(19) United States
(12) Patent Application Publication
(10) Pub. No.: US 2024/0011007 A1
(43) Pub. Date: Jan. 11, 2024

(54) GENOME EDITING COMPOSITIONS AND METHODS FOR TREATMENT OF CHRONIC GRANULOMATOUS DISEASE

(71) Applicant: Prime Medicine, Inc., Cambridge, MA (US)

(72) Inventors: Jennifer Gori, Jamaica Plain, MA (US); David Waterman, Framingham, MA (US); Jack Heath, Winchester, MA (US); Andrew V. Anzalone, Cambridge, MA (US)

(21) Appl. No.: 18/449,230

(22) Filed: Aug. 14, 2023

Related U.S. Application Data
(63) Continuation of application No. PCT/US22/74088, filed on Jul. 23, 2022.
(60) Provisional application No. 63/225,100, filed on Jul. 23, 2021.

(51) Int. Cl. C12N 9/22; A61P 37/02; C12N 15/10

(52) U.S. Cl. CPC C12N 9/22; A61P 37/02; C12N 15/102; C12N 2310/20

(57) ABSTRACT

Provided herein are compositions and methods of using prime editing systems comprising prime editors and prime editing guide RNAs for treatment of genetic disorders.

### CROSS-REFERENCE

[0001] This application is a continuation of International Application No. PCT/US2022/074088, filed on Jul. 23, 2022, which claims benefit to U.S. Provisional Application No. 63/225,100, filed Jul. 23, 2021, each of which is incorporated herein by reference in its entirety.

### SEQUENCE LISTING

[0002] The instant application contains a Sequence Listing which has been submitted electronically in XML file format and is hereby incorporated by reference in its entirety. Said XML copy, created on Jul. 21, 2022, is named 59761741601_SL.xml and is 31,838,208 bytes in size.

### BACKGROUND

[0003] Chronic granulomatous disease (CGD) is an inherited hematologic disorder that leads to a failure of innate immune defense against extracellular pathogens. CGD blood phagocytes (e.g., neutrophils) lack functional activity of the NADPH oxidase rendering patients susceptible to prolonged and recurrent bacterial and fungal infections and inflammatory complications. Despite progress in diagnostic tests that have led to development of more effective prophylactic treatments, the only curative option for patients remains hematopoietic stem cell transplantation (HSCT) from an HLA-matched allogeneic donor. However, HLA-matched donors are not available for all patients and allogeneic HSCT is often complicated by the risks of graft versus host disease and some CGD patients may be ineligible due to ongoing or severe infection.

[0004] CGD is caused by mutations in genes encoding the five subunits (gp91phox, p22phox, p40phox, p47phox and p67phox) that comprise the NADPH oxidase enzyme which mediates pathogen clearance via production of reactive oxygen species, activation of granule proteases and formation of neutrophil extracellular traps. p47phox deficiency is the most common among the autosomal recessive forms of CGD accounting for ˜25% of all CGD cases in Europe and North America. P47phox-deficient CGD is caused by mutations in the NCF1 gene which encodes the p47phox protein. A 2-nucleotide deletion (NCF1 c.73_74 GT deletion, also referred to herein as the ΔGT mutation or delGT mutation) at the start of the exon 2 is the predominant mutation identified in p47phox-deficient patients. NCF1 delGT results in premature termination, undetectable protein expression, and defective production of antimicrobial superoxide in neutrophils.

[0005] The human NCF1 gene is located on chromosome 7, adjacent to two pseudogenes, NCF1B and NCF1C. Compared to the wild type NCF1 gene, both NCF1B and NCF1C have a GT dinucleotide deletion in exon 2, which results in a frameshift and premature stop codon. Proximity to pseudogenes also limits the application of ‘classic’ CRISPR gene editing as this may induce multiple double strand breaks at the ΔGT target sites in NCF1, NCF1B, and NCF1C leading to chromosomal rearrangements that may have safety implications.

[0006] This disclosure provides prime editing methods and compositions for correcting mutations associated with CGD.

### SUMMARY OF THE DISCLOSURE

[0007] Provided herein, in some embodiments, are methods and compositions for prime editing of alterations in a target sequence in a target gene, for example, an NCF1 gene. The target NCF1 gene may comprise double stranded DNA. As exemplified in FIG. 1, in an embodiment, the target gene is edited by prime editing.

[0008] The NCF1 gene has a unique genetic context as it is flanked by two non-functional pseudogenes (NCF1B and NCF1C) that share high sequence homology with NCF1 and contain the exon 2 ΔGT mutation that is present in NCF1 in >80% p47phox CGD patients. Gene conversion resulting from proximity of NCF1, NCF1B, and NCF1C at chromosome 7q11.23 likely accounts for the predominant ΔGT mutation characteristic of p47phox-deficient CGD.

[0009] Without wishing to be bound by any particular theory, the prime editing process may search specific targets and edit endogenous sequences in a target gene, e.g., the NCF1 gene. As exemplified in FIG. 1, the spacer sequence of a PEgRNA recognizes and anneals with a search target sequence in a target strand of the target gene. A prime editing complex may generate a nick in the target gene on the edit strand which is the complementary strand of the target strand. The prime editing complex may then use a free 3′ end formed at the nick site of the edit strand to initiate DNA synthesis, where a primer binding site (PBS) of the PEgRNA complexes with the free 3′ end, and a single stranded DNA is synthesized using an editing template of the PEgRNA as a template. The editing template may comprise one or more nucleotide edits compared to the endogenous target NCF1 gene sequence. Accordingly, the newly-synthesized single stranded DNA also comprises the nucleotide edit(s) encoded by the editing template. Through removal of an editing target sequence on the edit strand of the target gene and DNA repair, the intended nucleotide edit(s) included in the newly synthesized single stranded DNA are incorporated into the target NCF1 gene.

[0010] In one aspect, provided herein is a prime editing guide RNA (PEgRNA) comprising: (a) a spacer that is complementary to a search target sequence on a first strand of a NCF1 gene, wherein the spacer comprises at its 3′ end SEQ ID NO: 19077; (b) a gRNA core capable of binding to a Cas9 protein; and (c) an extension arm comprising: (i) an editing template that comprises a region of complementarity to an editing target sequence on a second strand of the NCF1 gene, and (ii) a primer binding site (PBS) that comprises at its 5′ end a sequence that is a reverse complement of nucleotides 11-13 of SEQ ID NO: 19077; wherein the first strand and second strand are complementary to each other and wherein the editing target sequence comprises a c.73_74 ΔGT deletion compared to a wildtype NCF1 gene, and wherein the editing template comprises an AC, CC, GC, or UC dinucleotide insertion compared to the first strand of the N(CF gene.

[0011] In one aspect, provided herein a prime editing guide RNA (PEgRNA) comprising: (a) a spacer comprising at its 3′ end nucleotides SEQ ID NO: 19077; (b) a gRNA core capable of binding to a Cas9 protein, and (c) an extension arm comprising: (i) an editing template comprising at its 3′ end any one of SEQ ID NOs: 19100-19103, and (ii) a primer binding site (PBS) comprising at its 5′ end a sequence that is a reverse complement of nucleotides 11-13 of SEQ ID NO: 19077.

[0012] In some embodiments, the spacer is from 16 to 22 nucleotides in length. In some embodiments, the spacer comprises at its 3′ end any one of SEQ ID Nos: 19077-19083. In some embodiments, the spacer comprises at is 3′ end SEQ ID No: 19081. In some embodiments, the spacer is 20 nucleotides in length. In some embodiments, the PEgRNA of any one of aspects above, comprises from 5′ to 3′, the spacer, the gRNA core, the editing template, and the PBS. In some embodiments, the spacer, the gRNA core, and PBS form a contiguous sequence in a single molecule. In some embodiments, the editing template comprises at its 3′ end SEQ ID No: 19103. In some embodiments, the editing template comprises at its 3′ end any one of SEQ ID No:s 19100-19102. In some embodiments, the editing template is at least 13 nucleotides in length and comprises at its 3′ end the sequence corresponding to SEQ ID NO: 19112, 19113, 19114, or 19115. In some embodiments, the editing template comprises at its 3′ end SEQ ID NO: 19112. In some embodiments, the editing template is at least 15 nucleotides in length and comprises at its 3′ end the sequence corresponding to SEQ ID NO: 19120, 19121, 19122, or 19123.

[0013] In some embodiments, the editing template is at least 15 nucleotides in length and comprises at its 3′ end the sequence corresponding to SEQ ID NO: 19123. In some embodiments, the editing template is at least 16 nucleotides in length and comprises at its 3′ end the sequence corresponding to SEQ ID NO: 19124, 19125, 19126, or 19127. In some embodiments, the editing template is at least 16 nucleotides in length and comprises at its 3′ end the sequence corresponding to SEQ ID NO: 19125. In some embodiments, the editing template is at least 17 nucleotides in length and comprises at its 3′ end the sequence corresponding to SEQ ID NO: 19128, 19129, 19230, or 19131. In some embodiments, the editing template is at least 17 nucleotides in length and comprises at its 3′ end the sequence corresponding to SEQ ID NO: 19129. In some embodiments, the editing template has a length of 50 nucleotides or less, 40 nucleotides or less, 30 nucleotides or less, or 20 nucleotides or less. In some embodiments, the editing template is 13-17 nucleotide in length and comprises SEQ ID NO:19112, 19116, 19123, 19126, 19129, 19115, 19114, 19118, 19119, 19117, 19122, 19121, 19120, 19127, 19124, 19125, 19131, 19130, or 19128. In some embodiments, the editing template comprises SEQ ID NO: 19112, 19116, 19123, 19126, or 19129. In some embodiments, the editing template comprises SEQ ID NO: 19126 or 19129.

[0014] In some embodiments, the PBS is 3 to 19 nucleotides in length. In some embodiments, the PBS comprises at its 5′ a sequence that is a reverse complement of nucleotides 10-13, 9-13, 8-13, 7-13, 6-13, 5-13, 4-13, 343, 2-13, or 1-13 of SEQ ID NO. 19077. In some embodiments, the PBS is at least 12 nucleotides in length, at least 13 nucleotides in length, or at least 14 nucleotides in length.

[0015] In some embodiments, the PBS is at least 13 nucleotides in length. In some embodiments, the PBS is 12 to 14 nucleotides in length. In some embodiments, the PBS comprises SEQ ID NO: 19093. In some embodiments, the 3′ end of the editing template is adjacent to the 5′ end of the PBS. In some embodiments, the PEgRNA of any one of aspects above, comprises the sequence of SEQ ID NO: 19481, 19482, 19483, 19484, 19486, 19485, 19488, 19490, 19489, 19487, 19493, 19491, 19492, 19495, 19499, 19498, 19502, 19500, 19496, 19501, 19494, 19497, 19503, 19509, 19506, 19507, 19505, 19510, 19504, 19508, 19514, 19519, 19517, 19518, 19511, 19515, 19513, 19516, 19512, 19523, 19527, 19522, 19526, 19525, 19520, 19521, 19524, 19534, 19532, 19530, 19536, 19531, 19529, 19528, 19537, 19533, 19535, 19538, 19541, 19543, 19544, 19542, 19540, 19545, 19539, 19549, 19552, 19551, 19550, 19547, 19548, 19546, 19553, 19554, 19556, 19557, 19555, 19558, 19560, 19559, 19562, 19561, or 19563.

[0016] In some embodiments, the PEgRNA of any one of aspects above, comprises the sequence of SEQ ID NO: 19534, 19559, 19550, 19563, 19497, 19531, 19508, 19542, 19516, 19547, 19546, 19512, 19526, 19557, 19524, 19554, 19537, 19560, 19545, 19561, 19535, 19558, 19543, or 19562. In some embodiments, the PEgRNA comprises the sequence of SEQ ID NO: 19560 or 19537. In some embodiments, the PEgRNA comprises the sequence of SEQ ID NO: 19562 or 19543. In some embodiments, the PEgRNA of any one of aspects above, further comprises 3′ mN*mN*mN*N and 5′mN*mN*mN* modifications, where m indicates that the nucleotide contains a 2′-O-Me modification and a * indicates the presence of a phosphorothioate bond.

[0017] In one aspect, provided herein is a Prime Editing system comprising: (a) the prime editing guide RNA (PEgRNA) of any one of aspects above, or a polynucleotide encoding the PEgRNA; and (b) a nick guide RNA (ngRNA) comprising (i) a spacer that comprises at its 3′ end nucleotides 5-20 of any one of SEQ ID NOs: 840, 830, 809, 829, 431, 460, 838, 839, 2133, 848, 806, 461, 794, 803, 19478, 2131, 2130, 796, 842, 2139, 856, 849, 833, 828, 462, 467, 810, 464, 843, 832, 801, 2134, 804, 807, 802, 19479, 2138, 800, 857, 792, 2132, 808, 2137, 2135, 19480, 835, 841, 455, 19477, or 2136, and (ii) a gRNA core capable of binding to a Cas9 protein, or a polynucleotide encoding the ngRNA.

[0018] In some embodiments, the spacer of the ngRNA comprises at its 3′ end SEQ ID NO 766, 767, 768, 769, 770, 404, 2129, 409, 1820, 772, 774, 407, 406, 405, 777, 790, 408, 829, 431, 460, 838, 839, 2133, 848, 806, 461, 794, 803, 19478, 2131, 2130, 796, 842, 2139, 856, 849, 833, 462, 467, 464, 843, 2134, 19479, 2138, 2132, 2137, 2135, 19480, 841, 455, 19477, 2136, 473, 472, or 479, and the editing template of the PEgRNA comprises SEQ ID NO: 19103 at its 3′ end. In some embodiments, the spacer of the ngRNA comprises SEQ ID NO 766, 767, 768, 769, 770, 829, 839, 803, 849, or 833 at its 3′ end. In some embodiments, the spacer of ngRNA comprises at its 3′ end SEQ ID NO 832, 801, 807, 800, or 792, and the editing template of the PEgRNA comprises SEQ ID NO 19101 at its 3′ end.

[0019] In some embodiments, the spacer of ngRNA comprises at its 3′ end SEQ ID NO 809, 828, 802, 857, 808, and the editing template of the PEgRNA comprises SEQ ID NO 19102 at its 3′ end. In some embodiments, the spacer of ngRNA comprises at its 3′ end SEQ ID NO 840, 830, 810, 804, or 835, and the editing template of the PEgRNA comprises SEQ ID NO 19100 at its 3′ end. In some embodiments, the nick-to-nick distance between the nick generated by the ngRNA and the nick generated by the PEgRNA is 4-88 nucleotides.

[0020] In some embodiments, the nick-to-nick distance between the nick generated by the ngRNA and the nick generated by the PEgRNA is 4, 5, 6, 7, 61, 72, or 88 nucleotides. In some embodiments, the nick-to-nick distance between the nick generated by the ngRNA and the nick generated by the PEgRNA is 4-7 nucleotides. In some embodiments, the spacer of the ngRNA comprises at its 3′ end SEQ ID NO: 838, 2139, 2130, 2133, 19478, 849, 803, 839, 833, 843, 841, 848, 770, 767, 768, 769, 766, or 842. In some embodiments, the spacer of the ngRNA comprises at its 3′ end SEQ ID No 838, 2139, 2130, 2133, 19478, 849, 803, 839, 833, 843, 841, 848, or 842. In some embodiments, the spacer of the ngRNA comprises at its 3′ end 766, 767, 768, 769, 770, 849, 803, 839, 833, or 842. In some embodiments, the spacer of the ngRNA is 16-22 nucleotides in length, optionally wherein 17 nucleotides in length.

[0021] In some embodiments, the spacer of the ngRNA is 20 nucleotides in length. In some embodiments, the spacer of the ngRNA comprises at its 3′ end nucleotides 5-20 of SEQ ID NO 849, nucleotides 5-20 of SEQ ID NO 833, or nucleotides 2-17 of SEQ ID NO 770.

[0022] In some embodiments, the spacer of the ngRNA comprises at its 3′ end SEQ ID NO 849, 833, or 770.

[0023] In some embodiments, the ngRNA comprises the sequence of SEQ ID NO. 2140, 19564, 877, 878, 881, 879, 880, 19565, 2141, 892, 891, 884, 883, 882, 888, 887, 889, 885, 886, 2142, 19566, 890, 2143, 895, 893, 896, 894, 899, 906, 900, 904, 2144, 903, 905, 2145, 19567, 902, 897, 901, or 898. In some embodiments, the ngRNA comprises the sequence of SEQ ID No 896, 904, 890, 895, 903, 894, 906, 893, 901, 2145, 2144, 19567, 2141, 19565, 769, 803, 766, 768, 839, 767, 833, 770, 849, 2130, 2133, or 19478 In some embodiments, the ngRNA comprises the sequence of SEQ ID No 893, 894, 895, 896, 890, 901, 878, 880, 881, 879, 877, or 888. In some embodiments, the ngRNA comprises the sequence of SEQ ID No 893, 878, 901, 888, 906, or 883.

[0024] In one aspect, provided herein is a prime editing guide RNA (PEgRNA) comprising: (a) a spacer that is complementary to a search target sequence on a first strand of an NCF1 gene, wherein the spacer comprises at its 3′ end SEQ ID NO: 3995; (b) a gRNA core capable of binding to a Cas9 protein; and (c) an extension arm comprising: (i) an editing template that comprises a region of complementarity to an editing target sequence on a second strand of the NCF1 gene, and (ii) a primer binding site that comprises at its 5′ end a sequence that is a reverse complement of nucleotides 11-13 of SEQ ID NO: 3995; wherein the first strand and second strand are complementary to each other and wherein the editing target sequence on the second strand is complementary to a portion of the NCF1 gene comprising a c.73_74 ΔGT deletion compared to a wild type NCF1 gene, and wherein the editing template comprises a GU, GA, GG, or GC dinucleotide insertion compared to the first strand of the NCF1 gene.

[0025] In one aspect, provided herein is a prime editing guide RNA (PEgRNA) comprising: (a) a spacer comprising at its 3′ end nucleotides SEQ ID NO: 3995; (b) a gRNA core capable of binding to a Cas9 protein, and (c) an extension arm comprising: (i) an editing template comprising at its 3′ end SEQ ID NO: 4019, and (ii) a primer binding site (PBS) comprising at its 5′ end a sequence that is a reverse complement of nucleotides 11-13 of SEQ ID NO: 3995.

[0026] In some embodiments, the spacer is from 16 to 22 nucleotides in length. In some embodiments, the spacer comprises at its 3′ end any one of SEQ ID Nos: 3995-4001.

[0027] In some embodiments, the spacer comprises at its 3′ end SEQ ID NO: 3999. In some embodiments, the spacer is 20 nucleotides in length. In some embodiments, the PEgRNA of any one of aspects above, comprises from 5′ to 3′, the spacer, the gRNA core, the editing template, and the PBS. In some embodiments, the gRNA core, and PBS form a contiguous sequence in a single molecule. In some embodiments, the editing template comprises at its 3′ end SEQ ID NO 4019, 4020, 4021, 4037, 4054, 4072, 4098, 4102, 4119, 4136, 4149, 4171, 4193, 4209, 4213, 4230, 4245, 4263, 4277, 4305, 4313, 4330, 4348, 4358, 4375, 4402, 4409, 4427, 4439, 4460, 4472, 4490, 4504, 4517, 4533, 4557, 4568, 4584, 4601, 4618, 4630, 4650, 4671, 4681, 4702, 4715, 4732, 4744, 4764, 4785, 4791, 4809, 4826, 4844, 4859, 4870, 4893, 4910, 4920, 4945, 4949, 4971, 4984, 5007, 5020, 5030, 5047, 5061, 5087, 5099, 5110, 5131, 5152, 5157, 5175, 5203, 5217, 5234, 5243, 5258, 5275, 5286, 5309, 5319, 5339, 5349, 5369, 5385, 5399, 5414, 5433, 5458, 5464, or 5478.

[0028] In some embodiments, the editing template further encodes a PAM silencing edit. In some embodiments, the editing template encodes a GGG-to-GGC, GGG-to-GAA, GGG-to-GAT, GGG-to-GGT, GGT-to-GTA, GGG-to-GCC, GGG-to-GTG, GGG-to-GTC, GGG-to-GGA, GGG-to-GAC, GGG-to-GCA, GGG-to-GAG, GGG-to-GCT, GGG-to-GTT, or GGG-to-GCG PAM silencing edit on the edit strand, wherein the edit corresponds to positions 74777262-74777264 of human chromosome 7. In some embodiments, the editing template is at least 11 nucleotides in length and comprises at its 3′ end SEQ ID NO 4020. In some embodiments, the editing template is at least 12 nucleotides in length and comprises at its 3′end SEQ ID NO 4023, 4021, 4034, 4031, 4029, 4025, 4028, 4033, 4026, 4030, 4036, 4035, 4032, 4027, 4024, or 4022. In some embodiments, the editing template is at least 14 nucleotides in length and comprises at its 3′ end SEQ ID NO. 4061, 4056, 4057, 4062, 4067, 4060, 4055, 4058, 4053, 4066, 4068, 4065, 4054, 4063, 4064, or 4059.

[0029] In some embodiments, the editing template is at least 16 nucleotides in length and comprises at its 3′ end SEQ ID NO. 4099, 4095, 4093, 4085, 4089, 4100, 4091, 4096, 4097, 4094, 4086, 4088, 4090, 4087, 4092, or 4098. In some embodiments, the editing template is 11-16 nucleotides in length. In some embodiments, the editing template comprises SEQ ID NO. 4020, 4021, 4037, 4054, 4072, or 4098. In some embodiments, the editing template is 12 nucleotides in length and comprises SEQ ID NO 4021. In some embodiments, the PBS is 3 to 19 nucleotides in length. In some embodiments, the PBS comprises at its 5′ a sequence that is a reverse complement of nucleotides 10-13, 9-13, 8-13, 7-13, 6-13, 5-13, 4-13, 3-13, 2-13, or 1-13 of SEQ ID NO. 3995. In some embodiments, the PBS is at least 8 nucleotides in length.

[0030] In some embodiments, the PBS is at least 11, 12, 13, or 14 nucleotides in length. In some embodiments, the PBS is 11 to 14 nucleotides in length and comprises SEQ ID NO 4010, 4011, 4012, or 4013.

[0031] In some embodiments, the PEgRNA of any one of aspects above, comprises the sequence of SEQ ID NO 5637, 5637, 5682, 5689, 5683, 5690, 5692, 5563, 5606, 5647, 5605, 5644, 5672, 5613, 5537, 5618, 5542, 5661, 5571, 5614, 5543, 5665, 5570, 5638, 5561, 5688, or 5634. In some embodiments, the PEgRNA of any one of aspects above, comprises the sequence of SEQ ID NO 5637, 5563, 5683, 5605, 5659, 5569, 5618, or 5542. In some embodiments, the PEgRNA of any one of aspects above, further comprises 3′ mN*mN*mN*N and 5′mN*mN*mN* modifications, where m indicates that the nucleotide contains a 2′-O-Me modification and a * indicates the presence of a phosphorothioate bond.

[0032] In one aspect, provided herein is a Prime Editing system comprising: (a) the prime editing guide RNA (PEgRNA) of any one of aspects above, or a polynucleotide encoding the PEgRNA; and (b) a nick guide RNA (ngRNA) comprising (i) a spacer at its 3′ end nucleotides 5-20 of any one of SEQ ID NOs: 840, 830, 809, 829, 431, 460, 838, 839, 2133, 848, 806, 461, 794, 803, 19478, 2131, 2130, 796, 842, 2139, 856, 849, 833, 828, 462, 467, 810, 464, 843, 832, 801, 2134, 804, 807, 802, 19479, 2138, 800, 857, 792, 2132, 808, 2137, 2135, 19480, 835, 841, 455, 19477, or 2136, and (ii) a gRNA core capable of binding to a Cas9 protein, or a polynucleotide encoding the ngRNA.

[0033] In some embodiments, the spacer of the ngRNA comprises at its 3′ end SEQ ID NO 461, 462, 467, 431, 464, 466, 454, 457, 459, 433, 417, 449, 425, 439, 460, 426, 458, 450, 429, 423, 434, 436, 420, 418, 455, 432, 443, 424, 421, 451, 445, 435, 430, 446, 427, 422, 463, 452, 453, 444, 419, 442, 441, 447, 440, 438, or 428. In some embodiments, the spacer of the ngRNA comprises at its 3′ end: SEQ ID NO 5495 wherein the editing template of the PEgRNA comprises at its 3′ end SEQ ID NO 4022, SEQ ID NO 5501 wherein the editing template of the PEgRNA comprises at its 3′ end SEQ ID NO 4025, SEQ ID NO 5510 wherein the editing template of the PEgRNA comprises at its 3′ end SEQ ID NO 4029, SEQ ID NO 5502 wherein the editing template of the PEgRNA comprises at its 3′ end SEQ ID NO 4028, SEQ ID NO 5509 wherein the editing template of the PEgRNA comprises at its 3′ end SEQ ID NO 4026, SEQ ID NO 5496 wherein the editing template of the PEgRNA comprises at its 3′ end SEQ ID NO 4035, SEQ ID NO 5497 wherein the editing template of the PEgRNA comprises at its 3′ end SEQ ID NO 4031, SEQ ID NO 5506 wherein the editing template of the PEgRNA comprises at its 3′ end SEQ ID NO 4024, SEQ ID NO 5504 wherein the editing template of the PEgRNA comprises at its 3′ end SEQ ID NO 4030, SEQ ID NO 5498 wherein the editing template of the PEgRNA comprises at its 3′ end SEQ ID NO 4032, SEQ ID NO 5499 wherein the editing template of the PEgRNA comprises at its 3′ end SEQ ID NO 4027, SEQ ID NO 5508 wherein the editing template of the PEgRNA comprises at its 3′ end SEQ ID NO 4023, SEQ ID NO 5505 wherein the editing template of the PEgRNA comprises at its 3′ end SEQ ID NO 4033, SEQ ID NO 5503 wherein the editing template of the PEgRNA comprises at its 3′ end SEQ ID NO 4034, or SEQ ID 5500 wherein the editing template of the PEgRNA comprises at its 3′ end SEQ ID NO 4036.

[0034] In some embodiments, the nick-to-nick distance between the nick generated by the ngRNA and the nick generated by the PEgRNA is 41 to 96 nucleotides. In some embodiments, the nick-to-nick distance between the nick generated by the ngRNA and the nick generated by the PEgRNA is 41, 44, 82, or 96 nucleotides. In some embodiments, the spacer of the ngRNA comprises at its 3′ end nucleotides 5-20 of SEQ ID NO 436, 2130, 442, 421, 445, 451, 424, 422, 429, 436, or 424. In some embodiments, the spacer of the ngRNA is 16-22 nucleotides in length. In some embodiments, the spacer of the ngRNA is 20 nucleotides in length. In some embodiments, the spacer of the ngRNA comprises SEQ ID NO 436, 2130, 442, 421, 445, 451, 424, 422, 429, 436, or 424. In some embodiments, the ngRNA comprises the sequence of 584, 606, 585, 2143, 595, 594, 583, 592, 591, 590, 599, 2145, 604, 597, 602, 596, 598, or 600.

[0035] In some embodiments, the ngRNA further comprises 3′ mN*mN*mN*N and 5′mN*mN*mN* modifications, where m indicates that the nucleotide contains a 2-O-Me modification and a * indicates the presence of a phosphorothioate bond. In some embodiments, the Prime Editing system of any one of aspects above, further comprises: c. a Prime Editor comprising a Cas9 nickase having a nuclease inactivating mutation in the HNH domain, or a polynucleotide encoding the Cas9 nickase, and a reverse transcriptase, or a polynucleotide encoding the reverse transcriptase. In some embodiments, the Cas9 nickase comprises an amino acid sequence having at least 80%, 85%, 90%, 95%, 96%, 97%, 98%, 99%, or 100% identity to SEQ ID NO: 34365. In some embodiments, the reverse transcriptase comprises an amino acid sequence having at least 80%, 85%, 90%, 95%, 96%, 97%, 98%, 99%, or 100% identity to SEQ ID NO: 34363. In some embodiments, the sequence identities are determined by Needleman-Wunsch alignment of two protein sequences with Gap Costs set to Existence: 11 Extension: 1 where percent identity is calculated by dividing the number of identities by the length of the alignment.

[0036] In some embodiments, the prime editor is a fusion protein. In some embodiments, the polynucleotide encoding the Cas9 nickase and/or the polynucleotide encoding the reverse transcriptase are mRNA. In some embodiments, the polynucleotide encoding the Cas9 nickase and/or the polynucleotide encoding the reverse transcriptase are the same molecule.

[0037] In one aspect, the present disclosure provides a method for editing a NCF1 gene, a NCF1B pseudogene, or a NCF1C pseudogene, the method comprising contacting the NCF1 gene, the NCF1B pseudogene, or the NCF1C pseudogene with (a) the PEgRNA of any one of aspects above, or (b) the Prime Editing system of any one of aspects above. In some embodiments, the NCF1 gene, the NCF1B pseudogene, or the NCF1C pseudogene is in a cell. In some embodiments, the cell is a mammalian cell. In some embodiments, the cell is a human cell. In some embodiments, the cell is a hematopoietic stem cell or a hematopoietic pluripotent stem cell.

[0038] In one aspect, provided herein is a cell generated by the method of any one of aspects above.

[0039] In one aspect, provided herein is a population of cells generated by the method of any one of aspects above.

[0040] In one aspect, the present disclosure provides a method of treating chronic granulomatous disease in a subject in need thereof, the method comprising administering to the subject the cell of any one of aspects above or the population of cells of any one of aspects above.

[0041] In some embodiments, the cell or the population of cells is obtained from the subject prior to the contacting. In some embodiments, the cell is an allogeneic cell. In one aspect, provides herein is a pharmaceutical composition comprising the cell of any one of aspects above or the population of any one of aspects above.

[0042] In one aspect, the present disclosure provides a prime editing guide RNA (PEgRNA) comprising: (a) a spacer comprising at its 3′ end nucleotides a PEgRNA Spacer sequence selected from any one of Tables 1-76; (b) a gRNA core capable of binding to a Cas9 protein, and (c) an extension arm comprising: i. an editing template comprising at its 3′ end an RTT sequence selected from the same Table as the PEgRNA Spacer sequence, and ii. a primer binding site (PBS) comprising at its 5′ end a PBS sequence selected from the same Table as the PEgRNA Spacer sequence.

[0043] In some embodiments, the spacer is 16 to 22 nucleotides in length. In some embodiments, the spacer is 20 nucleotides in length. In some embodiments, the PEgRNA of any one of aspects above, comprises from 5′ to 3′, the spacer, the gRNA core, the editing template, and the PBS. In some embodiments, the spacer, the gRNA core, the editing template, and the PBS form a contiguous sequence in a single molecule. In some embodiments, the PEgRNA of any one of aspects above, comprises a pegRNA sequence selected from the same Table as the PEgRNA Spacer sequence.

[0044] In one aspect, the present disclosure provides a Prime Editing system comprising (a) the prime editing guide RNA (PEgRNA) of any one of aspects above, or a polynucleotide encoding the PEgRNA; and (b) a nick guide RNA (ngRNA) comprising i. a spacer at its 3′ end nucleotides 5-20 of any ngRNA Spacer sequence selected from the same Table as the PEgRNA Spacer, wherein the ngRNA Spacer sequence in the Table is 20 nucleotides in length, and ii. a gRNA core capable of binding to a Cas9 protein, or a polynucleotide encoding the ngRNA.

[0045] In some embodiments, the spacer of the ngRNA is from 16 to 22 nucleotides in length. In some embodiments, the spacer of the ngRNA comprises at its 3′ end nucleotides 4-20, 3-20, 2-20, or 1-20 of the ngRNA Spacer sequence selected from the same Table as the PEgRNA Spacer sequence, wherein the ngRNA Spacer sequence in the Table is 20 nucleotides in length. In some embodiments, the spacer of the ngRNA is 20 nucleotides in length. In some embodiments, the ngRNA comprises a ngRNA sequence selected from the same Table as the PEgRNA Spacer sequence.

[0046] In some embodiments, the Prime Editing system of any one of aspects above, further comprises: c. a Prime Editor comprising a Cas9 nickase having a nuclease inactivating mutation in the HNH domain, or a polynucleotide encoding the Cas9 nickase, and a reverse transcriptase, or a polynucleotide encoding the reverse transcriptase. In some embodiments, the Cas9 nickase comprises an amino acid sequence having at least 80%, 85%, 90%, 95%, 96%, 97%, 98%, 99%, or 100% identity to SEQ ID NO: 34365. In some embodiments, the reverse transcriptase comprises an amino acid sequence having at least 80%, 85%, 90%, 95%, 96%, 97%, 98%, 99%, or 100% identity to SEQ ID NO: 34363. In some embodiments, the sequence identities are determined by Needleman-Wunsch alignment of two protein sequences with Gap Costs set to Existence: 11 Extension: 1 where percent identity is calculated by dividing the number of identities by the length of the alignment.

[0047] In some embodiments, the prime editor is a fusion protein. In some embodiments, the polynucleotide encoding the Cas9 nickase and/or the polynucleotide encoding the reverse transcriptase are mRNA. In some embodiments, the polynucleotide encoding the Cas9 nickase and/or the polynucleotide encoding the reverse transcriptase are the same molecule.

[0048] In one aspect, provides herein is a method for editing a NCF1 gene, a NCF1B pseudogene, or a NCF1C pseudogene, the method comprising contacting the NCF1 gene, the NCF1B pseudogene, or the NCF1C pseudogene with (a) the PEgRNA of any one of aspects above or (b) the Prime Editing system of any one of aspects above.

[0049] In some embodiments, the CF B pseudogene, or the NCF1C pseudogene is in a cell. In some embodiments, the cell is a mammalian cell. In some embodiments, the cell is a human cell. In some embodiments, the cell is a hematopoietic stem cell or a hematopoietic pluripotent stem cell.

[0050] In one aspect, provided herein a cell generated by the method of any one of aspects above.

[0051] In one aspect, provided herein is a population of cells generated by the method of any one of aspects above.

[0052] In one aspect, the present disclosure provides a method of treating chronic granulomatous disease in a subject in need thereof, the method comprising administering to the subject the cell of any one of aspects above or the population of cells of any one of aspects above.

[0053] In some embodiments, the cell or the population of cells is obtained from the subject prior to the contacting. In some embodiments, the cell is an allogeneic cell.

[0054] In one aspect, provided herein is a pharmaceutical composition comprising the cell of any one of aspects above, or the population of cells of any one of aspects above.

[0055] In one aspect, provided herein is a pharmaceutical composition comprising the PEgRNA of any one of aspects above, or the Prime Editing system of any one of aspects above.

### INCORPORATION BY REFERENCE

[0056] All publications, patents, and patent applications mentioned in this specification are herein incorporated by reference to the same extent as if each individual publication, patent, or patent application was specifically and individually indicated to be incorporated by reference.

### BRIEF DESCRIPTION OF THE DRAWINGS

[0057] The novel features of the disclosure are set forth with particularity in the appended claims. A better understanding of the features and advantages of the present disclosure will be obtained by reference to the following detailed description that sets forth illustrative embodiments, in which the principles of the disclosure are utilized, and the accompanying drawings of which:

[0058] FIG. 1 depicts a schematic of a prime editing guide RNA (PEgRNA) binding to a double stranded target DNA sequence.

[0059] FIG. 2 depicts a PEgRNA architectural overview in an exemplary schematic of PEgRNA designed for a prime editor.

[0060] FIG. 3 is a schematic showing the spacer and gRNA core part of an exemplary guide RNA, in two separate molecules. The rest of the PEgRNA structure is not shown.

[0061] FIG. 4A is a schematic showing positions of NCF1B, NCF1, NCF1C, and the regions in between each two genes.

[0062] FIG. 4B is a schematic showing the probes targeting regions of chromosome 7 between NCF1B and NCF1, between NCF1 and NCF1C, and a reference probe.

### DETAILED DESCRIPTION OF THE DISCLOSURE

[0063] Provided herein, in some embodiments, are compositions and methods to edit the target gene NCF1 with prime editing. In some embodiments, provided herein are compositions and methods for editing NCF1B pseudogene or NCF1C pseudogene with prime editing. In certain embodiments, provided herein are compositions and methods for correction of mutations in genes encoding the NCF1 gene associated with chronic granulomatous disease (CGD). Compositions provided herein can comprise prime editors (PEs) that may use engineered guide polynucleotides, e.g., prime editing guide RNAs (PEgRNAs), that can direct PEs to specific DNA targets and can encode DNA edits on the target gene, e.g., NCF1, NCF1B, or NCF1C, that serve a variety of functions, including direct correction of disease-causing mutations.

[0064] The following description and examples illustrate embodiments of the present disclosure in detail. It is to be understood that this disclosure is not limited to the particular embodiments described herein and as such can vary. Those of skill in the art will recognize that there are numerous variations and modifications of this disclosure, which are encompassed within its scope. Although various features of the present disclosure can be described in the context of a single embodiment, the features can also be provided separately or in any suitable combination. Conversely, although the present disclosure can be described herein in the context of separate embodiments for clarity, the present disclosure can also be implemented in a single embodiment.

### Definitions

[0065] Unless defined otherwise, all technical and scientific terms used herein have the same meaning as is commonly understood by one of ordinary skill in the art.

[0066] The terminology used herein is for the purpose of describing particular embodiments only and is not intended to be limiting. As used herein, the singular forms “a”, “an” and “the” are intended to include the plural forms as well, unless the context clearly indicates otherwise. Furthermore, to the extent that the terms “including”, “includes”, “having”, “has”, “with”, or variants thereof as used herein mean “comprising”.

[0067] Unless otherwise specified, the words “comprising”, “comprise”, “comprises”, “having”, “have”, “has”, “including”, “includes”, “include”, “containing”, “contains” and “contain” are inclusive or open-ended and do not exclude additional, unrecited elements or method steps.

[0068] Reference to “some embodiments”, “an embodiment”, “one embodiment”, or “other embodiments” means that a particular feature or characteristic described in connection with the embodiments is included in at least one or more embodiments, but not necessarily all embodiments, of the present disclosure.

[0069] The term “about” or “approximately” in relation to a numerical means, a range of values that fall within 10% greater than or less than the value. For example, about x means x±(10%*x).

[0070] In some embodiments, the cell is a human cell. A cell may be of or derived from different tissues, organs, and/or cell types. In some embodiments, the cell is a primary cell. As used herein, the term “primary cell” means a cell isolated from an organism, e.g., a mammal, which is grown in tissue culture (i.e., in vitro) for the first time before subdivision and transfer to a subculture. In some non-limiting examples, mammalian cells, including primary cells and stem cells, can be modified through introduction of one or more polynucleotides, polypeptide, and/or prime editing compositions (e.g., through transfection, transduction, electroporation, and the like) and further passaged. Such modified cells include hepatocytes, fibroblasts, keratinocytes, epithelial cells (e.g., mammary epithelial cells, intestinal epithelial cells), endothelial cells, glial cells, neural cells, formed elements of the blood (e.g., lymphocytes, bone marrow cells), muscle cells and precursors of these somatic cell types. In some embodiments, the cell is a stem cell. In some embodiments, the cell is a progenitor cell. In some embodiments, the cell is a human stem cell. In some embodiments, the cell is a human progenitor cell. In some embodiments, the cell is a pluripotent cell (e.g., a pluripotent stem cell). In some embodiments, the cell (e.g., a stem cell) is an embryonic stem cell, tissue-specific stem cell, mesenchymal stem cell, or an induced pluripotent stem cell. In some embodiments, the cell is an induced pluripotent stem cell (iPSC). In some embodiments, the cell is an embryonic stem cell (ESC). In some embodiments, the cell is a hematopoietic stem cell (HSC) or a hematopoietic stem and progenitor cell (HSPC). In some embodiments, the HSC is from bone marrow or mobilized peripheral blood. In some embodiments the human stem cell is an induced pluripotent stem cell (iPSC). In some embodiments, the cell is a human HSC. In some embodiments, the cell is a human CD34+ cell. In some embodiments, the cell is a hematopoietic stem and progenitor cell (HSPC). In some embodiments, the cell is a human hematopoietic stem and progenitor cell (HSPC). In some embodiments, the cell is a hematopoietic progenitor cell, multipotent progenitor cell, lymphoid progenitor cell, a myeloid progenitor cell, a megakaryocyte-erythroid progenitor cell, a granulocyte-megakaryocyte progenitor cell, a granulocyte, a promyelocyte, a neutrophil, an eosinophil, a basophil, an erythrocyte, a reticulocyte, a thrombocyte, a megakaryoblast, a platelet-producing megakaryocyte, a monocyte, a macrophage, a dendritic cell, a microglia, an osteoclast, a lymphocyte, a NK cell, a B-cell, or a T-cell. In some embodiments, the cell edited by prime editing can be differentiated into, or give rise to recovery of a population of cells, e.g., common lymphoid progenitor cells, common myeloid progenitor cells, megakaryocyte-erythroid progenitor cells, granulocyte-megakaryocyte progenitor cells, granulocytes, promyelocytes, neutrophils, eosinophils, basophils, erythrocytes, reticulocytes, thrombocytes, megakaryoblasts, platelet-producing megakaryocytes, platelets, monocytes, macrophages, dendritic cells, microglia, osteoclasts, lymphocytes, such as NK cells, B-cells or T-cells. In some embodiments, the cell edited by prime editing can be differentiated into, or give rise to recovery of a population of cells, e.g., neutrophils, platelets, red blood cells, monocytes, macrophages, antigen-presenting cells, microglia, osteoclasts, dendritic cells, and/or lymphocytes. In some embodiments, the cell is in a subject, e.g., a human subject. In some embodiments, the cell is obtained from a subject prior to editing. For example, in some embodiments, the cell is obtained from a CGD patient having a mutation in the NCF1 gene. NCF1 c.73_74 GT deletion, may also be referred to herein as the dGT mutation. A patient having a NCF1 c.73_74 GT deletion may be referred as a dGT patient. A patient not having a NCF1 c.73_74 GT deletion may be referred as a non-dGT patient.

[0071] In some embodiments, the cell comprises a prime editor, a PEgRNA, or a prime editing composition disclosed herein. In some embodiments, the cell further comprises an ngRNA. In some embodiments, the cell is from a human subject. In some embodiments, the human subject has a disease or condition, or is at a risk of developing a disease or a condition associated with a mutation to be corrected by prime editing, for example, chronic granulomatous disease (CGD). In some embodiments, the cell is from a human subject, and comprises a prime editor, a PEgRNA, or a prime editing composition for correction of the mutation. In some embodiments, the cell is from the human subject and the mutation has been edited or corrected by prime editing.

[0072] The term “substantially” as used herein may refer to a value approaching 100% of a given value. In some embodiments, the term may refer to an amount that may be at least about 70%, 80%, 90%, 91%, 92%, 93%, 94%, 95%, 96%, 97%, 98%, 99%, 99.9%, or 99.99% of a total amount. In some embodiments, the term may refer to an amount that may be about 100% of a total amount.

[0073] The terms “protein” and “polypeptide” can be used interchangeably to refer to a polymer of two or more amino acids joined by covalent bonds (e.g., an amide bond) that can adopt a three-dimensional conformation. In some embodiments, a protein or polypeptide comprises at least 10 amino acids, 15 amino acids, 20 amino acids, 30 amino acids or 50 amino acids joined by covalent bonds (e.g., amide bonds). In some embodiments, a protein comprises at least two amide bonds. In some embodiments, a protein comprises multiple amide bonds. In some embodiments, a protein comprises an enzyme, enzyme precursor proteins, regulatory protein, structural protein, receptor, nucleic acid binding protein, a biomarker, a member of a specific binding pair (e.g., a ligand or aptamer), or an antibody. In some embodiments, a protein may be a full-length protein (e.g., a fully processed protein having certain biological function). In some embodiments, a protein may be a variant or a fragment of a full-length protein. For example, in some embodiments, a Cas9 protein domain comprises an H840A amino acid substitution compared to a naturally occurring S. pyogenes Cas9 protein. A variant of a protein or enzyme, for example a variant reverse transcriptase, comprises a polypeptide having an amino acid sequence that is about 60% identical, about 70% identical, about 80% identical, about 90% identical, about 95% identical, about 96% identical, about 97% identical, about 98% identical, about 99% identical, about 99.5% identical, or about 99.9% identical to the amino acid sequence of a reference protein.

[0074] In some embodiments, a protein comprises one or more protein domains or subdomains. As used herein, the term “polypeptide domain”, “protein domain”, or “domain” when used in the context of a protein or polypeptide, refers to a polypeptide chain that has one or more biological functions, e.g., a catalytic function, a protein-protein binding function, or a protein-DNA function. In some embodiments, a protein comprises multiple protein domains. In some embodiments, a protein comprises multiple protein domains that are naturally occurring. In some embodiments, a protein comprises multiple protein domains from different naturally occurring proteins. For example, in some embodiments, a prime editor may be a fusion protein comprising a Cas9 protein domain of S. pyogenes and a reverse transcriptase protein domain of a retrovirus (e.g., a Moloney murine leukemia virus) or a variant of the retrovirus. A protein that comprises amino acid sequences from different origins or naturally occurring proteins may be referred to as a fusion, or chimeric protein.

[0075] In some embodiments, a protein comprises a functional variant or functional fragment of a full-length wild type protein. A “functional fragment” or “functional portion”, as used herein, refers to any portion of a reference protein (e.g., a wild type protein) that encompasses less than the entire amino acid sequence of the reference protein while retaining one or more of the functions, e.g., catalytic or binding functions. For example, a functional fragment of a reverse transcriptase may encompass less than the entire amino acid sequence of a wild type reverse transcriptase but retains the ability under at least one set of conditions to catalyze the polymerization of a polynucleotide. When the reference protein is a fusion of multiple functional domains, a functional fragment thereof may retain one or more of the functions of at least one of the functional domains. For example, a functional fragment of a Cas9 may encompass less than the entire amino acid sequence of a wild type Cas9 but retains its DNA binding ability and lacks its nuclease activity partially or completely.

[0076] A “functional variant” or “functional mutant”, as used herein, refers to any variant or mutant of a reference protein (e.g., a wild type protein) that encompasses one or more alterations to the amino acid sequence of the reference protein while retaining one or more of the functions, e.g., catalytic or binding functions. In some embodiments, the one or more alterations to the amino acid sequence comprises amino acid substitutions, insertions or deletions, or any combination thereof. In some embodiments, the one or more alterations to the amino acid sequence comprises amino acid substitutions. For example, a functional variant of a reverse transcriptase may comprise one or more amino acid substitutions compared to the amino acid sequence of a wild type reverse transcriptase but retains the ability under at least one set of conditions to catalyze the polymerization of a polynucleotide. When the reference protein is a fusion of multiple functional domains, a functional variant thereof may retain one or more of the functions of at least one of the functional domains. For example, in some embodiments, a functional fragment of a Cas9 may comprise one or more amino acid substitutions in a nuclease domain, e.g., an H840A amino acid substitution, compared to the amino acid sequence of a wild type Cas9, but retains the DNA binding ability and lacks the nuclease activity partially or completely.

[0077] The term “function” and its grammatical equivalents as used herein may refer to a capability of operating, having, or serving an intended purpose. Functional may comprise any percent from baseline to 100% of an intended purpose. For example, functional may comprise or comprise about 5%, 10%, 15%, 20%, 25%, 30%, 35%, 40%, 45%, 50%, 55%, 60%, 65%, 70%, 75%, 80%, 85%, 90%, 95%, or up to about 100% of an intended purpose. In some embodiments, the term functional may mean over or over about 100% of normal function, for example, 125%, 150%, 175%, 200%, 250%, 300%, 400%, 500%, 600%, 700% or up to about 1000% of an intended purpose.

[0078] In some embodiments, a protein or polypeptides includes naturally occurring amino acids (e.g., one of the twenty amino acids commonly found in peptides synthesized in nature, and known by the one letter abbreviations A, R, N, C, D, Q, E, G, H, I, L, K, M, F, P, S, T, W, Y and V). In some embodiments, a protein or polypeptides includes non-naturally occurring amino acids (e.g., amino acids which is not one of the twenty amino acids commonly found in peptides synthesized in nature, including synthetic amino acids, amino acid analogs, and amino acid mimetics). In some embodiments, a protein or polypeptide is modified.

[0079] In some embodiments, a protein comprises an isolated polypeptide. The term “isolated” means free or removed to varying degrees from components which normally accompany it as found in the natural state or environment. For example, a polypeptide naturally present in a living animal is not isolated, and the same polypeptide partially or completely separated from the coexisting materials of its natural state is isolated.

[0080] In some embodiments, a protein is present within a cell, a tissue, an organ, or a virus particle. In some embodiments, a protein is present within a cell or a part of a cell (e.g., a bacteria cell, a plant cell, or an animal cell). In some embodiments, the cell is in a tissue, in a subject, or in a cell culture. In some embodiments, the cell is a microorganism (e.g., a bacterium, fungus, protozoan, or virus). In some embodiments, a protein is present in a mixture of analytes (e.g., a lysate). In some embodiments, the protein is present in a lysate from a plurality of cells or from a lysate of a single cell.

[0081] The terms “homologous,” “homology,” or “percent homology” as used herein refer to the degree of sequence identity between an amino acid and a corresponding reference amino acid sequence or a polynucleotide sequence and a corresponding reference polynucleotide sequence. “Homology” can refer to polymeric sequences, e.g., polypeptide or DNA sequences that are similar. Homology can mean, for example, nucleic acid sequences with at least about: 50%, 55%, 60%, 65%, 70%, 75%, 80%, 81%, 82%, 83%, 84%, 85%, 86%, 87%, 88%, 89%, 90%, 91%, 92%, 93%, 94%, 95%, 96%, 97%, 98%, 99%, or 100% identity. In other embodiments, a “homologous sequence” of nucleic acid sequences may exhibit 93%, 95% or 98% sequence identity to the reference nucleic acid sequence. For example, a “region of homology to a genomic region” can be a region of DNA that has a similar sequence to a given genomic region in the genome. A region of homology can be of any length that is sufficient to promote binding of a spacer, a primer binding site, or protospacer sequence to the genomic region. For example, the region of homology can comprise at least 5, 10, 11, 12, 13, 14, 15, 16, 17, 18, 19, 20, 21, 22, 23, 24, 25, 30, 35, 40, 45, 50, 55, 60, 65, 70, 75, 80, 85, 90, 95, 100, 200, 300, 400, 500, 600, 700, 800, 900, 1000, 1100, 1200, 1300, 1400, 1500, 1600, 1700, 1800, 1900, 2000, 2100, 2200, 2300, 2400, 2500, 2600, 2700, 2800, 2900, 3000, 3100 or more bases in length such that the region of homology has sufficient homology to undergo binding with the corresponding genomic region.

[0082] When a percentage of sequence homology or identity is specified, in the context of two nucleic acid sequences or two polypeptide sequences, the percentage of homology or identity generally refers to the alignment of two or more sequences across a portion of their length when compared and aligned for maximum correspondence. When a position in the compared sequence can be occupied by the same base or amino acid, then the molecules can be homologous at that position. Unless stated otherwise, sequence homology or identity is assessed over the specified length of the nucleic acid, polypeptide or portion thereof. In some embodiments, the homology or identity is assessed over a functional portion or specified portion of the length.

[0083] Alignment of sequences for assessment of sequence homology can be conducted by algorithms known in the art, such as the Basic Local Alignment Search Tool (BLAST) algorithm, which is described in Altschul et al, J. Mol. Biol. 215:403-410, 1990. A publicly available, internet interface, for performing BLAST analyses is accessible through the National Center for Biotechnology Information. Additional known algorithms include those published in: Smith & Waterman, “Comparison of Biosequences”, Adv. Appl. Math. 2:482, 1981; Needleman & Wunsch, “A general method applicable to the search for similarities in the amino acid sequence of two proteins” J. Mol. Biol. 48:443, 1970; Pearson & Lipman “Improved tools for biological sequence comparison”, Proc. Natl. Acad. Sci. USA 85:2444, 1988; or by automated implementation of these or similar algorithms. Global alignment programs may also be used to align similar sequences of roughly equal size. Examples of global alignment programs include NEEDLE (available at www.ebi.ac.uk/Tools/psa/emboss_needle/) which is part of the EMBOSS package (Rice P et al., Trends Genet., 2000; 16: 276-277), and the GGSEARCH program https://fasta.bioch.virginia.edu/fasta_www2/, which is part of the FASTA package (Pearson W and Lipman D, 1988, Proc. Natl. Acad. Sci. USA, 85: 2444-2448). Both of these programs are based on the Needleman-Wunsch algorithm which is used to find the optimum alignment (including gaps) of two sequences along their entire length. A detailed discussion of sequence analysis can also be found in Unit 19.3 of Ausubel et al (“Current Protocols in Molecular Biology” John Wiley & Sons Inc, 1994-1998, Chapter 15, 1998). In some embodiments, alignment between a query sequence and a reference sequence is performed with Needleman-Wunsch alignment with Gap Costs set to Existence: 11 Extension: 1 where percent identity is calculated by dividing the number of identities by the length of the alignment, as further described in Altschul et al. (“Gapped BLAST and PSI-BLAST: a new generation of protein database search programs”, Nucleic Acids Res. 25:3389-3402, 1997) and Altschul et al, (“Protein database searches using compositionally adjusted substitution matrices”, FEBS J. 272:5101-5109, 2005).

[0084] A skilled person understands that amino acid (or nucleotide) positions may be determined in homologous sequences based on alignment, for example, “H840” in a reference Cas9 sequence may correspond to H839, or another position in a Cas9 homolog.

[0085] The term “polynucleotide” or “nucleic acid molecule” can be any polymeric form of nucleotides, including DNA, RNA, a hybridization thereof, or RNA-DNA chimeric molecules. In some embodiments, a polynucleotide comprises cDNA, genomic DNA, mRNA, tRNA, rRNA, or microRNA. In some embodiments, a polynucleotide is double stranded, e.g., a double-stranded DNA in a gene. In some embodiments, a polynucleotide is single-stranded or substantially single-stranded, e.g., single-stranded DNA or an mRNA. In some embodiments, a polynucleotide is a cell-free nucleic acid molecule. In some embodiments, a polynucleotide circulates in blood. In some embodiments, a polynucleotide is a cellular nucleic acid molecule. In some embodiments, a polynucleotide is a cellular nucleic acid molecule in a cell circulating in blood.

[0086] Polynucleotides can have any three-dimensional structure. The following are nonlimiting examples of polynucleotides: a gene or gene fragment (for example, a probe, primer, EST or SAGE tag), an exon, an intron, intergenic DNA (including, without limitation, heterochromatic DNA), messenger RNA (mRNA), transfer RNA (tRNA), ribosomal RNA (rRNA), a ribozyme, cDNA, a recombinant polynucleotide, a branched polynucleotide, a plasmid, a vector, isolated DNA, isolated RNA, sgRNA, guide RNA, a nucleic acid probe, a primer, an snRNA, a long non-coding RNA, a snoRNA, a siRNA, a miRNA, a tRNA-derived small RNA (tsRNA), an antisense RNA, an shRNA, or a small rDNA-derived RNA (srRNA).

[0087] In some embodiments, a polynucleotide comprises deoxyribonucleotides, ribonucleotides or analogs thereof. In some embodiments, a polynucleotide comprises modified nucleotides, such as methylated nucleotides and nucleotide analogs. If present, modifications to the nucleotide structure can be imparted before or after assembly of the polynucleotide. The sequence of nucleotides can be interrupted by non-nucleotide components. A polynucleotide can be further modified after polymerization, such as by conjugation with a labeling component.

[0088] In some embodiments, a polynucleotide is composed of a specific sequence of four nucleotide bases: adenine (A); cytosine (C); guanine (G); thymine (T); and uracil (U) for thymine when the polynucleotide is RNA. In some embodiments, the polynucleotide may comprise one or more other nucleotide bases, such as inosine (I), which is read by the translation machinery as guanine (G).

[0089] In some embodiments, a polynucleotide may be modified. As used herein, the terms “modified” or “modification” refers to chemical modification with respect to the A, C, G, T and U nucleotides. In some embodiments, modifications may be on the nucleoside base and/or sugar portion of the nucleosides that comprise the polynucleotide. In some embodiments, the modification may be on the internucleoside linkage (e.g., phosphate backbone). In some embodiments, multiple modifications are included in the modified nucleic acid molecule. In some embodiments, a single modification is included in the modified nucleic acid molecule.

[0090] The term “complement”, “complementary”, or “complementarity” as used herein, refers to the ability of two polynucleotide molecules to base pair with each other. Complementary polynucleotides may base pair via hydrogen bonding, which may be Watson Crick, Hoogsteen or reversed Hoogsteen hydrogen bonding. For example, an adenine on one polynucleotide molecule will base pair to a thymine or an uracil on a second polynucleotide molecule and a cytosine on one polynucleotide molecule will base pair to a guanine on a second polynucleotide molecule. Two polynucleotide molecules are complementary to each other when a first polynucleotide molecule comprising a first nucleotide sequence can base pair with a second polynucleotide molecule comprising a second nucleotide sequence. For instance, the two DNA molecules 5′-ATGC-3′ and 5′-GCAT-3′ are complementary, and the complement of the DNA molecule 5′-ATGC-3′ is 5′-GCAT-3′. A percentage of complementarity indicates the percentage of nucleotides in a polynucleotide molecule which can base pair with a second polynucleotide molecule (e.g., 5, 6, 7, 8, 9, 10 out of 10 being 50%, 60%, 70%, 80%, 90%, and 100% complementary, respectively). “Perfectly complementary” means that all the contiguous nucleotides of a polynucleotide molecule will base pair with the same number of contiguous nucleotides in a second polynucleotide molecule. “Substantially complementary” as used herein refers to a degree of complementarity that can be 70%, 75%, 80%, 85%, 90%, 95%, 97%, 98%, or 99% over all or a portion of two polynucleotide molecules. In some embodiments, the portion of complementarity may be a region of 10, 15, 20, 25, 30, 35, 40, 45, 50, or more nucleotides. “Substantial complementary” can also refer to a 100% complementarity over a portion or a region of two polynucleotide molecules. In some embodiments, the portion or the region of complementarity between the two polynucleotide molecules is at least 60%, 65%, 70%, 75%, 80%, 85%, 90%, 95%, 97%, 98%, or 99% of the length of at least one of the two polynucleotide molecules or a functional or defined portion thereof.

[0091] As used herein, “expression” refers to the process by which polynucleotides are transcribed into mRNA and/or the process by which polynucleotides, e.g., the transcribed mRNA, translated into peptides, polypeptides, or proteins. If the polynucleotide is derived from genomic DNA, expression may include splicing of the mRNA in a eukaryotic cell. In some embodiments, expression of a polynucleotide, e.g., a gene or a DNA encoding a protein, is determined by the amount of the protein encoded by the gene after transcription and translation of the gene. In some embodiments, expression of a polynucleotide, e.g., a gene or a DNA encoding a protein, is determined by the amount of a functional form of the protein encoded by the gene after transcription and translation of the gene. In some embodiments, expression of a gene is determined by the amount of the mRNA, or transcript, that is encoded by the gene after transcription the gene. In some embodiments, expression of a polynucleotide, e.g., an mRNA, is determined by the amount of the protein encoded by the mRNA after translation of the mRNA. In some embodiments, expression of a polynucleotide, e.g., a mRNA or coding RNA, is determined by the amount of a functional form of the protein encoded by the polypeptide after translation of the polynucleotide.

[0092] The term “sequencing” as used herein, may comprise capillary sequencing, bisulfite-free sequencing, bisulfite sequencing, TET-assisted bisulfite (TAB) sequencing, ACE-sequencing, high-throughput sequencing, Maxam-Gilbert sequencing, massively parallel signature sequencing, Polony sequencing, 454 pyrosequencing, Sanger sequencing, Illumina sequencing, SOLiD sequencing, Ion Torrent semiconductor sequencing, DNA nanoball sequencing, Heliscope single molecule sequencing, single molecule real time (SMRT) sequencing, nanopore sequencing, shot gun sequencing, RNA sequencing, or any combination thereof.

[0093] The terms “equivalent” or “biological equivalent” are used interchangeably when referring to a particular molecule, or biological or cellular material, and means a molecule having minimal homology to another molecule while still maintaining a desired structure or functionality.

[0094] The term “encode” as it is applied to polynucleotides refers to a polynucleotide which is said to “encode” another polynucleotide, a polypeptide, or an amino acid if, in its native state or when manipulated by methods well known to those skilled in the art, it can be used as polynucleotide synthesis template, e.g., transcribed into an RNA, reverse transcribed into a DNA or cDNA, and/or translated to produce an amino acid, or a polypeptide or fragment thereof. In some embodiments, a polynucleotide comprising three contiguous nucleotides form a codon that encodes a specific amino acid. In some embodiments, a polynucleotide comprises one or more codons that encode a polypeptide. In some embodiments, a polynucleotide comprising one or more codons comprises a mutation in a codon compared to a wild-type reference polynucleotide. In some embodiments, the mutation in the codon encodes an amino acid substitution in a polypeptide encoded by the polynucleotide as compared to a wild-type reference polypeptide.

[0095] The term “mutation” as used herein refers to a change and/or alteration in an amino acid sequence of a protein or nucleic acid sequence of a polynucleotide. Such changes and/or alterations may comprise the substitution, insertion, deletion and/or truncation of one or more amino acids, in the case of an amino acid sequence, and/or nucleotides, in the case of nucleic acid sequence, compared to a reference amino acid or a reference nucleic acid sequence. In some embodiments, the reference sequence is a wild-type sequence. In some embodiments, a mutation in a nucleic acid sequence of a polynucleotide encodes a mutation in the amino acid sequence of a polypeptide. In some embodiments, the mutation in the amino acid sequence of the polypeptide or the mutation in the nucleic acid sequence of the polynucleotide is a mutation associated with a disease state.

[0096] The term “subject” and its grammatical equivalents as used herein may refer to a human or a non-human. A subject may be a mammal. A human subject may be male or female. A human subject may be of any age. A subject may be a human embryo. A human subject may be a newborn, an infant, a child, an adolescent, or an adult. A human subject may be in need of treatment for a genetic disease or disorder.

[0097] The terms “treatment” or “treating” and their grammatical equivalents may refer to the medical management of a subject with an intent to cure, ameliorate, or ameliorate a symptom of, a disease, condition, or disorder. Treatment may include active treatment, that is, treatment directed specifically toward the improvement of a disease, condition, or disorder. Treatment may include causal treatment, that is, treatment directed toward removal of the cause of the associated disease, condition, or disorder. In addition, this treatment may include palliative treatment, that is, treatment designed for the relief of symptoms rather than the curing of the disease, condition, or disorder. Treatment may include supportive treatment, that is, treatment employed to supplement another specific therapy directed toward the improvement of the disease, condition, or disorder. In some embodiments, a condition may be pathological. In some embodiments, a treatment may not completely cure or prevent a disease, condition, or disorder. In some embodiments, a treatment ameliorates, but does not completely cure or prevent a disease, condition, or disorder. In some embodiments, a subject may be treated for 12 hours, 24 hours, 2 days, 3 days, 4 days, 5 days, 6 days, 7 days, 2 weeks, 3 weeks, 4 weeks, 2 months, 3 months, 4 months, 5 months, 6 months, 1 year, 2 years, 3 years, 4 years, 5 years, 6 years, indefinitely, or life of the subject.

[0098] The term “ameliorate” and its grammatical equivalents means to decrease, suppress, attenuate, diminish, arrest, or stabilize the development or progression of a disease.

[0099] The terms “prevent” or “preventing” means delaying, forestalling, or avoiding the onset or development of a disease, condition, or disorder for a period of time. Prevent also means reducing risk of developing a disease, disorder, or condition. Prevention includes minimizing or partially or completely inhibiting the development of a disease, condition, or disorder. In some embodiments, a composition, e.g. a pharmaceutical composition, prevents a disorder by delaying the onset of the disorder for 12 hours, 24 hours, 2 days, 3 days, 4 days, 5 days, 6 days, 7 days, 2 weeks, 3 weeks, 4 weeks, 2 months, 3 months, 4 months, 5 months, 6 months, 1 year, 2 years, 3 years, 4 years, 5 years, 6 years, indefinitely, or life of a subject.

[0100] The term “effective amount” or “therapeutically effective amount” refers to a quantity of a composition, for example a prime editing composition comprising a construct, that can be sufficient to result in a desired activity upon introduction into a subject as disclosed herein. An effective amount of the prime editing compositions can be provided to the target gene or cell, whether the cell is ex vivo or in vivo. An effective amount can be the amount to induce, for example, at least about a 2-fold change (increase or decrease) or more in the amount of target nucleic acid modulation (e.g., expression of NCF1 gene, NCF1B pseudogene, or NCF1C pseudogene to produce functional p47phox or NCF1 protein) observed relative to a negative control. An effective amount or dose can induce, for example, about 2-fold increase, about 3-fold increase, about 4-fold increase, about 5-fold increase, about 6-fold increase, about 7-fold increase, about 8-fold increase, about 9-fold increase, about 10-fold increase, about 25-fold increase, about 50-fold increase, about 100-fold increase, about 200-fold increase, about 500-fold increase, about 700-fold increase, about 1000-fold increase, about 5000-fold increase, or about 10,000-fold increase in target gene modulation (e.g., expression of a target NCF1 gene to produce functional p47phox or NCF1 protein). The amount of target gene modulation may be measured by any suitable method known in the art. In some embodiments, the “effective amount” or “therapeutically effective amount” is the amount of a composition that is required to ameliorate the symptoms of a disease relative to an untreated patient. In some embodiments, an effective amount is the amount of a composition sufficient to introduce an alteration in a gene of interest in a cell (e.g., a cell in vitro or in vivo).

[0101] In some embodiments, an effective amount can be an amount to induce, when administered to a population of cells, a certain percentage of the population of cells to have a correction of a mutation. For example, in some embodiments, an effective amount can be the amount to induce, when administered to or introduced to a population of cells, installation of one or more intended nucleotide edits that correct a mutation in the target NCF1 gene, in at least about 1%, 2%, 5%, about 10%, about 15%, about 20%, about 25%, about 30%, about 35%, about 40%, about 45%, about 50%, about 55%, about 60%, about 65%, about 70%, about 75%, about 80%, about 85%, about 90%, about 95%, or about 99% of the population of cells.

[0102] As used herein, the terms “CGD,” “chronic granulomatous disease,” and “Chronic Granulomatous Disease” are used interchangeably. CGD is disease caused by defects in any 1 of 5 subunits of the phagocyte nicotinamide adenine dinucleotide phosphate (NADPH) oxidase (phox), characterized by a failure of phagocytes (neutrophils, monocytes, macrophages, and eosinophils) to generate superoxide anion radical and other related reactive oxygen species (ROS), leading to recurrent infections, inflammation, and increased mortality. In some embodiments, mutations in the NCF1 gene are associated with diseases including CGD. The NCF1 gene codes the p47phox protein. Alternate names for NCF1 include: 47 kDa autosomal chronic granulomatous disease protein, 47 kDa neutrophil oxidase factor, NCF-47K, Neutrophil NADPH oxidase factor 1, Nox organizer 2, Nox-organizing protein 2, SH3 and PX domain-containing protein 1A, or p47-phox. In the human genome the NCF1 gene is located on chromosome 7q11.23 and contains 10 introns and 11 exons, for a total genomic length of 1.459 kb.

### Prime Editing

[0103] The term “prime editing” refers to programmable editing of a target DNA using a prime editor complexed with a PEgRNA to incorporate an intended nucleotide edit (also referred to herein as a nucleotide change) into the target DNA through target-primed DNA synthesis. A target gene of prime editing may comprise a double stranded DNA molecule having two complementary strands: a first strand that may be referred to as a “target strand” or a “non-edit strand”, and a second strand that may be referred to as a “non-target strand,” or an “edit strand.” In some embodiments, in a prime editing guide RNA (PEgRNA), a spacer sequence is complementary or substantially complementary to a specific sequence on the target strand, which may be referred to as a “search target sequence”. In some embodiments, the spacer sequence anneals with the target strand at the search target sequence. The target strand may also be referred to as the “non-Protospacer Adjacent Motif (non-PAM strand).” In some embodiments, the non-target strand may also be referred to as the “PAM strand”. In some embodiments, the PAM strand comprises a protospacer sequence and optionally protospacer adjacent motif (PAM) sequence. In prime editing using a Cas-protein-based prime editor, a PAM sequence refers to a short DNA sequence immediately adjacent to the protospacer sequence on the PAM strand of the target gene. A PAM sequence may be specifically recognized by a programmable DNA binding protein, e.g., a Cas nickase or a Cas nuclease. In some embodiments, a specific PAM is characteristic of a specific programmable DNA binding protein, e.g., a Cas nickase or a Cas nuclease. A protospacer sequence refers to a specific sequence in the PAM strand of the target gene that is complementary to the search target sequence. In a PEgRNA, a spacer sequence may have a substantially identical sequence as the protospacer sequence on the edit strand of a target gene, except that the spacer sequence may comprise Uracil (U) and the protospacer sequence may comprise Thymine (T).

[0104] In some embodiments, the double stranded target DNA comprises a nick site on the PAM strand (or non-target strand). As used herein, a “nick site” refers to a specific position in between two nucleotides or two base pairs of the double stranded target DNA. In some embodiments, the position of a nick site is determined relative to the position of a specific PAM sequence. In some embodiments, the nick site is the particular position where a nick will occur when the double stranded target DNA is contacted with a nickase, for example, a Cas nickase, that recognizes a specific PAM sequence. In some embodiments, the nick site is upstream of a specific PAM sequence on the PAM strand of the double stranded target DNA. In some embodiments, the nick site is downstream of a specific PAM sequence on the PAM strand of the double stranded target DNA. In some embodiments, the nick site is upstream of a PAM sequence recognized by a Cas9 nickase, wherein the Cas9 nickase comprises a nuclease active RuvC domain and a nuclease inactive HNH domain. In some embodiments, the nick site is 3 nucleotides upstream of the PAM sequence, and the PAM sequence is recognized by a Streptococcus pyogenes Cas9 nickase, a P. lavamentivorans Cas9 nickase, a C. diphtheriae Cas9 nickase, a N. cinerea Cas9, a S. aureus Cas9, or a N. lari Cas9 nickase. In some embodiments, the nick site is 3 base pairs upstream of the PAM sequence, and the PAM sequence is recognized by a Cas9 nickase, wherein the Cas9 nickase that comprises a nuclease active RuvC domain and a nuclease inactive HNH domain. In some embodiments, the nick site is 2 nucleotides upstream of the PAM sequence, and the PAM sequence is recognized by a S. thermophilus Cas9 nickase that comprises a nuclease active RuvC domain and a nuclease inactive HNH domain.

[0105] A “primer binding site” (also referred to as PBS or primer binding site sequence) is a single-stranded portion of the PEgRNA that comprises a region of complementarity to the PAM strand (i.e., the non-target strand or the edit strand). The PBS is complementary or substantially complementary to a sequence on the PAM strand of the double stranded target DNA that is immediately upstream of the nick site. In some embodiments, in the process of prime editing, the PEgRNA complexes with and directs a prime editor to bind the search target sequence on the target strand of the double stranded target DNA, and generates a nick at the nick site on the non-target strand of the double stranded target DNA. In some embodiments, the PBS is complementary to or substantially complementary to, and can anneal to, a free 3′ end on the non-target strand of the double stranded target DNA at the nick site. In some embodiments, the PBS annealed to the free 3′ end on the non-target strand can initiate target-primed DNA synthesis.

[0106] An “editing template” of a PEgRNA is a single-stranded portion of the PEgRNA that is 5′ of the PBS and which encodes a single strand of DNA. The editing template may comprise a region of complementarity to the PAM strand (i.e., the non-target strand or the edit strand), and comprises one or more intended nucleotide edits compared to the endogenous sequence of the double stranded target DNA. In some embodiments, the editing template and the PBS are immediately adjacent to each other. Accordingly, in some embodiments, a PEgRNA in prime editing comprises a single-stranded portion that comprises the PBS and the editing template immediately adjacent to each other. In some embodiments, the single stranded portion of the PEgRNA comprising both the PBS and the editing template is complementary or substantially complementary to an endogenous sequence on the PAM strand (i.e., the non-target strand or the edit strand) of the double stranded target DNA except for one or more non-complementary nucleotides at the intended nucleotide edit position(s). As used herein, regardless of relative 5′-3′ positioning in other context, the relative positions as between the PBS and the editing template, and the relative positions as among elements of a PEgRNA, are determined by the 5′ to 3′ order of the PEgRNA regardless of the position of sequences in the double stranded target DNA that may have complementarity or identity to elements of the PEgRNA. In some embodiments, the editing template is complementary or substantially complementary to a sequence on the PAM strand that is immediately downstream of the nick site, except for one or more non-complementary nucleotides at the intended nucleotide edit positions. The endogenous, e.g., genomic, sequence that is complementary or substantially complementary to the editing template, except for the one or more non-complementary nucleotides at the position corresponding to the intended nucleotide edit, may be referred to as an “editing target sequence”. In some embodiments, the editing template has identity or substantial identity to a sequence on the target strand that is complementary to, or having the same position in the genome as, the editing target sequence, except for one or more insertions, deletions, or substitutions at the intended nucleotide edit positions. In some embodiments, the editing template encodes a single stranded DNA, wherein the single stranded DNA has identity or substantial identity to the editing target sequence except for one or more insertions, deletions, or substitutions at the positions of the one or more intended nucleotide edits. In some embodiments, the editing template may encode the wild-type or non-disease associated gene sequence (or its complement if the edit strand is the antisense strand of a gene). In some embodiments, the editing template may encode the wild-type or non-disease associated protein, but contain one or more synonymous mutations relative to the wild-type or non-disease associated protein coding region. Such synonymous mutations may include, for example, mutations that decrease the ability of a PEgRNA to rebind to the same target sequence once the desired edit is installed in the genome (e.g., synonymous mutations that silence the endogenous PAM sequence or that edit the endogenous protospacer).

[0107] In some embodiments, a PEgRNA complexes with and directs a prime editor to bind to the search target sequence of the target gene. In some embodiments, the bound prime editor generates a nick on the edit strand (PAM strand) of the target gene at the nick site. In some embodiments, a primer binding site (PBS) of the PEgRNA anneals with a free 3′ end formed at the nick site, and the prime editor initiates DNA synthesis from the nick site, using the free 3′ end as a primer. Subsequently, a single-stranded DNA encoded by the editing template of the PEgRNA is synthesized. In some embodiments, the newly synthesized single-stranded DNA comprises one or more intended nucleotide edits compared to an endogenous target gene sequence. Accordingly, in some embodiments, the editing template of a PEgRNA is complementary to a sequence in the edit strand except for one or more mismatches at the intended nucleotide edit positions in the editing template. The endogenous, e.g., genomic, sequence that is partially complementary to the editing template may be referred to as an “editing target sequence”. Accordingly, in some embodiments, the newly synthesized single stranded DNA has identity or substantial identity to a sequence in the editing target sequence, except for one or more insertions, deletions, or substitutions at the intended nucleotide edit positions. In some embodiments, the editing template comprises at least 4 contiguous nucleotides of complementarity with the edit strand wherein the at least 4 nucleotides contiguous are located upstream of the 5′ most edit in the editing template.

[0108] In some embodiments, the newly synthesized single-stranded DNA equilibrates with the editing target on the edit strand of the target gene for pairing with the target strand of the target gene. In some embodiments, the editing target sequence of the target gene is excised by a flap endonuclease (FEN), for example, FEN1. In some embodiments, the FEN is an endogenous FEN, for example, in a cell comprising the target gene. In some embodiments, the FEN is provided as part of the prime editor, either linked to other components of the prime editor or provided in trans. In some embodiments, the newly synthesized single stranded DNA, which comprises the intended nucleotide edit, replaces the endogenous single stranded editing target sequence on the edit strand of the target gene. In some embodiments, the newly synthesized single stranded DNA and the endogenous DNA on the target strand form a heteroduplex DNA structure at the region corresponding to the editing target sequence of the target gene. In some embodiments, the newly synthesized single-stranded DNA comprising the nucleotide edit is paired in the heteroduplex with the target strand of the target DNA that does not comprise the nucleotide edit, thereby creating a mismatch between the two otherwise complementary strands. In some embodiments, the mismatch is recognized by DNA repair machinery, e.g., an endogenous DNA repair machinery. In some embodiments, through DNA repair, the intended nucleotide edit is incorporated into the target gene.

### Prime Editor

[0109] The term “prime editor (PE)” refers to the polypeptide or polypeptide components involved in prime editing, or any polynucleotide(s) encoding the polypeptide or polypeptide components. In various embodiments, a prime editor includes a polypeptide domain having DNA binding activity and a polypeptide domain having DNA polymerase activity. In some embodiments, the prime editor further comprises a polypeptide domain having nuclease activity. In some embodiments, the polypeptide domain having DNA binding activity comprises a nuclease domain or nuclease activity. In some embodiments, the polypeptide domain having nuclease activity comprises a nickase, or a fully active nuclease. As used herein, the term “nickase” refers to a nuclease capable of cleaving only one strand of a double-stranded DNA target. In some embodiments, the prime editor comprises a polypeptide domain that is an inactive nuclease. In some embodiments, the polypeptide domain having programmable DNA binding activity comprises a nucleic acid guided DNA binding domain, for example, a CRISPR-Cas protein, for example, a Cas9 nickase, a Cpf1 nickase, or another CRISPR-Cas nuclease. In some embodiments, the polypeptide domain having DNA polymerase activity comprises a template-dependent DNA polymerase, for example, a DNA-dependent DNA polymerase or an RNA-dependent DNA polymerase. In some embodiments, the DNA polymerase is a reverse transcriptase. In some embodiments, the prime editor comprises additional polypeptides involved in prime editing, for example, a polypeptide domain having 5′ endonuclease activity, e.g., a 5′ endogenous DNA flap endonucleases (e.g., FEN1), for helping to drive the prime editing process towards the edited product formation. In some embodiments, the prime editor further comprises an RNA-protein recruitment polypeptide, for example, a MS2 coat protein.

[0110] A prime editor may be engineered. In some embodiments, the polypeptide components of a prime editor do not naturally occur in the same organism or cellular environment. In some embodiments, the polypeptide components of a prime editor may be of different origins or from different organisms. In some embodiments, a prime editor comprises a DNA binding domain and a DNA polymerase domain that are derived from different species. In some embodiments, a prime editor comprises a Cas polypeptide (DNA binding domain) and a reverse transcriptase polypeptide (DNA polymerase) that are derived from different species. For example, a prime editor may comprise a S. pyogenes Cas9 polypeptide and a Moloney murine leukemia virus (M-MLV) reverse transcriptase polypeptide.

[0111] In some embodiments, polypeptide domains of a prime editor may be fused or linked by a peptide linker to form a fusion protein. In other embodiments, a prime editor comprises one or more polypeptide domains provided in trans as separate proteins, which are capable of being associated to each other through non-peptide linkages or through aptamers or recruitment sequences. For example, a prime editor may comprise a DNA binding domain and a reverse transcriptase domain associated with each other by an RNA-protein recruitment aptamer, e.g., a MS2 aptamer, which may be linked to a PEgRNA. Prime editor polypeptide components may be encoded by one or more polynucleotides in whole or in part. In some embodiments, a single polynucleotide, construct, or vector encodes the prime editor fusion protein. In some embodiments, multiple polynucleotides, constructs, or vectors each encode a polypeptide domain or portion of a domain of a prime editor, or a portion of a prime editor fusion protein. For example, a prime editor fusion protein may comprise an N-terminal portion fused to an intein-N and a C-terminal portion fused to an intein-C, each of which is individually encoded by an AAV vector.

### Prime Editor Nucleotide Polymerase Domain

[0112] In some embodiments, a prime editor comprises a nucleotide polymerase domain, e.g., a DNA polymerase domain. The DNA polymerase domain may be a wild-type DNA polymerase domain, a full-length DNA polymerase protein domain, or may be a functional mutant, a functional variant, or a functional fragment thereof. In some embodiments, the polymerase domain is a template dependent polymerase domain. For example, the DNA polymerase may rely on a template polynucleotide strand, e.g., the editing template sequence, for new strand DNA synthesis. In some embodiments, the prime editor comprises a DNA-dependent DNA polymerase. For example, a prime editor having a DNA-dependent DNA polymerase can synthesize a new single stranded DNA using a PEgRNA editing template that comprises a DNA sequence as a template. In such cases, the PEgRNA is a chimeric or hybrid PEgRNA, and comprising an extension arm comprising a DNA strand. The chimeric or hybrid PEgRNA may comprise an RNA portion (including the spacer and the gRNA core) and a DNA portion (the extension arm comprising the editing template that includes a strand of DNA).

[0113] In some embodiments, the DNA polymerases can be wild type polymerases from eukaryotic, prokaryotic, archaeal, or viral organisms, and/or the polymerases may be modified by genetic engineering, mutagenesis, or directed evolution-based processes. The polymerases can be a T7 DNA polymerase, T5 DNA polymerase, T4 DNA polymerase, Klenow fragment DNA polymerase, DNA polymerase III and the like. The polymerases can be thermostable, and can include Taq, Tne, Tma, Pfu, Tfl, Tth, Stoffel fragment, VENT® and DEEPVENT® DNA polymerases, KOD, Tgo, JDF3, and mutants, variants and derivatives thereof.

[0114] In some embodiments, the DNA polymerase is a bacteriophage polymerase, for example, a T4, T7, or phi29 DNA polymerase. In some embodiments, the DNA polymerase is an archaeal polymerase, for example, pol I type archaeal polymerase or a pol II type archaeal polymerase. In some embodiments, the DNA polymerase comprises a thermostable archaeal DNA polymerase. In some embodiments, the DNA polymerase comprises a eubacterial DNA polymerase, for example, Pol I, Pol II, or Pol III polymerase. In some embodiments, the DNA polymerase is a Pol I family DNA polymerase. In some embodiments, the DNA polymerase is a E. coli Pol I DNA polymerase. In some embodiments, the DNA polymerase is a Pol II family DNA polymerase. In some embodiments, the DNA polymerase is a Pyrococcus furiosus (Pfu) Pol II DNA polymerase. In some embodiments, the DNA Polymerase is a Pol IV family DNA polymerase. In some embodiments, the DNA polymerase is a E. coli Pol IV DNA polymerase. In some embodiments, the DNA polymerase comprises a eukaryotic DNA polymerase. In some embodiments, the DNA polymerase is a Pol-beta DNA polymerase, a Pol-lambda DNA polymerase, a Pol-sigma DNA polymerase, or a Pol-mu DNA polymerase. In some embodiments, the DNA polymerase is a Pol-alpha DNA polymerase. In some embodiments, the DNA polymerase is a POLA1 DNA polymerase. In some embodiments, the DNA polymerase is a POLA2 DNA polymerase. In some embodiments, the DNA polymerase is a Pol-delta DNA polymerase. In some embodiments, the DNA polymerase is a POLD1 DNA polymerase. In some embodiments, the DNA polymerase is a POLD2 DNA polymerase. In some embodiments, the DNA polymerase is a human POLD1 DNA polymerase. In some embodiments, the DNA polymerase is a human POLD2 DNA polymerase. In some embodiments, the DNA polymerase is a POLD3 DNA polymerase. In some embodiments, the DNA polymerase is a POLD4 DNA polymerase. In some embodiments, the DNA polymerase is a Pol-epsilon DNA polymerase. In some embodiments, the DNA polymerase is a POLE1 DNA polymerase. In some embodiments, the DNA polymerase is a POLE2 DNA polymerase. In some embodiments, the DNA polymerase is a POLE3 DNA polymerase. In some embodiments, the DNA polymerase is a Pol-eta (POLH) DNA polymerase. In some embodiments, the DNA polymerase is a Pol-iota (POLI) DNA polymerase. In some embodiments, the DNA polymerase is a Pol-kappa (POLK) DNA polymerase. In some embodiments, the DNA polymerase is a Rev1 DNA polymerase. In some embodiments, the DNA polymerase is a human Rev1 DNA polymerase. In some embodiments, the DNA polymerase is a viral DNA-dependent DNA polymerase. In some embodiments, the DNA polymerase is a B family DNA polymerases. In some embodiments, the DNA polymerase is a herpes simplex virus (HSV) UL30 DNA polymerase. In some embodiments, the DNA polymerase is a cytomegalovirus (CMV) UL54 DNA polymerase.

[0115] In some embodiments, the DNA polymerase is an archaeal polymerase. In some embodiments, the DNA polymerase is a Family B/pol I type DNA polymerase. For example, in some embodiments, the DNA polymerase is a homolog of Pfu from Pyrococcus furiosus. In some embodiments, the DNA polymerase is a pol II type DNA polymerase. For example, in some embodiments, the DNA polymerase is a homolog of P. furiosus DP1/DP2 2-subunit polymerase. In some embodiments, the DNA polymerase lacks 5′ to 3′ nuclease activity. Suitable DNA polymerases (pol I or pol II) can be derived from archaea with optimal growth temperatures that are similar to the desired assay temperatures.

[0116] In some embodiments, the DNA polymerase comprises a thermostable archaeal DNA polymerase. In some embodiments, the thermostable DNA polymerase is isolated or derived from Pyrococcus species (furiosus, species GB-D, woesii, abysii, horikoshii), Thermococcus species (kodakaraensis KOD1, litoralis, species 9 degrees North-7, species JDF-3, gorgonarius), Pyrodictium occultum, and Archaeoglobus fulgidus.

[0117] Polymerases may also be from eubacterial species. In some embodiments, the DNA polymerase is a Pol I family DNA polymerase. In some embodiments, the DNA polymerase is an E. coli Pol I DNA polymerase. In some embodiments, the DNA polymerase is a Pol II family DNA polymerase. In some embodiments, the DNA polymerase is a Pyrococcus furiosus (Pfu) Pol II DNA polymerase. In some embodiments, the DNA Polymerase is a Pol III family DNA polymerase. In some embodiments, the DNA Polymerase is a Pol IV family DNA polymerase. In some embodiments, the DNA polymerase is an E. coli Pol IV DNA polymerase. In some embodiments, the Pol I DNA polymerase is a DNA polymerase functional variant that lacks or has reduced 5′ to 3′ exonuclease activity.

[0118] Suitable thermostable pol I DNA polymerases can be isolated from a variety of thermophilic eubacteria, including Thermus species and Thermotoga maritima such as Thermus aquaticus (Taq), Thermus thermophilus (Tth) and Thermotoga maritima (Tma UlTma).

[0119] In some embodiments, a prime editor comprises an RNA-dependent DNA polymerase domain, for example, a reverse transcriptase (RT). A RT or an RT domain may be a wild type RT domain, a full-length RT domain, or may be a functional mutant, a functional variant, or a functional fragment thereof. An RT or an RT domain of a prime editor may comprise a wild-type RT, or may be engineered or evolved to contain specific amino acid substitutions, truncations, or variants. An engineered RT may comprise sequences or amino acid changes different from a naturally occurring RT. In some embodiments, the engineered RT may have improved reverse transcription activity over a naturally occurring RT or RT domain. In some embodiments, the engineered RT may have improved features over a naturally occurring RT, for example, improved thermostability, reverse transcription efficiency, or target fidelity. In some embodiments, a prime editor comprising the engineered RT has improved prime editing efficiency over a prime editor having a reference naturally occurring RT.

[0120] In some embodiments, a prime editor comprises a virus RT, for example, a retrovirus RT. Non-limiting examples of virus RT include Moloney murine leukemia virus (M-MLV or MMLVRT or M-MLV RT); human T-cell leukemia virus type 1 (HTLV-1) RT; bovine leukemia virus (BLV) RT; Rous Sarcoma Virus (RSV) RT; human immunodeficiency virus (HIV) RT, M-MFV RT, Avian Sarcoma-Leukosis Virus (ASLV) RT, Rous Sarcoma Virus (RSV) RT, Avian Myeloblastosis Virus (AMV) RT, Avian Erythroblastosis Virus (AEV) Helper Virus MCAV RT, Avian Myelocytomatosis Virus MC29 Helper Virus MCAV RT, Avian Reticuloendotheliosis Virus (REV-T) Helper Virus REV-A RT, Avian Sarcoma Virus UR2 Helper Virus (UR2AV) RT, Avian Sarcoma Virus Y73 Helper Virus YAV RT, Rous Associated Virus (RAV) RT, and Myeloblastosis Associated Virus (MAV) RT, all of which may be suitably used in the methods and composition described herein.

[0121] In some embodiments, the prime editor comprises a wild-type M-MLV RT, a functional mutant, a functional variant, or a functional fragment thereof. In some embodiments, the prime editor comprises a reference M-MLV RT, a functional mutant, a functional variant, or a functional fragment thereof. In some embodiments, the RT domain or a RT is a M-MLV RT (e.g., wild-type M-MLV RT, a functional mutant, a functional variant, or a functional fragment thereof). In some embodiments, the RT domain or a RT is a M-MLV RT (e.g., a reference M-MLV RT, a functional mutant, a functional variant, or a functional fragment thereof). In some embodiments, a M-MLV RT, e.g., reference M-MLV RT, comprises an amino acid sequence as set forth in any one of SEQ ID NO: 34362.

[0122] In some embodiments, a reference M-MLV RT is a wild-type M-MLV RT. An exemplary amino acid sequence of a reference M-MLV RT is provided in SEQ ID NO: 34361.

[0123] In some embodiments, the prime editor comprises a wild type M-MLV RT. An exemplary amino acid sequence of a wild type M-MLV RT is provided in SEQ ID NO: 34361.

(SEQ ID NO: 34361)
TLNIEDEHRLHETSKEPDVSLGSTWLSDFPQAWAETGGMGLAVRQAPLI
IPLKATSTPVSIKQYPMSQEARLGIKPHIQRLLDQGILVPCQSPWNTPL
LPVKKPGTNDYRPVQDLREVNKRVEDIHPTVPNPYNLLSGLPPSHQWYT
VLDLKDAFFCLRLHPTSQPLFAFEWRDPEMGISGQLTWTRLPQGFKNSP
TLFDEALHRDLADFRIQHPDLILLQYVDDLLLAATSELDCQQGTRALLQ
TLGNLGYRASAKKAQICQKQVKYLGYLLKEGQRWLTEARKETVMGQPTP
KTPRQLREFLGTAGFCRLWIPGFAEMAAPLYPLTKTGTLFNWGPDQQKA
YQEIKQALLTAPALGLPDLTKPFELFVDEKQGYAKGVLTQKLGPWRRPV
AYLSKKLDPVAAGWPPCLRMVAAIAVLTKDAGKLTMGQPLVILAPHAVE
ALVKQPPDRWLSNARMTHYQALLLDTDRVQFGPVVALNPATLLPLPEEG
LQHNCLDILAEAHGTRPDLTDQPLPDADHTWYTDGSSLLQEGQRKAGAA
VTTETEVIWAKALPAGTSAQRAELIALTQALKMAEGKKLNVYTDSRYAF
ATAHIHGEIYRRRGLLTSEGKEIKNKDEILALLKALFLPKRLSIIHCPG
HQKGHSAEARGNRMADQAARKAAITETPDTSTLLIENSSP.

[0124] In some embodiments, the prime editor comprises a reference M-MLV RT. An exemplary amino acid sequence of a reference M-MLV RT is provided in SEQ ID NO: 34362.

(SEQ ID NO: 34362)
TLNIEDEYRLHETSKEPDVSLGSTWLSDFPQAWAETGGMGLAVRQAPLI
IPLKATSTPVSIKQYPMSQEARLGIKPHIQRLLDQGILVPCQSPWNTPL
LPVKKPGTNDYRPVQDLREVNKRVEDIHPTVPNPYNLLSGLPPSHQWYT
VLDLKDAFFCLRLHPTSQPLFAFEWRDPEMGISGQLTWTRLPQGFKNSP
TLFDEALHRDLADFRIQHPDLILLQYVDDLLLAATSELDCQQGTRALLQ
TLGNLGYRASAKKAQICQKQVKYLGYLLKEGQRWLTEARKETVMGQPTP
KTPRQLREFLGTAGFCRLWIPGFAEMAAPLYPLTKTGTLFNWGPDQQKA
YQEIKQALLTAPALGLPDLTKPFELFVDEKQGYAKGVLTQKLGPWRRPV
AYLSKKLDPVAAGWPPCLRMVAAIAVLTKDAGKLTMGQPLVILAPHAVE
ALVKQPPDRWLSNARMTHYQALLLDTDRVQFGPVVALNPATLLPLPEEG
LQHNCLDILAEAHGTRPDLTDQPLPDADHTWYTDGSSLLQEGQRKAGAA
VTTETEVIWAKALPAGTSAQRAELIALTQALKMAEGKKLNVYTDSRYAF
ATAHIHGEIYRRRGLLTSEGKEIKNKDEILALLKALFLPKRLSIIHCPG
HQKGHSAEARGNRMADQAARKAAITETPDTSTLLIENSSP.

[0125] In some embodiments, the prime editor comprises a M-MLV RT comprising one or more of amino acid substitutions P51X, S67X, E69X, L139X, T197X, D200X, H204X, F209X, E302X, T306X, F309X, W313X, T330X, L345X, L435X, N454X, D524X, E562X, D583X, H594X, L603X, E607X, or D653X as compared to the reference M-MLV RT as set forth in SEQ ID NO: 34362, where X is any amino acid other than the original amino acid in the reference M-MLV RT. In some embodiments, the prime editor comprises a M-MLV RT comprising one or more of amino acid substitutions P51L, S67K, E69K, L139P, T197A, D200N, H204R, F209N, E302K, E302R, T306K, F309N, W313F, T330P, L345G, L435G, N454K, D524G, E562Q, D583N, H594Q, L603W, E607K, and D653N as compared to the reference M-MLV RT as set forth in SEQ ID NO: 34362. In some embodiments, the prime editor comprises a M-MLV RT comprising one or more of amino acid substitutions D200N, T330P, L603W, T306K, and W313F as compared to the reference M-MLV RT as set forth in SEQ ID NO: 34362. In some embodiments, the prime editor comprises a M-MLV RT comprising amino acid substitutions D200N, T330P, L603W, T306K, and W313F as compared to a reference M-MLV RT as set forth in SEQ ID NO: 34362. In some embodiments, the prime editor comprises a M-MLV RT comprising one or more of amino acid substitutions D200N, T330P, L603W, T306K, and W313F as compared to a wild type M-MMLV RT as set forth in SEQ ID NO: 34361. In some embodiments, a prime editor may comprise amino acid substitutions D200N, T330P, L603W, T306K, and W313F as compared to a reference M-MLV RT as set forth in SEQ ID NO: 34362. In some embodiments, the prime editor comprises a M-MLV RT that comprises an amino acid sequence that is at least 70%, at least 75%, at least 80%, at least 85%, at least 90%, at least 95%, at least 96%, at least 97%, at least 98%, at least 99%, at least 99.5%, or at least 99.9% identical to an amino acid sequence set forth in any one of SEQ ID NOs: 34361, 34362, or 34363. In some embodiments, the prime editor comprises a M-MLV RT that comprises an amino acid sequence that is selected from the group consisting of SEQ ID NOs: 34361, 34362, and 34363 or a variant or fragment thereof. In some embodiments, the prime editor comprises a M-MLV RT that comprises an amino acid sequence set forth in SEQ ID NO: 34363.

(SEQ ID NO: 34363)
TLNIEDEYRLHETSKEPDVSLGSTWLSDFPQAWAETGGMGLAVRQAPLI
IPLKATSTPVSIKQYPMSQEARLGIKPHIQRLLDQGILVPCQSPWNTPL
LPVKKPGTNDYRPVQDLREVNKRVEDIHPTVPNPYNLLSGLPPSHQWYT
VLDLKDAFFCLRLHPTSQPLFAFEWRDPEMGISGQLTWTRLPQGFKNSP
TLFNEALHRDLADFRIQHPDLILLQYVDDLLLAATSELDCQQGTRALLQ
TLGNLGYRASAKKAQICQKQVKYLGYLLKEGQRWLTEARKETVMGQPTP
KTPRQLREFLGKAGFCRLFIPGFAEMAAPLYPLTKPGTLFNWGPDQQKA
YQEIKQALLTAPALGLPDLTKPFELFVDEKQGYAKGVLTQKLGPWRRPV
AYLSKKLDPVAAGWPPCLRMVAAIAVLTKDAGKLTMGQPLVILAPHAVE
ALVKQPPDRWLSNARMTHYQALLLDTDRVQFGPVVALNPATLLPLPEEG
LQHNCLDILAEAHGTRPDLTDQPLPDADHTWYTDGSSLLQEGQRKAGAA
VTTETEVIWAKALPAGTSAQRAELIALTQALKMAEGKKLNVYTDSRYAF
ATAHIHGEIYRRRGWLTSEGKEIKNKDEILALLKALFLPKRLSIIHCPG
HQKGHSAEARGNRMADQAARKAAITETPDTSTLLIENSSP.

[0126] In some embodiments, an RT variant may be a functional fragment of a reference RT that has 1, 2, 3, 4, 5, 6, 7, 8, 9, 10, 11, 12, 13, 14, 15, 16, 17, 18, 19, 20, 21, 22, 21, 24, 25, 26, 27, 28, 29, 30, 31, 32, 33, 34, 35, 36, 37, 38, 39, 40, 41, 42, 43, 44, 45, 46, 47, 48, 49, 50, or up to 100, or up to 200, or up to 300, or up to 400, or up to 500 or more amino acid changes compared to a wild type RT (e.g., SEQ ID NO: 34361). In some embodiments, the RT variant comprises a fragment of a wild type RT (e.g., SEQ ID NO: 34361), such that the fragment is about 70% identical, about 80% identical, about 90% identical, about 95% identical, about 96% identical, about 97% identical, about 98% identical, about 99% identical, about 99.5% identical, or about 99.9% identical to the corresponding fragment of the wild type RT (e.g., SEQ ID NO: 34361). In some embodiments, the fragment is 30%, 35%, 40%, 45%, 50%, 55%, 60%, 65%, 70%, 75%, 80%, 85%, 90%, 95% identical, 96%, 97%, 98%, 99%, or 99.5% of the amino acid length of a corresponding wild type RT (M-MLV reverse transcriptase) (e.g., SEQ ID NO: 34361).

[0127] In some embodiments, an RT variant may be a functional fragment of a reference RT that has 1, 2, 3, 4, 5, 6, 7, 8, 9, 10, 11, 12, 13, 14, 15, 16, 17, 18, 19, 20, 21, 22, 21, 24, 25, 26, 27, 28, 29, 30, 31, 32, 33, 34, 35, 36, 37, 38, 39, 40, 41, 42, 43, 44, 45, 46, 47, 48, 49, 50, or up to 100, or up to 200, or up to 300, or up to 400, or up to 500 or more amino acid changes compared to a reference RT, e.g., SEQ ID NO: 34362. In some embodiments, the RT variant comprises a fragment of a reference RT, such that the fragment is about 70% identical, about 80% identical, about 90% identical, about 95% identical, about 96% identical, about 97% identical, about 98% identical, about 99% identical, about 99.5% identical, or about 99.9% identical to the corresponding fragment of a reference RT (e.g., SEQ ID NO: 34362). In some embodiments, the fragment is 30%, 35%, 40%, 45%, 50%, 55%, 60%, 65%, 70%, 75%, 80%, 85%, 90%, 95% identical, 96%, 97%, 98%, 99%, or 99.5% of the amino acid length of a reference RT (e.g., a M-MLV RT) (e.g., SEQ ID NO: 34362).

[0128] In some embodiments, the RT functional fragment is at least 100 amino acids in length. In some embodiments, the fragment is at least 100, 150, 200, 250, 300, 350, 400, 450, 500, 550, or up to 600 or more amino acids in length.

[0129] In still other embodiments, the functional RT variant is truncated at the N-terminus or the C-terminus, or both, by a certain number of amino acids which results in a truncated variant which still retains sufficient DNA polymerase function. In some embodiments, the functional RT variant, e.g., a functional MMLV RT variant, is truncated at the C-terminus to abolish or reduce RNAaseH activity and still retain DNA polymerase activity.

[0130] In some embodiments, a prime editing composition or a prime editing system disclosed herein comprises a polynucleotide (e.g., a DNA, a RNA, e.g., a mRNA) that encodes a M-MLV RT. In some embodiments, the polynucleotide encodes a M-MLV RT that comprises an amino acid sequence that is at least 70%, at least 75%, at least 80%, at least 85%, at least 90%, at least 95%, at least 96%, at least 97%, at least 98%, at least 99%, at least 99.5%, or at least 99.9% identical to an amino acid sequence set forth in any one of SEQ ID NOs: 34361, 34362, or 34363. In some embodiments, the polynucleotide encodes a M-MLV RT that comprises an amino acid sequence that is selected from the group consisting of SEQ ID NOs: 34361, 34362, and 34363. In some embodiments, the polynucleotide encodes a M-MLV RT that comprises an amino acid sequence that is set forth in SEQ ID NO: 34363.

[0131] In some embodiments, a prime editor comprises a eukaryotic RT, for example, a yeast, drosophila, rodent, or primate RT. In some embodiments, the prime editor comprises a Group II intron RT, for example, a. Geobacillus stearothermophilus Group II Intron (GsI-IIC) RT or a Eubacterium rectale group II intron (Eu.re.12) RT. In some embodiments, the prime editor comprises a retron RT. In some embodiments, a prime editor comprises a eukaryotic RT, for example, a yeast, drosophila, rodent, or primate RT. In some embodiments, the prime editor comprises a Group II intron RT, for example, a. Geobacillus stearothermophilus Group II Intron (GsI-IIC) RT or a Eubacterium rectale group II intron (Eu.re.12) RT. In some embodiments, the prime editor comprises a retron RT.

### Programmable DNA Binding Domain

[0132] In some embodiments, the DNA-binding domain of a prime editor is a programmable DNA binding domain. In some embodiments, a prime editor comprises a DNA binding domain that comprises an amino acid sequence that is at least 50%, at least 60%, at least 70%, at least 75%, at least 80%, 85%, at least 86%, at least 87%, at least 88%, at least 89%, at least 90%, at least 91%, at least 92%, at least 93%, at least 94%, at least 95%, at least 96%, at least 97%, at least 98%, at least 99%, or 100% identical to any one of the sequences set forth in SEQ ID NOs: 34364-34390. In some embodiments, the DNA binding domain comprises an amino acid sequence that has no more than 1, 2, 3, 4, 5, 6, 7, 8, 9, 10, 11, 12, 13, 14, 15, 16, 17, 18, 19, or 20 differences e.g., mutations e.g., deletions, substitutions and/or insertions compared to any one of the amino acid sequences set forth in SEQ ID NOs: 34364-34390. In some embodiments, the DNA binding domain of a prime editor is a programmable DNA binding domain. A programmable DNA binding domain refers to a protein domain that is designed to bind a specific nucleic acid sequence, e.g., a target DNA or a target RNA. In some embodiments, the DNA-binding domain is a polynucleotide programmable DNA-binding domain that can associate with a guide polynucleotide (e.g., a PEgRNA) that guides the DNA-binding domain to a specific DNA sequence, e.g., a search target sequence in a target gene. In some embodiments, the DNA-binding domain comprises a Clustered Regularly Interspaced Short Palindromic Repeats (CRISPR) Associated (Cas) protein. A Cas protein may comprise any Cas protein described herein or a functional fragment or functional variant thereof. In some embodiments, a DNA-binding domain may also comprise a zinc-finger protein domain. In other cases, a DNA-binding domain comprises a transcription activator-like effector domain (TALE). In some embodiments, the DNA-binding domain comprises a DNA nuclease. For example, the DNA-binding domain of a prime editor may comprise an RNA-guided DNA endonuclease, e.g., a Cas protein. In some embodiments, the DNA-binding domain comprises a zinc finger nuclease (ZFN) or a transcription activator like effector domain nuclease (TALEN), where one or more zinc finger motifs or TALE motifs are associated with one or more nucleases, e.g., a Fok I nuclease domain.

[0133] In some embodiments, the DNA-binding domain comprises a nuclease activity. In some embodiments, the DNA-binding domain of a prime editor comprises an endonuclease domain having single strand DNA cleavage activity. For example, the endonuclease domain may comprise a FokI nuclease domain. In some embodiments, the DNA-binding domain of a prime editor comprises a nuclease having full nuclease activity. In some embodiments, the DNA-binding domain of a prime editor comprises a nuclease having modified or reduced nuclease activity as compared to a wild type endonuclease domain. For example, the endonuclease domain may comprise one or more amino acid substitutions as compared to a wild type endonuclease domain. In some embodiments, the DNA-binding domain of a prime editor has a nickase activity. In some embodiments, the DNA-binding domain of a prime editor comprises a Cas protein domain that is a nickase. In some embodiments, compared to a wild type Cas protein, the Cas nickase comprises one or more amino acid substitutions in a nuclease domain that reduces or abolishes its double strand nuclease activity but retains DNA binding activity. In some embodiments, the Cas nickase comprises an amino acid substitution in a HNH domain. In some embodiments, the Cas nickase comprises an amino acid substitution in a RuvC domain.

[0134] In some embodiments, the DNA-binding domain comprises a CRISPR associated protein (Cas protein) domain. A Cas protein may be a Class 1 or a Class 2 Cas protein. A Cas protein can be a type I, type II, type III, type IV, type V Cas protein, or a type VI Cas protein. Non-limiting examples of Cas proteins include Cas1, Cas1B, Cas2, Cas3, Cas4, Cas5, Cas5d, Cas5t, Cas5h, Cas5a, Cas6, Cas7, Cas8, Cas8a, Cas8b, Cas8c, Cas9 (e.g., Csn1 or Csx12), Cas10, Cas10d, Cas12a/Cpf1, Cas12b/C2c1, Cas12c/C2c3, Cas12d/CasY, Cas12e/CasX, Cas12g, Cas12h, Cas12i, Csy1, Csy2, Csy3, Csy4, Cse1, Cse2, Cse3, Cse4, Cse5e, Csc1, Csc2, Csa5, Csn1, Csn2, Csm1, Csm2, Csm3, Csm4, Csm5, Csm6, Cmr1, Cmr3, Cmr4, Cmr5, Cmr6, Csb1, Csb2, Csb3, Csx17, Csx14, Csx10, Csx16, CsaX, Csx3, Csx1, Csx1S, Csx11, Csf1, Csf2, CsO, Csf4, Csd1, Csd2, Cst1, Cst2, Csh1, Csh2, Csa1, Csa2, Csa3, Csa4, Csa5, Type II Cas effector proteins, Type V Cas effector proteins, Type VI Cas effector proteins, CARF, DinG, Cpf1, Cas12b/C2c1, Cas12c/C2c3, Cas12b/C2c1, Cas12c/C2c3, SpCas9(K855A), eSpCas9(1.1), SpCas9-HF1, hyper accurate Cas9 variant (HypaCas9), Cas Φ, and homologues, modified or engineered variants, mutants, and/or functional fragments thereof. A Cas protein can be a chimeric Cas protein that is fused to other proteins or polypeptides. A Cas protein can be a chimera of various Cas proteins, for example, comprising domains of Cas proteins from different organisms. A Cas protein, e.g., Cas9, can be from any suitable organism. In some aspects, the organism is Streptococcus pyogenes (S. pyogenes). In some aspects, the organism is Staphylococcus aureus (S. aureus). In some aspects, the organism is Streptococcus thermophilus (S. thermophilus). In some embodiments, the organism is Staphylococcus lugdunensis.

[0135] Non-limiting examples of suitable organism include Streptococcus pyogenes, Streptococcus thermophilus, Streptococcus sp., Staphylococcus aureus, Nocardiopsis dassonvillei, Streptomyces pristinae spiralis, Streptomyces viridochromo genes, Streptomyces viridochromogenes, Streptosporangium roseum, Streptosporangium roseum, AlicyclobacHlus acidocaldarius, Bacillus pseudomycoides, Bacillus selenitireducens, Exiguobacterium sibiricum, Lactobacillus delbrueckii, Lactobacillus salivarius, Microscilla marina, Burkholderiales bacterium, Polaromonas naphthalenivorans, Polaromonas sp., Crocosphaera watsonii, Cyanothece sp., Microcystis aeruginosa, Pseudomonas aeruginosa, Synechococcus sp., Acetohalobium arabaticum, Ammonifex degensii, Caldicelulosiruptor becscii, Candidatus Desulforudis, Clostridium botulinum, Clostridium difficile, Finegoldia magna, Natranaerobius thermophilus, Pelotomaculum thermopropionicum, Acidithiobacillus caldus, Acidithiobacillus ferrooxidans, Allochromatium vinosum, Marinobacter sp., Nitrosococcus halophilus, Nitrosococcus watsoni, Pseudoalteromonas haloplanktis, Ktedonobacter racemifer, Methanohalobium evestigatum, Anabaena variabilis, Nodularia spumigena, Nostoc sp., Arthrospira maxima, Arthrospira platensis, Arthrospira sp., Lyngbya sp., Microcoleus chthonoplastes, Oscillatoria sp., Petrotoga mobilis, Thermosipho africanus, Acaryochloris marina, Leptotrichia shahii, and Francisella novicida. In some embodiments, the organism is Streptococcus pyogenes (S. pyogenes). In some embodiments, the organism is Staphylococcus aureus (S. aureus). In some embodiments, the organism is Streptococcus thermophilus (S. thermophilus). In some embodiments, the organism is Staphylococcus lugdunensis (S. lugdunensis).

[0136] In some embodiments, a Cas protein can be derived from a variety of bacterial species including, but not limited to, Veillonella atypical, Fusobacterium nucleatum, Filifactor alocis, Solobacterium moorei, Coprococcus catus, Treponema denticola, Peptoniphilus duerdenii, Catenibacterium mitsuokai, Streptococcus mutans, Listeria innocua, Staphylococcus pseudintermedius, Acidaminococcus intestine, Olsenella uli, Oenococcus kitaharae, Bifidobacterium bifidum, Lactobacillus rhamnosus, Lactobacillus gasseri, Finegoldia magna, Mycoplasma mobile, Mycoplasma gallisepticum, Mycoplasma ovipneumoniae, Mycoplasma canis, Mycoplasma synoviae, Eubacterium rectale, Streptococcus thermophilus, Eubacterium dolichum, Lactobacillus coryniformis subsp. Torquens, Ilyobacter polytropus, Ruminococcus albus, Akkermansia muciniphila, Acidothermus cellulolyticus, Bifidobacterium longum, Bifidobacterium dentium, Corynebacterium diphtheria, Elusimicrobium minutum, Nitratifractor salsuginis, Sphaerochaeta globus, Fibrobacter succinogenes subsp. Succinogenes, Bacteroides fragilis, Capnocytophaga ochracea, Rhodopseudomonas palustris, Prevotella micans, Prevotella ruminicola, Flavobacterium columnare, Aminomonas paucivorans, Rhodospirillum rubrum, Candidatus Puniceispirillum marinum, Verminephrobacter eiseniae, Ralstonia syzygii, Dinoroseobacter shibae, Azospirillum, Nitrobacter hamburgensis, Bradyrhizobium, Wolinella succinogenes, Campylobacter jejuni subsp. Jejuni, Helicobacter mustelae, Bacillus cereus, Acidovorax ebreus, Clostridium perfringens, Parvibaculum lavamentivorans, Roseburia intestinalis, Neisseria meningitidis, Pasteurella multocida subsp. Multocida, Sutterella wadsworthensis, proteobacterium, Legionella pneumophila, Parasutterella excrementihominis, Wolinella succinogenes, and Francisella novicida.

[0137] In some embodiments, a Cas protein, e.g., Cas9, can be a wild type or a modified form of a Cas protein. In some embodiments, a Cas protein, e.g., Cas9, can be a nuclease active variant, nuclease inactive variant, a nickase, or a functional variant or a functional fragment of a wild type Cas protein. In some embodiments, a Cas protein, e.g., Cas9, can be a wild type or a modified form of a Cas protein. A Cas protein, e.g., Cas9, can be a nuclease active variant, nuclease inactive variant, a nickase, or a functional variant or functional fragment of a wild type Cas protein. In some embodiments, a Cas protein, e.g., Cas9, can comprise an amino acid change such as a deletion, insertion, substitution, fusion, chimera, or any combination thereof relative to a corresponding wild-type version of the Cas protein. In some embodiments, a Cas protein can be a polypeptide with at least about 50%, 60%, 70%, 80%, 90%, 91%, 92%, 93%, 94%, 95%, 96%, 97%, 98%, 99%, or 100% sequence identity or sequence similarity to a wild type exemplary Cas protein.

[0138] A Cas protein, e.g., Cas9, may comprise one or more domains. Non-limiting examples of Cas domains include, guide nucleic acid recognition and/or binding domain, nuclease domains (e.g., DNase or RNase domains, RuvC, HNH), DNA binding domain, RNA binding domain, helicase domains, protein-protein interaction domains, and dimerization domains. In various embodiments, a Cas protein comprises a guide nucleic acid recognition and/or binding domain can interact with a guide nucleic acid, and one or more nuclease domains that comprise catalytic activity for nucleic acid cleavage.

[0139] In some embodiments, a Cas protein, e.g., Cas9, comprises one or more nuclease domains. A Cas protein can comprise an amino acid sequence having at least about 50%, 60%, 70%, 80%, 90%, 91%, 92%, 93%, 94%, 95%, 96%, 97%, 98%, 99%, or 100% sequence identity to a nuclease domain (e.g., RuvC domain, HNH domain) of a wild-type Cas protein. In some embodiments, a Cas protein comprises a single nuclease domain. For example, a Cpf1 may comprise a RuvC domain but lacks HNH domain. In some embodiments, a Cas protein comprises two nuclease domains, e.g., a Cas9 protein can comprise an HNH nuclease domain and a RuvC nuclease domain.

[0140] In some embodiments, a prime editor comprises a Cas protein, e.g., Cas9, wherein all nuclease domains of the Cas protein are active. In some embodiments, a prime editor comprises a Cas protein having one or more inactive nuclease domains. One or a plurality of the nuclease domains (e.g., RuvC, HNH) of a Cas protein can be deleted or mutated so that they are no longer functional or comprise reduced nuclease activity. In some embodiments, a Cas protein, e.g., Cas9, comprising mutations in a nuclease domain has reduced (e.g., nickase) or abolished nuclease activity while maintaining its ability to target a nucleic acid locus at a search target sequence when complexed with a guide nucleic acid, e.g., a PEgRNA.

[0141] In some embodiments, a prime editor comprises a Cas nickase that can bind to the target gene in a sequence-specific manner and generate a single-strand break at a protospacer within double-stranded DNA in the target gene, but not a double-strand break. For example, the Cas nickase can cleave the edit strand or the non-edit strand of the target gene, but may not cleave both. In some embodiments, a prime editor comprises a Cas nickase comprising two nuclease domains (e.g., Cas9), with one of the two nuclease domains modified to lack catalytic activity or deleted. In some embodiments, the Cas nickase of a prime editor comprises a nuclease inactive RuvC domain and a nuclease active HNH domain. In some embodiments, the Cas nickase of a prime editor comprises a nuclease inactive HNH domain and a nuclease active RuvC domain. In some embodiments, a prime editor comprises a Cas9 nickase having an amino acid substitution in the RuvC domain e.g., an amino acid substitution that reduces or abolishes nuclease activity of the RuvC domain. In some embodiments, the Cas9 nickase comprises a D10X amino acid substitution compared to a wild type S. pyogenes Cas9, wherein X is any amino acid other than D. In some embodiments, a prime editor comprises a Cas9 nickase having an amino acid substitution in the HNH domain e.g., an amino acid substitution that reduces or abolishes nuclease activity of the HNH domain. In some embodiments, the Cas9 nickase comprises a H840X amino acid substitution compared to a wild type S. pyogenes Cas9, wherein X is any amino acid other than H.

[0142] In some embodiments, a prime editor comprises a Cas protein that can bind to the target gene in a sequence-specific manner but lacks or has abolished nuclease activity and may not cleave either strand of a double stranded DNA in a target gene. Abolished activity or lacking activity can refer to an enzymatic activity less than 1%, less than 2%, less than 3%, less than 4%, less than 5%, less than 6%, less than 7%, less than 8%, less than 9%, or less than 10% activity compared to a wild-type exemplary activity (e.g., wild-type Cas9 nuclease activity). In some embodiments, a Cas protein of a prime editor completely lacks nuclease activity. A nuclease, e.g., Cas9, that lacks nuclease activity may be referred to as nuclease inactive or “nuclease dead” (abbreviated by “d”). A nuclease dead Cas protein (e.g., dCas, dCas9) can bind to a target polynucleotide but may not cleave the target polynucleotide. In some embodiments, a dead Cas protein is a dead Cas9 protein. In some embodiments, a prime editor comprises a nuclease dead Cas protein wherein all of the nuclease domains (e.g., both RuvC and HNH nuclease domains in a Cas9 protein; RuvC nuclease domain in a Cpf1 protein) are mutated to lack catalytic activity, or are deleted.

[0143] A Cas protein can be modified. A Cas protein, e.g., Cas9, can be modified to increase or decrease nucleic acid binding affinity, nucleic acid binding specificity, and/or enzymatic activity. Cas proteins can also be modified to change any other activity or property of the protein, such as stability. For example, one or more nuclease domains of the Cas protein can be modified, deleted, or inactivated, or a Cas protein can be truncated to remove domains that are not essential for the function of the protein or to optimize (e.g., enhance or reduce) the activity of the Cas protein.

[0144] A Cas protein can be a fusion protein. For example, a Cas protein can be fused to a cleavage domain, an epigenetic modification domain, a transcriptional regulation domain, or a polymerase domain. A Cas protein can also be fused to a heterologous polypeptide providing increased or decreased stability. The fused domain or heterologous polypeptide can be located at the N-terminus, the C-terminus, or internally within the Cas protein.

[0145] In some embodiments, the Cas protein of a prime editor is a Class 2 Cas protein. In some embodiments, the Cas protein is a type II Cas protein. In some embodiments, the Cas protein is a Cas9 protein, a modified version of a Cas9 protein, a Cas9 protein homolog, mutant, variant, or a functional fragment thereof. As used herein, a Cas9, Cas9 protein, Cas9 polypeptide or a Cas9 nuclease refers to an RNA guided nuclease comprising one or more Cas9 nuclease domains and a Cas9 gRNA binding domain having the ability to bind a guide polynucleotide, e.g., a PEgRNA. A Cas9 protein may refer to a wild type Cas9 protein from any organism or a homolog, ortholog, or paralog from any organisms; any functional mutants or functional variants thereof; or any functional fragments or domains thereof. In some embodiments, a prime editor comprises a full-length Cas9 protein. In some embodiments, the Cas9 protein can generally comprises at least about 50%, 60%, 70%, 80%, 90%, 100% sequence identity to a wild type reference Cas9 protein (e.g., Cas9 from S. pyogenes). In some embodiments, the Cas9 comprises an amino acid change such as a deletion, insertion, substitution, fusion, chimera, or any combination thereof as compared to a wild type reference Cas9 protein.

[0146] In some embodiments, a Cas9 protein may comprise a Cas9 protein from Streptococcus pyogenes (Sp), Staphylococcus aureus (Sa), Streptococcus canis (Sc), Streptococcus thermophilus (St), Staphylococcus lugdunensis (Slu), Neisseria meningitidis (Nm), Campylobacter jejuni (Cj), Francisella novicida (Fn), or Treponema denticola (Td), or any Cas9 homolog or ortholog from an organism known in the art. In some embodiments, a Cas9 polypeptide is a SpCas9 polypeptide, e.g., comprising an amino acid sequence as set forth in NCBI Accession No. WP_038431314 or a fragment or variant thereof. In some embodiments, a Cas9 polypeptide is a SaCas9 polypeptide, e.g., comprising an amino acid sequence as set forth in Uniprot Accession No. J7RUA5 or a fragment or variant thereof. In some embodiments, a Cas9 polypeptide is a ScCas9 polypeptide, e.g., comprising an amino acid sequence as set forth in Uniprot Accession No. A0A3P5YA78 or a fragment or variant thereof. In some embodiments, a Cas9 polypeptide is a StCas9 polypeptide, e.g., comprising an amino acid sequence as set forth in NCBI Accession No. WP_007896501.1 or a fragment or variant thereof. In some embodiments, a Cas9 polypeptide is a SluCas9 polypeptide, e.g., comprising an amino acid sequence as set forth in any of NCBI Accession No. WP_230580236.1 or WP_250638315.1 or WP_242234150.1, WP_241435384.1, WP_002460848.1, KAK58371.1, or a fragment or variant thereof. In some embodiments, a Cas9 polypeptide is a NmCas9 polypeptide, e.g., comprising an amino acid sequence as set forth in any of NCBI Accession No. WP_002238326.1 or WP_061704949.1 or a fragment or variant thereof. In some embodiments, a Cas9 polypeptide is a CjCas9 polypeptide, e.g., comprising an amino acid sequence as set forth in any of NCBI Accession No. WP 100612036.1, WP_116882154.1, WP_116560509.1, WP_116484194.1, WP_116479303.1, WP_115794652.1, WP_100624872.1, or a fragment or variant thereof. In some embodiments, a Cas9 polypeptide is a FnCas9 polypeptide, e.g., comprising the amino acid sequence as set forth in Uniprot Accession No. AOQ5Y3 or a fragment or variant thereof. In some embodiments, a Cas9 polypeptide is a TdCas9 polypeptide, e.g., comprising the amino acid sequence as set forth in NCBI Accession No. WP_147625065.1 or a fragment or variant thereof. In some embodiments, a Cas9 polypeptide is a chimera comprising domains from two or more of the organisms described herein or those known in the art. In some embodiments, a Cas9 polypeptide is a Cas9 polypeptide from Streptococcus macacae, e.g., comprising the amino acid sequence as set forth in NCBI Accession No. WP_003079701.1 or a fragment or variant thereof. In some embodiments, a Cas9 polypeptide is a Cas9 polypeptide generated by replacing a PAM interaction domain of a SpCas9 with that of a Streptococcus macacae Cas9 (Spy-mac Cas9). Exemplary Cas sequences are provided in Table 79 below.

[0147] In some embodiments, a Cas9 protein comprises an amino acid sequence that is at least 50%, at least 60%, at least 70%, at least 75%, at least 80%, 85%, at least 86%, at least 87%, at least 88%, at least 89%, at least 90%, at least 91%, at least 92%, at least 93%, at least 94%, at least 95%, at least 96%, at least 97%, at least 98%, at least 99%, or 100% identical to any one of the sequences set forth in SEQ ID NOs: 34406, 34364-34390. In some embodiments, a Cas9 protein is a Cas9 nickase that comprises an amino acid sequence that is at least 50%, at least 60%, at least 70%, at least 75%, at least 80%, 85%, at least 86%, at least 87%, at least 88%, at least 89%, at least 90%, at least 91%, at least 92%, at least 93%, at least 94%, at least 95%, at least 96%, at least 97%, at least 98%, at least 99%, or 100% identical to any one of the sequences set forth in SEQ ID NOs: 34406, 34365, 34366, 34368, 34369, 34371, 34372, 34374, 34375, 34377, 34378, 34380, 34381, 34383, 34384, 34386, 34387, 34389, or 34390. In some embodiments, a Cas9 protein comprises an amino acid sequence that is selected from the group consisting of SEQ ID NOs: 34406, 34364-34390. In some embodiments, a prime editor comprises a Cas9 protein that comprises an amino acid sequence that lacks a N-terminus methionine relative to an amino acid sequence set forth in any one of SEQ ID NOs: 34364, 34365, 34367, 34368, 34370, 34371, 34373, 34374, 34376, 34377, 34379, 34380, 34382, 34383, 34385, 34386, 34388, or 34389. In some embodiments, the prime editing compositions or prime editing systems disclosed herein comprises a polynucleotide (e.g., a DNA, or an RNA, e.g., an mRNA) that encodes a Cas9 protein that comprises an amino acid sequence that is at least 50%, at least 60%, at least 70%, at least 75%, at least 80%, 85%, at least 86%, at least 87%, at least 88%, at least 89%, at least 90%, at least 91%, at least 92%, at least 93%, at least 94%, at least 95%, at least 96%, at least 97%, at least 98%, at least 99%, or 100% identical to any one of the sequences set forth in SEQ ID NOs: 34406, 34364-34390.

[0148] In some embodiments, a Cas9 protein comprises a Cas9 protein from Streptococcus pyogenes (Sp), e.g., as according to NC_002737.2:854751-858857 or the protein encoded by UniProt Q99ZW2, e.g., as according to SEQ ID NO: 34364. In some embodiments, a prime editor comprises a Cas9 protein (e.g., a SpCas9) as according to any one of the sequences set forth in SEQ ID NOs: 34406, 34364-34366 or a variant thereof. In some embodiments, the Cas9 protein is a SpCas9. In some embodiments, a SpCas9 can be a wild type SpCas9, a SpCas9 variant, or a nickase SpCas9. In some embodiments, the SpCas9 lacks the N-terminus methionine relative to a corresponding SpCas9 (e.g., a wild type SpCas9, a SpCas9 variant or a nickase SpCas9). In some embodiments, a prime editor comprises a Cas9 protein, having an amino acid sequence as according to SEQ ID NO: 34364, not including the N-terminus methionine. In some embodiments, a wild type SpCas9 comprises an amino acid sequence set forth in SEQ ID NO: 34364. In some embodiments, a prime editor comprises a Cas9 protein comprising one or more mutations (e.g., amino acid substitutions, insertions and/or deletions) relative to a corresponding wild type Cas9 protein (e.g., a wild type SpCas9). In some embodiments, the Cas9 protein comprising one or more mutations relative to a wild type Cas9 (e.g., a wild type SpCas9) protein comprises an amino acid sequence set forth in SEQ ID NO: 34365, SEQ ID NO: 34366 or SEQ ID NO: 34406. Exemplary Streptococcus pyogenes Cas9 (SpCas9) amino acid sequence useful in the prime editors disclosed herein are provided below in SEQ ID NOs: 34406, 34364-34366.

[0149] In some embodiments, a prime editor comprises a Cas9 protein (e.g., a SluCas9) as according to any one of the SEQ ID NOS: 34367-34369 or a variant thereof. In some embodiments, a prime editor comprises a Cas9 protein from Staphylococcus lugdunensis (SluCas9) e.g., as according to any one of the SEQ ID NOs: 34367-34369 or a variant thereof. In some embodiments, the Cas9 protein is a SluCas9. In some embodiments, a SluCas9 can be a wild type SluCas9, a SluCas9 variant, or a nickase SluCas9. In some embodiments, the SluCas9 lacks the N-terminus methionine relative to a corresponding SluCas9 (e.g., a wild type SluCas9, a SluCas9 variant or a nickase SluCas9). In some embodiments, a prime editor comprises a Cas9 protein, having an amino acid sequence as according to SEQ ID NO: 34367, not including the N-terminus methionine. In some embodiments, a wild type SluCas9 comprises an amino acid sequence set forth in SEQ ID NO: 34367. In some embodiments, a prime editor comprises a Cas9 protein comprising one or more mutations (e.g., amino acid substitutions, insertions and/or deletions) relative to a corresponding wild type Cas9 protein (e.g., a wild type SluCas9). In some embodiments, the Cas9 protein comprising one or mutations relative to a wild type Cas9 protein comprises an amino acid sequence set forth in SEQ ID NO: 34368 or SEQ ID NO: 34369. Exemplary Staphylococcus lugdunensis Cas9 (SluCas9) amino acid sequence useful in the prime editors disclosed herein are provided below in SEQ ID NOs: 34367-34369.

[0150] In some embodiments, a prime editor comprises a Cas9 protein from Staphylococcus aureus (SaCas9) e.g., as according to any of the SEQ ID NOS: 34370-34372, or a variant thereof. In some embodiments, a prime editor comprises a Cas9 protein from Staphylococcus aureus (SaCas9) e.g., as according to any one of the SEQ ID NOS: 34370-34372, or a variant thereof. In some embodiments, the Cas9 protein is a SaCas9. In some embodiments, a SaCas9 can be a wild type SaCas9, a SaCas9 variant, or a nickase SaCas9. In some embodiments, the SaCas9 lacks the N-terminus methionine relative to a corresponding SaCas9 (e.g., a wild type SaCas9, a SaCas9 variant or a nickase SaCas9). In some embodiments, a prime editor comprises a Cas9 protein, having an amino acid sequence as according to SEQ ID NO: 34370, not including the N-terminus methionine. In some embodiments, a wild type SaCas9 comprises an amino acid sequence set forth in SEQ ID NO: 34370. In some embodiments, a prime editor comprises a Cas9 protein comprising one or more mutations (e.g., amino acid substitutions, insertions and/or deletions relative to a corresponding wild type Cas9 protein (e.g., a wild type SaCas9). In some embodiments, the Cas9 protein comprising one or more mutations relative to a wild type Cas9 protein comprises an amino acid sequence set forth in SEQ ID NO: 34371 or SEQ ID NO: 34372. Exemplary Staphylococcus aureus Cas9 (SaCas9) amino acid sequence useful in the prime editors disclosed herein are provided below in SEQ ID NOs: 34370-34372.

[0151] In some embodiments, a prime editor comprises a Cas protein, e.g., a Cas9 variant, comprising modifications that allow altered PAM recognition. Exemplary Cas9 protein amino acid sequence (e.g., Cas9 variant with altered PAM recognition specificities) that are useful in the Prime editors of the disclosure are provided below in SEQ ID NOs 34373-34381, 34388-34390. In some embodiments, a prime editor comprises a Cas9 protein as according to any one of the sequences set forth in SEQ ID NOs: 34373-34381, 34388-34390 or a variant thereof. In some embodiments, the Cas9 protein is a Cas9 variant, for example, a SpCas9 variant (e.g., SpCas9-NG, SpCas9-NGA, SpRY, or SpG). In some embodiments, the Cas9 protein lacks the N-terminus methionine relative to a corresponding Cas9 protein (e.g., a Cas9 variant set forth in any one of SEQ ID NOs: 34373, 34376, 34379, or 34388). In some embodiments, a prime editor comprises a Cas9 protein (e.g., a Cas9 variant), having an amino acid sequence as according to any one of SEQ ID NOs: 34373, 34376, 34379, or 34388 not including the N-terminus methionine. In some embodiments, a prime editor comprises a Cas9 protein comprising one or more mutations (e.g., amino acid substitutions, insertions and/or deletions) relative to a corresponding Cas9 protein (e.g., a Cas9 protein set forth in any one of SEQ ID NOs: 34373, 34376, 34379, or 34388). In some embodiments, the Cas9 protein comprising one or mutations relative to a corresponding Cas9 protein comprises an amino acid sequence set forth in any one of SEQ ID NOs: 34374, 34375, 34377, 34378, 34380, 34381, 34389, or 34390.

[0152] In some embodiments, a Cas9 protein is a chimeric Cas9, e.g., modified Cas9, e.g., synthetic RNA-guided nucleases (sRGNs), e.g., modified by DNA family shuffling, e.g., sRGN3.1, sRGN3.3. In some embodiments, the DNA family shuffling comprises, fragmentation and reassembly of parental Cas9 genes, e.g., one or more of Cas9s from Staphylococcus hyicus (Shy), Staphylococcus lugdunensis (Slu), Staphylococcus microti (Smi), and Staphylococcus pasteuri (Spa). In some embodiments, a modified sluCas9 shows increased editing efficiency and/or specificity relative to a sluCas9 that is not modified. In some embodiments, a modified Cas9, e.g., a sRGN shows at least 10%, at least 20%, at least 30%, at least 40%, at least 50%, at least 60%, at least 70%, at least 80%, at least 90%, at least 100%, at least 150%, at least 200%, at least 300%, at least 400%, at least 500%, at least 600%, at least 700%, at least 800%, at least 900%, or at least 1000% increase in editing efficiency compared to a Cas9 that is not modified. In some embodiments, a Cas9, e.g., a sRGN shows at least 10%, at least 20%, at least 30%, at least 40%, at least 50%, at least 60%, at least 70%, at least 80%, at least 90%, at least 100%, at least 150%, at least 200%, at least 300%, at least 400%, at least 500%, at least 600%, at least 700%, at least 800%, at least 900%, or at least 1000% increase in specificity compared to a Cas9 that is not modified. In some embodiments, a Cas9, e.g., a sRGN shows at least 10%, at least 20%, at least 30%, at least 40%, at least 50%, at least 60%, at least 70%, at least 80%, at least 90%, at least 100%, at least 150%, at least 200%, at least 300%, at least 400%, at least 500%, at least 600%, at least 700%, at least 800%, at least 900%, or at least 1000% increase in cleavage activity compared to a Cas9 that is not modified. In some embodiments, a Cas9, e.g., a sRGN shows ability to cleave a 5′-NNGG-3′ PAM-containing target. In some embodiments, a prime editor comprises a Cas9 protein (e.g., a chimeric Cas9), e.g., as according any one of the sequences set forth in SEQ ID NOs: 34382-34387, or a variant thereof. Exemplary amino acid sequences of Cas9 protein (e.g., sRGN) useful in the prime editors disclosed herein are provided below in SEQ ID NOs: 34382-34387. In some embodiments, a prime editor comprises a Cas9 protein, that lacks a N-terminus methionine relative to SEQ ID NO: 34382 or SEQ ID NO: 34385. In some embodiments, a prime editor comprises a Cas9 protein comprising one or more mutations (e.g., amino acid substitutions, insertions and/or deletions) relative to a corresponding Cas9 protein (e.g., a Cas9 protein set forth in SEQ ID NO: 34382 or SEQ ID NO: 34385). In some embodiments, the Cas9 protein comprising one or mutations relative to a corresponding Cas9 protein comprises an amino acid sequence set forth in any one of SEQ ID NOs: 34383, 34384, 34386, or 34387.

TABLE 79
Exemplary Cas protein sequences

| SEQ | Sequence | |
|---|---|---|
| ID NO: | description | Amino acid sequence |
| 34364 | wild type | MDKKYSIGLDIGTNSVGWAVITDEYKVPSKKFKVLGNTDRHSIKKNLIGALLFDSGE |
| | Streptococcus | TAEATRLKRTARRRYTRRKNRICYLQEIFSNEMAKVDDSFFHRLEESFLVEEDKKHE |
| | Pyogenes Cas9 | RHPIFGNIVDEVAYHEKYPTIYHLRKKLVDSTDKADLRLIYLALAHMIKFRGHFLIEG |
| | (SpCas9) | DLNPDNSDVDKLFIQLVQTYNQLFEENPINASGVDAKAILSARLSKSRRLENLIAQLP |
| | | GEKKNGLFGNLIALSLGLTPNFKSNFDLAEDAKLQLSKDTYDDDLDNLLAQIGDQY |
| | | ADLFLAAKNLSDAILLSDILRVNTEITKAPLSASMIKRYDEHHQDLTLLKALVRQQLP |
| | | EKYKEIFFDQSKNGYAGYIDGGASQEEFYKFIKPILEKMDGTEELLVKLNREDLLRK |
| | | QRTFDNGSIPHQIHLGELHAILRRQEDFYPFLKDNREKIEKILTFRIPYYVGPLARGNS |
| | | RFAWMTRKSEETITPWNFEEVVDKGASAQSFIERMTNFDKNLPNEKVLPKHSLLYE |
| | | YFTVYNELTKVKYVTEGMRKPAFLSGEQKKAIVDLLFKTNRKVTVKQLKEDYFKKI |
| | | ECFDSVEISGVEDRFNASLGTYHDLLKIIKDKDFLDNEENEDILEDIVLTLTLFEDREM |
| | | IEERLKTYAHLFDDKVMKQLKRRRYTGWGRLSRKLINGIRDKQSGKTILDFLKSDGF |
| | | ANRNFMQLIHDDSLTFKEDIQKAQVSGQGDSLHEHIANLAGSPAIKKGILQTVKVVD |
| | | ELVKVMGRHKPENIVIEMARENQTTQKGQKNSRERMKRIEEGIKELGSQILKEHPVE |
| | | NTQLQNEKLYLYYLQNGRDMYVDQELDINRLSDYDVDHIVPQSFLKDDSIDNKVLT |
| | | RSDKNRGKSDNVPSEEVVKKMKNYWRQLLNAKLITQRKFDNLTKAERGGLSELDK |
| | | AGFIKRQLVETRQITKHVAQILDSRMNTKYDENDKLIREVKVITLKSKLVSDFRKDF |
| | | QFYKVREINNYHHAHDAYLNAVVGTALIKKYPKLESEFVYGDYKVYDVRKMIAKS |
| | | EQEIGKATAKYFFYSNIMNFFKTEITLANGEIRKRPLIETNGETGEIVWDKGRDFATV |
| | | RKVLSMPQVNIVKKTEVQTGGFSKESILPKRNSDKLIARKKDWDPKKYGGFDSPTV |
| | | AYSVLVVAKVEKGKSKKLKSVKELLGITIMERSSFEKNPIDFLEAKGYKEVKKDLIIK |
| | | LPKYSLFELENGRKRMLASAGELQKGNELALPSKYVNFLYLASHYEKLKGSPEDNE |
| | | QKQLFVEQHKHYLDEIIEQISEFSKRVILADANLDKVLSAYNKHRDKPIREQAENIIH |
| | | LFTLTNLGAPAAFKYFDTTIDRKRYTSTKEVLDATLIHQSITGLYETRIDLSQLGGD |
| 34365 | SpCas9 H840A | MDKKYSIGLDIGTNSVGWAVITDEYKVPSKKFKVLGNTDRHSIKKNLIGALLFDSGE |
| | nickase | TAEATRLKRTARRRYTRRKNRICYLQEIFSNEMAKVDDSFFHRLEESFLVEEDKKHE |
| | | RHPIFGNIVDEVAYHEKYPTIYHLRKKLVDSTDKADLRLIYLALAHMIKFRGHFLIEG |
| | | DLNPDNSDVDKLFIQLVQTYNQLFEENPINASGVDAKAILSARLSKSRRLENLIAQLP |
| | | GEKKNGLFGNLIALSLGLTPNFKSNFDLAEDAKLQLSKDTYDDDLDNLLAQIGDQY |
| | | ADLFLAAKNLSDAILLSDILRVNTEITKAPLSASMIKRYDEHHQDLTLLKALVRQQLP |
| | | EKYKEIFFDQSKNGYAGYIDGGASQEEFYKFIKPILEKMDGTEELLVKLNREDLLRK |
| | | QRTFDNGSIPHQIHLGELHAILRRQEDFYPFLKDNREKIEKILTFRIPYYVGPLARGNS |
| | | RFAWMTRKSEETITPWNFEEVVDKGASAQSFIERMTNFDKNLPNEKVLPKHSLLYE |
| | | YFTVYNELTKVKYVTEGMRKPAFLSGEQKKAIVDLLFKTNRKVTVKQLKEDYFKKI |
| | | ECFDSVEISGVEDRFNASLGTYHDLLKIIKDKDFLDNEENEDILEDIVLTLTLFEDREM |
| | | IEERLKTYAHLFDDKVMKQLKRRRYTGWGRLSRKLINGIRDKQSGKTILDFLKSDGF |
| | | ANRNFMQLIHDDSLTFKEDIQKAQVSGQGDSLHEHIANLAGSPAIKKGILQTVKVVD |
| | | ELVKVMGRHKPENIVIEMARENQTTQKGQKNSRERMKRIEEGIKELGSQILKEHPVE |
| | | NTQLQNEKLYLYYLQNGRDMYVDQELDINRLSDYDVDAIVPQSFLKDDSIDNKVLT |
| | | RSDKNRGKSDNVPSEEVVKKMKNYWRQLLNAKLITQRKFDNLTKAERGGLSELDK |
| | | AGFIKRQLVETRQITKHVAQILDSRMNTKYDENDKLIREVKVITLKSKLVSDFRKDF |
| | | QFYKVREINNYHHAHDAYLNAVVGTALIKKYPKLESEFVYGDYKVYDVRKMIAKS |
| | | EQEIGKATAKYFFYSNIMNFFKTEITLANGEIRKRPLIETNGETGEIVWDKGRDFATV |
| | | RKVLSMPQVNIVKKTEVQTGGFSKESILPKRNSDKLIARKKDWDPKKYGGFDSPTV |
| | | AYSVLVVAKVEKGKSKKLKSVKELLGITIMERSSFEKNPIDFLEAKGYKEVKKDLIIK |
| | | LPKYSLFELENGRKRMLASAGELQKGNELALPSKYVNFLYLASHYEKLKGSPEDNE |
| | | QKQLFVEQHKHYLDEIIEQISEFSKRVILADANLDKVLSAYNKHRDKPIREQAENIIH |
| | | LFTLTNLGAPAAFKYFDTTIDRKRYTSTKEVLDATLIHQSITGLYETRIDLSQLGGD |
| 34366 | Met (-) SpCas9 | DKKYSIGLDIGTNSVGWAVITDEYKVPSKKFKVLGNTDRHSIKKNLIGALLFDSGET |
| | H840A nickase | AEATRLKRTARRRYTRRKNRICYLQEIFSNEMAKVDDSFFHRLEESFLVEEDKKHER |
| | | HPIFGNIVDEVAYHEKYPTIYHLRKKLVDSTDKADLRLIYLALAHMIKFRGHFLIEGD |
| | | LNPDNSDVDKLFIQLVQTYNQLFEENPINASGVDAKAILSARLSKSRRLENLIAQLPG |
| | | EKKNGLFGNLIALSLGLTPNFKSNFDLAEDAKLQLSKDTYDDDLDNLLAQIGDQYA |
| | | DLFLAAKNLSDAILLSDILRVNTEITKAPLSASMIKRYDEHHQDLTLLKALVRQQLPE |
| | | KYKEIFFDQSKNGYAGYIDGGASQEEFYKFIKPILEKMDGTEELLVKLNREDLLRKQ |
| | | RTFDNGSIPHQIHLGELHAILRRQEDFYPFLKDNREKIEKILTFRIPYYVGPLARGNSR |
| | | FAWMTRKSEETITPWNFEEVVDKGASAQSFIERMTNFDKNLPNEKVLPKHSLLYEY |
| | | FTVYNELTKVKYVTEGMRKPAFLSGEQKKAIVDLLFKTNRKVTVKQLKEDYFKKIE |
| | | CFDSVEISGVEDRFNASLGTYHDLLKIIKDKDFLDNEENEDILEDIVLTLTLFEDREMI |
| | | EERLKTYAHLFDDKVMKQLKRRRYTGWGRLSRKLINGIRDKQSGKTILDFLKSDGF |
| | | ANRNFMQLIHDDSLTFKEDIQKAQVSGQGDSLHEHIANLAGSPAIKKGILQTVKVVD |
| | | ELVKVMGRHKPENIVIEMARENQTTQKGQKNSRERMKRIEEGIKELGSQILKEHPVE |
| | | NTQLQNEKLYLYYLQNGRDMYVDQELDINRLSDYDVDAIVPQSFLKDDSIDNKVLT |
| | | RSDKNRGKSDNVPSEEVVKKMKNYWRQLLNAKLITQRKFDNLTKAERGGLSELDK |
| | | AGFIKRQLVETRQITKHVAQILDSRMNTKYDENDKLIREVKVITLKSKLVSDFRKDF |
| | | QFYKVREINNYHHAHDAYLNAVVGTALIKKYPKLESEFVYGDYKVYDVRKMIAKS |
| | | EQEIGKATAKYFFYSNIMNFFKTEITLANGEIRKRPLIETNGETGEIVWDKGRDFATV |
| | | RKVLSMPQVNIVKKTEVQTGGFSKESILPKRNSDKLIARKKDWDPKKYGGFDSPTV |
| | | AYSVLVVAKVEKGKSKKLKSVKELLGITIMERSSFEKNPIDFLEAKGYKEVKKDLIIK |
| | | LPKYSLFELENGRKRMLASAGELQKGNELALPSKYVNFLYLASHYEKLKGSPEDNE |
| | | QKQLFVEQHKHYLDEIIEQISEFSKRVILADANLDKVLSAYNKHRDKPIREQAENIIH |
| | | LFTLTNLGAPAAFKYFDTTIDRKRYTSTKEVLDATLIHQSITGLYETRIDLSQLGGD |
| 34367 | wild type | MNQKFILGLDIGITSVGYGLIDYETKNIIDAGVRLFPEANVENNEGRRSKRGSRRLKR |
| | Staphylococcus | RRIHRLERVKKLLEDYNLLDQSQIPQSTNPYAIRVKGLSEALSKDELVIALLHIAKRR |
| | lugdunensis | GIHKIDVIDSNDDVGNELSTKEQLNKNSKLLKDKFVCQIQLERMNEGQVRGEKNRF |
| | (Slu)Cas9 | KTADIIKEIIQLLNVQKNFHQLDENFINKYIELVEMRREYFEGPGKGSPYGWEGDPK |
| | | AWYETLMGHCTYFPDELRSVKYAYSADLFNALNDLNNLVIQRDGLSKLEYHEKYH |
| | | IIENVFKQKKKPTLKQIANEINVNPEDIKGYRITKSGKPQFTEFKLYHDLKSVLFDQSI |
| | | LENEDVLDQIAEILTIYQDKDSIKSKLTELDILLNEEDKENIAQLTGYTGTHRLSLKCI |
| | | RLVLEEQWYSSRNQMEIFTHLNIKPKKINLTAANKIPKAMIDEFILSPVVKRTFGQAI |
| | | NLINKIIEKYGVPEDIIIELARENNSKDKQKFINEMQKKNENTRKRINEIIGKYGNQNA |
| | | KRLVEKIRLHDEQEGKCLYSLESIPLEDLLNNPNHYEVDHIIPRSVSFDNSYHNKVLV |
| | | KQSENSKKSNLTPYQYFNSGKSKLSYNQFKQHILNLSKSQDRISKKKKEYLLEERDI |
| | | NKFEVQKEFINRNLVDTRYATRELTNYLKAYFSANNMNVKVKTINGSFTDYLRKV |
| | | WKFKKERNHGYKHHAEDALIIANADFLFKENKKLKAVNSVLEKPEIESKQLDIQVD |
| | | SEDNYSEMFIIPKQVQDIKDFRNFKYSHRVDKKPNRQLINDTLYSTRKKDNSTYIVQ |
| | | TIKDIYAKDNTTLKKQFDKSPEKFLMYQHDPRTFEKLEVIMKQYANEKNPLAKYHE |
| | | ETGEYLTKYSKKNNGPIVKSLKYIGNKLGSHLDVTHQFKSSTKKLVKLSIKPYRFDV |
| | | YLTDKGYKFITISYLDVLKKDNYYYIPEQKYDKLKLGKAIDKNAKFIASFYKNDLIK |
| | | LDGEIYKIIGVNSDTRNMIELDLPDIRYKEYCELNNIKGEPRIKKTIGKKVNSIEKLTT |
| | | DVLGNVFTNTQYTKPQLLFKRGN |
| 34368 | SluCas9 | MNQKFILGLDIGITSVGYGLIDYETKNIIDAGVRLFPEANVENNEGRRSKRGSRRLKR |
| | N582A nickase | RRIHRLERVKKLLEDYNLLDQSQIPQSTNPYAIRVKGLSEALSKDELVIALLHIAKRR |
| | | GIHKIDVIDSNDDVGNELSTKEQLNKNSKLLKDKFVCQIQLERMNEGQVRGEKNRF |
| | | KTADIIKEIIQLLNVQKNFHQLDENFINKYIELVEMRREYFEGPGKGSPYGWEGDPK |
| | | AWYETLMGHCTYFPDELRSVKYAYSADLFNALNDLNNLVIQRDGLSKLEYHEKYH |
| | | IIENVFKQKKKPTLKQIANEINVNPEDIKGYRITKSGKPQFTEFKLYHDLKSVLFDQSI |
| | | LENEDVLDQIAEILTIYQDKDSIKSKLTELDILLNEEDKENIAQLTGYTGTHRLSLKCI |
| | | RLVLEEQWYSSRNQMEIFTHLNIKPKKINLTAANKIPKAMIDEFILSPVVKRTFGQAI |
| | | NLINKIIEKYGVPEDIIIELARENNSKDKQKFINEMQKKNENTRKRINEIIGKYGNQNA |
| | | KRLVEKIRLHDEQEGKCLYSLESIPLEDLLNNPNHYEVDHIIPRSVSFDNSYHNKVLV |
| | | KQSEASKKSNLTPYQYFNSGKSKLSYNQFKQHILNLSKSQDRISKKKKEYLLEERDI |
| | | NKFEVQKEFINRNLVDTRYATRELTNYLKAYFSANNMNVKVKTINGSFTDYLRKV |
| | | WKFKKERNHGYKHHAEDALIIANADFLFKENKKLKAVNSVLEKPEIESKQLDIQVD |
| | | SEDNYSEMFIIPKQVQDIKDFRNFKYSHRVDKKPNRQLINDTLYSTRKKDNSTYIVQ |
| | | TIKDIYAKDNTTLKKQFDKSPEKFLMYQHDPRTFEKLEVIMKQYANEKNPLAKYHE |
| | | ETGEYLTKYSKKNNGPIVKSLKYIGNKLGSHLDVTHQFKSSTKKLVKLSIKPYRFDV |
| | | YLTDKGYKFITISYLDVLKKDNYYYIPEQKYDKLKLGKAIDKNAKFIASFYKNDLIK |
| | | LDGEIYKIIGVNSDTRNMIELDLPDIRYKEYCELNNIKGEPRIKKTIGKKVNSIEKLTT |
| | | DVLGNVFTNTQYTKPQLLFKRGN |
| 34369 | Met (-) | NQKFILGLDIGITSVGYGLIDYETKNIIDAGVRLFPEANVENNEGRRSKRGSRRLKRR |
| | SluCas9 | RIHRLERVKKLLEDYNLLDQSQIPQSTNPYAIRVKGLSEALSKDELVIALLHIAKRRGI |
| | nickase | HKIDVIDSNDDVGNELSTKEQLNKNSKLLKDKFVCQIQLERMNEGQVRGEKNRFKT |
| | | ADIIKEIIQLLNVQKNFHQLDENFINKYIELVEMRREYFEGPGKGSPYGWEGDPKAW |
| | | YETLMGHCTYFPDELRSVKYAYSADLFNALNDLNNLVIQRDGLSKLEYHEKYHIIE |
| | | NVFKQKKKPTLKQIANEINVNPEDIKGYRITKSGKPQFTEFKLYHDLKSVLFDQSILE |
| | | NEDVLDQIAEILTIYQDKDSIKSKLTELDILLNEEDKENIAQLTGYTGTHRLSLKCIRL |
| | | VLEEQWYSSRNQMEIFTHLNIKPKKINLTAANKIPKAMIDEFILSPVVKRTFGQAINLI |
| | | NKIIEKYGVPEDIIIELARENNSKDKQKFINEMQKKNENTRKRINEIIGKYGNQNAKR |
| | | LVEKIRLHDEQEGKCLYSLESIPLEDLLNNPNHYEVDHIIPRSVSFDNSYHNKVLVKQ |
| | | SEASKKSNLTPYQYFNSGKSKLSYNQFKQHILNLSKSQDRISKKKKEYLLEERDINKF |
| | | EVQKEFINRNLVDTRYATRELTNYLKAYFSANNMNVKVKTINGSFTDYLRKVWKF |
| | | KKERNHGYKHHAEDALIIANADFLFKENKKLKAVNSVLEKPEIESKQLDIQVDSEDN |
| | | YSEMFIIPKQVQDIKDFRNFKYSHRVDKKPNRQLINDTLYSTRKKDNSTYIVQTIKDI |
| | | YAKDNTTLKKQFDKSPEKFLMYQHDPRTFEKLEVIMKQYANEKNPLAKYHEETGE |
| | | YLTKYSKKNNGPIVKSLKYIGNKLGSHLDVTHQFKSSTKKLVKLSIKPYRFDVYLTD |
| | | KGYKFITISYLDVLKKDNYYYIPEQKYDKLKLGKAIDKNAKFIASFYKNDLIKLDGEI |
| | | YKIIGVNSDTRNMIELDLPDIRYKEYCELNNIKGEPRIKKTIGKKVNSIEKLTTDVLGN |
| | | VFTNTQYTKPQLLFKRGN |
| 34370 | Staphylococcus | MKRNYILGLDIGITSVGYGIIDYETRDVIDAGVRLFKEANVENNEGRRSKRGARRLK |
| | aureus Cas9 | RRRRHRIQRVKKLLFDYNLLTDHSELSGINPYEARVKGLSQKLSEEEFSAALLHLAK |
| | (SaCas9) | RRGVHNVNEVEEDTGNELSTKEQISRNSKALEEKYVAELQLERLKKDGEVRGSINR |
| | | FKTSDYVKEAKQLLKVQKAYHQLDQSFIDTYIDLLETRRTYYEGPGEGSPFGWKDI |
| | | KEWYEMLMGHCTYFPEELRSVKYAYNADLYNALNDLNNLVITRDENEKLEYYEKF |
| | | QUIENVFKQKKKPTLKQIAKEILVNEEDIKGYRVTSTGKPEFTNLKVYHDIKDITARK |
| | | EIIENAELLDQIAKILTIYQSSEDIQEELTNLNSELTQEEIEQISNLKGYTGTHNLSLKAI |
| | | NLILDELWHTNDNQIAIFNRLKLVPKKVDLSQQKEIPTTLVDDFILSPVVKRSFIQSIK |
| | | VINAIIKKYGLPNDIIIELAREKNSKDAQKMINEMQKRNRQTNERIEEIIRTTGKENAK |
| | | YLIEKIKLHDMQEGKCLYSLEAIPLEDLLNNPFNYEVDHIIPRSVSFDNSFNNKVLVK |
| | | QEENSKKGNRTPFQYLSSSDSKISYETFKKHILNLAKGKGRISKTKKEYLLEERDINR |
| | | FSVQKDFINRNLVDTRYATRGLMNLLRSYFRVNNLDVKVKSINGGFTSFLRRKWKF |
| | | KKERNKGYKHHAEDALIIANADFIFKEWKKLDKAKKVMENQMFEEKQAESMPEIE |
| | | TEQEYKEIFITPHQIKHIKDFKDYKYSHRVDKKPNRELINDTLYSTRKDDKGNTLIVN |
| | | NLNGLYDKDNDKLKKLINKSPEKLLMYHHDPQTYQKLKLIMEQYGDEKNPLYKYY |
| | | EETGNYLTKYSKKDNGPVIKKIKYYGNKLNAHLDITDDYPNSRNKVVKLSLKPYRF |
| | | DVYLDNGVYKFVTVKNLDVIKKENYYEVNSKCYEEAKKLKKISNQAEFIASFYNND |
| | | LIKINGELYRVIGVNNDLLNRIEVNMIDITYREYLENMNDKRPPRIIKTIASKTQSIKK |
| | | YSTDILGNLYEVKSKKHPQIIKKG |
| 34371 | SaCas9 N580A | MKRNYILGLDIGITSVGYGIIDYETRDVIDAGVRLFKEANVENNEGRRSKRGARRLK |
| | nickase | RRRRHRIQRVKKLLFDYNLLTDHSELSGINPYEARVKGLSQKLSEEEFSAALLHLAK |
| | | RRGVHNVNEVEEDTGNELSTKEQISRNSKALEEKYVAELQLERLKKDGEVRGSINR |
| | | FKTSDYVKEAKQLLKVQKAYHQLDQSFIDTYIDLLETRRTYYEGPGEGSPFGWKDI |
| | | KEWYEMLMGHCTYFPEELRSVKYAYNADLYNALNDLNNLVITRDENEKLEYYEKF |
| | | QUIENVFKQKKKPTLKQIAKEILVNEEDIKGYRVTSTGKPEFTNLKVYHDIKDITARK |
| | | EIIENAELLDQIAKILTIYQSSEDIQEELTNLNSELTQEEIEQISNLKGYTGTHNLSLKAI |
| | | NLILDELWHTNDNQIAIFNRLKLVPKKVDLSQQKEIPTTLVDDFILSPVVKRSFIQSIK |
| | | VINAIIKKYGLPNDIIIELAREKNSKDAQKMINEMQKRNRQTNERIEEIIRTTGKENAK |
| | | YLIEKIKLHDMQEGKCLYSLEAIPLEDLLNNPFNYEVDHIIPRSVSFDNSFNNKVLVK |
| | | QEEASKKGNRTPFQYLSSSDSKISYETFKKHILNLAKGKGRISKTKKEYLLEERDINR |
| | | FSVQKDFINRNLVDTRYATRGLMNLLRSYFRVNNLDVKVKSINGGFTSFLRRKWKF |
| | | KKERNKGYKHHAEDALIIANADFIFKEWKKLDKAKKVMENQMFEEKQAESMPEIE |
| | | TEQEYKEIFITPHQIKHIKDFKDYKYSHRVDKKPNRELINDTLYSTRKDDKGNTLIVN |
| | | NLNGLYDKDNDKLKKLINKSPEKLLMYHHDPQTYQKLKLIMEQYGDEKNPLYKYY |
| | | EETGNYLTKYSKKDNGPVIKKIKYYGNKLNAHLDITDDYPNSRNKVVKLSLKPYRF |
| | | DVYLDNGVYKFVTVKNLDVIKKENYYEVNSKCYEEAKKLKKISNQAEFIASFYNND |
| | | LIKINGELYRVIGVNNDLLNRIEVNMIDITYREYLENMNDKRPPRIIKTIASKTQSIKK |
| | | YSTDILGNLYEVKSKKHPQIIKKG |
| 34372 | Met (-) SaCas9 | KRNYILGLDIGITSVGYGIIDYETRDVIDAGVRLFKEANVENNEGRRSKRGARRLKR |
| | nickase | RRRHRIQRVKKLLFDYNLLTDHSELSGINPYEARVKGLSQKLSEEEFSAALLHLAKR |
| | | RGVHNVNEVEEDTGNELSTKEQISRNSKALEEKYVAELQLERLKKDGEVRGSINRF |
| | | KTSDYVKEAKQLLKVQKAYHQLDQSFIDTYIDLLETRRTYYEGPGEGSPFGWKDIK |
| | | EWYEMLMGHCTYFPEELRSVKYAYNADLYNALNDLNNLVITRDENEKLEYYEKFQ |
| | | IIENVFKQKKKPTLKQIAKEILVNEEDIKGYRVTSTGKPEFTNLKVYHDIKDITARKEI |
| | | IENAELLDQIAKILTIYQSSEDIQEELTNLNSELTQEEIEQISNLKGYTGTHNLSLKAIN |
| | | LILDELWHTNDNQIAIFNRLKLVPKKVDLSQQKEIPTTLVDDFILSPVVKRSFIQSIKVI |
| | | NAIIKKYGLPNDIIIELAREKNSKDAQKMINEMQKRNRQTNERIEEIIRTTGKENAKY |
| | | LIEKIKLHDMQEGKCLYSLEAIPLEDLLNNPFNYEVDHIIPRSVSFDNSFNNKVLVKQ |
| | | EEASKKGNRTPFQYLSSSDSKISYETFKKHILNLAKGKGRISKTKKEYLLEERDINRFS |
| | | VQKDFINRNLVDTRYATRGLMNLLRSYFRVNNLDVKVKSINGGFTSFLRRKWKFK |
| | | KERNKGYKHHAEDALIIANADFIFKEWKKLDKAKKVMENQMFEEKQAESMPEIETE |
| | | QEYKEIFITPHQIKHIKDFKDYKYSHRVDKKPNRELINDTLYSTRKDDKGNTLIVNNL |
| | | NGLYDKDNDKLKKLINKSPEKLLMYHHDPQTYQKLKLIMEQYGDEKNPLYKYYEE |
| | | TGNYLTKYSKKDNGPVIKKIKYYGNKLNAHLDITDDYPNSRNKVVKLSLKPYRFDV |
| | | YLDNGVYKFVTVKNLDVIKKENYYEVNSKCYEEAKKLKKISNQAEFIASFYNNDLI |
| | | KINGELYRVIGVNNDLLNRIEVNMIDITYREYLENMNDKRPPRIIKTIASKTQSIKKYS |
| | | TDILGNLYEVKSKKHPQIIKKG |
| 34373 | SpCas9-NG | MDKKYSIGLDIGTNSVGWAVITDEYKVPSKKFKVLGNTDRHSIKKNLIGALLFDSGE |
| | (VRVRFRR) | TAEATRLKRTARRRYTRRKNRICYLQEIFSNEMAKVDDSFFHRLEESFLVEEDKKHE |
| | | RHPIFGNIVDEVAYHEKYPTIYHLRKKLVDSTDKADLRLIYLALAHMIKFRGHFLIEG |
| | | DLNPDNSDVDKLFIQLVQTYNQLFEENPINASGVDAKAILSARLSKSRRLENLIAQLP |
| | | GEKKNGLFGNLIALSLGLTPNFKSNFDLAEDAKLQLSKDTYDDDLDNLLAQIGDQY |
| | | ADLFLAAKNLSDAILLSDILRVNTEITKAPLSASMIKRYDEHHQDLTLLKALVRQQLP |
| | | EKYKEIFFDQSKNGYAGYIDGGASQEEFYKFIKPILEKMDGTEELLVKLNREDLLRK |
| | | QRTFDNGSIPHQIHLGELHAILRRQEDFYPFLKDNREKIEKILTFRIPYYVGPLARGNS |
| | | RFAWMTRKSEETITPWNFEEVVDKGASAQSFIERMTNFDKNLPNEKVLPKHSLLYE |
| | | YFTVYNELTKVKYVTEGMRKPAFLSGEQKKAIVDLLFKTNRKVTVKQLKEDYFKKI |
| | | ECFDSVEISGVEDRFNASLGTYHDLLKIIKDKDFLDNEENEDILEDIVLTLTLFEDREM |
| | | IEERLKTYAHLFDDKVMKQLKRRRYTGWGRLSRKLINGIRDKQSGKTILDFLKSDGF |
| | | ANRNFMQLIHDDSLTFKEDIQKAQVSGQGDSLHEHIANLAGSPAIKKGILQTVKVVD |
| | | ELVKVMGRHKPENIVIEMARENQTTQKGQKNSRERMKRIEEGIKELGSQILKEHPVE |
| | | NTQLQNEKLYLYYLQNGRDMYVDQELDINRLSDYDVDHIVPQSFLKDDSIDNKVLT |
| | | RSDKNRGKSDNVPSEEVVKKMKNYWRQLLNAKLITQRKFDNLTKAERGGLSELDK |
| | | AGFIKRQLVETRQITKHVAQILDSRMNTKYDENDKLIREVKVITLKSKLVSDFRKDF |
| | | QFYKVREINNYHHAHDAYLNAVVGTALIKKYPKLESEFVYGDYKVYDVRKMIAKS |
| | | EQEIGKATAKYFFYSNIMNFFKTEITLANGEIRKRPLIETNGETGEIVWDKGRDFATV |
| | | RKVLSMPQVNIVKKTEVQTGGFSKESIRPKRNSDKLIARKKDWDPKKYGGFVSPTV |
| | | AYSVLVVAKVEKGKSKKLKSVKELLGITIMERSSFEKNPIDFLEAKGYKEVKKDLIIK |
| | | LPKYSLFELENGRKRMLASARFLQKGNELALPSKYVNFLYLASHYEKLKGSPEDNE |
| | | QKQLFVEQHKHYLDEIIEQISEFSKRVILADANLDKVLSAYNKHRDKPIREQAENIIH |
| | | LFTLTNLGAPRAFKYFDTTIDRKVYRSTKEVLDATLIHQSITGLYETRIDLSQLGGD |
| 34374 | spCas9-NG | MDKKYSIGLDIGTNSVGWAVITDEYKVPSKKFKVLGNTDRHSIKKNLIGALLFDSGE |
| | (H840A_VRVRFRR) | TAEATRLKRTARRRYTRRKNRICYLQEIFSNEMAKVDDSFFHRLEESFLVEEDKKHE |
| | Nikcase | RHPIFGNIVDEVAYHEKYPTIYHLRKKLVDSTDKADLRLIYLALAHMIKFRGHFLIEG |
| | | DLNPDNSDVDKLFIQLVQTYNQLFEENPINASGVDAKAILSARLSKSRRLENLIAQLP |
| | | GEKKNGLFGNLIALSLGLTPNFKSNFDLAEDAKLQLSKDTYDDDLDNLLAQIGDQY |
| | | ADLFLAAKNLSDAILLSDILRVNTEITKAPLSASMIKRYDEHHQDLTLLKALVRQQLP |
| | | EKYKEIFFDQSKNGYAGYIDGGASQEEFYKFIKPILEKMDGTEELLVKLNREDLLRK |
| | | QRTFDNGSIPHQIHLGELHAILRRQEDFYPFLKDNREKIEKILTFRIPYYVGPLARGNS |
| | | RFAWMTRKSEETITPWNFEEVVDKGASAQSFIERMTNFDKNLPNEKVLPKHSLLYE |
| | | YFTVYNELTKVKYVTEGMRKPAFLSGEQKKAIVDLLFKTNRKVTVKQLKEDYFKKI |
| | | ECFDSVEISGVEDRFNASLGTYHDLLKIIKDKDFLDNEENEDILEDIVLTLTLFEDREM |
| | | IEERLKTYAHLFDDKVMKQLKRRRYTGWGRLSRKLINGIRDKQSGKTILDFLKSDGF |
| | | ANRNFMQLIHDDSLTFKEDIQKAQVSGQGDSLHEHIANLAGSPAIKKGILQTVKVVD |
| | | ELVKVMGRHKPENIVIEMARENQTTQKGQKNSRERMKRIEEGIKELGSQILKEHPVE |
| | | NTQLQNEKLYLYYLQNGRDMYVDQELDINRLSDYDVDAIVPQSFLKDDSIDNKVLT |
| | | RSDKNRGKSDNVPSEEVVKKMKNYWRQLLNAKLITQRKFDNLTKAERGGLSELDK |
| | | AGFIKRQLVETRQITKHVAQILDSRMNTKYDENDKLIREVKVITLKSKLVSDFRKDF |
| | | QFYKVREINNYHHAHDAYLNAVVGTALIKKYPKLESEFVYGDYKVYDVRKMIAKS |
| | | EQEIGKATAKYFFYSNIMNFFKTEITLANGEIRKRPLIETNGETGEIVWDKGRDFATV |
| | | RKVLSMPQVNIVKKTEVQTGGFSKESIRPKRNSDKLIARKKDWDPKKYGGFVSPTV |
| | | AYSVLVVAKVEKGKSKKLKSVKELLGITIMERSSFEKNPIDFLEAKGYKEVKKDLIIK |
| | | LPKYSLFELENGRKRMLASARFLQKGNELALPSKYVNFLYLASHYEKLKGSPEDNE |
| | | QKQLFVEQHKHYLDEIIEQISEFSKRVILADANLDKVLSAYNKHRDKPIREQAENIIH |
| | | LFTLTNLGAPRAFKYFDTTIDRKVYRSTKEVLDATLIHQSITGLYETRIDLSQLGGD |
| 34375 | Met (-) | DKKYSIGLDIGTNSVGWAVITDEYKVPSKKFKVLGNTDRHSIKKNLIGALLFDSGET |
| | SpCas9-NG | AEATRLKRTARRRYTRRKNRICYLQEIFSNEMAKVDDSFFHRLEESFLVEEDKKHER |
| | Nikcase | HPIFGNIVDEVAYHEKYPTIYHLRKKLVDSTDKADLRLIYLALAHMIKFRGHFLIEGD |
| | | LNPDNSDVDKLFIQLVQTYNQLFEENPINASGVDAKAILSARLSKSRRLENLIAQLPG |
| | | EKKNGLFGNLIALSLGLTPNFKSNFDLAEDAKLQLSKDTYDDDLDNLLAQIGDQYA |
| | | DLFLAAKNLSDAILLSDILRVNTEITKAPLSASMIKRYDEHHQDLTLLKALVRQQLPE |
| | | KYKEIFFDQSKNGYAGYIDGGASQEEFYKFIKPILEKMDGTEELLVKLNREDLLRKQ |
| | | RTFDNGSIPHQIHLGELHAILRRQEDFYPFLKDNREKIEKILTFRIPYYVGPLARGNSR |
| | | FAWMTRKSEETITPWNFEEVVDKGASAQSFIERMTNFDKNLPNEKVLPKHSLLYEY |
| | | FTVYNELTKVKYVTEGMRKPAFLSGEQKKAIVDLLFKTNRKVTVKQLKEDYFKKIE |
| | | CFDSVEISGVEDRFNASLGTYHDLLKIIKDKDFLDNEENEDILEDIVLTLTLFEDREMI |
| | | EERLKTYAHLFDDKVMKQLKRRRYTGWGRLSRKLINGIRDKQSGKTILDFLKSDGF |
| | | ANRNFMQLIHDDSLTFKEDIQKAQVSGQGDSLHEHIANLAGSPAIKKGILQTVKVVD |
| | | ELVKVMGRHKPENIVIEMARENQTTQKGQKNSRERMKRIEEGIKELGSQILKEHPVE |
| | | NTQLQNEKLYLYYLQNGRDMYVDQELDINRLSDYDVDAIVPQSFLKDDSIDNKVLT |
| | | RSDKNRGKSDNVPSEEVVKKMKNYWRQLLNAKLITQRKFDNLTKAERGGLSELDK |
| | | AGFIKRQLVETRQITKHVAQILDSRMNTKYDENDKLIREVKVITLKSKLVSDFRKDF |
| | | QFYKVREINNYHHAHDAYLNAVVGTALIKKYPKLESEFVYGDYKVYDVRKMIAKS |
| | | EQEIGKATAKYFFYSNIMNFFKTEITLANGEIRKRPLIETNGETGEIVWDKGRDFATV |
| | | RKVLSMPQVNIVKKTEVQTGGFSKESIRPKRNSDKLIARKKDWDPKKYGGFVSPTV |
| | | AYSVLVVAKVEKGKSKKLKSVKELLGITIMERSSFEKNPIDFLEAKGYKEVKKDLIIK |
| | | LPKYSLFELENGRKRMLASARFLQKGNELALPSKYVNFLYLASHYEKLKGSPEDNE |
| | | QKQLFVEQHKHYLDEIIEQISEFSKRVILADANLDKVLSAYNKHRDKPIREQAENIIH |
| | | LFTLTNLGAPRAFKYFDTTIDRKVYRSTKEVLDATLIHQSITGLYETRIDLSQLGGD |
| 34376 | spCas9-NGA | MDKKYSIGLDIGTNSVGWAVITDEYKVPSKKFKVLGNTDRHSIKKNLIGALLFDSGE |
| | (VRQR) | TAEATRLKRTARRRYTRRKNRICYLQEIFSNEMAKVDDSFFHRLEESFLVEEDKKHE |
| | | RHPIFGNIVDEVAYHEKYPTIYHLRKKLVDSTDKADLRLIYLALAHMIKFRGHFLIEG |
| | | DLNPDNSDVDKLFIQLVQTYNQLFEENPINASGVDAKAILSARLSKSRRLENLIAQLP |
| | | GEKKNGLFGNLIALSLGLTPNFKSNFDLAEDAKLQLSKDTYDDDLDNLLAQIGDQY |
| | | ADLFLAAKNLSDAILLSDILRVNTEITKAPLSASMIKRYDEHHQDLTLLKALVRQQLP |
| | | EKYKEIFFDQSKNGYAGYIDGGASQEEFYKFIKPILEKMDGTEELLVKLNREDLLRK |
| | | QRTFDNGSIPHQIHLGELHAILRRQEDFYPFLKDNREKIEKILTFRIPYYVGPLARGNS |
| | | RFAWMTRKSEETITPWNFEEVVDKGASAQSFIERMTNFDKNLPNEKVLPKHSLLYE |
| | | YFTVYNELTKVKYVTEGMRKPAFLSGEQKKAIVDLLFKTNRKVTVKQLKEDYFKKI |
| | | ECFDSVEISGVEDRFNASLGTYHDLLKIIKDKDFLDNEENEDILEDIVLTLTLFEDREM |
| | | IEERLKTYAHLFDDKVMKQLKRRRYTGWGRLSRKLINGIRDKQSGKTILDFLKSDGF |
| | | ANRNFMQLIHDDSLTFKEDIQKAQVSGQGDSLHEHIANLAGSPAIKKGILQTVKVVD |
| | | ELVKVMGRHKPENIVIEMARENQTTQKGQKNSRERMKRIEEGIKELGSQILKEHPVE |
| | | NTQLQNEKLYLYYLQNGRDMYVDQELDINRLSDYDVDHIVPQSFLKDDSIDNKVLT |
| | | RSDKNRGKSDNVPSEEVVKKMKNYWRQLLNAKLITQRKFDNLTKAERGGLSELDK |
| | | AGFIKRQLVETRQITKHVAQILDSRMNTKYDENDKLIREVKVITLKSKLVSDFRKDF |
| | | QFYKVREINNYHHAHDAYLNAVVGTALIKKYPKLESEFVYGDYKVYDVRKMIAKS |
| | | EQEIGKATAKYFFYSNIMNFFKTEITLANGEIRKRPLIETNGETGEIVWDKGRDFATV |
| | | RKVLSMPQVNIVKKTEVQTGGFSKESILPKRNSDKLIARKKDWDPKKYGGFVSPTV |
| | | AYSVLVVAKVEKGKSKKLKSVKELLGITIMERSSFEKNPIDFLEAKGYKEVKKDLIIK |
| | | LPKYSLFELENGRKRMLASARELQKGNELALPSKYVNFLYLASHYEKLKGSPEDNE |
| | | QKQLFVEQHKHYLDEIIEQISEFSKRVILADANLDKVLSAYNKHRDKPIREQAENIIH |
| | | LFTLTNLGAPAAFKYFDTTIDRKQYRSTKEVLDATLIHQSITGLYETRIDLSQLGGD |
| 34377 | spCas9-NGA | MDKKYSIGLDIGTNSVGWAVITDEYKVPSKKFKVLGNTDRHSIKKNLIGALLFDSGE |
| | (H840A_VRQR) | TAEATRLKRTARRRYTRRKNRICYLQEIFSNEMAKVDDSFFHRLEESFLVEEDKKHE |
| | Nickase | RHPIFGNIVDEVAYHEKYPTIYHLRKKLVDSTDKADLRLIYLALAHMIKFRGHFLIEG |
| | | DLNPDNSDVDKLFIQLVQTYNQLFEENPINASGVDAKAILSARLSKSRRLENLIAQLP |
| | | GEKKNGLFGNLIALSLGLTPNFKSNFDLAEDAKLQLSKDTYDDDLDNLLAQIGDQY |
| | | ADLFLAAKNLSDAILLSDILRVNTEITKAPLSASMIKRYDEHHQDLTLLKALVRQQLP |
| | | EKYKEIFFDQSKNGYAGYIDGGASQEEFYKFIKPILEKMDGTEELLVKLNREDLLRK |
| | | QRTFDNGSIPHQIHLGELHAILRRQEDFYPFLKDNREKIEKILTFRIPYYVGPLARGNS |
| | | RFAWMTRKSEETITPWNFEEVVDKGASAQSFIERMTNFDKNLPNEKVLPKHSLLYE |
| | | YFTVYNELTKVKYVTEGMRKPAFLSGEQKKAIVDLLFKTNRKVTVKQLKEDYFKKI |
| | | ECFDSVEISGVEDRFNASLGTYHDLLKIIKDKDFLDNEENEDILEDIVLTLTLFEDREM |
| | | IEERLKTYAHLFDDKVMKQLKRRRYTGWGRLSRKLINGIRDKQSGKTILDFLKSDGF |
| | | ANRNFMQLIHDDSLTFKEDIQKAQVSGQGDSLHEHIANLAGSPAIKKGILQTVKVVD |
| | | ELVKVMGRHKPENIVIEMARENQTTQKGQKNSRERMKRIEEGIKELGSQILKEHPVE |
| | | NTQLQNEKLYLYYLQNGRDMYVDQELDINRLSDYDVDAIVPQSFLKDDSIDNKVLT |
| | | RSDKNRGKSDNVPSEEVVKKMKNYWRQLLNAKLITQRKFDNLTKAERGGLSELDK |
| | | AGFIKRQLVETRQITKHVAQILDSRMNTKYDENDKLIREVKVITLKSKLVSDFRKDF |
| | | QFYKVREINNYHHAHDAYLNAVVGTALIKKYPKLESEFVYGDYKVYDVRKMIAKS |
| | | EQEIGKATAKYFFYSNIMNFFKTEITLANGEIRKRPLIETNGETGEIVWDKGRDFATV |
| | | RKVLSMPQVNIVKKTEVQTGGFSKESILPKRNSDKLIARKKDWDPKKYGGFVSPTV |
| | | AYSVLVVAKVEKGKSKKLKSVKELLGITIMERSSFEKNPIDFLEAKGYKEVKKDLIIK |
| | | LPKYSLFELENGRKRMLASARELQKGNELALPSKYVNFLYLASHYEKLKGSPEDNE |
| | | QKQLFVEQHKHYLDEIIEQISEFSKRVILADANLDKVLSAYNKHRDKPIREQAENIIH |
| | | LFTLTNLGAPAAFKYFDTTIDRKQYRSTKEVLDATLIHQSITGLYETRIDLSQLGGD |
| 34378 | Met(-) spCas9- | DKKYSIGLDIGTNSVGWAVITDEYKVPSKKFKVLGNTDRHSIKKNLIGALLFDSGET |
| | NGA Nickase | AEATRLKRTARRRYTRRKNRICYLQEIFSNEMAKVDDSFFHRLEESFLVEEDKKHER |
| | | HPIFGNIVDEVAYHEKYPTIYHLRKKLVDSTDKADLRLIYLALAHMIKFRGHFLIEGD |
| | | LNPDNSDVDKLFIQLVQTYNQLFEENPINASGVDAKAILSARLSKSRRLENLIAQLPG |
| | | EKKNGLFGNLIALSLGLTPNFKSNFDLAEDAKLQLSKDTYDDDLDNLLAQIGDQYA |
| | | DLFLAAKNLSDAILLSDILRVNTEITKAPLSASMIKRYDEHHQDLTLLKALVRQQLPE |
| | | KYKEIFFDQSKNGYAGYIDGGASQEEFYKFIKPILEKMDGTEELLVKLNREDLLRKQ |
| | | RTFDNGSIPHQIHLGELHAILRRQEDFYPFLKDNREKIEKILTFRIPYYVGPLARGNSR |
| | | FAWMTRKSEETITPWNFEEVVDKGASAQSFIERMTNFDKNLPNEKVLPKHSLLYEY |
| | | FTVYNELTKVKYVTEGMRKPAFLSGEQKKAIVDLLFKTNRKVTVKQLKEDYFKKIE |
| | | CFDSVEISGVEDRFNASLGTYHDLLKIIKDKDFLDNEENEDILEDIVLTLTLFEDREMI |
| | | EERLKTYAHLFDDKVMKQLKRRRYTGWGRLSRKLINGIRDKQSGKTILDFLKSDGF |
| | | ANRNFMQLIHDDSLTFKEDIQKAQVSGQGDSLHEHIANLAGSPAIKKGILQTVKVVD |
| | | ELVKVMGRHKPENIVIEMARENQTTQKGQKNSRERMKRIEEGIKELGSQILKEHPVE |
| | | NTQLQNEKLYLYYLQNGRDMYVDQELDINRLSDYDVDAIVPQSFLKDDSIDNKVLT |
| | | RSDKNRGKSDNVPSEEVVKKMKNYWRQLLNAKLITQRKFDNLTKAERGGLSELDK |
| | | AGFIKRQLVETRQITKHVAQILDSRMNTKYDENDKLIREVKVITLKSKLVSDFRKDF |
| | | QFYKVREINNYHHAHDAYLNAVVGTALIKKYPKLESEFVYGDYKVYDVRKMIAKS |
| | | EQEIGKATAKYFFYSNIMNFFKTEITLANGEIRKRPLIETNGETGEIVWDKGRDFATV |
| | | RKVLSMPQVNIVKKTEVQTGGFSKESILPKRNSDKLIARKKDWDPKKYGGFVSPTV |
| | | AYSVLVVAKVEKGKSKKLKSVKELLGITIMERSSFEKNPIDFLEAKGYKEVKKDLIIK |
| | | LPKYSLFELENGRKRMLASARELQKGNELALPSKYVNFLYLASHYEKLKGSPEDNE |
| | | QKQLFVEQHKHYLDEIIEQISEFSKRVILADANLDKVLSAYNKHRDKPIREQAENIIH |
| | | LFTLTNLGAPAAFKYFDTTIDRKQYRSTKEVLDATLIHQSITGLYETRIDLSQLGGD |
| 34379 | SpRY Cas9 | MDKKYSIGLDIGTNSVGWAVITDEYKVPSKKFKVLGNTDRHSIKKNLIGALLFDSGE |
| | | TAERTRLKRTARRRYTRRKNRICYLQEIFSNEMAKVDDSFFHRLEESFLVEEDKKHE |
| | | RHPIFGNIVDEVAYHEKYPTIYHLRKKLVDSTDKADLRLIYLALAHMIKFRGHFLIEG |
| | | DLNPDNSDVDKLFIQLVQTYNQLFEENPINASGVDAKAILSARLSKSRRLENLIAQLP |
| | | GEKKNGLFGNLIALSLGLTPNFKSNFDLAEDAKLQLSKDTYDDDLDNLLAQIGDQY |
| | | ADLFLAAKNLSDAILLSDILRVNTEITKAPLSASMIKRYDEHHQDLTLLKALVRQQLP |
| | | EKYKEIFFDQSKNGYAGYIDGGASQEEFYKFIKPILEKMDGTEELLVKLNREDLLRK |
| | | QRTFDNGSIPHQIHLGELHAILRRQEDFYPFLKDNREKIEKILTFRIPYYVGPLARGNS |
| | | RFAWMTRKSEETITPWNFEEVVDKGASAQSFIERMTNFDKNLPNEKVLPKHSLLYE |
| | | YFTVYNELTKVKYVTEGMRKPAFLSGEQKKAIVDLLFKTNRKVTVKQLKEDYFKKI |
| | | ECFDSVEISGVEDRFNASLGTYHDLLKIIKDKDFLDNEENEDILEDIVLTLTLFEDREM |
| | | IEERLKTYAHLFDDKVMKQLKRRRYTGWGRLSRKLINGIRDKQSGKTILDFLKSDGF |
| | | ANRNFMQLIHDDSLTFKEDIQKAQVSGQGDSLHEHIANLAGSPAIKKGILQTVKVVD |
| | | ELVKVMGRHKPENIVIEMARENQTTQKGQKNSRERMKRIEEGIKELGSQILKEHPVE |
| | | NTQLQNEKLYLYYLQNGRDMYVDQELDINRLSDYDVDHIVPQSFLKDDSIDNKVLT |
| | | RSDKNRGKSDNVPSEEVVKKMKNYWRQLLNAKLITQRKFDNLTKAERGGLSELDK |
| | | AGFIKRQLVETRQITKHVAQILDSRMNTKYDENDKLIREVKVITLKSKLVSDFRKDF |
| | | QFYKVREINNYHHAHDAYLNAVVGTALIKKYPKLESEFVYGDYKVYDVRKMIAKS |
| | | EQEIGKATAKYFFYSNIMNFFKTEITLANGEIRKRPLIETNGETGEIVWDKGRDFATV |
| | | RKVLSMPQVNIVKKTEVQTGGFSKESIRPKRNSDKLIARKKDWDPKKYGGFLWPTV |
| | | AYSVLVVAKVEKGKSKKLKSVKELLGITIMERSSFEKNPIDFLEAKGYKEVKKDLIIK |
| | | LPKYSLFELENGRKRMLASAKQLQKGNELALPSKYVNFLYLASHYEKLKGSPEDNE |
| | | QKQLFVEQHKHYLDEIIEQISEFSKRVILADANLDKVLSAYNKHRDKPIREQAENIIH |
| | | LFTLTRLGAPRAFKYFDTTIDPKQYRSTKEVLDATLIHQSITGLYETRIDLSQLGGD |
| 34380 | SpRY Cas9 | MDKKYSIGLDIGTNSVGWAVITDEYKVPSKKFKVLGNTDRHSIKKNLIGALLFDSGE |
| | (H840A) | TAERTRLKRTARRRYTRRKNRICYLQEIFSNEMAKVDDSFFHRLEESFLVEEDKKHE |
| | Nickase | RHPIFGNIVDEVAYHEKYPTIYHLRKKLVDSTDKADLRLIYLALAHMIKFRGHFLIEG |
| | | DLNPDNSDVDKLFIQLVQTYNQLFEENPINASGVDAKAILSARLSKSRRLENLIAQLP |
| | | GEKKNGLFGNLIALSLGLTPNFKSNFDLAEDAKLQLSKDTYDDDLDNLLAQIGDQY |
| | | ADLFLAAKNLSDAILLSDILRVNTEITKAPLSASMIKRYDEHHQDLTLLKALVRQQLP |
| | | EKYKEIFFDQSKNGYAGYIDGGASQEEFYKFIKPILEKMDGTEELLVKLNREDLLRK |
| | | QRTFDNGSIPHQIHLGELHAILRRQEDFYPFLKDNREKIEKILTFRIPYYVGPLARGNS |
| | | RFAWMTRKSEETITPWNFEEVVDKGASAQSFIERMTNFDKNLPNEKVLPKHSLLYE |
| | | YFTVYNELTKVKYVTEGMRKPAFLSGEQKKAIVDLLFKTNRKVTVKQLKEDYFKKI |
| | | ECFDSVEISGVEDRFNASLGTYHDLLKIIKDKDFLDNEENEDILEDIVLTLTLFEDREM |
| | | IEERLKTYAHLFDDKVMKQLKRRRYTGWGRLSRKLINGIRDKQSGKTILDFLKSDGF |
| | | ANRNFMQLIHDDSLTFKEDIQKAQVSGQGDSLHEHIANLAGSPAIKKGILQTVKVVD |
| | | ELVKVMGRHKPENIVIEMARENQTTQKGQKNSRERMKRIEEGIKELGSQILKEHPVE |
| | | NTQLQNEKLYLYYLQNGRDMYVDQELDINRLSDYDVDAIVPQSFLKDDSIDNKVLT |
| | | RSDKNRGKSDNVPSEEVVKKMKNYWRQLLNAKLITQRKFDNLTKAERGGLSELDK |
| | | AGFIKRQLVETRQITKHVAQILDSRMNTKYDENDKLIREVKVITLKSKLVSDFRKDF |
| | | QFYKVREINNYHHAHDAYLNAVVGTALIKKYPKLESEFVYGDYKVYDVRKMIAKS |
| | | EQEIGKATAKYFFYSNIMNFFKTEITLANGEIRKRPLIETNGETGEIVWDKGRDFATV |
| | | RKVLSMPQVNIVKKTEVQTGGFSKESIRPKRNSDKLIARKKDWDPKKYGGFLWPTV |
| | | AYSVLVVAKVEKGKSKKLKSVKELLGITIMERSSFEKNPIDFLEAKGYKEVKKDLIIK |
| | | LPKYSLFELENGRKRMLASAKQLQKGNELALPSKYVNFLYLASHYEKLKGSPEDNE |
| | | QKQLFVEQHKHYLDEIIEQISEFSKRVILADANLDKVLSAYNKHRDKPIREQAENIIH |
| | | LFTLTRLGAPRAFKYFDTTIDPKQYRSTKEVLDATLIHQSITGLYETRIDLSQLGGD |
| 34381 | Met(-) SpRY | DKKYSIGLDIGTNSVGWAVITDEYKVPSKKFKVLGNTDRHSIKKNLIGALLFDSGET |
| | Cas9 Nickase | AERTRLKRTARRRYTRRKNRICYLQEIFSNEMAKVDDSFFHRLEESFLVEEDKKHER |
| | | HPIFGNIVDEVAYHEKYPTIYHLRKKLVDSTDKADLRLIYLALAHMIKFRGHFLIEGD |
| | | LNPDNSDVDKLFIQLVQTYNQLFEENPINASGVDAKAILSARLSKSRRLENLIAQLPG |
| | | EKKNGLFGNLIALSLGLTPNFKSNFDLAEDAKLQLSKDTYDDDLDNLLAQIGDQYA |
| | | DLFLAAKNLSDAILLSDILRVNTEITKAPLSASMIKRYDEHHQDLTLLKALVRQQLPE |
| | | KYKEIFFDQSKNGYAGYIDGGASQEEFYKFIKPILEKMDGTEELLVKLNREDLLRKQ |
| | | RTFDNGSIPHQIHLGELHAILRRQEDFYPFLKDNREKIEKILTFRIPYYVGPLARGNSR |
| | | FAWMTRKSEETITPWNFEEVVDKGASAQSFIERMTNFDKNLPNEKVLPKHSLLYEY |
| | | FTVYNELTKVKYVTEGMRKPAFLSGEQKKAIVDLLFKTNRKVTVKQLKEDYFKKIE |
| | | CFDSVEISGVEDRFNASLGTYHDLLKIIKDKDFLDNEENEDILEDIVLTLTLFEDREMI |
| | | EERLKTYAHLFDDKVMKQLKRRRYTGWGRLSRKLINGIRDKQSGKTILDFLKSDGF |
| | | ANRNFMQLIHDDSLTFKEDIQKAQVSGQGDSLHEHIANLAGSPAIKKGILQTVKVVD |
| | | ELVKVMGRHKPENIVIEMARENQTTQKGQKNSRERMKRIEEGIKELGSQILKEHPVE |
| | | NTQLQNEKLYLYYLQNGRDMYVDQELDINRLSDYDVDAIVPQSFLKDDSIDNKVLT |
| | | RSDKNRGKSDNVPSEEVVKKMKNYWRQLLNAKLITQRKFDNLTKAERGGLSELDK |
| | | AGFIKRQLVETRQITKHVAQILDSRMNTKYDENDKLIREVKVITLKSKLVSDFRKDF |
| | | QFYKVREINNYHHAHDAYLNAVVGTALIKKYPKLESEFVYGDYKVYDVRKMIAKS |
| | | EQEIGKATAKYFFYSNIMNFFKTEITLANGEIRKRPLIETNGETGEIVWDKGRDFATV |
| | | RKVLSMPQVNIVKKTEVQTGGFSKESIRPKRNSDKLIARKKDWDPKKYGGFLWPTV |
| | | AYSVLVVAKVEKGKSKKLKSVKELLGITIMERSSFEKNPIDFLEAKGYKEVKKDLIIK |
| | | LPKYSLFELENGRKRMLASAKQLQKGNELALPSKYVNFLYLASHYEKLKGSPEDNE |
| | | QKQLFVEQHKHYLDEIIEQISEFSKRVILADANLDKVLSAYNKHRDKPIREQAENIIH |
| | | LFTLTRLGAPRAFKYFDTTIDPKQYRSTKEVLDATLIHQSITGLYETRIDLSQLGGD |
| 34382 | sRGN3.1 | MNQKFILGLDIGITSVGYGLIDYETKNIIDAGVRLFPEANVENNEGRRSKRGSRRLKR |
| | | RRIHRLERVKLLLTEYDLINKEQIPTSNNPYQIRVKGLSEILSKDELAIALLHLAKRRG |
| | | IHNVDVAADKEETASDSLSTKDQINKNAKFLESRYVCELQKERLENEGHVRGVENR |
| | | FLTKDIVREAKKIIDTQMQYYPEIDETFKEKYISLVETRREYFEGPGQGSPFGWNGDL |
| | | KKWYEMLMGHCTYFPQELRSVKYAYSADLFNALNDLNNLIIQRDNSEKLEYHEKY |
| | | HIIENVFKQKKKPTLKQIAKEIGVNPEDIKGYRITKSGTPEFTSFKLFHDLKKVVKDH |
| | | AILDDIDLLNQIAEILTIYQDKDSIVAELGQLEYLMSEADKQSISELTGYTGTHSLSLK |
| | | CMNMIIDELWHSSMNQMEVFTYLNMRPKKYELKGYQRIPTDMIDDAILSPVVKRTF |
| | | IQSINVINKVIEKYGIPEDIIIELARENNSDDRKKFINNLQKKNEATRKRINEIIGQTGN |
| | | QNAKRIVEKIRLHDQQEGKCLYSLESIPLEDLLNNPNHYEVDHIIPRSVSFDNSYHNK |
| | | VLVKQSENSKKSNLTPYQYFNSGKSKLSYNQFKQHILNLSKSQDRISKKKKEYLLEE |
| | | RDINKFEVQKEFINRNLVDTRYATRELTNYLKAYFSANNMNVKVKTINGSFTDYLR |
| | | KVWKFKKERNHGYKHHAEDALIIANADFLFKENKKLKAVNSVLEKPEIETKQLDIQ |
| | | VDSEDNYSEMFIIPKQVQDIKDFRNFKYSHRVDKKPNRQLINDTLYSTRKKDNSTYI |
| | | VQTIKDIYAKDNTTLKKQFDKSPEKFLMYQHDPRTFEKLEVIMKQYANEKNPLAKY |
| | | HEETGEYLTKYSKKNNGPIVKSLKYIGNKLGSHLDVTHQFKSSTKKLVKLSIKNYRF |
| | | DVYLTEKGYKFVTIAYLNVFKKDNYYYIPKDKYQELKEKKKIKDTDQFIASFYKND |
| | | LIKLNGDLYKIIGVNSDDRNIIELDYYDIKYKDYCEINNIKGEPRIKKTIGKKTESIEKF |
| | | TTDVLGNLYLHSTEKAPQLIFKRGL |
| 34383 | sRGN3.1(N585A) | MNQKFILGLDIGITSVGYGLIDYETKNIIDAGVRLFPEANVENNEGRRSKRGSRRLKR |
| | Nickase | RRIHRLERVKLLLTEYDLINKEQIPTSNNPYQIRVKGLSEILSKDELAIALLHLAKRRG |
| | | IHNVDVAADKEETASDSLSTKDQINKNAKFLESRYVCELQKERLENEGHVRGVENR |
| | | FLTKDIVREAKKIIDTQMQYYPEIDETFKEKYISLVETRREYFEGPGQGSPFGWNGDL |
| | | KKWYEMLMGHCTYFPQELRSVKYAYSADLFNALNDLNNLIIQRDNSEKLEYHEKY |
| | | HIIENVFKQKKKPTLKQIAKEIGVNPEDIKGYRITKSGTPEFTSFKLFHDLKKVVKDH |
| | | AILDDIDLLNQIAEILTIYQDKDSIVAELGQLEYLMSEADKQSISELTGYTGTHSLSLK |
| | | CMNMIIDELWHSSMNQMEVFTYLNMRPKKYELKGYQRIPTDMIDDAILSPVVKRTF |
| | | IQSINVINKVIEKYGIPEDIIIELARENNSDDRKKFINNLQKKNEATRKRINEIIGQTGN |
| | | QNAKRIVEKIRLHDQQEGKCLYSLESIPLEDLLNNPNHYEVDHIIPRSVSFDNSYHNK |
| | | VLVKQSEASKKSNLTPYQYFNSGKSKLSYNQFKQHILNLSKSQDRISKKKKEYLLEE |
| | | RDINKFEVQKEFINRNLVDTRYATRELTNYLKAYFSANNMNVKVKTINGSFTDYLR |
| | | KVWKFKKERNHGYKHHAEDALIIANADFLFKENKKLKAVNSVLEKPEIETKQLDIQ |
| | | VDSEDNYSEMFIIPKQVQDIKDFRNFKYSHRVDKKPNRQLINDTLYSTRKKDNSTYI |
| | | VQTIKDIYAKDNTTLKKQFDKSPEKFLMYQHDPRTFEKLEVIMKQYANEKNPLAKY |
| | | HEETGEYLTKYSKKNNGPIVKSLKYIGNKLGSHLDVTHQFKSSTKKLVKLSIKNYRF |
| | | DVYLTEKGYKFVTIAYLNVFKKDNYYYIPKDKYQELKEKKKIKDTDQFIASFYKND |
| | | LIKLNGDLYKIIGVNSDDRNIIELDYYDIKYKDYCEINNIKGEPRIKKTIGKKTESIEKF |
| | | TTDVLGNLYLHSTEKAPQLIFKRGL |
| 34384 | Met(-) | NQKFILGLDIGITSVGYGLIDYETKNIIDAGVRLFPEANVENNEGRRSKRGSRRLKRR |
| | sRGN3.1(N584A) | RIHRLERVKLLLTEYDLINKEQIPTSNNPYQIRVKGLSEILSKDELAIALLHLAKRRGI |
| | Nickase | HNVDVAADKEETASDSLSTKDQINKNAKFLESRYVCELQKERLENEGHVRGVENRF |
| | | LTKDIVREAKKIIDTQMQYYPEIDETFKEKYISLVETRREYFEGPGQGSPFGWNGDLK |
| | | KWYEMLMGHCTYFPQELRSVKYAYSADLFNALNDLNNLIIQRDNSEKLEYHEKYHI |
| | | IENVFKQKKKPTLKQIAKEIGVNPEDIKGYRITKSGTPEFTSFKLFHDLKKVVKDHAI |
| | | LDDIDLLNQIAEILTIYQDKDSIVAELGQLEYLMSEADKQSISELTGYTGTHSLSLKC |
| | | MNMIIDELWHSSMNQMEVFTYLNMRPKKYELKGYQRIPTDMIDDAILSPVVKRTFI |
| | | QSINVINKVIEKYGIPEDIIIELARENNSDDRKKFINNLQKKNEATRKRINEIIGQTGNQ |
| | | NAKRIVEKIRLHDQQEGKCLYSLESIPLEDLLNNPNHYEVDHIIPRSVSFDNSYHNKV |
| | | LVKQSEASKKSNLTPYQYFNSGKSKLSYNQFKQHILNLSKSQDRISKKKKEYLLEER |
| | | DINKFEVQKEFINRNLVDTRYATRELTNYLKAYFSANNMNVKVKTINGSFTDYLRK |
| | | VWKFKKERNHGYKHHAEDALIIANADFLFKENKKLKAVNSVLEKPEIETKQLDIQV |
| | | DSEDNYSEMFIIPKQVQDIKDFRNFKYSHRVDKKPNRQLINDTLYSTRKKDNSTYIV |
| | | QTIKDIYAKDNTTLKKQFDKSPEKFLMYQHDPRTFEKLEVIMKQYANEKNPLAKYH |
| | | EETGEYLTKYSKKNNGPIVKSLKYIGNKLGSHLDVTHQFKSSTKKLVKLSIKNYRFD |
| | | VYLTEKGYKFVTIAYLNVFKKDNYYYIPKDKYQELKEKKKIKDTDQFIASFYKNDLI |
| | | KLNGDLYKIIGVNSDDRNIIELDYYDIKYKDYCEINNIKGEPRIKKTIGKKTESIEKFTT |
| | | DVLGNLYLHSTEKAPQLIFKRGL |
| 34385 | sRGN3.3 | MNQKFILGLDIGITSVGYGLIDYETKNIIDAGVRLFPEANVENNEGRRSKRGSRRLKR |
| | | RRIHRLERVKLLLTEYDLINKEQIPTSNNPYQIRVKGLSEILSKDELAIALLHLAKRRG |
| | | IHNVDVAADKEETASDSLSTKDQINKNAKFLESRYVCELQKERLENEGHVRGVENR |
| | | FLTKDIVREAKKIIDTQMQYYPEIDETFKEKYISLVETRREYFEGPGQGSPFGWNGDL |
| | | KKWYEMLMGHCTYFPQELRSVKYAYSADLFNALNDLNNLIIQRDNSEKLEYHEKY |
| | | HIIENVFKQKKKPTLKQIAKEIGVNPEDIKGYRITKSGTPEFTSFKLFHDLKKVVKDH |
| | | AILDDIDLLNQIAEILTIYQDKDSIVAELGQLEYLMSEADKQSISELTGYTGTHSLSLK |
| | | CMNMIIDELWHSSMNQMEVFTYLNMRPKKYELKGYQRIPTDMIDDAILSPVVKRTF |
| | | IQSINVINKVIEKYGIPEDIIIELARENNSDDRKKFINNLQKKNEATRKRINEIIGQTGN |
| | | QNAKRIVEKIRLHDQQEGKCLYSLESIPLEDLLNNPNHYEVDHIIPRSVSFDNSYHNK |
| | | VLVKQSENSKKSNLTPYQYFNSGKSKLSYNQFKQHILNLSKSQDRISKKKKEYLLEE |
| | | RDINKFEVQKEFINRNLVDTRYATRELTSYLKAYFSANNMDVKVKTINGSFTNHLR |
| | | KVWRFDKYRNHGYKHHAEDALIIANADFLFKENKKLQNTNKILEKPTIENNTKKVT |
| | | VEKEEDYNNVFETPKLVEDIKQYRDYKFSHRVDKKPNRQLINDTLYSTRMKDEHDY |
| | | IVQTITDIYGKDNTNLKKQFNKNPEKFLMYQNDPKTFEKLSIIMKQYSDEKNPLAKY |
| | | YEETGEYLTKYSKKNNGPIVKKIKLLGNKVGNHLDVTNKYENSTKKLVKLSIKNYR |
| | | FDVYLTEKGYKFVTIAYLNVFKKDNYYYIPKDKYQELKEKKKIKDTDQFIASFYKN |
| | | DLIKLNGDLYKIIGVNSDDRNIIELDYYDIKYKDYCEINNIKGEPRIKKTIGKKTESIEK |
| | | FTTDVLGNLYLHSTEKAPQLIFKRGL |
| 34386 | sRGN3.3(N585A) | MNQKFILGLDIGITSVGYGLIDYETKNIIDAGVRLFPEANVENNEGRRSKRGSRRLKR |
| | Nickase | RRIHRLERVKLLLTEYDLINKEQIPTSNNPYQIRVKGLSEILSKDELAIALLHLAKRRG |
| | | IHNVDVAADKEETASDSLSTKDQINKNAKFLESRYVCELQKERLENEGHVRGVENR |
| | | FLTKDIVREAKKIIDTQMQYYPEIDETFKEKYISLVETRREYFEGPGQGSPFGWNGDL |
| | | KKWYEMLMGHCTYFPQELRSVKYAYSADLFNALNDLNNLIIQRDNSEKLEYHEKY |
| | | HIIENVFKQKKKPTLKQIAKEIGVNPEDIKGYRITKSGTPEFTSFKLFHDLKKVVKDH |
| | | AILDDIDLLNQIAEILTIYQDKDSIVAELGQLEYLMSEADKQSISELTGYTGTHSLSLK |
| | | CMNMIIDELWHSSMNQMEVFTYLNMRPKKYELKGYQRIPTDMIDDAILSPVVKRTF |
| | | IQSINVINKVIEKYGIPEDIIIELARENNSDDRKKFINNLQKKNEATRKRINELIGQTGN |
| | | QNAKRIVEKIRLHDQQEGKCLYSLESIPLEDLLNNPNHYEVDHIIPRSVSFDNSYHNK |
| | | VLVKQSEASKKSNLTPYQYFNSGKSKLSYNQFKQHILNLSKSQDRISKKKKEYLLEE |
| | | RDINKFEVQKEFINRNLVDTRYATRELTSYLKAYFSANNMDVKVKTINGSFTNHLR |
| | | KVWRFDKYRNHGYKHHAEDALIIANADFLFKENKKLQNTNKILEKPTIENNTKKVT |
| | | VEKEEDYNNVFETPKLVEDIKQYRDYKFSHRVDKKPNRQLINDTLYSTRMKDEHDY |
| | | IVQTITDIYGKDNTNLKKQFNKNPEKFLMYQNDPKTFEKLSIIMKQYSDEKNPLAKY |
| | | YEETGEYLTKYSKKNNGPIVKKIKLLGNKVGNHLDVTNKYENSTKKLVKLSIKNYR |
| | | FDVYLTEKGYKFVTIAYLNVFKKDNYYYIPKDKYQELKEKKKIKDTDQFIASFYKN |
| | | DLIKLNGDLYKIIGVNSDDRNIIELDYYDIKYKDYCEINNIKGEPRIKKTIGKKTESIEK |
| | | FTTDVLGNLYLHSTEKAPQLIFKRGL |
| 34387 | Met(-) | NQKFILGLDIGITSVGYGLIDYETKNIIDAGVRLFPEANVENNEGRRSKRGSRRLKRR |
| | sRGN3.3(N584A) | RIHRLERVKLLLTEYDLINKEQIPTSNNPYQIRVKGLSEILSKDELAIALLHLAKRRGI |
| | Nickase | HNVDVAADKEETASDSLSTKDQINKNAKFLESRYVCELQKERLENEGHVRGVENRF |
| | | LTKDIVREAKKIIDTQMQYYPEIDETFKEKYISLVETRREYFEGPGQGSPFGWNGDLK |
| | | KWYEMLMGHCTYFPQELRSVKYAYSADLFNALNDLNNLIIQRDNSEKLEYHEKYHI |
| | | IENVFKQKKKPTLKQIAKEIGVNPEDIKGYRITKSGTPEFTSFKLFHDLKKVVKDHAI |
| | | LDDIDLLNQIAEILTIYQDKDSIVAELGQLEYLMSEADKQSISELTGYTGTHSLSLKC |
| | | MNMIIDELWHSSMNQMEVFTYLNMRPKKYELKGYQRIPTDMIDDAILSPVVKRTFI |
| | | QSINVINKVIEKYGIPEDIIIELARENNSDDRKKFINNLQKKNEATRKRINEIIGQTGNQ |
| | | NAKRIVEKIRLHDQQEGKCLYSLESIPLEDLLNNPNHYEVDHIIPRSVSFDNSYHNKV |
| | | LVKQSEASKKSNLTPYQYFNSGKSKLSYNQFKQHILNLSKSQDRISKKKKEYLLEER |
| | | DINKFEVQKEFINRNLVDTRYATRELTSYLKAYFSANNMDVKVKTINGSFTNHLRK |
| | | VWRFDKYRNHGYKHHAEDALIIANADFLFKENKKLQNTNKILEKPTIENNTKKVTV |
| | | EKEEDYNNVFETPKLVEDIKQYRDYKFSHRVDKKPNRQLINDTLYSTRMKDEHDYI |
| | | VQTITDIYGKDNTNLKKQFNKNPEKFLMYQNDPKTFEKLSIIMKQYSDEKNPLAKY |
| | | YEETGEYLTKYSKKNNGPIVKKIKLLGNKVGNHLDVTNKYENSTKKLVKLSIKNYR |
| | | FDVYLTEKGYKFVTIAYLNVFKKDNYYYIPKDKYQELKEKKKIKDTDQFIASFYKN |
| | | DLIKLNGDLYKIIGVNSDDRNIIELDYYDIKYKDYCEINNIKGEPRIKKTIGKKTESIEK |
| | | FTTDVLGNLYLHSTEKAPQLIFKRGL |
| 34388 | SpG | MDKKYSIGLDIGTNSVGWAVITDEYKVPSKKFKVLGNTDRHSIKKNLIGALLFDSGE |
| | | TAEATRLKRTARRRYTRRKNRICYLQEIFSNEMAKVDDSFFHRLEESFLVEEDKKHE |
| | | RHPIFGNIVDEVAYHEKYPTIYHLRKKLVDSTDKADLRLIYLALAHMIKFRGHFLIEG |
| | | DLNPDNSDVDKLFIQLVQTYNQLFEENPINASGVDAKAILSARLSKSRRLENLIAQLP |
| | | GEKKNGLFGNLIALSLGLTPNFKSNFDLAEDAKLQLSKDTYDDDLDNLLAQIGDQY |
| | | ADLFLAAKNLSDAILLSDILRVNTEITKAPLSASMIKRYDEHHQDLTLLKALVRQQLP |
| | | EKYKEIFFDQSKNGYAGYIDGGASQEEFYKFIKPILEKMDGTEELLVKLNREDLLRK |
| | | QRTFDNGSIPHQIHLGELHAILRRQEDFYPFLKDNREKIEKILTFRIPYYVGPLARGNS |
| | | RFAWMTRKSEETITPWNFEEVVDKGASAQSFIERMTNFDKNLPNEKVLPKHSLLYE |
| | | YFTVYNELTKVKYVTEGMRKPAFLSGEQKKAIVDLLFKTNRKVTVKQLKEDYFKKI |
| | | ECFDSVEISGVEDRFNASLGTYHDLLKIIKDKDFLDNEENEDILEDIVLTLTLFEDREM |
| | | IEERLKTYAHLFDDKVMKQLKRRRYTGWGRLSRKLINGIRDKQSGKTILDFLKSDGF |
| | | ANRNFMQLIHDDSLTFKEDIQKAQVSGQGDSLHEHIANLAGSPAIKKGILQTVKVVD |
| | | ELVKVMGRHKPENIVIEMARENQTTQKGQKNSRERMKRIEEGIKELGSQILKEHPVE |
| | | NTQLQNEKLYLYYLQNGRDMYVDQELDINRLSDYDVDHIVPQSFLKDDSIDNKVLT |
| | | RSDKNRGKSDNVPSEEVVKKMKNYWRQLLNAKLITQRKFDNLTKAERGGLSELDK |
| | | AGFIKRQLVETRQITKHVAQILDSRMNTKYDENDKLIREVKVITLKSKLVSDFRKDF |
| | | QFYKVREINNYHHAHDAYLNAVVGTALIKKYPKLESEFVYGDYKVYDVRKMIAKS |
| | | EQEIGKATAKYFFYSNIMNFFKTEITLANGEIRKRPLIETNGETGEIVWDKGRDFATV |
| | | RKVLSMPQVNIVKKTEVQTGGFSKESILPKRNSDKLIARKKDWDPKKYGGFLWPTV |
| | | AYSVLVVAKVEKGKSKKLKSVKELLGITIMERSSFEKNPIDFLEAKGYKEVKKDLIIK |
| | | LPKYSLFELENGRKRMLASAKQLQKGNELALPSKYVNFLYLASHYEKLKGSPEDNE |
| | | QKQLFVEQHKHYLDEIIEQISEFSKRVILADANLDKVLSAYNKHRDKPIREQAENIIH |
| | | LFTLTNLGAPAAFKYFDTTIDRKQYRSTKEVLDATLIHQSITGLYETRIDLSQLGGD |
| 34389 | SpG(H840A) | MDKKYSIGLDIGTNSVGWAVITDEYKVPSKKFKVLGNTDRHSIKKNLIGALLFDSGE |
| | Nickase | TAEATRLKRTARRRYTRRKNRICYLQEIFSNEMAKVDDSFFHRLEESFLVEEDKKHE |
| | | RHPIFGNIVDEVAYHEKYPTIYHLRKKLVDSTDKADLRLIYLALAHMIKFRGHFLIEG |
| | | DLNPDNSDVDKLFIQLVQTYNQLFEENPINASGVDAKAILSARLSKSRRLENLIAQLP |
| | | GEKKNGLFGNLIALSLGLTPNFKSNFDLAEDAKLQLSKDTYDDDLDNLLAQIGDQY |
| | | ADLFLAAKNLSDAILLSDILRVNTEITKAPLSASMIKRYDEHHQDLTLLKALVRQQLP |
| | | EKYKEIFFDQSKNGYAGYIDGGASQEEFYKFIKPILEKMDGTEELLVKLNREDLLRK |
| | | QRTFDNGSIPHQIHLGELHAILRRQEDFYPFLKDNREKIEKILTFRIPYYVGPLARGNS |
| | | RFAWMTRKSEETITPWNFEEVVDKGASAQSFIERMTNFDKNLPNEKVLPKHSLLYE |
| | | YFTVYNELTKVKYVTEGMRKPAFLSGEQKKAIVDLLFKTNRKVTVKQLKEDYFKKI |
| | | ECFDSVEISGVEDRFNASLGTYHDLLKIIKDKDFLDNEENEDILEDIVLTLTLFEDREM |
| | | IEERLKTYAHLFDDKVMKQLKRRRYTGWGRLSRKLINGIRDKQSGKTILDFLKSDGF |
| | | ANRNFMQLIHDDSLTFKEDIQKAQVSGQGDSLHEHIANLAGSPAIKKGILQTVKVVD |
| | | ELVKVMGRHKPENIVIEMARENQTTQKGQKNSRERMKRIEEGIKELGSQILKEHPVE |
| | | NTQLQNEKLYLYYLQNGRDMYVDQELDINRLSDYDVDAIVPQSFLKDDSIDNKVLT |
| | | RSDKNRGKSDNVPSEEVVKKMKNYWRQLLNAKLITQRKFDNLTKAERGGLSELDK |
| | | AGFIKRQLVETRQITKHVAQILDSRMNTKYDENDKLIREVKVITLKSKLVSDFRKDF |
| | | QFYKVREINNYHHAHDAYLNAVVGTALIKKYPKLESEFVYGDYKVYDVRKMIAKS |
| | | EQEIGKATAKYFFYSNIMNFFKTEITLANGEIRKRPLIETNGETGEIVWDKGRDFATV |
| | | RKVLSMPQVNIVKKTEVQTGGFSKESILPKRNSDKLIARKKDWDPKKYGGFLWPTV |
| | | AYSVLVVAKVEKGKSKKLKSVKELLGITIMERSSFEKNPIDFLEAKGYKEVKKDLIIK |
| | | LPKYSLFELENGRKRMLASAKQLQKGNELALPSKYVNFLYLASHYEKLKGSPEDNE |
| | | QKQLFVEQHKHYLDEIIEQISEFSKRVILADANLDKVLSAYNKHRDKPIREQAENIIH |
| | | LFTLTNLGAPAAFKYFDTTIDRKQYRSTKEVLDATLIHQSITGLYETRIDLSQLGGD |
| 34390 | Met(-) | DKKYSIGLDIGTNSVGWAVITDEYKVPSKKFKVLGNTDRHSIKKNLIGALLFDSGET |
| | SpG(H839A) | AEATRLKRTARRRYTRRKNRICYLQEIFSNEMAKVDDSFFHRLEESFLVEEDKKHER |
| | Nickase | HPIFGNIVDEVAYHEKYPTIYHLRKKLVDSTDKADLRLIYLALAHMIKFRGHFLIEGD |
| | | LNPDNSDVDKLFIQLVQTYNQLFEENPINASGVDAKAILSARLSKSRRLENLIAQLPG |
| | | EKKNGLFGNLIALSLGLTPNFKSNFDLAEDAKLQLSKDTYDDDLDNLLAQIGDQYA |
| | | DLFLAAKNLSDAILLSDILRVNTEITKAPLSASMIKRYDEHHQDLTLLKALVRQQLPE |
| | | KYKEIFFDQSKNGYAGYIDGGASQEEFYKFIKPILEKMDGTEELLVKLNREDLLRKQ |
| | | RTFDNGSIPHQIHLGELHAILRRQEDFYPFLKDNREKIEKILTFRIPYYVGPLARGNSR |
| | | FAWMTRKSEETITPWNFEEVVDKGASAQSFIERMTNFDKNLPNEKVLPKHSLLYEY |
| | | FTVYNELTKVKYVTEGMRKPAFLSGEQKKAIVDLLFKTNRKVTVKQLKEDYFKKIE |
| | | CFDSVEISGVEDRFNASLGTYHDLLKIIKDKDFLDNEENEDILEDIVLTLTLFEDREMI |
| | | EERLKTYAHLFDDKVMKQLKRRRYTGWGRLSRKLINGIRDKQSGKTILDFLKSDGF |
| | | ANRNFMQLIHDDSLTFKEDIQKAQVSGQGDSLHEHIANLAGSPAIKKGILQTVKVVD |
| | | ELVKVMGRHKPENIVIEMARENQTTQKGQKNSRERMKRIEEGIKELGSQILKEHPVE |
| | | NTQLQNEKLYLYYLQNGRDMYVDQELDINRLSDYDVDAIVPQSFLKDDSIDNKVLT |
| | | RSDKNRGKSDNVPSEEVVKKMKNYWRQLLNAKLITQRKFDNLTKAERGGLSELDK |
| | | AGFIKRQLVETRQITKHVAQILDSRMNTKYDENDKLIREVKVITLKSKLVSDFRKDF |
| | | QFYKVREINNYHHAHDAYLNAVVGTALIKKYPKLESEFVYGDYKVYDVRKMIAKS |
| | | EQEIGKATAKYFFYSNIMNFFKTEITLANGEIRKRPLIETNGETGEIVWDKGRDFATV |
| | | RKVLSMPQVNIVKKTEVQTGGFSKESILPKRNSDKLIARKKDWDPKKYGGFLWPTV |
| | | AYSVLVVAKVEKGKSKKLKSVKELLGITIMERSSFEKNPIDFLEAKGYKEVKKDLIIK |
| | | LPKYSLFELENGRKRMLASAKQLQKGNELALPSKYVNFLYLASHYEKLKGSPEDNE |
| | | QKQLFVEQHKHYLDEIIEQISEFSKRVILADANLDKVLSAYNKHRDKPIREQAENIIH |
| | | LFTLTNLGAPAAFKYFDTTIDRKQYRSTKEVLDATLIHQSITGLYETRIDLSQLGGD |

[0153] In some embodiments, a Cas9 protein comprises a variant Cas9 protein containing one or more amino acid substitutions. In some embodiments, a wildtype Cas9 protein comprises a RuvC domain and an HNH domain. In some embodiments, a prime editor comprises a nuclease active Cas9 protein that may cleave both strands of a double stranded target DNA sequence. In some embodiments, the nuclease active Cas9 protein comprises a functional RuvC domain and a functional HNH domain. In some embodiments, a prime editor comprises a Cas9 nickase that can bind to a guide polynucleotide and recognize a target DNA, but can cleave only one strand of a double stranded target DNA. In some embodiments, the Cas9 nickase comprises only one functional RuvC domain or one functional HNH domain. In some embodiments, a prime editor comprises a Cas9 that has a non-functional HNH domain and a functional RuvC domain. In some embodiments, the prime editor can cleave the edit strand (i.e., the PAM strand), but not the non-edit strand of a double stranded target DNA sequence. In some embodiments, a prime editor comprises a Cas9 having a non-functional RuvC domain that can cleave the target strand (i.e., the non-PAM strand), but not the edit strand of a double stranded target DNA sequence. In some embodiments, a prime editor comprises a Cas9 that has neither a functional RuvC domain nor a functional HNH domain, which may not cleave any strand of a double stranded target DNA sequence.

[0154] In some embodiments, a prime editor comprises a Cas9 having a mutation in the RuvC domain that reduces or abolishes the nuclease activity of the RuvC domain. In some embodiments, the Cas9 comprises a mutation at amino acid D10 as compared to a wild type SpCas9 as set forth in SEQ ID NO: 34364, or a corresponding mutation thereof. In some embodiments, the Cas9 comprises a D10A mutation as compared to a wild type SpCas9 as set forth in SEQ ID NO: 34364, or a corresponding mutation thereof. In some embodiments, the Cas9 polypeptide comprises a mutation at amino acid D10, G12, and/or G17 as compared to a wild type SpCas9 as set forth in SEQ ID NO: 34364, or a corresponding mutation thereof. In some embodiments, the Cas9 polypeptide comprises a D10A mutation, a G12A mutation, and/or a G17A mutation as compared to a wild type SpCas9 as set forth in SEQ ID NO: 34364, or a corresponding mutation thereof.

[0155] In some embodiments, a prime editor comprises a Cas9 polypeptide having a mutation in the HNH domain that reduces or abolishes the nuclease activity of the HNH domain. In some embodiments, the Cas9 polypeptide comprises a mutation at amino acid H840 as compared to a wild type SpCas9 as set forth in SEQ ID NO: 34364, or a corresponding mutation thereof. In some embodiments, the Cas9 polypeptide comprises a H840A mutation as compared to a wild type SpCas9 as set forth in SEQ ID NO: 34364, or a corresponding mutation thereof. In some embodiments, the Cas9 polypeptide comprises a mutation at amino acid E762, D839, H840, N854, N856, N863, H982, H983, A984, D986, and/or a A987 as compared to a wild type SpCas9 as set forth in SEQ ID NO: 34364, or a corresponding mutation thereof. In some embodiments, the Cas9 polypeptide comprises a E762A, D839A, H840A, N854A, N856A, N863A, H982A, H983A, A984A, and/or a D986A mutation as compared to a wild type SpCas9 as set forth in SEQ ID NO: 34364, or a corresponding mutation thereof. In some embodiments, the Cas9 polypeptide comprises a mutation at amino acid residue R221, N394, and/or H840 as compared to a wild type SpCas9 (e.g., SEQ ID NO: 34364). In some embodiments, the Cas9 polypeptide comprises a R221K, N394L, and/or H840A mutation as compared to a wild type SpCas9 as set forth in SEQ ID NO: 34364, or a corresponding mutation thereof. In some embodiments, the Cas9 polypeptide comprises a mutation at amino acid residue R220, N393, and/or H839 as compared to a wild type SpCas9 (e.g., SEQ ID NO: 34364) lacking a N-terminal methionine, or a corresponding mutation thereof. In some embodiments, the Cas9 polypeptide comprises a R220K, N393K, and/or H839A mutation as compared to a wild type SpCas9 (as set forth in SEQ ID NO: 34364) lacking a N-terminal methionine, or a corresponding mutation thereof.

[0156] In some embodiments, a prime editor comprises a Cas9 having one or more amino acid substitutions in both the HNH domain and the RuvC domain that reduce or abolish the nuclease activity of both the HNH domain and the RuvC domain. In some embodiments, the prime editor comprises a nuclease inactive Cas9, or a nuclease dead Cas9 (dCas9). In some embodiments, the dCas9 comprises a H840X substitution and a D10X mutation compared to a wild type SpCas9 as set forth in SEQ ID NO: 34364 or corresponding mutations thereof, wherein X is any amino acid other than H for the H840X substitution and any amino acid other than D for the D10X substitution. In some embodiments, the dead Cas9 comprises a H840A and a D10A mutation as compared to a wild type SpCas9 as set forth in SEQ ID NO: 34364, or corresponding mutations thereof.

[0157] In some embodiments, the N-terminal methionine is removed from the amino acid sequence of a Cas9 nickase, or from any Cas9 variant, ortholog, or equivalent disclosed or contemplated herein. For example, methionine-minus (Met (−)) Cas9 nickases include any one of the sequences set forth in SEQ ID NOs: 34366, 34369, 34372, 34375, 34378, 34381, 34384, 34387, 34390 or a variant thereof having an amino acid sequence that has at least 80%, at least 85%, at least 90%, at least 95%, or at least 99% sequence identity thereto.

[0158] Besides dead Cas9 and Cas9 nickase variants, the Cas9 proteins used herein may also include other Cas9 variants having at least about 70%, at least about 80%, at least about 90%, at least about 95%, at least about 96%, at least about 97%, at least about 98%, at least about 99%, at least about 99.5%, or at least about 99.9% sequence identity to any reference Cas9 protein, including any wild type Cas9, or mutant Cas9 (e.g., a dead Cas9 or Cas9 nickase), or fragment Cas9, or circular permutant Cas9, or other variant of Cas9 disclosed herein or known in the art. In some embodiments, a Cas9 variant may have 1, 2, 3, 4, 5, 6, 7, 8, 9, 10, 11, 12, 13, 14, 15, 16, 17, 18, 19, 20, 21, 22, 21, 24, 25, 26, 27, 28, 29, 30, 31, 32, 33, 34, 35, 36, 37, 38, 39, 40, 41, 42, 43, 44, 45, 46, 47, 48, 49, 50 or more amino acid changes compared to a reference Cas9, e.g., a wild type Cas9. In some embodiments, the Cas9 variant comprises a fragment of a reference Cas9 (e.g., a gRNA binding domain or a DNA-cleavage domain), such that the fragment is at least about 70% identical, at least about 80% identical, at least about 90% identical, at least about 95% identical, at least about 96% identical, at least about 97% identical, at least about 98% identical, at least about 99% identical, at least about 99.5% identical, or at least about 99.9% identical to the corresponding fragment of a reference Cas9, e.g., a wild type Cas9. In some embodiments, the fragment is at least 30%, at least 35%, at least 40%, at least 45%, at least 50%, at least 55%, at least 60%, at least 65%, at least 70%, at least 75%, at least 80%, at least 85%, at least 90%, at least 95%, at least 96%, at least 97%, at least 98%, at least 99%, or at least 99.5% of the amino acid length of a corresponding wild type Cas9.

[0159] In some embodiments, a Cas9 fragment is a functional fragment that retains one or more Cas9 activities. In some embodiments, the Cas9 fragment is at least 100 amino acids in length. In some embodiments, the fragment is at least 100, 150, 200, 250, 300, 350, 400, 450, 500, 550, 600, 650, 700, 750, 800, 850, 900, 950, 1000, 1050, 1100, 1150, 1200, 1250, or at least 1300 amino acids in length.

[0160] In some embodiments, a prime editor comprises a Cas protein, e.g., Cas9, containing modifications that allow altered PAM recognition. In prime editing using a Cas-protein-based prime editor, a “protospacer adjacent motif (PAM)”, PAM sequence, or PAM-like motif, may be used to refer to a short DNA sequence immediately following the protospacer sequence on the PAM strand of the target gene. In some embodiments, the PAM is recognized by the Cas nuclease in the prime editor during prime editing. In certain embodiments, the PAM is required for target binding of the Cas protein. The specific PAM sequence required for Cas protein recognition may depend on the specific type of the Cas protein. A PAM can be 1, 2, 3, 4, 5, 6, 7, 8, 9, 10 or more nucleotides in length. In some embodiments, a PAM is between 2-6 nucleotides in length. In some embodiments, the PAM can be a 5′ PAM (i.e., located upstream of the 5′ end of the protospacer). In other embodiments, the PAM can be a 3′ PAM (i.e., located downstream of the 5′ end of the protospacer). In some embodiments, the Cas protein of a prime editor recognizes a canonical PAM, for example, a SpCas9 recognizes 5′-NGG-3′ PAM. In some embodiments, the Cas protein of a prime editor has altered or non-canonical PAM specificities. Exemplary PAM sequences and corresponding Cas variants are described in Table 80 below. It should be appreciated that for each of the variants provided, the Cas protein comprises one or more of the amino acid substitutions as indicated compared to a wild type Cas protein sequence, for example, the Cas9 as set forth in SEQ ID NO: 34364. The PAM motifs as shown in Table 80 below are in the order of 5′ to 3′. In some embodiments, the Cas proteins of the disclosure can also be used to direct transcriptional control of target sequences, for example silencing transcription by sequence-specific binding to target sequences. In some embodiments, a Cas protein described herein may have one or mutations in a PAM recognition motif. In some embodiments, a Cas protein described herein may have altered PAM specificity.

[0161] As used in PAM sequences in Table 80, “N” refers to any one of nucleotides A, G, C, and T, “R” refers to nucleotide A or G, and “Y” refers to nucleotide C or T.

TABLE 80
Cas protein variants and corresponding PAM sequences

| Variant | PAM |
|---|---|
| spCas9 (wild type) | NGG, NGA, NAG |
| spCas9-VRVRFRR | NG |
| R1335V/L1111R/D1135V/G1218R/E1219F/A1322R/T1337R | |
| spCas9-VQR (D1135V/R1335Q/T1337R ) | NGA |
| spCas9-EQR (D1135E/R1335Q/T1337R) | NGA |
| spCas9-VRER (D1135V/G1218R/R1335E/T1337R) | NGCG |
| spCas9-VRQR (D1135V, G1218R, R1335Q, T1337R) | NGA |
| Cas9-NG (L1111R, D1135V, G1218R, E1219F, A1322R, T1337R, R1335V) | NGN |
| SpG Cas9 (D1135L, S1136W, G1218K, E1219Q, R1335Q, T1337R) | NGN |
| SyRY Cas9 | NRN |
| (A61R, L1111R, N1317R, A1322R, and R1333P) | |
| xCas9 (E480K, E543D, E1219V, K294R, Q1256K, A262T, S409I, M6941) | NGN |
| SluCa9 | NNGG |
| sRGN1, sRGN2, sRGN4, sRGN3.1, sRGN3.3 | NNGG |
| saCas9 | NNGRRT, |
| | NNGRRN |
| saCas9-KKH (E782K, N968K, R1015H) | NNNRRT |
| spCas9-MQKSER (D1135M, S1136Q, G1218K, E1219S, R1335E, T1337R) | NGCG/NGCN |
| spCas9-LRKIQK (D1135L, S1136R, G1218K, E1219I, R1335Q, T1337K) | NGTN |
| spCas9-LRVSQK (D1135L, S1136R, G1218V, E1219S, R1335Q, T1337K) | NGTN |
| spCas9-LRVSQL (D1135L, S1136R, G1218V, E1219S, R1335Q, T1337L) | NGTN |
| Cpf1 | TTTV |
| Spy-Mac | NAA |
| NmCas9 | NNNNGATT |
| StCas9 | NNAGAAW |
| TdCas9 | NAAAAC |

[0162] In some embodiments, a prime editor comprises a Cas9 polypeptide comprising one or mutations selected from the group consisting of: A61R, L111R, D1135V, R221K, A262T, R324L, N394K, S4091, S4091, E427G, E480K, M495V, N497A, Y515N, K526E, F539S, E543D, R654L, R661A, R661L, R691A, N692A, M694A, M6941, Q695A, H698A, R753G, M7631, K848A, K890N, Q926A, K1003A, R1060A, L1111R, R1114G, D1135E, D1135L, D1135N, S1136W, V1139A, D1180G, G1218K, G1218R, G1218S, E1219Q, E1219V, E1219V, Q1221H, P1249S, E1253K, N1317R, A1320V, P1321S, A1322R, I1322V, D1332G, R1332N, A1332R, R1333K, R1333P, R1335L, R1335Q, R1335V, T1337N, T1337R, S1338T, H1349R, and any combinations thereof as compared to a wildtype SpCas9 polypeptide as set forth in SEQ ID NO: 34364.

[0163] In some embodiments, a prime editor comprises a SaCas9 polypeptide. In some embodiments, the SaCas9 polypeptide comprises one or more of mutations E782K, N968K, and R1015H as compared to a wild type SaCas9. In some embodiments, a prime editor comprises a FnCas9 polypeptide, for example, a wildtype FnCas9 polypeptide or a FnCas9 polypeptide comprising one or more of mutations E1369R, E1449H, or R1556A as compared to the wild type FnCas9. In some embodiments, a prime editor comprises a Sc Cas9, for example, a wild type ScCas9 or a ScCas9 polypeptide comprises one or more of mutations 1367K, G368D, 1369K, H371L, T375S, T376G, and T1227K as compared to the wild type ScCas9. In some embodiments, a prime editor comprises a St1 Cas9 polypeptide, a St3 Cas9 polypeptide, or a SluCas9 polypeptide.

[0164] In some embodiments, a prime editor comprises a Cas polypeptide that comprises a circular permutant Cas variant. For example, a Cas9 polypeptide of a prime editor may be engineered such that the N-terminus and the C-terminus of a Cas9 protein (e.g., a wild type Cas9 protein, or a Cas9 nickase) are topically rearranged to retain the ability to bind DNA when complexed with a guide RNA (gRNA). An exemplary circular permutant configuration may be N-terminus-[original C-terminus]-[original N-terminus]-C-terminus. Any of the Cas9 proteins described herein, including any variant, ortholog, or naturally occurring Cas9 or equivalent thereof, may be reconfigured as a circular permutant variant.

[0165] In various embodiments, the circular permutants of a Cas protein, e.g., a Cas9, may have the following structure: N-terminus-[original C-terminus]-[optional linker]-[original N-terminus]-C-terminus. In some embodiments, a circular permutant Cas9 comprises any one of the following structures (amino acid positions as set forth in SEQ ID NO: 34364):
[0166] N-terminus-[1268-1368]-[optional linker]-[1-1267]-C-terminus;
[0167] N-terminus-[1168-1368]-[optional linker]-[1-1167]-C-terminus;
[0168] N-terminus-[1068-1368]-[optional linker]-[1-1067]-C-terminus;
[0169] N-terminus-[968-1368]-[optional linker]-[1-967]-C-terminus;
[0170] N-terminus-[868-1368]-[optional linker]-[1-867]-C-terminus;
[0171] N-terminus-[768-1368]-[optional linker]-[1-767]-C-terminus;
[0172] N-terminus-[668-1368]-[optional linker]-[1-667]-C-terminus;
[0173] N-terminus-[568-1368]-[optional linker]-[1-567]-C-terminus;
[0174] N-terminus-[468-1368]-[optional linker]-[1-467]-C-terminus;
[0175] N-terminus-[368-1368]-[optional linker]-[1-367]-C-terminus;
[0176] N-terminus-[268-1368]-[optional linker]-[1-267]-C-terminus;
[0177] N-terminus-[168-1368]-[optional linker]-[1-167]-C-terminus;
[0178] N-terminus-[68-1368]-[optional linker]-[1-67]-C-terminus;
[0179] N-terminus-[10-1368]-[optional linker]-[1-9]-C-terminus, or the corresponding circular permutants of other Cas9 proteins (including other Cas9 orthologs, variants, etc).

[0180] In some embodiments, a circular permutant Cas9 comprises any one of the following structures (amino acid positions as set forth in SEQ ID NO: 34364-1368 amino acids of UniProtKB-Q99ZW2:
[0181] N-terminus-[102-1368]-[optional linker]-[1-101]-C-terminus;
[0182] N-terminus-[1028-1368]-[optional linker]-[1-1027]-C-terminus;
[0183] N-terminus-[1041-1368]-[optional linker]-[1-1043]-C-terminus;
[0184] N-terminus-[1249-1368]-[optional linker]-[1-1248]-C-terminus; or
[0185] N-terminus-[1300-1368]-[optional linker]-[1-1299]-C-terminus, or the corresponding circular permutants of other Cas9 proteins (including other Cas9 orthologs, variants, etc).

[0186] In some embodiments, a circular permutant Cas9 comprises any one of the following structures (amino acid positions as set forth in SEQ ID NO: 34364-1368 amino acids of UniProtKB-Q99ZW2 N-terminus-[103-1368]-[optional linker]-[1-102]-C-terminus:
[0187] N-terminus-[1029-1368]-[optional linker]-[1-1028]-C-terminus;
[0188] N-terminus-[1042-1368]-[optional linker]-[1-1041]-C-terminus;
[0189] N-terminus-[1250-1368]-[optional linker]-[1-1249]-C-terminus; or
[0190] N-terminus-[1301-1368]-[optional linker]-[1-1300]-C-terminus, or the corresponding circular permutants of other Cas9 proteins (including other Cas9 orthologs, variants, etc).

[0191] In some embodiments, the circular permutant can be formed by linking a C-terminal fragment of a Cas9 to an N-terminal fragment of a Cas9, either directly or by using a linker, such as an amino acid linker. In some embodiments, the C-terminal fragment may correspond to the 95% or more of the C-terminal amino acids of a Cas9 (e.g., amino acids about 1300-1368 as set forth in SEQ ID No: 34364 or corresponding amino acid positions thereof), or the 90%, 85%, 80%, 75%, 70%, 65%, 60%, 55%, 50%, 45%, 40%, 35%, 30%, 25%, 20%, 15%, 10%, or 5% or more of the C-terminal amino acids of a Cas9 (e.g., SEQ ID NO: 34364 or a ortholog or a variant thereof). The N-terminal portion may correspond to 95% or more of the N-terminal amino acids of a Cas9 (e.g., amino acids about 1-1300 as set forth in SEQ ID No: 34364 or corresponding amino acid positions thereof), or 90%, 85%, 80%, 75%, 70%, 65%, 60%, 55%, 50%, 45%, 40%, 35%, 30%, 25%, 20%, 15%, 10%, or 5% or more of the N terminal amino acids of a Cas9 (e.g., as set forth in SEQ ID No: 34364 or corresponding amino acid positions thereof).

[0192] In some embodiments, the circular permutant can be formed by linking a C-terminal fragment of a Cas9 to an N-terminal fragment of a Cas9, either directly or by using a linker, such as an amino acid linker. In some embodiments, the C-terminal fragment that is rearranged to the N-terminus includes or corresponds to the C-terminal 30% or less of the amino acids of a Cas9 (e.g., amino acids 1012-1368 as set forth in SEQ ID No: 34364 or corresponding amino acid positions thereof). In some embodiments, the C-terminal fragment that is rearranged to the N-terminus, includes or corresponds to the C-terminal 30%, 29%, 28%, 27%, 26%, 25%, 24%, 23%, 22%, 21%, 20%, 19%, 18%, 17%, 16%, 15%, 14%, 13%, 12%, 11%, 10%, 9%, 8%, 7%, 6%, 5%, 4%, 3%, 2%, or 1% of the amino acids of a Cas9 (e.g., as set forth in SEQ ID No: 34364 or corresponding amino acid positions thereof). In some embodiments, the C-terminal fragment that is rearranged to the N-terminus, includes or corresponds to the C-terminal 410 residues or less of a Cas9 (e.g., as set forth in SEQ ID No: 34364 or corresponding amino acid positions thereof). In some embodiments, the C-terminal portion that is rearranged to the N-terminus, includes or corresponds to the C-terminal 410, 400, 390, 380, 370, 360, 350, 340, 330, 320, 310, 300, 290, 280, 270, 260, 250, 240, 230, 220, 210, 200, 190, 180, 170, 160, 150, 140, 130, 120, 110, 100, 90, 80, 70, 60, 50, 40, 30, 20, or 10 residues of a Cas9 (e/g/ as set forth in SEQ ID No: 34364 or corresponding amino acid positions thereof). In some embodiments, the C-terminal portion that is rearranged to the N-terminus includes or corresponds to the C-terminal 357, 341, 328, 120, or 69 residues of a Cas9 (e.g., as set forth in SEQ ID No: 34364 or corresponding amino acid positions thereof).

[0193] In other embodiments, circular permutant Cas9 variants may be a topological rearrangement of a Cas9 primary structure based on the following method, which is based on S. pyogenes Cas9 of SEQ ID NO: 34364: (a) selecting a circular permutant (CP) site corresponding to an internal amino acid residue of the Cas9 primary structure, which dissects the original protein into two halves: an N-terminal region and a C-terminal region; (b) modifying the Cas9 protein sequence (e.g., by genetic engineering techniques) by moving the original C-terminal region (comprising the CP site amino acid) to precede the original N-terminal region, thereby forming a new N-terminus of the Cas9 protein that now begins with the CP site amino acid residue. The CP site can be located in any domain of the Cas9 protein, including, for example, the helical-II domain, the RuvCIII domain, or the CTD domain. For example, the CP site may be located (as set forth in SEQ ID No: 34364 or corresponding amino acid positions thereof) at original amino acid residue 181, 199, 230, 270, 310, 1010, 1016, 1023, 1029, 1041, 1247, 1249, or 1282. Thus, once relocated to the N-terminus, original amino acid 181, 199, 230, 270, 310, 1010, 1016, 1023, 1029, 1041, 1247, 1249, or 1282 would become the new N-terminal amino acid. Nomenclature of these CP-Cas9 proteins may be referred to as Cas9-CP¹⁸¹, Cas9-CP¹⁹⁹, Cas9-CP²³⁰, Cas9-CP²⁷⁰, Cas9-CP³¹⁰, Cas9-CP¹⁰¹⁰, Cas9-CP¹⁰¹⁶, Cas9-CP¹⁰²³, Cas9-CP¹⁰²⁹, Cas9-CP¹⁰⁴¹, Cas9-CP¹²⁴⁷, Cas9-CP¹²⁴⁹, and Cas9-CP¹²12, respectively. This description is not meant to be limited to making CP variants from SEQ ID NO: 34364 but may be implemented to make CP variants in any Cas9 sequence, either at CP sites that correspond to these positions, or at other CP sites entirely. This description is not meant to limit the specific CP sites in any way. Virtually any CP site may be used to form a CP-Cas9 variant.

[0194] In some embodiments, a prime editor comprises a Cas9 functional variant that is of smaller molecular weight than a wild type SpCas9 protein. In some embodiments, a smaller-sized Cas9 functional variant may facilitate delivery to cells, e.g., by an expression vector, nanoparticle, or other means of delivery. In certain embodiments, a smaller-sized Cas9 functional variant is a Class 2 Type II Cas protein. In certain embodiments, a smaller-sized Cas9 functional variant is a Class 2 Type V Cas protein. In certain embodiments, a smaller-sized Cas9 functional variant is a Class 2 Type VI Cas protein.

[0195] In some embodiments, a prime editor comprises a SpCas9 that is 1368 amino acids in length and has a predicted molecular weight of 158 kilodaltons. In some embodiments, a prime editor comprises a Cas9 functional variant or functional fragment that is less than 1300 amino acids, less than 1290 amino acids, than less than 1280 amino acids, less than 1270 amino acids, less than 1260 amino acid, less than 1250 amino acids, less than 1240 amino acids, less than 1230 amino acids, less than 1220 amino acids, less than 1210 amino acids, less than 1200 amino acids, less than 1190 amino acids, less than 1180 amino acids, less than 1170 amino acids, less than 1160 amino acids, less than 1150 amino acids, less than 1140 amino acids, less than 1130 amino acids, less than 1120 amino acids, less than 1110 amino acids, less than 1100 amino acids, less than 1050 amino acids, less than 1000 amino acids, less than 950 amino acids, less than 900 amino acids, less than 850 amino acids, less than 800 amino acids, less than 750 amino acids, less than 700 amino acids, less than 650 amino acids, less than 600 amino acids, less than 550 amino acids, or less than 500 amino acids, but at least larger than about 400 amino acids and retaining the one or more functions, e.g., DNA binding function, of the Cas9 protein.

[0196] In some embodiments, the Cas protein may include any CRISPR associated protein, including but not limited to, Cas12a, Cas12b1, Cas1, Cas1B, Cas2, Cas3, Cas4, Cas5, Cas6, Cas7, Cas8, Cas9 (also known as Csn1 and Csx12), Cas10, Csy1, Csy2, Csy3, Cse1, Cse2, Csc1, Csc2, Csa5, Csn2, Csm2, Csm3, Csm4, Csm5, Csm6, Cmr1, Cmr3, Cmr4, Cmr5, Cmr6, Csb1, Csb2, Csb3, Csx17, Csx14, Csx10, Csx16, CsaX, Csx3, Csx1, Csx15, Csf1, Csf2, Csf3, Csf4, homologs thereof, or modified versions thereof, and preferably comprising a nickase mutation (e.g., a mutation corresponding to the D10A mutation of the wild type Cas9 polypeptide of SEQ ID NO: 14829). In various other embodiments, the napDNAbp can be any of the following proteins: a Cas9, a Cas12a (Cpf1), a Cas12e (CasX), a Cas12d (CasY), a Cas12b1 (C2c1), a Cas13a (C2c2), a Cas12c (C2c3), a GeoCas9, a CjCas9, a Cas12g, a Cas12h, a Cas12i, a Cas13b, a Cas13c, a Cas13d, a Cas14, a Csn2, an xCas9, an SpCas9-NG, a circularly permuted Cas9, or an Argonaute (Ago) domain, or a functional variant or fragment thereof.

[0197] Exemplary Cas proteins and nomenclature are shown in Table 81 below:

TABLE 81
Exemplary Cas proteins and nomenclature

| | |
|---|---|
| Legacy nomenclature | Current nomenclature |

type II CRISPR-Cas enzymes

| | |
|---|---|
| Cas9 | same |

type V CRISPR-Cas enzymes

| | |
|---|---|
| Cpfl | Cas12a |
| CasX | Cas12e |
| C2c1 | Cas12b1 |
| Cas12b2 | same |
| C2c3 | Cas12c |
| Cas Y | Cas12d |
| C2c4 | same |
| C2c8 | same |
| C2c5 | same |
| C2c10 | same |
| C2c9 | same |

type VI CRISPR-Cas enzymes

| | |
|---|---|
| C2c2 | Cas13a |
| Cas13d | same |
| C2c7 | Cas13c |
| C2c6 | Cas13b |

[0198] In some embodiments, prime editors described herein may also comprise Cas proteins other than Cas9. For example, in some embodiments, a prime editor as described herein may comprise a Cas12a (Cpf1) polypeptide or functional variants thereof. In some embodiments, the Cas12a polypeptide comprises a mutation that reduces or abolishes the endonuclease domain of the Cas12a polypeptide. In some embodiments, the Cas12a polypeptide is a Cas12a nickase. In some embodiments, the Cas protein comprises an amino acid sequence that comprises at least about 50%, 60%, 70%, 80%, 90%, 91%, 92%, 93%, 94%, 95%, 96%, 97%, 98%, 99%, or 100% sequence identity to a naturally occurring Cas12a polypeptide.

[0199] In some embodiments, a prime editor comprises a Cas protein that is a Cas12b (C2c1) or a Cas12c (C2c3) polypeptide. In some embodiments, the Cas protein comprises an amino acid sequence that comprises at least about 50%, 60%, 70%, 80%, 90%, 91%, 92%, 93%, 94%, 95%, 96%, 97%, 98%, 99%, or 100% sequence identity to a naturally occurring Cas12b (C2c1) or Cas12c (C2c3) protein. In some embodiments, the Cas protein is a Cas12b nickase or a Cas12c nickase. In some embodiments, the Cas protein is a Cas12e, a Cas12d, a Cas13, Cas14a, Cas14b, Cas14c, Cas14d, Cas14e, Cas14f, Cas14g, Cas14h, Cas14u, or a CasΦ polypeptide. In some embodiments, the Cas protein comprises an amino acid sequence that comprises at least about 50%, 60%, 70%, 80%, 90%, 91%, 92%, 93%, 94%, 95%, 96%, 97%, 98%, 99%, or 100% sequence identity to a naturally-occurring Cas12e, Cas12d, Cas13, Cas14a, Cas14b, Cas14c, Cas14d, Cas14e, Cas14f, Cas14g, Cas14h, Cas14u, or Cas (D protein. In some embodiments, the Cas protein is a Cas12e, Cas12d, Cas13, or Cas (D nickase.

### Nuclear Localization Sequences

[0200] In some embodiments, a prime editor further comprises one or more nuclear localization sequence (NLS). In some embodiments, the NLS helps promote translocation of a protein into the cell nucleus. In some embodiments, a prime editor comprises a fusion protein, e.g., a fusion protein comprising a DNA binding domain and a DNA polymerase, that comprises one or more NLSs. In some embodiments, one or more polypeptides of the prime editor are fused to or linked to one or more NLSs. In some embodiments, the prime editor comprises a DNA binding domain and a DNA polymerase domain that are provided in trans, wherein the DNA binding domain and/or the DNA polymerase domain is fused or linked to one or more NLSs.

[0201] In certain embodiments, a prime editor or prime editing complex comprises at least one NLS. In some embodiments, a prime editor or prime editing complex comprises at least two NLSs. In embodiments with at least two NLSs, the NLSs can be the same NLS, or they can be different NLSs.

[0202] In some instances, a prime editor may further comprise at least one nuclear localization sequence (NLS). In some cases, a prime editor may further comprise 1 NLS. In some cases, a prime editor may further comprise 2 NLSs. In other cases, a prime editor may further comprise 3 NLSs. In one case, a primer editor can further comprise more than 4, 5, 6, 7, 8, 9 or 10 NLSs.

[0203] In addition, the NLSs can be expressed as part of a prime editor complex. In some embodiments, a NLS can be positioned almost anywhere in a protein's amino acid sequence, and generally comprises a short sequence of three or more or four or more amino acids. The location of the NLS fusion can be at the N-terminus, the C-terminus, or positioned anywhere within a sequence of a prime editor or a component thereof (e.g., inserted between the DNA-binding domain and the DNA polymerase domain of a prime editor fusion protein, between the DNA binding domain and a linker sequence, between a DNA polymerase and a linker sequence, between two linker sequences of a prime editor fusion protein or a component thereof, in either N-terminus to C-terminus or C-terminus to N-terminus order). In some embodiments, a prime editor is fusion protein that comprises an NLS at the N terminus. In some embodiments, a prime editor is fusion protein that comprises an NLS at the C terminus. In some embodiments, a prime editor is fusion protein that comprises at least one NLS at both the N terminus and the C terminus. In some embodiments, the prime editor is a fusion protein that comprises two NLSs at the N terminus and/or the C terminus.

[0204] Any NLSs that are known in the art are also contemplated herein. The NLSs may be any naturally occurring NLS, or any non-naturally occurring NLS (e.g., an NLS with one or more mutations relative to a wild-type NLS). In some embodiments, the one or more NLSs of a prime editor comprise bipartite NLSs. In some embodiments, a nuclear localization signal (NLS) is predominantly basic. In some embodiments, the one or more NLSs of a prime editor are rich in lysine and arginine residues. In some embodiments, the one or more NLSs of a prime editor comprise proline residues.

[0205] In some embodiments, a nuclear localization signal (NLS) comprises the sequence
[0206] MDSLLMNRRKFLYQFKNVRWAKGRRETYLC (SEQ ID NO: 34393) or KRTADGSEFEPKKKRKV (SEQ ID NO: 34403).

[0207] In some embodiments, a NLS is a monopartite NLS. For example, in some embodiments, a NLS is a SV40 large T antigen NLS PKKKRKV (SEQ ID NO: 34391). In some embodiments, a NLS is a bipartite NLS. In some embodiments, a bipartite NLS comprises two basic domains separated by a spacer sequence comprising a variable number of amino acids. In some embodiments, a NLS is a bipartite NLS. In some embodiments, a bipartite NLS consists of two basic domains separated by a spacer sequence comprising a variable number of amino acids. In some embodiments, a NLS is a noncanonical sequences such as M9 of the hnRNP A1 protein, the influenza virus nucleoprotein NLS, and the yeast Gal4 protein NLS. In some embodiments, a NLS is a noncanonical sequences such as M9 of the hnRNP A1 protein, the influenza virus nucleoprotein NLS, and the yeast Gal4 protein NLS.

[0208] In some embodiments, a bipartite NLS consists of two basic domains separated by a spacer sequence comprising a variable number of amino acids. In some embodiments, a NLS comprises an amino acid sequence that is at least about 50%, 60%, 70%, 80%, 90%, 91%, 92%, 93%, 94%, 95%, 96%, 97%, 98%, 99%, or 100% identical to the amino acid sequence of any one of SEQ ID NOs: 34391-34403. In some embodiments, a NLS comprises an amino acid sequence selected from the group consisting of 34391-34403. In some embodiments, a prime editing composition comprises a polynucleotide that encodes a NLS that comprises an amino acid sequence that is at least about 50%, 60%, 70%, 80%, 90%, 91%, 92%, 93%, 94%, 95%, 96%, 97%, 98%, 99%, or 100% identical to the amino acid sequence of any one of SEQ ID NOs: 34391-34403. In some embodiments, a prime editing composition comprises a polynucleotide that encodes a NLS that comprises an amino acid sequence selected from the group consisting of 34391-34403.

[0209] Any NLSs that are known in the art are also contemplated herein. The NLSs may be any naturally occurring NLS, or any non-naturally occurring NLS (e.g., an NLS with one or more mutations relative to a wild-type NLS). In some embodiments, the one or more NLSs of a prime editor comprise bipartite NLSs. In some embodiments, the one or more NLSs of a prime editor are rich in lysine and arginine residues. In some embodiments, the one or more NLSs of a prime editor comprise proline residues. Non-limiting examples of NLS sequences are provided in Table 84 below.

TABLE 84
Exemplary nuclear localization sequences

| Description | Sequence | SEQ ID NO: |
|---|---|---|
| NLS of SV40 Large T-AG | PKKKRKV | 34391 |
| NLS | MKRTADGSEFESPKKKRKV | 34392 |
| NLS | MDSLLMNRRKFLYQFKNVRWAKGRRETYLC | 34393 |
| NLS of Nucleoplasmin | AVKRPAATKKAGQAKKKKLD | 34394 |
| NLS of EGL-13 | MSRRRKANPTKLSENAKKLAKEVEN | 34395 |
| NLS of C-Myc | PAAKRVKLD | 34396 |
| NLS of Tus-protein | KLKIKRPVK | 34397 |
| NLS of polyoma large T-AG | VSRKRPRP | 34398 |
| NLS of Hepatitis D virus | EGAPPAKRAR | 34399 |
| antigen | | |
| NLS of Rev protein | RQARRNRRRRWRERNR | 34400 |
| NLS of murine p53 | PPQPKKKPLDGE | 34401 |
| C terminal linker and NLS of | SGGSKRTADGSEFEPKKKRKV | 34402 |
| an exemplary prime editor | | |
| fusion protein | | |
| NLS | KRTADGSEFEPKKKRKV | 34403 |

[0210] In some embodiments, a prime editing complex comprises a fusion protein comprising a DNA binding domain (e.g., Cas9(H840A)) and a reverse transcriptase (e.g., a variant MMLV RT) having the following structure: [NLS]-[Cas9(H840A)]-[linker]-[MMLV_RT(D200N)(T330P)(L603W)(T306K)(W313F)], and a desired PEgRNA. In some embodiments, the prime editing complex comprises a prime editor fusion protein that has the amino acid sequence of SEQ ID NO: 34404. Sequence of an exemplary prime editor fusion protein comprising a DNA binding domain (e.g., Cas9(H840A)) and a reverse transcriptase (e.g., a variant MMLV RT) having the following structure: [NLS]-[Cas9(H840A)]-[linker]-[MMLV_RT(D200N)(T330P)(L603W)(T306K)(W313F)] and its components are shown in Table 82.

[0211] In some embodiments, a prime editing complex comprises a fusion protein comprising a DNA binding domain (e.g., Cas9((R221K N394K H840A)) and a reverse transcriptase (e.g., a variant MMLV RT) having the following structure: [NLS]-[Cas9((R221K N394K H840A)]-[linker]-[MMLV_RT(D200N)(T330P)(L603W)(T306K)(W313F)], and a desired PEgRNA. In some embodiments, the prime editing complex comprises a prime editor fusion protein that has the amino acid sequence of SEQ ID NO: 34405. Sequence of an exemplary prime editor fusion protein comprising a DNA binding domain (e.g., Cas9(H840A)) and a reverse transcriptase (e.g., a variant MMLV_RT) having the following structure: [NLS]-[Cas9 (R221K N394K H840A)]-[linker]-[MMLV_RT(D200N)(T330P)(L603W)(T306K)(W313F)] and its components are shown in Table 83.

[0212] Polypeptides comprising components of a prime editor may be fused via peptide linkers, or may be provided in trans relevant to each other. For example, a reverse transcriptase may be expressed, delivered, or otherwise provided as an individual component rather than as a part of a fusion protein with the DNA binding domain. In such cases, components of the prime editor may be associated through non-peptide linkages or co-localization functions. In some embodiments, a prime editor further comprises additional components capable of interacting with, associating with, or capable of recruiting other components of the prime editor or the prime editing system. For example, a prime editor may comprise an RNA-protein recruitment polypeptide that can associate with an RNA-protein recruitment RNA aptamer. In some embodiments, an RNA-protein recruitment polypeptide can recruit, or be recruited by, a specific RNA sequence. Non limiting examples of RNA-protein recruitment polypeptide and RNA aptamer pairs include a MS2 coat protein and a MS2 RNA hairpin, a PCP polypeptide and a PP7 RNA hairpin, a Com polypeptide and a Com RNA hairpin, a Ku protein and a telomerase Ku binding RNA motif, and a Sm7 protein and a telomerase Sm7 binding RNA motif. In some embodiments, the prime editor comprises a DNA binding domain fused or linked to an RNA-protein recruitment polypeptide. In some embodiments, the prime editor comprises a DNA polymerase domain fused or linked to an RNA-protein recruitment polypeptide. In some embodiments, the DNA binding domain and the DNA polymerase domain fused to the RNA-protein recruitment polypeptide, or the DNA binding domain fused to the RNA-protein recruitment polypeptide and the DNA polymerase domain are co-localized by the corresponding RNA-protein recruitment RNA aptamer of the RNA-protein recruitment polypeptide. In some embodiments, the corresponding RNA-protein recruitment RNA aptamer fused or linked to a portion of the PEgRNA or ngRNA. For example, an MS2 coat protein fused or linked to the DNA polymerase and a MS2 hairpin installed on the PEgRNA for co-localization of the DNA polymerase and the RNA-guided DNA binding domain (e.g., a Cas9 nickase). In certain embodiments, components of a prime editor are directly fused to each other. In certain embodiments, components of a prime editor are associated to each other via a linker.

[0213] As used herein, a linker can be any chemical group or a molecule linking two molecules or moieties, e.g., a DNA binding domain and a polymerase domain of a prime editor. In some embodiments, a linker is an organic molecule, group, polymer, or chemical moiety. In some embodiments, the linker comprises a non-peptide moiety. The linker may be as simple as a covalent bond, or it may be a polymeric linker many atoms in length, for example, a polynucleotide sequence. In certain embodiments, the linker is a covalent bond (e.g., a carbon-carbon bond, disulfide bond, carbon-heteroatom bond, etc.).

[0214] In certain embodiments, two or more components of a prime editor are linked to each other by a peptide linker. In some embodiments, a peptide linker is 5-100 amino acids in length, for example, 2, 3, 4, 5, 6, 7, 8, 9, 10, 11, 12, 13, 14, 15, 16, 17, 18, 19, 20, 21, 22, 23, 24, 25, 26, 27, 28, 29, 30, 30-35, 35-40, 40-45, 45-50, 50-60, 60-70, 70-80, 80-90, 90-100, 100-150, or 150-200 amino acids in length. In some embodiments, the peptide linker is 16 amino acids in length, 24 amino acids in length, 64 amino acids in length, or 96 amino acids in length.

[0215] In some embodiments, the linker comprises the amino acid sequence (GGGGS)n (SEQ ID NO: 34410), (G)n (SEQ ID NO: 34411), (EAAAK)n (SEQ ID NO: 34412), (GGS)n (SEQ ID NO: 34413), (SGGS)n (SEQ ID NO: 34414), (XP)n (SEQ ID NO: 34415), or any combination thereof, wherein n is independently an integer between 1 and 30, and wherein X is any amino acid. In some embodiments, the linker comprises the amino acid sequence (GGS)n (SEQ ID NO: 34413), wherein n is 1, 3, or 7. In some embodiments, the linker comprises the amino acid sequence SGSETPGTSESATPES (SEQ ID NO: 34416). In some embodiments, the linker comprises the amino acid sequence SGGSSGGSSGS ETPGTSESATPESSGGSSGGS (SEQ ID NO: 34417). In some embodiments, the linker comprises the amino acid sequence SGGSGGSGGS (SEQ ID NO: 34419). In some embodiments, the linker comprises the amino acid sequence SGGS (SEQ ID NO: 34420). In other embodiments, the linker comprises the amino acid sequence

(SEQ ID NO: 34421)
SGGSSGGSSGSETPGTSESATPESAGSYPYDVPDYAGSAAPAAKKKKLD
GSGSGGSSGGS.

[0216] In certain embodiments, two or more components of a prime editor are linked to each other by a non-peptide linker. In some embodiments, the linker is a carbon-nitrogen bond of an amide linkage. In certain embodiments, the linker is a cyclic or acyclic, substituted or unsubstituted, branched or unbranched aliphatic or heteroaliphatic linker. In certain embodiments, the linker is polymeric (e.g., polyethylene, polyethylene glycol, polyamide, polyester, etc.). In certain embodiments, the linker comprises a monomer, dimer, or polymer of aminoalkanoic acid. In certain embodiments, the linker comprises an aminoalkanoic acid (e.g., glycine, ethanoic acid, alanine, beta-alanine, 3-aminopropanoic acid, 4-aminobutanoic acid, 5-pentanoic acid, etc.). In certain embodiments, the linker comprises a monomer, dimer, or polymer of aminohexanoic acid (Ahx). In certain embodiments, the linker is based on a carbocyclic moiety (e.g., cyclopentane, cyclohexane). In other embodiments, the linker comprises a polyethylene glycol moiety (PEG). In certain embodiments, the linker comprises an aryl or heteroaryl moiety. In certain embodiments, the linker is based on a phenyl ring. The linker may include functionalized moieties to facilitate attachment of a nucleophile (e.g., thiol, amino) from the peptide to the linker. Any electrophile may be used as part of the linker. Exemplary electrophiles include, but are not limited to, activated esters, activated amides, Michael acceptors, alkyl halides, aryl halides, acyl halides, and isothiocyanates.

[0217] Components of a prime editor may be connected to each other in any order. In some embodiments, the DNA binding domain and the DNA polymerase domain of a prime editor may be fused to form a fusion protein, or may be joined by a peptide or protein linker, in any order from the N terminus to the C terminus. In some embodiments, a prime editor comprises a DNA binding domain fused or linked to the C-terminal end of a DNA polymerase domain. In some embodiments, a prime editor comprises a DNA binding domain fused or linked to the N-terminal end of a DNA polymerase domain. In some embodiments, the prime editor comprises a fusion protein comprising the structure NH2-[DNA binding domain]-[polymerase]-COOH; or NH2-[polymerase]-[DNA binding domain]-COOH, wherein each instance of “]-[” indicates the presence of an optional linker sequence. In some embodiments, a prime editor comprises a fusion protein and a DNA polymerase domain provided in trans, wherein the fusion protein comprises the structure NH2-[DNA binding domain]-[RNA-protein recruitment polypeptide]-COOH. In some embodiments, a prime editor comprises a fusion protein and a DNA binding domain provided in trans, wherein the fusion protein comprises the structure NH2-[DNA polymerase domain]-[RNA-protein recruitment polypeptide]-COOH.

[0218] In some embodiments, a prime editor fusion protein, a polypeptide component of a prime editor, or a polynucleotide encoding the prime editor fusion protein or polypeptide component, may be split into an N-terminal half and a C-terminal half or polypeptides that encode the N-terminal half and the C terminal half, and provided to a target DNA in a cell separately. For example, in certain embodiments, a prime editor fusion protein may be split into a N-terminal and a C-terminal half for separate delivery in AAV vectors, and subsequently translated and colocalized in a target cell to reform the complete polypeptide or prime editor protein. In such cases, separate halves of a protein or a fusion protein may each comprise a split-intein to facilitate colocalization and reformation of the complete protein or fusion protein by the mechanism of intein facilitated trans splicing. In some embodiments, a prime editor comprises a N-terminal half fused to an intein-N, and a C-terminal half fused to an intein-C, or polynucleotides or vectors (e.g., AAV vectors) encoding each thereof. When delivered and/or expressed in a target cell, the intein-N and the intein-C can be excised via protein trans-splicing, resulting in a complete prime editor fusion protein in the target cell. In some embodiments, an exemplary protein described herein may lack a methionine residue at the N-terminus.

[0219] In some embodiments, a prime editor fusion protein comprises a Cas9(H840A) nickase and a wild type M-MLV RT. In some embodiments, a prime editor fusion protein comprises a Cas9(H840A) nickase and a M-MLV RT that comprises amino acid substitutions D200N, T330P, T306K, W313F, and L603W compared to a wild type M-MLV RT. In some embodiments, a prime editor fusion protein comprises a Cas9(H840A) nickase and a M-MLV RT that comprises amino acid substitutions D200N, T330P, T306K, W313F, and L603W compared to a wild type M-MLV RT. The amino acid sequence of an exemplary PE2 and its individual components in shown in Table 82. In some embodiments, a prime editor fusion protein comprises a Cas9 (R221K N394K H840A) nickase and a M-MLV RT that comprises amino acid substitutions D200N, T330P, T306K, W313F, and L603W compared to a wild type M-MLV RT. The amino acid sequence of an exemplary Prime editor fusion protein and its individual components in shown in Table 83. In some embodiments an exemplary prime editor protein may comprise an amino acid sequence as set forth in any of the SEQ ID NO: 34404 or SEQ ID NO: 34405.

[0220] In various embodiments, a prime editor fusion protein comprises an amino acid sequence that is at least about 70% identical, at least about 80% identical, at least about 90% identical, at least about 95% identical, at least about 96% identical, at least about 97% identical, at least about 98% identical, at least about 99% identical, at least about 99.5% identical, or at least about 99.9% identical to any of the prime editor fusion sequences described herein or known in the art.

TABLE 82
lists exemplary prime editor and its components

| SEQ ID | | |
|---|---|---|
| NO. | DESCRIPTION | SEQUENCE |
| 34404 | Exemplary Prime Editor | MKRTADGSEFESPKKKRKVDKKYSIGLDIGTNSVGWAVITDEYKV |
| | [NLS]-[Cas9 (H840A)]- | PSKKFKVLGNTDRHSIKKNLIGALLFDSGETAEATRLKRTARRR |
| | [linker]- | YTRRKNRICYLQEIFSNEMAKVDDSFFHRLEESFLVEEDKKHER |
| | [MMLV_RT (D200N) (T330P) | HPIFGNIVDEVAYHEKYPTIYHLRKKLVDSTDKADLRLIYLALAH |
| | (L603W) (T306K) (W313F)]- | MIKFRGHFLIEGDLNPDNSDVDKLFIQLVQTYNQLFEENPINASG |
| | [NLS] | VDAKAILSARLSKSRRLENLIAQLPGEKKNGLFGNLIALSLGLTP |
| | | NFKSNFDLAEDAKLQLSKDTYDDDLDNLLAQIGDQYADLFLAAK |
| | | NLSDAILLSDILRVNTEITKAPLSASMIKRYDEHHQDLTLLKALV |
| | | RQQLPEKYKEIFFDQSKNGYAGYIDGGASQEEFYKFIKPILEKMD |
| | | GTEELLVKLNREDLLRKQRTFDNGSIPHQIHLGELHAILRRQEDF |
| | | YPFLKDNREKIEKILTFRIPYYVGPLARGNSRFAWMTRKSEETIT |
| | | PWNFEEVVDKGASAQSFIERMTNFDKNLPNEKVLPKHSLLYEYF |
| | | TVYNELTKVKYVTEGMRKPAFLSGEQKKAIVDLLFKTNRKVTV |
| | | KQLKEDYFKKIECFDSVEISGVEDRFNASLGTYHDLLKIIKDKDF |
| | | LDNEENEDILEDIVLTLTLFEDREMIEERLKTYAHLFDDKVMKQ |
| | | LKRRRYTGWGRLSRKLINGIRDKQSGKTILDFLKSDGFANRNFM |
| | | QLIHDDSLTFKEDIQKAQVSGQGDSLHEHIANLAGSPAIKKGILQ |
| | | TVKVVDELVKVMGRHKPENIVIEMARENQTTQKGQKNSRERM |
| | | KRIEEGIKELGSQILKEHPVENTQLQNEKLYLYYLQNGRDMYVD |
| | | QELDINRLSDYDVDAIVPQSFLKDDSIDNKVLTRSDKNRGKSDNV |
| | | PSEEVVKKMKNYWRQLLNAKLITQRKFDNLTKAERGGLSELDK |
| | | AGFIKRQLVETRQITKHVAQILDSRMNTKYDENDKLIREVKVITL |
| | | KSKLVSDFRKDFQFYKVREINNYHHAHDAYLNAVVGTALIKKYP |
| | | KLESEFVYGDYKVYDVRKMIAKSEQEIGKATAKYFFYSNIMNFF |
| | | KTEITLANGEIRKRPLIETNGETGEIVWDKGRDFATVRKVLSMP |
| | | QVNIVKKTEVQTGGFSKESILPKRNSDKLIARKKDWDPKKYGGF |
| | | DSPTVAYSVLVVAKVEKGKSKKLKSVKELLGITIMERSSFEKNPI |
| | | DFLEAKGYKEVKKDLIIKLPKYSLFELENGRKRMLASAGELQKG |
| | | NELALPSKYVNFLYLASHYEKLKGSPEDNEQKQLFVEQHKHYL |
| | | DEIIEQISEFSKRVILADANLDKVLSAYNKHRDKPIREQAENIIHLF |
| | | TLTNLGAPAAFKYFDTTIDRKRYTSTKEVLDATLIHQSITGLYET |
| | | RIDLSQLGGDSGGSSGGSSGSETPGTSESATPESSGGSSGGSSTLNI |
| | | EDEYRLHETSKEPDVSLGSTWLSDFPQAWAETGGMGLAVRQAPLIIPLK |
| | | ATSTPVSIKQYPMSQEARLGIKPHIQRLLDQGILVPCQSPWNTPLLPVKK |
| | | PGTNDYRPVQDLREVNKRVEDIHPTVPNPYNLLSGLPPSHQWYTVLDLK |
| | | DAFFCLRLHPTSQPLFAFEWRDPEMGISGQLTWTRLPQGFKNSPTLFNE |
| | | ALHRDLADFRIQHPDLILLQYVDDLLLAATSELDCQQGTRALLQTLGNL |
| | | GYRASAKKAQICQKQVKYLGYLLKEGQRWLTEARKETVMGQPTPKTPR |
| | | QLREFLGKAGFCRLFIPGFAEMAAPLYPLTKPGTLFNWGPDQQKAYQEI |
| | | KQALLTAPALGLPDLTKPFELFVDEKQGYAKGVLTQKLGPWRRPVAYLS |
| | | KKLDPVAAGWPPCLRMVAAIAVLTKDAGKLTMGQPLVILAPHAVEALVK |
| | | QPPDRWLSNARMTHYQALLLDTDRVQFGPVVALNPATLLPLPEEGLQH |
| | | NCLDILAEAHGTRPDLTDQPLPDADHTWYTDGSSLLQEGQRKAGAAVTT |
| | | ETEVIWAKALPAGTSAQRAELIALTQALKMAEGKKLNVYTDSRYAFATAH |
| | | IHGEIYRRRGWLTSEGKEIKNKDEILALLKALFLPKRLSIIHCPGHQKGHS |
| | | AEARGNRMADQAARKAAITETPDTSTLLIENSSPSGGSKRTADGSEFEPK |
| | | KKRKV |
| | | KEY: |
| | | NUCLEAR LOCALIZATION SEQUENCE (NLS) |
| | | CAS9 (H840A) |
| | | 33-AMINO ACID LINKER |
| | | M-MLV REVERSE TRANSCRIPTASE |
| 34392 | -N-terminal NLS | MKRTADGSEFESPKKKRKV |
| 34366 | -CAS9 (H840A) | DKKYSIGLDIGTNSVGWAVITDEYKVPSKKFKVLGNTDRHSIKKNLI |
| | | GALLFDSGETAEATRLKRTARRRYTRRKNRICYLQEIFSNEMAKVD |
| | | DSFFHRLEESFLVEEDKKHERHPIFGNIVDEVAYHEKYPTIYHLRKKL |
| | | VDSTDKADLRLIYLALAHMIKFRGHFLIEGDLNPDNSDVDKLFIQLV |
| | | QTYNQLFEENPINASGVDAKAILSARLSKSRRLENLIAQLPGEKKNG |
| | | LFGNLIALSLGLTPNFKSNFDLAEDAKLQLSKDTYDDDLDNLLAQIG |
| | | DQYADLFLAAKNLSDAILLSDILRVNTEITKAPLSASMIKRYDEHHQ |
| | | DLTLLKALVRQQLPEKYKEIFFDQSKNGYAGYIDGGASQEEFYKFIK |
| | | PILEKMDGTEELLVKLNREDLLRKQRTFDNGSIPHQIHLGELHAILRR |
| | | QEDFYPFLKDNREKIEKILTFRIPYYVGPLARGNSRFAWMTRKSEETI |
| | | TPWNFEEVVDKGASAQSFIERMTNFDKNLPNEKVLPKHSLLYEYFT |
| | | VYNELTKVKYVTEGMRKPAFLSGEQKKAIVDLLFKTNRKVTVKQL |
| | | KEDYFKKIECFDSVEISGVEDRFNASLGTYHDLLKIIKDKDFLDNEEN |
| | | EDILEDIVLTLTLFEDREMIEERLKTYAHLFDDKVMKQLKRRRYTG |
| | | WGRLSRKLINGIRDKQSGKTILDFLKSDGFANRNFMQLIHDDSLTFK |
| | | EDIQKAQVSGQGDSLHEHIANLAGSPAIKKGILQTVKVVDELVKVM |
| | | GRHKPENIVIEMARENQTTQKGQKNSRERMKRIEEGIKELGSQILKE |
| | | HPVENTQLQNEKLYLYYLQNGRDMYVDQELDINRLSDYDVDAIVP |
| | | QSFLKDDSIDNKVLTRSDKNRGKSDNVPSEEVVKKMKNYWRQLLN |
| | | AKLITQRKFDNLTKAERGGLSELDKAGFIKRQLVETRQITKHVAQIL |
| | | DSRMNTKYDENDKLIREVKVITLKSKLVSDFRKDFQFYKVREINNY |
| | | HHAHDAYLNAVVGTALIKKYPKLESEFVYGDYKVYDVRKMIAKSE |
| | | QEIGKATAKYFFYSNIMNFFKTEITLANGEIRKRPLIETNGETGEIVW |
| | | DKGRDFATVRKVLSMPQVNIVKKTEVQTGGFSKESILPKRNSDKLIA |
| | | RKKDWDPKKYGGFDSPTVAYSVLVVAKVEKGKSKKLKSVKELLGI |
| | | TIMERSSFEKNPIDFLEAKGYKEVKKDLIIKLPKYSLFELENGRKRML |
| | | ASAGELQKGNELALPSKYVNFLYLASHYEKLKGSPEDNEQKQLFVE |
| | | QHKHYLDEIIEQISEFSKRVILADANLDKVLSAYNKHRDKPIREQAEN |
| | | IIHLFTLTNLGAPAAFKYFDTTIDRKRYTSTKEVLDATLIHQSITGLYE |
| | | TRIDLSQLGGD |
| 34418 | -linker between CAS9 | SGGSSGGSSGSETPGTSESATPESSGGSSGGSS |
| | domain and RT domain | |
| | (33 amino acids) | |
| 34363 | -MMLV_RT D200N | TLNIEDEYRLHETSKEPDVSLGSTWLSDFPQAWAETGGMGLAVRQA |
| | T330P L603W T306K | PLIIPLKATSTPVSIKQYPMSQEARLGIKPHIQRLLDQGILVPCQSPWN |
| | W313F | TPLLPVKKPGTNDYRPVQDLREVNKRVEDIHPTVPNPYNLLSGLPPS |
| | | HQWYTVLDLKDAFFCLRLHPTSQPLFAFEWRDPEMGISGQLTWTRL |
| | | PQGFKNSPTLFNEALHRDLADFRIQHPDLILLQYVDDLLLAATSELD |
| | | CQQGTRALLQTLGNLGYRASAKKAQICQKQVKYLGYLLKEGQRWL |
| | | TEARKETVMGQPTPKTPRQLREFLGKAGFCRLFIPGFAEMAAPLYPL |
| | | TKPGTLFNWGPDQQKAYQEIKQALLTAPALGLPDLTKPFELFVDEK |
| | | QGYAKGVLTQKLGPWRRPVAYLSKKLDPVAAGWPPCLRMVAAIA |
| | | VLTKDAGKLTMGQPLVILAPHAVEALVKQPPDRWLSNARMTHYQA |
| | | LLLDTDRVQFGPVVALNPATLLPLPEEGLQHNCLDILAEAHGTRPDL |
| | | TDQPLPDADHTWYTDGSSLLQEGQRKAGAAVTTETEVIWAKALPA |
| | | GTSAQRAELIALTQALKMAEGKKLNVYTDSRYAFATAHIHGEIYRR |
| | | RGWLTSEGKEIKNKDEILALLKALFLPKRLSIIHCPGHQKGHSAEAR |
| | | GNRMADQAARKAAITETPDTSTLLIENSSP |
| 34402 | -C-terminal NLS | SGGSKRTADGSEFEPKKKRKV |

TABLE 83
lists exemplary prime editor and its components

| SEQ ID | | |
|---|---|---|
| NO. | DESCRIPTION | SEQUENCE |
| 34405 | Exemplary prime editor | MKRTADGSEFESPKKKRKVDKKYSIGLDIGTNSVGWAVITDEYKV |
| | [NLS]-[Cas9 ( (R220K) | PSKKFKVLGNTDRHSIKKNLIGALLFDSGETAEATRLKRTARRR |
| | (R393K) (H839A)]- | YTRRKNRICYLQEIFSNEMAKVDDSFFHRLEESFLVEEDKKHER |
| | [linker]- | HPIFGNIVDEVAYHEKYPTIYHLRKKLVDSTDKADLRLIYLALAH |
| | [MMLV_RT (D200N) (T330P) | MIKFRGHFLIEGDLNPDNSDVDKLFIQLVQTYNQLFEENPINASG |
| | (L603W) (T306K) (W313F)]- | VDAKAILSARLSKSRKLENLIAQLPGEKKNGLFGNLIALSLGLTP |
| | [NLS] | NFKSNFDLAEDAKLQLSKDTYDDDLDNLLAQIGDQYADLFLAAK |
| | | NLSDAILLSDILRVNTEITKAPLSASMIKRYDEHHQDLTLLKALV |
| | | RQQLPEKYKEIFFDQSKNGYAGYIDGGASQEEFYKFIKPILEKMD |
| | | GTEELLVKLKREDLLRKQRTFDNGSIPHQIHLGELHAILRRQED |
| | | FYPFLKDNREKIEKILTFRIPYYVGPLARGNSRFAWMTRKSEETI |
| | | TPWNFEEVVDKGASAQSFIERMTNFDKNLPNEKVLPKHSLLYEY |
| | | FTVYNELTKVKYVTEGMRKPAFLSGEQKKAIVDLLFKTNRKVT |
| | | VKQLKEDYFKKIECFDSVEISGVEDRFNASLGTYHDLLKIIKDKD |
| | | FLDNEENEDILEDIVLTLTLFEDREMIEERLKTYAHLFDDKVMK |
| | | QLKRRRYTGWGRLSRKLINGIRDKQSGKTILDFLKSDGFANRNF |
| | | MQLIHDDSLTFKEDIQKAQVSGQGDSLHEHIANLAGSPAIKKGIL |
| | | QTVKVVDELVKVMGRHKPENIVIEMARENQTTQKGQKNSRER |
| | | MKRIEEGIKELGSQILKEHPVENTQLQNEKLYLYYLQNGRDMY |
| | | VDQELDINRLSDYDVDAIVPQSFLKDDSIDNKVLTRSDKNRGKSD |
| | | NVPSEEVVKKMKNYWRQLLNAKLITQRKFDNLTKAERGGLSEL |
| | | DKAGFIKRQLVETRQITKHVAQILDSRMNTKYDENDKLIREVKV |
| | | ITLKSKLVSDFRKDFQFYKVREINNYHHAHDAYLNAVVGTALIK |
| | | KYPKLESEFVYGDYKVYDVRKMIAKSEQEIGKATAKYFFYSNIM |
| | | NFFKTEITLANGEIRKRPLIETNGETGEIVWDKGRDFATVRKVLS |
| | | MPQVNIVKKTEVQTGGFSKESILPKRNSDKLIARKKDWDPKKYG |
| | | GFDSPTVAYSVLVVAKVEKGKSKKLKSVKELLGITIMERSSFEKN |
| | | PIDFLEAKGYKEVKKDLIIKLPKYSLFELENGRKRMLASAGELQ |
| | | KGNELALPSKYVNFLYLASHYEKLKGSPEDNEQKQLFVEQHKH |
| | | YLDEIIEQISEFSKRVILADANLDKVLSAYNKHRDKPIREQAENII |
| | | HLFTLTNLGAPAAFKYFDTTIDRKRYTSTKEVLDATLIHQSITGL |
| | | YETRIDLSQLGGDSGGSSGGSKRTADGSEFESPKKKRKVSGGSSG |
| | | GSTLNIEDEYRLHETSKEPDVSLGSTWLSDFPQAWAETGGMGLAVRQAP |
| | | LIIPLKATSTPVSIKQYPMSQEARLGIKPHIQRLLDQGILVPCQSPWNTPLL |
| | | PVKKPGTNDYRPVQDLREVNKRVEDIHPTVPNPYNLLSGLPPSHQWYTV |
| | | LDLKDAFFCLRLHPTSQPLFAFEWRDPEMGISGQLTWTRLPQGFKNSPT |
| | | LFNEALHRDLADFRIQHPDLILLQYVDDLLLAATSELDCQQGTRALLQTL |
| | | GNLGYRASAKKAQICQKQVKYLGYLLKEGQRWLTEARKETVMGQPTPK |
| | | TPRQLREFLGKAGFCRLFIPGFAEMAAPLYPLTKPGTLFNWGPDQQKAY |
| | | QEIKQALLTAPALGLPDLTKPFELFVDEKQGYAKGVLTQKLGPWRRPVA |
| | | YLSKKLDPVAAGWPPCLRMVAAIAVLTKDAGKLTMGQPLVILAPHAVEA |
| | | LVKQPPDRWLSNARMTHYQALLLDTDRVQFGPVVALNPATLLPLPEEGL |
| | | QHNCLDILAEAHGTRPDLTDQPLPDADHTWYTDGSSLLQEGQRKAGAA |
| | | VTTETEVIWAKALPAGTSAQRAELIALTQALKMAEGKKLNVYTDSRYAFA |
| | | TAHIHGEIYRRRGWLTSEGKEIKNKDEILALLKALFLPKRLSIIHCPGHQK |
| | | GHSAEARGNRMADQAARKAAITETPDTSTLLIENSSPSGGSKRTADGSEF |
| | | ESPKKKRKV [symbol] |
| | | KEY: |
| | | N-terminal bipartiteSV40NLS |
| | | CAS9 (R221K N394K H840A) |
| | | SGGSx2-met-bpSV40NLS-SGGSx2 LINKER |
| | | M-MLV D200N T306K W313F T330P L603W REVERSE TRANSCRIPTASE |
| | | C-terminal linker-NLS1 |
| | | C-terminal linker-NLS2 |
| 34392 | -N-terminal bpSV40NLS | MKRTADGSEFESPKKKRKV |
| 34406 | -CAS9 (R221K N394K | DKKYSIGLDIGTNSVGWAVITDEYKVPSKKFKVLGNTDRHSIKKNLI |
| | H840A) | GALLFDSGETAEATRLKRTARRRYTRRKNRICYLQEIFSNEMAKVD |
| | | DSFFHRLEESFLVEEDKKHERHPIFGNIVDEVAYHEKYPTIYHLRKKL |
| | | VDSTDKADLRLIYLALAHMIKFRGHFLIEGDLNPDNSDVDKLFIQLV |
| | | QTYNQLFEENPINASGVDAKAILSARLSKSRKLENLIAQLPGEKKNG |
| | | LFGNLIALSLGLTPNFKSNFDLAEDAKLQLSKDTYDDDLDNLLAQIG |
| | | DQYADLFLAAKNLSDAILLSDILRVNTEITKAPLSASMIKRYDEHHQ |
| | | DLTLLKALVRQQLPEKYKEIFFDQSKNGYAGYIDGGASQEEFYKFIK |
| | | PILEKMDGTEELLVKLKREDLLRKQRTFDNGSIPHQIHLGELHAILRR |
| | | QEDFYPFLKDNREKIEKILTFRIPYYVGPLARGNSRFAWMTRKSEETI |
| | | TPWNFEEVVDKGASAQSFIERMTNFDKNLPNEKVLPKHSLLYEYFT |
| | | VYNELTKVKYVTEGMRKPAFLSGEQKKAIVDLLFKTNRKVTVKQL |
| | | KEDYFKKIECFDSVEISGVEDRFNASLGTYHDLLKIIKDKDFLDNEEN |
| | | EDILEDIVLTLTLFEDREMIEERLKTYAHLFDDKVMKQLKRRRYTG |
| | | WGRLSRKLINGIRDKQSGKTILDFLKSDGFANRNFMQLIHDDSLTFK |
| | | EDIQKAQVSGQGDSLHEHIANLAGSPAIKKGILQTVKVVDELVKVM |
| | | GRHKPENIVIEMARENQTTQKGQKNSRERMKRIEEGIKELGSQILKE |
| | | HPVENTQLQNEKLYLYYLQNGRDMYVDQELDINRLSDYDVDAIVP |
| | | QSFLKDDSIDNKVLTRSDKNRGKSDNVPSEEVVKKMKNYWRQLLN |
| | | AKLITQRKFDNLTKAERGGLSELDKAGFIKRQLVETRQITKHVAQIL |
| | | DSRMNTKYDENDKLIREVKVITLKSKLVSDFRKDFQFYKVREINNY |
| | | HHAHDAYLNAVVGTALIKKYPKLESEFVYGDYKVYDVRKMIAKSE |
| | | QEIGKATAKYFFYSNIMNFFKTEITLANGEIRKRPLIETNGETGEIVW |
| | | DKGRDFATVRKVLSMPQVNIVKKTEVQTGGFSKESILPKRNSDKLIA |
| | | RKKDWDPKKYGGFDSPTVAYSVLVVAKVEKGKSKKLKSVKELLGI |
| | | TIMERSSFEKNPIDFLEAKGYKEVKKDLIIKLPKYSLFELENGRKRML |
| | | ASAGELQKGNELALPSKYVNFLYLASHYEKLKGSPEDNEQKQLFVE |
| | | QHKHYLDEIIEQISEFSKRVILADANLDKVLSAYNKHRDKPIREQAEN |
| | | IIHLFTLTNLGAPAAFKYFDTTIDRKRYTSTKEVLDATLIHQSITGLYE |
| | | TRIDLSQLGGD |
| 34407 | -SGGSx2-bpSV40NLS- | SGGSSGGSKRTADGSEFESPKKKRKVSGGSSGGS |
| | SGGSx2 linker | |
| 34363 | -MMLV_RT D200N | TLNIEDEYRLHETSKEPDVSLGSTWLSDFPQAWAETGGMGLAVRQA |
| | T330P L603W T306K | PLIIPLKATSTPVSIKQYPMSQEARLGIKPHIQRLLDQGIL VPCQSPWN |
| | W313F | TPLLPVKKPGTNDYRPVQDLREVNKRVEDIHPTVPNPYNLLSGLPPS |
| | | HQWYTVLDLKDAFFCLRLHPTSQPLFAFEWRDPEMGISGQLTWTRL |
| | | PQGFKNSPTLFNEALHRDLADFRIQHPDLILLQYVDDLLLAATSELD |
| | | CQQGTRALLQTLGNLGYRASAKKAQICQKQVKYLGYLLKEGQRWL |
| | | TEARKETVMGQPTPKTPRQLREFLGKAGFCRLFIPGFAEMAAPLYPL |
| | | TKPGTLFNWGPDQQKAYQEIKQALLTAPALGLPDLTKPFELFVDEK |
| | | QGYAKGVLTQKLGPWRRPVAYLSKKLDPVAAGWPPCLRMVAAIA |
| | | VLTKDAGKLTMGQPLVILAPHAVEALVKQPPDRWLSNARMTHYQA |
| | | LLLDTDRVQFGPVVALNPATLLPLPEEGLQHNCLDILAEAHGTRPDL |
| | | TDQPLPDADHTWYTDGSSLLQEGQRKAGAAVTTETEVIWAKALPA |
| | | GTSAQRAELIALTQALKMAEGKKLNVYTDSRYAFATAHIHGEIYRR |
| | | RGWLTSEGKEIKNKDEILALLKALFLPKRLSIIHCPGHQKGHSAEAR |
| | | GNRMADQAARKAAITETPDTSTLLIENSSP |
| 34408 | C-terminal linker-NLS | SGGSKRTADGSEFESPKKKRKV |
| 34409 | C-terminal linker-NLS2 | GSGPAAKRVKLD |

### PEgRNA for Editing of NCF1 Gene

[0221] The term “prime editing guide RNA”, or “PEgRNA”, refers to a guide polynucleotide that comprises one or more intended nucleotide edits for incorporation into the target DNA. In some embodiments, the PEgRNA associates with and directs a prime editor to incorporate the one or more intended nucleotide edits into the target gene via prime editing. “Nucleotide edit” or “intended nucleotide edit” refers to a specified deletion of one or more nucleotides at one specific position, insertion of one or more nucleotides at one specific position, substitution of a single nucleotide, or other alterations at one specific position to be incorporated into the sequence of the target gene. Intended nucleotide edit may refer to the edit on the editing template as compared to the sequence on the target strand of the target gene, or may refer to the edit encoded by the editing template on the newly synthesized single stranded DNA that replaces the editing target sequence, as compared to the editing target sequence. In some embodiments, a PEgRNA comprises a spacer sequence that is complementary or substantially complementary to a search target sequence on a target strand of the target gene. In some embodiments, the PEgRNA comprises a gRNA core that associates with a DNA binding domain, e.g., a CRISPR-Cas protein domain, of a prime editor. In some embodiments, the PEgRNA further comprises an extended nucleotide sequence comprising one or more intended nucleotide edits compared to the endogenous sequence of the target gene, wherein the extended nucleotide sequence may be referred to as an extension arm.

[0222] In certain embodiments, the extension arm comprises a primer binding site sequence (PBS) that can initiate target-primed DNA synthesis. In some embodiments, the PBS is complementary or substantially complementary to a free 3′ end on the edit strand of the target gene at a nick site generated by the prime editor. In some embodiments, the extension arm further comprises an editing template that comprises one or more intended nucleotide edits to be incorporated in the target gene by prime editing. In some embodiments, the editing template is a template for an RNA-dependent DNA polymerase domain or polypeptide of the prime editor, for example, a reverse transcriptase domain. The reverse transcriptase editing template may also be referred to herein as an RT template, or RTT. In some embodiments, the editing template comprises partial complementarity to an editing target sequence in the target gene, e.g., an NCF1 gene. In some embodiments, the editing template comprises substantial or partial complementarity to the editing target sequence except at the position of the intended nucleotide edits to be incorporated into the target gene. An exemplary architecture of a PEgRNA including its components is as demonstrated in FIG. 2.

[0223] In some embodiments, a PEgRNA includes only RNA nucleotides and forms an RNA polynucleotide. In some embodiments, a PEgRNA is a chimeric polynucleotide that includes both RNA and DNA nucleotides. For example, a PEgRNA can include DNA in the spacer sequence, the gRNA core, or the extension arm. In some embodiments, a PEgRNA comprises DNA in the spacer sequence. In some embodiments, the entire spacer sequence of a PEgRNA is a DNA sequence. In some embodiments, the PEgRNA comprises DNA in the gRNA core, for example, in a stem region of the gRNA core. In some embodiments, the PEgRNA comprises DNA in the extension arm, for example, in the editing template. An editing template that comprises a DNA sequence may serve as a DNA synthesis template for a DNA polymerase in a prime editor, for example, a DNA-dependent DNA polymerase. Accordingly, the PEgRNA may be a chimeric polynucleotide that comprises RNA in the spacer, gRNA core, and/or the PBS sequences and DNA in the editing template.

[0224] Components of a PEgRNA may be arranged in a modular fashion. In some embodiments, the spacer and the extension arm comprising a primer binding site sequence (PBS) and an editing template, e.g., a reverse transcriptase template (RTT), can be interchangeably located in the 5′ portion of the PEgRNA, the 3′ portion of the PEgRNA, or in the middle of the gRNA core. In some embodiments, a PEgRNA comprises a PBS and an editing template sequence in 5′ to 3′ order. In some embodiments, the gRNA core of a PEgRNA of this disclosure may be located in between a spacer and an extension arm of the PEgRNA. In some embodiments, the gRNA core of a PEgRNA may be located at the 3′ end of a spacer. In some embodiments, the gRNA core of a PEgRNA may be located at the 5′ end of a spacer. In some embodiments, the gRNA core of a PEgRNA may be located at the 3′ end of an extension arm. In some embodiments, the gRNA core of a PEgRNA may be located at the 5′ end of an extension arm. In some embodiments, the PEgRNA comprises, from 5′ to 3′: a spacer, a gRNA core, and an extension arm. In some embodiments, the PEgRNA comprises, from 5′ to 3′: a spacer, a gRNA core, an editing template, and a PBS. In some embodiments, the PEgRNA comprises, from 5′ to 3′: an extension arm, a spacer, and a gRNA core. In some embodiments, the PEgRNA comprises, from 5′ to 3′: an editing template, a PBS, a spacer, and a gRNA core.

[0225] In some embodiments, a PEgRNA comprises a single polynucleotide molecule that comprises the spacer sequence, the gRNA core, and the extension arm. In some embodiments, a PEgRNA comprises multiple polynucleotide molecules, for example, two polynucleotide molecules. In some embodiments, a PEgRNA comprise a first polynucleotide molecule that comprises the spacer and a portion of the gRNA core, and a second polynucleotide molecule that comprises the rest of the gRNA core and the extension arm. In some embodiments, the gRNA core portion in the first polynucleotide molecule and the gRNA core portion in the second polynucleotide molecule are at least partly complementary to each other. In some embodiments, the PEgRNA may comprise a first polynucleotide comprising the spacer and a first portion of a gRNA core comprising, which may be also be referred to as a crRNA. In some embodiments, the PEgRNA comprise a second polynucleotide comprising a second portion of the gRNA core and the extension arm, wherein the second portion of the gRNA core may also be referred to as a trans-activating crRNA, or tracr RNA. In some embodiments, the crRNA portion and the tracr RNA portion of the gRNA core are at least partially complementary to each other. In some embodiments, the partially complementary portions of the crRNA and the tracr RNA form a lower stem, a bulge, and an upper stem, as exemplified in FIG. 3.

[0226] In some embodiments, a spacer sequence comprises a region that has substantial complementarity to a search target sequence on the target strand of a double stranded target DNA, e.g., an NCF1 gene, an NCF1B pseudogene, or an NCF1C pseudogene. In some embodiments, the spacer sequence of a PEgRNA is identical or substantially identical to a protospacer sequence on the edit strand of the target gene (except that the protospacer sequence comprises thymine and the spacer sequence may comprise uracil). In some embodiments, the spacer sequence is at least about 70%, 75%, 80%, 85%, 90%, 95%, or 100% complementary to a search target sequence in the target gene. In some embodiments, the spacer comprises is substantially complementary to the search target sequence.

[0227] In some embodiments, the length of the spacer varies from about 10 to about 100 nucleotides. In some embodiments, the spacer is 16 nucleotides, 17 nucleotides, 18 nucleotides, 19 nucleotides, 20 nucleotides, 21 nucleotides, 22 nucleotides, 23 nucleotides, 24 nucleotides, or 25 nucleotides in length. In some embodiments, the spacer is from 15 nucleotides to 30 nucleotides in length, 15 to 25 nucleotides in length, 18 to 22 nucleotides in length, 10 to 20 nucleotides in length, or 20 to 30 nucleotides in length. In some embodiments, the spacer is 16 to 22 nucleotides in length, e.g., about 16, 17, 18, 19, 20, 21, or 22 nucleotides in length. In some embodiments, the spacer is 20 nucleotides in length.

[0228] As used herein in a PEgRNA or a nick guide RNA sequence, or fragments thereof such as a spacer, PBS, or RTT sequence, unless indicated otherwise, it should be appreciated that the letter “T” or “thymine” indicates a nucleobase in a DNA sequence that encodes the PEgRNA or guide RNA sequence, and is intended to refer to a uracil (U) nucleobase of the PEgRNA or guide RNA or any chemically modified uracil nucleobase known in the art, such as 5-methoxyuracil.

[0229] The extension arm of a PEgRNA may comprise a primer binding site (PBS) and an editing template (e.g., an RTT). The extension arm may be partially complementary to the spacer. In some embodiments, the editing template (e.g., RTT) is partially complementary to the spacer. In some embodiments, the editing template (e.g., RTT) and the primer binding site (PBS) are each partially complementary to the spacer.

[0230] An extension arm of a PEgRNA may comprise a primer binding site sequence (PBS, or PBS sequence) that comprises complementarity to and can hybridize with a free 3′ end of a single stranded DNA in the target gene (e.g., an NCF1 gene, an NCF1B pseudogene, or an NCF1C pseudogene) generated by nicking with a prime editor at the nick site on the PAM strand.

[0231] The length of the PBS sequence may vary depending on, e.g., the prime editor components, the search target sequence and other components of the PEgRNA. In some embodiments, the PBS is about 3 to 19 nucleotides in length. in some embodiments, the PBS is about 3 to 17 nucleotides in length. In some embodiments, the PBS is about 4 to 16 nucleotides, about 6 to 16 nucleotides, about 6 to 18 nucleotides, about 6 to 20 nucleotides, about 8 to 20 nucleotides, about 10 to 20 nucleotides, about 12 to 20 nucleotides, about 14 to 20 nucleotides, about 16 to 20 nucleotides, or about 18 to 20 nucleotides in length. In some embodiments, the PBS is 8 to 17 nucleotides in length. In some embodiments, the PBS is 8 to 16 nucleotides in length. In some embodiments, the PBS is 8 to 15 nucleotides in length. In some embodiments, the PBS is 8 to 14 nucleotides in length. In some embodiments, the PBS is 8 to 13 nucleotides in length. In some embodiments, the PBS is 8 to 12 nucleotides in length. In some embodiments, the PBS is 8 to 11 nucleotides in length. In some embodiments, the PBS is 8 to 10 nucleotides in length. In some embodiments, the PBS is 8 or 9 nucleotides in length. In some embodiments, the PBS is 16 or 17 nucleotides in length. In some embodiments, the PBS is 15 to 17 nucleotides in length. In some embodiments, the PBS is 14 to 17 nucleotides in length. In some embodiments, the PBS is 13 to 17 nucleotides in length. In some embodiments, the PBS is 12 to 17 nucleotides in length. In some embodiments, the PBS is 11 to 17 nucleotides in length. In some embodiments, the PBS is 10 to 17 nucleotides in length. In some embodiments, the PBS is 9 to 17 nucleotides in length. In some embodiments, the PBS is about 7 to 15 nucleotides in length. In some embodiments, the PBS is 6, 7, 8, 9, 10, 11, 12, 13, 14, 15, 16, 17, 18, or 19 nucleotides in length. In some embodiments, the PBS is 8 to 14 nucleotides in length. For example, the PBS can be 8, 9, 10, 11, 12, 13, or 14 nucleotides in length. In some embodiments, the PBS is 11 or 12 nucleotides in length. In some embodiments, the PBS is 11 to 13 nucleotides in length. In some embodiments, the PBS is 11 to 14 nucleotides in length.

[0232] The PBS may be complementary or substantially complementary to a DNA sequence in the edit strand of the target gene. By annealing with the edit strand at a free hydroxy group, e.g., a free 3′ end generated by prime editor nicking, the PBS may initiate synthesis of a new single stranded DNA encoded by the editing template at the nick site. In some embodiments, the PBS is at least about 70%, 75%, 80%, 85%, 90%, 95%, or 100% complementary to a region of the edit strand of the target gene (e.g., an NCF1 gene, an NCF1B pseudogene, or an NCF1C pseudogene). In some embodiments, the PBS is perfectly complementary, or 100% complementary, to a region of the edit strand of the target gene (e.g., an NCF1 gene, an NCF1B pseudogene, or an NCF1C pseudogene).

[0233] An extension arm of a PEgRNA may comprise an editing template that serves as a DNA synthesis template for the DNA polymerase in a prime editor during prime editing.

[0234] The length of an editing template may vary depending on, e.g., the prime editor components, the search target sequence and other components of the PEgRNA. In some embodiments, the editing template serves as a DNA synthesis template for a reverse transcriptase, and the editing template is referred to as a reverse transcription editing template (RTT).

[0235] The editing template (e.g., RTT), in some embodiments, is 2, 3, 4, 5, 6, 7, 8, 9, 10, 11, 12, 13, 14, 15, 16, 17, 18, 19, 20, 21, 22, 23, 24, or 25 nucleotides in length. In some embodiments, the RTT is 12, 13, 14, 15, 16, 17, 18, 19, 20, 21, 22, 23, 24, or 25 nucleotides in length. In some embodiments, the RTT is 16, 17, 18, 19, 20, 21, 22, 23, 24, 25, 26, 27, 28, 29, 30, 31, 32, 33, 34, 35, 36, 37, 38, 39, or 40 nucleotides in length. In some embodiments, the RTT is 16, 17, 18, 19, 20, 21, 22, 23, 24, 25, 26, 27, 28, 29, 30, 31, 32, 33, 34, 35, 36, 37, 38, 39, 40, 41, 42, 43, 44, 45, 46, 47, 48, 49, 50, 51, 52, 53, 54, 55, 56, 57, 58, 59, 60, 61, 62, 63, 64, 65, 66, 67, 68, 69, 70, 71, 72, 73, 74, 75, 76, 77, 78, 79, or 80 nucleotides in length. In some embodiments, the RTT is 10 to 110 nucleotides in length. In some embodiments, the RTT is 10 to 109, 10 to 108, 10 to 107, 10 to 106, 10 to 105, 10 to 104, 10 to 103, 10 to 102, or 10 to 101 nucleotides in length. In some embodiments, the RTT is at least 8 and no more than 50 nucleotides in length. In some embodiments, the RTT is at least 8 and no more than 25 nucleotides in length. In some embodiments, the RTT is about 10 to about 20 nucleotides in length. In some embodiments, the RTT is about 11, 12, 13, 14, 15, 16, 17, 18, or 19 nucleotides in length. In some embodiments, the RTT is 11 to 17 nucleotides in length. In some embodiments, the RTT is 12 to 17 nucleotides in length. In some embodiments, the RTT is 12 to 16 nucleotides in length. In some embodiments, the RTT is 13 to 17 nucleotides in length. In some embodiments, the RTT is 11, 12, 13, 14, 15, 16, or 17 nucleotides in length. In some embodiments the RTT is 12 nucleotides in length. In some embodiments the RTT is 16 nucleotides in length. In some embodiments the RTT is 17 nucleotides in length.

[0236] In some embodiments, the editing template (e.g., RTT) sequence is about 70%, 75%, 80%, 85%, 90%, 95%, or 99% complementary to the editing target sequence on the edit strand of the target gene (e.g., an NCF1 gene, an NCF1B pseudogene, or an NCF1C pseudogene). In some embodiments, the editing template sequence (e.g., RTT) is substantially complementary to the editing target sequence. In some embodiments, the editing template sequence (e.g., RTT) is complementary to the editing target sequence except at positions of the intended nucleotide edits to be incorporated in the target gene. In some embodiments, the editing template comprises a nucleotide sequence comprising about 85% to about 95% complementarity to an editing target sequence in the edit strand in the target gene (e.g., an NCF1 gene, an NCF1B pseudogene, or an NCF1C pseudogene). In some embodiments, the editing template comprises about 86%, about 87%, about 88%, about 89%, about 90%, about 91%, about 92%, about 93%, about 94%, about 95%, about 96%, about 97%, about 98%, or about 99% complementarity to an editing target sequence in the edit strand of the target gene (e.g., an NCF1 gene, an NCF1B pseudogene, or an NCF1C pseudogene).

[0237] An intended nucleotide edit in an editing template of a PEgRNA may comprise various types of alterations as compared to the target gene sequence. In some embodiments, the nucleotide edit is a single nucleotide substitution as compared to the target gene sequence. In some embodiments, the nucleotide edit is a deletion as compared to the target gene sequence. In some embodiments, the nucleotide edit is an insertion as compared to the target gene sequence. In some embodiments, the editing template comprises one to ten intended nucleotide edits as compared to the target gene sequence. In some embodiments, the editing template comprises one or more intended nucleotide edits as compared to the target gene sequence. In some embodiments, the editing template comprises two or more intended nucleotide edits as compared to the target gene sequence. In some embodiments, the editing template comprises three or more intended nucleotide edits as compared to the target gene sequence. In some embodiments, the editing template comprises four or more, five or more, or six or more intended nucleotide edits as compared to the target gene sequence. In some embodiments, the editing template comprises two single nucleotide substitutions, insertions, deletions, or any combination thereof, as compared to the target gene sequence. In some embodiments, the editing template comprises three single nucleotide substitutions, insertions, deletions, or any combination thereof, as compared to the target gene sequence. In some embodiments, the editing template comprises four, five, or six single nucleotide substitutions, insertions, deletions, or any combination thereof, as compared to the target gene sequence. In some embodiments, a nucleotide substitution comprises an adenine (A)-to-thymine (T) substitution. In some embodiments, a nucleotide substitution comprises an A-to-guanine (G) substitution. In some embodiments, a nucleotide substitution comprises an A-to-cytosine (C) substitution. In some embodiments, a nucleotide substitution comprises a T-A substitution. In some embodiments, a nucleotide substitution comprises a T-G substitution. In some embodiments, a nucleotide substitution comprises a T-C substitution. In some embodiments, a nucleotide substitution comprises a G-to-A substitution. In some embodiments, a nucleotide substitution comprises a G-to-T substitution. In some embodiments, a nucleotide substitution comprises a G-to-C substitution. In some embodiments, a nucleotide substitution comprises a C-to-A substitution. In some embodiments, a nucleotide substitution comprises a C-to-T substitution. In some embodiments, a nucleotide substitution comprises a C-to-G substitution.

[0238] In some embodiments, a nucleotide insertion is at least 1, at least 2, at least 3, at least 4, at least 5 nucleotides, at least 6 nucleotides, at least 7 nucleotides, at least 8 nucleotides, at least 9 nucleotides, at least 10 nucleotides, at least 11 nucleotides, at least 12 nucleotides, at least 13 nucleotides, at least 14 nucleotides, at least 15 nucleotides, at least 16 nucleotides, at least 17 nucleotides, at least 18 nucleotides, at least 19 nucleotides, or at least 20 nucleotides in length. In some embodiments, a nucleotide insertion is from 1 to 2 nucleotides, from 1 to 3 nucleotides, from 1 to 4 nucleotides, from 1 to 5 nucleotides, form 2 to 5 nucleotides, from 3 to 5 nucleotides, from 3 to 6 nucleotides, from 3 to 8 nucleotides, from 4 to 9 nucleotides, from 5 to 10 nucleotides, from 6 to 11 nucleotides, from 7 to 12 nucleotides, from 8 to 13 nucleotides, from 9 to 14 nucleotides, from 10 to 15 nucleotides, from 11 to 16 nucleotides, from 12 to 17 nucleotides, from 13 to 18 nucleotides, from 14 to 19 nucleotides, from 15 to 20 nucleotides in length. In some embodiments, a nucleotide insertion is a single nucleotide insertion. In some embodiments, a nucleotide insertion comprises insertion of two nucleotides.

[0239] The editing template of a PEgRNA may comprise one or more intended nucleotide edits, compared to the target gene (e.g., an NCF1 gene, an NCF1B pseudogene, or an NCF1C pseudogene) to be edited. Position of the intended nucleotide edit(s) relevant to other components of the PEgRNA, or to particular nucleotides (e.g., mutations) in the target gene may vary. In some embodiments, the nucleotide edit is in a region of the PEgRNA corresponding to or homologous to the protospacer sequence. In some embodiments, the nucleotide edit is in a region of the PEgRNA corresponding to a region of the target gene outside of the protospacer sequence.

[0240] By “upstream” and “downstream” it is intended to define relevant positions at least two regions or sequences in a nucleic acid molecule orientated in a 5′-to-3′ direction. For example, a first sequence is upstream of a second sequence in a DNA molecule where the first sequence is positioned 5′ to the second sequence. Accordingly, the second sequence is downstream of the first sequence.

[0241] In some embodiments, the position of a nucleotide edit incorporation in the target gene can be determined based on position of the nick site. In some embodiments, position of an intended nucleotide edit is 0, 1, 2, 3, 4, 5, 6, 7, 8, 9, 10, 11, 12, 13, 14, 15, 16, 17, 18, 19, 20, 21, 22, 23, 24, 25, 26, 27, 28, 29, 30, 31, 32, 33, 34, 35, 36, 37, 38, 39, 40, 45, 50, 55, 60, 65, 70, 75, 80, 85, 90, 95, 100, 110, 120, 130, 140, or 150 nucleotides apart from the nick site. In some embodiments, position of an intended nucleotide edit is 0, 1, 2, 3, 4, 5, 6, 7, 8, 9, 10, 11, 12, 13, 14, 15, 16, 17, 18, 19, 20, 21, 22, 23, 24, 25, 26, 27, 28, 29, 30, 31, 32, 33, 34, 35, 36, 37, 38, 39, 40, 45, 50, 55, 60, 65, 70, 75, 80, 85, 90, 95, 100, 110, 120, 130, 140, or 150 nucleotides downstream of the nick site on the PAM strand (or the non-target strand, or the edit strand) of the double stranded target DNA. In some embodiments, position of the intended nucleotide edit in the editing template can be referred to by aligning the editing template with the partially complementary editing target sequence on the edit strand and referring to nucleotide positions on the editing strand where the intended nucleotide edit is incorporated. Accordingly, in some embodiments, a nucleotide edit in an editing template is at a position corresponding to a position about 0, 1, 2, 3, 4, 5, 6, 7, 8, 9, 10, 11, 12, 13, 14, 15, 16, 17, 18, 19, 20, 21, 22, 23, 24, 25, 26, 27, 28, 29, 30, 31, 32, 33, 34, 35, 36, 37, 38, 39, 40, 45, 50, 55, 60, 65, 70, 75, 80, 85, 90, 95, 100, 110, 120, 130, 140, or 150 nucleotides apart from the nick site. In some embodiments, a nucleotide edit in an editing template is at a position corresponding to a position about 0 to 2 nucleotides, 0 to 4 nucleotides, 0 to 6 nucleotides, 0 to 8 nucleotides, 0 to 10 nucleotides, 2 to 4 nucleotides, 2 to 6 nucleotides, 2 to 8 nucleotides, 2 to 10 nucleotides, 2 to 12 nucleotides, 4 to 6 nucleotides, 4 to 8 nucleotides, 4 to 10 nucleotides, 4 to 12 nucleotides, 4 to 14 nucleotides, 6 to 8 nucleotides, 6 to 10 nucleotides, 6 to 12 nucleotides, 6 to 14 nucleotides, 6 to 16 nucleotides, 8 to 10 nucleotides, 8 to 12 nucleotides, 8 to 14 nucleotides, 8 to 16 nucleotides, 8 to 18 nucleotides, 10 to 12 nucleotides, 10 to 14 nucleotides, 10 to 16 nucleotides, 10 to 18 nucleotides, 10 to 20 nucleotides, 12 to 14 nucleotides, 12 to 16 nucleotides, 12 to 18 nucleotides, 12 to 20 nucleotides, 12 to 22 nucleotides, 14 to 16 nucleotides, 14 to 18 nucleotides, 14 to 20 nucleotides, 14 to 22 nucleotides, 14 to 24 nucleotides, 16 to 18 nucleotides, 16 to 20 nucleotides, 16 to 22 nucleotides, 16 to 24 nucleotides, 16 to 26 nucleotides, 18 to 20 nucleotides, 18 to 22 nucleotides, 18 to 24 nucleotides, 18 to 26 nucleotides, 18 to 28 nucleotides, 20 to 22 nucleotides, 20 to 24 nucleotides, 20 to 26 nucleotides, 20 to 28 nucleotides, 20 to 30 nucleotides, 30 to 40 nucleotides, 40 to 50 nucleotides, 50 to 60 nucleotides, 60 to 70 nucleotides, 70 to 80 nucleotides, 80 to 90 nucleotides, 90 to 100 nucleotides, 100 to 110 nucleotides, 110 to 120 nucleotides, 120 to 130 nucleotides, 130 to 140 nucleotides, or 140 to 150 nucleotides apart from the nick site. In some embodiments, when referred to in the context of the PAM strand (or the non-target strand, or the edit strand), a nucleotide edit in an editing template is at a position corresponding to a position about 0 to 2 nucleotides, 0 to 4 nucleotides, 0 to 6 nucleotides, 0 to 8 nucleotides, 0 to 10 nucleotides, 2 to 4 nucleotides, 2 to 6 nucleotides, 2 to 8 nucleotides, 2 to 10 nucleotides, 2 to 12 nucleotides, 4 to 6 nucleotides, 4 to 8 nucleotides, 4 to 10 nucleotides, 4 to 12 nucleotides, 4 to 14 nucleotides, 6 to 8 nucleotides, 6 to 10 nucleotides, 6 to 12 nucleotides, 6 to 14 nucleotides, 6 to 16 nucleotides, 8 to 10 nucleotides, 8 to 12 nucleotides, 8 to 14 nucleotides, 8 to 16 nucleotides, 8 to 18 nucleotides, 10 to 12 nucleotides, 10 to 14 nucleotides, 10 to 16 nucleotides, 10 to 18 nucleotides, 10 to 20 nucleotides, 12 to 14 nucleotides, 12 to 16 nucleotides, 12 to 18 nucleotides, 12 to 20 nucleotides, 12 to 22 nucleotides, 14 to 16 nucleotides, 14 to 18 nucleotides, 14 to 20 nucleotides, 14 to 22 nucleotides, 14 to 24 nucleotides, 16 to 18 nucleotides, 16 to 20 nucleotides, 16 to 22 nucleotides, 16 to 24 nucleotides, 16 to 26 nucleotides, 18 to 20 nucleotides, 18 to 22 nucleotides, 18 to 24 nucleotides, 18 to 26 nucleotides, 18 to 28 nucleotides, 20 to 22 nucleotides, 20 to 24 nucleotides, 20 to 26 nucleotides, 20 to 28 nucleotides, 20 to 30 nucleotides, 30 to 40 nucleotides, 40 to 50 nucleotides, 50 to 60 nucleotides, 60 to 70 nucleotides, 70 to 80 nucleotides, 80 to 90 nucleotides, 90 to 100 nucleotides, 100 to 110 nucleotides, 110 to 120 nucleotides, 120 to 130 nucleotides, 130 to 140 nucleotides, or 140 to 150 nucleotides downstream from the nick site. The relative positions of the intended nucleotide edit(s) and nick site may be referred to by numbers. For example, in some embodiments, the nucleotide immediately downstream of the nick site on a PAM strand (or the non-target strand, or the edit strand) may be referred to as at position 0. The nucleotide immediately upstream of the nick site on the PAM strand (or the non-target strand, or the edit strand) may be referred to as at position −1. The nucleotides downstream of position 0 on the PAM strand can be referred to as at positions +1, +2, +3, +4, . . . +n, and the nucleotides upstream of position −1 on the PAM strand may be referred to as at positions −2, −3, −4, . . . , −n. Accordingly, in some embodiments, the nucleotide in the editing template that corresponds to position 0 when the editing template is aligned with the partially complementary editing target sequence by complementarity can also be referred to as position 0 in the editing template, the nucleotides in the editing template corresponding to the nucleotides at positions +1, +2, +3, +4, . . . , +n on the PAM strand of the double stranded target DNA can also be referred to as at positions +1, +2, +3, +4, . . . , +n in the editing template, and the nucleotides in the editing template corresponding to the nucleotides at positions −1, −2, −3, −4, . . . , −n on the PAM strand on the double stranded target DNA may also be referred to as at positions −1, −2, −3, −4, . . . , −n on the editing template, even though when the PEgRNA is viewed as a standalone nucleic acid, positions +1, +2, +3, +4, . . . , +n are 5′ of position 0 and positions −1, −2, −3, −4, . . . −n are 3′ of position 0 in the editing template. In some embodiments, an intended nucleotide edit is at position +n of the editing template relative to position 0. Accordingly, the intended nucleotide edit may be incorporated at position +n of the PAM strand of the double stranded target DNA (and subsequently, the target strand of the double stranded target DNA) by prime editing. The corresponding positions of the intended nucleotide edit incorporated in the target gene may also be referred to based on the nicking position generated by a prime editor based on sequence homology and complementarity. For example, in embodiments, the distance between the nucleotide edit to be incorporated into the target gene (e.g., an NCF1 gene, an NCF1B pseudogene, or an NCF1C pseudogene) and the nick site (also referred to as the “nick to edit distance”) may be determined by the position of the nick site and the position of the nucleotide(s) corresponding to the intended nucleotide edit(s), for example, by identifying sequence complementarity between the spacer and the search target sequence and sequence complementarity between the editing template and the editing target sequence. In certain embodiments, the position of the nucleotide edit can be in any position downstream of the nick site on the edit strand (or the PAM strand). As used herein, the distance between the nick site and the nucleotide edit, for example, where the nucleotide edit comprises an insertion or deletion, refers to the 5′ most position of the nucleotide edit for a nick that creates a 3′ free end on the edit strand (i.e., the “near position” of the nucleotide edit to the nick site). For PEgRNAs designed to correct or edit the c.73_74delGT deletion in NCF1 (or corresponding edits in NCF1B/NCF1C), the nick-to-edit distance can be considered by the “edit” position being the position of the third and fourth nucleotides in exon 2 of NCF1 gene (because insertion of, e.g., one “GT” upstream or downstream of another “GT” results in the same “GTGT” sequence, which is the wildtype sequence of NCF1 at the first 4 nucleotides of exon 2). For example, a PEgRNA having a spacer sequence of SEQ ID NO: 3995 has a nick-to-edit distance of 2 nucleotides. In some embodiments, the nick-to-edit distance is 2 to 106 nucleotides. In some embodiments, the nick-to-edit distance is 2 to 105, 2 to 104, 2 to 103, 2 to 102, 2 to 101, 2 to 100, 2 to 99, 2 to 98, or 2 to 97 nucleotides. In some embodiments, the nick-to-edit distance is 2 to 90, 2 to 80, 2 to 70, 2 to 60, 2 to 50, 2 to 40, or 2 to 30 nucleotides. In some embodiments, the nick-to-edit distance is 2 to 25, 2 to 20, 2 to 15, or 2 to 10 nucleotides. In some embodiments, the nick-to-edit distance is 2, 3, 4, 5, 6, or 7 nucleotides in length.

[0242] The RTT length and the nick-to-edit distance relate to the length of the portion of the RTT that is upstream of (i.e. 5′ to) the 5′-most edit in the RTT and is complementary to the edit strand. In some embodiments, the editing template comprises at least 4 contiguous nucleotides of complementarity with the edit strand wherein the at least 4 nucleotides contiguous are located upstream of the 5′ most edit in the editing template. In some embodiments, the editing template comprises at least 5, 6, 7, 8, 9, 10, 11, 12, 13, 14, 15, 16, 17, 18, 19, or more contiguous nucleotides of complementarity with the edit strand wherein the at least 5, 6, 7, 8, 9, 10, 11, 12, 13, 14, 15, 16, 17, 18, 19, or more contiguous nucleotides are located upstream of the 5′ most edit in the editing template. In some embodiments, the editing template comprises 20-25, 25-30, 30-35, 35-40, 45-45, or 45-50 contiguous nucleotides of complementarity with the edit strand wherein the 20-25, 25-30, 30-35, 35-40, 45-45, or 45-50 or more contiguous nucleotides are located upstream of the 5′ most edit in the editing template. In some embodiments, the editing template comprises 9-14 contiguous nucleotides of complementarity with the edit strand wherein the 9-14 contiguous nucleotides are located upstream of the 5′ most edit in the editing template. In some embodiments, the editing template comprises 6-10 contiguous nucleotides of complementarity with the edit strand wherein the 6-10 contiguous nucleotides are located upstream of the 5′ most edit in the editing template. In some embodiments, the editing template comprises 10 contiguous nucleotides of complementarity with the edit strand wherein the 10 contiguous nucleotides are located upstream of the 5′ most edit in the editing template. In some embodiments, the editing template comprises 9 contiguous nucleotides of complementarity with the edit strand wherein the 9 contiguous nucleotides are located upstream of the 5′ most edit in the editing template.

[0243] When referred to within the PEgRNA, positions of the one or more intended nucleotide edits may be referred to relevant to components of the PEgRNA. For example, an intended nucleotide edit may be 5′ or 3′ to the PBS. In some embodiments, a PEgRNA comprises the structure, from 5′ to 3′: a spacer, a gRNA core, an editing template, and a PBS. In some embodiments, the intended nucleotide edit is 0, 1, 2, 3, 4, 5, 6, 7, 8, 9, 10, 11, 12, 13, 14, 15, 16, 17, 18, 19, 20, 21, 22, 23, 24, 25, 26, 27, 28, 29, 30, 31, 32, 33, 34, 35, 36, 37, 38, 39, or 40 nucleotides upstream to the 5′ most nucleotide of the PBS. In some embodiments, the intended nucleotide edit is 0 to 2 nucleotides, 0 to 4 nucleotides, 0 to 6 nucleotides, 0 to 8 nucleotides, 0 to 10 nucleotides, 2 to 4 nucleotides, 2 to 6 nucleotides, 2 to 8 nucleotides, 2 to 10 nucleotides, 2 to 12 nucleotides, 4 to 6 nucleotides, 4 to 8 nucleotides, 4 to 10 nucleotides, 4 to 12 nucleotides, 4 to 14 nucleotides, 6 to 8 nucleotides, 6 to 10 nucleotides, 6 to 12 nucleotides, 6 to 14 nucleotides, 6 to 16 nucleotides, 8 to 10 nucleotides, 8 to 12 nucleotides, 8 to 14 nucleotides, 8 to 16 nucleotides, 8 to 18 nucleotides, 10 to 12 nucleotides, 10 to 14 nucleotides, 10 to 16 nucleotides, 10 to 18 nucleotides, 10 to 20 nucleotides, 12 to 14 nucleotides, 12 to 16 nucleotides, 12 to 18 nucleotides, 12 to 20 nucleotides, 12 to 22 nucleotides, 14 to 16 nucleotides, 14 to 18 nucleotides, 14 to 20 nucleotides, 14 to 22 nucleotides, 14 to 24 nucleotides, 16 to 18 nucleotides, 16 to 20 nucleotides, 16 to 22 nucleotides, 16 to 24 nucleotides, 16 to 26 nucleotides, 18 to 20 nucleotides, 18 to 22 nucleotides, 18 to 24 nucleotides, 18 to 26 nucleotides, 18 to 28 nucleotides, 20 to 22 nucleotides, 20 to 24 nucleotides, 20 to 26 nucleotides, 20 to 28 nucleotides, or 20 to 30 nucleotides upstream to the 5′ most nucleotide of the PBS.

[0244] The corresponding positions of the intended nucleotide edit incorporated in the target gene may also be referred to based on the nicking position generated by a prime editor based on sequence homology and complementarity. For example, in embodiments, the distance between the nucleotide edit to be incorporated into the target gene (e.g., an NCF1 gene, an NCF1B pseudogene, or an NCF1C pseudogene) and the nick site (also referred to as the “nick to edit distance”) may be determined by the position of the nick site and the position of the nucleotide(s) corresponding to the intended nucleotide edit(s), for example, by identifying sequence complementarity between the spacer and the search target sequence and sequence complementarity between the editing template and the editing target sequence. In certain embodiments, the position of the nucleotide edit can be in any position downstream of the nick site on the edit strand (or the PAM strand) generated by the prime editor, such that the distance between the nick site and the intended nucleotide edit is 0, 1, 2, 3, 4, 5, 6, 7, 8, 9, 10, 11, 12, 13, 14, 15, 16, 17, 18, 19, 20, 21, 22, 23, 24, 25, 26, 27, 28, 29, or 30 nucleotides in length. In some embodiments, the position of the nucleotide edit is 0, 1, 2, 3, 4, 5, 6, 7, 8, 9, 10, 11, 12, 13, 14, 15, 16, 17, 18, 19, 20, 21, 22, 23, 24, 25, 26, 27, 28, 29, or 30 nucleotides upstream of the nick site on the edit strand. In some embodiments, the position of the nucleotide edit is 0, 1, 2, 3, 4, 5, 6, 7, 8, 9, 10, 11, 12, 13, 14, 15, 16, 17, 18, 19, 20, 21, 22, 23, 24, 25, 26, 27, 28, 29, or 30 nucleotides downstream of the nick site on the edit strand. In some embodiments, the position of the nucleotide edit is 0 base pair from the nick site on the edit strand, that is, the editing position is at the same position as the nick site. As used herein, the distance between the nick site and the nucleotide edit, for example, where the nucleotide edit comprises an insertion or deletion, refers to the 5′ most position of the nucleotide edit for a nick that creates a 3′ free end on the edit strand (i.e., the “near position” of the nucleotide edit to the nick site). Similarly, as used herein, the distance between the nick site and a PAM position edit, for example, where the nucleotide edit comprises an insertion, deletion, or substitution of two or more contiguous nucleotides, refers to the 5′ most position of the nucleotide edit and the 5′ most position of the PAM sequence. In some embodiments, the editing template extends beyond a nucleotide edit to be incorporated to the target gene sequence (e.g., an NCF1 gene, an NCF1B pseudogene, or an NCF1C pseudogene sequence). For example, in some embodiments, the editing template comprises at least 1, 2, 3, 4, 5, 6, 7, 8, 9, 10, 11, 12, 13, 14, 15, 16, 17, 18, 19, 20, 21, 22, 23, 24, 25, 26, 27, 28, 29, 30, 31, 32, 33, 34, 35, 36, 37, 38, 39, 40, 41, 42, 43, 44, 45, 46, 47, 48, 49, 50, 51, 52, 53, 54, 55, 56, 57, 58, 59, 60, 61, 62, 63, 64, 65, 66, 67, 68, 69, 70, 71, 72, 73, 74, 75, 76, 77, 78, 79, or 80 nucleotides.

[0245] In some embodiments, the editing template can comprise comprising a second edit relative to a target sequence. The second edit can be designed to mutate or otherwise silence a PAM sequence such that a corresponding nucleic acid guided nuclease or CRISPR nuclease is no longer able to cleave the target sequence (such edits referred to as “PAM silencing edits).

[0246] Without wishing to be bound by any particular theory, PAM silencing edits may prevent the Cas, e.g., Cas9, nickase, from re-nicking the edit strand before the edit is incorporated in the target strand, therefore improving prime editing efficiency. In some embodiments, a PAM silencing edit is a synonymous edit that does not alter the amino acid sequence encoded by the target gene after incorporation of the edit. In some embodiments, a PAM silencing edit is at a position corresponding to a non-coding region, e.g., an intron, of a target NCF1 (or NCF1B/NCF1C) gene. Preferrably, the edits in an intron of a target gene is not at a position that corresponds to intron-exon junction and the edit does not affect transcript splicing.

[0247] In some embodiments, the length of the editing template is at least 2, 3, 4, 5, 6, 7, 8, 9, 10, 11, 12, 13, 14, 15, 16, 17, 18, 19, 20, 21, 22, 23, 24, 25, 26, 27, 28, 29, 30, 31, 32, 33, 34, 35, 36, 37, 38, 39, 40, 41, 42, 43, 44, 45, 46, 47, 48, 49, 50, 51, 52, 53, 54, 55, 56, 57, 58, 59, 60, 61, 62, 63, 64, 65, 66, 67, 68, 69, 70, 71, 72, 73, 74, 75, 76, 77, 78, 79, or 80 nucleotides longer than the nick to edit distance. In some embodiments, for example, the nick to edit distance is 8 nucleotides, and the editing template is 10 to 15, 10 to 20, 10 to 25, 10 to 30, 10 to 35, 10 to 40, 10 to 45, 10 to 50, 10 to 55, 10 to 60, 10 to 65, 10 to 70, 10 to 75, or 10 to 80 nucleotides in length. In some embodiments, the nick to edit distance is 22 nucleotides, and the editing template is 24 to 28, 24 to 30, 24 to 32, 24 to 34, 24 to 36, 24 to 37, 24 to 38, 24 to 40, 24 to 45, 24 to 50, 24 to 55, 24 to 60, 24 to 65, 24 to 70, 24 to 75, 24 to 80, 24 to 85, 24 to 90, 24 to 95, 24 to 100, 24 to 105, 24 to 100, 24 to 105, or 24 to 110 nucleotides in length.

[0248] In some embodiments, the editing template comprises an adenine at the first nucleobase position (e.g., for a PEgRNA following 5′-spacer-gRNA core-RTT-PBS-3′ orientation, the 5′ most nucleobase is the “first base”). In some embodiments, the editing template comprises a guanine at the first nucleobase position (e.g., for a PEgRNA following 5′-spacer-gRNA core-RTT-PBS-3′ orientation, the 5′ most nucleobase is the “first base”). In some embodiments, the editing template comprises an uracil at the first nucleobase position (e.g., for a PEgRNA following 5′-spacer-gRNA core-RTT-PBS-3′ orientation, the 5′ most nucleobase is the “first base”). In some embodiments, the editing template comprises a cytosine at the first nucleobase position (e.g., for a PEgRNA following 5′-spacer-gRNA core-RTT-PBS-3′ orientation, the 5′ most nucleobase is the “first base”). In some embodiments, the editing template does not comprise a cytosine at the first nucleobase position (e.g., for a PEgRNA following 5′-spacer-gRNA core-RTT-PBS-3′ orientation, the 5′ most nucleobase is the “first base”).

[0249] The editing template of a PEgRNA may encode a new single stranded DNA (e.g. by reverse transcription) to replace an editing target sequence in the target gene. In some embodiments, the editing target sequence in the edit strand of the target gene is replaced by the newly synthesized strand, and the nucleotide edit(s) are incorporated in the region of the target gene. In some embodiments, the target gene is an NCF1 gene, an NCF1B pseudogene, or an NCF1C pseudogene. In some embodiments, the editing template of the PEgRNA encodes a newly synthesized single stranded DNA that comprises a wild type NCF1 gene sequence. In some embodiments, the newly synthesized DNA strand replaces the editing target sequence in the target gene, wherein the editing target sequence (or the endogenous sequence complementary to the editing target sequence on the target strand of the target gene) comprises a mutation or a nucleotide alteration compared to a reference gene, e.g., a wild type gene.

[0250] In some embodiments, the newly synthesized DNA strand replaces the editing target sequence in a target NCF1 gene, wherein the editing target sequence (or the endogenous sequence complementary to the editing target sequence on the target strand of the target NCF1 gene) comprises a mutation compared to a reference gene, e.g., a wild type NCF1 gene. In some embodiments, the mutation is associated with CGD. In some embodiments, the newly synthesized single stranded DNA encoded by the editing target sequence replaces the editing target sequence, and corrects the mutation in the editing target sequence of the target NCF1 gene.

[0251] In some embodiments, the editing target sequence comprises a mutation in exon 1, exon 2, exon 3, exon 4, exon 5, exon 6, exon 7, exon 8, exon 9, exon 10, exon 11 of the NCF1 gene, as compared to a wild type NCF1 gene. In some embodiments, the editing target sequence comprises a mutation at an exon/intron junction of the NCF1 gene as compared to a wild type NCF1 gene.

[0252] Unless otherwise indicated, references to nucleotide positions in human chromosomes are as set forth in human genome assembly consortium Human build 38 (GRCh38), GenBank accession GCF_000001405.38.

[0253] In some embodiments, the editing target sequence is between positions 73220539-75172098 of human chromosome 7. In some embodiments, the editing target sequence is between positions 74777218-74777418 of human chromosome 7. In some embodiments, the editing target sequence is between positions 74778985-74779285 of human chromosome 7. In some embodiments, the editing target sequence is between positions 74779058-74779258 of human chromosome 7. In some embodiments, the editing target sequence is between positions 74779174-74779374 of human chromosome 7. In some embodiments, the editing target sequence is between positions 74779195-74779395 of human chromosome 7. In some embodiments, the editing target sequence is between positions 74779196-74779396 of human chromosome 7. In some embodiments, the editing target sequence is between positions 74779198-74779398 of human chromosome 7. In some embodiments, the editing target sequence is between positions 74779219-74779419 of human chromosome 7. In some embodiments, the editing target sequence is between positions 74779222-74779422 of human chromosome 7. In some embodiments, the editing target sequence is between positions 74779255-74779455 of human chromosome 7. In some embodiments, the editing target sequence is between positions 74779260-74779460 of human chromosome 7. In some embodiments, the editing target sequence is between positions 74779258-74779458 of human chromosome 7. In some embodiments, the editing target sequence is between positions 74779274-74779474 of human chromosome 7. In some embodiments, the editing target sequence is between positions 74779280-74779480 of human chromosome 7. In some embodiments, the editing target sequence is between positions 74780687-74780887 of human chromosome 7. In some embodiments, the editing target sequence is between positions 74780730-74780930 of human chromosome 7. In some embodiments, the editing target sequence is between positions 74782961-74783161 of human chromosome 7. In some embodiments, the editing target sequence is between positions 74782928-74783128 of human chromosome 7. In some embodiments, the editing target sequence is between positions 74783429-74783629 of human chromosome 7. In some embodiments, the editing target sequence is between positions 74783431-74783631 of human chromosome 7. In some embodiments, the editing target sequence is between positions 74783454-74783654 of human chromosome 7. In some embodiments, the editing target sequence is between positions 74783462-74783662 of human chromosome 7. In some embodiments, the editing target sequence is between positions 74783528-74783728 of human chromosome 7. In some embodiments, the editing target sequence is between positions 74785129-74785329 of human chromosome 7. In some embodiments, the editing target sequence is between positions 74785183-74785383 of human chromosome 7. In some embodiments, the editing target sequence is between positions 74785188-74785388 of human chromosome 7. In some embodiments, the editing target sequence is between positions 74785133-74785333 of human chromosome 7. In some embodiments, the editing target sequence is between positions 74787894-74788094 of human chromosome 7. In some embodiments, the editing target sequence is between positions 74787921-74788121 of human chromosome 7. In some embodiments, the editing target sequence is between positions 74788476-74788676 of human chromosome 7. In some embodiments, the editing target sequence is between positions 74774004-74774204 of human chromosome 7. In some embodiments, the editing target sequence is between positions 74774006-74774206 of human chromosome 7. In some embodiments, the editing target sequence is between positions 74777248-74777448 of human chromosome 7. In some embodiments, the editing target sequence is between positions 74777252-74777452 of human chromosome 7. In some embodiments, the editing target sequence is between positions 74782962-74783162 of human chromosome 7. In some embodiments, the editing target sequence is between positions 74783533-74783733 of human chromosome 7.

[0254] In some embodiments, the editing target sequence comprises a mutation that is located on exon 2 of the NCF1 gene as compared to a wild type NCF1 gene. In some embodiments, the editing target sequence comprises a mutation that is located between positions 74774011-74789315 of human chromosome 7. In some embodiments, the editing target sequence comprises a mutation that is located between positions 74777167-74777368 of human chromosome 7 as compared to a wild type NCF1 gene. In some embodiments, the editing target sequence is located between positions corresponding to 74777167-74777368 of human chromosome 7. In some embodiments, the editing target sequence comprises a mutation that is located at positions 74777267-74777268 of human chromosome 7 as compared to a wild type NCF1 gene. In some embodiments, the editing target sequence (or a complementary sequence in the target NCF1 gene) comprises a mutation that is located at positions 74777269-74777270 of human chromosome 7 as compared to a wild type NCF1 gene. In some embodiments, the mutation is a c. 73_74GT (ΔGT) mutation, resulting in the deletion of a 2-nucleotide sequence located at positions 74777267-74777268 as compared to a wild type NCF1 gene. In some embodiments, the editing target sequence (or a complementary sequence in the target NCF1 gene) comprises a mutation that encodes a R42Q amino acid substitution in a p47phox polypeptide as compared to a wild type p47phox polypeptide as set forth in SEQ ID No: 34422.

[0255] Wild Type p47phox Protein Sequence

(SEQ ID NO: 34422)
MGDTFIRHIALLGFEKRFVPSQHYVYMFLVKWQDLSEKVVYRRFTEIYE
FHKTLKEMFPIEAGAINPENRIIPHLPAPKWFDGQRAAENRQGTLTEYC
STLMSLPTKISRCPHLLDFFKVRPDDLKLPTDNQTKKPETYLMPKDGKS
TATDITGPIILQTYRAIANYEKTSGSEMALSTGDVVEVVEKSESGWWFC
QMKAKRGWIPASFLEPLDSPDETEDPEPNYAGEPYVAIKAYTAVEGDEV
SLLEGEAVEVIHKLLDGWWVIRKDDVTGYFPSMYLQKSGQDVSQAQRQI
KRGAPPRRSSIRNAHSIHQRSRKRLSQDAYRRNSVRFLQQRRRQARPGP
QSPGSPLEEERQTQRSKPQPAVPPRPSADLILNRCSESTKRKLASAV.

[0256] The p47phox protein may be encoded by a wildtype NCF1 genomic sequence: NG_009078.2.

[0257] In some embodiments, the editing target sequence (or a complementary sequence in the target NCF1 gene) comprises a G→A nucleotide substitution (c.125 G→A) at position 74777319 of human chromosome 7 as compared to a wild type NCF1 gene. In some embodiments, the editing target sequence (or a complementary sequence in the target NCF1 gene) comprises a mutation that encodes a R42W amino acid substitution in a p47phox polypeptide as compared to a wild type p47phox polypeptide as set forth in SEQ ID No: 34422. In some embodiments, the editing target sequence (or a complementary sequence in the target NCF1 gene) comprises a C→T nucleotide substitution (c.124 C→T) at position 74777318 of human chromosome 7 as compared to a wild type NCF1 gene.

[0258] Accordingly, in some embodiments, the editing template of a PEgRNA encodes the newly synthesized single stranded DNA that replaces the editing target sequence, thereby correcting the mutation in the target NCF1 gene. In some embodiments, one or more intended nucleotide edits in the newly synthesized single stranded DNA is incorporated in the target NCF1 gene, thereby correcting the mutation in the target NCF1 gene. In some embodiments, the editing template of the PEgRNA or the newly synthesized single stranded DNA comprises a two-nucleotide insertion as compared to the editing target sequence. The c.73_74 delGT mutation is a deletion of “GT” from a “GTGT” sequence, which are the first 4 nucleotides of exon 2 of wild type NCF1 (positions 74777267-74777270 of human chromosome 7, GRch 38). The mutation shifts the reading frame and thus abolishes expression of the p47 protein. Because inserting a GT either upstream or downstream of another GT results in the same “GTGT” sequence, the two-nucleotide insert can be considered at the position of the second “GT” in “GTGT”. Accordingly, the editing template maybe designed to contain a GT insertion (or a reverse complement thereof) that corresponds to the wildtype NCF1 sequence, or may contain s TT, AT, or CT insertion (or a reverse complement thereof) that restores the wildtype reading frame and does not alter the amino acid sequence encoded. In some embodiments, the editing template of the PEgRNA or the newly synthesized single stranded DNA comprises a two nucleotide GT insertion as compared to the editing target sequence (or a complementary sequence in the target NCF1 gene). In some embodiments, the editing template of the PEgRNA or the newly synthesized single stranded DNA comprises a two nucleotide GT insertion as compared to the editing target sequence (or a complementary sequence in the target NCF1 gene) corresponding to positions 74777267-74777268 (also referred to as insertion at position 74777267) of human chromosome 7. In some embodiments, the editing template of the PEgRNA or the newly synthesized single stranded DNA comprises a two nucleotide GT insertion as compared to the editing target sequence (or a complementary sequence in the target NCF1 gene) corresponding to positions 74777269-74777270 of human chromosome 7. In some embodiments, the editing template of the PEgRNA or the newly synthesized single stranded DNA comprises a two nucleotide TT insertion as compared to the editing target sequence corresponding to positions 74777269-74777270 of human chromosome 7. In some embodiments, the editing template of the PEgRNA or the newly synthesized single stranded DNA comprises a two nucleotide AT insertion as compared to the editing target sequence (or a complementary sequence in the target NCF1 gene) corresponding to positions 74777269-74777270 of human chromosome 7. In some embodiments, the editing template of the PEgRNA or the newly synthesized single stranded DNA comprises a two nucleotide CT insertion as compared to the editing target sequence (or a complementary sequence in the target NCF1 gene) corresponding to positions 74777269-74777270 of human chromosome 7. In some embodiments, the editing template of the PEgRNA or the newly synthesized single stranded DNA comprises a A→G nucleotide substitution as compared to the editing target sequence (or a complementary sequence in the target NCF1 gene) at a position corresponding to position 74777319 of human chromosome 7. In some embodiments, the editing template of the PEgRNA or the newly synthesized single stranded DNA comprises a T→C nucleotide substitution as compared to the editing target sequence (or a complementary sequence in the target NCF1 gene) at a position corresponding to position 74777318 of human chromosome 7. In some embodiments, the editing template of the PEgRNA or the newly synthesized single stranded DNA comprises a A→G nucleotide substitution at a position corresponding to position 74777319, a T→C nucleotide substitution at a position corresponding to position 74777318, a GT two-nucleotide insertion at positions corresponding to positions 74777267-74777268, and/or a GT, AT, CT, or TT two-nucleotide insertion at corresponding to positions 74777269-74777270 of human chromosome 7 as compared to the editing target sequence (or a complementary sequence in the target NCF1 gene).

[0259] In some embodiments, the editing target sequence comprises a mutation that is located in exon 3 of the NCF1 gene as compared to a wild type NCF1 gene. In some embodiments, the editing target sequence (or a complementary sequence in the target NCF1 gene) comprises a mutation that encodes a T53A amino acid substitution in a p47phox polypeptide as compared to a wild type p47phox polypeptide as set forth in SEQ ID No: 34422. In some embodiments, the editing target sequence (or a complementary sequence in the target NCF1 gene) comprises a A→G nucleotide substitution (c.157 A→G) at position 74779085 of human chromosome 7 as compared to a wild type NCF1 gene. In some embodiments, the editing target sequence comprises a deletion of a nucleotide G (c.229_1delG) at a position corresponding to position 74779158 of human chromosome 7.

[0260] Accordingly, in some embodiments, one or more intended nucleotide edits in the newly synthesized single stranded DNA is incorporated in the target NCF1 gene, thereby correcting the mutation in the target NCF1 gene. In some embodiments, the editing template of the PEgRNA or the newly synthesized single stranded DNA comprises a G→A nucleotide substitution compared to the editing target sequence (or a complementary sequence in the target NCF1 gene) at a position corresponding to position 74779085 of human chromosome 7. In some embodiments, the editing template of the PEgRNA or the newly synthesized single stranded DNA comprises insertion of a guanine nucleotide compared to the editing target sequence (or a complementary sequence in the target NCF1 gene) at a position corresponding to position 74779158 of human chromosome 7.

[0261] In some embodiments, the editing target sequence comprises a mutation that is located in exon 4 of the NCF1 gene as compared to a wild type NCF1 gene. In some embodiments, the editing target sequence (or a complementary sequence in the target NCF1 gene) comprises a mutation that encodes a G83R amino acid substitution in a p47phox polypeptide as compared to a wild type p47phox polypeptide as set forth in SEQ ID No: 34422. In some embodiments, the editing target sequence (or a complementary sequence in the target NCF1 gene) comprises a G→A nucleotide substitution (c.247 G→A) at position 74779274 of human chromosome 7 as compared to a wild type NCF1 gene. In some embodiments, the editing target sequence (or a complementary sequence in the target NCF1 gene) comprises a mutation that encodes a R90C amino acid substitution in a p47phox polypeptide as compared to a wild type p47phox polypeptide as set forth in SEQ ID No: 34422. In some embodiments, the editing target sequence (or a complementary sequence in the target NCF1 gene) comprises a C→T nucleotide substitution (c.268 C→T) at position 74779295 of human chromosome 7 as compared to a wild type NCF1 gene. In some embodiments, the editing target sequence (or a complementary sequence in the target NCF1 gene) comprises a mutation that encodes a R90H amino acid substitution in a p47phox polypeptide as compared to a wild type p47phox polypeptide as set forth in SEQ ID No: 34422. In some embodiments, the editing target sequence (or a complementary sequence in the target NCF1 gene) comprises a G→A nucleotide substitution (c.269 G→A) at position 74779296 of human chromosome 7 as compared to a wild type NCF1 gene. In some embodiments, the editing target sequence (or a complementary sequence in the target NCF1 gene) comprises a nonsense mutation that results in a Q90* amino acid alteration in a p47phox polypeptide as compared to a wild type p47phox polypeptide as set forth in SEQ ID No: 34422, wherein * refers to a premature stop codon. In some embodiments, the editing target sequence (or a complementary sequence in the target NCF1 gene) comprises a C→T nucleotide substitution (c.271 C→T) at position 74779298 of human chromosome 7 as compared to a wild type NCF1 gene. In some embodiments, the editing target sequence (or a complementary sequence in the target NCF1 gene) comprises a mutation that encodes a C98G amino acid substitution in a p47phox polypeptide as compared to a wild type p47phox polypeptide as set forth in SEQ ID No: 34422. In some embodiments, the editing target sequence (or a complementary sequence in the target NCF1 gene) comprises a T→G nucleotide substitution (c.292 T→G) at position 74779319 of human chromosome 7 as compared to a wild type NCF1 gene. In some embodiments, the editing target sequence (or a complementary sequence in the target NCF1 gene) comprises a mutation that encodes a S99G amino acid substitution in a p47phox polypeptide as compared to a wild type p47phox polypeptide as set forth in SEQ ID No: 34422. In some embodiments, the editing target sequence (or a complementary sequence in the target NCF1 gene) comprises a A→G nucleotide substitution (c.295 A→G) at position 74779322 of human chromosome 7 as compared to a wild type NCF1 gene. In some embodiments, the editing target sequence (or a complementary sequence in the target NCF1 gene) comprises a mutation that encodes a R110C amino acid substitution in a p47phox polypeptide as compared to a wild type p47phox polypeptide as set forth in SEQ ID No: 34422. In some embodiments, the editing target sequence comprises (or a complementary sequence in the target NCF1 gene) a C→T nucleotide substitution (c.328 C→T) at position 74779355 of human chromosome 7 as compared to a wild type NCF1 gene. In some embodiments, the editing target sequence (or a complementary sequence in the target NCF1 gene) comprises a nonsense mutation that results in a C111* amino acid alteration in a p47phox polypeptide as compared to a wild type p47phox polypeptide as set forth in SEQ ID No: 34422, wherein * refers to a premature stop codon. In some embodiments, the editing target sequence (or a complementary sequence in the target NCF1 gene) comprises a T→A nucleotide substitution (c.333 T→A) at position 74779360 of human chromosome 7 as compared to a wild type NCF1 gene. In some embodiments, the editing target sequence (or a complementary sequence in the target NCF1 gene) comprises deletion of nucleotides TGTCCCCAC (c.331_339delTGTCCCCAC) at position 74779358 of human chromosome 7 as compared to a wild type NCF1 gene. In some embodiments, the editing target sequence (or a complementary sequence in the target NCF1 gene) comprises a deletion of nucleotide adenine (c.347delA) at position 74779374 of human chromosome 7 as compared to a wild type NCF1 gene. In some embodiments, the editing target sequence (or a complementary sequence in the target NCF1 gene) comprises a deletion of nucleotides TC and insertion of nucleotides AA (c.353_354delTCinsAA) at a position 74779380 of human chromosome 7 as compared to a wild type NCF1 gene.

[0262] Accordingly, in some embodiments, one or more intended nucleotide edits in the newly synthesized single stranded DNA is incorporated in the target NCF1 gene, thereby correcting the mutation in the target NCF1 gene. In some embodiments, the editing template of the PEgRNA or the newly synthesized single stranded DNA comprises a A→G nucleotide substitution compared to the editing target sequence (or a complementary sequence in the target NCF1 gene) at a position corresponding to position 74779274 of human chromosome 7. In some embodiments, the editing template of the PEgRNA or the newly synthesized single stranded DNA comprises a T→C nucleotide substitution compared to the editing target sequence (or a complementary sequence in the target NCF1 gene) at a position corresponding to position 74779295 of human chromosome 7. In some embodiments, the editing template of the PEgRNA or the newly synthesized single stranded DNA comprises a A→G nucleotide substitution compared to the editing target sequence (or a complementary sequence in the target NCF1 gene) at a position corresponding to position 74779296 of human chromosome 7. In some embodiments, the editing template of the PEgRNA or the newly synthesized single stranded DNA comprises a T→C nucleotide substitution compared to the editing target sequence (or a complementary sequence in the target NCF1 gene) at a position corresponding to position 74779298 of human chromosome 7. In some embodiments, the editing template of the PEgRNA or the newly synthesized single stranded DNA comprises a G→T nucleotide substitution compared to the editing target sequence (or a complementary sequence in the target NCF1 gene) at a position corresponding to position 74779319 of human chromosome 7. In some embodiments, the editing template of the PEgRNA or the newly synthesized single stranded DNA comprises a G→A nucleotide substitution compared to the editing target sequence (or a complementary sequence in the target NCF1 gene) at a position corresponding to position 74779322 of human chromosome 7. In some embodiments, the editing template of the PEgRNA or the newly synthesized single stranded DNA comprises a T→C nucleotide substitution compared to the editing target sequence (or a complementary sequence in the target NCF1 gene) at a position corresponding to position 74779355 of human chromosome 7. In some embodiments, the editing template of the PEgRNA or the newly synthesized single stranded DNA comprises a A→T nucleotide substitution compared to the editing target sequence (or a complementary sequence in the target NCF1 gene) at a position corresponding to position 74779360 of human chromosome 7. In some embodiments, the editing template of the PEgRNA or the newly synthesized single stranded DNA comprises an insertion of nucleotides TGTCCCCAC compared to the editing target sequence (or a complementary sequence in the target NCF1 gene) at a position corresponding to position 74779358 of human chromosome 7. In some embodiments, the editing template of the PEgRNA or the newly synthesized single stranded DNA comprises an insertion of an adenine nucleotide compared to the editing target sequence (or a complementary sequence in the target NCF1 gene) at a position corresponding to position 74779374 of human chromosome 7. In some embodiments, the editing template of the PEgRNA or the newly synthesized single stranded DNA comprises a substitution of nucleotides AA with nucleotides TC compared to the editing target sequence (or a complementary sequence in the target NCF1 gene) at a position 74779380 of human chromosome 7. In some embodiments, the editing template of the PEgRNA or the newly synthesized single stranded DNA comprises a A→G nucleotide substitution at a position corresponding to position 74779274, a T→C nucleotide substitution at a position corresponding to position 74779295, a A→G nucleotide substitution at a position corresponding to position 74779296, a T→C nucleotide substitution at a position corresponding to position 74779298, a G→T nucleotide substitution at a position corresponding to position 74779319, a G→A nucleotide substitution at a position corresponding to position 74779322, a T→C nucleotide substitution at a position corresponding to position 74779355, a A→T nucleotide substitution at a position corresponding to position 74779360, an insertion of nucleotides TGTCCCCAC at a position corresponding to position 74779358, an insertion of an adenine nucleotide at a position corresponding to position 74779374, and/or a substitution of nucleotides AA with nucleotides TC c at a position 74779380 human chromosome 7 compared to the editing target sequence (or a complementary sequence in the target NCF1 gene).

[0263] In some embodiments, the editing target sequence comprises a mutation that is located in exon 5 of the NCF1 gene as compared to a wild type NCF1 gene. In some embodiments, the editing target sequence (or a complementary sequence in the target NCF1 gene) comprises a mutation that encodes a K135E amino acid substitution in a p47phox polypeptide as compared to a wild type p47phox polypeptide as set forth in SEQ ID No: 34422. In some embodiments, the editing target sequence (or a complementary sequence in the target NCF1 gene) comprises a A→G nucleotide substitution (c.403 A→G) at position 74780787 of human chromosome 7 as compared to a wild type NCF1 gene. In some embodiments, the editing target sequence (or a complementary sequence in the target NCF1 gene) comprises a mutation that encodes a A149E amino acid substitution in a p47phox polypeptide as compared to a wild type p47phox polypeptide as set forth in SEQ ID No: 34422. In some embodiments, the editing target sequence (or a complementary sequence in the target NCF1 gene) comprises a C→A nucleotide substitution (c.446 C→A) at position 74780830 of human chromosome 77 as compared to a wild type NCF1 gene.

[0264] Accordingly, in some embodiments, one or more intended nucleotide edits in the newly synthesized single stranded DNA is incorporated in the target NCF1 gene, thereby correcting the mutation in the target NCF1 gene. In some embodiments, the editing template of the PEgRNA or the newly synthesized single stranded DNA comprises a G→A nucleotide substitution compared to the editing target sequence (or a complementary sequence in the target NCF1 gene) at a position corresponding to position 74780787 of human chromosome 7. In some embodiments, the editing template of the PEgRNA or the newly synthesized single stranded DNA comprises a A→C nucleotide substitution compared to the editing target sequence (or a complementary sequence in the target NCF1 gene) at a position corresponding to position 74780830 of human chromosome 7. In some embodiments, the editing template of the PEgRNA or the newly synthesized single stranded DNA comprises a A→C nucleotide substitution at a position corresponding to position 74780830 and/or a G→A nucleotide substitution at a position corresponding to position 74780787 of human chromosome 7 compared to the editing target sequence (or a complementary sequence in the target NCF1 gene).

[0265] In some embodiments, the editing target sequence comprises a mutation that is located in exon 6 of the NCF1 gene as compared to a wild type NCF1 gene. In some embodiments, the editing target sequence (or a complementary sequence in the target NCF1 gene) comprises a mutation that encodes a G192S amino acid substitution in a p47phox polypeptide as compared to a wild type p47phox polypeptide as set forth in SEQ ID No: 34422. In some embodiments, the editing target sequence (or a complementary sequence in the target NCF1 gene) comprises a G→A nucleotide substitution (c.574 G→A) at position 74783061 of human chromosome 7 as compared to a wild type NCF1 gene. In some embodiments, the editing target sequence (or a complementary sequence in the target NCF1 gene) comprises a deletion of a guanine nucleotide (c.541 delG) at position 74783028 of human chromosome 7 as compared to a wild type NCF1 gene. In some embodiments, the editing target sequence (or a complementary sequence in the target NCF1 gene) comprises a deletion of a guanine nucleotide (c.502 delG) at position 74782989 of human chromosome 7 as compared to a wild type NCF1 gene.

[0266] Accordingly, in some embodiments, one or more intended nucleotide edits in the newly synthesized single stranded DNA is incorporated in the target NCF1 gene, thereby correcting the mutation in the target NCF1 gene. In some embodiments, the editing template of the PEgRNA or the newly synthesized single stranded DNA comprises a A→G nucleotide substitution compared to the editing target sequence (or a complementary sequence in the target NCF1 gene) at a position corresponding to position 74783061 of human chromosome 7. In some embodiments, the editing template of the PEgRNA or the newly synthesized single stranded DNA comprises an insertion of a guanine nucleotide compared to the editing target sequence (or a complementary sequence in the target NCF1 gene) at a position corresponding to position 74783028 of human chromosome 7. In some embodiments, the editing template of the PEgRNA or the newly synthesized single stranded DNA comprises an insertion of a guanine nucleotide compared to the editing target sequence (or a complementary sequence in the target NCF1 gene) at a position corresponding to position 74782989 of human chromosome 7. In some embodiments, the editing template of the PEgRNA or the newly synthesized single stranded DNA comprises an insertion of a guanine nucleotide at a position corresponding to position 74783028, an insertion of a guanine nucleotide at a position corresponding to position 74782989, and/or an A→G nucleotide substitution at a position corresponding to position 74783061 of human chromosome 7 compared to the editing target sequence (or a complementary sequence in the target NCF1 gene).

[0267] In some embodiments, the editing target sequence comprises a mutation that is located in exon 7 of the NCF1 gene as compared to a wild type NCF1 gene. In some embodiments, the editing target sequence (or a complementary sequence in the target NCF1 gene) comprises a mutation that results in a W193* amino acid substitution in a p47phox polypeptide as compared to a wild type p47phox polypeptide as set forth in SEQ ID No: 34422, wherein * refers to a premature stop codon. In some embodiments, the editing target sequence (or a complementary sequence in the target NCF1 gene) comprises a G→A nucleotide substitution (c.579 G→A) at position 74783529 of human chromosome 7 as compared to a wild type NCF1 gene. In some embodiments, the editing target sequence (or a complementary sequence in the target NCF1 gene) comprises a mutation that results in a W194* amino acid substitution in a p47phox polypeptide as compared to a wild type p47phox polypeptide as set forth in SEQ ID No: 34422, wherein * refers to a premature stop codon. In some embodiments, the editing target sequence (or a complementary sequence in the target NCF1 gene) comprises a G→A nucleotide substitution (c.581 G→A) at position 74783531 of human chromosome 7 as compared to a wild type NCF1 gene. In some embodiments, the editing target sequence (or a complementary sequence in the target NCF1 gene) comprises a mutation that results in a R202* amino acid substitution in a p47phox polypeptide as compared to a wild type p47phox polypeptide as set forth in SEQ ID No: 34422, wherein * refers to a premature stop codon. In some embodiments, the editing target sequence (or a complementary sequence in the target NCF1 gene) comprises a C→T nucleotide substitution (c.604 C→T) at position 74783554 of human chromosome 7 as compared to a wild type NCF1 gene. In some embodiments, the editing target sequence (or a complementary sequence in the target NCF1 gene) comprises a mutation that results in a W204* amino acid substitution in a p47phox polypeptide as compared to a wild type p47phox polypeptide as set forth in SEQ ID No: 34422, wherein * refers to a premature stop codon. In some embodiments, the editing target sequence (or a complementary sequence in the target NCF1 gene) comprises a G→A nucleotide substitution (c.612 G→A) at position 74783562 of human chromosome 7 as compared to a wild type NCF1 gene. In some embodiments, the editing target sequence (or a complementary sequence in the target NCF1 gene) comprises a mutation that results in a Y226* amino acid substitution in a p47phox polypeptide as compared to a wild type p47phox polypeptide as set forth in SEQ ID No: 34422, wherein * refers to a premature stop codon. In some embodiments, the editing target sequence (or a complementary sequence in the target NCF1 gene) comprises a T→G nucleotide substitution (c.678 T→G) at position 74783628 of human chromosome 7 as compared to a wild type NCF1 gene.

[0268] Accordingly, in some embodiments, one or more intended nucleotide edits in the newly synthesized single stranded DNA is incorporated in the target NCF1 gene, thereby correcting the mutation in the target NCF1 gene. In some embodiments, the editing template of the PEgRNA or the newly synthesized single stranded DNA comprises a A→G nucleotide substitution compared to the editing target sequence (or a complementary sequence in the target NCF1 gene) at a position corresponding to position 74783529 of human chromosome 7. In some embodiments, the editing template of the PEgRNA or the newly synthesized single stranded DNA comprises a A→G nucleotide substitution compared to the editing target sequence (or a complementary sequence in the target NCF1 gene) at a position corresponding to position 74783531 of human chromosome 7. In some embodiments, the editing template of the PEgRNA or the newly synthesized single stranded DNA comprises a T→C nucleotide substitution compared to the editing target sequence (or a complementary sequence in the target NCF1 gene) at a position corresponding to position 74783554 of human chromosome 7. In some embodiments, the editing template of the PEgRNA or the newly synthesized single stranded DNA comprises a A→G nucleotide substitution compared to the editing target sequence (or a complementary sequence in the target NCF1 gene) at a position corresponding to position 74783562 of human chromosome 7. In some embodiments, the editing template of the PEgRNA or the newly synthesized single stranded DNA comprises a G→T nucleotide substitution compared to the editing target sequence (or a complementary sequence in the target NCF1 gene) at a position corresponding to position 74783628 of human chromosome 7. In some embodiments, the editing template of the PEgRNA or the newly synthesized single stranded DNA comprises a A→G nucleotide substitution at a position corresponding to position 74783529, a A→G nucleotide substitution at a position corresponding to position 74783531, a T→C nucleotide substitution at a position corresponding to position 74783554, a A→G nucleotide substitution at a position corresponding to position 74783562, and/or a G→T nucleotide substitution at a position corresponding to position 74783628 of human chromosome 7 compared to the editing target sequence (or a complementary sequence in the target NCF1 gene).

[0269] In some embodiments, the editing target sequence comprises a mutation that is located in exon 8 of the NCF1 gene as compared to a wild type NCF1 gene. In some embodiments, the editing target sequence (or a complementary sequence in the target NCF1 gene) comprises a mutation that encodes a E224K amino acid substitution in a p47phox polypeptide as compared to a wild type p47phox polypeptide as set forth in SEQ ID No: 34422. In some embodiments, the editing target sequence (or a complementary sequence in the target NCF1 gene) comprises a G→A nucleotide substitution (c.730 G→A) at position 74785229 of human chromosome 7 as compared to a wild type NCF1 gene. In some embodiments, the editing target sequence (or a complementary sequence in the target NCF1 gene) comprises a mutation that encodes a G262S amino acid substitution in a p47phox polypeptide as compared to a wild type p47phox polypeptide as set forth in SEQ ID No: 34422. In some embodiments, the editing target sequence (or a complementary sequence in the target NCF1 gene) comprises a G→A nucleotide substitution (c.784 G→A) at position 74785283 of human chromosome 7 as compared to a wild type NCF1 gene. In some embodiments, the editing target sequence (or a complementary sequence in the target NCF1 gene) comprises a mutation that encodes a W263C amino acid substitution in a p47phox polypeptide as compared to a wild type p47phox polypeptide as set forth in SEQ ID No: 34422. In some embodiments, the editing target sequence (or a complementary sequence in the target NCF1 gene) comprises a G→C nucleotide substitution (c.784 G→C) at position 74785288 of human chromosome 7 as compared to a wild type NCF1 gene. In some embodiments, the editing target sequence (or a complementary sequence in the target NCF1 gene) comprises a deletion of nucleotides TGTCCCTGCTCGAGG (c.734_748delTGTCCCTGCTCGAGG) at position 74785233 of human chromosome 7 as compared to a wild type NCF1 gene.

[0270] In some embodiments, the editing template of the PEgRNA or the newly synthesized single stranded DNA comprises a A→G nucleotide substitution compared to the editing target sequence (or a complementary sequence in the target NCF1 gene) at a position corresponding to position 74785229 of human chromosome 7. In some embodiments, the editing template of the PEgRNA or the newly synthesized single stranded DNA comprises a A→G nucleotide substitution compared to the editing target sequence (or a complementary sequence in the target NCF1 gene) at a position corresponding to position 74785283 of human chromosome 7. In some embodiments, the editing template of the PEgRNA or the newly synthesized single stranded DNA comprises a C4G nucleotide substitution compared to the editing target sequence (or a complementary sequence in the target NCF1 gene) at a position corresponding to position 74785288 of human chromosome 7. In some embodiments, the editing template of the PEgRNA or the newly synthesized single stranded DNA comprises an insertion of nucleotides TGTCCCTGCTCGAGG compared to the editing target sequence (or a complementary sequence in the target NCF1 gene) at position 74785233 of human chromosome 7. In some embodiments, the editing template of the PEgRNA or the newly synthesized single stranded DNA comprises an A→G nucleotide substitution at a position corresponding to position 74785229, an A→G nucleotide substitution at a position corresponding to position 74785283, a C4G nucleotide substitution at a position corresponding to position 74785288, and/or an insertion of nucleotides TGTCCCTGCTCGAGG at position 74785233 of human chromosome 7 compared to the editing target sequence (or a complementary sequence in the target NCF1 gene).

[0271] In some embodiments, the editing target sequence comprises a mutation that is located in exon 9 of the NCF1 gene as compared to a wild type NCF1 gene. In some embodiments, the editing target sequence (or a complementary sequence in the target NCF1 gene) comprises a deletion of nucleotide guanine (c.811 delG) at position 74787994 of human chromosome 7 as compared to a wild type NCF1 gene. In some embodiments, the editing target sequence (or a complementary sequence in the target NCF1 gene) comprises a deletion of nucleotide cytidine (c.838delC) at position 74788021 of human chromosome 7 as compared to a wild type NCF1 gene.

[0272] Accordingly, in some embodiments, the editing template of the PEgRNA or the newly synthesized single stranded DNA comprises an insertion of a nucleotide guanine compared to the editing target sequence (or a complementary sequence in the target NCF1 gene) at a position corresponding to position 74787994 of human chromosome 7. In some embodiments, the editing template of the PEgRNA or the newly synthesized single stranded DNA comprises an insertion of a nucleotide cytidine compared to the editing target sequence (or a complementary sequence in the target NCF1 gene) at a position corresponding to position 74788021 of human chromosome 7. In some embodiments, the editing template of the PEgRNA or the newly synthesized single stranded DNA comprises an insertion of a nucleotide guanine at a position corresponding to position 74787994 and/or an insertion of a nucleotide cytidine at a position corresponding to position 74788021 of human chromosome 7 compared to the editing target sequence (or a complementary sequence in the target NCF1 gene).

[0273] In some embodiments, the editing target sequence comprises a mutation that is located in exon 10 of the NCF1 gene as compared to a wild type NCF1 gene. In some embodiments, the editing target sequence (or a complementary sequence in the target NCF1 gene) comprises a mutation that encodes a A308V amino acid substitution in a p47phox polypeptide as compared to a wild type p47phox polypeptide as set forth in SEQ ID No: 34422. In some embodiments, the editing target sequence (or a complementary sequence in the target NCF1 gene) comprises a C→T nucleotide substitution (c.923 C→T) at position 74788576 of human chromosome 7 as compared to a wild type NCF1 gene. Accordingly, in some embodiments, the editing template of the PEgRNA or the newly synthesized single stranded DNA comprises a T→C nucleotide substitution at position 74788576 of human chromosome 7 compared to the editing target sequence (or a complementary sequence in the target NCF1 gene).

[0274] In some embodiments, the editing target sequence comprises a mutation in a non-coding region of the target NCF1 gene compared to a wild type NCF1 gene. In some embodiments, the editing target sequence comprises a mutation in an intron of the target NCF1 gene compared to a wild type NCF1 gene.

[0275] In some embodiments, the editing target sequence comprises a mutation that is at a splice site of the target NCF1 gene compared to a wild type NCF1 gene. In some embodiments, the editing target sequence comprises a mutation that is at an intron/exon junction of the target NCF1 gene compared to a wild type NCF1 gene. In some embodiments, the editing target sequence (or a complementary sequence in the target NCF1 gene) comprises a mutation at the junction of the exon 1 and the intron 1 of the target NCF1 gene compared to a wild type NCF1 gene. In some embodiments, the editing target sequence (or a complementary sequence in the target NCF1 gene) comprises a mutation at the junction of intron 1 and the exon 2 of the target NCF1 gene compared to a wild type NCF1 gene. In some embodiments, the editing target sequence (or a complementary sequence in the target NCF1 gene) comprises a mutation at the junction of exon 2 and intron 2 of the target NCF1 gene compared to a wild type NCF1 gene. In some embodiments, the editing target sequence (or a complementary sequence in the target NCF1 gene) comprises a mutation at the junction of intron 2 and exon 3 of the target NCF1 gene compared to a wild type NCF1 gene. In some embodiments, the editing target sequence (or a complementary sequence in the target NCF1 gene) comprises a mutation at the junction of exon 3 and intron 3 of the target NCF1 gene compared to a wild type NCF1 gene. In some embodiments, the editing target sequence (or a complementary sequence in the target NCF1 gene) comprises a mutation at the junction of intron 3 and exon 4 of the target NCF1 gene compared to a wild type NCF1 gene. In some embodiments, the editing target sequence (or a complementary sequence in the target NCF1 gene) comprises a mutation at the junction of exon 4 and intron 4 of the target NCF1 gene compared to a wild type NCF1 gene. In some embodiments, the editing target sequence (or a complementary sequence in the target NCF1 gene) comprises a mutation at the junction of intron 4 and exon 5 of the target NCF1 gene compared to a wild type NCF1 gene. In some embodiments, the editing target sequence (or a complementary sequence in the target NCF1 gene) comprises a mutation at the junction of exon 5 and intron 5 of the target NCF1 gene compared to a wild type NCF1 gene. In some embodiments, the editing target sequence (or a complementary sequence in the target NCF1 gene) comprises a mutation at the junction of intron 5 and exon 6 of the target NCF1 gene compared to a wild type NCF1 gene. In some embodiments, the editing target sequence (or a complementary sequence in the target NCF1 gene) comprises a mutation at the junction of exon 6 and intron 6 of the target NCF1 gene compared to a wild type NCF1 gene. In some embodiments, the editing target sequence (or a complementary sequence in the target NCF1 gene) comprises a mutation at the junction of intron 6 and exon 7 of the target NCF1 gene compared to a wild type NCF1 gene. In some embodiments, the editing target sequence (or a complementary sequence in the target NCF1 gene) comprises a mutation at the junction of exon 7 and intron 7 of the target NCF1 gene compared to a wild type NCF1 gene. In some embodiments, the editing target sequence (or a complementary sequence in the target NCF1 gene) comprises a mutation at the junction of intron 7 and exon 8 of the target NCF1 gene compared to a wild type NCF1 gene. In some embodiments, the editing target sequence (or a complementary sequence in the target NCF1 gene) comprises a mutation at the junction of exon 8 and intron 8 of the target NCF1 gene compared to a wild type NCF1 gene. In some embodiments, the editing target sequence (or a complementary sequence in the target NCF1 gene) comprises a mutation at the junction of intron 8 and exon 9 of the target NCF1 gene compared to a wild type NCF1 gene. In some embodiments, the editing target sequence (or a complementary sequence in the target NCF1 gene) comprises a mutation at the junction of exon 9 and intron 9 of the target NCF1 gene compared to a wild type NCF1 gene. In some embodiments, the editing target sequence (or a complementary sequence in the target NCF1 gene) comprises a mutation at the junction of intron 9 and exon 10 of the target NCF1 gene compared to a wild type NCF1 gene. In some embodiments, the editing target sequence (or a complementary sequence in the target NCF1 gene) comprises a mutation at the junction of exon 10 and intron 10 of the target NCF1 gene compared to a wild type NCF1 gene. In some embodiments, the editing target sequence (or a complementary sequence in the target NCF1 gene) comprises a mutation at the junction of intron 10 and exon 11 of the target NCF1 gene compared to a wild type NCF1 gene. In some embodiments, the editing target sequence (or a complementary sequence in the target NCF1 gene) comprises a G→A nucleotide substitution at a position corresponding to position 74774104 (c.72+1 G→A) of human chromosome 7 as compared to a wild type NCF1 gene. In some embodiments, the editing target sequence (or a complementary sequence in the target NCF1 gene) comprises a G→T nucleotide substitution at a position corresponding to position 74774106 (c.72+3 G-*T) of human chromosome 7 as compared to a wild type NCF1 gene. In some embodiments, the editing target sequence (or a complementary sequence in the target NCF1 gene) comprises a G→A nucleotide substitution at a position corresponding to position 74777348 (c.153+1 G→A) of human chromosome 7 as compared to a wild type NCF1 gene. In some embodiments, the editing target sequence (or a complementary sequence in the target NCF1 gene) comprises a G→C nucleotide substitution at a position corresponding to position 74777352 (c.153+5 G→C) of human chromosome 7 as compared to a wild type NCF1 gene. In some embodiments, the editing target sequence (or a complementary sequence in the target NCF1 gene) comprises a G→A nucleotide substitution at a position corresponding to position 74783061 (c.574 G→A) of human chromosome 7 as compared to a wild type NCF1 gene. In some embodiments, the editing target sequence (or a complementary sequence in the target NCF1 gene) comprises a G→A nucleotide substitution at a position corresponding to position 74783062 (c.574+1 G→A) of human chromosome 7 as compared to a wild type NCF1 gene. In some embodiments, the editing target sequence (or a complementary sequence in the target NCF1 gene) comprises a G→A nucleotide substitution at a position corresponding to position 74783633 (c.682+1 G→A) of human chromosome 7 as compared to a wild type NCF1 gene. In some embodiments, the editing target sequence (or a complementary sequence in the target NCF1 gene) comprises a G→C nucleotide substitution at a position corresponding to position 74783633 (c.682+1 G→C) of human chromosome 7 as compared to a wild type NCF1 gene.

[0276] Accordingly, in some embodiments, one or more intended nucleotide edits in the newly synthesized single stranded DNA is incorporated in the target NCF1 gene, thereby correcting the mutation in the target NCF1 gene. In some embodiments, the editing template of the PEgRNA or the newly synthesized single stranded DNA comprises a A→G nucleotide substitution compared to the editing target sequence (or a complementary sequence in the target NCF1 gene) at a position corresponding to position 74774104 of human chromosome 7. In some embodiments, the editing template of the PEgRNA or the newly synthesized single stranded DNA comprises a T→G nucleotide substitution at a position corresponding to position 74774106 of human chromosome 7 as compared editing target sequence (or a complementary sequence in the target NCF1 gene). In some embodiments, the editing template of the PEgRNA or the newly synthesized single stranded DNA comprises a A→G nucleotide substitution at a position corresponding to position 74777348 compared to the editing target sequence (or a complementary sequence in the target NCF1 gene). In some embodiments, t the editing template of the PEgRNA or the newly synthesized single stranded DNA comprises a C→G nucleotide substitution at a position corresponding to position 74777352 of human chromosome 7 as compared to the editing target sequence (or a complementary sequence in the target NCF1 gene). In some embodiments, the editing template of the PEgRNA or the newly synthesized single stranded DNA comprises a A→G nucleotide substitution at a position corresponding to position 74783061 of human chromosome 7 compared to the editing target sequence (or a complementary sequence in the target NCF1 gene). In some embodiments, the editing template of the PEgRNA or the newly synthesized single stranded DNA comprises a A→G nucleotide substitution at a position corresponding to position 74783062 of human chromosome 7 as compared to the editing target sequence (or a complementary sequence in the target NCF1 gene). In some embodiments, the editing template of the PEgRNA or the newly synthesized single stranded DNA comprises a A→G nucleotide substitution at a position corresponding to position 74783633 of human chromosome 7 compared to the editing target sequence (or a complementary sequence in the target NCF1 gene). In some embodiments, the editing template of the PEgRNA or the newly synthesized single stranded DNA comprises a C→G nucleotide substitution at a position corresponding to position 74783633 of human chromosome 7 as compared to a wild type NCF1 gene.

[0277] In some embodiments, the editing target sequence is in a target NCF1B pseudogene or a target NCF1C pseudogene. In some embodiments, the newly synthesized DNA strand replaces the editing target sequence in a target NCF1B pseudogene or a target NCF1C pseudogene, wherein the editing target sequence (or the endogenous sequence complementary to the editing target sequence on the target strand of the target NCF1B pseudogene or the NCF1C pseudogene) comprises a nucleotide alteration, e.g., a deletion, as compared to a reference gene, e.g., a wild type NCF1 gene.

[0278] In some embodiments, the editing target sequence comprises a sequence in a pseudogene of NCF1, wherein the pseudogene is NCF1B. In some embodiments, the editing target sequence comprises a sequence in an exon of NCF1B. In some embodiments, the editing target sequence comprises a sequence in exon 2 of NCF1B. In some embodiments, the editing target sequence is located between positions 73220639-73235945 of human chromosome 7. In some embodiments, the editing target sequence is between positions corresponding to positions 73223778-73223979 of human chromosome 7. In some embodiments, the editing target sequence comprises nucleotides corresponding to positions 73223878-73223979 of human chromosome 7. In some embodiments, the editing target sequence in the NCF1B pseudogene comprises a two nucleotide GT deletion compared to a wild type NCF1 gene. Accordingly, in some embodiments, the editing template of a PEgRNA encodes the newly synthesized single stranded DNA that replaces the editing target sequence, thereby editing the target NCF1B pseudogene. NCF1B differs from wildtype NCF1 in that it lacks a “GT” of a “GTGT” sequence, which are the first 4 nucleotides of exon 2 of wild type NCF1 (positions 74777267-74777270 of human chromosome 7, GRch 38). Because inserting a GT either upstream or downstream of another GT results in the same “GTGT” sequence, the two-nucleotide insert can be considered at the position of the second “GT” in “GTGT”. Accordingly, the editing template maybe designed to contain a GT insertion (or a reverse complement thereof) that corresponds to the wildtype NCF1 sequence, or may contain s TT, AT, or CT insertion (or a reverse complement thereof) that restores the wildtype NCF1 reading frame and does not alter the amino acid sequence encoded by wildtype NCF1. In some embodiments, one or more intended nucleotide edits in the newly synthesized single stranded DNA is incorporated in the target NCF1 gene, thereby editing the target NCF1B gene to comprise a sequence of a wild type NCF1 gene. In some embodiments, the editing template of the PEgRNA or the newly synthesized single stranded DNA comprises a two-nucleotide insertion as compared to the editing target sequence. In some embodiments, the intended nucleotide edit comprises a two-nucleotide insertion at a position corresponding to position 73223878 in human chromosome 7 as compared to the region corresponding to the editing target sequence in the NCF1B pseudogene. In some embodiments, the editing template of the PEgRNA or the newly synthesized single stranded DNA comprises a two nucleotide GT insertion as compared to the editing target sequence (or a complementary sequence in the target NCF1B pseudogene). In some embodiments, the intended nucleotide edit comprises a two-nucleotide insertion at a position corresponding to position 73223880 in human chromosome 7 as compared to the region corresponding to the editing target sequence in the NCF1B pseudogene. In some embodiments, the editing template of the PEgRNA or the newly synthesized single stranded DNA comprises a two nucleotide TT, AT, or CT insertion as compared to the editing target sequence (or a complementary sequence in the target NCF1B pseudogene).

[0279] In some embodiments, the editing target sequence comprises a sequence in a pseudogene of NCF1, wherein the pseudogene is NCF1C. In some embodiments, the editing target sequence comprises a sequence in an exon of NCF1C. In some embodiments, the editing target sequence comprises a sequence in exon 2 of NCF1C. In some embodiments, the editing target sequence is located between positions 75156578-75171998 of human chromosome 7 as set forth in human genome assembly consortium Human build 38 (GRCh38), GenBank accession GCF 000001405.39. In some embodiments, the editing target sequence is located between positions 75168609-75168810 of human chromosome 7. In some embodiments, the editing target sequence comprises nucleotides corresponding to positions 75168709-75168710 of human chromosome 7. In some embodiments, the editing target sequence in the NCF1 pseudogene comprises a two nucleotide GT deletion compared to a wild type NCF1 gene. Accordingly, in some embodiments, the editing template of a PEgRNA encodes the newly synthesized single stranded DNA that is replaces the editing target sequence, thereby editing the target NCF1C pseudogene. NCF1C differs from wildtype NCF1 in that it lacks a “GT” of a “GTGT” sequence, which are the first 4 nucleotides of exon 2 of wild type NCF1 (positions 74777267-74777270 of human chromosome 7, GRch 38). Because inserting a GT either upstream or downstream of another GT results in the same “GTGT” sequence, the two-nucleotide insert can be considered at the position of the second “GT” in “GTGT”. Accordingly, the editing template maybe designed to contain a GT insertion (or a reverse complement thereof) that corresponds to the wildtype NCF1 sequence, or may contain s TT, AT, or CT insertion (or a reverse complement thereof) that restores the wildtype NCF1 reading frame and does not alter the amino acid sequence encoded by wildtype NCF1. In some embodiments, one or more intended nucleotide edits in the newly synthesized single stranded DNA is incorporated in the target NCF1 gene, thereby editing the target NCF1C gene to comprise a sequence of a wild type NCF1 gene. In some embodiments, the editing template of the PEgRNA or the newly synthesized single stranded DNA comprises a two nucleotide insertion as compared to the editing target sequence. In some embodiments, the intended nucleotide edit comprises a two nucleotide insertion at a position corresponding to position 75168710 in human chromosome 7 as compared to the region corresponding to the editing target sequence in the NCF1C pseudogene. In some embodiments, the editing template of the PEgRNA or the newly synthesized single stranded DNA comprises a two nucleotide GT insertion as compared to the editing target sequence (or a complementary sequence in the target NCF1C pseudogene). In some embodiments, the intended nucleotide edit comprises a two nucleotide insertion at a position corresponding to position 75168708 in human chromosome 7 as compared to the region corresponding to the editing target sequence in the NCF1C pseudogene. In some embodiments, the editing template of the PEgRNA or the newly synthesized single stranded DNA comprises a two nucleotide TT, AT, or CT insertion as compared to the editing target sequence (or a complementary sequence in the target NCF1C pseudogene).

[0280] In some embodiments, the editing template comprises one or more intended nucleotide edits compared to the sequence on the target strand of the target gene (e.g., an NCF1 gene, an NCF1B pseudogene, or an NCF1C pseudogene). In some embodiments, the editing template encodes a single stranded DNA that comprises one or more intended nucleotide edits compared to the editing target sequence. In some embodiments, the single stranded DNA replaces the editing target sequence by prime editing, thereby incorporating the one or more intended nucleotide edits.

[0281] In some embodiments, incorporation of the one or more intended nucleotide edits corrects the mutation in the editing target sequence to wild type nucleotides at corresponding positions in the target gene: (e.g., an NCF1 gene, an NCF1B pseudogene, or an NCF1C pseudogene). As used herein, “correcting” a mutation means restoring a wild type sequence at the place of the mutation in the double stranded target DNA, e.g., target gene, by prime editing. In some embodiments, the editing template comprises and/or encodes a wild type target gene sequence (e.g., an NCF1 gene, an NCF1B pseudogene, or an NCF1C pseudogene).

[0282] In some embodiments, incorporation of the one or more intended nucleotide edits does not correct the mutation in the editing target sequence to wild type sequence, but allows for expression of a functional protein encoded by the target gene (e.g., an NCF1 gene, an NCF1B pseudogene, or an NCF1C pseudogene). In the context of editing NCF1B or NCF1C pseudogenes, “correcting” the pseudogene may also refer to editing of the pseudogene to incorporate a GT (or AC) insertion such that the edited pseudogene has the same coding sequence as the wildtype NCF1 gene. In some embodiments, incorporation of the one or more intended nucleotide edits does not correct the mutation in the editing target sequence to wild type sequence, but allows for expression of a functional protein encoded by the target gene (e.g., an NCF1 gene, an NCF1B pseudogene, or an NCF1C pseudogene).

[0283] In some embodiments, the editing template comprises one or more intended nucleotide edits compared to the sequence on the target strand of the target gene (e.g., an NCF1 gene, an NCF1B pseudogene, or an NCF1C pseudogene) that is complementary to the editing target sequence, wherein the one or more intended nucleotide edits is a single nucleotide substitution, polynucleotide substitution, nucleotide insertion, or nucleotide deletion. In some embodiments, the intended nucleotide edit in the editing template comprises a single nucleotide substitution, polynucleotide substitution, nucleotide insertion, or nucleotide deletion compared to the sequence on the target strand of the target gene (e.g., an NCF1 gene, an NCF1B pseudogene, or an NCF1C pseudogene) that is complementary to the editing target at a position corresponding to a mutation in target gene, wherein the editing target sequence is on the sense strand of the target gene. In some embodiments, the intended nucleotide edit in the editing template comprises a single nucleotide substitution, polynucleotide substitution, nucleotide insertion, or nucleotide deletion compared to the sequence on the target strand of the target gene that is complementary to the editing target at a position corresponding to a mutation in target gene, wherein the editing target sequence is on the antisense strand of the target gene (e.g., an NCF1 gene, an NCF1B pseudogene, or an NCF1C pseudogene).

[0284] A guide RNA core (also referred to herein as the gRNA core, gRNA scaffold, or gRNA backbone sequence) of a PEgRNA may contain a polynucleotide sequence that binds to a DNA binding domain (e.g., Cas9) of a prime editor. The gRNA core may interact with a prime editor as described herein, for example, by association with a DNA binding domain, such as a DNA nickase of the prime editor.

[0285] One of skill in the art will recognize that different prime editors having different DNA binding domains from different DNA binding proteins may require different gRNA core sequences specific to the DNA binding protein. In some embodiments, the gRNA core is capable of binding to a Cas9-based prime editor. In some embodiments, the gRNA core is capable of binding to a Cpf1-based prime editor. In some embodiments, the gRNA core is capable of binding to a Cas12b-based prime editor.

[0286] In some embodiments, the gRNA core comprises regions and secondary structures involved in binding with specific CRISPR Cas proteins. For example, in a Cas9 based prime editing system, the gRNA core of a PEgRNA may comprise one or more regions of a base paired “lower stem” adjacent to the spacer sequence and a base paired “upper stem” following the lower stem, where the lower stem and upper stem may be connected by a “bulge” comprising unpaired RNAs. The gRNA core may further comprise a “nexus” distal from the spacer sequence, followed by a hairpin structure, e.g., at the 3′ end, as exemplified in FIG. 3. In some embodiments, the gRNA core comprises modified nucleotides as compared to a wild type gRNA core in the lower stem, upper stem, and/or the hairpin. For example, nucleotides in the lower stem, upper stem, an/or the hairpin regions may be modified, deleted, or replaced. In some embodiments, RNA nucleotides in the lower stem, upper stem, an/or the hairpin regions may be replaced with one or more DNA sequences. In some embodiments, the gRNA core comprises unmodified or wild type RNA sequences in the nexus and/or the bulge regions. In some embodiments, the gRNA core does not include long stretches of A-T pairs, for example, a GUUUU-AAAAC pairing element. In some embodiments, a prime editing system comprises a prime editor and a PEgRNA, wherein the prime editor comprises a SpCas9 nickase variant thereof, and the gRNA core of the PEgRNA comprises the sequence:

```
  (SEQ ID NO: 34424)
GUUUUAGAGCUAGAAAUAGCAAGUUAAAAUAAGGCUAGUCCGUUAUCAA
CUUGAAAAAGUGGCACCGAGUCGGUGC;
  (SEQ ID NO: 34425)
GUUUGAGAGCUAGAAAUAGCAAGUUUAAAUAAGGCUAGUCCGUUAUCAA
CUUGAAAAAGUGGGACCGAGUCGGUCC;
  (SEQ ID NO: 34426)
GUUUAAGAGCUAUGCUGGAAACAGCAUAGCAAGUUUAAAUAAGGCUAGU
CCGUUAUCAACUUGAAAAAGUGGCACCGAGUCGGUGC;
  (SEQ ID NO: 34427)
GUUUUAGUACUCUGGAAACAGAAUCUACUAAAACAAGGCAAAAUGCCGU
GUUUAUCUCGUCAACUUGUUGGCGAGA;
or
  (SEQ ID NO: 34428)
GUUUUAGUACUCUGGAAACAGAAUCUACUGAAACAAGACAAUAUGUCGU
GUUUAUCCCAUCAAUUUAUUGGUGGGA.
```

[0287] In some embodiments, the gRNA core comprises the sequence

(SEQ ID NO: 34424)
GUUUUAGAGCUAGAAAUAGCAAGUUAAAAUAAGGCUAGUCCGUUAUCAA
CUUGAAAAAGUGGCACCGAGUCGGUGC.

Any gRNA core sequences known in the art are also contemplated in the prime editing compositions described herein.

[0288] A PEgRNA may also comprise optional modifiers, e.g., 3′ end modifier region and/or an 5′ end modifier region. In some embodiments, a PEgRNA comprises at least one nucleotide that is not part of a spacer, a gRNA core, or an extension arm. The optional sequence modifiers could be positioned within or between any of the other regions shown, and not limited to being located at the 3′ and 5′ ends. In certain embodiments, the PEgRNA comprises secondary RNA structure, such as, but not limited to, aptamers, hairpins, stem/loops, toeloops, and/or RNA-binding protein recruitment domains (e.g., the MS2 aptamer which recruits and binds to the MS2cp protein). In some embodiments, a PEgRNA comprises a short stretch of uracil at the 5′ end or the 3′ end. For example, in some embodiments, a PEgRNA comprising a 3′ extension arm comprises a “UUU” sequence at the 3′ end of the extension arm. In some embodiments, a PEgRNA comprises a toeloop sequence at the 3′ end. In some embodiments, the PEgRNA comprises a 3′ extension arm and a toeloop sequence at the 3′ end of the extension arm. In some embodiments, the PEgRNA comprises a 5′ extension arm and a toeloop sequence at the 5′ end of the extension arm. In some embodiments, the PEgRNA comprises a toeloop element having the sequence 5′-GAAANNNNN-3′, wherein N is any nucleobase. In some embodiments, the secondary RNA structure is positioned within the spacer. In some embodiments, the secondary structure is positioned within the extension arm. In some embodiments, the secondary structure is positioned within the gRNA core. In some embodiments, the secondary structure is positioned between the spacer and the gRNA core, between the gRNA core and the extension arm, or between the spacer and the extension arm. In some embodiments, the secondary structure is positioned between the PBS and the editing template. In some embodiments the secondary structure is positioned at the 3′ end or at the 5′ end of the PEgRNA. In some embodiments, the PEgRNA comprises a transcriptional termination signal at the 3′ end of the PEgRNA. In addition to secondary RNA structures, the PEgRNA may comprise a chemical linker or a poly(N) linker or tail, where “N” can be any nucleobase. In some embodiments, the chemical linker may function to prevent reverse transcription of the gRNA core.

[0289] In some embodiments, a prime editing system or composition further comprises a nick guide polynucleotide, such as a nick guide RNA (ngRNA). In some embodiments, a ngRNA comprises a spacer (referred to as a ngRNA spacer or ng spacer) and a gRNA core, wherein the spacer of the ngRNA comprises a region of complementarity to the edit strand, and wherein the gRNA core can interact with a Cas, e.g., Cas9, of a prime editor. Without wishing to be bound by any particular theory, an ngRNA may bind to the edit strand and direct the Cas nickase to generate a nick on the non-edit strand (or target strand). In some embodiments, the nick on the non-edit strand directs endogenous DNA repair machinery to use the edit strand as a template for repair of the non-edit strand, which may increase efficiency of prime editing. In some embodiments, the non-edit strand is nicked by a prime editor localized to the non-edit strand by the ngRNA. Accordingly, also provided herein are PEgRNA systems comprising at least one PEgRNA and at least one ngRNA.

[0290] A prime editing system comprising a PEgRNA (or one or more polynucleotide encoding the PEgRNA) and a prime editor protein (or one or more polynucleotides encoding the prime editor), may be referred to as a PE2 prime editing system and the corresponding editing approach referred to as PE2 approach or PE2 strategy. A PE2 system does not contain a ngRNA. A prime editing system comprising a PEgRNA (or one or more polynucleotide encoding the PEgRNA), a prime editor protein (or one or more polynucleotides encoding the prime editor), and a ngRNA (or one or more polynucleotides encoding the ngRNA) may be referred to as a “PE3” prime editing system. In some embodiments, an ngRNA spacer sequence is complementary to a portion of the edit strand that includes the intended nucleotide edit, and may hybridize with the edit strand only after the edit has been incorporated on the edit strand. Such ngRNA may be referred to a “PE3b” ngRNA, and the prime editing system a PE3b prime editing system.

[0291] In some embodiments, a PEgRNA or a nick guide RNA (ngRNA) can be chemically synthesized, or can be assembled or cloned and transcribed from a DNA sequence, e.g., a plasmid DNA sequence, or by any RNA oligonucleotide synthesis method known in the art. In some embodiments, a DNA sequence that encodes a PEgRNA (or ngRNA) can be designed to append one or more nucleotides at the 5′ end or the 3′ end of the PEgRNA (or nick guide RNA) encoding sequence to enhance PEgRNA transcription. For example, in some embodiments, a DNA sequence that encodes a PEgRNA (or nick guide RNA) (or an ngRNA) can be designed to append a nucleotide G at the 5′ end. Accordingly, in some embodiments, the PEgRNA (or nick guide RNA) can comprise an appended nucleotide G at the 5′ end. In some embodiments, a DNA sequence that encodes a PEgRNA (or nick guide RNA) can be designed to append a sequence that enhances transcription, e.g., a Kozak sequence, at the 5′ end. In some embodiments, a DNA sequence that encodes a PEgRNA (or nick guide RNA) can be designed to append the sequence CACC or CCACC at the 5′ end. Accordingly, in some embodiments, the PEgRNA (or nick guide RNA) can comprise an appended sequence CACC or CCACC at the 5′ end. In some embodiments, a DNA sequence that encodes a PEgRNA (or nick guide RNA) can be designed to append the sequence TTT, TTTT, TTTTT, TTTTTT, TTTTTT at the 3′ end. Accordingly, in some embodiments, the PEgRNA (or nick guide RNA) can comprise an appended sequence UUU, UUUU, UUUUU, UUUUUU, or UUUUUUU at the 3′ end.

Lengthy table referenced here
US20240011007A1-20240111-T00001
Please refer to the end of the specification for access instructions.

Lengthy table referenced here
US20240011007A1-20240111-T00002
Please refer to the end of the specification for access instructions.

Lengthy table referenced here
US20240011007A1-20240111-T00003
Please refer to the end of the specification for access instructions.

Lengthy table referenced here
US20240011007A1-20240111-T00004
Please refer to the end of the specification for access instructions.

Lengthy table referenced here
US20240011007A1-20240111-T00005
Please refer to the end of the specification for access instructions.

Lengthy table referenced here
US20240011007A1-20240111-T00006
Please refer to the end of the specification for access instructions.

Lengthy table referenced here
US20240011007A1-20240111-T00007
Please refer to the end of the specification for access instructions.

Lengthy table referenced here
US20240011007A1-20240111-T00008
Please refer to the end of the specification for access instructions.

Lengthy table referenced here
US20240011007A1-20240111-T00009
Please refer to the end of the specification for access instructions.

Lengthy table referenced here
US20240011007A1-20240111-T00010
Please refer to the end of the specification for access instructions.

Lengthy table referenced here
US20240011007A1-20240111-T00011
Please refer to the end of the specification for access instructions.

Lengthy table referenced here
US20240011007A1-20240111-T00012
Please refer to the end of the specification for access instructions.

Lengthy table referenced here
US20240011007A1-20240111-T00013
Please refer to the end of the specification for access instructions.

Lengthy table referenced here
US20240011007A1-20240111-T00014
Please refer to the end of the specification for access instructions.

Lengthy table referenced here
US20240011007A1-20240111-T00015
Please refer to the end of the specification for access instructions.

Lengthy table referenced here
US20240011007A1-20240111-T00016
Please refer to the end of the specification for access instructions.

Lengthy table referenced here
US20240011007A1-20240111-T00017
Please refer to the end of the specification for access instructions.

Lengthy table referenced here
US20240011007A1-20240111-T00018
Please refer to the end of the specification for access instructions.

Lengthy table referenced here
US20240011007A1-20240111-T00019
Please refer to the end of the specification for access instructions.

Lengthy table referenced here
US20240011007A1-20240111-T00020
Please refer to the end of the specification for access instructions.

Lengthy table referenced here
US20240011007A1-20240111-T00021
Please refer to the end of the specification for access instructions.

Lengthy table referenced here
US20240011007A1-20240111-T00022
Please refer to the end of the specification for access instructions.

Lengthy table referenced here
US20240011007A1-20240111-T00023
Please refer to the end of the specification for access instructions.

Lengthy table referenced here
US20240011007A1-20240111-T00024
Please refer to the end of the specification for access instructions.

Lengthy table referenced here
US20240011007A1-20240111-T00025
Please refer to the end of the specification for access instructions.

Lengthy table referenced here
US20240011007A1-20240111-T00026
Please refer to the end of the specification for access instructions.

Lengthy table referenced here
US20240011007A1-20240111-T00027
Please refer to the end of the specification for access instructions.

Lengthy table referenced here
US20240011007A1-20240111-T00028
Please refer to the end of the specification for access instructions.

Lengthy table referenced here
US20240011007A1-20240111-T00029
Please refer to the end of the specification for access instructions.

Lengthy table referenced here
US20240011007A1-20240111-T00030
Please refer to the end of the specification for access instructions.

Lengthy table referenced here
US20240011007A1-20240111-T00031
Please refer to the end of the specification for access instructions.

Lengthy table referenced here
US20240011007A1-20240111-T00032
Please refer to the end of the specification for access instructions.

Lengthy table referenced here
US20240011007A1-20240111-T00033
Please refer to the end of the specification for access instructions.

Lengthy table referenced here
US20240011007A1-20240111-T00034
Please refer to the end of the specification for access instructions.

Lengthy table referenced here
US20240011007A1-20240111-T00035
Please refer to the end of the specification for access instructions.

Lengthy table referenced here
US20240011007A1-20240111-T00036
Please refer to the end of the specification for access instructions.

Lengthy table referenced here
US20240011007A1-20240111-T00037
Please refer to the end of the specification for access instructions.

Lengthy table referenced here
US20240011007A1-20240111-T00038
Please refer to the end of the specification for access instructions.

Lengthy table referenced here
US20240011007A1-20240111-T00039
Please refer to the end of the specification for access instructions.

Lengthy table referenced here
US20240011007A1-20240111-T00040
Please refer to the end of the specification for access instructions.

Lengthy table referenced here
US20240011007A1-20240111-T00041
Please refer to the end of the specification for access instructions.

Lengthy table referenced here
US20240011007A1-20240111-T00042
Please refer to the end of the specification for access instructions.

Lengthy table referenced here
US20240011007A1-20240111-T00043
Please refer to the end of the specification for access instructions.

Lengthy table referenced here
US20240011007A1-20240111-T00044
Please refer to the end of the specification for access instructions.

Lengthy table referenced here
US20240011007A1-20240111-T00045
Please refer to the end of the specification for access instructions.

Lengthy table referenced here
US20240011007A1-20240111-T00046
Please refer to the end of the specification for access instructions.

Lengthy table referenced here
US20240011007A1-20240111-T00047
Please refer to the end of the specification for access instructions.

Lengthy table referenced here
US20240011007A1-20240111-T00048
Please refer to the end of the specification for access instructions.

Lengthy table referenced here
US20240011007A1-20240111-T00049
Please refer to the end of the specification for access instructions.

Lengthy table referenced here
US20240011007A1-20240111-T00050
Please refer to the end of the specification for access instructions.

Lengthy table referenced here
US20240011007A1-20240111-T00051
Please refer to the end of the specification for access instructions.

Lengthy table referenced here
US20240011007A1-20240111-T00052
Please refer to the end of the specification for access instructions.

Lengthy table referenced here
US20240011007A1-20240111-T00053
Please refer to the end of the specification for access instructions.

Lengthy table referenced here
US20240011007A1-20240111-T00054
Please refer to the end of the specification for access instructions.

Lengthy table referenced here
US20240011007A1-20240111-T00055
Please refer to the end of the specification for access instructions.

Lengthy table referenced here
US20240011007A1-20240111-T00056
Please refer to the end of the specification for access instructions.

Lengthy table referenced here
US20240011007A1-20240111-T00057
Please refer to the end of the specification for access instructions.

Lengthy table referenced here
US20240011007A1-20240111-T00058
Please refer to the end of the specification for access instructions.

Lengthy table referenced here
US20240011007A1-20240111-T00059
Please refer to the end of the specification for access instructions.

Lengthy table referenced here
US20240011007A1-20240111-T00060
Please refer to the end of the specification for access instructions.

Lengthy table referenced here
US20240011007A1-20240111-T00061
Please refer to the end of the specification for access instructions.

Lengthy table referenced here
US20240011007A1-20240111-T00062
Please refer to the end of the specification for access instructions.

Lengthy table referenced here
US20240011007A1-20240111-T00063
Please refer to the end of the specification for access instructions.

Lengthy table referenced here
US20240011007A1-20240111-T00064
Please refer to the end of the specification for access instructions.

Lengthy table referenced here
US20240011007A1-20240111-T00065
Please refer to the end of the specification for access instructions.

Lengthy table referenced here
US20240011007A1-20240111-T00066
Please refer to the end of the specification for access instructions.

Lengthy table referenced here
US20240011007A1-20240111-T00067
Please refer to the end of the specification for access instructions.

Lengthy table referenced here
US20240011007A1-20240111-T00068
Please refer to the end of the specification for access instructions.

Lengthy table referenced here
US20240011007A1-20240111-T00069
Please refer to the end of the specification for access instructions.

Lengthy table referenced here
US20240011007A1-20240111-T00070
Please refer to the end of the specification for access instructions.

Lengthy table referenced here
US20240011007A1-20240111-T00071
Please refer to the end of the specification for access instructions.

Lengthy table referenced here
US20240011007A1-20240111-T00072
Please refer to the end of the specification for access instructions.

Lengthy table referenced here
US20240011007A1-20240111-T00073
Please refer to the end of the specification for access instructions.

Lengthy table referenced here
US20240011007A1-20240111-T00074
Please refer to the end of the specification for access instructions.

Lengthy table referenced here
US20240011007A1-20240111-T00075
Please refer to the end of the specification for access instructions.

Lengthy table referenced here
US20240011007A1-20240111-T00076
Please refer to the end of the specification for access instructions.

[0292] In some embodiments, the ng search target sequence is located on the non-target strand, within 10 base pairs to 100 base pairs of an intended nucleotide edit incorporated by the PEgRNA on the edit strand. In some embodiments, the ng target search target sequence is within 10 bp, 20 bp, 30 bp, 40 bp, 50 bp, 60 bp, 70 bp, 80 bp, 90 bp, 91 bp, 92 bp, 93 bp, 94 bp, 95 bp, 96 bp, 97 bp, 98 bp, 99 bp, or 100 bp of an intended nucleotide edit incorporated by the PEgRNA on the edit strand. In some embodiments, the 5′ ends of the ng search target sequence and the PEgRNA search target sequence are within 1, 2, 3, 4, 5, 6, 7, 8, 9, or 10 bp apart from each other. In some embodiments, the 5′ ends of the ng search target sequence and the PEgRNA search target sequence are within 10 bp, 20 bp, 30 bp, 40 bp, 50 bp, 60 bp, 70 bp, 80 bp, 90 bp, 91 bp, 92 bp, 93 bp, 94 bp, 95 bp, 96 bp, 97 bp, 98 bp, 99 bp, or 100 bp apart from each other.

[0293] Exemplary combinations of PEgRNA components, e.g., spacer, PBS, and editing template/RTT, as well as combinations of each PEgRNA and corresponding ngRNA(s) are provided in Tables 1-76. Tables 1-76 each contain three columns. From left to right, the first column is the sequence number. The second column provides the sequence of the component as actual sequence or by reference to a SEQ ID NO. Although all the sequences provided in Tables 1-76 are RNA sequences, “T” is used instead of a “U” in the sequences for consistency with the ST.26 standard used in the accompanying sequence listing. The third column contains a description of the sequence, where each sequence is annotated with its specific information.

[0294] Each of Tables 1-76 provides Prime Editing guide RNAs (PEgRNAs) that can be used with any Prime Editor comprising a Cas9 protein capable of recognizing a specific PAM sequence, as provided in the Description column of the Tables for the PEgRNA spacer. The PEgRNAs of each of Tables 1-76 can also be used in Prime Editing systems further comprising a nick guide RNA (ngRNA). Such PEgRNAs and Prime Editing systems can be used, for example, to correct or edit an c.73_74 ΔGT mutation in NCF1, or to edit the corresponding site in NCF1B or NCF1C.

[0295] The PEgRNAs exemplified in Tables 1-76 comprise: (a) a spacer comprising at its 3′ end a sequence corresponding to a listed PEgRNA spacer sequence; (b) a gRNA core capable of complexing with a Cas9 protein, and (c) an extension arm comprising: (i) an editing template comprising at its 3′ end an RTT sequence from the same table as the PEgRNA spacer, and (ii) a prime binding site (PBS) comprising at its 5′ end a PBS sequence from the same table as the PEgRNA spacer.

[0296] The PEgRNA spacer can be, for example, 16-22 nucleotides in length. The PEgRNA spacers in Tables 1-76 are annotated with their PAM sequence(s), enabling the selection of an appropriate Cas9 protein. The indicated PAM sequences, unless otherwise noted, is in a 5′ to 3′ order. For example, a “NGG” PAM is a 5′-NGG-3′ PAM.

[0297] The editing template can be referred to as a reverse transcription template (RTT). The editing template can encode wildtype NCF1 gene sequence. For example, in some embodiments, the editing template encodes a “GT” or “AC” insertion to restore wildtype NCF1 sequence. the dinucleotide insertion that corrects the c.73_74 ΔGT mutation can be considered at positions corresponding to c.73_74, or at positions adjacent to c.73_74, as the mutation is a deletion of “GT” from a “GTGT” sequence. The GT (or AC on the opposite strand) insertion encoded by an editing template can thus also be considered at the position corresponding to the third and fourth nucleotides of exon 2 of NCF1 gene. In some embodiments, the editing template can encode one or more synonymous edits relative to the wildtype NCF1 gene. In some cases, a synonymous edit can be an edit that alters the third nucleotide of exon 2 of the wild type NCF1 gene sequence (or the reverse complement of the third nucleotide of exon 2 of the wild type NCF1 gene sequence). Because the first three nucleotides of NCF1 exon 2 encodes a Valine, such edits are referred to as Valine recode edits. In some embodiments, the editing template contains one or more intended edits that alters the PAM sequence of the PEgRNA (or the reverse complement of the PAM sequence) such that the PAM is no longer recognized by the Cas9. Such edits are referred to as PAM silencing edits. A PAM silencing edit can be a synonymous edit or can be at a position corresponding to a non-coding region of wildtype NCF1 gene. In some embodiments, the intended edit(s) in the editing template, for example, a dinucleotide insertion at position c.73_74 or c.75_76 in the NCF1 gene, a synonymous edit, or a PAM silencing edit, are in such position(s) in the editing template that incorporation of the edits alter the protospacer sequence that correspond to the PEgRNA spacer sequence. Such edits are referred to as protospacer edits. Without wishing to be bound by any particular theory, PAM silencing edits and/or protospacer edits may prevent the Cas9 nickase from re-nicking the edit strand, thereby improving Prime Editing efficiency or reduce indel formation. The edit type, including protospacer edit, Valine recode edit, and PAM silencing edit, as well as the particular edits made for PAM silencing and Valine recoding, are provided in the third column of each of Tables 1-76. When the third column in the Table does not include a specific description of the RTT, e.g., a Valine recode edit, a protospacer edit, or a PAM silencing edit, the RTT encodes a wildtype NCF1 sequence. Some of the RTTs in Tables 1-76 have perfect complementarity to specific PE3b nick guide RNA (ngRNA) spacers. Such RTTs are annotated in the third column with a * followed by a number code, to indicate the specific complementary PE3b ngRNA. Briefly, the RTTs are annotated with *N wherein N is the same number annotated to the PE3b ngRNA spacer that has perfect complementarity to a specific edit encoded by the RTT. In some embodiments, a RTT contains edits e.g., PAM silencing edits, synonymous edits, and/or edits corresponding to a non-coding region of NCF1, in addition to a dinucleotide insertion corresponding to the nucleotides 3-4 of exon 2 of NCF1 gene. In some embodiments, such additional edits can allow for additional designs of PE3b ngRNA spacers that have perfect complementarity to a portion of the edit strand that includes one or more specific edits encoded by the RTT (i.e., having prefect identity to a portion of the RTT that includes the edit).

[0298] In some embodiments, the editing template comprises at least 4 nucleotides that is 5′ to the 5′-most edit, wherein the at least 4 nucleotides are complementary to the edit strand of the target gene. Accordingly, in cases where a listed RTT sequence contains less than 4 contiguous nucleotides 5′ to the 5′ most edit that are complementary to the edit strand, the editing template may further comprise 1, 2, 3, 4, or more contiguous nucleotides at the 5′ end that are complementary to the edit strand.

[0299] The PBS can be, for example, 3 to 19 nucleotides in length. In some cases, a PBS length of no more than 3 nucleotides less than the PEgRNA spacer length is chosen.

[0300] The PEgRNA provided in Tables 1-76 can comprise, from 5′ to 3′, the spacer, the gRNA core, the editing template, and the PBS. The 3′ end of the editing template can be contiguous with the 5′ end of the PBS. The PEgRNA can comprise multiple RNA molecules (e.g., a crRNA containing the PEgRNA spacer and a tracrRNA containing the extension arm) or can be a single gRNA molecule. Any PEgRNA exemplified in Tables 1-76 may comprise, or further comprise, a 3′ motif at the 3′ end of the extension arm, for example, a hairpin-forming motif or a series of 1, 2, 3, 4, 5, 6, 7 or more U nucleotides. In some embodiments, the PEgRNA comprises 4 U nucleotides at its 3′ end. Without being bound by theory, such 3′ motifs are believed to increase PEgRNA stability. The PEgRNA may alternatively or additionally comprise one or more chemical modifications, such as phosphorothioate (PS) bond(s), 2′-O-methylated (2′-Ome) nucleotides, or a combination thereof. In some embodiments, the PEgRNA comprise 3′ mN*mN*mN*N and 5′mN*mN*mN* modifications, where m indicates that the nucleotide contains a 2′-O-Me modification and a * indicates the presence of a phosphorothioate bond. PEgRNA sequences exemplified in Tables 1-76 may alternatively be adapted for expression from a DNA template, for example, by including a 5′ terminal G if the spacer of the PEgRNA begins with a nucleotide other than G, by including 6 or 7 U nucleotides at the 3′ end of the extension arm, or both.

[0301] Any of the PEgRNAs of Tables 1-76 can be used in a Prime Editing system further comprising a nick guide RNA (ngRNA). Such ngRNA can comprise a spacer comprising at its 3′ end a sequence corresponding to nucleotides 5-20 of any of the 20-nucleotide ngRNA spacers listed in the same table as the PEgRNA spacer and a gRNA core capable of complexing with a Cas9 protein. For example, the sequence in the spacer of the ngRNA can comprise nucleotides 5-20, 4-20, 3-20, 2-20, or 1-20 of a 20-nucleotide-long spacer listed in the table. In some embodiments, the spacer of the ngRNA is the complete sequence of an ngRNA spacer listed in the same table as the PEgRNA spacer. The ngRNA spacers in Tables 1-76 are annotated with their PAM sequences, enabling selection of an appropriate Cas9 protein. It can be advantageous to select an ngRNA spacer that has a PAM sequence compatible with the Cas9 protein used in the Prime Editor with the PEgRNA, thus avoiding the need to use two different Cas9 proteins. The ngRNA can comprise multiple RNA molecules (e.g., a crRNA containing the ngRNA spacer and a tracrRNA) or can be a single gRNA molecule. The ngRNA is capable of binding the edit strand of the NCF1 gene (or a NCF1B or NCF1C pseudogene) and directing a complexed Cas9 nickase protein to nick the non-edit strand. A PE3 ngRNA spacer has perfect complementarity to the edit strand both prior to and post incorporation of the intended edit(s) encoded by the PEgRNA; a PE3b ngRNA spacer has perfect complementarity to the edit strand only after the intended edit(s) are incorporated. Without wishing to be bound by any particular theory, a PE3b ngRNA spacer is believed to reduce indel formation resulted from PE3 nicking of the non-edit strand. In Tables 1-76, a PE3b*N ngRNA spacer, where N is the integer following the *, has perfect complementarity to the edit strand post-edit containing the specific edit encoded by the editing template in the same Table, wherein the editing template (RTT) is annotated with the same *N. For example, a PE3b*1 ngRNA spacer has 100% complementary with the portion of the edit strand containing the edit encoded by a RTT annotated with *1.

[0302] Any ngRNA sequence provided in Tables 1-76 may comprise, or further comprise, a 3′ motif at their 3′ end, for example, a series of 1, 2, 3, 4, 5, 6, 7 or more U nucleotides. In some embodiments, the ngRNA comprises 4 U nucleotides at its 3′ end. Without being bound by theory, such 3′ motifs are believed to increase ngRNA stability. The ngRNA may alternatively or additionally comprise one or more chemical modifications, such as phosphorothioate (PS) bond(s), 2′-O-methylated (2′-Ome) nucleotides, or a combination thereof. In some embodiments, the ngRNA comprise 3′ mN*mN*mN*N and 5′mN*mN*mN* modifications, where m indicates that the nucleotide contains a 2′-O-Me modification and a * indicates the presence of a phosphorothioate bond. NgRNA sequences may alternatively be adapted for expression from a DNA template, for example, by including a 5′ terminal G if the spacer of the ngRNA begins with a nucleotide other than G, by including 6 or 7 U nucleotides at the 3′ end of the ngRNA, or both.

[0303] The gRNA core sequence of any of PEgRNA sequences in Tables 1-76 can be any gRNA scaffold sequence that can complex with a Cas9 that recognizes the PAM sequence annotated for each Table. In some embodiments, the gRNA core for the PEgRNA and/or the ngRNA comprises a sequence selected from SEQ ID Nos 34424, In some embodiments, the gRNA core for the PEgRNA and/or the ngRNA comprises SEQ ID No. 34428. In some embodiments, the gRNA core for the PEgRNA and/or the ngRNA comprises SEQ ID No. 34427.

[0304] Table 1

[0305] Table 1 provides Prime Editing guide RNAs (PEgRNAs) that can be used with any Prime Editor containing a Cas9 protein capable of recognizing a TG, TGG, or TGGG PAM sequence. The PEgRNAs of Table 1 can also be used in Prime Editing systems further comprising a nick guide RNA (ngRNA). Such PEgRNAs and Prime Editing systems can be used, for example, to correct or edit an c.73_74 ΔGT mutation in NCF1, or to edit the corresponding site in NCF1B or NCF1C.

[0306] The PEgRNAs exemplified in Table 1 comprise: (a) a spacer comprising at its 3′ end a sequence corresponding to sequence number 1; (b) a gRNA core capable of complexing with a Cas9 protein, and (c) an extension arm comprising: (i) an editing template at least 10 nucleotides in length and comprising at its 3′ end a sequence corresponding to sequence number 27, 25, 26, or 28, and (ii) a prime binding site (PBS) comprising at its 5′ end a sequence corresponding to sequence number 8.

[0307] The PEgRNA spacer can be, for example, 16-22 nucleotides in length and can comprise the sequence corresponding to any one of sequence numbers 1-7. In some embodiments, the PEgRNA spacer comprises sequence number 5. The PEgRNA spacers in Table 1 are annotated with their PAM sequence(s), enabling the selection of an appropriate Cas9 protein.

[0308] The editing template can be referred to as a reverse transcription template (RTT). The editing template comprises one or more intended nucleotide edits for incorporation into the target NCF1 (or NCF1B/NCF1C) gene by Prime Editing. In some embodiments, the editing template comprises at least 4 nucleotides that is 5′ to the 5′-most edit, wherein the at least 4 nucleotides are complementary to the edit strand of the target gene. Accordingly, in cases where a listed RTT sequence contains less than 4 contiguous nucleotides 5′ to the 5′ most edit that are complementary to the edit strand, the editing template may further comprise 1, 2, 3, 4, or more contiguous nucleotides at the 5′ end that are complementary to the edit strand.

[0309] In some embodiments, the editing template encodes a wildtype NCF1 gene sequence. For example, the editing template can comprise at its 3′ end the sequence corresponding to sequence number 27, 31, 35, 39, 43, 47, 51, 56, 60, 64, 66, 71, 75, 78, 84, 85, 91, 94, 98, 103, 108, 110, 114, 118, 121, 125, 132, 135, 138, 144, 147, 151, 153, 159, 161, 165, 172, 175, 180, 182, 188, 191, 196, 200, 202, 207, 212, 215, 218, 221, 226, 230, 234, 238, 241, 246, 250, 256, 258, 262, 266, 272, 275, 280, 282, 286, 289, 294, 298, 303, 308, 311, 314, 317, 321, 326, 331, 335, 338, 341, 347, 350, 353, 359, 364, 367, 372, 374, 379, 384, 388, 391, 395, or 400. In some embodiments, the editing template can encode one or more synonymous edits relative to the wildtype NCF1 gene. In some cases, a synonymous edit is a Valine recode edit. For example, the editing template can comprise at its 3′ end the sequence corresponding to sequence number 290, 291, 292, 293, 296, 295, 299, 300, 297, 302, 304, 301, 307, 305, 306, 312, 310, 309, 313, 315, 316, 320, 318, 319, 322, 323, 324, 325, 328, 327, 332, 330, 329, 334, 336, 333, 339, 337, 340, 343, 344, 342, 345, 346, 348, 349, 351, 352, 355, 354, 356, 357, 358, 360, 362, 361, 363, 366, 365, 368, 370, 371, 369, 373, 375, 376, 380, 377, 378, 381, 383, 382, 386, 387, 385, 392, 389, 390, 394, 396, 393, 398, 399, or 397. In some embodiments, the editing template encodes a protospacer edit. For example, an editing template that encodes a protospacer edit can comprises at its 3′ end the sequence corresponding to sequence number 27, 31, 35, 39, 43, 47, 51, 56, 60, 64, 66, 71, 75, 78, 84, 85, 91, 94, 98, 103, 108, 110, 114, 118, 121, 125, 132, 135, 138, 144, 147, 151, 153, 159, 161, 165, 172, 175, 180, 182, 188, 191, 196, 200, 202, 207, 212, 215, 218, 221, 226, 230, 234, 238, 241, 246, 250, 256, 258, 262, 266, 272, 275, 280, 282, 286, 289, 294, 298, 303, 308, 311, 314, 317, 321, 326, 331, 335, 338, 341, 347, 350, 353, 359, 364, 367, 372, 374, 379, 384, 388, 391, 395, 400, 290, 291, 292, 293, 296, 295, 299, 300, 297, 302, 304, 301, 307, 305, 306, 312, 310, 309, 313, 315, 316, 320, 318, 319, 322, 323, 324, 325, 328, 327, 332, 330, 329, 334, 336, 333, 339, 337, 340, 343, 344, 342, 345, 346, 348, 349, 351, 352, 355, 354, 356, 357, 358, 360, 362, 361, 363, 366, 365, 368, 370, 371, 369, 373, 375, 376, 380, 377, 378, 381, 383, 382, 386, 387, 385, 392, 389, 390, 394, 396, 393, 398, 399, or 397.

[0310] The PBS can be, for example, 3 to 19 nucleotides in length and can comprise the sequence corresponding to any one of sequence numbers 8-24. In some cases, a PBS length of no more than 3 nucleotides less than the PEgRNA spacer length is chosen.

[0311] The PEgRNA can comprise, from 5′ to 3′, the spacer, the gRNA core, the editing template, and the PBS. The 3′ end of the editing template can be contiguous with the 5′ end of the PBS. The PEgRNA can comprise multiple RNA molecules or can be a single RNA molecule. Exemplary PEgRNAs provided in Table 1 can comprise a sequence corresponding to sequence number 482, 485, 483, 486, 484, 488, 487, 490, 491, 495, 494, 492, 493, 496, 489, 497, 501, 499, 498, 500, 502, 505, 503, 511, 512, 510, 506, 504, 508, 513, 507, 509, 518, 515, 519, 514, 517, 516, 526, 524, 520, 522, 530, 521, 528, 532, 531, 534, 527, 525, 533, 529, 523, 538, 541, 536, 539, 535, 540, 537, 546, 549, 545, 550, 543, 544, 548, 547, 542, 552, 551, 555, 557, 556, 554, 553, 560, 563, 561, 559, 562, 558, 566, 564, 569, 568, 567, 565, 570, 571, 574, 573, 572, 575, 576, or 577.

[0312] Any of the PEgRNAs of Table 1 can be used in a Prime Editing system further comprising a nick guide RNA (ngRNA). Such ngRNA can comprise (a) a spacer comprising at its 3′ end a sequence corresponding to nucleotides 5-20 of any ngRNA spacer corresponding to sequence number 449, 425, 417, 457, 444, 448, 440, 426, 424, 421, 422, 451, 447, 437, 445, 435, 446, 427, 436, 467, 454, 423, 441, 428, 465, 438, 434, 418, 464, 461, 452, 420, 460, 466, 453, 455, 459, 456, 439, 432, 433, 419, 462, 429, 431, 443, 458, 463, 450, 442, 430, 473, 472, 471, 468, 470, 469, 474, 476, 477, 480, 478, 475, or 479, and (b) a gRNA core capable of complexing with a Cas9 protein. For example, the sequence in the spacer of the ngRNA can comprise nucleotides 5-20, 4-20, 3-20, 2-20, or 1-20 of sequence number 449, 425, 417, 457, 444, 448, 440, 426, 424, 421, 422, 451, 447, 437, 445, 435, 446, 427, 436, 467, 454, 423, 441, 428, 465, 438, 434, 418, 464, 461, 452, 420, 460, 466, 453, 455, 459, 456, 439, 432, 433, 419, 462, 429, 431, 443, 458, 463, 450, 442, 430, 473, 472, 471, 468, 470, 469, 474, 476, 477, 480, 478, 475, or 479. In some embodiments, the spacer of the ngRNA is a ngRNA spacer listed in Table 1. The ngRNA spacers in Table 1 are annotated with their PAM sequences, enabling selection of an appropriate Cas9 protein. It can be advantageous to select a ngRNA spacer that has a PAM sequence compatible with the Cas9 protein used in the Prime Editor, thus avoiding the need to use two different Cas9 proteins. The ngRNA is capable of directing a complexed Cas9 protein to bind the edit strand of the NCF1 gene (or NCF1B/NCF1C pseudogene); thus, a complexed Cas9 nickase containing a nuclease inactivating mutation in the HNH domain will nick the non-edit strand. A PE3 ngRNA spacer has perfect complementarity to the edit strand both pre- and post-edit; a PE3b ngRNA spacer has perfect complementarity to the edit strand post-edit. A PE3b*N ngRNA spacer, where N is the integer following the * as indicated in the table, has perfect complementarity to the edit strand post-edit containing the specific edit encoded by the editing template annotated with the same *N. For example, a PE3b*1 ngRNA spacer has 100% complementary with the portion of the edit strand containing the edit encoded by a RTT annotated with *1.

[0313] Exemplary ngRNA provided in Table 1 can comprise a sequence corresponding to sequence number 579, 578, 581, 580, 592, 591, 589, 593, 582, 583, 586, 585, 595, 584, 594, 590, 587, 588, 602, 604, 607, 603, 596, 601, 598, 597, 600, 599, 608, 605, 606, or 481.

[0314] Any PEgRNA or ngRNA exemplified in Table 1 may comprise, or further comprise, a 3′ motif at the 3′ end of the extension arm, for example, a hairpin-forming motif or a series of 1, 2, 3, 4, 5, 6, 7 or more U nucleotides. In some embodiments, the PEgRNA or ngRNA comprises 4 U nucleotides at its 3′ end. Without being bound by theory, such 3′ motifs are believed to increase gRNA stability. The PEgRNA or ngRNA may alternatively or additionally comprise one or more chemical modifications, such as phosphorothioate (PS) bond(s), 2′-O-methylated (2′-Ome) nucleotides, or a combination thereof. In some embodiments, the PEgRNA or ngRNA comprise 3′ mN*mN*mN*N and 5′mN*mN*mN* modifications, where m indicates that the nucleotide contains a 2′-O-Me modification and a * indicates the presence of a phosphorothioate bond. PEgRNA and ngRNA sequences exemplified in Table 1 may alternatively be adapted for expression from a DNA template, for example, by including a 5′ terminal G if the spacer of the PEgRNA or ngRNA begins with a nucleotide other than G, by including 6 or 7 U nucleotides at the 3′ end of the extension arm, or both.

[0315] Table 12

[0316] Table 12 provides Prime Editing guide RNAs (PEgRNAs) that can be used with any Prime Editor containing a Cas9 protein capable of recognizing a GG, GGG, or GGGG PAM sequence. The PEgRNAs of Table 12 can also be used in Prime Editing systems further comprising a nick guide RNA (ngRNA). Such PEgRNAs and Prime Editing systems can be used, for example, to correct or edit an c.73_74 ΔGT mutation in NCF1, or to edit the corresponding site in NCF1B or NCF1C.

[0317] The PEgRNAs exemplified in Table 12 comprise: (a) a spacer comprising at its 3′ end a sequence corresponding to sequence number 3995; (b) a gRNA core capable of complexing with a Cas9 protein, and (c) an extension arm comprising: (i) an editing template at least 10 nucleotides in length and comprising at its 3′ end a sequence corresponding to sequence number 4019, and (ii) a prime binding site (PBS) comprising at its 5′ end a sequence corresponding to sequence number 4002.

[0318] The PEgRNA spacer can be, for example, 16-22 nucleotides in length and can comprise the sequence corresponding to any one of sequence numbers 3995-4001. In some embodiments, the PEgRNA spacer comprises sequence number 3999. The PEgRNA spacers in Table 12 are annotated with their PAM sequence(s), enabling the selection of an appropriate Cas9 protein.

[0319] The editing template can be referred to as a reverse transcription template (RTT). The editing template comprises one or more intended nucleotide edits for incorporation into the target NCF1 (or NCF1B/NCF1C) gene by Prime Editing. In some embodiments, the editing template comprises at least 4 nucleotides that is 5′ to the 5′ most intended edit, wherein the at least 4 nucleotides are complementary to the edit strand of the target gene.

[0320] In some embodiments, the editing template encodes a wildtype NCF1 gene sequence. For example, the editing template can comprise at its 3′ end the sequence corresponding to sequence number 4019, 4020, 4021, 4037, 4054, 4072, 4098, 4102, 4119, 4136, 4149, 4171, 4193, 4209, 4213, 4230, 4245, 4263, 4277, 4305, 4313, 4330, 4348, 4358, 4375, 4402, 4409, 4427, 4439, 4460, 4472, 4490, 4504, 4517, 4533, 4557, 4568, 4584, 4601, 4618, 4630, 4650, 4671, 4681, 4702, 4715, 4732, 4744, 4764, 4785, 4791, 4809, 4826, 4844, 4859, 4870, 4893, 4910, 4920, 4945, 4949, 4971, 4984, 5007, 5020, 5030, 5047, 5061, 5087, 5099, 5110, 5131, 5152, 5157, 5175, 5203, 5217, 5234, 5243, 5258, 5275, 5286, 5309, 5319, 5339, 5349, 5369, 5385, 5399, 5414, 5433, 5458, 5464, or 5478. In some embodiments, the editing template encodes one or more PAM silencing edits relative to the wildtype NCF1 gene. The editing template that encodes one or more PAM silencing edits can comprise at its 3′ end the sequence corresponding to sequence number 4023, 4034, 4031, 4029, 4025, 4028, 4033, 4026, 4030, 4036, 4035, 4032, 4027, 4024, 4022, 4043, 4042, 4050, 4051, 4044, 4049, 4041, 4040, 4052, 4045, 4039, 4038, 4048, 4046, 4047, 4061, 4056, 4057, 4062, 4067, 4060, 4055, 4058, 4053, 4066, 4068, 4065, 4063, 4064, 4059, 4070, 4078, 4082, 4081, 4069, 4074, 4080, 4073, 4075, 4071, 4083, 4077, 4084, 4079, 4076, 4099, 4095, 4093, 4085, 4089, 4100, 4091, 4096, 4097, 4094, 4086, 4088, 4090, 4087, 4092, 4116, 4108, 4114, 4115, 4105, 4104, 4106, 4112, 4113, 4109, 4111, 4101, 4110, 4107, 4103, 4117, 4128, 4126, 4120, 4132, 4123, 4127, 4129, 4122, 4124, 4125, 4121, 4130, 4131, 4118, 4138, 4139, 4143, 4140, 4141, 4145, 4147, 4144, 4146, 4133, 4142, 4148, 4137, 4135, 4134, 4152, 4159, 4164, 4157, 4158, 4156, 4161, 4162, 4163, 4154, 4151, 4150, 4155, 4153, 4160, 4173, 4166, 4175, 4177, 4178, 4176, 4174, 4180, 4170, 4165, 4168, 4172, 4179, 4167, 4169, 4192, 4183, 4190, 4196, 4188, 4194, 4189, 4182, 4181, 4184, 4186, 4195, 4185, 4187, 4191, 4203, 4204, 4205, 4210, 4206, 4198, 4202, 4208, 4199, 4211, 4207, 4212, 4197, 4200, 4201, 4214, 4225, 4219, 4221, 4224, 4227, 4220, 4217, 4226, 4228, 4218, 4222, 4223, 4215, 4216, 4231, 4237, 4240, 4233, 4229, 4243, 4235, 4236, 4238, 4241, 4242, 4239, 4234, 4244, 4232, 4252, 4247, 4253, 4257, 4254, 4250, 4255, 4246, 4251, 4249, 4260, 4259, 4256, 4248, 4258, 4265, 4267, 4271, 4270, 4275, 4262, 4272, 4264, 4276, 4274, 4266, 4268, 4261, 4273, 4269, 4283, 4289, 4285, 4278, 4288, 4290, 4279, 4280, 4286, 4281, 4287, 4282, 4291, 4284, 4292, 4299, 4302, 4296, 4306, 4304, 4297, 4301, 4295, 4298, 4308, 4303, 4300, 4294, 4293, 4307, 4324, 4309, 4314, 4312, 4318, 4321, 4323, 4311, 4310, 4316, 4319, 4317, 4320, 4322, 4315, 4326, 4336, 4331, 4335, 4337, 4334, 4328, 4325, 4340, 4339, 4333, 4329, 4327, 4338, 4332, 4349, 4347, 4344, 4355, 4352, 4356, 4342, 4350, 4354, 4351, 4345, 4341, 4353, 4343, 4346, 4362, 4371, 4359, 4367, 4370, 4368, 4363, 4372, 4369, 4360, 4357, 4361, 4366, 4365, 4364, 4376, 4374, 4382, 4373, 4380, 4384, 4381, 4388, 4378, 4387, 4379, 4386, 4377, 4385, 4383, 4390, 4393, 4404, 4395, 4401, 4389, 4392, 4400, 4399, 4403, 4396, 4397, 4394, 4398, 4391, 4407, 4405, 4412, 4413, 4414, 4408, 4411, 4415, 4416, 4410, 4406, 4417, 4419, 4420, 4418, 4434, 4433, 4432, 4423, 4431, 4425, 4435, 4422, 4428, 4424, 4436, 4430, 4421, 4429, 4426, 4451, 4441, 4440, 4437, 4446, 4449, 4443, 4448, 4442, 4447, 4438, 4450, 4452, 4444, 4445, 4458, 4455, 4464, 4456, 4457, 4463, 4461, 4462, 4454, 4459, 4465, 4467, 4453, 4468, 4466, 4477, 4481, 4480, 4471, 4484, 4483, 4476, 4474, 4478, 4482, 4470, 4469, 4479, 4475, 4473, 4500, 4496, 4491, 4485, 4489, 4493, 4499, 4486, 4495, 4487, 4498, 4488, 4492, 4494, 4497, 4511, 4510, 4512, 4514, 4516, 4502, 4509, 4501, 4506, 4508, 4515, 4507, 4503, 4513, 4505, 4520, 4519, 4522, 4523, 4530, 4524, 4528, 4531, 4532, 4521, 4527, 4525, 4526, 4529, 4518, 4534, 4548, 4544, 4540, 4546, 4537, 4545, 4536, 4541, 4543, 4542, 4535, 4547, 4538, 4539, 4564, 4555, 4551, 4559, 4552, 4561, 4562, 4556, 4560, 4563, 4553, 4554, 4558, 4550, 4549, 4570, 4579, 4567, 4566, 4575, 4565, 4578, 4573, 4572, 4569, 4574, 4576, 4580, 4577, 4571, 4581, 4586, 4585, 4591, 4590, 4583, 4593, 4589, 4595, 4594, 4588, 4582, 4596, 4592, 4587, 4602, 4609, 4606, 4608, 4603, 4610, 4599, 4605, 4611, 4597, 4600, 4604, 4598, 4612, 4607, 4623, 4627, 4613, 4619, 4628, 4617, 4620, 4626, 4621, 4625, 4624, 4622, 4616, 4615, 4614, 4640, 4632, 4633, 4638, 4643, 4635, 4629, 4639, 4641, 4631, 4634, 4644, 4637, 4636, 4642, 4646, 4656, 4652, 4647, 4649, 4658, 4654, 4648, 4659, 4660, 4657, 4653, 4651, 4645, 4655, 4661, 4676, 4666, 4670, 4669, 4662, 4672, 4663, 4668, 4664, 4665, 4667, 4673, 4674, 4675, 4690, 4691, 4683, 4680, 4687, 4688, 4682, 4684, 4689, 4678, 4685, 4692, 4686, 4677, 4679, 4707, 4706, 4698, 4699, 4703, 4704, 4695, 4694, 4693, 4705, 4697, 4700, 4701, 4708, 4696, 4717, 4719, 4722, 4712, 4711, 4714, 4718, 4720, 4723, 4721, 4709, 4710, 4724, 4716, 4713, 4739, 4733, 4731, 4738, 4735, 4725, 4730, 4729, 4727, 4737, 4740, 4726, 4734, 4736, 4728, 4746, 4747, 4755, 4742, 4751, 4743, 4752, 4753, 4756, 4748, 4745, 4749, 4750, 4741, 4754, 4761, 4766, 4759, 4767, 4760, 4758, 4757, 4770, 4769, 4768, 4765, 4763, 4772, 4762, 4771, 4782, 4784, 4778, 4779, 4774, 4773, 4777, 4787, 4776, 4780, 4783, 4788, 4781, 4786, 4775, 4792, 4804, 4800, 4794, 4795, 4796, 4797, 4790, 4801, 4793, 4789, 4799, 4802, 4803, 4798, 4815, 4816, 4817, 4812, 4806, 4811, 4819, 4808, 4818, 4814, 4805, 4820, 4810, 4813, 4807, 4827, 4822, 4833, 4834, 4831, 4823, 4825, 4829, 4828, 4836, 4821, 4835, 4830, 4824, 4832, 4849, 4839, 4843, 4852, 4847, 4837, 4850, 4848, 4841, 4842, 4838, 4840, 4846, 4851, 4845, 4866, 4856, 4864, 4853, 4862, 4858, 4855, 4854, 4865, 4860, 4868, 4867, 4857, 4861, 4863, 4884, 4869, 4874, 4875, 4879, 4880, 4882, 4878, 4883, 4876, 4881, 4877, 4871, 4872, 4873, 4890, 4892, 4897, 4900, 4888, 4885, 4887, 4889, 4891, 4899, 4894, 4898, 4896, 4886, 4895, 4912, 4903, 4907, 4905, 4904, 4909, 4913, 4916, 4902, 4914, 4906, 4911, 4901, 4915, 4908, 4926, 4932, 4919, 4918, 4929, 4925, 4924, 4921, 4927, 4923, 4930, 4917, 4931, 4928, 4922, 4940, 4947, 4933, 4934, 4935, 4942, 4943, 4938, 4939, 4936, 4948, 4946, 4941, 4944, 4937, 4955, 4958, 4964, 4963, 4961, 4959, 4950, 4957, 4953, 4951, 4960, 4954, 4962, 4956, 4952, 4973, 4974, 4979, 4975, 4970, 4966, 4967, 4965, 4978, 4977, 4969, 4972, 4976, 4968, 4980, 4981, 4996, 4983, 4982, 4986, 4994, 4993, 4989, 4992, 4987, 4995, 4988, 4991, 4985, 4990, 5003, 4999, 5006, 5009, 4998, 5002, 5001, 5012, 5000, 4997, 5005, 5008, 5011, 5004, 5010, 5019, 5021, 5024, 5022, 5026, 5015, 5017, 5027, 5028, 5018, 5014, 5023, 5025, 5013, 5016, 5034, 5039, 5040, 5041, 5038, 5029, 5036, 5044, 5042, 5032, 5037, 5033, 5043, 5031, 5035, 5053, 5048, 5051, 5050, 5045, 5058, 5049, 5060, 5059, 5057, 5052, 5046, 5055, 5056, 5054, 5071, 5067, 5069, 5075, 5064, 5076, 5066, 5070, 5068, 5074, 5063, 5062, 5073, 5072, 5065, 5090, 5084, 5079, 5091, 5083, 5086, 5081, 5085, 5077, 5080, 5078, 5092, 5088, 5082, 5089, 5098, 5103, 5104, 5093, 5096, 5106, 5105, 5108, 5097, 5094, 5100, 5107, 5102, 5095, 5101, 5114, 5112, 5124, 5118, 5115, 5120, 5111, 5121, 5119, 5122, 5116, 5123, 5109, 5113, 5117, 5133, 5140, 5136, 5137, 5127, 5139, 5129, 5126, 5125, 5138, 5128, 5130, 5132, 5135, 5134, 5153, 5141, 5144, 5155, 5154, 5156, 5148, 5149, 5147, 5150, 5142, 5146, 5151, 5145, 5143, 5168, 5164, 5171, 5161, 5172, 5159, 5163, 5166, 5167, 5170, 5165, 5162, 5160, 5169, 5158, 5185, 5186, 5177, 5180, 5173, 5174, 5183, 5178, 5176, 5182, 5184, 5188, 5179, 5187, 5181, 5192, 5200, 5197, 5190, 5193, 5202, 5191, 5201, 5194, 5198, 5189, 5199, 5196, 5204, 5195, 5213, 5206, 5219, 5220, 5208, 5216, 5205, 5214, 5210, 5209, 5207, 5212, 5218, 5215, 5211, 5231, 5221, 5223, 5235, 5233, 5224, 5226, 5222, 5229, 5236, 5232, 5230, 5227, 5225, 5228, 5239, 5250, 5246, 5240, 5238, 5249, 5248, 5237, 5252, 5247, 5251, 5244, 5241, 5245, 5242, 5268, 5259, 5254, 5257, 5267, 5263, 5260, 5265, 5264, 5255, 5262, 5261, 5253, 5256, 5266, 5274, 5280, 5271, 5279, 5277, 5276, 5281, 5278, 5284, 5270, 5283, 5269, 5273, 5282, 5272, 5298, 5293, 5297, 5288, 5295, 5290, 5299, 5292, 5300, 5296, 5291, 5289, 5285, 5287, 5294, 5302, 5311, 5313, 5310, 5316, 5301, 5308, 5306, 5315, 5312, 5307, 5305, 5303, 5304, 5314, 5326, 5332, 5329, 5320, 5317, 5330, 5323, 5322, 5321, 5325, 5318, 5328, 5324, 5327, 5331, 5345, 5348, 5334, 5338, 5346, 5333, 5343, 5342, 5335, 5340, 5344, 5347, 5341, 5337, 5336, 5364, 5359, 5361, 5354, 5363, 5357, 5355, 5350, 5351, 5352, 5356, 5360, 5353, 5358, 5362, 5368, 5370, 5371, 5379, 5373, 5378, 5375, 5365, 5380, 5367, 5366, 5372, 5377, 5376, 5374, 5384, 5387, 5392, 5389, 5388, 5386, 5383, 5390, 5382, 5393, 5391, 5396, 5381, 5394, 5395, 5406, 5401, 5411, 5405, 5409, 5404, 5403, 5400, 5407, 5402, 5408, 5397, 5412, 5398, 5410, 5413, 5425, 5416, 5422, 5419, 5426, 5424, 5420, 5421, 5415, 5418, 5417, 5423, 5428, 5427, 5440, 5431, 5441, 5429, 5444, 5442, 5430, 5436, 5443, 5438, 5437, 5432, 5434, 5435, 5439, 5451, 5454, 5445, 5448, 5453, 5447, 5449, 5456, 5460, 5457, 5450, 5455, 5452, 5446, 5459, 5465, 5461, 5469, 5474, 5473, 5466, 5467, 5468, 5462, 5470, 5463, 5475, 5476, 5471, 5472, 5480, 5487, 5483, 5485, 5488, 5479, 5481, 5482, 5490, 5491, 5484, 5477, 5492, 5486, or 5489. In some embodiments, the editing template that encodes a protospacer edit comprises at its 3′ end any of the RTT sequences in Table 12.

[0321] In some embodiments, the editing template is at least 11 nucleotides in length and comprises at its 3′ end the sequence corresponding to sequence number 4020.

[0322] In some embodiments, the editing template is at least 12 nucleotides in length and comprises at its 3′ end the sequence corresponding to sequence number 4023, 4021, 4034, 4031, 4029, 4025, 4028, 4033, 4026, 4030, 4036, 4035, 4032, 4027, 4024, or 4022. In some embodiments, the editing template encodes a wild type NCF1 sequence and comprises at its 3′ end the sequence corresponding to sequence number 4021. In some embodiments, the editing template encodes a PAM silencing edit and comprises at its 3′ end the sequence corresponding to sequence number 4023, 4034, 4031, 4029, 4025, 4028, 4033, 4026, 4030, 4036, 4035, 4032, 4027, 4024, or 4022. In some embodiments, the editing template is 12 nucleotide in length.

[0323] In some embodiments, the editing template is at least 14 nucleotides in length and comprises at its 3′ end the sequence corresponding to sequence number 4061, 4056, 4057, 4062, 4067, 4060, 4055, 4058, 4053, 4066, 4068, 4065, 4054, 4063, 4064, or 4059. In some embodiments, the editing template encodes a wild type NCF1 sequence and comprises at its 3′ end the sequence corresponding to sequence number 4054. In some embodiments, the editing template encodes a PAM silencing edit and comprises at its 3′ end the sequence corresponding to sequence number 4061, 4056, 4057, 4062, 4067, 4060, 4055, 4058, 4053, 4066, 4068, 4065, 4063, 4064, or 4059. In some embodiments, the editing template is 14 nucleotides in length.

[0324] In some embodiments, the editing template is at least 16 nucleotides in length and comprises at its 3′ end the sequence corresponding to sequence number 4099, 4095, 4093, 4085, 4089, 4100, 4091, 4096, 4097, 4094, 4086, 4088, 4090, 4087, 4092, or 4098. In some embodiments, the editing template encodes a wild type NCF1 sequence and comprises at its 3′ end the sequence corresponding to sequence number 4098. In some embodiments, the editing template encodes a PAM silencing edit and comprises at its 3′ end the sequence corresponding to sequence number 4099, 4095, 4093, 4085, 4089, 4100, 4091, 4096, 4097, 4094, 4086, 4088, 4090, 4087, or 4092. In some embodiments, the editing template is 16 nucleotides in length.

[0325] In some embodiments, the editing template is 11 to 16 nucleotides in length, and comprises the sequence corresponding to sequence number 4020, 4023, 4021, 4034, 4031, 4029, 4025, 4028, 4033, 4026, 4030, 4036, 4035, 4032, 4027, 4024, 4022, 4043, 4042, 4037, 4050, 4051, 4044, 4049, 4041, 4040, 4052, 4045, 4039, 4038, 4048, 4046, 4047, 4061, 4056, 4057, 4062, 4067, 4060, 4055, 4058, 4053, 4066, 4068, 4065, 4054, 4063, 4064, 4059, 4070, 4078, 4072, 4082, 4081, 4069, 4074, 4080, 4073, 4075, 4071, 4083, 4077, 4084, 4079, 4076, 4099, 4095, 4093, 4085, 4089, 4100, 4091, 4096, 4097, 4094, 4086, 4088, 4090, 4087, 4092, or 4098. In some embodiments, the 11-16 nucleotide editing template encodes a wildtype NCF1 gene sequence and comprises the sequence corresponding to sequence number 4020, 4021, 4037, 4054, 4072, or 4098. In some embodiments, the 11-16 nucleotide editing template encodes one or more PAM silencing edits can comprise and comprises the sequence corresponding to sequence number 4023, 4034, 4031, 4029, 4025, 4028, 4033, 4026, 4030, 4036, 4035, 4032, 4027, 4024, 4022, 4043, 4042, 4050, 4051, 4044, 4049, 4041, 4040, 4052, 4045, 4039, 4038, 4048, 4046, 4047, 4061, 4056, 4057, 4062, 4067, 4060, 4055, 4058, 4053, 4066, 4068, 4065, 4063, 4064, 4059, 4070, 4078, 4082, 4081, 4069, 4074, 4080, 4073, 4075, 4071, 4083, 4077, 4084, 4079, 4076, 4099, 4095, 4093, 4085, 4089, 4100, 4091, 4096, 4097, 4094, 4086, 4088, 4090, 4087, or 4092.

[0326] In some embodiments, the editing template is 12 to 16 nucleotides in length and comprises the sequence corresponding to sequence number 4023, 4021, 4034, 4031, 4029, 4025, 4028, 4033, 4026, 4030, 4036, 4035, 4032, 4027, 4024, 4022, 4043, 4042, 4037, 4050, 4051, 4044, 4049, 4041, 4040, 4052, 4045, 4039, 4038, 4048, 4046, 4047, 4061, 4056, 4057, 4062, 4067, 4060, 4055, 4058, 4053, 4066, 4068, 4065, 4054, 4063, 4064, 4059, 4070, 4078, 4072, 4082, 4081, 4069, 4074, 4080, 4073, 4075, 4071, 4083, 4077, 4084, 4079, 4076, 4099, 4095, 4093, 4085, 4089, 4100, 4091, 4096, 4097, 4094, 4086, 4088, 4090, 4087, 4092, or 4098. In some embodiments, the 12-16 nucleotide editing template encodes one or more PAM silencing edits can comprise and comprises the sequence corresponding to sequence number 4023, 4034, 4031, 4029, 4025, 4028, 4033, 4026, 4030, 4036, 4035, 4032, 4027, 4024, 4022, 4043, 4042, 4050, 4051, 4044, 4049, 4041, 4040, 4052, 4045, 4039, 4038, 4048, 4046, 4047, 4061, 4056, 4057, 4062, 4067, 4060, 4055, 4058, 4053, 4066, 4068, 4065, 4063, 4064, 4059, 4070, 4078, 4082, 4081, 4069, 4074, 4080, 4073, 4075, 4071, 4083, 4077, 4084, 4079, 4076, 4099, 4095, 4093, 4085, 4089, 4100, 4091, 4096, 4097, 4094, 4086, 4088, 4090, 4087, or 4092. In some embodiments, the 12-16 nucleotide editing template encodes a wildtype NCF1 gene sequence and comprises the sequence corresponding to sequence number 4021, 4037, 4054, 4072, or 4098.

[0327] In some embodiments, the editing template is 12 nucleotides in length. In some embodiments, the 12-nucleotide editing template comprises the sequence corresponding to sequence number 4023, 4021, 4034, 4031, 4029, 4025, 4028, 4033, 4026, 4030, 4036, 4035, 4032, 4027, 4024, or 4022. In some embodiments, the 12-nucleotide editing template comprises the sequence corresponding to sequence number 4021.

[0328] The PBS can be, for example, 3 to 19 nucleotides in length and can comprise the sequence corresponding to any one of sequence numbers 4002-4018. In some cases, a PBS length of no more than 3 nucleotides less than the PEgRNA spacer length is chosen. In some embodiments, the PBS is at least 8 nucleotides in length and comprises at its 5′ end the sequence corresponding to any one of sequence numbers 4007-4018. In some embodiments, the PBS is at least 9, 10, or 11 nucleotides in length. In some embodiments, the PBS is at least 12 nucleotides in length and comprises at its 5′ end the sequence corresponding to any one of sequence numbers 4011-4018. In some embodiments, the PBS is 11 to 14 nucleotides in length, and comprises the sequence corresponding to anyone of sequence numbers 4010, 4011, 4012, and 4013. In some embodiments, the PBS is 12 to 14 nucleotide in length, and comprises the sequence corresponding to anyone of sequence numbers 4011, 4012, and 4013. In some embodiments, the PBS is 11 nucleotides in length and comprises the sequence corresponding to sequence number 4010. In some embodiments, the PBS is 12 nucleotides in length and comprises the sequence corresponding to sequence number 4011. In some embodiments, the PBS is 13 nucleotides in length and comprises the sequence corresponding to sequence number 4012. In some embodiments, the PBS is 13 nucleotides in length and comprises the sequence corresponding to sequence number 4013.

[0329] The PEgRNA can comprise, from 5′ to 3′, the spacer, the gRNA core, the editing template, and the PBS. The 3′ end of the editing template can be contiguous with the 5′ end of the PBS. The PEgRNA can comprise multiple RNA molecules or can be a single RNA molecule. Exemplary PEgRNAs provided in Table 12 can comprise a sequence corresponding to sequence number 5529, 5528, 5530, 5532, 5531, 5534, 5533, 5537, 5538, 5535, 5540, 5539, 5536, 5541, 5545, 5544, 5542, 5543, 5558, 5552, 5546, 5556, 5563, 5549, 5560, 5565, 5562, 5561, 5553, 5550, 5555, 5554, 5557, 5548, 5551, 5567, 5559, 5547, 5566, 5564, 5584, 5585, 5590, 5572, 5570, 5581, 5583, 5586, 5588, 5589, 5574, 5575, 5580, 5578, 5579, 5587, 5577, 5582, 5569, 5568, 5573, 5576, 5571, 5602, 5597, 5600, 5596, 5606, 5604, 5595, 5605, 5594, 5593, 5613, 5609, 5610, 5608, 5601, 5599, 5598, 5591, 5607, 5592, 5603, 5611, 5612, 5615, 5630, 5627, 5632, 5634, 5626, 5622, 5619, 5633, 5635, 5617, 5618, 5624, 5623, 5614, 5620, 5628, 5616, 5621, 5625, 5629, 5631, 5648, 5652, 5647, 5637, 5638, 5640, 5651, 5636, 5646, 5655, 5641, 5639, 5656, 5654, 5642, 5645, 5649, 5650, 5658, 5643, 5644, 5657, 5653, 5665, 5661, 5663, 5660, 5664, 5659, 5662, 5676, 5677, 5672, 5673, 5680, 5670, 5669, 5674, 5684, 5675, 5681, 5682, 5666, 5667, 5668, 5683, 5671, 5678, 5685, 5679, 5687, 5686, 5688, 5689, 5690, 5691, or 5692. In some embodiments, the PEgRNA comprises a sequence corresponding to sequence number 5637, 5682, 5689, 5683, 5690, 5692, 5563, 5606, 5647, 5605, 5644, 5672, 5538, 5613, 5614, 5638, 5665, 5618, 5659, 5661, 5688, 5529, 5537, 5543, 5561, 5570, 5542, 5569, 5571, 5634, 5667, 5668, 5666, 5592, 5604, or 5602. In some embodiments, the PEgRNA comprises a sequence corresponding to sequence number 5637, 5682, 5689, 5683, 5690, 5692, 5563, 5606, 5647, 5605, 5644, 5672, 5613, 5537, 5618, 5542, 5661, 5571, 5614, 5543, 5665, 5570, 5638, 5561, 5688, or 5634. In some embodiments, the PEgRNA comprises a sequence corresponding to sequence number 5637, 5563, 5683, 5605, 5659, 5569, 5618, or 5542.

[0330] Any PEgRNA exemplified in Table 12 may comprise, or further comprise, a 3′ motif at the 3′ end of the extension arm, for example, a hairpin-forming motif or a series of 1, 2, 3, 4, 5, 6, 7 or more U nucleotides. In some embodiments, the PEgRNA comprises 4 U nucleotides at its 3′ end. Without being bound by theory, such 3′ motifs are believed to increase PEgRNA stability. The PEgRNA may alternatively or additionally comprise one or more chemical modifications, such as phosphorothioate (PS) bond(s), 2′-O-methylated (2′-Ome) nucleotides, or a combination thereof. In some embodiments, the PEgRNA comprise 3′ mN*mN*mN*N and 5′mN*mN*mN* modifications, where m indicates that the nucleotide contains a 2′-O-Me modification and a * indicates the presence of a phosphorothioate bond. PEgRNA sequences exemplified in Table 12 may alternatively be adapted for expression from a DNA template, for example, by including a 5′ terminal G if the spacer of the PEgRNA begins with a nucleotide, other than G by including 6 or 7 U nucleotides at the 3′ end of the extension arm, or both.

[0331] Any of the PEgRNAs of Table 12 can be used in a Prime Editing system further comprising a nick guide RNA (ngRNA). Such ngRNA can comprise (a) a spacer comprising at its 3′ end a sequence corresponding to nucleotides 5-20 of any ngRNA spacer corresponding to sequence number 461, 462, 467, 431, 464, 466, 454, 457, 459, 433, 417, 449, 425, 439, 460, 426, 5495, 5501, 5510, 5502, 5509, 5496, 5497, 458, 5506, 5504, 5498, 450, 429, 423, 434, 436, 420, 418, 455, 5499, 432, 443, 424, 421, 451, 445, 435, 430, 446, 427, 422, 463, 452, 453, 444, 419, 442, 5508, 441, 5505, 447, 440, 438, 428, 5503, or 5500 and (b) a gRNA core capable of complexing with a Cas9 protein. For example, the sequence in the spacer of the ngRNA can comprise nucleotides 5-20, 4-20, 3-20, 2-20, or 1-20 of sequence number 461, 462, 467, 431, 464, 466, 454, 457, 459, 433, 417, 449, 425, 439, 460, 426, 5495, 5501, 5510, 5502, 5509, 5496, 5497, 458, 5506, 5504, 5498, 450, 429, 423, 434, 436, 420, 418, 455, 5499, 432, 443, 424, 421, 451, 445, 435, 430, 446, 427, 422, 463, 452, 453, 444, 419, 442, 5508, 441, 5505, 447, 440, 438, 428, 5503, or 5500. In some embodiments, the spacer of the ngRNA is a ngRNA spacer listed in Table 12. The ngRNA spacers in Table 12 are annotated with their PAM sequences, enabling selection of an appropriate Cas9 protein. It can be advantageous to select a ngRNA spacer that has a PAM sequence compatible with the Cas9 protein used in the Prime Editor, thus avoiding the need to use two different Cas9 proteins. The ngRNA is capable of directing a complexed Cas9 protein to bind the edit strand of the NCF1 gene (or NCF1B/NCF1C pseudogene); thus, a complexed Cas9 nickase containing a nuclease inactivating mutation in the HNH domain will nick the non-edit strand.

[0332] A PE3 ngRNA spacer has perfect complementarity to the edit strand both pre- and post-edit; a PE3b ngRNA spacer has perfect complementarity to the edit strand post-edit. A PE3b*N ngRNA spacer, where N is the integer following the * as indicated in the table, has perfect complementarity to the edit strand post-edit containing the specific edit encoded by the editing template annotated with the same *N. For example, a PE3b*1 ngRNA spacer has 100% complementary with the portion of the edit strand containing the edit encoded by a RTT annotated with *1. In some embodiments, a PE3 ngRNA spacer comprises perfect complementarity to the edit strand pre- and post-edit, and comprises at its 3′ end a sequence corresponding to nucleotides 15-20 of sequence numbers 461, 462, 467, 431, 464, 466, 454, 457, 459, 433, 417, 449, 425, 439, 460, 426, 458, 450, 429, 423, 434, 436, 420, 418, 455, 432, 443, 424, 421, 451, 445, 435, 430, 446, 427, 422, 463, 452, 453, 444, 419, 442, 441, 447, 440, 438, or 428. In some embodiments, a PE3 ngRNA spacer comprises perfect complementarity to the edit strand pre- and post-edit, and comprises at its 3′ end a sequence corresponding to sequence numbers 405, 403, 411, 406, 407, 413, 414, 409, 415, 404, 412, 416, 410, 408, 461, 462, 467, 431, 464, 466, 454, 457, 459, 433, 417, 449, 425, 439, 460, 426, 458, 450, 429, 423, 434, 436, 420, 418, 455, 432, 443, 424, 421, 451, 445, 435, 430, 446, 427, 422, 463, 452, 453, 444, 419, 442, 441, 447, 440, 438, 428, 473, 472, 471, 474, 469, 470, 468, 476, 478, 479, 477, 480, or 475.

[0333] In some embodiments, a PE3b ngRNA spacer comprises at its 3′ end:
[0334] SEQ ID NO 5495 wherein the RTT of the PEgRNA comprises at its 3′ end SEQ ID NO 4022,
[0335] SEQ ID NO 5501 wherein the RTT of the PEgRNA comprises at its 3′ end SEQ ID NO 4025,
[0336] SEQ ID NO 5510 wherein the RTT of the PEgRNA comprises at its 3′ end SEQ ID NO 4029,
[0337] SEQ ID NO 5502 wherein the RTT of the PEgRNA comprises at its 3′ end SEQ ID NO 4028,
[0338] SEQ ID NO 5509 wherein the RTT of the PEgRNA comprises at its 3′ end SEQ ID NO 4026,
[0339] SEQ ID NO 5496 wherein the RTT of the PEgRNA comprises at its 3′ end SEQ ID NO 4035,
[0340] SEQ ID NO 5497 wherein the RTT of the PEgRNA comprises at its 3′ end SEQ ID NO 4031,
[0341] SEQ ID NO 5506 wherein the RTT of the PEgRNA comprises at its 3′ end SEQ ID NO 4024,
[0342] SEQ ID NO 5504 wherein the RTT of the PEgRNA comprises at its 3′ end SEQ ID NO 4030,
[0343] SEQ ID NO 5498 wherein the RTT of the PEgRNA comprises at its 3′ end SEQ ID NO 4032,
[0344] SEQ ID NO 5499 wherein the RTT of the PEgRNA comprises at its 3′ end SEQ ID NO 4027,
[0345] SEQ ID NO 5508 wherein the RTT of the PEgRNA comprises at its 3′ end SEQ ID NO 4023,
[0346] SEQ ID NO 5505 wherein the RTT of the PEgRNA comprises at its 3′ end SEQ ID NO 4033,
[0347] SEQ ID NO 5503 wherein the RTT of the PEgRNA comprises at its 3′ end SEQ ID NO 4034,
[0348] SEQ ID 5500 NO wherein the RTT of the PEgRNA comprises at its 3′ end SEQ ID NO 4036.

[0349] In some embodiments, the nick-to-nick distance between the ngRNA generated nick and the PEgRNA generated nick is 41 to 96 nucleotides. In some embodiments, the sequence in the spacer of the ngRNA can comprise nucleotides 5-20 of sequence number 436, 2130, 442, 421, 445, 451, 424, 422, 429, 436, or 424. In some embodiments, the sequence in the spacer of the ngRNA can comprise the sequence corresponding to sequence number 436, 2130, 442, 421, 445, 451, 424, 422, 429, 436, or 424.

[0350] Exemplary ngRNA provided in Table 12 can comprise a sequence corresponding to sequence number 579, 578, 581, 580, 5698, 595, 592, 594, 5700, 5699, 5702, 584, 582, 586, 593, 5694, 5707, 5701, 5697, 5704, 591, 589, 583, 587, 5703, 588, 5696, 590, 5693, 5705, 5695, 5706, 585, 5712, 5708, 5721, 5710, 5720, 5718, 5709, 5716, 5719, 5713, 5715, 5711, 5714, 5722, 5717, 607, 603, 602, 596, 5521, 481, 5515, 5523, 5526, 5520, 5522, 5516, 5525, 5527, 5517, 598, 605, 5518, 608, 600, 5514, 5524, 5513, 601, 597, 604, 599, 606, or 5519. In some embodiments, the ngRNA comprises a sequence corresponding to sequence number 584, 606, 585, 2143, 595, 594, 583, 592, 591, 590, 599, 2145, 604, 597, 602, 596, 598, or 600.

[0351] Any ngRNA sequence provided in Table 12 may comprise, or further comprise, a 3′ motif at their 3′ end, for example, a series of 1, 2, 3, 4, 5, 6, 7 or more U nucleotides. In some embodiments, the ngRNA comprises 4 U nucleotides at its 3′ end. Without being bound by theory, such 3′ motifs are believed to increase ngRNA stability. The ngRNA may alternatively or additionally comprise one or more chemical modifications, such as phosphorothioate (PS) bond(s), 2′-O-methylated (2′-Ome) nucleotides, or a combination thereof. In some embodiments, the ngRNA comprise 3′ mN*mN*mN*N and 5′mN*mN*mN* modifications, where m indicates that the nucleotide contains a 2′-O-Me modification and a * indicates the presence of a phosphorothioate bond. NgRNA sequences may alternatively be adapted for expression from a DNA template, for example, by including a 5′ terminal G if the spacer of the ngRNA begins with a nucleotide other than G, by including 6 or 7 U nucleotides at the 3′ end of the ngRNA, or both.

[0352] Exemplary PEgRNA and ngRNA from Table 12 are further excerpted in Table 77 below. All these sequences contained in Table 77 are RNA sequences; however, the Us are presented as Ts to be consistent with ST.26 convention.

TABLE 77
Exemplary PEgRNA and ngRNA from Table 12

| Description | Sequence |
|---|---|
| PEgRNA | TCACCAGGAACATGTACCTGGTTTTAGAGCTAGAAATAGCAAGTTA |
| | AAATAAGGCTAGTCCGTTATCAACTTGAAAAAGTGGCACCGAGTCG |
| | GTGCTTTCCCCCAGGTGTACATGTTCCTTTT (SEQ ID NO: 5618; |
| | Length: 123) |
| | spacer: TCACCAGGAACATGTACCTG (SEQ ID NO: 3999; Length: 20) |
| | RTT: TTTCCCCCAGGT (SEQ ID NO: 4021; Length: 12) |
| | PBS: GTACATGTTCC (SEQ ID NO: 4010; Length: 11) |
| PEgRNA | TCACCAGGAACATGTACCTGGTTTTAGAGCTAGAAATAGCAAGTTA |
| | AAATAAGGCTAGTCCGTTATCAACTTGAAAAAGTGGCACCGAGTCG |
| | GTGCTTTCCCCCAGGTGTACATGTTCC (SEQ ID NO: 5542; Length: 119) |
| | spacer: TCACCAGGAACATGTACCTG (SEQ ID NO: 3999; Length: 20) |
| | RTT: TTTCCCCCAGGT (SEQ ID NO: 4021; Length: 12) |
| | PBS: GTACATGTTCC (SEQ ID NO: 4010; Length: 11) |
| PEgRNA | TCACCAGGAACATGTACCTGGTTTTAGAGCTAGAAATAGCAAGTTA |
| | AAATAAGGCTAGTCCGTTATCAACTTGAAAAAGTGGCACCGAGTCG |
| | GTGCTTTCCCCCAGGTGTACATGTTCCTTTTT (SEQ ID NO: 5637; |
| | Length: 124) |
| | spacer: TCACCAGGAACATGTACCTG (SEQ ID NO: 3999; Length: 20) |
| | RTT: TTTCCCCCAGGT (SEQ ID NO: 4021; Length: 12) |
| | PBS: GTACATGTTCCT (SEQ ID NO: 4011; Length: 12) |
| PEgRNA | TCACCAGGAACATGTACCTGGTTTTAGAGCTAGAAATAGCAAGTTA |
| | AAATAAGGCTAGTCCGTTATCAACTTGAAAAAGTGGCACCGAGTCG |
| | GTGCTTTCCCCCAGGTGTACATGTTCCT (SEQ ID NO: 5563; Length: 120) |
| | spacer: TCACCAGGAACATGTACCTG (SEQ ID NO: 3999; Length: 20) |
| | RTT: TTTCCCCCAGGT (SEQ ID NO: 4021; Length: 12) |
| | PBS: GTACATGTTCCT (SEQ ID NO: 4011; Length: 12) |
| PEgRNA | TCACCAGGAACATGTACCTGGTTTTAGAGCTAGAAATAGCAAGTTA |
| | AAATAAGGCTAGTCCGTTATCAACTTGAAAAAGTGGCACCGAGTCG |
| | GTGCTTTCCCCCAGGTGTACATGTTCCTGTTTT (SEQ ID NO: 5659; |
| | Length: 125) |
| | spacer: TCACCAGGAACATGTACCTG (SEQ ID NO: 3999; Length: 20) |
| | RTT: TTTCCCCCAGGT (SEQ ID NO: 4021; Length: 12) |
| | PBS: GTACATGTTCCTG (SEQ ID NO: 4012; Length: 13) |
| PEgRNA | TCACCAGGAACATGTACCTGGTTTTAGAGCTAGAAATAGCAAGTTA |
| | AAATAAGGCTAGTCCGTTATCAACTTGAAAAAGTGGCACCGAGTCG |
| | GTGCTTTCCCCCAGGTGTACATGTTCCTG (SEQ ID NO: 5569; |
| | Length: 121) |
| | spacer: TCACCAGGAACATGTACCTG (SEQ ID NO: 3999; Length: 20) |
| | RTT: TTTCCCCCAGGT (SEQ ID NO: 4021; Length: 12) |
| | PBS: GTACATGTTCCTG (SEQ ID NO: 4012; Length: 13) |
| PEgRNA | TCACCAGGAACATGTACCTGGTTTTAGAGCTAGAAATAGCAAGTTA |
| | AAATAAGGCTAGTCCGTTATCAACTTGAAAAAGTGGCACCGAGTCG |
| | GTGCTTTCCCCCAGGTGTACATGTTCCTGGTTTT (SEQ ID NO: 5683; |
| | Length: 126) |
| | spacer: TCACCAGGAACATGTACCTG (SEQ ID NO: 3999; Length: 20) |
| | RTT: TTTCCCCCAGGT (SEQ ID NO: 4021; Length: 12) |
| | PBS: GTACATGTTCCTGG (SEQ ID NO: 4013; Length: 14) |
| PEgRNA | TCACCAGGAACATGTACCTGGTTTTAGAGCTAGAAATAGCAAGTTA |
| | AAATAAGGCTAGTCCGTTATCAACTTGAAAAAGTGGCACCGAGTCG |
| | GTGCTTTCCCCCAGGTGTACATGTTCCTGG (SEQ ID NO: 5605; |
| | Length: 122) |
| | spacer: TCACCAGGAACATGTACCTG (SEQ ID NO: 3999; Length: 20) |
| | RTT: TTTCCCCCAGGT (SEQ ID NO: 4021; Length: 12) |
| | PBS: GTACATGTTCCTGG (SEQ ID NO: 4013; Length: 14) |
| PE3ngRNA | GGTCCTCACCCCAATCCTCTGTTTTAGAGCTAGAAATAGCAAGTTAA |
| | AATAAGGCTAGTCCGTTATCAACTTGAAAAAGTGGCACCGAGTCGG |
| | TGCTTTT (SEQ ID NO: 600; Length: 100) |
| | spacer: GGTCCTCACCCCAATCCTCT (SEQ ID NO: 422; Length: 20) |
| PE3ngRNA | GGTCCTCACCCCAATCCTCTGTTTTAGAGCTAGAAATAGCAAGTTAA |
| | AATAAGGCTAGTCCGTTATCAACTTGAAAAAGTGGCACCGAGTCGG |
| | TGC (SEQ ID NO: 590; Length: 96) |
| | spacer: GGTCCTCACCCCAATCCTCT (SEQ ID NO: 422; Length: 20) |
| PE3ngRNA | TCCTCTGGGCTTCCTCCAGTGTTTTAGAGCTAGAAATAGCAAGTTAA |
| | AATAAGGCTAGTCCGTTATCAACTTGAAAAAGTGGCACCGAGTCGG |
| | TGCTTTT (SEQ ID NO: 598; Length: 100) |
| | spacer: TCCTCTGGGCTTCCTCCAGT (SEQ ID NO: 424; Length: 20) |
| PE3ngRNA | TCCTCTGGGCTTCCTCCAGTGTTTTAGAGCTAGAAATAGCAAGTTAA |
| | AATAAGGCTAGTCCGTTATCAACTTGAAAAAGTGGCACCGAGTCGG |
| | TGC (SEQ ID NO: 591; Length: 96) |
| | spacer: TCCTCTGGGCTTCCTCCAGT (SEQ ID NO: 424; Length: 20) |
| PE3ngRNA | TGCACACAGCAAAGCCTCTTGTTTTAGAGCTAGAAATAGCAAGTTA |
| | AAATAAGGCTAGTCCGTTATCAACTTGAAAAAGTGGCACCGAGTCG |
| | GTGCTTTT (SEQ ID NO: 599; Length: 100) |
| | spacer: TGCACACAGCAAAGCCTCTT (SEQ ID NO: 436; Length: 20) |
| PE3ngRNA | TGCACACAGCAAAGCCTCTTGTTTTAGAGCTAGAAATAGCAAGTTA |
| | AAATAAGGCTAGTCCGTTATCAACTTGAAAAAGTGGCACCGAGTCG |
| | GTGC (SEQ ID NO: 585; Length: 96) |
| | spacer: TGCACACAGCAAAGCCTCTT (SEQ ID NO: 436; Length: 20) |
| PE3ngRNA | ACACAGCAAAGCCTCTTTGGGTTTTAGAGCTAGAAATAGCAAGTTA |
| | AAATAAGGCTAGTCCGTTATCAACTTGAAAAAGTGGCACCGAGTCG |
| | GTGCTTTT (SEQ ID NO: 606; Length: 100) |
| PE3ngRNA | spacer: ACACAGCAAAGCCTCTTTGG (SEQ ID NO: 429; Length: 20) |
| | ACACAGCAAAGCCTCTTTGGGTTTTAGAGCTAGAAATAGCAAGTTA |
| | AAATAAGGCTAGTCCGTTATCAACTTGAAAAAGTGGCACCGAGTCG |
| | GTGC (SEQ ID NO: 584; Length: 96) |
| | spacer: ACACAGCAAAGCCTCTTTGG (SEQ ID NO: 429; Length: 20) |

[0353] Table 38

[0354] Table 38 provides Prime Editing guide RNAs (PEgRNAs) that can be used with any Prime Editor containing a Cas9 protein capable of recognizing an AG or AGG PAM sequence. The PEgRNAs of Table 38 can also be used in Prime Editing systems further comprising a nick guide RNA (ngRNA). Such PEgRNAs and Prime Editing systems can be used, for example, to correct or edit an c.73_74 ΔGT mutation in NCF1, or to edit the corresponding site in NCF1B or NCF1C.

[0355] The PEgRNAs exemplified in Table 38 comprise: (a) a spacer comprising at its 3′ end a sequence corresponding to sequence number 19077; (b) a gRNA core capable of complexing with a Cas9 protein, and (c) an extension arm comprising: (i) an editing template at least 10 nucleotides in length and comprising at its 3′ end a sequence corresponding to sequence number 19101, 19103, 19100, or 19102, and (ii) a prime binding site (PBS) comprising at its 5′ end a sequence corresponding to sequence number 16085.

[0356] The PEgRNA spacer can be, for example, 16-22 nucleotides in length and can comprise the sequence corresponding to any one of sequence numbers 19077-19083. In some embodiments, the PEgRNA spacer comprises sequence number 19081. The PEgRNA spacers in Table 38 are annotated with their PAM sequence(s), enabling the selection of an appropriate Cas9 protein.

[0357] The editing template can be referred to as a reverse transcription template (RTT). The editing template comprises one or more intended nucleotide edits for incorporation into the target NCF1 (or NCF1B/NCF1C) gene by Prime Editing. In some embodiments, the editing template comprises at least 4 nucleotides that is 5′ to the 5′ most intended edit, wherein the at least 4 nucleotides are complementary to the edit strand of the target gene.

[0358] In some embodiments, the editing template encodes a wildtype NCF1 gene sequence. For example, the editing template can comprise at its 3′ end the sequence corresponding to sequence number 19103, 19106, 19108, 19112, 19116, 19123, 19126, 19129, 19133, 19136, 19142, 19144, 19150, 19154, 19159, 19160, 19165, 19169, 19174, 19176, 19180, 19185, 19190, 19194, 19197, 19203, 19206, 19211, 19214, 19216, 19221, 19226, 19229, 19232, 19238, 19241, 19247, 19250, 19254, 19257, 19263, 19265, 19268, 19275, 19279, 19283, 19284, 19289, 19293, 19298, 19303, 19305, 19308, 19314, 19318, 19321, 19327, 19328, 19333, 19338, 19343, 19345, 19349, 19352, 19357, 19361, 19364, 19368, 19373, 19379, 19383, 19385, 19390, 19392, 19399, 19403, 19405, 19408, 19415, 19417, 19420, 19426, 19429, 19433, 19438, 19441, 19446, 19451, 19453, 19456, 19461, 19466, 19471, 19473. In some embodiments, the editing template can comprise at its 3′ end the sequence corresponding to sequence number 19103. In some embodiments, the editing template can encode one or more synonymous edits relative to the wildtype NCF1 gene. In some cases, a synonymous edit is a Valine recode edit. For example, the editing template can comprise at its 3′ end the sequence corresponding to sequence number 19101, 19100, 19102, 19105, 19104, 19107, 19110, 19109, 19111, 19113, 19115, 19114, 19118, 19119, 19117, 19122, 19121, 19120, 19127, 19124, 19125, 19131, 19130, 19128, 19135, 19134, 19132, 19139, 19138, 19137, 19141, 19140, 19143, 19145, 19147, 19146, 19149, 19148, 19151, 19155, 19152, 19153, 19158, 19157, 19156, 19161, 19163, 19162, 19167, 19166, 19164, 19168, 19171, 19170, 19173, 19175, 19172, 19179, 19177, 19178, 19181, 19182, 19183, 19187, 19184, 19186, 19189, 19191, 19188, 19193, 19195, 19192, 19199, 19196, 19198, 19201, 19202, 19200, 19207, 19204, 19205, 19209, 19210, 19208, 19212, 19213, 19215, 19218, 19217, 19219, 19222, 19220, 19223, 19227, 19224, 19225, 19228, 19230, 19231, 19234, 19235, 19233, 19236, 19239, 19237, 19240, 19243, 19242, 19244, 19245, 19246, 19248, 19249, 19251, 19253, 19255, 19252, 19256, 19258, 19259, 19260, 19262, 19261, 19266, 19267, 19264, 19269, 19270, 19271, 19272, 19273, 19274, 19277, 19276, 19278, 19281, 19280, 19282, 19287, 19286, 19285, 19290, 19291, 19288, 19295, 19292, 19294, 19296, 19297, 19299, 19302, 19301, 19300, 19304, 19307, 19306, 19311, 19310, 19309, 19313, 19312, 19315, 19316, 19317, 19319, 19320, 19323, 19322, 19326, 19325, 19324, 19330, 19331, 19329, 19332, 19334, 19335, 19339, 19337, 19336, 19340, 19341, 19342, 19347, 19344, 19346, 19350, 19351, 19348, 19355, 19354, 19353, 19358, 19356, 19359, 19362, 19363, 19360, 19367, 19366, 19365, 19370, 19369, 19371, 19372, 19375, 19374, 19377, 19376, 19378, 19381, 19380, 19382, 19384, 19387, 19386, 19388, 19389, 19391, 19395, 19394, 19393, 19396, 19398, 19397, 19400, 19401, 19402, 19406, 19407, 19404, 19410, 19411, 19409, 19412, 19414, 19413, 19419, 19418, 19416, 19423, 19422, 19421, 19424, 19425, 19427, 19428, 19431, 19430, 19432, 19434, 19435, 19439, 19436, 19437, 19440, 19442, 19443, 19445, 19444, 19447, 19450, 19449, 19448, 19454, 19452, 19455, 19458, 19459, 19457, 19460, 19463, 19462, 19464, 19467, 19465, 19468, 19469, 19470, 19474, 19475, 19472. In some embodiments, the editing template encodes a Valine recode for Valine codon GTA, and comprises at its 3′ end a sequence corresponding to sequence number 19101, 19107, 19111, 19113, 19117, 19121, 19125, 19131, 19135, 19139, 19141, 19146, 19151, 19153, 19157, 19163, 19166, 19170, 19172, 19177, 19182, 19184, 19188, 19192, 19196, 19201, 19204, 19208, 19215, 19218, 19223, 19224, 19231, 19235, 19236, 19242, 19245, 19248, 19253, 19256, 19262, 19266, 19269, 19272, 19278, 19281, 19287, 19288, 19295, 19297, 19302, 19304, 19311, 19312, 19316, 19320, 19326, 19331, 19335, 19336, 19341, 19347, 19348, 19353, 19359, 19363, 19367, 19370, 19375, 19376, 19382, 19387, 19388, 19395, 19398, 19401, 19407, 19409, 19414, 19418, 19423, 19425, 19431, 19435, 19436, 19443, 19444, 19449, 19452, 19458, 19462, 19464, 19469, or 19475. In some embodiments, the editing template encodes a Valine recode for Valine codon GTC, and comprises at its 3′ end a sequence corresponding to sequence number 19102, 19105, 19109, 19114, 19119, 19122, 19124, 19128, 19132, 19137, 19140, 19145, 19149, 19152, 19158, 19162, 19164, 19171, 19173, 19179, 19183, 19187, 19189, 19193, 19198, 19200, 19207, 19210, 19213, 19217, 19220, 19225, 19228, 19233, 19239, 19243, 19246, 19251, 19252, 19258, 19261, 19267, 19270, 19274, 19277, 19282, 19286, 19290, 19292, 19296, 19300, 19307, 19310, 19313, 19317, 19323, 19324, 19329, 19334, 19339, 19340, 19344, 19351, 19354, 19356, 19362, 19365, 19371, 19372, 19378, 19381, 19386, 19389, 19393, 19396, 19402, 19404, 19410, 19413, 19416, 19421, 19424, 19430, 19434, 19437, 19442, 19445, 19448, 19455, 19457, 19463, 19467, 19470, or 19474. In some embodiments, the editing template encodes a Valine recode for Valine codon GTT, and comprises at its 3′ end a sequence corresponding to sequence number 19100, 19104, 19110, 19115, 19118, 19120, 19127, 19130, 19134, 19138, 19143, 19147, 19148, 19155, 19156, 19161, 19167, 19168, 19175, 19178, 19181, 19186, 19191, 19195, 19199, 19202, 19205, 19209, 19212, 19219, 19222, 19227, 19230, 19234, 19237, 19240, 19244, 19249, 19255, 19259, 19260, 19264, 19271, 19273, 19276, 19280, 19285, 19291, 19294, 19299, 19301, 19306, 19309, 19315, 19319, 19322, 19325, 19330, 19332, 19337, 19342, 19346, 19350, 19355, 19358, 19360, 19366, 19369, 19374, 19377, 19380, 19384, 19391, 19394, 19397, 19400, 19406, 19411, 19412, 19419, 19422, 19427, 19428, 19432, 19439, 19440, 19447, 19450, 19454, 19459, 19460, 19465, 19468, or 19472.

[0359] In some embodiments, the editing template is at least 13 nucleotides in length and comprises at its 3′ end the sequence corresponding to sequence number 19112, 19113, 19114, or 19115. In some embodiments, the editing template encoding a wildtype NCF1 sequence is at least 13 nucleotides in length and comprises at its 3′ end the sequence corresponding to sequence number 19112. In some embodiments, the editing template encoding a Valine recode is at least 13 nucleotides in length and comprises at its 3′ end the sequence corresponding to sequence number 19113, 19114, or 19115.

[0360] In some embodiments, the editing template is at least 15 nucleotides in length and comprises at its 3′ end the sequence corresponding to sequence number 19120, 19121, 19122, or 19123. In some embodiments, the editing template encoding a wildtype NCF1 sequence is at least 15 nucleotides in length and comprises at its 3′ end the sequence corresponding to sequence number 19123. In some embodiments, the editing template encoding a Valine recode is at least 15 nucleotides in length and comprises at its 3′ end the sequence corresponding to sequence number 19120, 19121, or 19122.

[0361] In some embodiments, the editing template is at least 16 nucleotides in length and comprises at its 3′ end the sequence corresponding to sequence number 19127, 19126, 19124, or 19125. In some embodiments, the editing template encoding a wildtype NCF1 sequence is at least 16 nucleotides in length and comprises at its 3′ end the sequence corresponding to sequence number 19126. In some embodiments, the editing template encoding a Valine recode is at least 16 nucleotides in length and comprises at its 3′ end the sequence corresponding to sequence number 19127, 19124, or 19125.

[0362] In some embodiments, the editing template encoding a wildtype NCF1 sequence is at least 17 nucleotides in length and comprises at its 3′ end the sequence corresponding to sequence number 19128, 19129, 19230, or 19131. In some embodiments, the editing template is at least 17 nucleotides in length and comprises at its 3′ end the sequence corresponding to sequence number 19129. In some embodiments, the editing template encoding a Valine recode is at least 17 nucleotides in length and comprises at its 3′ end the sequence corresponding to sequence number 19128, 19230, or 19131.

[0363] In some embodiments, the editing template is 13 to 17 nucleotides in length and comprises the sequence corresponding to sequence number 19112, 19116, 19123, 19126, 19129, 19115, 19114, 19118, 19119, 19117, 19122, 19121, 19120, 19127, 19124, 19125, 19131, 19130, or 19128. In some embodiments, the editing template encoding a wildtype NCF1 sequence is 13 to 17 nucleotides in length, and comprises the sequence corresponding to sequence number 19112, 19116, 19123, 19126, or 19129. In some embodiments, the editing template encoding a Valine recode is 13-17 nucleotides in length and comprises the sequence corresponding to sequence number 19115, 19114, 19118, 19119, 19117, 19122, 19121, 19120, 19127, 19124, 19125, 19131, 19130, or 19128.

[0364] In some embodiments, the editing template is 13 nucleotides in length and comprises the sequence corresponding to sequence number 19112, 19113, 19114, or 19115. In some embodiments, the editing template encoding a wildtype NCF1 sequence is 13 nucleotides in length and comprises the sequence corresponding to sequence number 19112. In some embodiments, the editing template encoding a Valine recode is 13 nucleotides in length and comprises the sequence corresponding to sequence number 19113, 19114, or 19115.

[0365] In some embodiments, the editing template is 15 nucleotides in length and comprises the sequence corresponding to sequence number 19120, 19121, 19122, or 19123. In some embodiments, the editing template encoding a wildtype NCF1 sequence is 15 nucleotides in length and comprises the sequence corresponding to sequence number 19123. In some embodiments, the editing template encoding a Valine recode is 15 nucleotides in length and comprises the sequence corresponding to sequence number 19120, 19121, or 19122.

[0366] In some embodiments, the editing template is 16 nucleotides in length and comprises the sequence corresponding to sequence number 19127, 19126, 19124, or 19125. In some embodiments, the editing template encoding a wildtype NCF1 sequence is 16 nucleotides in length and comprises the sequence corresponding to sequence number 19126. In some embodiments, the editing template encoding a Valine recode is 16 nucleotides in length and comprises the sequence corresponding to sequence number 19127, 19124, or 19125.

[0367] In some embodiments, the editing template encoding a wildtype NCF1 sequence is 17 nucleotides in length and comprises the sequence corresponding to sequence number 19128, 19129, 19230, or 19131. In some embodiments, the editing template is 17 nucleotides in length and comprises the sequence corresponding to sequence number 19129. In some embodiments, the editing template encoding a Valine recode is 17 nucleotides in length and comprises the sequence corresponding to sequence number 19128, 19230, or 19131.

[0368] The PBS can be, for example, 3 to 19 nucleotides in length and can comprise the sequence corresponding to any one of sequence numbers 16085, 19084, 19085, 19086, 19087, 19088, 19089, 19090, 19091, 19092, 19093, 19094, 19095, 19096, 19097, 19098, and 19099. In some cases, a PBS length of no more than 3 nucleotides less than the PEgRNA spacer length is chosen. In some embodiments, the PBS is at least 12 nucleotides in length and comprises at its 5′ end the sequence corresponding to any one of sequence numbers 19092-19099. In some embodiments, the PBS is 12 nucleotides in length and comprises the sequence corresponding to sequence number 19092. In some embodiments, the PBS is at least 13 nucleotides in length and comprises at its 5′ end the sequence corresponding to any one of sequence numbers 19093-19099. In some embodiments, the PBS is 13 nucleotides in length and comprises the sequence corresponding to sequence number 19093. In some embodiments, the PBS is at least 14 nucleotides in length and comprises at its 5′ end the sequence corresponding to any one of sequence numbers 19094-19099. In some embodiments, the PBS is 14 nucleotides in length and comprises the sequence corresponding to sequence number 19094. In some embodiments, the PBS is 12 to 14 nucleotides in length, and comprises the sequence corresponding to anyone of sequence numbers 19092-19094.

[0369] The PEgRNA can comprise, from 5′ to 3′, the spacer, the gRNA core, the editing template, and the PBS. The 3′ end of the editing template can be contiguous with the 5′ end of the PBS. The PEgRNA can comprise multiple RNA molecules or can be a single RNA molecule. Exemplary PEgRNAs provided in Table 38 can comprise a sequence corresponding to sequence number 19481, 19482, 19483, 19484, 19486, 19485, 19488, 19490, 19489, 19487, 19493, 19491, 19492, 19495, 19499, 19498, 19502, 19500, 19496, 19501, 19494, 19497, 19503, 19509, 19506, 19507, 19505, 19510, 19504, 19508, 19514, 19519, 19517, 19518, 19511, 19515, 19513, 19516, 19512, 19523, 19527, 19522, 19526, 19525, 19520, 19521, 19524, 19534, 19532, 19530, 19536, 19531, 19529, 19528, 19537, 19533, 19535, 19538, 19541, 19543, 19544, 19542, 19540, 19545, 19539, 19549, 19552, 19551, 19550, 19547, 19548, 19546, 19553, 19554, 19556, 19557, 19555, 19558, 19560, 19559, 19562, 19561, 19563. In some embodiments, the PEgRNA comprises a sequence corresponding to sequence number 19534, 19559, 19550, 19563, 19497, 19531, 19508, 19542, 19516, 19547, 19546, 19512, 19526, 19557, 19524, 19554, 19537, 19560, 19545, 19561, 19535, 19558, 19543, or 19562. In some embodiments, the PEgRNA comprises a sequence corresponding to sequence number 19560 or 19537. In some embodiments, the PEgRNA comprises a sequence corresponding to sequence number 19562 or 19543.

[0370] Any PEgRNA exemplified in Table 38 may comprise, or further comprise, a 3′ motif at the 3′ end of the extension arm, for example, a hairpin-forming motif or a series of 1, 2, 3, 4, 5, 6, 7 or more U nucleotides. In some embodiments, the PEgRNA comprises 4 U nucleotides at its 3′ end. Without being bound by theory, such 3′ motifs are believed to increase PEgRNA stability. The PEgRNA may alternatively or additionally comprise one or more chemical modifications, such as phosphorothioate (PS) bond(s), 2′-O-methylated (2′-Ome) nucleotides, or a combination thereof. In some embodiments, the PEgRNA comprise 3′ mN*mN*mN*N and 5′mN*mN*mN* modifications, where m indicates that the nucleotide contains a 2′-O-Me modification and a * indicates the presence of a phosphorothioate bond. PEgRNA sequences exemplified in Table 38 may alternatively be adapted for expression from a DNA template, for example, by including a 5′ terminal G if the spacer of the PEgRNA begins with a nucleotide, other than G by including 6 or 7 U nucleotides at the 3′ end of the extension arm, or both.

[0371] Any of the PEgRNAs of Table 38 can be used in a Prime Editing system further comprising a nick guide RNA (ngRNA). Such ngRNA can comprise (a) a spacer comprising at its 3′ end a sequence corresponding to nucleotides 5-20 of any ngRNA spacer corresponding to sequence number 840, 830, 809, 829, 431, 460, 838, 839, 2133, 848, 806, 461, 794, 803, 19478, 2131, 2130, 796, 842, 2139, 856, 849, 833, 828, 462, 467, 810, 464, 843, 832, 801, 2134, 804, 807, 802, 19479, 2138, 800, 857, 792, 2132, 808, 2137, 2135, 19480, 835, 841, 455, 19477, or 2136, and (b) a gRNA core capable of complexing with a Cas9 protein. For example, the sequence in the spacer of the ngRNA can comprise nucleotides 5-20, 4-20, 3-20, 2-20, or 1-20 of sequence number 840, 830, 809, 829, 431, 460, 838, 839, 2133, 848, 806, 461, 794, 803, 19478, 2131, 2130, 796, 842, 2139, 856, 849, 833, 828, 462, 467, 810, 464, 843, 832, 801, 2134, 804, 807, 802, 19479, 2138, 800, 857, 792, 2132, 808, 2137, 2135, 19480, 835, 841, 455, 19477, or 2136. In some embodiments, the ngRNA spacer comprises a sequence corresponding to sequence number 766, 767, 768, 769, 770, 404, 2129, 409, 1820, 772, 774, 407, 406, 405, 777, 790, 408, 840, 830, 809, 829, 431, 460, 838, 839, 2133, 848, 806, 461, 794, 803, 19478, 2131, 2130, 796, 842, 2139, 856, 849, 833, 828, 462, 467, 810, 464, 843, 832, 801, 2134, 804, 807, 802, 19479, 2138, 800, 857, 792, 2132, 808, 2137, 2135, 19480, 835, 841, 455, 19477, 2136, 473, 472, or 479. In some embodiments, the ngRNA spacer is 16 nucleotides in length and comprises the sequence corresponding the sequence number 766. In some embodiments, the ngRNA spacer is 17 nucleotides in length and comprises the sequence corresponding to sequence number 767, 768, 769, or 770. In some embodiments, the ngRNA spacer is 17 nucleotides in length and comprises the sequence corresponding to sequence number 770. In some embodiments, the spacer of the ngRNA is a ngRNA spacer listed in Table 38. The ngRNA spacers in Table 38 are annotated with their PAM sequences, enabling selection of an appropriate Cas9 protein. It can be advantageous to select a ngRNA spacer that has a PAM sequence compatible with the Cas9 protein used in the Prime Editor, thus avoiding the need to use two different Cas9 proteins. The ngRNA is capable of directing a complexed Cas9 protein to bind the edit strand of the NCF1 gene (or NCF1B/NCF1C pseudogene); thus, a complexed Cas9 nickase containing a nuclease inactivating mutation in the HNH domain will nick the non-edit strand.

[0372] A PE3 ngRNA spacer has perfect complementarity to the edit strand both pre- and post-edit; a PE3b ngRNA spacer has perfect complementarity to the edit strand post-edit. A PE3b*N ngRNA spacer, where N is the integer following the * as indicated in the table, has perfect complementarity to the edit strand post-edit containing the specific edit encoded by the editing template annotated with the same *N. For example, a PE3b*1 ngRNA spacer has 100% complementary with the portion of the edit strand containing the edit encoded by a RTT annotated with *1.

[0373] In some embodiments, the PE3b ngRNA spacer has perfect complementarity to a wild type NCF1 sequence encoded by the RTT, and comprises at its 3′ end a sequence corresponding to sequence number 766, 767, 768, 769, 770, 829, 839, 803, 849, 833. In some embodiments, the PE3b ngRNA spacer has perfect complementarity to a Valine recode for Valine codon GTA encoded by the RTT, and comprises at its 3′ end a sequence corresponding to sequence number 832, 801, 807, 800, 792. In some embodiments, the PE3b ngRNA spacer has perfect complementarity to a Valine recode for Valine codon GTC encoded by the RTT, and comprises at its 3′ end a sequence corresponding to sequence 809, 828, 802, 857, 808. In some embodiments, the PE3b ngRNA spacer has perfect complementarity to a Valine recode for Valine codon GTT encoded by the RTT, and comprises at its 3′ end a sequence corresponding to sequence number 840, 830, 810, 804, or 835.

[0374] In some embodiments, the nick-to-nick distance between the ngRNA generated nick and the PEgRNA generated nick is 4-88 nucleotides. In some embodiments, the nick-to-nick distance between the ngRNA generated nick and the PEgRNA generated nick is 61-72 nucleotides. In some embodiments, the nick-to-nick distance between the ngRNA generated nick and the PEgRNA generated nick is 72-88 nucleotides. In some embodiments, the nick-to-nick distance between the ngRNA generated nick and the PEgRNA generated nick is 4 to 7 nucleotides and comprises at its 3′ end the sequence corresponding the sequence number 770, 767, 768, 769, 766, 849, 803, 839, 833, or 842. In some embodiments, the sequence in the spacer of the ngRNA can comprise at its 3′end sequence number 838, 2139, 2130, 2133, 19478, 849, 803, 839, 833, 843, 841, 848, or 842. In some embodiments, the sequence in the spacer of the ngRNA can comprise at its 3′end the sequence of sequence number 838, 2139, 2130, 2133, 19478, 849, 803, 839, 833, 843, 841, 848, 770, 767, 768, 769, 766, or 842. In some embodiments, the ngRNA spacer is a PE3b spacer comprising at its 3′ end nucleotides 5-20 of sequence number 840, 830, 809, 829, 839, 803, 849, 833, 828, 810, 832, 801, 804, 807, 802, 800, 857, 792, 808, 835, nucleotides 2-17 of sequence number 767,768,769, or 770, or sequence number 766. In some embodiments, the ngRNA spacer is a PE3b spacer comprising at its 3′ end sequence number 840, 830, 809, 829, 839, 803, 849, 833, 828, 810, 832, 801, 804, 807, 802, 800, 857, 792, 808, 835, 767, 768, 769, 770, or 766. In some embodiments, the ngRNA spacer is a PE3b spacer having perfect complementarity to a RTT encoding a wild type NCF1 sequence and comprises at its 3′ end sequence number 766, nucleotides 2-17 of sequence number 767, 768, 769, or 770, or nucleotides 5-20 of sequence number 829, 839, 803, 849, or 833. In some embodiments, the ngRNA spacer is a PE3b spacer having perfect complementarity to a RTT encoding a wild type NCF1 sequence and comprises at its 3′ end sequence number 766, 767, 768, 769, 770, 829, 839, 803, 849, or 833. In some embodiments, the ngRNA spacer is a PE3b spacer having perfect complementarity to a RTT encoding a Valine recode edit and comprises at its 3′ end nucleotides 5-20 of sequence number 840, 830, 809, 828, 810, 832, 801, 804, 807, 802, 800, 857, 792, 808, or 835. In some embodiments, the ngRNA spacer is a PE3b spacer having perfect complementarity to a RTT encoding a Valine recode edit and comprises at its 3′ end the sequence corresponding to sequence number 840, 830, 809, 828, 810, 832, 801, 804, 807, 802, 800, 857, 792, 808, or 835.

[0375] In some embodiments, the sequence in the spacer of the ngRNA can comprise at its 3′end nucleotides 5-20 of sequence number 833. In some embodiments, the sequence in the spacer of the ngRNA can comprise at its 3′end nucleotides 5-20 of sequence number 849. In some embodiments, the sequence in the spacer of the ngRNA can comprise at its 3′end nucleotides 2-17 of sequence number 770. In some embodiments, the sequence in the spacer of the ngRNA is 20 nucleotide in length and comprises sequence number 833. In some embodiments, the sequence in the spacer of the ngRNA is 20 nucleotide in length and comprises sequence number 849. In some embodiments, the sequence in the spacer of the ngRNA is 17 nucleotide in length and comprises sequence number 770.

[0376] Exemplary ngRNA provided in Table 38 can comprise a sequence corresponding to sequence number 2140, 19564, 877, 878, 881, 879, 880, 19565, 2141, 892, 891, 884, 883, 882, 888, 887, 889, 885, 886, 2142, 19566, 890, 2143, 895, 893, 896, 894, 899, 906, 900, 904, 2144, 903, 905, 2145, 19567, 902, 897, 901, 898. In some embodiments, the ngRNA comprises a sequence corresponding to sequence number 896, 904, 890, 895, 903, 894, 906, 893, 901, 2145, 2144, 19567, 2141, 19565, 769, 803, 766, 768, 839, 767, 833, 770, 849, 2130, 2133, 19478. In some embodiments, the ngRNA is a PE3b ngRNA and comprises a sequence corresponding to sequence number 893, 894, 895, 896, 890, 901, 878, 880, 881, 879, 877, or 888. In some embodiments, In some embodiments, the ngRNA is a PE3b ngRNA and comprises a sequence corresponding to sequence number 893 or 878. In some embodiments, the ngRNA is a PE3b ngRNA and comprises a sequence corresponding to sequence number 901 or 888. In some embodiments, the ngRNA is a PE3b ngRNA and comprises a sequence corresponding to sequence number 906 or 883.

[0377] Any ngRNA sequence provided in Table 38 may comprise, or further comprise, a 3′ motif at their 3′ end, for example, a series of 1, 2, 3, 4, 5, 6, 7 or more U nucleotides. In some embodiments, the ngRNA comprises 4 U nucleotides at its 3′ end. Without being bound by theory, such 3′ motifs are believed to increase ngRNA stability. The ngRNA may alternatively or additionally comprise one or more chemical modifications, such as phosphorothioate (PS) bond(s), 2′-O-methylated (2′-Ome) nucleotides, or a combination thereof. In some embodiments, the ngRNA comprise 3′ mN*mN*mN*N and 5′mN*mN*mN* modifications, where m indicates that the nucleotide contains a 2′-O-Me modification and a * indicates the presence of a phosphorothioate bond. NgRNA sequences may alternatively be adapted for expression from a DNA template, for example, by including a 5′ terminal G if the spacer of the ngRNA begins with a nucleotide other than G, by including 6 or 7 U nucleotides at the 3′ end of the ngRNA, or both.

[0378] Exemplary PEgRNA and ngRNA from Table 38 are further excerpted in Table 78 below. All these sequences contained in Table 78 are RNA sequences; however, the Us are presented as Ts to be consistent with ST.26 convention.

TABLE 78
Exemplary PEgRNA and ngRNA from Table 38

| Description | Sequence |
|---|---|
| PEgRNA | CCCGACTCTGGCTTTCCCCCGTTTTAGAGCTAGAAATAGCAAGTTAA |
| | AATAAGGCTAGTCCGTTATCAACTTGAAAAAGTGGCACCGAGTCGG |
| | TGCATGTACACCTGGGGGAAAGCCAGAGTTTT (SEQ ID NO. 19531); |
| | Length: 125 |
| | spacer: CCCGACTCTGGCTTTCCCCC (SEQ ID NO. 19081); Length: 20 |
| | RTT: ATGTACACCTGGG (SEQ ID NO. 19112); Length: 13 |
| | PBS: GGAAAGCCAGAG (SEQ ID NO. 19092); Length: 12 |
| PEgRNA | CCCGACTCTGGCTTTCCCCCGTTTTAGAGCTAGAAATAGCAAGTTAA |
| | AATAAGGCTAGTCCGTTATCAACTTGAAAAAGTGGCACCGAGTCGG |
| | TGCATGTACACCTGGGGGAAAGCCAGAG (SEQ ID NO. 19497); |
| | Length: 121 |
| | spacer: CCCGACTCTGGCTTTCCCCC (SEQ ID NO. 19081); Length: 20 |
| | RTT: ATGTACACCTGGG (SEQ ID NO. 19112); Length: 13 |
| | PBS: GGAAAGCCAGAG (SEQ ID NO. 19092); Length: 12 |
| PEgRNA | CCCGACTCTGGCTTTCCCCCGTTTTAGAGCTAGAAATAGCAAGTTAA |
| | AATAAGGCTAGTCCGTTATCAACTTGAAAAAGTGGCACCGAGTCGG |
| | TGCACATGTACACCTGGGGGAAAGCCAGAGTTTT (SEQ ID NO. 19548); |
| | Length: 127 |
| | spacer: CCCGACTCTGGCTTTCCCCC (SEQ ID NO. 19081); Length: 20 |
| | RTT: ACATGTACACCTGGG (SEQ ID NO. 19123); Length: 15 |
| | PBS: GGAAAGCCAGAG (SEQ ID NO. 19092); Length: 12 |
| PERNA | CCCGACTCTGGCTTTCCCCCGTTTTAGAGCTAGAAATAGCAAGTTAA |
| | AATAAGGCTAGTCCGTTATCAACTTGAAAAAGTGGCACCGAGTCGG |
| | TGCACATGTACACCTGGGGGAAAGCCAGAG (SEQ ID NO. 19515); |
| | Length: 123 |
| | spacer: CCCGACTCTGGCTTTCCCCC (SEQ ID NO. 19081); Length: 20 |
| | RTT: ACATGTACACCTGGG (SEQ ID NO. 19123); Length: 15 |
| | PBS: GGAAAGCCAGAG (SEQ ID NO. 19092); Length: 12 |
| PEgRNA | CCCGACTCTGGCTTTCCCCCGTTTTAGAGCTAGAAATAGCAAGTTAA |
| | AATAAGGCTAGTCCGTTATCAACTTGAAAAAGTGGCACCGAGTCGG |
| | TGCAACATGTACACCTGGGGGAAAGCCAGAGTTTT (SEQ ID |
| | NO. 19554); Length: 128 |
| | spacer: CCCGACTCTGGCTTTCCCCC (SEQ ID NO. 19081); Length: 20 |
| | RTT: AACATGTACACCTGGG (SEQ ID NO. 19126); Length: 16 |
| | PBS: GGAAAGCCAGAG (SEQ ID NO. 19092); Length: 12 |
| PERNA | CCCGACTCTGGCTTTCCCCCGTTTTAGAGCTAGAAATAGCAAGTTAA |
| | AATAAGGCTAGTCCGTTATCAACTTGAAAAAGTGGCACCGAGTCGG |
| | TGCAACATGTACACCTGGGGGAAAGCCAGAG (SEQ ID NO. 19524); |
| | Length: 124 |
| | spacer: CCCGACTCTGGCTTTCCCCC (SEQ ID NO. 19081); Length: 20 |
| | RTT: AACATGTACACCTGGG (SEQ ID NO. 19126); Length: 16 |
| | PBS: GGAAAGCCAGAG (SEQ ID NO. 19092); Length: 12 |
| PERNA | CCCGACTCTGGCTTTCCCCCGTTTTAGAGCTAGAAATAGCAAGTTAA |
| | AATAAGGCTAGTCCGTTATCAACTTGAAAAAGTGGCACCGAGTCGG |
| | TGCGAACATGTACACCTGGGGGAAAGCCAGAGTTTT (SEQ ID |
| | NO. 19558); Length: 129 |
| | spacer: CCCGACTCTGGCTTTCCCCC (SEQ ID NO. 19081); Length: 20 |
| | RTT: GAACATGTACACCTGGG (SEQ ID NO. 19129); Length: 17 |
| | PBS: GGAAAGCCAGAG (SEQ ID NO. 19092); Length: 12 |
| PEgRNA | CCCGACTCTGGCTTTCCCCCGTTTTAGAGCTAGAAATAGCAAGTTAA |
| | AATAAGGCTAGTCCGTTATCAACTTGAAAAAGTGGCACCGAGTCGG |
| | TGCGAACATGTACACCTGGGGGAAAGCCAGAG (SEQ ID NO. 19535); |
| | Length: 125 |
| | spacer: CCCGACTCTGGCTTTCCCCC (SEQ ID NO. 19081); Length: 20 |
| | RTT: GAACATGTACACCTGGG (SEQ ID NO. 19129); Length: 17 |
| | PBS: GGAAAGCCAGAG (SEQ ID NO. 19092); Length: 12 |
| PEgRNA | CCCGACTCTGGCTTTCCCCCGTTTTAGAGCTAGAAATAGCAAGTTAA |
| | AATAAGGCTAGTCCGTTATCAACTTGAAAAAGTGGCACCGAGTCGG |
| | TGCATGTACACCTGGGGGAAAGCCAGAGTTTTT (SEQ ID NO. 19542); |
| | Length: 126 |
| | spacer: CCCGACTCTGGCTTTCCCCC (SEQ ID NO. 19081); Length: 20 |
| | RTT: ATGTACACCTGGG (SEQ ID NO. 19112); Length: 13 |
| | PBS: GGAAAGCCAGAGT (SEQ ID NO. 19093); Length: 13 |
| PEgRNA | CCCGACTCTGGCTTTCCCCCGTTTTAGAGCTAGAAATAGCAAGTTAA |
| | AATAAGGCTAGTCCGTTATCAACTTGAAAAAGTGGCACCGAGTCGG |
| | TGCATGTACACCTGGGGGAAAGCCAGAGT (SEQ ID NO. 19508); |
| | Length: 122 |
| | spacer: CCCGACTCTGGCTTTCCCCC (SEQ ID NO.19081); Length: 20 |
| | RTT: ATGTACACCTGGG (SEQ ID NO. 19112); Length: 13 |
| | PBS: GGAAAGCCAGAGT (SEQ ID NO. 19093); Length: 13 |
| PEgRNA | CCCGACTCTGGCTTTCCCCCGTTTTAGAGCTAGAAATAGCAAGTTAA |
| | AATAAGGCTAGTCCGTTATCAACTTGAAAAAGTGGCACCGAGTCGG |
| | TGCACATGTACACCTGGGGGAAAGCCAGAGTTTTT (SEQ ID |
| | NO. 19557); Length: 128 |
| | spacer: CCCGACTCTGGCTTTCCCCC (SEQ ID NO. 19081); Length: 20 |
| | RTT: ACATGTACACCTGGG (SEQ ID NO. 19123); Length: 15 |
| | PBS: GGAAAGCCAGAGT (SEQ ID NO. 19093); Length: 13 |
| PEgRNA | CCCGACTCTGGCTTTCCCCCGTTTTAGAGCTAGAAATAGCAAGTTAA |
| | AATAAGGCTAGTCCGTTATCAACTTGAAAAAGTGGCACCGAGTCGG |
| | TGCACATGTACACCTGGGGGAAAGCCAGAGT (SEQ ID NO. 19526); |
| | Length: 124 |
| | spacer: CCCGACTCTGGCTTTCCCCC (SEQ ID NO. 19081); Length: 20 |
| | RTT: ACATGTACACCTGGG (SEQ ID NO. 19123); Length: 15 |
| | PBS: GGAAAGCCAGAGT (SEQ ID NO. 19093); Length: 13 |
| PEgRNA | CCCGACTCTGGCTTTCCCCCGTTTTAGAGCTAGAAATAGCAAGTTAA |
| | AATAAGGCTAGTCCGTTATCAACTTGAAAAAGTGGCACCGAGTCGG |
| | TGCAACATGTACACCTGGGGGAAAGCCAGAGTTTTT (SEQ ID |
| | NO. 19560); Length: 129 |
| | spacer: CCCGACTCTGGCTTTCCCCC (SEQ ID NO. 19081); Length: 20 |
| | RTT: AACATGTACACCTGGG (SEQ ID NO. 19126); Length: 16 |
| | PBS: GGAAAGCCAGAGT (SEQ ID NO. 19093); Length: 13 |
| PEgRNA | CCCGACTCTGGCTTTCCCCCGTTTTAGAGCTAGAAATAGCAAGTTAA |
| | AATAAGGCTAGTCCGTTATCAACTTGAAAAAGTGGCACCGAGTCGG |
| | TGCAACATGTACACCTGGGGGAAAGCCAGAGT (SEQ ID NO. 19537); |
| | Length: 125 |
| | spacer: CCCGACTCTGGCTTTCCCCC (SEQ ID NO. 19081); Length: 20 |
| | RTT: AACATGTACACCTGGG (SEQ ID NO. 19126); Length: 16 |
| | PBS: GGAAAGCCAGAGT (SEQ ID NO. 19093); Length: 13 |
| PEgRNA | CCCGACTCTGGCTTTCCCCCGTTTTAGAGCTAGAAATAGCAAGTTAA |
| | AATAAGGCTAGTCCGTTATCAACTTGAAAAAGTGGCACCGAGTCGG |
| | TGCGAACATGTACACCTGGGGGAAAGCCAGAGTTTTT (SEQ ID |
| | NO. 19562); Length: 130 |
| | spacer: CCCGACTCTGGCTTTCCCCC (SEQ ID NO. 19081); Length: 20 |
| | RTT: GAACATGTACACCTGGG (SEQ ID NO. 19129); Length: 17 |
| | PBS: GGAAAGCCAGAGT (SEQ ID NO. 19093); Length: 13 |
| PEgRNA | CCCGACTCTGGCTTTCCCCCGTTTTAGAGCTAGAAATAGCAAGTTAA |
| | AATAAGGCTAGTCCGTTATCAACTTGAAAAAGTGGCACCGAGTCGG |
| | TGCGAACATGTACACCTGGGGGAAAGCCAGAGT (SEQ ID NO. 19543); |
| | Length: 126 |
| | spacer: CCCGACTCTGGCTTTCCCCC (SEQ ID NO. 19081); Length: 20 |
| | RTT: GAACATGTACACCTGGG (SEQ ID NO. 19129); Length: 17 |
| | PBS: GGAAAGCCAGAGT (SEQ ID NO. 19093); Length: 13 |
| PEgRNA | CCCGACTCTGGCTTTCCCCCGTTTTAGAGCTAGAAATAGCAAGTTAA |
| | AATAAGGCTAGTCCGTTATCAACTTGAAAAAGTGGCACCGAGTCGG |
| | TGCATGTACACCTGGGGGAAAGCCAGAGTCTTTT (SEQ ID NO. 19547); |
| | Length: 127 |
| | spacer: CCCGACTCTGGCTTTCCCCC (SEQ ID NO. 19081); Length: 20 |
| | RTT: ATGTACACCTGGG (SEQ ID NO. 19112); Length: 13 |
| | PBS: GGAAAGCCAGAGTC (SEQ ID NO. 19094); Length: 14 |
| PEgRNA | CCCGACTCTGGCTTTCCCCCGTTTTAGAGCTAGAAATAGCAAGTTAA |
| | AATAAGGCTAGTCCGTTATCAACTTGAAAAAGTGGCACCGAGTCGG |
| | TGCATGTACACCTGGGGGAAAGCCAGAGTC (SEQ ID NO. 19516); |
| | Length: 123 |
| | spacer: CCCGACTCTGGCTTTCCCCC (SEQ ID NO. 19081); Length: 20 |
| | RTT: ATGTACACCTGGG (SEQ ID NO. 19112); Length: 13 |
| | PBS: GGAAAGCCAGAGTC (SEQ ID NO. 19094); Length: 14 |
| PEgRNA | CCCGACTCTGGCTTTCCCCCGTTTTAGAGCTAGAAATAGCAAGTTAA |
| | AATAAGGCTAGTCCGTTATCAACTTGAAAAAGTGGCACCGAGTCGG |
| | TGCACATGTACACCTGGGGGAAAGCCAGAGTCTTTT (SEQ ID |
| | NO. 19559); Length: 129 |
| | spacer: CCCGACTCTGGCTTTCCCCC (SEQ ID NO. 19081); Length: 20 |
| | RTT: ACATGTACACCTGGG (SEQ ID NO. 19123); Length: 15 |
| | PBS: GGAAAGCCAGAGTC (SEQ ID NO. 19094); Length: 14 |
| PEgRNA | CCCGACTCTGGCTTTCCCCCGTTTTAGAGCTAGAAATAGCAAGTTAA |
| | AATAAGGCTAGTCCGTTATCAACTTGAAAAAGTGGCACCGAGTCGG |
| | TGCACATGTACACCTGGGGGAAAGCCAGAGTC (SEQ ID NO. 19534); |
| | Length: 125 |
| | spacer: CCCGACTCTGGCTTTCCCCC (SEQ ID NO. 19081); Length: 20 |
| | RTT: ACATGTACACCTGGG (SEQ ID NO. 19123); Length: 15 |
| | PBS: GGAAAGCCAGAGTC (SEQ ID NO. 19094); Length: 14 |
| PEgRNA | CCCGACTCTGGCTTTCCCCCGTTTTAGAGCTAGAAATAGCAAGTTAA |
| | AATAAGGCTAGTCCGTTATCAACTTGAAAAAGTGGCACCGAGTCGG |
| | TGCAACATGTACACCTGGGGGAAAGCCAGAGTCTTTT (SEQ ID |
| | NO. 19561); Length: 130 |
| | spacer: CCCGACTCTGGCTTTCCCCC (SEQ ID NO. 19081); Length: 20 |
| | RTT: AACATGTACACCTGGG (SEQ ID NO. 19126); Length: 16 |
| | PBS: GGAAAGCCAGAGTC (SEQ ID NO. 19094); Length: 14 |
| PEgRNA | CCCGACTCTGGCTTTCCCCCGTTTTAGAGCTAGAAATAGCAAGTTAA |
| | AATAAGGCTAGTCCGTTATCAACTTGAAAAAGTGGCACCGAGTCGG |
| | TGCAACATGTACACCTGGGGGAAAGCCAGAGTC (SEQ ID NO. 19545); |
| | Length: 126 |
| | spacer: CCCGACTCTGGCTTTCCCCC (SEQ ID NO. 19081); Length: 20 |
| | RTT: AACATGTACACCTGGG (SEQ ID NO. 19126); Length: 16 |
| | PBS: GGAAAGCCAGAGTC (SEQ ID NO. 19094); Length: 14 |
| PEgRNA | CCCGACTCTGGCTTTCCCCCGTTTTAGAGCTAGAAATAGCAAGTTAA |
| | AATAAGGCTAGTCCGTTATCAACTTGAAAAAGTGGCACCGAGTCGG |
| | TGCGAACATGTACACCTGGGGGAAAGCCAGAGTCTTTT (SEQ ID |
| | NO. 19563); Length: 131 |
| | spacer: CCCGACTCTGGCTTTCCCCC (SEQ ID NO. 19081); Length: 20 |
| | RTT: GAACATGTACACCTGGG (SEQ ID NO. 19129); Length: 17 |
| | PBS: GGAAAGCCAGAGTC (SEQ ID NO. 19094); Length: 14 |
| PEgRNA | CCCGACTCTGGCTTTCCCCCGTTTTAGAGCTAGAAATAGCAAGTTAA |
| | AATAAGGCTAGTCCGTTATCAACTTGAAAAAGTGGCACCGAGTCGG |
| | TGCGAACATGTACACCTGGGGGAAAGCCAGAGTC (SEQ ID |
| | NO. 19550); Length: 127 |
| | spacer: CCCGACTCTGGCTTTCCCCC (SEQ ID NO. 19081); Length: 20 |
| | RTT: GAACATGTACACCTGGG (SEQ ID NO. 19129); Length: 17 |
| | PBS: GGAAAGCCAGAGTC (SEQ ID NO. 19094); Length: 14 |
| PE3bngRNA | CCAGGAACATGTACACCGTTTTAGAGCTAGAAATAGCAAGTTAAAA |
| | TAAGGCTAGTCCGTTATCAACTTGAAAAAGTGGCACCGAGTCGGTG |
| | CTTTT (SEQ ID NO: 893; length: 97) |
| | spacer: CCAGGAACATGTACACC (SEQ ID NO: 770; length: 17) |
| PE3bngRNA | CCAGGAACATGTACACCGTTTTAGAGCTAGAAATAGCAAGTTAAAA |
| | TAAGGCTAGTCCGTTATCAACTTGAAAAAGTGGCACCGAGTCGGTG |
| | C (SEQ ID NO: 878; length: 93) |
| | spacer: CCAGGAACATGTACACC (SEQ ID NO: 770; length: 17) |
| PE3bngRNA | CAGGAACATGTACACCTGTTTTAGAGCTAGAAATAGCAAGTTAAAA |
| | TAAGGCTAGTCCGTTATCAACTTGAAAAAGTGGCACCGAGTCGGTG |
| | CTTTT (SEQ ID NO: 894; length: 97) |
| | spacer: CAGGAACATGTACACCT (SEQ ID NO: 767; length: 17) |
| PE3bngRNA | CAGGAACATGTACACCTGTTTTAGAGCTAGAAATAGCAAGTTAAAA |
| | TAAGGCTAGTCCGTTATCAACTTGAAAAAGTGGCACCGAGTCGGTG |
| | C (SEQ ID NO: 880; length: 93) |
| | spacer: CAGGAACATGTACACCT (SEQ ID NO: 767; length: 17) |
| PE3bngRNA | AGGAACATGTACACCTGGTTTTAGAGCTAGAAATAGCAAGTTAAAA |
| | TAAGGCTAGTCCGTTATCAACTTGAAAAAGTGGCACCGAGTCGGTG |
| | CTTTT (SEQ ID NO: 895; length: 97) |
| | spacer: AGGAACATGTACACCTG (SEQ ID NO: 768; length: 17) |
| PE3bngRNA | AGGAACATGTACACCTGGTTTTAGAGCTAGAAATAGCAAGTTAAAA |
| | TAAGGCTAGTCCGTTATCAACTTGAAAAAGTGGCACCGAGTCGGTG |
| | C (SEQ ID NO: 881; length: 93) |
| | spacer: AGGAACATGTACACCTG (SEQ ID NO: 768; length: 17) |
| PE3bngRNA | GGAACATGTACACCTGGGTTTTAGAGCTAGAAATAGCAAGTTAAAA |
| | TAAGGCTAGTCCGTTATCAACTTGAAAAAGTGGCACCGAGTCGGTG |
| | CTTTT (SEQ ID NO: 896; length: 97) |
| | spacer: GGAACATGTACACCTGG (SEQ ID NO: 769; length: 17) |
| PE3bngRNA | GGAACATGTACACCTGGGTTTTAGAGCTAGAAATAGCAAGTTAAAA |
| | TAAGGCTAGTCCGTTATCAACTTGAAAAAGTGGCACCGAGTCGGTG |
| | C (SEQ ID NO: 879; length: 93) |
| | spacer: GGAACATGTACACCTGG (SEQ ID NO: 769; length: 17) |
| PE3bngRNA | GGAACATGTACACCTGGTTTTAGAGCTAGAAATAGCAAGTTAAAAT |
| | AAGGCTAGTCCGTTATCAACTTGAAAAAGTGGCACCGAGTCGGTGC |
| | TTTT (SEQ ID NO: 890; length: 96) |
| | spacer: GGAACATGTACACCTG (SEQ ID NO: 766; length: 16) |
| PE3bngRNA | GGAACATGTACACCTGGTTTTAGAGCTAGAAATAGCAAGTTAAAAT |
| | AAGGCTAGTCCGTTATCAACTTGAAAAAGTGGCACCGAGTCGGTGC |
| | (SEQ ID NO: 877; length: 92) |
| | spacer: GGAACATGTACACCTG (SEQ ID NO: 766; length: 16) |
| PE3bngRNA | TCACCAGGAACATGTACACCGTTTTAGAGCTAGAAATAGCAAGTTA |
| | AAATAAGGCTAGTCCGTTATCAACTTGAAAAAGTGGCACCGAGTCG |
| | GTGCTTTT (SEQ ID NO: 901; length: 100) |
| | spacer: TCACCAGGAACATGTACACC (SEQ ID NO: 849; length: 20) |
| PE3bngRNA | TCACCAGGAACATGTACACCGTTTTAGAGCTAGAAATAGCAAGTTA |
| | AAATAAGGCTAGTCCGTTATCAACTTGAAAAAGTGGCACCGAGTCG |
| | GTGC (SEQ ID NO: 888; length: 96) |
| | spacer: TCACCAGGAACATGTACACC (SEQ ID NO: 849; length: 20) |
| PE3bngRNA | CCAGGAACATGTACACCTGGGTTTTAGAGCTAGAAATAGCAAGTTA |
| | AAATAAGGCTAGTCCGTTATCAACTTGAAAAAGTGGCACCGAGTCG |
| | GTGCTTTT (SEQ ID NO: 904; length: 100) |
| | spacer: CCAGGAACATGTACACCTGG (SEQ ID NO: 803; length: 20) |
| PE3bngRNA | CCAGGAACATGTACACCTGGGTTTTAGAGCTAGAAATAGCAAGTTA |
| | AAATAAGGCTAGTCCGTTATCAACTTGAAAAAGTGGCACCGAGTCG |
| | GTGC (SEQ ID NO: 887; length: 96) |
| | spacer: CCAGGAACATGTACACCTGG (SEQ ID NO: 803; length: 20) |
| PE3bngRNA | ACCAGGAACATGTACACCTGGTTTTAGAGCTAGAAATAGCAAGTTA |
| | AAATAAGGCTAGTCCGTTATCAACTTGAAAAAGTGGCACCGAGTCG |
| | GTGCTTTT (SEQ ID NO: 903; length: 100) |
| | spacer: ACCAGGAACATGTACACCTG (SEQ ID NO: 839; length: 20) |
| PE3bngRNA | ACCAGGAACATGTACACCTGGTTTTAGAGCTAGAAATAGCAAGTTA |
| | AAATAAGGCTAGTCCGTTATCAACTTGAAAAAGTGGCACCGAGTCG |
| | GTGC (SEQ ID NO: 892; length: 96) |
| | spacer: ACCAGGAACATGTACACCTG (SEQ ID NO: 839; length: 20) |
| PE3bngRNA | CACCAGGAACATGTACACCTGTTTTAGAGCTAGAAATAGCAAGTTA |
| | AAATAAGGCTAGTCCGTTATCAACTTGAAAAAGTGGCACCGAGTCG |
| | GTGCTTTT (SEQ ID NO: 906; length: 100) |
| | spacer: CACCAGGAACATGTACACCT (SEQ ID NO: 833; length: 20) |
| PE3bngRNA | CACCAGGAACATGTACACCTGTTTTAGAGCTAGAAATAGCAAGTTA |
| | AAATAAGGCTAGTCCGTTATCAACTTGAAAAAGTGGCACCGAGTCG |
| | GTGC (SEQ ID NO: 883; length: 96) |
| | spacer: CACCAGGAACATGTACACCT (SEQ ID NO: 833; length: 20) |

[0379] In some embodiments, an ng spacer sequence is complementary to, and may hybridize with the second search target sequence only after an intended nucleotide edit has been incorporated on the edit strand, by the editing template of a PEgRNA. In some embodiments, such a prime editing system maybe referred to as a “PE3b” prime editing system or composition. In some embodiments, the ngRNA comprises a spacer sequence that matches only the edit strand after incorporation of the nucleotide edits, but not the endogenous target gene sequence on the edit strand. Accordingly, in some embodiments, an intended nucleotide edit is incorporated within the ng search target sequence. A ngRNA protospacer may be in close proximity to the PEgRNA spacer, or may be upstream or downstream of the PEgRNA spacer. In some embodiments, the distance generated by the PEgRNA nick site and the ngRNA nick site (referred to as the nick-to-nick distance) is about 3 to about 100 nucleotides. In some embodiments, the distance generated by the PEgRNA nick site and the ngRNA nick site (referred to as the nick-to-nick distance) is about 4-90, 4-80, 4-70, 4-60, 4-50, 4-40, 4-30, 4-20, or 4-10 nucleotides. In some embodiments, the distance generated by the PEgRNA nick site and the ngRNA nick site (referred to as the nick-to-nick distance) is about 10-20, 20-30, 30-40, 40-50, 50-60, 60-70, 70-80, 80-90, or 90-100 nucleotides. In some embodiments, the nick-to-nick distance is about 4-88 nucleotides. In some embodiments, the nick-to-nick distance is about 4-72 nucleotides. In some embodiments, the nick-to-nick distance is about 4-61 nucleotides. In some embodiments, the nick-to-nick distance is about 61-72 nucleotides. In some embodiments, the nick-to-nick distance is about 61-88 nucleotides. In some embodiments, the nick-to-nick distance is about 72-88 nucleotides. In some embodiments, the nick-to-nick distance is about 4-7 nucleotides. In some embodiments, the nick-to-nick distance is 4, 5, 6, or 7 nucleotides. In some embodiments, the nick-to-nick distance is about 41-96 nucleotides. In some embodiments, the nick-to-nick distance is about 41-82 nucleotides. In some embodiments, the nick-to-nick distance is about 41-44 nucleotides. In some embodiments, the nick-to-nick distance is about 44-82 nucleotides. In some embodiments, the nick-to-nick distance is about 44-96 nucleotides. In some embodiments, the nick-to-nick distance is about 82-96 nucleotides. In some embodiments, the nick-to-nick distance is 41, 44, 82, or 96 nucleotides. In some embodiments, the intended nucleotide edit is incorporated within about 1-10 nucleotides of the position corresponding to the PAM of the ng search target sequence.

[0380] The gRNA core of a PEgRNA or ngRNA can be any gRNA scaffold sequence that is capable of interacting with a Cas protein that recognizes the corresponding PAM of the PEgRNA or ngRNA. In some embodiments, gRNA core of a PEgRNA or a ngRNA comprises a sequence selected from SEQ ID Nos:34424-34428.

[0381] A PEgRNA and/or an ngRNA of this disclosure, in some embodiments, may include modified nucleotides, e.g., chemically modified DNA or RNA nucleobases, and may include one or more nucleobase analogs (e.g., modifications which might add functionality, such as temperature resilience). In some embodiments, PEgRNAs and/or ngRNAs as described herein may be chemically modified. The phrase “chemical modifications,” as used herein, can include modifications which introduce chemistries which differ from those seen in naturally occurring DNA or RNAs, for example, covalent modifications such as the introduction of modified nucleotides, (e.g., nucleotide analogs, or the inclusion of pendant groups which are not naturally found in DNA or RNA molecules).

[0382] In some embodiments, the PEgRNAs provided in the disclosure may further comprise nucleotides added to the 5′ of the PEgRNAs. In some embodiments, the PEgRNA further comprises 1, 2, or 3 additional nucleotides added to the 5′ end. The additional nucleotides can be guanine, cytosine, adenine, or uracil. In some embodiments, the additional nucleotide at the 5′ end of the PEgRNA is a guanine or cytosine. In some embodiments, the additional nucleotides can be chemically or biologically modified.

[0383] In some embodiments, the PEgRNAs provided in the disclosure may further comprise nucleotides to the 3′ of the PEgRNAs. In some embodiments, the PEgRNA further comprises 1, 2, or 3 additional nucleotides to the 3′ end. The additional nucleotides can be guanine, cytosine, adenine, or uracil. In some embodiments, the additional nucleotides at the 3′ end of the PEgRNA is a polynucleotide comprising at least 1 uracil. In some embodiments, the additional nucleotides can be chemically or biologically modified.

[0384] In some embodiments, a PEgRNA or ngRNA is produced by transcription from a template nucleotide, for example, a template plasmid. In some embodiments, a polynucleotide encoding the PEgRNA or ngRNA is appended with one or more additional nucleotides that improves PEgRNA or ngRNA function or expression, e.g., expression from a plasmid that encodes the PEgRNA or ngRNA. In some embodiments, a polynucleotide encoding a PEgRNA or ngRNA is appended with one or more additional nucleotides at the 5′ end or at the 3′ end. In some embodiments, the polynucleotide encoding the PEgRNA or ngRNA is appended with a guanine at the 5′ end, for example, if the first nucleotide at the 5′ end of the spacer is not a guanine. In some embodiments, a polynucleotide encoding the PEgRNA or ngRNA is appended with nucleotide sequence CACC at the 5′ end. In some embodiments, the polynucleotide encoding the PEgRNA or ngRNA is appended with an additional nucleotide adenine at the 3′ end, for example, if the last nucleotide at the 3′ end of the PBS is a Thymine. In some embodiments, the polynucleotide encoding the PEgRNA or ngRNA is appended with additional nucleotide sequence TTTTTT, TTTTTTT, TTTTT, or TTTT at the 3′ end. In some embodiments, the PEgRNA or ngRNA comprises the appended nucleotides from the transcription template. In some embodiments, the PEgRNA or ngRNA further comprises one or more nucleotides at the 5′ end or the 3′ end in addition to spacer, PBS, and RTT sequences. in some embodiments, the PEgRNA or ngRNA further comprises a guanine at the 5′ end, for example, when the first nucleotide at the 5′ end of the spacer is not a guanine. In some embodiments, the PEgRNA or ngRNA further comprises nucleotide sequence CACC at the 5′ end. In some embodiments, the PEgRNA or ngRNA further comprises an adenine at the 3′ end, for example, if the last nucleotide at the 3′ end of the PBS is a thymine. In some embodiments, the PEgRNA or ngRNA further comprises nucleotide sequence UUUUUUU, UUUUUU, UUUUU, or UUUU at the 3′ end.

[0385] In some embodiments, the PEgRNAs and/or ngRNAs provided in this disclosure may have undergone a chemical or biological modifications. Modifications may be made at any position within a PEgRNA or ngRNA, and may include modification to a nucleobase or to a phosphate backbone of the PEgRNA or ngRNA. In some embodiments, chemical modifications can be a structure guided modifications. In some embodiments, a chemical modification is at the 5′ end and/or the 3′ end of a PEgRNA. In some embodiments, a chemical modification is at the 5′ end and/or the 3′ end of a ngRNA. In some embodiments, a chemical modification may be within the spacer sequence, the extension arm, the editing template sequence, or the primer binding site of a PEgRNA. In some embodiments, a chemical modification may be within the spacer sequence or the gRNA core of a PEgRNA or a ngRNA. In some embodiments, a chemical modification may be within the 3′ most nucleotides of a PEgRNA or ngRNA. In some embodiments, a chemical modification may be within the 3′ most end of a PEgRNA or ngRNA comprises 1, 2, 3, 4, 5, 6, 7, 8, 9, 10 or more chemically modified nucleotides at the 3′ end. In some embodiments, a PEgRNA or ngRNA comprises 3 contiguous chemically modified nucleotides at the 3′ end. In some embodiments, a chemical modification may be within the 5′ most end of a PEgRNA or ngRNA. In some embodiments, a PEgRNA or ngRNA comprises 1, 2, 3, 4, 5, 6, 7, 8, 9, 10 or more chemically modified nucleotides at the 3′ end. In some embodiments, a PEgRNA or ngRNA comprises 1, 2, 3, 4, 5, 6, 7, 8, 9, 10 or more chemically modified nucleotides at the 5′ end. In some embodiments, a PEgRNA or ngRNA comprises 1, 2, 3, 4, or 5 or more chemically modified nucleotides at the 3′ end. In some embodiments, a PEgRNA or ngRNA comprises 1, 2, 3, 4, or 5 more chemically modified nucleotides at the 5′ end. In some embodiments, a PEgRNA or ngRNA comprises 1, 2, or 3 or more chemically modified nucleotides at the 3′ end. In some embodiments, a PEgRNA or ngRNA comprises 1, 2, or 3 more chemically modified nucleotides at the 5′ end. In some embodiments, a PEgRNA or ngRNA comprises 1, 2, 3, 4, 5, 6, 7, 8, 9, 10 or more contiguous chemically modified nucleotides at the 3′ end. In some embodiments, a PEgRNA or ngRNA comprises 1, 2, 3, 4, 5, 6, 7, 8, 9, 10 or more contiguous chemically modified nucleotides at the 5′ end. In some embodiments, a PEgRNA or ngRNA comprises 1, 2, 3, 4, or 5 contiguous chemically modified nucleotides at the 3′ end. In some embodiments, a PEgRNA or ngRNA comprises 1, 2, 3, 4, or 5 contiguous chemically modified nucleotides at the 5′ end. In some embodiments, a PEgRNA or ngRNA comprises 1, 2, or 3 contiguous chemically modified nucleotides at the 3′ end. In some embodiments, a PEgRNA or ngRNA comprises 1, 2, or 3 contiguous chemically modified nucleotides at the 5′ end. In some embodiments, a PEgRNA or ngRNA comprises 3 contiguous chemically modified nucleotides at the 3′ end. In some embodiments, a PEgRNA or ngRNA comprises 1, 2, 3, 4, 5, or more chemically modified nucleotides near the 3′ end. In some embodiments, a PEgRNA or ngRNA comprises 3 contiguous chemically modified nucleotides at the 3′ end. In some embodiments, a PEgRNA or ngRNA comprises 3 contiguous chemically modified nucleotides at the 5′ end. In some embodiments, a PEgRNA or ngRNA comprises 1, 2, 3, 4, 5, or more chemically modified nucleotides near the 3′ end. In some embodiments, a PEgRNA or ngRNA comprises 1, 2, 3, 4, 5, or more contiguous chemically modified nucleotides near the 3′ end. In some embodiments, a PEgRNA or ngRNA comprises 1, 2, 3, 4, 5, or more chemically modified nucleotides near the 3′ end, where the 3′ most nucleotide is not modified, and the 1, 2, 3, 4, 5, or more chemically modified nucleotides precede the 3′ most nucleotide in a 5′-to-3′ order. In some embodiments, a PEgRNA or ngRNA comprises 1, 2, 3, 4, 5, 6, 7, 8, 9, 10, 11, 12, 13, 14, 15, 16, 17, 18, 19, 20, 21, 22, 23, 24, 25, 26, 27, 28, 29, 30, 31, 32, 33, 34, 35 or more chemically modified nucleotides near the 3′ end, where the 3′ most nucleotide is not modified, and the 1, 2, 3, 4, 5, 6, 7, 8, 9, 10, 11, 12, 13, 14, 15, 16, 17, 18, 19, 20, 21, 22, 23, 24, 25, 26, 27, 28, 29, 30, 31, 32, 33, 34, 35 or more chemically modified nucleotides precede the 3′ most nucleotide in a 5′-to-3′ order.

[0386] In some embodiments, a PEgRNA or ngRNA comprises one or more chemical modified nucleotides in the gRNA core. As exemplified in FIG. 3, the gRNA core of a PEgRNA may comprise one or more regions of a base paired lower stem, a base paired upper stem, where the lower stem and upper stem may be connected by a bulge comprising unpaired RNAs. The gRNA core may further comprise a nexus distal from the spacer sequence. In some embodiments, the gRNA core comprises one or more chemically modified nucleotides in the lower stem, upper stem, and/or the hairpin regions. In some embodiments, all of the nucleotides in the lower stem, upper stem, and/or the hairpin regions are chemically modified.

[0387] A chemical modification to a PEgRNA or ngRNA can comprise a 2′-O-thionocarbamate-protected nucleoside phosphoramidite, a 2′-O-methyl (M), a 2′-O-methyl 3′phosphorothioate (MS), or a 2′-O-methyl 3′thioPACE (MSP), or any combination thereof. In some embodiments, a chemically modified PEgRNA and/or ngRNA can comprise a ′-O-methyl (M) RNA, a 2′-O-methyl 3′phosphorothioate (MS) RNA, a 2′-O-methyl 3′thioPACE (MSP) RNA, a 2′-F RNA, a phosphorothioate bond modification, any other chemical modifications known in the art, or any combination thereof. A chemical modification may also include, for example, the incorporation of non-nucleotide linkages or modified nucleotides into the PEgRNA and/or ngRNA (e.g., modifications to one or both of the 3′ and 5′ ends of a guide RNA molecule). Such modifications can include the addition of bases to an RNA sequence, complexing the RNA with an agent (e.g., a protein or a complementary nucleic acid molecule), and inclusion of elements which change the structure of an RNA molecule (e.g., which form secondary structures).

### Prime Editing Compositions

[0388] Disclosed herein, in some embodiments, are compositions, systems, and methods using a prime editing composition. The term “prime editing composition” or “prime editing system” refers to compositions involved in the method of prime editing as described herein. A prime editing composition may include a prime editor, e.g., a prime editor fusion protein, and a PEgRNA. A prime editing composition may further comprise additional elements, such as second strand nicking ngRNAs. Components of a prime editing composition may be combined to form a complex for prime editing, or may be kept separately, e.g., for administration purposes. In some embodiments, a prime editing composition comprises a prime editor fusion protein complexed with a PEgRNA and optionally complexed with a ngRNA. In some embodiments, the prime editing composition comprises a prime editor comprising a DNA binding domain and a DNA polymerase domain associated with each other through a PEgRNA. For example, the prime editing composition may comprise a prime editor comprising a DNA binding domain and a DNA polymerase domain linked to each other by an RNA-protein recruitment aptamer RNA sequence, which is linked to a PEgRNA. In some embodiments, a prime editing composition comprises a PEgRNA and a polynucleotide, a polynucleotide construct, or a vector that encodes a prime editor fusion protein. In some embodiments, a prime editing composition comprises a PEgRNA, a ngRNA, and a polynucleotide, a polynucleotide construct, or a vector that encodes a prime editor fusion protein. In some embodiments, a prime editing composition comprises multiple polynucleotides, polynucleotide constructs, or vectors, each of which encodes one or more prime editing composition components. In some embodiments, the PEgRNA of a prime editing composition is associated with the DNA binding domain, e.g., a Cas9 nickase, of the prime editor. In some embodiments, the PEgRNA of a prime editing composition complexes with the DNA binding domain of a prime editor and directs the prime editor to the target DNA.

[0389] In some embodiments, a prime editing composition comprises one or more polynucleotides that encode prime editor components and/or PEgRNA or ngRNAs. In some embodiments, a prime editing composition comprises a polynucleotide encoding a fusion protein comprising a DNA binding domain and a DNA polymerase domain. In some embodiments, a prime editing composition comprises (i) a polynucleotide encoding a fusion protein comprising a DNA binding domain and a DNA polymerase domain, and (ii) a PEgRNA or a polynucleotide encoding the PEgRNA. In some embodiments, a prime editing composition comprises (i) a polynucleotide encoding a fusion protein comprising a DNA binding domain and a DNA polymerase domain, (ii) a PEgRNA or a polynucleotide encoding the PEgRNA, and (iii) an ngRNA or a polynucleotide encoding the ngRNA. In some embodiments, a prime editing composition comprises (i) a polynucleotide encoding a DNA binding domain of a prime editor, e.g., a Cas9 nickase, (ii) a polynucleotide encoding a DNA polymerase domain of a prime editor, e.g., a reverse transcriptase, and (iii) a PEgRNA or a polynucleotide encoding the PEgRNA. In some embodiments, a prime editing composition comprises (i) a polynucleotide encoding a DNA binding domain of a prime editor, e.g., a Cas9 nickase, (ii) a polynucleotide encoding a DNA polymerase domain of a prime editor, e.g., a reverse transcriptase, (iii) a PEgRNA or a polynucleotide encoding the PEgRNA, and (iv) an ngRNA or a polynucleotide encoding the ngRNA. In some embodiments, the polynucleotide encoding the DNA biding domain or the polynucleotide encoding the DNA polymerase domain further encodes an additional polypeptide domain, e.g., an RNA-protein recruitment domain, such as a MS2 coat protein domain. In some embodiments, a prime editing composition comprises (i) a polynucleotide encoding a N-terminal half of a prime editor fusion protein and an intein-N and (ii) a polynucleotide encoding a C-terminal half of a prime editor fusion protein and an intein-C. In some embodiments, a prime editing composition comprises (i) a polynucleotide encoding a N-terminal half of a prime editor fusion protein and an intein-N (ii) a polynucleotide encoding a C-terminal half of a prime editor fusion protein and an intein-C, (iii) a PEgRNA or a polynucleotide encoding the PEgRNA, and/or (iv) an ngRNA or a polynucleotide encoding the ngRNA. In some embodiments, a prime editing composition comprises (i) a polynucleotide encoding a N-terminal portion of a DNA binding domain and an intein-N, (ii) a polynucleotide encoding a C-terminal portion of the DNA binding domain, an intein-C, and a DNA polymerase domain. In some embodiments, the DNA binding domain is a Cas protein domain, e.g., a Cas9 nickase. In some embodiments, the prime editing composition comprises (i) a polynucleotide encoding a N-terminal portion of a DNA binding domain and an intein-N, (ii) a polynucleotide encoding a C-terminal portion of the DNA binding domain, an intein-C, and a DNA polymerase domain, (iii) a PEgRNA or a polynucleotide encoding the PEgRNA, and/or (iv) a ngRNA or a polynucleotide encoding the ngRNA.

[0390] In some embodiments, a prime editing system comprises one or more polynucleotides encoding one or more prime editor polypeptides, wherein activity of the prime editing system can be temporally regulated by controlling the timing in which the vectors are delivered. For example, in some embodiments, a polynucleotide encoding the prime editor and a polynucleotide encoding a PEgRNA can be delivered simultaneously. For example, in some embodiments, a polynucleotide encoding the prime editor and a polynucleotide encoding a PEgRNA can be delivered sequentially.

[0391] In some embodiments, a polynucleotide encoding a component of a prime editing system can further comprise an element that is capable of modifying the intracellular half-life of the polynucleotide and/or modulating translational control. In some embodiments, the polynucleotide is a RNA, for example, an mRNA. In some embodiments, the half-life of the polynucleotide, e.g., the RNA may be increased. In some embodiments, the half-life of the polynucleotide, e.g., the RNA may be decreased. In some embodiments, the element may be capable of increasing the stability of the polynucleotide, e.g., the RNA. In some embodiments, the element may be capable of decreasing the stability of the polynucleotide, e.g., the RNA. In some embodiments, the element may be within the 3′ UTR of the RNA. In some embodiments, the element may include a polyadenylation signal (PA). In some embodiments, the element may include a cap, e.g., an upstream mRNA or PEgRNA end. In some embodiments, the RNA may comprise no PA such that it is subject to quicker degradation in the cell after transcription.

[0392] In some embodiments, the element may include at least one AU-rich element (ARE). The AREs may be bound by ARE binding proteins (ARE-BPs) in a manner that is dependent upon tissue type, cell type, timing, cellular localization, and environment. In some embodiments the destabilizing element may promote RNA decay, affect RNA stability, or activate translation. In some embodiments, the ARE may comprise 50 to 150 nucleotides in length. In some embodiments, the ARE may comprise at least one copy of the sequence AUUUA. In some embodiments, at least one ARE may be added to the 3′ UTR of the RNA. In some embodiments, the element may be a Woodchuck Hepatitis Virus Posttranscriptional Regulatory Element (WPRE). In further embodiments, the element is a modified and/or truncated WPRE sequence that is capable of enhancing expression from the transcript. In some embodiments, the WPRE or equivalent may be added to the 3′ UTR of the RNA. In some embodiments, the element may be selected from other RNA sequence motifs that are enriched in either fast- or slow-decaying transcripts. In some embodiments, the polynucleotide, e.g., a vector, encoding the PE or the PEgRNA may be self-destroyed via cleavage of a target sequence present on the polynucleotide, e.g., a vector. The cleavage may prevent continued transcription of a PE or a PEgRNA.

[0393] Polynucleotides encoding prime editing composition components can be DNA, RNA, or any combination thereof. In some embodiments, a polynucleotide encoding a prime editing composition component is an expression construct. In some embodiments, a polynucleotide encoding a prime editing composition component is a vector. In some embodiments, the vector is a DNA vector. In some embodiments, the vector is a plasmid. In some embodiments, the vector is a virus vector, e.g., a retroviral vector, adenoviral vector, lentiviral vector, herpesvirus vector, or an adeno-associated virus vector (AAV).

[0394] In some embodiments, polynucleotides encoding polypeptide components of a prime editing composition are codon optimized by replacing at least one codon (e.g., about or more than about 1, 2, 3, 4, 5, 10, 15, 20, 25, 50, or more codons) of the native sequence with codons that are more frequently or most frequently used in the genes of that host cell while maintaining the native amino acid sequence. In some embodiments, a polynucleotide encoding a polypeptide component of a prime editing composition are operably linked to one or more expression regulatory elements, for example, a promoter, a 3′ UTR, a 5′ UTR, or any combination thereof. In some embodiments, a polynucleotide encoding a prime editing composition component is a messenger RNA (mRNA). In some embodiments, the mRNA comprises a Cap at the 5′ end and/or a poly A tail at the 3′ end.

### Pharmaceutical Compositions

[0395] Disclosed herein are pharmaceutical compositions comprising any of the prime editing composition components, for example, prime editors, fusion proteins, polynucleotides encoding prime editor polypeptides, PEgRNAs, ngRNAs, and/or prime editing complexes described herein.

[0396] The term “pharmaceutical composition”, as used herein, refers to a composition formulated for pharmaceutical use. In some embodiments, the pharmaceutical composition further comprises a pharmaceutically acceptable carrier. In some embodiments, the pharmaceutical composition comprises additional agents, e.g., for specific delivery, increasing half-life, or other therapeutic compounds.

[0397] In some embodiments, a pharmaceutically-acceptable carrier comprises any vehicle, such as a liquid or solid filler, diluent, excipient, manufacturing aid (e.g., lubricant, talc magnesium, calcium or zinc stearate, or steric acid), or solvent encapsulating material, involved in carrying or transporting the compound from one site (e.g., the delivery site) of the body, to another site (e.g., organ, tissue or portion of the body). A pharmaceutically acceptable carrier is “acceptable” in the sense of being compatible with the other ingredients of the formulation and not injurious to the tissue of the subject (e.g., physiologically compatible, sterile, physiologic pH, etc.)

[0398] Formulations of the pharmaceutical compositions described herein can be prepared by any method known or hereafter developed in the art of pharmacology. In general, such preparatory methods include the step of bringing the active ingredient(s) into association with an excipient and/or one or more other accessory ingredients, and then, if necessary and/or desirable, shaping and/or packaging the product into a desired single- or multi-dose unit. Pharmaceutical formulations can additionally comprise a pharmaceutically acceptable excipient, which, as used herein, includes any and all solvents, dispersion media, diluents, or other liquid vehicles, dispersion or suspension aids, surface active agents, isotonic agents, thickening or emulsifying agents, preservatives, solid binders, lubricants and the like, as suited to the particular dosage form desired.

[0399] Methods of Editing

[0400] The methods and compositions disclosed herein can be used to edit a target gene of interest by prime editing.

[0401] In some embodiments, the prime editing method comprises contacting a target gene, e.g., an NCF1 gene, an NCF1B pseudogene, or an NCF1C pseudogene. with a PEgRNA and a prime editor (PE) polypeptide described herein. In some embodiments, the target gene is double stranded, and comprises two strands of DNA complementary to each other. In some embodiments, the contacting with a PEgRNA and the contacting with a prime editor are performed sequentially. In some embodiments, the contacting with a prime editor is performed after the contacting with a PEgRNA. In some embodiments, the contacting with a PEgRNA is performed after the contacting with a prime editor. In some embodiments, the contacting with a PEgRNA, and the contacting with a prime editor are performed simultaneously. In some embodiments, the PEgRNA and the prime editor are associated in a complex prior to contacting a target gene.

[0402] In some embodiments, contacting the target gene with the prime editing composition results in binding of the PEgRNA to a target strand of the target gene, e.g., an NCF1 gene, an NCF1B pseudogene, or an NCF1C pseudogene. In some embodiments, contacting the target gene with the prime editing composition results in binding of the PEgRNA to a search target sequence on the target strand of the target gene upon contacting with the PEgRNA. In some embodiments, contacting the target gene with the prime editing composition results in binding of a spacer sequence of the PEgRNA to a search target sequence with the search target sequence on the target strand of the target gene upon said contacting of the PEgRNA.

[0403] In some embodiments, contacting the target gene with the prime editing composition results in binding of the prime editor to the target gene, e.g., an NCF1 gene, an NCF1B pseudogene, or an NCF1C pseudogene, upon the contacting of the PE composition with the target gene. In some embodiments, the DNA binding domain of the PE associates with the PEgRNA. In some embodiments, the PE binds the target gene, e.g., an NCF1 gene, an NCF1B pseudogene, or an NCF1C pseudogene, directed by the PEgRNA. Accordingly, in some embodiments, the contacting of the target gene results in binding of a DNA binding domain of a prime editor of the target gene, e.g., an NCF1 gene, an NCF1B pseudogene, or an NCF1C pseudogene, directed by the PEgRNA.

[0404] In some embodiments, contacting the target gene with the prime editing composition results in a nick in an edit strand of the target gene, e.g., an NCF1 gene, an NCF1B pseudogene, or an NCF1C pseudogene by the prime editor upon contacting with the target gene, thereby generating a nicked on the edit strand of the target gene. In some embodiments, contacting the target gene with the prime editing composition results in a single-stranded DNA comprising a free 3′ end at the nick site of the edit strand of the target gene. In some embodiments, contacting the target gene with the prime editing composition results in a nick in the edit strand of the target gene by a DNA binding domain of the prime editor, thereby generating a single-stranded DNA comprising a free 3′ end at the nick site. In some embodiments, the DNA binding domain of the prime editor is a Cas domain. In some embodiments, the DNA binding domain of the prime editor is a Cas9. In some embodiments, the DNA binding domain of the prime editor is a Cas9 nickase.

[0405] In some embodiments, contacting the target gene with the prime editing composition results in hybridization of the PEgRNA with the 3′ end of the nicked single-stranded DNA, thereby priming DNA polymerization by a DNA polymerase domain of the prime editor. In some embodiments, the free 3′ end of the single-stranded DNA generated at the nick site hybridizes to a primer binding site sequence (PBS) of the contacted PEgRNA, thereby priming DNA polymerization. In some embodiments, the DNA polymerization is reverse transcription catalyzed by a reverse transcriptase domain of the prime editor. In some embodiments, the method comprises contacting the target gene with a DNA polymerase, e.g., a reverse transcriptase, as a part of a prime editor fusion protein or prime editing complex (in cis), or as a separate protein (in trans).

[0406] In some embodiments, contacting the target gene with the prime editing composition generates an edited single stranded DNA that is coded by the editing template of the PEgRNA by DNA polymerase mediated polymerization from the 3′ free end of the single-stranded DNA at the nick site. In some embodiments, the editing template of the PEgRNA comprises one or more intended nucleotide edits compared to endogenous sequence of the target gene, e.g., an NCF1 gene, an NCF1B pseudogene, or an NCF1C pseudogene. In some embodiments, the intended nucleotide edits are incorporated in the target gene, by excision of the 5′ single stranded DNA of the edit strand of the target gene generated at the nick site and DNA repair. In some embodiments, the intended nucleotide edits are incorporated in the target gene by excision of the editing target sequence and DNA repair. In some embodiments, excision of the 5′ single stranded DNA of the edit strand generated at the nick site is by a flap endonuclease. In some embodiments, the flap nuclease is FEN1. In some embodiments, the method further comprises contacting the target gene with a flap endonuclease. In some embodiments, the flap endonuclease is provided as a part of a prime editor fusion protein. In some embodiments, the flap endonuclease is provided in trans.

[0407] In some embodiments, contacting the target gene with the prime editing composition generates a mismatched heteroduplex comprising the edit strand of the target gene that comprises the edited single stranded DNA, and the unedited target strand of the target gene. Without being bound by theory, the endogenous DNA repair and replication may resolve the mismatched edited DNA to incorporate the nucleotide change(s) to form the desired edited target gene.

[0408] In some embodiments, the method further comprises contacting the target gene, e.g., an NCF1 gene, an NCF1B pseudogene, or an NCF1C pseudogene, with a nick guide (ngRNA) disclosed herein. In some embodiments, the ngRNA comprises a spacer that binds a second search target sequence on the edit strand of the target gene. In some embodiments, the contacted ngRNA directs the PE to introduce a nick in the target strand of the target gene. In some embodiments, the nick on the target strand (non-edit strand) results in endogenous DNA repair machinery to use the edit strand to repair the non-edit strand, thereby incorporating the intended nucleotide edit in both strand of the target gene and modifying the target gene. In some embodiments, the ngRNA comprises a spacer sequence that is complementary to, and may hybridize with, the second search target sequence on the edit strand only after the intended nucleotide edit(s) are incorporated in the edit strand of the target gene.

[0409] In some embodiments, the target gene is contacted by the ngRNA, the PEgRNA, and the PE simultaneously. In some embodiments, the ngRNA, the PEgRNA, and the PE form a complex when they contact the target gene. In some embodiments, the target gene is contacted with the ngRNA, the PEgRNA, and the prime editor sequentially. In some embodiments, the target gene is contacted with the ngRNA and/or the PEgRNA after contacting the target gene with the PE. In some embodiments, the target gene is contacted with the ngRNA and/or the PEgRNA before contacting the target gene with the prime editor.

[0410] In some embodiments, the target gene, e.g., an NCF1 gene, an NCF1B pseudogene, or an NCF1C pseudogene, is in a cell. Accordingly, also provided herein are methods of modifying a cell.

[0411] In some embodiments, the prime editing method comprises introducing a PEgRNA, a prime editor, and/or a ngRNA into the cell that has the target gene. In some embodiments, the prime editing method comprises introducing into the cell that has the target gene with a prime editing composition comprising a PEgRNA, a prime editor polypeptide, and/or a ngRNA. In some embodiments, the PEgRNA, the prime editor polypeptide, and/or the ngRNA form a complex prior to the introduction into the cell. In some embodiments, the PEgRNA, the prime editor polypeptide, and/or the ngRNA form a complex after the introduction into the cell. The prime editors, PEgRNA and/or ngRNAs, and prime editing complexes may be introduced into the cell by any delivery approaches described herein or any delivery approach known in the art, including ribonucleoprotein (RNPs), lipid nanoparticles (LNPs), viral vectors, non-viral vectors, mRNA delivery, and physical techniques such as cell membrane disruption by a microfluidics device. The prime editors, PEgRNA and/or ngRNAs, and prime editing complexes may be introduced into the cell simultaneously or sequentially.

[0412] In some embodiments, the prime editing method comprises introducing into the cell a PEgRNA or a polynucleotide encoding the PEgRNA, a prime editor polynucleotide encoding a prime editor polypeptide, and optionally an ngRNA or a polynucleotide encoding the ngRNA. In some embodiments, the method comprises introducing the PEgRNA or the polynucleotide encoding the PEgRNA, the polynucleotide encoding the prime editor polypeptide, and/or the ngRNA or the polynucleotide encoding the ngRNA into the cell simultaneously. In some embodiments, the method comprises introducing the PEgRNA or the polynucleotide encoding the PEgRNA, the polynucleotide encoding the prime editor polypeptide, and/or the ngRNA or the polynucleotide encoding the ngRNA into the cell sequentially. In some embodiments, the method comprises introducing the polynucleotide encoding the prime editor polypeptide into the cell before introduction of the PEgRNA or the polynucleotide encoding the PEgRNA and/or the ngRNA or the polynucleotide encoding the ngRNA. In some embodiments, the polynucleotide encoding the prime editor polypeptide is introduced into and expressed in the cell before introduction of the PEgRNA or the polynucleotide encoding the PEgRNA and/or the ngRNA or the polynucleotide encoding the ngRNA into the cell. In some embodiments, the polynucleotide encoding the prime editor polypeptide is introduced into the cell after the PEgRNA or the polynucleotide encoding the PEgRNA and/or the ngRNA or the polynucleotide encoding the ngRNA are introduced into the cell. The polynucleotide encoding the prime editor polypeptide, the PEgRNA or the polynucleotide encoding the PEgRNA, and/or the ngRNA or the polynucleotide encoding the ngRNA, may be introduced into the cell by any delivery approaches described herein or any delivery approach known in the art, for example, by RNPs, LNPs, viral vectors, non-viral vectors, mRNA delivery, and physical. In some embodiments, the polynucleotide is a DNA polynucleotide. In some embodiments, the polynucleotide is a RNA polynucleotide, e.g., mRNA polynucleotide.

[0413] In some embodiments, the polynucleotide encoding the prime editor polypeptide, the polynucleotide encoding the PEgRNA, and/or the polynucleotide encoding the ngRNA integrate into the genome of the cell after being introduced into the cell. In some embodiments, the polynucleotide encoding the prime editor polypeptide, the polynucleotide encoding the PEgRNA, and/or the polynucleotide encoding the ngRNA are introduced into the cell for transient expression. Accordingly, also provided herein are cells modified by prime editing.

[0414] In some embodiments, the cell is a eukaryotic cell. In some embodiments, the cell is a mammalian cell. In some embodiments, the cell is a non-human primate cell, bovine cell, porcine cell, rodent or mouse cell. In some embodiments, the cell is a human cell. In some embodiments, the cell is a primary cell. In some embodiments, the cell is a human primary cell. In some embodiments, the cell is a progenitor cell. In some embodiments, the cell is a human progenitor cell. In some embodiments, the cell is a stem cell. In some embodiments, the cell is a human stem cell. In some embodiments, the cell is an iPSC. In some embodiments, the cell is a human iPSC. In some embodiments, the cell is a hematopoietic stem cell (HSC). In some embodiments, the cell is a human HSC. In some embodiments, the HSC is from bone marrow or mobilized peripheral blood. In some embodiments, the cell is a hematopoietic stem and progenitor cell. In some embodiments the human stem cell is an induced pluripotent stem cell (iPSC). In some embodiments, the cell is a human HSC. In some embodiments, the cell is a human CD34⁺ cell. In some embodiments, the cell is a hematopoietic stem and progenitor cell (HSPC). A human HSPC cell may also be generally referred to as a CD34⁺ cell. In some embodiments, the cell is a hematopoietic progenitor cell, multipotent progenitor cell, a lymphoid progenitor cell, a myeloid progenitor cell, a megakaryocyte-erythroid progenitor cell, a granulocyte-megakaryocyte progenitor cell, a granulocyte, a promyelocyte, a neutrophil, an eosinophil, a basophil, an erythrocyte, a reticulocyte, a thrombocyte, a megakaryoblast, a platelet-producing megakaryocyte, a monocyte, a macrophage, a dendritic cell, a microglia, an osteoclast, a lymphocyte, a NK cell, a B-cell, or a T-cell. In some embodiments, the cell edited by prime editing can be differentiated into, or give rise to recovery of a population of cells, e.g., common lymphoid progenitor cells, common myeloid progenitor cells, megakaryocyte-erythroid progenitor cells, granulocyte-megakaryocyte progenitor cells, granulocytes, promyelocytes, neutrophils, eosinophils, basophils, erythrocytes, reticulocytes, thrombocytes, megakaryoblasts, platelet-producing megakaryocytes, platelets, monocytes, macrophages, dendritic cells, microglia, osteoclasts, lymphocytes, such as NK cells, B-cells or T-cells. In some embodiments, the cell edited by prime editing can be differentiated into, or give rise to recovery of a population of cells, e.g., neutrophils, platelets, red blood cells, monocytes, macrophages, antigen-presenting cells, microglia, osteoclasts, dendritic cells, and/or lymphocytes. In some embodiments, the cell is an ex vivo cell. In some embodiments, the cell is an ex vivo cell obtained from a human subject. For example, in some embodiments, the cell is a stem cell, a bone marrow cell, a LCL cell, or a CD34⁺ cell obtained from a subject having CGD disease prior to editing. After correction of the mutation by prime editing, the cell may be administered to the subject, e.g., by infusion. In some embodiments, the cell is in a subject, e.g., a human subject.

[0415] In some embodiments, the target gene edited by prime editing is in a chromosome of the cell. In some embodiments, the intended nucleotide edits incorporate in the chromosome of the cell and are inheritable by progeny cells. In some embodiments, the intended nucleotide edits introduced to the cell by the prime editing compositions and methods are such that the cell and progeny of the cell also include the intended nucleotide edits. In some embodiments, the cell is autologous, allogeneic, or xenogeneic to a subject. In some embodiments, the cell is from or derived from a subject. In some embodiments, the cell is from or derived from a human subject. In some embodiments, the cell is introduced back into the subject, e.g., a human subject, after incorporation of the intended nucleotide edits by prime editing.

[0416] In some embodiments, the method provided herein comprises introducing the prime editor polypeptide or the polynucleotide encoding the prime editor polypeptide, the PEgRNA or the polynucleotide encoding the PEgRNA, and/or the ngRNA or the polynucleotide encoding the ngRNA into a plurality or a population of cells that comprise the target gene. In some embodiments, the population of cells is of the same cell type. In some embodiments, the population of cells is of the same tissue or organ. In some embodiments, the population of cells is heterogeneous. In some embodiments, the population of cells is homogeneous. In some embodiments, the population of cells is from a single tissue or organ, and the cells are heterogeneous. In some embodiments, the introduction into the population of cells is ex vivo. In some embodiments, the introduction into the population of cells is in vivo, e.g., into a human subject.

[0417] In some embodiments, the target gene is in a genome of each cell of the population. In some embodiments, introduction of the prime editor polypeptide or the polynucleotide encoding the prime editor polypeptide, the PEgRNA or the polynucleotide encoding the PEgRNA, and/or the ngRNA or the polynucleotide encoding the ngRNA results in incorporation of one or more intended nucleotide edits in the target gene in at least one of the cells in the population of cells. In some embodiments, introduction of the prime editor polypeptide or the polynucleotide encoding the prime editor polypeptide, the PEgRNA or the polynucleotide encoding the PEgRNA, and/or the ngRNA or the polynucleotide encoding the ngRNA results in incorporation of the one or more intended nucleotide edits in the target gene in a plurality of the population of cells. In some embodiments, introduction of the prime editor polypeptide or the polynucleotide encoding the prime editor polypeptide, the PEgRNA or the polynucleotide encoding the PEgRNA, and/or the ngRNA or the polynucleotide encoding the ngRNA results in incorporation of the one or more intended nucleotide edits in the target gene in each cell of the population of cells. In some embodiments, introduction of the prime editor polypeptide or the polynucleotide encoding the prime editor polypeptide, the PEgRNA or the polynucleotide encoding the PEgRNA, and/or the ngRNA or the polynucleotide encoding the ngRNA results in incorporation of the one or more intended nucleotide edits in the target gene in sufficient number of cells such that the disease or disorder is treated, prevented or ameliorated.

[0418] In some embodiments, editing efficiency of the prime editing compositions and method described herein can be measured by calculating the percentage of edited target genes in a population of cells introduced with the prime editing composition. In some embodiments, the editing efficiency is determined after 1 hour, 2 hours, 6 hours, 12 hours, 24 hours, 36 hours, 48 hours, 3 days, 4 days, 5 days, 7 days, 10 days, or 14 days of exposing a target gene (e.g., an NCF1 gene, an NCF1B pseudogene, or an NCF1C pseudogene gene within the genome of a cell) to a prime editing composition. In some embodiments, editing efficiency of the prime editing compositions and method described herein can be measured by calculating the percentage of edited target genes in a population of cells introduced with the prime editing composition. In some embodiments, the editing efficiency is determined after 5, 6, 7, 8, 9, 10, 11, 12, 13, 14, 15, or 16 weeks of exposing a target gene (e.g., an NCF1 gene, an NCF1B pseudogene, or an NCF1C pseudogene gene within the genome of a cell) to a prime editing composition. In some embodiments, the population of cells introduced with the prime editing composition is ex vivo. In some embodiments, the population of cells introduced with the prime editing composition is in vitro. In some embodiments, the population of cells introduced with the prime editing composition is in vivo. In some embodiments, the prime editing methods disclosed herein have an editing efficiency of at least about 1%, at least about 5%, at least about 10%, at least about 20%, at least about 30%, at least about 40%, at least about 50%, at least about 60%, at least about 70%, at least about 80%, at least about 90%, at least about 95%, or at least about 99% relative to a suitable control. In some embodiments, the prime editing methods disclosed herein have an editing efficiency of at least 25% relative to a suitable control. In some embodiments, the prime editing methods disclosed herein have an editing efficiency of at least 35% relative to a suitable control. prime editing method disclosed herein has an editing efficiency of at least 30% relative to a suitable control. In some embodiments, the prime editing methods disclosed herein have an editing efficiency of at least 45% relative to a suitable control. In some embodiments, the prime editing methods disclosed herein have an editing efficiency of at least 50% relative to a suitable control. In some embodiemnts, editing efficiency of prime the prime editing compositions and method described herein can be measured by calculating the percentage of edited target genes in a population of cells after in vivo engraftment of the edited cells. In some embodiments, the editing efficiency is determined after 5, 6, 7, 8, 9, 10, 11, 12, 13, 14, 15, or 16 weeks of engraftment. In some embodiments, the editing efficiency is determined after 8 or 16 weeks of engraftment. In some embodiments, prime editing is able to maintain in edited cells at least about 10%, about 15%, about 20%, about 25%, about 30%, about 35%, about 40%, about 45%, about 50%, about 55%, about 60%, about 65%, about 70%, about 75%, about 80%, about 85%, about 90%, about 95% or more than 95% of editing efficiency after 8 or 16 weeks post engraftment.

[0419] In some embodiments, the methods disclosed herein have an editing efficiency of at least about 1%, at least about 5%, at least about 7.5%, at least about 10%, at least about 15%, at least about 20%, at least about 30%, at least about 40%, at least about 50%, at least about 60%, at least about 70%, at least about 80%, at least about 90%, or at least about 95% of editing a primary cell (as measured in a population of primary cells) relative to a suitable control.

[0420] In some embodiments, the methods disclosed herein have an editing efficiency of at least about 5%, at least about 7.5%, at least about 10%, at least about 15%, at least about 20%, at least about 30%, at least about 40%, at least about 50%, at least about 60%, at least about 70%, at least about 80%, at least about 90%, or at least about 95% of editing HSPC (as measured in a population of HSPC cells) relative to a corresponding control HSPC. In some embodiments, the HSC is a human HSPC.

[0421] In some embodiments, the prime editing compositions provided herein are capable of incorporating one or more intended nucleotide edits without generating a significant proportion of indels. The term “indel(s)”, as used herein, refers to the insertion or deletion of a nucleotide base within a polynucleotide, for example, a target gene. Such insertions or deletions can lead to frame shift mutations within a coding region of a gene. Indel frequency of editing can be calculated by methods known in the art. In some embodiments, indel frequency can be calculated based on sequence alignment such as the CRISPResso 2 algorithm as described in Clement et al., Nat. Biotechnol. 37(3): 224-226 (2019), which is incorporated herein in its entirety. In some embodiments, the prime editing methods disclosed herein can have an indel frequency of less than 30%, less than 20%, less than 10%, less than 9%, less than 8%, less than 7%, less than 6%, less than 5%, less than 4%, less than 3%, less than 2%, less than 1.5%, or less than 1%. In some embodiments, any number of indels is determined after at least 1 hour, at least 2 hours, at least 6 hours, at least 12 hours, at least 24 hours, at least 36 hours, at least 48 hours, at least 3 days, at least 4 days, at least 5 days, at least 7 days, at least 10 days, or at least 14 days of exposing a target gene (e.g., an NCF1 gene, an NCF1B pseudogene, or an NCF1C pseudogene within the genome of a cell) to a prime editing composition.

[0422] In some embodiments, the prime editing compositions provided herein are capable of incorporating one or more intended nucleotide edits efficiently without generating a significant proportion of indels. In some embodiments, the prime editing methods disclosed herein have an editing efficiency of at least about 1% and an indel frequency of less than 10% in a population of target cells, e.g., a population of human HSPCs. In some embodiments, the prime editing methods disclosed herein have an editing efficiency of at least about 1% and an indel frequency of less than 7.5% in a population of target cells, e.g., a population of human HSPCs. In some embodiments, the prime editing methods disclosed herein have an editing efficiency of at least about 1% and an indel frequency of less than 5% in a population of target cells, e.g., a population of human HSPCs. In some embodiments, the prime editing methods disclosed herein have an editing efficiency of at least about 1% and an indel frequency of less than 2.5% in a population of target cells, e.g., a population of human HSPCs. In some embodiments, the prime editing methods disclosed herein have an editing efficiency of at least about 1% and an indel frequency of less than 1% in a population of target cells, e.g., a population of human HSPCs. In some embodiments, the prime editing methods disclosed herein have an editing efficiency of at least about 1% and an indel frequency of less than 0.5% in a population of target cells, e.g., a population of human HSPCs. In some embodiments, the prime editing methods disclosed herein have an editing efficiency of at least about 1% and an indel frequency of less than 0.1% in a population of target cells, e.g., a population of human HSPCs. In some embodiments, the prime editing methods disclosed herein have an editing efficiency of at least about 5% and an indel frequency of less than 1% in a population of target cells, e.g., a population of human HSPCs. In some embodiments, the prime editing methods disclosed herein have an editing efficiency of at least about 5% and an indel frequency of less than 0.5% in a population of target cells, e.g., a population of human HSPCs. In some embodiments, the prime editing methods disclosed herein have an editing efficiency of at least about 5% and an indel frequency of less than 0.10% in a population of target cells, e.g., a population of human HSPCs.

[0423] In some embodiments, the prime editing methods disclosed herein have an editing efficiency of at least about 7.5% and an indel frequency of less than 10% in a population of target cells, e.g., a population of human HSCs. In some embodiments, the prime editing methods disclosed herein have an editing efficiency of at least about 7.5% and an indel frequency of less than 7.5% in a population of target cells, e.g., a population of human HSCs. In some embodiments, the prime editing methods disclosed herein have an editing efficiency of at least about 7.5% and an indel frequency of less than 5% in a population of target cells, e.g., a population of human HSCs. In some embodiments, the prime editing methods disclosed herein have an editing efficiency of at least about 7.5% and an indel frequency of less than 2.5% in a population of target cells, e.g., a population of human HSCs. In some embodiments, the prime editing methods disclosed herein have an editing efficiency of at least about 7.5% and an indel frequency of less than 1% in a population of target cells, e.g., a population of human HSCs. In some embodiments, the prime editing methods disclosed herein have an editing efficiency of at least about 7.5% and an indel frequency of less than 0.5% in a population of target cells, e.g., a population of human HSCs. In some embodiments, the prime editing methods disclosed herein have an editing efficiency of at least about 7.5% and an indel frequency of less than 0.1% in a population of target cells, e.g., a population of human HSCs.

[0424] In some embodiments, the prime editing methods disclosed herein have an editing efficiency of at least about 10% and an indel frequency of less than 10% in a population of target cells, e.g., a population of human HSCs. In some embodiments, the prime editing methods disclosed herein have an editing efficiency of at least about 10% and an indel frequency of less than 7.5% in a population of target cells, e.g., a population of human HSCs. In some embodiments, the prime editing methods disclosed herein have an editing efficiency of at least about 10% and an indel frequency of less than 5% in a population of target cells, e.g., a population of human HSCs. In some embodiments, the prime editing methods disclosed herein have an editing efficiency of at least about 10% and an indel frequency of less than 2.5% in a population of target cells, e.g., a population of human HSCs. In some embodiments, the prime editing methods disclosed herein have an editing efficiency of at least about 10% and an indel frequency of less than 1% in a population of target cells, e.g., a population of human HSCs. In some embodiments, the prime editing methods disclosed herein have an editing efficiency of at least about 10% and an indel frequency of less than 0.5% in a population of target cells, e.g., a population of human HSCs. In some embodiments, the prime editing methods disclosed herein have an editing efficiency of at least about 10% and an indel frequency of less than 0.1% in a population of target cells, e.g., a population of human HSCs.

[0425] In some embodiments, the prime editing methods disclosed herein have an editing efficiency of at least about 15% and an indel frequency of less than 10% in a population of target cells, e.g., a population of human HSCs. In some embodiments, the prime editing methods disclosed herein have an editing efficiency of at least about 15% and an indel frequency of less than 7.5% in a population of target cells, e.g., a population of human HSCs. In some embodiments, the prime editing methods disclosed herein have an editing efficiency of at least about 15% and an indel frequency of less than 5% in a population of target cells, e.g., a population of human HSCs. In some embodiments, the prime editing methods disclosed herein have an editing efficiency of at least about 15% and an indel frequency of less than 2.5% in a population of target cells, e.g., a population of human HSCs. In some embodiments, the prime editing methods disclosed herein have an editing efficiency of at least about 15% and an indel frequency of less than 1% in a population of target cells, e.g., a population of human HSCs. In some embodiments, the prime editing methods disclosed herein have an editing efficiency of at least about 15% and an indel frequency of less than 0.5% in a population of target cells, e.g., a population of human HSCs. In some embodiments, the prime editing methods disclosed herein have an editing efficiency of at least about 15% and an indel frequency of less than 0.1% in a population of target cells, e.g., a population of human HSCs.

[0426] In some embodiments, the prime editing methods disclosed herein have an editing efficiency of at least about 15% and an indel frequency of less than 10% in a population of target cells, e.g., a population of human HSCs. In some embodiments, the prime editing methods disclosed herein have an editing efficiency of at least about 15% and an indel frequency of less than 7.5% in a population of target cells, e.g., a population of human HSCs. In some embodiments, the prime editing methods disclosed herein have an editing efficiency of at least about 15% and an indel frequency of less than 5% in a population of target cells, e.g., a population of human HSCs. In some embodiments, the prime editing methods disclosed herein have an editing efficiency of at least about 15% and an indel frequency of less than 2.5% in a population of target cells, e.g., a population of human HSCs. In some embodiments, the prime editing methods disclosed herein have an editing efficiency of at least about 20% and an indel frequency of less than 1% in a population of target cells, e.g., a population of human HSCs. In some embodiments, the prime editing methods disclosed herein have an editing efficiency of at least about 20% and an indel frequency of less than 0.5% in a population of target cells, e.g., a population of human HSCs. In some embodiments, the prime editing methods disclosed herein have an editing efficiency of at least about 20% and an indel frequency of less than 0.10% in a population of target cells, e.g., a population of human HSCs.

[0427] In some embodiments, the prime editing methods disclosed herein have an editing efficiency of at least about 30% and an indel frequency of less than 10% in a population of target cells, e.g., a population of human HSCs. In some embodiments, the prime editing methods disclosed herein have an editing efficiency of at least about 30% and an indel frequency of less than 7.5% in a population of target cells, e.g., a population of human HSCs. In some embodiments, the prime editing methods disclosed herein have an editing efficiency of at least about 30% and an indel frequency of less than 5% in a population of target cells, e.g., a population of human HSCs. In some embodiments, the prime editing methods disclosed herein have an editing efficiency of at least about 30% and an indel frequency of less than 2.5% in a population of target cells, e.g., a population of human HSCs. In some embodiments, the prime editing methods disclosed herein have an editing efficiency of at least about 30% and an indel frequency of less than 1% in a population of target cells, e.g., a population of human HSCs. In some embodiments, the prime editing methods disclosed herein have an editing efficiency of at least about 30% and an indel frequency of less than 0.5% in a population of target cells, e.g., a population of human HSCs. In some embodiments, the prime editing methods disclosed herein have an editing efficiency of at least about 30% and an indel frequency of less than 0.1% in a population of target cells, e.g., a population of human HSCs.

[0428] In some embodiments, the prime editing methods disclosed herein have an editing efficiency of at least about 40% and an indel frequency of less than 10% in a population of target cells, e.g., a population of human HSCs. In some embodiments, the prime editing methods disclosed herein have an editing efficiency of at least about 40% and an indel frequency of less than 7.5% in a population of target cells, e.g., a population of human HSCs. In some embodiments, the prime editing methods disclosed herein have an editing efficiency of at least about 40% and an indel frequency of less than 5% in a population of target cells, e.g., a population of human HSCs. In some embodiments, the prime editing methods disclosed herein have an editing efficiency of at least about 40% and an indel frequency of less than 2.5% in a population of target cells, e.g., a population of human HSCs. In some embodiments, the prime editing methods disclosed herein have an editing efficiency of at least about 40% and an indel frequency of less than 1% in a population of target cells, e.g., a population of human HSCs. In some embodiments, the prime editing methods disclosed herein have an editing efficiency of at least about 40% and an indel frequency of less than 0.5% in a population of target cells, e.g., a population of human HSCs. In some embodiments, the prime editing methods disclosed herein have an editing efficiency of at least about 40% and an indel frequency of less than 0.1G % in a population of target cells, e.g., a population of human HSCs.

[0429] In some embodiments, the prime editing methods disclosed herein have an editing efficiency of at least about 50% and an indel frequency of less than 10% in a population of target cells, e.g., a population of human HSCs. In some embodiments, the prime editing methods disclosed herein have an editing efficiency of at least about 50% and an indel frequency of less than 7.5% in a population of target cells, e.g., a population of human HSCs. In some embodiments, the prime editing methods disclosed herein have an editing efficiency of at least about 50% and an indel frequency of less than 5% in a population of target cells, e.g., a population of human HSCs. In some embodiments, the prime editing methods disclosed herein have an editing efficiency of at least about 50% and an indel frequency of less than 2.5% in a population of target cells, e.g., a population of human HSCs. In some embodiments, the prime editing methods disclosed herein have an editing efficiency of at least about 50% and an indel frequency of less than 1% in a population of target cells, e.g., a population of human HSCs. In some embodiments, the prime editing methods disclosed herein have an editing efficiency of at least about 50% and an indel frequency of less than 0.5% in a population of target cells, e.g., a population of human HSCs. In some embodiments, the prime editing methods disclosed herein have an editing efficiency of at least about 50% and an indel frequency of less than 0.1% in a population of target cells, e.g., a population of human HSCs.

[0430] In some embodiments, the prime editing methods disclosed herein have an editing efficiency of at least about 60% and an indel frequency of less than 10% in a population of target cells, e.g., a population of human HSCs. In some embodiments, the prime editing methods disclosed herein have an editing efficiency of at least about 60% and an indel frequency of less than 7.5% in a population of target cells, e.g., a population of human HSCs. In some embodiments, the prime editing methods disclosed herein have an editing efficiency of at least about 60% and an indel frequency of less than 5% in a population of target cells, e.g., a population of human HSCs. In some embodiments, the prime editing methods disclosed herein have an editing efficiency of at least about 60% and an indel frequency of less than 2.5% in a population of target cells, e.g., a population of human HSCs. In some embodiments, the prime editing methods disclosed herein have an editing efficiency of at least about 60% and an indel frequency of less than 1% in a population of target cells, e.g., a population of human HSCs. In some embodiments, the prime editing methods disclosed herein have an editing efficiency of at least about 60% and an indel frequency of less than 0.5% in a population of target cells, e.g., a population of human HSCs. In some embodiments, the prime editing methods disclosed herein have an editing efficiency of at least about 60% and an indel frequency of less than 0.10% in a population of target cells, e.g., a population of human HSCs.

[0431] In some embodiments, the prime editing methods disclosed herein have an editing efficiency of at least about 70% and an indel frequency of less than 10% in a population of target cells, e.g., a population of human HSCs. In some embodiments, the prime editing methods disclosed herein have an editing efficiency of at least about 70% and an indel frequency of less than 7.5% in a population of target cells, e.g., a population of human HSCs. In some embodiments, the prime editing methods disclosed herein have an editing efficiency of at least about 70% and an indel frequency of less than 5% in a population of target cells, e.g., a population of human HSCs. In some embodiments, the prime editing methods disclosed herein have an editing efficiency of at least about 70% and an indel frequency of less than 2.5% in a population of target cells, e.g., a population of human HSCs. In some embodiments, the prime editing methods disclosed herein have an editing efficiency of at least about 70% and an indel frequency of less than 1% in a population of target cells, e.g., a population of human HSCs. In some embodiments, the prime editing methods disclosed herein have an editing efficiency of at least about 70% and an indel frequency of less than 0.5% in a population of target cells, e.g., a population of human HSCs. In some embodiments, the prime editing methods disclosed herein have an editing efficiency of at least about 70% and an indel frequency of less than 0.10% in a population of target cells, e.g., a population of human HSCs.

[0432] In some embodiments, the prime editing methods disclosed herein have an editing efficiency of at least about 80% and an indel frequency of less than 10% in a population of target cells, e.g., a population of human HSCs. In some embodiments, the prime editing methods disclosed herein have an editing efficiency of at least about 80% and an indel frequency of less than 7.5% in a population of target cells, e.g., a population of human HSCs. In some embodiments, the prime editing methods disclosed herein have an editing efficiency of at least about 80% and an indel frequency of less than 5% in a population of target cells, e.g., a population of human HSCs. In some embodiments, the prime editing methods disclosed herein have an editing efficiency of at least about 80% and an indel frequency of less than 2.5% in a population of target cells, e.g., a population of human HSCs. In some embodiments, the prime editing methods disclosed herein have an editing efficiency of at least about 80% and an indel frequency of less than 1% in a population of target cells, e.g., a population of human HSCs. In some embodiments, the prime editing methods disclosed herein have an editing efficiency of at least about 80% and an indel frequency of less than 0.5% in a population of target cells, e.g., a population of human HSCs. In some embodiments, the prime editing methods disclosed herein have an editing efficiency of at least about 80% and an indel frequency of less than 0.10% in a population of target cells, e.g., a population of human HSCs.

[0433] In some embodiments, the prime editing methods disclosed herein have an editing efficiency of at least about 90% and an indel frequency of less than 10% in a population of target cells, e.g., a population of human HSCs. In some embodiments, the prime editing methods disclosed herein have an editing efficiency of at least about 90% and an indel frequency of less than 7.5% in a population of target cells, e.g., a population of human HSCs. In some embodiments, the prime editing methods disclosed herein have an editing efficiency of at least about 90% and an indel frequency of less than 5% in a population of target cells, e.g., a population of human HSCs. In some embodiments, the prime editing methods disclosed herein have an editing efficiency of at least about 90% and an indel frequency of less than 2.5% in a population of target cells, e.g., a population of human HSCs. In some embodiments, the prime editing methods disclosed herein have an editing efficiency of at least about 90% and an indel frequency of less than 1% in a population of target cells, e.g., a population of human HSCs. In some embodiments, the prime editing methods disclosed herein have an editing efficiency of at least about 90% and an indel frequency of less than 0.5% in a population of target cells, e.g., a population of human HSCs. In some embodiments, the prime editing methods disclosed herein have an editing efficiency of at least about 90% and an indel frequency of less than 0.1G % in a population of target cells, e.g., a population of human HSCs.

[0434] In some embodiments, the prime editing methods disclosed herein have an editing efficiency of at least about 95% and an indel frequency of less than 10% in a population of target cells, e.g., a population of human HSCs. In some embodiments, the prime editing methods disclosed herein have an editing efficiency of at least about 95% and an indel frequency of less than 7.5% in a population of target cells, e.g., a population of human HSCs. In some embodiments, the prime editing methods disclosed herein have an editing efficiency of at least about 95% and an indel frequency of less than 5% in a population of target cells, e.g., a population of human HSCs. In some embodiments, the prime editing methods disclosed herein have an editing efficiency of at least about 95% and an indel frequency of less than 2.5% in a population of target cells, e.g., a population of human HSCs. In some embodiments, the prime editing methods disclosed herein have an editing efficiency of at least about 95% and an indel frequency of less than 1% as measured in a population of target cells, e.g., a population of human HSCs. In some embodiments, the prime editing methods disclosed herein have an editing efficiency of at least about 95% and an indel frequency of less than 0.5% as measured in a population of target cells, e.g., a population of human HSCs. In some embodiments, the prime editing methods disclosed herein have an editing efficiency of at least about 95% and an indel frequency of less than 0.1% as measured in a population of target cells, e.g., population of human HSCs. In some embodiments, any number of indels is determined after at least 1 hour, at least 2 hours, at least 6 hours, at least 12 hours, at least 24 hours, at least 36 hours, at least 48 hours, at least 3 days, at least 4 days, at least 5 days, at least 7 days, at least 10 days, or at least 14 days of exposing a target gene (e.g., an NCF1 gene, an NCF1B pseudogene, or an NCF1C pseudogene, within the genome of a cell) to a prime editing composition. In some embodiments, the editing efficiency is determined after 1 hour, 2 hours, 6 hours, 12 hours, 24 hours, 36 hours, 48 hours, 3 days, 4 days, 5 days, 7 days, 10 days, or 14 days of exposing a target gene (e.g., an NCF1 gene, an NCF1B pseudogene, or an NCF1C pseudogene within the genome of a cell) to a prime editing composition.

[0435] In some embodiments, the prime editing composition described herein result in less than 50%, less than 40%, less than 30%, less than 20%, less than 19%, less than 18%, less than 17%, less than 16%, less than 15%, less than 14%, less than 13%, less than 12%, less than 11%, less than 10%, less than 9%, less than 8%, less than 7%, less than 6%, less than 5%, less than 4%, less than 3%, less than 2%, less than 1%, less than 0.9%, less than 0.8%, less than 0.7%, less than 0.6%, less than 0.5%, less than 0.4%, less than 0.3%, less than 0.2%, less than 0.1%, less than 0.09%, less than 0.08%, less than 0.07%, less than 0.06%, less than 0.05%, less than 0.04%, less than 0.03%, less than 0.02%, or less than 0.01% off-target editing in a chromosome that includes the target gene. In some embodiments, off-target editing is determined after at least 1 hour, at least 2 hours, at least 6 hours, at least 12 hours, at least 24 hours, at least 36 hours, at least 48 hours, at least 3 days, at least 4 days, at least 5 days, at least 7 days, at least 10 days, or at least 14 days of exposing a target gene (e.g., a nucleic acid within the genome of a cell) to a prime editing composition.

[0436] Because the NCF1 gene is flanked by two pseudogenes that have highly similar sequences as NCF1 (>99% sequence identity), genome editing of NCF1, NCF1B, and/or NCF1C may result in large deletion events of the regions between NCF1 and NCF1B, between NCF1 and NCF1C, or the entire region between NCF1B and NCF1C. As shown in FIG. 4B, deletion event between NCF1B and NCF1, between NCF1 and NCF1C, and between NCF1B and NCF1C would result in about 1.5 Mb, about 0.4 Mb, and about 2 Mb of deletion, respectively. In some embodiments, the prime editing method described herein can correct a NCF1 gene having a c-73_74delGT mutation (or a NCF1B/NCF1C pseudogene) with low level of large deletion events. Such deletion events may be measured by designing probes that bind to the sequences between NCF1B and NCF1 and/or between NCF1 and NCF1C. In some embodiments, the prime editing methods described herein result in less than 10%, less than 9%, less than 8%, less than 7%, less than 6%, less than 5%, less than 4%, less than 3%, less than 2%, less than 1%, or less than 0.5% large deletion in edited cells. In some embodiments, the prime editing methods described herein result in less than 4% large deletion in edited cells. In some embodiments, the prime editing methods described herein result in less than 3% large deletion in edited cells. In some embodiments, the prime editing methods described herein result in less than 2% large deletion in edited cells. In some embodiments, the prime editing methods described herein result in less than 1% Marge deletion in edited cells. In some embodiments, the prime editing methods described herein does not result in detectable level of large deletion in edited cells.

[0437] In some embodiments, the prime editing methods disclosed herein have an editing efficiency of at least about 90% and an indel frequency of less than 10% in a population of target cells, e.g., a population of human HSCs. In some embodiments, the prime editing methods disclosed herein have an editing efficiency of at least about 90% and an indel frequency of less than 7.5% in a population of target cells, e.g., a population of human HSCs. In some embodiments, the prime editing methods disclosed herein have an editing efficiency of at least about 90% and an indel frequency of less than 5% in a population of target cells, e.g., a population of human HSCs. In some embodiments, the prime editing methods disclosed herein have an editing efficiency of at least about 90% and an indel frequency of less than 2.5% in a population of target cells, e.g., a population of human HSCs. In some embodiments, the prime editing methods disclosed herein have an editing efficiency of at least about 90% and an indel frequency of less than 1% in a population of target cells, e.g., a population of human HSCs. In some embodiments, the prime editing methods disclosed herein have an editing efficiency of at least about 90%.

[0438] In some embodiments, the prime editing compositions (e.g., PEgRNAs and prime editors as described herein) and prime editing methods disclosed herein can be used to edit a target NCF1 gene, a target NCF1B pseudogene, or a target NCF1C pseudogene. In some embodiments, the target NCF1 gene comprises a mutation compared to a wild type NCF1 gene. In some embodiments, the mutation is associated with CGD. In some embodiments, the target NCF1 gene comprises an editing target sequence that contains the mutation associated with CGD. In some embodiments, the mutation is in a coding region of the target NCF1 gene. In some embodiments, the mutation is in an exon of the target NCF1 gene. In some embodiments, the mutation is in exon 1, exon 2, exon 3, exon 4, exon 5, exon 6, exon 7, exon 8, exon 9, exon 10, exon 11 of the NCF1 gene as compared to a wild type NCF1 gene. In some embodiments, the mutation is exon 2 of the NCF1 gene as compared to a wild type NCF1 gene. In some embodiments, the mutation is located between positions 74777167-74777368 of human chromosome 7 as set forth in human genome assembly consortium Human build 38 (GRCh38), GenBank accession GCF_000001405.38.

[0439] In some embodiments, the target NCF1 gene is in a chromosome in a cell. In some embodiments, the cell comprises a second copy of NCF1 gene. In some embodiments, the second copy of NCF1 gene comprises a mutation compared to a wild type NCF1 gene. In some embodiments, the second copy of NCF1 gene in the cell comprises a mutation that is different from the mutation in the target NCF1 gene. In some embodiments, editing of the target gene with the prime editing compositions (compositions (e.g., PEgRNAs and prime editors as described herein) and prime editing methods disclosed herein) restores expression and function of a NCF1 p47^{phox} protein subunit in the cell. In some embodiments, editing of the target gene with the prime editing compositions (compositions (e.g., PEgRNAs and prime editors as described herein) and prime editing methods disclosed herein) restores expression and function of a p47^{phox} in the cell.

[0440] In some embodiments, the prime editing compositions (e.g., PEgRNAs and prime editors as described herein) and prime editing methods disclosed herein can be used to edit a target pseudogene NCF1B. In some embodiments, the target NCF1 pseudogene comprises an editing target sequence in an exon of NCF1B. In some embodiments, the target NCF1 pseudogene comprises an editing target sequence in exon 2 of NCF1B. In some embodiments, the editing target sequence is located between positions 73223778-73223979 of human chromosome 7 as set forth in human genome assembly consortium Human build 38 (GRCh38), GenBank accession GCF_000001405.39. In some embodiments, the editing target sequence comprises nucleotides corresponding to positions 73223878-73223879 of human chromosome 7 as set forth in human genome assembly consortium Human build 38 (GRCh38), GenBank accession GCF_000001405.39.

[0441] In some embodiments, the prime editing compositions (e.g., PEgRNAs and prime editors as described herein) and prime editing methods disclosed herein can be used to edit a target NCF1 pseudogene, NCF1C. In some embodiments, the target NCF1 pseudogene comprises an editing target sequence in an exon of NCF1C. In some embodiments, the editing target sequence comprises a sequence in exon 2 of NCF1C. In some embodiments, the editing target sequence is located between positions 75168610-75168811 of human chromosome 7 as set forth in human genome assembly consortium Human build 38 (GRCh38), GenBank accession GCF_000001405.39. In some embodiments, the editing target sequence comprises nucleotides corresponding to positions 75168709-75168710 of human chromosome 7 as set forth in human genome assembly consortium Human build 38 (GRCh38), GenBank accession GCF_000001405.39.

[0442] In some embodiments, the prime editing method comprises contacting a target NCF1 gene with a prime editing composition comprising a prime editor, a PEgRNA, and/or a ngRNA. In some embodiments, contacting the target NCF1 gene with the prime editing composition results in incorporation of one or more intended nucleotide edits in the target NCF1 gene. In some embodiments, the incorporation is in a region of the target NCF1 gene that corresponds to an editing target sequence in the NCF1 gene. In some embodiments, the one or more intended nucleotide edits comprises a single nucleotide substitution, an insertion, a deletion, or any combination thereof, compared to the endogenous sequence of the target NCF1 gene. In some embodiments, incorporation of the one or more intended nucleotide edits results in replacement of one or more mutations with the corresponding sequence that encodes a wild type NCF1 polypeptide set forth in SEQ ID NO: 34422. In some embodiments, incorporation of the one or more intended nucleotide edits results in replacement of the one or more mutations with the corresponding sequence in a wild type NCF1 gene. In some embodiments, incorporation of the one more intended nucleotide edits results in correction of a mutation in the target NCF1 gene. In some embodiments, the target NCF1 gene comprises an editing template sequence that contains the mutation. In some embodiments, contacting the target NCF1 gene with the prime editing composition results in incorporation of one or more intended nucleotide edits in the target NCF1 gene, which corrects the mutation in the editing target sequence (or a double stranded region comprising the editing target sequence and the complementary sequence to the editing target sequence on a target strand) in the target NCF1 gene.

[0443] In some embodiments, incorporation of the one more intended nucleotide edits results in correction of a mutation in exon 2 of the target NCF1 gene as compared to a wild type NCF1 gene. In some embodiments, incorporation of the one more intended nucleotide edits results in correction of a mutation located between positions 74777167-74777368 of human chromosome 7 in the target NCF1 gene as set forth in human genome assembly consortium Human build 38 (GRCh38), GenBank accession GCF_000001405.38. In some embodiments, incorporation of the one more intended nucleotide edits results in a nucleotide insertion at position 74777167-74777368 in human chromosome 7 in the target NCF1 gene as compared to the endogenous sequence of the target NCF1 gene, thereby correcting c. 73_74GT (ΔGT) mutation at position 74777167-74777368 in human chromosome 7 in the target NCF1 gene as set forth in human genome assembly consortium Human build 38 (GRCh38), GenBank accession GCF_000001405.38. In some embodiments, incorporation of the one more intended nucleotide edits results in correction of an NCF1 gene sequence that comprises a c. 73_74GT (ΔGT) mutationn, and restores wild type expression and function of the NCF1 protein. In some embodiments, the nucleotide insertion at positions 74777269 comprises a 2 nucleotide insertion. In some embodiments, the 2 nucleotide insertion is a GT, TT, CT, or AT.

[0444] In some embodiments, incorporation of the one more intended nucleotide edits result in insertion of a nucleotide sequence into exon 2 of a target NCF1B pseudogene. In some embodiments, incorporation of the one more intended nucleotide edits results in an insertion of a nucleotide sequence located between positions 73223778-73223979 and of human chromosome 7 in the target NCF1B pseudogene gene as set forth in human genome assembly consortium Human build 38 (GRCh38), GenBank accession GCF_000001405.39. In some embodiments, incorporation of the one more intended nucleotide edits results in a nucleotide insertion located between positions 73223778-73223979 in human chromosome 7 in the target NCF1B pseudogene as compared to the endogenous sequence of the target NCF1B pseudogene. In some embodiments, incorporation of the one more intended nucleotide edits results in a nucleotide insertion of a sequence into NCF1B pseudogene sequence, and restores the reading frame ofNCF1B, thereby facilitating expression ofNCF1B. In some embodiments, the intended nucleotide edit comprises a two nucleotide insertion at a position corresponding to position 73223878 in human chromosome 7 as compared to the region corresponding to the editing target sequence in the NCF1B pseudogene. In some embodiments, the two nucleotide insertion is a GT. In some embodiments, the intended nucleotide edit comprises a two nucleotide insertion at a position corresponding to position 73223880 in human chromosome 7 as compared to the region corresponding to the editing target sequence in the NCF1B pseudogene. In some embodiments, the two nucleotide insertion is a GT, TT, CT, or AT.

[0445] In some embodiments, incorporation of the one more intended nucleotide edits result in insertion of a nucleotide sequence into exon 2 of a target NCF1C pseudogene. In some embodiments, incorporation of the one more intended nucleotide edits results in an insertion of a nucleotide sequence located between positions 75168610-75168811 and of human chromosome 7 in the target NCF1C pseudogene gene as set forth in human genome assembly consortium Human build 38 (GRCh38), GenBank accession GCF 000001405.39. In some embodiments, incorporation of the one more intended nucleotide edits results in a nucleotide insertion located between positions 75168610-75168811 in human chromosome 7 in the target NCF1C pseudogene as compared to the endogenous sequence of the target NCF1C pseudogene. In some embodiments, incorporation of the one more intended nucleotide edits results in a nucleotide insertion of a sequence into NCF1C pseudogene sequence, and restores the reading frame of NCF1C, thereby facilitating expression of NCF1C. In some embodiments, the intended nucleotide edit comprises a two nucleotide insertion at a position corresponding to position 75168710 in human chromosome 7 as compared to the region corresponding to the editing target sequence in the NCF1C pseudogene. In some embodiments, the two nucleotide insertion is a GT. In some embodiments, the intended nucleotide edit comprises a two nucleotide insertion at a position corresponding to position 75168708 in human chromosome 7 as compared to the region corresponding to the editing target sequence in the NCF1C pseudogene. In some embodiments, the two nucleotide insertion is a GT, TT, CT, or AT.

[0446] In some embodiments, the target NCF1 gene, the target NCF1B pseudogene, or the target NCF1C pseudogene is in a target cell. Accordingly, in one aspect provided herein is a method of editing a target cell comprising a target NCF1 gene that encodes a p47^{phox} polypeptide that comprises one or more mutations relative to a wild type NCF1 gene. In some embodiments, provided herein is a method of editing a target cell comprising a target NCF1B pseudogene or a target NCF1C pseudogene to result in expression of a p47^{phox} polypeptide encoded by the target NCF1B pseudogene or the target NCF1C pseudogene. In some embodiments, the methods of the present disclosure comprise introducing a prime editing composition comprising a PEgRNA, a prime editor polypeptide, and/or a ngRNA into the target cell that has the target NCF1 gene, the target NCF1B pseudogene, or the target NCF1C pseudogene to edit the target NCF1 gene, the target NCF1B pseudogene, or the target NCF1C pseudogene, thereby generating an edited cell. In some embodiments, the target cell is a mammalian cell. In some embodiments, the target cell is a human cell. In some embodiments, the target cell is a primary cell. In some embodiments, the target cell is a human primary cell. In some embodiments, the target cell is a progenitor cell. In some embodiments, the target cell is a human progenitor cell. In some embodiments, the target cell is a stem cell. In some embodiments, the target cell is a human stem cell. In some embodiments, the target cell is a stem cell. In some embodiments, the target cell is a human stem cell. In some embodiments, the target cell is an iPSC. In some embodiments, the target cell is a human iPSC. In some embodiments, the target cell is a hematopoietic stem cell (HSC). In some embodiments, the target cell is a human HSC. In some embodiments, the HSC is from bone marrow or mobilized peripheral blood. In some embodiments, the cell is a hematopoietic stem and progenitor cell. In some embodiments the human stem cell is an induced pluripotent stem cell (iPSC). In some embodiments, the cell is a human HSC. In some embodiments, the cell is a human CD34⁺ cell. In some embodiments, the cell is a hematopoietic stem and progenitor cell (HSPC). In some embodiments, the target cell is a hematopoietic progenitor cell, multipotent progenitor cell, a lymphoid progenitor cell, a myeloid progenitor cell, a megakaryocyte-erythroid progenitor cell, a granulocyte-megakaryocyte progenitor cell, a granulocyte, a promyelocyte, a neutrophil, an eosinophil, a basophil, an erythrocyte, a reticulocyte, a thrombocyte, a megakaryoblast, a platelet-producing megakaryocyte, a monocyte, a macrophage, a dendritic cell, a microglia, an osteoclast, a lymphocyte, a NK cell, a B-cell, or a T-cell. In some embodiments, the cell edited by prime editing can be differentiated into, or give rise to recovery of a population of cells, e.g., common lymphoid progenitor cells, common myeloid progenitor cells, megakaryocyte-erythroid progenitor cells, granulocyte-megakaryocyte progenitor cells, granulocytes, promyelocytes, neutrophils, eosinophils, basophils, erythrocytes, reticulocytes, thrombocytes, megakaryoblasts, platelet-producing megakaryocytes, platelets, monocytes, macrophages, dendritic cells, microglia, osteoclasts, lymphocytes, such as NK cells, B-cells or T-cells. In some embodiments, the cell edited by prime editing can be differentiated into, or give rise to recovery of a population of cells, e.g., neutrophils, platelets, red blood cells, monocytes, macrophages, antigen-presenting cells, microglia, osteoclasts, dendritic cells, and/or lymphocytes. In some embodiments, the target cell is an ex vivo cell. In some embodiments, the target cell is an ex vivo cell obtained from a human subject. In some embodiments, the target cell is in a subject, e.g., a human subject.

[0447] In some embodiments, components of a prime editing composition described herein are provided to a target cell in vitro. In some embodiments, components of a prime editing composition described herein are provided to a target cell ex vivo. In some embodiments, components of a prime editing composition described herein are provided to a target cell in vivo.

[0448] In some embodiments, incorporation of the one or more intended nucleotide edits in the target NCF1 gene that comprises one or more mutations restores wild type expression and function of the NCF1 protein encoded by the NCF1 gene. In some embodiments, the target NCF1 gene comprises a c. 73_74GT (ΔGT) mutation as compared to the wild type NCF1 gene prior to incorporation of the one or more intended nucleotide edits. In some embodiments, expression and/or function of the NCF1 protein may be measured when expressed in a target cell. In some embodiments, incorporation of the one or more intended nucleotide edits in the target NCF1 gene comprising one or more mutations lead to a fold change in a level of NCF1 gene expression, NCF1 protein expression, or a combination thereof. In some embodiments, a change in the level ofNCF1 expression level can comprise a fold change of, e.g., 2-fold, 3-fold, 4-fold, 5-fold, 6-fold, 7-fold, 8-fold, 9-fold, 10-fold, 15-fold, 20-fold, 25-fold, 30-fold, 40-fold, 50-fold, 60-fold, 70-fold, 80-fold, 90-fold, 100-fold or greater as compared to expression in a suitable control cell not introduced with a prime editing composition described herein. In some embodiments, incorporation of the one or more intended nucleotide edits in the target NCF1 gene that comprises one or more mutations restores wild type expression of the NCF1 protein by at least 10%, 20%, 30%, 40%, 50%, 60%, 70%, 80%, 90%, 95%, or 99% or more as compared to wild type expression of the NCF1 protein in a suitable control cell that comprises a wild type NCF1 gene.

[0449] In some embodiments, incorporation of the one or more intended nucleotide edits in the target NCF1B or NCF1C pseudogene that comprises one or more mutations or nucleotide alterations results in expression of a p47^{phox} polypeptide encoded by the target NCF1B or NCF1C pseudogene. In some embodiments, incorporation of the one or more intended nucleotide edits in the target NCF1B or NCF1C pseudogene that comprises one or more mutations or nucleotide alterations results in an edited NCF1B or NCF1C pseudogene that has a wild type NCF1 gene sequence. In some embodiments, incorporation of the one or more intended nucleotide edits in the target NCF1B or NCF1C pseudogene that comprises one or more mutations or nucleotide alterations results in expression of a functional p47^{Ph}OX polypeptide. In some embodiments, incorporation of the one or more intended nucleotide edits in the target NCF1B or NCF1C pseudogene that comprises one or more mutations or nucleotide alterations results in expression of a functional p47^{phox} polypeptide that has the same sequence as a wild type p47^{phox} polypeptide. In some embodiments, expression and/or function of the p47^{phox} polypeptide (NCF1 polypeptide) may be measured when expressed in a target cell. In some embodiments, incorporation of the one or more intended nucleotide edits in the target NCF1B or NCF1C pseudogene leads to a fold change in a level of NCF1B or NCF1C transcript expression, p47^{phox} protein expression, or a combination thereof. In some embodiments, a change in the level of NCF1B or NCF1C transcript expression level can comprise a fold change of, e.g., 2-fold, 3-fold, 4-fold, 5-fold, 6-fold, 7-fold, 8-fold, 9-fold, 10-fold, 15-fold, 20-fold, 25-fold, 30-fold, 40-fold, 50-fold, 60-fold, 70-fold, 80-fold, 90-fold, 100-fold or greater as compared to expression in a suitable control cell not introduced with a prime editing composition described herein. In some embodiments, incorporation of the one or more intended nucleotide edits in the target NCF1B or NCF1C pseudogene restores wild type expression of the p47^{phox} protein by at least 10, 20%, 30%, 40%, 50%, 60%, 70%, 80%, 90%, 95%, or 99% or more as compared to wild type expression of the NCF1 protein in a suitable control cell that comprises a wild type NCF1 gene. In some embodiments, a p47^{phox} protein expression increase can be measured by a functional assay. In some embodiments, the functional assay can comprise measurement of ferricytochrome c reduction, luminol-enhanced chemiluminescence, or ROS-mediated dihydrorhodamine (DHR) oxidation, which may be detected using flow cytometry, or any other functional assay known in the art or a combination thereof. In some embodiments, protein expression can be measured using a protein assay. In some embodiments, protein expression can be measured using antibody testing. In some embodiments, an antibody can comprise anti-p47^{phox}. In some embodiments, protein expression can be measured using ELISA, mass spectrometry, Western blot, sodium dodecyl sulfate polyacrylamide gel electrophoresis (SDS-PAGE), high performance liquid chromatography (HPLC), electrophoresis, or any combination thereof. In some embodiments, a protein assay can comprise SDS-PAGE and densitometric analysis of a Coomassie Blue-stained gel.

### Methods of Treating CGD

[0450] In some embodiments, provided herein are methods for treatment of a subject diagnosed with a disease associated with or caused by one or more pathogenic mutations. In some embodiments, provided herein are methods for treatment of a subject diagnosed with a disease associated with or caused by one or more pathogenic mutations that can be corrected by prime editing. In some embodiments, methods of treatment provided herein comprises editing one or more genes other than the gene that harbors the one or more pathogenic mutations. In some embodiments, provided herein are methods for treating CGD that comprise administering to a subject a therapeutically effective amount of a prime editing composition, or a pharmaceutical composition comprising a prime editing composition as described herein. In some embodiments, administration of the prime editing composition results in incorporation of one or more intended nucleotide edits in a target NCF1 gene in the subject. In some embodiments, administration of the prime editing composition results in correction of one or more pathogenic mutations, e.g., point mutations, insertions, or deletions, associated with CGD in the subject. In some embodiments, administration of the prime editing composition results in correction of one or more pathogenic mutations, e.g., point mutations, insertions, or deletions in the target NCF1 gene associated with CGD in the subject. In some embodiments, the target gene comprise an editing target sequence in the NCF1 gene that contains the pathogenic mutation. In some embodiments, administration of the prime editing composition results in incorporation of one or more intended nucleotide edits in the target NCF1 gene that corrects the pathogenic mutation in the editing target sequence (or a double stranded region comprising the editing target sequence and the complementary sequence to the editing target sequence on a target strand) of the target gene in the subject. In some embodiments, the subject has been diagnosed with CGD by sequencing of a NCF1 gene in the subject. In some embodiments, the subject comprises at least a copy of NCF1 gene that comprises one or more mutations compared to a wild type NCF1 gene. In some embodiments, the subject comprises at least a copy of NCF1 gene that comprises a mutation in a coding region of the NCF1 gene. In some embodiments, the subject comprises at least a copy of NCF1 gene that comprises a mutation in exon 1, exon 2, exon 3, exon 4, exon 5, exon 6, exon 7, exon 8, exon 9, exon 10, exon 11, as compared to a wild type NCF1 gene. In some embodiments, the subject comprises at least a copy of NCF1 gene that comprises a mutation in exon 2 as compared to a wild type NCF1 gene. In some embodiments, the subject comprises at least a copy of NCF1 gene comprising a c. 73_74GT (ΔGT) mutation, resulting in the deletion of a 2 nucleotide sequence located at positions 74777267-74777268 as compared to a wild type NCF1 gene. In some embodiments, the subject comprises at least a copy of NCF1 gene, wherein the copy of NCF1 gene comprises one or more of a c. 73_74GT (ΔGT) mutation, a c.125 G→A mutation, a c.124 C→T mutation, a c.157 A→G mutation, a c.229_1delG mutation, a c.247 G→A mutation, a c.268 C→T mutation, a c.269 G→A mutation, a c.271 C→T mutation, a c.292 T→G mutation, a c.295 A→G mutation, a c.328 C→T mutation, a c.333 T-*A mutation, a c.331_339delTGTCCCCAC mutation, a c.347delA mutation, a c.353_354delTCinsAA mutation, a c.403 A→G mutation, a c.446 C→A mutation, a c.574 G→A mutation, a c.541 delG mutation, a c.502 delG mutation, a c.579 G→A mutation, a c.581 G→A mutation, a c.604 C→T mutation, a c.612 G→A mutation, a c.678 T→G mutation, a c.730 G→A mutation, a c.784 G→A mutation, a c.784 G→C mutation, a c.734_748delTGTCCCTGCTCGAGG mutation, a c.811delG mutation, a c.838delC mutation, a c.923 C→T mutation, a c.72+1 G→A mutation, a c.72+3 G→T mutation, a c.153+1 G→A mutation, a c.153+5 G→C mutation, a c.574 G→A mutation, a c.574+1 G→A mutation, a c.682+1 G→A mutation, and a c.682+1 G→C mutation compared to a wild type NCF1 gene, which may be corrected by the prime editing composition provided herein. In some embodiments, the subject comprises two copies of NCF1 gene, wherein each of the both copies of the NCF1 gene comprises a c. 73_74GT (ΔGT) mutation. In some embodiments, the subject comprises two copies of NCF1 gene, wherein both copies of the NCF1 gene comprises one or more of a c. 73_74GT (ΔGT) mutation, a c.125 G→A mutation, a c.124 C→T mutation, a c.157 A→G mutation, a c.229_1delG mutation, a c.247 G→A mutation, a c.268 C→T mutation, a c.269 G→A mutation, a c.271 C→T mutation, a c.292 T→G mutation, a c.295 A→G mutation, a c.328 C→T mutation, a c.333 T→A mutation, a c.331_339delTGTCCCCAC mutation, a c.347delA mutation, a c.353_354delTCinsAA mutation, a c.403 A→G mutation, a c.446 C→A mutation, a c.574 G→A mutation, a c.541 delG mutation, a c.502 delG mutation, a c.579 G→A mutation, a c.581 G→A mutation, a c.604 C→T mutation, a c.612 G→A mutation, a c.678 T→G mutation, a c.730 G→A mutation, a c.784 G→A mutation, a c.784 G→C mutation, a c.734_748delTGTCCCTGCTCGAGG mutation, a c.811delG mutation, a c.838delC mutation, a c.923 C→T mutation, a c.72+1 G→A mutation, a c.72+3 G→T mutation, a c.153+1 G→A mutation, a c.153+5 G→C mutation, a c.574 G→A mutation, a c.574+1 G→A mutation, a c.682+1 G→A mutation, and a c.682+1 G→C mutation compared to a wild type NCF1 gene, which may be corrected by the prime editing composition provided herein. The mutations on both copies of the NCF1 gene in the subject may or may not be the same. In some embodiments, incorporation of the one or more intended nucleotide edits results in a wild type sequence of the target NCF1 gene, thereby treating CGD. In some embodiments, incorporation of the one or more intended nucleotide edits results in a GT two-nucleotide insertion at positions corresponding to positions 74777267-74777268, and/or a GT, AT, CT, or TT two-nucleotide insertion at corresponding to positions 74777269-74777270 of human chromosome 7 in the target NCF1 gene. In some embodiments, incorporation of the one or more intended nucleotide edits results in correction of the one or more mutations in the NCF1 gene. In some embodiments, incorporation of the one or more intended nucleotide edits restores expression of a wild type p47^{phox} polypeptide encoded by the target gene, thereby treating CGD.

[0451] In some embodiments, administration of the prime editing composition results in incorporation of one or more intended nucleotide edits in a target gene that is not the gene that harbors the pathogenic mutation. In some embodiments, administration of the prime editing composition results in incorporation of one or more intended nucleotide edits in a pseudogene that is not the gene that harbors the pathogenic mutation, wherein incorporation of the one or more intended nucleotide edits results in expression of a functional protein encoded by the pseudogene. In some embodiments, administration of the prime editing composition results in incorporation of one or more intended nucleotide edits in a NCF1B pseudogene. In some embodiments, the subject comprises at least a copy of NCF1 gene that comprises a mutation in exon 1, exon 2, exon 3, exon 4, exon 5, exon 6, exon 7, exon 8, exon 9, exon 10, exon 11, as compared to a wild type NCF1 gene. In some embodiments, the subject comprises at least a copy of NCF1 gene that comprises a mutation in exon 2 as compared to a wild type NCF1 gene. In some embodiments, the subject comprises at least a copy of NCF1 gene comprising a c. 73_74GT (ΔGT) mutation, resulting in the deletion of a 2 nucleotide sequence located at positions 74777267-74777268 as compared to a wild type NCF1 gene. In some embodiments, the subject comprises at least a copy of NCF1 gene, wherein the copy of NCF1 gene comprises one or more of a c. 73_74GT (ΔGT) mutation, a c.125 G→A mutation, a c.124 C→T mutation, a c.157 A→G mutation, a c.229_1delG mutation, a c.247 G→A mutation, a c.268 C→T mutation, a c.269 G→A mutation, a c.271 C→T mutation, a c.292 T→G mutation, a c.295 A→G mutation, a c.328 C→T mutation, a c.333 T→A mutation, a c.331_339delTGTCCCCAC mutation, a c.347delA mutation, a c.353_354delTCinsAA mutation, a c.403 A→G mutation, a c.446 C→A mutation, a c.574 G→A mutation, a c.541 delG mutation, a c.502 delG mutation, a c.579 G→A mutation, a c.581 G→A mutation, a c.604 C→T mutation, a c.612 G→A mutation, a c.678 T→G mutation, a c.730 G→A mutation, a c.784 G→A mutation, a c.784 G→C mutation, a c.734_748delTGTCCCTGCTCGAGG mutation, a c.811delG mutation, a c.838delC mutation, a c.923 C→T mutation, a c.72+1 G→A mutation, a c.72+3 G→T mutation, a c.153+1 G→A mutation, a c.153+5 G→C mutation, a c.574 G→A mutation, a c.574+1 G→A mutation, a c.682+1 G→A mutation, and a c.682+1 G→C mutation compared to a wild type NCF1 gene, which may be corrected by the prime editing composition provided herein. In some embodiments, the subject comprises at least one copy of a NCF1 gene that comprises a mutation other than a c. 73_74GT (ΔGT) mutation compared to a wild type NCF1 gene. In some embodiments, the subject comprises two copies of NCF1 gene, wherein each of the both copies of the NCF1 gene comprises a c. 73_74GT (ΔGT) mutation. In some embodiments, the subject comprises two copies of a NCF1 gene, wherein each of the both copies of the NCF1 gene comprises a mutation other than a c. 73_74GT (ΔGT) mutation compared to a wild type NCF1 gene. In some embodiments, the subject comprises two copies of NCF1 gene, wherein both copies of the NCF1 gene comprises one or more of a c. 73_74GT (ΔGT) mutation, a c.125 G→A mutation, a c.124 C→T mutation, a c.157 A→G mutation, a c.229_1delG mutation, a c.247 G→A mutation, a c.268 C→T mutation, a c.269 G→A mutation, a c.271 C→T mutation, a c.292 T→G mutation, a c.295 A→G mutation, a c.328 C→T mutation, a c.333 T→A mutation, a c.331_339delTGTCCCCAC mutation, a c.347delA mutation, a c.353_354delTCinsAA mutation, a c.403 A→G mutation, a c.446 C→A mutation, a c.574 G→A mutation, a c.541 delG mutation, a c.502 delG mutation, a c.579 G→A mutation, a c.581 G→A mutation, a c.604 C→T mutation, a c.612 G→A mutation, a c.678 T→G mutation, a c.730 G→A mutation, a c.784 G→A mutation, a c.784 G→C mutation, a c.734_748delTGTCCCTGCTCGAGG mutation, a c.811delG mutation, a c.838delC mutation, a c.923 C→T mutation, a c.72+1 G→A mutation, a c.72+3 G→T mutation, a c.153+1 G→A mutation, a c.153+5 G→C mutation, a c.574 G→A mutation, a c.574+1 G→A mutation, a c.682+1 G→A mutation, and a c.682+1 G→C mutation compared to a wild type NCF1 gene. The mutations on both copies of the NCF1 gene in the subject may or may not be the same. In some embodiments, administration of the prime editing composition results in incorporation of an insertion of GT nucleotides in a NCF1B pseudogene. In some embodiments, administration of the prime editing composition results in incorporation of an insertion of GT, AT, CT, or TT nucleotides in the exon 2 of a NCF1B pseudogene. In some embodiments, administration of the prime editing composition results in incorporation of an insertion of GT nucleotides in the exon 2 of a NCF1B pseudogene. In some embodiments, incorporation of the one or more intended nucleotide edits results in NCF1B pseudogene that has the same sequence as a wild type NCF1 gene. In some embodiments, incorporation of the one or more intended nucleotide edits results in expression of a functional p47^{phox} polypeptide encoded by the NCF1B pseudogene that compensates for the lack of functional p47^{phox} polypeptide caused by the one or more mutations in the NCF1 gene, thereby treating CGD. In some embodiments, incorporation of the one or more intended nucleotide edits results in expression of a wild type p47^{phox} polypeptide encoded by the NCF1B pseudogene, thereby treating CGD. In some embodiments, administration of the prime editing composition results in incorporation of one or more intended nucleotide edits in a NCF1C pseudogene. In some embodiments, administration of the prime editing composition results in incorporation of an insertion of GT nucleotides in a NCF1C pseudogene. In some embodiments, administration of the prime editing composition results in incorporation of an insertion of GT nucleotides in the exon 2 of a NCF1C pseudogene. In some embodiments, administration of the prime editing composition results in incorporation of an insertion of GT, AT, CT, or TT nucleotides in the exon 2 of a NCF1C pseudogene. In some embodiments, incorporation of the one or more intended nucleotide edits results in NCF1C pseudogene that has the same sequence as a wild type NCF1 gene. In some embodiments, incorporation of the one or more intended nucleotide edits results in expression of a functional p47^{phox} polypeptide encoded by the NCF1C pseudogene that compensates for the lack of functional p47^{phox} polypeptide caused by the one or more mutations in the NCF1 gene thereby treating CGD. In some embodiments, incorporation of the one or more intended nucleotide edits results in expression of a wild type p47^{phox} polypeptide encoded by the NCF1C pseudogene, thereby treating CGD. In some embodiments, administration of the prime editing composition results in incorporation of one or more intended nucleotide edits in a NCF1B pseudogene and a NCF1C pseudogene. In some embodiments, administration of the prime editing composition results in incorporation of an insertion of GT nucleotides in a NCF1B pseudogene and a NCF1C pseudogene. In some embodiments, administration of the prime editing composition results in incorporation of an insertion of GT nucleotides in the exon 2 of a NCF1B pseudogene and a NCF1C pseudogene. In some embodiments, administration of the prime editing composition results in incorporation of an insertion of GT, AT, CT, or TT nucleotides in the exon 2 of a NCF1B pseudogene and a NCF1C pseudogene. In some embodiments, incorporation of the one or more intended nucleotide edits results in a NCF1B pseudogene and a NCF1C pseudogene that both have the same sequence as a wild type NCF1 gene. In some embodiments, incorporation of the one or more intended nucleotide edits results in expression of a functional p47^{phox} polypeptide encoded by the NCF1B pseudogene and the NCF1C pseudogene that compensates for the lack of functional p47^{phox} polypeptide caused by the one or more mutations in the NCF1 gene thereby treating CGD.

[0452] In some embodiments, the method provided herein comprises administering to a subject an effective amount of a prime editing composition, for example, a PEgRNA, a prime editor, and/or a ngRNA. In some embodiments, the method comprises administering to the subject an effective amount of a prime editing composition described herein, for example, polynucleotides, vectors, or constructs that encode prime editing composition components, or RNPs, LNPs, and/or polypeptides comprising prime editing composition components. Prime editing compositions can be administered to target the NCF1 gene in a subject, e.g., a human subject, suffering from, having, susceptible to, or at risk for CGD. Identifying a subject in need of such treatment can be in the judgment of a subject or a health care professional and can be subjective (e.g., opinion) or objective (e.g., measurable by a test or diagnostic method). In some embodiments, the subject has CGD.

[0453] In some embodiments, a population of patients each having one or more mutations in the target gene (e.g., an NCF1 gene) may be treated with a prime editing composition (e.g., a PEgRNA, a prime editor, and optionally an ngRNA as described herein) disclosed herein. In some embodiments, a population of patients with different mutations in the target gene can be treated with the same prime editing composition comprising a single PEgRNA, a prime editor, and optionally an ngRNA. In some embodiments, a single prime editing composition comprising a single PEgRNA and a prime editor can be used to correct one or more, or two or more, mutations in the target gene in a populations of patients, wherein one or more patients in the population have different mutations from one another. In some embodiments, the prime editing composition comprising a single pair of PEgRNA, a prime editor, and optionally an ngRNA can be used to correct 2, 3, 4, 5, 6, 7, 8, 9, 10, 15, 20, 25 or more mutations in the target gene in a population of patients, wherein one or more patients in the population have different mutations from one another. In some embodiments, the PEgRNA comprises an editing template comprising a wild type sequence of the gene.

[0454] In some embodiments, a patient with multiple mutations in the target gene (e.g., an NCF1 gene) can be treated with a prime editing composition (e.g., a PEgRNAs, a prime editor, and optionally an ngRNA as described herein). For example, in some embodiments, a subject may comprise two copies of the gene, each comprising one or more different mutations. In some embodiments, a patient with one or more different mutations in the target gene can be treated with a single prime editing composition comprising a PEgRNAs, a prime editor, and optionally an ngRNA.

[0455] In some embodiments, the method comprises directly administering prime editing compositions provided herein to a subject. The prime editing compositions described herein can be delivered with in any form as described herein, e.g., as LNPs, RNPs, polynucleotide vectors such as viral vectors, or mRNAs. The prime editing compositions can be formulated with any pharmaceutically acceptable carrier described herein or known in the art for administering directly to a subject. Components of a prime editing composition or a pharmaceutical composition thereof may be administered to the subject simultaneously or sequentially. For example, in some embodiments, the method comprises administering a prime editing composition, or pharmaceutical composition thereof, comprising a complex that comprises a prime editor fusion protein and a PEgRNA and/or a ngRNA, to a subject. In some embodiments, the method comprises administering a polynucleotide or vector encoding a prime editor to a subject simultaneously with a PEgRNA and/or a ngRNA. In some embodiments, the method comprises administering a polynucleotide or vector encoding a prime editor to a subject before administration with a PEgRNA and/or a ngRNA.

[0456] Suitable routes of administrating the prime editing compositions to a subject include, without limitation: topical, subcutaneous, transdermal, intradermal, intralesional, intraarticular, intraperitoneal, intravesical, transmucosal, gingival, intradental, intracochlear, transtympanic, intraorgan, epidural, intrathecal, intramuscular, intravenous, intravascular, intraosseus, periocular, intratumoral, intracerebral, and intracerebroventricular administration. In some embodiments, the compositions described are administered intraperitoneally, intravenously, or by direct injection or direct infusion. In some embodiments, the compositions described are administered by direct injection or infusion into a subject. In some embodiments, the compositions described herein are administered to a subject by injection, by means of a catheter, by means of a suppository, or by means of an implant.

[0457] In some embodiments, the method comprises administering cells edited with a prime editing composition described herein to a subject. In some embodiments, the cells are allogeneic. In some embodiments, allogeneic cells are or have been contacted ex vivo with a prime editing composition or pharmaceutical composition thereof and are introduced into a human subject in need thereof. In some embodiments, the cells are autologous to the subject. In some embodiments, cells are removed from a subject and contacted ex vivo with a prime editing composition or pharmaceutical composition thereof and are re-introduced into the subject.

[0458] In some embodiments, cells are contacted ex vivo with one or more components of a prime editing composition. In some embodiments, the ex vivo-contacted cells are introduced into the subject, and the subject is administered in vivo with one or more components of a prime editing composition. For example, in some embodiments, cells are contacted ex vivo with a prime editor and introduced into a subject. In some embodiments, the subject is then administered with a PEgRNA and/or a ngRNA, or a polynucleotide encoding the PEgRNA and/or the ngRNA.

[0459] In some embodiments, cells contacted with the prime editing composition are determined for incorporation of the one or more intended nucleotide edits in the genome before re-introduction into the subject. In some embodiments, the cells are enriched for incorporation of the one or more intended nucleotide edits in the genome before re-introduction into the subject. In some embodiments, the edited cells are primary cells. In some embodiments, the edited cells are progenitor cells. In some embodiments, the edited cells are stem cells. In some embodiments, the edited cells are hematopoietic stem cells (HSCs). In some embodiments, the edited cells are primary human cells. In some embodiments, the edited cells are human progenitor cells. In some embodiments, the edited cells are human stem cells. In some embodiments, the edited cells are hematopoietic stem cells (HSCs). In some embodiments, the edited cells are human HSCs. In some embodiments, the edited cells are hematopoietic stem and progenitor cells (HSPCs). In some embodiments, the edited cells are human hematopoietic stem and progenitor cells (HSPCs). In some embodiments, the edited cells are human CD34t cells. In some embodiments, the edited cells are iPSCs. In some embodiments, the edited cells are HSC is from bone marrow or mobilized peripheral blood. In some embodiments, the cell is a hematopoietic stem and progenitor cell. In some embodiments, the cell is a human HSC. In some embodiments, the cell is a HSPC. In some embodiments, the cell is a human HSPC. In some embodiments, the cell is a human CD34V cell. In some embodiments, the edited cells are hematopoietic progenitor cells, multipotent progenitor cells, lymphoid progenitor cells, myeloid progenitor cells, megakaryocyte-erythroid progenitor cells, granulocyte-megakaryocyte progenitor cells, granulocytes, promyelocytes, neutrophils, eosinophils, basophil, erythrocytes, reticulocytes, thrombocytes, megakaryoblasts, platelet-producing megakaryocytes, monocytes, macrophages, dendritic cells, microglia, osteoclasts, lymphocytes, NK cells, B-cells, or T-cells. In some embodiments, the cell edited by prime editing can be differentiated into, or give rise to recovery of a population of cells, e.g., common lymphoid progenitor cells, common myeloid progenitor cells, megakaryocyte-erythroid progenitor cells, granulocyte-megakaryocyte progenitor cells, granulocytes, promyelocytes, neutrophils, eosinophils, basophils, erythrocytes, reticulocytes, thrombocytes, megakaryoblasts, platelet-producing megakaryocytes, platelets, monocytes, macrophages, dendritic cells, microglia, osteoclasts, lymphocytes, such as NK cells, B-cells or T-cells. In some embodiments, the cell edited by prime editing can be differentiated into, or give rise to recovery of a population of cells, e.g., neutrophils, platelets, red blood cells, monocytes, macrophages, antigen-presenting cells, microglia, osteoclasts, dendritic cells, and/or lymphocytes. In some embodiments, the edited cells are an ex vivo cells. In some embodiments, the edited cells are an ex vivo cells obtained from a human subject. In some embodiments, the edited cells are in a subject, e.g., a human subject. The prime editing composition or components thereof may be introduced into a cell by any delivery approaches as described herein, including LNP administration, RNP administration, electroporation, nucleofection, transfection, viral transduction, microinjection, cell membrane disruption and diffusion, or any other approach known in the art.

[0460] The cells edited with prime editing can be introduced into the subject by any route known in the art. In some embodiments, the edited cells are administered to a subject by direct infusion. In some embodiments, the edited cells are administered to a subject by intravenous infusion. In some embodiments, the edited cells are administered to a subject as implants.

[0461] The pharmaceutical compositions, prime editing compositions, and cells, as described herein, can be administered in effective amounts. In some embodiments, the effective amount depends upon the mode of administration. In some embodiments, the effective amount depends upon the stage of the condition, the age and physical condition of the subject, the nature of concurrent therapy, if any, and like factors well-known to the medical practitioner.

[0462] The specific dose administered can be a uniform dose for each subject. Alternatively, a subject's dose can be tailored to the approximate body weight of the subject. Other factors in determining the appropriate dosage can include the disease or condition to be treated or prevented, the severity of the disease, the route of administration, and the age, sex and medical condition of the patient.

[0463] In embodiments wherein components of a prime editing composition are administered sequentially, the time between sequential administration can be at least 1 hour, at least 2 hours, at least 6 hours, at least 12 hours, at least 24 hours, at least 36 hours, at least 48 hours, at least 3 days, at least 4 days, at least 5 days, at least 7 days, at least 10 days, or at least 14 days.

[0464] In some embodiments, a method of monitoring treatment progress is provided. In some embodiments, the method includes the step of determining a level of diagnostic marker, for example, correction of a mutation in NCF1 gene, expression level of a functional p47^{phox} polypeptide, or diagnostic measurement associated with CGD, (e.g., ROS-mediated dihydrorhodamine (DHR) oxidation assay) in a subject suffering from CGD symptoms and has been administered an effective amount of a prime editing composition described herein. The level of the diagnostic marker determined in the method can be compared to known levels of the marker in either healthy normal controls or in other afflicted subjects to establish the subject's disease status.

### Delivery

[0465] Prime editing compositions described herein can be delivered to a cellular environment with any approach known in the art. Components of a prime editing composition can be delivered to a cell by the same mode or different modes. For example, in some embodiments, a prime editor can be delivered as a polypeptide or a polynucleotide (DNA or RNA) encoding the polypeptide. In some embodiments, a PEgRNA can be delivered directly as an RNA or as a DNA encoding the PEgRNA.

[0466] In some embodiments, a prime editing composition component is encoded by a polynucleotide, a vector, or a construct. In some embodiments, a prime editor polypeptide, a PEgRNA and/or a ngRNA is encoded by a polynucleotide. In some embodiments, the polynucleotide encodes a prime editor fusion protein comprising a DNA binding domain and a DNA polymerase domain. In some embodiments, the polynucleotide encodes a DNA polymerase domain of a prime editor. In some embodiments, the polynucleotide encodes a DNA polymerase domain of a prime editor. In some embodiments, the polynucleotide encodes a portion of a prime editor protein, for example, a N-terminal portion of a prime editor fusion protein connected to an intein-N. In some embodiments, the polynucleotide encodes a portion of a prime editor protein, for example, a C-terminal portion of a prime editor fusion protein connected to an intein-C. In some embodiments, the polynucleotide encodes a PEgRNA and/or a ngRNA. In some embodiments, the polypeptide encodes two or more components of a prime editing composition, for example, a prime editor fusion protein and a PEgRNA.

[0467] In some embodiments, the polynucleotide encoding one or more prime editing composition components is delivered to a target cell is integrated into the genome of the cell for long-term expression, for example, by a retroviral vector. In some embodiments, the polynucleotide delivered to a target cell is expressed transiently. For example, the polynucleotide may be delivered in the form of a mRNA, or a non-integrating vector (non-integrating virus, plasmids, minicircle DNAs) for episomal expression.

[0468] In some embodiments, a polynucleotide encoding one or more prime editing system components can be operably linked to a regulatory element, e.g., a transcriptional control element, such as a promoter. In some embodiments, the polynucleotide is operably linked to multiple control elements. Depending on the expression system utilized, any of a number of suitable transcription and translation control elements, including constitutive and inducible promoters, transcription enhancer elements, transcription terminators, etc. may be used in the expression vector (e.g., U6 promoter, H1 promoter).

[0469] In some embodiments, the polynucleotide encoding one or more prime editing composition components is a part of, or is encoded by, a vector. In some embodiments, the vector is a viral vector. In some embodiments, the vector is a non-viral vector.

[0470] Non-viral vector delivery systems can include DNA plasmids, RNA (e.g., a transcript of a vector described herein), naked nucleic acid, and nucleic acid complexed with a delivery vehicle, such as a liposome. In some embodiments, the polynucleotide is provided as an RNA, e.g., a mRNA or a transcript. Any RNA of the prime editing systems, for example a guide RNA or a base editor-encoding mRNA, can be delivered in the form of RNA. In some embodiments, one or more components of the prime editing system that are RNAs is produced by direct chemical synthesis or may be transcribed in vitro from a DNA. In some embodiments, a mRNA that encodes a prime editor polypeptide is generated using in vitro transcription. Guide polynucleotides (e.g., PEgRNA or ngRNA) can also be transcribed using in vitro transcription from a cassette containing a T7 promoter, followed by the sequence “GG”, and guide polynucleotide sequence. In some embodiments, the prime editor encoding mRNA, PEgRNA, and/or ngRNA are synthesized in vitro using an RNA polymerase enzyme (e.g., T7 polymerase, T3 polymerase, SP6 polymerase, etc.). Once synthesized, the RNA can directly contact a target NCF1 gene or can be introduced into a cell using any suitable technique for introducing nucleic acids into cells (e.g., microinjection, electroporation, transfection). In some embodiments, the prime editor-coding sequences, the PEgRNAs, and/or the ngRNAs are modified to include one or more modified nucleoside e.g. using pseudo-U or 5-Methyl-C.

[0471] Methods of non-viral delivery of nucleic acids can include lipofection, electroporation, nucleofection, microinjection, biolistics, virosomes, liposomes, immunoliposomes, polycation or lipid:nucleic acid conjugates, nanoparticles, cell penetrating peptides and associated conjugated molecules and chemistry, naked DNA, artificial virions, cell membrane disruption by a microfluidics device, and agent-enhanced uptake of DNA. Cationic and neutral lipids that are suitable for efficient receptor-recognition lipofection of polynucleotides can be used. Delivery can be to cells (e.g., in vitro or ex vivo administration) or target tissues (e.g., in vivo administration). The preparation of lipid:nucleic acid complexes, including targeted liposomes such as immunolipid complexes, can be used.

[0472] Viral vector delivery systems can include DNA and RNA viruses, which can have either episomal or integrated genomes after delivery to the cell. RNA or DNA viral based systems can be used to target specific cells and trafficking the viral payload to an organelle of the cell. Viral vectors can be administered directly (in vivo) or they can be used to treat cells in vitro, and the modified cells can optionally be administered after delivery (ex vivo).

[0473] In some embodiments, the viral vector is a retroviral, lentiviral, adenoviral, adeno-associated viral or herpes simplex viral vector. Retroviral vectors can include those based upon murine leukemia virus (MuLV), gibbon ape leukemia virus (GaLV), Simian Immuno deficiency virus (SIV), human immuno deficiency virus (HIV), and combinations thereof. In some embodiments, the retroviral vector is a lentiviral vector. In some embodiments, the retroviral vector is a gamma retroviral vector. In some embodiments, the viral vector is an adenoviral vector. In some embodiments, the viral vector is an adeno-associated virus (“AAV”) vector.

[0474] In some embodiments, polynucleotides encoding one or more prime editing composition components are packaged in a virus particle. Packaging cells can be used to form virus particles that can infect a target cell. Such cells can include 293 cells, (e.g., for packaging adenovirus), and .psi.2 cells or PA317 cells (e.g., for packaging retrovirus). Viral vectors can be generated by producing a cell line that packages a nucleic acid vector into a viral particle. The vectors can contain the minimal viral sequences required for packaging and subsequent integration into a host. The vectors can contain other viral sequences being replaced by an expression cassette for the polynucleotide(s) to be expressed. The missing viral functions can be supplied in trans by the packaging cell line. For example, AAV vectors can comprise ITR sequences from the AAV genome which are required for packaging and integration into the host genome. In some embodiment, the polynucleotides are a DNA polynucleotide. In some embodiment, the polynucleotides are an RNA polynucleotide; e.g., an mRNA polynucleotide.

[0475] In some embodiments, the AAV vector is selected for tropism to a particular cell, tissue, organism. In some embodiments, the AAV vector is pseudotyped, e.g., AAV5/8. In some embodiments, polynucleotides encoding one or more prime editing composition components are packaged in a first AAV and a second AAV. In some embodiments, the polynucleotides encoding one or more prime editing composition components are packaged in a first rAAV and a second rAAV.

[0476] In some embodiments, dual AAV vectors are generated by splitting a large transgene expression cassette in two separate halves (5′ and 3′ ends that encode N-terminal portion and C-terminal portion of, e.g., a prime editor polypeptide), where each half of the cassette is no more than 5 kb in length, optionally no more than 4.7 kb in length, and is packaged in a single AAV vector. In some embodiments, the full-length transgene expression cassette is reassembled upon co-infection of the same cell by both dual AAV vectors. In some embodiments, a portion or fragment of a prime editor polypeptide, e.g., a Cas9 nickase, is fused to an intein. The portion or fragment of the polypeptide can be fused to the N-terminus or the C-terminus of the intein. In some embodiments, a N-terminal portion of the polypeptide is fused to an intein-N, and a C-terminal portion of the polypeptide is separately fused to an intein-C. In some embodiments, a portion or fragment of a prime editor fusion protein is fused to an intein and fused to an AAV capsid protein. In some embodiments, intein-N may be fused to the N-terminal portion of a first domain described herein, and intein-C may be fused to the C-terminal portion of a second domain described herein for the joining of the N-terminal portion to the C-terminal portion, thereby joining the first and second domains. In some embodiments, the first and second domains are each independently chosen from a DNA binding domain or a DNA polymerase domain. The intein, nuclease and capsid protein can be fused together in any arrangement (e.g., nuclease-intein-capsid, intein-nuclease-capsid, capsid-intein-nuclease, etc.). In some embodiments, a polynucleotide encoding a prime editor fusion protein is split in two separate halves, each encoding a portion of the prime editor fusion protein and separately fused to an intein. In some embodiments, each of the two halves of the polynucleotide is packaged in an individual AAV vector of a dual AAV vector system. In some embodiments, each of the two halves of the polynucleotide is no more than 5 kb in length, optionally no more than 4.7 kb in length. In some embodiments, the full-length prime editor fusion protein is reassembled upon co-infection of the same cell by both dual AAV vectors, expression of both halves of the prime editor fusion protein, and self-excision of the inteins. In some embodiments, the in vivo use of dual AAV vectors results in the expression of full-length full-length prime editor fusion proteins. In some embodiments, the use of the dual AAV vector platform allows viable delivery of transgenes of greater than about 4.5, 4.6, 4.7, 4.8, 4.9, or 5.0 kb in size.

[0477] In some embodiments, an intein is inserted at a splice site within a Cas protein. In some embodiments, insertion of an intein disrupts a Cas activity. As used herein, “intein” refers to a self-splicing protein intron (e.g., peptide), e.g., which ligates flanking N-terminal and C-terminal exteins (e.g., fragments to be joined). In some embodiments, an intein may comprise a polypeptide that is able to excise itself and join exteins with a peptide bond (e.g., protein splicing). In some embodiments, an intein of a precursor gene comes from two genes (e.g., split intein). In some embodiments, an intein may be a synthetic intein. Non-limiting examples of intein pairs that may be used in accordance with the present disclosure include: dnaE-n and dnaE-c. a 4-hydroxytamoxifen (4-HT)-responsive intein, an iCas molecule, a Ssp DnaX intein, Ter DnaE3 intein, Ter ThyX intein, Rma DnaB intein, Cfa DnaE intein, Ssp GyrB intein, and Rma DnaB intein. In some embodiments, intein fragments may be fused to the N terminal and C-terminal portion of a split Cas protein respectively for joining the fragments of split Cas9.

[0478] In some embodiments, the split Cas9 system may be used in general to bypass the packing limit of the viral delivery vehicles. In some embodiments, a split Cas9 may be a Type II CRISPR system Cas9. In some embodiments, a first nucleic acid encodes a first portion of the Cas9 protein having a first split-intein and wherein the second nucleic acid encodes a second portion of the Cas9 protein having a second split-intein complementary to the first split-intein and wherein the first portion of the Cas9 protein and the second portion of the Cas9 protein are joined together to form the Cas9 protein. In some embodiments, the first portion of the Cas9 protein is the N-terminal fragment of the Cas9 protein and the second portion of the Cas9 protein is the C-terminal fragment of the Cas9 protein. In some embodiments, a split site may be selected which are surface exposed due to the sterical need for protein splicing.

[0479] In some embodiments, a Cas protein may be split into two fragments at any C, T, A, or S. In some embodiments, a Cas9 may be intein split at residues 203-204, 280-292, 292-364, 311-325, 417-438, 445-483, 468-469, 481-502, 513-520, 522-530, 565-637, 696-707, 713-714, 795-804, 803-810, 878-887, and 1153-1154. In some embodiments, protein is divided into two fragments at SpCas9 T310, T313, A456, S469, or C574. In some embodiments, split Cas9 fragments across different split pairs yield combinations that provided the complete polypeptide sequence activate gene expression even when fragments are partially redundant. In some embodiments, a functional Cas9 protein may be reconstituted from two inactive split-Cas9 peptides in the presence of gRNA by using a split-intein protein splicing strategy. In some embodiment, the split Cas9 fragments are fused to either a N-terminal intein fragment or a C-terminal intein fragment, which can associate with each other and catalytically splice the two split Cas9 fragments into a functional reconstituted Cas9 protein. In some embodiments, a split-Cas9 can be packaged into self-complementary AAV. In some embodiments, a split-Cas9 comprises a 2.5 kb and a 2.2 kb fragment of S. pyogenes Cas9 coding sequences.

[0480] In some embodiments, a split-Cas9 architecture reduces the length and/or size of the coding sequences of a viral vector, e.g., AAV.

[0481] A target cell can be transiently or non-transiently transfected with one or more vectors described herein. A cell can be transfected as it naturally occurs in a subject. A cell can be taken or derived from a subject and transfected. A cell can be derived from cells taken from a subject, such as a cell line. In some embodiments, a cell transfected with one or more vectors described herein can be used to establish a new cell line comprising one or more vector-derived sequences. In some embodiments, a cell transiently transfected with the compositions of the disclosure (such as by transient transfection of one or more vectors, or transfection with RNA), and modified through the activity of a prime editor, can be used to establish a new cell line comprising cells containing the modification but lacking any other exogenous sequence. Any suitable vector compatible with the host cell can be used with the methods of the disclosure. Non-limiting examples of vectors include pXT1, pSG5, pSVK3, pBPV, pMSG, and pSVLSV40.

[0482] In some embodiments, a prime editor protein can be provided to cells as a polypeptide. In some embodiments, the prime editor protein is fused to a polypeptide domain that increases solubility of the protein. In some embodiments, the prime editor protein is formulated to improve solubility of the protein.

[0483] In some embodiment, a prime editor polypeptide is fused to a polypeptide permeant domain to promote uptake by the cell. In some embodiments, the permeant domain is a including peptide, a peptidomimetic, or a non-peptide carrier. For example, a permeant peptide may be derived from the third alpha helix of Drosophila melanogaster transcription factor Antennapaedia, referred to as penetratin. As another example, the permeant peptide can comprise the HIV-1 tat basic region amino acid sequence, which may include, for example, amino acids 49-57 of naturally-occurring tat protein. Other permeant domains can include poly-arginine motifs, for example, the region of amino acids 34-56 of HIV-1 rev protein, nona-arginine, and octa-arginine. The nona-arginine (R9) sequence can be used. The site at which the fusion can be made may be selected in order to optimize the biological activity, secretion or binding characteristics of the polypeptide.

[0484] In some embodiments, a prime editor polypeptide is produced in vitro or by host cells, and it may be further processed by unfolding, e.g., heat denaturation, DTT reduction, etc. and may be further refolded. In some embodiments, a prime editor polypeptide is prepared by in vitro synthesis. Various commercial synthetic apparatuses can be used. By using synthesizers, naturally occurring amino acids can be substituted with unnatural amino acids. In some embodiments, a prime editor polypeptide is isolated and purified in accordance with recombinant synthesis methods, for example, by expression in a host cell and the lysate purified using HPLC, exclusion chromatography, gel electrophoresis, affinity chromatography, or other purification technique.

[0485] In some embodiments, a prime editing composition, for example, prime editor polypeptide components and PEgRNA/ngRNA are introduced to a target cell by nanoparticles. In some embodiments, the prime editor polypeptide components and the PEgRNA and/or ngRNA form a complex in the nanoparticle. Any suitable nanoparticle design can be used to deliver genome editing system components or nucleic acids encoding such components. In some embodiments, the nanoparticle is inorganic. In some embodiments, the nanoparticle is organic. In some embodiments, a prime editing composition is delivered to a target cell, e.g., a HSC, in an organic nanoparticle, e.g., a lipid nanoparticle (LNP) or polymer nanoparticle.

[0486] In some embodiments, LNPs are formulated from cationic, anionic, neutral lipids, or combinations thereof. In some embodiments, neutral lipids, such as the fusogenic phospholipid DOPE or the membrane component cholesterol, are included to enhance transfection activity and nanoparticle stability. In some embodiments, LNPs are formulated with hydrophobic lipids, hydrophilic lipids, or combinations thereof. Lipids may be formulated in a wide range of molar ratios to produce an LNP. Any lipid or combination of lipids that are known in the art can be used to produce an LNP. Exemplary lipids used to produce LNPs are provided in Table 3 below.

[0487] In some embodiments, components of a prime editing composition form a complex prior to delivery to a target cell. For example, a prime editor fusion protein, a PEgRNA, and/or a ngRNA can form a complex prior to delivery to the target cell. In some embodiments, a prime editing polypeptide (e.g., a prime editor fusion protein) and a guide polynucleotide (e.g. a PEgRNA or ngRNA) form a ribonucleoprotein (RNP) for delivery to a target cell. In some embodiments, the RNP comprises a prime editor fusion protein in complex with a PEgRNA. RNPs may be delivered to cells using known methods, such as electroporation, nucleofection, or cationic lipid-mediated methods, or any other approaches known in the art. In some embodiments, delivery of a prime editing composition or complex to the target cell does not require the delivery of foreign DNA into the cell. In some embodiments, the RNP comprising the prime editing complex is degraded over time in the target cell. Exemplary lipids for use in nanoparticle formulations and/or gene transfer are shown in Table 85 below.

TABLE 85
Exemplary lipids for nanoparticle formulation or gene transfer

| Lipid | Abbreviation | Feature |
|---|---|---|
| 1,2-Dioleoyl-sn-glycero-3-phosphatidylcholine | DOPC | Helper |
| 1,2-Dioleoyl-sn-glycero-3-phosphatidylethanolamine | DOPE | Helper |
| Cholesterol | | Helper |
| N41-(2,3-Dioleyloxy)prophyliN,N,N-trimethylammonium | DOTMA | Cationic |
| Chloride | | |
| 1,2-Dioleoyloxy-3-trimethylammonium-propane | DOGS | Cationic |
| Dioctadecylamidoglycylspermine | | |
| N-(3-Aminopropy1)-N,N-dimethy1-2,3-bis(dodecyloxy)-1- | GAP-DLRIE | Cationic |
| propanaminium bromide | | |
| Cetyltrimethylammonium bromide | CTAB | Cationic |
| 6-Lauroxyhexyl omithinate | LHON | Cationic |
| 1-(2,3-Dioleoyloxypropy1)-2,4,6-trimethylpyridinium | 2Oc | Cationic |
| 2,3-Dioleyloxy-N-P(spenninecarboxamido-ethy1J-N,Ndimethyl- | DOSPA | Cationic |
| 1-propanatninium trifluoroacetate | | |
| 1,2-Dioley1-3-trimethylamtnonium-propane | DOPA | Cationic |
| N-(2-Hydroxyethyl)-N,N-dimethy1-2,3-bis(tetradecyloxy)-1- | MDRIE | Cationic |
| propanaminium bromide | | |
| Dimyristooxypropyl dimethyl hydroxyethyl ammonium | DMRI | Cationic |
| bromide | | |
| 3β-[N-(N', N'-Dimethylaminoethane)-carbamoyl]cholesterol | DC-Chol | Cationic |
| Bis-guanidium-tren-cholesterol | BGTC | Cationic |
| 1,3-Diodeoxy-2-(6-carboxy-spermy1)-propylamide | DOSPER | Cationic |
| Dimethyloctadecylammonium bromide | DDAB | Cationic |
| Dioctadecylamidoglicylspermidin | DSL | Cationic |
| rac-[(2,3-Dioctadecyloxypropyl)(2-hydroxyethyl)]- | CLIP-1 | Cationic |
| dimethylammonium chloride | | |
| rac-[2(2,3-Dihexadecyloxypropyloxymethyloxy) | CLIP-6 | Cationic |
| ethyl]trimethylammoniun bromide | | |
| Ethyldimyristoylphosphatidylcholine | EDMPC | Cationic |
| 1,2-Distearyloxy-N,N-dimethyl-3-aminopropane | DSDMA | Cationic |
| 1,2-Dimyristoyl-trimethylammonium propane | DMTAP | Cationic |
| O,O′-Dimyristyl-N-lysyl aspartate | DMKE | Cationic |
| 1,2-Distearoyl-sn-glycero-3-ethylpho sphocholine | DSEPC | Cationic |
| N-Palmitoyl D-erythro-sphingosyl carbamoyl-spenmine | CCS | Cationic |
| N-t-Butyl-N0-tetradecyl-3-tetradecylaminopropionamidine | diC14-amidine | Cationic |
| Octadecenolyoxy[ethyl-2-heptadecenyl-3 hydroxyethyl] | DOTIM | Cationic |
| imidazolinium chloride | | |
| N1-Cholesteryloxycarbonyl-3,7-diazanonane-1,9-diamine | CDAN | Cationic |
| 2-(3-Bis(3-amino-propy1)-amino]propylamino)- | RPR209120 | Cationic |
| Nditetradecylcarbamoylme-ethyl-acetamide | | |
| 1,2-dilinoleyloxy-3-dimethylaminopropane | DLinDMA | Cationic |
| 2,2-dilinoley1-4-dimethylaminoethyl-[1,3]-dioxolane | DLin-KC2- | Cationic |
| | DMA | |
| dilinoleyl-methyl-4-dimethylaminobutyrate | DLin-MC3- | Cationic |
| | DMA | |

[0488] Exemplary polymers for use in nanoparticle formulations and/or gene transfer are shown in Table 86 below.

TABLE 86
Exemplary lipids for nanoparticle formulation or gene transfer

| Polymer | Abbreviation |
|---|---|
| Poly(ethylene)glycol | PEG |
| Polyethylenimine | PEI |
| Dithiobis (succinimidylpropionate) | DSP |
| Dimethyl-3,3′-dithiobispropionimidate | DTBP |
| Poly(ethylene imine)biscarbamate | PEIC |
| Poly(L-lysine) | PLL |
| Histidine modified PLL | |
| Poly(N-vinylpyrrolidone) | PVP |
| Poly(propylenimine) | PPI |
| Poly(amidoamine) | PAMAM |
| Poly(amidoethylenimine) | SS_PAEI |
| Triethylenetetramine | TETA |
| Poly(β-aminoester) | |
| Poly(4-hydroxy-L-proline ester) | PHP |
| Poly(allylamine) | |
| Poly(α-[4-aminobutyl]-L-glycolic acid) | PAGA |
| Poly(D,L-lactic-co-glycolic acid) | PLGA |
| Poly(N-ethyl-4-vinylpyridinium bromide) | |
| Poly(phosphazene)s | PPZ |
| Poly(phosphoester)s | PPE |
| Poly(phosphoramidate)s | PPA |
| Poly(N-2-hydroxypropylmethacrylamide) | pHPMA |
| Poly (2-(dimethylamino)ethyl methacrylate) | pDMAEMA |
| Poly(2-aminoethyl propylene phosphate) | PPE-EA |
| Chitosan | |
| Galactosylated chitosan | |
| N-dodacylated chitosam | |
| Histone | |
| Collagen | |
| Dextran-spermine | D-SPM |

[0489] Exemplary delivery methods for polynucleotides encoding prime editing composition components are shown in Table 87 below.

TABLE 87
Exemplary polynucleotide delivery methods

| | | Delivery | | | |
|---|---|---|---|---|---|
| | | into Non- | | | Type of |
| | | Dividing | Duration of | Genome | Molecule |
| Delivery | Vector/Mode | Cells | Expression | Integration | Delivered |
| Physical | (e.g., | YES | Transient | NO | Nucleic Acids |
| | electroporation, | | | | and Proteins |
| | particle gun, | | | | |
| | Calcium phosphate | | | | |
| | transfection) | | | | |
| Viral | Retrovirus | NO | Stable | YES | RNA |
| | Lentivirus | YES | Stable | YES/NO with | RNA |
| | | | | modification | |
| | Adenovirus | YES | Transient | NO | DNA |
| | Adeno-Associated | YES | Stable | NO | DNA |
| | Virus (AAV) | | | | |
| | Vaccinia Virus | YES | Very | NO | DNA |
| | | | Transient | | |
| | Herpes Simplex | YES | Stable | NO | DNA |
| | Virus | | | | |
| Non-Viral | Cationic | YES | Transient | Depends on | Nucleic acids |
| | | | | what is | and Proteins |
| | | | | delivered | |
| | Polymeric | YES | Transient | NO | Nucleic Acids |
| | Nanoparticles | | | | |
| Biological | Attenuated Bacteria | YES | Transient | NO | Nucleic Acids |
| Non-Viral | Engineered | YES | Transient | NO | Nucleic Acids |
| Delivery | Bacteriophages | | | | |
| Vehicles | Mammalian Virus- | YES | Transient | NO | Nucleic Acids |
| | like Particles | | | | |
| | Biological | YES | Transient | NO | Nucleic Acids |
| | liposomes: | | | | |
| | Erythrocyte Ghosts | | | | |
| | and Exosomes | | | | |

[0490] The prime editing compositions of the disclosure, whether introduced as polynucleotides or polypeptides, can be provided to the cells for about 30 minutes to about 24 hours, e.g., 1 hour, 1.5 hours, 2 hours, 2.5 hours, 3 hours, 3.5 hours 4 hours, 5 hours, 6 hours, 7 hours, 8 hours, 12 hours, 16 hours, 18 hours, 20 hours, or any other period from about 30 minutes to about 24 hours, which can be repeated with a frequency of about every day to about every 4 days, e.g., every 1.5 days, every 2 days, every 3 days, or any other frequency from about every day to about every four days. The compositions may be provided to the subject cells one or more times, e.g., one time, twice, three times, or more than three times, and the cells allowed to incubate with the agent(s) for some amount of time following each contacting event e.g., 16-24 hours. In cases in which two or more different prime editing system components, e.g. two different polynucleotide constructs are provided to the cell (e.g., different components of the same prim editing system, or two different guide nucleic acids that are complementary to different sequences within the same or different target genes), the compositions may be delivered simultaneously (e.g., as two polypeptides and/or nucleic acids). Alternatively, they may be provided sequentially, e.g., one composition being provided first, followed by a second composition.

[0491] The prime editing compositions and pharmaceutical compositions of the disclosure, whether introduced as polynucleotides or polypeptides, can be administered to subjects in need thereof for about 30 minutes to about 24 hours, e.g., 1 hour, 1.5 hours, 2 hours, 2.5 hours, 3 hours, 3.5 hours 4 hours, 5 hours, 6 hours, 7 hours, 8 hours, 12 hours, 16 hours, 18 hours, 20 hours, or any other period from about 30 minutes to about 24 hours, which can be repeated with a frequency of about every day to about every 4 days, e.g., every 1.5 days, every 2 days, every 3 days, or any other frequency from about every day to about every four days. The compositions may be provided to the subject one or more times, e.g., one time, twice, three times, or more than three times. In cases in which two or more different prime editing system components, e.g. two different polynucleotide constructs are administered to the subject (e.g., different components of the same prim editing system, or two different guide nucleic acids that are complementary to different sequences within the same or different target genes), the compositions may be administered simultaneously (e.g., as two polypeptides and/or nucleic acids). Alternatively, they may be provided sequentially, e.g., one composition being provided first, followed by a second composition.

[0492] The corresponding sequences to the SEQ ID NOs. disclosed herein is provided in the sequence listing filed herewith.

### EXAMPLES

[0493] The following examples are provided for illustrative purposes only and are not intended to limit the scope of the claims provided herein.

### Example 1: Installation of c.73_74 ΔGT Mutation in Wildtype HEK293T Cells by Prime Editing

[0494] To examine accessibility of the NCF1 gene for Prime Editing, prime editing guide RNAs (PEgRNAs) were designed to install a c.73_74 ΔGT mutation in wildtype HEK293T cells.

[0495] PEgRNA assembly: PEgRNAs were assembled by one of three methods: in the first method, pooled synthesized DNA oligos encoding the PEgRNA and flanking U6 expression plasmid homology regions were cloned into U6 expression plasmids via Gibson cloning and sequencing of bacterial colonies via Sanger or Next-generation sequencing. In the second method, double-stranded linear DNA fragments encoding PEgRNA and homology sequences as above were individually Gibson-cloned into U6 expression plasmids. In the third method, for each PEgRNA, separate oligos encoding a protospacer, a gRNA scaffold, and PEgRNA extension (PBS and RTT) were ligated, and then cloned into a U6 expression plasmid as described in Anzalone et al., Nature. 2019 December; 576(7785):149-157. Bacterial colonies carrying sequence-verified plasmids were propagated in LB or TB. Plasmid DNA was purified by minipreps for mammalian transfection.

[0496] HEK cell culture and transfection: HEK293T cells were propagated in DMEM with 10% FBS. Prior to transfection, cells were seeded in 96-well plates and then transfected with Lipofectamine 2000 according to the manufacturer's directions with DNA encoding PE2 and PEgRNA. Three days after transfection, gDNA was harvested in lysis buffer for high throughput sequencing and sequenced using Miseq. Generally, indel frequency was quantified using standard quantification techniques via CRISPResso2 algorithm as described in Clement, K. et al., Nat. Biotechnol. 37, 224-226 (2019), with the quantification window defined as at least 5 bases 5′ and 3′ of pegRNA (and ngRNA) nick site

[0497] PEgRNAs spacers were designed to be 20 nt in length and for the protospacer to be adjacent to an “5′-NGG-3′” PAM, where N is any one of nucleotides A, G, C, or T. DNA sequences encoding each PEgRNA was cloned into an expression plasmid driven by a U6 promoter. The PEgRNA expression plasmid and a plasmid encoding a prime editor fusion protein were co-transfected into wild type HEK293T cells. Seventy-two hours after transfection, genomic DNA was extracted from the HEK293T cells and the region of NCF1 targeted by Prime Editing was PCR amplified. Editing of NCF1 was evaluated by Miseq and scored for the percentage of sequence reads with the intended edit. PEgRNA sequences used to install the c.73_74 ΔGT mutation and Prime Editing efficiency are provided in Table 88 below. The results indicate that Prime Editing is able to target the NCF1 gene near the c.73_74 ΔGT location.

TABLE 88
Sequence and activity of PEgRNAs for installation of
NCF1 c.73_74delGT in HEK293T cells.

| | Spacer | PBS | PBS | % Editing |
|---|---|---|---|---|
| PEgRNA¹ | Sequence | sequence | length | Efficiency² |
| 34314 | 849 | 4007 | 8 | + |
| 34315 | 849 | 4007 | 8 | +++ |
| 34316 | 849 | 4007 | 8 | ++ |
| 34317 | 849 | 4007 | 8 | +++ |
| 34318 | 849 | 4009 | 10 | ++ |
| 34319 | 849 | 4009 | 10 | +++ |
| 34320 | 849 | 4009 | 10 | ++ |
| 34321 | 849 | 4009 | 10 | ++ |
| 34322 | 849 | 4011 | 12 | +++ |
| 34323 | 849 | 4011 | 12 | +++ |
| 34324 | 849 | 4011 | 12 | ++ |
| 34325 | 849 | 4011 | 12 | +++ |
| 34326 | 849 | 4013 | 14 | ++ |
| 34327 | 849 | 4013 | 14 | +++ |
| 34328 | 849 | 4013 | 14 | +++ |
| 34329 | 849 | 4013 | 14 | +++ |
| 34330 | 19081 | 19088 | 8 | − |
| 34331 | 19081 | 19088 | 8 | − |
| 34332 | 19081 | 19088 | 8 | + |
| 34333 | 19081 | 19088 | 8 | ++ |
| 34334 | 19081 | 19090 | 10 | + |
| 34335 | 19081 | 19090 | 10 | + |
| 34336 | 19081 | 19090 | 10 | + |
| 34337 | 19081 | 19090 | 10 | ++ |
| 34338 | 19081 | 19092 | 12 | − |
| 34339 | 19081 | 19092 | 12 | − |
| 34340 | 19081 | 19092 | 12 | + |
| 34341 | 19081 | 19092 | 12 | ++ |
| 34342 | 19081 | 19094 | 14 | − |
| 34343 | 19081 | 19094 | 14 | − |
| 34344 | 19081 | 19094 | 14 | ++ |
| 34345 | 19572 | 19580 | 10 | + |
| 34346 | 19572 | 19582 | 12 | + |
| 34347 | 19572 | 19582 | 12 | + |
| 34348 | 19572 | 19582 | 12 | + |
| 34349 | 19572 | 19584 | 14 | + |
| 34350 | 19572 | 19584 | 14 | + |
| 34351 | 19572 | 19584 | 14 | + |
| 34352 | 19572 | 19584 | 14 | − |
| 34353 | 22506 | 22514 | 8 | − |
| 34354 | 22506 | 22514 | 8 | + |
| 34355 | 22506 | 22514 | 8 | − |
| 34356 | 22506 | 22516 | 10 | + |
| 34357 | 22506 | 22516 | 10 | − |
| 34358 | 22506 | 22516 | 10 | + |
| 34359 | 22506 | 22518 | 12 | + |
| 34360 | 22506 | 22518 | 12 | + |

1. Indicated PEgRNA sequence contains addition of a 5′Guanine for adaptations for transcription from the expression plasmid used.
2. “−”: 0%; “+”: 1%-5%; “++”: 5%-10%; “+++”: greater than 10%. Each range includes the upper limit and not the lower limit. For example, 1%-2% means any value larger than 1% and no less than 2%.

### Example 2: PEgRNA Screen for Prime Editing of Pseudogenes NCF1B and/or NCF1C in HEK293T cells

[0498] PEgRNAs were designed to install a dinucleotide “GT” (or “AC” on the opposite strand) insertion at the c.73_74 ΔGT target site in human NCF1 gene. Two pseudogenes, NCF1B and NCF1C, share more than 99% sequence identity with the NCF1 gene: the pseudogenes each carries a deletion of “GT” compared to wild type NCF1, at the location corresponding to c.73_74. Therefore, PEgRNAs and ngRNAs designed to target the c.73_74 site in NCF1 would also be able to target corresponding target sequences in pseudogene NCF1C and NCF1B. Editing of NCF1C/NCF1B in wild-type HEK293T cells were thus used to access Prime Editing efficiency.

[0499] With methods as described in Example 1, PEgRNAs were assembled, HEK293T cells were transfected with plasmids encoding the PEgRNA and prime editor, and genomic DNA were extracted for sequencing analysis. Editing efficiency was assessed by first obtaining sequencing reads that have the sequence “GTGT” in the + strand at chromosome positions 74777267-74777270 according to GRCh38, or corresponding positions in NCF1B or NCF1C. These reads are referred to herein as the “GTGT reads”. The total GTGT reads and the total reads of NCF1, NCF1B, and NCF1C sequences flanking the c.73-74 site (or corresponding sites in NCF1B and NCF1C) in NCF1 were obtained by Miseq analysis, and the ratio of GTGT reads over total reads (GTGT reads %) were calculated. Because the HEK293T cells carry a wild-type NCF1 gene, the cells have two copies of endogenous “GTGT” NCF1, and 4 copies of ΔGT from NCF1C/NCF1B. Editing efficiency was thus calculated by the following formula:

Editing efficiency=(GTGT reads %−0.33)/0.66

[0500] The screen included 3 PEgRNA spacers, each designed with a different PBS and/or RTT. Each spacer is 20 nt in length and the corresponding protospacer is adjacent to an “5′-NGG-3′” PAM. A total of 46 PEgRNAs were examined. The PEgRNAs were examined for Prime Editing efficiency with PE2 editing strategy. The results are shown in Table 89 below. The distance from the PEgRNA's nick site to the intended GT insert in number of nucleotides (the nick-to-edit distance; for GT insertion, the nick-to-edit distance looks at the edit between the first GT and the second GT) is also provided. For two spacers having the sequences of SEQ ID No. 3999 and SEQ ID No. 19081, a majority of the PEgRNAs designed were able to achieve successful Prime Editing.

TABLE 89
PEgRNA screen for Prime Editing of pseudogenes
NCF1B and/or NCF1C in HEK293T cells cells.

| PEgRNA | | Nick-to- | | | | | |
|---|---|---|---|---|---|---|---|
| SEQ ID | Spacer | edit | PBS SEQ | PBS | RTT SEQ | RTT | % |
| No.¹ | SEQ ID | distance | ID | length | ID | length | editing² |
| 5528 | 3999 | 2 | 4007 | 8 | 4019 | 10 | + |
| 5531 | 3999 | 2 | 4007 | 8 | 4021 | 12 | ++ |
| 5539 | 3999 | 2 | 4007 | 8 | 4054 | 14 | + |
| 5547 | 3999 | 2 | 4007 | 8 | 4098 | 16 | + |
| 5532 | 3999 | 2 | 4009 | 10 | 4019 | 10 | ++ |
| 5536 | 3999 | 2 | 4009 | 10 | 4021 | 12 | ++ |
| 5548 | 3999 | 2 | 4009 | 10 | 4054 | 14 | ++ |
| 5597 | 3999 | 2 | 4009 | 10 | 4098 | 16 | ++ |
| 5535 | 3999 | 2 | 4011 | 12 | 4019 | 10 | ++ |
| 5563 | 3999 | 2 | 4011 | 12 | 4021 | 12 | ++ |
| 5606 | 3999 | 2 | 4011 | 12 | 4054 | 14 | ++ |
| 5647 | 3999 | 2 | 4011 | 12 | 4098 | 16 | ++ |
| 5556 | 3999 | 2 | 4013 | 14 | 4019 | 10 | ++ |
| 5635 | 3999 | 2 | 4013 | 14 | 4021 | 12 | ++ |
| 5644 | 3999 | 2 | 4013 | 14 | 4054 | 14 | − |
| 5672 | 3999 | 2 | 4013 | 14 | 4098 | 14 | ++ |
| 482 | 5 | 4 | 13 | 8 | 35 | 12 | − |
| 488 | 5 | 4 | 13 | 8 | 43 | 14 | − |
| 515 | 5 | 4 | 13 | 8 | 60 | 18 | − |
| 487 | 5 | 4 | 15 | 10 | 35 | 12 | − |
| 502 | 5 | 4 | 15 | 10 | 43 | 14 | + |
| 519 | 5 | 4 | 15 | 10 | 51 | 16 | − |
| 541 | 5 | 4 | 15 | 10 | 60 | 18 | − |
| 500 | 5 | 4 | 17 | 12 | 35 | 12 | − |
| 517 | 5 | 4 | 17 | 12 | 43 | 14 | − |
| 540 | 5 | 4 | 17 | 12 | 51 | 16 | − |
| 553 | 5 | 4 | 17 | 12 | 60 | 18 | − |
| 518 | 5 | 4 | 19 | 14 | 35 | 12 | − |
| 539 | 5 | 4 | 19 | 14 | 43 | 14 | − |
| 552 | 5 | 4 | 19 | 14 | 51 | 16 | − |
| 566 | 5 | 4 | 19 | 14 | 60 | 18 | − |
| 19481 | 19081 | 7 | 19088 | 8 | 19106 | 11 | − |
| 19484 | 19081 | 7 | 19088 | 8 | 19112 | 13 | + |
| 19487 | 19081 | 7 | 19088 | 8 | 19123 | 15 | ++ |
| 19496 | 19081 | 7 | 19088 | 8 | 19129 | 17 | + |
| 19483 | 19081 | 7 | 19090 | 10 | 19106 | 11 | − |
| 19488 | 19081 | 7 | 19090 | 10 | 19112 | 13 | + |
| 19498 | 19081 | 7 | 19090 | 10 | 19123 | 15 | + |
| 19514 | 19081 | 7 | 19090 | 10 | 19129 | 17 | + |
| 19489 | 19081 | 7 | 19092 | 12 | 19106 | 11 | − |
| 19497 | 19081 | 7 | 19092 | 12 | 19112 | 13 | + |
| 19515 | 19081 | 7 | 19092 | 12 | 19123 | 15 | + |
| 19535 | 19081 | 7 | 19092 | 12 | 19129 | 17 | + |
| 19495 | 19081 | 7 | 19094 | 14 | 19106 | 11 | − |
| 19516 | 19081 | 7 | 19094 | 14 | 19112 | 13 | + |
| 19534 | 19081 | 7 | 19094 | 14 | 19123 | 15 | ++ |

¹Indicated PEgRNA sequence does not contain the adaptations for transcription from a DNA template used experimentally (i.e., addition of a 5′G if the spacer did not already start with a G).
²“−”: 0%; “+”: 1%-5%; “++”: 5%-10%; “+++”: greater than 10%. Each range includes the upper limit and not the lower limit. For example, 1%-2% means any value larger than 1% and no less than 2%.

[0501] Two additional spacers were screened. 16 PEgRNAs, each having a different combination of PBS and RTT sequences, were designed for each spacer. The spacers are 20 nt in length and the corresponding protospacers are adjacent to an “5′-NGA-3′” PAM. PEgRNAs were synthesized, wild-type HEK293T cells transfected, and genomic DNA extracted and analyzed as described in Example 1. The PEgRNAs were examined for Prime Editing efficiency with PE2 editing strategy, with two replicates for each PEgRNA. Editing efficiency was assess by the formula (GTGT reads-0.33)/0.66 as described above. The results are shown in Table 90 below. The PEgRNAs tested, having the spacer sequence of SEQ ID No. 33242 or SEQ ID No. 31334, showed low editing efficiency.

TABLE 90
PE2 Prime Editing of NCF1B/NCF1C pseudogenes in HEK293T cells.

| ¹PEgRNA | Spacer | PBS | | RTT | | | | | |
|---|---|---|---|---|---|---|---|---|---|
| SEQ ID | SEQ ID | SEQ ID | PBS | SEQ ID | RTT | % Editing | % Editing | % Indels | % Indels |
| NO. | No. | No. | length | No. | length | Rep1* | Rep2* | rep** | rep 2** |
| 33974 | 33242 | 33249 | 8 | 33329 | 24 | − | + | + | + |
| 33978 | 33242 | 33249 | 8 | 33347 | 26 | − | − | + | + |
| 33983 | 33242 | 33249 | 8 | 33363 | 28 | − | + | + | + |
| 33995 | 33242 | 33249 | 8 | 33376 | 30 | − | − | + | + |
| 33977 | 33242 | 33251 | 10 | 33329 | 24 | + | − | + | − |
| 33984 | 33242 | 33251 | 10 | 33347 | 26 | − | − | + | + |
| 33994 | 33242 | 33251 | 10 | 33363 | 28 | + | − | + | + |
| 34002 | 33242 | 33251 | 10 | 33376 | 30 | ++ | − | + | + |
| 33985 | 33242 | 33253 | 12 | 33329 | 24 | + | ++ | + | + |
| 33993 | 33242 | 33253 | 12 | 33347 | 26 | ++ | − | + | + |
| 34004 | 33242 | 33253 | 12 | 33363 | 28 | + | − | − | + |
| 34012 | 33242 | 33253 | 12 | 33376 | 30 | ++ | − | + | + |
| 33992 | 33242 | 33255 | 14 | 33329 | 24 | + | + | + | + |
| 34003 | 33242 | 33255 | 14 | 33347 | 26 | − | + | + | + |
| 34011 | 33242 | 33255 | 14 | 33363 | 28 | + | + | + | + |
| 34017 | 33242 | 33255 | 14 | 33376 | 30 | + | − | + | + |
| 31667 | 31334 | 31342 | 8 | 31370 | 29 | − | − | + | + |
| 31669 | 31334 | 31342 | 8 | 31375 | 31 | − | − | + | + |
| 31673 | 31334 | 31342 | 8 | 31388 | 34 | + | ++ | + | + |
| 31678 | 31334 | 31342 | 8 | 31396 | 36 | − | − | + | + |
| 31668 | 31334 | 31344 | 10 | 31370 | 29 | − | − | + | + |
| 31672 | 31334 | 31344 | 10 | 31375 | 31 | − | + | + | − |
| 31679 | 31334 | 31344 | 10 | 31388 | 34 | − | − | + | + |
| 31685 | 31334 | 31344 | 10 | 31396 | 36 | − | − | + | + |
| 31671 | 31334 | 31346 | 12 | 31370 | 29 | ++ | − | + | + |
| 31675 | 31334 | 31346 | 12 | 31375 | 31 | ++ | − | + | + |
| 31684 | 31334 | 31346 | 12 | 31388 | 34 | − | − | + | + |
| 31690 | 31334 | 31346 | 12 | 31396 | 36 | − | + | + | + |
| 31677 | 31334 | 31348 | 14 | 31370 | 29 | − | + | − | + |
| 31681 | 31334 | 31348 | 14 | 31375 | 31 | + | − | + | − |
| 31691 | 31334 | 31348 | 14 | 31388 | 34 | + | ++ | + | + |

¹Indicated PEgRNA sequence contains addition of a 5′Guanine for adaptations for transcription from the expression plasmid used.
*“−”: 0% or less (negative values resulted from formula used to calculate editing efficiency. If GTGT reads are lower than 33%, the result is negative); “+”: 0%-1%; “++”: 1%-3%; “+++”: greater than 3%. Each range includes the upper limit and not the lower limit. For example, 1%-2% means any value larger than 1% and no less than 2%.
**“−”: 0%; “+”: 0%-0.5%; “++”: 0.5%-1%; “+++”: greater than 11%. Each range includes the upper limit and not the lower limit. For example, 1%-2% means any value larger than 1% and no less than 2%.

[0502] A subset of PEgRNAs, with a spacer having the sequence of either SEQ ID No. 3999 or SEQ ID No. 19081 from the above screens, were further examined for Prime Editing efficiency with PE3 strategy. The results are shown in Tables 91 and 92 below. Successful Prime Editing was observed in most of PEgRNA/ngRNA combinations (with three exceptions).

TABLE 91
PE3 Prime Editing of NCF1B/NCF1C pseudogenes in HEK293T cells

| | % editing w/ | % editing w/ | % editing w/ |
|---|---|---|---|
| | ngRNA | ngRNA | ngRNA |
| PEgRNA | SEQ ID | SEQ ID | SEQ ID |
| SEQ ID No.¹ | No. 590 | No. 589 | No. 584 |
| 5528 | ++ | ++ | +++ |
| 5531 | ++ | ++ | +++ |
| 5539 | ++ | ++ | +++ |
| 5547 | ++ | ++ | +++ |
| 5532 | ++ | +++ | +++ |
| 5536 | +++ | +++ | +++ |
| 5548 | ++ | +++ | +++ |
| 5597 | ++ | +++ | +++ |
| 5535 | ++ | +++ | +++ |
| 5563 | +++ | +++ | +++ |
| 5606 | +++ | +++ | +++ |

¹Indicated PEgRNA sequence does not contain the adaptations for transcription from a DNA template used experimentally (i.e., addition of a 5′G if the spacer did not already start with a G). For all editing efficiency in Table 91, “−”: 0%; “+”: 1%-5%; “++”: 5%-10%; “+++”: greater than 10%.

TABLE 92
PE3 Prime Editing of NCF1B/NCF1C pseudogenes in HEK293T cells.

| PEgRNA | % editing w/ | % editing w/ |
|---|---|---|
| SEQ ID | ngRNA SEQ ID | ngRNA SEQ ID |
| No.¹ | No. 19566 | No. 2143 |
| 19496 | ++ | +++ |
| 19483 | − | − |
| 19488 | ++ | +++ |
| 19498 | ++ | +++ |
| 19514 | + | +++ |
| 19489 | − | − |
| 19497 | + | ++ |
| 19515 | + | ++ |
| 19535 | ++ | +++ |
| 19495 | − | + |
| 19516 | ++ | +++ |
| 19534 | ++ | +++ |

¹Indicated PEgRNA sequence does not contain the adaptations for transcription from a DNA template used experimentally (i.e., addition of a 5′G if the spacer did not already start with a G). For all editing efficiency in Table 92, “−”: 0%; “+”: 1%-5%; “++”: 5%-10%; “+++”: greater than 10%. Each range includes the upper limit and not the lower limit. For example, 1%-2% means any value larger than 1% and no less than 2%.

[0503] Although PEgRNAs having the spacer sequence of SEQ ID No. 5 showed lower editing efficiency in experiment shown in Table B1, the spacer was further tested with different combinations of PBSs and RTTs. PEgRNAs were chemically synthesized. Without wishing to be bound by theory, synthesized PEgRNAs may have improve quality compared to PEgRNA transcribed from plasmid. Wildtype HEK293T cells were transfected with the synthesized PEgRNAs and plasmid encoding a Prime Editor fusion protein. Genomic DNA was extracted and sequencing result was analyzed as described in Example 1. Two replicates were performed for each PEgRNA. The results are shown in Table 93 below.

TABLE 93
PE2 Prime Editing of NCF1B/NCF1C pseudogenes in HEK293T cells.

| PEgRNA | | | | | | |
|---|---|---|---|---|---|---|
| SEQ ID | PBS SEQ | RTT SEQ | Editing | Editing | Indels rep 1 | Indels rep 2 |
| NO¹ | ID NO: | ID NO: | Rep 1 (%)² | Rep 2 (%)² | (%)³ | (%)³ |
| 482 | 13 | 35 | + | + | + | + |
| 488 | 13 | 43 | + | + | + | + |
| 498 | 13 | 51 | + | + | + | + |
| 515 | 13 | 60 | + | + | + | + |
| 536 | 13 | 66 | + | + | + | + |
| 487 | 15 | 35 | ++ | ++ | +++ | + |
| 502 | 15 | 43 | ++ | ++ | +++ | ++ |
| 519 | 15 | 51 | ++ | ++ | +++ | ++ |
| 541 | 15 | 60 | ++ | ++ | ++ | + |
| 556 | 15 | 66 | ++ | ++ | ++ | ++ |
| 500 | 17 | 35 | ++++ | ++++ | ++++ | +++ |
| 517 | 17 | 43 | ++++ | ++++ | ++++ | ++++ |
| 540 | 17 | 51 | ++++ | ++++ | ++++ | +++ |
| 553 | 17 | 60 | ++++ | +++ | ++++ | ++++ |
| 564 | 17 | 66 | +++ | +++ | +++ | ++++ |
| 518 | 19 | 35 | ++++ | +++ | ++++ | +++ |
| 539 | 19 | 43 | ++++ | ++++ | ++++ | ++++ |
| 552 | 19 | 51 | +++ | ++ | +++ | ++ |
| 566 | 19 | 60 | +++ | +++ | ++ | +++ |
| 571 | 19 | 66 | +++ | +++ | +++ | +++ |

¹Indicated sequence does not contain the 3′ mU*mU*mU*U additional nucleotides and does not contain a 5′ mN*mN*mN* modifications used experimentally, where m indicates that the indicated nucleotide contains a 2′-O—Me modification and a * indicates a phosphorothioate bond.
²“−”: 0%; “+”: 0%-4%; “++”: 4%-8%; “+++”: 8% to 11%; “++++”: greater than 11%. Each range includes the upper limit and not the lower limit. For example, 1%-2% means any value larger than 1% and no less than 2%.
³“−”: 0%; “+”: 0%-0.4%; “++”: 0.4%-0.5%; “+++”: 0.5% to 0.9%; “++++”: greater than 9%.

### Example 3: Prime Editing of NCF1, NCF1B, and/or NCF1C in HEK293T Cells Bearing a c.73_74 ΔGT Mutation

[0504] A clonal cell line homozygous for NCF1 c.73_74ΔGT mutation was generated as follows: HEK293T cells were co-transfected with plasmids expressing a prime editor fusion protein, PEgRNA SEQ ID No. 34323 and ngRNA SEQ ID No. 584 as described in Example 1. Seventy-two hours after transfection, cells were detached from the growth surface and plated at a limiting dilution to generate clonal colonies. After seven days of growth, single colonies were mechanically detached from the dish and transferred into separate wells. Once grown to near-confluence, cells were split into two fractions: fraction #1 was propagated while gDNA was harvested from fraction #2. Editing efficiency was determined by Miseq of NCF1 c.73_74GT region as described in Example 1. Clones exhibiting 100% editing for installation of the ΔGT mutation were used to examine prime editing correction of NCF1 c.73_74 ΔGT.

[0505] A subset of five highly active PEgRNAs from Example 2 were examined for Prime Editing efficiency, either with PE2 strategy or with PE3 strategy combined with the ngRNA having the sequence of SEQ ID No. 584. Each of the five PEgRNAs has a spacer of SEQ ID No. 3999. The clonal HEK293T cells described above were co-transfected with plasmids encoding a Prime Editor fusion protein, a PEgRNA, and the ngRNA respectively, as described in Example 1. Seventy-two hours after transfection, gDNA was extracted and the PE-targeted region of NCF1 was PCR amplified. The results are shown in Table 94. Efficient editing was observed for all five PEgRNAs. In addition, improved editing was observed with PE3 strategy.

TABLE 47
Prime Editing of NCF1, NCF1B, and/or NCF1C in HEK293T cells
bearing a c.73_74 AGT mutation

| PEgRNA | | |
|---|---|---|
| SEQ ID No.¹ | % Editing (PE2)² | % Editing (PE3)² |
| 5535 | ++ | +++ |
| 5563 | ++ | +++ |
| 5606 | ++ | +++ |
| 5556 | ++ | +++ |
| 5644 | ++ | +++ |

¹Indicated PEgRNA sequence does not contain the adaptations for transcription from a DNA template used experimentally (i.e., addition of a 5′G if the spacer did not already start with a G).
²“−”: 0%; “+”: 1%-15%; “++”: 15%-30%; “+++”: 30%-50%.; “++++”: greater than 50%. Each range included the upper limit and not the lower limit. For example, 1%-2% means any value larger than 1% and no less than 2%.

[0506] A summary of ngRNAs used in Examples 2 and 3 are provided in Table 95 below.

TABLE 95

| | ngRNA Spacer | Spacer SEQ ID of |
|---|---|---|
| ngRNA SEQ ID NO: | SEQ ID No. | PEgRNAs |
| 2143 | 2130 | SEQ ID No. 19081 |
| 19566 | 19478 | SEQ ID No. 19081 |
| 590 | 422 | SEQ ID No. 3999 |
| 589 | 458 | SEQ ID No. 3999 |
| 584 | 429 | SEQ ID No. 3999 |

### Example 4: Prime Editing with PEgRNAs Harboring Additional PAM Silencing Edits

[0507] An additional set of 30 PEgRNAs having the spacer of SEQ ID No.3999 were tested. The PEgRNAs were designed by including additional edits, using PEgRNAs having the sequence of SEQ ID No. 5563 and 5606 as a starting point. Besides the GT insertion, the RTT of each of the 30 PEgRNAs further include 1 or 2 nt substitutions at a position corresponding to intron 1 of the NCF1, NCF1B, and/or NCF1C gene. All 30 PEgRNAs have the same PBS sequence (SEQ ID No. 4011). 15 PEgRNAs have a 12 nucleotide RTT, designed by including a nucleotide substitution at position 5 and/or 6 of SEQ ID NO. 402. The other 15 PEgRNAs have a 14 nucleotide RTT, designed by including a nucleotide substitution at position 7 and/or 8 of SEQ ID No. 4054. Incorporation of these substitutions alters the PAM sequence GGG on the edit strand to a non-NGG sequence. Without wishing to be bound by any particular theory, PAM silencing edits may prevent the Cas9 nickase from re-nicking the edit strand, and thus improve editing efficiency.

[0508] The additional PAM silencing edits allow PE3b ngRNAs to be designed for each of the PEgRNAs, where the ngRNA spacer contain perfect complementarity to the portion of the edit strand that contains the intended edit (i.e., perfectly complementarity to the edit strand only after the intended edits are made). The PEgRNAs and ngRNAs were assembled, HEK293T cells transfected, and genomic DNA extracted and analyzed as described in Example 1. Pseudogene editing efficiency was assessed using the formula as described in Example 2.

[0509] Prime Editing efficiency and indel formation were assessed for both PE2 and PE3 editing strategies. The results are provided in Tables 96-99 below: Table 96 summarizes the results from PE2 editing, and Tables 97-99 provide the results of PE3b editing with the 12 nt RTT PEgRNAs and 14 nt RTT PEgRNAs, respectively. Table 99 provides the average editing efficiency of the PAM silencing PEgRNAs using PE2 and PE3b editing strategy. The PAM silencing edits besides the GT insertion are well tolerated by Prime Editing, as shown by successful editing observed. In addition, the PE3b strategy generally improved Prime Editing efficiency.

[0510] For Tables 96-99, editing efficiency are grouped as follows: “+”=9% to 20%, “++”=20% to 26%, “+++”=26% to 35%, “++++”=35% and more. Each range includes the upper limit and not the lower limit. For example, “1% to 2%” means any value larger than 1% and no less than 2%.

TABLE 96
PE2 Prime Editing of NCF1B/NCF1C
pseudogenes with PEgRNAs having PAM silencing edits.

| PEgRNA | RTT SEQ | RTT | % Editing | % Editing |
|---|---|---|---|---|
| SEQ ID^{1 2} | ID No.² | Length | Rep 1 | Rep 2 |
| 5563 | 4021 | 12 | ++ | ++ |
| 5564* | 4030* | 12 | ++ | ++ |
| 5555* | 4032* | 12 | + | ++ |
| 5554* | 4034* | 12 | + | + |
| 5559* | 4029* | 12 | + | + |
| 5566* | 4033* | 12 | + | + |
| 5562* | 4024* | 12 | ++ | ++ |
| 5551* | 4023* | 12 | + | + |
| 5546* | 4022* | 12 | ++ | ++ |
| 5565* | 4028* | 12 | + | + |
| 5552* | 4025* | 12 | + | + |
| 5560* | 4031* | 12 | + | + |
| 5549* | 4035* | 12 | + | ++ |
| 5558* | 4036* | 12 | + | ++ |
| 5567* | 4027* | 12 | + | ++ |
| 5553* | 4026* | 12 | + | + |
| 5606 | 4054 | 14 | ++ | ++ |
| 5610* | 4062* | 14 | ++ | +++ |
| 5592* | 4066* | 14 | +++ | +++ |
| 5591* | 4058* | 14 | + | ++ |
| 5607* | 4065* | 14 | ++ | +++ |
| 5604* | 4064* | 14 | ++ | ++ |
| 5593* | 4061* | 14 | +++ | +++ |
| 5595* | 4063* | 14 | +++ | +++ |
| 5602* | 4068* | 14 | +++ | +++ |
| 5594* | 4057* | 14 | + | + |
| 5596* | 4056* | 14 | ++ | ++ |
| 5608* | 4060* | 14 | ++ | ++ |
| 5601* | 4059* | 14 | ++ | ++ |
| 5598* | 4053* | 14 | + | + |
| 5603* | 4055* | 14 | + | + |
| 5611* | 4067* | 14 | ++ | ++ |

¹Indicated PEgRNA sequence does not contain the adaptations for transcription from a DNA template used experimentally (i.e., addition of a 5′G if the spacer did not already start with a G).
²A star (*) indicates the RTT, and corresponding PEgRNA, contains an additional PAM silencing mutation.

TABLE 97
PE3b Prime Editing of NCF1B/NCF1C pseudogenes with PEgRNAs
having PAM silencing edits and corresponding PE3b ngRNAs.

| | ngRNA | Paired | | |
|---|---|---|---|---|
| ngRNA SEQ | spacer SEQ | PEgRNA | % Editing | % Editing |
| ID No^{.1} | ID No.¹ | SEQ ID¹ | Rep 1 | Rep 2 |
| 5702(*9) | 5504(*9) | 5564(*9) | + | +++ |
| 5693(*10) | 5498(*10) | 5555(*10) | ++++ | ++++ |
| 5699(*14) | 5503(*14) | 5554(*14) | +++ | +++ |
| 5707(*3) | 5510(*3) | 5559(*3) | ++++ | +++ |
| 5703(*13) | 5505(*13) | 5566(*13) | ++++ | ++++ |
| 5704(*8) | 5506(*8) | 5562(*8) | ++++ | ++++ |
| 5705(*12) | 5508(*12) | 5551(*13) | ++++ | ++++ |
| 5697(*1) | 5495(*1) | 5546(*1) | ++++ | ++++ |
| 5701(*4) | 5502(*4) | 5565(*4) | +++ | +++ |
| 5698(*2) | 5501(*2) | 5552(*2) | ++++ | ++++ |
| 5700(*7) | 5497(*7) | 5560(*7) | ++++ | ++++ |
| 5695(*6) | 5496(*6) | 5549(*6) | +++ | +++ |
| 5694(*15) | 5500(*15) | 5558(*15) | +++ | ++++ |
| 5696(*11) | 5499(*11) | 5567(*11) | +++ | ++ |
| 5706(*5) | 5509(*5) | 5553(*5) | ++++ | +++ |

¹A star (*n), where n is an integer, is used to indicate the paring relationship between PE3b ngRNAs and PEgRNA RTTs. An RTT annotated with (*n) indicates that the RTT has a specific PAM silencing edit, and a PE3b ngRNA annotated with the same number *n indicates that the ngRNA spacer has perfect complementarity to the portion of the edit strand including the PAM silencing edit after the edit is incorporated (i.e. the ngRNA spacer has a region of identity to the RTT that includes the PAM silencing edit). The type of PAM silencing edits and sequences are provided in Table 12, which are annotated under the same system.

TABLE 98
PE3b Prime Editing of NCF1B/NCF1C pseudogenes with PEgRNAs
having PAM silencing edits and corresponding PE3b ngRNAs.

| | | Paired | | |
|---|---|---|---|---|
| nGRNA | spacer SEQ | PERNA | % Editing | % Editing |
| SEQ ID No.¹ | ID No.¹ | SEQ ID¹ | Rep 1 | Rep 2 |
| 5702(*9) | 5504(*9) | 5610(*9) | +++ | +++ |
| 5693(*10) | 5498(*10) | 5592(*10) | ++++ | ++++ |
| 5699(*14) | 5503(*14) | 5591(*14) | +++ | +++ |
| 5707(*3) | 5510(*3) | 5607(*3) | ++++ | ++++ |
| 5703(*13) | 5505(*13) | 5604(*13) | ++++ | ++++ |
| 5704(*8) | 5506(*8) | 5593(*8) | ++++ | ++++ |
| 5705(*12) | 5508(*12) | 5595(*12) | ++++ | ++++ |
| 5697(*1) | 5495(*1) | 5602(*1) | ++++ | ++++ |
| 5701(*4) | 5502(*4) | 5594(*4) | ++ | ++ |
| 5698(*2) | 5501(*2) | 5596(*2) | +++ | ++++ |
| 5700(*7) | 5497(*7) | 5608(*7) | +++ | +++ |
| 5695(*6) | 5496(*6) | 5601(*6) | +++ | +++ |
| 5694(*15) | 5500(*15) | 5598(*15) | +++ | +++ |
| 5696(*11) | 5499(*11) | 5603(*11) | +++ | ++ |
| 5706(*5) | 5509(*5) | 5611(*5) | ++++ | ++++ |

¹A star (*n), where n is an integer, is used to indicate the paring relationship between PE3b ngRNAs and PEgRNA RTTs. An RTT annotated with (*n) indicates that the RTT has a specific PAM silencing edit, and a PE3b ngRNA annotated with the same number *n indicates that the ngRNA spacer has perfect complementarity to the portion of the edit strand including the PAM silencing edit after the edit is incorporated (i.e. the ngRNA spacer has a region of identity to the RTT that includes the PAM silencing edit). The type of PAM silencing edits and sequences are provided in Table 12, which are annotated under the same system.

TABLE 99
Average editing efficiency of PAM silencing PEgRNAs
using PE2 and PE3 strategyand corresponding ngRNAs

| | | Average editing |
|---|---|---|
| Editing strategy | Prime Editing reagents | efficiency |
| PE2 | PEgRNAs with 12nt RTT | + |
| PE2 | PEgRNAs with 14nt RTT | ++ |
| PE3 | PEgRNAs with 12nt RTT | +++ |
| PE3 | PEgRNAs with 14nt RTT | ++++ |

### Example 5: Prime Editing with PEgRNAs that Edit c.73_74 Deletion with Alternative Codons

[0511] In wild-type NCF1 gene, the first four nucleotides in exon 2 are GTGT, the first three of which encodes a Valine. Deletion of one of the two “GT”s correspond to the c.73_74 ΔGT mutation. In this experiment, PEgRNAs whose RTTs contain a “NT” insert in place of “GT”, or a “AN” insert on the opposite strand in place of “AC”, where N is any one of A, G, or C, were tested (inserts correspond to the second “GT” in “GTGT”, underlined above). These PEgRNAs can correct the frameshift resulted from the c.73_74 ΔGT mutation, and can generate a synonymous edit without changing the amino acid sequence encoded by NCF1.

[0512] 30 PEgRNAs were designed. 16 of the PEgRNAs have the spacer sequence of SEQ ID No. 5, and 14 have the spacer sequence SEQ ID NO. 19081. The PEgRNAs were chemically synthesized. HEK293T cells were transfected, and genomic DNA extracted and analyzed as described in Example 1. Editing efficiency was calculated with the formula as described in Example 2. Results of Prime Editing are summarized in Table 100.

[0513] Successful Prime Editing with RTTs containing alternative codons for Valine were observed.

TABLE 100
Prime Editing of NCF1B/NCF1C pseudogenes with Valine recode PEgRNAs.
For editing efficiency, “+”: 1.5%-4%, “++”: 4%-6%, “+++”: 6%-11%,
“++++”: greater than 11%. For indels: “+”: 0-0.1%; “++”: 0.1% to 0.2″;
“+++”: 0.2% to 0.4%; “++++”: greater than 0.4%.
Each range includes the upper limit and not the lower limit.
For example, 1%-2% means any value larger than 1% and no less than 2%.

| PEgRNA | Spacer | PBS | | RTT | | % | % | % | % |
|---|---|---|---|---|---|---|---|---|---|
| SEQ ID | SEQ ID | SEQ ID | PBS | SEQ ID | RTT | Editing | Editing | Indels | Indels |
| No.¹ | NO: | NO: | length | NO: | length | Rep1 | Rep2 | Rep1 | Rep2 |
| 485 | 5 | 14 | 9 | 34 | 12 | ++ | + | + | + |
| 496 | 5 | 14 | 9 | 41 | 14 | + | + | − | − |
| 497 | 5 | 16 | 11 | 34 | 12 | ++ | + | + | + |
| 513 | 5 | 16 | 11 | 41 | 14 | + | + | − | − |
| 510 | 5 | 18 | 13 | 34 | 12 | +++ | +++ | ++ | + |
| 521 | 5 | 18 | 13 | 41 | 14 | ++ | +++ | + | ++ |
| 19501 | 19081 | 19090 | 10 | 19121 | 15 | +++ | +++ | ++++ | ++ |
| 19507 | 19081 | 19090 | 10 | 19125 | 16 | +++ | +++ | ++ | ++ |
| 19512 | 19081 | 19092 | 12 | 19121 | 15 | +++ | +++ | +++ | +++ |
| 19527 | 19081 | 19092 | 12 | 19125 | 16 | ++++ | +++ | +++ | ++ |
| 483 | 5 | 14 | 9 | 36 | 12 | ++ | +++ | − | − |
| 489 | 5 | 14 | 9 | 42 | 14 | + | + | − | + |
| 492 | 5 | 16 | 11 | 36 | 12 | + | ++ | − | + |
| 512 | 5 | 16 | 11 | 42 | 14 | + | + | − | + |
| 503 | 5 | 18 | 13 | 36 | 12 | ++ | +++ | − | + |
| 522 | 5 | 18 | 13 | 42 | 14 | ++ | +++ | − | + |
| 19499 | 19081 | 19090 | 10 | 19120 | 15 | ++++ | +++ | +++ | +++ |
| 19503 | 19081 | 19090 | 10 | 19127 | 16 | ++++ | ++++ | +++ | +++ |
| 19511 | 19081 | 19092 | 12 | 19120 | 15 | ++++ | ++++ | +++ | +++ |
| 19521 | 19081 | 19092 | 12 | 19127 | 16 | ++++ | ++++ | +++ | +++ |
| 484 | 5 | 14 | 9 | 33 | 12 | ++ | ++ | + | + |
| 494 | 5 | 14 | 9 | 44 | 14 | ++ | + | + | − |
| 495 | 5 | 16 | 11 | 33 | 12 | ++ | + | − | + |
| 506 | 5 | 16 | 11 | 44 | 14 | + | + | − | − |
| 504 | 5 | 18 | 13 | 33 | 12 | +++ | ++ | + | + |
| 520 | 5 | 18 | 13 | 44 | 14 | +++ | +++ | ++ | − |
| 19502 | 19081 | 19090 | 10 | 19122 | 15 | ++++ | ++++ | ++ | +++ |
| 19509 | 19081 | 19090 | 10 | 19124 | 16 | ++++ | ++++ | ++ | +++ |
| 19513 | 19081 | 19092 | 12 | 19122 | 15 | ++++ | ++++ | +++ | +++ |
| 19522 | 19081 | 19092 | 12 | 19124 | 16 | ++++ | ++++ | ++ | +++ |

¹Indicated sequence does not contain the 3′ mU*mU*mU*U additional nucleotides and does not contain a 5′ mN*mN*mN* modifications used experimentally, where m indicates that the indicated nucleotide contains a 2′-O—Me modification and a * indicates a phosphorothioate bond. In case of ngRNA, the indicate. Italics: PEgRNAs for installing an “AT” in place of the second GT in GTGT as described above. underlined: PEgRNAs for installing a “TT” in place of the second GT in GTGT as described above. Italics: PEgRNAs for installing a “CT” in place of the second GT in GTGT as described above.

### Example 6: Ex Vivo Editing of Human CD34+ Cells at NCF1B, NCF1C, or NCF1 Sites

[0514] Prime Editing activity was tested for various PEgRNAs having the spacer of SEQ ID NO: 3999 or SEQ ID NO: 19081 were examined in human hematopoietic pluripotent stem cells (HSPCs, or CD34+ cells).

[0515] Cryopreserved human CD34+ cells were obtained from healthy donors and CGD patients having a c.73_74 GT deletion in NCF1 gene (referred to as ΔGT CGD patients). Prior to electroporation, cells were thawed and cultured for 2 days in complete media (X-VIVO 10, Lonza) supplemented with 100 ng/mL of each of Stem cell factor, Thrombopoietin, and Fms-related tyrosine kinase 3 ligand at 37° C./5% CO2 prior to electroporation. At the time of electroporation, cells were counted and resuspended to between 3.5E+7 to 7E+7 cells/mL in Maxcyte electroporation buffer.

[0516] mRNA encoding Prime Editor fusion proteins was used to electroporate the cells. Each Prime Editor fusion protein contains a Streptococcus pyogenes Cas9 (SpCas9) H840A nickase fused to the N-terminus of a full length MMLV-RT or a truncated MMLV-RT, where the truncation is at the C-terminus to reduce RNaseH activity. A Prime Editor fusion protein indicated as “Fx”, e.g., F1, has a full length MMLV-RT, and a Prime Editor fusion protein indicated as “Tx”, e.g., T1, has a C-terminal truncated MMLV-RT.

[0517] Prime editing guide RNAs (pegRNAs) and nick guide RNAs (ngRNAs) were synthesized and HPLC purified. Resuspended cells were mixed with PEgRNA, ngRNA, and mRNA encoding a Prime Editor fusion protein and transferred to a Maxcyte Cartridge for electroporation. Cells were then electroporated on Macyte program HSC-6 and transferred to a tissue culture plate and returned to the 37° C. incubator to recover for 20 minutes before adding fresh complete media, to achieve a density of approximately 1xe\hat{ }6 cells/mL. Cells were returned to culture for the desired time for downstream analysis.

[0518] At desired timepoints post electroporation (24 hours-120 hours), genomic DNA was extracted using Quick extract buffer (Lucigen). Samples were then PCR amplified at the NCF1 (or NCF1B/NCF1C) target site and processed for amplicon sequencing (Illumina). Sequence reads were assessed for insertion of the GT dinucleotide at the target site(s) as well as indels at the target sites.

[0519] CD34+ cells from healthy human donors as well as from ΔGT CGD patients were used to access editing efficiency and indel frequency by prime editing. Editing efficiency is represented as a percentage of all reads at a given timepoint.

[0520] For Editing in Cells from Healthy Donors:

[0521] Unless otherwise indicated, a “healthy donor” in Examples 6 to 11 refers to a donor having a wild type NCF1 gene bearing two copies of “GTGT”, as well as a NCF1B and a NCF1C pseudogene each having two copies of “GT” at the site corresponding to c.73_74 of NCF1.

[0522] Healthy donor CD34⁺ cells contain a wild-type NCF1 gene as well as both NCF1B and NCF1C pseudogenes. Compared to the wild type NCF1 gene, NCF1B and NCF1C both contain a dinucleotide deletion corresponding to the c.73-74GT deletion in the CGD-associated NCF1 gene, and are otherwise identical to the NCF1 gene at the target site corresponding to the c.73-74 location. Therefore, editing of NCF1B/NCF1C in healthy CD34+ cells is used an estimate for prime editing efficiency of the disease associated NCF1 gene, as well as for prime editing's potential to restore p47 function in CD34+ cells, as editing of NCF1B or NCF1C to resemble the wild type NCF1 sequence may be able to restore expression of a functional p47 protein.

[0523] Similar to calculation of editing efficiency as described in Example 2 above, the percentage of “GTGT” reads over the total reads of NCF1, NCF1B, and NCF1C sequences flanking the c.73-74 site (or corresponding sequences in NCF1B and NCF1C) sequence in exon 2 of NCF1 was used to calculate editing efficiency.

[0524] For editing in healthy donor cells, GTGT read percentage represents the percentage of all reads containing GTGT at a NCF1, NCF1B, or NCF1C site, and thus includes reads from wild-type NCF1 (˜33.3% of reads in an unedited healthy donor cells). The pseudogene correction efficiency calculates the level of correction within the pseudogenes, by deducting 33.3% from the GTGT reads percentage and dividing the remainder by 66.6% (percentage of NCF1B or NCF1C pseudogene reads), as shown in the formula below:

Editing efficiency=(GTGT reads %−0.33)/0.66

[0525] For editing in cells from donor in, e.g., samples No.s 54-59, 83, and 111-118: the donor cells used in these samples are derived from a healthy donor bearing three copies of “GTGT” and three copies of “GT” at the NCF1, NCF1B, and NCF1C loci. Accordingly, for such donor derived cells, GTGT reads include reads from endogenous loci (˜50% in an unedited cell). The pseudogene correction efficiency is thus calculated as below:

Editing efficiency=(GTGT reads %−0.5)/0.5

[0526] For editing in ΔGT CGD patients cells: Because these cells, e.g., those used in Sample No.s 133 and 134, lack a wild-type copy of the NCF1 gene, the percentage of “GTGT” reads at the c.73-74 site over the total reads of NCF1, NCF1B, and NCF1C sequences flanking the c.73-74 site (or corresponding sequences in NCF1B and NCF1C) sequence in exon 2 of NCF1 directly reflects editing efficiency.

[0527] In each table, nick-to-edit distance refers to the distance from the PEgRNA's nick site to the intended GT insert in number of nucleotides. Nick-to-nick distance refers to the distance between the PEgRNA's nick site and the ngRNA's nick site in number of nucleotides. A subset of the ngRNAs were designed for a PE3b strategy, and contains spacers complementary to the portion of the edit strand containing the intended edit.

[0528] Editing efficiency and indel frequency of each specific pegRNA and ngRNA combination are summarized below. The results demonstrate successful editing of endogenous NCF1, NCF1B and/or NCF1C in CD34+ cells using a PE3 or PE3b Prime Editing strategy.

[0529] For each of Tables 101-130, Indicated PEgRNA sequences and ngRNA sequences do not contain the 3′ mU*mU*mU*U additional nucleotides and does not contain the 5′mN*mN*mN* modifications used experimentally, where m indicates that the indicated nucleotide contains a 2′-O-Me modification and a * indicates a phosphorothioate bond.

[0530] Indel frequency (%), GTGT reads (%), and editing efficiency (%) in Tables 101-130 are as follows:

[0531] Indel frequency: “−”=0; “+”=0-1%; “++”=1%-2%; “+++”=2%-6%; “++++”=greater than 6%. For boarder values, each range includes the upper limit and not the lower limit. For example, 1%-2% means any value larger than 1% and no less than 2%.

[0532] Editing efficiency: “−” refers to less than 3%; “+”=3%-10%; “++”=10%-18%; “+++”=18%-25%; “++++”=greater than 25%. For boarder values, each range includes the upper limit and not the lower limit. For example, 3%-10% means any value larger than 3% and no less than 10%.

[0533] GTGT reads percentage for cells from healthy donors: “−” refers to less than 35%; “+”=35%-40%; “++”=40%-45%; “+++”=45%-50%; “++++”=greater than 50%. For boarder values, each range includes the upper limit and not the lower limit. For example, 35%-40% means any value larger than 35% and no less than 40%.

[0534] GTGT reads percentage for cells from donors that have three copies of “GTGT”: “−” refers to less than 49%; “+”=49%-53%; “++”=53%-54%; “+++”=54%-68%; “++++”=greater than 68%. For boarder values, each range includes the upper limit and not the lower limit. For example, 49%-53% means any value larger than 49% and no less than 53%.

TABLE 101
CD34+ cells from a healthy donor were electroporated with mRNA encoding
Prime Editor, PEgRNA, and ngRNA in a 25 uL electroporation cartridge. Editing
efficiency and indel frequency were measured 72 hours post electroporation.

| Sample | Prime | pegRNA | ngRNA | | | |
|---|---|---|---|---|---|---|
| No. | Editor | SEQ ID | SEQ ID | Indels (%) | GTGT (%) | editing (%) |
| Mock | NA | NA | NA | + | − | − |
| 1 | T1 | 5563 | 584 | ++++ | ++++ | ++++ |
| 2 | F1 | 5563 | 584 | ++++ | +++ | +++ |
| 3 | T1 | 5606 | 584 | +++ | ++ | ++ |
| 4 | T1 | 5647 | 584 | +++ | +++ | +++ |
| 5 | T1 | 5605 | 584 | ++++ | ++++ | ++++ |
| 6 | T1 | 5644 | 584 | ++++ | ++ | ++ |
| 7 | T1 | 5672 | 584 | ++++ | +++ | +++ |

TABLE 102
CD34+ cells from a healthy donor were electroporated with mRNA encoding
the prime editor, PEgRNA, and ngRNA in 25 uL cartridge. Editing efficiency
and indel frequency were measured at 72, 96, and 120 hours post electroporation.

| Sample | Prime | PEgRNA | ngRNA | Indels (%) | | | GTGT (%) | | | Editing (%) | | |
|---|---|---|---|---|---|---|---|---|---|---|---|---|
| No. | Editor | SEQ ID | SEQ ID | 72 h | 96 h | 120 h | 72 h | 96 h | 120 h | 72 h | 96 h | 120 h |
| Mock | NA | NA | NA | + | + | + | − | − | − | − | − | − |
| 8 | T1 | 5529 | 591 | ++ | ++ | ++ | − | − | − | − | − | − |
| 9 | T1 | 5537 | 591 | +++ | +++ | ++++ | ++ | ++ | ++ | ++ | ++ | ++ |
| 10 | T1 | 5542 | 591 | +++ | +++ | +++ | +++ | +++ | +++ | +++ | +++ | +++ |
| 11 | T1 | 5571 | 591 | +++ | +++ | +++ | ++ | ++ | ++ | ++ | ++ | ++ |
| 12 | T1 | 5543 | 591 | +++ | +++ | ++++ | ++ | ++ | ++ | ++ | ++ | ++ |
| 13 | T1 | 5563 | 591 | +++ | ++++ | ++++ | +++ | ++++ | ++++ | +++ | ++++ | ++++ |
| 14 | T1 | 5561 | 591 | +++ | +++ | +++ | + | + | + | + | + | + |
| 15 | T1 | 5569 | 591 | +++ | +++ | +++ | ++++ | ++++ | ++++ | ++++ | ++++ | ++++ |
| 16 | T1 | 5634 | 591 | +++ | +++ | ++++ | ++ | +++ | +++ | ++ | +++ | +++ |
| 17 | T1 | 5570 | 591 | +++ | ++++ | +++ | ++ | + | ++ | ++ | + | ++ |
| 18 | T1 | 5672 | 591 | − | +++ | ++++ | ++ | ++ | ++ | ++ | ++ | ++ |

TABLE 103
The PEgRNA having the sequence of SEQ ID No. 5563 combined with ngRNA having
the sequence of SEQ ID No. 584 was also re-examined as below. CD34+
cells from a healthy donor were electroporated with mRNA encoding the prime
editor, PEgRNA, and ngRNA in 100 uL cartridge. Editing efficiency and indel
frequency were measured at 72, 96, and 120 hours post electroporation.

| Sample | Prime | PEg | ngRNA | Indels (%) | | | GTGT (%) | | | Editing (%) | | |
|---|---|---|---|---|---|---|---|---|---|---|---|---|
| No. | Editor | SEQ ID | SEQ ID | 72 h | 96 h | 120 h | 72 h | 96 h | 120 h | 72 h | 96 h | 120 h |
| Mock | NA | NA | NA | + | + | + | − | − | − | − | − | − |
| 19 | Prime | 5563 | 584 | ++++ | ++++ | ++++ | ++++ | ++++ | ++++ | ++++ | ++++ | ++++ |
| | Editor | | | | | | | | | | | |
| | T1 | | | | | | | | | | | |

[0535] The PEgRNA having the sequence of SEQ ID No. 5563 combined with ngRNA having the sequence of SEQ ID No. 584 was also tested for editing of NCF1B/NCF1C pseudogenes in healthy CD34+ cells with mRNAs encoding 26 different prime editor fusion proteins each having a SpCas9H840A nickase and a MMLV-RT. Successful Prime Editing was observed in each case (data not shown).

TABLE 104
CD34+ cells from healthy donor were electroporated with mRNA encoding
the prime editor, pegRNA, and ngRNA in 25 uL cartridge. Editing efficiency
and indel frequency were measured at 72, 96, and 120 hours post electroporation.

| Sample | Prime | PEgRNA | ngRNA | Indels (%) | | | GTGT (%) | | | Editing (%) | | |
|---|---|---|---|---|---|---|---|---|---|---|---|---|
| No. | Editor | SEQ ID | SEQ ID | 72 h | 96 h | 120 h | 72 h | 96 h | 120 h | 72 h | 96 h | 120 h |
| Mock | NA | NA | NA | + | + | + | − | − | − | − | − | − |
| 20 | T1 | 5563 | 585 | +++ | +++ | +++ | +++ | +++ | ++++ | +++ | +++ | ++++ |
| 21 | T1 | 5563 | 2143 | + | + | + | + | + | + | + | + | + |
| 22 | T1 | 5563 | 595 | +++ | +++ | +++ | ++ | ++ | +++ | ++ | ++ | +++ |
| 23 | T1 | 5563 | 594 | ++ | ++ | ++ | + | ++ | ++ | + | ++ | ++ |
| 24 | T1 | 5563 | 583 | ++ | ++ | +++ | ++ | ++ | +++ | ++ | ++ | +++ |
| 25 | T1 | 5563 | 592 | ++ | ++ | ++ | + | + | ++ | + | + | ++ |
| 26 | T1 | 5563 | 591 | +++ | +++ | +++ | ++++ | ++++ | ++++ | ++++ | ++++ | ++++ |
| 27 | T1 | 5563 | 590 | ++ | ++ | ++ | ++ | ++ | ++ | ++ | ++ | ++ |

TABLE 105
CD34+ cells from healthy donor were electroporated with mRNA encoding
the prime editor, pegRNA, and ngRNA in 25 uL cartridge. Editing efficiency and indel
frequency were measured at 72, 96, and 120 hours post electroporation.

| | | PEgRNA | ngRNA | | | | | | | | | |
|---|---|---|---|---|---|---|---|---|---|---|---|---|
| Sample | Prime | SEQ | SEQ | Indels (%)² | | | GTGT (%)² | | | Editing (%)² | | |
| No. | Editor | ID | ID¹ | 72 h | 96 h | 120 h | 72 h | 96 h | 120 h | 72 h | 96 h | 120 h |
| Mock | NA | NA | NA | + | + | + | − | − | − | − | − | − |
| 28 | T1 | 5563 | 584 | ++++ | ++++ | +++ | ++++ | ++++ | ++++ | ++++ | ++++ | ++++ |
| 29 | T1 | 5563 | 585 | ++++ | ++++ | ++++ | +++ | ++++ | ++++ | +++ | ++++ | ++++ |
| 30 | T1 | 5563 | 591 | +++ | +++ | +++ | ++ | +++ | +++ | ++ | +++ | +++ |
| 31 | T1 | 5563 | 579^{C} | + | + | + | + | + | − | + | + | − |
| 32 | T1 | 5563 | 578^{C} | + | + | + | − | − | − | − | − | − |
| 33 | T1 | 5606 | 584 | +++ | +++ | +++ | + | + | ++ | + | + | ++ |
| 34 | T1 | 5606 | 585 | +++ | ++++ | NA | ++ | + | NA | ++ | + | NA |
| 35 | T1 | 5606 | 591 | +++ | +++ | ++++ | ++ | ++ | ++ | ++ | ++ | ++ |
| 36 | T1 | 5606 | 579^{C} | + | + | + | − | − | − | − | − | − |

¹A superscript “C” indicates that the ngRNA is a control ngRNA that does not efficiently nick the target DNA strand.
²“NA” indicates sample not taken or sequencing issue at given timepoint.

TABLE 106
CD34+ cells from a healthy donor were electroporated with mRNA
encoding the prime editor, PEgRNA, and ngRNA in 100 uL cartridge. Editing efficiency and
indel frequency were measured at 72, 96, and 120 hours post electroporation.

| Sample | Prime | PEgRNA | ngRNA | Indels (%) | | | GTGT (%) | | | Editing (%) | | |
|---|---|---|---|---|---|---|---|---|---|---|---|---|
| No. | Editor | SEQ ID | SEQ ID | 72 h | 96 h | 120 h | 72 h | 96 h | 120 h | 72 h | 96 h | 120 h |
| Mock | NA | NA | NA | + | + | + | − | − | + | − | − | − |
| 37 | T1 | 5647 | 584 | ++++ | ++++ | ++++ | ++++ | ++++ | ++++ | ++++ | ++++ | ++++ |
| 38 | T1 | 5647 | 591 | +++ | +++ | +++ | ++++ | ++++ | ++++ | ++++ | ++++ | ++++ |
| 39 | T1 | 5647 | 590 | +++ | +++ | +++ | +++ | +++ | ++++ | +++ | +++ | ++++ |

[0536] PEgRNA having the sequence of SEQ ID NO 5647 in combination with ngRNA having the sequence of SEQ ID NO 584 and ngRNA having the sequence of SEQ ID NO 590 were also re-examined with mRNA encoding Prime Editor fusion protein T1 or F1. Successful Prime Editing was observed in all cases (data not shown).

TABLE 107
CD34+ cells from a healthy donor were electroporated with mRNA
encoding the prime editor, PEgRNA, and ngRNA in 400 uL cartridge. Editing efficiency and
indel frequency were measured and indel frequency measured at 48, 72, and 96 hours post
electroporation.

| Sample | Prime | PERNA | ngRNA | Indels (%) | | | GTGT (%) | | | Editing (%) | | |
|---|---|---|---|---|---|---|---|---|---|---|---|---|
| No. | Editor | SEQ ID | SEQ ID | 72 h | 96 h | 120 h | 72 h | 96 h | 120 h | 72 h | 96 h | 120 h |
| Mock | NA | NA | NA | +++ | +++ | + | − | − | − | − | − | − |
| 40 | T1 | 5569 | 585 | ++++ | ++++ | ++++ | ++++ | ++++ | ++++ | ++++ | ++++ | ++++ |
| 41 | T1 | 5569 | 585 | ++++ | ++++ | ++++ | ++++ | ++++ | ++++ | ++++ | ++++ | ++++ |
| 42 | F1 | 5569 | 585 | ++++ | ++++ | ++++ | ++++ | ++++ | ++++ | ++++ | ++++ | ++++ |

TABLE 108
CD34+ cells from a healthy donor were electroporated with mRNA
encoding the prime editor, PEgRNA, and ngRNA in 100 uL cartridge. Editing efficiency and
indel frequency were measured and indel frequency measured at 72, 96, and 120 hours post
electroporation. In cell sample 43, Prime Editing was performed using PE2 strategy, and no
ngRNA was used. The PEgRNA and ngRNA component information is provided in Table 101.

| | | | ngRNA | | | | | | | | | |
|---|---|---|---|---|---|---|---|---|---|---|---|---|
| Sample | Prime | PEgRNA | SEQ | Indels (%) | | | GTGT (%) | | | Editing (%) | | |
| No. | Editor | SEQ ID | ID¹ | 72 h | 96 h | 120 h | 72 h | 96 h | 120 h | 72 h | 96 h | 120 h |
| Mock | NA | NA | NA | + | + | + | − | − | − | − | − | − |
| 43 | T1 | 5605 | PE2 | + | + | + | + | + | + | + | + | + |
| 44 | T1 | 5605 | 584 | ++++ | ++++ | ++++ | ++++ | ++++ | ++++ | ++++ | ++++ | ++++ |

TABLE 109
CD34+ cells from a healthy donor were electroporated with mRNA
encoding the prime editor, PEgRNA, and ngRNA in 25 uL cartridge. Editing efficiency and indel
frequency were measured. Different concentrations of ngRNA were tested. Editing efficiency
and indel frequency measured at 72, 96, and 120 hours post electroporation. For amples 45-47,
48-50, and 51-53, high-concentration, mid-concentration, and low concentration of ngRNA was
used, respectively.

| Sample | Prime | PEgRNA | ngRNA | Indels (%) | | | GTGT (%) | | | Editing (%) | | |
|---|---|---|---|---|---|---|---|---|---|---|---|---|
| No. | Editor | SEQ ID | SEQ ID | 72 h | 96 h | 120 h | 72 h | 96 h | 120 h | 72 h | 96 h | 120 h |
| Mock | NA | NA | NA | + | + | + | − | − | − | − | − | − |
| 45 | F1 | 5605 | 590 | ++++ | ++++ | ++++ | +++ | +++ | +++ | +++ | +++ | +++ |
| 46 | F1 | 5605 | 590 | +++ | +++ | +++ | ++ | +++ | +++ | ++ | +++ | +++ |
| 47 | F1 | 5605 | 590 | +++ | +++ | +++ | ++ | ++ | ++ | ++ | ++ | ++ |
| 48 | F1 | 5605 | 591 | ++++ | ++++ | ++++ | +++ | ++++ | +++ | +++ | ++++ | +++ |
| 49 | F1 | 5605 | 591 | +++ | +++ | +++ | ++ | ++ | ++ | ++ | ++ | ++ |
| 50 | F1 | 5605 | 591 | +++ | +++ | ++++ | ++ | +++ | +++ | ++ | +++ | ++ |
| 51 | F1 | 5605 | 584 | ++++ | ++++ | ++++ | +++ | ++++ | +++ | +++ | ++++ | +++ |
| 52 | F1 | 5605 | 584 | ++++ | ++++ | ++++ | +++ | ++++ | +++ | +++ | ++++ | +++ |
| 53 | F1 | 5605 | 584 | ++++ | ++++ | ++++ | +++ | +++ | +++ | +++ | +++ | +++ |

[0537] The PEgRNA having the sequence of SEQ ID No. 5605, combined with the ngRNA having the sequence of SEQ ID No. 584, were also tested with mRNA that encode 9 different prime editor fusion proteins. Successful Prime Editing was observed (data not shown).

TABLE 110
CD34+ cells from a donor having 3 copies of “GTGT” at the
c.73_74 or corresponding sites in NCF1, NCF1B and/or NCF1C
were electroporated with mRNA encoding the prime editor,
pegRNA, and ngRNA in 400 uL cartridge. Editing efficiency and indel
frequency were measured at 24 hours post electroporation.

| Sample | Prime | PEgRNA | ngRNA | Indels | GTGT | editing |
|---|---|---|---|---|---|---|
| No. | Editor | SEQ ID | SEQ ID | (%) | (%) | (%) |
| Mock | NA | NA | NA | + | − | − |
| 58 | T1 | 5605 | 584 | ++++ | ++++ | ++++ |
| 59 | T1 | 5605 | 584 | ++++ | ++++ | ++++ |

TABLE 111
CD34+ cells from a donor having 3 copies of “GTGT” at the
c.73_74 or corresponding sites in NCF1, NCF1B and/or NCF1C
were also tested for editing at 72 hours post electroporation.
The cells were electroporated with mRNA encoding the prime editor,
pegRNA, and ngRNA in 400 uL cartridge.

| Sample | Prime | PEgRNA | ngRNA | Indels | GTGT | editing |
|---|---|---|---|---|---|---|
| No. | Editor | SEQ ID | SEQ ID¹ | (%) | (%) | (%) |
| Mock | NA | NA | NA | + | − | − |
| 54 | T1 | 5605 | 584 | +++ | ++++ | ++++ |
| 55 | T1 | 5605 | 584 | +++ | +++ | ++++ |
| 56 | T1 | 5605 | 584 | +++ | ++++ | ++++ |
| 57 | T1 | 5605 | 584 | +++ | +++ | ++++ |

TABLE 112
CD34+ cells from a healthy donor were electroporated with mRNA
encoding the prime editor, PEgRNA, and ngRNA in 25 uL cartridge.
Editing efficiency and indel frequency were measured and
indel frequency measured at 48 and 120 hours post electroporation.
Mock sample was not taken at 120 h.

| Sample | Prime | PEgRNA | ngRNA | Indels(%) | | GTGT (%) | | Editing (%) | |
|---|---|---|---|---|---|---|---|---|---|
| No. | Editor | SEQ ID | SEQ ID | 48 h | 120 h | 48 h | 120 h | 48 h | 120 h |
| Mock | NA | NA | NA | + | NA | − | NA | − | NA |
| 60 | T1 | 5647 | 590 | ++ | ++ | + | + | + | + |
| 61 | T1 | 5570 | 590 | +++ | +++ | + | + | + | + |

TABLE 113
Summary of PEgRNAs used in experiments in Tables 101-112 (spacer SEQ
ID NO. 3999). Nick-to-edit distance for all PEgRNAs is 2nt. The RTTs introduce an edit in the
edit strand that is in the protospacer. Incorporation of the edit alters protospacer sequence and
may therefore prevent Cas9 from re-nicking the edit strand.

| pegRNA | | | | |
|---|---|---|---|---|
| SEQ ID s | PBS SEQ ID | PBS length | RTT SEQ ID | RTT length |
| 5529 | 4006 | 7 | 4020 | 11 |
| 5537 | 4010 | 11 | 4020 | 11 |
| 5543 | 4011 | 12 | 4020 | 11 |
| 5542 | 4010 | 11 | 4021 | 12 |
| 5563 | 4011 | 12 | 4021 | 12 |
| 5561 | 4012 | 13 | 4020 | 11 |
| 5569 | 4012 | 13 | 4021 | 12 |
| 5571 | 4010 | 11 | 4054 | 14 |
| 5570 | 4013 | 14 | 4020 | 11 |
| 5606 | 4011 | 12 | 4054 | 14 |
| 5605 | 4013 | 14 | 4021 | 12 |
| 5634 | 4012 | 13 | 4054 | 14 |
| 5647 | 4011 | 12 | 4098 | 16 |
| 5644 | 4013 | 14 | 4054 | 14 |

TABLE 114
Summary of ngRNAs used in experiments in Tables 101-112.
The nick-to-nick distance is based on the sequence pre-editing.

| ngRNA | ngRNA spacer | Nick-to-nick |
|---|---|---|
| SEQ ID | SEQ ID | distance |
| 592 | 451 | 76 |
| 594 | 421 | 68 |
| 591 | 424 | 82 |
| 585 | 436 | 44 |
| 590 | 422 | 96 |
| 583 | 445 | 75 |
| 595 | 442 | 67 |
| 584 | 429 | 41 |
| 2143 | 2130 | 56 |

TABLE 115
CD34+ cells from a healthy donor were electroporated with mRNA
encoding the prime editor, PEgRNA, and ngRNA in 25 uL cartridge. Editing efficiency and indel
frequency measured at 72, 96, and 120 hours post electroporation.

| Sample | Prime | PEgRNA | ngRNA | Indels (%) | | | GTGT (%) | | | Editing (%) | | |
|---|---|---|---|---|---|---|---|---|---|---|---|---|
| No. | Editor | SEQ ID | SEQ ID | 72 h | 96 h | 120 h | 72 h | 96 h | 120 h | 72 h | 96 h | 120 h |
| Mock | NA | NA | NA | + | + | + | − | − | − | − | − | − |
| 61 | F1 | 19534 | 2142 | +++ | +++ | ++++ | ++ | ++ | +++ | ++ | ++ | +++ |
| 62 | F1 | 19550 | 2142 | +++ | +++ | +++ | +++ | +++ | +++ | +++ | +++ | +++ |
| 63 | F1 | 19497 | 2142 | ++++ | ++++ | ++++ | +++ | +++ | +++ | +++ | +++ | +++ |
| 64 | F1 | 19508 | 2142 | ++++ | ++++ | ++++ | +++ | +++ | +++ | +++ | +++ | +++ |
| 65 | F1 | 19516 | 2142 | ++++ | ++++ | ++++ | ++ | ++ | ++ | ++ | ++ | ++ |
| 66 | F1 | 19526 | 2142 | ++++ | ++++ | ++++ | ++ | ++ | +++ | ++ | ++ | +++ |
| 67 | F1 | 19524 | 2142 | ++++ | ++++ | ++++ | +++ | +++ | +++ | +++ | NA | +++ |
| 68 | F1 | 19537 | 2142 | ++++ | ++++ | ++++ | +++ | +++ | ++++ | +++ | +++ | ++++ |
| 69 | F1 | 19545 | 2142 | ++++ | ++++ | ++++ | +++ | +++ | +++ | +++ | +++ | +++ |
| 70 | F1 | 19535 | 2142 | +++ | +++ | +++ | ++ | ++++ | +++ | ++ | NA | +++ |
| 71 | F1 | 19543 | 2142 | ++++ | +++ | ++++ | ++++ | +++ | ++++ | ++++ | NA | ++++ |

TABLE 116
CD34+ cells from a healthy donor were electroporated with mRNA
encoding the prime editor, PEgRNA, and ngRNA in 25 uL cartridge.
Editing efficiency and indel frequency were measured
72 hours post electroporation.

| | | | ngRNA | | | |
|---|---|---|---|---|---|---|
| Sample | Prime | pegRNA | SEQ | Indels | GTGT | Editing |
| No. | Editor | SEQ ID s | ID | (%) | (%) | (%) |
| Mock | NA | NA | NA | + | − | − |
| 72 | T1 | 19534 | 2142 | +++ | + | + |
| 73 | T1 | 19534 | 19566 | ++ | + | + |
| 74 | T1 | 19550 | 2142 | +++ | ++ | ++ |
| 75 | T1 | 19550 | 2142 | +++ | ++ | ++ |
| 76 | T1 | 19550 | 19566 | ++ | + | + |
| 77 | T1 | 19550 | 19566 | ++ | + | + |

TABLE 117
CD34+ cells from a healthy donor were electroporated with mRNA encoding
the prime editor, PERNA, and ngRNA in 25 uL cartridge. Editing efficiency and indel
frequency measured at 72, 96, and 120 hours post electroporation.

| Sample | Prime | PEgRNA | ngRNA | Indels (%) | | | GTGT (%) | | | Editing (%) | | |
|---|---|---|---|---|---|---|---|---|---|---|---|---|
| No. | Editor | SEQ ID | SEQ ID¹ | 72 h | 96 h | 120 h | 72 h | 96 h | 120 h | 72 h | 96 h | 120 h |
| Mock | NA | NA | NA | + | + | + | − | − | − | − | − | − |
| 78 | T1 | 19550 | 2142 | +++ | +++ | +++ | + | + | + | + | + | + |
| 79 | T1 | 19550 | 19566 | +++ | +++ | ++ | + | + | + | + | + | + |
| 80 | T1 | 19550 | 2140^{C} | + | + | + | − | − | − | − | − | − |
| 81 | T1 | 19550 | 19564^{C} | + | + | + | − | − | − | − | − | − |

¹A superscript “C” indicates that the ngRNA is a control ngRNA that does not efficiently nick the target DNA strand.

TABLE 118
CD34+ cells from a healthy donor were electroporated with mRNA
encoding the prime editor, PEgRNA, and ngRNA in 25 uL cartridge. Editing efficiency and indel
frequency measured at 72, 96, and 120 hours post electroporation.

| Sample | Prime | PEgRNA | ngRNA | Indels (%) | | | GTGT (%) | | | Editing (%) | | |
|---|---|---|---|---|---|---|---|---|---|---|---|---|
| No. | Editor | SEQ ID | SEQ ID | 72 h | 96 h | 120 h | 72 h | 96 h | 120 h | 72 h | 96 h | 120 h |
| Mock | NA | NA | NA | + | + | + | − | − | + | − | − | − |
| 82 | T1 | 19550 | 2142 | +++ | +++ | +++ | +++ | +++ | +++ | +++ | +++ | +++ |

TABLE 119
CD34+ cells from a healthy donor were electroporated with
mRNA encoding the prime editor, PEgRNA, and ngRNA in
400 uL cartridge. Editing efficiency and indel frequency
measured at 24 hours post electroporation

| Sample | Prime | PEgRNA | ngRNA | Indels | GTGT | Editing |
|---|---|---|---|---|---|---|
| No. | Editor | SEQ ID | SEQ ID | (%) | (%) | (%) |
| Mock | NA | NA | NA | + | − | − |
| 83 | T1 | 19550 | 888 | + | + | + |

TABLE 120
CD34+ cells from a healthy donor were electroporated with mRNA
encoding the prime editor, PERNA, and ngRNA in 25 uL cartridge. Editing efficiency and indel
frequency measured at 72 and 96 hours post electroporation

| | | | | | | GTGT | | | |
|---|---|---|---|---|---|---|---|---|---|
| | Prime | PEgRNA | ngRNA | Indels(%) | | percentage(%) | | Editing (%) | |
| Sample No. | Editor | SEQ ID | SEQ ID | 72 h | 96 h | 72 h | 96 h | 72 h | 96 h |
| Mock | NA | NA | NA | + | + | − | − | − | − |
| 84 | F1 | 19543 | 2143 | ++++ | ++++ | ++++ | ++++ | ++++ | ++++ |
| 85 | F1 | 19543 | 2142 | +++ | +++ | +++ | +++ | +++ | +++ |
| 86 | F1 | 19543 | 888 | + | + | ++ | ++ | ++ | ++ |

TABLE 121
CD34+ cells from a healthy donor were electroporated with mRNA encoding
the prime editor, PERNA, and ngRNA in 100 uL cartridge. Editing efficiency and indel
frequency measured at 24, 48, and 120 hours post electroporation.

| Sample | Prime | PEgRNA | ngRNA | Indels (%) | | | GTGT (%) | | | Editing (%) | | |
|---|---|---|---|---|---|---|---|---|---|---|---|---|
| No. | Editor | SEQ ID | SEQ ID | 24 h | 48 h | 120 h | 24 h | 48 h | 120 h | 24 h | 48 h | 120 h |
| Mock | NA | NA | NA | + | + | + | − | − | − | − | − | − |
| 87 | T1 | 19543 | 888 | + | + | + | + | + | ++ | + | + | ++ |
| 88 | T1 | 19543 | 2143 | +++ | +++ | ++++ | ++ | +++ | ++++ | ++ | +++ | ++++ |
| 89 | T1 | 19543 | 2142 | +++ | +++ | ++++ | + | + | +++ | + | + | +++ |

TABLE 122
CD34+ cells from a healthy donor were electroporated with mRNA
encoding the prime editor, PEgRNA, and ngRNA in 100 uL cartridge. Editing efficiency and
indel frequency measured at 24, 48, and 120 hours post electroporation

| Sample | Prime | PEgRNA | ngRNA | Indels (%) | | | GTGT (%) | | | Editing (%) | | |
|---|---|---|---|---|---|---|---|---|---|---|---|---|
| No. | Editor | SEQ ID | SEQ ID | 24 h | 48 h | 120 h | 24 h | 48 h | 120 h | 24 h | 48 h | 120 h |
| Mock | NA | NA | NA | + | + | + | − | − | − | − | − | − |
| 90 | T1 | 19543 | 878 | + | + | + | ++ | +++ | ++++ | ++ | +++ | ++++ |
| 91 | T1 | 19543 | 880 | + | + | + | ++ | +++ | ++++ | ++ | +++ | ++++ |
| 92 | T1 | 19543 | 888 | + | + | + | ++ | +++ | ++++ | ++ | +++ | ++++ |
| 93 | T1 | 19543 | 883 | + | + | ++ | +++ | ++++ | ++++ | +++ | ++++ | ++++ |

TABLE 123
CD34+ cells from a healthy donor were electroporated with mRNA encoding
the prime editor, PEgRNA, and ngRNA in 100 uL cartridge. Editing efficiency and indel
frequency measured at 72 hours post electroporation

| Sample | Prime | PEgRNA | ngRNA | Indels | GTGT | Editing |
|---|---|---|---|---|---|---|
| No. | Editor | SEQ ID | SEQ ID | (%) | (%) | (%) |
| Mock | NA | NA | NA | + | − | − |
| 94 | T1 | 19543 | 883 | + | +++ | +++ |
| 95 | T1 | 19543 | 880 | + | ++ | ++ |
| 96 | T1 | 19543 | 883 | ++ | ++++ | ++++ |

TABLE 124
CD34+ cells from a healthy donor were electroporated with mRNA
encoding the prime editor, PEgRNA, and ngRNA in 25 uL cartridge. Editing efficiency and indel
frequency measured at 24, 48, and 120 hours post electroporation. The Mock, sample numbers
97, 98, and 99, each had 100, 400, 400, and 100 uL cartridge volume.

| Sample | Prime | PEgRNA | ngRNA | Indels (%) | | | GTGT (%) | | | Editing (%) | | |
|---|---|---|---|---|---|---|---|---|---|---|---|---|
| No. | Editor | SEQ ID | SEQ ID | 24 h | 48 h | 120 h | 24 h | 48 h | 120 h | 24 h | 48 h | 120 h |
| Mock | NA | NA | NA | + | + | + | − | − | − | − | − | − |
| 97 | F1 | 19543 | 883 | + | +++ | ++ | ++++ | ++++ | ++++ | ++++ | ++++ | ++++ |
| 98 | T1 | 19543 | 883 | ++ | ++ | +++ | ++++ | ++++ | ++++ | ++++ | ++++ | ++++ |
| 99 | F2 | 19543 | 883 | + | + | ++ | ++ | +++ | ++++ | ++ | +++ | ++++ |

TABLE 125
CD34+ cells from a healthy donor were electroporated with mRNA encoding
the prime editor, PEgRNA, and ngRNA in 25 uL cartridge. Editing efficiency and indel
frequency measured at 120 hours post electroporation. Samples 176-178, 179-182, and 183-186
were each contacted with high, mid, and low concentration of pegRNA and low, mid, and high
concentration ngRNA, respectively.

| Sample | Prime | PEgRNA | ngRNA | Indels | GTGT | Editing |
|---|---|---|---|---|---|---|
| No. | Editor | SEQ ID | SEQ ID | (%) | (%) | (%) |
| Mock | NA | NA | NA | NA | NA | NA |
| 100 | TI | 19537 | 881 | + | + | + |
| 101 | T1 | 19537 | 879 | + | + | + |
| 102 | T1 | 19537 | 888 | + | ++ | ++ |
| 103 | T1 | 19537 | 880 | + | ++ | ++ |
| 104 | T1 | 19537 | 881 | + | + | + |
| 105 | T1 | 19537 | 879 | + | ++ | ++ |
| 106 | T1 | 19537 | 888 | + | ++ | ++ |
| 107 | T1 | 19537 | 880 | ++ | +++ | ++ |
| 108 | T1 | 19537 | 881 | + | ++ | ++ |
| 109 | T1 | 19537 | 879 | + | + | + |
| 110 | T1 | 19537 | 888 | + | ++ | ++ |

TABLE 126
CD34+ cells (4.00E+07 cells/mL at electroporation) from a donor having 3
copies of “GTGT” at the c.73_74 or corresponding sites in NCF1, NCF1B and/or NCF1C were
electroporated with mRNA encoding prime editor, pegRNA, and ngRNA. Editing efficiency and
indel frequency measured at 72 hours post electroporation.

| Sample | Prime | PERNA | ngRNA | Indels | GTGT | Editing |
|---|---|---|---|---|---|---|
| No. | Editor | SEQ ID | SEQ ID | (%) | (%) | (%) |
| Mock | NA | NA | NA | + | − | − |
| 111 | T1 | 19537 | 878 | + | + | + |
| 112 | T1 | 19537 | 880 | + | +++ | + |
| 113 | T1 | 19537 | 881 | + | + | + |
| 114 | T1 | 19537 | 879 | + | + | + |
| 115 | T1 | 19537 | 888 | + | + | + |
| 116 | T1 | 19545 | 888 | + | + | + |
| 117 | T1 | 19535 | 888 | + | + | + |
| 118 | T1 | 19543 | 888 | + | +++ | ++ |

TABLE 127
CD34+ cells from a healthy donor were electroporated with mRNA encoding
the prime editor, PEgRNA, and ngRNA in 25 uL cartridge. Editing efficiency and indel
frequency measured at 72 and 120 hours post electroporation.

| | | | | | | GTGT | | | |
|---|---|---|---|---|---|---|---|---|---|
| Sample | Prime | PEgRNA | ngRNA | Indels(%)¹ | | percentage(%)¹ | | Editing (%)¹ | |
| No. | Editor | SEQ ID | SEQ ID | 72 h | 120 h | 72 h | 120 h | 72 h | 120 h |
| Mock | NA | NA | NA | + | NA | − | NA | − | NA |
| 119 | T1 | 19524 | 878 | + | + | + | ++ | + | ++ |
| 120 | T1 | 19524 | 880 | + | + | + | ++ | + | ++ |
| 121 | T1 | 19524 | 881 | + | + | + | + | + | + |
| 122 | T1 | 19524 | 879 | + | + | + | + | + | + |
| 123 | T1 | 19524 | 877 | + | + | + | + | + | + |
| 124 | T1 | 19524 | 888 | + | + | + | + | + | + |
| 125 | T1 | 19524 | 887 | + | + | − | − | − | − |
| 126 | T1 | 19524 | 892 | + | + | + | + | + | + |
| 127 | T1 | 19524 | 883 | + | + | ++ | ++ | ++ | ++ |
| 128 | F2 | 19524 | 880 | + | + | + | + | + | + |
| 129 | F2 | 19524 | 888 | + | + | + | + | + | + |
| 130 | F2 | 19524 | 887 | NA | +++ | NA | + | NA | + |
| 131 | F2 | 19524 | 892 | NA | + | NA | + | NA | − |
| 132 | F2 | 19524 | 883 | NA | + | NA | + | NA | + |

¹“NA” indicates sample not taken or sequencing issue at given timepoint.

TABLE 128
Summary of PEgRNAs used in experiments in Tables 115-127
(spacer SEQ ID NO. 19081). Nick-to-edit
distance for all PEgRNAs is 7nt.

| PEgRNA SEQ | | PBS | | RTT |
|---|---|---|---|---|
| ID | PBS SEQ ID | length | RTT SEQ ID | length |
| 19497 | 19092 | 12 | 19112 | 13 |
| 19524 | 19092 | 12 | 19126 | 16 |
| 19535 | 19092 | 12 | 19129 | 17 |
| 19508 | 19093 | 13 | 19112 | 13 |
| 19526 | 19093 | 13 | 19123 | 15 |
| 19537 | 19093 | 13 | 19126 | 16 |
| 19543 | 19093 | 13 | 19129 | 17 |
| 19516 | 19094 | 14 | 19112 | 13 |
| 19534 | 19094 | 14 | 19123 | 15 |
| 19545 | 19094 | 14 | 19126 | 16 |
| 19550 | 19094 | 14 | 19129 | 17 |

TABLE 129
Summary of ngRNAs used in experiments in Tables 115-127.
The nick-to-nick distance is based on the sequence
pre-editing. A star (*) indicates a PE3b ngRNA.

| | ngRNA | Nick-to-nick |
|---|---|---|
| ngRNA SEQ ID | spacer SEQ ID | distance |
| 879* | 769 | 4 |
| 887* | 803 | 4 |
| 877* | 766 | 5 |
| 881* | 768 | 5 |
| 892* | 839 | 5 |
| 880* | 767 | 6 |
| 883* | 833 | 6 |
| 878* | 770 | 7 |
| 888* | 849 | 7 |
| 2143 | 2130 | 61 |
| 2142 | 2133 | 72 |
| 19566* | 19478 | 88 |

TABLE 130
Two pairs of PEgRNA and ngRNA were tested in CD34+ cells derived from
a ΔGT CGD patient and in CD34+ cells from a healthy donor. The cells were electroporated
with mRNA encoding prime editor, and different concentrations of PEgRNA and ngRNA in
different cartridge volumes. Pseudogene and/or NCF1 editing efficiency and indel frequency
were measured at 24, 48, and 120 hours post electroporation. Samples 133 and 135 had mid
concentration and high concentration of ngRNA, and samples 134 and 136 high concentrations
of PEgRNA and low concentration of ngRNA

| Sample | | | PEgRNA | ngRNA | | | | GTGT percentage | | | | | |
|---|---|---|---|---|---|---|---|---|---|---|---|---|---|
| No. for | Cell | Prime | SEQ | SEQ | Indels (%) | | | (%) | | | Editing (%) | | |
| filing | source | Editor | ID | ID | 24 h | 48 h | 120 h | 24 h | 48 h | 120 h | 24 h | 48 h | 120 h |
| Mock1 | ΔGT | NA | | | + | + | + | NA | NA | NA | − | − | − |
| | CGD | | | | | | | | | | | | |
| | patient | | | | | | | | | | | | |
| 133 | ΔGT | T1 | 19537 | 880 | + | ++ | ++ | NA | NA | NA | + | +++ | ++++ |
| | CGD | | | | | | | | | | | | |
| | patient | | | | | | | | | | | | |
| 134 | ΔGT | T1 | 5605 | 584 | ++++ | ++++ | ++++ | NA | NA | NA | ++++ | ++++ | ++++ |
| | CGD | | | | | | | | | | | | |
| | patient | | | | | | | | | | | | |
| Mock2 | Healthy | Mock | | | + | ++ | + | − | − | − | − | − | − |
| 135 | Healthy | T1 | 19537 | 880 | + | ++ | ++ | + | +++ | ++++ | + | +++ | ++++ |
| 136 | Healthy | T1 | 5605 | 584 | +++ | +++ | ++++ | ++++ | ++++ | ++++ | ++++ | ++++ | ++++ |

### Example 7: Analysis of Clones Derived from Ex Vivo Edited CD34+ Cells

[0538] To confirm that the editing efficiency observed in Example 6 throughout the population of CD34+ cells contacted with the prime editing components, a subset of cells edited in Example 6 were further examined with clonal analysis. Edited cells from sample numbers 19, 37-39, 40-42, 44, 58, 59, 82, 87-89, 97-99, 133, and 134 were each plated separately in Methocult (Stem Cell Technologies, H4435) at 300 to 500 cells per well and incubated for 14 days for the clones to grow. Following incubation, clones were picked individually into 15 μL of Quick extract buffer for genomic DNA extraction. The extracted genomic DNA was PCR amplified for amplicon sequencing

[0539] For analysis No. 6, cells with at least 66% GTGT reads at the NCF1, NCF1B, and NCF1C target sites corresponding to c.73_74 in NCF1 were deemed to carry a desired GT insertion at the at the target site of at least 1 pseudogene. For the other analysis groups, cells with at least 50% GTGT reads at the NCF1, NCF1B, and NCF1C target sites corresponding to c.73_74 in NCF1 were deemed to carry a desired GT insertion at the at the target site of at least 1 pseudogene. When calculated, percentage of GTGT reads and indels were bucketed with +/−3%.

[0540] Results of the clonal analysis are summarized in Table 131 below. The sample numbers of edited cells as well as the pegRNA and ngRNA used in editing are also shown. The percentage of clones carrying desired edit indicate that the prime editing efficiency reflects efficient editing throughout the population of cells.

TABLE 131
Ex vivo clonal analysis of CD34+ cells edited with Prime Editing.

| | Sample | | | | | | |
|---|---|---|---|---|---|---|---|
| | No. | | | | | Clone | |
| Anal- | (as in | | | | Clones | with | Clones |
| ysis | Example | Prime | PEgRNA | ngRNA | cor- | indel at | as- |
| No. | 6) | Editor | SEQ ID | SEQ ID | rected¹ | ≥1 allele² | sessed |
| 1 | Mock | NA | NA | NA | − | − | 2 |
| | 44 | T1 | 5605 | 584 | +++ | ++++ | 34 |
| 2 | Mock | NA | NA | NA | − | − | 11 |
| | 19 | T1 | 5563 | 584 | +++ | ++++ | 84 |
| 3 | Mock | NA | NA | NA | − | − | 12 |
| | 37 | T1 | 5647 | 584 | ++++ | +++ | 70 |
| | 38 | T1 | 5647 | 591 | ++ | ++ | 60 |
| | 39 | T1 | 5647 | 590 | + | ++ | 69 |
| | 82 | T1 | 19550 | 2142 | + | ++ | 64 |
| 4 | Mock | NA | NA | NA | − | − | 20 |
| | 40 | T1 | 5569 | 585 | ++ | ++ | 71 |
| | 41 | T1 | 5569 | 585 | ++++ | +++ | 69 |
| | 42 | F1 | 5569 | 585 | +++ | ++++ | 67 |
| 5 | Mock | NA | NA | NA | − | − | 12 |
| | 87 | T1 | 19543 | 888 | + | + | 91 |
| | 88 | T1 | 19543 | 2143 | ++ | +++ | 58 |
| | 89 | T1 | 19543 | 2142 | + | ++++ | 58 |
| 6 | Mock | NA | NA | NA | − | − | 8 |
| | 58 | T1 | 5605 | 584 | ++++ | ++ | 83 |
| | 59 | T1 | 5605 | 584 | +++ | ++ | 84 |
| 7 | Mock | NA | NA | NA | − | − | 79 |
| | 133 | T1 | 19537 | 880 | ++ | + | 232 |
| | 134 | T1 | 5605 | 584 | ++++ | ++++ | 337 |
| 8 | Mock | NA | NA | NA | − | − | 24 |
| | 97 | F1 | 19543 | 883 | − | + | 36 |
| | 98 | T1 | 19543 | 883 | ++++ | ++ | 35 |
| | 99 | F2 | 19543 | 883 | + | + | 34 |

¹“−” refers to 0%. “+” = 58%-79%; “++” = 79%-88%; “+++” = 88%-94%; “++++” = greater than 94%. For boarder values, each range includes the upper limit and not the lower limit. For example, 58%-79% means any value larger than 58% and no less than 79%.
²“−” refers to 0%; “+” = 0-13%; “++” = 13%-25%; “+++” = 25%-34%; “++++” = greater than 34%. For boarder values, each range includes the upper limit and not the lower limit. For example, 13%-25% means any value larger than 13% and no less than 25%.

### Example 8: In Vivo Engraftment of Prime Edited CD34⁺ Cells and Chimerism Analysis Post Engraftment

[0541] A subset of edited cells in Example 6 were cryopreserved 24 hours post electroporation and used for in vivo engraftment studies. On the day of engraftment, cells were thawed, counted, and resuspended to 5E+6 cells per mL in PBS+0.1% BSA. Cells were then injected intravenously into the tail veins of 6-week-old female NBSGW mice (Jackson Laboratory, Stock Number 026622) at 200 μL/mouse. At desired timepoints (7, 8, or 16 weeks) after engraftment, mice were euthanized, and bone marrow and spleen collected for analysis.

[0542] Firstly, samples from each mouse were assessed by flow cytometry for human chimerism to ensure that the Prime edited cells were able to successfully engraft. Chimerism was calculated as percentage of human CD45+ cells divided by the percentage of (human CD45⁺ cells+mouse CD45⁺ cells):

$$Chimerism = \frac{huCD {45}^{+}}{h u C D 4 {5}^{+} + mCD {45}^{+}}$$

[0543] Samples were also assessed for human monocytes (CD14), B cells (CD19), myeloid cells (CD33) hematopoietic stem and progenitor cells (HSPC, CD34) and erythroid (GlyA) fractions. Each engraftment group contained 4 to 5 mice. For each group, Dunnett's multiple comparison test was used to analyze chimerism in each fraction compared to mouse engrafted with the control CD34⁺ cell (“Mock”) in each group.

[0544] Mice engrafted with CD34⁺ cells edited in Sample No.s 40-42, 58, 59, 87-89, and 97-99 as described in Example 6 were examined. For each Sample No. and Mock control, 4 to 5 mice were engrafted. Bone marrow samples from each of the engrafted mice were sorted into their respective human cell fractions (CD19, CD33, CD34, and GlyA) (BD Aria fusion). The fractions were analyzed for chimerism and compared to Mock treatment. Dunnett's multiple comparison test was performed for the statistical analysis. 128 mice, including 30 Mocks, were analyzed. Except for 13 mice (all from one engraftment experiment), no significant was detected in engrafted mice compared to Mock controls.

[0545] The percentage of Prime Edited cells having the intended GT insertion and indels in each of the fractions are summarized in Tables 132-138 below.

[0546] The detection of the desired Prime edit in each of the isolated fractions demonstrates that the edited cells were able to engraft, and that Prime Editing can be achieved without hindering normal HSPC function.

TABLE 132
Percentage of edited cells and indels 7 weeks after engraftment. The first
column indicates the sample number of the CD34+ cells edited as described in Example 6.
Sample No.s 40-42 were edited with PEgRNA having the sequence of SEQ ID No. 5569 and
ngRNA having the sequence of SEQ ID No. 585.

| | | % Indels¹ | | | | | % Editing² | | | | |
|---|---|---|---|---|---|---|---|---|---|---|---|
| Sample | | Bulk | | | | | Bulk | | | | |
| No. | Mouse # | BM | CD34 | CD33 | CD19 | Erythroid | BM | CD34 | CD33 | CD19 | Erythroid |
| Mock | 3 | NA | NA | NA | NA | NA | NA | NA | NA | NA | NA |
| | 4 | NA | NA | NA | NA | NA | NA | NA | NA | NA | NA |
| | 7 | + | + | + | + | + | − | − | − | − | − |
| | 41 | + | + | + | + | + | − | − | − | − | − |
| | 42 | + | + | + | + | + | − | − | − | − | − |
| 40 | 11 | + | + | ++ | ++ | +++ | + | + | + | ++ | + |
| | 12 | ++ | ++ | ++ | + | ++ | ++ | ++ | ++ | +++ | ++ |
| | 13 | +++ | ++++ | ++ | ++++ | ++ | + | + | ++ | + | + |
| | 14 | ++ | +++ | ++ | ++ | ++ | + | + | + | + | + |
| | 15 | ++ | ++ | ++ | + | ++ | + | + | + | ++ | + |
| 41 | 21 | ++ | + | +++ | + | +++ | ++++ | ++++ | +++ | ++++ | +++ |
| | 22 | +++ | + | +++ | +++ | ++++ | ++++ | ++++ | ++++ | +++ | ++++ |
| | 23 | ++ | +++ | +++ | ++ | ++++ | ++++ | ++++ | ++++ | ++++ | ++ |
| | 24 | +++ | ++++ | ++ | ++ | ++++ | ++++ | +++ | ++++ | ++++ | +++ |
| | 25 | ++++ | +++ | +++ | ++++ | +++ | +++ | ++++ | ++++ | +++ | +++ |
| 42 | 31 | +++ | +++ | +++ | +++ | ++++ | +++ | +++ | ++++ | +++ | + |
| | 32 | ++++ | ++++ | ++++ | ++++ | ++++ | ++ | ++ | ++++ | +++ | + |
| | 33 | +++ | +++ | +++ | ++ | +++ | ++ | ++++ | +++ | +++ | ++ |
| | 34 | +++ | ++++ | +++ | +++ | ++++ | ++ | +++ | +++ | +++ | + |
| | 35 | +++ | ++++ | ++++ | ++++ | ++++ | +++ | +++ | ++ | + | + |

¹“−” refers to 0%. “+” = 0%-7%; “++” = 7%-9%; “+++” = 9%-12%; “++++” = larger than 12%. For boarder values, each range includes the upper limit and not the lower limit. For example, 7%-9% means any value larger than 7% and no less than 9%. “NA” indicates sample not taken.
²“−” refers to less than 2%; “+” = 2-34%; “++” = 34%-37%; “+++” = 37%-41%; “++++” = larger than 41%. For boarder values, each range includes the upper limit and not the lower limit. For example, 34%-37% means any value larger than 34% and no less than 37%. “NA” indicates sample not taken.

TABLE 133
Percentage of edited cells and indels 16 weeks after engraftment. The first
column indicates the sample number of the CD34+ cells edited as described in Example 6.
Sample No.s 40-42 were edited with PEgRNA having the sequence of SEQ ID No. 5569 and
ngRNA having the sequence of SEQ ID No. 585.

| | | % Indels¹ | | | | | | % Editing² | | | | | |
|---|---|---|---|---|---|---|---|---|---|---|---|---|---|
| Sample | Mouse | Bulk | Bulk | | | | | Bulk | Bulk | | | | |
| No. | # | BM | Spleen | CD19 | CD33 | CD34 | Erythroid | BM | Spleen | CD19 | CD33 | CD34 | Erythroid |
| Mock | 5 | + | + | + | + | + | + | − | − | − | − | − | − |
| | 6 | + | + | NA | NA | NA | NA | − | − | NA | NA | NA | NA |
| | 8 | + | + | + | + | + | + | − | − | − | − | − | − |
| | 9 | + | + | NA | NA | NA | NA | − | − | NA | NA | NA | NA |
| | 10 | + | + | NA | NA | NA | NA | − | − | NA | NA | NA | NA |
| 40 | 16 | + | ++ | + | ++ | + | + | + | + | + | +++ | ++ | + |
| | 17 | ++ | +++ | ++ | ++ | ++ | ++ | + | + | + | ++ | ++ | + |
| | 18 | ++ | ++ | ++ | ++ | ++ | + | + | + | + | ++ | + | ++ |
| | 19 | +++ | + | ++ | +++ | +++ | ++ | + | + | ++ | + | + | + |
| | 20 | + | ++ | + | ++ | + | ++ | + | + | + | ++ | + | + |
| 41 | 26 | ++ | ++++ | ++ | ++ | +++ | ++++ | +++ | ++++ | ++++ | ++++ | ++++ | ++++ |
| | 27 | ++++ | ++++ | ++++ | ++++ | ++++ | ++++ | ++ | ++++ | +++ | ++++ | +++ | ++ |
| | 28 | ++++ | ++ | +++ | +++ | ++++ | ++++ | ++++ | ++++ | ++++ | ++++ | ++++ | ++++ |
| | 29 | ++++ | ++ | ++ | ++++ | +++ | ++ | +++ | ++++ | ++++ | ++++ | ++++ | ++++ |
| | 30 | ++++ | ++++ | ++++ | ++++ | ++++ | ++++ | ++++ | ++++ | ++++ | ++++ | ++++ | ++++ |
| 42 | 36 | ++++ | ++++ | ++++ | ++++ | +++ | ++++ | +++ | +++ | +++ | +++ | ++++ | +++ |
| | 37 | ++++ | ++++ | ++++ | ++++ | ++++ | ++++ | + | +++ | ++ | ++ | ++ | ++ |
| | 38 | ++ | ++++ | ++ | ++ | +++ | +++ | ++ | ++ | +++ | ++++ | ++ | +++ |
| | 39 | ++++ | ++++ | ++++ | +++ | ++++ | ++ | + | +++ | +++ | ++ | ++ | +++ |
| | 40 | ++ | ++ | ++ | ++++ | ++ | ++ | ++ | ++ | ++++ | +++ | +++ | ++ |

¹“−” refers to 0%. “+” = 0%-4%; “++” = 4%-6%; “+++” = 6%-7%; “++++” = larger than 7%. For boarder values, each range includes the upper limit and not the lower limit. For example, 6%-7% means any value larger than 6% and no less than 7%. “NA” indicates sample not taken.
²“−” refers to less than 9%; “+” = 9-26%; “++” = 26%-31%; “+++” = 31%-33%; “++++” = larger than 33%. For boarder values, each range includes the upper limit and not the lower limit. For example, 31%-33% means any value larger than 31% and no less than 33%. “NA” indicates sample not taken.

TABLE 134
Percentage of edited cells and indels 8 weeks after engraftment. The first
column indicates the sample number of the CD34+ cells edited as described in Example 6. Cells
in sample No. 87 were edited with PEgRNA having the sequence of SEQ ID No. 19543 and
ngRNA having the sequence of SEQ ID No. 888. Cells in sample No. 88 were edited with
PERNA having the sequence of SEQ ID No. 19543 and ngRNA having the sequence of SEQ
ID No. 2143. Cells in sample No. 89 were edited with PEgRNA having the sequence of SEQ ID
No. 19543 and ngRNA having the sequence of SEQ ID No. 2142.

| | | % Indels¹ | | | | | | % Editing² | | | | | |
|---|---|---|---|---|---|---|---|---|---|---|---|---|---|
| Sample | Mouse | Bulk | Bulk | | | | | Bulk | Bulk | | | | |
| No. | # | BM | Spleen | CD19 | CD33 | CD34 | Erythroid | BM | Spleen | CD19 | CD33 | CD34 | Erythroid |
| Mock | 48 | + | + | + | + | + | + | − | − | − | − | − | − |
| | 49 | + | + | NA | NA | NA | NA | − | − | NA | NA | NA | NA |
| | 50 | + | + | + | + | + | + | − | − | − | − | − | − |
| | 51 | + | + | NA | NA | NA | NA | − | − | NA | NA | NA | NA |
| | 52 | + | + | + | + | + | + | − | − | − | − | − | − |
| 87 | 60 | ++ | ++ | + | ++ | ++ | ++ | + | + | + | + | + | ++ |
| | 61 | ++ | ++ | ++ | ++ | ++ | ++ | + | + | + | + | + | + |
| | 62 | ++ | ++ | + | ++ | ++ | ++ | + | + | + | + | + | + |
| | 63 | ++ | + | ++ | +++ | ++ | ++ | + | + | + | + | + | + |
| 88 | 70 | ++++ | +++ | +++ | ++++ | ++++ | ++++ | +++ | +++ | ++++ | ++++ | ++++ | ++++ |
| | 71 | ++++ | ++++ | +++ | ++++ | ++++ | ++++ | ++++ | +++ | +++ | ++++ | ++++ | ++++ |
| | 72 | ++++ | ++++ | +++ | ++++ | ++++ | ++++ | +++ | ++++ | +++ | ++++ | ++++ | +++ |
| | 73 | +++ | ++++ | ++++ | ++++ | +++ | ++++ | +++ | +++ | +++ | ++++ | +++ | ++++ |
| | 74 | ++++ | ++++ | ++++ | ++++ | ++++ | ++++ | ++++ | ++++ | +++ | ++++ | ++++ | ++++ |
| 89 | 80 | +++ | +++ | +++ | +++ | +++ | +++ | ++ | ++ | ++ | ++ | ++ | +++ |
| | 81 | +++ | +++ | ++ | +++ | +++ | +++ | +++ | ++ | +++ | +++ | +++ | +++ |
| | 82 | +++ | +++ | +++ | +++ | +++ | +++ | +++ | +++ | ++ | ++ | +++ | ++ |
| | 83 | ++++ | +++ | +++ | +++ | +++ | +++ | ++ | ++ | ++ | ++ | ++ | ++ |

¹“−” refers to 0%. “+” = 0%-1%; “++” = 1%-2%; “+++” = 2%-4%; “++++” = larger than 4%. For boarder values, each range includes the upper limit and not the lower limit. For example, 1%-2% means any value larger than 1% and no less than 2%. “NA” indicates sample not taken.
²“−” refers to less than 1%; “+” = 1-15%; “++” = 15%-21%; “+++” = 21%-38%; “++++” = larger than 38%. For boarder values, each range includes the upper limit and not the lower limit. For example, 15%-21% means any value larger than 15% and no less than 21%. “NA” indicates sample not taken.

TABLE 135
Percentage of edited cells and indels 16 weeks after engraftment. The
first column indicates the sample number of the CD34+ cells edited as described in Example 6.
Cells in sample No. 87 were edited with PERNA having the sequence of SEQ ID No. 19543
and ngRNA having the sequence of SEQ ID No. 888. Cells in sample No. 88 were edited with
PERNA having the sequence of SEQ ID No. 19543 and ngRNA having the sequence of SEQ
ID No. 2143. Cells in sample No. 89 were edited with PEgRNA having the sequence of SEQ ID
No. 19543 and ngRNA having the sequence of SEQ ID No. 2142.

| | | %Indels¹ | | | | | | % Editing² | | | | | |
|---|---|---|---|---|---|---|---|---|---|---|---|---|---|
| Sample | Mouse | Bulk | Bulk | | | | | Bulk | Bulk | | | | |
| No. | # | BM | Spleen | CD19 | CD33 | CD34 | Erythroid | BM | Spleen | CD19 | CD33 | CD34 | Erythroid |
| Mock | 43 | + | + | + | + | + | + | − | − | − | − | − | − |
| | 44 | + | + | + | + | + | + | − | − | − | − | − | − |
| | 45 | + | + | + | + | + | NA | − | − | − | − | − | NA |
| | 46 | + | + | NA | NA | NA | NA | − | − | NA | NA | NA | NA |
| | 47 | + | + | + | + | + | + | − | − | − | − | − | − |
| 87 | 55 | + | + | + | + | ++ | ++ | + | + | + | + | ++ | ++ |
| | 56 | + | + | + | + | + | + | + | ++ | + | + | + | + |
| | 57 | ++ | ++ | + | ++ | ++ | NA | + | + | + | ++ | ++ | NA |
| | 58 | + | ++ | + | ++ | + | + | + | + | ++ | ++ | + | ++ |
| | 59 | + | NA | ++ | ++ | + | + | + | NA | ++ | ++ | + | ++ |
| 88 | 65 | ++++ | ++++ | ++++ | ++++ | ++++ | ++++ | ++++ | ++++ | ++++ | ++++ | ++++ | ++++ |
| | 66 | ++++ | ++++ | +++ | ++++ | ++++ | NA | ++++ | ++++ | ++++ | ++++ | ++++ | NA |
| | 67 | ++++ | ++++ | ++++ | ++++ | ++++ | ++++ | +++ | ++++ | +++ | +++ | +++ | +++ |
| | 68 | ++++ | ++++ | ++++ | ++++ | ++++ | ++++ | ++++ | ++++ | ++++ | ++++ | ++++ | ++++ |
| | 69 | ++++ | ++++ | ++++ | ++++ | ++++ | +++ | +++ | ++++ | +++ | ++++ | ++++ | ++++ |
| 89 | 75 | +++ | +++ | +++ | +++ | +++ | ++ | ++ | +++ | ++ | +++ | ++ | +++ |
| | 76 | +++ | +++ | ++ | +++ | +++ | ++ | ++ | +++ | ++ | ++ | ++ | +++ |
| | 77 | +++ | ++ | +++ | +++ | +++ | +++ | +++ | +++ | +++ | +++ | ++ | +++ |
| | 78 | ++++ | +++ | +++ | +++ | +++ | +++ | + | ++ | +++ | +++ | +++ | +++ |
| | 79 | +++ | +++ | ++++ | +++ | +++ | ++ | +++ | +++ | ++ | +++ | +++ | +++ |

¹“−” refers to 0%. “+” = 0%-1%; “++” = 1%-2%; “+++” = 2%-4%; “++++” = larger than 4%. For boarder values, each range includes the upper limit and not the lower limit. For example, 1%-2% means any value larger than 1% and no less than 2%. “NA” indicates sample not taken or unsuccessful sequencing.
²“−” refers to less than 1%; “+” = 1-9%; “++” = 9%-14%; “+++” = 14%-32%; “++++” = larger than 32%. For boarder values, each range includes the upper limit and not the lower limit. For example, 14%-32% means any value larger than 14% and no less than 32%. “NA” indicates sample not taken or unsuccessful sequencing.

TABLE 136
Percentage of edited cells and indels 8 weeks after engraftment. The first
column indicates the sample number of the CD34+ cells edited as described in Example 6.
Samples 58 and 59 were edited with PEgRNA having the sequence of SEQ ID No. 5605 and
ngRNA having the sequence of SEQ ID No. 584

| | | % Indels¹ | | | | | | % Editing² | | | | | |
|---|---|---|---|---|---|---|---|---|---|---|---|---|---|
| Sample | Mouse | Bulk | Bulk | | | | | Bulk | Bulk | | | | |
| No. | # | BM | Spleen | CD19 | CD33 | CD34 | Erythroid | BM | Spleen | CD19 | CD33 | CD34 | Erythroid |
| Mock | 85 | + | + | NA | NA | NA | NA | − | − | NA | NA | NA | NA |
| | 86 | + | + | NA | NA | NA | NA | − | − | NA | NA | NA | NA |
| | 87 | + | + | NA | NA | NA | NA | − | − | NA | NA | NA | NA |
| | 88 | + | + | + | + | + | + | − | − | − | − | − | − |
| | 89 | + | + | + | + | + | + | − | − | − | − | − | − |
| 58 | 95 | ++++ | +++ | ++++ | ++++ | ++++ | ++ | ++++ | ++++ | +++ | ++++ | +++ | ++++ |
| | 96 | ++ | ++ | ++ | +++ | +++ | ++++ | ++++ | ++++ | ++++ | ++++ | ++++ | ++++ |
| | 97 | +++ | +++ | +++ | ++ | +++ | ++++ | ++++ | ++++ | ++++ | ++++ | ++++ | +++ |
| | 98 | +++ | +++ | ++ | +++ | +++ | ++ | ++++ | +++ | ++++ | ++++ | ++++ | ++++ |
| | 99 | +++ | ++++ | ++ | +++ | +++ | +++ | ++++ | ++++ | ++++ | ++++ | ++++ | ++++ |
| 59 | 106 | NA | ++ | ++++ | + | ++++ | ++ | NA | +++ | ++ | ++ | ++ | ++ |
| | 107 | ++ | +++ | ++ | +++ | +++ | ++ | +++ | ++ | ++ | +++ | ++ | +++ |
| | 108 | +++ | ++++ | ++ | ++ | ++ | ++ | +++ | ++ | +++ | +++ | ++++ | ++++ |
| | 109 | ++ | ++ | ++ | +++ | ++++ | ++++ | +++ | +++ | ++++ | ++ | ++ | ++ |
| | 110 | ++++ | NA | ++ | +++ | +++ | ++++ | +++ | NA | +++ | ++ | ++ | ++ |

¹“−” refers to 0%. “+” = 0%-7%; “++” = 7%-9%; “+++” = 9%-11%; “++++” = larger than 11%. For boarder values, each range includes the upper limit and not the lower limit. For example, 7%-9% means any value larger than 7% and no less than 9%. “NA” indicates sample not taken or unsuccessful sequencing.
²“−” refers to less than 6%; “+” = 6-19%; “++” = 19%-44%; “+++” = 44%-51%; “++++” = larger than 51%. For boarder values, each range includes the upper limit and not the lower limit. For example, 19%-44% means any value larger than 19% and no less than 44%. “NA” indicates sample not taken or unsuccessful sequencing.

TABLE 137
Percentage of edited cells and indels 16 weeks after engraftment. The
first column indicates the sample number of the CD34+ cells edited as described in Example 6.
Samples 58 and 59 were edited with PEgRNA having the sequence of SEQ ID No. 5605 and
ngRNA having the sequence of SEQ ID No. 584.

| | | % Indels¹ | | | | | | % Editing² | | | | | |
|---|---|---|---|---|---|---|---|---|---|---|---|---|---|
| Sample | Mouse | Bulk | Bulk | | | | | Bulk | Bulk | | | | |
| No. | # | BM | Spleen | CD19 | CD33 | CD34 | Erythroid | BM | Spleen | CD19 | CD33 | CD34 | Erythroid |
| Mock | 90 | + | + | NA | NA | NA | NA | − | − | NA | NA | NA | NA |
| | 91 | + | + | NA | NA | NA | NA | − | − | NA | NA | NA | NA |
| | 92 | + | + | NA | NA | NA | NA | − | − | NA | NA | NA | NA |
| | 93 | + | + | NA | NA | NA | NA | − | − | NA | NA | NA | NA |
| | 94 | + | + | NA | NA | NA | NA | − | − | NA | NA | NA | NA |
| 58 | 101 | +++ | ++ | ++++ | ++++ | +++ | +++ | ++ | ++++ | + | ++ | + | ++++ |
| | 102 | +++ | +++ | ++++ | ++++ | ++++ | ++++ | ++++ | +++ | ++++ | +++ | ++++ | ++ |
| | 103 | ++++ | +++ | ++++ | ++++ | ++++ | ++++ | +++ | +++ | ++ | ++ | +++ | ++ |
| | 104 | ++ | +++ | +++ | +++ | + | +++ | ++++ | ++++ | ++++ | ++++ | ++++ | ++++ |
| | 105 | ++ | +++ | ++ | ++ | + | +++ | +++ | ++++ | ++++ | +++ | ++ | ++ |
| 59 | 100 | +++ | + | + | +++ | + | ++ | + | ++ | +++ | ++ | + | + |
| | 111 | ++++ | ++ | +++ | +++ | ++ | ++++ | + | ++ | ++ | + | + | + |
| | 112 | + | +++ | ++ | +++ | ++ | +++ | ++ | ++ | + | + | + | + |
| | 113 | ++++ | ++ | ++ | +++ | ++++ | +++ | +++ | +++ | ++++ | ++++ | +++ | +++ |
| | 114 | +++ | ++ | +++ | ++ | + | ++ | + | +++ | + | ++ | + | + |

¹“−” refers to 0%. “+” = 0%-5%; “++” = 5%-6%; “+++” = 6%-8%; “++++” = larger than 8%. For boarder values, each range includes the upper limit and not the lower limit. For example, 5%-6% means any value larger than 5% and no less than 6%. “NA” indicates sample not taken.
²“−” refers to less than 1%; “+” = 1-39%; “++” = 39%-42%; “+++” = 42%-45%; “++++” = larger than 45%. For boarder values, each range includes the upper limit and not the lower limit. For example, 42%-45% means any value larger than 42% and no less than 45%. “NA” indicates sample not taken.

TABLE 138
Percentage of edited cells and indels 8 weeks after engraftment. The first
column indicates the sample number of the CD34+ cells edited as described in Example 6.
Samples 97-99 were edited with PEgRNA having the sequence of SEQ ID No. 19543 and
ngRNA having the sequence of SEQ ID No. 883.

| Sample | Mouse | % Indels¹ | | | | | | % Editing² | | | | | |
|---|---|---|---|---|---|---|---|---|---|---|---|---|---|
| No. | # | Spleen | BM | CD19 | CD33 | CD34 | GlyA | Spleen | BM | GlyA | CD33 | CD19 | CD34 |
| Mock | 145 | + | NA | NA | NA | NA | ++++ | − | − | NA | NA | NA | NA |
| | 146 | + | NA | NA | NA | NA | ++++ | − | − | NA | NA | NA | NA |
| | 147 | + | NA | NA | NA | NA | ++++ | − | − | NA | NA | NA | NA |
| | 148 | + | NA | NA | NA | NA | ++++ | − | − | NA | NA | NA | NA |
| | 149 | + | NA | NA | NA | NA | ++++ | − | − | NA | NA | NA | NA |
| 97 | 165 | ++ | ++ | + | ++ | ++ | + | +++ | +++ | +++ | ++ | ++ | +++ |
| | 166 | ++ | ++ | ++ | ++ | ++ | ++ | +++ | ++ | ++ | +++ | +++ | +++ |
| | 167 | ++ | ++ | ++ | +++ | +++ | ++ | +++ | +++ | +++ | +++ | +++ | +++ |
| | 168 | ++ | ++ | ++ | ++ | +++ | ++ | +++ | +++ | +++ | ++ | +++ | +++ |
| | 169 | ++ | ++ | ++ | ++ | + | ++ | +++ | +++ | +++ | ++ | +++ | ++ |
| 98 | 175 | ++ | +++ | +++ | ++ | +++ | ++ | ++++ | ++++ | ++++ | ++++ | ++++ | ++++ |
| | 176 | ++ | +++ | +++ | +++ | +++ | ++ | ++++ | ++++ | ++++ | ++++ | ++++ | ++++ |
| | 177 | ++ | ++ | ++ | ++ | + | ++ | ++++ | ++++ | ++++ | ++++ | ++++ | ++++ |
| | 178 | +++ | +++ | +++ | +++ | +++ | ++ | ++++ | ++++ | ++++ | ++++ | ++++ | ++++ |
| | 179 | ++ | ++ | ++ | ++ | ++ | +++ | ++++ | +++ | ++++ | ++++ | ++++ | ++++ |
| 99 | 185 | ++ | + | + | ++ | + | + | + | + | + | + | + | + |
| | 186 | ++ | + | + | + | + | + | + | + | + | + | + | + |
| | 187 | + | ++ | ++ | ++ | ++ | + | + | + | + | + | + | + |
| | 188 | ++ | ++ | ++ | ++ | ++ | ++ | + | + | + | + | + | + |
| | 189 | + | + | + | ++ | + | + | + | + | + | + | + | + |

¹“−” refers to 0%. “+” = 0%-1%; “++” = 1%-2%; “+++” = 2%-6%; “++++” = larger than 6%. For boarder values, each range includes the upper limit and not the lower limit. For example, 1%-2% means any value larger than 1% and no less than 2%. “NA” indicates sample not taken.
²“−” refers to less than 1%; “+” = 1-35%; “++” = 35%-44%; “+++” = 44%-52%; “++++” = larger than 52%. For boarder values, each range includes the upper limit and not the lower limit. For example, 44%-52% means any value larger than 44% and no less than 52%. “NA” indicates sample not taken.

[0547] Clonal analysis was also performed with bone marrow collected from mice engrafted as shown in Tables 132-137 above. After Bone marrow was collected and the percentage of CD34⁺ cells was determined by flow cytometry. After plating on methocult (Stem Cell Technologies, H4435) and incubating 14 days, DNA was extracted for sequencing analysis. For bone marrow collected from mice engrafted with all samples, most showed about 50% or more clones having the correct edit, with indel frequency between 7%-30%. The percentage of clones carrying desired edit indicate that the prime editing efficiency reflects editing throughout the population of cells.

### Example 9: Clonal Assessment for Detection of Large Deletions Between NCF1 and its Pseudogenes

[0548] Because the NCF1 gene is flanked by two pseudogenes that have highly similar sequences as NCF1 (>99% sequence identity), genome editing of NCF1, NCF1B, and/or NCF1C may result in large deletion events of the regions between NCF1 and NCF1B, between NCF1 and NCF1C, or the entire region between NCF1B and NCF1C. As shown in FIG. 4A, deletion event between NCF1B and NCF1, between NCF1 and NCF1C, and between NCF1B and NCF1C would result in about 1.5 Mb, about 0.4 Mb, and about 2 Mb of deletion, respectively.

[0549] To assess any large scale deletion or alteration of sequences between of sequences between NCF1 and NCF1B/NCF1C pseudogenes that may result from contacting the cells with Prime Editing reagents, edited CD34⁺ cells of sample No.s 133-134, 40-42, and 87-89 as described in Example 6 were examined. Following electroporation, cells were plated in methocult at 500 cells per well and incubated for 14 days for clones to grow. Following incubation, clones were picked into 15 μL of Quick extract buffer to extract genomic DNA. Digital droplet PCR (ddPCR) was then used to analyze the genomic DNA and determine the presence of large deletions between the proposed Peg/Nick guide target sites. Two probes were designed to bind either between NCF1B and NCF1 (FAM) or NCF1 and NCF1C (HEX). A reference probe (Cy5) serves as a reference for unedited region as shown in FIG. 4B. The detected ratios of each probe were then used to determine the presence or loss of the regions and assess the deletion events post editing. In case of a deletion event, the binding sequence for FAM and/or HEX would be lost, leading to a change in ratios of FAM and/or HEX reads in comparison to Cy5 reads. The three possible outcomes are loss of region between NCF1B and NCF1 (referred to as % LD1-detected by loss of FAM), NCF1 and NCF1C (referred to as % LD2—detected by loss of HEX) and Loss of NCF1B-NCF1C (referred to as % LD1 and LD2 detected by loss of FAM and HEX).

[0550] The results are summarized in Table 139 below, where “% LD1” indicates deletion frequency between NCF1B and NCF1, “% LD2” indicates deletion frequency between NCF1 and NCF1C, and “% LD1 and LD2” indicates deletion frequency between the NCF1B-NCF1C region. The results demonstrate low to non-detectable frequency of large deletion between the genes examined. The first column refers to the Sample numbers of CD34⁺ cells used in the analysis, which were edited as described in Example 6.

TABLE 139
Analysis of large deletion events at Prime Editing site.

| | total clones | | | % LD1 |
|---|---|---|---|---|
| Sample No. | tested | % LD1 | % LD2 | and 2 |
| 133 | 66 | − | − | − |
| 134 | 126 | + | + | − |
| Mock | 8 | − | − | − |
| 40 | 78 | + | + | − |
| 41 | 78 | ++ | + | − |
| 42 | 78 | + | − | − |
| Mock | 18 | − | − | − |
| 40 | 49 | − | − | − |
| 41 | 59 | ++ | − | − |
| 42 | 41 | + | − | − |
| Mock | 9 | − | − | − |
| 87 | 52 | − | − | − |
| 88 | 32 | ++ | − | − |
| 89 | 28 | + | − | − |
| 87 | 63 | + | − | − |
| 88 | 56 | − | − | − |
| 89 | 52 | − | − | − |

% LD1, % LD2, and % LD1 and 2 are annotated as follows: “−” = 0; “+” = 0 to 5%; “++” = 5% to 7.5%. Each range includes the upper end and not the lower end. For example, 5%-7.5% means larger than 5% and no less than 7.5%.

### Example 10: Prime Editing with PEgRNAs Harboring Additional PAM Silencing Edits

[0551] CD34⁺ cells obtained from ΔGT CGD patients were electroporated and allowed for recovery is described in Example 6. Following recovery, cells from samples Mock1, 133, 134, and Mock2 (as described in Table 130, Example 6) were transferred to myeloid media and maintained in culture for 14 days, with feeds every 3-4 days, to drive differentiation from CD34+ to CD13+ neutrophils.

[0552] At day 14 of myeloid culture, cells were assessed by flow cytometry for CD13+ expression to determine successful differentiation. The cells were also assessed for p47 protein expression: the cells were permeabilized, and pre-conjugated anti-human p47 antibody were added to detect p47 protein. p47 protein expression level was then assessed by flow cytometry.

[0553] Restoration of NADPH complex functionality was also assessed via two independent methods:

[0554] Reduction of Nitroblue-Tetrazolium (NBT) to insoluble formazan: Following 14-days of culture in methocult, a solution containing NBT and Phorbol 12-myristate 13-acetate (PMA, to active ROS release from functioning cells) was added to cell culture. Reduction of NBT results in formazan, a dark blue compound. The reduction requires a properly functional NADPH complex. The NBT test was thus used to assess restored NADPH complex function in the myeloid cells. Percentage of cultured cells exhibiting NBT reduction as indicated by formazan was calculated to indicate restoration of NADPH function.

[0555] Dihydrorhodamine (DHR) Oxidation test: Oxidation of DHR results in a fluorescent compound, rhodamine 123. This oxidation also requires a functional NADPH complex containing the p47 protein. Oxidation rate of DHR in the myeloid cells were assessed by flow cytometry and used to determine restoration of NADPH function.

[0556] Mock treated (electroporation only, no correction) patient cells, Prime Edited patient cells and Healthy donor cells were all assessed. Results from the p47 protein expression and cell functionality analysis are summarized in Table 140. The results demonstrate that Prime Edited CD34⁺ cells are able to successfully differentiate, and that Prime Editing can restore expression of p47 protein as well as functionality of NADPH complex in patient derived cells.

TABLE 140

| | | | | | p47 |
|---|---|---|---|---|---|
| | | % NBT | | % DHR | expression |
| Sample | Cell | reduction | | oxidation | (% positive |
| No. | Genotype | observed ¹ | CD13+ cells² | observed³ | by flow)⁴ |
| Mock1 | ΔGT patient | − | ++++ | − | − |
| 133 | ΔGT patient | + | ++++ | ++++ | ++ |
| 134 | ΔGT patient | +++ | ++++ | NA | ++++ |
| Mock2 | Healthy | +++ | ++++ | +++ | +++ |
| | donor | | | | |

¹ “−”: less than 5%; “+”: 5%-15%; “++”: 15%-25%; “+++”: 25%-35%; “++++”: larger than 35%.
²“+”: 5%-25%; “++”: 25%-50%; “+++”: 50%-75%; “++++”: larger than 75%.
³“−”: less than 2%; “+”: 2%-25%; “++”: 25%-50%; “+++”: 50%-75%; “++++”: larger than 75%.
⁴“−”: less than 1%; “+”: 1%-15%; “++”: 15%-25%; “+++”: 25%-35%; “++++”: larger than 35%.
All ranges in 1-4 above include the upper end and not the lower end. For example, 5%-7.5% means larger than 5% and no less than 7.5%.

### Example 11: Restoration of p47 Protein Expression in ΔGT CGD Patient and Non-ΔGT CGD Patient Derived Lymphoblastoid Cell Lines (LCLs)

[0557] LCLs derived from a healthy donor, a ΔGT CGD patient, and a CGD patient that has a disease associated mutation in NCF1 other than ΔGT (a non-ΔGT CGD patient) were contacted with a mRNA encoding a Prime Editor fusion protein, the PEgRNA having the sequence of SEQ ID NO. 5634 and the ngRNA having the sequence of SEQ ID NO. 595. Particularly, the LCLs were electroporated in the same way for CD34⁺ cells as described in Example 6, with the exception that Protector RNAse inhibitor (Sigma) was added to each cartridge at 1:50 volumetric ratio prior to electroporation. 72 hours post electroporation, cells were analyzed by flow cytometry for p47 protein expression as described in Example 10. Editing efficiency of NCF1 gene and/or NCF1B/NCF1C pseudogenes in healthy (or non-ΔGT CGD patient) derived cells were calculated in the same way as for CD34⁺ cells derived from healthy donors, and editing ΔGT CGD patient derived cells were calculated in the same way as for CD34⁺ cells from ΔGT CGD patient as described in Example 6. The results are summarized in Table 141 below. Successful editing and restoration of p47 expression by Prime Editing was observed. In addition, in cells derived from the non-ΔGT patient, the NCF1 gene contains a disease associated mutation that is different from the c.73_74 delGT deletion, thus correction of the delGT mutation in NCF1 would not effectively restore expression of p47. The results observed in cells derived from the non-ΔGT patient therefore demonstrate successful editing of NCF1B and/or NCF1C pseudogene, and that prime editing of NCF1B/NCF1C can restore expression of p47.

TABLE 141
Restoration of p47 expression in LCL cells.

| | PEgRNA | | | p47 |
|---|---|---|---|---|
| | SEQ | | | expression |
| Cell | ID/ngRNA | | | (% positive |
| Genotype | SEQ ID | % indel ¹ | % correction ² | by flow)³ |
| Healthy donor | Mock | + | − | +++ |
| Healthy donor | 5634/595 | + | +++ | ++++ |
| non-dGT | Mock | + | − | + |
| patient | | | | |
| non-dGT | 5634/595 | ++ | +++ | +++ |
| patient | | | | |
| dGT patient | Mock | + | − | − |
| dGT patient | 5634/595 | ++++ | +++ | ++ |

¹ “−”: 0; “+”: 0%-2%; “++”: 2%-4%; “+++”: 4%-6%; “++++”: larger than 6%.
² “−”: less than 1%; “+”: 1%-5%; “++”: 5%-10%; “+++”: 10%-20%; “++++”: larger than 20%.
³“−”: less than 1%; “+”: 1%-20%; “++”: 20%-40%; “+++”: 40%-60%; “++++”: larger than 60%.
All ranges in 1-4 above include the upper end and not the lower end. For example, 1%-2% means larger than 1% and no less than 2%.

LENGTHY TABLES
The patent application contains a lengthy table section. A copy of the table is available in electronic form from the USPTO web site (https://seqdata.uspto.gov/?pageRequest=docDetail&DocID=US20240011007A1). An electronic copy of the table will also be available from the USPTO upon request and payment of the fee set forth in 37 CFR 1.19(b)(3).

What is claimed is:

1. A prime editing guide RNA (PEgRNA) comprising:
a. a spacer comprising at its 3′ end SEQ ID NO: 19077;
b. a gRNA core capable of binding to a Cas9 protein, and
c. an extension arm comprising:
i. an editing template comprising at its 3′ end any one of SEQ ID NOs: 19100-19103, and
ii. a primer binding site (PBS) comprising at its 5′ end a sequence that is a reverse complement of nucleotides 11-13 of SEQ ID NO: 19077.

2. The PEgRNA of claim 1, wherein the spacer comprises at is 3′ end SEQ ID NO: 19081.

3. The PEgRNA of claim 2, wherein the spacer is 20 nucleotides in length.

4. The PEgRNA of claim 1, wherein the spacer, the gRNA core, and PBS form a contiguous sequence in a single molecule.

5. The PEgRNA of claim 1, wherein the editing template comprises at its 3′ end SEQ ID NO: 19103.

6. The PEgRNA of claim 1, wherein the editing template is at least 13 nucleotides in length and comprises at its 3′ end the sequence corresponding to SEQ ID NO: 19112, 19113, 19114, or 19115.

7. The PEgRNA of claim 6, wherein the editing template comprises at its 3′ end SEQ ID NO: 19112.

8. The PEgRNA of claim 1, wherein the editing template is at least 17 nucleotides in length and comprises at its 3′ end the sequence corresponding to any one of SEQ ID NOs: 19128, 19129, 19230, or 19131.

9. The PEgRNA of claim 8, wherein the editing template comprises at its 3′ end the sequence corresponding to SEQ ID NO: 19129.

10. The PEgRNA of claim 1, wherein the editing template is 13-17 nucleotide in length and comprises any one of SEQ ID NOs:19112, 19116, 19123, 19126, 19129, 19115, 19114, 19118, 19119, 19117, 19122, 19121, 19120, 19127, 19124, 19125, 19131, 19130, or 19128.

11. The PEgRNA of claim 2, wherein the PBS comprises at its 5′ end a sequence that is a reverse complement of nucleotides 6-13, 5-13, 4-13, 3-13, 2-13, or 1-13 of SEQ ID NO. 19077.

12. The PEgRNA of claim 1, wherein the PBS is 8-14 nucleotides in length.

13. The PEgRNA of claim 1, wherein the PBS comprises SEQ ID NO: 19093.

14. The PEgRNA of claim 1, comprising the sequence of any one of SEQ ID NOs: 19481, 19482, 19483, 19484, 19486, 19485, 19488, 19490, 19489, 19487, 19493, 19491, 19492, 19495, 19499, 19498, 19502, 19500, 19496, 19501, 19494, 19497, 19503, 19509, 19506, 19507, 19505, 19510, 19504, 19508, 19514, 19519, 19517, 19518, 19511, 19515, 19513, 19516, 19512, 19523, 19527, 19522, 19526, 19525, 19520, 19521, 19524, 19534, 19532, 19530, 19536, 19531, 19529, 19528, 19537, 19533, 19535, 19538, 19541, 19543, 19544, 19542, 19540, 19545, 19539, 19549, 19552, 19551, 19550, 19547, 19548, 19546, 19553, 19554, 19556, 19557, 19555, 19558, 19560, 19559, 19562, 19561, or 19563.

15. The PEgRNA of claim 1, wherein the PEgRNA comprises the sequence of SEQ ID NO: 19562 or 19543.

16. The PEgRNA of claim 1, further comprising 3′ mN*mN*mN*N and 5′mN*mN*mN* modifications, where m indicates that the nucleotide contains a 2′-O-Me modification and a * indicates the presence of a phosphorothioate bond.

17. A Prime Editing system comprising:
a. the prime editing guide RNA (PEgRNA) of claim 1, or a polynucleotide encoding the PEgRNA; and
b. a nick guide RNA (ngRNA) comprising
i. a spacer that comprises at its 3′ end nucleotides 5-20 of any one of SEQ ID NOs: 840, 830, 809, 829, 431, 460, 838, 839, 2133, 848, 806, 461, 794, 803, 19478, 2131, 2130, 796, 842, 2139, 856, 849, 833, 828, 462, 467, 810, 464, 843, 832, 801, 2134, 804, 807, 802, 19479, 2138, 800, 857, 792, 2132, 808, 2137, 2135, 19480, 835, 841, 455, 19477, or 2136, and
ii. a gRNA core capable of binding to a Cas9 protein,
or a polynucleotide encoding the ngRNA.

18. The Prime Editing system of claim 17, wherein the spacer of the ngRNA comprises at its 3′ end any one of SEQ ID NOs: 766, 767, 768, 769, 770, 404, 2129, 409, 1820, 772, 774, 407, 406, 405, 777, 790, 408, 829, 431, 460, 838, 839, 2133, 848, 806, 461, 794, 803, 19478, 2131, 2130, 796, 842, 2139, 856, 849, 833, 462, 467, 464, 843, 2134, 19479, 2138, 2132, 2137, 2135, 19480, 841, 455, 19477, 2136, 473, 472, or 479, and the editing template of the PEgRNA comprises SEQ ID NO: 19103 at its 3′ end.

19. The Prime Editing system of claim 17, wherein the spacer of the ngRNA comprises SEQ ID NO 766, 767, 768, 769, 770, 829, 839, 803, 849, or 833 at its 3′ end.

20. The Prime Editing system of claim 17, wherein the spacer of the ngRNA is 20 nucleotides in length.

21. The Prime Editing system of claim 20, wherein the spacer of the ngRNA comprises any one of SEQ ID NOs: 849, 833, or 770.

22. The Prime Editing system of claim 17, wherein the ngRNA comprises the sequence of any one of SEQ ID NOs: 2140, 19564, 877, 878, 881, 879, 880, 19565, 2141, 892, 891, 884, 883, 882, 888, 887, 889, 885, 886, 2142, 19566, 890, 2143, 895, 893, 896, 894, 899, 906, 900, 904, 2144, 903, 905, 2145, 19567, 902, 897, 901, or 898.

23. The Prime Editing system of claim 17, wherein the ngRNA consists of the sequence of any one of SEQ ID NOs: 893, 878, 901, 888, 906, or 883.

24. The Prime Editing system of claim 17, further comprising: c. a Prime Editor comprising a Cas9 nickase, or a polynucleotide encoding the Cas9 nickase, and a reverse transcriptase, or a polynucleotide encoding the reverse transcriptase.

25. A method for editing a NCF1 gene, a NCF1B pseudogene, or a NCF1C pseudogene, the method comprising contacting the NCF1 gene, the NCF1B pseudogene, or the NCF1C pseudogene with the PEgRNA of claim 1.

26. The method of claim 25, wherein the NCF1 gene, the NCF1B pseudogene, or the NCF1C pseudogene is in a hematopoietic stem cell or a hematopoietic pluripotent stem cell.

27. A cell generated by the method of claim 25.

28. A cell generated by the method of claim 26.

29. A population of cells generated by the method of claim 25.

30. A population of cells generated by the method of claim 26.

The application's sequence listing, which the Patent Office published only in electronic form, follows.

SEQUENCE LISTING (34428 sequences)

SEQ ID NO: 1 - RNA, 16 nt, synthetic construct
  source 1..16: mol_type = other RNA
accaggaacatgtacc

SEQ ID NO: 2 - RNA, 17 nt, synthetic construct
  source 1..17: mol_type = other RNA
caccaggaacatgtacc

SEQ ID NO: 3 - RNA, 18 nt, synthetic construct
  source 1..18: mol_type = other RNA
tcaccaggaacatgtacc

SEQ ID NO: 4 - RNA, 19 nt, synthetic construct
  source 1..19: mol_type = other RNA
ttcaccaggaacatgtacc

SEQ ID NO: 5 - RNA, 20 nt, synthetic construct
  source 1..20: mol_type = other RNA
tttcaccaggaacatgtacc

SEQ ID NO: 6 - RNA, 21 nt, synthetic construct
  source 1..21: mol_type = other RNA
atttcaccaggaacatgtacc

SEQ ID NO: 7 - RNA, 22 nt, synthetic construct
  source 1..22: mol_type = other RNA
catttcaccaggaacatgtacc

SEQ ID NO: 8-14 - skipped (7 entries)

SEQ ID NO: 15 - RNA, 10 nt, synthetic construct
  source 1..10: mol_type = other RNA
acatgttcct

SEQ ID NO: 16 - RNA, 11 nt, synthetic construct
  source 1..11: mol_type = other RNA
acatgttcctg

SEQ ID NO: 17 - RNA, 12 nt, synthetic construct
  source 1..12: mol_type = other RNA
acatgttcctgg

SEQ ID NO: 18 - RNA, 13 nt, synthetic construct
  source 1..13: mol_type = other RNA
acatgttcctggt

SEQ ID NO: 19 - RNA, 14 nt, synthetic construct
  source 1..14: mol_type = other RNA
acatgttcctggtg

SEQ ID NO: 20 - RNA, 15 nt, synthetic construct
  source 1..15: mol_type = other RNA
acatgttcctggtga

SEQ ID NO: 21 - RNA, 16 nt, synthetic construct
  source 1..16: mol_type = other RNA
acatgttcctggtgaa

SEQ ID NO: 22 - RNA, 17 nt, synthetic construct
  source 1..17: mol_type = other RNA
acatgttcctggtgaaa

SEQ ID NO: 23 - RNA, 18 nt, synthetic construct
  source 1..18: mol_type = other RNA
acatgttcctggtgaaat

SEQ ID NO: 24 - RNA, 19 nt, synthetic construct
  source 1..19: mol_type = other RNA
acatgttcctggtgaaatg

SEQ ID NO: 25 - RNA, 10 nt, synthetic construct
  source 1..10: mol_type = other RNA
ccccaggtct

SEQ ID NO: 26 - RNA, 10 nt, synthetic construct
  source 1..10: mol_type = other RNA
ccccaggtat

SEQ ID NO: 27 - RNA, 10 nt, synthetic construct
  source 1..10: mol_type = other RNA
ccccaggtgt

SEQ ID NO: 28 - RNA, 10 nt, synthetic construct
  source 1..10: mol_type = other RNA
ccccaggttt

SEQ ID NO: 29 - RNA, 11 nt, synthetic construct
  source 1..11: mol_type = other RNA
cccccaggtat

SEQ ID NO: 30 - RNA, 11 nt, synthetic construct
  source 1..11: mol_type = other RNA
cccccaggtct

SEQ ID NO: 31 - RNA, 11 nt, synthetic construct
  source 1..11: mol_type = other RNA
cccccaggtgt

SEQ ID NO: 32 - RNA, 11 nt, synthetic construct
  source 1..11: mol_type = other RNA
cccccaggttt

SEQ ID NO: 33 - RNA, 12 nt, synthetic construct
  source 1..12: mol_type = other RNA
tcccccaggtct

SEQ ID NO: 34 - RNA, 12 nt, synthetic construct
  source 1..12: mol_type = other RNA
tcccccaggtat

SEQ ID NO: 35 - RNA, 12 nt, synthetic construct
  source 1..12: mol_type = other RNA
tcccccaggtgt

SEQ ID NO: 36 - RNA, 12 nt, synthetic construct
  source 1..12: mol_type = other RNA
tcccccaggttt

SEQ ID NO: 37 - RNA, 13 nt, synthetic construct
  source 1..13: mol_type = other RNA
ttcccccaggttt

SEQ ID NO: 38 - RNA, 13 nt, synthetic construct
  source 1..13: mol_type = other RNA
ttcccccaggtct

SEQ ID NO: 39 - RNA, 13 nt, synthetic construct
  source 1..13: mol_type = other RNA
ttcccccaggtgt

SEQ ID NO: 40 - RNA, 13 nt, synthetic construct
  source 1..13: mol_type = other RNA
ttcccccaggtat

SEQ ID NO: 41 - RNA, 14 nt, synthetic construct
  source 1..14: mol_type = other RNA
tttcccccaggtat

SEQ ID NO: 42 - RNA, 14 nt, synthetic construct
  source 1..14: mol_type = other RNA
tttcccccaggttt

SEQ ID NO: 43 - RNA, 14 nt, synthetic construct
  source 1..14: mol_type = other RNA
tttcccccaggtgt

SEQ ID NO: 44 - RNA, 14 nt, synthetic construct
  source 1..14: mol_type = other RNA
tttcccccaggtct

SEQ ID NO: 45 - RNA, 15 nt, synthetic construct
  source 1..15: mol_type = other RNA
ctttcccccaggttt

SEQ ID NO: 46 - RNA, 15 nt, synthetic construct
  source 1..15: mol_type = other RNA
ctttcccccaggtat

SEQ ID NO: 47 - RNA, 15 nt, synthetic construct
  source 1..15: mol_type = other RNA
ctttcccccaggtgt

SEQ ID NO: 48 - RNA, 15 nt, synthetic construct
  source 1..15: mol_type = other RNA
ctttcccccaggtct

SEQ ID NO: 49 - RNA, 16 nt, synthetic construct
  source 1..16: mol_type = other RNA
gctttcccccaggtat

SEQ ID NO: 50 - RNA, 16 nt, synthetic construct
  source 1..16: mol_type = other RNA
gctttcccccaggtct

SEQ ID NO: 51 - RNA, 16 nt, synthetic construct
  source 1..16: mol_type = other RNA
gctttcccccaggtgt

SEQ ID NO: 52 - RNA, 16 nt, synthetic construct
  source 1..16: mol_type = other RNA
gctttcccccaggttt

SEQ ID NO: 53 - RNA, 17 nt, synthetic construct
  source 1..17: mol_type = other RNA
ggctttcccccaggtct

SEQ ID NO: 54 - RNA, 17 nt, synthetic construct
  source 1..17: mol_type = other RNA
ggctttcccccaggtat

SEQ ID NO: 55 - RNA, 17 nt, synthetic construct
  source 1..17: mol_type = other RNA
ggctttcccccaggttt

SEQ ID NO: 56 - RNA, 17 nt, synthetic construct
  source 1..17: mol_type = other RNA
ggctttcccccaggtgt

SEQ ID NO: 57 - RNA, 18 nt, synthetic construct
  source 1..18: mol_type = other RNA
tggctttcccccaggtct

SEQ ID NO: 58 - RNA, 18 nt, synthetic construct
  source 1..18: mol_type = other RNA
tggctttcccccaggtat

SEQ ID NO: 59 - RNA, 18 nt, synthetic construct
  source 1..18: mol_type = other RNA
tggctttcccccaggttt

SEQ ID NO: 60 - RNA, 18 nt, synthetic construct
  source 1..18: mol_type = other RNA
tggctttcccccaggtgt

SEQ ID NO: 61 - RNA, 19 nt, synthetic construct
  source 1..19: mol_type = other RNA
ctggctttcccccaggtat

SEQ ID NO: 62 - RNA, 19 nt, synthetic construct
  source 1..19: mol_type = other RNA
ctggctttcccccaggttt

SEQ ID NO: 63 - RNA, 19 nt, synthetic construct
  source 1..19: mol_type = other RNA
ctggctttcccccaggtct

SEQ ID NO: 64 - RNA, 19 nt, synthetic construct
  source 1..19: mol_type = other RNA
ctggctttcccccaggtgt

SEQ ID NO: 65 - RNA, 20 nt, synthetic construct
  source 1..20: mol_type = other RNA
tctggctttcccccaggtat

SEQ ID NO: 66 - RNA, 20 nt, synthetic construct
  source 1..20: mol_type = other RNA
tctggctttcccccaggtgt

SEQ ID NO: 67 - RNA, 20 nt, synthetic construct
  source 1..20: mol_type = other RNA
tctggctttcccccaggttt

SEQ ID NO: 68 - RNA, 20 nt, synthetic construct
  source 1..20: mol_type = other RNA
tctggctttcccccaggtct

SEQ ID NO: 69 - RNA, 21 nt, synthetic construct
  source 1..21: mol_type = other RNA
ctctggctttcccccaggttt

SEQ ID NO: 70 - RNA, 21 nt, synthetic construct
  source 1..21: mol_type = other RNA
ctctggctttcccccaggtat

SEQ ID NO: 71 - RNA, 21 nt, synthetic construct
  source 1..21: mol_type = other RNA
ctctggctttcccccaggtgt

SEQ ID NO: 72 - RNA, 21 nt, synthetic construct
  source 1..21: mol_type = other RNA
ctctggctttcccccaggtct

SEQ ID NO: 73 - RNA, 22 nt, synthetic construct
  source 1..22: mol_type = other RNA
actctggctttcccccaggtct

SEQ ID NO: 74 - RNA, 22 nt, synthetic construct
  source 1..22: mol_type = other RNA
actctggctttcccccaggttt

SEQ ID NO: 75 - RNA, 22 nt, synthetic construct
  source 1..22: mol_type = other RNA
actctggctttcccccaggtgt

SEQ ID NO: 76 - RNA, 22 nt, synthetic construct
  source 1..22: mol_type = other RNA
actctggctttcccccaggtat

SEQ ID NO: 77 - RNA, 23 nt, synthetic construct
  source 1..23: mol_type = other RNA
gactctggctttcccccaggtct

SEQ ID NO: 78 - RNA, 23 nt, synthetic construct
  source 1..23: mol_type = other RNA
gactctggctttcccccaggtgt

SEQ ID NO: 79 - RNA, 23 nt, synthetic construct
  source 1..23: mol_type = other RNA
gactctggctttcccccaggttt

SEQ ID NO: 80 - RNA, 23 nt, synthetic construct
  source 1..23: mol_type = other RNA
gactctggctttcccccaggtat

SEQ ID NO: 81 - RNA, 24 nt, synthetic construct
  source 1..24: mol_type = other RNA
cgactctggctttcccccaggtat

SEQ ID NO: 82 - RNA, 24 nt, synthetic construct
  source 1..24: mol_type = other RNA
cgactctggctttcccccaggtct

SEQ ID NO: 83 - RNA, 24 nt, synthetic construct
  source 1..24: mol_type = other RNA
cgactctggctttcccccaggttt

SEQ ID NO: 84 - RNA, 24 nt, synthetic construct
  source 1..24: mol_type = other RNA
cgactctggctttcccccaggtgt

SEQ ID NO: 85 - RNA, 25 nt, synthetic construct
  source 1..25: mol_type = other RNA
ccgactctggctttcccccaggtgt

SEQ ID NO: 86 - RNA, 25 nt, synthetic construct
  source 1..25: mol_type = other RNA
ccgactctggctttcccccaggtat

SEQ ID NO: 87 - RNA, 25 nt, synthetic construct
  source 1..25: mol_type = other RNA
ccgactctggctttcccccaggttt

SEQ ID NO: 88 - RNA, 25 nt, synthetic construct
  source 1..25: mol_type = other RNA
ccgactctggctttcccccaggtct

SEQ ID NO: 89 - RNA, 26 nt, synthetic construct
  source 1..26: mol_type = other RNA
cccgactctggctttcccccaggtat

SEQ ID NO: 90 - RNA, 26 nt, synthetic construct
  source 1..26: mol_type = other RNA
cccgactctggctttcccccaggtct

SEQ ID NO: 91 - RNA, 26 nt, synthetic construct
  source 1..26: mol_type = other RNA
cccgactctggctttcccccaggtgt

SEQ ID NO: 92 - RNA, 26 nt, synthetic construct
  source 1..26: mol_type = other RNA
cccgactctggctttcccccaggttt

SEQ ID NO: 93 - RNA, 27 nt, synthetic construct
  source 1..27: mol_type = other RNA
ccccgactctggctttcccccaggtat

SEQ ID NO: 94 - RNA, 27 nt, synthetic construct
  source 1..27: mol_type = other RNA
ccccgactctggctttcccccaggtgt

SEQ ID NO: 95 - RNA, 27 nt, synthetic construct
  source 1..27: mol_type = other RNA
ccccgactctggctttcccccaggtct

SEQ ID NO: 96 - RNA, 27 nt, synthetic construct
  source 1..27: mol_type = other RNA
ccccgactctggctttcccccaggttt

SEQ ID NO: 97 - RNA, 28 nt, synthetic construct
  source 1..28: mol_type = other RNA
cccccgactctggctttcccccaggtat

SEQ ID NO: 98 - RNA, 28 nt, synthetic construct
  source 1..28: mol_type = other RNA
cccccgactctggctttcccccaggtgt

SEQ ID NO: 99 - RNA, 28 nt, synthetic construct
  source 1..28: mol_type = other RNA
cccccgactctggctttcccccaggttt

SEQ ID NO: 100 - RNA, 28 nt, synthetic construct
  source 1..28: mol_type = other RNA
cccccgactctggctttcccccaggtct

SEQ ID NO: 101 - RNA, 29 nt, synthetic construct
  source 1..29: mol_type = other RNA
tcccccgactctggctttcccccaggtat

SEQ ID NO: 102 - RNA, 29 nt, synthetic construct
  source 1..29: mol_type = other RNA
tcccccgactctggctttcccccaggtct

SEQ ID NO: 103 - RNA, 29 nt, synthetic construct
  source 1..29: mol_type = other RNA
tcccccgactctggctttcccccaggtgt

SEQ ID NO: 104 - RNA, 29 nt, synthetic construct
  source 1..29: mol_type = other RNA
tcccccgactctggctttcccccaggttt

SEQ ID NO: 105 - RNA, 30 nt, synthetic construct
  source 1..30: mol_type = other RNA
gtcccccgactctggctttcccccaggtat

SEQ ID NO: 106 - RNA, 30 nt, synthetic construct
  source 1..30: mol_type = other RNA
gtcccccgactctggctttcccccaggtct

SEQ ID NO: 107 - RNA, 30 nt, synthetic construct
  source 1..30: mol_type = other RNA
gtcccccgactctggctttcccccaggttt

SEQ ID NO: 108 - RNA, 30 nt, synthetic construct
  source 1..30: mol_type = other RNA
gtcccccgactctggctttcccccaggtgt

SEQ ID NO: 109 - RNA, 31 nt, synthetic construct
  source 1..31: mol_type = other RNA
ggtcccccgactctggctttcccccaggttt

SEQ ID NO: 110 - RNA, 31 nt, synthetic construct
  source 1..31: mol_type = other RNA
ggtcccccgactctggctttcccccaggtgt

SEQ ID NO: 111 - RNA, 31 nt, synthetic construct
  source 1..31: mol_type = other RNA
ggtcccccgactctggctttcccccaggtat

SEQ ID NO: 112 - RNA, 31 nt, synthetic construct
  source 1..31: mol_type = other RNA
ggtcccccgactctggctttcccccaggtct

SEQ ID NO: 113 - RNA, 32 nt, synthetic construct
  source 1..32: mol_type = other RNA
gggtcccccgactctggctttcccccaggtct

SEQ ID NO: 114 - RNA, 32 nt, synthetic construct
  source 1..32: mol_type = other RNA
gggtcccccgactctggctttcccccaggtgt

SEQ ID NO: 115 - RNA, 32 nt, synthetic construct
  source 1..32: mol_type = other RNA
gggtcccccgactctggctttcccccaggtat

SEQ ID NO: 116 - RNA, 32 nt, synthetic construct
  source 1..32: mol_type = other RNA
gggtcccccgactctggctttcccccaggttt

SEQ ID NO: 117 - RNA, 33 nt, synthetic construct
  source 1..33: mol_type = other RNA
ggggtcccccgactctggctttcccccaggttt

SEQ ID NO: 118 - RNA, 33 nt, synthetic construct
  source 1..33: mol_type = other RNA
ggggtcccccgactctggctttcccccaggtgt

SEQ ID NO: 119 - RNA, 33 nt, synthetic construct
  source 1..33: mol_type = other RNA
ggggtcccccgactctggctttcccccaggtct

SEQ ID NO: 120 - RNA, 33 nt, synthetic construct
  source 1..33: mol_type = other RNA
ggggtcccccgactctggctttcccccaggtat

SEQ ID NO: 121 - RNA, 34 nt, synthetic construct
  source 1..34: mol_type = other RNA
tggggtcccccgactctggctttcccccaggtgt

SEQ ID NO: 122 - RNA, 34 nt, synthetic construct
  source 1..34: mol_type = other RNA
tggggtcccccgactctggctttcccccaggttt

SEQ ID NO: 123 - RNA, 34 nt, synthetic construct
  source 1..34: mol_type = other RNA
tggggtcccccgactctggctttcccccaggtct

SEQ ID NO: 124 - RNA, 34 nt, synthetic construct
  source 1..34: mol_type = other RNA
tggggtcccccgactctggctttcccccaggtat

SEQ ID NO: 125 - RNA, 35 nt, synthetic construct
  source 1..35: mol_type = other RNA
atggggtcccccgactctggctttcccccaggtgt

SEQ ID NO: 126 - RNA, 35 nt, synthetic construct
  source 1..35: mol_type = other RNA
atggggtcccccgactctggctttcccccaggttt

SEQ ID NO: 127 - RNA, 35 nt, synthetic construct
  source 1..35: mol_type = other RNA
atggggtcccccgactctggctttcccccaggtat

SEQ ID NO: 128 - RNA, 35 nt, synthetic construct
  source 1..35: mol_type = other RNA
atggggtcccccgactctggctttcccccaggtct

SEQ ID NO: 129 - RNA, 36 nt, synthetic construct
  source 1..36: mol_type = other RNA
aatggggtcccccgactctggctttcccccaggtct

SEQ ID NO: 130 - RNA, 36 nt, synthetic construct
  source 1..36: mol_type = other RNA
aatggggtcccccgactctggctttcccccaggttt

SEQ ID NO: 131 - RNA, 36 nt, synthetic construct
  source 1..36: mol_type = other RNA
aatggggtcccccgactctggctttcccccaggtat

SEQ ID NO: 132 - RNA, 36 nt, synthetic construct
  source 1..36: mol_type = other RNA
aatggggtcccccgactctggctttcccccaggtgt

SEQ ID NO: 133 - RNA, 37 nt, synthetic construct
  source 1..37: mol_type = other RNA
gaatggggtcccccgactctggctttcccccaggtat

SEQ ID NO: 134 - RNA, 37 nt, synthetic construct
  source 1..37: mol_type = other RNA
gaatggggtcccccgactctggctttcccccaggtct

SEQ ID NO: 135 - RNA, 37 nt, synthetic construct
  source 1..37: mol_type = other RNA
gaatggggtcccccgactctggctttcccccaggtgt

SEQ ID NO: 136 - RNA, 37 nt, synthetic construct
  source 1..37: mol_type = other RNA
gaatggggtcccccgactctggctttcccccaggttt

SEQ ID NO: 137 - RNA, 38 nt, synthetic construct
  source 1..38: mol_type = other RNA
tgaatggggtcccccgactctggctttcccccaggtat

SEQ ID NO: 138 - RNA, 38 nt, synthetic construct
  source 1..38: mol_type = other RNA
tgaatggggtcccccgactctggctttcccccaggtgt

SEQ ID NO: 139 - RNA, 38 nt, synthetic construct
  source 1..38: mol_type = other RNA
tgaatggggtcccccgactctggctttcccccaggttt

SEQ ID NO: 140 - RNA, 38 nt, synthetic construct
  source 1..38: mol_type = other RNA
tgaatggggtcccccgactctggctttcccccaggtct

SEQ ID NO: 141 - RNA, 39 nt, synthetic construct
  source 1..39: mol_type = other RNA
ctgaatggggtcccccgactctggctttcccccaggttt

SEQ ID NO: 142 - RNA, 39 nt, synthetic construct
  source 1..39: mol_type = other RNA
ctgaatggggtcccccgactctggctttcccccaggtat

SEQ ID NO: 143 - RNA, 39 nt, synthetic construct
  source 1..39: mol_type = other RNA
ctgaatggggtcccccgactctggctttcccccaggtct

SEQ ID NO: 144 - RNA, 39 nt, synthetic construct
  source 1..39: mol_type = other RNA
ctgaatggggtcccccgactctggctttcccccaggtgt

SEQ ID NO: 145 - RNA, 40 nt, synthetic construct
  source 1..40: mol_type = other RNA
gctgaatggggtcccccgactctggctttcccccaggtct

SEQ ID NO: 146 - RNA, 40 nt, synthetic construct
  source 1..40: mol_type = other RNA
gctgaatggggtcccccgactctggctttcccccaggttt

SEQ ID NO: 147 - RNA, 40 nt, synthetic construct
  source 1..40: mol_type = other RNA
gctgaatggggtcccccgactctggctttcccccaggtgt

SEQ ID NO: 148 - RNA, 40 nt, synthetic construct
  source 1..40: mol_type = other RNA
gctgaatggggtcccccgactctggctttcccccaggtat

SEQ ID NO: 149 - RNA, 41 nt, synthetic construct
  source 1..41: mol_type = other RNA
ggctgaatggggtcccccgactctggctttcccccaggtct

SEQ ID NO: 150 - RNA, 41 nt, synthetic construct
  source 1..41: mol_type = other RNA
ggctgaatggggtcccccgactctggctttcccccaggtat

SEQ ID NO: 151 - RNA, 41 nt, synthetic construct
  source 1..41: mol_type = other RNA
ggctgaatggggtcccccgactctggctttcccccaggtgt

SEQ ID NO: 152 - RNA, 41 nt, synthetic construct
  source 1..41: mol_type = other RNA
ggctgaatggggtcccccgactctggctttcccccaggttt

SEQ ID NO: 153 - RNA, 42 nt, synthetic construct
  source 1..42: mol_type = other RNA
aggctgaatggggtcccccgactctggctttcccccaggtgt

SEQ ID NO: 154 - RNA, 42 nt, synthetic construct
  source 1..42: mol_type = other RNA
aggctgaatggggtcccccgactctggctttcccccaggtct

SEQ ID NO: 155 - RNA, 42 nt, synthetic construct
  source 1..42: mol_type = other RNA
aggctgaatggggtcccccgactctggctttcccccaggttt

SEQ ID NO: 156 - RNA, 42 nt, synthetic construct
  source 1..42: mol_type = other RNA
aggctgaatggggtcccccgactctggctttcccccaggtat

SEQ ID NO: 157 - RNA, 43 nt, synthetic construct
  source 1..43: mol_type = other RNA
gaggctgaatggggtcccccgactctggctttcccccaggtct

SEQ ID NO: 158 - RNA, 43 nt, synthetic construct
  source 1..43: mol_type = other RNA
gaggctgaatggggtcccccgactctggctttcccccaggttt

SEQ ID NO: 159 - RNA, 43 nt, synthetic construct
  source 1..43: mol_type = other RNA
gaggctgaatggggtcccccgactctggctttcccccaggtgt

SEQ ID NO: 160 - RNA, 43 nt, synthetic construct
  source 1..43: mol_type = other RNA
gaggctgaatggggtcccccgactctggctttcccccaggtat

SEQ ID NO: 161 - RNA, 44 nt, synthetic construct
  source 1..44: mol_type = other RNA
ggaggctgaatggggtcccccgactctggctttcccccaggtgt

SEQ ID NO: 162 - RNA, 44 nt, synthetic construct
  source 1..44: mol_type = other RNA
ggaggctgaatggggtcccccgactctggctttcccccaggttt

SEQ ID NO: 163 - RNA, 44 nt, synthetic construct
  source 1..44: mol_type = other RNA
ggaggctgaatggggtcccccgactctggctttcccccaggtct

SEQ ID NO: 164 - RNA, 44 nt, synthetic construct
  source 1..44: mol_type = other RNA
ggaggctgaatggggtcccccgactctggctttcccccaggtat

SEQ ID NO: 165 - RNA, 45 nt, synthetic construct
  source 1..45: mol_type = other RNA
tggaggctgaatggggtcccccgactctggctttcccccaggtgt

SEQ ID NO: 166 - RNA, 45 nt, synthetic construct
  source 1..45: mol_type = other RNA
tggaggctgaatggggtcccccgactctggctttcccccaggttt

SEQ ID NO: 167 - RNA, 45 nt, synthetic construct
  source 1..45: mol_type = other RNA
tggaggctgaatggggtcccccgactctggctttcccccaggtct

SEQ ID NO: 168 - RNA, 45 nt, synthetic construct
  source 1..45: mol_type = other RNA
tggaggctgaatggggtcccccgactctggctttcccccaggtat

SEQ ID NO: 169 - RNA, 46 nt, synthetic construct
  source 1..46: mol_type = other RNA
ttggaggctgaatggggtcccccgactctggctttcccccaggttt

SEQ ID NO: 170 - RNA, 46 nt, synthetic construct
  source 1..46: mol_type = other RNA
ttggaggctgaatggggtcccccgactctggctttcccccaggtat

SEQ ID NO: 171 - RNA, 46 nt, synthetic construct
  source 1..46: mol_type = other RNA
ttggaggctgaatggggtcccccgactctggctttcccccaggtct

SEQ ID NO: 172 - RNA, 46 nt, synthetic construct
  source 1..46: mol_type = other RNA
ttggaggctgaatggggtcccccgactctggctttcccccaggtgt

SEQ ID NO: 173 - RNA, 47 nt, synthetic construct
  source 1..47: mol_type = other RNA
tttggaggctgaatggggtcccccgactctggctttcccccaggtat

SEQ ID NO: 174 - RNA, 47 nt, synthetic construct
  source 1..47: mol_type = other RNA
tttggaggctgaatggggtcccccgactctggctttcccccaggtct

SEQ ID NO: 175 - RNA, 47 nt, synthetic construct
  source 1..47: mol_type = other RNA
tttggaggctgaatggggtcccccgactctggctttcccccaggtgt

SEQ ID NO: 176 - RNA, 47 nt, synthetic construct
  source 1..47: mol_type = other RNA
tttggaggctgaatggggtcccccgactctggctttcccccaggttt

SEQ ID NO: 177 - RNA, 48 nt, synthetic construct
  source 1..48: mol_type = other RNA
ctttggaggctgaatggggtcccccgactctggctttcccccaggtct

SEQ ID NO: 178 - RNA, 48 nt, synthetic construct
  source 1..48: mol_type = other RNA
ctttggaggctgaatggggtcccccgactctggctttcccccaggttt

SEQ ID NO: 179 - RNA, 48 nt, synthetic construct
  source 1..48: mol_type = other RNA
ctttggaggctgaatggggtcccccgactctggctttcccccaggtat

SEQ ID NO: 180 - RNA, 48 nt, synthetic construct
  source 1..48: mol_type = other RNA
ctttggaggctgaatggggtcccccgactctggctttcccccaggtgt

SEQ ID NO: 181 - RNA, 49 nt, synthetic construct
  source 1..49: mol_type = other RNA
tctttggaggctgaatggggtcccccgactctggctttcccccaggtat

SEQ ID NO: 182 - RNA, 49 nt, synthetic construct
  source 1..49: mol_type = other RNA
tctttggaggctgaatggggtcccccgactctggctttcccccaggtgt

SEQ ID NO: 183 - RNA, 49 nt, synthetic construct
  source 1..49: mol_type = other RNA
tctttggaggctgaatggggtcccccgactctggctttcccccaggtct

SEQ ID NO: 184 - RNA, 49 nt, synthetic construct
  source 1..49: mol_type = other RNA
tctttggaggctgaatggggtcccccgactctggctttcccccaggttt

SEQ ID NO: 185 - RNA, 50 nt, synthetic construct
  source 1..50: mol_type = other RNA
ctctttggaggctgaatggggtcccccgactctggctttcccccaggttt

SEQ ID NO: 186 - RNA, 50 nt, synthetic construct
  source 1..50: mol_type = other RNA
ctctttggaggctgaatggggtcccccgactctggctttcccccaggtct

SEQ ID NO: 187 - RNA, 50 nt, synthetic construct
  source 1..50: mol_type = other RNA
ctctttggaggctgaatggggtcccccgactctggctttcccccaggtat

SEQ ID NO: 188 - RNA, 50 nt, synthetic construct
  source 1..50: mol_type = other RNA
ctctttggaggctgaatggggtcccccgactctggctttcccccaggtgt

SEQ ID NO: 189 - RNA, 51 nt, synthetic construct
  source 1..51: mol_type = other RNA
cctctttggaggctgaatggggtcccccgactctggctttcccccaggtat

SEQ ID NO: 190 - RNA, 51 nt, synthetic construct
  source 1..51: mol_type = other RNA
cctctttggaggctgaatggggtcccccgactctggctttcccccaggtct

SEQ ID NO: 191 - RNA, 51 nt, synthetic construct
  source 1..51: mol_type = other RNA
cctctttggaggctgaatggggtcccccgactctggctttcccccaggtgt

SEQ ID NO: 192 - RNA, 51 nt, synthetic construct
  source 1..51: mol_type = other RNA
cctctttggaggctgaatggggtcccccgactctggctttcccccaggttt

SEQ ID NO: 193 - RNA, 52 nt, synthetic construct
  source 1..52: mol_type = other RNA
gcctctttggaggctgaatggggtcccccgactctggctttcccccaggttt

SEQ ID NO: 194 - RNA, 52 nt, synthetic construct
  source 1..52: mol_type = other RNA
gcctctttggaggctgaatggggtcccccgactctggctttcccccaggtct

SEQ ID NO: 195 - RNA, 52 nt, synthetic construct
  source 1..52: mol_type = other RNA
gcctctttggaggctgaatggggtcccccgactctggctttcccccaggtat

SEQ ID NO: 196 - RNA, 52 nt, synthetic construct
  source 1..52: mol_type = other RNA
gcctctttggaggctgaatggggtcccccgactctggctttcccccaggtgt

SEQ ID NO: 197 - RNA, 53 nt, synthetic construct
  source 1..53: mol_type = other RNA
agcctctttggaggctgaatggggtcccccgactctggctttcccccaggttt

SEQ ID NO: 198 - RNA, 53 nt, synthetic construct
  source 1..53: mol_type = other RNA
agcctctttggaggctgaatggggtcccccgactctggctttcccccaggtct

SEQ ID NO: 199 - RNA, 53 nt, synthetic construct
  source 1..53: mol_type = other RNA
agcctctttggaggctgaatggggtcccccgactctggctttcccccaggtat

SEQ ID NO: 200 - RNA, 53 nt, synthetic construct
  source 1..53: mol_type = other RNA
agcctctttggaggctgaatggggtcccccgactctggctttcccccaggtgt

SEQ ID NO: 201 - RNA, 54 nt, synthetic construct
  source 1..54: mol_type = other RNA
aagcctctttggaggctgaatggggtcccccgactctggctttcccccaggttt

SEQ ID NO: 202 - RNA, 54 nt, synthetic construct
  source 1..54: mol_type = other RNA
aagcctctttggaggctgaatggggtcccccgactctggctttcccccaggtgt

SEQ ID NO: 203 - RNA, 54 nt, synthetic construct
  source 1..54: mol_type = other RNA
aagcctctttggaggctgaatggggtcccccgactctggctttcccccaggtct

SEQ ID NO: 204 - RNA, 54 nt, synthetic construct
  source 1..54: mol_type = other RNA
aagcctctttggaggctgaatggggtcccccgactctggctttcccccaggtat

SEQ ID NO: 205 - RNA, 55 nt, synthetic construct
  source 1..55: mol_type = other RNA
aaagcctctttggaggctgaatggggtcccccgactctggctttcccccaggtat

SEQ ID NO: 206 - RNA, 55 nt, synthetic construct
  source 1..55: mol_type = other RNA
aaagcctctttggaggctgaatggggtcccccgactctggctttcccccaggtct

SEQ ID NO: 207 - RNA, 55 nt, synthetic construct
  source 1..55: mol_type = other RNA
aaagcctctttggaggctgaatggggtcccccgactctggctttcccccaggtgt

SEQ ID NO: 208 - RNA, 55 nt, synthetic construct
  source 1..55: mol_type = other RNA
aaagcctctttggaggctgaatggggtcccccgactctggctttcccccaggttt

SEQ ID NO: 209 - RNA, 56 nt, synthetic construct
  source 1..56: mol_type = other RNA
caaagcctctttggaggctgaatggggtcccccgactctggctttcccccaggtct

SEQ ID NO: 210 - RNA, 56 nt, synthetic construct
  source 1..56: mol_type = other RNA
caaagcctctttggaggctgaatggggtcccccgactctggctttcccccaggtat

SEQ ID NO: 211 - RNA, 56 nt, synthetic construct
  source 1..56: mol_type = other RNA
caaagcctctttggaggctgaatggggtcccccgactctggctttcccccaggttt

SEQ ID NO: 212 - RNA, 56 nt, synthetic construct
  source 1..56: mol_type = other RNA
caaagcctctttggaggctgaatggggtcccccgactctggctttcccccaggtgt

SEQ ID NO: 213 - RNA, 57 nt, synthetic construct
  source 1..57: mol_type = other RNA
gcaaagcctctttggaggctgaatggggtcccccgactctggctttcccccaggtct

SEQ ID NO: 214 - RNA, 57 nt, synthetic construct
  source 1..57: mol_type = other RNA
gcaaagcctctttggaggctgaatggggtcccccgactctggctttcccccaggttt

SEQ ID NO: 215 - RNA, 57 nt, synthetic construct
  source 1..57: mol_type = other RNA
gcaaagcctctttggaggctgaatggggtcccccgactctggctttcccccaggtgt

SEQ ID NO: 216 - RNA, 57 nt, synthetic construct
  source 1..57: mol_type = other RNA
gcaaagcctctttggaggctgaatggggtcccccgactctggctttcccccaggtat

SEQ ID NO: 217 - RNA, 58 nt, synthetic construct
  source 1..58: mol_type = other RNA
agcaaagcctctttggaggctgaatggggtcccccgactctggctttcccccaggtat

SEQ ID NO: 218 - RNA, 58 nt, synthetic construct
  source 1..58: mol_type = other RNA
agcaaagcctctttggaggctgaatggggtcccccgactctggctttcccccaggtgt

SEQ ID NO: 219 - RNA, 58 nt, synthetic construct
  source 1..58: mol_type = other RNA
agcaaagcctctttggaggctgaatggggtcccccgactctggctttcccccaggttt

SEQ ID NO: 220 - RNA, 58 nt, synthetic construct
  source 1..58: mol_type = other RNA
agcaaagcctctttggaggctgaatggggtcccccgactctggctttcccccaggtct

SEQ ID NO: 221 - RNA, 59 nt, synthetic construct
  source 1..59: mol_type = other RNA
cagcaaagcctctttggaggctgaatggggtcccccgactctggctttcccccaggtgt

SEQ ID NO: 222 - RNA, 59 nt, synthetic construct
  source 1..59: mol_type = other RNA
cagcaaagcctctttggaggctgaatggggtcccccgactctggctttcccccaggtct

SEQ ID NO: 223 - RNA, 59 nt, synthetic construct
  source 1..59: mol_type = other RNA
cagcaaagcctctttggaggctgaatggggtcccccgactctggctttcccccaggttt

SEQ ID NO: 224 - RNA, 59 nt, synthetic construct
  source 1..59: mol_type = other RNA
cagcaaagcctctttggaggctgaatggggtcccccgactctggctttcccccaggtat

SEQ ID NO: 225 - RNA, 60 nt, synthetic construct
  source 1..60: mol_type = other RNA
acagcaaagcctctttggaggctgaatggggtcccccgactctggctttcccccaggtct

SEQ ID NO: 226 - RNA, 60 nt, synthetic construct
  source 1..60: mol_type = other RNA
acagcaaagcctctttggaggctgaatggggtcccccgactctggctttcccccaggtgt

SEQ ID NO: 227 - RNA, 60 nt, synthetic construct
  source 1..60: mol_type = other RNA
acagcaaagcctctttggaggctgaatggggtcccccgactctggctttcccccaggtat

SEQ ID NO: 228 - RNA, 60 nt, synthetic construct
  source 1..60: mol_type = other RNA
acagcaaagcctctttggaggctgaatggggtcccccgactctggctttcccccaggttt

SEQ ID NO: 229 - RNA, 61 nt, synthetic construct
  source 1..61: mol_type = other RNA
cacagcaaagcctctttggaggctgaatggggtcccccgactctggctttcccccaggttt

SEQ ID NO: 230 - RNA, 61 nt, synthetic construct
  source 1..61: mol_type = other RNA
cacagcaaagcctctttggaggctgaatggggtcccccgactctggctttcccccaggtgt

SEQ ID NO: 231 - RNA, 61 nt, synthetic construct
  source 1..61: mol_type = other RNA
cacagcaaagcctctttggaggctgaatggggtcccccgactctggctttcccccaggtct

SEQ ID NO: 232 - RNA, 61 nt, synthetic construct
  source 1..61: mol_type = other RNA
cacagcaaagcctctttggaggctgaatggggtcccccgactctggctttcccccaggtat

SEQ ID NO: 233 - RNA, 62 nt, synthetic construct
  source 1..62: mol_type = other RNA
acacagcaaagcctctttggaggctgaatggggtcccccgactctggctttcccccaggtat

SEQ ID NO: 234 - RNA, 62 nt, synthetic construct
  source 1..62: mol_type = other RNA
acacagcaaagcctctttggaggctgaatggggtcccccgactctggctttcccccaggtgt

SEQ ID NO: 235 - RNA, 62 nt, synthetic construct
  source 1..62: mol_type = other RNA
acacagcaaagcctctttggaggctgaatggggtcccccgactctggctttcccccaggttt

SEQ ID NO: 236 - RNA, 62 nt, synthetic construct
  source 1..62: mol_type = other RNA
acacagcaaagcctctttggaggctgaatggggtcccccgactctggctttcccccaggtct

SEQ ID NO: 237 - RNA, 63 nt, synthetic construct
  source 1..63: mol_type = other RNA
cacacagcaaagcctctttggaggctgaatggggtcccccgactctggctttcccccaggttt

SEQ ID NO: 238 - RNA, 63 nt, synthetic construct
  source 1..63: mol_type = other RNA
cacacagcaaagcctctttggaggctgaatggggtcccccgactctggctttcccccaggtgt

SEQ ID NO: 239 - RNA, 63 nt, synthetic construct
  source 1..63: mol_type = other RNA
cacacagcaaagcctctttggaggctgaatggggtcccccgactctggctttcccccaggtat

SEQ ID NO: 240 - RNA, 63 nt, synthetic construct
  source 1..63: mol_type = other RNA
cacacagcaaagcctctttggaggctgaatggggtcccccgactctggctttcccccaggtct

SEQ ID NO: 241 - RNA, 64 nt, synthetic construct
  source 1..64: mol_type = other RNA
gcacacagcaaagcctctttggaggctgaatggggtcccccgactctggctttcccccaggtgt

SEQ ID NO: 242 - RNA, 64 nt, synthetic construct
  source 1..64: mol_type = other RNA
gcacacagcaaagcctctttggaggctgaatggggtcccccgactctggctttcccccaggttt

SEQ ID NO: 243 - RNA, 64 nt, synthetic construct
  source 1..64: mol_type = other RNA
gcacacagcaaagcctctttggaggctgaatggggtcccccgactctggctttcccccaggtct

SEQ ID NO: 244 - RNA, 64 nt, synthetic construct
  source 1..64: mol_type = other RNA
gcacacagcaaagcctctttggaggctgaatggggtcccccgactctggctttcccccaggtat

SEQ ID NO: 245 - RNA, 65 nt, synthetic construct
  source 1..65: mol_type = other RNA
tgcacacagcaaagcctctttggaggctgaatggggtcccccgactctggctttcccccaggtct

SEQ ID NO: 246 - RNA, 65 nt, synthetic construct
  source 1..65: mol_type = other RNA
tgcacacagcaaagcctctttggaggctgaatggggtcccccgactctggctttcccccaggtgt

SEQ ID NO: 247 - RNA, 65 nt, synthetic construct
  source 1..65: mol_type = other RNA
tgcacacagcaaagcctctttggaggctgaatggggtcccccgactctggctttcccccaggttt

SEQ ID NO: 248 - RNA, 65 nt, synthetic construct
  source 1..65: mol_type = other RNA
tgcacacagcaaagcctctttggaggctgaatggggtcccccgactctggctttcccccaggtat

SEQ ID NO: 249 - RNA, 66 nt, synthetic construct
  source 1..66: mol_type = other RNA
gtgcacacagcaaagcctctttggaggctgaatggggtcccccgactctggctttcccccaggttt

SEQ ID NO: 250 - RNA, 66 nt, synthetic construct
  source 1..66: mol_type = other RNA
gtgcacacagcaaagcctctttggaggctgaatggggtcccccgactctggctttcccccaggtgt

SEQ ID NO: 251 - RNA, 66 nt, synthetic construct
  source 1..66: mol_type = other RNA
gtgcacacagcaaagcctctttggaggctgaatggggtcccccgactctggctttcccccaggtct

SEQ ID NO: 252 - RNA, 66 nt, synthetic construct
  source 1..66: mol_type = other RNA
gtgcacacagcaaagcctctttggaggctgaatggggtcccccgactctggctttcccccaggtat

SEQ ID NO: 253 - RNA, 67 nt, synthetic construct
  source 1..67: mol_type = other RNA
ggtgcacacagcaaagcctctttggaggctgaatggggtcccccgactctggctttcccccaggtct

SEQ ID NO: 254 - RNA, 67 nt, synthetic construct
  source 1..67: mol_type = other RNA
ggtgcacacagcaaagcctctttggaggctgaatggggtcccccgactctggctttcccccaggtat

SEQ ID NO: 255 - RNA, 67 nt, synthetic construct
  source 1..67: mol_type = other RNA
ggtgcacacagcaaagcctctttggaggctgaatggggtcccccgactctggctttcccccaggttt

SEQ ID NO: 256 - RNA, 67 nt, synthetic construct
  source 1..67: mol_type = other RNA
ggtgcacacagcaaagcctctttggaggctgaatggggtcccccgactctggctttcccccaggtgt

SEQ ID NO: 257 - RNA, 68 nt, synthetic construct
  source 1..68: mol_type = other RNA
gggtgcacacagcaaagcctctttggaggctgaatggggtcccccgactctggctttcccccaggtct

SEQ ID NO: 258 - RNA, 68 nt, synthetic construct
  source 1..68: mol_type = other RNA
gggtgcacacagcaaagcctctttggaggctgaatggggtcccccgactctggctttcccccaggtgt

SEQ ID NO: 259 - RNA, 68 nt, synthetic construct
  source 1..68: mol_type = other RNA
gggtgcacacagcaaagcctctttggaggctgaatggggtcccccgactctggctttcccccaggtat

SEQ ID NO: 260 - RNA, 68 nt, synthetic construct
  source 1..68: mol_type = other RNA
gggtgcacacagcaaagcctctttggaggctgaatggggtcccccgactctggctttcccccaggttt

SEQ ID NO: 261 - RNA, 69 nt, synthetic construct
  source 1..69: mol_type = other RNA
tgggtgcacacagcaaagcctctttggaggctgaatggggtcccccgactctggctttcccccaggttt

SEQ ID NO: 262 - RNA, 69 nt, synthetic construct
  source 1..69: mol_type = other RNA
tgggtgcacacagcaaagcctctttggaggctgaatggggtcccccgactctggctttcccccaggtgt

SEQ ID NO: 263 - RNA, 69 nt, synthetic construct
  source 1..69: mol_type = other RNA
tgggtgcacacagcaaagcctctttggaggctgaatggggtcccccgactctggctttcccccaggtat

SEQ ID NO: 264 - RNA, 69 nt, synthetic construct
  source 1..69: mol_type = other RNA
tgggtgcacacagcaaagcctctttggaggctgaatggggtcccccgactctggctttcccccaggtct

SEQ ID NO: 265 - RNA, 70 nt, synthetic construct
  source 1..70: mol_type = other RNA
ctgggtgcacacagcaaagcctctttggaggctgaatggggtcccccgactctggctttcccccaggtat

SEQ ID NO: 266 - RNA, 70 nt, synthetic construct
  source 1..70: mol_type = other RNA
ctgggtgcacacagcaaagcctctttggaggctgaatggggtcccccgactctggctttcccccaggtgt

SEQ ID NO: 267 - RNA, 70 nt, synthetic construct
  source 1..70: mol_type = other RNA
ctgggtgcacacagcaaagcctctttggaggctgaatggggtcccccgactctggctttcccccaggttt

SEQ ID NO: 268 - RNA, 70 nt, synthetic construct
  source 1..70: mol_type = other RNA
ctgggtgcacacagcaaagcctctttggaggctgaatggggtcccccgactctggctttcccccaggtct

SEQ ID NO: 269 - RNA, 71 nt, synthetic construct
  source 1..71: mol_type = other RNA
cctgggtgcacacagcaaagcctctttggaggctgaatggggtcccccgactctggctttcccccaggtat

SEQ ID NO: 270 - RNA, 71 nt, synthetic construct
  source 1..71: mol_type = other RNA
cctgggtgcacacagcaaagcctctttggaggctgaatggggtcccccgactctggctttcccccaggtct

SEQ ID NO: 271 - RNA, 71 nt, synthetic construct
  source 1..71: mol_type = other RNA
cctgggtgcacacagcaaagcctctttggaggctgaatggggtcccccgactctggctttcccccaggttt

SEQ ID NO: 272 - RNA, 71 nt, synthetic construct
  source 1..71: mol_type = other RNA
cctgggtgcacacagcaaagcctctttggaggctgaatggggtcccccgactctggctttcccccaggtgt

SEQ ID NO: 273 - RNA, 72 nt, synthetic construct
  source 1..72: mol_type = other RNA
tcctgggtgcacacagcaaagcctctttggaggctgaatggggtcccccgactctggctttcccccaggtat

SEQ ID NO: 274 - RNA, 72 nt, synthetic construct
  source 1..72: mol_type = other RNA
tcctgggtgcacacagcaaagcctctttggaggctgaatggggtcccccgactctggctttcccccaggtct

SEQ ID NO: 275 - RNA, 72 nt, synthetic construct
  source 1..72: mol_type = other RNA
tcctgggtgcacacagcaaagcctctttggaggctgaatggggtcccccgactctggctttcccccaggtgt

SEQ ID NO: 276 - RNA, 72 nt, synthetic construct
  source 1..72: mol_type = other RNA
tcctgggtgcacacagcaaagcctctttggaggctgaatggggtcccccgactctggctttcccccaggttt

SEQ ID NO: 277 - RNA, 73 nt, synthetic construct
  source 1..73: mol_type = other RNA
atcctgggtgcacacagcaaagcctctttggaggctgaatggggtcccccgactctggctttcccccaggtct

SEQ ID NO: 278 - RNA, 73 nt, synthetic construct
  source 1..73: mol_type = other RNA
atcctgggtgcacacagcaaagcctctttggaggctgaatggggtcccccgactctggctttcccccaggtat

SEQ ID NO: 279 - RNA, 73 nt, synthetic construct
  source 1..73: mol_type = other RNA
atcctgggtgcacacagcaaagcctctttggaggctgaatggggtcccccgactctggctttcccccaggttt

SEQ ID NO: 280 - RNA, 73 nt, synthetic construct
  source 1..73: mol_type = other RNA
atcctgggtgcacacagcaaagcctctttggaggctgaatggggtcccccgactctggctttcccccaggtgt

SEQ ID NO: 281 - RNA, 74 nt, synthetic construct
  source 1..74: mol_type = other RNA
gatcctgggtgcacacagcaaagcctctttggaggctgaatggggtcccccgactctggctttcccccaggtat

SEQ ID NO: 282 - RNA, 74 nt, synthetic construct
  source 1..74: mol_type = other RNA
gatcctgggtgcacacagcaaagcctctttggaggctgaatggggtcccccgactctggctttcccccaggtgt

SEQ ID NO: 283 - RNA, 74 nt, synthetic construct
  source 1..74: mol_type = other RNA
gatcctgggtgcacacagcaaagcctctttggaggctgaatggggtcccccgactctggctttcccccaggttt

SEQ ID NO: 284 - RNA, 74 nt, synthetic construct
  source 1..74: mol_type = other RNA
gatcctgggtgcacacagcaaagcctctttggaggctgaatggggtcccccgactctggctttcccccaggtct

SEQ ID NO: 285 - RNA, 75 nt, synthetic construct
  source 1..75: mol_type = other RNA
ggatcctgggtgcacacagcaaagcctctttggaggctgaatggggtcccccgactctggctttcccccaggttt

SEQ ID NO: 286 - RNA, 75 nt, synthetic construct
  source 1..75: mol_type = other RNA
ggatcctgggtgcacacagcaaagcctctttggaggctgaatggggtcccccgactctggctttcccccaggtgt

SEQ ID NO: 287 - RNA, 75 nt, synthetic construct
  source 1..75: mol_type = other RNA
ggatcctgggtgcacacagcaaagcctctttggaggctgaatggggtcccccgactctggctttcccccaggtct

SEQ ID NO: 288 - RNA, 75 nt, synthetic construct
  source 1..75: mol_type = other RNA
ggatcctgggtgcacacagcaaagcctctttggaggctgaatggggtcccccgactctggctttcccccaggtat

SEQ ID NO: 289 - RNA, 76 nt, synthetic construct
  source 1..76: mol_type = other RNA
gggatcctgggtgcacacagcaaagcctctttggaggctgaatggggtcccccgactctggctttcccccaggtgt

SEQ ID NO: 290 - RNA, 76 nt, synthetic construct
  source 1..76: mol_type = other RNA
gggatcctgggtgcacacagcaaagcctctttggaggctgaatggggtcccccgactctggctttcccccaggtct

SEQ ID NO: 291 - RNA, 76 nt, synthetic construct
  source 1..76: mol_type = other RNA
gggatcctgggtgcacacagcaaagcctctttggaggctgaatggggtcccccgactctggctttcccccaggtat

SEQ ID NO: 292 - RNA, 76 nt, synthetic construct
  source 1..76: mol_type = other RNA
gggatcctgggtgcacacagcaaagcctctttggaggctgaatggggtcccccgactctggctttcccccaggttt

SEQ ID NO: 293 - RNA, 77 nt, synthetic construct
  source 1..77: mol_type = other RNA
tgggatcctgggtgcacacagcaaagcctctttggaggctgaatggggtcccccgactctggctttcccccaggtct

SEQ ID NO: 294 - RNA, 77 nt, synthetic construct
  source 1..77: mol_type = other RNA
tgggatcctgggtgcacacagcaaagcctctttggaggctgaatggggtcccccgactctggctttcccccaggtgt

SEQ ID NO: 295 - RNA, 77 nt, synthetic construct
  source 1..77: mol_type = other RNA
tgggatcctgggtgcacacagcaaagcctctttggaggctgaatggggtcccccgactctggctttcccccaggttt

SEQ ID NO: 296 - RNA, 77 nt, synthetic construct
  source 1..77: mol_type = other RNA
tgggatcctgggtgcacacagcaaagcctctttggaggctgaatggggtcccccgactctggctttcccccaggtat

SEQ ID NO: 297 - RNA, 78 nt, synthetic construct
  source 1..78: mol_type = other RNA
gtgggatcctgggtgcacacagcaaagcctctttggaggctgaatggggtcccccgactctggctttcccccaggttt

SEQ ID NO: 298 - RNA, 78 nt, synthetic construct
  source 1..78: mol_type = other RNA
gtgggatcctgggtgcacacagcaaagcctctttggaggctgaatggggtcccccgactctggctttcccccaggtgt

SEQ ID NO: 299 - RNA, 78 nt, synthetic construct
  source 1..78: mol_type = other RNA
gtgggatcctgggtgcacacagcaaagcctctttggaggctgaatggggtcccccgactctggctttcccccaggtct

SEQ ID NO: 300 - RNA, 78 nt, synthetic construct
  source 1..78: mol_type = other RNA
gtgggatcctgggtgcacacagcaaagcctctttggaggctgaatggggtcccccgactctggctttcccccaggtat

SEQ ID NO: 301 - RNA, 79 nt, synthetic construct
  source 1..79: mol_type = other RNA
agtgggatcctgggtgcacacagcaaagcctctttggaggctgaatggggtcccccgactctggctttcccccaggtct

SEQ ID NO: 302 - RNA, 79 nt, synthetic construct
  source 1..79: mol_type = other RNA
agtgggatcctgggtgcacacagcaaagcctctttggaggctgaatggggtcccccgactctggctttcccccaggttt

SEQ ID NO: 303 - RNA, 79 nt, synthetic construct
  source 1..79: mol_type = other RNA
agtgggatcctgggtgcacacagcaaagcctctttggaggctgaatggggtcccccgactctggctttcccccaggtgt

SEQ ID NO: 304 - RNA, 79 nt, synthetic construct
  source 1..79: mol_type = other RNA
agtgggatcctgggtgcacacagcaaagcctctttggaggctgaatggggtcccccgactctggctttcccccaggtat

SEQ ID NO: 305 - RNA, 80 nt, synthetic construct
  source 1..80: mol_type = other RNA
tagtgggatcctgggtgcacacagcaaagcctctttggaggctgaatggggtcccccgactctggctttcccccaggtct

SEQ ID NO: 306 - RNA, 80 nt, synthetic construct
  source 1..80: mol_type = other RNA
tagtgggatcctgggtgcacacagcaaagcctctttggaggctgaatggggtcccccgactctggctttcccccaggttt

SEQ ID NO: 307 - RNA, 80 nt, synthetic construct
  source 1..80: mol_type = other RNA
tagtgggatcctgggtgcacacagcaaagcctctttggaggctgaatggggtcccccgactctggctttcccccaggtat

SEQ ID NO: 308 - RNA, 80 nt, synthetic construct
  source 1..80: mol_type = other RNA
tagtgggatcctgggtgcacacagcaaagcctctttggaggctgaatggggtcccccgactctggctttcccccaggtgt

SEQ ID NO: 309 - RNA, 81 nt, synthetic construct
  source 1..81: mol_type = other RNA
gtagtgggatcctgggtgcacacagcaaagcctctttggaggctgaatggggtcccccgactctggctttcccccaggtat

SEQ ID NO: 310 - RNA, 81 nt, synthetic construct
  source 1..81: mol_type = other RNA
gtagtgggatcctgggtgcacacagcaaagcctctttggaggctgaatggggtcccccgactctggctttcccccaggtct

SEQ ID NO: 311 - RNA, 81 nt, synthetic construct
  source 1..81: mol_type = other RNA
gtagtgggatcctgggtgcacacagcaaagcctctttggaggctgaatggggtcccccgactctggctttcccccaggtgt

SEQ ID NO: 312 - RNA, 81 nt, synthetic construct
  source 1..81: mol_type = other RNA
gtagtgggatcctgggtgcacacagcaaagcctctttggaggctgaatggggtcccccgactctggctttcccccaggttt

SEQ ID NO: 313 - RNA, 82 nt, synthetic construct
  source 1..82: mol_type = other RNA
ggtagtgggatcctgggtgcacacagcaaagcctctttggaggctgaatggggtcccccgactctggctttcccccaggtct

SEQ ID NO: 314 - RNA, 82 nt, synthetic construct
  source 1..82: mol_type = other RNA
ggtagtgggatcctgggtgcacacagcaaagcctctttggaggctgaatggggtcccccgactctggctttcccccaggtgt

SEQ ID NO: 315 - RNA, 82 nt, synthetic construct
  source 1..82: mol_type = other RNA
ggtagtgggatcctgggtgcacacagcaaagcctctttggaggctgaatggggtcccccgactctggctttcccccaggtat

SEQ ID NO: 316 - RNA, 82 nt, synthetic construct
  source 1..82: mol_type = other RNA
ggtagtgggatcctgggtgcacacagcaaagcctctttggaggctgaatggggtcccccgactctggctttcccccaggttt

SEQ ID NO: 317 - RNA, 83 nt, synthetic construct
  source 1..83: mol_type = other RNA
gggtagtgggatcctgggtgcacacagcaaagcctctttggaggctgaatggggtcccccgactctggctttcccccaggtgt

SEQ ID NO: 318 - RNA, 83 nt, synthetic construct
  source 1..83: mol_type = other RNA
gggtagtgggatcctgggtgcacacagcaaagcctctttggaggctgaatggggtcccccgactctggctttcccccaggttt

SEQ ID NO: 319 - RNA, 83 nt, synthetic construct
  source 1..83: mol_type = other RNA
gggtagtgggatcctgggtgcacacagcaaagcctctttggaggctgaatggggtcccccgactctggctttcccccaggtct

SEQ ID NO: 320 - RNA, 83 nt, synthetic construct
  source 1..83: mol_type = other RNA
gggtagtgggatcctgggtgcacacagcaaagcctctttggaggctgaatggggtcccccgactctggctttcccccaggtat

SEQ ID NO: 321 - RNA, 84 nt, synthetic construct
  source 1..84: mol_type = other RNA
tgggtagtgggatcctgggtgcacacagcaaagcctctttggaggctgaatggggtcccccgactctggctttcccccaggtgt

SEQ ID NO: 322 - RNA, 84 nt, synthetic construct
  source 1..84: mol_type = other RNA
tgggtagtgggatcctgggtgcacacagcaaagcctctttggaggctgaatggggtcccccgactctggctttcccccaggtct

SEQ ID NO: 323 - RNA, 84 nt, synthetic construct
  source 1..84: mol_type = other RNA
tgggtagtgggatcctgggtgcacacagcaaagcctctttggaggctgaatggggtcccccgactctggctttcccccaggtat

SEQ ID NO: 324 - RNA, 84 nt, synthetic construct
  source 1..84: mol_type = other RNA
tgggtagtgggatcctgggtgcacacagcaaagcctctttggaggctgaatggggtcccccgactctggctttcccccaggttt

SEQ ID NO: 325 - RNA, 85 nt, synthetic construct
  source 1..85: mol_type = other RNA
gtgggtagtgggatcctgggtgcacacagcaaagcctctttggaggctgaatggggtcccccgactctggctttcccccaggtct

SEQ ID NO: 326 - RNA, 85 nt, synthetic construct
  source 1..85: mol_type = other RNA
gtgggtagtgggatcctgggtgcacacagcaaagcctctttggaggctgaatggggtcccccgactctggctttcccccaggtgt

SEQ ID NO: 327 - RNA, 85 nt, synthetic construct
  source 1..85: mol_type = other RNA
gtgggtagtgggatcctgggtgcacacagcaaagcctctttggaggctgaatggggtcccccgactctggctttcccccaggttt

SEQ ID NO: 328 - RNA, 85 nt, synthetic construct
  source 1..85: mol_type = other RNA
gtgggtagtgggatcctgggtgcacacagcaaagcctctttggaggctgaatggggtcccccgactctggctttcccccaggtat

SEQ ID NO: 329 - RNA, 86 nt, synthetic construct
  source 1..86: mol_type = other RNA
agtgggtagtgggatcctgggtgcacacagcaaagcctctttggaggctgaatggggtcccccgactctggctttcccccaggttt

SEQ ID NO: 330 - RNA, 86 nt, synthetic construct
  source 1..86: mol_type = other RNA
agtgggtagtgggatcctgggtgcacacagcaaagcctctttggaggctgaatggggtcccccgactctggctttcccccaggtat

SEQ ID NO: 331 - RNA, 86 nt, synthetic construct
  source 1..86: mol_type = other RNA
agtgggtagtgggatcctgggtgcacacagcaaagcctctttggaggctgaatggggtcccccgactctggctttcccccaggtgt

SEQ ID NO: 332 - RNA, 86 nt, synthetic construct
  source 1..86: mol_type = other RNA
agtgggtagtgggatcctgggtgcacacagcaaagcctctttggaggctgaatggggtcccccgactctggctttcccccaggtct

SEQ ID NO: 333 - RNA, 87 nt, synthetic construct
  source 1..87: mol_type = other RNA
cagtgggtagtgggatcctgggtgcacacagcaaagcctctttggaggctgaatggggtcccccgactctggctttcccccaggtat

SEQ ID NO: 334 - RNA, 87 nt, synthetic construct
  source 1..87: mol_type = other RNA
cagtgggtagtgggatcctgggtgcacacagcaaagcctctttggaggctgaatggggtcccccgactctggctttcccccaggtct

SEQ ID NO: 335 - RNA, 87 nt, synthetic construct
  source 1..87: mol_type = other RNA
cagtgggtagtgggatcctgggtgcacacagcaaagcctctttggaggctgaatggggtcccccgactctggctttcccccaggtgt

SEQ ID NO: 336 - RNA, 87 nt, synthetic construct
  source 1..87: mol_type = other RNA
cagtgggtagtgggatcctgggtgcacacagcaaagcctctttggaggctgaatggggtcccccgactctggctttcccccaggttt

SEQ ID NO: 337 - RNA, 88 nt, synthetic construct
  source 1..88: mol_type = other RNA
ccagtgggtagtgggatcctgggtgcacacagcaaagcctctttggaggctgaatggggtcccccgactctggctttcccccaggtct

SEQ ID NO: 338 - RNA, 88 nt, synthetic construct
  source 1..88: mol_type = other RNA
ccagtgggtagtgggatcctgggtgcacacagcaaagcctctttggaggctgaatggggtcccccgactctggctttcccccaggtgt

SEQ ID NO: 339 - RNA, 88 nt, synthetic construct
  source 1..88: mol_type = other RNA
ccagtgggtagtgggatcctgggtgcacacagcaaagcctctttggaggctgaatggggtcccccgactctggctttcccccaggtat

SEQ ID NO: 340 - RNA, 88 nt, synthetic construct
  source 1..88: mol_type = other RNA
ccagtgggtagtgggatcctgggtgcacacagcaaagcctctttggaggctgaatggggtcccccgactctggctttcccccaggttt

SEQ ID NO: 341 - RNA, 89 nt, synthetic construct
  source 1..89: mol_type = other RNA
tccagtgggtagtgggatcctgggtgcacacagcaaagcctctttggaggctgaatggggtcccccgactctggctttcccccaggtgt

SEQ ID NO: 342 - RNA, 89 nt, synthetic construct
  source 1..89: mol_type = other RNA
tccagtgggtagtgggatcctgggtgcacacagcaaagcctctttggaggctgaatggggtcccccgactctggctttcccccaggtat

SEQ ID NO: 343 - RNA, 89 nt, synthetic construct
  source 1..89: mol_type = other RNA
tccagtgggtagtgggatcctgggtgcacacagcaaagcctctttggaggctgaatggggtcccccgactctggctttcccccaggttt

SEQ ID NO: 344 - RNA, 89 nt, synthetic construct
  source 1..89: mol_type = other RNA
tccagtgggtagtgggatcctgggtgcacacagcaaagcctctttggaggctgaatggggtcccccgactctggctttcccccaggtct

SEQ ID NO: 345 - RNA, 90 nt, synthetic construct
  source 1..90: mol_type = other RNA
ctccagtgggtagtgggatcctgggtgcacacagcaaagcctctttggaggctgaatggggtcccccgactctggctttcccccaggtat

SEQ ID NO: 346 - RNA, 90 nt, synthetic construct
  source 1..90: mol_type = other RNA
ctccagtgggtagtgggatcctgggtgcacacagcaaagcctctttggaggctgaatggggtcccccgactctggctttcccccaggtct

SEQ ID NO: 347 - RNA, 90 nt, synthetic construct
  source 1..90: mol_type = other RNA
ctccagtgggtagtgggatcctgggtgcacacagcaaagcctctttggaggctgaatggggtcccccgactctggctttcccccaggtgt

SEQ ID NO: 348 - RNA, 90 nt, synthetic construct
  source 1..90: mol_type = other RNA
ctccagtgggtagtgggatcctgggtgcacacagcaaagcctctttggaggctgaatggggtcccccgactctggctttcccccaggttt

SEQ ID NO: 349 - RNA, 91 nt, synthetic construct
  source 1..91: mol_type = other RNA
cctccagtgggtagtgggatcctgggtgcacacagcaaagcctctttggaggctgaatggggtcccccgactctggctttcccccaggtat

SEQ ID NO: 350 - RNA, 91 nt, synthetic construct
  source 1..91: mol_type = other RNA
cctccagtgggtagtgggatcctgggtgcacacagcaaagcctctttggaggctgaatggggtcccccgactctggctttcccccaggtgt

SEQ ID NO: 351 - RNA, 91 nt, synthetic construct
  source 1..91: mol_type = other RNA
cctccagtgggtagtgggatcctgggtgcacacagcaaagcctctttggaggctgaatggggtcccccgactctggctttcccccaggtct

SEQ ID NO: 352 - RNA, 91 nt, synthetic construct
  source 1..91: mol_type = other RNA
cctccagtgggtagtgggatcctgggtgcacacagcaaagcctctttggaggctgaatggggtcccccgactctggctttcccccaggttt

SEQ ID NO: 353 - RNA, 92 nt, synthetic construct
  source 1..92: mol_type = other RNA
tcctccagtgggtagtgggatcctgggtgcacacagcaaagcctctttggaggctgaatggggtcccccgactctggctttcccccaggtgt

SEQ ID NO: 354 - RNA, 92 nt, synthetic construct
  source 1..92: mol_type = other RNA
tcctccagtgggtagtgggatcctgggtgcacacagcaaagcctctttggaggctgaatggggtcccccgactctggctttcccccaggttt

SEQ ID NO: 355 - RNA, 92 nt, synthetic construct
  source 1..92: mol_type = other RNA
tcctccagtgggtagtgggatcctgggtgcacacagcaaagcctctttggaggctgaatggggtcccccgactctggctttcccccaggtat

SEQ ID NO: 356 - RNA, 92 nt, synthetic construct
  source 1..92: mol_type = other RNA
tcctccagtgggtagtgggatcctgggtgcacacagcaaagcctctttggaggctgaatggggtcccccgactctggctttcccccaggtct

SEQ ID NO: 357 - RNA, 93 nt, synthetic construct
  source 1..93: mol_type = other RNA
ttcctccagtgggtagtgggatcctgggtgcacacagcaaagcctctttggaggctgaatggggtcccccgactctggctttcccccaggtct

SEQ ID NO: 358 - RNA, 93 nt, synthetic construct
  source 1..93: mol_type = other RNA
ttcctccagtgggtagtgggatcctgggtgcacacagcaaagcctctttggaggctgaatggggtcccccgactctggctttcccccaggttt

SEQ ID NO: 359 - RNA, 93 nt, synthetic construct
  source 1..93: mol_type = other RNA
ttcctccagtgggtagtgggatcctgggtgcacacagcaaagcctctttggaggctgaatggggtcccccgactctggctttcccccaggtgt

SEQ ID NO: 360 - RNA, 93 nt, synthetic construct
  source 1..93: mol_type = other RNA
ttcctccagtgggtagtgggatcctgggtgcacacagcaaagcctctttggaggctgaatggggtcccccgactctggctttcccccaggtat

SEQ ID NO: 361 - RNA, 94 nt, synthetic construct
  source 1..94: mol_type = other RNA
cttcctccagtgggtagtgggatcctgggtgcacacagcaaagcctctttggaggctgaatggggtcccccgactctggctttcccccaggtat

SEQ ID NO: 362 - RNA, 94 nt, synthetic construct
  source 1..94: mol_type = other RNA
cttcctccagtgggtagtgggatcctgggtgcacacagcaaagcctctttggaggctgaatggggtcccccgactctggctttcccccaggtct

SEQ ID NO: 363 - RNA, 94 nt, synthetic construct
  source 1..94: mol_type = other RNA
cttcctccagtgggtagtgggatcctgggtgcacacagcaaagcctctttggaggctgaatggggtcccccgactctggctttcccccaggttt

SEQ ID NO: 364 - RNA, 94 nt, synthetic construct
  source 1..94: mol_type = other RNA
cttcctccagtgggtagtgggatcctgggtgcacacagcaaagcctctttggaggctgaatggggtcccccgactctggctttcccccaggtgt

SEQ ID NO: 365 - RNA, 95 nt, synthetic construct
  source 1..95: mol_type = other RNA
gcttcctccagtgggtagtgggatcctgggtgcacacagcaaagcctctttggaggctgaatggggtcccccgactctggctttcccccaggtct

SEQ ID NO: 366 - RNA, 95 nt, synthetic construct
  source 1..95: mol_type = other RNA
gcttcctccagtgggtagtgggatcctgggtgcacacagcaaagcctctttggaggctgaatggggtcccccgactctggctttcccccaggttt

SEQ ID NO: 367 - RNA, 95 nt, synthetic construct
  source 1..95: mol_type = other RNA
gcttcctccagtgggtagtgggatcctgggtgcacacagcaaagcctctttggaggctgaatggggtcccccgactctggctttcccccaggtgt

SEQ ID NO: 368 - RNA, 95 nt, synthetic construct
  source 1..95: mol_type = other RNA
gcttcctccagtgggtagtgggatcctgggtgcacacagcaaagcctctttggaggctgaatggggtcccccgactctggctttcccccaggtat

SEQ ID NO: 369 - RNA, 96 nt, synthetic construct
  source 1..96: mol_type = other RNA
ggcttcctccagtgggtagtgggatcctgggtgcacacagcaaagcctctttggaggctgaatggggtcccccgactctggctttcccccaggttt

SEQ ID NO: 370 - RNA, 96 nt, synthetic construct
  source 1..96: mol_type = other RNA
ggcttcctccagtgggtagtgggatcctgggtgcacacagcaaagcctctttggaggctgaatggggtcccccgactctggctttcccccaggtat

SEQ ID NO: 371 - RNA, 96 nt, synthetic construct
  source 1..96: mol_type = other RNA
ggcttcctccagtgggtagtgggatcctgggtgcacacagcaaagcctctttggaggctgaatggggtcccccgactctggctttcccccaggtct

SEQ ID NO: 372 - RNA, 96 nt, synthetic construct
  source 1..96: mol_type = other RNA
ggcttcctccagtgggtagtgggatcctgggtgcacacagcaaagcctctttggaggctgaatggggtcccccgactctggctttcccccaggtgt

SEQ ID NO: 373 - RNA, 97 nt, synthetic construct
  source 1..97: mol_type = other RNA
gggcttcctccagtgggtagtgggatcctgggtgcacacagcaaagcctctttggaggctgaatggggtcccccgactctggctttcccccaggtct

SEQ ID NO: 374 - RNA, 97 nt, synthetic construct
  source 1..97: mol_type = other RNA
gggcttcctccagtgggtagtgggatcctgggtgcacacagcaaagcctctttggaggctgaatggggtcccccgactctggctttcccccaggtgt

SEQ ID NO: 375 - RNA, 97 nt, synthetic construct
  source 1..97: mol_type = other RNA
gggcttcctccagtgggtagtgggatcctgggtgcacacagcaaagcctctttggaggctgaatggggtcccccgactctggctttcccccaggttt

SEQ ID NO: 376 - RNA, 97 nt, synthetic construct
  source 1..97: mol_type = other RNA
gggcttcctccagtgggtagtgggatcctgggtgcacacagcaaagcctctttggaggctgaatggggtcccccgactctggctttcccccaggtat

SEQ ID NO: 377 - RNA, 98 nt, synthetic construct
  source 1..98: mol_type = other RNA
tgggcttcctccagtgggtagtgggatcctgggtgcacacagcaaagcctctttggaggctgaatggggtcccccgactctggctttcccccaggtat

SEQ ID NO: 378 - RNA, 98 nt, synthetic construct
  source 1..98: mol_type = other RNA
tgggcttcctccagtgggtagtgggatcctgggtgcacacagcaaagcctctttggaggctgaatggggtcccccgactctggctttcccccaggtct

SEQ ID NO: 379 - RNA, 98 nt, synthetic construct
  source 1..98: mol_type = other RNA
tgggcttcctccagtgggtagtgggatcctgggtgcacacagcaaagcctctttggaggctgaatggggtcccccgactctggctttcccccaggtgt

SEQ ID NO: 380 - RNA, 98 nt, synthetic construct
  source 1..98: mol_type = other RNA
tgggcttcctccagtgggtagtgggatcctgggtgcacacagcaaagcctctttggaggctgaatggggtcccccgactctggctttcccccaggttt

SEQ ID NO: 381 - RNA, 99 nt, synthetic construct
  source 1..99: mol_type = other RNA
ctgggcttcctccagtgggtagtgggatcctgggtgcacacagcaaagcctctttggaggctgaatggggtcccccgactctggctttcccccaggttt

SEQ ID NO: 382 - RNA, 99 nt, synthetic construct
  source 1..99: mol_type = other RNA
ctgggcttcctccagtgggtagtgggatcctgggtgcacacagcaaagcctctttggaggctgaatggggtcccccgactctggctttcccccaggtat

SEQ ID NO: 383 - RNA, 99 nt, synthetic construct
  source 1..99: mol_type = other RNA
ctgggcttcctccagtgggtagtgggatcctgggtgcacacagcaaagcctctttggaggctgaatggggtcccccgactctggctttcccccaggtct

SEQ ID NO: 384 - RNA, 99 nt, synthetic construct
  source 1..99: mol_type = other RNA
ctgggcttcctccagtgggtagtgggatcctgggtgcacacagcaaagcctctttggaggctgaatggggtcccccgactctggctttcccccaggtgt

SEQ ID NO: 385 - RNA, 100 nt, synthetic construct
  source 1..100: mol_type = other RNA
tctgggcttcctccagtgggtagtgggatcctgggtgcacacagcaaagcctctttggaggctgaatggggtcccccgactctggctttcccccaggttt

SEQ ID NO: 386 - RNA, 100 nt, synthetic construct
  source 1..100: mol_type = other RNA
tctgggcttcctccagtgggtagtgggatcctgggtgcacacagcaaagcctctttggaggctgaatggggtcccccgactctggctttcccccaggtat

SEQ ID NO: 387 - RNA, 100 nt, synthetic construct
  source 1..100: mol_type = other RNA
tctgggcttcctccagtgggtagtgggatcctgggtgcacacagcaaagcctctttggaggctgaatggggtcccccgactctggctttcccccaggtct

SEQ ID NO: 388 - RNA, 100 nt, synthetic construct
  source 1..100: mol_type = other RNA
tctgggcttcctccagtgggtagtgggatcctgggtgcacacagcaaagcctctttggaggctgaatggggtcccccgactctggctttcccccaggtgt

SEQ ID NO: 389 - RNA, 101 nt, synthetic construct
  source 1..101: mol_type = other RNA
ctctgggcttcctccagtgggtagtgggatcctgggtgcacacagcaaagcctctttggaggctgaatggggtcccccgactctggctttcccccaggttt

SEQ ID NO: 390 - RNA, 101 nt, synthetic construct
  source 1..101: mol_type = other RNA
ctctgggcttcctccagtgggtagtgggatcctgggtgcacacagcaaagcctctttggaggctgaatggggtcccccgactctggctttcccccaggtct

SEQ ID NO: 391 - RNA, 101 nt, synthetic construct
  source 1..101: mol_type = other RNA
ctctgggcttcctccagtgggtagtgggatcctgggtgcacacagcaaagcctctttggaggctgaatggggtcccccgactctggctttcccccaggtgt

SEQ ID NO: 392 - RNA, 101 nt, synthetic construct
  source 1..101: mol_type = other RNA
ctctgggcttcctccagtgggtagtgggatcctgggtgcacacagcaaagcctctttggaggctgaatggggtcccccgactctggctttcccccaggtat

SEQ ID NO: 393 - RNA, 102 nt, synthetic construct
  source 1..102: mol_type = other RNA
cctctgggcttcctccagtgggtagtgggatcctgggtgcacacagcaaagcctctttggaggctgaatggggtcccccgactctggctttcccccaggtct

SEQ ID NO: 394 - RNA, 102 nt, synthetic construct
  source 1..102: mol_type = other RNA
cctctgggcttcctccagtgggtagtgggatcctgggtgcacacagcaaagcctctttggaggctgaatggggtcccccgactctggctttcccccaggttt

SEQ ID NO: 395 - RNA, 102 nt, synthetic construct
  source 1..102: mol_type = other RNA
cctctgggcttcctccagtgggtagtgggatcctgggtgcacacagcaaagcctctttggaggctgaatggggtcccccgactctggctttcccccaggtgt

SEQ ID NO: 396 - RNA, 102 nt, synthetic construct
  source 1..102: mol_type = other RNA
cctctgggcttcctccagtgggtagtgggatcctgggtgcacacagcaaagcctctttggaggctgaatggggtcccccgactctggctttcccccaggtat

SEQ ID NO: 397 - RNA, 103 nt, synthetic construct
  source 1..103: mol_type = other RNA
tcctctgggcttcctccagtgggtagtgggatcctgggtgcacacagcaaagcctctttggaggctgaatggggtcccccgactctggctttcccccaggttt

SEQ ID NO: 398 - RNA, 103 nt, synthetic construct
  source 1..103: mol_type = other RNA
tcctctgggcttcctccagtgggtagtgggatcctgggtgcacacagcaaagcctctttggaggctgaatggggtcccccgactctggctttcccccaggtat

SEQ ID NO: 399 - RNA, 103 nt, synthetic construct
  source 1..103: mol_type = other RNA
tcctctgggcttcctccagtgggtagtgggatcctgggtgcacacagcaaagcctctttggaggctgaatggggtcccccgactctggctttcccccaggtct

SEQ ID NO: 400 - RNA, 103 nt, synthetic construct
  source 1..103: mol_type = other RNA
tcctctgggcttcctccagtgggtagtgggatcctgggtgcacacagcaaagcctctttggaggctgaatggggtcccccgactctggctttcccccaggtgt

SEQ ID NO: 401 - RNA, 15 nt, synthetic construct
  source 1..15: mol_type = other RNA
gcaaagcctctttgg

SEQ ID NO: 402 - RNA, 15 nt, synthetic construct
  source 1..15: mol_type = other RNA
tgggcttcctccagt

SEQ ID NO: 403 - RNA, 19 nt, synthetic construct
  source 1..19: mol_type = other RNA
gcctctttggaggctgaat

SEQ ID NO: 404 - RNA, 19 nt, synthetic construct
  source 1..19: mol_type = other RNA
acgagttccatgtgagtgt

SEQ ID NO: 405 - RNA, 19 nt, synthetic construct
  source 1..19: mol_type = other RNA
catgtgagtgtggggatgg

SEQ ID NO: 406 - RNA, 19 nt, synthetic construct
  source 1..19: mol_type = other RNA
cgagttccatgtgagtgtg

SEQ ID NO: 407 - RNA, 19 nt, synthetic construct
  source 1..19: mol_type = other RNA
gtgagtgtggggatggagg

SEQ ID NO: 408 - RNA, 19 nt, synthetic construct
  source 1..19: mol_type = other RNA
ttccatgtgagtgtgggga

SEQ ID NO: 409 - RNA, 19 nt, synthetic construct
  source 1..19: mol_type = other RNA
tacgagttccatgtgagtg

SEQ ID NO: 410 - RNA, 19 nt, synthetic construct
  source 1..19: mol_type = other RNA
agcctctttggaggctgaa

SEQ ID NO: 411 - RNA, 19 nt, synthetic construct
  source 1..19: mol_type = other RNA
gcaaagcctctttggaggc

SEQ ID NO: 412 - RNA, 19 nt, synthetic construct
  source 1..19: mol_type = other RNA
cccgactctggctttcccc

SEQ ID NO: 413 - RNA, 19 nt, synthetic construct
  source 1..19: mol_type = other RNA
gaggctgaatggggtcccc

SEQ ID NO: 414 - RNA, 19 nt, synthetic construct
  source 1..19: mol_type = other RNA
gaatggggtcccccgactc

SEQ ID NO: 415 - RNA, 19 nt, synthetic construct
  source 1..19: mol_type = other RNA
cctctttggaggctgaatg

SEQ ID NO: 416 - RNA, 19 nt, synthetic construct
  source 1..19: mol_type = other RNA
ccgactctggctttccccc

SEQ ID NO: 417 - RNA, 20 nt, synthetic construct
  source 1..20: mol_type = other RNA
aatcctctgggcttcctcca

SEQ ID NO: 418 - RNA, 20 nt, synthetic construct
  source 1..20: mol_type = other RNA
gtgcacacagcaaagcctct

SEQ ID NO: 419 - RNA, 20 nt, synthetic construct
  source 1..20: mol_type = other RNA
gtgggatcctgggtgcacac

SEQ ID NO: 420 - RNA, 20 nt, synthetic construct
  source 1..20: mol_type = other RNA
gtgggtagtgggatcctggg

SEQ ID NO: 421 - RNA, 20 nt, synthetic construct
  source 1..20: mol_type = other RNA
tccagtgggtagtgggatcc

SEQ ID NO: 422 - RNA, 20 nt, synthetic construct
  source 1..20: mol_type = other RNA
ggtcctcaccccaatcctct

SEQ ID NO: 423 - RNA, 20 nt, synthetic construct
  source 1..20: mol_type = other RNA
agcaaagcctctttggaggc

SEQ ID NO: 424 - RNA, 20 nt, synthetic construct
  source 1..20: mol_type = other RNA
tcctctgggcttcctccagt

SEQ ID NO: 425 - RNA, 20 nt, synthetic construct
  source 1..20: mol_type = other RNA
ctccagtgggtagtgggatc

SEQ ID NO: 426 - RNA, 20 nt, synthetic construct
  source 1..20: mol_type = other RNA
tgaatggggtcccccgactc

SEQ ID NO: 427 - RNA, 20 nt, synthetic construct
  source 1..20: mol_type = other RNA
gaatggggtcccccgactct

SEQ ID NO: 428 - RNA, 20 nt, synthetic construct
  source 1..20: mol_type = other RNA
ctgaatggggtcccccgact

SEQ ID NO: 429 - RNA, 20 nt, synthetic construct
  source 1..20: mol_type = other RNA
acacagcaaagcctctttgg

SEQ ID NO: 430 - RNA, 20 nt, synthetic construct
  source 1..20: mol_type = other RNA
agcctctttggaggctgaat

SEQ ID NO: 431 - RNA, 20 nt, synthetic construct
  source 1..20: mol_type = other RNA
tgtgagtgtggggatggagg

SEQ ID NO: 432 - RNA, 20 nt, synthetic construct
  source 1..20: mol_type = other RNA
gtcctcaccccaatcctctg

SEQ ID NO: 433 - RNA, 20 nt, synthetic construct
  source 1..20: mol_type = other RNA
tgggcttcctccagtgggta

SEQ ID NO: 434 - RNA, 20 nt, synthetic construct
  source 1..20: mol_type = other RNA
tggtcctcaccccaatcctc

SEQ ID NO: 435 - RNA, 20 nt, synthetic construct
  source 1..20: mol_type = other RNA
ggaggctgaatggggtcccc

SEQ ID NO: 436 - RNA, 20 nt, synthetic construct
  source 1..20: mol_type = other RNA
tgcacacagcaaagcctctt

SEQ ID NO: 437 - RNA, 20 nt, synthetic construct
  source 1..20: mol_type = other RNA
ggctttcccccaggtgtaca

SEQ ID NO: 438 - RNA, 20 nt, synthetic construct
  source 1..20: mol_type = other RNA
cctctttggaggctgaatgg

SEQ ID NO: 439 - RNA, 20 nt, synthetic construct
  source 1..20: mol_type = other RNA
cctctgggcttcctccagtg

SEQ ID NO: 440 - RNA, 20 nt, synthetic construct
  source 1..20: mol_type = other RNA
ccgactctggctttccccca

SEQ ID NO: 441 - RNA, 20 nt, synthetic construct
  source 1..20: mol_type = other RNA
ccccgactctggctttcccc

SEQ ID NO: 442 - RNA, 20 nt, synthetic construct
  source 1..20: mol_type = other RNA
ccagtgggtagtgggatcct

SEQ ID NO: 443 - RNA, 20 nt, synthetic construct
  source 1..20: mol_type = other RNA
cagtgggtagtgggatcctg

SEQ ID NO: 444 - RNA, 20 nt, synthetic construct
  source 1..20: mol_type = other RNA
cacagcaaagcctctttgga

SEQ ID NO: 445 - RNA, 20 nt, synthetic construct
  source 1..20: mol_type = other RNA
ggcttcctccagtgggtagt

SEQ ID NO: 446 - RNA, 20 nt, synthetic construct
  source 1..20: mol_type = other RNA
gcctctttggaggctgaatg

SEQ ID NO: 447 - RNA, 20 nt, synthetic construct
  source 1..20: mol_type = other RNA
cccgactctggctttccccc

SEQ ID NO: 448 - RNA, 20 nt, synthetic construct
  source 1..20: mol_type = other RNA
ggctttcccccaggtataca

SEQ ID NO: 449 - RNA, 20 nt, synthetic construct
  source 1..20: mol_type = other RNA
ctgggcttcctccagtgggt

SEQ ID NO: 450 - RNA, 20 nt, synthetic construct
  source 1..20: mol_type = other RNA
aagcctctttggaggctgaa

SEQ ID NO: 451 - RNA, 20 nt, synthetic construct
  source 1..20: mol_type = other RNA
gggcttcctccagtgggtag

SEQ ID NO: 452 - RNA, 20 nt, synthetic construct
  source 1..20: mol_type = other RNA
caatcctctgggcttcctcc

SEQ ID NO: 453 - RNA, 20 nt, synthetic construct
  source 1..20: mol_type = other RNA
cacacagcaaagcctctttg

SEQ ID NO: 454 - RNA, 20 nt, synthetic construct
  source 1..20: mol_type = other RNA
atggtcctcaccccaatcct

SEQ ID NO: 455 - RNA, 20 nt, synthetic construct
  source 1..20: mol_type = other RNA
tacgagttccatgtgagtgt

SEQ ID NO: 456 - RNA, 20 nt, synthetic construct
  source 1..20: mol_type = other RNA
ggctttcccccaggtctaca

SEQ ID NO: 457 - RNA, 20 nt, synthetic construct
  source 1..20: mol_type = other RNA
atcctgggtgcacacagcaa

SEQ ID NO: 458 - RNA, 20 nt, synthetic construct
  source 1..20: mol_type = other RNA
atcctctgggcttcctccag

SEQ ID NO: 459 - RNA, 20 nt, synthetic construct
  source 1..20: mol_type = other RNA
gcttcctccagtgggtagtg

SEQ ID NO: 460 - RNA, 20 nt, synthetic construct
  source 1..20: mol_type = other RNA
gttccatgtgagtgtgggga

SEQ ID NO: 461 - RNA, 20 nt, synthetic construct
  source 1..20: mol_type = other RNA
gtgagtgtggggatggagga

SEQ ID NO: 462 - RNA, 20 nt, synthetic construct
  source 1..20: mol_type = other RNA
ctacgagttccatgtgagtg

SEQ ID NO: 463 - RNA, 20 nt, synthetic construct
  source 1..20: mol_type = other RNA
aaagcctctttggaggctga

SEQ ID NO: 464 - RNA, 20 nt, synthetic construct
  source 1..20: mol_type = other RNA
acgagttccatgtgagtgtg

SEQ ID NO: 465 - RNA, 20 nt, synthetic construct
  source 1..20: mol_type = other RNA
ggctttcccccaggtttaca

SEQ ID NO: 466 - RNA, 20 nt, synthetic construct
  source 1..20: mol_type = other RNA
gcacacagcaaagcctcttt

SEQ ID NO: 467 - RNA, 20 nt, synthetic construct
  source 1..20: mol_type = other RNA
ccatgtgagtgtggggatgg

SEQ ID NO: 468 - RNA, 21 nt, synthetic construct
  source 1..21: mol_type = other RNA
caaagcctctttggaggctga

SEQ ID NO: 469 - RNA, 21 nt, synthetic construct
  source 1..21: mol_type = other RNA
aagcctctttggaggctgaat

SEQ ID NO: 470 - RNA, 21 nt, synthetic construct
  source 1..21: mol_type = other RNA
cccccgactctggctttcccc

SEQ ID NO: 471 - RNA, 21 nt, synthetic construct
  source 1..21: mol_type = other RNA
aaagcctctttggaggctgaa

SEQ ID NO: 472 - RNA, 21 nt, synthetic construct
  source 1..21: mol_type = other RNA
atgtgagtgtggggatggagg

SEQ ID NO: 473 - RNA, 21 nt, synthetic construct
  source 1..21: mol_type = other RNA
ctacgagttccatgtgagtgt

SEQ ID NO: 474 - RNA, 21 nt, synthetic construct
  source 1..21: mol_type = other RNA
gctgaatggggtcccccgact

SEQ ID NO: 475 - RNA, 22 nt, synthetic construct
  source 1..22: mol_type = other RNA
gcaaagcctctttggaggctga

SEQ ID NO: 476 - RNA, 22 nt, synthetic construct
  source 1..22: mol_type = other RNA
caaagcctctttggaggctgaa

SEQ ID NO: 477 - RNA, 22 nt, synthetic construct
  source 1..22: mol_type = other RNA
aaagcctctttggaggctgaat

SEQ ID NO: 478 - RNA, 22 nt, synthetic construct
  source 1..22: mol_type = other RNA
tcccccgactctggctttcccc

SEQ ID NO: 479 - RNA, 22 nt, synthetic construct
  source 1..22: mol_type = other RNA
catgtgagtgtggggatggagg

SEQ ID NO: 480 - RNA, 22 nt, synthetic construct
  source 1..22: mol_type = other RNA
ggctgaatggggtcccccgact

SEQ ID NO: 481 - RNA, 100 nt, synthetic construct
  source 1..100: mol_type = other RNA
tgaatggggtcccccgactcgttttagagctagaaatagcaagttaaaataaggctagtccgttatcaacttgaaaaagtggcaccgagtcggtgctttt

SEQ ID NO: 482 - RNA, 116 nt, synthetic construct
  source 1..116: mol_type = other RNA
tttcaccaggaacatgtaccgttttagagctagaaatagcaagttaaaataaggctagtccgttatcaacttgaaaaagtggcaccgagtcggtgctcccccaggtgtacatgttc

SEQ ID NO: 483 - RNA, 117 nt, synthetic construct
  source 1..117: mol_type = other RNA
tttcaccaggaacatgtaccgttttagagctagaaatagcaagttaaaataaggctagtccgttatcaacttgaaaaagtggcaccgagtcggtgctcccccaggtttacatgttcc

SEQ ID NO: 484 - RNA, 117 nt, synthetic construct
  source 1..117: mol_type = other RNA
tttcaccaggaacatgtaccgttttagagctagaaatagcaagttaaaataaggctagtccgttatcaacttgaaaaagtggcaccgagtcggtgctcccccaggtctacatgttcc

SEQ ID NO: 485 - RNA, 117 nt, synthetic construct
  source 1..117: mol_type = other RNA
tttcaccaggaacatgtaccgttttagagctagaaatagcaagttaaaataaggctagtccgttatcaacttgaaaaagtggcaccgagtcggtgctcccccaggtatacatgttcc

SEQ ID NO: 486 - RNA, 117 nt, synthetic construct
  source 1..117: mol_type = other RNA
gtttcaccaggaacatgtaccgttttagagctagaaatagcaagttaaaataaggctagtccgttatcaacttgaaaaagtggcaccgagtcggtgctcccccaggtgtacatgttc

SEQ ID NO: 487 - RNA, 118 nt, synthetic construct
  source 1..118: mol_type = other RNA
tttcaccaggaacatgtaccgttttagagctagaaatagcaagttaaaataaggctagtccgttatcaacttgaaaaagtggcaccgagtcggtgctcccccaggtgtacatgttcct

SEQ ID NO: 488 - RNA, 118 nt, synthetic construct
  source 1..118: mol_type = other RNA
tttcaccaggaacatgtaccgttttagagctagaaatagcaagttaaaataaggctagtccgttatcaacttgaaaaagtggcaccgagtcggtgctttcccccaggtgtacatgttc

SEQ ID NO: 489 - RNA, 119 nt, synthetic construct
  source 1..119: mol_type = other RNA
tttcaccaggaacatgtaccgttttagagctagaaatagcaagttaaaataaggctagtccgttatcaacttgaaaaagtggcaccgagtcggtgctttcccccaggtttacatgttcc

SEQ ID NO: 490 - RNA, 119 nt, synthetic construct
  source 1..119: mol_type = other RNA
gtttcaccaggaacatgtaccgttttagagctagaaatagcaagttaaaataaggctagtccgttatcaacttgaaaaagtggcaccgagtcggtgctttcccccaggtgtacatgttc

SEQ ID NO: 491 - RNA, 119 nt, synthetic construct
  source 1..119: mol_type = other RNA
gtttcaccaggaacatgtaccgttttagagctagaaatagcaagttaaaataaggctagtccgttatcaacttgaaaaagtggcaccgagtcggtgctcccccaggtgtacatgttcct

SEQ ID NO: 492 - RNA, 119 nt, synthetic construct
  source 1..119: mol_type = other RNA
tttcaccaggaacatgtaccgttttagagctagaaatagcaagttaaaataaggctagtccgttatcaacttgaaaaagtggcaccgagtcggtgctcccccaggtttacatgttcctg

SEQ ID NO: 493 - RNA, 119 nt, synthetic construct
  source 1..119: mol_type = other RNA
tttcaccaggaacatgtaccgttttagagctagaaatagcaagttaaaataaggctagtccgttatcaacttgaaaaagtggcaccgagtcggtgctttcccccaggtgtacatgttcc

SEQ ID NO: 494 - RNA, 119 nt, synthetic construct
  source 1..119: mol_type = other RNA
tttcaccaggaacatgtaccgttttagagctagaaatagcaagttaaaataaggctagtccgttatcaacttgaaaaagtggcaccgagtcggtgctttcccccaggtctacatgttcc

SEQ ID NO: 495 - RNA, 119 nt, synthetic construct
  source 1..119: mol_type = other RNA
tttcaccaggaacatgtaccgttttagagctagaaatagcaagttaaaataaggctagtccgttatcaacttgaaaaagtggcaccgagtcggtgctcccccaggtctacatgttcctg

SEQ ID NO: 496 - RNA, 119 nt, synthetic construct
  source 1..119: mol_type = other RNA
tttcaccaggaacatgtaccgttttagagctagaaatagcaagttaaaataaggctagtccgttatcaacttgaaaaagtggcaccgagtcggtgctttcccccaggtatacatgttcc

SEQ ID NO: 497 - RNA, 119 nt, synthetic construct
  source 1..119: mol_type = other RNA
tttcaccaggaacatgtaccgttttagagctagaaatagcaagttaaaataaggctagtccgttatcaacttgaaaaagtggcaccgagtcggtgctcccccaggtatacatgttcctg

SEQ ID NO: 498 - RNA, 120 nt, synthetic construct
  source 1..120: mol_type = other RNA
tttcaccaggaacatgtaccgttttagagctagaaatagcaagttaaaataaggctagtccgttatcaacttgaaaaagtggcaccgagtcggtgcgctttcccccaggtgtacatgttc

SEQ ID NO: 499 - RNA, 120 nt, synthetic construct
  source 1..120: mol_type = other RNA
gtttcaccaggaacatgtaccgttttagagctagaaatagcaagttaaaataaggctagtccgttatcaacttgaaaaagtggcaccgagtcggtgctttcccccaggtgtacatgttcc

SEQ ID NO: 500 - RNA, 120 nt, synthetic construct
  source 1..120: mol_type = other RNA
tttcaccaggaacatgtaccgttttagagctagaaatagcaagttaaaataaggctagtccgttatcaacttgaaaaagtggcaccgagtcggtgctcccccaggtgtacatgttcctgg

SEQ ID NO: 501 - RNA, 120 nt, synthetic construct
  source 1..120: mol_type = other RNA
tttcaccaggaacatgtaccgttttagagctagaaatagcaagttaaaataaggctagtccgttatcaacttgaaaaagtggcaccgagtcggtgctcccccaggtgtacatgttctttt

SEQ ID NO: 502 - RNA, 120 nt, synthetic construct
  source 1..120: mol_type = other RNA
tttcaccaggaacatgtaccgttttagagctagaaatagcaagttaaaataaggctagtccgttatcaacttgaaaaagtggcaccgagtcggtgctttcccccaggtgtacatgttcct

SEQ ID NO: 503 - RNA, 121 nt, synthetic construct
  source 1..121: mol_type = other RNA
tttcaccaggaacatgtaccgttttagagctagaaatagcaagttaaaataaggctagtccgttatcaacttgaaaaagtggcaccgagtcggtgctcccccaggtttacatgttcctggt

SEQ ID NO: 504 - RNA, 121 nt, synthetic construct
  source 1..121: mol_type = other RNA
tttcaccaggaacatgtaccgttttagagctagaaatagcaagttaaaataaggctagtccgttatcaacttgaaaaagtggcaccgagtcggtgctcccccaggtctacatgttcctggt

SEQ ID NO: 505 - RNA, 121 nt, synthetic construct
  source 1..121: mol_type = other RNA
gtttcaccaggaacatgtaccgttttagagctagaaatagcaagttaaaataaggctagtccgttatcaacttgaaaaagtggcaccgagtcggtgctcccccaggtgtacatgttcctgg

SEQ ID NO: 506 - RNA, 121 nt, synthetic construct
  source 1..121: mol_type = other RNA
tttcaccaggaacatgtaccgttttagagctagaaatagcaagttaaaataaggctagtccgttatcaacttgaaaaagtggcaccgagtcggtgctttcccccaggtctacatgttcctg

SEQ ID NO: 507 - RNA, 121 nt, synthetic construct
  source 1..121: mol_type = other RNA
tttcaccaggaacatgtaccgttttagagctagaaatagcaagttaaaataaggctagtccgttatcaacttgaaaaagtggcaccgagtcggtgctcccccaggtatacatgttcctttt

SEQ ID NO: 508 - RNA, 121 nt, synthetic construct
  source 1..121: mol_type = other RNA
tttcaccaggaacatgtaccgttttagagctagaaatagcaagttaaaataaggctagtccgttatcaacttgaaaaagtggcaccgagtcggtgctcccccaggtctacatgttcctttt

SEQ ID NO: 509 - RNA, 121 nt, synthetic construct
  source 1..121: mol_type = other RNA
tttcaccaggaacatgtaccgttttagagctagaaatagcaagttaaaataaggctagtccgttatcaacttgaaaaagtggcaccgagtcggtgctcccccaggtttacatgttcctttt

SEQ ID NO: 510 - RNA, 121 nt, synthetic construct
  source 1..121: mol_type = other RNA
tttcaccaggaacatgtaccgttttagagctagaaatagcaagttaaaataaggctagtccgttatcaacttgaaaaagtggcaccgagtcggtgctcccccaggtatacatgttcctggt

SEQ ID NO: 511 - RNA, 121 nt, synthetic construct
  source 1..121: mol_type = other RNA
gtttcaccaggaacatgtaccgttttagagctagaaatagcaagttaaaataaggctagtccgttatcaacttgaaaaagtggcaccgagtcggtgctttcccccaggtgtacatgttcct

SEQ ID NO: 512 - RNA, 121 nt, synthetic construct
  source 1..121: mol_type = other RNA
tttcaccaggaacatgtaccgttttagagctagaaatagcaagttaaaataaggctagtccgttatcaacttgaaaaagtggcaccgagtcggtgctttcccccaggtttacatgttcctg

SEQ ID NO: 513 - RNA, 121 nt, synthetic construct
  source 1..121: mol_type = other RNA
tttcaccaggaacatgtaccgttttagagctagaaatagcaagttaaaataaggctagtccgttatcaacttgaaaaagtggcaccgagtcggtgctttcccccaggtatacatgttcctg

SEQ ID NO: 514 - RNA, 122 nt, synthetic construct
  source 1..122: mol_type = other RNA
tttcaccaggaacatgtaccgttttagagctagaaatagcaagttaaaataaggctagtccgttatcaacttgaaaaagtggcaccgagtcggtgctttcccccaggtgtacatgttctttt

SEQ ID NO: 515 - RNA, 122 nt, synthetic construct
  source 1..122: mol_type = other RNA
tttcaccaggaacatgtaccgttttagagctagaaatagcaagttaaaataaggctagtccgttatcaacttgaaaaagtggcaccgagtcggtgctggctttcccccaggtgtacatgttc

SEQ ID NO: 516 - RNA, 122 nt, synthetic construct
  source 1..122: mol_type = other RNA
tttcaccaggaacatgtaccgttttagagctagaaatagcaagttaaaataaggctagtccgttatcaacttgaaaaagtggcaccgagtcggtgctcccccaggtgtacatgttccttttt

SEQ ID NO: 517 - RNA, 122 nt, synthetic construct
  source 1..122: mol_type = other RNA
tttcaccaggaacatgtaccgttttagagctagaaatagcaagttaaaataaggctagtccgttatcaacttgaaaaagtggcaccgagtcggtgctttcccccaggtgtacatgttcctgg

SEQ ID NO: 518 - RNA, 122 nt, synthetic construct
  source 1..122: mol_type = other RNA
tttcaccaggaacatgtaccgttttagagctagaaatagcaagttaaaataaggctagtccgttatcaacttgaaaaagtggcaccgagtcggtgctcccccaggtgtacatgttcctggtg

SEQ ID NO: 519 - RNA, 122 nt, synthetic construct
  source 1..122: mol_type = other RNA
tttcaccaggaacatgtaccgttttagagctagaaatagcaagttaaaataaggctagtccgttatcaacttgaaaaagtggcaccgagtcggtgcgctttcccccaggtgtacatgttcct

SEQ ID NO: 520 - RNA, 123 nt, synthetic construct
  source 1..123: mol_type = other RNA
tttcaccaggaacatgtaccgttttagagctagaaatagcaagttaaaataaggctagtccgttatcaacttgaaaaagtggcaccgagtcggtgctttcccccaggtctacatgttcctggt

SEQ ID NO: 521 - RNA, 123 nt, synthetic construct
  source 1..123: mol_type = other RNA
tttcaccaggaacatgtaccgttttagagctagaaatagcaagttaaaataaggctagtccgttatcaacttgaaaaagtggcaccgagtcggtgctttcccccaggtatacatgttcctggt

SEQ ID NO: 522 - RNA, 123 nt, synthetic construct
  source 1..123: mol_type = other RNA
tttcaccaggaacatgtaccgttttagagctagaaatagcaagttaaaataaggctagtccgttatcaacttgaaaaagtggcaccgagtcggtgctttcccccaggtttacatgttcctggt

SEQ ID NO: 523 - RNA, 123 nt, synthetic construct
  source 1..123: mol_type = other RNA
tttcaccaggaacatgtaccgttttagagctagaaatagcaagttaaaataaggctagtccgttatcaacttgaaaaagtggcaccgagtcggtgctttcccccaggtgtacatgttcctggt

SEQ ID NO: 524 - RNA, 123 nt, synthetic construct
  source 1..123: mol_type = other RNA
tttcaccaggaacatgtaccgttttagagctagaaatagcaagttaaaataaggctagtccgttatcaacttgaaaaagtggcaccgagtcggtgctttcccccaggtgtacatgttcctttt

SEQ ID NO: 525 - RNA, 123 nt, synthetic construct
  source 1..123: mol_type = other RNA
gtttcaccaggaacatgtaccgttttagagctagaaatagcaagttaaaataaggctagtccgttatcaacttgaaaaagtggcaccgagtcggtgctttcccccaggtgtacatgttcctgg

SEQ ID NO: 526 - RNA, 123 nt, synthetic construct
  source 1..123: mol_type = other RNA
gtttcaccaggaacatgtaccgttttagagctagaaatagcaagttaaaataaggctagtccgttatcaacttgaaaaagtggcaccgagtcggtgctcccccaggtgtacatgttcctggtg

SEQ ID NO: 527 - RNA, 123 nt, synthetic construct
  source 1..123: mol_type = other RNA
tttcaccaggaacatgtaccgttttagagctagaaatagcaagttaaaataaggctagtccgttatcaacttgaaaaagtggcaccgagtcggtgctcccccaggtctacatgttcctgtttt

SEQ ID NO: 528 - RNA, 123 nt, synthetic construct
  source 1..123: mol_type = other RNA
tttcaccaggaacatgtaccgttttagagctagaaatagcaagttaaaataaggctagtccgttatcaacttgaaaaagtggcaccgagtcggtgctttcccccaggtatacatgttcctttt

SEQ ID NO: 529 - RNA, 123 nt, synthetic construct
  source 1..123: mol_type = other RNA
gtttcaccaggaacatgtaccgttttagagctagaaatagcaagttaaaataaggctagtccgttatcaacttgaaaaagtggcaccgagtcggtgcgctttcccccaggtgtacatgttcct

SEQ ID NO: 530 - RNA, 123 nt, synthetic construct
  source 1..123: mol_type = other RNA
tttcaccaggaacatgtaccgttttagagctagaaatagcaagttaaaataaggctagtccgttatcaacttgaaaaagtggcaccgagtcggtgctcccccaggtttacatgttcctgtttt

SEQ ID NO: 531 - RNA, 123 nt, synthetic construct
  source 1..123: mol_type = other RNA
gtttcaccaggaacatgtaccgttttagagctagaaatagcaagttaaaataaggctagtccgttatcaacttgaaaaagtggcaccgagtcggtgctggctttcccccaggtgtacatgttc

SEQ ID NO: 532 - RNA, 123 nt, synthetic construct
  source 1..123: mol_type = other RNA
tttcaccaggaacatgtaccgttttagagctagaaatagcaagttaaaataaggctagtccgttatcaacttgaaaaagtggcaccgagtcggtgctttcccccaggtttacatgttcctttt

SEQ ID NO: 533 - RNA, 123 nt, synthetic construct
  source 1..123: mol_type = other RNA
tttcaccaggaacatgtaccgttttagagctagaaatagcaagttaaaataaggctagtccgttatcaacttgaaaaagtggcaccgagtcggtgctttcccccaggtctacatgttcctttt

SEQ ID NO: 534 - RNA, 123 nt, synthetic construct
  source 1..123: mol_type = other RNA
tttcaccaggaacatgtaccgttttagagctagaaatagcaagttaaaataaggctagtccgttatcaacttgaaaaagtggcaccgagtcggtgctcccccaggtatacatgttcctgtttt

SEQ ID NO: 535 - RNA, 124 nt, synthetic construct
  source 1..124: mol_type = other RNA
tttcaccaggaacatgtaccgttttagagctagaaatagcaagttaaaataaggctagtccgttatcaacttgaaaaagtggcaccgagtcggtgcgctttcccccaggtgtacatgttctttt

SEQ ID NO: 536 - RNA, 124 nt, synthetic construct
  source 1..124: mol_type = other RNA
tttcaccaggaacatgtaccgttttagagctagaaatagcaagttaaaataaggctagtccgttatcaacttgaaaaagtggcaccgagtcggtgctctggctttcccccaggtgtacatgttc

SEQ ID NO: 537 - RNA, 124 nt, synthetic construct
  source 1..124: mol_type = other RNA
tttcaccaggaacatgtaccgttttagagctagaaatagcaagttaaaataaggctagtccgttatcaacttgaaaaagtggcaccgagtcggtgctttcccccaggtgtacatgttccttttt

SEQ ID NO: 538 - RNA, 124 nt, synthetic construct
  source 1..124: mol_type = other RNA
tttcaccaggaacatgtaccgttttagagctagaaatagcaagttaaaataaggctagtccgttatcaacttgaaaaagtggcaccgagtcggtgctcccccaggtgtacatgttcctggtttt

SEQ ID NO: 539 - RNA, 124 nt, synthetic construct
  source 1..124: mol_type = other RNA
tttcaccaggaacatgtaccgttttagagctagaaatagcaagttaaaataaggctagtccgttatcaacttgaaaaagtggcaccgagtcggtgctttcccccaggtgtacatgttcctggtg

SEQ ID NO: 540 - RNA, 124 nt, synthetic construct
  source 1..124: mol_type = other RNA
tttcaccaggaacatgtaccgttttagagctagaaatagcaagttaaaataaggctagtccgttatcaacttgaaaaagtggcaccgagtcggtgcgctttcccccaggtgtacatgttcctgg

SEQ ID NO: 541 - RNA, 124 nt, synthetic construct
  source 1..124: mol_type = other RNA
tttcaccaggaacatgtaccgttttagagctagaaatagcaagttaaaataaggctagtccgttatcaacttgaaaaagtggcaccgagtcggtgctggctttcccccaggtgtacatgttcct

SEQ ID NO: 542 - RNA, 125 nt, synthetic construct
  source 1..125: mol_type = other RNA
tttcaccaggaacatgtaccgttttagagctagaaatagcaagttaaaataaggctagtccgttatcaacttgaaaaagtggcaccgagtcggtgctttcccccaggtctacatgttcctgtttt

SEQ ID NO: 543 - RNA, 125 nt, synthetic construct
  source 1..125: mol_type = other RNA
tttcaccaggaacatgtaccgttttagagctagaaatagcaagttaaaataaggctagtccgttatcaacttgaaaaagtggcaccgagtcggtgctttcccccaggtatacatgttcctgtttt

SEQ ID NO: 544 - RNA, 125 nt, synthetic construct
  source 1..125: mol_type = other RNA
tttcaccaggaacatgtaccgttttagagctagaaatagcaagttaaaataaggctagtccgttatcaacttgaaaaagtggcaccgagtcggtgctcccccaggtctacatgttcctggttttt

SEQ ID NO: 545 - RNA, 125 nt, synthetic construct
  source 1..125: mol_type = other RNA
gtttcaccaggaacatgtaccgttttagagctagaaatagcaagttaaaataaggctagtccgttatcaacttgaaaaagtggcaccgagtcggtgcgctttcccccaggtgtacatgttcctgg

SEQ ID NO: 546 - RNA, 125 nt, synthetic construct
  source 1..125: mol_type = other RNA
tttcaccaggaacatgtaccgttttagagctagaaatagcaagttaaaataaggctagtccgttatcaacttgaaaaagtggcaccgagtcggtgctcccccaggtttacatgttcctggttttt

SEQ ID NO: 547 - RNA, 125 nt, synthetic construct
  source 1..125: mol_type = other RNA
gtttcaccaggaacatgtaccgttttagagctagaaatagcaagttaaaataaggctagtccgttatcaacttgaaaaagtggcaccgagtcggtgctggctttcccccaggtgtacatgttcct

SEQ ID NO: 548 - RNA, 125 nt, synthetic construct
  source 1..125: mol_type = other RNA
tttcaccaggaacatgtaccgttttagagctagaaatagcaagttaaaataaggctagtccgttatcaacttgaaaaagtggcaccgagtcggtgctcccccaggtatacatgttcctggttttt

SEQ ID NO: 549 - RNA, 125 nt, synthetic construct
  source 1..125: mol_type = other RNA
tttcaccaggaacatgtaccgttttagagctagaaatagcaagttaaaataaggctagtccgttatcaacttgaaaaagtggcaccgagtcggtgctttcccccaggtttacatgttcctgtttt

SEQ ID NO: 550 - RNA, 125 nt, synthetic construct
  source 1..125: mol_type = other RNA
gtttcaccaggaacatgtaccgttttagagctagaaatagcaagttaaaataaggctagtccgttatcaacttgaaaaagtggcaccgagtcggtgctttcccccaggtgtacatgttcctggtg

SEQ ID NO: 551 - RNA, 126 nt, synthetic construct
  source 1..126: mol_type = other RNA
tttcaccaggaacatgtaccgttttagagctagaaatagcaagttaaaataaggctagtccgttatcaacttgaaaaagtggcaccgagtcggtgctcccccaggtgtacatgttcctggtgtttt

SEQ ID NO: 552 - RNA, 126 nt, synthetic construct
  source 1..126: mol_type = other RNA
tttcaccaggaacatgtaccgttttagagctagaaatagcaagttaaaataaggctagtccgttatcaacttgaaaaagtggcaccgagtcggtgcgctttcccccaggtgtacatgttcctggtg

SEQ ID NO: 553 - RNA, 126 nt, synthetic construct
  source 1..126: mol_type = other RNA
tttcaccaggaacatgtaccgttttagagctagaaatagcaagttaaaataaggctagtccgttatcaacttgaaaaagtggcaccgagtcggtgctggctttcccccaggtgtacatgttcctgg

SEQ ID NO: 554 - RNA, 126 nt, synthetic construct
  source 1..126: mol_type = other RNA
tttcaccaggaacatgtaccgttttagagctagaaatagcaagttaaaataaggctagtccgttatcaacttgaaaaagtggcaccgagtcggtgctttcccccaggtgtacatgttcctggtttt

SEQ ID NO: 555 - RNA, 126 nt, synthetic construct
  source 1..126: mol_type = other RNA
tttcaccaggaacatgtaccgttttagagctagaaatagcaagttaaaataaggctagtccgttatcaacttgaaaaagtggcaccgagtcggtgcgctttcccccaggtgtacatgttccttttt

SEQ ID NO: 556 - RNA, 126 nt, synthetic construct
  source 1..126: mol_type = other RNA
tttcaccaggaacatgtaccgttttagagctagaaatagcaagttaaaataaggctagtccgttatcaacttgaaaaagtggcaccgagtcggtgctctggctttcccccaggtgtacatgttcct

SEQ ID NO: 557 - RNA, 126 nt, synthetic construct
  source 1..126: mol_type = other RNA
tttcaccaggaacatgtaccgttttagagctagaaatagcaagttaaaataaggctagtccgttatcaacttgaaaaagtggcaccgagtcggtgctggctttcccccaggtgtacatgttctttt

SEQ ID NO: 558 - RNA, 127 nt, synthetic construct
  source 1..127: mol_type = other RNA
gtttcaccaggaacatgtaccgttttagagctagaaatagcaagttaaaataaggctagtccgttatcaacttgaaaaagtggcaccgagtcggtgctggctttcccccaggtgtacatgttcctgg

SEQ ID NO: 559 - RNA, 127 nt, synthetic construct
  source 1..127: mol_type = other RNA
gtttcaccaggaacatgtaccgttttagagctagaaatagcaagttaaaataaggctagtccgttatcaacttgaaaaagtggcaccgagtcggtgcgctttcccccaggtgtacatgttcctggtg

SEQ ID NO: 560 - RNA, 127 nt, synthetic construct
  source 1..127: mol_type = other RNA
tttcaccaggaacatgtaccgttttagagctagaaatagcaagttaaaataaggctagtccgttatcaacttgaaaaagtggcaccgagtcggtgctttcccccaggtatacatgttcctggttttt

SEQ ID NO: 561 - RNA, 127 nt, synthetic construct
  source 1..127: mol_type = other RNA
tttcaccaggaacatgtaccgttttagagctagaaatagcaagttaaaataaggctagtccgttatcaacttgaaaaagtggcaccgagtcggtgctttcccccaggtctacatgttcctggttttt

SEQ ID NO: 562 - RNA, 127 nt, synthetic construct
  source 1..127: mol_type = other RNA
tttcaccaggaacatgtaccgttttagagctagaaatagcaagttaaaataaggctagtccgttatcaacttgaaaaagtggcaccgagtcggtgctttcccccaggtgtacatgttcctggttttt

SEQ ID NO: 563 - RNA, 127 nt, synthetic construct
  source 1..127: mol_type = other RNA
tttcaccaggaacatgtaccgttttagagctagaaatagcaagttaaaataaggctagtccgttatcaacttgaaaaagtggcaccgagtcggtgctttcccccaggtttacatgttcctggttttt

SEQ ID NO: 564 - RNA, 128 nt, synthetic construct
  source 1..128: mol_type = other RNA
tttcaccaggaacatgtaccgttttagagctagaaatagcaagttaaaataaggctagtccgttatcaacttgaaaaagtggcaccgagtcggtgctctggctttcccccaggtgtacatgttcctgg

SEQ ID NO: 565 - RNA, 128 nt, synthetic construct
  source 1..128: mol_type = other RNA
tttcaccaggaacatgtaccgttttagagctagaaatagcaagttaaaataaggctagtccgttatcaacttgaaaaagtggcaccgagtcggtgctttcccccaggtgtacatgttcctggtgtttt

SEQ ID NO: 566 - RNA, 128 nt, synthetic construct
  source 1..128: mol_type = other RNA
tttcaccaggaacatgtaccgttttagagctagaaatagcaagttaaaataaggctagtccgttatcaacttgaaaaagtggcaccgagtcggtgctggctttcccccaggtgtacatgttcctggtg

SEQ ID NO: 567 - RNA, 128 nt, synthetic construct
  source 1..128: mol_type = other RNA
tttcaccaggaacatgtaccgttttagagctagaaatagcaagttaaaataaggctagtccgttatcaacttgaaaaagtggcaccgagtcggtgctctggctttcccccaggtgtacatgttctttt

SEQ ID NO: 568 - RNA, 128 nt, synthetic construct
  source 1..128: mol_type = other RNA
tttcaccaggaacatgtaccgttttagagctagaaatagcaagttaaaataaggctagtccgttatcaacttgaaaaagtggcaccgagtcggtgctggctttcccccaggtgtacatgttccttttt

SEQ ID NO: 569 - RNA, 128 nt, synthetic construct
  source 1..128: mol_type = other RNA
tttcaccaggaacatgtaccgttttagagctagaaatagcaagttaaaataaggctagtccgttatcaacttgaaaaagtggcaccgagtcggtgcgctttcccccaggtgtacatgttcctggtttt

SEQ ID NO: 570 - RNA, 129 nt, synthetic construct
  source 1..129: mol_type = other RNA
gtttcaccaggaacatgtaccgttttagagctagaaatagcaagttaaaataaggctagtccgttatcaacttgaaaaagtggcaccgagtcggtgctggctttcccccaggtgtacatgttcctggtg

SEQ ID NO: 571 - RNA, 130 nt, synthetic construct
  source 1..130: mol_type = other RNA
tttcaccaggaacatgtaccgttttagagctagaaatagcaagttaaaataaggctagtccgttatcaacttgaaaaagtggcaccgagtcggtgctctggctttcccccaggtgtacatgttcctggtg

SEQ ID NO: 572 - RNA, 130 nt, synthetic construct
  source 1..130: mol_type = other RNA
tttcaccaggaacatgtaccgttttagagctagaaatagcaagttaaaataaggctagtccgttatcaacttgaaaaagtggcaccgagtcggtgctctggctttcccccaggtgtacatgttccttttt

SEQ ID NO: 573 - RNA, 130 nt, synthetic construct
  source 1..130: mol_type = other RNA
tttcaccaggaacatgtaccgttttagagctagaaatagcaagttaaaataaggctagtccgttatcaacttgaaaaagtggcaccgagtcggtgcgctttcccccaggtgtacatgttcctggtgtttt

SEQ ID NO: 574 - RNA, 130 nt, synthetic construct
  source 1..130: mol_type = other RNA
tttcaccaggaacatgtaccgttttagagctagaaatagcaagttaaaataaggctagtccgttatcaacttgaaaaagtggcaccgagtcggtgctggctttcccccaggtgtacatgttcctggtttt

SEQ ID NO: 575 - RNA, 132 nt, synthetic construct
  source 1..132: mol_type = other RNA
tttcaccaggaacatgtaccgttttagagctagaaatagcaagttaaaataaggctagtccgttatcaacttgaaaaagtggcaccgagtcggtgctggctttcccccaggtgtacatgttcctggtgtttt

SEQ ID NO: 576 - RNA, 132 nt, synthetic construct
  source 1..132: mol_type = other RNA
tttcaccaggaacatgtaccgttttagagctagaaatagcaagttaaaataaggctagtccgttatcaacttgaaaaagtggcaccgagtcggtgctctggctttcccccaggtgtacatgttcctggtttt

SEQ ID NO: 577 - RNA, 134 nt, synthetic construct
  source 1..134: mol_type = other RNA
tttcaccaggaacatgtaccgttttagagctagaaatagcaagttaaaataaggctagtccgttatcaacttgaaaaagtggcaccgagtcggtgctctggctttcccccaggtgtacatgttcctggtgtttt

SEQ ID NO: 578 - RNA, 91 nt, synthetic construct
  source 1..91: mol_type = other RNA
tgggcttcctccagtgttttagagctagaaatagcaagttaaaataaggctagtccgttatcaacttgaaaaagtggcaccgagtcggtgc

SEQ ID NO: 579 - RNA, 91 nt, synthetic construct
  source 1..91: mol_type = other RNA
gcaaagcctctttgggttttagagctagaaatagcaagttaaaataaggctagtccgttatcaacttgaaaaagtggcaccgagtcggtgc

SEQ ID NO: 580 - RNA, 95 nt, synthetic construct
  source 1..95: mol_type = other RNA
tgggcttcctccagtgttttagagctagaaatagcaagttaaaataaggctagtccgttatcaacttgaaaaagtggcaccgagtcggtgctttt

SEQ ID NO: 581 - RNA, 95 nt, synthetic construct
  source 1..95: mol_type = other RNA
gcaaagcctctttgggttttagagctagaaatagcaagttaaaataaggctagtccgttatcaacttgaaaaagtggcaccgagtcggtgctttt

SEQ ID NO: 582 - RNA, 96 nt, synthetic construct
  source 1..96: mol_type = other RNA
agcctctttggaggctgaatgttttagagctagaaatagcaagttaaaataaggctagtccgttatcaacttgaaaaagtggcaccgagtcggtgc

SEQ ID NO: 583 - RNA, 96 nt, synthetic construct
  source 1..96: mol_type = other RNA
ggcttcctccagtgggtagtgttttagagctagaaatagcaagttaaaataaggctagtccgttatcaacttgaaaaagtggcaccgagtcggtgc

SEQ ID NO: 584 - RNA, 96 nt, synthetic construct
  source 1..96: mol_type = other RNA
acacagcaaagcctctttgggttttagagctagaaatagcaagttaaaataaggctagtccgttatcaacttgaaaaagtggcaccgagtcggtgc

SEQ ID NO: 585 - RNA, 96 nt, synthetic construct
  source 1..96: mol_type = other RNA
tgcacacagcaaagcctcttgttttagagctagaaatagcaagttaaaataaggctagtccgttatcaacttgaaaaagtggcaccgagtcggtgc

SEQ ID NO: 586 - RNA, 96 nt, synthetic construct
  source 1..96: mol_type = other RNA
aagcctctttggaggctgaagttttagagctagaaatagcaagttaaaataaggctagtccgttatcaacttgaaaaagtggcaccgagtcggtgc

SEQ ID NO: 587 - RNA, 96 nt, synthetic construct
  source 1..96: mol_type = other RNA
gcctctttggaggctgaatggttttagagctagaaatagcaagttaaaataaggctagtccgttatcaacttgaaaaagtggcaccgagtcggtgc

SEQ ID NO: 588 - RNA, 96 nt, synthetic construct
  source 1..96: mol_type = other RNA
tggtcctcaccccaatcctcgttttagagctagaaatagcaagttaaaataaggctagtccgttatcaacttgaaaaagtggcaccgagtcggtgc

SEQ ID NO: 589 - RNA, 96 nt, synthetic construct
  source 1..96: mol_type = other RNA
atcctctgggcttcctccaggttttagagctagaaatagcaagttaaaataaggctagtccgttatcaacttgaaaaagtggcaccgagtcggtgc

SEQ ID NO: 590 - RNA, 96 nt, synthetic construct
  source 1..96: mol_type = other RNA
ggtcctcaccccaatcctctgttttagagctagaaatagcaagttaaaataaggctagtccgttatcaacttgaaaaagtggcaccgagtcggtgc

SEQ ID NO: 591 - RNA, 96 nt, synthetic construct
  source 1..96: mol_type = other RNA
tcctctgggcttcctccagtgttttagagctagaaatagcaagttaaaataaggctagtccgttatcaacttgaaaaagtggcaccgagtcggtgc

SEQ ID NO: 592 - RNA, 96 nt, synthetic construct
  source 1..96: mol_type = other RNA
gggcttcctccagtgggtaggttttagagctagaaatagcaagttaaaataaggctagtccgttatcaacttgaaaaagtggcaccgagtcggtgc

SEQ ID NO: 593 - RNA, 96 nt, synthetic construct
  source 1..96: mol_type = other RNA
tgaatggggtcccccgactcgttttagagctagaaatagcaagttaaaataaggctagtccgttatcaacttgaaaaagtggcaccgagtcggtgc

SEQ ID NO: 594 - RNA, 96 nt, synthetic construct
  source 1..96: mol_type = other RNA
tccagtgggtagtgggatccgttttagagctagaaatagcaagttaaaataaggctagtccgttatcaacttgaaaaagtggcaccgagtcggtgc

SEQ ID NO: 595 - RNA, 96 nt, synthetic construct
  source 1..96: mol_type = other RNA
ccagtgggtagtgggatcctgttttagagctagaaatagcaagttaaaataaggctagtccgttatcaacttgaaaaagtggcaccgagtcggtgc

SEQ ID NO: 596 - RNA, 100 nt, synthetic construct
  source 1..100: mol_type = other RNA
gggcttcctccagtgggtaggttttagagctagaaatagcaagttaaaataaggctagtccgttatcaacttgaaaaagtggcaccgagtcggtgctttt

SEQ ID NO: 597 - RNA, 100 nt, synthetic construct
  source 1..100: mol_type = other RNA
tccagtgggtagtgggatccgttttagagctagaaatagcaagttaaaataaggctagtccgttatcaacttgaaaaagtggcaccgagtcggtgctttt

SEQ ID NO: 598 - RNA, 100 nt, synthetic construct
  source 1..100: mol_type = other RNA
tcctctgggcttcctccagtgttttagagctagaaatagcaagttaaaataaggctagtccgttatcaacttgaaaaagtggcaccgagtcggtgctttt

SEQ ID NO: 599 - RNA, 100 nt, synthetic construct
  source 1..100: mol_type = other RNA
tgcacacagcaaagcctcttgttttagagctagaaatagcaagttaaaataaggctagtccgttatcaacttgaaaaagtggcaccgagtcggtgctttt

SEQ ID NO: 600 - RNA, 100 nt, synthetic construct
  source 1..100: mol_type = other RNA
ggtcctcaccccaatcctctgttttagagctagaaatagcaagttaaaataaggctagtccgttatcaacttgaaaaagtggcaccgagtcggtgctttt

SEQ ID NO: 601 - RNA, 100 nt, synthetic construct
  source 1..100: mol_type = other RNA
atcctctgggcttcctccaggttttagagctagaaatagcaagttaaaataaggctagtccgttatcaacttgaaaaagtggcaccgagtcggtgctttt

SEQ ID NO: 602 - RNA, 100 nt, synthetic construct
  source 1..100: mol_type = other RNA
ggcttcctccagtgggtagtgttttagagctagaaatagcaagttaaaataaggctagtccgttatcaacttgaaaaagtggcaccgagtcggtgctttt

SEQ ID NO: 603 - RNA, 100 nt, synthetic construct
  source 1..100: mol_type = other RNA
gcctctttggaggctgaatggttttagagctagaaatagcaagttaaaataaggctagtccgttatcaacttgaaaaagtggcaccgagtcggtgctttt

SEQ ID NO: 604 - RNA, 100 nt, synthetic construct
  source 1..100: mol_type = other RNA
ccagtgggtagtgggatcctgttttagagctagaaatagcaagttaaaataaggctagtccgttatcaacttgaaaaagtggcaccgagtcggtgctttt

SEQ ID NO: 605 - RNA, 100 nt, synthetic construct
  source 1..100: mol_type = other RNA
aagcctctttggaggctgaagttttagagctagaaatagcaagttaaaataaggctagtccgttatcaacttgaaaaagtggcaccgagtcggtgctttt

SEQ ID NO: 606 - RNA, 100 nt, synthetic construct
  source 1..100: mol_type = other RNA
acacagcaaagcctctttgggttttagagctagaaatagcaagttaaaataaggctagtccgttatcaacttgaaaaagtggcaccgagtcggtgctttt

SEQ ID NO: 607 - RNA, 100 nt, synthetic construct
  source 1..100: mol_type = other RNA
agcctctttggaggctgaatgttttagagctagaaatagcaagttaaaataaggctagtccgttatcaacttgaaaaagtggcaccgagtcggtgctttt

SEQ ID NO: 608 - RNA, 100 nt, synthetic construct
  source 1..100: mol_type = other RNA
tggtcctcaccccaatcctcgttttagagctagaaatagcaagttaaaataaggctagtccgttatcaacttgaaaaagtggcaccgagtcggtgctttt

SEQ ID NO: 609 - RNA, 16 nt, synthetic construct
  source 1..16: mol_type = other RNA
gtgggtagtgggatcc

SEQ ID NO: 610 - RNA, 17 nt, synthetic construct
  source 1..17: mol_type = other RNA
agtgggtagtgggatcc

SEQ ID NO: 611 - RNA, 18 nt, synthetic construct
  source 1..18: mol_type = other RNA
cagtgggtagtgggatcc

SEQ ID NO: 612 - RNA, 19 nt, synthetic construct
  source 1..19: mol_type = other RNA
ccagtgggtagtgggatcc

SEQ ID NO: 613 - RNA, 20 nt, synthetic construct
  source 1..20: mol_type = other RNA
tccagtgggtagtgggatcc

SEQ ID NO: 614 - RNA, 21 nt, synthetic construct
  source 1..21: mol_type = other RNA
ctccagtgggtagtgggatcc

SEQ ID NO: 615 - RNA, 22 nt, synthetic construct
  source 1..22: mol_type = other RNA
cctccagtgggtagtgggatcc

SEQ ID NO: 616-622 - skipped (7 entries)

SEQ ID NO: 623 - RNA, 10 nt, synthetic construct
  source 1..10: mol_type = other RNA
tcccactacc

SEQ ID NO: 624 - RNA, 11 nt, synthetic construct
  source 1..11: mol_type = other RNA
tcccactaccc

SEQ ID NO: 625 - RNA, 12 nt, synthetic construct
  source 1..12: mol_type = other RNA
tcccactaccca

SEQ ID NO: 626 - RNA, 13 nt, synthetic construct
  source 1..13: mol_type = other RNA
tcccactacccac

SEQ ID NO: 627 - RNA, 14 nt, synthetic construct
  source 1..14: mol_type = other RNA
tcccactacccact

SEQ ID NO: 628 - RNA, 15 nt, synthetic construct
  source 1..15: mol_type = other RNA
tcccactacccactg

SEQ ID NO: 629 - RNA, 16 nt, synthetic construct
  source 1..16: mol_type = other RNA
tcccactacccactgg

SEQ ID NO: 630 - RNA, 17 nt, synthetic construct
  source 1..17: mol_type = other RNA
tcccactacccactgga

SEQ ID NO: 631 - RNA, 18 nt, synthetic construct
  source 1..18: mol_type = other RNA
tcccactacccactggag

SEQ ID NO: 632 - RNA, 19 nt, synthetic construct
  source 1..19: mol_type = other RNA
tcccactacccactggagg

SEQ ID NO: 633 - RNA, 70 nt, synthetic construct
  source 1..70: mol_type = other RNA
acctgggggaaagccagagtcgggggaccccattcagcctccaaagaggctttgctgtgtgcacccagga

SEQ ID NO: 634 - RNA, 71 nt, synthetic construct
  source 1..71: mol_type = other RNA
tacctgggggaaagccagagtcgggggaccccattcagcctccaaagaggctttgctgtgtgcacccagga

SEQ ID NO: 635 - RNA, 71 nt, synthetic construct
  source 1..71: mol_type = other RNA
cacctgggggaaagccagagtcgggggaccccattcagcctccaaagaggctttgctgtgtgcacccagga

SEQ ID NO: 636 - RNA, 71 nt, synthetic construct
  source 1..71: mol_type = other RNA
aacctgggggaaagccagagtcgggggaccccattcagcctccaaagaggctttgctgtgtgcacccagga

SEQ ID NO: 637 - RNA, 71 nt, synthetic construct
  source 1..71: mol_type = other RNA
gacctgggggaaagccagagtcgggggaccccattcagcctccaaagaggctttgctgtgtgcacccagga

SEQ ID NO: 638 - RNA, 72 nt, synthetic construct
  source 1..72: mol_type = other RNA
atacctgggggaaagccagagtcgggggaccccattcagcctccaaagaggctttgctgtgtgcacccagga

SEQ ID NO: 639 - RNA, 72 nt, synthetic construct
  source 1..72: mol_type = other RNA
agacctgggggaaagccagagtcgggggaccccattcagcctccaaagaggctttgctgtgtgcacccagga

SEQ ID NO: 640 - RNA, 72 nt, synthetic construct
  source 1..72: mol_type = other RNA
acacctgggggaaagccagagtcgggggaccccattcagcctccaaagaggctttgctgtgtgcacccagga

SEQ ID NO: 641 - RNA, 72 nt, synthetic construct
  source 1..72: mol_type = other RNA
aaacctgggggaaagccagagtcgggggaccccattcagcctccaaagaggctttgctgtgtgcacccagga

SEQ ID NO: 642 - RNA, 73 nt, synthetic construct
  source 1..73: mol_type = other RNA
taaacctgggggaaagccagagtcgggggaccccattcagcctccaaagaggctttgctgtgtgcacccagga

SEQ ID NO: 643 - RNA, 73 nt, synthetic construct
  source 1..73: mol_type = other RNA
tatacctgggggaaagccagagtcgggggaccccattcagcctccaaagaggctttgctgtgtgcacccagga

SEQ ID NO: 644 - RNA, 73 nt, synthetic construct
  source 1..73: mol_type = other RNA
tagacctgggggaaagccagagtcgggggaccccattcagcctccaaagaggctttgctgtgtgcacccagga

SEQ ID NO: 645 - RNA, 73 nt, synthetic construct
  source 1..73: mol_type = other RNA
tacacctgggggaaagccagagtcgggggaccccattcagcctccaaagaggctttgctgtgtgcacccagga

SEQ ID NO: 646 - RNA, 74 nt, synthetic construct
  source 1..74: mol_type = other RNA
gtacacctgggggaaagccagagtcgggggaccccattcagcctccaaagaggctttgctgtgtgcacccagga

SEQ ID NO: 647 - RNA, 74 nt, synthetic construct
  source 1..74: mol_type = other RNA
gtagacctgggggaaagccagagtcgggggaccccattcagcctccaaagaggctttgctgtgtgcacccagga

SEQ ID NO: 648 - RNA, 74 nt, synthetic construct
  source 1..74: mol_type = other RNA
gtatacctgggggaaagccagagtcgggggaccccattcagcctccaaagaggctttgctgtgtgcacccagga

SEQ ID NO: 649 - RNA, 74 nt, synthetic construct
  source 1..74: mol_type = other RNA
gtaaacctgggggaaagccagagtcgggggaccccattcagcctccaaagaggctttgctgtgtgcacccagga

SEQ ID NO: 650 - RNA, 75 nt, synthetic construct
  source 1..75: mol_type = other RNA
tgtatacctgggggaaagccagagtcgggggaccccattcagcctccaaagaggctttgctgtgtgcacccagga

SEQ ID NO: 651 - RNA, 75 nt, synthetic construct
  source 1..75: mol_type = other RNA
tgtagacctgggggaaagccagagtcgggggaccccattcagcctccaaagaggctttgctgtgtgcacccagga

SEQ ID NO: 652 - RNA, 75 nt, synthetic construct
  source 1..75: mol_type = other RNA
tgtacacctgggggaaagccagagtcgggggaccccattcagcctccaaagaggctttgctgtgtgcacccagga

SEQ ID NO: 653 - RNA, 75 nt, synthetic construct
  source 1..75: mol_type = other RNA
tgtaaacctgggggaaagccagagtcgggggaccccattcagcctccaaagaggctttgctgtgtgcacccagga

SEQ ID NO: 654 - RNA, 76 nt, synthetic construct
  source 1..76: mol_type = other RNA
atgtaaacctgggggaaagccagagtcgggggaccccattcagcctccaaagaggctttgctgtgtgcacccagga

SEQ ID NO: 655 - RNA, 76 nt, synthetic construct
  source 1..76: mol_type = other RNA
atgtagacctgggggaaagccagagtcgggggaccccattcagcctccaaagaggctttgctgtgtgcacccagga

SEQ ID NO: 656 - RNA, 76 nt, synthetic construct
  source 1..76: mol_type = other RNA
atgtatacctgggggaaagccagagtcgggggaccccattcagcctccaaagaggctttgctgtgtgcacccagga

SEQ ID NO: 657 - RNA, 76 nt, synthetic construct
  source 1..76: mol_type = other RNA
atgtacacctgggggaaagccagagtcgggggaccccattcagcctccaaagaggctttgctgtgtgcacccagga

SEQ ID NO: 658 - RNA, 77 nt, synthetic construct
  source 1..77: mol_type = other RNA
catgtacacctgggggaaagccagagtcgggggaccccattcagcctccaaagaggctttgctgtgtgcacccagga

SEQ ID NO: 659 - RNA, 77 nt, synthetic construct
  source 1..77: mol_type = other RNA
catgtagacctgggggaaagccagagtcgggggaccccattcagcctccaaagaggctttgctgtgtgcacccagga

SEQ ID NO: 660 - RNA, 77 nt, synthetic construct
  source 1..77: mol_type = other RNA
catgtaaacctgggggaaagccagagtcgggggaccccattcagcctccaaagaggctttgctgtgtgcacccagga

SEQ ID NO: 661 - RNA, 77 nt, synthetic construct
  source 1..77: mol_type = other RNA
catgtatacctgggggaaagccagagtcgggggaccccattcagcctccaaagaggctttgctgtgtgcacccagga

SEQ ID NO: 662 - RNA, 78 nt, synthetic construct
  source 1..78: mol_type = other RNA
acatgtatacctgggggaaagccagagtcgggggaccccattcagcctccaaagaggctttgctgtgtgcacccagga

SEQ ID NO: 663 - RNA, 78 nt, synthetic construct
  source 1..78: mol_type = other RNA
acatgtaaacctgggggaaagccagagtcgggggaccccattcagcctccaaagaggctttgctgtgtgcacccagga

SEQ ID NO: 664 - RNA, 78 nt, synthetic construct
  source 1..78: mol_type = other RNA
acatgtagacctgggggaaagccagagtcgggggaccccattcagcctccaaagaggctttgctgtgtgcacccagga

SEQ ID NO: 665 - RNA, 78 nt, synthetic construct
  source 1..78: mol_type = other RNA
acatgtacacctgggggaaagccagagtcgggggaccccattcagcctccaaagaggctttgctgtgtgcacccagga

SEQ ID NO: 666 - RNA, 79 nt, synthetic construct
  source 1..79: mol_type = other RNA
aacatgtagacctgggggaaagccagagtcgggggaccccattcagcctccaaagaggctttgctgtgtgcacccagga

SEQ ID NO: 667 - RNA, 79 nt, synthetic construct
  source 1..79: mol_type = other RNA
aacatgtaaacctgggggaaagccagagtcgggggaccccattcagcctccaaagaggctttgctgtgtgcacccagga

SEQ ID NO: 668 - RNA, 79 nt, synthetic construct
  source 1..79: mol_type = other RNA
aacatgtacacctgggggaaagccagagtcgggggaccccattcagcctccaaagaggctttgctgtgtgcacccagga

SEQ ID NO: 669 - RNA, 79 nt, synthetic construct
  source 1..79: mol_type = other RNA
aacatgtatacctgggggaaagccagagtcgggggaccccattcagcctccaaagaggctttgctgtgtgcacccagga

SEQ ID NO: 670 - RNA, 80 nt, synthetic construct
  source 1..80: mol_type = other RNA
gaacatgtacacctgggggaaagccagagtcgggggaccccattcagcctccaaagaggctttgctgtgtgcacccagga

SEQ ID NO: 671 - RNA, 80 nt, synthetic construct
  source 1..80: mol_type = other RNA
gaacatgtaaacctgggggaaagccagagtcgggggaccccattcagcctccaaagaggctttgctgtgtgcacccagga

SEQ ID NO: 672 - RNA, 80 nt, synthetic construct
  source 1..80: mol_type = other RNA
gaacatgtagacctgggggaaagccagagtcgggggaccccattcagcctccaaagaggctttgctgtgtgcacccagga

SEQ ID NO: 673 - RNA, 80 nt, synthetic construct
  source 1..80: mol_type = other RNA
gaacatgtatacctgggggaaagccagagtcgggggaccccattcagcctccaaagaggctttgctgtgtgcacccagga

SEQ ID NO: 674 - RNA, 81 nt, synthetic construct
  source 1..81: mol_type = other RNA
ggaacatgtaaacctgggggaaagccagagtcgggggaccccattcagcctccaaagaggctttgctgtgtgcacccagga

SEQ ID NO: 675 - RNA, 81 nt, synthetic construct
  source 1..81: mol_type = other RNA
ggaacatgtacacctgggggaaagccagagtcgggggaccccattcagcctccaaagaggctttgctgtgtgcacccagga

SEQ ID NO: 676 - RNA, 81 nt, synthetic construct
  source 1..81: mol_type = other RNA
ggaacatgtatacctgggggaaagccagagtcgggggaccccattcagcctccaaagaggctttgctgtgtgcacccagga

SEQ ID NO: 677 - RNA, 81 nt, synthetic construct
  source 1..81: mol_type = other RNA
ggaacatgtagacctgggggaaagccagagtcgggggaccccattcagcctccaaagaggctttgctgtgtgcacccagga

SEQ ID NO: 678 - RNA, 82 nt, synthetic construct
  source 1..82: mol_type = other RNA
aggaacatgtacacctgggggaaagccagagtcgggggaccccattcagcctccaaagaggctttgctgtgtgcacccagga

SEQ ID NO: 679 - RNA, 82 nt, synthetic construct
  source 1..82: mol_type = other RNA
aggaacatgtagacctgggggaaagccagagtcgggggaccccattcagcctccaaagaggctttgctgtgtgcacccagga

SEQ ID NO: 680 - RNA, 82 nt, synthetic construct
  source 1..82: mol_type = other RNA
aggaacatgtaaacctgggggaaagccagagtcgggggaccccattcagcctccaaagaggctttgctgtgtgcacccagga

SEQ ID NO: 681 - RNA, 82 nt, synthetic construct
  source 1..82: mol_type = other RNA
aggaacatgtatacctgggggaaagccagagtcgggggaccccattcagcctccaaagaggctttgctgtgtgcacccagga

SEQ ID NO: 682 - RNA, 83 nt, synthetic construct
  source 1..83: mol_type = other RNA
caggaacatgtatacctgggggaaagccagagtcgggggaccccattcagcctccaaagaggctttgctgtgtgcacccagga

SEQ ID NO: 683 - RNA, 83 nt, synthetic construct
  source 1..83: mol_type = other RNA
caggaacatgtagacctgggggaaagccagagtcgggggaccccattcagcctccaaagaggctttgctgtgtgcacccagga

SEQ ID NO: 684 - RNA, 83 nt, synthetic construct
  source 1..83: mol_type = other RNA
caggaacatgtacacctgggggaaagccagagtcgggggaccccattcagcctccaaagaggctttgctgtgtgcacccagga

SEQ ID NO: 685 - RNA, 83 nt, synthetic construct
  source 1..83: mol_type = other RNA
caggaacatgtaaacctgggggaaagccagagtcgggggaccccattcagcctccaaagaggctttgctgtgtgcacccagga

SEQ ID NO: 686 - RNA, 84 nt, synthetic construct
  source 1..84: mol_type = other RNA
ccaggaacatgtaaacctgggggaaagccagagtcgggggaccccattcagcctccaaagaggctttgctgtgtgcacccagga

SEQ ID NO: 687 - RNA, 84 nt, synthetic construct
  source 1..84: mol_type = other RNA
ccaggaacatgtatacctgggggaaagccagagtcgggggaccccattcagcctccaaagaggctttgctgtgtgcacccagga

SEQ ID NO: 688 - RNA, 84 nt, synthetic construct
  source 1..84: mol_type = other RNA
ccaggaacatgtacacctgggggaaagccagagtcgggggaccccattcagcctccaaagaggctttgctgtgtgcacccagga

SEQ ID NO: 689 - RNA, 84 nt, synthetic construct
  source 1..84: mol_type = other RNA
ccaggaacatgtagacctgggggaaagccagagtcgggggaccccattcagcctccaaagaggctttgctgtgtgcacccagga

SEQ ID NO: 690 - RNA, 85 nt, synthetic construct
  source 1..85: mol_type = other RNA
accaggaacatgtagacctgggggaaagccagagtcgggggaccccattcagcctccaaagaggctttgctgtgtgcacccagga

SEQ ID NO: 691 - RNA, 85 nt, synthetic construct
  source 1..85: mol_type = other RNA
accaggaacatgtacacctgggggaaagccagagtcgggggaccccattcagcctccaaagaggctttgctgtgtgcacccagga

SEQ ID NO: 692 - RNA, 85 nt, synthetic construct
  source 1..85: mol_type = other RNA
accaggaacatgtaaacctgggggaaagccagagtcgggggaccccattcagcctccaaagaggctttgctgtgtgcacccagga

SEQ ID NO: 693 - RNA, 85 nt, synthetic construct
  source 1..85: mol_type = other RNA
accaggaacatgtatacctgggggaaagccagagtcgggggaccccattcagcctccaaagaggctttgctgtgtgcacccagga

SEQ ID NO: 694 - RNA, 86 nt, synthetic construct
  source 1..86: mol_type = other RNA
caccaggaacatgtatacctgggggaaagccagagtcgggggaccccattcagcctccaaagaggctttgctgtgtgcacccagga

SEQ ID NO: 695 - RNA, 86 nt, synthetic construct
  source 1..86: mol_type = other RNA
caccaggaacatgtaaacctgggggaaagccagagtcgggggaccccattcagcctccaaagaggctttgctgtgtgcacccagga

SEQ ID NO: 696 - RNA, 86 nt, synthetic construct
  source 1..86: mol_type = other RNA
caccaggaacatgtagacctgggggaaagccagagtcgggggaccccattcagcctccaaagaggctttgctgtgtgcacccagga

SEQ ID NO: 697 - RNA, 86 nt, synthetic construct
  source 1..86: mol_type = other RNA
caccaggaacatgtacacctgggggaaagccagagtcgggggaccccattcagcctccaaagaggctttgctgtgtgcacccagga

SEQ ID NO: 698 - RNA, 87 nt, synthetic construct
  source 1..87: mol_type = other RNA
tcaccaggaacatgtatacctgggggaaagccagagtcgggggaccccattcagcctccaaagaggctttgctgtgtgcacccagga

SEQ ID NO: 699 - RNA, 87 nt, synthetic construct
  source 1..87: mol_type = other RNA
tcaccaggaacatgtagacctgggggaaagccagagtcgggggaccccattcagcctccaaagaggctttgctgtgtgcacccagga

SEQ ID NO: 700 - RNA, 87 nt, synthetic construct
  source 1..87: mol_type = other RNA
tcaccaggaacatgtaaacctgggggaaagccagagtcgggggaccccattcagcctccaaagaggctttgctgtgtgcacccagga

SEQ ID NO: 701 - RNA, 87 nt, synthetic construct
  source 1..87: mol_type = other RNA
tcaccaggaacatgtacacctgggggaaagccagagtcgggggaccccattcagcctccaaagaggctttgctgtgtgcacccagga

SEQ ID NO: 702 - RNA, 88 nt, synthetic construct
  source 1..88: mol_type = other RNA
ttcaccaggaacatgtaaacctgggggaaagccagagtcgggggaccccattcagcctccaaagaggctttgctgtgtgcacccagga

SEQ ID NO: 703 - RNA, 88 nt, synthetic construct
  source 1..88: mol_type = other RNA
ttcaccaggaacatgtacacctgggggaaagccagagtcgggggaccccattcagcctccaaagaggctttgctgtgtgcacccagga

SEQ ID NO: 704 - RNA, 88 nt, synthetic construct
  source 1..88: mol_type = other RNA
ttcaccaggaacatgtagacctgggggaaagccagagtcgggggaccccattcagcctccaaagaggctttgctgtgtgcacccagga

SEQ ID NO: 705 - RNA, 88 nt, synthetic construct
  source 1..88: mol_type = other RNA
ttcaccaggaacatgtatacctgggggaaagccagagtcgggggaccccattcagcctccaaagaggctttgctgtgtgcacccagga

SEQ ID NO: 706 - RNA, 89 nt, synthetic construct
  source 1..89: mol_type = other RNA
tttcaccaggaacatgtaaacctgggggaaagccagagtcgggggaccccattcagcctccaaagaggctttgctgtgtgcacccagga

SEQ ID NO: 707 - RNA, 89 nt, synthetic construct
  source 1..89: mol_type = other RNA
tttcaccaggaacatgtagacctgggggaaagccagagtcgggggaccccattcagcctccaaagaggctttgctgtgtgcacccagga

SEQ ID NO: 708 - RNA, 89 nt, synthetic construct
  source 1..89: mol_type = other RNA
tttcaccaggaacatgtatacctgggggaaagccagagtcgggggaccccattcagcctccaaagaggctttgctgtgtgcacccagga

SEQ ID NO: 709 - RNA, 89 nt, synthetic construct
  source 1..89: mol_type = other RNA
tttcaccaggaacatgtacacctgggggaaagccagagtcgggggaccccattcagcctccaaagaggctttgctgtgtgcacccagga

SEQ ID NO: 710 - RNA, 90 nt, synthetic construct
  source 1..90: mol_type = other RNA
atttcaccaggaacatgtacacctgggggaaagccagagtcgggggaccccattcagcctccaaagaggctttgctgtgtgcacccagga

SEQ ID NO: 711 - RNA, 90 nt, synthetic construct
  source 1..90: mol_type = other RNA
atttcaccaggaacatgtaaacctgggggaaagccagagtcgggggaccccattcagcctccaaagaggctttgctgtgtgcacccagga

SEQ ID NO: 712 - RNA, 90 nt, synthetic construct
  source 1..90: mol_type = other RNA
atttcaccaggaacatgtatacctgggggaaagccagagtcgggggaccccattcagcctccaaagaggctttgctgtgtgcacccagga

SEQ ID NO: 713 - RNA, 90 nt, synthetic construct
  source 1..90: mol_type = other RNA
atttcaccaggaacatgtagacctgggggaaagccagagtcgggggaccccattcagcctccaaagaggctttgctgtgtgcacccagga

SEQ ID NO: 714 - RNA, 91 nt, synthetic construct
  source 1..91: mol_type = other RNA
catttcaccaggaacatgtacacctgggggaaagccagagtcgggggaccccattcagcctccaaagaggctttgctgtgtgcacccagga

SEQ ID NO: 715 - RNA, 91 nt, synthetic construct
  source 1..91: mol_type = other RNA
catttcaccaggaacatgtatacctgggggaaagccagagtcgggggaccccattcagcctccaaagaggctttgctgtgtgcacccagga

SEQ ID NO: 716 - RNA, 91 nt, synthetic construct
  source 1..91: mol_type = other RNA
catttcaccaggaacatgtaaacctgggggaaagccagagtcgggggaccccattcagcctccaaagaggctttgctgtgtgcacccagga

SEQ ID NO: 717 - RNA, 91 nt, synthetic construct
  source 1..91: mol_type = other RNA
catttcaccaggaacatgtagacctgggggaaagccagagtcgggggaccccattcagcctccaaagaggctttgctgtgtgcacccagga

SEQ ID NO: 718 - RNA, 92 nt, synthetic construct
  source 1..92: mol_type = other RNA
ccatttcaccaggaacatgtaaacctgggggaaagccagagtcgggggaccccattcagcctccaaagaggctttgctgtgtgcacccagga

SEQ ID NO: 719 - RNA, 92 nt, synthetic construct
  source 1..92: mol_type = other RNA
ccatttcaccaggaacatgtacacctgggggaaagccagagtcgggggaccccattcagcctccaaagaggctttgctgtgtgcacccagga

SEQ ID NO: 720 - RNA, 92 nt, synthetic construct
  source 1..92: mol_type = other RNA
ccatttcaccaggaacatgtagacctgggggaaagccagagtcgggggaccccattcagcctccaaagaggctttgctgtgtgcacccagga

SEQ ID NO: 721 - RNA, 92 nt, synthetic construct
  source 1..92: mol_type = other RNA
ccatttcaccaggaacatgtatacctgggggaaagccagagtcgggggaccccattcagcctccaaagaggctttgctgtgtgcacccagga

SEQ ID NO: 722 - RNA, 93 nt, synthetic construct
  source 1..93: mol_type = other RNA
gccatttcaccaggaacatgtagacctgggggaaagccagagtcgggggaccccattcagcctccaaagaggctttgctgtgtgcacccagga

SEQ ID NO: 723 - RNA, 93 nt, synthetic construct
  source 1..93: mol_type = other RNA
gccatttcaccaggaacatgtatacctgggggaaagccagagtcgggggaccccattcagcctccaaagaggctttgctgtgtgcacccagga

SEQ ID NO: 724 - RNA, 93 nt, synthetic construct
  source 1..93: mol_type = other RNA
gccatttcaccaggaacatgtaaacctgggggaaagccagagtcgggggaccccattcagcctccaaagaggctttgctgtgtgcacccagga

SEQ ID NO: 725 - RNA, 93 nt, synthetic construct
  source 1..93: mol_type = other RNA
gccatttcaccaggaacatgtacacctgggggaaagccagagtcgggggaccccattcagcctccaaagaggctttgctgtgtgcacccagga

SEQ ID NO: 726 - RNA, 94 nt, synthetic construct
  source 1..94: mol_type = other RNA
tgccatttcaccaggaacatgtagacctgggggaaagccagagtcgggggaccccattcagcctccaaagaggctttgctgtgtgcacccagga

SEQ ID NO: 727 - RNA, 94 nt, synthetic construct
  source 1..94: mol_type = other RNA
tgccatttcaccaggaacatgtaaacctgggggaaagccagagtcgggggaccccattcagcctccaaagaggctttgctgtgtgcacccagga

SEQ ID NO: 728 - RNA, 94 nt, synthetic construct
  source 1..94: mol_type = other RNA
tgccatttcaccaggaacatgtatacctgggggaaagccagagtcgggggaccccattcagcctccaaagaggctttgctgtgtgcacccagga

SEQ ID NO: 729 - RNA, 94 nt, synthetic construct
  source 1..94: mol_type = other RNA
tgccatttcaccaggaacatgtacacctgggggaaagccagagtcgggggaccccattcagcctccaaagaggctttgctgtgtgcacccagga

SEQ ID NO: 730 - RNA, 95 nt, synthetic construct
  source 1..95: mol_type = other RNA
ctgccatttcaccaggaacatgtatacctgggggaaagccagagtcgggggaccccattcagcctccaaagaggctttgctgtgtgcacccagga

SEQ ID NO: 731 - RNA, 95 nt, synthetic construct
  source 1..95: mol_type = other RNA
ctgccatttcaccaggaacatgtagacctgggggaaagccagagtcgggggaccccattcagcctccaaagaggctttgctgtgtgcacccagga

SEQ ID NO: 732 - RNA, 95 nt, synthetic construct
  source 1..95: mol_type = other RNA
ctgccatttcaccaggaacatgtaaacctgggggaaagccagagtcgggggaccccattcagcctccaaagaggctttgctgtgtgcacccagga

SEQ ID NO: 733 - RNA, 95 nt, synthetic construct
  source 1..95: mol_type = other RNA
ctgccatttcaccaggaacatgtacacctgggggaaagccagagtcgggggaccccattcagcctccaaagaggctttgctgtgtgcacccagga

SEQ ID NO: 734 - RNA, 96 nt, synthetic construct
  source 1..96: mol_type = other RNA
cctgccatttcaccaggaacatgtaaacctgggggaaagccagagtcgggggaccccattcagcctccaaagaggctttgctgtgtgcacccagga

SEQ ID NO: 735 - RNA, 96 nt, synthetic construct
  source 1..96: mol_type = other RNA
cctgccatttcaccaggaacatgtacacctgggggaaagccagagtcgggggaccccattcagcctccaaagaggctttgctgtgtgcacccagga

SEQ ID NO: 736 - RNA, 96 nt, synthetic construct
  source 1..96: mol_type = other RNA
cctgccatttcaccaggaacatgtagacctgggggaaagccagagtcgggggaccccattcagcctccaaagaggctttgctgtgtgcacccagga

SEQ ID NO: 737 - RNA, 96 nt, synthetic construct
  source 1..96: mol_type = other RNA
cctgccatttcaccaggaacatgtatacctgggggaaagccagagtcgggggaccccattcagcctccaaagaggctttgctgtgtgcacccagga

SEQ ID NO: 738 - RNA, 97 nt, synthetic construct
  source 1..97: mol_type = other RNA
tcctgccatttcaccaggaacatgtatacctgggggaaagccagagtcgggggaccccattcagcctccaaagaggctttgctgtgtgcacccagga

SEQ ID NO: 739 - RNA, 97 nt, synthetic construct
  source 1..97: mol_type = other RNA
tcctgccatttcaccaggaacatgtaaacctgggggaaagccagagtcgggggaccccattcagcctccaaagaggctttgctgtgtgcacccagga

SEQ ID NO: 740 - RNA, 97 nt, synthetic construct
  source 1..97: mol_type = other RNA
tcctgccatttcaccaggaacatgtagacctgggggaaagccagagtcgggggaccccattcagcctccaaagaggctttgctgtgtgcacccagga

SEQ ID NO: 741 - RNA, 97 nt, synthetic construct
  source 1..97: mol_type = other RNA
tcctgccatttcaccaggaacatgtacacctgggggaaagccagagtcgggggaccccattcagcctccaaagaggctttgctgtgtgcacccagga

SEQ ID NO: 742 - RNA, 98 nt, synthetic construct
  source 1..98: mol_type = other RNA
gtcctgccatttcaccaggaacatgtacacctgggggaaagccagagtcgggggaccccattcagcctccaaagaggctttgctgtgtgcacccagga

SEQ ID NO: 743 - RNA, 98 nt, synthetic construct
  source 1..98: mol_type = other RNA
gtcctgccatttcaccaggaacatgtaaacctgggggaaagccagagtcgggggaccccattcagcctccaaagaggctttgctgtgtgcacccagga

SEQ ID NO: 744 - RNA, 98 nt, synthetic construct
  source 1..98: mol_type = other RNA
gtcctgccatttcaccaggaacatgtatacctgggggaaagccagagtcgggggaccccattcagcctccaaagaggctttgctgtgtgcacccagga

SEQ ID NO: 745 - RNA, 98 nt, synthetic construct
  source 1..98: mol_type = other RNA
gtcctgccatttcaccaggaacatgtagacctgggggaaagccagagtcgggggaccccattcagcctccaaagaggctttgctgtgtgcacccagga

SEQ ID NO: 746 - RNA, 99 nt, synthetic construct
  source 1..99: mol_type = other RNA
ggtcctgccatttcaccaggaacatgtaaacctgggggaaagccagagtcgggggaccccattcagcctccaaagaggctttgctgtgtgcacccagga

SEQ ID NO: 747 - RNA, 99 nt, synthetic construct
  source 1..99: mol_type = other RNA
ggtcctgccatttcaccaggaacatgtacacctgggggaaagccagagtcgggggaccccattcagcctccaaagaggctttgctgtgtgcacccagga

SEQ ID NO: 748 - RNA, 99 nt, synthetic construct
  source 1..99: mol_type = other RNA
ggtcctgccatttcaccaggaacatgtatacctgggggaaagccagagtcgggggaccccattcagcctccaaagaggctttgctgtgtgcacccagga

SEQ ID NO: 749 - RNA, 99 nt, synthetic construct
  source 1..99: mol_type = other RNA
ggtcctgccatttcaccaggaacatgtagacctgggggaaagccagagtcgggggaccccattcagcctccaaagaggctttgctgtgtgcacccagga

SEQ ID NO: 750 - RNA, 100 nt, synthetic construct
  source 1..100: mol_type = other RNA
aggtcctgccatttcaccaggaacatgtaaacctgggggaaagccagagtcgggggaccccattcagcctccaaagaggctttgctgtgtgcacccagga

SEQ ID NO: 751 - RNA, 100 nt, synthetic construct
  source 1..100: mol_type = other RNA
aggtcctgccatttcaccaggaacatgtatacctgggggaaagccagagtcgggggaccccattcagcctccaaagaggctttgctgtgtgcacccagga

SEQ ID NO: 752 - RNA, 100 nt, synthetic construct
  source 1..100: mol_type = other RNA
aggtcctgccatttcaccaggaacatgtacacctgggggaaagccagagtcgggggaccccattcagcctccaaagaggctttgctgtgtgcacccagga

SEQ ID NO: 753 - RNA, 100 nt, synthetic construct
  source 1..100: mol_type = other RNA
aggtcctgccatttcaccaggaacatgtagacctgggggaaagccagagtcgggggaccccattcagcctccaaagaggctttgctgtgtgcacccagga

SEQ ID NO: 754 - RNA, 101 nt, synthetic construct
  source 1..101: mol_type = other RNA
caggtcctgccatttcaccaggaacatgtacacctgggggaaagccagagtcgggggaccccattcagcctccaaagaggctttgctgtgtgcacccagga

SEQ ID NO: 755 - RNA, 101 nt, synthetic construct
  source 1..101: mol_type = other RNA
caggtcctgccatttcaccaggaacatgtatacctgggggaaagccagagtcgggggaccccattcagcctccaaagaggctttgctgtgtgcacccagga

SEQ ID NO: 756 - RNA, 101 nt, synthetic construct
  source 1..101: mol_type = other RNA
caggtcctgccatttcaccaggaacatgtaaacctgggggaaagccagagtcgggggaccccattcagcctccaaagaggctttgctgtgtgcacccagga

SEQ ID NO: 757 - RNA, 101 nt, synthetic construct
  source 1..101: mol_type = other RNA
caggtcctgccatttcaccaggaacatgtagacctgggggaaagccagagtcgggggaccccattcagcctccaaagaggctttgctgtgtgcacccagga

SEQ ID NO: 758 - RNA, 102 nt, synthetic construct
  source 1..102: mol_type = other RNA
acaggtcctgccatttcaccaggaacatgtacacctgggggaaagccagagtcgggggaccccattcagcctccaaagaggctttgctgtgtgcacccagga

SEQ ID NO: 759 - RNA, 102 nt, synthetic construct
  source 1..102: mol_type = other RNA
acaggtcctgccatttcaccaggaacatgtatacctgggggaaagccagagtcgggggaccccattcagcctccaaagaggctttgctgtgtgcacccagga

SEQ ID NO: 760 - RNA, 102 nt, synthetic construct
  source 1..102: mol_type = other RNA
acaggtcctgccatttcaccaggaacatgtaaacctgggggaaagccagagtcgggggaccccattcagcctccaaagaggctttgctgtgtgcacccagga

SEQ ID NO: 761 - RNA, 102 nt, synthetic construct
  source 1..102: mol_type = other RNA
acaggtcctgccatttcaccaggaacatgtagacctgggggaaagccagagtcgggggaccccattcagcctccaaagaggctttgctgtgtgcacccagga

SEQ ID NO: 762 - RNA, 103 nt, synthetic construct
  source 1..103: mol_type = other RNA
gacaggtcctgccatttcaccaggaacatgtatacctgggggaaagccagagtcgggggaccccattcagcctccaaagaggctttgctgtgtgcacccagga

SEQ ID NO: 763 - RNA, 103 nt, synthetic construct
  source 1..103: mol_type = other RNA
gacaggtcctgccatttcaccaggaacatgtaaacctgggggaaagccagagtcgggggaccccattcagcctccaaagaggctttgctgtgtgcacccagga

SEQ ID NO: 764 - RNA, 103 nt, synthetic construct
  source 1..103: mol_type = other RNA
gacaggtcctgccatttcaccaggaacatgtacacctgggggaaagccagagtcgggggaccccattcagcctccaaagaggctttgctgtgtgcacccagga

SEQ ID NO: 765 - RNA, 103 nt, synthetic construct
  source 1..103: mol_type = other RNA
gacaggtcctgccatttcaccaggaacatgtagacctgggggaaagccagagtcgggggaccccattcagcctccaaagaggctttgctgtgtgcacccagga

SEQ ID NO: 766 - RNA, 16 nt, synthetic construct
  source 1..16: mol_type = other RNA
ggaacatgtacacctg

SEQ ID NO: 767 - RNA, 17 nt, synthetic construct
  source 1..17: mol_type = other RNA
caggaacatgtacacct

SEQ ID NO: 768 - RNA, 17 nt, synthetic construct
  source 1..17: mol_type = other RNA
aggaacatgtacacctg

SEQ ID NO: 769 - RNA, 17 nt, synthetic construct
  source 1..17: mol_type = other RNA
ggaacatgtacacctgg

SEQ ID NO: 770 - RNA, 17 nt, synthetic construct
  source 1..17: mol_type = other RNA
ccaggaacatgtacacc

SEQ ID NO: 771 - RNA, 19 nt, synthetic construct
  source 1..19: mol_type = other RNA
ccccattcagcctccaaag

SEQ ID NO: 772 - RNA, 19 nt, synthetic construct
  source 1..19: mol_type = other RNA
caggtcctgccatttcacc

SEQ ID NO: 773 - RNA, 19 nt, synthetic construct
  source 1..19: mol_type = other RNA
agagtcgggggaccccatt

SEQ ID NO: 774 - RNA, 19 nt, synthetic construct
  source 1..19: mol_type = other RNA
aggtcctgccatttcacca

SEQ ID NO: 775 - RNA, 19 nt, synthetic construct
  source 1..19: mol_type = other RNA
aggctttgctgtgtgcacc

SEQ ID NO: 776 - RNA, 19 nt, synthetic construct
  source 1..19: mol_type = other RNA
cctgggggaaagccagagt

SEQ ID NO: 777 - RNA, 19 nt, synthetic construct
  source 1..19: mol_type = other RNA
acaggtcctgccatttcac

SEQ ID NO: 778 - RNA, 19 nt, synthetic construct
  source 1..19: mol_type = other RNA
ctgggggaaagccagagtc

SEQ ID NO: 779 - RNA, 19 nt, synthetic construct
  source 1..19: mol_type = other RNA
gctttgctgtgtgcaccca

SEQ ID NO: 780 - RNA, 19 nt, synthetic construct
  source 1..19: mol_type = other RNA
ggctttgctgtgtgcaccc

SEQ ID NO: 781 - RNA, 19 nt, synthetic construct
  source 1..19: mol_type = other RNA
accccattcagcctccaaa

SEQ ID NO: 782 - RNA, 19 nt, synthetic construct
  source 1..19: mol_type = other RNA
gaccccattcagcctccaa

SEQ ID NO: 783 - RNA, 19 nt, synthetic construct
  source 1..19: mol_type = other RNA
tgtacacctgggggaaagc

SEQ ID NO: 784 - RNA, 19 nt, synthetic construct
  source 1..19: mol_type = other RNA
gggggaaagccagagtcgg

SEQ ID NO: 785 - RNA, 19 nt, synthetic construct
  source 1..19: mol_type = other RNA
ggaccccattcagcctcca

SEQ ID NO: 786 - RNA, 19 nt, synthetic construct
  source 1..19: mol_type = other RNA
tgtatacctgggggaaagc

SEQ ID NO: 787 - RNA, 19 nt, synthetic construct
  source 1..19: mol_type = other RNA
tgggggaaagccagagtcg

SEQ ID NO: 788 - RNA, 19 nt, synthetic construct
  source 1..19: mol_type = other RNA
tatacctgggggaaagcca

SEQ ID NO: 789 - RNA, 19 nt, synthetic construct
  source 1..19: mol_type = other RNA
tacacctgggggaaagcca

SEQ ID NO: 790 - RNA, 19 nt, synthetic construct
  source 1..19: mol_type = other RNA
gtagaccaccttctccgac

SEQ ID NO: 791 - RNA, 20 nt, synthetic construct
  source 1..20: mol_type = other RNA
tgtagacctgggggaaagcc

SEQ ID NO: 792 - RNA, 20 nt, synthetic construct
  source 1..20: mol_type = other RNA
accaggaacatgtatacctg

SEQ ID NO: 793 - RNA, 20 nt, synthetic construct
  source 1..20: mol_type = other RNA
agagtcgggggaccccattc

SEQ ID NO: 794 - RNA, 20 nt, synthetic construct
  source 1..20: mol_type = other RNA
caggtcctgccatttcacca

SEQ ID NO: 795 - RNA, 20 nt, synthetic construct
  source 1..20: mol_type = other RNA
ctgggggaaagccagagtcg

SEQ ID NO: 796 - RNA, 20 nt, synthetic construct
  source 1..20: mol_type = other RNA
ctgccatttcaccaggaaca

SEQ ID NO: 797 - RNA, 20 nt, synthetic construct
  source 1..20: mol_type = other RNA
tgggggaaagccagagtcgg

SEQ ID NO: 798 - RNA, 20 nt, synthetic construct
  source 1..20: mol_type = other RNA
accccattcagcctccaaag

SEQ ID NO: 799 - RNA, 20 nt, synthetic construct
  source 1..20: mol_type = other RNA
gacaggtcctgccatttcac

SEQ ID NO: 800 - RNA, 20 nt, synthetic construct
  source 1..20: mol_type = other RNA
tcaccaggaacatgtatacc

SEQ ID NO: 801 - RNA, 20 nt, synthetic construct
  source 1..20: mol_type = other RNA
ccaggaacatgtatacctgg

SEQ ID NO: 802 - RNA, 20 nt, synthetic construct
  source 1..20: mol_type = other RNA
ccaggaacatgtagacctgg

SEQ ID NO: 803 - RNA, 20 nt, synthetic construct
  source 1..20: mol_type = other RNA
ccaggaacatgtacacctgg

SEQ ID NO: 804 - RNA, 20 nt, synthetic construct
  source 1..20: mol_type = other RNA
ccaggaacatgtaaacctgg

SEQ ID NO: 805 - RNA, 20 nt, synthetic construct
  source 1..20: mol_type = other RNA
agcctccaaagaggctttgc

SEQ ID NO: 806 - RNA, 20 nt, synthetic construct
  source 1..20: mol_type = other RNA
ccaccttctccgacaggtcc

SEQ ID NO: 807 - RNA, 20 nt, synthetic construct
  source 1..20: mol_type = other RNA
caggaacatgtatacctggg

SEQ ID NO: 808 - RNA, 20 nt, synthetic construct
  source 1..20: mol_type = other RNA
caccaggaacatgtagacct

SEQ ID NO: 809 - RNA, 20 nt, synthetic construct
  source 1..20: mol_type = other RNA
caggaacatgtagacctggg

SEQ ID NO: 810 - RNA, 20 nt, synthetic construct
  source 1..20: mol_type = other RNA
tcaccaggaacatgtaaacc

SEQ ID NO: 811 - RNA, 20 nt, synthetic construct
  source 1..20: mol_type = other RNA
tatacctgggggaaagccag

SEQ ID NO: 812 - RNA, 20 nt, synthetic construct
  source 1..20: mol_type = other RNA
aacatgtatacctgggggaa

SEQ ID NO: 813 - RNA, 20 nt, synthetic construct
  source 1..20: mol_type = other RNA
aacatgtagacctgggggaa

SEQ ID NO: 814 - RNA, 20 nt, synthetic construct
  source 1..20: mol_type = other RNA
ccccattcagcctccaaaga

SEQ ID NO: 815 - RNA, 20 nt, synthetic construct
  source 1..20: mol_type = other RNA
cctgggggaaagccagagtc

SEQ ID NO: 816 - RNA, 20 nt, synthetic construct
  source 1..20: mol_type = other RNA
ggaccccattcagcctccaa

SEQ ID NO: 817 - RNA, 20 nt, synthetic construct
  source 1..20: mol_type = other RNA
gaggctttgctgtgtgcacc

SEQ ID NO: 818 - RNA, 20 nt, synthetic construct
  source 1..20: mol_type = other RNA
gacctgggggaaagccagag

SEQ ID NO: 819 - RNA, 20 nt, synthetic construct
  source 1..20: mol_type = other RNA
acctgggggaaagccagagt

SEQ ID NO: 820 - RNA, 20 nt, synthetic construct
  source 1..20: mol_type = other RNA
gggggaaagccagagtcggg

SEQ ID NO: 821 - RNA, 20 nt, synthetic construct
  source 1..20: mol_type = other RNA
taaacctgggggaaagccag

SEQ ID NO: 822 - RNA, 20 nt, synthetic construct
  source 1..20: mol_type = other RNA
ggctttgctgtgtgcaccca

SEQ ID NO: 823 - RNA, 20 nt, synthetic construct
  source 1..20: mol_type = other RNA
tgtacacctgggggaaagcc

SEQ ID NO: 824 - RNA, 20 nt, synthetic construct
  source 1..20: mol_type = other RNA
tacacctgggggaaagccag

SEQ ID NO: 825 - RNA, 20 nt, synthetic construct
  source 1..20: mol_type = other RNA
tacctgggggaaagccagag

SEQ ID NO: 826 - RNA, 20 nt, synthetic construct
  source 1..20: mol_type = other RNA
tagacctgggggaaagccag

SEQ ID NO: 827 - RNA, 20 nt, synthetic construct
  source 1..20: mol_type = other RNA
gaccccattcagcctccaaa

SEQ ID NO: 828 - RNA, 20 nt, synthetic construct
  source 1..20: mol_type = other RNA
tcaccaggaacatgtagacc

SEQ ID NO: 829 - RNA, 20 nt, synthetic construct
  source 1..20: mol_type = other RNA
caggaacatgtacacctggg

SEQ ID NO: 830 - RNA, 20 nt, synthetic construct
  source 1..20: mol_type = other RNA
caggaacatgtaaacctggg

SEQ ID NO: 831 - RNA, 20 nt, synthetic construct
  source 1..20: mol_type = other RNA
cacctgggggaaagccagag

SEQ ID NO: 832 - RNA, 20 nt, synthetic construct
  source 1..20: mol_type = other RNA
caccaggaacatgtatacct

SEQ ID NO: 833 - RNA, 20 nt, synthetic construct
  source 1..20: mol_type = other RNA
caccaggaacatgtacacct

SEQ ID NO: 834 - RNA, 20 nt, synthetic construct
  source 1..20: mol_type = other RNA
cctccaaagaggctttgctg

SEQ ID NO: 835 - RNA, 20 nt, synthetic construct
  source 1..20: mol_type = other RNA
caccaggaacatgtaaacct

SEQ ID NO: 836 - RNA, 20 nt, synthetic construct
  source 1..20: mol_type = other RNA
aggctttgctgtgtgcaccc

SEQ ID NO: 837 - RNA, 20 nt, synthetic construct
  source 1..20: mol_type = other RNA
aacctgggggaaagccagag

SEQ ID NO: 838 - RNA, 20 nt, synthetic construct
  source 1..20: mol_type = other RNA
acaggtcctgccatttcacc

SEQ ID NO: 839 - RNA, 20 nt, synthetic construct
  source 1..20: mol_type = other RNA
accaggaacatgtacacctg

SEQ ID NO: 840 - RNA, 20 nt, synthetic construct
  source 1..20: mol_type = other RNA
accaggaacatgtaaacctg

SEQ ID NO: 841 - RNA, 20 nt, synthetic construct
  source 1..20: mol_type = other RNA
aaagggtggagctggaacgg

SEQ ID NO: 842 - RNA, 20 nt, synthetic construct
  source 1..20: mol_type = other RNA
tccttcccaaagggtggagc

SEQ ID NO: 843 - RNA, 20 nt, synthetic construct
  source 1..20: mol_type = other RNA
aagggtggagctggaacggt

SEQ ID NO: 844 - RNA, 20 nt, synthetic construct
  source 1..20: mol_type = other RNA
ttcagcctccaaagaggctt

SEQ ID NO: 845 - RNA, 20 nt, synthetic construct
  source 1..20: mol_type = other RNA
ttcaccaggaacatgtacac

SEQ ID NO: 846 - RNA, 20 nt, synthetic construct
  source 1..20: mol_type = other RNA
tgtatacctgggggaaagcc

SEQ ID NO: 847 - RNA, 20 nt, synthetic construct
  source 1..20: mol_type = other RNA
tccaaagaggctttgctgtg

SEQ ID NO: 848 - RNA, 20 nt, synthetic construct
  source 1..20: mol_type = other RNA
cccaaagggtggagctggaa

SEQ ID NO: 849 - RNA, 20 nt, synthetic construct
  source 1..20: mol_type = other RNA
tcaccaggaacatgtacacc

SEQ ID NO: 850 - RNA, 20 nt, synthetic construct
  source 1..20: mol_type = other RNA
tgtaaacctgggggaaagcc

SEQ ID NO: 851 - RNA, 20 nt, synthetic construct
  source 1..20: mol_type = other RNA
ttcaccaggaacatgtatac

SEQ ID NO: 852 - RNA, 20 nt, synthetic construct
  source 1..20: mol_type = other RNA
aacatgtaaacctgggggaa

SEQ ID NO: 853 - RNA, 20 nt, synthetic construct
  source 1..20: mol_type = other RNA
aacatgtacacctgggggaa

SEQ ID NO: 854 - RNA, 20 nt, synthetic construct
  source 1..20: mol_type = other RNA
ttcaccaggaacatgtaaac

SEQ ID NO: 855 - RNA, 20 nt, synthetic construct
  source 1..20: mol_type = other RNA
ttcaccaggaacatgtagac

SEQ ID NO: 856 - RNA, 20 nt, synthetic construct
  source 1..20: mol_type = other RNA
gtagaccaccttctccgaca

SEQ ID NO: 857 - RNA, 20 nt, synthetic construct
  source 1..20: mol_type = other RNA
accaggaacatgtagacctg

SEQ ID NO: 858 - RNA, 21 nt, synthetic construct
  source 1..21: mol_type = other RNA
cctgggggaaagccagagtcg

SEQ ID NO: 859 - RNA, 21 nt, synthetic construct
  source 1..21: mol_type = other RNA
ggaccccattcagcctccaaa

SEQ ID NO: 860 - RNA, 21 nt, synthetic construct
  source 1..21: mol_type = other RNA
cacctgggggaaagccagagt

SEQ ID NO: 861 - RNA, 21 nt, synthetic construct
  source 1..21: mol_type = other RNA
acacctgggggaaagccagag

SEQ ID NO: 862 - RNA, 21 nt, synthetic construct
  source 1..21: mol_type = other RNA
cgacaggtcctgccatttcac

SEQ ID NO: 863 - RNA, 21 nt, synthetic construct
  source 1..21: mol_type = other RNA
atacctgggggaaagccagag

SEQ ID NO: 864 - RNA, 21 nt, synthetic construct
  source 1..21: mol_type = other RNA
agaggctttgctgtgtgcacc

SEQ ID NO: 865 - RNA, 21 nt, synthetic construct
  source 1..21: mol_type = other RNA
tacctgggggaaagccagagt

SEQ ID NO: 866 - RNA, 21 nt, synthetic construct
  source 1..21: mol_type = other RNA
acctgggggaaagccagagtc

SEQ ID NO: 867 - RNA, 22 nt, synthetic construct
  source 1..22: mol_type = other RNA
ccgacaggtcctgccatttcac

SEQ ID NO: 868 - RNA, 22 nt, synthetic construct
  source 1..22: mol_type = other RNA
tacacctgggggaaagccagag

SEQ ID NO: 869 - RNA, 22 nt, synthetic construct
  source 1..22: mol_type = other RNA
aagaggctttgctgtgtgcacc

SEQ ID NO: 870 - RNA, 22 nt, synthetic construct
  source 1..22: mol_type = other RNA
tacctgggggaaagccagagtc

SEQ ID NO: 871 - RNA, 22 nt, synthetic construct
  source 1..22: mol_type = other RNA
tatacctgggggaaagccagag

SEQ ID NO: 872 - RNA, 22 nt, synthetic construct
  source 1..22: mol_type = other RNA
acacctgggggaaagccagagt

SEQ ID NO: 873 - RNA, 22 nt, synthetic construct
  source 1..22: mol_type = other RNA
gggaccccattcagcctccaaa

SEQ ID NO: 874 - RNA, 22 nt, synthetic construct
  source 1..22: mol_type = other RNA
cacctgggggaaagccagagtc

SEQ ID NO: 875 - RNA, 22 nt, synthetic construct
  source 1..22: mol_type = other RNA
atacctgggggaaagccagagt

SEQ ID NO: 876 - RNA, 22 nt, synthetic construct
  source 1..22: mol_type = other RNA
acctgggggaaagccagagtcg

SEQ ID NO: 877 - RNA, 92 nt, synthetic construct
  source 1..92: mol_type = other RNA
ggaacatgtacacctggttttagagctagaaatagcaagttaaaataaggctagtccgttatcaacttgaaaaagtggcaccgagtcggtgc

SEQ ID NO: 878 - RNA, 93 nt, synthetic construct
  source 1..93: mol_type = other RNA
ccaggaacatgtacaccgttttagagctagaaatagcaagttaaaataaggctagtccgttatcaacttgaaaaagtggcaccgagtcggtgc

SEQ ID NO: 879 - RNA, 93 nt, synthetic construct
  source 1..93: mol_type = other RNA
ggaacatgtacacctgggttttagagctagaaatagcaagttaaaataaggctagtccgttatcaacttgaaaaagtggcaccgagtcggtgc

SEQ ID NO: 880 - RNA, 93 nt, synthetic construct
  source 1..93: mol_type = other RNA
caggaacatgtacacctgttttagagctagaaatagcaagttaaaataaggctagtccgttatcaacttgaaaaagtggcaccgagtcggtgc

SEQ ID NO: 881 - RNA, 93 nt, synthetic construct
  source 1..93: mol_type = other RNA
aggaacatgtacacctggttttagagctagaaatagcaagttaaaataaggctagtccgttatcaacttgaaaaagtggcaccgagtcggtgc

SEQ ID NO: 882 - RNA, 96 nt, synthetic construct
  source 1..96: mol_type = other RNA
aagggtggagctggaacggtgttttagagctagaaatagcaagttaaaataaggctagtccgttatcaacttgaaaaagtggcaccgagtcggtgc

SEQ ID NO: 883 - RNA, 96 nt, synthetic construct
  source 1..96: mol_type = other RNA
caccaggaacatgtacacctgttttagagctagaaatagcaagttaaaataaggctagtccgttatcaacttgaaaaagtggcaccgagtcggtgc

SEQ ID NO: 884 - RNA, 96 nt, synthetic construct
  source 1..96: mol_type = other RNA
ggtagaccaccttctccgacgttttagagctagaaatagcaagttaaaataaggctagtccgttatcaacttgaaaaagtggcaccgagtcggtgc

SEQ ID NO: 885 - RNA, 96 nt, synthetic construct
  source 1..96: mol_type = other RNA
cccaaagggtggagctggaagttttagagctagaaatagcaagttaaaataaggctagtccgttatcaacttgaaaaagtggcaccgagtcggtgc

SEQ ID NO: 886 - RNA, 96 nt, synthetic construct
  source 1..96: mol_type = other RNA
aaagggtggagctggaacgggttttagagctagaaatagcaagttaaaataaggctagtccgttatcaacttgaaaaagtggcaccgagtcggtgc

SEQ ID NO: 887 - RNA, 96 nt, synthetic construct
  source 1..96: mol_type = other RNA
ccaggaacatgtacacctgggttttagagctagaaatagcaagttaaaataaggctagtccgttatcaacttgaaaaagtggcaccgagtcggtgc

SEQ ID NO: 888 - RNA, 96 nt, synthetic construct
  source 1..96: mol_type = other RNA
tcaccaggaacatgtacaccgttttagagctagaaatagcaagttaaaataaggctagtccgttatcaacttgaaaaagtggcaccgagtcggtgc

SEQ ID NO: 889 - RNA, 96 nt, synthetic construct
  source 1..96: mol_type = other RNA
tccttcccaaagggtggagcgttttagagctagaaatagcaagttaaaataaggctagtccgttatcaacttgaaaaagtggcaccgagtcggtgc

SEQ ID NO: 890 - RNA, 96 nt, synthetic construct
  source 1..96: mol_type = other RNA
ggaacatgtacacctggttttagagctagaaatagcaagttaaaataaggctagtccgttatcaacttgaaaaagtggcaccgagtcggtgctttt

SEQ ID NO: 891 - RNA, 96 nt, synthetic construct
  source 1..96: mol_type = other RNA
acaggtcctgccatttcaccgttttagagctagaaatagcaagttaaaataaggctagtccgttatcaacttgaaaaagtggcaccgagtcggtgc

SEQ ID NO: 892 - RNA, 96 nt, synthetic construct
  source 1..96: mol_type = other RNA
accaggaacatgtacacctggttttagagctagaaatagcaagttaaaataaggctagtccgttatcaacttgaaaaagtggcaccgagtcggtgc

SEQ ID NO: 893 - RNA, 97 nt, synthetic construct
  source 1..97: mol_type = other RNA
ccaggaacatgtacaccgttttagagctagaaatagcaagttaaaataaggctagtccgttatcaacttgaaaaagtggcaccgagtcggtgctttt

SEQ ID NO: 894 - RNA, 97 nt, synthetic construct
  source 1..97: mol_type = other RNA
caggaacatgtacacctgttttagagctagaaatagcaagttaaaataaggctagtccgttatcaacttgaaaaagtggcaccgagtcggtgctttt

SEQ ID NO: 895 - RNA, 97 nt, synthetic construct
  source 1..97: mol_type = other RNA
aggaacatgtacacctggttttagagctagaaatagcaagttaaaataaggctagtccgttatcaacttgaaaaagtggcaccgagtcggtgctttt

SEQ ID NO: 896 - RNA, 97 nt, synthetic construct
  source 1..97: mol_type = other RNA
ggaacatgtacacctgggttttagagctagaaatagcaagttaaaataaggctagtccgttatcaacttgaaaaagtggcaccgagtcggtgctttt

SEQ ID NO: 897 - RNA, 100 nt, synthetic construct
  source 1..100: mol_type = other RNA
tccttcccaaagggtggagcgttttagagctagaaatagcaagttaaaataaggctagtccgttatcaacttgaaaaagtggcaccgagtcggtgctttt

SEQ ID NO: 898 - RNA, 100 nt, synthetic construct
  source 1..100: mol_type = other RNA
aaagggtggagctggaacgggttttagagctagaaatagcaagttaaaataaggctagtccgttatcaacttgaaaaagtggcaccgagtcggtgctttt

SEQ ID NO: 899 - RNA, 100 nt, synthetic construct
  source 1..100: mol_type = other RNA
ggtagaccaccttctccgacgttttagagctagaaatagcaagttaaaataaggctagtccgttatcaacttgaaaaagtggcaccgagtcggtgctttt

SEQ ID NO: 900 - RNA, 100 nt, synthetic construct
  source 1..100: mol_type = other RNA
cccaaagggtggagctggaagttttagagctagaaatagcaagttaaaataaggctagtccgttatcaacttgaaaaagtggcaccgagtcggtgctttt

SEQ ID NO: 901 - RNA, 100 nt, synthetic construct
  source 1..100: mol_type = other RNA
tcaccaggaacatgtacaccgttttagagctagaaatagcaagttaaaataaggctagtccgttatcaacttgaaaaagtggcaccgagtcggtgctttt

SEQ ID NO: 902 - RNA, 100 nt, synthetic construct
  source 1..100: mol_type = other RNA
aagggtggagctggaacggtgttttagagctagaaatagcaagttaaaataaggctagtccgttatcaacttgaaaaagtggcaccgagtcggtgctttt

SEQ ID NO: 903 - RNA, 100 nt, synthetic construct
  source 1..100: mol_type = other RNA
accaggaacatgtacacctggttttagagctagaaatagcaagttaaaataaggctagtccgttatcaacttgaaaaagtggcaccgagtcggtgctttt

SEQ ID NO: 904 - RNA, 100 nt, synthetic construct
  source 1..100: mol_type = other RNA
ccaggaacatgtacacctgggttttagagctagaaatagcaagttaaaataaggctagtccgttatcaacttgaaaaagtggcaccgagtcggtgctttt

SEQ ID NO: 905 - RNA, 100 nt, synthetic construct
  source 1..100: mol_type = other RNA
acaggtcctgccatttcaccgttttagagctagaaatagcaagttaaaataaggctagtccgttatcaacttgaaaaagtggcaccgagtcggtgctttt

SEQ ID NO: 906 - RNA, 100 nt, synthetic construct
  source 1..100: mol_type = other RNA
caccaggaacatgtacacctgttttagagctagaaatagcaagttaaaataaggctagtccgttatcaacttgaaaaagtggcaccgagtcggtgctttt

SEQ ID NO: 907 - RNA, 16 nt, synthetic construct
  source 1..16: mol_type = other RNA
agtgggtagtgggatc

SEQ ID NO: 908 - RNA, 17 nt, synthetic construct
  source 1..17: mol_type = other RNA
cagtgggtagtgggatc

SEQ ID NO: 909 - RNA, 18 nt, synthetic construct
  source 1..18: mol_type = other RNA
ccagtgggtagtgggatc

SEQ ID NO: 910 - RNA, 19 nt, synthetic construct
  source 1..19: mol_type = other RNA
tccagtgggtagtgggatc

SEQ ID NO: 911 - RNA, 20 nt, synthetic construct
  source 1..20: mol_type = other RNA
ctccagtgggtagtgggatc

SEQ ID NO: 912 - RNA, 21 nt, synthetic construct
  source 1..21: mol_type = other RNA
cctccagtgggtagtgggatc

SEQ ID NO: 913 - RNA, 22 nt, synthetic construct
  source 1..22: mol_type = other RNA
tcctccagtgggtagtgggatc

SEQ ID NO: 914-920 - skipped (7 entries)

SEQ ID NO: 921 - RNA, 10 nt, synthetic construct
  source 1..10: mol_type = other RNA
cccactaccc

SEQ ID NO: 922 - RNA, 11 nt, synthetic construct
  source 1..11: mol_type = other RNA
cccactaccca

SEQ ID NO: 923 - RNA, 12 nt, synthetic construct
  source 1..12: mol_type = other RNA
cccactacccac

SEQ ID NO: 924 - RNA, 13 nt, synthetic construct
  source 1..13: mol_type = other RNA
cccactacccact

SEQ ID NO: 925 - RNA, 14 nt, synthetic construct
  source 1..14: mol_type = other RNA
cccactacccactg

SEQ ID NO: 926 - RNA, 15 nt, synthetic construct
  source 1..15: mol_type = other RNA
cccactacccactgg

SEQ ID NO: 927 - RNA, 16 nt, synthetic construct
  source 1..16: mol_type = other RNA
cccactacccactgga

SEQ ID NO: 928 - RNA, 17 nt, synthetic construct
  source 1..17: mol_type = other RNA
cccactacccactggag

SEQ ID NO: 929 - RNA, 18 nt, synthetic construct
  source 1..18: mol_type = other RNA
cccactacccactggagg

SEQ ID NO: 930 - RNA, 19 nt, synthetic construct
  source 1..19: mol_type = other RNA
cccactacccactggagga

SEQ ID NO: 931 - RNA, 71 nt, synthetic construct
  source 1..71: mol_type = other RNA
acctgggggaaagccagagtcgggggaccccattcagcctccaaagaggctttgctgtgtgcacccaggat

SEQ ID NO: 932 - RNA, 72 nt, synthetic construct
  source 1..72: mol_type = other RNA
tacctgggggaaagccagagtcgggggaccccattcagcctccaaagaggctttgctgtgtgcacccaggat

SEQ ID NO: 933 - RNA, 72 nt, synthetic construct
  source 1..72: mol_type = other RNA
gacctgggggaaagccagagtcgggggaccccattcagcctccaaagaggctttgctgtgtgcacccaggat

SEQ ID NO: 934 - RNA, 72 nt, synthetic construct
  source 1..72: mol_type = other RNA
cacctgggggaaagccagagtcgggggaccccattcagcctccaaagaggctttgctgtgtgcacccaggat

SEQ ID NO: 935 - RNA, 72 nt, synthetic construct
  source 1..72: mol_type = other RNA
aacctgggggaaagccagagtcgggggaccccattcagcctccaaagaggctttgctgtgtgcacccaggat

SEQ ID NO: 936 - RNA, 73 nt, synthetic construct
  source 1..73: mol_type = other RNA
aaacctgggggaaagccagagtcgggggaccccattcagcctccaaagaggctttgctgtgtgcacccaggat

SEQ ID NO: 937 - RNA, 73 nt, synthetic construct
  source 1..73: mol_type = other RNA
acacctgggggaaagccagagtcgggggaccccattcagcctccaaagaggctttgctgtgtgcacccaggat

SEQ ID NO: 938 - RNA, 73 nt, synthetic construct
  source 1..73: mol_type = other RNA
atacctgggggaaagccagagtcgggggaccccattcagcctccaaagaggctttgctgtgtgcacccaggat

SEQ ID NO: 939 - RNA, 73 nt, synthetic construct
  source 1..73: mol_type = other RNA
agacctgggggaaagccagagtcgggggaccccattcagcctccaaagaggctttgctgtgtgcacccaggat

SEQ ID NO: 940 - RNA, 74 nt, synthetic construct
  source 1..74: mol_type = other RNA
tagacctgggggaaagccagagtcgggggaccccattcagcctccaaagaggctttgctgtgtgcacccaggat

SEQ ID NO: 941 - RNA, 74 nt, synthetic construct
  source 1..74: mol_type = other RNA
tatacctgggggaaagccagagtcgggggaccccattcagcctccaaagaggctttgctgtgtgcacccaggat

SEQ ID NO: 942 - RNA, 74 nt, synthetic construct
  source 1..74: mol_type = other RNA
tacacctgggggaaagccagagtcgggggaccccattcagcctccaaagaggctttgctgtgtgcacccaggat

SEQ ID NO: 943 - RNA, 74 nt, synthetic construct
  source 1..74: mol_type = other RNA
taaacctgggggaaagccagagtcgggggaccccattcagcctccaaagaggctttgctgtgtgcacccaggat

SEQ ID NO: 944 - RNA, 75 nt, synthetic construct
  source 1..75: mol_type = other RNA
gtatacctgggggaaagccagagtcgggggaccccattcagcctccaaagaggctttgctgtgtgcacccaggat

SEQ ID NO: 945 - RNA, 75 nt, synthetic construct
  source 1..75: mol_type = other RNA
gtaaacctgggggaaagccagagtcgggggaccccattcagcctccaaagaggctttgctgtgtgcacccaggat

SEQ ID NO: 946 - RNA, 75 nt, synthetic construct
  source 1..75: mol_type = other RNA
gtacacctgggggaaagccagagtcgggggaccccattcagcctccaaagaggctttgctgtgtgcacccaggat

SEQ ID NO: 947 - RNA, 75 nt, synthetic construct
  source 1..75: mol_type = other RNA
gtagacctgggggaaagccagagtcgggggaccccattcagcctccaaagaggctttgctgtgtgcacccaggat

SEQ ID NO: 948 - RNA, 76 nt, synthetic construct
  source 1..76: mol_type = other RNA
tgtacacctgggggaaagccagagtcgggggaccccattcagcctccaaagaggctttgctgtgtgcacccaggat

SEQ ID NO: 949 - RNA, 76 nt, synthetic construct
  source 1..76: mol_type = other RNA
tgtaaacctgggggaaagccagagtcgggggaccccattcagcctccaaagaggctttgctgtgtgcacccaggat

SEQ ID NO: 950 - RNA, 76 nt, synthetic construct
  source 1..76: mol_type = other RNA
tgtatacctgggggaaagccagagtcgggggaccccattcagcctccaaagaggctttgctgtgtgcacccaggat

SEQ ID NO: 951 - RNA, 76 nt, synthetic construct
  source 1..76: mol_type = other RNA
tgtagacctgggggaaagccagagtcgggggaccccattcagcctccaaagaggctttgctgtgtgcacccaggat

SEQ ID NO: 952 - RNA, 77 nt, synthetic construct
  source 1..77: mol_type = other RNA
atgtaaacctgggggaaagccagagtcgggggaccccattcagcctccaaagaggctttgctgtgtgcacccaggat

SEQ ID NO: 953 - RNA, 77 nt, synthetic construct
  source 1..77: mol_type = other RNA
atgtacacctgggggaaagccagagtcgggggaccccattcagcctccaaagaggctttgctgtgtgcacccaggat

SEQ ID NO: 954 - RNA, 77 nt, synthetic construct
  source 1..77: mol_type = other RNA
atgtatacctgggggaaagccagagtcgggggaccccattcagcctccaaagaggctttgctgtgtgcacccaggat

SEQ ID NO: 955 - RNA, 77 nt, synthetic construct
  source 1..77: mol_type = other RNA
atgtagacctgggggaaagccagagtcgggggaccccattcagcctccaaagaggctttgctgtgtgcacccaggat

SEQ ID NO: 956 - RNA, 78 nt, synthetic construct
  source 1..78: mol_type = other RNA
catgtatacctgggggaaagccagagtcgggggaccccattcagcctccaaagaggctttgctgtgtgcacccaggat

SEQ ID NO: 957 - RNA, 78 nt, synthetic construct
  source 1..78: mol_type = other RNA
catgtaaacctgggggaaagccagagtcgggggaccccattcagcctccaaagaggctttgctgtgtgcacccaggat

SEQ ID NO: 958 - RNA, 78 nt, synthetic construct
  source 1..78: mol_type = other RNA
catgtagacctgggggaaagccagagtcgggggaccccattcagcctccaaagaggctttgctgtgtgcacccaggat

SEQ ID NO: 959 - RNA, 78 nt, synthetic construct
  source 1..78: mol_type = other RNA
catgtacacctgggggaaagccagagtcgggggaccccattcagcctccaaagaggctttgctgtgtgcacccaggat

SEQ ID NO: 960 - RNA, 79 nt, synthetic construct
  source 1..79: mol_type = other RNA
acatgtaaacctgggggaaagccagagtcgggggaccccattcagcctccaaagaggctttgctgtgtgcacccaggat

SEQ ID NO: 961 - RNA, 79 nt, synthetic construct
  source 1..79: mol_type = other RNA
acatgtatacctgggggaaagccagagtcgggggaccccattcagcctccaaagaggctttgctgtgtgcacccaggat

SEQ ID NO: 962 - RNA, 79 nt, synthetic construct
  source 1..79: mol_type = other RNA
acatgtacacctgggggaaagccagagtcgggggaccccattcagcctccaaagaggctttgctgtgtgcacccaggat

SEQ ID NO: 963 - RNA, 79 nt, synthetic construct
  source 1..79: mol_type = other RNA
acatgtagacctgggggaaagccagagtcgggggaccccattcagcctccaaagaggctttgctgtgtgcacccaggat

SEQ ID NO: 964 - RNA, 80 nt, synthetic construct
  source 1..80: mol_type = other RNA
aacatgtagacctgggggaaagccagagtcgggggaccccattcagcctccaaagaggctttgctgtgtgcacccaggat

SEQ ID NO: 965 - RNA, 80 nt, synthetic construct
  source 1..80: mol_type = other RNA
aacatgtaaacctgggggaaagccagagtcgggggaccccattcagcctccaaagaggctttgctgtgtgcacccaggat

SEQ ID NO: 966 - RNA, 80 nt, synthetic construct
  source 1..80: mol_type = other RNA
aacatgtacacctgggggaaagccagagtcgggggaccccattcagcctccaaagaggctttgctgtgtgcacccaggat

SEQ ID NO: 967 - RNA, 80 nt, synthetic construct
  source 1..80: mol_type = other RNA
aacatgtatacctgggggaaagccagagtcgggggaccccattcagcctccaaagaggctttgctgtgtgcacccaggat

SEQ ID NO: 968 - RNA, 81 nt, synthetic construct
  source 1..81: mol_type = other RNA
gaacatgtacacctgggggaaagccagagtcgggggaccccattcagcctccaaagaggctttgctgtgtgcacccaggat

SEQ ID NO: 969 - RNA, 81 nt, synthetic construct
  source 1..81: mol_type = other RNA
gaacatgtatacctgggggaaagccagagtcgggggaccccattcagcctccaaagaggctttgctgtgtgcacccaggat

SEQ ID NO: 970 - RNA, 81 nt, synthetic construct
  source 1..81: mol_type = other RNA
gaacatgtaaacctgggggaaagccagagtcgggggaccccattcagcctccaaagaggctttgctgtgtgcacccaggat

SEQ ID NO: 971 - RNA, 81 nt, synthetic construct
  source 1..81: mol_type = other RNA
gaacatgtagacctgggggaaagccagagtcgggggaccccattcagcctccaaagaggctttgctgtgtgcacccaggat

SEQ ID NO: 972 - RNA, 82 nt, synthetic construct
  source 1..82: mol_type = other RNA
ggaacatgtatacctgggggaaagccagagtcgggggaccccattcagcctccaaagaggctttgctgtgtgcacccaggat

SEQ ID NO: 973 - RNA, 82 nt, synthetic construct
  source 1..82: mol_type = other RNA
ggaacatgtagacctgggggaaagccagagtcgggggaccccattcagcctccaaagaggctttgctgtgtgcacccaggat

SEQ ID NO: 974 - RNA, 82 nt, synthetic construct
  source 1..82: mol_type = other RNA
ggaacatgtacacctgggggaaagccagagtcgggggaccccattcagcctccaaagaggctttgctgtgtgcacccaggat

SEQ ID NO: 975 - RNA, 82 nt, synthetic construct
  source 1..82: mol_type = other RNA
ggaacatgtaaacctgggggaaagccagagtcgggggaccccattcagcctccaaagaggctttgctgtgtgcacccaggat

SEQ ID NO: 976 - RNA, 83 nt, synthetic construct
  source 1..83: mol_type = other RNA
aggaacatgtatacctgggggaaagccagagtcgggggaccccattcagcctccaaagaggctttgctgtgtgcacccaggat

SEQ ID NO: 977 - RNA, 83 nt, synthetic construct
  source 1..83: mol_type = other RNA
aggaacatgtaaacctgggggaaagccagagtcgggggaccccattcagcctccaaagaggctttgctgtgtgcacccaggat

SEQ ID NO: 978 - RNA, 83 nt, synthetic construct
  source 1..83: mol_type = other RNA
aggaacatgtacacctgggggaaagccagagtcgggggaccccattcagcctccaaagaggctttgctgtgtgcacccaggat

SEQ ID NO: 979 - RNA, 83 nt, synthetic construct
  source 1..83: mol_type = other RNA
aggaacatgtagacctgggggaaagccagagtcgggggaccccattcagcctccaaagaggctttgctgtgtgcacccaggat

SEQ ID NO: 980 - RNA, 84 nt, synthetic construct
  source 1..84: mol_type = other RNA
caggaacatgtagacctgggggaaagccagagtcgggggaccccattcagcctccaaagaggctttgctgtgtgcacccaggat

SEQ ID NO: 981 - RNA, 84 nt, synthetic construct
  source 1..84: mol_type = other RNA
caggaacatgtatacctgggggaaagccagagtcgggggaccccattcagcctccaaagaggctttgctgtgtgcacccaggat

SEQ ID NO: 982 - RNA, 84 nt, synthetic construct
  source 1..84: mol_type = other RNA
caggaacatgtaaacctgggggaaagccagagtcgggggaccccattcagcctccaaagaggctttgctgtgtgcacccaggat

SEQ ID NO: 983 - RNA, 84 nt, synthetic construct
  source 1..84: mol_type = other RNA
caggaacatgtacacctgggggaaagccagagtcgggggaccccattcagcctccaaagaggctttgctgtgtgcacccaggat

SEQ ID NO: 984 - RNA, 85 nt, synthetic construct
  source 1..85: mol_type = other RNA
ccaggaacatgtaaacctgggggaaagccagagtcgggggaccccattcagcctccaaagaggctttgctgtgtgcacccaggat

SEQ ID NO: 985 - RNA, 85 nt, synthetic construct
  source 1..85: mol_type = other RNA
ccaggaacatgtacacctgggggaaagccagagtcgggggaccccattcagcctccaaagaggctttgctgtgtgcacccaggat

SEQ ID NO: 986 - RNA, 85 nt, synthetic construct
  source 1..85: mol_type = other RNA
ccaggaacatgtagacctgggggaaagccagagtcgggggaccccattcagcctccaaagaggctttgctgtgtgcacccaggat

SEQ ID NO: 987 - RNA, 85 nt, synthetic construct
  source 1..85: mol_type = other RNA
ccaggaacatgtatacctgggggaaagccagagtcgggggaccccattcagcctccaaagaggctttgctgtgtgcacccaggat

SEQ ID NO: 988 - RNA, 86 nt, synthetic construct
  source 1..86: mol_type = other RNA
accaggaacatgtatacctgggggaaagccagagtcgggggaccccattcagcctccaaagaggctttgctgtgtgcacccaggat

SEQ ID NO: 989 - RNA, 86 nt, synthetic construct
  source 1..86: mol_type = other RNA
accaggaacatgtacacctgggggaaagccagagtcgggggaccccattcagcctccaaagaggctttgctgtgtgcacccaggat

SEQ ID NO: 990 - RNA, 86 nt, synthetic construct
  source 1..86: mol_type = other RNA
accaggaacatgtaaacctgggggaaagccagagtcgggggaccccattcagcctccaaagaggctttgctgtgtgcacccaggat

SEQ ID NO: 991 - RNA, 86 nt, synthetic construct
  source 1..86: mol_type = other RNA
accaggaacatgtagacctgggggaaagccagagtcgggggaccccattcagcctccaaagaggctttgctgtgtgcacccaggat

SEQ ID NO: 992 - RNA, 87 nt, synthetic construct
  source 1..87: mol_type = other RNA
caccaggaacatgtaaacctgggggaaagccagagtcgggggaccccattcagcctccaaagaggctttgctgtgtgcacccaggat

SEQ ID NO: 993 - RNA, 87 nt, synthetic construct
  source 1..87: mol_type = other RNA
caccaggaacatgtatacctgggggaaagccagagtcgggggaccccattcagcctccaaagaggctttgctgtgtgcacccaggat

SEQ ID NO: 994 - RNA, 87 nt, synthetic construct
  source 1..87: mol_type = other RNA
caccaggaacatgtacacctgggggaaagccagagtcgggggaccccattcagcctccaaagaggctttgctgtgtgcacccaggat

SEQ ID NO: 995 - RNA, 87 nt, synthetic construct
  source 1..87: mol_type = other RNA
caccaggaacatgtagacctgggggaaagccagagtcgggggaccccattcagcctccaaagaggctttgctgtgtgcacccaggat

SEQ ID NO: 996 - RNA, 88 nt, synthetic construct
  source 1..88: mol_type = other RNA
tcaccaggaacatgtagacctgggggaaagccagagtcgggggaccccattcagcctccaaagaggctttgctgtgtgcacccaggat

SEQ ID NO: 997 - RNA, 88 nt, synthetic construct
  source 1..88: mol_type = other RNA
tcaccaggaacatgtatacctgggggaaagccagagtcgggggaccccattcagcctccaaagaggctttgctgtgtgcacccaggat

SEQ ID NO: 998 - RNA, 88 nt, synthetic construct
  source 1..88: mol_type = other RNA
tcaccaggaacatgtaaacctgggggaaagccagagtcgggggaccccattcagcctccaaagaggctttgctgtgtgcacccaggat

SEQ ID NO: 999 - RNA, 88 nt, synthetic construct
  source 1..88: mol_type = other RNA
tcaccaggaacatgtacacctgggggaaagccagagtcgggggaccccattcagcctccaaagaggctttgctgtgtgcacccaggat

SEQ ID NO: 1000 - RNA, 89 nt, synthetic construct
  source 1..89: mol_type = other RNA
ttcaccaggaacatgtacacctgggggaaagccagagtcgggggaccccattcagcctccaaagaggctttgctgtgtgcacccaggat

SEQ ID NO: 1001 - RNA, 89 nt, synthetic construct
  source 1..89: mol_type = other RNA
ttcaccaggaacatgtatacctgggggaaagccagagtcgggggaccccattcagcctccaaagaggctttgctgtgtgcacccaggat

SEQ ID NO: 1002 - RNA, 89 nt, synthetic construct
  source 1..89: mol_type = other RNA
ttcaccaggaacatgtaaacctgggggaaagccagagtcgggggaccccattcagcctccaaagaggctttgctgtgtgcacccaggat

SEQ ID NO: 1003 - RNA, 89 nt, synthetic construct
  source 1..89: mol_type = other RNA
ttcaccaggaacatgtagacctgggggaaagccagagtcgggggaccccattcagcctccaaagaggctttgctgtgtgcacccaggat

SEQ ID NO: 1004 - RNA, 90 nt, synthetic construct
  source 1..90: mol_type = other RNA
tttcaccaggaacatgtatacctgggggaaagccagagtcgggggaccccattcagcctccaaagaggctttgctgtgtgcacccaggat

SEQ ID NO: 1005 - RNA, 90 nt, synthetic construct
  source 1..90: mol_type = other RNA
tttcaccaggaacatgtagacctgggggaaagccagagtcgggggaccccattcagcctccaaagaggctttgctgtgtgcacccaggat

SEQ ID NO: 1006 - RNA, 90 nt, synthetic construct
  source 1..90: mol_type = other RNA
tttcaccaggaacatgtaaacctgggggaaagccagagtcgggggaccccattcagcctccaaagaggctttgctgtgtgcacccaggat

SEQ ID NO: 1007 - RNA, 90 nt, synthetic construct
  source 1..90: mol_type = other RNA
tttcaccaggaacatgtacacctgggggaaagccagagtcgggggaccccattcagcctccaaagaggctttgctgtgtgcacccaggat

SEQ ID NO: 1008 - RNA, 91 nt, synthetic construct
  source 1..91: mol_type = other RNA
atttcaccaggaacatgtacacctgggggaaagccagagtcgggggaccccattcagcctccaaagaggctttgctgtgtgcacccaggat

SEQ ID NO: 1009 - RNA, 91 nt, synthetic construct
  source 1..91: mol_type = other RNA
atttcaccaggaacatgtatacctgggggaaagccagagtcgggggaccccattcagcctccaaagaggctttgctgtgtgcacccaggat

SEQ ID NO: 1010 - RNA, 91 nt, synthetic construct
  source 1..91: mol_type = other RNA
atttcaccaggaacatgtaaacctgggggaaagccagagtcgggggaccccattcagcctccaaagaggctttgctgtgtgcacccaggat

SEQ ID NO: 1011 - RNA, 91 nt, synthetic construct
  source 1..91: mol_type = other RNA
atttcaccaggaacatgtagacctgggggaaagccagagtcgggggaccccattcagcctccaaagaggctttgctgtgtgcacccaggat

SEQ ID NO: 1012 - RNA, 92 nt, synthetic construct
  source 1..92: mol_type = other RNA
catttcaccaggaacatgtagacctgggggaaagccagagtcgggggaccccattcagcctccaaagaggctttgctgtgtgcacccaggat

SEQ ID NO: 1013 - RNA, 92 nt, synthetic construct
  source 1..92: mol_type = other RNA
catttcaccaggaacatgtacacctgggggaaagccagagtcgggggaccccattcagcctccaaagaggctttgctgtgtgcacccaggat

SEQ ID NO: 1014 - RNA, 92 nt, synthetic construct
  source 1..92: mol_type = other RNA
catttcaccaggaacatgtatacctgggggaaagccagagtcgggggaccccattcagcctccaaagaggctttgctgtgtgcacccaggat

SEQ ID NO: 1015 - RNA, 92 nt, synthetic construct
  source 1..92: mol_type = other RNA
catttcaccaggaacatgtaaacctgggggaaagccagagtcgggggaccccattcagcctccaaagaggctttgctgtgtgcacccaggat

SEQ ID NO: 1016 - RNA, 93 nt, synthetic construct
  source 1..93: mol_type = other RNA
ccatttcaccaggaacatgtaaacctgggggaaagccagagtcgggggaccccattcagcctccaaagaggctttgctgtgtgcacccaggat

SEQ ID NO: 1017 - RNA, 93 nt, synthetic construct
  source 1..93: mol_type = other RNA
ccatttcaccaggaacatgtagacctgggggaaagccagagtcgggggaccccattcagcctccaaagaggctttgctgtgtgcacccaggat

SEQ ID NO: 1018 - RNA, 93 nt, synthetic construct
  source 1..93: mol_type = other RNA
ccatttcaccaggaacatgtatacctgggggaaagccagagtcgggggaccccattcagcctccaaagaggctttgctgtgtgcacccaggat

SEQ ID NO: 1019 - RNA, 93 nt, synthetic construct
  source 1..93: mol_type = other RNA
ccatttcaccaggaacatgtacacctgggggaaagccagagtcgggggaccccattcagcctccaaagaggctttgctgtgtgcacccaggat

SEQ ID NO: 1020 - RNA, 94 nt, synthetic construct
  source 1..94: mol_type = other RNA
gccatttcaccaggaacatgtatacctgggggaaagccagagtcgggggaccccattcagcctccaaagaggctttgctgtgtgcacccaggat

SEQ ID NO: 1021 - RNA, 94 nt, synthetic construct
  source 1..94: mol_type = other RNA
gccatttcaccaggaacatgtaaacctgggggaaagccagagtcgggggaccccattcagcctccaaagaggctttgctgtgtgcacccaggat

SEQ ID NO: 1022 - RNA, 94 nt, synthetic construct
  source 1..94: mol_type = other RNA
gccatttcaccaggaacatgtacacctgggggaaagccagagtcgggggaccccattcagcctccaaagaggctttgctgtgtgcacccaggat

SEQ ID NO: 1023 - RNA, 94 nt, synthetic construct
  source 1..94: mol_type = other RNA
gccatttcaccaggaacatgtagacctgggggaaagccagagtcgggggaccccattcagcctccaaagaggctttgctgtgtgcacccaggat

SEQ ID NO: 1024 - RNA, 95 nt, synthetic construct
  source 1..95: mol_type = other RNA
tgccatttcaccaggaacatgtatacctgggggaaagccagagtcgggggaccccattcagcctccaaagaggctttgctgtgtgcacccaggat

SEQ ID NO: 1025 - RNA, 95 nt, synthetic construct
  source 1..95: mol_type = other RNA
tgccatttcaccaggaacatgtacacctgggggaaagccagagtcgggggaccccattcagcctccaaagaggctttgctgtgtgcacccaggat

SEQ ID NO: 1026 - RNA, 95 nt, synthetic construct
  source 1..95: mol_type = other RNA
tgccatttcaccaggaacatgtagacctgggggaaagccagagtcgggggaccccattcagcctccaaagaggctttgctgtgtgcacccaggat

SEQ ID NO: 1027 - RNA, 95 nt, synthetic construct
  source 1..95: mol_type = other RNA
tgccatttcaccaggaacatgtaaacctgggggaaagccagagtcgggggaccccattcagcctccaaagaggctttgctgtgtgcacccaggat

SEQ ID NO: 1028 - RNA, 96 nt, synthetic construct
  source 1..96: mol_type = other RNA
ctgccatttcaccaggaacatgtaaacctgggggaaagccagagtcgggggaccccattcagcctccaaagaggctttgctgtgtgcacccaggat

SEQ ID NO: 1029 - RNA, 96 nt, synthetic construct
  source 1..96: mol_type = other RNA
ctgccatttcaccaggaacatgtagacctgggggaaagccagagtcgggggaccccattcagcctccaaagaggctttgctgtgtgcacccaggat

SEQ ID NO: 1030 - RNA, 96 nt, synthetic construct
  source 1..96: mol_type = other RNA
ctgccatttcaccaggaacatgtatacctgggggaaagccagagtcgggggaccccattcagcctccaaagaggctttgctgtgtgcacccaggat

SEQ ID NO: 1031 - RNA, 96 nt, synthetic construct
  source 1..96: mol_type = other RNA
ctgccatttcaccaggaacatgtacacctgggggaaagccagagtcgggggaccccattcagcctccaaagaggctttgctgtgtgcacccaggat

SEQ ID NO: 1032 - RNA, 97 nt, synthetic construct
  source 1..97: mol_type = other RNA
cctgccatttcaccaggaacatgtaaacctgggggaaagccagagtcgggggaccccattcagcctccaaagaggctttgctgtgtgcacccaggat

SEQ ID NO: 1033 - RNA, 97 nt, synthetic construct
  source 1..97: mol_type = other RNA
cctgccatttcaccaggaacatgtacacctgggggaaagccagagtcgggggaccccattcagcctccaaagaggctttgctgtgtgcacccaggat

SEQ ID NO: 1034 - RNA, 97 nt, synthetic construct
  source 1..97: mol_type = other RNA
cctgccatttcaccaggaacatgtagacctgggggaaagccagagtcgggggaccccattcagcctccaaagaggctttgctgtgtgcacccaggat

SEQ ID NO: 1035 - RNA, 97 nt, synthetic construct
  source 1..97: mol_type = other RNA
cctgccatttcaccaggaacatgtatacctgggggaaagccagagtcgggggaccccattcagcctccaaagaggctttgctgtgtgcacccaggat

SEQ ID NO: 1036 - RNA, 98 nt, synthetic construct
  source 1..98: mol_type = other RNA
tcctgccatttcaccaggaacatgtatacctgggggaaagccagagtcgggggaccccattcagcctccaaagaggctttgctgtgtgcacccaggat

SEQ ID NO: 1037 - RNA, 98 nt, synthetic construct
  source 1..98: mol_type = other RNA
tcctgccatttcaccaggaacatgtagacctgggggaaagccagagtcgggggaccccattcagcctccaaagaggctttgctgtgtgcacccaggat

SEQ ID NO: 1038 - RNA, 98 nt, synthetic construct
  source 1..98: mol_type = other RNA
tcctgccatttcaccaggaacatgtaaacctgggggaaagccagagtcgggggaccccattcagcctccaaagaggctttgctgtgtgcacccaggat

SEQ ID NO: 1039 - RNA, 98 nt, synthetic construct
  source 1..98: mol_type = other RNA
tcctgccatttcaccaggaacatgtacacctgggggaaagccagagtcgggggaccccattcagcctccaaagaggctttgctgtgtgcacccaggat

SEQ ID NO: 1040 - RNA, 99 nt, synthetic construct
  source 1..99: mol_type = other RNA
gtcctgccatttcaccaggaacatgtaaacctgggggaaagccagagtcgggggaccccattcagcctccaaagaggctttgctgtgtgcacccaggat

SEQ ID NO: 1041 - RNA, 99 nt, synthetic construct
  source 1..99: mol_type = other RNA
gtcctgccatttcaccaggaacatgtagacctgggggaaagccagagtcgggggaccccattcagcctccaaagaggctttgctgtgtgcacccaggat

SEQ ID NO: 1042 - RNA, 99 nt, synthetic construct
  source 1..99: mol_type = other RNA
gtcctgccatttcaccaggaacatgtatacctgggggaaagccagagtcgggggaccccattcagcctccaaagaggctttgctgtgtgcacccaggat

SEQ ID NO: 1043 - RNA, 99 nt, synthetic construct
  source 1..99: mol_type = other RNA
gtcctgccatttcaccaggaacatgtacacctgggggaaagccagagtcgggggaccccattcagcctccaaagaggctttgctgtgtgcacccaggat

SEQ ID NO: 1044 - RNA, 100 nt, synthetic construct
  source 1..100: mol_type = other RNA
ggtcctgccatttcaccaggaacatgtacacctgggggaaagccagagtcgggggaccccattcagcctccaaagaggctttgctgtgtgcacccaggat

SEQ ID NO: 1045 - RNA, 100 nt, synthetic construct
  source 1..100: mol_type = other RNA
ggtcctgccatttcaccaggaacatgtagacctgggggaaagccagagtcgggggaccccattcagcctccaaagaggctttgctgtgtgcacccaggat

SEQ ID NO: 1046 - RNA, 100 nt, synthetic construct
  source 1..100: mol_type = other RNA
ggtcctgccatttcaccaggaacatgtatacctgggggaaagccagagtcgggggaccccattcagcctccaaagaggctttgctgtgtgcacccaggat

SEQ ID NO: 1047 - RNA, 100 nt, synthetic construct
  source 1..100: mol_type = other RNA
ggtcctgccatttcaccaggaacatgtaaacctgggggaaagccagagtcgggggaccccattcagcctccaaagaggctttgctgtgtgcacccaggat

SEQ ID NO: 1048 - RNA, 101 nt, synthetic construct
  source 1..101: mol_type = other RNA
aggtcctgccatttcaccaggaacatgtaaacctgggggaaagccagagtcgggggaccccattcagcctccaaagaggctttgctgtgtgcacccaggat

SEQ ID NO: 1049 - RNA, 101 nt, synthetic construct
  source 1..101: mol_type = other RNA
aggtcctgccatttcaccaggaacatgtacacctgggggaaagccagagtcgggggaccccattcagcctccaaagaggctttgctgtgtgcacccaggat

SEQ ID NO: 1050 - RNA, 101 nt, synthetic construct
  source 1..101: mol_type = other RNA
aggtcctgccatttcaccaggaacatgtatacctgggggaaagccagagtcgggggaccccattcagcctccaaagaggctttgctgtgtgcacccaggat

SEQ ID NO: 1051 - RNA, 101 nt, synthetic construct
  source 1..101: mol_type = other RNA
aggtcctgccatttcaccaggaacatgtagacctgggggaaagccagagtcgggggaccccattcagcctccaaagaggctttgctgtgtgcacccaggat

SEQ ID NO: 1052 - RNA, 102 nt, synthetic construct
  source 1..102: mol_type = other RNA
caggtcctgccatttcaccaggaacatgtaaacctgggggaaagccagagtcgggggaccccattcagcctccaaagaggctttgctgtgtgcacccaggat

SEQ ID NO: 1053 - RNA, 102 nt, synthetic construct
  source 1..102: mol_type = other RNA
caggtcctgccatttcaccaggaacatgtacacctgggggaaagccagagtcgggggaccccattcagcctccaaagaggctttgctgtgtgcacccaggat

SEQ ID NO: 1054 - RNA, 102 nt, synthetic construct
  source 1..102: mol_type = other RNA
caggtcctgccatttcaccaggaacatgtagacctgggggaaagccagagtcgggggaccccattcagcctccaaagaggctttgctgtgtgcacccaggat

SEQ ID NO: 1055 - RNA, 102 nt, synthetic construct
  source 1..102: mol_type = other RNA
caggtcctgccatttcaccaggaacatgtatacctgggggaaagccagagtcgggggaccccattcagcctccaaagaggctttgctgtgtgcacccaggat

SEQ ID NO: 1056 - RNA, 103 nt, synthetic construct
  source 1..103: mol_type = other RNA
acaggtcctgccatttcaccaggaacatgtatacctgggggaaagccagagtcgggggaccccattcagcctccaaagaggctttgctgtgtgcacccaggat

SEQ ID NO: 1057 - RNA, 103 nt, synthetic construct
  source 1..103: mol_type = other RNA
acaggtcctgccatttcaccaggaacatgtaaacctgggggaaagccagagtcgggggaccccattcagcctccaaagaggctttgctgtgtgcacccaggat

SEQ ID NO: 1058 - RNA, 103 nt, synthetic construct
  source 1..103: mol_type = other RNA
acaggtcctgccatttcaccaggaacatgtacacctgggggaaagccagagtcgggggaccccattcagcctccaaagaggctttgctgtgtgcacccaggat

SEQ ID NO: 1059 - RNA, 103 nt, synthetic construct
  source 1..103: mol_type = other RNA
acaggtcctgccatttcaccaggaacatgtagacctgggggaaagccagagtcgggggaccccattcagcctccaaagaggctttgctgtgtgcacccaggat

SEQ ID NO: 1060 - RNA, 20 nt, synthetic construct
  source 1..20: mol_type = other RNA
atgtacacctgggggaaagc

SEQ ID NO: 1061 - RNA, 20 nt, synthetic construct
  source 1..20: mol_type = other RNA
atgtagacctgggggaaagc

SEQ ID NO: 1062 - RNA, 20 nt, synthetic construct
  source 1..20: mol_type = other RNA
atgtatacctgggggaaagc

SEQ ID NO: 1063 - RNA, 20 nt, synthetic construct
  source 1..20: mol_type = other RNA
atgtaaacctgggggaaagc

SEQ ID NO: 1064 - RNA, 16 nt, synthetic construct
  source 1..16: mol_type = other RNA
tcctcaccccaatcct

SEQ ID NO: 1065 - RNA, 17 nt, synthetic construct
  source 1..17: mol_type = other RNA
gtcctcaccccaatcct

SEQ ID NO: 1066 - RNA, 18 nt, synthetic construct
  source 1..18: mol_type = other RNA
ggtcctcaccccaatcct

SEQ ID NO: 1067 - RNA, 19 nt, synthetic construct
  source 1..19: mol_type = other RNA
tggtcctcaccccaatcct

SEQ ID NO: 1068 - RNA, 20 nt, synthetic construct
  source 1..20: mol_type = other RNA
atggtcctcaccccaatcct

SEQ ID NO: 1069 - RNA, 21 nt, synthetic construct
  source 1..21: mol_type = other RNA
gatggtcctcaccccaatcct

SEQ ID NO: 1070 - RNA, 22 nt, synthetic construct
  source 1..22: mol_type = other RNA
agatggtcctcaccccaatcct

SEQ ID NO: 1071-1077 - skipped (7 entries)

SEQ ID NO: 1078 - RNA, 10 nt, synthetic construct
  source 1..10: mol_type = other RNA
attggggtga

SEQ ID NO: 1079 - RNA, 11 nt, synthetic construct
  source 1..11: mol_type = other RNA
attggggtgag

SEQ ID NO: 1080 - RNA, 12 nt, synthetic construct
  source 1..12: mol_type = other RNA
attggggtgagg

SEQ ID NO: 1081 - RNA, 13 nt, synthetic construct
  source 1..13: mol_type = other RNA
attggggtgagga

SEQ ID NO: 1082 - RNA, 14 nt, synthetic construct
  source 1..14: mol_type = other RNA
attggggtgaggac

SEQ ID NO: 1083 - RNA, 15 nt, synthetic construct
  source 1..15: mol_type = other RNA
attggggtgaggacc

SEQ ID NO: 1084 - RNA, 16 nt, synthetic construct
  source 1..16: mol_type = other RNA
attggggtgaggacca

SEQ ID NO: 1085 - RNA, 17 nt, synthetic construct
  source 1..17: mol_type = other RNA
attggggtgaggaccat

SEQ ID NO: 1086 - RNA, 18 nt, synthetic construct
  source 1..18: mol_type = other RNA
attggggtgaggaccatc

SEQ ID NO: 1087 - RNA, 19 nt, synthetic construct
  source 1..19: mol_type = other RNA
attggggtgaggaccatct

SEQ ID NO: 1088 - RNA, 100 nt, synthetic construct
  source 1..100: mol_type = other RNA
acctgggggaaagccagagtcgggggaccccattcagcctccaaagaggctttgctgtgtgcacccaggatcccactacccactggaggaagcccagagg

SEQ ID NO: 1089 - RNA, 101 nt, synthetic construct
  source 1..101: mol_type = other RNA
cacctgggggaaagccagagtcgggggaccccattcagcctccaaagaggctttgctgtgtgcacccaggatcccactacccactggaggaagcccagagg

SEQ ID NO: 1090 - RNA, 101 nt, synthetic construct
  source 1..101: mol_type = other RNA
tacctgggggaaagccagagtcgggggaccccattcagcctccaaagaggctttgctgtgtgcacccaggatcccactacccactggaggaagcccagagg

SEQ ID NO: 1091 - RNA, 101 nt, synthetic construct
  source 1..101: mol_type = other RNA
gacctgggggaaagccagagtcgggggaccccattcagcctccaaagaggctttgctgtgtgcacccaggatcccactacccactggaggaagcccagagg

SEQ ID NO: 1092 - RNA, 101 nt, synthetic construct
  source 1..101: mol_type = other RNA
aacctgggggaaagccagagtcgggggaccccattcagcctccaaagaggctttgctgtgtgcacccaggatcccactacccactggaggaagcccagagg

SEQ ID NO: 1093 - RNA, 102 nt, synthetic construct
  source 1..102: mol_type = other RNA
agacctgggggaaagccagagtcgggggaccccattcagcctccaaagaggctttgctgtgtgcacccaggatcccactacccactggaggaagcccagagg

SEQ ID NO: 1094 - RNA, 102 nt, synthetic construct
  source 1..102: mol_type = other RNA
acacctgggggaaagccagagtcgggggaccccattcagcctccaaagaggctttgctgtgtgcacccaggatcccactacccactggaggaagcccagagg

SEQ ID NO: 1095 - RNA, 102 nt, synthetic construct
  source 1..102: mol_type = other RNA
aaacctgggggaaagccagagtcgggggaccccattcagcctccaaagaggctttgctgtgtgcacccaggatcccactacccactggaggaagcccagagg

SEQ ID NO: 1096 - RNA, 102 nt, synthetic construct
  source 1..102: mol_type = other RNA
atacctgggggaaagccagagtcgggggaccccattcagcctccaaagaggctttgctgtgtgcacccaggatcccactacccactggaggaagcccagagg

SEQ ID NO: 1097 - RNA, 103 nt, synthetic construct
  source 1..103: mol_type = other RNA
tatacctgggggaaagccagagtcgggggaccccattcagcctccaaagaggctttgctgtgtgcacccaggatcccactacccactggaggaagcccagagg

SEQ ID NO: 1098 - RNA, 103 nt, synthetic construct
  source 1..103: mol_type = other RNA
tacacctgggggaaagccagagtcgggggaccccattcagcctccaaagaggctttgctgtgtgcacccaggatcccactacccactggaggaagcccagagg

SEQ ID NO: 1099 - RNA, 103 nt, synthetic construct
  source 1..103: mol_type = other RNA
taaacctgggggaaagccagagtcgggggaccccattcagcctccaaagaggctttgctgtgtgcacccaggatcccactacccactggaggaagcccagagg

SEQ ID NO: 1100 - RNA, 103 nt, synthetic construct
  source 1..103: mol_type = other RNA
tagacctgggggaaagccagagtcgggggaccccattcagcctccaaagaggctttgctgtgtgcacccaggatcccactacccactggaggaagcccagagg

SEQ ID NO: 1101 - RNA, 19 nt, synthetic construct
  source 1..19: mol_type = other RNA
caggatcccactacccact

SEQ ID NO: 1102 - RNA, 19 nt, synthetic construct
  source 1..19: mol_type = other RNA
aggatcccactacccactg

SEQ ID NO: 1103 - RNA, 19 nt, synthetic construct
  source 1..19: mol_type = other RNA
acccactggaggaagccca

SEQ ID NO: 1104 - RNA, 19 nt, synthetic construct
  source 1..19: mol_type = other RNA
tacccactggaggaagccc

SEQ ID NO: 1105 - RNA, 20 nt, synthetic construct
  source 1..20: mol_type = other RNA
actggaggaagcccagagga

SEQ ID NO: 1106 - RNA, 20 nt, synthetic construct
  source 1..20: mol_type = other RNA
caggatcccactacccactg

SEQ ID NO: 1107 - RNA, 20 nt, synthetic construct
  source 1..20: mol_type = other RNA
tacccactggaggaagccca

SEQ ID NO: 1108 - RNA, 20 nt, synthetic construct
  source 1..20: mol_type = other RNA
acccaggatcccactaccca

SEQ ID NO: 1109 - RNA, 20 nt, synthetic construct
  source 1..20: mol_type = other RNA
tggaggaagcccagaggatt

SEQ ID NO: 1110 - RNA, 20 nt, synthetic construct
  source 1..20: mol_type = other RNA
ctggaggaagcccagaggat

SEQ ID NO: 1111 - RNA, 21 nt, synthetic construct
  source 1..21: mol_type = other RNA
ctacccactggaggaagccca

SEQ ID NO: 1112 - RNA, 21 nt, synthetic construct
  source 1..21: mol_type = other RNA
cacccaggatcccactaccca

SEQ ID NO: 1113 - RNA, 21 nt, synthetic construct
  source 1..21: mol_type = other RNA
ccaggatcccactacccactg

SEQ ID NO: 1114 - RNA, 22 nt, synthetic construct
  source 1..22: mol_type = other RNA
gcacccaggatcccactaccca

SEQ ID NO: 1115 - RNA, 22 nt, synthetic construct
  source 1..22: mol_type = other RNA
actacccactggaggaagccca

SEQ ID NO: 1116 - RNA, 22 nt, synthetic construct
  source 1..22: mol_type = other RNA
cccaggatcccactacccactg

SEQ ID NO: 1117 - RNA, 16 nt, synthetic construct
  source 1..16: mol_type = other RNA
cttcctccagtgggta

SEQ ID NO: 1118 - RNA, 17 nt, synthetic construct
  source 1..17: mol_type = other RNA
gcttcctccagtgggta

SEQ ID NO: 1119 - RNA, 18 nt, synthetic construct
  source 1..18: mol_type = other RNA
ggcttcctccagtgggta

SEQ ID NO: 1120 - RNA, 19 nt, synthetic construct
  source 1..19: mol_type = other RNA
gggcttcctccagtgggta

SEQ ID NO: 1121 - RNA, 20 nt, synthetic construct
  source 1..20: mol_type = other RNA
tgggcttcctccagtgggta

SEQ ID NO: 1122 - RNA, 21 nt, synthetic construct
  source 1..21: mol_type = other RNA
ctgggcttcctccagtgggta

SEQ ID NO: 1123 - RNA, 22 nt, synthetic construct
  source 1..22: mol_type = other RNA
tctgggcttcctccagtgggta

SEQ ID NO: 1124-1130 - skipped (7 entries)

SEQ ID NO: 1131 - RNA, 10 nt, synthetic construct
  source 1..10: mol_type = other RNA
ccactggagg

SEQ ID NO: 1132 - RNA, 11 nt, synthetic construct
  source 1..11: mol_type = other RNA
ccactggagga

SEQ ID NO: 1133 - RNA, 12 nt, synthetic construct
  source 1..12: mol_type = other RNA
ccactggaggaa

SEQ ID NO: 1134 - RNA, 13 nt, synthetic construct
  source 1..13: mol_type = other RNA
ccactggaggaag

SEQ ID NO: 1135 - RNA, 14 nt, synthetic construct
  source 1..14: mol_type = other RNA
ccactggaggaagc

SEQ ID NO: 1136 - RNA, 15 nt, synthetic construct
  source 1..15: mol_type = other RNA
ccactggaggaagcc

SEQ ID NO: 1137 - RNA, 16 nt, synthetic construct
  source 1..16: mol_type = other RNA
ccactggaggaagccc

SEQ ID NO: 1138 - RNA, 17 nt, synthetic construct
  source 1..17: mol_type = other RNA
ccactggaggaagccca

SEQ ID NO: 1139 - RNA, 18 nt, synthetic construct
  source 1..18: mol_type = other RNA
ccactggaggaagcccag

SEQ ID NO: 1140 - RNA, 19 nt, synthetic construct
  source 1..19: mol_type = other RNA
ccactggaggaagcccaga

SEQ ID NO: 1141 - RNA, 79 nt, synthetic construct
  source 1..79: mol_type = other RNA
acctgggggaaagccagagtcgggggaccccattcagcctccaaagaggctttgctgtgtgcacccaggatcccactac

SEQ ID NO: 1142 - RNA, 80 nt, synthetic construct
  source 1..80: mol_type = other RNA
cacctgggggaaagccagagtcgggggaccccattcagcctccaaagaggctttgctgtgtgcacccaggatcccactac

SEQ ID NO: 1143 - RNA, 80 nt, synthetic construct
  source 1..80: mol_type = other RNA
aacctgggggaaagccagagtcgggggaccccattcagcctccaaagaggctttgctgtgtgcacccaggatcccactac

SEQ ID NO: 1144 - RNA, 80 nt, synthetic construct
  source 1..80: mol_type = other RNA
gacctgggggaaagccagagtcgggggaccccattcagcctccaaagaggctttgctgtgtgcacccaggatcccactac

SEQ ID NO: 1145 - RNA, 80 nt, synthetic construct
  source 1..80: mol_type = other RNA
tacctgggggaaagccagagtcgggggaccccattcagcctccaaagaggctttgctgtgtgcacccaggatcccactac

SEQ ID NO: 1146 - RNA, 81 nt, synthetic construct
  source 1..81: mol_type = other RNA
acacctgggggaaagccagagtcgggggaccccattcagcctccaaagaggctttgctgtgtgcacccaggatcccactac

SEQ ID NO: 1147 - RNA, 81 nt, synthetic construct
  source 1..81: mol_type = other RNA
aaacctgggggaaagccagagtcgggggaccccattcagcctccaaagaggctttgctgtgtgcacccaggatcccactac

SEQ ID NO: 1148 - RNA, 81 nt, synthetic construct
  source 1..81: mol_type = other RNA
atacctgggggaaagccagagtcgggggaccccattcagcctccaaagaggctttgctgtgtgcacccaggatcccactac

SEQ ID NO: 1149 - RNA, 81 nt, synthetic construct
  source 1..81: mol_type = other RNA
agacctgggggaaagccagagtcgggggaccccattcagcctccaaagaggctttgctgtgtgcacccaggatcccactac

SEQ ID NO: 1150 - RNA, 82 nt, synthetic construct
  source 1..82: mol_type = other RNA
tagacctgggggaaagccagagtcgggggaccccattcagcctccaaagaggctttgctgtgtgcacccaggatcccactac

SEQ ID NO: 1151 - RNA, 82 nt, synthetic construct
  source 1..82: mol_type = other RNA
taaacctgggggaaagccagagtcgggggaccccattcagcctccaaagaggctttgctgtgtgcacccaggatcccactac

SEQ ID NO: 1152 - RNA, 82 nt, synthetic construct
  source 1..82: mol_type = other RNA
tacacctgggggaaagccagagtcgggggaccccattcagcctccaaagaggctttgctgtgtgcacccaggatcccactac

SEQ ID NO: 1153 - RNA, 82 nt, synthetic construct
  source 1..82: mol_type = other RNA
tatacctgggggaaagccagagtcgggggaccccattcagcctccaaagaggctttgctgtgtgcacccaggatcccactac

SEQ ID NO: 1154 - RNA, 83 nt, synthetic construct
  source 1..83: mol_type = other RNA
gtatacctgggggaaagccagagtcgggggaccccattcagcctccaaagaggctttgctgtgtgcacccaggatcccactac

SEQ ID NO: 1155 - RNA, 83 nt, synthetic construct
  source 1..83: mol_type = other RNA
gtaaacctgggggaaagccagagtcgggggaccccattcagcctccaaagaggctttgctgtgtgcacccaggatcccactac

SEQ ID NO: 1156 - RNA, 83 nt, synthetic construct
  source 1..83: mol_type = other RNA
gtagacctgggggaaagccagagtcgggggaccccattcagcctccaaagaggctttgctgtgtgcacccaggatcccactac

SEQ ID NO: 1157 - RNA, 83 nt, synthetic construct
  source 1..83: mol_type = other RNA
gtacacctgggggaaagccagagtcgggggaccccattcagcctccaaagaggctttgctgtgtgcacccaggatcccactac

SEQ ID NO: 1158 - RNA, 84 nt, synthetic construct
  source 1..84: mol_type = other RNA
tgtacacctgggggaaagccagagtcgggggaccccattcagcctccaaagaggctttgctgtgtgcacccaggatcccactac

SEQ ID NO: 1159 - RNA, 84 nt, synthetic construct
  source 1..84: mol_type = other RNA
tgtaaacctgggggaaagccagagtcgggggaccccattcagcctccaaagaggctttgctgtgtgcacccaggatcccactac

SEQ ID NO: 1160 - RNA, 84 nt, synthetic construct
  source 1..84: mol_type = other RNA
tgtatacctgggggaaagccagagtcgggggaccccattcagcctccaaagaggctttgctgtgtgcacccaggatcccactac

SEQ ID NO: 1161 - RNA, 84 nt, synthetic construct
  source 1..84: mol_type = other RNA
tgtagacctgggggaaagccagagtcgggggaccccattcagcctccaaagaggctttgctgtgtgcacccaggatcccactac

SEQ ID NO: 1162 - RNA, 85 nt, synthetic construct
  source 1..85: mol_type = other RNA
atgtatacctgggggaaagccagagtcgggggaccccattcagcctccaaagaggctttgctgtgtgcacccaggatcccactac

SEQ ID NO: 1163 - RNA, 85 nt, synthetic construct
  source 1..85: mol_type = other RNA
atgtaaacctgggggaaagccagagtcgggggaccccattcagcctccaaagaggctttgctgtgtgcacccaggatcccactac

SEQ ID NO: 1164 - RNA, 85 nt, synthetic construct
  source 1..85: mol_type = other RNA
atgtacacctgggggaaagccagagtcgggggaccccattcagcctccaaagaggctttgctgtgtgcacccaggatcccactac

SEQ ID NO: 1165 - RNA, 85 nt, synthetic construct
  source 1..85: mol_type = other RNA
atgtagacctgggggaaagccagagtcgggggaccccattcagcctccaaagaggctttgctgtgtgcacccaggatcccactac

SEQ ID NO: 1166 - RNA, 86 nt, synthetic construct
  source 1..86: mol_type = other RNA
catgtagacctgggggaaagccagagtcgggggaccccattcagcctccaaagaggctttgctgtgtgcacccaggatcccactac

SEQ ID NO: 1167 - RNA, 86 nt, synthetic construct
  source 1..86: mol_type = other RNA
catgtaaacctgggggaaagccagagtcgggggaccccattcagcctccaaagaggctttgctgtgtgcacccaggatcccactac

SEQ ID NO: 1168 - RNA, 86 nt, synthetic construct
  source 1..86: mol_type = other RNA
catgtacacctgggggaaagccagagtcgggggaccccattcagcctccaaagaggctttgctgtgtgcacccaggatcccactac

SEQ ID NO: 1169 - RNA, 86 nt, synthetic construct
  source 1..86: mol_type = other RNA
catgtatacctgggggaaagccagagtcgggggaccccattcagcctccaaagaggctttgctgtgtgcacccaggatcccactac

SEQ ID NO: 1170 - RNA, 87 nt, synthetic construct
  source 1..87: mol_type = other RNA
acatgtatacctgggggaaagccagagtcgggggaccccattcagcctccaaagaggctttgctgtgtgcacccaggatcccactac

SEQ ID NO: 1171 - RNA, 87 nt, synthetic construct
  source 1..87: mol_type = other RNA
acatgtagacctgggggaaagccagagtcgggggaccccattcagcctccaaagaggctttgctgtgtgcacccaggatcccactac

SEQ ID NO: 1172 - RNA, 87 nt, synthetic construct
  source 1..87: mol_type = other RNA
acatgtacacctgggggaaagccagagtcgggggaccccattcagcctccaaagaggctttgctgtgtgcacccaggatcccactac

SEQ ID NO: 1173 - RNA, 87 nt, synthetic construct
  source 1..87: mol_type = other RNA
acatgtaaacctgggggaaagccagagtcgggggaccccattcagcctccaaagaggctttgctgtgtgcacccaggatcccactac

SEQ ID NO: 1174 - RNA, 88 nt, synthetic construct
  source 1..88: mol_type = other RNA
aacatgtaaacctgggggaaagccagagtcgggggaccccattcagcctccaaagaggctttgctgtgtgcacccaggatcccactac

SEQ ID NO: 1175 - RNA, 88 nt, synthetic construct
  source 1..88: mol_type = other RNA
aacatgtagacctgggggaaagccagagtcgggggaccccattcagcctccaaagaggctttgctgtgtgcacccaggatcccactac

SEQ ID NO: 1176 - RNA, 88 nt, synthetic construct
  source 1..88: mol_type = other RNA
aacatgtatacctgggggaaagccagagtcgggggaccccattcagcctccaaagaggctttgctgtgtgcacccaggatcccactac

SEQ ID NO: 1177 - RNA, 88 nt, synthetic construct
  source 1..88: mol_type = other RNA
aacatgtacacctgggggaaagccagagtcgggggaccccattcagcctccaaagaggctttgctgtgtgcacccaggatcccactac

SEQ ID NO: 1178 - RNA, 89 nt, synthetic construct
  source 1..89: mol_type = other RNA
gaacatgtacacctgggggaaagccagagtcgggggaccccattcagcctccaaagaggctttgctgtgtgcacccaggatcccactac

SEQ ID NO: 1179 - RNA, 89 nt, synthetic construct
  source 1..89: mol_type = other RNA
gaacatgtatacctgggggaaagccagagtcgggggaccccattcagcctccaaagaggctttgctgtgtgcacccaggatcccactac

SEQ ID NO: 1180 - RNA, 89 nt, synthetic construct
  source 1..89: mol_type = other RNA
gaacatgtagacctgggggaaagccagagtcgggggaccccattcagcctccaaagaggctttgctgtgtgcacccaggatcccactac

SEQ ID NO: 1181 - RNA, 89 nt, synthetic construct
  source 1..89: mol_type = other RNA
gaacatgtaaacctgggggaaagccagagtcgggggaccccattcagcctccaaagaggctttgctgtgtgcacccaggatcccactac

SEQ ID NO: 1182 - RNA, 90 nt, synthetic construct
  source 1..90: mol_type = other RNA
ggaacatgtaaacctgggggaaagccagagtcgggggaccccattcagcctccaaagaggctttgctgtgtgcacccaggatcccactac

SEQ ID NO: 1183 - RNA, 90 nt, synthetic construct
  source 1..90: mol_type = other RNA
ggaacatgtatacctgggggaaagccagagtcgggggaccccattcagcctccaaagaggctttgctgtgtgcacccaggatcccactac

SEQ ID NO: 1184 - RNA, 90 nt, synthetic construct
  source 1..90: mol_type = other RNA
ggaacatgtagacctgggggaaagccagagtcgggggaccccattcagcctccaaagaggctttgctgtgtgcacccaggatcccactac

SEQ ID NO: 1185 - RNA, 90 nt, synthetic construct
  source 1..90: mol_type = other RNA
ggaacatgtacacctgggggaaagccagagtcgggggaccccattcagcctccaaagaggctttgctgtgtgcacccaggatcccactac

SEQ ID NO: 1186 - RNA, 91 nt, synthetic construct
  source 1..91: mol_type = other RNA
aggaacatgtagacctgggggaaagccagagtcgggggaccccattcagcctccaaagaggctttgctgtgtgcacccaggatcccactac

SEQ ID NO: 1187 - RNA, 91 nt, synthetic construct
  source 1..91: mol_type = other RNA
aggaacatgtacacctgggggaaagccagagtcgggggaccccattcagcctccaaagaggctttgctgtgtgcacccaggatcccactac

SEQ ID NO: 1188 - RNA, 91 nt, synthetic construct
  source 1..91: mol_type = other RNA
aggaacatgtaaacctgggggaaagccagagtcgggggaccccattcagcctccaaagaggctttgctgtgtgcacccaggatcccactac

SEQ ID NO: 1189 - RNA, 91 nt, synthetic construct
  source 1..91: mol_type = other RNA
aggaacatgtatacctgggggaaagccagagtcgggggaccccattcagcctccaaagaggctttgctgtgtgcacccaggatcccactac

SEQ ID NO: 1190 - RNA, 92 nt, synthetic construct
  source 1..92: mol_type = other RNA
caggaacatgtatacctgggggaaagccagagtcgggggaccccattcagcctccaaagaggctttgctgtgtgcacccaggatcccactac

SEQ ID NO: 1191 - RNA, 92 nt, synthetic construct
  source 1..92: mol_type = other RNA
caggaacatgtagacctgggggaaagccagagtcgggggaccccattcagcctccaaagaggctttgctgtgtgcacccaggatcccactac

SEQ ID NO: 1192 - RNA, 92 nt, synthetic construct
  source 1..92: mol_type = other RNA
caggaacatgtaaacctgggggaaagccagagtcgggggaccccattcagcctccaaagaggctttgctgtgtgcacccaggatcccactac

SEQ ID NO: 1193 - RNA, 92 nt, synthetic construct
  source 1..92: mol_type = other RNA
caggaacatgtacacctgggggaaagccagagtcgggggaccccattcagcctccaaagaggctttgctgtgtgcacccaggatcccactac

SEQ ID NO: 1194 - RNA, 93 nt, synthetic construct
  source 1..93: mol_type = other RNA
ccaggaacatgtatacctgggggaaagccagagtcgggggaccccattcagcctccaaagaggctttgctgtgtgcacccaggatcccactac

SEQ ID NO: 1195 - RNA, 93 nt, synthetic construct
  source 1..93: mol_type = other RNA
ccaggaacatgtaaacctgggggaaagccagagtcgggggaccccattcagcctccaaagaggctttgctgtgtgcacccaggatcccactac

SEQ ID NO: 1196 - RNA, 93 nt, synthetic construct
  source 1..93: mol_type = other RNA
ccaggaacatgtacacctgggggaaagccagagtcgggggaccccattcagcctccaaagaggctttgctgtgtgcacccaggatcccactac

SEQ ID NO: 1197 - RNA, 93 nt, synthetic construct
  source 1..93: mol_type = other RNA
ccaggaacatgtagacctgggggaaagccagagtcgggggaccccattcagcctccaaagaggctttgctgtgtgcacccaggatcccactac

SEQ ID NO: 1198 - RNA, 94 nt, synthetic construct
  source 1..94: mol_type = other RNA
accaggaacatgtatacctgggggaaagccagagtcgggggaccccattcagcctccaaagaggctttgctgtgtgcacccaggatcccactac

SEQ ID NO: 1199 - RNA, 94 nt, synthetic construct
  source 1..94: mol_type = other RNA
accaggaacatgtacacctgggggaaagccagagtcgggggaccccattcagcctccaaagaggctttgctgtgtgcacccaggatcccactac

SEQ ID NO: 1200 - RNA, 94 nt, synthetic construct
  source 1..94: mol_type = other RNA
accaggaacatgtaaacctgggggaaagccagagtcgggggaccccattcagcctccaaagaggctttgctgtgtgcacccaggatcccactac

SEQ ID NO: 1201 - RNA, 94 nt, synthetic construct
  source 1..94: mol_type = other RNA
accaggaacatgtagacctgggggaaagccagagtcgggggaccccattcagcctccaaagaggctttgctgtgtgcacccaggatcccactac

SEQ ID NO: 1202 - RNA, 95 nt, synthetic construct
  source 1..95: mol_type = other RNA
caccaggaacatgtagacctgggggaaagccagagtcgggggaccccattcagcctccaaagaggctttgctgtgtgcacccaggatcccactac

SEQ ID NO: 1203 - RNA, 95 nt, synthetic construct
  source 1..95: mol_type = other RNA
caccaggaacatgtatacctgggggaaagccagagtcgggggaccccattcagcctccaaagaggctttgctgtgtgcacccaggatcccactac

SEQ ID NO: 1204 - RNA, 95 nt, synthetic construct
  source 1..95: mol_type = other RNA
caccaggaacatgtacacctgggggaaagccagagtcgggggaccccattcagcctccaaagaggctttgctgtgtgcacccaggatcccactac

SEQ ID NO: 1205 - RNA, 95 nt, synthetic construct
  source 1..95: mol_type = other RNA
caccaggaacatgtaaacctgggggaaagccagagtcgggggaccccattcagcctccaaagaggctttgctgtgtgcacccaggatcccactac

SEQ ID NO: 1206 - RNA, 96 nt, synthetic construct
  source 1..96: mol_type = other RNA
tcaccaggaacatgtacacctgggggaaagccagagtcgggggaccccattcagcctccaaagaggctttgctgtgtgcacccaggatcccactac

SEQ ID NO: 1207 - RNA, 96 nt, synthetic construct
  source 1..96: mol_type = other RNA
tcaccaggaacatgtaaacctgggggaaagccagagtcgggggaccccattcagcctccaaagaggctttgctgtgtgcacccaggatcccactac

SEQ ID NO: 1208 - RNA, 96 nt, synthetic construct
  source 1..96: mol_type = other RNA
tcaccaggaacatgtatacctgggggaaagccagagtcgggggaccccattcagcctccaaagaggctttgctgtgtgcacccaggatcccactac

SEQ ID NO: 1209 - RNA, 96 nt, synthetic construct
  source 1..96: mol_type = other RNA
tcaccaggaacatgtagacctgggggaaagccagagtcgggggaccccattcagcctccaaagaggctttgctgtgtgcacccaggatcccactac

SEQ ID NO: 1210 - RNA, 97 nt, synthetic construct
  source 1..97: mol_type = other RNA
ttcaccaggaacatgtagacctgggggaaagccagagtcgggggaccccattcagcctccaaagaggctttgctgtgtgcacccaggatcccactac

SEQ ID NO: 1211 - RNA, 97 nt, synthetic construct
  source 1..97: mol_type = other RNA
ttcaccaggaacatgtacacctgggggaaagccagagtcgggggaccccattcagcctccaaagaggctttgctgtgtgcacccaggatcccactac

SEQ ID NO: 1212 - RNA, 97 nt, synthetic construct
  source 1..97: mol_type = other RNA
ttcaccaggaacatgtatacctgggggaaagccagagtcgggggaccccattcagcctccaaagaggctttgctgtgtgcacccaggatcccactac

SEQ ID NO: 1213 - RNA, 97 nt, synthetic construct
  source 1..97: mol_type = other RNA
ttcaccaggaacatgtaaacctgggggaaagccagagtcgggggaccccattcagcctccaaagaggctttgctgtgtgcacccaggatcccactac

SEQ ID NO: 1214 - RNA, 98 nt, synthetic construct
  source 1..98: mol_type = other RNA
tttcaccaggaacatgtaaacctgggggaaagccagagtcgggggaccccattcagcctccaaagaggctttgctgtgtgcacccaggatcccactac

SEQ ID NO: 1215 - RNA, 98 nt, synthetic construct
  source 1..98: mol_type = other RNA
tttcaccaggaacatgtagacctgggggaaagccagagtcgggggaccccattcagcctccaaagaggctttgctgtgtgcacccaggatcccactac

SEQ ID NO: 1216 - RNA, 98 nt, synthetic construct
  source 1..98: mol_type = other RNA
tttcaccaggaacatgtatacctgggggaaagccagagtcgggggaccccattcagcctccaaagaggctttgctgtgtgcacccaggatcccactac

SEQ ID NO: 1217 - RNA, 98 nt, synthetic construct
  source 1..98: mol_type = other RNA
tttcaccaggaacatgtacacctgggggaaagccagagtcgggggaccccattcagcctccaaagaggctttgctgtgtgcacccaggatcccactac

SEQ ID NO: 1218 - RNA, 99 nt, synthetic construct
  source 1..99: mol_type = other RNA
atttcaccaggaacatgtatacctgggggaaagccagagtcgggggaccccattcagcctccaaagaggctttgctgtgtgcacccaggatcccactac

SEQ ID NO: 1219 - RNA, 99 nt, synthetic construct
  source 1..99: mol_type = other RNA
atttcaccaggaacatgtagacctgggggaaagccagagtcgggggaccccattcagcctccaaagaggctttgctgtgtgcacccaggatcccactac

SEQ ID NO: 1220 - RNA, 99 nt, synthetic construct
  source 1..99: mol_type = other RNA
atttcaccaggaacatgtacacctgggggaaagccagagtcgggggaccccattcagcctccaaagaggctttgctgtgtgcacccaggatcccactac

SEQ ID NO: 1221 - RNA, 99 nt, synthetic construct
  source 1..99: mol_type = other RNA
atttcaccaggaacatgtaaacctgggggaaagccagagtcgggggaccccattcagcctccaaagaggctttgctgtgtgcacccaggatcccactac

SEQ ID NO: 1222 - RNA, 100 nt, synthetic construct
  source 1..100: mol_type = other RNA
catttcaccaggaacatgtagacctgggggaaagccagagtcgggggaccccattcagcctccaaagaggctttgctgtgtgcacccaggatcccactac

SEQ ID NO: 1223 - RNA, 100 nt, synthetic construct
  source 1..100: mol_type = other RNA
catttcaccaggaacatgtatacctgggggaaagccagagtcgggggaccccattcagcctccaaagaggctttgctgtgtgcacccaggatcccactac

SEQ ID NO: 1224 - RNA, 100 nt, synthetic construct
  source 1..100: mol_type = other RNA
catttcaccaggaacatgtacacctgggggaaagccagagtcgggggaccccattcagcctccaaagaggctttgctgtgtgcacccaggatcccactac

SEQ ID NO: 1225 - RNA, 100 nt, synthetic construct
  source 1..100: mol_type = other RNA
catttcaccaggaacatgtaaacctgggggaaagccagagtcgggggaccccattcagcctccaaagaggctttgctgtgtgcacccaggatcccactac

SEQ ID NO: 1226 - RNA, 101 nt, synthetic construct
  source 1..101: mol_type = other RNA
ccatttcaccaggaacatgtacacctgggggaaagccagagtcgggggaccccattcagcctccaaagaggctttgctgtgtgcacccaggatcccactac

SEQ ID NO: 1227 - RNA, 101 nt, synthetic construct
  source 1..101: mol_type = other RNA
ccatttcaccaggaacatgtatacctgggggaaagccagagtcgggggaccccattcagcctccaaagaggctttgctgtgtgcacccaggatcccactac

SEQ ID NO: 1228 - RNA, 101 nt, synthetic construct
  source 1..101: mol_type = other RNA
ccatttcaccaggaacatgtagacctgggggaaagccagagtcgggggaccccattcagcctccaaagaggctttgctgtgtgcacccaggatcccactac

SEQ ID NO: 1229 - RNA, 101 nt, synthetic construct
  source 1..101: mol_type = other RNA
ccatttcaccaggaacatgtaaacctgggggaaagccagagtcgggggaccccattcagcctccaaagaggctttgctgtgtgcacccaggatcccactac

SEQ ID NO: 1230 - RNA, 102 nt, synthetic construct
  source 1..102: mol_type = other RNA
gccatttcaccaggaacatgtaaacctgggggaaagccagagtcgggggaccccattcagcctccaaagaggctttgctgtgtgcacccaggatcccactac

SEQ ID NO: 1231 - RNA, 102 nt, synthetic construct
  source 1..102: mol_type = other RNA
gccatttcaccaggaacatgtatacctgggggaaagccagagtcgggggaccccattcagcctccaaagaggctttgctgtgtgcacccaggatcccactac

SEQ ID NO: 1232 - RNA, 102 nt, synthetic construct
  source 1..102: mol_type = other RNA
gccatttcaccaggaacatgtagacctgggggaaagccagagtcgggggaccccattcagcctccaaagaggctttgctgtgtgcacccaggatcccactac

SEQ ID NO: 1233 - RNA, 102 nt, synthetic construct
  source 1..102: mol_type = other RNA
gccatttcaccaggaacatgtacacctgggggaaagccagagtcgggggaccccattcagcctccaaagaggctttgctgtgtgcacccaggatcccactac

SEQ ID NO: 1234 - RNA, 103 nt, synthetic construct
  source 1..103: mol_type = other RNA
tgccatttcaccaggaacatgtacacctgggggaaagccagagtcgggggaccccattcagcctccaaagaggctttgctgtgtgcacccaggatcccactac

SEQ ID NO: 1235 - RNA, 103 nt, synthetic construct
  source 1..103: mol_type = other RNA
tgccatttcaccaggaacatgtagacctgggggaaagccagagtcgggggaccccattcagcctccaaagaggctttgctgtgtgcacccaggatcccactac

SEQ ID NO: 1236 - RNA, 103 nt, synthetic construct
  source 1..103: mol_type = other RNA
tgccatttcaccaggaacatgtatacctgggggaaagccagagtcgggggaccccattcagcctccaaagaggctttgctgtgtgcacccaggatcccactac

SEQ ID NO: 1237 - RNA, 103 nt, synthetic construct
  source 1..103: mol_type = other RNA
tgccatttcaccaggaacatgtaaacctgggggaaagccagagtcgggggaccccattcagcctccaaagaggctttgctgtgtgcacccaggatcccactac

SEQ ID NO: 1238 - RNA, 16 nt, synthetic construct
  source 1..16: mol_type = other RNA
ccatccccacactcac

SEQ ID NO: 1239 - RNA, 17 nt, synthetic construct
  source 1..17: mol_type = other RNA
tccatccccacactcac

SEQ ID NO: 1240 - RNA, 18 nt, synthetic construct
  source 1..18: mol_type = other RNA
ctccatccccacactcac

SEQ ID NO: 1241 - RNA, 19 nt, synthetic construct
  source 1..19: mol_type = other RNA
cctccatccccacactcac

SEQ ID NO: 1242 - RNA, 20 nt, synthetic construct
  source 1..20: mol_type = other RNA
tcctccatccccacactcac

SEQ ID NO: 1243 - RNA, 21 nt, synthetic construct
  source 1..21: mol_type = other RNA
ctcctccatccccacactcac

SEQ ID NO: 1244 - RNA, 22 nt, synthetic construct
  source 1..22: mol_type = other RNA
cctcctccatccccacactcac

SEQ ID NO: 1245-1251 - skipped (7 entries)

SEQ ID NO: 1252 - RNA, 10 nt, synthetic construct
  source 1..10: mol_type = other RNA
agtgtgggga

SEQ ID NO: 1253 - RNA, 11 nt, synthetic construct
  source 1..11: mol_type = other RNA
agtgtggggat

SEQ ID NO: 1254 - RNA, 12 nt, synthetic construct
  source 1..12: mol_type = other RNA
agtgtggggatg

SEQ ID NO: 1255 - RNA, 13 nt, synthetic construct
  source 1..13: mol_type = other RNA
agtgtggggatgg

SEQ ID NO: 1256 - RNA, 14 nt, synthetic construct
  source 1..14: mol_type = other RNA
agtgtggggatgga

SEQ ID NO: 1257 - RNA, 15 nt, synthetic construct
  source 1..15: mol_type = other RNA
agtgtggggatggag

SEQ ID NO: 1258 - RNA, 16 nt, synthetic construct
  source 1..16: mol_type = other RNA
agtgtggggatggagg

SEQ ID NO: 1259 - RNA, 17 nt, synthetic construct
  source 1..17: mol_type = other RNA
agtgtggggatggagga

SEQ ID NO: 1260 - RNA, 18 nt, synthetic construct
  source 1..18: mol_type = other RNA
agtgtggggatggaggag

SEQ ID NO: 1261 - RNA, 19 nt, synthetic construct
  source 1..19: mol_type = other RNA
agtgtggggatggaggagg

SEQ ID NO: 1262 - RNA, 84 nt, synthetic construct
  source 1..84: mol_type = other RNA
gtgtacatgttcctggtgaaatggcaggacctgtcggagaaggtggtctaccggcgcttcaccgagatctacgagttccatgtg

SEQ ID NO: 1263 - RNA, 84 nt, synthetic construct
  source 1..84: mol_type = other RNA
gtatacatgttcctggtgaaatggcaggacctgtcggagaaggtggtctaccggcgcttcaccgagatctacgagttccatgtg

SEQ ID NO: 1264 - RNA, 84 nt, synthetic construct
  source 1..84: mol_type = other RNA
gtatacatgttcctggtgaaatggcaggacctgtcggagaaggtggtctaccggcgcttcaccgagatctacgagtttcatgtg

SEQ ID NO: 1265 - RNA, 84 nt, synthetic construct
  source 1..84: mol_type = other RNA
gtctacatgttcctggtgaaatggcaggacctgtcggagaaggtggtctaccggcgcttcaccgagatctacgagttccatgtg

SEQ ID NO: 1266 - RNA, 84 nt, synthetic construct
  source 1..84: mol_type = other RNA
gtctacatgttcctggtgaaatggcaggacctgtcggagaaggtggtctaccggcgcttcaccgagatctacgagtttcatgtg

SEQ ID NO: 1267 - RNA, 84 nt, synthetic construct
  source 1..84: mol_type = other RNA
gtgtacatgttcctggtgaaatggcaggacctgtcggagaaggtggtctaccggcgcttcaccgagatctacgagtttcatgtg

SEQ ID NO: 1268 - RNA, 84 nt, synthetic construct
  source 1..84: mol_type = other RNA
gtttacatgttcctggtgaaatggcaggacctgtcggagaaggtggtctaccggcgcttcaccgagatctacgagtttcatgtg

SEQ ID NO: 1269 - RNA, 84 nt, synthetic construct
  source 1..84: mol_type = other RNA
gtttacatgttcctggtgaaatggcaggacctgtcggagaaggtggtctaccggcgcttcaccgagatctacgagttccatgtg

SEQ ID NO: 1270 - RNA, 85 nt, synthetic construct
  source 1..85: mol_type = other RNA
ggtctacatgttcctggtgaaatggcaggacctgtcggagaaggtggtctaccggcgcttcaccgagatctacgagtttcatgtg

SEQ ID NO: 1271 - RNA, 85 nt, synthetic construct
  source 1..85: mol_type = other RNA
ggtctacatgttcctggtgaaatggcaggacctgtcggagaaggtggtctaccggcgcttcaccgagatctacgagttccatgtg

SEQ ID NO: 1272 - RNA, 85 nt, synthetic construct
  source 1..85: mol_type = other RNA
ggtttacatgttcctggtgaaatggcaggacctgtcggagaaggtggtctaccggcgcttcaccgagatctacgagtttcatgtg

SEQ ID NO: 1273 - RNA, 85 nt, synthetic construct
  source 1..85: mol_type = other RNA
ggtatacatgttcctggtgaaatggcaggacctgtcggagaaggtggtctaccggcgcttcaccgagatctacgagttccatgtg

SEQ ID NO: 1274 - RNA, 85 nt, synthetic construct
  source 1..85: mol_type = other RNA
ggtgtacatgttcctggtgaaatggcaggacctgtcggagaaggtggtctaccggcgcttcaccgagatctacgagtttcatgtg

SEQ ID NO: 1275 - RNA, 85 nt, synthetic construct
  source 1..85: mol_type = other RNA
ggtttacatgttcctggtgaaatggcaggacctgtcggagaaggtggtctaccggcgcttcaccgagatctacgagttccatgtg

SEQ ID NO: 1276 - RNA, 85 nt, synthetic construct
  source 1..85: mol_type = other RNA
ggtatacatgttcctggtgaaatggcaggacctgtcggagaaggtggtctaccggcgcttcaccgagatctacgagtttcatgtg

SEQ ID NO: 1277 - RNA, 85 nt, synthetic construct
  source 1..85: mol_type = other RNA
ggtgtacatgttcctggtgaaatggcaggacctgtcggagaaggtggtctaccggcgcttcaccgagatctacgagttccatgtg

SEQ ID NO: 1278 - RNA, 86 nt, synthetic construct
  source 1..86: mol_type = other RNA
aggtttacatgttcctggtgaaatggcaggacctgtcggagaaggtggtctaccggcgcttcaccgagatctacgagttccatgtg

SEQ ID NO: 1279 - RNA, 86 nt, synthetic construct
  source 1..86: mol_type = other RNA
aggtgtacatgttcctggtgaaatggcaggacctgtcggagaaggtggtctaccggcgcttcaccgagatctacgagtttcatgtg

SEQ ID NO: 1280 - RNA, 86 nt, synthetic construct
  source 1..86: mol_type = other RNA
aggtgtacatgttcctggtgaaatggcaggacctgtcggagaaggtggtctaccggcgcttcaccgagatctacgagttccatgtg

SEQ ID NO: 1281 - RNA, 86 nt, synthetic construct
  source 1..86: mol_type = other RNA
aggtctacatgttcctggtgaaatggcaggacctgtcggagaaggtggtctaccggcgcttcaccgagatctacgagtttcatgtg

SEQ ID NO: 1282 - RNA, 86 nt, synthetic construct
  source 1..86: mol_type = other RNA
aggtatacatgttcctggtgaaatggcaggacctgtcggagaaggtggtctaccggcgcttcaccgagatctacgagtttcatgtg

SEQ ID NO: 1283 - RNA, 86 nt, synthetic construct
  source 1..86: mol_type = other RNA
aggtctacatgttcctggtgaaatggcaggacctgtcggagaaggtggtctaccggcgcttcaccgagatctacgagttccatgtg

SEQ ID NO: 1284 - RNA, 86 nt, synthetic construct
  source 1..86: mol_type = other RNA
aggtttacatgttcctggtgaaatggcaggacctgtcggagaaggtggtctaccggcgcttcaccgagatctacgagtttcatgtg

SEQ ID NO: 1285 - RNA, 86 nt, synthetic construct
  source 1..86: mol_type = other RNA
aggtatacatgttcctggtgaaatggcaggacctgtcggagaaggtggtctaccggcgcttcaccgagatctacgagttccatgtg

SEQ ID NO: 1286 - RNA, 87 nt, synthetic construct
  source 1..87: mol_type = other RNA
caggtttacatgttcctggtgaaatggcaggacctgtcggagaaggtggtctaccggcgcttcaccgagatctacgagtttcatgtg

SEQ ID NO: 1287 - RNA, 87 nt, synthetic construct
  source 1..87: mol_type = other RNA
caggtatacatgttcctggtgaaatggcaggacctgtcggagaaggtggtctaccggcgcttcaccgagatctacgagtttcatgtg

SEQ ID NO: 1288 - RNA, 87 nt, synthetic construct
  source 1..87: mol_type = other RNA
caggtatacatgttcctggtgaaatggcaggacctgtcggagaaggtggtctaccggcgcttcaccgagatctacgagttccatgtg

SEQ ID NO: 1289 - RNA, 87 nt, synthetic construct
  source 1..87: mol_type = other RNA
caggtttacatgttcctggtgaaatggcaggacctgtcggagaaggtggtctaccggcgcttcaccgagatctacgagttccatgtg

SEQ ID NO: 1290 - RNA, 87 nt, synthetic construct
  source 1..87: mol_type = other RNA
caggtctacatgttcctggtgaaatggcaggacctgtcggagaaggtggtctaccggcgcttcaccgagatctacgagttccatgtg

SEQ ID NO: 1291 - RNA, 87 nt, synthetic construct
  source 1..87: mol_type = other RNA
caggtgtacatgttcctggtgaaatggcaggacctgtcggagaaggtggtctaccggcgcttcaccgagatctacgagtttcatgtg

SEQ ID NO: 1292 - RNA, 87 nt, synthetic construct
  source 1..87: mol_type = other RNA
caggtctacatgttcctggtgaaatggcaggacctgtcggagaaggtggtctaccggcgcttcaccgagatctacgagtttcatgtg

SEQ ID NO: 1293 - RNA, 87 nt, synthetic construct
  source 1..87: mol_type = other RNA
caggtgtacatgttcctggtgaaatggcaggacctgtcggagaaggtggtctaccggcgcttcaccgagatctacgagttccatgtg

SEQ ID NO: 1294 - RNA, 88 nt, synthetic construct
  source 1..88: mol_type = other RNA
ccaggtatacatgttcctggtgaaatggcaggacctgtcggagaaggtggtctaccggcgcttcaccgagatctacgagttccatgtg

SEQ ID NO: 1295 - RNA, 88 nt, synthetic construct
  source 1..88: mol_type = other RNA
ccaggtatacatgttcctggtgaaatggcaggacctgtcggagaaggtggtctaccggcgcttcaccgagatctacgagtttcatgtg

SEQ ID NO: 1296 - RNA, 88 nt, synthetic construct
  source 1..88: mol_type = other RNA
ccaggtctacatgttcctggtgaaatggcaggacctgtcggagaaggtggtctaccggcgcttcaccgagatctacgagtttcatgtg

SEQ ID NO: 1297 - RNA, 88 nt, synthetic construct
  source 1..88: mol_type = other RNA
ccaggtttacatgttcctggtgaaatggcaggacctgtcggagaaggtggtctaccggcgcttcaccgagatctacgagttccatgtg

SEQ ID NO: 1298 - RNA, 88 nt, synthetic construct
  source 1..88: mol_type = other RNA
ccaggtgtacatgttcctggtgaaatggcaggacctgtcggagaaggtggtctaccggcgcttcaccgagatctacgagtttcatgtg

SEQ ID NO: 1299 - RNA, 88 nt, synthetic construct
  source 1..88: mol_type = other RNA
ccaggtttacatgttcctggtgaaatggcaggacctgtcggagaaggtggtctaccggcgcttcaccgagatctacgagtttcatgtg

SEQ ID NO: 1300 - RNA, 88 nt, synthetic construct
  source 1..88: mol_type = other RNA
ccaggtctacatgttcctggtgaaatggcaggacctgtcggagaaggtggtctaccggcgcttcaccgagatctacgagttccatgtg

SEQ ID NO: 1301 - RNA, 88 nt, synthetic construct
  source 1..88: mol_type = other RNA
ccaggtgtacatgttcctggtgaaatggcaggacctgtcggagaaggtggtctaccggcgcttcaccgagatctacgagttccatgtg

SEQ ID NO: 1302 - RNA, 89 nt, synthetic construct
  source 1..89: mol_type = other RNA
cccaggtttacatgttcctggtgaaatggcaggacctgtcggagaaggtggtctaccggcgcttcaccgagatctacgagttccatgtg

SEQ ID NO: 1303 - RNA, 89 nt, synthetic construct
  source 1..89: mol_type = other RNA
cccaggtatacatgttcctggtgaaatggcaggacctgtcggagaaggtggtctaccggcgcttcaccgagatctacgagttccatgtg

SEQ ID NO: 1304 - RNA, 89 nt, synthetic construct
  source 1..89: mol_type = other RNA
cccaggtgtacatgttcctggtgaaatggcaggacctgtcggagaaggtggtctaccggcgcttcaccgagatctacgagttccatgtg

SEQ ID NO: 1305 - RNA, 89 nt, synthetic construct
  source 1..89: mol_type = other RNA
cccaggtatacatgttcctggtgaaatggcaggacctgtcggagaaggtggtctaccggcgcttcaccgagatctacgagtttcatgtg

SEQ ID NO: 1306 - RNA, 89 nt, synthetic construct
  source 1..89: mol_type = other RNA
cccaggtctacatgttcctggtgaaatggcaggacctgtcggagaaggtggtctaccggcgcttcaccgagatctacgagttccatgtg

SEQ ID NO: 1307 - RNA, 89 nt, synthetic construct
  source 1..89: mol_type = other RNA
cccaggtctacatgttcctggtgaaatggcaggacctgtcggagaaggtggtctaccggcgcttcaccgagatctacgagtttcatgtg

SEQ ID NO: 1308 - RNA, 89 nt, synthetic construct
  source 1..89: mol_type = other RNA
cccaggtgtacatgttcctggtgaaatggcaggacctgtcggagaaggtggtctaccggcgcttcaccgagatctacgagtttcatgtg

SEQ ID NO: 1309 - RNA, 89 nt, synthetic construct
  source 1..89: mol_type = other RNA
cccaggtttacatgttcctggtgaaatggcaggacctgtcggagaaggtggtctaccggcgcttcaccgagatctacgagtttcatgtg

SEQ ID NO: 1310 - RNA, 90 nt, synthetic construct
  source 1..90: mol_type = other RNA
ccccaggtatacatgttcctggtgaaatggcaggacctgtcggagaaggtggtctaccggcgcttcaccgagatctacgagtttcatgtg

SEQ ID NO: 1311 - RNA, 90 nt, synthetic construct
  source 1..90: mol_type = other RNA
ccccaggtatacatgttcctggtgaaatggcaggacctgtcggagaaggtggtctaccggcgcttcaccgagatctacgagttccatgtg

SEQ ID NO: 1312 - RNA, 90 nt, synthetic construct
  source 1..90: mol_type = other RNA
ccccaggtttacatgttcctggtgaaatggcaggacctgtcggagaaggtggtctaccggcgcttcaccgagatctacgagtttcatgtg

SEQ ID NO: 1313 - RNA, 90 nt, synthetic construct
  source 1..90: mol_type = other RNA
ccccaggtgtacatgttcctggtgaaatggcaggacctgtcggagaaggtggtctaccggcgcttcaccgagatctacgagtttcatgtg

SEQ ID NO: 1314 - RNA, 90 nt, synthetic construct
  source 1..90: mol_type = other RNA
ccccaggtttacatgttcctggtgaaatggcaggacctgtcggagaaggtggtctaccggcgcttcaccgagatctacgagttccatgtg

SEQ ID NO: 1315 - RNA, 90 nt, synthetic construct
  source 1..90: mol_type = other RNA
ccccaggtgtacatgttcctggtgaaatggcaggacctgtcggagaaggtggtctaccggcgcttcaccgagatctacgagttccatgtg

SEQ ID NO: 1316 - RNA, 90 nt, synthetic construct
  source 1..90: mol_type = other RNA
ccccaggtctacatgttcctggtgaaatggcaggacctgtcggagaaggtggtctaccggcgcttcaccgagatctacgagtttcatgtg

SEQ ID NO: 1317 - RNA, 90 nt, synthetic construct
  source 1..90: mol_type = other RNA
ccccaggtctacatgttcctggtgaaatggcaggacctgtcggagaaggtggtctaccggcgcttcaccgagatctacgagttccatgtg

SEQ ID NO: 1318 - RNA, 91 nt, synthetic construct
  source 1..91: mol_type = other RNA
cccccaggtatacatgttcctggtgaaatggcaggacctgtcggagaaggtggtctaccggcgcttcaccgagatctacgagttccatgtg

SEQ ID NO: 1319 - RNA, 91 nt, synthetic construct
  source 1..91: mol_type = other RNA
cccccaggtatacatgttcctggtgaaatggcaggacctgtcggagaaggtggtctaccggcgcttcaccgagatctacgagtttcatgtg

SEQ ID NO: 1320 - RNA, 91 nt, synthetic construct
  source 1..91: mol_type = other RNA
cccccaggtctacatgttcctggtgaaatggcaggacctgtcggagaaggtggtctaccggcgcttcaccgagatctacgagttccatgtg

SEQ ID NO: 1321 - RNA, 91 nt, synthetic construct
  source 1..91: mol_type = other RNA
cccccaggtctacatgttcctggtgaaatggcaggacctgtcggagaaggtggtctaccggcgcttcaccgagatctacgagtttcatgtg

SEQ ID NO: 1322 - RNA, 91 nt, synthetic construct
  source 1..91: mol_type = other RNA
cccccaggtgtacatgttcctggtgaaatggcaggacctgtcggagaaggtggtctaccggcgcttcaccgagatctacgagttccatgtg

SEQ ID NO: 1323 - RNA, 91 nt, synthetic construct
  source 1..91: mol_type = other RNA
cccccaggtgtacatgttcctggtgaaatggcaggacctgtcggagaaggtggtctaccggcgcttcaccgagatctacgagtttcatgtg

SEQ ID NO: 1324 - RNA, 91 nt, synthetic construct
  source 1..91: mol_type = other RNA
cccccaggtttacatgttcctggtgaaatggcaggacctgtcggagaaggtggtctaccggcgcttcaccgagatctacgagttccatgtg

SEQ ID NO: 1325 - RNA, 91 nt, synthetic construct
  source 1..91: mol_type = other RNA
cccccaggtttacatgttcctggtgaaatggcaggacctgtcggagaaggtggtctaccggcgcttcaccgagatctacgagtttcatgtg

SEQ ID NO: 1326 - RNA, 92 nt, synthetic construct
  source 1..92: mol_type = other RNA
tcccccaggtttacatgttcctggtgaaatggcaggacctgtcggagaaggtggtctaccggcgcttcaccgagatctacgagtttcatgtg

SEQ ID NO: 1327 - RNA, 92 nt, synthetic construct
  source 1..92: mol_type = other RNA
tcccccaggtgtacatgttcctggtgaaatggcaggacctgtcggagaaggtggtctaccggcgcttcaccgagatctacgagtttcatgtg

SEQ ID NO: 1328 - RNA, 92 nt, synthetic construct
  source 1..92: mol_type = other RNA
tcccccaggtctacatgttcctggtgaaatggcaggacctgtcggagaaggtggtctaccggcgcttcaccgagatctacgagttccatgtg

SEQ ID NO: 1329 - RNA, 92 nt, synthetic construct
  source 1..92: mol_type = other RNA
tcccccaggtatacatgttcctggtgaaatggcaggacctgtcggagaaggtggtctaccggcgcttcaccgagatctacgagttccatgtg

SEQ ID NO: 1330 - RNA, 92 nt, synthetic construct
  source 1..92: mol_type = other RNA
tcccccaggtttacatgttcctggtgaaatggcaggacctgtcggagaaggtggtctaccggcgcttcaccgagatctacgagttccatgtg

SEQ ID NO: 1331 - RNA, 92 nt, synthetic construct
  source 1..92: mol_type = other RNA
tcccccaggtctacatgttcctggtgaaatggcaggacctgtcggagaaggtggtctaccggcgcttcaccgagatctacgagtttcatgtg

SEQ ID NO: 1332 - RNA, 92 nt, synthetic construct
  source 1..92: mol_type = other RNA
tcccccaggtgtacatgttcctggtgaaatggcaggacctgtcggagaaggtggtctaccggcgcttcaccgagatctacgagttccatgtg

SEQ ID NO: 1333 - RNA, 92 nt, synthetic construct
  source 1..92: mol_type = other RNA
tcccccaggtatacatgttcctggtgaaatggcaggacctgtcggagaaggtggtctaccggcgcttcaccgagatctacgagtttcatgtg

SEQ ID NO: 1334 - RNA, 93 nt, synthetic construct
  source 1..93: mol_type = other RNA
ttcccccaggtttacatgttcctggtgaaatggcaggacctgtcggagaaggtggtctaccggcgcttcaccgagatctacgagttccatgtg

SEQ ID NO: 1335 - RNA, 93 nt, synthetic construct
  source 1..93: mol_type = other RNA
ttcccccaggtatacatgttcctggtgaaatggcaggacctgtcggagaaggtggtctaccggcgcttcaccgagatctacgagttccatgtg

SEQ ID NO: 1336 - RNA, 93 nt, synthetic construct
  source 1..93: mol_type = other RNA
ttcccccaggtctacatgttcctggtgaaatggcaggacctgtcggagaaggtggtctaccggcgcttcaccgagatctacgagttccatgtg

SEQ ID NO: 1337 - RNA, 93 nt, synthetic construct
  source 1..93: mol_type = other RNA
ttcccccaggtctacatgttcctggtgaaatggcaggacctgtcggagaaggtggtctaccggcgcttcaccgagatctacgagtttcatgtg

SEQ ID NO: 1338 - RNA, 93 nt, synthetic construct
  source 1..93: mol_type = other RNA
ttcccccaggtgtacatgttcctggtgaaatggcaggacctgtcggagaaggtggtctaccggcgcttcaccgagatctacgagttccatgtg

SEQ ID NO: 1339 - RNA, 93 nt, synthetic construct
  source 1..93: mol_type = other RNA
ttcccccaggtgtacatgttcctggtgaaatggcaggacctgtcggagaaggtggtctaccggcgcttcaccgagatctacgagtttcatgtg

SEQ ID NO: 1340 - RNA, 93 nt, synthetic construct
  source 1..93: mol_type = other RNA
ttcccccaggtttacatgttcctggtgaaatggcaggacctgtcggagaaggtggtctaccggcgcttcaccgagatctacgagtttcatgtg

SEQ ID NO: 1341 - RNA, 93 nt, synthetic construct
  source 1..93: mol_type = other RNA
ttcccccaggtatacatgttcctggtgaaatggcaggacctgtcggagaaggtggtctaccggcgcttcaccgagatctacgagtttcatgtg

SEQ ID NO: 1342 - RNA, 94 nt, synthetic construct
  source 1..94: mol_type = other RNA
tttcccccaggtctacatgttcctggtgaaatggcaggacctgtcggagaaggtggtctaccggcgcttcaccgagatctacgagtttcatgtg

SEQ ID NO: 1343 - RNA, 94 nt, synthetic construct
  source 1..94: mol_type = other RNA
tttcccccaggtctacatgttcctggtgaaatggcaggacctgtcggagaaggtggtctaccggcgcttcaccgagatctacgagttccatgtg

SEQ ID NO: 1344 - RNA, 94 nt, synthetic construct
  source 1..94: mol_type = other RNA
tttcccccaggtatacatgttcctggtgaaatggcaggacctgtcggagaaggtggtctaccggcgcttcaccgagatctacgagtttcatgtg

SEQ ID NO: 1345 - RNA, 94 nt, synthetic construct
  source 1..94: mol_type = other RNA
tttcccccaggtatacatgttcctggtgaaatggcaggacctgtcggagaaggtggtctaccggcgcttcaccgagatctacgagttccatgtg

SEQ ID NO: 1346 - RNA, 94 nt, synthetic construct
  source 1..94: mol_type = other RNA
tttcccccaggtgtacatgttcctggtgaaatggcaggacctgtcggagaaggtggtctaccggcgcttcaccgagatctacgagttccatgtg

SEQ ID NO: 1347 - RNA, 94 nt, synthetic construct
  source 1..94: mol_type = other RNA
tttcccccaggtgtacatgttcctggtgaaatggcaggacctgtcggagaaggtggtctaccggcgcttcaccgagatctacgagtttcatgtg

SEQ ID NO: 1348 - RNA, 94 nt, synthetic construct
  source 1..94: mol_type = other RNA
tttcccccaggtttacatgttcctggtgaaatggcaggacctgtcggagaaggtggtctaccggcgcttcaccgagatctacgagtttcatgtg

SEQ ID NO: 1349 - RNA, 94 nt, synthetic construct
  source 1..94: mol_type = other RNA
tttcccccaggtttacatgttcctggtgaaatggcaggacctgtcggagaaggtggtctaccggcgcttcaccgagatctacgagttccatgtg

SEQ ID NO: 1350 - RNA, 95 nt, synthetic construct
  source 1..95: mol_type = other RNA
ctttcccccaggtctacatgttcctggtgaaatggcaggacctgtcggagaaggtggtctaccggcgcttcaccgagatctacgagttccatgtg

SEQ ID NO: 1351 - RNA, 95 nt, synthetic construct
  source 1..95: mol_type = other RNA
ctttcccccaggtttacatgttcctggtgaaatggcaggacctgtcggagaaggtggtctaccggcgcttcaccgagatctacgagttccatgtg

SEQ ID NO: 1352 - RNA, 95 nt, synthetic construct
  source 1..95: mol_type = other RNA
ctttcccccaggtttacatgttcctggtgaaatggcaggacctgtcggagaaggtggtctaccggcgcttcaccgagatctacgagtttcatgtg

SEQ ID NO: 1353 - RNA, 95 nt, synthetic construct
  source 1..95: mol_type = other RNA
ctttcccccaggtgtacatgttcctggtgaaatggcaggacctgtcggagaaggtggtctaccggcgcttcaccgagatctacgagttccatgtg

SEQ ID NO: 1354 - RNA, 95 nt, synthetic construct
  source 1..95: mol_type = other RNA
ctttcccccaggtgtacatgttcctggtgaaatggcaggacctgtcggagaaggtggtctaccggcgcttcaccgagatctacgagtttcatgtg

SEQ ID NO: 1355 - RNA, 95 nt, synthetic construct
  source 1..95: mol_type = other RNA
ctttcccccaggtatacatgttcctggtgaaatggcaggacctgtcggagaaggtggtctaccggcgcttcaccgagatctacgagtttcatgtg

SEQ ID NO: 1356 - RNA, 95 nt, synthetic construct
  source 1..95: mol_type = other RNA
ctttcccccaggtatacatgttcctggtgaaatggcaggacctgtcggagaaggtggtctaccggcgcttcaccgagatctacgagttccatgtg

SEQ ID NO: 1357 - RNA, 95 nt, synthetic construct
  source 1..95: mol_type = other RNA
ctttcccccaggtctacatgttcctggtgaaatggcaggacctgtcggagaaggtggtctaccggcgcttcaccgagatctacgagtttcatgtg

SEQ ID NO: 1358 - RNA, 96 nt, synthetic construct
  source 1..96: mol_type = other RNA
gctttcccccaggtgtacatgttcctggtgaaatggcaggacctgtcggagaaggtggtctaccggcgcttcaccgagatctacgagtttcatgtg

SEQ ID NO: 1359 - RNA, 96 nt, synthetic construct
  source 1..96: mol_type = other RNA
gctttcccccaggtttacatgttcctggtgaaatggcaggacctgtcggagaaggtggtctaccggcgcttcaccgagatctacgagtttcatgtg

SEQ ID NO: 1360 - RNA, 96 nt, synthetic construct
  source 1..96: mol_type = other RNA
gctttcccccaggtttacatgttcctggtgaaatggcaggacctgtcggagaaggtggtctaccggcgcttcaccgagatctacgagttccatgtg

SEQ ID NO: 1361 - RNA, 96 nt, synthetic construct
  source 1..96: mol_type = other RNA
gctttcccccaggtgtacatgttcctggtgaaatggcaggacctgtcggagaaggtggtctaccggcgcttcaccgagatctacgagttccatgtg

SEQ ID NO: 1362 - RNA, 96 nt, synthetic construct
  source 1..96: mol_type = other RNA
gctttcccccaggtatacatgttcctggtgaaatggcaggacctgtcggagaaggtggtctaccggcgcttcaccgagatctacgagtttcatgtg

SEQ ID NO: 1363 - RNA, 96 nt, synthetic construct
  source 1..96: mol_type = other RNA
gctttcccccaggtctacatgttcctggtgaaatggcaggacctgtcggagaaggtggtctaccggcgcttcaccgagatctacgagttccatgtg

SEQ ID NO: 1364 - RNA, 96 nt, synthetic construct
  source 1..96: mol_type = other RNA
gctttcccccaggtctacatgttcctggtgaaatggcaggacctgtcggagaaggtggtctaccggcgcttcaccgagatctacgagtttcatgtg

SEQ ID NO: 1365 - RNA, 96 nt, synthetic construct
  source 1..96: mol_type = other RNA
gctttcccccaggtatacatgttcctggtgaaatggcaggacctgtcggagaaggtggtctaccggcgcttcaccgagatctacgagttccatgtg

SEQ ID NO: 1366 - RNA, 97 nt, synthetic construct
  source 1..97: mol_type = other RNA
ggctttcccccaggtttacatgttcctggtgaaatggcaggacctgtcggagaaggtggtctaccggcgcttcaccgagatctacgagtttcatgtg

SEQ ID NO: 1367 - RNA, 97 nt, synthetic construct
  source 1..97: mol_type = other RNA
ggctttcccccaggtgtacatgttcctggtgaaatggcaggacctgtcggagaaggtggtctaccggcgcttcaccgagatctacgagtttcatgtg

SEQ ID NO: 1368 - RNA, 97 nt, synthetic construct
  source 1..97: mol_type = other RNA
ggctttcccccaggtgtacatgttcctggtgaaatggcaggacctgtcggagaaggtggtctaccggcgcttcaccgagatctacgagttccatgtg

SEQ ID NO: 1369 - RNA, 97 nt, synthetic construct
  source 1..97: mol_type = other RNA
ggctttcccccaggtttacatgttcctggtgaaatggcaggacctgtcggagaaggtggtctaccggcgcttcaccgagatctacgagttccatgtg

SEQ ID NO: 1370 - RNA, 97 nt, synthetic construct
  source 1..97: mol_type = other RNA
ggctttcccccaggtctacatgttcctggtgaaatggcaggacctgtcggagaaggtggtctaccggcgcttcaccgagatctacgagtttcatgtg

SEQ ID NO: 1371 - RNA, 97 nt, synthetic construct
  source 1..97: mol_type = other RNA
ggctttcccccaggtctacatgttcctggtgaaatggcaggacctgtcggagaaggtggtctaccggcgcttcaccgagatctacgagttccatgtg

SEQ ID NO: 1372 - RNA, 97 nt, synthetic construct
  source 1..97: mol_type = other RNA
ggctttcccccaggtatacatgttcctggtgaaatggcaggacctgtcggagaaggtggtctaccggcgcttcaccgagatctacgagttccatgtg

SEQ ID NO: 1373 - RNA, 97 nt, synthetic construct
  source 1..97: mol_type = other RNA
ggctttcccccaggtatacatgttcctggtgaaatggcaggacctgtcggagaaggtggtctaccggcgcttcaccgagatctacgagtttcatgtg

SEQ ID NO: 1374 - RNA, 98 nt, synthetic construct
  source 1..98: mol_type = other RNA
tggctttcccccaggtctacatgttcctggtgaaatggcaggacctgtcggagaaggtggtctaccggcgcttcaccgagatctacgagttccatgtg

SEQ ID NO: 1375 - RNA, 98 nt, synthetic construct
  source 1..98: mol_type = other RNA
tggctttcccccaggtgtacatgttcctggtgaaatggcaggacctgtcggagaaggtggtctaccggcgcttcaccgagatctacgagttccatgtg

SEQ ID NO: 1376 - RNA, 98 nt, synthetic construct
  source 1..98: mol_type = other RNA
tggctttcccccaggtatacatgttcctggtgaaatggcaggacctgtcggagaaggtggtctaccggcgcttcaccgagatctacgagtttcatgtg

SEQ ID NO: 1377 - RNA, 98 nt, synthetic construct
  source 1..98: mol_type = other RNA
tggctttcccccaggtatacatgttcctggtgaaatggcaggacctgtcggagaaggtggtctaccggcgcttcaccgagatctacgagttccatgtg

SEQ ID NO: 1378 - RNA, 98 nt, synthetic construct
  source 1..98: mol_type = other RNA
tggctttcccccaggtctacatgttcctggtgaaatggcaggacctgtcggagaaggtggtctaccggcgcttcaccgagatctacgagtttcatgtg

SEQ ID NO: 1379 - RNA, 98 nt, synthetic construct
  source 1..98: mol_type = other RNA
tggctttcccccaggtgtacatgttcctggtgaaatggcaggacctgtcggagaaggtggtctaccggcgcttcaccgagatctacgagtttcatgtg

SEQ ID NO: 1380 - RNA, 98 nt, synthetic construct
  source 1..98: mol_type = other RNA
tggctttcccccaggtttacatgttcctggtgaaatggcaggacctgtcggagaaggtggtctaccggcgcttcaccgagatctacgagtttcatgtg

SEQ ID NO: 1381 - RNA, 98 nt, synthetic construct
  source 1..98: mol_type = other RNA
tggctttcccccaggtttacatgttcctggtgaaatggcaggacctgtcggagaaggtggtctaccggcgcttcaccgagatctacgagttccatgtg

SEQ ID NO: 1382 - RNA, 99 nt, synthetic construct
  source 1..99: mol_type = other RNA
ctggctttcccccaggtttacatgttcctggtgaaatggcaggacctgtcggagaaggtggtctaccggcgcttcaccgagatctacgagtttcatgtg

SEQ ID NO: 1383 - RNA, 99 nt, synthetic construct
  source 1..99: mol_type = other RNA
ctggctttcccccaggtttacatgttcctggtgaaatggcaggacctgtcggagaaggtggtctaccggcgcttcaccgagatctacgagttccatgtg

SEQ ID NO: 1384 - RNA, 99 nt, synthetic construct
  source 1..99: mol_type = other RNA
ctggctttcccccaggtatacatgttcctggtgaaatggcaggacctgtcggagaaggtggtctaccggcgcttcaccgagatctacgagttccatgtg

SEQ ID NO: 1385 - RNA, 99 nt, synthetic construct
  source 1..99: mol_type = other RNA
ctggctttcccccaggtgtacatgttcctggtgaaatggcaggacctgtcggagaaggtggtctaccggcgcttcaccgagatctacgagtttcatgtg

SEQ ID NO: 1386 - RNA, 99 nt, synthetic construct
  source 1..99: mol_type = other RNA
ctggctttcccccaggtgtacatgttcctggtgaaatggcaggacctgtcggagaaggtggtctaccggcgcttcaccgagatctacgagttccatgtg

SEQ ID NO: 1387 - RNA, 99 nt, synthetic construct
  source 1..99: mol_type = other RNA
ctggctttcccccaggtatacatgttcctggtgaaatggcaggacctgtcggagaaggtggtctaccggcgcttcaccgagatctacgagtttcatgtg

SEQ ID NO: 1388 - RNA, 99 nt, synthetic construct
  source 1..99: mol_type = other RNA
ctggctttcccccaggtctacatgttcctggtgaaatggcaggacctgtcggagaaggtggtctaccggcgcttcaccgagatctacgagttccatgtg

SEQ ID NO: 1389 - RNA, 99 nt, synthetic construct
  source 1..99: mol_type = other RNA
ctggctttcccccaggtctacatgttcctggtgaaatggcaggacctgtcggagaaggtggtctaccggcgcttcaccgagatctacgagtttcatgtg

SEQ ID NO: 1390 - RNA, 100 nt, synthetic construct
  source 1..100: mol_type = other RNA
tctggctttcccccaggtgtacatgttcctggtgaaatggcaggacctgtcggagaaggtggtctaccggcgcttcaccgagatctacgagttccatgtg

SEQ ID NO: 1391 - RNA, 100 nt, synthetic construct
  source 1..100: mol_type = other RNA
tctggctttcccccaggtttacatgttcctggtgaaatggcaggacctgtcggagaaggtggtctaccggcgcttcaccgagatctacgagtttcatgtg

SEQ ID NO: 1392 - RNA, 100 nt, synthetic construct
  source 1..100: mol_type = other RNA
tctggctttcccccaggtttacatgttcctggtgaaatggcaggacctgtcggagaaggtggtctaccggcgcttcaccgagatctacgagttccatgtg

SEQ ID NO: 1393 - RNA, 100 nt, synthetic construct
  source 1..100: mol_type = other RNA
tctggctttcccccaggtctacatgttcctggtgaaatggcaggacctgtcggagaaggtggtctaccggcgcttcaccgagatctacgagtttcatgtg

SEQ ID NO: 1394 - RNA, 100 nt, synthetic construct
  source 1..100: mol_type = other RNA
tctggctttcccccaggtgtacatgttcctggtgaaatggcaggacctgtcggagaaggtggtctaccggcgcttcaccgagatctacgagtttcatgtg

SEQ ID NO: 1395 - RNA, 100 nt, synthetic construct
  source 1..100: mol_type = other RNA
tctggctttcccccaggtatacatgttcctggtgaaatggcaggacctgtcggagaaggtggtctaccggcgcttcaccgagatctacgagttccatgtg

SEQ ID NO: 1396 - RNA, 100 nt, synthetic construct
  source 1..100: mol_type = other RNA
tctggctttcccccaggtatacatgttcctggtgaaatggcaggacctgtcggagaaggtggtctaccggcgcttcaccgagatctacgagtttcatgtg

SEQ ID NO: 1397 - RNA, 100 nt, synthetic construct
  source 1..100: mol_type = other RNA
tctggctttcccccaggtctacatgttcctggtgaaatggcaggacctgtcggagaaggtggtctaccggcgcttcaccgagatctacgagttccatgtg

SEQ ID NO: 1398 - RNA, 101 nt, synthetic construct
  source 1..101: mol_type = other RNA
ctctggctttcccccaggtctacatgttcctggtgaaatggcaggacctgtcggagaaggtggtctaccggcgcttcaccgagatctacgagttccatgtg

SEQ ID NO: 1399 - RNA, 101 nt, synthetic construct
  source 1..101: mol_type = other RNA
ctctggctttcccccaggtttacatgttcctggtgaaatggcaggacctgtcggagaaggtggtctaccggcgcttcaccgagatctacgagttccatgtg

SEQ ID NO: 1400 - RNA, 101 nt, synthetic construct
  source 1..101: mol_type = other RNA
ctctggctttcccccaggtgtacatgttcctggtgaaatggcaggacctgtcggagaaggtggtctaccggcgcttcaccgagatctacgagtttcatgtg

SEQ ID NO: 1401 - RNA, 101 nt, synthetic construct
  source 1..101: mol_type = other RNA
ctctggctttcccccaggtttacatgttcctggtgaaatggcaggacctgtcggagaaggtggtctaccggcgcttcaccgagatctacgagtttcatgtg

SEQ ID NO: 1402 - RNA, 101 nt, synthetic construct
  source 1..101: mol_type = other RNA
ctctggctttcccccaggtctacatgttcctggtgaaatggcaggacctgtcggagaaggtggtctaccggcgcttcaccgagatctacgagtttcatgtg

SEQ ID NO: 1403 - RNA, 101 nt, synthetic construct
  source 1..101: mol_type = other RNA
ctctggctttcccccaggtatacatgttcctggtgaaatggcaggacctgtcggagaaggtggtctaccggcgcttcaccgagatctacgagttccatgtg

SEQ ID NO: 1404 - RNA, 101 nt, synthetic construct
  source 1..101: mol_type = other RNA
ctctggctttcccccaggtatacatgttcctggtgaaatggcaggacctgtcggagaaggtggtctaccggcgcttcaccgagatctacgagtttcatgtg

SEQ ID NO: 1405 - RNA, 101 nt, synthetic construct
  source 1..101: mol_type = other RNA
ctctggctttcccccaggtgtacatgttcctggtgaaatggcaggacctgtcggagaaggtggtctaccggcgcttcaccgagatctacgagttccatgtg

SEQ ID NO: 1406 - RNA, 102 nt, synthetic construct
  source 1..102: mol_type = other RNA
actctggctttcccccaggtctacatgttcctggtgaaatggcaggacctgtcggagaaggtggtctaccggcgcttcaccgagatctacgagtttcatgtg

SEQ ID NO: 1407 - RNA, 102 nt, synthetic construct
  source 1..102: mol_type = other RNA
actctggctttcccccaggtatacatgttcctggtgaaatggcaggacctgtcggagaaggtggtctaccggcgcttcaccgagatctacgagttccatgtg

SEQ ID NO: 1408 - RNA, 102 nt, synthetic construct
  source 1..102: mol_type = other RNA
actctggctttcccccaggtatacatgttcctggtgaaatggcaggacctgtcggagaaggtggtctaccggcgcttcaccgagatctacgagtttcatgtg

SEQ ID NO: 1409 - RNA, 102 nt, synthetic construct
  source 1..102: mol_type = other RNA
actctggctttcccccaggtctacatgttcctggtgaaatggcaggacctgtcggagaaggtggtctaccggcgcttcaccgagatctacgagttccatgtg

SEQ ID NO: 1410 - RNA, 102 nt, synthetic construct
  source 1..102: mol_type = other RNA
actctggctttcccccaggtgtacatgttcctggtgaaatggcaggacctgtcggagaaggtggtctaccggcgcttcaccgagatctacgagttccatgtg

SEQ ID NO: 1411 - RNA, 102 nt, synthetic construct
  source 1..102: mol_type = other RNA
actctggctttcccccaggtgtacatgttcctggtgaaatggcaggacctgtcggagaaggtggtctaccggcgcttcaccgagatctacgagtttcatgtg

SEQ ID NO: 1412 - RNA, 102 nt, synthetic construct
  source 1..102: mol_type = other RNA
actctggctttcccccaggtttacatgttcctggtgaaatggcaggacctgtcggagaaggtggtctaccggcgcttcaccgagatctacgagtttcatgtg

SEQ ID NO: 1413 - RNA, 102 nt, synthetic construct
  source 1..102: mol_type = other RNA
actctggctttcccccaggtttacatgttcctggtgaaatggcaggacctgtcggagaaggtggtctaccggcgcttcaccgagatctacgagttccatgtg

SEQ ID NO: 1414 - RNA, 103 nt, synthetic construct
  source 1..103: mol_type = other RNA
gactctggctttcccccaggtatacatgttcctggtgaaatggcaggacctgtcggagaaggtggtctaccggcgcttcaccgagatctacgagttccatgtg

SEQ ID NO: 1415 - RNA, 103 nt, synthetic construct
  source 1..103: mol_type = other RNA
gactctggctttcccccaggtatacatgttcctggtgaaatggcaggacctgtcggagaaggtggtctaccggcgcttcaccgagatctacgagtttcatgtg

SEQ ID NO: 1416 - RNA, 103 nt, synthetic construct
  source 1..103: mol_type = other RNA
gactctggctttcccccaggtctacatgttcctggtgaaatggcaggacctgtcggagaaggtggtctaccggcgcttcaccgagatctacgagttccatgtg

SEQ ID NO: 1417 - RNA, 103 nt, synthetic construct
  source 1..103: mol_type = other RNA
gactctggctttcccccaggtctacatgttcctggtgaaatggcaggacctgtcggagaaggtggtctaccggcgcttcaccgagatctacgagtttcatgtg

SEQ ID NO: 1418 - RNA, 103 nt, synthetic construct
  source 1..103: mol_type = other RNA
gactctggctttcccccaggtgtacatgttcctggtgaaatggcaggacctgtcggagaaggtggtctaccggcgcttcaccgagatctacgagtttcatgtg

SEQ ID NO: 1419 - RNA, 103 nt, synthetic construct
  source 1..103: mol_type = other RNA
gactctggctttcccccaggtttacatgttcctggtgaaatggcaggacctgtcggagaaggtggtctaccggcgcttcaccgagatctacgagtttcatgtg

SEQ ID NO: 1420 - RNA, 103 nt, synthetic construct
  source 1..103: mol_type = other RNA
gactctggctttcccccaggtgtacatgttcctggtgaaatggcaggacctgtcggagaaggtggtctaccggcgcttcaccgagatctacgagttccatgtg

SEQ ID NO: 1421 - RNA, 103 nt, synthetic construct
  source 1..103: mol_type = other RNA
gactctggctttcccccaggtttacatgttcctggtgaaatggcaggacctgtcggagaaggtggtctaccggcgcttcaccgagatctacgagttccatgtg

SEQ ID NO: 1422 - RNA, 19 nt, synthetic construct
  source 1..19: mol_type = other RNA
atggcaggacctgtcggag

SEQ ID NO: 1423 - RNA, 19 nt, synthetic construct
  source 1..19: mol_type = other RNA
catgttcctggtgaaatgg

SEQ ID NO: 1424 - RNA, 20 nt, synthetic construct
  source 1..20: mol_type = other RNA
gtttacatgttcctggtgaa

SEQ ID NO: 1425 - RNA, 20 nt, synthetic construct
  source 1..20: mol_type = other RNA
ggcaggacctgtcggagaag

SEQ ID NO: 1426 - RNA, 20 nt, synthetic construct
  source 1..20: mol_type = other RNA
tcccccaggtatacatgttc

SEQ ID NO: 1427 - RNA, 20 nt, synthetic construct
  source 1..20: mol_type = other RNA
acatgttcctggtgaaatgg

SEQ ID NO: 1428 - RNA, 20 nt, synthetic construct
  source 1..20: mol_type = other RNA
aatggcaggacctgtcggag

SEQ ID NO: 1429 - RNA, 20 nt, synthetic construct
  source 1..20: mol_type = other RNA
tcccccaggtttacatgttc

SEQ ID NO: 1430 - RNA, 20 nt, synthetic construct
  source 1..20: mol_type = other RNA
tggtgaaatggcaggacctg

SEQ ID NO: 1431 - RNA, 20 nt, synthetic construct
  source 1..20: mol_type = other RNA
tcccccaggtgtacatgttc

SEQ ID NO: 1432 - RNA, 20 nt, synthetic construct
  source 1..20: mol_type = other RNA
gtgtacatgttcctggtgaa

SEQ ID NO: 1433 - RNA, 20 nt, synthetic construct
  source 1..20: mol_type = other RNA
gtatacatgttcctggtgaa

SEQ ID NO: 1434 - RNA, 20 nt, synthetic construct
  source 1..20: mol_type = other RNA
tctacgagtttcatgtgagt

SEQ ID NO: 1435 - RNA, 20 nt, synthetic construct
  source 1..20: mol_type = other RNA
tctacgagttccatgtgagt

SEQ ID NO: 1436 - RNA, 20 nt, synthetic construct
  source 1..20: mol_type = other RNA
tcccccaggtctacatgttc

SEQ ID NO: 1437 - RNA, 20 nt, synthetic construct
  source 1..20: mol_type = other RNA
ctgtcggagaaggtggtcta

SEQ ID NO: 1438 - RNA, 20 nt, synthetic construct
  source 1..20: mol_type = other RNA
gtctacatgttcctggtgaa

SEQ ID NO: 1439 - RNA, 21 nt, synthetic construct
  source 1..21: mol_type = other RNA
atctacgagttccatgtgagt

SEQ ID NO: 1440 - RNA, 21 nt, synthetic construct
  source 1..21: mol_type = other RNA
tacatgttcctggtgaaatgg

SEQ ID NO: 1441 - RNA, 21 nt, synthetic construct
  source 1..21: mol_type = other RNA
ggtatacatgttcctggtgaa

SEQ ID NO: 1442 - RNA, 21 nt, synthetic construct
  source 1..21: mol_type = other RNA
aaatggcaggacctgtcggag

SEQ ID NO: 1443 - RNA, 21 nt, synthetic construct
  source 1..21: mol_type = other RNA
tctacgagttccatgtgagtg

SEQ ID NO: 1444 - RNA, 21 nt, synthetic construct
  source 1..21: mol_type = other RNA
tggcaggacctgtcggagaag

SEQ ID NO: 1445 - RNA, 21 nt, synthetic construct
  source 1..21: mol_type = other RNA
cctgtcggagaaggtggtcta

SEQ ID NO: 1446 - RNA, 21 nt, synthetic construct
  source 1..21: mol_type = other RNA
ttcccccaggtatacatgttc

SEQ ID NO: 1447 - RNA, 21 nt, synthetic construct
  source 1..21: mol_type = other RNA
ttcccccaggtgtacatgttc

SEQ ID NO: 1448 - RNA, 21 nt, synthetic construct
  source 1..21: mol_type = other RNA
ctggtgaaatggcaggacctg

SEQ ID NO: 1449 - RNA, 21 nt, synthetic construct
  source 1..21: mol_type = other RNA
ggtgtacatgttcctggtgaa

SEQ ID NO: 1450 - RNA, 22 nt, synthetic construct
  source 1..22: mol_type = other RNA
tttcccccaggtgtacatgttc

SEQ ID NO: 1451 - RNA, 22 nt, synthetic construct
  source 1..22: mol_type = other RNA
atggcaggacctgtcggagaag

SEQ ID NO: 1452 - RNA, 22 nt, synthetic construct
  source 1..22: mol_type = other RNA
cctggtgaaatggcaggacctg

SEQ ID NO: 1453 - RNA, 22 nt, synthetic construct
  source 1..22: mol_type = other RNA
acctgtcggagaaggtggtcta

SEQ ID NO: 1454 - RNA, 22 nt, synthetic construct
  source 1..22: mol_type = other RNA
aggtgtacatgttcctggtgaa

SEQ ID NO: 1455 - RNA, 22 nt, synthetic construct
  source 1..22: mol_type = other RNA
atacatgttcctggtgaaatgg

SEQ ID NO: 1456 - RNA, 22 nt, synthetic construct
  source 1..22: mol_type = other RNA
atctacgagttccatgtgagtg

SEQ ID NO: 1457 - RNA, 22 nt, synthetic construct
  source 1..22: mol_type = other RNA
aggtatacatgttcctggtgaa

SEQ ID NO: 1458 - RNA, 22 nt, synthetic construct
  source 1..22: mol_type = other RNA
gaaatggcaggacctgtcggag

SEQ ID NO: 1459 - RNA, 22 nt, synthetic construct
  source 1..22: mol_type = other RNA
gatctacgagttccatgtgagt

SEQ ID NO: 1460 - RNA, 22 nt, synthetic construct
  source 1..22: mol_type = other RNA
gtacatgttcctggtgaaatgg

SEQ ID NO: 1461 - RNA, 22 nt, synthetic construct
  source 1..22: mol_type = other RNA
tctacgagttccatgtgagtgt

SEQ ID NO: 1462 - RNA, 22 nt, synthetic construct
  source 1..22: mol_type = other RNA
tttcccccaggtatacatgttc

SEQ ID NO: 1463 - RNA, 16 nt, synthetic construct
  source 1..16: mol_type = other RNA
atggggtcccccgact

SEQ ID NO: 1464 - RNA, 17 nt, synthetic construct
  source 1..17: mol_type = other RNA
aatggggtcccccgact

SEQ ID NO: 1465 - RNA, 18 nt, synthetic construct
  source 1..18: mol_type = other RNA
gaatggggtcccccgact

SEQ ID NO: 1466 - RNA, 19 nt, synthetic construct
  source 1..19: mol_type = other RNA
tgaatggggtcccccgact

SEQ ID NO: 1467 - RNA, 20 nt, synthetic construct
  source 1..20: mol_type = other RNA
ctgaatggggtcccccgact

SEQ ID NO: 1468 - RNA, 21 nt, synthetic construct
  source 1..21: mol_type = other RNA
gctgaatggggtcccccgact

SEQ ID NO: 1469 - RNA, 22 nt, synthetic construct
  source 1..22: mol_type = other RNA
ggctgaatggggtcccccgact

SEQ ID NO: 1470-1476 - skipped (7 entries)

SEQ ID NO: 1477 - RNA, 10 nt, synthetic construct
  source 1..10: mol_type = other RNA
cgggggaccc

SEQ ID NO: 1478 - RNA, 11 nt, synthetic construct
  source 1..11: mol_type = other RNA
cgggggacccc

SEQ ID NO: 1479 - RNA, 12 nt, synthetic construct
  source 1..12: mol_type = other RNA
cgggggacccca

SEQ ID NO: 1480 - RNA, 13 nt, synthetic construct
  source 1..13: mol_type = other RNA
cgggggaccccat

SEQ ID NO: 1481 - RNA, 14 nt, synthetic construct
  source 1..14: mol_type = other RNA
cgggggaccccatt

SEQ ID NO: 1482 - RNA, 15 nt, synthetic construct
  source 1..15: mol_type = other RNA
cgggggaccccattc

SEQ ID NO: 1483 - RNA, 16 nt, synthetic construct
  source 1..16: mol_type = other RNA
cgggggaccccattca

SEQ ID NO: 1484 - RNA, 17 nt, synthetic construct
  source 1..17: mol_type = other RNA
cgggggaccccattcag

SEQ ID NO: 1485 - RNA, 18 nt, synthetic construct
  source 1..18: mol_type = other RNA
cgggggaccccattcagc

SEQ ID NO: 1486 - RNA, 19 nt, synthetic construct
  source 1..19: mol_type = other RNA
cgggggaccccattcagcc

SEQ ID NO: 1487 - RNA, 20 nt, synthetic construct
  source 1..20: mol_type = other RNA
acctgggggaaagccagagt

SEQ ID NO: 1488 - RNA, 21 nt, synthetic construct
  source 1..21: mol_type = other RNA
gacctgggggaaagccagagt

SEQ ID NO: 1489 - RNA, 21 nt, synthetic construct
  source 1..21: mol_type = other RNA
cacctgggggaaagccagagt

SEQ ID NO: 1490 - RNA, 21 nt, synthetic construct
  source 1..21: mol_type = other RNA
tacctgggggaaagccagagt

SEQ ID NO: 1491 - RNA, 21 nt, synthetic construct
  source 1..21: mol_type = other RNA
aacctgggggaaagccagagt

SEQ ID NO: 1492 - RNA, 22 nt, synthetic construct
  source 1..22: mol_type = other RNA
atacctgggggaaagccagagt

SEQ ID NO: 1493 - RNA, 22 nt, synthetic construct
  source 1..22: mol_type = other RNA
agacctgggggaaagccagagt

SEQ ID NO: 1494 - RNA, 22 nt, synthetic construct
  source 1..22: mol_type = other RNA
aaacctgggggaaagccagagt

SEQ ID NO: 1495 - RNA, 22 nt, synthetic construct
  source 1..22: mol_type = other RNA
acacctgggggaaagccagagt

SEQ ID NO: 1496 - RNA, 23 nt, synthetic construct
  source 1..23: mol_type = other RNA
tacacctgggggaaagccagagt

SEQ ID NO: 1497 - RNA, 23 nt, synthetic construct
  source 1..23: mol_type = other RNA
tatacctgggggaaagccagagt

SEQ ID NO: 1498 - RNA, 23 nt, synthetic construct
  source 1..23: mol_type = other RNA
tagacctgggggaaagccagagt

SEQ ID NO: 1499 - RNA, 23 nt, synthetic construct
  source 1..23: mol_type = other RNA
taaacctgggggaaagccagagt

SEQ ID NO: 1500 - RNA, 24 nt, synthetic construct
  source 1..24: mol_type = other RNA
gtacacctgggggaaagccagagt

SEQ ID NO: 1501 - RNA, 24 nt, synthetic construct
  source 1..24: mol_type = other RNA
gtaaacctgggggaaagccagagt

SEQ ID NO: 1502 - RNA, 24 nt, synthetic construct
  source 1..24: mol_type = other RNA
gtagacctgggggaaagccagagt

SEQ ID NO: 1503 - RNA, 24 nt, synthetic construct
  source 1..24: mol_type = other RNA
gtatacctgggggaaagccagagt

SEQ ID NO: 1504 - RNA, 25 nt, synthetic construct
  source 1..25: mol_type = other RNA
tgtacacctgggggaaagccagagt

SEQ ID NO: 1505 - RNA, 25 nt, synthetic construct
  source 1..25: mol_type = other RNA
tgtagacctgggggaaagccagagt

SEQ ID NO: 1506 - RNA, 25 nt, synthetic construct
  source 1..25: mol_type = other RNA
tgtatacctgggggaaagccagagt

SEQ ID NO: 1507 - RNA, 25 nt, synthetic construct
  source 1..25: mol_type = other RNA
tgtaaacctgggggaaagccagagt

SEQ ID NO: 1508 - RNA, 26 nt, synthetic construct
  source 1..26: mol_type = other RNA
atgtacacctgggggaaagccagagt

SEQ ID NO: 1509 - RNA, 26 nt, synthetic construct
  source 1..26: mol_type = other RNA
atgtagacctgggggaaagccagagt

SEQ ID NO: 1510 - RNA, 26 nt, synthetic construct
  source 1..26: mol_type = other RNA
atgtaaacctgggggaaagccagagt

SEQ ID NO: 1511 - RNA, 26 nt, synthetic construct
  source 1..26: mol_type = other RNA
atgtatacctgggggaaagccagagt

SEQ ID NO: 1512 - RNA, 27 nt, synthetic construct
  source 1..27: mol_type = other RNA
catgtaaacctgggggaaagccagagt

SEQ ID NO: 1513 - RNA, 27 nt, synthetic construct
  source 1..27: mol_type = other RNA
catgtacacctgggggaaagccagagt

SEQ ID NO: 1514 - RNA, 27 nt, synthetic construct
  source 1..27: mol_type = other RNA
catgtagacctgggggaaagccagagt

SEQ ID NO: 1515 - RNA, 27 nt, synthetic construct
  source 1..27: mol_type = other RNA
catgtatacctgggggaaagccagagt

SEQ ID NO: 1516 - RNA, 28 nt, synthetic construct
  source 1..28: mol_type = other RNA
acatgtaaacctgggggaaagccagagt

SEQ ID NO: 1517 - RNA, 28 nt, synthetic construct
  source 1..28: mol_type = other RNA
acatgtagacctgggggaaagccagagt

SEQ ID NO: 1518 - RNA, 28 nt, synthetic construct
  source 1..28: mol_type = other RNA
acatgtacacctgggggaaagccagagt

SEQ ID NO: 1519 - RNA, 28 nt, synthetic construct
  source 1..28: mol_type = other RNA
acatgtatacctgggggaaagccagagt

SEQ ID NO: 1520 - RNA, 29 nt, synthetic construct
  source 1..29: mol_type = other RNA
aacatgtacacctgggggaaagccagagt

SEQ ID NO: 1521 - RNA, 29 nt, synthetic construct
  source 1..29: mol_type = other RNA
aacatgtagacctgggggaaagccagagt

SEQ ID NO: 1522 - RNA, 29 nt, synthetic construct
  source 1..29: mol_type = other RNA
aacatgtatacctgggggaaagccagagt

SEQ ID NO: 1523 - RNA, 29 nt, synthetic construct
  source 1..29: mol_type = other RNA
aacatgtaaacctgggggaaagccagagt

SEQ ID NO: 1524 - RNA, 30 nt, synthetic construct
  source 1..30: mol_type = other RNA
gaacatgtaaacctgggggaaagccagagt

SEQ ID NO: 1525 - RNA, 30 nt, synthetic construct
  source 1..30: mol_type = other RNA
gaacatgtagacctgggggaaagccagagt

SEQ ID NO: 1526 - RNA, 30 nt, synthetic construct
  source 1..30: mol_type = other RNA
gaacatgtatacctgggggaaagccagagt

SEQ ID NO: 1527 - RNA, 30 nt, synthetic construct
  source 1..30: mol_type = other RNA
gaacatgtacacctgggggaaagccagagt

SEQ ID NO: 1528 - RNA, 31 nt, synthetic construct
  source 1..31: mol_type = other RNA
ggaacatgtacacctgggggaaagccagagt

SEQ ID NO: 1529 - RNA, 31 nt, synthetic construct
  source 1..31: mol_type = other RNA
ggaacatgtatacctgggggaaagccagagt

SEQ ID NO: 1530 - RNA, 31 nt, synthetic construct
  source 1..31: mol_type = other RNA
ggaacatgtaaacctgggggaaagccagagt

SEQ ID NO: 1531 - RNA, 31 nt, synthetic construct
  source 1..31: mol_type = other RNA
ggaacatgtagacctgggggaaagccagagt

SEQ ID NO: 1532 - RNA, 32 nt, synthetic construct
  source 1..32: mol_type = other RNA
aggaacatgtaaacctgggggaaagccagagt

SEQ ID NO: 1533 - RNA, 32 nt, synthetic construct
  source 1..32: mol_type = other RNA
aggaacatgtacacctgggggaaagccagagt

SEQ ID NO: 1534 - RNA, 32 nt, synthetic construct
  source 1..32: mol_type = other RNA
aggaacatgtagacctgggggaaagccagagt

SEQ ID NO: 1535 - RNA, 32 nt, synthetic construct
  source 1..32: mol_type = other RNA
aggaacatgtatacctgggggaaagccagagt

SEQ ID NO: 1536 - RNA, 33 nt, synthetic construct
  source 1..33: mol_type = other RNA
caggaacatgtaaacctgggggaaagccagagt

SEQ ID NO: 1537 - RNA, 33 nt, synthetic construct
  source 1..33: mol_type = other RNA
caggaacatgtagacctgggggaaagccagagt

SEQ ID NO: 1538 - RNA, 33 nt, synthetic construct
  source 1..33: mol_type = other RNA
caggaacatgtatacctgggggaaagccagagt

SEQ ID NO: 1539 - RNA, 33 nt, synthetic construct
  source 1..33: mol_type = other RNA
caggaacatgtacacctgggggaaagccagagt

SEQ ID NO: 1540 - RNA, 34 nt, synthetic construct
  source 1..34: mol_type = other RNA
ccaggaacatgtaaacctgggggaaagccagagt

SEQ ID NO: 1541 - RNA, 34 nt, synthetic construct
  source 1..34: mol_type = other RNA
ccaggaacatgtatacctgggggaaagccagagt

SEQ ID NO: 1542 - RNA, 34 nt, synthetic construct
  source 1..34: mol_type = other RNA
ccaggaacatgtagacctgggggaaagccagagt

SEQ ID NO: 1543 - RNA, 34 nt, synthetic construct
  source 1..34: mol_type = other RNA
ccaggaacatgtacacctgggggaaagccagagt

SEQ ID NO: 1544 - RNA, 35 nt, synthetic construct
  source 1..35: mol_type = other RNA
accaggaacatgtagacctgggggaaagccagagt

SEQ ID NO: 1545 - RNA, 35 nt, synthetic construct
  source 1..35: mol_type = other RNA
accaggaacatgtacacctgggggaaagccagagt

SEQ ID NO: 1546 - RNA, 35 nt, synthetic construct
  source 1..35: mol_type = other RNA
accaggaacatgtaaacctgggggaaagccagagt

SEQ ID NO: 1547 - RNA, 35 nt, synthetic construct
  source 1..35: mol_type = other RNA
accaggaacatgtatacctgggggaaagccagagt

SEQ ID NO: 1548 - RNA, 36 nt, synthetic construct
  source 1..36: mol_type = other RNA
caccaggaacatgtatacctgggggaaagccagagt

SEQ ID NO: 1549 - RNA, 36 nt, synthetic construct
  source 1..36: mol_type = other RNA
caccaggaacatgtagacctgggggaaagccagagt

SEQ ID NO: 1550 - RNA, 36 nt, synthetic construct
  source 1..36: mol_type = other RNA
caccaggaacatgtacacctgggggaaagccagagt

SEQ ID NO: 1551 - RNA, 36 nt, synthetic construct
  source 1..36: mol_type = other RNA
caccaggaacatgtaaacctgggggaaagccagagt

SEQ ID NO: 1552 - RNA, 37 nt, synthetic construct
  source 1..37: mol_type = other RNA
tcaccaggaacatgtaaacctgggggaaagccagagt

SEQ ID NO: 1553 - RNA, 37 nt, synthetic construct
  source 1..37: mol_type = other RNA
tcaccaggaacatgtatacctgggggaaagccagagt

SEQ ID NO: 1554 - RNA, 37 nt, synthetic construct
  source 1..37: mol_type = other RNA
tcaccaggaacatgtacacctgggggaaagccagagt

SEQ ID NO: 1555 - RNA, 37 nt, synthetic construct
  source 1..37: mol_type = other RNA
tcaccaggaacatgtagacctgggggaaagccagagt

SEQ ID NO: 1556 - RNA, 38 nt, synthetic construct
  source 1..38: mol_type = other RNA
ttcaccaggaacatgtaaacctgggggaaagccagagt

SEQ ID NO: 1557 - RNA, 38 nt, synthetic construct
  source 1..38: mol_type = other RNA
ttcaccaggaacatgtacacctgggggaaagccagagt

SEQ ID NO: 1558 - RNA, 38 nt, synthetic construct
  source 1..38: mol_type = other RNA
ttcaccaggaacatgtatacctgggggaaagccagagt

SEQ ID NO: 1559 - RNA, 38 nt, synthetic construct
  source 1..38: mol_type = other RNA
ttcaccaggaacatgtagacctgggggaaagccagagt

SEQ ID NO: 1560 - RNA, 39 nt, synthetic construct
  source 1..39: mol_type = other RNA
tttcaccaggaacatgtagacctgggggaaagccagagt

SEQ ID NO: 1561 - RNA, 39 nt, synthetic construct
  source 1..39: mol_type = other RNA
tttcaccaggaacatgtacacctgggggaaagccagagt

SEQ ID NO: 1562 - RNA, 39 nt, synthetic construct
  source 1..39: mol_type = other RNA
tttcaccaggaacatgtaaacctgggggaaagccagagt

SEQ ID NO: 1563 - RNA, 39 nt, synthetic construct
  source 1..39: mol_type = other RNA
tttcaccaggaacatgtatacctgggggaaagccagagt

SEQ ID NO: 1564 - RNA, 40 nt, synthetic construct
  source 1..40: mol_type = other RNA
atttcaccaggaacatgtagacctgggggaaagccagagt

SEQ ID NO: 1565 - RNA, 40 nt, synthetic construct
  source 1..40: mol_type = other RNA
atttcaccaggaacatgtaaacctgggggaaagccagagt

SEQ ID NO: 1566 - RNA, 40 nt, synthetic construct
  source 1..40: mol_type = other RNA
atttcaccaggaacatgtacacctgggggaaagccagagt

SEQ ID NO: 1567 - RNA, 40 nt, synthetic construct
  source 1..40: mol_type = other RNA
atttcaccaggaacatgtatacctgggggaaagccagagt

SEQ ID NO: 1568 - RNA, 41 nt, synthetic construct
  source 1..41: mol_type = other RNA
catttcaccaggaacatgtagacctgggggaaagccagagt

SEQ ID NO: 1569 - RNA, 41 nt, synthetic construct
  source 1..41: mol_type = other RNA
catttcaccaggaacatgtatacctgggggaaagccagagt

SEQ ID NO: 1570 - RNA, 41 nt, synthetic construct
  source 1..41: mol_type = other RNA
catttcaccaggaacatgtaaacctgggggaaagccagagt

SEQ ID NO: 1571 - RNA, 41 nt, synthetic construct
  source 1..41: mol_type = other RNA
catttcaccaggaacatgtacacctgggggaaagccagagt

SEQ ID NO: 1572 - RNA, 42 nt, synthetic construct
  source 1..42: mol_type = other RNA
ccatttcaccaggaacatgtagacctgggggaaagccagagt

SEQ ID NO: 1573 - RNA, 42 nt, synthetic construct
  source 1..42: mol_type = other RNA
ccatttcaccaggaacatgtatacctgggggaaagccagagt

SEQ ID NO: 1574 - RNA, 42 nt, synthetic construct
  source 1..42: mol_type = other RNA
ccatttcaccaggaacatgtaaacctgggggaaagccagagt

SEQ ID NO: 1575 - RNA, 42 nt, synthetic construct
  source 1..42: mol_type = other RNA
ccatttcaccaggaacatgtacacctgggggaaagccagagt

SEQ ID NO: 1576 - RNA, 43 nt, synthetic construct
  source 1..43: mol_type = other RNA
gccatttcaccaggaacatgtacacctgggggaaagccagagt

SEQ ID NO: 1577 - RNA, 43 nt, synthetic construct
  source 1..43: mol_type = other RNA
gccatttcaccaggaacatgtagacctgggggaaagccagagt

SEQ ID NO: 1578 - RNA, 43 nt, synthetic construct
  source 1..43: mol_type = other RNA
gccatttcaccaggaacatgtatacctgggggaaagccagagt

SEQ ID NO: 1579 - RNA, 43 nt, synthetic construct
  source 1..43: mol_type = other RNA
gccatttcaccaggaacatgtaaacctgggggaaagccagagt

SEQ ID NO: 1580 - RNA, 44 nt, synthetic construct
  source 1..44: mol_type = other RNA
tgccatttcaccaggaacatgtatacctgggggaaagccagagt

SEQ ID NO: 1581 - RNA, 44 nt, synthetic construct
  source 1..44: mol_type = other RNA
tgccatttcaccaggaacatgtagacctgggggaaagccagagt

SEQ ID NO: 1582 - RNA, 44 nt, synthetic construct
  source 1..44: mol_type = other RNA
tgccatttcaccaggaacatgtacacctgggggaaagccagagt

SEQ ID NO: 1583 - RNA, 44 nt, synthetic construct
  source 1..44: mol_type = other RNA
tgccatttcaccaggaacatgtaaacctgggggaaagccagagt

SEQ ID NO: 1584 - RNA, 45 nt, synthetic construct
  source 1..45: mol_type = other RNA
ctgccatttcaccaggaacatgtagacctgggggaaagccagagt

SEQ ID NO: 1585 - RNA, 45 nt, synthetic construct
  source 1..45: mol_type = other RNA
ctgccatttcaccaggaacatgtatacctgggggaaagccagagt

SEQ ID NO: 1586 - RNA, 45 nt, synthetic construct
  source 1..45: mol_type = other RNA
ctgccatttcaccaggaacatgtacacctgggggaaagccagagt

SEQ ID NO: 1587 - RNA, 45 nt, synthetic construct
  source 1..45: mol_type = other RNA
ctgccatttcaccaggaacatgtaaacctgggggaaagccagagt

SEQ ID NO: 1588 - RNA, 46 nt, synthetic construct
  source 1..46: mol_type = other RNA
cctgccatttcaccaggaacatgtaaacctgggggaaagccagagt

SEQ ID NO: 1589 - RNA, 46 nt, synthetic construct
  source 1..46: mol_type = other RNA
cctgccatttcaccaggaacatgtagacctgggggaaagccagagt

SEQ ID NO: 1590 - RNA, 46 nt, synthetic construct
  source 1..46: mol_type = other RNA
cctgccatttcaccaggaacatgtacacctgggggaaagccagagt

SEQ ID NO: 1591 - RNA, 46 nt, synthetic construct
  source 1..46: mol_type = other RNA
cctgccatttcaccaggaacatgtatacctgggggaaagccagagt

SEQ ID NO: 1592 - RNA, 47 nt, synthetic construct
  source 1..47: mol_type = other RNA
tcctgccatttcaccaggaacatgtacacctgggggaaagccagagt

SEQ ID NO: 1593 - RNA, 47 nt, synthetic construct
  source 1..47: mol_type = other RNA
tcctgccatttcaccaggaacatgtatacctgggggaaagccagagt

SEQ ID NO: 1594 - RNA, 47 nt, synthetic construct
  source 1..47: mol_type = other RNA
tcctgccatttcaccaggaacatgtaaacctgggggaaagccagagt

SEQ ID NO: 1595 - RNA, 47 nt, synthetic construct
  source 1..47: mol_type = other RNA
tcctgccatttcaccaggaacatgtagacctgggggaaagccagagt

SEQ ID NO: 1596 - RNA, 48 nt, synthetic construct
  source 1..48: mol_type = other RNA
gtcctgccatttcaccaggaacatgtaaacctgggggaaagccagagt

SEQ ID NO: 1597 - RNA, 48 nt, synthetic construct
  source 1..48: mol_type = other RNA
gtcctgccatttcaccaggaacatgtagacctgggggaaagccagagt

SEQ ID NO: 1598 - RNA, 48 nt, synthetic construct
  source 1..48: mol_type = other RNA
gtcctgccatttcaccaggaacatgtacacctgggggaaagccagagt

SEQ ID NO: 1599 - RNA, 48 nt, synthetic construct
  source 1..48: mol_type = other RNA
gtcctgccatttcaccaggaacatgtatacctgggggaaagccagagt

SEQ ID NO: 1600 - RNA, 49 nt, synthetic construct
  source 1..49: mol_type = other RNA
ggtcctgccatttcaccaggaacatgtaaacctgggggaaagccagagt

SEQ ID NO: 1601 - RNA, 49 nt, synthetic construct
  source 1..49: mol_type = other RNA
ggtcctgccatttcaccaggaacatgtacacctgggggaaagccagagt

SEQ ID NO: 1602 - RNA, 49 nt, synthetic construct
  source 1..49: mol_type = other RNA
ggtcctgccatttcaccaggaacatgtagacctgggggaaagccagagt

SEQ ID NO: 1603 - RNA, 49 nt, synthetic construct
  source 1..49: mol_type = other RNA
ggtcctgccatttcaccaggaacatgtatacctgggggaaagccagagt

SEQ ID NO: 1604 - RNA, 50 nt, synthetic construct
  source 1..50: mol_type = other RNA
aggtcctgccatttcaccaggaacatgtatacctgggggaaagccagagt

SEQ ID NO: 1605 - RNA, 50 nt, synthetic construct
  source 1..50: mol_type = other RNA
aggtcctgccatttcaccaggaacatgtagacctgggggaaagccagagt

SEQ ID NO: 1606 - RNA, 50 nt, synthetic construct
  source 1..50: mol_type = other RNA
aggtcctgccatttcaccaggaacatgtaaacctgggggaaagccagagt

SEQ ID NO: 1607 - RNA, 50 nt, synthetic construct
  source 1..50: mol_type = other RNA
aggtcctgccatttcaccaggaacatgtacacctgggggaaagccagagt

SEQ ID NO: 1608 - RNA, 51 nt, synthetic construct
  source 1..51: mol_type = other RNA
caggtcctgccatttcaccaggaacatgtatacctgggggaaagccagagt

SEQ ID NO: 1609 - RNA, 51 nt, synthetic construct
  source 1..51: mol_type = other RNA
caggtcctgccatttcaccaggaacatgtagacctgggggaaagccagagt

SEQ ID NO: 1610 - RNA, 51 nt, synthetic construct
  source 1..51: mol_type = other RNA
caggtcctgccatttcaccaggaacatgtaaacctgggggaaagccagagt

SEQ ID NO: 1611 - RNA, 51 nt, synthetic construct
  source 1..51: mol_type = other RNA
caggtcctgccatttcaccaggaacatgtacacctgggggaaagccagagt

SEQ ID NO: 1612 - RNA, 52 nt, synthetic construct
  source 1..52: mol_type = other RNA
acaggtcctgccatttcaccaggaacatgtacacctgggggaaagccagagt

SEQ ID NO: 1613 - RNA, 52 nt, synthetic construct
  source 1..52: mol_type = other RNA
acaggtcctgccatttcaccaggaacatgtagacctgggggaaagccagagt

SEQ ID NO: 1614 - RNA, 52 nt, synthetic construct
  source 1..52: mol_type = other RNA
acaggtcctgccatttcaccaggaacatgtatacctgggggaaagccagagt

SEQ ID NO: 1615 - RNA, 52 nt, synthetic construct
  source 1..52: mol_type = other RNA
acaggtcctgccatttcaccaggaacatgtaaacctgggggaaagccagagt

SEQ ID NO: 1616 - RNA, 53 nt, synthetic construct
  source 1..53: mol_type = other RNA
gacaggtcctgccatttcaccaggaacatgtatacctgggggaaagccagagt

SEQ ID NO: 1617 - RNA, 53 nt, synthetic construct
  source 1..53: mol_type = other RNA
gacaggtcctgccatttcaccaggaacatgtaaacctgggggaaagccagagt

SEQ ID NO: 1618 - RNA, 53 nt, synthetic construct
  source 1..53: mol_type = other RNA
gacaggtcctgccatttcaccaggaacatgtagacctgggggaaagccagagt

SEQ ID NO: 1619 - RNA, 53 nt, synthetic construct
  source 1..53: mol_type = other RNA
gacaggtcctgccatttcaccaggaacatgtacacctgggggaaagccagagt

SEQ ID NO: 1620 - RNA, 54 nt, synthetic construct
  source 1..54: mol_type = other RNA
cgacaggtcctgccatttcaccaggaacatgtaaacctgggggaaagccagagt

SEQ ID NO: 1621 - RNA, 54 nt, synthetic construct
  source 1..54: mol_type = other RNA
cgacaggtcctgccatttcaccaggaacatgtacacctgggggaaagccagagt

SEQ ID NO: 1622 - RNA, 54 nt, synthetic construct
  source 1..54: mol_type = other RNA
cgacaggtcctgccatttcaccaggaacatgtagacctgggggaaagccagagt

SEQ ID NO: 1623 - RNA, 54 nt, synthetic construct
  source 1..54: mol_type = other RNA
cgacaggtcctgccatttcaccaggaacatgtatacctgggggaaagccagagt

SEQ ID NO: 1624 - RNA, 55 nt, synthetic construct
  source 1..55: mol_type = other RNA
ccgacaggtcctgccatttcaccaggaacatgtagacctgggggaaagccagagt

SEQ ID NO: 1625 - RNA, 55 nt, synthetic construct
  source 1..55: mol_type = other RNA
ccgacaggtcctgccatttcaccaggaacatgtatacctgggggaaagccagagt

SEQ ID NO: 1626 - RNA, 55 nt, synthetic construct
  source 1..55: mol_type = other RNA
ccgacaggtcctgccatttcaccaggaacatgtacacctgggggaaagccagagt

SEQ ID NO: 1627 - RNA, 55 nt, synthetic construct
  source 1..55: mol_type = other RNA
ccgacaggtcctgccatttcaccaggaacatgtaaacctgggggaaagccagagt

SEQ ID NO: 1628 - RNA, 56 nt, synthetic construct
  source 1..56: mol_type = other RNA
tccgacaggtcctgccatttcaccaggaacatgtaaacctgggggaaagccagagt

SEQ ID NO: 1629 - RNA, 56 nt, synthetic construct
  source 1..56: mol_type = other RNA
tccgacaggtcctgccatttcaccaggaacatgtacacctgggggaaagccagagt

SEQ ID NO: 1630 - RNA, 56 nt, synthetic construct
  source 1..56: mol_type = other RNA
tccgacaggtcctgccatttcaccaggaacatgtagacctgggggaaagccagagt

SEQ ID NO: 1631 - RNA, 56 nt, synthetic construct
  source 1..56: mol_type = other RNA
tccgacaggtcctgccatttcaccaggaacatgtatacctgggggaaagccagagt

SEQ ID NO: 1632 - RNA, 57 nt, synthetic construct
  source 1..57: mol_type = other RNA
ctccgacaggtcctgccatttcaccaggaacatgtatacctgggggaaagccagagt

SEQ ID NO: 1633 - RNA, 57 nt, synthetic construct
  source 1..57: mol_type = other RNA
ctccgacaggtcctgccatttcaccaggaacatgtagacctgggggaaagccagagt

SEQ ID NO: 1634 - RNA, 57 nt, synthetic construct
  source 1..57: mol_type = other RNA
ctccgacaggtcctgccatttcaccaggaacatgtacacctgggggaaagccagagt

SEQ ID NO: 1635 - RNA, 57 nt, synthetic construct
  source 1..57: mol_type = other RNA
ctccgacaggtcctgccatttcaccaggaacatgtaaacctgggggaaagccagagt

SEQ ID NO: 1636 - RNA, 58 nt, synthetic construct
  source 1..58: mol_type = other RNA
tctccgacaggtcctgccatttcaccaggaacatgtacacctgggggaaagccagagt

SEQ ID NO: 1637 - RNA, 58 nt, synthetic construct
  source 1..58: mol_type = other RNA
tctccgacaggtcctgccatttcaccaggaacatgtatacctgggggaaagccagagt

SEQ ID NO: 1638 - RNA, 58 nt, synthetic construct
  source 1..58: mol_type = other RNA
tctccgacaggtcctgccatttcaccaggaacatgtagacctgggggaaagccagagt

SEQ ID NO: 1639 - RNA, 58 nt, synthetic construct
  source 1..58: mol_type = other RNA
tctccgacaggtcctgccatttcaccaggaacatgtaaacctgggggaaagccagagt

SEQ ID NO: 1640 - RNA, 59 nt, synthetic construct
  source 1..59: mol_type = other RNA
ttctccgacaggtcctgccatttcaccaggaacatgtatacctgggggaaagccagagt

SEQ ID NO: 1641 - RNA, 59 nt, synthetic construct
  source 1..59: mol_type = other RNA
ttctccgacaggtcctgccatttcaccaggaacatgtacacctgggggaaagccagagt

SEQ ID NO: 1642 - RNA, 59 nt, synthetic construct
  source 1..59: mol_type = other RNA
ttctccgacaggtcctgccatttcaccaggaacatgtaaacctgggggaaagccagagt

SEQ ID NO: 1643 - RNA, 59 nt, synthetic construct
  source 1..59: mol_type = other RNA
ttctccgacaggtcctgccatttcaccaggaacatgtagacctgggggaaagccagagt

SEQ ID NO: 1644 - RNA, 60 nt, synthetic construct
  source 1..60: mol_type = other RNA
cttctccgacaggtcctgccatttcaccaggaacatgtagacctgggggaaagccagagt

SEQ ID NO: 1645 - RNA, 60 nt, synthetic construct
  source 1..60: mol_type = other RNA
cttctccgacaggtcctgccatttcaccaggaacatgtaaacctgggggaaagccagagt

SEQ ID NO: 1646 - RNA, 60 nt, synthetic construct
  source 1..60: mol_type = other RNA
cttctccgacaggtcctgccatttcaccaggaacatgtacacctgggggaaagccagagt

SEQ ID NO: 1647 - RNA, 60 nt, synthetic construct
  source 1..60: mol_type = other RNA
cttctccgacaggtcctgccatttcaccaggaacatgtatacctgggggaaagccagagt

SEQ ID NO: 1648 - RNA, 61 nt, synthetic construct
  source 1..61: mol_type = other RNA
ccttctccgacaggtcctgccatttcaccaggaacatgtacacctgggggaaagccagagt

SEQ ID NO: 1649 - RNA, 61 nt, synthetic construct
  source 1..61: mol_type = other RNA
ccttctccgacaggtcctgccatttcaccaggaacatgtaaacctgggggaaagccagagt

SEQ ID NO: 1650 - RNA, 61 nt, synthetic construct
  source 1..61: mol_type = other RNA
ccttctccgacaggtcctgccatttcaccaggaacatgtagacctgggggaaagccagagt

SEQ ID NO: 1651 - RNA, 61 nt, synthetic construct
  source 1..61: mol_type = other RNA
ccttctccgacaggtcctgccatttcaccaggaacatgtatacctgggggaaagccagagt

SEQ ID NO: 1652 - RNA, 62 nt, synthetic construct
  source 1..62: mol_type = other RNA
accttctccgacaggtcctgccatttcaccaggaacatgtaaacctgggggaaagccagagt

SEQ ID NO: 1653 - RNA, 62 nt, synthetic construct
  source 1..62: mol_type = other RNA
accttctccgacaggtcctgccatttcaccaggaacatgtatacctgggggaaagccagagt

SEQ ID NO: 1654 - RNA, 62 nt, synthetic construct
  source 1..62: mol_type = other RNA
accttctccgacaggtcctgccatttcaccaggaacatgtagacctgggggaaagccagagt

SEQ ID NO: 1655 - RNA, 62 nt, synthetic construct
  source 1..62: mol_type = other RNA
accttctccgacaggtcctgccatttcaccaggaacatgtacacctgggggaaagccagagt

SEQ ID NO: 1656 - RNA, 63 nt, synthetic construct
  source 1..63: mol_type = other RNA
caccttctccgacaggtcctgccatttcaccaggaacatgtatacctgggggaaagccagagt

SEQ ID NO: 1657 - RNA, 63 nt, synthetic construct
  source 1..63: mol_type = other RNA
caccttctccgacaggtcctgccatttcaccaggaacatgtagacctgggggaaagccagagt

SEQ ID NO: 1658 - RNA, 63 nt, synthetic construct
  source 1..63: mol_type = other RNA
caccttctccgacaggtcctgccatttcaccaggaacatgtaaacctgggggaaagccagagt

SEQ ID NO: 1659 - RNA, 63 nt, synthetic construct
  source 1..63: mol_type = other RNA
caccttctccgacaggtcctgccatttcaccaggaacatgtacacctgggggaaagccagagt

SEQ ID NO: 1660 - RNA, 64 nt, synthetic construct
  source 1..64: mol_type = other RNA
ccaccttctccgacaggtcctgccatttcaccaggaacatgtacacctgggggaaagccagagt

SEQ ID NO: 1661 - RNA, 64 nt, synthetic construct
  source 1..64: mol_type = other RNA
ccaccttctccgacaggtcctgccatttcaccaggaacatgtatacctgggggaaagccagagt

SEQ ID NO: 1662 - RNA, 64 nt, synthetic construct
  source 1..64: mol_type = other RNA
ccaccttctccgacaggtcctgccatttcaccaggaacatgtagacctgggggaaagccagagt

SEQ ID NO: 1663 - RNA, 64 nt, synthetic construct
  source 1..64: mol_type = other RNA
ccaccttctccgacaggtcctgccatttcaccaggaacatgtaaacctgggggaaagccagagt

SEQ ID NO: 1664 - RNA, 65 nt, synthetic construct
  source 1..65: mol_type = other RNA
accaccttctccgacaggtcctgccatttcaccaggaacatgtagacctgggggaaagccagagt

SEQ ID NO: 1665 - RNA, 65 nt, synthetic construct
  source 1..65: mol_type = other RNA
accaccttctccgacaggtcctgccatttcaccaggaacatgtaaacctgggggaaagccagagt

SEQ ID NO: 1666 - RNA, 65 nt, synthetic construct
  source 1..65: mol_type = other RNA
accaccttctccgacaggtcctgccatttcaccaggaacatgtacacctgggggaaagccagagt

SEQ ID NO: 1667 - RNA, 65 nt, synthetic construct
  source 1..65: mol_type = other RNA
accaccttctccgacaggtcctgccatttcaccaggaacatgtatacctgggggaaagccagagt

SEQ ID NO: 1668 - RNA, 66 nt, synthetic construct
  source 1..66: mol_type = other RNA
gaccaccttctccgacaggtcctgccatttcaccaggaacatgtaaacctgggggaaagccagagt

SEQ ID NO: 1669 - RNA, 66 nt, synthetic construct
  source 1..66: mol_type = other RNA
gaccaccttctccgacaggtcctgccatttcaccaggaacatgtacacctgggggaaagccagagt

SEQ ID NO: 1670 - RNA, 66 nt, synthetic construct
  source 1..66: mol_type = other RNA
gaccaccttctccgacaggtcctgccatttcaccaggaacatgtagacctgggggaaagccagagt

SEQ ID NO: 1671 - RNA, 66 nt, synthetic construct
  source 1..66: mol_type = other RNA
gaccaccttctccgacaggtcctgccatttcaccaggaacatgtatacctgggggaaagccagagt

SEQ ID NO: 1672 - RNA, 67 nt, synthetic construct
  source 1..67: mol_type = other RNA
agaccaccttctccgacaggtcctgccatttcaccaggaacatgtaaacctgggggaaagccagagt

SEQ ID NO: 1673 - RNA, 67 nt, synthetic construct
  source 1..67: mol_type = other RNA
agaccaccttctccgacaggtcctgccatttcaccaggaacatgtatacctgggggaaagccagagt

SEQ ID NO: 1674 - RNA, 67 nt, synthetic construct
  source 1..67: mol_type = other RNA
agaccaccttctccgacaggtcctgccatttcaccaggaacatgtagacctgggggaaagccagagt

SEQ ID NO: 1675 - RNA, 67 nt, synthetic construct
  source 1..67: mol_type = other RNA
agaccaccttctccgacaggtcctgccatttcaccaggaacatgtacacctgggggaaagccagagt

SEQ ID NO: 1676 - RNA, 68 nt, synthetic construct
  source 1..68: mol_type = other RNA
tagaccaccttctccgacaggtcctgccatttcaccaggaacatgtagacctgggggaaagccagagt

SEQ ID NO: 1677 - RNA, 68 nt, synthetic construct
  source 1..68: mol_type = other RNA
tagaccaccttctccgacaggtcctgccatttcaccaggaacatgtacacctgggggaaagccagagt

SEQ ID NO: 1678 - RNA, 68 nt, synthetic construct
  source 1..68: mol_type = other RNA
tagaccaccttctccgacaggtcctgccatttcaccaggaacatgtaaacctgggggaaagccagagt

SEQ ID NO: 1679 - RNA, 68 nt, synthetic construct
  source 1..68: mol_type = other RNA
tagaccaccttctccgacaggtcctgccatttcaccaggaacatgtatacctgggggaaagccagagt

SEQ ID NO: 1680 - RNA, 69 nt, synthetic construct
  source 1..69: mol_type = other RNA
gtagaccaccttctccgacaggtcctgccatttcaccaggaacatgtagacctgggggaaagccagagt

SEQ ID NO: 1681 - RNA, 69 nt, synthetic construct
  source 1..69: mol_type = other RNA
gtagaccaccttctccgacaggtcctgccatttcaccaggaacatgtatacctgggggaaagccagagt

SEQ ID NO: 1682 - RNA, 69 nt, synthetic construct
  source 1..69: mol_type = other RNA
gtagaccaccttctccgacaggtcctgccatttcaccaggaacatgtaaacctgggggaaagccagagt

SEQ ID NO: 1683 - RNA, 69 nt, synthetic construct
  source 1..69: mol_type = other RNA
gtagaccaccttctccgacaggtcctgccatttcaccaggaacatgtacacctgggggaaagccagagt

SEQ ID NO: 1684 - RNA, 70 nt, synthetic construct
  source 1..70: mol_type = other RNA
ggtagaccaccttctccgacaggtcctgccatttcaccaggaacatgtatacctgggggaaagccagagt

SEQ ID NO: 1685 - RNA, 70 nt, synthetic construct
  source 1..70: mol_type = other RNA
ggtagaccaccttctccgacaggtcctgccatttcaccaggaacatgtacacctgggggaaagccagagt

SEQ ID NO: 1686 - RNA, 70 nt, synthetic construct
  source 1..70: mol_type = other RNA
ggtagaccaccttctccgacaggtcctgccatttcaccaggaacatgtagacctgggggaaagccagagt

SEQ ID NO: 1687 - RNA, 70 nt, synthetic construct
  source 1..70: mol_type = other RNA
ggtagaccaccttctccgacaggtcctgccatttcaccaggaacatgtaaacctgggggaaagccagagt

SEQ ID NO: 1688 - RNA, 71 nt, synthetic construct
  source 1..71: mol_type = other RNA
cggtagaccaccttctccgacaggtcctgccatttcaccaggaacatgtagacctgggggaaagccagagt

SEQ ID NO: 1689 - RNA, 71 nt, synthetic construct
  source 1..71: mol_type = other RNA
cggtagaccaccttctccgacaggtcctgccatttcaccaggaacatgtatacctgggggaaagccagagt

SEQ ID NO: 1690 - RNA, 71 nt, synthetic construct
  source 1..71: mol_type = other RNA
cggtagaccaccttctccgacaggtcctgccatttcaccaggaacatgtacacctgggggaaagccagagt

SEQ ID NO: 1691 - RNA, 71 nt, synthetic construct
  source 1..71: mol_type = other RNA
cggtagaccaccttctccgacaggtcctgccatttcaccaggaacatgtaaacctgggggaaagccagagt

SEQ ID NO: 1692 - RNA, 72 nt, synthetic construct
  source 1..72: mol_type = other RNA
ccggtagaccaccttctccgacaggtcctgccatttcaccaggaacatgtaaacctgggggaaagccagagt

SEQ ID NO: 1693 - RNA, 72 nt, synthetic construct
  source 1..72: mol_type = other RNA
ccggtagaccaccttctccgacaggtcctgccatttcaccaggaacatgtatacctgggggaaagccagagt

SEQ ID NO: 1694 - RNA, 72 nt, synthetic construct
  source 1..72: mol_type = other RNA
ccggtagaccaccttctccgacaggtcctgccatttcaccaggaacatgtacacctgggggaaagccagagt

SEQ ID NO: 1695 - RNA, 72 nt, synthetic construct
  source 1..72: mol_type = other RNA
ccggtagaccaccttctccgacaggtcctgccatttcaccaggaacatgtagacctgggggaaagccagagt

SEQ ID NO: 1696 - RNA, 73 nt, synthetic construct
  source 1..73: mol_type = other RNA
gccggtagaccaccttctccgacaggtcctgccatttcaccaggaacatgtaaacctgggggaaagccagagt

SEQ ID NO: 1697 - RNA, 73 nt, synthetic construct
  source 1..73: mol_type = other RNA
gccggtagaccaccttctccgacaggtcctgccatttcaccaggaacatgtatacctgggggaaagccagagt

SEQ ID NO: 1698 - RNA, 73 nt, synthetic construct
  source 1..73: mol_type = other RNA
gccggtagaccaccttctccgacaggtcctgccatttcaccaggaacatgtacacctgggggaaagccagagt

SEQ ID NO: 1699 - RNA, 73 nt, synthetic construct
  source 1..73: mol_type = other RNA
gccggtagaccaccttctccgacaggtcctgccatttcaccaggaacatgtagacctgggggaaagccagagt

SEQ ID NO: 1700 - RNA, 74 nt, synthetic construct
  source 1..74: mol_type = other RNA
cgccggtagaccaccttctccgacaggtcctgccatttcaccaggaacatgtagacctgggggaaagccagagt

SEQ ID NO: 1701 - RNA, 74 nt, synthetic construct
  source 1..74: mol_type = other RNA
cgccggtagaccaccttctccgacaggtcctgccatttcaccaggaacatgtatacctgggggaaagccagagt

SEQ ID NO: 1702 - RNA, 74 nt, synthetic construct
  source 1..74: mol_type = other RNA
cgccggtagaccaccttctccgacaggtcctgccatttcaccaggaacatgtaaacctgggggaaagccagagt

SEQ ID NO: 1703 - RNA, 74 nt, synthetic construct
  source 1..74: mol_type = other RNA
cgccggtagaccaccttctccgacaggtcctgccatttcaccaggaacatgtacacctgggggaaagccagagt

SEQ ID NO: 1704 - RNA, 75 nt, synthetic construct
  source 1..75: mol_type = other RNA
gcgccggtagaccaccttctccgacaggtcctgccatttcaccaggaacatgtagacctgggggaaagccagagt

SEQ ID NO: 1705 - RNA, 75 nt, synthetic construct
  source 1..75: mol_type = other RNA
gcgccggtagaccaccttctccgacaggtcctgccatttcaccaggaacatgtaaacctgggggaaagccagagt

SEQ ID NO: 1706 - RNA, 75 nt, synthetic construct
  source 1..75: mol_type = other RNA
gcgccggtagaccaccttctccgacaggtcctgccatttcaccaggaacatgtacacctgggggaaagccagagt

SEQ ID NO: 1707 - RNA, 75 nt, synthetic construct
  source 1..75: mol_type = other RNA
gcgccggtagaccaccttctccgacaggtcctgccatttcaccaggaacatgtatacctgggggaaagccagagt

SEQ ID NO: 1708 - RNA, 76 nt, synthetic construct
  source 1..76: mol_type = other RNA
agcgccggtagaccaccttctccgacaggtcctgccatttcaccaggaacatgtatacctgggggaaagccagagt

SEQ ID NO: 1709 - RNA, 76 nt, synthetic construct
  source 1..76: mol_type = other RNA
agcgccggtagaccaccttctccgacaggtcctgccatttcaccaggaacatgtacacctgggggaaagccagagt

SEQ ID NO: 1710 - RNA, 76 nt, synthetic construct
  source 1..76: mol_type = other RNA
agcgccggtagaccaccttctccgacaggtcctgccatttcaccaggaacatgtaaacctgggggaaagccagagt

SEQ ID NO: 1711 - RNA, 76 nt, synthetic construct
  source 1..76: mol_type = other RNA
agcgccggtagaccaccttctccgacaggtcctgccatttcaccaggaacatgtagacctgggggaaagccagagt

SEQ ID NO: 1712 - RNA, 77 nt, synthetic construct
  source 1..77: mol_type = other RNA
aagcgccggtagaccaccttctccgacaggtcctgccatttcaccaggaacatgtaaacctgggggaaagccagagt

SEQ ID NO: 1713 - RNA, 77 nt, synthetic construct
  source 1..77: mol_type = other RNA
aagcgccggtagaccaccttctccgacaggtcctgccatttcaccaggaacatgtacacctgggggaaagccagagt

SEQ ID NO: 1714 - RNA, 77 nt, synthetic construct
  source 1..77: mol_type = other RNA
aagcgccggtagaccaccttctccgacaggtcctgccatttcaccaggaacatgtatacctgggggaaagccagagt

SEQ ID NO: 1715 - RNA, 77 nt, synthetic construct
  source 1..77: mol_type = other RNA
aagcgccggtagaccaccttctccgacaggtcctgccatttcaccaggaacatgtagacctgggggaaagccagagt

SEQ ID NO: 1716 - RNA, 78 nt, synthetic construct
  source 1..78: mol_type = other RNA
gaagcgccggtagaccaccttctccgacaggtcctgccatttcaccaggaacatgtatacctgggggaaagccagagt

SEQ ID NO: 1717 - RNA, 78 nt, synthetic construct
  source 1..78: mol_type = other RNA
gaagcgccggtagaccaccttctccgacaggtcctgccatttcaccaggaacatgtacacctgggggaaagccagagt

SEQ ID NO: 1718 - RNA, 78 nt, synthetic construct
  source 1..78: mol_type = other RNA
gaagcgccggtagaccaccttctccgacaggtcctgccatttcaccaggaacatgtagacctgggggaaagccagagt

SEQ ID NO: 1719 - RNA, 78 nt, synthetic construct
  source 1..78: mol_type = other RNA
gaagcgccggtagaccaccttctccgacaggtcctgccatttcaccaggaacatgtaaacctgggggaaagccagagt

SEQ ID NO: 1720 - RNA, 79 nt, synthetic construct
  source 1..79: mol_type = other RNA
tgaagcgccggtagaccaccttctccgacaggtcctgccatttcaccaggaacatgtatacctgggggaaagccagagt

SEQ ID NO: 1721 - RNA, 79 nt, synthetic construct
  source 1..79: mol_type = other RNA
tgaagcgccggtagaccaccttctccgacaggtcctgccatttcaccaggaacatgtagacctgggggaaagccagagt

SEQ ID NO: 1722 - RNA, 79 nt, synthetic construct
  source 1..79: mol_type = other RNA
tgaagcgccggtagaccaccttctccgacaggtcctgccatttcaccaggaacatgtacacctgggggaaagccagagt

SEQ ID NO: 1723 - RNA, 79 nt, synthetic construct
  source 1..79: mol_type = other RNA
tgaagcgccggtagaccaccttctccgacaggtcctgccatttcaccaggaacatgtaaacctgggggaaagccagagt

SEQ ID NO: 1724 - RNA, 80 nt, synthetic construct
  source 1..80: mol_type = other RNA
gtgaagcgccggtagaccaccttctccgacaggtcctgccatttcaccaggaacatgtacacctgggggaaagccagagt

SEQ ID NO: 1725 - RNA, 80 nt, synthetic construct
  source 1..80: mol_type = other RNA
gtgaagcgccggtagaccaccttctccgacaggtcctgccatttcaccaggaacatgtaaacctgggggaaagccagagt

SEQ ID NO: 1726 - RNA, 80 nt, synthetic construct
  source 1..80: mol_type = other RNA
gtgaagcgccggtagaccaccttctccgacaggtcctgccatttcaccaggaacatgtagacctgggggaaagccagagt

SEQ ID NO: 1727 - RNA, 80 nt, synthetic construct
  source 1..80: mol_type = other RNA
gtgaagcgccggtagaccaccttctccgacaggtcctgccatttcaccaggaacatgtatacctgggggaaagccagagt

SEQ ID NO: 1728 - RNA, 81 nt, synthetic construct
  source 1..81: mol_type = other RNA
ggtgaagcgccggtagaccaccttctccgacaggtcctgccatttcaccaggaacatgtatacctgggggaaagccagagt

SEQ ID NO: 1729 - RNA, 81 nt, synthetic construct
  source 1..81: mol_type = other RNA
ggtgaagcgccggtagaccaccttctccgacaggtcctgccatttcaccaggaacatgtaaacctgggggaaagccagagt

SEQ ID NO: 1730 - RNA, 81 nt, synthetic construct
  source 1..81: mol_type = other RNA
ggtgaagcgccggtagaccaccttctccgacaggtcctgccatttcaccaggaacatgtacacctgggggaaagccagagt

SEQ ID NO: 1731 - RNA, 81 nt, synthetic construct
  source 1..81: mol_type = other RNA
ggtgaagcgccggtagaccaccttctccgacaggtcctgccatttcaccaggaacatgtagacctgggggaaagccagagt

SEQ ID NO: 1732 - RNA, 82 nt, synthetic construct
  source 1..82: mol_type = other RNA
cggtgaagcgccggtagaccaccttctccgacaggtcctgccatttcaccaggaacatgtatacctgggggaaagccagagt

SEQ ID NO: 1733 - RNA, 82 nt, synthetic construct
  source 1..82: mol_type = other RNA
cggtgaagcgccggtagaccaccttctccgacaggtcctgccatttcaccaggaacatgtagacctgggggaaagccagagt

SEQ ID NO: 1734 - RNA, 82 nt, synthetic construct
  source 1..82: mol_type = other RNA
cggtgaagcgccggtagaccaccttctccgacaggtcctgccatttcaccaggaacatgtacacctgggggaaagccagagt

SEQ ID NO: 1735 - RNA, 82 nt, synthetic construct
  source 1..82: mol_type = other RNA
cggtgaagcgccggtagaccaccttctccgacaggtcctgccatttcaccaggaacatgtaaacctgggggaaagccagagt

SEQ ID NO: 1736 - RNA, 83 nt, synthetic construct
  source 1..83: mol_type = other RNA
tcggtgaagcgccggtagaccaccttctccgacaggtcctgccatttcaccaggaacatgtaaacctgggggaaagccagagt

SEQ ID NO: 1737 - RNA, 83 nt, synthetic construct
  source 1..83: mol_type = other RNA
tcggtgaagcgccggtagaccaccttctccgacaggtcctgccatttcaccaggaacatgtagacctgggggaaagccagagt

SEQ ID NO: 1738 - RNA, 83 nt, synthetic construct
  source 1..83: mol_type = other RNA
tcggtgaagcgccggtagaccaccttctccgacaggtcctgccatttcaccaggaacatgtacacctgggggaaagccagagt

SEQ ID NO: 1739 - RNA, 83 nt, synthetic construct
  source 1..83: mol_type = other RNA
tcggtgaagcgccggtagaccaccttctccgacaggtcctgccatttcaccaggaacatgtatacctgggggaaagccagagt

SEQ ID NO: 1740 - RNA, 84 nt, synthetic construct
  source 1..84: mol_type = other RNA
ctcggtgaagcgccggtagaccaccttctccgacaggtcctgccatttcaccaggaacatgtaaacctgggggaaagccagagt

SEQ ID NO: 1741 - RNA, 84 nt, synthetic construct
  source 1..84: mol_type = other RNA
ctcggtgaagcgccggtagaccaccttctccgacaggtcctgccatttcaccaggaacatgtacacctgggggaaagccagagt

SEQ ID NO: 1742 - RNA, 84 nt, synthetic construct
  source 1..84: mol_type = other RNA
ctcggtgaagcgccggtagaccaccttctccgacaggtcctgccatttcaccaggaacatgtagacctgggggaaagccagagt

SEQ ID NO: 1743 - RNA, 84 nt, synthetic construct
  source 1..84: mol_type = other RNA
ctcggtgaagcgccggtagaccaccttctccgacaggtcctgccatttcaccaggaacatgtatacctgggggaaagccagagt

SEQ ID NO: 1744 - RNA, 85 nt, synthetic construct
  source 1..85: mol_type = other RNA
tctcggtgaagcgccggtagaccaccttctccgacaggtcctgccatttcaccaggaacatgtacacctgggggaaagccagagt

SEQ ID NO: 1745 - RNA, 85 nt, synthetic construct
  source 1..85: mol_type = other RNA
tctcggtgaagcgccggtagaccaccttctccgacaggtcctgccatttcaccaggaacatgtaaacctgggggaaagccagagt

SEQ ID NO: 1746 - RNA, 85 nt, synthetic construct
  source 1..85: mol_type = other RNA
tctcggtgaagcgccggtagaccaccttctccgacaggtcctgccatttcaccaggaacatgtatacctgggggaaagccagagt

SEQ ID NO: 1747 - RNA, 85 nt, synthetic construct
  source 1..85: mol_type = other RNA
tctcggtgaagcgccggtagaccaccttctccgacaggtcctgccatttcaccaggaacatgtagacctgggggaaagccagagt

SEQ ID NO: 1748 - RNA, 86 nt, synthetic construct
  source 1..86: mol_type = other RNA
atctcggtgaagcgccggtagaccaccttctccgacaggtcctgccatttcaccaggaacatgtacacctgggggaaagccagagt

SEQ ID NO: 1749 - RNA, 86 nt, synthetic construct
  source 1..86: mol_type = other RNA
atctcggtgaagcgccggtagaccaccttctccgacaggtcctgccatttcaccaggaacatgtatacctgggggaaagccagagt

SEQ ID NO: 1750 - RNA, 86 nt, synthetic construct
  source 1..86: mol_type = other RNA
atctcggtgaagcgccggtagaccaccttctccgacaggtcctgccatttcaccaggaacatgtagacctgggggaaagccagagt

SEQ ID NO: 1751 - RNA, 86 nt, synthetic construct
  source 1..86: mol_type = other RNA
atctcggtgaagcgccggtagaccaccttctccgacaggtcctgccatttcaccaggaacatgtaaacctgggggaaagccagagt

SEQ ID NO: 1752 - RNA, 87 nt, synthetic construct
  source 1..87: mol_type = other RNA
gatctcggtgaagcgccggtagaccaccttctccgacaggtcctgccatttcaccaggaacatgtaaacctgggggaaagccagagt

SEQ ID NO: 1753 - RNA, 87 nt, synthetic construct
  source 1..87: mol_type = other RNA
gatctcggtgaagcgccggtagaccaccttctccgacaggtcctgccatttcaccaggaacatgtacacctgggggaaagccagagt

SEQ ID NO: 1754 - RNA, 87 nt, synthetic construct
  source 1..87: mol_type = other RNA
gatctcggtgaagcgccggtagaccaccttctccgacaggtcctgccatttcaccaggaacatgtagacctgggggaaagccagagt

SEQ ID NO: 1755 - RNA, 87 nt, synthetic construct
  source 1..87: mol_type = other RNA
gatctcggtgaagcgccggtagaccaccttctccgacaggtcctgccatttcaccaggaacatgtatacctgggggaaagccagagt

SEQ ID NO: 1756 - RNA, 88 nt, synthetic construct
  source 1..88: mol_type = other RNA
agatctcggtgaagcgccggtagaccaccttctccgacaggtcctgccatttcaccaggaacatgtacacctgggggaaagccagagt

SEQ ID NO: 1757 - RNA, 88 nt, synthetic construct
  source 1..88: mol_type = other RNA
agatctcggtgaagcgccggtagaccaccttctccgacaggtcctgccatttcaccaggaacatgtaaacctgggggaaagccagagt

SEQ ID NO: 1758 - RNA, 88 nt, synthetic construct
  source 1..88: mol_type = other RNA
agatctcggtgaagcgccggtagaccaccttctccgacaggtcctgccatttcaccaggaacatgtagacctgggggaaagccagagt

SEQ ID NO: 1759 - RNA, 88 nt, synthetic construct
  source 1..88: mol_type = other RNA
agatctcggtgaagcgccggtagaccaccttctccgacaggtcctgccatttcaccaggaacatgtatacctgggggaaagccagagt

SEQ ID NO: 1760 - RNA, 89 nt, synthetic construct
  source 1..89: mol_type = other RNA
tagatctcggtgaagcgccggtagaccaccttctccgacaggtcctgccatttcaccaggaacatgtatacctgggggaaagccagagt

SEQ ID NO: 1761 - RNA, 89 nt, synthetic construct
  source 1..89: mol_type = other RNA
tagatctcggtgaagcgccggtagaccaccttctccgacaggtcctgccatttcaccaggaacatgtagacctgggggaaagccagagt

SEQ ID NO: 1762 - RNA, 89 nt, synthetic construct
  source 1..89: mol_type = other RNA
tagatctcggtgaagcgccggtagaccaccttctccgacaggtcctgccatttcaccaggaacatgtacacctgggggaaagccagagt

SEQ ID NO: 1763 - RNA, 89 nt, synthetic construct
  source 1..89: mol_type = other RNA
tagatctcggtgaagcgccggtagaccaccttctccgacaggtcctgccatttcaccaggaacatgtaaacctgggggaaagccagagt

SEQ ID NO: 1764 - RNA, 90 nt, synthetic construct
  source 1..90: mol_type = other RNA
gtagatctcggtgaagcgccggtagaccaccttctccgacaggtcctgccatttcaccaggaacatgtagacctgggggaaagccagagt

SEQ ID NO: 1765 - RNA, 90 nt, synthetic construct
  source 1..90: mol_type = other RNA
gtagatctcggtgaagcgccggtagaccaccttctccgacaggtcctgccatttcaccaggaacatgtatacctgggggaaagccagagt

SEQ ID NO: 1766 - RNA, 90 nt, synthetic construct
  source 1..90: mol_type = other RNA
gtagatctcggtgaagcgccggtagaccaccttctccgacaggtcctgccatttcaccaggaacatgtacacctgggggaaagccagagt

SEQ ID NO: 1767 - RNA, 90 nt, synthetic construct
  source 1..90: mol_type = other RNA
gtagatctcggtgaagcgccggtagaccaccttctccgacaggtcctgccatttcaccaggaacatgtaaacctgggggaaagccagagt

SEQ ID NO: 1768 - RNA, 91 nt, synthetic construct
  source 1..91: mol_type = other RNA
cgtagatctcggtgaagcgccggtagaccaccttctccgacaggtcctgccatttcaccaggaacatgtacacctgggggaaagccagagt

SEQ ID NO: 1769 - RNA, 91 nt, synthetic construct
  source 1..91: mol_type = other RNA
cgtagatctcggtgaagcgccggtagaccaccttctccgacaggtcctgccatttcaccaggaacatgtaaacctgggggaaagccagagt

SEQ ID NO: 1770 - RNA, 91 nt, synthetic construct
  source 1..91: mol_type = other RNA
cgtagatctcggtgaagcgccggtagaccaccttctccgacaggtcctgccatttcaccaggaacatgtatacctgggggaaagccagagt

SEQ ID NO: 1771 - RNA, 91 nt, synthetic construct
  source 1..91: mol_type = other RNA
cgtagatctcggtgaagcgccggtagaccaccttctccgacaggtcctgccatttcaccaggaacatgtagacctgggggaaagccagagt

SEQ ID NO: 1772 - RNA, 92 nt, synthetic construct
  source 1..92: mol_type = other RNA
tcgtagatctcggtgaagcgccggtagaccaccttctccgacaggtcctgccatttcaccaggaacatgtagacctgggggaaagccagagt

SEQ ID NO: 1773 - RNA, 92 nt, synthetic construct
  source 1..92: mol_type = other RNA
tcgtagatctcggtgaagcgccggtagaccaccttctccgacaggtcctgccatttcaccaggaacatgtatacctgggggaaagccagagt

SEQ ID NO: 1774 - RNA, 92 nt, synthetic construct
  source 1..92: mol_type = other RNA
tcgtagatctcggtgaagcgccggtagaccaccttctccgacaggtcctgccatttcaccaggaacatgtacacctgggggaaagccagagt

SEQ ID NO: 1775 - RNA, 92 nt, synthetic construct
  source 1..92: mol_type = other RNA
tcgtagatctcggtgaagcgccggtagaccaccttctccgacaggtcctgccatttcaccaggaacatgtaaacctgggggaaagccagagt

SEQ ID NO: 1776 - RNA, 93 nt, synthetic construct
  source 1..93: mol_type = other RNA
ctcgtagatctcggtgaagcgccggtagaccaccttctccgacaggtcctgccatttcaccaggaacatgtacacctgggggaaagccagagt

SEQ ID NO: 1777 - RNA, 93 nt, synthetic construct
  source 1..93: mol_type = other RNA
ctcgtagatctcggtgaagcgccggtagaccaccttctccgacaggtcctgccatttcaccaggaacatgtatacctgggggaaagccagagt

SEQ ID NO: 1778 - RNA, 93 nt, synthetic construct
  source 1..93: mol_type = other RNA
ctcgtagatctcggtgaagcgccggtagaccaccttctccgacaggtcctgccatttcaccaggaacatgtaaacctgggggaaagccagagt

SEQ ID NO: 1779 - RNA, 93 nt, synthetic construct
  source 1..93: mol_type = other RNA
ctcgtagatctcggtgaagcgccggtagaccaccttctccgacaggtcctgccatttcaccaggaacatgtagacctgggggaaagccagagt

SEQ ID NO: 1780 - RNA, 94 nt, synthetic construct
  source 1..94: mol_type = other RNA
actcgtagatctcggtgaagcgccggtagaccaccttctccgacaggtcctgccatttcaccaggaacatgtagacctgggggaaagccagagt

SEQ ID NO: 1781 - RNA, 94 nt, synthetic construct
  source 1..94: mol_type = other RNA
actcgtagatctcggtgaagcgccggtagaccaccttctccgacaggtcctgccatttcaccaggaacatgtacacctgggggaaagccagagt

SEQ ID NO: 1782 - RNA, 94 nt, synthetic construct
  source 1..94: mol_type = other RNA
actcgtagatctcggtgaagcgccggtagaccaccttctccgacaggtcctgccatttcaccaggaacatgtaaacctgggggaaagccagagt

SEQ ID NO: 1783 - RNA, 94 nt, synthetic construct
  source 1..94: mol_type = other RNA
actcgtagatctcggtgaagcgccggtagaccaccttctccgacaggtcctgccatttcaccaggaacatgtatacctgggggaaagccagagt

SEQ ID NO: 1784 - RNA, 95 nt, synthetic construct
  source 1..95: mol_type = other RNA
aactcgtagatctcggtgaagcgccggtagaccaccttctccgacaggtcctgccatttcaccaggaacatgtagacctgggggaaagccagagt

SEQ ID NO: 1785 - RNA, 95 nt, synthetic construct
  source 1..95: mol_type = other RNA
aactcgtagatctcggtgaagcgccggtagaccaccttctccgacaggtcctgccatttcaccaggaacatgtatacctgggggaaagccagagt

SEQ ID NO: 1786 - RNA, 95 nt, synthetic construct
  source 1..95: mol_type = other RNA
aactcgtagatctcggtgaagcgccggtagaccaccttctccgacaggtcctgccatttcaccaggaacatgtacacctgggggaaagccagagt

SEQ ID NO: 1787 - RNA, 95 nt, synthetic construct
  source 1..95: mol_type = other RNA
aactcgtagatctcggtgaagcgccggtagaccaccttctccgacaggtcctgccatttcaccaggaacatgtaaacctgggggaaagccagagt

SEQ ID NO: 1788 - RNA, 96 nt, synthetic construct
  source 1..96: mol_type = other RNA
gaactcgtagatctcggtgaagcgccggtagaccaccttctccgacaggtcctgccatttcaccaggaacatgtatacctgggggaaagccagagt

SEQ ID NO: 1789 - RNA, 96 nt, synthetic construct
  source 1..96: mol_type = other RNA
gaactcgtagatctcggtgaagcgccggtagaccaccttctccgacaggtcctgccatttcaccaggaacatgtagacctgggggaaagccagagt

SEQ ID NO: 1790 - RNA, 96 nt, synthetic construct
  source 1..96: mol_type = other RNA
gaactcgtagatctcggtgaagcgccggtagaccaccttctccgacaggtcctgccatttcaccaggaacatgtaaacctgggggaaagccagagt

SEQ ID NO: 1791 - RNA, 96 nt, synthetic construct
  source 1..96: mol_type = other RNA
gaactcgtagatctcggtgaagcgccggtagaccaccttctccgacaggtcctgccatttcaccaggaacatgtacacctgggggaaagccagagt

SEQ ID NO: 1792 - RNA, 97 nt, synthetic construct
  source 1..97: mol_type = other RNA
ggaactcgtagatctcggtgaagcgccggtagaccaccttctccgacaggtcctgccatttcaccaggaacatgtaaacctgggggaaagccagagt

SEQ ID NO: 1793 - RNA, 97 nt, synthetic construct
  source 1..97: mol_type = other RNA
ggaactcgtagatctcggtgaagcgccggtagaccaccttctccgacaggtcctgccatttcaccaggaacatgtatacctgggggaaagccagagt

SEQ ID NO: 1794 - RNA, 97 nt, synthetic construct
  source 1..97: mol_type = other RNA
ggaactcgtagatctcggtgaagcgccggtagaccaccttctccgacaggtcctgccatttcaccaggaacatgtacacctgggggaaagccagagt

SEQ ID NO: 1795 - RNA, 97 nt, synthetic construct
  source 1..97: mol_type = other RNA
ggaactcgtagatctcggtgaagcgccggtagaccaccttctccgacaggtcctgccatttcaccaggaacatgtagacctgggggaaagccagagt

SEQ ID NO: 1796 - RNA, 98 nt, synthetic construct
  source 1..98: mol_type = other RNA
tggaactcgtagatctcggtgaagcgccggtagaccaccttctccgacaggtcctgccatttcaccaggaacatgtatacctgggggaaagccagagt

SEQ ID NO: 1797 - RNA, 98 nt, synthetic construct
  source 1..98: mol_type = other RNA
tggaactcgtagatctcggtgaagcgccggtagaccaccttctccgacaggtcctgccatttcaccaggaacatgtaaacctgggggaaagccagagt

SEQ ID NO: 1798 - RNA, 98 nt, synthetic construct
  source 1..98: mol_type = other RNA
tggaactcgtagatctcggtgaagcgccggtagaccaccttctccgacaggtcctgccatttcaccaggaacatgtagacctgggggaaagccagagt

SEQ ID NO: 1799 - RNA, 98 nt, synthetic construct
  source 1..98: mol_type = other RNA
tggaactcgtagatctcggtgaagcgccggtagaccaccttctccgacaggtcctgccatttcaccaggaacatgtacacctgggggaaagccagagt

SEQ ID NO: 1800 - RNA, 99 nt, synthetic construct
  source 1..99: mol_type = other RNA
atggaactcgtagatctcggtgaagcgccggtagaccaccttctccgacaggtcctgccatttcaccaggaacatgtagacctgggggaaagccagagt

SEQ ID NO: 1801 - RNA, 99 nt, synthetic construct
  source 1..99: mol_type = other RNA
atggaactcgtagatctcggtgaagcgccggtagaccaccttctccgacaggtcctgccatttcaccaggaacatgtacacctgggggaaagccagagt

SEQ ID NO: 1802 - RNA, 99 nt, synthetic construct
  source 1..99: mol_type = other RNA
atggaactcgtagatctcggtgaagcgccggtagaccaccttctccgacaggtcctgccatttcaccaggaacatgtatacctgggggaaagccagagt

SEQ ID NO: 1803 - RNA, 99 nt, synthetic construct
  source 1..99: mol_type = other RNA
atggaactcgtagatctcggtgaagcgccggtagaccaccttctccgacaggtcctgccatttcaccaggaacatgtaaacctgggggaaagccagagt

SEQ ID NO: 1804 - RNA, 100 nt, synthetic construct
  source 1..100: mol_type = other RNA
catggaactcgtagatctcggtgaagcgccggtagaccaccttctccgacaggtcctgccatttcaccaggaacatgtacacctgggggaaagccagagt

SEQ ID NO: 1805 - RNA, 100 nt, synthetic construct
  source 1..100: mol_type = other RNA
catggaactcgtagatctcggtgaagcgccggtagaccaccttctccgacaggtcctgccatttcaccaggaacatgtagacctgggggaaagccagagt

SEQ ID NO: 1806 - RNA, 100 nt, synthetic construct
  source 1..100: mol_type = other RNA
catggaactcgtagatctcggtgaagcgccggtagaccaccttctccgacaggtcctgccatttcaccaggaacatgtatacctgggggaaagccagagt

SEQ ID NO: 1807 - RNA, 100 nt, synthetic construct
  source 1..100: mol_type = other RNA
catggaactcgtagatctcggtgaagcgccggtagaccaccttctccgacaggtcctgccatttcaccaggaacatgtaaacctgggggaaagccagagt

SEQ ID NO: 1808 - RNA, 101 nt, synthetic construct
  source 1..101: mol_type = other RNA
acatggaactcgtagatctcggtgaagcgccggtagaccaccttctccgacaggtcctgccatttcaccaggaacatgtaaacctgggggaaagccagagt

SEQ ID NO: 1809 - RNA, 101 nt, synthetic construct
  source 1..101: mol_type = other RNA
acatggaactcgtagatctcggtgaagcgccggtagaccaccttctccgacaggtcctgccatttcaccaggaacatgtacacctgggggaaagccagagt

SEQ ID NO: 1810 - RNA, 101 nt, synthetic construct
  source 1..101: mol_type = other RNA
acatggaactcgtagatctcggtgaagcgccggtagaccaccttctccgacaggtcctgccatttcaccaggaacatgtagacctgggggaaagccagagt

SEQ ID NO: 1811 - RNA, 101 nt, synthetic construct
  source 1..101: mol_type = other RNA
acatggaactcgtagatctcggtgaagcgccggtagaccaccttctccgacaggtcctgccatttcaccaggaacatgtatacctgggggaaagccagagt

SEQ ID NO: 1812 - RNA, 102 nt, synthetic construct
  source 1..102: mol_type = other RNA
cacatggaactcgtagatctcggtgaagcgccggtagaccaccttctccgacaggtcctgccatttcaccaggaacatgtacacctgggggaaagccagagt

SEQ ID NO: 1813 - RNA, 102 nt, synthetic construct
  source 1..102: mol_type = other RNA
cacatggaactcgtagatctcggtgaagcgccggtagaccaccttctccgacaggtcctgccatttcaccaggaacatgtaaacctgggggaaagccagagt

SEQ ID NO: 1814 - RNA, 102 nt, synthetic construct
  source 1..102: mol_type = other RNA
cacatggaactcgtagatctcggtgaagcgccggtagaccaccttctccgacaggtcctgccatttcaccaggaacatgtagacctgggggaaagccagagt

SEQ ID NO: 1815 - RNA, 102 nt, synthetic construct
  source 1..102: mol_type = other RNA
cacatggaactcgtagatctcggtgaagcgccggtagaccaccttctccgacaggtcctgccatttcaccaggaacatgtatacctgggggaaagccagagt

SEQ ID NO: 1816 - RNA, 103 nt, synthetic construct
  source 1..103: mol_type = other RNA
tcacatggaactcgtagatctcggtgaagcgccggtagaccaccttctccgacaggtcctgccatttcaccaggaacatgtagacctgggggaaagccagagt

SEQ ID NO: 1817 - RNA, 103 nt, synthetic construct
  source 1..103: mol_type = other RNA
tcacatggaactcgtagatctcggtgaagcgccggtagaccaccttctccgacaggtcctgccatttcaccaggaacatgtacacctgggggaaagccagagt

SEQ ID NO: 1818 - RNA, 103 nt, synthetic construct
  source 1..103: mol_type = other RNA
tcacatggaactcgtagatctcggtgaagcgccggtagaccaccttctccgacaggtcctgccatttcaccaggaacatgtatacctgggggaaagccagagt

SEQ ID NO: 1819 - RNA, 103 nt, synthetic construct
  source 1..103: mol_type = other RNA
tcacatggaactcgtagatctcggtgaagcgccggtagaccaccttctccgacaggtcctgccatttcaccaggaacatgtaaacctgggggaaagccagagt

SEQ ID NO: 1820 - RNA, 19 nt, synthetic construct
  source 1..19: mol_type = other RNA
ggtagaccaccttctccga

SEQ ID NO: 1821 - RNA, 20 nt, synthetic construct
  source 1..20: mol_type = other RNA
cggtagaccaccttctccga

SEQ ID NO: 1822 - RNA, 20 nt, synthetic construct
  source 1..20: mol_type = other RNA
tcacatggaactcgtagatc

SEQ ID NO: 1823 - RNA, 20 nt, synthetic construct
  source 1..20: mol_type = other RNA
tcgtagatctcggtgaagcg

SEQ ID NO: 1824 - RNA, 20 nt, synthetic construct
  source 1..20: mol_type = other RNA
tcctccatccccacactcac

SEQ ID NO: 1825 - RNA, 21 nt, synthetic construct
  source 1..21: mol_type = other RNA
ccggtagaccaccttctccga

SEQ ID NO: 1826 - RNA, 22 nt, synthetic construct
  source 1..22: mol_type = other RNA
gccggtagaccaccttctccga

SEQ ID NO: 1827 - RNA, 16 nt, synthetic construct
  source 1..16: mol_type = other RNA
tctttggaggctgaat

SEQ ID NO: 1828 - RNA, 17 nt, synthetic construct
  source 1..17: mol_type = other RNA
ctctttggaggctgaat

SEQ ID NO: 1829 - RNA, 18 nt, synthetic construct
  source 1..18: mol_type = other RNA
cctctttggaggctgaat

SEQ ID NO: 1830 - RNA, 19 nt, synthetic construct
  source 1..19: mol_type = other RNA
gcctctttggaggctgaat

SEQ ID NO: 1831 - RNA, 20 nt, synthetic construct
  source 1..20: mol_type = other RNA
agcctctttggaggctgaat

SEQ ID NO: 1832 - RNA, 21 nt, synthetic construct
  source 1..21: mol_type = other RNA
aagcctctttggaggctgaat

SEQ ID NO: 1833 - RNA, 22 nt, synthetic construct
  source 1..22: mol_type = other RNA
aaagcctctttggaggctgaat

SEQ ID NO: 1834-1840 - skipped (7 entries)

SEQ ID NO: 1841 - RNA, 10 nt, synthetic construct
  source 1..10: mol_type = other RNA
cagcctccaa

SEQ ID NO: 1842 - RNA, 11 nt, synthetic construct
  source 1..11: mol_type = other RNA
cagcctccaaa

SEQ ID NO: 1843 - RNA, 12 nt, synthetic construct
  source 1..12: mol_type = other RNA
cagcctccaaag

SEQ ID NO: 1844 - RNA, 13 nt, synthetic construct
  source 1..13: mol_type = other RNA
cagcctccaaaga

SEQ ID NO: 1845 - RNA, 14 nt, synthetic construct
  source 1..14: mol_type = other RNA
cagcctccaaagag

SEQ ID NO: 1846 - RNA, 15 nt, synthetic construct
  source 1..15: mol_type = other RNA
cagcctccaaagagg

SEQ ID NO: 1847 - RNA, 16 nt, synthetic construct
  source 1..16: mol_type = other RNA
cagcctccaaagaggc

SEQ ID NO: 1848 - RNA, 17 nt, synthetic construct
  source 1..17: mol_type = other RNA
cagcctccaaagaggct

SEQ ID NO: 1849 - RNA, 18 nt, synthetic construct
  source 1..18: mol_type = other RNA
cagcctccaaagaggctt

SEQ ID NO: 1850 - RNA, 19 nt, synthetic construct
  source 1..19: mol_type = other RNA
cagcctccaaagaggcttt

SEQ ID NO: 1851 - RNA, 34 nt, synthetic construct
  source 1..34: mol_type = other RNA
acctgggggaaagccagagtcgggggaccccatt

SEQ ID NO: 1852 - RNA, 35 nt, synthetic construct
  source 1..35: mol_type = other RNA
gacctgggggaaagccagagtcgggggaccccatt

SEQ ID NO: 1853 - RNA, 35 nt, synthetic construct
  source 1..35: mol_type = other RNA
cacctgggggaaagccagagtcgggggaccccatt

SEQ ID NO: 1854 - RNA, 35 nt, synthetic construct
  source 1..35: mol_type = other RNA
tacctgggggaaagccagagtcgggggaccccatt

SEQ ID NO: 1855 - RNA, 35 nt, synthetic construct
  source 1..35: mol_type = other RNA
aacctgggggaaagccagagtcgggggaccccatt

SEQ ID NO: 1856 - RNA, 36 nt, synthetic construct
  source 1..36: mol_type = other RNA
atacctgggggaaagccagagtcgggggaccccatt

SEQ ID NO: 1857 - RNA, 36 nt, synthetic construct
  source 1..36: mol_type = other RNA
agacctgggggaaagccagagtcgggggaccccatt

SEQ ID NO: 1858 - RNA, 36 nt, synthetic construct
  source 1..36: mol_type = other RNA
acacctgggggaaagccagagtcgggggaccccatt

SEQ ID NO: 1859 - RNA, 36 nt, synthetic construct
  source 1..36: mol_type = other RNA
aaacctgggggaaagccagagtcgggggaccccatt

SEQ ID NO: 1860 - RNA, 37 nt, synthetic construct
  source 1..37: mol_type = other RNA
tacacctgggggaaagccagagtcgggggaccccatt

SEQ ID NO: 1861 - RNA, 37 nt, synthetic construct
  source 1..37: mol_type = other RNA
tagacctgggggaaagccagagtcgggggaccccatt

SEQ ID NO: 1862 - RNA, 37 nt, synthetic construct
  source 1..37: mol_type = other RNA
taaacctgggggaaagccagagtcgggggaccccatt

SEQ ID NO: 1863 - RNA, 37 nt, synthetic construct
  source 1..37: mol_type = other RNA
tatacctgggggaaagccagagtcgggggaccccatt

SEQ ID NO: 1864 - RNA, 38 nt, synthetic construct
  source 1..38: mol_type = other RNA
gtaaacctgggggaaagccagagtcgggggaccccatt

SEQ ID NO: 1865 - RNA, 38 nt, synthetic construct
  source 1..38: mol_type = other RNA
gtacacctgggggaaagccagagtcgggggaccccatt

SEQ ID NO: 1866 - RNA, 38 nt, synthetic construct
  source 1..38: mol_type = other RNA
gtagacctgggggaaagccagagtcgggggaccccatt

SEQ ID NO: 1867 - RNA, 38 nt, synthetic construct
  source 1..38: mol_type = other RNA
gtatacctgggggaaagccagagtcgggggaccccatt

SEQ ID NO: 1868 - RNA, 39 nt, synthetic construct
  source 1..39: mol_type = other RNA
tgtaaacctgggggaaagccagagtcgggggaccccatt

SEQ ID NO: 1869 - RNA, 39 nt, synthetic construct
  source 1..39: mol_type = other RNA
tgtatacctgggggaaagccagagtcgggggaccccatt

SEQ ID NO: 1870 - RNA, 39 nt, synthetic construct
  source 1..39: mol_type = other RNA
tgtacacctgggggaaagccagagtcgggggaccccatt

SEQ ID NO: 1871 - RNA, 39 nt, synthetic construct
  source 1..39: mol_type = other RNA
tgtagacctgggggaaagccagagtcgggggaccccatt

SEQ ID NO: 1872 - RNA, 40 nt, synthetic construct
  source 1..40: mol_type = other RNA
atgtatacctgggggaaagccagagtcgggggaccccatt

SEQ ID NO: 1873 - RNA, 40 nt, synthetic construct
  source 1..40: mol_type = other RNA
atgtaaacctgggggaaagccagagtcgggggaccccatt

SEQ ID NO: 1874 - RNA, 40 nt, synthetic construct
  source 1..40: mol_type = other RNA
atgtagacctgggggaaagccagagtcgggggaccccatt

SEQ ID NO: 1875 - RNA, 40 nt, synthetic construct
  source 1..40: mol_type = other RNA
atgtacacctgggggaaagccagagtcgggggaccccatt

SEQ ID NO: 1876 - RNA, 41 nt, synthetic construct
  source 1..41: mol_type = other RNA
catgtagacctgggggaaagccagagtcgggggaccccatt

SEQ ID NO: 1877 - RNA, 41 nt, synthetic construct
  source 1..41: mol_type = other RNA
catgtaaacctgggggaaagccagagtcgggggaccccatt

SEQ ID NO: 1878 - RNA, 41 nt, synthetic construct
  source 1..41: mol_type = other RNA
catgtatacctgggggaaagccagagtcgggggaccccatt

SEQ ID NO: 1879 - RNA, 41 nt, synthetic construct
  source 1..41: mol_type = other RNA
catgtacacctgggggaaagccagagtcgggggaccccatt

SEQ ID NO: 1880 - RNA, 42 nt, synthetic construct
  source 1..42: mol_type = other RNA
acatgtacacctgggggaaagccagagtcgggggaccccatt

SEQ ID NO: 1881 - RNA, 42 nt, synthetic construct
  source 1..42: mol_type = other RNA
acatgtagacctgggggaaagccagagtcgggggaccccatt

SEQ ID NO: 1882 - RNA, 42 nt, synthetic construct
  source 1..42: mol_type = other RNA
acatgtaaacctgggggaaagccagagtcgggggaccccatt

SEQ ID NO: 1883 - RNA, 42 nt, synthetic construct
  source 1..42: mol_type = other RNA
acatgtatacctgggggaaagccagagtcgggggaccccatt

SEQ ID NO: 1884 - RNA, 43 nt, synthetic construct
  source 1..43: mol_type = other RNA
aacatgtaaacctgggggaaagccagagtcgggggaccccatt

SEQ ID NO: 1885 - RNA, 43 nt, synthetic construct
  source 1..43: mol_type = other RNA
aacatgtacacctgggggaaagccagagtcgggggaccccatt

SEQ ID NO: 1886 - RNA, 43 nt, synthetic construct
  source 1..43: mol_type = other RNA
aacatgtagacctgggggaaagccagagtcgggggaccccatt

SEQ ID NO: 1887 - RNA, 43 nt, synthetic construct
  source 1..43: mol_type = other RNA
aacatgtatacctgggggaaagccagagtcgggggaccccatt

SEQ ID NO: 1888 - RNA, 44 nt, synthetic construct
  source 1..44: mol_type = other RNA
gaacatgtatacctgggggaaagccagagtcgggggaccccatt

SEQ ID NO: 1889 - RNA, 44 nt, synthetic construct
  source 1..44: mol_type = other RNA
gaacatgtaaacctgggggaaagccagagtcgggggaccccatt

SEQ ID NO: 1890 - RNA, 44 nt, synthetic construct
  source 1..44: mol_type = other RNA
gaacatgtacacctgggggaaagccagagtcgggggaccccatt

SEQ ID NO: 1891 - RNA, 44 nt, synthetic construct
  source 1..44: mol_type = other RNA
gaacatgtagacctgggggaaagccagagtcgggggaccccatt

SEQ ID NO: 1892 - RNA, 45 nt, synthetic construct
  source 1..45: mol_type = other RNA
ggaacatgtacacctgggggaaagccagagtcgggggaccccatt

SEQ ID NO: 1893 - RNA, 45 nt, synthetic construct
  source 1..45: mol_type = other RNA
ggaacatgtaaacctgggggaaagccagagtcgggggaccccatt

SEQ ID NO: 1894 - RNA, 45 nt, synthetic construct
  source 1..45: mol_type = other RNA
ggaacatgtatacctgggggaaagccagagtcgggggaccccatt

SEQ ID NO: 1895 - RNA, 45 nt, synthetic construct
  source 1..45: mol_type = other RNA
ggaacatgtagacctgggggaaagccagagtcgggggaccccatt

SEQ ID NO: 1896 - RNA, 46 nt, synthetic construct
  source 1..46: mol_type = other RNA
aggaacatgtagacctgggggaaagccagagtcgggggaccccatt

SEQ ID NO: 1897 - RNA, 46 nt, synthetic construct
  source 1..46: mol_type = other RNA
aggaacatgtatacctgggggaaagccagagtcgggggaccccatt

SEQ ID NO: 1898 - RNA, 46 nt, synthetic construct
  source 1..46: mol_type = other RNA
aggaacatgtaaacctgggggaaagccagagtcgggggaccccatt

SEQ ID NO: 1899 - RNA, 46 nt, synthetic construct
  source 1..46: mol_type = other RNA
aggaacatgtacacctgggggaaagccagagtcgggggaccccatt

SEQ ID NO: 1900 - RNA, 47 nt, synthetic construct
  source 1..47: mol_type = other RNA
caggaacatgtaaacctgggggaaagccagagtcgggggaccccatt

SEQ ID NO: 1901 - RNA, 47 nt, synthetic construct
  source 1..47: mol_type = other RNA
caggaacatgtatacctgggggaaagccagagtcgggggaccccatt

SEQ ID NO: 1902 - RNA, 47 nt, synthetic construct
  source 1..47: mol_type = other RNA
caggaacatgtagacctgggggaaagccagagtcgggggaccccatt

SEQ ID NO: 1903 - RNA, 47 nt, synthetic construct
  source 1..47: mol_type = other RNA
caggaacatgtacacctgggggaaagccagagtcgggggaccccatt

SEQ ID NO: 1904 - RNA, 48 nt, synthetic construct
  source 1..48: mol_type = other RNA
ccaggaacatgtacacctgggggaaagccagagtcgggggaccccatt

SEQ ID NO: 1905 - RNA, 48 nt, synthetic construct
  source 1..48: mol_type = other RNA
ccaggaacatgtatacctgggggaaagccagagtcgggggaccccatt

SEQ ID NO: 1906 - RNA, 48 nt, synthetic construct
  source 1..48: mol_type = other RNA
ccaggaacatgtagacctgggggaaagccagagtcgggggaccccatt

SEQ ID NO: 1907 - RNA, 48 nt, synthetic construct
  source 1..48: mol_type = other RNA
ccaggaacatgtaaacctgggggaaagccagagtcgggggaccccatt

SEQ ID NO: 1908 - RNA, 49 nt, synthetic construct
  source 1..49: mol_type = other RNA
accaggaacatgtacacctgggggaaagccagagtcgggggaccccatt

SEQ ID NO: 1909 - RNA, 49 nt, synthetic construct
  source 1..49: mol_type = other RNA
accaggaacatgtaaacctgggggaaagccagagtcgggggaccccatt

SEQ ID NO: 1910 - RNA, 49 nt, synthetic construct
  source 1..49: mol_type = other RNA
accaggaacatgtatacctgggggaaagccagagtcgggggaccccatt

SEQ ID NO: 1911 - RNA, 49 nt, synthetic construct
  source 1..49: mol_type = other RNA
accaggaacatgtagacctgggggaaagccagagtcgggggaccccatt

SEQ ID NO: 1912 - RNA, 50 nt, synthetic construct
  source 1..50: mol_type = other RNA
caccaggaacatgtatacctgggggaaagccagagtcgggggaccccatt

SEQ ID NO: 1913 - RNA, 50 nt, synthetic construct
  source 1..50: mol_type = other RNA
caccaggaacatgtacacctgggggaaagccagagtcgggggaccccatt

SEQ ID NO: 1914 - RNA, 50 nt, synthetic construct
  source 1..50: mol_type = other RNA
caccaggaacatgtaaacctgggggaaagccagagtcgggggaccccatt

SEQ ID NO: 1915 - RNA, 50 nt, synthetic construct
  source 1..50: mol_type = other RNA
caccaggaacatgtagacctgggggaaagccagagtcgggggaccccatt

SEQ ID NO: 1916 - RNA, 51 nt, synthetic construct
  source 1..51: mol_type = other RNA
tcaccaggaacatgtacacctgggggaaagccagagtcgggggaccccatt

SEQ ID NO: 1917 - RNA, 51 nt, synthetic construct
  source 1..51: mol_type = other RNA
tcaccaggaacatgtaaacctgggggaaagccagagtcgggggaccccatt

SEQ ID NO: 1918 - RNA, 51 nt, synthetic construct
  source 1..51: mol_type = other RNA
tcaccaggaacatgtagacctgggggaaagccagagtcgggggaccccatt

SEQ ID NO: 1919 - RNA, 51 nt, synthetic construct
  source 1..51: mol_type = other RNA
tcaccaggaacatgtatacctgggggaaagccagagtcgggggaccccatt

SEQ ID NO: 1920 - RNA, 52 nt, synthetic construct
  source 1..52: mol_type = other RNA
ttcaccaggaacatgtatacctgggggaaagccagagtcgggggaccccatt

SEQ ID NO: 1921 - RNA, 52 nt, synthetic construct
  source 1..52: mol_type = other RNA
ttcaccaggaacatgtagacctgggggaaagccagagtcgggggaccccatt

SEQ ID NO: 1922 - RNA, 52 nt, synthetic construct
  source 1..52: mol_type = other RNA
ttcaccaggaacatgtaaacctgggggaaagccagagtcgggggaccccatt

SEQ ID NO: 1923 - RNA, 52 nt, synthetic construct
  source 1..52: mol_type = other RNA
ttcaccaggaacatgtacacctgggggaaagccagagtcgggggaccccatt

SEQ ID NO: 1924 - RNA, 53 nt, synthetic construct
  source 1..53: mol_type = other RNA
tttcaccaggaacatgtaaacctgggggaaagccagagtcgggggaccccatt

SEQ ID NO: 1925 - RNA, 53 nt, synthetic construct
  source 1..53: mol_type = other RNA
tttcaccaggaacatgtatacctgggggaaagccagagtcgggggaccccatt

SEQ ID NO: 1926 - RNA, 53 nt, synthetic construct
  source 1..53: mol_type = other RNA
tttcaccaggaacatgtagacctgggggaaagccagagtcgggggaccccatt

SEQ ID NO: 1927 - RNA, 53 nt, synthetic construct
  source 1..53: mol_type = other RNA
tttcaccaggaacatgtacacctgggggaaagccagagtcgggggaccccatt

SEQ ID NO: 1928 - RNA, 54 nt, synthetic construct
  source 1..54: mol_type = other RNA
atttcaccaggaacatgtatacctgggggaaagccagagtcgggggaccccatt

SEQ ID NO: 1929 - RNA, 54 nt, synthetic construct
  source 1..54: mol_type = other RNA
atttcaccaggaacatgtagacctgggggaaagccagagtcgggggaccccatt

SEQ ID NO: 1930 - RNA, 54 nt, synthetic construct
  source 1..54: mol_type = other RNA
atttcaccaggaacatgtacacctgggggaaagccagagtcgggggaccccatt

SEQ ID NO: 1931 - RNA, 54 nt, synthetic construct
  source 1..54: mol_type = other RNA
atttcaccaggaacatgtaaacctgggggaaagccagagtcgggggaccccatt

SEQ ID NO: 1932 - RNA, 55 nt, synthetic construct
  source 1..55: mol_type = other RNA
catttcaccaggaacatgtatacctgggggaaagccagagtcgggggaccccatt

SEQ ID NO: 1933 - RNA, 55 nt, synthetic construct
  source 1..55: mol_type = other RNA
catttcaccaggaacatgtagacctgggggaaagccagagtcgggggaccccatt

SEQ ID NO: 1934 - RNA, 55 nt, synthetic construct
  source 1..55: mol_type = other RNA
catttcaccaggaacatgtaaacctgggggaaagccagagtcgggggaccccatt

SEQ ID NO: 1935 - RNA, 55 nt, synthetic construct
  source 1..55: mol_type = other RNA
catttcaccaggaacatgtacacctgggggaaagccagagtcgggggaccccatt

SEQ ID NO: 1936 - RNA, 56 nt, synthetic construct
  source 1..56: mol_type = other RNA
ccatttcaccaggaacatgtaaacctgggggaaagccagagtcgggggaccccatt

SEQ ID NO: 1937 - RNA, 56 nt, synthetic construct
  source 1..56: mol_type = other RNA
ccatttcaccaggaacatgtacacctgggggaaagccagagtcgggggaccccatt

SEQ ID NO: 1938 - RNA, 56 nt, synthetic construct
  source 1..56: mol_type = other RNA
ccatttcaccaggaacatgtagacctgggggaaagccagagtcgggggaccccatt

SEQ ID NO: 1939 - RNA, 56 nt, synthetic construct
  source 1..56: mol_type = other RNA
ccatttcaccaggaacatgtatacctgggggaaagccagagtcgggggaccccatt

SEQ ID NO: 1940 - RNA, 57 nt, synthetic construct
  source 1..57: mol_type = other RNA
gccatttcaccaggaacatgtaaacctgggggaaagccagagtcgggggaccccatt

SEQ ID NO: 1941 - RNA, 57 nt, synthetic construct
  source 1..57: mol_type = other RNA
gccatttcaccaggaacatgtatacctgggggaaagccagagtcgggggaccccatt

SEQ ID NO: 1942 - RNA, 57 nt, synthetic construct
  source 1..57: mol_type = other RNA
gccatttcaccaggaacatgtagacctgggggaaagccagagtcgggggaccccatt

SEQ ID NO: 1943 - RNA, 57 nt, synthetic construct
  source 1..57: mol_type = other RNA
gccatttcaccaggaacatgtacacctgggggaaagccagagtcgggggaccccatt

SEQ ID NO: 1944 - RNA, 58 nt, synthetic construct
  source 1..58: mol_type = other RNA
tgccatttcaccaggaacatgtagacctgggggaaagccagagtcgggggaccccatt

SEQ ID NO: 1945 - RNA, 58 nt, synthetic construct
  source 1..58: mol_type = other RNA
tgccatttcaccaggaacatgtacacctgggggaaagccagagtcgggggaccccatt

SEQ ID NO: 1946 - RNA, 58 nt, synthetic construct
  source 1..58: mol_type = other RNA
tgccatttcaccaggaacatgtaaacctgggggaaagccagagtcgggggaccccatt

SEQ ID NO: 1947 - RNA, 58 nt, synthetic construct
  source 1..58: mol_type = other RNA
tgccatttcaccaggaacatgtatacctgggggaaagccagagtcgggggaccccatt

SEQ ID NO: 1948 - RNA, 59 nt, synthetic construct
  source 1..59: mol_type = other RNA
ctgccatttcaccaggaacatgtacacctgggggaaagccagagtcgggggaccccatt

SEQ ID NO: 1949 - RNA, 59 nt, synthetic construct
  source 1..59: mol_type = other RNA
ctgccatttcaccaggaacatgtagacctgggggaaagccagagtcgggggaccccatt

SEQ ID NO: 1950 - RNA, 59 nt, synthetic construct
  source 1..59: mol_type = other RNA
ctgccatttcaccaggaacatgtatacctgggggaaagccagagtcgggggaccccatt

SEQ ID NO: 1951 - RNA, 59 nt, synthetic construct
  source 1..59: mol_type = other RNA
ctgccatttcaccaggaacatgtaaacctgggggaaagccagagtcgggggaccccatt

SEQ ID NO: 1952 - RNA, 60 nt, synthetic construct
  source 1..60: mol_type = other RNA
cctgccatttcaccaggaacatgtaaacctgggggaaagccagagtcgggggaccccatt

SEQ ID NO: 1953 - RNA, 60 nt, synthetic construct
  source 1..60: mol_type = other RNA
cctgccatttcaccaggaacatgtatacctgggggaaagccagagtcgggggaccccatt

SEQ ID NO: 1954 - RNA, 60 nt, synthetic construct
  source 1..60: mol_type = other RNA
cctgccatttcaccaggaacatgtagacctgggggaaagccagagtcgggggaccccatt

SEQ ID NO: 1955 - RNA, 60 nt, synthetic construct
  source 1..60: mol_type = other RNA
cctgccatttcaccaggaacatgtacacctgggggaaagccagagtcgggggaccccatt

SEQ ID NO: 1956 - RNA, 61 nt, synthetic construct
  source 1..61: mol_type = other RNA
tcctgccatttcaccaggaacatgtatacctgggggaaagccagagtcgggggaccccatt

SEQ ID NO: 1957 - RNA, 61 nt, synthetic construct
  source 1..61: mol_type = other RNA
tcctgccatttcaccaggaacatgtagacctgggggaaagccagagtcgggggaccccatt

SEQ ID NO: 1958 - RNA, 61 nt, synthetic construct
  source 1..61: mol_type = other RNA
tcctgccatttcaccaggaacatgtacacctgggggaaagccagagtcgggggaccccatt

SEQ ID NO: 1959 - RNA, 61 nt, synthetic construct
  source 1..61: mol_type = other RNA
tcctgccatttcaccaggaacatgtaaacctgggggaaagccagagtcgggggaccccatt

SEQ ID NO: 1960 - RNA, 62 nt, synthetic construct
  source 1..62: mol_type = other RNA
gtcctgccatttcaccaggaacatgtatacctgggggaaagccagagtcgggggaccccatt

SEQ ID NO: 1961 - RNA, 62 nt, synthetic construct
  source 1..62: mol_type = other RNA
gtcctgccatttcaccaggaacatgtagacctgggggaaagccagagtcgggggaccccatt

SEQ ID NO: 1962 - RNA, 62 nt, synthetic construct
  source 1..62: mol_type = other RNA
gtcctgccatttcaccaggaacatgtaaacctgggggaaagccagagtcgggggaccccatt

SEQ ID NO: 1963 - RNA, 62 nt, synthetic construct
  source 1..62: mol_type = other RNA
gtcctgccatttcaccaggaacatgtacacctgggggaaagccagagtcgggggaccccatt

SEQ ID NO: 1964 - RNA, 63 nt, synthetic construct
  source 1..63: mol_type = other RNA
ggtcctgccatttcaccaggaacatgtagacctgggggaaagccagagtcgggggaccccatt

SEQ ID NO: 1965 - RNA, 63 nt, synthetic construct
  source 1..63: mol_type = other RNA
ggtcctgccatttcaccaggaacatgtacacctgggggaaagccagagtcgggggaccccatt

SEQ ID NO: 1966 - RNA, 63 nt, synthetic construct
  source 1..63: mol_type = other RNA
ggtcctgccatttcaccaggaacatgtatacctgggggaaagccagagtcgggggaccccatt

SEQ ID NO: 1967 - RNA, 63 nt, synthetic construct
  source 1..63: mol_type = other RNA
ggtcctgccatttcaccaggaacatgtaaacctgggggaaagccagagtcgggggaccccatt

SEQ ID NO: 1968 - RNA, 64 nt, synthetic construct
  source 1..64: mol_type = other RNA
aggtcctgccatttcaccaggaacatgtaaacctgggggaaagccagagtcgggggaccccatt

SEQ ID NO: 1969 - RNA, 64 nt, synthetic construct
  source 1..64: mol_type = other RNA
aggtcctgccatttcaccaggaacatgtacacctgggggaaagccagagtcgggggaccccatt

SEQ ID NO: 1970 - RNA, 64 nt, synthetic construct
  source 1..64: mol_type = other RNA
aggtcctgccatttcaccaggaacatgtatacctgggggaaagccagagtcgggggaccccatt

SEQ ID NO: 1971 - RNA, 64 nt, synthetic construct
  source 1..64: mol_type = other RNA
aggtcctgccatttcaccaggaacatgtagacctgggggaaagccagagtcgggggaccccatt

SEQ ID NO: 1972 - RNA, 65 nt, synthetic construct
  source 1..65: mol_type = other RNA
caggtcctgccatttcaccaggaacatgtatacctgggggaaagccagagtcgggggaccccatt

SEQ ID NO: 1973 - RNA, 65 nt, synthetic construct
  source 1..65: mol_type = other RNA
caggtcctgccatttcaccaggaacatgtacacctgggggaaagccagagtcgggggaccccatt

SEQ ID NO: 1974 - RNA, 65 nt, synthetic construct
  source 1..65: mol_type = other RNA
caggtcctgccatttcaccaggaacatgtaaacctgggggaaagccagagtcgggggaccccatt

SEQ ID NO: 1975 - RNA, 65 nt, synthetic construct
  source 1..65: mol_type = other RNA
caggtcctgccatttcaccaggaacatgtagacctgggggaaagccagagtcgggggaccccatt

SEQ ID NO: 1976 - RNA, 66 nt, synthetic construct
  source 1..66: mol_type = other RNA
acaggtcctgccatttcaccaggaacatgtacacctgggggaaagccagagtcgggggaccccatt

SEQ ID NO: 1977 - RNA, 66 nt, synthetic construct
  source 1..66: mol_type = other RNA
acaggtcctgccatttcaccaggaacatgtaaacctgggggaaagccagagtcgggggaccccatt

SEQ ID NO: 1978 - RNA, 66 nt, synthetic construct
  source 1..66: mol_type = other RNA
acaggtcctgccatttcaccaggaacatgtatacctgggggaaagccagagtcgggggaccccatt

SEQ ID NO: 1979 - RNA, 66 nt, synthetic construct
  source 1..66: mol_type = other RNA
acaggtcctgccatttcaccaggaacatgtagacctgggggaaagccagagtcgggggaccccatt

SEQ ID NO: 1980 - RNA, 67 nt, synthetic construct
  source 1..67: mol_type = other RNA
gacaggtcctgccatttcaccaggaacatgtagacctgggggaaagccagagtcgggggaccccatt

SEQ ID NO: 1981 - RNA, 67 nt, synthetic construct
  source 1..67: mol_type = other RNA
gacaggtcctgccatttcaccaggaacatgtatacctgggggaaagccagagtcgggggaccccatt

SEQ ID NO: 1982 - RNA, 67 nt, synthetic construct
  source 1..67: mol_type = other RNA
gacaggtcctgccatttcaccaggaacatgtacacctgggggaaagccagagtcgggggaccccatt

SEQ ID NO: 1983 - RNA, 67 nt, synthetic construct
  source 1..67: mol_type = other RNA
gacaggtcctgccatttcaccaggaacatgtaaacctgggggaaagccagagtcgggggaccccatt

SEQ ID NO: 1984 - RNA, 68 nt, synthetic construct
  source 1..68: mol_type = other RNA
cgacaggtcctgccatttcaccaggaacatgtacacctgggggaaagccagagtcgggggaccccatt

SEQ ID NO: 1985 - RNA, 68 nt, synthetic construct
  source 1..68: mol_type = other RNA
cgacaggtcctgccatttcaccaggaacatgtaaacctgggggaaagccagagtcgggggaccccatt

SEQ ID NO: 1986 - RNA, 68 nt, synthetic construct
  source 1..68: mol_type = other RNA
cgacaggtcctgccatttcaccaggaacatgtatacctgggggaaagccagagtcgggggaccccatt

SEQ ID NO: 1987 - RNA, 68 nt, synthetic construct
  source 1..68: mol_type = other RNA
cgacaggtcctgccatttcaccaggaacatgtagacctgggggaaagccagagtcgggggaccccatt

SEQ ID NO: 1988 - RNA, 69 nt, synthetic construct
  source 1..69: mol_type = other RNA
ccgacaggtcctgccatttcaccaggaacatgtatacctgggggaaagccagagtcgggggaccccatt

SEQ ID NO: 1989 - RNA, 69 nt, synthetic construct
  source 1..69: mol_type = other RNA
ccgacaggtcctgccatttcaccaggaacatgtagacctgggggaaagccagagtcgggggaccccatt

SEQ ID NO: 1990 - RNA, 69 nt, synthetic construct
  source 1..69: mol_type = other RNA
ccgacaggtcctgccatttcaccaggaacatgtacacctgggggaaagccagagtcgggggaccccatt

SEQ ID NO: 1991 - RNA, 69 nt, synthetic construct
  source 1..69: mol_type = other RNA
ccgacaggtcctgccatttcaccaggaacatgtaaacctgggggaaagccagagtcgggggaccccatt

SEQ ID NO: 1992 - RNA, 70 nt, synthetic construct
  source 1..70: mol_type = other RNA
tccgacaggtcctgccatttcaccaggaacatgtagacctgggggaaagccagagtcgggggaccccatt

SEQ ID NO: 1993 - RNA, 70 nt, synthetic construct
  source 1..70: mol_type = other RNA
tccgacaggtcctgccatttcaccaggaacatgtaaacctgggggaaagccagagtcgggggaccccatt

SEQ ID NO: 1994 - RNA, 70 nt, synthetic construct
  source 1..70: mol_type = other RNA
tccgacaggtcctgccatttcaccaggaacatgtatacctgggggaaagccagagtcgggggaccccatt

SEQ ID NO: 1995 - RNA, 70 nt, synthetic construct
  source 1..70: mol_type = other RNA
tccgacaggtcctgccatttcaccaggaacatgtacacctgggggaaagccagagtcgggggaccccatt

SEQ ID NO: 1996 - RNA, 71 nt, synthetic construct
  source 1..71: mol_type = other RNA
ctccgacaggtcctgccatttcaccaggaacatgtaaacctgggggaaagccagagtcgggggaccccatt

SEQ ID NO: 1997 - RNA, 71 nt, synthetic construct
  source 1..71: mol_type = other RNA
ctccgacaggtcctgccatttcaccaggaacatgtacacctgggggaaagccagagtcgggggaccccatt

SEQ ID NO: 1998 - RNA, 71 nt, synthetic construct
  source 1..71: mol_type = other RNA
ctccgacaggtcctgccatttcaccaggaacatgtagacctgggggaaagccagagtcgggggaccccatt

SEQ ID NO: 1999 - RNA, 71 nt, synthetic construct
  source 1..71: mol_type = other RNA
ctccgacaggtcctgccatttcaccaggaacatgtatacctgggggaaagccagagtcgggggaccccatt

SEQ ID NO: 2000 - RNA, 72 nt, synthetic construct
  source 1..72: mol_type = other RNA
tctccgacaggtcctgccatttcaccaggaacatgtagacctgggggaaagccagagtcgggggaccccatt

SEQ ID NO: 2001 - RNA, 72 nt, synthetic construct
  source 1..72: mol_type = other RNA
tctccgacaggtcctgccatttcaccaggaacatgtacacctgggggaaagccagagtcgggggaccccatt

SEQ ID NO: 2002 - RNA, 72 nt, synthetic construct
  source 1..72: mol_type = other RNA
tctccgacaggtcctgccatttcaccaggaacatgtatacctgggggaaagccagagtcgggggaccccatt

SEQ ID NO: 2003 - RNA, 72 nt, synthetic construct
  source 1..72: mol_type = other RNA
tctccgacaggtcctgccatttcaccaggaacatgtaaacctgggggaaagccagagtcgggggaccccatt

SEQ ID NO: 2004 - RNA, 73 nt, synthetic construct
  source 1..73: mol_type = other RNA
ttctccgacaggtcctgccatttcaccaggaacatgtacacctgggggaaagccagagtcgggggaccccatt

SEQ ID NO: 2005 - RNA, 73 nt, synthetic construct
  source 1..73: mol_type = other RNA
ttctccgacaggtcctgccatttcaccaggaacatgtagacctgggggaaagccagagtcgggggaccccatt

SEQ ID NO: 2006 - RNA, 73 nt, synthetic construct
  source 1..73: mol_type = other RNA
ttctccgacaggtcctgccatttcaccaggaacatgtatacctgggggaaagccagagtcgggggaccccatt

SEQ ID NO: 2007 - RNA, 73 nt, synthetic construct
  source 1..73: mol_type = other RNA
ttctccgacaggtcctgccatttcaccaggaacatgtaaacctgggggaaagccagagtcgggggaccccatt

SEQ ID NO: 2008 - RNA, 74 nt, synthetic construct
  source 1..74: mol_type = other RNA
cttctccgacaggtcctgccatttcaccaggaacatgtaaacctgggggaaagccagagtcgggggaccccatt

SEQ ID NO: 2009 - RNA, 74 nt, synthetic construct
  source 1..74: mol_type = other RNA
cttctccgacaggtcctgccatttcaccaggaacatgtagacctgggggaaagccagagtcgggggaccccatt

SEQ ID NO: 2010 - RNA, 74 nt, synthetic construct
  source 1..74: mol_type = other RNA
cttctccgacaggtcctgccatttcaccaggaacatgtatacctgggggaaagccagagtcgggggaccccatt

SEQ ID NO: 2011 - RNA, 74 nt, synthetic construct
  source 1..74: mol_type = other RNA
cttctccgacaggtcctgccatttcaccaggaacatgtacacctgggggaaagccagagtcgggggaccccatt

SEQ ID NO: 2012 - RNA, 75 nt, synthetic construct
  source 1..75: mol_type = other RNA
ccttctccgacaggtcctgccatttcaccaggaacatgtagacctgggggaaagccagagtcgggggaccccatt

SEQ ID NO: 2013 - RNA, 75 nt, synthetic construct
  source 1..75: mol_type = other RNA
ccttctccgacaggtcctgccatttcaccaggaacatgtacacctgggggaaagccagagtcgggggaccccatt

SEQ ID NO: 2014 - RNA, 75 nt, synthetic construct
  source 1..75: mol_type = other RNA
ccttctccgacaggtcctgccatttcaccaggaacatgtatacctgggggaaagccagagtcgggggaccccatt

SEQ ID NO: 2015 - RNA, 75 nt, synthetic construct
  source 1..75: mol_type = other RNA
ccttctccgacaggtcctgccatttcaccaggaacatgtaaacctgggggaaagccagagtcgggggaccccatt

SEQ ID NO: 2016 - RNA, 76 nt, synthetic construct
  source 1..76: mol_type = other RNA
accttctccgacaggtcctgccatttcaccaggaacatgtatacctgggggaaagccagagtcgggggaccccatt

SEQ ID NO: 2017 - RNA, 76 nt, synthetic construct
  source 1..76: mol_type = other RNA
accttctccgacaggtcctgccatttcaccaggaacatgtacacctgggggaaagccagagtcgggggaccccatt

SEQ ID NO: 2018 - RNA, 76 nt, synthetic construct
  source 1..76: mol_type = other RNA
accttctccgacaggtcctgccatttcaccaggaacatgtagacctgggggaaagccagagtcgggggaccccatt

SEQ ID NO: 2019 - RNA, 76 nt, synthetic construct
  source 1..76: mol_type = other RNA
accttctccgacaggtcctgccatttcaccaggaacatgtaaacctgggggaaagccagagtcgggggaccccatt

SEQ ID NO: 2020 - RNA, 77 nt, synthetic construct
  source 1..77: mol_type = other RNA
caccttctccgacaggtcctgccatttcaccaggaacatgtagacctgggggaaagccagagtcgggggaccccatt

SEQ ID NO: 2021 - RNA, 77 nt, synthetic construct
  source 1..77: mol_type = other RNA
caccttctccgacaggtcctgccatttcaccaggaacatgtaaacctgggggaaagccagagtcgggggaccccatt

SEQ ID NO: 2022 - RNA, 77 nt, synthetic construct
  source 1..77: mol_type = other RNA
caccttctccgacaggtcctgccatttcaccaggaacatgtacacctgggggaaagccagagtcgggggaccccatt

SEQ ID NO: 2023 - RNA, 77 nt, synthetic construct
  source 1..77: mol_type = other RNA
caccttctccgacaggtcctgccatttcaccaggaacatgtatacctgggggaaagccagagtcgggggaccccatt

SEQ ID NO: 2024 - RNA, 78 nt, synthetic construct
  source 1..78: mol_type = other RNA
ccaccttctccgacaggtcctgccatttcaccaggaacatgtaaacctgggggaaagccagagtcgggggaccccatt

SEQ ID NO: 2025 - RNA, 78 nt, synthetic construct
  source 1..78: mol_type = other RNA
ccaccttctccgacaggtcctgccatttcaccaggaacatgtatacctgggggaaagccagagtcgggggaccccatt

SEQ ID NO: 2026 - RNA, 78 nt, synthetic construct
  source 1..78: mol_type = other RNA
ccaccttctccgacaggtcctgccatttcaccaggaacatgtagacctgggggaaagccagagtcgggggaccccatt

SEQ ID NO: 2027 - RNA, 78 nt, synthetic construct
  source 1..78: mol_type = other RNA
ccaccttctccgacaggtcctgccatttcaccaggaacatgtacacctgggggaaagccagagtcgggggaccccatt

SEQ ID NO: 2028 - RNA, 79 nt, synthetic construct
  source 1..79: mol_type = other RNA
accaccttctccgacaggtcctgccatttcaccaggaacatgtacacctgggggaaagccagagtcgggggaccccatt

SEQ ID NO: 2029 - RNA, 79 nt, synthetic construct
  source 1..79: mol_type = other RNA
accaccttctccgacaggtcctgccatttcaccaggaacatgtaaacctgggggaaagccagagtcgggggaccccatt

SEQ ID NO: 2030 - RNA, 79 nt, synthetic construct
  source 1..79: mol_type = other RNA
accaccttctccgacaggtcctgccatttcaccaggaacatgtagacctgggggaaagccagagtcgggggaccccatt

SEQ ID NO: 2031 - RNA, 79 nt, synthetic construct
  source 1..79: mol_type = other RNA
accaccttctccgacaggtcctgccatttcaccaggaacatgtatacctgggggaaagccagagtcgggggaccccatt

SEQ ID NO: 2032 - RNA, 80 nt, synthetic construct
  source 1..80: mol_type = other RNA
gaccaccttctccgacaggtcctgccatttcaccaggaacatgtacacctgggggaaagccagagtcgggggaccccatt

SEQ ID NO: 2033 - RNA, 80 nt, synthetic construct
  source 1..80: mol_type = other RNA
gaccaccttctccgacaggtcctgccatttcaccaggaacatgtagacctgggggaaagccagagtcgggggaccccatt

SEQ ID NO: 2034 - RNA, 80 nt, synthetic construct
  source 1..80: mol_type = other RNA
gaccaccttctccgacaggtcctgccatttcaccaggaacatgtaaacctgggggaaagccagagtcgggggaccccatt

SEQ ID NO: 2035 - RNA, 80 nt, synthetic construct
  source 1..80: mol_type = other RNA
gaccaccttctccgacaggtcctgccatttcaccaggaacatgtatacctgggggaaagccagagtcgggggaccccatt

SEQ ID NO: 2036 - RNA, 81 nt, synthetic construct
  source 1..81: mol_type = other RNA
agaccaccttctccgacaggtcctgccatttcaccaggaacatgtacacctgggggaaagccagagtcgggggaccccatt

SEQ ID NO: 2037 - RNA, 81 nt, synthetic construct
  source 1..81: mol_type = other RNA
agaccaccttctccgacaggtcctgccatttcaccaggaacatgtagacctgggggaaagccagagtcgggggaccccatt

SEQ ID NO: 2038 - RNA, 81 nt, synthetic construct
  source 1..81: mol_type = other RNA
agaccaccttctccgacaggtcctgccatttcaccaggaacatgtatacctgggggaaagccagagtcgggggaccccatt

SEQ ID NO: 2039 - RNA, 81 nt, synthetic construct
  source 1..81: mol_type = other RNA
agaccaccttctccgacaggtcctgccatttcaccaggaacatgtaaacctgggggaaagccagagtcgggggaccccatt

SEQ ID NO: 2040 - RNA, 82 nt, synthetic construct
  source 1..82: mol_type = other RNA
tagaccaccttctccgacaggtcctgccatttcaccaggaacatgtacacctgggggaaagccagagtcgggggaccccatt

SEQ ID NO: 2041 - RNA, 82 nt, synthetic construct
  source 1..82: mol_type = other RNA
tagaccaccttctccgacaggtcctgccatttcaccaggaacatgtaaacctgggggaaagccagagtcgggggaccccatt

SEQ ID NO: 2042 - RNA, 82 nt, synthetic construct
  source 1..82: mol_type = other RNA
tagaccaccttctccgacaggtcctgccatttcaccaggaacatgtagacctgggggaaagccagagtcgggggaccccatt

SEQ ID NO: 2043 - RNA, 82 nt, synthetic construct
  source 1..82: mol_type = other RNA
tagaccaccttctccgacaggtcctgccatttcaccaggaacatgtatacctgggggaaagccagagtcgggggaccccatt

SEQ ID NO: 2044 - RNA, 83 nt, synthetic construct
  source 1..83: mol_type = other RNA
gtagaccaccttctccgacaggtcctgccatttcaccaggaacatgtagacctgggggaaagccagagtcgggggaccccatt

SEQ ID NO: 2045 - RNA, 83 nt, synthetic construct
  source 1..83: mol_type = other RNA
gtagaccaccttctccgacaggtcctgccatttcaccaggaacatgtaaacctgggggaaagccagagtcgggggaccccatt

SEQ ID NO: 2046 - RNA, 83 nt, synthetic construct
  source 1..83: mol_type = other RNA
gtagaccaccttctccgacaggtcctgccatttcaccaggaacatgtacacctgggggaaagccagagtcgggggaccccatt

SEQ ID NO: 2047 - RNA, 83 nt, synthetic construct
  source 1..83: mol_type = other RNA
gtagaccaccttctccgacaggtcctgccatttcaccaggaacatgtatacctgggggaaagccagagtcgggggaccccatt

SEQ ID NO: 2048 - RNA, 84 nt, synthetic construct
  source 1..84: mol_type = other RNA
ggtagaccaccttctccgacaggtcctgccatttcaccaggaacatgtagacctgggggaaagccagagtcgggggaccccatt

SEQ ID NO: 2049 - RNA, 84 nt, synthetic construct
  source 1..84: mol_type = other RNA
ggtagaccaccttctccgacaggtcctgccatttcaccaggaacatgtacacctgggggaaagccagagtcgggggaccccatt

SEQ ID NO: 2050 - RNA, 84 nt, synthetic construct
  source 1..84: mol_type = other RNA
ggtagaccaccttctccgacaggtcctgccatttcaccaggaacatgtaaacctgggggaaagccagagtcgggggaccccatt

SEQ ID NO: 2051 - RNA, 84 nt, synthetic construct
  source 1..84: mol_type = other RNA
ggtagaccaccttctccgacaggtcctgccatttcaccaggaacatgtatacctgggggaaagccagagtcgggggaccccatt

SEQ ID NO: 2052 - RNA, 85 nt, synthetic construct
  source 1..85: mol_type = other RNA
cggtagaccaccttctccgacaggtcctgccatttcaccaggaacatgtacacctgggggaaagccagagtcgggggaccccatt

SEQ ID NO: 2053 - RNA, 85 nt, synthetic construct
  source 1..85: mol_type = other RNA
cggtagaccaccttctccgacaggtcctgccatttcaccaggaacatgtaaacctgggggaaagccagagtcgggggaccccatt

SEQ ID NO: 2054 - RNA, 85 nt, synthetic construct
  source 1..85: mol_type = other RNA
cggtagaccaccttctccgacaggtcctgccatttcaccaggaacatgtagacctgggggaaagccagagtcgggggaccccatt

SEQ ID NO: 2055 - RNA, 85 nt, synthetic construct
  source 1..85: mol_type = other RNA
cggtagaccaccttctccgacaggtcctgccatttcaccaggaacatgtatacctgggggaaagccagagtcgggggaccccatt

SEQ ID NO: 2056 - RNA, 86 nt, synthetic construct
  source 1..86: mol_type = other RNA
ccggtagaccaccttctccgacaggtcctgccatttcaccaggaacatgtagacctgggggaaagccagagtcgggggaccccatt

SEQ ID NO: 2057 - RNA, 86 nt, synthetic construct
  source 1..86: mol_type = other RNA
ccggtagaccaccttctccgacaggtcctgccatttcaccaggaacatgtacacctgggggaaagccagagtcgggggaccccatt

SEQ ID NO: 2058 - RNA, 86 nt, synthetic construct
  source 1..86: mol_type = other RNA
ccggtagaccaccttctccgacaggtcctgccatttcaccaggaacatgtatacctgggggaaagccagagtcgggggaccccatt

SEQ ID NO: 2059 - RNA, 86 nt, synthetic construct
  source 1..86: mol_type = other RNA
ccggtagaccaccttctccgacaggtcctgccatttcaccaggaacatgtaaacctgggggaaagccagagtcgggggaccccatt

SEQ ID NO: 2060 - RNA, 87 nt, synthetic construct
  source 1..87: mol_type = other RNA
gccggtagaccaccttctccgacaggtcctgccatttcaccaggaacatgtacacctgggggaaagccagagtcgggggaccccatt

SEQ ID NO: 2061 - RNA, 87 nt, synthetic construct
  source 1..87: mol_type = other RNA
gccggtagaccaccttctccgacaggtcctgccatttcaccaggaacatgtagacctgggggaaagccagagtcgggggaccccatt

SEQ ID NO: 2062 - RNA, 87 nt, synthetic construct
  source 1..87: mol_type = other RNA
gccggtagaccaccttctccgacaggtcctgccatttcaccaggaacatgtaaacctgggggaaagccagagtcgggggaccccatt

SEQ ID NO: 2063 - RNA, 87 nt, synthetic construct
  source 1..87: mol_type = other RNA
gccggtagaccaccttctccgacaggtcctgccatttcaccaggaacatgtatacctgggggaaagccagagtcgggggaccccatt

SEQ ID NO: 2064 - RNA, 88 nt, synthetic construct
  source 1..88: mol_type = other RNA
cgccggtagaccaccttctccgacaggtcctgccatttcaccaggaacatgtatacctgggggaaagccagagtcgggggaccccatt

SEQ ID NO: 2065 - RNA, 88 nt, synthetic construct
  source 1..88: mol_type = other RNA
cgccggtagaccaccttctccgacaggtcctgccatttcaccaggaacatgtagacctgggggaaagccagagtcgggggaccccatt

SEQ ID NO: 2066 - RNA, 88 nt, synthetic construct
  source 1..88: mol_type = other RNA
cgccggtagaccaccttctccgacaggtcctgccatttcaccaggaacatgtacacctgggggaaagccagagtcgggggaccccatt

SEQ ID NO: 2067 - RNA, 88 nt, synthetic construct
  source 1..88: mol_type = other RNA
cgccggtagaccaccttctccgacaggtcctgccatttcaccaggaacatgtaaacctgggggaaagccagagtcgggggaccccatt

SEQ ID NO: 2068 - RNA, 89 nt, synthetic construct
  source 1..89: mol_type = other RNA
gcgccggtagaccaccttctccgacaggtcctgccatttcaccaggaacatgtagacctgggggaaagccagagtcgggggaccccatt

SEQ ID NO: 2069 - RNA, 89 nt, synthetic construct
  source 1..89: mol_type = other RNA
gcgccggtagaccaccttctccgacaggtcctgccatttcaccaggaacatgtatacctgggggaaagccagagtcgggggaccccatt

SEQ ID NO: 2070 - RNA, 89 nt, synthetic construct
  source 1..89: mol_type = other RNA
gcgccggtagaccaccttctccgacaggtcctgccatttcaccaggaacatgtaaacctgggggaaagccagagtcgggggaccccatt

SEQ ID NO: 2071 - RNA, 89 nt, synthetic construct
  source 1..89: mol_type = other RNA
gcgccggtagaccaccttctccgacaggtcctgccatttcaccaggaacatgtacacctgggggaaagccagagtcgggggaccccatt

SEQ ID NO: 2072 - RNA, 90 nt, synthetic construct
  source 1..90: mol_type = other RNA
agcgccggtagaccaccttctccgacaggtcctgccatttcaccaggaacatgtagacctgggggaaagccagagtcgggggaccccatt

SEQ ID NO: 2073 - RNA, 90 nt, synthetic construct
  source 1..90: mol_type = other RNA
agcgccggtagaccaccttctccgacaggtcctgccatttcaccaggaacatgtaaacctgggggaaagccagagtcgggggaccccatt

SEQ ID NO: 2074 - RNA, 90 nt, synthetic construct
  source 1..90: mol_type = other RNA
agcgccggtagaccaccttctccgacaggtcctgccatttcaccaggaacatgtacacctgggggaaagccagagtcgggggaccccatt

SEQ ID NO: 2075 - RNA, 90 nt, synthetic construct
  source 1..90: mol_type = other RNA
agcgccggtagaccaccttctccgacaggtcctgccatttcaccaggaacatgtatacctgggggaaagccagagtcgggggaccccatt

SEQ ID NO: 2076 - RNA, 91 nt, synthetic construct
  source 1..91: mol_type = other RNA
aagcgccggtagaccaccttctccgacaggtcctgccatttcaccaggaacatgtatacctgggggaaagccagagtcgggggaccccatt

SEQ ID NO: 2077 - RNA, 91 nt, synthetic construct
  source 1..91: mol_type = other RNA
aagcgccggtagaccaccttctccgacaggtcctgccatttcaccaggaacatgtaaacctgggggaaagccagagtcgggggaccccatt

SEQ ID NO: 2078 - RNA, 91 nt, synthetic construct
  source 1..91: mol_type = other RNA
aagcgccggtagaccaccttctccgacaggtcctgccatttcaccaggaacatgtagacctgggggaaagccagagtcgggggaccccatt

SEQ ID NO: 2079 - RNA, 91 nt, synthetic construct
  source 1..91: mol_type = other RNA
aagcgccggtagaccaccttctccgacaggtcctgccatttcaccaggaacatgtacacctgggggaaagccagagtcgggggaccccatt

SEQ ID NO: 2080 - RNA, 92 nt, synthetic construct
  source 1..92: mol_type = other RNA
gaagcgccggtagaccaccttctccgacaggtcctgccatttcaccaggaacatgtagacctgggggaaagccagagtcgggggaccccatt

SEQ ID NO: 2081 - RNA, 92 nt, synthetic construct
  source 1..92: mol_type = other RNA
gaagcgccggtagaccaccttctccgacaggtcctgccatttcaccaggaacatgtacacctgggggaaagccagagtcgggggaccccatt

SEQ ID NO: 2082 - RNA, 92 nt, synthetic construct
  source 1..92: mol_type = other RNA
gaagcgccggtagaccaccttctccgacaggtcctgccatttcaccaggaacatgtatacctgggggaaagccagagtcgggggaccccatt

SEQ ID NO: 2083 - RNA, 92 nt, synthetic construct
  source 1..92: mol_type = other RNA
gaagcgccggtagaccaccttctccgacaggtcctgccatttcaccaggaacatgtaaacctgggggaaagccagagtcgggggaccccatt

SEQ ID NO: 2084 - RNA, 93 nt, synthetic construct
  source 1..93: mol_type = other RNA
tgaagcgccggtagaccaccttctccgacaggtcctgccatttcaccaggaacatgtagacctgggggaaagccagagtcgggggaccccatt

SEQ ID NO: 2085 - RNA, 93 nt, synthetic construct
  source 1..93: mol_type = other RNA
tgaagcgccggtagaccaccttctccgacaggtcctgccatttcaccaggaacatgtatacctgggggaaagccagagtcgggggaccccatt

SEQ ID NO: 2086 - RNA, 93 nt, synthetic construct
  source 1..93: mol_type = other RNA
tgaagcgccggtagaccaccttctccgacaggtcctgccatttcaccaggaacatgtacacctgggggaaagccagagtcgggggaccccatt

SEQ ID NO: 2087 - RNA, 93 nt, synthetic construct
  source 1..93: mol_type = other RNA
tgaagcgccggtagaccaccttctccgacaggtcctgccatttcaccaggaacatgtaaacctgggggaaagccagagtcgggggaccccatt

SEQ ID NO: 2088 - RNA, 94 nt, synthetic construct
  source 1..94: mol_type = other RNA
gtgaagcgccggtagaccaccttctccgacaggtcctgccatttcaccaggaacatgtatacctgggggaaagccagagtcgggggaccccatt

SEQ ID NO: 2089 - RNA, 94 nt, synthetic construct
  source 1..94: mol_type = other RNA
gtgaagcgccggtagaccaccttctccgacaggtcctgccatttcaccaggaacatgtagacctgggggaaagccagagtcgggggaccccatt

SEQ ID NO: 2090 - RNA, 94 nt, synthetic construct
  source 1..94: mol_type = other RNA
gtgaagcgccggtagaccaccttctccgacaggtcctgccatttcaccaggaacatgtacacctgggggaaagccagagtcgggggaccccatt

SEQ ID NO: 2091 - RNA, 94 nt, synthetic construct
  source 1..94: mol_type = other RNA
gtgaagcgccggtagaccaccttctccgacaggtcctgccatttcaccaggaacatgtaaacctgggggaaagccagagtcgggggaccccatt

SEQ ID NO: 2092 - RNA, 95 nt, synthetic construct
  source 1..95: mol_type = other RNA
ggtgaagcgccggtagaccaccttctccgacaggtcctgccatttcaccaggaacatgtaaacctgggggaaagccagagtcgggggaccccatt

SEQ ID NO: 2093 - RNA, 95 nt, synthetic construct
  source 1..95: mol_type = other RNA
ggtgaagcgccggtagaccaccttctccgacaggtcctgccatttcaccaggaacatgtacacctgggggaaagccagagtcgggggaccccatt

SEQ ID NO: 2094 - RNA, 95 nt, synthetic construct
  source 1..95: mol_type = other RNA
ggtgaagcgccggtagaccaccttctccgacaggtcctgccatttcaccaggaacatgtagacctgggggaaagccagagtcgggggaccccatt

SEQ ID NO: 2095 - RNA, 95 nt, synthetic construct
  source 1..95: mol_type = other RNA
ggtgaagcgccggtagaccaccttctccgacaggtcctgccatttcaccaggaacatgtatacctgggggaaagccagagtcgggggaccccatt

SEQ ID NO: 2096 - RNA, 96 nt, synthetic construct
  source 1..96: mol_type = other RNA
cggtgaagcgccggtagaccaccttctccgacaggtcctgccatttcaccaggaacatgtatacctgggggaaagccagagtcgggggaccccatt

SEQ ID NO: 2097 - RNA, 96 nt, synthetic construct
  source 1..96: mol_type = other RNA
cggtgaagcgccggtagaccaccttctccgacaggtcctgccatttcaccaggaacatgtagacctgggggaaagccagagtcgggggaccccatt

SEQ ID NO: 2098 - RNA, 96 nt, synthetic construct
  source 1..96: mol_type = other RNA
cggtgaagcgccggtagaccaccttctccgacaggtcctgccatttcaccaggaacatgtaaacctgggggaaagccagagtcgggggaccccatt

SEQ ID NO: 2099 - RNA, 96 nt, synthetic construct
  source 1..96: mol_type = other RNA
cggtgaagcgccggtagaccaccttctccgacaggtcctgccatttcaccaggaacatgtacacctgggggaaagccagagtcgggggaccccatt

SEQ ID NO: 2100 - RNA, 97 nt, synthetic construct
  source 1..97: mol_type = other RNA
tcggtgaagcgccggtagaccaccttctccgacaggtcctgccatttcaccaggaacatgtatacctgggggaaagccagagtcgggggaccccatt

SEQ ID NO: 2101 - RNA, 97 nt, synthetic construct
  source 1..97: mol_type = other RNA
tcggtgaagcgccggtagaccaccttctccgacaggtcctgccatttcaccaggaacatgtacacctgggggaaagccagagtcgggggaccccatt

SEQ ID NO: 2102 - RNA, 97 nt, synthetic construct
  source 1..97: mol_type = other RNA
tcggtgaagcgccggtagaccaccttctccgacaggtcctgccatttcaccaggaacatgtagacctgggggaaagccagagtcgggggaccccatt

SEQ ID NO: 2103 - RNA, 97 nt, synthetic construct
  source 1..97: mol_type = other RNA
tcggtgaagcgccggtagaccaccttctccgacaggtcctgccatttcaccaggaacatgtaaacctgggggaaagccagagtcgggggaccccatt

SEQ ID NO: 2104 - RNA, 98 nt, synthetic construct
  source 1..98: mol_type = other RNA
ctcggtgaagcgccggtagaccaccttctccgacaggtcctgccatttcaccaggaacatgtatacctgggggaaagccagagtcgggggaccccatt

SEQ ID NO: 2105 - RNA, 98 nt, synthetic construct
  source 1..98: mol_type = other RNA
ctcggtgaagcgccggtagaccaccttctccgacaggtcctgccatttcaccaggaacatgtaaacctgggggaaagccagagtcgggggaccccatt

SEQ ID NO: 2106 - RNA, 98 nt, synthetic construct
  source 1..98: mol_type = other RNA
ctcggtgaagcgccggtagaccaccttctccgacaggtcctgccatttcaccaggaacatgtacacctgggggaaagccagagtcgggggaccccatt

SEQ ID NO: 2107 - RNA, 98 nt, synthetic construct
  source 1..98: mol_type = other RNA
ctcggtgaagcgccggtagaccaccttctccgacaggtcctgccatttcaccaggaacatgtagacctgggggaaagccagagtcgggggaccccatt

SEQ ID NO: 2108 - RNA, 99 nt, synthetic construct
  source 1..99: mol_type = other RNA
tctcggtgaagcgccggtagaccaccttctccgacaggtcctgccatttcaccaggaacatgtagacctgggggaaagccagagtcgggggaccccatt

SEQ ID NO: 2109 - RNA, 99 nt, synthetic construct
  source 1..99: mol_type = other RNA
tctcggtgaagcgccggtagaccaccttctccgacaggtcctgccatttcaccaggaacatgtatacctgggggaaagccagagtcgggggaccccatt

SEQ ID NO: 2110 - RNA, 99 nt, synthetic construct
  source 1..99: mol_type = other RNA
tctcggtgaagcgccggtagaccaccttctccgacaggtcctgccatttcaccaggaacatgtaaacctgggggaaagccagagtcgggggaccccatt

SEQ ID NO: 2111 - RNA, 99 nt, synthetic construct
  source 1..99: mol_type = other RNA
tctcggtgaagcgccggtagaccaccttctccgacaggtcctgccatttcaccaggaacatgtacacctgggggaaagccagagtcgggggaccccatt

SEQ ID NO: 2112 - RNA, 100 nt, synthetic construct
  source 1..100: mol_type = other RNA
atctcggtgaagcgccggtagaccaccttctccgacaggtcctgccatttcaccaggaacatgtatacctgggggaaagccagagtcgggggaccccatt

SEQ ID NO: 2113 - RNA, 100 nt, synthetic construct
  source 1..100: mol_type = other RNA
atctcggtgaagcgccggtagaccaccttctccgacaggtcctgccatttcaccaggaacatgtagacctgggggaaagccagagtcgggggaccccatt

SEQ ID NO: 2114 - RNA, 100 nt, synthetic construct
  source 1..100: mol_type = other RNA
atctcggtgaagcgccggtagaccaccttctccgacaggtcctgccatttcaccaggaacatgtacacctgggggaaagccagagtcgggggaccccatt

SEQ ID NO: 2115 - RNA, 100 nt, synthetic construct
  source 1..100: mol_type = other RNA
atctcggtgaagcgccggtagaccaccttctccgacaggtcctgccatttcaccaggaacatgtaaacctgggggaaagccagagtcgggggaccccatt

SEQ ID NO: 2116 - RNA, 101 nt, synthetic construct
  source 1..101: mol_type = other RNA
gatctcggtgaagcgccggtagaccaccttctccgacaggtcctgccatttcaccaggaacatgtaaacctgggggaaagccagagtcgggggaccccatt

SEQ ID NO: 2117 - RNA, 101 nt, synthetic construct
  source 1..101: mol_type = other RNA
gatctcggtgaagcgccggtagaccaccttctccgacaggtcctgccatttcaccaggaacatgtacacctgggggaaagccagagtcgggggaccccatt

SEQ ID NO: 2118 - RNA, 101 nt, synthetic construct
  source 1..101: mol_type = other RNA
gatctcggtgaagcgccggtagaccaccttctccgacaggtcctgccatttcaccaggaacatgtatacctgggggaaagccagagtcgggggaccccatt

SEQ ID NO: 2119 - RNA, 101 nt, synthetic construct
  source 1..101: mol_type = other RNA
gatctcggtgaagcgccggtagaccaccttctccgacaggtcctgccatttcaccaggaacatgtagacctgggggaaagccagagtcgggggaccccatt

SEQ ID NO: 2120 - RNA, 102 nt, synthetic construct
  source 1..102: mol_type = other RNA
agatctcggtgaagcgccggtagaccaccttctccgacaggtcctgccatttcaccaggaacatgtacacctgggggaaagccagagtcgggggaccccatt

SEQ ID NO: 2121 - RNA, 102 nt, synthetic construct
  source 1..102: mol_type = other RNA
agatctcggtgaagcgccggtagaccaccttctccgacaggtcctgccatttcaccaggaacatgtatacctgggggaaagccagagtcgggggaccccatt

SEQ ID NO: 2122 - RNA, 102 nt, synthetic construct
  source 1..102: mol_type = other RNA
agatctcggtgaagcgccggtagaccaccttctccgacaggtcctgccatttcaccaggaacatgtagacctgggggaaagccagagtcgggggaccccatt

SEQ ID NO: 2123 - RNA, 102 nt, synthetic construct
  source 1..102: mol_type = other RNA
agatctcggtgaagcgccggtagaccaccttctccgacaggtcctgccatttcaccaggaacatgtaaacctgggggaaagccagagtcgggggaccccatt

SEQ ID NO: 2124 - RNA, 103 nt, synthetic construct
  source 1..103: mol_type = other RNA
tagatctcggtgaagcgccggtagaccaccttctccgacaggtcctgccatttcaccaggaacatgtaaacctgggggaaagccagagtcgggggaccccatt

SEQ ID NO: 2125 - RNA, 103 nt, synthetic construct
  source 1..103: mol_type = other RNA
tagatctcggtgaagcgccggtagaccaccttctccgacaggtcctgccatttcaccaggaacatgtatacctgggggaaagccagagtcgggggaccccatt

SEQ ID NO: 2126 - RNA, 103 nt, synthetic construct
  source 1..103: mol_type = other RNA
tagatctcggtgaagcgccggtagaccaccttctccgacaggtcctgccatttcaccaggaacatgtagacctgggggaaagccagagtcgggggaccccatt

SEQ ID NO: 2127 - RNA, 103 nt, synthetic construct
  source 1..103: mol_type = other RNA
tagatctcggtgaagcgccggtagaccaccttctccgacaggtcctgccatttcaccaggaacatgtacacctgggggaaagccagagtcgggggaccccatt

SEQ ID NO: 2128 - RNA, 15 nt, synthetic construct
  source 1..15: mol_type = other RNA
ggaactcgtagatct

SEQ ID NO: 2129 - RNA, 19 nt, synthetic construct
  source 1..19: mol_type = other RNA
gccggtagaccaccttctc

SEQ ID NO: 2130 - RNA, 20 nt, synthetic construct
  source 1..20: mol_type = other RNA
cgtagatctcggtgaagcgc

SEQ ID NO: 2131 - RNA, 20 nt, synthetic construct
  source 1..20: mol_type = other RNA
cgccggtagaccaccttctc

SEQ ID NO: 2132 - RNA, 20 nt, synthetic construct
  source 1..20: mol_type = other RNA
actcgtagatctcggtgaag

SEQ ID NO: 2133 - RNA, 20 nt, synthetic construct
  source 1..20: mol_type = other RNA
cacatggaactcgtagatct

SEQ ID NO: 2134 - RNA, 20 nt, synthetic construct
  source 1..20: mol_type = other RNA
gaactcgtagatctcggtga

SEQ ID NO: 2135 - RNA, 20 nt, synthetic construct
  source 1..20: mol_type = other RNA
atggaactcgtagatctcgg

SEQ ID NO: 2136 - RNA, 20 nt, synthetic construct
  source 1..20: mol_type = other RNA
gtagatctcggtgaagcgcc

SEQ ID NO: 2137 - RNA, 20 nt, synthetic construct
  source 1..20: mol_type = other RNA
gatctcggtgaagcgccggt

SEQ ID NO: 2138 - RNA, 20 nt, synthetic construct
  source 1..20: mol_type = other RNA
acatggaactcgtagatctc

SEQ ID NO: 2139 - RNA, 20 nt, synthetic construct
  source 1..20: mol_type = other RNA
ggtagaccaccttctccgac

SEQ ID NO: 2140 - RNA, 91 nt, synthetic construct
  source 1..91: mol_type = other RNA
ggaactcgtagatctgttttagagctagaaatagcaagttaaaataaggctagtccgttatcaacttgaaaaagtggcaccgagtcggtgc

SEQ ID NO: 2141 - RNA, 95 nt, synthetic construct
  source 1..95: mol_type = other RNA
ggaactcgtagatctgttttagagctagaaatagcaagttaaaataaggctagtccgttatcaacttgaaaaagtggcaccgagtcggtgctttt

SEQ ID NO: 2142 - RNA, 96 nt, synthetic construct
  source 1..96: mol_type = other RNA
cacatggaactcgtagatctgttttagagctagaaatagcaagttaaaataaggctagtccgttatcaacttgaaaaagtggcaccgagtcggtgc

SEQ ID NO: 2143 - RNA, 96 nt, synthetic construct
  source 1..96: mol_type = other RNA
cgtagatctcggtgaagcgcgttttagagctagaaatagcaagttaaaataaggctagtccgttatcaacttgaaaaagtggcaccgagtcggtgc

SEQ ID NO: 2144 - RNA, 100 nt, synthetic construct
  source 1..100: mol_type = other RNA
cacatggaactcgtagatctgttttagagctagaaatagcaagttaaaataaggctagtccgttatcaacttgaaaaagtggcaccgagtcggtgctttt

SEQ ID NO: 2145 - RNA, 100 nt, synthetic construct
  source 1..100: mol_type = other RNA
cgtagatctcggtgaagcgcgttttagagctagaaatagcaagttaaaataaggctagtccgttatcaacttgaaaaagtggcaccgagtcggtgctttt

SEQ ID NO: 2146 - RNA, 16 nt, synthetic construct
  source 1..16: mol_type = other RNA
agatctcggtgaagcg

SEQ ID NO: 2147 - RNA, 17 nt, synthetic construct
  source 1..17: mol_type = other RNA
tagatctcggtgaagcg

SEQ ID NO: 2148 - RNA, 18 nt, synthetic construct
  source 1..18: mol_type = other RNA
gtagatctcggtgaagcg

SEQ ID NO: 2149 - RNA, 19 nt, synthetic construct
  source 1..19: mol_type = other RNA
cgtagatctcggtgaagcg

SEQ ID NO: 2150 - RNA, 20 nt, synthetic construct
  source 1..20: mol_type = other RNA
tcgtagatctcggtgaagcg

SEQ ID NO: 2151 - RNA, 21 nt, synthetic construct
  source 1..21: mol_type = other RNA
ctcgtagatctcggtgaagcg

SEQ ID NO: 2152 - RNA, 22 nt, synthetic construct
  source 1..22: mol_type = other RNA
actcgtagatctcggtgaagcg

SEQ ID NO: 2153-2159 - skipped (7 entries)

SEQ ID NO: 2160 - RNA, 10 nt, synthetic construct
  source 1..10: mol_type = other RNA
ttcaccgaga

SEQ ID NO: 2161 - RNA, 11 nt, synthetic construct
  source 1..11: mol_type = other RNA
ttcaccgagat

SEQ ID NO: 2162 - RNA, 12 nt, synthetic construct
  source 1..12: mol_type = other RNA
ttcaccgagatc

SEQ ID NO: 2163 - RNA, 13 nt, synthetic construct
  source 1..13: mol_type = other RNA
ttcaccgagatct

SEQ ID NO: 2164 - RNA, 14 nt, synthetic construct
  source 1..14: mol_type = other RNA
ttcaccgagatcta

SEQ ID NO: 2165 - RNA, 15 nt, synthetic construct
  source 1..15: mol_type = other RNA
ttcaccgagatctac

SEQ ID NO: 2166 - RNA, 16 nt, synthetic construct
  source 1..16: mol_type = other RNA
ttcaccgagatctacg

SEQ ID NO: 2167 - RNA, 17 nt, synthetic construct
  source 1..17: mol_type = other RNA
ttcaccgagatctacga

SEQ ID NO: 2168 - RNA, 18 nt, synthetic construct
  source 1..18: mol_type = other RNA
ttcaccgagatctacgag

SEQ ID NO: 2169 - RNA, 19 nt, synthetic construct
  source 1..19: mol_type = other RNA
ttcaccgagatctacgagt

SEQ ID NO: 2170 - RNA, 57 nt, synthetic construct
  source 1..57: mol_type = other RNA
gtatacatgttcctggtgaaatggcaggacctgtcggagaaggtggtctatcggcgc

SEQ ID NO: 2171 - RNA, 57 nt, synthetic construct
  source 1..57: mol_type = other RNA
gtgtacatgttcctggtgaaatggcaggacctgtcggagaaggtggtctacaggcgc

SEQ ID NO: 2172 - RNA, 57 nt, synthetic construct
  source 1..57: mol_type = other RNA
gtgtacatgttcctggtgaaatggcaggacctgtcggagaaggtggtctaccggcgc

SEQ ID NO: 2173 - RNA, 57 nt, synthetic construct
  source 1..57: mol_type = other RNA
gtgtacatgttcctggtgaaatggcaggacctgtcggagaaggtggtctatagacgc

SEQ ID NO: 2174 - RNA, 57 nt, synthetic construct
  source 1..57: mol_type = other RNA
gtttacatgttcctggtgaaatggcaggacctgtcggagaaggtggtctatcggcgc

SEQ ID NO: 2175 - RNA, 57 nt, synthetic construct
  source 1..57: mol_type = other RNA
gtgtacatgttcctggtgaaatggcaggacctgtcggagaaggtggtctacagacgc

SEQ ID NO: 2176 - RNA, 57 nt, synthetic construct
  source 1..57: mol_type = other RNA
gtgtacatgttcctggtgaaatggcaggacctgtcggagaaggtggtctatcggcgc

SEQ ID NO: 2177 - RNA, 57 nt, synthetic construct
  source 1..57: mol_type = other RNA
gtctacatgttcctggtgaaatggcaggacctgtcggagaaggtggtctacaggcgc

SEQ ID NO: 2178 - RNA, 57 nt, synthetic construct
  source 1..57: mol_type = other RNA
gtttacatgttcctggtgaaatggcaggacctgtcggagaaggtggtctataggcgc

SEQ ID NO: 2179 - RNA, 57 nt, synthetic construct
  source 1..57: mol_type = other RNA
gtttacatgttcctggtgaaatggcaggacctgtcggagaaggtggtctatagacgc

SEQ ID NO: 2180 - RNA, 57 nt, synthetic construct
  source 1..57: mol_type = other RNA
gtttacatgttcctggtgaaatggcaggacctgtcggagaaggtggtctaccggcgc

SEQ ID NO: 2181 - RNA, 57 nt, synthetic construct
  source 1..57: mol_type = other RNA
gtctacatgttcctggtgaaatggcaggacctgtcggagaaggtggtctatcggcgc

SEQ ID NO: 2182 - RNA, 57 nt, synthetic construct
  source 1..57: mol_type = other RNA
gtctacatgttcctggtgaaatggcaggacctgtcggagaaggtggtctatagacgc

SEQ ID NO: 2183 - RNA, 57 nt, synthetic construct
  source 1..57: mol_type = other RNA
gtttacatgttcctggtgaaatggcaggacctgtcggagaaggtggtctacaggcgc

SEQ ID NO: 2184 - RNA, 57 nt, synthetic construct
  source 1..57: mol_type = other RNA
gtctacatgttcctggtgaaatggcaggacctgtcggagaaggtggtctaccggcgc

SEQ ID NO: 2185 - RNA, 57 nt, synthetic construct
  source 1..57: mol_type = other RNA
gtatacatgttcctggtgaaatggcaggacctgtcggagaaggtggtctacagacgc

SEQ ID NO: 2186 - RNA, 57 nt, synthetic construct
  source 1..57: mol_type = other RNA
gtctacatgttcctggtgaaatggcaggacctgtcggagaaggtggtctacagacgc

SEQ ID NO: 2187 - RNA, 57 nt, synthetic construct
  source 1..57: mol_type = other RNA
gtatacatgttcctggtgaaatggcaggacctgtcggagaaggtggtctataggcgc

SEQ ID NO: 2188 - RNA, 57 nt, synthetic construct
  source 1..57: mol_type = other RNA
gtatacatgttcctggtgaaatggcaggacctgtcggagaaggtggtctatagacgc

SEQ ID NO: 2189 - RNA, 57 nt, synthetic construct
  source 1..57: mol_type = other RNA
gtatacatgttcctggtgaaatggcaggacctgtcggagaaggtggtctaccggcgc

SEQ ID NO: 2190 - RNA, 57 nt, synthetic construct
  source 1..57: mol_type = other RNA
gtatacatgttcctggtgaaatggcaggacctgtcggagaaggtggtctacaggcgc

SEQ ID NO: 2191 - RNA, 57 nt, synthetic construct
  source 1..57: mol_type = other RNA
gtctacatgttcctggtgaaatggcaggacctgtcggagaaggtggtctataggcgc

SEQ ID NO: 2192 - RNA, 57 nt, synthetic construct
  source 1..57: mol_type = other RNA
gtttacatgttcctggtgaaatggcaggacctgtcggagaaggtggtctacagacgc

SEQ ID NO: 2193 - RNA, 57 nt, synthetic construct
  source 1..57: mol_type = other RNA
gtgtacatgttcctggtgaaatggcaggacctgtcggagaaggtggtctataggcgc

SEQ ID NO: 2194 - RNA, 58 nt, synthetic construct
  source 1..58: mol_type = other RNA
ggtctacatgttcctggtgaaatggcaggacctgtcggagaaggtggtctacagacgc

SEQ ID NO: 2195 - RNA, 58 nt, synthetic construct
  source 1..58: mol_type = other RNA
ggtgtacatgttcctggtgaaatggcaggacctgtcggagaaggtggtctacagacgc

SEQ ID NO: 2196 - RNA, 58 nt, synthetic construct
  source 1..58: mol_type = other RNA
ggtttacatgttcctggtgaaatggcaggacctgtcggagaaggtggtctatagacgc

SEQ ID NO: 2197 - RNA, 58 nt, synthetic construct
  source 1..58: mol_type = other RNA
ggtgtacatgttcctggtgaaatggcaggacctgtcggagaaggtggtctacaggcgc

SEQ ID NO: 2198 - RNA, 58 nt, synthetic construct
  source 1..58: mol_type = other RNA
ggtatacatgttcctggtgaaatggcaggacctgtcggagaaggtggtctatcggcgc

SEQ ID NO: 2199 - RNA, 58 nt, synthetic construct
  source 1..58: mol_type = other RNA
ggtatacatgttcctggtgaaatggcaggacctgtcggagaaggtggtctatagacgc

SEQ ID NO: 2200 - RNA, 58 nt, synthetic construct
  source 1..58: mol_type = other RNA
ggtatacatgttcctggtgaaatggcaggacctgtcggagaaggtggtctaccggcgc

SEQ ID NO: 2201 - RNA, 58 nt, synthetic construct
  source 1..58: mol_type = other RNA
ggtgtacatgttcctggtgaaatggcaggacctgtcggagaaggtggtctaccggcgc

SEQ ID NO: 2202 - RNA, 58 nt, synthetic construct
  source 1..58: mol_type = other RNA
ggtatacatgttcctggtgaaatggcaggacctgtcggagaaggtggtctacaggcgc

SEQ ID NO: 2203 - RNA, 58 nt, synthetic construct
  source 1..58: mol_type = other RNA
ggtgtacatgttcctggtgaaatggcaggacctgtcggagaaggtggtctatagacgc

SEQ ID NO: 2204 - RNA, 58 nt, synthetic construct
  source 1..58: mol_type = other RNA
ggtgtacatgttcctggtgaaatggcaggacctgtcggagaaggtggtctataggcgc

SEQ ID NO: 2205 - RNA, 58 nt, synthetic construct
  source 1..58: mol_type = other RNA
ggtgtacatgttcctggtgaaatggcaggacctgtcggagaaggtggtctatcggcgc

SEQ ID NO: 2206 - RNA, 58 nt, synthetic construct
  source 1..58: mol_type = other RNA
ggtttacatgttcctggtgaaatggcaggacctgtcggagaaggtggtctacagacgc

SEQ ID NO: 2207 - RNA, 58 nt, synthetic construct
  source 1..58: mol_type = other RNA
ggtctacatgttcctggtgaaatggcaggacctgtcggagaaggtggtctatcggcgc

SEQ ID NO: 2208 - RNA, 58 nt, synthetic construct
  source 1..58: mol_type = other RNA
ggtctacatgttcctggtgaaatggcaggacctgtcggagaaggtggtctacaggcgc

SEQ ID NO: 2209 - RNA, 58 nt, synthetic construct
  source 1..58: mol_type = other RNA
ggtctacatgttcctggtgaaatggcaggacctgtcggagaaggtggtctataggcgc

SEQ ID NO: 2210 - RNA, 58 nt, synthetic construct
  source 1..58: mol_type = other RNA
ggtctacatgttcctggtgaaatggcaggacctgtcggagaaggtggtctaccggcgc

SEQ ID NO: 2211 - RNA, 58 nt, synthetic construct
  source 1..58: mol_type = other RNA
ggtatacatgttcctggtgaaatggcaggacctgtcggagaaggtggtctacagacgc

SEQ ID NO: 2212 - RNA, 58 nt, synthetic construct
  source 1..58: mol_type = other RNA
ggtctacatgttcctggtgaaatggcaggacctgtcggagaaggtggtctatagacgc

SEQ ID NO: 2213 - RNA, 58 nt, synthetic construct
  source 1..58: mol_type = other RNA
ggtttacatgttcctggtgaaatggcaggacctgtcggagaaggtggtctacaggcgc

SEQ ID NO: 2214 - RNA, 58 nt, synthetic construct
  source 1..58: mol_type = other RNA
ggtatacatgttcctggtgaaatggcaggacctgtcggagaaggtggtctataggcgc

SEQ ID NO: 2215 - RNA, 58 nt, synthetic construct
  source 1..58: mol_type = other RNA
ggtttacatgttcctggtgaaatggcaggacctgtcggagaaggtggtctaccggcgc

SEQ ID NO: 2216 - RNA, 58 nt, synthetic construct
  source 1..58: mol_type = other RNA
ggtttacatgttcctggtgaaatggcaggacctgtcggagaaggtggtctataggcgc

SEQ ID NO: 2217 - RNA, 58 nt, synthetic construct
  source 1..58: mol_type = other RNA
ggtttacatgttcctggtgaaatggcaggacctgtcggagaaggtggtctatcggcgc

SEQ ID NO: 2218 - RNA, 59 nt, synthetic construct
  source 1..59: mol_type = other RNA
aggtttacatgttcctggtgaaatggcaggacctgtcggagaaggtggtctaccggcgc

SEQ ID NO: 2219 - RNA, 59 nt, synthetic construct
  source 1..59: mol_type = other RNA
aggtatacatgttcctggtgaaatggcaggacctgtcggagaaggtggtctataggcgc

SEQ ID NO: 2220 - RNA, 59 nt, synthetic construct
  source 1..59: mol_type = other RNA
aggtctacatgttcctggtgaaatggcaggacctgtcggagaaggtggtctacaggcgc

SEQ ID NO: 2221 - RNA, 59 nt, synthetic construct
  source 1..59: mol_type = other RNA
aggtttacatgttcctggtgaaatggcaggacctgtcggagaaggtggtctataggcgc

SEQ ID NO: 2222 - RNA, 59 nt, synthetic construct
  source 1..59: mol_type = other RNA
aggtttacatgttcctggtgaaatggcaggacctgtcggagaaggtggtctatcggcgc

SEQ ID NO: 2223 - RNA, 59 nt, synthetic construct
  source 1..59: mol_type = other RNA
aggtttacatgttcctggtgaaatggcaggacctgtcggagaaggtggtctacaggcgc

SEQ ID NO: 2224 - RNA, 59 nt, synthetic construct
  source 1..59: mol_type = other RNA
aggtttacatgttcctggtgaaatggcaggacctgtcggagaaggtggtctacagacgc

SEQ ID NO: 2225 - RNA, 59 nt, synthetic construct
  source 1..59: mol_type = other RNA
aggtgtacatgttcctggtgaaatggcaggacctgtcggagaaggtggtctatcggcgc

SEQ ID NO: 2226 - RNA, 59 nt, synthetic construct
  source 1..59: mol_type = other RNA
aggtgtacatgttcctggtgaaatggcaggacctgtcggagaaggtggtctataggcgc

SEQ ID NO: 2227 - RNA, 59 nt, synthetic construct
  source 1..59: mol_type = other RNA
aggtgtacatgttcctggtgaaatggcaggacctgtcggagaaggtggtctatagacgc

SEQ ID NO: 2228 - RNA, 59 nt, synthetic construct
  source 1..59: mol_type = other RNA
aggtgtacatgttcctggtgaaatggcaggacctgtcggagaaggtggtctacaggcgc

SEQ ID NO: 2229 - RNA, 59 nt, synthetic construct
  source 1..59: mol_type = other RNA
aggtctacatgttcctggtgaaatggcaggacctgtcggagaaggtggtctaccggcgc

SEQ ID NO: 2230 - RNA, 59 nt, synthetic construct
  source 1..59: mol_type = other RNA
aggtgtacatgttcctggtgaaatggcaggacctgtcggagaaggtggtctacagacgc

SEQ ID NO: 2231 - RNA, 59 nt, synthetic construct
  source 1..59: mol_type = other RNA
aggtgtacatgttcctggtgaaatggcaggacctgtcggagaaggtggtctaccggcgc

SEQ ID NO: 2232 - RNA, 59 nt, synthetic construct
  source 1..59: mol_type = other RNA
aggtctacatgttcctggtgaaatggcaggacctgtcggagaaggtggtctatagacgc

SEQ ID NO: 2233 - RNA, 59 nt, synthetic construct
  source 1..59: mol_type = other RNA
aggtctacatgttcctggtgaaatggcaggacctgtcggagaaggtggtctataggcgc

SEQ ID NO: 2234 - RNA, 59 nt, synthetic construct
  source 1..59: mol_type = other RNA
aggtttacatgttcctggtgaaatggcaggacctgtcggagaaggtggtctatagacgc

SEQ ID NO: 2235 - RNA, 59 nt, synthetic construct
  source 1..59: mol_type = other RNA
aggtatacatgttcctggtgaaatggcaggacctgtcggagaaggtggtctacaggcgc

SEQ ID NO: 2236 - RNA, 59 nt, synthetic construct
  source 1..59: mol_type = other RNA
aggtatacatgttcctggtgaaatggcaggacctgtcggagaaggtggtctaccggcgc

SEQ ID NO: 2237 - RNA, 59 nt, synthetic construct
  source 1..59: mol_type = other RNA
aggtatacatgttcctggtgaaatggcaggacctgtcggagaaggtggtctatagacgc

SEQ ID NO: 2238 - RNA, 59 nt, synthetic construct
  source 1..59: mol_type = other RNA
aggtatacatgttcctggtgaaatggcaggacctgtcggagaaggtggtctacagacgc

SEQ ID NO: 2239 - RNA, 59 nt, synthetic construct
  source 1..59: mol_type = other RNA
aggtatacatgttcctggtgaaatggcaggacctgtcggagaaggtggtctatcggcgc

SEQ ID NO: 2240 - RNA, 59 nt, synthetic construct
  source 1..59: mol_type = other RNA
aggtctacatgttcctggtgaaatggcaggacctgtcggagaaggtggtctacagacgc

SEQ ID NO: 2241 - RNA, 59 nt, synthetic construct
  source 1..59: mol_type = other RNA
aggtctacatgttcctggtgaaatggcaggacctgtcggagaaggtggtctatcggcgc

SEQ ID NO: 2242 - RNA, 60 nt, synthetic construct
  source 1..60: mol_type = other RNA
caggtttacatgttcctggtgaaatggcaggacctgtcggagaaggtggtctataggcgc

SEQ ID NO: 2243 - RNA, 60 nt, synthetic construct
  source 1..60: mol_type = other RNA
caggtctacatgttcctggtgaaatggcaggacctgtcggagaaggtggtctatcggcgc

SEQ ID NO: 2244 - RNA, 60 nt, synthetic construct
  source 1..60: mol_type = other RNA
caggtttacatgttcctggtgaaatggcaggacctgtcggagaaggtggtctaccggcgc

SEQ ID NO: 2245 - RNA, 60 nt, synthetic construct
  source 1..60: mol_type = other RNA
caggtttacatgttcctggtgaaatggcaggacctgtcggagaaggtggtctatagacgc

SEQ ID NO: 2246 - RNA, 60 nt, synthetic construct
  source 1..60: mol_type = other RNA
caggtatacatgttcctggtgaaatggcaggacctgtcggagaaggtggtctacaggcgc

SEQ ID NO: 2247 - RNA, 60 nt, synthetic construct
  source 1..60: mol_type = other RNA
caggtatacatgttcctggtgaaatggcaggacctgtcggagaaggtggtctaccggcgc

SEQ ID NO: 2248 - RNA, 60 nt, synthetic construct
  source 1..60: mol_type = other RNA
caggtatacatgttcctggtgaaatggcaggacctgtcggagaaggtggtctatagacgc

SEQ ID NO: 2249 - RNA, 60 nt, synthetic construct
  source 1..60: mol_type = other RNA
caggtatacatgttcctggtgaaatggcaggacctgtcggagaaggtggtctataggcgc

SEQ ID NO: 2250 - RNA, 60 nt, synthetic construct
  source 1..60: mol_type = other RNA
caggtatacatgttcctggtgaaatggcaggacctgtcggagaaggtggtctatcggcgc

SEQ ID NO: 2251 - RNA, 60 nt, synthetic construct
  source 1..60: mol_type = other RNA
caggtctacatgttcctggtgaaatggcaggacctgtcggagaaggtggtctacagacgc

SEQ ID NO: 2252 - RNA, 60 nt, synthetic construct
  source 1..60: mol_type = other RNA
caggtctacatgttcctggtgaaatggcaggacctgtcggagaaggtggtctacaggcgc

SEQ ID NO: 2253 - RNA, 60 nt, synthetic construct
  source 1..60: mol_type = other RNA
caggtctacatgttcctggtgaaatggcaggacctgtcggagaaggtggtctaccggcgc

SEQ ID NO: 2254 - RNA, 60 nt, synthetic construct
  source 1..60: mol_type = other RNA
caggtctacatgttcctggtgaaatggcaggacctgtcggagaaggtggtctatagacgc

SEQ ID NO: 2255 - RNA, 60 nt, synthetic construct
  source 1..60: mol_type = other RNA
caggtttacatgttcctggtgaaatggcaggacctgtcggagaaggtggtctatcggcgc

SEQ ID NO: 2256 - RNA, 60 nt, synthetic construct
  source 1..60: mol_type = other RNA
caggtatacatgttcctggtgaaatggcaggacctgtcggagaaggtggtctacagacgc

SEQ ID NO: 2257 - RNA, 60 nt, synthetic construct
  source 1..60: mol_type = other RNA
caggtttacatgttcctggtgaaatggcaggacctgtcggagaaggtggtctacaggcgc

SEQ ID NO: 2258 - RNA, 60 nt, synthetic construct
  source 1..60: mol_type = other RNA
caggtttacatgttcctggtgaaatggcaggacctgtcggagaaggtggtctacagacgc

SEQ ID NO: 2259 - RNA, 60 nt, synthetic construct
  source 1..60: mol_type = other RNA
caggtgtacatgttcctggtgaaatggcaggacctgtcggagaaggtggtctataggcgc

SEQ ID NO: 2260 - RNA, 60 nt, synthetic construct
  source 1..60: mol_type = other RNA
caggtgtacatgttcctggtgaaatggcaggacctgtcggagaaggtggtctatagacgc

SEQ ID NO: 2261 - RNA, 60 nt, synthetic construct
  source 1..60: mol_type = other RNA
caggtgtacatgttcctggtgaaatggcaggacctgtcggagaaggtggtctaccggcgc

SEQ ID NO: 2262 - RNA, 60 nt, synthetic construct
  source 1..60: mol_type = other RNA
caggtgtacatgttcctggtgaaatggcaggacctgtcggagaaggtggtctacaggcgc

SEQ ID NO: 2263 - RNA, 60 nt, synthetic construct
  source 1..60: mol_type = other RNA
caggtgtacatgttcctggtgaaatggcaggacctgtcggagaaggtggtctacagacgc

SEQ ID NO: 2264 - RNA, 60 nt, synthetic construct
  source 1..60: mol_type = other RNA
caggtctacatgttcctggtgaaatggcaggacctgtcggagaaggtggtctataggcgc

SEQ ID NO: 2265 - RNA, 60 nt, synthetic construct
  source 1..60: mol_type = other RNA
caggtgtacatgttcctggtgaaatggcaggacctgtcggagaaggtggtctatcggcgc

SEQ ID NO: 2266 - RNA, 61 nt, synthetic construct
  source 1..61: mol_type = other RNA
ccaggtgtacatgttcctggtgaaatggcaggacctgtcggagaaggtggtctataggcgc

SEQ ID NO: 2267 - RNA, 61 nt, synthetic construct
  source 1..61: mol_type = other RNA
ccaggtgtacatgttcctggtgaaatggcaggacctgtcggagaaggtggtctatagacgc

SEQ ID NO: 2268 - RNA, 61 nt, synthetic construct
  source 1..61: mol_type = other RNA
ccaggtgtacatgttcctggtgaaatggcaggacctgtcggagaaggtggtctaccggcgc

SEQ ID NO: 2269 - RNA, 61 nt, synthetic construct
  source 1..61: mol_type = other RNA
ccaggtatacatgttcctggtgaaatggcaggacctgtcggagaaggtggtctacaggcgc

SEQ ID NO: 2270 - RNA, 61 nt, synthetic construct
  source 1..61: mol_type = other RNA
ccaggtgtacatgttcctggtgaaatggcaggacctgtcggagaaggtggtctacagacgc

SEQ ID NO: 2271 - RNA, 61 nt, synthetic construct
  source 1..61: mol_type = other RNA
ccaggtttacatgttcctggtgaaatggcaggacctgtcggagaaggtggtctataggcgc

SEQ ID NO: 2272 - RNA, 61 nt, synthetic construct
  source 1..61: mol_type = other RNA
ccaggtctacatgttcctggtgaaatggcaggacctgtcggagaaggtggtctatagacgc

SEQ ID NO: 2273 - RNA, 61 nt, synthetic construct
  source 1..61: mol_type = other RNA
ccaggtctacatgttcctggtgaaatggcaggacctgtcggagaaggtggtctaccggcgc

SEQ ID NO: 2274 - RNA, 61 nt, synthetic construct
  source 1..61: mol_type = other RNA
ccaggtctacatgttcctggtgaaatggcaggacctgtcggagaaggtggtctacaggcgc

SEQ ID NO: 2275 - RNA, 61 nt, synthetic construct
  source 1..61: mol_type = other RNA
ccaggtctacatgttcctggtgaaatggcaggacctgtcggagaaggtggtctacagacgc

SEQ ID NO: 2276 - RNA, 61 nt, synthetic construct
  source 1..61: mol_type = other RNA
ccaggtatacatgttcctggtgaaatggcaggacctgtcggagaaggtggtctatcggcgc

SEQ ID NO: 2277 - RNA, 61 nt, synthetic construct
  source 1..61: mol_type = other RNA
ccaggtatacatgttcctggtgaaatggcaggacctgtcggagaaggtggtctataggcgc

SEQ ID NO: 2278 - RNA, 61 nt, synthetic construct
  source 1..61: mol_type = other RNA
ccaggtatacatgttcctggtgaaatggcaggacctgtcggagaaggtggtctatagacgc

SEQ ID NO: 2279 - RNA, 61 nt, synthetic construct
  source 1..61: mol_type = other RNA
ccaggtatacatgttcctggtgaaatggcaggacctgtcggagaaggtggtctaccggcgc

SEQ ID NO: 2280 - RNA, 61 nt, synthetic construct
  source 1..61: mol_type = other RNA
ccaggtctacatgttcctggtgaaatggcaggacctgtcggagaaggtggtctatcggcgc

SEQ ID NO: 2281 - RNA, 61 nt, synthetic construct
  source 1..61: mol_type = other RNA
ccaggtttacatgttcctggtgaaatggcaggacctgtcggagaaggtggtctatcggcgc

SEQ ID NO: 2282 - RNA, 61 nt, synthetic construct
  source 1..61: mol_type = other RNA
ccaggtgtacatgttcctggtgaaatggcaggacctgtcggagaaggtggtctatcggcgc

SEQ ID NO: 2283 - RNA, 61 nt, synthetic construct
  source 1..61: mol_type = other RNA
ccaggtttacatgttcctggtgaaatggcaggacctgtcggagaaggtggtctacagacgc

SEQ ID NO: 2284 - RNA, 61 nt, synthetic construct
  source 1..61: mol_type = other RNA
ccaggtttacatgttcctggtgaaatggcaggacctgtcggagaaggtggtctaccggcgc

SEQ ID NO: 2285 - RNA, 61 nt, synthetic construct
  source 1..61: mol_type = other RNA
ccaggtttacatgttcctggtgaaatggcaggacctgtcggagaaggtggtctatagacgc

SEQ ID NO: 2286 - RNA, 61 nt, synthetic construct
  source 1..61: mol_type = other RNA
ccaggtgtacatgttcctggtgaaatggcaggacctgtcggagaaggtggtctacaggcgc

SEQ ID NO: 2287 - RNA, 61 nt, synthetic construct
  source 1..61: mol_type = other RNA
ccaggtatacatgttcctggtgaaatggcaggacctgtcggagaaggtggtctacagacgc

SEQ ID NO: 2288 - RNA, 61 nt, synthetic construct
  source 1..61: mol_type = other RNA
ccaggtctacatgttcctggtgaaatggcaggacctgtcggagaaggtggtctataggcgc

SEQ ID NO: 2289 - RNA, 61 nt, synthetic construct
  source 1..61: mol_type = other RNA
ccaggtttacatgttcctggtgaaatggcaggacctgtcggagaaggtggtctacaggcgc

SEQ ID NO: 2290 - RNA, 62 nt, synthetic construct
  source 1..62: mol_type = other RNA
cccaggtatacatgttcctggtgaaatggcaggacctgtcggagaaggtggtctataggcgc

SEQ ID NO: 2291 - RNA, 62 nt, synthetic construct
  source 1..62: mol_type = other RNA
cccaggtatacatgttcctggtgaaatggcaggacctgtcggagaaggtggtctatcggcgc

SEQ ID NO: 2292 - RNA, 62 nt, synthetic construct
  source 1..62: mol_type = other RNA
cccaggtctacatgttcctggtgaaatggcaggacctgtcggagaaggtggtctacagacgc

SEQ ID NO: 2293 - RNA, 62 nt, synthetic construct
  source 1..62: mol_type = other RNA
cccaggtatacatgttcctggtgaaatggcaggacctgtcggagaaggtggtctatagacgc

SEQ ID NO: 2294 - RNA, 62 nt, synthetic construct
  source 1..62: mol_type = other RNA
cccaggtgtacatgttcctggtgaaatggcaggacctgtcggagaaggtggtctaccggcgc

SEQ ID NO: 2295 - RNA, 62 nt, synthetic construct
  source 1..62: mol_type = other RNA
cccaggtgtacatgttcctggtgaaatggcaggacctgtcggagaaggtggtctacagacgc

SEQ ID NO: 2296 - RNA, 62 nt, synthetic construct
  source 1..62: mol_type = other RNA
cccaggtctacatgttcctggtgaaatggcaggacctgtcggagaaggtggtctatcggcgc

SEQ ID NO: 2297 - RNA, 62 nt, synthetic construct
  source 1..62: mol_type = other RNA
cccaggtgtacatgttcctggtgaaatggcaggacctgtcggagaaggtggtctatcggcgc

SEQ ID NO: 2298 - RNA, 62 nt, synthetic construct
  source 1..62: mol_type = other RNA
cccaggtgtacatgttcctggtgaaatggcaggacctgtcggagaaggtggtctacaggcgc

SEQ ID NO: 2299 - RNA, 62 nt, synthetic construct
  source 1..62: mol_type = other RNA
cccaggtctacatgttcctggtgaaatggcaggacctgtcggagaaggtggtctacaggcgc

SEQ ID NO: 2300 - RNA, 62 nt, synthetic construct
  source 1..62: mol_type = other RNA
cccaggtgtacatgttcctggtgaaatggcaggacctgtcggagaaggtggtctataggcgc

SEQ ID NO: 2301 - RNA, 62 nt, synthetic construct
  source 1..62: mol_type = other RNA
cccaggtctacatgttcctggtgaaatggcaggacctgtcggagaaggtggtctatagacgc

SEQ ID NO: 2302 - RNA, 62 nt, synthetic construct
  source 1..62: mol_type = other RNA
cccaggtttacatgttcctggtgaaatggcaggacctgtcggagaaggtggtctacagacgc

SEQ ID NO: 2303 - RNA, 62 nt, synthetic construct
  source 1..62: mol_type = other RNA
cccaggtttacatgttcctggtgaaatggcaggacctgtcggagaaggtggtctacaggcgc

SEQ ID NO: 2304 - RNA, 62 nt, synthetic construct
  source 1..62: mol_type = other RNA
cccaggtttacatgttcctggtgaaatggcaggacctgtcggagaaggtggtctaccggcgc

SEQ ID NO: 2305 - RNA, 62 nt, synthetic construct
  source 1..62: mol_type = other RNA
cccaggtttacatgttcctggtgaaatggcaggacctgtcggagaaggtggtctatagacgc

SEQ ID NO: 2306 - RNA, 62 nt, synthetic construct
  source 1..62: mol_type = other RNA
cccaggtttacatgttcctggtgaaatggcaggacctgtcggagaaggtggtctataggcgc

SEQ ID NO: 2307 - RNA, 62 nt, synthetic construct
  source 1..62: mol_type = other RNA
cccaggtatacatgttcctggtgaaatggcaggacctgtcggagaaggtggtctaccggcgc

SEQ ID NO: 2308 - RNA, 62 nt, synthetic construct
  source 1..62: mol_type = other RNA
cccaggtatacatgttcctggtgaaatggcaggacctgtcggagaaggtggtctacaggcgc

SEQ ID NO: 2309 - RNA, 62 nt, synthetic construct
  source 1..62: mol_type = other RNA
cccaggtatacatgttcctggtgaaatggcaggacctgtcggagaaggtggtctacagacgc

SEQ ID NO: 2310 - RNA, 62 nt, synthetic construct
  source 1..62: mol_type = other RNA
cccaggtctacatgttcctggtgaaatggcaggacctgtcggagaaggtggtctaccggcgc

SEQ ID NO: 2311 - RNA, 62 nt, synthetic construct
  source 1..62: mol_type = other RNA
cccaggtgtacatgttcctggtgaaatggcaggacctgtcggagaaggtggtctatagacgc

SEQ ID NO: 2312 - RNA, 62 nt, synthetic construct
  source 1..62: mol_type = other RNA
cccaggtctacatgttcctggtgaaatggcaggacctgtcggagaaggtggtctataggcgc

SEQ ID NO: 2313 - RNA, 62 nt, synthetic construct
  source 1..62: mol_type = other RNA
cccaggtttacatgttcctggtgaaatggcaggacctgtcggagaaggtggtctatcggcgc

SEQ ID NO: 2314 - RNA, 63 nt, synthetic construct
  source 1..63: mol_type = other RNA
ccccaggtatacatgttcctggtgaaatggcaggacctgtcggagaaggtggtctaccggcgc

SEQ ID NO: 2315 - RNA, 63 nt, synthetic construct
  source 1..63: mol_type = other RNA
ccccaggtatacatgttcctggtgaaatggcaggacctgtcggagaaggtggtctacaggcgc

SEQ ID NO: 2316 - RNA, 63 nt, synthetic construct
  source 1..63: mol_type = other RNA
ccccaggtttacatgttcctggtgaaatggcaggacctgtcggagaaggtggtctataggcgc

SEQ ID NO: 2317 - RNA, 63 nt, synthetic construct
  source 1..63: mol_type = other RNA
ccccaggtctacatgttcctggtgaaatggcaggacctgtcggagaaggtggtctatcggcgc

SEQ ID NO: 2318 - RNA, 63 nt, synthetic construct
  source 1..63: mol_type = other RNA
ccccaggtttacatgttcctggtgaaatggcaggacctgtcggagaaggtggtctaccggcgc

SEQ ID NO: 2319 - RNA, 63 nt, synthetic construct
  source 1..63: mol_type = other RNA
ccccaggtttacatgttcctggtgaaatggcaggacctgtcggagaaggtggtctacaggcgc

SEQ ID NO: 2320 - RNA, 63 nt, synthetic construct
  source 1..63: mol_type = other RNA
ccccaggtttacatgttcctggtgaaatggcaggacctgtcggagaaggtggtctacagacgc

SEQ ID NO: 2321 - RNA, 63 nt, synthetic construct
  source 1..63: mol_type = other RNA
ccccaggtgtacatgttcctggtgaaatggcaggacctgtcggagaaggtggtctatcggcgc

SEQ ID NO: 2322 - RNA, 63 nt, synthetic construct
  source 1..63: mol_type = other RNA
ccccaggtgtacatgttcctggtgaaatggcaggacctgtcggagaaggtggtctataggcgc

SEQ ID NO: 2323 - RNA, 63 nt, synthetic construct
  source 1..63: mol_type = other RNA
ccccaggtgtacatgttcctggtgaaatggcaggacctgtcggagaaggtggtctatagacgc

SEQ ID NO: 2324 - RNA, 63 nt, synthetic construct
  source 1..63: mol_type = other RNA
ccccaggtgtacatgttcctggtgaaatggcaggacctgtcggagaaggtggtctaccggcgc

SEQ ID NO: 2325 - RNA, 63 nt, synthetic construct
  source 1..63: mol_type = other RNA
ccccaggtgtacatgttcctggtgaaatggcaggacctgtcggagaaggtggtctacagacgc

SEQ ID NO: 2326 - RNA, 63 nt, synthetic construct
  source 1..63: mol_type = other RNA
ccccaggtatacatgttcctggtgaaatggcaggacctgtcggagaaggtggtctacagacgc

SEQ ID NO: 2327 - RNA, 63 nt, synthetic construct
  source 1..63: mol_type = other RNA
ccccaggtgtacatgttcctggtgaaatggcaggacctgtcggagaaggtggtctacaggcgc

SEQ ID NO: 2328 - RNA, 63 nt, synthetic construct
  source 1..63: mol_type = other RNA
ccccaggtttacatgttcctggtgaaatggcaggacctgtcggagaaggtggtctatagacgc

SEQ ID NO: 2329 - RNA, 63 nt, synthetic construct
  source 1..63: mol_type = other RNA
ccccaggtatacatgttcctggtgaaatggcaggacctgtcggagaaggtggtctatagacgc

SEQ ID NO: 2330 - RNA, 63 nt, synthetic construct
  source 1..63: mol_type = other RNA
ccccaggtatacatgttcctggtgaaatggcaggacctgtcggagaaggtggtctataggcgc

SEQ ID NO: 2331 - RNA, 63 nt, synthetic construct
  source 1..63: mol_type = other RNA
ccccaggtctacatgttcctggtgaaatggcaggacctgtcggagaaggtggtctacagacgc

SEQ ID NO: 2332 - RNA, 63 nt, synthetic construct
  source 1..63: mol_type = other RNA
ccccaggtctacatgttcctggtgaaatggcaggacctgtcggagaaggtggtctacaggcgc

SEQ ID NO: 2333 - RNA, 63 nt, synthetic construct
  source 1..63: mol_type = other RNA
ccccaggtctacatgttcctggtgaaatggcaggacctgtcggagaaggtggtctaccggcgc

SEQ ID NO: 2334 - RNA, 63 nt, synthetic construct
  source 1..63: mol_type = other RNA
ccccaggtctacatgttcctggtgaaatggcaggacctgtcggagaaggtggtctatagacgc

SEQ ID NO: 2335 - RNA, 63 nt, synthetic construct
  source 1..63: mol_type = other RNA
ccccaggtctacatgttcctggtgaaatggcaggacctgtcggagaaggtggtctataggcgc

SEQ ID NO: 2336 - RNA, 63 nt, synthetic construct
  source 1..63: mol_type = other RNA
ccccaggtttacatgttcctggtgaaatggcaggacctgtcggagaaggtggtctatcggcgc

SEQ ID NO: 2337 - RNA, 63 nt, synthetic construct
  source 1..63: mol_type = other RNA
ccccaggtatacatgttcctggtgaaatggcaggacctgtcggagaaggtggtctatcggcgc

SEQ ID NO: 2338 - RNA, 64 nt, synthetic construct
  source 1..64: mol_type = other RNA
cccccaggtctacatgttcctggtgaaatggcaggacctgtcggagaaggtggtctataggcgc

SEQ ID NO: 2339 - RNA, 64 nt, synthetic construct
  source 1..64: mol_type = other RNA
cccccaggtgtacatgttcctggtgaaatggcaggacctgtcggagaaggtggtctacagacgc

SEQ ID NO: 2340 - RNA, 64 nt, synthetic construct
  source 1..64: mol_type = other RNA
cccccaggtgtacatgttcctggtgaaatggcaggacctgtcggagaaggtggtctacaggcgc

SEQ ID NO: 2341 - RNA, 64 nt, synthetic construct
  source 1..64: mol_type = other RNA
cccccaggtgtacatgttcctggtgaaatggcaggacctgtcggagaaggtggtctaccggcgc

SEQ ID NO: 2342 - RNA, 64 nt, synthetic construct
  source 1..64: mol_type = other RNA
cccccaggtgtacatgttcctggtgaaatggcaggacctgtcggagaaggtggtctatagacgc

SEQ ID NO: 2343 - RNA, 64 nt, synthetic construct
  source 1..64: mol_type = other RNA
cccccaggtatacatgttcctggtgaaatggcaggacctgtcggagaaggtggtctataggcgc

SEQ ID NO: 2344 - RNA, 64 nt, synthetic construct
  source 1..64: mol_type = other RNA
cccccaggtgtacatgttcctggtgaaatggcaggacctgtcggagaaggtggtctataggcgc

SEQ ID NO: 2345 - RNA, 64 nt, synthetic construct
  source 1..64: mol_type = other RNA
cccccaggtttacatgttcctggtgaaatggcaggacctgtcggagaaggtggtctacagacgc

SEQ ID NO: 2346 - RNA, 64 nt, synthetic construct
  source 1..64: mol_type = other RNA
cccccaggtttacatgttcctggtgaaatggcaggacctgtcggagaaggtggtctacaggcgc

SEQ ID NO: 2347 - RNA, 64 nt, synthetic construct
  source 1..64: mol_type = other RNA
cccccaggtttacatgttcctggtgaaatggcaggacctgtcggagaaggtggtctaccggcgc

SEQ ID NO: 2348 - RNA, 64 nt, synthetic construct
  source 1..64: mol_type = other RNA
cccccaggtttacatgttcctggtgaaatggcaggacctgtcggagaaggtggtctatagacgc

SEQ ID NO: 2349 - RNA, 64 nt, synthetic construct
  source 1..64: mol_type = other RNA
cccccaggtttacatgttcctggtgaaatggcaggacctgtcggagaaggtggtctataggcgc

SEQ ID NO: 2350 - RNA, 64 nt, synthetic construct
  source 1..64: mol_type = other RNA
cccccaggtttacatgttcctggtgaaatggcaggacctgtcggagaaggtggtctatcggcgc

SEQ ID NO: 2351 - RNA, 64 nt, synthetic construct
  source 1..64: mol_type = other RNA
cccccaggtatacatgttcctggtgaaatggcaggacctgtcggagaaggtggtctacaggcgc

SEQ ID NO: 2352 - RNA, 64 nt, synthetic construct
  source 1..64: mol_type = other RNA
cccccaggtctacatgttcctggtgaaatggcaggacctgtcggagaaggtggtctatagacgc

SEQ ID NO: 2353 - RNA, 64 nt, synthetic construct
  source 1..64: mol_type = other RNA
cccccaggtctacatgttcctggtgaaatggcaggacctgtcggagaaggtggtctatcggcgc

SEQ ID NO: 2354 - RNA, 64 nt, synthetic construct
  source 1..64: mol_type = other RNA
cccccaggtatacatgttcctggtgaaatggcaggacctgtcggagaaggtggtctacagacgc

SEQ ID NO: 2355 - RNA, 64 nt, synthetic construct
  source 1..64: mol_type = other RNA
cccccaggtgtacatgttcctggtgaaatggcaggacctgtcggagaaggtggtctatcggcgc

SEQ ID NO: 2356 - RNA, 64 nt, synthetic construct
  source 1..64: mol_type = other RNA
cccccaggtatacatgttcctggtgaaatggcaggacctgtcggagaaggtggtctaccggcgc

SEQ ID NO: 2357 - RNA, 64 nt, synthetic construct
  source 1..64: mol_type = other RNA
cccccaggtctacatgttcctggtgaaatggcaggacctgtcggagaaggtggtctaccggcgc

SEQ ID NO: 2358 - RNA, 64 nt, synthetic construct
  source 1..64: mol_type = other RNA
cccccaggtctacatgttcctggtgaaatggcaggacctgtcggagaaggtggtctacaggcgc

SEQ ID NO: 2359 - RNA, 64 nt, synthetic construct
  source 1..64: mol_type = other RNA
cccccaggtctacatgttcctggtgaaatggcaggacctgtcggagaaggtggtctacagacgc

SEQ ID NO: 2360 - RNA, 64 nt, synthetic construct
  source 1..64: mol_type = other RNA
cccccaggtatacatgttcctggtgaaatggcaggacctgtcggagaaggtggtctatcggcgc

SEQ ID NO: 2361 - RNA, 64 nt, synthetic construct
  source 1..64: mol_type = other RNA
cccccaggtatacatgttcctggtgaaatggcaggacctgtcggagaaggtggtctatagacgc

SEQ ID NO: 2362 - RNA, 65 nt, synthetic construct
  source 1..65: mol_type = other RNA
tcccccaggtgtacatgttcctggtgaaatggcaggacctgtcggagaaggtggtctaccggcgc

SEQ ID NO: 2363 - RNA, 65 nt, synthetic construct
  source 1..65: mol_type = other RNA
tcccccaggtttacatgttcctggtgaaatggcaggacctgtcggagaaggtggtctacagacgc

SEQ ID NO: 2364 - RNA, 65 nt, synthetic construct
  source 1..65: mol_type = other RNA
tcccccaggtatacatgttcctggtgaaatggcaggacctgtcggagaaggtggtctaccggcgc

SEQ ID NO: 2365 - RNA, 65 nt, synthetic construct
  source 1..65: mol_type = other RNA
tcccccaggtatacatgttcctggtgaaatggcaggacctgtcggagaaggtggtctatagacgc

SEQ ID NO: 2366 - RNA, 65 nt, synthetic construct
  source 1..65: mol_type = other RNA
tcccccaggtctacatgttcctggtgaaatggcaggacctgtcggagaaggtggtctacaggcgc

SEQ ID NO: 2367 - RNA, 65 nt, synthetic construct
  source 1..65: mol_type = other RNA
tcccccaggtatacatgttcctggtgaaatggcaggacctgtcggagaaggtggtctacagacgc

SEQ ID NO: 2368 - RNA, 65 nt, synthetic construct
  source 1..65: mol_type = other RNA
tcccccaggtctacatgttcctggtgaaatggcaggacctgtcggagaaggtggtctaccggcgc

SEQ ID NO: 2369 - RNA, 65 nt, synthetic construct
  source 1..65: mol_type = other RNA
tcccccaggtctacatgttcctggtgaaatggcaggacctgtcggagaaggtggtctatagacgc

SEQ ID NO: 2370 - RNA, 65 nt, synthetic construct
  source 1..65: mol_type = other RNA
tcccccaggtctacatgttcctggtgaaatggcaggacctgtcggagaaggtggtctataggcgc

SEQ ID NO: 2371 - RNA, 65 nt, synthetic construct
  source 1..65: mol_type = other RNA
tcccccaggtctacatgttcctggtgaaatggcaggacctgtcggagaaggtggtctatcggcgc

SEQ ID NO: 2372 - RNA, 65 nt, synthetic construct
  source 1..65: mol_type = other RNA
tcccccaggtgtacatgttcctggtgaaatggcaggacctgtcggagaaggtggtctacagacgc

SEQ ID NO: 2373 - RNA, 65 nt, synthetic construct
  source 1..65: mol_type = other RNA
tcccccaggtgtacatgttcctggtgaaatggcaggacctgtcggagaaggtggtctacaggcgc

SEQ ID NO: 2374 - RNA, 65 nt, synthetic construct
  source 1..65: mol_type = other RNA
tcccccaggtatacatgttcctggtgaaatggcaggacctgtcggagaaggtggtctatcggcgc

SEQ ID NO: 2375 - RNA, 65 nt, synthetic construct
  source 1..65: mol_type = other RNA
tcccccaggtgtacatgttcctggtgaaatggcaggacctgtcggagaaggtggtctatagacgc

SEQ ID NO: 2376 - RNA, 65 nt, synthetic construct
  source 1..65: mol_type = other RNA
tcccccaggtctacatgttcctggtgaaatggcaggacctgtcggagaaggtggtctacagacgc

SEQ ID NO: 2377 - RNA, 65 nt, synthetic construct
  source 1..65: mol_type = other RNA
tcccccaggtgtacatgttcctggtgaaatggcaggacctgtcggagaaggtggtctatcggcgc

SEQ ID NO: 2378 - RNA, 65 nt, synthetic construct
  source 1..65: mol_type = other RNA
tcccccaggtttacatgttcctggtgaaatggcaggacctgtcggagaaggtggtctacaggcgc

SEQ ID NO: 2379 - RNA, 65 nt, synthetic construct
  source 1..65: mol_type = other RNA
tcccccaggtttacatgttcctggtgaaatggcaggacctgtcggagaaggtggtctaccggcgc

SEQ ID NO: 2380 - RNA, 65 nt, synthetic construct
  source 1..65: mol_type = other RNA
tcccccaggtttacatgttcctggtgaaatggcaggacctgtcggagaaggtggtctatagacgc

SEQ ID NO: 2381 - RNA, 65 nt, synthetic construct
  source 1..65: mol_type = other RNA
tcccccaggtttacatgttcctggtgaaatggcaggacctgtcggagaaggtggtctataggcgc

SEQ ID NO: 2382 - RNA, 65 nt, synthetic construct
  source 1..65: mol_type = other RNA
tcccccaggtttacatgttcctggtgaaatggcaggacctgtcggagaaggtggtctatcggcgc

SEQ ID NO: 2383 - RNA, 65 nt, synthetic construct
  source 1..65: mol_type = other RNA
tcccccaggtatacatgttcctggtgaaatggcaggacctgtcggagaaggtggtctataggcgc

SEQ ID NO: 2384 - RNA, 65 nt, synthetic construct
  source 1..65: mol_type = other RNA
tcccccaggtatacatgttcctggtgaaatggcaggacctgtcggagaaggtggtctacaggcgc

SEQ ID NO: 2385 - RNA, 65 nt, synthetic construct
  source 1..65: mol_type = other RNA
tcccccaggtgtacatgttcctggtgaaatggcaggacctgtcggagaaggtggtctataggcgc

SEQ ID NO: 2386 - RNA, 66 nt, synthetic construct
  source 1..66: mol_type = other RNA
ttcccccaggtatacatgttcctggtgaaatggcaggacctgtcggagaaggtggtctataggcgc

SEQ ID NO: 2387 - RNA, 66 nt, synthetic construct
  source 1..66: mol_type = other RNA
ttcccccaggtatacatgttcctggtgaaatggcaggacctgtcggagaaggtggtctacaggcgc

SEQ ID NO: 2388 - RNA, 66 nt, synthetic construct
  source 1..66: mol_type = other RNA
ttcccccaggtctacatgttcctggtgaaatggcaggacctgtcggagaaggtggtctatcggcgc

SEQ ID NO: 2389 - RNA, 66 nt, synthetic construct
  source 1..66: mol_type = other RNA
ttcccccaggtatacatgttcctggtgaaatggcaggacctgtcggagaaggtggtctatagacgc

SEQ ID NO: 2390 - RNA, 66 nt, synthetic construct
  source 1..66: mol_type = other RNA
ttcccccaggtatacatgttcctggtgaaatggcaggacctgtcggagaaggtggtctacagacgc

SEQ ID NO: 2391 - RNA, 66 nt, synthetic construct
  source 1..66: mol_type = other RNA
ttcccccaggtttacatgttcctggtgaaatggcaggacctgtcggagaaggtggtctataggcgc

SEQ ID NO: 2392 - RNA, 66 nt, synthetic construct
  source 1..66: mol_type = other RNA
ttcccccaggtttacatgttcctggtgaaatggcaggacctgtcggagaaggtggtctatcggcgc

SEQ ID NO: 2393 - RNA, 66 nt, synthetic construct
  source 1..66: mol_type = other RNA
ttcccccaggtttacatgttcctggtgaaatggcaggacctgtcggagaaggtggtctatagacgc

SEQ ID NO: 2394 - RNA, 66 nt, synthetic construct
  source 1..66: mol_type = other RNA
ttcccccaggtttacatgttcctggtgaaatggcaggacctgtcggagaaggtggtctaccggcgc

SEQ ID NO: 2395 - RNA, 66 nt, synthetic construct
  source 1..66: mol_type = other RNA
ttcccccaggtttacatgttcctggtgaaatggcaggacctgtcggagaaggtggtctacaggcgc

SEQ ID NO: 2396 - RNA, 66 nt, synthetic construct
  source 1..66: mol_type = other RNA
ttcccccaggtatacatgttcctggtgaaatggcaggacctgtcggagaaggtggtctatcggcgc

SEQ ID NO: 2397 - RNA, 66 nt, synthetic construct
  source 1..66: mol_type = other RNA
ttcccccaggtctacatgttcctggtgaaatggcaggacctgtcggagaaggtggtctacagacgc

SEQ ID NO: 2398 - RNA, 66 nt, synthetic construct
  source 1..66: mol_type = other RNA
ttcccccaggtctacatgttcctggtgaaatggcaggacctgtcggagaaggtggtctacaggcgc

SEQ ID NO: 2399 - RNA, 66 nt, synthetic construct
  source 1..66: mol_type = other RNA
ttcccccaggtctacatgttcctggtgaaatggcaggacctgtcggagaaggtggtctaccggcgc

SEQ ID NO: 2400 - RNA, 66 nt, synthetic construct
  source 1..66: mol_type = other RNA
ttcccccaggtctacatgttcctggtgaaatggcaggacctgtcggagaaggtggtctatagacgc

SEQ ID NO: 2401 - RNA, 66 nt, synthetic construct
  source 1..66: mol_type = other RNA
ttcccccaggtctacatgttcctggtgaaatggcaggacctgtcggagaaggtggtctataggcgc

SEQ ID NO: 2402 - RNA, 66 nt, synthetic construct
  source 1..66: mol_type = other RNA
ttcccccaggtgtacatgttcctggtgaaatggcaggacctgtcggagaaggtggtctataggcgc

SEQ ID NO: 2403 - RNA, 66 nt, synthetic construct
  source 1..66: mol_type = other RNA
ttcccccaggtgtacatgttcctggtgaaatggcaggacctgtcggagaaggtggtctacaggcgc

SEQ ID NO: 2404 - RNA, 66 nt, synthetic construct
  source 1..66: mol_type = other RNA
ttcccccaggtgtacatgttcctggtgaaatggcaggacctgtcggagaaggtggtctaccggcgc

SEQ ID NO: 2405 - RNA, 66 nt, synthetic construct
  source 1..66: mol_type = other RNA
ttcccccaggtatacatgttcctggtgaaatggcaggacctgtcggagaaggtggtctaccggcgc

SEQ ID NO: 2406 - RNA, 66 nt, synthetic construct
  source 1..66: mol_type = other RNA
ttcccccaggtgtacatgttcctggtgaaatggcaggacctgtcggagaaggtggtctatagacgc

SEQ ID NO: 2407 - RNA, 66 nt, synthetic construct
  source 1..66: mol_type = other RNA
ttcccccaggtgtacatgttcctggtgaaatggcaggacctgtcggagaaggtggtctatcggcgc

SEQ ID NO: 2408 - RNA, 66 nt, synthetic construct
  source 1..66: mol_type = other RNA
ttcccccaggtttacatgttcctggtgaaatggcaggacctgtcggagaaggtggtctacagacgc

SEQ ID NO: 2409 - RNA, 66 nt, synthetic construct
  source 1..66: mol_type = other RNA
ttcccccaggtgtacatgttcctggtgaaatggcaggacctgtcggagaaggtggtctacagacgc

SEQ ID NO: 2410 - RNA, 67 nt, synthetic construct
  source 1..67: mol_type = other RNA
tttcccccaggtttacatgttcctggtgaaatggcaggacctgtcggagaaggtggtctatagacgc

SEQ ID NO: 2411 - RNA, 67 nt, synthetic construct
  source 1..67: mol_type = other RNA
tttcccccaggtgtacatgttcctggtgaaatggcaggacctgtcggagaaggtggtctacagacgc

SEQ ID NO: 2412 - RNA, 67 nt, synthetic construct
  source 1..67: mol_type = other RNA
tttcccccaggtgtacatgttcctggtgaaatggcaggacctgtcggagaaggtggtctacaggcgc

SEQ ID NO: 2413 - RNA, 67 nt, synthetic construct
  source 1..67: mol_type = other RNA
tttcccccaggtgtacatgttcctggtgaaatggcaggacctgtcggagaaggtggtctatagacgc

SEQ ID NO: 2414 - RNA, 67 nt, synthetic construct
  source 1..67: mol_type = other RNA
tttcccccaggtgtacatgttcctggtgaaatggcaggacctgtcggagaaggtggtctataggcgc

SEQ ID NO: 2415 - RNA, 67 nt, synthetic construct
  source 1..67: mol_type = other RNA
tttcccccaggtttacatgttcctggtgaaatggcaggacctgtcggagaaggtggtctaccggcgc

SEQ ID NO: 2416 - RNA, 67 nt, synthetic construct
  source 1..67: mol_type = other RNA
tttcccccaggtttacatgttcctggtgaaatggcaggacctgtcggagaaggtggtctacagacgc

SEQ ID NO: 2417 - RNA, 67 nt, synthetic construct
  source 1..67: mol_type = other RNA
tttcccccaggtttacatgttcctggtgaaatggcaggacctgtcggagaaggtggtctacaggcgc

SEQ ID NO: 2418 - RNA, 67 nt, synthetic construct
  source 1..67: mol_type = other RNA
tttcccccaggtctacatgttcctggtgaaatggcaggacctgtcggagaaggtggtctatcggcgc

SEQ ID NO: 2419 - RNA, 67 nt, synthetic construct
  source 1..67: mol_type = other RNA
tttcccccaggtgtacatgttcctggtgaaatggcaggacctgtcggagaaggtggtctatcggcgc

SEQ ID NO: 2420 - RNA, 67 nt, synthetic construct
  source 1..67: mol_type = other RNA
tttcccccaggtctacatgttcctggtgaaatggcaggacctgtcggagaaggtggtctataggcgc

SEQ ID NO: 2421 - RNA, 67 nt, synthetic construct
  source 1..67: mol_type = other RNA
tttcccccaggtctacatgttcctggtgaaatggcaggacctgtcggagaaggtggtctaccggcgc

SEQ ID NO: 2422 - RNA, 67 nt, synthetic construct
  source 1..67: mol_type = other RNA
tttcccccaggtctacatgttcctggtgaaatggcaggacctgtcggagaaggtggtctacaggcgc

SEQ ID NO: 2423 - RNA, 67 nt, synthetic construct
  source 1..67: mol_type = other RNA
tttcccccaggtctacatgttcctggtgaaatggcaggacctgtcggagaaggtggtctacagacgc

SEQ ID NO: 2424 - RNA, 67 nt, synthetic construct
  source 1..67: mol_type = other RNA
tttcccccaggtctacatgttcctggtgaaatggcaggacctgtcggagaaggtggtctatagacgc

SEQ ID NO: 2425 - RNA, 67 nt, synthetic construct
  source 1..67: mol_type = other RNA
tttcccccaggtatacatgttcctggtgaaatggcaggacctgtcggagaaggtggtctatcggcgc

SEQ ID NO: 2426 - RNA, 67 nt, synthetic construct
  source 1..67: mol_type = other RNA
tttcccccaggtatacatgttcctggtgaaatggcaggacctgtcggagaaggtggtctatagacgc

SEQ ID NO: 2427 - RNA, 67 nt, synthetic construct
  source 1..67: mol_type = other RNA
tttcccccaggtatacatgttcctggtgaaatggcaggacctgtcggagaaggtggtctaccggcgc

SEQ ID NO: 2428 - RNA, 67 nt, synthetic construct
  source 1..67: mol_type = other RNA
tttcccccaggtatacatgttcctggtgaaatggcaggacctgtcggagaaggtggtctacaggcgc

SEQ ID NO: 2429 - RNA, 67 nt, synthetic construct
  source 1..67: mol_type = other RNA
tttcccccaggtatacatgttcctggtgaaatggcaggacctgtcggagaaggtggtctacagacgc

SEQ ID NO: 2430 - RNA, 67 nt, synthetic construct
  source 1..67: mol_type = other RNA
tttcccccaggtttacatgttcctggtgaaatggcaggacctgtcggagaaggtggtctatcggcgc

SEQ ID NO: 2431 - RNA, 67 nt, synthetic construct
  source 1..67: mol_type = other RNA
tttcccccaggtatacatgttcctggtgaaatggcaggacctgtcggagaaggtggtctataggcgc

SEQ ID NO: 2432 - RNA, 67 nt, synthetic construct
  source 1..67: mol_type = other RNA
tttcccccaggtttacatgttcctggtgaaatggcaggacctgtcggagaaggtggtctataggcgc

SEQ ID NO: 2433 - RNA, 67 nt, synthetic construct
  source 1..67: mol_type = other RNA
tttcccccaggtgtacatgttcctggtgaaatggcaggacctgtcggagaaggtggtctaccggcgc

SEQ ID NO: 2434 - RNA, 68 nt, synthetic construct
  source 1..68: mol_type = other RNA
ctttcccccaggtctacatgttcctggtgaaatggcaggacctgtcggagaaggtggtctacagacgc

SEQ ID NO: 2435 - RNA, 68 nt, synthetic construct
  source 1..68: mol_type = other RNA
ctttcccccaggtgtacatgttcctggtgaaatggcaggacctgtcggagaaggtggtctaccggcgc

SEQ ID NO: 2436 - RNA, 68 nt, synthetic construct
  source 1..68: mol_type = other RNA
ctttcccccaggtctacatgttcctggtgaaatggcaggacctgtcggagaaggtggtctacaggcgc

SEQ ID NO: 2437 - RNA, 68 nt, synthetic construct
  source 1..68: mol_type = other RNA
ctttcccccaggtttacatgttcctggtgaaatggcaggacctgtcggagaaggtggtctatcggcgc

SEQ ID NO: 2438 - RNA, 68 nt, synthetic construct
  source 1..68: mol_type = other RNA
ctttcccccaggtatacatgttcctggtgaaatggcaggacctgtcggagaaggtggtctacagacgc

SEQ ID NO: 2439 - RNA, 68 nt, synthetic construct
  source 1..68: mol_type = other RNA
ctttcccccaggtttacatgttcctggtgaaatggcaggacctgtcggagaaggtggtctataggcgc

SEQ ID NO: 2440 - RNA, 68 nt, synthetic construct
  source 1..68: mol_type = other RNA
ctttcccccaggtttacatgttcctggtgaaatggcaggacctgtcggagaaggtggtctatagacgc

SEQ ID NO: 2441 - RNA, 68 nt, synthetic construct
  source 1..68: mol_type = other RNA
ctttcccccaggtttacatgttcctggtgaaatggcaggacctgtcggagaaggtggtctaccggcgc

SEQ ID NO: 2442 - RNA, 68 nt, synthetic construct
  source 1..68: mol_type = other RNA
ctttcccccaggtttacatgttcctggtgaaatggcaggacctgtcggagaaggtggtctacaggcgc

SEQ ID NO: 2443 - RNA, 68 nt, synthetic construct
  source 1..68: mol_type = other RNA
ctttcccccaggtttacatgttcctggtgaaatggcaggacctgtcggagaaggtggtctacagacgc

SEQ ID NO: 2444 - RNA, 68 nt, synthetic construct
  source 1..68: mol_type = other RNA
ctttcccccaggtctacatgttcctggtgaaatggcaggacctgtcggagaaggtggtctatagacgc

SEQ ID NO: 2445 - RNA, 68 nt, synthetic construct
  source 1..68: mol_type = other RNA
ctttcccccaggtgtacatgttcctggtgaaatggcaggacctgtcggagaaggtggtctatagacgc

SEQ ID NO: 2446 - RNA, 68 nt, synthetic construct
  source 1..68: mol_type = other RNA
ctttcccccaggtgtacatgttcctggtgaaatggcaggacctgtcggagaaggtggtctataggcgc

SEQ ID NO: 2447 - RNA, 68 nt, synthetic construct
  source 1..68: mol_type = other RNA
ctttcccccaggtctacatgttcctggtgaaatggcaggacctgtcggagaaggtggtctaccggcgc

SEQ ID NO: 2448 - RNA, 68 nt, synthetic construct
  source 1..68: mol_type = other RNA
ctttcccccaggtgtacatgttcctggtgaaatggcaggacctgtcggagaaggtggtctacaggcgc

SEQ ID NO: 2449 - RNA, 68 nt, synthetic construct
  source 1..68: mol_type = other RNA
ctttcccccaggtgtacatgttcctggtgaaatggcaggacctgtcggagaaggtggtctatcggcgc

SEQ ID NO: 2450 - RNA, 68 nt, synthetic construct
  source 1..68: mol_type = other RNA
ctttcccccaggtctacatgttcctggtgaaatggcaggacctgtcggagaaggtggtctataggcgc

SEQ ID NO: 2451 - RNA, 68 nt, synthetic construct
  source 1..68: mol_type = other RNA
ctttcccccaggtctacatgttcctggtgaaatggcaggacctgtcggagaaggtggtctatcggcgc

SEQ ID NO: 2452 - RNA, 68 nt, synthetic construct
  source 1..68: mol_type = other RNA
ctttcccccaggtatacatgttcctggtgaaatggcaggacctgtcggagaaggtggtctaccggcgc

SEQ ID NO: 2453 - RNA, 68 nt, synthetic construct
  source 1..68: mol_type = other RNA
ctttcccccaggtatacatgttcctggtgaaatggcaggacctgtcggagaaggtggtctatagacgc

SEQ ID NO: 2454 - RNA, 68 nt, synthetic construct
  source 1..68: mol_type = other RNA
ctttcccccaggtatacatgttcctggtgaaatggcaggacctgtcggagaaggtggtctataggcgc

SEQ ID NO: 2455 - RNA, 68 nt, synthetic construct
  source 1..68: mol_type = other RNA
ctttcccccaggtatacatgttcctggtgaaatggcaggacctgtcggagaaggtggtctatcggcgc

SEQ ID NO: 2456 - RNA, 68 nt, synthetic construct
  source 1..68: mol_type = other RNA
ctttcccccaggtatacatgttcctggtgaaatggcaggacctgtcggagaaggtggtctacaggcgc

SEQ ID NO: 2457 - RNA, 68 nt, synthetic construct
  source 1..68: mol_type = other RNA
ctttcccccaggtgtacatgttcctggtgaaatggcaggacctgtcggagaaggtggtctacagacgc

SEQ ID NO: 2458 - RNA, 69 nt, synthetic construct
  source 1..69: mol_type = other RNA
gctttcccccaggtctacatgttcctggtgaaatggcaggacctgtcggagaaggtggtctacagacgc

SEQ ID NO: 2459 - RNA, 69 nt, synthetic construct
  source 1..69: mol_type = other RNA
gctttcccccaggtatacatgttcctggtgaaatggcaggacctgtcggagaaggtggtctaccggcgc

SEQ ID NO: 2460 - RNA, 69 nt, synthetic construct
  source 1..69: mol_type = other RNA
gctttcccccaggtatacatgttcctggtgaaatggcaggacctgtcggagaaggtggtctatagacgc

SEQ ID NO: 2461 - RNA, 69 nt, synthetic construct
  source 1..69: mol_type = other RNA
gctttcccccaggtttacatgttcctggtgaaatggcaggacctgtcggagaaggtggtctatcggcgc

SEQ ID NO: 2462 - RNA, 69 nt, synthetic construct
  source 1..69: mol_type = other RNA
gctttcccccaggtatacatgttcctggtgaaatggcaggacctgtcggagaaggtggtctatcggcgc

SEQ ID NO: 2463 - RNA, 69 nt, synthetic construct
  source 1..69: mol_type = other RNA
gctttcccccaggtgtacatgttcctggtgaaatggcaggacctgtcggagaaggtggtctatcggcgc

SEQ ID NO: 2464 - RNA, 69 nt, synthetic construct
  source 1..69: mol_type = other RNA
gctttcccccaggtgtacatgttcctggtgaaatggcaggacctgtcggagaaggtggtctacagacgc

SEQ ID NO: 2465 - RNA, 69 nt, synthetic construct
  source 1..69: mol_type = other RNA
gctttcccccaggtatacatgttcctggtgaaatggcaggacctgtcggagaaggtggtctacaggcgc

SEQ ID NO: 2466 - RNA, 69 nt, synthetic construct
  source 1..69: mol_type = other RNA
gctttcccccaggtctacatgttcctggtgaaatggcaggacctgtcggagaaggtggtctacaggcgc

SEQ ID NO: 2467 - RNA, 69 nt, synthetic construct
  source 1..69: mol_type = other RNA
gctttcccccaggtctacatgttcctggtgaaatggcaggacctgtcggagaaggtggtctaccggcgc

SEQ ID NO: 2468 - RNA, 69 nt, synthetic construct
  source 1..69: mol_type = other RNA
gctttcccccaggtttacatgttcctggtgaaatggcaggacctgtcggagaaggtggtctataggcgc

SEQ ID NO: 2469 - RNA, 69 nt, synthetic construct
  source 1..69: mol_type = other RNA
gctttcccccaggtttacatgttcctggtgaaatggcaggacctgtcggagaaggtggtctatagacgc

SEQ ID NO: 2470 - RNA, 69 nt, synthetic construct
  source 1..69: mol_type = other RNA
gctttcccccaggtttacatgttcctggtgaaatggcaggacctgtcggagaaggtggtctaccggcgc

SEQ ID NO: 2471 - RNA, 69 nt, synthetic construct
  source 1..69: mol_type = other RNA
gctttcccccaggtttacatgttcctggtgaaatggcaggacctgtcggagaaggtggtctacaggcgc

SEQ ID NO: 2472 - RNA, 69 nt, synthetic construct
  source 1..69: mol_type = other RNA
gctttcccccaggtttacatgttcctggtgaaatggcaggacctgtcggagaaggtggtctacagacgc

SEQ ID NO: 2473 - RNA, 69 nt, synthetic construct
  source 1..69: mol_type = other RNA
gctttcccccaggtatacatgttcctggtgaaatggcaggacctgtcggagaaggtggtctataggcgc

SEQ ID NO: 2474 - RNA, 69 nt, synthetic construct
  source 1..69: mol_type = other RNA
gctttcccccaggtatacatgttcctggtgaaatggcaggacctgtcggagaaggtggtctacagacgc

SEQ ID NO: 2475 - RNA, 69 nt, synthetic construct
  source 1..69: mol_type = other RNA
gctttcccccaggtgtacatgttcctggtgaaatggcaggacctgtcggagaaggtggtctataggcgc

SEQ ID NO: 2476 - RNA, 69 nt, synthetic construct
  source 1..69: mol_type = other RNA
gctttcccccaggtgtacatgttcctggtgaaatggcaggacctgtcggagaaggtggtctaccggcgc

SEQ ID NO: 2477 - RNA, 69 nt, synthetic construct
  source 1..69: mol_type = other RNA
gctttcccccaggtgtacatgttcctggtgaaatggcaggacctgtcggagaaggtggtctacaggcgc

SEQ ID NO: 2478 - RNA, 69 nt, synthetic construct
  source 1..69: mol_type = other RNA
gctttcccccaggtctacatgttcctggtgaaatggcaggacctgtcggagaaggtggtctatcggcgc

SEQ ID NO: 2479 - RNA, 69 nt, synthetic construct
  source 1..69: mol_type = other RNA
gctttcccccaggtctacatgttcctggtgaaatggcaggacctgtcggagaaggtggtctataggcgc

SEQ ID NO: 2480 - RNA, 69 nt, synthetic construct
  source 1..69: mol_type = other RNA
gctttcccccaggtctacatgttcctggtgaaatggcaggacctgtcggagaaggtggtctatagacgc

SEQ ID NO: 2481 - RNA, 69 nt, synthetic construct
  source 1..69: mol_type = other RNA
gctttcccccaggtgtacatgttcctggtgaaatggcaggacctgtcggagaaggtggtctatagacgc

SEQ ID NO: 2482 - RNA, 70 nt, synthetic construct
  source 1..70: mol_type = other RNA
ggctttcccccaggtctacatgttcctggtgaaatggcaggacctgtcggagaaggtggtctatcggcgc

SEQ ID NO: 2483 - RNA, 70 nt, synthetic construct
  source 1..70: mol_type = other RNA
ggctttcccccaggtatacatgttcctggtgaaatggcaggacctgtcggagaaggtggtctacagacgc

SEQ ID NO: 2484 - RNA, 70 nt, synthetic construct
  source 1..70: mol_type = other RNA
ggctttcccccaggtgtacatgttcctggtgaaatggcaggacctgtcggagaaggtggtctaccggcgc

SEQ ID NO: 2485 - RNA, 70 nt, synthetic construct
  source 1..70: mol_type = other RNA
ggctttcccccaggtttacatgttcctggtgaaatggcaggacctgtcggagaaggtggtctatcggcgc

SEQ ID NO: 2486 - RNA, 70 nt, synthetic construct
  source 1..70: mol_type = other RNA
ggctttcccccaggtttacatgttcctggtgaaatggcaggacctgtcggagaaggtggtctataggcgc

SEQ ID NO: 2487 - RNA, 70 nt, synthetic construct
  source 1..70: mol_type = other RNA
ggctttcccccaggtttacatgttcctggtgaaatggcaggacctgtcggagaaggtggtctatagacgc

SEQ ID NO: 2488 - RNA, 70 nt, synthetic construct
  source 1..70: mol_type = other RNA
ggctttcccccaggtttacatgttcctggtgaaatggcaggacctgtcggagaaggtggtctaccggcgc

SEQ ID NO: 2489 - RNA, 70 nt, synthetic construct
  source 1..70: mol_type = other RNA
ggctttcccccaggtttacatgttcctggtgaaatggcaggacctgtcggagaaggtggtctacaggcgc

SEQ ID NO: 2490 - RNA, 70 nt, synthetic construct
  source 1..70: mol_type = other RNA
ggctttcccccaggtttacatgttcctggtgaaatggcaggacctgtcggagaaggtggtctacagacgc

SEQ ID NO: 2491 - RNA, 70 nt, synthetic construct
  source 1..70: mol_type = other RNA
ggctttcccccaggtgtacatgttcctggtgaaatggcaggacctgtcggagaaggtggtctataggcgc

SEQ ID NO: 2492 - RNA, 70 nt, synthetic construct
  source 1..70: mol_type = other RNA
ggctttcccccaggtgtacatgttcctggtgaaatggcaggacctgtcggagaaggtggtctatagacgc

SEQ ID NO: 2493 - RNA, 70 nt, synthetic construct
  source 1..70: mol_type = other RNA
ggctttcccccaggtatacatgttcctggtgaaatggcaggacctgtcggagaaggtggtctacaggcgc

SEQ ID NO: 2494 - RNA, 70 nt, synthetic construct
  source 1..70: mol_type = other RNA
ggctttcccccaggtgtacatgttcctggtgaaatggcaggacctgtcggagaaggtggtctacagacgc

SEQ ID NO: 2495 - RNA, 70 nt, synthetic construct
  source 1..70: mol_type = other RNA
ggctttcccccaggtgtacatgttcctggtgaaatggcaggacctgtcggagaaggtggtctacaggcgc

SEQ ID NO: 2496 - RNA, 70 nt, synthetic construct
  source 1..70: mol_type = other RNA
ggctttcccccaggtctacatgttcctggtgaaatggcaggacctgtcggagaaggtggtctataggcgc

SEQ ID NO: 2497 - RNA, 70 nt, synthetic construct
  source 1..70: mol_type = other RNA
ggctttcccccaggtctacatgttcctggtgaaatggcaggacctgtcggagaaggtggtctaccggcgc

SEQ ID NO: 2498 - RNA, 70 nt, synthetic construct
  source 1..70: mol_type = other RNA
ggctttcccccaggtctacatgttcctggtgaaatggcaggacctgtcggagaaggtggtctacaggcgc

SEQ ID NO: 2499 - RNA, 70 nt, synthetic construct
  source 1..70: mol_type = other RNA
ggctttcccccaggtctacatgttcctggtgaaatggcaggacctgtcggagaaggtggtctacagacgc

SEQ ID NO: 2500 - RNA, 70 nt, synthetic construct
  source 1..70: mol_type = other RNA
ggctttcccccaggtatacatgttcctggtgaaatggcaggacctgtcggagaaggtggtctataggcgc

SEQ ID NO: 2501 - RNA, 70 nt, synthetic construct
  source 1..70: mol_type = other RNA
ggctttcccccaggtatacatgttcctggtgaaatggcaggacctgtcggagaaggtggtctatagacgc

SEQ ID NO: 2502 - RNA, 70 nt, synthetic construct
  source 1..70: mol_type = other RNA
ggctttcccccaggtatacatgttcctggtgaaatggcaggacctgtcggagaaggtggtctaccggcgc

SEQ ID NO: 2503 - RNA, 70 nt, synthetic construct
  source 1..70: mol_type = other RNA
ggctttcccccaggtatacatgttcctggtgaaatggcaggacctgtcggagaaggtggtctatcggcgc

SEQ ID NO: 2504 - RNA, 70 nt, synthetic construct
  source 1..70: mol_type = other RNA
ggctttcccccaggtctacatgttcctggtgaaatggcaggacctgtcggagaaggtggtctatagacgc

SEQ ID NO: 2505 - RNA, 70 nt, synthetic construct
  source 1..70: mol_type = other RNA
ggctttcccccaggtgtacatgttcctggtgaaatggcaggacctgtcggagaaggtggtctatcggcgc

SEQ ID NO: 2506 - RNA, 71 nt, synthetic construct
  source 1..71: mol_type = other RNA
tggctttcccccaggtctacatgttcctggtgaaatggcaggacctgtcggagaaggtggtctataggcgc

SEQ ID NO: 2507 - RNA, 71 nt, synthetic construct
  source 1..71: mol_type = other RNA
tggctttcccccaggtatacatgttcctggtgaaatggcaggacctgtcggagaaggtggtctacagacgc

SEQ ID NO: 2508 - RNA, 71 nt, synthetic construct
  source 1..71: mol_type = other RNA
tggctttcccccaggtgtacatgttcctggtgaaatggcaggacctgtcggagaaggtggtctacaggcgc

SEQ ID NO: 2509 - RNA, 71 nt, synthetic construct
  source 1..71: mol_type = other RNA
tggctttcccccaggtatacatgttcctggtgaaatggcaggacctgtcggagaaggtggtctaccggcgc

SEQ ID NO: 2510 - RNA, 71 nt, synthetic construct
  source 1..71: mol_type = other RNA
tggctttcccccaggtttacatgttcctggtgaaatggcaggacctgtcggagaaggtggtctacagacgc

SEQ ID NO: 2511 - RNA, 71 nt, synthetic construct
  source 1..71: mol_type = other RNA
tggctttcccccaggtgtacatgttcctggtgaaatggcaggacctgtcggagaaggtggtctatagacgc

SEQ ID NO: 2512 - RNA, 71 nt, synthetic construct
  source 1..71: mol_type = other RNA
tggctttcccccaggtgtacatgttcctggtgaaatggcaggacctgtcggagaaggtggtctataggcgc

SEQ ID NO: 2513 - RNA, 71 nt, synthetic construct
  source 1..71: mol_type = other RNA
tggctttcccccaggtgtacatgttcctggtgaaatggcaggacctgtcggagaaggtggtctatcggcgc

SEQ ID NO: 2514 - RNA, 71 nt, synthetic construct
  source 1..71: mol_type = other RNA
tggctttcccccaggtgtacatgttcctggtgaaatggcaggacctgtcggagaaggtggtctacagacgc

SEQ ID NO: 2515 - RNA, 71 nt, synthetic construct
  source 1..71: mol_type = other RNA
tggctttcccccaggtttacatgttcctggtgaaatggcaggacctgtcggagaaggtggtctacaggcgc

SEQ ID NO: 2516 - RNA, 71 nt, synthetic construct
  source 1..71: mol_type = other RNA
tggctttcccccaggtttacatgttcctggtgaaatggcaggacctgtcggagaaggtggtctatagacgc

SEQ ID NO: 2517 - RNA, 71 nt, synthetic construct
  source 1..71: mol_type = other RNA
tggctttcccccaggtttacatgttcctggtgaaatggcaggacctgtcggagaaggtggtctataggcgc

SEQ ID NO: 2518 - RNA, 71 nt, synthetic construct
  source 1..71: mol_type = other RNA
tggctttcccccaggtttacatgttcctggtgaaatggcaggacctgtcggagaaggtggtctatcggcgc

SEQ ID NO: 2519 - RNA, 71 nt, synthetic construct
  source 1..71: mol_type = other RNA
tggctttcccccaggtttacatgttcctggtgaaatggcaggacctgtcggagaaggtggtctaccggcgc

SEQ ID NO: 2520 - RNA, 71 nt, synthetic construct
  source 1..71: mol_type = other RNA
tggctttcccccaggtctacatgttcctggtgaaatggcaggacctgtcggagaaggtggtctatcggcgc

SEQ ID NO: 2521 - RNA, 71 nt, synthetic construct
  source 1..71: mol_type = other RNA
tggctttcccccaggtctacatgttcctggtgaaatggcaggacctgtcggagaaggtggtctatagacgc

SEQ ID NO: 2522 - RNA, 71 nt, synthetic construct
  source 1..71: mol_type = other RNA
tggctttcccccaggtctacatgttcctggtgaaatggcaggacctgtcggagaaggtggtctaccggcgc

SEQ ID NO: 2523 - RNA, 71 nt, synthetic construct
  source 1..71: mol_type = other RNA
tggctttcccccaggtctacatgttcctggtgaaatggcaggacctgtcggagaaggtggtctacaggcgc

SEQ ID NO: 2524 - RNA, 71 nt, synthetic construct
  source 1..71: mol_type = other RNA
tggctttcccccaggtctacatgttcctggtgaaatggcaggacctgtcggagaaggtggtctacagacgc

SEQ ID NO: 2525 - RNA, 71 nt, synthetic construct
  source 1..71: mol_type = other RNA
tggctttcccccaggtatacatgttcctggtgaaatggcaggacctgtcggagaaggtggtctatcggcgc

SEQ ID NO: 2526 - RNA, 71 nt, synthetic construct
  source 1..71: mol_type = other RNA
tggctttcccccaggtatacatgttcctggtgaaatggcaggacctgtcggagaaggtggtctataggcgc

SEQ ID NO: 2527 - RNA, 71 nt, synthetic construct
  source 1..71: mol_type = other RNA
tggctttcccccaggtatacatgttcctggtgaaatggcaggacctgtcggagaaggtggtctatagacgc

SEQ ID NO: 2528 - RNA, 71 nt, synthetic construct
  source 1..71: mol_type = other RNA
tggctttcccccaggtatacatgttcctggtgaaatggcaggacctgtcggagaaggtggtctacaggcgc

SEQ ID NO: 2529 - RNA, 71 nt, synthetic construct
  source 1..71: mol_type = other RNA
tggctttcccccaggtgtacatgttcctggtgaaatggcaggacctgtcggagaaggtggtctaccggcgc

SEQ ID NO: 2530 - RNA, 72 nt, synthetic construct
  source 1..72: mol_type = other RNA
ctggctttcccccaggtatacatgttcctggtgaaatggcaggacctgtcggagaaggtggtctataggcgc

SEQ ID NO: 2531 - RNA, 72 nt, synthetic construct
  source 1..72: mol_type = other RNA
ctggctttcccccaggtatacatgttcctggtgaaatggcaggacctgtcggagaaggtggtctatagacgc

SEQ ID NO: 2532 - RNA, 72 nt, synthetic construct
  source 1..72: mol_type = other RNA
ctggctttcccccaggtatacatgttcctggtgaaatggcaggacctgtcggagaaggtggtctaccggcgc

SEQ ID NO: 2533 - RNA, 72 nt, synthetic construct
  source 1..72: mol_type = other RNA
ctggctttcccccaggtatacatgttcctggtgaaatggcaggacctgtcggagaaggtggtctatcggcgc

SEQ ID NO: 2534 - RNA, 72 nt, synthetic construct
  source 1..72: mol_type = other RNA
ctggctttcccccaggtctacatgttcctggtgaaatggcaggacctgtcggagaaggtggtctacagacgc

SEQ ID NO: 2535 - RNA, 72 nt, synthetic construct
  source 1..72: mol_type = other RNA
ctggctttcccccaggtctacatgttcctggtgaaatggcaggacctgtcggagaaggtggtctatagacgc

SEQ ID NO: 2536 - RNA, 72 nt, synthetic construct
  source 1..72: mol_type = other RNA
ctggctttcccccaggtctacatgttcctggtgaaatggcaggacctgtcggagaaggtggtctacaggcgc

SEQ ID NO: 2537 - RNA, 72 nt, synthetic construct
  source 1..72: mol_type = other RNA
ctggctttcccccaggtctacatgttcctggtgaaatggcaggacctgtcggagaaggtggtctatcggcgc

SEQ ID NO: 2538 - RNA, 72 nt, synthetic construct
  source 1..72: mol_type = other RNA
ctggctttcccccaggtgtacatgttcctggtgaaatggcaggacctgtcggagaaggtggtctaccggcgc

SEQ ID NO: 2539 - RNA, 72 nt, synthetic construct
  source 1..72: mol_type = other RNA
ctggctttcccccaggtatacatgttcctggtgaaatggcaggacctgtcggagaaggtggtctacagacgc

SEQ ID NO: 2540 - RNA, 72 nt, synthetic construct
  source 1..72: mol_type = other RNA
ctggctttcccccaggtctacatgttcctggtgaaatggcaggacctgtcggagaaggtggtctataggcgc

SEQ ID NO: 2541 - RNA, 72 nt, synthetic construct
  source 1..72: mol_type = other RNA
ctggctttcccccaggtctacatgttcctggtgaaatggcaggacctgtcggagaaggtggtctaccggcgc

SEQ ID NO: 2542 - RNA, 72 nt, synthetic construct
  source 1..72: mol_type = other RNA
ctggctttcccccaggtgtacatgttcctggtgaaatggcaggacctgtcggagaaggtggtctacagacgc

SEQ ID NO: 2543 - RNA, 72 nt, synthetic construct
  source 1..72: mol_type = other RNA
ctggctttcccccaggtttacatgttcctggtgaaatggcaggacctgtcggagaaggtggtctacagacgc

SEQ ID NO: 2544 - RNA, 72 nt, synthetic construct
  source 1..72: mol_type = other RNA
ctggctttcccccaggtatacatgttcctggtgaaatggcaggacctgtcggagaaggtggtctacaggcgc

SEQ ID NO: 2545 - RNA, 72 nt, synthetic construct
  source 1..72: mol_type = other RNA
ctggctttcccccaggtgtacatgttcctggtgaaatggcaggacctgtcggagaaggtggtctatagacgc

SEQ ID NO: 2546 - RNA, 72 nt, synthetic construct
  source 1..72: mol_type = other RNA
ctggctttcccccaggtgtacatgttcctggtgaaatggcaggacctgtcggagaaggtggtctacaggcgc

SEQ ID NO: 2547 - RNA, 72 nt, synthetic construct
  source 1..72: mol_type = other RNA
ctggctttcccccaggtttacatgttcctggtgaaatggcaggacctgtcggagaaggtggtctatagacgc

SEQ ID NO: 2548 - RNA, 72 nt, synthetic construct
  source 1..72: mol_type = other RNA
ctggctttcccccaggtttacatgttcctggtgaaatggcaggacctgtcggagaaggtggtctaccggcgc

SEQ ID NO: 2549 - RNA, 72 nt, synthetic construct
  source 1..72: mol_type = other RNA
ctggctttcccccaggtttacatgttcctggtgaaatggcaggacctgtcggagaaggtggtctacaggcgc

SEQ ID NO: 2550 - RNA, 72 nt, synthetic construct
  source 1..72: mol_type = other RNA
ctggctttcccccaggtttacatgttcctggtgaaatggcaggacctgtcggagaaggtggtctataggcgc

SEQ ID NO: 2551 - RNA, 72 nt, synthetic construct
  source 1..72: mol_type = other RNA
ctggctttcccccaggtgtacatgttcctggtgaaatggcaggacctgtcggagaaggtggtctatcggcgc

SEQ ID NO: 2552 - RNA, 72 nt, synthetic construct
  source 1..72: mol_type = other RNA
ctggctttcccccaggtttacatgttcctggtgaaatggcaggacctgtcggagaaggtggtctatcggcgc

SEQ ID NO: 2553 - RNA, 72 nt, synthetic construct
  source 1..72: mol_type = other RNA
ctggctttcccccaggtgtacatgttcctggtgaaatggcaggacctgtcggagaaggtggtctataggcgc

SEQ ID NO: 2554 - RNA, 73 nt, synthetic construct
  source 1..73: mol_type = other RNA
tctggctttcccccaggtttacatgttcctggtgaaatggcaggacctgtcggagaaggtggtctatagacgc

SEQ ID NO: 2555 - RNA, 73 nt, synthetic construct
  source 1..73: mol_type = other RNA
tctggctttcccccaggtttacatgttcctggtgaaatggcaggacctgtcggagaaggtggtctataggcgc

SEQ ID NO: 2556 - RNA, 73 nt, synthetic construct
  source 1..73: mol_type = other RNA
tctggctttcccccaggtctacatgttcctggtgaaatggcaggacctgtcggagaaggtggtctacagacgc

SEQ ID NO: 2557 - RNA, 73 nt, synthetic construct
  source 1..73: mol_type = other RNA
tctggctttcccccaggtctacatgttcctggtgaaatggcaggacctgtcggagaaggtggtctacaggcgc

SEQ ID NO: 2558 - RNA, 73 nt, synthetic construct
  source 1..73: mol_type = other RNA
tctggctttcccccaggtatacatgttcctggtgaaatggcaggacctgtcggagaaggtggtctatagacgc

SEQ ID NO: 2559 - RNA, 73 nt, synthetic construct
  source 1..73: mol_type = other RNA
tctggctttcccccaggtatacatgttcctggtgaaatggcaggacctgtcggagaaggtggtctacaggcgc

SEQ ID NO: 2560 - RNA, 73 nt, synthetic construct
  source 1..73: mol_type = other RNA
tctggctttcccccaggtatacatgttcctggtgaaatggcaggacctgtcggagaaggtggtctaccggcgc

SEQ ID NO: 2561 - RNA, 73 nt, synthetic construct
  source 1..73: mol_type = other RNA
tctggctttcccccaggtatacatgttcctggtgaaatggcaggacctgtcggagaaggtggtctataggcgc

SEQ ID NO: 2562 - RNA, 73 nt, synthetic construct
  source 1..73: mol_type = other RNA
tctggctttcccccaggtatacatgttcctggtgaaatggcaggacctgtcggagaaggtggtctatcggcgc

SEQ ID NO: 2563 - RNA, 73 nt, synthetic construct
  source 1..73: mol_type = other RNA
tctggctttcccccaggtttacatgttcctggtgaaatggcaggacctgtcggagaaggtggtctatcggcgc

SEQ ID NO: 2564 - RNA, 73 nt, synthetic construct
  source 1..73: mol_type = other RNA
tctggctttcccccaggtttacatgttcctggtgaaatggcaggacctgtcggagaaggtggtctaccggcgc

SEQ ID NO: 2565 - RNA, 73 nt, synthetic construct
  source 1..73: mol_type = other RNA
tctggctttcccccaggtttacatgttcctggtgaaatggcaggacctgtcggagaaggtggtctacaggcgc

SEQ ID NO: 2566 - RNA, 73 nt, synthetic construct
  source 1..73: mol_type = other RNA
tctggctttcccccaggtttacatgttcctggtgaaatggcaggacctgtcggagaaggtggtctacagacgc

SEQ ID NO: 2567 - RNA, 73 nt, synthetic construct
  source 1..73: mol_type = other RNA
tctggctttcccccaggtgtacatgttcctggtgaaatggcaggacctgtcggagaaggtggtctatcggcgc

SEQ ID NO: 2568 - RNA, 73 nt, synthetic construct
  source 1..73: mol_type = other RNA
tctggctttcccccaggtctacatgttcctggtgaaatggcaggacctgtcggagaaggtggtctaccggcgc

SEQ ID NO: 2569 - RNA, 73 nt, synthetic construct
  source 1..73: mol_type = other RNA
tctggctttcccccaggtctacatgttcctggtgaaatggcaggacctgtcggagaaggtggtctatagacgc

SEQ ID NO: 2570 - RNA, 73 nt, synthetic construct
  source 1..73: mol_type = other RNA
tctggctttcccccaggtctacatgttcctggtgaaatggcaggacctgtcggagaaggtggtctatcggcgc

SEQ ID NO: 2571 - RNA, 73 nt, synthetic construct
  source 1..73: mol_type = other RNA
tctggctttcccccaggtgtacatgttcctggtgaaatggcaggacctgtcggagaaggtggtctacagacgc

SEQ ID NO: 2572 - RNA, 73 nt, synthetic construct
  source 1..73: mol_type = other RNA
tctggctttcccccaggtgtacatgttcctggtgaaatggcaggacctgtcggagaaggtggtctacaggcgc

SEQ ID NO: 2573 - RNA, 73 nt, synthetic construct
  source 1..73: mol_type = other RNA
tctggctttcccccaggtgtacatgttcctggtgaaatggcaggacctgtcggagaaggtggtctaccggcgc

SEQ ID NO: 2574 - RNA, 73 nt, synthetic construct
  source 1..73: mol_type = other RNA
tctggctttcccccaggtgtacatgttcctggtgaaatggcaggacctgtcggagaaggtggtctatagacgc

SEQ ID NO: 2575 - RNA, 73 nt, synthetic construct
  source 1..73: mol_type = other RNA
tctggctttcccccaggtgtacatgttcctggtgaaatggcaggacctgtcggagaaggtggtctataggcgc

SEQ ID NO: 2576 - RNA, 73 nt, synthetic construct
  source 1..73: mol_type = other RNA
tctggctttcccccaggtctacatgttcctggtgaaatggcaggacctgtcggagaaggtggtctataggcgc

SEQ ID NO: 2577 - RNA, 73 nt, synthetic construct
  source 1..73: mol_type = other RNA
tctggctttcccccaggtatacatgttcctggtgaaatggcaggacctgtcggagaaggtggtctacagacgc

SEQ ID NO: 2578 - RNA, 74 nt, synthetic construct
  source 1..74: mol_type = other RNA
ctctggctttcccccaggtctacatgttcctggtgaaatggcaggacctgtcggagaaggtggtctatcggcgc

SEQ ID NO: 2579 - RNA, 74 nt, synthetic construct
  source 1..74: mol_type = other RNA
ctctggctttcccccaggtctacatgttcctggtgaaatggcaggacctgtcggagaaggtggtctataggcgc

SEQ ID NO: 2580 - RNA, 74 nt, synthetic construct
  source 1..74: mol_type = other RNA
ctctggctttcccccaggtctacatgttcctggtgaaatggcaggacctgtcggagaaggtggtctatagacgc

SEQ ID NO: 2581 - RNA, 74 nt, synthetic construct
  source 1..74: mol_type = other RNA
ctctggctttcccccaggtctacatgttcctggtgaaatggcaggacctgtcggagaaggtggtctaccggcgc

SEQ ID NO: 2582 - RNA, 74 nt, synthetic construct
  source 1..74: mol_type = other RNA
ctctggctttcccccaggtgtacatgttcctggtgaaatggcaggacctgtcggagaaggtggtctatagacgc

SEQ ID NO: 2583 - RNA, 74 nt, synthetic construct
  source 1..74: mol_type = other RNA
ctctggctttcccccaggtatacatgttcctggtgaaatggcaggacctgtcggagaaggtggtctatcggcgc

SEQ ID NO: 2584 - RNA, 74 nt, synthetic construct
  source 1..74: mol_type = other RNA
ctctggctttcccccaggtatacatgttcctggtgaaatggcaggacctgtcggagaaggtggtctatagacgc

SEQ ID NO: 2585 - RNA, 74 nt, synthetic construct
  source 1..74: mol_type = other RNA
ctctggctttcccccaggtatacatgttcctggtgaaatggcaggacctgtcggagaaggtggtctaccggcgc

SEQ ID NO: 2586 - RNA, 74 nt, synthetic construct
  source 1..74: mol_type = other RNA
ctctggctttcccccaggtatacatgttcctggtgaaatggcaggacctgtcggagaaggtggtctacagacgc

SEQ ID NO: 2587 - RNA, 74 nt, synthetic construct
  source 1..74: mol_type = other RNA
ctctggctttcccccaggtctacatgttcctggtgaaatggcaggacctgtcggagaaggtggtctacagacgc

SEQ ID NO: 2588 - RNA, 74 nt, synthetic construct
  source 1..74: mol_type = other RNA
ctctggctttcccccaggtgtacatgttcctggtgaaatggcaggacctgtcggagaaggtggtctaccggcgc

SEQ ID NO: 2589 - RNA, 74 nt, synthetic construct
  source 1..74: mol_type = other RNA
ctctggctttcccccaggtttacatgttcctggtgaaatggcaggacctgtcggagaaggtggtctacaggcgc

SEQ ID NO: 2590 - RNA, 74 nt, synthetic construct
  source 1..74: mol_type = other RNA
ctctggctttcccccaggtttacatgttcctggtgaaatggcaggacctgtcggagaaggtggtctatagacgc

SEQ ID NO: 2591 - RNA, 74 nt, synthetic construct
  source 1..74: mol_type = other RNA
ctctggctttcccccaggtatacatgttcctggtgaaatggcaggacctgtcggagaaggtggtctataggcgc

SEQ ID NO: 2592 - RNA, 74 nt, synthetic construct
  source 1..74: mol_type = other RNA
ctctggctttcccccaggtttacatgttcctggtgaaatggcaggacctgtcggagaaggtggtctacagacgc

SEQ ID NO: 2593 - RNA, 74 nt, synthetic construct
  source 1..74: mol_type = other RNA
ctctggctttcccccaggtgtacatgttcctggtgaaatggcaggacctgtcggagaaggtggtctacagacgc

SEQ ID NO: 2594 - RNA, 74 nt, synthetic construct
  source 1..74: mol_type = other RNA
ctctggctttcccccaggtgtacatgttcctggtgaaatggcaggacctgtcggagaaggtggtctacaggcgc

SEQ ID NO: 2595 - RNA, 74 nt, synthetic construct
  source 1..74: mol_type = other RNA
ctctggctttcccccaggtatacatgttcctggtgaaatggcaggacctgtcggagaaggtggtctacaggcgc

SEQ ID NO: 2596 - RNA, 74 nt, synthetic construct
  source 1..74: mol_type = other RNA
ctctggctttcccccaggtgtacatgttcctggtgaaatggcaggacctgtcggagaaggtggtctatcggcgc

SEQ ID NO: 2597 - RNA, 74 nt, synthetic construct
  source 1..74: mol_type = other RNA
ctctggctttcccccaggtgtacatgttcctggtgaaatggcaggacctgtcggagaaggtggtctataggcgc

SEQ ID NO: 2598 - RNA, 74 nt, synthetic construct
  source 1..74: mol_type = other RNA
ctctggctttcccccaggtttacatgttcctggtgaaatggcaggacctgtcggagaaggtggtctaccggcgc

SEQ ID NO: 2599 - RNA, 74 nt, synthetic construct
  source 1..74: mol_type = other RNA
ctctggctttcccccaggtctacatgttcctggtgaaatggcaggacctgtcggagaaggtggtctacaggcgc

SEQ ID NO: 2600 - RNA, 74 nt, synthetic construct
  source 1..74: mol_type = other RNA
ctctggctttcccccaggtttacatgttcctggtgaaatggcaggacctgtcggagaaggtggtctatcggcgc

SEQ ID NO: 2601 - RNA, 74 nt, synthetic construct
  source 1..74: mol_type = other RNA
ctctggctttcccccaggtttacatgttcctggtgaaatggcaggacctgtcggagaaggtggtctataggcgc

SEQ ID NO: 2602 - RNA, 75 nt, synthetic construct
  source 1..75: mol_type = other RNA
actctggctttcccccaggtttacatgttcctggtgaaatggcaggacctgtcggagaaggtggtctatagacgc

SEQ ID NO: 2603 - RNA, 75 nt, synthetic construct
  source 1..75: mol_type = other RNA
actctggctttcccccaggtttacatgttcctggtgaaatggcaggacctgtcggagaaggtggtctataggcgc

SEQ ID NO: 2604 - RNA, 75 nt, synthetic construct
  source 1..75: mol_type = other RNA
actctggctttcccccaggtttacatgttcctggtgaaatggcaggacctgtcggagaaggtggtctatcggcgc

SEQ ID NO: 2605 - RNA, 75 nt, synthetic construct
  source 1..75: mol_type = other RNA
actctggctttcccccaggtatacatgttcctggtgaaatggcaggacctgtcggagaaggtggtctacagacgc

SEQ ID NO: 2606 - RNA, 75 nt, synthetic construct
  source 1..75: mol_type = other RNA
actctggctttcccccaggtctacatgttcctggtgaaatggcaggacctgtcggagaaggtggtctacaggcgc

SEQ ID NO: 2607 - RNA, 75 nt, synthetic construct
  source 1..75: mol_type = other RNA
actctggctttcccccaggtttacatgttcctggtgaaatggcaggacctgtcggagaaggtggtctaccggcgc

SEQ ID NO: 2608 - RNA, 75 nt, synthetic construct
  source 1..75: mol_type = other RNA
actctggctttcccccaggtttacatgttcctggtgaaatggcaggacctgtcggagaaggtggtctacaggcgc

SEQ ID NO: 2609 - RNA, 75 nt, synthetic construct
  source 1..75: mol_type = other RNA
actctggctttcccccaggtttacatgttcctggtgaaatggcaggacctgtcggagaaggtggtctacagacgc

SEQ ID NO: 2610 - RNA, 75 nt, synthetic construct
  source 1..75: mol_type = other RNA
actctggctttcccccaggtgtacatgttcctggtgaaatggcaggacctgtcggagaaggtggtctatcggcgc

SEQ ID NO: 2611 - RNA, 75 nt, synthetic construct
  source 1..75: mol_type = other RNA
actctggctttcccccaggtctacatgttcctggtgaaatggcaggacctgtcggagaaggtggtctacagacgc

SEQ ID NO: 2612 - RNA, 75 nt, synthetic construct
  source 1..75: mol_type = other RNA
actctggctttcccccaggtgtacatgttcctggtgaaatggcaggacctgtcggagaaggtggtctataggcgc

SEQ ID NO: 2613 - RNA, 75 nt, synthetic construct
  source 1..75: mol_type = other RNA
actctggctttcccccaggtgtacatgttcctggtgaaatggcaggacctgtcggagaaggtggtctaccggcgc

SEQ ID NO: 2614 - RNA, 75 nt, synthetic construct
  source 1..75: mol_type = other RNA
actctggctttcccccaggtctacatgttcctggtgaaatggcaggacctgtcggagaaggtggtctatagacgc

SEQ ID NO: 2615 - RNA, 75 nt, synthetic construct
  source 1..75: mol_type = other RNA
actctggctttcccccaggtgtacatgttcctggtgaaatggcaggacctgtcggagaaggtggtctatagacgc

SEQ ID NO: 2616 - RNA, 75 nt, synthetic construct
  source 1..75: mol_type = other RNA
actctggctttcccccaggtatacatgttcctggtgaaatggcaggacctgtcggagaaggtggtctaccggcgc

SEQ ID NO: 2617 - RNA, 75 nt, synthetic construct
  source 1..75: mol_type = other RNA
actctggctttcccccaggtatacatgttcctggtgaaatggcaggacctgtcggagaaggtggtctacaggcgc

SEQ ID NO: 2618 - RNA, 75 nt, synthetic construct
  source 1..75: mol_type = other RNA
actctggctttcccccaggtctacatgttcctggtgaaatggcaggacctgtcggagaaggtggtctatcggcgc

SEQ ID NO: 2619 - RNA, 75 nt, synthetic construct
  source 1..75: mol_type = other RNA
actctggctttcccccaggtatacatgttcctggtgaaatggcaggacctgtcggagaaggtggtctataggcgc

SEQ ID NO: 2620 - RNA, 75 nt, synthetic construct
  source 1..75: mol_type = other RNA
actctggctttcccccaggtatacatgttcctggtgaaatggcaggacctgtcggagaaggtggtctatcggcgc

SEQ ID NO: 2621 - RNA, 75 nt, synthetic construct
  source 1..75: mol_type = other RNA
actctggctttcccccaggtgtacatgttcctggtgaaatggcaggacctgtcggagaaggtggtctacaggcgc

SEQ ID NO: 2622 - RNA, 75 nt, synthetic construct
  source 1..75: mol_type = other RNA
actctggctttcccccaggtctacatgttcctggtgaaatggcaggacctgtcggagaaggtggtctaccggcgc

SEQ ID NO: 2623 - RNA, 75 nt, synthetic construct
  source 1..75: mol_type = other RNA
actctggctttcccccaggtgtacatgttcctggtgaaatggcaggacctgtcggagaaggtggtctacagacgc

SEQ ID NO: 2624 - RNA, 75 nt, synthetic construct
  source 1..75: mol_type = other RNA
actctggctttcccccaggtctacatgttcctggtgaaatggcaggacctgtcggagaaggtggtctataggcgc

SEQ ID NO: 2625 - RNA, 75 nt, synthetic construct
  source 1..75: mol_type = other RNA
actctggctttcccccaggtatacatgttcctggtgaaatggcaggacctgtcggagaaggtggtctatagacgc

SEQ ID NO: 2626 - RNA, 76 nt, synthetic construct
  source 1..76: mol_type = other RNA
gactctggctttcccccaggtatacatgttcctggtgaaatggcaggacctgtcggagaaggtggtctataggcgc

SEQ ID NO: 2627 - RNA, 76 nt, synthetic construct
  source 1..76: mol_type = other RNA
gactctggctttcccccaggtatacatgttcctggtgaaatggcaggacctgtcggagaaggtggtctatcggcgc

SEQ ID NO: 2628 - RNA, 76 nt, synthetic construct
  source 1..76: mol_type = other RNA
gactctggctttcccccaggtgtacatgttcctggtgaaatggcaggacctgtcggagaaggtggtctacagacgc

SEQ ID NO: 2629 - RNA, 76 nt, synthetic construct
  source 1..76: mol_type = other RNA
gactctggctttcccccaggtatacatgttcctggtgaaatggcaggacctgtcggagaaggtggtctaccggcgc

SEQ ID NO: 2630 - RNA, 76 nt, synthetic construct
  source 1..76: mol_type = other RNA
gactctggctttcccccaggtatacatgttcctggtgaaatggcaggacctgtcggagaaggtggtctatagacgc

SEQ ID NO: 2631 - RNA, 76 nt, synthetic construct
  source 1..76: mol_type = other RNA
gactctggctttcccccaggtctacatgttcctggtgaaatggcaggacctgtcggagaaggtggtctacaggcgc

SEQ ID NO: 2632 - RNA, 76 nt, synthetic construct
  source 1..76: mol_type = other RNA
gactctggctttcccccaggtctacatgttcctggtgaaatggcaggacctgtcggagaaggtggtctacagacgc

SEQ ID NO: 2633 - RNA, 76 nt, synthetic construct
  source 1..76: mol_type = other RNA
gactctggctttcccccaggtctacatgttcctggtgaaatggcaggacctgtcggagaaggtggtctatagacgc

SEQ ID NO: 2634 - RNA, 76 nt, synthetic construct
  source 1..76: mol_type = other RNA
gactctggctttcccccaggtctacatgttcctggtgaaatggcaggacctgtcggagaaggtggtctataggcgc

SEQ ID NO: 2635 - RNA, 76 nt, synthetic construct
  source 1..76: mol_type = other RNA
gactctggctttcccccaggtctacatgttcctggtgaaatggcaggacctgtcggagaaggtggtctaccggcgc

SEQ ID NO: 2636 - RNA, 76 nt, synthetic construct
  source 1..76: mol_type = other RNA
gactctggctttcccccaggtttacatgttcctggtgaaatggcaggacctgtcggagaaggtggtctatcggcgc

SEQ ID NO: 2637 - RNA, 76 nt, synthetic construct
  source 1..76: mol_type = other RNA
gactctggctttcccccaggtgtacatgttcctggtgaaatggcaggacctgtcggagaaggtggtctacaggcgc

SEQ ID NO: 2638 - RNA, 76 nt, synthetic construct
  source 1..76: mol_type = other RNA
gactctggctttcccccaggtgtacatgttcctggtgaaatggcaggacctgtcggagaaggtggtctaccggcgc

SEQ ID NO: 2639 - RNA, 76 nt, synthetic construct
  source 1..76: mol_type = other RNA
gactctggctttcccccaggtgtacatgttcctggtgaaatggcaggacctgtcggagaaggtggtctatagacgc

SEQ ID NO: 2640 - RNA, 76 nt, synthetic construct
  source 1..76: mol_type = other RNA
gactctggctttcccccaggtgtacatgttcctggtgaaatggcaggacctgtcggagaaggtggtctataggcgc

SEQ ID NO: 2641 - RNA, 76 nt, synthetic construct
  source 1..76: mol_type = other RNA
gactctggctttcccccaggtgtacatgttcctggtgaaatggcaggacctgtcggagaaggtggtctatcggcgc

SEQ ID NO: 2642 - RNA, 76 nt, synthetic construct
  source 1..76: mol_type = other RNA
gactctggctttcccccaggtttacatgttcctggtgaaatggcaggacctgtcggagaaggtggtctacagacgc

SEQ ID NO: 2643 - RNA, 76 nt, synthetic construct
  source 1..76: mol_type = other RNA
gactctggctttcccccaggtttacatgttcctggtgaaatggcaggacctgtcggagaaggtggtctacaggcgc

SEQ ID NO: 2644 - RNA, 76 nt, synthetic construct
  source 1..76: mol_type = other RNA
gactctggctttcccccaggtttacatgttcctggtgaaatggcaggacctgtcggagaaggtggtctaccggcgc

SEQ ID NO: 2645 - RNA, 76 nt, synthetic construct
  source 1..76: mol_type = other RNA
gactctggctttcccccaggtttacatgttcctggtgaaatggcaggacctgtcggagaaggtggtctatagacgc

SEQ ID NO: 2646 - RNA, 76 nt, synthetic construct
  source 1..76: mol_type = other RNA
gactctggctttcccccaggtttacatgttcctggtgaaatggcaggacctgtcggagaaggtggtctataggcgc

SEQ ID NO: 2647 - RNA, 76 nt, synthetic construct
  source 1..76: mol_type = other RNA
gactctggctttcccccaggtatacatgttcctggtgaaatggcaggacctgtcggagaaggtggtctacaggcgc

SEQ ID NO: 2648 - RNA, 76 nt, synthetic construct
  source 1..76: mol_type = other RNA
gactctggctttcccccaggtatacatgttcctggtgaaatggcaggacctgtcggagaaggtggtctacagacgc

SEQ ID NO: 2649 - RNA, 76 nt, synthetic construct
  source 1..76: mol_type = other RNA
gactctggctttcccccaggtctacatgttcctggtgaaatggcaggacctgtcggagaaggtggtctatcggcgc

SEQ ID NO: 2650 - RNA, 77 nt, synthetic construct
  source 1..77: mol_type = other RNA
cgactctggctttcccccaggtatacatgttcctggtgaaatggcaggacctgtcggagaaggtggtctatcggcgc

SEQ ID NO: 2651 - RNA, 77 nt, synthetic construct
  source 1..77: mol_type = other RNA
cgactctggctttcccccaggtctacatgttcctggtgaaatggcaggacctgtcggagaaggtggtctatagacgc

SEQ ID NO: 2652 - RNA, 77 nt, synthetic construct
  source 1..77: mol_type = other RNA
cgactctggctttcccccaggtgtacatgttcctggtgaaatggcaggacctgtcggagaaggtggtctaccggcgc

SEQ ID NO: 2653 - RNA, 77 nt, synthetic construct
  source 1..77: mol_type = other RNA
cgactctggctttcccccaggtctacatgttcctggtgaaatggcaggacctgtcggagaaggtggtctacagacgc

SEQ ID NO: 2654 - RNA, 77 nt, synthetic construct
  source 1..77: mol_type = other RNA
cgactctggctttcccccaggtctacatgttcctggtgaaatggcaggacctgtcggagaaggtggtctaccggcgc

SEQ ID NO: 2655 - RNA, 77 nt, synthetic construct
  source 1..77: mol_type = other RNA
cgactctggctttcccccaggtttacatgttcctggtgaaatggcaggacctgtcggagaaggtggtctatcggcgc

SEQ ID NO: 2656 - RNA, 77 nt, synthetic construct
  source 1..77: mol_type = other RNA
cgactctggctttcccccaggtttacatgttcctggtgaaatggcaggacctgtcggagaaggtggtctataggcgc

SEQ ID NO: 2657 - RNA, 77 nt, synthetic construct
  source 1..77: mol_type = other RNA
cgactctggctttcccccaggtttacatgttcctggtgaaatggcaggacctgtcggagaaggtggtctatagacgc

SEQ ID NO: 2658 - RNA, 77 nt, synthetic construct
  source 1..77: mol_type = other RNA
cgactctggctttcccccaggtttacatgttcctggtgaaatggcaggacctgtcggagaaggtggtctaccggcgc

SEQ ID NO: 2659 - RNA, 77 nt, synthetic construct
  source 1..77: mol_type = other RNA
cgactctggctttcccccaggtttacatgttcctggtgaaatggcaggacctgtcggagaaggtggtctacaggcgc

SEQ ID NO: 2660 - RNA, 77 nt, synthetic construct
  source 1..77: mol_type = other RNA
cgactctggctttcccccaggtttacatgttcctggtgaaatggcaggacctgtcggagaaggtggtctacagacgc

SEQ ID NO: 2661 - RNA, 77 nt, synthetic construct
  source 1..77: mol_type = other RNA
cgactctggctttcccccaggtgtacatgttcctggtgaaatggcaggacctgtcggagaaggtggtctatcggcgc

SEQ ID NO: 2662 - RNA, 77 nt, synthetic construct
  source 1..77: mol_type = other RNA
cgactctggctttcccccaggtgtacatgttcctggtgaaatggcaggacctgtcggagaaggtggtctataggcgc

SEQ ID NO: 2663 - RNA, 77 nt, synthetic construct
  source 1..77: mol_type = other RNA
cgactctggctttcccccaggtctacatgttcctggtgaaatggcaggacctgtcggagaaggtggtctacaggcgc

SEQ ID NO: 2664 - RNA, 77 nt, synthetic construct
  source 1..77: mol_type = other RNA
cgactctggctttcccccaggtgtacatgttcctggtgaaatggcaggacctgtcggagaaggtggtctatagacgc

SEQ ID NO: 2665 - RNA, 77 nt, synthetic construct
  source 1..77: mol_type = other RNA
cgactctggctttcccccaggtgtacatgttcctggtgaaatggcaggacctgtcggagaaggtggtctacaggcgc

SEQ ID NO: 2666 - RNA, 77 nt, synthetic construct
  source 1..77: mol_type = other RNA
cgactctggctttcccccaggtgtacatgttcctggtgaaatggcaggacctgtcggagaaggtggtctacagacgc

SEQ ID NO: 2667 - RNA, 77 nt, synthetic construct
  source 1..77: mol_type = other RNA
cgactctggctttcccccaggtctacatgttcctggtgaaatggcaggacctgtcggagaaggtggtctatcggcgc

SEQ ID NO: 2668 - RNA, 77 nt, synthetic construct
  source 1..77: mol_type = other RNA
cgactctggctttcccccaggtatacatgttcctggtgaaatggcaggacctgtcggagaaggtggtctacagacgc

SEQ ID NO: 2669 - RNA, 77 nt, synthetic construct
  source 1..77: mol_type = other RNA
cgactctggctttcccccaggtatacatgttcctggtgaaatggcaggacctgtcggagaaggtggtctacaggcgc

SEQ ID NO: 2670 - RNA, 77 nt, synthetic construct
  source 1..77: mol_type = other RNA
cgactctggctttcccccaggtatacatgttcctggtgaaatggcaggacctgtcggagaaggtggtctaccggcgc

SEQ ID NO: 2671 - RNA, 77 nt, synthetic construct
  source 1..77: mol_type = other RNA
cgactctggctttcccccaggtatacatgttcctggtgaaatggcaggacctgtcggagaaggtggtctatagacgc

SEQ ID NO: 2672 - RNA, 77 nt, synthetic construct
  source 1..77: mol_type = other RNA
cgactctggctttcccccaggtctacatgttcctggtgaaatggcaggacctgtcggagaaggtggtctataggcgc

SEQ ID NO: 2673 - RNA, 77 nt, synthetic construct
  source 1..77: mol_type = other RNA
cgactctggctttcccccaggtatacatgttcctggtgaaatggcaggacctgtcggagaaggtggtctataggcgc

SEQ ID NO: 2674 - RNA, 78 nt, synthetic construct
  source 1..78: mol_type = other RNA
ccgactctggctttcccccaggtgtacatgttcctggtgaaatggcaggacctgtcggagaaggtggtctatcggcgc

SEQ ID NO: 2675 - RNA, 78 nt, synthetic construct
  source 1..78: mol_type = other RNA
ccgactctggctttcccccaggtttacatgttcctggtgaaatggcaggacctgtcggagaaggtggtctacagacgc

SEQ ID NO: 2676 - RNA, 78 nt, synthetic construct
  source 1..78: mol_type = other RNA
ccgactctggctttcccccaggtttacatgttcctggtgaaatggcaggacctgtcggagaaggtggtctacaggcgc

SEQ ID NO: 2677 - RNA, 78 nt, synthetic construct
  source 1..78: mol_type = other RNA
ccgactctggctttcccccaggtttacatgttcctggtgaaatggcaggacctgtcggagaaggtggtctaccggcgc

SEQ ID NO: 2678 - RNA, 78 nt, synthetic construct
  source 1..78: mol_type = other RNA
ccgactctggctttcccccaggtttacatgttcctggtgaaatggcaggacctgtcggagaaggtggtctatagacgc

SEQ ID NO: 2679 - RNA, 78 nt, synthetic construct
  source 1..78: mol_type = other RNA
ccgactctggctttcccccaggtttacatgttcctggtgaaatggcaggacctgtcggagaaggtggtctatcggcgc

SEQ ID NO: 2680 - RNA, 78 nt, synthetic construct
  source 1..78: mol_type = other RNA
ccgactctggctttcccccaggtgtacatgttcctggtgaaatggcaggacctgtcggagaaggtggtctataggcgc

SEQ ID NO: 2681 - RNA, 78 nt, synthetic construct
  source 1..78: mol_type = other RNA
ccgactctggctttcccccaggtatacatgttcctggtgaaatggcaggacctgtcggagaaggtggtctacaggcgc

SEQ ID NO: 2682 - RNA, 78 nt, synthetic construct
  source 1..78: mol_type = other RNA
ccgactctggctttcccccaggtttacatgttcctggtgaaatggcaggacctgtcggagaaggtggtctataggcgc

SEQ ID NO: 2683 - RNA, 78 nt, synthetic construct
  source 1..78: mol_type = other RNA
ccgactctggctttcccccaggtgtacatgttcctggtgaaatggcaggacctgtcggagaaggtggtctaccggcgc

SEQ ID NO: 2684 - RNA, 78 nt, synthetic construct
  source 1..78: mol_type = other RNA
ccgactctggctttcccccaggtctacatgttcctggtgaaatggcaggacctgtcggagaaggtggtctatcggcgc

SEQ ID NO: 2685 - RNA, 78 nt, synthetic construct
  source 1..78: mol_type = other RNA
ccgactctggctttcccccaggtgtacatgttcctggtgaaatggcaggacctgtcggagaaggtggtctatagacgc

SEQ ID NO: 2686 - RNA, 78 nt, synthetic construct
  source 1..78: mol_type = other RNA
ccgactctggctttcccccaggtctacatgttcctggtgaaatggcaggacctgtcggagaaggtggtctatagacgc

SEQ ID NO: 2687 - RNA, 78 nt, synthetic construct
  source 1..78: mol_type = other RNA
ccgactctggctttcccccaggtctacatgttcctggtgaaatggcaggacctgtcggagaaggtggtctaccggcgc

SEQ ID NO: 2688 - RNA, 78 nt, synthetic construct
  source 1..78: mol_type = other RNA
ccgactctggctttcccccaggtctacatgttcctggtgaaatggcaggacctgtcggagaaggtggtctacaggcgc

SEQ ID NO: 2689 - RNA, 78 nt, synthetic construct
  source 1..78: mol_type = other RNA
ccgactctggctttcccccaggtctacatgttcctggtgaaatggcaggacctgtcggagaaggtggtctacagacgc

SEQ ID NO: 2690 - RNA, 78 nt, synthetic construct
  source 1..78: mol_type = other RNA
ccgactctggctttcccccaggtatacatgttcctggtgaaatggcaggacctgtcggagaaggtggtctatcggcgc

SEQ ID NO: 2691 - RNA, 78 nt, synthetic construct
  source 1..78: mol_type = other RNA
ccgactctggctttcccccaggtgtacatgttcctggtgaaatggcaggacctgtcggagaaggtggtctacaggcgc

SEQ ID NO: 2692 - RNA, 78 nt, synthetic construct
  source 1..78: mol_type = other RNA
ccgactctggctttcccccaggtatacatgttcctggtgaaatggcaggacctgtcggagaaggtggtctataggcgc

SEQ ID NO: 2693 - RNA, 78 nt, synthetic construct
  source 1..78: mol_type = other RNA
ccgactctggctttcccccaggtatacatgttcctggtgaaatggcaggacctgtcggagaaggtggtctaccggcgc

SEQ ID NO: 2694 - RNA, 78 nt, synthetic construct
  source 1..78: mol_type = other RNA
ccgactctggctttcccccaggtgtacatgttcctggtgaaatggcaggacctgtcggagaaggtggtctacagacgc

SEQ ID NO: 2695 - RNA, 78 nt, synthetic construct
  source 1..78: mol_type = other RNA
ccgactctggctttcccccaggtatacatgttcctggtgaaatggcaggacctgtcggagaaggtggtctacagacgc

SEQ ID NO: 2696 - RNA, 78 nt, synthetic construct
  source 1..78: mol_type = other RNA
ccgactctggctttcccccaggtctacatgttcctggtgaaatggcaggacctgtcggagaaggtggtctataggcgc

SEQ ID NO: 2697 - RNA, 78 nt, synthetic construct
  source 1..78: mol_type = other RNA
ccgactctggctttcccccaggtatacatgttcctggtgaaatggcaggacctgtcggagaaggtggtctatagacgc

SEQ ID NO: 2698 - RNA, 79 nt, synthetic construct
  source 1..79: mol_type = other RNA
cccgactctggctttcccccaggtctacatgttcctggtgaaatggcaggacctgtcggagaaggtggtctatcggcgc

SEQ ID NO: 2699 - RNA, 79 nt, synthetic construct
  source 1..79: mol_type = other RNA
cccgactctggctttcccccaggtctacatgttcctggtgaaatggcaggacctgtcggagaaggtggtctataggcgc

SEQ ID NO: 2700 - RNA, 79 nt, synthetic construct
  source 1..79: mol_type = other RNA
cccgactctggctttcccccaggtttacatgttcctggtgaaatggcaggacctgtcggagaaggtggtctataggcgc

SEQ ID NO: 2701 - RNA, 79 nt, synthetic construct
  source 1..79: mol_type = other RNA
cccgactctggctttcccccaggtgtacatgttcctggtgaaatggcaggacctgtcggagaaggtggtctacagacgc

SEQ ID NO: 2702 - RNA, 79 nt, synthetic construct
  source 1..79: mol_type = other RNA
cccgactctggctttcccccaggtatacatgttcctggtgaaatggcaggacctgtcggagaaggtggtctacagacgc

SEQ ID NO: 2703 - RNA, 79 nt, synthetic construct
  source 1..79: mol_type = other RNA
cccgactctggctttcccccaggtctacatgttcctggtgaaatggcaggacctgtcggagaaggtggtctatagacgc

SEQ ID NO: 2704 - RNA, 79 nt, synthetic construct
  source 1..79: mol_type = other RNA
cccgactctggctttcccccaggtctacatgttcctggtgaaatggcaggacctgtcggagaaggtggtctaccggcgc

SEQ ID NO: 2705 - RNA, 79 nt, synthetic construct
  source 1..79: mol_type = other RNA
cccgactctggctttcccccaggtctacatgttcctggtgaaatggcaggacctgtcggagaaggtggtctacaggcgc

SEQ ID NO: 2706 - RNA, 79 nt, synthetic construct
  source 1..79: mol_type = other RNA
cccgactctggctttcccccaggtctacatgttcctggtgaaatggcaggacctgtcggagaaggtggtctacagacgc

SEQ ID NO: 2707 - RNA, 79 nt, synthetic construct
  source 1..79: mol_type = other RNA
cccgactctggctttcccccaggtatacatgttcctggtgaaatggcaggacctgtcggagaaggtggtctacaggcgc

SEQ ID NO: 2708 - RNA, 79 nt, synthetic construct
  source 1..79: mol_type = other RNA
cccgactctggctttcccccaggtatacatgttcctggtgaaatggcaggacctgtcggagaaggtggtctataggcgc

SEQ ID NO: 2709 - RNA, 79 nt, synthetic construct
  source 1..79: mol_type = other RNA
cccgactctggctttcccccaggtttacatgttcctggtgaaatggcaggacctgtcggagaaggtggtctatagacgc

SEQ ID NO: 2710 - RNA, 79 nt, synthetic construct
  source 1..79: mol_type = other RNA
cccgactctggctttcccccaggtttacatgttcctggtgaaatggcaggacctgtcggagaaggtggtctaccggcgc

SEQ ID NO: 2711 - RNA, 79 nt, synthetic construct
  source 1..79: mol_type = other RNA
cccgactctggctttcccccaggtttacatgttcctggtgaaatggcaggacctgtcggagaaggtggtctacaggcgc

SEQ ID NO: 2712 - RNA, 79 nt, synthetic construct
  source 1..79: mol_type = other RNA
cccgactctggctttcccccaggtttacatgttcctggtgaaatggcaggacctgtcggagaaggtggtctacagacgc

SEQ ID NO: 2713 - RNA, 79 nt, synthetic construct
  source 1..79: mol_type = other RNA
cccgactctggctttcccccaggtgtacatgttcctggtgaaatggcaggacctgtcggagaaggtggtctatcggcgc

SEQ ID NO: 2714 - RNA, 79 nt, synthetic construct
  source 1..79: mol_type = other RNA
cccgactctggctttcccccaggtgtacatgttcctggtgaaatggcaggacctgtcggagaaggtggtctataggcgc

SEQ ID NO: 2715 - RNA, 79 nt, synthetic construct
  source 1..79: mol_type = other RNA
cccgactctggctttcccccaggtgtacatgttcctggtgaaatggcaggacctgtcggagaaggtggtctatagacgc

SEQ ID NO: 2716 - RNA, 79 nt, synthetic construct
  source 1..79: mol_type = other RNA
cccgactctggctttcccccaggtgtacatgttcctggtgaaatggcaggacctgtcggagaaggtggtctacaggcgc

SEQ ID NO: 2717 - RNA, 79 nt, synthetic construct
  source 1..79: mol_type = other RNA
cccgactctggctttcccccaggtttacatgttcctggtgaaatggcaggacctgtcggagaaggtggtctatcggcgc

SEQ ID NO: 2718 - RNA, 79 nt, synthetic construct
  source 1..79: mol_type = other RNA
cccgactctggctttcccccaggtatacatgttcctggtgaaatggcaggacctgtcggagaaggtggtctatcggcgc

SEQ ID NO: 2719 - RNA, 79 nt, synthetic construct
  source 1..79: mol_type = other RNA
cccgactctggctttcccccaggtatacatgttcctggtgaaatggcaggacctgtcggagaaggtggtctaccggcgc

SEQ ID NO: 2720 - RNA, 79 nt, synthetic construct
  source 1..79: mol_type = other RNA
cccgactctggctttcccccaggtatacatgttcctggtgaaatggcaggacctgtcggagaaggtggtctatagacgc

SEQ ID NO: 2721 - RNA, 79 nt, synthetic construct
  source 1..79: mol_type = other RNA
cccgactctggctttcccccaggtgtacatgttcctggtgaaatggcaggacctgtcggagaaggtggtctaccggcgc

SEQ ID NO: 2722 - RNA, 80 nt, synthetic construct
  source 1..80: mol_type = other RNA
ccccgactctggctttcccccaggtatacatgttcctggtgaaatggcaggacctgtcggagaaggtggtctatagacgc

SEQ ID NO: 2723 - RNA, 80 nt, synthetic construct
  source 1..80: mol_type = other RNA
ccccgactctggctttcccccaggtgtacatgttcctggtgaaatggcaggacctgtcggagaaggtggtctatcggcgc

SEQ ID NO: 2724 - RNA, 80 nt, synthetic construct
  source 1..80: mol_type = other RNA
ccccgactctggctttcccccaggtgtacatgttcctggtgaaatggcaggacctgtcggagaaggtggtctataggcgc

SEQ ID NO: 2725 - RNA, 80 nt, synthetic construct
  source 1..80: mol_type = other RNA
ccccgactctggctttcccccaggtgtacatgttcctggtgaaatggcaggacctgtcggagaaggtggtctacaggcgc

SEQ ID NO: 2726 - RNA, 80 nt, synthetic construct
  source 1..80: mol_type = other RNA
ccccgactctggctttcccccaggtttacatgttcctggtgaaatggcaggacctgtcggagaaggtggtctatcggcgc

SEQ ID NO: 2727 - RNA, 80 nt, synthetic construct
  source 1..80: mol_type = other RNA
ccccgactctggctttcccccaggtgtacatgttcctggtgaaatggcaggacctgtcggagaaggtggtctacagacgc

SEQ ID NO: 2728 - RNA, 80 nt, synthetic construct
  source 1..80: mol_type = other RNA
ccccgactctggctttcccccaggtttacatgttcctggtgaaatggcaggacctgtcggagaaggtggtctacagacgc

SEQ ID NO: 2729 - RNA, 80 nt, synthetic construct
  source 1..80: mol_type = other RNA
ccccgactctggctttcccccaggtctacatgttcctggtgaaatggcaggacctgtcggagaaggtggtctataggcgc

SEQ ID NO: 2730 - RNA, 80 nt, synthetic construct
  source 1..80: mol_type = other RNA
ccccgactctggctttcccccaggtctacatgttcctggtgaaatggcaggacctgtcggagaaggtggtctaccggcgc

SEQ ID NO: 2731 - RNA, 80 nt, synthetic construct
  source 1..80: mol_type = other RNA
ccccgactctggctttcccccaggtctacatgttcctggtgaaatggcaggacctgtcggagaaggtggtctacaggcgc

SEQ ID NO: 2732 - RNA, 80 nt, synthetic construct
  source 1..80: mol_type = other RNA
ccccgactctggctttcccccaggtatacatgttcctggtgaaatggcaggacctgtcggagaaggtggtctatcggcgc

SEQ ID NO: 2733 - RNA, 80 nt, synthetic construct
  source 1..80: mol_type = other RNA
ccccgactctggctttcccccaggtatacatgttcctggtgaaatggcaggacctgtcggagaaggtggtctataggcgc

SEQ ID NO: 2734 - RNA, 80 nt, synthetic construct
  source 1..80: mol_type = other RNA
ccccgactctggctttcccccaggtatacatgttcctggtgaaatggcaggacctgtcggagaaggtggtctacaggcgc

SEQ ID NO: 2735 - RNA, 80 nt, synthetic construct
  source 1..80: mol_type = other RNA
ccccgactctggctttcccccaggtatacatgttcctggtgaaatggcaggacctgtcggagaaggtggtctaccggcgc

SEQ ID NO: 2736 - RNA, 80 nt, synthetic construct
  source 1..80: mol_type = other RNA
ccccgactctggctttcccccaggtctacatgttcctggtgaaatggcaggacctgtcggagaaggtggtctatagacgc

SEQ ID NO: 2737 - RNA, 80 nt, synthetic construct
  source 1..80: mol_type = other RNA
ccccgactctggctttcccccaggtttacatgttcctggtgaaatggcaggacctgtcggagaaggtggtctacaggcgc

SEQ ID NO: 2738 - RNA, 80 nt, synthetic construct
  source 1..80: mol_type = other RNA
ccccgactctggctttcccccaggtttacatgttcctggtgaaatggcaggacctgtcggagaaggtggtctatagacgc

SEQ ID NO: 2739 - RNA, 80 nt, synthetic construct
  source 1..80: mol_type = other RNA
ccccgactctggctttcccccaggtttacatgttcctggtgaaatggcaggacctgtcggagaaggtggtctaccggcgc

SEQ ID NO: 2740 - RNA, 80 nt, synthetic construct
  source 1..80: mol_type = other RNA
ccccgactctggctttcccccaggtgtacatgttcctggtgaaatggcaggacctgtcggagaaggtggtctatagacgc

SEQ ID NO: 2741 - RNA, 80 nt, synthetic construct
  source 1..80: mol_type = other RNA
ccccgactctggctttcccccaggtttacatgttcctggtgaaatggcaggacctgtcggagaaggtggtctataggcgc

SEQ ID NO: 2742 - RNA, 80 nt, synthetic construct
  source 1..80: mol_type = other RNA
ccccgactctggctttcccccaggtatacatgttcctggtgaaatggcaggacctgtcggagaaggtggtctacagacgc

SEQ ID NO: 2743 - RNA, 80 nt, synthetic construct
  source 1..80: mol_type = other RNA
ccccgactctggctttcccccaggtgtacatgttcctggtgaaatggcaggacctgtcggagaaggtggtctaccggcgc

SEQ ID NO: 2744 - RNA, 80 nt, synthetic construct
  source 1..80: mol_type = other RNA
ccccgactctggctttcccccaggtctacatgttcctggtgaaatggcaggacctgtcggagaaggtggtctatcggcgc

SEQ ID NO: 2745 - RNA, 80 nt, synthetic construct
  source 1..80: mol_type = other RNA
ccccgactctggctttcccccaggtctacatgttcctggtgaaatggcaggacctgtcggagaaggtggtctacagacgc

SEQ ID NO: 2746 - RNA, 81 nt, synthetic construct
  source 1..81: mol_type = other RNA
cccccgactctggctttcccccaggtctacatgttcctggtgaaatggcaggacctgtcggagaaggtggtctaccggcgc

SEQ ID NO: 2747 - RNA, 81 nt, synthetic construct
  source 1..81: mol_type = other RNA
cccccgactctggctttcccccaggtttacatgttcctggtgaaatggcaggacctgtcggagaaggtggtctaccggcgc

SEQ ID NO: 2748 - RNA, 81 nt, synthetic construct
  source 1..81: mol_type = other RNA
cccccgactctggctttcccccaggtctacatgttcctggtgaaatggcaggacctgtcggagaaggtggtctataggcgc

SEQ ID NO: 2749 - RNA, 81 nt, synthetic construct
  source 1..81: mol_type = other RNA
cccccgactctggctttcccccaggtatacatgttcctggtgaaatggcaggacctgtcggagaaggtggtctatcggcgc

SEQ ID NO: 2750 - RNA, 81 nt, synthetic construct
  source 1..81: mol_type = other RNA
cccccgactctggctttcccccaggtctacatgttcctggtgaaatggcaggacctgtcggagaaggtggtctacagacgc

SEQ ID NO: 2751 - RNA, 81 nt, synthetic construct
  source 1..81: mol_type = other RNA
cccccgactctggctttcccccaggtatacatgttcctggtgaaatggcaggacctgtcggagaaggtggtctaccggcgc

SEQ ID NO: 2752 - RNA, 81 nt, synthetic construct
  source 1..81: mol_type = other RNA
cccccgactctggctttcccccaggtatacatgttcctggtgaaatggcaggacctgtcggagaaggtggtctacaggcgc

SEQ ID NO: 2753 - RNA, 81 nt, synthetic construct
  source 1..81: mol_type = other RNA
cccccgactctggctttcccccaggtgtacatgttcctggtgaaatggcaggacctgtcggagaaggtggtctacaggcgc

SEQ ID NO: 2754 - RNA, 81 nt, synthetic construct
  source 1..81: mol_type = other RNA
cccccgactctggctttcccccaggtatacatgttcctggtgaaatggcaggacctgtcggagaaggtggtctataggcgc

SEQ ID NO: 2755 - RNA, 81 nt, synthetic construct
  source 1..81: mol_type = other RNA
cccccgactctggctttcccccaggtgtacatgttcctggtgaaatggcaggacctgtcggagaaggtggtctacagacgc

SEQ ID NO: 2756 - RNA, 81 nt, synthetic construct
  source 1..81: mol_type = other RNA
cccccgactctggctttcccccaggtttacatgttcctggtgaaatggcaggacctgtcggagaaggtggtctacaggcgc

SEQ ID NO: 2757 - RNA, 81 nt, synthetic construct
  source 1..81: mol_type = other RNA
cccccgactctggctttcccccaggtgtacatgttcctggtgaaatggcaggacctgtcggagaaggtggtctatagacgc

SEQ ID NO: 2758 - RNA, 81 nt, synthetic construct
  source 1..81: mol_type = other RNA
cccccgactctggctttcccccaggtgtacatgttcctggtgaaatggcaggacctgtcggagaaggtggtctaccggcgc

SEQ ID NO: 2759 - RNA, 81 nt, synthetic construct
  source 1..81: mol_type = other RNA
cccccgactctggctttcccccaggtgtacatgttcctggtgaaatggcaggacctgtcggagaaggtggtctataggcgc

SEQ ID NO: 2760 - RNA, 81 nt, synthetic construct
  source 1..81: mol_type = other RNA
cccccgactctggctttcccccaggtgtacatgttcctggtgaaatggcaggacctgtcggagaaggtggtctatcggcgc

SEQ ID NO: 2761 - RNA, 81 nt, synthetic construct
  source 1..81: mol_type = other RNA
cccccgactctggctttcccccaggtatacatgttcctggtgaaatggcaggacctgtcggagaaggtggtctatagacgc

SEQ ID NO: 2762 - RNA, 81 nt, synthetic construct
  source 1..81: mol_type = other RNA
cccccgactctggctttcccccaggtatacatgttcctggtgaaatggcaggacctgtcggagaaggtggtctacagacgc

SEQ ID NO: 2763 - RNA, 81 nt, synthetic construct
  source 1..81: mol_type = other RNA
cccccgactctggctttcccccaggtttacatgttcctggtgaaatggcaggacctgtcggagaaggtggtctatagacgc

SEQ ID NO: 2764 - RNA, 81 nt, synthetic construct
  source 1..81: mol_type = other RNA
cccccgactctggctttcccccaggtttacatgttcctggtgaaatggcaggacctgtcggagaaggtggtctataggcgc

SEQ ID NO: 2765 - RNA, 81 nt, synthetic construct
  source 1..81: mol_type = other RNA
cccccgactctggctttcccccaggtttacatgttcctggtgaaatggcaggacctgtcggagaaggtggtctatcggcgc

SEQ ID NO: 2766 - RNA, 81 nt, synthetic construct
  source 1..81: mol_type = other RNA
cccccgactctggctttcccccaggtttacatgttcctggtgaaatggcaggacctgtcggagaaggtggtctacagacgc

SEQ ID NO: 2767 - RNA, 81 nt, synthetic construct
  source 1..81: mol_type = other RNA
cccccgactctggctttcccccaggtctacatgttcctggtgaaatggcaggacctgtcggagaaggtggtctatcggcgc

SEQ ID NO: 2768 - RNA, 81 nt, synthetic construct
  source 1..81: mol_type = other RNA
cccccgactctggctttcccccaggtctacatgttcctggtgaaatggcaggacctgtcggagaaggtggtctacaggcgc

SEQ ID NO: 2769 - RNA, 81 nt, synthetic construct
  source 1..81: mol_type = other RNA
cccccgactctggctttcccccaggtctacatgttcctggtgaaatggcaggacctgtcggagaaggtggtctatagacgc

SEQ ID NO: 2770 - RNA, 82 nt, synthetic construct
  source 1..82: mol_type = other RNA
tcccccgactctggctttcccccaggtctacatgttcctggtgaaatggcaggacctgtcggagaaggtggtctatagacgc

SEQ ID NO: 2771 - RNA, 82 nt, synthetic construct
  source 1..82: mol_type = other RNA
tcccccgactctggctttcccccaggtctacatgttcctggtgaaatggcaggacctgtcggagaaggtggtctataggcgc

SEQ ID NO: 2772 - RNA, 82 nt, synthetic construct
  source 1..82: mol_type = other RNA
tcccccgactctggctttcccccaggtctacatgttcctggtgaaatggcaggacctgtcggagaaggtggtctatcggcgc

SEQ ID NO: 2773 - RNA, 82 nt, synthetic construct
  source 1..82: mol_type = other RNA
tcccccgactctggctttcccccaggtgtacatgttcctggtgaaatggcaggacctgtcggagaaggtggtctacagacgc

SEQ ID NO: 2774 - RNA, 82 nt, synthetic construct
  source 1..82: mol_type = other RNA
tcccccgactctggctttcccccaggtttacatgttcctggtgaaatggcaggacctgtcggagaaggtggtctacaggcgc

SEQ ID NO: 2775 - RNA, 82 nt, synthetic construct
  source 1..82: mol_type = other RNA
tcccccgactctggctttcccccaggtctacatgttcctggtgaaatggcaggacctgtcggagaaggtggtctaccggcgc

SEQ ID NO: 2776 - RNA, 82 nt, synthetic construct
  source 1..82: mol_type = other RNA
tcccccgactctggctttcccccaggtatacatgttcctggtgaaatggcaggacctgtcggagaaggtggtctatcggcgc

SEQ ID NO: 2777 - RNA, 82 nt, synthetic construct
  source 1..82: mol_type = other RNA
tcccccgactctggctttcccccaggtatacatgttcctggtgaaatggcaggacctgtcggagaaggtggtctataggcgc

SEQ ID NO: 2778 - RNA, 82 nt, synthetic construct
  source 1..82: mol_type = other RNA
tcccccgactctggctttcccccaggtgtacatgttcctggtgaaatggcaggacctgtcggagaaggtggtctatcggcgc

SEQ ID NO: 2779 - RNA, 82 nt, synthetic construct
  source 1..82: mol_type = other RNA
tcccccgactctggctttcccccaggtttacatgttcctggtgaaatggcaggacctgtcggagaaggtggtctaccggcgc

SEQ ID NO: 2780 - RNA, 82 nt, synthetic construct
  source 1..82: mol_type = other RNA
tcccccgactctggctttcccccaggtttacatgttcctggtgaaatggcaggacctgtcggagaaggtggtctatagacgc

SEQ ID NO: 2781 - RNA, 82 nt, synthetic construct
  source 1..82: mol_type = other RNA
tcccccgactctggctttcccccaggtttacatgttcctggtgaaatggcaggacctgtcggagaaggtggtctataggcgc

SEQ ID NO: 2782 - RNA, 82 nt, synthetic construct
  source 1..82: mol_type = other RNA
tcccccgactctggctttcccccaggtttacatgttcctggtgaaatggcaggacctgtcggagaaggtggtctatcggcgc

SEQ ID NO: 2783 - RNA, 82 nt, synthetic construct
  source 1..82: mol_type = other RNA
tcccccgactctggctttcccccaggtgtacatgttcctggtgaaatggcaggacctgtcggagaaggtggtctaccggcgc

SEQ ID NO: 2784 - RNA, 82 nt, synthetic construct
  source 1..82: mol_type = other RNA
tcccccgactctggctttcccccaggtctacatgttcctggtgaaatggcaggacctgtcggagaaggtggtctacagacgc

SEQ ID NO: 2785 - RNA, 82 nt, synthetic construct
  source 1..82: mol_type = other RNA
tcccccgactctggctttcccccaggtgtacatgttcctggtgaaatggcaggacctgtcggagaaggtggtctataggcgc

SEQ ID NO: 2786 - RNA, 82 nt, synthetic construct
  source 1..82: mol_type = other RNA
tcccccgactctggctttcccccaggtatacatgttcctggtgaaatggcaggacctgtcggagaaggtggtctaccggcgc

SEQ ID NO: 2787 - RNA, 82 nt, synthetic construct
  source 1..82: mol_type = other RNA
tcccccgactctggctttcccccaggtctacatgttcctggtgaaatggcaggacctgtcggagaaggtggtctacaggcgc

SEQ ID NO: 2788 - RNA, 82 nt, synthetic construct
  source 1..82: mol_type = other RNA
tcccccgactctggctttcccccaggtgtacatgttcctggtgaaatggcaggacctgtcggagaaggtggtctatagacgc

SEQ ID NO: 2789 - RNA, 82 nt, synthetic construct
  source 1..82: mol_type = other RNA
tcccccgactctggctttcccccaggtatacatgttcctggtgaaatggcaggacctgtcggagaaggtggtctacagacgc

SEQ ID NO: 2790 - RNA, 82 nt, synthetic construct
  source 1..82: mol_type = other RNA
tcccccgactctggctttcccccaggtatacatgttcctggtgaaatggcaggacctgtcggagaaggtggtctacaggcgc

SEQ ID NO: 2791 - RNA, 82 nt, synthetic construct
  source 1..82: mol_type = other RNA
tcccccgactctggctttcccccaggtatacatgttcctggtgaaatggcaggacctgtcggagaaggtggtctatagacgc

SEQ ID NO: 2792 - RNA, 82 nt, synthetic construct
  source 1..82: mol_type = other RNA
tcccccgactctggctttcccccaggtgtacatgttcctggtgaaatggcaggacctgtcggagaaggtggtctacaggcgc

SEQ ID NO: 2793 - RNA, 82 nt, synthetic construct
  source 1..82: mol_type = other RNA
tcccccgactctggctttcccccaggtttacatgttcctggtgaaatggcaggacctgtcggagaaggtggtctacagacgc

SEQ ID NO: 2794 - RNA, 83 nt, synthetic construct
  source 1..83: mol_type = other RNA
gtcccccgactctggctttcccccaggtctacatgttcctggtgaaatggcaggacctgtcggagaaggtggtctaccggcgc

SEQ ID NO: 2795 - RNA, 83 nt, synthetic construct
  source 1..83: mol_type = other RNA
gtcccccgactctggctttcccccaggtatacatgttcctggtgaaatggcaggacctgtcggagaaggtggtctacaggcgc

SEQ ID NO: 2796 - RNA, 83 nt, synthetic construct
  source 1..83: mol_type = other RNA
gtcccccgactctggctttcccccaggtgtacatgttcctggtgaaatggcaggacctgtcggagaaggtggtctacagacgc

SEQ ID NO: 2797 - RNA, 83 nt, synthetic construct
  source 1..83: mol_type = other RNA
gtcccccgactctggctttcccccaggtctacatgttcctggtgaaatggcaggacctgtcggagaaggtggtctacaggcgc

SEQ ID NO: 2798 - RNA, 83 nt, synthetic construct
  source 1..83: mol_type = other RNA
gtcccccgactctggctttcccccaggtctacatgttcctggtgaaatggcaggacctgtcggagaaggtggtctatagacgc

SEQ ID NO: 2799 - RNA, 83 nt, synthetic construct
  source 1..83: mol_type = other RNA
gtcccccgactctggctttcccccaggtctacatgttcctggtgaaatggcaggacctgtcggagaaggtggtctataggcgc

SEQ ID NO: 2800 - RNA, 83 nt, synthetic construct
  source 1..83: mol_type = other RNA
gtcccccgactctggctttcccccaggtgtacatgttcctggtgaaatggcaggacctgtcggagaaggtggtctacaggcgc

SEQ ID NO: 2801 - RNA, 83 nt, synthetic construct
  source 1..83: mol_type = other RNA
gtcccccgactctggctttcccccaggtttacatgttcctggtgaaatggcaggacctgtcggagaaggtggtctataggcgc

SEQ ID NO: 2802 - RNA, 83 nt, synthetic construct
  source 1..83: mol_type = other RNA
gtcccccgactctggctttcccccaggtatacatgttcctggtgaaatggcaggacctgtcggagaaggtggtctacagacgc

SEQ ID NO: 2803 - RNA, 83 nt, synthetic construct
  source 1..83: mol_type = other RNA
gtcccccgactctggctttcccccaggtctacatgttcctggtgaaatggcaggacctgtcggagaaggtggtctacagacgc

SEQ ID NO: 2804 - RNA, 83 nt, synthetic construct
  source 1..83: mol_type = other RNA
gtcccccgactctggctttcccccaggtgtacatgttcctggtgaaatggcaggacctgtcggagaaggtggtctatagacgc

SEQ ID NO: 2805 - RNA, 83 nt, synthetic construct
  source 1..83: mol_type = other RNA
gtcccccgactctggctttcccccaggtgtacatgttcctggtgaaatggcaggacctgtcggagaaggtggtctatcggcgc

SEQ ID NO: 2806 - RNA, 83 nt, synthetic construct
  source 1..83: mol_type = other RNA
gtcccccgactctggctttcccccaggtttacatgttcctggtgaaatggcaggacctgtcggagaaggtggtctacagacgc

SEQ ID NO: 2807 - RNA, 83 nt, synthetic construct
  source 1..83: mol_type = other RNA
gtcccccgactctggctttcccccaggtttacatgttcctggtgaaatggcaggacctgtcggagaaggtggtctacaggcgc

SEQ ID NO: 2808 - RNA, 83 nt, synthetic construct
  source 1..83: mol_type = other RNA
gtcccccgactctggctttcccccaggtttacatgttcctggtgaaatggcaggacctgtcggagaaggtggtctaccggcgc

SEQ ID NO: 2809 - RNA, 83 nt, synthetic construct
  source 1..83: mol_type = other RNA
gtcccccgactctggctttcccccaggtttacatgttcctggtgaaatggcaggacctgtcggagaaggtggtctatagacgc

SEQ ID NO: 2810 - RNA, 83 nt, synthetic construct
  source 1..83: mol_type = other RNA
gtcccccgactctggctttcccccaggtgtacatgttcctggtgaaatggcaggacctgtcggagaaggtggtctaccggcgc

SEQ ID NO: 2811 - RNA, 83 nt, synthetic construct
  source 1..83: mol_type = other RNA
gtcccccgactctggctttcccccaggtgtacatgttcctggtgaaatggcaggacctgtcggagaaggtggtctataggcgc

SEQ ID NO: 2812 - RNA, 83 nt, synthetic construct
  source 1..83: mol_type = other RNA
gtcccccgactctggctttcccccaggtatacatgttcctggtgaaatggcaggacctgtcggagaaggtggtctatcggcgc

SEQ ID NO: 2813 - RNA, 83 nt, synthetic construct
  source 1..83: mol_type = other RNA
gtcccccgactctggctttcccccaggtatacatgttcctggtgaaatggcaggacctgtcggagaaggtggtctatagacgc

SEQ ID NO: 2814 - RNA, 83 nt, synthetic construct
  source 1..83: mol_type = other RNA
gtcccccgactctggctttcccccaggtatacatgttcctggtgaaatggcaggacctgtcggagaaggtggtctataggcgc

SEQ ID NO: 2815 - RNA, 83 nt, synthetic construct
  source 1..83: mol_type = other RNA
gtcccccgactctggctttcccccaggtttacatgttcctggtgaaatggcaggacctgtcggagaaggtggtctatcggcgc

SEQ ID NO: 2816 - RNA, 83 nt, synthetic construct
  source 1..83: mol_type = other RNA
gtcccccgactctggctttcccccaggtctacatgttcctggtgaaatggcaggacctgtcggagaaggtggtctatcggcgc

SEQ ID NO: 2817 - RNA, 83 nt, synthetic construct
  source 1..83: mol_type = other RNA
gtcccccgactctggctttcccccaggtatacatgttcctggtgaaatggcaggacctgtcggagaaggtggtctaccggcgc

SEQ ID NO: 2818 - RNA, 84 nt, synthetic construct
  source 1..84: mol_type = other RNA
ggtcccccgactctggctttcccccaggtttacatgttcctggtgaaatggcaggacctgtcggagaaggtggtctataggcgc

SEQ ID NO: 2819 - RNA, 84 nt, synthetic construct
  source 1..84: mol_type = other RNA
ggtcccccgactctggctttcccccaggtgtacatgttcctggtgaaatggcaggacctgtcggagaaggtggtctatagacgc

SEQ ID NO: 2820 - RNA, 84 nt, synthetic construct
  source 1..84: mol_type = other RNA
ggtcccccgactctggctttcccccaggtctacatgttcctggtgaaatggcaggacctgtcggagaaggtggtctatcggcgc

SEQ ID NO: 2821 - RNA, 84 nt, synthetic construct
  source 1..84: mol_type = other RNA
ggtcccccgactctggctttcccccaggtgtacatgttcctggtgaaatggcaggacctgtcggagaaggtggtctataggcgc

SEQ ID NO: 2822 - RNA, 84 nt, synthetic construct
  source 1..84: mol_type = other RNA
ggtcccccgactctggctttcccccaggtctacatgttcctggtgaaatggcaggacctgtcggagaaggtggtctacagacgc

SEQ ID NO: 2823 - RNA, 84 nt, synthetic construct
  source 1..84: mol_type = other RNA
ggtcccccgactctggctttcccccaggtttacatgttcctggtgaaatggcaggacctgtcggagaaggtggtctacagacgc

SEQ ID NO: 2824 - RNA, 84 nt, synthetic construct
  source 1..84: mol_type = other RNA
ggtcccccgactctggctttcccccaggtttacatgttcctggtgaaatggcaggacctgtcggagaaggtggtctacaggcgc

SEQ ID NO: 2825 - RNA, 84 nt, synthetic construct
  source 1..84: mol_type = other RNA
ggtcccccgactctggctttcccccaggtttacatgttcctggtgaaatggcaggacctgtcggagaaggtggtctaccggcgc

SEQ ID NO: 2826 - RNA, 84 nt, synthetic construct
  source 1..84: mol_type = other RNA
ggtcccccgactctggctttcccccaggtctacatgttcctggtgaaatggcaggacctgtcggagaaggtggtctataggcgc

SEQ ID NO: 2827 - RNA, 84 nt, synthetic construct
  source 1..84: mol_type = other RNA
ggtcccccgactctggctttcccccaggtttacatgttcctggtgaaatggcaggacctgtcggagaaggtggtctatagacgc

SEQ ID NO: 2828 - RNA, 84 nt, synthetic construct
  source 1..84: mol_type = other RNA
ggtcccccgactctggctttcccccaggtttacatgttcctggtgaaatggcaggacctgtcggagaaggtggtctatcggcgc

SEQ ID NO: 2829 - RNA, 84 nt, synthetic construct
  source 1..84: mol_type = other RNA
ggtcccccgactctggctttcccccaggtgtacatgttcctggtgaaatggcaggacctgtcggagaaggtggtctaccggcgc

SEQ ID NO: 2830 - RNA, 84 nt, synthetic construct
  source 1..84: mol_type = other RNA
ggtcccccgactctggctttcccccaggtctacatgttcctggtgaaatggcaggacctgtcggagaaggtggtctacaggcgc

SEQ ID NO: 2831 - RNA, 84 nt, synthetic construct
  source 1..84: mol_type = other RNA
ggtcccccgactctggctttcccccaggtgtacatgttcctggtgaaatggcaggacctgtcggagaaggtggtctacaggcgc

SEQ ID NO: 2832 - RNA, 84 nt, synthetic construct
  source 1..84: mol_type = other RNA
ggtcccccgactctggctttcccccaggtatacatgttcctggtgaaatggcaggacctgtcggagaaggtggtctatagacgc

SEQ ID NO: 2833 - RNA, 84 nt, synthetic construct
  source 1..84: mol_type = other RNA
ggtcccccgactctggctttcccccaggtatacatgttcctggtgaaatggcaggacctgtcggagaaggtggtctaccggcgc

SEQ ID NO: 2834 - RNA, 84 nt, synthetic construct
  source 1..84: mol_type = other RNA
ggtcccccgactctggctttcccccaggtatacatgttcctggtgaaatggcaggacctgtcggagaaggtggtctataggcgc

SEQ ID NO: 2835 - RNA, 84 nt, synthetic construct
  source 1..84: mol_type = other RNA
ggtcccccgactctggctttcccccaggtatacatgttcctggtgaaatggcaggacctgtcggagaaggtggtctacaggcgc

SEQ ID NO: 2836 - RNA, 84 nt, synthetic construct
  source 1..84: mol_type = other RNA
ggtcccccgactctggctttcccccaggtatacatgttcctggtgaaatggcaggacctgtcggagaaggtggtctacagacgc

SEQ ID NO: 2837 - RNA, 84 nt, synthetic construct
  source 1..84: mol_type = other RNA
ggtcccccgactctggctttcccccaggtatacatgttcctggtgaaatggcaggacctgtcggagaaggtggtctatcggcgc

SEQ ID NO: 2838 - RNA, 84 nt, synthetic construct
  source 1..84: mol_type = other RNA
ggtcccccgactctggctttcccccaggtgtacatgttcctggtgaaatggcaggacctgtcggagaaggtggtctacagacgc

SEQ ID NO: 2839 - RNA, 84 nt, synthetic construct
  source 1..84: mol_type = other RNA
ggtcccccgactctggctttcccccaggtctacatgttcctggtgaaatggcaggacctgtcggagaaggtggtctaccggcgc

SEQ ID NO: 2840 - RNA, 84 nt, synthetic construct
  source 1..84: mol_type = other RNA
ggtcccccgactctggctttcccccaggtgtacatgttcctggtgaaatggcaggacctgtcggagaaggtggtctatcggcgc

SEQ ID NO: 2841 - RNA, 84 nt, synthetic construct
  source 1..84: mol_type = other RNA
ggtcccccgactctggctttcccccaggtctacatgttcctggtgaaatggcaggacctgtcggagaaggtggtctatagacgc

SEQ ID NO: 2842 - RNA, 85 nt, synthetic construct
  source 1..85: mol_type = other RNA
gggtcccccgactctggctttcccccaggtatacatgttcctggtgaaatggcaggacctgtcggagaaggtggtctatcggcgc

SEQ ID NO: 2843 - RNA, 85 nt, synthetic construct
  source 1..85: mol_type = other RNA
gggtcccccgactctggctttcccccaggtttacatgttcctggtgaaatggcaggacctgtcggagaaggtggtctataggcgc

SEQ ID NO: 2844 - RNA, 85 nt, synthetic construct
  source 1..85: mol_type = other RNA
gggtcccccgactctggctttcccccaggtttacatgttcctggtgaaatggcaggacctgtcggagaaggtggtctaccggcgc

SEQ ID NO: 2845 - RNA, 85 nt, synthetic construct
  source 1..85: mol_type = other RNA
gggtcccccgactctggctttcccccaggtttacatgttcctggtgaaatggcaggacctgtcggagaaggtggtctacaggcgc

SEQ ID NO: 2846 - RNA, 85 nt, synthetic construct
  source 1..85: mol_type = other RNA
gggtcccccgactctggctttcccccaggtctacatgttcctggtgaaatggcaggacctgtcggagaaggtggtctaccggcgc

SEQ ID NO: 2847 - RNA, 85 nt, synthetic construct
  source 1..85: mol_type = other RNA
gggtcccccgactctggctttcccccaggtttacatgttcctggtgaaatggcaggacctgtcggagaaggtggtctatagacgc

SEQ ID NO: 2848 - RNA, 85 nt, synthetic construct
  source 1..85: mol_type = other RNA
gggtcccccgactctggctttcccccaggtttacatgttcctggtgaaatggcaggacctgtcggagaaggtggtctatcggcgc

SEQ ID NO: 2849 - RNA, 85 nt, synthetic construct
  source 1..85: mol_type = other RNA
gggtcccccgactctggctttcccccaggtttacatgttcctggtgaaatggcaggacctgtcggagaaggtggtctacagacgc

SEQ ID NO: 2850 - RNA, 85 nt, synthetic construct
  source 1..85: mol_type = other RNA
gggtcccccgactctggctttcccccaggtatacatgttcctggtgaaatggcaggacctgtcggagaaggtggtctaccggcgc

SEQ ID NO: 2851 - RNA, 85 nt, synthetic construct
  source 1..85: mol_type = other RNA
gggtcccccgactctggctttcccccaggtatacatgttcctggtgaaatggcaggacctgtcggagaaggtggtctacagacgc

SEQ ID NO: 2852 - RNA, 85 nt, synthetic construct
  source 1..85: mol_type = other RNA
gggtcccccgactctggctttcccccaggtgtacatgttcctggtgaaatggcaggacctgtcggagaaggtggtctataggcgc

SEQ ID NO: 2853 - RNA, 85 nt, synthetic construct
  source 1..85: mol_type = other RNA
gggtcccccgactctggctttcccccaggtgtacatgttcctggtgaaatggcaggacctgtcggagaaggtggtctatagacgc

SEQ ID NO: 2854 - RNA, 85 nt, synthetic construct
  source 1..85: mol_type = other RNA
gggtcccccgactctggctttcccccaggtgtacatgttcctggtgaaatggcaggacctgtcggagaaggtggtctaccggcgc

SEQ ID NO: 2855 - RNA, 85 nt, synthetic construct
  source 1..85: mol_type = other RNA
gggtcccccgactctggctttcccccaggtgtacatgttcctggtgaaatggcaggacctgtcggagaaggtggtctacaggcgc

SEQ ID NO: 2856 - RNA, 85 nt, synthetic construct
  source 1..85: mol_type = other RNA
gggtcccccgactctggctttcccccaggtgtacatgttcctggtgaaatggcaggacctgtcggagaaggtggtctacagacgc

SEQ ID NO: 2857 - RNA, 85 nt, synthetic construct
  source 1..85: mol_type = other RNA
gggtcccccgactctggctttcccccaggtctacatgttcctggtgaaatggcaggacctgtcggagaaggtggtctatcggcgc

SEQ ID NO: 2858 - RNA, 85 nt, synthetic construct
  source 1..85: mol_type = other RNA
gggtcccccgactctggctttcccccaggtctacatgttcctggtgaaatggcaggacctgtcggagaaggtggtctatagacgc

SEQ ID NO: 2859 - RNA, 85 nt, synthetic construct
  source 1..85: mol_type = other RNA
gggtcccccgactctggctttcccccaggtctacatgttcctggtgaaatggcaggacctgtcggagaaggtggtctataggcgc

SEQ ID NO: 2860 - RNA, 85 nt, synthetic construct
  source 1..85: mol_type = other RNA
gggtcccccgactctggctttcccccaggtctacatgttcctggtgaaatggcaggacctgtcggagaaggtggtctacagacgc

SEQ ID NO: 2861 - RNA, 85 nt, synthetic construct
  source 1..85: mol_type = other RNA
gggtcccccgactctggctttcccccaggtatacatgttcctggtgaaatggcaggacctgtcggagaaggtggtctataggcgc

SEQ ID NO: 2862 - RNA, 85 nt, synthetic construct
  source 1..85: mol_type = other RNA
gggtcccccgactctggctttcccccaggtatacatgttcctggtgaaatggcaggacctgtcggagaaggtggtctatagacgc

SEQ ID NO: 2863 - RNA, 85 nt, synthetic construct
  source 1..85: mol_type = other RNA
gggtcccccgactctggctttcccccaggtgtacatgttcctggtgaaatggcaggacctgtcggagaaggtggtctatcggcgc

SEQ ID NO: 2864 - RNA, 85 nt, synthetic construct
  source 1..85: mol_type = other RNA
gggtcccccgactctggctttcccccaggtatacatgttcctggtgaaatggcaggacctgtcggagaaggtggtctacaggcgc

SEQ ID NO: 2865 - RNA, 85 nt, synthetic construct
  source 1..85: mol_type = other RNA
gggtcccccgactctggctttcccccaggtctacatgttcctggtgaaatggcaggacctgtcggagaaggtggtctacaggcgc

SEQ ID NO: 2866 - RNA, 86 nt, synthetic construct
  source 1..86: mol_type = other RNA
ggggtcccccgactctggctttcccccaggtctacatgttcctggtgaaatggcaggacctgtcggagaaggtggtctatagacgc

SEQ ID NO: 2867 - RNA, 86 nt, synthetic construct
  source 1..86: mol_type = other RNA
ggggtcccccgactctggctttcccccaggtctacatgttcctggtgaaatggcaggacctgtcggagaaggtggtctataggcgc

SEQ ID NO: 2868 - RNA, 86 nt, synthetic construct
  source 1..86: mol_type = other RNA
ggggtcccccgactctggctttcccccaggtgtacatgttcctggtgaaatggcaggacctgtcggagaaggtggtctacaggcgc

SEQ ID NO: 2869 - RNA, 86 nt, synthetic construct
  source 1..86: mol_type = other RNA
ggggtcccccgactctggctttcccccaggtgtacatgttcctggtgaaatggcaggacctgtcggagaaggtggtctatagacgc

SEQ ID NO: 2870 - RNA, 86 nt, synthetic construct
  source 1..86: mol_type = other RNA
ggggtcccccgactctggctttcccccaggtatacatgttcctggtgaaatggcaggacctgtcggagaaggtggtctacaggcgc

SEQ ID NO: 2871 - RNA, 86 nt, synthetic construct
  source 1..86: mol_type = other RNA
ggggtcccccgactctggctttcccccaggtgtacatgttcctggtgaaatggcaggacctgtcggagaaggtggtctataggcgc

SEQ ID NO: 2872 - RNA, 86 nt, synthetic construct
  source 1..86: mol_type = other RNA
ggggtcccccgactctggctttcccccaggtctacatgttcctggtgaaatggcaggacctgtcggagaaggtggtctaccggcgc

SEQ ID NO: 2873 - RNA, 86 nt, synthetic construct
  source 1..86: mol_type = other RNA
ggggtcccccgactctggctttcccccaggtgtacatgttcctggtgaaatggcaggacctgtcggagaaggtggtctatcggcgc

SEQ ID NO: 2874 - RNA, 86 nt, synthetic construct
  source 1..86: mol_type = other RNA
ggggtcccccgactctggctttcccccaggtttacatgttcctggtgaaatggcaggacctgtcggagaaggtggtctacaggcgc

SEQ ID NO: 2875 - RNA, 86 nt, synthetic construct
  source 1..86: mol_type = other RNA
ggggtcccccgactctggctttcccccaggtttacatgttcctggtgaaatggcaggacctgtcggagaaggtggtctaccggcgc

SEQ ID NO: 2876 - RNA, 86 nt, synthetic construct
  source 1..86: mol_type = other RNA
ggggtcccccgactctggctttcccccaggtttacatgttcctggtgaaatggcaggacctgtcggagaaggtggtctatagacgc

SEQ ID NO: 2877 - RNA, 86 nt, synthetic construct
  source 1..86: mol_type = other RNA
ggggtcccccgactctggctttcccccaggtttacatgttcctggtgaaatggcaggacctgtcggagaaggtggtctataggcgc

SEQ ID NO: 2878 - RNA, 86 nt, synthetic construct
  source 1..86: mol_type = other RNA
ggggtcccccgactctggctttcccccaggtttacatgttcctggtgaaatggcaggacctgtcggagaaggtggtctatcggcgc

SEQ ID NO: 2879 - RNA, 86 nt, synthetic construct
  source 1..86: mol_type = other RNA
ggggtcccccgactctggctttcccccaggtatacatgttcctggtgaaatggcaggacctgtcggagaaggtggtctacagacgc

SEQ ID NO: 2880 - RNA, 86 nt, synthetic construct
  source 1..86: mol_type = other RNA
ggggtcccccgactctggctttcccccaggtttacatgttcctggtgaaatggcaggacctgtcggagaaggtggtctacagacgc

SEQ ID NO: 2881 - RNA, 86 nt, synthetic construct
  source 1..86: mol_type = other RNA
ggggtcccccgactctggctttcccccaggtctacatgttcctggtgaaatggcaggacctgtcggagaaggtggtctacaggcgc

SEQ ID NO: 2882 - RNA, 86 nt, synthetic construct
  source 1..86: mol_type = other RNA
ggggtcccccgactctggctttcccccaggtatacatgttcctggtgaaatggcaggacctgtcggagaaggtggtctatcggcgc

SEQ ID NO: 2883 - RNA, 86 nt, synthetic construct
  source 1..86: mol_type = other RNA
ggggtcccccgactctggctttcccccaggtctacatgttcctggtgaaatggcaggacctgtcggagaaggtggtctacagacgc

SEQ ID NO: 2884 - RNA, 86 nt, synthetic construct
  source 1..86: mol_type = other RNA
ggggtcccccgactctggctttcccccaggtgtacatgttcctggtgaaatggcaggacctgtcggagaaggtggtctaccggcgc

SEQ ID NO: 2885 - RNA, 86 nt, synthetic construct
  source 1..86: mol_type = other RNA
ggggtcccccgactctggctttcccccaggtatacatgttcctggtgaaatggcaggacctgtcggagaaggtggtctatagacgc

SEQ ID NO: 2886 - RNA, 86 nt, synthetic construct
  source 1..86: mol_type = other RNA
ggggtcccccgactctggctttcccccaggtatacatgttcctggtgaaatggcaggacctgtcggagaaggtggtctataggcgc

SEQ ID NO: 2887 - RNA, 86 nt, synthetic construct
  source 1..86: mol_type = other RNA
ggggtcccccgactctggctttcccccaggtatacatgttcctggtgaaatggcaggacctgtcggagaaggtggtctaccggcgc

SEQ ID NO: 2888 - RNA, 86 nt, synthetic construct
  source 1..86: mol_type = other RNA
ggggtcccccgactctggctttcccccaggtgtacatgttcctggtgaaatggcaggacctgtcggagaaggtggtctacagacgc

SEQ ID NO: 2889 - RNA, 86 nt, synthetic construct
  source 1..86: mol_type = other RNA
ggggtcccccgactctggctttcccccaggtctacatgttcctggtgaaatggcaggacctgtcggagaaggtggtctatcggcgc

SEQ ID NO: 2890 - RNA, 87 nt, synthetic construct
  source 1..87: mol_type = other RNA
tggggtcccccgactctggctttcccccaggtctacatgttcctggtgaaatggcaggacctgtcggagaaggtggtctacaggcgc

SEQ ID NO: 2891 - RNA, 87 nt, synthetic construct
  source 1..87: mol_type = other RNA
tggggtcccccgactctggctttcccccaggtctacatgttcctggtgaaatggcaggacctgtcggagaaggtggtctataggcgc

SEQ ID NO: 2892 - RNA, 87 nt, synthetic construct
  source 1..87: mol_type = other RNA
tggggtcccccgactctggctttcccccaggtgtacatgttcctggtgaaatggcaggacctgtcggagaaggtggtctatagacgc

SEQ ID NO: 2893 - RNA, 87 nt, synthetic construct
  source 1..87: mol_type = other RNA
tggggtcccccgactctggctttcccccaggtctacatgttcctggtgaaatggcaggacctgtcggagaaggtggtctaccggcgc

SEQ ID NO: 2894 - RNA, 87 nt, synthetic construct
  source 1..87: mol_type = other RNA
tggggtcccccgactctggctttcccccaggtatacatgttcctggtgaaatggcaggacctgtcggagaaggtggtctacagacgc

SEQ ID NO: 2895 - RNA, 87 nt, synthetic construct
  source 1..87: mol_type = other RNA
tggggtcccccgactctggctttcccccaggtatacatgttcctggtgaaatggcaggacctgtcggagaaggtggtctacaggcgc

SEQ ID NO: 2896 - RNA, 87 nt, synthetic construct
  source 1..87: mol_type = other RNA
tggggtcccccgactctggctttcccccaggtatacatgttcctggtgaaatggcaggacctgtcggagaaggtggtctaccggcgc

SEQ ID NO: 2897 - RNA, 87 nt, synthetic construct
  source 1..87: mol_type = other RNA
tggggtcccccgactctggctttcccccaggtatacatgttcctggtgaaatggcaggacctgtcggagaaggtggtctatagacgc

SEQ ID NO: 2898 - RNA, 87 nt, synthetic construct
  source 1..87: mol_type = other RNA
tggggtcccccgactctggctttcccccaggtgtacatgttcctggtgaaatggcaggacctgtcggagaaggtggtctacagacgc

SEQ ID NO: 2899 - RNA, 87 nt, synthetic construct
  source 1..87: mol_type = other RNA
tggggtcccccgactctggctttcccccaggtatacatgttcctggtgaaatggcaggacctgtcggagaaggtggtctataggcgc

SEQ ID NO: 2900 - RNA, 87 nt, synthetic construct
  source 1..87: mol_type = other RNA
tggggtcccccgactctggctttcccccaggtatacatgttcctggtgaaatggcaggacctgtcggagaaggtggtctatcggcgc

SEQ ID NO: 2901 - RNA, 87 nt, synthetic construct
  source 1..87: mol_type = other RNA
tggggtcccccgactctggctttcccccaggtctacatgttcctggtgaaatggcaggacctgtcggagaaggtggtctatcggcgc

SEQ ID NO: 2902 - RNA, 87 nt, synthetic construct
  source 1..87: mol_type = other RNA
tggggtcccccgactctggctttcccccaggtctacatgttcctggtgaaatggcaggacctgtcggagaaggtggtctacagacgc

SEQ ID NO: 2903 - RNA, 87 nt, synthetic construct
  source 1..87: mol_type = other RNA
tggggtcccccgactctggctttcccccaggtctacatgttcctggtgaaatggcaggacctgtcggagaaggtggtctatagacgc

SEQ ID NO: 2904 - RNA, 87 nt, synthetic construct
  source 1..87: mol_type = other RNA
tggggtcccccgactctggctttcccccaggtttacatgttcctggtgaaatggcaggacctgtcggagaaggtggtctataggcgc

SEQ ID NO: 2905 - RNA, 87 nt, synthetic construct
  source 1..87: mol_type = other RNA
tggggtcccccgactctggctttcccccaggtttacatgttcctggtgaaatggcaggacctgtcggagaaggtggtctatcggcgc

SEQ ID NO: 2906 - RNA, 87 nt, synthetic construct
  source 1..87: mol_type = other RNA
tggggtcccccgactctggctttcccccaggtttacatgttcctggtgaaatggcaggacctgtcggagaaggtggtctatagacgc

SEQ ID NO: 2907 - RNA, 87 nt, synthetic construct
  source 1..87: mol_type = other RNA
tggggtcccccgactctggctttcccccaggtttacatgttcctggtgaaatggcaggacctgtcggagaaggtggtctaccggcgc

SEQ ID NO: 2908 - RNA, 87 nt, synthetic construct
  source 1..87: mol_type = other RNA
tggggtcccccgactctggctttcccccaggtttacatgttcctggtgaaatggcaggacctgtcggagaaggtggtctacaggcgc

SEQ ID NO: 2909 - RNA, 87 nt, synthetic construct
  source 1..87: mol_type = other RNA
tggggtcccccgactctggctttcccccaggtgtacatgttcctggtgaaatggcaggacctgtcggagaaggtggtctatcggcgc

SEQ ID NO: 2910 - RNA, 87 nt, synthetic construct
  source 1..87: mol_type = other RNA
tggggtcccccgactctggctttcccccaggtttacatgttcctggtgaaatggcaggacctgtcggagaaggtggtctacagacgc

SEQ ID NO: 2911 - RNA, 87 nt, synthetic construct
  source 1..87: mol_type = other RNA
tggggtcccccgactctggctttcccccaggtgtacatgttcctggtgaaatggcaggacctgtcggagaaggtggtctacaggcgc

SEQ ID NO: 2912 - RNA, 87 nt, synthetic construct
  source 1..87: mol_type = other RNA
tggggtcccccgactctggctttcccccaggtgtacatgttcctggtgaaatggcaggacctgtcggagaaggtggtctataggcgc

SEQ ID NO: 2913 - RNA, 87 nt, synthetic construct
  source 1..87: mol_type = other RNA
tggggtcccccgactctggctttcccccaggtgtacatgttcctggtgaaatggcaggacctgtcggagaaggtggtctaccggcgc

SEQ ID NO: 2914 - RNA, 88 nt, synthetic construct
  source 1..88: mol_type = other RNA
atggggtcccccgactctggctttcccccaggtgtacatgttcctggtgaaatggcaggacctgtcggagaaggtggtctataggcgc

SEQ ID NO: 2915 - RNA, 88 nt, synthetic construct
  source 1..88: mol_type = other RNA
atggggtcccccgactctggctttcccccaggtctacatgttcctggtgaaatggcaggacctgtcggagaaggtggtctataggcgc

SEQ ID NO: 2916 - RNA, 88 nt, synthetic construct
  source 1..88: mol_type = other RNA
atggggtcccccgactctggctttcccccaggtatacatgttcctggtgaaatggcaggacctgtcggagaaggtggtctaccggcgc

SEQ ID NO: 2917 - RNA, 88 nt, synthetic construct
  source 1..88: mol_type = other RNA
atggggtcccccgactctggctttcccccaggtgtacatgttcctggtgaaatggcaggacctgtcggagaaggtggtctatcggcgc

SEQ ID NO: 2918 - RNA, 88 nt, synthetic construct
  source 1..88: mol_type = other RNA
atggggtcccccgactctggctttcccccaggtttacatgttcctggtgaaatggcaggacctgtcggagaaggtggtctacagacgc

SEQ ID NO: 2919 - RNA, 88 nt, synthetic construct
  source 1..88: mol_type = other RNA
atggggtcccccgactctggctttcccccaggtctacatgttcctggtgaaatggcaggacctgtcggagaaggtggtctacagacgc

SEQ ID NO: 2920 - RNA, 88 nt, synthetic construct
  source 1..88: mol_type = other RNA
atggggtcccccgactctggctttcccccaggtctacatgttcctggtgaaatggcaggacctgtcggagaaggtggtctatagacgc

SEQ ID NO: 2921 - RNA, 88 nt, synthetic construct
  source 1..88: mol_type = other RNA
atggggtcccccgactctggctttcccccaggtatacatgttcctggtgaaatggcaggacctgtcggagaaggtggtctacagacgc

SEQ ID NO: 2922 - RNA, 88 nt, synthetic construct
  source 1..88: mol_type = other RNA
atggggtcccccgactctggctttcccccaggtgtacatgttcctggtgaaatggcaggacctgtcggagaaggtggtctacaggcgc

SEQ ID NO: 2923 - RNA, 88 nt, synthetic construct
  source 1..88: mol_type = other RNA
atggggtcccccgactctggctttcccccaggtatacatgttcctggtgaaatggcaggacctgtcggagaaggtggtctatcggcgc

SEQ ID NO: 2924 - RNA, 88 nt, synthetic construct
  source 1..88: mol_type = other RNA
atggggtcccccgactctggctttcccccaggtctacatgttcctggtgaaatggcaggacctgtcggagaaggtggtctaccggcgc

SEQ ID NO: 2925 - RNA, 88 nt, synthetic construct
  source 1..88: mol_type = other RNA
atggggtcccccgactctggctttcccccaggtctacatgttcctggtgaaatggcaggacctgtcggagaaggtggtctacaggcgc

SEQ ID NO: 2926 - RNA, 88 nt, synthetic construct
  source 1..88: mol_type = other RNA
atggggtcccccgactctggctttcccccaggtctacatgttcctggtgaaatggcaggacctgtcggagaaggtggtctatcggcgc

SEQ ID NO: 2927 - RNA, 88 nt, synthetic construct
  source 1..88: mol_type = other RNA
atggggtcccccgactctggctttcccccaggtgtacatgttcctggtgaaatggcaggacctgtcggagaaggtggtctacagacgc

SEQ ID NO: 2928 - RNA, 88 nt, synthetic construct
  source 1..88: mol_type = other RNA
atggggtcccccgactctggctttcccccaggtgtacatgttcctggtgaaatggcaggacctgtcggagaaggtggtctaccggcgc

SEQ ID NO: 2929 - RNA, 88 nt, synthetic construct
  source 1..88: mol_type = other RNA
atggggtcccccgactctggctttcccccaggtatacatgttcctggtgaaatggcaggacctgtcggagaaggtggtctataggcgc

SEQ ID NO: 2930 - RNA, 88 nt, synthetic construct
  source 1..88: mol_type = other RNA
atggggtcccccgactctggctttcccccaggtatacatgttcctggtgaaatggcaggacctgtcggagaaggtggtctatagacgc

SEQ ID NO: 2931 - RNA, 88 nt, synthetic construct
  source 1..88: mol_type = other RNA
atggggtcccccgactctggctttcccccaggtgtacatgttcctggtgaaatggcaggacctgtcggagaaggtggtctatagacgc

SEQ ID NO: 2932 - RNA, 88 nt, synthetic construct
  source 1..88: mol_type = other RNA
atggggtcccccgactctggctttcccccaggtttacatgttcctggtgaaatggcaggacctgtcggagaaggtggtctatcggcgc

SEQ ID NO: 2933 - RNA, 88 nt, synthetic construct
  source 1..88: mol_type = other RNA
atggggtcccccgactctggctttcccccaggtttacatgttcctggtgaaatggcaggacctgtcggagaaggtggtctataggcgc

SEQ ID NO: 2934 - RNA, 88 nt, synthetic construct
  source 1..88: mol_type = other RNA
atggggtcccccgactctggctttcccccaggtttacatgttcctggtgaaatggcaggacctgtcggagaaggtggtctatagacgc

SEQ ID NO: 2935 - RNA, 88 nt, synthetic construct
  source 1..88: mol_type = other RNA
atggggtcccccgactctggctttcccccaggtttacatgttcctggtgaaatggcaggacctgtcggagaaggtggtctacaggcgc

SEQ ID NO: 2936 - RNA, 88 nt, synthetic construct
  source 1..88: mol_type = other RNA
atggggtcccccgactctggctttcccccaggtatacatgttcctggtgaaatggcaggacctgtcggagaaggtggtctacaggcgc

SEQ ID NO: 2937 - RNA, 88 nt, synthetic construct
  source 1..88: mol_type = other RNA
atggggtcccccgactctggctttcccccaggtttacatgttcctggtgaaatggcaggacctgtcggagaaggtggtctaccggcgc

SEQ ID NO: 2938 - RNA, 89 nt, synthetic construct
  source 1..89: mol_type = other RNA
aatggggtcccccgactctggctttcccccaggtttacatgttcctggtgaaatggcaggacctgtcggagaaggtggtctataggcgc

SEQ ID NO: 2939 - RNA, 89 nt, synthetic construct
  source 1..89: mol_type = other RNA
aatggggtcccccgactctggctttcccccaggtgtacatgttcctggtgaaatggcaggacctgtcggagaaggtggtctaccggcgc

SEQ ID NO: 2940 - RNA, 89 nt, synthetic construct
  source 1..89: mol_type = other RNA
aatggggtcccccgactctggctttcccccaggtgtacatgttcctggtgaaatggcaggacctgtcggagaaggtggtctatagacgc

SEQ ID NO: 2941 - RNA, 89 nt, synthetic construct
  source 1..89: mol_type = other RNA
aatggggtcccccgactctggctttcccccaggtttacatgttcctggtgaaatggcaggacctgtcggagaaggtggtctacagacgc

SEQ ID NO: 2942 - RNA, 89 nt, synthetic construct
  source 1..89: mol_type = other RNA
aatggggtcccccgactctggctttcccccaggtttacatgttcctggtgaaatggcaggacctgtcggagaaggtggtctacaggcgc

SEQ ID NO: 2943 - RNA, 89 nt, synthetic construct
  source 1..89: mol_type = other RNA
aatggggtcccccgactctggctttcccccaggtttacatgttcctggtgaaatggcaggacctgtcggagaaggtggtctatagacgc

SEQ ID NO: 2944 - RNA, 89 nt, synthetic construct
  source 1..89: mol_type = other RNA
aatggggtcccccgactctggctttcccccaggtctacatgttcctggtgaaatggcaggacctgtcggagaaggtggtctacaggcgc

SEQ ID NO: 2945 - RNA, 89 nt, synthetic construct
  source 1..89: mol_type = other RNA
aatggggtcccccgactctggctttcccccaggtttacatgttcctggtgaaatggcaggacctgtcggagaaggtggtctatcggcgc

SEQ ID NO: 2946 - RNA, 89 nt, synthetic construct
  source 1..89: mol_type = other RNA
aatggggtcccccgactctggctttcccccaggtgtacatgttcctggtgaaatggcaggacctgtcggagaaggtggtctatcggcgc

SEQ ID NO: 2947 - RNA, 89 nt, synthetic construct
  source 1..89: mol_type = other RNA
aatggggtcccccgactctggctttcccccaggtctacatgttcctggtgaaatggcaggacctgtcggagaaggtggtctacagacgc

SEQ ID NO: 2948 - RNA, 89 nt, synthetic construct
  source 1..89: mol_type = other RNA
aatggggtcccccgactctggctttcccccaggtatacatgttcctggtgaaatggcaggacctgtcggagaaggtggtctataggcgc

SEQ ID NO: 2949 - RNA, 89 nt, synthetic construct
  source 1..89: mol_type = other RNA
aatggggtcccccgactctggctttcccccaggtatacatgttcctggtgaaatggcaggacctgtcggagaaggtggtctaccggcgc

SEQ ID NO: 2950 - RNA, 89 nt, synthetic construct
  source 1..89: mol_type = other RNA
aatggggtcccccgactctggctttcccccaggtatacatgttcctggtgaaatggcaggacctgtcggagaaggtggtctacaggcgc

SEQ ID NO: 2951 - RNA, 89 nt, synthetic construct
  source 1..89: mol_type = other RNA
aatggggtcccccgactctggctttcccccaggtatacatgttcctggtgaaatggcaggacctgtcggagaaggtggtctacagacgc

SEQ ID NO: 2952 - RNA, 89 nt, synthetic construct
  source 1..89: mol_type = other RNA
aatggggtcccccgactctggctttcccccaggtctacatgttcctggtgaaatggcaggacctgtcggagaaggtggtctatagacgc

SEQ ID NO: 2953 - RNA, 89 nt, synthetic construct
  source 1..89: mol_type = other RNA
aatggggtcccccgactctggctttcccccaggtctacatgttcctggtgaaatggcaggacctgtcggagaaggtggtctaccggcgc

SEQ ID NO: 2954 - RNA, 89 nt, synthetic construct
  source 1..89: mol_type = other RNA
aatggggtcccccgactctggctttcccccaggtatacatgttcctggtgaaatggcaggacctgtcggagaaggtggtctatagacgc

SEQ ID NO: 2955 - RNA, 89 nt, synthetic construct
  source 1..89: mol_type = other RNA
aatggggtcccccgactctggctttcccccaggtatacatgttcctggtgaaatggcaggacctgtcggagaaggtggtctatcggcgc

SEQ ID NO: 2956 - RNA, 89 nt, synthetic construct
  source 1..89: mol_type = other RNA
aatggggtcccccgactctggctttcccccaggtgtacatgttcctggtgaaatggcaggacctgtcggagaaggtggtctacaggcgc

SEQ ID NO: 2957 - RNA, 89 nt, synthetic construct
  source 1..89: mol_type = other RNA
aatggggtcccccgactctggctttcccccaggtgtacatgttcctggtgaaatggcaggacctgtcggagaaggtggtctataggcgc

SEQ ID NO: 2958 - RNA, 89 nt, synthetic construct
  source 1..89: mol_type = other RNA
aatggggtcccccgactctggctttcccccaggtttacatgttcctggtgaaatggcaggacctgtcggagaaggtggtctaccggcgc

SEQ ID NO: 2959 - RNA, 89 nt, synthetic construct
  source 1..89: mol_type = other RNA
aatggggtcccccgactctggctttcccccaggtctacatgttcctggtgaaatggcaggacctgtcggagaaggtggtctataggcgc

SEQ ID NO: 2960 - RNA, 89 nt, synthetic construct
  source 1..89: mol_type = other RNA
aatggggtcccccgactctggctttcccccaggtctacatgttcctggtgaaatggcaggacctgtcggagaaggtggtctatcggcgc

SEQ ID NO: 2961 - RNA, 89 nt, synthetic construct
  source 1..89: mol_type = other RNA
aatggggtcccccgactctggctttcccccaggtgtacatgttcctggtgaaatggcaggacctgtcggagaaggtggtctacagacgc

SEQ ID NO: 2962 - RNA, 90 nt, synthetic construct
  source 1..90: mol_type = other RNA
gaatggggtcccccgactctggctttcccccaggtgtacatgttcctggtgaaatggcaggacctgtcggagaaggtggtctacagacgc

SEQ ID NO: 2963 - RNA, 90 nt, synthetic construct
  source 1..90: mol_type = other RNA
gaatggggtcccccgactctggctttcccccaggtatacatgttcctggtgaaatggcaggacctgtcggagaaggtggtctacaggcgc

SEQ ID NO: 2964 - RNA, 90 nt, synthetic construct
  source 1..90: mol_type = other RNA
gaatggggtcccccgactctggctttcccccaggtatacatgttcctggtgaaatggcaggacctgtcggagaaggtggtctataggcgc

SEQ ID NO: 2965 - RNA, 90 nt, synthetic construct
  source 1..90: mol_type = other RNA
gaatggggtcccccgactctggctttcccccaggtatacatgttcctggtgaaatggcaggacctgtcggagaaggtggtctacagacgc

SEQ ID NO: 2966 - RNA, 90 nt, synthetic construct
  source 1..90: mol_type = other RNA
gaatggggtcccccgactctggctttcccccaggtgtacatgttcctggtgaaatggcaggacctgtcggagaaggtggtctataggcgc

SEQ ID NO: 2967 - RNA, 90 nt, synthetic construct
  source 1..90: mol_type = other RNA
gaatggggtcccccgactctggctttcccccaggtgtacatgttcctggtgaaatggcaggacctgtcggagaaggtggtctatcggcgc

SEQ ID NO: 2968 - RNA, 90 nt, synthetic construct
  source 1..90: mol_type = other RNA
gaatggggtcccccgactctggctttcccccaggtgtacatgttcctggtgaaatggcaggacctgtcggagaaggtggtctacaggcgc

SEQ ID NO: 2969 - RNA, 90 nt, synthetic construct
  source 1..90: mol_type = other RNA
gaatggggtcccccgactctggctttcccccaggtttacatgttcctggtgaaatggcaggacctgtcggagaaggtggtctacaggcgc

SEQ ID NO: 2970 - RNA, 90 nt, synthetic construct
  source 1..90: mol_type = other RNA
gaatggggtcccccgactctggctttcccccaggtttacatgttcctggtgaaatggcaggacctgtcggagaaggtggtctaccggcgc

SEQ ID NO: 2971 - RNA, 90 nt, synthetic construct
  source 1..90: mol_type = other RNA
gaatggggtcccccgactctggctttcccccaggtgtacatgttcctggtgaaatggcaggacctgtcggagaaggtggtctatagacgc

SEQ ID NO: 2972 - RNA, 90 nt, synthetic construct
  source 1..90: mol_type = other RNA
gaatggggtcccccgactctggctttcccccaggtttacatgttcctggtgaaatggcaggacctgtcggagaaggtggtctatagacgc

SEQ ID NO: 2973 - RNA, 90 nt, synthetic construct
  source 1..90: mol_type = other RNA
gaatggggtcccccgactctggctttcccccaggtttacatgttcctggtgaaatggcaggacctgtcggagaaggtggtctataggcgc

SEQ ID NO: 2974 - RNA, 90 nt, synthetic construct
  source 1..90: mol_type = other RNA
gaatggggtcccccgactctggctttcccccaggtgtacatgttcctggtgaaatggcaggacctgtcggagaaggtggtctaccggcgc

SEQ ID NO: 2975 - RNA, 90 nt, synthetic construct
  source 1..90: mol_type = other RNA
gaatggggtcccccgactctggctttcccccaggtttacatgttcctggtgaaatggcaggacctgtcggagaaggtggtctatcggcgc

SEQ ID NO: 2976 - RNA, 90 nt, synthetic construct
  source 1..90: mol_type = other RNA
gaatggggtcccccgactctggctttcccccaggtctacatgttcctggtgaaatggcaggacctgtcggagaaggtggtctatcggcgc

SEQ ID NO: 2977 - RNA, 90 nt, synthetic construct
  source 1..90: mol_type = other RNA
gaatggggtcccccgactctggctttcccccaggtctacatgttcctggtgaaatggcaggacctgtcggagaaggtggtctatagacgc

SEQ ID NO: 2978 - RNA, 90 nt, synthetic construct
  source 1..90: mol_type = other RNA
gaatggggtcccccgactctggctttcccccaggtctacatgttcctggtgaaatggcaggacctgtcggagaaggtggtctaccggcgc

SEQ ID NO: 2979 - RNA, 90 nt, synthetic construct
  source 1..90: mol_type = other RNA
gaatggggtcccccgactctggctttcccccaggtctacatgttcctggtgaaatggcaggacctgtcggagaaggtggtctacaggcgc

SEQ ID NO: 2980 - RNA, 90 nt, synthetic construct
  source 1..90: mol_type = other RNA
gaatggggtcccccgactctggctttcccccaggtctacatgttcctggtgaaatggcaggacctgtcggagaaggtggtctacagacgc

SEQ ID NO: 2981 - RNA, 90 nt, synthetic construct
  source 1..90: mol_type = other RNA
gaatggggtcccccgactctggctttcccccaggtatacatgttcctggtgaaatggcaggacctgtcggagaaggtggtctatcggcgc

SEQ ID NO: 2982 - RNA, 90 nt, synthetic construct
  source 1..90: mol_type = other RNA
gaatggggtcccccgactctggctttcccccaggtatacatgttcctggtgaaatggcaggacctgtcggagaaggtggtctatagacgc

SEQ ID NO: 2983 - RNA, 90 nt, synthetic construct
  source 1..90: mol_type = other RNA
gaatggggtcccccgactctggctttcccccaggtctacatgttcctggtgaaatggcaggacctgtcggagaaggtggtctataggcgc

SEQ ID NO: 2984 - RNA, 90 nt, synthetic construct
  source 1..90: mol_type = other RNA
gaatggggtcccccgactctggctttcccccaggtttacatgttcctggtgaaatggcaggacctgtcggagaaggtggtctacagacgc

SEQ ID NO: 2985 - RNA, 90 nt, synthetic construct
  source 1..90: mol_type = other RNA
gaatggggtcccccgactctggctttcccccaggtatacatgttcctggtgaaatggcaggacctgtcggagaaggtggtctaccggcgc

SEQ ID NO: 2986 - RNA, 91 nt, synthetic construct
  source 1..91: mol_type = other RNA
tgaatggggtcccccgactctggctttcccccaggtttacatgttcctggtgaaatggcaggacctgtcggagaaggtggtctatcggcgc

SEQ ID NO: 2987 - RNA, 91 nt, synthetic construct
  source 1..91: mol_type = other RNA
tgaatggggtcccccgactctggctttcccccaggtttacatgttcctggtgaaatggcaggacctgtcggagaaggtggtctataggcgc

SEQ ID NO: 2988 - RNA, 91 nt, synthetic construct
  source 1..91: mol_type = other RNA
tgaatggggtcccccgactctggctttcccccaggtatacatgttcctggtgaaatggcaggacctgtcggagaaggtggtctataggcgc

SEQ ID NO: 2989 - RNA, 91 nt, synthetic construct
  source 1..91: mol_type = other RNA
tgaatggggtcccccgactctggctttcccccaggtatacatgttcctggtgaaatggcaggacctgtcggagaaggtggtctaccggcgc

SEQ ID NO: 2990 - RNA, 91 nt, synthetic construct
  source 1..91: mol_type = other RNA
tgaatggggtcccccgactctggctttcccccaggtttacatgttcctggtgaaatggcaggacctgtcggagaaggtggtctatagacgc

SEQ ID NO: 2991 - RNA, 91 nt, synthetic construct
  source 1..91: mol_type = other RNA
tgaatggggtcccccgactctggctttcccccaggtttacatgttcctggtgaaatggcaggacctgtcggagaaggtggtctaccggcgc

SEQ ID NO: 2992 - RNA, 91 nt, synthetic construct
  source 1..91: mol_type = other RNA
tgaatggggtcccccgactctggctttcccccaggtttacatgttcctggtgaaatggcaggacctgtcggagaaggtggtctacagacgc

SEQ ID NO: 2993 - RNA, 91 nt, synthetic construct
  source 1..91: mol_type = other RNA
tgaatggggtcccccgactctggctttcccccaggtatacatgttcctggtgaaatggcaggacctgtcggagaaggtggtctatcggcgc

SEQ ID NO: 2994 - RNA, 91 nt, synthetic construct
  source 1..91: mol_type = other RNA
tgaatggggtcccccgactctggctttcccccaggtatacatgttcctggtgaaatggcaggacctgtcggagaaggtggtctacagacgc

SEQ ID NO: 2995 - RNA, 91 nt, synthetic construct
  source 1..91: mol_type = other RNA
tgaatggggtcccccgactctggctttcccccaggtctacatgttcctggtgaaatggcaggacctgtcggagaaggtggtctacagacgc

SEQ ID NO: 2996 - RNA, 91 nt, synthetic construct
  source 1..91: mol_type = other RNA
tgaatggggtcccccgactctggctttcccccaggtctacatgttcctggtgaaatggcaggacctgtcggagaaggtggtctacaggcgc

SEQ ID NO: 2997 - RNA, 91 nt, synthetic construct
  source 1..91: mol_type = other RNA
tgaatggggtcccccgactctggctttcccccaggtctacatgttcctggtgaaatggcaggacctgtcggagaaggtggtctaccggcgc

SEQ ID NO: 2998 - RNA, 91 nt, synthetic construct
  source 1..91: mol_type = other RNA
tgaatggggtcccccgactctggctttcccccaggtctacatgttcctggtgaaatggcaggacctgtcggagaaggtggtctatagacgc

SEQ ID NO: 2999 - RNA, 91 nt, synthetic construct
  source 1..91: mol_type = other RNA
tgaatggggtcccccgactctggctttcccccaggtttacatgttcctggtgaaatggcaggacctgtcggagaaggtggtctacaggcgc

SEQ ID NO: 3000 - RNA, 91 nt, synthetic construct
  source 1..91: mol_type = other RNA
tgaatggggtcccccgactctggctttcccccaggtctacatgttcctggtgaaatggcaggacctgtcggagaaggtggtctataggcgc

SEQ ID NO: 3001 - RNA, 91 nt, synthetic construct
  source 1..91: mol_type = other RNA
tgaatggggtcccccgactctggctttcccccaggtgtacatgttcctggtgaaatggcaggacctgtcggagaaggtggtctacagacgc

SEQ ID NO: 3002 - RNA, 91 nt, synthetic construct
  source 1..91: mol_type = other RNA
tgaatggggtcccccgactctggctttcccccaggtctacatgttcctggtgaaatggcaggacctgtcggagaaggtggtctatcggcgc

SEQ ID NO: 3003 - RNA, 91 nt, synthetic construct
  source 1..91: mol_type = other RNA
tgaatggggtcccccgactctggctttcccccaggtatacatgttcctggtgaaatggcaggacctgtcggagaaggtggtctatagacgc

SEQ ID NO: 3004 - RNA, 91 nt, synthetic construct
  source 1..91: mol_type = other RNA
tgaatggggtcccccgactctggctttcccccaggtgtacatgttcctggtgaaatggcaggacctgtcggagaaggtggtctaccggcgc

SEQ ID NO: 3005 - RNA, 91 nt, synthetic construct
  source 1..91: mol_type = other RNA
tgaatggggtcccccgactctggctttcccccaggtgtacatgttcctggtgaaatggcaggacctgtcggagaaggtggtctatagacgc

SEQ ID NO: 3006 - RNA, 91 nt, synthetic construct
  source 1..91: mol_type = other RNA
tgaatggggtcccccgactctggctttcccccaggtgtacatgttcctggtgaaatggcaggacctgtcggagaaggtggtctatcggcgc

SEQ ID NO: 3007 - RNA, 91 nt, synthetic construct
  source 1..91: mol_type = other RNA
tgaatggggtcccccgactctggctttcccccaggtgtacatgttcctggtgaaatggcaggacctgtcggagaaggtggtctataggcgc

SEQ ID NO: 3008 - RNA, 91 nt, synthetic construct
  source 1..91: mol_type = other RNA
tgaatggggtcccccgactctggctttcccccaggtatacatgttcctggtgaaatggcaggacctgtcggagaaggtggtctacaggcgc

SEQ ID NO: 3009 - RNA, 91 nt, synthetic construct
  source 1..91: mol_type = other RNA
tgaatggggtcccccgactctggctttcccccaggtgtacatgttcctggtgaaatggcaggacctgtcggagaaggtggtctacaggcgc

SEQ ID NO: 3010 - RNA, 92 nt, synthetic construct
  source 1..92: mol_type = other RNA
ctgaatggggtcccccgactctggctttcccccaggtctacatgttcctggtgaaatggcaggacctgtcggagaaggtggtctaccggcgc

SEQ ID NO: 3011 - RNA, 92 nt, synthetic construct
  source 1..92: mol_type = other RNA
ctgaatggggtcccccgactctggctttcccccaggtttacatgttcctggtgaaatggcaggacctgtcggagaaggtggtctataggcgc

SEQ ID NO: 3012 - RNA, 92 nt, synthetic construct
  source 1..92: mol_type = other RNA
ctgaatggggtcccccgactctggctttcccccaggtttacatgttcctggtgaaatggcaggacctgtcggagaaggtggtctacagacgc

SEQ ID NO: 3013 - RNA, 92 nt, synthetic construct
  source 1..92: mol_type = other RNA
ctgaatggggtcccccgactctggctttcccccaggtctacatgttcctggtgaaatggcaggacctgtcggagaaggtggtctatcggcgc

SEQ ID NO: 3014 - RNA, 92 nt, synthetic construct
  source 1..92: mol_type = other RNA
ctgaatggggtcccccgactctggctttcccccaggtgtacatgttcctggtgaaatggcaggacctgtcggagaaggtggtctataggcgc

SEQ ID NO: 3015 - RNA, 92 nt, synthetic construct
  source 1..92: mol_type = other RNA
ctgaatggggtcccccgactctggctttcccccaggtctacatgttcctggtgaaatggcaggacctgtcggagaaggtggtctataggcgc

SEQ ID NO: 3016 - RNA, 92 nt, synthetic construct
  source 1..92: mol_type = other RNA
ctgaatggggtcccccgactctggctttcccccaggtttacatgttcctggtgaaatggcaggacctgtcggagaaggtggtctatcggcgc

SEQ ID NO: 3017 - RNA, 92 nt, synthetic construct
  source 1..92: mol_type = other RNA
ctgaatggggtcccccgactctggctttcccccaggtctacatgttcctggtgaaatggcaggacctgtcggagaaggtggtctacaggcgc

SEQ ID NO: 3018 - RNA, 92 nt, synthetic construct
  source 1..92: mol_type = other RNA
ctgaatggggtcccccgactctggctttcccccaggtttacatgttcctggtgaaatggcaggacctgtcggagaaggtggtctacaggcgc

SEQ ID NO: 3019 - RNA, 92 nt, synthetic construct
  source 1..92: mol_type = other RNA
ctgaatggggtcccccgactctggctttcccccaggtctacatgttcctggtgaaatggcaggacctgtcggagaaggtggtctacagacgc

SEQ ID NO: 3020 - RNA, 92 nt, synthetic construct
  source 1..92: mol_type = other RNA
ctgaatggggtcccccgactctggctttcccccaggtatacatgttcctggtgaaatggcaggacctgtcggagaaggtggtctataggcgc

SEQ ID NO: 3021 - RNA, 92 nt, synthetic construct
  source 1..92: mol_type = other RNA
ctgaatggggtcccccgactctggctttcccccaggtatacatgttcctggtgaaatggcaggacctgtcggagaaggtggtctatagacgc

SEQ ID NO: 3022 - RNA, 92 nt, synthetic construct
  source 1..92: mol_type = other RNA
ctgaatggggtcccccgactctggctttcccccaggtatacatgttcctggtgaaatggcaggacctgtcggagaaggtggtctaccggcgc

SEQ ID NO: 3023 - RNA, 92 nt, synthetic construct
  source 1..92: mol_type = other RNA
ctgaatggggtcccccgactctggctttcccccaggtttacatgttcctggtgaaatggcaggacctgtcggagaaggtggtctatagacgc

SEQ ID NO: 3024 - RNA, 92 nt, synthetic construct
  source 1..92: mol_type = other RNA
ctgaatggggtcccccgactctggctttcccccaggtatacatgttcctggtgaaatggcaggacctgtcggagaaggtggtctacagacgc

SEQ ID NO: 3025 - RNA, 92 nt, synthetic construct
  source 1..92: mol_type = other RNA
ctgaatggggtcccccgactctggctttcccccaggtctacatgttcctggtgaaatggcaggacctgtcggagaaggtggtctatagacgc

SEQ ID NO: 3026 - RNA, 92 nt, synthetic construct
  source 1..92: mol_type = other RNA
ctgaatggggtcccccgactctggctttcccccaggtatacatgttcctggtgaaatggcaggacctgtcggagaaggtggtctatcggcgc

SEQ ID NO: 3027 - RNA, 92 nt, synthetic construct
  source 1..92: mol_type = other RNA
ctgaatggggtcccccgactctggctttcccccaggtgtacatgttcctggtgaaatggcaggacctgtcggagaaggtggtctatcggcgc

SEQ ID NO: 3028 - RNA, 92 nt, synthetic construct
  source 1..92: mol_type = other RNA
ctgaatggggtcccccgactctggctttcccccaggtgtacatgttcctggtgaaatggcaggacctgtcggagaaggtggtctatagacgc

SEQ ID NO: 3029 - RNA, 92 nt, synthetic construct
  source 1..92: mol_type = other RNA
ctgaatggggtcccccgactctggctttcccccaggtttacatgttcctggtgaaatggcaggacctgtcggagaaggtggtctaccggcgc

SEQ ID NO: 3030 - RNA, 92 nt, synthetic construct
  source 1..92: mol_type = other RNA
ctgaatggggtcccccgactctggctttcccccaggtatacatgttcctggtgaaatggcaggacctgtcggagaaggtggtctacaggcgc

SEQ ID NO: 3031 - RNA, 92 nt, synthetic construct
  source 1..92: mol_type = other RNA
ctgaatggggtcccccgactctggctttcccccaggtgtacatgttcctggtgaaatggcaggacctgtcggagaaggtggtctacagacgc

SEQ ID NO: 3032 - RNA, 92 nt, synthetic construct
  source 1..92: mol_type = other RNA
ctgaatggggtcccccgactctggctttcccccaggtgtacatgttcctggtgaaatggcaggacctgtcggagaaggtggtctacaggcgc

SEQ ID NO: 3033 - RNA, 92 nt, synthetic construct
  source 1..92: mol_type = other RNA
ctgaatggggtcccccgactctggctttcccccaggtgtacatgttcctggtgaaatggcaggacctgtcggagaaggtggtctaccggcgc

SEQ ID NO: 3034 - RNA, 93 nt, synthetic construct
  source 1..93: mol_type = other RNA
gctgaatggggtcccccgactctggctttcccccaggtatacatgttcctggtgaaatggcaggacctgtcggagaaggtggtctacaggcgc

SEQ ID NO: 3035 - RNA, 93 nt, synthetic construct
  source 1..93: mol_type = other RNA
gctgaatggggtcccccgactctggctttcccccaggtttacatgttcctggtgaaatggcaggacctgtcggagaaggtggtctatcggcgc

SEQ ID NO: 3036 - RNA, 93 nt, synthetic construct
  source 1..93: mol_type = other RNA
gctgaatggggtcccccgactctggctttcccccaggtatacatgttcctggtgaaatggcaggacctgtcggagaaggtggtctacagacgc

SEQ ID NO: 3037 - RNA, 93 nt, synthetic construct
  source 1..93: mol_type = other RNA
gctgaatggggtcccccgactctggctttcccccaggtatacatgttcctggtgaaatggcaggacctgtcggagaaggtggtctatcggcgc

SEQ ID NO: 3038 - RNA, 93 nt, synthetic construct
  source 1..93: mol_type = other RNA
gctgaatggggtcccccgactctggctttcccccaggtatacatgttcctggtgaaatggcaggacctgtcggagaaggtggtctataggcgc

SEQ ID NO: 3039 - RNA, 93 nt, synthetic construct
  source 1..93: mol_type = other RNA
gctgaatggggtcccccgactctggctttcccccaggtatacatgttcctggtgaaatggcaggacctgtcggagaaggtggtctatagacgc

SEQ ID NO: 3040 - RNA, 93 nt, synthetic construct
  source 1..93: mol_type = other RNA
gctgaatggggtcccccgactctggctttcccccaggtatacatgttcctggtgaaatggcaggacctgtcggagaaggtggtctaccggcgc

SEQ ID NO: 3041 - RNA, 93 nt, synthetic construct
  source 1..93: mol_type = other RNA
gctgaatggggtcccccgactctggctttcccccaggtctacatgttcctggtgaaatggcaggacctgtcggagaaggtggtctatcggcgc

SEQ ID NO: 3042 - RNA, 93 nt, synthetic construct
  source 1..93: mol_type = other RNA
gctgaatggggtcccccgactctggctttcccccaggtctacatgttcctggtgaaatggcaggacctgtcggagaaggtggtctataggcgc

SEQ ID NO: 3043 - RNA, 93 nt, synthetic construct
  source 1..93: mol_type = other RNA
gctgaatggggtcccccgactctggctttcccccaggtctacatgttcctggtgaaatggcaggacctgtcggagaaggtggtctaccggcgc

SEQ ID NO: 3044 - RNA, 93 nt, synthetic construct
  source 1..93: mol_type = other RNA
gctgaatggggtcccccgactctggctttcccccaggtgtacatgttcctggtgaaatggcaggacctgtcggagaaggtggtctatcggcgc

SEQ ID NO: 3045 - RNA, 93 nt, synthetic construct
  source 1..93: mol_type = other RNA
gctgaatggggtcccccgactctggctttcccccaggtgtacatgttcctggtgaaatggcaggacctgtcggagaaggtggtctacagacgc

SEQ ID NO: 3046 - RNA, 93 nt, synthetic construct
  source 1..93: mol_type = other RNA
gctgaatggggtcccccgactctggctttcccccaggtgtacatgttcctggtgaaatggcaggacctgtcggagaaggtggtctatagacgc

SEQ ID NO: 3047 - RNA, 93 nt, synthetic construct
  source 1..93: mol_type = other RNA
gctgaatggggtcccccgactctggctttcccccaggtgtacatgttcctggtgaaatggcaggacctgtcggagaaggtggtctacaggcgc

SEQ ID NO: 3048 - RNA, 93 nt, synthetic construct
  source 1..93: mol_type = other RNA
gctgaatggggtcccccgactctggctttcccccaggtgtacatgttcctggtgaaatggcaggacctgtcggagaaggtggtctataggcgc

SEQ ID NO: 3049 - RNA, 93 nt, synthetic construct
  source 1..93: mol_type = other RNA
gctgaatggggtcccccgactctggctttcccccaggtttacatgttcctggtgaaatggcaggacctgtcggagaaggtggtctacagacgc

SEQ ID NO: 3050 - RNA, 93 nt, synthetic construct
  source 1..93: mol_type = other RNA
gctgaatggggtcccccgactctggctttcccccaggtttacatgttcctggtgaaatggcaggacctgtcggagaaggtggtctacaggcgc

SEQ ID NO: 3051 - RNA, 93 nt, synthetic construct
  source 1..93: mol_type = other RNA
gctgaatggggtcccccgactctggctttcccccaggtttacatgttcctggtgaaatggcaggacctgtcggagaaggtggtctaccggcgc

SEQ ID NO: 3052 - RNA, 93 nt, synthetic construct
  source 1..93: mol_type = other RNA
gctgaatggggtcccccgactctggctttcccccaggtttacatgttcctggtgaaatggcaggacctgtcggagaaggtggtctatagacgc

SEQ ID NO: 3053 - RNA, 93 nt, synthetic construct
  source 1..93: mol_type = other RNA
gctgaatggggtcccccgactctggctttcccccaggtttacatgttcctggtgaaatggcaggacctgtcggagaaggtggtctataggcgc

SEQ ID NO: 3054 - RNA, 93 nt, synthetic construct
  source 1..93: mol_type = other RNA
gctgaatggggtcccccgactctggctttcccccaggtctacatgttcctggtgaaatggcaggacctgtcggagaaggtggtctacaggcgc

SEQ ID NO: 3055 - RNA, 93 nt, synthetic construct
  source 1..93: mol_type = other RNA
gctgaatggggtcccccgactctggctttcccccaggtctacatgttcctggtgaaatggcaggacctgtcggagaaggtggtctatagacgc

SEQ ID NO: 3056 - RNA, 93 nt, synthetic construct
  source 1..93: mol_type = other RNA
gctgaatggggtcccccgactctggctttcccccaggtctacatgttcctggtgaaatggcaggacctgtcggagaaggtggtctacagacgc

SEQ ID NO: 3057 - RNA, 93 nt, synthetic construct
  source 1..93: mol_type = other RNA
gctgaatggggtcccccgactctggctttcccccaggtgtacatgttcctggtgaaatggcaggacctgtcggagaaggtggtctaccggcgc

SEQ ID NO: 3058 - RNA, 94 nt, synthetic construct
  source 1..94: mol_type = other RNA
ggctgaatggggtcccccgactctggctttcccccaggtctacatgttcctggtgaaatggcaggacctgtcggagaaggtggtctacaggcgc

SEQ ID NO: 3059 - RNA, 94 nt, synthetic construct
  source 1..94: mol_type = other RNA
ggctgaatggggtcccccgactctggctttcccccaggtctacatgttcctggtgaaatggcaggacctgtcggagaaggtggtctacagacgc

SEQ ID NO: 3060 - RNA, 94 nt, synthetic construct
  source 1..94: mol_type = other RNA
ggctgaatggggtcccccgactctggctttcccccaggtgtacatgttcctggtgaaatggcaggacctgtcggagaaggtggtctatagacgc

SEQ ID NO: 3061 - RNA, 94 nt, synthetic construct
  source 1..94: mol_type = other RNA
ggctgaatggggtcccccgactctggctttcccccaggtatacatgttcctggtgaaatggcaggacctgtcggagaaggtggtctacaggcgc

SEQ ID NO: 3062 - RNA, 94 nt, synthetic construct
  source 1..94: mol_type = other RNA
ggctgaatggggtcccccgactctggctttcccccaggtctacatgttcctggtgaaatggcaggacctgtcggagaaggtggtctaccggcgc

SEQ ID NO: 3063 - RNA, 94 nt, synthetic construct
  source 1..94: mol_type = other RNA
ggctgaatggggtcccccgactctggctttcccccaggtctacatgttcctggtgaaatggcaggacctgtcggagaaggtggtctatagacgc

SEQ ID NO: 3064 - RNA, 94 nt, synthetic construct
  source 1..94: mol_type = other RNA
ggctgaatggggtcccccgactctggctttcccccaggtctacatgttcctggtgaaatggcaggacctgtcggagaaggtggtctatcggcgc

SEQ ID NO: 3065 - RNA, 94 nt, synthetic construct
  source 1..94: mol_type = other RNA
ggctgaatggggtcccccgactctggctttcccccaggtgtacatgttcctggtgaaatggcaggacctgtcggagaaggtggtctatcggcgc

SEQ ID NO: 3066 - RNA, 94 nt, synthetic construct
  source 1..94: mol_type = other RNA
ggctgaatggggtcccccgactctggctttcccccaggtatacatgttcctggtgaaatggcaggacctgtcggagaaggtggtctatcggcgc

SEQ ID NO: 3067 - RNA, 94 nt, synthetic construct
  source 1..94: mol_type = other RNA
ggctgaatggggtcccccgactctggctttcccccaggtatacatgttcctggtgaaatggcaggacctgtcggagaaggtggtctatagacgc

SEQ ID NO: 3068 - RNA, 94 nt, synthetic construct
  source 1..94: mol_type = other RNA
ggctgaatggggtcccccgactctggctttcccccaggtttacatgttcctggtgaaatggcaggacctgtcggagaaggtggtctatcggcgc

SEQ ID NO: 3069 - RNA, 94 nt, synthetic construct
  source 1..94: mol_type = other RNA
ggctgaatggggtcccccgactctggctttcccccaggtttacatgttcctggtgaaatggcaggacctgtcggagaaggtggtctataggcgc

SEQ ID NO: 3070 - RNA, 94 nt, synthetic construct
  source 1..94: mol_type = other RNA
ggctgaatggggtcccccgactctggctttcccccaggtttacatgttcctggtgaaatggcaggacctgtcggagaaggtggtctatagacgc

SEQ ID NO: 3071 - RNA, 94 nt, synthetic construct
  source 1..94: mol_type = other RNA
ggctgaatggggtcccccgactctggctttcccccaggtctacatgttcctggtgaaatggcaggacctgtcggagaaggtggtctataggcgc

SEQ ID NO: 3072 - RNA, 94 nt, synthetic construct
  source 1..94: mol_type = other RNA
ggctgaatggggtcccccgactctggctttcccccaggtttacatgttcctggtgaaatggcaggacctgtcggagaaggtggtctaccggcgc

SEQ ID NO: 3073 - RNA, 94 nt, synthetic construct
  source 1..94: mol_type = other RNA
ggctgaatggggtcccccgactctggctttcccccaggtttacatgttcctggtgaaatggcaggacctgtcggagaaggtggtctacagacgc

SEQ ID NO: 3074 - RNA, 94 nt, synthetic construct
  source 1..94: mol_type = other RNA
ggctgaatggggtcccccgactctggctttcccccaggtgtacatgttcctggtgaaatggcaggacctgtcggagaaggtggtctataggcgc

SEQ ID NO: 3075 - RNA, 94 nt, synthetic construct
  source 1..94: mol_type = other RNA
ggctgaatggggtcccccgactctggctttcccccaggtatacatgttcctggtgaaatggcaggacctgtcggagaaggtggtctaccggcgc

SEQ ID NO: 3076 - RNA, 94 nt, synthetic construct
  source 1..94: mol_type = other RNA
ggctgaatggggtcccccgactctggctttcccccaggtgtacatgttcctggtgaaatggcaggacctgtcggagaaggtggtctaccggcgc

SEQ ID NO: 3077 - RNA, 94 nt, synthetic construct
  source 1..94: mol_type = other RNA
ggctgaatggggtcccccgactctggctttcccccaggtgtacatgttcctggtgaaatggcaggacctgtcggagaaggtggtctacaggcgc

SEQ ID NO: 3078 - RNA, 94 nt, synthetic construct
  source 1..94: mol_type = other RNA
ggctgaatggggtcccccgactctggctttcccccaggtgtacatgttcctggtgaaatggcaggacctgtcggagaaggtggtctacagacgc

SEQ ID NO: 3079 - RNA, 94 nt, synthetic construct
  source 1..94: mol_type = other RNA
ggctgaatggggtcccccgactctggctttcccccaggtttacatgttcctggtgaaatggcaggacctgtcggagaaggtggtctacaggcgc

SEQ ID NO: 3080 - RNA, 94 nt, synthetic construct
  source 1..94: mol_type = other RNA
ggctgaatggggtcccccgactctggctttcccccaggtatacatgttcctggtgaaatggcaggacctgtcggagaaggtggtctacagacgc

SEQ ID NO: 3081 - RNA, 94 nt, synthetic construct
  source 1..94: mol_type = other RNA
ggctgaatggggtcccccgactctggctttcccccaggtatacatgttcctggtgaaatggcaggacctgtcggagaaggtggtctataggcgc

SEQ ID NO: 3082 - RNA, 95 nt, synthetic construct
  source 1..95: mol_type = other RNA
aggctgaatggggtcccccgactctggctttcccccaggtatacatgttcctggtgaaatggcaggacctgtcggagaaggtggtctacagacgc

SEQ ID NO: 3083 - RNA, 95 nt, synthetic construct
  source 1..95: mol_type = other RNA
aggctgaatggggtcccccgactctggctttcccccaggtctacatgttcctggtgaaatggcaggacctgtcggagaaggtggtctatagacgc

SEQ ID NO: 3084 - RNA, 95 nt, synthetic construct
  source 1..95: mol_type = other RNA
aggctgaatggggtcccccgactctggctttcccccaggtctacatgttcctggtgaaatggcaggacctgtcggagaaggtggtctatcggcgc

SEQ ID NO: 3085 - RNA, 95 nt, synthetic construct
  source 1..95: mol_type = other RNA
aggctgaatggggtcccccgactctggctttcccccaggtgtacatgttcctggtgaaatggcaggacctgtcggagaaggtggtctacagacgc

SEQ ID NO: 3086 - RNA, 95 nt, synthetic construct
  source 1..95: mol_type = other RNA
aggctgaatggggtcccccgactctggctttcccccaggtgtacatgttcctggtgaaatggcaggacctgtcggagaaggtggtctatagacgc

SEQ ID NO: 3087 - RNA, 95 nt, synthetic construct
  source 1..95: mol_type = other RNA
aggctgaatggggtcccccgactctggctttcccccaggtatacatgttcctggtgaaatggcaggacctgtcggagaaggtggtctacaggcgc

SEQ ID NO: 3088 - RNA, 95 nt, synthetic construct
  source 1..95: mol_type = other RNA
aggctgaatggggtcccccgactctggctttcccccaggtgtacatgttcctggtgaaatggcaggacctgtcggagaaggtggtctataggcgc

SEQ ID NO: 3089 - RNA, 95 nt, synthetic construct
  source 1..95: mol_type = other RNA
aggctgaatggggtcccccgactctggctttcccccaggtgtacatgttcctggtgaaatggcaggacctgtcggagaaggtggtctatcggcgc

SEQ ID NO: 3090 - RNA, 95 nt, synthetic construct
  source 1..95: mol_type = other RNA
aggctgaatggggtcccccgactctggctttcccccaggtctacatgttcctggtgaaatggcaggacctgtcggagaaggtggtctataggcgc

SEQ ID NO: 3091 - RNA, 95 nt, synthetic construct
  source 1..95: mol_type = other RNA
aggctgaatggggtcccccgactctggctttcccccaggtttacatgttcctggtgaaatggcaggacctgtcggagaaggtggtctacaggcgc

SEQ ID NO: 3092 - RNA, 95 nt, synthetic construct
  source 1..95: mol_type = other RNA
aggctgaatggggtcccccgactctggctttcccccaggtttacatgttcctggtgaaatggcaggacctgtcggagaaggtggtctatagacgc

SEQ ID NO: 3093 - RNA, 95 nt, synthetic construct
  source 1..95: mol_type = other RNA
aggctgaatggggtcccccgactctggctttcccccaggtttacatgttcctggtgaaatggcaggacctgtcggagaaggtggtctataggcgc

SEQ ID NO: 3094 - RNA, 95 nt, synthetic construct
  source 1..95: mol_type = other RNA
aggctgaatggggtcccccgactctggctttcccccaggtttacatgttcctggtgaaatggcaggacctgtcggagaaggtggtctatcggcgc

SEQ ID NO: 3095 - RNA, 95 nt, synthetic construct
  source 1..95: mol_type = other RNA
aggctgaatggggtcccccgactctggctttcccccaggtttacatgttcctggtgaaatggcaggacctgtcggagaaggtggtctacagacgc

SEQ ID NO: 3096 - RNA, 95 nt, synthetic construct
  source 1..95: mol_type = other RNA
aggctgaatggggtcccccgactctggctttcccccaggtatacatgttcctggtgaaatggcaggacctgtcggagaaggtggtctatagacgc

SEQ ID NO: 3097 - RNA, 95 nt, synthetic construct
  source 1..95: mol_type = other RNA
aggctgaatggggtcccccgactctggctttcccccaggtatacatgttcctggtgaaatggcaggacctgtcggagaaggtggtctaccggcgc

SEQ ID NO: 3098 - RNA, 95 nt, synthetic construct
  source 1..95: mol_type = other RNA
aggctgaatggggtcccccgactctggctttcccccaggtttacatgttcctggtgaaatggcaggacctgtcggagaaggtggtctaccggcgc

SEQ ID NO: 3099 - RNA, 95 nt, synthetic construct
  source 1..95: mol_type = other RNA
aggctgaatggggtcccccgactctggctttcccccaggtgtacatgttcctggtgaaatggcaggacctgtcggagaaggtggtctaccggcgc

SEQ ID NO: 3100 - RNA, 95 nt, synthetic construct
  source 1..95: mol_type = other RNA
aggctgaatggggtcccccgactctggctttcccccaggtctacatgttcctggtgaaatggcaggacctgtcggagaaggtggtctacaggcgc

SEQ ID NO: 3101 - RNA, 95 nt, synthetic construct
  source 1..95: mol_type = other RNA
aggctgaatggggtcccccgactctggctttcccccaggtctacatgttcctggtgaaatggcaggacctgtcggagaaggtggtctaccggcgc

SEQ ID NO: 3102 - RNA, 95 nt, synthetic construct
  source 1..95: mol_type = other RNA
aggctgaatggggtcccccgactctggctttcccccaggtgtacatgttcctggtgaaatggcaggacctgtcggagaaggtggtctacaggcgc

SEQ ID NO: 3103 - RNA, 95 nt, synthetic construct
  source 1..95: mol_type = other RNA
aggctgaatggggtcccccgactctggctttcccccaggtatacatgttcctggtgaaatggcaggacctgtcggagaaggtggtctataggcgc

SEQ ID NO: 3104 - RNA, 95 nt, synthetic construct
  source 1..95: mol_type = other RNA
aggctgaatggggtcccccgactctggctttcccccaggtatacatgttcctggtgaaatggcaggacctgtcggagaaggtggtctatcggcgc

SEQ ID NO: 3105 - RNA, 95 nt, synthetic construct
  source 1..95: mol_type = other RNA
aggctgaatggggtcccccgactctggctttcccccaggtctacatgttcctggtgaaatggcaggacctgtcggagaaggtggtctacagacgc

SEQ ID NO: 3106 - RNA, 96 nt, synthetic construct
  source 1..96: mol_type = other RNA
gaggctgaatggggtcccccgactctggctttcccccaggtttacatgttcctggtgaaatggcaggacctgtcggagaaggtggtctacaggcgc

SEQ ID NO: 3107 - RNA, 96 nt, synthetic construct
  source 1..96: mol_type = other RNA
gaggctgaatggggtcccccgactctggctttcccccaggtctacatgttcctggtgaaatggcaggacctgtcggagaaggtggtctacaggcgc

SEQ ID NO: 3108 - RNA, 96 nt, synthetic construct
  source 1..96: mol_type = other RNA
gaggctgaatggggtcccccgactctggctttcccccaggtatacatgttcctggtgaaatggcaggacctgtcggagaaggtggtctatagacgc

SEQ ID NO: 3109 - RNA, 96 nt, synthetic construct
  source 1..96: mol_type = other RNA
gaggctgaatggggtcccccgactctggctttcccccaggtgtacatgttcctggtgaaatggcaggacctgtcggagaaggtggtctatagacgc

SEQ ID NO: 3110 - RNA, 96 nt, synthetic construct
  source 1..96: mol_type = other RNA
gaggctgaatggggtcccccgactctggctttcccccaggtgtacatgttcctggtgaaatggcaggacctgtcggagaaggtggtctataggcgc

SEQ ID NO: 3111 - RNA, 96 nt, synthetic construct
  source 1..96: mol_type = other RNA
gaggctgaatggggtcccccgactctggctttcccccaggtgtacatgttcctggtgaaatggcaggacctgtcggagaaggtggtctatcggcgc

SEQ ID NO: 3112 - RNA, 96 nt, synthetic construct
  source 1..96: mol_type = other RNA
gaggctgaatggggtcccccgactctggctttcccccaggtttacatgttcctggtgaaatggcaggacctgtcggagaaggtggtctacagacgc

SEQ ID NO: 3113 - RNA, 96 nt, synthetic construct
  source 1..96: mol_type = other RNA
gaggctgaatggggtcccccgactctggctttcccccaggtttacatgttcctggtgaaatggcaggacctgtcggagaaggtggtctataggcgc

SEQ ID NO: 3114 - RNA, 96 nt, synthetic construct
  source 1..96: mol_type = other RNA
gaggctgaatggggtcccccgactctggctttcccccaggtttacatgttcctggtgaaatggcaggacctgtcggagaaggtggtctaccggcgc

SEQ ID NO: 3115 - RNA, 96 nt, synthetic construct
  source 1..96: mol_type = other RNA
gaggctgaatggggtcccccgactctggctttcccccaggtgtacatgttcctggtgaaatggcaggacctgtcggagaaggtggtctaccggcgc

SEQ ID NO: 3116 - RNA, 96 nt, synthetic construct
  source 1..96: mol_type = other RNA
gaggctgaatggggtcccccgactctggctttcccccaggtttacatgttcctggtgaaatggcaggacctgtcggagaaggtggtctatagacgc

SEQ ID NO: 3117 - RNA, 96 nt, synthetic construct
  source 1..96: mol_type = other RNA
gaggctgaatggggtcccccgactctggctttcccccaggtttacatgttcctggtgaaatggcaggacctgtcggagaaggtggtctatcggcgc

SEQ ID NO: 3118 - RNA, 96 nt, synthetic construct
  source 1..96: mol_type = other RNA
gaggctgaatggggtcccccgactctggctttcccccaggtctacatgttcctggtgaaatggcaggacctgtcggagaaggtggtctatcggcgc

SEQ ID NO: 3119 - RNA, 96 nt, synthetic construct
  source 1..96: mol_type = other RNA
gaggctgaatggggtcccccgactctggctttcccccaggtgtacatgttcctggtgaaatggcaggacctgtcggagaaggtggtctacagacgc

SEQ ID NO: 3120 - RNA, 96 nt, synthetic construct
  source 1..96: mol_type = other RNA
gaggctgaatggggtcccccgactctggctttcccccaggtgtacatgttcctggtgaaatggcaggacctgtcggagaaggtggtctacaggcgc

SEQ ID NO: 3121 - RNA, 96 nt, synthetic construct
  source 1..96: mol_type = other RNA
gaggctgaatggggtcccccgactctggctttcccccaggtctacatgttcctggtgaaatggcaggacctgtcggagaaggtggtctatagacgc

SEQ ID NO: 3122 - RNA, 96 nt, synthetic construct
  source 1..96: mol_type = other RNA
gaggctgaatggggtcccccgactctggctttcccccaggtctacatgttcctggtgaaatggcaggacctgtcggagaaggtggtctataggcgc

SEQ ID NO: 3123 - RNA, 96 nt, synthetic construct
  source 1..96: mol_type = other RNA
gaggctgaatggggtcccccgactctggctttcccccaggtatacatgttcctggtgaaatggcaggacctgtcggagaaggtggtctacagacgc

SEQ ID NO: 3124 - RNA, 96 nt, synthetic construct
  source 1..96: mol_type = other RNA
gaggctgaatggggtcccccgactctggctttcccccaggtatacatgttcctggtgaaatggcaggacctgtcggagaaggtggtctacaggcgc

SEQ ID NO: 3125 - RNA, 96 nt, synthetic construct
  source 1..96: mol_type = other RNA
gaggctgaatggggtcccccgactctggctttcccccaggtatacatgttcctggtgaaatggcaggacctgtcggagaaggtggtctaccggcgc

SEQ ID NO: 3126 - RNA, 96 nt, synthetic construct
  source 1..96: mol_type = other RNA
gaggctgaatggggtcccccgactctggctttcccccaggtatacatgttcctggtgaaatggcaggacctgtcggagaaggtggtctatcggcgc

SEQ ID NO: 3127 - RNA, 96 nt, synthetic construct
  source 1..96: mol_type = other RNA
gaggctgaatggggtcccccgactctggctttcccccaggtctacatgttcctggtgaaatggcaggacctgtcggagaaggtggtctaccggcgc

SEQ ID NO: 3128 - RNA, 96 nt, synthetic construct
  source 1..96: mol_type = other RNA
gaggctgaatggggtcccccgactctggctttcccccaggtatacatgttcctggtgaaatggcaggacctgtcggagaaggtggtctataggcgc

SEQ ID NO: 3129 - RNA, 96 nt, synthetic construct
  source 1..96: mol_type = other RNA
gaggctgaatggggtcccccgactctggctttcccccaggtctacatgttcctggtgaaatggcaggacctgtcggagaaggtggtctacagacgc

SEQ ID NO: 3130 - RNA, 97 nt, synthetic construct
  source 1..97: mol_type = other RNA
ggaggctgaatggggtcccccgactctggctttcccccaggtatacatgttcctggtgaaatggcaggacctgtcggagaaggtggtctacaggcgc

SEQ ID NO: 3131 - RNA, 97 nt, synthetic construct
  source 1..97: mol_type = other RNA
ggaggctgaatggggtcccccgactctggctttcccccaggtttacatgttcctggtgaaatggcaggacctgtcggagaaggtggtctacagacgc

SEQ ID NO: 3132 - RNA, 97 nt, synthetic construct
  source 1..97: mol_type = other RNA
ggaggctgaatggggtcccccgactctggctttcccccaggtgtacatgttcctggtgaaatggcaggacctgtcggagaaggtggtctataggcgc

SEQ ID NO: 3133 - RNA, 97 nt, synthetic construct
  source 1..97: mol_type = other RNA
ggaggctgaatggggtcccccgactctggctttcccccaggtgtacatgttcctggtgaaatggcaggacctgtcggagaaggtggtctatagacgc

SEQ ID NO: 3134 - RNA, 97 nt, synthetic construct
  source 1..97: mol_type = other RNA
ggaggctgaatggggtcccccgactctggctttcccccaggtgtacatgttcctggtgaaatggcaggacctgtcggagaaggtggtctaccggcgc

SEQ ID NO: 3135 - RNA, 97 nt, synthetic construct
  source 1..97: mol_type = other RNA
ggaggctgaatggggtcccccgactctggctttcccccaggtatacatgttcctggtgaaatggcaggacctgtcggagaaggtggtctaccggcgc

SEQ ID NO: 3136 - RNA, 97 nt, synthetic construct
  source 1..97: mol_type = other RNA
ggaggctgaatggggtcccccgactctggctttcccccaggtgtacatgttcctggtgaaatggcaggacctgtcggagaaggtggtctatcggcgc

SEQ ID NO: 3137 - RNA, 97 nt, synthetic construct
  source 1..97: mol_type = other RNA
ggaggctgaatggggtcccccgactctggctttcccccaggtttacatgttcctggtgaaatggcaggacctgtcggagaaggtggtctacaggcgc

SEQ ID NO: 3138 - RNA, 97 nt, synthetic construct
  source 1..97: mol_type = other RNA
ggaggctgaatggggtcccccgactctggctttcccccaggtttacatgttcctggtgaaatggcaggacctgtcggagaaggtggtctatagacgc

SEQ ID NO: 3139 - RNA, 97 nt, synthetic construct
  source 1..97: mol_type = other RNA
ggaggctgaatggggtcccccgactctggctttcccccaggtatacatgttcctggtgaaatggcaggacctgtcggagaaggtggtctataggcgc

SEQ ID NO: 3140 - RNA, 97 nt, synthetic construct
  source 1..97: mol_type = other RNA
ggaggctgaatggggtcccccgactctggctttcccccaggtctacatgttcctggtgaaatggcaggacctgtcggagaaggtggtctatcggcgc

SEQ ID NO: 3141 - RNA, 97 nt, synthetic construct
  source 1..97: mol_type = other RNA
ggaggctgaatggggtcccccgactctggctttcccccaggtatacatgttcctggtgaaatggcaggacctgtcggagaaggtggtctatcggcgc

SEQ ID NO: 3142 - RNA, 97 nt, synthetic construct
  source 1..97: mol_type = other RNA
ggaggctgaatggggtcccccgactctggctttcccccaggtctacatgttcctggtgaaatggcaggacctgtcggagaaggtggtctacagacgc

SEQ ID NO: 3143 - RNA, 97 nt, synthetic construct
  source 1..97: mol_type = other RNA
ggaggctgaatggggtcccccgactctggctttcccccaggtctacatgttcctggtgaaatggcaggacctgtcggagaaggtggtctaccggcgc

SEQ ID NO: 3144 - RNA, 97 nt, synthetic construct
  source 1..97: mol_type = other RNA
ggaggctgaatggggtcccccgactctggctttcccccaggtctacatgttcctggtgaaatggcaggacctgtcggagaaggtggtctatagacgc

SEQ ID NO: 3145 - RNA, 97 nt, synthetic construct
  source 1..97: mol_type = other RNA
ggaggctgaatggggtcccccgactctggctttcccccaggtttacatgttcctggtgaaatggcaggacctgtcggagaaggtggtctaccggcgc

SEQ ID NO: 3146 - RNA, 97 nt, synthetic construct
  source 1..97: mol_type = other RNA
ggaggctgaatggggtcccccgactctggctttcccccaggtctacatgttcctggtgaaatggcaggacctgtcggagaaggtggtctataggcgc

SEQ ID NO: 3147 - RNA, 97 nt, synthetic construct
  source 1..97: mol_type = other RNA
ggaggctgaatggggtcccccgactctggctttcccccaggtgtacatgttcctggtgaaatggcaggacctgtcggagaaggtggtctacagacgc

SEQ ID NO: 3148 - RNA, 97 nt, synthetic construct
  source 1..97: mol_type = other RNA
ggaggctgaatggggtcccccgactctggctttcccccaggtatacatgttcctggtgaaatggcaggacctgtcggagaaggtggtctacagacgc

SEQ ID NO: 3149 - RNA, 97 nt, synthetic construct
  source 1..97: mol_type = other RNA
ggaggctgaatggggtcccccgactctggctttcccccaggtatacatgttcctggtgaaatggcaggacctgtcggagaaggtggtctatagacgc

SEQ ID NO: 3150 - RNA, 97 nt, synthetic construct
  source 1..97: mol_type = other RNA
ggaggctgaatggggtcccccgactctggctttcccccaggtttacatgttcctggtgaaatggcaggacctgtcggagaaggtggtctatcggcgc

SEQ ID NO: 3151 - RNA, 97 nt, synthetic construct
  source 1..97: mol_type = other RNA
ggaggctgaatggggtcccccgactctggctttcccccaggtgtacatgttcctggtgaaatggcaggacctgtcggagaaggtggtctacaggcgc

SEQ ID NO: 3152 - RNA, 97 nt, synthetic construct
  source 1..97: mol_type = other RNA
ggaggctgaatggggtcccccgactctggctttcccccaggtttacatgttcctggtgaaatggcaggacctgtcggagaaggtggtctataggcgc

SEQ ID NO: 3153 - RNA, 97 nt, synthetic construct
  source 1..97: mol_type = other RNA
ggaggctgaatggggtcccccgactctggctttcccccaggtctacatgttcctggtgaaatggcaggacctgtcggagaaggtggtctacaggcgc

SEQ ID NO: 3154 - RNA, 98 nt, synthetic construct
  source 1..98: mol_type = other RNA
tggaggctgaatggggtcccccgactctggctttcccccaggtttacatgttcctggtgaaatggcaggacctgtcggagaaggtggtctatcggcgc

SEQ ID NO: 3155 - RNA, 98 nt, synthetic construct
  source 1..98: mol_type = other RNA
tggaggctgaatggggtcccccgactctggctttcccccaggtttacatgttcctggtgaaatggcaggacctgtcggagaaggtggtctataggcgc

SEQ ID NO: 3156 - RNA, 98 nt, synthetic construct
  source 1..98: mol_type = other RNA
tggaggctgaatggggtcccccgactctggctttcccccaggtttacatgttcctggtgaaatggcaggacctgtcggagaaggtggtctatagacgc

SEQ ID NO: 3157 - RNA, 98 nt, synthetic construct
  source 1..98: mol_type = other RNA
tggaggctgaatggggtcccccgactctggctttcccccaggtttacatgttcctggtgaaatggcaggacctgtcggagaaggtggtctaccggcgc

SEQ ID NO: 3158 - RNA, 98 nt, synthetic construct
  source 1..98: mol_type = other RNA
tggaggctgaatggggtcccccgactctggctttcccccaggtttacatgttcctggtgaaatggcaggacctgtcggagaaggtggtctacagacgc

SEQ ID NO: 3159 - RNA, 98 nt, synthetic construct
  source 1..98: mol_type = other RNA
tggaggctgaatggggtcccccgactctggctttcccccaggtgtacatgttcctggtgaaatggcaggacctgtcggagaaggtggtctatcggcgc

SEQ ID NO: 3160 - RNA, 98 nt, synthetic construct
  source 1..98: mol_type = other RNA
tggaggctgaatggggtcccccgactctggctttcccccaggtttacatgttcctggtgaaatggcaggacctgtcggagaaggtggtctacaggcgc

SEQ ID NO: 3161 - RNA, 98 nt, synthetic construct
  source 1..98: mol_type = other RNA
tggaggctgaatggggtcccccgactctggctttcccccaggtgtacatgttcctggtgaaatggcaggacctgtcggagaaggtggtctataggcgc

SEQ ID NO: 3162 - RNA, 98 nt, synthetic construct
  source 1..98: mol_type = other RNA
tggaggctgaatggggtcccccgactctggctttcccccaggtgtacatgttcctggtgaaatggcaggacctgtcggagaaggtggtctatagacgc

SEQ ID NO: 3163 - RNA, 98 nt, synthetic construct
  source 1..98: mol_type = other RNA
tggaggctgaatggggtcccccgactctggctttcccccaggtgtacatgttcctggtgaaatggcaggacctgtcggagaaggtggtctacagacgc

SEQ ID NO: 3164 - RNA, 98 nt, synthetic construct
  source 1..98: mol_type = other RNA
tggaggctgaatggggtcccccgactctggctttcccccaggtctacatgttcctggtgaaatggcaggacctgtcggagaaggtggtctatcggcgc

SEQ ID NO: 3165 - RNA, 98 nt, synthetic construct
  source 1..98: mol_type = other RNA
tggaggctgaatggggtcccccgactctggctttcccccaggtctacatgttcctggtgaaatggcaggacctgtcggagaaggtggtctaccggcgc

SEQ ID NO: 3166 - RNA, 98 nt, synthetic construct
  source 1..98: mol_type = other RNA
tggaggctgaatggggtcccccgactctggctttcccccaggtctacatgttcctggtgaaatggcaggacctgtcggagaaggtggtctatagacgc

SEQ ID NO: 3167 - RNA, 98 nt, synthetic construct
  source 1..98: mol_type = other RNA
tggaggctgaatggggtcccccgactctggctttcccccaggtctacatgttcctggtgaaatggcaggacctgtcggagaaggtggtctacaggcgc

SEQ ID NO: 3168 - RNA, 98 nt, synthetic construct
  source 1..98: mol_type = other RNA
tggaggctgaatggggtcccccgactctggctttcccccaggtgtacatgttcctggtgaaatggcaggacctgtcggagaaggtggtctaccggcgc

SEQ ID NO: 3169 - RNA, 98 nt, synthetic construct
  source 1..98: mol_type = other RNA
tggaggctgaatggggtcccccgactctggctttcccccaggtatacatgttcctggtgaaatggcaggacctgtcggagaaggtggtctatcggcgc

SEQ ID NO: 3170 - RNA, 98 nt, synthetic construct
  source 1..98: mol_type = other RNA
tggaggctgaatggggtcccccgactctggctttcccccaggtatacatgttcctggtgaaatggcaggacctgtcggagaaggtggtctaccggcgc

SEQ ID NO: 3171 - RNA, 98 nt, synthetic construct
  source 1..98: mol_type = other RNA
tggaggctgaatggggtcccccgactctggctttcccccaggtatacatgttcctggtgaaatggcaggacctgtcggagaaggtggtctataggcgc

SEQ ID NO: 3172 - RNA, 98 nt, synthetic construct
  source 1..98: mol_type = other RNA
tggaggctgaatggggtcccccgactctggctttcccccaggtctacatgttcctggtgaaatggcaggacctgtcggagaaggtggtctataggcgc

SEQ ID NO: 3173 - RNA, 98 nt, synthetic construct
  source 1..98: mol_type = other RNA
tggaggctgaatggggtcccccgactctggctttcccccaggtatacatgttcctggtgaaatggcaggacctgtcggagaaggtggtctatagacgc

SEQ ID NO: 3174 - RNA, 98 nt, synthetic construct
  source 1..98: mol_type = other RNA
tggaggctgaatggggtcccccgactctggctttcccccaggtatacatgttcctggtgaaatggcaggacctgtcggagaaggtggtctacagacgc

SEQ ID NO: 3175 - RNA, 98 nt, synthetic construct
  source 1..98: mol_type = other RNA
tggaggctgaatggggtcccccgactctggctttcccccaggtatacatgttcctggtgaaatggcaggacctgtcggagaaggtggtctacaggcgc

SEQ ID NO: 3176 - RNA, 98 nt, synthetic construct
  source 1..98: mol_type = other RNA
tggaggctgaatggggtcccccgactctggctttcccccaggtctacatgttcctggtgaaatggcaggacctgtcggagaaggtggtctacagacgc

SEQ ID NO: 3177 - RNA, 98 nt, synthetic construct
  source 1..98: mol_type = other RNA
tggaggctgaatggggtcccccgactctggctttcccccaggtgtacatgttcctggtgaaatggcaggacctgtcggagaaggtggtctacaggcgc

SEQ ID NO: 3178 - RNA, 99 nt, synthetic construct
  source 1..99: mol_type = other RNA
ttggaggctgaatggggtcccccgactctggctttcccccaggtatacatgttcctggtgaaatggcaggacctgtcggagaaggtggtctataggcgc

SEQ ID NO: 3179 - RNA, 99 nt, synthetic construct
  source 1..99: mol_type = other RNA
ttggaggctgaatggggtcccccgactctggctttcccccaggtgtacatgttcctggtgaaatggcaggacctgtcggagaaggtggtctatcggcgc

SEQ ID NO: 3180 - RNA, 99 nt, synthetic construct
  source 1..99: mol_type = other RNA
ttggaggctgaatggggtcccccgactctggctttcccccaggtgtacatgttcctggtgaaatggcaggacctgtcggagaaggtggtctatagacgc

SEQ ID NO: 3181 - RNA, 99 nt, synthetic construct
  source 1..99: mol_type = other RNA
ttggaggctgaatggggtcccccgactctggctttcccccaggtatacatgttcctggtgaaatggcaggacctgtcggagaaggtggtctatagacgc

SEQ ID NO: 3182 - RNA, 99 nt, synthetic construct
  source 1..99: mol_type = other RNA
ttggaggctgaatggggtcccccgactctggctttcccccaggtatacatgttcctggtgaaatggcaggacctgtcggagaaggtggtctaccggcgc

SEQ ID NO: 3183 - RNA, 99 nt, synthetic construct
  source 1..99: mol_type = other RNA
ttggaggctgaatggggtcccccgactctggctttcccccaggtctacatgttcctggtgaaatggcaggacctgtcggagaaggtggtctataggcgc

SEQ ID NO: 3184 - RNA, 99 nt, synthetic construct
  source 1..99: mol_type = other RNA
ttggaggctgaatggggtcccccgactctggctttcccccaggtatacatgttcctggtgaaatggcaggacctgtcggagaaggtggtctacagacgc

SEQ ID NO: 3185 - RNA, 99 nt, synthetic construct
  source 1..99: mol_type = other RNA
ttggaggctgaatggggtcccccgactctggctttcccccaggtctacatgttcctggtgaaatggcaggacctgtcggagaaggtggtctatagacgc

SEQ ID NO: 3186 - RNA, 99 nt, synthetic construct
  source 1..99: mol_type = other RNA
ttggaggctgaatggggtcccccgactctggctttcccccaggtatacatgttcctggtgaaatggcaggacctgtcggagaaggtggtctatcggcgc

SEQ ID NO: 3187 - RNA, 99 nt, synthetic construct
  source 1..99: mol_type = other RNA
ttggaggctgaatggggtcccccgactctggctttcccccaggtctacatgttcctggtgaaatggcaggacctgtcggagaaggtggtctacagacgc

SEQ ID NO: 3188 - RNA, 99 nt, synthetic construct
  source 1..99: mol_type = other RNA
ttggaggctgaatggggtcccccgactctggctttcccccaggtctacatgttcctggtgaaatggcaggacctgtcggagaaggtggtctatcggcgc

SEQ ID NO: 3189 - RNA, 99 nt, synthetic construct
  source 1..99: mol_type = other RNA
ttggaggctgaatggggtcccccgactctggctttcccccaggtttacatgttcctggtgaaatggcaggacctgtcggagaaggtggtctacaggcgc

SEQ ID NO: 3190 - RNA, 99 nt, synthetic construct
  source 1..99: mol_type = other RNA
ttggaggctgaatggggtcccccgactctggctttcccccaggtttacatgttcctggtgaaatggcaggacctgtcggagaaggtggtctataggcgc

SEQ ID NO: 3191 - RNA, 99 nt, synthetic construct
  source 1..99: mol_type = other RNA
ttggaggctgaatggggtcccccgactctggctttcccccaggtttacatgttcctggtgaaatggcaggacctgtcggagaaggtggtctatcggcgc

SEQ ID NO: 3192 - RNA, 99 nt, synthetic construct
  source 1..99: mol_type = other RNA
ttggaggctgaatggggtcccccgactctggctttcccccaggtttacatgttcctggtgaaatggcaggacctgtcggagaaggtggtctatagacgc

SEQ ID NO: 3193 - RNA, 99 nt, synthetic construct
  source 1..99: mol_type = other RNA
ttggaggctgaatggggtcccccgactctggctttcccccaggtttacatgttcctggtgaaatggcaggacctgtcggagaaggtggtctaccggcgc

SEQ ID NO: 3194 - RNA, 99 nt, synthetic construct
  source 1..99: mol_type = other RNA
ttggaggctgaatggggtcccccgactctggctttcccccaggtgtacatgttcctggtgaaatggcaggacctgtcggagaaggtggtctacaggcgc

SEQ ID NO: 3195 - RNA, 99 nt, synthetic construct
  source 1..99: mol_type = other RNA
ttggaggctgaatggggtcccccgactctggctttcccccaggtttacatgttcctggtgaaatggcaggacctgtcggagaaggtggtctacagacgc

SEQ ID NO: 3196 - RNA, 99 nt, synthetic construct
  source 1..99: mol_type = other RNA
ttggaggctgaatggggtcccccgactctggctttcccccaggtgtacatgttcctggtgaaatggcaggacctgtcggagaaggtggtctataggcgc

SEQ ID NO: 3197 - RNA, 99 nt, synthetic construct
  source 1..99: mol_type = other RNA
ttggaggctgaatggggtcccccgactctggctttcccccaggtgtacatgttcctggtgaaatggcaggacctgtcggagaaggtggtctaccggcgc

SEQ ID NO: 3198 - RNA, 99 nt, synthetic construct
  source 1..99: mol_type = other RNA
ttggaggctgaatggggtcccccgactctggctttcccccaggtatacatgttcctggtgaaatggcaggacctgtcggagaaggtggtctacaggcgc

SEQ ID NO: 3199 - RNA, 99 nt, synthetic construct
  source 1..99: mol_type = other RNA
ttggaggctgaatggggtcccccgactctggctttcccccaggtctacatgttcctggtgaaatggcaggacctgtcggagaaggtggtctacaggcgc

SEQ ID NO: 3200 - RNA, 99 nt, synthetic construct
  source 1..99: mol_type = other RNA
ttggaggctgaatggggtcccccgactctggctttcccccaggtctacatgttcctggtgaaatggcaggacctgtcggagaaggtggtctaccggcgc

SEQ ID NO: 3201 - RNA, 99 nt, synthetic construct
  source 1..99: mol_type = other RNA
ttggaggctgaatggggtcccccgactctggctttcccccaggtgtacatgttcctggtgaaatggcaggacctgtcggagaaggtggtctacagacgc

SEQ ID NO: 3202 - RNA, 100 nt, synthetic construct
  source 1..100: mol_type = other RNA
tttggaggctgaatggggtcccccgactctggctttcccccaggtttacatgttcctggtgaaatggcaggacctgtcggagaaggtggtctatagacgc

SEQ ID NO: 3203 - RNA, 100 nt, synthetic construct
  source 1..100: mol_type = other RNA
tttggaggctgaatggggtcccccgactctggctttcccccaggtttacatgttcctggtgaaatggcaggacctgtcggagaaggtggtctacaggcgc

SEQ ID NO: 3204 - RNA, 100 nt, synthetic construct
  source 1..100: mol_type = other RNA
tttggaggctgaatggggtcccccgactctggctttcccccaggtttacatgttcctggtgaaatggcaggacctgtcggagaaggtggtctaccggcgc

SEQ ID NO: 3205 - RNA, 100 nt, synthetic construct
  source 1..100: mol_type = other RNA
tttggaggctgaatggggtcccccgactctggctttcccccaggtatacatgttcctggtgaaatggcaggacctgtcggagaaggtggtctacaggcgc

SEQ ID NO: 3206 - RNA, 100 nt, synthetic construct
  source 1..100: mol_type = other RNA
tttggaggctgaatggggtcccccgactctggctttcccccaggtttacatgttcctggtgaaatggcaggacctgtcggagaaggtggtctacagacgc

SEQ ID NO: 3207 - RNA, 100 nt, synthetic construct
  source 1..100: mol_type = other RNA
tttggaggctgaatggggtcccccgactctggctttcccccaggtgtacatgttcctggtgaaatggcaggacctgtcggagaaggtggtctatcggcgc

SEQ ID NO: 3208 - RNA, 100 nt, synthetic construct
  source 1..100: mol_type = other RNA
tttggaggctgaatggggtcccccgactctggctttcccccaggtgtacatgttcctggtgaaatggcaggacctgtcggagaaggtggtctatagacgc

SEQ ID NO: 3209 - RNA, 100 nt, synthetic construct
  source 1..100: mol_type = other RNA
tttggaggctgaatggggtcccccgactctggctttcccccaggtatacatgttcctggtgaaatggcaggacctgtcggagaaggtggtctacagacgc

SEQ ID NO: 3210 - RNA, 100 nt, synthetic construct
  source 1..100: mol_type = other RNA
tttggaggctgaatggggtcccccgactctggctttcccccaggtctacatgttcctggtgaaatggcaggacctgtcggagaaggtggtctatagacgc

SEQ ID NO: 3211 - RNA, 100 nt, synthetic construct
  source 1..100: mol_type = other RNA
tttggaggctgaatggggtcccccgactctggctttcccccaggtatacatgttcctggtgaaatggcaggacctgtcggagaaggtggtctatagacgc

SEQ ID NO: 3212 - RNA, 100 nt, synthetic construct
  source 1..100: mol_type = other RNA
tttggaggctgaatggggtcccccgactctggctttcccccaggtatacatgttcctggtgaaatggcaggacctgtcggagaaggtggtctataggcgc

SEQ ID NO: 3213 - RNA, 100 nt, synthetic construct
  source 1..100: mol_type = other RNA
tttggaggctgaatggggtcccccgactctggctttcccccaggtatacatgttcctggtgaaatggcaggacctgtcggagaaggtggtctatcggcgc

SEQ ID NO: 3214 - RNA, 100 nt, synthetic construct
  source 1..100: mol_type = other RNA
tttggaggctgaatggggtcccccgactctggctttcccccaggtctacatgttcctggtgaaatggcaggacctgtcggagaaggtggtctacagacgc

SEQ ID NO: 3215 - RNA, 100 nt, synthetic construct
  source 1..100: mol_type = other RNA
tttggaggctgaatggggtcccccgactctggctttcccccaggtgtacatgttcctggtgaaatggcaggacctgtcggagaaggtggtctataggcgc

SEQ ID NO: 3216 - RNA, 100 nt, synthetic construct
  source 1..100: mol_type = other RNA
tttggaggctgaatggggtcccccgactctggctttcccccaggtctacatgttcctggtgaaatggcaggacctgtcggagaaggtggtctacaggcgc

SEQ ID NO: 3217 - RNA, 100 nt, synthetic construct
  source 1..100: mol_type = other RNA
tttggaggctgaatggggtcccccgactctggctttcccccaggtttacatgttcctggtgaaatggcaggacctgtcggagaaggtggtctatcggcgc

SEQ ID NO: 3218 - RNA, 100 nt, synthetic construct
  source 1..100: mol_type = other RNA
tttggaggctgaatggggtcccccgactctggctttcccccaggtctacatgttcctggtgaaatggcaggacctgtcggagaaggtggtctatcggcgc

SEQ ID NO: 3219 - RNA, 100 nt, synthetic construct
  source 1..100: mol_type = other RNA
tttggaggctgaatggggtcccccgactctggctttcccccaggtatacatgttcctggtgaaatggcaggacctgtcggagaaggtggtctaccggcgc

SEQ ID NO: 3220 - RNA, 100 nt, synthetic construct
  source 1..100: mol_type = other RNA
tttggaggctgaatggggtcccccgactctggctttcccccaggtgtacatgttcctggtgaaatggcaggacctgtcggagaaggtggtctacagacgc

SEQ ID NO: 3221 - RNA, 100 nt, synthetic construct
  source 1..100: mol_type = other RNA
tttggaggctgaatggggtcccccgactctggctttcccccaggtgtacatgttcctggtgaaatggcaggacctgtcggagaaggtggtctacaggcgc

SEQ ID NO: 3222 - RNA, 100 nt, synthetic construct
  source 1..100: mol_type = other RNA
tttggaggctgaatggggtcccccgactctggctttcccccaggtgtacatgttcctggtgaaatggcaggacctgtcggagaaggtggtctaccggcgc

SEQ ID NO: 3223 - RNA, 100 nt, synthetic construct
  source 1..100: mol_type = other RNA
tttggaggctgaatggggtcccccgactctggctttcccccaggtctacatgttcctggtgaaatggcaggacctgtcggagaaggtggtctaccggcgc

SEQ ID NO: 3224 - RNA, 100 nt, synthetic construct
  source 1..100: mol_type = other RNA
tttggaggctgaatggggtcccccgactctggctttcccccaggtctacatgttcctggtgaaatggcaggacctgtcggagaaggtggtctataggcgc

SEQ ID NO: 3225 - RNA, 100 nt, synthetic construct
  source 1..100: mol_type = other RNA
tttggaggctgaatggggtcccccgactctggctttcccccaggtttacatgttcctggtgaaatggcaggacctgtcggagaaggtggtctataggcgc

SEQ ID NO: 3226 - RNA, 101 nt, synthetic construct
  source 1..101: mol_type = other RNA
ctttggaggctgaatggggtcccccgactctggctttcccccaggtatacatgttcctggtgaaatggcaggacctgtcggagaaggtggtctatcggcgc

SEQ ID NO: 3227 - RNA, 101 nt, synthetic construct
  source 1..101: mol_type = other RNA
ctttggaggctgaatggggtcccccgactctggctttcccccaggtctacatgttcctggtgaaatggcaggacctgtcggagaaggtggtctaccggcgc

SEQ ID NO: 3228 - RNA, 101 nt, synthetic construct
  source 1..101: mol_type = other RNA
ctttggaggctgaatggggtcccccgactctggctttcccccaggtttacatgttcctggtgaaatggcaggacctgtcggagaaggtggtctacaggcgc

SEQ ID NO: 3229 - RNA, 101 nt, synthetic construct
  source 1..101: mol_type = other RNA
ctttggaggctgaatggggtcccccgactctggctttcccccaggtttacatgttcctggtgaaatggcaggacctgtcggagaaggtggtctacagacgc

SEQ ID NO: 3230 - RNA, 101 nt, synthetic construct
  source 1..101: mol_type = other RNA
ctttggaggctgaatggggtcccccgactctggctttcccccaggtgtacatgttcctggtgaaatggcaggacctgtcggagaaggtggtctatcggcgc

SEQ ID NO: 3231 - RNA, 101 nt, synthetic construct
  source 1..101: mol_type = other RNA
ctttggaggctgaatggggtcccccgactctggctttcccccaggtgtacatgttcctggtgaaatggcaggacctgtcggagaaggtggtctataggcgc

SEQ ID NO: 3232 - RNA, 101 nt, synthetic construct
  source 1..101: mol_type = other RNA
ctttggaggctgaatggggtcccccgactctggctttcccccaggtgtacatgttcctggtgaaatggcaggacctgtcggagaaggtggtctatagacgc

SEQ ID NO: 3233 - RNA, 101 nt, synthetic construct
  source 1..101: mol_type = other RNA
ctttggaggctgaatggggtcccccgactctggctttcccccaggtttacatgttcctggtgaaatggcaggacctgtcggagaaggtggtctatcggcgc

SEQ ID NO: 3234 - RNA, 101 nt, synthetic construct
  source 1..101: mol_type = other RNA
ctttggaggctgaatggggtcccccgactctggctttcccccaggtttacatgttcctggtgaaatggcaggacctgtcggagaaggtggtctaccggcgc

SEQ ID NO: 3235 - RNA, 101 nt, synthetic construct
  source 1..101: mol_type = other RNA
ctttggaggctgaatggggtcccccgactctggctttcccccaggtctacatgttcctggtgaaatggcaggacctgtcggagaaggtggtctataggcgc

SEQ ID NO: 3236 - RNA, 101 nt, synthetic construct
  source 1..101: mol_type = other RNA
ctttggaggctgaatggggtcccccgactctggctttcccccaggtgtacatgttcctggtgaaatggcaggacctgtcggagaaggtggtctaccggcgc

SEQ ID NO: 3237 - RNA, 101 nt, synthetic construct
  source 1..101: mol_type = other RNA
ctttggaggctgaatggggtcccccgactctggctttcccccaggtatacatgttcctggtgaaatggcaggacctgtcggagaaggtggtctatagacgc

SEQ ID NO: 3238 - RNA, 101 nt, synthetic construct
  source 1..101: mol_type = other RNA
ctttggaggctgaatggggtcccccgactctggctttcccccaggtatacatgttcctggtgaaatggcaggacctgtcggagaaggtggtctataggcgc

SEQ ID NO: 3239 - RNA, 101 nt, synthetic construct
  source 1..101: mol_type = other RNA
ctttggaggctgaatggggtcccccgactctggctttcccccaggtctacatgttcctggtgaaatggcaggacctgtcggagaaggtggtctacaggcgc

SEQ ID NO: 3240 - RNA, 101 nt, synthetic construct
  source 1..101: mol_type = other RNA
ctttggaggctgaatggggtcccccgactctggctttcccccaggtctacatgttcctggtgaaatggcaggacctgtcggagaaggtggtctacagacgc

SEQ ID NO: 3241 - RNA, 101 nt, synthetic construct
  source 1..101: mol_type = other RNA
ctttggaggctgaatggggtcccccgactctggctttcccccaggtctacatgttcctggtgaaatggcaggacctgtcggagaaggtggtctatagacgc

SEQ ID NO: 3242 - RNA, 101 nt, synthetic construct
  source 1..101: mol_type = other RNA
ctttggaggctgaatggggtcccccgactctggctttcccccaggtatacatgttcctggtgaaatggcaggacctgtcggagaaggtggtctaccggcgc

SEQ ID NO: 3243 - RNA, 101 nt, synthetic construct
  source 1..101: mol_type = other RNA
ctttggaggctgaatggggtcccccgactctggctttcccccaggtttacatgttcctggtgaaatggcaggacctgtcggagaaggtggtctatagacgc

SEQ ID NO: 3244 - RNA, 101 nt, synthetic construct
  source 1..101: mol_type = other RNA
ctttggaggctgaatggggtcccccgactctggctttcccccaggtgtacatgttcctggtgaaatggcaggacctgtcggagaaggtggtctacagacgc

SEQ ID NO: 3245 - RNA, 101 nt, synthetic construct
  source 1..101: mol_type = other RNA
ctttggaggctgaatggggtcccccgactctggctttcccccaggtttacatgttcctggtgaaatggcaggacctgtcggagaaggtggtctataggcgc

SEQ ID NO: 3246 - RNA, 101 nt, synthetic construct
  source 1..101: mol_type = other RNA
ctttggaggctgaatggggtcccccgactctggctttcccccaggtctacatgttcctggtgaaatggcaggacctgtcggagaaggtggtctatcggcgc

SEQ ID NO: 3247 - RNA, 101 nt, synthetic construct
  source 1..101: mol_type = other RNA
ctttggaggctgaatggggtcccccgactctggctttcccccaggtgtacatgttcctggtgaaatggcaggacctgtcggagaaggtggtctacaggcgc

SEQ ID NO: 3248 - RNA, 101 nt, synthetic construct
  source 1..101: mol_type = other RNA
ctttggaggctgaatggggtcccccgactctggctttcccccaggtatacatgttcctggtgaaatggcaggacctgtcggagaaggtggtctacagacgc

SEQ ID NO: 3249 - RNA, 101 nt, synthetic construct
  source 1..101: mol_type = other RNA
ctttggaggctgaatggggtcccccgactctggctttcccccaggtatacatgttcctggtgaaatggcaggacctgtcggagaaggtggtctacaggcgc

SEQ ID NO: 3250 - RNA, 102 nt, synthetic construct
  source 1..102: mol_type = other RNA
tctttggaggctgaatggggtcccccgactctggctttcccccaggtttacatgttcctggtgaaatggcaggacctgtcggagaaggtggtctacagacgc

SEQ ID NO: 3251 - RNA, 102 nt, synthetic construct
  source 1..102: mol_type = other RNA
tctttggaggctgaatggggtcccccgactctggctttcccccaggtctacatgttcctggtgaaatggcaggacctgtcggagaaggtggtctacaggcgc

SEQ ID NO: 3252 - RNA, 102 nt, synthetic construct
  source 1..102: mol_type = other RNA
tctttggaggctgaatggggtcccccgactctggctttcccccaggtgtacatgttcctggtgaaatggcaggacctgtcggagaaggtggtctataggcgc

SEQ ID NO: 3253 - RNA, 102 nt, synthetic construct
  source 1..102: mol_type = other RNA
tctttggaggctgaatggggtcccccgactctggctttcccccaggtgtacatgttcctggtgaaatggcaggacctgtcggagaaggtggtctaccggcgc

SEQ ID NO: 3254 - RNA, 102 nt, synthetic construct
  source 1..102: mol_type = other RNA
tctttggaggctgaatggggtcccccgactctggctttcccccaggtgtacatgttcctggtgaaatggcaggacctgtcggagaaggtggtctacaggcgc

SEQ ID NO: 3255 - RNA, 102 nt, synthetic construct
  source 1..102: mol_type = other RNA
tctttggaggctgaatggggtcccccgactctggctttcccccaggtgtacatgttcctggtgaaatggcaggacctgtcggagaaggtggtctacagacgc

SEQ ID NO: 3256 - RNA, 102 nt, synthetic construct
  source 1..102: mol_type = other RNA
tctttggaggctgaatggggtcccccgactctggctttcccccaggtctacatgttcctggtgaaatggcaggacctgtcggagaaggtggtctatcggcgc

SEQ ID NO: 3257 - RNA, 102 nt, synthetic construct
  source 1..102: mol_type = other RNA
tctttggaggctgaatggggtcccccgactctggctttcccccaggtctacatgttcctggtgaaatggcaggacctgtcggagaaggtggtctataggcgc

SEQ ID NO: 3258 - RNA, 102 nt, synthetic construct
  source 1..102: mol_type = other RNA
tctttggaggctgaatggggtcccccgactctggctttcccccaggtctacatgttcctggtgaaatggcaggacctgtcggagaaggtggtctaccggcgc

SEQ ID NO: 3259 - RNA, 102 nt, synthetic construct
  source 1..102: mol_type = other RNA
tctttggaggctgaatggggtcccccgactctggctttcccccaggtgtacatgttcctggtgaaatggcaggacctgtcggagaaggtggtctatagacgc

SEQ ID NO: 3260 - RNA, 102 nt, synthetic construct
  source 1..102: mol_type = other RNA
tctttggaggctgaatggggtcccccgactctggctttcccccaggtatacatgttcctggtgaaatggcaggacctgtcggagaaggtggtctataggcgc

SEQ ID NO: 3261 - RNA, 102 nt, synthetic construct
  source 1..102: mol_type = other RNA
tctttggaggctgaatggggtcccccgactctggctttcccccaggtttacatgttcctggtgaaatggcaggacctgtcggagaaggtggtctaccggcgc

SEQ ID NO: 3262 - RNA, 102 nt, synthetic construct
  source 1..102: mol_type = other RNA
tctttggaggctgaatggggtcccccgactctggctttcccccaggtatacatgttcctggtgaaatggcaggacctgtcggagaaggtggtctaccggcgc

SEQ ID NO: 3263 - RNA, 102 nt, synthetic construct
  source 1..102: mol_type = other RNA
tctttggaggctgaatggggtcccccgactctggctttcccccaggtatacatgttcctggtgaaatggcaggacctgtcggagaaggtggtctatagacgc

SEQ ID NO: 3264 - RNA, 102 nt, synthetic construct
  source 1..102: mol_type = other RNA
tctttggaggctgaatggggtcccccgactctggctttcccccaggtatacatgttcctggtgaaatggcaggacctgtcggagaaggtggtctacaggcgc

SEQ ID NO: 3265 - RNA, 102 nt, synthetic construct
  source 1..102: mol_type = other RNA
tctttggaggctgaatggggtcccccgactctggctttcccccaggtatacatgttcctggtgaaatggcaggacctgtcggagaaggtggtctacagacgc

SEQ ID NO: 3266 - RNA, 102 nt, synthetic construct
  source 1..102: mol_type = other RNA
tctttggaggctgaatggggtcccccgactctggctttcccccaggtgtacatgttcctggtgaaatggcaggacctgtcggagaaggtggtctatcggcgc

SEQ ID NO: 3267 - RNA, 102 nt, synthetic construct
  source 1..102: mol_type = other RNA
tctttggaggctgaatggggtcccccgactctggctttcccccaggtctacatgttcctggtgaaatggcaggacctgtcggagaaggtggtctatagacgc

SEQ ID NO: 3268 - RNA, 102 nt, synthetic construct
  source 1..102: mol_type = other RNA
tctttggaggctgaatggggtcccccgactctggctttcccccaggtatacatgttcctggtgaaatggcaggacctgtcggagaaggtggtctatcggcgc

SEQ ID NO: 3269 - RNA, 102 nt, synthetic construct
  source 1..102: mol_type = other RNA
tctttggaggctgaatggggtcccccgactctggctttcccccaggtttacatgttcctggtgaaatggcaggacctgtcggagaaggtggtctatcggcgc

SEQ ID NO: 3270 - RNA, 102 nt, synthetic construct
  source 1..102: mol_type = other RNA
tctttggaggctgaatggggtcccccgactctggctttcccccaggtttacatgttcctggtgaaatggcaggacctgtcggagaaggtggtctacaggcgc

SEQ ID NO: 3271 - RNA, 102 nt, synthetic construct
  source 1..102: mol_type = other RNA
tctttggaggctgaatggggtcccccgactctggctttcccccaggtttacatgttcctggtgaaatggcaggacctgtcggagaaggtggtctatagacgc

SEQ ID NO: 3272 - RNA, 102 nt, synthetic construct
  source 1..102: mol_type = other RNA
tctttggaggctgaatggggtcccccgactctggctttcccccaggtttacatgttcctggtgaaatggcaggacctgtcggagaaggtggtctataggcgc

SEQ ID NO: 3273 - RNA, 102 nt, synthetic construct
  source 1..102: mol_type = other RNA
tctttggaggctgaatggggtcccccgactctggctttcccccaggtctacatgttcctggtgaaatggcaggacctgtcggagaaggtggtctacagacgc

SEQ ID NO: 3274 - RNA, 103 nt, synthetic construct
  source 1..103: mol_type = other RNA
ctctttggaggctgaatggggtcccccgactctggctttcccccaggtatacatgttcctggtgaaatggcaggacctgtcggagaaggtggtctatagacgc

SEQ ID NO: 3275 - RNA, 103 nt, synthetic construct
  source 1..103: mol_type = other RNA
ctctttggaggctgaatggggtcccccgactctggctttcccccaggtatacatgttcctggtgaaatggcaggacctgtcggagaaggtggtctacaggcgc

SEQ ID NO: 3276 - RNA, 103 nt, synthetic construct
  source 1..103: mol_type = other RNA
ctctttggaggctgaatggggtcccccgactctggctttcccccaggtctacatgttcctggtgaaatggcaggacctgtcggagaaggtggtctatcggcgc

SEQ ID NO: 3277 - RNA, 103 nt, synthetic construct
  source 1..103: mol_type = other RNA
ctctttggaggctgaatggggtcccccgactctggctttcccccaggtgtacatgttcctggtgaaatggcaggacctgtcggagaaggtggtctacaggcgc

SEQ ID NO: 3278 - RNA, 103 nt, synthetic construct
  source 1..103: mol_type = other RNA
ctctttggaggctgaatggggtcccccgactctggctttcccccaggtatacatgttcctggtgaaatggcaggacctgtcggagaaggtggtctacagacgc

SEQ ID NO: 3279 - RNA, 103 nt, synthetic construct
  source 1..103: mol_type = other RNA
ctctttggaggctgaatggggtcccccgactctggctttcccccaggtttacatgttcctggtgaaatggcaggacctgtcggagaaggtggtctatcggcgc

SEQ ID NO: 3280 - RNA, 103 nt, synthetic construct
  source 1..103: mol_type = other RNA
ctctttggaggctgaatggggtcccccgactctggctttcccccaggtttacatgttcctggtgaaatggcaggacctgtcggagaaggtggtctatagacgc

SEQ ID NO: 3281 - RNA, 103 nt, synthetic construct
  source 1..103: mol_type = other RNA
ctctttggaggctgaatggggtcccccgactctggctttcccccaggtatacatgttcctggtgaaatggcaggacctgtcggagaaggtggtctataggcgc

SEQ ID NO: 3282 - RNA, 103 nt, synthetic construct
  source 1..103: mol_type = other RNA
ctctttggaggctgaatggggtcccccgactctggctttcccccaggtatacatgttcctggtgaaatggcaggacctgtcggagaaggtggtctatcggcgc

SEQ ID NO: 3283 - RNA, 103 nt, synthetic construct
  source 1..103: mol_type = other RNA
ctctttggaggctgaatggggtcccccgactctggctttcccccaggtctacatgttcctggtgaaatggcaggacctgtcggagaaggtggtctacagacgc

SEQ ID NO: 3284 - RNA, 103 nt, synthetic construct
  source 1..103: mol_type = other RNA
ctctttggaggctgaatggggtcccccgactctggctttcccccaggtctacatgttcctggtgaaatggcaggacctgtcggagaaggtggtctacaggcgc

SEQ ID NO: 3285 - RNA, 103 nt, synthetic construct
  source 1..103: mol_type = other RNA
ctctttggaggctgaatggggtcccccgactctggctttcccccaggtctacatgttcctggtgaaatggcaggacctgtcggagaaggtggtctaccggcgc

SEQ ID NO: 3286 - RNA, 103 nt, synthetic construct
  source 1..103: mol_type = other RNA
ctctttggaggctgaatggggtcccccgactctggctttcccccaggtctacatgttcctggtgaaatggcaggacctgtcggagaaggtggtctatagacgc

SEQ ID NO: 3287 - RNA, 103 nt, synthetic construct
  source 1..103: mol_type = other RNA
ctctttggaggctgaatggggtcccccgactctggctttcccccaggtttacatgttcctggtgaaatggcaggacctgtcggagaaggtggtctataggcgc

SEQ ID NO: 3288 - RNA, 103 nt, synthetic construct
  source 1..103: mol_type = other RNA
ctctttggaggctgaatggggtcccccgactctggctttcccccaggtctacatgttcctggtgaaatggcaggacctgtcggagaaggtggtctataggcgc

SEQ ID NO: 3289 - RNA, 103 nt, synthetic construct
  source 1..103: mol_type = other RNA
ctctttggaggctgaatggggtcccccgactctggctttcccccaggtgtacatgttcctggtgaaatggcaggacctgtcggagaaggtggtctataggcgc

SEQ ID NO: 3290 - RNA, 103 nt, synthetic construct
  source 1..103: mol_type = other RNA
ctctttggaggctgaatggggtcccccgactctggctttcccccaggtatacatgttcctggtgaaatggcaggacctgtcggagaaggtggtctaccggcgc

SEQ ID NO: 3291 - RNA, 103 nt, synthetic construct
  source 1..103: mol_type = other RNA
ctctttggaggctgaatggggtcccccgactctggctttcccccaggtgtacatgttcctggtgaaatggcaggacctgtcggagaaggtggtctatcggcgc

SEQ ID NO: 3292 - RNA, 103 nt, synthetic construct
  source 1..103: mol_type = other RNA
ctctttggaggctgaatggggtcccccgactctggctttcccccaggtttacatgttcctggtgaaatggcaggacctgtcggagaaggtggtctacagacgc

SEQ ID NO: 3293 - RNA, 103 nt, synthetic construct
  source 1..103: mol_type = other RNA
ctctttggaggctgaatggggtcccccgactctggctttcccccaggtttacatgttcctggtgaaatggcaggacctgtcggagaaggtggtctacaggcgc

SEQ ID NO: 3294 - RNA, 103 nt, synthetic construct
  source 1..103: mol_type = other RNA
ctctttggaggctgaatggggtcccccgactctggctttcccccaggtttacatgttcctggtgaaatggcaggacctgtcggagaaggtggtctaccggcgc

SEQ ID NO: 3295 - RNA, 103 nt, synthetic construct
  source 1..103: mol_type = other RNA
ctctttggaggctgaatggggtcccccgactctggctttcccccaggtgtacatgttcctggtgaaatggcaggacctgtcggagaaggtggtctacagacgc

SEQ ID NO: 3296 - RNA, 103 nt, synthetic construct
  source 1..103: mol_type = other RNA
ctctttggaggctgaatggggtcccccgactctggctttcccccaggtgtacatgttcctggtgaaatggcaggacctgtcggagaaggtggtctaccggcgc

SEQ ID NO: 3297 - RNA, 103 nt, synthetic construct
  source 1..103: mol_type = other RNA
ctctttggaggctgaatggggtcccccgactctggctttcccccaggtgtacatgttcctggtgaaatggcaggacctgtcggagaaggtggtctatagacgc

SEQ ID NO: 3298 - RNA, 16 nt, synthetic construct
  source 1..16: mol_type = other RNA
ctctttggaggctgaa

SEQ ID NO: 3299 - RNA, 17 nt, synthetic construct
  source 1..17: mol_type = other RNA
cctctttggaggctgaa

SEQ ID NO: 3300 - RNA, 18 nt, synthetic construct
  source 1..18: mol_type = other RNA
gcctctttggaggctgaa

SEQ ID NO: 3301 - RNA, 19 nt, synthetic construct
  source 1..19: mol_type = other RNA
agcctctttggaggctgaa

SEQ ID NO: 3302 - RNA, 20 nt, synthetic construct
  source 1..20: mol_type = other RNA
aagcctctttggaggctgaa

SEQ ID NO: 3303 - RNA, 21 nt, synthetic construct
  source 1..21: mol_type = other RNA
aaagcctctttggaggctgaa

SEQ ID NO: 3304 - RNA, 22 nt, synthetic construct
  source 1..22: mol_type = other RNA
caaagcctctttggaggctgaa

SEQ ID NO: 3305-3311 - skipped (7 entries)

SEQ ID NO: 3312 - RNA, 10 nt, synthetic construct
  source 1..10: mol_type = other RNA
agcctccaaa

SEQ ID NO: 3313 - RNA, 11 nt, synthetic construct
  source 1..11: mol_type = other RNA
agcctccaaag

SEQ ID NO: 3314 - RNA, 12 nt, synthetic construct
  source 1..12: mol_type = other RNA
agcctccaaaga

SEQ ID NO: 3315 - RNA, 13 nt, synthetic construct
  source 1..13: mol_type = other RNA
agcctccaaagag

SEQ ID NO: 3316 - RNA, 14 nt, synthetic construct
  source 1..14: mol_type = other RNA
agcctccaaagagg

SEQ ID NO: 3317 - RNA, 15 nt, synthetic construct
  source 1..15: mol_type = other RNA
agcctccaaagaggc

SEQ ID NO: 3318 - RNA, 16 nt, synthetic construct
  source 1..16: mol_type = other RNA
agcctccaaagaggct

SEQ ID NO: 3319 - RNA, 17 nt, synthetic construct
  source 1..17: mol_type = other RNA
agcctccaaagaggctt

SEQ ID NO: 3320 - RNA, 18 nt, synthetic construct
  source 1..18: mol_type = other RNA
agcctccaaagaggcttt

SEQ ID NO: 3321 - RNA, 19 nt, synthetic construct
  source 1..19: mol_type = other RNA
agcctccaaagaggctttg

SEQ ID NO: 3322 - RNA, 35 nt, synthetic construct
  source 1..35: mol_type = other RNA
acctgggggaaagccagagtcgggggaccccattc

SEQ ID NO: 3323 - RNA, 36 nt, synthetic construct
  source 1..36: mol_type = other RNA
tacctgggggaaagccagagtcgggggaccccattc

SEQ ID NO: 3324 - RNA, 36 nt, synthetic construct
  source 1..36: mol_type = other RNA
cacctgggggaaagccagagtcgggggaccccattc

SEQ ID NO: 3325 - RNA, 36 nt, synthetic construct
  source 1..36: mol_type = other RNA
aacctgggggaaagccagagtcgggggaccccattc

SEQ ID NO: 3326 - RNA, 36 nt, synthetic construct
  source 1..36: mol_type = other RNA
gacctgggggaaagccagagtcgggggaccccattc

SEQ ID NO: 3327 - RNA, 37 nt, synthetic construct
  source 1..37: mol_type = other RNA
acacctgggggaaagccagagtcgggggaccccattc

SEQ ID NO: 3328 - RNA, 37 nt, synthetic construct
  source 1..37: mol_type = other RNA
aaacctgggggaaagccagagtcgggggaccccattc

SEQ ID NO: 3329 - RNA, 37 nt, synthetic construct
  source 1..37: mol_type = other RNA
agacctgggggaaagccagagtcgggggaccccattc

SEQ ID NO: 3330 - RNA, 37 nt, synthetic construct
  source 1..37: mol_type = other RNA
atacctgggggaaagccagagtcgggggaccccattc

SEQ ID NO: 3331 - RNA, 38 nt, synthetic construct
  source 1..38: mol_type = other RNA
tacacctgggggaaagccagagtcgggggaccccattc

SEQ ID NO: 3332 - RNA, 38 nt, synthetic construct
  source 1..38: mol_type = other RNA
tagacctgggggaaagccagagtcgggggaccccattc

SEQ ID NO: 3333 - RNA, 38 nt, synthetic construct
  source 1..38: mol_type = other RNA
taaacctgggggaaagccagagtcgggggaccccattc

SEQ ID NO: 3334 - RNA, 38 nt, synthetic construct
  source 1..38: mol_type = other RNA
tatacctgggggaaagccagagtcgggggaccccattc

SEQ ID NO: 3335 - RNA, 39 nt, synthetic construct
  source 1..39: mol_type = other RNA
gtagacctgggggaaagccagagtcgggggaccccattc

SEQ ID NO: 3336 - RNA, 39 nt, synthetic construct
  source 1..39: mol_type = other RNA
gtacacctgggggaaagccagagtcgggggaccccattc

SEQ ID NO: 3337 - RNA, 39 nt, synthetic construct
  source 1..39: mol_type = other RNA
gtaaacctgggggaaagccagagtcgggggaccccattc

SEQ ID NO: 3338 - RNA, 39 nt, synthetic construct
  source 1..39: mol_type = other RNA
gtatacctgggggaaagccagagtcgggggaccccattc

SEQ ID NO: 3339 - RNA, 40 nt, synthetic construct
  source 1..40: mol_type = other RNA
tgtatacctgggggaaagccagagtcgggggaccccattc

SEQ ID NO: 3340 - RNA, 40 nt, synthetic construct
  source 1..40: mol_type = other RNA
tgtacacctgggggaaagccagagtcgggggaccccattc

SEQ ID NO: 3341 - RNA, 40 nt, synthetic construct
  source 1..40: mol_type = other RNA
tgtaaacctgggggaaagccagagtcgggggaccccattc

SEQ ID NO: 3342 - RNA, 40 nt, synthetic construct
  source 1..40: mol_type = other RNA
tgtagacctgggggaaagccagagtcgggggaccccattc

SEQ ID NO: 3343 - RNA, 41 nt, synthetic construct
  source 1..41: mol_type = other RNA
atgtacacctgggggaaagccagagtcgggggaccccattc

SEQ ID NO: 3344 - RNA, 41 nt, synthetic construct
  source 1..41: mol_type = other RNA
atgtaaacctgggggaaagccagagtcgggggaccccattc

SEQ ID NO: 3345 - RNA, 41 nt, synthetic construct
  source 1..41: mol_type = other RNA
atgtagacctgggggaaagccagagtcgggggaccccattc

SEQ ID NO: 3346 - RNA, 41 nt, synthetic construct
  source 1..41: mol_type = other RNA
atgtatacctgggggaaagccagagtcgggggaccccattc

SEQ ID NO: 3347 - RNA, 42 nt, synthetic construct
  source 1..42: mol_type = other RNA
catgtaaacctgggggaaagccagagtcgggggaccccattc

SEQ ID NO: 3348 - RNA, 42 nt, synthetic construct
  source 1..42: mol_type = other RNA
catgtatacctgggggaaagccagagtcgggggaccccattc

SEQ ID NO: 3349 - RNA, 42 nt, synthetic construct
  source 1..42: mol_type = other RNA
catgtagacctgggggaaagccagagtcgggggaccccattc

SEQ ID NO: 3350 - RNA, 42 nt, synthetic construct
  source 1..42: mol_type = other RNA
catgtacacctgggggaaagccagagtcgggggaccccattc

SEQ ID NO: 3351 - RNA, 43 nt, synthetic construct
  source 1..43: mol_type = other RNA
acatgtaaacctgggggaaagccagagtcgggggaccccattc

SEQ ID NO: 3352 - RNA, 43 nt, synthetic construct
  source 1..43: mol_type = other RNA
acatgtatacctgggggaaagccagagtcgggggaccccattc

SEQ ID NO: 3353 - RNA, 43 nt, synthetic construct
  source 1..43: mol_type = other RNA
acatgtagacctgggggaaagccagagtcgggggaccccattc

SEQ ID NO: 3354 - RNA, 43 nt, synthetic construct
  source 1..43: mol_type = other RNA
acatgtacacctgggggaaagccagagtcgggggaccccattc

SEQ ID NO: 3355 - RNA, 44 nt, synthetic construct
  source 1..44: mol_type = other RNA
aacatgtacacctgggggaaagccagagtcgggggaccccattc

SEQ ID NO: 3356 - RNA, 44 nt, synthetic construct
  source 1..44: mol_type = other RNA
aacatgtatacctgggggaaagccagagtcgggggaccccattc

SEQ ID NO: 3357 - RNA, 44 nt, synthetic construct
  source 1..44: mol_type = other RNA
aacatgtagacctgggggaaagccagagtcgggggaccccattc

SEQ ID NO: 3358 - RNA, 44 nt, synthetic construct
  source 1..44: mol_type = other RNA
aacatgtaaacctgggggaaagccagagtcgggggaccccattc

SEQ ID NO: 3359 - RNA, 45 nt, synthetic construct
  source 1..45: mol_type = other RNA
gaacatgtacacctgggggaaagccagagtcgggggaccccattc

SEQ ID NO: 3360 - RNA, 45 nt, synthetic construct
  source 1..45: mol_type = other RNA
gaacatgtatacctgggggaaagccagagtcgggggaccccattc

SEQ ID NO: 3361 - RNA, 45 nt, synthetic construct
  source 1..45: mol_type = other RNA
gaacatgtaaacctgggggaaagccagagtcgggggaccccattc

SEQ ID NO: 3362 - RNA, 45 nt, synthetic construct
  source 1..45: mol_type = other RNA
gaacatgtagacctgggggaaagccagagtcgggggaccccattc

SEQ ID NO: 3363 - RNA, 46 nt, synthetic construct
  source 1..46: mol_type = other RNA
ggaacatgtaaacctgggggaaagccagagtcgggggaccccattc

SEQ ID NO: 3364 - RNA, 46 nt, synthetic construct
  source 1..46: mol_type = other RNA
ggaacatgtacacctgggggaaagccagagtcgggggaccccattc

SEQ ID NO: 3365 - RNA, 46 nt, synthetic construct
  source 1..46: mol_type = other RNA
ggaacatgtagacctgggggaaagccagagtcgggggaccccattc

SEQ ID NO: 3366 - RNA, 46 nt, synthetic construct
  source 1..46: mol_type = other RNA
ggaacatgtatacctgggggaaagccagagtcgggggaccccattc

SEQ ID NO: 3367 - RNA, 47 nt, synthetic construct
  source 1..47: mol_type = other RNA
aggaacatgtagacctgggggaaagccagagtcgggggaccccattc

SEQ ID NO: 3368 - RNA, 47 nt, synthetic construct
  source 1..47: mol_type = other RNA
aggaacatgtacacctgggggaaagccagagtcgggggaccccattc

SEQ ID NO: 3369 - RNA, 47 nt, synthetic construct
  source 1..47: mol_type = other RNA
aggaacatgtaaacctgggggaaagccagagtcgggggaccccattc

SEQ ID NO: 3370 - RNA, 47 nt, synthetic construct
  source 1..47: mol_type = other RNA
aggaacatgtatacctgggggaaagccagagtcgggggaccccattc

SEQ ID NO: 3371 - RNA, 48 nt, synthetic construct
  source 1..48: mol_type = other RNA
caggaacatgtaaacctgggggaaagccagagtcgggggaccccattc

SEQ ID NO: 3372 - RNA, 48 nt, synthetic construct
  source 1..48: mol_type = other RNA
caggaacatgtacacctgggggaaagccagagtcgggggaccccattc

SEQ ID NO: 3373 - RNA, 48 nt, synthetic construct
  source 1..48: mol_type = other RNA
caggaacatgtatacctgggggaaagccagagtcgggggaccccattc

SEQ ID NO: 3374 - RNA, 48 nt, synthetic construct
  source 1..48: mol_type = other RNA
caggaacatgtagacctgggggaaagccagagtcgggggaccccattc

SEQ ID NO: 3375 - RNA, 49 nt, synthetic construct
  source 1..49: mol_type = other RNA
ccaggaacatgtatacctgggggaaagccagagtcgggggaccccattc

SEQ ID NO: 3376 - RNA, 49 nt, synthetic construct
  source 1..49: mol_type = other RNA
ccaggaacatgtagacctgggggaaagccagagtcgggggaccccattc

SEQ ID NO: 3377 - RNA, 49 nt, synthetic construct
  source 1..49: mol_type = other RNA
ccaggaacatgtacacctgggggaaagccagagtcgggggaccccattc

SEQ ID NO: 3378 - RNA, 49 nt, synthetic construct
  source 1..49: mol_type = other RNA
ccaggaacatgtaaacctgggggaaagccagagtcgggggaccccattc

SEQ ID NO: 3379 - RNA, 50 nt, synthetic construct
  source 1..50: mol_type = other RNA
accaggaacatgtaaacctgggggaaagccagagtcgggggaccccattc

SEQ ID NO: 3380 - RNA, 50 nt, synthetic construct
  source 1..50: mol_type = other RNA
accaggaacatgtacacctgggggaaagccagagtcgggggaccccattc

SEQ ID NO: 3381 - RNA, 50 nt, synthetic construct
  source 1..50: mol_type = other RNA
accaggaacatgtagacctgggggaaagccagagtcgggggaccccattc

SEQ ID NO: 3382 - RNA, 50 nt, synthetic construct
  source 1..50: mol_type = other RNA
accaggaacatgtatacctgggggaaagccagagtcgggggaccccattc

SEQ ID NO: 3383 - RNA, 51 nt, synthetic construct
  source 1..51: mol_type = other RNA
caccaggaacatgtacacctgggggaaagccagagtcgggggaccccattc

SEQ ID NO: 3384 - RNA, 51 nt, synthetic construct
  source 1..51: mol_type = other RNA
caccaggaacatgtagacctgggggaaagccagagtcgggggaccccattc

SEQ ID NO: 3385 - RNA, 51 nt, synthetic construct
  source 1..51: mol_type = other RNA
caccaggaacatgtaaacctgggggaaagccagagtcgggggaccccattc

SEQ ID NO: 3386 - RNA, 51 nt, synthetic construct
  source 1..51: mol_type = other RNA
caccaggaacatgtatacctgggggaaagccagagtcgggggaccccattc

SEQ ID NO: 3387 - RNA, 52 nt, synthetic construct
  source 1..52: mol_type = other RNA
tcaccaggaacatgtacacctgggggaaagccagagtcgggggaccccattc

SEQ ID NO: 3388 - RNA, 52 nt, synthetic construct
  source 1..52: mol_type = other RNA
tcaccaggaacatgtatacctgggggaaagccagagtcgggggaccccattc

SEQ ID NO: 3389 - RNA, 52 nt, synthetic construct
  source 1..52: mol_type = other RNA
tcaccaggaacatgtagacctgggggaaagccagagtcgggggaccccattc

SEQ ID NO: 3390 - RNA, 52 nt, synthetic construct
  source 1..52: mol_type = other RNA
tcaccaggaacatgtaaacctgggggaaagccagagtcgggggaccccattc

SEQ ID NO: 3391 - RNA, 53 nt, synthetic construct
  source 1..53: mol_type = other RNA
ttcaccaggaacatgtatacctgggggaaagccagagtcgggggaccccattc

SEQ ID NO: 3392 - RNA, 53 nt, synthetic construct
  source 1..53: mol_type = other RNA
ttcaccaggaacatgtaaacctgggggaaagccagagtcgggggaccccattc

SEQ ID NO: 3393 - RNA, 53 nt, synthetic construct
  source 1..53: mol_type = other RNA
ttcaccaggaacatgtacacctgggggaaagccagagtcgggggaccccattc

SEQ ID NO: 3394 - RNA, 53 nt, synthetic construct
  source 1..53: mol_type = other RNA
ttcaccaggaacatgtagacctgggggaaagccagagtcgggggaccccattc

SEQ ID NO: 3395 - RNA, 54 nt, synthetic construct
  source 1..54: mol_type = other RNA
tttcaccaggaacatgtatacctgggggaaagccagagtcgggggaccccattc

SEQ ID NO: 3396 - RNA, 54 nt, synthetic construct
  source 1..54: mol_type = other RNA
tttcaccaggaacatgtaaacctgggggaaagccagagtcgggggaccccattc

SEQ ID NO: 3397 - RNA, 54 nt, synthetic construct
  source 1..54: mol_type = other RNA
tttcaccaggaacatgtacacctgggggaaagccagagtcgggggaccccattc

SEQ ID NO: 3398 - RNA, 54 nt, synthetic construct
  source 1..54: mol_type = other RNA
tttcaccaggaacatgtagacctgggggaaagccagagtcgggggaccccattc

SEQ ID NO: 3399 - RNA, 55 nt, synthetic construct
  source 1..55: mol_type = other RNA
atttcaccaggaacatgtacacctgggggaaagccagagtcgggggaccccattc

SEQ ID NO: 3400 - RNA, 55 nt, synthetic construct
  source 1..55: mol_type = other RNA
atttcaccaggaacatgtatacctgggggaaagccagagtcgggggaccccattc

SEQ ID NO: 3401 - RNA, 55 nt, synthetic construct
  source 1..55: mol_type = other RNA
atttcaccaggaacatgtagacctgggggaaagccagagtcgggggaccccattc

SEQ ID NO: 3402 - RNA, 55 nt, synthetic construct
  source 1..55: mol_type = other RNA
atttcaccaggaacatgtaaacctgggggaaagccagagtcgggggaccccattc

SEQ ID NO: 3403 - RNA, 56 nt, synthetic construct
  source 1..56: mol_type = other RNA
catttcaccaggaacatgtacacctgggggaaagccagagtcgggggaccccattc

SEQ ID NO: 3404 - RNA, 56 nt, synthetic construct
  source 1..56: mol_type = other RNA
catttcaccaggaacatgtatacctgggggaaagccagagtcgggggaccccattc

SEQ ID NO: 3405 - RNA, 56 nt, synthetic construct
  source 1..56: mol_type = other RNA
catttcaccaggaacatgtagacctgggggaaagccagagtcgggggaccccattc

SEQ ID NO: 3406 - RNA, 56 nt, synthetic construct
  source 1..56: mol_type = other RNA
catttcaccaggaacatgtaaacctgggggaaagccagagtcgggggaccccattc

SEQ ID NO: 3407 - RNA, 57 nt, synthetic construct
  source 1..57: mol_type = other RNA
ccatttcaccaggaacatgtatacctgggggaaagccagagtcgggggaccccattc

SEQ ID NO: 3408 - RNA, 57 nt, synthetic construct
  source 1..57: mol_type = other RNA
ccatttcaccaggaacatgtagacctgggggaaagccagagtcgggggaccccattc

SEQ ID NO: 3409 - RNA, 57 nt, synthetic construct
  source 1..57: mol_type = other RNA
ccatttcaccaggaacatgtacacctgggggaaagccagagtcgggggaccccattc

SEQ ID NO: 3410 - RNA, 57 nt, synthetic construct
  source 1..57: mol_type = other RNA
ccatttcaccaggaacatgtaaacctgggggaaagccagagtcgggggaccccattc

SEQ ID NO: 3411 - RNA, 58 nt, synthetic construct
  source 1..58: mol_type = other RNA
gccatttcaccaggaacatgtaaacctgggggaaagccagagtcgggggaccccattc

SEQ ID NO: 3412 - RNA, 58 nt, synthetic construct
  source 1..58: mol_type = other RNA
gccatttcaccaggaacatgtatacctgggggaaagccagagtcgggggaccccattc

SEQ ID NO: 3413 - RNA, 58 nt, synthetic construct
  source 1..58: mol_type = other RNA
gccatttcaccaggaacatgtagacctgggggaaagccagagtcgggggaccccattc

SEQ ID NO: 3414 - RNA, 58 nt, synthetic construct
  source 1..58: mol_type = other RNA
gccatttcaccaggaacatgtacacctgggggaaagccagagtcgggggaccccattc

SEQ ID NO: 3415 - RNA, 59 nt, synthetic construct
  source 1..59: mol_type = other RNA
tgccatttcaccaggaacatgtagacctgggggaaagccagagtcgggggaccccattc

SEQ ID NO: 3416 - RNA, 59 nt, synthetic construct
  source 1..59: mol_type = other RNA
tgccatttcaccaggaacatgtacacctgggggaaagccagagtcgggggaccccattc

SEQ ID NO: 3417 - RNA, 59 nt, synthetic construct
  source 1..59: mol_type = other RNA
tgccatttcaccaggaacatgtaaacctgggggaaagccagagtcgggggaccccattc

SEQ ID NO: 3418 - RNA, 59 nt, synthetic construct
  source 1..59: mol_type = other RNA
tgccatttcaccaggaacatgtatacctgggggaaagccagagtcgggggaccccattc

SEQ ID NO: 3419 - RNA, 60 nt, synthetic construct
  source 1..60: mol_type = other RNA
ctgccatttcaccaggaacatgtaaacctgggggaaagccagagtcgggggaccccattc

SEQ ID NO: 3420 - RNA, 60 nt, synthetic construct
  source 1..60: mol_type = other RNA
ctgccatttcaccaggaacatgtacacctgggggaaagccagagtcgggggaccccattc

SEQ ID NO: 3421 - RNA, 60 nt, synthetic construct
  source 1..60: mol_type = other RNA
ctgccatttcaccaggaacatgtagacctgggggaaagccagagtcgggggaccccattc

SEQ ID NO: 3422 - RNA, 60 nt, synthetic construct
  source 1..60: mol_type = other RNA
ctgccatttcaccaggaacatgtatacctgggggaaagccagagtcgggggaccccattc

SEQ ID NO: 3423 - RNA, 61 nt, synthetic construct
  source 1..61: mol_type = other RNA
cctgccatttcaccaggaacatgtagacctgggggaaagccagagtcgggggaccccattc

SEQ ID NO: 3424 - RNA, 61 nt, synthetic construct
  source 1..61: mol_type = other RNA
cctgccatttcaccaggaacatgtacacctgggggaaagccagagtcgggggaccccattc

SEQ ID NO: 3425 - RNA, 61 nt, synthetic construct
  source 1..61: mol_type = other RNA
cctgccatttcaccaggaacatgtaaacctgggggaaagccagagtcgggggaccccattc

SEQ ID NO: 3426 - RNA, 61 nt, synthetic construct
  source 1..61: mol_type = other RNA
cctgccatttcaccaggaacatgtatacctgggggaaagccagagtcgggggaccccattc

SEQ ID NO: 3427 - RNA, 62 nt, synthetic construct
  source 1..62: mol_type = other RNA
tcctgccatttcaccaggaacatgtacacctgggggaaagccagagtcgggggaccccattc

SEQ ID NO: 3428 - RNA, 62 nt, synthetic construct
  source 1..62: mol_type = other RNA
tcctgccatttcaccaggaacatgtaaacctgggggaaagccagagtcgggggaccccattc

SEQ ID NO: 3429 - RNA, 62 nt, synthetic construct
  source 1..62: mol_type = other RNA
tcctgccatttcaccaggaacatgtagacctgggggaaagccagagtcgggggaccccattc

SEQ ID NO: 3430 - RNA, 62 nt, synthetic construct
  source 1..62: mol_type = other RNA
tcctgccatttcaccaggaacatgtatacctgggggaaagccagagtcgggggaccccattc

SEQ ID NO: 3431 - RNA, 63 nt, synthetic construct
  source 1..63: mol_type = other RNA
gtcctgccatttcaccaggaacatgtacacctgggggaaagccagagtcgggggaccccattc

SEQ ID NO: 3432 - RNA, 63 nt, synthetic construct
  source 1..63: mol_type = other RNA
gtcctgccatttcaccaggaacatgtaaacctgggggaaagccagagtcgggggaccccattc

SEQ ID NO: 3433 - RNA, 63 nt, synthetic construct
  source 1..63: mol_type = other RNA
gtcctgccatttcaccaggaacatgtatacctgggggaaagccagagtcgggggaccccattc

SEQ ID NO: 3434 - RNA, 63 nt, synthetic construct
  source 1..63: mol_type = other RNA
gtcctgccatttcaccaggaacatgtagacctgggggaaagccagagtcgggggaccccattc

SEQ ID NO: 3435 - RNA, 64 nt, synthetic construct
  source 1..64: mol_type = other RNA
ggtcctgccatttcaccaggaacatgtaaacctgggggaaagccagagtcgggggaccccattc

SEQ ID NO: 3436 - RNA, 64 nt, synthetic construct
  source 1..64: mol_type = other RNA
ggtcctgccatttcaccaggaacatgtacacctgggggaaagccagagtcgggggaccccattc

SEQ ID NO: 3437 - RNA, 64 nt, synthetic construct
  source 1..64: mol_type = other RNA
ggtcctgccatttcaccaggaacatgtagacctgggggaaagccagagtcgggggaccccattc

SEQ ID NO: 3438 - RNA, 64 nt, synthetic construct
  source 1..64: mol_type = other RNA
ggtcctgccatttcaccaggaacatgtatacctgggggaaagccagagtcgggggaccccattc

SEQ ID NO: 3439 - RNA, 65 nt, synthetic construct
  source 1..65: mol_type = other RNA
aggtcctgccatttcaccaggaacatgtaaacctgggggaaagccagagtcgggggaccccattc

SEQ ID NO: 3440 - RNA, 65 nt, synthetic construct
  source 1..65: mol_type = other RNA
aggtcctgccatttcaccaggaacatgtagacctgggggaaagccagagtcgggggaccccattc

SEQ ID NO: 3441 - RNA, 65 nt, synthetic construct
  source 1..65: mol_type = other RNA
aggtcctgccatttcaccaggaacatgtatacctgggggaaagccagagtcgggggaccccattc

SEQ ID NO: 3442 - RNA, 65 nt, synthetic construct
  source 1..65: mol_type = other RNA
aggtcctgccatttcaccaggaacatgtacacctgggggaaagccagagtcgggggaccccattc

SEQ ID NO: 3443 - RNA, 66 nt, synthetic construct
  source 1..66: mol_type = other RNA
caggtcctgccatttcaccaggaacatgtaaacctgggggaaagccagagtcgggggaccccattc

SEQ ID NO: 3444 - RNA, 66 nt, synthetic construct
  source 1..66: mol_type = other RNA
caggtcctgccatttcaccaggaacatgtacacctgggggaaagccagagtcgggggaccccattc

SEQ ID NO: 3445 - RNA, 66 nt, synthetic construct
  source 1..66: mol_type = other RNA
caggtcctgccatttcaccaggaacatgtagacctgggggaaagccagagtcgggggaccccattc

SEQ ID NO: 3446 - RNA, 66 nt, synthetic construct
  source 1..66: mol_type = other RNA
caggtcctgccatttcaccaggaacatgtatacctgggggaaagccagagtcgggggaccccattc

SEQ ID NO: 3447 - RNA, 67 nt, synthetic construct
  source 1..67: mol_type = other RNA
acaggtcctgccatttcaccaggaacatgtatacctgggggaaagccagagtcgggggaccccattc

SEQ ID NO: 3448 - RNA, 67 nt, synthetic construct
  source 1..67: mol_type = other RNA
acaggtcctgccatttcaccaggaacatgtacacctgggggaaagccagagtcgggggaccccattc

SEQ ID NO: 3449 - RNA, 67 nt, synthetic construct
  source 1..67: mol_type = other RNA
acaggtcctgccatttcaccaggaacatgtaaacctgggggaaagccagagtcgggggaccccattc

SEQ ID NO: 3450 - RNA, 67 nt, synthetic construct
  source 1..67: mol_type = other RNA
acaggtcctgccatttcaccaggaacatgtagacctgggggaaagccagagtcgggggaccccattc

SEQ ID NO: 3451 - RNA, 68 nt, synthetic construct
  source 1..68: mol_type = other RNA
gacaggtcctgccatttcaccaggaacatgtacacctgggggaaagccagagtcgggggaccccattc

SEQ ID NO: 3452 - RNA, 68 nt, synthetic construct
  source 1..68: mol_type = other RNA
gacaggtcctgccatttcaccaggaacatgtatacctgggggaaagccagagtcgggggaccccattc

SEQ ID NO: 3453 - RNA, 68 nt, synthetic construct
  source 1..68: mol_type = other RNA
gacaggtcctgccatttcaccaggaacatgtaaacctgggggaaagccagagtcgggggaccccattc

SEQ ID NO: 3454 - RNA, 68 nt, synthetic construct
  source 1..68: mol_type = other RNA
gacaggtcctgccatttcaccaggaacatgtagacctgggggaaagccagagtcgggggaccccattc

SEQ ID NO: 3455 - RNA, 69 nt, synthetic construct
  source 1..69: mol_type = other RNA
cgacaggtcctgccatttcaccaggaacatgtacacctgggggaaagccagagtcgggggaccccattc

SEQ ID NO: 3456 - RNA, 69 nt, synthetic construct
  source 1..69: mol_type = other RNA
cgacaggtcctgccatttcaccaggaacatgtaaacctgggggaaagccagagtcgggggaccccattc

SEQ ID NO: 3457 - RNA, 69 nt, synthetic construct
  source 1..69: mol_type = other RNA
cgacaggtcctgccatttcaccaggaacatgtatacctgggggaaagccagagtcgggggaccccattc

SEQ ID NO: 3458 - RNA, 69 nt, synthetic construct
  source 1..69: mol_type = other RNA
cgacaggtcctgccatttcaccaggaacatgtagacctgggggaaagccagagtcgggggaccccattc

SEQ ID NO: 3459 - RNA, 70 nt, synthetic construct
  source 1..70: mol_type = other RNA
ccgacaggtcctgccatttcaccaggaacatgtagacctgggggaaagccagagtcgggggaccccattc

SEQ ID NO: 3460 - RNA, 70 nt, synthetic construct
  source 1..70: mol_type = other RNA
ccgacaggtcctgccatttcaccaggaacatgtacacctgggggaaagccagagtcgggggaccccattc

SEQ ID NO: 3461 - RNA, 70 nt, synthetic construct
  source 1..70: mol_type = other RNA
ccgacaggtcctgccatttcaccaggaacatgtatacctgggggaaagccagagtcgggggaccccattc

SEQ ID NO: 3462 - RNA, 70 nt, synthetic construct
  source 1..70: mol_type = other RNA
ccgacaggtcctgccatttcaccaggaacatgtaaacctgggggaaagccagagtcgggggaccccattc

SEQ ID NO: 3463 - RNA, 71 nt, synthetic construct
  source 1..71: mol_type = other RNA
tccgacaggtcctgccatttcaccaggaacatgtacacctgggggaaagccagagtcgggggaccccattc

SEQ ID NO: 3464 - RNA, 71 nt, synthetic construct
  source 1..71: mol_type = other RNA
tccgacaggtcctgccatttcaccaggaacatgtatacctgggggaaagccagagtcgggggaccccattc

SEQ ID NO: 3465 - RNA, 71 nt, synthetic construct
  source 1..71: mol_type = other RNA
tccgacaggtcctgccatttcaccaggaacatgtagacctgggggaaagccagagtcgggggaccccattc

SEQ ID NO: 3466 - RNA, 71 nt, synthetic construct
  source 1..71: mol_type = other RNA
tccgacaggtcctgccatttcaccaggaacatgtaaacctgggggaaagccagagtcgggggaccccattc

SEQ ID NO: 3467 - RNA, 72 nt, synthetic construct
  source 1..72: mol_type = other RNA
ctccgacaggtcctgccatttcaccaggaacatgtagacctgggggaaagccagagtcgggggaccccattc

SEQ ID NO: 3468 - RNA, 72 nt, synthetic construct
  source 1..72: mol_type = other RNA
ctccgacaggtcctgccatttcaccaggaacatgtaaacctgggggaaagccagagtcgggggaccccattc

SEQ ID NO: 3469 - RNA, 72 nt, synthetic construct
  source 1..72: mol_type = other RNA
ctccgacaggtcctgccatttcaccaggaacatgtacacctgggggaaagccagagtcgggggaccccattc

SEQ ID NO: 3470 - RNA, 72 nt, synthetic construct
  source 1..72: mol_type = other RNA
ctccgacaggtcctgccatttcaccaggaacatgtatacctgggggaaagccagagtcgggggaccccattc

SEQ ID NO: 3471 - RNA, 73 nt, synthetic construct
  source 1..73: mol_type = other RNA
tctccgacaggtcctgccatttcaccaggaacatgtacacctgggggaaagccagagtcgggggaccccattc

SEQ ID NO: 3472 - RNA, 73 nt, synthetic construct
  source 1..73: mol_type = other RNA
tctccgacaggtcctgccatttcaccaggaacatgtaaacctgggggaaagccagagtcgggggaccccattc

SEQ ID NO: 3473 - RNA, 73 nt, synthetic construct
  source 1..73: mol_type = other RNA
tctccgacaggtcctgccatttcaccaggaacatgtatacctgggggaaagccagagtcgggggaccccattc

SEQ ID NO: 3474 - RNA, 73 nt, synthetic construct
  source 1..73: mol_type = other RNA
tctccgacaggtcctgccatttcaccaggaacatgtagacctgggggaaagccagagtcgggggaccccattc

SEQ ID NO: 3475 - RNA, 74 nt, synthetic construct
  source 1..74: mol_type = other RNA
ttctccgacaggtcctgccatttcaccaggaacatgtatacctgggggaaagccagagtcgggggaccccattc

SEQ ID NO: 3476 - RNA, 74 nt, synthetic construct
  source 1..74: mol_type = other RNA
ttctccgacaggtcctgccatttcaccaggaacatgtacacctgggggaaagccagagtcgggggaccccattc

SEQ ID NO: 3477 - RNA, 74 nt, synthetic construct
  source 1..74: mol_type = other RNA
ttctccgacaggtcctgccatttcaccaggaacatgtagacctgggggaaagccagagtcgggggaccccattc

SEQ ID NO: 3478 - RNA, 74 nt, synthetic construct
  source 1..74: mol_type = other RNA
ttctccgacaggtcctgccatttcaccaggaacatgtaaacctgggggaaagccagagtcgggggaccccattc

SEQ ID NO: 3479 - RNA, 75 nt, synthetic construct
  source 1..75: mol_type = other RNA
cttctccgacaggtcctgccatttcaccaggaacatgtaaacctgggggaaagccagagtcgggggaccccattc

SEQ ID NO: 3480 - RNA, 75 nt, synthetic construct
  source 1..75: mol_type = other RNA
cttctccgacaggtcctgccatttcaccaggaacatgtacacctgggggaaagccagagtcgggggaccccattc

SEQ ID NO: 3481 - RNA, 75 nt, synthetic construct
  source 1..75: mol_type = other RNA
cttctccgacaggtcctgccatttcaccaggaacatgtagacctgggggaaagccagagtcgggggaccccattc

SEQ ID NO: 3482 - RNA, 75 nt, synthetic construct
  source 1..75: mol_type = other RNA
cttctccgacaggtcctgccatttcaccaggaacatgtatacctgggggaaagccagagtcgggggaccccattc

SEQ ID NO: 3483 - RNA, 76 nt, synthetic construct
  source 1..76: mol_type = other RNA
ccttctccgacaggtcctgccatttcaccaggaacatgtatacctgggggaaagccagagtcgggggaccccattc

SEQ ID NO: 3484 - RNA, 76 nt, synthetic construct
  source 1..76: mol_type = other RNA
ccttctccgacaggtcctgccatttcaccaggaacatgtaaacctgggggaaagccagagtcgggggaccccattc

SEQ ID NO: 3485 - RNA, 76 nt, synthetic construct
  source 1..76: mol_type = other RNA
ccttctccgacaggtcctgccatttcaccaggaacatgtagacctgggggaaagccagagtcgggggaccccattc

SEQ ID NO: 3486 - RNA, 76 nt, synthetic construct
  source 1..76: mol_type = other RNA
ccttctccgacaggtcctgccatttcaccaggaacatgtacacctgggggaaagccagagtcgggggaccccattc

SEQ ID NO: 3487 - RNA, 77 nt, synthetic construct
  source 1..77: mol_type = other RNA
accttctccgacaggtcctgccatttcaccaggaacatgtatacctgggggaaagccagagtcgggggaccccattc

SEQ ID NO: 3488 - RNA, 77 nt, synthetic construct
  source 1..77: mol_type = other RNA
accttctccgacaggtcctgccatttcaccaggaacatgtagacctgggggaaagccagagtcgggggaccccattc

SEQ ID NO: 3489 - RNA, 77 nt, synthetic construct
  source 1..77: mol_type = other RNA
accttctccgacaggtcctgccatttcaccaggaacatgtaaacctgggggaaagccagagtcgggggaccccattc

SEQ ID NO: 3490 - RNA, 77 nt, synthetic construct
  source 1..77: mol_type = other RNA
accttctccgacaggtcctgccatttcaccaggaacatgtacacctgggggaaagccagagtcgggggaccccattc

SEQ ID NO: 3491 - RNA, 78 nt, synthetic construct
  source 1..78: mol_type = other RNA
caccttctccgacaggtcctgccatttcaccaggaacatgtaaacctgggggaaagccagagtcgggggaccccattc

SEQ ID NO: 3492 - RNA, 78 nt, synthetic construct
  source 1..78: mol_type = other RNA
caccttctccgacaggtcctgccatttcaccaggaacatgtacacctgggggaaagccagagtcgggggaccccattc

SEQ ID NO: 3493 - RNA, 78 nt, synthetic construct
  source 1..78: mol_type = other RNA
caccttctccgacaggtcctgccatttcaccaggaacatgtagacctgggggaaagccagagtcgggggaccccattc

SEQ ID NO: 3494 - RNA, 78 nt, synthetic construct
  source 1..78: mol_type = other RNA
caccttctccgacaggtcctgccatttcaccaggaacatgtatacctgggggaaagccagagtcgggggaccccattc

SEQ ID NO: 3495 - RNA, 79 nt, synthetic construct
  source 1..79: mol_type = other RNA
ccaccttctccgacaggtcctgccatttcaccaggaacatgtacacctgggggaaagccagagtcgggggaccccattc

SEQ ID NO: 3496 - RNA, 79 nt, synthetic construct
  source 1..79: mol_type = other RNA
ccaccttctccgacaggtcctgccatttcaccaggaacatgtagacctgggggaaagccagagtcgggggaccccattc

SEQ ID NO: 3497 - RNA, 79 nt, synthetic construct
  source 1..79: mol_type = other RNA
ccaccttctccgacaggtcctgccatttcaccaggaacatgtaaacctgggggaaagccagagtcgggggaccccattc

SEQ ID NO: 3498 - RNA, 79 nt, synthetic construct
  source 1..79: mol_type = other RNA
ccaccttctccgacaggtcctgccatttcaccaggaacatgtatacctgggggaaagccagagtcgggggaccccattc

SEQ ID NO: 3499 - RNA, 80 nt, synthetic construct
  source 1..80: mol_type = other RNA
accaccttctccgacaggtcctgccatttcaccaggaacatgtaaacctgggggaaagccagagtcgggggaccccattc

SEQ ID NO: 3500 - RNA, 80 nt, synthetic construct
  source 1..80: mol_type = other RNA
accaccttctccgacaggtcctgccatttcaccaggaacatgtagacctgggggaaagccagagtcgggggaccccattc

SEQ ID NO: 3501 - RNA, 80 nt, synthetic construct
  source 1..80: mol_type = other RNA
accaccttctccgacaggtcctgccatttcaccaggaacatgtacacctgggggaaagccagagtcgggggaccccattc

SEQ ID NO: 3502 - RNA, 80 nt, synthetic construct
  source 1..80: mol_type = other RNA
accaccttctccgacaggtcctgccatttcaccaggaacatgtatacctgggggaaagccagagtcgggggaccccattc

SEQ ID NO: 3503 - RNA, 81 nt, synthetic construct
  source 1..81: mol_type = other RNA
gaccaccttctccgacaggtcctgccatttcaccaggaacatgtagacctgggggaaagccagagtcgggggaccccattc

SEQ ID NO: 3504 - RNA, 81 nt, synthetic construct
  source 1..81: mol_type = other RNA
gaccaccttctccgacaggtcctgccatttcaccaggaacatgtatacctgggggaaagccagagtcgggggaccccattc

SEQ ID NO: 3505 - RNA, 81 nt, synthetic construct
  source 1..81: mol_type = other RNA
gaccaccttctccgacaggtcctgccatttcaccaggaacatgtacacctgggggaaagccagagtcgggggaccccattc

SEQ ID NO: 3506 - RNA, 81 nt, synthetic construct
  source 1..81: mol_type = other RNA
gaccaccttctccgacaggtcctgccatttcaccaggaacatgtaaacctgggggaaagccagagtcgggggaccccattc

SEQ ID NO: 3507 - RNA, 82 nt, synthetic construct
  source 1..82: mol_type = other RNA
agaccaccttctccgacaggtcctgccatttcaccaggaacatgtatacctgggggaaagccagagtcgggggaccccattc

SEQ ID NO: 3508 - RNA, 82 nt, synthetic construct
  source 1..82: mol_type = other RNA
agaccaccttctccgacaggtcctgccatttcaccaggaacatgtagacctgggggaaagccagagtcgggggaccccattc

SEQ ID NO: 3509 - RNA, 82 nt, synthetic construct
  source 1..82: mol_type = other RNA
agaccaccttctccgacaggtcctgccatttcaccaggaacatgtacacctgggggaaagccagagtcgggggaccccattc

SEQ ID NO: 3510 - RNA, 82 nt, synthetic construct
  source 1..82: mol_type = other RNA
agaccaccttctccgacaggtcctgccatttcaccaggaacatgtaaacctgggggaaagccagagtcgggggaccccattc

SEQ ID NO: 3511 - RNA, 83 nt, synthetic construct
  source 1..83: mol_type = other RNA
tagaccaccttctccgacaggtcctgccatttcaccaggaacatgtacacctgggggaaagccagagtcgggggaccccattc

SEQ ID NO: 3512 - RNA, 83 nt, synthetic construct
  source 1..83: mol_type = other RNA
tagaccaccttctccgacaggtcctgccatttcaccaggaacatgtaaacctgggggaaagccagagtcgggggaccccattc

SEQ ID NO: 3513 - RNA, 83 nt, synthetic construct
  source 1..83: mol_type = other RNA
tagaccaccttctccgacaggtcctgccatttcaccaggaacatgtagacctgggggaaagccagagtcgggggaccccattc

SEQ ID NO: 3514 - RNA, 83 nt, synthetic construct
  source 1..83: mol_type = other RNA
tagaccaccttctccgacaggtcctgccatttcaccaggaacatgtatacctgggggaaagccagagtcgggggaccccattc

SEQ ID NO: 3515 - RNA, 84 nt, synthetic construct
  source 1..84: mol_type = other RNA
gtagaccaccttctccgacaggtcctgccatttcaccaggaacatgtagacctgggggaaagccagagtcgggggaccccattc

SEQ ID NO: 3516 - RNA, 84 nt, synthetic construct
  source 1..84: mol_type = other RNA
gtagaccaccttctccgacaggtcctgccatttcaccaggaacatgtaaacctgggggaaagccagagtcgggggaccccattc

SEQ ID NO: 3517 - RNA, 84 nt, synthetic construct
  source 1..84: mol_type = other RNA
gtagaccaccttctccgacaggtcctgccatttcaccaggaacatgtacacctgggggaaagccagagtcgggggaccccattc

SEQ ID NO: 3518 - RNA, 84 nt, synthetic construct
  source 1..84: mol_type = other RNA
gtagaccaccttctccgacaggtcctgccatttcaccaggaacatgtatacctgggggaaagccagagtcgggggaccccattc

SEQ ID NO: 3519 - RNA, 85 nt, synthetic construct
  source 1..85: mol_type = other RNA
ggtagaccaccttctccgacaggtcctgccatttcaccaggaacatgtatacctgggggaaagccagagtcgggggaccccattc

SEQ ID NO: 3520 - RNA, 85 nt, synthetic construct
  source 1..85: mol_type = other RNA
ggtagaccaccttctccgacaggtcctgccatttcaccaggaacatgtagacctgggggaaagccagagtcgggggaccccattc

SEQ ID NO: 3521 - RNA, 85 nt, synthetic construct
  source 1..85: mol_type = other RNA
ggtagaccaccttctccgacaggtcctgccatttcaccaggaacatgtacacctgggggaaagccagagtcgggggaccccattc

SEQ ID NO: 3522 - RNA, 85 nt, synthetic construct
  source 1..85: mol_type = other RNA
ggtagaccaccttctccgacaggtcctgccatttcaccaggaacatgtaaacctgggggaaagccagagtcgggggaccccattc

SEQ ID NO: 3523 - RNA, 86 nt, synthetic construct
  source 1..86: mol_type = other RNA
cggtagaccaccttctccgacaggtcctgccatttcaccaggaacatgtaaacctgggggaaagccagagtcgggggaccccattc

SEQ ID NO: 3524 - RNA, 86 nt, synthetic construct
  source 1..86: mol_type = other RNA
cggtagaccaccttctccgacaggtcctgccatttcaccaggaacatgtacacctgggggaaagccagagtcgggggaccccattc

SEQ ID NO: 3525 - RNA, 86 nt, synthetic construct
  source 1..86: mol_type = other RNA
cggtagaccaccttctccgacaggtcctgccatttcaccaggaacatgtatacctgggggaaagccagagtcgggggaccccattc

SEQ ID NO: 3526 - RNA, 86 nt, synthetic construct
  source 1..86: mol_type = other RNA
cggtagaccaccttctccgacaggtcctgccatttcaccaggaacatgtagacctgggggaaagccagagtcgggggaccccattc

SEQ ID NO: 3527 - RNA, 87 nt, synthetic construct
  source 1..87: mol_type = other RNA
ccggtagaccaccttctccgacaggtcctgccatttcaccaggaacatgtaaacctgggggaaagccagagtcgggggaccccattc

SEQ ID NO: 3528 - RNA, 87 nt, synthetic construct
  source 1..87: mol_type = other RNA
ccggtagaccaccttctccgacaggtcctgccatttcaccaggaacatgtacacctgggggaaagccagagtcgggggaccccattc

SEQ ID NO: 3529 - RNA, 87 nt, synthetic construct
  source 1..87: mol_type = other RNA
ccggtagaccaccttctccgacaggtcctgccatttcaccaggaacatgtatacctgggggaaagccagagtcgggggaccccattc

SEQ ID NO: 3530 - RNA, 87 nt, synthetic construct
  source 1..87: mol_type = other RNA
ccggtagaccaccttctccgacaggtcctgccatttcaccaggaacatgtagacctgggggaaagccagagtcgggggaccccattc

SEQ ID NO: 3531 - RNA, 88 nt, synthetic construct
  source 1..88: mol_type = other RNA
gccggtagaccaccttctccgacaggtcctgccatttcaccaggaacatgtatacctgggggaaagccagagtcgggggaccccattc

SEQ ID NO: 3532 - RNA, 88 nt, synthetic construct
  source 1..88: mol_type = other RNA
gccggtagaccaccttctccgacaggtcctgccatttcaccaggaacatgtagacctgggggaaagccagagtcgggggaccccattc

SEQ ID NO: 3533 - RNA, 88 nt, synthetic construct
  source 1..88: mol_type = other RNA
gccggtagaccaccttctccgacaggtcctgccatttcaccaggaacatgtacacctgggggaaagccagagtcgggggaccccattc

SEQ ID NO: 3534 - RNA, 88 nt, synthetic construct
  source 1..88: mol_type = other RNA
gccggtagaccaccttctccgacaggtcctgccatttcaccaggaacatgtaaacctgggggaaagccagagtcgggggaccccattc

SEQ ID NO: 3535 - RNA, 89 nt, synthetic construct
  source 1..89: mol_type = other RNA
cgccggtagaccaccttctccgacaggtcctgccatttcaccaggaacatgtaaacctgggggaaagccagagtcgggggaccccattc

SEQ ID NO: 3536 - RNA, 89 nt, synthetic construct
  source 1..89: mol_type = other RNA
cgccggtagaccaccttctccgacaggtcctgccatttcaccaggaacatgtacacctgggggaaagccagagtcgggggaccccattc

SEQ ID NO: 3537 - RNA, 89 nt, synthetic construct
  source 1..89: mol_type = other RNA
cgccggtagaccaccttctccgacaggtcctgccatttcaccaggaacatgtatacctgggggaaagccagagtcgggggaccccattc

SEQ ID NO: 3538 - RNA, 89 nt, synthetic construct
  source 1..89: mol_type = other RNA
cgccggtagaccaccttctccgacaggtcctgccatttcaccaggaacatgtagacctgggggaaagccagagtcgggggaccccattc

SEQ ID NO: 3539 - RNA, 90 nt, synthetic construct
  source 1..90: mol_type = other RNA
gcgccggtagaccaccttctccgacaggtcctgccatttcaccaggaacatgtagacctgggggaaagccagagtcgggggaccccattc

SEQ ID NO: 3540 - RNA, 90 nt, synthetic construct
  source 1..90: mol_type = other RNA
gcgccggtagaccaccttctccgacaggtcctgccatttcaccaggaacatgtacacctgggggaaagccagagtcgggggaccccattc

SEQ ID NO: 3541 - RNA, 90 nt, synthetic construct
  source 1..90: mol_type = other RNA
gcgccggtagaccaccttctccgacaggtcctgccatttcaccaggaacatgtaaacctgggggaaagccagagtcgggggaccccattc

SEQ ID NO: 3542 - RNA, 90 nt, synthetic construct
  source 1..90: mol_type = other RNA
gcgccggtagaccaccttctccgacaggtcctgccatttcaccaggaacatgtatacctgggggaaagccagagtcgggggaccccattc

SEQ ID NO: 3543 - RNA, 91 nt, synthetic construct
  source 1..91: mol_type = other RNA
agcgccggtagaccaccttctccgacaggtcctgccatttcaccaggaacatgtagacctgggggaaagccagagtcgggggaccccattc

SEQ ID NO: 3544 - RNA, 91 nt, synthetic construct
  source 1..91: mol_type = other RNA
agcgccggtagaccaccttctccgacaggtcctgccatttcaccaggaacatgtacacctgggggaaagccagagtcgggggaccccattc

SEQ ID NO: 3545 - RNA, 91 nt, synthetic construct
  source 1..91: mol_type = other RNA
agcgccggtagaccaccttctccgacaggtcctgccatttcaccaggaacatgtaaacctgggggaaagccagagtcgggggaccccattc

SEQ ID NO: 3546 - RNA, 91 nt, synthetic construct
  source 1..91: mol_type = other RNA
agcgccggtagaccaccttctccgacaggtcctgccatttcaccaggaacatgtatacctgggggaaagccagagtcgggggaccccattc

SEQ ID NO: 3547 - RNA, 92 nt, synthetic construct
  source 1..92: mol_type = other RNA
aagcgccggtagaccaccttctccgacaggtcctgccatttcaccaggaacatgtatacctgggggaaagccagagtcgggggaccccattc

SEQ ID NO: 3548 - RNA, 92 nt, synthetic construct
  source 1..92: mol_type = other RNA
aagcgccggtagaccaccttctccgacaggtcctgccatttcaccaggaacatgtacacctgggggaaagccagagtcgggggaccccattc

SEQ ID NO: 3549 - RNA, 92 nt, synthetic construct
  source 1..92: mol_type = other RNA
aagcgccggtagaccaccttctccgacaggtcctgccatttcaccaggaacatgtaaacctgggggaaagccagagtcgggggaccccattc

SEQ ID NO: 3550 - RNA, 92 nt, synthetic construct
  source 1..92: mol_type = other RNA
aagcgccggtagaccaccttctccgacaggtcctgccatttcaccaggaacatgtagacctgggggaaagccagagtcgggggaccccattc

SEQ ID NO: 3551 - RNA, 93 nt, synthetic construct
  source 1..93: mol_type = other RNA
gaagcgccggtagaccaccttctccgacaggtcctgccatttcaccaggaacatgtacacctgggggaaagccagagtcgggggaccccattc

SEQ ID NO: 3552 - RNA, 93 nt, synthetic construct
  source 1..93: mol_type = other RNA
gaagcgccggtagaccaccttctccgacaggtcctgccatttcaccaggaacatgtatacctgggggaaagccagagtcgggggaccccattc

SEQ ID NO: 3553 - RNA, 93 nt, synthetic construct
  source 1..93: mol_type = other RNA
gaagcgccggtagaccaccttctccgacaggtcctgccatttcaccaggaacatgtaaacctgggggaaagccagagtcgggggaccccattc

SEQ ID NO: 3554 - RNA, 93 nt, synthetic construct
  source 1..93: mol_type = other RNA
gaagcgccggtagaccaccttctccgacaggtcctgccatttcaccaggaacatgtagacctgggggaaagccagagtcgggggaccccattc

SEQ ID NO: 3555 - RNA, 94 nt, synthetic construct
  source 1..94: mol_type = other RNA
tgaagcgccggtagaccaccttctccgacaggtcctgccatttcaccaggaacatgtacacctgggggaaagccagagtcgggggaccccattc

SEQ ID NO: 3556 - RNA, 94 nt, synthetic construct
  source 1..94: mol_type = other RNA
tgaagcgccggtagaccaccttctccgacaggtcctgccatttcaccaggaacatgtatacctgggggaaagccagagtcgggggaccccattc

SEQ ID NO: 3557 - RNA, 94 nt, synthetic construct
  source 1..94: mol_type = other RNA
tgaagcgccggtagaccaccttctccgacaggtcctgccatttcaccaggaacatgtagacctgggggaaagccagagtcgggggaccccattc

SEQ ID NO: 3558 - RNA, 94 nt, synthetic construct
  source 1..94: mol_type = other RNA
tgaagcgccggtagaccaccttctccgacaggtcctgccatttcaccaggaacatgtaaacctgggggaaagccagagtcgggggaccccattc

SEQ ID NO: 3559 - RNA, 95 nt, synthetic construct
  source 1..95: mol_type = other RNA
gtgaagcgccggtagaccaccttctccgacaggtcctgccatttcaccaggaacatgtagacctgggggaaagccagagtcgggggaccccattc

SEQ ID NO: 3560 - RNA, 95 nt, synthetic construct
  source 1..95: mol_type = other RNA
gtgaagcgccggtagaccaccttctccgacaggtcctgccatttcaccaggaacatgtacacctgggggaaagccagagtcgggggaccccattc

SEQ ID NO: 3561 - RNA, 95 nt, synthetic construct
  source 1..95: mol_type = other RNA
gtgaagcgccggtagaccaccttctccgacaggtcctgccatttcaccaggaacatgtatacctgggggaaagccagagtcgggggaccccattc

SEQ ID NO: 3562 - RNA, 95 nt, synthetic construct
  source 1..95: mol_type = other RNA
gtgaagcgccggtagaccaccttctccgacaggtcctgccatttcaccaggaacatgtaaacctgggggaaagccagagtcgggggaccccattc

SEQ ID NO: 3563 - RNA, 96 nt, synthetic construct
  source 1..96: mol_type = other RNA
ggtgaagcgccggtagaccaccttctccgacaggtcctgccatttcaccaggaacatgtagacctgggggaaagccagagtcgggggaccccattc

SEQ ID NO: 3564 - RNA, 96 nt, synthetic construct
  source 1..96: mol_type = other RNA
ggtgaagcgccggtagaccaccttctccgacaggtcctgccatttcaccaggaacatgtaaacctgggggaaagccagagtcgggggaccccattc

SEQ ID NO: 3565 - RNA, 96 nt, synthetic construct
  source 1..96: mol_type = other RNA
ggtgaagcgccggtagaccaccttctccgacaggtcctgccatttcaccaggaacatgtacacctgggggaaagccagagtcgggggaccccattc

SEQ ID NO: 3566 - RNA, 96 nt, synthetic construct
  source 1..96: mol_type = other RNA
ggtgaagcgccggtagaccaccttctccgacaggtcctgccatttcaccaggaacatgtatacctgggggaaagccagagtcgggggaccccattc

SEQ ID NO: 3567 - RNA, 97 nt, synthetic construct
  source 1..97: mol_type = other RNA
cggtgaagcgccggtagaccaccttctccgacaggtcctgccatttcaccaggaacatgtagacctgggggaaagccagagtcgggggaccccattc

SEQ ID NO: 3568 - RNA, 97 nt, synthetic construct
  source 1..97: mol_type = other RNA
cggtgaagcgccggtagaccaccttctccgacaggtcctgccatttcaccaggaacatgtaaacctgggggaaagccagagtcgggggaccccattc

SEQ ID NO: 3569 - RNA, 97 nt, synthetic construct
  source 1..97: mol_type = other RNA
cggtgaagcgccggtagaccaccttctccgacaggtcctgccatttcaccaggaacatgtatacctgggggaaagccagagtcgggggaccccattc

SEQ ID NO: 3570 - RNA, 97 nt, synthetic construct
  source 1..97: mol_type = other RNA
cggtgaagcgccggtagaccaccttctccgacaggtcctgccatttcaccaggaacatgtacacctgggggaaagccagagtcgggggaccccattc

SEQ ID NO: 3571 - RNA, 98 nt, synthetic construct
  source 1..98: mol_type = other RNA
tcggtgaagcgccggtagaccaccttctccgacaggtcctgccatttcaccaggaacatgtacacctgggggaaagccagagtcgggggaccccattc

SEQ ID NO: 3572 - RNA, 98 nt, synthetic construct
  source 1..98: mol_type = other RNA
tcggtgaagcgccggtagaccaccttctccgacaggtcctgccatttcaccaggaacatgtatacctgggggaaagccagagtcgggggaccccattc

SEQ ID NO: 3573 - RNA, 98 nt, synthetic construct
  source 1..98: mol_type = other RNA
tcggtgaagcgccggtagaccaccttctccgacaggtcctgccatttcaccaggaacatgtagacctgggggaaagccagagtcgggggaccccattc

SEQ ID NO: 3574 - RNA, 98 nt, synthetic construct
  source 1..98: mol_type = other RNA
tcggtgaagcgccggtagaccaccttctccgacaggtcctgccatttcaccaggaacatgtaaacctgggggaaagccagagtcgggggaccccattc

SEQ ID NO: 3575 - RNA, 99 nt, synthetic construct
  source 1..99: mol_type = other RNA
ctcggtgaagcgccggtagaccaccttctccgacaggtcctgccatttcaccaggaacatgtatacctgggggaaagccagagtcgggggaccccattc

SEQ ID NO: 3576 - RNA, 99 nt, synthetic construct
  source 1..99: mol_type = other RNA
ctcggtgaagcgccggtagaccaccttctccgacaggtcctgccatttcaccaggaacatgtaaacctgggggaaagccagagtcgggggaccccattc

SEQ ID NO: 3577 - RNA, 99 nt, synthetic construct
  source 1..99: mol_type = other RNA
ctcggtgaagcgccggtagaccaccttctccgacaggtcctgccatttcaccaggaacatgtacacctgggggaaagccagagtcgggggaccccattc

SEQ ID NO: 3578 - RNA, 99 nt, synthetic construct
  source 1..99: mol_type = other RNA
ctcggtgaagcgccggtagaccaccttctccgacaggtcctgccatttcaccaggaacatgtagacctgggggaaagccagagtcgggggaccccattc

SEQ ID NO: 3579 - RNA, 100 nt, synthetic construct
  source 1..100: mol_type = other RNA
tctcggtgaagcgccggtagaccaccttctccgacaggtcctgccatttcaccaggaacatgtatacctgggggaaagccagagtcgggggaccccattc

SEQ ID NO: 3580 - RNA, 100 nt, synthetic construct
  source 1..100: mol_type = other RNA
tctcggtgaagcgccggtagaccaccttctccgacaggtcctgccatttcaccaggaacatgtagacctgggggaaagccagagtcgggggaccccattc

SEQ ID NO: 3581 - RNA, 100 nt, synthetic construct
  source 1..100: mol_type = other RNA
tctcggtgaagcgccggtagaccaccttctccgacaggtcctgccatttcaccaggaacatgtacacctgggggaaagccagagtcgggggaccccattc

SEQ ID NO: 3582 - RNA, 100 nt, synthetic construct
  source 1..100: mol_type = other RNA
tctcggtgaagcgccggtagaccaccttctccgacaggtcctgccatttcaccaggaacatgtaaacctgggggaaagccagagtcgggggaccccattc

SEQ ID NO: 3583 - RNA, 101 nt, synthetic construct
  source 1..101: mol_type = other RNA
atctcggtgaagcgccggtagaccaccttctccgacaggtcctgccatttcaccaggaacatgtacacctgggggaaagccagagtcgggggaccccattc

SEQ ID NO: 3584 - RNA, 101 nt, synthetic construct
  source 1..101: mol_type = other RNA
atctcggtgaagcgccggtagaccaccttctccgacaggtcctgccatttcaccaggaacatgtaaacctgggggaaagccagagtcgggggaccccattc

SEQ ID NO: 3585 - RNA, 101 nt, synthetic construct
  source 1..101: mol_type = other RNA
atctcggtgaagcgccggtagaccaccttctccgacaggtcctgccatttcaccaggaacatgtagacctgggggaaagccagagtcgggggaccccattc

SEQ ID NO: 3586 - RNA, 101 nt, synthetic construct
  source 1..101: mol_type = other RNA
atctcggtgaagcgccggtagaccaccttctccgacaggtcctgccatttcaccaggaacatgtatacctgggggaaagccagagtcgggggaccccattc

SEQ ID NO: 3587 - RNA, 102 nt, synthetic construct
  source 1..102: mol_type = other RNA
gatctcggtgaagcgccggtagaccaccttctccgacaggtcctgccatttcaccaggaacatgtatacctgggggaaagccagagtcgggggaccccattc

SEQ ID NO: 3588 - RNA, 102 nt, synthetic construct
  source 1..102: mol_type = other RNA
gatctcggtgaagcgccggtagaccaccttctccgacaggtcctgccatttcaccaggaacatgtagacctgggggaaagccagagtcgggggaccccattc

SEQ ID NO: 3589 - RNA, 102 nt, synthetic construct
  source 1..102: mol_type = other RNA
gatctcggtgaagcgccggtagaccaccttctccgacaggtcctgccatttcaccaggaacatgtacacctgggggaaagccagagtcgggggaccccattc

SEQ ID NO: 3590 - RNA, 102 nt, synthetic construct
  source 1..102: mol_type = other RNA
gatctcggtgaagcgccggtagaccaccttctccgacaggtcctgccatttcaccaggaacatgtaaacctgggggaaagccagagtcgggggaccccattc

SEQ ID NO: 3591 - RNA, 103 nt, synthetic construct
  source 1..103: mol_type = other RNA
agatctcggtgaagcgccggtagaccaccttctccgacaggtcctgccatttcaccaggaacatgtaaacctgggggaaagccagagtcgggggaccccattc

SEQ ID NO: 3592 - RNA, 103 nt, synthetic construct
  source 1..103: mol_type = other RNA
agatctcggtgaagcgccggtagaccaccttctccgacaggtcctgccatttcaccaggaacatgtatacctgggggaaagccagagtcgggggaccccattc

SEQ ID NO: 3593 - RNA, 103 nt, synthetic construct
  source 1..103: mol_type = other RNA
agatctcggtgaagcgccggtagaccaccttctccgacaggtcctgccatttcaccaggaacatgtagacctgggggaaagccagagtcgggggaccccattc

SEQ ID NO: 3594 - RNA, 103 nt, synthetic construct
  source 1..103: mol_type = other RNA
agatctcggtgaagcgccggtagaccaccttctccgacaggtcctgccatttcaccaggaacatgtacacctgggggaaagccagagtcgggggaccccattc

SEQ ID NO: 3595 - RNA, 16 nt, synthetic construct
  source 1..16: mol_type = other RNA
caccaggaacatgtac

SEQ ID NO: 3596 - RNA, 17 nt, synthetic construct
  source 1..17: mol_type = other RNA
tcaccaggaacatgtac

SEQ ID NO: 3597 - RNA, 18 nt, synthetic construct
  source 1..18: mol_type = other RNA
ttcaccaggaacatgtac

SEQ ID NO: 3598 - RNA, 19 nt, synthetic construct
  source 1..19: mol_type = other RNA
tttcaccaggaacatgtac

SEQ ID NO: 3599 - RNA, 20 nt, synthetic construct
  source 1..20: mol_type = other RNA
atttcaccaggaacatgtac

SEQ ID NO: 3600 - RNA, 21 nt, synthetic construct
  source 1..21: mol_type = other RNA
catttcaccaggaacatgtac

SEQ ID NO: 3601 - RNA, 22 nt, synthetic construct
  source 1..22: mol_type = other RNA
ccatttcaccaggaacatgtac

SEQ ID NO: 3602-3608 - skipped (7 entries)

SEQ ID NO: 3609 - RNA, 10 nt, synthetic construct
  source 1..10: mol_type = other RNA
catgttcctg

SEQ ID NO: 3610 - RNA, 11 nt, synthetic construct
  source 1..11: mol_type = other RNA
catgttcctgg

SEQ ID NO: 3611 - RNA, 12 nt, synthetic construct
  source 1..12: mol_type = other RNA
catgttcctggt

SEQ ID NO: 3612 - RNA, 13 nt, synthetic construct
  source 1..13: mol_type = other RNA
catgttcctggtg

SEQ ID NO: 3613 - RNA, 14 nt, synthetic construct
  source 1..14: mol_type = other RNA
catgttcctggtga

SEQ ID NO: 3614 - RNA, 15 nt, synthetic construct
  source 1..15: mol_type = other RNA
catgttcctggtgaa

SEQ ID NO: 3615 - RNA, 16 nt, synthetic construct
  source 1..16: mol_type = other RNA
catgttcctggtgaaa

SEQ ID NO: 3616 - RNA, 17 nt, synthetic construct
  source 1..17: mol_type = other RNA
catgttcctggtgaaat

SEQ ID NO: 3617 - RNA, 18 nt, synthetic construct
  source 1..18: mol_type = other RNA
catgttcctggtgaaatg

SEQ ID NO: 3618 - RNA, 19 nt, synthetic construct
  source 1..19: mol_type = other RNA
catgttcctggtgaaatgg

SEQ ID NO: 3619 - RNA, 10 nt, synthetic construct
  source 1..10: mol_type = other RNA
cccaggtcta

SEQ ID NO: 3620 - RNA, 10 nt, synthetic construct
  source 1..10: mol_type = other RNA
cccaggtgta

SEQ ID NO: 3621 - RNA, 10 nt, synthetic construct
  source 1..10: mol_type = other RNA
cccaggtata

SEQ ID NO: 3622 - RNA, 10 nt, synthetic construct
  source 1..10: mol_type = other RNA
cccaggttta

SEQ ID NO: 3623 - RNA, 11 nt, synthetic construct
  source 1..11: mol_type = other RNA
ccccaggttta

SEQ ID NO: 3624 - RNA, 11 nt, synthetic construct
  source 1..11: mol_type = other RNA
ccccaggtgta

SEQ ID NO: 3625 - RNA, 11 nt, synthetic construct
  source 1..11: mol_type = other RNA
ccccaggtcta

SEQ ID NO: 3626 - RNA, 11 nt, synthetic construct
  source 1..11: mol_type = other RNA
ccccaggtata

SEQ ID NO: 3627 - RNA, 12 nt, synthetic construct
  source 1..12: mol_type = other RNA
cccccaggttta

SEQ ID NO: 3628 - RNA, 12 nt, synthetic construct
  source 1..12: mol_type = other RNA
cccccaggtata

SEQ ID NO: 3629 - RNA, 12 nt, synthetic construct
  source 1..12: mol_type = other RNA
cccccaggtgta

SEQ ID NO: 3630 - RNA, 12 nt, synthetic construct
  source 1..12: mol_type = other RNA
cccccaggtcta

SEQ ID NO: 3631 - RNA, 13 nt, synthetic construct
  source 1..13: mol_type = other RNA
tcccccaggttta

SEQ ID NO: 3632 - RNA, 13 nt, synthetic construct
  source 1..13: mol_type = other RNA
tcccccaggtcta

SEQ ID NO: 3633 - RNA, 13 nt, synthetic construct
  source 1..13: mol_type = other RNA
tcccccaggtgta

SEQ ID NO: 3634 - RNA, 13 nt, synthetic construct
  source 1..13: mol_type = other RNA
tcccccaggtata

SEQ ID NO: 3635 - RNA, 14 nt, synthetic construct
  source 1..14: mol_type = other RNA
ttcccccaggtcta

SEQ ID NO: 3636 - RNA, 14 nt, synthetic construct
  source 1..14: mol_type = other RNA
ttcccccaggtata

SEQ ID NO: 3637 - RNA, 14 nt, synthetic construct
  source 1..14: mol_type = other RNA
ttcccccaggtgta

SEQ ID NO: 3638 - RNA, 14 nt, synthetic construct
  source 1..14: mol_type = other RNA
ttcccccaggttta

SEQ ID NO: 3639 - RNA, 15 nt, synthetic construct
  source 1..15: mol_type = other RNA
tttcccccaggtgta

SEQ ID NO: 3640 - RNA, 15 nt, synthetic construct
  source 1..15: mol_type = other RNA
tttcccccaggttta

SEQ ID NO: 3641 - RNA, 15 nt, synthetic construct
  source 1..15: mol_type = other RNA
tttcccccaggtcta

SEQ ID NO: 3642 - RNA, 15 nt, synthetic construct
  source 1..15: mol_type = other RNA
tttcccccaggtata

SEQ ID NO: 3643 - RNA, 16 nt, synthetic construct
  source 1..16: mol_type = other RNA
ctttcccccaggtata

SEQ ID NO: 3644 - RNA, 16 nt, synthetic construct
  source 1..16: mol_type = other RNA
ctttcccccaggttta

SEQ ID NO: 3645 - RNA, 16 nt, synthetic construct
  source 1..16: mol_type = other RNA
ctttcccccaggtcta

SEQ ID NO: 3646 - RNA, 16 nt, synthetic construct
  source 1..16: mol_type = other RNA
ctttcccccaggtgta

SEQ ID NO: 3647 - RNA, 17 nt, synthetic construct
  source 1..17: mol_type = other RNA
gctttcccccaggtata

SEQ ID NO: 3648 - RNA, 17 nt, synthetic construct
  source 1..17: mol_type = other RNA
gctttcccccaggtcta

SEQ ID NO: 3649 - RNA, 17 nt, synthetic construct
  source 1..17: mol_type = other RNA
gctttcccccaggtgta

SEQ ID NO: 3650 - RNA, 17 nt, synthetic construct
  source 1..17: mol_type = other RNA
gctttcccccaggttta

SEQ ID NO: 3651 - RNA, 18 nt, synthetic construct
  source 1..18: mol_type = other RNA
ggctttcccccaggtcta

SEQ ID NO: 3652 - RNA, 18 nt, synthetic construct
  source 1..18: mol_type = other RNA
ggctttcccccaggttta

SEQ ID NO: 3653 - RNA, 18 nt, synthetic construct
  source 1..18: mol_type = other RNA
ggctttcccccaggtata

SEQ ID NO: 3654 - RNA, 18 nt, synthetic construct
  source 1..18: mol_type = other RNA
ggctttcccccaggtgta

SEQ ID NO: 3655 - RNA, 19 nt, synthetic construct
  source 1..19: mol_type = other RNA
tggctttcccccaggttta

SEQ ID NO: 3656 - RNA, 19 nt, synthetic construct
  source 1..19: mol_type = other RNA
tggctttcccccaggtgta

SEQ ID NO: 3657 - RNA, 19 nt, synthetic construct
  source 1..19: mol_type = other RNA
tggctttcccccaggtcta

SEQ ID NO: 3658 - RNA, 19 nt, synthetic construct
  source 1..19: mol_type = other RNA
tggctttcccccaggtata

SEQ ID NO: 3659 - RNA, 20 nt, synthetic construct
  source 1..20: mol_type = other RNA
ctggctttcccccaggtata

SEQ ID NO: 3660 - RNA, 20 nt, synthetic construct
  source 1..20: mol_type = other RNA
ctggctttcccccaggtgta

SEQ ID NO: 3661 - RNA, 20 nt, synthetic construct
  source 1..20: mol_type = other RNA
ctggctttcccccaggttta

SEQ ID NO: 3662 - RNA, 20 nt, synthetic construct
  source 1..20: mol_type = other RNA
ctggctttcccccaggtcta

SEQ ID NO: 3663 - RNA, 21 nt, synthetic construct
  source 1..21: mol_type = other RNA
tctggctttcccccaggtata

SEQ ID NO: 3664 - RNA, 21 nt, synthetic construct
  source 1..21: mol_type = other RNA
tctggctttcccccaggtcta

SEQ ID NO: 3665 - RNA, 21 nt, synthetic construct
  source 1..21: mol_type = other RNA
tctggctttcccccaggtgta

SEQ ID NO: 3666 - RNA, 21 nt, synthetic construct
  source 1..21: mol_type = other RNA
tctggctttcccccaggttta

SEQ ID NO: 3667 - RNA, 22 nt, synthetic construct
  source 1..22: mol_type = other RNA
ctctggctttcccccaggtgta

SEQ ID NO: 3668 - RNA, 22 nt, synthetic construct
  source 1..22: mol_type = other RNA
ctctggctttcccccaggtata

SEQ ID NO: 3669 - RNA, 22 nt, synthetic construct
  source 1..22: mol_type = other RNA
ctctggctttcccccaggtcta

SEQ ID NO: 3670 - RNA, 22 nt, synthetic construct
  source 1..22: mol_type = other RNA
ctctggctttcccccaggttta

SEQ ID NO: 3671 - RNA, 23 nt, synthetic construct
  source 1..23: mol_type = other RNA
actctggctttcccccaggtata

SEQ ID NO: 3672 - RNA, 23 nt, synthetic construct
  source 1..23: mol_type = other RNA
actctggctttcccccaggttta

SEQ ID NO: 3673 - RNA, 23 nt, synthetic construct
  source 1..23: mol_type = other RNA
actctggctttcccccaggtgta

SEQ ID NO: 3674 - RNA, 23 nt, synthetic construct
  source 1..23: mol_type = other RNA
actctggctttcccccaggtcta

SEQ ID NO: 3675 - RNA, 24 nt, synthetic construct
  source 1..24: mol_type = other RNA
gactctggctttcccccaggtcta

SEQ ID NO: 3676 - RNA, 24 nt, synthetic construct
  source 1..24: mol_type = other RNA
gactctggctttcccccaggtgta

SEQ ID NO: 3677 - RNA, 24 nt, synthetic construct
  source 1..24: mol_type = other RNA
gactctggctttcccccaggttta

SEQ ID NO: 3678 - RNA, 24 nt, synthetic construct
  source 1..24: mol_type = other RNA
gactctggctttcccccaggtata

SEQ ID NO: 3679 - RNA, 25 nt, synthetic construct
  source 1..25: mol_type = other RNA
cgactctggctttcccccaggtcta

SEQ ID NO: 3680 - RNA, 25 nt, synthetic construct
  source 1..25: mol_type = other RNA
cgactctggctttcccccaggttta

SEQ ID NO: 3681 - RNA, 25 nt, synthetic construct
  source 1..25: mol_type = other RNA
cgactctggctttcccccaggtata

SEQ ID NO: 3682 - RNA, 25 nt, synthetic construct
  source 1..25: mol_type = other RNA
cgactctggctttcccccaggtgta

SEQ ID NO: 3683 - RNA, 26 nt, synthetic construct
  source 1..26: mol_type = other RNA
ccgactctggctttcccccaggtcta

SEQ ID NO: 3684 - RNA, 26 nt, synthetic construct
  source 1..26: mol_type = other RNA
ccgactctggctttcccccaggtgta

SEQ ID NO: 3685 - RNA, 26 nt, synthetic construct
  source 1..26: mol_type = other RNA
ccgactctggctttcccccaggttta

SEQ ID NO: 3686 - RNA, 26 nt, synthetic construct
  source 1..26: mol_type = other RNA
ccgactctggctttcccccaggtata

SEQ ID NO: 3687 - RNA, 27 nt, synthetic construct
  source 1..27: mol_type = other RNA
cccgactctggctttcccccaggtata

SEQ ID NO: 3688 - RNA, 27 nt, synthetic construct
  source 1..27: mol_type = other RNA
cccgactctggctttcccccaggtcta

SEQ ID NO: 3689 - RNA, 27 nt, synthetic construct
  source 1..27: mol_type = other RNA
cccgactctggctttcccccaggttta

SEQ ID NO: 3690 - RNA, 27 nt, synthetic construct
  source 1..27: mol_type = other RNA
cccgactctggctttcccccaggtgta

SEQ ID NO: 3691 - RNA, 28 nt, synthetic construct
  source 1..28: mol_type = other RNA
ccccgactctggctttcccccaggtcta

SEQ ID NO: 3692 - RNA, 28 nt, synthetic construct
  source 1..28: mol_type = other RNA
ccccgactctggctttcccccaggtata

SEQ ID NO: 3693 - RNA, 28 nt, synthetic construct
  source 1..28: mol_type = other RNA
ccccgactctggctttcccccaggtgta

SEQ ID NO: 3694 - RNA, 28 nt, synthetic construct
  source 1..28: mol_type = other RNA
ccccgactctggctttcccccaggttta

SEQ ID NO: 3695 - RNA, 29 nt, synthetic construct
  source 1..29: mol_type = other RNA
cccccgactctggctttcccccaggtcta

SEQ ID NO: 3696 - RNA, 29 nt, synthetic construct
  source 1..29: mol_type = other RNA
cccccgactctggctttcccccaggttta

SEQ ID NO: 3697 - RNA, 29 nt, synthetic construct
  source 1..29: mol_type = other RNA
cccccgactctggctttcccccaggtata

SEQ ID NO: 3698 - RNA, 29 nt, synthetic construct
  source 1..29: mol_type = other RNA
cccccgactctggctttcccccaggtgta

SEQ ID NO: 3699 - RNA, 30 nt, synthetic construct
  source 1..30: mol_type = other RNA
tcccccgactctggctttcccccaggtata

SEQ ID NO: 3700 - RNA, 30 nt, synthetic construct
  source 1..30: mol_type = other RNA
tcccccgactctggctttcccccaggtcta

SEQ ID NO: 3701 - RNA, 30 nt, synthetic construct
  source 1..30: mol_type = other RNA
tcccccgactctggctttcccccaggttta

SEQ ID NO: 3702 - RNA, 30 nt, synthetic construct
  source 1..30: mol_type = other RNA
tcccccgactctggctttcccccaggtgta

SEQ ID NO: 3703 - RNA, 31 nt, synthetic construct
  source 1..31: mol_type = other RNA
gtcccccgactctggctttcccccaggtcta

SEQ ID NO: 3704 - RNA, 31 nt, synthetic construct
  source 1..31: mol_type = other RNA
gtcccccgactctggctttcccccaggtgta

SEQ ID NO: 3705 - RNA, 31 nt, synthetic construct
  source 1..31: mol_type = other RNA
gtcccccgactctggctttcccccaggttta

SEQ ID NO: 3706 - RNA, 31 nt, synthetic construct
  source 1..31: mol_type = other RNA
gtcccccgactctggctttcccccaggtata

SEQ ID NO: 3707 - RNA, 32 nt, synthetic construct
  source 1..32: mol_type = other RNA
ggtcccccgactctggctttcccccaggtgta

SEQ ID NO: 3708 - RNA, 32 nt, synthetic construct
  source 1..32: mol_type = other RNA
ggtcccccgactctggctttcccccaggtata

SEQ ID NO: 3709 - RNA, 32 nt, synthetic construct
  source 1..32: mol_type = other RNA
ggtcccccgactctggctttcccccaggtcta

SEQ ID NO: 3710 - RNA, 32 nt, synthetic construct
  source 1..32: mol_type = other RNA
ggtcccccgactctggctttcccccaggttta

SEQ ID NO: 3711 - RNA, 33 nt, synthetic construct
  source 1..33: mol_type = other RNA
gggtcccccgactctggctttcccccaggtgta

SEQ ID NO: 3712 - RNA, 33 nt, synthetic construct
  source 1..33: mol_type = other RNA
gggtcccccgactctggctttcccccaggttta

SEQ ID NO: 3713 - RNA, 33 nt, synthetic construct
  source 1..33: mol_type = other RNA
gggtcccccgactctggctttcccccaggtata

SEQ ID NO: 3714 - RNA, 33 nt, synthetic construct
  source 1..33: mol_type = other RNA
gggtcccccgactctggctttcccccaggtcta

SEQ ID NO: 3715 - RNA, 34 nt, synthetic construct
  source 1..34: mol_type = other RNA
ggggtcccccgactctggctttcccccaggtgta

SEQ ID NO: 3716 - RNA, 34 nt, synthetic construct
  source 1..34: mol_type = other RNA
ggggtcccccgactctggctttcccccaggtcta

SEQ ID NO: 3717 - RNA, 34 nt, synthetic construct
  source 1..34: mol_type = other RNA
ggggtcccccgactctggctttcccccaggtata

SEQ ID NO: 3718 - RNA, 34 nt, synthetic construct
  source 1..34: mol_type = other RNA
ggggtcccccgactctggctttcccccaggttta

SEQ ID NO: 3719 - RNA, 35 nt, synthetic construct
  source 1..35: mol_type = other RNA
tggggtcccccgactctggctttcccccaggtgta

SEQ ID NO: 3720 - RNA, 35 nt, synthetic construct
  source 1..35: mol_type = other RNA
tggggtcccccgactctggctttcccccaggtcta

SEQ ID NO: 3721 - RNA, 35 nt, synthetic construct
  source 1..35: mol_type = other RNA
tggggtcccccgactctggctttcccccaggtata

SEQ ID NO: 3722 - RNA, 35 nt, synthetic construct
  source 1..35: mol_type = other RNA
tggggtcccccgactctggctttcccccaggttta

SEQ ID NO: 3723 - RNA, 36 nt, synthetic construct
  source 1..36: mol_type = other RNA
atggggtcccccgactctggctttcccccaggtcta

SEQ ID NO: 3724 - RNA, 36 nt, synthetic construct
  source 1..36: mol_type = other RNA
atggggtcccccgactctggctttcccccaggtgta

SEQ ID NO: 3725 - RNA, 36 nt, synthetic construct
  source 1..36: mol_type = other RNA
atggggtcccccgactctggctttcccccaggttta

SEQ ID NO: 3726 - RNA, 36 nt, synthetic construct
  source 1..36: mol_type = other RNA
atggggtcccccgactctggctttcccccaggtata

SEQ ID NO: 3727 - RNA, 37 nt, synthetic construct
  source 1..37: mol_type = other RNA
aatggggtcccccgactctggctttcccccaggtgta

SEQ ID NO: 3728 - RNA, 37 nt, synthetic construct
  source 1..37: mol_type = other RNA
aatggggtcccccgactctggctttcccccaggttta

SEQ ID NO: 3729 - RNA, 37 nt, synthetic construct
  source 1..37: mol_type = other RNA
aatggggtcccccgactctggctttcccccaggtata

SEQ ID NO: 3730 - RNA, 37 nt, synthetic construct
  source 1..37: mol_type = other RNA
aatggggtcccccgactctggctttcccccaggtcta

SEQ ID NO: 3731 - RNA, 38 nt, synthetic construct
  source 1..38: mol_type = other RNA
gaatggggtcccccgactctggctttcccccaggtcta

SEQ ID NO: 3732 - RNA, 38 nt, synthetic construct
  source 1..38: mol_type = other RNA
gaatggggtcccccgactctggctttcccccaggttta

SEQ ID NO: 3733 - RNA, 38 nt, synthetic construct
  source 1..38: mol_type = other RNA
gaatggggtcccccgactctggctttcccccaggtata

SEQ ID NO: 3734 - RNA, 38 nt, synthetic construct
  source 1..38: mol_type = other RNA
gaatggggtcccccgactctggctttcccccaggtgta

SEQ ID NO: 3735 - RNA, 39 nt, synthetic construct
  source 1..39: mol_type = other RNA
tgaatggggtcccccgactctggctttcccccaggttta

SEQ ID NO: 3736 - RNA, 39 nt, synthetic construct
  source 1..39: mol_type = other RNA
tgaatggggtcccccgactctggctttcccccaggtcta

SEQ ID NO: 3737 - RNA, 39 nt, synthetic construct
  source 1..39: mol_type = other RNA
tgaatggggtcccccgactctggctttcccccaggtata

SEQ ID NO: 3738 - RNA, 39 nt, synthetic construct
  source 1..39: mol_type = other RNA
tgaatggggtcccccgactctggctttcccccaggtgta

SEQ ID NO: 3739 - RNA, 40 nt, synthetic construct
  source 1..40: mol_type = other RNA
ctgaatggggtcccccgactctggctttcccccaggttta

SEQ ID NO: 3740 - RNA, 40 nt, synthetic construct
  source 1..40: mol_type = other RNA
ctgaatggggtcccccgactctggctttcccccaggtcta

SEQ ID NO: 3741 - RNA, 40 nt, synthetic construct
  source 1..40: mol_type = other RNA
ctgaatggggtcccccgactctggctttcccccaggtata

SEQ ID NO: 3742 - RNA, 40 nt, synthetic construct
  source 1..40: mol_type = other RNA
ctgaatggggtcccccgactctggctttcccccaggtgta

SEQ ID NO: 3743 - RNA, 41 nt, synthetic construct
  source 1..41: mol_type = other RNA
gctgaatggggtcccccgactctggctttcccccaggtata

SEQ ID NO: 3744 - RNA, 41 nt, synthetic construct
  source 1..41: mol_type = other RNA
gctgaatggggtcccccgactctggctttcccccaggttta

SEQ ID NO: 3745 - RNA, 41 nt, synthetic construct
  source 1..41: mol_type = other RNA
gctgaatggggtcccccgactctggctttcccccaggtgta

SEQ ID NO: 3746 - RNA, 41 nt, synthetic construct
  source 1..41: mol_type = other RNA
gctgaatggggtcccccgactctggctttcccccaggtcta

SEQ ID NO: 3747 - RNA, 42 nt, synthetic construct
  source 1..42: mol_type = other RNA
ggctgaatggggtcccccgactctggctttcccccaggttta

SEQ ID NO: 3748 - RNA, 42 nt, synthetic construct
  source 1..42: mol_type = other RNA
ggctgaatggggtcccccgactctggctttcccccaggtgta

SEQ ID NO: 3749 - RNA, 42 nt, synthetic construct
  source 1..42: mol_type = other RNA
ggctgaatggggtcccccgactctggctttcccccaggtata

SEQ ID NO: 3750 - RNA, 42 nt, synthetic construct
  source 1..42: mol_type = other RNA
ggctgaatggggtcccccgactctggctttcccccaggtcta

SEQ ID NO: 3751 - RNA, 43 nt, synthetic construct
  source 1..43: mol_type = other RNA
aggctgaatggggtcccccgactctggctttcccccaggtgta

SEQ ID NO: 3752 - RNA, 43 nt, synthetic construct
  source 1..43: mol_type = other RNA
aggctgaatggggtcccccgactctggctttcccccaggtata

SEQ ID NO: 3753 - RNA, 43 nt, synthetic construct
  source 1..43: mol_type = other RNA
aggctgaatggggtcccccgactctggctttcccccaggtcta

SEQ ID NO: 3754 - RNA, 43 nt, synthetic construct
  source 1..43: mol_type = other RNA
aggctgaatggggtcccccgactctggctttcccccaggttta

SEQ ID NO: 3755 - RNA, 44 nt, synthetic construct
  source 1..44: mol_type = other RNA
gaggctgaatggggtcccccgactctggctttcccccaggtgta

SEQ ID NO: 3756 - RNA, 44 nt, synthetic construct
  source 1..44: mol_type = other RNA
gaggctgaatggggtcccccgactctggctttcccccaggttta

SEQ ID NO: 3757 - RNA, 44 nt, synthetic construct
  source 1..44: mol_type = other RNA
gaggctgaatggggtcccccgactctggctttcccccaggtcta

SEQ ID NO: 3758 - RNA, 44 nt, synthetic construct
  source 1..44: mol_type = other RNA
gaggctgaatggggtcccccgactctggctttcccccaggtata

SEQ ID NO: 3759 - RNA, 45 nt, synthetic construct
  source 1..45: mol_type = other RNA
ggaggctgaatggggtcccccgactctggctttcccccaggtata

SEQ ID NO: 3760 - RNA, 45 nt, synthetic construct
  source 1..45: mol_type = other RNA
ggaggctgaatggggtcccccgactctggctttcccccaggtcta

SEQ ID NO: 3761 - RNA, 45 nt, synthetic construct
  source 1..45: mol_type = other RNA
ggaggctgaatggggtcccccgactctggctttcccccaggtgta

SEQ ID NO: 3762 - RNA, 45 nt, synthetic construct
  source 1..45: mol_type = other RNA
ggaggctgaatggggtcccccgactctggctttcccccaggttta

SEQ ID NO: 3763 - RNA, 46 nt, synthetic construct
  source 1..46: mol_type = other RNA
tggaggctgaatggggtcccccgactctggctttcccccaggtcta

SEQ ID NO: 3764 - RNA, 46 nt, synthetic construct
  source 1..46: mol_type = other RNA
tggaggctgaatggggtcccccgactctggctttcccccaggtgta

SEQ ID NO: 3765 - RNA, 46 nt, synthetic construct
  source 1..46: mol_type = other RNA
tggaggctgaatggggtcccccgactctggctttcccccaggtata

SEQ ID NO: 3766 - RNA, 46 nt, synthetic construct
  source 1..46: mol_type = other RNA
tggaggctgaatggggtcccccgactctggctttcccccaggttta

SEQ ID NO: 3767 - RNA, 47 nt, synthetic construct
  source 1..47: mol_type = other RNA
ttggaggctgaatggggtcccccgactctggctttcccccaggtcta

SEQ ID NO: 3768 - RNA, 47 nt, synthetic construct
  source 1..47: mol_type = other RNA
ttggaggctgaatggggtcccccgactctggctttcccccaggtata

SEQ ID NO: 3769 - RNA, 47 nt, synthetic construct
  source 1..47: mol_type = other RNA
ttggaggctgaatggggtcccccgactctggctttcccccaggttta

SEQ ID NO: 3770 - RNA, 47 nt, synthetic construct
  source 1..47: mol_type = other RNA
ttggaggctgaatggggtcccccgactctggctttcccccaggtgta

SEQ ID NO: 3771 - RNA, 48 nt, synthetic construct
  source 1..48: mol_type = other RNA
tttggaggctgaatggggtcccccgactctggctttcccccaggtata

SEQ ID NO: 3772 - RNA, 48 nt, synthetic construct
  source 1..48: mol_type = other RNA
tttggaggctgaatggggtcccccgactctggctttcccccaggtcta

SEQ ID NO: 3773 - RNA, 48 nt, synthetic construct
  source 1..48: mol_type = other RNA
tttggaggctgaatggggtcccccgactctggctttcccccaggttta

SEQ ID NO: 3774 - RNA, 48 nt, synthetic construct
  source 1..48: mol_type = other RNA
tttggaggctgaatggggtcccccgactctggctttcccccaggtgta

SEQ ID NO: 3775 - RNA, 49 nt, synthetic construct
  source 1..49: mol_type = other RNA
ctttggaggctgaatggggtcccccgactctggctttcccccaggtgta

SEQ ID NO: 3776 - RNA, 49 nt, synthetic construct
  source 1..49: mol_type = other RNA
ctttggaggctgaatggggtcccccgactctggctttcccccaggttta

SEQ ID NO: 3777 - RNA, 49 nt, synthetic construct
  source 1..49: mol_type = other RNA
ctttggaggctgaatggggtcccccgactctggctttcccccaggtata

SEQ ID NO: 3778 - RNA, 49 nt, synthetic construct
  source 1..49: mol_type = other RNA
ctttggaggctgaatggggtcccccgactctggctttcccccaggtcta

SEQ ID NO: 3779 - RNA, 50 nt, synthetic construct
  source 1..50: mol_type = other RNA
tctttggaggctgaatggggtcccccgactctggctttcccccaggttta

SEQ ID NO: 3780 - RNA, 50 nt, synthetic construct
  source 1..50: mol_type = other RNA
tctttggaggctgaatggggtcccccgactctggctttcccccaggtgta

SEQ ID NO: 3781 - RNA, 50 nt, synthetic construct
  source 1..50: mol_type = other RNA
tctttggaggctgaatggggtcccccgactctggctttcccccaggtata

SEQ ID NO: 3782 - RNA, 50 nt, synthetic construct
  source 1..50: mol_type = other RNA
tctttggaggctgaatggggtcccccgactctggctttcccccaggtcta

SEQ ID NO: 3783 - RNA, 51 nt, synthetic construct
  source 1..51: mol_type = other RNA
ctctttggaggctgaatggggtcccccgactctggctttcccccaggtata

SEQ ID NO: 3784 - RNA, 51 nt, synthetic construct
  source 1..51: mol_type = other RNA
ctctttggaggctgaatggggtcccccgactctggctttcccccaggtgta

SEQ ID NO: 3785 - RNA, 51 nt, synthetic construct
  source 1..51: mol_type = other RNA
ctctttggaggctgaatggggtcccccgactctggctttcccccaggttta

SEQ ID NO: 3786 - RNA, 51 nt, synthetic construct
  source 1..51: mol_type = other RNA
ctctttggaggctgaatggggtcccccgactctggctttcccccaggtcta

SEQ ID NO: 3787 - RNA, 52 nt, synthetic construct
  source 1..52: mol_type = other RNA
cctctttggaggctgaatggggtcccccgactctggctttcccccaggttta

SEQ ID NO: 3788 - RNA, 52 nt, synthetic construct
  source 1..52: mol_type = other RNA
cctctttggaggctgaatggggtcccccgactctggctttcccccaggtata

SEQ ID NO: 3789 - RNA, 52 nt, synthetic construct
  source 1..52: mol_type = other RNA
cctctttggaggctgaatggggtcccccgactctggctttcccccaggtcta

SEQ ID NO: 3790 - RNA, 52 nt, synthetic construct
  source 1..52: mol_type = other RNA
cctctttggaggctgaatggggtcccccgactctggctttcccccaggtgta

SEQ ID NO: 3791 - RNA, 53 nt, synthetic construct
  source 1..53: mol_type = other RNA
gcctctttggaggctgaatggggtcccccgactctggctttcccccaggtata

SEQ ID NO: 3792 - RNA, 53 nt, synthetic construct
  source 1..53: mol_type = other RNA
gcctctttggaggctgaatggggtcccccgactctggctttcccccaggtcta

SEQ ID NO: 3793 - RNA, 53 nt, synthetic construct
  source 1..53: mol_type = other RNA
gcctctttggaggctgaatggggtcccccgactctggctttcccccaggttta

SEQ ID NO: 3794 - RNA, 53 nt, synthetic construct
  source 1..53: mol_type = other RNA
gcctctttggaggctgaatggggtcccccgactctggctttcccccaggtgta

SEQ ID NO: 3795 - RNA, 54 nt, synthetic construct
  source 1..54: mol_type = other RNA
agcctctttggaggctgaatggggtcccccgactctggctttcccccaggtata

SEQ ID NO: 3796 - RNA, 54 nt, synthetic construct
  source 1..54: mol_type = other RNA
agcctctttggaggctgaatggggtcccccgactctggctttcccccaggtgta

SEQ ID NO: 3797 - RNA, 54 nt, synthetic construct
  source 1..54: mol_type = other RNA
agcctctttggaggctgaatggggtcccccgactctggctttcccccaggtcta

SEQ ID NO: 3798 - RNA, 54 nt, synthetic construct
  source 1..54: mol_type = other RNA
agcctctttggaggctgaatggggtcccccgactctggctttcccccaggttta

SEQ ID NO: 3799 - RNA, 55 nt, synthetic construct
  source 1..55: mol_type = other RNA
aagcctctttggaggctgaatggggtcccccgactctggctttcccccaggtata

SEQ ID NO: 3800 - RNA, 55 nt, synthetic construct
  source 1..55: mol_type = other RNA
aagcctctttggaggctgaatggggtcccccgactctggctttcccccaggtcta

SEQ ID NO: 3801 - RNA, 55 nt, synthetic construct
  source 1..55: mol_type = other RNA
aagcctctttggaggctgaatggggtcccccgactctggctttcccccaggttta

SEQ ID NO: 3802 - RNA, 55 nt, synthetic construct
  source 1..55: mol_type = other RNA
aagcctctttggaggctgaatggggtcccccgactctggctttcccccaggtgta

SEQ ID NO: 3803 - RNA, 56 nt, synthetic construct
  source 1..56: mol_type = other RNA
aaagcctctttggaggctgaatggggtcccccgactctggctttcccccaggtcta

SEQ ID NO: 3804 - RNA, 56 nt, synthetic construct
  source 1..56: mol_type = other RNA
aaagcctctttggaggctgaatggggtcccccgactctggctttcccccaggtgta

SEQ ID NO: 3805 - RNA, 56 nt, synthetic construct
  source 1..56: mol_type = other RNA
aaagcctctttggaggctgaatggggtcccccgactctggctttcccccaggtata

SEQ ID NO: 3806 - RNA, 56 nt, synthetic construct
  source 1..56: mol_type = other RNA
aaagcctctttggaggctgaatggggtcccccgactctggctttcccccaggttta

SEQ ID NO: 3807 - RNA, 57 nt, synthetic construct
  source 1..57: mol_type = other RNA
caaagcctctttggaggctgaatggggtcccccgactctggctttcccccaggttta

SEQ ID NO: 3808 - RNA, 57 nt, synthetic construct
  source 1..57: mol_type = other RNA
caaagcctctttggaggctgaatggggtcccccgactctggctttcccccaggtcta

SEQ ID NO: 3809 - RNA, 57 nt, synthetic construct
  source 1..57: mol_type = other RNA
caaagcctctttggaggctgaatggggtcccccgactctggctttcccccaggtgta

SEQ ID NO: 3810 - RNA, 57 nt, synthetic construct
  source 1..57: mol_type = other RNA
caaagcctctttggaggctgaatggggtcccccgactctggctttcccccaggtata

SEQ ID NO: 3811 - RNA, 58 nt, synthetic construct
  source 1..58: mol_type = other RNA
gcaaagcctctttggaggctgaatggggtcccccgactctggctttcccccaggtata

SEQ ID NO: 3812 - RNA, 58 nt, synthetic construct
  source 1..58: mol_type = other RNA
gcaaagcctctttggaggctgaatggggtcccccgactctggctttcccccaggttta

SEQ ID NO: 3813 - RNA, 58 nt, synthetic construct
  source 1..58: mol_type = other RNA
gcaaagcctctttggaggctgaatggggtcccccgactctggctttcccccaggtcta

SEQ ID NO: 3814 - RNA, 58 nt, synthetic construct
  source 1..58: mol_type = other RNA
gcaaagcctctttggaggctgaatggggtcccccgactctggctttcccccaggtgta

SEQ ID NO: 3815 - RNA, 59 nt, synthetic construct
  source 1..59: mol_type = other RNA
agcaaagcctctttggaggctgaatggggtcccccgactctggctttcccccaggtcta

SEQ ID NO: 3816 - RNA, 59 nt, synthetic construct
  source 1..59: mol_type = other RNA
agcaaagcctctttggaggctgaatggggtcccccgactctggctttcccccaggttta

SEQ ID NO: 3817 - RNA, 59 nt, synthetic construct
  source 1..59: mol_type = other RNA
agcaaagcctctttggaggctgaatggggtcccccgactctggctttcccccaggtgta

SEQ ID NO: 3818 - RNA, 59 nt, synthetic construct
  source 1..59: mol_type = other RNA
agcaaagcctctttggaggctgaatggggtcccccgactctggctttcccccaggtata

SEQ ID NO: 3819 - RNA, 60 nt, synthetic construct
  source 1..60: mol_type = other RNA
cagcaaagcctctttggaggctgaatggggtcccccgactctggctttcccccaggttta

SEQ ID NO: 3820 - RNA, 60 nt, synthetic construct
  source 1..60: mol_type = other RNA
cagcaaagcctctttggaggctgaatggggtcccccgactctggctttcccccaggtgta

SEQ ID NO: 3821 - RNA, 60 nt, synthetic construct
  source 1..60: mol_type = other RNA
cagcaaagcctctttggaggctgaatggggtcccccgactctggctttcccccaggtcta

SEQ ID NO: 3822 - RNA, 60 nt, synthetic construct
  source 1..60: mol_type = other RNA
cagcaaagcctctttggaggctgaatggggtcccccgactctggctttcccccaggtata

SEQ ID NO: 3823 - RNA, 61 nt, synthetic construct
  source 1..61: mol_type = other RNA
acagcaaagcctctttggaggctgaatggggtcccccgactctggctttcccccaggtata

SEQ ID NO: 3824 - RNA, 61 nt, synthetic construct
  source 1..61: mol_type = other RNA
acagcaaagcctctttggaggctgaatggggtcccccgactctggctttcccccaggttta

SEQ ID NO: 3825 - RNA, 61 nt, synthetic construct
  source 1..61: mol_type = other RNA
acagcaaagcctctttggaggctgaatggggtcccccgactctggctttcccccaggtcta

SEQ ID NO: 3826 - RNA, 61 nt, synthetic construct
  source 1..61: mol_type = other RNA
acagcaaagcctctttggaggctgaatggggtcccccgactctggctttcccccaggtgta

SEQ ID NO: 3827 - RNA, 62 nt, synthetic construct
  source 1..62: mol_type = other RNA
cacagcaaagcctctttggaggctgaatggggtcccccgactctggctttcccccaggtcta

SEQ ID NO: 3828 - RNA, 62 nt, synthetic construct
  source 1..62: mol_type = other RNA
cacagcaaagcctctttggaggctgaatggggtcccccgactctggctttcccccaggtgta

SEQ ID NO: 3829 - RNA, 62 nt, synthetic construct
  source 1..62: mol_type = other RNA
cacagcaaagcctctttggaggctgaatggggtcccccgactctggctttcccccaggtata

SEQ ID NO: 3830 - RNA, 62 nt, synthetic construct
  source 1..62: mol_type = other RNA
cacagcaaagcctctttggaggctgaatggggtcccccgactctggctttcccccaggttta

SEQ ID NO: 3831 - RNA, 63 nt, synthetic construct
  source 1..63: mol_type = other RNA
acacagcaaagcctctttggaggctgaatggggtcccccgactctggctttcccccaggtgta

SEQ ID NO: 3832 - RNA, 63 nt, synthetic construct
  source 1..63: mol_type = other RNA
acacagcaaagcctctttggaggctgaatggggtcccccgactctggctttcccccaggtata

SEQ ID NO: 3833 - RNA, 63 nt, synthetic construct
  source 1..63: mol_type = other RNA
acacagcaaagcctctttggaggctgaatggggtcccccgactctggctttcccccaggtcta

SEQ ID NO: 3834 - RNA, 63 nt, synthetic construct
  source 1..63: mol_type = other RNA
acacagcaaagcctctttggaggctgaatggggtcccccgactctggctttcccccaggttta

SEQ ID NO: 3835 - RNA, 64 nt, synthetic construct
  source 1..64: mol_type = other RNA
cacacagcaaagcctctttggaggctgaatggggtcccccgactctggctttcccccaggtgta

SEQ ID NO: 3836 - RNA, 64 nt, synthetic construct
  source 1..64: mol_type = other RNA
cacacagcaaagcctctttggaggctgaatggggtcccccgactctggctttcccccaggttta

SEQ ID NO: 3837 - RNA, 64 nt, synthetic construct
  source 1..64: mol_type = other RNA
cacacagcaaagcctctttggaggctgaatggggtcccccgactctggctttcccccaggtcta

SEQ ID NO: 3838 - RNA, 64 nt, synthetic construct
  source 1..64: mol_type = other RNA
cacacagcaaagcctctttggaggctgaatggggtcccccgactctggctttcccccaggtata

SEQ ID NO: 3839 - RNA, 65 nt, synthetic construct
  source 1..65: mol_type = other RNA
gcacacagcaaagcctctttggaggctgaatggggtcccccgactctggctttcccccaggtcta

SEQ ID NO: 3840 - RNA, 65 nt, synthetic construct
  source 1..65: mol_type = other RNA
gcacacagcaaagcctctttggaggctgaatggggtcccccgactctggctttcccccaggtgta

SEQ ID NO: 3841 - RNA, 65 nt, synthetic construct
  source 1..65: mol_type = other RNA
gcacacagcaaagcctctttggaggctgaatggggtcccccgactctggctttcccccaggttta

SEQ ID NO: 3842 - RNA, 65 nt, synthetic construct
  source 1..65: mol_type = other RNA
gcacacagcaaagcctctttggaggctgaatggggtcccccgactctggctttcccccaggtata

SEQ ID NO: 3843 - RNA, 66 nt, synthetic construct
  source 1..66: mol_type = other RNA
tgcacacagcaaagcctctttggaggctgaatggggtcccccgactctggctttcccccaggttta

SEQ ID NO: 3844 - RNA, 66 nt, synthetic construct
  source 1..66: mol_type = other RNA
tgcacacagcaaagcctctttggaggctgaatggggtcccccgactctggctttcccccaggtata

SEQ ID NO: 3845 - RNA, 66 nt, synthetic construct
  source 1..66: mol_type = other RNA
tgcacacagcaaagcctctttggaggctgaatggggtcccccgactctggctttcccccaggtcta

SEQ ID NO: 3846 - RNA, 66 nt, synthetic construct
  source 1..66: mol_type = other RNA
tgcacacagcaaagcctctttggaggctgaatggggtcccccgactctggctttcccccaggtgta

SEQ ID NO: 3847 - RNA, 67 nt, synthetic construct
  source 1..67: mol_type = other RNA
gtgcacacagcaaagcctctttggaggctgaatggggtcccccgactctggctttcccccaggttta

SEQ ID NO: 3848 - RNA, 67 nt, synthetic construct
  source 1..67: mol_type = other RNA
gtgcacacagcaaagcctctttggaggctgaatggggtcccccgactctggctttcccccaggtgta

SEQ ID NO: 3849 - RNA, 67 nt, synthetic construct
  source 1..67: mol_type = other RNA
gtgcacacagcaaagcctctttggaggctgaatggggtcccccgactctggctttcccccaggtcta

SEQ ID NO: 3850 - RNA, 67 nt, synthetic construct
  source 1..67: mol_type = other RNA
gtgcacacagcaaagcctctttggaggctgaatggggtcccccgactctggctttcccccaggtata

SEQ ID NO: 3851 - RNA, 68 nt, synthetic construct
  source 1..68: mol_type = other RNA
ggtgcacacagcaaagcctctttggaggctgaatggggtcccccgactctggctttcccccaggtgta

SEQ ID NO: 3852 - RNA, 68 nt, synthetic construct
  source 1..68: mol_type = other RNA
ggtgcacacagcaaagcctctttggaggctgaatggggtcccccgactctggctttcccccaggtata

SEQ ID NO: 3853 - RNA, 68 nt, synthetic construct
  source 1..68: mol_type = other RNA
ggtgcacacagcaaagcctctttggaggctgaatggggtcccccgactctggctttcccccaggtcta

SEQ ID NO: 3854 - RNA, 68 nt, synthetic construct
  source 1..68: mol_type = other RNA
ggtgcacacagcaaagcctctttggaggctgaatggggtcccccgactctggctttcccccaggttta

SEQ ID NO: 3855 - RNA, 69 nt, synthetic construct
  source 1..69: mol_type = other RNA
gggtgcacacagcaaagcctctttggaggctgaatggggtcccccgactctggctttcccccaggtata

SEQ ID NO: 3856 - RNA, 69 nt, synthetic construct
  source 1..69: mol_type = other RNA
gggtgcacacagcaaagcctctttggaggctgaatggggtcccccgactctggctttcccccaggtcta

SEQ ID NO: 3857 - RNA, 69 nt, synthetic construct
  source 1..69: mol_type = other RNA
gggtgcacacagcaaagcctctttggaggctgaatggggtcccccgactctggctttcccccaggtgta

SEQ ID NO: 3858 - RNA, 69 nt, synthetic construct
  source 1..69: mol_type = other RNA
gggtgcacacagcaaagcctctttggaggctgaatggggtcccccgactctggctttcccccaggttta

SEQ ID NO: 3859 - RNA, 70 nt, synthetic construct
  source 1..70: mol_type = other RNA
tgggtgcacacagcaaagcctctttggaggctgaatggggtcccccgactctggctttcccccaggtata

SEQ ID NO: 3860 - RNA, 70 nt, synthetic construct
  source 1..70: mol_type = other RNA
tgggtgcacacagcaaagcctctttggaggctgaatggggtcccccgactctggctttcccccaggtcta

SEQ ID NO: 3861 - RNA, 70 nt, synthetic construct
  source 1..70: mol_type = other RNA
tgggtgcacacagcaaagcctctttggaggctgaatggggtcccccgactctggctttcccccaggtgta

SEQ ID NO: 3862 - RNA, 70 nt, synthetic construct
  source 1..70: mol_type = other RNA
tgggtgcacacagcaaagcctctttggaggctgaatggggtcccccgactctggctttcccccaggttta

SEQ ID NO: 3863 - RNA, 71 nt, synthetic construct
  source 1..71: mol_type = other RNA
ctgggtgcacacagcaaagcctctttggaggctgaatggggtcccccgactctggctttcccccaggtgta

SEQ ID NO: 3864 - RNA, 71 nt, synthetic construct
  source 1..71: mol_type = other RNA
ctgggtgcacacagcaaagcctctttggaggctgaatggggtcccccgactctggctttcccccaggtata

SEQ ID NO: 3865 - RNA, 71 nt, synthetic construct
  source 1..71: mol_type = other RNA
ctgggtgcacacagcaaagcctctttggaggctgaatggggtcccccgactctggctttcccccaggtcta

SEQ ID NO: 3866 - RNA, 71 nt, synthetic construct
  source 1..71: mol_type = other RNA
ctgggtgcacacagcaaagcctctttggaggctgaatggggtcccccgactctggctttcccccaggttta

SEQ ID NO: 3867 - RNA, 72 nt, synthetic construct
  source 1..72: mol_type = other RNA
cctgggtgcacacagcaaagcctctttggaggctgaatggggtcccccgactctggctttcccccaggtata

SEQ ID NO: 3868 - RNA, 72 nt, synthetic construct
  source 1..72: mol_type = other RNA
cctgggtgcacacagcaaagcctctttggaggctgaatggggtcccccgactctggctttcccccaggtcta

SEQ ID NO: 3869 - RNA, 72 nt, synthetic construct
  source 1..72: mol_type = other RNA
cctgggtgcacacagcaaagcctctttggaggctgaatggggtcccccgactctggctttcccccaggtgta

SEQ ID NO: 3870 - RNA, 72 nt, synthetic construct
  source 1..72: mol_type = other RNA
cctgggtgcacacagcaaagcctctttggaggctgaatggggtcccccgactctggctttcccccaggttta

SEQ ID NO: 3871 - RNA, 73 nt, synthetic construct
  source 1..73: mol_type = other RNA
tcctgggtgcacacagcaaagcctctttggaggctgaatggggtcccccgactctggctttcccccaggtata

SEQ ID NO: 3872 - RNA, 73 nt, synthetic construct
  source 1..73: mol_type = other RNA
tcctgggtgcacacagcaaagcctctttggaggctgaatggggtcccccgactctggctttcccccaggttta

SEQ ID NO: 3873 - RNA, 73 nt, synthetic construct
  source 1..73: mol_type = other RNA
tcctgggtgcacacagcaaagcctctttggaggctgaatggggtcccccgactctggctttcccccaggtgta

SEQ ID NO: 3874 - RNA, 73 nt, synthetic construct
  source 1..73: mol_type = other RNA
tcctgggtgcacacagcaaagcctctttggaggctgaatggggtcccccgactctggctttcccccaggtcta

SEQ ID NO: 3875 - RNA, 74 nt, synthetic construct
  source 1..74: mol_type = other RNA
atcctgggtgcacacagcaaagcctctttggaggctgaatggggtcccccgactctggctttcccccaggtcta

SEQ ID NO: 3876 - RNA, 74 nt, synthetic construct
  source 1..74: mol_type = other RNA
atcctgggtgcacacagcaaagcctctttggaggctgaatggggtcccccgactctggctttcccccaggttta

SEQ ID NO: 3877 - RNA, 74 nt, synthetic construct
  source 1..74: mol_type = other RNA
atcctgggtgcacacagcaaagcctctttggaggctgaatggggtcccccgactctggctttcccccaggtata

SEQ ID NO: 3878 - RNA, 74 nt, synthetic construct
  source 1..74: mol_type = other RNA
atcctgggtgcacacagcaaagcctctttggaggctgaatggggtcccccgactctggctttcccccaggtgta

SEQ ID NO: 3879 - RNA, 75 nt, synthetic construct
  source 1..75: mol_type = other RNA
gatcctgggtgcacacagcaaagcctctttggaggctgaatggggtcccccgactctggctttcccccaggtgta

SEQ ID NO: 3880 - RNA, 75 nt, synthetic construct
  source 1..75: mol_type = other RNA
gatcctgggtgcacacagcaaagcctctttggaggctgaatggggtcccccgactctggctttcccccaggtcta

SEQ ID NO: 3881 - RNA, 75 nt, synthetic construct
  source 1..75: mol_type = other RNA
gatcctgggtgcacacagcaaagcctctttggaggctgaatggggtcccccgactctggctttcccccaggtata

SEQ ID NO: 3882 - RNA, 75 nt, synthetic construct
  source 1..75: mol_type = other RNA
gatcctgggtgcacacagcaaagcctctttggaggctgaatggggtcccccgactctggctttcccccaggttta

SEQ ID NO: 3883 - RNA, 76 nt, synthetic construct
  source 1..76: mol_type = other RNA
ggatcctgggtgcacacagcaaagcctctttggaggctgaatggggtcccccgactctggctttcccccaggtgta

SEQ ID NO: 3884 - RNA, 76 nt, synthetic construct
  source 1..76: mol_type = other RNA
ggatcctgggtgcacacagcaaagcctctttggaggctgaatggggtcccccgactctggctttcccccaggtcta

SEQ ID NO: 3885 - RNA, 76 nt, synthetic construct
  source 1..76: mol_type = other RNA
ggatcctgggtgcacacagcaaagcctctttggaggctgaatggggtcccccgactctggctttcccccaggttta

SEQ ID NO: 3886 - RNA, 76 nt, synthetic construct
  source 1..76: mol_type = other RNA
ggatcctgggtgcacacagcaaagcctctttggaggctgaatggggtcccccgactctggctttcccccaggtata

SEQ ID NO: 3887 - RNA, 77 nt, synthetic construct
  source 1..77: mol_type = other RNA
gggatcctgggtgcacacagcaaagcctctttggaggctgaatggggtcccccgactctggctttcccccaggtcta

SEQ ID NO: 3888 - RNA, 77 nt, synthetic construct
  source 1..77: mol_type = other RNA
gggatcctgggtgcacacagcaaagcctctttggaggctgaatggggtcccccgactctggctttcccccaggtata

SEQ ID NO: 3889 - RNA, 77 nt, synthetic construct
  source 1..77: mol_type = other RNA
gggatcctgggtgcacacagcaaagcctctttggaggctgaatggggtcccccgactctggctttcccccaggttta

SEQ ID NO: 3890 - RNA, 77 nt, synthetic construct
  source 1..77: mol_type = other RNA
gggatcctgggtgcacacagcaaagcctctttggaggctgaatggggtcccccgactctggctttcccccaggtgta

SEQ ID NO: 3891 - RNA, 78 nt, synthetic construct
  source 1..78: mol_type = other RNA
tgggatcctgggtgcacacagcaaagcctctttggaggctgaatggggtcccccgactctggctttcccccaggttta

SEQ ID NO: 3892 - RNA, 78 nt, synthetic construct
  source 1..78: mol_type = other RNA
tgggatcctgggtgcacacagcaaagcctctttggaggctgaatggggtcccccgactctggctttcccccaggtgta

SEQ ID NO: 3893 - RNA, 78 nt, synthetic construct
  source 1..78: mol_type = other RNA
tgggatcctgggtgcacacagcaaagcctctttggaggctgaatggggtcccccgactctggctttcccccaggtcta

SEQ ID NO: 3894 - RNA, 78 nt, synthetic construct
  source 1..78: mol_type = other RNA
tgggatcctgggtgcacacagcaaagcctctttggaggctgaatggggtcccccgactctggctttcccccaggtata

SEQ ID NO: 3895 - RNA, 79 nt, synthetic construct
  source 1..79: mol_type = other RNA
gtgggatcctgggtgcacacagcaaagcctctttggaggctgaatggggtcccccgactctggctttcccccaggttta

SEQ ID NO: 3896 - RNA, 79 nt, synthetic construct
  source 1..79: mol_type = other RNA
gtgggatcctgggtgcacacagcaaagcctctttggaggctgaatggggtcccccgactctggctttcccccaggtata

SEQ ID NO: 3897 - RNA, 79 nt, synthetic construct
  source 1..79: mol_type = other RNA
gtgggatcctgggtgcacacagcaaagcctctttggaggctgaatggggtcccccgactctggctttcccccaggtcta

SEQ ID NO: 3898 - RNA, 79 nt, synthetic construct
  source 1..79: mol_type = other RNA
gtgggatcctgggtgcacacagcaaagcctctttggaggctgaatggggtcccccgactctggctttcccccaggtgta

SEQ ID NO: 3899 - RNA, 80 nt, synthetic construct
  source 1..80: mol_type = other RNA
agtgggatcctgggtgcacacagcaaagcctctttggaggctgaatggggtcccccgactctggctttcccccaggtgta

SEQ ID NO: 3900 - RNA, 80 nt, synthetic construct
  source 1..80: mol_type = other RNA
agtgggatcctgggtgcacacagcaaagcctctttggaggctgaatggggtcccccgactctggctttcccccaggttta

SEQ ID NO: 3901 - RNA, 80 nt, synthetic construct
  source 1..80: mol_type = other RNA
agtgggatcctgggtgcacacagcaaagcctctttggaggctgaatggggtcccccgactctggctttcccccaggtata

SEQ ID NO: 3902 - RNA, 80 nt, synthetic construct
  source 1..80: mol_type = other RNA
agtgggatcctgggtgcacacagcaaagcctctttggaggctgaatggggtcccccgactctggctttcccccaggtcta

SEQ ID NO: 3903 - RNA, 81 nt, synthetic construct
  source 1..81: mol_type = other RNA
tagtgggatcctgggtgcacacagcaaagcctctttggaggctgaatggggtcccccgactctggctttcccccaggtata

SEQ ID NO: 3904 - RNA, 81 nt, synthetic construct
  source 1..81: mol_type = other RNA
tagtgggatcctgggtgcacacagcaaagcctctttggaggctgaatggggtcccccgactctggctttcccccaggtcta

SEQ ID NO: 3905 - RNA, 81 nt, synthetic construct
  source 1..81: mol_type = other RNA
tagtgggatcctgggtgcacacagcaaagcctctttggaggctgaatggggtcccccgactctggctttcccccaggtgta

SEQ ID NO: 3906 - RNA, 81 nt, synthetic construct
  source 1..81: mol_type = other RNA
tagtgggatcctgggtgcacacagcaaagcctctttggaggctgaatggggtcccccgactctggctttcccccaggttta

SEQ ID NO: 3907 - RNA, 82 nt, synthetic construct
  source 1..82: mol_type = other RNA
gtagtgggatcctgggtgcacacagcaaagcctctttggaggctgaatggggtcccccgactctggctttcccccaggtgta

SEQ ID NO: 3908 - RNA, 82 nt, synthetic construct
  source 1..82: mol_type = other RNA
gtagtgggatcctgggtgcacacagcaaagcctctttggaggctgaatggggtcccccgactctggctttcccccaggtata

SEQ ID NO: 3909 - RNA, 82 nt, synthetic construct
  source 1..82: mol_type = other RNA
gtagtgggatcctgggtgcacacagcaaagcctctttggaggctgaatggggtcccccgactctggctttcccccaggtcta

SEQ ID NO: 3910 - RNA, 82 nt, synthetic construct
  source 1..82: mol_type = other RNA
gtagtgggatcctgggtgcacacagcaaagcctctttggaggctgaatggggtcccccgactctggctttcccccaggttta

SEQ ID NO: 3911 - RNA, 83 nt, synthetic construct
  source 1..83: mol_type = other RNA
ggtagtgggatcctgggtgcacacagcaaagcctctttggaggctgaatggggtcccccgactctggctttcccccaggttta

SEQ ID NO: 3912 - RNA, 83 nt, synthetic construct
  source 1..83: mol_type = other RNA
ggtagtgggatcctgggtgcacacagcaaagcctctttggaggctgaatggggtcccccgactctggctttcccccaggtgta

SEQ ID NO: 3913 - RNA, 83 nt, synthetic construct
  source 1..83: mol_type = other RNA
ggtagtgggatcctgggtgcacacagcaaagcctctttggaggctgaatggggtcccccgactctggctttcccccaggtcta

SEQ ID NO: 3914 - RNA, 83 nt, synthetic construct
  source 1..83: mol_type = other RNA
ggtagtgggatcctgggtgcacacagcaaagcctctttggaggctgaatggggtcccccgactctggctttcccccaggtata

SEQ ID NO: 3915 - RNA, 84 nt, synthetic construct
  source 1..84: mol_type = other RNA
gggtagtgggatcctgggtgcacacagcaaagcctctttggaggctgaatggggtcccccgactctggctttcccccaggtata

SEQ ID NO: 3916 - RNA, 84 nt, synthetic construct
  source 1..84: mol_type = other RNA
gggtagtgggatcctgggtgcacacagcaaagcctctttggaggctgaatggggtcccccgactctggctttcccccaggttta

SEQ ID NO: 3917 - RNA, 84 nt, synthetic construct
  source 1..84: mol_type = other RNA
gggtagtgggatcctgggtgcacacagcaaagcctctttggaggctgaatggggtcccccgactctggctttcccccaggtgta

SEQ ID NO: 3918 - RNA, 84 nt, synthetic construct
  source 1..84: mol_type = other RNA
gggtagtgggatcctgggtgcacacagcaaagcctctttggaggctgaatggggtcccccgactctggctttcccccaggtcta

SEQ ID NO: 3919 - RNA, 85 nt, synthetic construct
  source 1..85: mol_type = other RNA
tgggtagtgggatcctgggtgcacacagcaaagcctctttggaggctgaatggggtcccccgactctggctttcccccaggtata

SEQ ID NO: 3920 - RNA, 85 nt, synthetic construct
  source 1..85: mol_type = other RNA
tgggtagtgggatcctgggtgcacacagcaaagcctctttggaggctgaatggggtcccccgactctggctttcccccaggtcta

SEQ ID NO: 3921 - RNA, 85 nt, synthetic construct
  source 1..85: mol_type = other RNA
tgggtagtgggatcctgggtgcacacagcaaagcctctttggaggctgaatggggtcccccgactctggctttcccccaggttta

SEQ ID NO: 3922 - RNA, 85 nt, synthetic construct
  source 1..85: mol_type = other RNA
tgggtagtgggatcctgggtgcacacagcaaagcctctttggaggctgaatggggtcccccgactctggctttcccccaggtgta

SEQ ID NO: 3923 - RNA, 86 nt, synthetic construct
  source 1..86: mol_type = other RNA
gtgggtagtgggatcctgggtgcacacagcaaagcctctttggaggctgaatggggtcccccgactctggctttcccccaggttta

SEQ ID NO: 3924 - RNA, 86 nt, synthetic construct
  source 1..86: mol_type = other RNA
gtgggtagtgggatcctgggtgcacacagcaaagcctctttggaggctgaatggggtcccccgactctggctttcccccaggtcta

SEQ ID NO: 3925 - RNA, 86 nt, synthetic construct
  source 1..86: mol_type = other RNA
gtgggtagtgggatcctgggtgcacacagcaaagcctctttggaggctgaatggggtcccccgactctggctttcccccaggtata

SEQ ID NO: 3926 - RNA, 86 nt, synthetic construct
  source 1..86: mol_type = other RNA
gtgggtagtgggatcctgggtgcacacagcaaagcctctttggaggctgaatggggtcccccgactctggctttcccccaggtgta

SEQ ID NO: 3927 - RNA, 87 nt, synthetic construct
  source 1..87: mol_type = other RNA
agtgggtagtgggatcctgggtgcacacagcaaagcctctttggaggctgaatggggtcccccgactctggctttcccccaggtata

SEQ ID NO: 3928 - RNA, 87 nt, synthetic construct
  source 1..87: mol_type = other RNA
agtgggtagtgggatcctgggtgcacacagcaaagcctctttggaggctgaatggggtcccccgactctggctttcccccaggtcta

SEQ ID NO: 3929 - RNA, 87 nt, synthetic construct
  source 1..87: mol_type = other RNA
agtgggtagtgggatcctgggtgcacacagcaaagcctctttggaggctgaatggggtcccccgactctggctttcccccaggtgta

SEQ ID NO: 3930 - RNA, 87 nt, synthetic construct
  source 1..87: mol_type = other RNA
agtgggtagtgggatcctgggtgcacacagcaaagcctctttggaggctgaatggggtcccccgactctggctttcccccaggttta

SEQ ID NO: 3931 - RNA, 88 nt, synthetic construct
  source 1..88: mol_type = other RNA
cagtgggtagtgggatcctgggtgcacacagcaaagcctctttggaggctgaatggggtcccccgactctggctttcccccaggtgta

SEQ ID NO: 3932 - RNA, 88 nt, synthetic construct
  source 1..88: mol_type = other RNA
cagtgggtagtgggatcctgggtgcacacagcaaagcctctttggaggctgaatggggtcccccgactctggctttcccccaggtata

SEQ ID NO: 3933 - RNA, 88 nt, synthetic construct
  source 1..88: mol_type = other RNA
cagtgggtagtgggatcctgggtgcacacagcaaagcctctttggaggctgaatggggtcccccgactctggctttcccccaggtcta

SEQ ID NO: 3934 - RNA, 88 nt, synthetic construct
  source 1..88: mol_type = other RNA
cagtgggtagtgggatcctgggtgcacacagcaaagcctctttggaggctgaatggggtcccccgactctggctttcccccaggttta

SEQ ID NO: 3935 - RNA, 89 nt, synthetic construct
  source 1..89: mol_type = other RNA
ccagtgggtagtgggatcctgggtgcacacagcaaagcctctttggaggctgaatggggtcccccgactctggctttcccccaggtata

SEQ ID NO: 3936 - RNA, 89 nt, synthetic construct
  source 1..89: mol_type = other RNA
ccagtgggtagtgggatcctgggtgcacacagcaaagcctctttggaggctgaatggggtcccccgactctggctttcccccaggtcta

SEQ ID NO: 3937 - RNA, 89 nt, synthetic construct
  source 1..89: mol_type = other RNA
ccagtgggtagtgggatcctgggtgcacacagcaaagcctctttggaggctgaatggggtcccccgactctggctttcccccaggtgta

SEQ ID NO: 3938 - RNA, 89 nt, synthetic construct
  source 1..89: mol_type = other RNA
ccagtgggtagtgggatcctgggtgcacacagcaaagcctctttggaggctgaatggggtcccccgactctggctttcccccaggttta

SEQ ID NO: 3939 - RNA, 90 nt, synthetic construct
  source 1..90: mol_type = other RNA
tccagtgggtagtgggatcctgggtgcacacagcaaagcctctttggaggctgaatggggtcccccgactctggctttcccccaggttta

SEQ ID NO: 3940 - RNA, 90 nt, synthetic construct
  source 1..90: mol_type = other RNA
tccagtgggtagtgggatcctgggtgcacacagcaaagcctctttggaggctgaatggggtcccccgactctggctttcccccaggtata

SEQ ID NO: 3941 - RNA, 90 nt, synthetic construct
  source 1..90: mol_type = other RNA
tccagtgggtagtgggatcctgggtgcacacagcaaagcctctttggaggctgaatggggtcccccgactctggctttcccccaggtcta

SEQ ID NO: 3942 - RNA, 90 nt, synthetic construct
  source 1..90: mol_type = other RNA
tccagtgggtagtgggatcctgggtgcacacagcaaagcctctttggaggctgaatggggtcccccgactctggctttcccccaggtgta

SEQ ID NO: 3943 - RNA, 91 nt, synthetic construct
  source 1..91: mol_type = other RNA
ctccagtgggtagtgggatcctgggtgcacacagcaaagcctctttggaggctgaatggggtcccccgactctggctttcccccaggtcta

SEQ ID NO: 3944 - RNA, 91 nt, synthetic construct
  source 1..91: mol_type = other RNA
ctccagtgggtagtgggatcctgggtgcacacagcaaagcctctttggaggctgaatggggtcccccgactctggctttcccccaggtgta

SEQ ID NO: 3945 - RNA, 91 nt, synthetic construct
  source 1..91: mol_type = other RNA
ctccagtgggtagtgggatcctgggtgcacacagcaaagcctctttggaggctgaatggggtcccccgactctggctttcccccaggttta

SEQ ID NO: 3946 - RNA, 91 nt, synthetic construct
  source 1..91: mol_type = other RNA
ctccagtgggtagtgggatcctgggtgcacacagcaaagcctctttggaggctgaatggggtcccccgactctggctttcccccaggtata

SEQ ID NO: 3947 - RNA, 92 nt, synthetic construct
  source 1..92: mol_type = other RNA
cctccagtgggtagtgggatcctgggtgcacacagcaaagcctctttggaggctgaatggggtcccccgactctggctttcccccaggtcta

SEQ ID NO: 3948 - RNA, 92 nt, synthetic construct
  source 1..92: mol_type = other RNA
cctccagtgggtagtgggatcctgggtgcacacagcaaagcctctttggaggctgaatggggtcccccgactctggctttcccccaggttta

SEQ ID NO: 3949 - RNA, 92 nt, synthetic construct
  source 1..92: mol_type = other RNA
cctccagtgggtagtgggatcctgggtgcacacagcaaagcctctttggaggctgaatggggtcccccgactctggctttcccccaggtata

SEQ ID NO: 3950 - RNA, 92 nt, synthetic construct
  source 1..92: mol_type = other RNA
cctccagtgggtagtgggatcctgggtgcacacagcaaagcctctttggaggctgaatggggtcccccgactctggctttcccccaggtgta

SEQ ID NO: 3951 - RNA, 93 nt, synthetic construct
  source 1..93: mol_type = other RNA
tcctccagtgggtagtgggatcctgggtgcacacagcaaagcctctttggaggctgaatggggtcccccgactctggctttcccccaggtgta

SEQ ID NO: 3952 - RNA, 93 nt, synthetic construct
  source 1..93: mol_type = other RNA
tcctccagtgggtagtgggatcctgggtgcacacagcaaagcctctttggaggctgaatggggtcccccgactctggctttcccccaggttta

SEQ ID NO: 3953 - RNA, 93 nt, synthetic construct
  source 1..93: mol_type = other RNA
tcctccagtgggtagtgggatcctgggtgcacacagcaaagcctctttggaggctgaatggggtcccccgactctggctttcccccaggtcta

SEQ ID NO: 3954 - RNA, 93 nt, synthetic construct
  source 1..93: mol_type = other RNA
tcctccagtgggtagtgggatcctgggtgcacacagcaaagcctctttggaggctgaatggggtcccccgactctggctttcccccaggtata

SEQ ID NO: 3955 - RNA, 94 nt, synthetic construct
  source 1..94: mol_type = other RNA
ttcctccagtgggtagtgggatcctgggtgcacacagcaaagcctctttggaggctgaatggggtcccccgactctggctttcccccaggtcta

SEQ ID NO: 3956 - RNA, 94 nt, synthetic construct
  source 1..94: mol_type = other RNA
ttcctccagtgggtagtgggatcctgggtgcacacagcaaagcctctttggaggctgaatggggtcccccgactctggctttcccccaggtgta

SEQ ID NO: 3957 - RNA, 94 nt, synthetic construct
  source 1..94: mol_type = other RNA
ttcctccagtgggtagtgggatcctgggtgcacacagcaaagcctctttggaggctgaatggggtcccccgactctggctttcccccaggtata

SEQ ID NO: 3958 - RNA, 94 nt, synthetic construct
  source 1..94: mol_type = other RNA
ttcctccagtgggtagtgggatcctgggtgcacacagcaaagcctctttggaggctgaatggggtcccccgactctggctttcccccaggttta

SEQ ID NO: 3959 - RNA, 95 nt, synthetic construct
  source 1..95: mol_type = other RNA
cttcctccagtgggtagtgggatcctgggtgcacacagcaaagcctctttggaggctgaatggggtcccccgactctggctttcccccaggtgta

SEQ ID NO: 3960 - RNA, 95 nt, synthetic construct
  source 1..95: mol_type = other RNA
cttcctccagtgggtagtgggatcctgggtgcacacagcaaagcctctttggaggctgaatggggtcccccgactctggctttcccccaggtata

SEQ ID NO: 3961 - RNA, 95 nt, synthetic construct
  source 1..95: mol_type = other RNA
cttcctccagtgggtagtgggatcctgggtgcacacagcaaagcctctttggaggctgaatggggtcccccgactctggctttcccccaggtcta

SEQ ID NO: 3962 - RNA, 95 nt, synthetic construct
  source 1..95: mol_type = other RNA
cttcctccagtgggtagtgggatcctgggtgcacacagcaaagcctctttggaggctgaatggggtcccccgactctggctttcccccaggttta

SEQ ID NO: 3963 - RNA, 96 nt, synthetic construct
  source 1..96: mol_type = other RNA
gcttcctccagtgggtagtgggatcctgggtgcacacagcaaagcctctttggaggctgaatggggtcccccgactctggctttcccccaggtcta

SEQ ID NO: 3964 - RNA, 96 nt, synthetic construct
  source 1..96: mol_type = other RNA
gcttcctccagtgggtagtgggatcctgggtgcacacagcaaagcctctttggaggctgaatggggtcccccgactctggctttcccccaggtata

SEQ ID NO: 3965 - RNA, 96 nt, synthetic construct
  source 1..96: mol_type = other RNA
gcttcctccagtgggtagtgggatcctgggtgcacacagcaaagcctctttggaggctgaatggggtcccccgactctggctttcccccaggtgta

SEQ ID NO: 3966 - RNA, 96 nt, synthetic construct
  source 1..96: mol_type = other RNA
gcttcctccagtgggtagtgggatcctgggtgcacacagcaaagcctctttggaggctgaatggggtcccccgactctggctttcccccaggttta

SEQ ID NO: 3967 - RNA, 97 nt, synthetic construct
  source 1..97: mol_type = other RNA
ggcttcctccagtgggtagtgggatcctgggtgcacacagcaaagcctctttggaggctgaatggggtcccccgactctggctttcccccaggtgta

SEQ ID NO: 3968 - RNA, 97 nt, synthetic construct
  source 1..97: mol_type = other RNA
ggcttcctccagtgggtagtgggatcctgggtgcacacagcaaagcctctttggaggctgaatggggtcccccgactctggctttcccccaggttta

SEQ ID NO: 3969 - RNA, 97 nt, synthetic construct
  source 1..97: mol_type = other RNA
ggcttcctccagtgggtagtgggatcctgggtgcacacagcaaagcctctttggaggctgaatggggtcccccgactctggctttcccccaggtata

SEQ ID NO: 3970 - RNA, 97 nt, synthetic construct
  source 1..97: mol_type = other RNA
ggcttcctccagtgggtagtgggatcctgggtgcacacagcaaagcctctttggaggctgaatggggtcccccgactctggctttcccccaggtcta

SEQ ID NO: 3971 - RNA, 98 nt, synthetic construct
  source 1..98: mol_type = other RNA
gggcttcctccagtgggtagtgggatcctgggtgcacacagcaaagcctctttggaggctgaatggggtcccccgactctggctttcccccaggtcta

SEQ ID NO: 3972 - RNA, 98 nt, synthetic construct
  source 1..98: mol_type = other RNA
gggcttcctccagtgggtagtgggatcctgggtgcacacagcaaagcctctttggaggctgaatggggtcccccgactctggctttcccccaggtgta

SEQ ID NO: 3973 - RNA, 98 nt, synthetic construct
  source 1..98: mol_type = other RNA
gggcttcctccagtgggtagtgggatcctgggtgcacacagcaaagcctctttggaggctgaatggggtcccccgactctggctttcccccaggttta

SEQ ID NO: 3974 - RNA, 98 nt, synthetic construct
  source 1..98: mol_type = other RNA
gggcttcctccagtgggtagtgggatcctgggtgcacacagcaaagcctctttggaggctgaatggggtcccccgactctggctttcccccaggtata

SEQ ID NO: 3975 - RNA, 99 nt, synthetic construct
  source 1..99: mol_type = other RNA
tgggcttcctccagtgggtagtgggatcctgggtgcacacagcaaagcctctttggaggctgaatggggtcccccgactctggctttcccccaggtata

SEQ ID NO: 3976 - RNA, 99 nt, synthetic construct
  source 1..99: mol_type = other RNA
tgggcttcctccagtgggtagtgggatcctgggtgcacacagcaaagcctctttggaggctgaatggggtcccccgactctggctttcccccaggtgta

SEQ ID NO: 3977 - RNA, 99 nt, synthetic construct
  source 1..99: mol_type = other RNA
tgggcttcctccagtgggtagtgggatcctgggtgcacacagcaaagcctctttggaggctgaatggggtcccccgactctggctttcccccaggttta

SEQ ID NO: 3978 - RNA, 99 nt, synthetic construct
  source 1..99: mol_type = other RNA
tgggcttcctccagtgggtagtgggatcctgggtgcacacagcaaagcctctttggaggctgaatggggtcccccgactctggctttcccccaggtcta

SEQ ID NO: 3979 - RNA, 100 nt, synthetic construct
  source 1..100: mol_type = other RNA
ctgggcttcctccagtgggtagtgggatcctgggtgcacacagcaaagcctctttggaggctgaatggggtcccccgactctggctttcccccaggtcta

SEQ ID NO: 3980 - RNA, 100 nt, synthetic construct
  source 1..100: mol_type = other RNA
ctgggcttcctccagtgggtagtgggatcctgggtgcacacagcaaagcctctttggaggctgaatggggtcccccgactctggctttcccccaggttta

SEQ ID NO: 3981 - RNA, 100 nt, synthetic construct
  source 1..100: mol_type = other RNA
ctgggcttcctccagtgggtagtgggatcctgggtgcacacagcaaagcctctttggaggctgaatggggtcccccgactctggctttcccccaggtgta

SEQ ID NO: 3982 - RNA, 100 nt, synthetic construct
  source 1..100: mol_type = other RNA
ctgggcttcctccagtgggtagtgggatcctgggtgcacacagcaaagcctctttggaggctgaatggggtcccccgactctggctttcccccaggtata

SEQ ID NO: 3983 - RNA, 101 nt, synthetic construct
  source 1..101: mol_type = other RNA
tctgggcttcctccagtgggtagtgggatcctgggtgcacacagcaaagcctctttggaggctgaatggggtcccccgactctggctttcccccaggtata

SEQ ID NO: 3984 - RNA, 101 nt, synthetic construct
  source 1..101: mol_type = other RNA
tctgggcttcctccagtgggtagtgggatcctgggtgcacacagcaaagcctctttggaggctgaatggggtcccccgactctggctttcccccaggtcta

SEQ ID NO: 3985 - RNA, 101 nt, synthetic construct
  source 1..101: mol_type = other RNA
tctgggcttcctccagtgggtagtgggatcctgggtgcacacagcaaagcctctttggaggctgaatggggtcccccgactctggctttcccccaggtgta

SEQ ID NO: 3986 - RNA, 101 nt, synthetic construct
  source 1..101: mol_type = other RNA
tctgggcttcctccagtgggtagtgggatcctgggtgcacacagcaaagcctctttggaggctgaatggggtcccccgactctggctttcccccaggttta

SEQ ID NO: 3987 - RNA, 102 nt, synthetic construct
  source 1..102: mol_type = other RNA
ctctgggcttcctccagtgggtagtgggatcctgggtgcacacagcaaagcctctttggaggctgaatggggtcccccgactctggctttcccccaggtata

SEQ ID NO: 3988 - RNA, 102 nt, synthetic construct
  source 1..102: mol_type = other RNA
ctctgggcttcctccagtgggtagtgggatcctgggtgcacacagcaaagcctctttggaggctgaatggggtcccccgactctggctttcccccaggtcta

SEQ ID NO: 3989 - RNA, 102 nt, synthetic construct
  source 1..102: mol_type = other RNA
ctctgggcttcctccagtgggtagtgggatcctgggtgcacacagcaaagcctctttggaggctgaatggggtcccccgactctggctttcccccaggtgta

SEQ ID NO: 3990 - RNA, 102 nt, synthetic construct
  source 1..102: mol_type = other RNA
ctctgggcttcctccagtgggtagtgggatcctgggtgcacacagcaaagcctctttggaggctgaatggggtcccccgactctggctttcccccaggttta

SEQ ID NO: 3991 - RNA, 103 nt, synthetic construct
  source 1..103: mol_type = other RNA
cctctgggcttcctccagtgggtagtgggatcctgggtgcacacagcaaagcctctttggaggctgaatggggtcccccgactctggctttcccccaggtcta

SEQ ID NO: 3992 - RNA, 103 nt, synthetic construct
  source 1..103: mol_type = other RNA
cctctgggcttcctccagtgggtagtgggatcctgggtgcacacagcaaagcctctttggaggctgaatggggtcccccgactctggctttcccccaggttta

SEQ ID NO: 3993 - RNA, 103 nt, synthetic construct
  source 1..103: mol_type = other RNA
cctctgggcttcctccagtgggtagtgggatcctgggtgcacacagcaaagcctctttggaggctgaatggggtcccccgactctggctttcccccaggtata

SEQ ID NO: 3994 - RNA, 103 nt, synthetic construct
  source 1..103: mol_type = other RNA
cctctgggcttcctccagtgggtagtgggatcctgggtgcacacagcaaagcctctttggaggctgaatggggtcccccgactctggctttcccccaggtgta

SEQ ID NO: 3995 - RNA, 16 nt, synthetic construct
  source 1..16: mol_type = other RNA
caggaacatgtacctg

SEQ ID NO: 3996 - RNA, 17 nt, synthetic construct
  source 1..17: mol_type = other RNA
ccaggaacatgtacctg

SEQ ID NO: 3997 - RNA, 18 nt, synthetic construct
  source 1..18: mol_type = other RNA
accaggaacatgtacctg

SEQ ID NO: 3998 - RNA, 19 nt, synthetic construct
  source 1..19: mol_type = other RNA
caccaggaacatgtacctg

SEQ ID NO: 3999 - RNA, 20 nt, synthetic construct
  source 1..20: mol_type = other RNA
tcaccaggaacatgtacctg

SEQ ID NO: 4000 - RNA, 21 nt, synthetic construct
  source 1..21: mol_type = other RNA
ttcaccaggaacatgtacctg

SEQ ID NO: 4001 - RNA, 22 nt, synthetic construct
  source 1..22: mol_type = other RNA
tttcaccaggaacatgtacctg

SEQ ID NO: 4002-4008 - skipped (7 entries)

SEQ ID NO: 4009 - RNA, 10 nt, synthetic construct
  source 1..10: mol_type = other RNA
gtacatgttc

SEQ ID NO: 4010 - RNA, 11 nt, synthetic construct
  source 1..11: mol_type = other RNA
gtacatgttcc

SEQ ID NO: 4011 - RNA, 12 nt, synthetic construct
  source 1..12: mol_type = other RNA
gtacatgttcct

SEQ ID NO: 4012 - RNA, 13 nt, synthetic construct
  source 1..13: mol_type = other RNA
gtacatgttcctg

SEQ ID NO: 4013 - RNA, 14 nt, synthetic construct
  source 1..14: mol_type = other RNA
gtacatgttcctgg

SEQ ID NO: 4014 - RNA, 15 nt, synthetic construct
  source 1..15: mol_type = other RNA
gtacatgttcctggt

SEQ ID NO: 4015 - RNA, 16 nt, synthetic construct
  source 1..16: mol_type = other RNA
gtacatgttcctggtg

SEQ ID NO: 4016 - RNA, 17 nt, synthetic construct
  source 1..17: mol_type = other RNA
gtacatgttcctggtga

SEQ ID NO: 4017 - RNA, 18 nt, synthetic construct
  source 1..18: mol_type = other RNA
gtacatgttcctggtgaa

SEQ ID NO: 4018 - RNA, 19 nt, synthetic construct
  source 1..19: mol_type = other RNA
gtacatgttcctggtgaaa

SEQ ID NO: 4019 - RNA, 10 nt, synthetic construct
  source 1..10: mol_type = other RNA
tcccccaggt

SEQ ID NO: 4020 - RNA, 11 nt, synthetic construct
  source 1..11: mol_type = other RNA
ttcccccaggt

SEQ ID NO: 4021 - RNA, 12 nt, synthetic construct
  source 1..12: mol_type = other RNA
tttcccccaggt

SEQ ID NO: 4022 - RNA, 12 nt, synthetic construct
  source 1..12: mol_type = other RNA
tttccgccaggt

SEQ ID NO: 4023 - RNA, 12 nt, synthetic construct
  source 1..12: mol_type = other RNA
tttcgcccaggt

SEQ ID NO: 4024 - RNA, 12 nt, synthetic construct
  source 1..12: mol_type = other RNA
tttcaaccaggt

SEQ ID NO: 4025 - RNA, 12 nt, synthetic construct
  source 1..12: mol_type = other RNA
tttctaccaggt

SEQ ID NO: 4026 - RNA, 12 nt, synthetic construct
  source 1..12: mol_type = other RNA
tttcgaccaggt

SEQ ID NO: 4027 - RNA, 12 nt, synthetic construct
  source 1..12: mol_type = other RNA
tttcagccaggt

SEQ ID NO: 4028 - RNA, 12 nt, synthetic construct
  source 1..12: mol_type = other RNA
tttcggccaggt

SEQ ID NO: 4029 - RNA, 12 nt, synthetic construct
  source 1..12: mol_type = other RNA
tttcacccaggt

SEQ ID NO: 4030 - RNA, 12 nt, synthetic construct
  source 1..12: mol_type = other RNA
tttctcccaggt

SEQ ID NO: 4031 - RNA, 12 nt, synthetic construct
  source 1..12: mol_type = other RNA
tttcatccaggt

SEQ ID NO: 4032 - RNA, 12 nt, synthetic construct
  source 1..12: mol_type = other RNA
tttcctccaggt

SEQ ID NO: 4033 - RNA, 12 nt, synthetic construct
  source 1..12: mol_type = other RNA
tttccaccaggt

SEQ ID NO: 4034 - RNA, 12 nt, synthetic construct
  source 1..12: mol_type = other RNA
tttcttccaggt

SEQ ID NO: 4035 - RNA, 12 nt, synthetic construct
  source 1..12: mol_type = other RNA
tttctgccaggt

SEQ ID NO: 4036 - RNA, 12 nt, synthetic construct
  source 1..12: mol_type = other RNA
tttcgtccaggt

SEQ ID NO: 4037 - RNA, 13 nt, synthetic construct
  source 1..13: mol_type = other RNA
ctttcccccaggt

SEQ ID NO: 4038 - RNA, 13 nt, synthetic construct
  source 1..13: mol_type = other RNA
ctttcagccaggt

SEQ ID NO: 4039 - RNA, 13 nt, synthetic construct
  source 1..13: mol_type = other RNA
ctttcggccaggt

SEQ ID NO: 4040 - RNA, 13 nt, synthetic construct
  source 1..13: mol_type = other RNA
ctttcgcccaggt

SEQ ID NO: 4041 - RNA, 13 nt, synthetic construct
  source 1..13: mol_type = other RNA
ctttcctccaggt

SEQ ID NO: 4042 - RNA, 13 nt, synthetic construct
  source 1..13: mol_type = other RNA
ctttcgaccaggt

SEQ ID NO: 4043 - RNA, 13 nt, synthetic construct
  source 1..13: mol_type = other RNA
ctttcaaccaggt

SEQ ID NO: 4044 - RNA, 13 nt, synthetic construct
  source 1..13: mol_type = other RNA
ctttctgccaggt

SEQ ID NO: 4045 - RNA, 13 nt, synthetic construct
  source 1..13: mol_type = other RNA
ctttccgccaggt

SEQ ID NO: 4046 - RNA, 13 nt, synthetic construct
  source 1..13: mol_type = other RNA
ctttcgtccaggt

SEQ ID NO: 4047 - RNA, 13 nt, synthetic construct
  source 1..13: mol_type = other RNA
ctttcttccaggt

SEQ ID NO: 4048 - RNA, 13 nt, synthetic construct
  source 1..13: mol_type = other RNA
ctttctaccaggt

SEQ ID NO: 4049 - RNA, 13 nt, synthetic construct
  source 1..13: mol_type = other RNA
ctttccaccaggt

SEQ ID NO: 4050 - RNA, 13 nt, synthetic construct
  source 1..13: mol_type = other RNA
ctttcatccaggt

SEQ ID NO: 4051 - RNA, 13 nt, synthetic construct
  source 1..13: mol_type = other RNA
ctttctcccaggt

SEQ ID NO: 4052 - RNA, 13 nt, synthetic construct
  source 1..13: mol_type = other RNA
ctttcacccaggt

SEQ ID NO: 4053 - RNA, 14 nt, synthetic construct
  source 1..14: mol_type = other RNA
gctttcgtccaggt

SEQ ID NO: 4054 - RNA, 14 nt, synthetic construct
  source 1..14: mol_type = other RNA
gctttcccccaggt

SEQ ID NO: 4055 - RNA, 14 nt, synthetic construct
  source 1..14: mol_type = other RNA
gctttcagccaggt

SEQ ID NO: 4056 - RNA, 14 nt, synthetic construct
  source 1..14: mol_type = other RNA
gctttctaccaggt

SEQ ID NO: 4057 - RNA, 14 nt, synthetic construct
  source 1..14: mol_type = other RNA
gctttcggccaggt

SEQ ID NO: 4058 - RNA, 14 nt, synthetic construct
  source 1..14: mol_type = other RNA
gctttcttccaggt

SEQ ID NO: 4059 - RNA, 14 nt, synthetic construct
  source 1..14: mol_type = other RNA
gctttctgccaggt

SEQ ID NO: 4060 - RNA, 14 nt, synthetic construct
  source 1..14: mol_type = other RNA
gctttcatccaggt

SEQ ID NO: 4061 - RNA, 14 nt, synthetic construct
  source 1..14: mol_type = other RNA
gctttcaaccaggt

SEQ ID NO: 4062 - RNA, 14 nt, synthetic construct
  source 1..14: mol_type = other RNA
gctttctcccaggt

SEQ ID NO: 4063 - RNA, 14 nt, synthetic construct
  source 1..14: mol_type = other RNA
gctttcgcccaggt

SEQ ID NO: 4064 - RNA, 14 nt, synthetic construct
  source 1..14: mol_type = other RNA
gctttccaccaggt

SEQ ID NO: 4065 - RNA, 14 nt, synthetic construct
  source 1..14: mol_type = other RNA
gctttcacccaggt

SEQ ID NO: 4066 - RNA, 14 nt, synthetic construct
  source 1..14: mol_type = other RNA
gctttcctccaggt

SEQ ID NO: 4067 - RNA, 14 nt, synthetic construct
  source 1..14: mol_type = other RNA
gctttcgaccaggt

SEQ ID NO: 4068 - RNA, 14 nt, synthetic construct
  source 1..14: mol_type = other RNA
gctttccgccaggt

SEQ ID NO: 4069 - RNA, 15 nt, synthetic construct
  source 1..15: mol_type = other RNA
ggctttcacccaggt

SEQ ID NO: 4070 - RNA, 15 nt, synthetic construct
  source 1..15: mol_type = other RNA
ggctttccgccaggt

SEQ ID NO: 4071 - RNA, 15 nt, synthetic construct
  source 1..15: mol_type = other RNA
ggctttcatccaggt

SEQ ID NO: 4072 - RNA, 15 nt, synthetic construct
  source 1..15: mol_type = other RNA
ggctttcccccaggt

SEQ ID NO: 4073 - RNA, 15 nt, synthetic construct
  source 1..15: mol_type = other RNA
ggctttcgaccaggt

SEQ ID NO: 4074 - RNA, 15 nt, synthetic construct
  source 1..15: mol_type = other RNA
ggctttctcccaggt

SEQ ID NO: 4075 - RNA, 15 nt, synthetic construct
  source 1..15: mol_type = other RNA
ggctttctgccaggt

SEQ ID NO: 4076 - RNA, 15 nt, synthetic construct
  source 1..15: mol_type = other RNA
ggctttcttccaggt

SEQ ID NO: 4077 - RNA, 15 nt, synthetic construct
  source 1..15: mol_type = other RNA
ggctttcgtccaggt

SEQ ID NO: 4078 - RNA, 15 nt, synthetic construct
  source 1..15: mol_type = other RNA
ggctttcggccaggt

SEQ ID NO: 4079 - RNA, 15 nt, synthetic construct
  source 1..15: mol_type = other RNA
ggctttccaccaggt

SEQ ID NO: 4080 - RNA, 15 nt, synthetic construct
  source 1..15: mol_type = other RNA
ggctttcctccaggt

SEQ ID NO: 4081 - RNA, 15 nt, synthetic construct
  source 1..15: mol_type = other RNA
ggctttcaaccaggt

SEQ ID NO: 4082 - RNA, 15 nt, synthetic construct
  source 1..15: mol_type = other RNA
ggctttctaccaggt

SEQ ID NO: 4083 - RNA, 15 nt, synthetic construct
  source 1..15: mol_type = other RNA
ggctttcagccaggt

SEQ ID NO: 4084 - RNA, 15 nt, synthetic construct
  source 1..15: mol_type = other RNA
ggctttcgcccaggt

SEQ ID NO: 4085 - RNA, 16 nt, synthetic construct
  source 1..16: mol_type = other RNA
tggctttcaaccaggt

SEQ ID NO: 4086 - RNA, 16 nt, synthetic construct
  source 1..16: mol_type = other RNA
tggctttcagccaggt

SEQ ID NO: 4087 - RNA, 16 nt, synthetic construct
  source 1..16: mol_type = other RNA
tggctttcttccaggt

SEQ ID NO: 4088 - RNA, 16 nt, synthetic construct
  source 1..16: mol_type = other RNA
tggctttccaccaggt

SEQ ID NO: 4089 - RNA, 16 nt, synthetic construct
  source 1..16: mol_type = other RNA
tggctttcatccaggt

SEQ ID NO: 4090 - RNA, 16 nt, synthetic construct
  source 1..16: mol_type = other RNA
tggctttctaccaggt

SEQ ID NO: 4091 - RNA, 16 nt, synthetic construct
  source 1..16: mol_type = other RNA
tggctttcgtccaggt

SEQ ID NO: 4092 - RNA, 16 nt, synthetic construct
  source 1..16: mol_type = other RNA
tggctttcgcccaggt

SEQ ID NO: 4093 - RNA, 16 nt, synthetic construct
  source 1..16: mol_type = other RNA
tggctttctcccaggt

SEQ ID NO: 4094 - RNA, 16 nt, synthetic construct
  source 1..16: mol_type = other RNA
tggctttcctccaggt

SEQ ID NO: 4095 - RNA, 16 nt, synthetic construct
  source 1..16: mol_type = other RNA
tggctttcacccaggt

SEQ ID NO: 4096 - RNA, 16 nt, synthetic construct
  source 1..16: mol_type = other RNA
tggctttcgaccaggt

SEQ ID NO: 4097 - RNA, 16 nt, synthetic construct
  source 1..16: mol_type = other RNA
tggctttcggccaggt

SEQ ID NO: 4098 - RNA, 16 nt, synthetic construct
  source 1..16: mol_type = other RNA
tggctttcccccaggt

SEQ ID NO: 4099 - RNA, 16 nt, synthetic construct
  source 1..16: mol_type = other RNA
tggctttctgccaggt

SEQ ID NO: 4100 - RNA, 16 nt, synthetic construct
  source 1..16: mol_type = other RNA
tggctttccgccaggt

SEQ ID NO: 4101 - RNA, 17 nt, synthetic construct
  source 1..17: mol_type = other RNA
ctggctttccgccaggt

SEQ ID NO: 4102 - RNA, 17 nt, synthetic construct
  source 1..17: mol_type = other RNA
ctggctttcccccaggt

SEQ ID NO: 4103 - RNA, 17 nt, synthetic construct
  source 1..17: mol_type = other RNA
ctggctttcggccaggt

SEQ ID NO: 4104 - RNA, 17 nt, synthetic construct
  source 1..17: mol_type = other RNA
ctggctttctaccaggt

SEQ ID NO: 4105 - RNA, 17 nt, synthetic construct
  source 1..17: mol_type = other RNA
ctggctttcaaccaggt

SEQ ID NO: 4106 - RNA, 17 nt, synthetic construct
  source 1..17: mol_type = other RNA
ctggctttccaccaggt

SEQ ID NO: 4107 - RNA, 17 nt, synthetic construct
  source 1..17: mol_type = other RNA
ctggctttcctccaggt

SEQ ID NO: 4108 - RNA, 17 nt, synthetic construct
  source 1..17: mol_type = other RNA
ctggctttctcccaggt

SEQ ID NO: 4109 - RNA, 17 nt, synthetic construct
  source 1..17: mol_type = other RNA
ctggctttcagccaggt

SEQ ID NO: 4110 - RNA, 17 nt, synthetic construct
  source 1..17: mol_type = other RNA
ctggctttcgcccaggt

SEQ ID NO: 4111 - RNA, 17 nt, synthetic construct
  source 1..17: mol_type = other RNA
ctggctttctgccaggt

SEQ ID NO: 4112 - RNA, 17 nt, synthetic construct
  source 1..17: mol_type = other RNA
ctggctttcatccaggt

SEQ ID NO: 4113 - RNA, 17 nt, synthetic construct
  source 1..17: mol_type = other RNA
ctggctttcacccaggt

SEQ ID NO: 4114 - RNA, 17 nt, synthetic construct
  source 1..17: mol_type = other RNA
ctggctttcgtccaggt

SEQ ID NO: 4115 - RNA, 17 nt, synthetic construct
  source 1..17: mol_type = other RNA
ctggctttcttccaggt

SEQ ID NO: 4116 - RNA, 17 nt, synthetic construct
  source 1..17: mol_type = other RNA
ctggctttcgaccaggt

SEQ ID NO: 4117 - RNA, 18 nt, synthetic construct
  source 1..18: mol_type = other RNA
tctggctttcgtccaggt

SEQ ID NO: 4118 - RNA, 18 nt, synthetic construct
  source 1..18: mol_type = other RNA
tctggctttctaccaggt

SEQ ID NO: 4119 - RNA, 18 nt, synthetic construct
  source 1..18: mol_type = other RNA
tctggctttcccccaggt

SEQ ID NO: 4120 - RNA, 18 nt, synthetic construct
  source 1..18: mol_type = other RNA
tctggctttcgcccaggt

SEQ ID NO: 4121 - RNA, 18 nt, synthetic construct
  source 1..18: mol_type = other RNA
tctggctttcaaccaggt

SEQ ID NO: 4122 - RNA, 18 nt, synthetic construct
  source 1..18: mol_type = other RNA
tctggctttcatccaggt

SEQ ID NO: 4123 - RNA, 18 nt, synthetic construct
  source 1..18: mol_type = other RNA
tctggctttcctccaggt

SEQ ID NO: 4124 - RNA, 18 nt, synthetic construct
  source 1..18: mol_type = other RNA
tctggctttcttccaggt

SEQ ID NO: 4125 - RNA, 18 nt, synthetic construct
  source 1..18: mol_type = other RNA
tctggctttctcccaggt

SEQ ID NO: 4126 - RNA, 18 nt, synthetic construct
  source 1..18: mol_type = other RNA
tctggctttcgaccaggt

SEQ ID NO: 4127 - RNA, 18 nt, synthetic construct
  source 1..18: mol_type = other RNA
tctggctttccaccaggt

SEQ ID NO: 4128 - RNA, 18 nt, synthetic construct
  source 1..18: mol_type = other RNA
tctggctttctgccaggt

SEQ ID NO: 4129 - RNA, 18 nt, synthetic construct
  source 1..18: mol_type = other RNA
tctggctttcggccaggt

SEQ ID NO: 4130 - RNA, 18 nt, synthetic construct
  source 1..18: mol_type = other RNA
tctggctttcagccaggt

SEQ ID NO: 4131 - RNA, 18 nt, synthetic construct
  source 1..18: mol_type = other RNA
tctggctttccgccaggt

SEQ ID NO: 4132 - RNA, 18 nt, synthetic construct
  source 1..18: mol_type = other RNA
tctggctttcacccaggt

SEQ ID NO: 4133 - RNA, 19 nt, synthetic construct
  source 1..19: mol_type = other RNA
ctctggctttcttccaggt

SEQ ID NO: 4134 - RNA, 19 nt, synthetic construct
  source 1..19: mol_type = other RNA
ctctggctttcgcccaggt

SEQ ID NO: 4135 - RNA, 19 nt, synthetic construct
  source 1..19: mol_type = other RNA
ctctggctttccaccaggt

SEQ ID NO: 4136 - RNA, 19 nt, synthetic construct
  source 1..19: mol_type = other RNA
ctctggctttcccccaggt

SEQ ID NO: 4137 - RNA, 19 nt, synthetic construct
  source 1..19: mol_type = other RNA
ctctggctttcacccaggt

SEQ ID NO: 4138 - RNA, 19 nt, synthetic construct
  source 1..19: mol_type = other RNA
ctctggctttcggccaggt

SEQ ID NO: 4139 - RNA, 19 nt, synthetic construct
  source 1..19: mol_type = other RNA
ctctggctttcgaccaggt

SEQ ID NO: 4140 - RNA, 19 nt, synthetic construct
  source 1..19: mol_type = other RNA
ctctggctttccgccaggt

SEQ ID NO: 4141 - RNA, 19 nt, synthetic construct
  source 1..19: mol_type = other RNA
ctctggctttctaccaggt

SEQ ID NO: 4142 - RNA, 19 nt, synthetic construct
  source 1..19: mol_type = other RNA
ctctggctttcatccaggt

SEQ ID NO: 4143 - RNA, 19 nt, synthetic construct
  source 1..19: mol_type = other RNA
ctctggctttctgccaggt

SEQ ID NO: 4144 - RNA, 19 nt, synthetic construct
  source 1..19: mol_type = other RNA
ctctggctttcgtccaggt

SEQ ID NO: 4145 - RNA, 19 nt, synthetic construct
  source 1..19: mol_type = other RNA
ctctggctttcctccaggt

SEQ ID NO: 4146 - RNA, 19 nt, synthetic construct
  source 1..19: mol_type = other RNA
ctctggctttctcccaggt

SEQ ID NO: 4147 - RNA, 19 nt, synthetic construct
  source 1..19: mol_type = other RNA
ctctggctttcaaccaggt

SEQ ID NO: 4148 - RNA, 19 nt, synthetic construct
  source 1..19: mol_type = other RNA
ctctggctttcagccaggt

SEQ ID NO: 4149 - RNA, 20 nt, synthetic construct
  source 1..20: mol_type = other RNA
actctggctttcccccaggt

SEQ ID NO: 4150 - RNA, 20 nt, synthetic construct
  source 1..20: mol_type = other RNA
actctggctttcggccaggt

SEQ ID NO: 4151 - RNA, 20 nt, synthetic construct
  source 1..20: mol_type = other RNA
actctggctttccaccaggt

SEQ ID NO: 4152 - RNA, 20 nt, synthetic construct
  source 1..20: mol_type = other RNA
actctggctttctgccaggt

SEQ ID NO: 4153 - RNA, 20 nt, synthetic construct
  source 1..20: mol_type = other RNA
actctggctttcacccaggt

SEQ ID NO: 4154 - RNA, 20 nt, synthetic construct
  source 1..20: mol_type = other RNA
actctggctttcagccaggt

SEQ ID NO: 4155 - RNA, 20 nt, synthetic construct
  source 1..20: mol_type = other RNA
actctggctttcatccaggt

SEQ ID NO: 4156 - RNA, 20 nt, synthetic construct
  source 1..20: mol_type = other RNA
actctggctttctaccaggt

SEQ ID NO: 4157 - RNA, 20 nt, synthetic construct
  source 1..20: mol_type = other RNA
actctggctttctcccaggt

SEQ ID NO: 4158 - RNA, 20 nt, synthetic construct
  source 1..20: mol_type = other RNA
actctggctttcgcccaggt

SEQ ID NO: 4159 - RNA, 20 nt, synthetic construct
  source 1..20: mol_type = other RNA
actctggctttcgaccaggt

SEQ ID NO: 4160 - RNA, 20 nt, synthetic construct
  source 1..20: mol_type = other RNA
actctggctttcttccaggt

SEQ ID NO: 4161 - RNA, 20 nt, synthetic construct
  source 1..20: mol_type = other RNA
actctggctttcctccaggt

SEQ ID NO: 4162 - RNA, 20 nt, synthetic construct
  source 1..20: mol_type = other RNA
actctggctttcaaccaggt

SEQ ID NO: 4163 - RNA, 20 nt, synthetic construct
  source 1..20: mol_type = other RNA
actctggctttccgccaggt

SEQ ID NO: 4164 - RNA, 20 nt, synthetic construct
  source 1..20: mol_type = other RNA
actctggctttcgtccaggt

SEQ ID NO: 4165 - RNA, 21 nt, synthetic construct
  source 1..21: mol_type = other RNA
gactctggctttcatccaggt

SEQ ID NO: 4166 - RNA, 21 nt, synthetic construct
  source 1..21: mol_type = other RNA
gactctggctttctaccaggt

SEQ ID NO: 4167 - RNA, 21 nt, synthetic construct
  source 1..21: mol_type = other RNA
gactctggctttcgcccaggt

SEQ ID NO: 4168 - RNA, 21 nt, synthetic construct
  source 1..21: mol_type = other RNA
gactctggctttcagccaggt

SEQ ID NO: 4169 - RNA, 21 nt, synthetic construct
  source 1..21: mol_type = other RNA
gactctggctttcttccaggt

SEQ ID NO: 4170 - RNA, 21 nt, synthetic construct
  source 1..21: mol_type = other RNA
gactctggctttcggccaggt

SEQ ID NO: 4171 - RNA, 21 nt, synthetic construct
  source 1..21: mol_type = other RNA
gactctggctttcccccaggt

SEQ ID NO: 4172 - RNA, 21 nt, synthetic construct
  source 1..21: mol_type = other RNA
gactctggctttccgccaggt

SEQ ID NO: 4173 - RNA, 21 nt, synthetic construct
  source 1..21: mol_type = other RNA
gactctggctttcaaccaggt

SEQ ID NO: 4174 - RNA, 21 nt, synthetic construct
  source 1..21: mol_type = other RNA
gactctggctttcacccaggt

SEQ ID NO: 4175 - RNA, 21 nt, synthetic construct
  source 1..21: mol_type = other RNA
gactctggctttcctccaggt

SEQ ID NO: 4176 - RNA, 21 nt, synthetic construct
  source 1..21: mol_type = other RNA
gactctggctttcgtccaggt

SEQ ID NO: 4177 - RNA, 21 nt, synthetic construct
  source 1..21: mol_type = other RNA
gactctggctttctgccaggt

SEQ ID NO: 4178 - RNA, 21 nt, synthetic construct
  source 1..21: mol_type = other RNA
gactctggctttcgaccaggt

SEQ ID NO: 4179 - RNA, 21 nt, synthetic construct
  source 1..21: mol_type = other RNA
gactctggctttctcccaggt

SEQ ID NO: 4180 - RNA, 21 nt, synthetic construct
  source 1..21: mol_type = other RNA
gactctggctttccaccaggt

SEQ ID NO: 4181 - RNA, 22 nt, synthetic construct
  source 1..22: mol_type = other RNA
cgactctggctttcggccaggt

SEQ ID NO: 4182 - RNA, 22 nt, synthetic construct
  source 1..22: mol_type = other RNA
cgactctggctttccgccaggt

SEQ ID NO: 4183 - RNA, 22 nt, synthetic construct
  source 1..22: mol_type = other RNA
cgactctggctttctcccaggt

SEQ ID NO: 4184 - RNA, 22 nt, synthetic construct
  source 1..22: mol_type = other RNA
cgactctggctttcagccaggt

SEQ ID NO: 4185 - RNA, 22 nt, synthetic construct
  source 1..22: mol_type = other RNA
cgactctggctttctgccaggt

SEQ ID NO: 4186 - RNA, 22 nt, synthetic construct
  source 1..22: mol_type = other RNA
cgactctggctttcttccaggt

SEQ ID NO: 4187 - RNA, 22 nt, synthetic construct
  source 1..22: mol_type = other RNA
cgactctggctttcctccaggt

SEQ ID NO: 4188 - RNA, 22 nt, synthetic construct
  source 1..22: mol_type = other RNA
cgactctggctttccaccaggt

SEQ ID NO: 4189 - RNA, 22 nt, synthetic construct
  source 1..22: mol_type = other RNA
cgactctggctttcgtccaggt

SEQ ID NO: 4190 - RNA, 22 nt, synthetic construct
  source 1..22: mol_type = other RNA
cgactctggctttcacccaggt

SEQ ID NO: 4191 - RNA, 22 nt, synthetic construct
  source 1..22: mol_type = other RNA
cgactctggctttctaccaggt

SEQ ID NO: 4192 - RNA, 22 nt, synthetic construct
  source 1..22: mol_type = other RNA
cgactctggctttcgaccaggt

SEQ ID NO: 4193 - RNA, 22 nt, synthetic construct
  source 1..22: mol_type = other RNA
cgactctggctttcccccaggt

SEQ ID NO: 4194 - RNA, 22 nt, synthetic construct
  source 1..22: mol_type = other RNA
cgactctggctttcatccaggt

SEQ ID NO: 4195 - RNA, 22 nt, synthetic construct
  source 1..22: mol_type = other RNA
cgactctggctttcaaccaggt

SEQ ID NO: 4196 - RNA, 22 nt, synthetic construct
  source 1..22: mol_type = other RNA
cgactctggctttcgcccaggt

SEQ ID NO: 4197 - RNA, 23 nt, synthetic construct
  source 1..23: mol_type = other RNA
ccgactctggctttcgaccaggt

SEQ ID NO: 4198 - RNA, 23 nt, synthetic construct
  source 1..23: mol_type = other RNA
ccgactctggctttcttccaggt

SEQ ID NO: 4199 - RNA, 23 nt, synthetic construct
  source 1..23: mol_type = other RNA
ccgactctggctttcggccaggt

SEQ ID NO: 4200 - RNA, 23 nt, synthetic construct
  source 1..23: mol_type = other RNA
ccgactctggctttctaccaggt

SEQ ID NO: 4201 - RNA, 23 nt, synthetic construct
  source 1..23: mol_type = other RNA
ccgactctggctttcatccaggt

SEQ ID NO: 4202 - RNA, 23 nt, synthetic construct
  source 1..23: mol_type = other RNA
ccgactctggctttccgccaggt

SEQ ID NO: 4203 - RNA, 23 nt, synthetic construct
  source 1..23: mol_type = other RNA
ccgactctggctttcacccaggt

SEQ ID NO: 4204 - RNA, 23 nt, synthetic construct
  source 1..23: mol_type = other RNA
ccgactctggctttcagccaggt

SEQ ID NO: 4205 - RNA, 23 nt, synthetic construct
  source 1..23: mol_type = other RNA
ccgactctggctttccaccaggt

SEQ ID NO: 4206 - RNA, 23 nt, synthetic construct
  source 1..23: mol_type = other RNA
ccgactctggctttcaaccaggt

SEQ ID NO: 4207 - RNA, 23 nt, synthetic construct
  source 1..23: mol_type = other RNA
ccgactctggctttcgtccaggt

SEQ ID NO: 4208 - RNA, 23 nt, synthetic construct
  source 1..23: mol_type = other RNA
ccgactctggctttctgccaggt

SEQ ID NO: 4209 - RNA, 23 nt, synthetic construct
  source 1..23: mol_type = other RNA
ccgactctggctttcccccaggt

SEQ ID NO: 4210 - RNA, 23 nt, synthetic construct
  source 1..23: mol_type = other RNA
ccgactctggctttcctccaggt

SEQ ID NO: 4211 - RNA, 23 nt, synthetic construct
  source 1..23: mol_type = other RNA
ccgactctggctttcgcccaggt

SEQ ID NO: 4212 - RNA, 23 nt, synthetic construct
  source 1..23: mol_type = other RNA
ccgactctggctttctcccaggt

SEQ ID NO: 4213 - RNA, 24 nt, synthetic construct
  source 1..24: mol_type = other RNA
cccgactctggctttcccccaggt

SEQ ID NO: 4214 - RNA, 24 nt, synthetic construct
  source 1..24: mol_type = other RNA
cccgactctggctttcctccaggt

SEQ ID NO: 4215 - RNA, 24 nt, synthetic construct
  source 1..24: mol_type = other RNA
cccgactctggctttctcccaggt

SEQ ID NO: 4216 - RNA, 24 nt, synthetic construct
  source 1..24: mol_type = other RNA
cccgactctggctttcagccaggt

SEQ ID NO: 4217 - RNA, 24 nt, synthetic construct
  source 1..24: mol_type = other RNA
cccgactctggctttcatccaggt

SEQ ID NO: 4218 - RNA, 24 nt, synthetic construct
  source 1..24: mol_type = other RNA
cccgactctggctttcacccaggt

SEQ ID NO: 4219 - RNA, 24 nt, synthetic construct
  source 1..24: mol_type = other RNA
cccgactctggctttccaccaggt

SEQ ID NO: 4220 - RNA, 24 nt, synthetic construct
  source 1..24: mol_type = other RNA
cccgactctggctttcgtccaggt

SEQ ID NO: 4221 - RNA, 24 nt, synthetic construct
  source 1..24: mol_type = other RNA
cccgactctggctttctgccaggt

SEQ ID NO: 4222 - RNA, 24 nt, synthetic construct
  source 1..24: mol_type = other RNA
cccgactctggctttccgccaggt

SEQ ID NO: 4223 - RNA, 24 nt, synthetic construct
  source 1..24: mol_type = other RNA
cccgactctggctttcttccaggt

SEQ ID NO: 4224 - RNA, 24 nt, synthetic construct
  source 1..24: mol_type = other RNA
cccgactctggctttcgaccaggt

SEQ ID NO: 4225 - RNA, 24 nt, synthetic construct
  source 1..24: mol_type = other RNA
cccgactctggctttcaaccaggt

SEQ ID NO: 4226 - RNA, 24 nt, synthetic construct
  source 1..24: mol_type = other RNA
cccgactctggctttcgcccaggt

SEQ ID NO: 4227 - RNA, 24 nt, synthetic construct
  source 1..24: mol_type = other RNA
cccgactctggctttctaccaggt

SEQ ID NO: 4228 - RNA, 24 nt, synthetic construct
  source 1..24: mol_type = other RNA
cccgactctggctttcggccaggt

SEQ ID NO: 4229 - RNA, 25 nt, synthetic construct
  source 1..25: mol_type = other RNA
ccccgactctggctttcaaccaggt

SEQ ID NO: 4230 - RNA, 25 nt, synthetic construct
  source 1..25: mol_type = other RNA
ccccgactctggctttcccccaggt

SEQ ID NO: 4231 - RNA, 25 nt, synthetic construct
  source 1..25: mol_type = other RNA
ccccgactctggctttcagccaggt

SEQ ID NO: 4232 - RNA, 25 nt, synthetic construct
  source 1..25: mol_type = other RNA
ccccgactctggctttctgccaggt

SEQ ID NO: 4233 - RNA, 25 nt, synthetic construct
  source 1..25: mol_type = other RNA
ccccgactctggctttcgaccaggt

SEQ ID NO: 4234 - RNA, 25 nt, synthetic construct
  source 1..25: mol_type = other RNA
ccccgactctggctttcctccaggt

SEQ ID NO: 4235 - RNA, 25 nt, synthetic construct
  source 1..25: mol_type = other RNA
ccccgactctggctttcatccaggt

SEQ ID NO: 4236 - RNA, 25 nt, synthetic construct
  source 1..25: mol_type = other RNA
ccccgactctggctttccgccaggt

SEQ ID NO: 4237 - RNA, 25 nt, synthetic construct
  source 1..25: mol_type = other RNA
ccccgactctggctttcttccaggt

SEQ ID NO: 4238 - RNA, 25 nt, synthetic construct
  source 1..25: mol_type = other RNA
ccccgactctggctttcggccaggt

SEQ ID NO: 4239 - RNA, 25 nt, synthetic construct
  source 1..25: mol_type = other RNA
ccccgactctggctttctcccaggt

SEQ ID NO: 4240 - RNA, 25 nt, synthetic construct
  source 1..25: mol_type = other RNA
ccccgactctggctttcacccaggt

SEQ ID NO: 4241 - RNA, 25 nt, synthetic construct
  source 1..25: mol_type = other RNA
ccccgactctggctttcgtccaggt

SEQ ID NO: 4242 - RNA, 25 nt, synthetic construct
  source 1..25: mol_type = other RNA
ccccgactctggctttctaccaggt

SEQ ID NO: 4243 - RNA, 25 nt, synthetic construct
  source 1..25: mol_type = other RNA
ccccgactctggctttccaccaggt

SEQ ID NO: 4244 - RNA, 25 nt, synthetic construct
  source 1..25: mol_type = other RNA
ccccgactctggctttcgcccaggt

SEQ ID NO: 4245 - RNA, 26 nt, synthetic construct
  source 1..26: mol_type = other RNA
cccccgactctggctttcccccaggt

SEQ ID NO: 4246 - RNA, 26 nt, synthetic construct
  source 1..26: mol_type = other RNA
cccccgactctggctttcggccaggt

SEQ ID NO: 4247 - RNA, 26 nt, synthetic construct
  source 1..26: mol_type = other RNA
cccccgactctggctttctcccaggt

SEQ ID NO: 4248 - RNA, 26 nt, synthetic construct
  source 1..26: mol_type = other RNA
cccccgactctggctttcacccaggt

SEQ ID NO: 4249 - RNA, 26 nt, synthetic construct
  source 1..26: mol_type = other RNA
cccccgactctggctttcctccaggt

SEQ ID NO: 4250 - RNA, 26 nt, synthetic construct
  source 1..26: mol_type = other RNA
cccccgactctggctttcgtccaggt

SEQ ID NO: 4251 - RNA, 26 nt, synthetic construct
  source 1..26: mol_type = other RNA
cccccgactctggctttctaccaggt

SEQ ID NO: 4252 - RNA, 26 nt, synthetic construct
  source 1..26: mol_type = other RNA
cccccgactctggctttcgcccaggt

SEQ ID NO: 4253 - RNA, 26 nt, synthetic construct
  source 1..26: mol_type = other RNA
cccccgactctggctttcagccaggt

SEQ ID NO: 4254 - RNA, 26 nt, synthetic construct
  source 1..26: mol_type = other RNA
cccccgactctggctttcgaccaggt

SEQ ID NO: 4255 - RNA, 26 nt, synthetic construct
  source 1..26: mol_type = other RNA
cccccgactctggctttccaccaggt

SEQ ID NO: 4256 - RNA, 26 nt, synthetic construct
  source 1..26: mol_type = other RNA
cccccgactctggctttcaaccaggt

SEQ ID NO: 4257 - RNA, 26 nt, synthetic construct
  source 1..26: mol_type = other RNA
cccccgactctggctttcttccaggt

SEQ ID NO: 4258 - RNA, 26 nt, synthetic construct
  source 1..26: mol_type = other RNA
cccccgactctggctttctgccaggt

SEQ ID NO: 4259 - RNA, 26 nt, synthetic construct
  source 1..26: mol_type = other RNA
cccccgactctggctttcatccaggt

SEQ ID NO: 4260 - RNA, 26 nt, synthetic construct
  source 1..26: mol_type = other RNA
cccccgactctggctttccgccaggt

SEQ ID NO: 4261 - RNA, 27 nt, synthetic construct
  source 1..27: mol_type = other RNA
tcccccgactctggctttcgcccaggt

SEQ ID NO: 4262 - RNA, 27 nt, synthetic construct
  source 1..27: mol_type = other RNA
tcccccgactctggctttcgtccaggt

SEQ ID NO: 4263 - RNA, 27 nt, synthetic construct
  source 1..27: mol_type = other RNA
tcccccgactctggctttcccccaggt

SEQ ID NO: 4264 - RNA, 27 nt, synthetic construct
  source 1..27: mol_type = other RNA
tcccccgactctggctttcacccaggt

SEQ ID NO: 4265 - RNA, 27 nt, synthetic construct
  source 1..27: mol_type = other RNA
tcccccgactctggctttcttccaggt

SEQ ID NO: 4266 - RNA, 27 nt, synthetic construct
  source 1..27: mol_type = other RNA
tcccccgactctggctttccgccaggt

SEQ ID NO: 4267 - RNA, 27 nt, synthetic construct
  source 1..27: mol_type = other RNA
tcccccgactctggctttctgccaggt

SEQ ID NO: 4268 - RNA, 27 nt, synthetic construct
  source 1..27: mol_type = other RNA
tcccccgactctggctttctcccaggt

SEQ ID NO: 4269 - RNA, 27 nt, synthetic construct
  source 1..27: mol_type = other RNA
tcccccgactctggctttccaccaggt

SEQ ID NO: 4270 - RNA, 27 nt, synthetic construct
  source 1..27: mol_type = other RNA
tcccccgactctggctttcatccaggt

SEQ ID NO: 4271 - RNA, 27 nt, synthetic construct
  source 1..27: mol_type = other RNA
tcccccgactctggctttcggccaggt

SEQ ID NO: 4272 - RNA, 27 nt, synthetic construct
  source 1..27: mol_type = other RNA
tcccccgactctggctttcagccaggt

SEQ ID NO: 4273 - RNA, 27 nt, synthetic construct
  source 1..27: mol_type = other RNA
tcccccgactctggctttctaccaggt

SEQ ID NO: 4274 - RNA, 27 nt, synthetic construct
  source 1..27: mol_type = other RNA
tcccccgactctggctttcaaccaggt

SEQ ID NO: 4275 - RNA, 27 nt, synthetic construct
  source 1..27: mol_type = other RNA
tcccccgactctggctttcgaccaggt

SEQ ID NO: 4276 - RNA, 27 nt, synthetic construct
  source 1..27: mol_type = other RNA
tcccccgactctggctttcctccaggt

SEQ ID NO: 4277 - RNA, 28 nt, synthetic construct
  source 1..28: mol_type = other RNA
gtcccccgactctggctttcccccaggt

SEQ ID NO: 4278 - RNA, 28 nt, synthetic construct
  source 1..28: mol_type = other RNA
gtcccccgactctggctttcaaccaggt

SEQ ID NO: 4279 - RNA, 28 nt, synthetic construct
  source 1..28: mol_type = other RNA
gtcccccgactctggctttcctccaggt

SEQ ID NO: 4280 - RNA, 28 nt, synthetic construct
  source 1..28: mol_type = other RNA
gtcccccgactctggctttccaccaggt

SEQ ID NO: 4281 - RNA, 28 nt, synthetic construct
  source 1..28: mol_type = other RNA
gtcccccgactctggctttccgccaggt

SEQ ID NO: 4282 - RNA, 28 nt, synthetic construct
  source 1..28: mol_type = other RNA
gtcccccgactctggctttcgtccaggt

SEQ ID NO: 4283 - RNA, 28 nt, synthetic construct
  source 1..28: mol_type = other RNA
gtcccccgactctggctttcgcccaggt

SEQ ID NO: 4284 - RNA, 28 nt, synthetic construct
  source 1..28: mol_type = other RNA
gtcccccgactctggctttctaccaggt

SEQ ID NO: 4285 - RNA, 28 nt, synthetic construct
  source 1..28: mol_type = other RNA
gtcccccgactctggctttcatccaggt

SEQ ID NO: 4286 - RNA, 28 nt, synthetic construct
  source 1..28: mol_type = other RNA
gtcccccgactctggctttcacccaggt

SEQ ID NO: 4287 - RNA, 28 nt, synthetic construct
  source 1..28: mol_type = other RNA
gtcccccgactctggctttctgccaggt

SEQ ID NO: 4288 - RNA, 28 nt, synthetic construct
  source 1..28: mol_type = other RNA
gtcccccgactctggctttcggccaggt

SEQ ID NO: 4289 - RNA, 28 nt, synthetic construct
  source 1..28: mol_type = other RNA
gtcccccgactctggctttctcccaggt

SEQ ID NO: 4290 - RNA, 28 nt, synthetic construct
  source 1..28: mol_type = other RNA
gtcccccgactctggctttcgaccaggt

SEQ ID NO: 4291 - RNA, 28 nt, synthetic construct
  source 1..28: mol_type = other RNA
gtcccccgactctggctttcttccaggt

SEQ ID NO: 4292 - RNA, 28 nt, synthetic construct
  source 1..28: mol_type = other RNA
gtcccccgactctggctttcagccaggt

SEQ ID NO: 4293 - RNA, 29 nt, synthetic construct
  source 1..29: mol_type = other RNA
ggtcccccgactctggctttctgccaggt

SEQ ID NO: 4294 - RNA, 29 nt, synthetic construct
  source 1..29: mol_type = other RNA
ggtcccccgactctggctttcttccaggt

SEQ ID NO: 4295 - RNA, 29 nt, synthetic construct
  source 1..29: mol_type = other RNA
ggtcccccgactctggctttcctccaggt

SEQ ID NO: 4296 - RNA, 29 nt, synthetic construct
  source 1..29: mol_type = other RNA
ggtcccccgactctggctttcgtccaggt

SEQ ID NO: 4297 - RNA, 29 nt, synthetic construct
  source 1..29: mol_type = other RNA
ggtcccccgactctggctttcagccaggt

SEQ ID NO: 4298 - RNA, 29 nt, synthetic construct
  source 1..29: mol_type = other RNA
ggtcccccgactctggctttcaaccaggt

SEQ ID NO: 4299 - RNA, 29 nt, synthetic construct
  source 1..29: mol_type = other RNA
ggtcccccgactctggctttcgaccaggt

SEQ ID NO: 4300 - RNA, 29 nt, synthetic construct
  source 1..29: mol_type = other RNA
ggtcccccgactctggctttccaccaggt

SEQ ID NO: 4301 - RNA, 29 nt, synthetic construct
  source 1..29: mol_type = other RNA
ggtcccccgactctggctttccgccaggt

SEQ ID NO: 4302 - RNA, 29 nt, synthetic construct
  source 1..29: mol_type = other RNA
ggtcccccgactctggctttcacccaggt

SEQ ID NO: 4303 - RNA, 29 nt, synthetic construct
  source 1..29: mol_type = other RNA
ggtcccccgactctggctttcatccaggt

SEQ ID NO: 4304 - RNA, 29 nt, synthetic construct
  source 1..29: mol_type = other RNA
ggtcccccgactctggctttcgcccaggt

SEQ ID NO: 4305 - RNA, 29 nt, synthetic construct
  source 1..29: mol_type = other RNA
ggtcccccgactctggctttcccccaggt

SEQ ID NO: 4306 - RNA, 29 nt, synthetic construct
  source 1..29: mol_type = other RNA
ggtcccccgactctggctttctaccaggt

SEQ ID NO: 4307 - RNA, 29 nt, synthetic construct
  source 1..29: mol_type = other RNA
ggtcccccgactctggctttctcccaggt

SEQ ID NO: 4308 - RNA, 29 nt, synthetic construct
  source 1..29: mol_type = other RNA
ggtcccccgactctggctttcggccaggt

SEQ ID NO: 4309 - RNA, 30 nt, synthetic construct
  source 1..30: mol_type = other RNA
gggtcccccgactctggctttcagccaggt

SEQ ID NO: 4310 - RNA, 30 nt, synthetic construct
  source 1..30: mol_type = other RNA
gggtcccccgactctggctttccaccaggt

SEQ ID NO: 4311 - RNA, 30 nt, synthetic construct
  source 1..30: mol_type = other RNA
gggtcccccgactctggctttcgtccaggt

SEQ ID NO: 4312 - RNA, 30 nt, synthetic construct
  source 1..30: mol_type = other RNA
gggtcccccgactctggctttcaaccaggt

SEQ ID NO: 4313 - RNA, 30 nt, synthetic construct
  source 1..30: mol_type = other RNA
gggtcccccgactctggctttcccccaggt

SEQ ID NO: 4314 - RNA, 30 nt, synthetic construct
  source 1..30: mol_type = other RNA
gggtcccccgactctggctttcggccaggt

SEQ ID NO: 4315 - RNA, 30 nt, synthetic construct
  source 1..30: mol_type = other RNA
gggtcccccgactctggctttccgccaggt

SEQ ID NO: 4316 - RNA, 30 nt, synthetic construct
  source 1..30: mol_type = other RNA
gggtcccccgactctggctttcttccaggt

SEQ ID NO: 4317 - RNA, 30 nt, synthetic construct
  source 1..30: mol_type = other RNA
gggtcccccgactctggctttctaccaggt

SEQ ID NO: 4318 - RNA, 30 nt, synthetic construct
  source 1..30: mol_type = other RNA
gggtcccccgactctggctttcgcccaggt

SEQ ID NO: 4319 - RNA, 30 nt, synthetic construct
  source 1..30: mol_type = other RNA
gggtcccccgactctggctttcatccaggt

SEQ ID NO: 4320 - RNA, 30 nt, synthetic construct
  source 1..30: mol_type = other RNA
gggtcccccgactctggctttctcccaggt

SEQ ID NO: 4321 - RNA, 30 nt, synthetic construct
  source 1..30: mol_type = other RNA
gggtcccccgactctggctttcgaccaggt

SEQ ID NO: 4322 - RNA, 30 nt, synthetic construct
  source 1..30: mol_type = other RNA
gggtcccccgactctggctttcacccaggt

SEQ ID NO: 4323 - RNA, 30 nt, synthetic construct
  source 1..30: mol_type = other RNA
gggtcccccgactctggctttcctccaggt

SEQ ID NO: 4324 - RNA, 30 nt, synthetic construct
  source 1..30: mol_type = other RNA
gggtcccccgactctggctttctgccaggt

SEQ ID NO: 4325 - RNA, 31 nt, synthetic construct
  source 1..31: mol_type = other RNA
ggggtcccccgactctggctttcgtccaggt

SEQ ID NO: 4326 - RNA, 31 nt, synthetic construct
  source 1..31: mol_type = other RNA
ggggtcccccgactctggctttcttccaggt

SEQ ID NO: 4327 - RNA, 31 nt, synthetic construct
  source 1..31: mol_type = other RNA
ggggtcccccgactctggctttccaccaggt

SEQ ID NO: 4328 - RNA, 31 nt, synthetic construct
  source 1..31: mol_type = other RNA
ggggtcccccgactctggctttcggccaggt

SEQ ID NO: 4329 - RNA, 31 nt, synthetic construct
  source 1..31: mol_type = other RNA
ggggtcccccgactctggctttcacccaggt

SEQ ID NO: 4330 - RNA, 31 nt, synthetic construct
  source 1..31: mol_type = other RNA
ggggtcccccgactctggctttcccccaggt

SEQ ID NO: 4331 - RNA, 31 nt, synthetic construct
  source 1..31: mol_type = other RNA
ggggtcccccgactctggctttctcccaggt

SEQ ID NO: 4332 - RNA, 31 nt, synthetic construct
  source 1..31: mol_type = other RNA
ggggtcccccgactctggctttcaaccaggt

SEQ ID NO: 4333 - RNA, 31 nt, synthetic construct
  source 1..31: mol_type = other RNA
ggggtcccccgactctggctttcgaccaggt

SEQ ID NO: 4334 - RNA, 31 nt, synthetic construct
  source 1..31: mol_type = other RNA
ggggtcccccgactctggctttcgcccaggt

SEQ ID NO: 4335 - RNA, 31 nt, synthetic construct
  source 1..31: mol_type = other RNA
ggggtcccccgactctggctttcagccaggt

SEQ ID NO: 4336 - RNA, 31 nt, synthetic construct
  source 1..31: mol_type = other RNA
ggggtcccccgactctggctttcctccaggt

SEQ ID NO: 4337 - RNA, 31 nt, synthetic construct
  source 1..31: mol_type = other RNA
ggggtcccccgactctggctttctaccaggt

SEQ ID NO: 4338 - RNA, 31 nt, synthetic construct
  source 1..31: mol_type = other RNA
ggggtcccccgactctggctttccgccaggt

SEQ ID NO: 4339 - RNA, 31 nt, synthetic construct
  source 1..31: mol_type = other RNA
ggggtcccccgactctggctttctgccaggt

SEQ ID NO: 4340 - RNA, 31 nt, synthetic construct
  source 1..31: mol_type = other RNA
ggggtcccccgactctggctttcatccaggt

SEQ ID NO: 4341 - RNA, 32 nt, synthetic construct
  source 1..32: mol_type = other RNA
tggggtcccccgactctggctttccgccaggt

SEQ ID NO: 4342 - RNA, 32 nt, synthetic construct
  source 1..32: mol_type = other RNA
tggggtcccccgactctggctttcaaccaggt

SEQ ID NO: 4343 - RNA, 32 nt, synthetic construct
  source 1..32: mol_type = other RNA
tggggtcccccgactctggctttcggccaggt

SEQ ID NO: 4344 - RNA, 32 nt, synthetic construct
  source 1..32: mol_type = other RNA
tggggtcccccgactctggctttcctccaggt

SEQ ID NO: 4345 - RNA, 32 nt, synthetic construct
  source 1..32: mol_type = other RNA
tggggtcccccgactctggctttccaccaggt

SEQ ID NO: 4346 - RNA, 32 nt, synthetic construct
  source 1..32: mol_type = other RNA
tggggtcccccgactctggctttcacccaggt

SEQ ID NO: 4347 - RNA, 32 nt, synthetic construct
  source 1..32: mol_type = other RNA
tggggtcccccgactctggctttcgtccaggt

SEQ ID NO: 4348 - RNA, 32 nt, synthetic construct
  source 1..32: mol_type = other RNA
tggggtcccccgactctggctttcccccaggt

SEQ ID NO: 4349 - RNA, 32 nt, synthetic construct
  source 1..32: mol_type = other RNA
tggggtcccccgactctggctttcgcccaggt

SEQ ID NO: 4350 - RNA, 32 nt, synthetic construct
  source 1..32: mol_type = other RNA
tggggtcccccgactctggctttcagccaggt

SEQ ID NO: 4351 - RNA, 32 nt, synthetic construct
  source 1..32: mol_type = other RNA
tggggtcccccgactctggctttcttccaggt

SEQ ID NO: 4352 - RNA, 32 nt, synthetic construct
  source 1..32: mol_type = other RNA
tggggtcccccgactctggctttctcccaggt

SEQ ID NO: 4353 - RNA, 32 nt, synthetic construct
  source 1..32: mol_type = other RNA
tggggtcccccgactctggctttcgaccaggt

SEQ ID NO: 4354 - RNA, 32 nt, synthetic construct
  source 1..32: mol_type = other RNA
tggggtcccccgactctggctttctaccaggt

SEQ ID NO: 4355 - RNA, 32 nt, synthetic construct
  source 1..32: mol_type = other RNA
tggggtcccccgactctggctttctgccaggt

SEQ ID NO: 4356 - RNA, 32 nt, synthetic construct
  source 1..32: mol_type = other RNA
tggggtcccccgactctggctttcatccaggt

SEQ ID NO: 4357 - RNA, 33 nt, synthetic construct
  source 1..33: mol_type = other RNA
atggggtcccccgactctggctttcggccaggt

SEQ ID NO: 4358 - RNA, 33 nt, synthetic construct
  source 1..33: mol_type = other RNA
atggggtcccccgactctggctttcccccaggt

SEQ ID NO: 4359 - RNA, 33 nt, synthetic construct
  source 1..33: mol_type = other RNA
atggggtcccccgactctggctttcatccaggt

SEQ ID NO: 4360 - RNA, 33 nt, synthetic construct
  source 1..33: mol_type = other RNA
atggggtcccccgactctggctttcctccaggt

SEQ ID NO: 4361 - RNA, 33 nt, synthetic construct
  source 1..33: mol_type = other RNA
atggggtcccccgactctggctttcgaccaggt

SEQ ID NO: 4362 - RNA, 33 nt, synthetic construct
  source 1..33: mol_type = other RNA
atggggtcccccgactctggctttcgcccaggt

SEQ ID NO: 4363 - RNA, 33 nt, synthetic construct
  source 1..33: mol_type = other RNA
atggggtcccccgactctggctttctgccaggt

SEQ ID NO: 4364 - RNA, 33 nt, synthetic construct
  source 1..33: mol_type = other RNA
atggggtcccccgactctggctttccgccaggt

SEQ ID NO: 4365 - RNA, 33 nt, synthetic construct
  source 1..33: mol_type = other RNA
atggggtcccccgactctggctttcacccaggt

SEQ ID NO: 4366 - RNA, 33 nt, synthetic construct
  source 1..33: mol_type = other RNA
atggggtcccccgactctggctttcagccaggt

SEQ ID NO: 4367 - RNA, 33 nt, synthetic construct
  source 1..33: mol_type = other RNA
atggggtcccccgactctggctttcaaccaggt

SEQ ID NO: 4368 - RNA, 33 nt, synthetic construct
  source 1..33: mol_type = other RNA
atggggtcccccgactctggctttccaccaggt

SEQ ID NO: 4369 - RNA, 33 nt, synthetic construct
  source 1..33: mol_type = other RNA
atggggtcccccgactctggctttcttccaggt

SEQ ID NO: 4370 - RNA, 33 nt, synthetic construct
  source 1..33: mol_type = other RNA
atggggtcccccgactctggctttctaccaggt

SEQ ID NO: 4371 - RNA, 33 nt, synthetic construct
  source 1..33: mol_type = other RNA
atggggtcccccgactctggctttctcccaggt

SEQ ID NO: 4372 - RNA, 33 nt, synthetic construct
  source 1..33: mol_type = other RNA
atggggtcccccgactctggctttcgtccaggt

SEQ ID NO: 4373 - RNA, 34 nt, synthetic construct
  source 1..34: mol_type = other RNA
aatggggtcccccgactctggctttctaccaggt

SEQ ID NO: 4374 - RNA, 34 nt, synthetic construct
  source 1..34: mol_type = other RNA
aatggggtcccccgactctggctttcctccaggt

SEQ ID NO: 4375 - RNA, 34 nt, synthetic construct
  source 1..34: mol_type = other RNA
aatggggtcccccgactctggctttcccccaggt

SEQ ID NO: 4376 - RNA, 34 nt, synthetic construct
  source 1..34: mol_type = other RNA
aatggggtcccccgactctggctttcgaccaggt

SEQ ID NO: 4377 - RNA, 34 nt, synthetic construct
  source 1..34: mol_type = other RNA
aatggggtcccccgactctggctttcgcccaggt

SEQ ID NO: 4378 - RNA, 34 nt, synthetic construct
  source 1..34: mol_type = other RNA
aatggggtcccccgactctggctttctgccaggt

SEQ ID NO: 4379 - RNA, 34 nt, synthetic construct
  source 1..34: mol_type = other RNA
aatggggtcccccgactctggctttccgccaggt

SEQ ID NO: 4380 - RNA, 34 nt, synthetic construct
  source 1..34: mol_type = other RNA
aatggggtcccccgactctggctttcagccaggt

SEQ ID NO: 4381 - RNA, 34 nt, synthetic construct
  source 1..34: mol_type = other RNA
aatggggtcccccgactctggctttcatccaggt

SEQ ID NO: 4382 - RNA, 34 nt, synthetic construct
  source 1..34: mol_type = other RNA
aatggggtcccccgactctggctttcacccaggt

SEQ ID NO: 4383 - RNA, 34 nt, synthetic construct
  source 1..34: mol_type = other RNA
aatggggtcccccgactctggctttccaccaggt

SEQ ID NO: 4384 - RNA, 34 nt, synthetic construct
  source 1..34: mol_type = other RNA
aatggggtcccccgactctggctttcaaccaggt

SEQ ID NO: 4385 - RNA, 34 nt, synthetic construct
  source 1..34: mol_type = other RNA
aatggggtcccccgactctggctttcggccaggt

SEQ ID NO: 4386 - RNA, 34 nt, synthetic construct
  source 1..34: mol_type = other RNA
aatggggtcccccgactctggctttcgtccaggt

SEQ ID NO: 4387 - RNA, 34 nt, synthetic construct
  source 1..34: mol_type = other RNA
aatggggtcccccgactctggctttcttccaggt

SEQ ID NO: 4388 - RNA, 34 nt, synthetic construct
  source 1..34: mol_type = other RNA
aatggggtcccccgactctggctttctcccaggt

SEQ ID NO: 4389 - RNA, 35 nt, synthetic construct
  source 1..35: mol_type = other RNA
gaatggggtcccccgactctggctttcaaccaggt

SEQ ID NO: 4390 - RNA, 35 nt, synthetic construct
  source 1..35: mol_type = other RNA
gaatggggtcccccgactctggctttcttccaggt

SEQ ID NO: 4391 - RNA, 35 nt, synthetic construct
  source 1..35: mol_type = other RNA
gaatggggtcccccgactctggctttcggccaggt

SEQ ID NO: 4392 - RNA, 35 nt, synthetic construct
  source 1..35: mol_type = other RNA
gaatggggtcccccgactctggctttccaccaggt

SEQ ID NO: 4393 - RNA, 35 nt, synthetic construct
  source 1..35: mol_type = other RNA
gaatggggtcccccgactctggctttctaccaggt

SEQ ID NO: 4394 - RNA, 35 nt, synthetic construct
  source 1..35: mol_type = other RNA
gaatggggtcccccgactctggctttctcccaggt

SEQ ID NO: 4395 - RNA, 35 nt, synthetic construct
  source 1..35: mol_type = other RNA
gaatggggtcccccgactctggctttcgcccaggt

SEQ ID NO: 4396 - RNA, 35 nt, synthetic construct
  source 1..35: mol_type = other RNA
gaatggggtcccccgactctggctttcctccaggt

SEQ ID NO: 4397 - RNA, 35 nt, synthetic construct
  source 1..35: mol_type = other RNA
gaatggggtcccccgactctggctttcatccaggt

SEQ ID NO: 4398 - RNA, 35 nt, synthetic construct
  source 1..35: mol_type = other RNA
gaatggggtcccccgactctggctttcgaccaggt

SEQ ID NO: 4399 - RNA, 35 nt, synthetic construct
  source 1..35: mol_type = other RNA
gaatggggtcccccgactctggctttcacccaggt

SEQ ID NO: 4400 - RNA, 35 nt, synthetic construct
  source 1..35: mol_type = other RNA
gaatggggtcccccgactctggctttctgccaggt

SEQ ID NO: 4401 - RNA, 35 nt, synthetic construct
  source 1..35: mol_type = other RNA
gaatggggtcccccgactctggctttcgtccaggt

SEQ ID NO: 4402 - RNA, 35 nt, synthetic construct
  source 1..35: mol_type = other RNA
gaatggggtcccccgactctggctttcccccaggt

SEQ ID NO: 4403 - RNA, 35 nt, synthetic construct
  source 1..35: mol_type = other RNA
gaatggggtcccccgactctggctttccgccaggt

SEQ ID NO: 4404 - RNA, 35 nt, synthetic construct
  source 1..35: mol_type = other RNA
gaatggggtcccccgactctggctttcagccaggt

SEQ ID NO: 4405 - RNA, 36 nt, synthetic construct
  source 1..36: mol_type = other RNA
tgaatggggtcccccgactctggctttcggccaggt

SEQ ID NO: 4406 - RNA, 36 nt, synthetic construct
  source 1..36: mol_type = other RNA
tgaatggggtcccccgactctggctttcgaccaggt

SEQ ID NO: 4407 - RNA, 36 nt, synthetic construct
  source 1..36: mol_type = other RNA
tgaatggggtcccccgactctggctttcaaccaggt

SEQ ID NO: 4408 - RNA, 36 nt, synthetic construct
  source 1..36: mol_type = other RNA
tgaatggggtcccccgactctggctttcctccaggt

SEQ ID NO: 4409 - RNA, 36 nt, synthetic construct
  source 1..36: mol_type = other RNA
tgaatggggtcccccgactctggctttcccccaggt

SEQ ID NO: 4410 - RNA, 36 nt, synthetic construct
  source 1..36: mol_type = other RNA
tgaatggggtcccccgactctggctttccaccaggt

SEQ ID NO: 4411 - RNA, 36 nt, synthetic construct
  source 1..36: mol_type = other RNA
tgaatggggtcccccgactctggctttctcccaggt

SEQ ID NO: 4412 - RNA, 36 nt, synthetic construct
  source 1..36: mol_type = other RNA
tgaatggggtcccccgactctggctttcatccaggt

SEQ ID NO: 4413 - RNA, 36 nt, synthetic construct
  source 1..36: mol_type = other RNA
tgaatggggtcccccgactctggctttctgccaggt

SEQ ID NO: 4414 - RNA, 36 nt, synthetic construct
  source 1..36: mol_type = other RNA
tgaatggggtcccccgactctggctttctaccaggt

SEQ ID NO: 4415 - RNA, 36 nt, synthetic construct
  source 1..36: mol_type = other RNA
tgaatggggtcccccgactctggctttccgccaggt

SEQ ID NO: 4416 - RNA, 36 nt, synthetic construct
  source 1..36: mol_type = other RNA
tgaatggggtcccccgactctggctttcgtccaggt

SEQ ID NO: 4417 - RNA, 36 nt, synthetic construct
  source 1..36: mol_type = other RNA
tgaatggggtcccccgactctggctttcttccaggt

SEQ ID NO: 4418 - RNA, 36 nt, synthetic construct
  source 1..36: mol_type = other RNA
tgaatggggtcccccgactctggctttcagccaggt

SEQ ID NO: 4419 - RNA, 36 nt, synthetic construct
  source 1..36: mol_type = other RNA
tgaatggggtcccccgactctggctttcacccaggt

SEQ ID NO: 4420 - RNA, 36 nt, synthetic construct
  source 1..36: mol_type = other RNA
tgaatggggtcccccgactctggctttcgcccaggt

SEQ ID NO: 4421 - RNA, 37 nt, synthetic construct
  source 1..37: mol_type = other RNA
ctgaatggggtcccccgactctggctttccaccaggt

SEQ ID NO: 4422 - RNA, 37 nt, synthetic construct
  source 1..37: mol_type = other RNA
ctgaatggggtcccccgactctggctttcgcccaggt

SEQ ID NO: 4423 - RNA, 37 nt, synthetic construct
  source 1..37: mol_type = other RNA
ctgaatggggtcccccgactctggctttcagccaggt

SEQ ID NO: 4424 - RNA, 37 nt, synthetic construct
  source 1..37: mol_type = other RNA
ctgaatggggtcccccgactctggctttcgaccaggt

SEQ ID NO: 4425 - RNA, 37 nt, synthetic construct
  source 1..37: mol_type = other RNA
ctgaatggggtcccccgactctggctttcatccaggt

SEQ ID NO: 4426 - RNA, 37 nt, synthetic construct
  source 1..37: mol_type = other RNA
ctgaatggggtcccccgactctggctttccgccaggt

SEQ ID NO: 4427 - RNA, 37 nt, synthetic construct
  source 1..37: mol_type = other RNA
ctgaatggggtcccccgactctggctttcccccaggt

SEQ ID NO: 4428 - RNA, 37 nt, synthetic construct
  source 1..37: mol_type = other RNA
ctgaatggggtcccccgactctggctttcacccaggt

SEQ ID NO: 4429 - RNA, 37 nt, synthetic construct
  source 1..37: mol_type = other RNA
ctgaatggggtcccccgactctggctttcggccaggt

SEQ ID NO: 4430 - RNA, 37 nt, synthetic construct
  source 1..37: mol_type = other RNA
ctgaatggggtcccccgactctggctttcgtccaggt

SEQ ID NO: 4431 - RNA, 37 nt, synthetic construct
  source 1..37: mol_type = other RNA
ctgaatggggtcccccgactctggctttctcccaggt

SEQ ID NO: 4432 - RNA, 37 nt, synthetic construct
  source 1..37: mol_type = other RNA
ctgaatggggtcccccgactctggctttcttccaggt

SEQ ID NO: 4433 - RNA, 37 nt, synthetic construct
  source 1..37: mol_type = other RNA
ctgaatggggtcccccgactctggctttcaaccaggt

SEQ ID NO: 4434 - RNA, 37 nt, synthetic construct
  source 1..37: mol_type = other RNA
ctgaatggggtcccccgactctggctttcctccaggt

SEQ ID NO: 4435 - RNA, 37 nt, synthetic construct
  source 1..37: mol_type = other RNA
ctgaatggggtcccccgactctggctttctaccaggt

SEQ ID NO: 4436 - RNA, 37 nt, synthetic construct
  source 1..37: mol_type = other RNA
ctgaatggggtcccccgactctggctttctgccaggt

SEQ ID NO: 4437 - RNA, 38 nt, synthetic construct
  source 1..38: mol_type = other RNA
gctgaatggggtcccccgactctggctttctgccaggt

SEQ ID NO: 4438 - RNA, 38 nt, synthetic construct
  source 1..38: mol_type = other RNA
gctgaatggggtcccccgactctggctttcgaccaggt

SEQ ID NO: 4439 - RNA, 38 nt, synthetic construct
  source 1..38: mol_type = other RNA
gctgaatggggtcccccgactctggctttcccccaggt

SEQ ID NO: 4440 - RNA, 38 nt, synthetic construct
  source 1..38: mol_type = other RNA
gctgaatggggtcccccgactctggctttcgtccaggt

SEQ ID NO: 4441 - RNA, 38 nt, synthetic construct
  source 1..38: mol_type = other RNA
gctgaatggggtcccccgactctggctttccaccaggt

SEQ ID NO: 4442 - RNA, 38 nt, synthetic construct
  source 1..38: mol_type = other RNA
gctgaatggggtcccccgactctggctttcaaccaggt

SEQ ID NO: 4443 - RNA, 38 nt, synthetic construct
  source 1..38: mol_type = other RNA
gctgaatggggtcccccgactctggctttcggccaggt

SEQ ID NO: 4444 - RNA, 38 nt, synthetic construct
  source 1..38: mol_type = other RNA
gctgaatggggtcccccgactctggctttcctccaggt

SEQ ID NO: 4445 - RNA, 38 nt, synthetic construct
  source 1..38: mol_type = other RNA
gctgaatggggtcccccgactctggctttctaccaggt

SEQ ID NO: 4446 - RNA, 38 nt, synthetic construct
  source 1..38: mol_type = other RNA
gctgaatggggtcccccgactctggctttcttccaggt

SEQ ID NO: 4447 - RNA, 38 nt, synthetic construct
  source 1..38: mol_type = other RNA
gctgaatggggtcccccgactctggctttcatccaggt

SEQ ID NO: 4448 - RNA, 38 nt, synthetic construct
  source 1..38: mol_type = other RNA
gctgaatggggtcccccgactctggctttccgccaggt

SEQ ID NO: 4449 - RNA, 38 nt, synthetic construct
  source 1..38: mol_type = other RNA
gctgaatggggtcccccgactctggctttctcccaggt

SEQ ID NO: 4450 - RNA, 38 nt, synthetic construct
  source 1..38: mol_type = other RNA
gctgaatggggtcccccgactctggctttcacccaggt

SEQ ID NO: 4451 - RNA, 38 nt, synthetic construct
  source 1..38: mol_type = other RNA
gctgaatggggtcccccgactctggctttcagccaggt

SEQ ID NO: 4452 - RNA, 38 nt, synthetic construct
  source 1..38: mol_type = other RNA
gctgaatggggtcccccgactctggctttcgcccaggt

SEQ ID NO: 4453 - RNA, 39 nt, synthetic construct
  source 1..39: mol_type = other RNA
ggctgaatggggtcccccgactctggctttcaaccaggt

SEQ ID NO: 4454 - RNA, 39 nt, synthetic construct
  source 1..39: mol_type = other RNA
ggctgaatggggtcccccgactctggctttctgccaggt

SEQ ID NO: 4455 - RNA, 39 nt, synthetic construct
  source 1..39: mol_type = other RNA
ggctgaatggggtcccccgactctggctttcttccaggt

SEQ ID NO: 4456 - RNA, 39 nt, synthetic construct
  source 1..39: mol_type = other RNA
ggctgaatggggtcccccgactctggctttcagccaggt

SEQ ID NO: 4457 - RNA, 39 nt, synthetic construct
  source 1..39: mol_type = other RNA
ggctgaatggggtcccccgactctggctttctaccaggt

SEQ ID NO: 4458 - RNA, 39 nt, synthetic construct
  source 1..39: mol_type = other RNA
ggctgaatggggtcccccgactctggctttcgtccaggt

SEQ ID NO: 4459 - RNA, 39 nt, synthetic construct
  source 1..39: mol_type = other RNA
ggctgaatggggtcccccgactctggctttcggccaggt

SEQ ID NO: 4460 - RNA, 39 nt, synthetic construct
  source 1..39: mol_type = other RNA
ggctgaatggggtcccccgactctggctttcccccaggt

SEQ ID NO: 4461 - RNA, 39 nt, synthetic construct
  source 1..39: mol_type = other RNA
ggctgaatggggtcccccgactctggctttccgccaggt

SEQ ID NO: 4462 - RNA, 39 nt, synthetic construct
  source 1..39: mol_type = other RNA
ggctgaatggggtcccccgactctggctttcgcccaggt

SEQ ID NO: 4463 - RNA, 39 nt, synthetic construct
  source 1..39: mol_type = other RNA
ggctgaatggggtcccccgactctggctttcacccaggt

SEQ ID NO: 4464 - RNA, 39 nt, synthetic construct
  source 1..39: mol_type = other RNA
ggctgaatggggtcccccgactctggctttctcccaggt

SEQ ID NO: 4465 - RNA, 39 nt, synthetic construct
  source 1..39: mol_type = other RNA
ggctgaatggggtcccccgactctggctttccaccaggt

SEQ ID NO: 4466 - RNA, 39 nt, synthetic construct
  source 1..39: mol_type = other RNA
ggctgaatggggtcccccgactctggctttcatccaggt

SEQ ID NO: 4467 - RNA, 39 nt, synthetic construct
  source 1..39: mol_type = other RNA
ggctgaatggggtcccccgactctggctttcctccaggt

SEQ ID NO: 4468 - RNA, 39 nt, synthetic construct
  source 1..39: mol_type = other RNA
ggctgaatggggtcccccgactctggctttcgaccaggt

SEQ ID NO: 4469 - RNA, 40 nt, synthetic construct
  source 1..40: mol_type = other RNA
aggctgaatggggtcccccgactctggctttctcccaggt

SEQ ID NO: 4470 - RNA, 40 nt, synthetic construct
  source 1..40: mol_type = other RNA
aggctgaatggggtcccccgactctggctttccaccaggt

SEQ ID NO: 4471 - RNA, 40 nt, synthetic construct
  source 1..40: mol_type = other RNA
aggctgaatggggtcccccgactctggctttcatccaggt

SEQ ID NO: 4472 - RNA, 40 nt, synthetic construct
  source 1..40: mol_type = other RNA
aggctgaatggggtcccccgactctggctttcccccaggt

SEQ ID NO: 4473 - RNA, 40 nt, synthetic construct
  source 1..40: mol_type = other RNA
aggctgaatggggtcccccgactctggctttcgaccaggt

SEQ ID NO: 4474 - RNA, 40 nt, synthetic construct
  source 1..40: mol_type = other RNA
aggctgaatggggtcccccgactctggctttcctccaggt

SEQ ID NO: 4475 - RNA, 40 nt, synthetic construct
  source 1..40: mol_type = other RNA
aggctgaatggggtcccccgactctggctttcgcccaggt

SEQ ID NO: 4476 - RNA, 40 nt, synthetic construct
  source 1..40: mol_type = other RNA
aggctgaatggggtcccccgactctggctttcacccaggt

SEQ ID NO: 4477 - RNA, 40 nt, synthetic construct
  source 1..40: mol_type = other RNA
aggctgaatggggtcccccgactctggctttctaccaggt

SEQ ID NO: 4478 - RNA, 40 nt, synthetic construct
  source 1..40: mol_type = other RNA
aggctgaatggggtcccccgactctggctttccgccaggt

SEQ ID NO: 4479 - RNA, 40 nt, synthetic construct
  source 1..40: mol_type = other RNA
aggctgaatggggtcccccgactctggctttcggccaggt

SEQ ID NO: 4480 - RNA, 40 nt, synthetic construct
  source 1..40: mol_type = other RNA
aggctgaatggggtcccccgactctggctttcagccaggt

SEQ ID NO: 4481 - RNA, 40 nt, synthetic construct
  source 1..40: mol_type = other RNA
aggctgaatggggtcccccgactctggctttcaaccaggt

SEQ ID NO: 4482 - RNA, 40 nt, synthetic construct
  source 1..40: mol_type = other RNA
aggctgaatggggtcccccgactctggctttcttccaggt

SEQ ID NO: 4483 - RNA, 40 nt, synthetic construct
  source 1..40: mol_type = other RNA
aggctgaatggggtcccccgactctggctttctgccaggt

SEQ ID NO: 4484 - RNA, 40 nt, synthetic construct
  source 1..40: mol_type = other RNA
aggctgaatggggtcccccgactctggctttcgtccaggt

SEQ ID NO: 4485 - RNA, 41 nt, synthetic construct
  source 1..41: mol_type = other RNA
gaggctgaatggggtcccccgactctggctttctgccaggt

SEQ ID NO: 4486 - RNA, 41 nt, synthetic construct
  source 1..41: mol_type = other RNA
gaggctgaatggggtcccccgactctggctttcagccaggt

SEQ ID NO: 4487 - RNA, 41 nt, synthetic construct
  source 1..41: mol_type = other RNA
gaggctgaatggggtcccccgactctggctttcggccaggt

SEQ ID NO: 4488 - RNA, 41 nt, synthetic construct
  source 1..41: mol_type = other RNA
gaggctgaatggggtcccccgactctggctttcacccaggt

SEQ ID NO: 4489 - RNA, 41 nt, synthetic construct
  source 1..41: mol_type = other RNA
gaggctgaatggggtcccccgactctggctttcatccaggt

SEQ ID NO: 4490 - RNA, 41 nt, synthetic construct
  source 1..41: mol_type = other RNA
gaggctgaatggggtcccccgactctggctttcccccaggt

SEQ ID NO: 4491 - RNA, 41 nt, synthetic construct
  source 1..41: mol_type = other RNA
gaggctgaatggggtcccccgactctggctttcttccaggt

SEQ ID NO: 4492 - RNA, 41 nt, synthetic construct
  source 1..41: mol_type = other RNA
gaggctgaatggggtcccccgactctggctttcgaccaggt

SEQ ID NO: 4493 - RNA, 41 nt, synthetic construct
  source 1..41: mol_type = other RNA
gaggctgaatggggtcccccgactctggctttcgcccaggt

SEQ ID NO: 4494 - RNA, 41 nt, synthetic construct
  source 1..41: mol_type = other RNA
gaggctgaatggggtcccccgactctggctttccgccaggt

SEQ ID NO: 4495 - RNA, 41 nt, synthetic construct
  source 1..41: mol_type = other RNA
gaggctgaatggggtcccccgactctggctttctaccaggt

SEQ ID NO: 4496 - RNA, 41 nt, synthetic construct
  source 1..41: mol_type = other RNA
gaggctgaatggggtcccccgactctggctttcaaccaggt

SEQ ID NO: 4497 - RNA, 41 nt, synthetic construct
  source 1..41: mol_type = other RNA
gaggctgaatggggtcccccgactctggctttcctccaggt

SEQ ID NO: 4498 - RNA, 41 nt, synthetic construct
  source 1..41: mol_type = other RNA
gaggctgaatggggtcccccgactctggctttcgtccaggt

SEQ ID NO: 4499 - RNA, 41 nt, synthetic construct
  source 1..41: mol_type = other RNA
gaggctgaatggggtcccccgactctggctttccaccaggt

SEQ ID NO: 4500 - RNA, 41 nt, synthetic construct
  source 1..41: mol_type = other RNA
gaggctgaatggggtcccccgactctggctttctcccaggt

SEQ ID NO: 4501 - RNA, 42 nt, synthetic construct
  source 1..42: mol_type = other RNA
ggaggctgaatggggtcccccgactctggctttccgccaggt

SEQ ID NO: 4502 - RNA, 42 nt, synthetic construct
  source 1..42: mol_type = other RNA
ggaggctgaatggggtcccccgactctggctttctcccaggt

SEQ ID NO: 4503 - RNA, 42 nt, synthetic construct
  source 1..42: mol_type = other RNA
ggaggctgaatggggtcccccgactctggctttcttccaggt

SEQ ID NO: 4504 - RNA, 42 nt, synthetic construct
  source 1..42: mol_type = other RNA
ggaggctgaatggggtcccccgactctggctttcccccaggt

SEQ ID NO: 4505 - RNA, 42 nt, synthetic construct
  source 1..42: mol_type = other RNA
ggaggctgaatggggtcccccgactctggctttcctccaggt

SEQ ID NO: 4506 - RNA, 42 nt, synthetic construct
  source 1..42: mol_type = other RNA
ggaggctgaatggggtcccccgactctggctttccaccaggt

SEQ ID NO: 4507 - RNA, 42 nt, synthetic construct
  source 1..42: mol_type = other RNA
ggaggctgaatggggtcccccgactctggctttcggccaggt

SEQ ID NO: 4508 - RNA, 42 nt, synthetic construct
  source 1..42: mol_type = other RNA
ggaggctgaatggggtcccccgactctggctttcatccaggt

SEQ ID NO: 4509 - RNA, 42 nt, synthetic construct
  source 1..42: mol_type = other RNA
ggaggctgaatggggtcccccgactctggctttcgcccaggt

SEQ ID NO: 4510 - RNA, 42 nt, synthetic construct
  source 1..42: mol_type = other RNA
ggaggctgaatggggtcccccgactctggctttcacccaggt

SEQ ID NO: 4511 - RNA, 42 nt, synthetic construct
  source 1..42: mol_type = other RNA
ggaggctgaatggggtcccccgactctggctttctgccaggt

SEQ ID NO: 4512 - RNA, 42 nt, synthetic construct
  source 1..42: mol_type = other RNA
ggaggctgaatggggtcccccgactctggctttcaaccaggt

SEQ ID NO: 4513 - RNA, 42 nt, synthetic construct
  source 1..42: mol_type = other RNA
ggaggctgaatggggtcccccgactctggctttcgtccaggt

SEQ ID NO: 4514 - RNA, 42 nt, synthetic construct
  source 1..42: mol_type = other RNA
ggaggctgaatggggtcccccgactctggctttctaccaggt

SEQ ID NO: 4515 - RNA, 42 nt, synthetic construct
  source 1..42: mol_type = other RNA
ggaggctgaatggggtcccccgactctggctttcgaccaggt

SEQ ID NO: 4516 - RNA, 42 nt, synthetic construct
  source 1..42: mol_type = other RNA
ggaggctgaatggggtcccccgactctggctttcagccaggt

SEQ ID NO: 4517 - RNA, 43 nt, synthetic construct
  source 1..43: mol_type = other RNA
tggaggctgaatggggtcccccgactctggctttcccccaggt

SEQ ID NO: 4518 - RNA, 43 nt, synthetic construct
  source 1..43: mol_type = other RNA
tggaggctgaatggggtcccccgactctggctttcagccaggt

SEQ ID NO: 4519 - RNA, 43 nt, synthetic construct
  source 1..43: mol_type = other RNA
tggaggctgaatggggtcccccgactctggctttcaaccaggt

SEQ ID NO: 4520 - RNA, 43 nt, synthetic construct
  source 1..43: mol_type = other RNA
tggaggctgaatggggtcccccgactctggctttccaccaggt

SEQ ID NO: 4521 - RNA, 43 nt, synthetic construct
  source 1..43: mol_type = other RNA
tggaggctgaatggggtcccccgactctggctttctgccaggt

SEQ ID NO: 4522 - RNA, 43 nt, synthetic construct
  source 1..43: mol_type = other RNA
tggaggctgaatggggtcccccgactctggctttccgccaggt

SEQ ID NO: 4523 - RNA, 43 nt, synthetic construct
  source 1..43: mol_type = other RNA
tggaggctgaatggggtcccccgactctggctttcggccaggt

SEQ ID NO: 4524 - RNA, 43 nt, synthetic construct
  source 1..43: mol_type = other RNA
tggaggctgaatggggtcccccgactctggctttcttccaggt

SEQ ID NO: 4525 - RNA, 43 nt, synthetic construct
  source 1..43: mol_type = other RNA
tggaggctgaatggggtcccccgactctggctttcatccaggt

SEQ ID NO: 4526 - RNA, 43 nt, synthetic construct
  source 1..43: mol_type = other RNA
tggaggctgaatggggtcccccgactctggctttcctccaggt

SEQ ID NO: 4527 - RNA, 43 nt, synthetic construct
  source 1..43: mol_type = other RNA
tggaggctgaatggggtcccccgactctggctttctaccaggt

SEQ ID NO: 4528 - RNA, 43 nt, synthetic construct
  source 1..43: mol_type = other RNA
tggaggctgaatggggtcccccgactctggctttcgcccaggt

SEQ ID NO: 4529 - RNA, 43 nt, synthetic construct
  source 1..43: mol_type = other RNA
tggaggctgaatggggtcccccgactctggctttctcccaggt

SEQ ID NO: 4530 - RNA, 43 nt, synthetic construct
  source 1..43: mol_type = other RNA
tggaggctgaatggggtcccccgactctggctttcacccaggt

SEQ ID NO: 4531 - RNA, 43 nt, synthetic construct
  source 1..43: mol_type = other RNA
tggaggctgaatggggtcccccgactctggctttcgtccaggt

SEQ ID NO: 4532 - RNA, 43 nt, synthetic construct
  source 1..43: mol_type = other RNA
tggaggctgaatggggtcccccgactctggctttcgaccaggt

SEQ ID NO: 4533 - RNA, 44 nt, synthetic construct
  source 1..44: mol_type = other RNA
ttggaggctgaatggggtcccccgactctggctttcccccaggt

SEQ ID NO: 4534 - RNA, 44 nt, synthetic construct
  source 1..44: mol_type = other RNA
ttggaggctgaatggggtcccccgactctggctttcggccaggt

SEQ ID NO: 4535 - RNA, 44 nt, synthetic construct
  source 1..44: mol_type = other RNA
ttggaggctgaatggggtcccccgactctggctttctcccaggt

SEQ ID NO: 4536 - RNA, 44 nt, synthetic construct
  source 1..44: mol_type = other RNA
ttggaggctgaatggggtcccccgactctggctttcgaccaggt

SEQ ID NO: 4537 - RNA, 44 nt, synthetic construct
  source 1..44: mol_type = other RNA
ttggaggctgaatggggtcccccgactctggctttcaaccaggt

SEQ ID NO: 4538 - RNA, 44 nt, synthetic construct
  source 1..44: mol_type = other RNA
ttggaggctgaatggggtcccccgactctggctttcgcccaggt

SEQ ID NO: 4539 - RNA, 44 nt, synthetic construct
  source 1..44: mol_type = other RNA
ttggaggctgaatggggtcccccgactctggctttctgccaggt

SEQ ID NO: 4540 - RNA, 44 nt, synthetic construct
  source 1..44: mol_type = other RNA
ttggaggctgaatggggtcccccgactctggctttcgtccaggt

SEQ ID NO: 4541 - RNA, 44 nt, synthetic construct
  source 1..44: mol_type = other RNA
ttggaggctgaatggggtcccccgactctggctttcttccaggt

SEQ ID NO: 4542 - RNA, 44 nt, synthetic construct
  source 1..44: mol_type = other RNA
ttggaggctgaatggggtcccccgactctggctttcacccaggt

SEQ ID NO: 4543 - RNA, 44 nt, synthetic construct
  source 1..44: mol_type = other RNA
ttggaggctgaatggggtcccccgactctggctttctaccaggt

SEQ ID NO: 4544 - RNA, 44 nt, synthetic construct
  source 1..44: mol_type = other RNA
ttggaggctgaatggggtcccccgactctggctttccgccaggt

SEQ ID NO: 4545 - RNA, 44 nt, synthetic construct
  source 1..44: mol_type = other RNA
ttggaggctgaatggggtcccccgactctggctttcagccaggt

SEQ ID NO: 4546 - RNA, 44 nt, synthetic construct
  source 1..44: mol_type = other RNA
ttggaggctgaatggggtcccccgactctggctttcctccaggt

SEQ ID NO: 4547 - RNA, 44 nt, synthetic construct
  source 1..44: mol_type = other RNA
ttggaggctgaatggggtcccccgactctggctttccaccaggt

SEQ ID NO: 4548 - RNA, 44 nt, synthetic construct
  source 1..44: mol_type = other RNA
ttggaggctgaatggggtcccccgactctggctttcatccaggt

SEQ ID NO: 4549 - RNA, 45 nt, synthetic construct
  source 1..45: mol_type = other RNA
tttggaggctgaatggggtcccccgactctggctttcgaccaggt

SEQ ID NO: 4550 - RNA, 45 nt, synthetic construct
  source 1..45: mol_type = other RNA
tttggaggctgaatggggtcccccgactctggctttcgcccaggt

SEQ ID NO: 4551 - RNA, 45 nt, synthetic construct
  source 1..45: mol_type = other RNA
tttggaggctgaatggggtcccccgactctggctttctaccaggt

SEQ ID NO: 4552 - RNA, 45 nt, synthetic construct
  source 1..45: mol_type = other RNA
tttggaggctgaatggggtcccccgactctggctttcacccaggt

SEQ ID NO: 4553 - RNA, 45 nt, synthetic construct
  source 1..45: mol_type = other RNA
tttggaggctgaatggggtcccccgactctggctttcatccaggt

SEQ ID NO: 4554 - RNA, 45 nt, synthetic construct
  source 1..45: mol_type = other RNA
tttggaggctgaatggggtcccccgactctggctttcctccaggt

SEQ ID NO: 4555 - RNA, 45 nt, synthetic construct
  source 1..45: mol_type = other RNA
tttggaggctgaatggggtcccccgactctggctttccgccaggt

SEQ ID NO: 4556 - RNA, 45 nt, synthetic construct
  source 1..45: mol_type = other RNA
tttggaggctgaatggggtcccccgactctggctttcggccaggt

SEQ ID NO: 4557 - RNA, 45 nt, synthetic construct
  source 1..45: mol_type = other RNA
tttggaggctgaatggggtcccccgactctggctttcccccaggt

SEQ ID NO: 4558 - RNA, 45 nt, synthetic construct
  source 1..45: mol_type = other RNA
tttggaggctgaatggggtcccccgactctggctttccaccaggt

SEQ ID NO: 4559 - RNA, 45 nt, synthetic construct
  source 1..45: mol_type = other RNA
tttggaggctgaatggggtcccccgactctggctttctgccaggt

SEQ ID NO: 4560 - RNA, 45 nt, synthetic construct
  source 1..45: mol_type = other RNA
tttggaggctgaatggggtcccccgactctggctttcgtccaggt

SEQ ID NO: 4561 - RNA, 45 nt, synthetic construct
  source 1..45: mol_type = other RNA
tttggaggctgaatggggtcccccgactctggctttctcccaggt

SEQ ID NO: 4562 - RNA, 45 nt, synthetic construct
  source 1..45: mol_type = other RNA
tttggaggctgaatggggtcccccgactctggctttcaaccaggt

SEQ ID NO: 4563 - RNA, 45 nt, synthetic construct
  source 1..45: mol_type = other RNA
tttggaggctgaatggggtcccccgactctggctttcttccaggt

SEQ ID NO: 4564 - RNA, 45 nt, synthetic construct
  source 1..45: mol_type = other RNA
tttggaggctgaatggggtcccccgactctggctttcagccaggt

SEQ ID NO: 4565 - RNA, 46 nt, synthetic construct
  source 1..46: mol_type = other RNA
ctttggaggctgaatggggtcccccgactctggctttcgtccaggt

SEQ ID NO: 4566 - RNA, 46 nt, synthetic construct
  source 1..46: mol_type = other RNA
ctttggaggctgaatggggtcccccgactctggctttctaccaggt

SEQ ID NO: 4567 - RNA, 46 nt, synthetic construct
  source 1..46: mol_type = other RNA
ctttggaggctgaatggggtcccccgactctggctttcggccaggt

SEQ ID NO: 4568 - RNA, 46 nt, synthetic construct
  source 1..46: mol_type = other RNA
ctttggaggctgaatggggtcccccgactctggctttcccccaggt

SEQ ID NO: 4569 - RNA, 46 nt, synthetic construct
  source 1..46: mol_type = other RNA
ctttggaggctgaatggggtcccccgactctggctttcgaccaggt

SEQ ID NO: 4570 - RNA, 46 nt, synthetic construct
  source 1..46: mol_type = other RNA
ctttggaggctgaatggggtcccccgactctggctttcagccaggt

SEQ ID NO: 4571 - RNA, 46 nt, synthetic construct
  source 1..46: mol_type = other RNA
ctttggaggctgaatggggtcccccgactctggctttcacccaggt

SEQ ID NO: 4572 - RNA, 46 nt, synthetic construct
  source 1..46: mol_type = other RNA
ctttggaggctgaatggggtcccccgactctggctttcatccaggt

SEQ ID NO: 4573 - RNA, 46 nt, synthetic construct
  source 1..46: mol_type = other RNA
ctttggaggctgaatggggtcccccgactctggctttcgcccaggt

SEQ ID NO: 4574 - RNA, 46 nt, synthetic construct
  source 1..46: mol_type = other RNA
ctttggaggctgaatggggtcccccgactctggctttcaaccaggt

SEQ ID NO: 4575 - RNA, 46 nt, synthetic construct
  source 1..46: mol_type = other RNA
ctttggaggctgaatggggtcccccgactctggctttccaccaggt

SEQ ID NO: 4576 - RNA, 46 nt, synthetic construct
  source 1..46: mol_type = other RNA
ctttggaggctgaatggggtcccccgactctggctttccgccaggt

SEQ ID NO: 4577 - RNA, 46 nt, synthetic construct
  source 1..46: mol_type = other RNA
ctttggaggctgaatggggtcccccgactctggctttctgccaggt

SEQ ID NO: 4578 - RNA, 46 nt, synthetic construct
  source 1..46: mol_type = other RNA
ctttggaggctgaatggggtcccccgactctggctttcctccaggt

SEQ ID NO: 4579 - RNA, 46 nt, synthetic construct
  source 1..46: mol_type = other RNA
ctttggaggctgaatggggtcccccgactctggctttctcccaggt

SEQ ID NO: 4580 - RNA, 46 nt, synthetic construct
  source 1..46: mol_type = other RNA
ctttggaggctgaatggggtcccccgactctggctttcttccaggt

SEQ ID NO: 4581 - RNA, 47 nt, synthetic construct
  source 1..47: mol_type = other RNA
tctttggaggctgaatggggtcccccgactctggctttctaccaggt

SEQ ID NO: 4582 - RNA, 47 nt, synthetic construct
  source 1..47: mol_type = other RNA
tctttggaggctgaatggggtcccccgactctggctttcggccaggt

SEQ ID NO: 4583 - RNA, 47 nt, synthetic construct
  source 1..47: mol_type = other RNA
tctttggaggctgaatggggtcccccgactctggctttcctccaggt

SEQ ID NO: 4584 - RNA, 47 nt, synthetic construct
  source 1..47: mol_type = other RNA
tctttggaggctgaatggggtcccccgactctggctttcccccaggt

SEQ ID NO: 4585 - RNA, 47 nt, synthetic construct
  source 1..47: mol_type = other RNA
tctttggaggctgaatggggtcccccgactctggctttcgcccaggt

SEQ ID NO: 4586 - RNA, 47 nt, synthetic construct
  source 1..47: mol_type = other RNA
tctttggaggctgaatggggtcccccgactctggctttccaccaggt

SEQ ID NO: 4587 - RNA, 47 nt, synthetic construct
  source 1..47: mol_type = other RNA
tctttggaggctgaatggggtcccccgactctggctttcgaccaggt

SEQ ID NO: 4588 - RNA, 47 nt, synthetic construct
  source 1..47: mol_type = other RNA
tctttggaggctgaatggggtcccccgactctggctttctgccaggt

SEQ ID NO: 4589 - RNA, 47 nt, synthetic construct
  source 1..47: mol_type = other RNA
tctttggaggctgaatggggtcccccgactctggctttcaaccaggt

SEQ ID NO: 4590 - RNA, 47 nt, synthetic construct
  source 1..47: mol_type = other RNA
tctttggaggctgaatggggtcccccgactctggctttcacccaggt

SEQ ID NO: 4591 - RNA, 47 nt, synthetic construct
  source 1..47: mol_type = other RNA
tctttggaggctgaatggggtcccccgactctggctttcttccaggt

SEQ ID NO: 4592 - RNA, 47 nt, synthetic construct
  source 1..47: mol_type = other RNA
tctttggaggctgaatggggtcccccgactctggctttcatccaggt

SEQ ID NO: 4593 - RNA, 47 nt, synthetic construct
  source 1..47: mol_type = other RNA
tctttggaggctgaatggggtcccccgactctggctttcagccaggt

SEQ ID NO: 4594 - RNA, 47 nt, synthetic construct
  source 1..47: mol_type = other RNA
tctttggaggctgaatggggtcccccgactctggctttctcccaggt

SEQ ID NO: 4595 - RNA, 47 nt, synthetic construct
  source 1..47: mol_type = other RNA
tctttggaggctgaatggggtcccccgactctggctttcgtccaggt

SEQ ID NO: 4596 - RNA, 47 nt, synthetic construct
  source 1..47: mol_type = other RNA
tctttggaggctgaatggggtcccccgactctggctttccgccaggt

SEQ ID NO: 4597 - RNA, 48 nt, synthetic construct
  source 1..48: mol_type = other RNA
ctctttggaggctgaatggggtcccccgactctggctttcaaccaggt

SEQ ID NO: 4598 - RNA, 48 nt, synthetic construct
  source 1..48: mol_type = other RNA
ctctttggaggctgaatggggtcccccgactctggctttcttccaggt

SEQ ID NO: 4599 - RNA, 48 nt, synthetic construct
  source 1..48: mol_type = other RNA
ctctttggaggctgaatggggtcccccgactctggctttctcccaggt

SEQ ID NO: 4600 - RNA, 48 nt, synthetic construct
  source 1..48: mol_type = other RNA
ctctttggaggctgaatggggtcccccgactctggctttccgccaggt

SEQ ID NO: 4601 - RNA, 48 nt, synthetic construct
  source 1..48: mol_type = other RNA
ctctttggaggctgaatggggtcccccgactctggctttcccccaggt

SEQ ID NO: 4602 - RNA, 48 nt, synthetic construct
  source 1..48: mol_type = other RNA
ctctttggaggctgaatggggtcccccgactctggctttcgtccaggt

SEQ ID NO: 4603 - RNA, 48 nt, synthetic construct
  source 1..48: mol_type = other RNA
ctctttggaggctgaatggggtcccccgactctggctttcgcccaggt

SEQ ID NO: 4604 - RNA, 48 nt, synthetic construct
  source 1..48: mol_type = other RNA
ctctttggaggctgaatggggtcccccgactctggctttcgaccaggt

SEQ ID NO: 4605 - RNA, 48 nt, synthetic construct
  source 1..48: mol_type = other RNA
ctctttggaggctgaatggggtcccccgactctggctttctaccaggt

SEQ ID NO: 4606 - RNA, 48 nt, synthetic construct
  source 1..48: mol_type = other RNA
ctctttggaggctgaatggggtcccccgactctggctttcatccaggt

SEQ ID NO: 4607 - RNA, 48 nt, synthetic construct
  source 1..48: mol_type = other RNA
ctctttggaggctgaatggggtcccccgactctggctttctgccaggt

SEQ ID NO: 4608 - RNA, 48 nt, synthetic construct
  source 1..48: mol_type = other RNA
ctctttggaggctgaatggggtcccccgactctggctttcctccaggt

SEQ ID NO: 4609 - RNA, 48 nt, synthetic construct
  source 1..48: mol_type = other RNA
ctctttggaggctgaatggggtcccccgactctggctttcggccaggt

SEQ ID NO: 4610 - RNA, 48 nt, synthetic construct
  source 1..48: mol_type = other RNA
ctctttggaggctgaatggggtcccccgactctggctttccaccaggt

SEQ ID NO: 4611 - RNA, 48 nt, synthetic construct
  source 1..48: mol_type = other RNA
ctctttggaggctgaatggggtcccccgactctggctttcagccaggt

SEQ ID NO: 4612 - RNA, 48 nt, synthetic construct
  source 1..48: mol_type = other RNA
ctctttggaggctgaatggggtcccccgactctggctttcacccaggt

SEQ ID NO: 4613 - RNA, 49 nt, synthetic construct
  source 1..49: mol_type = other RNA
cctctttggaggctgaatggggtcccccgactctggctttcttccaggt

SEQ ID NO: 4614 - RNA, 49 nt, synthetic construct
  source 1..49: mol_type = other RNA
cctctttggaggctgaatggggtcccccgactctggctttcgtccaggt

SEQ ID NO: 4615 - RNA, 49 nt, synthetic construct
  source 1..49: mol_type = other RNA
cctctttggaggctgaatggggtcccccgactctggctttcgcccaggt

SEQ ID NO: 4616 - RNA, 49 nt, synthetic construct
  source 1..49: mol_type = other RNA
cctctttggaggctgaatggggtcccccgactctggctttcaaccaggt

SEQ ID NO: 4617 - RNA, 49 nt, synthetic construct
  source 1..49: mol_type = other RNA
cctctttggaggctgaatggggtcccccgactctggctttctcccaggt

SEQ ID NO: 4618 - RNA, 49 nt, synthetic construct
  source 1..49: mol_type = other RNA
cctctttggaggctgaatggggtcccccgactctggctttcccccaggt

SEQ ID NO: 4619 - RNA, 49 nt, synthetic construct
  source 1..49: mol_type = other RNA
cctctttggaggctgaatggggtcccccgactctggctttccgccaggt

SEQ ID NO: 4620 - RNA, 49 nt, synthetic construct
  source 1..49: mol_type = other RNA
cctctttggaggctgaatggggtcccccgactctggctttcctccaggt

SEQ ID NO: 4621 - RNA, 49 nt, synthetic construct
  source 1..49: mol_type = other RNA
cctctttggaggctgaatggggtcccccgactctggctttcacccaggt

SEQ ID NO: 4622 - RNA, 49 nt, synthetic construct
  source 1..49: mol_type = other RNA
cctctttggaggctgaatggggtcccccgactctggctttctaccaggt

SEQ ID NO: 4623 - RNA, 49 nt, synthetic construct
  source 1..49: mol_type = other RNA
cctctttggaggctgaatggggtcccccgactctggctttcgaccaggt

SEQ ID NO: 4624 - RNA, 49 nt, synthetic construct
  source 1..49: mol_type = other RNA
cctctttggaggctgaatggggtcccccgactctggctttctgccaggt

SEQ ID NO: 4625 - RNA, 49 nt, synthetic construct
  source 1..49: mol_type = other RNA
cctctttggaggctgaatggggtcccccgactctggctttcatccaggt

SEQ ID NO: 4626 - RNA, 49 nt, synthetic construct
  source 1..49: mol_type = other RNA
cctctttggaggctgaatggggtcccccgactctggctttcagccaggt

SEQ ID NO: 4627 - RNA, 49 nt, synthetic construct
  source 1..49: mol_type = other RNA
cctctttggaggctgaatggggtcccccgactctggctttcggccaggt

SEQ ID NO: 4628 - RNA, 49 nt, synthetic construct
  source 1..49: mol_type = other RNA
cctctttggaggctgaatggggtcccccgactctggctttccaccaggt

SEQ ID NO: 4629 - RNA, 50 nt, synthetic construct
  source 1..50: mol_type = other RNA
gcctctttggaggctgaatggggtcccccgactctggctttctgccaggt

SEQ ID NO: 4630 - RNA, 50 nt, synthetic construct
  source 1..50: mol_type = other RNA
gcctctttggaggctgaatggggtcccccgactctggctttcccccaggt

SEQ ID NO: 4631 - RNA, 50 nt, synthetic construct
  source 1..50: mol_type = other RNA
gcctctttggaggctgaatggggtcccccgactctggctttctcccaggt

SEQ ID NO: 4632 - RNA, 50 nt, synthetic construct
  source 1..50: mol_type = other RNA
gcctctttggaggctgaatggggtcccccgactctggctttcttccaggt

SEQ ID NO: 4633 - RNA, 50 nt, synthetic construct
  source 1..50: mol_type = other RNA
gcctctttggaggctgaatggggtcccccgactctggctttccgccaggt

SEQ ID NO: 4634 - RNA, 50 nt, synthetic construct
  source 1..50: mol_type = other RNA
gcctctttggaggctgaatggggtcccccgactctggctttcaaccaggt

SEQ ID NO: 4635 - RNA, 50 nt, synthetic construct
  source 1..50: mol_type = other RNA
gcctctttggaggctgaatggggtcccccgactctggctttcacccaggt

SEQ ID NO: 4636 - RNA, 50 nt, synthetic construct
  source 1..50: mol_type = other RNA
gcctctttggaggctgaatggggtcccccgactctggctttctaccaggt

SEQ ID NO: 4637 - RNA, 50 nt, synthetic construct
  source 1..50: mol_type = other RNA
gcctctttggaggctgaatggggtcccccgactctggctttcggccaggt

SEQ ID NO: 4638 - RNA, 50 nt, synthetic construct
  source 1..50: mol_type = other RNA
gcctctttggaggctgaatggggtcccccgactctggctttccaccaggt

SEQ ID NO: 4639 - RNA, 50 nt, synthetic construct
  source 1..50: mol_type = other RNA
gcctctttggaggctgaatggggtcccccgactctggctttcagccaggt

SEQ ID NO: 4640 - RNA, 50 nt, synthetic construct
  source 1..50: mol_type = other RNA
gcctctttggaggctgaatggggtcccccgactctggctttcatccaggt

SEQ ID NO: 4641 - RNA, 50 nt, synthetic construct
  source 1..50: mol_type = other RNA
gcctctttggaggctgaatggggtcccccgactctggctttcgaccaggt

SEQ ID NO: 4642 - RNA, 50 nt, synthetic construct
  source 1..50: mol_type = other RNA
gcctctttggaggctgaatggggtcccccgactctggctttcgcccaggt

SEQ ID NO: 4643 - RNA, 50 nt, synthetic construct
  source 1..50: mol_type = other RNA
gcctctttggaggctgaatggggtcccccgactctggctttcctccaggt

SEQ ID NO: 4644 - RNA, 50 nt, synthetic construct
  source 1..50: mol_type = other RNA
gcctctttggaggctgaatggggtcccccgactctggctttcgtccaggt

SEQ ID NO: 4645 - RNA, 51 nt, synthetic construct
  source 1..51: mol_type = other RNA
agcctctttggaggctgaatggggtcccccgactctggctttcttccaggt

SEQ ID NO: 4646 - RNA, 51 nt, synthetic construct
  source 1..51: mol_type = other RNA
agcctctttggaggctgaatggggtcccccgactctggctttcgtccaggt

SEQ ID NO: 4647 - RNA, 51 nt, synthetic construct
  source 1..51: mol_type = other RNA
agcctctttggaggctgaatggggtcccccgactctggctttctaccaggt

SEQ ID NO: 4648 - RNA, 51 nt, synthetic construct
  source 1..51: mol_type = other RNA
agcctctttggaggctgaatggggtcccccgactctggctttcatccaggt

SEQ ID NO: 4649 - RNA, 51 nt, synthetic construct
  source 1..51: mol_type = other RNA
agcctctttggaggctgaatggggtcccccgactctggctttcgaccaggt

SEQ ID NO: 4650 - RNA, 51 nt, synthetic construct
  source 1..51: mol_type = other RNA
agcctctttggaggctgaatggggtcccccgactctggctttcccccaggt

SEQ ID NO: 4651 - RNA, 51 nt, synthetic construct
  source 1..51: mol_type = other RNA
agcctctttggaggctgaatggggtcccccgactctggctttcaaccaggt

SEQ ID NO: 4652 - RNA, 51 nt, synthetic construct
  source 1..51: mol_type = other RNA
agcctctttggaggctgaatggggtcccccgactctggctttcggccaggt

SEQ ID NO: 4653 - RNA, 51 nt, synthetic construct
  source 1..51: mol_type = other RNA
agcctctttggaggctgaatggggtcccccgactctggctttcagccaggt

SEQ ID NO: 4654 - RNA, 51 nt, synthetic construct
  source 1..51: mol_type = other RNA
agcctctttggaggctgaatggggtcccccgactctggctttccaccaggt

SEQ ID NO: 4655 - RNA, 51 nt, synthetic construct
  source 1..51: mol_type = other RNA
agcctctttggaggctgaatggggtcccccgactctggctttcacccaggt

SEQ ID NO: 4656 - RNA, 51 nt, synthetic construct
  source 1..51: mol_type = other RNA
agcctctttggaggctgaatggggtcccccgactctggctttcctccaggt

SEQ ID NO: 4657 - RNA, 51 nt, synthetic construct
  source 1..51: mol_type = other RNA
agcctctttggaggctgaatggggtcccccgactctggctttctgccaggt

SEQ ID NO: 4658 - RNA, 51 nt, synthetic construct
  source 1..51: mol_type = other RNA
agcctctttggaggctgaatggggtcccccgactctggctttctcccaggt

SEQ ID NO: 4659 - RNA, 51 nt, synthetic construct
  source 1..51: mol_type = other RNA
agcctctttggaggctgaatggggtcccccgactctggctttcgcccaggt

SEQ ID NO: 4660 - RNA, 51 nt, synthetic construct
  source 1..51: mol_type = other RNA
agcctctttggaggctgaatggggtcccccgactctggctttccgccaggt

SEQ ID NO: 4661 - RNA, 52 nt, synthetic construct
  source 1..52: mol_type = other RNA
aagcctctttggaggctgaatggggtcccccgactctggctttcacccaggt

SEQ ID NO: 4662 - RNA, 52 nt, synthetic construct
  source 1..52: mol_type = other RNA
aagcctctttggaggctgaatggggtcccccgactctggctttcaaccaggt

SEQ ID NO: 4663 - RNA, 52 nt, synthetic construct
  source 1..52: mol_type = other RNA
aagcctctttggaggctgaatggggtcccccgactctggctttctcccaggt

SEQ ID NO: 4664 - RNA, 52 nt, synthetic construct
  source 1..52: mol_type = other RNA
aagcctctttggaggctgaatggggtcccccgactctggctttcagccaggt

SEQ ID NO: 4665 - RNA, 52 nt, synthetic construct
  source 1..52: mol_type = other RNA
aagcctctttggaggctgaatggggtcccccgactctggctttctaccaggt

SEQ ID NO: 4666 - RNA, 52 nt, synthetic construct
  source 1..52: mol_type = other RNA
aagcctctttggaggctgaatggggtcccccgactctggctttcgaccaggt

SEQ ID NO: 4667 - RNA, 52 nt, synthetic construct
  source 1..52: mol_type = other RNA
aagcctctttggaggctgaatggggtcccccgactctggctttcgcccaggt

SEQ ID NO: 4668 - RNA, 52 nt, synthetic construct
  source 1..52: mol_type = other RNA
aagcctctttggaggctgaatggggtcccccgactctggctttccaccaggt

SEQ ID NO: 4669 - RNA, 52 nt, synthetic construct
  source 1..52: mol_type = other RNA
aagcctctttggaggctgaatggggtcccccgactctggctttcgtccaggt

SEQ ID NO: 4670 - RNA, 52 nt, synthetic construct
  source 1..52: mol_type = other RNA
aagcctctttggaggctgaatggggtcccccgactctggctttcggccaggt

SEQ ID NO: 4671 - RNA, 52 nt, synthetic construct
  source 1..52: mol_type = other RNA
aagcctctttggaggctgaatggggtcccccgactctggctttcccccaggt

SEQ ID NO: 4672 - RNA, 52 nt, synthetic construct
  source 1..52: mol_type = other RNA
aagcctctttggaggctgaatggggtcccccgactctggctttcttccaggt

SEQ ID NO: 4673 - RNA, 52 nt, synthetic construct
  source 1..52: mol_type = other RNA
aagcctctttggaggctgaatggggtcccccgactctggctttcatccaggt

SEQ ID NO: 4674 - RNA, 52 nt, synthetic construct
  source 1..52: mol_type = other RNA
aagcctctttggaggctgaatggggtcccccgactctggctttctgccaggt

SEQ ID NO: 4675 - RNA, 52 nt, synthetic construct
  source 1..52: mol_type = other RNA
aagcctctttggaggctgaatggggtcccccgactctggctttccgccaggt

SEQ ID NO: 4676 - RNA, 52 nt, synthetic construct
  source 1..52: mol_type = other RNA
aagcctctttggaggctgaatggggtcccccgactctggctttcctccaggt

SEQ ID NO: 4677 - RNA, 53 nt, synthetic construct
  source 1..53: mol_type = other RNA
aaagcctctttggaggctgaatggggtcccccgactctggctttcctccaggt

SEQ ID NO: 4678 - RNA, 53 nt, synthetic construct
  source 1..53: mol_type = other RNA
aaagcctctttggaggctgaatggggtcccccgactctggctttcttccaggt

SEQ ID NO: 4679 - RNA, 53 nt, synthetic construct
  source 1..53: mol_type = other RNA
aaagcctctttggaggctgaatggggtcccccgactctggctttcggccaggt

SEQ ID NO: 4680 - RNA, 53 nt, synthetic construct
  source 1..53: mol_type = other RNA
aaagcctctttggaggctgaatggggtcccccgactctggctttcaaccaggt

SEQ ID NO: 4681 - RNA, 53 nt, synthetic construct
  source 1..53: mol_type = other RNA
aaagcctctttggaggctgaatggggtcccccgactctggctttcccccaggt

SEQ ID NO: 4682 - RNA, 53 nt, synthetic construct
  source 1..53: mol_type = other RNA
aaagcctctttggaggctgaatggggtcccccgactctggctttcgaccaggt

SEQ ID NO: 4683 - RNA, 53 nt, synthetic construct
  source 1..53: mol_type = other RNA
aaagcctctttggaggctgaatggggtcccccgactctggctttcgtccaggt

SEQ ID NO: 4684 - RNA, 53 nt, synthetic construct
  source 1..53: mol_type = other RNA
aaagcctctttggaggctgaatggggtcccccgactctggctttcacccaggt

SEQ ID NO: 4685 - RNA, 53 nt, synthetic construct
  source 1..53: mol_type = other RNA
aaagcctctttggaggctgaatggggtcccccgactctggctttctcccaggt

SEQ ID NO: 4686 - RNA, 53 nt, synthetic construct
  source 1..53: mol_type = other RNA
aaagcctctttggaggctgaatggggtcccccgactctggctttctaccaggt

SEQ ID NO: 4687 - RNA, 53 nt, synthetic construct
  source 1..53: mol_type = other RNA
aaagcctctttggaggctgaatggggtcccccgactctggctttcagccaggt

SEQ ID NO: 4688 - RNA, 53 nt, synthetic construct
  source 1..53: mol_type = other RNA
aaagcctctttggaggctgaatggggtcccccgactctggctttctgccaggt

SEQ ID NO: 4689 - RNA, 53 nt, synthetic construct
  source 1..53: mol_type = other RNA
aaagcctctttggaggctgaatggggtcccccgactctggctttcgcccaggt

SEQ ID NO: 4690 - RNA, 53 nt, synthetic construct
  source 1..53: mol_type = other RNA
aaagcctctttggaggctgaatggggtcccccgactctggctttccaccaggt

SEQ ID NO: 4691 - RNA, 53 nt, synthetic construct
  source 1..53: mol_type = other RNA
aaagcctctttggaggctgaatggggtcccccgactctggctttccgccaggt

SEQ ID NO: 4692 - RNA, 53 nt, synthetic construct
  source 1..53: mol_type = other RNA
aaagcctctttggaggctgaatggggtcccccgactctggctttcatccaggt

SEQ ID NO: 4693 - RNA, 54 nt, synthetic construct
  source 1..54: mol_type = other RNA
caaagcctctttggaggctgaatggggtcccccgactctggctttcttccaggt

SEQ ID NO: 4694 - RNA, 54 nt, synthetic construct
  source 1..54: mol_type = other RNA
caaagcctctttggaggctgaatggggtcccccgactctggctttcgaccaggt

SEQ ID NO: 4695 - RNA, 54 nt, synthetic construct
  source 1..54: mol_type = other RNA
caaagcctctttggaggctgaatggggtcccccgactctggctttcgcccaggt

SEQ ID NO: 4696 - RNA, 54 nt, synthetic construct
  source 1..54: mol_type = other RNA
caaagcctctttggaggctgaatggggtcccccgactctggctttctaccaggt

SEQ ID NO: 4697 - RNA, 54 nt, synthetic construct
  source 1..54: mol_type = other RNA
caaagcctctttggaggctgaatggggtcccccgactctggctttcgtccaggt

SEQ ID NO: 4698 - RNA, 54 nt, synthetic construct
  source 1..54: mol_type = other RNA
caaagcctctttggaggctgaatggggtcccccgactctggctttcctccaggt

SEQ ID NO: 4699 - RNA, 54 nt, synthetic construct
  source 1..54: mol_type = other RNA
caaagcctctttggaggctgaatggggtcccccgactctggctttcaaccaggt

SEQ ID NO: 4700 - RNA, 54 nt, synthetic construct
  source 1..54: mol_type = other RNA
caaagcctctttggaggctgaatggggtcccccgactctggctttcatccaggt

SEQ ID NO: 4701 - RNA, 54 nt, synthetic construct
  source 1..54: mol_type = other RNA
caaagcctctttggaggctgaatggggtcccccgactctggctttccgccaggt

SEQ ID NO: 4702 - RNA, 54 nt, synthetic construct
  source 1..54: mol_type = other RNA
caaagcctctttggaggctgaatggggtcccccgactctggctttcccccaggt

SEQ ID NO: 4703 - RNA, 54 nt, synthetic construct
  source 1..54: mol_type = other RNA
caaagcctctttggaggctgaatggggtcccccgactctggctttctcccaggt

SEQ ID NO: 4704 - RNA, 54 nt, synthetic construct
  source 1..54: mol_type = other RNA
caaagcctctttggaggctgaatggggtcccccgactctggctttcggccaggt

SEQ ID NO: 4705 - RNA, 54 nt, synthetic construct
  source 1..54: mol_type = other RNA
caaagcctctttggaggctgaatggggtcccccgactctggctttctgccaggt

SEQ ID NO: 4706 - RNA, 54 nt, synthetic construct
  source 1..54: mol_type = other RNA
caaagcctctttggaggctgaatggggtcccccgactctggctttccaccaggt

SEQ ID NO: 4707 - RNA, 54 nt, synthetic construct
  source 1..54: mol_type = other RNA
caaagcctctttggaggctgaatggggtcccccgactctggctttcagccaggt

SEQ ID NO: 4708 - RNA, 54 nt, synthetic construct
  source 1..54: mol_type = other RNA
caaagcctctttggaggctgaatggggtcccccgactctggctttcacccaggt

SEQ ID NO: 4709 - RNA, 55 nt, synthetic construct
  source 1..55: mol_type = other RNA
gcaaagcctctttggaggctgaatggggtcccccgactctggctttcaaccaggt

SEQ ID NO: 4710 - RNA, 55 nt, synthetic construct
  source 1..55: mol_type = other RNA
gcaaagcctctttggaggctgaatggggtcccccgactctggctttcatccaggt

SEQ ID NO: 4711 - RNA, 55 nt, synthetic construct
  source 1..55: mol_type = other RNA
gcaaagcctctttggaggctgaatggggtcccccgactctggctttccaccaggt

SEQ ID NO: 4712 - RNA, 55 nt, synthetic construct
  source 1..55: mol_type = other RNA
gcaaagcctctttggaggctgaatggggtcccccgactctggctttcacccaggt

SEQ ID NO: 4713 - RNA, 55 nt, synthetic construct
  source 1..55: mol_type = other RNA
gcaaagcctctttggaggctgaatggggtcccccgactctggctttcgtccaggt

SEQ ID NO: 4714 - RNA, 55 nt, synthetic construct
  source 1..55: mol_type = other RNA
gcaaagcctctttggaggctgaatggggtcccccgactctggctttctgccaggt

SEQ ID NO: 4715 - RNA, 55 nt, synthetic construct
  source 1..55: mol_type = other RNA
gcaaagcctctttggaggctgaatggggtcccccgactctggctttcccccaggt

SEQ ID NO: 4716 - RNA, 55 nt, synthetic construct
  source 1..55: mol_type = other RNA
gcaaagcctctttggaggctgaatggggtcccccgactctggctttctaccaggt

SEQ ID NO: 4717 - RNA, 55 nt, synthetic construct
  source 1..55: mol_type = other RNA
gcaaagcctctttggaggctgaatggggtcccccgactctggctttcgcccaggt

SEQ ID NO: 4718 - RNA, 55 nt, synthetic construct
  source 1..55: mol_type = other RNA
gcaaagcctctttggaggctgaatggggtcccccgactctggctttcgaccaggt

SEQ ID NO: 4719 - RNA, 55 nt, synthetic construct
  source 1..55: mol_type = other RNA
gcaaagcctctttggaggctgaatggggtcccccgactctggctttcggccaggt

SEQ ID NO: 4720 - RNA, 55 nt, synthetic construct
  source 1..55: mol_type = other RNA
gcaaagcctctttggaggctgaatggggtcccccgactctggctttccgccaggt

SEQ ID NO: 4721 - RNA, 55 nt, synthetic construct
  source 1..55: mol_type = other RNA
gcaaagcctctttggaggctgaatggggtcccccgactctggctttcagccaggt

SEQ ID NO: 4722 - RNA, 55 nt, synthetic construct
  source 1..55: mol_type = other RNA
gcaaagcctctttggaggctgaatggggtcccccgactctggctttctcccaggt

SEQ ID NO: 4723 - RNA, 55 nt, synthetic construct
  source 1..55: mol_type = other RNA
gcaaagcctctttggaggctgaatggggtcccccgactctggctttcctccaggt

SEQ ID NO: 4724 - RNA, 55 nt, synthetic construct
  source 1..55: mol_type = other RNA
gcaaagcctctttggaggctgaatggggtcccccgactctggctttcttccaggt

SEQ ID NO: 4725 - RNA, 56 nt, synthetic construct
  source 1..56: mol_type = other RNA
agcaaagcctctttggaggctgaatggggtcccccgactctggctttctaccaggt

SEQ ID NO: 4726 - RNA, 56 nt, synthetic construct
  source 1..56: mol_type = other RNA
agcaaagcctctttggaggctgaatggggtcccccgactctggctttcgaccaggt

SEQ ID NO: 4727 - RNA, 56 nt, synthetic construct
  source 1..56: mol_type = other RNA
agcaaagcctctttggaggctgaatggggtcccccgactctggctttctcccaggt

SEQ ID NO: 4728 - RNA, 56 nt, synthetic construct
  source 1..56: mol_type = other RNA
agcaaagcctctttggaggctgaatggggtcccccgactctggctttcggccaggt

SEQ ID NO: 4729 - RNA, 56 nt, synthetic construct
  source 1..56: mol_type = other RNA
agcaaagcctctttggaggctgaatggggtcccccgactctggctttcaaccaggt

SEQ ID NO: 4730 - RNA, 56 nt, synthetic construct
  source 1..56: mol_type = other RNA
agcaaagcctctttggaggctgaatggggtcccccgactctggctttcgtccaggt

SEQ ID NO: 4731 - RNA, 56 nt, synthetic construct
  source 1..56: mol_type = other RNA
agcaaagcctctttggaggctgaatggggtcccccgactctggctttcctccaggt

SEQ ID NO: 4732 - RNA, 56 nt, synthetic construct
  source 1..56: mol_type = other RNA
agcaaagcctctttggaggctgaatggggtcccccgactctggctttcccccaggt

SEQ ID NO: 4733 - RNA, 56 nt, synthetic construct
  source 1..56: mol_type = other RNA
agcaaagcctctttggaggctgaatggggtcccccgactctggctttcagccaggt

SEQ ID NO: 4734 - RNA, 56 nt, synthetic construct
  source 1..56: mol_type = other RNA
agcaaagcctctttggaggctgaatggggtcccccgactctggctttcgcccaggt

SEQ ID NO: 4735 - RNA, 56 nt, synthetic construct
  source 1..56: mol_type = other RNA
agcaaagcctctttggaggctgaatggggtcccccgactctggctttcacccaggt

SEQ ID NO: 4736 - RNA, 56 nt, synthetic construct
  source 1..56: mol_type = other RNA
agcaaagcctctttggaggctgaatggggtcccccgactctggctttcttccaggt

SEQ ID NO: 4737 - RNA, 56 nt, synthetic construct
  source 1..56: mol_type = other RNA
agcaaagcctctttggaggctgaatggggtcccccgactctggctttctgccaggt

SEQ ID NO: 4738 - RNA, 56 nt, synthetic construct
  source 1..56: mol_type = other RNA
agcaaagcctctttggaggctgaatggggtcccccgactctggctttccgccaggt

SEQ ID NO: 4739 - RNA, 56 nt, synthetic construct
  source 1..56: mol_type = other RNA
agcaaagcctctttggaggctgaatggggtcccccgactctggctttcatccaggt

SEQ ID NO: 4740 - RNA, 56 nt, synthetic construct
  source 1..56: mol_type = other RNA
agcaaagcctctttggaggctgaatggggtcccccgactctggctttccaccaggt

SEQ ID NO: 4741 - RNA, 57 nt, synthetic construct
  source 1..57: mol_type = other RNA
cagcaaagcctctttggaggctgaatggggtcccccgactctggctttcttccaggt

SEQ ID NO: 4742 - RNA, 57 nt, synthetic construct
  source 1..57: mol_type = other RNA
cagcaaagcctctttggaggctgaatggggtcccccgactctggctttccgccaggt

SEQ ID NO: 4743 - RNA, 57 nt, synthetic construct
  source 1..57: mol_type = other RNA
cagcaaagcctctttggaggctgaatggggtcccccgactctggctttctaccaggt

SEQ ID NO: 4744 - RNA, 57 nt, synthetic construct
  source 1..57: mol_type = other RNA
cagcaaagcctctttggaggctgaatggggtcccccgactctggctttcccccaggt

SEQ ID NO: 4745 - RNA, 57 nt, synthetic construct
  source 1..57: mol_type = other RNA
cagcaaagcctctttggaggctgaatggggtcccccgactctggctttcgtccaggt

SEQ ID NO: 4746 - RNA, 57 nt, synthetic construct
  source 1..57: mol_type = other RNA
cagcaaagcctctttggaggctgaatggggtcccccgactctggctttcgaccaggt

SEQ ID NO: 4747 - RNA, 57 nt, synthetic construct
  source 1..57: mol_type = other RNA
cagcaaagcctctttggaggctgaatggggtcccccgactctggctttcctccaggt

SEQ ID NO: 4748 - RNA, 57 nt, synthetic construct
  source 1..57: mol_type = other RNA
cagcaaagcctctttggaggctgaatggggtcccccgactctggctttctgccaggt

SEQ ID NO: 4749 - RNA, 57 nt, synthetic construct
  source 1..57: mol_type = other RNA
cagcaaagcctctttggaggctgaatggggtcccccgactctggctttctcccaggt

SEQ ID NO: 4750 - RNA, 57 nt, synthetic construct
  source 1..57: mol_type = other RNA
cagcaaagcctctttggaggctgaatggggtcccccgactctggctttccaccaggt

SEQ ID NO: 4751 - RNA, 57 nt, synthetic construct
  source 1..57: mol_type = other RNA
cagcaaagcctctttggaggctgaatggggtcccccgactctggctttcatccaggt

SEQ ID NO: 4752 - RNA, 57 nt, synthetic construct
  source 1..57: mol_type = other RNA
cagcaaagcctctttggaggctgaatggggtcccccgactctggctttcaaccaggt

SEQ ID NO: 4753 - RNA, 57 nt, synthetic construct
  source 1..57: mol_type = other RNA
cagcaaagcctctttggaggctgaatggggtcccccgactctggctttcgcccaggt

SEQ ID NO: 4754 - RNA, 57 nt, synthetic construct
  source 1..57: mol_type = other RNA
cagcaaagcctctttggaggctgaatggggtcccccgactctggctttcggccaggt

SEQ ID NO: 4755 - RNA, 57 nt, synthetic construct
  source 1..57: mol_type = other RNA
cagcaaagcctctttggaggctgaatggggtcccccgactctggctttcagccaggt

SEQ ID NO: 4756 - RNA, 57 nt, synthetic construct
  source 1..57: mol_type = other RNA
cagcaaagcctctttggaggctgaatggggtcccccgactctggctttcacccaggt

SEQ ID NO: 4757 - RNA, 58 nt, synthetic construct
  source 1..58: mol_type = other RNA
acagcaaagcctctttggaggctgaatggggtcccccgactctggctttccgccaggt

SEQ ID NO: 4758 - RNA, 58 nt, synthetic construct
  source 1..58: mol_type = other RNA
acagcaaagcctctttggaggctgaatggggtcccccgactctggctttcctccaggt

SEQ ID NO: 4759 - RNA, 58 nt, synthetic construct
  source 1..58: mol_type = other RNA
acagcaaagcctctttggaggctgaatggggtcccccgactctggctttctaccaggt

SEQ ID NO: 4760 - RNA, 58 nt, synthetic construct
  source 1..58: mol_type = other RNA
acagcaaagcctctttggaggctgaatggggtcccccgactctggctttcagccaggt

SEQ ID NO: 4761 - RNA, 58 nt, synthetic construct
  source 1..58: mol_type = other RNA
acagcaaagcctctttggaggctgaatggggtcccccgactctggctttccaccaggt

SEQ ID NO: 4762 - RNA, 58 nt, synthetic construct
  source 1..58: mol_type = other RNA
acagcaaagcctctttggaggctgaatggggtcccccgactctggctttcaaccaggt

SEQ ID NO: 4763 - RNA, 58 nt, synthetic construct
  source 1..58: mol_type = other RNA
acagcaaagcctctttggaggctgaatggggtcccccgactctggctttctcccaggt

SEQ ID NO: 4764 - RNA, 58 nt, synthetic construct
  source 1..58: mol_type = other RNA
acagcaaagcctctttggaggctgaatggggtcccccgactctggctttcccccaggt

SEQ ID NO: 4765 - RNA, 58 nt, synthetic construct
  source 1..58: mol_type = other RNA
acagcaaagcctctttggaggctgaatggggtcccccgactctggctttcgcccaggt

SEQ ID NO: 4766 - RNA, 58 nt, synthetic construct
  source 1..58: mol_type = other RNA
acagcaaagcctctttggaggctgaatggggtcccccgactctggctttcgaccaggt

SEQ ID NO: 4767 - RNA, 58 nt, synthetic construct
  source 1..58: mol_type = other RNA
acagcaaagcctctttggaggctgaatggggtcccccgactctggctttcttccaggt

SEQ ID NO: 4768 - RNA, 58 nt, synthetic construct
  source 1..58: mol_type = other RNA
acagcaaagcctctttggaggctgaatggggtcccccgactctggctttcacccaggt

SEQ ID NO: 4769 - RNA, 58 nt, synthetic construct
  source 1..58: mol_type = other RNA
acagcaaagcctctttggaggctgaatggggtcccccgactctggctttcgtccaggt

SEQ ID NO: 4770 - RNA, 58 nt, synthetic construct
  source 1..58: mol_type = other RNA
acagcaaagcctctttggaggctgaatggggtcccccgactctggctttcggccaggt

SEQ ID NO: 4771 - RNA, 58 nt, synthetic construct
  source 1..58: mol_type = other RNA
acagcaaagcctctttggaggctgaatggggtcccccgactctggctttctgccaggt

SEQ ID NO: 4772 - RNA, 58 nt, synthetic construct
  source 1..58: mol_type = other RNA
acagcaaagcctctttggaggctgaatggggtcccccgactctggctttcatccaggt

SEQ ID NO: 4773 - RNA, 59 nt, synthetic construct
  source 1..59: mol_type = other RNA
cacagcaaagcctctttggaggctgaatggggtcccccgactctggctttctcccaggt

SEQ ID NO: 4774 - RNA, 59 nt, synthetic construct
  source 1..59: mol_type = other RNA
cacagcaaagcctctttggaggctgaatggggtcccccgactctggctttccaccaggt

SEQ ID NO: 4775 - RNA, 59 nt, synthetic construct
  source 1..59: mol_type = other RNA
cacagcaaagcctctttggaggctgaatggggtcccccgactctggctttcggccaggt

SEQ ID NO: 4776 - RNA, 59 nt, synthetic construct
  source 1..59: mol_type = other RNA
cacagcaaagcctctttggaggctgaatggggtcccccgactctggctttcacccaggt

SEQ ID NO: 4777 - RNA, 59 nt, synthetic construct
  source 1..59: mol_type = other RNA
cacagcaaagcctctttggaggctgaatggggtcccccgactctggctttctgccaggt

SEQ ID NO: 4778 - RNA, 59 nt, synthetic construct
  source 1..59: mol_type = other RNA
cacagcaaagcctctttggaggctgaatggggtcccccgactctggctttcagccaggt

SEQ ID NO: 4779 - RNA, 59 nt, synthetic construct
  source 1..59: mol_type = other RNA
cacagcaaagcctctttggaggctgaatggggtcccccgactctggctttccgccaggt

SEQ ID NO: 4780 - RNA, 59 nt, synthetic construct
  source 1..59: mol_type = other RNA
cacagcaaagcctctttggaggctgaatggggtcccccgactctggctttcatccaggt

SEQ ID NO: 4781 - RNA, 59 nt, synthetic construct
  source 1..59: mol_type = other RNA
cacagcaaagcctctttggaggctgaatggggtcccccgactctggctttcctccaggt

SEQ ID NO: 4782 - RNA, 59 nt, synthetic construct
  source 1..59: mol_type = other RNA
cacagcaaagcctctttggaggctgaatggggtcccccgactctggctttcaaccaggt

SEQ ID NO: 4783 - RNA, 59 nt, synthetic construct
  source 1..59: mol_type = other RNA
cacagcaaagcctctttggaggctgaatggggtcccccgactctggctttcgtccaggt

SEQ ID NO: 4784 - RNA, 59 nt, synthetic construct
  source 1..59: mol_type = other RNA
cacagcaaagcctctttggaggctgaatggggtcccccgactctggctttcgcccaggt

SEQ ID NO: 4785 - RNA, 59 nt, synthetic construct
  source 1..59: mol_type = other RNA
cacagcaaagcctctttggaggctgaatggggtcccccgactctggctttcccccaggt

SEQ ID NO: 4786 - RNA, 59 nt, synthetic construct
  source 1..59: mol_type = other RNA
cacagcaaagcctctttggaggctgaatggggtcccccgactctggctttcgaccaggt

SEQ ID NO: 4787 - RNA, 59 nt, synthetic construct
  source 1..59: mol_type = other RNA
cacagcaaagcctctttggaggctgaatggggtcccccgactctggctttctaccaggt

SEQ ID NO: 4788 - RNA, 59 nt, synthetic construct
  source 1..59: mol_type = other RNA
cacagcaaagcctctttggaggctgaatggggtcccccgactctggctttcttccaggt

SEQ ID NO: 4789 - RNA, 60 nt, synthetic construct
  source 1..60: mol_type = other RNA
acacagcaaagcctctttggaggctgaatggggtcccccgactctggctttccaccaggt

SEQ ID NO: 4790 - RNA, 60 nt, synthetic construct
  source 1..60: mol_type = other RNA
acacagcaaagcctctttggaggctgaatggggtcccccgactctggctttcggccaggt

SEQ ID NO: 4791 - RNA, 60 nt, synthetic construct
  source 1..60: mol_type = other RNA
acacagcaaagcctctttggaggctgaatggggtcccccgactctggctttcccccaggt

SEQ ID NO: 4792 - RNA, 60 nt, synthetic construct
  source 1..60: mol_type = other RNA
acacagcaaagcctctttggaggctgaatggggtcccccgactctggctttctgccaggt

SEQ ID NO: 4793 - RNA, 60 nt, synthetic construct
  source 1..60: mol_type = other RNA
acacagcaaagcctctttggaggctgaatggggtcccccgactctggctttcagccaggt

SEQ ID NO: 4794 - RNA, 60 nt, synthetic construct
  source 1..60: mol_type = other RNA
acacagcaaagcctctttggaggctgaatggggtcccccgactctggctttcacccaggt

SEQ ID NO: 4795 - RNA, 60 nt, synthetic construct
  source 1..60: mol_type = other RNA
acacagcaaagcctctttggaggctgaatggggtcccccgactctggctttctaccaggt

SEQ ID NO: 4796 - RNA, 60 nt, synthetic construct
  source 1..60: mol_type = other RNA
acacagcaaagcctctttggaggctgaatggggtcccccgactctggctttcttccaggt

SEQ ID NO: 4797 - RNA, 60 nt, synthetic construct
  source 1..60: mol_type = other RNA
acacagcaaagcctctttggaggctgaatggggtcccccgactctggctttcctccaggt

SEQ ID NO: 4798 - RNA, 60 nt, synthetic construct
  source 1..60: mol_type = other RNA
acacagcaaagcctctttggaggctgaatggggtcccccgactctggctttcgcccaggt

SEQ ID NO: 4799 - RNA, 60 nt, synthetic construct
  source 1..60: mol_type = other RNA
acacagcaaagcctctttggaggctgaatggggtcccccgactctggctttccgccaggt

SEQ ID NO: 4800 - RNA, 60 nt, synthetic construct
  source 1..60: mol_type = other RNA
acacagcaaagcctctttggaggctgaatggggtcccccgactctggctttcatccaggt

SEQ ID NO: 4801 - RNA, 60 nt, synthetic construct
  source 1..60: mol_type = other RNA
acacagcaaagcctctttggaggctgaatggggtcccccgactctggctttcaaccaggt

SEQ ID NO: 4802 - RNA, 60 nt, synthetic construct
  source 1..60: mol_type = other RNA
acacagcaaagcctctttggaggctgaatggggtcccccgactctggctttcgaccaggt

SEQ ID NO: 4803 - RNA, 60 nt, synthetic construct
  source 1..60: mol_type = other RNA
acacagcaaagcctctttggaggctgaatggggtcccccgactctggctttctcccaggt

SEQ ID NO: 4804 - RNA, 60 nt, synthetic construct
  source 1..60: mol_type = other RNA
acacagcaaagcctctttggaggctgaatggggtcccccgactctggctttcgtccaggt

SEQ ID NO: 4805 - RNA, 61 nt, synthetic construct
  source 1..61: mol_type = other RNA
cacacagcaaagcctctttggaggctgaatggggtcccccgactctggctttcgcccaggt

SEQ ID NO: 4806 - RNA, 61 nt, synthetic construct
  source 1..61: mol_type = other RNA
cacacagcaaagcctctttggaggctgaatggggtcccccgactctggctttcacccaggt

SEQ ID NO: 4807 - RNA, 61 nt, synthetic construct
  source 1..61: mol_type = other RNA
cacacagcaaagcctctttggaggctgaatggggtcccccgactctggctttctcccaggt

SEQ ID NO: 4808 - RNA, 61 nt, synthetic construct
  source 1..61: mol_type = other RNA
cacacagcaaagcctctttggaggctgaatggggtcccccgactctggctttcggccaggt

SEQ ID NO: 4809 - RNA, 61 nt, synthetic construct
  source 1..61: mol_type = other RNA
cacacagcaaagcctctttggaggctgaatggggtcccccgactctggctttcccccaggt

SEQ ID NO: 4810 - RNA, 61 nt, synthetic construct
  source 1..61: mol_type = other RNA
cacacagcaaagcctctttggaggctgaatggggtcccccgactctggctttcgtccaggt

SEQ ID NO: 4811 - RNA, 61 nt, synthetic construct
  source 1..61: mol_type = other RNA
cacacagcaaagcctctttggaggctgaatggggtcccccgactctggctttcaaccaggt

SEQ ID NO: 4812 - RNA, 61 nt, synthetic construct
  source 1..61: mol_type = other RNA
cacacagcaaagcctctttggaggctgaatggggtcccccgactctggctttccaccaggt

SEQ ID NO: 4813 - RNA, 61 nt, synthetic construct
  source 1..61: mol_type = other RNA
cacacagcaaagcctctttggaggctgaatggggtcccccgactctggctttccgccaggt

SEQ ID NO: 4814 - RNA, 61 nt, synthetic construct
  source 1..61: mol_type = other RNA
cacacagcaaagcctctttggaggctgaatggggtcccccgactctggctttcatccaggt

SEQ ID NO: 4815 - RNA, 61 nt, synthetic construct
  source 1..61: mol_type = other RNA
cacacagcaaagcctctttggaggctgaatggggtcccccgactctggctttcgaccaggt

SEQ ID NO: 4816 - RNA, 61 nt, synthetic construct
  source 1..61: mol_type = other RNA
cacacagcaaagcctctttggaggctgaatggggtcccccgactctggctttcctccaggt

SEQ ID NO: 4817 - RNA, 61 nt, synthetic construct
  source 1..61: mol_type = other RNA
cacacagcaaagcctctttggaggctgaatggggtcccccgactctggctttctgccaggt

SEQ ID NO: 4818 - RNA, 61 nt, synthetic construct
  source 1..61: mol_type = other RNA
cacacagcaaagcctctttggaggctgaatggggtcccccgactctggctttcttccaggt

SEQ ID NO: 4819 - RNA, 61 nt, synthetic construct
  source 1..61: mol_type = other RNA
cacacagcaaagcctctttggaggctgaatggggtcccccgactctggctttctaccaggt

SEQ ID NO: 4820 - RNA, 61 nt, synthetic construct
  source 1..61: mol_type = other RNA
cacacagcaaagcctctttggaggctgaatggggtcccccgactctggctttcagccaggt

SEQ ID NO: 4821 - RNA, 62 nt, synthetic construct
  source 1..62: mol_type = other RNA
gcacacagcaaagcctctttggaggctgaatggggtcccccgactctggctttcgaccaggt

SEQ ID NO: 4822 - RNA, 62 nt, synthetic construct
  source 1..62: mol_type = other RNA
gcacacagcaaagcctctttggaggctgaatggggtcccccgactctggctttcgtccaggt

SEQ ID NO: 4823 - RNA, 62 nt, synthetic construct
  source 1..62: mol_type = other RNA
gcacacagcaaagcctctttggaggctgaatggggtcccccgactctggctttctaccaggt

SEQ ID NO: 4824 - RNA, 62 nt, synthetic construct
  source 1..62: mol_type = other RNA
gcacacagcaaagcctctttggaggctgaatggggtcccccgactctggctttcctccaggt

SEQ ID NO: 4825 - RNA, 62 nt, synthetic construct
  source 1..62: mol_type = other RNA
gcacacagcaaagcctctttggaggctgaatggggtcccccgactctggctttcaaccaggt

SEQ ID NO: 4826 - RNA, 62 nt, synthetic construct
  source 1..62: mol_type = other RNA
gcacacagcaaagcctctttggaggctgaatggggtcccccgactctggctttcccccaggt

SEQ ID NO: 4827 - RNA, 62 nt, synthetic construct
  source 1..62: mol_type = other RNA
gcacacagcaaagcctctttggaggctgaatggggtcccccgactctggctttcttccaggt

SEQ ID NO: 4828 - RNA, 62 nt, synthetic construct
  source 1..62: mol_type = other RNA
gcacacagcaaagcctctttggaggctgaatggggtcccccgactctggctttcacccaggt

SEQ ID NO: 4829 - RNA, 62 nt, synthetic construct
  source 1..62: mol_type = other RNA
gcacacagcaaagcctctttggaggctgaatggggtcccccgactctggctttctcccaggt

SEQ ID NO: 4830 - RNA, 62 nt, synthetic construct
  source 1..62: mol_type = other RNA
gcacacagcaaagcctctttggaggctgaatggggtcccccgactctggctttcggccaggt

SEQ ID NO: 4831 - RNA, 62 nt, synthetic construct
  source 1..62: mol_type = other RNA
gcacacagcaaagcctctttggaggctgaatggggtcccccgactctggctttccaccaggt

SEQ ID NO: 4832 - RNA, 62 nt, synthetic construct
  source 1..62: mol_type = other RNA
gcacacagcaaagcctctttggaggctgaatggggtcccccgactctggctttcatccaggt

SEQ ID NO: 4833 - RNA, 62 nt, synthetic construct
  source 1..62: mol_type = other RNA
gcacacagcaaagcctctttggaggctgaatggggtcccccgactctggctttcagccaggt

SEQ ID NO: 4834 - RNA, 62 nt, synthetic construct
  source 1..62: mol_type = other RNA
gcacacagcaaagcctctttggaggctgaatggggtcccccgactctggctttccgccaggt

SEQ ID NO: 4835 - RNA, 62 nt, synthetic construct
  source 1..62: mol_type = other RNA
gcacacagcaaagcctctttggaggctgaatggggtcccccgactctggctttctgccaggt

SEQ ID NO: 4836 - RNA, 62 nt, synthetic construct
  source 1..62: mol_type = other RNA
gcacacagcaaagcctctttggaggctgaatggggtcccccgactctggctttcgcccaggt

SEQ ID NO: 4837 - RNA, 63 nt, synthetic construct
  source 1..63: mol_type = other RNA
tgcacacagcaaagcctctttggaggctgaatggggtcccccgactctggctttcggccaggt

SEQ ID NO: 4838 - RNA, 63 nt, synthetic construct
  source 1..63: mol_type = other RNA
tgcacacagcaaagcctctttggaggctgaatggggtcccccgactctggctttctgccaggt

SEQ ID NO: 4839 - RNA, 63 nt, synthetic construct
  source 1..63: mol_type = other RNA
tgcacacagcaaagcctctttggaggctgaatggggtcccccgactctggctttcgtccaggt

SEQ ID NO: 4840 - RNA, 63 nt, synthetic construct
  source 1..63: mol_type = other RNA
tgcacacagcaaagcctctttggaggctgaatggggtcccccgactctggctttccgccaggt

SEQ ID NO: 4841 - RNA, 63 nt, synthetic construct
  source 1..63: mol_type = other RNA
tgcacacagcaaagcctctttggaggctgaatggggtcccccgactctggctttcctccaggt

SEQ ID NO: 4842 - RNA, 63 nt, synthetic construct
  source 1..63: mol_type = other RNA
tgcacacagcaaagcctctttggaggctgaatggggtcccccgactctggctttctcccaggt

SEQ ID NO: 4843 - RNA, 63 nt, synthetic construct
  source 1..63: mol_type = other RNA
tgcacacagcaaagcctctttggaggctgaatggggtcccccgactctggctttcaaccaggt

SEQ ID NO: 4844 - RNA, 63 nt, synthetic construct
  source 1..63: mol_type = other RNA
tgcacacagcaaagcctctttggaggctgaatggggtcccccgactctggctttcccccaggt

SEQ ID NO: 4845 - RNA, 63 nt, synthetic construct
  source 1..63: mol_type = other RNA
tgcacacagcaaagcctctttggaggctgaatggggtcccccgactctggctttcttccaggt

SEQ ID NO: 4846 - RNA, 63 nt, synthetic construct
  source 1..63: mol_type = other RNA
tgcacacagcaaagcctctttggaggctgaatggggtcccccgactctggctttcatccaggt

SEQ ID NO: 4847 - RNA, 63 nt, synthetic construct
  source 1..63: mol_type = other RNA
tgcacacagcaaagcctctttggaggctgaatggggtcccccgactctggctttcagccaggt

SEQ ID NO: 4848 - RNA, 63 nt, synthetic construct
  source 1..63: mol_type = other RNA
tgcacacagcaaagcctctttggaggctgaatggggtcccccgactctggctttcgcccaggt

SEQ ID NO: 4849 - RNA, 63 nt, synthetic construct
  source 1..63: mol_type = other RNA
tgcacacagcaaagcctctttggaggctgaatggggtcccccgactctggctttccaccaggt

SEQ ID NO: 4850 - RNA, 63 nt, synthetic construct
  source 1..63: mol_type = other RNA
tgcacacagcaaagcctctttggaggctgaatggggtcccccgactctggctttctaccaggt

SEQ ID NO: 4851 - RNA, 63 nt, synthetic construct
  source 1..63: mol_type = other RNA
tgcacacagcaaagcctctttggaggctgaatggggtcccccgactctggctttcacccaggt

SEQ ID NO: 4852 - RNA, 63 nt, synthetic construct
  source 1..63: mol_type = other RNA
tgcacacagcaaagcctctttggaggctgaatggggtcccccgactctggctttcgaccaggt

SEQ ID NO: 4853 - RNA, 64 nt, synthetic construct
  source 1..64: mol_type = other RNA
gtgcacacagcaaagcctctttggaggctgaatggggtcccccgactctggctttcgcccaggt

SEQ ID NO: 4854 - RNA, 64 nt, synthetic construct
  source 1..64: mol_type = other RNA
gtgcacacagcaaagcctctttggaggctgaatggggtcccccgactctggctttcgaccaggt

SEQ ID NO: 4855 - RNA, 64 nt, synthetic construct
  source 1..64: mol_type = other RNA
gtgcacacagcaaagcctctttggaggctgaatggggtcccccgactctggctttcttccaggt

SEQ ID NO: 4856 - RNA, 64 nt, synthetic construct
  source 1..64: mol_type = other RNA
gtgcacacagcaaagcctctttggaggctgaatggggtcccccgactctggctttcagccaggt

SEQ ID NO: 4857 - RNA, 64 nt, synthetic construct
  source 1..64: mol_type = other RNA
gtgcacacagcaaagcctctttggaggctgaatggggtcccccgactctggctttcgtccaggt

SEQ ID NO: 4858 - RNA, 64 nt, synthetic construct
  source 1..64: mol_type = other RNA
gtgcacacagcaaagcctctttggaggctgaatggggtcccccgactctggctttcctccaggt

SEQ ID NO: 4859 - RNA, 64 nt, synthetic construct
  source 1..64: mol_type = other RNA
gtgcacacagcaaagcctctttggaggctgaatggggtcccccgactctggctttcccccaggt

SEQ ID NO: 4860 - RNA, 64 nt, synthetic construct
  source 1..64: mol_type = other RNA
gtgcacacagcaaagcctctttggaggctgaatggggtcccccgactctggctttctgccaggt

SEQ ID NO: 4861 - RNA, 64 nt, synthetic construct
  source 1..64: mol_type = other RNA
gtgcacacagcaaagcctctttggaggctgaatggggtcccccgactctggctttcacccaggt

SEQ ID NO: 4862 - RNA, 64 nt, synthetic construct
  source 1..64: mol_type = other RNA
gtgcacacagcaaagcctctttggaggctgaatggggtcccccgactctggctttccaccaggt

SEQ ID NO: 4863 - RNA, 64 nt, synthetic construct
  source 1..64: mol_type = other RNA
gtgcacacagcaaagcctctttggaggctgaatggggtcccccgactctggctttcatccaggt

SEQ ID NO: 4864 - RNA, 64 nt, synthetic construct
  source 1..64: mol_type = other RNA
gtgcacacagcaaagcctctttggaggctgaatggggtcccccgactctggctttcggccaggt

SEQ ID NO: 4865 - RNA, 64 nt, synthetic construct
  source 1..64: mol_type = other RNA
gtgcacacagcaaagcctctttggaggctgaatggggtcccccgactctggctttccgccaggt

SEQ ID NO: 4866 - RNA, 64 nt, synthetic construct
  source 1..64: mol_type = other RNA
gtgcacacagcaaagcctctttggaggctgaatggggtcccccgactctggctttcaaccaggt

SEQ ID NO: 4867 - RNA, 64 nt, synthetic construct
  source 1..64: mol_type = other RNA
gtgcacacagcaaagcctctttggaggctgaatggggtcccccgactctggctttctcccaggt

SEQ ID NO: 4868 - RNA, 64 nt, synthetic construct
  source 1..64: mol_type = other RNA
gtgcacacagcaaagcctctttggaggctgaatggggtcccccgactctggctttctaccaggt

SEQ ID NO: 4869 - RNA, 65 nt, synthetic construct
  source 1..65: mol_type = other RNA
ggtgcacacagcaaagcctctttggaggctgaatggggtcccccgactctggctttcatccaggt

SEQ ID NO: 4870 - RNA, 65 nt, synthetic construct
  source 1..65: mol_type = other RNA
ggtgcacacagcaaagcctctttggaggctgaatggggtcccccgactctggctttcccccaggt

SEQ ID NO: 4871 - RNA, 65 nt, synthetic construct
  source 1..65: mol_type = other RNA
ggtgcacacagcaaagcctctttggaggctgaatggggtcccccgactctggctttcttccaggt

SEQ ID NO: 4872 - RNA, 65 nt, synthetic construct
  source 1..65: mol_type = other RNA
ggtgcacacagcaaagcctctttggaggctgaatggggtcccccgactctggctttcacccaggt

SEQ ID NO: 4873 - RNA, 65 nt, synthetic construct
  source 1..65: mol_type = other RNA
ggtgcacacagcaaagcctctttggaggctgaatggggtcccccgactctggctttctaccaggt

SEQ ID NO: 4874 - RNA, 65 nt, synthetic construct
  source 1..65: mol_type = other RNA
ggtgcacacagcaaagcctctttggaggctgaatggggtcccccgactctggctttctgccaggt

SEQ ID NO: 4875 - RNA, 65 nt, synthetic construct
  source 1..65: mol_type = other RNA
ggtgcacacagcaaagcctctttggaggctgaatggggtcccccgactctggctttcaaccaggt

SEQ ID NO: 4876 - RNA, 65 nt, synthetic construct
  source 1..65: mol_type = other RNA
ggtgcacacagcaaagcctctttggaggctgaatggggtcccccgactctggctttccgccaggt

SEQ ID NO: 4877 - RNA, 65 nt, synthetic construct
  source 1..65: mol_type = other RNA
ggtgcacacagcaaagcctctttggaggctgaatggggtcccccgactctggctttcgtccaggt

SEQ ID NO: 4878 - RNA, 65 nt, synthetic construct
  source 1..65: mol_type = other RNA
ggtgcacacagcaaagcctctttggaggctgaatggggtcccccgactctggctttcctccaggt

SEQ ID NO: 4879 - RNA, 65 nt, synthetic construct
  source 1..65: mol_type = other RNA
ggtgcacacagcaaagcctctttggaggctgaatggggtcccccgactctggctttcgcccaggt

SEQ ID NO: 4880 - RNA, 65 nt, synthetic construct
  source 1..65: mol_type = other RNA
ggtgcacacagcaaagcctctttggaggctgaatggggtcccccgactctggctttcgaccaggt

SEQ ID NO: 4881 - RNA, 65 nt, synthetic construct
  source 1..65: mol_type = other RNA
ggtgcacacagcaaagcctctttggaggctgaatggggtcccccgactctggctttcggccaggt

SEQ ID NO: 4882 - RNA, 65 nt, synthetic construct
  source 1..65: mol_type = other RNA
ggtgcacacagcaaagcctctttggaggctgaatggggtcccccgactctggctttcagccaggt

SEQ ID NO: 4883 - RNA, 65 nt, synthetic construct
  source 1..65: mol_type = other RNA
ggtgcacacagcaaagcctctttggaggctgaatggggtcccccgactctggctttccaccaggt

SEQ ID NO: 4884 - RNA, 65 nt, synthetic construct
  source 1..65: mol_type = other RNA
ggtgcacacagcaaagcctctttggaggctgaatggggtcccccgactctggctttctcccaggt

SEQ ID NO: 4885 - RNA, 66 nt, synthetic construct
  source 1..66: mol_type = other RNA
gggtgcacacagcaaagcctctttggaggctgaatggggtcccccgactctggctttcagccaggt

SEQ ID NO: 4886 - RNA, 66 nt, synthetic construct
  source 1..66: mol_type = other RNA
gggtgcacacagcaaagcctctttggaggctgaatggggtcccccgactctggctttcctccaggt

SEQ ID NO: 4887 - RNA, 66 nt, synthetic construct
  source 1..66: mol_type = other RNA
gggtgcacacagcaaagcctctttggaggctgaatggggtcccccgactctggctttcgaccaggt

SEQ ID NO: 4888 - RNA, 66 nt, synthetic construct
  source 1..66: mol_type = other RNA
gggtgcacacagcaaagcctctttggaggctgaatggggtcccccgactctggctttcgcccaggt

SEQ ID NO: 4889 - RNA, 66 nt, synthetic construct
  source 1..66: mol_type = other RNA
gggtgcacacagcaaagcctctttggaggctgaatggggtcccccgactctggctttcaaccaggt

SEQ ID NO: 4890 - RNA, 66 nt, synthetic construct
  source 1..66: mol_type = other RNA
gggtgcacacagcaaagcctctttggaggctgaatggggtcccccgactctggctttccgccaggt

SEQ ID NO: 4891 - RNA, 66 nt, synthetic construct
  source 1..66: mol_type = other RNA
gggtgcacacagcaaagcctctttggaggctgaatggggtcccccgactctggctttcggccaggt

SEQ ID NO: 4892 - RNA, 66 nt, synthetic construct
  source 1..66: mol_type = other RNA
gggtgcacacagcaaagcctctttggaggctgaatggggtcccccgactctggctttcttccaggt

SEQ ID NO: 4893 - RNA, 66 nt, synthetic construct
  source 1..66: mol_type = other RNA
gggtgcacacagcaaagcctctttggaggctgaatggggtcccccgactctggctttcccccaggt

SEQ ID NO: 4894 - RNA, 66 nt, synthetic construct
  source 1..66: mol_type = other RNA
gggtgcacacagcaaagcctctttggaggctgaatggggtcccccgactctggctttcacccaggt

SEQ ID NO: 4895 - RNA, 66 nt, synthetic construct
  source 1..66: mol_type = other RNA
gggtgcacacagcaaagcctctttggaggctgaatggggtcccccgactctggctttctgccaggt

SEQ ID NO: 4896 - RNA, 66 nt, synthetic construct
  source 1..66: mol_type = other RNA
gggtgcacacagcaaagcctctttggaggctgaatggggtcccccgactctggctttctcccaggt

SEQ ID NO: 4897 - RNA, 66 nt, synthetic construct
  source 1..66: mol_type = other RNA
gggtgcacacagcaaagcctctttggaggctgaatggggtcccccgactctggctttcatccaggt

SEQ ID NO: 4898 - RNA, 66 nt, synthetic construct
  source 1..66: mol_type = other RNA
gggtgcacacagcaaagcctctttggaggctgaatggggtcccccgactctggctttctaccaggt

SEQ ID NO: 4899 - RNA, 66 nt, synthetic construct
  source 1..66: mol_type = other RNA
gggtgcacacagcaaagcctctttggaggctgaatggggtcccccgactctggctttccaccaggt

SEQ ID NO: 4900 - RNA, 66 nt, synthetic construct
  source 1..66: mol_type = other RNA
gggtgcacacagcaaagcctctttggaggctgaatggggtcccccgactctggctttcgtccaggt

SEQ ID NO: 4901 - RNA, 67 nt, synthetic construct
  source 1..67: mol_type = other RNA
tgggtgcacacagcaaagcctctttggaggctgaatggggtcccccgactctggctttcctccaggt

SEQ ID NO: 4902 - RNA, 67 nt, synthetic construct
  source 1..67: mol_type = other RNA
tgggtgcacacagcaaagcctctttggaggctgaatggggtcccccgactctggctttcacccaggt

SEQ ID NO: 4903 - RNA, 67 nt, synthetic construct
  source 1..67: mol_type = other RNA
tgggtgcacacagcaaagcctctttggaggctgaatggggtcccccgactctggctttcgaccaggt

SEQ ID NO: 4904 - RNA, 67 nt, synthetic construct
  source 1..67: mol_type = other RNA
tgggtgcacacagcaaagcctctttggaggctgaatggggtcccccgactctggctttctgccaggt

SEQ ID NO: 4905 - RNA, 67 nt, synthetic construct
  source 1..67: mol_type = other RNA
tgggtgcacacagcaaagcctctttggaggctgaatggggtcccccgactctggctttccgccaggt

SEQ ID NO: 4906 - RNA, 67 nt, synthetic construct
  source 1..67: mol_type = other RNA
tgggtgcacacagcaaagcctctttggaggctgaatggggtcccccgactctggctttcaaccaggt

SEQ ID NO: 4907 - RNA, 67 nt, synthetic construct
  source 1..67: mol_type = other RNA
tgggtgcacacagcaaagcctctttggaggctgaatggggtcccccgactctggctttcggccaggt

SEQ ID NO: 4908 - RNA, 67 nt, synthetic construct
  source 1..67: mol_type = other RNA
tgggtgcacacagcaaagcctctttggaggctgaatggggtcccccgactctggctttcagccaggt

SEQ ID NO: 4909 - RNA, 67 nt, synthetic construct
  source 1..67: mol_type = other RNA
tgggtgcacacagcaaagcctctttggaggctgaatggggtcccccgactctggctttcatccaggt

SEQ ID NO: 4910 - RNA, 67 nt, synthetic construct
  source 1..67: mol_type = other RNA
tgggtgcacacagcaaagcctctttggaggctgaatggggtcccccgactctggctttcccccaggt

SEQ ID NO: 4911 - RNA, 67 nt, synthetic construct
  source 1..67: mol_type = other RNA
tgggtgcacacagcaaagcctctttggaggctgaatggggtcccccgactctggctttcgtccaggt

SEQ ID NO: 4912 - RNA, 67 nt, synthetic construct
  source 1..67: mol_type = other RNA
tgggtgcacacagcaaagcctctttggaggctgaatggggtcccccgactctggctttccaccaggt

SEQ ID NO: 4913 - RNA, 67 nt, synthetic construct
  source 1..67: mol_type = other RNA
tgggtgcacacagcaaagcctctttggaggctgaatggggtcccccgactctggctttctcccaggt

SEQ ID NO: 4914 - RNA, 67 nt, synthetic construct
  source 1..67: mol_type = other RNA
tgggtgcacacagcaaagcctctttggaggctgaatggggtcccccgactctggctttcgcccaggt

SEQ ID NO: 4915 - RNA, 67 nt, synthetic construct
  source 1..67: mol_type = other RNA
tgggtgcacacagcaaagcctctttggaggctgaatggggtcccccgactctggctttcttccaggt

SEQ ID NO: 4916 - RNA, 67 nt, synthetic construct
  source 1..67: mol_type = other RNA
tgggtgcacacagcaaagcctctttggaggctgaatggggtcccccgactctggctttctaccaggt

SEQ ID NO: 4917 - RNA, 68 nt, synthetic construct
  source 1..68: mol_type = other RNA
ctgggtgcacacagcaaagcctctttggaggctgaatggggtcccccgactctggctttcgtccaggt

SEQ ID NO: 4918 - RNA, 68 nt, synthetic construct
  source 1..68: mol_type = other RNA
ctgggtgcacacagcaaagcctctttggaggctgaatggggtcccccgactctggctttcggccaggt

SEQ ID NO: 4919 - RNA, 68 nt, synthetic construct
  source 1..68: mol_type = other RNA
ctgggtgcacacagcaaagcctctttggaggctgaatggggtcccccgactctggctttctcccaggt

SEQ ID NO: 4920 - RNA, 68 nt, synthetic construct
  source 1..68: mol_type = other RNA
ctgggtgcacacagcaaagcctctttggaggctgaatggggtcccccgactctggctttcccccaggt

SEQ ID NO: 4921 - RNA, 68 nt, synthetic construct
  source 1..68: mol_type = other RNA
ctgggtgcacacagcaaagcctctttggaggctgaatggggtcccccgactctggctttccaccaggt

SEQ ID NO: 4922 - RNA, 68 nt, synthetic construct
  source 1..68: mol_type = other RNA
ctgggtgcacacagcaaagcctctttggaggctgaatggggtcccccgactctggctttccgccaggt

SEQ ID NO: 4923 - RNA, 68 nt, synthetic construct
  source 1..68: mol_type = other RNA
ctgggtgcacacagcaaagcctctttggaggctgaatggggtcccccgactctggctttcacccaggt

SEQ ID NO: 4924 - RNA, 68 nt, synthetic construct
  source 1..68: mol_type = other RNA
ctgggtgcacacagcaaagcctctttggaggctgaatggggtcccccgactctggctttcagccaggt

SEQ ID NO: 4925 - RNA, 68 nt, synthetic construct
  source 1..68: mol_type = other RNA
ctgggtgcacacagcaaagcctctttggaggctgaatggggtcccccgactctggctttcgaccaggt

SEQ ID NO: 4926 - RNA, 68 nt, synthetic construct
  source 1..68: mol_type = other RNA
ctgggtgcacacagcaaagcctctttggaggctgaatggggtcccccgactctggctttcctccaggt

SEQ ID NO: 4927 - RNA, 68 nt, synthetic construct
  source 1..68: mol_type = other RNA
ctgggtgcacacagcaaagcctctttggaggctgaatggggtcccccgactctggctttcttccaggt

SEQ ID NO: 4928 - RNA, 68 nt, synthetic construct
  source 1..68: mol_type = other RNA
ctgggtgcacacagcaaagcctctttggaggctgaatggggtcccccgactctggctttcaaccaggt

SEQ ID NO: 4929 - RNA, 68 nt, synthetic construct
  source 1..68: mol_type = other RNA
ctgggtgcacacagcaaagcctctttggaggctgaatggggtcccccgactctggctttctaccaggt

SEQ ID NO: 4930 - RNA, 68 nt, synthetic construct
  source 1..68: mol_type = other RNA
ctgggtgcacacagcaaagcctctttggaggctgaatggggtcccccgactctggctttcatccaggt

SEQ ID NO: 4931 - RNA, 68 nt, synthetic construct
  source 1..68: mol_type = other RNA
ctgggtgcacacagcaaagcctctttggaggctgaatggggtcccccgactctggctttctgccaggt

SEQ ID NO: 4932 - RNA, 68 nt, synthetic construct
  source 1..68: mol_type = other RNA
ctgggtgcacacagcaaagcctctttggaggctgaatggggtcccccgactctggctttcgcccaggt

SEQ ID NO: 4933 - RNA, 69 nt, synthetic construct
  source 1..69: mol_type = other RNA
cctgggtgcacacagcaaagcctctttggaggctgaatggggtcccccgactctggctttcctccaggt

SEQ ID NO: 4934 - RNA, 69 nt, synthetic construct
  source 1..69: mol_type = other RNA
cctgggtgcacacagcaaagcctctttggaggctgaatggggtcccccgactctggctttctcccaggt

SEQ ID NO: 4935 - RNA, 69 nt, synthetic construct
  source 1..69: mol_type = other RNA
cctgggtgcacacagcaaagcctctttggaggctgaatggggtcccccgactctggctttccaccaggt

SEQ ID NO: 4936 - RNA, 69 nt, synthetic construct
  source 1..69: mol_type = other RNA
cctgggtgcacacagcaaagcctctttggaggctgaatggggtcccccgactctggctttctaccaggt

SEQ ID NO: 4937 - RNA, 69 nt, synthetic construct
  source 1..69: mol_type = other RNA
cctgggtgcacacagcaaagcctctttggaggctgaatggggtcccccgactctggctttccgccaggt

SEQ ID NO: 4938 - RNA, 69 nt, synthetic construct
  source 1..69: mol_type = other RNA
cctgggtgcacacagcaaagcctctttggaggctgaatggggtcccccgactctggctttcatccaggt

SEQ ID NO: 4939 - RNA, 69 nt, synthetic construct
  source 1..69: mol_type = other RNA
cctgggtgcacacagcaaagcctctttggaggctgaatggggtcccccgactctggctttcgcccaggt

SEQ ID NO: 4940 - RNA, 69 nt, synthetic construct
  source 1..69: mol_type = other RNA
cctgggtgcacacagcaaagcctctttggaggctgaatggggtcccccgactctggctttcagccaggt

SEQ ID NO: 4941 - RNA, 69 nt, synthetic construct
  source 1..69: mol_type = other RNA
cctgggtgcacacagcaaagcctctttggaggctgaatggggtcccccgactctggctttctgccaggt

SEQ ID NO: 4942 - RNA, 69 nt, synthetic construct
  source 1..69: mol_type = other RNA
cctgggtgcacacagcaaagcctctttggaggctgaatggggtcccccgactctggctttcgtccaggt

SEQ ID NO: 4943 - RNA, 69 nt, synthetic construct
  source 1..69: mol_type = other RNA
cctgggtgcacacagcaaagcctctttggaggctgaatggggtcccccgactctggctttcggccaggt

SEQ ID NO: 4944 - RNA, 69 nt, synthetic construct
  source 1..69: mol_type = other RNA
cctgggtgcacacagcaaagcctctttggaggctgaatggggtcccccgactctggctttcttccaggt

SEQ ID NO: 4945 - RNA, 69 nt, synthetic construct
  source 1..69: mol_type = other RNA
cctgggtgcacacagcaaagcctctttggaggctgaatggggtcccccgactctggctttcccccaggt

SEQ ID NO: 4946 - RNA, 69 nt, synthetic construct
  source 1..69: mol_type = other RNA
cctgggtgcacacagcaaagcctctttggaggctgaatggggtcccccgactctggctttcgaccaggt

SEQ ID NO: 4947 - RNA, 69 nt, synthetic construct
  source 1..69: mol_type = other RNA
cctgggtgcacacagcaaagcctctttggaggctgaatggggtcccccgactctggctttcacccaggt

SEQ ID NO: 4948 - RNA, 69 nt, synthetic construct
  source 1..69: mol_type = other RNA
cctgggtgcacacagcaaagcctctttggaggctgaatggggtcccccgactctggctttcaaccaggt

SEQ ID NO: 4949 - RNA, 70 nt, synthetic construct
  source 1..70: mol_type = other RNA
tcctgggtgcacacagcaaagcctctttggaggctgaatggggtcccccgactctggctttcccccaggt

SEQ ID NO: 4950 - RNA, 70 nt, synthetic construct
  source 1..70: mol_type = other RNA
tcctgggtgcacacagcaaagcctctttggaggctgaatggggtcccccgactctggctttcatccaggt

SEQ ID NO: 4951 - RNA, 70 nt, synthetic construct
  source 1..70: mol_type = other RNA
tcctgggtgcacacagcaaagcctctttggaggctgaatggggtcccccgactctggctttctaccaggt

SEQ ID NO: 4952 - RNA, 70 nt, synthetic construct
  source 1..70: mol_type = other RNA
tcctgggtgcacacagcaaagcctctttggaggctgaatggggtcccccgactctggctttcagccaggt

SEQ ID NO: 4953 - RNA, 70 nt, synthetic construct
  source 1..70: mol_type = other RNA
tcctgggtgcacacagcaaagcctctttggaggctgaatggggtcccccgactctggctttcacccaggt

SEQ ID NO: 4954 - RNA, 70 nt, synthetic construct
  source 1..70: mol_type = other RNA
tcctgggtgcacacagcaaagcctctttggaggctgaatggggtcccccgactctggctttcaaccaggt

SEQ ID NO: 4955 - RNA, 70 nt, synthetic construct
  source 1..70: mol_type = other RNA
tcctgggtgcacacagcaaagcctctttggaggctgaatggggtcccccgactctggctttcgtccaggt

SEQ ID NO: 4956 - RNA, 70 nt, synthetic construct
  source 1..70: mol_type = other RNA
tcctgggtgcacacagcaaagcctctttggaggctgaatggggtcccccgactctggctttctcccaggt

SEQ ID NO: 4957 - RNA, 70 nt, synthetic construct
  source 1..70: mol_type = other RNA
tcctgggtgcacacagcaaagcctctttggaggctgaatggggtcccccgactctggctttcctccaggt

SEQ ID NO: 4958 - RNA, 70 nt, synthetic construct
  source 1..70: mol_type = other RNA
tcctgggtgcacacagcaaagcctctttggaggctgaatggggtcccccgactctggctttcttccaggt

SEQ ID NO: 4959 - RNA, 70 nt, synthetic construct
  source 1..70: mol_type = other RNA
tcctgggtgcacacagcaaagcctctttggaggctgaatggggtcccccgactctggctttcggccaggt

SEQ ID NO: 4960 - RNA, 70 nt, synthetic construct
  source 1..70: mol_type = other RNA
tcctgggtgcacacagcaaagcctctttggaggctgaatggggtcccccgactctggctttcgcccaggt

SEQ ID NO: 4961 - RNA, 70 nt, synthetic construct
  source 1..70: mol_type = other RNA
tcctgggtgcacacagcaaagcctctttggaggctgaatggggtcccccgactctggctttccgccaggt

SEQ ID NO: 4962 - RNA, 70 nt, synthetic construct
  source 1..70: mol_type = other RNA
tcctgggtgcacacagcaaagcctctttggaggctgaatggggtcccccgactctggctttctgccaggt

SEQ ID NO: 4963 - RNA, 70 nt, synthetic construct
  source 1..70: mol_type = other RNA
tcctgggtgcacacagcaaagcctctttggaggctgaatggggtcccccgactctggctttccaccaggt

SEQ ID NO: 4964 - RNA, 70 nt, synthetic construct
  source 1..70: mol_type = other RNA
tcctgggtgcacacagcaaagcctctttggaggctgaatggggtcccccgactctggctttcgaccaggt

SEQ ID NO: 4965 - RNA, 71 nt, synthetic construct
  source 1..71: mol_type = other RNA
atcctgggtgcacacagcaaagcctctttggaggctgaatggggtcccccgactctggctttcagccaggt

SEQ ID NO: 4966 - RNA, 71 nt, synthetic construct
  source 1..71: mol_type = other RNA
atcctgggtgcacacagcaaagcctctttggaggctgaatggggtcccccgactctggctttcaaccaggt

SEQ ID NO: 4967 - RNA, 71 nt, synthetic construct
  source 1..71: mol_type = other RNA
atcctgggtgcacacagcaaagcctctttggaggctgaatggggtcccccgactctggctttcgaccaggt

SEQ ID NO: 4968 - RNA, 71 nt, synthetic construct
  source 1..71: mol_type = other RNA
atcctgggtgcacacagcaaagcctctttggaggctgaatggggtcccccgactctggctttcggccaggt

SEQ ID NO: 4969 - RNA, 71 nt, synthetic construct
  source 1..71: mol_type = other RNA
atcctgggtgcacacagcaaagcctctttggaggctgaatggggtcccccgactctggctttccgccaggt

SEQ ID NO: 4970 - RNA, 71 nt, synthetic construct
  source 1..71: mol_type = other RNA
atcctgggtgcacacagcaaagcctctttggaggctgaatggggtcccccgactctggctttctgccaggt

SEQ ID NO: 4971 - RNA, 71 nt, synthetic construct
  source 1..71: mol_type = other RNA
atcctgggtgcacacagcaaagcctctttggaggctgaatggggtcccccgactctggctttcccccaggt

SEQ ID NO: 4972 - RNA, 71 nt, synthetic construct
  source 1..71: mol_type = other RNA
atcctgggtgcacacagcaaagcctctttggaggctgaatggggtcccccgactctggctttctcccaggt

SEQ ID NO: 4973 - RNA, 71 nt, synthetic construct
  source 1..71: mol_type = other RNA
atcctgggtgcacacagcaaagcctctttggaggctgaatggggtcccccgactctggctttcgcccaggt

SEQ ID NO: 4974 - RNA, 71 nt, synthetic construct
  source 1..71: mol_type = other RNA
atcctgggtgcacacagcaaagcctctttggaggctgaatggggtcccccgactctggctttcatccaggt

SEQ ID NO: 4975 - RNA, 71 nt, synthetic construct
  source 1..71: mol_type = other RNA
atcctgggtgcacacagcaaagcctctttggaggctgaatggggtcccccgactctggctttcttccaggt

SEQ ID NO: 4976 - RNA, 71 nt, synthetic construct
  source 1..71: mol_type = other RNA
atcctgggtgcacacagcaaagcctctttggaggctgaatggggtcccccgactctggctttcgtccaggt

SEQ ID NO: 4977 - RNA, 71 nt, synthetic construct
  source 1..71: mol_type = other RNA
atcctgggtgcacacagcaaagcctctttggaggctgaatggggtcccccgactctggctttcctccaggt

SEQ ID NO: 4978 - RNA, 71 nt, synthetic construct
  source 1..71: mol_type = other RNA
atcctgggtgcacacagcaaagcctctttggaggctgaatggggtcccccgactctggctttccaccaggt

SEQ ID NO: 4979 - RNA, 71 nt, synthetic construct
  source 1..71: mol_type = other RNA
atcctgggtgcacacagcaaagcctctttggaggctgaatggggtcccccgactctggctttctaccaggt

SEQ ID NO: 4980 - RNA, 71 nt, synthetic construct
  source 1..71: mol_type = other RNA
atcctgggtgcacacagcaaagcctctttggaggctgaatggggtcccccgactctggctttcacccaggt

SEQ ID NO: 4981 - RNA, 72 nt, synthetic construct
  source 1..72: mol_type = other RNA
gatcctgggtgcacacagcaaagcctctttggaggctgaatggggtcccccgactctggctttctaccaggt

SEQ ID NO: 4982 - RNA, 72 nt, synthetic construct
  source 1..72: mol_type = other RNA
gatcctgggtgcacacagcaaagcctctttggaggctgaatggggtcccccgactctggctttcctccaggt

SEQ ID NO: 4983 - RNA, 72 nt, synthetic construct
  source 1..72: mol_type = other RNA
gatcctgggtgcacacagcaaagcctctttggaggctgaatggggtcccccgactctggctttcttccaggt

SEQ ID NO: 4984 - RNA, 72 nt, synthetic construct
  source 1..72: mol_type = other RNA
gatcctgggtgcacacagcaaagcctctttggaggctgaatggggtcccccgactctggctttcccccaggt

SEQ ID NO: 4985 - RNA, 72 nt, synthetic construct
  source 1..72: mol_type = other RNA
gatcctgggtgcacacagcaaagcctctttggaggctgaatggggtcccccgactctggctttctcccaggt

SEQ ID NO: 4986 - RNA, 72 nt, synthetic construct
  source 1..72: mol_type = other RNA
gatcctgggtgcacacagcaaagcctctttggaggctgaatggggtcccccgactctggctttctgccaggt

SEQ ID NO: 4987 - RNA, 72 nt, synthetic construct
  source 1..72: mol_type = other RNA
gatcctgggtgcacacagcaaagcctctttggaggctgaatggggtcccccgactctggctttcggccaggt

SEQ ID NO: 4988 - RNA, 72 nt, synthetic construct
  source 1..72: mol_type = other RNA
gatcctgggtgcacacagcaaagcctctttggaggctgaatggggtcccccgactctggctttcacccaggt

SEQ ID NO: 4989 - RNA, 72 nt, synthetic construct
  source 1..72: mol_type = other RNA
gatcctgggtgcacacagcaaagcctctttggaggctgaatggggtcccccgactctggctttcgcccaggt

SEQ ID NO: 4990 - RNA, 72 nt, synthetic construct
  source 1..72: mol_type = other RNA
gatcctgggtgcacacagcaaagcctctttggaggctgaatggggtcccccgactctggctttccaccaggt

SEQ ID NO: 4991 - RNA, 72 nt, synthetic construct
  source 1..72: mol_type = other RNA
gatcctgggtgcacacagcaaagcctctttggaggctgaatggggtcccccgactctggctttcagccaggt

SEQ ID NO: 4992 - RNA, 72 nt, synthetic construct
  source 1..72: mol_type = other RNA
gatcctgggtgcacacagcaaagcctctttggaggctgaatggggtcccccgactctggctttcaaccaggt

SEQ ID NO: 4993 - RNA, 72 nt, synthetic construct
  source 1..72: mol_type = other RNA
gatcctgggtgcacacagcaaagcctctttggaggctgaatggggtcccccgactctggctttccgccaggt

SEQ ID NO: 4994 - RNA, 72 nt, synthetic construct
  source 1..72: mol_type = other RNA
gatcctgggtgcacacagcaaagcctctttggaggctgaatggggtcccccgactctggctttcgaccaggt

SEQ ID NO: 4995 - RNA, 72 nt, synthetic construct
  source 1..72: mol_type = other RNA
gatcctgggtgcacacagcaaagcctctttggaggctgaatggggtcccccgactctggctttcatccaggt

SEQ ID NO: 4996 - RNA, 72 nt, synthetic construct
  source 1..72: mol_type = other RNA
gatcctgggtgcacacagcaaagcctctttggaggctgaatggggtcccccgactctggctttcgtccaggt

SEQ ID NO: 4997 - RNA, 73 nt, synthetic construct
  source 1..73: mol_type = other RNA
ggatcctgggtgcacacagcaaagcctctttggaggctgaatggggtcccccgactctggctttcttccaggt

SEQ ID NO: 4998 - RNA, 73 nt, synthetic construct
  source 1..73: mol_type = other RNA
ggatcctgggtgcacacagcaaagcctctttggaggctgaatggggtcccccgactctggctttccaccaggt

SEQ ID NO: 4999 - RNA, 73 nt, synthetic construct
  source 1..73: mol_type = other RNA
ggatcctgggtgcacacagcaaagcctctttggaggctgaatggggtcccccgactctggctttcgtccaggt

SEQ ID NO: 5000 - RNA, 73 nt, synthetic construct
  source 1..73: mol_type = other RNA
ggatcctgggtgcacacagcaaagcctctttggaggctgaatggggtcccccgactctggctttcaaccaggt

SEQ ID NO: 5001 - RNA, 73 nt, synthetic construct
  source 1..73: mol_type = other RNA
ggatcctgggtgcacacagcaaagcctctttggaggctgaatggggtcccccgactctggctttcatccaggt

SEQ ID NO: 5002 - RNA, 73 nt, synthetic construct
  source 1..73: mol_type = other RNA
ggatcctgggtgcacacagcaaagcctctttggaggctgaatggggtcccccgactctggctttcgaccaggt

SEQ ID NO: 5003 - RNA, 73 nt, synthetic construct
  source 1..73: mol_type = other RNA
ggatcctgggtgcacacagcaaagcctctttggaggctgaatggggtcccccgactctggctttcacccaggt

SEQ ID NO: 5004 - RNA, 73 nt, synthetic construct
  source 1..73: mol_type = other RNA
ggatcctgggtgcacacagcaaagcctctttggaggctgaatggggtcccccgactctggctttcagccaggt

SEQ ID NO: 5005 - RNA, 73 nt, synthetic construct
  source 1..73: mol_type = other RNA
ggatcctgggtgcacacagcaaagcctctttggaggctgaatggggtcccccgactctggctttctaccaggt

SEQ ID NO: 5006 - RNA, 73 nt, synthetic construct
  source 1..73: mol_type = other RNA
ggatcctgggtgcacacagcaaagcctctttggaggctgaatggggtcccccgactctggctttctgccaggt

SEQ ID NO: 5007 - RNA, 73 nt, synthetic construct
  source 1..73: mol_type = other RNA
ggatcctgggtgcacacagcaaagcctctttggaggctgaatggggtcccccgactctggctttcccccaggt

SEQ ID NO: 5008 - RNA, 73 nt, synthetic construct
  source 1..73: mol_type = other RNA
ggatcctgggtgcacacagcaaagcctctttggaggctgaatggggtcccccgactctggctttctcccaggt

SEQ ID NO: 5009 - RNA, 73 nt, synthetic construct
  source 1..73: mol_type = other RNA
ggatcctgggtgcacacagcaaagcctctttggaggctgaatggggtcccccgactctggctttcgcccaggt

SEQ ID NO: 5010 - RNA, 73 nt, synthetic construct
  source 1..73: mol_type = other RNA
ggatcctgggtgcacacagcaaagcctctttggaggctgaatggggtcccccgactctggctttccgccaggt

SEQ ID NO: 5011 - RNA, 73 nt, synthetic construct
  source 1..73: mol_type = other RNA
ggatcctgggtgcacacagcaaagcctctttggaggctgaatggggtcccccgactctggctttcggccaggt

SEQ ID NO: 5012 - RNA, 73 nt, synthetic construct
  source 1..73: mol_type = other RNA
ggatcctgggtgcacacagcaaagcctctttggaggctgaatggggtcccccgactctggctttcctccaggt

SEQ ID NO: 5013 - RNA, 74 nt, synthetic construct
  source 1..74: mol_type = other RNA
gggatcctgggtgcacacagcaaagcctctttggaggctgaatggggtcccccgactctggctttctcccaggt

SEQ ID NO: 5014 - RNA, 74 nt, synthetic construct
  source 1..74: mol_type = other RNA
gggatcctgggtgcacacagcaaagcctctttggaggctgaatggggtcccccgactctggctttcgcccaggt

SEQ ID NO: 5015 - RNA, 74 nt, synthetic construct
  source 1..74: mol_type = other RNA
gggatcctgggtgcacacagcaaagcctctttggaggctgaatggggtcccccgactctggctttcagccaggt

SEQ ID NO: 5016 - RNA, 74 nt, synthetic construct
  source 1..74: mol_type = other RNA
gggatcctgggtgcacacagcaaagcctctttggaggctgaatggggtcccccgactctggctttctaccaggt

SEQ ID NO: 5017 - RNA, 74 nt, synthetic construct
  source 1..74: mol_type = other RNA
gggatcctgggtgcacacagcaaagcctctttggaggctgaatggggtcccccgactctggctttcaaccaggt

SEQ ID NO: 5018 - RNA, 74 nt, synthetic construct
  source 1..74: mol_type = other RNA
gggatcctgggtgcacacagcaaagcctctttggaggctgaatggggtcccccgactctggctttccaccaggt

SEQ ID NO: 5019 - RNA, 74 nt, synthetic construct
  source 1..74: mol_type = other RNA
gggatcctgggtgcacacagcaaagcctctttggaggctgaatggggtcccccgactctggctttcacccaggt

SEQ ID NO: 5020 - RNA, 74 nt, synthetic construct
  source 1..74: mol_type = other RNA
gggatcctgggtgcacacagcaaagcctctttggaggctgaatggggtcccccgactctggctttcccccaggt

SEQ ID NO: 5021 - RNA, 74 nt, synthetic construct
  source 1..74: mol_type = other RNA
gggatcctgggtgcacacagcaaagcctctttggaggctgaatggggtcccccgactctggctttcctccaggt

SEQ ID NO: 5022 - RNA, 74 nt, synthetic construct
  source 1..74: mol_type = other RNA
gggatcctgggtgcacacagcaaagcctctttggaggctgaatggggtcccccgactctggctttcttccaggt

SEQ ID NO: 5023 - RNA, 74 nt, synthetic construct
  source 1..74: mol_type = other RNA
gggatcctgggtgcacacagcaaagcctctttggaggctgaatggggtcccccgactctggctttccgccaggt

SEQ ID NO: 5024 - RNA, 74 nt, synthetic construct
  source 1..74: mol_type = other RNA
gggatcctgggtgcacacagcaaagcctctttggaggctgaatggggtcccccgactctggctttctgccaggt

SEQ ID NO: 5025 - RNA, 74 nt, synthetic construct
  source 1..74: mol_type = other RNA
gggatcctgggtgcacacagcaaagcctctttggaggctgaatggggtcccccgactctggctttcgtccaggt

SEQ ID NO: 5026 - RNA, 74 nt, synthetic construct
  source 1..74: mol_type = other RNA
gggatcctgggtgcacacagcaaagcctctttggaggctgaatggggtcccccgactctggctttcggccaggt

SEQ ID NO: 5027 - RNA, 74 nt, synthetic construct
  source 1..74: mol_type = other RNA
gggatcctgggtgcacacagcaaagcctctttggaggctgaatggggtcccccgactctggctttcatccaggt

SEQ ID NO: 5028 - RNA, 74 nt, synthetic construct
  source 1..74: mol_type = other RNA
gggatcctgggtgcacacagcaaagcctctttggaggctgaatggggtcccccgactctggctttcgaccaggt

SEQ ID NO: 5029 - RNA, 75 nt, synthetic construct
  source 1..75: mol_type = other RNA
tgggatcctgggtgcacacagcaaagcctctttggaggctgaatggggtcccccgactctggctttccgccaggt

SEQ ID NO: 5030 - RNA, 75 nt, synthetic construct
  source 1..75: mol_type = other RNA
tgggatcctgggtgcacacagcaaagcctctttggaggctgaatggggtcccccgactctggctttcccccaggt

SEQ ID NO: 5031 - RNA, 75 nt, synthetic construct
  source 1..75: mol_type = other RNA
tgggatcctgggtgcacacagcaaagcctctttggaggctgaatggggtcccccgactctggctttcctccaggt

SEQ ID NO: 5032 - RNA, 75 nt, synthetic construct
  source 1..75: mol_type = other RNA
tgggatcctgggtgcacacagcaaagcctctttggaggctgaatggggtcccccgactctggctttctgccaggt

SEQ ID NO: 5033 - RNA, 75 nt, synthetic construct
  source 1..75: mol_type = other RNA
tgggatcctgggtgcacacagcaaagcctctttggaggctgaatggggtcccccgactctggctttctaccaggt

SEQ ID NO: 5034 - RNA, 75 nt, synthetic construct
  source 1..75: mol_type = other RNA
tgggatcctgggtgcacacagcaaagcctctttggaggctgaatggggtcccccgactctggctttcatccaggt

SEQ ID NO: 5035 - RNA, 75 nt, synthetic construct
  source 1..75: mol_type = other RNA
tgggatcctgggtgcacacagcaaagcctctttggaggctgaatggggtcccccgactctggctttcgtccaggt

SEQ ID NO: 5036 - RNA, 75 nt, synthetic construct
  source 1..75: mol_type = other RNA
tgggatcctgggtgcacacagcaaagcctctttggaggctgaatggggtcccccgactctggctttccaccaggt

SEQ ID NO: 5037 - RNA, 75 nt, synthetic construct
  source 1..75: mol_type = other RNA
tgggatcctgggtgcacacagcaaagcctctttggaggctgaatggggtcccccgactctggctttcacccaggt

SEQ ID NO: 5038 - RNA, 75 nt, synthetic construct
  source 1..75: mol_type = other RNA
tgggatcctgggtgcacacagcaaagcctctttggaggctgaatggggtcccccgactctggctttcggccaggt

SEQ ID NO: 5039 - RNA, 75 nt, synthetic construct
  source 1..75: mol_type = other RNA
tgggatcctgggtgcacacagcaaagcctctttggaggctgaatggggtcccccgactctggctttctcccaggt

SEQ ID NO: 5040 - RNA, 75 nt, synthetic construct
  source 1..75: mol_type = other RNA
tgggatcctgggtgcacacagcaaagcctctttggaggctgaatggggtcccccgactctggctttcaaccaggt

SEQ ID NO: 5041 - RNA, 75 nt, synthetic construct
  source 1..75: mol_type = other RNA
tgggatcctgggtgcacacagcaaagcctctttggaggctgaatggggtcccccgactctggctttcttccaggt

SEQ ID NO: 5042 - RNA, 75 nt, synthetic construct
  source 1..75: mol_type = other RNA
tgggatcctgggtgcacacagcaaagcctctttggaggctgaatggggtcccccgactctggctttcgaccaggt

SEQ ID NO: 5043 - RNA, 75 nt, synthetic construct
  source 1..75: mol_type = other RNA
tgggatcctgggtgcacacagcaaagcctctttggaggctgaatggggtcccccgactctggctttcgcccaggt

SEQ ID NO: 5044 - RNA, 75 nt, synthetic construct
  source 1..75: mol_type = other RNA
tgggatcctgggtgcacacagcaaagcctctttggaggctgaatggggtcccccgactctggctttcagccaggt

SEQ ID NO: 5045 - RNA, 76 nt, synthetic construct
  source 1..76: mol_type = other RNA
gtgggatcctgggtgcacacagcaaagcctctttggaggctgaatggggtcccccgactctggctttcagccaggt

SEQ ID NO: 5046 - RNA, 76 nt, synthetic construct
  source 1..76: mol_type = other RNA
gtgggatcctgggtgcacacagcaaagcctctttggaggctgaatggggtcccccgactctggctttccgccaggt

SEQ ID NO: 5047 - RNA, 76 nt, synthetic construct
  source 1..76: mol_type = other RNA
gtgggatcctgggtgcacacagcaaagcctctttggaggctgaatggggtcccccgactctggctttcccccaggt

SEQ ID NO: 5048 - RNA, 76 nt, synthetic construct
  source 1..76: mol_type = other RNA
gtgggatcctgggtgcacacagcaaagcctctttggaggctgaatggggtcccccgactctggctttccaccaggt

SEQ ID NO: 5049 - RNA, 76 nt, synthetic construct
  source 1..76: mol_type = other RNA
gtgggatcctgggtgcacacagcaaagcctctttggaggctgaatggggtcccccgactctggctttcacccaggt

SEQ ID NO: 5050 - RNA, 76 nt, synthetic construct
  source 1..76: mol_type = other RNA
gtgggatcctgggtgcacacagcaaagcctctttggaggctgaatggggtcccccgactctggctttcgaccaggt

SEQ ID NO: 5051 - RNA, 76 nt, synthetic construct
  source 1..76: mol_type = other RNA
gtgggatcctgggtgcacacagcaaagcctctttggaggctgaatggggtcccccgactctggctttcttccaggt

SEQ ID NO: 5052 - RNA, 76 nt, synthetic construct
  source 1..76: mol_type = other RNA
gtgggatcctgggtgcacacagcaaagcctctttggaggctgaatggggtcccccgactctggctttcaaccaggt

SEQ ID NO: 5053 - RNA, 76 nt, synthetic construct
  source 1..76: mol_type = other RNA
gtgggatcctgggtgcacacagcaaagcctctttggaggctgaatggggtcccccgactctggctttctcccaggt

SEQ ID NO: 5054 - RNA, 76 nt, synthetic construct
  source 1..76: mol_type = other RNA
gtgggatcctgggtgcacacagcaaagcctctttggaggctgaatggggtcccccgactctggctttcctccaggt

SEQ ID NO: 5055 - RNA, 76 nt, synthetic construct
  source 1..76: mol_type = other RNA
gtgggatcctgggtgcacacagcaaagcctctttggaggctgaatggggtcccccgactctggctttcggccaggt

SEQ ID NO: 5056 - RNA, 76 nt, synthetic construct
  source 1..76: mol_type = other RNA
gtgggatcctgggtgcacacagcaaagcctctttggaggctgaatggggtcccccgactctggctttcatccaggt

SEQ ID NO: 5057 - RNA, 76 nt, synthetic construct
  source 1..76: mol_type = other RNA
gtgggatcctgggtgcacacagcaaagcctctttggaggctgaatggggtcccccgactctggctttcgcccaggt

SEQ ID NO: 5058 - RNA, 76 nt, synthetic construct
  source 1..76: mol_type = other RNA
gtgggatcctgggtgcacacagcaaagcctctttggaggctgaatggggtcccccgactctggctttctaccaggt

SEQ ID NO: 5059 - RNA, 76 nt, synthetic construct
  source 1..76: mol_type = other RNA
gtgggatcctgggtgcacacagcaaagcctctttggaggctgaatggggtcccccgactctggctttcgtccaggt

SEQ ID NO: 5060 - RNA, 76 nt, synthetic construct
  source 1..76: mol_type = other RNA
gtgggatcctgggtgcacacagcaaagcctctttggaggctgaatggggtcccccgactctggctttctgccaggt

SEQ ID NO: 5061 - RNA, 77 nt, synthetic construct
  source 1..77: mol_type = other RNA
agtgggatcctgggtgcacacagcaaagcctctttggaggctgaatggggtcccccgactctggctttcccccaggt

SEQ ID NO: 5062 - RNA, 77 nt, synthetic construct
  source 1..77: mol_type = other RNA
agtgggatcctgggtgcacacagcaaagcctctttggaggctgaatggggtcccccgactctggctttcatccaggt

SEQ ID NO: 5063 - RNA, 77 nt, synthetic construct
  source 1..77: mol_type = other RNA
agtgggatcctgggtgcacacagcaaagcctctttggaggctgaatggggtcccccgactctggctttccgccaggt

SEQ ID NO: 5064 - RNA, 77 nt, synthetic construct
  source 1..77: mol_type = other RNA
agtgggatcctgggtgcacacagcaaagcctctttggaggctgaatggggtcccccgactctggctttcaaccaggt

SEQ ID NO: 5065 - RNA, 77 nt, synthetic construct
  source 1..77: mol_type = other RNA
agtgggatcctgggtgcacacagcaaagcctctttggaggctgaatggggtcccccgactctggctttctgccaggt

SEQ ID NO: 5066 - RNA, 77 nt, synthetic construct
  source 1..77: mol_type = other RNA
agtgggatcctgggtgcacacagcaaagcctctttggaggctgaatggggtcccccgactctggctttcggccaggt

SEQ ID NO: 5067 - RNA, 77 nt, synthetic construct
  source 1..77: mol_type = other RNA
agtgggatcctgggtgcacacagcaaagcctctttggaggctgaatggggtcccccgactctggctttcgtccaggt

SEQ ID NO: 5068 - RNA, 77 nt, synthetic construct
  source 1..77: mol_type = other RNA
agtgggatcctgggtgcacacagcaaagcctctttggaggctgaatggggtcccccgactctggctttcgaccaggt

SEQ ID NO: 5069 - RNA, 77 nt, synthetic construct
  source 1..77: mol_type = other RNA
agtgggatcctgggtgcacacagcaaagcctctttggaggctgaatggggtcccccgactctggctttccaccaggt

SEQ ID NO: 5070 - RNA, 77 nt, synthetic construct
  source 1..77: mol_type = other RNA
agtgggatcctgggtgcacacagcaaagcctctttggaggctgaatggggtcccccgactctggctttcttccaggt

SEQ ID NO: 5071 - RNA, 77 nt, synthetic construct
  source 1..77: mol_type = other RNA
agtgggatcctgggtgcacacagcaaagcctctttggaggctgaatggggtcccccgactctggctttcagccaggt

SEQ ID NO: 5072 - RNA, 77 nt, synthetic construct
  source 1..77: mol_type = other RNA
agtgggatcctgggtgcacacagcaaagcctctttggaggctgaatggggtcccccgactctggctttcgcccaggt

SEQ ID NO: 5073 - RNA, 77 nt, synthetic construct
  source 1..77: mol_type = other RNA
agtgggatcctgggtgcacacagcaaagcctctttggaggctgaatggggtcccccgactctggctttcacccaggt

SEQ ID NO: 5074 - RNA, 77 nt, synthetic construct
  source 1..77: mol_type = other RNA
agtgggatcctgggtgcacacagcaaagcctctttggaggctgaatggggtcccccgactctggctttctcccaggt

SEQ ID NO: 5075 - RNA, 77 nt, synthetic construct
  source 1..77: mol_type = other RNA
agtgggatcctgggtgcacacagcaaagcctctttggaggctgaatggggtcccccgactctggctttcctccaggt

SEQ ID NO: 5076 - RNA, 77 nt, synthetic construct
  source 1..77: mol_type = other RNA
agtgggatcctgggtgcacacagcaaagcctctttggaggctgaatggggtcccccgactctggctttctaccaggt

SEQ ID NO: 5077 - RNA, 78 nt, synthetic construct
  source 1..78: mol_type = other RNA
tagtgggatcctgggtgcacacagcaaagcctctttggaggctgaatggggtcccccgactctggctttcttccaggt

SEQ ID NO: 5078 - RNA, 78 nt, synthetic construct
  source 1..78: mol_type = other RNA
tagtgggatcctgggtgcacacagcaaagcctctttggaggctgaatggggtcccccgactctggctttccgccaggt

SEQ ID NO: 5079 - RNA, 78 nt, synthetic construct
  source 1..78: mol_type = other RNA
tagtgggatcctgggtgcacacagcaaagcctctttggaggctgaatggggtcccccgactctggctttcagccaggt

SEQ ID NO: 5080 - RNA, 78 nt, synthetic construct
  source 1..78: mol_type = other RNA
tagtgggatcctgggtgcacacagcaaagcctctttggaggctgaatggggtcccccgactctggctttccaccaggt

SEQ ID NO: 5081 - RNA, 78 nt, synthetic construct
  source 1..78: mol_type = other RNA
tagtgggatcctgggtgcacacagcaaagcctctttggaggctgaatggggtcccccgactctggctttcgaccaggt

SEQ ID NO: 5082 - RNA, 78 nt, synthetic construct
  source 1..78: mol_type = other RNA
tagtgggatcctgggtgcacacagcaaagcctctttggaggctgaatggggtcccccgactctggctttctaccaggt

SEQ ID NO: 5083 - RNA, 78 nt, synthetic construct
  source 1..78: mol_type = other RNA
tagtgggatcctgggtgcacacagcaaagcctctttggaggctgaatggggtcccccgactctggctttcctccaggt

SEQ ID NO: 5084 - RNA, 78 nt, synthetic construct
  source 1..78: mol_type = other RNA
tagtgggatcctgggtgcacacagcaaagcctctttggaggctgaatggggtcccccgactctggctttcgtccaggt

SEQ ID NO: 5085 - RNA, 78 nt, synthetic construct
  source 1..78: mol_type = other RNA
tagtgggatcctgggtgcacacagcaaagcctctttggaggctgaatggggtcccccgactctggctttctgccaggt

SEQ ID NO: 5086 - RNA, 78 nt, synthetic construct
  source 1..78: mol_type = other RNA
tagtgggatcctgggtgcacacagcaaagcctctttggaggctgaatggggtcccccgactctggctttcggccaggt

SEQ ID NO: 5087 - RNA, 78 nt, synthetic construct
  source 1..78: mol_type = other RNA
tagtgggatcctgggtgcacacagcaaagcctctttggaggctgaatggggtcccccgactctggctttcccccaggt

SEQ ID NO: 5088 - RNA, 78 nt, synthetic construct
  source 1..78: mol_type = other RNA
tagtgggatcctgggtgcacacagcaaagcctctttggaggctgaatggggtcccccgactctggctttcatccaggt

SEQ ID NO: 5089 - RNA, 78 nt, synthetic construct
  source 1..78: mol_type = other RNA
tagtgggatcctgggtgcacacagcaaagcctctttggaggctgaatggggtcccccgactctggctttcaaccaggt

SEQ ID NO: 5090 - RNA, 78 nt, synthetic construct
  source 1..78: mol_type = other RNA
tagtgggatcctgggtgcacacagcaaagcctctttggaggctgaatggggtcccccgactctggctttctcccaggt

SEQ ID NO: 5091 - RNA, 78 nt, synthetic construct
  source 1..78: mol_type = other RNA
tagtgggatcctgggtgcacacagcaaagcctctttggaggctgaatggggtcccccgactctggctttcacccaggt

SEQ ID NO: 5092 - RNA, 78 nt, synthetic construct
  source 1..78: mol_type = other RNA
tagtgggatcctgggtgcacacagcaaagcctctttggaggctgaatggggtcccccgactctggctttcgcccaggt

SEQ ID NO: 5093 - RNA, 79 nt, synthetic construct
  source 1..79: mol_type = other RNA
gtagtgggatcctgggtgcacacagcaaagcctctttggaggctgaatggggtcccccgactctggctttccgccaggt

SEQ ID NO: 5094 - RNA, 79 nt, synthetic construct
  source 1..79: mol_type = other RNA
gtagtgggatcctgggtgcacacagcaaagcctctttggaggctgaatggggtcccccgactctggctttctaccaggt

SEQ ID NO: 5095 - RNA, 79 nt, synthetic construct
  source 1..79: mol_type = other RNA
gtagtgggatcctgggtgcacacagcaaagcctctttggaggctgaatggggtcccccgactctggctttctcccaggt

SEQ ID NO: 5096 - RNA, 79 nt, synthetic construct
  source 1..79: mol_type = other RNA
gtagtgggatcctgggtgcacacagcaaagcctctttggaggctgaatggggtcccccgactctggctttcggccaggt

SEQ ID NO: 5097 - RNA, 79 nt, synthetic construct
  source 1..79: mol_type = other RNA
gtagtgggatcctgggtgcacacagcaaagcctctttggaggctgaatggggtcccccgactctggctttcatccaggt

SEQ ID NO: 5098 - RNA, 79 nt, synthetic construct
  source 1..79: mol_type = other RNA
gtagtgggatcctgggtgcacacagcaaagcctctttggaggctgaatggggtcccccgactctggctttccaccaggt

SEQ ID NO: 5099 - RNA, 79 nt, synthetic construct
  source 1..79: mol_type = other RNA
gtagtgggatcctgggtgcacacagcaaagcctctttggaggctgaatggggtcccccgactctggctttcccccaggt

SEQ ID NO: 5100 - RNA, 79 nt, synthetic construct
  source 1..79: mol_type = other RNA
gtagtgggatcctgggtgcacacagcaaagcctctttggaggctgaatggggtcccccgactctggctttcacccaggt

SEQ ID NO: 5101 - RNA, 79 nt, synthetic construct
  source 1..79: mol_type = other RNA
gtagtgggatcctgggtgcacacagcaaagcctctttggaggctgaatggggtcccccgactctggctttcagccaggt

SEQ ID NO: 5102 - RNA, 79 nt, synthetic construct
  source 1..79: mol_type = other RNA
gtagtgggatcctgggtgcacacagcaaagcctctttggaggctgaatggggtcccccgactctggctttcgcccaggt

SEQ ID NO: 5103 - RNA, 79 nt, synthetic construct
  source 1..79: mol_type = other RNA
gtagtgggatcctgggtgcacacagcaaagcctctttggaggctgaatggggtcccccgactctggctttcgtccaggt

SEQ ID NO: 5104 - RNA, 79 nt, synthetic construct
  source 1..79: mol_type = other RNA
gtagtgggatcctgggtgcacacagcaaagcctctttggaggctgaatggggtcccccgactctggctttcttccaggt

SEQ ID NO: 5105 - RNA, 79 nt, synthetic construct
  source 1..79: mol_type = other RNA
gtagtgggatcctgggtgcacacagcaaagcctctttggaggctgaatggggtcccccgactctggctttcctccaggt

SEQ ID NO: 5106 - RNA, 79 nt, synthetic construct
  source 1..79: mol_type = other RNA
gtagtgggatcctgggtgcacacagcaaagcctctttggaggctgaatggggtcccccgactctggctttctgccaggt

SEQ ID NO: 5107 - RNA, 79 nt, synthetic construct
  source 1..79: mol_type = other RNA
gtagtgggatcctgggtgcacacagcaaagcctctttggaggctgaatggggtcccccgactctggctttcgaccaggt

SEQ ID NO: 5108 - RNA, 79 nt, synthetic construct
  source 1..79: mol_type = other RNA
gtagtgggatcctgggtgcacacagcaaagcctctttggaggctgaatggggtcccccgactctggctttcaaccaggt

SEQ ID NO: 5109 - RNA, 80 nt, synthetic construct
  source 1..80: mol_type = other RNA
ggtagtgggatcctgggtgcacacagcaaagcctctttggaggctgaatggggtcccccgactctggctttccgccaggt

SEQ ID NO: 5110 - RNA, 80 nt, synthetic construct
  source 1..80: mol_type = other RNA
ggtagtgggatcctgggtgcacacagcaaagcctctttggaggctgaatggggtcccccgactctggctttcccccaggt

SEQ ID NO: 5111 - RNA, 80 nt, synthetic construct
  source 1..80: mol_type = other RNA
ggtagtgggatcctgggtgcacacagcaaagcctctttggaggctgaatggggtcccccgactctggctttctaccaggt

SEQ ID NO: 5112 - RNA, 80 nt, synthetic construct
  source 1..80: mol_type = other RNA
ggtagtgggatcctgggtgcacacagcaaagcctctttggaggctgaatggggtcccccgactctggctttcttccaggt

SEQ ID NO: 5113 - RNA, 80 nt, synthetic construct
  source 1..80: mol_type = other RNA
ggtagtgggatcctgggtgcacacagcaaagcctctttggaggctgaatggggtcccccgactctggctttcacccaggt

SEQ ID NO: 5114 - RNA, 80 nt, synthetic construct
  source 1..80: mol_type = other RNA
ggtagtgggatcctgggtgcacacagcaaagcctctttggaggctgaatggggtcccccgactctggctttctgccaggt

SEQ ID NO: 5115 - RNA, 80 nt, synthetic construct
  source 1..80: mol_type = other RNA
ggtagtgggatcctgggtgcacacagcaaagcctctttggaggctgaatggggtcccccgactctggctttcgtccaggt

SEQ ID NO: 5116 - RNA, 80 nt, synthetic construct
  source 1..80: mol_type = other RNA
ggtagtgggatcctgggtgcacacagcaaagcctctttggaggctgaatggggtcccccgactctggctttcaaccaggt

SEQ ID NO: 5117 - RNA, 80 nt, synthetic construct
  source 1..80: mol_type = other RNA
ggtagtgggatcctgggtgcacacagcaaagcctctttggaggctgaatggggtcccccgactctggctttcatccaggt

SEQ ID NO: 5118 - RNA, 80 nt, synthetic construct
  source 1..80: mol_type = other RNA
ggtagtgggatcctgggtgcacacagcaaagcctctttggaggctgaatggggtcccccgactctggctttccaccaggt

SEQ ID NO: 5119 - RNA, 80 nt, synthetic construct
  source 1..80: mol_type = other RNA
ggtagtgggatcctgggtgcacacagcaaagcctctttggaggctgaatggggtcccccgactctggctttcgcccaggt

SEQ ID NO: 5120 - RNA, 80 nt, synthetic construct
  source 1..80: mol_type = other RNA
ggtagtgggatcctgggtgcacacagcaaagcctctttggaggctgaatggggtcccccgactctggctttcctccaggt

SEQ ID NO: 5121 - RNA, 80 nt, synthetic construct
  source 1..80: mol_type = other RNA
ggtagtgggatcctgggtgcacacagcaaagcctctttggaggctgaatggggtcccccgactctggctttcggccaggt

SEQ ID NO: 5122 - RNA, 80 nt, synthetic construct
  source 1..80: mol_type = other RNA
ggtagtgggatcctgggtgcacacagcaaagcctctttggaggctgaatggggtcccccgactctggctttcagccaggt

SEQ ID NO: 5123 - RNA, 80 nt, synthetic construct
  source 1..80: mol_type = other RNA
ggtagtgggatcctgggtgcacacagcaaagcctctttggaggctgaatggggtcccccgactctggctttctcccaggt

SEQ ID NO: 5124 - RNA, 80 nt, synthetic construct
  source 1..80: mol_type = other RNA
ggtagtgggatcctgggtgcacacagcaaagcctctttggaggctgaatggggtcccccgactctggctttcgaccaggt

SEQ ID NO: 5125 - RNA, 81 nt, synthetic construct
  source 1..81: mol_type = other RNA
gggtagtgggatcctgggtgcacacagcaaagcctctttggaggctgaatggggtcccccgactctggctttcacccaggt

SEQ ID NO: 5126 - RNA, 81 nt, synthetic construct
  source 1..81: mol_type = other RNA
gggtagtgggatcctgggtgcacacagcaaagcctctttggaggctgaatggggtcccccgactctggctttcttccaggt

SEQ ID NO: 5127 - RNA, 81 nt, synthetic construct
  source 1..81: mol_type = other RNA
gggtagtgggatcctgggtgcacacagcaaagcctctttggaggctgaatggggtcccccgactctggctttctgccaggt

SEQ ID NO: 5128 - RNA, 81 nt, synthetic construct
  source 1..81: mol_type = other RNA
gggtagtgggatcctgggtgcacacagcaaagcctctttggaggctgaatggggtcccccgactctggctttcgaccaggt

SEQ ID NO: 5129 - RNA, 81 nt, synthetic construct
  source 1..81: mol_type = other RNA
gggtagtgggatcctgggtgcacacagcaaagcctctttggaggctgaatggggtcccccgactctggctttcatccaggt

SEQ ID NO: 5130 - RNA, 81 nt, synthetic construct
  source 1..81: mol_type = other RNA
gggtagtgggatcctgggtgcacacagcaaagcctctttggaggctgaatggggtcccccgactctggctttctaccaggt

SEQ ID NO: 5131 - RNA, 81 nt, synthetic construct
  source 1..81: mol_type = other RNA
gggtagtgggatcctgggtgcacacagcaaagcctctttggaggctgaatggggtcccccgactctggctttcccccaggt

SEQ ID NO: 5132 - RNA, 81 nt, synthetic construct
  source 1..81: mol_type = other RNA
gggtagtgggatcctgggtgcacacagcaaagcctctttggaggctgaatggggtcccccgactctggctttcggccaggt

SEQ ID NO: 5133 - RNA, 81 nt, synthetic construct
  source 1..81: mol_type = other RNA
gggtagtgggatcctgggtgcacacagcaaagcctctttggaggctgaatggggtcccccgactctggctttccaccaggt

SEQ ID NO: 5134 - RNA, 81 nt, synthetic construct
  source 1..81: mol_type = other RNA
gggtagtgggatcctgggtgcacacagcaaagcctctttggaggctgaatggggtcccccgactctggctttcctccaggt

SEQ ID NO: 5135 - RNA, 81 nt, synthetic construct
  source 1..81: mol_type = other RNA
gggtagtgggatcctgggtgcacacagcaaagcctctttggaggctgaatggggtcccccgactctggctttctcccaggt

SEQ ID NO: 5136 - RNA, 81 nt, synthetic construct
  source 1..81: mol_type = other RNA
gggtagtgggatcctgggtgcacacagcaaagcctctttggaggctgaatggggtcccccgactctggctttcagccaggt

SEQ ID NO: 5137 - RNA, 81 nt, synthetic construct
  source 1..81: mol_type = other RNA
gggtagtgggatcctgggtgcacacagcaaagcctctttggaggctgaatggggtcccccgactctggctttcgcccaggt

SEQ ID NO: 5138 - RNA, 81 nt, synthetic construct
  source 1..81: mol_type = other RNA
gggtagtgggatcctgggtgcacacagcaaagcctctttggaggctgaatggggtcccccgactctggctttcaaccaggt

SEQ ID NO: 5139 - RNA, 81 nt, synthetic construct
  source 1..81: mol_type = other RNA
gggtagtgggatcctgggtgcacacagcaaagcctctttggaggctgaatggggtcccccgactctggctttcgtccaggt

SEQ ID NO: 5140 - RNA, 81 nt, synthetic construct
  source 1..81: mol_type = other RNA
gggtagtgggatcctgggtgcacacagcaaagcctctttggaggctgaatggggtcccccgactctggctttccgccaggt

SEQ ID NO: 5141 - RNA, 82 nt, synthetic construct
  source 1..82: mol_type = other RNA
tgggtagtgggatcctgggtgcacacagcaaagcctctttggaggctgaatggggtcccccgactctggctttcatccaggt

SEQ ID NO: 5142 - RNA, 82 nt, synthetic construct
  source 1..82: mol_type = other RNA
tgggtagtgggatcctgggtgcacacagcaaagcctctttggaggctgaatggggtcccccgactctggctttcgcccaggt

SEQ ID NO: 5143 - RNA, 82 nt, synthetic construct
  source 1..82: mol_type = other RNA
tgggtagtgggatcctgggtgcacacagcaaagcctctttggaggctgaatggggtcccccgactctggctttcagccaggt

SEQ ID NO: 5144 - RNA, 82 nt, synthetic construct
  source 1..82: mol_type = other RNA
tgggtagtgggatcctgggtgcacacagcaaagcctctttggaggctgaatggggtcccccgactctggctttcttccaggt

SEQ ID NO: 5145 - RNA, 82 nt, synthetic construct
  source 1..82: mol_type = other RNA
tgggtagtgggatcctgggtgcacacagcaaagcctctttggaggctgaatggggtcccccgactctggctttctaccaggt

SEQ ID NO: 5146 - RNA, 82 nt, synthetic construct
  source 1..82: mol_type = other RNA
tgggtagtgggatcctgggtgcacacagcaaagcctctttggaggctgaatggggtcccccgactctggctttccgccaggt

SEQ ID NO: 5147 - RNA, 82 nt, synthetic construct
  source 1..82: mol_type = other RNA
tgggtagtgggatcctgggtgcacacagcaaagcctctttggaggctgaatggggtcccccgactctggctttcgaccaggt

SEQ ID NO: 5148 - RNA, 82 nt, synthetic construct
  source 1..82: mol_type = other RNA
tgggtagtgggatcctgggtgcacacagcaaagcctctttggaggctgaatggggtcccccgactctggctttcggccaggt

SEQ ID NO: 5149 - RNA, 82 nt, synthetic construct
  source 1..82: mol_type = other RNA
tgggtagtgggatcctgggtgcacacagcaaagcctctttggaggctgaatggggtcccccgactctggctttcacccaggt

SEQ ID NO: 5150 - RNA, 82 nt, synthetic construct
  source 1..82: mol_type = other RNA
tgggtagtgggatcctgggtgcacacagcaaagcctctttggaggctgaatggggtcccccgactctggctttcctccaggt

SEQ ID NO: 5151 - RNA, 82 nt, synthetic construct
  source 1..82: mol_type = other RNA
tgggtagtgggatcctgggtgcacacagcaaagcctctttggaggctgaatggggtcccccgactctggctttccaccaggt

SEQ ID NO: 5152 - RNA, 82 nt, synthetic construct
  source 1..82: mol_type = other RNA
tgggtagtgggatcctgggtgcacacagcaaagcctctttggaggctgaatggggtcccccgactctggctttcccccaggt

SEQ ID NO: 5153 - RNA, 82 nt, synthetic construct
  source 1..82: mol_type = other RNA
tgggtagtgggatcctgggtgcacacagcaaagcctctttggaggctgaatggggtcccccgactctggctttcgtccaggt

SEQ ID NO: 5154 - RNA, 82 nt, synthetic construct
  source 1..82: mol_type = other RNA
tgggtagtgggatcctgggtgcacacagcaaagcctctttggaggctgaatggggtcccccgactctggctttcaaccaggt

SEQ ID NO: 5155 - RNA, 82 nt, synthetic construct
  source 1..82: mol_type = other RNA
tgggtagtgggatcctgggtgcacacagcaaagcctctttggaggctgaatggggtcccccgactctggctttctgccaggt

SEQ ID NO: 5156 - RNA, 82 nt, synthetic construct
  source 1..82: mol_type = other RNA
tgggtagtgggatcctgggtgcacacagcaaagcctctttggaggctgaatggggtcccccgactctggctttctcccaggt

SEQ ID NO: 5157 - RNA, 83 nt, synthetic construct
  source 1..83: mol_type = other RNA
gtgggtagtgggatcctgggtgcacacagcaaagcctctttggaggctgaatggggtcccccgactctggctttcccccaggt

SEQ ID NO: 5158 - RNA, 83 nt, synthetic construct
  source 1..83: mol_type = other RNA
gtgggtagtgggatcctgggtgcacacagcaaagcctctttggaggctgaatggggtcccccgactctggctttccaccaggt

SEQ ID NO: 5159 - RNA, 83 nt, synthetic construct
  source 1..83: mol_type = other RNA
gtgggtagtgggatcctgggtgcacacagcaaagcctctttggaggctgaatggggtcccccgactctggctttcgtccaggt

SEQ ID NO: 5160 - RNA, 83 nt, synthetic construct
  source 1..83: mol_type = other RNA
gtgggtagtgggatcctgggtgcacacagcaaagcctctttggaggctgaatggggtcccccgactctggctttcgaccaggt

SEQ ID NO: 5161 - RNA, 83 nt, synthetic construct
  source 1..83: mol_type = other RNA
gtgggtagtgggatcctgggtgcacacagcaaagcctctttggaggctgaatggggtcccccgactctggctttcttccaggt

SEQ ID NO: 5162 - RNA, 83 nt, synthetic construct
  source 1..83: mol_type = other RNA
gtgggtagtgggatcctgggtgcacacagcaaagcctctttggaggctgaatggggtcccccgactctggctttcacccaggt

SEQ ID NO: 5163 - RNA, 83 nt, synthetic construct
  source 1..83: mol_type = other RNA
gtgggtagtgggatcctgggtgcacacagcaaagcctctttggaggctgaatggggtcccccgactctggctttcggccaggt

SEQ ID NO: 5164 - RNA, 83 nt, synthetic construct
  source 1..83: mol_type = other RNA
gtgggtagtgggatcctgggtgcacacagcaaagcctctttggaggctgaatggggtcccccgactctggctttcgcccaggt

SEQ ID NO: 5165 - RNA, 83 nt, synthetic construct
  source 1..83: mol_type = other RNA
gtgggtagtgggatcctgggtgcacacagcaaagcctctttggaggctgaatggggtcccccgactctggctttctgccaggt

SEQ ID NO: 5166 - RNA, 83 nt, synthetic construct
  source 1..83: mol_type = other RNA
gtgggtagtgggatcctgggtgcacacagcaaagcctctttggaggctgaatggggtcccccgactctggctttcagccaggt

SEQ ID NO: 5167 - RNA, 83 nt, synthetic construct
  source 1..83: mol_type = other RNA
gtgggtagtgggatcctgggtgcacacagcaaagcctctttggaggctgaatggggtcccccgactctggctttcatccaggt

SEQ ID NO: 5168 - RNA, 83 nt, synthetic construct
  source 1..83: mol_type = other RNA
gtgggtagtgggatcctgggtgcacacagcaaagcctctttggaggctgaatggggtcccccgactctggctttcctccaggt

SEQ ID NO: 5169 - RNA, 83 nt, synthetic construct
  source 1..83: mol_type = other RNA
gtgggtagtgggatcctgggtgcacacagcaaagcctctttggaggctgaatggggtcccccgactctggctttccgccaggt

SEQ ID NO: 5170 - RNA, 83 nt, synthetic construct
  source 1..83: mol_type = other RNA
gtgggtagtgggatcctgggtgcacacagcaaagcctctttggaggctgaatggggtcccccgactctggctttctaccaggt

SEQ ID NO: 5171 - RNA, 83 nt, synthetic construct
  source 1..83: mol_type = other RNA
gtgggtagtgggatcctgggtgcacacagcaaagcctctttggaggctgaatggggtcccccgactctggctttctcccaggt

SEQ ID NO: 5172 - RNA, 83 nt, synthetic construct
  source 1..83: mol_type = other RNA
gtgggtagtgggatcctgggtgcacacagcaaagcctctttggaggctgaatggggtcccccgactctggctttcaaccaggt

SEQ ID NO: 5173 - RNA, 84 nt, synthetic construct
  source 1..84: mol_type = other RNA
agtgggtagtgggatcctgggtgcacacagcaaagcctctttggaggctgaatggggtcccccgactctggctttcagccaggt

SEQ ID NO: 5174 - RNA, 84 nt, synthetic construct
  source 1..84: mol_type = other RNA
agtgggtagtgggatcctgggtgcacacagcaaagcctctttggaggctgaatggggtcccccgactctggctttcgtccaggt

SEQ ID NO: 5175 - RNA, 84 nt, synthetic construct
  source 1..84: mol_type = other RNA
agtgggtagtgggatcctgggtgcacacagcaaagcctctttggaggctgaatggggtcccccgactctggctttcccccaggt

SEQ ID NO: 5176 - RNA, 84 nt, synthetic construct
  source 1..84: mol_type = other RNA
agtgggtagtgggatcctgggtgcacacagcaaagcctctttggaggctgaatggggtcccccgactctggctttctgccaggt

SEQ ID NO: 5177 - RNA, 84 nt, synthetic construct
  source 1..84: mol_type = other RNA
agtgggtagtgggatcctgggtgcacacagcaaagcctctttggaggctgaatggggtcccccgactctggctttccgccaggt

SEQ ID NO: 5178 - RNA, 84 nt, synthetic construct
  source 1..84: mol_type = other RNA
agtgggtagtgggatcctgggtgcacacagcaaagcctctttggaggctgaatggggtcccccgactctggctttcgcccaggt

SEQ ID NO: 5179 - RNA, 84 nt, synthetic construct
  source 1..84: mol_type = other RNA
agtgggtagtgggatcctgggtgcacacagcaaagcctctttggaggctgaatggggtcccccgactctggctttccaccaggt

SEQ ID NO: 5180 - RNA, 84 nt, synthetic construct
  source 1..84: mol_type = other RNA
agtgggtagtgggatcctgggtgcacacagcaaagcctctttggaggctgaatggggtcccccgactctggctttctaccaggt

SEQ ID NO: 5181 - RNA, 84 nt, synthetic construct
  source 1..84: mol_type = other RNA
agtgggtagtgggatcctgggtgcacacagcaaagcctctttggaggctgaatggggtcccccgactctggctttcctccaggt

SEQ ID NO: 5182 - RNA, 84 nt, synthetic construct
  source 1..84: mol_type = other RNA
agtgggtagtgggatcctgggtgcacacagcaaagcctctttggaggctgaatggggtcccccgactctggctttctcccaggt

SEQ ID NO: 5183 - RNA, 84 nt, synthetic construct
  source 1..84: mol_type = other RNA
agtgggtagtgggatcctgggtgcacacagcaaagcctctttggaggctgaatggggtcccccgactctggctttcatccaggt

SEQ ID NO: 5184 - RNA, 84 nt, synthetic construct
  source 1..84: mol_type = other RNA
agtgggtagtgggatcctgggtgcacacagcaaagcctctttggaggctgaatggggtcccccgactctggctttcgaccaggt

SEQ ID NO: 5185 - RNA, 84 nt, synthetic construct
  source 1..84: mol_type = other RNA
agtgggtagtgggatcctgggtgcacacagcaaagcctctttggaggctgaatggggtcccccgactctggctttcggccaggt

SEQ ID NO: 5186 - RNA, 84 nt, synthetic construct
  source 1..84: mol_type = other RNA
agtgggtagtgggatcctgggtgcacacagcaaagcctctttggaggctgaatggggtcccccgactctggctttcacccaggt

SEQ ID NO: 5187 - RNA, 84 nt, synthetic construct
  source 1..84: mol_type = other RNA
agtgggtagtgggatcctgggtgcacacagcaaagcctctttggaggctgaatggggtcccccgactctggctttcttccaggt

SEQ ID NO: 5188 - RNA, 84 nt, synthetic construct
  source 1..84: mol_type = other RNA
agtgggtagtgggatcctgggtgcacacagcaaagcctctttggaggctgaatggggtcccccgactctggctttcaaccaggt

SEQ ID NO: 5189 - RNA, 85 nt, synthetic construct
  source 1..85: mol_type = other RNA
cagtgggtagtgggatcctgggtgcacacagcaaagcctctttggaggctgaatggggtcccccgactctggctttcatccaggt

SEQ ID NO: 5190 - RNA, 85 nt, synthetic construct
  source 1..85: mol_type = other RNA
cagtgggtagtgggatcctgggtgcacacagcaaagcctctttggaggctgaatggggtcccccgactctggctttcttccaggt

SEQ ID NO: 5191 - RNA, 85 nt, synthetic construct
  source 1..85: mol_type = other RNA
cagtgggtagtgggatcctgggtgcacacagcaaagcctctttggaggctgaatggggtcccccgactctggctttcctccaggt

SEQ ID NO: 5192 - RNA, 85 nt, synthetic construct
  source 1..85: mol_type = other RNA
cagtgggtagtgggatcctgggtgcacacagcaaagcctctttggaggctgaatggggtcccccgactctggctttcgtccaggt

SEQ ID NO: 5193 - RNA, 85 nt, synthetic construct
  source 1..85: mol_type = other RNA
cagtgggtagtgggatcctgggtgcacacagcaaagcctctttggaggctgaatggggtcccccgactctggctttccaccaggt

SEQ ID NO: 5194 - RNA, 85 nt, synthetic construct
  source 1..85: mol_type = other RNA
cagtgggtagtgggatcctgggtgcacacagcaaagcctctttggaggctgaatggggtcccccgactctggctttcacccaggt

SEQ ID NO: 5195 - RNA, 85 nt, synthetic construct
  source 1..85: mol_type = other RNA
cagtgggtagtgggatcctgggtgcacacagcaaagcctctttggaggctgaatggggtcccccgactctggctttcgcccaggt

SEQ ID NO: 5196 - RNA, 85 nt, synthetic construct
  source 1..85: mol_type = other RNA
cagtgggtagtgggatcctgggtgcacacagcaaagcctctttggaggctgaatggggtcccccgactctggctttccgccaggt

SEQ ID NO: 5197 - RNA, 85 nt, synthetic construct
  source 1..85: mol_type = other RNA
cagtgggtagtgggatcctgggtgcacacagcaaagcctctttggaggctgaatggggtcccccgactctggctttcaaccaggt

SEQ ID NO: 5198 - RNA, 85 nt, synthetic construct
  source 1..85: mol_type = other RNA
cagtgggtagtgggatcctgggtgcacacagcaaagcctctttggaggctgaatggggtcccccgactctggctttcggccaggt

SEQ ID NO: 5199 - RNA, 85 nt, synthetic construct
  source 1..85: mol_type = other RNA
cagtgggtagtgggatcctgggtgcacacagcaaagcctctttggaggctgaatggggtcccccgactctggctttctcccaggt

SEQ ID NO: 5200 - RNA, 85 nt, synthetic construct
  source 1..85: mol_type = other RNA
cagtgggtagtgggatcctgggtgcacacagcaaagcctctttggaggctgaatggggtcccccgactctggctttcagccaggt

SEQ ID NO: 5201 - RNA, 85 nt, synthetic construct
  source 1..85: mol_type = other RNA
cagtgggtagtgggatcctgggtgcacacagcaaagcctctttggaggctgaatggggtcccccgactctggctttctaccaggt

SEQ ID NO: 5202 - RNA, 85 nt, synthetic construct
  source 1..85: mol_type = other RNA
cagtgggtagtgggatcctgggtgcacacagcaaagcctctttggaggctgaatggggtcccccgactctggctttctgccaggt

SEQ ID NO: 5203 - RNA, 85 nt, synthetic construct
  source 1..85: mol_type = other RNA
cagtgggtagtgggatcctgggtgcacacagcaaagcctctttggaggctgaatggggtcccccgactctggctttcccccaggt

SEQ ID NO: 5204 - RNA, 85 nt, synthetic construct
  source 1..85: mol_type = other RNA
cagtgggtagtgggatcctgggtgcacacagcaaagcctctttggaggctgaatggggtcccccgactctggctttcgaccaggt

SEQ ID NO: 5205 - RNA, 86 nt, synthetic construct
  source 1..86: mol_type = other RNA
ccagtgggtagtgggatcctgggtgcacacagcaaagcctctttggaggctgaatggggtcccccgactctggctttcttccaggt

SEQ ID NO: 5206 - RNA, 86 nt, synthetic construct
  source 1..86: mol_type = other RNA
ccagtgggtagtgggatcctgggtgcacacagcaaagcctctttggaggctgaatggggtcccccgactctggctttcacccaggt

SEQ ID NO: 5207 - RNA, 86 nt, synthetic construct
  source 1..86: mol_type = other RNA
ccagtgggtagtgggatcctgggtgcacacagcaaagcctctttggaggctgaatggggtcccccgactctggctttccgccaggt

SEQ ID NO: 5208 - RNA, 86 nt, synthetic construct
  source 1..86: mol_type = other RNA
ccagtgggtagtgggatcctgggtgcacacagcaaagcctctttggaggctgaatggggtcccccgactctggctttcgcccaggt

SEQ ID NO: 5209 - RNA, 86 nt, synthetic construct
  source 1..86: mol_type = other RNA
ccagtgggtagtgggatcctgggtgcacacagcaaagcctctttggaggctgaatggggtcccccgactctggctttcggccaggt

SEQ ID NO: 5210 - RNA, 86 nt, synthetic construct
  source 1..86: mol_type = other RNA
ccagtgggtagtgggatcctgggtgcacacagcaaagcctctttggaggctgaatggggtcccccgactctggctttcctccaggt

SEQ ID NO: 5211 - RNA, 86 nt, synthetic construct
  source 1..86: mol_type = other RNA
ccagtgggtagtgggatcctgggtgcacacagcaaagcctctttggaggctgaatggggtcccccgactctggctttctaccaggt

SEQ ID NO: 5212 - RNA, 86 nt, synthetic construct
  source 1..86: mol_type = other RNA
ccagtgggtagtgggatcctgggtgcacacagcaaagcctctttggaggctgaatggggtcccccgactctggctttcatccaggt

SEQ ID NO: 5213 - RNA, 86 nt, synthetic construct
  source 1..86: mol_type = other RNA
ccagtgggtagtgggatcctgggtgcacacagcaaagcctctttggaggctgaatggggtcccccgactctggctttcgaccaggt

SEQ ID NO: 5214 - RNA, 86 nt, synthetic construct
  source 1..86: mol_type = other RNA
ccagtgggtagtgggatcctgggtgcacacagcaaagcctctttggaggctgaatggggtcccccgactctggctttcagccaggt

SEQ ID NO: 5215 - RNA, 86 nt, synthetic construct
  source 1..86: mol_type = other RNA
ccagtgggtagtgggatcctgggtgcacacagcaaagcctctttggaggctgaatggggtcccccgactctggctttccaccaggt

SEQ ID NO: 5216 - RNA, 86 nt, synthetic construct
  source 1..86: mol_type = other RNA
ccagtgggtagtgggatcctgggtgcacacagcaaagcctctttggaggctgaatggggtcccccgactctggctttctgccaggt

SEQ ID NO: 5217 - RNA, 86 nt, synthetic construct
  source 1..86: mol_type = other RNA
ccagtgggtagtgggatcctgggtgcacacagcaaagcctctttggaggctgaatggggtcccccgactctggctttcccccaggt

SEQ ID NO: 5218 - RNA, 86 nt, synthetic construct
  source 1..86: mol_type = other RNA
ccagtgggtagtgggatcctgggtgcacacagcaaagcctctttggaggctgaatggggtcccccgactctggctttcaaccaggt

SEQ ID NO: 5219 - RNA, 86 nt, synthetic construct
  source 1..86: mol_type = other RNA
ccagtgggtagtgggatcctgggtgcacacagcaaagcctctttggaggctgaatggggtcccccgactctggctttcgtccaggt

SEQ ID NO: 5220 - RNA, 86 nt, synthetic construct
  source 1..86: mol_type = other RNA
ccagtgggtagtgggatcctgggtgcacacagcaaagcctctttggaggctgaatggggtcccccgactctggctttctcccaggt

SEQ ID NO: 5221 - RNA, 87 nt, synthetic construct
  source 1..87: mol_type = other RNA
tccagtgggtagtgggatcctgggtgcacacagcaaagcctctttggaggctgaatggggtcccccgactctggctttcttccaggt

SEQ ID NO: 5222 - RNA, 87 nt, synthetic construct
  source 1..87: mol_type = other RNA
tccagtgggtagtgggatcctgggtgcacacagcaaagcctctttggaggctgaatggggtcccccgactctggctttccgccaggt

SEQ ID NO: 5223 - RNA, 87 nt, synthetic construct
  source 1..87: mol_type = other RNA
tccagtgggtagtgggatcctgggtgcacacagcaaagcctctttggaggctgaatggggtcccccgactctggctttctcccaggt

SEQ ID NO: 5224 - RNA, 87 nt, synthetic construct
  source 1..87: mol_type = other RNA
tccagtgggtagtgggatcctgggtgcacacagcaaagcctctttggaggctgaatggggtcccccgactctggctttcaaccaggt

SEQ ID NO: 5225 - RNA, 87 nt, synthetic construct
  source 1..87: mol_type = other RNA
tccagtgggtagtgggatcctgggtgcacacagcaaagcctctttggaggctgaatggggtcccccgactctggctttcggccaggt

SEQ ID NO: 5226 - RNA, 87 nt, synthetic construct
  source 1..87: mol_type = other RNA
tccagtgggtagtgggatcctgggtgcacacagcaaagcctctttggaggctgaatggggtcccccgactctggctttcgaccaggt

SEQ ID NO: 5227 - RNA, 87 nt, synthetic construct
  source 1..87: mol_type = other RNA
tccagtgggtagtgggatcctgggtgcacacagcaaagcctctttggaggctgaatggggtcccccgactctggctttcgcccaggt

SEQ ID NO: 5228 - RNA, 87 nt, synthetic construct
  source 1..87: mol_type = other RNA
tccagtgggtagtgggatcctgggtgcacacagcaaagcctctttggaggctgaatggggtcccccgactctggctttcgtccaggt

SEQ ID NO: 5229 - RNA, 87 nt, synthetic construct
  source 1..87: mol_type = other RNA
tccagtgggtagtgggatcctgggtgcacacagcaaagcctctttggaggctgaatggggtcccccgactctggctttcagccaggt

SEQ ID NO: 5230 - RNA, 87 nt, synthetic construct
  source 1..87: mol_type = other RNA
tccagtgggtagtgggatcctgggtgcacacagcaaagcctctttggaggctgaatggggtcccccgactctggctttccaccaggt

SEQ ID NO: 5231 - RNA, 87 nt, synthetic construct
  source 1..87: mol_type = other RNA
tccagtgggtagtgggatcctgggtgcacacagcaaagcctctttggaggctgaatggggtcccccgactctggctttcacccaggt

SEQ ID NO: 5232 - RNA, 87 nt, synthetic construct
  source 1..87: mol_type = other RNA
tccagtgggtagtgggatcctgggtgcacacagcaaagcctctttggaggctgaatggggtcccccgactctggctttcctccaggt

SEQ ID NO: 5233 - RNA, 87 nt, synthetic construct
  source 1..87: mol_type = other RNA
tccagtgggtagtgggatcctgggtgcacacagcaaagcctctttggaggctgaatggggtcccccgactctggctttctgccaggt

SEQ ID NO: 5234 - RNA, 87 nt, synthetic construct
  source 1..87: mol_type = other RNA
tccagtgggtagtgggatcctgggtgcacacagcaaagcctctttggaggctgaatggggtcccccgactctggctttcccccaggt

SEQ ID NO: 5235 - RNA, 87 nt, synthetic construct
  source 1..87: mol_type = other RNA
tccagtgggtagtgggatcctgggtgcacacagcaaagcctctttggaggctgaatggggtcccccgactctggctttcatccaggt

SEQ ID NO: 5236 - RNA, 87 nt, synthetic construct
  source 1..87: mol_type = other RNA
tccagtgggtagtgggatcctgggtgcacacagcaaagcctctttggaggctgaatggggtcccccgactctggctttctaccaggt

SEQ ID NO: 5237 - RNA, 88 nt, synthetic construct
  source 1..88: mol_type = other RNA
ctccagtgggtagtgggatcctgggtgcacacagcaaagcctctttggaggctgaatggggtcccccgactctggctttctcccaggt

SEQ ID NO: 5238 - RNA, 88 nt, synthetic construct
  source 1..88: mol_type = other RNA
ctccagtgggtagtgggatcctgggtgcacacagcaaagcctctttggaggctgaatggggtcccccgactctggctttcaaccaggt

SEQ ID NO: 5239 - RNA, 88 nt, synthetic construct
  source 1..88: mol_type = other RNA
ctccagtgggtagtgggatcctgggtgcacacagcaaagcctctttggaggctgaatggggtcccccgactctggctttccaccaggt

SEQ ID NO: 5240 - RNA, 88 nt, synthetic construct
  source 1..88: mol_type = other RNA
ctccagtgggtagtgggatcctgggtgcacacagcaaagcctctttggaggctgaatggggtcccccgactctggctttcatccaggt

SEQ ID NO: 5241 - RNA, 88 nt, synthetic construct
  source 1..88: mol_type = other RNA
ctccagtgggtagtgggatcctgggtgcacacagcaaagcctctttggaggctgaatggggtcccccgactctggctttccgccaggt

SEQ ID NO: 5242 - RNA, 88 nt, synthetic construct
  source 1..88: mol_type = other RNA
ctccagtgggtagtgggatcctgggtgcacacagcaaagcctctttggaggctgaatggggtcccccgactctggctttcggccaggt

SEQ ID NO: 5243 - RNA, 88 nt, synthetic construct
  source 1..88: mol_type = other RNA
ctccagtgggtagtgggatcctgggtgcacacagcaaagcctctttggaggctgaatggggtcccccgactctggctttcccccaggt

SEQ ID NO: 5244 - RNA, 88 nt, synthetic construct
  source 1..88: mol_type = other RNA
ctccagtgggtagtgggatcctgggtgcacacagcaaagcctctttggaggctgaatggggtcccccgactctggctttcgtccaggt

SEQ ID NO: 5245 - RNA, 88 nt, synthetic construct
  source 1..88: mol_type = other RNA
ctccagtgggtagtgggatcctgggtgcacacagcaaagcctctttggaggctgaatggggtcccccgactctggctttcctccaggt

SEQ ID NO: 5246 - RNA, 88 nt, synthetic construct
  source 1..88: mol_type = other RNA
ctccagtgggtagtgggatcctgggtgcacacagcaaagcctctttggaggctgaatggggtcccccgactctggctttcgcccaggt

SEQ ID NO: 5247 - RNA, 88 nt, synthetic construct
  source 1..88: mol_type = other RNA
ctccagtgggtagtgggatcctgggtgcacacagcaaagcctctttggaggctgaatggggtcccccgactctggctttctgccaggt

SEQ ID NO: 5248 - RNA, 88 nt, synthetic construct
  source 1..88: mol_type = other RNA
ctccagtgggtagtgggatcctgggtgcacacagcaaagcctctttggaggctgaatggggtcccccgactctggctttcttccaggt

SEQ ID NO: 5249 - RNA, 88 nt, synthetic construct
  source 1..88: mol_type = other RNA
ctccagtgggtagtgggatcctgggtgcacacagcaaagcctctttggaggctgaatggggtcccccgactctggctttctaccaggt

SEQ ID NO: 5250 - RNA, 88 nt, synthetic construct
  source 1..88: mol_type = other RNA
ctccagtgggtagtgggatcctgggtgcacacagcaaagcctctttggaggctgaatggggtcccccgactctggctttcacccaggt

SEQ ID NO: 5251 - RNA, 88 nt, synthetic construct
  source 1..88: mol_type = other RNA
ctccagtgggtagtgggatcctgggtgcacacagcaaagcctctttggaggctgaatggggtcccccgactctggctttcagccaggt

SEQ ID NO: 5252 - RNA, 88 nt, synthetic construct
  source 1..88: mol_type = other RNA
ctccagtgggtagtgggatcctgggtgcacacagcaaagcctctttggaggctgaatggggtcccccgactctggctttcgaccaggt

SEQ ID NO: 5253 - RNA, 89 nt, synthetic construct
  source 1..89: mol_type = other RNA
cctccagtgggtagtgggatcctgggtgcacacagcaaagcctctttggaggctgaatggggtcccccgactctggctttctgccaggt

SEQ ID NO: 5254 - RNA, 89 nt, synthetic construct
  source 1..89: mol_type = other RNA
cctccagtgggtagtgggatcctgggtgcacacagcaaagcctctttggaggctgaatggggtcccccgactctggctttcaaccaggt

SEQ ID NO: 5255 - RNA, 89 nt, synthetic construct
  source 1..89: mol_type = other RNA
cctccagtgggtagtgggatcctgggtgcacacagcaaagcctctttggaggctgaatggggtcccccgactctggctttcttccaggt

SEQ ID NO: 5256 - RNA, 89 nt, synthetic construct
  source 1..89: mol_type = other RNA
cctccagtgggtagtgggatcctgggtgcacacagcaaagcctctttggaggctgaatggggtcccccgactctggctttcctccaggt

SEQ ID NO: 5257 - RNA, 89 nt, synthetic construct
  source 1..89: mol_type = other RNA
cctccagtgggtagtgggatcctgggtgcacacagcaaagcctctttggaggctgaatggggtcccccgactctggctttccaccaggt

SEQ ID NO: 5258 - RNA, 89 nt, synthetic construct
  source 1..89: mol_type = other RNA
cctccagtgggtagtgggatcctgggtgcacacagcaaagcctctttggaggctgaatggggtcccccgactctggctttcccccaggt

SEQ ID NO: 5259 - RNA, 89 nt, synthetic construct
  source 1..89: mol_type = other RNA
cctccagtgggtagtgggatcctgggtgcacacagcaaagcctctttggaggctgaatggggtcccccgactctggctttcatccaggt

SEQ ID NO: 5260 - RNA, 89 nt, synthetic construct
  source 1..89: mol_type = other RNA
cctccagtgggtagtgggatcctgggtgcacacagcaaagcctctttggaggctgaatggggtcccccgactctggctttctcccaggt

SEQ ID NO: 5261 - RNA, 89 nt, synthetic construct
  source 1..89: mol_type = other RNA
cctccagtgggtagtgggatcctgggtgcacacagcaaagcctctttggaggctgaatggggtcccccgactctggctttcagccaggt

SEQ ID NO: 5262 - RNA, 89 nt, synthetic construct
  source 1..89: mol_type = other RNA
cctccagtgggtagtgggatcctgggtgcacacagcaaagcctctttggaggctgaatggggtcccccgactctggctttcggccaggt

SEQ ID NO: 5263 - RNA, 89 nt, synthetic construct
  source 1..89: mol_type = other RNA
cctccagtgggtagtgggatcctgggtgcacacagcaaagcctctttggaggctgaatggggtcccccgactctggctttcgcccaggt

SEQ ID NO: 5264 - RNA, 89 nt, synthetic construct
  source 1..89: mol_type = other RNA
cctccagtgggtagtgggatcctgggtgcacacagcaaagcctctttggaggctgaatggggtcccccgactctggctttcgtccaggt

SEQ ID NO: 5265 - RNA, 89 nt, synthetic construct
  source 1..89: mol_type = other RNA
cctccagtgggtagtgggatcctgggtgcacacagcaaagcctctttggaggctgaatggggtcccccgactctggctttcgaccaggt

SEQ ID NO: 5266 - RNA, 89 nt, synthetic construct
  source 1..89: mol_type = other RNA
cctccagtgggtagtgggatcctgggtgcacacagcaaagcctctttggaggctgaatggggtcccccgactctggctttcacccaggt

SEQ ID NO: 5267 - RNA, 89 nt, synthetic construct
  source 1..89: mol_type = other RNA
cctccagtgggtagtgggatcctgggtgcacacagcaaagcctctttggaggctgaatggggtcccccgactctggctttctaccaggt

SEQ ID NO: 5268 - RNA, 89 nt, synthetic construct
  source 1..89: mol_type = other RNA
cctccagtgggtagtgggatcctgggtgcacacagcaaagcctctttggaggctgaatggggtcccccgactctggctttccgccaggt

SEQ ID NO: 5269 - RNA, 90 nt, synthetic construct
  source 1..90: mol_type = other RNA
tcctccagtgggtagtgggatcctgggtgcacacagcaaagcctctttggaggctgaatggggtcccccgactctggctttcctccaggt

SEQ ID NO: 5270 - RNA, 90 nt, synthetic construct
  source 1..90: mol_type = other RNA
tcctccagtgggtagtgggatcctgggtgcacacagcaaagcctctttggaggctgaatggggtcccccgactctggctttcacccaggt

SEQ ID NO: 5271 - RNA, 90 nt, synthetic construct
  source 1..90: mol_type = other RNA
tcctccagtgggtagtgggatcctgggtgcacacagcaaagcctctttggaggctgaatggggtcccccgactctggctttcttccaggt

SEQ ID NO: 5272 - RNA, 90 nt, synthetic construct
  source 1..90: mol_type = other RNA
tcctccagtgggtagtgggatcctgggtgcacacagcaaagcctctttggaggctgaatggggtcccccgactctggctttctaccaggt

SEQ ID NO: 5273 - RNA, 90 nt, synthetic construct
  source 1..90: mol_type = other RNA
tcctccagtgggtagtgggatcctgggtgcacacagcaaagcctctttggaggctgaatggggtcccccgactctggctttcagccaggt

SEQ ID NO: 5274 - RNA, 90 nt, synthetic construct
  source 1..90: mol_type = other RNA
tcctccagtgggtagtgggatcctgggtgcacacagcaaagcctctttggaggctgaatggggtcccccgactctggctttccgccaggt

SEQ ID NO: 5275 - RNA, 90 nt, synthetic construct
  source 1..90: mol_type = other RNA
tcctccagtgggtagtgggatcctgggtgcacacagcaaagcctctttggaggctgaatggggtcccccgactctggctttcccccaggt

SEQ ID NO: 5276 - RNA, 90 nt, synthetic construct
  source 1..90: mol_type = other RNA
tcctccagtgggtagtgggatcctgggtgcacacagcaaagcctctttggaggctgaatggggtcccccgactctggctttcatccaggt

SEQ ID NO: 5277 - RNA, 90 nt, synthetic construct
  source 1..90: mol_type = other RNA
tcctccagtgggtagtgggatcctgggtgcacacagcaaagcctctttggaggctgaatggggtcccccgactctggctttctcccaggt

SEQ ID NO: 5278 - RNA, 90 nt, synthetic construct
  source 1..90: mol_type = other RNA
tcctccagtgggtagtgggatcctgggtgcacacagcaaagcctctttggaggctgaatggggtcccccgactctggctttcgaccaggt

SEQ ID NO: 5279 - RNA, 90 nt, synthetic construct
  source 1..90: mol_type = other RNA
tcctccagtgggtagtgggatcctgggtgcacacagcaaagcctctttggaggctgaatggggtcccccgactctggctttcaaccaggt

SEQ ID NO: 5280 - RNA, 90 nt, synthetic construct
  source 1..90: mol_type = other RNA
tcctccagtgggtagtgggatcctgggtgcacacagcaaagcctctttggaggctgaatggggtcccccgactctggctttcgtccaggt

SEQ ID NO: 5281 - RNA, 90 nt, synthetic construct
  source 1..90: mol_type = other RNA
tcctccagtgggtagtgggatcctgggtgcacacagcaaagcctctttggaggctgaatggggtcccccgactctggctttcgcccaggt

SEQ ID NO: 5282 - RNA, 90 nt, synthetic construct
  source 1..90: mol_type = other RNA
tcctccagtgggtagtgggatcctgggtgcacacagcaaagcctctttggaggctgaatggggtcccccgactctggctttctgccaggt

SEQ ID NO: 5283 - RNA, 90 nt, synthetic construct
  source 1..90: mol_type = other RNA
tcctccagtgggtagtgggatcctgggtgcacacagcaaagcctctttggaggctgaatggggtcccccgactctggctttccaccaggt

SEQ ID NO: 5284 - RNA, 90 nt, synthetic construct
  source 1..90: mol_type = other RNA
tcctccagtgggtagtgggatcctgggtgcacacagcaaagcctctttggaggctgaatggggtcccccgactctggctttcggccaggt

SEQ ID NO: 5285 - RNA, 91 nt, synthetic construct
  source 1..91: mol_type = other RNA
ttcctccagtgggtagtgggatcctgggtgcacacagcaaagcctctttggaggctgaatggggtcccccgactctggctttcagccaggt

SEQ ID NO: 5286 - RNA, 91 nt, synthetic construct
  source 1..91: mol_type = other RNA
ttcctccagtgggtagtgggatcctgggtgcacacagcaaagcctctttggaggctgaatggggtcccccgactctggctttcccccaggt

SEQ ID NO: 5287 - RNA, 91 nt, synthetic construct
  source 1..91: mol_type = other RNA
ttcctccagtgggtagtgggatcctgggtgcacacagcaaagcctctttggaggctgaatggggtcccccgactctggctttcttccaggt

SEQ ID NO: 5288 - RNA, 91 nt, synthetic construct
  source 1..91: mol_type = other RNA
ttcctccagtgggtagtgggatcctgggtgcacacagcaaagcctctttggaggctgaatggggtcccccgactctggctttcgcccaggt

SEQ ID NO: 5289 - RNA, 91 nt, synthetic construct
  source 1..91: mol_type = other RNA
ttcctccagtgggtagtgggatcctgggtgcacacagcaaagcctctttggaggctgaatggggtcccccgactctggctttccgccaggt

SEQ ID NO: 5290 - RNA, 91 nt, synthetic construct
  source 1..91: mol_type = other RNA
ttcctccagtgggtagtgggatcctgggtgcacacagcaaagcctctttggaggctgaatggggtcccccgactctggctttcggccaggt

SEQ ID NO: 5291 - RNA, 91 nt, synthetic construct
  source 1..91: mol_type = other RNA
ttcctccagtgggtagtgggatcctgggtgcacacagcaaagcctctttggaggctgaatggggtcccccgactctggctttctgccaggt

SEQ ID NO: 5292 - RNA, 91 nt, synthetic construct
  source 1..91: mol_type = other RNA
ttcctccagtgggtagtgggatcctgggtgcacacagcaaagcctctttggaggctgaatggggtcccccgactctggctttcgtccaggt

SEQ ID NO: 5293 - RNA, 91 nt, synthetic construct
  source 1..91: mol_type = other RNA
ttcctccagtgggtagtgggatcctgggtgcacacagcaaagcctctttggaggctgaatggggtcccccgactctggctttcacccaggt

SEQ ID NO: 5294 - RNA, 91 nt, synthetic construct
  source 1..91: mol_type = other RNA
ttcctccagtgggtagtgggatcctgggtgcacacagcaaagcctctttggaggctgaatggggtcccccgactctggctttcctccaggt

SEQ ID NO: 5295 - RNA, 91 nt, synthetic construct
  source 1..91: mol_type = other RNA
ttcctccagtgggtagtgggatcctgggtgcacacagcaaagcctctttggaggctgaatggggtcccccgactctggctttcaaccaggt

SEQ ID NO: 5296 - RNA, 91 nt, synthetic construct
  source 1..91: mol_type = other RNA
ttcctccagtgggtagtgggatcctgggtgcacacagcaaagcctctttggaggctgaatggggtcccccgactctggctttcgaccaggt

SEQ ID NO: 5297 - RNA, 91 nt, synthetic construct
  source 1..91: mol_type = other RNA
ttcctccagtgggtagtgggatcctgggtgcacacagcaaagcctctttggaggctgaatggggtcccccgactctggctttccaccaggt

SEQ ID NO: 5298 - RNA, 91 nt, synthetic construct
  source 1..91: mol_type = other RNA
ttcctccagtgggtagtgggatcctgggtgcacacagcaaagcctctttggaggctgaatggggtcccccgactctggctttctcccaggt

SEQ ID NO: 5299 - RNA, 91 nt, synthetic construct
  source 1..91: mol_type = other RNA
ttcctccagtgggtagtgggatcctgggtgcacacagcaaagcctctttggaggctgaatggggtcccccgactctggctttctaccaggt

SEQ ID NO: 5300 - RNA, 91 nt, synthetic construct
  source 1..91: mol_type = other RNA
ttcctccagtgggtagtgggatcctgggtgcacacagcaaagcctctttggaggctgaatggggtcccccgactctggctttcatccaggt

SEQ ID NO: 5301 - RNA, 92 nt, synthetic construct
  source 1..92: mol_type = other RNA
cttcctccagtgggtagtgggatcctgggtgcacacagcaaagcctctttggaggctgaatggggtcccccgactctggctttccgccaggt

SEQ ID NO: 5302 - RNA, 92 nt, synthetic construct
  source 1..92: mol_type = other RNA
cttcctccagtgggtagtgggatcctgggtgcacacagcaaagcctctttggaggctgaatggggtcccccgactctggctttctcccaggt

SEQ ID NO: 5303 - RNA, 92 nt, synthetic construct
  source 1..92: mol_type = other RNA
cttcctccagtgggtagtgggatcctgggtgcacacagcaaagcctctttggaggctgaatggggtcccccgactctggctttcgcccaggt

SEQ ID NO: 5304 - RNA, 92 nt, synthetic construct
  source 1..92: mol_type = other RNA
cttcctccagtgggtagtgggatcctgggtgcacacagcaaagcctctttggaggctgaatggggtcccccgactctggctttccaccaggt

SEQ ID NO: 5305 - RNA, 92 nt, synthetic construct
  source 1..92: mol_type = other RNA
cttcctccagtgggtagtgggatcctgggtgcacacagcaaagcctctttggaggctgaatggggtcccccgactctggctttcgtccaggt

SEQ ID NO: 5306 - RNA, 92 nt, synthetic construct
  source 1..92: mol_type = other RNA
cttcctccagtgggtagtgggatcctgggtgcacacagcaaagcctctttggaggctgaatggggtcccccgactctggctttcagccaggt

SEQ ID NO: 5307 - RNA, 92 nt, synthetic construct
  source 1..92: mol_type = other RNA
cttcctccagtgggtagtgggatcctgggtgcacacagcaaagcctctttggaggctgaatggggtcccccgactctggctttcaaccaggt

SEQ ID NO: 5308 - RNA, 92 nt, synthetic construct
  source 1..92: mol_type = other RNA
cttcctccagtgggtagtgggatcctgggtgcacacagcaaagcctctttggaggctgaatggggtcccccgactctggctttctgccaggt

SEQ ID NO: 5309 - RNA, 92 nt, synthetic construct
  source 1..92: mol_type = other RNA
cttcctccagtgggtagtgggatcctgggtgcacacagcaaagcctctttggaggctgaatggggtcccccgactctggctttcccccaggt

SEQ ID NO: 5310 - RNA, 92 nt, synthetic construct
  source 1..92: mol_type = other RNA
cttcctccagtgggtagtgggatcctgggtgcacacagcaaagcctctttggaggctgaatggggtcccccgactctggctttcgaccaggt

SEQ ID NO: 5311 - RNA, 92 nt, synthetic construct
  source 1..92: mol_type = other RNA
cttcctccagtgggtagtgggatcctgggtgcacacagcaaagcctctttggaggctgaatggggtcccccgactctggctttcatccaggt

SEQ ID NO: 5312 - RNA, 92 nt, synthetic construct
  source 1..92: mol_type = other RNA
cttcctccagtgggtagtgggatcctgggtgcacacagcaaagcctctttggaggctgaatggggtcccccgactctggctttcacccaggt

SEQ ID NO: 5313 - RNA, 92 nt, synthetic construct
  source 1..92: mol_type = other RNA
cttcctccagtgggtagtgggatcctgggtgcacacagcaaagcctctttggaggctgaatggggtcccccgactctggctttcctccaggt

SEQ ID NO: 5314 - RNA, 92 nt, synthetic construct
  source 1..92: mol_type = other RNA
cttcctccagtgggtagtgggatcctgggtgcacacagcaaagcctctttggaggctgaatggggtcccccgactctggctttcggccaggt

SEQ ID NO: 5315 - RNA, 92 nt, synthetic construct
  source 1..92: mol_type = other RNA
cttcctccagtgggtagtgggatcctgggtgcacacagcaaagcctctttggaggctgaatggggtcccccgactctggctttcttccaggt

SEQ ID NO: 5316 - RNA, 92 nt, synthetic construct
  source 1..92: mol_type = other RNA
cttcctccagtgggtagtgggatcctgggtgcacacagcaaagcctctttggaggctgaatggggtcccccgactctggctttctaccaggt

SEQ ID NO: 5317 - RNA, 93 nt, synthetic construct
  source 1..93: mol_type = other RNA
gcttcctccagtgggtagtgggatcctgggtgcacacagcaaagcctctttggaggctgaatggggtcccccgactctggctttcagccaggt

SEQ ID NO: 5318 - RNA, 93 nt, synthetic construct
  source 1..93: mol_type = other RNA
gcttcctccagtgggtagtgggatcctgggtgcacacagcaaagcctctttggaggctgaatggggtcccccgactctggctttcgcccaggt

SEQ ID NO: 5319 - RNA, 93 nt, synthetic construct
  source 1..93: mol_type = other RNA
gcttcctccagtgggtagtgggatcctgggtgcacacagcaaagcctctttggaggctgaatggggtcccccgactctggctttcccccaggt

SEQ ID NO: 5320 - RNA, 93 nt, synthetic construct
  source 1..93: mol_type = other RNA
gcttcctccagtgggtagtgggatcctgggtgcacacagcaaagcctctttggaggctgaatggggtcccccgactctggctttccgccaggt

SEQ ID NO: 5321 - RNA, 93 nt, synthetic construct
  source 1..93: mol_type = other RNA
gcttcctccagtgggtagtgggatcctgggtgcacacagcaaagcctctttggaggctgaatggggtcccccgactctggctttcacccaggt

SEQ ID NO: 5322 - RNA, 93 nt, synthetic construct
  source 1..93: mol_type = other RNA
gcttcctccagtgggtagtgggatcctgggtgcacacagcaaagcctctttggaggctgaatggggtcccccgactctggctttcttccaggt

SEQ ID NO: 5323 - RNA, 93 nt, synthetic construct
  source 1..93: mol_type = other RNA
gcttcctccagtgggtagtgggatcctgggtgcacacagcaaagcctctttggaggctgaatggggtcccccgactctggctttcgaccaggt

SEQ ID NO: 5324 - RNA, 93 nt, synthetic construct
  source 1..93: mol_type = other RNA
gcttcctccagtgggtagtgggatcctgggtgcacacagcaaagcctctttggaggctgaatggggtcccccgactctggctttctgccaggt

SEQ ID NO: 5325 - RNA, 93 nt, synthetic construct
  source 1..93: mol_type = other RNA
gcttcctccagtgggtagtgggatcctgggtgcacacagcaaagcctctttggaggctgaatggggtcccccgactctggctttctaccaggt

SEQ ID NO: 5326 - RNA, 93 nt, synthetic construct
  source 1..93: mol_type = other RNA
gcttcctccagtgggtagtgggatcctgggtgcacacagcaaagcctctttggaggctgaatggggtcccccgactctggctttcgtccaggt

SEQ ID NO: 5327 - RNA, 93 nt, synthetic construct
  source 1..93: mol_type = other RNA
gcttcctccagtgggtagtgggatcctgggtgcacacagcaaagcctctttggaggctgaatggggtcccccgactctggctttcatccaggt

SEQ ID NO: 5328 - RNA, 93 nt, synthetic construct
  source 1..93: mol_type = other RNA
gcttcctccagtgggtagtgggatcctgggtgcacacagcaaagcctctttggaggctgaatggggtcccccgactctggctttcaaccaggt

SEQ ID NO: 5329 - RNA, 93 nt, synthetic construct
  source 1..93: mol_type = other RNA
gcttcctccagtgggtagtgggatcctgggtgcacacagcaaagcctctttggaggctgaatggggtcccccgactctggctttcggccaggt

SEQ ID NO: 5330 - RNA, 93 nt, synthetic construct
  source 1..93: mol_type = other RNA
gcttcctccagtgggtagtgggatcctgggtgcacacagcaaagcctctttggaggctgaatggggtcccccgactctggctttctcccaggt

SEQ ID NO: 5331 - RNA, 93 nt, synthetic construct
  source 1..93: mol_type = other RNA
gcttcctccagtgggtagtgggatcctgggtgcacacagcaaagcctctttggaggctgaatggggtcccccgactctggctttccaccaggt

SEQ ID NO: 5332 - RNA, 93 nt, synthetic construct
  source 1..93: mol_type = other RNA
gcttcctccagtgggtagtgggatcctgggtgcacacagcaaagcctctttggaggctgaatggggtcccccgactctggctttcctccaggt

SEQ ID NO: 5333 - RNA, 94 nt, synthetic construct
  source 1..94: mol_type = other RNA
ggcttcctccagtgggtagtgggatcctgggtgcacacagcaaagcctctttggaggctgaatggggtcccccgactctggctttcttccaggt

SEQ ID NO: 5334 - RNA, 94 nt, synthetic construct
  source 1..94: mol_type = other RNA
ggcttcctccagtgggtagtgggatcctgggtgcacacagcaaagcctctttggaggctgaatggggtcccccgactctggctttcgcccaggt

SEQ ID NO: 5335 - RNA, 94 nt, synthetic construct
  source 1..94: mol_type = other RNA
ggcttcctccagtgggtagtgggatcctgggtgcacacagcaaagcctctttggaggctgaatggggtcccccgactctggctttctaccaggt

SEQ ID NO: 5336 - RNA, 94 nt, synthetic construct
  source 1..94: mol_type = other RNA
ggcttcctccagtgggtagtgggatcctgggtgcacacagcaaagcctctttggaggctgaatggggtcccccgactctggctttctcccaggt

SEQ ID NO: 5337 - RNA, 94 nt, synthetic construct
  source 1..94: mol_type = other RNA
ggcttcctccagtgggtagtgggatcctgggtgcacacagcaaagcctctttggaggctgaatggggtcccccgactctggctttcctccaggt

SEQ ID NO: 5338 - RNA, 94 nt, synthetic construct
  source 1..94: mol_type = other RNA
ggcttcctccagtgggtagtgggatcctgggtgcacacagcaaagcctctttggaggctgaatggggtcccccgactctggctttctgccaggt

SEQ ID NO: 5339 - RNA, 94 nt, synthetic construct
  source 1..94: mol_type = other RNA
ggcttcctccagtgggtagtgggatcctgggtgcacacagcaaagcctctttggaggctgaatggggtcccccgactctggctttcccccaggt

SEQ ID NO: 5340 - RNA, 94 nt, synthetic construct
  source 1..94: mol_type = other RNA
ggcttcctccagtgggtagtgggatcctgggtgcacacagcaaagcctctttggaggctgaatggggtcccccgactctggctttcagccaggt

SEQ ID NO: 5341 - RNA, 94 nt, synthetic construct
  source 1..94: mol_type = other RNA
ggcttcctccagtgggtagtgggatcctgggtgcacacagcaaagcctctttggaggctgaatggggtcccccgactctggctttcgtccaggt

SEQ ID NO: 5342 - RNA, 94 nt, synthetic construct
  source 1..94: mol_type = other RNA
ggcttcctccagtgggtagtgggatcctgggtgcacacagcaaagcctctttggaggctgaatggggtcccccgactctggctttcgaccaggt

SEQ ID NO: 5343 - RNA, 94 nt, synthetic construct
  source 1..94: mol_type = other RNA
ggcttcctccagtgggtagtgggatcctgggtgcacacagcaaagcctctttggaggctgaatggggtcccccgactctggctttcggccaggt

SEQ ID NO: 5344 - RNA, 94 nt, synthetic construct
  source 1..94: mol_type = other RNA
ggcttcctccagtgggtagtgggatcctgggtgcacacagcaaagcctctttggaggctgaatggggtcccccgactctggctttcacccaggt

SEQ ID NO: 5345 - RNA, 94 nt, synthetic construct
  source 1..94: mol_type = other RNA
ggcttcctccagtgggtagtgggatcctgggtgcacacagcaaagcctctttggaggctgaatggggtcccccgactctggctttccgccaggt

SEQ ID NO: 5346 - RNA, 94 nt, synthetic construct
  source 1..94: mol_type = other RNA
ggcttcctccagtgggtagtgggatcctgggtgcacacagcaaagcctctttggaggctgaatggggtcccccgactctggctttccaccaggt

SEQ ID NO: 5347 - RNA, 94 nt, synthetic construct
  source 1..94: mol_type = other RNA
ggcttcctccagtgggtagtgggatcctgggtgcacacagcaaagcctctttggaggctgaatggggtcccccgactctggctttcaaccaggt

SEQ ID NO: 5348 - RNA, 94 nt, synthetic construct
  source 1..94: mol_type = other RNA
ggcttcctccagtgggtagtgggatcctgggtgcacacagcaaagcctctttggaggctgaatggggtcccccgactctggctttcatccaggt

SEQ ID NO: 5349 - RNA, 95 nt, synthetic construct
  source 1..95: mol_type = other RNA
gggcttcctccagtgggtagtgggatcctgggtgcacacagcaaagcctctttggaggctgaatggggtcccccgactctggctttcccccaggt

SEQ ID NO: 5350 - RNA, 95 nt, synthetic construct
  source 1..95: mol_type = other RNA
gggcttcctccagtgggtagtgggatcctgggtgcacacagcaaagcctctttggaggctgaatggggtcccccgactctggctttctgccaggt

SEQ ID NO: 5351 - RNA, 95 nt, synthetic construct
  source 1..95: mol_type = other RNA
gggcttcctccagtgggtagtgggatcctgggtgcacacagcaaagcctctttggaggctgaatggggtcccccgactctggctttcatccaggt

SEQ ID NO: 5352 - RNA, 95 nt, synthetic construct
  source 1..95: mol_type = other RNA
gggcttcctccagtgggtagtgggatcctgggtgcacacagcaaagcctctttggaggctgaatggggtcccccgactctggctttcgtccaggt

SEQ ID NO: 5353 - RNA, 95 nt, synthetic construct
  source 1..95: mol_type = other RNA
gggcttcctccagtgggtagtgggatcctgggtgcacacagcaaagcctctttggaggctgaatggggtcccccgactctggctttctaccaggt

SEQ ID NO: 5354 - RNA, 95 nt, synthetic construct
  source 1..95: mol_type = other RNA
gggcttcctccagtgggtagtgggatcctgggtgcacacagcaaagcctctttggaggctgaatggggtcccccgactctggctttcggccaggt

SEQ ID NO: 5355 - RNA, 95 nt, synthetic construct
  source 1..95: mol_type = other RNA
gggcttcctccagtgggtagtgggatcctgggtgcacacagcaaagcctctttggaggctgaatggggtcccccgactctggctttcgcccaggt

SEQ ID NO: 5356 - RNA, 95 nt, synthetic construct
  source 1..95: mol_type = other RNA
gggcttcctccagtgggtagtgggatcctgggtgcacacagcaaagcctctttggaggctgaatggggtcccccgactctggctttctcccaggt

SEQ ID NO: 5357 - RNA, 95 nt, synthetic construct
  source 1..95: mol_type = other RNA
gggcttcctccagtgggtagtgggatcctgggtgcacacagcaaagcctctttggaggctgaatggggtcccccgactctggctttcaaccaggt

SEQ ID NO: 5358 - RNA, 95 nt, synthetic construct
  source 1..95: mol_type = other RNA
gggcttcctccagtgggtagtgggatcctgggtgcacacagcaaagcctctttggaggctgaatggggtcccccgactctggctttcctccaggt

SEQ ID NO: 5359 - RNA, 95 nt, synthetic construct
  source 1..95: mol_type = other RNA
gggcttcctccagtgggtagtgggatcctgggtgcacacagcaaagcctctttggaggctgaatggggtcccccgactctggctttccaccaggt

SEQ ID NO: 5360 - RNA, 95 nt, synthetic construct
  source 1..95: mol_type = other RNA
gggcttcctccagtgggtagtgggatcctgggtgcacacagcaaagcctctttggaggctgaatggggtcccccgactctggctttcttccaggt

SEQ ID NO: 5361 - RNA, 95 nt, synthetic construct
  source 1..95: mol_type = other RNA
gggcttcctccagtgggtagtgggatcctgggtgcacacagcaaagcctctttggaggctgaatggggtcccccgactctggctttccgccaggt

SEQ ID NO: 5362 - RNA, 95 nt, synthetic construct
  source 1..95: mol_type = other RNA
gggcttcctccagtgggtagtgggatcctgggtgcacacagcaaagcctctttggaggctgaatggggtcccccgactctggctttcgaccaggt

SEQ ID NO: 5363 - RNA, 95 nt, synthetic construct
  source 1..95: mol_type = other RNA
gggcttcctccagtgggtagtgggatcctgggtgcacacagcaaagcctctttggaggctgaatggggtcccccgactctggctttcacccaggt

SEQ ID NO: 5364 - RNA, 95 nt, synthetic construct
  source 1..95: mol_type = other RNA
gggcttcctccagtgggtagtgggatcctgggtgcacacagcaaagcctctttggaggctgaatggggtcccccgactctggctttcagccaggt

SEQ ID NO: 5365 - RNA, 96 nt, synthetic construct
  source 1..96: mol_type = other RNA
tgggcttcctccagtgggtagtgggatcctgggtgcacacagcaaagcctctttggaggctgaatggggtcccccgactctggctttcgaccaggt

SEQ ID NO: 5366 - RNA, 96 nt, synthetic construct
  source 1..96: mol_type = other RNA
tgggcttcctccagtgggtagtgggatcctgggtgcacacagcaaagcctctttggaggctgaatggggtcccccgactctggctttcgcccaggt

SEQ ID NO: 5367 - RNA, 96 nt, synthetic construct
  source 1..96: mol_type = other RNA
tgggcttcctccagtgggtagtgggatcctgggtgcacacagcaaagcctctttggaggctgaatggggtcccccgactctggctttcacccaggt

SEQ ID NO: 5368 - RNA, 96 nt, synthetic construct
  source 1..96: mol_type = other RNA
tgggcttcctccagtgggtagtgggatcctgggtgcacacagcaaagcctctttggaggctgaatggggtcccccgactctggctttcttccaggt

SEQ ID NO: 5369 - RNA, 96 nt, synthetic construct
  source 1..96: mol_type = other RNA
tgggcttcctccagtgggtagtgggatcctgggtgcacacagcaaagcctctttggaggctgaatggggtcccccgactctggctttcccccaggt

SEQ ID NO: 5370 - RNA, 96 nt, synthetic construct
  source 1..96: mol_type = other RNA
tgggcttcctccagtgggtagtgggatcctgggtgcacacagcaaagcctctttggaggctgaatggggtcccccgactctggctttcaaccaggt

SEQ ID NO: 5371 - RNA, 96 nt, synthetic construct
  source 1..96: mol_type = other RNA
tgggcttcctccagtgggtagtgggatcctgggtgcacacagcaaagcctctttggaggctgaatggggtcccccgactctggctttctgccaggt

SEQ ID NO: 5372 - RNA, 96 nt, synthetic construct
  source 1..96: mol_type = other RNA
tgggcttcctccagtgggtagtgggatcctgggtgcacacagcaaagcctctttggaggctgaatggggtcccccgactctggctttcggccaggt

SEQ ID NO: 5373 - RNA, 96 nt, synthetic construct
  source 1..96: mol_type = other RNA
tgggcttcctccagtgggtagtgggatcctgggtgcacacagcaaagcctctttggaggctgaatggggtcccccgactctggctttcatccaggt

SEQ ID NO: 5374 - RNA, 96 nt, synthetic construct
  source 1..96: mol_type = other RNA
tgggcttcctccagtgggtagtgggatcctgggtgcacacagcaaagcctctttggaggctgaatggggtcccccgactctggctttccgccaggt

SEQ ID NO: 5375 - RNA, 96 nt, synthetic construct
  source 1..96: mol_type = other RNA
tgggcttcctccagtgggtagtgggatcctgggtgcacacagcaaagcctctttggaggctgaatggggtcccccgactctggctttctcccaggt

SEQ ID NO: 5376 - RNA, 96 nt, synthetic construct
  source 1..96: mol_type = other RNA
tgggcttcctccagtgggtagtgggatcctgggtgcacacagcaaagcctctttggaggctgaatggggtcccccgactctggctttcagccaggt

SEQ ID NO: 5377 - RNA, 96 nt, synthetic construct
  source 1..96: mol_type = other RNA
tgggcttcctccagtgggtagtgggatcctgggtgcacacagcaaagcctctttggaggctgaatggggtcccccgactctggctttcctccaggt

SEQ ID NO: 5378 - RNA, 96 nt, synthetic construct
  source 1..96: mol_type = other RNA
tgggcttcctccagtgggtagtgggatcctgggtgcacacagcaaagcctctttggaggctgaatggggtcccccgactctggctttctaccaggt

SEQ ID NO: 5379 - RNA, 96 nt, synthetic construct
  source 1..96: mol_type = other RNA
tgggcttcctccagtgggtagtgggatcctgggtgcacacagcaaagcctctttggaggctgaatggggtcccccgactctggctttccaccaggt

SEQ ID NO: 5380 - RNA, 96 nt, synthetic construct
  source 1..96: mol_type = other RNA
tgggcttcctccagtgggtagtgggatcctgggtgcacacagcaaagcctctttggaggctgaatggggtcccccgactctggctttcgtccaggt

SEQ ID NO: 5381 - RNA, 97 nt, synthetic construct
  source 1..97: mol_type = other RNA
ctgggcttcctccagtgggtagtgggatcctgggtgcacacagcaaagcctctttggaggctgaatggggtcccccgactctggctttcgcccaggt

SEQ ID NO: 5382 - RNA, 97 nt, synthetic construct
  source 1..97: mol_type = other RNA
ctgggcttcctccagtgggtagtgggatcctgggtgcacacagcaaagcctctttggaggctgaatggggtcccccgactctggctttcgtccaggt

SEQ ID NO: 5383 - RNA, 97 nt, synthetic construct
  source 1..97: mol_type = other RNA
ctgggcttcctccagtgggtagtgggatcctgggtgcacacagcaaagcctctttggaggctgaatggggtcccccgactctggctttctaccaggt

SEQ ID NO: 5384 - RNA, 97 nt, synthetic construct
  source 1..97: mol_type = other RNA
ctgggcttcctccagtgggtagtgggatcctgggtgcacacagcaaagcctctttggaggctgaatggggtcccccgactctggctttcatccaggt

SEQ ID NO: 5385 - RNA, 97 nt, synthetic construct
  source 1..97: mol_type = other RNA
ctgggcttcctccagtgggtagtgggatcctgggtgcacacagcaaagcctctttggaggctgaatggggtcccccgactctggctttcccccaggt

SEQ ID NO: 5386 - RNA, 97 nt, synthetic construct
  source 1..97: mol_type = other RNA
ctgggcttcctccagtgggtagtgggatcctgggtgcacacagcaaagcctctttggaggctgaatggggtcccccgactctggctttctgccaggt

SEQ ID NO: 5387 - RNA, 97 nt, synthetic construct
  source 1..97: mol_type = other RNA
ctgggcttcctccagtgggtagtgggatcctgggtgcacacagcaaagcctctttggaggctgaatggggtcccccgactctggctttcggccaggt

SEQ ID NO: 5388 - RNA, 97 nt, synthetic construct
  source 1..97: mol_type = other RNA
ctgggcttcctccagtgggtagtgggatcctgggtgcacacagcaaagcctctttggaggctgaatggggtcccccgactctggctttccgccaggt

SEQ ID NO: 5389 - RNA, 97 nt, synthetic construct
  source 1..97: mol_type = other RNA
ctgggcttcctccagtgggtagtgggatcctgggtgcacacagcaaagcctctttggaggctgaatggggtcccccgactctggctttctcccaggt

SEQ ID NO: 5390 - RNA, 97 nt, synthetic construct
  source 1..97: mol_type = other RNA
ctgggcttcctccagtgggtagtgggatcctgggtgcacacagcaaagcctctttggaggctgaatggggtcccccgactctggctttcgaccaggt

SEQ ID NO: 5391 - RNA, 97 nt, synthetic construct
  source 1..97: mol_type = other RNA
ctgggcttcctccagtgggtagtgggatcctgggtgcacacagcaaagcctctttggaggctgaatggggtcccccgactctggctttcaaccaggt

SEQ ID NO: 5392 - RNA, 97 nt, synthetic construct
  source 1..97: mol_type = other RNA
ctgggcttcctccagtgggtagtgggatcctgggtgcacacagcaaagcctctttggaggctgaatggggtcccccgactctggctttcacccaggt

SEQ ID NO: 5393 - RNA, 97 nt, synthetic construct
  source 1..97: mol_type = other RNA
ctgggcttcctccagtgggtagtgggatcctgggtgcacacagcaaagcctctttggaggctgaatggggtcccccgactctggctttcttccaggt

SEQ ID NO: 5394 - RNA, 97 nt, synthetic construct
  source 1..97: mol_type = other RNA
ctgggcttcctccagtgggtagtgggatcctgggtgcacacagcaaagcctctttggaggctgaatggggtcccccgactctggctttccaccaggt

SEQ ID NO: 5395 - RNA, 97 nt, synthetic construct
  source 1..97: mol_type = other RNA
ctgggcttcctccagtgggtagtgggatcctgggtgcacacagcaaagcctctttggaggctgaatggggtcccccgactctggctttcagccaggt

SEQ ID NO: 5396 - RNA, 97 nt, synthetic construct
  source 1..97: mol_type = other RNA
ctgggcttcctccagtgggtagtgggatcctgggtgcacacagcaaagcctctttggaggctgaatggggtcccccgactctggctttcctccaggt

SEQ ID NO: 5397 - RNA, 98 nt, synthetic construct
  source 1..98: mol_type = other RNA
tctgggcttcctccagtgggtagtgggatcctgggtgcacacagcaaagcctctttggaggctgaatggggtcccccgactctggctttcatccaggt

SEQ ID NO: 5398 - RNA, 98 nt, synthetic construct
  source 1..98: mol_type = other RNA
tctgggcttcctccagtgggtagtgggatcctgggtgcacacagcaaagcctctttggaggctgaatggggtcccccgactctggctttcaaccaggt

SEQ ID NO: 5399 - RNA, 98 nt, synthetic construct
  source 1..98: mol_type = other RNA
tctgggcttcctccagtgggtagtgggatcctgggtgcacacagcaaagcctctttggaggctgaatggggtcccccgactctggctttcccccaggt

SEQ ID NO: 5400 - RNA, 98 nt, synthetic construct
  source 1..98: mol_type = other RNA
tctgggcttcctccagtgggtagtgggatcctgggtgcacacagcaaagcctctttggaggctgaatggggtcccccgactctggctttcgcccaggt

SEQ ID NO: 5401 - RNA, 98 nt, synthetic construct
  source 1..98: mol_type = other RNA
tctgggcttcctccagtgggtagtgggatcctgggtgcacacagcaaagcctctttggaggctgaatggggtcccccgactctggctttccgccaggt

SEQ ID NO: 5402 - RNA, 98 nt, synthetic construct
  source 1..98: mol_type = other RNA
tctgggcttcctccagtgggtagtgggatcctgggtgcacacagcaaagcctctttggaggctgaatggggtcccccgactctggctttctaccaggt

SEQ ID NO: 5403 - RNA, 98 nt, synthetic construct
  source 1..98: mol_type = other RNA
tctgggcttcctccagtgggtagtgggatcctgggtgcacacagcaaagcctctttggaggctgaatggggtcccccgactctggctttcacccaggt

SEQ ID NO: 5404 - RNA, 98 nt, synthetic construct
  source 1..98: mol_type = other RNA
tctgggcttcctccagtgggtagtgggatcctgggtgcacacagcaaagcctctttggaggctgaatggggtcccccgactctggctttcggccaggt

SEQ ID NO: 5405 - RNA, 98 nt, synthetic construct
  source 1..98: mol_type = other RNA
tctgggcttcctccagtgggtagtgggatcctgggtgcacacagcaaagcctctttggaggctgaatggggtcccccgactctggctttccaccaggt

SEQ ID NO: 5406 - RNA, 98 nt, synthetic construct
  source 1..98: mol_type = other RNA
tctgggcttcctccagtgggtagtgggatcctgggtgcacacagcaaagcctctttggaggctgaatggggtcccccgactctggctttcttccaggt

SEQ ID NO: 5407 - RNA, 98 nt, synthetic construct
  source 1..98: mol_type = other RNA
tctgggcttcctccagtgggtagtgggatcctgggtgcacacagcaaagcctctttggaggctgaatggggtcccccgactctggctttcgaccaggt

SEQ ID NO: 5408 - RNA, 98 nt, synthetic construct
  source 1..98: mol_type = other RNA
tctgggcttcctccagtgggtagtgggatcctgggtgcacacagcaaagcctctttggaggctgaatggggtcccccgactctggctttcgtccaggt

SEQ ID NO: 5409 - RNA, 98 nt, synthetic construct
  source 1..98: mol_type = other RNA
tctgggcttcctccagtgggtagtgggatcctgggtgcacacagcaaagcctctttggaggctgaatggggtcccccgactctggctttcagccaggt

SEQ ID NO: 5410 - RNA, 98 nt, synthetic construct
  source 1..98: mol_type = other RNA
tctgggcttcctccagtgggtagtgggatcctgggtgcacacagcaaagcctctttggaggctgaatggggtcccccgactctggctttctgccaggt

SEQ ID NO: 5411 - RNA, 98 nt, synthetic construct
  source 1..98: mol_type = other RNA
tctgggcttcctccagtgggtagtgggatcctgggtgcacacagcaaagcctctttggaggctgaatggggtcccccgactctggctttctcccaggt

SEQ ID NO: 5412 - RNA, 98 nt, synthetic construct
  source 1..98: mol_type = other RNA
tctgggcttcctccagtgggtagtgggatcctgggtgcacacagcaaagcctctttggaggctgaatggggtcccccgactctggctttcctccaggt

SEQ ID NO: 5413 - RNA, 99 nt, synthetic construct
  source 1..99: mol_type = other RNA
ctctgggcttcctccagtgggtagtgggatcctgggtgcacacagcaaagcctctttggaggctgaatggggtcccccgactctggctttctgccaggt

SEQ ID NO: 5414 - RNA, 99 nt, synthetic construct
  source 1..99: mol_type = other RNA
ctctgggcttcctccagtgggtagtgggatcctgggtgcacacagcaaagcctctttggaggctgaatggggtcccccgactctggctttcccccaggt

SEQ ID NO: 5415 - RNA, 99 nt, synthetic construct
  source 1..99: mol_type = other RNA
ctctgggcttcctccagtgggtagtgggatcctgggtgcacacagcaaagcctctttggaggctgaatggggtcccccgactctggctttcgcccaggt

SEQ ID NO: 5416 - RNA, 99 nt, synthetic construct
  source 1..99: mol_type = other RNA
ctctgggcttcctccagtgggtagtgggatcctgggtgcacacagcaaagcctctttggaggctgaatggggtcccccgactctggctttcgtccaggt

SEQ ID NO: 5417 - RNA, 99 nt, synthetic construct
  source 1..99: mol_type = other RNA
ctctgggcttcctccagtgggtagtgggatcctgggtgcacacagcaaagcctctttggaggctgaatggggtcccccgactctggctttctaccaggt

SEQ ID NO: 5418 - RNA, 99 nt, synthetic construct
  source 1..99: mol_type = other RNA
ctctgggcttcctccagtgggtagtgggatcctgggtgcacacagcaaagcctctttggaggctgaatggggtcccccgactctggctttcacccaggt

SEQ ID NO: 5419 - RNA, 99 nt, synthetic construct
  source 1..99: mol_type = other RNA
ctctgggcttcctccagtgggtagtgggatcctgggtgcacacagcaaagcctctttggaggctgaatggggtcccccgactctggctttcgaccaggt

SEQ ID NO: 5420 - RNA, 99 nt, synthetic construct
  source 1..99: mol_type = other RNA
ctctgggcttcctccagtgggtagtgggatcctgggtgcacacagcaaagcctctttggaggctgaatggggtcccccgactctggctttcggccaggt

SEQ ID NO: 5421 - RNA, 99 nt, synthetic construct
  source 1..99: mol_type = other RNA
ctctgggcttcctccagtgggtagtgggatcctgggtgcacacagcaaagcctctttggaggctgaatggggtcccccgactctggctttcctccaggt

SEQ ID NO: 5422 - RNA, 99 nt, synthetic construct
  source 1..99: mol_type = other RNA
ctctgggcttcctccagtgggtagtgggatcctgggtgcacacagcaaagcctctttggaggctgaatggggtcccccgactctggctttccgccaggt

SEQ ID NO: 5423 - RNA, 99 nt, synthetic construct
  source 1..99: mol_type = other RNA
ctctgggcttcctccagtgggtagtgggatcctgggtgcacacagcaaagcctctttggaggctgaatggggtcccccgactctggctttcatccaggt

SEQ ID NO: 5424 - RNA, 99 nt, synthetic construct
  source 1..99: mol_type = other RNA
ctctgggcttcctccagtgggtagtgggatcctgggtgcacacagcaaagcctctttggaggctgaatggggtcccccgactctggctttctcccaggt

SEQ ID NO: 5425 - RNA, 99 nt, synthetic construct
  source 1..99: mol_type = other RNA
ctctgggcttcctccagtgggtagtgggatcctgggtgcacacagcaaagcctctttggaggctgaatggggtcccccgactctggctttcttccaggt

SEQ ID NO: 5426 - RNA, 99 nt, synthetic construct
  source 1..99: mol_type = other RNA
ctctgggcttcctccagtgggtagtgggatcctgggtgcacacagcaaagcctctttggaggctgaatggggtcccccgactctggctttcagccaggt

SEQ ID NO: 5427 - RNA, 99 nt, synthetic construct
  source 1..99: mol_type = other RNA
ctctgggcttcctccagtgggtagtgggatcctgggtgcacacagcaaagcctctttggaggctgaatggggtcccccgactctggctttccaccaggt

SEQ ID NO: 5428 - RNA, 99 nt, synthetic construct
  source 1..99: mol_type = other RNA
ctctgggcttcctccagtgggtagtgggatcctgggtgcacacagcaaagcctctttggaggctgaatggggtcccccgactctggctttcaaccaggt

SEQ ID NO: 5429 - RNA, 100 nt, synthetic construct
  source 1..100: mol_type = other RNA
cctctgggcttcctccagtgggtagtgggatcctgggtgcacacagcaaagcctctttggaggctgaatggggtcccccgactctggctttcaaccaggt

SEQ ID NO: 5430 - RNA, 100 nt, synthetic construct
  source 1..100: mol_type = other RNA
cctctgggcttcctccagtgggtagtgggatcctgggtgcacacagcaaagcctctttggaggctgaatggggtcccccgactctggctttctgccaggt

SEQ ID NO: 5431 - RNA, 100 nt, synthetic construct
  source 1..100: mol_type = other RNA
cctctgggcttcctccagtgggtagtgggatcctgggtgcacacagcaaagcctctttggaggctgaatggggtcccccgactctggctttccgccaggt

SEQ ID NO: 5432 - RNA, 100 nt, synthetic construct
  source 1..100: mol_type = other RNA
cctctgggcttcctccagtgggtagtgggatcctgggtgcacacagcaaagcctctttggaggctgaatggggtcccccgactctggctttcgcccaggt

SEQ ID NO: 5433 - RNA, 100 nt, synthetic construct
  source 1..100: mol_type = other RNA
cctctgggcttcctccagtgggtagtgggatcctgggtgcacacagcaaagcctctttggaggctgaatggggtcccccgactctggctttcccccaggt

SEQ ID NO: 5434 - RNA, 100 nt, synthetic construct
  source 1..100: mol_type = other RNA
cctctgggcttcctccagtgggtagtgggatcctgggtgcacacagcaaagcctctttggaggctgaatggggtcccccgactctggctttcgtccaggt

SEQ ID NO: 5435 - RNA, 100 nt, synthetic construct
  source 1..100: mol_type = other RNA
cctctgggcttcctccagtgggtagtgggatcctgggtgcacacagcaaagcctctttggaggctgaatggggtcccccgactctggctttcttccaggt

SEQ ID NO: 5436 - RNA, 100 nt, synthetic construct
  source 1..100: mol_type = other RNA
cctctgggcttcctccagtgggtagtgggatcctgggtgcacacagcaaagcctctttggaggctgaatggggtcccccgactctggctttcagccaggt

SEQ ID NO: 5437 - RNA, 100 nt, synthetic construct
  source 1..100: mol_type = other RNA
cctctgggcttcctccagtgggtagtgggatcctgggtgcacacagcaaagcctctttggaggctgaatggggtcccccgactctggctttctaccaggt

SEQ ID NO: 5438 - RNA, 100 nt, synthetic construct
  source 1..100: mol_type = other RNA
cctctgggcttcctccagtgggtagtgggatcctgggtgcacacagcaaagcctctttggaggctgaatggggtcccccgactctggctttctcccaggt

SEQ ID NO: 5439 - RNA, 100 nt, synthetic construct
  source 1..100: mol_type = other RNA
cctctgggcttcctccagtgggtagtgggatcctgggtgcacacagcaaagcctctttggaggctgaatggggtcccccgactctggctttcatccaggt

SEQ ID NO: 5440 - RNA, 100 nt, synthetic construct
  source 1..100: mol_type = other RNA
cctctgggcttcctccagtgggtagtgggatcctgggtgcacacagcaaagcctctttggaggctgaatggggtcccccgactctggctttcacccaggt

SEQ ID NO: 5441 - RNA, 100 nt, synthetic construct
  source 1..100: mol_type = other RNA
cctctgggcttcctccagtgggtagtgggatcctgggtgcacacagcaaagcctctttggaggctgaatggggtcccccgactctggctttcctccaggt

SEQ ID NO: 5442 - RNA, 100 nt, synthetic construct
  source 1..100: mol_type = other RNA
cctctgggcttcctccagtgggtagtgggatcctgggtgcacacagcaaagcctctttggaggctgaatggggtcccccgactctggctttcgaccaggt

SEQ ID NO: 5443 - RNA, 100 nt, synthetic construct
  source 1..100: mol_type = other RNA
cctctgggcttcctccagtgggtagtgggatcctgggtgcacacagcaaagcctctttggaggctgaatggggtcccccgactctggctttccaccaggt

SEQ ID NO: 5444 - RNA, 100 nt, synthetic construct
  source 1..100: mol_type = other RNA
cctctgggcttcctccagtgggtagtgggatcctgggtgcacacagcaaagcctctttggaggctgaatggggtcccccgactctggctttcggccaggt

SEQ ID NO: 5445 - RNA, 101 nt, synthetic construct
  source 1..101: mol_type = other RNA
tcctctgggcttcctccagtgggtagtgggatcctgggtgcacacagcaaagcctctttggaggctgaatggggtcccccgactctggctttcgcccaggt

SEQ ID NO: 5446 - RNA, 101 nt, synthetic construct
  source 1..101: mol_type = other RNA
tcctctgggcttcctccagtgggtagtgggatcctgggtgcacacagcaaagcctctttggaggctgaatggggtcccccgactctggctttcaaccaggt

SEQ ID NO: 5447 - RNA, 101 nt, synthetic construct
  source 1..101: mol_type = other RNA
tcctctgggcttcctccagtgggtagtgggatcctgggtgcacacagcaaagcctctttggaggctgaatggggtcccccgactctggctttcacccaggt

SEQ ID NO: 5448 - RNA, 101 nt, synthetic construct
  source 1..101: mol_type = other RNA
tcctctgggcttcctccagtgggtagtgggatcctgggtgcacacagcaaagcctctttggaggctgaatggggtcccccgactctggctttcagccaggt

SEQ ID NO: 5449 - RNA, 101 nt, synthetic construct
  source 1..101: mol_type = other RNA
tcctctgggcttcctccagtgggtagtgggatcctgggtgcacacagcaaagcctctttggaggctgaatggggtcccccgactctggctttcctccaggt

SEQ ID NO: 5450 - RNA, 101 nt, synthetic construct
  source 1..101: mol_type = other RNA
tcctctgggcttcctccagtgggtagtgggatcctgggtgcacacagcaaagcctctttggaggctgaatggggtcccccgactctggctttcgaccaggt

SEQ ID NO: 5451 - RNA, 101 nt, synthetic construct
  source 1..101: mol_type = other RNA
tcctctgggcttcctccagtgggtagtgggatcctgggtgcacacagcaaagcctctttggaggctgaatggggtcccccgactctggctttccaccaggt

SEQ ID NO: 5452 - RNA, 101 nt, synthetic construct
  source 1..101: mol_type = other RNA
tcctctgggcttcctccagtgggtagtgggatcctgggtgcacacagcaaagcctctttggaggctgaatggggtcccccgactctggctttcgtccaggt

SEQ ID NO: 5453 - RNA, 101 nt, synthetic construct
  source 1..101: mol_type = other RNA
tcctctgggcttcctccagtgggtagtgggatcctgggtgcacacagcaaagcctctttggaggctgaatggggtcccccgactctggctttcatccaggt

SEQ ID NO: 5454 - RNA, 101 nt, synthetic construct
  source 1..101: mol_type = other RNA
tcctctgggcttcctccagtgggtagtgggatcctgggtgcacacagcaaagcctctttggaggctgaatggggtcccccgactctggctttcttccaggt

SEQ ID NO: 5455 - RNA, 101 nt, synthetic construct
  source 1..101: mol_type = other RNA
tcctctgggcttcctccagtgggtagtgggatcctgggtgcacacagcaaagcctctttggaggctgaatggggtcccccgactctggctttctaccaggt

SEQ ID NO: 5456 - RNA, 101 nt, synthetic construct
  source 1..101: mol_type = other RNA
tcctctgggcttcctccagtgggtagtgggatcctgggtgcacacagcaaagcctctttggaggctgaatggggtcccccgactctggctttctcccaggt

SEQ ID NO: 5457 - RNA, 101 nt, synthetic construct
  source 1..101: mol_type = other RNA
tcctctgggcttcctccagtgggtagtgggatcctgggtgcacacagcaaagcctctttggaggctgaatggggtcccccgactctggctttctgccaggt

SEQ ID NO: 5458 - RNA, 101 nt, synthetic construct
  source 1..101: mol_type = other RNA
tcctctgggcttcctccagtgggtagtgggatcctgggtgcacacagcaaagcctctttggaggctgaatggggtcccccgactctggctttcccccaggt

SEQ ID NO: 5459 - RNA, 101 nt, synthetic construct
  source 1..101: mol_type = other RNA
tcctctgggcttcctccagtgggtagtgggatcctgggtgcacacagcaaagcctctttggaggctgaatggggtcccccgactctggctttcggccaggt

SEQ ID NO: 5460 - RNA, 101 nt, synthetic construct
  source 1..101: mol_type = other RNA
tcctctgggcttcctccagtgggtagtgggatcctgggtgcacacagcaaagcctctttggaggctgaatggggtcccccgactctggctttccgccaggt

SEQ ID NO: 5461 - RNA, 102 nt, synthetic construct
  source 1..102: mol_type = other RNA
atcctctgggcttcctccagtgggtagtgggatcctgggtgcacacagcaaagcctctttggaggctgaatggggtcccccgactctggctttctgccaggt

SEQ ID NO: 5462 - RNA, 102 nt, synthetic construct
  source 1..102: mol_type = other RNA
atcctctgggcttcctccagtgggtagtgggatcctgggtgcacacagcaaagcctctttggaggctgaatggggtcccccgactctggctttcgtccaggt

SEQ ID NO: 5463 - RNA, 102 nt, synthetic construct
  source 1..102: mol_type = other RNA
atcctctgggcttcctccagtgggtagtgggatcctgggtgcacacagcaaagcctctttggaggctgaatggggtcccccgactctggctttcgaccaggt

SEQ ID NO: 5464 - RNA, 102 nt, synthetic construct
  source 1..102: mol_type = other RNA
atcctctgggcttcctccagtgggtagtgggatcctgggtgcacacagcaaagcctctttggaggctgaatggggtcccccgactctggctttcccccaggt

SEQ ID NO: 5465 - RNA, 102 nt, synthetic construct
  source 1..102: mol_type = other RNA
atcctctgggcttcctccagtgggtagtgggatcctgggtgcacacagcaaagcctctttggaggctgaatggggtcccccgactctggctttcctccaggt

SEQ ID NO: 5466 - RNA, 102 nt, synthetic construct
  source 1..102: mol_type = other RNA
atcctctgggcttcctccagtgggtagtgggatcctgggtgcacacagcaaagcctctttggaggctgaatggggtcccccgactctggctttcaaccaggt

SEQ ID NO: 5467 - RNA, 102 nt, synthetic construct
  source 1..102: mol_type = other RNA
atcctctgggcttcctccagtgggtagtgggatcctgggtgcacacagcaaagcctctttggaggctgaatggggtcccccgactctggctttcacccaggt

SEQ ID NO: 5468 - RNA, 102 nt, synthetic construct
  source 1..102: mol_type = other RNA
atcctctgggcttcctccagtgggtagtgggatcctgggtgcacacagcaaagcctctttggaggctgaatggggtcccccgactctggctttccgccaggt

SEQ ID NO: 5469 - RNA, 102 nt, synthetic construct
  source 1..102: mol_type = other RNA
atcctctgggcttcctccagtgggtagtgggatcctgggtgcacacagcaaagcctctttggaggctgaatggggtcccccgactctggctttcagccaggt

SEQ ID NO: 5470 - RNA, 102 nt, synthetic construct
  source 1..102: mol_type = other RNA
atcctctgggcttcctccagtgggtagtgggatcctgggtgcacacagcaaagcctctttggaggctgaatggggtcccccgactctggctttcatccaggt

SEQ ID NO: 5471 - RNA, 102 nt, synthetic construct
  source 1..102: mol_type = other RNA
atcctctgggcttcctccagtgggtagtgggatcctgggtgcacacagcaaagcctctttggaggctgaatggggtcccccgactctggctttccaccaggt

SEQ ID NO: 5472 - RNA, 102 nt, synthetic construct
  source 1..102: mol_type = other RNA
atcctctgggcttcctccagtgggtagtgggatcctgggtgcacacagcaaagcctctttggaggctgaatggggtcccccgactctggctttcggccaggt

SEQ ID NO: 5473 - RNA, 102 nt, synthetic construct
  source 1..102: mol_type = other RNA
atcctctgggcttcctccagtgggtagtgggatcctgggtgcacacagcaaagcctctttggaggctgaatggggtcccccgactctggctttcgcccaggt

SEQ ID NO: 5474 - RNA, 102 nt, synthetic construct
  source 1..102: mol_type = other RNA
atcctctgggcttcctccagtgggtagtgggatcctgggtgcacacagcaaagcctctttggaggctgaatggggtcccccgactctggctttctaccaggt

SEQ ID NO: 5475 - RNA, 102 nt, synthetic construct
  source 1..102: mol_type = other RNA
atcctctgggcttcctccagtgggtagtgggatcctgggtgcacacagcaaagcctctttggaggctgaatggggtcccccgactctggctttcttccaggt

SEQ ID NO: 5476 - RNA, 102 nt, synthetic construct
  source 1..102: mol_type = other RNA
atcctctgggcttcctccagtgggtagtgggatcctgggtgcacacagcaaagcctctttggaggctgaatggggtcccccgactctggctttctcccaggt

SEQ ID NO: 5477 - RNA, 103 nt, synthetic construct
  source 1..103: mol_type = other RNA
aatcctctgggcttcctccagtgggtagtgggatcctgggtgcacacagcaaagcctctttggaggctgaatggggtcccccgactctggctttcagccaggt

SEQ ID NO: 5478 - RNA, 103 nt, synthetic construct
  source 1..103: mol_type = other RNA
aatcctctgggcttcctccagtgggtagtgggatcctgggtgcacacagcaaagcctctttggaggctgaatggggtcccccgactctggctttcccccaggt

SEQ ID NO: 5479 - RNA, 103 nt, synthetic construct
  source 1..103: mol_type = other RNA
aatcctctgggcttcctccagtgggtagtgggatcctgggtgcacacagcaaagcctctttggaggctgaatggggtcccccgactctggctttcctccaggt

SEQ ID NO: 5480 - RNA, 103 nt, synthetic construct
  source 1..103: mol_type = other RNA
aatcctctgggcttcctccagtgggtagtgggatcctgggtgcacacagcaaagcctctttggaggctgaatggggtcccccgactctggctttccgccaggt

SEQ ID NO: 5481 - RNA, 103 nt, synthetic construct
  source 1..103: mol_type = other RNA
aatcctctgggcttcctccagtgggtagtgggatcctgggtgcacacagcaaagcctctttggaggctgaatggggtcccccgactctggctttcaaccaggt

SEQ ID NO: 5482 - RNA, 103 nt, synthetic construct
  source 1..103: mol_type = other RNA
aatcctctgggcttcctccagtgggtagtgggatcctgggtgcacacagcaaagcctctttggaggctgaatggggtcccccgactctggctttccaccaggt

SEQ ID NO: 5483 - RNA, 103 nt, synthetic construct
  source 1..103: mol_type = other RNA
aatcctctgggcttcctccagtgggtagtgggatcctgggtgcacacagcaaagcctctttggaggctgaatggggtcccccgactctggctttcttccaggt

SEQ ID NO: 5484 - RNA, 103 nt, synthetic construct
  source 1..103: mol_type = other RNA
aatcctctgggcttcctccagtgggtagtgggatcctgggtgcacacagcaaagcctctttggaggctgaatggggtcccccgactctggctttcgaccaggt

SEQ ID NO: 5485 - RNA, 103 nt, synthetic construct
  source 1..103: mol_type = other RNA
aatcctctgggcttcctccagtgggtagtgggatcctgggtgcacacagcaaagcctctttggaggctgaatggggtcccccgactctggctttcgcccaggt

SEQ ID NO: 5486 - RNA, 103 nt, synthetic construct
  source 1..103: mol_type = other RNA
aatcctctgggcttcctccagtgggtagtgggatcctgggtgcacacagcaaagcctctttggaggctgaatggggtcccccgactctggctttctaccaggt

SEQ ID NO: 5487 - RNA, 103 nt, synthetic construct
  source 1..103: mol_type = other RNA
aatcctctgggcttcctccagtgggtagtgggatcctgggtgcacacagcaaagcctctttggaggctgaatggggtcccccgactctggctttcatccaggt

SEQ ID NO: 5488 - RNA, 103 nt, synthetic construct
  source 1..103: mol_type = other RNA
aatcctctgggcttcctccagtgggtagtgggatcctgggtgcacacagcaaagcctctttggaggctgaatggggtcccccgactctggctttcggccaggt

SEQ ID NO: 5489 - RNA, 103 nt, synthetic construct
  source 1..103: mol_type = other RNA
aatcctctgggcttcctccagtgggtagtgggatcctgggtgcacacagcaaagcctctttggaggctgaatggggtcccccgactctggctttctcccaggt

SEQ ID NO: 5490 - RNA, 103 nt, synthetic construct
  source 1..103: mol_type = other RNA
aatcctctgggcttcctccagtgggtagtgggatcctgggtgcacacagcaaagcctctttggaggctgaatggggtcccccgactctggctttctgccaggt

SEQ ID NO: 5491 - RNA, 103 nt, synthetic construct
  source 1..103: mol_type = other RNA
aatcctctgggcttcctccagtgggtagtgggatcctgggtgcacacagcaaagcctctttggaggctgaatggggtcccccgactctggctttcgtccaggt

SEQ ID NO: 5492 - RNA, 103 nt, synthetic construct
  source 1..103: mol_type = other RNA
aatcctctgggcttcctccagtgggtagtgggatcctgggtgcacacagcaaagcctctttggaggctgaatggggtcccccgactctggctttcacccaggt

SEQ ID NO: 5493 - RNA, 19 nt, synthetic construct
  source 1..19: mol_type = other RNA
caccaggaacatgtacctg

SEQ ID NO: 5494 - RNA, 19 nt, synthetic construct
  source 1..19: mol_type = other RNA
tcaccaggaacatgtacct

SEQ ID NO: 5495 - RNA, 20 nt, synthetic construct
  source 1..20: mol_type = other RNA
cccgactctggctttccgcc

SEQ ID NO: 5496 - RNA, 20 nt, synthetic construct
  source 1..20: mol_type = other RNA
cccgactctggctttctgcc

SEQ ID NO: 5497 - RNA, 20 nt, synthetic construct
  source 1..20: mol_type = other RNA
cccgactctggctttcatcc

SEQ ID NO: 5498 - RNA, 20 nt, synthetic construct
  source 1..20: mol_type = other RNA
cccgactctggctttcctcc

SEQ ID NO: 5499 - RNA, 20 nt, synthetic construct
  source 1..20: mol_type = other RNA
cccgactctggctttcagcc

SEQ ID NO: 5500 - RNA, 20 nt, synthetic construct
  source 1..20: mol_type = other RNA
cccgactctggctttcgtcc

SEQ ID NO: 5501 - RNA, 20 nt, synthetic construct
  source 1..20: mol_type = other RNA
cccgactctggctttctacc

SEQ ID NO: 5502 - RNA, 20 nt, synthetic construct
  source 1..20: mol_type = other RNA
cccgactctggctttcggcc

SEQ ID NO: 5503 - RNA, 20 nt, synthetic construct
  source 1..20: mol_type = other RNA
cccgactctggctttcttcc

SEQ ID NO: 5504 - RNA, 20 nt, synthetic construct
  source 1..20: mol_type = other RNA
cccgactctggctttctccc

SEQ ID NO: 5505 - RNA, 20 nt, synthetic construct
  source 1..20: mol_type = other RNA
cccgactctggctttccacc

SEQ ID NO: 5506 - RNA, 20 nt, synthetic construct
  source 1..20: mol_type = other RNA
cccgactctggctttcaacc

SEQ ID NO: 5507 - RNA, 20 nt, synthetic construct
  source 1..20: mol_type = other RNA
tcaccaggaacatgtacctg

SEQ ID NO: 5508 - RNA, 20 nt, synthetic construct
  source 1..20: mol_type = other RNA
cccgactctggctttcgccc

SEQ ID NO: 5509 - RNA, 20 nt, synthetic construct
  source 1..20: mol_type = other RNA
cccgactctggctttcgacc

SEQ ID NO: 5510 - RNA, 20 nt, synthetic construct
  source 1..20: mol_type = other RNA
cccgactctggctttcaccc

SEQ ID NO: 5511 - RNA, 21 nt, synthetic construct
  source 1..21: mol_type = other RNA
ttcaccaggaacatgtacctg

SEQ ID NO: 5512 - RNA, 22 nt, synthetic construct
  source 1..22: mol_type = other RNA
tttcaccaggaacatgtacctg

SEQ ID NO: 5513 - RNA, 100 nt, synthetic construct
  source 1..100: mol_type = other RNA
cccgactctggctttcgaccgttttagagctagaaatagcaagttaaaataaggctagtccgttatcaacttgaaaaagtggcaccgagtcggtgctttt

SEQ ID NO: 5514 - RNA, 100 nt, synthetic construct
  source 1..100: mol_type = other RNA
cccgactctggctttcagccgttttagagctagaaatagcaagttaaaataaggctagtccgttatcaacttgaaaaagtggcaccgagtcggtgctttt

SEQ ID NO: 5515 - RNA, 100 nt, synthetic construct
  source 1..100: mol_type = other RNA
cccgactctggctttcatccgttttagagctagaaatagcaagttaaaataaggctagtccgttatcaacttgaaaaagtggcaccgagtcggtgctttt

SEQ ID NO: 5516 - RNA, 100 nt, synthetic construct
  source 1..100: mol_type = other RNA
cccgactctggctttcggccgttttagagctagaaatagcaagttaaaataaggctagtccgttatcaacttgaaaaagtggcaccgagtcggtgctttt

SEQ ID NO: 5517 - RNA, 100 nt, synthetic construct
  source 1..100: mol_type = other RNA
cccgactctggctttcctccgttttagagctagaaatagcaagttaaaataaggctagtccgttatcaacttgaaaaagtggcaccgagtcggtgctttt

SEQ ID NO: 5518 - RNA, 100 nt, synthetic construct
  source 1..100: mol_type = other RNA
cccgactctggctttcgcccgttttagagctagaaatagcaagttaaaataaggctagtccgttatcaacttgaaaaagtggcaccgagtcggtgctttt

SEQ ID NO: 5519 - RNA, 100 nt, synthetic construct
  source 1..100: mol_type = other RNA
cccgactctggctttctgccgttttagagctagaaatagcaagttaaaataaggctagtccgttatcaacttgaaaaagtggcaccgagtcggtgctttt

SEQ ID NO: 5520 - RNA, 100 nt, synthetic construct
  source 1..100: mol_type = other RNA
cccgactctggctttcacccgttttagagctagaaatagcaagttaaaataaggctagtccgttatcaacttgaaaaagtggcaccgagtcggtgctttt

SEQ ID NO: 5521 - RNA, 100 nt, synthetic construct
  source 1..100: mol_type = other RNA
cccgactctggctttctcccgttttagagctagaaatagcaagttaaaataaggctagtccgttatcaacttgaaaaagtggcaccgagtcggtgctttt

SEQ ID NO: 5522 - RNA, 100 nt, synthetic construct
  source 1..100: mol_type = other RNA
cccgactctggctttccgccgttttagagctagaaatagcaagttaaaataaggctagtccgttatcaacttgaaaaagtggcaccgagtcggtgctttt

SEQ ID NO: 5523 - RNA, 100 nt, synthetic construct
  source 1..100: mol_type = other RNA
cccgactctggctttctaccgttttagagctagaaatagcaagttaaaataaggctagtccgttatcaacttgaaaaagtggcaccgagtcggtgctttt

SEQ ID NO: 5524 - RNA, 100 nt, synthetic construct
  source 1..100: mol_type = other RNA
cccgactctggctttcttccgttttagagctagaaatagcaagttaaaataaggctagtccgttatcaacttgaaaaagtggcaccgagtcggtgctttt

SEQ ID NO: 5525 - RNA, 100 nt, synthetic construct
  source 1..100: mol_type = other RNA
cccgactctggctttcaaccgttttagagctagaaatagcaagttaaaataaggctagtccgttatcaacttgaaaaagtggcaccgagtcggtgctttt

SEQ ID NO: 5526 - RNA, 100 nt, synthetic construct
  source 1..100: mol_type = other RNA
cccgactctggctttcgtccgttttagagctagaaatagcaagttaaaataaggctagtccgttatcaacttgaaaaagtggcaccgagtcggtgctttt

SEQ ID NO: 5527 - RNA, 100 nt, synthetic construct
  source 1..100: mol_type = other RNA
cccgactctggctttccaccgttttagagctagaaatagcaagttaaaataaggctagtccgttatcaacttgaaaaagtggcaccgagtcggtgctttt

SEQ ID NO: 5528 - RNA, 114 nt, synthetic construct
  source 1..114: mol_type = other RNA
tcaccaggaacatgtacctggttttagagctagaaatagcaagttaaaataaggctagtccgttatcaacttgaaaaagtggcaccgagtcggtgctcccccaggtgtacatgt

SEQ ID NO: 5529 - RNA, 114 nt, synthetic construct
  source 1..114: mol_type = other RNA
tcaccaggaacatgtacctggttttagagctagaaatagcaagttaaaataaggctagtccgttatcaacttgaaaaagtggcaccgagtcggtgcttcccccaggtgtacatg

SEQ ID NO: 5530 - RNA, 115 nt, synthetic construct
  source 1..115: mol_type = other RNA
gtcaccaggaacatgtacctggttttagagctagaaatagcaagttaaaataaggctagtccgttatcaacttgaaaaagtggcaccgagtcggtgctcccccaggtgtacatgt

SEQ ID NO: 5531 - RNA, 116 nt, synthetic construct
  source 1..116: mol_type = other RNA
tcaccaggaacatgtacctggttttagagctagaaatagcaagttaaaataaggctagtccgttatcaacttgaaaaagtggcaccgagtcggtgctttcccccaggtgtacatgt

SEQ ID NO: 5532 - RNA, 116 nt, synthetic construct
  source 1..116: mol_type = other RNA
tcaccaggaacatgtacctggttttagagctagaaatagcaagttaaaataaggctagtccgttatcaacttgaaaaagtggcaccgagtcggtgctcccccaggtgtacatgttc

SEQ ID NO: 5533 - RNA, 117 nt, synthetic construct
  source 1..117: mol_type = other RNA
gtcaccaggaacatgtacctggttttagagctagaaatagcaagttaaaataaggctagtccgttatcaacttgaaaaagtggcaccgagtcggtgctttcccccaggtgtacatgt

SEQ ID NO: 5534 - RNA, 117 nt, synthetic construct
  source 1..117: mol_type = other RNA
gtcaccaggaacatgtacctggttttagagctagaaatagcaagttaaaataaggctagtccgttatcaacttgaaaaagtggcaccgagtcggtgctcccccaggtgtacatgttc

SEQ ID NO: 5535 - RNA, 118 nt, synthetic construct
  source 1..118: mol_type = other RNA
tcaccaggaacatgtacctggttttagagctagaaatagcaagttaaaataaggctagtccgttatcaacttgaaaaagtggcaccgagtcggtgctcccccaggtgtacatgttcct

SEQ ID NO: 5536 - RNA, 118 nt, synthetic construct
  source 1..118: mol_type = other RNA
tcaccaggaacatgtacctggttttagagctagaaatagcaagttaaaataaggctagtccgttatcaacttgaaaaagtggcaccgagtcggtgctttcccccaggtgtacatgttc

SEQ ID NO: 5537 - RNA, 118 nt, synthetic construct
  source 1..118: mol_type = other RNA
tcaccaggaacatgtacctggttttagagctagaaatagcaagttaaaataaggctagtccgttatcaacttgaaaaagtggcaccgagtcggtgcttcccccaggtgtacatgttcc

SEQ ID NO: 5538 - RNA, 118 nt, synthetic construct
  source 1..118: mol_type = other RNA
tcaccaggaacatgtacctggttttagagctagaaatagcaagttaaaataaggctagtccgttatcaacttgaaaaagtggcaccgagtcggtgcttcccccaggtgtacatgtttt

SEQ ID NO: 5539 - RNA, 118 nt, synthetic construct
  source 1..118: mol_type = other RNA
tcaccaggaacatgtacctggttttagagctagaaatagcaagttaaaataaggctagtccgttatcaacttgaaaaagtggcaccgagtcggtgcgctttcccccaggtgtacatgt

SEQ ID NO: 5540 - RNA, 118 nt, synthetic construct
  source 1..118: mol_type = other RNA
tcaccaggaacatgtacctggttttagagctagaaatagcaagttaaaataaggctagtccgttatcaacttgaaaaagtggcaccgagtcggtgctcccccaggtgtacatgttttt

SEQ ID NO: 5541 - RNA, 119 nt, synthetic construct
  source 1..119: mol_type = other RNA
gtcaccaggaacatgtacctggttttagagctagaaatagcaagttaaaataaggctagtccgttatcaacttgaaaaagtggcaccgagtcggtgctcccccaggtgtacatgttcct

SEQ ID NO: 5542 - RNA, 119 nt, synthetic construct
  source 1..119: mol_type = other RNA
tcaccaggaacatgtacctggttttagagctagaaatagcaagttaaaataaggctagtccgttatcaacttgaaaaagtggcaccgagtcggtgctttcccccaggtgtacatgttcc

SEQ ID NO: 5543 - RNA, 119 nt, synthetic construct
  source 1..119: mol_type = other RNA
tcaccaggaacatgtacctggttttagagctagaaatagcaagttaaaataaggctagtccgttatcaacttgaaaaagtggcaccgagtcggtgcttcccccaggtgtacatgttcct

SEQ ID NO: 5544 - RNA, 119 nt, synthetic construct
  source 1..119: mol_type = other RNA
gtcaccaggaacatgtacctggttttagagctagaaatagcaagttaaaataaggctagtccgttatcaacttgaaaaagtggcaccgagtcggtgcgctttcccccaggtgtacatgt

SEQ ID NO: 5545 - RNA, 119 nt, synthetic construct
  source 1..119: mol_type = other RNA
gtcaccaggaacatgtacctggttttagagctagaaatagcaagttaaaataaggctagtccgttatcaacttgaaaaagtggcaccgagtcggtgctttcccccaggtgtacatgttc

SEQ ID NO: 5546 - RNA, 120 nt, synthetic construct
  source 1..120: mol_type = other RNA
tcaccaggaacatgtacctggttttagagctagaaatagcaagttaaaataaggctagtccgttatcaacttgaaaaagtggcaccgagtcggtgctttccgccaggtgtacatgttcct

SEQ ID NO: 5547 - RNA, 120 nt, synthetic construct
  source 1..120: mol_type = other RNA
tcaccaggaacatgtacctggttttagagctagaaatagcaagttaaaataaggctagtccgttatcaacttgaaaaagtggcaccgagtcggtgctggctttcccccaggtgtacatgt

SEQ ID NO: 5548 - RNA, 120 nt, synthetic construct
  source 1..120: mol_type = other RNA
tcaccaggaacatgtacctggttttagagctagaaatagcaagttaaaataaggctagtccgttatcaacttgaaaaagtggcaccgagtcggtgcgctttcccccaggtgtacatgttc

SEQ ID NO: 5549 - RNA, 120 nt, synthetic construct
  source 1..120: mol_type = other RNA
tcaccaggaacatgtacctggttttagagctagaaatagcaagttaaaataaggctagtccgttatcaacttgaaaaagtggcaccgagtcggtgctttctgccaggtgtacatgttcct

SEQ ID NO: 5550 - RNA, 120 nt, synthetic construct
  source 1..120: mol_type = other RNA
tcaccaggaacatgtacctggttttagagctagaaatagcaagttaaaataaggctagtccgttatcaacttgaaaaagtggcaccgagtcggtgctcccccaggtgtacatgttctttt

SEQ ID NO: 5551 - RNA, 120 nt, synthetic construct
  source 1..120: mol_type = other RNA
tcaccaggaacatgtacctggttttagagctagaaatagcaagttaaaataaggctagtccgttatcaacttgaaaaagtggcaccgagtcggtgctttcgcccaggtgtacatgttcct

SEQ ID NO: 5552 - RNA, 120 nt, synthetic construct
  source 1..120: mol_type = other RNA
tcaccaggaacatgtacctggttttagagctagaaatagcaagttaaaataaggctagtccgttatcaacttgaaaaagtggcaccgagtcggtgctttctaccaggtgtacatgttcct

SEQ ID NO: 5553 - RNA, 120 nt, synthetic construct
  source 1..120: mol_type = other RNA
tcaccaggaacatgtacctggttttagagctagaaatagcaagttaaaataaggctagtccgttatcaacttgaaaaagtggcaccgagtcggtgctttcgaccaggtgtacatgttcct

SEQ ID NO: 5554 - RNA, 120 nt, synthetic construct
  source 1..120: mol_type = other RNA
tcaccaggaacatgtacctggttttagagctagaaatagcaagttaaaataaggctagtccgttatcaacttgaaaaagtggcaccgagtcggtgctttcttccaggtgtacatgttcct

SEQ ID NO: 5555 - RNA, 120 nt, synthetic construct
  source 1..120: mol_type = other RNA
tcaccaggaacatgtacctggttttagagctagaaatagcaagttaaaataaggctagtccgttatcaacttgaaaaagtggcaccgagtcggtgctttcctccaggtgtacatgttcct

SEQ ID NO: 5556 - RNA, 120 nt, synthetic construct
  source 1..120: mol_type = other RNA
tcaccaggaacatgtacctggttttagagctagaaatagcaagttaaaataaggctagtccgttatcaacttgaaaaagtggcaccgagtcggtgctcccccaggtgtacatgttcctgg

SEQ ID NO: 5557 - RNA, 120 nt, synthetic construct
  source 1..120: mol_type = other RNA
tcaccaggaacatgtacctggttttagagctagaaatagcaagttaaaataaggctagtccgttatcaacttgaaaaagtggcaccgagtcggtgctttcccccaggtgtacatgttttt

SEQ ID NO: 5558 - RNA, 120 nt, synthetic construct
  source 1..120: mol_type = other RNA
tcaccaggaacatgtacctggttttagagctagaaatagcaagttaaaataaggctagtccgttatcaacttgaaaaagtggcaccgagtcggtgctttcgtccaggtgtacatgttcct

SEQ ID NO: 5559 - RNA, 120 nt, synthetic construct
  source 1..120: mol_type = other RNA
tcaccaggaacatgtacctggttttagagctagaaatagcaagttaaaataaggctagtccgttatcaacttgaaaaagtggcaccgagtcggtgctttcacccaggtgtacatgttcct

SEQ ID NO: 5560 - RNA, 120 nt, synthetic construct
  source 1..120: mol_type = other RNA
tcaccaggaacatgtacctggttttagagctagaaatagcaagttaaaataaggctagtccgttatcaacttgaaaaagtggcaccgagtcggtgctttcatccaggtgtacatgttcct

SEQ ID NO: 5561 - RNA, 120 nt, synthetic construct
  source 1..120: mol_type = other RNA
tcaccaggaacatgtacctggttttagagctagaaatagcaagttaaaataaggctagtccgttatcaacttgaaaaagtggcaccgagtcggtgcttcccccaggtgtacatgttcctg

SEQ ID NO: 5562 - RNA, 120 nt, synthetic construct
  source 1..120: mol_type = other RNA
tcaccaggaacatgtacctggttttagagctagaaatagcaagttaaaataaggctagtccgttatcaacttgaaaaagtggcaccgagtcggtgctttcaaccaggtgtacatgttcct

SEQ ID NO: 5563 - RNA, 120 nt, synthetic construct
  source 1..120: mol_type = other RNA
tcaccaggaacatgtacctggttttagagctagaaatagcaagttaaaataaggctagtccgttatcaacttgaaaaagtggcaccgagtcggtgctttcccccaggtgtacatgttcct

SEQ ID NO: 5564 - RNA, 120 nt, synthetic construct
  source 1..120: mol_type = other RNA
tcaccaggaacatgtacctggttttagagctagaaatagcaagttaaaataaggctagtccgttatcaacttgaaaaagtggcaccgagtcggtgctttctcccaggtgtacatgttcct

SEQ ID NO: 5565 - RNA, 120 nt, synthetic construct
  source 1..120: mol_type = other RNA
tcaccaggaacatgtacctggttttagagctagaaatagcaagttaaaataaggctagtccgttatcaacttgaaaaagtggcaccgagtcggtgctttcggccaggtgtacatgttcct

SEQ ID NO: 5566 - RNA, 120 nt, synthetic construct
  source 1..120: mol_type = other RNA
tcaccaggaacatgtacctggttttagagctagaaatagcaagttaaaataaggctagtccgttatcaacttgaaaaagtggcaccgagtcggtgctttccaccaggtgtacatgttcct

SEQ ID NO: 5567 - RNA, 120 nt, synthetic construct
  source 1..120: mol_type = other RNA
tcaccaggaacatgtacctggttttagagctagaaatagcaagttaaaataaggctagtccgttatcaacttgaaaaagtggcaccgagtcggtgctttcagccaggtgtacatgttcct

SEQ ID NO: 5568 - RNA, 121 nt, synthetic construct
  source 1..121: mol_type = other RNA
gtcaccaggaacatgtacctggttttagagctagaaatagcaagttaaaataaggctagtccgttatcaacttgaaaaagtggcaccgagtcggtgctttctcccaggtgtacatgttcct

SEQ ID NO: 5569 - RNA, 121 nt, synthetic construct
  source 1..121: mol_type = other RNA
tcaccaggaacatgtacctggttttagagctagaaatagcaagttaaaataaggctagtccgttatcaacttgaaaaagtggcaccgagtcggtgctttcccccaggtgtacatgttcctg

SEQ ID NO: 5570 - RNA, 121 nt, synthetic construct
  source 1..121: mol_type = other RNA
tcaccaggaacatgtacctggttttagagctagaaatagcaagttaaaataaggctagtccgttatcaacttgaaaaagtggcaccgagtcggtgcttcccccaggtgtacatgttcctgg

SEQ ID NO: 5571 - RNA, 121 nt, synthetic construct
  source 1..121: mol_type = other RNA
tcaccaggaacatgtacctggttttagagctagaaatagcaagttaaaataaggctagtccgttatcaacttgaaaaagtggcaccgagtcggtgcgctttcccccaggtgtacatgttcc

SEQ ID NO: 5572 - RNA, 121 nt, synthetic construct
  source 1..121: mol_type = other RNA
gtcaccaggaacatgtacctggttttagagctagaaatagcaagttaaaataaggctagtccgttatcaacttgaaaaagtggcaccgagtcggtgctttcatccaggtgtacatgttcct

SEQ ID NO: 5573 - RNA, 121 nt, synthetic construct
  source 1..121: mol_type = other RNA
gtcaccaggaacatgtacctggttttagagctagaaatagcaagttaaaataaggctagtccgttatcaacttgaaaaagtggcaccgagtcggtgctttctaccaggtgtacatgttcct

SEQ ID NO: 5574 - RNA, 121 nt, synthetic construct
  source 1..121: mol_type = other RNA
gtcaccaggaacatgtacctggttttagagctagaaatagcaagttaaaataaggctagtccgttatcaacttgaaaaagtggcaccgagtcggtgctttcgaccaggtgtacatgttcct

SEQ ID NO: 5575 - RNA, 121 nt, synthetic construct
  source 1..121: mol_type = other RNA
gtcaccaggaacatgtacctggttttagagctagaaatagcaagttaaaataaggctagtccgttatcaacttgaaaaagtggcaccgagtcggtgctggctttcccccaggtgtacatgt

SEQ ID NO: 5576 - RNA, 121 nt, synthetic construct
  source 1..121: mol_type = other RNA
gtcaccaggaacatgtacctggttttagagctagaaatagcaagttaaaataaggctagtccgttatcaacttgaaaaagtggcaccgagtcggtgctttcaaccaggtgtacatgttcct

SEQ ID NO: 5577 - RNA, 121 nt, synthetic construct
  source 1..121: mol_type = other RNA
gtcaccaggaacatgtacctggttttagagctagaaatagcaagttaaaataaggctagtccgttatcaacttgaaaaagtggcaccgagtcggtgctttcacccaggtgtacatgttcct

SEQ ID NO: 5578 - RNA, 121 nt, synthetic construct
  source 1..121: mol_type = other RNA
gtcaccaggaacatgtacctggttttagagctagaaatagcaagttaaaataaggctagtccgttatcaacttgaaaaagtggcaccgagtcggtgctttcttccaggtgtacatgttcct

SEQ ID NO: 5579 - RNA, 121 nt, synthetic construct
  source 1..121: mol_type = other RNA
tcaccaggaacatgtacctggttttagagctagaaatagcaagttaaaataaggctagtccgttatcaacttgaaaaagtggcaccgagtcggtgctcccccaggtgtacatgttcctggt

SEQ ID NO: 5580 - RNA, 121 nt, synthetic construct
  source 1..121: mol_type = other RNA
gtcaccaggaacatgtacctggttttagagctagaaatagcaagttaaaataaggctagtccgttatcaacttgaaaaagtggcaccgagtcggtgcgctttcccccaggtgtacatgttc

SEQ ID NO: 5581 - RNA, 121 nt, synthetic construct
  source 1..121: mol_type = other RNA
gtcaccaggaacatgtacctggttttagagctagaaatagcaagttaaaataaggctagtccgttatcaacttgaaaaagtggcaccgagtcggtgctttccaccaggtgtacatgttcct

SEQ ID NO: 5582 - RNA, 121 nt, synthetic construct
  source 1..121: mol_type = other RNA
gtcaccaggaacatgtacctggttttagagctagaaatagcaagttaaaataaggctagtccgttatcaacttgaaaaagtggcaccgagtcggtgctttcccccaggtgtacatgttcct

SEQ ID NO: 5583 - RNA, 121 nt, synthetic construct
  source 1..121: mol_type = other RNA
gtcaccaggaacatgtacctggttttagagctagaaatagcaagttaaaataaggctagtccgttatcaacttgaaaaagtggcaccgagtcggtgctttccgccaggtgtacatgttcct

SEQ ID NO: 5584 - RNA, 121 nt, synthetic construct
  source 1..121: mol_type = other RNA
gtcaccaggaacatgtacctggttttagagctagaaatagcaagttaaaataaggctagtccgttatcaacttgaaaaagtggcaccgagtcggtgctcccccaggtgtacatgttcctgg

SEQ ID NO: 5585 - RNA, 121 nt, synthetic construct
  source 1..121: mol_type = other RNA
gtcaccaggaacatgtacctggttttagagctagaaatagcaagttaaaataaggctagtccgttatcaacttgaaaaagtggcaccgagtcggtgctttcgcccaggtgtacatgttcct

SEQ ID NO: 5586 - RNA, 121 nt, synthetic construct
  source 1..121: mol_type = other RNA
gtcaccaggaacatgtacctggttttagagctagaaatagcaagttaaaataaggctagtccgttatcaacttgaaaaagtggcaccgagtcggtgctttcgtccaggtgtacatgttcct

SEQ ID NO: 5587 - RNA, 121 nt, synthetic construct
  source 1..121: mol_type = other RNA
gtcaccaggaacatgtacctggttttagagctagaaatagcaagttaaaataaggctagtccgttatcaacttgaaaaagtggcaccgagtcggtgctttcagccaggtgtacatgttcct

SEQ ID NO: 5588 - RNA, 121 nt, synthetic construct
  source 1..121: mol_type = other RNA
gtcaccaggaacatgtacctggttttagagctagaaatagcaagttaaaataaggctagtccgttatcaacttgaaaaagtggcaccgagtcggtgctttcctccaggtgtacatgttcct

SEQ ID NO: 5589 - RNA, 121 nt, synthetic construct
  source 1..121: mol_type = other RNA
gtcaccaggaacatgtacctggttttagagctagaaatagcaagttaaaataaggctagtccgttatcaacttgaaaaagtggcaccgagtcggtgctttctgccaggtgtacatgttcct

SEQ ID NO: 5590 - RNA, 121 nt, synthetic construct
  source 1..121: mol_type = other RNA
gtcaccaggaacatgtacctggttttagagctagaaatagcaagttaaaataaggctagtccgttatcaacttgaaaaagtggcaccgagtcggtgctttcggccaggtgtacatgttcct

SEQ ID NO: 5591 - RNA, 122 nt, synthetic construct
  source 1..122: mol_type = other RNA
tcaccaggaacatgtacctggttttagagctagaaatagcaagttaaaataaggctagtccgttatcaacttgaaaaagtggcaccgagtcggtgcgctttcttccaggtgtacatgttcct

SEQ ID NO: 5592 - RNA, 122 nt, synthetic construct
  source 1..122: mol_type = other RNA
tcaccaggaacatgtacctggttttagagctagaaatagcaagttaaaataaggctagtccgttatcaacttgaaaaagtggcaccgagtcggtgcgctttcctccaggtgtacatgttcct

SEQ ID NO: 5593 - RNA, 122 nt, synthetic construct
  source 1..122: mol_type = other RNA
tcaccaggaacatgtacctggttttagagctagaaatagcaagttaaaataaggctagtccgttatcaacttgaaaaagtggcaccgagtcggtgcgctttcaaccaggtgtacatgttcct

SEQ ID NO: 5594 - RNA, 122 nt, synthetic construct
  source 1..122: mol_type = other RNA
tcaccaggaacatgtacctggttttagagctagaaatagcaagttaaaataaggctagtccgttatcaacttgaaaaagtggcaccgagtcggtgcgctttcggccaggtgtacatgttcct

SEQ ID NO: 5595 - RNA, 122 nt, synthetic construct
  source 1..122: mol_type = other RNA
tcaccaggaacatgtacctggttttagagctagaaatagcaagttaaaataaggctagtccgttatcaacttgaaaaagtggcaccgagtcggtgcgctttcgcccaggtgtacatgttcct

SEQ ID NO: 5596 - RNA, 122 nt, synthetic construct
  source 1..122: mol_type = other RNA
tcaccaggaacatgtacctggttttagagctagaaatagcaagttaaaataaggctagtccgttatcaacttgaaaaagtggcaccgagtcggtgcgctttctaccaggtgtacatgttcct

SEQ ID NO: 5597 - RNA, 122 nt, synthetic construct
  source 1..122: mol_type = other RNA
tcaccaggaacatgtacctggttttagagctagaaatagcaagttaaaataaggctagtccgttatcaacttgaaaaagtggcaccgagtcggtgctggctttcccccaggtgtacatgttc

SEQ ID NO: 5598 - RNA, 122 nt, synthetic construct
  source 1..122: mol_type = other RNA
tcaccaggaacatgtacctggttttagagctagaaatagcaagttaaaataaggctagtccgttatcaacttgaaaaagtggcaccgagtcggtgcgctttcgtccaggtgtacatgttcct

SEQ ID NO: 5599 - RNA, 122 nt, synthetic construct
  source 1..122: mol_type = other RNA
tcaccaggaacatgtacctggttttagagctagaaatagcaagttaaaataaggctagtccgttatcaacttgaaaaagtggcaccgagtcggtgctttcccccaggtgtacatgttctttt

SEQ ID NO: 5600 - RNA, 122 nt, synthetic construct
  source 1..122: mol_type = other RNA
tcaccaggaacatgtacctggttttagagctagaaatagcaagttaaaataaggctagtccgttatcaacttgaaaaagtggcaccgagtcggtgcgctttcccccaggtgtacatgttttt

SEQ ID NO: 5601 - RNA, 122 nt, synthetic construct
  source 1..122: mol_type = other RNA
tcaccaggaacatgtacctggttttagagctagaaatagcaagttaaaataaggctagtccgttatcaacttgaaaaagtggcaccgagtcggtgcgctttctgccaggtgtacatgttcct

SEQ ID NO: 5602 - RNA, 122 nt, synthetic construct
  source 1..122: mol_type = other RNA
tcaccaggaacatgtacctggttttagagctagaaatagcaagttaaaataaggctagtccgttatcaacttgaaaaagtggcaccgagtcggtgcgctttccgccaggtgtacatgttcct

SEQ ID NO: 5603 - RNA, 122 nt, synthetic construct
  source 1..122: mol_type = other RNA
tcaccaggaacatgtacctggttttagagctagaaatagcaagttaaaataaggctagtccgttatcaacttgaaaaagtggcaccgagtcggtgcgctttcagccaggtgtacatgttcct

SEQ ID NO: 5604 - RNA, 122 nt, synthetic construct
  source 1..122: mol_type = other RNA
tcaccaggaacatgtacctggttttagagctagaaatagcaagttaaaataaggctagtccgttatcaacttgaaaaagtggcaccgagtcggtgcgctttccaccaggtgtacatgttcct

SEQ ID NO: 5605 - RNA, 122 nt, synthetic construct
  source 1..122: mol_type = other RNA
tcaccaggaacatgtacctggttttagagctagaaatagcaagttaaaataaggctagtccgttatcaacttgaaaaagtggcaccgagtcggtgctttcccccaggtgtacatgttcctgg

SEQ ID NO: 5606 - RNA, 122 nt, synthetic construct
  source 1..122: mol_type = other RNA
tcaccaggaacatgtacctggttttagagctagaaatagcaagttaaaataaggctagtccgttatcaacttgaaaaagtggcaccgagtcggtgcgctttcccccaggtgtacatgttcct

SEQ ID NO: 5607 - RNA, 122 nt, synthetic construct
  source 1..122: mol_type = other RNA
tcaccaggaacatgtacctggttttagagctagaaatagcaagttaaaataaggctagtccgttatcaacttgaaaaagtggcaccgagtcggtgcgctttcacccaggtgtacatgttcct

SEQ ID NO: 5608 - RNA, 122 nt, synthetic construct
  source 1..122: mol_type = other RNA
tcaccaggaacatgtacctggttttagagctagaaatagcaagttaaaataaggctagtccgttatcaacttgaaaaagtggcaccgagtcggtgcgctttcatccaggtgtacatgttcct

SEQ ID NO: 5609 - RNA, 122 nt, synthetic construct
  source 1..122: mol_type = other RNA
gtcaccaggaacatgtacctggttttagagctagaaatagcaagttaaaataaggctagtccgttatcaacttgaaaaagtggcaccgagtcggtgctcccccaggtgtacatgttcctggt

SEQ ID NO: 5610 - RNA, 122 nt, synthetic construct
  source 1..122: mol_type = other RNA
tcaccaggaacatgtacctggttttagagctagaaatagcaagttaaaataaggctagtccgttatcaacttgaaaaagtggcaccgagtcggtgcgctttctcccaggtgtacatgttcct

SEQ ID NO: 5611 - RNA, 122 nt, synthetic construct
  source 1..122: mol_type = other RNA
tcaccaggaacatgtacctggttttagagctagaaatagcaagttaaaataaggctagtccgttatcaacttgaaaaagtggcaccgagtcggtgcgctttcgaccaggtgtacatgttcct

SEQ ID NO: 5612 - RNA, 122 nt, synthetic construct
  source 1..122: mol_type = other RNA
tcaccaggaacatgtacctggttttagagctagaaatagcaagttaaaataaggctagtccgttatcaacttgaaaaagtggcaccgagtcggtgctcccccaggtgtacatgttccttttt

SEQ ID NO: 5613 - RNA, 122 nt, synthetic construct
  source 1..122: mol_type = other RNA
tcaccaggaacatgtacctggttttagagctagaaatagcaagttaaaataaggctagtccgttatcaacttgaaaaagtggcaccgagtcggtgcttcccccaggtgtacatgttcctttt

SEQ ID NO: 5614 - RNA, 123 nt, synthetic construct
  source 1..123: mol_type = other RNA
tcaccaggaacatgtacctggttttagagctagaaatagcaagttaaaataaggctagtccgttatcaacttgaaaaagtggcaccgagtcggtgcttcccccaggtgtacatgttccttttt

SEQ ID NO: 5615 - RNA, 123 nt, synthetic construct
  source 1..123: mol_type = other RNA
gtcaccaggaacatgtacctggttttagagctagaaatagcaagttaaaataaggctagtccgttatcaacttgaaaaagtggcaccgagtcggtgcgctttcatccaggtgtacatgttcct

SEQ ID NO: 5616 - RNA, 123 nt, synthetic construct
  source 1..123: mol_type = other RNA
gtcaccaggaacatgtacctggttttagagctagaaatagcaagttaaaataaggctagtccgttatcaacttgaaaaagtggcaccgagtcggtgcgctttcccccaggtgtacatgttcct

SEQ ID NO: 5617 - RNA, 123 nt, synthetic construct
  source 1..123: mol_type = other RNA
gtcaccaggaacatgtacctggttttagagctagaaatagcaagttaaaataaggctagtccgttatcaacttgaaaaagtggcaccgagtcggtgcgctttcttccaggtgtacatgttcct

SEQ ID NO: 5618 - RNA, 123 nt, synthetic construct
  source 1..123: mol_type = other RNA
tcaccaggaacatgtacctggttttagagctagaaatagcaagttaaaataaggctagtccgttatcaacttgaaaaagtggcaccgagtcggtgctttcccccaggtgtacatgttcctttt

SEQ ID NO: 5619 - RNA, 123 nt, synthetic construct
  source 1..123: mol_type = other RNA
gtcaccaggaacatgtacctggttttagagctagaaatagcaagttaaaataaggctagtccgttatcaacttgaaaaagtggcaccgagtcggtgcgctttctcccaggtgtacatgttcct

SEQ ID NO: 5620 - RNA, 123 nt, synthetic construct
  source 1..123: mol_type = other RNA
gtcaccaggaacatgtacctggttttagagctagaaatagcaagttaaaataaggctagtccgttatcaacttgaaaaagtggcaccgagtcggtgcgctttcctccaggtgtacatgttcct

SEQ ID NO: 5621 - RNA, 123 nt, synthetic construct
  source 1..123: mol_type = other RNA
gtcaccaggaacatgtacctggttttagagctagaaatagcaagttaaaataaggctagtccgttatcaacttgaaaaagtggcaccgagtcggtgcgctttcagccaggtgtacatgttcct

SEQ ID NO: 5622 - RNA, 123 nt, synthetic construct
  source 1..123: mol_type = other RNA
gtcaccaggaacatgtacctggttttagagctagaaatagcaagttaaaataaggctagtccgttatcaacttgaaaaagtggcaccgagtcggtgcgctttctaccaggtgtacatgttcct

SEQ ID NO: 5623 - RNA, 123 nt, synthetic construct
  source 1..123: mol_type = other RNA
gtcaccaggaacatgtacctggttttagagctagaaatagcaagttaaaataaggctagtccgttatcaacttgaaaaagtggcaccgagtcggtgcgctttcgtccaggtgtacatgttcct

SEQ ID NO: 5624 - RNA, 123 nt, synthetic construct
  source 1..123: mol_type = other RNA
gtcaccaggaacatgtacctggttttagagctagaaatagcaagttaaaataaggctagtccgttatcaacttgaaaaagtggcaccgagtcggtgcgctttctgccaggtgtacatgttcct

SEQ ID NO: 5625 - RNA, 123 nt, synthetic construct
  source 1..123: mol_type = other RNA
gtcaccaggaacatgtacctggttttagagctagaaatagcaagttaaaataaggctagtccgttatcaacttgaaaaagtggcaccgagtcggtgcgctttcacccaggtgtacatgttcct

SEQ ID NO: 5626 - RNA, 123 nt, synthetic construct
  source 1..123: mol_type = other RNA
gtcaccaggaacatgtacctggttttagagctagaaatagcaagttaaaataaggctagtccgttatcaacttgaaaaagtggcaccgagtcggtgctttcccccaggtgtacatgttcctgg

SEQ ID NO: 5627 - RNA, 123 nt, synthetic construct
  source 1..123: mol_type = other RNA
gtcaccaggaacatgtacctggttttagagctagaaatagcaagttaaaataaggctagtccgttatcaacttgaaaaagtggcaccgagtcggtgcgctttcgcccaggtgtacatgttcct

SEQ ID NO: 5628 - RNA, 123 nt, synthetic construct
  source 1..123: mol_type = other RNA
gtcaccaggaacatgtacctggttttagagctagaaatagcaagttaaaataaggctagtccgttatcaacttgaaaaagtggcaccgagtcggtgcgctttcgaccaggtgtacatgttcct

SEQ ID NO: 5629 - RNA, 123 nt, synthetic construct
  source 1..123: mol_type = other RNA
gtcaccaggaacatgtacctggttttagagctagaaatagcaagttaaaataaggctagtccgttatcaacttgaaaaagtggcaccgagtcggtgctggctttcccccaggtgtacatgttc

SEQ ID NO: 5630 - RNA, 123 nt, synthetic construct
  source 1..123: mol_type = other RNA
gtcaccaggaacatgtacctggttttagagctagaaatagcaagttaaaataaggctagtccgttatcaacttgaaaaagtggcaccgagtcggtgcgctttccaccaggtgtacatgttcct

SEQ ID NO: 5631 - RNA, 123 nt, synthetic construct
  source 1..123: mol_type = other RNA
gtcaccaggaacatgtacctggttttagagctagaaatagcaagttaaaataaggctagtccgttatcaacttgaaaaagtggcaccgagtcggtgcgctttcaaccaggtgtacatgttcct

SEQ ID NO: 5632 - RNA, 123 nt, synthetic construct
  source 1..123: mol_type = other RNA
gtcaccaggaacatgtacctggttttagagctagaaatagcaagttaaaataaggctagtccgttatcaacttgaaaaagtggcaccgagtcggtgcgctttccgccaggtgtacatgttcct

SEQ ID NO: 5633 - RNA, 123 nt, synthetic construct
  source 1..123: mol_type = other RNA
gtcaccaggaacatgtacctggttttagagctagaaatagcaagttaaaataaggctagtccgttatcaacttgaaaaagtggcaccgagtcggtgcgctttcggccaggtgtacatgttcct

SEQ ID NO: 5634 - RNA, 123 nt, synthetic construct
  source 1..123: mol_type = other RNA
tcaccaggaacatgtacctggttttagagctagaaatagcaagttaaaataaggctagtccgttatcaacttgaaaaagtggcaccgagtcggtgcgctttcccccaggtgtacatgttcctg

SEQ ID NO: 5635 - RNA, 123 nt, synthetic construct
  source 1..123: mol_type = other RNA
tcaccaggaacatgtacctggttttagagctagaaatagcaagttaaaataaggctagtccgttatcaacttgaaaaagtggcaccgagtcggtgctttcccccaggtgtacatgttcctggt

SEQ ID NO: 5636 - RNA, 124 nt, synthetic construct
  source 1..124: mol_type = other RNA
tcaccaggaacatgtacctggttttagagctagaaatagcaagttaaaataaggctagtccgttatcaacttgaaaaagtggcaccgagtcggtgctttcctccaggtgtacatgttccttttt

SEQ ID NO: 5637 - RNA, 124 nt, synthetic construct
  source 1..124: mol_type = other RNA
tcaccaggaacatgtacctggttttagagctagaaatagcaagttaaaataaggctagtccgttatcaacttgaaaaagtggcaccgagtcggtgctttcccccaggtgtacatgttccttttt

SEQ ID NO: 5638 - RNA, 124 nt, synthetic construct
  source 1..124: mol_type = other RNA
tcaccaggaacatgtacctggttttagagctagaaatagcaagttaaaataaggctagtccgttatcaacttgaaaaagtggcaccgagtcggtgcttcccccaggtgtacatgttcctgtttt

SEQ ID NO: 5639 - RNA, 124 nt, synthetic construct
  source 1..124: mol_type = other RNA
tcaccaggaacatgtacctggttttagagctagaaatagcaagttaaaataaggctagtccgttatcaacttgaaaaagtggcaccgagtcggtgctttctgccaggtgtacatgttccttttt

SEQ ID NO: 5640 - RNA, 124 nt, synthetic construct
  source 1..124: mol_type = other RNA
gtcaccaggaacatgtacctggttttagagctagaaatagcaagttaaaataaggctagtccgttatcaacttgaaaaagtggcaccgagtcggtgctttcccccaggtgtacatgttcctggt

SEQ ID NO: 5641 - RNA, 124 nt, synthetic construct
  source 1..124: mol_type = other RNA
tcaccaggaacatgtacctggttttagagctagaaatagcaagttaaaataaggctagtccgttatcaacttgaaaaagtggcaccgagtcggtgctcccccaggtgtacatgttcctggtttt

SEQ ID NO: 5642 - RNA, 124 nt, synthetic construct
  source 1..124: mol_type = other RNA
tcaccaggaacatgtacctggttttagagctagaaatagcaagttaaaataaggctagtccgttatcaacttgaaaaagtggcaccgagtcggtgctttcaaccaggtgtacatgttccttttt

SEQ ID NO: 5643 - RNA, 124 nt, synthetic construct
  source 1..124: mol_type = other RNA
tcaccaggaacatgtacctggttttagagctagaaatagcaagttaaaataaggctagtccgttatcaacttgaaaaagtggcaccgagtcggtgctttccaccaggtgtacatgttccttttt

SEQ ID NO: 5644 - RNA, 124 nt, synthetic construct
  source 1..124: mol_type = other RNA
tcaccaggaacatgtacctggttttagagctagaaatagcaagttaaaataaggctagtccgttatcaacttgaaaaagtggcaccgagtcggtgcgctttcccccaggtgtacatgttcctgg

SEQ ID NO: 5645 - RNA, 124 nt, synthetic construct
  source 1..124: mol_type = other RNA
tcaccaggaacatgtacctggttttagagctagaaatagcaagttaaaataaggctagtccgttatcaacttgaaaaagtggcaccgagtcggtgcgctttcccccaggtgtacatgttctttt

SEQ ID NO: 5646 - RNA, 124 nt, synthetic construct
  source 1..124: mol_type = other RNA
tcaccaggaacatgtacctggttttagagctagaaatagcaagttaaaataaggctagtccgttatcaacttgaaaaagtggcaccgagtcggtgctttcgtccaggtgtacatgttccttttt

SEQ ID NO: 5647 - RNA, 124 nt, synthetic construct
  source 1..124: mol_type = other RNA
tcaccaggaacatgtacctggttttagagctagaaatagcaagttaaaataaggctagtccgttatcaacttgaaaaagtggcaccgagtcggtgctggctttcccccaggtgtacatgttcct

SEQ ID NO: 5648 - RNA, 124 nt, synthetic construct
  source 1..124: mol_type = other RNA
tcaccaggaacatgtacctggttttagagctagaaatagcaagttaaaataaggctagtccgttatcaacttgaaaaagtggcaccgagtcggtgctttcggccaggtgtacatgttccttttt

SEQ ID NO: 5649 - RNA, 124 nt, synthetic construct
  source 1..124: mol_type = other RNA
tcaccaggaacatgtacctggttttagagctagaaatagcaagttaaaataaggctagtccgttatcaacttgaaaaagtggcaccgagtcggtgctttcagccaggtgtacatgttccttttt

SEQ ID NO: 5650 - RNA, 124 nt, synthetic construct
  source 1..124: mol_type = other RNA
tcaccaggaacatgtacctggttttagagctagaaatagcaagttaaaataaggctagtccgttatcaacttgaaaaagtggcaccgagtcggtgctttctaccaggtgtacatgttccttttt

SEQ ID NO: 5651 - RNA, 124 nt, synthetic construct
  source 1..124: mol_type = other RNA
tcaccaggaacatgtacctggttttagagctagaaatagcaagttaaaataaggctagtccgttatcaacttgaaaaagtggcaccgagtcggtgctggctttcccccaggtgtacatgttttt

SEQ ID NO: 5652 - RNA, 124 nt, synthetic construct
  source 1..124: mol_type = other RNA
tcaccaggaacatgtacctggttttagagctagaaatagcaagttaaaataaggctagtccgttatcaacttgaaaaagtggcaccgagtcggtgctttccgccaggtgtacatgttccttttt

SEQ ID NO: 5653 - RNA, 124 nt, synthetic construct
  source 1..124: mol_type = other RNA
tcaccaggaacatgtacctggttttagagctagaaatagcaagttaaaataaggctagtccgttatcaacttgaaaaagtggcaccgagtcggtgctttcgcccaggtgtacatgttccttttt

SEQ ID NO: 5654 - RNA, 124 nt, synthetic construct
  source 1..124: mol_type = other RNA
tcaccaggaacatgtacctggttttagagctagaaatagcaagttaaaataaggctagtccgttatcaacttgaaaaagtggcaccgagtcggtgctttcgaccaggtgtacatgttccttttt

SEQ ID NO: 5655 - RNA, 124 nt, synthetic construct
  source 1..124: mol_type = other RNA
tcaccaggaacatgtacctggttttagagctagaaatagcaagttaaaataaggctagtccgttatcaacttgaaaaagtggcaccgagtcggtgctttcttccaggtgtacatgttccttttt

SEQ ID NO: 5656 - RNA, 124 nt, synthetic construct
  source 1..124: mol_type = other RNA
tcaccaggaacatgtacctggttttagagctagaaatagcaagttaaaataaggctagtccgttatcaacttgaaaaagtggcaccgagtcggtgctttcacccaggtgtacatgttccttttt

SEQ ID NO: 5657 - RNA, 124 nt, synthetic construct
  source 1..124: mol_type = other RNA
tcaccaggaacatgtacctggttttagagctagaaatagcaagttaaaataaggctagtccgttatcaacttgaaaaagtggcaccgagtcggtgctttcatccaggtgtacatgttccttttt

SEQ ID NO: 5658 - RNA, 124 nt, synthetic construct
  source 1..124: mol_type = other RNA
tcaccaggaacatgtacctggttttagagctagaaatagcaagttaaaataaggctagtccgttatcaacttgaaaaagtggcaccgagtcggtgctttctcccaggtgtacatgttccttttt

SEQ ID NO: 5659 - RNA, 125 nt, synthetic construct
  source 1..125: mol_type = other RNA
tcaccaggaacatgtacctggttttagagctagaaatagcaagttaaaataaggctagtccgttatcaacttgaaaaagtggcaccgagtcggtgctttcccccaggtgtacatgttcctgtttt

SEQ ID NO: 5660 - RNA, 125 nt, synthetic construct
  source 1..125: mol_type = other RNA
tcaccaggaacatgtacctggttttagagctagaaatagcaagttaaaataaggctagtccgttatcaacttgaaaaagtggcaccgagtcggtgcgctttcccccaggtgtacatgttcctggt

SEQ ID NO: 5661 - RNA, 125 nt, synthetic construct
  source 1..125: mol_type = other RNA
tcaccaggaacatgtacctggttttagagctagaaatagcaagttaaaataaggctagtccgttatcaacttgaaaaagtggcaccgagtcggtgcgctttcccccaggtgtacatgttcctttt

SEQ ID NO: 5662 - RNA, 125 nt, synthetic construct
  source 1..125: mol_type = other RNA
tcaccaggaacatgtacctggttttagagctagaaatagcaagttaaaataaggctagtccgttatcaacttgaaaaagtggcaccgagtcggtgctcccccaggtgtacatgttcctggttttt

SEQ ID NO: 5663 - RNA, 125 nt, synthetic construct
  source 1..125: mol_type = other RNA
gtcaccaggaacatgtacctggttttagagctagaaatagcaagttaaaataaggctagtccgttatcaacttgaaaaagtggcaccgagtcggtgcgctttcccccaggtgtacatgttcctgg

SEQ ID NO: 5664 - RNA, 125 nt, synthetic construct
  source 1..125: mol_type = other RNA
gtcaccaggaacatgtacctggttttagagctagaaatagcaagttaaaataaggctagtccgttatcaacttgaaaaagtggcaccgagtcggtgctggctttcccccaggtgtacatgttcct

SEQ ID NO: 5665 - RNA, 125 nt, synthetic construct
  source 1..125: mol_type = other RNA
tcaccaggaacatgtacctggttttagagctagaaatagcaagttaaaataaggctagtccgttatcaacttgaaaaagtggcaccgagtcggtgcttcccccaggtgtacatgttcctggtttt

SEQ ID NO: 5666 - RNA, 126 nt, synthetic construct
  source 1..126: mol_type = other RNA
tcaccaggaacatgtacctggttttagagctagaaatagcaagttaaaataaggctagtccgttatcaacttgaaaaagtggcaccgagtcggtgcgctttccgccaggtgtacatgttccttttt

SEQ ID NO: 5667 - RNA, 126 nt, synthetic construct
  source 1..126: mol_type = other RNA
tcaccaggaacatgtacctggttttagagctagaaatagcaagttaaaataaggctagtccgttatcaacttgaaaaagtggcaccgagtcggtgcgctttcctccaggtgtacatgttccttttt

SEQ ID NO: 5668 - RNA, 126 nt, synthetic construct
  source 1..126: mol_type = other RNA
tcaccaggaacatgtacctggttttagagctagaaatagcaagttaaaataaggctagtccgttatcaacttgaaaaagtggcaccgagtcggtgcgctttccaccaggtgtacatgttccttttt

SEQ ID NO: 5669 - RNA, 126 nt, synthetic construct
  source 1..126: mol_type = other RNA
tcaccaggaacatgtacctggttttagagctagaaatagcaagttaaaataaggctagtccgttatcaacttgaaaaagtggcaccgagtcggtgcgctttcagccaggtgtacatgttccttttt

SEQ ID NO: 5670 - RNA, 126 nt, synthetic construct
  source 1..126: mol_type = other RNA
tcaccaggaacatgtacctggttttagagctagaaatagcaagttaaaataaggctagtccgttatcaacttgaaaaagtggcaccgagtcggtgcgctttcatccaggtgtacatgttccttttt

SEQ ID NO: 5671 - RNA, 126 nt, synthetic construct
  source 1..126: mol_type = other RNA
gtcaccaggaacatgtacctggttttagagctagaaatagcaagttaaaataaggctagtccgttatcaacttgaaaaagtggcaccgagtcggtgcgctttcccccaggtgtacatgttcctggt

SEQ ID NO: 5672 - RNA, 126 nt, synthetic construct
  source 1..126: mol_type = other RNA
tcaccaggaacatgtacctggttttagagctagaaatagcaagttaaaataaggctagtccgttatcaacttgaaaaagtggcaccgagtcggtgctggctttcccccaggtgtacatgttcctgg

SEQ ID NO: 5673 - RNA, 126 nt, synthetic construct
  source 1..126: mol_type = other RNA
tcaccaggaacatgtacctggttttagagctagaaatagcaagttaaaataaggctagtccgttatcaacttgaaaaagtggcaccgagtcggtgcgctttcggccaggtgtacatgttccttttt

SEQ ID NO: 5674 - RNA, 126 nt, synthetic construct
  source 1..126: mol_type = other RNA
tcaccaggaacatgtacctggttttagagctagaaatagcaagttaaaataaggctagtccgttatcaacttgaaaaagtggcaccgagtcggtgcgctttcgcccaggtgtacatgttccttttt

SEQ ID NO: 5675 - RNA, 126 nt, synthetic construct
  source 1..126: mol_type = other RNA
tcaccaggaacatgtacctggttttagagctagaaatagcaagttaaaataaggctagtccgttatcaacttgaaaaagtggcaccgagtcggtgcgctttcaaccaggtgtacatgttccttttt

SEQ ID NO: 5676 - RNA, 126 nt, synthetic construct
  source 1..126: mol_type = other RNA
tcaccaggaacatgtacctggttttagagctagaaatagcaagttaaaataaggctagtccgttatcaacttgaaaaagtggcaccgagtcggtgcgctttcttccaggtgtacatgttccttttt

SEQ ID NO: 5677 - RNA, 126 nt, synthetic construct
  source 1..126: mol_type = other RNA
tcaccaggaacatgtacctggttttagagctagaaatagcaagttaaaataaggctagtccgttatcaacttgaaaaagtggcaccgagtcggtgcgctttctcccaggtgtacatgttccttttt

SEQ ID NO: 5678 - RNA, 126 nt, synthetic construct
  source 1..126: mol_type = other RNA
tcaccaggaacatgtacctggttttagagctagaaatagcaagttaaaataaggctagtccgttatcaacttgaaaaagtggcaccgagtcggtgcgctttcgtccaggtgtacatgttccttttt

SEQ ID NO: 5679 - RNA, 126 nt, synthetic construct
  source 1..126: mol_type = other RNA
tcaccaggaacatgtacctggttttagagctagaaatagcaagttaaaataaggctagtccgttatcaacttgaaaaagtggcaccgagtcggtgcgctttctgccaggtgtacatgttccttttt

SEQ ID NO: 5680 - RNA, 126 nt, synthetic construct
  source 1..126: mol_type = other RNA
tcaccaggaacatgtacctggttttagagctagaaatagcaagttaaaataaggctagtccgttatcaacttgaaaaagtggcaccgagtcggtgctggctttcccccaggtgtacatgttctttt

SEQ ID NO: 5681 - RNA, 126 nt, synthetic construct
  source 1..126: mol_type = other RNA
tcaccaggaacatgtacctggttttagagctagaaatagcaagttaaaataaggctagtccgttatcaacttgaaaaagtggcaccgagtcggtgcgctttcacccaggtgtacatgttccttttt

SEQ ID NO: 5682 - RNA, 126 nt, synthetic construct
  source 1..126: mol_type = other RNA
tcaccaggaacatgtacctggttttagagctagaaatagcaagttaaaataaggctagtccgttatcaacttgaaaaagtggcaccgagtcggtgcgctttcccccaggtgtacatgttccttttt

SEQ ID NO: 5683 - RNA, 126 nt, synthetic construct
  source 1..126: mol_type = other RNA
tcaccaggaacatgtacctggttttagagctagaaatagcaagttaaaataaggctagtccgttatcaacttgaaaaagtggcaccgagtcggtgctttcccccaggtgtacatgttcctggtttt

SEQ ID NO: 5684 - RNA, 126 nt, synthetic construct
  source 1..126: mol_type = other RNA
tcaccaggaacatgtacctggttttagagctagaaatagcaagttaaaataaggctagtccgttatcaacttgaaaaagtggcaccgagtcggtgcgctttctaccaggtgtacatgttccttttt

SEQ ID NO: 5685 - RNA, 126 nt, synthetic construct
  source 1..126: mol_type = other RNA
tcaccaggaacatgtacctggttttagagctagaaatagcaagttaaaataaggctagtccgttatcaacttgaaaaagtggcaccgagtcggtgcgctttcgaccaggtgtacatgttccttttt

SEQ ID NO: 5686 - RNA, 127 nt, synthetic construct
  source 1..127: mol_type = other RNA
tcaccaggaacatgtacctggttttagagctagaaatagcaagttaaaataaggctagtccgttatcaacttgaaaaagtggcaccgagtcggtgctttcccccaggtgtacatgttcctggttttt

SEQ ID NO: 5687 - RNA, 127 nt, synthetic construct
  source 1..127: mol_type = other RNA
gtcaccaggaacatgtacctggttttagagctagaaatagcaagttaaaataaggctagtccgttatcaacttgaaaaagtggcaccgagtcggtgctggctttcccccaggtgtacatgttcctgg

SEQ ID NO: 5688 - RNA, 127 nt, synthetic construct
  source 1..127: mol_type = other RNA
tcaccaggaacatgtacctggttttagagctagaaatagcaagttaaaataaggctagtccgttatcaacttgaaaaagtggcaccgagtcggtgcgctttcccccaggtgtacatgttcctgtttt

SEQ ID NO: 5689 - RNA, 128 nt, synthetic construct
  source 1..128: mol_type = other RNA
tcaccaggaacatgtacctggttttagagctagaaatagcaagttaaaataaggctagtccgttatcaacttgaaaaagtggcaccgagtcggtgctggctttcccccaggtgtacatgttccttttt

SEQ ID NO: 5690 - RNA, 128 nt, synthetic construct
  source 1..128: mol_type = other RNA
tcaccaggaacatgtacctggttttagagctagaaatagcaagttaaaataaggctagtccgttatcaacttgaaaaagtggcaccgagtcggtgcgctttcccccaggtgtacatgttcctggtttt

SEQ ID NO: 5691 - RNA, 129 nt, synthetic construct
  source 1..129: mol_type = other RNA
tcaccaggaacatgtacctggttttagagctagaaatagcaagttaaaataaggctagtccgttatcaacttgaaaaagtggcaccgagtcggtgcgctttcccccaggtgtacatgttcctggttttt

SEQ ID NO: 5692 - RNA, 130 nt, synthetic construct
  source 1..130: mol_type = other RNA
tcaccaggaacatgtacctggttttagagctagaaatagcaagttaaaataaggctagtccgttatcaacttgaaaaagtggcaccgagtcggtgctggctttcccccaggtgtacatgttcctggtttt

SEQ ID NO: 5693 - RNA, 96 nt, synthetic construct
  source 1..96: mol_type = other RNA
cccgactctggctttcctccgttttagagctagaaatagcaagttaaaataaggctagtccgttatcaacttgaaaaagtggcaccgagtcggtgc

SEQ ID NO: 5694 - RNA, 96 nt, synthetic construct
  source 1..96: mol_type = other RNA
cccgactctggctttcgtccgttttagagctagaaatagcaagttaaaataaggctagtccgttatcaacttgaaaaagtggcaccgagtcggtgc

SEQ ID NO: 5695 - RNA, 96 nt, synthetic construct
  source 1..96: mol_type = other RNA
cccgactctggctttctgccgttttagagctagaaatagcaagttaaaataaggctagtccgttatcaacttgaaaaagtggcaccgagtcggtgc

SEQ ID NO: 5696 - RNA, 96 nt, synthetic construct
  source 1..96: mol_type = other RNA
cccgactctggctttcagccgttttagagctagaaatagcaagttaaaataaggctagtccgttatcaacttgaaaaagtggcaccgagtcggtgc

SEQ ID NO: 5697 - RNA, 96 nt, synthetic construct
  source 1..96: mol_type = other RNA
cccgactctggctttccgccgttttagagctagaaatagcaagttaaaataaggctagtccgttatcaacttgaaaaagtggcaccgagtcggtgc

SEQ ID NO: 5698 - RNA, 96 nt, synthetic construct
  source 1..96: mol_type = other RNA
cccgactctggctttctaccgttttagagctagaaatagcaagttaaaataaggctagtccgttatcaacttgaaaaagtggcaccgagtcggtgc

SEQ ID NO: 5699 - RNA, 96 nt, synthetic construct
  source 1..96: mol_type = other RNA
cccgactctggctttcttccgttttagagctagaaatagcaagttaaaataaggctagtccgttatcaacttgaaaaagtggcaccgagtcggtgc

SEQ ID NO: 5700 - RNA, 96 nt, synthetic construct
  source 1..96: mol_type = other RNA
cccgactctggctttcatccgttttagagctagaaatagcaagttaaaataaggctagtccgttatcaacttgaaaaagtggcaccgagtcggtgc

SEQ ID NO: 5701 - RNA, 96 nt, synthetic construct
  source 1..96: mol_type = other RNA
cccgactctggctttcggccgttttagagctagaaatagcaagttaaaataaggctagtccgttatcaacttgaaaaagtggcaccgagtcggtgc

SEQ ID NO: 5702 - RNA, 96 nt, synthetic construct
  source 1..96: mol_type = other RNA
cccgactctggctttctcccgttttagagctagaaatagcaagttaaaataaggctagtccgttatcaacttgaaaaagtggcaccgagtcggtgc

SEQ ID NO: 5703 - RNA, 96 nt, synthetic construct
  source 1..96: mol_type = other RNA
cccgactctggctttccaccgttttagagctagaaatagcaagttaaaataaggctagtccgttatcaacttgaaaaagtggcaccgagtcggtgc

SEQ ID NO: 5704 - RNA, 96 nt, synthetic construct
  source 1..96: mol_type = other RNA
cccgactctggctttcaaccgttttagagctagaaatagcaagttaaaataaggctagtccgttatcaacttgaaaaagtggcaccgagtcggtgc

SEQ ID NO: 5705 - RNA, 96 nt, synthetic construct
  source 1..96: mol_type = other RNA
cccgactctggctttcgcccgttttagagctagaaatagcaagttaaaataaggctagtccgttatcaacttgaaaaagtggcaccgagtcggtgc

SEQ ID NO: 5706 - RNA, 96 nt, synthetic construct
  source 1..96: mol_type = other RNA
cccgactctggctttcgaccgttttagagctagaaatagcaagttaaaataaggctagtccgttatcaacttgaaaaagtggcaccgagtcggtgc

SEQ ID NO: 5707 - RNA, 96 nt, synthetic construct
  source 1..96: mol_type = other RNA
cccgactctggctttcacccgttttagagctagaaatagcaagttaaaataaggctagtccgttatcaacttgaaaaagtggcaccgagtcggtgc

SEQ ID NO: 5708 - RNA, 97 nt, synthetic construct
  source 1..97: mol_type = other RNA
gcccgactctggctttctgccgttttagagctagaaatagcaagttaaaataaggctagtccgttatcaacttgaaaaagtggcaccgagtcggtgc

SEQ ID NO: 5709 - RNA, 97 nt, synthetic construct
  source 1..97: mol_type = other RNA
gcccgactctggctttctaccgttttagagctagaaatagcaagttaaaataaggctagtccgttatcaacttgaaaaagtggcaccgagtcggtgc

SEQ ID NO: 5710 - RNA, 97 nt, synthetic construct
  source 1..97: mol_type = other RNA
gcccgactctggctttcagccgttttagagctagaaatagcaagttaaaataaggctagtccgttatcaacttgaaaaagtggcaccgagtcggtgc

SEQ ID NO: 5711 - RNA, 97 nt, synthetic construct
  source 1..97: mol_type = other RNA
gcccgactctggctttcctccgttttagagctagaaatagcaagttaaaataaggctagtccgttatcaacttgaaaaagtggcaccgagtcggtgc

SEQ ID NO: 5712 - RNA, 97 nt, synthetic construct
  source 1..97: mol_type = other RNA
gcccgactctggctttcggccgttttagagctagaaatagcaagttaaaataaggctagtccgttatcaacttgaaaaagtggcaccgagtcggtgc

SEQ ID NO: 5713 - RNA, 97 nt, synthetic construct
  source 1..97: mol_type = other RNA
gcccgactctggctttcgcccgttttagagctagaaatagcaagttaaaataaggctagtccgttatcaacttgaaaaagtggcaccgagtcggtgc

SEQ ID NO: 5714 - RNA, 97 nt, synthetic construct
  source 1..97: mol_type = other RNA
gcccgactctggctttcacccgttttagagctagaaatagcaagttaaaataaggctagtccgttatcaacttgaaaaagtggcaccgagtcggtgc

SEQ ID NO: 5715 - RNA, 97 nt, synthetic construct
  source 1..97: mol_type = other RNA
gcccgactctggctttcatccgttttagagctagaaatagcaagttaaaataaggctagtccgttatcaacttgaaaaagtggcaccgagtcggtgc

SEQ ID NO: 5716 - RNA, 97 nt, synthetic construct
  source 1..97: mol_type = other RNA
gcccgactctggctttcgaccgttttagagctagaaatagcaagttaaaataaggctagtccgttatcaacttgaaaaagtggcaccgagtcggtgc

SEQ ID NO: 5717 - RNA, 97 nt, synthetic construct
  source 1..97: mol_type = other RNA
gcccgactctggctttcaaccgttttagagctagaaatagcaagttaaaataaggctagtccgttatcaacttgaaaaagtggcaccgagtcggtgc

SEQ ID NO: 5718 - RNA, 97 nt, synthetic construct
  source 1..97: mol_type = other RNA
gcccgactctggctttccgccgttttagagctagaaatagcaagttaaaataaggctagtccgttatcaacttgaaaaagtggcaccgagtcggtgc

SEQ ID NO: 5719 - RNA, 97 nt, synthetic construct
  source 1..97: mol_type = other RNA
gcccgactctggctttctcccgttttagagctagaaatagcaagttaaaataaggctagtccgttatcaacttgaaaaagtggcaccgagtcggtgc

SEQ ID NO: 5720 - RNA, 97 nt, synthetic construct
  source 1..97: mol_type = other RNA
gcccgactctggctttccaccgttttagagctagaaatagcaagttaaaataaggctagtccgttatcaacttgaaaaagtggcaccgagtcggtgc

SEQ ID NO: 5721 - RNA, 97 nt, synthetic construct
  source 1..97: mol_type = other RNA
gcccgactctggctttcttccgttttagagctagaaatagcaagttaaaataaggctagtccgttatcaacttgaaaaagtggcaccgagtcggtgc

SEQ ID NO: 5722 - RNA, 97 nt, synthetic construct
  source 1..97: mol_type = other RNA
gcccgactctggctttcgtccgttttagagctagaaatagcaagttaaaataaggctagtccgttatcaacttgaaaaagtggcaccgagtcggtgc

SEQ ID NO: 5723 - RNA, 16 nt, synthetic construct
  source 1..16: mol_type = other RNA
ctctgggcttcctcca

SEQ ID NO: 5724 - RNA, 17 nt, synthetic construct
  source 1..17: mol_type = other RNA
cctctgggcttcctcca

SEQ ID NO: 5725 - RNA, 18 nt, synthetic construct
  source 1..18: mol_type = other RNA
tcctctgggcttcctcca

SEQ ID NO: 5726 - RNA, 19 nt, synthetic construct
  source 1..19: mol_type = other RNA
atcctctgggcttcctcca

SEQ ID NO: 5727 - RNA, 20 nt, synthetic construct
  source 1..20: mol_type = other RNA
aatcctctgggcttcctcca

SEQ ID NO: 5728 - RNA, 21 nt, synthetic construct
  source 1..21: mol_type = other RNA
caatcctctgggcttcctcca

SEQ ID NO: 5729 - RNA, 22 nt, synthetic construct
  source 1..22: mol_type = other RNA
ccaatcctctgggcttcctcca

SEQ ID NO: 5730-5736 - skipped (7 entries)

SEQ ID NO: 5737 - RNA, 10 nt, synthetic construct
  source 1..10: mol_type = other RNA
aggaagccca

SEQ ID NO: 5738 - RNA, 11 nt, synthetic construct
  source 1..11: mol_type = other RNA
aggaagcccag

SEQ ID NO: 5739 - RNA, 12 nt, synthetic construct
  source 1..12: mol_type = other RNA
aggaagcccaga

SEQ ID NO: 5740 - RNA, 13 nt, synthetic construct
  source 1..13: mol_type = other RNA
aggaagcccagag

SEQ ID NO: 5741 - RNA, 14 nt, synthetic construct
  source 1..14: mol_type = other RNA
aggaagcccagagg

SEQ ID NO: 5742 - RNA, 15 nt, synthetic construct
  source 1..15: mol_type = other RNA
aggaagcccagagga

SEQ ID NO: 5743 - RNA, 16 nt, synthetic construct
  source 1..16: mol_type = other RNA
aggaagcccagaggat

SEQ ID NO: 5744 - RNA, 17 nt, synthetic construct
  source 1..17: mol_type = other RNA
aggaagcccagaggatt

SEQ ID NO: 5745 - RNA, 18 nt, synthetic construct
  source 1..18: mol_type = other RNA
aggaagcccagaggattg

SEQ ID NO: 5746 - RNA, 19 nt, synthetic construct
  source 1..19: mol_type = other RNA
aggaagcccagaggattgg

SEQ ID NO: 5747 - RNA, 86 nt, synthetic construct
  source 1..86: mol_type = other RNA
acctgggggaaagccagagtcgggggaccccattcagcctccaaagaggctttgctgtgtgcacccaggatcccactacccactgg

SEQ ID NO: 5748 - RNA, 87 nt, synthetic construct
  source 1..87: mol_type = other RNA
cacctgggggaaagccagagtcgggggaccccattcagcctccaaagaggctttgctgtgtgcacccaggatcccactacccactgg

SEQ ID NO: 5749 - RNA, 87 nt, synthetic construct
  source 1..87: mol_type = other RNA
tacctgggggaaagccagagtcgggggaccccattcagcctccaaagaggctttgctgtgtgcacccaggatcccactacccactgg

SEQ ID NO: 5750 - RNA, 87 nt, synthetic construct
  source 1..87: mol_type = other RNA
aacctgggggaaagccagagtcgggggaccccattcagcctccaaagaggctttgctgtgtgcacccaggatcccactacccactgg

SEQ ID NO: 5751 - RNA, 87 nt, synthetic construct
  source 1..87: mol_type = other RNA
gacctgggggaaagccagagtcgggggaccccattcagcctccaaagaggctttgctgtgtgcacccaggatcccactacccactgg

SEQ ID NO: 5752 - RNA, 88 nt, synthetic construct
  source 1..88: mol_type = other RNA
atacctgggggaaagccagagtcgggggaccccattcagcctccaaagaggctttgctgtgtgcacccaggatcccactacccactgg

SEQ ID NO: 5753 - RNA, 88 nt, synthetic construct
  source 1..88: mol_type = other RNA
agacctgggggaaagccagagtcgggggaccccattcagcctccaaagaggctttgctgtgtgcacccaggatcccactacccactgg

SEQ ID NO: 5754 - RNA, 88 nt, synthetic construct
  source 1..88: mol_type = other RNA
acacctgggggaaagccagagtcgggggaccccattcagcctccaaagaggctttgctgtgtgcacccaggatcccactacccactgg

SEQ ID NO: 5755 - RNA, 88 nt, synthetic construct
  source 1..88: mol_type = other RNA
aaacctgggggaaagccagagtcgggggaccccattcagcctccaaagaggctttgctgtgtgcacccaggatcccactacccactgg

SEQ ID NO: 5756 - RNA, 89 nt, synthetic construct
  source 1..89: mol_type = other RNA
tagacctgggggaaagccagagtcgggggaccccattcagcctccaaagaggctttgctgtgtgcacccaggatcccactacccactgg

SEQ ID NO: 5757 - RNA, 89 nt, synthetic construct
  source 1..89: mol_type = other RNA
taaacctgggggaaagccagagtcgggggaccccattcagcctccaaagaggctttgctgtgtgcacccaggatcccactacccactgg

SEQ ID NO: 5758 - RNA, 89 nt, synthetic construct
  source 1..89: mol_type = other RNA
tacacctgggggaaagccagagtcgggggaccccattcagcctccaaagaggctttgctgtgtgcacccaggatcccactacccactgg

SEQ ID NO: 5759 - RNA, 89 nt, synthetic construct
  source 1..89: mol_type = other RNA
tatacctgggggaaagccagagtcgggggaccccattcagcctccaaagaggctttgctgtgtgcacccaggatcccactacccactgg

SEQ ID NO: 5760 - RNA, 90 nt, synthetic construct
  source 1..90: mol_type = other RNA
gtaaacctgggggaaagccagagtcgggggaccccattcagcctccaaagaggctttgctgtgtgcacccaggatcccactacccactgg

SEQ ID NO: 5761 - RNA, 90 nt, synthetic construct
  source 1..90: mol_type = other RNA
gtatacctgggggaaagccagagtcgggggaccccattcagcctccaaagaggctttgctgtgtgcacccaggatcccactacccactgg

SEQ ID NO: 5762 - RNA, 90 nt, synthetic construct
  source 1..90: mol_type = other RNA
gtacacctgggggaaagccagagtcgggggaccccattcagcctccaaagaggctttgctgtgtgcacccaggatcccactacccactgg

SEQ ID NO: 5763 - RNA, 90 nt, synthetic construct
  source 1..90: mol_type = other RNA
gtagacctgggggaaagccagagtcgggggaccccattcagcctccaaagaggctttgctgtgtgcacccaggatcccactacccactgg

SEQ ID NO: 5764 - RNA, 91 nt, synthetic construct
  source 1..91: mol_type = other RNA
tgtatacctgggggaaagccagagtcgggggaccccattcagcctccaaagaggctttgctgtgtgcacccaggatcccactacccactgg

SEQ ID NO: 5765 - RNA, 91 nt, synthetic construct
  source 1..91: mol_type = other RNA
tgtaaacctgggggaaagccagagtcgggggaccccattcagcctccaaagaggctttgctgtgtgcacccaggatcccactacccactgg

SEQ ID NO: 5766 - RNA, 91 nt, synthetic construct
  source 1..91: mol_type = other RNA
tgtagacctgggggaaagccagagtcgggggaccccattcagcctccaaagaggctttgctgtgtgcacccaggatcccactacccactgg

SEQ ID NO: 5767 - RNA, 91 nt, synthetic construct
  source 1..91: mol_type = other RNA
tgtacacctgggggaaagccagagtcgggggaccccattcagcctccaaagaggctttgctgtgtgcacccaggatcccactacccactgg

SEQ ID NO: 5768 - RNA, 92 nt, synthetic construct
  source 1..92: mol_type = other RNA
atgtaaacctgggggaaagccagagtcgggggaccccattcagcctccaaagaggctttgctgtgtgcacccaggatcccactacccactgg

SEQ ID NO: 5769 - RNA, 92 nt, synthetic construct
  source 1..92: mol_type = other RNA
atgtagacctgggggaaagccagagtcgggggaccccattcagcctccaaagaggctttgctgtgtgcacccaggatcccactacccactgg

SEQ ID NO: 5770 - RNA, 92 nt, synthetic construct
  source 1..92: mol_type = other RNA
atgtacacctgggggaaagccagagtcgggggaccccattcagcctccaaagaggctttgctgtgtgcacccaggatcccactacccactgg

SEQ ID NO: 5771 - RNA, 92 nt, synthetic construct
  source 1..92: mol_type = other RNA
atgtatacctgggggaaagccagagtcgggggaccccattcagcctccaaagaggctttgctgtgtgcacccaggatcccactacccactgg

SEQ ID NO: 5772 - RNA, 93 nt, synthetic construct
  source 1..93: mol_type = other RNA
catgtacacctgggggaaagccagagtcgggggaccccattcagcctccaaagaggctttgctgtgtgcacccaggatcccactacccactgg

SEQ ID NO: 5773 - RNA, 93 nt, synthetic construct
  source 1..93: mol_type = other RNA
catgtatacctgggggaaagccagagtcgggggaccccattcagcctccaaagaggctttgctgtgtgcacccaggatcccactacccactgg

SEQ ID NO: 5774 - RNA, 93 nt, synthetic construct
  source 1..93: mol_type = other RNA
catgtagacctgggggaaagccagagtcgggggaccccattcagcctccaaagaggctttgctgtgtgcacccaggatcccactacccactgg

SEQ ID NO: 5775 - RNA, 93 nt, synthetic construct
  source 1..93: mol_type = other RNA
catgtaaacctgggggaaagccagagtcgggggaccccattcagcctccaaagaggctttgctgtgtgcacccaggatcccactacccactgg

SEQ ID NO: 5776 - RNA, 94 nt, synthetic construct
  source 1..94: mol_type = other RNA
acatgtaaacctgggggaaagccagagtcgggggaccccattcagcctccaaagaggctttgctgtgtgcacccaggatcccactacccactgg

SEQ ID NO: 5777 - RNA, 94 nt, synthetic construct
  source 1..94: mol_type = other RNA
acatgtagacctgggggaaagccagagtcgggggaccccattcagcctccaaagaggctttgctgtgtgcacccaggatcccactacccactgg

SEQ ID NO: 5778 - RNA, 94 nt, synthetic construct
  source 1..94: mol_type = other RNA
acatgtacacctgggggaaagccagagtcgggggaccccattcagcctccaaagaggctttgctgtgtgcacccaggatcccactacccactgg

SEQ ID NO: 5779 - RNA, 94 nt, synthetic construct
  source 1..94: mol_type = other RNA
acatgtatacctgggggaaagccagagtcgggggaccccattcagcctccaaagaggctttgctgtgtgcacccaggatcccactacccactgg

SEQ ID NO: 5780 - RNA, 95 nt, synthetic construct
  source 1..95: mol_type = other RNA
aacatgtaaacctgggggaaagccagagtcgggggaccccattcagcctccaaagaggctttgctgtgtgcacccaggatcccactacccactgg

SEQ ID NO: 5781 - RNA, 95 nt, synthetic construct
  source 1..95: mol_type = other RNA
aacatgtagacctgggggaaagccagagtcgggggaccccattcagcctccaaagaggctttgctgtgtgcacccaggatcccactacccactgg

SEQ ID NO: 5782 - RNA, 95 nt, synthetic construct
  source 1..95: mol_type = other RNA
aacatgtatacctgggggaaagccagagtcgggggaccccattcagcctccaaagaggctttgctgtgtgcacccaggatcccactacccactgg

SEQ ID NO: 5783 - RNA, 95 nt, synthetic construct
  source 1..95: mol_type = other RNA
aacatgtacacctgggggaaagccagagtcgggggaccccattcagcctccaaagaggctttgctgtgtgcacccaggatcccactacccactgg

SEQ ID NO: 5784 - RNA, 96 nt, synthetic construct
  source 1..96: mol_type = other RNA
gaacatgtatacctgggggaaagccagagtcgggggaccccattcagcctccaaagaggctttgctgtgtgcacccaggatcccactacccactgg

SEQ ID NO: 5785 - RNA, 96 nt, synthetic construct
  source 1..96: mol_type = other RNA
gaacatgtagacctgggggaaagccagagtcgggggaccccattcagcctccaaagaggctttgctgtgtgcacccaggatcccactacccactgg

SEQ ID NO: 5786 - RNA, 96 nt, synthetic construct
  source 1..96: mol_type = other RNA
gaacatgtacacctgggggaaagccagagtcgggggaccccattcagcctccaaagaggctttgctgtgtgcacccaggatcccactacccactgg

SEQ ID NO: 5787 - RNA, 96 nt, synthetic construct
  source 1..96: mol_type = other RNA
gaacatgtaaacctgggggaaagccagagtcgggggaccccattcagcctccaaagaggctttgctgtgtgcacccaggatcccactacccactgg

SEQ ID NO: 5788 - RNA, 97 nt, synthetic construct
  source 1..97: mol_type = other RNA
ggaacatgtaaacctgggggaaagccagagtcgggggaccccattcagcctccaaagaggctttgctgtgtgcacccaggatcccactacccactgg

SEQ ID NO: 5789 - RNA, 97 nt, synthetic construct
  source 1..97: mol_type = other RNA
ggaacatgtagacctgggggaaagccagagtcgggggaccccattcagcctccaaagaggctttgctgtgtgcacccaggatcccactacccactgg

SEQ ID NO: 5790 - RNA, 97 nt, synthetic construct
  source 1..97: mol_type = other RNA
ggaacatgtacacctgggggaaagccagagtcgggggaccccattcagcctccaaagaggctttgctgtgtgcacccaggatcccactacccactgg

SEQ ID NO: 5791 - RNA, 97 nt, synthetic construct
  source 1..97: mol_type = other RNA
ggaacatgtatacctgggggaaagccagagtcgggggaccccattcagcctccaaagaggctttgctgtgtgcacccaggatcccactacccactgg

SEQ ID NO: 5792 - RNA, 98 nt, synthetic construct
  source 1..98: mol_type = other RNA
aggaacatgtatacctgggggaaagccagagtcgggggaccccattcagcctccaaagaggctttgctgtgtgcacccaggatcccactacccactgg

SEQ ID NO: 5793 - RNA, 98 nt, synthetic construct
  source 1..98: mol_type = other RNA
aggaacatgtacacctgggggaaagccagagtcgggggaccccattcagcctccaaagaggctttgctgtgtgcacccaggatcccactacccactgg

SEQ ID NO: 5794 - RNA, 98 nt, synthetic construct
  source 1..98: mol_type = other RNA
aggaacatgtaaacctgggggaaagccagagtcgggggaccccattcagcctccaaagaggctttgctgtgtgcacccaggatcccactacccactgg

SEQ ID NO: 5795 - RNA, 98 nt, synthetic construct
  source 1..98: mol_type = other RNA
aggaacatgtagacctgggggaaagccagagtcgggggaccccattcagcctccaaagaggctttgctgtgtgcacccaggatcccactacccactgg

SEQ ID NO: 5796 - RNA, 99 nt, synthetic construct
  source 1..99: mol_type = other RNA
caggaacatgtaaacctgggggaaagccagagtcgggggaccccattcagcctccaaagaggctttgctgtgtgcacccaggatcccactacccactgg

SEQ ID NO: 5797 - RNA, 99 nt, synthetic construct
  source 1..99: mol_type = other RNA
caggaacatgtacacctgggggaaagccagagtcgggggaccccattcagcctccaaagaggctttgctgtgtgcacccaggatcccactacccactgg

SEQ ID NO: 5798 - RNA, 99 nt, synthetic construct
  source 1..99: mol_type = other RNA
caggaacatgtagacctgggggaaagccagagtcgggggaccccattcagcctccaaagaggctttgctgtgtgcacccaggatcccactacccactgg

SEQ ID NO: 5799 - RNA, 99 nt, synthetic construct
  source 1..99: mol_type = other RNA
caggaacatgtatacctgggggaaagccagagtcgggggaccccattcagcctccaaagaggctttgctgtgtgcacccaggatcccactacccactgg

SEQ ID NO: 5800 - RNA, 100 nt, synthetic construct
  source 1..100: mol_type = other RNA
ccaggaacatgtagacctgggggaaagccagagtcgggggaccccattcagcctccaaagaggctttgctgtgtgcacccaggatcccactacccactgg

SEQ ID NO: 5801 - RNA, 100 nt, synthetic construct
  source 1..100: mol_type = other RNA
ccaggaacatgtaaacctgggggaaagccagagtcgggggaccccattcagcctccaaagaggctttgctgtgtgcacccaggatcccactacccactgg

SEQ ID NO: 5802 - RNA, 100 nt, synthetic construct
  source 1..100: mol_type = other RNA
ccaggaacatgtatacctgggggaaagccagagtcgggggaccccattcagcctccaaagaggctttgctgtgtgcacccaggatcccactacccactgg

SEQ ID NO: 5803 - RNA, 100 nt, synthetic construct
  source 1..100: mol_type = other RNA
ccaggaacatgtacacctgggggaaagccagagtcgggggaccccattcagcctccaaagaggctttgctgtgtgcacccaggatcccactacccactgg

SEQ ID NO: 5804 - RNA, 101 nt, synthetic construct
  source 1..101: mol_type = other RNA
accaggaacatgtatacctgggggaaagccagagtcgggggaccccattcagcctccaaagaggctttgctgtgtgcacccaggatcccactacccactgg

SEQ ID NO: 5805 - RNA, 101 nt, synthetic construct
  source 1..101: mol_type = other RNA
accaggaacatgtagacctgggggaaagccagagtcgggggaccccattcagcctccaaagaggctttgctgtgtgcacccaggatcccactacccactgg

SEQ ID NO: 5806 - RNA, 101 nt, synthetic construct
  source 1..101: mol_type = other RNA
accaggaacatgtacacctgggggaaagccagagtcgggggaccccattcagcctccaaagaggctttgctgtgtgcacccaggatcccactacccactgg

SEQ ID NO: 5807 - RNA, 101 nt, synthetic construct
  source 1..101: mol_type = other RNA
accaggaacatgtaaacctgggggaaagccagagtcgggggaccccattcagcctccaaagaggctttgctgtgtgcacccaggatcccactacccactgg

SEQ ID NO: 5808 - RNA, 102 nt, synthetic construct
  source 1..102: mol_type = other RNA
caccaggaacatgtagacctgggggaaagccagagtcgggggaccccattcagcctccaaagaggctttgctgtgtgcacccaggatcccactacccactgg

SEQ ID NO: 5809 - RNA, 102 nt, synthetic construct
  source 1..102: mol_type = other RNA
caccaggaacatgtacacctgggggaaagccagagtcgggggaccccattcagcctccaaagaggctttgctgtgtgcacccaggatcccactacccactgg

SEQ ID NO: 5810 - RNA, 102 nt, synthetic construct
  source 1..102: mol_type = other RNA
caccaggaacatgtaaacctgggggaaagccagagtcgggggaccccattcagcctccaaagaggctttgctgtgtgcacccaggatcccactacccactgg

SEQ ID NO: 5811 - RNA, 102 nt, synthetic construct
  source 1..102: mol_type = other RNA
caccaggaacatgtatacctgggggaaagccagagtcgggggaccccattcagcctccaaagaggctttgctgtgtgcacccaggatcccactacccactgg

SEQ ID NO: 5812 - RNA, 103 nt, synthetic construct
  source 1..103: mol_type = other RNA
tcaccaggaacatgtacacctgggggaaagccagagtcgggggaccccattcagcctccaaagaggctttgctgtgtgcacccaggatcccactacccactgg

SEQ ID NO: 5813 - RNA, 103 nt, synthetic construct
  source 1..103: mol_type = other RNA
tcaccaggaacatgtaaacctgggggaaagccagagtcgggggaccccattcagcctccaaagaggctttgctgtgtgcacccaggatcccactacccactgg

SEQ ID NO: 5814 - RNA, 103 nt, synthetic construct
  source 1..103: mol_type = other RNA
tcaccaggaacatgtatacctgggggaaagccagagtcgggggaccccattcagcctccaaagaggctttgctgtgtgcacccaggatcccactacccactgg

SEQ ID NO: 5815 - RNA, 103 nt, synthetic construct
  source 1..103: mol_type = other RNA
tcaccaggaacatgtagacctgggggaaagccagagtcgggggaccccattcagcctccaaagaggctttgctgtgtgcacccaggatcccactacccactgg

SEQ ID NO: 5816 - RNA, 16 nt, synthetic construct
  source 1..16: mol_type = other RNA
agaccaccttctccga

SEQ ID NO: 5817 - RNA, 17 nt, synthetic construct
  source 1..17: mol_type = other RNA
tagaccaccttctccga

SEQ ID NO: 5818 - RNA, 18 nt, synthetic construct
  source 1..18: mol_type = other RNA
gtagaccaccttctccga

SEQ ID NO: 5819 - RNA, 19 nt, synthetic construct
  source 1..19: mol_type = other RNA
ggtagaccaccttctccga

SEQ ID NO: 5820 - RNA, 20 nt, synthetic construct
  source 1..20: mol_type = other RNA
cggtagaccaccttctccga

SEQ ID NO: 5821 - RNA, 21 nt, synthetic construct
  source 1..21: mol_type = other RNA
ccggtagaccaccttctccga

SEQ ID NO: 5822 - RNA, 22 nt, synthetic construct
  source 1..22: mol_type = other RNA
gccggtagaccaccttctccga

SEQ ID NO: 5823-5829 - skipped (7 entries)

SEQ ID NO: 5830 - RNA, 10 nt, synthetic construct
  source 1..10: mol_type = other RNA
gagaaggtgg

SEQ ID NO: 5831 - RNA, 11 nt, synthetic construct
  source 1..11: mol_type = other RNA
gagaaggtggt

SEQ ID NO: 5832 - RNA, 12 nt, synthetic construct
  source 1..12: mol_type = other RNA
gagaaggtggtc

SEQ ID NO: 5833 - RNA, 13 nt, synthetic construct
  source 1..13: mol_type = other RNA
gagaaggtggtct

SEQ ID NO: 5834 - RNA, 14 nt, synthetic construct
  source 1..14: mol_type = other RNA
gagaaggtggtcta

SEQ ID NO: 5835 - RNA, 15 nt, synthetic construct
  source 1..15: mol_type = other RNA
gagaaggtggtctac

SEQ ID NO: 5836 - RNA, 16 nt, synthetic construct
  source 1..16: mol_type = other RNA
gagaaggtggtctacc

SEQ ID NO: 5837 - RNA, 17 nt, synthetic construct
  source 1..17: mol_type = other RNA
gagaaggtggtctaccg

SEQ ID NO: 5838 - RNA, 18 nt, synthetic construct
  source 1..18: mol_type = other RNA
gagaaggtggtctaccgg

SEQ ID NO: 5839 - RNA, 19 nt, synthetic construct
  source 1..19: mol_type = other RNA
gagaaggtggtctaccggc

SEQ ID NO: 5840 - RNA, 36 nt, synthetic construct
  source 1..36: mol_type = other RNA
gtttacatgttcctggtgaaatggcaggatctgtcg

SEQ ID NO: 5841 - RNA, 36 nt, synthetic construct
  source 1..36: mol_type = other RNA
gtttacatgttcctggtgaaatggcaggacttgtcg

SEQ ID NO: 5842 - RNA, 36 nt, synthetic construct
  source 1..36: mol_type = other RNA
gtttacatgttcctggtgaaatggcaggacttatcg

SEQ ID NO: 5843 - RNA, 36 nt, synthetic construct
  source 1..36: mol_type = other RNA
gtttacatgttcctggtgaaatggcaggacctgtcg

SEQ ID NO: 5844 - RNA, 36 nt, synthetic construct
  source 1..36: mol_type = other RNA
gtgtacatgttcctggtgaaatggcaggatttgtcg

SEQ ID NO: 5845 - RNA, 36 nt, synthetic construct
  source 1..36: mol_type = other RNA
gtgtacatgttcctggtgaaatggcaggatttatcg

SEQ ID NO: 5846 - RNA, 36 nt, synthetic construct
  source 1..36: mol_type = other RNA
gtgtacatgttcctggtgaaatggcaggatctgtcg

SEQ ID NO: 5847 - RNA, 36 nt, synthetic construct
  source 1..36: mol_type = other RNA
gtatacatgttcctggtgaaatggcaggacctgtcg

SEQ ID NO: 5848 - RNA, 36 nt, synthetic construct
  source 1..36: mol_type = other RNA
gtctacatgttcctggtgaaatggcaggatttatcg

SEQ ID NO: 5849 - RNA, 36 nt, synthetic construct
  source 1..36: mol_type = other RNA
gtgtacatgttcctggtgaaatggcaggacttgtcg

SEQ ID NO: 5850 - RNA, 36 nt, synthetic construct
  source 1..36: mol_type = other RNA
gtttacatgttcctggtgaaatggcaggatttgtcg

SEQ ID NO: 5851 - RNA, 36 nt, synthetic construct
  source 1..36: mol_type = other RNA
gtttacatgttcctggtgaaatggcaggatttatcg

SEQ ID NO: 5852 - RNA, 36 nt, synthetic construct
  source 1..36: mol_type = other RNA
gtatacatgttcctggtgaaatggcaggacttatcg

SEQ ID NO: 5853 - RNA, 36 nt, synthetic construct
  source 1..36: mol_type = other RNA
gtatacatgttcctggtgaaatggcaggacttgtcg

SEQ ID NO: 5854 - RNA, 36 nt, synthetic construct
  source 1..36: mol_type = other RNA
gtatacatgttcctggtgaaatggcaggatctgtcg

SEQ ID NO: 5855 - RNA, 36 nt, synthetic construct
  source 1..36: mol_type = other RNA
gtatacatgttcctggtgaaatggcaggatttatcg

SEQ ID NO: 5856 - RNA, 36 nt, synthetic construct
  source 1..36: mol_type = other RNA
gtctacatgttcctggtgaaatggcaggacctgtcg

SEQ ID NO: 5857 - RNA, 36 nt, synthetic construct
  source 1..36: mol_type = other RNA
gtctacatgttcctggtgaaatggcaggacttatcg

SEQ ID NO: 5858 - RNA, 36 nt, synthetic construct
  source 1..36: mol_type = other RNA
gtctacatgttcctggtgaaatggcaggacttgtcg

SEQ ID NO: 5859 - RNA, 36 nt, synthetic construct
  source 1..36: mol_type = other RNA
gtctacatgttcctggtgaaatggcaggatctgtcg

SEQ ID NO: 5860 - RNA, 36 nt, synthetic construct
  source 1..36: mol_type = other RNA
gtatacatgttcctggtgaaatggcaggatttgtcg

SEQ ID NO: 5861 - RNA, 36 nt, synthetic construct
  source 1..36: mol_type = other RNA
gtgtacatgttcctggtgaaatggcaggacttatcg

SEQ ID NO: 5862 - RNA, 36 nt, synthetic construct
  source 1..36: mol_type = other RNA
gtgtacatgttcctggtgaaatggcaggacctgtcg

SEQ ID NO: 5863 - RNA, 36 nt, synthetic construct
  source 1..36: mol_type = other RNA
gtctacatgttcctggtgaaatggcaggatttgtcg

SEQ ID NO: 5864 - RNA, 37 nt, synthetic construct
  source 1..37: mol_type = other RNA
ggtctacatgttcctggtgaaatggcaggatctgtcg

SEQ ID NO: 5865 - RNA, 37 nt, synthetic construct
  source 1..37: mol_type = other RNA
ggtgtacatgttcctggtgaaatggcaggacctgtcg

SEQ ID NO: 5866 - RNA, 37 nt, synthetic construct
  source 1..37: mol_type = other RNA
ggtgtacatgttcctggtgaaatggcaggacttgtcg

SEQ ID NO: 5867 - RNA, 37 nt, synthetic construct
  source 1..37: mol_type = other RNA
ggtctacatgttcctggtgaaatggcaggatttgtcg

SEQ ID NO: 5868 - RNA, 37 nt, synthetic construct
  source 1..37: mol_type = other RNA
ggtctacatgttcctggtgaaatggcaggacctgtcg

SEQ ID NO: 5869 - RNA, 37 nt, synthetic construct
  source 1..37: mol_type = other RNA
ggtctacatgttcctggtgaaatggcaggatttatcg

SEQ ID NO: 5870 - RNA, 37 nt, synthetic construct
  source 1..37: mol_type = other RNA
ggtgtacatgttcctggtgaaatggcaggacttatcg

SEQ ID NO: 5871 - RNA, 37 nt, synthetic construct
  source 1..37: mol_type = other RNA
ggtttacatgttcctggtgaaatggcaggatttgtcg

SEQ ID NO: 5872 - RNA, 37 nt, synthetic construct
  source 1..37: mol_type = other RNA
ggtatacatgttcctggtgaaatggcaggacttatcg

SEQ ID NO: 5873 - RNA, 37 nt, synthetic construct
  source 1..37: mol_type = other RNA
ggtctacatgttcctggtgaaatggcaggacttgtcg

SEQ ID NO: 5874 - RNA, 37 nt, synthetic construct
  source 1..37: mol_type = other RNA
ggtttacatgttcctggtgaaatggcaggatttatcg

SEQ ID NO: 5875 - RNA, 37 nt, synthetic construct
  source 1..37: mol_type = other RNA
ggtgtacatgttcctggtgaaatggcaggatctgtcg

SEQ ID NO: 5876 - RNA, 37 nt, synthetic construct
  source 1..37: mol_type = other RNA
ggtgtacatgttcctggtgaaatggcaggatttatcg

SEQ ID NO: 5877 - RNA, 37 nt, synthetic construct
  source 1..37: mol_type = other RNA
ggtgtacatgttcctggtgaaatggcaggatttgtcg

SEQ ID NO: 5878 - RNA, 37 nt, synthetic construct
  source 1..37: mol_type = other RNA
ggtttacatgttcctggtgaaatggcaggacctgtcg

SEQ ID NO: 5879 - RNA, 37 nt, synthetic construct
  source 1..37: mol_type = other RNA
ggtttacatgttcctggtgaaatggcaggacttatcg

SEQ ID NO: 5880 - RNA, 37 nt, synthetic construct
  source 1..37: mol_type = other RNA
ggtttacatgttcctggtgaaatggcaggacttgtcg

SEQ ID NO: 5881 - RNA, 37 nt, synthetic construct
  source 1..37: mol_type = other RNA
ggtatacatgttcctggtgaaatggcaggatttgtcg

SEQ ID NO: 5882 - RNA, 37 nt, synthetic construct
  source 1..37: mol_type = other RNA
ggtatacatgttcctggtgaaatggcaggatttatcg

SEQ ID NO: 5883 - RNA, 37 nt, synthetic construct
  source 1..37: mol_type = other RNA
ggtatacatgttcctggtgaaatggcaggatctgtcg

SEQ ID NO: 5884 - RNA, 37 nt, synthetic construct
  source 1..37: mol_type = other RNA
ggtatacatgttcctggtgaaatggcaggacctgtcg

SEQ ID NO: 5885 - RNA, 37 nt, synthetic construct
  source 1..37: mol_type = other RNA
ggtatacatgttcctggtgaaatggcaggacttgtcg

SEQ ID NO: 5886 - RNA, 37 nt, synthetic construct
  source 1..37: mol_type = other RNA
ggtttacatgttcctggtgaaatggcaggatctgtcg

SEQ ID NO: 5887 - RNA, 37 nt, synthetic construct
  source 1..37: mol_type = other RNA
ggtctacatgttcctggtgaaatggcaggacttatcg

SEQ ID NO: 5888 - RNA, 38 nt, synthetic construct
  source 1..38: mol_type = other RNA
aggtctacatgttcctggtgaaatggcaggatctgtcg

SEQ ID NO: 5889 - RNA, 38 nt, synthetic construct
  source 1..38: mol_type = other RNA
aggtctacatgttcctggtgaaatggcaggacttatcg

SEQ ID NO: 5890 - RNA, 38 nt, synthetic construct
  source 1..38: mol_type = other RNA
aggtatacatgttcctggtgaaatggcaggatttatcg

SEQ ID NO: 5891 - RNA, 38 nt, synthetic construct
  source 1..38: mol_type = other RNA
aggtatacatgttcctggtgaaatggcaggatctgtcg

SEQ ID NO: 5892 - RNA, 38 nt, synthetic construct
  source 1..38: mol_type = other RNA
aggtatacatgttcctggtgaaatggcaggacttgtcg

SEQ ID NO: 5893 - RNA, 38 nt, synthetic construct
  source 1..38: mol_type = other RNA
aggtctacatgttcctggtgaaatggcaggacctgtcg

SEQ ID NO: 5894 - RNA, 38 nt, synthetic construct
  source 1..38: mol_type = other RNA
aggtctacatgttcctggtgaaatggcaggatttatcg

SEQ ID NO: 5895 - RNA, 38 nt, synthetic construct
  source 1..38: mol_type = other RNA
aggtatacatgttcctggtgaaatggcaggacctgtcg

SEQ ID NO: 5896 - RNA, 38 nt, synthetic construct
  source 1..38: mol_type = other RNA
aggtatacatgttcctggtgaaatggcaggacttatcg

SEQ ID NO: 5897 - RNA, 38 nt, synthetic construct
  source 1..38: mol_type = other RNA
aggtttacatgttcctggtgaaatggcaggatttgtcg

SEQ ID NO: 5898 - RNA, 38 nt, synthetic construct
  source 1..38: mol_type = other RNA
aggtttacatgttcctggtgaaatggcaggatttatcg

SEQ ID NO: 5899 - RNA, 38 nt, synthetic construct
  source 1..38: mol_type = other RNA
aggtttacatgttcctggtgaaatggcaggatctgtcg

SEQ ID NO: 5900 - RNA, 38 nt, synthetic construct
  source 1..38: mol_type = other RNA
aggtttacatgttcctggtgaaatggcaggacttgtcg

SEQ ID NO: 5901 - RNA, 38 nt, synthetic construct
  source 1..38: mol_type = other RNA
aggtttacatgttcctggtgaaatggcaggacttatcg

SEQ ID NO: 5902 - RNA, 38 nt, synthetic construct
  source 1..38: mol_type = other RNA
aggtttacatgttcctggtgaaatggcaggacctgtcg

SEQ ID NO: 5903 - RNA, 38 nt, synthetic construct
  source 1..38: mol_type = other RNA
aggtgtacatgttcctggtgaaatggcaggatttgtcg

SEQ ID NO: 5904 - RNA, 38 nt, synthetic construct
  source 1..38: mol_type = other RNA
aggtgtacatgttcctggtgaaatggcaggatttatcg

SEQ ID NO: 5905 - RNA, 38 nt, synthetic construct
  source 1..38: mol_type = other RNA
aggtgtacatgttcctggtgaaatggcaggacttgtcg

SEQ ID NO: 5906 - RNA, 38 nt, synthetic construct
  source 1..38: mol_type = other RNA
aggtgtacatgttcctggtgaaatggcaggacttatcg

SEQ ID NO: 5907 - RNA, 38 nt, synthetic construct
  source 1..38: mol_type = other RNA
aggtctacatgttcctggtgaaatggcaggacttgtcg

SEQ ID NO: 5908 - RNA, 38 nt, synthetic construct
  source 1..38: mol_type = other RNA
aggtatacatgttcctggtgaaatggcaggatttgtcg

SEQ ID NO: 5909 - RNA, 38 nt, synthetic construct
  source 1..38: mol_type = other RNA
aggtctacatgttcctggtgaaatggcaggatttgtcg

SEQ ID NO: 5910 - RNA, 38 nt, synthetic construct
  source 1..38: mol_type = other RNA
aggtgtacatgttcctggtgaaatggcaggacctgtcg

SEQ ID NO: 5911 - RNA, 38 nt, synthetic construct
  source 1..38: mol_type = other RNA
aggtgtacatgttcctggtgaaatggcaggatctgtcg

SEQ ID NO: 5912 - RNA, 39 nt, synthetic construct
  source 1..39: mol_type = other RNA
caggtatacatgttcctggtgaaatggcaggacttatcg

SEQ ID NO: 5913 - RNA, 39 nt, synthetic construct
  source 1..39: mol_type = other RNA
caggtgtacatgttcctggtgaaatggcaggatttgtcg

SEQ ID NO: 5914 - RNA, 39 nt, synthetic construct
  source 1..39: mol_type = other RNA
caggtctacatgttcctggtgaaatggcaggatttatcg

SEQ ID NO: 5915 - RNA, 39 nt, synthetic construct
  source 1..39: mol_type = other RNA
caggtatacatgttcctggtgaaatggcaggatttatcg

SEQ ID NO: 5916 - RNA, 39 nt, synthetic construct
  source 1..39: mol_type = other RNA
caggtctacatgttcctggtgaaatggcaggacttgtcg

SEQ ID NO: 5917 - RNA, 39 nt, synthetic construct
  source 1..39: mol_type = other RNA
caggtctacatgttcctggtgaaatggcaggatttgtcg

SEQ ID NO: 5918 - RNA, 39 nt, synthetic construct
  source 1..39: mol_type = other RNA
caggtctacatgttcctggtgaaatggcaggacctgtcg

SEQ ID NO: 5919 - RNA, 39 nt, synthetic construct
  source 1..39: mol_type = other RNA
caggtgtacatgttcctggtgaaatggcaggacttgtcg

SEQ ID NO: 5920 - RNA, 39 nt, synthetic construct
  source 1..39: mol_type = other RNA
caggtatacatgttcctggtgaaatggcaggacctgtcg

SEQ ID NO: 5921 - RNA, 39 nt, synthetic construct
  source 1..39: mol_type = other RNA
caggtatacatgttcctggtgaaatggcaggacttgtcg

SEQ ID NO: 5922 - RNA, 39 nt, synthetic construct
  source 1..39: mol_type = other RNA
caggtatacatgttcctggtgaaatggcaggatctgtcg

SEQ ID NO: 5923 - RNA, 39 nt, synthetic construct
  source 1..39: mol_type = other RNA
caggtctacatgttcctggtgaaatggcaggatctgtcg

SEQ ID NO: 5924 - RNA, 39 nt, synthetic construct
  source 1..39: mol_type = other RNA
caggtctacatgttcctggtgaaatggcaggacttatcg

SEQ ID NO: 5925 - RNA, 39 nt, synthetic construct
  source 1..39: mol_type = other RNA
caggtgtacatgttcctggtgaaatggcaggatctgtcg

SEQ ID NO: 5926 - RNA, 39 nt, synthetic construct
  source 1..39: mol_type = other RNA
caggtttacatgttcctggtgaaatggcaggacttgtcg

SEQ ID NO: 5927 - RNA, 39 nt, synthetic construct
  source 1..39: mol_type = other RNA
caggtgtacatgttcctggtgaaatggcaggatttatcg

SEQ ID NO: 5928 - RNA, 39 nt, synthetic construct
  source 1..39: mol_type = other RNA
caggtttacatgttcctggtgaaatggcaggatttgtcg

SEQ ID NO: 5929 - RNA, 39 nt, synthetic construct
  source 1..39: mol_type = other RNA
caggtttacatgttcctggtgaaatggcaggatttatcg

SEQ ID NO: 5930 - RNA, 39 nt, synthetic construct
  source 1..39: mol_type = other RNA
caggtttacatgttcctggtgaaatggcaggatctgtcg

SEQ ID NO: 5931 - RNA, 39 nt, synthetic construct
  source 1..39: mol_type = other RNA
caggtgtacatgttcctggtgaaatggcaggacctgtcg

SEQ ID NO: 5932 - RNA, 39 nt, synthetic construct
  source 1..39: mol_type = other RNA
caggtgtacatgttcctggtgaaatggcaggacttatcg

SEQ ID NO: 5933 - RNA, 39 nt, synthetic construct
  source 1..39: mol_type = other RNA
caggtttacatgttcctggtgaaatggcaggacttatcg

SEQ ID NO: 5934 - RNA, 39 nt, synthetic construct
  source 1..39: mol_type = other RNA
caggtttacatgttcctggtgaaatggcaggacctgtcg

SEQ ID NO: 5935 - RNA, 39 nt, synthetic construct
  source 1..39: mol_type = other RNA
caggtatacatgttcctggtgaaatggcaggatttgtcg

SEQ ID NO: 5936 - RNA, 40 nt, synthetic construct
  source 1..40: mol_type = other RNA
ccaggtgtacatgttcctggtgaaatggcaggacttgtcg

SEQ ID NO: 5937 - RNA, 40 nt, synthetic construct
  source 1..40: mol_type = other RNA
ccaggtctacatgttcctggtgaaatggcaggatttgtcg

SEQ ID NO: 5938 - RNA, 40 nt, synthetic construct
  source 1..40: mol_type = other RNA
ccaggtgtacatgttcctggtgaaatggcaggacctgtcg

SEQ ID NO: 5939 - RNA, 40 nt, synthetic construct
  source 1..40: mol_type = other RNA
ccaggtttacatgttcctggtgaaatggcaggatctgtcg

SEQ ID NO: 5940 - RNA, 40 nt, synthetic construct
  source 1..40: mol_type = other RNA
ccaggtctacatgttcctggtgaaatggcaggacttgtcg

SEQ ID NO: 5941 - RNA, 40 nt, synthetic construct
  source 1..40: mol_type = other RNA
ccaggtatacatgttcctggtgaaatggcaggacctgtcg

SEQ ID NO: 5942 - RNA, 40 nt, synthetic construct
  source 1..40: mol_type = other RNA
ccaggtatacatgttcctggtgaaatggcaggacttatcg

SEQ ID NO: 5943 - RNA, 40 nt, synthetic construct
  source 1..40: mol_type = other RNA
ccaggtatacatgttcctggtgaaatggcaggacttgtcg

SEQ ID NO: 5944 - RNA, 40 nt, synthetic construct
  source 1..40: mol_type = other RNA
ccaggtatacatgttcctggtgaaatggcaggatctgtcg

SEQ ID NO: 5945 - RNA, 40 nt, synthetic construct
  source 1..40: mol_type = other RNA
ccaggtatacatgttcctggtgaaatggcaggatttatcg

SEQ ID NO: 5946 - RNA, 40 nt, synthetic construct
  source 1..40: mol_type = other RNA
ccaggtatacatgttcctggtgaaatggcaggatttgtcg

SEQ ID NO: 5947 - RNA, 40 nt, synthetic construct
  source 1..40: mol_type = other RNA
ccaggtctacatgttcctggtgaaatggcaggacttatcg

SEQ ID NO: 5948 - RNA, 40 nt, synthetic construct
  source 1..40: mol_type = other RNA
ccaggtttacatgttcctggtgaaatggcaggatttgtcg

SEQ ID NO: 5949 - RNA, 40 nt, synthetic construct
  source 1..40: mol_type = other RNA
ccaggtttacatgttcctggtgaaatggcaggacttgtcg

SEQ ID NO: 5950 - RNA, 40 nt, synthetic construct
  source 1..40: mol_type = other RNA
ccaggtctacatgttcctggtgaaatggcaggacctgtcg

SEQ ID NO: 5951 - RNA, 40 nt, synthetic construct
  source 1..40: mol_type = other RNA
ccaggtgtacatgttcctggtgaaatggcaggatttgtcg

SEQ ID NO: 5952 - RNA, 40 nt, synthetic construct
  source 1..40: mol_type = other RNA
ccaggtctacatgttcctggtgaaatggcaggatctgtcg

SEQ ID NO: 5953 - RNA, 40 nt, synthetic construct
  source 1..40: mol_type = other RNA
ccaggtgtacatgttcctggtgaaatggcaggatctgtcg

SEQ ID NO: 5954 - RNA, 40 nt, synthetic construct
  source 1..40: mol_type = other RNA
ccaggtttacatgttcctggtgaaatggcaggacttatcg

SEQ ID NO: 5955 - RNA, 40 nt, synthetic construct
  source 1..40: mol_type = other RNA
ccaggtttacatgttcctggtgaaatggcaggacctgtcg

SEQ ID NO: 5956 - RNA, 40 nt, synthetic construct
  source 1..40: mol_type = other RNA
ccaggtctacatgttcctggtgaaatggcaggatttatcg

SEQ ID NO: 5957 - RNA, 40 nt, synthetic construct
  source 1..40: mol_type = other RNA
ccaggtgtacatgttcctggtgaaatggcaggatttatcg

SEQ ID NO: 5958 - RNA, 40 nt, synthetic construct
  source 1..40: mol_type = other RNA
ccaggtttacatgttcctggtgaaatggcaggatttatcg

SEQ ID NO: 5959 - RNA, 40 nt, synthetic construct
  source 1..40: mol_type = other RNA
ccaggtgtacatgttcctggtgaaatggcaggacttatcg

SEQ ID NO: 5960 - RNA, 41 nt, synthetic construct
  source 1..41: mol_type = other RNA
cccaggtctacatgttcctggtgaaatggcaggacctgtcg

SEQ ID NO: 5961 - RNA, 41 nt, synthetic construct
  source 1..41: mol_type = other RNA
cccaggtttacatgttcctggtgaaatggcaggatttgtcg

SEQ ID NO: 5962 - RNA, 41 nt, synthetic construct
  source 1..41: mol_type = other RNA
cccaggtttacatgttcctggtgaaatggcaggatctgtcg

SEQ ID NO: 5963 - RNA, 41 nt, synthetic construct
  source 1..41: mol_type = other RNA
cccaggtatacatgttcctggtgaaatggcaggatttgtcg

SEQ ID NO: 5964 - RNA, 41 nt, synthetic construct
  source 1..41: mol_type = other RNA
cccaggtatacatgttcctggtgaaatggcaggatttatcg

SEQ ID NO: 5965 - RNA, 41 nt, synthetic construct
  source 1..41: mol_type = other RNA
cccaggtatacatgttcctggtgaaatggcaggatctgtcg

SEQ ID NO: 5966 - RNA, 41 nt, synthetic construct
  source 1..41: mol_type = other RNA
cccaggtatacatgttcctggtgaaatggcaggacttgtcg

SEQ ID NO: 5967 - RNA, 41 nt, synthetic construct
  source 1..41: mol_type = other RNA
cccaggtatacatgttcctggtgaaatggcaggacttatcg

SEQ ID NO: 5968 - RNA, 41 nt, synthetic construct
  source 1..41: mol_type = other RNA
cccaggtatacatgttcctggtgaaatggcaggacctgtcg

SEQ ID NO: 5969 - RNA, 41 nt, synthetic construct
  source 1..41: mol_type = other RNA
cccaggtctacatgttcctggtgaaatggcaggatttatcg

SEQ ID NO: 5970 - RNA, 41 nt, synthetic construct
  source 1..41: mol_type = other RNA
cccaggtctacatgttcctggtgaaatggcaggatctgtcg

SEQ ID NO: 5971 - RNA, 41 nt, synthetic construct
  source 1..41: mol_type = other RNA
cccaggtttacatgttcctggtgaaatggcaggatttatcg

SEQ ID NO: 5972 - RNA, 41 nt, synthetic construct
  source 1..41: mol_type = other RNA
cccaggtctacatgttcctggtgaaatggcaggacttgtcg

SEQ ID NO: 5973 - RNA, 41 nt, synthetic construct
  source 1..41: mol_type = other RNA
cccaggtgtacatgttcctggtgaaatggcaggacctgtcg

SEQ ID NO: 5974 - RNA, 41 nt, synthetic construct
  source 1..41: mol_type = other RNA
cccaggtctacatgttcctggtgaaatggcaggacttatcg

SEQ ID NO: 5975 - RNA, 41 nt, synthetic construct
  source 1..41: mol_type = other RNA
cccaggtgtacatgttcctggtgaaatggcaggacttatcg

SEQ ID NO: 5976 - RNA, 41 nt, synthetic construct
  source 1..41: mol_type = other RNA
cccaggtgtacatgttcctggtgaaatggcaggacttgtcg

SEQ ID NO: 5977 - RNA, 41 nt, synthetic construct
  source 1..41: mol_type = other RNA
cccaggtgtacatgttcctggtgaaatggcaggatctgtcg

SEQ ID NO: 5978 - RNA, 41 nt, synthetic construct
  source 1..41: mol_type = other RNA
cccaggtgtacatgttcctggtgaaatggcaggatttatcg

SEQ ID NO: 5979 - RNA, 41 nt, synthetic construct
  source 1..41: mol_type = other RNA
cccaggtgtacatgttcctggtgaaatggcaggatttgtcg

SEQ ID NO: 5980 - RNA, 41 nt, synthetic construct
  source 1..41: mol_type = other RNA
cccaggtttacatgttcctggtgaaatggcaggacctgtcg

SEQ ID NO: 5981 - RNA, 41 nt, synthetic construct
  source 1..41: mol_type = other RNA
cccaggtttacatgttcctggtgaaatggcaggacttatcg

SEQ ID NO: 5982 - RNA, 41 nt, synthetic construct
  source 1..41: mol_type = other RNA
cccaggtttacatgttcctggtgaaatggcaggacttgtcg

SEQ ID NO: 5983 - RNA, 41 nt, synthetic construct
  source 1..41: mol_type = other RNA
cccaggtctacatgttcctggtgaaatggcaggatttgtcg

SEQ ID NO: 5984 - RNA, 42 nt, synthetic construct
  source 1..42: mol_type = other RNA
ccccaggtatacatgttcctggtgaaatggcaggacttatcg

SEQ ID NO: 5985 - RNA, 42 nt, synthetic construct
  source 1..42: mol_type = other RNA
ccccaggtgtacatgttcctggtgaaatggcaggacctgtcg

SEQ ID NO: 5986 - RNA, 42 nt, synthetic construct
  source 1..42: mol_type = other RNA
ccccaggtatacatgttcctggtgaaatggcaggatctgtcg

SEQ ID NO: 5987 - RNA, 42 nt, synthetic construct
  source 1..42: mol_type = other RNA
ccccaggtatacatgttcctggtgaaatggcaggatttatcg

SEQ ID NO: 5988 - RNA, 42 nt, synthetic construct
  source 1..42: mol_type = other RNA
ccccaggtatacatgttcctggtgaaatggcaggatttgtcg

SEQ ID NO: 5989 - RNA, 42 nt, synthetic construct
  source 1..42: mol_type = other RNA
ccccaggtctacatgttcctggtgaaatggcaggacctgtcg

SEQ ID NO: 5990 - RNA, 42 nt, synthetic construct
  source 1..42: mol_type = other RNA
ccccaggtctacatgttcctggtgaaatggcaggacttatcg

SEQ ID NO: 5991 - RNA, 42 nt, synthetic construct
  source 1..42: mol_type = other RNA
ccccaggtctacatgttcctggtgaaatggcaggacttgtcg

SEQ ID NO: 5992 - RNA, 42 nt, synthetic construct
  source 1..42: mol_type = other RNA
ccccaggtctacatgttcctggtgaaatggcaggatctgtcg

SEQ ID NO: 5993 - RNA, 42 nt, synthetic construct
  source 1..42: mol_type = other RNA
ccccaggtatacatgttcctggtgaaatggcaggacttgtcg

SEQ ID NO: 5994 - RNA, 42 nt, synthetic construct
  source 1..42: mol_type = other RNA
ccccaggtctacatgttcctggtgaaatggcaggatttgtcg

SEQ ID NO: 5995 - RNA, 42 nt, synthetic construct
  source 1..42: mol_type = other RNA
ccccaggtttacatgttcctggtgaaatggcaggacttgtcg

SEQ ID NO: 5996 - RNA, 42 nt, synthetic construct
  source 1..42: mol_type = other RNA
ccccaggtatacatgttcctggtgaaatggcaggacctgtcg

SEQ ID NO: 5997 - RNA, 42 nt, synthetic construct
  source 1..42: mol_type = other RNA
ccccaggtttacatgttcctggtgaaatggcaggacctgtcg

SEQ ID NO: 5998 - RNA, 42 nt, synthetic construct
  source 1..42: mol_type = other RNA
ccccaggtgtacatgttcctggtgaaatggcaggacttgtcg

SEQ ID NO: 5999 - RNA, 42 nt, synthetic construct
  source 1..42: mol_type = other RNA
ccccaggtttacatgttcctggtgaaatggcaggatttatcg

SEQ ID NO: 6000 - RNA, 42 nt, synthetic construct
  source 1..42: mol_type = other RNA
ccccaggtttacatgttcctggtgaaatggcaggatctgtcg

SEQ ID NO: 6001 - RNA, 42 nt, synthetic construct
  source 1..42: mol_type = other RNA
ccccaggtttacatgttcctggtgaaatggcaggatttgtcg

SEQ ID NO: 6002 - RNA, 42 nt, synthetic construct
  source 1..42: mol_type = other RNA
ccccaggtttacatgttcctggtgaaatggcaggacttatcg

SEQ ID NO: 6003 - RNA, 42 nt, synthetic construct
  source 1..42: mol_type = other RNA
ccccaggtgtacatgttcctggtgaaatggcaggatttgtcg

SEQ ID NO: 6004 - RNA, 42 nt, synthetic construct
  source 1..42: mol_type = other RNA
ccccaggtgtacatgttcctggtgaaatggcaggatttatcg

SEQ ID NO: 6005 - RNA, 42 nt, synthetic construct
  source 1..42: mol_type = other RNA
ccccaggtgtacatgttcctggtgaaatggcaggacttatcg

SEQ ID NO: 6006 - RNA, 42 nt, synthetic construct
  source 1..42: mol_type = other RNA
ccccaggtgtacatgttcctggtgaaatggcaggatctgtcg

SEQ ID NO: 6007 - RNA, 42 nt, synthetic construct
  source 1..42: mol_type = other RNA
ccccaggtctacatgttcctggtgaaatggcaggatttatcg

SEQ ID NO: 6008 - RNA, 43 nt, synthetic construct
  source 1..43: mol_type = other RNA
cccccaggtgtacatgttcctggtgaaatggcaggacttgtcg

SEQ ID NO: 6009 - RNA, 43 nt, synthetic construct
  source 1..43: mol_type = other RNA
cccccaggtttacatgttcctggtgaaatggcaggacttgtcg

SEQ ID NO: 6010 - RNA, 43 nt, synthetic construct
  source 1..43: mol_type = other RNA
cccccaggtttacatgttcctggtgaaatggcaggatttgtcg

SEQ ID NO: 6011 - RNA, 43 nt, synthetic construct
  source 1..43: mol_type = other RNA
cccccaggtttacatgttcctggtgaaatggcaggatttatcg

SEQ ID NO: 6012 - RNA, 43 nt, synthetic construct
  source 1..43: mol_type = other RNA
cccccaggtgtacatgttcctggtgaaatggcaggatctgtcg

SEQ ID NO: 6013 - RNA, 43 nt, synthetic construct
  source 1..43: mol_type = other RNA
cccccaggtgtacatgttcctggtgaaatggcaggacttatcg

SEQ ID NO: 6014 - RNA, 43 nt, synthetic construct
  source 1..43: mol_type = other RNA
cccccaggtatacatgttcctggtgaaatggcaggatttatcg

SEQ ID NO: 6015 - RNA, 43 nt, synthetic construct
  source 1..43: mol_type = other RNA
cccccaggtctacatgttcctggtgaaatggcaggacttgtcg

SEQ ID NO: 6016 - RNA, 43 nt, synthetic construct
  source 1..43: mol_type = other RNA
cccccaggtctacatgttcctggtgaaatggcaggacttatcg

SEQ ID NO: 6017 - RNA, 43 nt, synthetic construct
  source 1..43: mol_type = other RNA
cccccaggtctacatgttcctggtgaaatggcaggacctgtcg

SEQ ID NO: 6018 - RNA, 43 nt, synthetic construct
  source 1..43: mol_type = other RNA
cccccaggtatacatgttcctggtgaaatggcaggacctgtcg

SEQ ID NO: 6019 - RNA, 43 nt, synthetic construct
  source 1..43: mol_type = other RNA
cccccaggtatacatgttcctggtgaaatggcaggatctgtcg

SEQ ID NO: 6020 - RNA, 43 nt, synthetic construct
  source 1..43: mol_type = other RNA
cccccaggtatacatgttcctggtgaaatggcaggacttgtcg

SEQ ID NO: 6021 - RNA, 43 nt, synthetic construct
  source 1..43: mol_type = other RNA
cccccaggtctacatgttcctggtgaaatggcaggatttgtcg

SEQ ID NO: 6022 - RNA, 43 nt, synthetic construct
  source 1..43: mol_type = other RNA
cccccaggtatacatgttcctggtgaaatggcaggatttgtcg

SEQ ID NO: 6023 - RNA, 43 nt, synthetic construct
  source 1..43: mol_type = other RNA
cccccaggtatacatgttcctggtgaaatggcaggacttatcg

SEQ ID NO: 6024 - RNA, 43 nt, synthetic construct
  source 1..43: mol_type = other RNA
cccccaggtctacatgttcctggtgaaatggcaggatctgtcg

SEQ ID NO: 6025 - RNA, 43 nt, synthetic construct
  source 1..43: mol_type = other RNA
cccccaggtgtacatgttcctggtgaaatggcaggacctgtcg

SEQ ID NO: 6026 - RNA, 43 nt, synthetic construct
  source 1..43: mol_type = other RNA
cccccaggtctacatgttcctggtgaaatggcaggatttatcg

SEQ ID NO: 6027 - RNA, 43 nt, synthetic construct
  source 1..43: mol_type = other RNA
cccccaggtttacatgttcctggtgaaatggcaggacctgtcg

SEQ ID NO: 6028 - RNA, 43 nt, synthetic construct
  source 1..43: mol_type = other RNA
cccccaggtgtacatgttcctggtgaaatggcaggatttatcg

SEQ ID NO: 6029 - RNA, 43 nt, synthetic construct
  source 1..43: mol_type = other RNA
cccccaggtgtacatgttcctggtgaaatggcaggatttgtcg

SEQ ID NO: 6030 - RNA, 43 nt, synthetic construct
  source 1..43: mol_type = other RNA
cccccaggtttacatgttcctggtgaaatggcaggacttatcg

SEQ ID NO: 6031 - RNA, 43 nt, synthetic construct
  source 1..43: mol_type = other RNA
cccccaggtttacatgttcctggtgaaatggcaggatctgtcg

SEQ ID NO: 6032 - RNA, 44 nt, synthetic construct
  source 1..44: mol_type = other RNA
tcccccaggtttacatgttcctggtgaaatggcaggacttgtcg

SEQ ID NO: 6033 - RNA, 44 nt, synthetic construct
  source 1..44: mol_type = other RNA
tcccccaggtgtacatgttcctggtgaaatggcaggacctgtcg

SEQ ID NO: 6034 - RNA, 44 nt, synthetic construct
  source 1..44: mol_type = other RNA
tcccccaggtttacatgttcctggtgaaatggcaggatttatcg

SEQ ID NO: 6035 - RNA, 44 nt, synthetic construct
  source 1..44: mol_type = other RNA
tcccccaggtatacatgttcctggtgaaatggcaggacctgtcg

SEQ ID NO: 6036 - RNA, 44 nt, synthetic construct
  source 1..44: mol_type = other RNA
tcccccaggtatacatgttcctggtgaaatggcaggacttatcg

SEQ ID NO: 6037 - RNA, 44 nt, synthetic construct
  source 1..44: mol_type = other RNA
tcccccaggtatacatgttcctggtgaaatggcaggacttgtcg

SEQ ID NO: 6038 - RNA, 44 nt, synthetic construct
  source 1..44: mol_type = other RNA
tcccccaggtatacatgttcctggtgaaatggcaggatctgtcg

SEQ ID NO: 6039 - RNA, 44 nt, synthetic construct
  source 1..44: mol_type = other RNA
tcccccaggtatacatgttcctggtgaaatggcaggatttatcg

SEQ ID NO: 6040 - RNA, 44 nt, synthetic construct
  source 1..44: mol_type = other RNA
tcccccaggtatacatgttcctggtgaaatggcaggatttgtcg

SEQ ID NO: 6041 - RNA, 44 nt, synthetic construct
  source 1..44: mol_type = other RNA
tcccccaggtctacatgttcctggtgaaatggcaggacctgtcg

SEQ ID NO: 6042 - RNA, 44 nt, synthetic construct
  source 1..44: mol_type = other RNA
tcccccaggtctacatgttcctggtgaaatggcaggacttatcg

SEQ ID NO: 6043 - RNA, 44 nt, synthetic construct
  source 1..44: mol_type = other RNA
tcccccaggtctacatgttcctggtgaaatggcaggacttgtcg

SEQ ID NO: 6044 - RNA, 44 nt, synthetic construct
  source 1..44: mol_type = other RNA
tcccccaggtctacatgttcctggtgaaatggcaggatctgtcg

SEQ ID NO: 6045 - RNA, 44 nt, synthetic construct
  source 1..44: mol_type = other RNA
tcccccaggtttacatgttcctggtgaaatggcaggatttgtcg

SEQ ID NO: 6046 - RNA, 44 nt, synthetic construct
  source 1..44: mol_type = other RNA
tcccccaggtctacatgttcctggtgaaatggcaggatttgtcg

SEQ ID NO: 6047 - RNA, 44 nt, synthetic construct
  source 1..44: mol_type = other RNA
tcccccaggtgtacatgttcctggtgaaatggcaggatttgtcg

SEQ ID NO: 6048 - RNA, 44 nt, synthetic construct
  source 1..44: mol_type = other RNA
tcccccaggtctacatgttcctggtgaaatggcaggatttatcg

SEQ ID NO: 6049 - RNA, 44 nt, synthetic construct
  source 1..44: mol_type = other RNA
tcccccaggtttacatgttcctggtgaaatggcaggacctgtcg

SEQ ID NO: 6050 - RNA, 44 nt, synthetic construct
  source 1..44: mol_type = other RNA
tcccccaggtttacatgttcctggtgaaatggcaggatctgtcg

SEQ ID NO: 6051 - RNA, 44 nt, synthetic construct
  source 1..44: mol_type = other RNA
tcccccaggtgtacatgttcctggtgaaatggcaggatttatcg

SEQ ID NO: 6052 - RNA, 44 nt, synthetic construct
  source 1..44: mol_type = other RNA
tcccccaggtgtacatgttcctggtgaaatggcaggatctgtcg

SEQ ID NO: 6053 - RNA, 44 nt, synthetic construct
  source 1..44: mol_type = other RNA
tcccccaggtgtacatgttcctggtgaaatggcaggacttgtcg

SEQ ID NO: 6054 - RNA, 44 nt, synthetic construct
  source 1..44: mol_type = other RNA
tcccccaggtgtacatgttcctggtgaaatggcaggacttatcg

SEQ ID NO: 6055 - RNA, 44 nt, synthetic construct
  source 1..44: mol_type = other RNA
tcccccaggtttacatgttcctggtgaaatggcaggacttatcg

SEQ ID NO: 6056 - RNA, 45 nt, synthetic construct
  source 1..45: mol_type = other RNA
ttcccccaggtatacatgttcctggtgaaatggcaggatttgtcg

SEQ ID NO: 6057 - RNA, 45 nt, synthetic construct
  source 1..45: mol_type = other RNA
ttcccccaggtatacatgttcctggtgaaatggcaggatttatcg

SEQ ID NO: 6058 - RNA, 45 nt, synthetic construct
  source 1..45: mol_type = other RNA
ttcccccaggtctacatgttcctggtgaaatggcaggatttgtcg

SEQ ID NO: 6059 - RNA, 45 nt, synthetic construct
  source 1..45: mol_type = other RNA
ttcccccaggtttacatgttcctggtgaaatggcaggatctgtcg

SEQ ID NO: 6060 - RNA, 45 nt, synthetic construct
  source 1..45: mol_type = other RNA
ttcccccaggtctacatgttcctggtgaaatggcaggacctgtcg

SEQ ID NO: 6061 - RNA, 45 nt, synthetic construct
  source 1..45: mol_type = other RNA
ttcccccaggtctacatgttcctggtgaaatggcaggacttatcg

SEQ ID NO: 6062 - RNA, 45 nt, synthetic construct
  source 1..45: mol_type = other RNA
ttcccccaggtctacatgttcctggtgaaatggcaggatctgtcg

SEQ ID NO: 6063 - RNA, 45 nt, synthetic construct
  source 1..45: mol_type = other RNA
ttcccccaggtatacatgttcctggtgaaatggcaggacttgtcg

SEQ ID NO: 6064 - RNA, 45 nt, synthetic construct
  source 1..45: mol_type = other RNA
ttcccccaggtgtacatgttcctggtgaaatggcaggacttgtcg

SEQ ID NO: 6065 - RNA, 45 nt, synthetic construct
  source 1..45: mol_type = other RNA
ttcccccaggtgtacatgttcctggtgaaatggcaggatttatcg

SEQ ID NO: 6066 - RNA, 45 nt, synthetic construct
  source 1..45: mol_type = other RNA
ttcccccaggtgtacatgttcctggtgaaatggcaggatttgtcg

SEQ ID NO: 6067 - RNA, 45 nt, synthetic construct
  source 1..45: mol_type = other RNA
ttcccccaggtatacatgttcctggtgaaatggcaggacttatcg

SEQ ID NO: 6068 - RNA, 45 nt, synthetic construct
  source 1..45: mol_type = other RNA
ttcccccaggtatacatgttcctggtgaaatggcaggacctgtcg

SEQ ID NO: 6069 - RNA, 45 nt, synthetic construct
  source 1..45: mol_type = other RNA
ttcccccaggtttacatgttcctggtgaaatggcaggatttgtcg

SEQ ID NO: 6070 - RNA, 45 nt, synthetic construct
  source 1..45: mol_type = other RNA
ttcccccaggtttacatgttcctggtgaaatggcaggatttatcg

SEQ ID NO: 6071 - RNA, 45 nt, synthetic construct
  source 1..45: mol_type = other RNA
ttcccccaggtttacatgttcctggtgaaatggcaggacttgtcg

SEQ ID NO: 6072 - RNA, 45 nt, synthetic construct
  source 1..45: mol_type = other RNA
ttcccccaggtttacatgttcctggtgaaatggcaggacttatcg

SEQ ID NO: 6073 - RNA, 45 nt, synthetic construct
  source 1..45: mol_type = other RNA
ttcccccaggtttacatgttcctggtgaaatggcaggacctgtcg

SEQ ID NO: 6074 - RNA, 45 nt, synthetic construct
  source 1..45: mol_type = other RNA
ttcccccaggtgtacatgttcctggtgaaatggcaggacttatcg

SEQ ID NO: 6075 - RNA, 45 nt, synthetic construct
  source 1..45: mol_type = other RNA
ttcccccaggtatacatgttcctggtgaaatggcaggatctgtcg

SEQ ID NO: 6076 - RNA, 45 nt, synthetic construct
  source 1..45: mol_type = other RNA
ttcccccaggtgtacatgttcctggtgaaatggcaggacctgtcg

SEQ ID NO: 6077 - RNA, 45 nt, synthetic construct
  source 1..45: mol_type = other RNA
ttcccccaggtgtacatgttcctggtgaaatggcaggatctgtcg

SEQ ID NO: 6078 - RNA, 45 nt, synthetic construct
  source 1..45: mol_type = other RNA
ttcccccaggtctacatgttcctggtgaaatggcaggatttatcg

SEQ ID NO: 6079 - RNA, 45 nt, synthetic construct
  source 1..45: mol_type = other RNA
ttcccccaggtctacatgttcctggtgaaatggcaggacttgtcg

SEQ ID NO: 6080 - RNA, 46 nt, synthetic construct
  source 1..46: mol_type = other RNA
tttcccccaggtgtacatgttcctggtgaaatggcaggacttgtcg

SEQ ID NO: 6081 - RNA, 46 nt, synthetic construct
  source 1..46: mol_type = other RNA
tttcccccaggtatacatgttcctggtgaaatggcaggatttgtcg

SEQ ID NO: 6082 - RNA, 46 nt, synthetic construct
  source 1..46: mol_type = other RNA
tttcccccaggtgtacatgttcctggtgaaatggcaggacttatcg

SEQ ID NO: 6083 - RNA, 46 nt, synthetic construct
  source 1..46: mol_type = other RNA
tttcccccaggtgtacatgttcctggtgaaatggcaggatttgtcg

SEQ ID NO: 6084 - RNA, 46 nt, synthetic construct
  source 1..46: mol_type = other RNA
tttcccccaggtgtacatgttcctggtgaaatggcaggatctgtcg

SEQ ID NO: 6085 - RNA, 46 nt, synthetic construct
  source 1..46: mol_type = other RNA
tttcccccaggtctacatgttcctggtgaaatggcaggatttgtcg

SEQ ID NO: 6086 - RNA, 46 nt, synthetic construct
  source 1..46: mol_type = other RNA
tttcccccaggtctacatgttcctggtgaaatggcaggatttatcg

SEQ ID NO: 6087 - RNA, 46 nt, synthetic construct
  source 1..46: mol_type = other RNA
tttcccccaggtctacatgttcctggtgaaatggcaggacctgtcg

SEQ ID NO: 6088 - RNA, 46 nt, synthetic construct
  source 1..46: mol_type = other RNA
tttcccccaggtctacatgttcctggtgaaatggcaggacttgtcg

SEQ ID NO: 6089 - RNA, 46 nt, synthetic construct
  source 1..46: mol_type = other RNA
tttcccccaggtctacatgttcctggtgaaatggcaggacttatcg

SEQ ID NO: 6090 - RNA, 46 nt, synthetic construct
  source 1..46: mol_type = other RNA
tttcccccaggtatacatgttcctggtgaaatggcaggatttatcg

SEQ ID NO: 6091 - RNA, 46 nt, synthetic construct
  source 1..46: mol_type = other RNA
tttcccccaggtttacatgttcctggtgaaatggcaggatttgtcg

SEQ ID NO: 6092 - RNA, 46 nt, synthetic construct
  source 1..46: mol_type = other RNA
tttcccccaggtatacatgttcctggtgaaatggcaggatctgtcg

SEQ ID NO: 6093 - RNA, 46 nt, synthetic construct
  source 1..46: mol_type = other RNA
tttcccccaggtatacatgttcctggtgaaatggcaggacttgtcg

SEQ ID NO: 6094 - RNA, 46 nt, synthetic construct
  source 1..46: mol_type = other RNA
tttcccccaggtgtacatgttcctggtgaaatggcaggatttatcg

SEQ ID NO: 6095 - RNA, 46 nt, synthetic construct
  source 1..46: mol_type = other RNA
tttcccccaggtatacatgttcctggtgaaatggcaggacttatcg

SEQ ID NO: 6096 - RNA, 46 nt, synthetic construct
  source 1..46: mol_type = other RNA
tttcccccaggtttacatgttcctggtgaaatggcaggacctgtcg

SEQ ID NO: 6097 - RNA, 46 nt, synthetic construct
  source 1..46: mol_type = other RNA
tttcccccaggtctacatgttcctggtgaaatggcaggatctgtcg

SEQ ID NO: 6098 - RNA, 46 nt, synthetic construct
  source 1..46: mol_type = other RNA
tttcccccaggtatacatgttcctggtgaaatggcaggacctgtcg

SEQ ID NO: 6099 - RNA, 46 nt, synthetic construct
  source 1..46: mol_type = other RNA
tttcccccaggtttacatgttcctggtgaaatggcaggacttatcg

SEQ ID NO: 6100 - RNA, 46 nt, synthetic construct
  source 1..46: mol_type = other RNA
tttcccccaggtttacatgttcctggtgaaatggcaggatctgtcg

SEQ ID NO: 6101 - RNA, 46 nt, synthetic construct
  source 1..46: mol_type = other RNA
tttcccccaggtttacatgttcctggtgaaatggcaggatttatcg

SEQ ID NO: 6102 - RNA, 46 nt, synthetic construct
  source 1..46: mol_type = other RNA
tttcccccaggtgtacatgttcctggtgaaatggcaggacctgtcg

SEQ ID NO: 6103 - RNA, 46 nt, synthetic construct
  source 1..46: mol_type = other RNA
tttcccccaggtttacatgttcctggtgaaatggcaggacttgtcg

SEQ ID NO: 6104 - RNA, 47 nt, synthetic construct
  source 1..47: mol_type = other RNA
ctttcccccaggtatacatgttcctggtgaaatggcaggacttatcg

SEQ ID NO: 6105 - RNA, 47 nt, synthetic construct
  source 1..47: mol_type = other RNA
ctttcccccaggtatacatgttcctggtgaaatggcaggacctgtcg

SEQ ID NO: 6106 - RNA, 47 nt, synthetic construct
  source 1..47: mol_type = other RNA
ctttcccccaggtatacatgttcctggtgaaatggcaggatctgtcg

SEQ ID NO: 6107 - RNA, 47 nt, synthetic construct
  source 1..47: mol_type = other RNA
ctttcccccaggtgtacatgttcctggtgaaatggcaggacctgtcg

SEQ ID NO: 6108 - RNA, 47 nt, synthetic construct
  source 1..47: mol_type = other RNA
ctttcccccaggtatacatgttcctggtgaaatggcaggacttgtcg

SEQ ID NO: 6109 - RNA, 47 nt, synthetic construct
  source 1..47: mol_type = other RNA
ctttcccccaggtatacatgttcctggtgaaatggcaggatttatcg

SEQ ID NO: 6110 - RNA, 47 nt, synthetic construct
  source 1..47: mol_type = other RNA
ctttcccccaggtatacatgttcctggtgaaatggcaggatttgtcg

SEQ ID NO: 6111 - RNA, 47 nt, synthetic construct
  source 1..47: mol_type = other RNA
ctttcccccaggtctacatgttcctggtgaaatggcaggacctgtcg

SEQ ID NO: 6112 - RNA, 47 nt, synthetic construct
  source 1..47: mol_type = other RNA
ctttcccccaggtctacatgttcctggtgaaatggcaggacttgtcg

SEQ ID NO: 6113 - RNA, 47 nt, synthetic construct
  source 1..47: mol_type = other RNA
ctttcccccaggtttacatgttcctggtgaaatggcaggatttgtcg

SEQ ID NO: 6114 - RNA, 47 nt, synthetic construct
  source 1..47: mol_type = other RNA
ctttcccccaggtgtacatgttcctggtgaaatggcaggacttatcg

SEQ ID NO: 6115 - RNA, 47 nt, synthetic construct
  source 1..47: mol_type = other RNA
ctttcccccaggtttacatgttcctggtgaaatggcaggatttatcg

SEQ ID NO: 6116 - RNA, 47 nt, synthetic construct
  source 1..47: mol_type = other RNA
ctttcccccaggtttacatgttcctggtgaaatggcaggatctgtcg

SEQ ID NO: 6117 - RNA, 47 nt, synthetic construct
  source 1..47: mol_type = other RNA
ctttcccccaggtttacatgttcctggtgaaatggcaggacttgtcg

SEQ ID NO: 6118 - RNA, 47 nt, synthetic construct
  source 1..47: mol_type = other RNA
ctttcccccaggtttacatgttcctggtgaaatggcaggacttatcg

SEQ ID NO: 6119 - RNA, 47 nt, synthetic construct
  source 1..47: mol_type = other RNA
ctttcccccaggtttacatgttcctggtgaaatggcaggacctgtcg

SEQ ID NO: 6120 - RNA, 47 nt, synthetic construct
  source 1..47: mol_type = other RNA
ctttcccccaggtgtacatgttcctggtgaaatggcaggatttgtcg

SEQ ID NO: 6121 - RNA, 47 nt, synthetic construct
  source 1..47: mol_type = other RNA
ctttcccccaggtgtacatgttcctggtgaaatggcaggatttatcg

SEQ ID NO: 6122 - RNA, 47 nt, synthetic construct
  source 1..47: mol_type = other RNA
ctttcccccaggtgtacatgttcctggtgaaatggcaggatctgtcg

SEQ ID NO: 6123 - RNA, 47 nt, synthetic construct
  source 1..47: mol_type = other RNA
ctttcccccaggtgtacatgttcctggtgaaatggcaggacttgtcg

SEQ ID NO: 6124 - RNA, 47 nt, synthetic construct
  source 1..47: mol_type = other RNA
ctttcccccaggtctacatgttcctggtgaaatggcaggacttatcg

SEQ ID NO: 6125 - RNA, 47 nt, synthetic construct
  source 1..47: mol_type = other RNA
ctttcccccaggtctacatgttcctggtgaaatggcaggatttgtcg

SEQ ID NO: 6126 - RNA, 47 nt, synthetic construct
  source 1..47: mol_type = other RNA
ctttcccccaggtctacatgttcctggtgaaatggcaggatttatcg

SEQ ID NO: 6127 - RNA, 47 nt, synthetic construct
  source 1..47: mol_type = other RNA
ctttcccccaggtctacatgttcctggtgaaatggcaggatctgtcg

SEQ ID NO: 6128 - RNA, 48 nt, synthetic construct
  source 1..48: mol_type = other RNA
gctttcccccaggtctacatgttcctggtgaaatggcaggacctgtcg

SEQ ID NO: 6129 - RNA, 48 nt, synthetic construct
  source 1..48: mol_type = other RNA
gctttcccccaggtatacatgttcctggtgaaatggcaggatctgtcg

SEQ ID NO: 6130 - RNA, 48 nt, synthetic construct
  source 1..48: mol_type = other RNA
gctttcccccaggtctacatgttcctggtgaaatggcaggacttgtcg

SEQ ID NO: 6131 - RNA, 48 nt, synthetic construct
  source 1..48: mol_type = other RNA
gctttcccccaggtctacatgttcctggtgaaatggcaggatctgtcg

SEQ ID NO: 6132 - RNA, 48 nt, synthetic construct
  source 1..48: mol_type = other RNA
gctttcccccaggtctacatgttcctggtgaaatggcaggatttatcg

SEQ ID NO: 6133 - RNA, 48 nt, synthetic construct
  source 1..48: mol_type = other RNA
gctttcccccaggtgtacatgttcctggtgaaatggcaggacttatcg

SEQ ID NO: 6134 - RNA, 48 nt, synthetic construct
  source 1..48: mol_type = other RNA
gctttcccccaggtatacatgttcctggtgaaatggcaggatttatcg

SEQ ID NO: 6135 - RNA, 48 nt, synthetic construct
  source 1..48: mol_type = other RNA
gctttcccccaggtgtacatgttcctggtgaaatggcaggacctgtcg

SEQ ID NO: 6136 - RNA, 48 nt, synthetic construct
  source 1..48: mol_type = other RNA
gctttcccccaggtgtacatgttcctggtgaaatggcaggacttgtcg

SEQ ID NO: 6137 - RNA, 48 nt, synthetic construct
  source 1..48: mol_type = other RNA
gctttcccccaggtatacatgttcctggtgaaatggcaggatttgtcg

SEQ ID NO: 6138 - RNA, 48 nt, synthetic construct
  source 1..48: mol_type = other RNA
gctttcccccaggtatacatgttcctggtgaaatggcaggacttatcg

SEQ ID NO: 6139 - RNA, 48 nt, synthetic construct
  source 1..48: mol_type = other RNA
gctttcccccaggtgtacatgttcctggtgaaatggcaggatctgtcg

SEQ ID NO: 6140 - RNA, 48 nt, synthetic construct
  source 1..48: mol_type = other RNA
gctttcccccaggtatacatgttcctggtgaaatggcaggacttgtcg

SEQ ID NO: 6141 - RNA, 48 nt, synthetic construct
  source 1..48: mol_type = other RNA
gctttcccccaggtatacatgttcctggtgaaatggcaggacctgtcg

SEQ ID NO: 6142 - RNA, 48 nt, synthetic construct
  source 1..48: mol_type = other RNA
gctttcccccaggtgtacatgttcctggtgaaatggcaggatttgtcg

SEQ ID NO: 6143 - RNA, 48 nt, synthetic construct
  source 1..48: mol_type = other RNA
gctttcccccaggtttacatgttcctggtgaaatggcaggatttgtcg

SEQ ID NO: 6144 - RNA, 48 nt, synthetic construct
  source 1..48: mol_type = other RNA
gctttcccccaggtttacatgttcctggtgaaatggcaggatttatcg

SEQ ID NO: 6145 - RNA, 48 nt, synthetic construct
  source 1..48: mol_type = other RNA
gctttcccccaggtttacatgttcctggtgaaatggcaggatctgtcg

SEQ ID NO: 6146 - RNA, 48 nt, synthetic construct
  source 1..48: mol_type = other RNA
gctttcccccaggtttacatgttcctggtgaaatggcaggacttgtcg

SEQ ID NO: 6147 - RNA, 48 nt, synthetic construct
  source 1..48: mol_type = other RNA
gctttcccccaggtttacatgttcctggtgaaatggcaggacttatcg

SEQ ID NO: 6148 - RNA, 48 nt, synthetic construct
  source 1..48: mol_type = other RNA
gctttcccccaggtttacatgttcctggtgaaatggcaggacctgtcg

SEQ ID NO: 6149 - RNA, 48 nt, synthetic construct
  source 1..48: mol_type = other RNA
gctttcccccaggtgtacatgttcctggtgaaatggcaggatttatcg

SEQ ID NO: 6150 - RNA, 48 nt, synthetic construct
  source 1..48: mol_type = other RNA
gctttcccccaggtctacatgttcctggtgaaatggcaggatttgtcg

SEQ ID NO: 6151 - RNA, 48 nt, synthetic construct
  source 1..48: mol_type = other RNA
gctttcccccaggtctacatgttcctggtgaaatggcaggacttatcg

SEQ ID NO: 6152 - RNA, 49 nt, synthetic construct
  source 1..49: mol_type = other RNA
ggctttcccccaggtgtacatgttcctggtgaaatggcaggatctgtcg

SEQ ID NO: 6153 - RNA, 49 nt, synthetic construct
  source 1..49: mol_type = other RNA
ggctttcccccaggtgtacatgttcctggtgaaatggcaggacttgtcg

SEQ ID NO: 6154 - RNA, 49 nt, synthetic construct
  source 1..49: mol_type = other RNA
ggctttcccccaggtgtacatgttcctggtgaaatggcaggatttgtcg

SEQ ID NO: 6155 - RNA, 49 nt, synthetic construct
  source 1..49: mol_type = other RNA
ggctttcccccaggtatacatgttcctggtgaaatggcaggatttgtcg

SEQ ID NO: 6156 - RNA, 49 nt, synthetic construct
  source 1..49: mol_type = other RNA
ggctttcccccaggtatacatgttcctggtgaaatggcaggatttatcg

SEQ ID NO: 6157 - RNA, 49 nt, synthetic construct
  source 1..49: mol_type = other RNA
ggctttcccccaggtatacatgttcctggtgaaatggcaggatctgtcg

SEQ ID NO: 6158 - RNA, 49 nt, synthetic construct
  source 1..49: mol_type = other RNA
ggctttcccccaggtgtacatgttcctggtgaaatggcaggacttatcg

SEQ ID NO: 6159 - RNA, 49 nt, synthetic construct
  source 1..49: mol_type = other RNA
ggctttcccccaggtgtacatgttcctggtgaaatggcaggatttatcg

SEQ ID NO: 6160 - RNA, 49 nt, synthetic construct
  source 1..49: mol_type = other RNA
ggctttcccccaggtttacatgttcctggtgaaatggcaggacctgtcg

SEQ ID NO: 6161 - RNA, 49 nt, synthetic construct
  source 1..49: mol_type = other RNA
ggctttcccccaggtttacatgttcctggtgaaatggcaggacttatcg

SEQ ID NO: 6162 - RNA, 49 nt, synthetic construct
  source 1..49: mol_type = other RNA
ggctttcccccaggtctacatgttcctggtgaaatggcaggatttgtcg

SEQ ID NO: 6163 - RNA, 49 nt, synthetic construct
  source 1..49: mol_type = other RNA
ggctttcccccaggtctacatgttcctggtgaaatggcaggacttgtcg

SEQ ID NO: 6164 - RNA, 49 nt, synthetic construct
  source 1..49: mol_type = other RNA
ggctttcccccaggtatacatgttcctggtgaaatggcaggacttatcg

SEQ ID NO: 6165 - RNA, 49 nt, synthetic construct
  source 1..49: mol_type = other RNA
ggctttcccccaggtctacatgttcctggtgaaatggcaggatctgtcg

SEQ ID NO: 6166 - RNA, 49 nt, synthetic construct
  source 1..49: mol_type = other RNA
ggctttcccccaggtttacatgttcctggtgaaatggcaggatctgtcg

SEQ ID NO: 6167 - RNA, 49 nt, synthetic construct
  source 1..49: mol_type = other RNA
ggctttcccccaggtatacatgttcctggtgaaatggcaggacctgtcg

SEQ ID NO: 6168 - RNA, 49 nt, synthetic construct
  source 1..49: mol_type = other RNA
ggctttcccccaggtctacatgttcctggtgaaatggcaggatttatcg

SEQ ID NO: 6169 - RNA, 49 nt, synthetic construct
  source 1..49: mol_type = other RNA
ggctttcccccaggtgtacatgttcctggtgaaatggcaggacctgtcg

SEQ ID NO: 6170 - RNA, 49 nt, synthetic construct
  source 1..49: mol_type = other RNA
ggctttcccccaggtttacatgttcctggtgaaatggcaggacttgtcg

SEQ ID NO: 6171 - RNA, 49 nt, synthetic construct
  source 1..49: mol_type = other RNA
ggctttcccccaggtctacatgttcctggtgaaatggcaggacttatcg

SEQ ID NO: 6172 - RNA, 49 nt, synthetic construct
  source 1..49: mol_type = other RNA
ggctttcccccaggtctacatgttcctggtgaaatggcaggacctgtcg

SEQ ID NO: 6173 - RNA, 49 nt, synthetic construct
  source 1..49: mol_type = other RNA
ggctttcccccaggtttacatgttcctggtgaaatggcaggatttgtcg

SEQ ID NO: 6174 - RNA, 49 nt, synthetic construct
  source 1..49: mol_type = other RNA
ggctttcccccaggtttacatgttcctggtgaaatggcaggatttatcg

SEQ ID NO: 6175 - RNA, 49 nt, synthetic construct
  source 1..49: mol_type = other RNA
ggctttcccccaggtatacatgttcctggtgaaatggcaggacttgtcg

SEQ ID NO: 6176 - RNA, 50 nt, synthetic construct
  source 1..50: mol_type = other RNA
tggctttcccccaggtatacatgttcctggtgaaatggcaggacttatcg

SEQ ID NO: 6177 - RNA, 50 nt, synthetic construct
  source 1..50: mol_type = other RNA
tggctttcccccaggtatacatgttcctggtgaaatggcaggacctgtcg

SEQ ID NO: 6178 - RNA, 50 nt, synthetic construct
  source 1..50: mol_type = other RNA
tggctttcccccaggtatacatgttcctggtgaaatggcaggacttgtcg

SEQ ID NO: 6179 - RNA, 50 nt, synthetic construct
  source 1..50: mol_type = other RNA
tggctttcccccaggtttacatgttcctggtgaaatggcaggatttatcg

SEQ ID NO: 6180 - RNA, 50 nt, synthetic construct
  source 1..50: mol_type = other RNA
tggctttcccccaggtgtacatgttcctggtgaaatggcaggatttgtcg

SEQ ID NO: 6181 - RNA, 50 nt, synthetic construct
  source 1..50: mol_type = other RNA
tggctttcccccaggtgtacatgttcctggtgaaatggcaggacctgtcg

SEQ ID NO: 6182 - RNA, 50 nt, synthetic construct
  source 1..50: mol_type = other RNA
tggctttcccccaggtgtacatgttcctggtgaaatggcaggacttgtcg

SEQ ID NO: 6183 - RNA, 50 nt, synthetic construct
  source 1..50: mol_type = other RNA
tggctttcccccaggtgtacatgttcctggtgaaatggcaggatctgtcg

SEQ ID NO: 6184 - RNA, 50 nt, synthetic construct
  source 1..50: mol_type = other RNA
tggctttcccccaggtgtacatgttcctggtgaaatggcaggatttatcg

SEQ ID NO: 6185 - RNA, 50 nt, synthetic construct
  source 1..50: mol_type = other RNA
tggctttcccccaggtttacatgttcctggtgaaatggcaggatctgtcg

SEQ ID NO: 6186 - RNA, 50 nt, synthetic construct
  source 1..50: mol_type = other RNA
tggctttcccccaggtttacatgttcctggtgaaatggcaggacctgtcg

SEQ ID NO: 6187 - RNA, 50 nt, synthetic construct
  source 1..50: mol_type = other RNA
tggctttcccccaggtttacatgttcctggtgaaatggcaggatttgtcg

SEQ ID NO: 6188 - RNA, 50 nt, synthetic construct
  source 1..50: mol_type = other RNA
tggctttcccccaggtttacatgttcctggtgaaatggcaggacttatcg

SEQ ID NO: 6189 - RNA, 50 nt, synthetic construct
  source 1..50: mol_type = other RNA
tggctttcccccaggtttacatgttcctggtgaaatggcaggacttgtcg

SEQ ID NO: 6190 - RNA, 50 nt, synthetic construct
  source 1..50: mol_type = other RNA
tggctttcccccaggtctacatgttcctggtgaaatggcaggatttatcg

SEQ ID NO: 6191 - RNA, 50 nt, synthetic construct
  source 1..50: mol_type = other RNA
tggctttcccccaggtgtacatgttcctggtgaaatggcaggacttatcg

SEQ ID NO: 6192 - RNA, 50 nt, synthetic construct
  source 1..50: mol_type = other RNA
tggctttcccccaggtctacatgttcctggtgaaatggcaggatttgtcg

SEQ ID NO: 6193 - RNA, 50 nt, synthetic construct
  source 1..50: mol_type = other RNA
tggctttcccccaggtatacatgttcctggtgaaatggcaggatttgtcg

SEQ ID NO: 6194 - RNA, 50 nt, synthetic construct
  source 1..50: mol_type = other RNA
tggctttcccccaggtctacatgttcctggtgaaatggcaggatctgtcg

SEQ ID NO: 6195 - RNA, 50 nt, synthetic construct
  source 1..50: mol_type = other RNA
tggctttcccccaggtctacatgttcctggtgaaatggcaggacttgtcg

SEQ ID NO: 6196 - RNA, 50 nt, synthetic construct
  source 1..50: mol_type = other RNA
tggctttcccccaggtctacatgttcctggtgaaatggcaggacttatcg

SEQ ID NO: 6197 - RNA, 50 nt, synthetic construct
  source 1..50: mol_type = other RNA
tggctttcccccaggtctacatgttcctggtgaaatggcaggacctgtcg

SEQ ID NO: 6198 - RNA, 50 nt, synthetic construct
  source 1..50: mol_type = other RNA
tggctttcccccaggtatacatgttcctggtgaaatggcaggatttatcg

SEQ ID NO: 6199 - RNA, 50 nt, synthetic construct
  source 1..50: mol_type = other RNA
tggctttcccccaggtatacatgttcctggtgaaatggcaggatctgtcg

SEQ ID NO: 6200 - RNA, 51 nt, synthetic construct
  source 1..51: mol_type = other RNA
ctggctttcccccaggtttacatgttcctggtgaaatggcaggacttgtcg

SEQ ID NO: 6201 - RNA, 51 nt, synthetic construct
  source 1..51: mol_type = other RNA
ctggctttcccccaggtttacatgttcctggtgaaatggcaggacttatcg

SEQ ID NO: 6202 - RNA, 51 nt, synthetic construct
  source 1..51: mol_type = other RNA
ctggctttcccccaggtttacatgttcctggtgaaatggcaggacctgtcg

SEQ ID NO: 6203 - RNA, 51 nt, synthetic construct
  source 1..51: mol_type = other RNA
ctggctttcccccaggtgtacatgttcctggtgaaatggcaggatttgtcg

SEQ ID NO: 6204 - RNA, 51 nt, synthetic construct
  source 1..51: mol_type = other RNA
ctggctttcccccaggtgtacatgttcctggtgaaatggcaggatttatcg

SEQ ID NO: 6205 - RNA, 51 nt, synthetic construct
  source 1..51: mol_type = other RNA
ctggctttcccccaggtgtacatgttcctggtgaaatggcaggacttgtcg

SEQ ID NO: 6206 - RNA, 51 nt, synthetic construct
  source 1..51: mol_type = other RNA
ctggctttcccccaggtatacatgttcctggtgaaatggcaggatttgtcg

SEQ ID NO: 6207 - RNA, 51 nt, synthetic construct
  source 1..51: mol_type = other RNA
ctggctttcccccaggtatacatgttcctggtgaaatggcaggatctgtcg

SEQ ID NO: 6208 - RNA, 51 nt, synthetic construct
  source 1..51: mol_type = other RNA
ctggctttcccccaggtttacatgttcctggtgaaatggcaggatctgtcg

SEQ ID NO: 6209 - RNA, 51 nt, synthetic construct
  source 1..51: mol_type = other RNA
ctggctttcccccaggtttacatgttcctggtgaaatggcaggatttatcg

SEQ ID NO: 6210 - RNA, 51 nt, synthetic construct
  source 1..51: mol_type = other RNA
ctggctttcccccaggtttacatgttcctggtgaaatggcaggatttgtcg

SEQ ID NO: 6211 - RNA, 51 nt, synthetic construct
  source 1..51: mol_type = other RNA
ctggctttcccccaggtgtacatgttcctggtgaaatggcaggacctgtcg

SEQ ID NO: 6212 - RNA, 51 nt, synthetic construct
  source 1..51: mol_type = other RNA
ctggctttcccccaggtatacatgttcctggtgaaatggcaggacttgtcg

SEQ ID NO: 6213 - RNA, 51 nt, synthetic construct
  source 1..51: mol_type = other RNA
ctggctttcccccaggtatacatgttcctggtgaaatggcaggatttatcg

SEQ ID NO: 6214 - RNA, 51 nt, synthetic construct
  source 1..51: mol_type = other RNA
ctggctttcccccaggtctacatgttcctggtgaaatggcaggatttgtcg

SEQ ID NO: 6215 - RNA, 51 nt, synthetic construct
  source 1..51: mol_type = other RNA
ctggctttcccccaggtctacatgttcctggtgaaatggcaggacctgtcg

SEQ ID NO: 6216 - RNA, 51 nt, synthetic construct
  source 1..51: mol_type = other RNA
ctggctttcccccaggtctacatgttcctggtgaaatggcaggacttatcg

SEQ ID NO: 6217 - RNA, 51 nt, synthetic construct
  source 1..51: mol_type = other RNA
ctggctttcccccaggtctacatgttcctggtgaaatggcaggacttgtcg

SEQ ID NO: 6218 - RNA, 51 nt, synthetic construct
  source 1..51: mol_type = other RNA
ctggctttcccccaggtctacatgttcctggtgaaatggcaggatctgtcg

SEQ ID NO: 6219 - RNA, 51 nt, synthetic construct
  source 1..51: mol_type = other RNA
ctggctttcccccaggtctacatgttcctggtgaaatggcaggatttatcg

SEQ ID NO: 6220 - RNA, 51 nt, synthetic construct
  source 1..51: mol_type = other RNA
ctggctttcccccaggtgtacatgttcctggtgaaatggcaggatctgtcg

SEQ ID NO: 6221 - RNA, 51 nt, synthetic construct
  source 1..51: mol_type = other RNA
ctggctttcccccaggtatacatgttcctggtgaaatggcaggacttatcg

SEQ ID NO: 6222 - RNA, 51 nt, synthetic construct
  source 1..51: mol_type = other RNA
ctggctttcccccaggtgtacatgttcctggtgaaatggcaggacttatcg

SEQ ID NO: 6223 - RNA, 51 nt, synthetic construct
  source 1..51: mol_type = other RNA
ctggctttcccccaggtatacatgttcctggtgaaatggcaggacctgtcg

SEQ ID NO: 6224 - RNA, 52 nt, synthetic construct
  source 1..52: mol_type = other RNA
tctggctttcccccaggtatacatgttcctggtgaaatggcaggacttgtcg

SEQ ID NO: 6225 - RNA, 52 nt, synthetic construct
  source 1..52: mol_type = other RNA
tctggctttcccccaggtatacatgttcctggtgaaatggcaggacttatcg

SEQ ID NO: 6226 - RNA, 52 nt, synthetic construct
  source 1..52: mol_type = other RNA
tctggctttcccccaggtatacatgttcctggtgaaatggcaggacctgtcg

SEQ ID NO: 6227 - RNA, 52 nt, synthetic construct
  source 1..52: mol_type = other RNA
tctggctttcccccaggtctacatgttcctggtgaaatggcaggatctgtcg

SEQ ID NO: 6228 - RNA, 52 nt, synthetic construct
  source 1..52: mol_type = other RNA
tctggctttcccccaggtatacatgttcctggtgaaatggcaggatttgtcg

SEQ ID NO: 6229 - RNA, 52 nt, synthetic construct
  source 1..52: mol_type = other RNA
tctggctttcccccaggtttacatgttcctggtgaaatggcaggacttatcg

SEQ ID NO: 6230 - RNA, 52 nt, synthetic construct
  source 1..52: mol_type = other RNA
tctggctttcccccaggtttacatgttcctggtgaaatggcaggatctgtcg

SEQ ID NO: 6231 - RNA, 52 nt, synthetic construct
  source 1..52: mol_type = other RNA
tctggctttcccccaggtttacatgttcctggtgaaatggcaggatttgtcg

SEQ ID NO: 6232 - RNA, 52 nt, synthetic construct
  source 1..52: mol_type = other RNA
tctggctttcccccaggtctacatgttcctggtgaaatggcaggacctgtcg

SEQ ID NO: 6233 - RNA, 52 nt, synthetic construct
  source 1..52: mol_type = other RNA
tctggctttcccccaggtatacatgttcctggtgaaatggcaggatctgtcg

SEQ ID NO: 6234 - RNA, 52 nt, synthetic construct
  source 1..52: mol_type = other RNA
tctggctttcccccaggtatacatgttcctggtgaaatggcaggatttatcg

SEQ ID NO: 6235 - RNA, 52 nt, synthetic construct
  source 1..52: mol_type = other RNA
tctggctttcccccaggtttacatgttcctggtgaaatggcaggacctgtcg

SEQ ID NO: 6236 - RNA, 52 nt, synthetic construct
  source 1..52: mol_type = other RNA
tctggctttcccccaggtttacatgttcctggtgaaatggcaggatttatcg

SEQ ID NO: 6237 - RNA, 52 nt, synthetic construct
  source 1..52: mol_type = other RNA
tctggctttcccccaggtttacatgttcctggtgaaatggcaggacttgtcg

SEQ ID NO: 6238 - RNA, 52 nt, synthetic construct
  source 1..52: mol_type = other RNA
tctggctttcccccaggtctacatgttcctggtgaaatggcaggacttatcg

SEQ ID NO: 6239 - RNA, 52 nt, synthetic construct
  source 1..52: mol_type = other RNA
tctggctttcccccaggtgtacatgttcctggtgaaatggcaggatttgtcg

SEQ ID NO: 6240 - RNA, 52 nt, synthetic construct
  source 1..52: mol_type = other RNA
tctggctttcccccaggtgtacatgttcctggtgaaatggcaggatttatcg

SEQ ID NO: 6241 - RNA, 52 nt, synthetic construct
  source 1..52: mol_type = other RNA
tctggctttcccccaggtgtacatgttcctggtgaaatggcaggatctgtcg

SEQ ID NO: 6242 - RNA, 52 nt, synthetic construct
  source 1..52: mol_type = other RNA
tctggctttcccccaggtgtacatgttcctggtgaaatggcaggacttgtcg

SEQ ID NO: 6243 - RNA, 52 nt, synthetic construct
  source 1..52: mol_type = other RNA
tctggctttcccccaggtgtacatgttcctggtgaaatggcaggacttatcg

SEQ ID NO: 6244 - RNA, 52 nt, synthetic construct
  source 1..52: mol_type = other RNA
tctggctttcccccaggtgtacatgttcctggtgaaatggcaggacctgtcg

SEQ ID NO: 6245 - RNA, 52 nt, synthetic construct
  source 1..52: mol_type = other RNA
tctggctttcccccaggtctacatgttcctggtgaaatggcaggatttgtcg

SEQ ID NO: 6246 - RNA, 52 nt, synthetic construct
  source 1..52: mol_type = other RNA
tctggctttcccccaggtctacatgttcctggtgaaatggcaggatttatcg

SEQ ID NO: 6247 - RNA, 52 nt, synthetic construct
  source 1..52: mol_type = other RNA
tctggctttcccccaggtctacatgttcctggtgaaatggcaggacttgtcg

SEQ ID NO: 6248 - RNA, 53 nt, synthetic construct
  source 1..53: mol_type = other RNA
ctctggctttcccccaggtctacatgttcctggtgaaatggcaggacttgtcg

SEQ ID NO: 6249 - RNA, 53 nt, synthetic construct
  source 1..53: mol_type = other RNA
ctctggctttcccccaggtctacatgttcctggtgaaatggcaggacttatcg

SEQ ID NO: 6250 - RNA, 53 nt, synthetic construct
  source 1..53: mol_type = other RNA
ctctggctttcccccaggtctacatgttcctggtgaaatggcaggacctgtcg

SEQ ID NO: 6251 - RNA, 53 nt, synthetic construct
  source 1..53: mol_type = other RNA
ctctggctttcccccaggtatacatgttcctggtgaaatggcaggatttgtcg

SEQ ID NO: 6252 - RNA, 53 nt, synthetic construct
  source 1..53: mol_type = other RNA
ctctggctttcccccaggtatacatgttcctggtgaaatggcaggatttatcg

SEQ ID NO: 6253 - RNA, 53 nt, synthetic construct
  source 1..53: mol_type = other RNA
ctctggctttcccccaggtatacatgttcctggtgaaatggcaggatctgtcg

SEQ ID NO: 6254 - RNA, 53 nt, synthetic construct
  source 1..53: mol_type = other RNA
ctctggctttcccccaggtatacatgttcctggtgaaatggcaggacttatcg

SEQ ID NO: 6255 - RNA, 53 nt, synthetic construct
  source 1..53: mol_type = other RNA
ctctggctttcccccaggtatacatgttcctggtgaaatggcaggacctgtcg

SEQ ID NO: 6256 - RNA, 53 nt, synthetic construct
  source 1..53: mol_type = other RNA
ctctggctttcccccaggtttacatgttcctggtgaaatggcaggatttgtcg

SEQ ID NO: 6257 - RNA, 53 nt, synthetic construct
  source 1..53: mol_type = other RNA
ctctggctttcccccaggtatacatgttcctggtgaaatggcaggacttgtcg

SEQ ID NO: 6258 - RNA, 53 nt, synthetic construct
  source 1..53: mol_type = other RNA
ctctggctttcccccaggtctacatgttcctggtgaaatggcaggatctgtcg

SEQ ID NO: 6259 - RNA, 53 nt, synthetic construct
  source 1..53: mol_type = other RNA
ctctggctttcccccaggtgtacatgttcctggtgaaatggcaggacctgtcg

SEQ ID NO: 6260 - RNA, 53 nt, synthetic construct
  source 1..53: mol_type = other RNA
ctctggctttcccccaggtgtacatgttcctggtgaaatggcaggacttatcg

SEQ ID NO: 6261 - RNA, 53 nt, synthetic construct
  source 1..53: mol_type = other RNA
ctctggctttcccccaggtgtacatgttcctggtgaaatggcaggacttgtcg

SEQ ID NO: 6262 - RNA, 53 nt, synthetic construct
  source 1..53: mol_type = other RNA
ctctggctttcccccaggtctacatgttcctggtgaaatggcaggatttgtcg

SEQ ID NO: 6263 - RNA, 53 nt, synthetic construct
  source 1..53: mol_type = other RNA
ctctggctttcccccaggtttacatgttcctggtgaaatggcaggatttatcg

SEQ ID NO: 6264 - RNA, 53 nt, synthetic construct
  source 1..53: mol_type = other RNA
ctctggctttcccccaggtttacatgttcctggtgaaatggcaggatctgtcg

SEQ ID NO: 6265 - RNA, 53 nt, synthetic construct
  source 1..53: mol_type = other RNA
ctctggctttcccccaggtttacatgttcctggtgaaatggcaggacttgtcg

SEQ ID NO: 6266 - RNA, 53 nt, synthetic construct
  source 1..53: mol_type = other RNA
ctctggctttcccccaggtttacatgttcctggtgaaatggcaggacttatcg

SEQ ID NO: 6267 - RNA, 53 nt, synthetic construct
  source 1..53: mol_type = other RNA
ctctggctttcccccaggtttacatgttcctggtgaaatggcaggacctgtcg

SEQ ID NO: 6268 - RNA, 53 nt, synthetic construct
  source 1..53: mol_type = other RNA
ctctggctttcccccaggtgtacatgttcctggtgaaatggcaggatttgtcg

SEQ ID NO: 6269 - RNA, 53 nt, synthetic construct
  source 1..53: mol_type = other RNA
ctctggctttcccccaggtgtacatgttcctggtgaaatggcaggatttatcg

SEQ ID NO: 6270 - RNA, 53 nt, synthetic construct
  source 1..53: mol_type = other RNA
ctctggctttcccccaggtgtacatgttcctggtgaaatggcaggatctgtcg

SEQ ID NO: 6271 - RNA, 53 nt, synthetic construct
  source 1..53: mol_type = other RNA
ctctggctttcccccaggtctacatgttcctggtgaaatggcaggatttatcg

SEQ ID NO: 6272 - RNA, 54 nt, synthetic construct
  source 1..54: mol_type = other RNA
actctggctttcccccaggtttacatgttcctggtgaaatggcaggatttatcg

SEQ ID NO: 6273 - RNA, 54 nt, synthetic construct
  source 1..54: mol_type = other RNA
actctggctttcccccaggtgtacatgttcctggtgaaatggcaggacttatcg

SEQ ID NO: 6274 - RNA, 54 nt, synthetic construct
  source 1..54: mol_type = other RNA
actctggctttcccccaggtgtacatgttcctggtgaaatggcaggatttatcg

SEQ ID NO: 6275 - RNA, 54 nt, synthetic construct
  source 1..54: mol_type = other RNA
actctggctttcccccaggtttacatgttcctggtgaaatggcaggatttgtcg

SEQ ID NO: 6276 - RNA, 54 nt, synthetic construct
  source 1..54: mol_type = other RNA
actctggctttcccccaggtttacatgttcctggtgaaatggcaggatctgtcg

SEQ ID NO: 6277 - RNA, 54 nt, synthetic construct
  source 1..54: mol_type = other RNA
actctggctttcccccaggtttacatgttcctggtgaaatggcaggacttgtcg

SEQ ID NO: 6278 - RNA, 54 nt, synthetic construct
  source 1..54: mol_type = other RNA
actctggctttcccccaggtttacatgttcctggtgaaatggcaggacttatcg

SEQ ID NO: 6279 - RNA, 54 nt, synthetic construct
  source 1..54: mol_type = other RNA
actctggctttcccccaggtttacatgttcctggtgaaatggcaggacctgtcg

SEQ ID NO: 6280 - RNA, 54 nt, synthetic construct
  source 1..54: mol_type = other RNA
actctggctttcccccaggtgtacatgttcctggtgaaatggcaggatttgtcg

SEQ ID NO: 6281 - RNA, 54 nt, synthetic construct
  source 1..54: mol_type = other RNA
actctggctttcccccaggtgtacatgttcctggtgaaatggcaggatctgtcg

SEQ ID NO: 6282 - RNA, 54 nt, synthetic construct
  source 1..54: mol_type = other RNA
actctggctttcccccaggtgtacatgttcctggtgaaatggcaggacttgtcg

SEQ ID NO: 6283 - RNA, 54 nt, synthetic construct
  source 1..54: mol_type = other RNA
actctggctttcccccaggtctacatgttcctggtgaaatggcaggacttatcg

SEQ ID NO: 6284 - RNA, 54 nt, synthetic construct
  source 1..54: mol_type = other RNA
actctggctttcccccaggtctacatgttcctggtgaaatggcaggatttgtcg

SEQ ID NO: 6285 - RNA, 54 nt, synthetic construct
  source 1..54: mol_type = other RNA
actctggctttcccccaggtgtacatgttcctggtgaaatggcaggacctgtcg

SEQ ID NO: 6286 - RNA, 54 nt, synthetic construct
  source 1..54: mol_type = other RNA
actctggctttcccccaggtctacatgttcctggtgaaatggcaggatctgtcg

SEQ ID NO: 6287 - RNA, 54 nt, synthetic construct
  source 1..54: mol_type = other RNA
actctggctttcccccaggtctacatgttcctggtgaaatggcaggacttgtcg

SEQ ID NO: 6288 - RNA, 54 nt, synthetic construct
  source 1..54: mol_type = other RNA
actctggctttcccccaggtctacatgttcctggtgaaatggcaggacctgtcg

SEQ ID NO: 6289 - RNA, 54 nt, synthetic construct
  source 1..54: mol_type = other RNA
actctggctttcccccaggtatacatgttcctggtgaaatggcaggatttgtcg

SEQ ID NO: 6290 - RNA, 54 nt, synthetic construct
  source 1..54: mol_type = other RNA
actctggctttcccccaggtatacatgttcctggtgaaatggcaggatttatcg

SEQ ID NO: 6291 - RNA, 54 nt, synthetic construct
  source 1..54: mol_type = other RNA
actctggctttcccccaggtatacatgttcctggtgaaatggcaggacttgtcg

SEQ ID NO: 6292 - RNA, 54 nt, synthetic construct
  source 1..54: mol_type = other RNA
actctggctttcccccaggtatacatgttcctggtgaaatggcaggacttatcg

SEQ ID NO: 6293 - RNA, 54 nt, synthetic construct
  source 1..54: mol_type = other RNA
actctggctttcccccaggtctacatgttcctggtgaaatggcaggatttatcg

SEQ ID NO: 6294 - RNA, 54 nt, synthetic construct
  source 1..54: mol_type = other RNA
actctggctttcccccaggtatacatgttcctggtgaaatggcaggacctgtcg

SEQ ID NO: 6295 - RNA, 54 nt, synthetic construct
  source 1..54: mol_type = other RNA
actctggctttcccccaggtatacatgttcctggtgaaatggcaggatctgtcg

SEQ ID NO: 6296 - RNA, 55 nt, synthetic construct
  source 1..55: mol_type = other RNA
gactctggctttcccccaggtctacatgttcctggtgaaatggcaggatctgtcg

SEQ ID NO: 6297 - RNA, 55 nt, synthetic construct
  source 1..55: mol_type = other RNA
gactctggctttcccccaggtttacatgttcctggtgaaatggcaggacttgtcg

SEQ ID NO: 6298 - RNA, 55 nt, synthetic construct
  source 1..55: mol_type = other RNA
gactctggctttcccccaggtatacatgttcctggtgaaatggcaggacttgtcg

SEQ ID NO: 6299 - RNA, 55 nt, synthetic construct
  source 1..55: mol_type = other RNA
gactctggctttcccccaggtgtacatgttcctggtgaaatggcaggacctgtcg

SEQ ID NO: 6300 - RNA, 55 nt, synthetic construct
  source 1..55: mol_type = other RNA
gactctggctttcccccaggtatacatgttcctggtgaaatggcaggatttatcg

SEQ ID NO: 6301 - RNA, 55 nt, synthetic construct
  source 1..55: mol_type = other RNA
gactctggctttcccccaggtatacatgttcctggtgaaatggcaggatctgtcg

SEQ ID NO: 6302 - RNA, 55 nt, synthetic construct
  source 1..55: mol_type = other RNA
gactctggctttcccccaggtctacatgttcctggtgaaatggcaggacctgtcg

SEQ ID NO: 6303 - RNA, 55 nt, synthetic construct
  source 1..55: mol_type = other RNA
gactctggctttcccccaggtatacatgttcctggtgaaatggcaggacttatcg

SEQ ID NO: 6304 - RNA, 55 nt, synthetic construct
  source 1..55: mol_type = other RNA
gactctggctttcccccaggtctacatgttcctggtgaaatggcaggatttgtcg

SEQ ID NO: 6305 - RNA, 55 nt, synthetic construct
  source 1..55: mol_type = other RNA
gactctggctttcccccaggtttacatgttcctggtgaaatggcaggatttgtcg

SEQ ID NO: 6306 - RNA, 55 nt, synthetic construct
  source 1..55: mol_type = other RNA
gactctggctttcccccaggtctacatgttcctggtgaaatggcaggatttatcg

SEQ ID NO: 6307 - RNA, 55 nt, synthetic construct
  source 1..55: mol_type = other RNA
gactctggctttcccccaggtatacatgttcctggtgaaatggcaggatttgtcg

SEQ ID NO: 6308 - RNA, 55 nt, synthetic construct
  source 1..55: mol_type = other RNA
gactctggctttcccccaggtttacatgttcctggtgaaatggcaggatttatcg

SEQ ID NO: 6309 - RNA, 55 nt, synthetic construct
  source 1..55: mol_type = other RNA
gactctggctttcccccaggtttacatgttcctggtgaaatggcaggatctgtcg

SEQ ID NO: 6310 - RNA, 55 nt, synthetic construct
  source 1..55: mol_type = other RNA
gactctggctttcccccaggtttacatgttcctggtgaaatggcaggacctgtcg

SEQ ID NO: 6311 - RNA, 55 nt, synthetic construct
  source 1..55: mol_type = other RNA
gactctggctttcccccaggtatacatgttcctggtgaaatggcaggacctgtcg

SEQ ID NO: 6312 - RNA, 55 nt, synthetic construct
  source 1..55: mol_type = other RNA
gactctggctttcccccaggtctacatgttcctggtgaaatggcaggacttgtcg

SEQ ID NO: 6313 - RNA, 55 nt, synthetic construct
  source 1..55: mol_type = other RNA
gactctggctttcccccaggtgtacatgttcctggtgaaatggcaggacttatcg

SEQ ID NO: 6314 - RNA, 55 nt, synthetic construct
  source 1..55: mol_type = other RNA
gactctggctttcccccaggtctacatgttcctggtgaaatggcaggacttatcg

SEQ ID NO: 6315 - RNA, 55 nt, synthetic construct
  source 1..55: mol_type = other RNA
gactctggctttcccccaggtgtacatgttcctggtgaaatggcaggatttgtcg

SEQ ID NO: 6316 - RNA, 55 nt, synthetic construct
  source 1..55: mol_type = other RNA
gactctggctttcccccaggtgtacatgttcctggtgaaatggcaggacttgtcg

SEQ ID NO: 6317 - RNA, 55 nt, synthetic construct
  source 1..55: mol_type = other RNA
gactctggctttcccccaggtgtacatgttcctggtgaaatggcaggatctgtcg

SEQ ID NO: 6318 - RNA, 55 nt, synthetic construct
  source 1..55: mol_type = other RNA
gactctggctttcccccaggtgtacatgttcctggtgaaatggcaggatttatcg

SEQ ID NO: 6319 - RNA, 55 nt, synthetic construct
  source 1..55: mol_type = other RNA
gactctggctttcccccaggtttacatgttcctggtgaaatggcaggacttatcg

SEQ ID NO: 6320 - RNA, 56 nt, synthetic construct
  source 1..56: mol_type = other RNA
cgactctggctttcccccaggtctacatgttcctggtgaaatggcaggacttatcg

SEQ ID NO: 6321 - RNA, 56 nt, synthetic construct
  source 1..56: mol_type = other RNA
cgactctggctttcccccaggtctacatgttcctggtgaaatggcaggatctgtcg

SEQ ID NO: 6322 - RNA, 56 nt, synthetic construct
  source 1..56: mol_type = other RNA
cgactctggctttcccccaggtctacatgttcctggtgaaatggcaggatttatcg

SEQ ID NO: 6323 - RNA, 56 nt, synthetic construct
  source 1..56: mol_type = other RNA
cgactctggctttcccccaggtatacatgttcctggtgaaatggcaggacctgtcg

SEQ ID NO: 6324 - RNA, 56 nt, synthetic construct
  source 1..56: mol_type = other RNA
cgactctggctttcccccaggtatacatgttcctggtgaaatggcaggacttgtcg

SEQ ID NO: 6325 - RNA, 56 nt, synthetic construct
  source 1..56: mol_type = other RNA
cgactctggctttcccccaggtatacatgttcctggtgaaatggcaggatctgtcg

SEQ ID NO: 6326 - RNA, 56 nt, synthetic construct
  source 1..56: mol_type = other RNA
cgactctggctttcccccaggtatacatgttcctggtgaaatggcaggacttatcg

SEQ ID NO: 6327 - RNA, 56 nt, synthetic construct
  source 1..56: mol_type = other RNA
cgactctggctttcccccaggtatacatgttcctggtgaaatggcaggatttgtcg

SEQ ID NO: 6328 - RNA, 56 nt, synthetic construct
  source 1..56: mol_type = other RNA
cgactctggctttcccccaggtatacatgttcctggtgaaatggcaggatttatcg

SEQ ID NO: 6329 - RNA, 56 nt, synthetic construct
  source 1..56: mol_type = other RNA
cgactctggctttcccccaggtctacatgttcctggtgaaatggcaggacttgtcg

SEQ ID NO: 6330 - RNA, 56 nt, synthetic construct
  source 1..56: mol_type = other RNA
cgactctggctttcccccaggtgtacatgttcctggtgaaatggcaggacttatcg

SEQ ID NO: 6331 - RNA, 56 nt, synthetic construct
  source 1..56: mol_type = other RNA
cgactctggctttcccccaggtgtacatgttcctggtgaaatggcaggacctgtcg

SEQ ID NO: 6332 - RNA, 56 nt, synthetic construct
  source 1..56: mol_type = other RNA
cgactctggctttcccccaggtctacatgttcctggtgaaatggcaggacctgtcg

SEQ ID NO: 6333 - RNA, 56 nt, synthetic construct
  source 1..56: mol_type = other RNA
cgactctggctttcccccaggtttacatgttcctggtgaaatggcaggatttgtcg

SEQ ID NO: 6334 - RNA, 56 nt, synthetic construct
  source 1..56: mol_type = other RNA
cgactctggctttcccccaggtgtacatgttcctggtgaaatggcaggatctgtcg

SEQ ID NO: 6335 - RNA, 56 nt, synthetic construct
  source 1..56: mol_type = other RNA
cgactctggctttcccccaggtgtacatgttcctggtgaaatggcaggacttgtcg

SEQ ID NO: 6336 - RNA, 56 nt, synthetic construct
  source 1..56: mol_type = other RNA
cgactctggctttcccccaggtctacatgttcctggtgaaatggcaggatttgtcg

SEQ ID NO: 6337 - RNA, 56 nt, synthetic construct
  source 1..56: mol_type = other RNA
cgactctggctttcccccaggtttacatgttcctggtgaaatggcaggatttatcg

SEQ ID NO: 6338 - RNA, 56 nt, synthetic construct
  source 1..56: mol_type = other RNA
cgactctggctttcccccaggtttacatgttcctggtgaaatggcaggatctgtcg

SEQ ID NO: 6339 - RNA, 56 nt, synthetic construct
  source 1..56: mol_type = other RNA
cgactctggctttcccccaggtttacatgttcctggtgaaatggcaggacttgtcg

SEQ ID NO: 6340 - RNA, 56 nt, synthetic construct
  source 1..56: mol_type = other RNA
cgactctggctttcccccaggtttacatgttcctggtgaaatggcaggacttatcg

SEQ ID NO: 6341 - RNA, 56 nt, synthetic construct
  source 1..56: mol_type = other RNA
cgactctggctttcccccaggtttacatgttcctggtgaaatggcaggacctgtcg

SEQ ID NO: 6342 - RNA, 56 nt, synthetic construct
  source 1..56: mol_type = other RNA
cgactctggctttcccccaggtgtacatgttcctggtgaaatggcaggatttgtcg

SEQ ID NO: 6343 - RNA, 56 nt, synthetic construct
  source 1..56: mol_type = other RNA
cgactctggctttcccccaggtgtacatgttcctggtgaaatggcaggatttatcg

SEQ ID NO: 6344 - RNA, 57 nt, synthetic construct
  source 1..57: mol_type = other RNA
ccgactctggctttcccccaggtatacatgttcctggtgaaatggcaggacttgtcg

SEQ ID NO: 6345 - RNA, 57 nt, synthetic construct
  source 1..57: mol_type = other RNA
ccgactctggctttcccccaggtatacatgttcctggtgaaatggcaggacctgtcg

SEQ ID NO: 6346 - RNA, 57 nt, synthetic construct
  source 1..57: mol_type = other RNA
ccgactctggctttcccccaggtgtacatgttcctggtgaaatggcaggacttatcg

SEQ ID NO: 6347 - RNA, 57 nt, synthetic construct
  source 1..57: mol_type = other RNA
ccgactctggctttcccccaggtctacatgttcctggtgaaatggcaggacctgtcg

SEQ ID NO: 6348 - RNA, 57 nt, synthetic construct
  source 1..57: mol_type = other RNA
ccgactctggctttcccccaggtgtacatgttcctggtgaaatggcaggacttgtcg

SEQ ID NO: 6349 - RNA, 57 nt, synthetic construct
  source 1..57: mol_type = other RNA
ccgactctggctttcccccaggtgtacatgttcctggtgaaatggcaggatctgtcg

SEQ ID NO: 6350 - RNA, 57 nt, synthetic construct
  source 1..57: mol_type = other RNA
ccgactctggctttcccccaggtttacatgttcctggtgaaatggcaggacttatcg

SEQ ID NO: 6351 - RNA, 57 nt, synthetic construct
  source 1..57: mol_type = other RNA
ccgactctggctttcccccaggtgtacatgttcctggtgaaatggcaggatttatcg

SEQ ID NO: 6352 - RNA, 57 nt, synthetic construct
  source 1..57: mol_type = other RNA
ccgactctggctttcccccaggtttacatgttcctggtgaaatggcaggacctgtcg

SEQ ID NO: 6353 - RNA, 57 nt, synthetic construct
  source 1..57: mol_type = other RNA
ccgactctggctttcccccaggtgtacatgttcctggtgaaatggcaggacctgtcg

SEQ ID NO: 6354 - RNA, 57 nt, synthetic construct
  source 1..57: mol_type = other RNA
ccgactctggctttcccccaggtttacatgttcctggtgaaatggcaggacttgtcg

SEQ ID NO: 6355 - RNA, 57 nt, synthetic construct
  source 1..57: mol_type = other RNA
ccgactctggctttcccccaggtttacatgttcctggtgaaatggcaggatttatcg

SEQ ID NO: 6356 - RNA, 57 nt, synthetic construct
  source 1..57: mol_type = other RNA
ccgactctggctttcccccaggtatacatgttcctggtgaaatggcaggatctgtcg

SEQ ID NO: 6357 - RNA, 57 nt, synthetic construct
  source 1..57: mol_type = other RNA
ccgactctggctttcccccaggtatacatgttcctggtgaaatggcaggatttatcg

SEQ ID NO: 6358 - RNA, 57 nt, synthetic construct
  source 1..57: mol_type = other RNA
ccgactctggctttcccccaggtatacatgttcctggtgaaatggcaggacttatcg

SEQ ID NO: 6359 - RNA, 57 nt, synthetic construct
  source 1..57: mol_type = other RNA
ccgactctggctttcccccaggtatacatgttcctggtgaaatggcaggatttgtcg

SEQ ID NO: 6360 - RNA, 57 nt, synthetic construct
  source 1..57: mol_type = other RNA
ccgactctggctttcccccaggtctacatgttcctggtgaaatggcaggatctgtcg

SEQ ID NO: 6361 - RNA, 57 nt, synthetic construct
  source 1..57: mol_type = other RNA
ccgactctggctttcccccaggtctacatgttcctggtgaaatggcaggatttatcg

SEQ ID NO: 6362 - RNA, 57 nt, synthetic construct
  source 1..57: mol_type = other RNA
ccgactctggctttcccccaggtctacatgttcctggtgaaatggcaggatttgtcg

SEQ ID NO: 6363 - RNA, 57 nt, synthetic construct
  source 1..57: mol_type = other RNA
ccgactctggctttcccccaggtctacatgttcctggtgaaatggcaggacttatcg

SEQ ID NO: 6364 - RNA, 57 nt, synthetic construct
  source 1..57: mol_type = other RNA
ccgactctggctttcccccaggtttacatgttcctggtgaaatggcaggatttgtcg

SEQ ID NO: 6365 - RNA, 57 nt, synthetic construct
  source 1..57: mol_type = other RNA
ccgactctggctttcccccaggtgtacatgttcctggtgaaatggcaggatttgtcg

SEQ ID NO: 6366 - RNA, 57 nt, synthetic construct
  source 1..57: mol_type = other RNA
ccgactctggctttcccccaggtttacatgttcctggtgaaatggcaggatctgtcg

SEQ ID NO: 6367 - RNA, 57 nt, synthetic construct
  source 1..57: mol_type = other RNA
ccgactctggctttcccccaggtctacatgttcctggtgaaatggcaggacttgtcg

SEQ ID NO: 6368 - RNA, 58 nt, synthetic construct
  source 1..58: mol_type = other RNA
cccgactctggctttcccccaggtgtacatgttcctggtgaaatggcaggacctgtcg

SEQ ID NO: 6369 - RNA, 58 nt, synthetic construct
  source 1..58: mol_type = other RNA
cccgactctggctttcccccaggtatacatgttcctggtgaaatggcaggatttgtcg

SEQ ID NO: 6370 - RNA, 58 nt, synthetic construct
  source 1..58: mol_type = other RNA
cccgactctggctttcccccaggtctacatgttcctggtgaaatggcaggatttatcg

SEQ ID NO: 6371 - RNA, 58 nt, synthetic construct
  source 1..58: mol_type = other RNA
cccgactctggctttcccccaggtatacatgttcctggtgaaatggcaggacttgtcg

SEQ ID NO: 6372 - RNA, 58 nt, synthetic construct
  source 1..58: mol_type = other RNA
cccgactctggctttcccccaggtctacatgttcctggtgaaatggcaggacttgtcg

SEQ ID NO: 6373 - RNA, 58 nt, synthetic construct
  source 1..58: mol_type = other RNA
cccgactctggctttcccccaggtttacatgttcctggtgaaatggcaggacttatcg

SEQ ID NO: 6374 - RNA, 58 nt, synthetic construct
  source 1..58: mol_type = other RNA
cccgactctggctttcccccaggtatacatgttcctggtgaaatggcaggacttatcg

SEQ ID NO: 6375 - RNA, 58 nt, synthetic construct
  source 1..58: mol_type = other RNA
cccgactctggctttcccccaggtctacatgttcctggtgaaatggcaggatttgtcg

SEQ ID NO: 6376 - RNA, 58 nt, synthetic construct
  source 1..58: mol_type = other RNA
cccgactctggctttcccccaggtgtacatgttcctggtgaaatggcaggacttatcg

SEQ ID NO: 6377 - RNA, 58 nt, synthetic construct
  source 1..58: mol_type = other RNA
cccgactctggctttcccccaggtgtacatgttcctggtgaaatggcaggatttgtcg

SEQ ID NO: 6378 - RNA, 58 nt, synthetic construct
  source 1..58: mol_type = other RNA
cccgactctggctttcccccaggtatacatgttcctggtgaaatggcaggatctgtcg

SEQ ID NO: 6379 - RNA, 58 nt, synthetic construct
  source 1..58: mol_type = other RNA
cccgactctggctttcccccaggtgtacatgttcctggtgaaatggcaggatttatcg

SEQ ID NO: 6380 - RNA, 58 nt, synthetic construct
  source 1..58: mol_type = other RNA
cccgactctggctttcccccaggtttacatgttcctggtgaaatggcaggacctgtcg

SEQ ID NO: 6381 - RNA, 58 nt, synthetic construct
  source 1..58: mol_type = other RNA
cccgactctggctttcccccaggtttacatgttcctggtgaaatggcaggacttgtcg

SEQ ID NO: 6382 - RNA, 58 nt, synthetic construct
  source 1..58: mol_type = other RNA
cccgactctggctttcccccaggtctacatgttcctggtgaaatggcaggacttatcg

SEQ ID NO: 6383 - RNA, 58 nt, synthetic construct
  source 1..58: mol_type = other RNA
cccgactctggctttcccccaggtttacatgttcctggtgaaatggcaggatctgtcg

SEQ ID NO: 6384 - RNA, 58 nt, synthetic construct
  source 1..58: mol_type = other RNA
cccgactctggctttcccccaggtttacatgttcctggtgaaatggcaggatttatcg

SEQ ID NO: 6385 - RNA, 58 nt, synthetic construct
  source 1..58: mol_type = other RNA
cccgactctggctttcccccaggtttacatgttcctggtgaaatggcaggatttgtcg

SEQ ID NO: 6386 - RNA, 58 nt, synthetic construct
  source 1..58: mol_type = other RNA
cccgactctggctttcccccaggtatacatgttcctggtgaaatggcaggacctgtcg

SEQ ID NO: 6387 - RNA, 58 nt, synthetic construct
  source 1..58: mol_type = other RNA
cccgactctggctttcccccaggtatacatgttcctggtgaaatggcaggatttatcg

SEQ ID NO: 6388 - RNA, 58 nt, synthetic construct
  source 1..58: mol_type = other RNA
cccgactctggctttcccccaggtgtacatgttcctggtgaaatggcaggacttgtcg

SEQ ID NO: 6389 - RNA, 58 nt, synthetic construct
  source 1..58: mol_type = other RNA
cccgactctggctttcccccaggtctacatgttcctggtgaaatggcaggacctgtcg

SEQ ID NO: 6390 - RNA, 58 nt, synthetic construct
  source 1..58: mol_type = other RNA
cccgactctggctttcccccaggtgtacatgttcctggtgaaatggcaggatctgtcg

SEQ ID NO: 6391 - RNA, 58 nt, synthetic construct
  source 1..58: mol_type = other RNA
cccgactctggctttcccccaggtctacatgttcctggtgaaatggcaggatctgtcg

SEQ ID NO: 6392 - RNA, 59 nt, synthetic construct
  source 1..59: mol_type = other RNA
ccccgactctggctttcccccaggtatacatgttcctggtgaaatggcaggatctgtcg

SEQ ID NO: 6393 - RNA, 59 nt, synthetic construct
  source 1..59: mol_type = other RNA
ccccgactctggctttcccccaggtatacatgttcctggtgaaatggcaggatttatcg

SEQ ID NO: 6394 - RNA, 59 nt, synthetic construct
  source 1..59: mol_type = other RNA
ccccgactctggctttcccccaggtatacatgttcctggtgaaatggcaggatttgtcg

SEQ ID NO: 6395 - RNA, 59 nt, synthetic construct
  source 1..59: mol_type = other RNA
ccccgactctggctttcccccaggtctacatgttcctggtgaaatggcaggacctgtcg

SEQ ID NO: 6396 - RNA, 59 nt, synthetic construct
  source 1..59: mol_type = other RNA
ccccgactctggctttcccccaggtctacatgttcctggtgaaatggcaggacttatcg

SEQ ID NO: 6397 - RNA, 59 nt, synthetic construct
  source 1..59: mol_type = other RNA
ccccgactctggctttcccccaggtgtacatgttcctggtgaaatggcaggatctgtcg

SEQ ID NO: 6398 - RNA, 59 nt, synthetic construct
  source 1..59: mol_type = other RNA
ccccgactctggctttcccccaggtctacatgttcctggtgaaatggcaggacttgtcg

SEQ ID NO: 6399 - RNA, 59 nt, synthetic construct
  source 1..59: mol_type = other RNA
ccccgactctggctttcccccaggtctacatgttcctggtgaaatggcaggatctgtcg

SEQ ID NO: 6400 - RNA, 59 nt, synthetic construct
  source 1..59: mol_type = other RNA
ccccgactctggctttcccccaggtgtacatgttcctggtgaaatggcaggacctgtcg

SEQ ID NO: 6401 - RNA, 59 nt, synthetic construct
  source 1..59: mol_type = other RNA
ccccgactctggctttcccccaggtctacatgttcctggtgaaatggcaggatttatcg

SEQ ID NO: 6402 - RNA, 59 nt, synthetic construct
  source 1..59: mol_type = other RNA
ccccgactctggctttcccccaggtttacatgttcctggtgaaatggcaggatttgtcg

SEQ ID NO: 6403 - RNA, 59 nt, synthetic construct
  source 1..59: mol_type = other RNA
ccccgactctggctttcccccaggtttacatgttcctggtgaaatggcaggatttatcg

SEQ ID NO: 6404 - RNA, 59 nt, synthetic construct
  source 1..59: mol_type = other RNA
ccccgactctggctttcccccaggtttacatgttcctggtgaaatggcaggatctgtcg

SEQ ID NO: 6405 - RNA, 59 nt, synthetic construct
  source 1..59: mol_type = other RNA
ccccgactctggctttcccccaggtttacatgttcctggtgaaatggcaggacttgtcg

SEQ ID NO: 6406 - RNA, 59 nt, synthetic construct
  source 1..59: mol_type = other RNA
ccccgactctggctttcccccaggtttacatgttcctggtgaaatggcaggacttatcg

SEQ ID NO: 6407 - RNA, 59 nt, synthetic construct
  source 1..59: mol_type = other RNA
ccccgactctggctttcccccaggtatacatgttcctggtgaaatggcaggacttatcg

SEQ ID NO: 6408 - RNA, 59 nt, synthetic construct
  source 1..59: mol_type = other RNA
ccccgactctggctttcccccaggtgtacatgttcctggtgaaatggcaggacttgtcg

SEQ ID NO: 6409 - RNA, 59 nt, synthetic construct
  source 1..59: mol_type = other RNA
ccccgactctggctttcccccaggtctacatgttcctggtgaaatggcaggatttgtcg

SEQ ID NO: 6410 - RNA, 59 nt, synthetic construct
  source 1..59: mol_type = other RNA
ccccgactctggctttcccccaggtttacatgttcctggtgaaatggcaggacctgtcg

SEQ ID NO: 6411 - RNA, 59 nt, synthetic construct
  source 1..59: mol_type = other RNA
ccccgactctggctttcccccaggtgtacatgttcctggtgaaatggcaggacttatcg

SEQ ID NO: 6412 - RNA, 59 nt, synthetic construct
  source 1..59: mol_type = other RNA
ccccgactctggctttcccccaggtgtacatgttcctggtgaaatggcaggatttgtcg

SEQ ID NO: 6413 - RNA, 59 nt, synthetic construct
  source 1..59: mol_type = other RNA
ccccgactctggctttcccccaggtgtacatgttcctggtgaaatggcaggatttatcg

SEQ ID NO: 6414 - RNA, 59 nt, synthetic construct
  source 1..59: mol_type = other RNA
ccccgactctggctttcccccaggtatacatgttcctggtgaaatggcaggacctgtcg

SEQ ID NO: 6415 - RNA, 59 nt, synthetic construct
  source 1..59: mol_type = other RNA
ccccgactctggctttcccccaggtatacatgttcctggtgaaatggcaggacttgtcg

SEQ ID NO: 6416 - RNA, 60 nt, synthetic construct
  source 1..60: mol_type = other RNA
cccccgactctggctttcccccaggtgtacatgttcctggtgaaatggcaggacttatcg

SEQ ID NO: 6417 - RNA, 60 nt, synthetic construct
  source 1..60: mol_type = other RNA
cccccgactctggctttcccccaggtctacatgttcctggtgaaatggcaggatttgtcg

SEQ ID NO: 6418 - RNA, 60 nt, synthetic construct
  source 1..60: mol_type = other RNA
cccccgactctggctttcccccaggtgtacatgttcctggtgaaatggcaggacctgtcg

SEQ ID NO: 6419 - RNA, 60 nt, synthetic construct
  source 1..60: mol_type = other RNA
cccccgactctggctttcccccaggtatacatgttcctggtgaaatggcaggacctgtcg

SEQ ID NO: 6420 - RNA, 60 nt, synthetic construct
  source 1..60: mol_type = other RNA
cccccgactctggctttcccccaggtatacatgttcctggtgaaatggcaggacttatcg

SEQ ID NO: 6421 - RNA, 60 nt, synthetic construct
  source 1..60: mol_type = other RNA
cccccgactctggctttcccccaggtatacatgttcctggtgaaatggcaggacttgtcg

SEQ ID NO: 6422 - RNA, 60 nt, synthetic construct
  source 1..60: mol_type = other RNA
cccccgactctggctttcccccaggtatacatgttcctggtgaaatggcaggatttatcg

SEQ ID NO: 6423 - RNA, 60 nt, synthetic construct
  source 1..60: mol_type = other RNA
cccccgactctggctttcccccaggtatacatgttcctggtgaaatggcaggatctgtcg

SEQ ID NO: 6424 - RNA, 60 nt, synthetic construct
  source 1..60: mol_type = other RNA
cccccgactctggctttcccccaggtatacatgttcctggtgaaatggcaggatttgtcg

SEQ ID NO: 6425 - RNA, 60 nt, synthetic construct
  source 1..60: mol_type = other RNA
cccccgactctggctttcccccaggtctacatgttcctggtgaaatggcaggacctgtcg

SEQ ID NO: 6426 - RNA, 60 nt, synthetic construct
  source 1..60: mol_type = other RNA
cccccgactctggctttcccccaggtctacatgttcctggtgaaatggcaggacttgtcg

SEQ ID NO: 6427 - RNA, 60 nt, synthetic construct
  source 1..60: mol_type = other RNA
cccccgactctggctttcccccaggtctacatgttcctggtgaaatggcaggatctgtcg

SEQ ID NO: 6428 - RNA, 60 nt, synthetic construct
  source 1..60: mol_type = other RNA
cccccgactctggctttcccccaggtctacatgttcctggtgaaatggcaggatttatcg

SEQ ID NO: 6429 - RNA, 60 nt, synthetic construct
  source 1..60: mol_type = other RNA
cccccgactctggctttcccccaggtctacatgttcctggtgaaatggcaggacttatcg

SEQ ID NO: 6430 - RNA, 60 nt, synthetic construct
  source 1..60: mol_type = other RNA
cccccgactctggctttcccccaggtttacatgttcctggtgaaatggcaggacctgtcg

SEQ ID NO: 6431 - RNA, 60 nt, synthetic construct
  source 1..60: mol_type = other RNA
cccccgactctggctttcccccaggtttacatgttcctggtgaaatggcaggatttgtcg

SEQ ID NO: 6432 - RNA, 60 nt, synthetic construct
  source 1..60: mol_type = other RNA
cccccgactctggctttcccccaggtttacatgttcctggtgaaatggcaggatttatcg

SEQ ID NO: 6433 - RNA, 60 nt, synthetic construct
  source 1..60: mol_type = other RNA
cccccgactctggctttcccccaggtttacatgttcctggtgaaatggcaggatctgtcg

SEQ ID NO: 6434 - RNA, 60 nt, synthetic construct
  source 1..60: mol_type = other RNA
cccccgactctggctttcccccaggtttacatgttcctggtgaaatggcaggacttgtcg

SEQ ID NO: 6435 - RNA, 60 nt, synthetic construct
  source 1..60: mol_type = other RNA
cccccgactctggctttcccccaggtttacatgttcctggtgaaatggcaggacttatcg

SEQ ID NO: 6436 - RNA, 60 nt, synthetic construct
  source 1..60: mol_type = other RNA
cccccgactctggctttcccccaggtgtacatgttcctggtgaaatggcaggatttgtcg

SEQ ID NO: 6437 - RNA, 60 nt, synthetic construct
  source 1..60: mol_type = other RNA
cccccgactctggctttcccccaggtgtacatgttcctggtgaaatggcaggatttatcg

SEQ ID NO: 6438 - RNA, 60 nt, synthetic construct
  source 1..60: mol_type = other RNA
cccccgactctggctttcccccaggtgtacatgttcctggtgaaatggcaggatctgtcg

SEQ ID NO: 6439 - RNA, 60 nt, synthetic construct
  source 1..60: mol_type = other RNA
cccccgactctggctttcccccaggtgtacatgttcctggtgaaatggcaggacttgtcg

SEQ ID NO: 6440 - RNA, 61 nt, synthetic construct
  source 1..61: mol_type = other RNA
tcccccgactctggctttcccccaggtatacatgttcctggtgaaatggcaggatctgtcg

SEQ ID NO: 6441 - RNA, 61 nt, synthetic construct
  source 1..61: mol_type = other RNA
tcccccgactctggctttcccccaggtttacatgttcctggtgaaatggcaggacttgtcg

SEQ ID NO: 6442 - RNA, 61 nt, synthetic construct
  source 1..61: mol_type = other RNA
tcccccgactctggctttcccccaggtttacatgttcctggtgaaatggcaggatttgtcg

SEQ ID NO: 6443 - RNA, 61 nt, synthetic construct
  source 1..61: mol_type = other RNA
tcccccgactctggctttcccccaggtttacatgttcctggtgaaatggcaggacttatcg

SEQ ID NO: 6444 - RNA, 61 nt, synthetic construct
  source 1..61: mol_type = other RNA
tcccccgactctggctttcccccaggtctacatgttcctggtgaaatggcaggacttgtcg

SEQ ID NO: 6445 - RNA, 61 nt, synthetic construct
  source 1..61: mol_type = other RNA
tcccccgactctggctttcccccaggtttacatgttcctggtgaaatggcaggacctgtcg

SEQ ID NO: 6446 - RNA, 61 nt, synthetic construct
  source 1..61: mol_type = other RNA
tcccccgactctggctttcccccaggtgtacatgttcctggtgaaatggcaggatttgtcg

SEQ ID NO: 6447 - RNA, 61 nt, synthetic construct
  source 1..61: mol_type = other RNA
tcccccgactctggctttcccccaggtgtacatgttcctggtgaaatggcaggatctgtcg

SEQ ID NO: 6448 - RNA, 61 nt, synthetic construct
  source 1..61: mol_type = other RNA
tcccccgactctggctttcccccaggtgtacatgttcctggtgaaatggcaggatttatcg

SEQ ID NO: 6449 - RNA, 61 nt, synthetic construct
  source 1..61: mol_type = other RNA
tcccccgactctggctttcccccaggtgtacatgttcctggtgaaatggcaggacttatcg

SEQ ID NO: 6450 - RNA, 61 nt, synthetic construct
  source 1..61: mol_type = other RNA
tcccccgactctggctttcccccaggtgtacatgttcctggtgaaatggcaggacctgtcg

SEQ ID NO: 6451 - RNA, 61 nt, synthetic construct
  source 1..61: mol_type = other RNA
tcccccgactctggctttcccccaggtctacatgttcctggtgaaatggcaggatttgtcg

SEQ ID NO: 6452 - RNA, 61 nt, synthetic construct
  source 1..61: mol_type = other RNA
tcccccgactctggctttcccccaggtctacatgttcctggtgaaatggcaggatttatcg

SEQ ID NO: 6453 - RNA, 61 nt, synthetic construct
  source 1..61: mol_type = other RNA
tcccccgactctggctttcccccaggtctacatgttcctggtgaaatggcaggatctgtcg

SEQ ID NO: 6454 - RNA, 61 nt, synthetic construct
  source 1..61: mol_type = other RNA
tcccccgactctggctttcccccaggtctacatgttcctggtgaaatggcaggacttatcg

SEQ ID NO: 6455 - RNA, 61 nt, synthetic construct
  source 1..61: mol_type = other RNA
tcccccgactctggctttcccccaggtttacatgttcctggtgaaatggcaggatttatcg

SEQ ID NO: 6456 - RNA, 61 nt, synthetic construct
  source 1..61: mol_type = other RNA
tcccccgactctggctttcccccaggtatacatgttcctggtgaaatggcaggatttgtcg

SEQ ID NO: 6457 - RNA, 61 nt, synthetic construct
  source 1..61: mol_type = other RNA
tcccccgactctggctttcccccaggtatacatgttcctggtgaaatggcaggacttatcg

SEQ ID NO: 6458 - RNA, 61 nt, synthetic construct
  source 1..61: mol_type = other RNA
tcccccgactctggctttcccccaggtctacatgttcctggtgaaatggcaggacctgtcg

SEQ ID NO: 6459 - RNA, 61 nt, synthetic construct
  source 1..61: mol_type = other RNA
tcccccgactctggctttcccccaggtgtacatgttcctggtgaaatggcaggacttgtcg

SEQ ID NO: 6460 - RNA, 61 nt, synthetic construct
  source 1..61: mol_type = other RNA
tcccccgactctggctttcccccaggtttacatgttcctggtgaaatggcaggatctgtcg

SEQ ID NO: 6461 - RNA, 61 nt, synthetic construct
  source 1..61: mol_type = other RNA
tcccccgactctggctttcccccaggtatacatgttcctggtgaaatggcaggatttatcg

SEQ ID NO: 6462 - RNA, 61 nt, synthetic construct
  source 1..61: mol_type = other RNA
tcccccgactctggctttcccccaggtatacatgttcctggtgaaatggcaggacctgtcg

SEQ ID NO: 6463 - RNA, 61 nt, synthetic construct
  source 1..61: mol_type = other RNA
tcccccgactctggctttcccccaggtatacatgttcctggtgaaatggcaggacttgtcg

SEQ ID NO: 6464 - RNA, 62 nt, synthetic construct
  source 1..62: mol_type = other RNA
gtcccccgactctggctttcccccaggtgtacatgttcctggtgaaatggcaggacttatcg

SEQ ID NO: 6465 - RNA, 62 nt, synthetic construct
  source 1..62: mol_type = other RNA
gtcccccgactctggctttcccccaggtgtacatgttcctggtgaaatggcaggacctgtcg

SEQ ID NO: 6466 - RNA, 62 nt, synthetic construct
  source 1..62: mol_type = other RNA
gtcccccgactctggctttcccccaggtgtacatgttcctggtgaaatggcaggatctgtcg

SEQ ID NO: 6467 - RNA, 62 nt, synthetic construct
  source 1..62: mol_type = other RNA
gtcccccgactctggctttcccccaggtgtacatgttcctggtgaaatggcaggatttatcg

SEQ ID NO: 6468 - RNA, 62 nt, synthetic construct
  source 1..62: mol_type = other RNA
gtcccccgactctggctttcccccaggtgtacatgttcctggtgaaatggcaggatttgtcg

SEQ ID NO: 6469 - RNA, 62 nt, synthetic construct
  source 1..62: mol_type = other RNA
gtcccccgactctggctttcccccaggtttacatgttcctggtgaaatggcaggacttatcg

SEQ ID NO: 6470 - RNA, 62 nt, synthetic construct
  source 1..62: mol_type = other RNA
gtcccccgactctggctttcccccaggtgtacatgttcctggtgaaatggcaggacttgtcg

SEQ ID NO: 6471 - RNA, 62 nt, synthetic construct
  source 1..62: mol_type = other RNA
gtcccccgactctggctttcccccaggtttacatgttcctggtgaaatggcaggatctgtcg

SEQ ID NO: 6472 - RNA, 62 nt, synthetic construct
  source 1..62: mol_type = other RNA
gtcccccgactctggctttcccccaggtttacatgttcctggtgaaatggcaggatttatcg

SEQ ID NO: 6473 - RNA, 62 nt, synthetic construct
  source 1..62: mol_type = other RNA
gtcccccgactctggctttcccccaggtttacatgttcctggtgaaatggcaggatttgtcg

SEQ ID NO: 6474 - RNA, 62 nt, synthetic construct
  source 1..62: mol_type = other RNA
gtcccccgactctggctttcccccaggtttacatgttcctggtgaaatggcaggacttgtcg

SEQ ID NO: 6475 - RNA, 62 nt, synthetic construct
  source 1..62: mol_type = other RNA
gtcccccgactctggctttcccccaggtctacatgttcctggtgaaatggcaggacttatcg

SEQ ID NO: 6476 - RNA, 62 nt, synthetic construct
  source 1..62: mol_type = other RNA
gtcccccgactctggctttcccccaggtctacatgttcctggtgaaatggcaggatctgtcg

SEQ ID NO: 6477 - RNA, 62 nt, synthetic construct
  source 1..62: mol_type = other RNA
gtcccccgactctggctttcccccaggtctacatgttcctggtgaaatggcaggatttatcg

SEQ ID NO: 6478 - RNA, 62 nt, synthetic construct
  source 1..62: mol_type = other RNA
gtcccccgactctggctttcccccaggtatacatgttcctggtgaaatggcaggacctgtcg

SEQ ID NO: 6479 - RNA, 62 nt, synthetic construct
  source 1..62: mol_type = other RNA
gtcccccgactctggctttcccccaggtctacatgttcctggtgaaatggcaggatttgtcg

SEQ ID NO: 6480 - RNA, 62 nt, synthetic construct
  source 1..62: mol_type = other RNA
gtcccccgactctggctttcccccaggtatacatgttcctggtgaaatggcaggacttgtcg

SEQ ID NO: 6481 - RNA, 62 nt, synthetic construct
  source 1..62: mol_type = other RNA
gtcccccgactctggctttcccccaggtatacatgttcctggtgaaatggcaggatctgtcg

SEQ ID NO: 6482 - RNA, 62 nt, synthetic construct
  source 1..62: mol_type = other RNA
gtcccccgactctggctttcccccaggtatacatgttcctggtgaaatggcaggatttatcg

SEQ ID NO: 6483 - RNA, 62 nt, synthetic construct
  source 1..62: mol_type = other RNA
gtcccccgactctggctttcccccaggtatacatgttcctggtgaaatggcaggacttatcg

SEQ ID NO: 6484 - RNA, 62 nt, synthetic construct
  source 1..62: mol_type = other RNA
gtcccccgactctggctttcccccaggtctacatgttcctggtgaaatggcaggacctgtcg

SEQ ID NO: 6485 - RNA, 62 nt, synthetic construct
  source 1..62: mol_type = other RNA
gtcccccgactctggctttcccccaggtctacatgttcctggtgaaatggcaggacttgtcg

SEQ ID NO: 6486 - RNA, 62 nt, synthetic construct
  source 1..62: mol_type = other RNA
gtcccccgactctggctttcccccaggtttacatgttcctggtgaaatggcaggacctgtcg

SEQ ID NO: 6487 - RNA, 62 nt, synthetic construct
  source 1..62: mol_type = other RNA
gtcccccgactctggctttcccccaggtatacatgttcctggtgaaatggcaggatttgtcg

SEQ ID NO: 6488 - RNA, 63 nt, synthetic construct
  source 1..63: mol_type = other RNA
ggtcccccgactctggctttcccccaggtctacatgttcctggtgaaatggcaggatttgtcg

SEQ ID NO: 6489 - RNA, 63 nt, synthetic construct
  source 1..63: mol_type = other RNA
ggtcccccgactctggctttcccccaggtgtacatgttcctggtgaaatggcaggacctgtcg

SEQ ID NO: 6490 - RNA, 63 nt, synthetic construct
  source 1..63: mol_type = other RNA
ggtcccccgactctggctttcccccaggtatacatgttcctggtgaaatggcaggatttatcg

SEQ ID NO: 6491 - RNA, 63 nt, synthetic construct
  source 1..63: mol_type = other RNA
ggtcccccgactctggctttcccccaggtgtacatgttcctggtgaaatggcaggacttgtcg

SEQ ID NO: 6492 - RNA, 63 nt, synthetic construct
  source 1..63: mol_type = other RNA
ggtcccccgactctggctttcccccaggtgtacatgttcctggtgaaatggcaggatctgtcg

SEQ ID NO: 6493 - RNA, 63 nt, synthetic construct
  source 1..63: mol_type = other RNA
ggtcccccgactctggctttcccccaggtttacatgttcctggtgaaatggcaggatttatcg

SEQ ID NO: 6494 - RNA, 63 nt, synthetic construct
  source 1..63: mol_type = other RNA
ggtcccccgactctggctttcccccaggtgtacatgttcctggtgaaatggcaggacttatcg

SEQ ID NO: 6495 - RNA, 63 nt, synthetic construct
  source 1..63: mol_type = other RNA
ggtcccccgactctggctttcccccaggtttacatgttcctggtgaaatggcaggacttatcg

SEQ ID NO: 6496 - RNA, 63 nt, synthetic construct
  source 1..63: mol_type = other RNA
ggtcccccgactctggctttcccccaggtttacatgttcctggtgaaatggcaggacttgtcg

SEQ ID NO: 6497 - RNA, 63 nt, synthetic construct
  source 1..63: mol_type = other RNA
ggtcccccgactctggctttcccccaggtctacatgttcctggtgaaatggcaggatttatcg

SEQ ID NO: 6498 - RNA, 63 nt, synthetic construct
  source 1..63: mol_type = other RNA
ggtcccccgactctggctttcccccaggtttacatgttcctggtgaaatggcaggatctgtcg

SEQ ID NO: 6499 - RNA, 63 nt, synthetic construct
  source 1..63: mol_type = other RNA
ggtcccccgactctggctttcccccaggtatacatgttcctggtgaaatggcaggatctgtcg

SEQ ID NO: 6500 - RNA, 63 nt, synthetic construct
  source 1..63: mol_type = other RNA
ggtcccccgactctggctttcccccaggtatacatgttcctggtgaaatggcaggacttgtcg

SEQ ID NO: 6501 - RNA, 63 nt, synthetic construct
  source 1..63: mol_type = other RNA
ggtcccccgactctggctttcccccaggtatacatgttcctggtgaaatggcaggacttatcg

SEQ ID NO: 6502 - RNA, 63 nt, synthetic construct
  source 1..63: mol_type = other RNA
ggtcccccgactctggctttcccccaggtatacatgttcctggtgaaatggcaggacctgtcg

SEQ ID NO: 6503 - RNA, 63 nt, synthetic construct
  source 1..63: mol_type = other RNA
ggtcccccgactctggctttcccccaggtatacatgttcctggtgaaatggcaggatttgtcg

SEQ ID NO: 6504 - RNA, 63 nt, synthetic construct
  source 1..63: mol_type = other RNA
ggtcccccgactctggctttcccccaggtctacatgttcctggtgaaatggcaggacctgtcg

SEQ ID NO: 6505 - RNA, 63 nt, synthetic construct
  source 1..63: mol_type = other RNA
ggtcccccgactctggctttcccccaggtttacatgttcctggtgaaatggcaggacctgtcg

SEQ ID NO: 6506 - RNA, 63 nt, synthetic construct
  source 1..63: mol_type = other RNA
ggtcccccgactctggctttcccccaggtttacatgttcctggtgaaatggcaggatttgtcg

SEQ ID NO: 6507 - RNA, 63 nt, synthetic construct
  source 1..63: mol_type = other RNA
ggtcccccgactctggctttcccccaggtctacatgttcctggtgaaatggcaggatctgtcg

SEQ ID NO: 6508 - RNA, 63 nt, synthetic construct
  source 1..63: mol_type = other RNA
ggtcccccgactctggctttcccccaggtctacatgttcctggtgaaatggcaggacttgtcg

SEQ ID NO: 6509 - RNA, 63 nt, synthetic construct
  source 1..63: mol_type = other RNA
ggtcccccgactctggctttcccccaggtctacatgttcctggtgaaatggcaggacttatcg

SEQ ID NO: 6510 - RNA, 63 nt, synthetic construct
  source 1..63: mol_type = other RNA
ggtcccccgactctggctttcccccaggtgtacatgttcctggtgaaatggcaggatttatcg

SEQ ID NO: 6511 - RNA, 63 nt, synthetic construct
  source 1..63: mol_type = other RNA
ggtcccccgactctggctttcccccaggtgtacatgttcctggtgaaatggcaggatttgtcg

SEQ ID NO: 6512 - RNA, 64 nt, synthetic construct
  source 1..64: mol_type = other RNA
gggtcccccgactctggctttcccccaggtatacatgttcctggtgaaatggcaggacctgtcg

SEQ ID NO: 6513 - RNA, 64 nt, synthetic construct
  source 1..64: mol_type = other RNA
gggtcccccgactctggctttcccccaggtttacatgttcctggtgaaatggcaggacttgtcg

SEQ ID NO: 6514 - RNA, 64 nt, synthetic construct
  source 1..64: mol_type = other RNA
gggtcccccgactctggctttcccccaggtttacatgttcctggtgaaatggcaggatttgtcg

SEQ ID NO: 6515 - RNA, 64 nt, synthetic construct
  source 1..64: mol_type = other RNA
gggtcccccgactctggctttcccccaggtttacatgttcctggtgaaatggcaggatttatcg

SEQ ID NO: 6516 - RNA, 64 nt, synthetic construct
  source 1..64: mol_type = other RNA
gggtcccccgactctggctttcccccaggtttacatgttcctggtgaaatggcaggacctgtcg

SEQ ID NO: 6517 - RNA, 64 nt, synthetic construct
  source 1..64: mol_type = other RNA
gggtcccccgactctggctttcccccaggtgtacatgttcctggtgaaatggcaggatttgtcg

SEQ ID NO: 6518 - RNA, 64 nt, synthetic construct
  source 1..64: mol_type = other RNA
gggtcccccgactctggctttcccccaggtgtacatgttcctggtgaaatggcaggatttatcg

SEQ ID NO: 6519 - RNA, 64 nt, synthetic construct
  source 1..64: mol_type = other RNA
gggtcccccgactctggctttcccccaggtgtacatgttcctggtgaaatggcaggacttgtcg

SEQ ID NO: 6520 - RNA, 64 nt, synthetic construct
  source 1..64: mol_type = other RNA
gggtcccccgactctggctttcccccaggtatacatgttcctggtgaaatggcaggatttgtcg

SEQ ID NO: 6521 - RNA, 64 nt, synthetic construct
  source 1..64: mol_type = other RNA
gggtcccccgactctggctttcccccaggtgtacatgttcctggtgaaatggcaggacctgtcg

SEQ ID NO: 6522 - RNA, 64 nt, synthetic construct
  source 1..64: mol_type = other RNA
gggtcccccgactctggctttcccccaggtatacatgttcctggtgaaatggcaggacttgtcg

SEQ ID NO: 6523 - RNA, 64 nt, synthetic construct
  source 1..64: mol_type = other RNA
gggtcccccgactctggctttcccccaggtctacatgttcctggtgaaatggcaggatttgtcg

SEQ ID NO: 6524 - RNA, 64 nt, synthetic construct
  source 1..64: mol_type = other RNA
gggtcccccgactctggctttcccccaggtatacatgttcctggtgaaatggcaggatttatcg

SEQ ID NO: 6525 - RNA, 64 nt, synthetic construct
  source 1..64: mol_type = other RNA
gggtcccccgactctggctttcccccaggtatacatgttcctggtgaaatggcaggatctgtcg

SEQ ID NO: 6526 - RNA, 64 nt, synthetic construct
  source 1..64: mol_type = other RNA
gggtcccccgactctggctttcccccaggtttacatgttcctggtgaaatggcaggacttatcg

SEQ ID NO: 6527 - RNA, 64 nt, synthetic construct
  source 1..64: mol_type = other RNA
gggtcccccgactctggctttcccccaggtctacatgttcctggtgaaatggcaggatttatcg

SEQ ID NO: 6528 - RNA, 64 nt, synthetic construct
  source 1..64: mol_type = other RNA
gggtcccccgactctggctttcccccaggtatacatgttcctggtgaaatggcaggacttatcg

SEQ ID NO: 6529 - RNA, 64 nt, synthetic construct
  source 1..64: mol_type = other RNA
gggtcccccgactctggctttcccccaggtctacatgttcctggtgaaatggcaggatctgtcg

SEQ ID NO: 6530 - RNA, 64 nt, synthetic construct
  source 1..64: mol_type = other RNA
gggtcccccgactctggctttcccccaggtgtacatgttcctggtgaaatggcaggatctgtcg

SEQ ID NO: 6531 - RNA, 64 nt, synthetic construct
  source 1..64: mol_type = other RNA
gggtcccccgactctggctttcccccaggtttacatgttcctggtgaaatggcaggatctgtcg

SEQ ID NO: 6532 - RNA, 64 nt, synthetic construct
  source 1..64: mol_type = other RNA
gggtcccccgactctggctttcccccaggtctacatgttcctggtgaaatggcaggacctgtcg

SEQ ID NO: 6533 - RNA, 64 nt, synthetic construct
  source 1..64: mol_type = other RNA
gggtcccccgactctggctttcccccaggtctacatgttcctggtgaaatggcaggacttgtcg

SEQ ID NO: 6534 - RNA, 64 nt, synthetic construct
  source 1..64: mol_type = other RNA
gggtcccccgactctggctttcccccaggtctacatgttcctggtgaaatggcaggacttatcg

SEQ ID NO: 6535 - RNA, 64 nt, synthetic construct
  source 1..64: mol_type = other RNA
gggtcccccgactctggctttcccccaggtgtacatgttcctggtgaaatggcaggacttatcg

SEQ ID NO: 6536 - RNA, 65 nt, synthetic construct
  source 1..65: mol_type = other RNA
ggggtcccccgactctggctttcccccaggtctacatgttcctggtgaaatggcaggacctgtcg

SEQ ID NO: 6537 - RNA, 65 nt, synthetic construct
  source 1..65: mol_type = other RNA
ggggtcccccgactctggctttcccccaggtgtacatgttcctggtgaaatggcaggacttgtcg

SEQ ID NO: 6538 - RNA, 65 nt, synthetic construct
  source 1..65: mol_type = other RNA
ggggtcccccgactctggctttcccccaggtgtacatgttcctggtgaaatggcaggacttatcg

SEQ ID NO: 6539 - RNA, 65 nt, synthetic construct
  source 1..65: mol_type = other RNA
ggggtcccccgactctggctttcccccaggtgtacatgttcctggtgaaatggcaggacctgtcg

SEQ ID NO: 6540 - RNA, 65 nt, synthetic construct
  source 1..65: mol_type = other RNA
ggggtcccccgactctggctttcccccaggtctacatgttcctggtgaaatggcaggatttgtcg

SEQ ID NO: 6541 - RNA, 65 nt, synthetic construct
  source 1..65: mol_type = other RNA
ggggtcccccgactctggctttcccccaggtgtacatgttcctggtgaaatggcaggatttgtcg

SEQ ID NO: 6542 - RNA, 65 nt, synthetic construct
  source 1..65: mol_type = other RNA
ggggtcccccgactctggctttcccccaggtttacatgttcctggtgaaatggcaggacctgtcg

SEQ ID NO: 6543 - RNA, 65 nt, synthetic construct
  source 1..65: mol_type = other RNA
ggggtcccccgactctggctttcccccaggtatacatgttcctggtgaaatggcaggacctgtcg

SEQ ID NO: 6544 - RNA, 65 nt, synthetic construct
  source 1..65: mol_type = other RNA
ggggtcccccgactctggctttcccccaggtctacatgttcctggtgaaatggcaggacttatcg

SEQ ID NO: 6545 - RNA, 65 nt, synthetic construct
  source 1..65: mol_type = other RNA
ggggtcccccgactctggctttcccccaggtatacatgttcctggtgaaatggcaggatttgtcg

SEQ ID NO: 6546 - RNA, 65 nt, synthetic construct
  source 1..65: mol_type = other RNA
ggggtcccccgactctggctttcccccaggtttacatgttcctggtgaaatggcaggatttgtcg

SEQ ID NO: 6547 - RNA, 65 nt, synthetic construct
  source 1..65: mol_type = other RNA
ggggtcccccgactctggctttcccccaggtatacatgttcctggtgaaatggcaggatttatcg

SEQ ID NO: 6548 - RNA, 65 nt, synthetic construct
  source 1..65: mol_type = other RNA
ggggtcccccgactctggctttcccccaggtatacatgttcctggtgaaatggcaggatctgtcg

SEQ ID NO: 6549 - RNA, 65 nt, synthetic construct
  source 1..65: mol_type = other RNA
ggggtcccccgactctggctttcccccaggtatacatgttcctggtgaaatggcaggacttgtcg

SEQ ID NO: 6550 - RNA, 65 nt, synthetic construct
  source 1..65: mol_type = other RNA
ggggtcccccgactctggctttcccccaggtatacatgttcctggtgaaatggcaggacttatcg

SEQ ID NO: 6551 - RNA, 65 nt, synthetic construct
  source 1..65: mol_type = other RNA
ggggtcccccgactctggctttcccccaggtctacatgttcctggtgaaatggcaggacttgtcg

SEQ ID NO: 6552 - RNA, 65 nt, synthetic construct
  source 1..65: mol_type = other RNA
ggggtcccccgactctggctttcccccaggtttacatgttcctggtgaaatggcaggacttgtcg

SEQ ID NO: 6553 - RNA, 65 nt, synthetic construct
  source 1..65: mol_type = other RNA
ggggtcccccgactctggctttcccccaggtttacatgttcctggtgaaatggcaggatctgtcg

SEQ ID NO: 6554 - RNA, 65 nt, synthetic construct
  source 1..65: mol_type = other RNA
ggggtcccccgactctggctttcccccaggtttacatgttcctggtgaaatggcaggatttatcg

SEQ ID NO: 6555 - RNA, 65 nt, synthetic construct
  source 1..65: mol_type = other RNA
ggggtcccccgactctggctttcccccaggtttacatgttcctggtgaaatggcaggacttatcg

SEQ ID NO: 6556 - RNA, 65 nt, synthetic construct
  source 1..65: mol_type = other RNA
ggggtcccccgactctggctttcccccaggtgtacatgttcctggtgaaatggcaggatctgtcg

SEQ ID NO: 6557 - RNA, 65 nt, synthetic construct
  source 1..65: mol_type = other RNA
ggggtcccccgactctggctttcccccaggtctacatgttcctggtgaaatggcaggatttatcg

SEQ ID NO: 6558 - RNA, 65 nt, synthetic construct
  source 1..65: mol_type = other RNA
ggggtcccccgactctggctttcccccaggtctacatgttcctggtgaaatggcaggatctgtcg

SEQ ID NO: 6559 - RNA, 65 nt, synthetic construct
  source 1..65: mol_type = other RNA
ggggtcccccgactctggctttcccccaggtgtacatgttcctggtgaaatggcaggatttatcg

SEQ ID NO: 6560 - RNA, 66 nt, synthetic construct
  source 1..66: mol_type = other RNA
tggggtcccccgactctggctttcccccaggtatacatgttcctggtgaaatggcaggatttatcg

SEQ ID NO: 6561 - RNA, 66 nt, synthetic construct
  source 1..66: mol_type = other RNA
tggggtcccccgactctggctttcccccaggtatacatgttcctggtgaaatggcaggatctgtcg

SEQ ID NO: 6562 - RNA, 66 nt, synthetic construct
  source 1..66: mol_type = other RNA
tggggtcccccgactctggctttcccccaggtctacatgttcctggtgaaatggcaggatttgtcg

SEQ ID NO: 6563 - RNA, 66 nt, synthetic construct
  source 1..66: mol_type = other RNA
tggggtcccccgactctggctttcccccaggtatacatgttcctggtgaaatggcaggatttgtcg

SEQ ID NO: 6564 - RNA, 66 nt, synthetic construct
  source 1..66: mol_type = other RNA
tggggtcccccgactctggctttcccccaggtatacatgttcctggtgaaatggcaggacctgtcg

SEQ ID NO: 6565 - RNA, 66 nt, synthetic construct
  source 1..66: mol_type = other RNA
tggggtcccccgactctggctttcccccaggtgtacatgttcctggtgaaatggcaggatctgtcg

SEQ ID NO: 6566 - RNA, 66 nt, synthetic construct
  source 1..66: mol_type = other RNA
tggggtcccccgactctggctttcccccaggtgtacatgttcctggtgaaatggcaggatttatcg

SEQ ID NO: 6567 - RNA, 66 nt, synthetic construct
  source 1..66: mol_type = other RNA
tggggtcccccgactctggctttcccccaggtgtacatgttcctggtgaaatggcaggatttgtcg

SEQ ID NO: 6568 - RNA, 66 nt, synthetic construct
  source 1..66: mol_type = other RNA
tggggtcccccgactctggctttcccccaggtttacatgttcctggtgaaatggcaggatttgtcg

SEQ ID NO: 6569 - RNA, 66 nt, synthetic construct
  source 1..66: mol_type = other RNA
tggggtcccccgactctggctttcccccaggtttacatgttcctggtgaaatggcaggatttatcg

SEQ ID NO: 6570 - RNA, 66 nt, synthetic construct
  source 1..66: mol_type = other RNA
tggggtcccccgactctggctttcccccaggtttacatgttcctggtgaaatggcaggatctgtcg

SEQ ID NO: 6571 - RNA, 66 nt, synthetic construct
  source 1..66: mol_type = other RNA
tggggtcccccgactctggctttcccccaggtttacatgttcctggtgaaatggcaggacttgtcg

SEQ ID NO: 6572 - RNA, 66 nt, synthetic construct
  source 1..66: mol_type = other RNA
tggggtcccccgactctggctttcccccaggtttacatgttcctggtgaaatggcaggacttatcg

SEQ ID NO: 6573 - RNA, 66 nt, synthetic construct
  source 1..66: mol_type = other RNA
tggggtcccccgactctggctttcccccaggtttacatgttcctggtgaaatggcaggacctgtcg

SEQ ID NO: 6574 - RNA, 66 nt, synthetic construct
  source 1..66: mol_type = other RNA
tggggtcccccgactctggctttcccccaggtatacatgttcctggtgaaatggcaggacttatcg

SEQ ID NO: 6575 - RNA, 66 nt, synthetic construct
  source 1..66: mol_type = other RNA
tggggtcccccgactctggctttcccccaggtatacatgttcctggtgaaatggcaggacttgtcg

SEQ ID NO: 6576 - RNA, 66 nt, synthetic construct
  source 1..66: mol_type = other RNA
tggggtcccccgactctggctttcccccaggtgtacatgttcctggtgaaatggcaggacttgtcg

SEQ ID NO: 6577 - RNA, 66 nt, synthetic construct
  source 1..66: mol_type = other RNA
tggggtcccccgactctggctttcccccaggtgtacatgttcctggtgaaatggcaggacctgtcg

SEQ ID NO: 6578 - RNA, 66 nt, synthetic construct
  source 1..66: mol_type = other RNA
tggggtcccccgactctggctttcccccaggtgtacatgttcctggtgaaatggcaggacttatcg

SEQ ID NO: 6579 - RNA, 66 nt, synthetic construct
  source 1..66: mol_type = other RNA
tggggtcccccgactctggctttcccccaggtctacatgttcctggtgaaatggcaggatttatcg

SEQ ID NO: 6580 - RNA, 66 nt, synthetic construct
  source 1..66: mol_type = other RNA
tggggtcccccgactctggctttcccccaggtctacatgttcctggtgaaatggcaggatctgtcg

SEQ ID NO: 6581 - RNA, 66 nt, synthetic construct
  source 1..66: mol_type = other RNA
tggggtcccccgactctggctttcccccaggtctacatgttcctggtgaaatggcaggacttgtcg

SEQ ID NO: 6582 - RNA, 66 nt, synthetic construct
  source 1..66: mol_type = other RNA
tggggtcccccgactctggctttcccccaggtctacatgttcctggtgaaatggcaggacttatcg

SEQ ID NO: 6583 - RNA, 66 nt, synthetic construct
  source 1..66: mol_type = other RNA
tggggtcccccgactctggctttcccccaggtctacatgttcctggtgaaatggcaggacctgtcg

SEQ ID NO: 6584 - RNA, 67 nt, synthetic construct
  source 1..67: mol_type = other RNA
atggggtcccccgactctggctttcccccaggtatacatgttcctggtgaaatggcaggacctgtcg

SEQ ID NO: 6585 - RNA, 67 nt, synthetic construct
  source 1..67: mol_type = other RNA
atggggtcccccgactctggctttcccccaggtatacatgttcctggtgaaatggcaggatctgtcg

SEQ ID NO: 6586 - RNA, 67 nt, synthetic construct
  source 1..67: mol_type = other RNA
atggggtcccccgactctggctttcccccaggtatacatgttcctggtgaaatggcaggacttgtcg

SEQ ID NO: 6587 - RNA, 67 nt, synthetic construct
  source 1..67: mol_type = other RNA
atggggtcccccgactctggctttcccccaggtatacatgttcctggtgaaatggcaggacttatcg

SEQ ID NO: 6588 - RNA, 67 nt, synthetic construct
  source 1..67: mol_type = other RNA
atggggtcccccgactctggctttcccccaggtctacatgttcctggtgaaatggcaggatttgtcg

SEQ ID NO: 6589 - RNA, 67 nt, synthetic construct
  source 1..67: mol_type = other RNA
atggggtcccccgactctggctttcccccaggtctacatgttcctggtgaaatggcaggatttatcg

SEQ ID NO: 6590 - RNA, 67 nt, synthetic construct
  source 1..67: mol_type = other RNA
atggggtcccccgactctggctttcccccaggtatacatgttcctggtgaaatggcaggatttatcg

SEQ ID NO: 6591 - RNA, 67 nt, synthetic construct
  source 1..67: mol_type = other RNA
atggggtcccccgactctggctttcccccaggtctacatgttcctggtgaaatggcaggatctgtcg

SEQ ID NO: 6592 - RNA, 67 nt, synthetic construct
  source 1..67: mol_type = other RNA
atggggtcccccgactctggctttcccccaggtttacatgttcctggtgaaatggcaggacttatcg

SEQ ID NO: 6593 - RNA, 67 nt, synthetic construct
  source 1..67: mol_type = other RNA
atggggtcccccgactctggctttcccccaggtctacatgttcctggtgaaatggcaggacctgtcg

SEQ ID NO: 6594 - RNA, 67 nt, synthetic construct
  source 1..67: mol_type = other RNA
atggggtcccccgactctggctttcccccaggtgtacatgttcctggtgaaatggcaggacttatcg

SEQ ID NO: 6595 - RNA, 67 nt, synthetic construct
  source 1..67: mol_type = other RNA
atggggtcccccgactctggctttcccccaggtttacatgttcctggtgaaatggcaggatttatcg

SEQ ID NO: 6596 - RNA, 67 nt, synthetic construct
  source 1..67: mol_type = other RNA
atggggtcccccgactctggctttcccccaggtttacatgttcctggtgaaatggcaggacttgtcg

SEQ ID NO: 6597 - RNA, 67 nt, synthetic construct
  source 1..67: mol_type = other RNA
atggggtcccccgactctggctttcccccaggtttacatgttcctggtgaaatggcaggatctgtcg

SEQ ID NO: 6598 - RNA, 67 nt, synthetic construct
  source 1..67: mol_type = other RNA
atggggtcccccgactctggctttcccccaggtttacatgttcctggtgaaatggcaggacctgtcg

SEQ ID NO: 6599 - RNA, 67 nt, synthetic construct
  source 1..67: mol_type = other RNA
atggggtcccccgactctggctttcccccaggtgtacatgttcctggtgaaatggcaggatttatcg

SEQ ID NO: 6600 - RNA, 67 nt, synthetic construct
  source 1..67: mol_type = other RNA
atggggtcccccgactctggctttcccccaggtgtacatgttcctggtgaaatggcaggatctgtcg

SEQ ID NO: 6601 - RNA, 67 nt, synthetic construct
  source 1..67: mol_type = other RNA
atggggtcccccgactctggctttcccccaggtgtacatgttcctggtgaaatggcaggacttgtcg

SEQ ID NO: 6602 - RNA, 67 nt, synthetic construct
  source 1..67: mol_type = other RNA
atggggtcccccgactctggctttcccccaggtgtacatgttcctggtgaaatggcaggatttgtcg

SEQ ID NO: 6603 - RNA, 67 nt, synthetic construct
  source 1..67: mol_type = other RNA
atggggtcccccgactctggctttcccccaggtatacatgttcctggtgaaatggcaggatttgtcg

SEQ ID NO: 6604 - RNA, 67 nt, synthetic construct
  source 1..67: mol_type = other RNA
atggggtcccccgactctggctttcccccaggtttacatgttcctggtgaaatggcaggatttgtcg

SEQ ID NO: 6605 - RNA, 67 nt, synthetic construct
  source 1..67: mol_type = other RNA
atggggtcccccgactctggctttcccccaggtctacatgttcctggtgaaatggcaggacttgtcg

SEQ ID NO: 6606 - RNA, 67 nt, synthetic construct
  source 1..67: mol_type = other RNA
atggggtcccccgactctggctttcccccaggtgtacatgttcctggtgaaatggcaggacctgtcg

SEQ ID NO: 6607 - RNA, 67 nt, synthetic construct
  source 1..67: mol_type = other RNA
atggggtcccccgactctggctttcccccaggtctacatgttcctggtgaaatggcaggacttatcg

SEQ ID NO: 6608 - RNA, 68 nt, synthetic construct
  source 1..68: mol_type = other RNA
aatggggtcccccgactctggctttcccccaggtctacatgttcctggtgaaatggcaggatttgtcg

SEQ ID NO: 6609 - RNA, 68 nt, synthetic construct
  source 1..68: mol_type = other RNA
aatggggtcccccgactctggctttcccccaggtctacatgttcctggtgaaatggcaggacttgtcg

SEQ ID NO: 6610 - RNA, 68 nt, synthetic construct
  source 1..68: mol_type = other RNA
aatggggtcccccgactctggctttcccccaggtgtacatgttcctggtgaaatggcaggacctgtcg

SEQ ID NO: 6611 - RNA, 68 nt, synthetic construct
  source 1..68: mol_type = other RNA
aatggggtcccccgactctggctttcccccaggtctacatgttcctggtgaaatggcaggatttatcg

SEQ ID NO: 6612 - RNA, 68 nt, synthetic construct
  source 1..68: mol_type = other RNA
aatggggtcccccgactctggctttcccccaggtctacatgttcctggtgaaatggcaggatctgtcg

SEQ ID NO: 6613 - RNA, 68 nt, synthetic construct
  source 1..68: mol_type = other RNA
aatggggtcccccgactctggctttcccccaggtatacatgttcctggtgaaatggcaggacctgtcg

SEQ ID NO: 6614 - RNA, 68 nt, synthetic construct
  source 1..68: mol_type = other RNA
aatggggtcccccgactctggctttcccccaggtatacatgttcctggtgaaatggcaggacttatcg

SEQ ID NO: 6615 - RNA, 68 nt, synthetic construct
  source 1..68: mol_type = other RNA
aatggggtcccccgactctggctttcccccaggtatacatgttcctggtgaaatggcaggacttgtcg

SEQ ID NO: 6616 - RNA, 68 nt, synthetic construct
  source 1..68: mol_type = other RNA
aatggggtcccccgactctggctttcccccaggtatacatgttcctggtgaaatggcaggatctgtcg

SEQ ID NO: 6617 - RNA, 68 nt, synthetic construct
  source 1..68: mol_type = other RNA
aatggggtcccccgactctggctttcccccaggtatacatgttcctggtgaaatggcaggatttatcg

SEQ ID NO: 6618 - RNA, 68 nt, synthetic construct
  source 1..68: mol_type = other RNA
aatggggtcccccgactctggctttcccccaggtatacatgttcctggtgaaatggcaggatttgtcg

SEQ ID NO: 6619 - RNA, 68 nt, synthetic construct
  source 1..68: mol_type = other RNA
aatggggtcccccgactctggctttcccccaggtctacatgttcctggtgaaatggcaggacctgtcg

SEQ ID NO: 6620 - RNA, 68 nt, synthetic construct
  source 1..68: mol_type = other RNA
aatggggtcccccgactctggctttcccccaggtctacatgttcctggtgaaatggcaggacttatcg

SEQ ID NO: 6621 - RNA, 68 nt, synthetic construct
  source 1..68: mol_type = other RNA
aatggggtcccccgactctggctttcccccaggtttacatgttcctggtgaaatggcaggatctgtcg

SEQ ID NO: 6622 - RNA, 68 nt, synthetic construct
  source 1..68: mol_type = other RNA
aatggggtcccccgactctggctttcccccaggtttacatgttcctggtgaaatggcaggatttgtcg

SEQ ID NO: 6623 - RNA, 68 nt, synthetic construct
  source 1..68: mol_type = other RNA
aatggggtcccccgactctggctttcccccaggtgtacatgttcctggtgaaatggcaggacttatcg

SEQ ID NO: 6624 - RNA, 68 nt, synthetic construct
  source 1..68: mol_type = other RNA
aatggggtcccccgactctggctttcccccaggtgtacatgttcctggtgaaatggcaggacttgtcg

SEQ ID NO: 6625 - RNA, 68 nt, synthetic construct
  source 1..68: mol_type = other RNA
aatggggtcccccgactctggctttcccccaggtgtacatgttcctggtgaaatggcaggatctgtcg

SEQ ID NO: 6626 - RNA, 68 nt, synthetic construct
  source 1..68: mol_type = other RNA
aatggggtcccccgactctggctttcccccaggtgtacatgttcctggtgaaatggcaggatttatcg

SEQ ID NO: 6627 - RNA, 68 nt, synthetic construct
  source 1..68: mol_type = other RNA
aatggggtcccccgactctggctttcccccaggtgtacatgttcctggtgaaatggcaggatttgtcg

SEQ ID NO: 6628 - RNA, 68 nt, synthetic construct
  source 1..68: mol_type = other RNA
aatggggtcccccgactctggctttcccccaggtttacatgttcctggtgaaatggcaggacctgtcg

SEQ ID NO: 6629 - RNA, 68 nt, synthetic construct
  source 1..68: mol_type = other RNA
aatggggtcccccgactctggctttcccccaggtttacatgttcctggtgaaatggcaggacttatcg

SEQ ID NO: 6630 - RNA, 68 nt, synthetic construct
  source 1..68: mol_type = other RNA
aatggggtcccccgactctggctttcccccaggtttacatgttcctggtgaaatggcaggacttgtcg

SEQ ID NO: 6631 - RNA, 68 nt, synthetic construct
  source 1..68: mol_type = other RNA
aatggggtcccccgactctggctttcccccaggtttacatgttcctggtgaaatggcaggatttatcg

SEQ ID NO: 6632 - RNA, 69 nt, synthetic construct
  source 1..69: mol_type = other RNA
gaatggggtcccccgactctggctttcccccaggtttacatgttcctggtgaaatggcaggacttatcg

SEQ ID NO: 6633 - RNA, 69 nt, synthetic construct
  source 1..69: mol_type = other RNA
gaatggggtcccccgactctggctttcccccaggtgtacatgttcctggtgaaatggcaggatctgtcg

SEQ ID NO: 6634 - RNA, 69 nt, synthetic construct
  source 1..69: mol_type = other RNA
gaatggggtcccccgactctggctttcccccaggtttacatgttcctggtgaaatggcaggatttatcg

SEQ ID NO: 6635 - RNA, 69 nt, synthetic construct
  source 1..69: mol_type = other RNA
gaatggggtcccccgactctggctttcccccaggtttacatgttcctggtgaaatggcaggatctgtcg

SEQ ID NO: 6636 - RNA, 69 nt, synthetic construct
  source 1..69: mol_type = other RNA
gaatggggtcccccgactctggctttcccccaggtttacatgttcctggtgaaatggcaggacttgtcg

SEQ ID NO: 6637 - RNA, 69 nt, synthetic construct
  source 1..69: mol_type = other RNA
gaatggggtcccccgactctggctttcccccaggtgtacatgttcctggtgaaatggcaggacttgtcg

SEQ ID NO: 6638 - RNA, 69 nt, synthetic construct
  source 1..69: mol_type = other RNA
gaatggggtcccccgactctggctttcccccaggtttacatgttcctggtgaaatggcaggacctgtcg

SEQ ID NO: 6639 - RNA, 69 nt, synthetic construct
  source 1..69: mol_type = other RNA
gaatggggtcccccgactctggctttcccccaggtgtacatgttcctggtgaaatggcaggatttgtcg

SEQ ID NO: 6640 - RNA, 69 nt, synthetic construct
  source 1..69: mol_type = other RNA
gaatggggtcccccgactctggctttcccccaggtgtacatgttcctggtgaaatggcaggatttatcg

SEQ ID NO: 6641 - RNA, 69 nt, synthetic construct
  source 1..69: mol_type = other RNA
gaatggggtcccccgactctggctttcccccaggtgtacatgttcctggtgaaatggcaggacttatcg

SEQ ID NO: 6642 - RNA, 69 nt, synthetic construct
  source 1..69: mol_type = other RNA
gaatggggtcccccgactctggctttcccccaggtgtacatgttcctggtgaaatggcaggacctgtcg

SEQ ID NO: 6643 - RNA, 69 nt, synthetic construct
  source 1..69: mol_type = other RNA
gaatggggtcccccgactctggctttcccccaggtctacatgttcctggtgaaatggcaggatctgtcg

SEQ ID NO: 6644 - RNA, 69 nt, synthetic construct
  source 1..69: mol_type = other RNA
gaatggggtcccccgactctggctttcccccaggtctacatgttcctggtgaaatggcaggacttatcg

SEQ ID NO: 6645 - RNA, 69 nt, synthetic construct
  source 1..69: mol_type = other RNA
gaatggggtcccccgactctggctttcccccaggtctacatgttcctggtgaaatggcaggatttgtcg

SEQ ID NO: 6646 - RNA, 69 nt, synthetic construct
  source 1..69: mol_type = other RNA
gaatggggtcccccgactctggctttcccccaggtatacatgttcctggtgaaatggcaggatttgtcg

SEQ ID NO: 6647 - RNA, 69 nt, synthetic construct
  source 1..69: mol_type = other RNA
gaatggggtcccccgactctggctttcccccaggtatacatgttcctggtgaaatggcaggatttatcg

SEQ ID NO: 6648 - RNA, 69 nt, synthetic construct
  source 1..69: mol_type = other RNA
gaatggggtcccccgactctggctttcccccaggtatacatgttcctggtgaaatggcaggatctgtcg

SEQ ID NO: 6649 - RNA, 69 nt, synthetic construct
  source 1..69: mol_type = other RNA
gaatggggtcccccgactctggctttcccccaggtctacatgttcctggtgaaatggcaggacctgtcg

SEQ ID NO: 6650 - RNA, 69 nt, synthetic construct
  source 1..69: mol_type = other RNA
gaatggggtcccccgactctggctttcccccaggtatacatgttcctggtgaaatggcaggacttgtcg

SEQ ID NO: 6651 - RNA, 69 nt, synthetic construct
  source 1..69: mol_type = other RNA
gaatggggtcccccgactctggctttcccccaggtatacatgttcctggtgaaatggcaggacttatcg

SEQ ID NO: 6652 - RNA, 69 nt, synthetic construct
  source 1..69: mol_type = other RNA
gaatggggtcccccgactctggctttcccccaggtatacatgttcctggtgaaatggcaggacctgtcg

SEQ ID NO: 6653 - RNA, 69 nt, synthetic construct
  source 1..69: mol_type = other RNA
gaatggggtcccccgactctggctttcccccaggtctacatgttcctggtgaaatggcaggatttatcg

SEQ ID NO: 6654 - RNA, 69 nt, synthetic construct
  source 1..69: mol_type = other RNA
gaatggggtcccccgactctggctttcccccaggtttacatgttcctggtgaaatggcaggatttgtcg

SEQ ID NO: 6655 - RNA, 69 nt, synthetic construct
  source 1..69: mol_type = other RNA
gaatggggtcccccgactctggctttcccccaggtctacatgttcctggtgaaatggcaggacttgtcg

SEQ ID NO: 6656 - RNA, 70 nt, synthetic construct
  source 1..70: mol_type = other RNA
tgaatggggtcccccgactctggctttcccccaggtctacatgttcctggtgaaatggcaggatttgtcg

SEQ ID NO: 6657 - RNA, 70 nt, synthetic construct
  source 1..70: mol_type = other RNA
tgaatggggtcccccgactctggctttcccccaggtctacatgttcctggtgaaatggcaggacttatcg

SEQ ID NO: 6658 - RNA, 70 nt, synthetic construct
  source 1..70: mol_type = other RNA
tgaatggggtcccccgactctggctttcccccaggtttacatgttcctggtgaaatggcaggacttgtcg

SEQ ID NO: 6659 - RNA, 70 nt, synthetic construct
  source 1..70: mol_type = other RNA
tgaatggggtcccccgactctggctttcccccaggtttacatgttcctggtgaaatggcaggatttgtcg

SEQ ID NO: 6660 - RNA, 70 nt, synthetic construct
  source 1..70: mol_type = other RNA
tgaatggggtcccccgactctggctttcccccaggtatacatgttcctggtgaaatggcaggacctgtcg

SEQ ID NO: 6661 - RNA, 70 nt, synthetic construct
  source 1..70: mol_type = other RNA
tgaatggggtcccccgactctggctttcccccaggtgtacatgttcctggtgaaatggcaggacctgtcg

SEQ ID NO: 6662 - RNA, 70 nt, synthetic construct
  source 1..70: mol_type = other RNA
tgaatggggtcccccgactctggctttcccccaggtatacatgttcctggtgaaatggcaggacttatcg

SEQ ID NO: 6663 - RNA, 70 nt, synthetic construct
  source 1..70: mol_type = other RNA
tgaatggggtcccccgactctggctttcccccaggtatacatgttcctggtgaaatggcaggacttgtcg

SEQ ID NO: 6664 - RNA, 70 nt, synthetic construct
  source 1..70: mol_type = other RNA
tgaatggggtcccccgactctggctttcccccaggtatacatgttcctggtgaaatggcaggatctgtcg

SEQ ID NO: 6665 - RNA, 70 nt, synthetic construct
  source 1..70: mol_type = other RNA
tgaatggggtcccccgactctggctttcccccaggtatacatgttcctggtgaaatggcaggatttatcg

SEQ ID NO: 6666 - RNA, 70 nt, synthetic construct
  source 1..70: mol_type = other RNA
tgaatggggtcccccgactctggctttcccccaggtatacatgttcctggtgaaatggcaggatttgtcg

SEQ ID NO: 6667 - RNA, 70 nt, synthetic construct
  source 1..70: mol_type = other RNA
tgaatggggtcccccgactctggctttcccccaggtctacatgttcctggtgaaatggcaggacctgtcg

SEQ ID NO: 6668 - RNA, 70 nt, synthetic construct
  source 1..70: mol_type = other RNA
tgaatggggtcccccgactctggctttcccccaggtctacatgttcctggtgaaatggcaggacttgtcg

SEQ ID NO: 6669 - RNA, 70 nt, synthetic construct
  source 1..70: mol_type = other RNA
tgaatggggtcccccgactctggctttcccccaggtctacatgttcctggtgaaatggcaggatctgtcg

SEQ ID NO: 6670 - RNA, 70 nt, synthetic construct
  source 1..70: mol_type = other RNA
tgaatggggtcccccgactctggctttcccccaggtctacatgttcctggtgaaatggcaggatttatcg

SEQ ID NO: 6671 - RNA, 70 nt, synthetic construct
  source 1..70: mol_type = other RNA
tgaatggggtcccccgactctggctttcccccaggtgtacatgttcctggtgaaatggcaggatttgtcg

SEQ ID NO: 6672 - RNA, 70 nt, synthetic construct
  source 1..70: mol_type = other RNA
tgaatggggtcccccgactctggctttcccccaggtgtacatgttcctggtgaaatggcaggacttatcg

SEQ ID NO: 6673 - RNA, 70 nt, synthetic construct
  source 1..70: mol_type = other RNA
tgaatggggtcccccgactctggctttcccccaggtgtacatgttcctggtgaaatggcaggacttgtcg

SEQ ID NO: 6674 - RNA, 70 nt, synthetic construct
  source 1..70: mol_type = other RNA
tgaatggggtcccccgactctggctttcccccaggtgtacatgttcctggtgaaatggcaggatctgtcg

SEQ ID NO: 6675 - RNA, 70 nt, synthetic construct
  source 1..70: mol_type = other RNA
tgaatggggtcccccgactctggctttcccccaggtgtacatgttcctggtgaaatggcaggatttatcg

SEQ ID NO: 6676 - RNA, 70 nt, synthetic construct
  source 1..70: mol_type = other RNA
tgaatggggtcccccgactctggctttcccccaggtttacatgttcctggtgaaatggcaggacctgtcg

SEQ ID NO: 6677 - RNA, 70 nt, synthetic construct
  source 1..70: mol_type = other RNA
tgaatggggtcccccgactctggctttcccccaggtttacatgttcctggtgaaatggcaggacttatcg

SEQ ID NO: 6678 - RNA, 70 nt, synthetic construct
  source 1..70: mol_type = other RNA
tgaatggggtcccccgactctggctttcccccaggtttacatgttcctggtgaaatggcaggatctgtcg

SEQ ID NO: 6679 - RNA, 70 nt, synthetic construct
  source 1..70: mol_type = other RNA
tgaatggggtcccccgactctggctttcccccaggtttacatgttcctggtgaaatggcaggatttatcg

SEQ ID NO: 6680 - RNA, 71 nt, synthetic construct
  source 1..71: mol_type = other RNA
ctgaatggggtcccccgactctggctttcccccaggtatacatgttcctggtgaaatggcaggatttatcg

SEQ ID NO: 6681 - RNA, 71 nt, synthetic construct
  source 1..71: mol_type = other RNA
ctgaatggggtcccccgactctggctttcccccaggtctacatgttcctggtgaaatggcaggacctgtcg

SEQ ID NO: 6682 - RNA, 71 nt, synthetic construct
  source 1..71: mol_type = other RNA
ctgaatggggtcccccgactctggctttcccccaggtgtacatgttcctggtgaaatggcaggatttatcg

SEQ ID NO: 6683 - RNA, 71 nt, synthetic construct
  source 1..71: mol_type = other RNA
ctgaatggggtcccccgactctggctttcccccaggtctacatgttcctggtgaaatggcaggacttatcg

SEQ ID NO: 6684 - RNA, 71 nt, synthetic construct
  source 1..71: mol_type = other RNA
ctgaatggggtcccccgactctggctttcccccaggtgtacatgttcctggtgaaatggcaggacttatcg

SEQ ID NO: 6685 - RNA, 71 nt, synthetic construct
  source 1..71: mol_type = other RNA
ctgaatggggtcccccgactctggctttcccccaggtgtacatgttcctggtgaaatggcaggacctgtcg

SEQ ID NO: 6686 - RNA, 71 nt, synthetic construct
  source 1..71: mol_type = other RNA
ctgaatggggtcccccgactctggctttcccccaggtttacatgttcctggtgaaatggcaggatttatcg

SEQ ID NO: 6687 - RNA, 71 nt, synthetic construct
  source 1..71: mol_type = other RNA
ctgaatggggtcccccgactctggctttcccccaggtttacatgttcctggtgaaatggcaggatctgtcg

SEQ ID NO: 6688 - RNA, 71 nt, synthetic construct
  source 1..71: mol_type = other RNA
ctgaatggggtcccccgactctggctttcccccaggtttacatgttcctggtgaaatggcaggacttgtcg

SEQ ID NO: 6689 - RNA, 71 nt, synthetic construct
  source 1..71: mol_type = other RNA
ctgaatggggtcccccgactctggctttcccccaggtttacatgttcctggtgaaatggcaggacttatcg

SEQ ID NO: 6690 - RNA, 71 nt, synthetic construct
  source 1..71: mol_type = other RNA
ctgaatggggtcccccgactctggctttcccccaggtttacatgttcctggtgaaatggcaggacctgtcg

SEQ ID NO: 6691 - RNA, 71 nt, synthetic construct
  source 1..71: mol_type = other RNA
ctgaatggggtcccccgactctggctttcccccaggtgtacatgttcctggtgaaatggcaggatttgtcg

SEQ ID NO: 6692 - RNA, 71 nt, synthetic construct
  source 1..71: mol_type = other RNA
ctgaatggggtcccccgactctggctttcccccaggtgtacatgttcctggtgaaatggcaggatctgtcg

SEQ ID NO: 6693 - RNA, 71 nt, synthetic construct
  source 1..71: mol_type = other RNA
ctgaatggggtcccccgactctggctttcccccaggtctacatgttcctggtgaaatggcaggatttgtcg

SEQ ID NO: 6694 - RNA, 71 nt, synthetic construct
  source 1..71: mol_type = other RNA
ctgaatggggtcccccgactctggctttcccccaggtatacatgttcctggtgaaatggcaggacttgtcg

SEQ ID NO: 6695 - RNA, 71 nt, synthetic construct
  source 1..71: mol_type = other RNA
ctgaatggggtcccccgactctggctttcccccaggtctacatgttcctggtgaaatggcaggatttatcg

SEQ ID NO: 6696 - RNA, 71 nt, synthetic construct
  source 1..71: mol_type = other RNA
ctgaatggggtcccccgactctggctttcccccaggtgtacatgttcctggtgaaatggcaggacttgtcg

SEQ ID NO: 6697 - RNA, 71 nt, synthetic construct
  source 1..71: mol_type = other RNA
ctgaatggggtcccccgactctggctttcccccaggtatacatgttcctggtgaaatggcaggacctgtcg

SEQ ID NO: 6698 - RNA, 71 nt, synthetic construct
  source 1..71: mol_type = other RNA
ctgaatggggtcccccgactctggctttcccccaggtatacatgttcctggtgaaatggcaggatctgtcg

SEQ ID NO: 6699 - RNA, 71 nt, synthetic construct
  source 1..71: mol_type = other RNA
ctgaatggggtcccccgactctggctttcccccaggtatacatgttcctggtgaaatggcaggatttgtcg

SEQ ID NO: 6700 - RNA, 71 nt, synthetic construct
  source 1..71: mol_type = other RNA
ctgaatggggtcccccgactctggctttcccccaggtctacatgttcctggtgaaatggcaggatctgtcg

SEQ ID NO: 6701 - RNA, 71 nt, synthetic construct
  source 1..71: mol_type = other RNA
ctgaatggggtcccccgactctggctttcccccaggtatacatgttcctggtgaaatggcaggacttatcg

SEQ ID NO: 6702 - RNA, 71 nt, synthetic construct
  source 1..71: mol_type = other RNA
ctgaatggggtcccccgactctggctttcccccaggtctacatgttcctggtgaaatggcaggacttgtcg

SEQ ID NO: 6703 - RNA, 71 nt, synthetic construct
  source 1..71: mol_type = other RNA
ctgaatggggtcccccgactctggctttcccccaggtttacatgttcctggtgaaatggcaggatttgtcg

SEQ ID NO: 6704 - RNA, 72 nt, synthetic construct
  source 1..72: mol_type = other RNA
gctgaatggggtcccccgactctggctttcccccaggtttacatgttcctggtgaaatggcaggacttgtcg

SEQ ID NO: 6705 - RNA, 72 nt, synthetic construct
  source 1..72: mol_type = other RNA
gctgaatggggtcccccgactctggctttcccccaggtttacatgttcctggtgaaatggcaggacttatcg

SEQ ID NO: 6706 - RNA, 72 nt, synthetic construct
  source 1..72: mol_type = other RNA
gctgaatggggtcccccgactctggctttcccccaggtttacatgttcctggtgaaatggcaggatttgtcg

SEQ ID NO: 6707 - RNA, 72 nt, synthetic construct
  source 1..72: mol_type = other RNA
gctgaatggggtcccccgactctggctttcccccaggtgtacatgttcctggtgaaatggcaggatttatcg

SEQ ID NO: 6708 - RNA, 72 nt, synthetic construct
  source 1..72: mol_type = other RNA
gctgaatggggtcccccgactctggctttcccccaggtatacatgttcctggtgaaatggcaggacttgtcg

SEQ ID NO: 6709 - RNA, 72 nt, synthetic construct
  source 1..72: mol_type = other RNA
gctgaatggggtcccccgactctggctttcccccaggtttacatgttcctggtgaaatggcaggacctgtcg

SEQ ID NO: 6710 - RNA, 72 nt, synthetic construct
  source 1..72: mol_type = other RNA
gctgaatggggtcccccgactctggctttcccccaggtatacatgttcctggtgaaatggcaggatttgtcg

SEQ ID NO: 6711 - RNA, 72 nt, synthetic construct
  source 1..72: mol_type = other RNA
gctgaatggggtcccccgactctggctttcccccaggtgtacatgttcctggtgaaatggcaggatttgtcg

SEQ ID NO: 6712 - RNA, 72 nt, synthetic construct
  source 1..72: mol_type = other RNA
gctgaatggggtcccccgactctggctttcccccaggtatacatgttcctggtgaaatggcaggatctgtcg

SEQ ID NO: 6713 - RNA, 72 nt, synthetic construct
  source 1..72: mol_type = other RNA
gctgaatggggtcccccgactctggctttcccccaggtgtacatgttcctggtgaaatggcaggatctgtcg

SEQ ID NO: 6714 - RNA, 72 nt, synthetic construct
  source 1..72: mol_type = other RNA
gctgaatggggtcccccgactctggctttcccccaggtgtacatgttcctggtgaaatggcaggacttgtcg

SEQ ID NO: 6715 - RNA, 72 nt, synthetic construct
  source 1..72: mol_type = other RNA
gctgaatggggtcccccgactctggctttcccccaggtctacatgttcctggtgaaatggcaggatctgtcg

SEQ ID NO: 6716 - RNA, 72 nt, synthetic construct
  source 1..72: mol_type = other RNA
gctgaatggggtcccccgactctggctttcccccaggtgtacatgttcctggtgaaatggcaggacttatcg

SEQ ID NO: 6717 - RNA, 72 nt, synthetic construct
  source 1..72: mol_type = other RNA
gctgaatggggtcccccgactctggctttcccccaggtctacatgttcctggtgaaatggcaggatttgtcg

SEQ ID NO: 6718 - RNA, 72 nt, synthetic construct
  source 1..72: mol_type = other RNA
gctgaatggggtcccccgactctggctttcccccaggtctacatgttcctggtgaaatggcaggatttatcg

SEQ ID NO: 6719 - RNA, 72 nt, synthetic construct
  source 1..72: mol_type = other RNA
gctgaatggggtcccccgactctggctttcccccaggtctacatgttcctggtgaaatggcaggacttgtcg

SEQ ID NO: 6720 - RNA, 72 nt, synthetic construct
  source 1..72: mol_type = other RNA
gctgaatggggtcccccgactctggctttcccccaggtctacatgttcctggtgaaatggcaggacttatcg

SEQ ID NO: 6721 - RNA, 72 nt, synthetic construct
  source 1..72: mol_type = other RNA
gctgaatggggtcccccgactctggctttcccccaggtctacatgttcctggtgaaatggcaggacctgtcg

SEQ ID NO: 6722 - RNA, 72 nt, synthetic construct
  source 1..72: mol_type = other RNA
gctgaatggggtcccccgactctggctttcccccaggtatacatgttcctggtgaaatggcaggatttatcg

SEQ ID NO: 6723 - RNA, 72 nt, synthetic construct
  source 1..72: mol_type = other RNA
gctgaatggggtcccccgactctggctttcccccaggtttacatgttcctggtgaaatggcaggatctgtcg

SEQ ID NO: 6724 - RNA, 72 nt, synthetic construct
  source 1..72: mol_type = other RNA
gctgaatggggtcccccgactctggctttcccccaggtttacatgttcctggtgaaatggcaggatttatcg

SEQ ID NO: 6725 - RNA, 72 nt, synthetic construct
  source 1..72: mol_type = other RNA
gctgaatggggtcccccgactctggctttcccccaggtatacatgttcctggtgaaatggcaggacttatcg

SEQ ID NO: 6726 - RNA, 72 nt, synthetic construct
  source 1..72: mol_type = other RNA
gctgaatggggtcccccgactctggctttcccccaggtatacatgttcctggtgaaatggcaggacctgtcg

SEQ ID NO: 6727 - RNA, 72 nt, synthetic construct
  source 1..72: mol_type = other RNA
gctgaatggggtcccccgactctggctttcccccaggtgtacatgttcctggtgaaatggcaggacctgtcg

SEQ ID NO: 6728 - RNA, 73 nt, synthetic construct
  source 1..73: mol_type = other RNA
ggctgaatggggtcccccgactctggctttcccccaggtctacatgttcctggtgaaatggcaggacttatcg

SEQ ID NO: 6729 - RNA, 73 nt, synthetic construct
  source 1..73: mol_type = other RNA
ggctgaatggggtcccccgactctggctttcccccaggtctacatgttcctggtgaaatggcaggacctgtcg

SEQ ID NO: 6730 - RNA, 73 nt, synthetic construct
  source 1..73: mol_type = other RNA
ggctgaatggggtcccccgactctggctttcccccaggtatacatgttcctggtgaaatggcaggatttgtcg

SEQ ID NO: 6731 - RNA, 73 nt, synthetic construct
  source 1..73: mol_type = other RNA
ggctgaatggggtcccccgactctggctttcccccaggtatacatgttcctggtgaaatggcaggatttatcg

SEQ ID NO: 6732 - RNA, 73 nt, synthetic construct
  source 1..73: mol_type = other RNA
ggctgaatggggtcccccgactctggctttcccccaggtttacatgttcctggtgaaatggcaggatttatcg

SEQ ID NO: 6733 - RNA, 73 nt, synthetic construct
  source 1..73: mol_type = other RNA
ggctgaatggggtcccccgactctggctttcccccaggtatacatgttcctggtgaaatggcaggacttgtcg

SEQ ID NO: 6734 - RNA, 73 nt, synthetic construct
  source 1..73: mol_type = other RNA
ggctgaatggggtcccccgactctggctttcccccaggtgtacatgttcctggtgaaatggcaggacctgtcg

SEQ ID NO: 6735 - RNA, 73 nt, synthetic construct
  source 1..73: mol_type = other RNA
ggctgaatggggtcccccgactctggctttcccccaggtctacatgttcctggtgaaatggcaggacttgtcg

SEQ ID NO: 6736 - RNA, 73 nt, synthetic construct
  source 1..73: mol_type = other RNA
ggctgaatggggtcccccgactctggctttcccccaggtctacatgttcctggtgaaatggcaggatctgtcg

SEQ ID NO: 6737 - RNA, 73 nt, synthetic construct
  source 1..73: mol_type = other RNA
ggctgaatggggtcccccgactctggctttcccccaggtctacatgttcctggtgaaatggcaggatttgtcg

SEQ ID NO: 6738 - RNA, 73 nt, synthetic construct
  source 1..73: mol_type = other RNA
ggctgaatggggtcccccgactctggctttcccccaggtatacatgttcctggtgaaatggcaggacttatcg

SEQ ID NO: 6739 - RNA, 73 nt, synthetic construct
  source 1..73: mol_type = other RNA
ggctgaatggggtcccccgactctggctttcccccaggtatacatgttcctggtgaaatggcaggacctgtcg

SEQ ID NO: 6740 - RNA, 73 nt, synthetic construct
  source 1..73: mol_type = other RNA
ggctgaatggggtcccccgactctggctttcccccaggtttacatgttcctggtgaaatggcaggatttgtcg

SEQ ID NO: 6741 - RNA, 73 nt, synthetic construct
  source 1..73: mol_type = other RNA
ggctgaatggggtcccccgactctggctttcccccaggtttacatgttcctggtgaaatggcaggatctgtcg

SEQ ID NO: 6742 - RNA, 73 nt, synthetic construct
  source 1..73: mol_type = other RNA
ggctgaatggggtcccccgactctggctttcccccaggtttacatgttcctggtgaaatggcaggacttgtcg

SEQ ID NO: 6743 - RNA, 73 nt, synthetic construct
  source 1..73: mol_type = other RNA
ggctgaatggggtcccccgactctggctttcccccaggtttacatgttcctggtgaaatggcaggacttatcg

SEQ ID NO: 6744 - RNA, 73 nt, synthetic construct
  source 1..73: mol_type = other RNA
ggctgaatggggtcccccgactctggctttcccccaggtttacatgttcctggtgaaatggcaggacctgtcg

SEQ ID NO: 6745 - RNA, 73 nt, synthetic construct
  source 1..73: mol_type = other RNA
ggctgaatggggtcccccgactctggctttcccccaggtgtacatgttcctggtgaaatggcaggatttgtcg

SEQ ID NO: 6746 - RNA, 73 nt, synthetic construct
  source 1..73: mol_type = other RNA
ggctgaatggggtcccccgactctggctttcccccaggtgtacatgttcctggtgaaatggcaggatttatcg

SEQ ID NO: 6747 - RNA, 73 nt, synthetic construct
  source 1..73: mol_type = other RNA
ggctgaatggggtcccccgactctggctttcccccaggtgtacatgttcctggtgaaatggcaggatctgtcg

SEQ ID NO: 6748 - RNA, 73 nt, synthetic construct
  source 1..73: mol_type = other RNA
ggctgaatggggtcccccgactctggctttcccccaggtgtacatgttcctggtgaaatggcaggacttgtcg

SEQ ID NO: 6749 - RNA, 73 nt, synthetic construct
  source 1..73: mol_type = other RNA
ggctgaatggggtcccccgactctggctttcccccaggtgtacatgttcctggtgaaatggcaggacttatcg

SEQ ID NO: 6750 - RNA, 73 nt, synthetic construct
  source 1..73: mol_type = other RNA
ggctgaatggggtcccccgactctggctttcccccaggtatacatgttcctggtgaaatggcaggatctgtcg

SEQ ID NO: 6751 - RNA, 73 nt, synthetic construct
  source 1..73: mol_type = other RNA
ggctgaatggggtcccccgactctggctttcccccaggtctacatgttcctggtgaaatggcaggatttatcg

SEQ ID NO: 6752 - RNA, 74 nt, synthetic construct
  source 1..74: mol_type = other RNA
aggctgaatggggtcccccgactctggctttcccccaggtatacatgttcctggtgaaatggcaggacctgtcg

SEQ ID NO: 6753 - RNA, 74 nt, synthetic construct
  source 1..74: mol_type = other RNA
aggctgaatggggtcccccgactctggctttcccccaggtgtacatgttcctggtgaaatggcaggacctgtcg

SEQ ID NO: 6754 - RNA, 74 nt, synthetic construct
  source 1..74: mol_type = other RNA
aggctgaatggggtcccccgactctggctttcccccaggtgtacatgttcctggtgaaatggcaggacttatcg

SEQ ID NO: 6755 - RNA, 74 nt, synthetic construct
  source 1..74: mol_type = other RNA
aggctgaatggggtcccccgactctggctttcccccaggtttacatgttcctggtgaaatggcaggatctgtcg

SEQ ID NO: 6756 - RNA, 74 nt, synthetic construct
  source 1..74: mol_type = other RNA
aggctgaatggggtcccccgactctggctttcccccaggtttacatgttcctggtgaaatggcaggacttatcg

SEQ ID NO: 6757 - RNA, 74 nt, synthetic construct
  source 1..74: mol_type = other RNA
aggctgaatggggtcccccgactctggctttcccccaggtttacatgttcctggtgaaatggcaggacctgtcg

SEQ ID NO: 6758 - RNA, 74 nt, synthetic construct
  source 1..74: mol_type = other RNA
aggctgaatggggtcccccgactctggctttcccccaggtttacatgttcctggtgaaatggcaggatttgtcg

SEQ ID NO: 6759 - RNA, 74 nt, synthetic construct
  source 1..74: mol_type = other RNA
aggctgaatggggtcccccgactctggctttcccccaggtgtacatgttcctggtgaaatggcaggatttgtcg

SEQ ID NO: 6760 - RNA, 74 nt, synthetic construct
  source 1..74: mol_type = other RNA
aggctgaatggggtcccccgactctggctttcccccaggtgtacatgttcctggtgaaatggcaggatttatcg

SEQ ID NO: 6761 - RNA, 74 nt, synthetic construct
  source 1..74: mol_type = other RNA
aggctgaatggggtcccccgactctggctttcccccaggtctacatgttcctggtgaaatggcaggatttgtcg

SEQ ID NO: 6762 - RNA, 74 nt, synthetic construct
  source 1..74: mol_type = other RNA
aggctgaatggggtcccccgactctggctttcccccaggtttacatgttcctggtgaaatggcaggatttatcg

SEQ ID NO: 6763 - RNA, 74 nt, synthetic construct
  source 1..74: mol_type = other RNA
aggctgaatggggtcccccgactctggctttcccccaggtctacatgttcctggtgaaatggcaggatttatcg

SEQ ID NO: 6764 - RNA, 74 nt, synthetic construct
  source 1..74: mol_type = other RNA
aggctgaatggggtcccccgactctggctttcccccaggtctacatgttcctggtgaaatggcaggacttgtcg

SEQ ID NO: 6765 - RNA, 74 nt, synthetic construct
  source 1..74: mol_type = other RNA
aggctgaatggggtcccccgactctggctttcccccaggtttacatgttcctggtgaaatggcaggacttgtcg

SEQ ID NO: 6766 - RNA, 74 nt, synthetic construct
  source 1..74: mol_type = other RNA
aggctgaatggggtcccccgactctggctttcccccaggtctacatgttcctggtgaaatggcaggatctgtcg

SEQ ID NO: 6767 - RNA, 74 nt, synthetic construct
  source 1..74: mol_type = other RNA
aggctgaatggggtcccccgactctggctttcccccaggtgtacatgttcctggtgaaatggcaggacttgtcg

SEQ ID NO: 6768 - RNA, 74 nt, synthetic construct
  source 1..74: mol_type = other RNA
aggctgaatggggtcccccgactctggctttcccccaggtgtacatgttcctggtgaaatggcaggatctgtcg

SEQ ID NO: 6769 - RNA, 74 nt, synthetic construct
  source 1..74: mol_type = other RNA
aggctgaatggggtcccccgactctggctttcccccaggtatacatgttcctggtgaaatggcaggacttatcg

SEQ ID NO: 6770 - RNA, 74 nt, synthetic construct
  source 1..74: mol_type = other RNA
aggctgaatggggtcccccgactctggctttcccccaggtatacatgttcctggtgaaatggcaggacttgtcg

SEQ ID NO: 6771 - RNA, 74 nt, synthetic construct
  source 1..74: mol_type = other RNA
aggctgaatggggtcccccgactctggctttcccccaggtatacatgttcctggtgaaatggcaggatctgtcg

SEQ ID NO: 6772 - RNA, 74 nt, synthetic construct
  source 1..74: mol_type = other RNA
aggctgaatggggtcccccgactctggctttcccccaggtatacatgttcctggtgaaatggcaggatttatcg

SEQ ID NO: 6773 - RNA, 74 nt, synthetic construct
  source 1..74: mol_type = other RNA
aggctgaatggggtcccccgactctggctttcccccaggtatacatgttcctggtgaaatggcaggatttgtcg

SEQ ID NO: 6774 - RNA, 74 nt, synthetic construct
  source 1..74: mol_type = other RNA
aggctgaatggggtcccccgactctggctttcccccaggtctacatgttcctggtgaaatggcaggacctgtcg

SEQ ID NO: 6775 - RNA, 74 nt, synthetic construct
  source 1..74: mol_type = other RNA
aggctgaatggggtcccccgactctggctttcccccaggtctacatgttcctggtgaaatggcaggacttatcg

SEQ ID NO: 6776 - RNA, 75 nt, synthetic construct
  source 1..75: mol_type = other RNA
gaggctgaatggggtcccccgactctggctttcccccaggtgtacatgttcctggtgaaatggcaggatctgtcg

SEQ ID NO: 6777 - RNA, 75 nt, synthetic construct
  source 1..75: mol_type = other RNA
gaggctgaatggggtcccccgactctggctttcccccaggtctacatgttcctggtgaaatggcaggacttatcg

SEQ ID NO: 6778 - RNA, 75 nt, synthetic construct
  source 1..75: mol_type = other RNA
gaggctgaatggggtcccccgactctggctttcccccaggtctacatgttcctggtgaaatggcaggatttatcg

SEQ ID NO: 6779 - RNA, 75 nt, synthetic construct
  source 1..75: mol_type = other RNA
gaggctgaatggggtcccccgactctggctttcccccaggtctacatgttcctggtgaaatggcaggacttgtcg

SEQ ID NO: 6780 - RNA, 75 nt, synthetic construct
  source 1..75: mol_type = other RNA
gaggctgaatggggtcccccgactctggctttcccccaggtctacatgttcctggtgaaatggcaggatctgtcg

SEQ ID NO: 6781 - RNA, 75 nt, synthetic construct
  source 1..75: mol_type = other RNA
gaggctgaatggggtcccccgactctggctttcccccaggtttacatgttcctggtgaaatggcaggatttgtcg

SEQ ID NO: 6782 - RNA, 75 nt, synthetic construct
  source 1..75: mol_type = other RNA
gaggctgaatggggtcccccgactctggctttcccccaggtttacatgttcctggtgaaatggcaggatttatcg

SEQ ID NO: 6783 - RNA, 75 nt, synthetic construct
  source 1..75: mol_type = other RNA
gaggctgaatggggtcccccgactctggctttcccccaggtttacatgttcctggtgaaatggcaggatctgtcg

SEQ ID NO: 6784 - RNA, 75 nt, synthetic construct
  source 1..75: mol_type = other RNA
gaggctgaatggggtcccccgactctggctttcccccaggtttacatgttcctggtgaaatggcaggacttgtcg

SEQ ID NO: 6785 - RNA, 75 nt, synthetic construct
  source 1..75: mol_type = other RNA
gaggctgaatggggtcccccgactctggctttcccccaggtttacatgttcctggtgaaatggcaggacttatcg

SEQ ID NO: 6786 - RNA, 75 nt, synthetic construct
  source 1..75: mol_type = other RNA
gaggctgaatggggtcccccgactctggctttcccccaggtttacatgttcctggtgaaatggcaggacctgtcg

SEQ ID NO: 6787 - RNA, 75 nt, synthetic construct
  source 1..75: mol_type = other RNA
gaggctgaatggggtcccccgactctggctttcccccaggtatacatgttcctggtgaaatggcaggacctgtcg

SEQ ID NO: 6788 - RNA, 75 nt, synthetic construct
  source 1..75: mol_type = other RNA
gaggctgaatggggtcccccgactctggctttcccccaggtgtacatgttcctggtgaaatggcaggatttatcg

SEQ ID NO: 6789 - RNA, 75 nt, synthetic construct
  source 1..75: mol_type = other RNA
gaggctgaatggggtcccccgactctggctttcccccaggtgtacatgttcctggtgaaatggcaggacttgtcg

SEQ ID NO: 6790 - RNA, 75 nt, synthetic construct
  source 1..75: mol_type = other RNA
gaggctgaatggggtcccccgactctggctttcccccaggtgtacatgttcctggtgaaatggcaggatttgtcg

SEQ ID NO: 6791 - RNA, 75 nt, synthetic construct
  source 1..75: mol_type = other RNA
gaggctgaatggggtcccccgactctggctttcccccaggtgtacatgttcctggtgaaatggcaggacctgtcg

SEQ ID NO: 6792 - RNA, 75 nt, synthetic construct
  source 1..75: mol_type = other RNA
gaggctgaatggggtcccccgactctggctttcccccaggtgtacatgttcctggtgaaatggcaggacttatcg

SEQ ID NO: 6793 - RNA, 75 nt, synthetic construct
  source 1..75: mol_type = other RNA
gaggctgaatggggtcccccgactctggctttcccccaggtatacatgttcctggtgaaatggcaggatctgtcg

SEQ ID NO: 6794 - RNA, 75 nt, synthetic construct
  source 1..75: mol_type = other RNA
gaggctgaatggggtcccccgactctggctttcccccaggtatacatgttcctggtgaaatggcaggatttatcg

SEQ ID NO: 6795 - RNA, 75 nt, synthetic construct
  source 1..75: mol_type = other RNA
gaggctgaatggggtcccccgactctggctttcccccaggtatacatgttcctggtgaaatggcaggatttgtcg

SEQ ID NO: 6796 - RNA, 75 nt, synthetic construct
  source 1..75: mol_type = other RNA
gaggctgaatggggtcccccgactctggctttcccccaggtctacatgttcctggtgaaatggcaggacctgtcg

SEQ ID NO: 6797 - RNA, 75 nt, synthetic construct
  source 1..75: mol_type = other RNA
gaggctgaatggggtcccccgactctggctttcccccaggtatacatgttcctggtgaaatggcaggacttgtcg

SEQ ID NO: 6798 - RNA, 75 nt, synthetic construct
  source 1..75: mol_type = other RNA
gaggctgaatggggtcccccgactctggctttcccccaggtatacatgttcctggtgaaatggcaggacttatcg

SEQ ID NO: 6799 - RNA, 75 nt, synthetic construct
  source 1..75: mol_type = other RNA
gaggctgaatggggtcccccgactctggctttcccccaggtctacatgttcctggtgaaatggcaggatttgtcg

SEQ ID NO: 6800 - RNA, 76 nt, synthetic construct
  source 1..76: mol_type = other RNA
ggaggctgaatggggtcccccgactctggctttcccccaggtttacatgttcctggtgaaatggcaggatttgtcg

SEQ ID NO: 6801 - RNA, 76 nt, synthetic construct
  source 1..76: mol_type = other RNA
ggaggctgaatggggtcccccgactctggctttcccccaggtttacatgttcctggtgaaatggcaggatttatcg

SEQ ID NO: 6802 - RNA, 76 nt, synthetic construct
  source 1..76: mol_type = other RNA
ggaggctgaatggggtcccccgactctggctttcccccaggtatacatgttcctggtgaaatggcaggatttgtcg

SEQ ID NO: 6803 - RNA, 76 nt, synthetic construct
  source 1..76: mol_type = other RNA
ggaggctgaatggggtcccccgactctggctttcccccaggtatacatgttcctggtgaaatggcaggatttatcg

SEQ ID NO: 6804 - RNA, 76 nt, synthetic construct
  source 1..76: mol_type = other RNA
ggaggctgaatggggtcccccgactctggctttcccccaggtatacatgttcctggtgaaatggcaggatctgtcg

SEQ ID NO: 6805 - RNA, 76 nt, synthetic construct
  source 1..76: mol_type = other RNA
ggaggctgaatggggtcccccgactctggctttcccccaggtatacatgttcctggtgaaatggcaggacttatcg

SEQ ID NO: 6806 - RNA, 76 nt, synthetic construct
  source 1..76: mol_type = other RNA
ggaggctgaatggggtcccccgactctggctttcccccaggtgtacatgttcctggtgaaatggcaggatttatcg

SEQ ID NO: 6807 - RNA, 76 nt, synthetic construct
  source 1..76: mol_type = other RNA
ggaggctgaatggggtcccccgactctggctttcccccaggtatacatgttcctggtgaaatggcaggacctgtcg

SEQ ID NO: 6808 - RNA, 76 nt, synthetic construct
  source 1..76: mol_type = other RNA
ggaggctgaatggggtcccccgactctggctttcccccaggtttacatgttcctggtgaaatggcaggatctgtcg

SEQ ID NO: 6809 - RNA, 76 nt, synthetic construct
  source 1..76: mol_type = other RNA
ggaggctgaatggggtcccccgactctggctttcccccaggtttacatgttcctggtgaaatggcaggacttgtcg

SEQ ID NO: 6810 - RNA, 76 nt, synthetic construct
  source 1..76: mol_type = other RNA
ggaggctgaatggggtcccccgactctggctttcccccaggtctacatgttcctggtgaaatggcaggacttatcg

SEQ ID NO: 6811 - RNA, 76 nt, synthetic construct
  source 1..76: mol_type = other RNA
ggaggctgaatggggtcccccgactctggctttcccccaggtttacatgttcctggtgaaatggcaggacttatcg

SEQ ID NO: 6812 - RNA, 76 nt, synthetic construct
  source 1..76: mol_type = other RNA
ggaggctgaatggggtcccccgactctggctttcccccaggtgtacatgttcctggtgaaatggcaggatttgtcg

SEQ ID NO: 6813 - RNA, 76 nt, synthetic construct
  source 1..76: mol_type = other RNA
ggaggctgaatggggtcccccgactctggctttcccccaggtctacatgttcctggtgaaatggcaggacctgtcg

SEQ ID NO: 6814 - RNA, 76 nt, synthetic construct
  source 1..76: mol_type = other RNA
ggaggctgaatggggtcccccgactctggctttcccccaggtgtacatgttcctggtgaaatggcaggacctgtcg

SEQ ID NO: 6815 - RNA, 76 nt, synthetic construct
  source 1..76: mol_type = other RNA
ggaggctgaatggggtcccccgactctggctttcccccaggtctacatgttcctggtgaaatggcaggacttgtcg

SEQ ID NO: 6816 - RNA, 76 nt, synthetic construct
  source 1..76: mol_type = other RNA
ggaggctgaatggggtcccccgactctggctttcccccaggtatacatgttcctggtgaaatggcaggacttgtcg

SEQ ID NO: 6817 - RNA, 76 nt, synthetic construct
  source 1..76: mol_type = other RNA
ggaggctgaatggggtcccccgactctggctttcccccaggtctacatgttcctggtgaaatggcaggatctgtcg

SEQ ID NO: 6818 - RNA, 76 nt, synthetic construct
  source 1..76: mol_type = other RNA
ggaggctgaatggggtcccccgactctggctttcccccaggtgtacatgttcctggtgaaatggcaggacttatcg

SEQ ID NO: 6819 - RNA, 76 nt, synthetic construct
  source 1..76: mol_type = other RNA
ggaggctgaatggggtcccccgactctggctttcccccaggtctacatgttcctggtgaaatggcaggatttatcg

SEQ ID NO: 6820 - RNA, 76 nt, synthetic construct
  source 1..76: mol_type = other RNA
ggaggctgaatggggtcccccgactctggctttcccccaggtgtacatgttcctggtgaaatggcaggacttgtcg

SEQ ID NO: 6821 - RNA, 76 nt, synthetic construct
  source 1..76: mol_type = other RNA
ggaggctgaatggggtcccccgactctggctttcccccaggtttacatgttcctggtgaaatggcaggacctgtcg

SEQ ID NO: 6822 - RNA, 76 nt, synthetic construct
  source 1..76: mol_type = other RNA
ggaggctgaatggggtcccccgactctggctttcccccaggtgtacatgttcctggtgaaatggcaggatctgtcg

SEQ ID NO: 6823 - RNA, 76 nt, synthetic construct
  source 1..76: mol_type = other RNA
ggaggctgaatggggtcccccgactctggctttcccccaggtctacatgttcctggtgaaatggcaggatttgtcg

SEQ ID NO: 6824 - RNA, 77 nt, synthetic construct
  source 1..77: mol_type = other RNA
tggaggctgaatggggtcccccgactctggctttcccccaggtatacatgttcctggtgaaatggcaggatttatcg

SEQ ID NO: 6825 - RNA, 77 nt, synthetic construct
  source 1..77: mol_type = other RNA
tggaggctgaatggggtcccccgactctggctttcccccaggtatacatgttcctggtgaaatggcaggatctgtcg

SEQ ID NO: 6826 - RNA, 77 nt, synthetic construct
  source 1..77: mol_type = other RNA
tggaggctgaatggggtcccccgactctggctttcccccaggtctacatgttcctggtgaaatggcaggacctgtcg

SEQ ID NO: 6827 - RNA, 77 nt, synthetic construct
  source 1..77: mol_type = other RNA
tggaggctgaatggggtcccccgactctggctttcccccaggtgtacatgttcctggtgaaatggcaggacctgtcg

SEQ ID NO: 6828 - RNA, 77 nt, synthetic construct
  source 1..77: mol_type = other RNA
tggaggctgaatggggtcccccgactctggctttcccccaggtatacatgttcctggtgaaatggcaggacctgtcg

SEQ ID NO: 6829 - RNA, 77 nt, synthetic construct
  source 1..77: mol_type = other RNA
tggaggctgaatggggtcccccgactctggctttcccccaggtatacatgttcctggtgaaatggcaggatttgtcg

SEQ ID NO: 6830 - RNA, 77 nt, synthetic construct
  source 1..77: mol_type = other RNA
tggaggctgaatggggtcccccgactctggctttcccccaggtgtacatgttcctggtgaaatggcaggacttatcg

SEQ ID NO: 6831 - RNA, 77 nt, synthetic construct
  source 1..77: mol_type = other RNA
tggaggctgaatggggtcccccgactctggctttcccccaggtttacatgttcctggtgaaatggcaggatttatcg

SEQ ID NO: 6832 - RNA, 77 nt, synthetic construct
  source 1..77: mol_type = other RNA
tggaggctgaatggggtcccccgactctggctttcccccaggtatacatgttcctggtgaaatggcaggacttatcg

SEQ ID NO: 6833 - RNA, 77 nt, synthetic construct
  source 1..77: mol_type = other RNA
tggaggctgaatggggtcccccgactctggctttcccccaggtgtacatgttcctggtgaaatggcaggatctgtcg

SEQ ID NO: 6834 - RNA, 77 nt, synthetic construct
  source 1..77: mol_type = other RNA
tggaggctgaatggggtcccccgactctggctttcccccaggtgtacatgttcctggtgaaatggcaggatttgtcg

SEQ ID NO: 6835 - RNA, 77 nt, synthetic construct
  source 1..77: mol_type = other RNA
tggaggctgaatggggtcccccgactctggctttcccccaggtttacatgttcctggtgaaatggcaggacttatcg

SEQ ID NO: 6836 - RNA, 77 nt, synthetic construct
  source 1..77: mol_type = other RNA
tggaggctgaatggggtcccccgactctggctttcccccaggtgtacatgttcctggtgaaatggcaggacttgtcg

SEQ ID NO: 6837 - RNA, 77 nt, synthetic construct
  source 1..77: mol_type = other RNA
tggaggctgaatggggtcccccgactctggctttcccccaggtatacatgttcctggtgaaatggcaggacttgtcg

SEQ ID NO: 6838 - RNA, 77 nt, synthetic construct
  source 1..77: mol_type = other RNA
tggaggctgaatggggtcccccgactctggctttcccccaggtttacatgttcctggtgaaatggcaggacttgtcg

SEQ ID NO: 6839 - RNA, 77 nt, synthetic construct
  source 1..77: mol_type = other RNA
tggaggctgaatggggtcccccgactctggctttcccccaggtttacatgttcctggtgaaatggcaggatctgtcg

SEQ ID NO: 6840 - RNA, 77 nt, synthetic construct
  source 1..77: mol_type = other RNA
tggaggctgaatggggtcccccgactctggctttcccccaggtttacatgttcctggtgaaatggcaggatttgtcg

SEQ ID NO: 6841 - RNA, 77 nt, synthetic construct
  source 1..77: mol_type = other RNA
tggaggctgaatggggtcccccgactctggctttcccccaggtttacatgttcctggtgaaatggcaggacctgtcg

SEQ ID NO: 6842 - RNA, 77 nt, synthetic construct
  source 1..77: mol_type = other RNA
tggaggctgaatggggtcccccgactctggctttcccccaggtctacatgttcctggtgaaatggcaggatttatcg

SEQ ID NO: 6843 - RNA, 77 nt, synthetic construct
  source 1..77: mol_type = other RNA
tggaggctgaatggggtcccccgactctggctttcccccaggtctacatgttcctggtgaaatggcaggatctgtcg

SEQ ID NO: 6844 - RNA, 77 nt, synthetic construct
  source 1..77: mol_type = other RNA
tggaggctgaatggggtcccccgactctggctttcccccaggtctacatgttcctggtgaaatggcaggacttgtcg

SEQ ID NO: 6845 - RNA, 77 nt, synthetic construct
  source 1..77: mol_type = other RNA
tggaggctgaatggggtcccccgactctggctttcccccaggtctacatgttcctggtgaaatggcaggacttatcg

SEQ ID NO: 6846 - RNA, 77 nt, synthetic construct
  source 1..77: mol_type = other RNA
tggaggctgaatggggtcccccgactctggctttcccccaggtgtacatgttcctggtgaaatggcaggatttatcg

SEQ ID NO: 6847 - RNA, 77 nt, synthetic construct
  source 1..77: mol_type = other RNA
tggaggctgaatggggtcccccgactctggctttcccccaggtctacatgttcctggtgaaatggcaggatttgtcg

SEQ ID NO: 6848 - RNA, 78 nt, synthetic construct
  source 1..78: mol_type = other RNA
ttggaggctgaatggggtcccccgactctggctttcccccaggtgtacatgttcctggtgaaatggcaggatttgtcg

SEQ ID NO: 6849 - RNA, 78 nt, synthetic construct
  source 1..78: mol_type = other RNA
ttggaggctgaatggggtcccccgactctggctttcccccaggtttacatgttcctggtgaaatggcaggacctgtcg

SEQ ID NO: 6850 - RNA, 78 nt, synthetic construct
  source 1..78: mol_type = other RNA
ttggaggctgaatggggtcccccgactctggctttcccccaggtttacatgttcctggtgaaatggcaggacttatcg

SEQ ID NO: 6851 - RNA, 78 nt, synthetic construct
  source 1..78: mol_type = other RNA
ttggaggctgaatggggtcccccgactctggctttcccccaggtctacatgttcctggtgaaatggcaggatctgtcg

SEQ ID NO: 6852 - RNA, 78 nt, synthetic construct
  source 1..78: mol_type = other RNA
ttggaggctgaatggggtcccccgactctggctttcccccaggtttacatgttcctggtgaaatggcaggatttatcg

SEQ ID NO: 6853 - RNA, 78 nt, synthetic construct
  source 1..78: mol_type = other RNA
ttggaggctgaatggggtcccccgactctggctttcccccaggtttacatgttcctggtgaaatggcaggatttgtcg

SEQ ID NO: 6854 - RNA, 78 nt, synthetic construct
  source 1..78: mol_type = other RNA
ttggaggctgaatggggtcccccgactctggctttcccccaggtttacatgttcctggtgaaatggcaggacttgtcg

SEQ ID NO: 6855 - RNA, 78 nt, synthetic construct
  source 1..78: mol_type = other RNA
ttggaggctgaatggggtcccccgactctggctttcccccaggtatacatgttcctggtgaaatggcaggatctgtcg

SEQ ID NO: 6856 - RNA, 78 nt, synthetic construct
  source 1..78: mol_type = other RNA
ttggaggctgaatggggtcccccgactctggctttcccccaggtatacatgttcctggtgaaatggcaggacttgtcg

SEQ ID NO: 6857 - RNA, 78 nt, synthetic construct
  source 1..78: mol_type = other RNA
ttggaggctgaatggggtcccccgactctggctttcccccaggtatacatgttcctggtgaaatggcaggatttatcg

SEQ ID NO: 6858 - RNA, 78 nt, synthetic construct
  source 1..78: mol_type = other RNA
ttggaggctgaatggggtcccccgactctggctttcccccaggtgtacatgttcctggtgaaatggcaggatctgtcg

SEQ ID NO: 6859 - RNA, 78 nt, synthetic construct
  source 1..78: mol_type = other RNA
ttggaggctgaatggggtcccccgactctggctttcccccaggtatacatgttcctggtgaaatggcaggacttatcg

SEQ ID NO: 6860 - RNA, 78 nt, synthetic construct
  source 1..78: mol_type = other RNA
ttggaggctgaatggggtcccccgactctggctttcccccaggtatacatgttcctggtgaaatggcaggatttgtcg

SEQ ID NO: 6861 - RNA, 78 nt, synthetic construct
  source 1..78: mol_type = other RNA
ttggaggctgaatggggtcccccgactctggctttcccccaggtctacatgttcctggtgaaatggcaggacctgtcg

SEQ ID NO: 6862 - RNA, 78 nt, synthetic construct
  source 1..78: mol_type = other RNA
ttggaggctgaatggggtcccccgactctggctttcccccaggtctacatgttcctggtgaaatggcaggacttgtcg

SEQ ID NO: 6863 - RNA, 78 nt, synthetic construct
  source 1..78: mol_type = other RNA
ttggaggctgaatggggtcccccgactctggctttcccccaggtctacatgttcctggtgaaatggcaggacttatcg

SEQ ID NO: 6864 - RNA, 78 nt, synthetic construct
  source 1..78: mol_type = other RNA
ttggaggctgaatggggtcccccgactctggctttcccccaggtgtacatgttcctggtgaaatggcaggacttgtcg

SEQ ID NO: 6865 - RNA, 78 nt, synthetic construct
  source 1..78: mol_type = other RNA
ttggaggctgaatggggtcccccgactctggctttcccccaggtctacatgttcctggtgaaatggcaggatttgtcg

SEQ ID NO: 6866 - RNA, 78 nt, synthetic construct
  source 1..78: mol_type = other RNA
ttggaggctgaatggggtcccccgactctggctttcccccaggtatacatgttcctggtgaaatggcaggacctgtcg

SEQ ID NO: 6867 - RNA, 78 nt, synthetic construct
  source 1..78: mol_type = other RNA
ttggaggctgaatggggtcccccgactctggctttcccccaggtgtacatgttcctggtgaaatggcaggatttatcg

SEQ ID NO: 6868 - RNA, 78 nt, synthetic construct
  source 1..78: mol_type = other RNA
ttggaggctgaatggggtcccccgactctggctttcccccaggtgtacatgttcctggtgaaatggcaggacttatcg

SEQ ID NO: 6869 - RNA, 78 nt, synthetic construct
  source 1..78: mol_type = other RNA
ttggaggctgaatggggtcccccgactctggctttcccccaggtgtacatgttcctggtgaaatggcaggacctgtcg

SEQ ID NO: 6870 - RNA, 78 nt, synthetic construct
  source 1..78: mol_type = other RNA
ttggaggctgaatggggtcccccgactctggctttcccccaggtttacatgttcctggtgaaatggcaggatctgtcg

SEQ ID NO: 6871 - RNA, 78 nt, synthetic construct
  source 1..78: mol_type = other RNA
ttggaggctgaatggggtcccccgactctggctttcccccaggtctacatgttcctggtgaaatggcaggatttatcg

SEQ ID NO: 6872 - RNA, 79 nt, synthetic construct
  source 1..79: mol_type = other RNA
tttggaggctgaatggggtcccccgactctggctttcccccaggtatacatgttcctggtgaaatggcaggatttgtcg

SEQ ID NO: 6873 - RNA, 79 nt, synthetic construct
  source 1..79: mol_type = other RNA
tttggaggctgaatggggtcccccgactctggctttcccccaggtttacatgttcctggtgaaatggcaggatttgtcg

SEQ ID NO: 6874 - RNA, 79 nt, synthetic construct
  source 1..79: mol_type = other RNA
tttggaggctgaatggggtcccccgactctggctttcccccaggtttacatgttcctggtgaaatggcaggacctgtcg

SEQ ID NO: 6875 - RNA, 79 nt, synthetic construct
  source 1..79: mol_type = other RNA
tttggaggctgaatggggtcccccgactctggctttcccccaggtgtacatgttcctggtgaaatggcaggacttatcg

SEQ ID NO: 6876 - RNA, 79 nt, synthetic construct
  source 1..79: mol_type = other RNA
tttggaggctgaatggggtcccccgactctggctttcccccaggtgtacatgttcctggtgaaatggcaggatttatcg

SEQ ID NO: 6877 - RNA, 79 nt, synthetic construct
  source 1..79: mol_type = other RNA
tttggaggctgaatggggtcccccgactctggctttcccccaggtgtacatgttcctggtgaaatggcaggatttgtcg

SEQ ID NO: 6878 - RNA, 79 nt, synthetic construct
  source 1..79: mol_type = other RNA
tttggaggctgaatggggtcccccgactctggctttcccccaggtttacatgttcctggtgaaatggcaggacttatcg

SEQ ID NO: 6879 - RNA, 79 nt, synthetic construct
  source 1..79: mol_type = other RNA
tttggaggctgaatggggtcccccgactctggctttcccccaggtgtacatgttcctggtgaaatggcaggatctgtcg

SEQ ID NO: 6880 - RNA, 79 nt, synthetic construct
  source 1..79: mol_type = other RNA
tttggaggctgaatggggtcccccgactctggctttcccccaggtttacatgttcctggtgaaatggcaggatctgtcg

SEQ ID NO: 6881 - RNA, 79 nt, synthetic construct
  source 1..79: mol_type = other RNA
tttggaggctgaatggggtcccccgactctggctttcccccaggtttacatgttcctggtgaaatggcaggatttatcg

SEQ ID NO: 6882 - RNA, 79 nt, synthetic construct
  source 1..79: mol_type = other RNA
tttggaggctgaatggggtcccccgactctggctttcccccaggtctacatgttcctggtgaaatggcaggatttgtcg

SEQ ID NO: 6883 - RNA, 79 nt, synthetic construct
  source 1..79: mol_type = other RNA
tttggaggctgaatggggtcccccgactctggctttcccccaggtctacatgttcctggtgaaatggcaggacttatcg

SEQ ID NO: 6884 - RNA, 79 nt, synthetic construct
  source 1..79: mol_type = other RNA
tttggaggctgaatggggtcccccgactctggctttcccccaggtgtacatgttcctggtgaaatggcaggacttgtcg

SEQ ID NO: 6885 - RNA, 79 nt, synthetic construct
  source 1..79: mol_type = other RNA
tttggaggctgaatggggtcccccgactctggctttcccccaggtctacatgttcctggtgaaatggcaggatctgtcg

SEQ ID NO: 6886 - RNA, 79 nt, synthetic construct
  source 1..79: mol_type = other RNA
tttggaggctgaatggggtcccccgactctggctttcccccaggtctacatgttcctggtgaaatggcaggatttatcg

SEQ ID NO: 6887 - RNA, 79 nt, synthetic construct
  source 1..79: mol_type = other RNA
tttggaggctgaatggggtcccccgactctggctttcccccaggtatacatgttcctggtgaaatggcaggacctgtcg

SEQ ID NO: 6888 - RNA, 79 nt, synthetic construct
  source 1..79: mol_type = other RNA
tttggaggctgaatggggtcccccgactctggctttcccccaggtatacatgttcctggtgaaatggcaggacttgtcg

SEQ ID NO: 6889 - RNA, 79 nt, synthetic construct
  source 1..79: mol_type = other RNA
tttggaggctgaatggggtcccccgactctggctttcccccaggtatacatgttcctggtgaaatggcaggatctgtcg

SEQ ID NO: 6890 - RNA, 79 nt, synthetic construct
  source 1..79: mol_type = other RNA
tttggaggctgaatggggtcccccgactctggctttcccccaggtatacatgttcctggtgaaatggcaggatttatcg

SEQ ID NO: 6891 - RNA, 79 nt, synthetic construct
  source 1..79: mol_type = other RNA
tttggaggctgaatggggtcccccgactctggctttcccccaggtatacatgttcctggtgaaatggcaggacttatcg

SEQ ID NO: 6892 - RNA, 79 nt, synthetic construct
  source 1..79: mol_type = other RNA
tttggaggctgaatggggtcccccgactctggctttcccccaggtctacatgttcctggtgaaatggcaggacctgtcg

SEQ ID NO: 6893 - RNA, 79 nt, synthetic construct
  source 1..79: mol_type = other RNA
tttggaggctgaatggggtcccccgactctggctttcccccaggtctacatgttcctggtgaaatggcaggacttgtcg

SEQ ID NO: 6894 - RNA, 79 nt, synthetic construct
  source 1..79: mol_type = other RNA
tttggaggctgaatggggtcccccgactctggctttcccccaggtgtacatgttcctggtgaaatggcaggacctgtcg

SEQ ID NO: 6895 - RNA, 79 nt, synthetic construct
  source 1..79: mol_type = other RNA
tttggaggctgaatggggtcccccgactctggctttcccccaggtttacatgttcctggtgaaatggcaggacttgtcg

SEQ ID NO: 6896 - RNA, 80 nt, synthetic construct
  source 1..80: mol_type = other RNA
ctttggaggctgaatggggtcccccgactctggctttcccccaggtgtacatgttcctggtgaaatggcaggacctgtcg

SEQ ID NO: 6897 - RNA, 80 nt, synthetic construct
  source 1..80: mol_type = other RNA
ctttggaggctgaatggggtcccccgactctggctttcccccaggtgtacatgttcctggtgaaatggcaggacttgtcg

SEQ ID NO: 6898 - RNA, 80 nt, synthetic construct
  source 1..80: mol_type = other RNA
ctttggaggctgaatggggtcccccgactctggctttcccccaggtgtacatgttcctggtgaaatggcaggatctgtcg

SEQ ID NO: 6899 - RNA, 80 nt, synthetic construct
  source 1..80: mol_type = other RNA
ctttggaggctgaatggggtcccccgactctggctttcccccaggtgtacatgttcctggtgaaatggcaggatttgtcg

SEQ ID NO: 6900 - RNA, 80 nt, synthetic construct
  source 1..80: mol_type = other RNA
ctttggaggctgaatggggtcccccgactctggctttcccccaggtttacatgttcctggtgaaatggcaggacctgtcg

SEQ ID NO: 6901 - RNA, 80 nt, synthetic construct
  source 1..80: mol_type = other RNA
ctttggaggctgaatggggtcccccgactctggctttcccccaggtttacatgttcctggtgaaatggcaggacttgtcg

SEQ ID NO: 6902 - RNA, 80 nt, synthetic construct
  source 1..80: mol_type = other RNA
ctttggaggctgaatggggtcccccgactctggctttcccccaggtctacatgttcctggtgaaatggcaggatttatcg

SEQ ID NO: 6903 - RNA, 80 nt, synthetic construct
  source 1..80: mol_type = other RNA
ctttggaggctgaatggggtcccccgactctggctttcccccaggtgtacatgttcctggtgaaatggcaggatttatcg

SEQ ID NO: 6904 - RNA, 80 nt, synthetic construct
  source 1..80: mol_type = other RNA
ctttggaggctgaatggggtcccccgactctggctttcccccaggtctacatgttcctggtgaaatggcaggacttgtcg

SEQ ID NO: 6905 - RNA, 80 nt, synthetic construct
  source 1..80: mol_type = other RNA
ctttggaggctgaatggggtcccccgactctggctttcccccaggtttacatgttcctggtgaaatggcaggatttgtcg

SEQ ID NO: 6906 - RNA, 80 nt, synthetic construct
  source 1..80: mol_type = other RNA
ctttggaggctgaatggggtcccccgactctggctttcccccaggtctacatgttcctggtgaaatggcaggacttatcg

SEQ ID NO: 6907 - RNA, 80 nt, synthetic construct
  source 1..80: mol_type = other RNA
ctttggaggctgaatggggtcccccgactctggctttcccccaggtctacatgttcctggtgaaatggcaggacctgtcg

SEQ ID NO: 6908 - RNA, 80 nt, synthetic construct
  source 1..80: mol_type = other RNA
ctttggaggctgaatggggtcccccgactctggctttcccccaggtatacatgttcctggtgaaatggcaggatttatcg

SEQ ID NO: 6909 - RNA, 80 nt, synthetic construct
  source 1..80: mol_type = other RNA
ctttggaggctgaatggggtcccccgactctggctttcccccaggtatacatgttcctggtgaaatggcaggatctgtcg

SEQ ID NO: 6910 - RNA, 80 nt, synthetic construct
  source 1..80: mol_type = other RNA
ctttggaggctgaatggggtcccccgactctggctttcccccaggtatacatgttcctggtgaaatggcaggacttgtcg

SEQ ID NO: 6911 - RNA, 80 nt, synthetic construct
  source 1..80: mol_type = other RNA
ctttggaggctgaatggggtcccccgactctggctttcccccaggtatacatgttcctggtgaaatggcaggacttatcg

SEQ ID NO: 6912 - RNA, 80 nt, synthetic construct
  source 1..80: mol_type = other RNA
ctttggaggctgaatggggtcccccgactctggctttcccccaggtatacatgttcctggtgaaatggcaggacctgtcg

SEQ ID NO: 6913 - RNA, 80 nt, synthetic construct
  source 1..80: mol_type = other RNA
ctttggaggctgaatggggtcccccgactctggctttcccccaggtctacatgttcctggtgaaatggcaggatttgtcg

SEQ ID NO: 6914 - RNA, 80 nt, synthetic construct
  source 1..80: mol_type = other RNA
ctttggaggctgaatggggtcccccgactctggctttcccccaggtttacatgttcctggtgaaatggcaggatctgtcg

SEQ ID NO: 6915 - RNA, 80 nt, synthetic construct
  source 1..80: mol_type = other RNA
ctttggaggctgaatggggtcccccgactctggctttcccccaggtttacatgttcctggtgaaatggcaggacttatcg

SEQ ID NO: 6916 - RNA, 80 nt, synthetic construct
  source 1..80: mol_type = other RNA
ctttggaggctgaatggggtcccccgactctggctttcccccaggtctacatgttcctggtgaaatggcaggatctgtcg

SEQ ID NO: 6917 - RNA, 80 nt, synthetic construct
  source 1..80: mol_type = other RNA
ctttggaggctgaatggggtcccccgactctggctttcccccaggtatacatgttcctggtgaaatggcaggatttgtcg

SEQ ID NO: 6918 - RNA, 80 nt, synthetic construct
  source 1..80: mol_type = other RNA
ctttggaggctgaatggggtcccccgactctggctttcccccaggtgtacatgttcctggtgaaatggcaggacttatcg

SEQ ID NO: 6919 - RNA, 80 nt, synthetic construct
  source 1..80: mol_type = other RNA
ctttggaggctgaatggggtcccccgactctggctttcccccaggtttacatgttcctggtgaaatggcaggatttatcg

SEQ ID NO: 6920 - RNA, 81 nt, synthetic construct
  source 1..81: mol_type = other RNA
tctttggaggctgaatggggtcccccgactctggctttcccccaggtgtacatgttcctggtgaaatggcaggacttatcg

SEQ ID NO: 6921 - RNA, 81 nt, synthetic construct
  source 1..81: mol_type = other RNA
tctttggaggctgaatggggtcccccgactctggctttcccccaggtatacatgttcctggtgaaatggcaggatttgtcg

SEQ ID NO: 6922 - RNA, 81 nt, synthetic construct
  source 1..81: mol_type = other RNA
tctttggaggctgaatggggtcccccgactctggctttcccccaggtttacatgttcctggtgaaatggcaggatctgtcg

SEQ ID NO: 6923 - RNA, 81 nt, synthetic construct
  source 1..81: mol_type = other RNA
tctttggaggctgaatggggtcccccgactctggctttcccccaggtgtacatgttcctggtgaaatggcaggatttatcg

SEQ ID NO: 6924 - RNA, 81 nt, synthetic construct
  source 1..81: mol_type = other RNA
tctttggaggctgaatggggtcccccgactctggctttcccccaggtatacatgttcctggtgaaatggcaggacctgtcg

SEQ ID NO: 6925 - RNA, 81 nt, synthetic construct
  source 1..81: mol_type = other RNA
tctttggaggctgaatggggtcccccgactctggctttcccccaggtttacatgttcctggtgaaatggcaggacttgtcg

SEQ ID NO: 6926 - RNA, 81 nt, synthetic construct
  source 1..81: mol_type = other RNA
tctttggaggctgaatggggtcccccgactctggctttcccccaggtatacatgttcctggtgaaatggcaggacttatcg

SEQ ID NO: 6927 - RNA, 81 nt, synthetic construct
  source 1..81: mol_type = other RNA
tctttggaggctgaatggggtcccccgactctggctttcccccaggtatacatgttcctggtgaaatggcaggatctgtcg

SEQ ID NO: 6928 - RNA, 81 nt, synthetic construct
  source 1..81: mol_type = other RNA
tctttggaggctgaatggggtcccccgactctggctttcccccaggtatacatgttcctggtgaaatggcaggacttgtcg

SEQ ID NO: 6929 - RNA, 81 nt, synthetic construct
  source 1..81: mol_type = other RNA
tctttggaggctgaatggggtcccccgactctggctttcccccaggtttacatgttcctggtgaaatggcaggatttgtcg

SEQ ID NO: 6930 - RNA, 81 nt, synthetic construct
  source 1..81: mol_type = other RNA
tctttggaggctgaatggggtcccccgactctggctttcccccaggtttacatgttcctggtgaaatggcaggatttatcg

SEQ ID NO: 6931 - RNA, 81 nt, synthetic construct
  source 1..81: mol_type = other RNA
tctttggaggctgaatggggtcccccgactctggctttcccccaggtttacatgttcctggtgaaatggcaggacctgtcg

SEQ ID NO: 6932 - RNA, 81 nt, synthetic construct
  source 1..81: mol_type = other RNA
tctttggaggctgaatggggtcccccgactctggctttcccccaggtgtacatgttcctggtgaaatggcaggatttgtcg

SEQ ID NO: 6933 - RNA, 81 nt, synthetic construct
  source 1..81: mol_type = other RNA
tctttggaggctgaatggggtcccccgactctggctttcccccaggtgtacatgttcctggtgaaatggcaggatctgtcg

SEQ ID NO: 6934 - RNA, 81 nt, synthetic construct
  source 1..81: mol_type = other RNA
tctttggaggctgaatggggtcccccgactctggctttcccccaggtgtacatgttcctggtgaaatggcaggacttgtcg

SEQ ID NO: 6935 - RNA, 81 nt, synthetic construct
  source 1..81: mol_type = other RNA
tctttggaggctgaatggggtcccccgactctggctttcccccaggtttacatgttcctggtgaaatggcaggacttatcg

SEQ ID NO: 6936 - RNA, 81 nt, synthetic construct
  source 1..81: mol_type = other RNA
tctttggaggctgaatggggtcccccgactctggctttcccccaggtctacatgttcctggtgaaatggcaggatttatcg

SEQ ID NO: 6937 - RNA, 81 nt, synthetic construct
  source 1..81: mol_type = other RNA
tctttggaggctgaatggggtcccccgactctggctttcccccaggtctacatgttcctggtgaaatggcaggatctgtcg

SEQ ID NO: 6938 - RNA, 81 nt, synthetic construct
  source 1..81: mol_type = other RNA
tctttggaggctgaatggggtcccccgactctggctttcccccaggtctacatgttcctggtgaaatggcaggacttgtcg

SEQ ID NO: 6939 - RNA, 81 nt, synthetic construct
  source 1..81: mol_type = other RNA
tctttggaggctgaatggggtcccccgactctggctttcccccaggtctacatgttcctggtgaaatggcaggacttatcg

SEQ ID NO: 6940 - RNA, 81 nt, synthetic construct
  source 1..81: mol_type = other RNA
tctttggaggctgaatggggtcccccgactctggctttcccccaggtctacatgttcctggtgaaatggcaggacctgtcg

SEQ ID NO: 6941 - RNA, 81 nt, synthetic construct
  source 1..81: mol_type = other RNA
tctttggaggctgaatggggtcccccgactctggctttcccccaggtatacatgttcctggtgaaatggcaggatttatcg

SEQ ID NO: 6942 - RNA, 81 nt, synthetic construct
  source 1..81: mol_type = other RNA
tctttggaggctgaatggggtcccccgactctggctttcccccaggtgtacatgttcctggtgaaatggcaggacctgtcg

SEQ ID NO: 6943 - RNA, 81 nt, synthetic construct
  source 1..81: mol_type = other RNA
tctttggaggctgaatggggtcccccgactctggctttcccccaggtctacatgttcctggtgaaatggcaggatttgtcg

SEQ ID NO: 6944 - RNA, 82 nt, synthetic construct
  source 1..82: mol_type = other RNA
ctctttggaggctgaatggggtcccccgactctggctttcccccaggtctacatgttcctggtgaaatggcaggacctgtcg

SEQ ID NO: 6945 - RNA, 82 nt, synthetic construct
  source 1..82: mol_type = other RNA
ctctttggaggctgaatggggtcccccgactctggctttcccccaggtatacatgttcctggtgaaatggcaggatttgtcg

SEQ ID NO: 6946 - RNA, 82 nt, synthetic construct
  source 1..82: mol_type = other RNA
ctctttggaggctgaatggggtcccccgactctggctttcccccaggtatacatgttcctggtgaaatggcaggatttatcg

SEQ ID NO: 6947 - RNA, 82 nt, synthetic construct
  source 1..82: mol_type = other RNA
ctctttggaggctgaatggggtcccccgactctggctttcccccaggtgtacatgttcctggtgaaatggcaggacctgtcg

SEQ ID NO: 6948 - RNA, 82 nt, synthetic construct
  source 1..82: mol_type = other RNA
ctctttggaggctgaatggggtcccccgactctggctttcccccaggtctacatgttcctggtgaaatggcaggatttatcg

SEQ ID NO: 6949 - RNA, 82 nt, synthetic construct
  source 1..82: mol_type = other RNA
ctctttggaggctgaatggggtcccccgactctggctttcccccaggtttacatgttcctggtgaaatggcaggatctgtcg

SEQ ID NO: 6950 - RNA, 82 nt, synthetic construct
  source 1..82: mol_type = other RNA
ctctttggaggctgaatggggtcccccgactctggctttcccccaggtttacatgttcctggtgaaatggcaggatttgtcg

SEQ ID NO: 6951 - RNA, 82 nt, synthetic construct
  source 1..82: mol_type = other RNA
ctctttggaggctgaatggggtcccccgactctggctttcccccaggtctacatgttcctggtgaaatggcaggacttatcg

SEQ ID NO: 6952 - RNA, 82 nt, synthetic construct
  source 1..82: mol_type = other RNA
ctctttggaggctgaatggggtcccccgactctggctttcccccaggtatacatgttcctggtgaaatggcaggacttgtcg

SEQ ID NO: 6953 - RNA, 82 nt, synthetic construct
  source 1..82: mol_type = other RNA
ctctttggaggctgaatggggtcccccgactctggctttcccccaggtgtacatgttcctggtgaaatggcaggacttatcg

SEQ ID NO: 6954 - RNA, 82 nt, synthetic construct
  source 1..82: mol_type = other RNA
ctctttggaggctgaatggggtcccccgactctggctttcccccaggtgtacatgttcctggtgaaatggcaggacttgtcg

SEQ ID NO: 6955 - RNA, 82 nt, synthetic construct
  source 1..82: mol_type = other RNA
ctctttggaggctgaatggggtcccccgactctggctttcccccaggtttacatgttcctggtgaaatggcaggacctgtcg

SEQ ID NO: 6956 - RNA, 82 nt, synthetic construct
  source 1..82: mol_type = other RNA
ctctttggaggctgaatggggtcccccgactctggctttcccccaggtgtacatgttcctggtgaaatggcaggatttatcg

SEQ ID NO: 6957 - RNA, 82 nt, synthetic construct
  source 1..82: mol_type = other RNA
ctctttggaggctgaatggggtcccccgactctggctttcccccaggtttacatgttcctggtgaaatggcaggacttatcg

SEQ ID NO: 6958 - RNA, 82 nt, synthetic construct
  source 1..82: mol_type = other RNA
ctctttggaggctgaatggggtcccccgactctggctttcccccaggtgtacatgttcctggtgaaatggcaggatctgtcg

SEQ ID NO: 6959 - RNA, 82 nt, synthetic construct
  source 1..82: mol_type = other RNA
ctctttggaggctgaatggggtcccccgactctggctttcccccaggtctacatgttcctggtgaaatggcaggatttgtcg

SEQ ID NO: 6960 - RNA, 82 nt, synthetic construct
  source 1..82: mol_type = other RNA
ctctttggaggctgaatggggtcccccgactctggctttcccccaggtttacatgttcctggtgaaatggcaggatttatcg

SEQ ID NO: 6961 - RNA, 82 nt, synthetic construct
  source 1..82: mol_type = other RNA
ctctttggaggctgaatggggtcccccgactctggctttcccccaggtctacatgttcctggtgaaatggcaggatctgtcg

SEQ ID NO: 6962 - RNA, 82 nt, synthetic construct
  source 1..82: mol_type = other RNA
ctctttggaggctgaatggggtcccccgactctggctttcccccaggtttacatgttcctggtgaaatggcaggacttgtcg

SEQ ID NO: 6963 - RNA, 82 nt, synthetic construct
  source 1..82: mol_type = other RNA
ctctttggaggctgaatggggtcccccgactctggctttcccccaggtctacatgttcctggtgaaatggcaggacttgtcg

SEQ ID NO: 6964 - RNA, 82 nt, synthetic construct
  source 1..82: mol_type = other RNA
ctctttggaggctgaatggggtcccccgactctggctttcccccaggtatacatgttcctggtgaaatggcaggacctgtcg

SEQ ID NO: 6965 - RNA, 82 nt, synthetic construct
  source 1..82: mol_type = other RNA
ctctttggaggctgaatggggtcccccgactctggctttcccccaggtatacatgttcctggtgaaatggcaggacttatcg

SEQ ID NO: 6966 - RNA, 82 nt, synthetic construct
  source 1..82: mol_type = other RNA
ctctttggaggctgaatggggtcccccgactctggctttcccccaggtgtacatgttcctggtgaaatggcaggatttgtcg

SEQ ID NO: 6967 - RNA, 82 nt, synthetic construct
  source 1..82: mol_type = other RNA
ctctttggaggctgaatggggtcccccgactctggctttcccccaggtatacatgttcctggtgaaatggcaggatctgtcg

SEQ ID NO: 6968 - RNA, 83 nt, synthetic construct
  source 1..83: mol_type = other RNA
cctctttggaggctgaatggggtcccccgactctggctttcccccaggtatacatgttcctggtgaaatggcaggacttgtcg

SEQ ID NO: 6969 - RNA, 83 nt, synthetic construct
  source 1..83: mol_type = other RNA
cctctttggaggctgaatggggtcccccgactctggctttcccccaggtatacatgttcctggtgaaatggcaggacttatcg

SEQ ID NO: 6970 - RNA, 83 nt, synthetic construct
  source 1..83: mol_type = other RNA
cctctttggaggctgaatggggtcccccgactctggctttcccccaggtgtacatgttcctggtgaaatggcaggacttgtcg

SEQ ID NO: 6971 - RNA, 83 nt, synthetic construct
  source 1..83: mol_type = other RNA
cctctttggaggctgaatggggtcccccgactctggctttcccccaggtatacatgttcctggtgaaatggcaggatctgtcg

SEQ ID NO: 6972 - RNA, 83 nt, synthetic construct
  source 1..83: mol_type = other RNA
cctctttggaggctgaatggggtcccccgactctggctttcccccaggtttacatgttcctggtgaaatggcaggatttgtcg

SEQ ID NO: 6973 - RNA, 83 nt, synthetic construct
  source 1..83: mol_type = other RNA
cctctttggaggctgaatggggtcccccgactctggctttcccccaggtttacatgttcctggtgaaatggcaggatttatcg

SEQ ID NO: 6974 - RNA, 83 nt, synthetic construct
  source 1..83: mol_type = other RNA
cctctttggaggctgaatggggtcccccgactctggctttcccccaggtttacatgttcctggtgaaatggcaggatctgtcg

SEQ ID NO: 6975 - RNA, 83 nt, synthetic construct
  source 1..83: mol_type = other RNA
cctctttggaggctgaatggggtcccccgactctggctttcccccaggtctacatgttcctggtgaaatggcaggacctgtcg

SEQ ID NO: 6976 - RNA, 83 nt, synthetic construct
  source 1..83: mol_type = other RNA
cctctttggaggctgaatggggtcccccgactctggctttcccccaggtctacatgttcctggtgaaatggcaggacttatcg

SEQ ID NO: 6977 - RNA, 83 nt, synthetic construct
  source 1..83: mol_type = other RNA
cctctttggaggctgaatggggtcccccgactctggctttcccccaggtctacatgttcctggtgaaatggcaggatttgtcg

SEQ ID NO: 6978 - RNA, 83 nt, synthetic construct
  source 1..83: mol_type = other RNA
cctctttggaggctgaatggggtcccccgactctggctttcccccaggtctacatgttcctggtgaaatggcaggacttgtcg

SEQ ID NO: 6979 - RNA, 83 nt, synthetic construct
  source 1..83: mol_type = other RNA
cctctttggaggctgaatggggtcccccgactctggctttcccccaggtgtacatgttcctggtgaaatggcaggatttgtcg

SEQ ID NO: 6980 - RNA, 83 nt, synthetic construct
  source 1..83: mol_type = other RNA
cctctttggaggctgaatggggtcccccgactctggctttcccccaggtctacatgttcctggtgaaatggcaggatctgtcg

SEQ ID NO: 6981 - RNA, 83 nt, synthetic construct
  source 1..83: mol_type = other RNA
cctctttggaggctgaatggggtcccccgactctggctttcccccaggtctacatgttcctggtgaaatggcaggatttatcg

SEQ ID NO: 6982 - RNA, 83 nt, synthetic construct
  source 1..83: mol_type = other RNA
cctctttggaggctgaatggggtcccccgactctggctttcccccaggtgtacatgttcctggtgaaatggcaggacctgtcg

SEQ ID NO: 6983 - RNA, 83 nt, synthetic construct
  source 1..83: mol_type = other RNA
cctctttggaggctgaatggggtcccccgactctggctttcccccaggtgtacatgttcctggtgaaatggcaggacttatcg

SEQ ID NO: 6984 - RNA, 83 nt, synthetic construct
  source 1..83: mol_type = other RNA
cctctttggaggctgaatggggtcccccgactctggctttcccccaggtatacatgttcctggtgaaatggcaggatttgtcg

SEQ ID NO: 6985 - RNA, 83 nt, synthetic construct
  source 1..83: mol_type = other RNA
cctctttggaggctgaatggggtcccccgactctggctttcccccaggtatacatgttcctggtgaaatggcaggatttatcg

SEQ ID NO: 6986 - RNA, 83 nt, synthetic construct
  source 1..83: mol_type = other RNA
cctctttggaggctgaatggggtcccccgactctggctttcccccaggtgtacatgttcctggtgaaatggcaggatctgtcg

SEQ ID NO: 6987 - RNA, 83 nt, synthetic construct
  source 1..83: mol_type = other RNA
cctctttggaggctgaatggggtcccccgactctggctttcccccaggtgtacatgttcctggtgaaatggcaggatttatcg

SEQ ID NO: 6988 - RNA, 83 nt, synthetic construct
  source 1..83: mol_type = other RNA
cctctttggaggctgaatggggtcccccgactctggctttcccccaggtttacatgttcctggtgaaatggcaggacctgtcg

SEQ ID NO: 6989 - RNA, 83 nt, synthetic construct
  source 1..83: mol_type = other RNA
cctctttggaggctgaatggggtcccccgactctggctttcccccaggtatacatgttcctggtgaaatggcaggacctgtcg

SEQ ID NO: 6990 - RNA, 83 nt, synthetic construct
  source 1..83: mol_type = other RNA
cctctttggaggctgaatggggtcccccgactctggctttcccccaggtttacatgttcctggtgaaatggcaggacttatcg

SEQ ID NO: 6991 - RNA, 83 nt, synthetic construct
  source 1..83: mol_type = other RNA
cctctttggaggctgaatggggtcccccgactctggctttcccccaggtttacatgttcctggtgaaatggcaggacttgtcg

SEQ ID NO: 6992 - RNA, 84 nt, synthetic construct
  source 1..84: mol_type = other RNA
gcctctttggaggctgaatggggtcccccgactctggctttcccccaggtatacatgttcctggtgaaatggcaggatctgtcg

SEQ ID NO: 6993 - RNA, 84 nt, synthetic construct
  source 1..84: mol_type = other RNA
gcctctttggaggctgaatggggtcccccgactctggctttcccccaggtatacatgttcctggtgaaatggcaggacttgtcg

SEQ ID NO: 6994 - RNA, 84 nt, synthetic construct
  source 1..84: mol_type = other RNA
gcctctttggaggctgaatggggtcccccgactctggctttcccccaggtctacatgttcctggtgaaatggcaggatttatcg

SEQ ID NO: 6995 - RNA, 84 nt, synthetic construct
  source 1..84: mol_type = other RNA
gcctctttggaggctgaatggggtcccccgactctggctttcccccaggtatacatgttcctggtgaaatggcaggacctgtcg

SEQ ID NO: 6996 - RNA, 84 nt, synthetic construct
  source 1..84: mol_type = other RNA
gcctctttggaggctgaatggggtcccccgactctggctttcccccaggtgtacatgttcctggtgaaatggcaggatctgtcg

SEQ ID NO: 6997 - RNA, 84 nt, synthetic construct
  source 1..84: mol_type = other RNA
gcctctttggaggctgaatggggtcccccgactctggctttcccccaggtgtacatgttcctggtgaaatggcaggatttatcg

SEQ ID NO: 6998 - RNA, 84 nt, synthetic construct
  source 1..84: mol_type = other RNA
gcctctttggaggctgaatggggtcccccgactctggctttcccccaggtgtacatgttcctggtgaaatggcaggatttgtcg

SEQ ID NO: 6999 - RNA, 84 nt, synthetic construct
  source 1..84: mol_type = other RNA
gcctctttggaggctgaatggggtcccccgactctggctttcccccaggtttacatgttcctggtgaaatggcaggatttgtcg

SEQ ID NO: 7000 - RNA, 84 nt, synthetic construct
  source 1..84: mol_type = other RNA
gcctctttggaggctgaatggggtcccccgactctggctttcccccaggtttacatgttcctggtgaaatggcaggatttatcg

SEQ ID NO: 7001 - RNA, 84 nt, synthetic construct
  source 1..84: mol_type = other RNA
gcctctttggaggctgaatggggtcccccgactctggctttcccccaggtttacatgttcctggtgaaatggcaggatctgtcg

SEQ ID NO: 7002 - RNA, 84 nt, synthetic construct
  source 1..84: mol_type = other RNA
gcctctttggaggctgaatggggtcccccgactctggctttcccccaggtttacatgttcctggtgaaatggcaggacttgtcg

SEQ ID NO: 7003 - RNA, 84 nt, synthetic construct
  source 1..84: mol_type = other RNA
gcctctttggaggctgaatggggtcccccgactctggctttcccccaggtttacatgttcctggtgaaatggcaggacttatcg

SEQ ID NO: 7004 - RNA, 84 nt, synthetic construct
  source 1..84: mol_type = other RNA
gcctctttggaggctgaatggggtcccccgactctggctttcccccaggtttacatgttcctggtgaaatggcaggacctgtcg

SEQ ID NO: 7005 - RNA, 84 nt, synthetic construct
  source 1..84: mol_type = other RNA
gcctctttggaggctgaatggggtcccccgactctggctttcccccaggtatacatgttcctggtgaaatggcaggatttatcg

SEQ ID NO: 7006 - RNA, 84 nt, synthetic construct
  source 1..84: mol_type = other RNA
gcctctttggaggctgaatggggtcccccgactctggctttcccccaggtatacatgttcctggtgaaatggcaggacttatcg

SEQ ID NO: 7007 - RNA, 84 nt, synthetic construct
  source 1..84: mol_type = other RNA
gcctctttggaggctgaatggggtcccccgactctggctttcccccaggtgtacatgttcctggtgaaatggcaggacttgtcg

SEQ ID NO: 7008 - RNA, 84 nt, synthetic construct
  source 1..84: mol_type = other RNA
gcctctttggaggctgaatggggtcccccgactctggctttcccccaggtgtacatgttcctggtgaaatggcaggacttatcg

SEQ ID NO: 7009 - RNA, 84 nt, synthetic construct
  source 1..84: mol_type = other RNA
gcctctttggaggctgaatggggtcccccgactctggctttcccccaggtctacatgttcctggtgaaatggcaggatttgtcg

SEQ ID NO: 7010 - RNA, 84 nt, synthetic construct
  source 1..84: mol_type = other RNA
gcctctttggaggctgaatggggtcccccgactctggctttcccccaggtgtacatgttcctggtgaaatggcaggacctgtcg

SEQ ID NO: 7011 - RNA, 84 nt, synthetic construct
  source 1..84: mol_type = other RNA
gcctctttggaggctgaatggggtcccccgactctggctttcccccaggtctacatgttcctggtgaaatggcaggatctgtcg

SEQ ID NO: 7012 - RNA, 84 nt, synthetic construct
  source 1..84: mol_type = other RNA
gcctctttggaggctgaatggggtcccccgactctggctttcccccaggtctacatgttcctggtgaaatggcaggacttgtcg

SEQ ID NO: 7013 - RNA, 84 nt, synthetic construct
  source 1..84: mol_type = other RNA
gcctctttggaggctgaatggggtcccccgactctggctttcccccaggtctacatgttcctggtgaaatggcaggacttatcg

SEQ ID NO: 7014 - RNA, 84 nt, synthetic construct
  source 1..84: mol_type = other RNA
gcctctttggaggctgaatggggtcccccgactctggctttcccccaggtctacatgttcctggtgaaatggcaggacctgtcg

SEQ ID NO: 7015 - RNA, 84 nt, synthetic construct
  source 1..84: mol_type = other RNA
gcctctttggaggctgaatggggtcccccgactctggctttcccccaggtatacatgttcctggtgaaatggcaggatttgtcg

SEQ ID NO: 7016 - RNA, 85 nt, synthetic construct
  source 1..85: mol_type = other RNA
agcctctttggaggctgaatggggtcccccgactctggctttcccccaggtgtacatgttcctggtgaaatggcaggatttgtcg

SEQ ID NO: 7017 - RNA, 85 nt, synthetic construct
  source 1..85: mol_type = other RNA
agcctctttggaggctgaatggggtcccccgactctggctttcccccaggtttacatgttcctggtgaaatggcaggacttatcg

SEQ ID NO: 7018 - RNA, 85 nt, synthetic construct
  source 1..85: mol_type = other RNA
agcctctttggaggctgaatggggtcccccgactctggctttcccccaggtgtacatgttcctggtgaaatggcaggatttatcg

SEQ ID NO: 7019 - RNA, 85 nt, synthetic construct
  source 1..85: mol_type = other RNA
agcctctttggaggctgaatggggtcccccgactctggctttcccccaggtgtacatgttcctggtgaaatggcaggatctgtcg

SEQ ID NO: 7020 - RNA, 85 nt, synthetic construct
  source 1..85: mol_type = other RNA
agcctctttggaggctgaatggggtcccccgactctggctttcccccaggtgtacatgttcctggtgaaatggcaggacttgtcg

SEQ ID NO: 7021 - RNA, 85 nt, synthetic construct
  source 1..85: mol_type = other RNA
agcctctttggaggctgaatggggtcccccgactctggctttcccccaggtttacatgttcctggtgaaatggcaggacctgtcg

SEQ ID NO: 7022 - RNA, 85 nt, synthetic construct
  source 1..85: mol_type = other RNA
agcctctttggaggctgaatggggtcccccgactctggctttcccccaggtctacatgttcctggtgaaatggcaggatctgtcg

SEQ ID NO: 7023 - RNA, 85 nt, synthetic construct
  source 1..85: mol_type = other RNA
agcctctttggaggctgaatggggtcccccgactctggctttcccccaggtctacatgttcctggtgaaatggcaggacctgtcg

SEQ ID NO: 7024 - RNA, 85 nt, synthetic construct
  source 1..85: mol_type = other RNA
agcctctttggaggctgaatggggtcccccgactctggctttcccccaggtttacatgttcctggtgaaatggcaggatctgtcg

SEQ ID NO: 7025 - RNA, 85 nt, synthetic construct
  source 1..85: mol_type = other RNA
agcctctttggaggctgaatggggtcccccgactctggctttcccccaggtttacatgttcctggtgaaatggcaggatttatcg

SEQ ID NO: 7026 - RNA, 85 nt, synthetic construct
  source 1..85: mol_type = other RNA
agcctctttggaggctgaatggggtcccccgactctggctttcccccaggtgtacatgttcctggtgaaatggcaggacttatcg

SEQ ID NO: 7027 - RNA, 85 nt, synthetic construct
  source 1..85: mol_type = other RNA
agcctctttggaggctgaatggggtcccccgactctggctttcccccaggtttacatgttcctggtgaaatggcaggatttgtcg

SEQ ID NO: 7028 - RNA, 85 nt, synthetic construct
  source 1..85: mol_type = other RNA
agcctctttggaggctgaatggggtcccccgactctggctttcccccaggtgtacatgttcctggtgaaatggcaggacctgtcg

SEQ ID NO: 7029 - RNA, 85 nt, synthetic construct
  source 1..85: mol_type = other RNA
agcctctttggaggctgaatggggtcccccgactctggctttcccccaggtatacatgttcctggtgaaatggcaggacctgtcg

SEQ ID NO: 7030 - RNA, 85 nt, synthetic construct
  source 1..85: mol_type = other RNA
agcctctttggaggctgaatggggtcccccgactctggctttcccccaggtatacatgttcctggtgaaatggcaggatttatcg

SEQ ID NO: 7031 - RNA, 85 nt, synthetic construct
  source 1..85: mol_type = other RNA
agcctctttggaggctgaatggggtcccccgactctggctttcccccaggtatacatgttcctggtgaaatggcaggatctgtcg

SEQ ID NO: 7032 - RNA, 85 nt, synthetic construct
  source 1..85: mol_type = other RNA
agcctctttggaggctgaatggggtcccccgactctggctttcccccaggtatacatgttcctggtgaaatggcaggacttgtcg

SEQ ID NO: 7033 - RNA, 85 nt, synthetic construct
  source 1..85: mol_type = other RNA
agcctctttggaggctgaatggggtcccccgactctggctttcccccaggtatacatgttcctggtgaaatggcaggacttatcg

SEQ ID NO: 7034 - RNA, 85 nt, synthetic construct
  source 1..85: mol_type = other RNA
agcctctttggaggctgaatggggtcccccgactctggctttcccccaggtctacatgttcctggtgaaatggcaggatttgtcg

SEQ ID NO: 7035 - RNA, 85 nt, synthetic construct
  source 1..85: mol_type = other RNA
agcctctttggaggctgaatggggtcccccgactctggctttcccccaggtctacatgttcctggtgaaatggcaggatttatcg

SEQ ID NO: 7036 - RNA, 85 nt, synthetic construct
  source 1..85: mol_type = other RNA
agcctctttggaggctgaatggggtcccccgactctggctttcccccaggtatacatgttcctggtgaaatggcaggatttgtcg

SEQ ID NO: 7037 - RNA, 85 nt, synthetic construct
  source 1..85: mol_type = other RNA
agcctctttggaggctgaatggggtcccccgactctggctttcccccaggtctacatgttcctggtgaaatggcaggacttgtcg

SEQ ID NO: 7038 - RNA, 85 nt, synthetic construct
  source 1..85: mol_type = other RNA
agcctctttggaggctgaatggggtcccccgactctggctttcccccaggtttacatgttcctggtgaaatggcaggacttgtcg

SEQ ID NO: 7039 - RNA, 85 nt, synthetic construct
  source 1..85: mol_type = other RNA
agcctctttggaggctgaatggggtcccccgactctggctttcccccaggtctacatgttcctggtgaaatggcaggacttatcg

SEQ ID NO: 7040 - RNA, 86 nt, synthetic construct
  source 1..86: mol_type = other RNA
aagcctctttggaggctgaatggggtcccccgactctggctttcccccaggtctacatgttcctggtgaaatggcaggatttatcg

SEQ ID NO: 7041 - RNA, 86 nt, synthetic construct
  source 1..86: mol_type = other RNA
aagcctctttggaggctgaatggggtcccccgactctggctttcccccaggtctacatgttcctggtgaaatggcaggacttgtcg

SEQ ID NO: 7042 - RNA, 86 nt, synthetic construct
  source 1..86: mol_type = other RNA
aagcctctttggaggctgaatggggtcccccgactctggctttcccccaggtctacatgttcctggtgaaatggcaggacttatcg

SEQ ID NO: 7043 - RNA, 86 nt, synthetic construct
  source 1..86: mol_type = other RNA
aagcctctttggaggctgaatggggtcccccgactctggctttcccccaggtctacatgttcctggtgaaatggcaggacctgtcg

SEQ ID NO: 7044 - RNA, 86 nt, synthetic construct
  source 1..86: mol_type = other RNA
aagcctctttggaggctgaatggggtcccccgactctggctttcccccaggtatacatgttcctggtgaaatggcaggatttgtcg

SEQ ID NO: 7045 - RNA, 86 nt, synthetic construct
  source 1..86: mol_type = other RNA
aagcctctttggaggctgaatggggtcccccgactctggctttcccccaggtatacatgttcctggtgaaatggcaggatttatcg

SEQ ID NO: 7046 - RNA, 86 nt, synthetic construct
  source 1..86: mol_type = other RNA
aagcctctttggaggctgaatggggtcccccgactctggctttcccccaggtatacatgttcctggtgaaatggcaggatctgtcg

SEQ ID NO: 7047 - RNA, 86 nt, synthetic construct
  source 1..86: mol_type = other RNA
aagcctctttggaggctgaatggggtcccccgactctggctttcccccaggtatacatgttcctggtgaaatggcaggacttgtcg

SEQ ID NO: 7048 - RNA, 86 nt, synthetic construct
  source 1..86: mol_type = other RNA
aagcctctttggaggctgaatggggtcccccgactctggctttcccccaggtatacatgttcctggtgaaatggcaggacctgtcg

SEQ ID NO: 7049 - RNA, 86 nt, synthetic construct
  source 1..86: mol_type = other RNA
aagcctctttggaggctgaatggggtcccccgactctggctttcccccaggtgtacatgttcctggtgaaatggcaggacttatcg

SEQ ID NO: 7050 - RNA, 86 nt, synthetic construct
  source 1..86: mol_type = other RNA
aagcctctttggaggctgaatggggtcccccgactctggctttcccccaggtctacatgttcctggtgaaatggcaggatctgtcg

SEQ ID NO: 7051 - RNA, 86 nt, synthetic construct
  source 1..86: mol_type = other RNA
aagcctctttggaggctgaatggggtcccccgactctggctttcccccaggtatacatgttcctggtgaaatggcaggacttatcg

SEQ ID NO: 7052 - RNA, 86 nt, synthetic construct
  source 1..86: mol_type = other RNA
aagcctctttggaggctgaatggggtcccccgactctggctttcccccaggtctacatgttcctggtgaaatggcaggatttgtcg

SEQ ID NO: 7053 - RNA, 86 nt, synthetic construct
  source 1..86: mol_type = other RNA
aagcctctttggaggctgaatggggtcccccgactctggctttcccccaggtgtacatgttcctggtgaaatggcaggatctgtcg

SEQ ID NO: 7054 - RNA, 86 nt, synthetic construct
  source 1..86: mol_type = other RNA
aagcctctttggaggctgaatggggtcccccgactctggctttcccccaggtgtacatgttcctggtgaaatggcaggacctgtcg

SEQ ID NO: 7055 - RNA, 86 nt, synthetic construct
  source 1..86: mol_type = other RNA
aagcctctttggaggctgaatggggtcccccgactctggctttcccccaggtgtacatgttcctggtgaaatggcaggacttgtcg

SEQ ID NO: 7056 - RNA, 86 nt, synthetic construct
  source 1..86: mol_type = other RNA
aagcctctttggaggctgaatggggtcccccgactctggctttcccccaggtttacatgttcctggtgaaatggcaggatttgtcg

SEQ ID NO: 7057 - RNA, 86 nt, synthetic construct
  source 1..86: mol_type = other RNA
aagcctctttggaggctgaatggggtcccccgactctggctttcccccaggtttacatgttcctggtgaaatggcaggatttatcg

SEQ ID NO: 7058 - RNA, 86 nt, synthetic construct
  source 1..86: mol_type = other RNA
aagcctctttggaggctgaatggggtcccccgactctggctttcccccaggtttacatgttcctggtgaaatggcaggatctgtcg

SEQ ID NO: 7059 - RNA, 86 nt, synthetic construct
  source 1..86: mol_type = other RNA
aagcctctttggaggctgaatggggtcccccgactctggctttcccccaggtttacatgttcctggtgaaatggcaggacttgtcg

SEQ ID NO: 7060 - RNA, 86 nt, synthetic construct
  source 1..86: mol_type = other RNA
aagcctctttggaggctgaatggggtcccccgactctggctttcccccaggtttacatgttcctggtgaaatggcaggacttatcg

SEQ ID NO: 7061 - RNA, 86 nt, synthetic construct
  source 1..86: mol_type = other RNA
aagcctctttggaggctgaatggggtcccccgactctggctttcccccaggtttacatgttcctggtgaaatggcaggacctgtcg

SEQ ID NO: 7062 - RNA, 86 nt, synthetic construct
  source 1..86: mol_type = other RNA
aagcctctttggaggctgaatggggtcccccgactctggctttcccccaggtgtacatgttcctggtgaaatggcaggatttgtcg

SEQ ID NO: 7063 - RNA, 86 nt, synthetic construct
  source 1..86: mol_type = other RNA
aagcctctttggaggctgaatggggtcccccgactctggctttcccccaggtgtacatgttcctggtgaaatggcaggatttatcg

SEQ ID NO: 7064 - RNA, 87 nt, synthetic construct
  source 1..87: mol_type = other RNA
aaagcctctttggaggctgaatggggtcccccgactctggctttcccccaggtgtacatgttcctggtgaaatggcaggacctgtcg

SEQ ID NO: 7065 - RNA, 87 nt, synthetic construct
  source 1..87: mol_type = other RNA
aaagcctctttggaggctgaatggggtcccccgactctggctttcccccaggtgtacatgttcctggtgaaatggcaggacttatcg

SEQ ID NO: 7066 - RNA, 87 nt, synthetic construct
  source 1..87: mol_type = other RNA
aaagcctctttggaggctgaatggggtcccccgactctggctttcccccaggtgtacatgttcctggtgaaatggcaggatttatcg

SEQ ID NO: 7067 - RNA, 87 nt, synthetic construct
  source 1..87: mol_type = other RNA
aaagcctctttggaggctgaatggggtcccccgactctggctttcccccaggtgtacatgttcctggtgaaatggcaggatttgtcg

SEQ ID NO: 7068 - RNA, 87 nt, synthetic construct
  source 1..87: mol_type = other RNA
aaagcctctttggaggctgaatggggtcccccgactctggctttcccccaggtttacatgttcctggtgaaatggcaggacctgtcg

SEQ ID NO: 7069 - RNA, 87 nt, synthetic construct
  source 1..87: mol_type = other RNA
aaagcctctttggaggctgaatggggtcccccgactctggctttcccccaggtttacatgttcctggtgaaatggcaggacttatcg

SEQ ID NO: 7070 - RNA, 87 nt, synthetic construct
  source 1..87: mol_type = other RNA
aaagcctctttggaggctgaatggggtcccccgactctggctttcccccaggtttacatgttcctggtgaaatggcaggacttgtcg

SEQ ID NO: 7071 - RNA, 87 nt, synthetic construct
  source 1..87: mol_type = other RNA
aaagcctctttggaggctgaatggggtcccccgactctggctttcccccaggtttacatgttcctggtgaaatggcaggatctgtcg

SEQ ID NO: 7072 - RNA, 87 nt, synthetic construct
  source 1..87: mol_type = other RNA
aaagcctctttggaggctgaatggggtcccccgactctggctttcccccaggtttacatgttcctggtgaaatggcaggatttatcg

SEQ ID NO: 7073 - RNA, 87 nt, synthetic construct
  source 1..87: mol_type = other RNA
aaagcctctttggaggctgaatggggtcccccgactctggctttcccccaggtttacatgttcctggtgaaatggcaggatttgtcg

SEQ ID NO: 7074 - RNA, 87 nt, synthetic construct
  source 1..87: mol_type = other RNA
aaagcctctttggaggctgaatggggtcccccgactctggctttcccccaggtgtacatgttcctggtgaaatggcaggatctgtcg

SEQ ID NO: 7075 - RNA, 87 nt, synthetic construct
  source 1..87: mol_type = other RNA
aaagcctctttggaggctgaatggggtcccccgactctggctttcccccaggtctacatgttcctggtgaaatggcaggatctgtcg

SEQ ID NO: 7076 - RNA, 87 nt, synthetic construct
  source 1..87: mol_type = other RNA
aaagcctctttggaggctgaatggggtcccccgactctggctttcccccaggtctacatgttcctggtgaaatggcaggatttgtcg

SEQ ID NO: 7077 - RNA, 87 nt, synthetic construct
  source 1..87: mol_type = other RNA
aaagcctctttggaggctgaatggggtcccccgactctggctttcccccaggtatacatgttcctggtgaaatggcaggatttatcg

SEQ ID NO: 7078 - RNA, 87 nt, synthetic construct
  source 1..87: mol_type = other RNA
aaagcctctttggaggctgaatggggtcccccgactctggctttcccccaggtatacatgttcctggtgaaatggcaggacttatcg

SEQ ID NO: 7079 - RNA, 87 nt, synthetic construct
  source 1..87: mol_type = other RNA
aaagcctctttggaggctgaatggggtcccccgactctggctttcccccaggtatacatgttcctggtgaaatggcaggacttgtcg

SEQ ID NO: 7080 - RNA, 87 nt, synthetic construct
  source 1..87: mol_type = other RNA
aaagcctctttggaggctgaatggggtcccccgactctggctttcccccaggtctacatgttcctggtgaaatggcaggatttatcg

SEQ ID NO: 7081 - RNA, 87 nt, synthetic construct
  source 1..87: mol_type = other RNA
aaagcctctttggaggctgaatggggtcccccgactctggctttcccccaggtgtacatgttcctggtgaaatggcaggacttgtcg

SEQ ID NO: 7082 - RNA, 87 nt, synthetic construct
  source 1..87: mol_type = other RNA
aaagcctctttggaggctgaatggggtcccccgactctggctttcccccaggtctacatgttcctggtgaaatggcaggacttgtcg

SEQ ID NO: 7083 - RNA, 87 nt, synthetic construct
  source 1..87: mol_type = other RNA
aaagcctctttggaggctgaatggggtcccccgactctggctttcccccaggtctacatgttcctggtgaaatggcaggacttatcg

SEQ ID NO: 7084 - RNA, 87 nt, synthetic construct
  source 1..87: mol_type = other RNA
aaagcctctttggaggctgaatggggtcccccgactctggctttcccccaggtctacatgttcctggtgaaatggcaggacctgtcg

SEQ ID NO: 7085 - RNA, 87 nt, synthetic construct
  source 1..87: mol_type = other RNA
aaagcctctttggaggctgaatggggtcccccgactctggctttcccccaggtatacatgttcctggtgaaatggcaggatttgtcg

SEQ ID NO: 7086 - RNA, 87 nt, synthetic construct
  source 1..87: mol_type = other RNA
aaagcctctttggaggctgaatggggtcccccgactctggctttcccccaggtatacatgttcctggtgaaatggcaggacctgtcg

SEQ ID NO: 7087 - RNA, 87 nt, synthetic construct
  source 1..87: mol_type = other RNA
aaagcctctttggaggctgaatggggtcccccgactctggctttcccccaggtatacatgttcctggtgaaatggcaggatctgtcg

SEQ ID NO: 7088 - RNA, 88 nt, synthetic construct
  source 1..88: mol_type = other RNA
caaagcctctttggaggctgaatggggtcccccgactctggctttcccccaggtgtacatgttcctggtgaaatggcaggacttgtcg

SEQ ID NO: 7089 - RNA, 88 nt, synthetic construct
  source 1..88: mol_type = other RNA
caaagcctctttggaggctgaatggggtcccccgactctggctttcccccaggtgtacatgttcctggtgaaatggcaggacctgtcg

SEQ ID NO: 7090 - RNA, 88 nt, synthetic construct
  source 1..88: mol_type = other RNA
caaagcctctttggaggctgaatggggtcccccgactctggctttcccccaggtttacatgttcctggtgaaatggcaggatttatcg

SEQ ID NO: 7091 - RNA, 88 nt, synthetic construct
  source 1..88: mol_type = other RNA
caaagcctctttggaggctgaatggggtcccccgactctggctttcccccaggtttacatgttcctggtgaaatggcaggatctgtcg

SEQ ID NO: 7092 - RNA, 88 nt, synthetic construct
  source 1..88: mol_type = other RNA
caaagcctctttggaggctgaatggggtcccccgactctggctttcccccaggtttacatgttcctggtgaaatggcaggacttgtcg

SEQ ID NO: 7093 - RNA, 88 nt, synthetic construct
  source 1..88: mol_type = other RNA
caaagcctctttggaggctgaatggggtcccccgactctggctttcccccaggtttacatgttcctggtgaaatggcaggacttatcg

SEQ ID NO: 7094 - RNA, 88 nt, synthetic construct
  source 1..88: mol_type = other RNA
caaagcctctttggaggctgaatggggtcccccgactctggctttcccccaggtttacatgttcctggtgaaatggcaggacctgtcg

SEQ ID NO: 7095 - RNA, 88 nt, synthetic construct
  source 1..88: mol_type = other RNA
caaagcctctttggaggctgaatggggtcccccgactctggctttcccccaggtgtacatgttcctggtgaaatggcaggatttgtcg

SEQ ID NO: 7096 - RNA, 88 nt, synthetic construct
  source 1..88: mol_type = other RNA
caaagcctctttggaggctgaatggggtcccccgactctggctttcccccaggtgtacatgttcctggtgaaatggcaggatttatcg

SEQ ID NO: 7097 - RNA, 88 nt, synthetic construct
  source 1..88: mol_type = other RNA
caaagcctctttggaggctgaatggggtcccccgactctggctttcccccaggtgtacatgttcctggtgaaatggcaggatctgtcg

SEQ ID NO: 7098 - RNA, 88 nt, synthetic construct
  source 1..88: mol_type = other RNA
caaagcctctttggaggctgaatggggtcccccgactctggctttcccccaggtgtacatgttcctggtgaaatggcaggacttatcg

SEQ ID NO: 7099 - RNA, 88 nt, synthetic construct
  source 1..88: mol_type = other RNA
caaagcctctttggaggctgaatggggtcccccgactctggctttcccccaggtctacatgttcctggtgaaatggcaggacttatcg

SEQ ID NO: 7100 - RNA, 88 nt, synthetic construct
  source 1..88: mol_type = other RNA
caaagcctctttggaggctgaatggggtcccccgactctggctttcccccaggtttacatgttcctggtgaaatggcaggatttgtcg

SEQ ID NO: 7101 - RNA, 88 nt, synthetic construct
  source 1..88: mol_type = other RNA
caaagcctctttggaggctgaatggggtcccccgactctggctttcccccaggtctacatgttcctggtgaaatggcaggatttgtcg

SEQ ID NO: 7102 - RNA, 88 nt, synthetic construct
  source 1..88: mol_type = other RNA
caaagcctctttggaggctgaatggggtcccccgactctggctttcccccaggtctacatgttcctggtgaaatggcaggatctgtcg

SEQ ID NO: 7103 - RNA, 88 nt, synthetic construct
  source 1..88: mol_type = other RNA
caaagcctctttggaggctgaatggggtcccccgactctggctttcccccaggtctacatgttcctggtgaaatggcaggacttgtcg

SEQ ID NO: 7104 - RNA, 88 nt, synthetic construct
  source 1..88: mol_type = other RNA
caaagcctctttggaggctgaatggggtcccccgactctggctttcccccaggtctacatgttcctggtgaaatggcaggacctgtcg

SEQ ID NO: 7105 - RNA, 88 nt, synthetic construct
  source 1..88: mol_type = other RNA
caaagcctctttggaggctgaatggggtcccccgactctggctttcccccaggtatacatgttcctggtgaaatggcaggatttgtcg

SEQ ID NO: 7106 - RNA, 88 nt, synthetic construct
  source 1..88: mol_type = other RNA
caaagcctctttggaggctgaatggggtcccccgactctggctttcccccaggtatacatgttcctggtgaaatggcaggatttatcg

SEQ ID NO: 7107 - RNA, 88 nt, synthetic construct
  source 1..88: mol_type = other RNA
caaagcctctttggaggctgaatggggtcccccgactctggctttcccccaggtatacatgttcctggtgaaatggcaggatctgtcg

SEQ ID NO: 7108 - RNA, 88 nt, synthetic construct
  source 1..88: mol_type = other RNA
caaagcctctttggaggctgaatggggtcccccgactctggctttcccccaggtatacatgttcctggtgaaatggcaggacttgtcg

SEQ ID NO: 7109 - RNA, 88 nt, synthetic construct
  source 1..88: mol_type = other RNA
caaagcctctttggaggctgaatggggtcccccgactctggctttcccccaggtctacatgttcctggtgaaatggcaggatttatcg

SEQ ID NO: 7110 - RNA, 88 nt, synthetic construct
  source 1..88: mol_type = other RNA
caaagcctctttggaggctgaatggggtcccccgactctggctttcccccaggtatacatgttcctggtgaaatggcaggacttatcg

SEQ ID NO: 7111 - RNA, 88 nt, synthetic construct
  source 1..88: mol_type = other RNA
caaagcctctttggaggctgaatggggtcccccgactctggctttcccccaggtatacatgttcctggtgaaatggcaggacctgtcg

SEQ ID NO: 7112 - RNA, 89 nt, synthetic construct
  source 1..89: mol_type = other RNA
gcaaagcctctttggaggctgaatggggtcccccgactctggctttcccccaggtatacatgttcctggtgaaatggcaggacctgtcg

SEQ ID NO: 7113 - RNA, 89 nt, synthetic construct
  source 1..89: mol_type = other RNA
gcaaagcctctttggaggctgaatggggtcccccgactctggctttcccccaggtatacatgttcctggtgaaatggcaggatttgtcg

SEQ ID NO: 7114 - RNA, 89 nt, synthetic construct
  source 1..89: mol_type = other RNA
gcaaagcctctttggaggctgaatggggtcccccgactctggctttcccccaggtatacatgttcctggtgaaatggcaggacttatcg

SEQ ID NO: 7115 - RNA, 89 nt, synthetic construct
  source 1..89: mol_type = other RNA
gcaaagcctctttggaggctgaatggggtcccccgactctggctttcccccaggtctacatgttcctggtgaaatggcaggacctgtcg

SEQ ID NO: 7116 - RNA, 89 nt, synthetic construct
  source 1..89: mol_type = other RNA
gcaaagcctctttggaggctgaatggggtcccccgactctggctttcccccaggtctacatgttcctggtgaaatggcaggacttatcg

SEQ ID NO: 7117 - RNA, 89 nt, synthetic construct
  source 1..89: mol_type = other RNA
gcaaagcctctttggaggctgaatggggtcccccgactctggctttcccccaggtctacatgttcctggtgaaatggcaggacttgtcg

SEQ ID NO: 7118 - RNA, 89 nt, synthetic construct
  source 1..89: mol_type = other RNA
gcaaagcctctttggaggctgaatggggtcccccgactctggctttcccccaggtgtacatgttcctggtgaaatggcaggatctgtcg

SEQ ID NO: 7119 - RNA, 89 nt, synthetic construct
  source 1..89: mol_type = other RNA
gcaaagcctctttggaggctgaatggggtcccccgactctggctttcccccaggtttacatgttcctggtgaaatggcaggatttatcg

SEQ ID NO: 7120 - RNA, 89 nt, synthetic construct
  source 1..89: mol_type = other RNA
gcaaagcctctttggaggctgaatggggtcccccgactctggctttcccccaggtttacatgttcctggtgaaatggcaggacttgtcg

SEQ ID NO: 7121 - RNA, 89 nt, synthetic construct
  source 1..89: mol_type = other RNA
gcaaagcctctttggaggctgaatggggtcccccgactctggctttcccccaggtttacatgttcctggtgaaatggcaggatctgtcg

SEQ ID NO: 7122 - RNA, 89 nt, synthetic construct
  source 1..89: mol_type = other RNA
gcaaagcctctttggaggctgaatggggtcccccgactctggctttcccccaggtatacatgttcctggtgaaatggcaggacttgtcg

SEQ ID NO: 7123 - RNA, 89 nt, synthetic construct
  source 1..89: mol_type = other RNA
gcaaagcctctttggaggctgaatggggtcccccgactctggctttcccccaggtgtacatgttcctggtgaaatggcaggacttatcg

SEQ ID NO: 7124 - RNA, 89 nt, synthetic construct
  source 1..89: mol_type = other RNA
gcaaagcctctttggaggctgaatggggtcccccgactctggctttcccccaggtgtacatgttcctggtgaaatggcaggacctgtcg

SEQ ID NO: 7125 - RNA, 89 nt, synthetic construct
  source 1..89: mol_type = other RNA
gcaaagcctctttggaggctgaatggggtcccccgactctggctttcccccaggtgtacatgttcctggtgaaatggcaggatttatcg

SEQ ID NO: 7126 - RNA, 89 nt, synthetic construct
  source 1..89: mol_type = other RNA
gcaaagcctctttggaggctgaatggggtcccccgactctggctttcccccaggtgtacatgttcctggtgaaatggcaggatttgtcg

SEQ ID NO: 7127 - RNA, 89 nt, synthetic construct
  source 1..89: mol_type = other RNA
gcaaagcctctttggaggctgaatggggtcccccgactctggctttcccccaggtttacatgttcctggtgaaatggcaggacctgtcg

SEQ ID NO: 7128 - RNA, 89 nt, synthetic construct
  source 1..89: mol_type = other RNA
gcaaagcctctttggaggctgaatggggtcccccgactctggctttcccccaggtttacatgttcctggtgaaatggcaggacttatcg

SEQ ID NO: 7129 - RNA, 89 nt, synthetic construct
  source 1..89: mol_type = other RNA
gcaaagcctctttggaggctgaatggggtcccccgactctggctttcccccaggtgtacatgttcctggtgaaatggcaggacttgtcg

SEQ ID NO: 7130 - RNA, 89 nt, synthetic construct
  source 1..89: mol_type = other RNA
gcaaagcctctttggaggctgaatggggtcccccgactctggctttcccccaggtatacatgttcctggtgaaatggcaggatctgtcg

SEQ ID NO: 7131 - RNA, 89 nt, synthetic construct
  source 1..89: mol_type = other RNA
gcaaagcctctttggaggctgaatggggtcccccgactctggctttcccccaggtctacatgttcctggtgaaatggcaggatttgtcg

SEQ ID NO: 7132 - RNA, 89 nt, synthetic construct
  source 1..89: mol_type = other RNA
gcaaagcctctttggaggctgaatggggtcccccgactctggctttcccccaggtatacatgttcctggtgaaatggcaggatttatcg

SEQ ID NO: 7133 - RNA, 89 nt, synthetic construct
  source 1..89: mol_type = other RNA
gcaaagcctctttggaggctgaatggggtcccccgactctggctttcccccaggtctacatgttcctggtgaaatggcaggatttatcg

SEQ ID NO: 7134 - RNA, 89 nt, synthetic construct
  source 1..89: mol_type = other RNA
gcaaagcctctttggaggctgaatggggtcccccgactctggctttcccccaggtctacatgttcctggtgaaatggcaggatctgtcg

SEQ ID NO: 7135 - RNA, 89 nt, synthetic construct
  source 1..89: mol_type = other RNA
gcaaagcctctttggaggctgaatggggtcccccgactctggctttcccccaggtttacatgttcctggtgaaatggcaggatttgtcg

SEQ ID NO: 7136 - RNA, 90 nt, synthetic construct
  source 1..90: mol_type = other RNA
agcaaagcctctttggaggctgaatggggtcccccgactctggctttcccccaggtttacatgttcctggtgaaatggcaggacttgtcg

SEQ ID NO: 7137 - RNA, 90 nt, synthetic construct
  source 1..90: mol_type = other RNA
agcaaagcctctttggaggctgaatggggtcccccgactctggctttcccccaggtttacatgttcctggtgaaatggcaggatctgtcg

SEQ ID NO: 7138 - RNA, 90 nt, synthetic construct
  source 1..90: mol_type = other RNA
agcaaagcctctttggaggctgaatggggtcccccgactctggctttcccccaggtttacatgttcctggtgaaatggcaggatttgtcg

SEQ ID NO: 7139 - RNA, 90 nt, synthetic construct
  source 1..90: mol_type = other RNA
agcaaagcctctttggaggctgaatggggtcccccgactctggctttcccccaggtctacatgttcctggtgaaatggcaggatttgtcg

SEQ ID NO: 7140 - RNA, 90 nt, synthetic construct
  source 1..90: mol_type = other RNA
agcaaagcctctttggaggctgaatggggtcccccgactctggctttcccccaggtttacatgttcctggtgaaatggcaggacttatcg

SEQ ID NO: 7141 - RNA, 90 nt, synthetic construct
  source 1..90: mol_type = other RNA
agcaaagcctctttggaggctgaatggggtcccccgactctggctttcccccaggtctacatgttcctggtgaaatggcaggatttatcg

SEQ ID NO: 7142 - RNA, 90 nt, synthetic construct
  source 1..90: mol_type = other RNA
agcaaagcctctttggaggctgaatggggtcccccgactctggctttcccccaggtatacatgttcctggtgaaatggcaggacctgtcg

SEQ ID NO: 7143 - RNA, 90 nt, synthetic construct
  source 1..90: mol_type = other RNA
agcaaagcctctttggaggctgaatggggtcccccgactctggctttcccccaggtgtacatgttcctggtgaaatggcaggacttgtcg

SEQ ID NO: 7144 - RNA, 90 nt, synthetic construct
  source 1..90: mol_type = other RNA
agcaaagcctctttggaggctgaatggggtcccccgactctggctttcccccaggtctacatgttcctggtgaaatggcaggacttatcg

SEQ ID NO: 7145 - RNA, 90 nt, synthetic construct
  source 1..90: mol_type = other RNA
agcaaagcctctttggaggctgaatggggtcccccgactctggctttcccccaggtctacatgttcctggtgaaatggcaggacctgtcg

SEQ ID NO: 7146 - RNA, 90 nt, synthetic construct
  source 1..90: mol_type = other RNA
agcaaagcctctttggaggctgaatggggtcccccgactctggctttcccccaggtatacatgttcctggtgaaatggcaggatttgtcg

SEQ ID NO: 7147 - RNA, 90 nt, synthetic construct
  source 1..90: mol_type = other RNA
agcaaagcctctttggaggctgaatggggtcccccgactctggctttcccccaggtatacatgttcctggtgaaatggcaggatctgtcg

SEQ ID NO: 7148 - RNA, 90 nt, synthetic construct
  source 1..90: mol_type = other RNA
agcaaagcctctttggaggctgaatggggtcccccgactctggctttcccccaggtgtacatgttcctggtgaaatggcaggatctgtcg

SEQ ID NO: 7149 - RNA, 90 nt, synthetic construct
  source 1..90: mol_type = other RNA
agcaaagcctctttggaggctgaatggggtcccccgactctggctttcccccaggtatacatgttcctggtgaaatggcaggacttatcg

SEQ ID NO: 7150 - RNA, 90 nt, synthetic construct
  source 1..90: mol_type = other RNA
agcaaagcctctttggaggctgaatggggtcccccgactctggctttcccccaggtgtacatgttcctggtgaaatggcaggacttatcg

SEQ ID NO: 7151 - RNA, 90 nt, synthetic construct
  source 1..90: mol_type = other RNA
agcaaagcctctttggaggctgaatggggtcccccgactctggctttcccccaggtctacatgttcctggtgaaatggcaggatctgtcg

SEQ ID NO: 7152 - RNA, 90 nt, synthetic construct
  source 1..90: mol_type = other RNA
agcaaagcctctttggaggctgaatggggtcccccgactctggctttcccccaggtgtacatgttcctggtgaaatggcaggacctgtcg

SEQ ID NO: 7153 - RNA, 90 nt, synthetic construct
  source 1..90: mol_type = other RNA
agcaaagcctctttggaggctgaatggggtcccccgactctggctttcccccaggtctacatgttcctggtgaaatggcaggacttgtcg

SEQ ID NO: 7154 - RNA, 90 nt, synthetic construct
  source 1..90: mol_type = other RNA
agcaaagcctctttggaggctgaatggggtcccccgactctggctttcccccaggtatacatgttcctggtgaaatggcaggatttatcg

SEQ ID NO: 7155 - RNA, 90 nt, synthetic construct
  source 1..90: mol_type = other RNA
agcaaagcctctttggaggctgaatggggtcccccgactctggctttcccccaggtttacatgttcctggtgaaatggcaggatttatcg

SEQ ID NO: 7156 - RNA, 90 nt, synthetic construct
  source 1..90: mol_type = other RNA
agcaaagcctctttggaggctgaatggggtcccccgactctggctttcccccaggtttacatgttcctggtgaaatggcaggacctgtcg

SEQ ID NO: 7157 - RNA, 90 nt, synthetic construct
  source 1..90: mol_type = other RNA
agcaaagcctctttggaggctgaatggggtcccccgactctggctttcccccaggtgtacatgttcctggtgaaatggcaggatttatcg

SEQ ID NO: 7158 - RNA, 90 nt, synthetic construct
  source 1..90: mol_type = other RNA
agcaaagcctctttggaggctgaatggggtcccccgactctggctttcccccaggtatacatgttcctggtgaaatggcaggacttgtcg

SEQ ID NO: 7159 - RNA, 90 nt, synthetic construct
  source 1..90: mol_type = other RNA
agcaaagcctctttggaggctgaatggggtcccccgactctggctttcccccaggtgtacatgttcctggtgaaatggcaggatttgtcg

SEQ ID NO: 7160 - RNA, 91 nt, synthetic construct
  source 1..91: mol_type = other RNA
cagcaaagcctctttggaggctgaatggggtcccccgactctggctttcccccaggtatacatgttcctggtgaaatggcaggatttatcg

SEQ ID NO: 7161 - RNA, 91 nt, synthetic construct
  source 1..91: mol_type = other RNA
cagcaaagcctctttggaggctgaatggggtcccccgactctggctttcccccaggtgtacatgttcctggtgaaatggcaggatttgtcg

SEQ ID NO: 7162 - RNA, 91 nt, synthetic construct
  source 1..91: mol_type = other RNA
cagcaaagcctctttggaggctgaatggggtcccccgactctggctttcccccaggtgtacatgttcctggtgaaatggcaggatttatcg

SEQ ID NO: 7163 - RNA, 91 nt, synthetic construct
  source 1..91: mol_type = other RNA
cagcaaagcctctttggaggctgaatggggtcccccgactctggctttcccccaggtgtacatgttcctggtgaaatggcaggatctgtcg

SEQ ID NO: 7164 - RNA, 91 nt, synthetic construct
  source 1..91: mol_type = other RNA
cagcaaagcctctttggaggctgaatggggtcccccgactctggctttcccccaggtgtacatgttcctggtgaaatggcaggacttgtcg

SEQ ID NO: 7165 - RNA, 91 nt, synthetic construct
  source 1..91: mol_type = other RNA
cagcaaagcctctttggaggctgaatggggtcccccgactctggctttcccccaggtgtacatgttcctggtgaaatggcaggacttatcg

SEQ ID NO: 7166 - RNA, 91 nt, synthetic construct
  source 1..91: mol_type = other RNA
cagcaaagcctctttggaggctgaatggggtcccccgactctggctttcccccaggtgtacatgttcctggtgaaatggcaggacctgtcg

SEQ ID NO: 7167 - RNA, 91 nt, synthetic construct
  source 1..91: mol_type = other RNA
cagcaaagcctctttggaggctgaatggggtcccccgactctggctttcccccaggtttacatgttcctggtgaaatggcaggacttgtcg

SEQ ID NO: 7168 - RNA, 91 nt, synthetic construct
  source 1..91: mol_type = other RNA
cagcaaagcctctttggaggctgaatggggtcccccgactctggctttcccccaggtctacatgttcctggtgaaatggcaggatttatcg

SEQ ID NO: 7169 - RNA, 91 nt, synthetic construct
  source 1..91: mol_type = other RNA
cagcaaagcctctttggaggctgaatggggtcccccgactctggctttcccccaggtctacatgttcctggtgaaatggcaggatctgtcg

SEQ ID NO: 7170 - RNA, 91 nt, synthetic construct
  source 1..91: mol_type = other RNA
cagcaaagcctctttggaggctgaatggggtcccccgactctggctttcccccaggtttacatgttcctggtgaaatggcaggatctgtcg

SEQ ID NO: 7171 - RNA, 91 nt, synthetic construct
  source 1..91: mol_type = other RNA
cagcaaagcctctttggaggctgaatggggtcccccgactctggctttcccccaggtctacatgttcctggtgaaatggcaggacttgtcg

SEQ ID NO: 7172 - RNA, 91 nt, synthetic construct
  source 1..91: mol_type = other RNA
cagcaaagcctctttggaggctgaatggggtcccccgactctggctttcccccaggtctacatgttcctggtgaaatggcaggacctgtcg

SEQ ID NO: 7173 - RNA, 91 nt, synthetic construct
  source 1..91: mol_type = other RNA
cagcaaagcctctttggaggctgaatggggtcccccgactctggctttcccccaggtatacatgttcctggtgaaatggcaggatttgtcg

SEQ ID NO: 7174 - RNA, 91 nt, synthetic construct
  source 1..91: mol_type = other RNA
cagcaaagcctctttggaggctgaatggggtcccccgactctggctttcccccaggtatacatgttcctggtgaaatggcaggatctgtcg

SEQ ID NO: 7175 - RNA, 91 nt, synthetic construct
  source 1..91: mol_type = other RNA
cagcaaagcctctttggaggctgaatggggtcccccgactctggctttcccccaggtatacatgttcctggtgaaatggcaggacttgtcg

SEQ ID NO: 7176 - RNA, 91 nt, synthetic construct
  source 1..91: mol_type = other RNA
cagcaaagcctctttggaggctgaatggggtcccccgactctggctttcccccaggtatacatgttcctggtgaaatggcaggacttatcg

SEQ ID NO: 7177 - RNA, 91 nt, synthetic construct
  source 1..91: mol_type = other RNA
cagcaaagcctctttggaggctgaatggggtcccccgactctggctttcccccaggtatacatgttcctggtgaaatggcaggacctgtcg

SEQ ID NO: 7178 - RNA, 91 nt, synthetic construct
  source 1..91: mol_type = other RNA
cagcaaagcctctttggaggctgaatggggtcccccgactctggctttcccccaggtctacatgttcctggtgaaatggcaggatttgtcg

SEQ ID NO: 7179 - RNA, 91 nt, synthetic construct
  source 1..91: mol_type = other RNA
cagcaaagcctctttggaggctgaatggggtcccccgactctggctttcccccaggtttacatgttcctggtgaaatggcaggatttatcg

SEQ ID NO: 7180 - RNA, 91 nt, synthetic construct
  source 1..91: mol_type = other RNA
cagcaaagcctctttggaggctgaatggggtcccccgactctggctttcccccaggtttacatgttcctggtgaaatggcaggacctgtcg

SEQ ID NO: 7181 - RNA, 91 nt, synthetic construct
  source 1..91: mol_type = other RNA
cagcaaagcctctttggaggctgaatggggtcccccgactctggctttcccccaggtctacatgttcctggtgaaatggcaggacttatcg

SEQ ID NO: 7182 - RNA, 91 nt, synthetic construct
  source 1..91: mol_type = other RNA
cagcaaagcctctttggaggctgaatggggtcccccgactctggctttcccccaggtttacatgttcctggtgaaatggcaggatttgtcg

SEQ ID NO: 7183 - RNA, 91 nt, synthetic construct
  source 1..91: mol_type = other RNA
cagcaaagcctctttggaggctgaatggggtcccccgactctggctttcccccaggtttacatgttcctggtgaaatggcaggacttatcg

SEQ ID NO: 7184 - RNA, 92 nt, synthetic construct
  source 1..92: mol_type = other RNA
acagcaaagcctctttggaggctgaatggggtcccccgactctggctttcccccaggtatacatgttcctggtgaaatggcaggacttatcg

SEQ ID NO: 7185 - RNA, 92 nt, synthetic construct
  source 1..92: mol_type = other RNA
acagcaaagcctctttggaggctgaatggggtcccccgactctggctttcccccaggtttacatgttcctggtgaaatggcaggatttgtcg

SEQ ID NO: 7186 - RNA, 92 nt, synthetic construct
  source 1..92: mol_type = other RNA
acagcaaagcctctttggaggctgaatggggtcccccgactctggctttcccccaggtctacatgttcctggtgaaatggcaggacctgtcg

SEQ ID NO: 7187 - RNA, 92 nt, synthetic construct
  source 1..92: mol_type = other RNA
acagcaaagcctctttggaggctgaatggggtcccccgactctggctttcccccaggtatacatgttcctggtgaaatggcaggacctgtcg

SEQ ID NO: 7188 - RNA, 92 nt, synthetic construct
  source 1..92: mol_type = other RNA
acagcaaagcctctttggaggctgaatggggtcccccgactctggctttcccccaggtctacatgttcctggtgaaatggcaggatctgtcg

SEQ ID NO: 7189 - RNA, 92 nt, synthetic construct
  source 1..92: mol_type = other RNA
acagcaaagcctctttggaggctgaatggggtcccccgactctggctttcccccaggtatacatgttcctggtgaaatggcaggacttgtcg

SEQ ID NO: 7190 - RNA, 92 nt, synthetic construct
  source 1..92: mol_type = other RNA
acagcaaagcctctttggaggctgaatggggtcccccgactctggctttcccccaggtgtacatgttcctggtgaaatggcaggatctgtcg

SEQ ID NO: 7191 - RNA, 92 nt, synthetic construct
  source 1..92: mol_type = other RNA
acagcaaagcctctttggaggctgaatggggtcccccgactctggctttcccccaggtttacatgttcctggtgaaatggcaggatttatcg

SEQ ID NO: 7192 - RNA, 92 nt, synthetic construct
  source 1..92: mol_type = other RNA
acagcaaagcctctttggaggctgaatggggtcccccgactctggctttcccccaggtttacatgttcctggtgaaatggcaggatctgtcg

SEQ ID NO: 7193 - RNA, 92 nt, synthetic construct
  source 1..92: mol_type = other RNA
acagcaaagcctctttggaggctgaatggggtcccccgactctggctttcccccaggtttacatgttcctggtgaaatggcaggacttgtcg

SEQ ID NO: 7194 - RNA, 92 nt, synthetic construct
  source 1..92: mol_type = other RNA
acagcaaagcctctttggaggctgaatggggtcccccgactctggctttcccccaggtttacatgttcctggtgaaatggcaggacttatcg

SEQ ID NO: 7195 - RNA, 92 nt, synthetic construct
  source 1..92: mol_type = other RNA
acagcaaagcctctttggaggctgaatggggtcccccgactctggctttcccccaggtttacatgttcctggtgaaatggcaggacctgtcg

SEQ ID NO: 7196 - RNA, 92 nt, synthetic construct
  source 1..92: mol_type = other RNA
acagcaaagcctctttggaggctgaatggggtcccccgactctggctttcccccaggtctacatgttcctggtgaaatggcaggacttatcg

SEQ ID NO: 7197 - RNA, 92 nt, synthetic construct
  source 1..92: mol_type = other RNA
acagcaaagcctctttggaggctgaatggggtcccccgactctggctttcccccaggtgtacatgttcctggtgaaatggcaggatttgtcg

SEQ ID NO: 7198 - RNA, 92 nt, synthetic construct
  source 1..92: mol_type = other RNA
acagcaaagcctctttggaggctgaatggggtcccccgactctggctttcccccaggtgtacatgttcctggtgaaatggcaggatttatcg

SEQ ID NO: 7199 - RNA, 92 nt, synthetic construct
  source 1..92: mol_type = other RNA
acagcaaagcctctttggaggctgaatggggtcccccgactctggctttcccccaggtctacatgttcctggtgaaatggcaggatttatcg

SEQ ID NO: 7200 - RNA, 92 nt, synthetic construct
  source 1..92: mol_type = other RNA
acagcaaagcctctttggaggctgaatggggtcccccgactctggctttcccccaggtatacatgttcctggtgaaatggcaggatctgtcg

SEQ ID NO: 7201 - RNA, 92 nt, synthetic construct
  source 1..92: mol_type = other RNA
acagcaaagcctctttggaggctgaatggggtcccccgactctggctttcccccaggtctacatgttcctggtgaaatggcaggatttgtcg

SEQ ID NO: 7202 - RNA, 92 nt, synthetic construct
  source 1..92: mol_type = other RNA
acagcaaagcctctttggaggctgaatggggtcccccgactctggctttcccccaggtgtacatgttcctggtgaaatggcaggacctgtcg

SEQ ID NO: 7203 - RNA, 92 nt, synthetic construct
  source 1..92: mol_type = other RNA
acagcaaagcctctttggaggctgaatggggtcccccgactctggctttcccccaggtgtacatgttcctggtgaaatggcaggacttatcg

SEQ ID NO: 7204 - RNA, 92 nt, synthetic construct
  source 1..92: mol_type = other RNA
acagcaaagcctctttggaggctgaatggggtcccccgactctggctttcccccaggtgtacatgttcctggtgaaatggcaggacttgtcg

SEQ ID NO: 7205 - RNA, 92 nt, synthetic construct
  source 1..92: mol_type = other RNA
acagcaaagcctctttggaggctgaatggggtcccccgactctggctttcccccaggtctacatgttcctggtgaaatggcaggacttgtcg

SEQ ID NO: 7206 - RNA, 92 nt, synthetic construct
  source 1..92: mol_type = other RNA
acagcaaagcctctttggaggctgaatggggtcccccgactctggctttcccccaggtatacatgttcctggtgaaatggcaggatttgtcg

SEQ ID NO: 7207 - RNA, 92 nt, synthetic construct
  source 1..92: mol_type = other RNA
acagcaaagcctctttggaggctgaatggggtcccccgactctggctttcccccaggtatacatgttcctggtgaaatggcaggatttatcg

SEQ ID NO: 7208 - RNA, 93 nt, synthetic construct
  source 1..93: mol_type = other RNA
cacagcaaagcctctttggaggctgaatggggtcccccgactctggctttcccccaggtttacatgttcctggtgaaatggcaggacttatcg

SEQ ID NO: 7209 - RNA, 93 nt, synthetic construct
  source 1..93: mol_type = other RNA
cacagcaaagcctctttggaggctgaatggggtcccccgactctggctttcccccaggtgtacatgttcctggtgaaatggcaggacttgtcg

SEQ ID NO: 7210 - RNA, 93 nt, synthetic construct
  source 1..93: mol_type = other RNA
cacagcaaagcctctttggaggctgaatggggtcccccgactctggctttcccccaggtatacatgttcctggtgaaatggcaggacttatcg

SEQ ID NO: 7211 - RNA, 93 nt, synthetic construct
  source 1..93: mol_type = other RNA
cacagcaaagcctctttggaggctgaatggggtcccccgactctggctttcccccaggtttacatgttcctggtgaaatggcaggacttgtcg

SEQ ID NO: 7212 - RNA, 93 nt, synthetic construct
  source 1..93: mol_type = other RNA
cacagcaaagcctctttggaggctgaatggggtcccccgactctggctttcccccaggtttacatgttcctggtgaaatggcaggatctgtcg

SEQ ID NO: 7213 - RNA, 93 nt, synthetic construct
  source 1..93: mol_type = other RNA
cacagcaaagcctctttggaggctgaatggggtcccccgactctggctttcccccaggtttacatgttcctggtgaaatggcaggatttgtcg

SEQ ID NO: 7214 - RNA, 93 nt, synthetic construct
  source 1..93: mol_type = other RNA
cacagcaaagcctctttggaggctgaatggggtcccccgactctggctttcccccaggtgtacatgttcctggtgaaatggcaggacctgtcg

SEQ ID NO: 7215 - RNA, 93 nt, synthetic construct
  source 1..93: mol_type = other RNA
cacagcaaagcctctttggaggctgaatggggtcccccgactctggctttcccccaggtatacatgttcctggtgaaatggcaggatttatcg

SEQ ID NO: 7216 - RNA, 93 nt, synthetic construct
  source 1..93: mol_type = other RNA
cacagcaaagcctctttggaggctgaatggggtcccccgactctggctttcccccaggtatacatgttcctggtgaaatggcaggatttgtcg

SEQ ID NO: 7217 - RNA, 93 nt, synthetic construct
  source 1..93: mol_type = other RNA
cacagcaaagcctctttggaggctgaatggggtcccccgactctggctttcccccaggtctacatgttcctggtgaaatggcaggacttatcg

SEQ ID NO: 7218 - RNA, 93 nt, synthetic construct
  source 1..93: mol_type = other RNA
cacagcaaagcctctttggaggctgaatggggtcccccgactctggctttcccccaggtctacatgttcctggtgaaatggcaggatttgtcg

SEQ ID NO: 7219 - RNA, 93 nt, synthetic construct
  source 1..93: mol_type = other RNA
cacagcaaagcctctttggaggctgaatggggtcccccgactctggctttcccccaggtctacatgttcctggtgaaatggcaggatctgtcg

SEQ ID NO: 7220 - RNA, 93 nt, synthetic construct
  source 1..93: mol_type = other RNA
cacagcaaagcctctttggaggctgaatggggtcccccgactctggctttcccccaggtctacatgttcctggtgaaatggcaggatttatcg

SEQ ID NO: 7221 - RNA, 93 nt, synthetic construct
  source 1..93: mol_type = other RNA
cacagcaaagcctctttggaggctgaatggggtcccccgactctggctttcccccaggtttacatgttcctggtgaaatggcaggatttatcg

SEQ ID NO: 7222 - RNA, 93 nt, synthetic construct
  source 1..93: mol_type = other RNA
cacagcaaagcctctttggaggctgaatggggtcccccgactctggctttcccccaggtatacatgttcctggtgaaatggcaggatctgtcg

SEQ ID NO: 7223 - RNA, 93 nt, synthetic construct
  source 1..93: mol_type = other RNA
cacagcaaagcctctttggaggctgaatggggtcccccgactctggctttcccccaggtctacatgttcctggtgaaatggcaggacttgtcg

SEQ ID NO: 7224 - RNA, 93 nt, synthetic construct
  source 1..93: mol_type = other RNA
cacagcaaagcctctttggaggctgaatggggtcccccgactctggctttcccccaggtatacatgttcctggtgaaatggcaggacttgtcg

SEQ ID NO: 7225 - RNA, 93 nt, synthetic construct
  source 1..93: mol_type = other RNA
cacagcaaagcctctttggaggctgaatggggtcccccgactctggctttcccccaggtgtacatgttcctggtgaaatggcaggatctgtcg

SEQ ID NO: 7226 - RNA, 93 nt, synthetic construct
  source 1..93: mol_type = other RNA
cacagcaaagcctctttggaggctgaatggggtcccccgactctggctttcccccaggtatacatgttcctggtgaaatggcaggacctgtcg

SEQ ID NO: 7227 - RNA, 93 nt, synthetic construct
  source 1..93: mol_type = other RNA
cacagcaaagcctctttggaggctgaatggggtcccccgactctggctttcccccaggtctacatgttcctggtgaaatggcaggacctgtcg

SEQ ID NO: 7228 - RNA, 93 nt, synthetic construct
  source 1..93: mol_type = other RNA
cacagcaaagcctctttggaggctgaatggggtcccccgactctggctttcccccaggtgtacatgttcctggtgaaatggcaggacttatcg

SEQ ID NO: 7229 - RNA, 93 nt, synthetic construct
  source 1..93: mol_type = other RNA
cacagcaaagcctctttggaggctgaatggggtcccccgactctggctttcccccaggtgtacatgttcctggtgaaatggcaggatttatcg

SEQ ID NO: 7230 - RNA, 93 nt, synthetic construct
  source 1..93: mol_type = other RNA
cacagcaaagcctctttggaggctgaatggggtcccccgactctggctttcccccaggtgtacatgttcctggtgaaatggcaggatttgtcg

SEQ ID NO: 7231 - RNA, 93 nt, synthetic construct
  source 1..93: mol_type = other RNA
cacagcaaagcctctttggaggctgaatggggtcccccgactctggctttcccccaggtttacatgttcctggtgaaatggcaggacctgtcg

SEQ ID NO: 7232 - RNA, 94 nt, synthetic construct
  source 1..94: mol_type = other RNA
acacagcaaagcctctttggaggctgaatggggtcccccgactctggctttcccccaggtctacatgttcctggtgaaatggcaggatttgtcg

SEQ ID NO: 7233 - RNA, 94 nt, synthetic construct
  source 1..94: mol_type = other RNA
acacagcaaagcctctttggaggctgaatggggtcccccgactctggctttcccccaggtatacatgttcctggtgaaatggcaggatctgtcg

SEQ ID NO: 7234 - RNA, 94 nt, synthetic construct
  source 1..94: mol_type = other RNA
acacagcaaagcctctttggaggctgaatggggtcccccgactctggctttcccccaggtctacatgttcctggtgaaatggcaggatttatcg

SEQ ID NO: 7235 - RNA, 94 nt, synthetic construct
  source 1..94: mol_type = other RNA
acacagcaaagcctctttggaggctgaatggggtcccccgactctggctttcccccaggtctacatgttcctggtgaaatggcaggatctgtcg

SEQ ID NO: 7236 - RNA, 94 nt, synthetic construct
  source 1..94: mol_type = other RNA
acacagcaaagcctctttggaggctgaatggggtcccccgactctggctttcccccaggtctacatgttcctggtgaaatggcaggacttatcg

SEQ ID NO: 7237 - RNA, 94 nt, synthetic construct
  source 1..94: mol_type = other RNA
acacagcaaagcctctttggaggctgaatggggtcccccgactctggctttcccccaggtatacatgttcctggtgaaatggcaggacttgtcg

SEQ ID NO: 7238 - RNA, 94 nt, synthetic construct
  source 1..94: mol_type = other RNA
acacagcaaagcctctttggaggctgaatggggtcccccgactctggctttcccccaggtgtacatgttcctggtgaaatggcaggatctgtcg

SEQ ID NO: 7239 - RNA, 94 nt, synthetic construct
  source 1..94: mol_type = other RNA
acacagcaaagcctctttggaggctgaatggggtcccccgactctggctttcccccaggtatacatgttcctggtgaaatggcaggacttatcg

SEQ ID NO: 7240 - RNA, 94 nt, synthetic construct
  source 1..94: mol_type = other RNA
acacagcaaagcctctttggaggctgaatggggtcccccgactctggctttcccccaggtgtacatgttcctggtgaaatggcaggatttatcg

SEQ ID NO: 7241 - RNA, 94 nt, synthetic construct
  source 1..94: mol_type = other RNA
acacagcaaagcctctttggaggctgaatggggtcccccgactctggctttcccccaggtgtacatgttcctggtgaaatggcaggatttgtcg

SEQ ID NO: 7242 - RNA, 94 nt, synthetic construct
  source 1..94: mol_type = other RNA
acacagcaaagcctctttggaggctgaatggggtcccccgactctggctttcccccaggtttacatgttcctggtgaaatggcaggacctgtcg

SEQ ID NO: 7243 - RNA, 94 nt, synthetic construct
  source 1..94: mol_type = other RNA
acacagcaaagcctctttggaggctgaatggggtcccccgactctggctttcccccaggtctacatgttcctggtgaaatggcaggacttgtcg

SEQ ID NO: 7244 - RNA, 94 nt, synthetic construct
  source 1..94: mol_type = other RNA
acacagcaaagcctctttggaggctgaatggggtcccccgactctggctttcccccaggtttacatgttcctggtgaaatggcaggacttatcg

SEQ ID NO: 7245 - RNA, 94 nt, synthetic construct
  source 1..94: mol_type = other RNA
acacagcaaagcctctttggaggctgaatggggtcccccgactctggctttcccccaggtttacatgttcctggtgaaatggcaggatctgtcg

SEQ ID NO: 7246 - RNA, 94 nt, synthetic construct
  source 1..94: mol_type = other RNA
acacagcaaagcctctttggaggctgaatggggtcccccgactctggctttcccccaggtttacatgttcctggtgaaatggcaggatttatcg

SEQ ID NO: 7247 - RNA, 94 nt, synthetic construct
  source 1..94: mol_type = other RNA
acacagcaaagcctctttggaggctgaatggggtcccccgactctggctttcccccaggtttacatgttcctggtgaaatggcaggatttgtcg

SEQ ID NO: 7248 - RNA, 94 nt, synthetic construct
  source 1..94: mol_type = other RNA
acacagcaaagcctctttggaggctgaatggggtcccccgactctggctttcccccaggtgtacatgttcctggtgaaatggcaggacttatcg

SEQ ID NO: 7249 - RNA, 94 nt, synthetic construct
  source 1..94: mol_type = other RNA
acacagcaaagcctctttggaggctgaatggggtcccccgactctggctttcccccaggtatacatgttcctggtgaaatggcaggacctgtcg

SEQ ID NO: 7250 - RNA, 94 nt, synthetic construct
  source 1..94: mol_type = other RNA
acacagcaaagcctctttggaggctgaatggggtcccccgactctggctttcccccaggtgtacatgttcctggtgaaatggcaggacttgtcg

SEQ ID NO: 7251 - RNA, 94 nt, synthetic construct
  source 1..94: mol_type = other RNA
acacagcaaagcctctttggaggctgaatggggtcccccgactctggctttcccccaggtgtacatgttcctggtgaaatggcaggacctgtcg

SEQ ID NO: 7252 - RNA, 94 nt, synthetic construct
  source 1..94: mol_type = other RNA
acacagcaaagcctctttggaggctgaatggggtcccccgactctggctttcccccaggtatacatgttcctggtgaaatggcaggatttatcg

SEQ ID NO: 7253 - RNA, 94 nt, synthetic construct
  source 1..94: mol_type = other RNA
acacagcaaagcctctttggaggctgaatggggtcccccgactctggctttcccccaggtatacatgttcctggtgaaatggcaggatttgtcg

SEQ ID NO: 7254 - RNA, 94 nt, synthetic construct
  source 1..94: mol_type = other RNA
acacagcaaagcctctttggaggctgaatggggtcccccgactctggctttcccccaggtctacatgttcctggtgaaatggcaggacctgtcg

SEQ ID NO: 7255 - RNA, 94 nt, synthetic construct
  source 1..94: mol_type = other RNA
acacagcaaagcctctttggaggctgaatggggtcccccgactctggctttcccccaggtttacatgttcctggtgaaatggcaggacttgtcg

SEQ ID NO: 7256 - RNA, 95 nt, synthetic construct
  source 1..95: mol_type = other RNA
cacacagcaaagcctctttggaggctgaatggggtcccccgactctggctttcccccaggtctacatgttcctggtgaaatggcaggatttgtcg

SEQ ID NO: 7257 - RNA, 95 nt, synthetic construct
  source 1..95: mol_type = other RNA
cacacagcaaagcctctttggaggctgaatggggtcccccgactctggctttcccccaggtttacatgttcctggtgaaatggcaggatttgtcg

SEQ ID NO: 7258 - RNA, 95 nt, synthetic construct
  source 1..95: mol_type = other RNA
cacacagcaaagcctctttggaggctgaatggggtcccccgactctggctttcccccaggtgtacatgttcctggtgaaatggcaggacctgtcg

SEQ ID NO: 7259 - RNA, 95 nt, synthetic construct
  source 1..95: mol_type = other RNA
cacacagcaaagcctctttggaggctgaatggggtcccccgactctggctttcccccaggtttacatgttcctggtgaaatggcaggatttatcg

SEQ ID NO: 7260 - RNA, 95 nt, synthetic construct
  source 1..95: mol_type = other RNA
cacacagcaaagcctctttggaggctgaatggggtcccccgactctggctttcccccaggtttacatgttcctggtgaaatggcaggatctgtcg

SEQ ID NO: 7261 - RNA, 95 nt, synthetic construct
  source 1..95: mol_type = other RNA
cacacagcaaagcctctttggaggctgaatggggtcccccgactctggctttcccccaggtttacatgttcctggtgaaatggcaggacttatcg

SEQ ID NO: 7262 - RNA, 95 nt, synthetic construct
  source 1..95: mol_type = other RNA
cacacagcaaagcctctttggaggctgaatggggtcccccgactctggctttcccccaggtttacatgttcctggtgaaatggcaggacctgtcg

SEQ ID NO: 7263 - RNA, 95 nt, synthetic construct
  source 1..95: mol_type = other RNA
cacacagcaaagcctctttggaggctgaatggggtcccccgactctggctttcccccaggtgtacatgttcctggtgaaatggcaggatttgtcg

SEQ ID NO: 7264 - RNA, 95 nt, synthetic construct
  source 1..95: mol_type = other RNA
cacacagcaaagcctctttggaggctgaatggggtcccccgactctggctttcccccaggtgtacatgttcctggtgaaatggcaggatttatcg

SEQ ID NO: 7265 - RNA, 95 nt, synthetic construct
  source 1..95: mol_type = other RNA
cacacagcaaagcctctttggaggctgaatggggtcccccgactctggctttcccccaggtgtacatgttcctggtgaaatggcaggatctgtcg

SEQ ID NO: 7266 - RNA, 95 nt, synthetic construct
  source 1..95: mol_type = other RNA
cacacagcaaagcctctttggaggctgaatggggtcccccgactctggctttcccccaggtgtacatgttcctggtgaaatggcaggacttatcg

SEQ ID NO: 7267 - RNA, 95 nt, synthetic construct
  source 1..95: mol_type = other RNA
cacacagcaaagcctctttggaggctgaatggggtcccccgactctggctttcccccaggtatacatgttcctggtgaaatggcaggacctgtcg

SEQ ID NO: 7268 - RNA, 95 nt, synthetic construct
  source 1..95: mol_type = other RNA
cacacagcaaagcctctttggaggctgaatggggtcccccgactctggctttcccccaggtatacatgttcctggtgaaatggcaggacttatcg

SEQ ID NO: 7269 - RNA, 95 nt, synthetic construct
  source 1..95: mol_type = other RNA
cacacagcaaagcctctttggaggctgaatggggtcccccgactctggctttcccccaggtatacatgttcctggtgaaatggcaggacttgtcg

SEQ ID NO: 7270 - RNA, 95 nt, synthetic construct
  source 1..95: mol_type = other RNA
cacacagcaaagcctctttggaggctgaatggggtcccccgactctggctttcccccaggtatacatgttcctggtgaaatggcaggatctgtcg

SEQ ID NO: 7271 - RNA, 95 nt, synthetic construct
  source 1..95: mol_type = other RNA
cacacagcaaagcctctttggaggctgaatggggtcccccgactctggctttcccccaggtttacatgttcctggtgaaatggcaggacttgtcg

SEQ ID NO: 7272 - RNA, 95 nt, synthetic construct
  source 1..95: mol_type = other RNA
cacacagcaaagcctctttggaggctgaatggggtcccccgactctggctttcccccaggtatacatgttcctggtgaaatggcaggatttatcg

SEQ ID NO: 7273 - RNA, 95 nt, synthetic construct
  source 1..95: mol_type = other RNA
cacacagcaaagcctctttggaggctgaatggggtcccccgactctggctttcccccaggtatacatgttcctggtgaaatggcaggatttgtcg

SEQ ID NO: 7274 - RNA, 95 nt, synthetic construct
  source 1..95: mol_type = other RNA
cacacagcaaagcctctttggaggctgaatggggtcccccgactctggctttcccccaggtctacatgttcctggtgaaatggcaggacttatcg

SEQ ID NO: 7275 - RNA, 95 nt, synthetic construct
  source 1..95: mol_type = other RNA
cacacagcaaagcctctttggaggctgaatggggtcccccgactctggctttcccccaggtctacatgttcctggtgaaatggcaggacctgtcg

SEQ ID NO: 7276 - RNA, 95 nt, synthetic construct
  source 1..95: mol_type = other RNA
cacacagcaaagcctctttggaggctgaatggggtcccccgactctggctttcccccaggtctacatgttcctggtgaaatggcaggacttgtcg

SEQ ID NO: 7277 - RNA, 95 nt, synthetic construct
  source 1..95: mol_type = other RNA
cacacagcaaagcctctttggaggctgaatggggtcccccgactctggctttcccccaggtctacatgttcctggtgaaatggcaggatctgtcg

SEQ ID NO: 7278 - RNA, 95 nt, synthetic construct
  source 1..95: mol_type = other RNA
cacacagcaaagcctctttggaggctgaatggggtcccccgactctggctttcccccaggtctacatgttcctggtgaaatggcaggatttatcg

SEQ ID NO: 7279 - RNA, 95 nt, synthetic construct
  source 1..95: mol_type = other RNA
cacacagcaaagcctctttggaggctgaatggggtcccccgactctggctttcccccaggtgtacatgttcctggtgaaatggcaggacttgtcg

SEQ ID NO: 7280 - RNA, 96 nt, synthetic construct
  source 1..96: mol_type = other RNA
gcacacagcaaagcctctttggaggctgaatggggtcccccgactctggctttcccccaggtgtacatgttcctggtgaaatggcaggatttgtcg

SEQ ID NO: 7281 - RNA, 96 nt, synthetic construct
  source 1..96: mol_type = other RNA
gcacacagcaaagcctctttggaggctgaatggggtcccccgactctggctttcccccaggtttacatgttcctggtgaaatggcaggacctgtcg

SEQ ID NO: 7282 - RNA, 96 nt, synthetic construct
  source 1..96: mol_type = other RNA
gcacacagcaaagcctctttggaggctgaatggggtcccccgactctggctttcccccaggtttacatgttcctggtgaaatggcaggacttatcg

SEQ ID NO: 7283 - RNA, 96 nt, synthetic construct
  source 1..96: mol_type = other RNA
gcacacagcaaagcctctttggaggctgaatggggtcccccgactctggctttcccccaggtttacatgttcctggtgaaatggcaggatctgtcg

SEQ ID NO: 7284 - RNA, 96 nt, synthetic construct
  source 1..96: mol_type = other RNA
gcacacagcaaagcctctttggaggctgaatggggtcccccgactctggctttcccccaggtttacatgttcctggtgaaatggcaggatttatcg

SEQ ID NO: 7285 - RNA, 96 nt, synthetic construct
  source 1..96: mol_type = other RNA
gcacacagcaaagcctctttggaggctgaatggggtcccccgactctggctttcccccaggtctacatgttcctggtgaaatggcaggatctgtcg

SEQ ID NO: 7286 - RNA, 96 nt, synthetic construct
  source 1..96: mol_type = other RNA
gcacacagcaaagcctctttggaggctgaatggggtcccccgactctggctttcccccaggtgtacatgttcctggtgaaatggcaggatttatcg

SEQ ID NO: 7287 - RNA, 96 nt, synthetic construct
  source 1..96: mol_type = other RNA
gcacacagcaaagcctctttggaggctgaatggggtcccccgactctggctttcccccaggtgtacatgttcctggtgaaatggcaggatctgtcg

SEQ ID NO: 7288 - RNA, 96 nt, synthetic construct
  source 1..96: mol_type = other RNA
gcacacagcaaagcctctttggaggctgaatggggtcccccgactctggctttcccccaggtgtacatgttcctggtgaaatggcaggacttgtcg

SEQ ID NO: 7289 - RNA, 96 nt, synthetic construct
  source 1..96: mol_type = other RNA
gcacacagcaaagcctctttggaggctgaatggggtcccccgactctggctttcccccaggtgtacatgttcctggtgaaatggcaggacttatcg

SEQ ID NO: 7290 - RNA, 96 nt, synthetic construct
  source 1..96: mol_type = other RNA
gcacacagcaaagcctctttggaggctgaatggggtcccccgactctggctttcccccaggtctacatgttcctggtgaaatggcaggacttatcg

SEQ ID NO: 7291 - RNA, 96 nt, synthetic construct
  source 1..96: mol_type = other RNA
gcacacagcaaagcctctttggaggctgaatggggtcccccgactctggctttcccccaggtctacatgttcctggtgaaatggcaggatttatcg

SEQ ID NO: 7292 - RNA, 96 nt, synthetic construct
  source 1..96: mol_type = other RNA
gcacacagcaaagcctctttggaggctgaatggggtcccccgactctggctttcccccaggtttacatgttcctggtgaaatggcaggatttgtcg

SEQ ID NO: 7293 - RNA, 96 nt, synthetic construct
  source 1..96: mol_type = other RNA
gcacacagcaaagcctctttggaggctgaatggggtcccccgactctggctttcccccaggtatacatgttcctggtgaaatggcaggacctgtcg

SEQ ID NO: 7294 - RNA, 96 nt, synthetic construct
  source 1..96: mol_type = other RNA
gcacacagcaaagcctctttggaggctgaatggggtcccccgactctggctttcccccaggtatacatgttcctggtgaaatggcaggacttatcg

SEQ ID NO: 7295 - RNA, 96 nt, synthetic construct
  source 1..96: mol_type = other RNA
gcacacagcaaagcctctttggaggctgaatggggtcccccgactctggctttcccccaggtatacatgttcctggtgaaatggcaggacttgtcg

SEQ ID NO: 7296 - RNA, 96 nt, synthetic construct
  source 1..96: mol_type = other RNA
gcacacagcaaagcctctttggaggctgaatggggtcccccgactctggctttcccccaggtatacatgttcctggtgaaatggcaggatctgtcg

SEQ ID NO: 7297 - RNA, 96 nt, synthetic construct
  source 1..96: mol_type = other RNA
gcacacagcaaagcctctttggaggctgaatggggtcccccgactctggctttcccccaggtatacatgttcctggtgaaatggcaggatttatcg

SEQ ID NO: 7298 - RNA, 96 nt, synthetic construct
  source 1..96: mol_type = other RNA
gcacacagcaaagcctctttggaggctgaatggggtcccccgactctggctttcccccaggtatacatgttcctggtgaaatggcaggatttgtcg

SEQ ID NO: 7299 - RNA, 96 nt, synthetic construct
  source 1..96: mol_type = other RNA
gcacacagcaaagcctctttggaggctgaatggggtcccccgactctggctttcccccaggtctacatgttcctggtgaaatggcaggacctgtcg

SEQ ID NO: 7300 - RNA, 96 nt, synthetic construct
  source 1..96: mol_type = other RNA
gcacacagcaaagcctctttggaggctgaatggggtcccccgactctggctttcccccaggtctacatgttcctggtgaaatggcaggacttgtcg

SEQ ID NO: 7301 - RNA, 96 nt, synthetic construct
  source 1..96: mol_type = other RNA
gcacacagcaaagcctctttggaggctgaatggggtcccccgactctggctttcccccaggtctacatgttcctggtgaaatggcaggatttgtcg

SEQ ID NO: 7302 - RNA, 96 nt, synthetic construct
  source 1..96: mol_type = other RNA
gcacacagcaaagcctctttggaggctgaatggggtcccccgactctggctttcccccaggtttacatgttcctggtgaaatggcaggacttgtcg

SEQ ID NO: 7303 - RNA, 96 nt, synthetic construct
  source 1..96: mol_type = other RNA
gcacacagcaaagcctctttggaggctgaatggggtcccccgactctggctttcccccaggtgtacatgttcctggtgaaatggcaggacctgtcg

SEQ ID NO: 7304 - RNA, 97 nt, synthetic construct
  source 1..97: mol_type = other RNA
tgcacacagcaaagcctctttggaggctgaatggggtcccccgactctggctttcccccaggtttacatgttcctggtgaaatggcaggacttatcg

SEQ ID NO: 7305 - RNA, 97 nt, synthetic construct
  source 1..97: mol_type = other RNA
tgcacacagcaaagcctctttggaggctgaatggggtcccccgactctggctttcccccaggtgtacatgttcctggtgaaatggcaggacttatcg

SEQ ID NO: 7306 - RNA, 97 nt, synthetic construct
  source 1..97: mol_type = other RNA
tgcacacagcaaagcctctttggaggctgaatggggtcccccgactctggctttcccccaggtgtacatgttcctggtgaaatggcaggacttgtcg

SEQ ID NO: 7307 - RNA, 97 nt, synthetic construct
  source 1..97: mol_type = other RNA
tgcacacagcaaagcctctttggaggctgaatggggtcccccgactctggctttcccccaggtgtacatgttcctggtgaaatggcaggatctgtcg

SEQ ID NO: 7308 - RNA, 97 nt, synthetic construct
  source 1..97: mol_type = other RNA
tgcacacagcaaagcctctttggaggctgaatggggtcccccgactctggctttcccccaggtttacatgttcctggtgaaatggcaggatctgtcg

SEQ ID NO: 7309 - RNA, 97 nt, synthetic construct
  source 1..97: mol_type = other RNA
tgcacacagcaaagcctctttggaggctgaatggggtcccccgactctggctttcccccaggtgtacatgttcctggtgaaatggcaggatttgtcg

SEQ ID NO: 7310 - RNA, 97 nt, synthetic construct
  source 1..97: mol_type = other RNA
tgcacacagcaaagcctctttggaggctgaatggggtcccccgactctggctttcccccaggtttacatgttcctggtgaaatggcaggatttgtcg

SEQ ID NO: 7311 - RNA, 97 nt, synthetic construct
  source 1..97: mol_type = other RNA
tgcacacagcaaagcctctttggaggctgaatggggtcccccgactctggctttcccccaggtttacatgttcctggtgaaatggcaggatttatcg

SEQ ID NO: 7312 - RNA, 97 nt, synthetic construct
  source 1..97: mol_type = other RNA
tgcacacagcaaagcctctttggaggctgaatggggtcccccgactctggctttcccccaggtttacatgttcctggtgaaatggcaggacttgtcg

SEQ ID NO: 7313 - RNA, 97 nt, synthetic construct
  source 1..97: mol_type = other RNA
tgcacacagcaaagcctctttggaggctgaatggggtcccccgactctggctttcccccaggtgtacatgttcctggtgaaatggcaggatttatcg

SEQ ID NO: 7314 - RNA, 97 nt, synthetic construct
  source 1..97: mol_type = other RNA
tgcacacagcaaagcctctttggaggctgaatggggtcccccgactctggctttcccccaggtatacatgttcctggtgaaatggcaggacctgtcg

SEQ ID NO: 7315 - RNA, 97 nt, synthetic construct
  source 1..97: mol_type = other RNA
tgcacacagcaaagcctctttggaggctgaatggggtcccccgactctggctttcccccaggtctacatgttcctggtgaaatggcaggacttatcg

SEQ ID NO: 7316 - RNA, 97 nt, synthetic construct
  source 1..97: mol_type = other RNA
tgcacacagcaaagcctctttggaggctgaatggggtcccccgactctggctttcccccaggtctacatgttcctggtgaaatggcaggatctgtcg

SEQ ID NO: 7317 - RNA, 97 nt, synthetic construct
  source 1..97: mol_type = other RNA
tgcacacagcaaagcctctttggaggctgaatggggtcccccgactctggctttcccccaggtctacatgttcctggtgaaatggcaggatttgtcg

SEQ ID NO: 7318 - RNA, 97 nt, synthetic construct
  source 1..97: mol_type = other RNA
tgcacacagcaaagcctctttggaggctgaatggggtcccccgactctggctttcccccaggtctacatgttcctggtgaaatggcaggatttatcg

SEQ ID NO: 7319 - RNA, 97 nt, synthetic construct
  source 1..97: mol_type = other RNA
tgcacacagcaaagcctctttggaggctgaatggggtcccccgactctggctttcccccaggtctacatgttcctggtgaaatggcaggacttgtcg

SEQ ID NO: 7320 - RNA, 97 nt, synthetic construct
  source 1..97: mol_type = other RNA
tgcacacagcaaagcctctttggaggctgaatggggtcccccgactctggctttcccccaggtctacatgttcctggtgaaatggcaggacctgtcg

SEQ ID NO: 7321 - RNA, 97 nt, synthetic construct
  source 1..97: mol_type = other RNA
tgcacacagcaaagcctctttggaggctgaatggggtcccccgactctggctttcccccaggtatacatgttcctggtgaaatggcaggatttgtcg

SEQ ID NO: 7322 - RNA, 97 nt, synthetic construct
  source 1..97: mol_type = other RNA
tgcacacagcaaagcctctttggaggctgaatggggtcccccgactctggctttcccccaggtatacatgttcctggtgaaatggcaggatttatcg

SEQ ID NO: 7323 - RNA, 97 nt, synthetic construct
  source 1..97: mol_type = other RNA
tgcacacagcaaagcctctttggaggctgaatggggtcccccgactctggctttcccccaggtatacatgttcctggtgaaatggcaggatctgtcg

SEQ ID NO: 7324 - RNA, 97 nt, synthetic construct
  source 1..97: mol_type = other RNA
tgcacacagcaaagcctctttggaggctgaatggggtcccccgactctggctttcccccaggtatacatgttcctggtgaaatggcaggacttatcg

SEQ ID NO: 7325 - RNA, 97 nt, synthetic construct
  source 1..97: mol_type = other RNA
tgcacacagcaaagcctctttggaggctgaatggggtcccccgactctggctttcccccaggtttacatgttcctggtgaaatggcaggacctgtcg

SEQ ID NO: 7326 - RNA, 97 nt, synthetic construct
  source 1..97: mol_type = other RNA
tgcacacagcaaagcctctttggaggctgaatggggtcccccgactctggctttcccccaggtgtacatgttcctggtgaaatggcaggacctgtcg

SEQ ID NO: 7327 - RNA, 97 nt, synthetic construct
  source 1..97: mol_type = other RNA
tgcacacagcaaagcctctttggaggctgaatggggtcccccgactctggctttcccccaggtatacatgttcctggtgaaatggcaggacttgtcg

SEQ ID NO: 7328 - RNA, 98 nt, synthetic construct
  source 1..98: mol_type = other RNA
gtgcacacagcaaagcctctttggaggctgaatggggtcccccgactctggctttcccccaggtatacatgttcctggtgaaatggcaggacctgtcg

SEQ ID NO: 7329 - RNA, 98 nt, synthetic construct
  source 1..98: mol_type = other RNA
gtgcacacagcaaagcctctttggaggctgaatggggtcccccgactctggctttcccccaggtctacatgttcctggtgaaatggcaggacttatcg

SEQ ID NO: 7330 - RNA, 98 nt, synthetic construct
  source 1..98: mol_type = other RNA
gtgcacacagcaaagcctctttggaggctgaatggggtcccccgactctggctttcccccaggtttacatgttcctggtgaaatggcaggacctgtcg

SEQ ID NO: 7331 - RNA, 98 nt, synthetic construct
  source 1..98: mol_type = other RNA
gtgcacacagcaaagcctctttggaggctgaatggggtcccccgactctggctttcccccaggtttacatgttcctggtgaaatggcaggacttgtcg

SEQ ID NO: 7332 - RNA, 98 nt, synthetic construct
  source 1..98: mol_type = other RNA
gtgcacacagcaaagcctctttggaggctgaatggggtcccccgactctggctttcccccaggtgtacatgttcctggtgaaatggcaggacttatcg

SEQ ID NO: 7333 - RNA, 98 nt, synthetic construct
  source 1..98: mol_type = other RNA
gtgcacacagcaaagcctctttggaggctgaatggggtcccccgactctggctttcccccaggtttacatgttcctggtgaaatggcaggacttatcg

SEQ ID NO: 7334 - RNA, 98 nt, synthetic construct
  source 1..98: mol_type = other RNA
gtgcacacagcaaagcctctttggaggctgaatggggtcccccgactctggctttcccccaggtatacatgttcctggtgaaatggcaggacttatcg

SEQ ID NO: 7335 - RNA, 98 nt, synthetic construct
  source 1..98: mol_type = other RNA
gtgcacacagcaaagcctctttggaggctgaatggggtcccccgactctggctttcccccaggtgtacatgttcctggtgaaatggcaggatttgtcg

SEQ ID NO: 7336 - RNA, 98 nt, synthetic construct
  source 1..98: mol_type = other RNA
gtgcacacagcaaagcctctttggaggctgaatggggtcccccgactctggctttcccccaggtgtacatgttcctggtgaaatggcaggatttatcg

SEQ ID NO: 7337 - RNA, 98 nt, synthetic construct
  source 1..98: mol_type = other RNA
gtgcacacagcaaagcctctttggaggctgaatggggtcccccgactctggctttcccccaggtctacatgttcctggtgaaatggcaggacctgtcg

SEQ ID NO: 7338 - RNA, 98 nt, synthetic construct
  source 1..98: mol_type = other RNA
gtgcacacagcaaagcctctttggaggctgaatggggtcccccgactctggctttcccccaggtctacatgttcctggtgaaatggcaggatctgtcg

SEQ ID NO: 7339 - RNA, 98 nt, synthetic construct
  source 1..98: mol_type = other RNA
gtgcacacagcaaagcctctttggaggctgaatggggtcccccgactctggctttcccccaggtatacatgttcctggtgaaatggcaggatttgtcg

SEQ ID NO: 7340 - RNA, 98 nt, synthetic construct
  source 1..98: mol_type = other RNA
gtgcacacagcaaagcctctttggaggctgaatggggtcccccgactctggctttcccccaggtctacatgttcctggtgaaatggcaggatttatcg

SEQ ID NO: 7341 - RNA, 98 nt, synthetic construct
  source 1..98: mol_type = other RNA
gtgcacacagcaaagcctctttggaggctgaatggggtcccccgactctggctttcccccaggtgtacatgttcctggtgaaatggcaggacctgtcg

SEQ ID NO: 7342 - RNA, 98 nt, synthetic construct
  source 1..98: mol_type = other RNA
gtgcacacagcaaagcctctttggaggctgaatggggtcccccgactctggctttcccccaggtctacatgttcctggtgaaatggcaggatttgtcg

SEQ ID NO: 7343 - RNA, 98 nt, synthetic construct
  source 1..98: mol_type = other RNA
gtgcacacagcaaagcctctttggaggctgaatggggtcccccgactctggctttcccccaggtatacatgttcctggtgaaatggcaggatctgtcg

SEQ ID NO: 7344 - RNA, 98 nt, synthetic construct
  source 1..98: mol_type = other RNA
gtgcacacagcaaagcctctttggaggctgaatggggtcccccgactctggctttcccccaggtatacatgttcctggtgaaatggcaggatttatcg

SEQ ID NO: 7345 - RNA, 98 nt, synthetic construct
  source 1..98: mol_type = other RNA
gtgcacacagcaaagcctctttggaggctgaatggggtcccccgactctggctttcccccaggtctacatgttcctggtgaaatggcaggacttgtcg

SEQ ID NO: 7346 - RNA, 98 nt, synthetic construct
  source 1..98: mol_type = other RNA
gtgcacacagcaaagcctctttggaggctgaatggggtcccccgactctggctttcccccaggtatacatgttcctggtgaaatggcaggacttgtcg

SEQ ID NO: 7347 - RNA, 98 nt, synthetic construct
  source 1..98: mol_type = other RNA
gtgcacacagcaaagcctctttggaggctgaatggggtcccccgactctggctttcccccaggtgtacatgttcctggtgaaatggcaggatctgtcg

SEQ ID NO: 7348 - RNA, 98 nt, synthetic construct
  source 1..98: mol_type = other RNA
gtgcacacagcaaagcctctttggaggctgaatggggtcccccgactctggctttcccccaggtttacatgttcctggtgaaatggcaggatttgtcg

SEQ ID NO: 7349 - RNA, 98 nt, synthetic construct
  source 1..98: mol_type = other RNA
gtgcacacagcaaagcctctttggaggctgaatggggtcccccgactctggctttcccccaggtttacatgttcctggtgaaatggcaggatttatcg

SEQ ID NO: 7350 - RNA, 98 nt, synthetic construct
  source 1..98: mol_type = other RNA
gtgcacacagcaaagcctctttggaggctgaatggggtcccccgactctggctttcccccaggtttacatgttcctggtgaaatggcaggatctgtcg

SEQ ID NO: 7351 - RNA, 98 nt, synthetic construct
  source 1..98: mol_type = other RNA
gtgcacacagcaaagcctctttggaggctgaatggggtcccccgactctggctttcccccaggtgtacatgttcctggtgaaatggcaggacttgtcg

SEQ ID NO: 7352 - RNA, 99 nt, synthetic construct
  source 1..99: mol_type = other RNA
ggtgcacacagcaaagcctctttggaggctgaatggggtcccccgactctggctttcccccaggtatacatgttcctggtgaaatggcaggatctgtcg

SEQ ID NO: 7353 - RNA, 99 nt, synthetic construct
  source 1..99: mol_type = other RNA
ggtgcacacagcaaagcctctttggaggctgaatggggtcccccgactctggctttcccccaggtatacatgttcctggtgaaatggcaggatttatcg

SEQ ID NO: 7354 - RNA, 99 nt, synthetic construct
  source 1..99: mol_type = other RNA
ggtgcacacagcaaagcctctttggaggctgaatggggtcccccgactctggctttcccccaggtatacatgttcctggtgaaatggcaggatttgtcg

SEQ ID NO: 7355 - RNA, 99 nt, synthetic construct
  source 1..99: mol_type = other RNA
ggtgcacacagcaaagcctctttggaggctgaatggggtcccccgactctggctttcccccaggtttacatgttcctggtgaaatggcaggatttatcg

SEQ ID NO: 7356 - RNA, 99 nt, synthetic construct
  source 1..99: mol_type = other RNA
ggtgcacacagcaaagcctctttggaggctgaatggggtcccccgactctggctttcccccaggtctacatgttcctggtgaaatggcaggacttgtcg

SEQ ID NO: 7357 - RNA, 99 nt, synthetic construct
  source 1..99: mol_type = other RNA
ggtgcacacagcaaagcctctttggaggctgaatggggtcccccgactctggctttcccccaggtctacatgttcctggtgaaatggcaggatctgtcg

SEQ ID NO: 7358 - RNA, 99 nt, synthetic construct
  source 1..99: mol_type = other RNA
ggtgcacacagcaaagcctctttggaggctgaatggggtcccccgactctggctttcccccaggtctacatgttcctggtgaaatggcaggatttatcg

SEQ ID NO: 7359 - RNA, 99 nt, synthetic construct
  source 1..99: mol_type = other RNA
ggtgcacacagcaaagcctctttggaggctgaatggggtcccccgactctggctttcccccaggtctacatgttcctggtgaaatggcaggatttgtcg

SEQ ID NO: 7360 - RNA, 99 nt, synthetic construct
  source 1..99: mol_type = other RNA
ggtgcacacagcaaagcctctttggaggctgaatggggtcccccgactctggctttcccccaggtgtacatgttcctggtgaaatggcaggacctgtcg

SEQ ID NO: 7361 - RNA, 99 nt, synthetic construct
  source 1..99: mol_type = other RNA
ggtgcacacagcaaagcctctttggaggctgaatggggtcccccgactctggctttcccccaggtttacatgttcctggtgaaatggcaggacttatcg

SEQ ID NO: 7362 - RNA, 99 nt, synthetic construct
  source 1..99: mol_type = other RNA
ggtgcacacagcaaagcctctttggaggctgaatggggtcccccgactctggctttcccccaggtttacatgttcctggtgaaatggcaggacttgtcg

SEQ ID NO: 7363 - RNA, 99 nt, synthetic construct
  source 1..99: mol_type = other RNA
ggtgcacacagcaaagcctctttggaggctgaatggggtcccccgactctggctttcccccaggtatacatgttcctggtgaaatggcaggacttatcg

SEQ ID NO: 7364 - RNA, 99 nt, synthetic construct
  source 1..99: mol_type = other RNA
ggtgcacacagcaaagcctctttggaggctgaatggggtcccccgactctggctttcccccaggtttacatgttcctggtgaaatggcaggatctgtcg

SEQ ID NO: 7365 - RNA, 99 nt, synthetic construct
  source 1..99: mol_type = other RNA
ggtgcacacagcaaagcctctttggaggctgaatggggtcccccgactctggctttcccccaggtttacatgttcctggtgaaatggcaggacctgtcg

SEQ ID NO: 7366 - RNA, 99 nt, synthetic construct
  source 1..99: mol_type = other RNA
ggtgcacacagcaaagcctctttggaggctgaatggggtcccccgactctggctttcccccaggtgtacatgttcctggtgaaatggcaggatttgtcg

SEQ ID NO: 7367 - RNA, 99 nt, synthetic construct
  source 1..99: mol_type = other RNA
ggtgcacacagcaaagcctctttggaggctgaatggggtcccccgactctggctttcccccaggtctacatgttcctggtgaaatggcaggacttatcg

SEQ ID NO: 7368 - RNA, 99 nt, synthetic construct
  source 1..99: mol_type = other RNA
ggtgcacacagcaaagcctctttggaggctgaatggggtcccccgactctggctttcccccaggtgtacatgttcctggtgaaatggcaggacttatcg

SEQ ID NO: 7369 - RNA, 99 nt, synthetic construct
  source 1..99: mol_type = other RNA
ggtgcacacagcaaagcctctttggaggctgaatggggtcccccgactctggctttcccccaggtgtacatgttcctggtgaaatggcaggatttatcg

SEQ ID NO: 7370 - RNA, 99 nt, synthetic construct
  source 1..99: mol_type = other RNA
ggtgcacacagcaaagcctctttggaggctgaatggggtcccccgactctggctttcccccaggtttacatgttcctggtgaaatggcaggatttgtcg

SEQ ID NO: 7371 - RNA, 99 nt, synthetic construct
  source 1..99: mol_type = other RNA
ggtgcacacagcaaagcctctttggaggctgaatggggtcccccgactctggctttcccccaggtgtacatgttcctggtgaaatggcaggatctgtcg

SEQ ID NO: 7372 - RNA, 99 nt, synthetic construct
  source 1..99: mol_type = other RNA
ggtgcacacagcaaagcctctttggaggctgaatggggtcccccgactctggctttcccccaggtctacatgttcctggtgaaatggcaggacctgtcg

SEQ ID NO: 7373 - RNA, 99 nt, synthetic construct
  source 1..99: mol_type = other RNA
ggtgcacacagcaaagcctctttggaggctgaatggggtcccccgactctggctttcccccaggtgtacatgttcctggtgaaatggcaggacttgtcg

SEQ ID NO: 7374 - RNA, 99 nt, synthetic construct
  source 1..99: mol_type = other RNA
ggtgcacacagcaaagcctctttggaggctgaatggggtcccccgactctggctttcccccaggtatacatgttcctggtgaaatggcaggacttgtcg

SEQ ID NO: 7375 - RNA, 99 nt, synthetic construct
  source 1..99: mol_type = other RNA
ggtgcacacagcaaagcctctttggaggctgaatggggtcccccgactctggctttcccccaggtatacatgttcctggtgaaatggcaggacctgtcg

SEQ ID NO: 7376 - RNA, 100 nt, synthetic construct
  source 1..100: mol_type = other RNA
gggtgcacacagcaaagcctctttggaggctgaatggggtcccccgactctggctttcccccaggtttacatgttcctggtgaaatggcaggacctgtcg

SEQ ID NO: 7377 - RNA, 100 nt, synthetic construct
  source 1..100: mol_type = other RNA
gggtgcacacagcaaagcctctttggaggctgaatggggtcccccgactctggctttcccccaggtttacatgttcctggtgaaatggcaggatttgtcg

SEQ ID NO: 7378 - RNA, 100 nt, synthetic construct
  source 1..100: mol_type = other RNA
gggtgcacacagcaaagcctctttggaggctgaatggggtcccccgactctggctttcccccaggtttacatgttcctggtgaaatggcaggacttgtcg

SEQ ID NO: 7379 - RNA, 100 nt, synthetic construct
  source 1..100: mol_type = other RNA
gggtgcacacagcaaagcctctttggaggctgaatggggtcccccgactctggctttcccccaggtttacatgttcctggtgaaatggcaggatctgtcg

SEQ ID NO: 7380 - RNA, 100 nt, synthetic construct
  source 1..100: mol_type = other RNA
gggtgcacacagcaaagcctctttggaggctgaatggggtcccccgactctggctttcccccaggtttacatgttcctggtgaaatggcaggatttatcg

SEQ ID NO: 7381 - RNA, 100 nt, synthetic construct
  source 1..100: mol_type = other RNA
gggtgcacacagcaaagcctctttggaggctgaatggggtcccccgactctggctttcccccaggtatacatgttcctggtgaaatggcaggacttatcg

SEQ ID NO: 7382 - RNA, 100 nt, synthetic construct
  source 1..100: mol_type = other RNA
gggtgcacacagcaaagcctctttggaggctgaatggggtcccccgactctggctttcccccaggtgtacatgttcctggtgaaatggcaggatctgtcg

SEQ ID NO: 7383 - RNA, 100 nt, synthetic construct
  source 1..100: mol_type = other RNA
gggtgcacacagcaaagcctctttggaggctgaatggggtcccccgactctggctttcccccaggtgtacatgttcctggtgaaatggcaggacttatcg

SEQ ID NO: 7384 - RNA, 100 nt, synthetic construct
  source 1..100: mol_type = other RNA
gggtgcacacagcaaagcctctttggaggctgaatggggtcccccgactctggctttcccccaggtctacatgttcctggtgaaatggcaggacttgtcg

SEQ ID NO: 7385 - RNA, 100 nt, synthetic construct
  source 1..100: mol_type = other RNA
gggtgcacacagcaaagcctctttggaggctgaatggggtcccccgactctggctttcccccaggtctacatgttcctggtgaaatggcaggatttgtcg

SEQ ID NO: 7386 - RNA, 100 nt, synthetic construct
  source 1..100: mol_type = other RNA
gggtgcacacagcaaagcctctttggaggctgaatggggtcccccgactctggctttcccccaggtgtacatgttcctggtgaaatggcaggatttgtcg

SEQ ID NO: 7387 - RNA, 100 nt, synthetic construct
  source 1..100: mol_type = other RNA
gggtgcacacagcaaagcctctttggaggctgaatggggtcccccgactctggctttcccccaggtctacatgttcctggtgaaatggcaggatttatcg

SEQ ID NO: 7388 - RNA, 100 nt, synthetic construct
  source 1..100: mol_type = other RNA
gggtgcacacagcaaagcctctttggaggctgaatggggtcccccgactctggctttcccccaggtctacatgttcctggtgaaatggcaggacttatcg

SEQ ID NO: 7389 - RNA, 100 nt, synthetic construct
  source 1..100: mol_type = other RNA
gggtgcacacagcaaagcctctttggaggctgaatggggtcccccgactctggctttcccccaggtctacatgttcctggtgaaatggcaggacctgtcg

SEQ ID NO: 7390 - RNA, 100 nt, synthetic construct
  source 1..100: mol_type = other RNA
gggtgcacacagcaaagcctctttggaggctgaatggggtcccccgactctggctttcccccaggtatacatgttcctggtgaaatggcaggatttgtcg

SEQ ID NO: 7391 - RNA, 100 nt, synthetic construct
  source 1..100: mol_type = other RNA
gggtgcacacagcaaagcctctttggaggctgaatggggtcccccgactctggctttcccccaggtctacatgttcctggtgaaatggcaggatctgtcg

SEQ ID NO: 7392 - RNA, 100 nt, synthetic construct
  source 1..100: mol_type = other RNA
gggtgcacacagcaaagcctctttggaggctgaatggggtcccccgactctggctttcccccaggtgtacatgttcctggtgaaatggcaggatttatcg

SEQ ID NO: 7393 - RNA, 100 nt, synthetic construct
  source 1..100: mol_type = other RNA
gggtgcacacagcaaagcctctttggaggctgaatggggtcccccgactctggctttcccccaggtgtacatgttcctggtgaaatggcaggacttgtcg

SEQ ID NO: 7394 - RNA, 100 nt, synthetic construct
  source 1..100: mol_type = other RNA
gggtgcacacagcaaagcctctttggaggctgaatggggtcccccgactctggctttcccccaggtttacatgttcctggtgaaatggcaggacttatcg

SEQ ID NO: 7395 - RNA, 100 nt, synthetic construct
  source 1..100: mol_type = other RNA
gggtgcacacagcaaagcctctttggaggctgaatggggtcccccgactctggctttcccccaggtatacatgttcctggtgaaatggcaggatctgtcg

SEQ ID NO: 7396 - RNA, 100 nt, synthetic construct
  source 1..100: mol_type = other RNA
gggtgcacacagcaaagcctctttggaggctgaatggggtcccccgactctggctttcccccaggtatacatgttcctggtgaaatggcaggacttgtcg

SEQ ID NO: 7397 - RNA, 100 nt, synthetic construct
  source 1..100: mol_type = other RNA
gggtgcacacagcaaagcctctttggaggctgaatggggtcccccgactctggctttcccccaggtgtacatgttcctggtgaaatggcaggacctgtcg

SEQ ID NO: 7398 - RNA, 100 nt, synthetic construct
  source 1..100: mol_type = other RNA
gggtgcacacagcaaagcctctttggaggctgaatggggtcccccgactctggctttcccccaggtatacatgttcctggtgaaatggcaggatttatcg

SEQ ID NO: 7399 - RNA, 100 nt, synthetic construct
  source 1..100: mol_type = other RNA
gggtgcacacagcaaagcctctttggaggctgaatggggtcccccgactctggctttcccccaggtatacatgttcctggtgaaatggcaggacctgtcg

SEQ ID NO: 7400 - RNA, 101 nt, synthetic construct
  source 1..101: mol_type = other RNA
tgggtgcacacagcaaagcctctttggaggctgaatggggtcccccgactctggctttcccccaggtgtacatgttcctggtgaaatggcaggacctgtcg

SEQ ID NO: 7401 - RNA, 101 nt, synthetic construct
  source 1..101: mol_type = other RNA
tgggtgcacacagcaaagcctctttggaggctgaatggggtcccccgactctggctttcccccaggtatacatgttcctggtgaaatggcaggacttatcg

SEQ ID NO: 7402 - RNA, 101 nt, synthetic construct
  source 1..101: mol_type = other RNA
tgggtgcacacagcaaagcctctttggaggctgaatggggtcccccgactctggctttcccccaggtatacatgttcctggtgaaatggcaggatctgtcg

SEQ ID NO: 7403 - RNA, 101 nt, synthetic construct
  source 1..101: mol_type = other RNA
tgggtgcacacagcaaagcctctttggaggctgaatggggtcccccgactctggctttcccccaggtatacatgttcctggtgaaatggcaggatttgtcg

SEQ ID NO: 7404 - RNA, 101 nt, synthetic construct
  source 1..101: mol_type = other RNA
tgggtgcacacagcaaagcctctttggaggctgaatggggtcccccgactctggctttcccccaggtctacatgttcctggtgaaatggcaggacctgtcg

SEQ ID NO: 7405 - RNA, 101 nt, synthetic construct
  source 1..101: mol_type = other RNA
tgggtgcacacagcaaagcctctttggaggctgaatggggtcccccgactctggctttcccccaggtctacatgttcctggtgaaatggcaggacttatcg

SEQ ID NO: 7406 - RNA, 101 nt, synthetic construct
  source 1..101: mol_type = other RNA
tgggtgcacacagcaaagcctctttggaggctgaatggggtcccccgactctggctttcccccaggtctacatgttcctggtgaaatggcaggacttgtcg

SEQ ID NO: 7407 - RNA, 101 nt, synthetic construct
  source 1..101: mol_type = other RNA
tgggtgcacacagcaaagcctctttggaggctgaatggggtcccccgactctggctttcccccaggtctacatgttcctggtgaaatggcaggatctgtcg

SEQ ID NO: 7408 - RNA, 101 nt, synthetic construct
  source 1..101: mol_type = other RNA
tgggtgcacacagcaaagcctctttggaggctgaatggggtcccccgactctggctttcccccaggtctacatgttcctggtgaaatggcaggatttatcg

SEQ ID NO: 7409 - RNA, 101 nt, synthetic construct
  source 1..101: mol_type = other RNA
tgggtgcacacagcaaagcctctttggaggctgaatggggtcccccgactctggctttcccccaggtgtacatgttcctggtgaaatggcaggatttatcg

SEQ ID NO: 7410 - RNA, 101 nt, synthetic construct
  source 1..101: mol_type = other RNA
tgggtgcacacagcaaagcctctttggaggctgaatggggtcccccgactctggctttcccccaggtatacatgttcctggtgaaatggcaggacctgtcg

SEQ ID NO: 7411 - RNA, 101 nt, synthetic construct
  source 1..101: mol_type = other RNA
tgggtgcacacagcaaagcctctttggaggctgaatggggtcccccgactctggctttcccccaggtgtacatgttcctggtgaaatggcaggacttatcg

SEQ ID NO: 7412 - RNA, 101 nt, synthetic construct
  source 1..101: mol_type = other RNA
tgggtgcacacagcaaagcctctttggaggctgaatggggtcccccgactctggctttcccccaggtgtacatgttcctggtgaaatggcaggacttgtcg

SEQ ID NO: 7413 - RNA, 101 nt, synthetic construct
  source 1..101: mol_type = other RNA
tgggtgcacacagcaaagcctctttggaggctgaatggggtcccccgactctggctttcccccaggtgtacatgttcctggtgaaatggcaggatctgtcg

SEQ ID NO: 7414 - RNA, 101 nt, synthetic construct
  source 1..101: mol_type = other RNA
tgggtgcacacagcaaagcctctttggaggctgaatggggtcccccgactctggctttcccccaggtttacatgttcctggtgaaatggcaggatttatcg

SEQ ID NO: 7415 - RNA, 101 nt, synthetic construct
  source 1..101: mol_type = other RNA
tgggtgcacacagcaaagcctctttggaggctgaatggggtcccccgactctggctttcccccaggtgtacatgttcctggtgaaatggcaggatttgtcg

SEQ ID NO: 7416 - RNA, 101 nt, synthetic construct
  source 1..101: mol_type = other RNA
tgggtgcacacagcaaagcctctttggaggctgaatggggtcccccgactctggctttcccccaggtttacatgttcctggtgaaatggcaggacctgtcg

SEQ ID NO: 7417 - RNA, 101 nt, synthetic construct
  source 1..101: mol_type = other RNA
tgggtgcacacagcaaagcctctttggaggctgaatggggtcccccgactctggctttcccccaggtttacatgttcctggtgaaatggcaggacttatcg

SEQ ID NO: 7418 - RNA, 101 nt, synthetic construct
  source 1..101: mol_type = other RNA
tgggtgcacacagcaaagcctctttggaggctgaatggggtcccccgactctggctttcccccaggtttacatgttcctggtgaaatggcaggacttgtcg

SEQ ID NO: 7419 - RNA, 101 nt, synthetic construct
  source 1..101: mol_type = other RNA
tgggtgcacacagcaaagcctctttggaggctgaatggggtcccccgactctggctttcccccaggtttacatgttcctggtgaaatggcaggatctgtcg

SEQ ID NO: 7420 - RNA, 101 nt, synthetic construct
  source 1..101: mol_type = other RNA
tgggtgcacacagcaaagcctctttggaggctgaatggggtcccccgactctggctttcccccaggtttacatgttcctggtgaaatggcaggatttgtcg

SEQ ID NO: 7421 - RNA, 101 nt, synthetic construct
  source 1..101: mol_type = other RNA
tgggtgcacacagcaaagcctctttggaggctgaatggggtcccccgactctggctttcccccaggtatacatgttcctggtgaaatggcaggatttatcg

SEQ ID NO: 7422 - RNA, 101 nt, synthetic construct
  source 1..101: mol_type = other RNA
tgggtgcacacagcaaagcctctttggaggctgaatggggtcccccgactctggctttcccccaggtctacatgttcctggtgaaatggcaggatttgtcg

SEQ ID NO: 7423 - RNA, 101 nt, synthetic construct
  source 1..101: mol_type = other RNA
tgggtgcacacagcaaagcctctttggaggctgaatggggtcccccgactctggctttcccccaggtatacatgttcctggtgaaatggcaggacttgtcg

SEQ ID NO: 7424 - RNA, 102 nt, synthetic construct
  source 1..102: mol_type = other RNA
ctgggtgcacacagcaaagcctctttggaggctgaatggggtcccccgactctggctttcccccaggtctacatgttcctggtgaaatggcaggacttatcg

SEQ ID NO: 7425 - RNA, 102 nt, synthetic construct
  source 1..102: mol_type = other RNA
ctgggtgcacacagcaaagcctctttggaggctgaatggggtcccccgactctggctttcccccaggtctacatgttcctggtgaaatggcaggacctgtcg

SEQ ID NO: 7426 - RNA, 102 nt, synthetic construct
  source 1..102: mol_type = other RNA
ctgggtgcacacagcaaagcctctttggaggctgaatggggtcccccgactctggctttcccccaggtatacatgttcctggtgaaatggcaggacttatcg

SEQ ID NO: 7427 - RNA, 102 nt, synthetic construct
  source 1..102: mol_type = other RNA
ctgggtgcacacagcaaagcctctttggaggctgaatggggtcccccgactctggctttcccccaggtatacatgttcctggtgaaatggcaggatttatcg

SEQ ID NO: 7428 - RNA, 102 nt, synthetic construct
  source 1..102: mol_type = other RNA
ctgggtgcacacagcaaagcctctttggaggctgaatggggtcccccgactctggctttcccccaggtatacatgttcctggtgaaatggcaggatctgtcg

SEQ ID NO: 7429 - RNA, 102 nt, synthetic construct
  source 1..102: mol_type = other RNA
ctgggtgcacacagcaaagcctctttggaggctgaatggggtcccccgactctggctttcccccaggtatacatgttcctggtgaaatggcaggacttgtcg

SEQ ID NO: 7430 - RNA, 102 nt, synthetic construct
  source 1..102: mol_type = other RNA
ctgggtgcacacagcaaagcctctttggaggctgaatggggtcccccgactctggctttcccccaggtatacatgttcctggtgaaatggcaggatttgtcg

SEQ ID NO: 7431 - RNA, 102 nt, synthetic construct
  source 1..102: mol_type = other RNA
ctgggtgcacacagcaaagcctctttggaggctgaatggggtcccccgactctggctttcccccaggtgtacatgttcctggtgaaatggcaggacttatcg

SEQ ID NO: 7432 - RNA, 102 nt, synthetic construct
  source 1..102: mol_type = other RNA
ctgggtgcacacagcaaagcctctttggaggctgaatggggtcccccgactctggctttcccccaggtttacatgttcctggtgaaatggcaggatttgtcg

SEQ ID NO: 7433 - RNA, 102 nt, synthetic construct
  source 1..102: mol_type = other RNA
ctgggtgcacacagcaaagcctctttggaggctgaatggggtcccccgactctggctttcccccaggtgtacatgttcctggtgaaatggcaggacttgtcg

SEQ ID NO: 7434 - RNA, 102 nt, synthetic construct
  source 1..102: mol_type = other RNA
ctgggtgcacacagcaaagcctctttggaggctgaatggggtcccccgactctggctttcccccaggtctacatgttcctggtgaaatggcaggacttgtcg

SEQ ID NO: 7435 - RNA, 102 nt, synthetic construct
  source 1..102: mol_type = other RNA
ctgggtgcacacagcaaagcctctttggaggctgaatggggtcccccgactctggctttcccccaggtgtacatgttcctggtgaaatggcaggatctgtcg

SEQ ID NO: 7436 - RNA, 102 nt, synthetic construct
  source 1..102: mol_type = other RNA
ctgggtgcacacagcaaagcctctttggaggctgaatggggtcccccgactctggctttcccccaggtgtacatgttcctggtgaaatggcaggatttgtcg

SEQ ID NO: 7437 - RNA, 102 nt, synthetic construct
  source 1..102: mol_type = other RNA
ctgggtgcacacagcaaagcctctttggaggctgaatggggtcccccgactctggctttcccccaggtttacatgttcctggtgaaatggcaggacctgtcg

SEQ ID NO: 7438 - RNA, 102 nt, synthetic construct
  source 1..102: mol_type = other RNA
ctgggtgcacacagcaaagcctctttggaggctgaatggggtcccccgactctggctttcccccaggtttacatgttcctggtgaaatggcaggacttatcg

SEQ ID NO: 7439 - RNA, 102 nt, synthetic construct
  source 1..102: mol_type = other RNA
ctgggtgcacacagcaaagcctctttggaggctgaatggggtcccccgactctggctttcccccaggtttacatgttcctggtgaaatggcaggacttgtcg

SEQ ID NO: 7440 - RNA, 102 nt, synthetic construct
  source 1..102: mol_type = other RNA
ctgggtgcacacagcaaagcctctttggaggctgaatggggtcccccgactctggctttcccccaggtttacatgttcctggtgaaatggcaggatctgtcg

SEQ ID NO: 7441 - RNA, 102 nt, synthetic construct
  source 1..102: mol_type = other RNA
ctgggtgcacacagcaaagcctctttggaggctgaatggggtcccccgactctggctttcccccaggtatacatgttcctggtgaaatggcaggacctgtcg

SEQ ID NO: 7442 - RNA, 102 nt, synthetic construct
  source 1..102: mol_type = other RNA
ctgggtgcacacagcaaagcctctttggaggctgaatggggtcccccgactctggctttcccccaggtgtacatgttcctggtgaaatggcaggacctgtcg

SEQ ID NO: 7443 - RNA, 102 nt, synthetic construct
  source 1..102: mol_type = other RNA
ctgggtgcacacagcaaagcctctttggaggctgaatggggtcccccgactctggctttcccccaggtctacatgttcctggtgaaatggcaggatttatcg

SEQ ID NO: 7444 - RNA, 102 nt, synthetic construct
  source 1..102: mol_type = other RNA
ctgggtgcacacagcaaagcctctttggaggctgaatggggtcccccgactctggctttcccccaggtgtacatgttcctggtgaaatggcaggatttatcg

SEQ ID NO: 7445 - RNA, 102 nt, synthetic construct
  source 1..102: mol_type = other RNA
ctgggtgcacacagcaaagcctctttggaggctgaatggggtcccccgactctggctttcccccaggtctacatgttcctggtgaaatggcaggatctgtcg

SEQ ID NO: 7446 - RNA, 102 nt, synthetic construct
  source 1..102: mol_type = other RNA
ctgggtgcacacagcaaagcctctttggaggctgaatggggtcccccgactctggctttcccccaggtttacatgttcctggtgaaatggcaggatttatcg

SEQ ID NO: 7447 - RNA, 102 nt, synthetic construct
  source 1..102: mol_type = other RNA
ctgggtgcacacagcaaagcctctttggaggctgaatggggtcccccgactctggctttcccccaggtctacatgttcctggtgaaatggcaggatttgtcg

SEQ ID NO: 7448 - RNA, 103 nt, synthetic construct
  source 1..103: mol_type = other RNA
cctgggtgcacacagcaaagcctctttggaggctgaatggggtcccccgactctggctttcccccaggtatacatgttcctggtgaaatggcaggacctgtcg

SEQ ID NO: 7449 - RNA, 103 nt, synthetic construct
  source 1..103: mol_type = other RNA
cctgggtgcacacagcaaagcctctttggaggctgaatggggtcccccgactctggctttcccccaggtttacatgttcctggtgaaatggcaggatctgtcg

SEQ ID NO: 7450 - RNA, 103 nt, synthetic construct
  source 1..103: mol_type = other RNA
cctgggtgcacacagcaaagcctctttggaggctgaatggggtcccccgactctggctttcccccaggtttacatgttcctggtgaaatggcaggacttgtcg

SEQ ID NO: 7451 - RNA, 103 nt, synthetic construct
  source 1..103: mol_type = other RNA
cctgggtgcacacagcaaagcctctttggaggctgaatggggtcccccgactctggctttcccccaggtttacatgttcctggtgaaatggcaggacttatcg

SEQ ID NO: 7452 - RNA, 103 nt, synthetic construct
  source 1..103: mol_type = other RNA
cctgggtgcacacagcaaagcctctttggaggctgaatggggtcccccgactctggctttcccccaggtttacatgttcctggtgaaatggcaggacctgtcg

SEQ ID NO: 7453 - RNA, 103 nt, synthetic construct
  source 1..103: mol_type = other RNA
cctgggtgcacacagcaaagcctctttggaggctgaatggggtcccccgactctggctttcccccaggtgtacatgttcctggtgaaatggcaggatttgtcg

SEQ ID NO: 7454 - RNA, 103 nt, synthetic construct
  source 1..103: mol_type = other RNA
cctgggtgcacacagcaaagcctctttggaggctgaatggggtcccccgactctggctttcccccaggtgtacatgttcctggtgaaatggcaggatttatcg

SEQ ID NO: 7455 - RNA, 103 nt, synthetic construct
  source 1..103: mol_type = other RNA
cctgggtgcacacagcaaagcctctttggaggctgaatggggtcccccgactctggctttcccccaggtgtacatgttcctggtgaaatggcaggatctgtcg

SEQ ID NO: 7456 - RNA, 103 nt, synthetic construct
  source 1..103: mol_type = other RNA
cctgggtgcacacagcaaagcctctttggaggctgaatggggtcccccgactctggctttcccccaggtgtacatgttcctggtgaaatggcaggacttatcg

SEQ ID NO: 7457 - RNA, 103 nt, synthetic construct
  source 1..103: mol_type = other RNA
cctgggtgcacacagcaaagcctctttggaggctgaatggggtcccccgactctggctttcccccaggtgtacatgttcctggtgaaatggcaggacctgtcg

SEQ ID NO: 7458 - RNA, 103 nt, synthetic construct
  source 1..103: mol_type = other RNA
cctgggtgcacacagcaaagcctctttggaggctgaatggggtcccccgactctggctttcccccaggtctacatgttcctggtgaaatggcaggatttgtcg

SEQ ID NO: 7459 - RNA, 103 nt, synthetic construct
  source 1..103: mol_type = other RNA
cctgggtgcacacagcaaagcctctttggaggctgaatggggtcccccgactctggctttcccccaggtctacatgttcctggtgaaatggcaggatctgtcg

SEQ ID NO: 7460 - RNA, 103 nt, synthetic construct
  source 1..103: mol_type = other RNA
cctgggtgcacacagcaaagcctctttggaggctgaatggggtcccccgactctggctttcccccaggtctacatgttcctggtgaaatggcaggacttgtcg

SEQ ID NO: 7461 - RNA, 103 nt, synthetic construct
  source 1..103: mol_type = other RNA
cctgggtgcacacagcaaagcctctttggaggctgaatggggtcccccgactctggctttcccccaggtctacatgttcctggtgaaatggcaggacttatcg

SEQ ID NO: 7462 - RNA, 103 nt, synthetic construct
  source 1..103: mol_type = other RNA
cctgggtgcacacagcaaagcctctttggaggctgaatggggtcccccgactctggctttcccccaggtctacatgttcctggtgaaatggcaggacctgtcg

SEQ ID NO: 7463 - RNA, 103 nt, synthetic construct
  source 1..103: mol_type = other RNA
cctgggtgcacacagcaaagcctctttggaggctgaatggggtcccccgactctggctttcccccaggtatacatgttcctggtgaaatggcaggatttgtcg

SEQ ID NO: 7464 - RNA, 103 nt, synthetic construct
  source 1..103: mol_type = other RNA
cctgggtgcacacagcaaagcctctttggaggctgaatggggtcccccgactctggctttcccccaggtatacatgttcctggtgaaatggcaggatctgtcg

SEQ ID NO: 7465 - RNA, 103 nt, synthetic construct
  source 1..103: mol_type = other RNA
cctgggtgcacacagcaaagcctctttggaggctgaatggggtcccccgactctggctttcccccaggtatacatgttcctggtgaaatggcaggacttgtcg

SEQ ID NO: 7466 - RNA, 103 nt, synthetic construct
  source 1..103: mol_type = other RNA
cctgggtgcacacagcaaagcctctttggaggctgaatggggtcccccgactctggctttcccccaggtatacatgttcctggtgaaatggcaggacttatcg

SEQ ID NO: 7467 - RNA, 103 nt, synthetic construct
  source 1..103: mol_type = other RNA
cctgggtgcacacagcaaagcctctttggaggctgaatggggtcccccgactctggctttcccccaggtttacatgttcctggtgaaatggcaggatttatcg

SEQ ID NO: 7468 - RNA, 103 nt, synthetic construct
  source 1..103: mol_type = other RNA
cctgggtgcacacagcaaagcctctttggaggctgaatggggtcccccgactctggctttcccccaggtatacatgttcctggtgaaatggcaggatttatcg

SEQ ID NO: 7469 - RNA, 103 nt, synthetic construct
  source 1..103: mol_type = other RNA
cctgggtgcacacagcaaagcctctttggaggctgaatggggtcccccgactctggctttcccccaggtctacatgttcctggtgaaatggcaggatttatcg

SEQ ID NO: 7470 - RNA, 103 nt, synthetic construct
  source 1..103: mol_type = other RNA
cctgggtgcacacagcaaagcctctttggaggctgaatggggtcccccgactctggctttcccccaggtttacatgttcctggtgaaatggcaggatttgtcg

SEQ ID NO: 7471 - RNA, 103 nt, synthetic construct
  source 1..103: mol_type = other RNA
cctgggtgcacacagcaaagcctctttggaggctgaatggggtcccccgactctggctttcccccaggtgtacatgttcctggtgaaatggcaggacttgtcg

SEQ ID NO: 7472 - RNA, 19 nt, synthetic construct
  source 1..19: mol_type = other RNA
tgtgagtgtggggatggag

SEQ ID NO: 7473 - RNA, 19 nt, synthetic construct
  source 1..19: mol_type = other RNA
gaaatggcaggacctgtcg

SEQ ID NO: 7474 - RNA, 19 nt, synthetic construct
  source 1..19: mol_type = other RNA
tgaaatggcaggacctgtc

SEQ ID NO: 7475 - RNA, 19 nt, synthetic construct
  source 1..19: mol_type = other RNA
ccatgtgagtgtggggatg

SEQ ID NO: 7476 - RNA, 20 nt, synthetic construct
  source 1..20: mol_type = other RNA
aatggcaggatctgtcggag

SEQ ID NO: 7477 - RNA, 20 nt, synthetic construct
  source 1..20: mol_type = other RNA
tgaaatggcaggacctgtcg

SEQ ID NO: 7478 - RNA, 20 nt, synthetic construct
  source 1..20: mol_type = other RNA
tggtgaaatggcaggatctg

SEQ ID NO: 7479 - RNA, 20 nt, synthetic construct
  source 1..20: mol_type = other RNA
tggtgaaatggcaggactta

SEQ ID NO: 7480 - RNA, 20 nt, synthetic construct
  source 1..20: mol_type = other RNA
aatggcaggacttatcggag

SEQ ID NO: 7481 - RNA, 20 nt, synthetic construct
  source 1..20: mol_type = other RNA
aatggcaggacttgtcggag

SEQ ID NO: 7482 - RNA, 20 nt, synthetic construct
  source 1..20: mol_type = other RNA
tggtgaaatggcaggattta

SEQ ID NO: 7483 - RNA, 20 nt, synthetic construct
  source 1..20: mol_type = other RNA
agtgggatcctgggtgcaca

SEQ ID NO: 7484 - RNA, 20 nt, synthetic construct
  source 1..20: mol_type = other RNA
aatggcaggatttgtcggag

SEQ ID NO: 7485 - RNA, 20 nt, synthetic construct
  source 1..20: mol_type = other RNA
tccatgtgagtgtggggatg

SEQ ID NO: 7486 - RNA, 20 nt, synthetic construct
  source 1..20: mol_type = other RNA
tggtgaaatggcaggatttg

SEQ ID NO: 7487 - RNA, 20 nt, synthetic construct
  source 1..20: mol_type = other RNA
aatggcaggatttatcggag

SEQ ID NO: 7488 - RNA, 20 nt, synthetic construct
  source 1..20: mol_type = other RNA
tgaaatggcaggacttgtcg

SEQ ID NO: 7489 - RNA, 20 nt, synthetic construct
  source 1..20: mol_type = other RNA
gagatctacgagttccatgt

SEQ ID NO: 7490 - RNA, 20 nt, synthetic construct
  source 1..20: mol_type = other RNA
tgaaatggcaggacttatcg

SEQ ID NO: 7491 - RNA, 20 nt, synthetic construct
  source 1..20: mol_type = other RNA
tggtgaaatggcaggacttg

SEQ ID NO: 7492 - RNA, 20 nt, synthetic construct
  source 1..20: mol_type = other RNA
actacccactggaggaagcc

SEQ ID NO: 7493 - RNA, 20 nt, synthetic construct
  source 1..20: mol_type = other RNA
atgtgagtgtggggatggag

SEQ ID NO: 7494 - RNA, 20 nt, synthetic construct
  source 1..20: mol_type = other RNA
gatcctgggtgcacacagca

SEQ ID NO: 7495 - RNA, 21 nt, synthetic construct
  source 1..21: mol_type = other RNA
ttccatgtgagtgtggggatg

SEQ ID NO: 7496 - RNA, 21 nt, synthetic construct
  source 1..21: mol_type = other RNA
catgtgagtgtggggatggag

SEQ ID NO: 7497 - RNA, 22 nt, synthetic construct
  source 1..22: mol_type = other RNA
gttccatgtgagtgtggggatg

SEQ ID NO: 7498 - RNA, 22 nt, synthetic construct
  source 1..22: mol_type = other RNA
ccatgtgagtgtggggatggag

SEQ ID NO: 7499 - RNA, 16 nt, synthetic construct
  source 1..16: mol_type = other RNA
ggtcctgccatttcac

SEQ ID NO: 7500 - RNA, 17 nt, synthetic construct
  source 1..17: mol_type = other RNA
aggtcctgccatttcac

SEQ ID NO: 7501 - RNA, 18 nt, synthetic construct
  source 1..18: mol_type = other RNA
caggtcctgccatttcac

SEQ ID NO: 7502 - RNA, 19 nt, synthetic construct
  source 1..19: mol_type = other RNA
acaggtcctgccatttcac

SEQ ID NO: 7503 - RNA, 20 nt, synthetic construct
  source 1..20: mol_type = other RNA
gacaggtcctgccatttcac

SEQ ID NO: 7504 - RNA, 21 nt, synthetic construct
  source 1..21: mol_type = other RNA
cgacaggtcctgccatttcac

SEQ ID NO: 7505 - RNA, 22 nt, synthetic construct
  source 1..22: mol_type = other RNA
ccgacaggtcctgccatttcac

SEQ ID NO: 7506-7512 - skipped (7 entries)

SEQ ID NO: 7513 - RNA, 10 nt, synthetic construct
  source 1..10: mol_type = other RNA
aaatggcagg

SEQ ID NO: 7514 - RNA, 11 nt, synthetic construct
  source 1..11: mol_type = other RNA
aaatggcagga

SEQ ID NO: 7515 - RNA, 12 nt, synthetic construct
  source 1..12: mol_type = other RNA
aaatggcaggac

SEQ ID NO: 7516 - RNA, 13 nt, synthetic construct
  source 1..13: mol_type = other RNA
aaatggcaggacc

SEQ ID NO: 7517 - RNA, 14 nt, synthetic construct
  source 1..14: mol_type = other RNA
aaatggcaggacct

SEQ ID NO: 7518 - RNA, 15 nt, synthetic construct
  source 1..15: mol_type = other RNA
aaatggcaggacctg

SEQ ID NO: 7519 - RNA, 16 nt, synthetic construct
  source 1..16: mol_type = other RNA
aaatggcaggacctgt

SEQ ID NO: 7520 - RNA, 17 nt, synthetic construct
  source 1..17: mol_type = other RNA
aaatggcaggacctgtc

SEQ ID NO: 7521 - RNA, 18 nt, synthetic construct
  source 1..18: mol_type = other RNA
aaatggcaggacctgtcg

SEQ ID NO: 7522 - RNA, 19 nt, synthetic construct
  source 1..19: mol_type = other RNA
aaatggcaggacctgtcgg

SEQ ID NO: 7523 - RNA, 18 nt, synthetic construct
  source 1..18: mol_type = other RNA
gtgtacatgtttttagtg

SEQ ID NO: 7524 - RNA, 18 nt, synthetic construct
  source 1..18: mol_type = other RNA
gtgtacatgtttctggtg

SEQ ID NO: 7525 - RNA, 18 nt, synthetic construct
  source 1..18: mol_type = other RNA
gtttacatgtttttggtg

SEQ ID NO: 7526 - RNA, 18 nt, synthetic construct
  source 1..18: mol_type = other RNA
gtttacatgtttttagtg

SEQ ID NO: 7527 - RNA, 18 nt, synthetic construct
  source 1..18: mol_type = other RNA
gtttacatgtttctggtg

SEQ ID NO: 7528 - RNA, 18 nt, synthetic construct
  source 1..18: mol_type = other RNA
gtttacatgttcttagtg

SEQ ID NO: 7529 - RNA, 18 nt, synthetic construct
  source 1..18: mol_type = other RNA
gtttacatgttcctggtg

SEQ ID NO: 7530 - RNA, 18 nt, synthetic construct
  source 1..18: mol_type = other RNA
gtgtacatgtttttggtg

SEQ ID NO: 7531 - RNA, 18 nt, synthetic construct
  source 1..18: mol_type = other RNA
gtttacatgttcttggtg

SEQ ID NO: 7532 - RNA, 18 nt, synthetic construct
  source 1..18: mol_type = other RNA
gtgtacatgttcttggtg

SEQ ID NO: 7533 - RNA, 18 nt, synthetic construct
  source 1..18: mol_type = other RNA
gtctacatgttcttggtg

SEQ ID NO: 7534 - RNA, 18 nt, synthetic construct
  source 1..18: mol_type = other RNA
gtctacatgtttctggtg

SEQ ID NO: 7535 - RNA, 18 nt, synthetic construct
  source 1..18: mol_type = other RNA
gtctacatgtttttagtg

SEQ ID NO: 7536 - RNA, 18 nt, synthetic construct
  source 1..18: mol_type = other RNA
gtctacatgttcctggtg

SEQ ID NO: 7537 - RNA, 18 nt, synthetic construct
  source 1..18: mol_type = other RNA
gtatacatgttcctggtg

SEQ ID NO: 7538 - RNA, 18 nt, synthetic construct
  source 1..18: mol_type = other RNA
gtctacatgttcttagtg

SEQ ID NO: 7539 - RNA, 18 nt, synthetic construct
  source 1..18: mol_type = other RNA
gtatacatgtttttagtg

SEQ ID NO: 7540 - RNA, 18 nt, synthetic construct
  source 1..18: mol_type = other RNA
gtatacatgtttttggtg

SEQ ID NO: 7541 - RNA, 18 nt, synthetic construct
  source 1..18: mol_type = other RNA
gtatacatgtttctggtg

SEQ ID NO: 7542 - RNA, 18 nt, synthetic construct
  source 1..18: mol_type = other RNA
gtatacatgttcttggtg

SEQ ID NO: 7543 - RNA, 18 nt, synthetic construct
  source 1..18: mol_type = other RNA
gtgtacatgttcttagtg

SEQ ID NO: 7544 - RNA, 18 nt, synthetic construct
  source 1..18: mol_type = other RNA
gtatacatgttcttagtg

SEQ ID NO: 7545 - RNA, 18 nt, synthetic construct
  source 1..18: mol_type = other RNA
gtgtacatgttcctggtg

SEQ ID NO: 7546 - RNA, 18 nt, synthetic construct
  source 1..18: mol_type = other RNA
gtctacatgtttttggtg

SEQ ID NO: 7547 - RNA, 19 nt, synthetic construct
  source 1..19: mol_type = other RNA
ggtctacatgttcctggtg

SEQ ID NO: 7548 - RNA, 19 nt, synthetic construct
  source 1..19: mol_type = other RNA
ggtatacatgtttttggtg

SEQ ID NO: 7549 - RNA, 19 nt, synthetic construct
  source 1..19: mol_type = other RNA
ggtatacatgtttttagtg

SEQ ID NO: 7550 - RNA, 19 nt, synthetic construct
  source 1..19: mol_type = other RNA
ggtctacatgttcttagtg

SEQ ID NO: 7551 - RNA, 19 nt, synthetic construct
  source 1..19: mol_type = other RNA
ggtgtacatgtttttagtg

SEQ ID NO: 7552 - RNA, 19 nt, synthetic construct
  source 1..19: mol_type = other RNA
ggtatacatgttcttagtg

SEQ ID NO: 7553 - RNA, 19 nt, synthetic construct
  source 1..19: mol_type = other RNA
ggtgtacatgttcttggtg

SEQ ID NO: 7554 - RNA, 19 nt, synthetic construct
  source 1..19: mol_type = other RNA
ggtttacatgttcttagtg

SEQ ID NO: 7555 - RNA, 19 nt, synthetic construct
  source 1..19: mol_type = other RNA
ggtctacatgttcttggtg

SEQ ID NO: 7556 - RNA, 19 nt, synthetic construct
  source 1..19: mol_type = other RNA
ggtgtacatgtttttggtg

SEQ ID NO: 7557 - RNA, 19 nt, synthetic construct
  source 1..19: mol_type = other RNA
ggtttacatgtttttagtg

SEQ ID NO: 7558 - RNA, 19 nt, synthetic construct
  source 1..19: mol_type = other RNA
ggtttacatgtttctggtg

SEQ ID NO: 7559 - RNA, 19 nt, synthetic construct
  source 1..19: mol_type = other RNA
ggtttacatgttcttggtg

SEQ ID NO: 7560 - RNA, 19 nt, synthetic construct
  source 1..19: mol_type = other RNA
ggtttacatgtttttggtg

SEQ ID NO: 7561 - RNA, 19 nt, synthetic construct
  source 1..19: mol_type = other RNA
ggtatacatgttcctggtg

SEQ ID NO: 7562 - RNA, 19 nt, synthetic construct
  source 1..19: mol_type = other RNA
ggtgtacatgtttctggtg

SEQ ID NO: 7563 - RNA, 19 nt, synthetic construct
  source 1..19: mol_type = other RNA
ggtatacatgttcttggtg

SEQ ID NO: 7564 - RNA, 19 nt, synthetic construct
  source 1..19: mol_type = other RNA
ggtctacatgtttctggtg

SEQ ID NO: 7565 - RNA, 19 nt, synthetic construct
  source 1..19: mol_type = other RNA
ggtatacatgtttctggtg

SEQ ID NO: 7566 - RNA, 19 nt, synthetic construct
  source 1..19: mol_type = other RNA
ggtctacatgtttttggtg

SEQ ID NO: 7567 - RNA, 19 nt, synthetic construct
  source 1..19: mol_type = other RNA
ggtgtacatgttcctggtg

SEQ ID NO: 7568 - RNA, 19 nt, synthetic construct
  source 1..19: mol_type = other RNA
ggtgtacatgttcttagtg

SEQ ID NO: 7569 - RNA, 19 nt, synthetic construct
  source 1..19: mol_type = other RNA
ggtctacatgtttttagtg

SEQ ID NO: 7570 - RNA, 19 nt, synthetic construct
  source 1..19: mol_type = other RNA
ggtttacatgttcctggtg

SEQ ID NO: 7571 - RNA, 20 nt, synthetic construct
  source 1..20: mol_type = other RNA
aggtgtacatgtttttggtg

SEQ ID NO: 7572 - RNA, 20 nt, synthetic construct
  source 1..20: mol_type = other RNA
aggtatacatgtttttggtg

SEQ ID NO: 7573 - RNA, 20 nt, synthetic construct
  source 1..20: mol_type = other RNA
aggtatacatgtttttagtg

SEQ ID NO: 7574 - RNA, 20 nt, synthetic construct
  source 1..20: mol_type = other RNA
aggtatacatgtttctggtg

SEQ ID NO: 7575 - RNA, 20 nt, synthetic construct
  source 1..20: mol_type = other RNA
aggtatacatgttcttggtg

SEQ ID NO: 7576 - RNA, 20 nt, synthetic construct
  source 1..20: mol_type = other RNA
aggtatacatgttcttagtg

SEQ ID NO: 7577 - RNA, 20 nt, synthetic construct
  source 1..20: mol_type = other RNA
aggtatacatgttcctggtg

SEQ ID NO: 7578 - RNA, 20 nt, synthetic construct
  source 1..20: mol_type = other RNA
aggtttacatgttcttggtg

SEQ ID NO: 7579 - RNA, 20 nt, synthetic construct
  source 1..20: mol_type = other RNA
aggtctacatgttcttagtg

SEQ ID NO: 7580 - RNA, 20 nt, synthetic construct
  source 1..20: mol_type = other RNA
aggtctacatgttcctggtg

SEQ ID NO: 7581 - RNA, 20 nt, synthetic construct
  source 1..20: mol_type = other RNA
aggtctacatgttcttggtg

SEQ ID NO: 7582 - RNA, 20 nt, synthetic construct
  source 1..20: mol_type = other RNA
aggtgtacatgtttctggtg

SEQ ID NO: 7583 - RNA, 20 nt, synthetic construct
  source 1..20: mol_type = other RNA
aggtgtacatgttcttagtg

SEQ ID NO: 7584 - RNA, 20 nt, synthetic construct
  source 1..20: mol_type = other RNA
aggtttacatgttcctggtg

SEQ ID NO: 7585 - RNA, 20 nt, synthetic construct
  source 1..20: mol_type = other RNA
aggtgtacatgtttttagtg

SEQ ID NO: 7586 - RNA, 20 nt, synthetic construct
  source 1..20: mol_type = other RNA
aggtttacatgtttctggtg

SEQ ID NO: 7587 - RNA, 20 nt, synthetic construct
  source 1..20: mol_type = other RNA
aggtctacatgtttttagtg

SEQ ID NO: 7588 - RNA, 20 nt, synthetic construct
  source 1..20: mol_type = other RNA
aggtgtacatgttcttggtg

SEQ ID NO: 7589 - RNA, 20 nt, synthetic construct
  source 1..20: mol_type = other RNA
aggtttacatgtttttagtg

SEQ ID NO: 7590 - RNA, 20 nt, synthetic construct
  source 1..20: mol_type = other RNA
aggtgtacatgttcctggtg

SEQ ID NO: 7591 - RNA, 20 nt, synthetic construct
  source 1..20: mol_type = other RNA
aggtctacatgtttttggtg

SEQ ID NO: 7592 - RNA, 20 nt, synthetic construct
  source 1..20: mol_type = other RNA
aggtttacatgtttttggtg

SEQ ID NO: 7593 - RNA, 20 nt, synthetic construct
  source 1..20: mol_type = other RNA
aggtttacatgttcttagtg

SEQ ID NO: 7594 - RNA, 20 nt, synthetic construct
  source 1..20: mol_type = other RNA
aggtctacatgtttctggtg

SEQ ID NO: 7595 - RNA, 21 nt, synthetic construct
  source 1..21: mol_type = other RNA
caggtttacatgtttctggtg

SEQ ID NO: 7596 - RNA, 21 nt, synthetic construct
  source 1..21: mol_type = other RNA
caggtgtacatgttcctggtg

SEQ ID NO: 7597 - RNA, 21 nt, synthetic construct
  source 1..21: mol_type = other RNA
caggtctacatgtttttggtg

SEQ ID NO: 7598 - RNA, 21 nt, synthetic construct
  source 1..21: mol_type = other RNA
caggtctacatgtttttagtg

SEQ ID NO: 7599 - RNA, 21 nt, synthetic construct
  source 1..21: mol_type = other RNA
caggtctacatgtttctggtg

SEQ ID NO: 7600 - RNA, 21 nt, synthetic construct
  source 1..21: mol_type = other RNA
caggtttacatgttcctggtg

SEQ ID NO: 7601 - RNA, 21 nt, synthetic construct
  source 1..21: mol_type = other RNA
caggtctacatgttcttggtg

SEQ ID NO: 7602 - RNA, 21 nt, synthetic construct
  source 1..21: mol_type = other RNA
caggtctacatgttcttagtg

SEQ ID NO: 7603 - RNA, 21 nt, synthetic construct
  source 1..21: mol_type = other RNA
caggtgtacatgttcttggtg

SEQ ID NO: 7604 - RNA, 21 nt, synthetic construct
  source 1..21: mol_type = other RNA
caggtttacatgtttttagtg

SEQ ID NO: 7605 - RNA, 21 nt, synthetic construct
  source 1..21: mol_type = other RNA
caggtatacatgtttttagtg

SEQ ID NO: 7606 - RNA, 21 nt, synthetic construct
  source 1..21: mol_type = other RNA
caggtttacatgtttttggtg

SEQ ID NO: 7607 - RNA, 21 nt, synthetic construct
  source 1..21: mol_type = other RNA
caggtatacatgttcctggtg

SEQ ID NO: 7608 - RNA, 21 nt, synthetic construct
  source 1..21: mol_type = other RNA
caggtatacatgttcttagtg

SEQ ID NO: 7609 - RNA, 21 nt, synthetic construct
  source 1..21: mol_type = other RNA
caggtatacatgttcttggtg

SEQ ID NO: 7610 - RNA, 21 nt, synthetic construct
  source 1..21: mol_type = other RNA
caggtatacatgtttctggtg

SEQ ID NO: 7611 - RNA, 21 nt, synthetic construct
  source 1..21: mol_type = other RNA
caggtctacatgttcctggtg

SEQ ID NO: 7612 - RNA, 21 nt, synthetic construct
  source 1..21: mol_type = other RNA
caggtatacatgtttttggtg

SEQ ID NO: 7613 - RNA, 21 nt, synthetic construct
  source 1..21: mol_type = other RNA
caggtgtacatgttcttagtg

SEQ ID NO: 7614 - RNA, 21 nt, synthetic construct
  source 1..21: mol_type = other RNA
caggtttacatgttcttagtg

SEQ ID NO: 7615 - RNA, 21 nt, synthetic construct
  source 1..21: mol_type = other RNA
caggtttacatgttcttggtg

SEQ ID NO: 7616 - RNA, 21 nt, synthetic construct
  source 1..21: mol_type = other RNA
caggtgtacatgtttttagtg

SEQ ID NO: 7617 - RNA, 21 nt, synthetic construct
  source 1..21: mol_type = other RNA
caggtgtacatgtttctggtg

SEQ ID NO: 7618 - RNA, 21 nt, synthetic construct
  source 1..21: mol_type = other RNA
caggtgtacatgtttttggtg

SEQ ID NO: 7619 - RNA, 22 nt, synthetic construct
  source 1..22: mol_type = other RNA
ccaggtatacatgttcttagtg

SEQ ID NO: 7620 - RNA, 22 nt, synthetic construct
  source 1..22: mol_type = other RNA
ccaggtctacatgtttctggtg

SEQ ID NO: 7621 - RNA, 22 nt, synthetic construct
  source 1..22: mol_type = other RNA
ccaggtttacatgtttttagtg

SEQ ID NO: 7622 - RNA, 22 nt, synthetic construct
  source 1..22: mol_type = other RNA
ccaggtttacatgttcttggtg

SEQ ID NO: 7623 - RNA, 22 nt, synthetic construct
  source 1..22: mol_type = other RNA
ccaggtgtacatgtttttggtg

SEQ ID NO: 7624 - RNA, 22 nt, synthetic construct
  source 1..22: mol_type = other RNA
ccaggtgtacatgtttttagtg

SEQ ID NO: 7625 - RNA, 22 nt, synthetic construct
  source 1..22: mol_type = other RNA
ccaggtgtacatgtttctggtg

SEQ ID NO: 7626 - RNA, 22 nt, synthetic construct
  source 1..22: mol_type = other RNA
ccaggtttacatgtttctggtg

SEQ ID NO: 7627 - RNA, 22 nt, synthetic construct
  source 1..22: mol_type = other RNA
ccaggtgtacatgttcttggtg

SEQ ID NO: 7628 - RNA, 22 nt, synthetic construct
  source 1..22: mol_type = other RNA
ccaggtgtacatgttcttagtg

SEQ ID NO: 7629 - RNA, 22 nt, synthetic construct
  source 1..22: mol_type = other RNA
ccaggtgtacatgttcctggtg

SEQ ID NO: 7630 - RNA, 22 nt, synthetic construct
  source 1..22: mol_type = other RNA
ccaggtctacatgtttttggtg

SEQ ID NO: 7631 - RNA, 22 nt, synthetic construct
  source 1..22: mol_type = other RNA
ccaggtctacatgtttttagtg

SEQ ID NO: 7632 - RNA, 22 nt, synthetic construct
  source 1..22: mol_type = other RNA
ccaggtctacatgttcttggtg

SEQ ID NO: 7633 - RNA, 22 nt, synthetic construct
  source 1..22: mol_type = other RNA
ccaggtttacatgttcttagtg

SEQ ID NO: 7634 - RNA, 22 nt, synthetic construct
  source 1..22: mol_type = other RNA
ccaggtctacatgttcttagtg

SEQ ID NO: 7635 - RNA, 22 nt, synthetic construct
  source 1..22: mol_type = other RNA
ccaggtctacatgttcctggtg

SEQ ID NO: 7636 - RNA, 22 nt, synthetic construct
  source 1..22: mol_type = other RNA
ccaggtatacatgtttttggtg

SEQ ID NO: 7637 - RNA, 22 nt, synthetic construct
  source 1..22: mol_type = other RNA
ccaggtatacatgtttttagtg

SEQ ID NO: 7638 - RNA, 22 nt, synthetic construct
  source 1..22: mol_type = other RNA
ccaggtatacatgtttctggtg

SEQ ID NO: 7639 - RNA, 22 nt, synthetic construct
  source 1..22: mol_type = other RNA
ccaggtatacatgttcttggtg

SEQ ID NO: 7640 - RNA, 22 nt, synthetic construct
  source 1..22: mol_type = other RNA
ccaggtatacatgttcctggtg

SEQ ID NO: 7641 - RNA, 22 nt, synthetic construct
  source 1..22: mol_type = other RNA
ccaggtttacatgtttttggtg

SEQ ID NO: 7642 - RNA, 22 nt, synthetic construct
  source 1..22: mol_type = other RNA
ccaggtttacatgttcctggtg

SEQ ID NO: 7643 - RNA, 23 nt, synthetic construct
  source 1..23: mol_type = other RNA
cccaggtttacatgttcctggtg

SEQ ID NO: 7644 - RNA, 23 nt, synthetic construct
  source 1..23: mol_type = other RNA
cccaggtgtacatgtttttagtg

SEQ ID NO: 7645 - RNA, 23 nt, synthetic construct
  source 1..23: mol_type = other RNA
cccaggtgtacatgttcttagtg

SEQ ID NO: 7646 - RNA, 23 nt, synthetic construct
  source 1..23: mol_type = other RNA
cccaggtttacatgtttttagtg

SEQ ID NO: 7647 - RNA, 23 nt, synthetic construct
  source 1..23: mol_type = other RNA
cccaggtttacatgttcttggtg

SEQ ID NO: 7648 - RNA, 23 nt, synthetic construct
  source 1..23: mol_type = other RNA
cccaggtctacatgtttctggtg

SEQ ID NO: 7649 - RNA, 23 nt, synthetic construct
  source 1..23: mol_type = other RNA
cccaggtgtacatgtttctggtg

SEQ ID NO: 7650 - RNA, 23 nt, synthetic construct
  source 1..23: mol_type = other RNA
cccaggtctacatgtttttggtg

SEQ ID NO: 7651 - RNA, 23 nt, synthetic construct
  source 1..23: mol_type = other RNA
cccaggtgtacatgttcttggtg

SEQ ID NO: 7652 - RNA, 23 nt, synthetic construct
  source 1..23: mol_type = other RNA
cccaggtatacatgtttttagtg

SEQ ID NO: 7653 - RNA, 23 nt, synthetic construct
  source 1..23: mol_type = other RNA
cccaggtgtacatgttcctggtg

SEQ ID NO: 7654 - RNA, 23 nt, synthetic construct
  source 1..23: mol_type = other RNA
cccaggtgtacatgtttttggtg

SEQ ID NO: 7655 - RNA, 23 nt, synthetic construct
  source 1..23: mol_type = other RNA
cccaggtatacatgttcctggtg

SEQ ID NO: 7656 - RNA, 23 nt, synthetic construct
  source 1..23: mol_type = other RNA
cccaggtatacatgtttttggtg

SEQ ID NO: 7657 - RNA, 23 nt, synthetic construct
  source 1..23: mol_type = other RNA
cccaggtctacatgtttttagtg

SEQ ID NO: 7658 - RNA, 23 nt, synthetic construct
  source 1..23: mol_type = other RNA
cccaggtatacatgttcttagtg

SEQ ID NO: 7659 - RNA, 23 nt, synthetic construct
  source 1..23: mol_type = other RNA
cccaggtatacatgttcttggtg

SEQ ID NO: 7660 - RNA, 23 nt, synthetic construct
  source 1..23: mol_type = other RNA
cccaggtatacatgtttctggtg

SEQ ID NO: 7661 - RNA, 23 nt, synthetic construct
  source 1..23: mol_type = other RNA
cccaggtttacatgtttttggtg

SEQ ID NO: 7662 - RNA, 23 nt, synthetic construct
  source 1..23: mol_type = other RNA
cccaggtctacatgttcctggtg

SEQ ID NO: 7663 - RNA, 23 nt, synthetic construct
  source 1..23: mol_type = other RNA
cccaggtctacatgttcttagtg

SEQ ID NO: 7664 - RNA, 23 nt, synthetic construct
  source 1..23: mol_type = other RNA
cccaggtctacatgttcttggtg

SEQ ID NO: 7665 - RNA, 23 nt, synthetic construct
  source 1..23: mol_type = other RNA
cccaggtttacatgttcttagtg

SEQ ID NO: 7666 - RNA, 23 nt, synthetic construct
  source 1..23: mol_type = other RNA
cccaggtttacatgtttctggtg

SEQ ID NO: 7667 - RNA, 24 nt, synthetic construct
  source 1..24: mol_type = other RNA
ccccaggtctacatgttcttagtg

SEQ ID NO: 7668 - RNA, 24 nt, synthetic construct
  source 1..24: mol_type = other RNA
ccccaggtctacatgttcttggtg

SEQ ID NO: 7669 - RNA, 24 nt, synthetic construct
  source 1..24: mol_type = other RNA
ccccaggtctacatgtttttagtg

SEQ ID NO: 7670 - RNA, 24 nt, synthetic construct
  source 1..24: mol_type = other RNA
ccccaggtctacatgtttttggtg

SEQ ID NO: 7671 - RNA, 24 nt, synthetic construct
  source 1..24: mol_type = other RNA
ccccaggtgtacatgttcctggtg

SEQ ID NO: 7672 - RNA, 24 nt, synthetic construct
  source 1..24: mol_type = other RNA
ccccaggtgtacatgttcttggtg

SEQ ID NO: 7673 - RNA, 24 nt, synthetic construct
  source 1..24: mol_type = other RNA
ccccaggtgtacatgtttctggtg

SEQ ID NO: 7674 - RNA, 24 nt, synthetic construct
  source 1..24: mol_type = other RNA
ccccaggtgtacatgtttttagtg

SEQ ID NO: 7675 - RNA, 24 nt, synthetic construct
  source 1..24: mol_type = other RNA
ccccaggtctacatgttcctggtg

SEQ ID NO: 7676 - RNA, 24 nt, synthetic construct
  source 1..24: mol_type = other RNA
ccccaggtgtacatgttcttagtg

SEQ ID NO: 7677 - RNA, 24 nt, synthetic construct
  source 1..24: mol_type = other RNA
ccccaggtatacatgtttttggtg

SEQ ID NO: 7678 - RNA, 24 nt, synthetic construct
  source 1..24: mol_type = other RNA
ccccaggtatacatgttcttggtg

SEQ ID NO: 7679 - RNA, 24 nt, synthetic construct
  source 1..24: mol_type = other RNA
ccccaggtttacatgttcctggtg

SEQ ID NO: 7680 - RNA, 24 nt, synthetic construct
  source 1..24: mol_type = other RNA
ccccaggtatacatgtttctggtg

SEQ ID NO: 7681 - RNA, 24 nt, synthetic construct
  source 1..24: mol_type = other RNA
ccccaggtttacatgttcttagtg

SEQ ID NO: 7682 - RNA, 24 nt, synthetic construct
  source 1..24: mol_type = other RNA
ccccaggtttacatgtttttggtg

SEQ ID NO: 7683 - RNA, 24 nt, synthetic construct
  source 1..24: mol_type = other RNA
ccccaggtttacatgtttttagtg

SEQ ID NO: 7684 - RNA, 24 nt, synthetic construct
  source 1..24: mol_type = other RNA
ccccaggtttacatgtttctggtg

SEQ ID NO: 7685 - RNA, 24 nt, synthetic construct
  source 1..24: mol_type = other RNA
ccccaggtttacatgttcttggtg

SEQ ID NO: 7686 - RNA, 24 nt, synthetic construct
  source 1..24: mol_type = other RNA
ccccaggtatacatgtttttagtg

SEQ ID NO: 7687 - RNA, 24 nt, synthetic construct
  source 1..24: mol_type = other RNA
ccccaggtctacatgtttctggtg

SEQ ID NO: 7688 - RNA, 24 nt, synthetic construct
  source 1..24: mol_type = other RNA
ccccaggtgtacatgtttttggtg

SEQ ID NO: 7689 - RNA, 24 nt, synthetic construct
  source 1..24: mol_type = other RNA
ccccaggtatacatgttcctggtg

SEQ ID NO: 7690 - RNA, 24 nt, synthetic construct
  source 1..24: mol_type = other RNA
ccccaggtatacatgttcttagtg

SEQ ID NO: 7691 - RNA, 25 nt, synthetic construct
  source 1..25: mol_type = other RNA
cccccaggtatacatgttcttggtg

SEQ ID NO: 7692 - RNA, 25 nt, synthetic construct
  source 1..25: mol_type = other RNA
cccccaggtgtacatgttcctggtg

SEQ ID NO: 7693 - RNA, 25 nt, synthetic construct
  source 1..25: mol_type = other RNA
cccccaggtatacatgttcttagtg

SEQ ID NO: 7694 - RNA, 25 nt, synthetic construct
  source 1..25: mol_type = other RNA
cccccaggtatacatgtttttagtg

SEQ ID NO: 7695 - RNA, 25 nt, synthetic construct
  source 1..25: mol_type = other RNA
cccccaggtatacatgtttctggtg

SEQ ID NO: 7696 - RNA, 25 nt, synthetic construct
  source 1..25: mol_type = other RNA
cccccaggtatacatgttcctggtg

SEQ ID NO: 7697 - RNA, 25 nt, synthetic construct
  source 1..25: mol_type = other RNA
cccccaggtctacatgtttctggtg

SEQ ID NO: 7698 - RNA, 25 nt, synthetic construct
  source 1..25: mol_type = other RNA
cccccaggtctacatgttcctggtg

SEQ ID NO: 7699 - RNA, 25 nt, synthetic construct
  source 1..25: mol_type = other RNA
cccccaggtctacatgtttttagtg

SEQ ID NO: 7700 - RNA, 25 nt, synthetic construct
  source 1..25: mol_type = other RNA
cccccaggtctacatgtttttggtg

SEQ ID NO: 7701 - RNA, 25 nt, synthetic construct
  source 1..25: mol_type = other RNA
cccccaggtgtacatgttcttagtg

SEQ ID NO: 7702 - RNA, 25 nt, synthetic construct
  source 1..25: mol_type = other RNA
cccccaggtgtacatgttcttggtg

SEQ ID NO: 7703 - RNA, 25 nt, synthetic construct
  source 1..25: mol_type = other RNA
cccccaggtgtacatgtttctggtg

SEQ ID NO: 7704 - RNA, 25 nt, synthetic construct
  source 1..25: mol_type = other RNA
cccccaggtgtacatgtttttagtg

SEQ ID NO: 7705 - RNA, 25 nt, synthetic construct
  source 1..25: mol_type = other RNA
cccccaggtgtacatgtttttggtg

SEQ ID NO: 7706 - RNA, 25 nt, synthetic construct
  source 1..25: mol_type = other RNA
cccccaggtttacatgttcctggtg

SEQ ID NO: 7707 - RNA, 25 nt, synthetic construct
  source 1..25: mol_type = other RNA
cccccaggtttacatgttcttagtg

SEQ ID NO: 7708 - RNA, 25 nt, synthetic construct
  source 1..25: mol_type = other RNA
cccccaggtttacatgttcttggtg

SEQ ID NO: 7709 - RNA, 25 nt, synthetic construct
  source 1..25: mol_type = other RNA
cccccaggtttacatgtttctggtg

SEQ ID NO: 7710 - RNA, 25 nt, synthetic construct
  source 1..25: mol_type = other RNA
cccccaggtttacatgtttttagtg

SEQ ID NO: 7711 - RNA, 25 nt, synthetic construct
  source 1..25: mol_type = other RNA
cccccaggtctacatgttcttggtg

SEQ ID NO: 7712 - RNA, 25 nt, synthetic construct
  source 1..25: mol_type = other RNA
cccccaggtttacatgtttttggtg

SEQ ID NO: 7713 - RNA, 25 nt, synthetic construct
  source 1..25: mol_type = other RNA
cccccaggtctacatgttcttagtg

SEQ ID NO: 7714 - RNA, 25 nt, synthetic construct
  source 1..25: mol_type = other RNA
cccccaggtatacatgtttttggtg

SEQ ID NO: 7715 - RNA, 26 nt, synthetic construct
  source 1..26: mol_type = other RNA
tcccccaggtttacatgtttttggtg

SEQ ID NO: 7716 - RNA, 26 nt, synthetic construct
  source 1..26: mol_type = other RNA
tcccccaggtttacatgtttctggtg

SEQ ID NO: 7717 - RNA, 26 nt, synthetic construct
  source 1..26: mol_type = other RNA
tcccccaggtctacatgttcttggtg

SEQ ID NO: 7718 - RNA, 26 nt, synthetic construct
  source 1..26: mol_type = other RNA
tcccccaggtatacatgttcctggtg

SEQ ID NO: 7719 - RNA, 26 nt, synthetic construct
  source 1..26: mol_type = other RNA
tcccccaggtatacatgttcttggtg

SEQ ID NO: 7720 - RNA, 26 nt, synthetic construct
  source 1..26: mol_type = other RNA
tcccccaggtatacatgtttctggtg

SEQ ID NO: 7721 - RNA, 26 nt, synthetic construct
  source 1..26: mol_type = other RNA
tcccccaggtatacatgtttttagtg

SEQ ID NO: 7722 - RNA, 26 nt, synthetic construct
  source 1..26: mol_type = other RNA
tcccccaggtgtacatgtttttagtg

SEQ ID NO: 7723 - RNA, 26 nt, synthetic construct
  source 1..26: mol_type = other RNA
tcccccaggtatacatgtttttggtg

SEQ ID NO: 7724 - RNA, 26 nt, synthetic construct
  source 1..26: mol_type = other RNA
tcccccaggtctacatgttcctggtg

SEQ ID NO: 7725 - RNA, 26 nt, synthetic construct
  source 1..26: mol_type = other RNA
tcccccaggtctacatgttcttagtg

SEQ ID NO: 7726 - RNA, 26 nt, synthetic construct
  source 1..26: mol_type = other RNA
tcccccaggtgtacatgtttttggtg

SEQ ID NO: 7727 - RNA, 26 nt, synthetic construct
  source 1..26: mol_type = other RNA
tcccccaggtctacatgtttctggtg

SEQ ID NO: 7728 - RNA, 26 nt, synthetic construct
  source 1..26: mol_type = other RNA
tcccccaggtctacatgtttttagtg

SEQ ID NO: 7729 - RNA, 26 nt, synthetic construct
  source 1..26: mol_type = other RNA
tcccccaggtctacatgtttttggtg

SEQ ID NO: 7730 - RNA, 26 nt, synthetic construct
  source 1..26: mol_type = other RNA
tcccccaggtgtacatgttcctggtg

SEQ ID NO: 7731 - RNA, 26 nt, synthetic construct
  source 1..26: mol_type = other RNA
tcccccaggtgtacatgtttctggtg

SEQ ID NO: 7732 - RNA, 26 nt, synthetic construct
  source 1..26: mol_type = other RNA
tcccccaggtgtacatgttcttagtg

SEQ ID NO: 7733 - RNA, 26 nt, synthetic construct
  source 1..26: mol_type = other RNA
tcccccaggtgtacatgttcttggtg

SEQ ID NO: 7734 - RNA, 26 nt, synthetic construct
  source 1..26: mol_type = other RNA
tcccccaggtttacatgttcctggtg

SEQ ID NO: 7735 - RNA, 26 nt, synthetic construct
  source 1..26: mol_type = other RNA
tcccccaggtttacatgttcttagtg

SEQ ID NO: 7736 - RNA, 26 nt, synthetic construct
  source 1..26: mol_type = other RNA
tcccccaggtttacatgttcttggtg

SEQ ID NO: 7737 - RNA, 26 nt, synthetic construct
  source 1..26: mol_type = other RNA
tcccccaggtatacatgttcttagtg

SEQ ID NO: 7738 - RNA, 26 nt, synthetic construct
  source 1..26: mol_type = other RNA
tcccccaggtttacatgtttttagtg

SEQ ID NO: 7739 - RNA, 27 nt, synthetic construct
  source 1..27: mol_type = other RNA
ttcccccaggtctacatgtttttggtg

SEQ ID NO: 7740 - RNA, 27 nt, synthetic construct
  source 1..27: mol_type = other RNA
ttcccccaggtatacatgttcctggtg

SEQ ID NO: 7741 - RNA, 27 nt, synthetic construct
  source 1..27: mol_type = other RNA
ttcccccaggtatacatgttcttagtg

SEQ ID NO: 7742 - RNA, 27 nt, synthetic construct
  source 1..27: mol_type = other RNA
ttcccccaggtctacatgtttttagtg

SEQ ID NO: 7743 - RNA, 27 nt, synthetic construct
  source 1..27: mol_type = other RNA
ttcccccaggtgtacatgttcctggtg

SEQ ID NO: 7744 - RNA, 27 nt, synthetic construct
  source 1..27: mol_type = other RNA
ttcccccaggtgtacatgtttctggtg

SEQ ID NO: 7745 - RNA, 27 nt, synthetic construct
  source 1..27: mol_type = other RNA
ttcccccaggtgtacatgtttttagtg

SEQ ID NO: 7746 - RNA, 27 nt, synthetic construct
  source 1..27: mol_type = other RNA
ttcccccaggtgtacatgtttttggtg

SEQ ID NO: 7747 - RNA, 27 nt, synthetic construct
  source 1..27: mol_type = other RNA
ttcccccaggtttacatgttcctggtg

SEQ ID NO: 7748 - RNA, 27 nt, synthetic construct
  source 1..27: mol_type = other RNA
ttcccccaggtttacatgtttttagtg

SEQ ID NO: 7749 - RNA, 27 nt, synthetic construct
  source 1..27: mol_type = other RNA
ttcccccaggtttacatgtttctggtg

SEQ ID NO: 7750 - RNA, 27 nt, synthetic construct
  source 1..27: mol_type = other RNA
ttcccccaggtgtacatgttcttagtg

SEQ ID NO: 7751 - RNA, 27 nt, synthetic construct
  source 1..27: mol_type = other RNA
ttcccccaggtttacatgtttttggtg

SEQ ID NO: 7752 - RNA, 27 nt, synthetic construct
  source 1..27: mol_type = other RNA
ttcccccaggtttacatgttcttagtg

SEQ ID NO: 7753 - RNA, 27 nt, synthetic construct
  source 1..27: mol_type = other RNA
ttcccccaggtgtacatgttcttggtg

SEQ ID NO: 7754 - RNA, 27 nt, synthetic construct
  source 1..27: mol_type = other RNA
ttcccccaggtctacatgtttctggtg

SEQ ID NO: 7755 - RNA, 27 nt, synthetic construct
  source 1..27: mol_type = other RNA
ttcccccaggtctacatgttcttggtg

SEQ ID NO: 7756 - RNA, 27 nt, synthetic construct
  source 1..27: mol_type = other RNA
ttcccccaggtctacatgttcttagtg

SEQ ID NO: 7757 - RNA, 27 nt, synthetic construct
  source 1..27: mol_type = other RNA
ttcccccaggtctacatgttcctggtg

SEQ ID NO: 7758 - RNA, 27 nt, synthetic construct
  source 1..27: mol_type = other RNA
ttcccccaggtatacatgtttttggtg

SEQ ID NO: 7759 - RNA, 27 nt, synthetic construct
  source 1..27: mol_type = other RNA
ttcccccaggtatacatgtttttagtg

SEQ ID NO: 7760 - RNA, 27 nt, synthetic construct
  source 1..27: mol_type = other RNA
ttcccccaggtatacatgtttctggtg

SEQ ID NO: 7761 - RNA, 27 nt, synthetic construct
  source 1..27: mol_type = other RNA
ttcccccaggtatacatgttcttggtg

SEQ ID NO: 7762 - RNA, 27 nt, synthetic construct
  source 1..27: mol_type = other RNA
ttcccccaggtttacatgttcttggtg

SEQ ID NO: 7763 - RNA, 28 nt, synthetic construct
  source 1..28: mol_type = other RNA
tttcccccaggtctacatgtttttggtg

SEQ ID NO: 7764 - RNA, 28 nt, synthetic construct
  source 1..28: mol_type = other RNA
tttcccccaggtatacatgtttttggtg

SEQ ID NO: 7765 - RNA, 28 nt, synthetic construct
  source 1..28: mol_type = other RNA
tttcccccaggtctacatgtttctggtg

SEQ ID NO: 7766 - RNA, 28 nt, synthetic construct
  source 1..28: mol_type = other RNA
tttcccccaggtctacatgttcttggtg

SEQ ID NO: 7767 - RNA, 28 nt, synthetic construct
  source 1..28: mol_type = other RNA
tttcccccaggtctacatgttcctggtg

SEQ ID NO: 7768 - RNA, 28 nt, synthetic construct
  source 1..28: mol_type = other RNA
tttcccccaggtatacatgttcctggtg

SEQ ID NO: 7769 - RNA, 28 nt, synthetic construct
  source 1..28: mol_type = other RNA
tttcccccaggtatacatgtttttagtg

SEQ ID NO: 7770 - RNA, 28 nt, synthetic construct
  source 1..28: mol_type = other RNA
tttcccccaggtatacatgttcttggtg

SEQ ID NO: 7771 - RNA, 28 nt, synthetic construct
  source 1..28: mol_type = other RNA
tttcccccaggtgtacatgttcctggtg

SEQ ID NO: 7772 - RNA, 28 nt, synthetic construct
  source 1..28: mol_type = other RNA
tttcccccaggtctacatgtttttagtg

SEQ ID NO: 7773 - RNA, 28 nt, synthetic construct
  source 1..28: mol_type = other RNA
tttcccccaggtatacatgttcttagtg

SEQ ID NO: 7774 - RNA, 28 nt, synthetic construct
  source 1..28: mol_type = other RNA
tttcccccaggtttacatgttcttagtg

SEQ ID NO: 7775 - RNA, 28 nt, synthetic construct
  source 1..28: mol_type = other RNA
tttcccccaggtgtacatgttcttagtg

SEQ ID NO: 7776 - RNA, 28 nt, synthetic construct
  source 1..28: mol_type = other RNA
tttcccccaggtttacatgtttttggtg

SEQ ID NO: 7777 - RNA, 28 nt, synthetic construct
  source 1..28: mol_type = other RNA
tttcccccaggtttacatgtttttagtg

SEQ ID NO: 7778 - RNA, 28 nt, synthetic construct
  source 1..28: mol_type = other RNA
tttcccccaggtttacatgttcttggtg

SEQ ID NO: 7779 - RNA, 28 nt, synthetic construct
  source 1..28: mol_type = other RNA
tttcccccaggtctacatgttcttagtg

SEQ ID NO: 7780 - RNA, 28 nt, synthetic construct
  source 1..28: mol_type = other RNA
tttcccccaggtatacatgtttctggtg

SEQ ID NO: 7781 - RNA, 28 nt, synthetic construct
  source 1..28: mol_type = other RNA
tttcccccaggtgtacatgttcttggtg

SEQ ID NO: 7782 - RNA, 28 nt, synthetic construct
  source 1..28: mol_type = other RNA
tttcccccaggtgtacatgtttttggtg

SEQ ID NO: 7783 - RNA, 28 nt, synthetic construct
  source 1..28: mol_type = other RNA
tttcccccaggtgtacatgtttctggtg

SEQ ID NO: 7784 - RNA, 28 nt, synthetic construct
  source 1..28: mol_type = other RNA
tttcccccaggtgtacatgtttttagtg

SEQ ID NO: 7785 - RNA, 28 nt, synthetic construct
  source 1..28: mol_type = other RNA
tttcccccaggtttacatgttcctggtg

SEQ ID NO: 7786 - RNA, 28 nt, synthetic construct
  source 1..28: mol_type = other RNA
tttcccccaggtttacatgtttctggtg

SEQ ID NO: 7787 - RNA, 29 nt, synthetic construct
  source 1..29: mol_type = other RNA
ctttcccccaggtgtacatgtttttggtg

SEQ ID NO: 7788 - RNA, 29 nt, synthetic construct
  source 1..29: mol_type = other RNA
ctttcccccaggtctacatgtttctggtg

SEQ ID NO: 7789 - RNA, 29 nt, synthetic construct
  source 1..29: mol_type = other RNA
ctttcccccaggtgtacatgtttttagtg

SEQ ID NO: 7790 - RNA, 29 nt, synthetic construct
  source 1..29: mol_type = other RNA
ctttcccccaggtctacatgtttttagtg

SEQ ID NO: 7791 - RNA, 29 nt, synthetic construct
  source 1..29: mol_type = other RNA
ctttcccccaggtttacatgttcttagtg

SEQ ID NO: 7792 - RNA, 29 nt, synthetic construct
  source 1..29: mol_type = other RNA
ctttcccccaggtgtacatgttcctggtg

SEQ ID NO: 7793 - RNA, 29 nt, synthetic construct
  source 1..29: mol_type = other RNA
ctttcccccaggtttacatgttcctggtg

SEQ ID NO: 7794 - RNA, 29 nt, synthetic construct
  source 1..29: mol_type = other RNA
ctttcccccaggtgtacatgttcttggtg

SEQ ID NO: 7795 - RNA, 29 nt, synthetic construct
  source 1..29: mol_type = other RNA
ctttcccccaggtttacatgtttttggtg

SEQ ID NO: 7796 - RNA, 29 nt, synthetic construct
  source 1..29: mol_type = other RNA
ctttcccccaggtttacatgtttttagtg

SEQ ID NO: 7797 - RNA, 29 nt, synthetic construct
  source 1..29: mol_type = other RNA
ctttcccccaggtttacatgtttctggtg

SEQ ID NO: 7798 - RNA, 29 nt, synthetic construct
  source 1..29: mol_type = other RNA
ctttcccccaggtgtacatgtttctggtg

SEQ ID NO: 7799 - RNA, 29 nt, synthetic construct
  source 1..29: mol_type = other RNA
ctttcccccaggtgtacatgttcttagtg

SEQ ID NO: 7800 - RNA, 29 nt, synthetic construct
  source 1..29: mol_type = other RNA
ctttcccccaggtttacatgttcttggtg

SEQ ID NO: 7801 - RNA, 29 nt, synthetic construct
  source 1..29: mol_type = other RNA
ctttcccccaggtatacatgttcctggtg

SEQ ID NO: 7802 - RNA, 29 nt, synthetic construct
  source 1..29: mol_type = other RNA
ctttcccccaggtatacatgttcttagtg

SEQ ID NO: 7803 - RNA, 29 nt, synthetic construct
  source 1..29: mol_type = other RNA
ctttcccccaggtctacatgtttttggtg

SEQ ID NO: 7804 - RNA, 29 nt, synthetic construct
  source 1..29: mol_type = other RNA
ctttcccccaggtatacatgtttctggtg

SEQ ID NO: 7805 - RNA, 29 nt, synthetic construct
  source 1..29: mol_type = other RNA
ctttcccccaggtatacatgttcttggtg

SEQ ID NO: 7806 - RNA, 29 nt, synthetic construct
  source 1..29: mol_type = other RNA
ctttcccccaggtctacatgttcttggtg

SEQ ID NO: 7807 - RNA, 29 nt, synthetic construct
  source 1..29: mol_type = other RNA
ctttcccccaggtctacatgttcttagtg

SEQ ID NO: 7808 - RNA, 29 nt, synthetic construct
  source 1..29: mol_type = other RNA
ctttcccccaggtctacatgttcctggtg

SEQ ID NO: 7809 - RNA, 29 nt, synthetic construct
  source 1..29: mol_type = other RNA
ctttcccccaggtatacatgtttttggtg

SEQ ID NO: 7810 - RNA, 29 nt, synthetic construct
  source 1..29: mol_type = other RNA
ctttcccccaggtatacatgtttttagtg

SEQ ID NO: 7811 - RNA, 30 nt, synthetic construct
  source 1..30: mol_type = other RNA
gctttcccccaggtttacatgtttttagtg

SEQ ID NO: 7812 - RNA, 30 nt, synthetic construct
  source 1..30: mol_type = other RNA
gctttcccccaggtctacatgtttctggtg

SEQ ID NO: 7813 - RNA, 30 nt, synthetic construct
  source 1..30: mol_type = other RNA
gctttcccccaggtatacatgtttttagtg

SEQ ID NO: 7814 - RNA, 30 nt, synthetic construct
  source 1..30: mol_type = other RNA
gctttcccccaggtctacatgttcttagtg

SEQ ID NO: 7815 - RNA, 30 nt, synthetic construct
  source 1..30: mol_type = other RNA
gctttcccccaggtctacatgttcttggtg

SEQ ID NO: 7816 - RNA, 30 nt, synthetic construct
  source 1..30: mol_type = other RNA
gctttcccccaggtctacatgttcctggtg

SEQ ID NO: 7817 - RNA, 30 nt, synthetic construct
  source 1..30: mol_type = other RNA
gctttcccccaggtatacatgtttttggtg

SEQ ID NO: 7818 - RNA, 30 nt, synthetic construct
  source 1..30: mol_type = other RNA
gctttcccccaggtctacatgtttttagtg

SEQ ID NO: 7819 - RNA, 30 nt, synthetic construct
  source 1..30: mol_type = other RNA
gctttcccccaggtatacatgtttctggtg

SEQ ID NO: 7820 - RNA, 30 nt, synthetic construct
  source 1..30: mol_type = other RNA
gctttcccccaggtatacatgttcttggtg

SEQ ID NO: 7821 - RNA, 30 nt, synthetic construct
  source 1..30: mol_type = other RNA
gctttcccccaggtgtacatgttcttggtg

SEQ ID NO: 7822 - RNA, 30 nt, synthetic construct
  source 1..30: mol_type = other RNA
gctttcccccaggtgtacatgttcttagtg

SEQ ID NO: 7823 - RNA, 30 nt, synthetic construct
  source 1..30: mol_type = other RNA
gctttcccccaggtgtacatgttcctggtg

SEQ ID NO: 7824 - RNA, 30 nt, synthetic construct
  source 1..30: mol_type = other RNA
gctttcccccaggtttacatgttcttggtg

SEQ ID NO: 7825 - RNA, 30 nt, synthetic construct
  source 1..30: mol_type = other RNA
gctttcccccaggtatacatgttcctggtg

SEQ ID NO: 7826 - RNA, 30 nt, synthetic construct
  source 1..30: mol_type = other RNA
gctttcccccaggtctacatgtttttggtg

SEQ ID NO: 7827 - RNA, 30 nt, synthetic construct
  source 1..30: mol_type = other RNA
gctttcccccaggtttacatgtttctggtg

SEQ ID NO: 7828 - RNA, 30 nt, synthetic construct
  source 1..30: mol_type = other RNA
gctttcccccaggtatacatgttcttagtg

SEQ ID NO: 7829 - RNA, 30 nt, synthetic construct
  source 1..30: mol_type = other RNA
gctttcccccaggtttacatgttcttagtg

SEQ ID NO: 7830 - RNA, 30 nt, synthetic construct
  source 1..30: mol_type = other RNA
gctttcccccaggtttacatgttcctggtg

SEQ ID NO: 7831 - RNA, 30 nt, synthetic construct
  source 1..30: mol_type = other RNA
gctttcccccaggtgtacatgtttttggtg

SEQ ID NO: 7832 - RNA, 30 nt, synthetic construct
  source 1..30: mol_type = other RNA
gctttcccccaggtgtacatgtttttagtg

SEQ ID NO: 7833 - RNA, 30 nt, synthetic construct
  source 1..30: mol_type = other RNA
gctttcccccaggtgtacatgtttctggtg

SEQ ID NO: 7834 - RNA, 30 nt, synthetic construct
  source 1..30: mol_type = other RNA
gctttcccccaggtttacatgtttttggtg

SEQ ID NO: 7835 - RNA, 31 nt, synthetic construct
  source 1..31: mol_type = other RNA
ggctttcccccaggtctacatgttcttagtg

SEQ ID NO: 7836 - RNA, 31 nt, synthetic construct
  source 1..31: mol_type = other RNA
ggctttcccccaggtgtacatgtttttagtg

SEQ ID NO: 7837 - RNA, 31 nt, synthetic construct
  source 1..31: mol_type = other RNA
ggctttcccccaggtatacatgttcttagtg

SEQ ID NO: 7838 - RNA, 31 nt, synthetic construct
  source 1..31: mol_type = other RNA
ggctttcccccaggtatacatgttcttggtg

SEQ ID NO: 7839 - RNA, 31 nt, synthetic construct
  source 1..31: mol_type = other RNA
ggctttcccccaggtatacatgtttctggtg

SEQ ID NO: 7840 - RNA, 31 nt, synthetic construct
  source 1..31: mol_type = other RNA
ggctttcccccaggtatacatgtttttggtg

SEQ ID NO: 7841 - RNA, 31 nt, synthetic construct
  source 1..31: mol_type = other RNA
ggctttcccccaggtctacatgttcctggtg

SEQ ID NO: 7842 - RNA, 31 nt, synthetic construct
  source 1..31: mol_type = other RNA
ggctttcccccaggtctacatgttcttggtg

SEQ ID NO: 7843 - RNA, 31 nt, synthetic construct
  source 1..31: mol_type = other RNA
ggctttcccccaggtctacatgtttctggtg

SEQ ID NO: 7844 - RNA, 31 nt, synthetic construct
  source 1..31: mol_type = other RNA
ggctttcccccaggtctacatgtttttagtg

SEQ ID NO: 7845 - RNA, 31 nt, synthetic construct
  source 1..31: mol_type = other RNA
ggctttcccccaggtctacatgtttttggtg

SEQ ID NO: 7846 - RNA, 31 nt, synthetic construct
  source 1..31: mol_type = other RNA
ggctttcccccaggtgtacatgttcctggtg

SEQ ID NO: 7847 - RNA, 31 nt, synthetic construct
  source 1..31: mol_type = other RNA
ggctttcccccaggtgtacatgttcttagtg

SEQ ID NO: 7848 - RNA, 31 nt, synthetic construct
  source 1..31: mol_type = other RNA
ggctttcccccaggtgtacatgttcttggtg

SEQ ID NO: 7849 - RNA, 31 nt, synthetic construct
  source 1..31: mol_type = other RNA
ggctttcccccaggtgtacatgtttctggtg

SEQ ID NO: 7850 - RNA, 31 nt, synthetic construct
  source 1..31: mol_type = other RNA
ggctttcccccaggtatacatgtttttagtg

SEQ ID NO: 7851 - RNA, 31 nt, synthetic construct
  source 1..31: mol_type = other RNA
ggctttcccccaggtttacatgtttttagtg

SEQ ID NO: 7852 - RNA, 31 nt, synthetic construct
  source 1..31: mol_type = other RNA
ggctttcccccaggtttacatgttcttagtg

SEQ ID NO: 7853 - RNA, 31 nt, synthetic construct
  source 1..31: mol_type = other RNA
ggctttcccccaggtttacatgttcctggtg

SEQ ID NO: 7854 - RNA, 31 nt, synthetic construct
  source 1..31: mol_type = other RNA
ggctttcccccaggtttacatgtttttggtg

SEQ ID NO: 7855 - RNA, 31 nt, synthetic construct
  source 1..31: mol_type = other RNA
ggctttcccccaggtgtacatgtttttggtg

SEQ ID NO: 7856 - RNA, 31 nt, synthetic construct
  source 1..31: mol_type = other RNA
ggctttcccccaggtttacatgttcttggtg

SEQ ID NO: 7857 - RNA, 31 nt, synthetic construct
  source 1..31: mol_type = other RNA
ggctttcccccaggtttacatgtttctggtg

SEQ ID NO: 7858 - RNA, 31 nt, synthetic construct
  source 1..31: mol_type = other RNA
ggctttcccccaggtatacatgttcctggtg

SEQ ID NO: 7859 - RNA, 32 nt, synthetic construct
  source 1..32: mol_type = other RNA
tggctttcccccaggtatacatgtttctggtg

SEQ ID NO: 7860 - RNA, 32 nt, synthetic construct
  source 1..32: mol_type = other RNA
tggctttcccccaggtatacatgttcttggtg

SEQ ID NO: 7861 - RNA, 32 nt, synthetic construct
  source 1..32: mol_type = other RNA
tggctttcccccaggtatacatgttcttagtg

SEQ ID NO: 7862 - RNA, 32 nt, synthetic construct
  source 1..32: mol_type = other RNA
tggctttcccccaggtctacatgtttttagtg

SEQ ID NO: 7863 - RNA, 32 nt, synthetic construct
  source 1..32: mol_type = other RNA
tggctttcccccaggtatacatgtttttagtg

SEQ ID NO: 7864 - RNA, 32 nt, synthetic construct
  source 1..32: mol_type = other RNA
tggctttcccccaggtatacatgtttttggtg

SEQ ID NO: 7865 - RNA, 32 nt, synthetic construct
  source 1..32: mol_type = other RNA
tggctttcccccaggtctacatgttcctggtg

SEQ ID NO: 7866 - RNA, 32 nt, synthetic construct
  source 1..32: mol_type = other RNA
tggctttcccccaggtctacatgttcttggtg

SEQ ID NO: 7867 - RNA, 32 nt, synthetic construct
  source 1..32: mol_type = other RNA
tggctttcccccaggtgtacatgttcttggtg

SEQ ID NO: 7868 - RNA, 32 nt, synthetic construct
  source 1..32: mol_type = other RNA
tggctttcccccaggtatacatgttcctggtg

SEQ ID NO: 7869 - RNA, 32 nt, synthetic construct
  source 1..32: mol_type = other RNA
tggctttcccccaggtttacatgtttttggtg

SEQ ID NO: 7870 - RNA, 32 nt, synthetic construct
  source 1..32: mol_type = other RNA
tggctttcccccaggtttacatgtttttagtg

SEQ ID NO: 7871 - RNA, 32 nt, synthetic construct
  source 1..32: mol_type = other RNA
tggctttcccccaggtttacatgtttctggtg

SEQ ID NO: 7872 - RNA, 32 nt, synthetic construct
  source 1..32: mol_type = other RNA
tggctttcccccaggtttacatgttcttggtg

SEQ ID NO: 7873 - RNA, 32 nt, synthetic construct
  source 1..32: mol_type = other RNA
tggctttcccccaggtttacatgttcttagtg

SEQ ID NO: 7874 - RNA, 32 nt, synthetic construct
  source 1..32: mol_type = other RNA
tggctttcccccaggtttacatgttcctggtg

SEQ ID NO: 7875 - RNA, 32 nt, synthetic construct
  source 1..32: mol_type = other RNA
tggctttcccccaggtgtacatgtttttggtg

SEQ ID NO: 7876 - RNA, 32 nt, synthetic construct
  source 1..32: mol_type = other RNA
tggctttcccccaggtgtacatgtttttagtg

SEQ ID NO: 7877 - RNA, 32 nt, synthetic construct
  source 1..32: mol_type = other RNA
tggctttcccccaggtgtacatgtttctggtg

SEQ ID NO: 7878 - RNA, 32 nt, synthetic construct
  source 1..32: mol_type = other RNA
tggctttcccccaggtctacatgttcttagtg

SEQ ID NO: 7879 - RNA, 32 nt, synthetic construct
  source 1..32: mol_type = other RNA
tggctttcccccaggtgtacatgttcctggtg

SEQ ID NO: 7880 - RNA, 32 nt, synthetic construct
  source 1..32: mol_type = other RNA
tggctttcccccaggtctacatgtttttggtg

SEQ ID NO: 7881 - RNA, 32 nt, synthetic construct
  source 1..32: mol_type = other RNA
tggctttcccccaggtctacatgtttctggtg

SEQ ID NO: 7882 - RNA, 32 nt, synthetic construct
  source 1..32: mol_type = other RNA
tggctttcccccaggtgtacatgttcttagtg

SEQ ID NO: 7883 - RNA, 33 nt, synthetic construct
  source 1..33: mol_type = other RNA
ctggctttcccccaggtctacatgtttctggtg

SEQ ID NO: 7884 - RNA, 33 nt, synthetic construct
  source 1..33: mol_type = other RNA
ctggctttcccccaggtgtacatgttcttagtg

SEQ ID NO: 7885 - RNA, 33 nt, synthetic construct
  source 1..33: mol_type = other RNA
ctggctttcccccaggtctacatgtttttggtg

SEQ ID NO: 7886 - RNA, 33 nt, synthetic construct
  source 1..33: mol_type = other RNA
ctggctttcccccaggtttacatgttcttggtg

SEQ ID NO: 7887 - RNA, 33 nt, synthetic construct
  source 1..33: mol_type = other RNA
ctggctttcccccaggtttacatgtttttggtg

SEQ ID NO: 7888 - RNA, 33 nt, synthetic construct
  source 1..33: mol_type = other RNA
ctggctttcccccaggtttacatgtttttagtg

SEQ ID NO: 7889 - RNA, 33 nt, synthetic construct
  source 1..33: mol_type = other RNA
ctggctttcccccaggtttacatgtttctggtg

SEQ ID NO: 7890 - RNA, 33 nt, synthetic construct
  source 1..33: mol_type = other RNA
ctggctttcccccaggtgtacatgtttttagtg

SEQ ID NO: 7891 - RNA, 33 nt, synthetic construct
  source 1..33: mol_type = other RNA
ctggctttcccccaggtttacatgttcctggtg

SEQ ID NO: 7892 - RNA, 33 nt, synthetic construct
  source 1..33: mol_type = other RNA
ctggctttcccccaggtgtacatgtttttggtg

SEQ ID NO: 7893 - RNA, 33 nt, synthetic construct
  source 1..33: mol_type = other RNA
ctggctttcccccaggtgtacatgtttctggtg

SEQ ID NO: 7894 - RNA, 33 nt, synthetic construct
  source 1..33: mol_type = other RNA
ctggctttcccccaggtgtacatgttcttggtg

SEQ ID NO: 7895 - RNA, 33 nt, synthetic construct
  source 1..33: mol_type = other RNA
ctggctttcccccaggtctacatgttcttggtg

SEQ ID NO: 7896 - RNA, 33 nt, synthetic construct
  source 1..33: mol_type = other RNA
ctggctttcccccaggtctacatgttcttagtg

SEQ ID NO: 7897 - RNA, 33 nt, synthetic construct
  source 1..33: mol_type = other RNA
ctggctttcccccaggtctacatgttcctggtg

SEQ ID NO: 7898 - RNA, 33 nt, synthetic construct
  source 1..33: mol_type = other RNA
ctggctttcccccaggtatacatgtttttggtg

SEQ ID NO: 7899 - RNA, 33 nt, synthetic construct
  source 1..33: mol_type = other RNA
ctggctttcccccaggtatacatgttcctggtg

SEQ ID NO: 7900 - RNA, 33 nt, synthetic construct
  source 1..33: mol_type = other RNA
ctggctttcccccaggtgtacatgttcctggtg

SEQ ID NO: 7901 - RNA, 33 nt, synthetic construct
  source 1..33: mol_type = other RNA
ctggctttcccccaggtctacatgtttttagtg

SEQ ID NO: 7902 - RNA, 33 nt, synthetic construct
  source 1..33: mol_type = other RNA
ctggctttcccccaggtttacatgttcttagtg

SEQ ID NO: 7903 - RNA, 33 nt, synthetic construct
  source 1..33: mol_type = other RNA
ctggctttcccccaggtatacatgttcttagtg

SEQ ID NO: 7904 - RNA, 33 nt, synthetic construct
  source 1..33: mol_type = other RNA
ctggctttcccccaggtatacatgttcttggtg

SEQ ID NO: 7905 - RNA, 33 nt, synthetic construct
  source 1..33: mol_type = other RNA
ctggctttcccccaggtatacatgtttctggtg

SEQ ID NO: 7906 - RNA, 33 nt, synthetic construct
  source 1..33: mol_type = other RNA
ctggctttcccccaggtatacatgtttttagtg

SEQ ID NO: 7907 - RNA, 34 nt, synthetic construct
  source 1..34: mol_type = other RNA
tctggctttcccccaggtttacatgttcttggtg

SEQ ID NO: 7908 - RNA, 34 nt, synthetic construct
  source 1..34: mol_type = other RNA
tctggctttcccccaggtttacatgtttctggtg

SEQ ID NO: 7909 - RNA, 34 nt, synthetic construct
  source 1..34: mol_type = other RNA
tctggctttcccccaggtttacatgtttttagtg

SEQ ID NO: 7910 - RNA, 34 nt, synthetic construct
  source 1..34: mol_type = other RNA
tctggctttcccccaggtttacatgtttttggtg

SEQ ID NO: 7911 - RNA, 34 nt, synthetic construct
  source 1..34: mol_type = other RNA
tctggctttcccccaggtgtacatgttcttagtg

SEQ ID NO: 7912 - RNA, 34 nt, synthetic construct
  source 1..34: mol_type = other RNA
tctggctttcccccaggtctacatgtttctggtg

SEQ ID NO: 7913 - RNA, 34 nt, synthetic construct
  source 1..34: mol_type = other RNA
tctggctttcccccaggtctacatgttcttagtg

SEQ ID NO: 7914 - RNA, 34 nt, synthetic construct
  source 1..34: mol_type = other RNA
tctggctttcccccaggtttacatgttcttagtg

SEQ ID NO: 7915 - RNA, 34 nt, synthetic construct
  source 1..34: mol_type = other RNA
tctggctttcccccaggtctacatgttcctggtg

SEQ ID NO: 7916 - RNA, 34 nt, synthetic construct
  source 1..34: mol_type = other RNA
tctggctttcccccaggtatacatgttcctggtg

SEQ ID NO: 7917 - RNA, 34 nt, synthetic construct
  source 1..34: mol_type = other RNA
tctggctttcccccaggtatacatgtttttagtg

SEQ ID NO: 7918 - RNA, 34 nt, synthetic construct
  source 1..34: mol_type = other RNA
tctggctttcccccaggtatacatgtttctggtg

SEQ ID NO: 7919 - RNA, 34 nt, synthetic construct
  source 1..34: mol_type = other RNA
tctggctttcccccaggtatacatgttcttggtg

SEQ ID NO: 7920 - RNA, 34 nt, synthetic construct
  source 1..34: mol_type = other RNA
tctggctttcccccaggtatacatgttcttagtg

SEQ ID NO: 7921 - RNA, 34 nt, synthetic construct
  source 1..34: mol_type = other RNA
tctggctttcccccaggtctacatgtttttggtg

SEQ ID NO: 7922 - RNA, 34 nt, synthetic construct
  source 1..34: mol_type = other RNA
tctggctttcccccaggtctacatgtttttagtg

SEQ ID NO: 7923 - RNA, 34 nt, synthetic construct
  source 1..34: mol_type = other RNA
tctggctttcccccaggtatacatgtttttggtg

SEQ ID NO: 7924 - RNA, 34 nt, synthetic construct
  source 1..34: mol_type = other RNA
tctggctttcccccaggtgtacatgttcttggtg

SEQ ID NO: 7925 - RNA, 34 nt, synthetic construct
  source 1..34: mol_type = other RNA
tctggctttcccccaggtgtacatgttcctggtg

SEQ ID NO: 7926 - RNA, 34 nt, synthetic construct
  source 1..34: mol_type = other RNA
tctggctttcccccaggtttacatgttcctggtg

SEQ ID NO: 7927 - RNA, 34 nt, synthetic construct
  source 1..34: mol_type = other RNA
tctggctttcccccaggtgtacatgtttttagtg

SEQ ID NO: 7928 - RNA, 34 nt, synthetic construct
  source 1..34: mol_type = other RNA
tctggctttcccccaggtgtacatgtttctggtg

SEQ ID NO: 7929 - RNA, 34 nt, synthetic construct
  source 1..34: mol_type = other RNA
tctggctttcccccaggtctacatgttcttggtg

SEQ ID NO: 7930 - RNA, 34 nt, synthetic construct
  source 1..34: mol_type = other RNA
tctggctttcccccaggtgtacatgtttttggtg

SEQ ID NO: 7931 - RNA, 35 nt, synthetic construct
  source 1..35: mol_type = other RNA
ctctggctttcccccaggtgtacatgttcctggtg

SEQ ID NO: 7932 - RNA, 35 nt, synthetic construct
  source 1..35: mol_type = other RNA
ctctggctttcccccaggtttacatgtttttggtg

SEQ ID NO: 7933 - RNA, 35 nt, synthetic construct
  source 1..35: mol_type = other RNA
ctctggctttcccccaggtttacatgtttttagtg

SEQ ID NO: 7934 - RNA, 35 nt, synthetic construct
  source 1..35: mol_type = other RNA
ctctggctttcccccaggtttacatgtttctggtg

SEQ ID NO: 7935 - RNA, 35 nt, synthetic construct
  source 1..35: mol_type = other RNA
ctctggctttcccccaggtttacatgttcttggtg

SEQ ID NO: 7936 - RNA, 35 nt, synthetic construct
  source 1..35: mol_type = other RNA
ctctggctttcccccaggtttacatgttcttagtg

SEQ ID NO: 7937 - RNA, 35 nt, synthetic construct
  source 1..35: mol_type = other RNA
ctctggctttcccccaggtttacatgttcctggtg

SEQ ID NO: 7938 - RNA, 35 nt, synthetic construct
  source 1..35: mol_type = other RNA
ctctggctttcccccaggtgtacatgtttttagtg

SEQ ID NO: 7939 - RNA, 35 nt, synthetic construct
  source 1..35: mol_type = other RNA
ctctggctttcccccaggtgtacatgtttctggtg

SEQ ID NO: 7940 - RNA, 35 nt, synthetic construct
  source 1..35: mol_type = other RNA
ctctggctttcccccaggtgtacatgttcttggtg

SEQ ID NO: 7941 - RNA, 35 nt, synthetic construct
  source 1..35: mol_type = other RNA
ctctggctttcccccaggtgtacatgttcttagtg

SEQ ID NO: 7942 - RNA, 35 nt, synthetic construct
  source 1..35: mol_type = other RNA
ctctggctttcccccaggtctacatgtttttggtg

SEQ ID NO: 7943 - RNA, 35 nt, synthetic construct
  source 1..35: mol_type = other RNA
ctctggctttcccccaggtctacatgtttttagtg

SEQ ID NO: 7944 - RNA, 35 nt, synthetic construct
  source 1..35: mol_type = other RNA
ctctggctttcccccaggtatacatgttcttagtg

SEQ ID NO: 7945 - RNA, 35 nt, synthetic construct
  source 1..35: mol_type = other RNA
ctctggctttcccccaggtatacatgttcttggtg

SEQ ID NO: 7946 - RNA, 35 nt, synthetic construct
  source 1..35: mol_type = other RNA
ctctggctttcccccaggtatacatgttcctggtg

SEQ ID NO: 7947 - RNA, 35 nt, synthetic construct
  source 1..35: mol_type = other RNA
ctctggctttcccccaggtatacatgtttttggtg

SEQ ID NO: 7948 - RNA, 35 nt, synthetic construct
  source 1..35: mol_type = other RNA
ctctggctttcccccaggtctacatgttcctggtg

SEQ ID NO: 7949 - RNA, 35 nt, synthetic construct
  source 1..35: mol_type = other RNA
ctctggctttcccccaggtctacatgttcttagtg

SEQ ID NO: 7950 - RNA, 35 nt, synthetic construct
  source 1..35: mol_type = other RNA
ctctggctttcccccaggtctacatgttcttggtg

SEQ ID NO: 7951 - RNA, 35 nt, synthetic construct
  source 1..35: mol_type = other RNA
ctctggctttcccccaggtatacatgtttttagtg

SEQ ID NO: 7952 - RNA, 35 nt, synthetic construct
  source 1..35: mol_type = other RNA
ctctggctttcccccaggtatacatgtttctggtg

SEQ ID NO: 7953 - RNA, 35 nt, synthetic construct
  source 1..35: mol_type = other RNA
ctctggctttcccccaggtctacatgtttctggtg

SEQ ID NO: 7954 - RNA, 35 nt, synthetic construct
  source 1..35: mol_type = other RNA
ctctggctttcccccaggtgtacatgtttttggtg

SEQ ID NO: 7955 - RNA, 36 nt, synthetic construct
  source 1..36: mol_type = other RNA
actctggctttcccccaggtgtacatgttcctggtg

SEQ ID NO: 7956 - RNA, 36 nt, synthetic construct
  source 1..36: mol_type = other RNA
actctggctttcccccaggtctacatgttcttagtg

SEQ ID NO: 7957 - RNA, 36 nt, synthetic construct
  source 1..36: mol_type = other RNA
actctggctttcccccaggtatacatgtttctggtg

SEQ ID NO: 7958 - RNA, 36 nt, synthetic construct
  source 1..36: mol_type = other RNA
actctggctttcccccaggtctacatgtttctggtg

SEQ ID NO: 7959 - RNA, 36 nt, synthetic construct
  source 1..36: mol_type = other RNA
actctggctttcccccaggtctacatgtttttggtg

SEQ ID NO: 7960 - RNA, 36 nt, synthetic construct
  source 1..36: mol_type = other RNA
actctggctttcccccaggtctacatgtttttagtg

SEQ ID NO: 7961 - RNA, 36 nt, synthetic construct
  source 1..36: mol_type = other RNA
actctggctttcccccaggtgtacatgttcttggtg

SEQ ID NO: 7962 - RNA, 36 nt, synthetic construct
  source 1..36: mol_type = other RNA
actctggctttcccccaggtgtacatgtttctggtg

SEQ ID NO: 7963 - RNA, 36 nt, synthetic construct
  source 1..36: mol_type = other RNA
actctggctttcccccaggtgtacatgtttttagtg

SEQ ID NO: 7964 - RNA, 36 nt, synthetic construct
  source 1..36: mol_type = other RNA
actctggctttcccccaggtatacatgtttttggtg

SEQ ID NO: 7965 - RNA, 36 nt, synthetic construct
  source 1..36: mol_type = other RNA
actctggctttcccccaggtctacatgttcctggtg

SEQ ID NO: 7966 - RNA, 36 nt, synthetic construct
  source 1..36: mol_type = other RNA
actctggctttcccccaggtgtacatgttcttagtg

SEQ ID NO: 7967 - RNA, 36 nt, synthetic construct
  source 1..36: mol_type = other RNA
actctggctttcccccaggtatacatgtttttagtg

SEQ ID NO: 7968 - RNA, 36 nt, synthetic construct
  source 1..36: mol_type = other RNA
actctggctttcccccaggtttacatgttcttggtg

SEQ ID NO: 7969 - RNA, 36 nt, synthetic construct
  source 1..36: mol_type = other RNA
actctggctttcccccaggtatacatgttcttggtg

SEQ ID NO: 7970 - RNA, 36 nt, synthetic construct
  source 1..36: mol_type = other RNA
actctggctttcccccaggtttacatgtttttggtg

SEQ ID NO: 7971 - RNA, 36 nt, synthetic construct
  source 1..36: mol_type = other RNA
actctggctttcccccaggtttacatgtttttagtg

SEQ ID NO: 7972 - RNA, 36 nt, synthetic construct
  source 1..36: mol_type = other RNA
actctggctttcccccaggtttacatgtttctggtg

SEQ ID NO: 7973 - RNA, 36 nt, synthetic construct
  source 1..36: mol_type = other RNA
actctggctttcccccaggtttacatgttcctggtg

SEQ ID NO: 7974 - RNA, 36 nt, synthetic construct
  source 1..36: mol_type = other RNA
actctggctttcccccaggtgtacatgtttttggtg

SEQ ID NO: 7975 - RNA, 36 nt, synthetic construct
  source 1..36: mol_type = other RNA
actctggctttcccccaggtatacatgttcctggtg

SEQ ID NO: 7976 - RNA, 36 nt, synthetic construct
  source 1..36: mol_type = other RNA
actctggctttcccccaggtatacatgttcttagtg

SEQ ID NO: 7977 - RNA, 36 nt, synthetic construct
  source 1..36: mol_type = other RNA
actctggctttcccccaggtctacatgttcttggtg

SEQ ID NO: 7978 - RNA, 36 nt, synthetic construct
  source 1..36: mol_type = other RNA
actctggctttcccccaggtttacatgttcttagtg

SEQ ID NO: 7979 - RNA, 37 nt, synthetic construct
  source 1..37: mol_type = other RNA
gactctggctttcccccaggtgtacatgttcttagtg

SEQ ID NO: 7980 - RNA, 37 nt, synthetic construct
  source 1..37: mol_type = other RNA
gactctggctttcccccaggtgtacatgttcttggtg

SEQ ID NO: 7981 - RNA, 37 nt, synthetic construct
  source 1..37: mol_type = other RNA
gactctggctttcccccaggtgtacatgtttctggtg

SEQ ID NO: 7982 - RNA, 37 nt, synthetic construct
  source 1..37: mol_type = other RNA
gactctggctttcccccaggtgtacatgtttttagtg

SEQ ID NO: 7983 - RNA, 37 nt, synthetic construct
  source 1..37: mol_type = other RNA
gactctggctttcccccaggtttacatgttcttggtg

SEQ ID NO: 7984 - RNA, 37 nt, synthetic construct
  source 1..37: mol_type = other RNA
gactctggctttcccccaggtttacatgtttttagtg

SEQ ID NO: 7985 - RNA, 37 nt, synthetic construct
  source 1..37: mol_type = other RNA
gactctggctttcccccaggtttacatgtttttggtg

SEQ ID NO: 7986 - RNA, 37 nt, synthetic construct
  source 1..37: mol_type = other RNA
gactctggctttcccccaggtttacatgttcttagtg

SEQ ID NO: 7987 - RNA, 37 nt, synthetic construct
  source 1..37: mol_type = other RNA
gactctggctttcccccaggtttacatgttcctggtg

SEQ ID NO: 7988 - RNA, 37 nt, synthetic construct
  source 1..37: mol_type = other RNA
gactctggctttcccccaggtgtacatgttcctggtg

SEQ ID NO: 7989 - RNA, 37 nt, synthetic construct
  source 1..37: mol_type = other RNA
gactctggctttcccccaggtctacatgtttttggtg

SEQ ID NO: 7990 - RNA, 37 nt, synthetic construct
  source 1..37: mol_type = other RNA
gactctggctttcccccaggtttacatgtttctggtg

SEQ ID NO: 7991 - RNA, 37 nt, synthetic construct
  source 1..37: mol_type = other RNA
gactctggctttcccccaggtatacatgttcctggtg

SEQ ID NO: 7992 - RNA, 37 nt, synthetic construct
  source 1..37: mol_type = other RNA
gactctggctttcccccaggtatacatgttcttagtg

SEQ ID NO: 7993 - RNA, 37 nt, synthetic construct
  source 1..37: mol_type = other RNA
gactctggctttcccccaggtctacatgtttctggtg

SEQ ID NO: 7994 - RNA, 37 nt, synthetic construct
  source 1..37: mol_type = other RNA
gactctggctttcccccaggtctacatgtttttagtg

SEQ ID NO: 7995 - RNA, 37 nt, synthetic construct
  source 1..37: mol_type = other RNA
gactctggctttcccccaggtctacatgttcttggtg

SEQ ID NO: 7996 - RNA, 37 nt, synthetic construct
  source 1..37: mol_type = other RNA
gactctggctttcccccaggtatacatgtttttagtg

SEQ ID NO: 7997 - RNA, 37 nt, synthetic construct
  source 1..37: mol_type = other RNA
gactctggctttcccccaggtctacatgttcttagtg

SEQ ID NO: 7998 - RNA, 37 nt, synthetic construct
  source 1..37: mol_type = other RNA
gactctggctttcccccaggtctacatgttcctggtg

SEQ ID NO: 7999 - RNA, 37 nt, synthetic construct
  source 1..37: mol_type = other RNA
gactctggctttcccccaggtatacatgtttttggtg

SEQ ID NO: 8000 - RNA, 37 nt, synthetic construct
  source 1..37: mol_type = other RNA
gactctggctttcccccaggtgtacatgtttttggtg

SEQ ID NO: 8001 - RNA, 37 nt, synthetic construct
  source 1..37: mol_type = other RNA
gactctggctttcccccaggtatacatgtttctggtg

SEQ ID NO: 8002 - RNA, 37 nt, synthetic construct
  source 1..37: mol_type = other RNA
gactctggctttcccccaggtatacatgttcttggtg

SEQ ID NO: 8003 - RNA, 38 nt, synthetic construct
  source 1..38: mol_type = other RNA
cgactctggctttcccccaggtatacatgtttctggtg

SEQ ID NO: 8004 - RNA, 38 nt, synthetic construct
  source 1..38: mol_type = other RNA
cgactctggctttcccccaggtctacatgtttttagtg

SEQ ID NO: 8005 - RNA, 38 nt, synthetic construct
  source 1..38: mol_type = other RNA
cgactctggctttcccccaggtgtacatgtttttggtg

SEQ ID NO: 8006 - RNA, 38 nt, synthetic construct
  source 1..38: mol_type = other RNA
cgactctggctttcccccaggtttacatgttcctggtg

SEQ ID NO: 8007 - RNA, 38 nt, synthetic construct
  source 1..38: mol_type = other RNA
cgactctggctttcccccaggtgtacatgtttttagtg

SEQ ID NO: 8008 - RNA, 38 nt, synthetic construct
  source 1..38: mol_type = other RNA
cgactctggctttcccccaggtatacatgtttttagtg

SEQ ID NO: 8009 - RNA, 38 nt, synthetic construct
  source 1..38: mol_type = other RNA
cgactctggctttcccccaggtctacatgttcctggtg

SEQ ID NO: 8010 - RNA, 38 nt, synthetic construct
  source 1..38: mol_type = other RNA
cgactctggctttcccccaggtctacatgttcttagtg

SEQ ID NO: 8011 - RNA, 38 nt, synthetic construct
  source 1..38: mol_type = other RNA
cgactctggctttcccccaggtctacatgttcttggtg

SEQ ID NO: 8012 - RNA, 38 nt, synthetic construct
  source 1..38: mol_type = other RNA
cgactctggctttcccccaggtctacatgtttctggtg

SEQ ID NO: 8013 - RNA, 38 nt, synthetic construct
  source 1..38: mol_type = other RNA
cgactctggctttcccccaggtctacatgtttttggtg

SEQ ID NO: 8014 - RNA, 38 nt, synthetic construct
  source 1..38: mol_type = other RNA
cgactctggctttcccccaggtgtacatgttcctggtg

SEQ ID NO: 8015 - RNA, 38 nt, synthetic construct
  source 1..38: mol_type = other RNA
cgactctggctttcccccaggtatacatgttcctggtg

SEQ ID NO: 8016 - RNA, 38 nt, synthetic construct
  source 1..38: mol_type = other RNA
cgactctggctttcccccaggtgtacatgttcttagtg

SEQ ID NO: 8017 - RNA, 38 nt, synthetic construct
  source 1..38: mol_type = other RNA
cgactctggctttcccccaggtttacatgttcttagtg

SEQ ID NO: 8018 - RNA, 38 nt, synthetic construct
  source 1..38: mol_type = other RNA
cgactctggctttcccccaggtgtacatgtttctggtg

SEQ ID NO: 8019 - RNA, 38 nt, synthetic construct
  source 1..38: mol_type = other RNA
cgactctggctttcccccaggtatacatgttcttagtg

SEQ ID NO: 8020 - RNA, 38 nt, synthetic construct
  source 1..38: mol_type = other RNA
cgactctggctttcccccaggtgtacatgttcttggtg

SEQ ID NO: 8021 - RNA, 38 nt, synthetic construct
  source 1..38: mol_type = other RNA
cgactctggctttcccccaggtttacatgtttctggtg

SEQ ID NO: 8022 - RNA, 38 nt, synthetic construct
  source 1..38: mol_type = other RNA
cgactctggctttcccccaggtttacatgtttttggtg

SEQ ID NO: 8023 - RNA, 38 nt, synthetic construct
  source 1..38: mol_type = other RNA
cgactctggctttcccccaggtttacatgttcttggtg

SEQ ID NO: 8024 - RNA, 38 nt, synthetic construct
  source 1..38: mol_type = other RNA
cgactctggctttcccccaggtatacatgttcttggtg

SEQ ID NO: 8025 - RNA, 38 nt, synthetic construct
  source 1..38: mol_type = other RNA
cgactctggctttcccccaggtttacatgtttttagtg

SEQ ID NO: 8026 - RNA, 38 nt, synthetic construct
  source 1..38: mol_type = other RNA
cgactctggctttcccccaggtatacatgtttttggtg

SEQ ID NO: 8027 - RNA, 39 nt, synthetic construct
  source 1..39: mol_type = other RNA
ccgactctggctttcccccaggtgtacatgttcttagtg

SEQ ID NO: 8028 - RNA, 39 nt, synthetic construct
  source 1..39: mol_type = other RNA
ccgactctggctttcccccaggtgtacatgttcctggtg

SEQ ID NO: 8029 - RNA, 39 nt, synthetic construct
  source 1..39: mol_type = other RNA
ccgactctggctttcccccaggtctacatgttcttggtg

SEQ ID NO: 8030 - RNA, 39 nt, synthetic construct
  source 1..39: mol_type = other RNA
ccgactctggctttcccccaggtatacatgttcttagtg

SEQ ID NO: 8031 - RNA, 39 nt, synthetic construct
  source 1..39: mol_type = other RNA
ccgactctggctttcccccaggtctacatgtttttggtg

SEQ ID NO: 8032 - RNA, 39 nt, synthetic construct
  source 1..39: mol_type = other RNA
ccgactctggctttcccccaggtgtacatgtttttggtg

SEQ ID NO: 8033 - RNA, 39 nt, synthetic construct
  source 1..39: mol_type = other RNA
ccgactctggctttcccccaggtgtacatgttcttggtg

SEQ ID NO: 8034 - RNA, 39 nt, synthetic construct
  source 1..39: mol_type = other RNA
ccgactctggctttcccccaggtttacatgtttttggtg

SEQ ID NO: 8035 - RNA, 39 nt, synthetic construct
  source 1..39: mol_type = other RNA
ccgactctggctttcccccaggtttacatgtttttagtg

SEQ ID NO: 8036 - RNA, 39 nt, synthetic construct
  source 1..39: mol_type = other RNA
ccgactctggctttcccccaggtatacatgttcctggtg

SEQ ID NO: 8037 - RNA, 39 nt, synthetic construct
  source 1..39: mol_type = other RNA
ccgactctggctttcccccaggtttacatgtttctggtg

SEQ ID NO: 8038 - RNA, 39 nt, synthetic construct
  source 1..39: mol_type = other RNA
ccgactctggctttcccccaggtttacatgttcttggtg

SEQ ID NO: 8039 - RNA, 39 nt, synthetic construct
  source 1..39: mol_type = other RNA
ccgactctggctttcccccaggtttacatgttcttagtg

SEQ ID NO: 8040 - RNA, 39 nt, synthetic construct
  source 1..39: mol_type = other RNA
ccgactctggctttcccccaggtttacatgttcctggtg

SEQ ID NO: 8041 - RNA, 39 nt, synthetic construct
  source 1..39: mol_type = other RNA
ccgactctggctttcccccaggtgtacatgtttttagtg

SEQ ID NO: 8042 - RNA, 39 nt, synthetic construct
  source 1..39: mol_type = other RNA
ccgactctggctttcccccaggtgtacatgtttctggtg

SEQ ID NO: 8043 - RNA, 39 nt, synthetic construct
  source 1..39: mol_type = other RNA
ccgactctggctttcccccaggtatacatgttcttggtg

SEQ ID NO: 8044 - RNA, 39 nt, synthetic construct
  source 1..39: mol_type = other RNA
ccgactctggctttcccccaggtatacatgtttctggtg

SEQ ID NO: 8045 - RNA, 39 nt, synthetic construct
  source 1..39: mol_type = other RNA
ccgactctggctttcccccaggtatacatgtttttagtg

SEQ ID NO: 8046 - RNA, 39 nt, synthetic construct
  source 1..39: mol_type = other RNA
ccgactctggctttcccccaggtatacatgtttttggtg

SEQ ID NO: 8047 - RNA, 39 nt, synthetic construct
  source 1..39: mol_type = other RNA
ccgactctggctttcccccaggtctacatgttcctggtg

SEQ ID NO: 8048 - RNA, 39 nt, synthetic construct
  source 1..39: mol_type = other RNA
ccgactctggctttcccccaggtctacatgttcttagtg

SEQ ID NO: 8049 - RNA, 39 nt, synthetic construct
  source 1..39: mol_type = other RNA
ccgactctggctttcccccaggtctacatgtttctggtg

SEQ ID NO: 8050 - RNA, 39 nt, synthetic construct
  source 1..39: mol_type = other RNA
ccgactctggctttcccccaggtctacatgtttttagtg

SEQ ID NO: 8051 - RNA, 40 nt, synthetic construct
  source 1..40: mol_type = other RNA
cccgactctggctttcccccaggtatacatgttcttggtg

SEQ ID NO: 8052 - RNA, 40 nt, synthetic construct
  source 1..40: mol_type = other RNA
cccgactctggctttcccccaggtttacatgttcctggtg

SEQ ID NO: 8053 - RNA, 40 nt, synthetic construct
  source 1..40: mol_type = other RNA
cccgactctggctttcccccaggtgtacatgttcttggtg

SEQ ID NO: 8054 - RNA, 40 nt, synthetic construct
  source 1..40: mol_type = other RNA
cccgactctggctttcccccaggtatacatgttcctggtg

SEQ ID NO: 8055 - RNA, 40 nt, synthetic construct
  source 1..40: mol_type = other RNA
cccgactctggctttcccccaggtgtacatgtttctggtg

SEQ ID NO: 8056 - RNA, 40 nt, synthetic construct
  source 1..40: mol_type = other RNA
cccgactctggctttcccccaggtgtacatgttcttagtg

SEQ ID NO: 8057 - RNA, 40 nt, synthetic construct
  source 1..40: mol_type = other RNA
cccgactctggctttcccccaggtatacatgttcttagtg

SEQ ID NO: 8058 - RNA, 40 nt, synthetic construct
  source 1..40: mol_type = other RNA
cccgactctggctttcccccaggtatacatgtttctggtg

SEQ ID NO: 8059 - RNA, 40 nt, synthetic construct
  source 1..40: mol_type = other RNA
cccgactctggctttcccccaggtatacatgtttttagtg

SEQ ID NO: 8060 - RNA, 40 nt, synthetic construct
  source 1..40: mol_type = other RNA
cccgactctggctttcccccaggtatacatgtttttggtg

SEQ ID NO: 8061 - RNA, 40 nt, synthetic construct
  source 1..40: mol_type = other RNA
cccgactctggctttcccccaggtctacatgttcttagtg

SEQ ID NO: 8062 - RNA, 40 nt, synthetic construct
  source 1..40: mol_type = other RNA
cccgactctggctttcccccaggtctacatgttcttggtg

SEQ ID NO: 8063 - RNA, 40 nt, synthetic construct
  source 1..40: mol_type = other RNA
cccgactctggctttcccccaggtctacatgtttctggtg

SEQ ID NO: 8064 - RNA, 40 nt, synthetic construct
  source 1..40: mol_type = other RNA
cccgactctggctttcccccaggtctacatgtttttggtg

SEQ ID NO: 8065 - RNA, 40 nt, synthetic construct
  source 1..40: mol_type = other RNA
cccgactctggctttcccccaggtctacatgtttttagtg

SEQ ID NO: 8066 - RNA, 40 nt, synthetic construct
  source 1..40: mol_type = other RNA
cccgactctggctttcccccaggtttacatgtttttggtg

SEQ ID NO: 8067 - RNA, 40 nt, synthetic construct
  source 1..40: mol_type = other RNA
cccgactctggctttcccccaggtttacatgtttttagtg

SEQ ID NO: 8068 - RNA, 40 nt, synthetic construct
  source 1..40: mol_type = other RNA
cccgactctggctttcccccaggtttacatgtttctggtg

SEQ ID NO: 8069 - RNA, 40 nt, synthetic construct
  source 1..40: mol_type = other RNA
cccgactctggctttcccccaggtttacatgttcttggtg

SEQ ID NO: 8070 - RNA, 40 nt, synthetic construct
  source 1..40: mol_type = other RNA
cccgactctggctttcccccaggtttacatgttcttagtg

SEQ ID NO: 8071 - RNA, 40 nt, synthetic construct
  source 1..40: mol_type = other RNA
cccgactctggctttcccccaggtgtacatgttcctggtg

SEQ ID NO: 8072 - RNA, 40 nt, synthetic construct
  source 1..40: mol_type = other RNA
cccgactctggctttcccccaggtgtacatgtttttggtg

SEQ ID NO: 8073 - RNA, 40 nt, synthetic construct
  source 1..40: mol_type = other RNA
cccgactctggctttcccccaggtgtacatgtttttagtg

SEQ ID NO: 8074 - RNA, 40 nt, synthetic construct
  source 1..40: mol_type = other RNA
cccgactctggctttcccccaggtctacatgttcctggtg

SEQ ID NO: 8075 - RNA, 41 nt, synthetic construct
  source 1..41: mol_type = other RNA
ccccgactctggctttcccccaggtctacatgtttttagtg

SEQ ID NO: 8076 - RNA, 41 nt, synthetic construct
  source 1..41: mol_type = other RNA
ccccgactctggctttcccccaggtgtacatgtttctggtg

SEQ ID NO: 8077 - RNA, 41 nt, synthetic construct
  source 1..41: mol_type = other RNA
ccccgactctggctttcccccaggtgtacatgttcctggtg

SEQ ID NO: 8078 - RNA, 41 nt, synthetic construct
  source 1..41: mol_type = other RNA
ccccgactctggctttcccccaggtgtacatgtttttggtg

SEQ ID NO: 8079 - RNA, 41 nt, synthetic construct
  source 1..41: mol_type = other RNA
ccccgactctggctttcccccaggtttacatgtttttggtg

SEQ ID NO: 8080 - RNA, 41 nt, synthetic construct
  source 1..41: mol_type = other RNA
ccccgactctggctttcccccaggtttacatgtttttagtg

SEQ ID NO: 8081 - RNA, 41 nt, synthetic construct
  source 1..41: mol_type = other RNA
ccccgactctggctttcccccaggtttacatgtttctggtg

SEQ ID NO: 8082 - RNA, 41 nt, synthetic construct
  source 1..41: mol_type = other RNA
ccccgactctggctttcccccaggtttacatgttcttggtg

SEQ ID NO: 8083 - RNA, 41 nt, synthetic construct
  source 1..41: mol_type = other RNA
ccccgactctggctttcccccaggtttacatgttcttagtg

SEQ ID NO: 8084 - RNA, 41 nt, synthetic construct
  source 1..41: mol_type = other RNA
ccccgactctggctttcccccaggtttacatgttcctggtg

SEQ ID NO: 8085 - RNA, 41 nt, synthetic construct
  source 1..41: mol_type = other RNA
ccccgactctggctttcccccaggtgtacatgtttttagtg

SEQ ID NO: 8086 - RNA, 41 nt, synthetic construct
  source 1..41: mol_type = other RNA
ccccgactctggctttcccccaggtctacatgtttttggtg

SEQ ID NO: 8087 - RNA, 41 nt, synthetic construct
  source 1..41: mol_type = other RNA
ccccgactctggctttcccccaggtatacatgttcttagtg

SEQ ID NO: 8088 - RNA, 41 nt, synthetic construct
  source 1..41: mol_type = other RNA
ccccgactctggctttcccccaggtgtacatgttcttagtg

SEQ ID NO: 8089 - RNA, 41 nt, synthetic construct
  source 1..41: mol_type = other RNA
ccccgactctggctttcccccaggtctacatgtttctggtg

SEQ ID NO: 8090 - RNA, 41 nt, synthetic construct
  source 1..41: mol_type = other RNA
ccccgactctggctttcccccaggtctacatgttcttggtg

SEQ ID NO: 8091 - RNA, 41 nt, synthetic construct
  source 1..41: mol_type = other RNA
ccccgactctggctttcccccaggtctacatgttcttagtg

SEQ ID NO: 8092 - RNA, 41 nt, synthetic construct
  source 1..41: mol_type = other RNA
ccccgactctggctttcccccaggtctacatgttcctggtg

SEQ ID NO: 8093 - RNA, 41 nt, synthetic construct
  source 1..41: mol_type = other RNA
ccccgactctggctttcccccaggtatacatgtttttggtg

SEQ ID NO: 8094 - RNA, 41 nt, synthetic construct
  source 1..41: mol_type = other RNA
ccccgactctggctttcccccaggtatacatgtttttagtg

SEQ ID NO: 8095 - RNA, 41 nt, synthetic construct
  source 1..41: mol_type = other RNA
ccccgactctggctttcccccaggtatacatgtttctggtg

SEQ ID NO: 8096 - RNA, 41 nt, synthetic construct
  source 1..41: mol_type = other RNA
ccccgactctggctttcccccaggtatacatgttcttggtg

SEQ ID NO: 8097 - RNA, 41 nt, synthetic construct
  source 1..41: mol_type = other RNA
ccccgactctggctttcccccaggtatacatgttcctggtg

SEQ ID NO: 8098 - RNA, 41 nt, synthetic construct
  source 1..41: mol_type = other RNA
ccccgactctggctttcccccaggtgtacatgttcttggtg

SEQ ID NO: 8099 - RNA, 42 nt, synthetic construct
  source 1..42: mol_type = other RNA
cccccgactctggctttcccccaggtttacatgtttttagtg

SEQ ID NO: 8100 - RNA, 42 nt, synthetic construct
  source 1..42: mol_type = other RNA
cccccgactctggctttcccccaggtttacatgtttttggtg

SEQ ID NO: 8101 - RNA, 42 nt, synthetic construct
  source 1..42: mol_type = other RNA
cccccgactctggctttcccccaggtgtacatgttcctggtg

SEQ ID NO: 8102 - RNA, 42 nt, synthetic construct
  source 1..42: mol_type = other RNA
cccccgactctggctttcccccaggtctacatgtttttggtg

SEQ ID NO: 8103 - RNA, 42 nt, synthetic construct
  source 1..42: mol_type = other RNA
cccccgactctggctttcccccaggtatacatgtttttggtg

SEQ ID NO: 8104 - RNA, 42 nt, synthetic construct
  source 1..42: mol_type = other RNA
cccccgactctggctttcccccaggtgtacatgtttctggtg

SEQ ID NO: 8105 - RNA, 42 nt, synthetic construct
  source 1..42: mol_type = other RNA
cccccgactctggctttcccccaggtctacatgtttctggtg

SEQ ID NO: 8106 - RNA, 42 nt, synthetic construct
  source 1..42: mol_type = other RNA
cccccgactctggctttcccccaggtctacatgtttttagtg

SEQ ID NO: 8107 - RNA, 42 nt, synthetic construct
  source 1..42: mol_type = other RNA
cccccgactctggctttcccccaggtatacatgttcttggtg

SEQ ID NO: 8108 - RNA, 42 nt, synthetic construct
  source 1..42: mol_type = other RNA
cccccgactctggctttcccccaggtatacatgtttctggtg

SEQ ID NO: 8109 - RNA, 42 nt, synthetic construct
  source 1..42: mol_type = other RNA
cccccgactctggctttcccccaggtatacatgtttttagtg

SEQ ID NO: 8110 - RNA, 42 nt, synthetic construct
  source 1..42: mol_type = other RNA
cccccgactctggctttcccccaggtatacatgttcctggtg

SEQ ID NO: 8111 - RNA, 42 nt, synthetic construct
  source 1..42: mol_type = other RNA
cccccgactctggctttcccccaggtctacatgttcctggtg

SEQ ID NO: 8112 - RNA, 42 nt, synthetic construct
  source 1..42: mol_type = other RNA
cccccgactctggctttcccccaggtctacatgttcttagtg

SEQ ID NO: 8113 - RNA, 42 nt, synthetic construct
  source 1..42: mol_type = other RNA
cccccgactctggctttcccccaggtgtacatgtttttggtg

SEQ ID NO: 8114 - RNA, 42 nt, synthetic construct
  source 1..42: mol_type = other RNA
cccccgactctggctttcccccaggtctacatgttcttggtg

SEQ ID NO: 8115 - RNA, 42 nt, synthetic construct
  source 1..42: mol_type = other RNA
cccccgactctggctttcccccaggtttacatgtttctggtg

SEQ ID NO: 8116 - RNA, 42 nt, synthetic construct
  source 1..42: mol_type = other RNA
cccccgactctggctttcccccaggtttacatgttcttggtg

SEQ ID NO: 8117 - RNA, 42 nt, synthetic construct
  source 1..42: mol_type = other RNA
cccccgactctggctttcccccaggtgtacatgtttttagtg

SEQ ID NO: 8118 - RNA, 42 nt, synthetic construct
  source 1..42: mol_type = other RNA
cccccgactctggctttcccccaggtatacatgttcttagtg

SEQ ID NO: 8119 - RNA, 42 nt, synthetic construct
  source 1..42: mol_type = other RNA
cccccgactctggctttcccccaggtgtacatgttcttagtg

SEQ ID NO: 8120 - RNA, 42 nt, synthetic construct
  source 1..42: mol_type = other RNA
cccccgactctggctttcccccaggtgtacatgttcttggtg

SEQ ID NO: 8121 - RNA, 42 nt, synthetic construct
  source 1..42: mol_type = other RNA
cccccgactctggctttcccccaggtttacatgttcctggtg

SEQ ID NO: 8122 - RNA, 42 nt, synthetic construct
  source 1..42: mol_type = other RNA
cccccgactctggctttcccccaggtttacatgttcttagtg

SEQ ID NO: 8123 - RNA, 43 nt, synthetic construct
  source 1..43: mol_type = other RNA
tcccccgactctggctttcccccaggtttacatgtttttagtg

SEQ ID NO: 8124 - RNA, 43 nt, synthetic construct
  source 1..43: mol_type = other RNA
tcccccgactctggctttcccccaggtttacatgtttttggtg

SEQ ID NO: 8125 - RNA, 43 nt, synthetic construct
  source 1..43: mol_type = other RNA
tcccccgactctggctttcccccaggtttacatgtttctggtg

SEQ ID NO: 8126 - RNA, 43 nt, synthetic construct
  source 1..43: mol_type = other RNA
tcccccgactctggctttcccccaggtttacatgttcttggtg

SEQ ID NO: 8127 - RNA, 43 nt, synthetic construct
  source 1..43: mol_type = other RNA
tcccccgactctggctttcccccaggtttacatgttcttagtg

SEQ ID NO: 8128 - RNA, 43 nt, synthetic construct
  source 1..43: mol_type = other RNA
tcccccgactctggctttcccccaggtttacatgttcctggtg

SEQ ID NO: 8129 - RNA, 43 nt, synthetic construct
  source 1..43: mol_type = other RNA
tcccccgactctggctttcccccaggtgtacatgtttttggtg

SEQ ID NO: 8130 - RNA, 43 nt, synthetic construct
  source 1..43: mol_type = other RNA
tcccccgactctggctttcccccaggtgtacatgtttctggtg

SEQ ID NO: 8131 - RNA, 43 nt, synthetic construct
  source 1..43: mol_type = other RNA
tcccccgactctggctttcccccaggtgtacatgttcttggtg

SEQ ID NO: 8132 - RNA, 43 nt, synthetic construct
  source 1..43: mol_type = other RNA
tcccccgactctggctttcccccaggtgtacatgttcttagtg

SEQ ID NO: 8133 - RNA, 43 nt, synthetic construct
  source 1..43: mol_type = other RNA
tcccccgactctggctttcccccaggtctacatgtttttagtg

SEQ ID NO: 8134 - RNA, 43 nt, synthetic construct
  source 1..43: mol_type = other RNA
tcccccgactctggctttcccccaggtctacatgtttctggtg

SEQ ID NO: 8135 - RNA, 43 nt, synthetic construct
  source 1..43: mol_type = other RNA
tcccccgactctggctttcccccaggtctacatgtttttggtg

SEQ ID NO: 8136 - RNA, 43 nt, synthetic construct
  source 1..43: mol_type = other RNA
tcccccgactctggctttcccccaggtatacatgttcttagtg

SEQ ID NO: 8137 - RNA, 43 nt, synthetic construct
  source 1..43: mol_type = other RNA
tcccccgactctggctttcccccaggtatacatgttcttggtg

SEQ ID NO: 8138 - RNA, 43 nt, synthetic construct
  source 1..43: mol_type = other RNA
tcccccgactctggctttcccccaggtatacatgttcctggtg

SEQ ID NO: 8139 - RNA, 43 nt, synthetic construct
  source 1..43: mol_type = other RNA
tcccccgactctggctttcccccaggtatacatgtttttggtg

SEQ ID NO: 8140 - RNA, 43 nt, synthetic construct
  source 1..43: mol_type = other RNA
tcccccgactctggctttcccccaggtctacatgttcctggtg

SEQ ID NO: 8141 - RNA, 43 nt, synthetic construct
  source 1..43: mol_type = other RNA
tcccccgactctggctttcccccaggtctacatgttcttagtg

SEQ ID NO: 8142 - RNA, 43 nt, synthetic construct
  source 1..43: mol_type = other RNA
tcccccgactctggctttcccccaggtctacatgttcttggtg

SEQ ID NO: 8143 - RNA, 43 nt, synthetic construct
  source 1..43: mol_type = other RNA
tcccccgactctggctttcccccaggtatacatgtttttagtg

SEQ ID NO: 8144 - RNA, 43 nt, synthetic construct
  source 1..43: mol_type = other RNA
tcccccgactctggctttcccccaggtatacatgtttctggtg

SEQ ID NO: 8145 - RNA, 43 nt, synthetic construct
  source 1..43: mol_type = other RNA
tcccccgactctggctttcccccaggtgtacatgtttttagtg

SEQ ID NO: 8146 - RNA, 43 nt, synthetic construct
  source 1..43: mol_type = other RNA
tcccccgactctggctttcccccaggtgtacatgttcctggtg

SEQ ID NO: 8147 - RNA, 44 nt, synthetic construct
  source 1..44: mol_type = other RNA
gtcccccgactctggctttcccccaggtttacatgttcctggtg

SEQ ID NO: 8148 - RNA, 44 nt, synthetic construct
  source 1..44: mol_type = other RNA
gtcccccgactctggctttcccccaggtgtacatgtttttggtg

SEQ ID NO: 8149 - RNA, 44 nt, synthetic construct
  source 1..44: mol_type = other RNA
gtcccccgactctggctttcccccaggtatacatgttcctggtg

SEQ ID NO: 8150 - RNA, 44 nt, synthetic construct
  source 1..44: mol_type = other RNA
gtcccccgactctggctttcccccaggtctacatgtttctggtg

SEQ ID NO: 8151 - RNA, 44 nt, synthetic construct
  source 1..44: mol_type = other RNA
gtcccccgactctggctttcccccaggtttacatgttcttagtg

SEQ ID NO: 8152 - RNA, 44 nt, synthetic construct
  source 1..44: mol_type = other RNA
gtcccccgactctggctttcccccaggtctacatgttcctggtg

SEQ ID NO: 8153 - RNA, 44 nt, synthetic construct
  source 1..44: mol_type = other RNA
gtcccccgactctggctttcccccaggtgtacatgttcctggtg

SEQ ID NO: 8154 - RNA, 44 nt, synthetic construct
  source 1..44: mol_type = other RNA
gtcccccgactctggctttcccccaggtctacatgtttttggtg

SEQ ID NO: 8155 - RNA, 44 nt, synthetic construct
  source 1..44: mol_type = other RNA
gtcccccgactctggctttcccccaggtgtacatgttcttggtg

SEQ ID NO: 8156 - RNA, 44 nt, synthetic construct
  source 1..44: mol_type = other RNA
gtcccccgactctggctttcccccaggtttacatgtttttggtg

SEQ ID NO: 8157 - RNA, 44 nt, synthetic construct
  source 1..44: mol_type = other RNA
gtcccccgactctggctttcccccaggtatacatgttcttagtg

SEQ ID NO: 8158 - RNA, 44 nt, synthetic construct
  source 1..44: mol_type = other RNA
gtcccccgactctggctttcccccaggtatacatgttcttggtg

SEQ ID NO: 8159 - RNA, 44 nt, synthetic construct
  source 1..44: mol_type = other RNA
gtcccccgactctggctttcccccaggtttacatgttcttggtg

SEQ ID NO: 8160 - RNA, 44 nt, synthetic construct
  source 1..44: mol_type = other RNA
gtcccccgactctggctttcccccaggtatacatgtttctggtg

SEQ ID NO: 8161 - RNA, 44 nt, synthetic construct
  source 1..44: mol_type = other RNA
gtcccccgactctggctttcccccaggtgtacatgttcttagtg

SEQ ID NO: 8162 - RNA, 44 nt, synthetic construct
  source 1..44: mol_type = other RNA
gtcccccgactctggctttcccccaggtgtacatgtttttagtg

SEQ ID NO: 8163 - RNA, 44 nt, synthetic construct
  source 1..44: mol_type = other RNA
gtcccccgactctggctttcccccaggtttacatgtttttagtg

SEQ ID NO: 8164 - RNA, 44 nt, synthetic construct
  source 1..44: mol_type = other RNA
gtcccccgactctggctttcccccaggtctacatgttcttagtg

SEQ ID NO: 8165 - RNA, 44 nt, synthetic construct
  source 1..44: mol_type = other RNA
gtcccccgactctggctttcccccaggtctacatgttcttggtg

SEQ ID NO: 8166 - RNA, 44 nt, synthetic construct
  source 1..44: mol_type = other RNA
gtcccccgactctggctttcccccaggtatacatgtttttggtg

SEQ ID NO: 8167 - RNA, 44 nt, synthetic construct
  source 1..44: mol_type = other RNA
gtcccccgactctggctttcccccaggtatacatgtttttagtg

SEQ ID NO: 8168 - RNA, 44 nt, synthetic construct
  source 1..44: mol_type = other RNA
gtcccccgactctggctttcccccaggtctacatgtttttagtg

SEQ ID NO: 8169 - RNA, 44 nt, synthetic construct
  source 1..44: mol_type = other RNA
gtcccccgactctggctttcccccaggtgtacatgtttctggtg

SEQ ID NO: 8170 - RNA, 44 nt, synthetic construct
  source 1..44: mol_type = other RNA
gtcccccgactctggctttcccccaggtttacatgtttctggtg

SEQ ID NO: 8171 - RNA, 45 nt, synthetic construct
  source 1..45: mol_type = other RNA
ggtcccccgactctggctttcccccaggtgtacatgtttctggtg

SEQ ID NO: 8172 - RNA, 45 nt, synthetic construct
  source 1..45: mol_type = other RNA
ggtcccccgactctggctttcccccaggtctacatgttcttggtg

SEQ ID NO: 8173 - RNA, 45 nt, synthetic construct
  source 1..45: mol_type = other RNA
ggtcccccgactctggctttcccccaggtctacatgttcctggtg

SEQ ID NO: 8174 - RNA, 45 nt, synthetic construct
  source 1..45: mol_type = other RNA
ggtcccccgactctggctttcccccaggtttacatgtttttggtg

SEQ ID NO: 8175 - RNA, 45 nt, synthetic construct
  source 1..45: mol_type = other RNA
ggtcccccgactctggctttcccccaggtttacatgtttttagtg

SEQ ID NO: 8176 - RNA, 45 nt, synthetic construct
  source 1..45: mol_type = other RNA
ggtcccccgactctggctttcccccaggtttacatgtttctggtg

SEQ ID NO: 8177 - RNA, 45 nt, synthetic construct
  source 1..45: mol_type = other RNA
ggtcccccgactctggctttcccccaggtttacatgttcttagtg

SEQ ID NO: 8178 - RNA, 45 nt, synthetic construct
  source 1..45: mol_type = other RNA
ggtcccccgactctggctttcccccaggtttacatgttcctggtg

SEQ ID NO: 8179 - RNA, 45 nt, synthetic construct
  source 1..45: mol_type = other RNA
ggtcccccgactctggctttcccccaggtgtacatgtttttggtg

SEQ ID NO: 8180 - RNA, 45 nt, synthetic construct
  source 1..45: mol_type = other RNA
ggtcccccgactctggctttcccccaggtgtacatgttcctggtg

SEQ ID NO: 8181 - RNA, 45 nt, synthetic construct
  source 1..45: mol_type = other RNA
ggtcccccgactctggctttcccccaggtgtacatgtttttagtg

SEQ ID NO: 8182 - RNA, 45 nt, synthetic construct
  source 1..45: mol_type = other RNA
ggtcccccgactctggctttcccccaggtctacatgttcttagtg

SEQ ID NO: 8183 - RNA, 45 nt, synthetic construct
  source 1..45: mol_type = other RNA
ggtcccccgactctggctttcccccaggtatacatgtttttggtg

SEQ ID NO: 8184 - RNA, 45 nt, synthetic construct
  source 1..45: mol_type = other RNA
ggtcccccgactctggctttcccccaggtatacatgttcctggtg

SEQ ID NO: 8185 - RNA, 45 nt, synthetic construct
  source 1..45: mol_type = other RNA
ggtcccccgactctggctttcccccaggtatacatgttcttagtg

SEQ ID NO: 8186 - RNA, 45 nt, synthetic construct
  source 1..45: mol_type = other RNA
ggtcccccgactctggctttcccccaggtgtacatgttcttagtg

SEQ ID NO: 8187 - RNA, 45 nt, synthetic construct
  source 1..45: mol_type = other RNA
ggtcccccgactctggctttcccccaggtctacatgtttctggtg

SEQ ID NO: 8188 - RNA, 45 nt, synthetic construct
  source 1..45: mol_type = other RNA
ggtcccccgactctggctttcccccaggtatacatgttcttggtg

SEQ ID NO: 8189 - RNA, 45 nt, synthetic construct
  source 1..45: mol_type = other RNA
ggtcccccgactctggctttcccccaggtttacatgttcttggtg

SEQ ID NO: 8190 - RNA, 45 nt, synthetic construct
  source 1..45: mol_type = other RNA
ggtcccccgactctggctttcccccaggtatacatgtttttagtg

SEQ ID NO: 8191 - RNA, 45 nt, synthetic construct
  source 1..45: mol_type = other RNA
ggtcccccgactctggctttcccccaggtctacatgtttttggtg

SEQ ID NO: 8192 - RNA, 45 nt, synthetic construct
  source 1..45: mol_type = other RNA
ggtcccccgactctggctttcccccaggtctacatgtttttagtg

SEQ ID NO: 8193 - RNA, 45 nt, synthetic construct
  source 1..45: mol_type = other RNA
ggtcccccgactctggctttcccccaggtatacatgtttctggtg

SEQ ID NO: 8194 - RNA, 45 nt, synthetic construct
  source 1..45: mol_type = other RNA
ggtcccccgactctggctttcccccaggtgtacatgttcttggtg

SEQ ID NO: 8195 - RNA, 46 nt, synthetic construct
  source 1..46: mol_type = other RNA
gggtcccccgactctggctttcccccaggtctacatgttcctggtg

SEQ ID NO: 8196 - RNA, 46 nt, synthetic construct
  source 1..46: mol_type = other RNA
gggtcccccgactctggctttcccccaggtttacatgtttctggtg

SEQ ID NO: 8197 - RNA, 46 nt, synthetic construct
  source 1..46: mol_type = other RNA
gggtcccccgactctggctttcccccaggtgtacatgttcttggtg

SEQ ID NO: 8198 - RNA, 46 nt, synthetic construct
  source 1..46: mol_type = other RNA
gggtcccccgactctggctttcccccaggtgtacatgttcttagtg

SEQ ID NO: 8199 - RNA, 46 nt, synthetic construct
  source 1..46: mol_type = other RNA
gggtcccccgactctggctttcccccaggtgtacatgttcctggtg

SEQ ID NO: 8200 - RNA, 46 nt, synthetic construct
  source 1..46: mol_type = other RNA
gggtcccccgactctggctttcccccaggtctacatgtttttggtg

SEQ ID NO: 8201 - RNA, 46 nt, synthetic construct
  source 1..46: mol_type = other RNA
gggtcccccgactctggctttcccccaggtctacatgtttttagtg

SEQ ID NO: 8202 - RNA, 46 nt, synthetic construct
  source 1..46: mol_type = other RNA
gggtcccccgactctggctttcccccaggtatacatgtttttggtg

SEQ ID NO: 8203 - RNA, 46 nt, synthetic construct
  source 1..46: mol_type = other RNA
gggtcccccgactctggctttcccccaggtctacatgttcttagtg

SEQ ID NO: 8204 - RNA, 46 nt, synthetic construct
  source 1..46: mol_type = other RNA
gggtcccccgactctggctttcccccaggtttacatgttcttggtg

SEQ ID NO: 8205 - RNA, 46 nt, synthetic construct
  source 1..46: mol_type = other RNA
gggtcccccgactctggctttcccccaggtgtacatgtttttagtg

SEQ ID NO: 8206 - RNA, 46 nt, synthetic construct
  source 1..46: mol_type = other RNA
gggtcccccgactctggctttcccccaggtttacatgttcctggtg

SEQ ID NO: 8207 - RNA, 46 nt, synthetic construct
  source 1..46: mol_type = other RNA
gggtcccccgactctggctttcccccaggtttacatgttcttagtg

SEQ ID NO: 8208 - RNA, 46 nt, synthetic construct
  source 1..46: mol_type = other RNA
gggtcccccgactctggctttcccccaggtctacatgtttctggtg

SEQ ID NO: 8209 - RNA, 46 nt, synthetic construct
  source 1..46: mol_type = other RNA
gggtcccccgactctggctttcccccaggtttacatgtttttagtg

SEQ ID NO: 8210 - RNA, 46 nt, synthetic construct
  source 1..46: mol_type = other RNA
gggtcccccgactctggctttcccccaggtatacatgttcctggtg

SEQ ID NO: 8211 - RNA, 46 nt, synthetic construct
  source 1..46: mol_type = other RNA
gggtcccccgactctggctttcccccaggtatacatgtttctggtg

SEQ ID NO: 8212 - RNA, 46 nt, synthetic construct
  source 1..46: mol_type = other RNA
gggtcccccgactctggctttcccccaggtatacatgttcttggtg

SEQ ID NO: 8213 - RNA, 46 nt, synthetic construct
  source 1..46: mol_type = other RNA
gggtcccccgactctggctttcccccaggtatacatgttcttagtg

SEQ ID NO: 8214 - RNA, 46 nt, synthetic construct
  source 1..46: mol_type = other RNA
gggtcccccgactctggctttcccccaggtgtacatgtttctggtg

SEQ ID NO: 8215 - RNA, 46 nt, synthetic construct
  source 1..46: mol_type = other RNA
gggtcccccgactctggctttcccccaggtctacatgttcttggtg

SEQ ID NO: 8216 - RNA, 46 nt, synthetic construct
  source 1..46: mol_type = other RNA
gggtcccccgactctggctttcccccaggtatacatgtttttagtg

SEQ ID NO: 8217 - RNA, 46 nt, synthetic construct
  source 1..46: mol_type = other RNA
gggtcccccgactctggctttcccccaggtgtacatgtttttggtg

SEQ ID NO: 8218 - RNA, 46 nt, synthetic construct
  source 1..46: mol_type = other RNA
gggtcccccgactctggctttcccccaggtttacatgtttttggtg

SEQ ID NO: 8219 - RNA, 47 nt, synthetic construct
  source 1..47: mol_type = other RNA
ggggtcccccgactctggctttcccccaggtatacatgttcctggtg

SEQ ID NO: 8220 - RNA, 47 nt, synthetic construct
  source 1..47: mol_type = other RNA
ggggtcccccgactctggctttcccccaggtttacatgtttctggtg

SEQ ID NO: 8221 - RNA, 47 nt, synthetic construct
  source 1..47: mol_type = other RNA
ggggtcccccgactctggctttcccccaggtttacatgttcttggtg

SEQ ID NO: 8222 - RNA, 47 nt, synthetic construct
  source 1..47: mol_type = other RNA
ggggtcccccgactctggctttcccccaggtttacatgttcttagtg

SEQ ID NO: 8223 - RNA, 47 nt, synthetic construct
  source 1..47: mol_type = other RNA
ggggtcccccgactctggctttcccccaggtttacatgttcctggtg

SEQ ID NO: 8224 - RNA, 47 nt, synthetic construct
  source 1..47: mol_type = other RNA
ggggtcccccgactctggctttcccccaggtgtacatgtttttggtg

SEQ ID NO: 8225 - RNA, 47 nt, synthetic construct
  source 1..47: mol_type = other RNA
ggggtcccccgactctggctttcccccaggtgtacatgtttttagtg

SEQ ID NO: 8226 - RNA, 47 nt, synthetic construct
  source 1..47: mol_type = other RNA
ggggtcccccgactctggctttcccccaggtgtacatgtttctggtg

SEQ ID NO: 8227 - RNA, 47 nt, synthetic construct
  source 1..47: mol_type = other RNA
ggggtcccccgactctggctttcccccaggtgtacatgttcttggtg

SEQ ID NO: 8228 - RNA, 47 nt, synthetic construct
  source 1..47: mol_type = other RNA
ggggtcccccgactctggctttcccccaggtgtacatgttcttagtg

SEQ ID NO: 8229 - RNA, 47 nt, synthetic construct
  source 1..47: mol_type = other RNA
ggggtcccccgactctggctttcccccaggtgtacatgttcctggtg

SEQ ID NO: 8230 - RNA, 47 nt, synthetic construct
  source 1..47: mol_type = other RNA
ggggtcccccgactctggctttcccccaggtctacatgtttctggtg

SEQ ID NO: 8231 - RNA, 47 nt, synthetic construct
  source 1..47: mol_type = other RNA
ggggtcccccgactctggctttcccccaggtctacatgttcttggtg

SEQ ID NO: 8232 - RNA, 47 nt, synthetic construct
  source 1..47: mol_type = other RNA
ggggtcccccgactctggctttcccccaggtctacatgttcttagtg

SEQ ID NO: 8233 - RNA, 47 nt, synthetic construct
  source 1..47: mol_type = other RNA
ggggtcccccgactctggctttcccccaggtctacatgttcctggtg

SEQ ID NO: 8234 - RNA, 47 nt, synthetic construct
  source 1..47: mol_type = other RNA
ggggtcccccgactctggctttcccccaggtatacatgtttttggtg

SEQ ID NO: 8235 - RNA, 47 nt, synthetic construct
  source 1..47: mol_type = other RNA
ggggtcccccgactctggctttcccccaggtatacatgtttttagtg

SEQ ID NO: 8236 - RNA, 47 nt, synthetic construct
  source 1..47: mol_type = other RNA
ggggtcccccgactctggctttcccccaggtttacatgtttttagtg

SEQ ID NO: 8237 - RNA, 47 nt, synthetic construct
  source 1..47: mol_type = other RNA
ggggtcccccgactctggctttcccccaggtctacatgtttttggtg

SEQ ID NO: 8238 - RNA, 47 nt, synthetic construct
  source 1..47: mol_type = other RNA
ggggtcccccgactctggctttcccccaggtatacatgttcttagtg

SEQ ID NO: 8239 - RNA, 47 nt, synthetic construct
  source 1..47: mol_type = other RNA
ggggtcccccgactctggctttcccccaggtttacatgtttttggtg

SEQ ID NO: 8240 - RNA, 47 nt, synthetic construct
  source 1..47: mol_type = other RNA
ggggtcccccgactctggctttcccccaggtatacatgtttctggtg

SEQ ID NO: 8241 - RNA, 47 nt, synthetic construct
  source 1..47: mol_type = other RNA
ggggtcccccgactctggctttcccccaggtctacatgtttttagtg

SEQ ID NO: 8242 - RNA, 47 nt, synthetic construct
  source 1..47: mol_type = other RNA
ggggtcccccgactctggctttcccccaggtatacatgttcttggtg

SEQ ID NO: 8243 - RNA, 48 nt, synthetic construct
  source 1..48: mol_type = other RNA
tggggtcccccgactctggctttcccccaggtatacatgtttttagtg

SEQ ID NO: 8244 - RNA, 48 nt, synthetic construct
  source 1..48: mol_type = other RNA
tggggtcccccgactctggctttcccccaggtttacatgtttttggtg

SEQ ID NO: 8245 - RNA, 48 nt, synthetic construct
  source 1..48: mol_type = other RNA
tggggtcccccgactctggctttcccccaggtatacatgtttctggtg

SEQ ID NO: 8246 - RNA, 48 nt, synthetic construct
  source 1..48: mol_type = other RNA
tggggtcccccgactctggctttcccccaggtttacatgtttttagtg

SEQ ID NO: 8247 - RNA, 48 nt, synthetic construct
  source 1..48: mol_type = other RNA
tggggtcccccgactctggctttcccccaggtatacatgttcttggtg

SEQ ID NO: 8248 - RNA, 48 nt, synthetic construct
  source 1..48: mol_type = other RNA
tggggtcccccgactctggctttcccccaggtatacatgttcttagtg

SEQ ID NO: 8249 - RNA, 48 nt, synthetic construct
  source 1..48: mol_type = other RNA
tggggtcccccgactctggctttcccccaggtatacatgttcctggtg

SEQ ID NO: 8250 - RNA, 48 nt, synthetic construct
  source 1..48: mol_type = other RNA
tggggtcccccgactctggctttcccccaggtgtacatgttcttggtg

SEQ ID NO: 8251 - RNA, 48 nt, synthetic construct
  source 1..48: mol_type = other RNA
tggggtcccccgactctggctttcccccaggtgtacatgttcctggtg

SEQ ID NO: 8252 - RNA, 48 nt, synthetic construct
  source 1..48: mol_type = other RNA
tggggtcccccgactctggctttcccccaggtctacatgttcctggtg

SEQ ID NO: 8253 - RNA, 48 nt, synthetic construct
  source 1..48: mol_type = other RNA
tggggtcccccgactctggctttcccccaggtctacatgttcttagtg

SEQ ID NO: 8254 - RNA, 48 nt, synthetic construct
  source 1..48: mol_type = other RNA
tggggtcccccgactctggctttcccccaggtctacatgttcttggtg

SEQ ID NO: 8255 - RNA, 48 nt, synthetic construct
  source 1..48: mol_type = other RNA
tggggtcccccgactctggctttcccccaggtctacatgtttctggtg

SEQ ID NO: 8256 - RNA, 48 nt, synthetic construct
  source 1..48: mol_type = other RNA
tggggtcccccgactctggctttcccccaggtgtacatgttcttagtg

SEQ ID NO: 8257 - RNA, 48 nt, synthetic construct
  source 1..48: mol_type = other RNA
tggggtcccccgactctggctttcccccaggtctacatgtttttagtg

SEQ ID NO: 8258 - RNA, 48 nt, synthetic construct
  source 1..48: mol_type = other RNA
tggggtcccccgactctggctttcccccaggtctacatgtttttggtg

SEQ ID NO: 8259 - RNA, 48 nt, synthetic construct
  source 1..48: mol_type = other RNA
tggggtcccccgactctggctttcccccaggtgtacatgtttctggtg

SEQ ID NO: 8260 - RNA, 48 nt, synthetic construct
  source 1..48: mol_type = other RNA
tggggtcccccgactctggctttcccccaggtgtacatgtttttagtg

SEQ ID NO: 8261 - RNA, 48 nt, synthetic construct
  source 1..48: mol_type = other RNA
tggggtcccccgactctggctttcccccaggtgtacatgtttttggtg

SEQ ID NO: 8262 - RNA, 48 nt, synthetic construct
  source 1..48: mol_type = other RNA
tggggtcccccgactctggctttcccccaggtttacatgttcctggtg

SEQ ID NO: 8263 - RNA, 48 nt, synthetic construct
  source 1..48: mol_type = other RNA
tggggtcccccgactctggctttcccccaggtttacatgttcttagtg

SEQ ID NO: 8264 - RNA, 48 nt, synthetic construct
  source 1..48: mol_type = other RNA
tggggtcccccgactctggctttcccccaggtttacatgttcttggtg

SEQ ID NO: 8265 - RNA, 48 nt, synthetic construct
  source 1..48: mol_type = other RNA
tggggtcccccgactctggctttcccccaggtttacatgtttctggtg

SEQ ID NO: 8266 - RNA, 48 nt, synthetic construct
  source 1..48: mol_type = other RNA
tggggtcccccgactctggctttcccccaggtatacatgtttttggtg

SEQ ID NO: 8267 - RNA, 49 nt, synthetic construct
  source 1..49: mol_type = other RNA
atggggtcccccgactctggctttcccccaggtatacatgttcttagtg

SEQ ID NO: 8268 - RNA, 49 nt, synthetic construct
  source 1..49: mol_type = other RNA
atggggtcccccgactctggctttcccccaggtgtacatgttcctggtg

SEQ ID NO: 8269 - RNA, 49 nt, synthetic construct
  source 1..49: mol_type = other RNA
atggggtcccccgactctggctttcccccaggtttacatgtttttggtg

SEQ ID NO: 8270 - RNA, 49 nt, synthetic construct
  source 1..49: mol_type = other RNA
atggggtcccccgactctggctttcccccaggtgtacatgtttctggtg

SEQ ID NO: 8271 - RNA, 49 nt, synthetic construct
  source 1..49: mol_type = other RNA
atggggtcccccgactctggctttcccccaggtgtacatgtttttagtg

SEQ ID NO: 8272 - RNA, 49 nt, synthetic construct
  source 1..49: mol_type = other RNA
atggggtcccccgactctggctttcccccaggtgtacatgtttttggtg

SEQ ID NO: 8273 - RNA, 49 nt, synthetic construct
  source 1..49: mol_type = other RNA
atggggtcccccgactctggctttcccccaggtttacatgtttttagtg

SEQ ID NO: 8274 - RNA, 49 nt, synthetic construct
  source 1..49: mol_type = other RNA
atggggtcccccgactctggctttcccccaggtttacatgttcttagtg

SEQ ID NO: 8275 - RNA, 49 nt, synthetic construct
  source 1..49: mol_type = other RNA
atggggtcccccgactctggctttcccccaggtttacatgttcttggtg

SEQ ID NO: 8276 - RNA, 49 nt, synthetic construct
  source 1..49: mol_type = other RNA
atggggtcccccgactctggctttcccccaggtttacatgtttctggtg

SEQ ID NO: 8277 - RNA, 49 nt, synthetic construct
  source 1..49: mol_type = other RNA
atggggtcccccgactctggctttcccccaggtgtacatgttcttagtg

SEQ ID NO: 8278 - RNA, 49 nt, synthetic construct
  source 1..49: mol_type = other RNA
atggggtcccccgactctggctttcccccaggtttacatgttcctggtg

SEQ ID NO: 8279 - RNA, 49 nt, synthetic construct
  source 1..49: mol_type = other RNA
atggggtcccccgactctggctttcccccaggtctacatgtttttggtg

SEQ ID NO: 8280 - RNA, 49 nt, synthetic construct
  source 1..49: mol_type = other RNA
atggggtcccccgactctggctttcccccaggtgtacatgttcttggtg

SEQ ID NO: 8281 - RNA, 49 nt, synthetic construct
  source 1..49: mol_type = other RNA
atggggtcccccgactctggctttcccccaggtctacatgtttctggtg

SEQ ID NO: 8282 - RNA, 49 nt, synthetic construct
  source 1..49: mol_type = other RNA
atggggtcccccgactctggctttcccccaggtctacatgttcttggtg

SEQ ID NO: 8283 - RNA, 49 nt, synthetic construct
  source 1..49: mol_type = other RNA
atggggtcccccgactctggctttcccccaggtctacatgttcttagtg

SEQ ID NO: 8284 - RNA, 49 nt, synthetic construct
  source 1..49: mol_type = other RNA
atggggtcccccgactctggctttcccccaggtatacatgtttttggtg

SEQ ID NO: 8285 - RNA, 49 nt, synthetic construct
  source 1..49: mol_type = other RNA
atggggtcccccgactctggctttcccccaggtctacatgttcctggtg

SEQ ID NO: 8286 - RNA, 49 nt, synthetic construct
  source 1..49: mol_type = other RNA
atggggtcccccgactctggctttcccccaggtatacatgtttttagtg

SEQ ID NO: 8287 - RNA, 49 nt, synthetic construct
  source 1..49: mol_type = other RNA
atggggtcccccgactctggctttcccccaggtatacatgttcctggtg

SEQ ID NO: 8288 - RNA, 49 nt, synthetic construct
  source 1..49: mol_type = other RNA
atggggtcccccgactctggctttcccccaggtatacatgtttctggtg

SEQ ID NO: 8289 - RNA, 49 nt, synthetic construct
  source 1..49: mol_type = other RNA
atggggtcccccgactctggctttcccccaggtatacatgttcttggtg

SEQ ID NO: 8290 - RNA, 49 nt, synthetic construct
  source 1..49: mol_type = other RNA
atggggtcccccgactctggctttcccccaggtctacatgtttttagtg

SEQ ID NO: 8291 - RNA, 50 nt, synthetic construct
  source 1..50: mol_type = other RNA
aatggggtcccccgactctggctttcccccaggtctacatgtttttagtg

SEQ ID NO: 8292 - RNA, 50 nt, synthetic construct
  source 1..50: mol_type = other RNA
aatggggtcccccgactctggctttcccccaggtatacatgtttttggtg

SEQ ID NO: 8293 - RNA, 50 nt, synthetic construct
  source 1..50: mol_type = other RNA
aatggggtcccccgactctggctttcccccaggtctacatgtttttggtg

SEQ ID NO: 8294 - RNA, 50 nt, synthetic construct
  source 1..50: mol_type = other RNA
aatggggtcccccgactctggctttcccccaggtatacatgttcttagtg

SEQ ID NO: 8295 - RNA, 50 nt, synthetic construct
  source 1..50: mol_type = other RNA
aatggggtcccccgactctggctttcccccaggtatacatgttcttggtg

SEQ ID NO: 8296 - RNA, 50 nt, synthetic construct
  source 1..50: mol_type = other RNA
aatggggtcccccgactctggctttcccccaggtatacatgtttctggtg

SEQ ID NO: 8297 - RNA, 50 nt, synthetic construct
  source 1..50: mol_type = other RNA
aatggggtcccccgactctggctttcccccaggtatacatgtttttagtg

SEQ ID NO: 8298 - RNA, 50 nt, synthetic construct
  source 1..50: mol_type = other RNA
aatggggtcccccgactctggctttcccccaggtatacatgttcctggtg

SEQ ID NO: 8299 - RNA, 50 nt, synthetic construct
  source 1..50: mol_type = other RNA
aatggggtcccccgactctggctttcccccaggtctacatgttcttagtg

SEQ ID NO: 8300 - RNA, 50 nt, synthetic construct
  source 1..50: mol_type = other RNA
aatggggtcccccgactctggctttcccccaggtctacatgttcttggtg

SEQ ID NO: 8301 - RNA, 50 nt, synthetic construct
  source 1..50: mol_type = other RNA
aatggggtcccccgactctggctttcccccaggtctacatgtttctggtg

SEQ ID NO: 8302 - RNA, 50 nt, synthetic construct
  source 1..50: mol_type = other RNA
aatggggtcccccgactctggctttcccccaggtttacatgtttctggtg

SEQ ID NO: 8303 - RNA, 50 nt, synthetic construct
  source 1..50: mol_type = other RNA
aatggggtcccccgactctggctttcccccaggtttacatgttcttagtg

SEQ ID NO: 8304 - RNA, 50 nt, synthetic construct
  source 1..50: mol_type = other RNA
aatggggtcccccgactctggctttcccccaggtttacatgtttttggtg

SEQ ID NO: 8305 - RNA, 50 nt, synthetic construct
  source 1..50: mol_type = other RNA
aatggggtcccccgactctggctttcccccaggtgtacatgtttttggtg

SEQ ID NO: 8306 - RNA, 50 nt, synthetic construct
  source 1..50: mol_type = other RNA
aatggggtcccccgactctggctttcccccaggtttacatgtttttagtg

SEQ ID NO: 8307 - RNA, 50 nt, synthetic construct
  source 1..50: mol_type = other RNA
aatggggtcccccgactctggctttcccccaggtttacatgttcttggtg

SEQ ID NO: 8308 - RNA, 50 nt, synthetic construct
  source 1..50: mol_type = other RNA
aatggggtcccccgactctggctttcccccaggtctacatgttcctggtg

SEQ ID NO: 8309 - RNA, 50 nt, synthetic construct
  source 1..50: mol_type = other RNA
aatggggtcccccgactctggctttcccccaggtttacatgttcctggtg

SEQ ID NO: 8310 - RNA, 50 nt, synthetic construct
  source 1..50: mol_type = other RNA
aatggggtcccccgactctggctttcccccaggtgtacatgttcttagtg

SEQ ID NO: 8311 - RNA, 50 nt, synthetic construct
  source 1..50: mol_type = other RNA
aatggggtcccccgactctggctttcccccaggtgtacatgttcttggtg

SEQ ID NO: 8312 - RNA, 50 nt, synthetic construct
  source 1..50: mol_type = other RNA
aatggggtcccccgactctggctttcccccaggtgtacatgtttctggtg

SEQ ID NO: 8313 - RNA, 50 nt, synthetic construct
  source 1..50: mol_type = other RNA
aatggggtcccccgactctggctttcccccaggtgtacatgtttttagtg

SEQ ID NO: 8314 - RNA, 50 nt, synthetic construct
  source 1..50: mol_type = other RNA
aatggggtcccccgactctggctttcccccaggtgtacatgttcctggtg

SEQ ID NO: 8315 - RNA, 51 nt, synthetic construct
  source 1..51: mol_type = other RNA
gaatggggtcccccgactctggctttcccccaggtgtacatgttcttagtg

SEQ ID NO: 8316 - RNA, 51 nt, synthetic construct
  source 1..51: mol_type = other RNA
gaatggggtcccccgactctggctttcccccaggtctacatgtttttggtg

SEQ ID NO: 8317 - RNA, 51 nt, synthetic construct
  source 1..51: mol_type = other RNA
gaatggggtcccccgactctggctttcccccaggtgtacatgtttttagtg

SEQ ID NO: 8318 - RNA, 51 nt, synthetic construct
  source 1..51: mol_type = other RNA
gaatggggtcccccgactctggctttcccccaggtgtacatgttcctggtg

SEQ ID NO: 8319 - RNA, 51 nt, synthetic construct
  source 1..51: mol_type = other RNA
gaatggggtcccccgactctggctttcccccaggtttacatgttcctggtg

SEQ ID NO: 8320 - RNA, 51 nt, synthetic construct
  source 1..51: mol_type = other RNA
gaatggggtcccccgactctggctttcccccaggtttacatgttcttagtg

SEQ ID NO: 8321 - RNA, 51 nt, synthetic construct
  source 1..51: mol_type = other RNA
gaatggggtcccccgactctggctttcccccaggtttacatgttcttggtg

SEQ ID NO: 8322 - RNA, 51 nt, synthetic construct
  source 1..51: mol_type = other RNA
gaatggggtcccccgactctggctttcccccaggtttacatgtttctggtg

SEQ ID NO: 8323 - RNA, 51 nt, synthetic construct
  source 1..51: mol_type = other RNA
gaatggggtcccccgactctggctttcccccaggtttacatgtttttagtg

SEQ ID NO: 8324 - RNA, 51 nt, synthetic construct
  source 1..51: mol_type = other RNA
gaatggggtcccccgactctggctttcccccaggtttacatgtttttggtg

SEQ ID NO: 8325 - RNA, 51 nt, synthetic construct
  source 1..51: mol_type = other RNA
gaatggggtcccccgactctggctttcccccaggtctacatgtttttagtg

SEQ ID NO: 8326 - RNA, 51 nt, synthetic construct
  source 1..51: mol_type = other RNA
gaatggggtcccccgactctggctttcccccaggtgtacatgtttttggtg

SEQ ID NO: 8327 - RNA, 51 nt, synthetic construct
  source 1..51: mol_type = other RNA
gaatggggtcccccgactctggctttcccccaggtctacatgttcttggtg

SEQ ID NO: 8328 - RNA, 51 nt, synthetic construct
  source 1..51: mol_type = other RNA
gaatggggtcccccgactctggctttcccccaggtctacatgttcttagtg

SEQ ID NO: 8329 - RNA, 51 nt, synthetic construct
  source 1..51: mol_type = other RNA
gaatggggtcccccgactctggctttcccccaggtctacatgttcctggtg

SEQ ID NO: 8330 - RNA, 51 nt, synthetic construct
  source 1..51: mol_type = other RNA
gaatggggtcccccgactctggctttcccccaggtatacatgtttttggtg

SEQ ID NO: 8331 - RNA, 51 nt, synthetic construct
  source 1..51: mol_type = other RNA
gaatggggtcccccgactctggctttcccccaggtatacatgtttttagtg

SEQ ID NO: 8332 - RNA, 51 nt, synthetic construct
  source 1..51: mol_type = other RNA
gaatggggtcccccgactctggctttcccccaggtatacatgtttctggtg

SEQ ID NO: 8333 - RNA, 51 nt, synthetic construct
  source 1..51: mol_type = other RNA
gaatggggtcccccgactctggctttcccccaggtatacatgttcttagtg

SEQ ID NO: 8334 - RNA, 51 nt, synthetic construct
  source 1..51: mol_type = other RNA
gaatggggtcccccgactctggctttcccccaggtatacatgttcctggtg

SEQ ID NO: 8335 - RNA, 51 nt, synthetic construct
  source 1..51: mol_type = other RNA
gaatggggtcccccgactctggctttcccccaggtgtacatgttcttggtg

SEQ ID NO: 8336 - RNA, 51 nt, synthetic construct
  source 1..51: mol_type = other RNA
gaatggggtcccccgactctggctttcccccaggtctacatgtttctggtg

SEQ ID NO: 8337 - RNA, 51 nt, synthetic construct
  source 1..51: mol_type = other RNA
gaatggggtcccccgactctggctttcccccaggtgtacatgtttctggtg

SEQ ID NO: 8338 - RNA, 51 nt, synthetic construct
  source 1..51: mol_type = other RNA
gaatggggtcccccgactctggctttcccccaggtatacatgttcttggtg

SEQ ID NO: 8339 - RNA, 52 nt, synthetic construct
  source 1..52: mol_type = other RNA
tgaatggggtcccccgactctggctttcccccaggtatacatgtttttagtg

SEQ ID NO: 8340 - RNA, 52 nt, synthetic construct
  source 1..52: mol_type = other RNA
tgaatggggtcccccgactctggctttcccccaggtgtacatgtttctggtg

SEQ ID NO: 8341 - RNA, 52 nt, synthetic construct
  source 1..52: mol_type = other RNA
tgaatggggtcccccgactctggctttcccccaggtctacatgtttctggtg

SEQ ID NO: 8342 - RNA, 52 nt, synthetic construct
  source 1..52: mol_type = other RNA
tgaatggggtcccccgactctggctttcccccaggtatacatgttcctggtg

SEQ ID NO: 8343 - RNA, 52 nt, synthetic construct
  source 1..52: mol_type = other RNA
tgaatggggtcccccgactctggctttcccccaggtctacatgttcttggtg

SEQ ID NO: 8344 - RNA, 52 nt, synthetic construct
  source 1..52: mol_type = other RNA
tgaatggggtcccccgactctggctttcccccaggtttacatgtttttagtg

SEQ ID NO: 8345 - RNA, 52 nt, synthetic construct
  source 1..52: mol_type = other RNA
tgaatggggtcccccgactctggctttcccccaggtttacatgttcttggtg

SEQ ID NO: 8346 - RNA, 52 nt, synthetic construct
  source 1..52: mol_type = other RNA
tgaatggggtcccccgactctggctttcccccaggtttacatgttcttagtg

SEQ ID NO: 8347 - RNA, 52 nt, synthetic construct
  source 1..52: mol_type = other RNA
tgaatggggtcccccgactctggctttcccccaggtttacatgttcctggtg

SEQ ID NO: 8348 - RNA, 52 nt, synthetic construct
  source 1..52: mol_type = other RNA
tgaatggggtcccccgactctggctttcccccaggtgtacatgtttttggtg

SEQ ID NO: 8349 - RNA, 52 nt, synthetic construct
  source 1..52: mol_type = other RNA
tgaatggggtcccccgactctggctttcccccaggtgtacatgtttttagtg

SEQ ID NO: 8350 - RNA, 52 nt, synthetic construct
  source 1..52: mol_type = other RNA
tgaatggggtcccccgactctggctttcccccaggtgtacatgttcttggtg

SEQ ID NO: 8351 - RNA, 52 nt, synthetic construct
  source 1..52: mol_type = other RNA
tgaatggggtcccccgactctggctttcccccaggtctacatgtttttggtg

SEQ ID NO: 8352 - RNA, 52 nt, synthetic construct
  source 1..52: mol_type = other RNA
tgaatggggtcccccgactctggctttcccccaggtttacatgtttctggtg

SEQ ID NO: 8353 - RNA, 52 nt, synthetic construct
  source 1..52: mol_type = other RNA
tgaatggggtcccccgactctggctttcccccaggtgtacatgttcctggtg

SEQ ID NO: 8354 - RNA, 52 nt, synthetic construct
  source 1..52: mol_type = other RNA
tgaatggggtcccccgactctggctttcccccaggtatacatgttcttagtg

SEQ ID NO: 8355 - RNA, 52 nt, synthetic construct
  source 1..52: mol_type = other RNA
tgaatggggtcccccgactctggctttcccccaggtgtacatgttcttagtg

SEQ ID NO: 8356 - RNA, 52 nt, synthetic construct
  source 1..52: mol_type = other RNA
tgaatggggtcccccgactctggctttcccccaggtatacatgttcttggtg

SEQ ID NO: 8357 - RNA, 52 nt, synthetic construct
  source 1..52: mol_type = other RNA
tgaatggggtcccccgactctggctttcccccaggtatacatgtttctggtg

SEQ ID NO: 8358 - RNA, 52 nt, synthetic construct
  source 1..52: mol_type = other RNA
tgaatggggtcccccgactctggctttcccccaggtctacatgttcttagtg

SEQ ID NO: 8359 - RNA, 52 nt, synthetic construct
  source 1..52: mol_type = other RNA
tgaatggggtcccccgactctggctttcccccaggtatacatgtttttggtg

SEQ ID NO: 8360 - RNA, 52 nt, synthetic construct
  source 1..52: mol_type = other RNA
tgaatggggtcccccgactctggctttcccccaggtctacatgttcctggtg

SEQ ID NO: 8361 - RNA, 52 nt, synthetic construct
  source 1..52: mol_type = other RNA
tgaatggggtcccccgactctggctttcccccaggtctacatgtttttagtg

SEQ ID NO: 8362 - RNA, 52 nt, synthetic construct
  source 1..52: mol_type = other RNA
tgaatggggtcccccgactctggctttcccccaggtttacatgtttttggtg

SEQ ID NO: 8363 - RNA, 53 nt, synthetic construct
  source 1..53: mol_type = other RNA
ctgaatggggtcccccgactctggctttcccccaggtttacatgttcttggtg

SEQ ID NO: 8364 - RNA, 53 nt, synthetic construct
  source 1..53: mol_type = other RNA
ctgaatggggtcccccgactctggctttcccccaggtgtacatgttcttggtg

SEQ ID NO: 8365 - RNA, 53 nt, synthetic construct
  source 1..53: mol_type = other RNA
ctgaatggggtcccccgactctggctttcccccaggtttacatgttcctggtg

SEQ ID NO: 8366 - RNA, 53 nt, synthetic construct
  source 1..53: mol_type = other RNA
ctgaatggggtcccccgactctggctttcccccaggtgtacatgtttctggtg

SEQ ID NO: 8367 - RNA, 53 nt, synthetic construct
  source 1..53: mol_type = other RNA
ctgaatggggtcccccgactctggctttcccccaggtttacatgtttttagtg

SEQ ID NO: 8368 - RNA, 53 nt, synthetic construct
  source 1..53: mol_type = other RNA
ctgaatggggtcccccgactctggctttcccccaggtgtacatgtttttagtg

SEQ ID NO: 8369 - RNA, 53 nt, synthetic construct
  source 1..53: mol_type = other RNA
ctgaatggggtcccccgactctggctttcccccaggtatacatgtttttagtg

SEQ ID NO: 8370 - RNA, 53 nt, synthetic construct
  source 1..53: mol_type = other RNA
ctgaatggggtcccccgactctggctttcccccaggtatacatgttcttagtg

SEQ ID NO: 8371 - RNA, 53 nt, synthetic construct
  source 1..53: mol_type = other RNA
ctgaatggggtcccccgactctggctttcccccaggtgtacatgttcttagtg

SEQ ID NO: 8372 - RNA, 53 nt, synthetic construct
  source 1..53: mol_type = other RNA
ctgaatggggtcccccgactctggctttcccccaggtgtacatgttcctggtg

SEQ ID NO: 8373 - RNA, 53 nt, synthetic construct
  source 1..53: mol_type = other RNA
ctgaatggggtcccccgactctggctttcccccaggtctacatgtttttggtg

SEQ ID NO: 8374 - RNA, 53 nt, synthetic construct
  source 1..53: mol_type = other RNA
ctgaatggggtcccccgactctggctttcccccaggtctacatgtttttagtg

SEQ ID NO: 8375 - RNA, 53 nt, synthetic construct
  source 1..53: mol_type = other RNA
ctgaatggggtcccccgactctggctttcccccaggtctacatgtttctggtg

SEQ ID NO: 8376 - RNA, 53 nt, synthetic construct
  source 1..53: mol_type = other RNA
ctgaatggggtcccccgactctggctttcccccaggtctacatgttcctggtg

SEQ ID NO: 8377 - RNA, 53 nt, synthetic construct
  source 1..53: mol_type = other RNA
ctgaatggggtcccccgactctggctttcccccaggtctacatgttcttagtg

SEQ ID NO: 8378 - RNA, 53 nt, synthetic construct
  source 1..53: mol_type = other RNA
ctgaatggggtcccccgactctggctttcccccaggtatacatgtttttggtg

SEQ ID NO: 8379 - RNA, 53 nt, synthetic construct
  source 1..53: mol_type = other RNA
ctgaatggggtcccccgactctggctttcccccaggtatacatgttcttggtg

SEQ ID NO: 8380 - RNA, 53 nt, synthetic construct
  source 1..53: mol_type = other RNA
ctgaatggggtcccccgactctggctttcccccaggtatacatgttcctggtg

SEQ ID NO: 8381 - RNA, 53 nt, synthetic construct
  source 1..53: mol_type = other RNA
ctgaatggggtcccccgactctggctttcccccaggtttacatgtttctggtg

SEQ ID NO: 8382 - RNA, 53 nt, synthetic construct
  source 1..53: mol_type = other RNA
ctgaatggggtcccccgactctggctttcccccaggtctacatgttcttggtg

SEQ ID NO: 8383 - RNA, 53 nt, synthetic construct
  source 1..53: mol_type = other RNA
ctgaatggggtcccccgactctggctttcccccaggtatacatgtttctggtg

SEQ ID NO: 8384 - RNA, 53 nt, synthetic construct
  source 1..53: mol_type = other RNA
ctgaatggggtcccccgactctggctttcccccaggtttacatgttcttagtg

SEQ ID NO: 8385 - RNA, 53 nt, synthetic construct
  source 1..53: mol_type = other RNA
ctgaatggggtcccccgactctggctttcccccaggtgtacatgtttttggtg

SEQ ID NO: 8386 - RNA, 53 nt, synthetic construct
  source 1..53: mol_type = other RNA
ctgaatggggtcccccgactctggctttcccccaggtttacatgtttttggtg

SEQ ID NO: 8387 - RNA, 54 nt, synthetic construct
  source 1..54: mol_type = other RNA
gctgaatggggtcccccgactctggctttcccccaggtctacatgttcctggtg

SEQ ID NO: 8388 - RNA, 54 nt, synthetic construct
  source 1..54: mol_type = other RNA
gctgaatggggtcccccgactctggctttcccccaggtatacatgtttttggtg

SEQ ID NO: 8389 - RNA, 54 nt, synthetic construct
  source 1..54: mol_type = other RNA
gctgaatggggtcccccgactctggctttcccccaggtatacatgtttctggtg

SEQ ID NO: 8390 - RNA, 54 nt, synthetic construct
  source 1..54: mol_type = other RNA
gctgaatggggtcccccgactctggctttcccccaggtatacatgttcttggtg

SEQ ID NO: 8391 - RNA, 54 nt, synthetic construct
  source 1..54: mol_type = other RNA
gctgaatggggtcccccgactctggctttcccccaggtatacatgttcttagtg

SEQ ID NO: 8392 - RNA, 54 nt, synthetic construct
  source 1..54: mol_type = other RNA
gctgaatggggtcccccgactctggctttcccccaggtatacatgttcctggtg

SEQ ID NO: 8393 - RNA, 54 nt, synthetic construct
  source 1..54: mol_type = other RNA
gctgaatggggtcccccgactctggctttcccccaggtctacatgtttttggtg

SEQ ID NO: 8394 - RNA, 54 nt, synthetic construct
  source 1..54: mol_type = other RNA
gctgaatggggtcccccgactctggctttcccccaggtctacatgtttctggtg

SEQ ID NO: 8395 - RNA, 54 nt, synthetic construct
  source 1..54: mol_type = other RNA
gctgaatggggtcccccgactctggctttcccccaggtatacatgtttttagtg

SEQ ID NO: 8396 - RNA, 54 nt, synthetic construct
  source 1..54: mol_type = other RNA
gctgaatggggtcccccgactctggctttcccccaggtgtacatgttcttagtg

SEQ ID NO: 8397 - RNA, 54 nt, synthetic construct
  source 1..54: mol_type = other RNA
gctgaatggggtcccccgactctggctttcccccaggtctacatgttcttagtg

SEQ ID NO: 8398 - RNA, 54 nt, synthetic construct
  source 1..54: mol_type = other RNA
gctgaatggggtcccccgactctggctttcccccaggtctacatgtttttagtg

SEQ ID NO: 8399 - RNA, 54 nt, synthetic construct
  source 1..54: mol_type = other RNA
gctgaatggggtcccccgactctggctttcccccaggtctacatgttcttggtg

SEQ ID NO: 8400 - RNA, 54 nt, synthetic construct
  source 1..54: mol_type = other RNA
gctgaatggggtcccccgactctggctttcccccaggtgtacatgttcttggtg

SEQ ID NO: 8401 - RNA, 54 nt, synthetic construct
  source 1..54: mol_type = other RNA
gctgaatggggtcccccgactctggctttcccccaggtgtacatgttcctggtg

SEQ ID NO: 8402 - RNA, 54 nt, synthetic construct
  source 1..54: mol_type = other RNA
gctgaatggggtcccccgactctggctttcccccaggtttacatgtttttggtg

SEQ ID NO: 8403 - RNA, 54 nt, synthetic construct
  source 1..54: mol_type = other RNA
gctgaatggggtcccccgactctggctttcccccaggtttacatgtttttagtg

SEQ ID NO: 8404 - RNA, 54 nt, synthetic construct
  source 1..54: mol_type = other RNA
gctgaatggggtcccccgactctggctttcccccaggtttacatgtttctggtg

SEQ ID NO: 8405 - RNA, 54 nt, synthetic construct
  source 1..54: mol_type = other RNA
gctgaatggggtcccccgactctggctttcccccaggtttacatgttcttggtg

SEQ ID NO: 8406 - RNA, 54 nt, synthetic construct
  source 1..54: mol_type = other RNA
gctgaatggggtcccccgactctggctttcccccaggtttacatgttcttagtg

SEQ ID NO: 8407 - RNA, 54 nt, synthetic construct
  source 1..54: mol_type = other RNA
gctgaatggggtcccccgactctggctttcccccaggtttacatgttcctggtg

SEQ ID NO: 8408 - RNA, 54 nt, synthetic construct
  source 1..54: mol_type = other RNA
gctgaatggggtcccccgactctggctttcccccaggtgtacatgtttttggtg

SEQ ID NO: 8409 - RNA, 54 nt, synthetic construct
  source 1..54: mol_type = other RNA
gctgaatggggtcccccgactctggctttcccccaggtgtacatgtttttagtg

SEQ ID NO: 8410 - RNA, 54 nt, synthetic construct
  source 1..54: mol_type = other RNA
gctgaatggggtcccccgactctggctttcccccaggtgtacatgtttctggtg

SEQ ID NO: 8411 - RNA, 55 nt, synthetic construct
  source 1..55: mol_type = other RNA
ggctgaatggggtcccccgactctggctttcccccaggtttacatgtttttggtg

SEQ ID NO: 8412 - RNA, 55 nt, synthetic construct
  source 1..55: mol_type = other RNA
ggctgaatggggtcccccgactctggctttcccccaggtgtacatgtttttggtg

SEQ ID NO: 8413 - RNA, 55 nt, synthetic construct
  source 1..55: mol_type = other RNA
ggctgaatggggtcccccgactctggctttcccccaggtgtacatgttcctggtg

SEQ ID NO: 8414 - RNA, 55 nt, synthetic construct
  source 1..55: mol_type = other RNA
ggctgaatggggtcccccgactctggctttcccccaggtgtacatgttcttggtg

SEQ ID NO: 8415 - RNA, 55 nt, synthetic construct
  source 1..55: mol_type = other RNA
ggctgaatggggtcccccgactctggctttcccccaggtttacatgtttctggtg

SEQ ID NO: 8416 - RNA, 55 nt, synthetic construct
  source 1..55: mol_type = other RNA
ggctgaatggggtcccccgactctggctttcccccaggtgtacatgttcttagtg

SEQ ID NO: 8417 - RNA, 55 nt, synthetic construct
  source 1..55: mol_type = other RNA
ggctgaatggggtcccccgactctggctttcccccaggtatacatgttcttggtg

SEQ ID NO: 8418 - RNA, 55 nt, synthetic construct
  source 1..55: mol_type = other RNA
ggctgaatggggtcccccgactctggctttcccccaggtctacatgtttttagtg

SEQ ID NO: 8419 - RNA, 55 nt, synthetic construct
  source 1..55: mol_type = other RNA
ggctgaatggggtcccccgactctggctttcccccaggtctacatgtttttggtg

SEQ ID NO: 8420 - RNA, 55 nt, synthetic construct
  source 1..55: mol_type = other RNA
ggctgaatggggtcccccgactctggctttcccccaggtatacatgttcctggtg

SEQ ID NO: 8421 - RNA, 55 nt, synthetic construct
  source 1..55: mol_type = other RNA
ggctgaatggggtcccccgactctggctttcccccaggtatacatgttcttagtg

SEQ ID NO: 8422 - RNA, 55 nt, synthetic construct
  source 1..55: mol_type = other RNA
ggctgaatggggtcccccgactctggctttcccccaggtctacatgttcttggtg

SEQ ID NO: 8423 - RNA, 55 nt, synthetic construct
  source 1..55: mol_type = other RNA
ggctgaatggggtcccccgactctggctttcccccaggtatacatgtttctggtg

SEQ ID NO: 8424 - RNA, 55 nt, synthetic construct
  source 1..55: mol_type = other RNA
ggctgaatggggtcccccgactctggctttcccccaggtatacatgtttttggtg

SEQ ID NO: 8425 - RNA, 55 nt, synthetic construct
  source 1..55: mol_type = other RNA
ggctgaatggggtcccccgactctggctttcccccaggtctacatgttcttagtg

SEQ ID NO: 8426 - RNA, 55 nt, synthetic construct
  source 1..55: mol_type = other RNA
ggctgaatggggtcccccgactctggctttcccccaggtctacatgtttctggtg

SEQ ID NO: 8427 - RNA, 55 nt, synthetic construct
  source 1..55: mol_type = other RNA
ggctgaatggggtcccccgactctggctttcccccaggtatacatgtttttagtg

SEQ ID NO: 8428 - RNA, 55 nt, synthetic construct
  source 1..55: mol_type = other RNA
ggctgaatggggtcccccgactctggctttcccccaggtttacatgtttttagtg

SEQ ID NO: 8429 - RNA, 55 nt, synthetic construct
  source 1..55: mol_type = other RNA
ggctgaatggggtcccccgactctggctttcccccaggtctacatgttcctggtg

SEQ ID NO: 8430 - RNA, 55 nt, synthetic construct
  source 1..55: mol_type = other RNA
ggctgaatggggtcccccgactctggctttcccccaggtttacatgttcttagtg

SEQ ID NO: 8431 - RNA, 55 nt, synthetic construct
  source 1..55: mol_type = other RNA
ggctgaatggggtcccccgactctggctttcccccaggtttacatgttcctggtg

SEQ ID NO: 8432 - RNA, 55 nt, synthetic construct
  source 1..55: mol_type = other RNA
ggctgaatggggtcccccgactctggctttcccccaggtttacatgttcttggtg

SEQ ID NO: 8433 - RNA, 55 nt, synthetic construct
  source 1..55: mol_type = other RNA
ggctgaatggggtcccccgactctggctttcccccaggtgtacatgtttctggtg

SEQ ID NO: 8434 - RNA, 55 nt, synthetic construct
  source 1..55: mol_type = other RNA
ggctgaatggggtcccccgactctggctttcccccaggtgtacatgtttttagtg

SEQ ID NO: 8435 - RNA, 56 nt, synthetic construct
  source 1..56: mol_type = other RNA
aggctgaatggggtcccccgactctggctttcccccaggtatacatgttcttggtg

SEQ ID NO: 8436 - RNA, 56 nt, synthetic construct
  source 1..56: mol_type = other RNA
aggctgaatggggtcccccgactctggctttcccccaggtatacatgtttttggtg

SEQ ID NO: 8437 - RNA, 56 nt, synthetic construct
  source 1..56: mol_type = other RNA
aggctgaatggggtcccccgactctggctttcccccaggtctacatgtttttagtg

SEQ ID NO: 8438 - RNA, 56 nt, synthetic construct
  source 1..56: mol_type = other RNA
aggctgaatggggtcccccgactctggctttcccccaggtctacatgtttttggtg

SEQ ID NO: 8439 - RNA, 56 nt, synthetic construct
  source 1..56: mol_type = other RNA
aggctgaatggggtcccccgactctggctttcccccaggtatacatgttcttagtg

SEQ ID NO: 8440 - RNA, 56 nt, synthetic construct
  source 1..56: mol_type = other RNA
aggctgaatggggtcccccgactctggctttcccccaggtatacatgttcctggtg

SEQ ID NO: 8441 - RNA, 56 nt, synthetic construct
  source 1..56: mol_type = other RNA
aggctgaatggggtcccccgactctggctttcccccaggtatacatgtttctggtg

SEQ ID NO: 8442 - RNA, 56 nt, synthetic construct
  source 1..56: mol_type = other RNA
aggctgaatggggtcccccgactctggctttcccccaggtatacatgtttttagtg

SEQ ID NO: 8443 - RNA, 56 nt, synthetic construct
  source 1..56: mol_type = other RNA
aggctgaatggggtcccccgactctggctttcccccaggtctacatgttcctggtg

SEQ ID NO: 8444 - RNA, 56 nt, synthetic construct
  source 1..56: mol_type = other RNA
aggctgaatggggtcccccgactctggctttcccccaggtctacatgttcttagtg

SEQ ID NO: 8445 - RNA, 56 nt, synthetic construct
  source 1..56: mol_type = other RNA
aggctgaatggggtcccccgactctggctttcccccaggtctacatgtttctggtg

SEQ ID NO: 8446 - RNA, 56 nt, synthetic construct
  source 1..56: mol_type = other RNA
aggctgaatggggtcccccgactctggctttcccccaggtctacatgttcttggtg

SEQ ID NO: 8447 - RNA, 56 nt, synthetic construct
  source 1..56: mol_type = other RNA
aggctgaatggggtcccccgactctggctttcccccaggtgtacatgttcctggtg

SEQ ID NO: 8448 - RNA, 56 nt, synthetic construct
  source 1..56: mol_type = other RNA
aggctgaatggggtcccccgactctggctttcccccaggtttacatgtttttggtg

SEQ ID NO: 8449 - RNA, 56 nt, synthetic construct
  source 1..56: mol_type = other RNA
aggctgaatggggtcccccgactctggctttcccccaggtttacatgtttttagtg

SEQ ID NO: 8450 - RNA, 56 nt, synthetic construct
  source 1..56: mol_type = other RNA
aggctgaatggggtcccccgactctggctttcccccaggtttacatgtttctggtg

SEQ ID NO: 8451 - RNA, 56 nt, synthetic construct
  source 1..56: mol_type = other RNA
aggctgaatggggtcccccgactctggctttcccccaggtgtacatgtttttggtg

SEQ ID NO: 8452 - RNA, 56 nt, synthetic construct
  source 1..56: mol_type = other RNA
aggctgaatggggtcccccgactctggctttcccccaggtttacatgttcttagtg

SEQ ID NO: 8453 - RNA, 56 nt, synthetic construct
  source 1..56: mol_type = other RNA
aggctgaatggggtcccccgactctggctttcccccaggtgtacatgtttttagtg

SEQ ID NO: 8454 - RNA, 56 nt, synthetic construct
  source 1..56: mol_type = other RNA
aggctgaatggggtcccccgactctggctttcccccaggtgtacatgtttctggtg

SEQ ID NO: 8455 - RNA, 56 nt, synthetic construct
  source 1..56: mol_type = other RNA
aggctgaatggggtcccccgactctggctttcccccaggtgtacatgttcttggtg

SEQ ID NO: 8456 - RNA, 56 nt, synthetic construct
  source 1..56: mol_type = other RNA
aggctgaatggggtcccccgactctggctttcccccaggtttacatgttcctggtg

SEQ ID NO: 8457 - RNA, 56 nt, synthetic construct
  source 1..56: mol_type = other RNA
aggctgaatggggtcccccgactctggctttcccccaggtgtacatgttcttagtg

SEQ ID NO: 8458 - RNA, 56 nt, synthetic construct
  source 1..56: mol_type = other RNA
aggctgaatggggtcccccgactctggctttcccccaggtttacatgttcttggtg

SEQ ID NO: 8459 - RNA, 57 nt, synthetic construct
  source 1..57: mol_type = other RNA
gaggctgaatggggtcccccgactctggctttcccccaggtttacatgttcctggtg

SEQ ID NO: 8460 - RNA, 57 nt, synthetic construct
  source 1..57: mol_type = other RNA
gaggctgaatggggtcccccgactctggctttcccccaggtgtacatgttcttggtg

SEQ ID NO: 8461 - RNA, 57 nt, synthetic construct
  source 1..57: mol_type = other RNA
gaggctgaatggggtcccccgactctggctttcccccaggtgtacatgtttttagtg

SEQ ID NO: 8462 - RNA, 57 nt, synthetic construct
  source 1..57: mol_type = other RNA
gaggctgaatggggtcccccgactctggctttcccccaggtgtacatgtttttggtg

SEQ ID NO: 8463 - RNA, 57 nt, synthetic construct
  source 1..57: mol_type = other RNA
gaggctgaatggggtcccccgactctggctttcccccaggtttacatgttcttggtg

SEQ ID NO: 8464 - RNA, 57 nt, synthetic construct
  source 1..57: mol_type = other RNA
gaggctgaatggggtcccccgactctggctttcccccaggtttacatgttcttagtg

SEQ ID NO: 8465 - RNA, 57 nt, synthetic construct
  source 1..57: mol_type = other RNA
gaggctgaatggggtcccccgactctggctttcccccaggtgtacatgttcctggtg

SEQ ID NO: 8466 - RNA, 57 nt, synthetic construct
  source 1..57: mol_type = other RNA
gaggctgaatggggtcccccgactctggctttcccccaggtttacatgtttctggtg

SEQ ID NO: 8467 - RNA, 57 nt, synthetic construct
  source 1..57: mol_type = other RNA
gaggctgaatggggtcccccgactctggctttcccccaggtttacatgtttttagtg

SEQ ID NO: 8468 - RNA, 57 nt, synthetic construct
  source 1..57: mol_type = other RNA
gaggctgaatggggtcccccgactctggctttcccccaggtttacatgtttttggtg

SEQ ID NO: 8469 - RNA, 57 nt, synthetic construct
  source 1..57: mol_type = other RNA
gaggctgaatggggtcccccgactctggctttcccccaggtgtacatgttcttagtg

SEQ ID NO: 8470 - RNA, 57 nt, synthetic construct
  source 1..57: mol_type = other RNA
gaggctgaatggggtcccccgactctggctttcccccaggtgtacatgtttctggtg

SEQ ID NO: 8471 - RNA, 57 nt, synthetic construct
  source 1..57: mol_type = other RNA
gaggctgaatggggtcccccgactctggctttcccccaggtatacatgtttctggtg

SEQ ID NO: 8472 - RNA, 57 nt, synthetic construct
  source 1..57: mol_type = other RNA
gaggctgaatggggtcccccgactctggctttcccccaggtatacatgttcttggtg

SEQ ID NO: 8473 - RNA, 57 nt, synthetic construct
  source 1..57: mol_type = other RNA
gaggctgaatggggtcccccgactctggctttcccccaggtctacatgtttctggtg

SEQ ID NO: 8474 - RNA, 57 nt, synthetic construct
  source 1..57: mol_type = other RNA
gaggctgaatggggtcccccgactctggctttcccccaggtctacatgtttttggtg

SEQ ID NO: 8475 - RNA, 57 nt, synthetic construct
  source 1..57: mol_type = other RNA
gaggctgaatggggtcccccgactctggctttcccccaggtatacatgttcctggtg

SEQ ID NO: 8476 - RNA, 57 nt, synthetic construct
  source 1..57: mol_type = other RNA
gaggctgaatggggtcccccgactctggctttcccccaggtatacatgttcttagtg

SEQ ID NO: 8477 - RNA, 57 nt, synthetic construct
  source 1..57: mol_type = other RNA
gaggctgaatggggtcccccgactctggctttcccccaggtctacatgtttttagtg

SEQ ID NO: 8478 - RNA, 57 nt, synthetic construct
  source 1..57: mol_type = other RNA
gaggctgaatggggtcccccgactctggctttcccccaggtatacatgtttttagtg

SEQ ID NO: 8479 - RNA, 57 nt, synthetic construct
  source 1..57: mol_type = other RNA
gaggctgaatggggtcccccgactctggctttcccccaggtctacatgttcctggtg

SEQ ID NO: 8480 - RNA, 57 nt, synthetic construct
  source 1..57: mol_type = other RNA
gaggctgaatggggtcccccgactctggctttcccccaggtctacatgttcttggtg

SEQ ID NO: 8481 - RNA, 57 nt, synthetic construct
  source 1..57: mol_type = other RNA
gaggctgaatggggtcccccgactctggctttcccccaggtatacatgtttttggtg

SEQ ID NO: 8482 - RNA, 57 nt, synthetic construct
  source 1..57: mol_type = other RNA
gaggctgaatggggtcccccgactctggctttcccccaggtctacatgttcttagtg

SEQ ID NO: 8483 - RNA, 58 nt, synthetic construct
  source 1..58: mol_type = other RNA
ggaggctgaatggggtcccccgactctggctttcccccaggtgtacatgtttttagtg

SEQ ID NO: 8484 - RNA, 58 nt, synthetic construct
  source 1..58: mol_type = other RNA
ggaggctgaatggggtcccccgactctggctttcccccaggtatacatgttcttggtg

SEQ ID NO: 8485 - RNA, 58 nt, synthetic construct
  source 1..58: mol_type = other RNA
ggaggctgaatggggtcccccgactctggctttcccccaggtctacatgtttttagtg

SEQ ID NO: 8486 - RNA, 58 nt, synthetic construct
  source 1..58: mol_type = other RNA
ggaggctgaatggggtcccccgactctggctttcccccaggtatacatgtttttagtg

SEQ ID NO: 8487 - RNA, 58 nt, synthetic construct
  source 1..58: mol_type = other RNA
ggaggctgaatggggtcccccgactctggctttcccccaggtttacatgttcctggtg

SEQ ID NO: 8488 - RNA, 58 nt, synthetic construct
  source 1..58: mol_type = other RNA
ggaggctgaatggggtcccccgactctggctttcccccaggtttacatgttcttagtg

SEQ ID NO: 8489 - RNA, 58 nt, synthetic construct
  source 1..58: mol_type = other RNA
ggaggctgaatggggtcccccgactctggctttcccccaggtgtacatgttcttagtg

SEQ ID NO: 8490 - RNA, 58 nt, synthetic construct
  source 1..58: mol_type = other RNA
ggaggctgaatggggtcccccgactctggctttcccccaggtatacatgttcttagtg

SEQ ID NO: 8491 - RNA, 58 nt, synthetic construct
  source 1..58: mol_type = other RNA
ggaggctgaatggggtcccccgactctggctttcccccaggtatacatgttcctggtg

SEQ ID NO: 8492 - RNA, 58 nt, synthetic construct
  source 1..58: mol_type = other RNA
ggaggctgaatggggtcccccgactctggctttcccccaggtatacatgtttttggtg

SEQ ID NO: 8493 - RNA, 58 nt, synthetic construct
  source 1..58: mol_type = other RNA
ggaggctgaatggggtcccccgactctggctttcccccaggtctacatgttcctggtg

SEQ ID NO: 8494 - RNA, 58 nt, synthetic construct
  source 1..58: mol_type = other RNA
ggaggctgaatggggtcccccgactctggctttcccccaggtctacatgttcttagtg

SEQ ID NO: 8495 - RNA, 58 nt, synthetic construct
  source 1..58: mol_type = other RNA
ggaggctgaatggggtcccccgactctggctttcccccaggtctacatgtttttggtg

SEQ ID NO: 8496 - RNA, 58 nt, synthetic construct
  source 1..58: mol_type = other RNA
ggaggctgaatggggtcccccgactctggctttcccccaggtgtacatgttcctggtg

SEQ ID NO: 8497 - RNA, 58 nt, synthetic construct
  source 1..58: mol_type = other RNA
ggaggctgaatggggtcccccgactctggctttcccccaggtgtacatgttcttggtg

SEQ ID NO: 8498 - RNA, 58 nt, synthetic construct
  source 1..58: mol_type = other RNA
ggaggctgaatggggtcccccgactctggctttcccccaggtgtacatgtttttggtg

SEQ ID NO: 8499 - RNA, 58 nt, synthetic construct
  source 1..58: mol_type = other RNA
ggaggctgaatggggtcccccgactctggctttcccccaggtgtacatgtttctggtg

SEQ ID NO: 8500 - RNA, 58 nt, synthetic construct
  source 1..58: mol_type = other RNA
ggaggctgaatggggtcccccgactctggctttcccccaggtttacatgtttttggtg

SEQ ID NO: 8501 - RNA, 58 nt, synthetic construct
  source 1..58: mol_type = other RNA
ggaggctgaatggggtcccccgactctggctttcccccaggtttacatgtttttagtg

SEQ ID NO: 8502 - RNA, 58 nt, synthetic construct
  source 1..58: mol_type = other RNA
ggaggctgaatggggtcccccgactctggctttcccccaggtttacatgtttctggtg

SEQ ID NO: 8503 - RNA, 58 nt, synthetic construct
  source 1..58: mol_type = other RNA
ggaggctgaatggggtcccccgactctggctttcccccaggtatacatgtttctggtg

SEQ ID NO: 8504 - RNA, 58 nt, synthetic construct
  source 1..58: mol_type = other RNA
ggaggctgaatggggtcccccgactctggctttcccccaggtttacatgttcttggtg

SEQ ID NO: 8505 - RNA, 58 nt, synthetic construct
  source 1..58: mol_type = other RNA
ggaggctgaatggggtcccccgactctggctttcccccaggtctacatgtttctggtg

SEQ ID NO: 8506 - RNA, 58 nt, synthetic construct
  source 1..58: mol_type = other RNA
ggaggctgaatggggtcccccgactctggctttcccccaggtctacatgttcttggtg

SEQ ID NO: 8507 - RNA, 59 nt, synthetic construct
  source 1..59: mol_type = other RNA
tggaggctgaatggggtcccccgactctggctttcccccaggtctacatgtttttggtg

SEQ ID NO: 8508 - RNA, 59 nt, synthetic construct
  source 1..59: mol_type = other RNA
tggaggctgaatggggtcccccgactctggctttcccccaggtatacatgttcctggtg

SEQ ID NO: 8509 - RNA, 59 nt, synthetic construct
  source 1..59: mol_type = other RNA
tggaggctgaatggggtcccccgactctggctttcccccaggtgtacatgtttctggtg

SEQ ID NO: 8510 - RNA, 59 nt, synthetic construct
  source 1..59: mol_type = other RNA
tggaggctgaatggggtcccccgactctggctttcccccaggtctacatgtttttagtg

SEQ ID NO: 8511 - RNA, 59 nt, synthetic construct
  source 1..59: mol_type = other RNA
tggaggctgaatggggtcccccgactctggctttcccccaggtttacatgtttttggtg

SEQ ID NO: 8512 - RNA, 59 nt, synthetic construct
  source 1..59: mol_type = other RNA
tggaggctgaatggggtcccccgactctggctttcccccaggtttacatgtttttagtg

SEQ ID NO: 8513 - RNA, 59 nt, synthetic construct
  source 1..59: mol_type = other RNA
tggaggctgaatggggtcccccgactctggctttcccccaggtctacatgttcctggtg

SEQ ID NO: 8514 - RNA, 59 nt, synthetic construct
  source 1..59: mol_type = other RNA
tggaggctgaatggggtcccccgactctggctttcccccaggtttacatgttcttggtg

SEQ ID NO: 8515 - RNA, 59 nt, synthetic construct
  source 1..59: mol_type = other RNA
tggaggctgaatggggtcccccgactctggctttcccccaggtttacatgtttctggtg

SEQ ID NO: 8516 - RNA, 59 nt, synthetic construct
  source 1..59: mol_type = other RNA
tggaggctgaatggggtcccccgactctggctttcccccaggtttacatgttcttagtg

SEQ ID NO: 8517 - RNA, 59 nt, synthetic construct
  source 1..59: mol_type = other RNA
tggaggctgaatggggtcccccgactctggctttcccccaggtttacatgttcctggtg

SEQ ID NO: 8518 - RNA, 59 nt, synthetic construct
  source 1..59: mol_type = other RNA
tggaggctgaatggggtcccccgactctggctttcccccaggtgtacatgtttttggtg

SEQ ID NO: 8519 - RNA, 59 nt, synthetic construct
  source 1..59: mol_type = other RNA
tggaggctgaatggggtcccccgactctggctttcccccaggtgtacatgtttttagtg

SEQ ID NO: 8520 - RNA, 59 nt, synthetic construct
  source 1..59: mol_type = other RNA
tggaggctgaatggggtcccccgactctggctttcccccaggtgtacatgttcttggtg

SEQ ID NO: 8521 - RNA, 59 nt, synthetic construct
  source 1..59: mol_type = other RNA
tggaggctgaatggggtcccccgactctggctttcccccaggtgtacatgttcctggtg

SEQ ID NO: 8522 - RNA, 59 nt, synthetic construct
  source 1..59: mol_type = other RNA
tggaggctgaatggggtcccccgactctggctttcccccaggtctacatgtttctggtg

SEQ ID NO: 8523 - RNA, 59 nt, synthetic construct
  source 1..59: mol_type = other RNA
tggaggctgaatggggtcccccgactctggctttcccccaggtctacatgttcttggtg

SEQ ID NO: 8524 - RNA, 59 nt, synthetic construct
  source 1..59: mol_type = other RNA
tggaggctgaatggggtcccccgactctggctttcccccaggtctacatgttcttagtg

SEQ ID NO: 8525 - RNA, 59 nt, synthetic construct
  source 1..59: mol_type = other RNA
tggaggctgaatggggtcccccgactctggctttcccccaggtatacatgtttttggtg

SEQ ID NO: 8526 - RNA, 59 nt, synthetic construct
  source 1..59: mol_type = other RNA
tggaggctgaatggggtcccccgactctggctttcccccaggtatacatgtttttagtg

SEQ ID NO: 8527 - RNA, 59 nt, synthetic construct
  source 1..59: mol_type = other RNA
tggaggctgaatggggtcccccgactctggctttcccccaggtatacatgtttctggtg

SEQ ID NO: 8528 - RNA, 59 nt, synthetic construct
  source 1..59: mol_type = other RNA
tggaggctgaatggggtcccccgactctggctttcccccaggtatacatgttcttggtg

SEQ ID NO: 8529 - RNA, 59 nt, synthetic construct
  source 1..59: mol_type = other RNA
tggaggctgaatggggtcccccgactctggctttcccccaggtgtacatgttcttagtg

SEQ ID NO: 8530 - RNA, 59 nt, synthetic construct
  source 1..59: mol_type = other RNA
tggaggctgaatggggtcccccgactctggctttcccccaggtatacatgttcttagtg

SEQ ID NO: 8531 - RNA, 60 nt, synthetic construct
  source 1..60: mol_type = other RNA
ttggaggctgaatggggtcccccgactctggctttcccccaggtatacatgtttttagtg

SEQ ID NO: 8532 - RNA, 60 nt, synthetic construct
  source 1..60: mol_type = other RNA
ttggaggctgaatggggtcccccgactctggctttcccccaggtttacatgtttttagtg

SEQ ID NO: 8533 - RNA, 60 nt, synthetic construct
  source 1..60: mol_type = other RNA
ttggaggctgaatggggtcccccgactctggctttcccccaggtatacatgtttctggtg

SEQ ID NO: 8534 - RNA, 60 nt, synthetic construct
  source 1..60: mol_type = other RNA
ttggaggctgaatggggtcccccgactctggctttcccccaggtctacatgttcttggtg

SEQ ID NO: 8535 - RNA, 60 nt, synthetic construct
  source 1..60: mol_type = other RNA
ttggaggctgaatggggtcccccgactctggctttcccccaggtatacatgttcttagtg

SEQ ID NO: 8536 - RNA, 60 nt, synthetic construct
  source 1..60: mol_type = other RNA
ttggaggctgaatggggtcccccgactctggctttcccccaggtatacatgttcctggtg

SEQ ID NO: 8537 - RNA, 60 nt, synthetic construct
  source 1..60: mol_type = other RNA
ttggaggctgaatggggtcccccgactctggctttcccccaggtctacatgttcctggtg

SEQ ID NO: 8538 - RNA, 60 nt, synthetic construct
  source 1..60: mol_type = other RNA
ttggaggctgaatggggtcccccgactctggctttcccccaggtatacatgttcttggtg

SEQ ID NO: 8539 - RNA, 60 nt, synthetic construct
  source 1..60: mol_type = other RNA
ttggaggctgaatggggtcccccgactctggctttcccccaggtctacatgttcttagtg

SEQ ID NO: 8540 - RNA, 60 nt, synthetic construct
  source 1..60: mol_type = other RNA
ttggaggctgaatggggtcccccgactctggctttcccccaggtctacatgtttttggtg

SEQ ID NO: 8541 - RNA, 60 nt, synthetic construct
  source 1..60: mol_type = other RNA
ttggaggctgaatggggtcccccgactctggctttcccccaggtctacatgtttctggtg

SEQ ID NO: 8542 - RNA, 60 nt, synthetic construct
  source 1..60: mol_type = other RNA
ttggaggctgaatggggtcccccgactctggctttcccccaggtttacatgtttttggtg

SEQ ID NO: 8543 - RNA, 60 nt, synthetic construct
  source 1..60: mol_type = other RNA
ttggaggctgaatggggtcccccgactctggctttcccccaggtttacatgttcttggtg

SEQ ID NO: 8544 - RNA, 60 nt, synthetic construct
  source 1..60: mol_type = other RNA
ttggaggctgaatggggtcccccgactctggctttcccccaggtttacatgttcttagtg

SEQ ID NO: 8545 - RNA, 60 nt, synthetic construct
  source 1..60: mol_type = other RNA
ttggaggctgaatggggtcccccgactctggctttcccccaggtttacatgttcctggtg

SEQ ID NO: 8546 - RNA, 60 nt, synthetic construct
  source 1..60: mol_type = other RNA
ttggaggctgaatggggtcccccgactctggctttcccccaggtgtacatgtttttggtg

SEQ ID NO: 8547 - RNA, 60 nt, synthetic construct
  source 1..60: mol_type = other RNA
ttggaggctgaatggggtcccccgactctggctttcccccaggtttacatgtttctggtg

SEQ ID NO: 8548 - RNA, 60 nt, synthetic construct
  source 1..60: mol_type = other RNA
ttggaggctgaatggggtcccccgactctggctttcccccaggtgtacatgtttctggtg

SEQ ID NO: 8549 - RNA, 60 nt, synthetic construct
  source 1..60: mol_type = other RNA
ttggaggctgaatggggtcccccgactctggctttcccccaggtgtacatgttcttggtg

SEQ ID NO: 8550 - RNA, 60 nt, synthetic construct
  source 1..60: mol_type = other RNA
ttggaggctgaatggggtcccccgactctggctttcccccaggtgtacatgttcttagtg

SEQ ID NO: 8551 - RNA, 60 nt, synthetic construct
  source 1..60: mol_type = other RNA
ttggaggctgaatggggtcccccgactctggctttcccccaggtgtacatgttcctggtg

SEQ ID NO: 8552 - RNA, 60 nt, synthetic construct
  source 1..60: mol_type = other RNA
ttggaggctgaatggggtcccccgactctggctttcccccaggtctacatgtttttagtg

SEQ ID NO: 8553 - RNA, 60 nt, synthetic construct
  source 1..60: mol_type = other RNA
ttggaggctgaatggggtcccccgactctggctttcccccaggtgtacatgtttttagtg

SEQ ID NO: 8554 - RNA, 60 nt, synthetic construct
  source 1..60: mol_type = other RNA
ttggaggctgaatggggtcccccgactctggctttcccccaggtatacatgtttttggtg

SEQ ID NO: 8555 - RNA, 61 nt, synthetic construct
  source 1..61: mol_type = other RNA
tttggaggctgaatggggtcccccgactctggctttcccccaggtatacatgtttttagtg

SEQ ID NO: 8556 - RNA, 61 nt, synthetic construct
  source 1..61: mol_type = other RNA
tttggaggctgaatggggtcccccgactctggctttcccccaggtctacatgtttctggtg

SEQ ID NO: 8557 - RNA, 61 nt, synthetic construct
  source 1..61: mol_type = other RNA
tttggaggctgaatggggtcccccgactctggctttcccccaggtttacatgttcttggtg

SEQ ID NO: 8558 - RNA, 61 nt, synthetic construct
  source 1..61: mol_type = other RNA
tttggaggctgaatggggtcccccgactctggctttcccccaggtctacatgtttttggtg

SEQ ID NO: 8559 - RNA, 61 nt, synthetic construct
  source 1..61: mol_type = other RNA
tttggaggctgaatggggtcccccgactctggctttcccccaggtgtacatgtttttagtg

SEQ ID NO: 8560 - RNA, 61 nt, synthetic construct
  source 1..61: mol_type = other RNA
tttggaggctgaatggggtcccccgactctggctttcccccaggtttacatgttcctggtg

SEQ ID NO: 8561 - RNA, 61 nt, synthetic construct
  source 1..61: mol_type = other RNA
tttggaggctgaatggggtcccccgactctggctttcccccaggtgtacatgttcctggtg

SEQ ID NO: 8562 - RNA, 61 nt, synthetic construct
  source 1..61: mol_type = other RNA
tttggaggctgaatggggtcccccgactctggctttcccccaggtgtacatgttcttagtg

SEQ ID NO: 8563 - RNA, 61 nt, synthetic construct
  source 1..61: mol_type = other RNA
tttggaggctgaatggggtcccccgactctggctttcccccaggtgtacatgttcttggtg

SEQ ID NO: 8564 - RNA, 61 nt, synthetic construct
  source 1..61: mol_type = other RNA
tttggaggctgaatggggtcccccgactctggctttcccccaggtctacatgttcctggtg

SEQ ID NO: 8565 - RNA, 61 nt, synthetic construct
  source 1..61: mol_type = other RNA
tttggaggctgaatggggtcccccgactctggctttcccccaggtgtacatgtttttggtg

SEQ ID NO: 8566 - RNA, 61 nt, synthetic construct
  source 1..61: mol_type = other RNA
tttggaggctgaatggggtcccccgactctggctttcccccaggtatacatgtttttggtg

SEQ ID NO: 8567 - RNA, 61 nt, synthetic construct
  source 1..61: mol_type = other RNA
tttggaggctgaatggggtcccccgactctggctttcccccaggtttacatgtttctggtg

SEQ ID NO: 8568 - RNA, 61 nt, synthetic construct
  source 1..61: mol_type = other RNA
tttggaggctgaatggggtcccccgactctggctttcccccaggtttacatgtttttggtg

SEQ ID NO: 8569 - RNA, 61 nt, synthetic construct
  source 1..61: mol_type = other RNA
tttggaggctgaatggggtcccccgactctggctttcccccaggtatacatgttcctggtg

SEQ ID NO: 8570 - RNA, 61 nt, synthetic construct
  source 1..61: mol_type = other RNA
tttggaggctgaatggggtcccccgactctggctttcccccaggtatacatgttcttagtg

SEQ ID NO: 8571 - RNA, 61 nt, synthetic construct
  source 1..61: mol_type = other RNA
tttggaggctgaatggggtcccccgactctggctttcccccaggtatacatgttcttggtg

SEQ ID NO: 8572 - RNA, 61 nt, synthetic construct
  source 1..61: mol_type = other RNA
tttggaggctgaatggggtcccccgactctggctttcccccaggtttacatgtttttagtg

SEQ ID NO: 8573 - RNA, 61 nt, synthetic construct
  source 1..61: mol_type = other RNA
tttggaggctgaatggggtcccccgactctggctttcccccaggtctacatgttcttagtg

SEQ ID NO: 8574 - RNA, 61 nt, synthetic construct
  source 1..61: mol_type = other RNA
tttggaggctgaatggggtcccccgactctggctttcccccaggtttacatgttcttagtg

SEQ ID NO: 8575 - RNA, 61 nt, synthetic construct
  source 1..61: mol_type = other RNA
tttggaggctgaatggggtcccccgactctggctttcccccaggtctacatgttcttggtg

SEQ ID NO: 8576 - RNA, 61 nt, synthetic construct
  source 1..61: mol_type = other RNA
tttggaggctgaatggggtcccccgactctggctttcccccaggtatacatgtttctggtg

SEQ ID NO: 8577 - RNA, 61 nt, synthetic construct
  source 1..61: mol_type = other RNA
tttggaggctgaatggggtcccccgactctggctttcccccaggtctacatgtttttagtg

SEQ ID NO: 8578 - RNA, 61 nt, synthetic construct
  source 1..61: mol_type = other RNA
tttggaggctgaatggggtcccccgactctggctttcccccaggtgtacatgtttctggtg

SEQ ID NO: 8579 - RNA, 62 nt, synthetic construct
  source 1..62: mol_type = other RNA
ctttggaggctgaatggggtcccccgactctggctttcccccaggtttacatgttcttagtg

SEQ ID NO: 8580 - RNA, 62 nt, synthetic construct
  source 1..62: mol_type = other RNA
ctttggaggctgaatggggtcccccgactctggctttcccccaggtatacatgttcttggtg

SEQ ID NO: 8581 - RNA, 62 nt, synthetic construct
  source 1..62: mol_type = other RNA
ctttggaggctgaatggggtcccccgactctggctttcccccaggtatacatgttcttagtg

SEQ ID NO: 8582 - RNA, 62 nt, synthetic construct
  source 1..62: mol_type = other RNA
ctttggaggctgaatggggtcccccgactctggctttcccccaggtctacatgtttttagtg

SEQ ID NO: 8583 - RNA, 62 nt, synthetic construct
  source 1..62: mol_type = other RNA
ctttggaggctgaatggggtcccccgactctggctttcccccaggtttacatgttcctggtg

SEQ ID NO: 8584 - RNA, 62 nt, synthetic construct
  source 1..62: mol_type = other RNA
ctttggaggctgaatggggtcccccgactctggctttcccccaggtctacatgttcctggtg

SEQ ID NO: 8585 - RNA, 62 nt, synthetic construct
  source 1..62: mol_type = other RNA
ctttggaggctgaatggggtcccccgactctggctttcccccaggtatacatgtttctggtg

SEQ ID NO: 8586 - RNA, 62 nt, synthetic construct
  source 1..62: mol_type = other RNA
ctttggaggctgaatggggtcccccgactctggctttcccccaggtatacatgtttttagtg

SEQ ID NO: 8587 - RNA, 62 nt, synthetic construct
  source 1..62: mol_type = other RNA
ctttggaggctgaatggggtcccccgactctggctttcccccaggtatacatgtttttggtg

SEQ ID NO: 8588 - RNA, 62 nt, synthetic construct
  source 1..62: mol_type = other RNA
ctttggaggctgaatggggtcccccgactctggctttcccccaggtgtacatgtttttagtg

SEQ ID NO: 8589 - RNA, 62 nt, synthetic construct
  source 1..62: mol_type = other RNA
ctttggaggctgaatggggtcccccgactctggctttcccccaggtgtacatgttcttggtg

SEQ ID NO: 8590 - RNA, 62 nt, synthetic construct
  source 1..62: mol_type = other RNA
ctttggaggctgaatggggtcccccgactctggctttcccccaggtctacatgttcttagtg

SEQ ID NO: 8591 - RNA, 62 nt, synthetic construct
  source 1..62: mol_type = other RNA
ctttggaggctgaatggggtcccccgactctggctttcccccaggtctacatgttcttggtg

SEQ ID NO: 8592 - RNA, 62 nt, synthetic construct
  source 1..62: mol_type = other RNA
ctttggaggctgaatggggtcccccgactctggctttcccccaggtctacatgtttctggtg

SEQ ID NO: 8593 - RNA, 62 nt, synthetic construct
  source 1..62: mol_type = other RNA
ctttggaggctgaatggggtcccccgactctggctttcccccaggtatacatgttcctggtg

SEQ ID NO: 8594 - RNA, 62 nt, synthetic construct
  source 1..62: mol_type = other RNA
ctttggaggctgaatggggtcccccgactctggctttcccccaggtctacatgtttttggtg

SEQ ID NO: 8595 - RNA, 62 nt, synthetic construct
  source 1..62: mol_type = other RNA
ctttggaggctgaatggggtcccccgactctggctttcccccaggtgtacatgttcttagtg

SEQ ID NO: 8596 - RNA, 62 nt, synthetic construct
  source 1..62: mol_type = other RNA
ctttggaggctgaatggggtcccccgactctggctttcccccaggtgtacatgttcctggtg

SEQ ID NO: 8597 - RNA, 62 nt, synthetic construct
  source 1..62: mol_type = other RNA
ctttggaggctgaatggggtcccccgactctggctttcccccaggtgtacatgtttctggtg

SEQ ID NO: 8598 - RNA, 62 nt, synthetic construct
  source 1..62: mol_type = other RNA
ctttggaggctgaatggggtcccccgactctggctttcccccaggtttacatgttcttggtg

SEQ ID NO: 8599 - RNA, 62 nt, synthetic construct
  source 1..62: mol_type = other RNA
ctttggaggctgaatggggtcccccgactctggctttcccccaggtttacatgtttctggtg

SEQ ID NO: 8600 - RNA, 62 nt, synthetic construct
  source 1..62: mol_type = other RNA
ctttggaggctgaatggggtcccccgactctggctttcccccaggtttacatgtttttagtg

SEQ ID NO: 8601 - RNA, 62 nt, synthetic construct
  source 1..62: mol_type = other RNA
ctttggaggctgaatggggtcccccgactctggctttcccccaggtttacatgtttttggtg

SEQ ID NO: 8602 - RNA, 62 nt, synthetic construct
  source 1..62: mol_type = other RNA
ctttggaggctgaatggggtcccccgactctggctttcccccaggtgtacatgtttttggtg

SEQ ID NO: 8603 - RNA, 63 nt, synthetic construct
  source 1..63: mol_type = other RNA
tctttggaggctgaatggggtcccccgactctggctttcccccaggtatacatgtttctggtg

SEQ ID NO: 8604 - RNA, 63 nt, synthetic construct
  source 1..63: mol_type = other RNA
tctttggaggctgaatggggtcccccgactctggctttcccccaggtatacatgttcttggtg

SEQ ID NO: 8605 - RNA, 63 nt, synthetic construct
  source 1..63: mol_type = other RNA
tctttggaggctgaatggggtcccccgactctggctttcccccaggtatacatgttcttagtg

SEQ ID NO: 8606 - RNA, 63 nt, synthetic construct
  source 1..63: mol_type = other RNA
tctttggaggctgaatggggtcccccgactctggctttcccccaggtttacatgttcttagtg

SEQ ID NO: 8607 - RNA, 63 nt, synthetic construct
  source 1..63: mol_type = other RNA
tctttggaggctgaatggggtcccccgactctggctttcccccaggtctacatgtttttagtg

SEQ ID NO: 8608 - RNA, 63 nt, synthetic construct
  source 1..63: mol_type = other RNA
tctttggaggctgaatggggtcccccgactctggctttcccccaggtatacatgttcctggtg

SEQ ID NO: 8609 - RNA, 63 nt, synthetic construct
  source 1..63: mol_type = other RNA
tctttggaggctgaatggggtcccccgactctggctttcccccaggtttacatgttcttggtg

SEQ ID NO: 8610 - RNA, 63 nt, synthetic construct
  source 1..63: mol_type = other RNA
tctttggaggctgaatggggtcccccgactctggctttcccccaggtttacatgtttttagtg

SEQ ID NO: 8611 - RNA, 63 nt, synthetic construct
  source 1..63: mol_type = other RNA
tctttggaggctgaatggggtcccccgactctggctttcccccaggtttacatgtttttggtg

SEQ ID NO: 8612 - RNA, 63 nt, synthetic construct
  source 1..63: mol_type = other RNA
tctttggaggctgaatggggtcccccgactctggctttcccccaggtttacatgtttctggtg

SEQ ID NO: 8613 - RNA, 63 nt, synthetic construct
  source 1..63: mol_type = other RNA
tctttggaggctgaatggggtcccccgactctggctttcccccaggtctacatgtttctggtg

SEQ ID NO: 8614 - RNA, 63 nt, synthetic construct
  source 1..63: mol_type = other RNA
tctttggaggctgaatggggtcccccgactctggctttcccccaggtctacatgttcttagtg

SEQ ID NO: 8615 - RNA, 63 nt, synthetic construct
  source 1..63: mol_type = other RNA
tctttggaggctgaatggggtcccccgactctggctttcccccaggtctacatgtttttggtg

SEQ ID NO: 8616 - RNA, 63 nt, synthetic construct
  source 1..63: mol_type = other RNA
tctttggaggctgaatggggtcccccgactctggctttcccccaggtgtacatgttcttagtg

SEQ ID NO: 8617 - RNA, 63 nt, synthetic construct
  source 1..63: mol_type = other RNA
tctttggaggctgaatggggtcccccgactctggctttcccccaggtgtacatgttcttggtg

SEQ ID NO: 8618 - RNA, 63 nt, synthetic construct
  source 1..63: mol_type = other RNA
tctttggaggctgaatggggtcccccgactctggctttcccccaggtttacatgttcctggtg

SEQ ID NO: 8619 - RNA, 63 nt, synthetic construct
  source 1..63: mol_type = other RNA
tctttggaggctgaatggggtcccccgactctggctttcccccaggtgtacatgtttttagtg

SEQ ID NO: 8620 - RNA, 63 nt, synthetic construct
  source 1..63: mol_type = other RNA
tctttggaggctgaatggggtcccccgactctggctttcccccaggtgtacatgtttttggtg

SEQ ID NO: 8621 - RNA, 63 nt, synthetic construct
  source 1..63: mol_type = other RNA
tctttggaggctgaatggggtcccccgactctggctttcccccaggtgtacatgttcctggtg

SEQ ID NO: 8622 - RNA, 63 nt, synthetic construct
  source 1..63: mol_type = other RNA
tctttggaggctgaatggggtcccccgactctggctttcccccaggtgtacatgtttctggtg

SEQ ID NO: 8623 - RNA, 63 nt, synthetic construct
  source 1..63: mol_type = other RNA
tctttggaggctgaatggggtcccccgactctggctttcccccaggtatacatgtttttagtg

SEQ ID NO: 8624 - RNA, 63 nt, synthetic construct
  source 1..63: mol_type = other RNA
tctttggaggctgaatggggtcccccgactctggctttcccccaggtatacatgtttttggtg

SEQ ID NO: 8625 - RNA, 63 nt, synthetic construct
  source 1..63: mol_type = other RNA
tctttggaggctgaatggggtcccccgactctggctttcccccaggtctacatgttcttggtg

SEQ ID NO: 8626 - RNA, 63 nt, synthetic construct
  source 1..63: mol_type = other RNA
tctttggaggctgaatggggtcccccgactctggctttcccccaggtctacatgttcctggtg

SEQ ID NO: 8627 - RNA, 64 nt, synthetic construct
  source 1..64: mol_type = other RNA
ctctttggaggctgaatggggtcccccgactctggctttcccccaggtttacatgtttttggtg

SEQ ID NO: 8628 - RNA, 64 nt, synthetic construct
  source 1..64: mol_type = other RNA
ctctttggaggctgaatggggtcccccgactctggctttcccccaggtctacatgtttctggtg

SEQ ID NO: 8629 - RNA, 64 nt, synthetic construct
  source 1..64: mol_type = other RNA
ctctttggaggctgaatggggtcccccgactctggctttcccccaggtttacatgtttttagtg

SEQ ID NO: 8630 - RNA, 64 nt, synthetic construct
  source 1..64: mol_type = other RNA
ctctttggaggctgaatggggtcccccgactctggctttcccccaggtttacatgtttctggtg

SEQ ID NO: 8631 - RNA, 64 nt, synthetic construct
  source 1..64: mol_type = other RNA
ctctttggaggctgaatggggtcccccgactctggctttcccccaggtttacatgttcttggtg

SEQ ID NO: 8632 - RNA, 64 nt, synthetic construct
  source 1..64: mol_type = other RNA
ctctttggaggctgaatggggtcccccgactctggctttcccccaggtttacatgttcttagtg

SEQ ID NO: 8633 - RNA, 64 nt, synthetic construct
  source 1..64: mol_type = other RNA
ctctttggaggctgaatggggtcccccgactctggctttcccccaggtttacatgttcctggtg

SEQ ID NO: 8634 - RNA, 64 nt, synthetic construct
  source 1..64: mol_type = other RNA
ctctttggaggctgaatggggtcccccgactctggctttcccccaggtgtacatgtttttggtg

SEQ ID NO: 8635 - RNA, 64 nt, synthetic construct
  source 1..64: mol_type = other RNA
ctctttggaggctgaatggggtcccccgactctggctttcccccaggtgtacatgtttttagtg

SEQ ID NO: 8636 - RNA, 64 nt, synthetic construct
  source 1..64: mol_type = other RNA
ctctttggaggctgaatggggtcccccgactctggctttcccccaggtgtacatgtttctggtg

SEQ ID NO: 8637 - RNA, 64 nt, synthetic construct
  source 1..64: mol_type = other RNA
ctctttggaggctgaatggggtcccccgactctggctttcccccaggtctacatgtttttagtg

SEQ ID NO: 8638 - RNA, 64 nt, synthetic construct
  source 1..64: mol_type = other RNA
ctctttggaggctgaatggggtcccccgactctggctttcccccaggtctacatgttcctggtg

SEQ ID NO: 8639 - RNA, 64 nt, synthetic construct
  source 1..64: mol_type = other RNA
ctctttggaggctgaatggggtcccccgactctggctttcccccaggtctacatgttcttggtg

SEQ ID NO: 8640 - RNA, 64 nt, synthetic construct
  source 1..64: mol_type = other RNA
ctctttggaggctgaatggggtcccccgactctggctttcccccaggtctacatgttcttagtg

SEQ ID NO: 8641 - RNA, 64 nt, synthetic construct
  source 1..64: mol_type = other RNA
ctctttggaggctgaatggggtcccccgactctggctttcccccaggtatacatgtttttagtg

SEQ ID NO: 8642 - RNA, 64 nt, synthetic construct
  source 1..64: mol_type = other RNA
ctctttggaggctgaatggggtcccccgactctggctttcccccaggtatacatgtttctggtg

SEQ ID NO: 8643 - RNA, 64 nt, synthetic construct
  source 1..64: mol_type = other RNA
ctctttggaggctgaatggggtcccccgactctggctttcccccaggtatacatgttcttagtg

SEQ ID NO: 8644 - RNA, 64 nt, synthetic construct
  source 1..64: mol_type = other RNA
ctctttggaggctgaatggggtcccccgactctggctttcccccaggtatacatgttcctggtg

SEQ ID NO: 8645 - RNA, 64 nt, synthetic construct
  source 1..64: mol_type = other RNA
ctctttggaggctgaatggggtcccccgactctggctttcccccaggtctacatgtttttggtg

SEQ ID NO: 8646 - RNA, 64 nt, synthetic construct
  source 1..64: mol_type = other RNA
ctctttggaggctgaatggggtcccccgactctggctttcccccaggtgtacatgttcttggtg

SEQ ID NO: 8647 - RNA, 64 nt, synthetic construct
  source 1..64: mol_type = other RNA
ctctttggaggctgaatggggtcccccgactctggctttcccccaggtatacatgtttttggtg

SEQ ID NO: 8648 - RNA, 64 nt, synthetic construct
  source 1..64: mol_type = other RNA
ctctttggaggctgaatggggtcccccgactctggctttcccccaggtgtacatgttcctggtg

SEQ ID NO: 8649 - RNA, 64 nt, synthetic construct
  source 1..64: mol_type = other RNA
ctctttggaggctgaatggggtcccccgactctggctttcccccaggtgtacatgttcttagtg

SEQ ID NO: 8650 - RNA, 64 nt, synthetic construct
  source 1..64: mol_type = other RNA
ctctttggaggctgaatggggtcccccgactctggctttcccccaggtatacatgttcttggtg

SEQ ID NO: 8651 - RNA, 65 nt, synthetic construct
  source 1..65: mol_type = other RNA
cctctttggaggctgaatggggtcccccgactctggctttcccccaggtgtacatgttcttggtg

SEQ ID NO: 8652 - RNA, 65 nt, synthetic construct
  source 1..65: mol_type = other RNA
cctctttggaggctgaatggggtcccccgactctggctttcccccaggtatacatgttcttagtg

SEQ ID NO: 8653 - RNA, 65 nt, synthetic construct
  source 1..65: mol_type = other RNA
cctctttggaggctgaatggggtcccccgactctggctttcccccaggtttacatgttcttagtg

SEQ ID NO: 8654 - RNA, 65 nt, synthetic construct
  source 1..65: mol_type = other RNA
cctctttggaggctgaatggggtcccccgactctggctttcccccaggtttacatgttcctggtg

SEQ ID NO: 8655 - RNA, 65 nt, synthetic construct
  source 1..65: mol_type = other RNA
cctctttggaggctgaatggggtcccccgactctggctttcccccaggtgtacatgtttctggtg

SEQ ID NO: 8656 - RNA, 65 nt, synthetic construct
  source 1..65: mol_type = other RNA
cctctttggaggctgaatggggtcccccgactctggctttcccccaggtgtacatgttcctggtg

SEQ ID NO: 8657 - RNA, 65 nt, synthetic construct
  source 1..65: mol_type = other RNA
cctctttggaggctgaatggggtcccccgactctggctttcccccaggtttacatgtttttggtg

SEQ ID NO: 8658 - RNA, 65 nt, synthetic construct
  source 1..65: mol_type = other RNA
cctctttggaggctgaatggggtcccccgactctggctttcccccaggtttacatgtttctggtg

SEQ ID NO: 8659 - RNA, 65 nt, synthetic construct
  source 1..65: mol_type = other RNA
cctctttggaggctgaatggggtcccccgactctggctttcccccaggtatacatgttcctggtg

SEQ ID NO: 8660 - RNA, 65 nt, synthetic construct
  source 1..65: mol_type = other RNA
cctctttggaggctgaatggggtcccccgactctggctttcccccaggtatacatgtttctggtg

SEQ ID NO: 8661 - RNA, 65 nt, synthetic construct
  source 1..65: mol_type = other RNA
cctctttggaggctgaatggggtcccccgactctggctttcccccaggtctacatgtttttggtg

SEQ ID NO: 8662 - RNA, 65 nt, synthetic construct
  source 1..65: mol_type = other RNA
cctctttggaggctgaatggggtcccccgactctggctttcccccaggtctacatgtttttagtg

SEQ ID NO: 8663 - RNA, 65 nt, synthetic construct
  source 1..65: mol_type = other RNA
cctctttggaggctgaatggggtcccccgactctggctttcccccaggtctacatgtttctggtg

SEQ ID NO: 8664 - RNA, 65 nt, synthetic construct
  source 1..65: mol_type = other RNA
cctctttggaggctgaatggggtcccccgactctggctttcccccaggtctacatgttcttagtg

SEQ ID NO: 8665 - RNA, 65 nt, synthetic construct
  source 1..65: mol_type = other RNA
cctctttggaggctgaatggggtcccccgactctggctttcccccaggtctacatgttcctggtg

SEQ ID NO: 8666 - RNA, 65 nt, synthetic construct
  source 1..65: mol_type = other RNA
cctctttggaggctgaatggggtcccccgactctggctttcccccaggtatacatgtttttggtg

SEQ ID NO: 8667 - RNA, 65 nt, synthetic construct
  source 1..65: mol_type = other RNA
cctctttggaggctgaatggggtcccccgactctggctttcccccaggtatacatgtttttagtg

SEQ ID NO: 8668 - RNA, 65 nt, synthetic construct
  source 1..65: mol_type = other RNA
cctctttggaggctgaatggggtcccccgactctggctttcccccaggtatacatgttcttggtg

SEQ ID NO: 8669 - RNA, 65 nt, synthetic construct
  source 1..65: mol_type = other RNA
cctctttggaggctgaatggggtcccccgactctggctttcccccaggtgtacatgttcttagtg

SEQ ID NO: 8670 - RNA, 65 nt, synthetic construct
  source 1..65: mol_type = other RNA
cctctttggaggctgaatggggtcccccgactctggctttcccccaggtctacatgttcttggtg

SEQ ID NO: 8671 - RNA, 65 nt, synthetic construct
  source 1..65: mol_type = other RNA
cctctttggaggctgaatggggtcccccgactctggctttcccccaggtgtacatgtttttagtg

SEQ ID NO: 8672 - RNA, 65 nt, synthetic construct
  source 1..65: mol_type = other RNA
cctctttggaggctgaatggggtcccccgactctggctttcccccaggtgtacatgtttttggtg

SEQ ID NO: 8673 - RNA, 65 nt, synthetic construct
  source 1..65: mol_type = other RNA
cctctttggaggctgaatggggtcccccgactctggctttcccccaggtttacatgttcttggtg

SEQ ID NO: 8674 - RNA, 65 nt, synthetic construct
  source 1..65: mol_type = other RNA
cctctttggaggctgaatggggtcccccgactctggctttcccccaggtttacatgtttttagtg

SEQ ID NO: 8675 - RNA, 66 nt, synthetic construct
  source 1..66: mol_type = other RNA
gcctctttggaggctgaatggggtcccccgactctggctttcccccaggtatacatgttcctggtg

SEQ ID NO: 8676 - RNA, 66 nt, synthetic construct
  source 1..66: mol_type = other RNA
gcctctttggaggctgaatggggtcccccgactctggctttcccccaggtatacatgtttttggtg

SEQ ID NO: 8677 - RNA, 66 nt, synthetic construct
  source 1..66: mol_type = other RNA
gcctctttggaggctgaatggggtcccccgactctggctttcccccaggtgtacatgttcttggtg

SEQ ID NO: 8678 - RNA, 66 nt, synthetic construct
  source 1..66: mol_type = other RNA
gcctctttggaggctgaatggggtcccccgactctggctttcccccaggtgtacatgtttttagtg

SEQ ID NO: 8679 - RNA, 66 nt, synthetic construct
  source 1..66: mol_type = other RNA
gcctctttggaggctgaatggggtcccccgactctggctttcccccaggtgtacatgtttctggtg

SEQ ID NO: 8680 - RNA, 66 nt, synthetic construct
  source 1..66: mol_type = other RNA
gcctctttggaggctgaatggggtcccccgactctggctttcccccaggtgtacatgtttttggtg

SEQ ID NO: 8681 - RNA, 66 nt, synthetic construct
  source 1..66: mol_type = other RNA
gcctctttggaggctgaatggggtcccccgactctggctttcccccaggtttacatgttcctggtg

SEQ ID NO: 8682 - RNA, 66 nt, synthetic construct
  source 1..66: mol_type = other RNA
gcctctttggaggctgaatggggtcccccgactctggctttcccccaggtttacatgttcttagtg

SEQ ID NO: 8683 - RNA, 66 nt, synthetic construct
  source 1..66: mol_type = other RNA
gcctctttggaggctgaatggggtcccccgactctggctttcccccaggtttacatgtttctggtg

SEQ ID NO: 8684 - RNA, 66 nt, synthetic construct
  source 1..66: mol_type = other RNA
gcctctttggaggctgaatggggtcccccgactctggctttcccccaggtttacatgtttttagtg

SEQ ID NO: 8685 - RNA, 66 nt, synthetic construct
  source 1..66: mol_type = other RNA
gcctctttggaggctgaatggggtcccccgactctggctttcccccaggtttacatgtttttggtg

SEQ ID NO: 8686 - RNA, 66 nt, synthetic construct
  source 1..66: mol_type = other RNA
gcctctttggaggctgaatggggtcccccgactctggctttcccccaggtctacatgttcctggtg

SEQ ID NO: 8687 - RNA, 66 nt, synthetic construct
  source 1..66: mol_type = other RNA
gcctctttggaggctgaatggggtcccccgactctggctttcccccaggtctacatgttcttggtg

SEQ ID NO: 8688 - RNA, 66 nt, synthetic construct
  source 1..66: mol_type = other RNA
gcctctttggaggctgaatggggtcccccgactctggctttcccccaggtctacatgttcttagtg

SEQ ID NO: 8689 - RNA, 66 nt, synthetic construct
  source 1..66: mol_type = other RNA
gcctctttggaggctgaatggggtcccccgactctggctttcccccaggtatacatgttcttagtg

SEQ ID NO: 8690 - RNA, 66 nt, synthetic construct
  source 1..66: mol_type = other RNA
gcctctttggaggctgaatggggtcccccgactctggctttcccccaggtgtacatgttcttagtg

SEQ ID NO: 8691 - RNA, 66 nt, synthetic construct
  source 1..66: mol_type = other RNA
gcctctttggaggctgaatggggtcccccgactctggctttcccccaggtctacatgtttctggtg

SEQ ID NO: 8692 - RNA, 66 nt, synthetic construct
  source 1..66: mol_type = other RNA
gcctctttggaggctgaatggggtcccccgactctggctttcccccaggtatacatgttcttggtg

SEQ ID NO: 8693 - RNA, 66 nt, synthetic construct
  source 1..66: mol_type = other RNA
gcctctttggaggctgaatggggtcccccgactctggctttcccccaggtgtacatgttcctggtg

SEQ ID NO: 8694 - RNA, 66 nt, synthetic construct
  source 1..66: mol_type = other RNA
gcctctttggaggctgaatggggtcccccgactctggctttcccccaggtatacatgtttctggtg

SEQ ID NO: 8695 - RNA, 66 nt, synthetic construct
  source 1..66: mol_type = other RNA
gcctctttggaggctgaatggggtcccccgactctggctttcccccaggtctacatgtttttagtg

SEQ ID NO: 8696 - RNA, 66 nt, synthetic construct
  source 1..66: mol_type = other RNA
gcctctttggaggctgaatggggtcccccgactctggctttcccccaggtctacatgtttttggtg

SEQ ID NO: 8697 - RNA, 66 nt, synthetic construct
  source 1..66: mol_type = other RNA
gcctctttggaggctgaatggggtcccccgactctggctttcccccaggtatacatgtttttagtg

SEQ ID NO: 8698 - RNA, 66 nt, synthetic construct
  source 1..66: mol_type = other RNA
gcctctttggaggctgaatggggtcccccgactctggctttcccccaggtttacatgttcttggtg

SEQ ID NO: 8699 - RNA, 67 nt, synthetic construct
  source 1..67: mol_type = other RNA
agcctctttggaggctgaatggggtcccccgactctggctttcccccaggtctacatgttcctggtg

SEQ ID NO: 8700 - RNA, 67 nt, synthetic construct
  source 1..67: mol_type = other RNA
agcctctttggaggctgaatggggtcccccgactctggctttcccccaggtttacatgtttctggtg

SEQ ID NO: 8701 - RNA, 67 nt, synthetic construct
  source 1..67: mol_type = other RNA
agcctctttggaggctgaatggggtcccccgactctggctttcccccaggtgtacatgttcttggtg

SEQ ID NO: 8702 - RNA, 67 nt, synthetic construct
  source 1..67: mol_type = other RNA
agcctctttggaggctgaatggggtcccccgactctggctttcccccaggtgtacatgttcttagtg

SEQ ID NO: 8703 - RNA, 67 nt, synthetic construct
  source 1..67: mol_type = other RNA
agcctctttggaggctgaatggggtcccccgactctggctttcccccaggtgtacatgttcctggtg

SEQ ID NO: 8704 - RNA, 67 nt, synthetic construct
  source 1..67: mol_type = other RNA
agcctctttggaggctgaatggggtcccccgactctggctttcccccaggtctacatgtttttggtg

SEQ ID NO: 8705 - RNA, 67 nt, synthetic construct
  source 1..67: mol_type = other RNA
agcctctttggaggctgaatggggtcccccgactctggctttcccccaggtctacatgtttttagtg

SEQ ID NO: 8706 - RNA, 67 nt, synthetic construct
  source 1..67: mol_type = other RNA
agcctctttggaggctgaatggggtcccccgactctggctttcccccaggtatacatgtttttggtg

SEQ ID NO: 8707 - RNA, 67 nt, synthetic construct
  source 1..67: mol_type = other RNA
agcctctttggaggctgaatggggtcccccgactctggctttcccccaggtctacatgttcttagtg

SEQ ID NO: 8708 - RNA, 67 nt, synthetic construct
  source 1..67: mol_type = other RNA
agcctctttggaggctgaatggggtcccccgactctggctttcccccaggtttacatgttcttggtg

SEQ ID NO: 8709 - RNA, 67 nt, synthetic construct
  source 1..67: mol_type = other RNA
agcctctttggaggctgaatggggtcccccgactctggctttcccccaggtttacatgttcctggtg

SEQ ID NO: 8710 - RNA, 67 nt, synthetic construct
  source 1..67: mol_type = other RNA
agcctctttggaggctgaatggggtcccccgactctggctttcccccaggtttacatgttcttagtg

SEQ ID NO: 8711 - RNA, 67 nt, synthetic construct
  source 1..67: mol_type = other RNA
agcctctttggaggctgaatggggtcccccgactctggctttcccccaggtctacatgtttctggtg

SEQ ID NO: 8712 - RNA, 67 nt, synthetic construct
  source 1..67: mol_type = other RNA
agcctctttggaggctgaatggggtcccccgactctggctttcccccaggtttacatgtttttagtg

SEQ ID NO: 8713 - RNA, 67 nt, synthetic construct
  source 1..67: mol_type = other RNA
agcctctttggaggctgaatggggtcccccgactctggctttcccccaggtatacatgttcctggtg

SEQ ID NO: 8714 - RNA, 67 nt, synthetic construct
  source 1..67: mol_type = other RNA
agcctctttggaggctgaatggggtcccccgactctggctttcccccaggtttacatgtttttggtg

SEQ ID NO: 8715 - RNA, 67 nt, synthetic construct
  source 1..67: mol_type = other RNA
agcctctttggaggctgaatggggtcccccgactctggctttcccccaggtatacatgttcttggtg

SEQ ID NO: 8716 - RNA, 67 nt, synthetic construct
  source 1..67: mol_type = other RNA
agcctctttggaggctgaatggggtcccccgactctggctttcccccaggtatacatgttcttagtg

SEQ ID NO: 8717 - RNA, 67 nt, synthetic construct
  source 1..67: mol_type = other RNA
agcctctttggaggctgaatggggtcccccgactctggctttcccccaggtgtacatgtttctggtg

SEQ ID NO: 8718 - RNA, 67 nt, synthetic construct
  source 1..67: mol_type = other RNA
agcctctttggaggctgaatggggtcccccgactctggctttcccccaggtctacatgttcttggtg

SEQ ID NO: 8719 - RNA, 67 nt, synthetic construct
  source 1..67: mol_type = other RNA
agcctctttggaggctgaatggggtcccccgactctggctttcccccaggtatacatgtttttagtg

SEQ ID NO: 8720 - RNA, 67 nt, synthetic construct
  source 1..67: mol_type = other RNA
agcctctttggaggctgaatggggtcccccgactctggctttcccccaggtgtacatgtttttggtg

SEQ ID NO: 8721 - RNA, 67 nt, synthetic construct
  source 1..67: mol_type = other RNA
agcctctttggaggctgaatggggtcccccgactctggctttcccccaggtgtacatgtttttagtg

SEQ ID NO: 8722 - RNA, 67 nt, synthetic construct
  source 1..67: mol_type = other RNA
agcctctttggaggctgaatggggtcccccgactctggctttcccccaggtatacatgtttctggtg

SEQ ID NO: 8723 - RNA, 68 nt, synthetic construct
  source 1..68: mol_type = other RNA
aagcctctttggaggctgaatggggtcccccgactctggctttcccccaggtctacatgtttttagtg

SEQ ID NO: 8724 - RNA, 68 nt, synthetic construct
  source 1..68: mol_type = other RNA
aagcctctttggaggctgaatggggtcccccgactctggctttcccccaggtatacatgttcttggtg

SEQ ID NO: 8725 - RNA, 68 nt, synthetic construct
  source 1..68: mol_type = other RNA
aagcctctttggaggctgaatggggtcccccgactctggctttcccccaggtatacatgtttctggtg

SEQ ID NO: 8726 - RNA, 68 nt, synthetic construct
  source 1..68: mol_type = other RNA
aagcctctttggaggctgaatggggtcccccgactctggctttcccccaggtttacatgtttttggtg

SEQ ID NO: 8727 - RNA, 68 nt, synthetic construct
  source 1..68: mol_type = other RNA
aagcctctttggaggctgaatggggtcccccgactctggctttcccccaggtatacatgttcctggtg

SEQ ID NO: 8728 - RNA, 68 nt, synthetic construct
  source 1..68: mol_type = other RNA
aagcctctttggaggctgaatggggtcccccgactctggctttcccccaggtttacatgtttctggtg

SEQ ID NO: 8729 - RNA, 68 nt, synthetic construct
  source 1..68: mol_type = other RNA
aagcctctttggaggctgaatggggtcccccgactctggctttcccccaggtttacatgttcttggtg

SEQ ID NO: 8730 - RNA, 68 nt, synthetic construct
  source 1..68: mol_type = other RNA
aagcctctttggaggctgaatggggtcccccgactctggctttcccccaggtttacatgttcttagtg

SEQ ID NO: 8731 - RNA, 68 nt, synthetic construct
  source 1..68: mol_type = other RNA
aagcctctttggaggctgaatggggtcccccgactctggctttcccccaggtttacatgttcctggtg

SEQ ID NO: 8732 - RNA, 68 nt, synthetic construct
  source 1..68: mol_type = other RNA
aagcctctttggaggctgaatggggtcccccgactctggctttcccccaggtgtacatgtttttggtg

SEQ ID NO: 8733 - RNA, 68 nt, synthetic construct
  source 1..68: mol_type = other RNA
aagcctctttggaggctgaatggggtcccccgactctggctttcccccaggtgtacatgtttttagtg

SEQ ID NO: 8734 - RNA, 68 nt, synthetic construct
  source 1..68: mol_type = other RNA
aagcctctttggaggctgaatggggtcccccgactctggctttcccccaggtgtacatgtttctggtg

SEQ ID NO: 8735 - RNA, 68 nt, synthetic construct
  source 1..68: mol_type = other RNA
aagcctctttggaggctgaatggggtcccccgactctggctttcccccaggtgtacatgttcttggtg

SEQ ID NO: 8736 - RNA, 68 nt, synthetic construct
  source 1..68: mol_type = other RNA
aagcctctttggaggctgaatggggtcccccgactctggctttcccccaggtgtacatgttcttagtg

SEQ ID NO: 8737 - RNA, 68 nt, synthetic construct
  source 1..68: mol_type = other RNA
aagcctctttggaggctgaatggggtcccccgactctggctttcccccaggtgtacatgttcctggtg

SEQ ID NO: 8738 - RNA, 68 nt, synthetic construct
  source 1..68: mol_type = other RNA
aagcctctttggaggctgaatggggtcccccgactctggctttcccccaggtctacatgtttctggtg

SEQ ID NO: 8739 - RNA, 68 nt, synthetic construct
  source 1..68: mol_type = other RNA
aagcctctttggaggctgaatggggtcccccgactctggctttcccccaggtctacatgttcttggtg

SEQ ID NO: 8740 - RNA, 68 nt, synthetic construct
  source 1..68: mol_type = other RNA
aagcctctttggaggctgaatggggtcccccgactctggctttcccccaggtctacatgttcttagtg

SEQ ID NO: 8741 - RNA, 68 nt, synthetic construct
  source 1..68: mol_type = other RNA
aagcctctttggaggctgaatggggtcccccgactctggctttcccccaggtctacatgttcctggtg

SEQ ID NO: 8742 - RNA, 68 nt, synthetic construct
  source 1..68: mol_type = other RNA
aagcctctttggaggctgaatggggtcccccgactctggctttcccccaggtatacatgtttttggtg

SEQ ID NO: 8743 - RNA, 68 nt, synthetic construct
  source 1..68: mol_type = other RNA
aagcctctttggaggctgaatggggtcccccgactctggctttcccccaggtatacatgtttttagtg

SEQ ID NO: 8744 - RNA, 68 nt, synthetic construct
  source 1..68: mol_type = other RNA
aagcctctttggaggctgaatggggtcccccgactctggctttcccccaggtttacatgtttttagtg

SEQ ID NO: 8745 - RNA, 68 nt, synthetic construct
  source 1..68: mol_type = other RNA
aagcctctttggaggctgaatggggtcccccgactctggctttcccccaggtctacatgtttttggtg

SEQ ID NO: 8746 - RNA, 68 nt, synthetic construct
  source 1..68: mol_type = other RNA
aagcctctttggaggctgaatggggtcccccgactctggctttcccccaggtatacatgttcttagtg

SEQ ID NO: 8747 - RNA, 69 nt, synthetic construct
  source 1..69: mol_type = other RNA
aaagcctctttggaggctgaatggggtcccccgactctggctttcccccaggtgtacatgttcctggtg

SEQ ID NO: 8748 - RNA, 69 nt, synthetic construct
  source 1..69: mol_type = other RNA
aaagcctctttggaggctgaatggggtcccccgactctggctttcccccaggtttacatgttcctggtg

SEQ ID NO: 8749 - RNA, 69 nt, synthetic construct
  source 1..69: mol_type = other RNA
aaagcctctttggaggctgaatggggtcccccgactctggctttcccccaggtttacatgttcttagtg

SEQ ID NO: 8750 - RNA, 69 nt, synthetic construct
  source 1..69: mol_type = other RNA
aaagcctctttggaggctgaatggggtcccccgactctggctttcccccaggtttacatgttcttggtg

SEQ ID NO: 8751 - RNA, 69 nt, synthetic construct
  source 1..69: mol_type = other RNA
aaagcctctttggaggctgaatggggtcccccgactctggctttcccccaggtttacatgtttctggtg

SEQ ID NO: 8752 - RNA, 69 nt, synthetic construct
  source 1..69: mol_type = other RNA
aaagcctctttggaggctgaatggggtcccccgactctggctttcccccaggtttacatgtttttagtg

SEQ ID NO: 8753 - RNA, 69 nt, synthetic construct
  source 1..69: mol_type = other RNA
aaagcctctttggaggctgaatggggtcccccgactctggctttcccccaggtttacatgtttttggtg

SEQ ID NO: 8754 - RNA, 69 nt, synthetic construct
  source 1..69: mol_type = other RNA
aaagcctctttggaggctgaatggggtcccccgactctggctttcccccaggtgtacatgtttttggtg

SEQ ID NO: 8755 - RNA, 69 nt, synthetic construct
  source 1..69: mol_type = other RNA
aaagcctctttggaggctgaatggggtcccccgactctggctttcccccaggtctacatgttcctggtg

SEQ ID NO: 8756 - RNA, 69 nt, synthetic construct
  source 1..69: mol_type = other RNA
aaagcctctttggaggctgaatggggtcccccgactctggctttcccccaggtgtacatgttcttggtg

SEQ ID NO: 8757 - RNA, 69 nt, synthetic construct
  source 1..69: mol_type = other RNA
aaagcctctttggaggctgaatggggtcccccgactctggctttcccccaggtatacatgttcctggtg

SEQ ID NO: 8758 - RNA, 69 nt, synthetic construct
  source 1..69: mol_type = other RNA
aaagcctctttggaggctgaatggggtcccccgactctggctttcccccaggtatacatgttcttggtg

SEQ ID NO: 8759 - RNA, 69 nt, synthetic construct
  source 1..69: mol_type = other RNA
aaagcctctttggaggctgaatggggtcccccgactctggctttcccccaggtctacatgtttttggtg

SEQ ID NO: 8760 - RNA, 69 nt, synthetic construct
  source 1..69: mol_type = other RNA
aaagcctctttggaggctgaatggggtcccccgactctggctttcccccaggtctacatgtttttagtg

SEQ ID NO: 8761 - RNA, 69 nt, synthetic construct
  source 1..69: mol_type = other RNA
aaagcctctttggaggctgaatggggtcccccgactctggctttcccccaggtgtacatgtttttagtg

SEQ ID NO: 8762 - RNA, 69 nt, synthetic construct
  source 1..69: mol_type = other RNA
aaagcctctttggaggctgaatggggtcccccgactctggctttcccccaggtgtacatgttcttagtg

SEQ ID NO: 8763 - RNA, 69 nt, synthetic construct
  source 1..69: mol_type = other RNA
aaagcctctttggaggctgaatggggtcccccgactctggctttcccccaggtctacatgtttctggtg

SEQ ID NO: 8764 - RNA, 69 nt, synthetic construct
  source 1..69: mol_type = other RNA
aaagcctctttggaggctgaatggggtcccccgactctggctttcccccaggtctacatgttcttggtg

SEQ ID NO: 8765 - RNA, 69 nt, synthetic construct
  source 1..69: mol_type = other RNA
aaagcctctttggaggctgaatggggtcccccgactctggctttcccccaggtctacatgttcttagtg

SEQ ID NO: 8766 - RNA, 69 nt, synthetic construct
  source 1..69: mol_type = other RNA
aaagcctctttggaggctgaatggggtcccccgactctggctttcccccaggtgtacatgtttctggtg

SEQ ID NO: 8767 - RNA, 69 nt, synthetic construct
  source 1..69: mol_type = other RNA
aaagcctctttggaggctgaatggggtcccccgactctggctttcccccaggtatacatgtttttggtg

SEQ ID NO: 8768 - RNA, 69 nt, synthetic construct
  source 1..69: mol_type = other RNA
aaagcctctttggaggctgaatggggtcccccgactctggctttcccccaggtatacatgtttttagtg

SEQ ID NO: 8769 - RNA, 69 nt, synthetic construct
  source 1..69: mol_type = other RNA
aaagcctctttggaggctgaatggggtcccccgactctggctttcccccaggtatacatgtttctggtg

SEQ ID NO: 8770 - RNA, 69 nt, synthetic construct
  source 1..69: mol_type = other RNA
aaagcctctttggaggctgaatggggtcccccgactctggctttcccccaggtatacatgttcttagtg

SEQ ID NO: 8771 - RNA, 70 nt, synthetic construct
  source 1..70: mol_type = other RNA
caaagcctctttggaggctgaatggggtcccccgactctggctttcccccaggtttacatgtttctggtg

SEQ ID NO: 8772 - RNA, 70 nt, synthetic construct
  source 1..70: mol_type = other RNA
caaagcctctttggaggctgaatggggtcccccgactctggctttcccccaggtatacatgtttctggtg

SEQ ID NO: 8773 - RNA, 70 nt, synthetic construct
  source 1..70: mol_type = other RNA
caaagcctctttggaggctgaatggggtcccccgactctggctttcccccaggtgtacatgtttttagtg

SEQ ID NO: 8774 - RNA, 70 nt, synthetic construct
  source 1..70: mol_type = other RNA
caaagcctctttggaggctgaatggggtcccccgactctggctttcccccaggtatacatgttcttggtg

SEQ ID NO: 8775 - RNA, 70 nt, synthetic construct
  source 1..70: mol_type = other RNA
caaagcctctttggaggctgaatggggtcccccgactctggctttcccccaggtttacatgttcctggtg

SEQ ID NO: 8776 - RNA, 70 nt, synthetic construct
  source 1..70: mol_type = other RNA
caaagcctctttggaggctgaatggggtcccccgactctggctttcccccaggtttacatgtttttagtg

SEQ ID NO: 8777 - RNA, 70 nt, synthetic construct
  source 1..70: mol_type = other RNA
caaagcctctttggaggctgaatggggtcccccgactctggctttcccccaggtatacatgttcttagtg

SEQ ID NO: 8778 - RNA, 70 nt, synthetic construct
  source 1..70: mol_type = other RNA
caaagcctctttggaggctgaatggggtcccccgactctggctttcccccaggtgtacatgttcttggtg

SEQ ID NO: 8779 - RNA, 70 nt, synthetic construct
  source 1..70: mol_type = other RNA
caaagcctctttggaggctgaatggggtcccccgactctggctttcccccaggtttacatgtttttggtg

SEQ ID NO: 8780 - RNA, 70 nt, synthetic construct
  source 1..70: mol_type = other RNA
caaagcctctttggaggctgaatggggtcccccgactctggctttcccccaggtctacatgttcctggtg

SEQ ID NO: 8781 - RNA, 70 nt, synthetic construct
  source 1..70: mol_type = other RNA
caaagcctctttggaggctgaatggggtcccccgactctggctttcccccaggtatacatgttcctggtg

SEQ ID NO: 8782 - RNA, 70 nt, synthetic construct
  source 1..70: mol_type = other RNA
caaagcctctttggaggctgaatggggtcccccgactctggctttcccccaggtttacatgttcttggtg

SEQ ID NO: 8783 - RNA, 70 nt, synthetic construct
  source 1..70: mol_type = other RNA
caaagcctctttggaggctgaatggggtcccccgactctggctttcccccaggtatacatgtttttggtg

SEQ ID NO: 8784 - RNA, 70 nt, synthetic construct
  source 1..70: mol_type = other RNA
caaagcctctttggaggctgaatggggtcccccgactctggctttcccccaggtctacatgtttctggtg

SEQ ID NO: 8785 - RNA, 70 nt, synthetic construct
  source 1..70: mol_type = other RNA
caaagcctctttggaggctgaatggggtcccccgactctggctttcccccaggtctacatgttcttagtg

SEQ ID NO: 8786 - RNA, 70 nt, synthetic construct
  source 1..70: mol_type = other RNA
caaagcctctttggaggctgaatggggtcccccgactctggctttcccccaggtgtacatgtttttggtg

SEQ ID NO: 8787 - RNA, 70 nt, synthetic construct
  source 1..70: mol_type = other RNA
caaagcctctttggaggctgaatggggtcccccgactctggctttcccccaggtctacatgtttttagtg

SEQ ID NO: 8788 - RNA, 70 nt, synthetic construct
  source 1..70: mol_type = other RNA
caaagcctctttggaggctgaatggggtcccccgactctggctttcccccaggtctacatgtttttggtg

SEQ ID NO: 8789 - RNA, 70 nt, synthetic construct
  source 1..70: mol_type = other RNA
caaagcctctttggaggctgaatggggtcccccgactctggctttcccccaggtgtacatgttcctggtg

SEQ ID NO: 8790 - RNA, 70 nt, synthetic construct
  source 1..70: mol_type = other RNA
caaagcctctttggaggctgaatggggtcccccgactctggctttcccccaggtgtacatgttcttagtg

SEQ ID NO: 8791 - RNA, 70 nt, synthetic construct
  source 1..70: mol_type = other RNA
caaagcctctttggaggctgaatggggtcccccgactctggctttcccccaggtatacatgtttttagtg

SEQ ID NO: 8792 - RNA, 70 nt, synthetic construct
  source 1..70: mol_type = other RNA
caaagcctctttggaggctgaatggggtcccccgactctggctttcccccaggtctacatgttcttggtg

SEQ ID NO: 8793 - RNA, 70 nt, synthetic construct
  source 1..70: mol_type = other RNA
caaagcctctttggaggctgaatggggtcccccgactctggctttcccccaggtgtacatgtttctggtg

SEQ ID NO: 8794 - RNA, 70 nt, synthetic construct
  source 1..70: mol_type = other RNA
caaagcctctttggaggctgaatggggtcccccgactctggctttcccccaggtttacatgttcttagtg

SEQ ID NO: 8795 - RNA, 71 nt, synthetic construct
  source 1..71: mol_type = other RNA
gcaaagcctctttggaggctgaatggggtcccccgactctggctttcccccaggtgtacatgttcttggtg

SEQ ID NO: 8796 - RNA, 71 nt, synthetic construct
  source 1..71: mol_type = other RNA
gcaaagcctctttggaggctgaatggggtcccccgactctggctttcccccaggtctacatgttcttagtg

SEQ ID NO: 8797 - RNA, 71 nt, synthetic construct
  source 1..71: mol_type = other RNA
gcaaagcctctttggaggctgaatggggtcccccgactctggctttcccccaggtctacatgttcttggtg

SEQ ID NO: 8798 - RNA, 71 nt, synthetic construct
  source 1..71: mol_type = other RNA
gcaaagcctctttggaggctgaatggggtcccccgactctggctttcccccaggtctacatgtttttggtg

SEQ ID NO: 8799 - RNA, 71 nt, synthetic construct
  source 1..71: mol_type = other RNA
gcaaagcctctttggaggctgaatggggtcccccgactctggctttcccccaggtgtacatgtttttggtg

SEQ ID NO: 8800 - RNA, 71 nt, synthetic construct
  source 1..71: mol_type = other RNA
gcaaagcctctttggaggctgaatggggtcccccgactctggctttcccccaggtgtacatgtttttagtg

SEQ ID NO: 8801 - RNA, 71 nt, synthetic construct
  source 1..71: mol_type = other RNA
gcaaagcctctttggaggctgaatggggtcccccgactctggctttcccccaggtgtacatgttcctggtg

SEQ ID NO: 8802 - RNA, 71 nt, synthetic construct
  source 1..71: mol_type = other RNA
gcaaagcctctttggaggctgaatggggtcccccgactctggctttcccccaggtatacatgtttttagtg

SEQ ID NO: 8803 - RNA, 71 nt, synthetic construct
  source 1..71: mol_type = other RNA
gcaaagcctctttggaggctgaatggggtcccccgactctggctttcccccaggtctacatgtttttagtg

SEQ ID NO: 8804 - RNA, 71 nt, synthetic construct
  source 1..71: mol_type = other RNA
gcaaagcctctttggaggctgaatggggtcccccgactctggctttcccccaggtctacatgtttctggtg

SEQ ID NO: 8805 - RNA, 71 nt, synthetic construct
  source 1..71: mol_type = other RNA
gcaaagcctctttggaggctgaatggggtcccccgactctggctttcccccaggtgtacatgtttctggtg

SEQ ID NO: 8806 - RNA, 71 nt, synthetic construct
  source 1..71: mol_type = other RNA
gcaaagcctctttggaggctgaatggggtcccccgactctggctttcccccaggtttacatgttcttagtg

SEQ ID NO: 8807 - RNA, 71 nt, synthetic construct
  source 1..71: mol_type = other RNA
gcaaagcctctttggaggctgaatggggtcccccgactctggctttcccccaggtttacatgttcctggtg

SEQ ID NO: 8808 - RNA, 71 nt, synthetic construct
  source 1..71: mol_type = other RNA
gcaaagcctctttggaggctgaatggggtcccccgactctggctttcccccaggtatacatgtttttggtg

SEQ ID NO: 8809 - RNA, 71 nt, synthetic construct
  source 1..71: mol_type = other RNA
gcaaagcctctttggaggctgaatggggtcccccgactctggctttcccccaggtttacatgttcttggtg

SEQ ID NO: 8810 - RNA, 71 nt, synthetic construct
  source 1..71: mol_type = other RNA
gcaaagcctctttggaggctgaatggggtcccccgactctggctttcccccaggtttacatgtttctggtg

SEQ ID NO: 8811 - RNA, 71 nt, synthetic construct
  source 1..71: mol_type = other RNA
gcaaagcctctttggaggctgaatggggtcccccgactctggctttcccccaggtctacatgttcctggtg

SEQ ID NO: 8812 - RNA, 71 nt, synthetic construct
  source 1..71: mol_type = other RNA
gcaaagcctctttggaggctgaatggggtcccccgactctggctttcccccaggtttacatgtttttagtg

SEQ ID NO: 8813 - RNA, 71 nt, synthetic construct
  source 1..71: mol_type = other RNA
gcaaagcctctttggaggctgaatggggtcccccgactctggctttcccccaggtttacatgtttttggtg

SEQ ID NO: 8814 - RNA, 71 nt, synthetic construct
  source 1..71: mol_type = other RNA
gcaaagcctctttggaggctgaatggggtcccccgactctggctttcccccaggtatacatgttcctggtg

SEQ ID NO: 8815 - RNA, 71 nt, synthetic construct
  source 1..71: mol_type = other RNA
gcaaagcctctttggaggctgaatggggtcccccgactctggctttcccccaggtatacatgttcttagtg

SEQ ID NO: 8816 - RNA, 71 nt, synthetic construct
  source 1..71: mol_type = other RNA
gcaaagcctctttggaggctgaatggggtcccccgactctggctttcccccaggtatacatgttcttggtg

SEQ ID NO: 8817 - RNA, 71 nt, synthetic construct
  source 1..71: mol_type = other RNA
gcaaagcctctttggaggctgaatggggtcccccgactctggctttcccccaggtatacatgtttctggtg

SEQ ID NO: 8818 - RNA, 71 nt, synthetic construct
  source 1..71: mol_type = other RNA
gcaaagcctctttggaggctgaatggggtcccccgactctggctttcccccaggtgtacatgttcttagtg

SEQ ID NO: 8819 - RNA, 72 nt, synthetic construct
  source 1..72: mol_type = other RNA
agcaaagcctctttggaggctgaatggggtcccccgactctggctttcccccaggtgtacatgttcttagtg

SEQ ID NO: 8820 - RNA, 72 nt, synthetic construct
  source 1..72: mol_type = other RNA
agcaaagcctctttggaggctgaatggggtcccccgactctggctttcccccaggtgtacatgttcttggtg

SEQ ID NO: 8821 - RNA, 72 nt, synthetic construct
  source 1..72: mol_type = other RNA
agcaaagcctctttggaggctgaatggggtcccccgactctggctttcccccaggtttacatgtttctggtg

SEQ ID NO: 8822 - RNA, 72 nt, synthetic construct
  source 1..72: mol_type = other RNA
agcaaagcctctttggaggctgaatggggtcccccgactctggctttcccccaggtatacatgtttttggtg

SEQ ID NO: 8823 - RNA, 72 nt, synthetic construct
  source 1..72: mol_type = other RNA
agcaaagcctctttggaggctgaatggggtcccccgactctggctttcccccaggtttacatgtttttggtg

SEQ ID NO: 8824 - RNA, 72 nt, synthetic construct
  source 1..72: mol_type = other RNA
agcaaagcctctttggaggctgaatggggtcccccgactctggctttcccccaggtatacatgttcctggtg

SEQ ID NO: 8825 - RNA, 72 nt, synthetic construct
  source 1..72: mol_type = other RNA
agcaaagcctctttggaggctgaatggggtcccccgactctggctttcccccaggtatacatgttcttagtg

SEQ ID NO: 8826 - RNA, 72 nt, synthetic construct
  source 1..72: mol_type = other RNA
agcaaagcctctttggaggctgaatggggtcccccgactctggctttcccccaggtttacatgttcctggtg

SEQ ID NO: 8827 - RNA, 72 nt, synthetic construct
  source 1..72: mol_type = other RNA
agcaaagcctctttggaggctgaatggggtcccccgactctggctttcccccaggtgtacatgttcctggtg

SEQ ID NO: 8828 - RNA, 72 nt, synthetic construct
  source 1..72: mol_type = other RNA
agcaaagcctctttggaggctgaatggggtcccccgactctggctttcccccaggtttacatgttcttagtg

SEQ ID NO: 8829 - RNA, 72 nt, synthetic construct
  source 1..72: mol_type = other RNA
agcaaagcctctttggaggctgaatggggtcccccgactctggctttcccccaggtctacatgtttttggtg

SEQ ID NO: 8830 - RNA, 72 nt, synthetic construct
  source 1..72: mol_type = other RNA
agcaaagcctctttggaggctgaatggggtcccccgactctggctttcccccaggtgtacatgtttttggtg

SEQ ID NO: 8831 - RNA, 72 nt, synthetic construct
  source 1..72: mol_type = other RNA
agcaaagcctctttggaggctgaatggggtcccccgactctggctttcccccaggtgtacatgtttttagtg

SEQ ID NO: 8832 - RNA, 72 nt, synthetic construct
  source 1..72: mol_type = other RNA
agcaaagcctctttggaggctgaatggggtcccccgactctggctttcccccaggtttacatgtttttagtg

SEQ ID NO: 8833 - RNA, 72 nt, synthetic construct
  source 1..72: mol_type = other RNA
agcaaagcctctttggaggctgaatggggtcccccgactctggctttcccccaggtgtacatgtttctggtg

SEQ ID NO: 8834 - RNA, 72 nt, synthetic construct
  source 1..72: mol_type = other RNA
agcaaagcctctttggaggctgaatggggtcccccgactctggctttcccccaggtctacatgtttttagtg

SEQ ID NO: 8835 - RNA, 72 nt, synthetic construct
  source 1..72: mol_type = other RNA
agcaaagcctctttggaggctgaatggggtcccccgactctggctttcccccaggtctacatgtttctggtg

SEQ ID NO: 8836 - RNA, 72 nt, synthetic construct
  source 1..72: mol_type = other RNA
agcaaagcctctttggaggctgaatggggtcccccgactctggctttcccccaggtctacatgttcttggtg

SEQ ID NO: 8837 - RNA, 72 nt, synthetic construct
  source 1..72: mol_type = other RNA
agcaaagcctctttggaggctgaatggggtcccccgactctggctttcccccaggtctacatgttcttagtg

SEQ ID NO: 8838 - RNA, 72 nt, synthetic construct
  source 1..72: mol_type = other RNA
agcaaagcctctttggaggctgaatggggtcccccgactctggctttcccccaggtctacatgttcctggtg

SEQ ID NO: 8839 - RNA, 72 nt, synthetic construct
  source 1..72: mol_type = other RNA
agcaaagcctctttggaggctgaatggggtcccccgactctggctttcccccaggtatacatgtttttagtg

SEQ ID NO: 8840 - RNA, 72 nt, synthetic construct
  source 1..72: mol_type = other RNA
agcaaagcctctttggaggctgaatggggtcccccgactctggctttcccccaggtatacatgtttctggtg

SEQ ID NO: 8841 - RNA, 72 nt, synthetic construct
  source 1..72: mol_type = other RNA
agcaaagcctctttggaggctgaatggggtcccccgactctggctttcccccaggtatacatgttcttggtg

SEQ ID NO: 8842 - RNA, 72 nt, synthetic construct
  source 1..72: mol_type = other RNA
agcaaagcctctttggaggctgaatggggtcccccgactctggctttcccccaggtttacatgttcttggtg

SEQ ID NO: 8843 - RNA, 73 nt, synthetic construct
  source 1..73: mol_type = other RNA
cagcaaagcctctttggaggctgaatggggtcccccgactctggctttcccccaggtatacatgtttttggtg

SEQ ID NO: 8844 - RNA, 73 nt, synthetic construct
  source 1..73: mol_type = other RNA
cagcaaagcctctttggaggctgaatggggtcccccgactctggctttcccccaggtctacatgttcctggtg

SEQ ID NO: 8845 - RNA, 73 nt, synthetic construct
  source 1..73: mol_type = other RNA
cagcaaagcctctttggaggctgaatggggtcccccgactctggctttcccccaggtttacatgttcttagtg

SEQ ID NO: 8846 - RNA, 73 nt, synthetic construct
  source 1..73: mol_type = other RNA
cagcaaagcctctttggaggctgaatggggtcccccgactctggctttcccccaggtttacatgttcttggtg

SEQ ID NO: 8847 - RNA, 73 nt, synthetic construct
  source 1..73: mol_type = other RNA
cagcaaagcctctttggaggctgaatggggtcccccgactctggctttcccccaggtttacatgtttctggtg

SEQ ID NO: 8848 - RNA, 73 nt, synthetic construct
  source 1..73: mol_type = other RNA
cagcaaagcctctttggaggctgaatggggtcccccgactctggctttcccccaggtttacatgtttttagtg

SEQ ID NO: 8849 - RNA, 73 nt, synthetic construct
  source 1..73: mol_type = other RNA
cagcaaagcctctttggaggctgaatggggtcccccgactctggctttcccccaggtctacatgttcttagtg

SEQ ID NO: 8850 - RNA, 73 nt, synthetic construct
  source 1..73: mol_type = other RNA
cagcaaagcctctttggaggctgaatggggtcccccgactctggctttcccccaggtatacatgtttttagtg

SEQ ID NO: 8851 - RNA, 73 nt, synthetic construct
  source 1..73: mol_type = other RNA
cagcaaagcctctttggaggctgaatggggtcccccgactctggctttcccccaggtatacatgtttctggtg

SEQ ID NO: 8852 - RNA, 73 nt, synthetic construct
  source 1..73: mol_type = other RNA
cagcaaagcctctttggaggctgaatggggtcccccgactctggctttcccccaggtatacatgttcctggtg

SEQ ID NO: 8853 - RNA, 73 nt, synthetic construct
  source 1..73: mol_type = other RNA
cagcaaagcctctttggaggctgaatggggtcccccgactctggctttcccccaggtttacatgtttttggtg

SEQ ID NO: 8854 - RNA, 73 nt, synthetic construct
  source 1..73: mol_type = other RNA
cagcaaagcctctttggaggctgaatggggtcccccgactctggctttcccccaggtgtacatgtttttggtg

SEQ ID NO: 8855 - RNA, 73 nt, synthetic construct
  source 1..73: mol_type = other RNA
cagcaaagcctctttggaggctgaatggggtcccccgactctggctttcccccaggtttacatgttcctggtg

SEQ ID NO: 8856 - RNA, 73 nt, synthetic construct
  source 1..73: mol_type = other RNA
cagcaaagcctctttggaggctgaatggggtcccccgactctggctttcccccaggtgtacatgtttttagtg

SEQ ID NO: 8857 - RNA, 73 nt, synthetic construct
  source 1..73: mol_type = other RNA
cagcaaagcctctttggaggctgaatggggtcccccgactctggctttcccccaggtgtacatgtttctggtg

SEQ ID NO: 8858 - RNA, 73 nt, synthetic construct
  source 1..73: mol_type = other RNA
cagcaaagcctctttggaggctgaatggggtcccccgactctggctttcccccaggtgtacatgttcctggtg

SEQ ID NO: 8859 - RNA, 73 nt, synthetic construct
  source 1..73: mol_type = other RNA
cagcaaagcctctttggaggctgaatggggtcccccgactctggctttcccccaggtctacatgtttttggtg

SEQ ID NO: 8860 - RNA, 73 nt, synthetic construct
  source 1..73: mol_type = other RNA
cagcaaagcctctttggaggctgaatggggtcccccgactctggctttcccccaggtctacatgtttttagtg

SEQ ID NO: 8861 - RNA, 73 nt, synthetic construct
  source 1..73: mol_type = other RNA
cagcaaagcctctttggaggctgaatggggtcccccgactctggctttcccccaggtatacatgttcttagtg

SEQ ID NO: 8862 - RNA, 73 nt, synthetic construct
  source 1..73: mol_type = other RNA
cagcaaagcctctttggaggctgaatggggtcccccgactctggctttcccccaggtctacatgtttctggtg

SEQ ID NO: 8863 - RNA, 73 nt, synthetic construct
  source 1..73: mol_type = other RNA
cagcaaagcctctttggaggctgaatggggtcccccgactctggctttcccccaggtctacatgttcttggtg

SEQ ID NO: 8864 - RNA, 73 nt, synthetic construct
  source 1..73: mol_type = other RNA
cagcaaagcctctttggaggctgaatggggtcccccgactctggctttcccccaggtgtacatgttcttagtg

SEQ ID NO: 8865 - RNA, 73 nt, synthetic construct
  source 1..73: mol_type = other RNA
cagcaaagcctctttggaggctgaatggggtcccccgactctggctttcccccaggtgtacatgttcttggtg

SEQ ID NO: 8866 - RNA, 73 nt, synthetic construct
  source 1..73: mol_type = other RNA
cagcaaagcctctttggaggctgaatggggtcccccgactctggctttcccccaggtatacatgttcttggtg

SEQ ID NO: 8867 - RNA, 74 nt, synthetic construct
  source 1..74: mol_type = other RNA
acagcaaagcctctttggaggctgaatggggtcccccgactctggctttcccccaggtctacatgttcttggtg

SEQ ID NO: 8868 - RNA, 74 nt, synthetic construct
  source 1..74: mol_type = other RNA
acagcaaagcctctttggaggctgaatggggtcccccgactctggctttcccccaggtctacatgtttctggtg

SEQ ID NO: 8869 - RNA, 74 nt, synthetic construct
  source 1..74: mol_type = other RNA
acagcaaagcctctttggaggctgaatggggtcccccgactctggctttcccccaggtgtacatgtttctggtg

SEQ ID NO: 8870 - RNA, 74 nt, synthetic construct
  source 1..74: mol_type = other RNA
acagcaaagcctctttggaggctgaatggggtcccccgactctggctttcccccaggtctacatgtttttggtg

SEQ ID NO: 8871 - RNA, 74 nt, synthetic construct
  source 1..74: mol_type = other RNA
acagcaaagcctctttggaggctgaatggggtcccccgactctggctttcccccaggtctacatgttcctggtg

SEQ ID NO: 8872 - RNA, 74 nt, synthetic construct
  source 1..74: mol_type = other RNA
acagcaaagcctctttggaggctgaatggggtcccccgactctggctttcccccaggtgtacatgttcctggtg

SEQ ID NO: 8873 - RNA, 74 nt, synthetic construct
  source 1..74: mol_type = other RNA
acagcaaagcctctttggaggctgaatggggtcccccgactctggctttcccccaggtatacatgttcttagtg

SEQ ID NO: 8874 - RNA, 74 nt, synthetic construct
  source 1..74: mol_type = other RNA
acagcaaagcctctttggaggctgaatggggtcccccgactctggctttcccccaggtatacatgttcctggtg

SEQ ID NO: 8875 - RNA, 74 nt, synthetic construct
  source 1..74: mol_type = other RNA
acagcaaagcctctttggaggctgaatggggtcccccgactctggctttcccccaggtctacatgttcttagtg

SEQ ID NO: 8876 - RNA, 74 nt, synthetic construct
  source 1..74: mol_type = other RNA
acagcaaagcctctttggaggctgaatggggtcccccgactctggctttcccccaggtctacatgtttttagtg

SEQ ID NO: 8877 - RNA, 74 nt, synthetic construct
  source 1..74: mol_type = other RNA
acagcaaagcctctttggaggctgaatggggtcccccgactctggctttcccccaggtgtacatgtttttagtg

SEQ ID NO: 8878 - RNA, 74 nt, synthetic construct
  source 1..74: mol_type = other RNA
acagcaaagcctctttggaggctgaatggggtcccccgactctggctttcccccaggtatacatgtttttggtg

SEQ ID NO: 8879 - RNA, 74 nt, synthetic construct
  source 1..74: mol_type = other RNA
acagcaaagcctctttggaggctgaatggggtcccccgactctggctttcccccaggtttacatgttcttagtg

SEQ ID NO: 8880 - RNA, 74 nt, synthetic construct
  source 1..74: mol_type = other RNA
acagcaaagcctctttggaggctgaatggggtcccccgactctggctttcccccaggtgtacatgtttttggtg

SEQ ID NO: 8881 - RNA, 74 nt, synthetic construct
  source 1..74: mol_type = other RNA
acagcaaagcctctttggaggctgaatggggtcccccgactctggctttcccccaggtttacatgttcctggtg

SEQ ID NO: 8882 - RNA, 74 nt, synthetic construct
  source 1..74: mol_type = other RNA
acagcaaagcctctttggaggctgaatggggtcccccgactctggctttcccccaggtttacatgttcttggtg

SEQ ID NO: 8883 - RNA, 74 nt, synthetic construct
  source 1..74: mol_type = other RNA
acagcaaagcctctttggaggctgaatggggtcccccgactctggctttcccccaggtgtacatgttcttggtg

SEQ ID NO: 8884 - RNA, 74 nt, synthetic construct
  source 1..74: mol_type = other RNA
acagcaaagcctctttggaggctgaatggggtcccccgactctggctttcccccaggtttacatgtttttagtg

SEQ ID NO: 8885 - RNA, 74 nt, synthetic construct
  source 1..74: mol_type = other RNA
acagcaaagcctctttggaggctgaatggggtcccccgactctggctttcccccaggtttacatgtttttggtg

SEQ ID NO: 8886 - RNA, 74 nt, synthetic construct
  source 1..74: mol_type = other RNA
acagcaaagcctctttggaggctgaatggggtcccccgactctggctttcccccaggtatacatgtttctggtg

SEQ ID NO: 8887 - RNA, 74 nt, synthetic construct
  source 1..74: mol_type = other RNA
acagcaaagcctctttggaggctgaatggggtcccccgactctggctttcccccaggtttacatgtttctggtg

SEQ ID NO: 8888 - RNA, 74 nt, synthetic construct
  source 1..74: mol_type = other RNA
acagcaaagcctctttggaggctgaatggggtcccccgactctggctttcccccaggtatacatgtttttagtg

SEQ ID NO: 8889 - RNA, 74 nt, synthetic construct
  source 1..74: mol_type = other RNA
acagcaaagcctctttggaggctgaatggggtcccccgactctggctttcccccaggtgtacatgttcttagtg

SEQ ID NO: 8890 - RNA, 74 nt, synthetic construct
  source 1..74: mol_type = other RNA
acagcaaagcctctttggaggctgaatggggtcccccgactctggctttcccccaggtatacatgttcttggtg

SEQ ID NO: 8891 - RNA, 75 nt, synthetic construct
  source 1..75: mol_type = other RNA
cacagcaaagcctctttggaggctgaatggggtcccccgactctggctttcccccaggtatacatgtttttagtg

SEQ ID NO: 8892 - RNA, 75 nt, synthetic construct
  source 1..75: mol_type = other RNA
cacagcaaagcctctttggaggctgaatggggtcccccgactctggctttcccccaggtctacatgtttttggtg

SEQ ID NO: 8893 - RNA, 75 nt, synthetic construct
  source 1..75: mol_type = other RNA
cacagcaaagcctctttggaggctgaatggggtcccccgactctggctttcccccaggtatacatgttcctggtg

SEQ ID NO: 8894 - RNA, 75 nt, synthetic construct
  source 1..75: mol_type = other RNA
cacagcaaagcctctttggaggctgaatggggtcccccgactctggctttcccccaggtgtacatgtttctggtg

SEQ ID NO: 8895 - RNA, 75 nt, synthetic construct
  source 1..75: mol_type = other RNA
cacagcaaagcctctttggaggctgaatggggtcccccgactctggctttcccccaggtttacatgtttttggtg

SEQ ID NO: 8896 - RNA, 75 nt, synthetic construct
  source 1..75: mol_type = other RNA
cacagcaaagcctctttggaggctgaatggggtcccccgactctggctttcccccaggtttacatgtttctggtg

SEQ ID NO: 8897 - RNA, 75 nt, synthetic construct
  source 1..75: mol_type = other RNA
cacagcaaagcctctttggaggctgaatggggtcccccgactctggctttcccccaggtttacatgttcttggtg

SEQ ID NO: 8898 - RNA, 75 nt, synthetic construct
  source 1..75: mol_type = other RNA
cacagcaaagcctctttggaggctgaatggggtcccccgactctggctttcccccaggtttacatgttcttagtg

SEQ ID NO: 8899 - RNA, 75 nt, synthetic construct
  source 1..75: mol_type = other RNA
cacagcaaagcctctttggaggctgaatggggtcccccgactctggctttcccccaggtgtacatgtttttggtg

SEQ ID NO: 8900 - RNA, 75 nt, synthetic construct
  source 1..75: mol_type = other RNA
cacagcaaagcctctttggaggctgaatggggtcccccgactctggctttcccccaggtttacatgtttttagtg

SEQ ID NO: 8901 - RNA, 75 nt, synthetic construct
  source 1..75: mol_type = other RNA
cacagcaaagcctctttggaggctgaatggggtcccccgactctggctttcccccaggtgtacatgttcttggtg

SEQ ID NO: 8902 - RNA, 75 nt, synthetic construct
  source 1..75: mol_type = other RNA
cacagcaaagcctctttggaggctgaatggggtcccccgactctggctttcccccaggtgtacatgttcttagtg

SEQ ID NO: 8903 - RNA, 75 nt, synthetic construct
  source 1..75: mol_type = other RNA
cacagcaaagcctctttggaggctgaatggggtcccccgactctggctttcccccaggtctacatgtttttagtg

SEQ ID NO: 8904 - RNA, 75 nt, synthetic construct
  source 1..75: mol_type = other RNA
cacagcaaagcctctttggaggctgaatggggtcccccgactctggctttcccccaggtttacatgttcctggtg

SEQ ID NO: 8905 - RNA, 75 nt, synthetic construct
  source 1..75: mol_type = other RNA
cacagcaaagcctctttggaggctgaatggggtcccccgactctggctttcccccaggtatacatgttcttagtg

SEQ ID NO: 8906 - RNA, 75 nt, synthetic construct
  source 1..75: mol_type = other RNA
cacagcaaagcctctttggaggctgaatggggtcccccgactctggctttcccccaggtctacatgttcttagtg

SEQ ID NO: 8907 - RNA, 75 nt, synthetic construct
  source 1..75: mol_type = other RNA
cacagcaaagcctctttggaggctgaatggggtcccccgactctggctttcccccaggtatacatgttcttggtg

SEQ ID NO: 8908 - RNA, 75 nt, synthetic construct
  source 1..75: mol_type = other RNA
cacagcaaagcctctttggaggctgaatggggtcccccgactctggctttcccccaggtgtacatgtttttagtg

SEQ ID NO: 8909 - RNA, 75 nt, synthetic construct
  source 1..75: mol_type = other RNA
cacagcaaagcctctttggaggctgaatggggtcccccgactctggctttcccccaggtctacatgtttctggtg

SEQ ID NO: 8910 - RNA, 75 nt, synthetic construct
  source 1..75: mol_type = other RNA
cacagcaaagcctctttggaggctgaatggggtcccccgactctggctttcccccaggtctacatgttcttggtg

SEQ ID NO: 8911 - RNA, 75 nt, synthetic construct
  source 1..75: mol_type = other RNA
cacagcaaagcctctttggaggctgaatggggtcccccgactctggctttcccccaggtgtacatgttcctggtg

SEQ ID NO: 8912 - RNA, 75 nt, synthetic construct
  source 1..75: mol_type = other RNA
cacagcaaagcctctttggaggctgaatggggtcccccgactctggctttcccccaggtctacatgttcctggtg

SEQ ID NO: 8913 - RNA, 75 nt, synthetic construct
  source 1..75: mol_type = other RNA
cacagcaaagcctctttggaggctgaatggggtcccccgactctggctttcccccaggtatacatgtttttggtg

SEQ ID NO: 8914 - RNA, 75 nt, synthetic construct
  source 1..75: mol_type = other RNA
cacagcaaagcctctttggaggctgaatggggtcccccgactctggctttcccccaggtatacatgtttctggtg

SEQ ID NO: 8915 - RNA, 76 nt, synthetic construct
  source 1..76: mol_type = other RNA
acacagcaaagcctctttggaggctgaatggggtcccccgactctggctttcccccaggtttacatgtttttggtg

SEQ ID NO: 8916 - RNA, 76 nt, synthetic construct
  source 1..76: mol_type = other RNA
acacagcaaagcctctttggaggctgaatggggtcccccgactctggctttcccccaggtgtacatgttcctggtg

SEQ ID NO: 8917 - RNA, 76 nt, synthetic construct
  source 1..76: mol_type = other RNA
acacagcaaagcctctttggaggctgaatggggtcccccgactctggctttcccccaggtttacatgtttttagtg

SEQ ID NO: 8918 - RNA, 76 nt, synthetic construct
  source 1..76: mol_type = other RNA
acacagcaaagcctctttggaggctgaatggggtcccccgactctggctttcccccaggtttacatgttcttagtg

SEQ ID NO: 8919 - RNA, 76 nt, synthetic construct
  source 1..76: mol_type = other RNA
acacagcaaagcctctttggaggctgaatggggtcccccgactctggctttcccccaggtctacatgtttttagtg

SEQ ID NO: 8920 - RNA, 76 nt, synthetic construct
  source 1..76: mol_type = other RNA
acacagcaaagcctctttggaggctgaatggggtcccccgactctggctttcccccaggtatacatgttcctggtg

SEQ ID NO: 8921 - RNA, 76 nt, synthetic construct
  source 1..76: mol_type = other RNA
acacagcaaagcctctttggaggctgaatggggtcccccgactctggctttcccccaggtttacatgtttctggtg

SEQ ID NO: 8922 - RNA, 76 nt, synthetic construct
  source 1..76: mol_type = other RNA
acacagcaaagcctctttggaggctgaatggggtcccccgactctggctttcccccaggtatacatgtttttagtg

SEQ ID NO: 8923 - RNA, 76 nt, synthetic construct
  source 1..76: mol_type = other RNA
acacagcaaagcctctttggaggctgaatggggtcccccgactctggctttcccccaggtttacatgttcctggtg

SEQ ID NO: 8924 - RNA, 76 nt, synthetic construct
  source 1..76: mol_type = other RNA
acacagcaaagcctctttggaggctgaatggggtcccccgactctggctttcccccaggtttacatgttcttggtg

SEQ ID NO: 8925 - RNA, 76 nt, synthetic construct
  source 1..76: mol_type = other RNA
acacagcaaagcctctttggaggctgaatggggtcccccgactctggctttcccccaggtgtacatgttcttagtg

SEQ ID NO: 8926 - RNA, 76 nt, synthetic construct
  source 1..76: mol_type = other RNA
acacagcaaagcctctttggaggctgaatggggtcccccgactctggctttcccccaggtctacatgtttctggtg

SEQ ID NO: 8927 - RNA, 76 nt, synthetic construct
  source 1..76: mol_type = other RNA
acacagcaaagcctctttggaggctgaatggggtcccccgactctggctttcccccaggtctacatgttcttggtg

SEQ ID NO: 8928 - RNA, 76 nt, synthetic construct
  source 1..76: mol_type = other RNA
acacagcaaagcctctttggaggctgaatggggtcccccgactctggctttcccccaggtctacatgttcttagtg

SEQ ID NO: 8929 - RNA, 76 nt, synthetic construct
  source 1..76: mol_type = other RNA
acacagcaaagcctctttggaggctgaatggggtcccccgactctggctttcccccaggtctacatgttcctggtg

SEQ ID NO: 8930 - RNA, 76 nt, synthetic construct
  source 1..76: mol_type = other RNA
acacagcaaagcctctttggaggctgaatggggtcccccgactctggctttcccccaggtatacatgttcttagtg

SEQ ID NO: 8931 - RNA, 76 nt, synthetic construct
  source 1..76: mol_type = other RNA
acacagcaaagcctctttggaggctgaatggggtcccccgactctggctttcccccaggtatacatgtttctggtg

SEQ ID NO: 8932 - RNA, 76 nt, synthetic construct
  source 1..76: mol_type = other RNA
acacagcaaagcctctttggaggctgaatggggtcccccgactctggctttcccccaggtatacatgttcttggtg

SEQ ID NO: 8933 - RNA, 76 nt, synthetic construct
  source 1..76: mol_type = other RNA
acacagcaaagcctctttggaggctgaatggggtcccccgactctggctttcccccaggtatacatgtttttggtg

SEQ ID NO: 8934 - RNA, 76 nt, synthetic construct
  source 1..76: mol_type = other RNA
acacagcaaagcctctttggaggctgaatggggtcccccgactctggctttcccccaggtctacatgtttttggtg

SEQ ID NO: 8935 - RNA, 76 nt, synthetic construct
  source 1..76: mol_type = other RNA
acacagcaaagcctctttggaggctgaatggggtcccccgactctggctttcccccaggtgtacatgtttctggtg

SEQ ID NO: 8936 - RNA, 76 nt, synthetic construct
  source 1..76: mol_type = other RNA
acacagcaaagcctctttggaggctgaatggggtcccccgactctggctttcccccaggtgtacatgttcttggtg

SEQ ID NO: 8937 - RNA, 76 nt, synthetic construct
  source 1..76: mol_type = other RNA
acacagcaaagcctctttggaggctgaatggggtcccccgactctggctttcccccaggtgtacatgtttttagtg

SEQ ID NO: 8938 - RNA, 76 nt, synthetic construct
  source 1..76: mol_type = other RNA
acacagcaaagcctctttggaggctgaatggggtcccccgactctggctttcccccaggtgtacatgtttttggtg

SEQ ID NO: 8939 - RNA, 77 nt, synthetic construct
  source 1..77: mol_type = other RNA
cacacagcaaagcctctttggaggctgaatggggtcccccgactctggctttcccccaggtgtacatgttcctggtg

SEQ ID NO: 8940 - RNA, 77 nt, synthetic construct
  source 1..77: mol_type = other RNA
cacacagcaaagcctctttggaggctgaatggggtcccccgactctggctttcccccaggtttacatgttcttagtg

SEQ ID NO: 8941 - RNA, 77 nt, synthetic construct
  source 1..77: mol_type = other RNA
cacacagcaaagcctctttggaggctgaatggggtcccccgactctggctttcccccaggtctacatgtttttggtg

SEQ ID NO: 8942 - RNA, 77 nt, synthetic construct
  source 1..77: mol_type = other RNA
cacacagcaaagcctctttggaggctgaatggggtcccccgactctggctttcccccaggtatacatgttcttggtg

SEQ ID NO: 8943 - RNA, 77 nt, synthetic construct
  source 1..77: mol_type = other RNA
cacacagcaaagcctctttggaggctgaatggggtcccccgactctggctttcccccaggtctacatgtttctggtg

SEQ ID NO: 8944 - RNA, 77 nt, synthetic construct
  source 1..77: mol_type = other RNA
cacacagcaaagcctctttggaggctgaatggggtcccccgactctggctttcccccaggtgtacatgttcttagtg

SEQ ID NO: 8945 - RNA, 77 nt, synthetic construct
  source 1..77: mol_type = other RNA
cacacagcaaagcctctttggaggctgaatggggtcccccgactctggctttcccccaggtctacatgtttttagtg

SEQ ID NO: 8946 - RNA, 77 nt, synthetic construct
  source 1..77: mol_type = other RNA
cacacagcaaagcctctttggaggctgaatggggtcccccgactctggctttcccccaggtatacatgttcttagtg

SEQ ID NO: 8947 - RNA, 77 nt, synthetic construct
  source 1..77: mol_type = other RNA
cacacagcaaagcctctttggaggctgaatggggtcccccgactctggctttcccccaggtctacatgttcttagtg

SEQ ID NO: 8948 - RNA, 77 nt, synthetic construct
  source 1..77: mol_type = other RNA
cacacagcaaagcctctttggaggctgaatggggtcccccgactctggctttcccccaggtatacatgtttctggtg

SEQ ID NO: 8949 - RNA, 77 nt, synthetic construct
  source 1..77: mol_type = other RNA
cacacagcaaagcctctttggaggctgaatggggtcccccgactctggctttcccccaggtatacatgtttttggtg

SEQ ID NO: 8950 - RNA, 77 nt, synthetic construct
  source 1..77: mol_type = other RNA
cacacagcaaagcctctttggaggctgaatggggtcccccgactctggctttcccccaggtctacatgttcctggtg

SEQ ID NO: 8951 - RNA, 77 nt, synthetic construct
  source 1..77: mol_type = other RNA
cacacagcaaagcctctttggaggctgaatggggtcccccgactctggctttcccccaggtctacatgttcttggtg

SEQ ID NO: 8952 - RNA, 77 nt, synthetic construct
  source 1..77: mol_type = other RNA
cacacagcaaagcctctttggaggctgaatggggtcccccgactctggctttcccccaggtatacatgtttttagtg

SEQ ID NO: 8953 - RNA, 77 nt, synthetic construct
  source 1..77: mol_type = other RNA
cacacagcaaagcctctttggaggctgaatggggtcccccgactctggctttcccccaggtttacatgtttttggtg

SEQ ID NO: 8954 - RNA, 77 nt, synthetic construct
  source 1..77: mol_type = other RNA
cacacagcaaagcctctttggaggctgaatggggtcccccgactctggctttcccccaggtatacatgttcctggtg

SEQ ID NO: 8955 - RNA, 77 nt, synthetic construct
  source 1..77: mol_type = other RNA
cacacagcaaagcctctttggaggctgaatggggtcccccgactctggctttcccccaggtttacatgtttctggtg

SEQ ID NO: 8956 - RNA, 77 nt, synthetic construct
  source 1..77: mol_type = other RNA
cacacagcaaagcctctttggaggctgaatggggtcccccgactctggctttcccccaggtttacatgttcttggtg

SEQ ID NO: 8957 - RNA, 77 nt, synthetic construct
  source 1..77: mol_type = other RNA
cacacagcaaagcctctttggaggctgaatggggtcccccgactctggctttcccccaggtttacatgttcctggtg

SEQ ID NO: 8958 - RNA, 77 nt, synthetic construct
  source 1..77: mol_type = other RNA
cacacagcaaagcctctttggaggctgaatggggtcccccgactctggctttcccccaggtgtacatgttcttggtg

SEQ ID NO: 8959 - RNA, 77 nt, synthetic construct
  source 1..77: mol_type = other RNA
cacacagcaaagcctctttggaggctgaatggggtcccccgactctggctttcccccaggtgtacatgtttctggtg

SEQ ID NO: 8960 - RNA, 77 nt, synthetic construct
  source 1..77: mol_type = other RNA
cacacagcaaagcctctttggaggctgaatggggtcccccgactctggctttcccccaggtgtacatgtttttagtg

SEQ ID NO: 8961 - RNA, 77 nt, synthetic construct
  source 1..77: mol_type = other RNA
cacacagcaaagcctctttggaggctgaatggggtcccccgactctggctttcccccaggtgtacatgtttttggtg

SEQ ID NO: 8962 - RNA, 77 nt, synthetic construct
  source 1..77: mol_type = other RNA
cacacagcaaagcctctttggaggctgaatggggtcccccgactctggctttcccccaggtttacatgtttttagtg

SEQ ID NO: 8963 - RNA, 78 nt, synthetic construct
  source 1..78: mol_type = other RNA
gcacacagcaaagcctctttggaggctgaatggggtcccccgactctggctttcccccaggtgtacatgttcttagtg

SEQ ID NO: 8964 - RNA, 78 nt, synthetic construct
  source 1..78: mol_type = other RNA
gcacacagcaaagcctctttggaggctgaatggggtcccccgactctggctttcccccaggtctacatgtttctggtg

SEQ ID NO: 8965 - RNA, 78 nt, synthetic construct
  source 1..78: mol_type = other RNA
gcacacagcaaagcctctttggaggctgaatggggtcccccgactctggctttcccccaggtctacatgtttttggtg

SEQ ID NO: 8966 - RNA, 78 nt, synthetic construct
  source 1..78: mol_type = other RNA
gcacacagcaaagcctctttggaggctgaatggggtcccccgactctggctttcccccaggtatacatgttcctggtg

SEQ ID NO: 8967 - RNA, 78 nt, synthetic construct
  source 1..78: mol_type = other RNA
gcacacagcaaagcctctttggaggctgaatggggtcccccgactctggctttcccccaggtatacatgttcttagtg

SEQ ID NO: 8968 - RNA, 78 nt, synthetic construct
  source 1..78: mol_type = other RNA
gcacacagcaaagcctctttggaggctgaatggggtcccccgactctggctttcccccaggtatacatgttcttggtg

SEQ ID NO: 8969 - RNA, 78 nt, synthetic construct
  source 1..78: mol_type = other RNA
gcacacagcaaagcctctttggaggctgaatggggtcccccgactctggctttcccccaggtatacatgtttctggtg

SEQ ID NO: 8970 - RNA, 78 nt, synthetic construct
  source 1..78: mol_type = other RNA
gcacacagcaaagcctctttggaggctgaatggggtcccccgactctggctttcccccaggtatacatgtttttagtg

SEQ ID NO: 8971 - RNA, 78 nt, synthetic construct
  source 1..78: mol_type = other RNA
gcacacagcaaagcctctttggaggctgaatggggtcccccgactctggctttcccccaggtatacatgtttttggtg

SEQ ID NO: 8972 - RNA, 78 nt, synthetic construct
  source 1..78: mol_type = other RNA
gcacacagcaaagcctctttggaggctgaatggggtcccccgactctggctttcccccaggtctacatgttcttagtg

SEQ ID NO: 8973 - RNA, 78 nt, synthetic construct
  source 1..78: mol_type = other RNA
gcacacagcaaagcctctttggaggctgaatggggtcccccgactctggctttcccccaggtctacatgttcttggtg

SEQ ID NO: 8974 - RNA, 78 nt, synthetic construct
  source 1..78: mol_type = other RNA
gcacacagcaaagcctctttggaggctgaatggggtcccccgactctggctttcccccaggtctacatgtttttagtg

SEQ ID NO: 8975 - RNA, 78 nt, synthetic construct
  source 1..78: mol_type = other RNA
gcacacagcaaagcctctttggaggctgaatggggtcccccgactctggctttcccccaggtgtacatgttcctggtg

SEQ ID NO: 8976 - RNA, 78 nt, synthetic construct
  source 1..78: mol_type = other RNA
gcacacagcaaagcctctttggaggctgaatggggtcccccgactctggctttcccccaggtgtacatgttcttggtg

SEQ ID NO: 8977 - RNA, 78 nt, synthetic construct
  source 1..78: mol_type = other RNA
gcacacagcaaagcctctttggaggctgaatggggtcccccgactctggctttcccccaggtgtacatgtttttagtg

SEQ ID NO: 8978 - RNA, 78 nt, synthetic construct
  source 1..78: mol_type = other RNA
gcacacagcaaagcctctttggaggctgaatggggtcccccgactctggctttcccccaggtttacatgttcttagtg

SEQ ID NO: 8979 - RNA, 78 nt, synthetic construct
  source 1..78: mol_type = other RNA
gcacacagcaaagcctctttggaggctgaatggggtcccccgactctggctttcccccaggtttacatgttcttggtg

SEQ ID NO: 8980 - RNA, 78 nt, synthetic construct
  source 1..78: mol_type = other RNA
gcacacagcaaagcctctttggaggctgaatggggtcccccgactctggctttcccccaggtttacatgtttctggtg

SEQ ID NO: 8981 - RNA, 78 nt, synthetic construct
  source 1..78: mol_type = other RNA
gcacacagcaaagcctctttggaggctgaatggggtcccccgactctggctttcccccaggtttacatgtttttagtg

SEQ ID NO: 8982 - RNA, 78 nt, synthetic construct
  source 1..78: mol_type = other RNA
gcacacagcaaagcctctttggaggctgaatggggtcccccgactctggctttcccccaggtttacatgtttttggtg

SEQ ID NO: 8983 - RNA, 78 nt, synthetic construct
  source 1..78: mol_type = other RNA
gcacacagcaaagcctctttggaggctgaatggggtcccccgactctggctttcccccaggtgtacatgtttttggtg

SEQ ID NO: 8984 - RNA, 78 nt, synthetic construct
  source 1..78: mol_type = other RNA
gcacacagcaaagcctctttggaggctgaatggggtcccccgactctggctttcccccaggtctacatgttcctggtg

SEQ ID NO: 8985 - RNA, 78 nt, synthetic construct
  source 1..78: mol_type = other RNA
gcacacagcaaagcctctttggaggctgaatggggtcccccgactctggctttcccccaggtgtacatgtttctggtg

SEQ ID NO: 8986 - RNA, 78 nt, synthetic construct
  source 1..78: mol_type = other RNA
gcacacagcaaagcctctttggaggctgaatggggtcccccgactctggctttcccccaggtttacatgttcctggtg

SEQ ID NO: 8987 - RNA, 79 nt, synthetic construct
  source 1..79: mol_type = other RNA
tgcacacagcaaagcctctttggaggctgaatggggtcccccgactctggctttcccccaggtctacatgttcttagtg

SEQ ID NO: 8988 - RNA, 79 nt, synthetic construct
  source 1..79: mol_type = other RNA
tgcacacagcaaagcctctttggaggctgaatggggtcccccgactctggctttcccccaggtatacatgttcctggtg

SEQ ID NO: 8989 - RNA, 79 nt, synthetic construct
  source 1..79: mol_type = other RNA
tgcacacagcaaagcctctttggaggctgaatggggtcccccgactctggctttcccccaggtctacatgttcctggtg

SEQ ID NO: 8990 - RNA, 79 nt, synthetic construct
  source 1..79: mol_type = other RNA
tgcacacagcaaagcctctttggaggctgaatggggtcccccgactctggctttcccccaggtatacatgttcttagtg

SEQ ID NO: 8991 - RNA, 79 nt, synthetic construct
  source 1..79: mol_type = other RNA
tgcacacagcaaagcctctttggaggctgaatggggtcccccgactctggctttcccccaggtctacatgttcttggtg

SEQ ID NO: 8992 - RNA, 79 nt, synthetic construct
  source 1..79: mol_type = other RNA
tgcacacagcaaagcctctttggaggctgaatggggtcccccgactctggctttcccccaggtctacatgtttctggtg

SEQ ID NO: 8993 - RNA, 79 nt, synthetic construct
  source 1..79: mol_type = other RNA
tgcacacagcaaagcctctttggaggctgaatggggtcccccgactctggctttcccccaggtctacatgtttttggtg

SEQ ID NO: 8994 - RNA, 79 nt, synthetic construct
  source 1..79: mol_type = other RNA
tgcacacagcaaagcctctttggaggctgaatggggtcccccgactctggctttcccccaggtatacatgtttttagtg

SEQ ID NO: 8995 - RNA, 79 nt, synthetic construct
  source 1..79: mol_type = other RNA
tgcacacagcaaagcctctttggaggctgaatggggtcccccgactctggctttcccccaggtgtacatgtttctggtg

SEQ ID NO: 8996 - RNA, 79 nt, synthetic construct
  source 1..79: mol_type = other RNA
tgcacacagcaaagcctctttggaggctgaatggggtcccccgactctggctttcccccaggtgtacatgttcttggtg

SEQ ID NO: 8997 - RNA, 79 nt, synthetic construct
  source 1..79: mol_type = other RNA
tgcacacagcaaagcctctttggaggctgaatggggtcccccgactctggctttcccccaggtgtacatgtttttagtg

SEQ ID NO: 8998 - RNA, 79 nt, synthetic construct
  source 1..79: mol_type = other RNA
tgcacacagcaaagcctctttggaggctgaatggggtcccccgactctggctttcccccaggtctacatgtttttagtg

SEQ ID NO: 8999 - RNA, 79 nt, synthetic construct
  source 1..79: mol_type = other RNA
tgcacacagcaaagcctctttggaggctgaatggggtcccccgactctggctttcccccaggtatacatgtttttggtg

SEQ ID NO: 9000 - RNA, 79 nt, synthetic construct
  source 1..79: mol_type = other RNA
tgcacacagcaaagcctctttggaggctgaatggggtcccccgactctggctttcccccaggtgtacatgttcctggtg

SEQ ID NO: 9001 - RNA, 79 nt, synthetic construct
  source 1..79: mol_type = other RNA
tgcacacagcaaagcctctttggaggctgaatggggtcccccgactctggctttcccccaggtttacatgttcttagtg

SEQ ID NO: 9002 - RNA, 79 nt, synthetic construct
  source 1..79: mol_type = other RNA
tgcacacagcaaagcctctttggaggctgaatggggtcccccgactctggctttcccccaggtgtacatgttcttagtg

SEQ ID NO: 9003 - RNA, 79 nt, synthetic construct
  source 1..79: mol_type = other RNA
tgcacacagcaaagcctctttggaggctgaatggggtcccccgactctggctttcccccaggtttacatgtttttggtg

SEQ ID NO: 9004 - RNA, 79 nt, synthetic construct
  source 1..79: mol_type = other RNA
tgcacacagcaaagcctctttggaggctgaatggggtcccccgactctggctttcccccaggtttacatgtttttagtg

SEQ ID NO: 9005 - RNA, 79 nt, synthetic construct
  source 1..79: mol_type = other RNA
tgcacacagcaaagcctctttggaggctgaatggggtcccccgactctggctttcccccaggtatacatgtttctggtg

SEQ ID NO: 9006 - RNA, 79 nt, synthetic construct
  source 1..79: mol_type = other RNA
tgcacacagcaaagcctctttggaggctgaatggggtcccccgactctggctttcccccaggtttacatgtttctggtg

SEQ ID NO: 9007 - RNA, 79 nt, synthetic construct
  source 1..79: mol_type = other RNA
tgcacacagcaaagcctctttggaggctgaatggggtcccccgactctggctttcccccaggtttacatgttcttggtg

SEQ ID NO: 9008 - RNA, 79 nt, synthetic construct
  source 1..79: mol_type = other RNA
tgcacacagcaaagcctctttggaggctgaatggggtcccccgactctggctttcccccaggtgtacatgtttttggtg

SEQ ID NO: 9009 - RNA, 79 nt, synthetic construct
  source 1..79: mol_type = other RNA
tgcacacagcaaagcctctttggaggctgaatggggtcccccgactctggctttcccccaggtatacatgttcttggtg

SEQ ID NO: 9010 - RNA, 79 nt, synthetic construct
  source 1..79: mol_type = other RNA
tgcacacagcaaagcctctttggaggctgaatggggtcccccgactctggctttcccccaggtttacatgttcctggtg

SEQ ID NO: 9011 - RNA, 80 nt, synthetic construct
  source 1..80: mol_type = other RNA
gtgcacacagcaaagcctctttggaggctgaatggggtcccccgactctggctttcccccaggtgtacatgtttctggtg

SEQ ID NO: 9012 - RNA, 80 nt, synthetic construct
  source 1..80: mol_type = other RNA
gtgcacacagcaaagcctctttggaggctgaatggggtcccccgactctggctttcccccaggtctacatgttcctggtg

SEQ ID NO: 9013 - RNA, 80 nt, synthetic construct
  source 1..80: mol_type = other RNA
gtgcacacagcaaagcctctttggaggctgaatggggtcccccgactctggctttcccccaggtatacatgttcctggtg

SEQ ID NO: 9014 - RNA, 80 nt, synthetic construct
  source 1..80: mol_type = other RNA
gtgcacacagcaaagcctctttggaggctgaatggggtcccccgactctggctttcccccaggtatacatgtttttagtg

SEQ ID NO: 9015 - RNA, 80 nt, synthetic construct
  source 1..80: mol_type = other RNA
gtgcacacagcaaagcctctttggaggctgaatggggtcccccgactctggctttcccccaggtatacatgttcttggtg

SEQ ID NO: 9016 - RNA, 80 nt, synthetic construct
  source 1..80: mol_type = other RNA
gtgcacacagcaaagcctctttggaggctgaatggggtcccccgactctggctttcccccaggtatacatgttcttagtg

SEQ ID NO: 9017 - RNA, 80 nt, synthetic construct
  source 1..80: mol_type = other RNA
gtgcacacagcaaagcctctttggaggctgaatggggtcccccgactctggctttcccccaggtctacatgtttttggtg

SEQ ID NO: 9018 - RNA, 80 nt, synthetic construct
  source 1..80: mol_type = other RNA
gtgcacacagcaaagcctctttggaggctgaatggggtcccccgactctggctttcccccaggtctacatgtttttagtg

SEQ ID NO: 9019 - RNA, 80 nt, synthetic construct
  source 1..80: mol_type = other RNA
gtgcacacagcaaagcctctttggaggctgaatggggtcccccgactctggctttcccccaggtatacatgtttctggtg

SEQ ID NO: 9020 - RNA, 80 nt, synthetic construct
  source 1..80: mol_type = other RNA
gtgcacacagcaaagcctctttggaggctgaatggggtcccccgactctggctttcccccaggtgtacatgtttttagtg

SEQ ID NO: 9021 - RNA, 80 nt, synthetic construct
  source 1..80: mol_type = other RNA
gtgcacacagcaaagcctctttggaggctgaatggggtcccccgactctggctttcccccaggtttacatgttcctggtg

SEQ ID NO: 9022 - RNA, 80 nt, synthetic construct
  source 1..80: mol_type = other RNA
gtgcacacagcaaagcctctttggaggctgaatggggtcccccgactctggctttcccccaggtttacatgttcttagtg

SEQ ID NO: 9023 - RNA, 80 nt, synthetic construct
  source 1..80: mol_type = other RNA
gtgcacacagcaaagcctctttggaggctgaatggggtcccccgactctggctttcccccaggtttacatgttcttggtg

SEQ ID NO: 9024 - RNA, 80 nt, synthetic construct
  source 1..80: mol_type = other RNA
gtgcacacagcaaagcctctttggaggctgaatggggtcccccgactctggctttcccccaggtgtacatgttcttagtg

SEQ ID NO: 9025 - RNA, 80 nt, synthetic construct
  source 1..80: mol_type = other RNA
gtgcacacagcaaagcctctttggaggctgaatggggtcccccgactctggctttcccccaggtgtacatgttcctggtg

SEQ ID NO: 9026 - RNA, 80 nt, synthetic construct
  source 1..80: mol_type = other RNA
gtgcacacagcaaagcctctttggaggctgaatggggtcccccgactctggctttcccccaggtatacatgtttttggtg

SEQ ID NO: 9027 - RNA, 80 nt, synthetic construct
  source 1..80: mol_type = other RNA
gtgcacacagcaaagcctctttggaggctgaatggggtcccccgactctggctttcccccaggtctacatgttcttagtg

SEQ ID NO: 9028 - RNA, 80 nt, synthetic construct
  source 1..80: mol_type = other RNA
gtgcacacagcaaagcctctttggaggctgaatggggtcccccgactctggctttcccccaggtctacatgtttctggtg

SEQ ID NO: 9029 - RNA, 80 nt, synthetic construct
  source 1..80: mol_type = other RNA
gtgcacacagcaaagcctctttggaggctgaatggggtcccccgactctggctttcccccaggtgtacatgtttttggtg

SEQ ID NO: 9030 - RNA, 80 nt, synthetic construct
  source 1..80: mol_type = other RNA
gtgcacacagcaaagcctctttggaggctgaatggggtcccccgactctggctttcccccaggtgtacatgttcttggtg

SEQ ID NO: 9031 - RNA, 80 nt, synthetic construct
  source 1..80: mol_type = other RNA
gtgcacacagcaaagcctctttggaggctgaatggggtcccccgactctggctttcccccaggtttacatgtttttggtg

SEQ ID NO: 9032 - RNA, 80 nt, synthetic construct
  source 1..80: mol_type = other RNA
gtgcacacagcaaagcctctttggaggctgaatggggtcccccgactctggctttcccccaggtttacatgtttttagtg

SEQ ID NO: 9033 - RNA, 80 nt, synthetic construct
  source 1..80: mol_type = other RNA
gtgcacacagcaaagcctctttggaggctgaatggggtcccccgactctggctttcccccaggtctacatgttcttggtg

SEQ ID NO: 9034 - RNA, 80 nt, synthetic construct
  source 1..80: mol_type = other RNA
gtgcacacagcaaagcctctttggaggctgaatggggtcccccgactctggctttcccccaggtttacatgtttctggtg

SEQ ID NO: 9035 - RNA, 81 nt, synthetic construct
  source 1..81: mol_type = other RNA
ggtgcacacagcaaagcctctttggaggctgaatggggtcccccgactctggctttcccccaggtgtacatgtttttggtg

SEQ ID NO: 9036 - RNA, 81 nt, synthetic construct
  source 1..81: mol_type = other RNA
ggtgcacacagcaaagcctctttggaggctgaatggggtcccccgactctggctttcccccaggtatacatgttcctggtg

SEQ ID NO: 9037 - RNA, 81 nt, synthetic construct
  source 1..81: mol_type = other RNA
ggtgcacacagcaaagcctctttggaggctgaatggggtcccccgactctggctttcccccaggtatacatgttcttagtg

SEQ ID NO: 9038 - RNA, 81 nt, synthetic construct
  source 1..81: mol_type = other RNA
ggtgcacacagcaaagcctctttggaggctgaatggggtcccccgactctggctttcccccaggtatacatgttcttggtg

SEQ ID NO: 9039 - RNA, 81 nt, synthetic construct
  source 1..81: mol_type = other RNA
ggtgcacacagcaaagcctctttggaggctgaatggggtcccccgactctggctttcccccaggtatacatgtttttagtg

SEQ ID NO: 9040 - RNA, 81 nt, synthetic construct
  source 1..81: mol_type = other RNA
ggtgcacacagcaaagcctctttggaggctgaatggggtcccccgactctggctttcccccaggtttacatgtttttagtg

SEQ ID NO: 9041 - RNA, 81 nt, synthetic construct
  source 1..81: mol_type = other RNA
ggtgcacacagcaaagcctctttggaggctgaatggggtcccccgactctggctttcccccaggtctacatgttcctggtg

SEQ ID NO: 9042 - RNA, 81 nt, synthetic construct
  source 1..81: mol_type = other RNA
ggtgcacacagcaaagcctctttggaggctgaatggggtcccccgactctggctttcccccaggtctacatgttcttagtg

SEQ ID NO: 9043 - RNA, 81 nt, synthetic construct
  source 1..81: mol_type = other RNA
ggtgcacacagcaaagcctctttggaggctgaatggggtcccccgactctggctttcccccaggtatacatgtttctggtg

SEQ ID NO: 9044 - RNA, 81 nt, synthetic construct
  source 1..81: mol_type = other RNA
ggtgcacacagcaaagcctctttggaggctgaatggggtcccccgactctggctttcccccaggtctacatgtttctggtg

SEQ ID NO: 9045 - RNA, 81 nt, synthetic construct
  source 1..81: mol_type = other RNA
ggtgcacacagcaaagcctctttggaggctgaatggggtcccccgactctggctttcccccaggtctacatgtttttggtg

SEQ ID NO: 9046 - RNA, 81 nt, synthetic construct
  source 1..81: mol_type = other RNA
ggtgcacacagcaaagcctctttggaggctgaatggggtcccccgactctggctttcccccaggtgtacatgttcctggtg

SEQ ID NO: 9047 - RNA, 81 nt, synthetic construct
  source 1..81: mol_type = other RNA
ggtgcacacagcaaagcctctttggaggctgaatggggtcccccgactctggctttcccccaggtgtacatgttcttagtg

SEQ ID NO: 9048 - RNA, 81 nt, synthetic construct
  source 1..81: mol_type = other RNA
ggtgcacacagcaaagcctctttggaggctgaatggggtcccccgactctggctttcccccaggtgtacatgttcttggtg

SEQ ID NO: 9049 - RNA, 81 nt, synthetic construct
  source 1..81: mol_type = other RNA
ggtgcacacagcaaagcctctttggaggctgaatggggtcccccgactctggctttcccccaggtgtacatgtttctggtg

SEQ ID NO: 9050 - RNA, 81 nt, synthetic construct
  source 1..81: mol_type = other RNA
ggtgcacacagcaaagcctctttggaggctgaatggggtcccccgactctggctttcccccaggtctacatgtttttagtg

SEQ ID NO: 9051 - RNA, 81 nt, synthetic construct
  source 1..81: mol_type = other RNA
ggtgcacacagcaaagcctctttggaggctgaatggggtcccccgactctggctttcccccaggtttacatgtttttggtg

SEQ ID NO: 9052 - RNA, 81 nt, synthetic construct
  source 1..81: mol_type = other RNA
ggtgcacacagcaaagcctctttggaggctgaatggggtcccccgactctggctttcccccaggtttacatgttcttggtg

SEQ ID NO: 9053 - RNA, 81 nt, synthetic construct
  source 1..81: mol_type = other RNA
ggtgcacacagcaaagcctctttggaggctgaatggggtcccccgactctggctttcccccaggtgtacatgtttttagtg

SEQ ID NO: 9054 - RNA, 81 nt, synthetic construct
  source 1..81: mol_type = other RNA
ggtgcacacagcaaagcctctttggaggctgaatggggtcccccgactctggctttcccccaggtctacatgttcttggtg

SEQ ID NO: 9055 - RNA, 81 nt, synthetic construct
  source 1..81: mol_type = other RNA
ggtgcacacagcaaagcctctttggaggctgaatggggtcccccgactctggctttcccccaggtttacatgttcctggtg

SEQ ID NO: 9056 - RNA, 81 nt, synthetic construct
  source 1..81: mol_type = other RNA
ggtgcacacagcaaagcctctttggaggctgaatggggtcccccgactctggctttcccccaggtttacatgtttctggtg

SEQ ID NO: 9057 - RNA, 81 nt, synthetic construct
  source 1..81: mol_type = other RNA
ggtgcacacagcaaagcctctttggaggctgaatggggtcccccgactctggctttcccccaggtatacatgtttttggtg

SEQ ID NO: 9058 - RNA, 81 nt, synthetic construct
  source 1..81: mol_type = other RNA
ggtgcacacagcaaagcctctttggaggctgaatggggtcccccgactctggctttcccccaggtttacatgttcttagtg

SEQ ID NO: 9059 - RNA, 82 nt, synthetic construct
  source 1..82: mol_type = other RNA
gggtgcacacagcaaagcctctttggaggctgaatggggtcccccgactctggctttcccccaggtctacatgtttctggtg

SEQ ID NO: 9060 - RNA, 82 nt, synthetic construct
  source 1..82: mol_type = other RNA
gggtgcacacagcaaagcctctttggaggctgaatggggtcccccgactctggctttcccccaggtatacatgttcctggtg

SEQ ID NO: 9061 - RNA, 82 nt, synthetic construct
  source 1..82: mol_type = other RNA
gggtgcacacagcaaagcctctttggaggctgaatggggtcccccgactctggctttcccccaggtgtacatgtttctggtg

SEQ ID NO: 9062 - RNA, 82 nt, synthetic construct
  source 1..82: mol_type = other RNA
gggtgcacacagcaaagcctctttggaggctgaatggggtcccccgactctggctttcccccaggtgtacatgttcttggtg

SEQ ID NO: 9063 - RNA, 82 nt, synthetic construct
  source 1..82: mol_type = other RNA
gggtgcacacagcaaagcctctttggaggctgaatggggtcccccgactctggctttcccccaggtttacatgtttttggtg

SEQ ID NO: 9064 - RNA, 82 nt, synthetic construct
  source 1..82: mol_type = other RNA
gggtgcacacagcaaagcctctttggaggctgaatggggtcccccgactctggctttcccccaggtttacatgtttttagtg

SEQ ID NO: 9065 - RNA, 82 nt, synthetic construct
  source 1..82: mol_type = other RNA
gggtgcacacagcaaagcctctttggaggctgaatggggtcccccgactctggctttcccccaggtttacatgtttctggtg

SEQ ID NO: 9066 - RNA, 82 nt, synthetic construct
  source 1..82: mol_type = other RNA
gggtgcacacagcaaagcctctttggaggctgaatggggtcccccgactctggctttcccccaggtttacatgttcttggtg

SEQ ID NO: 9067 - RNA, 82 nt, synthetic construct
  source 1..82: mol_type = other RNA
gggtgcacacagcaaagcctctttggaggctgaatggggtcccccgactctggctttcccccaggtttacatgttcttagtg

SEQ ID NO: 9068 - RNA, 82 nt, synthetic construct
  source 1..82: mol_type = other RNA
gggtgcacacagcaaagcctctttggaggctgaatggggtcccccgactctggctttcccccaggtttacatgttcctggtg

SEQ ID NO: 9069 - RNA, 82 nt, synthetic construct
  source 1..82: mol_type = other RNA
gggtgcacacagcaaagcctctttggaggctgaatggggtcccccgactctggctttcccccaggtgtacatgtttttggtg

SEQ ID NO: 9070 - RNA, 82 nt, synthetic construct
  source 1..82: mol_type = other RNA
gggtgcacacagcaaagcctctttggaggctgaatggggtcccccgactctggctttcccccaggtgtacatgtttttagtg

SEQ ID NO: 9071 - RNA, 82 nt, synthetic construct
  source 1..82: mol_type = other RNA
gggtgcacacagcaaagcctctttggaggctgaatggggtcccccgactctggctttcccccaggtgtacatgttcctggtg

SEQ ID NO: 9072 - RNA, 82 nt, synthetic construct
  source 1..82: mol_type = other RNA
gggtgcacacagcaaagcctctttggaggctgaatggggtcccccgactctggctttcccccaggtatacatgttcttggtg

SEQ ID NO: 9073 - RNA, 82 nt, synthetic construct
  source 1..82: mol_type = other RNA
gggtgcacacagcaaagcctctttggaggctgaatggggtcccccgactctggctttcccccaggtctacatgtttttggtg

SEQ ID NO: 9074 - RNA, 82 nt, synthetic construct
  source 1..82: mol_type = other RNA
gggtgcacacagcaaagcctctttggaggctgaatggggtcccccgactctggctttcccccaggtctacatgtttttagtg

SEQ ID NO: 9075 - RNA, 82 nt, synthetic construct
  source 1..82: mol_type = other RNA
gggtgcacacagcaaagcctctttggaggctgaatggggtcccccgactctggctttcccccaggtctacatgttcttggtg

SEQ ID NO: 9076 - RNA, 82 nt, synthetic construct
  source 1..82: mol_type = other RNA
gggtgcacacagcaaagcctctttggaggctgaatggggtcccccgactctggctttcccccaggtctacatgttcttagtg

SEQ ID NO: 9077 - RNA, 82 nt, synthetic construct
  source 1..82: mol_type = other RNA
gggtgcacacagcaaagcctctttggaggctgaatggggtcccccgactctggctttcccccaggtctacatgttcctggtg

SEQ ID NO: 9078 - RNA, 82 nt, synthetic construct
  source 1..82: mol_type = other RNA
gggtgcacacagcaaagcctctttggaggctgaatggggtcccccgactctggctttcccccaggtatacatgtttttggtg

SEQ ID NO: 9079 - RNA, 82 nt, synthetic construct
  source 1..82: mol_type = other RNA
gggtgcacacagcaaagcctctttggaggctgaatggggtcccccgactctggctttcccccaggtatacatgtttttagtg

SEQ ID NO: 9080 - RNA, 82 nt, synthetic construct
  source 1..82: mol_type = other RNA
gggtgcacacagcaaagcctctttggaggctgaatggggtcccccgactctggctttcccccaggtatacatgtttctggtg

SEQ ID NO: 9081 - RNA, 82 nt, synthetic construct
  source 1..82: mol_type = other RNA
gggtgcacacagcaaagcctctttggaggctgaatggggtcccccgactctggctttcccccaggtatacatgttcttagtg

SEQ ID NO: 9082 - RNA, 82 nt, synthetic construct
  source 1..82: mol_type = other RNA
gggtgcacacagcaaagcctctttggaggctgaatggggtcccccgactctggctttcccccaggtgtacatgttcttagtg

SEQ ID NO: 9083 - RNA, 83 nt, synthetic construct
  source 1..83: mol_type = other RNA
tgggtgcacacagcaaagcctctttggaggctgaatggggtcccccgactctggctttcccccaggtctacatgttcctggtg

SEQ ID NO: 9084 - RNA, 83 nt, synthetic construct
  source 1..83: mol_type = other RNA
tgggtgcacacagcaaagcctctttggaggctgaatggggtcccccgactctggctttcccccaggtctacatgttcttagtg

SEQ ID NO: 9085 - RNA, 83 nt, synthetic construct
  source 1..83: mol_type = other RNA
tgggtgcacacagcaaagcctctttggaggctgaatggggtcccccgactctggctttcccccaggtgtacatgttcttagtg

SEQ ID NO: 9086 - RNA, 83 nt, synthetic construct
  source 1..83: mol_type = other RNA
tgggtgcacacagcaaagcctctttggaggctgaatggggtcccccgactctggctttcccccaggtttacatgttcttagtg

SEQ ID NO: 9087 - RNA, 83 nt, synthetic construct
  source 1..83: mol_type = other RNA
tgggtgcacacagcaaagcctctttggaggctgaatggggtcccccgactctggctttcccccaggtatacatgtttttggtg

SEQ ID NO: 9088 - RNA, 83 nt, synthetic construct
  source 1..83: mol_type = other RNA
tgggtgcacacagcaaagcctctttggaggctgaatggggtcccccgactctggctttcccccaggtatacatgtttttagtg

SEQ ID NO: 9089 - RNA, 83 nt, synthetic construct
  source 1..83: mol_type = other RNA
tgggtgcacacagcaaagcctctttggaggctgaatggggtcccccgactctggctttcccccaggtatacatgttcttagtg

SEQ ID NO: 9090 - RNA, 83 nt, synthetic construct
  source 1..83: mol_type = other RNA
tgggtgcacacagcaaagcctctttggaggctgaatggggtcccccgactctggctttcccccaggtatacatgttcttggtg

SEQ ID NO: 9091 - RNA, 83 nt, synthetic construct
  source 1..83: mol_type = other RNA
tgggtgcacacagcaaagcctctttggaggctgaatggggtcccccgactctggctttcccccaggtatacatgtttctggtg

SEQ ID NO: 9092 - RNA, 83 nt, synthetic construct
  source 1..83: mol_type = other RNA
tgggtgcacacagcaaagcctctttggaggctgaatggggtcccccgactctggctttcccccaggtgtacatgttcttggtg

SEQ ID NO: 9093 - RNA, 83 nt, synthetic construct
  source 1..83: mol_type = other RNA
tgggtgcacacagcaaagcctctttggaggctgaatggggtcccccgactctggctttcccccaggtgtacatgtttctggtg

SEQ ID NO: 9094 - RNA, 83 nt, synthetic construct
  source 1..83: mol_type = other RNA
tgggtgcacacagcaaagcctctttggaggctgaatggggtcccccgactctggctttcccccaggtgtacatgtttttagtg

SEQ ID NO: 9095 - RNA, 83 nt, synthetic construct
  source 1..83: mol_type = other RNA
tgggtgcacacagcaaagcctctttggaggctgaatggggtcccccgactctggctttcccccaggtgtacatgtttttggtg

SEQ ID NO: 9096 - RNA, 83 nt, synthetic construct
  source 1..83: mol_type = other RNA
tgggtgcacacagcaaagcctctttggaggctgaatggggtcccccgactctggctttcccccaggtctacatgttcttggtg

SEQ ID NO: 9097 - RNA, 83 nt, synthetic construct
  source 1..83: mol_type = other RNA
tgggtgcacacagcaaagcctctttggaggctgaatggggtcccccgactctggctttcccccaggtttacatgtttttagtg

SEQ ID NO: 9098 - RNA, 83 nt, synthetic construct
  source 1..83: mol_type = other RNA
tgggtgcacacagcaaagcctctttggaggctgaatggggtcccccgactctggctttcccccaggtttacatgtttctggtg

SEQ ID NO: 9099 - RNA, 83 nt, synthetic construct
  source 1..83: mol_type = other RNA
tgggtgcacacagcaaagcctctttggaggctgaatggggtcccccgactctggctttcccccaggtttacatgttcttggtg

SEQ ID NO: 9100 - RNA, 83 nt, synthetic construct
  source 1..83: mol_type = other RNA
tgggtgcacacagcaaagcctctttggaggctgaatggggtcccccgactctggctttcccccaggtgtacatgttcctggtg

SEQ ID NO: 9101 - RNA, 83 nt, synthetic construct
  source 1..83: mol_type = other RNA
tgggtgcacacagcaaagcctctttggaggctgaatggggtcccccgactctggctttcccccaggtctacatgtttttggtg

SEQ ID NO: 9102 - RNA, 83 nt, synthetic construct
  source 1..83: mol_type = other RNA
tgggtgcacacagcaaagcctctttggaggctgaatggggtcccccgactctggctttcccccaggtatacatgttcctggtg

SEQ ID NO: 9103 - RNA, 83 nt, synthetic construct
  source 1..83: mol_type = other RNA
tgggtgcacacagcaaagcctctttggaggctgaatggggtcccccgactctggctttcccccaggtttacatgttcctggtg

SEQ ID NO: 9104 - RNA, 83 nt, synthetic construct
  source 1..83: mol_type = other RNA
tgggtgcacacagcaaagcctctttggaggctgaatggggtcccccgactctggctttcccccaggtctacatgtttctggtg

SEQ ID NO: 9105 - RNA, 83 nt, synthetic construct
  source 1..83: mol_type = other RNA
tgggtgcacacagcaaagcctctttggaggctgaatggggtcccccgactctggctttcccccaggtctacatgtttttagtg

SEQ ID NO: 9106 - RNA, 83 nt, synthetic construct
  source 1..83: mol_type = other RNA
tgggtgcacacagcaaagcctctttggaggctgaatggggtcccccgactctggctttcccccaggtttacatgtttttggtg

SEQ ID NO: 9107 - RNA, 84 nt, synthetic construct
  source 1..84: mol_type = other RNA
ctgggtgcacacagcaaagcctctttggaggctgaatggggtcccccgactctggctttcccccaggtgtacatgttcctggtg

SEQ ID NO: 9108 - RNA, 84 nt, synthetic construct
  source 1..84: mol_type = other RNA
ctgggtgcacacagcaaagcctctttggaggctgaatggggtcccccgactctggctttcccccaggtatacatgttcttagtg

SEQ ID NO: 9109 - RNA, 84 nt, synthetic construct
  source 1..84: mol_type = other RNA
ctgggtgcacacagcaaagcctctttggaggctgaatggggtcccccgactctggctttcccccaggtatacatgttcttggtg

SEQ ID NO: 9110 - RNA, 84 nt, synthetic construct
  source 1..84: mol_type = other RNA
ctgggtgcacacagcaaagcctctttggaggctgaatggggtcccccgactctggctttcccccaggtatacatgtttctggtg

SEQ ID NO: 9111 - RNA, 84 nt, synthetic construct
  source 1..84: mol_type = other RNA
ctgggtgcacacagcaaagcctctttggaggctgaatggggtcccccgactctggctttcccccaggtatacatgtttttagtg

SEQ ID NO: 9112 - RNA, 84 nt, synthetic construct
  source 1..84: mol_type = other RNA
ctgggtgcacacagcaaagcctctttggaggctgaatggggtcccccgactctggctttcccccaggtatacatgtttttggtg

SEQ ID NO: 9113 - RNA, 84 nt, synthetic construct
  source 1..84: mol_type = other RNA
ctgggtgcacacagcaaagcctctttggaggctgaatggggtcccccgactctggctttcccccaggtctacatgttcctggtg

SEQ ID NO: 9114 - RNA, 84 nt, synthetic construct
  source 1..84: mol_type = other RNA
ctgggtgcacacagcaaagcctctttggaggctgaatggggtcccccgactctggctttcccccaggtctacatgttcttagtg

SEQ ID NO: 9115 - RNA, 84 nt, synthetic construct
  source 1..84: mol_type = other RNA
ctgggtgcacacagcaaagcctctttggaggctgaatggggtcccccgactctggctttcccccaggtatacatgttcctggtg

SEQ ID NO: 9116 - RNA, 84 nt, synthetic construct
  source 1..84: mol_type = other RNA
ctgggtgcacacagcaaagcctctttggaggctgaatggggtcccccgactctggctttcccccaggtctacatgtttttggtg

SEQ ID NO: 9117 - RNA, 84 nt, synthetic construct
  source 1..84: mol_type = other RNA
ctgggtgcacacagcaaagcctctttggaggctgaatggggtcccccgactctggctttcccccaggtctacatgtttttagtg

SEQ ID NO: 9118 - RNA, 84 nt, synthetic construct
  source 1..84: mol_type = other RNA
ctgggtgcacacagcaaagcctctttggaggctgaatggggtcccccgactctggctttcccccaggtgtacatgttcttggtg

SEQ ID NO: 9119 - RNA, 84 nt, synthetic construct
  source 1..84: mol_type = other RNA
ctgggtgcacacagcaaagcctctttggaggctgaatggggtcccccgactctggctttcccccaggtgtacatgttcttagtg

SEQ ID NO: 9120 - RNA, 84 nt, synthetic construct
  source 1..84: mol_type = other RNA
ctgggtgcacacagcaaagcctctttggaggctgaatggggtcccccgactctggctttcccccaggtgtacatgtttctggtg

SEQ ID NO: 9121 - RNA, 84 nt, synthetic construct
  source 1..84: mol_type = other RNA
ctgggtgcacacagcaaagcctctttggaggctgaatggggtcccccgactctggctttcccccaggtgtacatgtttttagtg

SEQ ID NO: 9122 - RNA, 84 nt, synthetic construct
  source 1..84: mol_type = other RNA
ctgggtgcacacagcaaagcctctttggaggctgaatggggtcccccgactctggctttcccccaggtgtacatgtttttggtg

SEQ ID NO: 9123 - RNA, 84 nt, synthetic construct
  source 1..84: mol_type = other RNA
ctgggtgcacacagcaaagcctctttggaggctgaatggggtcccccgactctggctttcccccaggtttacatgttcttagtg

SEQ ID NO: 9124 - RNA, 84 nt, synthetic construct
  source 1..84: mol_type = other RNA
ctgggtgcacacagcaaagcctctttggaggctgaatggggtcccccgactctggctttcccccaggtttacatgttcttggtg

SEQ ID NO: 9125 - RNA, 84 nt, synthetic construct
  source 1..84: mol_type = other RNA
ctgggtgcacacagcaaagcctctttggaggctgaatggggtcccccgactctggctttcccccaggtttacatgtttctggtg

SEQ ID NO: 9126 - RNA, 84 nt, synthetic construct
  source 1..84: mol_type = other RNA
ctgggtgcacacagcaaagcctctttggaggctgaatggggtcccccgactctggctttcccccaggtttacatgtttttagtg

SEQ ID NO: 9127 - RNA, 84 nt, synthetic construct
  source 1..84: mol_type = other RNA
ctgggtgcacacagcaaagcctctttggaggctgaatggggtcccccgactctggctttcccccaggtttacatgtttttggtg

SEQ ID NO: 9128 - RNA, 84 nt, synthetic construct
  source 1..84: mol_type = other RNA
ctgggtgcacacagcaaagcctctttggaggctgaatggggtcccccgactctggctttcccccaggtctacatgttcttggtg

SEQ ID NO: 9129 - RNA, 84 nt, synthetic construct
  source 1..84: mol_type = other RNA
ctgggtgcacacagcaaagcctctttggaggctgaatggggtcccccgactctggctttcccccaggtttacatgttcctggtg

SEQ ID NO: 9130 - RNA, 84 nt, synthetic construct
  source 1..84: mol_type = other RNA
ctgggtgcacacagcaaagcctctttggaggctgaatggggtcccccgactctggctttcccccaggtctacatgtttctggtg

SEQ ID NO: 9131 - RNA, 85 nt, synthetic construct
  source 1..85: mol_type = other RNA
cctgggtgcacacagcaaagcctctttggaggctgaatggggtcccccgactctggctttcccccaggtgtacatgttcttggtg

SEQ ID NO: 9132 - RNA, 85 nt, synthetic construct
  source 1..85: mol_type = other RNA
cctgggtgcacacagcaaagcctctttggaggctgaatggggtcccccgactctggctttcccccaggtgtacatgttcttagtg

SEQ ID NO: 9133 - RNA, 85 nt, synthetic construct
  source 1..85: mol_type = other RNA
cctgggtgcacacagcaaagcctctttggaggctgaatggggtcccccgactctggctttcccccaggtttacatgtttttggtg

SEQ ID NO: 9134 - RNA, 85 nt, synthetic construct
  source 1..85: mol_type = other RNA
cctgggtgcacacagcaaagcctctttggaggctgaatggggtcccccgactctggctttcccccaggtttacatgtttctggtg

SEQ ID NO: 9135 - RNA, 85 nt, synthetic construct
  source 1..85: mol_type = other RNA
cctgggtgcacacagcaaagcctctttggaggctgaatggggtcccccgactctggctttcccccaggtttacatgttcttggtg

SEQ ID NO: 9136 - RNA, 85 nt, synthetic construct
  source 1..85: mol_type = other RNA
cctgggtgcacacagcaaagcctctttggaggctgaatggggtcccccgactctggctttcccccaggtttacatgttcttagtg

SEQ ID NO: 9137 - RNA, 85 nt, synthetic construct
  source 1..85: mol_type = other RNA
cctgggtgcacacagcaaagcctctttggaggctgaatggggtcccccgactctggctttcccccaggtttacatgttcctggtg

SEQ ID NO: 9138 - RNA, 85 nt, synthetic construct
  source 1..85: mol_type = other RNA
cctgggtgcacacagcaaagcctctttggaggctgaatggggtcccccgactctggctttcccccaggtgtacatgtttttagtg

SEQ ID NO: 9139 - RNA, 85 nt, synthetic construct
  source 1..85: mol_type = other RNA
cctgggtgcacacagcaaagcctctttggaggctgaatggggtcccccgactctggctttcccccaggtgtacatgtttctggtg

SEQ ID NO: 9140 - RNA, 85 nt, synthetic construct
  source 1..85: mol_type = other RNA
cctgggtgcacacagcaaagcctctttggaggctgaatggggtcccccgactctggctttcccccaggtatacatgttcctggtg

SEQ ID NO: 9141 - RNA, 85 nt, synthetic construct
  source 1..85: mol_type = other RNA
cctgggtgcacacagcaaagcctctttggaggctgaatggggtcccccgactctggctttcccccaggtgtacatgtttttggtg

SEQ ID NO: 9142 - RNA, 85 nt, synthetic construct
  source 1..85: mol_type = other RNA
cctgggtgcacacagcaaagcctctttggaggctgaatggggtcccccgactctggctttcccccaggtctacatgttcctggtg

SEQ ID NO: 9143 - RNA, 85 nt, synthetic construct
  source 1..85: mol_type = other RNA
cctgggtgcacacagcaaagcctctttggaggctgaatggggtcccccgactctggctttcccccaggtctacatgtttctggtg

SEQ ID NO: 9144 - RNA, 85 nt, synthetic construct
  source 1..85: mol_type = other RNA
cctgggtgcacacagcaaagcctctttggaggctgaatggggtcccccgactctggctttcccccaggtgtacatgttcctggtg

SEQ ID NO: 9145 - RNA, 85 nt, synthetic construct
  source 1..85: mol_type = other RNA
cctgggtgcacacagcaaagcctctttggaggctgaatggggtcccccgactctggctttcccccaggtatacatgtttttggtg

SEQ ID NO: 9146 - RNA, 85 nt, synthetic construct
  source 1..85: mol_type = other RNA
cctgggtgcacacagcaaagcctctttggaggctgaatggggtcccccgactctggctttcccccaggtctacatgttcttggtg

SEQ ID NO: 9147 - RNA, 85 nt, synthetic construct
  source 1..85: mol_type = other RNA
cctgggtgcacacagcaaagcctctttggaggctgaatggggtcccccgactctggctttcccccaggtctacatgttcttagtg

SEQ ID NO: 9148 - RNA, 85 nt, synthetic construct
  source 1..85: mol_type = other RNA
cctgggtgcacacagcaaagcctctttggaggctgaatggggtcccccgactctggctttcccccaggtttacatgtttttagtg

SEQ ID NO: 9149 - RNA, 85 nt, synthetic construct
  source 1..85: mol_type = other RNA
cctgggtgcacacagcaaagcctctttggaggctgaatggggtcccccgactctggctttcccccaggtatacatgttcttggtg

SEQ ID NO: 9150 - RNA, 85 nt, synthetic construct
  source 1..85: mol_type = other RNA
cctgggtgcacacagcaaagcctctttggaggctgaatggggtcccccgactctggctttcccccaggtatacatgtttctggtg

SEQ ID NO: 9151 - RNA, 85 nt, synthetic construct
  source 1..85: mol_type = other RNA
cctgggtgcacacagcaaagcctctttggaggctgaatggggtcccccgactctggctttcccccaggtctacatgtttttagtg

SEQ ID NO: 9152 - RNA, 85 nt, synthetic construct
  source 1..85: mol_type = other RNA
cctgggtgcacacagcaaagcctctttggaggctgaatggggtcccccgactctggctttcccccaggtatacatgttcttagtg

SEQ ID NO: 9153 - RNA, 85 nt, synthetic construct
  source 1..85: mol_type = other RNA
cctgggtgcacacagcaaagcctctttggaggctgaatggggtcccccgactctggctttcccccaggtatacatgtttttagtg

SEQ ID NO: 9154 - RNA, 85 nt, synthetic construct
  source 1..85: mol_type = other RNA
cctgggtgcacacagcaaagcctctttggaggctgaatggggtcccccgactctggctttcccccaggtctacatgtttttggtg

SEQ ID NO: 9155 - RNA, 86 nt, synthetic construct
  source 1..86: mol_type = other RNA
tcctgggtgcacacagcaaagcctctttggaggctgaatggggtcccccgactctggctttcccccaggtctacatgttcttggtg

SEQ ID NO: 9156 - RNA, 86 nt, synthetic construct
  source 1..86: mol_type = other RNA
tcctgggtgcacacagcaaagcctctttggaggctgaatggggtcccccgactctggctttcccccaggtgtacatgttcctggtg

SEQ ID NO: 9157 - RNA, 86 nt, synthetic construct
  source 1..86: mol_type = other RNA
tcctgggtgcacacagcaaagcctctttggaggctgaatggggtcccccgactctggctttcccccaggtttacatgttcttagtg

SEQ ID NO: 9158 - RNA, 86 nt, synthetic construct
  source 1..86: mol_type = other RNA
tcctgggtgcacacagcaaagcctctttggaggctgaatggggtcccccgactctggctttcccccaggtctacatgttcctggtg

SEQ ID NO: 9159 - RNA, 86 nt, synthetic construct
  source 1..86: mol_type = other RNA
tcctgggtgcacacagcaaagcctctttggaggctgaatggggtcccccgactctggctttcccccaggtctacatgtttctggtg

SEQ ID NO: 9160 - RNA, 86 nt, synthetic construct
  source 1..86: mol_type = other RNA
tcctgggtgcacacagcaaagcctctttggaggctgaatggggtcccccgactctggctttcccccaggtctacatgtttttagtg

SEQ ID NO: 9161 - RNA, 86 nt, synthetic construct
  source 1..86: mol_type = other RNA
tcctgggtgcacacagcaaagcctctttggaggctgaatggggtcccccgactctggctttcccccaggtctacatgtttttggtg

SEQ ID NO: 9162 - RNA, 86 nt, synthetic construct
  source 1..86: mol_type = other RNA
tcctgggtgcacacagcaaagcctctttggaggctgaatggggtcccccgactctggctttcccccaggtgtacatgttcttagtg

SEQ ID NO: 9163 - RNA, 86 nt, synthetic construct
  source 1..86: mol_type = other RNA
tcctgggtgcacacagcaaagcctctttggaggctgaatggggtcccccgactctggctttcccccaggtgtacatgttcttggtg

SEQ ID NO: 9164 - RNA, 86 nt, synthetic construct
  source 1..86: mol_type = other RNA
tcctgggtgcacacagcaaagcctctttggaggctgaatggggtcccccgactctggctttcccccaggtgtacatgtttctggtg

SEQ ID NO: 9165 - RNA, 86 nt, synthetic construct
  source 1..86: mol_type = other RNA
tcctgggtgcacacagcaaagcctctttggaggctgaatggggtcccccgactctggctttcccccaggtgtacatgtttttggtg

SEQ ID NO: 9166 - RNA, 86 nt, synthetic construct
  source 1..86: mol_type = other RNA
tcctgggtgcacacagcaaagcctctttggaggctgaatggggtcccccgactctggctttcccccaggtctacatgttcttagtg

SEQ ID NO: 9167 - RNA, 86 nt, synthetic construct
  source 1..86: mol_type = other RNA
tcctgggtgcacacagcaaagcctctttggaggctgaatggggtcccccgactctggctttcccccaggtttacatgttcctggtg

SEQ ID NO: 9168 - RNA, 86 nt, synthetic construct
  source 1..86: mol_type = other RNA
tcctgggtgcacacagcaaagcctctttggaggctgaatggggtcccccgactctggctttcccccaggtgtacatgtttttagtg

SEQ ID NO: 9169 - RNA, 86 nt, synthetic construct
  source 1..86: mol_type = other RNA
tcctgggtgcacacagcaaagcctctttggaggctgaatggggtcccccgactctggctttcccccaggtttacatgtttctggtg

SEQ ID NO: 9170 - RNA, 86 nt, synthetic construct
  source 1..86: mol_type = other RNA
tcctgggtgcacacagcaaagcctctttggaggctgaatggggtcccccgactctggctttcccccaggtttacatgtttttagtg

SEQ ID NO: 9171 - RNA, 86 nt, synthetic construct
  source 1..86: mol_type = other RNA
tcctgggtgcacacagcaaagcctctttggaggctgaatggggtcccccgactctggctttcccccaggtatacatgttcttggtg

SEQ ID NO: 9172 - RNA, 86 nt, synthetic construct
  source 1..86: mol_type = other RNA
tcctgggtgcacacagcaaagcctctttggaggctgaatggggtcccccgactctggctttcccccaggtttacatgtttttggtg

SEQ ID NO: 9173 - RNA, 86 nt, synthetic construct
  source 1..86: mol_type = other RNA
tcctgggtgcacacagcaaagcctctttggaggctgaatggggtcccccgactctggctttcccccaggtatacatgtttttggtg

SEQ ID NO: 9174 - RNA, 86 nt, synthetic construct
  source 1..86: mol_type = other RNA
tcctgggtgcacacagcaaagcctctttggaggctgaatggggtcccccgactctggctttcccccaggtatacatgttcctggtg

SEQ ID NO: 9175 - RNA, 86 nt, synthetic construct
  source 1..86: mol_type = other RNA
tcctgggtgcacacagcaaagcctctttggaggctgaatggggtcccccgactctggctttcccccaggtatacatgttcttagtg

SEQ ID NO: 9176 - RNA, 86 nt, synthetic construct
  source 1..86: mol_type = other RNA
tcctgggtgcacacagcaaagcctctttggaggctgaatggggtcccccgactctggctttcccccaggtttacatgttcttggtg

SEQ ID NO: 9177 - RNA, 86 nt, synthetic construct
  source 1..86: mol_type = other RNA
tcctgggtgcacacagcaaagcctctttggaggctgaatggggtcccccgactctggctttcccccaggtatacatgtttctggtg

SEQ ID NO: 9178 - RNA, 86 nt, synthetic construct
  source 1..86: mol_type = other RNA
tcctgggtgcacacagcaaagcctctttggaggctgaatggggtcccccgactctggctttcccccaggtatacatgtttttagtg

SEQ ID NO: 9179 - RNA, 87 nt, synthetic construct
  source 1..87: mol_type = other RNA
atcctgggtgcacacagcaaagcctctttggaggctgaatggggtcccccgactctggctttcccccaggtctacatgttcctggtg

SEQ ID NO: 9180 - RNA, 87 nt, synthetic construct
  source 1..87: mol_type = other RNA
atcctgggtgcacacagcaaagcctctttggaggctgaatggggtcccccgactctggctttcccccaggtgtacatgttcttggtg

SEQ ID NO: 9181 - RNA, 87 nt, synthetic construct
  source 1..87: mol_type = other RNA
atcctgggtgcacacagcaaagcctctttggaggctgaatggggtcccccgactctggctttcccccaggtgtacatgttcttagtg

SEQ ID NO: 9182 - RNA, 87 nt, synthetic construct
  source 1..87: mol_type = other RNA
atcctgggtgcacacagcaaagcctctttggaggctgaatggggtcccccgactctggctttcccccaggtctacatgtttctggtg

SEQ ID NO: 9183 - RNA, 87 nt, synthetic construct
  source 1..87: mol_type = other RNA
atcctgggtgcacacagcaaagcctctttggaggctgaatggggtcccccgactctggctttcccccaggtctacatgtttttggtg

SEQ ID NO: 9184 - RNA, 87 nt, synthetic construct
  source 1..87: mol_type = other RNA
atcctgggtgcacacagcaaagcctctttggaggctgaatggggtcccccgactctggctttcccccaggtctacatgtttttagtg

SEQ ID NO: 9185 - RNA, 87 nt, synthetic construct
  source 1..87: mol_type = other RNA
atcctgggtgcacacagcaaagcctctttggaggctgaatggggtcccccgactctggctttcccccaggtctacatgttcttggtg

SEQ ID NO: 9186 - RNA, 87 nt, synthetic construct
  source 1..87: mol_type = other RNA
atcctgggtgcacacagcaaagcctctttggaggctgaatggggtcccccgactctggctttcccccaggtctacatgttcttagtg

SEQ ID NO: 9187 - RNA, 87 nt, synthetic construct
  source 1..87: mol_type = other RNA
atcctgggtgcacacagcaaagcctctttggaggctgaatggggtcccccgactctggctttcccccaggtgtacatgtttctggtg

SEQ ID NO: 9188 - RNA, 87 nt, synthetic construct
  source 1..87: mol_type = other RNA
atcctgggtgcacacagcaaagcctctttggaggctgaatggggtcccccgactctggctttcccccaggtatacatgttcctggtg

SEQ ID NO: 9189 - RNA, 87 nt, synthetic construct
  source 1..87: mol_type = other RNA
atcctgggtgcacacagcaaagcctctttggaggctgaatggggtcccccgactctggctttcccccaggtttacatgtttctggtg

SEQ ID NO: 9190 - RNA, 87 nt, synthetic construct
  source 1..87: mol_type = other RNA
atcctgggtgcacacagcaaagcctctttggaggctgaatggggtcccccgactctggctttcccccaggtgtacatgtttttggtg

SEQ ID NO: 9191 - RNA, 87 nt, synthetic construct
  source 1..87: mol_type = other RNA
atcctgggtgcacacagcaaagcctctttggaggctgaatggggtcccccgactctggctttcccccaggtatacatgtttttagtg

SEQ ID NO: 9192 - RNA, 87 nt, synthetic construct
  source 1..87: mol_type = other RNA
atcctgggtgcacacagcaaagcctctttggaggctgaatggggtcccccgactctggctttcccccaggtatacatgttcttagtg

SEQ ID NO: 9193 - RNA, 87 nt, synthetic construct
  source 1..87: mol_type = other RNA
atcctgggtgcacacagcaaagcctctttggaggctgaatggggtcccccgactctggctttcccccaggtttacatgttcttagtg

SEQ ID NO: 9194 - RNA, 87 nt, synthetic construct
  source 1..87: mol_type = other RNA
atcctgggtgcacacagcaaagcctctttggaggctgaatggggtcccccgactctggctttcccccaggtttacatgttcttggtg

SEQ ID NO: 9195 - RNA, 87 nt, synthetic construct
  source 1..87: mol_type = other RNA
atcctgggtgcacacagcaaagcctctttggaggctgaatggggtcccccgactctggctttcccccaggtttacatgtttttggtg

SEQ ID NO: 9196 - RNA, 87 nt, synthetic construct
  source 1..87: mol_type = other RNA
atcctgggtgcacacagcaaagcctctttggaggctgaatggggtcccccgactctggctttcccccaggtttacatgtttttagtg

SEQ ID NO: 9197 - RNA, 87 nt, synthetic construct
  source 1..87: mol_type = other RNA
atcctgggtgcacacagcaaagcctctttggaggctgaatggggtcccccgactctggctttcccccaggtgtacatgtttttagtg

SEQ ID NO: 9198 - RNA, 87 nt, synthetic construct
  source 1..87: mol_type = other RNA
atcctgggtgcacacagcaaagcctctttggaggctgaatggggtcccccgactctggctttcccccaggtttacatgttcctggtg

SEQ ID NO: 9199 - RNA, 87 nt, synthetic construct
  source 1..87: mol_type = other RNA
atcctgggtgcacacagcaaagcctctttggaggctgaatggggtcccccgactctggctttcccccaggtgtacatgttcctggtg

SEQ ID NO: 9200 - RNA, 87 nt, synthetic construct
  source 1..87: mol_type = other RNA
atcctgggtgcacacagcaaagcctctttggaggctgaatggggtcccccgactctggctttcccccaggtatacatgttcttggtg

SEQ ID NO: 9201 - RNA, 87 nt, synthetic construct
  source 1..87: mol_type = other RNA
atcctgggtgcacacagcaaagcctctttggaggctgaatggggtcccccgactctggctttcccccaggtatacatgtttctggtg

SEQ ID NO: 9202 - RNA, 87 nt, synthetic construct
  source 1..87: mol_type = other RNA
atcctgggtgcacacagcaaagcctctttggaggctgaatggggtcccccgactctggctttcccccaggtatacatgtttttggtg

SEQ ID NO: 9203 - RNA, 88 nt, synthetic construct
  source 1..88: mol_type = other RNA
gatcctgggtgcacacagcaaagcctctttggaggctgaatggggtcccccgactctggctttcccccaggtgtacatgtttttggtg

SEQ ID NO: 9204 - RNA, 88 nt, synthetic construct
  source 1..88: mol_type = other RNA
gatcctgggtgcacacagcaaagcctctttggaggctgaatggggtcccccgactctggctttcccccaggtttacatgttcctggtg

SEQ ID NO: 9205 - RNA, 88 nt, synthetic construct
  source 1..88: mol_type = other RNA
gatcctgggtgcacacagcaaagcctctttggaggctgaatggggtcccccgactctggctttcccccaggtgtacatgttcctggtg

SEQ ID NO: 9206 - RNA, 88 nt, synthetic construct
  source 1..88: mol_type = other RNA
gatcctgggtgcacacagcaaagcctctttggaggctgaatggggtcccccgactctggctttcccccaggtgtacatgtttctggtg

SEQ ID NO: 9207 - RNA, 88 nt, synthetic construct
  source 1..88: mol_type = other RNA
gatcctgggtgcacacagcaaagcctctttggaggctgaatggggtcccccgactctggctttcccccaggtctacatgtttttggtg

SEQ ID NO: 9208 - RNA, 88 nt, synthetic construct
  source 1..88: mol_type = other RNA
gatcctgggtgcacacagcaaagcctctttggaggctgaatggggtcccccgactctggctttcccccaggtctacatgttcctggtg

SEQ ID NO: 9209 - RNA, 88 nt, synthetic construct
  source 1..88: mol_type = other RNA
gatcctgggtgcacacagcaaagcctctttggaggctgaatggggtcccccgactctggctttcccccaggtctacatgtttctggtg

SEQ ID NO: 9210 - RNA, 88 nt, synthetic construct
  source 1..88: mol_type = other RNA
gatcctgggtgcacacagcaaagcctctttggaggctgaatggggtcccccgactctggctttcccccaggtctacatgttcttggtg

SEQ ID NO: 9211 - RNA, 88 nt, synthetic construct
  source 1..88: mol_type = other RNA
gatcctgggtgcacacagcaaagcctctttggaggctgaatggggtcccccgactctggctttcccccaggtctacatgttcttagtg

SEQ ID NO: 9212 - RNA, 88 nt, synthetic construct
  source 1..88: mol_type = other RNA
gatcctgggtgcacacagcaaagcctctttggaggctgaatggggtcccccgactctggctttcccccaggtatacatgtttttggtg

SEQ ID NO: 9213 - RNA, 88 nt, synthetic construct
  source 1..88: mol_type = other RNA
gatcctgggtgcacacagcaaagcctctttggaggctgaatggggtcccccgactctggctttcccccaggtatacatgtttttagtg

SEQ ID NO: 9214 - RNA, 88 nt, synthetic construct
  source 1..88: mol_type = other RNA
gatcctgggtgcacacagcaaagcctctttggaggctgaatggggtcccccgactctggctttcccccaggtatacatgtttctggtg

SEQ ID NO: 9215 - RNA, 88 nt, synthetic construct
  source 1..88: mol_type = other RNA
gatcctgggtgcacacagcaaagcctctttggaggctgaatggggtcccccgactctggctttcccccaggtatacatgttcttggtg

SEQ ID NO: 9216 - RNA, 88 nt, synthetic construct
  source 1..88: mol_type = other RNA
gatcctgggtgcacacagcaaagcctctttggaggctgaatggggtcccccgactctggctttcccccaggtatacatgttcttagtg

SEQ ID NO: 9217 - RNA, 88 nt, synthetic construct
  source 1..88: mol_type = other RNA
gatcctgggtgcacacagcaaagcctctttggaggctgaatggggtcccccgactctggctttcccccaggtgtacatgttcttggtg

SEQ ID NO: 9218 - RNA, 88 nt, synthetic construct
  source 1..88: mol_type = other RNA
gatcctgggtgcacacagcaaagcctctttggaggctgaatggggtcccccgactctggctttcccccaggtttacatgtttttggtg

SEQ ID NO: 9219 - RNA, 88 nt, synthetic construct
  source 1..88: mol_type = other RNA
gatcctgggtgcacacagcaaagcctctttggaggctgaatggggtcccccgactctggctttcccccaggtatacatgttcctggtg

SEQ ID NO: 9220 - RNA, 88 nt, synthetic construct
  source 1..88: mol_type = other RNA
gatcctgggtgcacacagcaaagcctctttggaggctgaatggggtcccccgactctggctttcccccaggtgtacatgtttttagtg

SEQ ID NO: 9221 - RNA, 88 nt, synthetic construct
  source 1..88: mol_type = other RNA
gatcctgggtgcacacagcaaagcctctttggaggctgaatggggtcccccgactctggctttcccccaggtttacatgttcttagtg

SEQ ID NO: 9222 - RNA, 88 nt, synthetic construct
  source 1..88: mol_type = other RNA
gatcctgggtgcacacagcaaagcctctttggaggctgaatggggtcccccgactctggctttcccccaggtttacatgtttctggtg

SEQ ID NO: 9223 - RNA, 88 nt, synthetic construct
  source 1..88: mol_type = other RNA
gatcctgggtgcacacagcaaagcctctttggaggctgaatggggtcccccgactctggctttcccccaggtgtacatgttcttagtg

SEQ ID NO: 9224 - RNA, 88 nt, synthetic construct
  source 1..88: mol_type = other RNA
gatcctgggtgcacacagcaaagcctctttggaggctgaatggggtcccccgactctggctttcccccaggtttacatgtttttagtg

SEQ ID NO: 9225 - RNA, 88 nt, synthetic construct
  source 1..88: mol_type = other RNA
gatcctgggtgcacacagcaaagcctctttggaggctgaatggggtcccccgactctggctttcccccaggtctacatgtttttagtg

SEQ ID NO: 9226 - RNA, 88 nt, synthetic construct
  source 1..88: mol_type = other RNA
gatcctgggtgcacacagcaaagcctctttggaggctgaatggggtcccccgactctggctttcccccaggtttacatgttcttggtg

SEQ ID NO: 9227 - RNA, 89 nt, synthetic construct
  source 1..89: mol_type = other RNA
ggatcctgggtgcacacagcaaagcctctttggaggctgaatggggtcccccgactctggctttcccccaggtctacatgttcttggtg

SEQ ID NO: 9228 - RNA, 89 nt, synthetic construct
  source 1..89: mol_type = other RNA
ggatcctgggtgcacacagcaaagcctctttggaggctgaatggggtcccccgactctggctttcccccaggtctacatgtttctggtg

SEQ ID NO: 9229 - RNA, 89 nt, synthetic construct
  source 1..89: mol_type = other RNA
ggatcctgggtgcacacagcaaagcctctttggaggctgaatggggtcccccgactctggctttcccccaggtctacatgttcctggtg

SEQ ID NO: 9230 - RNA, 89 nt, synthetic construct
  source 1..89: mol_type = other RNA
ggatcctgggtgcacacagcaaagcctctttggaggctgaatggggtcccccgactctggctttcccccaggtctacatgtttttagtg

SEQ ID NO: 9231 - RNA, 89 nt, synthetic construct
  source 1..89: mol_type = other RNA
ggatcctgggtgcacacagcaaagcctctttggaggctgaatggggtcccccgactctggctttcccccaggtgtacatgttcctggtg

SEQ ID NO: 9232 - RNA, 89 nt, synthetic construct
  source 1..89: mol_type = other RNA
ggatcctgggtgcacacagcaaagcctctttggaggctgaatggggtcccccgactctggctttcccccaggtgtacatgttcttagtg

SEQ ID NO: 9233 - RNA, 89 nt, synthetic construct
  source 1..89: mol_type = other RNA
ggatcctgggtgcacacagcaaagcctctttggaggctgaatggggtcccccgactctggctttcccccaggtgtacatgttcttggtg

SEQ ID NO: 9234 - RNA, 89 nt, synthetic construct
  source 1..89: mol_type = other RNA
ggatcctgggtgcacacagcaaagcctctttggaggctgaatggggtcccccgactctggctttcccccaggtctacatgttcttagtg

SEQ ID NO: 9235 - RNA, 89 nt, synthetic construct
  source 1..89: mol_type = other RNA
ggatcctgggtgcacacagcaaagcctctttggaggctgaatggggtcccccgactctggctttcccccaggtgtacatgtttttagtg

SEQ ID NO: 9236 - RNA, 89 nt, synthetic construct
  source 1..89: mol_type = other RNA
ggatcctgggtgcacacagcaaagcctctttggaggctgaatggggtcccccgactctggctttcccccaggtgtacatgtttttggtg

SEQ ID NO: 9237 - RNA, 89 nt, synthetic construct
  source 1..89: mol_type = other RNA
ggatcctgggtgcacacagcaaagcctctttggaggctgaatggggtcccccgactctggctttcccccaggtttacatgttcctggtg

SEQ ID NO: 9238 - RNA, 89 nt, synthetic construct
  source 1..89: mol_type = other RNA
ggatcctgggtgcacacagcaaagcctctttggaggctgaatggggtcccccgactctggctttcccccaggtttacatgttcttagtg

SEQ ID NO: 9239 - RNA, 89 nt, synthetic construct
  source 1..89: mol_type = other RNA
ggatcctgggtgcacacagcaaagcctctttggaggctgaatggggtcccccgactctggctttcccccaggtttacatgtttctggtg

SEQ ID NO: 9240 - RNA, 89 nt, synthetic construct
  source 1..89: mol_type = other RNA
ggatcctgggtgcacacagcaaagcctctttggaggctgaatggggtcccccgactctggctttcccccaggtttacatgtttttagtg

SEQ ID NO: 9241 - RNA, 89 nt, synthetic construct
  source 1..89: mol_type = other RNA
ggatcctgggtgcacacagcaaagcctctttggaggctgaatggggtcccccgactctggctttcccccaggtttacatgtttttggtg

SEQ ID NO: 9242 - RNA, 89 nt, synthetic construct
  source 1..89: mol_type = other RNA
ggatcctgggtgcacacagcaaagcctctttggaggctgaatggggtcccccgactctggctttcccccaggtatacatgtttttggtg

SEQ ID NO: 9243 - RNA, 89 nt, synthetic construct
  source 1..89: mol_type = other RNA
ggatcctgggtgcacacagcaaagcctctttggaggctgaatggggtcccccgactctggctttcccccaggtatacatgtttttagtg

SEQ ID NO: 9244 - RNA, 89 nt, synthetic construct
  source 1..89: mol_type = other RNA
ggatcctgggtgcacacagcaaagcctctttggaggctgaatggggtcccccgactctggctttcccccaggtatacatgtttctggtg

SEQ ID NO: 9245 - RNA, 89 nt, synthetic construct
  source 1..89: mol_type = other RNA
ggatcctgggtgcacacagcaaagcctctttggaggctgaatggggtcccccgactctggctttcccccaggtatacatgttcttggtg

SEQ ID NO: 9246 - RNA, 89 nt, synthetic construct
  source 1..89: mol_type = other RNA
ggatcctgggtgcacacagcaaagcctctttggaggctgaatggggtcccccgactctggctttcccccaggtatacatgttcttagtg

SEQ ID NO: 9247 - RNA, 89 nt, synthetic construct
  source 1..89: mol_type = other RNA
ggatcctgggtgcacacagcaaagcctctttggaggctgaatggggtcccccgactctggctttcccccaggtatacatgttcctggtg

SEQ ID NO: 9248 - RNA, 89 nt, synthetic construct
  source 1..89: mol_type = other RNA
ggatcctgggtgcacacagcaaagcctctttggaggctgaatggggtcccccgactctggctttcccccaggtctacatgtttttggtg

SEQ ID NO: 9249 - RNA, 89 nt, synthetic construct
  source 1..89: mol_type = other RNA
ggatcctgggtgcacacagcaaagcctctttggaggctgaatggggtcccccgactctggctttcccccaggtgtacatgtttctggtg

SEQ ID NO: 9250 - RNA, 89 nt, synthetic construct
  source 1..89: mol_type = other RNA
ggatcctgggtgcacacagcaaagcctctttggaggctgaatggggtcccccgactctggctttcccccaggtttacatgttcttggtg

SEQ ID NO: 9251 - RNA, 90 nt, synthetic construct
  source 1..90: mol_type = other RNA
gggatcctgggtgcacacagcaaagcctctttggaggctgaatggggtcccccgactctggctttcccccaggtgtacatgtttctggtg

SEQ ID NO: 9252 - RNA, 90 nt, synthetic construct
  source 1..90: mol_type = other RNA
gggatcctgggtgcacacagcaaagcctctttggaggctgaatggggtcccccgactctggctttcccccaggtctacatgttcttagtg

SEQ ID NO: 9253 - RNA, 90 nt, synthetic construct
  source 1..90: mol_type = other RNA
gggatcctgggtgcacacagcaaagcctctttggaggctgaatggggtcccccgactctggctttcccccaggtctacatgttcttggtg

SEQ ID NO: 9254 - RNA, 90 nt, synthetic construct
  source 1..90: mol_type = other RNA
gggatcctgggtgcacacagcaaagcctctttggaggctgaatggggtcccccgactctggctttcccccaggtctacatgtttctggtg

SEQ ID NO: 9255 - RNA, 90 nt, synthetic construct
  source 1..90: mol_type = other RNA
gggatcctgggtgcacacagcaaagcctctttggaggctgaatggggtcccccgactctggctttcccccaggtctacatgtttttagtg

SEQ ID NO: 9256 - RNA, 90 nt, synthetic construct
  source 1..90: mol_type = other RNA
gggatcctgggtgcacacagcaaagcctctttggaggctgaatggggtcccccgactctggctttcccccaggtgtacatgtttttagtg

SEQ ID NO: 9257 - RNA, 90 nt, synthetic construct
  source 1..90: mol_type = other RNA
gggatcctgggtgcacacagcaaagcctctttggaggctgaatggggtcccccgactctggctttcccccaggtttacatgttcttagtg

SEQ ID NO: 9258 - RNA, 90 nt, synthetic construct
  source 1..90: mol_type = other RNA
gggatcctgggtgcacacagcaaagcctctttggaggctgaatggggtcccccgactctggctttcccccaggtatacatgttcttagtg

SEQ ID NO: 9259 - RNA, 90 nt, synthetic construct
  source 1..90: mol_type = other RNA
gggatcctgggtgcacacagcaaagcctctttggaggctgaatggggtcccccgactctggctttcccccaggtatacatgtttttggtg

SEQ ID NO: 9260 - RNA, 90 nt, synthetic construct
  source 1..90: mol_type = other RNA
gggatcctgggtgcacacagcaaagcctctttggaggctgaatggggtcccccgactctggctttcccccaggtctacatgtttttggtg

SEQ ID NO: 9261 - RNA, 90 nt, synthetic construct
  source 1..90: mol_type = other RNA
gggatcctgggtgcacacagcaaagcctctttggaggctgaatggggtcccccgactctggctttcccccaggtgtacatgttcttggtg

SEQ ID NO: 9262 - RNA, 90 nt, synthetic construct
  source 1..90: mol_type = other RNA
gggatcctgggtgcacacagcaaagcctctttggaggctgaatggggtcccccgactctggctttcccccaggtctacatgttcctggtg

SEQ ID NO: 9263 - RNA, 90 nt, synthetic construct
  source 1..90: mol_type = other RNA
gggatcctgggtgcacacagcaaagcctctttggaggctgaatggggtcccccgactctggctttcccccaggtatacatgttcttggtg

SEQ ID NO: 9264 - RNA, 90 nt, synthetic construct
  source 1..90: mol_type = other RNA
gggatcctgggtgcacacagcaaagcctctttggaggctgaatggggtcccccgactctggctttcccccaggtatacatgtttttagtg

SEQ ID NO: 9265 - RNA, 90 nt, synthetic construct
  source 1..90: mol_type = other RNA
gggatcctgggtgcacacagcaaagcctctttggaggctgaatggggtcccccgactctggctttcccccaggtatacatgtttctggtg

SEQ ID NO: 9266 - RNA, 90 nt, synthetic construct
  source 1..90: mol_type = other RNA
gggatcctgggtgcacacagcaaagcctctttggaggctgaatggggtcccccgactctggctttcccccaggtgtacatgttcctggtg

SEQ ID NO: 9267 - RNA, 90 nt, synthetic construct
  source 1..90: mol_type = other RNA
gggatcctgggtgcacacagcaaagcctctttggaggctgaatggggtcccccgactctggctttcccccaggtatacatgttcctggtg

SEQ ID NO: 9268 - RNA, 90 nt, synthetic construct
  source 1..90: mol_type = other RNA
gggatcctgggtgcacacagcaaagcctctttggaggctgaatggggtcccccgactctggctttcccccaggtgtacatgtttttggtg

SEQ ID NO: 9269 - RNA, 90 nt, synthetic construct
  source 1..90: mol_type = other RNA
gggatcctgggtgcacacagcaaagcctctttggaggctgaatggggtcccccgactctggctttcccccaggtttacatgttcctggtg

SEQ ID NO: 9270 - RNA, 90 nt, synthetic construct
  source 1..90: mol_type = other RNA
gggatcctgggtgcacacagcaaagcctctttggaggctgaatggggtcccccgactctggctttcccccaggtttacatgttcttggtg

SEQ ID NO: 9271 - RNA, 90 nt, synthetic construct
  source 1..90: mol_type = other RNA
gggatcctgggtgcacacagcaaagcctctttggaggctgaatggggtcccccgactctggctttcccccaggtttacatgtttctggtg

SEQ ID NO: 9272 - RNA, 90 nt, synthetic construct
  source 1..90: mol_type = other RNA
gggatcctgggtgcacacagcaaagcctctttggaggctgaatggggtcccccgactctggctttcccccaggtttacatgtttttagtg

SEQ ID NO: 9273 - RNA, 90 nt, synthetic construct
  source 1..90: mol_type = other RNA
gggatcctgggtgcacacagcaaagcctctttggaggctgaatggggtcccccgactctggctttcccccaggtttacatgtttttggtg

SEQ ID NO: 9274 - RNA, 90 nt, synthetic construct
  source 1..90: mol_type = other RNA
gggatcctgggtgcacacagcaaagcctctttggaggctgaatggggtcccccgactctggctttcccccaggtgtacatgttcttagtg

SEQ ID NO: 9275 - RNA, 91 nt, synthetic construct
  source 1..91: mol_type = other RNA
tgggatcctgggtgcacacagcaaagcctctttggaggctgaatggggtcccccgactctggctttcccccaggtctacatgtttctggtg

SEQ ID NO: 9276 - RNA, 91 nt, synthetic construct
  source 1..91: mol_type = other RNA
tgggatcctgggtgcacacagcaaagcctctttggaggctgaatggggtcccccgactctggctttcccccaggtttacatgtttttagtg

SEQ ID NO: 9277 - RNA, 91 nt, synthetic construct
  source 1..91: mol_type = other RNA
tgggatcctgggtgcacacagcaaagcctctttggaggctgaatggggtcccccgactctggctttcccccaggtctacatgtttttggtg

SEQ ID NO: 9278 - RNA, 91 nt, synthetic construct
  source 1..91: mol_type = other RNA
tgggatcctgggtgcacacagcaaagcctctttggaggctgaatggggtcccccgactctggctttcccccaggtgtacatgttcctggtg

SEQ ID NO: 9279 - RNA, 91 nt, synthetic construct
  source 1..91: mol_type = other RNA
tgggatcctgggtgcacacagcaaagcctctttggaggctgaatggggtcccccgactctggctttcccccaggtgtacatgtttttggtg

SEQ ID NO: 9280 - RNA, 91 nt, synthetic construct
  source 1..91: mol_type = other RNA
tgggatcctgggtgcacacagcaaagcctctttggaggctgaatggggtcccccgactctggctttcccccaggtgtacatgttcttagtg

SEQ ID NO: 9281 - RNA, 91 nt, synthetic construct
  source 1..91: mol_type = other RNA
tgggatcctgggtgcacacagcaaagcctctttggaggctgaatggggtcccccgactctggctttcccccaggtgtacatgttcttggtg

SEQ ID NO: 9282 - RNA, 91 nt, synthetic construct
  source 1..91: mol_type = other RNA
tgggatcctgggtgcacacagcaaagcctctttggaggctgaatggggtcccccgactctggctttcccccaggtttacatgtttctggtg

SEQ ID NO: 9283 - RNA, 91 nt, synthetic construct
  source 1..91: mol_type = other RNA
tgggatcctgggtgcacacagcaaagcctctttggaggctgaatggggtcccccgactctggctttcccccaggtttacatgttcctggtg

SEQ ID NO: 9284 - RNA, 91 nt, synthetic construct
  source 1..91: mol_type = other RNA
tgggatcctgggtgcacacagcaaagcctctttggaggctgaatggggtcccccgactctggctttcccccaggtttacatgtttttggtg

SEQ ID NO: 9285 - RNA, 91 nt, synthetic construct
  source 1..91: mol_type = other RNA
tgggatcctgggtgcacacagcaaagcctctttggaggctgaatggggtcccccgactctggctttcccccaggtttacatgttcttggtg

SEQ ID NO: 9286 - RNA, 91 nt, synthetic construct
  source 1..91: mol_type = other RNA
tgggatcctgggtgcacacagcaaagcctctttggaggctgaatggggtcccccgactctggctttcccccaggtttacatgttcttagtg

SEQ ID NO: 9287 - RNA, 91 nt, synthetic construct
  source 1..91: mol_type = other RNA
tgggatcctgggtgcacacagcaaagcctctttggaggctgaatggggtcccccgactctggctttcccccaggtctacatgtttttagtg

SEQ ID NO: 9288 - RNA, 91 nt, synthetic construct
  source 1..91: mol_type = other RNA
tgggatcctgggtgcacacagcaaagcctctttggaggctgaatggggtcccccgactctggctttcccccaggtatacatgttcttagtg

SEQ ID NO: 9289 - RNA, 91 nt, synthetic construct
  source 1..91: mol_type = other RNA
tgggatcctgggtgcacacagcaaagcctctttggaggctgaatggggtcccccgactctggctttcccccaggtatacatgtttctggtg

SEQ ID NO: 9290 - RNA, 91 nt, synthetic construct
  source 1..91: mol_type = other RNA
tgggatcctgggtgcacacagcaaagcctctttggaggctgaatggggtcccccgactctggctttcccccaggtgtacatgtttttagtg

SEQ ID NO: 9291 - RNA, 91 nt, synthetic construct
  source 1..91: mol_type = other RNA
tgggatcctgggtgcacacagcaaagcctctttggaggctgaatggggtcccccgactctggctttcccccaggtgtacatgtttctggtg

SEQ ID NO: 9292 - RNA, 91 nt, synthetic construct
  source 1..91: mol_type = other RNA
tgggatcctgggtgcacacagcaaagcctctttggaggctgaatggggtcccccgactctggctttcccccaggtatacatgtttttagtg

SEQ ID NO: 9293 - RNA, 91 nt, synthetic construct
  source 1..91: mol_type = other RNA
tgggatcctgggtgcacacagcaaagcctctttggaggctgaatggggtcccccgactctggctttcccccaggtctacatgttcttggtg

SEQ ID NO: 9294 - RNA, 91 nt, synthetic construct
  source 1..91: mol_type = other RNA
tgggatcctgggtgcacacagcaaagcctctttggaggctgaatggggtcccccgactctggctttcccccaggtctacatgttcttagtg

SEQ ID NO: 9295 - RNA, 91 nt, synthetic construct
  source 1..91: mol_type = other RNA
tgggatcctgggtgcacacagcaaagcctctttggaggctgaatggggtcccccgactctggctttcccccaggtctacatgttcctggtg

SEQ ID NO: 9296 - RNA, 91 nt, synthetic construct
  source 1..91: mol_type = other RNA
tgggatcctgggtgcacacagcaaagcctctttggaggctgaatggggtcccccgactctggctttcccccaggtatacatgtttttggtg

SEQ ID NO: 9297 - RNA, 91 nt, synthetic construct
  source 1..91: mol_type = other RNA
tgggatcctgggtgcacacagcaaagcctctttggaggctgaatggggtcccccgactctggctttcccccaggtatacatgttcctggtg

SEQ ID NO: 9298 - RNA, 91 nt, synthetic construct
  source 1..91: mol_type = other RNA
tgggatcctgggtgcacacagcaaagcctctttggaggctgaatggggtcccccgactctggctttcccccaggtatacatgttcttggtg

SEQ ID NO: 9299 - RNA, 92 nt, synthetic construct
  source 1..92: mol_type = other RNA
gtgggatcctgggtgcacacagcaaagcctctttggaggctgaatggggtcccccgactctggctttcccccaggtgtacatgtttctggtg

SEQ ID NO: 9300 - RNA, 92 nt, synthetic construct
  source 1..92: mol_type = other RNA
gtgggatcctgggtgcacacagcaaagcctctttggaggctgaatggggtcccccgactctggctttcccccaggtttacatgttcttagtg

SEQ ID NO: 9301 - RNA, 92 nt, synthetic construct
  source 1..92: mol_type = other RNA
gtgggatcctgggtgcacacagcaaagcctctttggaggctgaatggggtcccccgactctggctttcccccaggtgtacatgttcttagtg

SEQ ID NO: 9302 - RNA, 92 nt, synthetic construct
  source 1..92: mol_type = other RNA
gtgggatcctgggtgcacacagcaaagcctctttggaggctgaatggggtcccccgactctggctttcccccaggtgtacatgttcttggtg

SEQ ID NO: 9303 - RNA, 92 nt, synthetic construct
  source 1..92: mol_type = other RNA
gtgggatcctgggtgcacacagcaaagcctctttggaggctgaatggggtcccccgactctggctttcccccaggtctacatgttcctggtg

SEQ ID NO: 9304 - RNA, 92 nt, synthetic construct
  source 1..92: mol_type = other RNA
gtgggatcctgggtgcacacagcaaagcctctttggaggctgaatggggtcccccgactctggctttcccccaggtgtacatgtttttagtg

SEQ ID NO: 9305 - RNA, 92 nt, synthetic construct
  source 1..92: mol_type = other RNA
gtgggatcctgggtgcacacagcaaagcctctttggaggctgaatggggtcccccgactctggctttcccccaggtgtacatgtttttggtg

SEQ ID NO: 9306 - RNA, 92 nt, synthetic construct
  source 1..92: mol_type = other RNA
gtgggatcctgggtgcacacagcaaagcctctttggaggctgaatggggtcccccgactctggctttcccccaggtttacatgttcctggtg

SEQ ID NO: 9307 - RNA, 92 nt, synthetic construct
  source 1..92: mol_type = other RNA
gtgggatcctgggtgcacacagcaaagcctctttggaggctgaatggggtcccccgactctggctttcccccaggtctacatgtttttggtg

SEQ ID NO: 9308 - RNA, 92 nt, synthetic construct
  source 1..92: mol_type = other RNA
gtgggatcctgggtgcacacagcaaagcctctttggaggctgaatggggtcccccgactctggctttcccccaggtctacatgtttctggtg

SEQ ID NO: 9309 - RNA, 92 nt, synthetic construct
  source 1..92: mol_type = other RNA
gtgggatcctgggtgcacacagcaaagcctctttggaggctgaatggggtcccccgactctggctttcccccaggtctacatgttcttggtg

SEQ ID NO: 9310 - RNA, 92 nt, synthetic construct
  source 1..92: mol_type = other RNA
gtgggatcctgggtgcacacagcaaagcctctttggaggctgaatggggtcccccgactctggctttcccccaggtctacatgttcttagtg

SEQ ID NO: 9311 - RNA, 92 nt, synthetic construct
  source 1..92: mol_type = other RNA
gtgggatcctgggtgcacacagcaaagcctctttggaggctgaatggggtcccccgactctggctttcccccaggtatacatgtttttggtg

SEQ ID NO: 9312 - RNA, 92 nt, synthetic construct
  source 1..92: mol_type = other RNA
gtgggatcctgggtgcacacagcaaagcctctttggaggctgaatggggtcccccgactctggctttcccccaggtatacatgtttttagtg

SEQ ID NO: 9313 - RNA, 92 nt, synthetic construct
  source 1..92: mol_type = other RNA
gtgggatcctgggtgcacacagcaaagcctctttggaggctgaatggggtcccccgactctggctttcccccaggtatacatgtttctggtg

SEQ ID NO: 9314 - RNA, 92 nt, synthetic construct
  source 1..92: mol_type = other RNA
gtgggatcctgggtgcacacagcaaagcctctttggaggctgaatggggtcccccgactctggctttcccccaggtatacatgttcttggtg

SEQ ID NO: 9315 - RNA, 92 nt, synthetic construct
  source 1..92: mol_type = other RNA
gtgggatcctgggtgcacacagcaaagcctctttggaggctgaatggggtcccccgactctggctttcccccaggtatacatgttcttagtg

SEQ ID NO: 9316 - RNA, 92 nt, synthetic construct
  source 1..92: mol_type = other RNA
gtgggatcctgggtgcacacagcaaagcctctttggaggctgaatggggtcccccgactctggctttcccccaggtatacatgttcctggtg

SEQ ID NO: 9317 - RNA, 92 nt, synthetic construct
  source 1..92: mol_type = other RNA
gtgggatcctgggtgcacacagcaaagcctctttggaggctgaatggggtcccccgactctggctttcccccaggtctacatgtttttagtg

SEQ ID NO: 9318 - RNA, 92 nt, synthetic construct
  source 1..92: mol_type = other RNA
gtgggatcctgggtgcacacagcaaagcctctttggaggctgaatggggtcccccgactctggctttcccccaggtttacatgtttctggtg

SEQ ID NO: 9319 - RNA, 92 nt, synthetic construct
  source 1..92: mol_type = other RNA
gtgggatcctgggtgcacacagcaaagcctctttggaggctgaatggggtcccccgactctggctttcccccaggtttacatgttcttggtg

SEQ ID NO: 9320 - RNA, 92 nt, synthetic construct
  source 1..92: mol_type = other RNA
gtgggatcctgggtgcacacagcaaagcctctttggaggctgaatggggtcccccgactctggctttcccccaggtttacatgtttttggtg

SEQ ID NO: 9321 - RNA, 92 nt, synthetic construct
  source 1..92: mol_type = other RNA
gtgggatcctgggtgcacacagcaaagcctctttggaggctgaatggggtcccccgactctggctttcccccaggtttacatgtttttagtg

SEQ ID NO: 9322 - RNA, 92 nt, synthetic construct
  source 1..92: mol_type = other RNA
gtgggatcctgggtgcacacagcaaagcctctttggaggctgaatggggtcccccgactctggctttcccccaggtgtacatgttcctggtg

SEQ ID NO: 9323 - RNA, 93 nt, synthetic construct
  source 1..93: mol_type = other RNA
agtgggatcctgggtgcacacagcaaagcctctttggaggctgaatggggtcccccgactctggctttcccccaggtgtacatgttcttagtg

SEQ ID NO: 9324 - RNA, 93 nt, synthetic construct
  source 1..93: mol_type = other RNA
agtgggatcctgggtgcacacagcaaagcctctttggaggctgaatggggtcccccgactctggctttcccccaggtttacatgtttttggtg

SEQ ID NO: 9325 - RNA, 93 nt, synthetic construct
  source 1..93: mol_type = other RNA
agtgggatcctgggtgcacacagcaaagcctctttggaggctgaatggggtcccccgactctggctttcccccaggtttacatgtttttagtg

SEQ ID NO: 9326 - RNA, 93 nt, synthetic construct
  source 1..93: mol_type = other RNA
agtgggatcctgggtgcacacagcaaagcctctttggaggctgaatggggtcccccgactctggctttcccccaggtttacatgtttctggtg

SEQ ID NO: 9327 - RNA, 93 nt, synthetic construct
  source 1..93: mol_type = other RNA
agtgggatcctgggtgcacacagcaaagcctctttggaggctgaatggggtcccccgactctggctttcccccaggtttacatgttcttggtg

SEQ ID NO: 9328 - RNA, 93 nt, synthetic construct
  source 1..93: mol_type = other RNA
agtgggatcctgggtgcacacagcaaagcctctttggaggctgaatggggtcccccgactctggctttcccccaggtttacatgttcttagtg

SEQ ID NO: 9329 - RNA, 93 nt, synthetic construct
  source 1..93: mol_type = other RNA
agtgggatcctgggtgcacacagcaaagcctctttggaggctgaatggggtcccccgactctggctttcccccaggtttacatgttcctggtg

SEQ ID NO: 9330 - RNA, 93 nt, synthetic construct
  source 1..93: mol_type = other RNA
agtgggatcctgggtgcacacagcaaagcctctttggaggctgaatggggtcccccgactctggctttcccccaggtgtacatgtttttggtg

SEQ ID NO: 9331 - RNA, 93 nt, synthetic construct
  source 1..93: mol_type = other RNA
agtgggatcctgggtgcacacagcaaagcctctttggaggctgaatggggtcccccgactctggctttcccccaggtgtacatgtttttagtg

SEQ ID NO: 9332 - RNA, 93 nt, synthetic construct
  source 1..93: mol_type = other RNA
agtgggatcctgggtgcacacagcaaagcctctttggaggctgaatggggtcccccgactctggctttcccccaggtgtacatgtttctggtg

SEQ ID NO: 9333 - RNA, 93 nt, synthetic construct
  source 1..93: mol_type = other RNA
agtgggatcctgggtgcacacagcaaagcctctttggaggctgaatggggtcccccgactctggctttcccccaggtgtacatgttcttggtg

SEQ ID NO: 9334 - RNA, 93 nt, synthetic construct
  source 1..93: mol_type = other RNA
agtgggatcctgggtgcacacagcaaagcctctttggaggctgaatggggtcccccgactctggctttcccccaggtctacatgtttttagtg

SEQ ID NO: 9335 - RNA, 93 nt, synthetic construct
  source 1..93: mol_type = other RNA
agtgggatcctgggtgcacacagcaaagcctctttggaggctgaatggggtcccccgactctggctttcccccaggtgtacatgttcctggtg

SEQ ID NO: 9336 - RNA, 93 nt, synthetic construct
  source 1..93: mol_type = other RNA
agtgggatcctgggtgcacacagcaaagcctctttggaggctgaatggggtcccccgactctggctttcccccaggtctacatgttcttggtg

SEQ ID NO: 9337 - RNA, 93 nt, synthetic construct
  source 1..93: mol_type = other RNA
agtgggatcctgggtgcacacagcaaagcctctttggaggctgaatggggtcccccgactctggctttcccccaggtctacatgttcttagtg

SEQ ID NO: 9338 - RNA, 93 nt, synthetic construct
  source 1..93: mol_type = other RNA
agtgggatcctgggtgcacacagcaaagcctctttggaggctgaatggggtcccccgactctggctttcccccaggtatacatgtttttagtg

SEQ ID NO: 9339 - RNA, 93 nt, synthetic construct
  source 1..93: mol_type = other RNA
agtgggatcctgggtgcacacagcaaagcctctttggaggctgaatggggtcccccgactctggctttcccccaggtatacatgtttctggtg

SEQ ID NO: 9340 - RNA, 93 nt, synthetic construct
  source 1..93: mol_type = other RNA
agtgggatcctgggtgcacacagcaaagcctctttggaggctgaatggggtcccccgactctggctttcccccaggtatacatgttcttggtg

SEQ ID NO: 9341 - RNA, 93 nt, synthetic construct
  source 1..93: mol_type = other RNA
agtgggatcctgggtgcacacagcaaagcctctttggaggctgaatggggtcccccgactctggctttcccccaggtatacatgttcttagtg

SEQ ID NO: 9342 - RNA, 93 nt, synthetic construct
  source 1..93: mol_type = other RNA
agtgggatcctgggtgcacacagcaaagcctctttggaggctgaatggggtcccccgactctggctttcccccaggtatacatgttcctggtg

SEQ ID NO: 9343 - RNA, 93 nt, synthetic construct
  source 1..93: mol_type = other RNA
agtgggatcctgggtgcacacagcaaagcctctttggaggctgaatggggtcccccgactctggctttcccccaggtctacatgtttttggtg

SEQ ID NO: 9344 - RNA, 93 nt, synthetic construct
  source 1..93: mol_type = other RNA
agtgggatcctgggtgcacacagcaaagcctctttggaggctgaatggggtcccccgactctggctttcccccaggtctacatgtttctggtg

SEQ ID NO: 9345 - RNA, 93 nt, synthetic construct
  source 1..93: mol_type = other RNA
agtgggatcctgggtgcacacagcaaagcctctttggaggctgaatggggtcccccgactctggctttcccccaggtatacatgtttttggtg

SEQ ID NO: 9346 - RNA, 93 nt, synthetic construct
  source 1..93: mol_type = other RNA
agtgggatcctgggtgcacacagcaaagcctctttggaggctgaatggggtcccccgactctggctttcccccaggtctacatgttcctggtg

SEQ ID NO: 9347 - RNA, 94 nt, synthetic construct
  source 1..94: mol_type = other RNA
tagtgggatcctgggtgcacacagcaaagcctctttggaggctgaatggggtcccccgactctggctttcccccaggtgtacatgtttctggtg

SEQ ID NO: 9348 - RNA, 94 nt, synthetic construct
  source 1..94: mol_type = other RNA
tagtgggatcctgggtgcacacagcaaagcctctttggaggctgaatggggtcccccgactctggctttcccccaggtttacatgtttttggtg

SEQ ID NO: 9349 - RNA, 94 nt, synthetic construct
  source 1..94: mol_type = other RNA
tagtgggatcctgggtgcacacagcaaagcctctttggaggctgaatggggtcccccgactctggctttcccccaggtgtacatgtttttggtg

SEQ ID NO: 9350 - RNA, 94 nt, synthetic construct
  source 1..94: mol_type = other RNA
tagtgggatcctgggtgcacacagcaaagcctctttggaggctgaatggggtcccccgactctggctttcccccaggtttacatgttcttagtg

SEQ ID NO: 9351 - RNA, 94 nt, synthetic construct
  source 1..94: mol_type = other RNA
tagtgggatcctgggtgcacacagcaaagcctctttggaggctgaatggggtcccccgactctggctttcccccaggtttacatgttcttggtg

SEQ ID NO: 9352 - RNA, 94 nt, synthetic construct
  source 1..94: mol_type = other RNA
tagtgggatcctgggtgcacacagcaaagcctctttggaggctgaatggggtcccccgactctggctttcccccaggtgtacatgttcctggtg

SEQ ID NO: 9353 - RNA, 94 nt, synthetic construct
  source 1..94: mol_type = other RNA
tagtgggatcctgggtgcacacagcaaagcctctttggaggctgaatggggtcccccgactctggctttcccccaggtatacatgttcctggtg

SEQ ID NO: 9354 - RNA, 94 nt, synthetic construct
  source 1..94: mol_type = other RNA
tagtgggatcctgggtgcacacagcaaagcctctttggaggctgaatggggtcccccgactctggctttcccccaggtgtacatgttcttggtg

SEQ ID NO: 9355 - RNA, 94 nt, synthetic construct
  source 1..94: mol_type = other RNA
tagtgggatcctgggtgcacacagcaaagcctctttggaggctgaatggggtcccccgactctggctttcccccaggtgtacatgtttttagtg

SEQ ID NO: 9356 - RNA, 94 nt, synthetic construct
  source 1..94: mol_type = other RNA
tagtgggatcctgggtgcacacagcaaagcctctttggaggctgaatggggtcccccgactctggctttcccccaggtgtacatgttcttagtg

SEQ ID NO: 9357 - RNA, 94 nt, synthetic construct
  source 1..94: mol_type = other RNA
tagtgggatcctgggtgcacacagcaaagcctctttggaggctgaatggggtcccccgactctggctttcccccaggtctacatgtttttagtg

SEQ ID NO: 9358 - RNA, 94 nt, synthetic construct
  source 1..94: mol_type = other RNA
tagtgggatcctgggtgcacacagcaaagcctctttggaggctgaatggggtcccccgactctggctttcccccaggtatacatgttcttggtg

SEQ ID NO: 9359 - RNA, 94 nt, synthetic construct
  source 1..94: mol_type = other RNA
tagtgggatcctgggtgcacacagcaaagcctctttggaggctgaatggggtcccccgactctggctttcccccaggtatacatgtttctggtg

SEQ ID NO: 9360 - RNA, 94 nt, synthetic construct
  source 1..94: mol_type = other RNA
tagtgggatcctgggtgcacacagcaaagcctctttggaggctgaatggggtcccccgactctggctttcccccaggtatacatgtttttagtg

SEQ ID NO: 9361 - RNA, 94 nt, synthetic construct
  source 1..94: mol_type = other RNA
tagtgggatcctgggtgcacacagcaaagcctctttggaggctgaatggggtcccccgactctggctttcccccaggtatacatgtttttggtg

SEQ ID NO: 9362 - RNA, 94 nt, synthetic construct
  source 1..94: mol_type = other RNA
tagtgggatcctgggtgcacacagcaaagcctctttggaggctgaatggggtcccccgactctggctttcccccaggtctacatgttcctggtg

SEQ ID NO: 9363 - RNA, 94 nt, synthetic construct
  source 1..94: mol_type = other RNA
tagtgggatcctgggtgcacacagcaaagcctctttggaggctgaatggggtcccccgactctggctttcccccaggtctacatgttcttagtg

SEQ ID NO: 9364 - RNA, 94 nt, synthetic construct
  source 1..94: mol_type = other RNA
tagtgggatcctgggtgcacacagcaaagcctctttggaggctgaatggggtcccccgactctggctttcccccaggtctacatgttcttggtg

SEQ ID NO: 9365 - RNA, 94 nt, synthetic construct
  source 1..94: mol_type = other RNA
tagtgggatcctgggtgcacacagcaaagcctctttggaggctgaatggggtcccccgactctggctttcccccaggtctacatgtttctggtg

SEQ ID NO: 9366 - RNA, 94 nt, synthetic construct
  source 1..94: mol_type = other RNA
tagtgggatcctgggtgcacacagcaaagcctctttggaggctgaatggggtcccccgactctggctttcccccaggtctacatgtttttggtg

SEQ ID NO: 9367 - RNA, 94 nt, synthetic construct
  source 1..94: mol_type = other RNA
tagtgggatcctgggtgcacacagcaaagcctctttggaggctgaatggggtcccccgactctggctttcccccaggtttacatgttcctggtg

SEQ ID NO: 9368 - RNA, 94 nt, synthetic construct
  source 1..94: mol_type = other RNA
tagtgggatcctgggtgcacacagcaaagcctctttggaggctgaatggggtcccccgactctggctttcccccaggtatacatgttcttagtg

SEQ ID NO: 9369 - RNA, 94 nt, synthetic construct
  source 1..94: mol_type = other RNA
tagtgggatcctgggtgcacacagcaaagcctctttggaggctgaatggggtcccccgactctggctttcccccaggtttacatgtttttagtg

SEQ ID NO: 9370 - RNA, 94 nt, synthetic construct
  source 1..94: mol_type = other RNA
tagtgggatcctgggtgcacacagcaaagcctctttggaggctgaatggggtcccccgactctggctttcccccaggtttacatgtttctggtg

SEQ ID NO: 9371 - RNA, 95 nt, synthetic construct
  source 1..95: mol_type = other RNA
gtagtgggatcctgggtgcacacagcaaagcctctttggaggctgaatggggtcccccgactctggctttcccccaggtatacatgtttttggtg

SEQ ID NO: 9372 - RNA, 95 nt, synthetic construct
  source 1..95: mol_type = other RNA
gtagtgggatcctgggtgcacacagcaaagcctctttggaggctgaatggggtcccccgactctggctttcccccaggtgtacatgtttctggtg

SEQ ID NO: 9373 - RNA, 95 nt, synthetic construct
  source 1..95: mol_type = other RNA
gtagtgggatcctgggtgcacacagcaaagcctctttggaggctgaatggggtcccccgactctggctttcccccaggtctacatgtttctggtg

SEQ ID NO: 9374 - RNA, 95 nt, synthetic construct
  source 1..95: mol_type = other RNA
gtagtgggatcctgggtgcacacagcaaagcctctttggaggctgaatggggtcccccgactctggctttcccccaggtgtacatgttcttggtg

SEQ ID NO: 9375 - RNA, 95 nt, synthetic construct
  source 1..95: mol_type = other RNA
gtagtgggatcctgggtgcacacagcaaagcctctttggaggctgaatggggtcccccgactctggctttcccccaggtgtacatgttcttagtg

SEQ ID NO: 9376 - RNA, 95 nt, synthetic construct
  source 1..95: mol_type = other RNA
gtagtgggatcctgggtgcacacagcaaagcctctttggaggctgaatggggtcccccgactctggctttcccccaggtgtacatgttcctggtg

SEQ ID NO: 9377 - RNA, 95 nt, synthetic construct
  source 1..95: mol_type = other RNA
gtagtgggatcctgggtgcacacagcaaagcctctttggaggctgaatggggtcccccgactctggctttcccccaggtctacatgtttttggtg

SEQ ID NO: 9378 - RNA, 95 nt, synthetic construct
  source 1..95: mol_type = other RNA
gtagtgggatcctgggtgcacacagcaaagcctctttggaggctgaatggggtcccccgactctggctttcccccaggtctacatgttcttggtg

SEQ ID NO: 9379 - RNA, 95 nt, synthetic construct
  source 1..95: mol_type = other RNA
gtagtgggatcctgggtgcacacagcaaagcctctttggaggctgaatggggtcccccgactctggctttcccccaggtgtacatgtttttggtg

SEQ ID NO: 9380 - RNA, 95 nt, synthetic construct
  source 1..95: mol_type = other RNA
gtagtgggatcctgggtgcacacagcaaagcctctttggaggctgaatggggtcccccgactctggctttcccccaggtctacatgttcttagtg

SEQ ID NO: 9381 - RNA, 95 nt, synthetic construct
  source 1..95: mol_type = other RNA
gtagtgggatcctgggtgcacacagcaaagcctctttggaggctgaatggggtcccccgactctggctttcccccaggtttacatgttcctggtg

SEQ ID NO: 9382 - RNA, 95 nt, synthetic construct
  source 1..95: mol_type = other RNA
gtagtgggatcctgggtgcacacagcaaagcctctttggaggctgaatggggtcccccgactctggctttcccccaggtgtacatgtttttagtg

SEQ ID NO: 9383 - RNA, 95 nt, synthetic construct
  source 1..95: mol_type = other RNA
gtagtgggatcctgggtgcacacagcaaagcctctttggaggctgaatggggtcccccgactctggctttcccccaggtctacatgtttttagtg

SEQ ID NO: 9384 - RNA, 95 nt, synthetic construct
  source 1..95: mol_type = other RNA
gtagtgggatcctgggtgcacacagcaaagcctctttggaggctgaatggggtcccccgactctggctttcccccaggtttacatgtttttggtg

SEQ ID NO: 9385 - RNA, 95 nt, synthetic construct
  source 1..95: mol_type = other RNA
gtagtgggatcctgggtgcacacagcaaagcctctttggaggctgaatggggtcccccgactctggctttcccccaggtatacatgttcttagtg

SEQ ID NO: 9386 - RNA, 95 nt, synthetic construct
  source 1..95: mol_type = other RNA
gtagtgggatcctgggtgcacacagcaaagcctctttggaggctgaatggggtcccccgactctggctttcccccaggtttacatgtttttagtg

SEQ ID NO: 9387 - RNA, 95 nt, synthetic construct
  source 1..95: mol_type = other RNA
gtagtgggatcctgggtgcacacagcaaagcctctttggaggctgaatggggtcccccgactctggctttcccccaggtatacatgtttttagtg

SEQ ID NO: 9388 - RNA, 95 nt, synthetic construct
  source 1..95: mol_type = other RNA
gtagtgggatcctgggtgcacacagcaaagcctctttggaggctgaatggggtcccccgactctggctttcccccaggtatacatgtttctggtg

SEQ ID NO: 9389 - RNA, 95 nt, synthetic construct
  source 1..95: mol_type = other RNA
gtagtgggatcctgggtgcacacagcaaagcctctttggaggctgaatggggtcccccgactctggctttcccccaggtatacatgttcttggtg

SEQ ID NO: 9390 - RNA, 95 nt, synthetic construct
  source 1..95: mol_type = other RNA
gtagtgggatcctgggtgcacacagcaaagcctctttggaggctgaatggggtcccccgactctggctttcccccaggtctacatgttcctggtg

SEQ ID NO: 9391 - RNA, 95 nt, synthetic construct
  source 1..95: mol_type = other RNA
gtagtgggatcctgggtgcacacagcaaagcctctttggaggctgaatggggtcccccgactctggctttcccccaggtttacatgttcttagtg

SEQ ID NO: 9392 - RNA, 95 nt, synthetic construct
  source 1..95: mol_type = other RNA
gtagtgggatcctgggtgcacacagcaaagcctctttggaggctgaatggggtcccccgactctggctttcccccaggtttacatgttcttggtg

SEQ ID NO: 9393 - RNA, 95 nt, synthetic construct
  source 1..95: mol_type = other RNA
gtagtgggatcctgggtgcacacagcaaagcctctttggaggctgaatggggtcccccgactctggctttcccccaggtttacatgtttctggtg

SEQ ID NO: 9394 - RNA, 95 nt, synthetic construct
  source 1..95: mol_type = other RNA
gtagtgggatcctgggtgcacacagcaaagcctctttggaggctgaatggggtcccccgactctggctttcccccaggtatacatgttcctggtg

SEQ ID NO: 9395 - RNA, 96 nt, synthetic construct
  source 1..96: mol_type = other RNA
ggtagtgggatcctgggtgcacacagcaaagcctctttggaggctgaatggggtcccccgactctggctttcccccaggtttacatgttcttggtg

SEQ ID NO: 9396 - RNA, 96 nt, synthetic construct
  source 1..96: mol_type = other RNA
ggtagtgggatcctgggtgcacacagcaaagcctctttggaggctgaatggggtcccccgactctggctttcccccaggtgtacatgttcctggtg

SEQ ID NO: 9397 - RNA, 96 nt, synthetic construct
  source 1..96: mol_type = other RNA
ggtagtgggatcctgggtgcacacagcaaagcctctttggaggctgaatggggtcccccgactctggctttcccccaggtctacatgtttttggtg

SEQ ID NO: 9398 - RNA, 96 nt, synthetic construct
  source 1..96: mol_type = other RNA
ggtagtgggatcctgggtgcacacagcaaagcctctttggaggctgaatggggtcccccgactctggctttcccccaggtctacatgtttttagtg

SEQ ID NO: 9399 - RNA, 96 nt, synthetic construct
  source 1..96: mol_type = other RNA
ggtagtgggatcctgggtgcacacagcaaagcctctttggaggctgaatggggtcccccgactctggctttcccccaggtctacatgttcttggtg

SEQ ID NO: 9400 - RNA, 96 nt, synthetic construct
  source 1..96: mol_type = other RNA
ggtagtgggatcctgggtgcacacagcaaagcctctttggaggctgaatggggtcccccgactctggctttcccccaggtgtacatgtttctggtg

SEQ ID NO: 9401 - RNA, 96 nt, synthetic construct
  source 1..96: mol_type = other RNA
ggtagtgggatcctgggtgcacacagcaaagcctctttggaggctgaatggggtcccccgactctggctttcccccaggtgtacatgttcttagtg

SEQ ID NO: 9402 - RNA, 96 nt, synthetic construct
  source 1..96: mol_type = other RNA
ggtagtgggatcctgggtgcacacagcaaagcctctttggaggctgaatggggtcccccgactctggctttcccccaggtgtacatgttcttggtg

SEQ ID NO: 9403 - RNA, 96 nt, synthetic construct
  source 1..96: mol_type = other RNA
ggtagtgggatcctgggtgcacacagcaaagcctctttggaggctgaatggggtcccccgactctggctttcccccaggtgtacatgtttttagtg

SEQ ID NO: 9404 - RNA, 96 nt, synthetic construct
  source 1..96: mol_type = other RNA
ggtagtgggatcctgggtgcacacagcaaagcctctttggaggctgaatggggtcccccgactctggctttcccccaggtgtacatgtttttggtg

SEQ ID NO: 9405 - RNA, 96 nt, synthetic construct
  source 1..96: mol_type = other RNA
ggtagtgggatcctgggtgcacacagcaaagcctctttggaggctgaatggggtcccccgactctggctttcccccaggtttacatgttcctggtg

SEQ ID NO: 9406 - RNA, 96 nt, synthetic construct
  source 1..96: mol_type = other RNA
ggtagtgggatcctgggtgcacacagcaaagcctctttggaggctgaatggggtcccccgactctggctttcccccaggtttacatgtttttagtg

SEQ ID NO: 9407 - RNA, 96 nt, synthetic construct
  source 1..96: mol_type = other RNA
ggtagtgggatcctgggtgcacacagcaaagcctctttggaggctgaatggggtcccccgactctggctttcccccaggtttacatgtttctggtg

SEQ ID NO: 9408 - RNA, 96 nt, synthetic construct
  source 1..96: mol_type = other RNA
ggtagtgggatcctgggtgcacacagcaaagcctctttggaggctgaatggggtcccccgactctggctttcccccaggtttacatgtttttggtg

SEQ ID NO: 9409 - RNA, 96 nt, synthetic construct
  source 1..96: mol_type = other RNA
ggtagtgggatcctgggtgcacacagcaaagcctctttggaggctgaatggggtcccccgactctggctttcccccaggtctacatgttcttagtg

SEQ ID NO: 9410 - RNA, 96 nt, synthetic construct
  source 1..96: mol_type = other RNA
ggtagtgggatcctgggtgcacacagcaaagcctctttggaggctgaatggggtcccccgactctggctttcccccaggtctacatgttcctggtg

SEQ ID NO: 9411 - RNA, 96 nt, synthetic construct
  source 1..96: mol_type = other RNA
ggtagtgggatcctgggtgcacacagcaaagcctctttggaggctgaatggggtcccccgactctggctttcccccaggtatacatgtttttagtg

SEQ ID NO: 9412 - RNA, 96 nt, synthetic construct
  source 1..96: mol_type = other RNA
ggtagtgggatcctgggtgcacacagcaaagcctctttggaggctgaatggggtcccccgactctggctttcccccaggtatacatgtttttggtg

SEQ ID NO: 9413 - RNA, 96 nt, synthetic construct
  source 1..96: mol_type = other RNA
ggtagtgggatcctgggtgcacacagcaaagcctctttggaggctgaatggggtcccccgactctggctttcccccaggtatacatgttcctggtg

SEQ ID NO: 9414 - RNA, 96 nt, synthetic construct
  source 1..96: mol_type = other RNA
ggtagtgggatcctgggtgcacacagcaaagcctctttggaggctgaatggggtcccccgactctggctttcccccaggtatacatgttcttagtg

SEQ ID NO: 9415 - RNA, 96 nt, synthetic construct
  source 1..96: mol_type = other RNA
ggtagtgggatcctgggtgcacacagcaaagcctctttggaggctgaatggggtcccccgactctggctttcccccaggtatacatgttcttggtg

SEQ ID NO: 9416 - RNA, 96 nt, synthetic construct
  source 1..96: mol_type = other RNA
ggtagtgggatcctgggtgcacacagcaaagcctctttggaggctgaatggggtcccccgactctggctttcccccaggtatacatgtttctggtg

SEQ ID NO: 9417 - RNA, 96 nt, synthetic construct
  source 1..96: mol_type = other RNA
ggtagtgggatcctgggtgcacacagcaaagcctctttggaggctgaatggggtcccccgactctggctttcccccaggtctacatgtttctggtg

SEQ ID NO: 9418 - RNA, 96 nt, synthetic construct
  source 1..96: mol_type = other RNA
ggtagtgggatcctgggtgcacacagcaaagcctctttggaggctgaatggggtcccccgactctggctttcccccaggtttacatgttcttagtg

SEQ ID NO: 9419 - RNA, 97 nt, synthetic construct
  source 1..97: mol_type = other RNA
gggtagtgggatcctgggtgcacacagcaaagcctctttggaggctgaatggggtcccccgactctggctttcccccaggtatacatgtttttagtg

SEQ ID NO: 9420 - RNA, 97 nt, synthetic construct
  source 1..97: mol_type = other RNA
gggtagtgggatcctgggtgcacacagcaaagcctctttggaggctgaatggggtcccccgactctggctttcccccaggtctacatgttcctggtg

SEQ ID NO: 9421 - RNA, 97 nt, synthetic construct
  source 1..97: mol_type = other RNA
gggtagtgggatcctgggtgcacacagcaaagcctctttggaggctgaatggggtcccccgactctggctttcccccaggtatacatgtttttggtg

SEQ ID NO: 9422 - RNA, 97 nt, synthetic construct
  source 1..97: mol_type = other RNA
gggtagtgggatcctgggtgcacacagcaaagcctctttggaggctgaatggggtcccccgactctggctttcccccaggtgtacatgtttttagtg

SEQ ID NO: 9423 - RNA, 97 nt, synthetic construct
  source 1..97: mol_type = other RNA
gggtagtgggatcctgggtgcacacagcaaagcctctttggaggctgaatggggtcccccgactctggctttcccccaggtttacatgttcttggtg

SEQ ID NO: 9424 - RNA, 97 nt, synthetic construct
  source 1..97: mol_type = other RNA
gggtagtgggatcctgggtgcacacagcaaagcctctttggaggctgaatggggtcccccgactctggctttcccccaggtttacatgttcttagtg

SEQ ID NO: 9425 - RNA, 97 nt, synthetic construct
  source 1..97: mol_type = other RNA
gggtagtgggatcctgggtgcacacagcaaagcctctttggaggctgaatggggtcccccgactctggctttcccccaggtttacatgtttttagtg

SEQ ID NO: 9426 - RNA, 97 nt, synthetic construct
  source 1..97: mol_type = other RNA
gggtagtgggatcctgggtgcacacagcaaagcctctttggaggctgaatggggtcccccgactctggctttcccccaggtttacatgttcctggtg

SEQ ID NO: 9427 - RNA, 97 nt, synthetic construct
  source 1..97: mol_type = other RNA
gggtagtgggatcctgggtgcacacagcaaagcctctttggaggctgaatggggtcccccgactctggctttcccccaggtttacatgtttctggtg

SEQ ID NO: 9428 - RNA, 97 nt, synthetic construct
  source 1..97: mol_type = other RNA
gggtagtgggatcctgggtgcacacagcaaagcctctttggaggctgaatggggtcccccgactctggctttcccccaggtgtacatgttcttggtg

SEQ ID NO: 9429 - RNA, 97 nt, synthetic construct
  source 1..97: mol_type = other RNA
gggtagtgggatcctgggtgcacacagcaaagcctctttggaggctgaatggggtcccccgactctggctttcccccaggtgtacatgttcttagtg

SEQ ID NO: 9430 - RNA, 97 nt, synthetic construct
  source 1..97: mol_type = other RNA
gggtagtgggatcctgggtgcacacagcaaagcctctttggaggctgaatggggtcccccgactctggctttcccccaggtgtacatgttcctggtg

SEQ ID NO: 9431 - RNA, 97 nt, synthetic construct
  source 1..97: mol_type = other RNA
gggtagtgggatcctgggtgcacacagcaaagcctctttggaggctgaatggggtcccccgactctggctttcccccaggtctacatgtttttggtg

SEQ ID NO: 9432 - RNA, 97 nt, synthetic construct
  source 1..97: mol_type = other RNA
gggtagtgggatcctgggtgcacacagcaaagcctctttggaggctgaatggggtcccccgactctggctttcccccaggtttacatgtttttggtg

SEQ ID NO: 9433 - RNA, 97 nt, synthetic construct
  source 1..97: mol_type = other RNA
gggtagtgggatcctgggtgcacacagcaaagcctctttggaggctgaatggggtcccccgactctggctttcccccaggtgtacatgtttctggtg

SEQ ID NO: 9434 - RNA, 97 nt, synthetic construct
  source 1..97: mol_type = other RNA
gggtagtgggatcctgggtgcacacagcaaagcctctttggaggctgaatggggtcccccgactctggctttcccccaggtgtacatgtttttggtg

SEQ ID NO: 9435 - RNA, 97 nt, synthetic construct
  source 1..97: mol_type = other RNA
gggtagtgggatcctgggtgcacacagcaaagcctctttggaggctgaatggggtcccccgactctggctttcccccaggtatacatgttcttggtg

SEQ ID NO: 9436 - RNA, 97 nt, synthetic construct
  source 1..97: mol_type = other RNA
gggtagtgggatcctgggtgcacacagcaaagcctctttggaggctgaatggggtcccccgactctggctttcccccaggtctacatgtttttagtg

SEQ ID NO: 9437 - RNA, 97 nt, synthetic construct
  source 1..97: mol_type = other RNA
gggtagtgggatcctgggtgcacacagcaaagcctctttggaggctgaatggggtcccccgactctggctttcccccaggtctacatgtttctggtg

SEQ ID NO: 9438 - RNA, 97 nt, synthetic construct
  source 1..97: mol_type = other RNA
gggtagtgggatcctgggtgcacacagcaaagcctctttggaggctgaatggggtcccccgactctggctttcccccaggtatacatgttcctggtg

SEQ ID NO: 9439 - RNA, 97 nt, synthetic construct
  source 1..97: mol_type = other RNA
gggtagtgggatcctgggtgcacacagcaaagcctctttggaggctgaatggggtcccccgactctggctttcccccaggtatacatgttcttagtg

SEQ ID NO: 9440 - RNA, 97 nt, synthetic construct
  source 1..97: mol_type = other RNA
gggtagtgggatcctgggtgcacacagcaaagcctctttggaggctgaatggggtcccccgactctggctttcccccaggtctacatgttcttggtg

SEQ ID NO: 9441 - RNA, 97 nt, synthetic construct
  source 1..97: mol_type = other RNA
gggtagtgggatcctgggtgcacacagcaaagcctctttggaggctgaatggggtcccccgactctggctttcccccaggtatacatgtttctggtg

SEQ ID NO: 9442 - RNA, 97 nt, synthetic construct
  source 1..97: mol_type = other RNA
gggtagtgggatcctgggtgcacacagcaaagcctctttggaggctgaatggggtcccccgactctggctttcccccaggtctacatgttcttagtg

SEQ ID NO: 9443 - RNA, 98 nt, synthetic construct
  source 1..98: mol_type = other RNA
tgggtagtgggatcctgggtgcacacagcaaagcctctttggaggctgaatggggtcccccgactctggctttcccccaggtgtacatgttcttggtg

SEQ ID NO: 9444 - RNA, 98 nt, synthetic construct
  source 1..98: mol_type = other RNA
tgggtagtgggatcctgggtgcacacagcaaagcctctttggaggctgaatggggtcccccgactctggctttcccccaggtgtacatgttcctggtg

SEQ ID NO: 9445 - RNA, 98 nt, synthetic construct
  source 1..98: mol_type = other RNA
tgggtagtgggatcctgggtgcacacagcaaagcctctttggaggctgaatggggtcccccgactctggctttcccccaggtgtacatgttcttagtg

SEQ ID NO: 9446 - RNA, 98 nt, synthetic construct
  source 1..98: mol_type = other RNA
tgggtagtgggatcctgggtgcacacagcaaagcctctttggaggctgaatggggtcccccgactctggctttcccccaggtgtacatgtttctggtg

SEQ ID NO: 9447 - RNA, 98 nt, synthetic construct
  source 1..98: mol_type = other RNA
tgggtagtgggatcctgggtgcacacagcaaagcctctttggaggctgaatggggtcccccgactctggctttcccccaggtctacatgtttttggtg

SEQ ID NO: 9448 - RNA, 98 nt, synthetic construct
  source 1..98: mol_type = other RNA
tgggtagtgggatcctgggtgcacacagcaaagcctctttggaggctgaatggggtcccccgactctggctttcccccaggtctacatgtttttagtg

SEQ ID NO: 9449 - RNA, 98 nt, synthetic construct
  source 1..98: mol_type = other RNA
tgggtagtgggatcctgggtgcacacagcaaagcctctttggaggctgaatggggtcccccgactctggctttcccccaggtctacatgtttctggtg

SEQ ID NO: 9450 - RNA, 98 nt, synthetic construct
  source 1..98: mol_type = other RNA
tgggtagtgggatcctgggtgcacacagcaaagcctctttggaggctgaatggggtcccccgactctggctttcccccaggtctacatgttcttggtg

SEQ ID NO: 9451 - RNA, 98 nt, synthetic construct
  source 1..98: mol_type = other RNA
tgggtagtgggatcctgggtgcacacagcaaagcctctttggaggctgaatggggtcccccgactctggctttcccccaggtctacatgttcttagtg

SEQ ID NO: 9452 - RNA, 98 nt, synthetic construct
  source 1..98: mol_type = other RNA
tgggtagtgggatcctgggtgcacacagcaaagcctctttggaggctgaatggggtcccccgactctggctttcccccaggtgtacatgtttttagtg

SEQ ID NO: 9453 - RNA, 98 nt, synthetic construct
  source 1..98: mol_type = other RNA
tgggtagtgggatcctgggtgcacacagcaaagcctctttggaggctgaatggggtcccccgactctggctttcccccaggtctacatgttcctggtg

SEQ ID NO: 9454 - RNA, 98 nt, synthetic construct
  source 1..98: mol_type = other RNA
tgggtagtgggatcctgggtgcacacagcaaagcctctttggaggctgaatggggtcccccgactctggctttcccccaggtttacatgttcttggtg

SEQ ID NO: 9455 - RNA, 98 nt, synthetic construct
  source 1..98: mol_type = other RNA
tgggtagtgggatcctgggtgcacacagcaaagcctctttggaggctgaatggggtcccccgactctggctttcccccaggtatacatgtttctggtg

SEQ ID NO: 9456 - RNA, 98 nt, synthetic construct
  source 1..98: mol_type = other RNA
tgggtagtgggatcctgggtgcacacagcaaagcctctttggaggctgaatggggtcccccgactctggctttcccccaggtatacatgtttttagtg

SEQ ID NO: 9457 - RNA, 98 nt, synthetic construct
  source 1..98: mol_type = other RNA
tgggtagtgggatcctgggtgcacacagcaaagcctctttggaggctgaatggggtcccccgactctggctttcccccaggtatacatgttcttggtg

SEQ ID NO: 9458 - RNA, 98 nt, synthetic construct
  source 1..98: mol_type = other RNA
tgggtagtgggatcctgggtgcacacagcaaagcctctttggaggctgaatggggtcccccgactctggctttcccccaggtttacatgttcttagtg

SEQ ID NO: 9459 - RNA, 98 nt, synthetic construct
  source 1..98: mol_type = other RNA
tgggtagtgggatcctgggtgcacacagcaaagcctctttggaggctgaatggggtcccccgactctggctttcccccaggtatacatgtttttggtg

SEQ ID NO: 9460 - RNA, 98 nt, synthetic construct
  source 1..98: mol_type = other RNA
tgggtagtgggatcctgggtgcacacagcaaagcctctttggaggctgaatggggtcccccgactctggctttcccccaggtttacatgtttctggtg

SEQ ID NO: 9461 - RNA, 98 nt, synthetic construct
  source 1..98: mol_type = other RNA
tgggtagtgggatcctgggtgcacacagcaaagcctctttggaggctgaatggggtcccccgactctggctttcccccaggtttacatgtttttagtg

SEQ ID NO: 9462 - RNA, 98 nt, synthetic construct
  source 1..98: mol_type = other RNA
tgggtagtgggatcctgggtgcacacagcaaagcctctttggaggctgaatggggtcccccgactctggctttcccccaggtttacatgtttttggtg

SEQ ID NO: 9463 - RNA, 98 nt, synthetic construct
  source 1..98: mol_type = other RNA
tgggtagtgggatcctgggtgcacacagcaaagcctctttggaggctgaatggggtcccccgactctggctttcccccaggtttacatgttcctggtg

SEQ ID NO: 9464 - RNA, 98 nt, synthetic construct
  source 1..98: mol_type = other RNA
tgggtagtgggatcctgggtgcacacagcaaagcctctttggaggctgaatggggtcccccgactctggctttcccccaggtgtacatgtttttggtg

SEQ ID NO: 9465 - RNA, 98 nt, synthetic construct
  source 1..98: mol_type = other RNA
tgggtagtgggatcctgggtgcacacagcaaagcctctttggaggctgaatggggtcccccgactctggctttcccccaggtatacatgttcctggtg

SEQ ID NO: 9466 - RNA, 98 nt, synthetic construct
  source 1..98: mol_type = other RNA
tgggtagtgggatcctgggtgcacacagcaaagcctctttggaggctgaatggggtcccccgactctggctttcccccaggtatacatgttcttagtg

SEQ ID NO: 9467 - RNA, 99 nt, synthetic construct
  source 1..99: mol_type = other RNA
gtgggtagtgggatcctgggtgcacacagcaaagcctctttggaggctgaatggggtcccccgactctggctttcccccaggtgtacatgttcctggtg

SEQ ID NO: 9468 - RNA, 99 nt, synthetic construct
  source 1..99: mol_type = other RNA
gtgggtagtgggatcctgggtgcacacagcaaagcctctttggaggctgaatggggtcccccgactctggctttcccccaggtatacatgtttctggtg

SEQ ID NO: 9469 - RNA, 99 nt, synthetic construct
  source 1..99: mol_type = other RNA
gtgggtagtgggatcctgggtgcacacagcaaagcctctttggaggctgaatggggtcccccgactctggctttcccccaggtgtacatgtttttggtg

SEQ ID NO: 9470 - RNA, 99 nt, synthetic construct
  source 1..99: mol_type = other RNA
gtgggtagtgggatcctgggtgcacacagcaaagcctctttggaggctgaatggggtcccccgactctggctttcccccaggtttacatgttcctggtg

SEQ ID NO: 9471 - RNA, 99 nt, synthetic construct
  source 1..99: mol_type = other RNA
gtgggtagtgggatcctgggtgcacacagcaaagcctctttggaggctgaatggggtcccccgactctggctttcccccaggtttacatgtttttggtg

SEQ ID NO: 9472 - RNA, 99 nt, synthetic construct
  source 1..99: mol_type = other RNA
gtgggtagtgggatcctgggtgcacacagcaaagcctctttggaggctgaatggggtcccccgactctggctttcccccaggtctacatgttcttggtg

SEQ ID NO: 9473 - RNA, 99 nt, synthetic construct
  source 1..99: mol_type = other RNA
gtgggtagtgggatcctgggtgcacacagcaaagcctctttggaggctgaatggggtcccccgactctggctttcccccaggtctacatgtttctggtg

SEQ ID NO: 9474 - RNA, 99 nt, synthetic construct
  source 1..99: mol_type = other RNA
gtgggtagtgggatcctgggtgcacacagcaaagcctctttggaggctgaatggggtcccccgactctggctttcccccaggtctacatgtttttagtg

SEQ ID NO: 9475 - RNA, 99 nt, synthetic construct
  source 1..99: mol_type = other RNA
gtgggtagtgggatcctgggtgcacacagcaaagcctctttggaggctgaatggggtcccccgactctggctttcccccaggtctacatgtttttggtg

SEQ ID NO: 9476 - RNA, 99 nt, synthetic construct
  source 1..99: mol_type = other RNA
gtgggtagtgggatcctgggtgcacacagcaaagcctctttggaggctgaatggggtcccccgactctggctttcccccaggtgtacatgttcttggtg

SEQ ID NO: 9477 - RNA, 99 nt, synthetic construct
  source 1..99: mol_type = other RNA
gtgggtagtgggatcctgggtgcacacagcaaagcctctttggaggctgaatggggtcccccgactctggctttcccccaggtgtacatgtttctggtg

SEQ ID NO: 9478 - RNA, 99 nt, synthetic construct
  source 1..99: mol_type = other RNA
gtgggtagtgggatcctgggtgcacacagcaaagcctctttggaggctgaatggggtcccccgactctggctttcccccaggtgtacatgtttttagtg

SEQ ID NO: 9479 - RNA, 99 nt, synthetic construct
  source 1..99: mol_type = other RNA
gtgggtagtgggatcctgggtgcacacagcaaagcctctttggaggctgaatggggtcccccgactctggctttcccccaggtatacatgtttttagtg

SEQ ID NO: 9480 - RNA, 99 nt, synthetic construct
  source 1..99: mol_type = other RNA
gtgggtagtgggatcctgggtgcacacagcaaagcctctttggaggctgaatggggtcccccgactctggctttcccccaggtttacatgttcttggtg

SEQ ID NO: 9481 - RNA, 99 nt, synthetic construct
  source 1..99: mol_type = other RNA
gtgggtagtgggatcctgggtgcacacagcaaagcctctttggaggctgaatggggtcccccgactctggctttcccccaggtttacatgtttctggtg

SEQ ID NO: 9482 - RNA, 99 nt, synthetic construct
  source 1..99: mol_type = other RNA
gtgggtagtgggatcctgggtgcacacagcaaagcctctttggaggctgaatggggtcccccgactctggctttcccccaggtgtacatgttcttagtg

SEQ ID NO: 9483 - RNA, 99 nt, synthetic construct
  source 1..99: mol_type = other RNA
gtgggtagtgggatcctgggtgcacacagcaaagcctctttggaggctgaatggggtcccccgactctggctttcccccaggtttacatgtttttagtg

SEQ ID NO: 9484 - RNA, 99 nt, synthetic construct
  source 1..99: mol_type = other RNA
gtgggtagtgggatcctgggtgcacacagcaaagcctctttggaggctgaatggggtcccccgactctggctttcccccaggtatacatgtttttggtg

SEQ ID NO: 9485 - RNA, 99 nt, synthetic construct
  source 1..99: mol_type = other RNA
gtgggtagtgggatcctgggtgcacacagcaaagcctctttggaggctgaatggggtcccccgactctggctttcccccaggtatacatgttcctggtg

SEQ ID NO: 9486 - RNA, 99 nt, synthetic construct
  source 1..99: mol_type = other RNA
gtgggtagtgggatcctgggtgcacacagcaaagcctctttggaggctgaatggggtcccccgactctggctttcccccaggtctacatgttcttagtg

SEQ ID NO: 9487 - RNA, 99 nt, synthetic construct
  source 1..99: mol_type = other RNA
gtgggtagtgggatcctgggtgcacacagcaaagcctctttggaggctgaatggggtcccccgactctggctttcccccaggtctacatgttcctggtg

SEQ ID NO: 9488 - RNA, 99 nt, synthetic construct
  source 1..99: mol_type = other RNA
gtgggtagtgggatcctgggtgcacacagcaaagcctctttggaggctgaatggggtcccccgactctggctttcccccaggtttacatgttcttagtg

SEQ ID NO: 9489 - RNA, 99 nt, synthetic construct
  source 1..99: mol_type = other RNA
gtgggtagtgggatcctgggtgcacacagcaaagcctctttggaggctgaatggggtcccccgactctggctttcccccaggtatacatgttcttagtg

SEQ ID NO: 9490 - RNA, 99 nt, synthetic construct
  source 1..99: mol_type = other RNA
gtgggtagtgggatcctgggtgcacacagcaaagcctctttggaggctgaatggggtcccccgactctggctttcccccaggtatacatgttcttggtg

SEQ ID NO: 9491 - RNA, 100 nt, synthetic construct
  source 1..100: mol_type = other RNA
agtgggtagtgggatcctgggtgcacacagcaaagcctctttggaggctgaatggggtcccccgactctggctttcccccaggtttacatgtttctggtg

SEQ ID NO: 9492 - RNA, 100 nt, synthetic construct
  source 1..100: mol_type = other RNA
agtgggtagtgggatcctgggtgcacacagcaaagcctctttggaggctgaatggggtcccccgactctggctttcccccaggtttacatgttcttggtg

SEQ ID NO: 9493 - RNA, 100 nt, synthetic construct
  source 1..100: mol_type = other RNA
agtgggtagtgggatcctgggtgcacacagcaaagcctctttggaggctgaatggggtcccccgactctggctttcccccaggtatacatgttcttagtg

SEQ ID NO: 9494 - RNA, 100 nt, synthetic construct
  source 1..100: mol_type = other RNA
agtgggtagtgggatcctgggtgcacacagcaaagcctctttggaggctgaatggggtcccccgactctggctttcccccaggtatacatgtttttggtg

SEQ ID NO: 9495 - RNA, 100 nt, synthetic construct
  source 1..100: mol_type = other RNA
agtgggtagtgggatcctgggtgcacacagcaaagcctctttggaggctgaatggggtcccccgactctggctttcccccaggtctacatgttcttagtg

SEQ ID NO: 9496 - RNA, 100 nt, synthetic construct
  source 1..100: mol_type = other RNA
agtgggtagtgggatcctgggtgcacacagcaaagcctctttggaggctgaatggggtcccccgactctggctttcccccaggtttacatgttcctggtg

SEQ ID NO: 9497 - RNA, 100 nt, synthetic construct
  source 1..100: mol_type = other RNA
agtgggtagtgggatcctgggtgcacacagcaaagcctctttggaggctgaatggggtcccccgactctggctttcccccaggtctacatgtttttggtg

SEQ ID NO: 9498 - RNA, 100 nt, synthetic construct
  source 1..100: mol_type = other RNA
agtgggtagtgggatcctgggtgcacacagcaaagcctctttggaggctgaatggggtcccccgactctggctttcccccaggtgtacatgttcctggtg

SEQ ID NO: 9499 - RNA, 100 nt, synthetic construct
  source 1..100: mol_type = other RNA
agtgggtagtgggatcctgggtgcacacagcaaagcctctttggaggctgaatggggtcccccgactctggctttcccccaggtgtacatgttcttagtg

SEQ ID NO: 9500 - RNA, 100 nt, synthetic construct
  source 1..100: mol_type = other RNA
agtgggtagtgggatcctgggtgcacacagcaaagcctctttggaggctgaatggggtcccccgactctggctttcccccaggtctacatgttcctggtg

SEQ ID NO: 9501 - RNA, 100 nt, synthetic construct
  source 1..100: mol_type = other RNA
agtgggtagtgggatcctgggtgcacacagcaaagcctctttggaggctgaatggggtcccccgactctggctttcccccaggtgtacatgttcttggtg

SEQ ID NO: 9502 - RNA, 100 nt, synthetic construct
  source 1..100: mol_type = other RNA
agtgggtagtgggatcctgggtgcacacagcaaagcctctttggaggctgaatggggtcccccgactctggctttcccccaggtgtacatgtttttagtg

SEQ ID NO: 9503 - RNA, 100 nt, synthetic construct
  source 1..100: mol_type = other RNA
agtgggtagtgggatcctgggtgcacacagcaaagcctctttggaggctgaatggggtcccccgactctggctttcccccaggtttacatgtttttggtg

SEQ ID NO: 9504 - RNA, 100 nt, synthetic construct
  source 1..100: mol_type = other RNA
agtgggtagtgggatcctgggtgcacacagcaaagcctctttggaggctgaatggggtcccccgactctggctttcccccaggtttacatgttcttagtg

SEQ ID NO: 9505 - RNA, 100 nt, synthetic construct
  source 1..100: mol_type = other RNA
agtgggtagtgggatcctgggtgcacacagcaaagcctctttggaggctgaatggggtcccccgactctggctttcccccaggtttacatgtttttagtg

SEQ ID NO: 9506 - RNA, 100 nt, synthetic construct
  source 1..100: mol_type = other RNA
agtgggtagtgggatcctgggtgcacacagcaaagcctctttggaggctgaatggggtcccccgactctggctttcccccaggtatacatgtttttagtg

SEQ ID NO: 9507 - RNA, 100 nt, synthetic construct
  source 1..100: mol_type = other RNA
agtgggtagtgggatcctgggtgcacacagcaaagcctctttggaggctgaatggggtcccccgactctggctttcccccaggtatacatgttcttggtg

SEQ ID NO: 9508 - RNA, 100 nt, synthetic construct
  source 1..100: mol_type = other RNA
agtgggtagtgggatcctgggtgcacacagcaaagcctctttggaggctgaatggggtcccccgactctggctttcccccaggtatacatgttcctggtg

SEQ ID NO: 9509 - RNA, 100 nt, synthetic construct
  source 1..100: mol_type = other RNA
agtgggtagtgggatcctgggtgcacacagcaaagcctctttggaggctgaatggggtcccccgactctggctttcccccaggtctacatgtttctggtg

SEQ ID NO: 9510 - RNA, 100 nt, synthetic construct
  source 1..100: mol_type = other RNA
agtgggtagtgggatcctgggtgcacacagcaaagcctctttggaggctgaatggggtcccccgactctggctttcccccaggtctacatgttcttggtg

SEQ ID NO: 9511 - RNA, 100 nt, synthetic construct
  source 1..100: mol_type = other RNA
agtgggtagtgggatcctgggtgcacacagcaaagcctctttggaggctgaatggggtcccccgactctggctttcccccaggtatacatgtttctggtg

SEQ ID NO: 9512 - RNA, 100 nt, synthetic construct
  source 1..100: mol_type = other RNA
agtgggtagtgggatcctgggtgcacacagcaaagcctctttggaggctgaatggggtcccccgactctggctttcccccaggtctacatgtttttagtg

SEQ ID NO: 9513 - RNA, 100 nt, synthetic construct
  source 1..100: mol_type = other RNA
agtgggtagtgggatcctgggtgcacacagcaaagcctctttggaggctgaatggggtcccccgactctggctttcccccaggtgtacatgtttttggtg

SEQ ID NO: 9514 - RNA, 100 nt, synthetic construct
  source 1..100: mol_type = other RNA
agtgggtagtgggatcctgggtgcacacagcaaagcctctttggaggctgaatggggtcccccgactctggctttcccccaggtgtacatgtttctggtg

SEQ ID NO: 9515 - RNA, 101 nt, synthetic construct
  source 1..101: mol_type = other RNA
cagtgggtagtgggatcctgggtgcacacagcaaagcctctttggaggctgaatggggtcccccgactctggctttcccccaggtttacatgtttttggtg

SEQ ID NO: 9516 - RNA, 101 nt, synthetic construct
  source 1..101: mol_type = other RNA
cagtgggtagtgggatcctgggtgcacacagcaaagcctctttggaggctgaatggggtcccccgactctggctttcccccaggtgtacatgttcctggtg

SEQ ID NO: 9517 - RNA, 101 nt, synthetic construct
  source 1..101: mol_type = other RNA
cagtgggtagtgggatcctgggtgcacacagcaaagcctctttggaggctgaatggggtcccccgactctggctttcccccaggtgtacatgttcttggtg

SEQ ID NO: 9518 - RNA, 101 nt, synthetic construct
  source 1..101: mol_type = other RNA
cagtgggtagtgggatcctgggtgcacacagcaaagcctctttggaggctgaatggggtcccccgactctggctttcccccaggtgtacatgtttctggtg

SEQ ID NO: 9519 - RNA, 101 nt, synthetic construct
  source 1..101: mol_type = other RNA
cagtgggtagtgggatcctgggtgcacacagcaaagcctctttggaggctgaatggggtcccccgactctggctttcccccaggtgtacatgtttttagtg

SEQ ID NO: 9520 - RNA, 101 nt, synthetic construct
  source 1..101: mol_type = other RNA
cagtgggtagtgggatcctgggtgcacacagcaaagcctctttggaggctgaatggggtcccccgactctggctttcccccaggtttacatgttcttagtg

SEQ ID NO: 9521 - RNA, 101 nt, synthetic construct
  source 1..101: mol_type = other RNA
cagtgggtagtgggatcctgggtgcacacagcaaagcctctttggaggctgaatggggtcccccgactctggctttcccccaggtttacatgttcctggtg

SEQ ID NO: 9522 - RNA, 101 nt, synthetic construct
  source 1..101: mol_type = other RNA
cagtgggtagtgggatcctgggtgcacacagcaaagcctctttggaggctgaatggggtcccccgactctggctttcccccaggtttacatgttcttggtg

SEQ ID NO: 9523 - RNA, 101 nt, synthetic construct
  source 1..101: mol_type = other RNA
cagtgggtagtgggatcctgggtgcacacagcaaagcctctttggaggctgaatggggtcccccgactctggctttcccccaggtttacatgtttctggtg

SEQ ID NO: 9524 - RNA, 101 nt, synthetic construct
  source 1..101: mol_type = other RNA
cagtgggtagtgggatcctgggtgcacacagcaaagcctctttggaggctgaatggggtcccccgactctggctttcccccaggtttacatgtttttagtg

SEQ ID NO: 9525 - RNA, 101 nt, synthetic construct
  source 1..101: mol_type = other RNA
cagtgggtagtgggatcctgggtgcacacagcaaagcctctttggaggctgaatggggtcccccgactctggctttcccccaggtgtacatgtttttggtg

SEQ ID NO: 9526 - RNA, 101 nt, synthetic construct
  source 1..101: mol_type = other RNA
cagtgggtagtgggatcctgggtgcacacagcaaagcctctttggaggctgaatggggtcccccgactctggctttcccccaggtctacatgtttctggtg

SEQ ID NO: 9527 - RNA, 101 nt, synthetic construct
  source 1..101: mol_type = other RNA
cagtgggtagtgggatcctgggtgcacacagcaaagcctctttggaggctgaatggggtcccccgactctggctttcccccaggtctacatgtttttagtg

SEQ ID NO: 9528 - RNA, 101 nt, synthetic construct
  source 1..101: mol_type = other RNA
cagtgggtagtgggatcctgggtgcacacagcaaagcctctttggaggctgaatggggtcccccgactctggctttcccccaggtctacatgttcttagtg

SEQ ID NO: 9529 - RNA, 101 nt, synthetic construct
  source 1..101: mol_type = other RNA
cagtgggtagtgggatcctgggtgcacacagcaaagcctctttggaggctgaatggggtcccccgactctggctttcccccaggtctacatgttcttggtg

SEQ ID NO: 9530 - RNA, 101 nt, synthetic construct
  source 1..101: mol_type = other RNA
cagtgggtagtgggatcctgggtgcacacagcaaagcctctttggaggctgaatggggtcccccgactctggctttcccccaggtctacatgttcctggtg

SEQ ID NO: 9531 - RNA, 101 nt, synthetic construct
  source 1..101: mol_type = other RNA
cagtgggtagtgggatcctgggtgcacacagcaaagcctctttggaggctgaatggggtcccccgactctggctttcccccaggtatacatgtttttggtg

SEQ ID NO: 9532 - RNA, 101 nt, synthetic construct
  source 1..101: mol_type = other RNA
cagtgggtagtgggatcctgggtgcacacagcaaagcctctttggaggctgaatggggtcccccgactctggctttcccccaggtatacatgtttttagtg

SEQ ID NO: 9533 - RNA, 101 nt, synthetic construct
  source 1..101: mol_type = other RNA
cagtgggtagtgggatcctgggtgcacacagcaaagcctctttggaggctgaatggggtcccccgactctggctttcccccaggtatacatgtttctggtg

SEQ ID NO: 9534 - RNA, 101 nt, synthetic construct
  source 1..101: mol_type = other RNA
cagtgggtagtgggatcctgggtgcacacagcaaagcctctttggaggctgaatggggtcccccgactctggctttcccccaggtatacatgttcttggtg

SEQ ID NO: 9535 - RNA, 101 nt, synthetic construct
  source 1..101: mol_type = other RNA
cagtgggtagtgggatcctgggtgcacacagcaaagcctctttggaggctgaatggggtcccccgactctggctttcccccaggtatacatgttcttagtg

SEQ ID NO: 9536 - RNA, 101 nt, synthetic construct
  source 1..101: mol_type = other RNA
cagtgggtagtgggatcctgggtgcacacagcaaagcctctttggaggctgaatggggtcccccgactctggctttcccccaggtatacatgttcctggtg

SEQ ID NO: 9537 - RNA, 101 nt, synthetic construct
  source 1..101: mol_type = other RNA
cagtgggtagtgggatcctgggtgcacacagcaaagcctctttggaggctgaatggggtcccccgactctggctttcccccaggtctacatgtttttggtg

SEQ ID NO: 9538 - RNA, 101 nt, synthetic construct
  source 1..101: mol_type = other RNA
cagtgggtagtgggatcctgggtgcacacagcaaagcctctttggaggctgaatggggtcccccgactctggctttcccccaggtgtacatgttcttagtg

SEQ ID NO: 9539 - RNA, 102 nt, synthetic construct
  source 1..102: mol_type = other RNA
ccagtgggtagtgggatcctgggtgcacacagcaaagcctctttggaggctgaatggggtcccccgactctggctttcccccaggtctacatgtttttagtg

SEQ ID NO: 9540 - RNA, 102 nt, synthetic construct
  source 1..102: mol_type = other RNA
ccagtgggtagtgggatcctgggtgcacacagcaaagcctctttggaggctgaatggggtcccccgactctggctttcccccaggtatacatgttcctggtg

SEQ ID NO: 9541 - RNA, 102 nt, synthetic construct
  source 1..102: mol_type = other RNA
ccagtgggtagtgggatcctgggtgcacacagcaaagcctctttggaggctgaatggggtcccccgactctggctttcccccaggtctacatgtttttggtg

SEQ ID NO: 9542 - RNA, 102 nt, synthetic construct
  source 1..102: mol_type = other RNA
ccagtgggtagtgggatcctgggtgcacacagcaaagcctctttggaggctgaatggggtcccccgactctggctttcccccaggtctacatgtttctggtg

SEQ ID NO: 9543 - RNA, 102 nt, synthetic construct
  source 1..102: mol_type = other RNA
ccagtgggtagtgggatcctgggtgcacacagcaaagcctctttggaggctgaatggggtcccccgactctggctttcccccaggtctacatgttcttggtg

SEQ ID NO: 9544 - RNA, 102 nt, synthetic construct
  source 1..102: mol_type = other RNA
ccagtgggtagtgggatcctgggtgcacacagcaaagcctctttggaggctgaatggggtcccccgactctggctttcccccaggtctacatgttcttagtg

SEQ ID NO: 9545 - RNA, 102 nt, synthetic construct
  source 1..102: mol_type = other RNA
ccagtgggtagtgggatcctgggtgcacacagcaaagcctctttggaggctgaatggggtcccccgactctggctttcccccaggtatacatgtttttggtg

SEQ ID NO: 9546 - RNA, 102 nt, synthetic construct
  source 1..102: mol_type = other RNA
ccagtgggtagtgggatcctgggtgcacacagcaaagcctctttggaggctgaatggggtcccccgactctggctttcccccaggtatacatgtttttagtg

SEQ ID NO: 9547 - RNA, 102 nt, synthetic construct
  source 1..102: mol_type = other RNA
ccagtgggtagtgggatcctgggtgcacacagcaaagcctctttggaggctgaatggggtcccccgactctggctttcccccaggtatacatgtttctggtg

SEQ ID NO: 9548 - RNA, 102 nt, synthetic construct
  source 1..102: mol_type = other RNA
ccagtgggtagtgggatcctgggtgcacacagcaaagcctctttggaggctgaatggggtcccccgactctggctttcccccaggtatacatgttcttggtg

SEQ ID NO: 9549 - RNA, 102 nt, synthetic construct
  source 1..102: mol_type = other RNA
ccagtgggtagtgggatcctgggtgcacacagcaaagcctctttggaggctgaatggggtcccccgactctggctttcccccaggtatacatgttcttagtg

SEQ ID NO: 9550 - RNA, 102 nt, synthetic construct
  source 1..102: mol_type = other RNA
ccagtgggtagtgggatcctgggtgcacacagcaaagcctctttggaggctgaatggggtcccccgactctggctttcccccaggtgtacatgttcctggtg

SEQ ID NO: 9551 - RNA, 102 nt, synthetic construct
  source 1..102: mol_type = other RNA
ccagtgggtagtgggatcctgggtgcacacagcaaagcctctttggaggctgaatggggtcccccgactctggctttcccccaggtgtacatgttcttagtg

SEQ ID NO: 9552 - RNA, 102 nt, synthetic construct
  source 1..102: mol_type = other RNA
ccagtgggtagtgggatcctgggtgcacacagcaaagcctctttggaggctgaatggggtcccccgactctggctttcccccaggtttacatgtttttggtg

SEQ ID NO: 9553 - RNA, 102 nt, synthetic construct
  source 1..102: mol_type = other RNA
ccagtgggtagtgggatcctgggtgcacacagcaaagcctctttggaggctgaatggggtcccccgactctggctttcccccaggtttacatgtttttagtg

SEQ ID NO: 9554 - RNA, 102 nt, synthetic construct
  source 1..102: mol_type = other RNA
ccagtgggtagtgggatcctgggtgcacacagcaaagcctctttggaggctgaatggggtcccccgactctggctttcccccaggtgtacatgttcttggtg

SEQ ID NO: 9555 - RNA, 102 nt, synthetic construct
  source 1..102: mol_type = other RNA
ccagtgggtagtgggatcctgggtgcacacagcaaagcctctttggaggctgaatggggtcccccgactctggctttcccccaggtctacatgttcctggtg

SEQ ID NO: 9556 - RNA, 102 nt, synthetic construct
  source 1..102: mol_type = other RNA
ccagtgggtagtgggatcctgggtgcacacagcaaagcctctttggaggctgaatggggtcccccgactctggctttcccccaggtttacatgttcctggtg

SEQ ID NO: 9557 - RNA, 102 nt, synthetic construct
  source 1..102: mol_type = other RNA
ccagtgggtagtgggatcctgggtgcacacagcaaagcctctttggaggctgaatggggtcccccgactctggctttcccccaggtgtacatgtttctggtg

SEQ ID NO: 9558 - RNA, 102 nt, synthetic construct
  source 1..102: mol_type = other RNA
ccagtgggtagtgggatcctgggtgcacacagcaaagcctctttggaggctgaatggggtcccccgactctggctttcccccaggtgtacatgtttttagtg

SEQ ID NO: 9559 - RNA, 102 nt, synthetic construct
  source 1..102: mol_type = other RNA
ccagtgggtagtgggatcctgggtgcacacagcaaagcctctttggaggctgaatggggtcccccgactctggctttcccccaggtgtacatgtttttggtg

SEQ ID NO: 9560 - RNA, 102 nt, synthetic construct
  source 1..102: mol_type = other RNA
ccagtgggtagtgggatcctgggtgcacacagcaaagcctctttggaggctgaatggggtcccccgactctggctttcccccaggtttacatgttcttggtg

SEQ ID NO: 9561 - RNA, 102 nt, synthetic construct
  source 1..102: mol_type = other RNA
ccagtgggtagtgggatcctgggtgcacacagcaaagcctctttggaggctgaatggggtcccccgactctggctttcccccaggtttacatgttcttagtg

SEQ ID NO: 9562 - RNA, 102 nt, synthetic construct
  source 1..102: mol_type = other RNA
ccagtgggtagtgggatcctgggtgcacacagcaaagcctctttggaggctgaatggggtcccccgactctggctttcccccaggtttacatgtttctggtg

SEQ ID NO: 9563 - RNA, 103 nt, synthetic construct
  source 1..103: mol_type = other RNA
tccagtgggtagtgggatcctgggtgcacacagcaaagcctctttggaggctgaatggggtcccccgactctggctttcccccaggtatacatgttcctggtg

SEQ ID NO: 9564 - RNA, 103 nt, synthetic construct
  source 1..103: mol_type = other RNA
tccagtgggtagtgggatcctgggtgcacacagcaaagcctctttggaggctgaatggggtcccccgactctggctttcccccaggtatacatgtttttagtg

SEQ ID NO: 9565 - RNA, 103 nt, synthetic construct
  source 1..103: mol_type = other RNA
tccagtgggtagtgggatcctgggtgcacacagcaaagcctctttggaggctgaatggggtcccccgactctggctttcccccaggtatacatgtttttggtg

SEQ ID NO: 9566 - RNA, 103 nt, synthetic construct
  source 1..103: mol_type = other RNA
tccagtgggtagtgggatcctgggtgcacacagcaaagcctctttggaggctgaatggggtcccccgactctggctttcccccaggtctacatgttcctggtg

SEQ ID NO: 9567 - RNA, 103 nt, synthetic construct
  source 1..103: mol_type = other RNA
tccagtgggtagtgggatcctgggtgcacacagcaaagcctctttggaggctgaatggggtcccccgactctggctttcccccaggtctacatgttcttagtg

SEQ ID NO: 9568 - RNA, 103 nt, synthetic construct
  source 1..103: mol_type = other RNA
tccagtgggtagtgggatcctgggtgcacacagcaaagcctctttggaggctgaatggggtcccccgactctggctttcccccaggtctacatgttcttggtg

SEQ ID NO: 9569 - RNA, 103 nt, synthetic construct
  source 1..103: mol_type = other RNA
tccagtgggtagtgggatcctgggtgcacacagcaaagcctctttggaggctgaatggggtcccccgactctggctttcccccaggtctacatgtttctggtg

SEQ ID NO: 9570 - RNA, 103 nt, synthetic construct
  source 1..103: mol_type = other RNA
tccagtgggtagtgggatcctgggtgcacacagcaaagcctctttggaggctgaatggggtcccccgactctggctttcccccaggtctacatgtttttagtg

SEQ ID NO: 9571 - RNA, 103 nt, synthetic construct
  source 1..103: mol_type = other RNA
tccagtgggtagtgggatcctgggtgcacacagcaaagcctctttggaggctgaatggggtcccccgactctggctttcccccaggtctacatgtttttggtg

SEQ ID NO: 9572 - RNA, 103 nt, synthetic construct
  source 1..103: mol_type = other RNA
tccagtgggtagtgggatcctgggtgcacacagcaaagcctctttggaggctgaatggggtcccccgactctggctttcccccaggtatacatgttcttggtg

SEQ ID NO: 9573 - RNA, 103 nt, synthetic construct
  source 1..103: mol_type = other RNA
tccagtgggtagtgggatcctgggtgcacacagcaaagcctctttggaggctgaatggggtcccccgactctggctttcccccaggtgtacatgttcttagtg

SEQ ID NO: 9574 - RNA, 103 nt, synthetic construct
  source 1..103: mol_type = other RNA
tccagtgggtagtgggatcctgggtgcacacagcaaagcctctttggaggctgaatggggtcccccgactctggctttcccccaggtatacatgttcttagtg

SEQ ID NO: 9575 - RNA, 103 nt, synthetic construct
  source 1..103: mol_type = other RNA
tccagtgggtagtgggatcctgggtgcacacagcaaagcctctttggaggctgaatggggtcccccgactctggctttcccccaggtgtacatgtttctggtg

SEQ ID NO: 9576 - RNA, 103 nt, synthetic construct
  source 1..103: mol_type = other RNA
tccagtgggtagtgggatcctgggtgcacacagcaaagcctctttggaggctgaatggggtcccccgactctggctttcccccaggtgtacatgtttttagtg

SEQ ID NO: 9577 - RNA, 103 nt, synthetic construct
  source 1..103: mol_type = other RNA
tccagtgggtagtgggatcctgggtgcacacagcaaagcctctttggaggctgaatggggtcccccgactctggctttcccccaggtttacatgttcctggtg

SEQ ID NO: 9578 - RNA, 103 nt, synthetic construct
  source 1..103: mol_type = other RNA
tccagtgggtagtgggatcctgggtgcacacagcaaagcctctttggaggctgaatggggtcccccgactctggctttcccccaggtttacatgttcttagtg

SEQ ID NO: 9579 - RNA, 103 nt, synthetic construct
  source 1..103: mol_type = other RNA
tccagtgggtagtgggatcctgggtgcacacagcaaagcctctttggaggctgaatggggtcccccgactctggctttcccccaggtttacatgttcttggtg

SEQ ID NO: 9580 - RNA, 103 nt, synthetic construct
  source 1..103: mol_type = other RNA
tccagtgggtagtgggatcctgggtgcacacagcaaagcctctttggaggctgaatggggtcccccgactctggctttcccccaggtttacatgtttctggtg

SEQ ID NO: 9581 - RNA, 103 nt, synthetic construct
  source 1..103: mol_type = other RNA
tccagtgggtagtgggatcctgggtgcacacagcaaagcctctttggaggctgaatggggtcccccgactctggctttcccccaggtttacatgtttttagtg

SEQ ID NO: 9582 - RNA, 103 nt, synthetic construct
  source 1..103: mol_type = other RNA
tccagtgggtagtgggatcctgggtgcacacagcaaagcctctttggaggctgaatggggtcccccgactctggctttcccccaggtttacatgtttttggtg

SEQ ID NO: 9583 - RNA, 103 nt, synthetic construct
  source 1..103: mol_type = other RNA
tccagtgggtagtgggatcctgggtgcacacagcaaagcctctttggaggctgaatggggtcccccgactctggctttcccccaggtatacatgtttctggtg

SEQ ID NO: 9584 - RNA, 103 nt, synthetic construct
  source 1..103: mol_type = other RNA
tccagtgggtagtgggatcctgggtgcacacagcaaagcctctttggaggctgaatggggtcccccgactctggctttcccccaggtgtacatgttcttggtg

SEQ ID NO: 9585 - RNA, 103 nt, synthetic construct
  source 1..103: mol_type = other RNA
tccagtgggtagtgggatcctgggtgcacacagcaaagcctctttggaggctgaatggggtcccccgactctggctttcccccaggtgtacatgttcctggtg

SEQ ID NO: 9586 - RNA, 103 nt, synthetic construct
  source 1..103: mol_type = other RNA
tccagtgggtagtgggatcctgggtgcacacagcaaagcctctttggaggctgaatggggtcccccgactctggctttcccccaggtgtacatgtttttggtg

SEQ ID NO: 9587 - RNA, 20 nt, synthetic construct
  source 1..20: mol_type = other RNA
gtatacatgtttttggtgaa

SEQ ID NO: 9588 - RNA, 20 nt, synthetic construct
  source 1..20: mol_type = other RNA
gtttacatgtttttggtgaa

SEQ ID NO: 9589 - RNA, 20 nt, synthetic construct
  source 1..20: mol_type = other RNA
gtttacatgtttctggtgaa

SEQ ID NO: 9590 - RNA, 20 nt, synthetic construct
  source 1..20: mol_type = other RNA
gtttacatgtttttagtgaa

SEQ ID NO: 9591 - RNA, 20 nt, synthetic construct
  source 1..20: mol_type = other RNA
gtgtacatgttcttggtgaa

SEQ ID NO: 9592 - RNA, 20 nt, synthetic construct
  source 1..20: mol_type = other RNA
gtctacatgttcttggtgaa

SEQ ID NO: 9593 - RNA, 20 nt, synthetic construct
  source 1..20: mol_type = other RNA
tcccccaggtctacatgttt

SEQ ID NO: 9594 - RNA, 20 nt, synthetic construct
  source 1..20: mol_type = other RNA
gtctacatgtttttggtgaa

SEQ ID NO: 9595 - RNA, 20 nt, synthetic construct
  source 1..20: mol_type = other RNA
gtctacatgtttttagtgaa

SEQ ID NO: 9596 - RNA, 20 nt, synthetic construct
  source 1..20: mol_type = other RNA
gtctacatgtttctggtgaa

SEQ ID NO: 9597 - RNA, 20 nt, synthetic construct
  source 1..20: mol_type = other RNA
gtgtacatgttcttagtgaa

SEQ ID NO: 9598 - RNA, 20 nt, synthetic construct
  source 1..20: mol_type = other RNA
tcccccaggtgtacatgttt

SEQ ID NO: 9599 - RNA, 20 nt, synthetic construct
  source 1..20: mol_type = other RNA
gtatacatgttcttagtgaa

SEQ ID NO: 9600 - RNA, 20 nt, synthetic construct
  source 1..20: mol_type = other RNA
gtatacatgttcttggtgaa

SEQ ID NO: 9601 - RNA, 20 nt, synthetic construct
  source 1..20: mol_type = other RNA
gtatacatgtttctggtgaa

SEQ ID NO: 9602 - RNA, 20 nt, synthetic construct
  source 1..20: mol_type = other RNA
gtatacatgtttttagtgaa

SEQ ID NO: 9603 - RNA, 20 nt, synthetic construct
  source 1..20: mol_type = other RNA
gtctacatgttcttagtgaa

SEQ ID NO: 9604 - RNA, 20 nt, synthetic construct
  source 1..20: mol_type = other RNA
gtttacatgttcttggtgaa

SEQ ID NO: 9605 - RNA, 20 nt, synthetic construct
  source 1..20: mol_type = other RNA
gtttacatgttcttagtgaa

SEQ ID NO: 9606 - RNA, 20 nt, synthetic construct
  source 1..20: mol_type = other RNA
gtgtacatgtttttggtgaa

SEQ ID NO: 9607 - RNA, 20 nt, synthetic construct
  source 1..20: mol_type = other RNA
gtgtacatgtttttagtgaa

SEQ ID NO: 9608 - RNA, 20 nt, synthetic construct
  source 1..20: mol_type = other RNA
gtgtacatgtttctggtgaa

SEQ ID NO: 9609 - RNA, 20 nt, synthetic construct
  source 1..20: mol_type = other RNA
tcccccaggtatacatgttt

SEQ ID NO: 9610 - RNA, 20 nt, synthetic construct
  source 1..20: mol_type = other RNA
tcccccaggtttacatgttt

SEQ ID NO: 9611 - RNA, 20 nt, synthetic construct
  source 1..20: mol_type = other RNA
tctgggcttcctccagtggg

SEQ ID NO: 9612 - RNA, 16 nt, synthetic construct
  source 1..16: mol_type = other RNA
acacagcaaagcctct

SEQ ID NO: 9613 - RNA, 17 nt, synthetic construct
  source 1..17: mol_type = other RNA
cacacagcaaagcctct

SEQ ID NO: 9614 - RNA, 18 nt, synthetic construct
  source 1..18: mol_type = other RNA
gcacacagcaaagcctct

SEQ ID NO: 9615 - RNA, 19 nt, synthetic construct
  source 1..19: mol_type = other RNA
tgcacacagcaaagcctct

SEQ ID NO: 9616 - RNA, 20 nt, synthetic construct
  source 1..20: mol_type = other RNA
gtgcacacagcaaagcctct

SEQ ID NO: 9617 - RNA, 21 nt, synthetic construct
  source 1..21: mol_type = other RNA
ggtgcacacagcaaagcctct

SEQ ID NO: 9618 - RNA, 22 nt, synthetic construct
  source 1..22: mol_type = other RNA
gggtgcacacagcaaagcctct

SEQ ID NO: 9619-9625 - skipped (7 entries)

SEQ ID NO: 9626 - RNA, 10 nt, synthetic construct
  source 1..10: mol_type = other RNA
ggctttgctg

SEQ ID NO: 9627 - RNA, 11 nt, synthetic construct
  source 1..11: mol_type = other RNA
ggctttgctgt

SEQ ID NO: 9628 - RNA, 12 nt, synthetic construct
  source 1..12: mol_type = other RNA
ggctttgctgtg

SEQ ID NO: 9629 - RNA, 13 nt, synthetic construct
  source 1..13: mol_type = other RNA
ggctttgctgtgt

SEQ ID NO: 9630 - RNA, 14 nt, synthetic construct
  source 1..14: mol_type = other RNA
ggctttgctgtgtg

SEQ ID NO: 9631 - RNA, 15 nt, synthetic construct
  source 1..15: mol_type = other RNA
ggctttgctgtgtgc

SEQ ID NO: 9632 - RNA, 16 nt, synthetic construct
  source 1..16: mol_type = other RNA
ggctttgctgtgtgca

SEQ ID NO: 9633 - RNA, 17 nt, synthetic construct
  source 1..17: mol_type = other RNA
ggctttgctgtgtgcac

SEQ ID NO: 9634 - RNA, 18 nt, synthetic construct
  source 1..18: mol_type = other RNA
ggctttgctgtgtgcacc

SEQ ID NO: 9635 - RNA, 19 nt, synthetic construct
  source 1..19: mol_type = other RNA
ggctttgctgtgtgcaccc

SEQ ID NO: 9636 - RNA, 47 nt, synthetic construct
  source 1..47: mol_type = other RNA
acctgggggaaagccagagtcgggggaccccattcagcctccaaaga

SEQ ID NO: 9637 - RNA, 48 nt, synthetic construct
  source 1..48: mol_type = other RNA
tacctgggggaaagccagagtcgggggaccccattcagcctccaaaga

SEQ ID NO: 9638 - RNA, 48 nt, synthetic construct
  source 1..48: mol_type = other RNA
cacctgggggaaagccagagtcgggggaccccattcagcctccaaaga

SEQ ID NO: 9639 - RNA, 48 nt, synthetic construct
  source 1..48: mol_type = other RNA
gacctgggggaaagccagagtcgggggaccccattcagcctccaaaga

SEQ ID NO: 9640 - RNA, 48 nt, synthetic construct
  source 1..48: mol_type = other RNA
aacctgggggaaagccagagtcgggggaccccattcagcctccaaaga

SEQ ID NO: 9641 - RNA, 49 nt, synthetic construct
  source 1..49: mol_type = other RNA
atacctgggggaaagccagagtcgggggaccccattcagcctccaaaga

SEQ ID NO: 9642 - RNA, 49 nt, synthetic construct
  source 1..49: mol_type = other RNA
agacctgggggaaagccagagtcgggggaccccattcagcctccaaaga

SEQ ID NO: 9643 - RNA, 49 nt, synthetic construct
  source 1..49: mol_type = other RNA
acacctgggggaaagccagagtcgggggaccccattcagcctccaaaga

SEQ ID NO: 9644 - RNA, 49 nt, synthetic construct
  source 1..49: mol_type = other RNA
aaacctgggggaaagccagagtcgggggaccccattcagcctccaaaga

SEQ ID NO: 9645 - RNA, 50 nt, synthetic construct
  source 1..50: mol_type = other RNA
tatacctgggggaaagccagagtcgggggaccccattcagcctccaaaga

SEQ ID NO: 9646 - RNA, 50 nt, synthetic construct
  source 1..50: mol_type = other RNA
taaacctgggggaaagccagagtcgggggaccccattcagcctccaaaga

SEQ ID NO: 9647 - RNA, 50 nt, synthetic construct
  source 1..50: mol_type = other RNA
tacacctgggggaaagccagagtcgggggaccccattcagcctccaaaga

SEQ ID NO: 9648 - RNA, 50 nt, synthetic construct
  source 1..50: mol_type = other RNA
tagacctgggggaaagccagagtcgggggaccccattcagcctccaaaga

SEQ ID NO: 9649 - RNA, 51 nt, synthetic construct
  source 1..51: mol_type = other RNA
gtacacctgggggaaagccagagtcgggggaccccattcagcctccaaaga

SEQ ID NO: 9650 - RNA, 51 nt, synthetic construct
  source 1..51: mol_type = other RNA
gtatacctgggggaaagccagagtcgggggaccccattcagcctccaaaga

SEQ ID NO: 9651 - RNA, 51 nt, synthetic construct
  source 1..51: mol_type = other RNA
gtagacctgggggaaagccagagtcgggggaccccattcagcctccaaaga

SEQ ID NO: 9652 - RNA, 51 nt, synthetic construct
  source 1..51: mol_type = other RNA
gtaaacctgggggaaagccagagtcgggggaccccattcagcctccaaaga

SEQ ID NO: 9653 - RNA, 52 nt, synthetic construct
  source 1..52: mol_type = other RNA
tgtaaacctgggggaaagccagagtcgggggaccccattcagcctccaaaga

SEQ ID NO: 9654 - RNA, 52 nt, synthetic construct
  source 1..52: mol_type = other RNA
tgtacacctgggggaaagccagagtcgggggaccccattcagcctccaaaga

SEQ ID NO: 9655 - RNA, 52 nt, synthetic construct
  source 1..52: mol_type = other RNA
tgtatacctgggggaaagccagagtcgggggaccccattcagcctccaaaga

SEQ ID NO: 9656 - RNA, 52 nt, synthetic construct
  source 1..52: mol_type = other RNA
tgtagacctgggggaaagccagagtcgggggaccccattcagcctccaaaga

SEQ ID NO: 9657 - RNA, 53 nt, synthetic construct
  source 1..53: mol_type = other RNA
atgtatacctgggggaaagccagagtcgggggaccccattcagcctccaaaga

SEQ ID NO: 9658 - RNA, 53 nt, synthetic construct
  source 1..53: mol_type = other RNA
atgtaaacctgggggaaagccagagtcgggggaccccattcagcctccaaaga

SEQ ID NO: 9659 - RNA, 53 nt, synthetic construct
  source 1..53: mol_type = other RNA
atgtacacctgggggaaagccagagtcgggggaccccattcagcctccaaaga

SEQ ID NO: 9660 - RNA, 53 nt, synthetic construct
  source 1..53: mol_type = other RNA
atgtagacctgggggaaagccagagtcgggggaccccattcagcctccaaaga

SEQ ID NO: 9661 - RNA, 54 nt, synthetic construct
  source 1..54: mol_type = other RNA
catgtaaacctgggggaaagccagagtcgggggaccccattcagcctccaaaga

SEQ ID NO: 9662 - RNA, 54 nt, synthetic construct
  source 1..54: mol_type = other RNA
catgtatacctgggggaaagccagagtcgggggaccccattcagcctccaaaga

SEQ ID NO: 9663 - RNA, 54 nt, synthetic construct
  source 1..54: mol_type = other RNA
catgtacacctgggggaaagccagagtcgggggaccccattcagcctccaaaga

SEQ ID NO: 9664 - RNA, 54 nt, synthetic construct
  source 1..54: mol_type = other RNA
catgtagacctgggggaaagccagagtcgggggaccccattcagcctccaaaga

SEQ ID NO: 9665 - RNA, 55 nt, synthetic construct
  source 1..55: mol_type = other RNA
acatgtagacctgggggaaagccagagtcgggggaccccattcagcctccaaaga

SEQ ID NO: 9666 - RNA, 55 nt, synthetic construct
  source 1..55: mol_type = other RNA
acatgtaaacctgggggaaagccagagtcgggggaccccattcagcctccaaaga

SEQ ID NO: 9667 - RNA, 55 nt, synthetic construct
  source 1..55: mol_type = other RNA
acatgtatacctgggggaaagccagagtcgggggaccccattcagcctccaaaga

SEQ ID NO: 9668 - RNA, 55 nt, synthetic construct
  source 1..55: mol_type = other RNA
acatgtacacctgggggaaagccagagtcgggggaccccattcagcctccaaaga

SEQ ID NO: 9669 - RNA, 56 nt, synthetic construct
  source 1..56: mol_type = other RNA
aacatgtatacctgggggaaagccagagtcgggggaccccattcagcctccaaaga

SEQ ID NO: 9670 - RNA, 56 nt, synthetic construct
  source 1..56: mol_type = other RNA
aacatgtaaacctgggggaaagccagagtcgggggaccccattcagcctccaaaga

SEQ ID NO: 9671 - RNA, 56 nt, synthetic construct
  source 1..56: mol_type = other RNA
aacatgtacacctgggggaaagccagagtcgggggaccccattcagcctccaaaga

SEQ ID NO: 9672 - RNA, 56 nt, synthetic construct
  source 1..56: mol_type = other RNA
aacatgtagacctgggggaaagccagagtcgggggaccccattcagcctccaaaga

SEQ ID NO: 9673 - RNA, 57 nt, synthetic construct
  source 1..57: mol_type = other RNA
gaacatgtatacctgggggaaagccagagtcgggggaccccattcagcctccaaaga

SEQ ID NO: 9674 - RNA, 57 nt, synthetic construct
  source 1..57: mol_type = other RNA
gaacatgtagacctgggggaaagccagagtcgggggaccccattcagcctccaaaga

SEQ ID NO: 9675 - RNA, 57 nt, synthetic construct
  source 1..57: mol_type = other RNA
gaacatgtaaacctgggggaaagccagagtcgggggaccccattcagcctccaaaga

SEQ ID NO: 9676 - RNA, 57 nt, synthetic construct
  source 1..57: mol_type = other RNA
gaacatgtacacctgggggaaagccagagtcgggggaccccattcagcctccaaaga

SEQ ID NO: 9677 - RNA, 58 nt, synthetic construct
  source 1..58: mol_type = other RNA
ggaacatgtacacctgggggaaagccagagtcgggggaccccattcagcctccaaaga

SEQ ID NO: 9678 - RNA, 58 nt, synthetic construct
  source 1..58: mol_type = other RNA
ggaacatgtagacctgggggaaagccagagtcgggggaccccattcagcctccaaaga

SEQ ID NO: 9679 - RNA, 58 nt, synthetic construct
  source 1..58: mol_type = other RNA
ggaacatgtatacctgggggaaagccagagtcgggggaccccattcagcctccaaaga

SEQ ID NO: 9680 - RNA, 58 nt, synthetic construct
  source 1..58: mol_type = other RNA
ggaacatgtaaacctgggggaaagccagagtcgggggaccccattcagcctccaaaga

SEQ ID NO: 9681 - RNA, 59 nt, synthetic construct
  source 1..59: mol_type = other RNA
aggaacatgtaaacctgggggaaagccagagtcgggggaccccattcagcctccaaaga

SEQ ID NO: 9682 - RNA, 59 nt, synthetic construct
  source 1..59: mol_type = other RNA
aggaacatgtacacctgggggaaagccagagtcgggggaccccattcagcctccaaaga

SEQ ID NO: 9683 - RNA, 59 nt, synthetic construct
  source 1..59: mol_type = other RNA
aggaacatgtatacctgggggaaagccagagtcgggggaccccattcagcctccaaaga

SEQ ID NO: 9684 - RNA, 59 nt, synthetic construct
  source 1..59: mol_type = other RNA
aggaacatgtagacctgggggaaagccagagtcgggggaccccattcagcctccaaaga

SEQ ID NO: 9685 - RNA, 60 nt, synthetic construct
  source 1..60: mol_type = other RNA
caggaacatgtacacctgggggaaagccagagtcgggggaccccattcagcctccaaaga

SEQ ID NO: 9686 - RNA, 60 nt, synthetic construct
  source 1..60: mol_type = other RNA
caggaacatgtagacctgggggaaagccagagtcgggggaccccattcagcctccaaaga

SEQ ID NO: 9687 - RNA, 60 nt, synthetic construct
  source 1..60: mol_type = other RNA
caggaacatgtaaacctgggggaaagccagagtcgggggaccccattcagcctccaaaga

SEQ ID NO: 9688 - RNA, 60 nt, synthetic construct
  source 1..60: mol_type = other RNA
caggaacatgtatacctgggggaaagccagagtcgggggaccccattcagcctccaaaga

SEQ ID NO: 9689 - RNA, 61 nt, synthetic construct
  source 1..61: mol_type = other RNA
ccaggaacatgtatacctgggggaaagccagagtcgggggaccccattcagcctccaaaga

SEQ ID NO: 9690 - RNA, 61 nt, synthetic construct
  source 1..61: mol_type = other RNA
ccaggaacatgtacacctgggggaaagccagagtcgggggaccccattcagcctccaaaga

SEQ ID NO: 9691 - RNA, 61 nt, synthetic construct
  source 1..61: mol_type = other RNA
ccaggaacatgtagacctgggggaaagccagagtcgggggaccccattcagcctccaaaga

SEQ ID NO: 9692 - RNA, 61 nt, synthetic construct
  source 1..61: mol_type = other RNA
ccaggaacatgtaaacctgggggaaagccagagtcgggggaccccattcagcctccaaaga

SEQ ID NO: 9693 - RNA, 62 nt, synthetic construct
  source 1..62: mol_type = other RNA
accaggaacatgtatacctgggggaaagccagagtcgggggaccccattcagcctccaaaga

SEQ ID NO: 9694 - RNA, 62 nt, synthetic construct
  source 1..62: mol_type = other RNA
accaggaacatgtaaacctgggggaaagccagagtcgggggaccccattcagcctccaaaga

SEQ ID NO: 9695 - RNA, 62 nt, synthetic construct
  source 1..62: mol_type = other RNA
accaggaacatgtacacctgggggaaagccagagtcgggggaccccattcagcctccaaaga

SEQ ID NO: 9696 - RNA, 62 nt, synthetic construct
  source 1..62: mol_type = other RNA
accaggaacatgtagacctgggggaaagccagagtcgggggaccccattcagcctccaaaga

SEQ ID NO: 9697 - RNA, 63 nt, synthetic construct
  source 1..63: mol_type = other RNA
caccaggaacatgtatacctgggggaaagccagagtcgggggaccccattcagcctccaaaga

SEQ ID NO: 9698 - RNA, 63 nt, synthetic construct
  source 1..63: mol_type = other RNA
caccaggaacatgtagacctgggggaaagccagagtcgggggaccccattcagcctccaaaga

SEQ ID NO: 9699 - RNA, 63 nt, synthetic construct
  source 1..63: mol_type = other RNA
caccaggaacatgtacacctgggggaaagccagagtcgggggaccccattcagcctccaaaga

SEQ ID NO: 9700 - RNA, 63 nt, synthetic construct
  source 1..63: mol_type = other RNA
caccaggaacatgtaaacctgggggaaagccagagtcgggggaccccattcagcctccaaaga

SEQ ID NO: 9701 - RNA, 64 nt, synthetic construct
  source 1..64: mol_type = other RNA
tcaccaggaacatgtaaacctgggggaaagccagagtcgggggaccccattcagcctccaaaga

SEQ ID NO: 9702 - RNA, 64 nt, synthetic construct
  source 1..64: mol_type = other RNA
tcaccaggaacatgtagacctgggggaaagccagagtcgggggaccccattcagcctccaaaga

SEQ ID NO: 9703 - RNA, 64 nt, synthetic construct
  source 1..64: mol_type = other RNA
tcaccaggaacatgtacacctgggggaaagccagagtcgggggaccccattcagcctccaaaga

SEQ ID NO: 9704 - RNA, 64 nt, synthetic construct
  source 1..64: mol_type = other RNA
tcaccaggaacatgtatacctgggggaaagccagagtcgggggaccccattcagcctccaaaga

SEQ ID NO: 9705 - RNA, 65 nt, synthetic construct
  source 1..65: mol_type = other RNA
ttcaccaggaacatgtagacctgggggaaagccagagtcgggggaccccattcagcctccaaaga

SEQ ID NO: 9706 - RNA, 65 nt, synthetic construct
  source 1..65: mol_type = other RNA
ttcaccaggaacatgtatacctgggggaaagccagagtcgggggaccccattcagcctccaaaga

SEQ ID NO: 9707 - RNA, 65 nt, synthetic construct
  source 1..65: mol_type = other RNA
ttcaccaggaacatgtacacctgggggaaagccagagtcgggggaccccattcagcctccaaaga

SEQ ID NO: 9708 - RNA, 65 nt, synthetic construct
  source 1..65: mol_type = other RNA
ttcaccaggaacatgtaaacctgggggaaagccagagtcgggggaccccattcagcctccaaaga

SEQ ID NO: 9709 - RNA, 66 nt, synthetic construct
  source 1..66: mol_type = other RNA
tttcaccaggaacatgtagacctgggggaaagccagagtcgggggaccccattcagcctccaaaga

SEQ ID NO: 9710 - RNA, 66 nt, synthetic construct
  source 1..66: mol_type = other RNA
tttcaccaggaacatgtatacctgggggaaagccagagtcgggggaccccattcagcctccaaaga

SEQ ID NO: 9711 - RNA, 66 nt, synthetic construct
  source 1..66: mol_type = other RNA
tttcaccaggaacatgtacacctgggggaaagccagagtcgggggaccccattcagcctccaaaga

SEQ ID NO: 9712 - RNA, 66 nt, synthetic construct
  source 1..66: mol_type = other RNA
tttcaccaggaacatgtaaacctgggggaaagccagagtcgggggaccccattcagcctccaaaga

SEQ ID NO: 9713 - RNA, 67 nt, synthetic construct
  source 1..67: mol_type = other RNA
atttcaccaggaacatgtatacctgggggaaagccagagtcgggggaccccattcagcctccaaaga

SEQ ID NO: 9714 - RNA, 67 nt, synthetic construct
  source 1..67: mol_type = other RNA
atttcaccaggaacatgtaaacctgggggaaagccagagtcgggggaccccattcagcctccaaaga

SEQ ID NO: 9715 - RNA, 67 nt, synthetic construct
  source 1..67: mol_type = other RNA
atttcaccaggaacatgtacacctgggggaaagccagagtcgggggaccccattcagcctccaaaga

SEQ ID NO: 9716 - RNA, 67 nt, synthetic construct
  source 1..67: mol_type = other RNA
atttcaccaggaacatgtagacctgggggaaagccagagtcgggggaccccattcagcctccaaaga

SEQ ID NO: 9717 - RNA, 68 nt, synthetic construct
  source 1..68: mol_type = other RNA
catttcaccaggaacatgtaaacctgggggaaagccagagtcgggggaccccattcagcctccaaaga

SEQ ID NO: 9718 - RNA, 68 nt, synthetic construct
  source 1..68: mol_type = other RNA
catttcaccaggaacatgtacacctgggggaaagccagagtcgggggaccccattcagcctccaaaga

SEQ ID NO: 9719 - RNA, 68 nt, synthetic construct
  source 1..68: mol_type = other RNA
catttcaccaggaacatgtagacctgggggaaagccagagtcgggggaccccattcagcctccaaaga

SEQ ID NO: 9720 - RNA, 68 nt, synthetic construct
  source 1..68: mol_type = other RNA
catttcaccaggaacatgtatacctgggggaaagccagagtcgggggaccccattcagcctccaaaga

SEQ ID NO: 9721 - RNA, 69 nt, synthetic construct
  source 1..69: mol_type = other RNA
ccatttcaccaggaacatgtagacctgggggaaagccagagtcgggggaccccattcagcctccaaaga

SEQ ID NO: 9722 - RNA, 69 nt, synthetic construct
  source 1..69: mol_type = other RNA
ccatttcaccaggaacatgtatacctgggggaaagccagagtcgggggaccccattcagcctccaaaga

SEQ ID NO: 9723 - RNA, 69 nt, synthetic construct
  source 1..69: mol_type = other RNA
ccatttcaccaggaacatgtaaacctgggggaaagccagagtcgggggaccccattcagcctccaaaga

SEQ ID NO: 9724 - RNA, 69 nt, synthetic construct
  source 1..69: mol_type = other RNA
ccatttcaccaggaacatgtacacctgggggaaagccagagtcgggggaccccattcagcctccaaaga

SEQ ID NO: 9725 - RNA, 70 nt, synthetic construct
  source 1..70: mol_type = other RNA
gccatttcaccaggaacatgtatacctgggggaaagccagagtcgggggaccccattcagcctccaaaga

SEQ ID NO: 9726 - RNA, 70 nt, synthetic construct
  source 1..70: mol_type = other RNA
gccatttcaccaggaacatgtaaacctgggggaaagccagagtcgggggaccccattcagcctccaaaga

SEQ ID NO: 9727 - RNA, 70 nt, synthetic construct
  source 1..70: mol_type = other RNA
gccatttcaccaggaacatgtacacctgggggaaagccagagtcgggggaccccattcagcctccaaaga

SEQ ID NO: 9728 - RNA, 70 nt, synthetic construct
  source 1..70: mol_type = other RNA
gccatttcaccaggaacatgtagacctgggggaaagccagagtcgggggaccccattcagcctccaaaga

SEQ ID NO: 9729 - RNA, 71 nt, synthetic construct
  source 1..71: mol_type = other RNA
tgccatttcaccaggaacatgtacacctgggggaaagccagagtcgggggaccccattcagcctccaaaga

SEQ ID NO: 9730 - RNA, 71 nt, synthetic construct
  source 1..71: mol_type = other RNA
tgccatttcaccaggaacatgtaaacctgggggaaagccagagtcgggggaccccattcagcctccaaaga

SEQ ID NO: 9731 - RNA, 71 nt, synthetic construct
  source 1..71: mol_type = other RNA
tgccatttcaccaggaacatgtatacctgggggaaagccagagtcgggggaccccattcagcctccaaaga

SEQ ID NO: 9732 - RNA, 71 nt, synthetic construct
  source 1..71: mol_type = other RNA
tgccatttcaccaggaacatgtagacctgggggaaagccagagtcgggggaccccattcagcctccaaaga

SEQ ID NO: 9733 - RNA, 72 nt, synthetic construct
  source 1..72: mol_type = other RNA
ctgccatttcaccaggaacatgtatacctgggggaaagccagagtcgggggaccccattcagcctccaaaga

SEQ ID NO: 9734 - RNA, 72 nt, synthetic construct
  source 1..72: mol_type = other RNA
ctgccatttcaccaggaacatgtaaacctgggggaaagccagagtcgggggaccccattcagcctccaaaga

SEQ ID NO: 9735 - RNA, 72 nt, synthetic construct
  source 1..72: mol_type = other RNA
ctgccatttcaccaggaacatgtacacctgggggaaagccagagtcgggggaccccattcagcctccaaaga

SEQ ID NO: 9736 - RNA, 72 nt, synthetic construct
  source 1..72: mol_type = other RNA
ctgccatttcaccaggaacatgtagacctgggggaaagccagagtcgggggaccccattcagcctccaaaga

SEQ ID NO: 9737 - RNA, 73 nt, synthetic construct
  source 1..73: mol_type = other RNA
cctgccatttcaccaggaacatgtacacctgggggaaagccagagtcgggggaccccattcagcctccaaaga

SEQ ID NO: 9738 - RNA, 73 nt, synthetic construct
  source 1..73: mol_type = other RNA
cctgccatttcaccaggaacatgtaaacctgggggaaagccagagtcgggggaccccattcagcctccaaaga

SEQ ID NO: 9739 - RNA, 73 nt, synthetic construct
  source 1..73: mol_type = other RNA
cctgccatttcaccaggaacatgtagacctgggggaaagccagagtcgggggaccccattcagcctccaaaga

SEQ ID NO: 9740 - RNA, 73 nt, synthetic construct
  source 1..73: mol_type = other RNA
cctgccatttcaccaggaacatgtatacctgggggaaagccagagtcgggggaccccattcagcctccaaaga

SEQ ID NO: 9741 - RNA, 74 nt, synthetic construct
  source 1..74: mol_type = other RNA
tcctgccatttcaccaggaacatgtagacctgggggaaagccagagtcgggggaccccattcagcctccaaaga

SEQ ID NO: 9742 - RNA, 74 nt, synthetic construct
  source 1..74: mol_type = other RNA
tcctgccatttcaccaggaacatgtatacctgggggaaagccagagtcgggggaccccattcagcctccaaaga

SEQ ID NO: 9743 - RNA, 74 nt, synthetic construct
  source 1..74: mol_type = other RNA
tcctgccatttcaccaggaacatgtaaacctgggggaaagccagagtcgggggaccccattcagcctccaaaga

SEQ ID NO: 9744 - RNA, 74 nt, synthetic construct
  source 1..74: mol_type = other RNA
tcctgccatttcaccaggaacatgtacacctgggggaaagccagagtcgggggaccccattcagcctccaaaga

SEQ ID NO: 9745 - RNA, 75 nt, synthetic construct
  source 1..75: mol_type = other RNA
gtcctgccatttcaccaggaacatgtaaacctgggggaaagccagagtcgggggaccccattcagcctccaaaga

SEQ ID NO: 9746 - RNA, 75 nt, synthetic construct
  source 1..75: mol_type = other RNA
gtcctgccatttcaccaggaacatgtatacctgggggaaagccagagtcgggggaccccattcagcctccaaaga

SEQ ID NO: 9747 - RNA, 75 nt, synthetic construct
  source 1..75: mol_type = other RNA
gtcctgccatttcaccaggaacatgtagacctgggggaaagccagagtcgggggaccccattcagcctccaaaga

SEQ ID NO: 9748 - RNA, 75 nt, synthetic construct
  source 1..75: mol_type = other RNA
gtcctgccatttcaccaggaacatgtacacctgggggaaagccagagtcgggggaccccattcagcctccaaaga

SEQ ID NO: 9749 - RNA, 76 nt, synthetic construct
  source 1..76: mol_type = other RNA
ggtcctgccatttcaccaggaacatgtatacctgggggaaagccagagtcgggggaccccattcagcctccaaaga

SEQ ID NO: 9750 - RNA, 76 nt, synthetic construct
  source 1..76: mol_type = other RNA
ggtcctgccatttcaccaggaacatgtacacctgggggaaagccagagtcgggggaccccattcagcctccaaaga

SEQ ID NO: 9751 - RNA, 76 nt, synthetic construct
  source 1..76: mol_type = other RNA
ggtcctgccatttcaccaggaacatgtagacctgggggaaagccagagtcgggggaccccattcagcctccaaaga

SEQ ID NO: 9752 - RNA, 76 nt, synthetic construct
  source 1..76: mol_type = other RNA
ggtcctgccatttcaccaggaacatgtaaacctgggggaaagccagagtcgggggaccccattcagcctccaaaga

SEQ ID NO: 9753 - RNA, 77 nt, synthetic construct
  source 1..77: mol_type = other RNA
aggtcctgccatttcaccaggaacatgtaaacctgggggaaagccagagtcgggggaccccattcagcctccaaaga

SEQ ID NO: 9754 - RNA, 77 nt, synthetic construct
  source 1..77: mol_type = other RNA
aggtcctgccatttcaccaggaacatgtacacctgggggaaagccagagtcgggggaccccattcagcctccaaaga

SEQ ID NO: 9755 - RNA, 77 nt, synthetic construct
  source 1..77: mol_type = other RNA
aggtcctgccatttcaccaggaacatgtagacctgggggaaagccagagtcgggggaccccattcagcctccaaaga

SEQ ID NO: 9756 - RNA, 77 nt, synthetic construct
  source 1..77: mol_type = other RNA
aggtcctgccatttcaccaggaacatgtatacctgggggaaagccagagtcgggggaccccattcagcctccaaaga

SEQ ID NO: 9757 - RNA, 78 nt, synthetic construct
  source 1..78: mol_type = other RNA
caggtcctgccatttcaccaggaacatgtagacctgggggaaagccagagtcgggggaccccattcagcctccaaaga

SEQ ID NO: 9758 - RNA, 78 nt, synthetic construct
  source 1..78: mol_type = other RNA
caggtcctgccatttcaccaggaacatgtacacctgggggaaagccagagtcgggggaccccattcagcctccaaaga

SEQ ID NO: 9759 - RNA, 78 nt, synthetic construct
  source 1..78: mol_type = other RNA
caggtcctgccatttcaccaggaacatgtaaacctgggggaaagccagagtcgggggaccccattcagcctccaaaga

SEQ ID NO: 9760 - RNA, 78 nt, synthetic construct
  source 1..78: mol_type = other RNA
caggtcctgccatttcaccaggaacatgtatacctgggggaaagccagagtcgggggaccccattcagcctccaaaga

SEQ ID NO: 9761 - RNA, 79 nt, synthetic construct
  source 1..79: mol_type = other RNA
acaggtcctgccatttcaccaggaacatgtacacctgggggaaagccagagtcgggggaccccattcagcctccaaaga

SEQ ID NO: 9762 - RNA, 79 nt, synthetic construct
  source 1..79: mol_type = other RNA
acaggtcctgccatttcaccaggaacatgtaaacctgggggaaagccagagtcgggggaccccattcagcctccaaaga

SEQ ID NO: 9763 - RNA, 79 nt, synthetic construct
  source 1..79: mol_type = other RNA
acaggtcctgccatttcaccaggaacatgtatacctgggggaaagccagagtcgggggaccccattcagcctccaaaga

SEQ ID NO: 9764 - RNA, 79 nt, synthetic construct
  source 1..79: mol_type = other RNA
acaggtcctgccatttcaccaggaacatgtagacctgggggaaagccagagtcgggggaccccattcagcctccaaaga

SEQ ID NO: 9765 - RNA, 80 nt, synthetic construct
  source 1..80: mol_type = other RNA
gacaggtcctgccatttcaccaggaacatgtatacctgggggaaagccagagtcgggggaccccattcagcctccaaaga

SEQ ID NO: 9766 - RNA, 80 nt, synthetic construct
  source 1..80: mol_type = other RNA
gacaggtcctgccatttcaccaggaacatgtagacctgggggaaagccagagtcgggggaccccattcagcctccaaaga

SEQ ID NO: 9767 - RNA, 80 nt, synthetic construct
  source 1..80: mol_type = other RNA
gacaggtcctgccatttcaccaggaacatgtacacctgggggaaagccagagtcgggggaccccattcagcctccaaaga

SEQ ID NO: 9768 - RNA, 80 nt, synthetic construct
  source 1..80: mol_type = other RNA
gacaggtcctgccatttcaccaggaacatgtaaacctgggggaaagccagagtcgggggaccccattcagcctccaaaga

SEQ ID NO: 9769 - RNA, 81 nt, synthetic construct
  source 1..81: mol_type = other RNA
cgacaggtcctgccatttcaccaggaacatgtacacctgggggaaagccagagtcgggggaccccattcagcctccaaaga

SEQ ID NO: 9770 - RNA, 81 nt, synthetic construct
  source 1..81: mol_type = other RNA
cgacaggtcctgccatttcaccaggaacatgtaaacctgggggaaagccagagtcgggggaccccattcagcctccaaaga

SEQ ID NO: 9771 - RNA, 81 nt, synthetic construct
  source 1..81: mol_type = other RNA
cgacaggtcctgccatttcaccaggaacatgtagacctgggggaaagccagagtcgggggaccccattcagcctccaaaga

SEQ ID NO: 9772 - RNA, 81 nt, synthetic construct
  source 1..81: mol_type = other RNA
cgacaggtcctgccatttcaccaggaacatgtatacctgggggaaagccagagtcgggggaccccattcagcctccaaaga

SEQ ID NO: 9773 - RNA, 82 nt, synthetic construct
  source 1..82: mol_type = other RNA
ccgacaggtcctgccatttcaccaggaacatgtatacctgggggaaagccagagtcgggggaccccattcagcctccaaaga

SEQ ID NO: 9774 - RNA, 82 nt, synthetic construct
  source 1..82: mol_type = other RNA
ccgacaggtcctgccatttcaccaggaacatgtagacctgggggaaagccagagtcgggggaccccattcagcctccaaaga

SEQ ID NO: 9775 - RNA, 82 nt, synthetic construct
  source 1..82: mol_type = other RNA
ccgacaggtcctgccatttcaccaggaacatgtaaacctgggggaaagccagagtcgggggaccccattcagcctccaaaga

SEQ ID NO: 9776 - RNA, 82 nt, synthetic construct
  source 1..82: mol_type = other RNA
ccgacaggtcctgccatttcaccaggaacatgtacacctgggggaaagccagagtcgggggaccccattcagcctccaaaga

SEQ ID NO: 9777 - RNA, 83 nt, synthetic construct
  source 1..83: mol_type = other RNA
tccgacaggtcctgccatttcaccaggaacatgtaaacctgggggaaagccagagtcgggggaccccattcagcctccaaaga

SEQ ID NO: 9778 - RNA, 83 nt, synthetic construct
  source 1..83: mol_type = other RNA
tccgacaggtcctgccatttcaccaggaacatgtatacctgggggaaagccagagtcgggggaccccattcagcctccaaaga

SEQ ID NO: 9779 - RNA, 83 nt, synthetic construct
  source 1..83: mol_type = other RNA
tccgacaggtcctgccatttcaccaggaacatgtagacctgggggaaagccagagtcgggggaccccattcagcctccaaaga

SEQ ID NO: 9780 - RNA, 83 nt, synthetic construct
  source 1..83: mol_type = other RNA
tccgacaggtcctgccatttcaccaggaacatgtacacctgggggaaagccagagtcgggggaccccattcagcctccaaaga

SEQ ID NO: 9781 - RNA, 84 nt, synthetic construct
  source 1..84: mol_type = other RNA
ctccgacaggtcctgccatttcaccaggaacatgtacacctgggggaaagccagagtcgggggaccccattcagcctccaaaga

SEQ ID NO: 9782 - RNA, 84 nt, synthetic construct
  source 1..84: mol_type = other RNA
ctccgacaggtcctgccatttcaccaggaacatgtatacctgggggaaagccagagtcgggggaccccattcagcctccaaaga

SEQ ID NO: 9783 - RNA, 84 nt, synthetic construct
  source 1..84: mol_type = other RNA
ctccgacaggtcctgccatttcaccaggaacatgtaaacctgggggaaagccagagtcgggggaccccattcagcctccaaaga

SEQ ID NO: 9784 - RNA, 84 nt, synthetic construct
  source 1..84: mol_type = other RNA
ctccgacaggtcctgccatttcaccaggaacatgtagacctgggggaaagccagagtcgggggaccccattcagcctccaaaga

SEQ ID NO: 9785 - RNA, 85 nt, synthetic construct
  source 1..85: mol_type = other RNA
tctccgacaggtcctgccatttcaccaggaacatgtatacctgggggaaagccagagtcgggggaccccattcagcctccaaaga

SEQ ID NO: 9786 - RNA, 85 nt, synthetic construct
  source 1..85: mol_type = other RNA
tctccgacaggtcctgccatttcaccaggaacatgtagacctgggggaaagccagagtcgggggaccccattcagcctccaaaga

SEQ ID NO: 9787 - RNA, 85 nt, synthetic construct
  source 1..85: mol_type = other RNA
tctccgacaggtcctgccatttcaccaggaacatgtacacctgggggaaagccagagtcgggggaccccattcagcctccaaaga

SEQ ID NO: 9788 - RNA, 85 nt, synthetic construct
  source 1..85: mol_type = other RNA
tctccgacaggtcctgccatttcaccaggaacatgtaaacctgggggaaagccagagtcgggggaccccattcagcctccaaaga

SEQ ID NO: 9789 - RNA, 86 nt, synthetic construct
  source 1..86: mol_type = other RNA
ttctccgacaggtcctgccatttcaccaggaacatgtacacctgggggaaagccagagtcgggggaccccattcagcctccaaaga

SEQ ID NO: 9790 - RNA, 86 nt, synthetic construct
  source 1..86: mol_type = other RNA
ttctccgacaggtcctgccatttcaccaggaacatgtaaacctgggggaaagccagagtcgggggaccccattcagcctccaaaga

SEQ ID NO: 9791 - RNA, 86 nt, synthetic construct
  source 1..86: mol_type = other RNA
ttctccgacaggtcctgccatttcaccaggaacatgtagacctgggggaaagccagagtcgggggaccccattcagcctccaaaga

SEQ ID NO: 9792 - RNA, 86 nt, synthetic construct
  source 1..86: mol_type = other RNA
ttctccgacaggtcctgccatttcaccaggaacatgtatacctgggggaaagccagagtcgggggaccccattcagcctccaaaga

SEQ ID NO: 9793 - RNA, 87 nt, synthetic construct
  source 1..87: mol_type = other RNA
cttctccgacaggtcctgccatttcaccaggaacatgtatacctgggggaaagccagagtcgggggaccccattcagcctccaaaga

SEQ ID NO: 9794 - RNA, 87 nt, synthetic construct
  source 1..87: mol_type = other RNA
cttctccgacaggtcctgccatttcaccaggaacatgtagacctgggggaaagccagagtcgggggaccccattcagcctccaaaga

SEQ ID NO: 9795 - RNA, 87 nt, synthetic construct
  source 1..87: mol_type = other RNA
cttctccgacaggtcctgccatttcaccaggaacatgtacacctgggggaaagccagagtcgggggaccccattcagcctccaaaga

SEQ ID NO: 9796 - RNA, 87 nt, synthetic construct
  source 1..87: mol_type = other RNA
cttctccgacaggtcctgccatttcaccaggaacatgtaaacctgggggaaagccagagtcgggggaccccattcagcctccaaaga

SEQ ID NO: 9797 - RNA, 88 nt, synthetic construct
  source 1..88: mol_type = other RNA
ccttctccgacaggtcctgccatttcaccaggaacatgtaaacctgggggaaagccagagtcgggggaccccattcagcctccaaaga

SEQ ID NO: 9798 - RNA, 88 nt, synthetic construct
  source 1..88: mol_type = other RNA
ccttctccgacaggtcctgccatttcaccaggaacatgtatacctgggggaaagccagagtcgggggaccccattcagcctccaaaga

SEQ ID NO: 9799 - RNA, 88 nt, synthetic construct
  source 1..88: mol_type = other RNA
ccttctccgacaggtcctgccatttcaccaggaacatgtagacctgggggaaagccagagtcgggggaccccattcagcctccaaaga

SEQ ID NO: 9800 - RNA, 88 nt, synthetic construct
  source 1..88: mol_type = other RNA
ccttctccgacaggtcctgccatttcaccaggaacatgtacacctgggggaaagccagagtcgggggaccccattcagcctccaaaga

SEQ ID NO: 9801 - RNA, 89 nt, synthetic construct
  source 1..89: mol_type = other RNA
accttctccgacaggtcctgccatttcaccaggaacatgtaaacctgggggaaagccagagtcgggggaccccattcagcctccaaaga

SEQ ID NO: 9802 - RNA, 89 nt, synthetic construct
  source 1..89: mol_type = other RNA
accttctccgacaggtcctgccatttcaccaggaacatgtatacctgggggaaagccagagtcgggggaccccattcagcctccaaaga

SEQ ID NO: 9803 - RNA, 89 nt, synthetic construct
  source 1..89: mol_type = other RNA
accttctccgacaggtcctgccatttcaccaggaacatgtagacctgggggaaagccagagtcgggggaccccattcagcctccaaaga

SEQ ID NO: 9804 - RNA, 89 nt, synthetic construct
  source 1..89: mol_type = other RNA
accttctccgacaggtcctgccatttcaccaggaacatgtacacctgggggaaagccagagtcgggggaccccattcagcctccaaaga

SEQ ID NO: 9805 - RNA, 90 nt, synthetic construct
  source 1..90: mol_type = other RNA
caccttctccgacaggtcctgccatttcaccaggaacatgtaaacctgggggaaagccagagtcgggggaccccattcagcctccaaaga

SEQ ID NO: 9806 - RNA, 90 nt, synthetic construct
  source 1..90: mol_type = other RNA
caccttctccgacaggtcctgccatttcaccaggaacatgtacacctgggggaaagccagagtcgggggaccccattcagcctccaaaga

SEQ ID NO: 9807 - RNA, 90 nt, synthetic construct
  source 1..90: mol_type = other RNA
caccttctccgacaggtcctgccatttcaccaggaacatgtagacctgggggaaagccagagtcgggggaccccattcagcctccaaaga

SEQ ID NO: 9808 - RNA, 90 nt, synthetic construct
  source 1..90: mol_type = other RNA
caccttctccgacaggtcctgccatttcaccaggaacatgtatacctgggggaaagccagagtcgggggaccccattcagcctccaaaga

SEQ ID NO: 9809 - RNA, 91 nt, synthetic construct
  source 1..91: mol_type = other RNA
ccaccttctccgacaggtcctgccatttcaccaggaacatgtaaacctgggggaaagccagagtcgggggaccccattcagcctccaaaga

SEQ ID NO: 9810 - RNA, 91 nt, synthetic construct
  source 1..91: mol_type = other RNA
ccaccttctccgacaggtcctgccatttcaccaggaacatgtacacctgggggaaagccagagtcgggggaccccattcagcctccaaaga

SEQ ID NO: 9811 - RNA, 91 nt, synthetic construct
  source 1..91: mol_type = other RNA
ccaccttctccgacaggtcctgccatttcaccaggaacatgtagacctgggggaaagccagagtcgggggaccccattcagcctccaaaga

SEQ ID NO: 9812 - RNA, 91 nt, synthetic construct
  source 1..91: mol_type = other RNA
ccaccttctccgacaggtcctgccatttcaccaggaacatgtatacctgggggaaagccagagtcgggggaccccattcagcctccaaaga

SEQ ID NO: 9813 - RNA, 92 nt, synthetic construct
  source 1..92: mol_type = other RNA
accaccttctccgacaggtcctgccatttcaccaggaacatgtacacctgggggaaagccagagtcgggggaccccattcagcctccaaaga

SEQ ID NO: 9814 - RNA, 92 nt, synthetic construct
  source 1..92: mol_type = other RNA
accaccttctccgacaggtcctgccatttcaccaggaacatgtagacctgggggaaagccagagtcgggggaccccattcagcctccaaaga

SEQ ID NO: 9815 - RNA, 92 nt, synthetic construct
  source 1..92: mol_type = other RNA
accaccttctccgacaggtcctgccatttcaccaggaacatgtatacctgggggaaagccagagtcgggggaccccattcagcctccaaaga

SEQ ID NO: 9816 - RNA, 92 nt, synthetic construct
  source 1..92: mol_type = other RNA
accaccttctccgacaggtcctgccatttcaccaggaacatgtaaacctgggggaaagccagagtcgggggaccccattcagcctccaaaga

SEQ ID NO: 9817 - RNA, 93 nt, synthetic construct
  source 1..93: mol_type = other RNA
gaccaccttctccgacaggtcctgccatttcaccaggaacatgtagacctgggggaaagccagagtcgggggaccccattcagcctccaaaga

SEQ ID NO: 9818 - RNA, 93 nt, synthetic construct
  source 1..93: mol_type = other RNA
gaccaccttctccgacaggtcctgccatttcaccaggaacatgtacacctgggggaaagccagagtcgggggaccccattcagcctccaaaga

SEQ ID NO: 9819 - RNA, 93 nt, synthetic construct
  source 1..93: mol_type = other RNA
gaccaccttctccgacaggtcctgccatttcaccaggaacatgtaaacctgggggaaagccagagtcgggggaccccattcagcctccaaaga

SEQ ID NO: 9820 - RNA, 93 nt, synthetic construct
  source 1..93: mol_type = other RNA
gaccaccttctccgacaggtcctgccatttcaccaggaacatgtatacctgggggaaagccagagtcgggggaccccattcagcctccaaaga

SEQ ID NO: 9821 - RNA, 94 nt, synthetic construct
  source 1..94: mol_type = other RNA
agaccaccttctccgacaggtcctgccatttcaccaggaacatgtatacctgggggaaagccagagtcgggggaccccattcagcctccaaaga

SEQ ID NO: 9822 - RNA, 94 nt, synthetic construct
  source 1..94: mol_type = other RNA
agaccaccttctccgacaggtcctgccatttcaccaggaacatgtagacctgggggaaagccagagtcgggggaccccattcagcctccaaaga

SEQ ID NO: 9823 - RNA, 94 nt, synthetic construct
  source 1..94: mol_type = other RNA
agaccaccttctccgacaggtcctgccatttcaccaggaacatgtacacctgggggaaagccagagtcgggggaccccattcagcctccaaaga

SEQ ID NO: 9824 - RNA, 94 nt, synthetic construct
  source 1..94: mol_type = other RNA
agaccaccttctccgacaggtcctgccatttcaccaggaacatgtaaacctgggggaaagccagagtcgggggaccccattcagcctccaaaga

SEQ ID NO: 9825 - RNA, 95 nt, synthetic construct
  source 1..95: mol_type = other RNA
tagaccaccttctccgacaggtcctgccatttcaccaggaacatgtagacctgggggaaagccagagtcgggggaccccattcagcctccaaaga

SEQ ID NO: 9826 - RNA, 95 nt, synthetic construct
  source 1..95: mol_type = other RNA
tagaccaccttctccgacaggtcctgccatttcaccaggaacatgtatacctgggggaaagccagagtcgggggaccccattcagcctccaaaga

SEQ ID NO: 9827 - RNA, 95 nt, synthetic construct
  source 1..95: mol_type = other RNA
tagaccaccttctccgacaggtcctgccatttcaccaggaacatgtacacctgggggaaagccagagtcgggggaccccattcagcctccaaaga

SEQ ID NO: 9828 - RNA, 95 nt, synthetic construct
  source 1..95: mol_type = other RNA
tagaccaccttctccgacaggtcctgccatttcaccaggaacatgtaaacctgggggaaagccagagtcgggggaccccattcagcctccaaaga

SEQ ID NO: 9829 - RNA, 96 nt, synthetic construct
  source 1..96: mol_type = other RNA
gtagaccaccttctccgacaggtcctgccatttcaccaggaacatgtacacctgggggaaagccagagtcgggggaccccattcagcctccaaaga

SEQ ID NO: 9830 - RNA, 96 nt, synthetic construct
  source 1..96: mol_type = other RNA
gtagaccaccttctccgacaggtcctgccatttcaccaggaacatgtagacctgggggaaagccagagtcgggggaccccattcagcctccaaaga

SEQ ID NO: 9831 - RNA, 96 nt, synthetic construct
  source 1..96: mol_type = other RNA
gtagaccaccttctccgacaggtcctgccatttcaccaggaacatgtaaacctgggggaaagccagagtcgggggaccccattcagcctccaaaga

SEQ ID NO: 9832 - RNA, 96 nt, synthetic construct
  source 1..96: mol_type = other RNA
gtagaccaccttctccgacaggtcctgccatttcaccaggaacatgtatacctgggggaaagccagagtcgggggaccccattcagcctccaaaga

SEQ ID NO: 9833 - RNA, 97 nt, synthetic construct
  source 1..97: mol_type = other RNA
ggtagaccaccttctccgacaggtcctgccatttcaccaggaacatgtatacctgggggaaagccagagtcgggggaccccattcagcctccaaaga

SEQ ID NO: 9834 - RNA, 97 nt, synthetic construct
  source 1..97: mol_type = other RNA
ggtagaccaccttctccgacaggtcctgccatttcaccaggaacatgtagacctgggggaaagccagagtcgggggaccccattcagcctccaaaga

SEQ ID NO: 9835 - RNA, 97 nt, synthetic construct
  source 1..97: mol_type = other RNA
ggtagaccaccttctccgacaggtcctgccatttcaccaggaacatgtacacctgggggaaagccagagtcgggggaccccattcagcctccaaaga

SEQ ID NO: 9836 - RNA, 97 nt, synthetic construct
  source 1..97: mol_type = other RNA
ggtagaccaccttctccgacaggtcctgccatttcaccaggaacatgtaaacctgggggaaagccagagtcgggggaccccattcagcctccaaaga

SEQ ID NO: 9837 - RNA, 98 nt, synthetic construct
  source 1..98: mol_type = other RNA
cggtagaccaccttctccgacaggtcctgccatttcaccaggaacatgtatacctgggggaaagccagagtcgggggaccccattcagcctccaaaga

SEQ ID NO: 9838 - RNA, 98 nt, synthetic construct
  source 1..98: mol_type = other RNA
cggtagaccaccttctccgacaggtcctgccatttcaccaggaacatgtacacctgggggaaagccagagtcgggggaccccattcagcctccaaaga

SEQ ID NO: 9839 - RNA, 98 nt, synthetic construct
  source 1..98: mol_type = other RNA
cggtagaccaccttctccgacaggtcctgccatttcaccaggaacatgtaaacctgggggaaagccagagtcgggggaccccattcagcctccaaaga

SEQ ID NO: 9840 - RNA, 98 nt, synthetic construct
  source 1..98: mol_type = other RNA
cggtagaccaccttctccgacaggtcctgccatttcaccaggaacatgtagacctgggggaaagccagagtcgggggaccccattcagcctccaaaga

SEQ ID NO: 9841 - RNA, 99 nt, synthetic construct
  source 1..99: mol_type = other RNA
ccggtagaccaccttctccgacaggtcctgccatttcaccaggaacatgtatacctgggggaaagccagagtcgggggaccccattcagcctccaaaga

SEQ ID NO: 9842 - RNA, 99 nt, synthetic construct
  source 1..99: mol_type = other RNA
ccggtagaccaccttctccgacaggtcctgccatttcaccaggaacatgtacacctgggggaaagccagagtcgggggaccccattcagcctccaaaga

SEQ ID NO: 9843 - RNA, 99 nt, synthetic construct
  source 1..99: mol_type = other RNA
ccggtagaccaccttctccgacaggtcctgccatttcaccaggaacatgtagacctgggggaaagccagagtcgggggaccccattcagcctccaaaga

SEQ ID NO: 9844 - RNA, 99 nt, synthetic construct
  source 1..99: mol_type = other RNA
ccggtagaccaccttctccgacaggtcctgccatttcaccaggaacatgtaaacctgggggaaagccagagtcgggggaccccattcagcctccaaaga

SEQ ID NO: 9845 - RNA, 100 nt, synthetic construct
  source 1..100: mol_type = other RNA
gccggtagaccaccttctccgacaggtcctgccatttcaccaggaacatgtaaacctgggggaaagccagagtcgggggaccccattcagcctccaaaga

SEQ ID NO: 9846 - RNA, 100 nt, synthetic construct
  source 1..100: mol_type = other RNA
gccggtagaccaccttctccgacaggtcctgccatttcaccaggaacatgtagacctgggggaaagccagagtcgggggaccccattcagcctccaaaga

SEQ ID NO: 9847 - RNA, 100 nt, synthetic construct
  source 1..100: mol_type = other RNA
gccggtagaccaccttctccgacaggtcctgccatttcaccaggaacatgtatacctgggggaaagccagagtcgggggaccccattcagcctccaaaga

SEQ ID NO: 9848 - RNA, 100 nt, synthetic construct
  source 1..100: mol_type = other RNA
gccggtagaccaccttctccgacaggtcctgccatttcaccaggaacatgtacacctgggggaaagccagagtcgggggaccccattcagcctccaaaga

SEQ ID NO: 9849 - RNA, 101 nt, synthetic construct
  source 1..101: mol_type = other RNA
cgccggtagaccaccttctccgacaggtcctgccatttcaccaggaacatgtaaacctgggggaaagccagagtcgggggaccccattcagcctccaaaga

SEQ ID NO: 9850 - RNA, 101 nt, synthetic construct
  source 1..101: mol_type = other RNA
cgccggtagaccaccttctccgacaggtcctgccatttcaccaggaacatgtacacctgggggaaagccagagtcgggggaccccattcagcctccaaaga

SEQ ID NO: 9851 - RNA, 101 nt, synthetic construct
  source 1..101: mol_type = other RNA
cgccggtagaccaccttctccgacaggtcctgccatttcaccaggaacatgtagacctgggggaaagccagagtcgggggaccccattcagcctccaaaga

SEQ ID NO: 9852 - RNA, 101 nt, synthetic construct
  source 1..101: mol_type = other RNA
cgccggtagaccaccttctccgacaggtcctgccatttcaccaggaacatgtatacctgggggaaagccagagtcgggggaccccattcagcctccaaaga

SEQ ID NO: 9853 - RNA, 102 nt, synthetic construct
  source 1..102: mol_type = other RNA
gcgccggtagaccaccttctccgacaggtcctgccatttcaccaggaacatgtaaacctgggggaaagccagagtcgggggaccccattcagcctccaaaga

SEQ ID NO: 9854 - RNA, 102 nt, synthetic construct
  source 1..102: mol_type = other RNA
gcgccggtagaccaccttctccgacaggtcctgccatttcaccaggaacatgtacacctgggggaaagccagagtcgggggaccccattcagcctccaaaga

SEQ ID NO: 9855 - RNA, 102 nt, synthetic construct
  source 1..102: mol_type = other RNA
gcgccggtagaccaccttctccgacaggtcctgccatttcaccaggaacatgtagacctgggggaaagccagagtcgggggaccccattcagcctccaaaga

SEQ ID NO: 9856 - RNA, 102 nt, synthetic construct
  source 1..102: mol_type = other RNA
gcgccggtagaccaccttctccgacaggtcctgccatttcaccaggaacatgtatacctgggggaaagccagagtcgggggaccccattcagcctccaaaga

SEQ ID NO: 9857 - RNA, 103 nt, synthetic construct
  source 1..103: mol_type = other RNA
agcgccggtagaccaccttctccgacaggtcctgccatttcaccaggaacatgtacacctgggggaaagccagagtcgggggaccccattcagcctccaaaga

SEQ ID NO: 9858 - RNA, 103 nt, synthetic construct
  source 1..103: mol_type = other RNA
agcgccggtagaccaccttctccgacaggtcctgccatttcaccaggaacatgtaaacctgggggaaagccagagtcgggggaccccattcagcctccaaaga

SEQ ID NO: 9859 - RNA, 103 nt, synthetic construct
  source 1..103: mol_type = other RNA
agcgccggtagaccaccttctccgacaggtcctgccatttcaccaggaacatgtagacctgggggaaagccagagtcgggggaccccattcagcctccaaaga

SEQ ID NO: 9860 - RNA, 103 nt, synthetic construct
  source 1..103: mol_type = other RNA
agcgccggtagaccaccttctccgacaggtcctgccatttcaccaggaacatgtatacctgggggaaagccagagtcgggggaccccattcagcctccaaaga

SEQ ID NO: 9861 - RNA, 16 nt, synthetic construct
  source 1..16: mol_type = other RNA
gactctggctttcccc

SEQ ID NO: 9862 - RNA, 17 nt, synthetic construct
  source 1..17: mol_type = other RNA
cgactctggctttcccc

SEQ ID NO: 9863 - RNA, 18 nt, synthetic construct
  source 1..18: mol_type = other RNA
ccgactctggctttcccc

SEQ ID NO: 9864 - RNA, 19 nt, synthetic construct
  source 1..19: mol_type = other RNA
cccgactctggctttcccc

SEQ ID NO: 9865 - RNA, 20 nt, synthetic construct
  source 1..20: mol_type = other RNA
ccccgactctggctttcccc

SEQ ID NO: 9866 - RNA, 21 nt, synthetic construct
  source 1..21: mol_type = other RNA
cccccgactctggctttcccc

SEQ ID NO: 9867 - RNA, 22 nt, synthetic construct
  source 1..22: mol_type = other RNA
tcccccgactctggctttcccc

SEQ ID NO: 9868-9874 - skipped (7 entries)

SEQ ID NO: 9875 - RNA, 10 nt, synthetic construct
  source 1..10: mol_type = other RNA
gaaagccaga

SEQ ID NO: 9876 - RNA, 11 nt, synthetic construct
  source 1..11: mol_type = other RNA
gaaagccagag

SEQ ID NO: 9877 - RNA, 12 nt, synthetic construct
  source 1..12: mol_type = other RNA
gaaagccagagt

SEQ ID NO: 9878 - RNA, 13 nt, synthetic construct
  source 1..13: mol_type = other RNA
gaaagccagagtc

SEQ ID NO: 9879 - RNA, 14 nt, synthetic construct
  source 1..14: mol_type = other RNA
gaaagccagagtcg

SEQ ID NO: 9880 - RNA, 15 nt, synthetic construct
  source 1..15: mol_type = other RNA
gaaagccagagtcgg

SEQ ID NO: 9881 - RNA, 16 nt, synthetic construct
  source 1..16: mol_type = other RNA
gaaagccagagtcggg

SEQ ID NO: 9882 - RNA, 17 nt, synthetic construct
  source 1..17: mol_type = other RNA
gaaagccagagtcgggg

SEQ ID NO: 9883 - RNA, 18 nt, synthetic construct
  source 1..18: mol_type = other RNA
gaaagccagagtcggggg

SEQ ID NO: 9884 - RNA, 19 nt, synthetic construct
  source 1..19: mol_type = other RNA
gaaagccagagtcggggga

SEQ ID NO: 9885 - RNA, 10 nt, synthetic construct
  source 1..10: mol_type = other RNA
acacctgggg

SEQ ID NO: 9886 - RNA, 10 nt, synthetic construct
  source 1..10: mol_type = other RNA
aaacctgggg

SEQ ID NO: 9887 - RNA, 10 nt, synthetic construct
  source 1..10: mol_type = other RNA
atacctgggg

SEQ ID NO: 9888 - RNA, 10 nt, synthetic construct
  source 1..10: mol_type = other RNA
agacctgggg

SEQ ID NO: 9889 - RNA, 11 nt, synthetic construct
  source 1..11: mol_type = other RNA
tacacctgggg

SEQ ID NO: 9890 - RNA, 11 nt, synthetic construct
  source 1..11: mol_type = other RNA
taaacctgggg

SEQ ID NO: 9891 - RNA, 11 nt, synthetic construct
  source 1..11: mol_type = other RNA
tatacctgggg

SEQ ID NO: 9892 - RNA, 11 nt, synthetic construct
  source 1..11: mol_type = other RNA
tagacctgggg

SEQ ID NO: 9893 - RNA, 12 nt, synthetic construct
  source 1..12: mol_type = other RNA
gtatacctgggg

SEQ ID NO: 9894 - RNA, 12 nt, synthetic construct
  source 1..12: mol_type = other RNA
gtaaacctgggg

SEQ ID NO: 9895 - RNA, 12 nt, synthetic construct
  source 1..12: mol_type = other RNA
gtacacctgggg

SEQ ID NO: 9896 - RNA, 12 nt, synthetic construct
  source 1..12: mol_type = other RNA
gtagacctgggg

SEQ ID NO: 9897 - RNA, 13 nt, synthetic construct
  source 1..13: mol_type = other RNA
tgtagacctgggg

SEQ ID NO: 9898 - RNA, 13 nt, synthetic construct
  source 1..13: mol_type = other RNA
tgtacacctgggg

SEQ ID NO: 9899 - RNA, 13 nt, synthetic construct
  source 1..13: mol_type = other RNA
tgtaaacctgggg

SEQ ID NO: 9900 - RNA, 13 nt, synthetic construct
  source 1..13: mol_type = other RNA
tgtatacctgggg

SEQ ID NO: 9901 - RNA, 14 nt, synthetic construct
  source 1..14: mol_type = other RNA
atgtagacctgggg

SEQ ID NO: 9902 - RNA, 14 nt, synthetic construct
  source 1..14: mol_type = other RNA
atgtacacctgggg

SEQ ID NO: 9903 - RNA, 14 nt, synthetic construct
  source 1..14: mol_type = other RNA
atgtaaacctgggg

SEQ ID NO: 9904 - RNA, 14 nt, synthetic construct
  source 1..14: mol_type = other RNA
atgtatacctgggg

SEQ ID NO: 9905 - RNA, 15 nt, synthetic construct
  source 1..15: mol_type = other RNA
catgtaaacctgggg

SEQ ID NO: 9906 - RNA, 15 nt, synthetic construct
  source 1..15: mol_type = other RNA
catgtagacctgggg

SEQ ID NO: 9907 - RNA, 15 nt, synthetic construct
  source 1..15: mol_type = other RNA
catgtatacctgggg

SEQ ID NO: 9908 - RNA, 15 nt, synthetic construct
  source 1..15: mol_type = other RNA
catgtacacctgggg

SEQ ID NO: 9909 - RNA, 16 nt, synthetic construct
  source 1..16: mol_type = other RNA
acatgtagacctgggg

SEQ ID NO: 9910 - RNA, 16 nt, synthetic construct
  source 1..16: mol_type = other RNA
acatgtatacctgggg

SEQ ID NO: 9911 - RNA, 16 nt, synthetic construct
  source 1..16: mol_type = other RNA
acatgtacacctgggg

SEQ ID NO: 9912 - RNA, 16 nt, synthetic construct
  source 1..16: mol_type = other RNA
acatgtaaacctgggg

SEQ ID NO: 9913 - RNA, 17 nt, synthetic construct
  source 1..17: mol_type = other RNA
aacatgtagacctgggg

SEQ ID NO: 9914 - RNA, 17 nt, synthetic construct
  source 1..17: mol_type = other RNA
aacatgtaaacctgggg

SEQ ID NO: 9915 - RNA, 17 nt, synthetic construct
  source 1..17: mol_type = other RNA
aacatgtacacctgggg

SEQ ID NO: 9916 - RNA, 17 nt, synthetic construct
  source 1..17: mol_type = other RNA
aacatgtatacctgggg

SEQ ID NO: 9917 - RNA, 18 nt, synthetic construct
  source 1..18: mol_type = other RNA
gaacatgtacacctgggg

SEQ ID NO: 9918 - RNA, 18 nt, synthetic construct
  source 1..18: mol_type = other RNA
gaacatgtatacctgggg

SEQ ID NO: 9919 - RNA, 18 nt, synthetic construct
  source 1..18: mol_type = other RNA
gaacatgtagacctgggg

SEQ ID NO: 9920 - RNA, 18 nt, synthetic construct
  source 1..18: mol_type = other RNA
gaacatgtaaacctgggg

SEQ ID NO: 9921 - RNA, 19 nt, synthetic construct
  source 1..19: mol_type = other RNA
ggaacatgtagacctgggg

SEQ ID NO: 9922 - RNA, 19 nt, synthetic construct
  source 1..19: mol_type = other RNA
ggaacatgtatacctgggg

SEQ ID NO: 9923 - RNA, 19 nt, synthetic construct
  source 1..19: mol_type = other RNA
ggaacatgtacacctgggg

SEQ ID NO: 9924 - RNA, 19 nt, synthetic construct
  source 1..19: mol_type = other RNA
ggaacatgtaaacctgggg

SEQ ID NO: 9925 - RNA, 20 nt, synthetic construct
  source 1..20: mol_type = other RNA
aggaacatgtaaacctgggg

SEQ ID NO: 9926 - RNA, 20 nt, synthetic construct
  source 1..20: mol_type = other RNA
aggaacatgtatacctgggg

SEQ ID NO: 9927 - RNA, 20 nt, synthetic construct
  source 1..20: mol_type = other RNA
aggaacatgtagacctgggg

SEQ ID NO: 9928 - RNA, 20 nt, synthetic construct
  source 1..20: mol_type = other RNA
aggaacatgtacacctgggg

SEQ ID NO: 9929 - RNA, 21 nt, synthetic construct
  source 1..21: mol_type = other RNA
caggaacatgtacacctgggg

SEQ ID NO: 9930 - RNA, 21 nt, synthetic construct
  source 1..21: mol_type = other RNA
caggaacatgtagacctgggg

SEQ ID NO: 9931 - RNA, 21 nt, synthetic construct
  source 1..21: mol_type = other RNA
caggaacatgtaaacctgggg

SEQ ID NO: 9932 - RNA, 21 nt, synthetic construct
  source 1..21: mol_type = other RNA
caggaacatgtatacctgggg

SEQ ID NO: 9933 - RNA, 22 nt, synthetic construct
  source 1..22: mol_type = other RNA
ccaggaacatgtagacctgggg

SEQ ID NO: 9934 - RNA, 22 nt, synthetic construct
  source 1..22: mol_type = other RNA
ccaggaacatgtatacctgggg

SEQ ID NO: 9935 - RNA, 22 nt, synthetic construct
  source 1..22: mol_type = other RNA
ccaggaacatgtacacctgggg

SEQ ID NO: 9936 - RNA, 22 nt, synthetic construct
  source 1..22: mol_type = other RNA
ccaggaacatgtaaacctgggg

SEQ ID NO: 9937 - RNA, 23 nt, synthetic construct
  source 1..23: mol_type = other RNA
accaggaacatgtagacctgggg

SEQ ID NO: 9938 - RNA, 23 nt, synthetic construct
  source 1..23: mol_type = other RNA
accaggaacatgtacacctgggg

SEQ ID NO: 9939 - RNA, 23 nt, synthetic construct
  source 1..23: mol_type = other RNA
accaggaacatgtatacctgggg

SEQ ID NO: 9940 - RNA, 23 nt, synthetic construct
  source 1..23: mol_type = other RNA
accaggaacatgtaaacctgggg

SEQ ID NO: 9941 - RNA, 24 nt, synthetic construct
  source 1..24: mol_type = other RNA
caccaggaacatgtagacctgggg

SEQ ID NO: 9942 - RNA, 24 nt, synthetic construct
  source 1..24: mol_type = other RNA
caccaggaacatgtatacctgggg

SEQ ID NO: 9943 - RNA, 24 nt, synthetic construct
  source 1..24: mol_type = other RNA
caccaggaacatgtacacctgggg

SEQ ID NO: 9944 - RNA, 24 nt, synthetic construct
  source 1..24: mol_type = other RNA
caccaggaacatgtaaacctgggg

SEQ ID NO: 9945 - RNA, 25 nt, synthetic construct
  source 1..25: mol_type = other RNA
tcaccaggaacatgtagacctgggg

SEQ ID NO: 9946 - RNA, 25 nt, synthetic construct
  source 1..25: mol_type = other RNA
tcaccaggaacatgtacacctgggg

SEQ ID NO: 9947 - RNA, 25 nt, synthetic construct
  source 1..25: mol_type = other RNA
tcaccaggaacatgtaaacctgggg

SEQ ID NO: 9948 - RNA, 25 nt, synthetic construct
  source 1..25: mol_type = other RNA
tcaccaggaacatgtatacctgggg

SEQ ID NO: 9949 - RNA, 26 nt, synthetic construct
  source 1..26: mol_type = other RNA
ttcaccaggaacatgtaaacctgggg

SEQ ID NO: 9950 - RNA, 26 nt, synthetic construct
  source 1..26: mol_type = other RNA
ttcaccaggaacatgtagacctgggg

SEQ ID NO: 9951 - RNA, 26 nt, synthetic construct
  source 1..26: mol_type = other RNA
ttcaccaggaacatgtacacctgggg

SEQ ID NO: 9952 - RNA, 26 nt, synthetic construct
  source 1..26: mol_type = other RNA
ttcaccaggaacatgtatacctgggg

SEQ ID NO: 9953 - RNA, 27 nt, synthetic construct
  source 1..27: mol_type = other RNA
tttcaccaggaacatgtaaacctgggg

SEQ ID NO: 9954 - RNA, 27 nt, synthetic construct
  source 1..27: mol_type = other RNA
tttcaccaggaacatgtagacctgggg

SEQ ID NO: 9955 - RNA, 27 nt, synthetic construct
  source 1..27: mol_type = other RNA
tttcaccaggaacatgtatacctgggg

SEQ ID NO: 9956 - RNA, 27 nt, synthetic construct
  source 1..27: mol_type = other RNA
tttcaccaggaacatgtacacctgggg

SEQ ID NO: 9957 - RNA, 28 nt, synthetic construct
  source 1..28: mol_type = other RNA
atttcaccaggaacatgtaaacctgggg

SEQ ID NO: 9958 - RNA, 28 nt, synthetic construct
  source 1..28: mol_type = other RNA
atttcaccaggaacatgtagacctgggg

SEQ ID NO: 9959 - RNA, 28 nt, synthetic construct
  source 1..28: mol_type = other RNA
atttcaccaggaacatgtacacctgggg

SEQ ID NO: 9960 - RNA, 28 nt, synthetic construct
  source 1..28: mol_type = other RNA
atttcaccaggaacatgtatacctgggg

SEQ ID NO: 9961 - RNA, 29 nt, synthetic construct
  source 1..29: mol_type = other RNA
catttcaccaggaacatgtaaacctgggg

SEQ ID NO: 9962 - RNA, 29 nt, synthetic construct
  source 1..29: mol_type = other RNA
catttcaccaggaacatgtagacctgggg

SEQ ID NO: 9963 - RNA, 29 nt, synthetic construct
  source 1..29: mol_type = other RNA
catttcaccaggaacatgtatacctgggg

SEQ ID NO: 9964 - RNA, 29 nt, synthetic construct
  source 1..29: mol_type = other RNA
catttcaccaggaacatgtacacctgggg

SEQ ID NO: 9965 - RNA, 30 nt, synthetic construct
  source 1..30: mol_type = other RNA
ccatttcaccaggaacatgtatacctgggg

SEQ ID NO: 9966 - RNA, 30 nt, synthetic construct
  source 1..30: mol_type = other RNA
ccatttcaccaggaacatgtaaacctgggg

SEQ ID NO: 9967 - RNA, 30 nt, synthetic construct
  source 1..30: mol_type = other RNA
ccatttcaccaggaacatgtacacctgggg

SEQ ID NO: 9968 - RNA, 30 nt, synthetic construct
  source 1..30: mol_type = other RNA
ccatttcaccaggaacatgtagacctgggg

SEQ ID NO: 9969 - RNA, 31 nt, synthetic construct
  source 1..31: mol_type = other RNA
gccatttcaccaggaacatgtaaacctgggg

SEQ ID NO: 9970 - RNA, 31 nt, synthetic construct
  source 1..31: mol_type = other RNA
gccatttcaccaggaacatgtatacctgggg

SEQ ID NO: 9971 - RNA, 31 nt, synthetic construct
  source 1..31: mol_type = other RNA
gccatttcaccaggaacatgtagacctgggg

SEQ ID NO: 9972 - RNA, 31 nt, synthetic construct
  source 1..31: mol_type = other RNA
gccatttcaccaggaacatgtacacctgggg

SEQ ID NO: 9973 - RNA, 32 nt, synthetic construct
  source 1..32: mol_type = other RNA
tgccatttcaccaggaacatgtaaacctgggg

SEQ ID NO: 9974 - RNA, 32 nt, synthetic construct
  source 1..32: mol_type = other RNA
tgccatttcaccaggaacatgtacacctgggg

SEQ ID NO: 9975 - RNA, 32 nt, synthetic construct
  source 1..32: mol_type = other RNA
tgccatttcaccaggaacatgtagacctgggg

SEQ ID NO: 9976 - RNA, 32 nt, synthetic construct
  source 1..32: mol_type = other RNA
tgccatttcaccaggaacatgtatacctgggg

SEQ ID NO: 9977 - RNA, 33 nt, synthetic construct
  source 1..33: mol_type = other RNA
ctgccatttcaccaggaacatgtaaacctgggg

SEQ ID NO: 9978 - RNA, 33 nt, synthetic construct
  source 1..33: mol_type = other RNA
ctgccatttcaccaggaacatgtacacctgggg

SEQ ID NO: 9979 - RNA, 33 nt, synthetic construct
  source 1..33: mol_type = other RNA
ctgccatttcaccaggaacatgtagacctgggg

SEQ ID NO: 9980 - RNA, 33 nt, synthetic construct
  source 1..33: mol_type = other RNA
ctgccatttcaccaggaacatgtatacctgggg

SEQ ID NO: 9981 - RNA, 34 nt, synthetic construct
  source 1..34: mol_type = other RNA
cctgccatttcaccaggaacatgtaaacctgggg

SEQ ID NO: 9982 - RNA, 34 nt, synthetic construct
  source 1..34: mol_type = other RNA
cctgccatttcaccaggaacatgtacacctgggg

SEQ ID NO: 9983 - RNA, 34 nt, synthetic construct
  source 1..34: mol_type = other RNA
cctgccatttcaccaggaacatgtagacctgggg

SEQ ID NO: 9984 - RNA, 34 nt, synthetic construct
  source 1..34: mol_type = other RNA
cctgccatttcaccaggaacatgtatacctgggg

SEQ ID NO: 9985 - RNA, 35 nt, synthetic construct
  source 1..35: mol_type = other RNA
tcctgccatttcaccaggaacatgtagacctgggg

SEQ ID NO: 9986 - RNA, 35 nt, synthetic construct
  source 1..35: mol_type = other RNA
tcctgccatttcaccaggaacatgtatacctgggg

SEQ ID NO: 9987 - RNA, 35 nt, synthetic construct
  source 1..35: mol_type = other RNA
tcctgccatttcaccaggaacatgtacacctgggg

SEQ ID NO: 9988 - RNA, 35 nt, synthetic construct
  source 1..35: mol_type = other RNA
tcctgccatttcaccaggaacatgtaaacctgggg

SEQ ID NO: 9989 - RNA, 36 nt, synthetic construct
  source 1..36: mol_type = other RNA
gtcctgccatttcaccaggaacatgtatacctgggg

SEQ ID NO: 9990 - RNA, 36 nt, synthetic construct
  source 1..36: mol_type = other RNA
gtcctgccatttcaccaggaacatgtagacctgggg

SEQ ID NO: 9991 - RNA, 36 nt, synthetic construct
  source 1..36: mol_type = other RNA
gtcctgccatttcaccaggaacatgtacacctgggg

SEQ ID NO: 9992 - RNA, 36 nt, synthetic construct
  source 1..36: mol_type = other RNA
gtcctgccatttcaccaggaacatgtaaacctgggg

SEQ ID NO: 9993 - RNA, 37 nt, synthetic construct
  source 1..37: mol_type = other RNA
ggtcctgccatttcaccaggaacatgtaaacctgggg

SEQ ID NO: 9994 - RNA, 37 nt, synthetic construct
  source 1..37: mol_type = other RNA
ggtcctgccatttcaccaggaacatgtacacctgggg

SEQ ID NO: 9995 - RNA, 37 nt, synthetic construct
  source 1..37: mol_type = other RNA
ggtcctgccatttcaccaggaacatgtagacctgggg

SEQ ID NO: 9996 - RNA, 37 nt, synthetic construct
  source 1..37: mol_type = other RNA
ggtcctgccatttcaccaggaacatgtatacctgggg

SEQ ID NO: 9997 - RNA, 38 nt, synthetic construct
  source 1..38: mol_type = other RNA
aggtcctgccatttcaccaggaacatgtatacctgggg

SEQ ID NO: 9998 - RNA, 38 nt, synthetic construct
  source 1..38: mol_type = other RNA
aggtcctgccatttcaccaggaacatgtaaacctgggg

SEQ ID NO: 9999 - RNA, 38 nt, synthetic construct
  source 1..38: mol_type = other RNA
aggtcctgccatttcaccaggaacatgtagacctgggg

SEQ ID NO: 10000 - RNA, 38 nt, synthetic construct
  source 1..38: mol_type = other RNA
aggtcctgccatttcaccaggaacatgtacacctgggg

SEQ ID NO: 10001 - RNA, 39 nt, synthetic construct
  source 1..39: mol_type = other RNA
caggtcctgccatttcaccaggaacatgtatacctgggg

SEQ ID NO: 10002 - RNA, 39 nt, synthetic construct
  source 1..39: mol_type = other RNA
caggtcctgccatttcaccaggaacatgtaaacctgggg

SEQ ID NO: 10003 - RNA, 39 nt, synthetic construct
  source 1..39: mol_type = other RNA
caggtcctgccatttcaccaggaacatgtacacctgggg

SEQ ID NO: 10004 - RNA, 39 nt, synthetic construct
  source 1..39: mol_type = other RNA
caggtcctgccatttcaccaggaacatgtagacctgggg

SEQ ID NO: 10005 - RNA, 40 nt, synthetic construct
  source 1..40: mol_type = other RNA
acaggtcctgccatttcaccaggaacatgtatacctgggg

SEQ ID NO: 10006 - RNA, 40 nt, synthetic construct
  source 1..40: mol_type = other RNA
acaggtcctgccatttcaccaggaacatgtagacctgggg

SEQ ID NO: 10007 - RNA, 40 nt, synthetic construct
  source 1..40: mol_type = other RNA
acaggtcctgccatttcaccaggaacatgtaaacctgggg

SEQ ID NO: 10008 - RNA, 40 nt, synthetic construct
  source 1..40: mol_type = other RNA
acaggtcctgccatttcaccaggaacatgtacacctgggg

SEQ ID NO: 10009 - RNA, 41 nt, synthetic construct
  source 1..41: mol_type = other RNA
gacaggtcctgccatttcaccaggaacatgtagacctgggg

SEQ ID NO: 10010 - RNA, 41 nt, synthetic construct
  source 1..41: mol_type = other RNA
gacaggtcctgccatttcaccaggaacatgtaaacctgggg

SEQ ID NO: 10011 - RNA, 41 nt, synthetic construct
  source 1..41: mol_type = other RNA
gacaggtcctgccatttcaccaggaacatgtacacctgggg

SEQ ID NO: 10012 - RNA, 41 nt, synthetic construct
  source 1..41: mol_type = other RNA
gacaggtcctgccatttcaccaggaacatgtatacctgggg

SEQ ID NO: 10013 - RNA, 42 nt, synthetic construct
  source 1..42: mol_type = other RNA
cgacaggtcctgccatttcaccaggaacatgtatacctgggg

SEQ ID NO: 10014 - RNA, 42 nt, synthetic construct
  source 1..42: mol_type = other RNA
cgacaggtcctgccatttcaccaggaacatgtagacctgggg

SEQ ID NO: 10015 - RNA, 42 nt, synthetic construct
  source 1..42: mol_type = other RNA
cgacaggtcctgccatttcaccaggaacatgtacacctgggg

SEQ ID NO: 10016 - RNA, 42 nt, synthetic construct
  source 1..42: mol_type = other RNA
cgacaggtcctgccatttcaccaggaacatgtaaacctgggg

SEQ ID NO: 10017 - RNA, 43 nt, synthetic construct
  source 1..43: mol_type = other RNA
ccgacaggtcctgccatttcaccaggaacatgtatacctgggg

SEQ ID NO: 10018 - RNA, 43 nt, synthetic construct
  source 1..43: mol_type = other RNA
ccgacaggtcctgccatttcaccaggaacatgtaaacctgggg

SEQ ID NO: 10019 - RNA, 43 nt, synthetic construct
  source 1..43: mol_type = other RNA
ccgacaggtcctgccatttcaccaggaacatgtacacctgggg

SEQ ID NO: 10020 - RNA, 43 nt, synthetic construct
  source 1..43: mol_type = other RNA
ccgacaggtcctgccatttcaccaggaacatgtagacctgggg

SEQ ID NO: 10021 - RNA, 44 nt, synthetic construct
  source 1..44: mol_type = other RNA
tccgacaggtcctgccatttcaccaggaacatgtacacctgggg

SEQ ID NO: 10022 - RNA, 44 nt, synthetic construct
  source 1..44: mol_type = other RNA
tccgacaggtcctgccatttcaccaggaacatgtaaacctgggg

SEQ ID NO: 10023 - RNA, 44 nt, synthetic construct
  source 1..44: mol_type = other RNA
tccgacaggtcctgccatttcaccaggaacatgtagacctgggg

SEQ ID NO: 10024 - RNA, 44 nt, synthetic construct
  source 1..44: mol_type = other RNA
tccgacaggtcctgccatttcaccaggaacatgtatacctgggg

SEQ ID NO: 10025 - RNA, 45 nt, synthetic construct
  source 1..45: mol_type = other RNA
ctccgacaggtcctgccatttcaccaggaacatgtacacctgggg

SEQ ID NO: 10026 - RNA, 45 nt, synthetic construct
  source 1..45: mol_type = other RNA
ctccgacaggtcctgccatttcaccaggaacatgtagacctgggg

SEQ ID NO: 10027 - RNA, 45 nt, synthetic construct
  source 1..45: mol_type = other RNA
ctccgacaggtcctgccatttcaccaggaacatgtatacctgggg

SEQ ID NO: 10028 - RNA, 45 nt, synthetic construct
  source 1..45: mol_type = other RNA
ctccgacaggtcctgccatttcaccaggaacatgtaaacctgggg

SEQ ID NO: 10029 - RNA, 46 nt, synthetic construct
  source 1..46: mol_type = other RNA
tctccgacaggtcctgccatttcaccaggaacatgtatacctgggg

SEQ ID NO: 10030 - RNA, 46 nt, synthetic construct
  source 1..46: mol_type = other RNA
tctccgacaggtcctgccatttcaccaggaacatgtagacctgggg

SEQ ID NO: 10031 - RNA, 46 nt, synthetic construct
  source 1..46: mol_type = other RNA
tctccgacaggtcctgccatttcaccaggaacatgtaaacctgggg

SEQ ID NO: 10032 - RNA, 46 nt, synthetic construct
  source 1..46: mol_type = other RNA
tctccgacaggtcctgccatttcaccaggaacatgtacacctgggg

SEQ ID NO: 10033 - RNA, 47 nt, synthetic construct
  source 1..47: mol_type = other RNA
ttctccgacaggtcctgccatttcaccaggaacatgtacacctgggg

SEQ ID NO: 10034 - RNA, 47 nt, synthetic construct
  source 1..47: mol_type = other RNA
ttctccgacaggtcctgccatttcaccaggaacatgtaaacctgggg

SEQ ID NO: 10035 - RNA, 47 nt, synthetic construct
  source 1..47: mol_type = other RNA
ttctccgacaggtcctgccatttcaccaggaacatgtatacctgggg

SEQ ID NO: 10036 - RNA, 47 nt, synthetic construct
  source 1..47: mol_type = other RNA
ttctccgacaggtcctgccatttcaccaggaacatgtagacctgggg

SEQ ID NO: 10037 - RNA, 48 nt, synthetic construct
  source 1..48: mol_type = other RNA
cttctccgacaggtcctgccatttcaccaggaacatgtatacctgggg

SEQ ID NO: 10038 - RNA, 48 nt, synthetic construct
  source 1..48: mol_type = other RNA
cttctccgacaggtcctgccatttcaccaggaacatgtagacctgggg

SEQ ID NO: 10039 - RNA, 48 nt, synthetic construct
  source 1..48: mol_type = other RNA
cttctccgacaggtcctgccatttcaccaggaacatgtacacctgggg

SEQ ID NO: 10040 - RNA, 48 nt, synthetic construct
  source 1..48: mol_type = other RNA
cttctccgacaggtcctgccatttcaccaggaacatgtaaacctgggg

SEQ ID NO: 10041 - RNA, 49 nt, synthetic construct
  source 1..49: mol_type = other RNA
ccttctccgacaggtcctgccatttcaccaggaacatgtaaacctgggg

SEQ ID NO: 10042 - RNA, 49 nt, synthetic construct
  source 1..49: mol_type = other RNA
ccttctccgacaggtcctgccatttcaccaggaacatgtatacctgggg

SEQ ID NO: 10043 - RNA, 49 nt, synthetic construct
  source 1..49: mol_type = other RNA
ccttctccgacaggtcctgccatttcaccaggaacatgtagacctgggg

SEQ ID NO: 10044 - RNA, 49 nt, synthetic construct
  source 1..49: mol_type = other RNA
ccttctccgacaggtcctgccatttcaccaggaacatgtacacctgggg

SEQ ID NO: 10045 - RNA, 50 nt, synthetic construct
  source 1..50: mol_type = other RNA
accttctccgacaggtcctgccatttcaccaggaacatgtagacctgggg

SEQ ID NO: 10046 - RNA, 50 nt, synthetic construct
  source 1..50: mol_type = other RNA
accttctccgacaggtcctgccatttcaccaggaacatgtatacctgggg

SEQ ID NO: 10047 - RNA, 50 nt, synthetic construct
  source 1..50: mol_type = other RNA
accttctccgacaggtcctgccatttcaccaggaacatgtaaacctgggg

SEQ ID NO: 10048 - RNA, 50 nt, synthetic construct
  source 1..50: mol_type = other RNA
accttctccgacaggtcctgccatttcaccaggaacatgtacacctgggg

SEQ ID NO: 10049 - RNA, 51 nt, synthetic construct
  source 1..51: mol_type = other RNA
caccttctccgacaggtcctgccatttcaccaggaacatgtatacctgggg

SEQ ID NO: 10050 - RNA, 51 nt, synthetic construct
  source 1..51: mol_type = other RNA
caccttctccgacaggtcctgccatttcaccaggaacatgtaaacctgggg

SEQ ID NO: 10051 - RNA, 51 nt, synthetic construct
  source 1..51: mol_type = other RNA
caccttctccgacaggtcctgccatttcaccaggaacatgtagacctgggg

SEQ ID NO: 10052 - RNA, 51 nt, synthetic construct
  source 1..51: mol_type = other RNA
caccttctccgacaggtcctgccatttcaccaggaacatgtacacctgggg

SEQ ID NO: 10053 - RNA, 52 nt, synthetic construct
  source 1..52: mol_type = other RNA
ccaccttctccgacaggtcctgccatttcaccaggaacatgtagacctgggg

SEQ ID NO: 10054 - RNA, 52 nt, synthetic construct
  source 1..52: mol_type = other RNA
ccaccttctccgacaggtcctgccatttcaccaggaacatgtaaacctgggg

SEQ ID NO: 10055 - RNA, 52 nt, synthetic construct
  source 1..52: mol_type = other RNA
ccaccttctccgacaggtcctgccatttcaccaggaacatgtacacctgggg

SEQ ID NO: 10056 - RNA, 52 nt, synthetic construct
  source 1..52: mol_type = other RNA
ccaccttctccgacaggtcctgccatttcaccaggaacatgtatacctgggg

SEQ ID NO: 10057 - RNA, 53 nt, synthetic construct
  source 1..53: mol_type = other RNA
accaccttctccgacaggtcctgccatttcaccaggaacatgtacacctgggg

SEQ ID NO: 10058 - RNA, 53 nt, synthetic construct
  source 1..53: mol_type = other RNA
accaccttctccgacaggtcctgccatttcaccaggaacatgtagacctgggg

SEQ ID NO: 10059 - RNA, 53 nt, synthetic construct
  source 1..53: mol_type = other RNA
accaccttctccgacaggtcctgccatttcaccaggaacatgtatacctgggg

SEQ ID NO: 10060 - RNA, 53 nt, synthetic construct
  source 1..53: mol_type = other RNA
accaccttctccgacaggtcctgccatttcaccaggaacatgtaaacctgggg

SEQ ID NO: 10061 - RNA, 54 nt, synthetic construct
  source 1..54: mol_type = other RNA
gaccaccttctccgacaggtcctgccatttcaccaggaacatgtacacctgggg

SEQ ID NO: 10062 - RNA, 54 nt, synthetic construct
  source 1..54: mol_type = other RNA
gaccaccttctccgacaggtcctgccatttcaccaggaacatgtatacctgggg

SEQ ID NO: 10063 - RNA, 54 nt, synthetic construct
  source 1..54: mol_type = other RNA
gaccaccttctccgacaggtcctgccatttcaccaggaacatgtagacctgggg

SEQ ID NO: 10064 - RNA, 54 nt, synthetic construct
  source 1..54: mol_type = other RNA
gaccaccttctccgacaggtcctgccatttcaccaggaacatgtaaacctgggg

SEQ ID NO: 10065 - RNA, 55 nt, synthetic construct
  source 1..55: mol_type = other RNA
agaccaccttctccgacaggtcctgccatttcaccaggaacatgtacacctgggg

SEQ ID NO: 10066 - RNA, 55 nt, synthetic construct
  source 1..55: mol_type = other RNA
agaccaccttctccgacaggtcctgccatttcaccaggaacatgtaaacctgggg

SEQ ID NO: 10067 - RNA, 55 nt, synthetic construct
  source 1..55: mol_type = other RNA
agaccaccttctccgacaggtcctgccatttcaccaggaacatgtagacctgggg

SEQ ID NO: 10068 - RNA, 55 nt, synthetic construct
  source 1..55: mol_type = other RNA
agaccaccttctccgacaggtcctgccatttcaccaggaacatgtatacctgggg

SEQ ID NO: 10069 - RNA, 56 nt, synthetic construct
  source 1..56: mol_type = other RNA
tagaccaccttctccgacaggtcctgccatttcaccaggaacatgtatacctgggg

SEQ ID NO: 10070 - RNA, 56 nt, synthetic construct
  source 1..56: mol_type = other RNA
tagaccaccttctccgacaggtcctgccatttcaccaggaacatgtacacctgggg

SEQ ID NO: 10071 - RNA, 56 nt, synthetic construct
  source 1..56: mol_type = other RNA
tagaccaccttctccgacaggtcctgccatttcaccaggaacatgtaaacctgggg

SEQ ID NO: 10072 - RNA, 56 nt, synthetic construct
  source 1..56: mol_type = other RNA
tagaccaccttctccgacaggtcctgccatttcaccaggaacatgtagacctgggg

SEQ ID NO: 10073 - RNA, 57 nt, synthetic construct
  source 1..57: mol_type = other RNA
gtagaccaccttctccgacaggtcctgccatttcaccaggaacatgtagacctgggg

SEQ ID NO: 10074 - RNA, 57 nt, synthetic construct
  source 1..57: mol_type = other RNA
gtagaccaccttctccgacaggtcctgccatttcaccaggaacatgtacacctgggg

SEQ ID NO: 10075 - RNA, 57 nt, synthetic construct
  source 1..57: mol_type = other RNA
gtagaccaccttctccgacaggtcctgccatttcaccaggaacatgtaaacctgggg

SEQ ID NO: 10076 - RNA, 57 nt, synthetic construct
  source 1..57: mol_type = other RNA
gtagaccaccttctccgacaggtcctgccatttcaccaggaacatgtatacctgggg

SEQ ID NO: 10077 - RNA, 58 nt, synthetic construct
  source 1..58: mol_type = other RNA
ggtagaccaccttctccgacaggtcctgccatttcaccaggaacatgtaaacctgggg

SEQ ID NO: 10078 - RNA, 58 nt, synthetic construct
  source 1..58: mol_type = other RNA
ggtagaccaccttctccgacaggtcctgccatttcaccaggaacatgtacacctgggg

SEQ ID NO: 10079 - RNA, 58 nt, synthetic construct
  source 1..58: mol_type = other RNA
ggtagaccaccttctccgacaggtcctgccatttcaccaggaacatgtatacctgggg

SEQ ID NO: 10080 - RNA, 58 nt, synthetic construct
  source 1..58: mol_type = other RNA
ggtagaccaccttctccgacaggtcctgccatttcaccaggaacatgtagacctgggg

SEQ ID NO: 10081 - RNA, 59 nt, synthetic construct
  source 1..59: mol_type = other RNA
cggtagaccaccttctccgacaggtcctgccatttcaccaggaacatgtagacctgggg

SEQ ID NO: 10082 - RNA, 59 nt, synthetic construct
  source 1..59: mol_type = other RNA
cggtagaccaccttctccgacaggtcctgccatttcaccaggaacatgtatacctgggg

SEQ ID NO: 10083 - RNA, 59 nt, synthetic construct
  source 1..59: mol_type = other RNA
cggtagaccaccttctccgacaggtcctgccatttcaccaggaacatgtacacctgggg

SEQ ID NO: 10084 - RNA, 59 nt, synthetic construct
  source 1..59: mol_type = other RNA
cggtagaccaccttctccgacaggtcctgccatttcaccaggaacatgtaaacctgggg

SEQ ID NO: 10085 - RNA, 60 nt, synthetic construct
  source 1..60: mol_type = other RNA
ccggtagaccaccttctccgacaggtcctgccatttcaccaggaacatgtaaacctgggg

SEQ ID NO: 10086 - RNA, 60 nt, synthetic construct
  source 1..60: mol_type = other RNA
ccggtagaccaccttctccgacaggtcctgccatttcaccaggaacatgtacacctgggg

SEQ ID NO: 10087 - RNA, 60 nt, synthetic construct
  source 1..60: mol_type = other RNA
ccggtagaccaccttctccgacaggtcctgccatttcaccaggaacatgtagacctgggg

SEQ ID NO: 10088 - RNA, 60 nt, synthetic construct
  source 1..60: mol_type = other RNA
ccggtagaccaccttctccgacaggtcctgccatttcaccaggaacatgtatacctgggg

SEQ ID NO: 10089 - RNA, 61 nt, synthetic construct
  source 1..61: mol_type = other RNA
gccggtagaccaccttctccgacaggtcctgccatttcaccaggaacatgtacacctgggg

SEQ ID NO: 10090 - RNA, 61 nt, synthetic construct
  source 1..61: mol_type = other RNA
gccggtagaccaccttctccgacaggtcctgccatttcaccaggaacatgtatacctgggg

SEQ ID NO: 10091 - RNA, 61 nt, synthetic construct
  source 1..61: mol_type = other RNA
gccggtagaccaccttctccgacaggtcctgccatttcaccaggaacatgtaaacctgggg

SEQ ID NO: 10092 - RNA, 61 nt, synthetic construct
  source 1..61: mol_type = other RNA
gccggtagaccaccttctccgacaggtcctgccatttcaccaggaacatgtagacctgggg

SEQ ID NO: 10093 - RNA, 62 nt, synthetic construct
  source 1..62: mol_type = other RNA
cgccggtagaccaccttctccgacaggtcctgccatttcaccaggaacatgtatacctgggg

SEQ ID NO: 10094 - RNA, 62 nt, synthetic construct
  source 1..62: mol_type = other RNA
cgccggtagaccaccttctccgacaggtcctgccatttcaccaggaacatgtaaacctgggg

SEQ ID NO: 10095 - RNA, 62 nt, synthetic construct
  source 1..62: mol_type = other RNA
cgccggtagaccaccttctccgacaggtcctgccatttcaccaggaacatgtacacctgggg

SEQ ID NO: 10096 - RNA, 62 nt, synthetic construct
  source 1..62: mol_type = other RNA
cgccggtagaccaccttctccgacaggtcctgccatttcaccaggaacatgtagacctgggg

SEQ ID NO: 10097 - RNA, 63 nt, synthetic construct
  source 1..63: mol_type = other RNA
gcgccggtagaccaccttctccgacaggtcctgccatttcaccaggaacatgtatacctgggg

SEQ ID NO: 10098 - RNA, 63 nt, synthetic construct
  source 1..63: mol_type = other RNA
gcgccggtagaccaccttctccgacaggtcctgccatttcaccaggaacatgtagacctgggg

SEQ ID NO: 10099 - RNA, 63 nt, synthetic construct
  source 1..63: mol_type = other RNA
gcgccggtagaccaccttctccgacaggtcctgccatttcaccaggaacatgtaaacctgggg

SEQ ID NO: 10100 - RNA, 63 nt, synthetic construct
  source 1..63: mol_type = other RNA
gcgccggtagaccaccttctccgacaggtcctgccatttcaccaggaacatgtacacctgggg

SEQ ID NO: 10101 - RNA, 64 nt, synthetic construct
  source 1..64: mol_type = other RNA
agcgccggtagaccaccttctccgacaggtcctgccatttcaccaggaacatgtatacctgggg

SEQ ID NO: 10102 - RNA, 64 nt, synthetic construct
  source 1..64: mol_type = other RNA
agcgccggtagaccaccttctccgacaggtcctgccatttcaccaggaacatgtacacctgggg

SEQ ID NO: 10103 - RNA, 64 nt, synthetic construct
  source 1..64: mol_type = other RNA
agcgccggtagaccaccttctccgacaggtcctgccatttcaccaggaacatgtaaacctgggg

SEQ ID NO: 10104 - RNA, 64 nt, synthetic construct
  source 1..64: mol_type = other RNA
agcgccggtagaccaccttctccgacaggtcctgccatttcaccaggaacatgtagacctgggg

SEQ ID NO: 10105 - RNA, 65 nt, synthetic construct
  source 1..65: mol_type = other RNA
aagcgccggtagaccaccttctccgacaggtcctgccatttcaccaggaacatgtatacctgggg

SEQ ID NO: 10106 - RNA, 65 nt, synthetic construct
  source 1..65: mol_type = other RNA
aagcgccggtagaccaccttctccgacaggtcctgccatttcaccaggaacatgtaaacctgggg

SEQ ID NO: 10107 - RNA, 65 nt, synthetic construct
  source 1..65: mol_type = other RNA
aagcgccggtagaccaccttctccgacaggtcctgccatttcaccaggaacatgtagacctgggg

SEQ ID NO: 10108 - RNA, 65 nt, synthetic construct
  source 1..65: mol_type = other RNA
aagcgccggtagaccaccttctccgacaggtcctgccatttcaccaggaacatgtacacctgggg

SEQ ID NO: 10109 - RNA, 66 nt, synthetic construct
  source 1..66: mol_type = other RNA
gaagcgccggtagaccaccttctccgacaggtcctgccatttcaccaggaacatgtatacctgggg

SEQ ID NO: 10110 - RNA, 66 nt, synthetic construct
  source 1..66: mol_type = other RNA
gaagcgccggtagaccaccttctccgacaggtcctgccatttcaccaggaacatgtagacctgggg

SEQ ID NO: 10111 - RNA, 66 nt, synthetic construct
  source 1..66: mol_type = other RNA
gaagcgccggtagaccaccttctccgacaggtcctgccatttcaccaggaacatgtacacctgggg

SEQ ID NO: 10112 - RNA, 66 nt, synthetic construct
  source 1..66: mol_type = other RNA
gaagcgccggtagaccaccttctccgacaggtcctgccatttcaccaggaacatgtaaacctgggg

SEQ ID NO: 10113 - RNA, 67 nt, synthetic construct
  source 1..67: mol_type = other RNA
tgaagcgccggtagaccaccttctccgacaggtcctgccatttcaccaggaacatgtagacctgggg

SEQ ID NO: 10114 - RNA, 67 nt, synthetic construct
  source 1..67: mol_type = other RNA
tgaagcgccggtagaccaccttctccgacaggtcctgccatttcaccaggaacatgtacacctgggg

SEQ ID NO: 10115 - RNA, 67 nt, synthetic construct
  source 1..67: mol_type = other RNA
tgaagcgccggtagaccaccttctccgacaggtcctgccatttcaccaggaacatgtaaacctgggg

SEQ ID NO: 10116 - RNA, 67 nt, synthetic construct
  source 1..67: mol_type = other RNA
tgaagcgccggtagaccaccttctccgacaggtcctgccatttcaccaggaacatgtatacctgggg

SEQ ID NO: 10117 - RNA, 68 nt, synthetic construct
  source 1..68: mol_type = other RNA
gtgaagcgccggtagaccaccttctccgacaggtcctgccatttcaccaggaacatgtacacctgggg

SEQ ID NO: 10118 - RNA, 68 nt, synthetic construct
  source 1..68: mol_type = other RNA
gtgaagcgccggtagaccaccttctccgacaggtcctgccatttcaccaggaacatgtagacctgggg

SEQ ID NO: 10119 - RNA, 68 nt, synthetic construct
  source 1..68: mol_type = other RNA
gtgaagcgccggtagaccaccttctccgacaggtcctgccatttcaccaggaacatgtatacctgggg

SEQ ID NO: 10120 - RNA, 68 nt, synthetic construct
  source 1..68: mol_type = other RNA
gtgaagcgccggtagaccaccttctccgacaggtcctgccatttcaccaggaacatgtaaacctgggg

SEQ ID NO: 10121 - RNA, 69 nt, synthetic construct
  source 1..69: mol_type = other RNA
ggtgaagcgccggtagaccaccttctccgacaggtcctgccatttcaccaggaacatgtagacctgggg

SEQ ID NO: 10122 - RNA, 69 nt, synthetic construct
  source 1..69: mol_type = other RNA
ggtgaagcgccggtagaccaccttctccgacaggtcctgccatttcaccaggaacatgtaaacctgggg

SEQ ID NO: 10123 - RNA, 69 nt, synthetic construct
  source 1..69: mol_type = other RNA
ggtgaagcgccggtagaccaccttctccgacaggtcctgccatttcaccaggaacatgtacacctgggg

SEQ ID NO: 10124 - RNA, 69 nt, synthetic construct
  source 1..69: mol_type = other RNA
ggtgaagcgccggtagaccaccttctccgacaggtcctgccatttcaccaggaacatgtatacctgggg

SEQ ID NO: 10125 - RNA, 70 nt, synthetic construct
  source 1..70: mol_type = other RNA
cggtgaagcgccggtagaccaccttctccgacaggtcctgccatttcaccaggaacatgtacacctgggg

SEQ ID NO: 10126 - RNA, 70 nt, synthetic construct
  source 1..70: mol_type = other RNA
cggtgaagcgccggtagaccaccttctccgacaggtcctgccatttcaccaggaacatgtagacctgggg

SEQ ID NO: 10127 - RNA, 70 nt, synthetic construct
  source 1..70: mol_type = other RNA
cggtgaagcgccggtagaccaccttctccgacaggtcctgccatttcaccaggaacatgtatacctgggg

SEQ ID NO: 10128 - RNA, 70 nt, synthetic construct
  source 1..70: mol_type = other RNA
cggtgaagcgccggtagaccaccttctccgacaggtcctgccatttcaccaggaacatgtaaacctgggg

SEQ ID NO: 10129 - RNA, 71 nt, synthetic construct
  source 1..71: mol_type = other RNA
tcggtgaagcgccggtagaccaccttctccgacaggtcctgccatttcaccaggaacatgtagacctgggg

SEQ ID NO: 10130 - RNA, 71 nt, synthetic construct
  source 1..71: mol_type = other RNA
tcggtgaagcgccggtagaccaccttctccgacaggtcctgccatttcaccaggaacatgtatacctgggg

SEQ ID NO: 10131 - RNA, 71 nt, synthetic construct
  source 1..71: mol_type = other RNA
tcggtgaagcgccggtagaccaccttctccgacaggtcctgccatttcaccaggaacatgtacacctgggg

SEQ ID NO: 10132 - RNA, 71 nt, synthetic construct
  source 1..71: mol_type = other RNA
tcggtgaagcgccggtagaccaccttctccgacaggtcctgccatttcaccaggaacatgtaaacctgggg

SEQ ID NO: 10133 - RNA, 72 nt, synthetic construct
  source 1..72: mol_type = other RNA
ctcggtgaagcgccggtagaccaccttctccgacaggtcctgccatttcaccaggaacatgtaaacctgggg

SEQ ID NO: 10134 - RNA, 72 nt, synthetic construct
  source 1..72: mol_type = other RNA
ctcggtgaagcgccggtagaccaccttctccgacaggtcctgccatttcaccaggaacatgtagacctgggg

SEQ ID NO: 10135 - RNA, 72 nt, synthetic construct
  source 1..72: mol_type = other RNA
ctcggtgaagcgccggtagaccaccttctccgacaggtcctgccatttcaccaggaacatgtacacctgggg

SEQ ID NO: 10136 - RNA, 72 nt, synthetic construct
  source 1..72: mol_type = other RNA
ctcggtgaagcgccggtagaccaccttctccgacaggtcctgccatttcaccaggaacatgtatacctgggg

SEQ ID NO: 10137 - RNA, 73 nt, synthetic construct
  source 1..73: mol_type = other RNA
tctcggtgaagcgccggtagaccaccttctccgacaggtcctgccatttcaccaggaacatgtacacctgggg

SEQ ID NO: 10138 - RNA, 73 nt, synthetic construct
  source 1..73: mol_type = other RNA
tctcggtgaagcgccggtagaccaccttctccgacaggtcctgccatttcaccaggaacatgtatacctgggg

SEQ ID NO: 10139 - RNA, 73 nt, synthetic construct
  source 1..73: mol_type = other RNA
tctcggtgaagcgccggtagaccaccttctccgacaggtcctgccatttcaccaggaacatgtagacctgggg

SEQ ID NO: 10140 - RNA, 73 nt, synthetic construct
  source 1..73: mol_type = other RNA
tctcggtgaagcgccggtagaccaccttctccgacaggtcctgccatttcaccaggaacatgtaaacctgggg

SEQ ID NO: 10141 - RNA, 74 nt, synthetic construct
  source 1..74: mol_type = other RNA
atctcggtgaagcgccggtagaccaccttctccgacaggtcctgccatttcaccaggaacatgtatacctgggg

SEQ ID NO: 10142 - RNA, 74 nt, synthetic construct
  source 1..74: mol_type = other RNA
atctcggtgaagcgccggtagaccaccttctccgacaggtcctgccatttcaccaggaacatgtaaacctgggg

SEQ ID NO: 10143 - RNA, 74 nt, synthetic construct
  source 1..74: mol_type = other RNA
atctcggtgaagcgccggtagaccaccttctccgacaggtcctgccatttcaccaggaacatgtacacctgggg

SEQ ID NO: 10144 - RNA, 74 nt, synthetic construct
  source 1..74: mol_type = other RNA
atctcggtgaagcgccggtagaccaccttctccgacaggtcctgccatttcaccaggaacatgtagacctgggg

SEQ ID NO: 10145 - RNA, 75 nt, synthetic construct
  source 1..75: mol_type = other RNA
gatctcggtgaagcgccggtagaccaccttctccgacaggtcctgccatttcaccaggaacatgtatacctgggg

SEQ ID NO: 10146 - RNA, 75 nt, synthetic construct
  source 1..75: mol_type = other RNA
gatctcggtgaagcgccggtagaccaccttctccgacaggtcctgccatttcaccaggaacatgtagacctgggg

SEQ ID NO: 10147 - RNA, 75 nt, synthetic construct
  source 1..75: mol_type = other RNA
gatctcggtgaagcgccggtagaccaccttctccgacaggtcctgccatttcaccaggaacatgtaaacctgggg

SEQ ID NO: 10148 - RNA, 75 nt, synthetic construct
  source 1..75: mol_type = other RNA
gatctcggtgaagcgccggtagaccaccttctccgacaggtcctgccatttcaccaggaacatgtacacctgggg

SEQ ID NO: 10149 - RNA, 76 nt, synthetic construct
  source 1..76: mol_type = other RNA
agatctcggtgaagcgccggtagaccaccttctccgacaggtcctgccatttcaccaggaacatgtatacctgggg

SEQ ID NO: 10150 - RNA, 76 nt, synthetic construct
  source 1..76: mol_type = other RNA
agatctcggtgaagcgccggtagaccaccttctccgacaggtcctgccatttcaccaggaacatgtagacctgggg

SEQ ID NO: 10151 - RNA, 76 nt, synthetic construct
  source 1..76: mol_type = other RNA
agatctcggtgaagcgccggtagaccaccttctccgacaggtcctgccatttcaccaggaacatgtacacctgggg

SEQ ID NO: 10152 - RNA, 76 nt, synthetic construct
  source 1..76: mol_type = other RNA
agatctcggtgaagcgccggtagaccaccttctccgacaggtcctgccatttcaccaggaacatgtaaacctgggg

SEQ ID NO: 10153 - RNA, 77 nt, synthetic construct
  source 1..77: mol_type = other RNA
tagatctcggtgaagcgccggtagaccaccttctccgacaggtcctgccatttcaccaggaacatgtaaacctgggg

SEQ ID NO: 10154 - RNA, 77 nt, synthetic construct
  source 1..77: mol_type = other RNA
tagatctcggtgaagcgccggtagaccaccttctccgacaggtcctgccatttcaccaggaacatgtagacctgggg

SEQ ID NO: 10155 - RNA, 77 nt, synthetic construct
  source 1..77: mol_type = other RNA
tagatctcggtgaagcgccggtagaccaccttctccgacaggtcctgccatttcaccaggaacatgtacacctgggg

SEQ ID NO: 10156 - RNA, 77 nt, synthetic construct
  source 1..77: mol_type = other RNA
tagatctcggtgaagcgccggtagaccaccttctccgacaggtcctgccatttcaccaggaacatgtatacctgggg

SEQ ID NO: 10157 - RNA, 78 nt, synthetic construct
  source 1..78: mol_type = other RNA
gtagatctcggtgaagcgccggtagaccaccttctccgacaggtcctgccatttcaccaggaacatgtaaacctgggg

SEQ ID NO: 10158 - RNA, 78 nt, synthetic construct
  source 1..78: mol_type = other RNA
gtagatctcggtgaagcgccggtagaccaccttctccgacaggtcctgccatttcaccaggaacatgtacacctgggg

SEQ ID NO: 10159 - RNA, 78 nt, synthetic construct
  source 1..78: mol_type = other RNA
gtagatctcggtgaagcgccggtagaccaccttctccgacaggtcctgccatttcaccaggaacatgtagacctgggg

SEQ ID NO: 10160 - RNA, 78 nt, synthetic construct
  source 1..78: mol_type = other RNA
gtagatctcggtgaagcgccggtagaccaccttctccgacaggtcctgccatttcaccaggaacatgtatacctgggg

SEQ ID NO: 10161 - RNA, 79 nt, synthetic construct
  source 1..79: mol_type = other RNA
cgtagatctcggtgaagcgccggtagaccaccttctccgacaggtcctgccatttcaccaggaacatgtagacctgggg

SEQ ID NO: 10162 - RNA, 79 nt, synthetic construct
  source 1..79: mol_type = other RNA
cgtagatctcggtgaagcgccggtagaccaccttctccgacaggtcctgccatttcaccaggaacatgtacacctgggg

SEQ ID NO: 10163 - RNA, 79 nt, synthetic construct
  source 1..79: mol_type = other RNA
cgtagatctcggtgaagcgccggtagaccaccttctccgacaggtcctgccatttcaccaggaacatgtaaacctgggg

SEQ ID NO: 10164 - RNA, 79 nt, synthetic construct
  source 1..79: mol_type = other RNA
cgtagatctcggtgaagcgccggtagaccaccttctccgacaggtcctgccatttcaccaggaacatgtatacctgggg

SEQ ID NO: 10165 - RNA, 80 nt, synthetic construct
  source 1..80: mol_type = other RNA
tcgtagatctcggtgaagcgccggtagaccaccttctccgacaggtcctgccatttcaccaggaacatgtagacctgggg

SEQ ID NO: 10166 - RNA, 80 nt, synthetic construct
  source 1..80: mol_type = other RNA
tcgtagatctcggtgaagcgccggtagaccaccttctccgacaggtcctgccatttcaccaggaacatgtatacctgggg

SEQ ID NO: 10167 - RNA, 80 nt, synthetic construct
  source 1..80: mol_type = other RNA
tcgtagatctcggtgaagcgccggtagaccaccttctccgacaggtcctgccatttcaccaggaacatgtacacctgggg

SEQ ID NO: 10168 - RNA, 80 nt, synthetic construct
  source 1..80: mol_type = other RNA
tcgtagatctcggtgaagcgccggtagaccaccttctccgacaggtcctgccatttcaccaggaacatgtaaacctgggg

SEQ ID NO: 10169 - RNA, 81 nt, synthetic construct
  source 1..81: mol_type = other RNA
ctcgtagatctcggtgaagcgccggtagaccaccttctccgacaggtcctgccatttcaccaggaacatgtaaacctgggg

SEQ ID NO: 10170 - RNA, 81 nt, synthetic construct
  source 1..81: mol_type = other RNA
ctcgtagatctcggtgaagcgccggtagaccaccttctccgacaggtcctgccatttcaccaggaacatgtacacctgggg

SEQ ID NO: 10171 - RNA, 81 nt, synthetic construct
  source 1..81: mol_type = other RNA
ctcgtagatctcggtgaagcgccggtagaccaccttctccgacaggtcctgccatttcaccaggaacatgtagacctgggg

SEQ ID NO: 10172 - RNA, 81 nt, synthetic construct
  source 1..81: mol_type = other RNA
ctcgtagatctcggtgaagcgccggtagaccaccttctccgacaggtcctgccatttcaccaggaacatgtatacctgggg

SEQ ID NO: 10173 - RNA, 82 nt, synthetic construct
  source 1..82: mol_type = other RNA
actcgtagatctcggtgaagcgccggtagaccaccttctccgacaggtcctgccatttcaccaggaacatgtacacctgggg

SEQ ID NO: 10174 - RNA, 82 nt, synthetic construct
  source 1..82: mol_type = other RNA
actcgtagatctcggtgaagcgccggtagaccaccttctccgacaggtcctgccatttcaccaggaacatgtaaacctgggg

SEQ ID NO: 10175 - RNA, 82 nt, synthetic construct
  source 1..82: mol_type = other RNA
actcgtagatctcggtgaagcgccggtagaccaccttctccgacaggtcctgccatttcaccaggaacatgtatacctgggg

SEQ ID NO: 10176 - RNA, 82 nt, synthetic construct
  source 1..82: mol_type = other RNA
actcgtagatctcggtgaagcgccggtagaccaccttctccgacaggtcctgccatttcaccaggaacatgtagacctgggg

SEQ ID NO: 10177 - RNA, 83 nt, synthetic construct
  source 1..83: mol_type = other RNA
aactcgtagatctcggtgaagcgccggtagaccaccttctccgacaggtcctgccatttcaccaggaacatgtatacctgggg

SEQ ID NO: 10178 - RNA, 83 nt, synthetic construct
  source 1..83: mol_type = other RNA
aactcgtagatctcggtgaagcgccggtagaccaccttctccgacaggtcctgccatttcaccaggaacatgtagacctgggg

SEQ ID NO: 10179 - RNA, 83 nt, synthetic construct
  source 1..83: mol_type = other RNA
aactcgtagatctcggtgaagcgccggtagaccaccttctccgacaggtcctgccatttcaccaggaacatgtacacctgggg

SEQ ID NO: 10180 - RNA, 83 nt, synthetic construct
  source 1..83: mol_type = other RNA
aactcgtagatctcggtgaagcgccggtagaccaccttctccgacaggtcctgccatttcaccaggaacatgtaaacctgggg

SEQ ID NO: 10181 - RNA, 84 nt, synthetic construct
  source 1..84: mol_type = other RNA
gaactcgtagatctcggtgaagcgccggtagaccaccttctccgacaggtcctgccatttcaccaggaacatgtacacctgggg

SEQ ID NO: 10182 - RNA, 84 nt, synthetic construct
  source 1..84: mol_type = other RNA
gaactcgtagatctcggtgaagcgccggtagaccaccttctccgacaggtcctgccatttcaccaggaacatgtagacctgggg

SEQ ID NO: 10183 - RNA, 84 nt, synthetic construct
  source 1..84: mol_type = other RNA
gaactcgtagatctcggtgaagcgccggtagaccaccttctccgacaggtcctgccatttcaccaggaacatgtatacctgggg

SEQ ID NO: 10184 - RNA, 84 nt, synthetic construct
  source 1..84: mol_type = other RNA
gaactcgtagatctcggtgaagcgccggtagaccaccttctccgacaggtcctgccatttcaccaggaacatgtaaacctgggg

SEQ ID NO: 10185 - RNA, 85 nt, synthetic construct
  source 1..85: mol_type = other RNA
ggaactcgtagatctcggtgaagcgccggtagaccaccttctccgacaggtcctgccatttcaccaggaacatgtagacctgggg

SEQ ID NO: 10186 - RNA, 85 nt, synthetic construct
  source 1..85: mol_type = other RNA
ggaactcgtagatctcggtgaagcgccggtagaccaccttctccgacaggtcctgccatttcaccaggaacatgtaaacctgggg

SEQ ID NO: 10187 - RNA, 85 nt, synthetic construct
  source 1..85: mol_type = other RNA
ggaactcgtagatctcggtgaagcgccggtagaccaccttctccgacaggtcctgccatttcaccaggaacatgtatacctgggg

SEQ ID NO: 10188 - RNA, 85 nt, synthetic construct
  source 1..85: mol_type = other RNA
ggaactcgtagatctcggtgaagcgccggtagaccaccttctccgacaggtcctgccatttcaccaggaacatgtacacctgggg

SEQ ID NO: 10189 - RNA, 86 nt, synthetic construct
  source 1..86: mol_type = other RNA
tggaactcgtagatctcggtgaagcgccggtagaccaccttctccgacaggtcctgccatttcaccaggaacatgtagacctgggg

SEQ ID NO: 10190 - RNA, 86 nt, synthetic construct
  source 1..86: mol_type = other RNA
tggaactcgtagatctcggtgaagcgccggtagaccaccttctccgacaggtcctgccatttcaccaggaacatgtacacctgggg

SEQ ID NO: 10191 - RNA, 86 nt, synthetic construct
  source 1..86: mol_type = other RNA
tggaactcgtagatctcggtgaagcgccggtagaccaccttctccgacaggtcctgccatttcaccaggaacatgtaaacctgggg

SEQ ID NO: 10192 - RNA, 86 nt, synthetic construct
  source 1..86: mol_type = other RNA
tggaactcgtagatctcggtgaagcgccggtagaccaccttctccgacaggtcctgccatttcaccaggaacatgtatacctgggg

SEQ ID NO: 10193 - RNA, 87 nt, synthetic construct
  source 1..87: mol_type = other RNA
atggaactcgtagatctcggtgaagcgccggtagaccaccttctccgacaggtcctgccatttcaccaggaacatgtatacctgggg

SEQ ID NO: 10194 - RNA, 87 nt, synthetic construct
  source 1..87: mol_type = other RNA
atggaactcgtagatctcggtgaagcgccggtagaccaccttctccgacaggtcctgccatttcaccaggaacatgtagacctgggg

SEQ ID NO: 10195 - RNA, 87 nt, synthetic construct
  source 1..87: mol_type = other RNA
atggaactcgtagatctcggtgaagcgccggtagaccaccttctccgacaggtcctgccatttcaccaggaacatgtaaacctgggg

SEQ ID NO: 10196 - RNA, 87 nt, synthetic construct
  source 1..87: mol_type = other RNA
atggaactcgtagatctcggtgaagcgccggtagaccaccttctccgacaggtcctgccatttcaccaggaacatgtacacctgggg

SEQ ID NO: 10197 - RNA, 88 nt, synthetic construct
  source 1..88: mol_type = other RNA
catggaactcgtagatctcggtgaagcgccggtagaccaccttctccgacaggtcctgccatttcaccaggaacatgtaaacctgggg

SEQ ID NO: 10198 - RNA, 88 nt, synthetic construct
  source 1..88: mol_type = other RNA
catggaactcgtagatctcggtgaagcgccggtagaccaccttctccgacaggtcctgccatttcaccaggaacatgtatacctgggg

SEQ ID NO: 10199 - RNA, 88 nt, synthetic construct
  source 1..88: mol_type = other RNA
catggaactcgtagatctcggtgaagcgccggtagaccaccttctccgacaggtcctgccatttcaccaggaacatgtacacctgggg

SEQ ID NO: 10200 - RNA, 88 nt, synthetic construct
  source 1..88: mol_type = other RNA
catggaactcgtagatctcggtgaagcgccggtagaccaccttctccgacaggtcctgccatttcaccaggaacatgtagacctgggg

SEQ ID NO: 10201 - RNA, 89 nt, synthetic construct
  source 1..89: mol_type = other RNA
acatggaactcgtagatctcggtgaagcgccggtagaccaccttctccgacaggtcctgccatttcaccaggaacatgtagacctgggg

SEQ ID NO: 10202 - RNA, 89 nt, synthetic construct
  source 1..89: mol_type = other RNA
acatggaactcgtagatctcggtgaagcgccggtagaccaccttctccgacaggtcctgccatttcaccaggaacatgtaaacctgggg

SEQ ID NO: 10203 - RNA, 89 nt, synthetic construct
  source 1..89: mol_type = other RNA
acatggaactcgtagatctcggtgaagcgccggtagaccaccttctccgacaggtcctgccatttcaccaggaacatgtatacctgggg

SEQ ID NO: 10204 - RNA, 89 nt, synthetic construct
  source 1..89: mol_type = other RNA
acatggaactcgtagatctcggtgaagcgccggtagaccaccttctccgacaggtcctgccatttcaccaggaacatgtacacctgggg

SEQ ID NO: 10205 - RNA, 90 nt, synthetic construct
  source 1..90: mol_type = other RNA
cacatggaactcgtagatctcggtgaagcgccggtagaccaccttctccgacaggtcctgccatttcaccaggaacatgtacacctgggg

SEQ ID NO: 10206 - RNA, 90 nt, synthetic construct
  source 1..90: mol_type = other RNA
cacatggaactcgtagatctcggtgaagcgccggtagaccaccttctccgacaggtcctgccatttcaccaggaacatgtatacctgggg

SEQ ID NO: 10207 - RNA, 90 nt, synthetic construct
  source 1..90: mol_type = other RNA
cacatggaactcgtagatctcggtgaagcgccggtagaccaccttctccgacaggtcctgccatttcaccaggaacatgtaaacctgggg

SEQ ID NO: 10208 - RNA, 90 nt, synthetic construct
  source 1..90: mol_type = other RNA
cacatggaactcgtagatctcggtgaagcgccggtagaccaccttctccgacaggtcctgccatttcaccaggaacatgtagacctgggg

SEQ ID NO: 10209 - RNA, 91 nt, synthetic construct
  source 1..91: mol_type = other RNA
tcacatggaactcgtagatctcggtgaagcgccggtagaccaccttctccgacaggtcctgccatttcaccaggaacatgtagacctgggg

SEQ ID NO: 10210 - RNA, 91 nt, synthetic construct
  source 1..91: mol_type = other RNA
tcacatggaactcgtagatctcggtgaagcgccggtagaccaccttctccgacaggtcctgccatttcaccaggaacatgtacacctgggg

SEQ ID NO: 10211 - RNA, 91 nt, synthetic construct
  source 1..91: mol_type = other RNA
tcacatggaactcgtagatctcggtgaagcgccggtagaccaccttctccgacaggtcctgccatttcaccaggaacatgtaaacctgggg

SEQ ID NO: 10212 - RNA, 91 nt, synthetic construct
  source 1..91: mol_type = other RNA
tcacatggaactcgtagatctcggtgaagcgccggtagaccaccttctccgacaggtcctgccatttcaccaggaacatgtatacctgggg

SEQ ID NO: 10213 - RNA, 92 nt, synthetic construct
  source 1..92: mol_type = other RNA
ctcacatggaactcgtagatctcggtgaagcgccggtagaccaccttctccgacaggtcctgccatttcaccaggaacatgtagacctgggg

SEQ ID NO: 10214 - RNA, 92 nt, synthetic construct
  source 1..92: mol_type = other RNA
ctcacatggaactcgtagatctcggtgaagcgccggtagaccaccttctccgacaggtcctgccatttcaccaggaacatgtacacctgggg

SEQ ID NO: 10215 - RNA, 92 nt, synthetic construct
  source 1..92: mol_type = other RNA
ctcacatggaactcgtagatctcggtgaagcgccggtagaccaccttctccgacaggtcctgccatttcaccaggaacatgtaaacctgggg

SEQ ID NO: 10216 - RNA, 92 nt, synthetic construct
  source 1..92: mol_type = other RNA
ctcacatggaactcgtagatctcggtgaagcgccggtagaccaccttctccgacaggtcctgccatttcaccaggaacatgtatacctgggg

SEQ ID NO: 10217 - RNA, 93 nt, synthetic construct
  source 1..93: mol_type = other RNA
actcacatggaactcgtagatctcggtgaagcgccggtagaccaccttctccgacaggtcctgccatttcaccaggaacatgtaaacctgggg

SEQ ID NO: 10218 - RNA, 93 nt, synthetic construct
  source 1..93: mol_type = other RNA
actcacatggaactcgtagatctcggtgaagcgccggtagaccaccttctccgacaggtcctgccatttcaccaggaacatgtagacctgggg

SEQ ID NO: 10219 - RNA, 93 nt, synthetic construct
  source 1..93: mol_type = other RNA
actcacatggaactcgtagatctcggtgaagcgccggtagaccaccttctccgacaggtcctgccatttcaccaggaacatgtacacctgggg

SEQ ID NO: 10220 - RNA, 93 nt, synthetic construct
  source 1..93: mol_type = other RNA
actcacatggaactcgtagatctcggtgaagcgccggtagaccaccttctccgacaggtcctgccatttcaccaggaacatgtatacctgggg

SEQ ID NO: 10221 - RNA, 94 nt, synthetic construct
  source 1..94: mol_type = other RNA
cactcacatggaactcgtagatctcggtgaagcgccggtagaccaccttctccgacaggtcctgccatttcaccaggaacatgtatacctgggg

SEQ ID NO: 10222 - RNA, 94 nt, synthetic construct
  source 1..94: mol_type = other RNA
cactcacatggaactcgtagatctcggtgaagcgccggtagaccaccttctccgacaggtcctgccatttcaccaggaacatgtagacctgggg

SEQ ID NO: 10223 - RNA, 94 nt, synthetic construct
  source 1..94: mol_type = other RNA
cactcacatggaactcgtagatctcggtgaagcgccggtagaccaccttctccgacaggtcctgccatttcaccaggaacatgtacacctgggg

SEQ ID NO: 10224 - RNA, 94 nt, synthetic construct
  source 1..94: mol_type = other RNA
cactcacatggaactcgtagatctcggtgaagcgccggtagaccaccttctccgacaggtcctgccatttcaccaggaacatgtaaacctgggg

SEQ ID NO: 10225 - RNA, 95 nt, synthetic construct
  source 1..95: mol_type = other RNA
acactcacatggaactcgtagatctcggtgaagcgccggtagaccaccttctccgacaggtcctgccatttcaccaggaacatgtagacctgggg

SEQ ID NO: 10226 - RNA, 95 nt, synthetic construct
  source 1..95: mol_type = other RNA
acactcacatggaactcgtagatctcggtgaagcgccggtagaccaccttctccgacaggtcctgccatttcaccaggaacatgtacacctgggg

SEQ ID NO: 10227 - RNA, 95 nt, synthetic construct
  source 1..95: mol_type = other RNA
acactcacatggaactcgtagatctcggtgaagcgccggtagaccaccttctccgacaggtcctgccatttcaccaggaacatgtatacctgggg

SEQ ID NO: 10228 - RNA, 95 nt, synthetic construct
  source 1..95: mol_type = other RNA
acactcacatggaactcgtagatctcggtgaagcgccggtagaccaccttctccgacaggtcctgccatttcaccaggaacatgtaaacctgggg

SEQ ID NO: 10229 - RNA, 96 nt, synthetic construct
  source 1..96: mol_type = other RNA
cacactcacatggaactcgtagatctcggtgaagcgccggtagaccaccttctccgacaggtcctgccatttcaccaggaacatgtacacctgggg

SEQ ID NO: 10230 - RNA, 96 nt, synthetic construct
  source 1..96: mol_type = other RNA
cacactcacatggaactcgtagatctcggtgaagcgccggtagaccaccttctccgacaggtcctgccatttcaccaggaacatgtagacctgggg

SEQ ID NO: 10231 - RNA, 96 nt, synthetic construct
  source 1..96: mol_type = other RNA
cacactcacatggaactcgtagatctcggtgaagcgccggtagaccaccttctccgacaggtcctgccatttcaccaggaacatgtatacctgggg

SEQ ID NO: 10232 - RNA, 96 nt, synthetic construct
  source 1..96: mol_type = other RNA
cacactcacatggaactcgtagatctcggtgaagcgccggtagaccaccttctccgacaggtcctgccatttcaccaggaacatgtaaacctgggg

SEQ ID NO: 10233 - RNA, 97 nt, synthetic construct
  source 1..97: mol_type = other RNA
ccacactcacatggaactcgtagatctcggtgaagcgccggtagaccaccttctccgacaggtcctgccatttcaccaggaacatgtagacctgggg

SEQ ID NO: 10234 - RNA, 97 nt, synthetic construct
  source 1..97: mol_type = other RNA
ccacactcacatggaactcgtagatctcggtgaagcgccggtagaccaccttctccgacaggtcctgccatttcaccaggaacatgtaaacctgggg

SEQ ID NO: 10235 - RNA, 97 nt, synthetic construct
  source 1..97: mol_type = other RNA
ccacactcacatggaactcgtagatctcggtgaagcgccggtagaccaccttctccgacaggtcctgccatttcaccaggaacatgtatacctgggg

SEQ ID NO: 10236 - RNA, 97 nt, synthetic construct
  source 1..97: mol_type = other RNA
ccacactcacatggaactcgtagatctcggtgaagcgccggtagaccaccttctccgacaggtcctgccatttcaccaggaacatgtacacctgggg

SEQ ID NO: 10237 - RNA, 98 nt, synthetic construct
  source 1..98: mol_type = other RNA
cccacactcacatggaactcgtagatctcggtgaagcgccggtagaccaccttctccgacaggtcctgccatttcaccaggaacatgtatacctgggg

SEQ ID NO: 10238 - RNA, 98 nt, synthetic construct
  source 1..98: mol_type = other RNA
cccacactcacatggaactcgtagatctcggtgaagcgccggtagaccaccttctccgacaggtcctgccatttcaccaggaacatgtagacctgggg

SEQ ID NO: 10239 - RNA, 98 nt, synthetic construct
  source 1..98: mol_type = other RNA
cccacactcacatggaactcgtagatctcggtgaagcgccggtagaccaccttctccgacaggtcctgccatttcaccaggaacatgtacacctgggg

SEQ ID NO: 10240 - RNA, 98 nt, synthetic construct
  source 1..98: mol_type = other RNA
cccacactcacatggaactcgtagatctcggtgaagcgccggtagaccaccttctccgacaggtcctgccatttcaccaggaacatgtaaacctgggg

SEQ ID NO: 10241 - RNA, 99 nt, synthetic construct
  source 1..99: mol_type = other RNA
ccccacactcacatggaactcgtagatctcggtgaagcgccggtagaccaccttctccgacaggtcctgccatttcaccaggaacatgtaaacctgggg

SEQ ID NO: 10242 - RNA, 99 nt, synthetic construct
  source 1..99: mol_type = other RNA
ccccacactcacatggaactcgtagatctcggtgaagcgccggtagaccaccttctccgacaggtcctgccatttcaccaggaacatgtatacctgggg

SEQ ID NO: 10243 - RNA, 99 nt, synthetic construct
  source 1..99: mol_type = other RNA
ccccacactcacatggaactcgtagatctcggtgaagcgccggtagaccaccttctccgacaggtcctgccatttcaccaggaacatgtagacctgggg

SEQ ID NO: 10244 - RNA, 99 nt, synthetic construct
  source 1..99: mol_type = other RNA
ccccacactcacatggaactcgtagatctcggtgaagcgccggtagaccaccttctccgacaggtcctgccatttcaccaggaacatgtacacctgggg

SEQ ID NO: 10245 - RNA, 100 nt, synthetic construct
  source 1..100: mol_type = other RNA
tccccacactcacatggaactcgtagatctcggtgaagcgccggtagaccaccttctccgacaggtcctgccatttcaccaggaacatgtatacctgggg

SEQ ID NO: 10246 - RNA, 100 nt, synthetic construct
  source 1..100: mol_type = other RNA
tccccacactcacatggaactcgtagatctcggtgaagcgccggtagaccaccttctccgacaggtcctgccatttcaccaggaacatgtacacctgggg

SEQ ID NO: 10247 - RNA, 100 nt, synthetic construct
  source 1..100: mol_type = other RNA
tccccacactcacatggaactcgtagatctcggtgaagcgccggtagaccaccttctccgacaggtcctgccatttcaccaggaacatgtaaacctgggg

SEQ ID NO: 10248 - RNA, 100 nt, synthetic construct
  source 1..100: mol_type = other RNA
tccccacactcacatggaactcgtagatctcggtgaagcgccggtagaccaccttctccgacaggtcctgccatttcaccaggaacatgtagacctgggg

SEQ ID NO: 10249 - RNA, 101 nt, synthetic construct
  source 1..101: mol_type = other RNA
atccccacactcacatggaactcgtagatctcggtgaagcgccggtagaccaccttctccgacaggtcctgccatttcaccaggaacatgtagacctgggg

SEQ ID NO: 10250 - RNA, 101 nt, synthetic construct
  source 1..101: mol_type = other RNA
atccccacactcacatggaactcgtagatctcggtgaagcgccggtagaccaccttctccgacaggtcctgccatttcaccaggaacatgtacacctgggg

SEQ ID NO: 10251 - RNA, 101 nt, synthetic construct
  source 1..101: mol_type = other RNA
atccccacactcacatggaactcgtagatctcggtgaagcgccggtagaccaccttctccgacaggtcctgccatttcaccaggaacatgtaaacctgggg

SEQ ID NO: 10252 - RNA, 101 nt, synthetic construct
  source 1..101: mol_type = other RNA
atccccacactcacatggaactcgtagatctcggtgaagcgccggtagaccaccttctccgacaggtcctgccatttcaccaggaacatgtatacctgggg

SEQ ID NO: 10253 - RNA, 102 nt, synthetic construct
  source 1..102: mol_type = other RNA
catccccacactcacatggaactcgtagatctcggtgaagcgccggtagaccaccttctccgacaggtcctgccatttcaccaggaacatgtaaacctgggg

SEQ ID NO: 10254 - RNA, 102 nt, synthetic construct
  source 1..102: mol_type = other RNA
catccccacactcacatggaactcgtagatctcggtgaagcgccggtagaccaccttctccgacaggtcctgccatttcaccaggaacatgtagacctgggg

SEQ ID NO: 10255 - RNA, 102 nt, synthetic construct
  source 1..102: mol_type = other RNA
catccccacactcacatggaactcgtagatctcggtgaagcgccggtagaccaccttctccgacaggtcctgccatttcaccaggaacatgtacacctgggg

SEQ ID NO: 10256 - RNA, 102 nt, synthetic construct
  source 1..102: mol_type = other RNA
catccccacactcacatggaactcgtagatctcggtgaagcgccggtagaccaccttctccgacaggtcctgccatttcaccaggaacatgtatacctgggg

SEQ ID NO: 10257 - RNA, 103 nt, synthetic construct
  source 1..103: mol_type = other RNA
ccatccccacactcacatggaactcgtagatctcggtgaagcgccggtagaccaccttctccgacaggtcctgccatttcaccaggaacatgtacacctgggg

SEQ ID NO: 10258 - RNA, 103 nt, synthetic construct
  source 1..103: mol_type = other RNA
ccatccccacactcacatggaactcgtagatctcggtgaagcgccggtagaccaccttctccgacaggtcctgccatttcaccaggaacatgtaaacctgggg

SEQ ID NO: 10259 - RNA, 103 nt, synthetic construct
  source 1..103: mol_type = other RNA
ccatccccacactcacatggaactcgtagatctcggtgaagcgccggtagaccaccttctccgacaggtcctgccatttcaccaggaacatgtatacctgggg

SEQ ID NO: 10260 - RNA, 103 nt, synthetic construct
  source 1..103: mol_type = other RNA
ccatccccacactcacatggaactcgtagatctcggtgaagcgccggtagaccaccttctccgacaggtcctgccatttcaccaggaacatgtagacctgggg

SEQ ID NO: 10261 - RNA, 20 nt, synthetic construct
  source 1..20: mol_type = other RNA
gaacatgtagacctggggga

SEQ ID NO: 10262 - RNA, 20 nt, synthetic construct
  source 1..20: mol_type = other RNA
ggaactcgtagatctcggtg

SEQ ID NO: 10263 - RNA, 20 nt, synthetic construct
  source 1..20: mol_type = other RNA
gaacatgtatacctggggga

SEQ ID NO: 10264 - RNA, 20 nt, synthetic construct
  source 1..20: mol_type = other RNA
gaacatgtaaacctggggga

SEQ ID NO: 10265 - RNA, 20 nt, synthetic construct
  source 1..20: mol_type = other RNA
gaacatgtacacctggggga

SEQ ID NO: 10266 - RNA, 20 nt, synthetic construct
  source 1..20: mol_type = other RNA
ccacactcacatggaactcg

SEQ ID NO: 10267 - RNA, 20 nt, synthetic construct
  source 1..20: mol_type = other RNA
agatctcggtgaagcgccgg

SEQ ID NO: 10268 - RNA, 16 nt, synthetic construct
  source 1..16: mol_type = other RNA
ttcctccagtgggtag

SEQ ID NO: 10269 - RNA, 17 nt, synthetic construct
  source 1..17: mol_type = other RNA
cttcctccagtgggtag

SEQ ID NO: 10270 - RNA, 18 nt, synthetic construct
  source 1..18: mol_type = other RNA
gcttcctccagtgggtag

SEQ ID NO: 10271 - RNA, 19 nt, synthetic construct
  source 1..19: mol_type = other RNA
ggcttcctccagtgggtag

SEQ ID NO: 10272 - RNA, 20 nt, synthetic construct
  source 1..20: mol_type = other RNA
gggcttcctccagtgggtag

SEQ ID NO: 10273 - RNA, 21 nt, synthetic construct
  source 1..21: mol_type = other RNA
tgggcttcctccagtgggtag

SEQ ID NO: 10274 - RNA, 22 nt, synthetic construct
  source 1..22: mol_type = other RNA
ctgggcttcctccagtgggtag

SEQ ID NO: 10275-10277 - skipped (3 entries)

SEQ ID NO: 10278 - RNA, 10 nt, synthetic construct
  source 1..10: mol_type = other RNA
cccactggag

SEQ ID NO: 10279 - RNA, 11 nt, synthetic construct
  source 1..11: mol_type = other RNA
cccactggagg

SEQ ID NO: 10280 - RNA, 12 nt, synthetic construct
  source 1..12: mol_type = other RNA
cccactggagga

SEQ ID NO: 10281 - RNA, 13 nt, synthetic construct
  source 1..13: mol_type = other RNA
cccactggaggaa

SEQ ID NO: 10282 - RNA, 14 nt, synthetic construct
  source 1..14: mol_type = other RNA
cccactggaggaag

SEQ ID NO: 10283 - RNA, 15 nt, synthetic construct
  source 1..15: mol_type = other RNA
cccactggaggaagc

SEQ ID NO: 10284 - RNA, 16 nt, synthetic construct
  source 1..16: mol_type = other RNA
cccactggaggaagcc

SEQ ID NO: 10285 - RNA, 17 nt, synthetic construct
  source 1..17: mol_type = other RNA
cccactggaggaagccc

SEQ ID NO: 10286 - RNA, 18 nt, synthetic construct
  source 1..18: mol_type = other RNA
cccactggaggaagccca

SEQ ID NO: 10287 - RNA, 19 nt, synthetic construct
  source 1..19: mol_type = other RNA
cccactggaggaagcccag

SEQ ID NO: 10288 - RNA, 78 nt, synthetic construct
  source 1..78: mol_type = other RNA
acctgggggaaagccagagtcgggggaccccattcagcctccaaagaggctttgctgtgtgcacccaggatcccacta

SEQ ID NO: 10289 - RNA, 79 nt, synthetic construct
  source 1..79: mol_type = other RNA
aacctgggggaaagccagagtcgggggaccccattcagcctccaaagaggctttgctgtgtgcacccaggatcccacta

SEQ ID NO: 10290 - RNA, 79 nt, synthetic construct
  source 1..79: mol_type = other RNA
cacctgggggaaagccagagtcgggggaccccattcagcctccaaagaggctttgctgtgtgcacccaggatcccacta

SEQ ID NO: 10291 - RNA, 79 nt, synthetic construct
  source 1..79: mol_type = other RNA
gacctgggggaaagccagagtcgggggaccccattcagcctccaaagaggctttgctgtgtgcacccaggatcccacta

SEQ ID NO: 10292 - RNA, 79 nt, synthetic construct
  source 1..79: mol_type = other RNA
tacctgggggaaagccagagtcgggggaccccattcagcctccaaagaggctttgctgtgtgcacccaggatcccacta

SEQ ID NO: 10293 - RNA, 80 nt, synthetic construct
  source 1..80: mol_type = other RNA
atacctgggggaaagccagagtcgggggaccccattcagcctccaaagaggctttgctgtgtgcacccaggatcccacta

SEQ ID NO: 10294 - RNA, 80 nt, synthetic construct
  source 1..80: mol_type = other RNA
agacctgggggaaagccagagtcgggggaccccattcagcctccaaagaggctttgctgtgtgcacccaggatcccacta

SEQ ID NO: 10295 - RNA, 80 nt, synthetic construct
  source 1..80: mol_type = other RNA
acacctgggggaaagccagagtcgggggaccccattcagcctccaaagaggctttgctgtgtgcacccaggatcccacta

SEQ ID NO: 10296 - RNA, 80 nt, synthetic construct
  source 1..80: mol_type = other RNA
aaacctgggggaaagccagagtcgggggaccccattcagcctccaaagaggctttgctgtgtgcacccaggatcccacta

SEQ ID NO: 10297 - RNA, 81 nt, synthetic construct
  source 1..81: mol_type = other RNA
tacacctgggggaaagccagagtcgggggaccccattcagcctccaaagaggctttgctgtgtgcacccaggatcccacta

SEQ ID NO: 10298 - RNA, 81 nt, synthetic construct
  source 1..81: mol_type = other RNA
tatacctgggggaaagccagagtcgggggaccccattcagcctccaaagaggctttgctgtgtgcacccaggatcccacta

SEQ ID NO: 10299 - RNA, 81 nt, synthetic construct
  source 1..81: mol_type = other RNA
taaacctgggggaaagccagagtcgggggaccccattcagcctccaaagaggctttgctgtgtgcacccaggatcccacta

SEQ ID NO: 10300 - RNA, 81 nt, synthetic construct
  source 1..81: mol_type = other RNA
tagacctgggggaaagccagagtcgggggaccccattcagcctccaaagaggctttgctgtgtgcacccaggatcccacta

SEQ ID NO: 10301 - RNA, 82 nt, synthetic construct
  source 1..82: mol_type = other RNA
gtatacctgggggaaagccagagtcgggggaccccattcagcctccaaagaggctttgctgtgtgcacccaggatcccacta

SEQ ID NO: 10302 - RNA, 82 nt, synthetic construct
  source 1..82: mol_type = other RNA
gtagacctgggggaaagccagagtcgggggaccccattcagcctccaaagaggctttgctgtgtgcacccaggatcccacta

SEQ ID NO: 10303 - RNA, 82 nt, synthetic construct
  source 1..82: mol_type = other RNA
gtaaacctgggggaaagccagagtcgggggaccccattcagcctccaaagaggctttgctgtgtgcacccaggatcccacta

SEQ ID NO: 10304 - RNA, 82 nt, synthetic construct
  source 1..82: mol_type = other RNA
gtacacctgggggaaagccagagtcgggggaccccattcagcctccaaagaggctttgctgtgtgcacccaggatcccacta

SEQ ID NO: 10305 - RNA, 83 nt, synthetic construct
  source 1..83: mol_type = other RNA
tgtagacctgggggaaagccagagtcgggggaccccattcagcctccaaagaggctttgctgtgtgcacccaggatcccacta

SEQ ID NO: 10306 - RNA, 83 nt, synthetic construct
  source 1..83: mol_type = other RNA
tgtacacctgggggaaagccagagtcgggggaccccattcagcctccaaagaggctttgctgtgtgcacccaggatcccacta

SEQ ID NO: 10307 - RNA, 83 nt, synthetic construct
  source 1..83: mol_type = other RNA
tgtatacctgggggaaagccagagtcgggggaccccattcagcctccaaagaggctttgctgtgtgcacccaggatcccacta

SEQ ID NO: 10308 - RNA, 83 nt, synthetic construct
  source 1..83: mol_type = other RNA
tgtaaacctgggggaaagccagagtcgggggaccccattcagcctccaaagaggctttgctgtgtgcacccaggatcccacta

SEQ ID NO: 10309 - RNA, 84 nt, synthetic construct
  source 1..84: mol_type = other RNA
atgtagacctgggggaaagccagagtcgggggaccccattcagcctccaaagaggctttgctgtgtgcacccaggatcccacta

SEQ ID NO: 10310 - RNA, 84 nt, synthetic construct
  source 1..84: mol_type = other RNA
atgtaaacctgggggaaagccagagtcgggggaccccattcagcctccaaagaggctttgctgtgtgcacccaggatcccacta

SEQ ID NO: 10311 - RNA, 84 nt, synthetic construct
  source 1..84: mol_type = other RNA
atgtacacctgggggaaagccagagtcgggggaccccattcagcctccaaagaggctttgctgtgtgcacccaggatcccacta

SEQ ID NO: 10312 - RNA, 84 nt, synthetic construct
  source 1..84: mol_type = other RNA
atgtatacctgggggaaagccagagtcgggggaccccattcagcctccaaagaggctttgctgtgtgcacccaggatcccacta

SEQ ID NO: 10313 - RNA, 85 nt, synthetic construct
  source 1..85: mol_type = other RNA
catgtatacctgggggaaagccagagtcgggggaccccattcagcctccaaagaggctttgctgtgtgcacccaggatcccacta

SEQ ID NO: 10314 - RNA, 85 nt, synthetic construct
  source 1..85: mol_type = other RNA
catgtagacctgggggaaagccagagtcgggggaccccattcagcctccaaagaggctttgctgtgtgcacccaggatcccacta

SEQ ID NO: 10315 - RNA, 85 nt, synthetic construct
  source 1..85: mol_type = other RNA
catgtacacctgggggaaagccagagtcgggggaccccattcagcctccaaagaggctttgctgtgtgcacccaggatcccacta

SEQ ID NO: 10316 - RNA, 85 nt, synthetic construct
  source 1..85: mol_type = other RNA
catgtaaacctgggggaaagccagagtcgggggaccccattcagcctccaaagaggctttgctgtgtgcacccaggatcccacta

SEQ ID NO: 10317 - RNA, 86 nt, synthetic construct
  source 1..86: mol_type = other RNA
acatgtacacctgggggaaagccagagtcgggggaccccattcagcctccaaagaggctttgctgtgtgcacccaggatcccacta

SEQ ID NO: 10318 - RNA, 86 nt, synthetic construct
  source 1..86: mol_type = other RNA
acatgtatacctgggggaaagccagagtcgggggaccccattcagcctccaaagaggctttgctgtgtgcacccaggatcccacta

SEQ ID NO: 10319 - RNA, 86 nt, synthetic construct
  source 1..86: mol_type = other RNA
acatgtagacctgggggaaagccagagtcgggggaccccattcagcctccaaagaggctttgctgtgtgcacccaggatcccacta

SEQ ID NO: 10320 - RNA, 86 nt, synthetic construct
  source 1..86: mol_type = other RNA
acatgtaaacctgggggaaagccagagtcgggggaccccattcagcctccaaagaggctttgctgtgtgcacccaggatcccacta

SEQ ID NO: 10321 - RNA, 87 nt, synthetic construct
  source 1..87: mol_type = other RNA
aacatgtatacctgggggaaagccagagtcgggggaccccattcagcctccaaagaggctttgctgtgtgcacccaggatcccacta

SEQ ID NO: 10322 - RNA, 87 nt, synthetic construct
  source 1..87: mol_type = other RNA
aacatgtagacctgggggaaagccagagtcgggggaccccattcagcctccaaagaggctttgctgtgtgcacccaggatcccacta

SEQ ID NO: 10323 - RNA, 87 nt, synthetic construct
  source 1..87: mol_type = other RNA
aacatgtaaacctgggggaaagccagagtcgggggaccccattcagcctccaaagaggctttgctgtgtgcacccaggatcccacta

SEQ ID NO: 10324 - RNA, 87 nt, synthetic construct
  source 1..87: mol_type = other RNA
aacatgtacacctgggggaaagccagagtcgggggaccccattcagcctccaaagaggctttgctgtgtgcacccaggatcccacta

SEQ ID NO: 10325 - RNA, 88 nt, synthetic construct
  source 1..88: mol_type = other RNA
gaacatgtaaacctgggggaaagccagagtcgggggaccccattcagcctccaaagaggctttgctgtgtgcacccaggatcccacta

SEQ ID NO: 10326 - RNA, 88 nt, synthetic construct
  source 1..88: mol_type = other RNA
gaacatgtatacctgggggaaagccagagtcgggggaccccattcagcctccaaagaggctttgctgtgtgcacccaggatcccacta

SEQ ID NO: 10327 - RNA, 88 nt, synthetic construct
  source 1..88: mol_type = other RNA
gaacatgtagacctgggggaaagccagagtcgggggaccccattcagcctccaaagaggctttgctgtgtgcacccaggatcccacta

SEQ ID NO: 10328 - RNA, 88 nt, synthetic construct
  source 1..88: mol_type = other RNA
gaacatgtacacctgggggaaagccagagtcgggggaccccattcagcctccaaagaggctttgctgtgtgcacccaggatcccacta

SEQ ID NO: 10329 - RNA, 89 nt, synthetic construct
  source 1..89: mol_type = other RNA
ggaacatgtaaacctgggggaaagccagagtcgggggaccccattcagcctccaaagaggctttgctgtgtgcacccaggatcccacta

SEQ ID NO: 10330 - RNA, 89 nt, synthetic construct
  source 1..89: mol_type = other RNA
ggaacatgtagacctgggggaaagccagagtcgggggaccccattcagcctccaaagaggctttgctgtgtgcacccaggatcccacta

SEQ ID NO: 10331 - RNA, 89 nt, synthetic construct
  source 1..89: mol_type = other RNA
ggaacatgtatacctgggggaaagccagagtcgggggaccccattcagcctccaaagaggctttgctgtgtgcacccaggatcccacta

SEQ ID NO: 10332 - RNA, 89 nt, synthetic construct
  source 1..89: mol_type = other RNA
ggaacatgtacacctgggggaaagccagagtcgggggaccccattcagcctccaaagaggctttgctgtgtgcacccaggatcccacta

SEQ ID NO: 10333 - RNA, 90 nt, synthetic construct
  source 1..90: mol_type = other RNA
aggaacatgtatacctgggggaaagccagagtcgggggaccccattcagcctccaaagaggctttgctgtgtgcacccaggatcccacta

SEQ ID NO: 10334 - RNA, 90 nt, synthetic construct
  source 1..90: mol_type = other RNA
aggaacatgtacacctgggggaaagccagagtcgggggaccccattcagcctccaaagaggctttgctgtgtgcacccaggatcccacta

SEQ ID NO: 10335 - RNA, 90 nt, synthetic construct
  source 1..90: mol_type = other RNA
aggaacatgtagacctgggggaaagccagagtcgggggaccccattcagcctccaaagaggctttgctgtgtgcacccaggatcccacta

SEQ ID NO: 10336 - RNA, 90 nt, synthetic construct
  source 1..90: mol_type = other RNA
aggaacatgtaaacctgggggaaagccagagtcgggggaccccattcagcctccaaagaggctttgctgtgtgcacccaggatcccacta

SEQ ID NO: 10337 - RNA, 91 nt, synthetic construct
  source 1..91: mol_type = other RNA
caggaacatgtaaacctgggggaaagccagagtcgggggaccccattcagcctccaaagaggctttgctgtgtgcacccaggatcccacta

SEQ ID NO: 10338 - RNA, 91 nt, synthetic construct
  source 1..91: mol_type = other RNA
caggaacatgtacacctgggggaaagccagagtcgggggaccccattcagcctccaaagaggctttgctgtgtgcacccaggatcccacta

SEQ ID NO: 10339 - RNA, 91 nt, synthetic construct
  source 1..91: mol_type = other RNA
caggaacatgtagacctgggggaaagccagagtcgggggaccccattcagcctccaaagaggctttgctgtgtgcacccaggatcccacta

SEQ ID NO: 10340 - RNA, 91 nt, synthetic construct
  source 1..91: mol_type = other RNA
caggaacatgtatacctgggggaaagccagagtcgggggaccccattcagcctccaaagaggctttgctgtgtgcacccaggatcccacta

SEQ ID NO: 10341 - RNA, 92 nt, synthetic construct
  source 1..92: mol_type = other RNA
ccaggaacatgtagacctgggggaaagccagagtcgggggaccccattcagcctccaaagaggctttgctgtgtgcacccaggatcccacta

SEQ ID NO: 10342 - RNA, 92 nt, synthetic construct
  source 1..92: mol_type = other RNA
ccaggaacatgtaaacctgggggaaagccagagtcgggggaccccattcagcctccaaagaggctttgctgtgtgcacccaggatcccacta

SEQ ID NO: 10343 - RNA, 92 nt, synthetic construct
  source 1..92: mol_type = other RNA
ccaggaacatgtacacctgggggaaagccagagtcgggggaccccattcagcctccaaagaggctttgctgtgtgcacccaggatcccacta

SEQ ID NO: 10344 - RNA, 92 nt, synthetic construct
  source 1..92: mol_type = other RNA
ccaggaacatgtatacctgggggaaagccagagtcgggggaccccattcagcctccaaagaggctttgctgtgtgcacccaggatcccacta

SEQ ID NO: 10345 - RNA, 93 nt, synthetic construct
  source 1..93: mol_type = other RNA
accaggaacatgtatacctgggggaaagccagagtcgggggaccccattcagcctccaaagaggctttgctgtgtgcacccaggatcccacta

SEQ ID NO: 10346 - RNA, 93 nt, synthetic construct
  source 1..93: mol_type = other RNA
accaggaacatgtagacctgggggaaagccagagtcgggggaccccattcagcctccaaagaggctttgctgtgtgcacccaggatcccacta

SEQ ID NO: 10347 - RNA, 93 nt, synthetic construct
  source 1..93: mol_type = other RNA
accaggaacatgtaaacctgggggaaagccagagtcgggggaccccattcagcctccaaagaggctttgctgtgtgcacccaggatcccacta

SEQ ID NO: 10348 - RNA, 93 nt, synthetic construct
  source 1..93: mol_type = other RNA
accaggaacatgtacacctgggggaaagccagagtcgggggaccccattcagcctccaaagaggctttgctgtgtgcacccaggatcccacta

SEQ ID NO: 10349 - RNA, 94 nt, synthetic construct
  source 1..94: mol_type = other RNA
caccaggaacatgtatacctgggggaaagccagagtcgggggaccccattcagcctccaaagaggctttgctgtgtgcacccaggatcccacta

SEQ ID NO: 10350 - RNA, 94 nt, synthetic construct
  source 1..94: mol_type = other RNA
caccaggaacatgtaaacctgggggaaagccagagtcgggggaccccattcagcctccaaagaggctttgctgtgtgcacccaggatcccacta

SEQ ID NO: 10351 - RNA, 94 nt, synthetic construct
  source 1..94: mol_type = other RNA
caccaggaacatgtacacctgggggaaagccagagtcgggggaccccattcagcctccaaagaggctttgctgtgtgcacccaggatcccacta

SEQ ID NO: 10352 - RNA, 94 nt, synthetic construct
  source 1..94: mol_type = other RNA
caccaggaacatgtagacctgggggaaagccagagtcgggggaccccattcagcctccaaagaggctttgctgtgtgcacccaggatcccacta

SEQ ID NO: 10353 - RNA, 95 nt, synthetic construct
  source 1..95: mol_type = other RNA
tcaccaggaacatgtacacctgggggaaagccagagtcgggggaccccattcagcctccaaagaggctttgctgtgtgcacccaggatcccacta

SEQ ID NO: 10354 - RNA, 95 nt, synthetic construct
  source 1..95: mol_type = other RNA
tcaccaggaacatgtagacctgggggaaagccagagtcgggggaccccattcagcctccaaagaggctttgctgtgtgcacccaggatcccacta

SEQ ID NO: 10355 - RNA, 95 nt, synthetic construct
  source 1..95: mol_type = other RNA
tcaccaggaacatgtaaacctgggggaaagccagagtcgggggaccccattcagcctccaaagaggctttgctgtgtgcacccaggatcccacta

SEQ ID NO: 10356 - RNA, 95 nt, synthetic construct
  source 1..95: mol_type = other RNA
tcaccaggaacatgtatacctgggggaaagccagagtcgggggaccccattcagcctccaaagaggctttgctgtgtgcacccaggatcccacta

SEQ ID NO: 10357 - RNA, 96 nt, synthetic construct
  source 1..96: mol_type = other RNA
ttcaccaggaacatgtatacctgggggaaagccagagtcgggggaccccattcagcctccaaagaggctttgctgtgtgcacccaggatcccacta

SEQ ID NO: 10358 - RNA, 96 nt, synthetic construct
  source 1..96: mol_type = other RNA
ttcaccaggaacatgtacacctgggggaaagccagagtcgggggaccccattcagcctccaaagaggctttgctgtgtgcacccaggatcccacta

SEQ ID NO: 10359 - RNA, 96 nt, synthetic construct
  source 1..96: mol_type = other RNA
ttcaccaggaacatgtaaacctgggggaaagccagagtcgggggaccccattcagcctccaaagaggctttgctgtgtgcacccaggatcccacta

SEQ ID NO: 10360 - RNA, 96 nt, synthetic construct
  source 1..96: mol_type = other RNA
ttcaccaggaacatgtagacctgggggaaagccagagtcgggggaccccattcagcctccaaagaggctttgctgtgtgcacccaggatcccacta

SEQ ID NO: 10361 - RNA, 97 nt, synthetic construct
  source 1..97: mol_type = other RNA
tttcaccaggaacatgtatacctgggggaaagccagagtcgggggaccccattcagcctccaaagaggctttgctgtgtgcacccaggatcccacta

SEQ ID NO: 10362 - RNA, 97 nt, synthetic construct
  source 1..97: mol_type = other RNA
tttcaccaggaacatgtacacctgggggaaagccagagtcgggggaccccattcagcctccaaagaggctttgctgtgtgcacccaggatcccacta

SEQ ID NO: 10363 - RNA, 97 nt, synthetic construct
  source 1..97: mol_type = other RNA
tttcaccaggaacatgtagacctgggggaaagccagagtcgggggaccccattcagcctccaaagaggctttgctgtgtgcacccaggatcccacta

SEQ ID NO: 10364 - RNA, 97 nt, synthetic construct
  source 1..97: mol_type = other RNA
tttcaccaggaacatgtaaacctgggggaaagccagagtcgggggaccccattcagcctccaaagaggctttgctgtgtgcacccaggatcccacta

SEQ ID NO: 10365 - RNA, 98 nt, synthetic construct
  source 1..98: mol_type = other RNA
atttcaccaggaacatgtaaacctgggggaaagccagagtcgggggaccccattcagcctccaaagaggctttgctgtgtgcacccaggatcccacta

SEQ ID NO: 10366 - RNA, 98 nt, synthetic construct
  source 1..98: mol_type = other RNA
atttcaccaggaacatgtatacctgggggaaagccagagtcgggggaccccattcagcctccaaagaggctttgctgtgtgcacccaggatcccacta

SEQ ID NO: 10367 - RNA, 98 nt, synthetic construct
  source 1..98: mol_type = other RNA
atttcaccaggaacatgtacacctgggggaaagccagagtcgggggaccccattcagcctccaaagaggctttgctgtgtgcacccaggatcccacta

SEQ ID NO: 10368 - RNA, 98 nt, synthetic construct
  source 1..98: mol_type = other RNA
atttcaccaggaacatgtagacctgggggaaagccagagtcgggggaccccattcagcctccaaagaggctttgctgtgtgcacccaggatcccacta

SEQ ID NO: 10369 - RNA, 99 nt, synthetic construct
  source 1..99: mol_type = other RNA
catttcaccaggaacatgtaaacctgggggaaagccagagtcgggggaccccattcagcctccaaagaggctttgctgtgtgcacccaggatcccacta

SEQ ID NO: 10370 - RNA, 99 nt, synthetic construct
  source 1..99: mol_type = other RNA
catttcaccaggaacatgtacacctgggggaaagccagagtcgggggaccccattcagcctccaaagaggctttgctgtgtgcacccaggatcccacta

SEQ ID NO: 10371 - RNA, 99 nt, synthetic construct
  source 1..99: mol_type = other RNA
catttcaccaggaacatgtagacctgggggaaagccagagtcgggggaccccattcagcctccaaagaggctttgctgtgtgcacccaggatcccacta

SEQ ID NO: 10372 - RNA, 99 nt, synthetic construct
  source 1..99: mol_type = other RNA
catttcaccaggaacatgtatacctgggggaaagccagagtcgggggaccccattcagcctccaaagaggctttgctgtgtgcacccaggatcccacta

SEQ ID NO: 10373 - RNA, 100 nt, synthetic construct
  source 1..100: mol_type = other RNA
ccatttcaccaggaacatgtagacctgggggaaagccagagtcgggggaccccattcagcctccaaagaggctttgctgtgtgcacccaggatcccacta

SEQ ID NO: 10374 - RNA, 100 nt, synthetic construct
  source 1..100: mol_type = other RNA
ccatttcaccaggaacatgtaaacctgggggaaagccagagtcgggggaccccattcagcctccaaagaggctttgctgtgtgcacccaggatcccacta

SEQ ID NO: 10375 - RNA, 100 nt, synthetic construct
  source 1..100: mol_type = other RNA
ccatttcaccaggaacatgtacacctgggggaaagccagagtcgggggaccccattcagcctccaaagaggctttgctgtgtgcacccaggatcccacta

SEQ ID NO: 10376 - RNA, 100 nt, synthetic construct
  source 1..100: mol_type = other RNA
ccatttcaccaggaacatgtatacctgggggaaagccagagtcgggggaccccattcagcctccaaagaggctttgctgtgtgcacccaggatcccacta

SEQ ID NO: 10377 - RNA, 101 nt, synthetic construct
  source 1..101: mol_type = other RNA
gccatttcaccaggaacatgtacacctgggggaaagccagagtcgggggaccccattcagcctccaaagaggctttgctgtgtgcacccaggatcccacta

SEQ ID NO: 10378 - RNA, 101 nt, synthetic construct
  source 1..101: mol_type = other RNA
gccatttcaccaggaacatgtatacctgggggaaagccagagtcgggggaccccattcagcctccaaagaggctttgctgtgtgcacccaggatcccacta

SEQ ID NO: 10379 - RNA, 101 nt, synthetic construct
  source 1..101: mol_type = other RNA
gccatttcaccaggaacatgtagacctgggggaaagccagagtcgggggaccccattcagcctccaaagaggctttgctgtgtgcacccaggatcccacta

SEQ ID NO: 10380 - RNA, 101 nt, synthetic construct
  source 1..101: mol_type = other RNA
gccatttcaccaggaacatgtaaacctgggggaaagccagagtcgggggaccccattcagcctccaaagaggctttgctgtgtgcacccaggatcccacta

SEQ ID NO: 10381 - RNA, 102 nt, synthetic construct
  source 1..102: mol_type = other RNA
tgccatttcaccaggaacatgtatacctgggggaaagccagagtcgggggaccccattcagcctccaaagaggctttgctgtgtgcacccaggatcccacta

SEQ ID NO: 10382 - RNA, 102 nt, synthetic construct
  source 1..102: mol_type = other RNA
tgccatttcaccaggaacatgtagacctgggggaaagccagagtcgggggaccccattcagcctccaaagaggctttgctgtgtgcacccaggatcccacta

SEQ ID NO: 10383 - RNA, 102 nt, synthetic construct
  source 1..102: mol_type = other RNA
tgccatttcaccaggaacatgtacacctgggggaaagccagagtcgggggaccccattcagcctccaaagaggctttgctgtgtgcacccaggatcccacta

SEQ ID NO: 10384 - RNA, 102 nt, synthetic construct
  source 1..102: mol_type = other RNA
tgccatttcaccaggaacatgtaaacctgggggaaagccagagtcgggggaccccattcagcctccaaagaggctttgctgtgtgcacccaggatcccacta

SEQ ID NO: 10385 - RNA, 103 nt, synthetic construct
  source 1..103: mol_type = other RNA
ctgccatttcaccaggaacatgtatacctgggggaaagccagagtcgggggaccccattcagcctccaaagaggctttgctgtgtgcacccaggatcccacta

SEQ ID NO: 10386 - RNA, 103 nt, synthetic construct
  source 1..103: mol_type = other RNA
ctgccatttcaccaggaacatgtagacctgggggaaagccagagtcgggggaccccattcagcctccaaagaggctttgctgtgtgcacccaggatcccacta

SEQ ID NO: 10387 - RNA, 103 nt, synthetic construct
  source 1..103: mol_type = other RNA
ctgccatttcaccaggaacatgtacacctgggggaaagccagagtcgggggaccccattcagcctccaaagaggctttgctgtgtgcacccaggatcccacta

SEQ ID NO: 10388 - RNA, 103 nt, synthetic construct
  source 1..103: mol_type = other RNA
ctgccatttcaccaggaacatgtaaacctgggggaaagccagagtcgggggaccccattcagcctccaaagaggctttgctgtgtgcacccaggatcccacta

SEQ ID NO: 10389 - RNA, 16 nt, synthetic construct
  source 1..16: mol_type = other RNA
cctcaccccaatcctc

SEQ ID NO: 10390 - RNA, 17 nt, synthetic construct
  source 1..17: mol_type = other RNA
tcctcaccccaatcctc

SEQ ID NO: 10391 - RNA, 18 nt, synthetic construct
  source 1..18: mol_type = other RNA
gtcctcaccccaatcctc

SEQ ID NO: 10392 - RNA, 19 nt, synthetic construct
  source 1..19: mol_type = other RNA
ggtcctcaccccaatcctc

SEQ ID NO: 10393 - RNA, 20 nt, synthetic construct
  source 1..20: mol_type = other RNA
tggtcctcaccccaatcctc

SEQ ID NO: 10394 - RNA, 21 nt, synthetic construct
  source 1..21: mol_type = other RNA
atggtcctcaccccaatcctc

SEQ ID NO: 10395 - RNA, 22 nt, synthetic construct
  source 1..22: mol_type = other RNA
gatggtcctcaccccaatcctc

SEQ ID NO: 10396-10402 - skipped (7 entries)

SEQ ID NO: 10403 - RNA, 10 nt, synthetic construct
  source 1..10: mol_type = other RNA
gattggggtg

SEQ ID NO: 10404 - RNA, 11 nt, synthetic construct
  source 1..11: mol_type = other RNA
gattggggtga

SEQ ID NO: 10405 - RNA, 12 nt, synthetic construct
  source 1..12: mol_type = other RNA
gattggggtgag

SEQ ID NO: 10406 - RNA, 13 nt, synthetic construct
  source 1..13: mol_type = other RNA
gattggggtgagg

SEQ ID NO: 10407 - RNA, 14 nt, synthetic construct
  source 1..14: mol_type = other RNA
gattggggtgagga

SEQ ID NO: 10408 - RNA, 15 nt, synthetic construct
  source 1..15: mol_type = other RNA
gattggggtgaggac

SEQ ID NO: 10409 - RNA, 16 nt, synthetic construct
  source 1..16: mol_type = other RNA
gattggggtgaggacc

SEQ ID NO: 10410 - RNA, 17 nt, synthetic construct
  source 1..17: mol_type = other RNA
gattggggtgaggacca

SEQ ID NO: 10411 - RNA, 18 nt, synthetic construct
  source 1..18: mol_type = other RNA
gattggggtgaggaccat

SEQ ID NO: 10412 - RNA, 19 nt, synthetic construct
  source 1..19: mol_type = other RNA
gattggggtgaggaccatc

SEQ ID NO: 10413 - RNA, 99 nt, synthetic construct
  source 1..99: mol_type = other RNA
acctgggggaaagccagagtcgggggaccccattcagcctccaaagaggctttgctgtgtgcacccaggatcccactacccactggaggaagcccagag

SEQ ID NO: 10414 - RNA, 100 nt, synthetic construct
  source 1..100: mol_type = other RNA
cacctgggggaaagccagagtcgggggaccccattcagcctccaaagaggctttgctgtgtgcacccaggatcccactacccactggaggaagcccagag

SEQ ID NO: 10415 - RNA, 100 nt, synthetic construct
  source 1..100: mol_type = other RNA
gacctgggggaaagccagagtcgggggaccccattcagcctccaaagaggctttgctgtgtgcacccaggatcccactacccactggaggaagcccagag

SEQ ID NO: 10416 - RNA, 100 nt, synthetic construct
  source 1..100: mol_type = other RNA
tacctgggggaaagccagagtcgggggaccccattcagcctccaaagaggctttgctgtgtgcacccaggatcccactacccactggaggaagcccagag

SEQ ID NO: 10417 - RNA, 100 nt, synthetic construct
  source 1..100: mol_type = other RNA
aacctgggggaaagccagagtcgggggaccccattcagcctccaaagaggctttgctgtgtgcacccaggatcccactacccactggaggaagcccagag

SEQ ID NO: 10418 - RNA, 101 nt, synthetic construct
  source 1..101: mol_type = other RNA
acacctgggggaaagccagagtcgggggaccccattcagcctccaaagaggctttgctgtgtgcacccaggatcccactacccactggaggaagcccagag

SEQ ID NO: 10419 - RNA, 101 nt, synthetic construct
  source 1..101: mol_type = other RNA
agacctgggggaaagccagagtcgggggaccccattcagcctccaaagaggctttgctgtgtgcacccaggatcccactacccactggaggaagcccagag

SEQ ID NO: 10420 - RNA, 101 nt, synthetic construct
  source 1..101: mol_type = other RNA
atacctgggggaaagccagagtcgggggaccccattcagcctccaaagaggctttgctgtgtgcacccaggatcccactacccactggaggaagcccagag

SEQ ID NO: 10421 - RNA, 101 nt, synthetic construct
  source 1..101: mol_type = other RNA
aaacctgggggaaagccagagtcgggggaccccattcagcctccaaagaggctttgctgtgtgcacccaggatcccactacccactggaggaagcccagag

SEQ ID NO: 10422 - RNA, 102 nt, synthetic construct
  source 1..102: mol_type = other RNA
tatacctgggggaaagccagagtcgggggaccccattcagcctccaaagaggctttgctgtgtgcacccaggatcccactacccactggaggaagcccagag

SEQ ID NO: 10423 - RNA, 102 nt, synthetic construct
  source 1..102: mol_type = other RNA
tagacctgggggaaagccagagtcgggggaccccattcagcctccaaagaggctttgctgtgtgcacccaggatcccactacccactggaggaagcccagag

SEQ ID NO: 10424 - RNA, 102 nt, synthetic construct
  source 1..102: mol_type = other RNA
tacacctgggggaaagccagagtcgggggaccccattcagcctccaaagaggctttgctgtgtgcacccaggatcccactacccactggaggaagcccagag

SEQ ID NO: 10425 - RNA, 102 nt, synthetic construct
  source 1..102: mol_type = other RNA
taaacctgggggaaagccagagtcgggggaccccattcagcctccaaagaggctttgctgtgtgcacccaggatcccactacccactggaggaagcccagag

SEQ ID NO: 10426 - RNA, 103 nt, synthetic construct
  source 1..103: mol_type = other RNA
gtatacctgggggaaagccagagtcgggggaccccattcagcctccaaagaggctttgctgtgtgcacccaggatcccactacccactggaggaagcccagag

SEQ ID NO: 10427 - RNA, 103 nt, synthetic construct
  source 1..103: mol_type = other RNA
gtacacctgggggaaagccagagtcgggggaccccattcagcctccaaagaggctttgctgtgtgcacccaggatcccactacccactggaggaagcccagag

SEQ ID NO: 10428 - RNA, 103 nt, synthetic construct
  source 1..103: mol_type = other RNA
gtagacctgggggaaagccagagtcgggggaccccattcagcctccaaagaggctttgctgtgtgcacccaggatcccactacccactggaggaagcccagag

SEQ ID NO: 10429 - RNA, 103 nt, synthetic construct
  source 1..103: mol_type = other RNA
gtaaacctgggggaaagccagagtcgggggaccccattcagcctccaaagaggctttgctgtgtgcacccaggatcccactacccactggaggaagcccagag

SEQ ID NO: 10430 - RNA, 19 nt, synthetic construct
  source 1..19: mol_type = other RNA
ctacccactggaggaagcc

SEQ ID NO: 10431 - RNA, 19 nt, synthetic construct
  source 1..19: mol_type = other RNA
tcccactacccactggagg

SEQ ID NO: 10432 - RNA, 19 nt, synthetic construct
  source 1..19: mol_type = other RNA
ccaggatcccactacccac

SEQ ID NO: 10433 - RNA, 19 nt, synthetic construct
  source 1..19: mol_type = other RNA
cccactggaggaagcccag

SEQ ID NO: 10434 - RNA, 19 nt, synthetic construct
  source 1..19: mol_type = other RNA
ccactggaggaagcccaga

SEQ ID NO: 10435 - RNA, 19 nt, synthetic construct
  source 1..19: mol_type = other RNA
ggatcccactacccactgg

SEQ ID NO: 10436 - RNA, 19 nt, synthetic construct
  source 1..19: mol_type = other RNA
gatcccactacccactgga

SEQ ID NO: 10437 - RNA, 20 nt, synthetic construct
  source 1..20: mol_type = other RNA
cccactggaggaagcccaga

SEQ ID NO: 10438 - RNA, 20 nt, synthetic construct
  source 1..20: mol_type = other RNA
cccaggatcccactacccac

SEQ ID NO: 10439 - RNA, 20 nt, synthetic construct
  source 1..20: mol_type = other RNA
ctacccactggaggaagccc

SEQ ID NO: 10440 - RNA, 20 nt, synthetic construct
  source 1..20: mol_type = other RNA
aggatcccactacccactgg

SEQ ID NO: 10441 - RNA, 20 nt, synthetic construct
  source 1..20: mol_type = other RNA
acccactggaggaagcccag

SEQ ID NO: 10442 - RNA, 20 nt, synthetic construct
  source 1..20: mol_type = other RNA
ccaggatcccactacccact

SEQ ID NO: 10443 - RNA, 20 nt, synthetic construct
  source 1..20: mol_type = other RNA
tcccactacccactggagga

SEQ ID NO: 10444 - RNA, 20 nt, synthetic construct
  source 1..20: mol_type = other RNA
ggatcccactacccactgga

SEQ ID NO: 10445 - RNA, 16 nt, synthetic construct
  source 1..16: mol_type = other RNA
tctgggcttcctccag

SEQ ID NO: 10446 - RNA, 17 nt, synthetic construct
  source 1..17: mol_type = other RNA
ctctgggcttcctccag

SEQ ID NO: 10447 - RNA, 18 nt, synthetic construct
  source 1..18: mol_type = other RNA
cctctgggcttcctccag

SEQ ID NO: 10448 - RNA, 19 nt, synthetic construct
  source 1..19: mol_type = other RNA
tcctctgggcttcctccag

SEQ ID NO: 10449 - RNA, 20 nt, synthetic construct
  source 1..20: mol_type = other RNA
atcctctgggcttcctccag

SEQ ID NO: 10450 - RNA, 21 nt, synthetic construct
  source 1..21: mol_type = other RNA
aatcctctgggcttcctccag

SEQ ID NO: 10451 - RNA, 22 nt, synthetic construct
  source 1..22: mol_type = other RNA
caatcctctgggcttcctccag

SEQ ID NO: 10452-10457 - skipped (6 entries)

SEQ ID NO: 10458 - RNA, 10 nt, synthetic construct
  source 1..10: mol_type = other RNA
gaggaagccc

SEQ ID NO: 10459 - RNA, 11 nt, synthetic construct
  source 1..11: mol_type = other RNA
gaggaagccca

SEQ ID NO: 10460 - RNA, 12 nt, synthetic construct
  source 1..12: mol_type = other RNA
gaggaagcccag

SEQ ID NO: 10461 - RNA, 13 nt, synthetic construct
  source 1..13: mol_type = other RNA
gaggaagcccaga

SEQ ID NO: 10462 - RNA, 14 nt, synthetic construct
  source 1..14: mol_type = other RNA
gaggaagcccagag

SEQ ID NO: 10463 - RNA, 15 nt, synthetic construct
  source 1..15: mol_type = other RNA
gaggaagcccagagg

SEQ ID NO: 10464 - RNA, 16 nt, synthetic construct
  source 1..16: mol_type = other RNA
gaggaagcccagagga

SEQ ID NO: 10465 - RNA, 17 nt, synthetic construct
  source 1..17: mol_type = other RNA
gaggaagcccagaggat

SEQ ID NO: 10466 - RNA, 18 nt, synthetic construct
  source 1..18: mol_type = other RNA
gaggaagcccagaggatt

SEQ ID NO: 10467 - RNA, 19 nt, synthetic construct
  source 1..19: mol_type = other RNA
gaggaagcccagaggattg

SEQ ID NO: 10468 - RNA, 85 nt, synthetic construct
  source 1..85: mol_type = other RNA
acctgggggaaagccagagtcgggggaccccattcagcctccaaagaggctttgctgtgtgcacccaggatcccactacccactg

SEQ ID NO: 10469 - RNA, 86 nt, synthetic construct
  source 1..86: mol_type = other RNA
tacctgggggaaagccagagtcgggggaccccattcagcctccaaagaggctttgctgtgtgcacccaggatcccactacccactg

SEQ ID NO: 10470 - RNA, 86 nt, synthetic construct
  source 1..86: mol_type = other RNA
gacctgggggaaagccagagtcgggggaccccattcagcctccaaagaggctttgctgtgtgcacccaggatcccactacccactg

SEQ ID NO: 10471 - RNA, 86 nt, synthetic construct
  source 1..86: mol_type = other RNA
cacctgggggaaagccagagtcgggggaccccattcagcctccaaagaggctttgctgtgtgcacccaggatcccactacccactg

SEQ ID NO: 10472 - RNA, 86 nt, synthetic construct
  source 1..86: mol_type = other RNA
aacctgggggaaagccagagtcgggggaccccattcagcctccaaagaggctttgctgtgtgcacccaggatcccactacccactg

SEQ ID NO: 10473 - RNA, 87 nt, synthetic construct
  source 1..87: mol_type = other RNA
aaacctgggggaaagccagagtcgggggaccccattcagcctccaaagaggctttgctgtgtgcacccaggatcccactacccactg

SEQ ID NO: 10474 - RNA, 87 nt, synthetic construct
  source 1..87: mol_type = other RNA
acacctgggggaaagccagagtcgggggaccccattcagcctccaaagaggctttgctgtgtgcacccaggatcccactacccactg

SEQ ID NO: 10475 - RNA, 87 nt, synthetic construct
  source 1..87: mol_type = other RNA
atacctgggggaaagccagagtcgggggaccccattcagcctccaaagaggctttgctgtgtgcacccaggatcccactacccactg

SEQ ID NO: 10476 - RNA, 87 nt, synthetic construct
  source 1..87: mol_type = other RNA
agacctgggggaaagccagagtcgggggaccccattcagcctccaaagaggctttgctgtgtgcacccaggatcccactacccactg

SEQ ID NO: 10477 - RNA, 88 nt, synthetic construct
  source 1..88: mol_type = other RNA
tagacctgggggaaagccagagtcgggggaccccattcagcctccaaagaggctttgctgtgtgcacccaggatcccactacccactg

SEQ ID NO: 10478 - RNA, 88 nt, synthetic construct
  source 1..88: mol_type = other RNA
tacacctgggggaaagccagagtcgggggaccccattcagcctccaaagaggctttgctgtgtgcacccaggatcccactacccactg

SEQ ID NO: 10479 - RNA, 88 nt, synthetic construct
  source 1..88: mol_type = other RNA
taaacctgggggaaagccagagtcgggggaccccattcagcctccaaagaggctttgctgtgtgcacccaggatcccactacccactg

SEQ ID NO: 10480 - RNA, 88 nt, synthetic construct
  source 1..88: mol_type = other RNA
tatacctgggggaaagccagagtcgggggaccccattcagcctccaaagaggctttgctgtgtgcacccaggatcccactacccactg

SEQ ID NO: 10481 - RNA, 89 nt, synthetic construct
  source 1..89: mol_type = other RNA
gtaaacctgggggaaagccagagtcgggggaccccattcagcctccaaagaggctttgctgtgtgcacccaggatcccactacccactg

SEQ ID NO: 10482 - RNA, 89 nt, synthetic construct
  source 1..89: mol_type = other RNA
gtatacctgggggaaagccagagtcgggggaccccattcagcctccaaagaggctttgctgtgtgcacccaggatcccactacccactg

SEQ ID NO: 10483 - RNA, 89 nt, synthetic construct
  source 1..89: mol_type = other RNA
gtacacctgggggaaagccagagtcgggggaccccattcagcctccaaagaggctttgctgtgtgcacccaggatcccactacccactg

SEQ ID NO: 10484 - RNA, 89 nt, synthetic construct
  source 1..89: mol_type = other RNA
gtagacctgggggaaagccagagtcgggggaccccattcagcctccaaagaggctttgctgtgtgcacccaggatcccactacccactg

SEQ ID NO: 10485 - RNA, 90 nt, synthetic construct
  source 1..90: mol_type = other RNA
tgtatacctgggggaaagccagagtcgggggaccccattcagcctccaaagaggctttgctgtgtgcacccaggatcccactacccactg

SEQ ID NO: 10486 - RNA, 90 nt, synthetic construct
  source 1..90: mol_type = other RNA
tgtaaacctgggggaaagccagagtcgggggaccccattcagcctccaaagaggctttgctgtgtgcacccaggatcccactacccactg

SEQ ID NO: 10487 - RNA, 90 nt, synthetic construct
  source 1..90: mol_type = other RNA
tgtacacctgggggaaagccagagtcgggggaccccattcagcctccaaagaggctttgctgtgtgcacccaggatcccactacccactg

SEQ ID NO: 10488 - RNA, 90 nt, synthetic construct
  source 1..90: mol_type = other RNA
tgtagacctgggggaaagccagagtcgggggaccccattcagcctccaaagaggctttgctgtgtgcacccaggatcccactacccactg

SEQ ID NO: 10489 - RNA, 91 nt, synthetic construct
  source 1..91: mol_type = other RNA
atgtaaacctgggggaaagccagagtcgggggaccccattcagcctccaaagaggctttgctgtgtgcacccaggatcccactacccactg

SEQ ID NO: 10490 - RNA, 91 nt, synthetic construct
  source 1..91: mol_type = other RNA
atgtatacctgggggaaagccagagtcgggggaccccattcagcctccaaagaggctttgctgtgtgcacccaggatcccactacccactg

SEQ ID NO: 10491 - RNA, 91 nt, synthetic construct
  source 1..91: mol_type = other RNA
atgtacacctgggggaaagccagagtcgggggaccccattcagcctccaaagaggctttgctgtgtgcacccaggatcccactacccactg

SEQ ID NO: 10492 - RNA, 91 nt, synthetic construct
  source 1..91: mol_type = other RNA
atgtagacctgggggaaagccagagtcgggggaccccattcagcctccaaagaggctttgctgtgtgcacccaggatcccactacccactg

SEQ ID NO: 10493 - RNA, 92 nt, synthetic construct
  source 1..92: mol_type = other RNA
catgtaaacctgggggaaagccagagtcgggggaccccattcagcctccaaagaggctttgctgtgtgcacccaggatcccactacccactg

SEQ ID NO: 10494 - RNA, 92 nt, synthetic construct
  source 1..92: mol_type = other RNA
catgtatacctgggggaaagccagagtcgggggaccccattcagcctccaaagaggctttgctgtgtgcacccaggatcccactacccactg

SEQ ID NO: 10495 - RNA, 92 nt, synthetic construct
  source 1..92: mol_type = other RNA
catgtacacctgggggaaagccagagtcgggggaccccattcagcctccaaagaggctttgctgtgtgcacccaggatcccactacccactg

SEQ ID NO: 10496 - RNA, 92 nt, synthetic construct
  source 1..92: mol_type = other RNA
catgtagacctgggggaaagccagagtcgggggaccccattcagcctccaaagaggctttgctgtgtgcacccaggatcccactacccactg

SEQ ID NO: 10497 - RNA, 93 nt, synthetic construct
  source 1..93: mol_type = other RNA
acatgtaaacctgggggaaagccagagtcgggggaccccattcagcctccaaagaggctttgctgtgtgcacccaggatcccactacccactg

SEQ ID NO: 10498 - RNA, 93 nt, synthetic construct
  source 1..93: mol_type = other RNA
acatgtacacctgggggaaagccagagtcgggggaccccattcagcctccaaagaggctttgctgtgtgcacccaggatcccactacccactg

SEQ ID NO: 10499 - RNA, 93 nt, synthetic construct
  source 1..93: mol_type = other RNA
acatgtatacctgggggaaagccagagtcgggggaccccattcagcctccaaagaggctttgctgtgtgcacccaggatcccactacccactg

SEQ ID NO: 10500 - RNA, 93 nt, synthetic construct
  source 1..93: mol_type = other RNA
acatgtagacctgggggaaagccagagtcgggggaccccattcagcctccaaagaggctttgctgtgtgcacccaggatcccactacccactg

SEQ ID NO: 10501 - RNA, 94 nt, synthetic construct
  source 1..94: mol_type = other RNA
aacatgtacacctgggggaaagccagagtcgggggaccccattcagcctccaaagaggctttgctgtgtgcacccaggatcccactacccactg

SEQ ID NO: 10502 - RNA, 94 nt, synthetic construct
  source 1..94: mol_type = other RNA
aacatgtagacctgggggaaagccagagtcgggggaccccattcagcctccaaagaggctttgctgtgtgcacccaggatcccactacccactg

SEQ ID NO: 10503 - RNA, 94 nt, synthetic construct
  source 1..94: mol_type = other RNA
aacatgtaaacctgggggaaagccagagtcgggggaccccattcagcctccaaagaggctttgctgtgtgcacccaggatcccactacccactg

SEQ ID NO: 10504 - RNA, 94 nt, synthetic construct
  source 1..94: mol_type = other RNA
aacatgtatacctgggggaaagccagagtcgggggaccccattcagcctccaaagaggctttgctgtgtgcacccaggatcccactacccactg

SEQ ID NO: 10505 - RNA, 95 nt, synthetic construct
  source 1..95: mol_type = other RNA
gaacatgtaaacctgggggaaagccagagtcgggggaccccattcagcctccaaagaggctttgctgtgtgcacccaggatcccactacccactg

SEQ ID NO: 10506 - RNA, 95 nt, synthetic construct
  source 1..95: mol_type = other RNA
gaacatgtacacctgggggaaagccagagtcgggggaccccattcagcctccaaagaggctttgctgtgtgcacccaggatcccactacccactg

SEQ ID NO: 10507 - RNA, 95 nt, synthetic construct
  source 1..95: mol_type = other RNA
gaacatgtagacctgggggaaagccagagtcgggggaccccattcagcctccaaagaggctttgctgtgtgcacccaggatcccactacccactg

SEQ ID NO: 10508 - RNA, 95 nt, synthetic construct
  source 1..95: mol_type = other RNA
gaacatgtatacctgggggaaagccagagtcgggggaccccattcagcctccaaagaggctttgctgtgtgcacccaggatcccactacccactg

SEQ ID NO: 10509 - RNA, 96 nt, synthetic construct
  source 1..96: mol_type = other RNA
ggaacatgtatacctgggggaaagccagagtcgggggaccccattcagcctccaaagaggctttgctgtgtgcacccaggatcccactacccactg

SEQ ID NO: 10510 - RNA, 96 nt, synthetic construct
  source 1..96: mol_type = other RNA
ggaacatgtaaacctgggggaaagccagagtcgggggaccccattcagcctccaaagaggctttgctgtgtgcacccaggatcccactacccactg

SEQ ID NO: 10511 - RNA, 96 nt, synthetic construct
  source 1..96: mol_type = other RNA
ggaacatgtagacctgggggaaagccagagtcgggggaccccattcagcctccaaagaggctttgctgtgtgcacccaggatcccactacccactg

SEQ ID NO: 10512 - RNA, 96 nt, synthetic construct
  source 1..96: mol_type = other RNA
ggaacatgtacacctgggggaaagccagagtcgggggaccccattcagcctccaaagaggctttgctgtgtgcacccaggatcccactacccactg

SEQ ID NO: 10513 - RNA, 97 nt, synthetic construct
  source 1..97: mol_type = other RNA
aggaacatgtagacctgggggaaagccagagtcgggggaccccattcagcctccaaagaggctttgctgtgtgcacccaggatcccactacccactg

SEQ ID NO: 10514 - RNA, 97 nt, synthetic construct
  source 1..97: mol_type = other RNA
aggaacatgtacacctgggggaaagccagagtcgggggaccccattcagcctccaaagaggctttgctgtgtgcacccaggatcccactacccactg

SEQ ID NO: 10515 - RNA, 97 nt, synthetic construct
  source 1..97: mol_type = other RNA
aggaacatgtatacctgggggaaagccagagtcgggggaccccattcagcctccaaagaggctttgctgtgtgcacccaggatcccactacccactg

SEQ ID NO: 10516 - RNA, 97 nt, synthetic construct
  source 1..97: mol_type = other RNA
aggaacatgtaaacctgggggaaagccagagtcgggggaccccattcagcctccaaagaggctttgctgtgtgcacccaggatcccactacccactg

SEQ ID NO: 10517 - RNA, 98 nt, synthetic construct
  source 1..98: mol_type = other RNA
caggaacatgtatacctgggggaaagccagagtcgggggaccccattcagcctccaaagaggctttgctgtgtgcacccaggatcccactacccactg

SEQ ID NO: 10518 - RNA, 98 nt, synthetic construct
  source 1..98: mol_type = other RNA
caggaacatgtacacctgggggaaagccagagtcgggggaccccattcagcctccaaagaggctttgctgtgtgcacccaggatcccactacccactg

SEQ ID NO: 10519 - RNA, 98 nt, synthetic construct
  source 1..98: mol_type = other RNA
caggaacatgtaaacctgggggaaagccagagtcgggggaccccattcagcctccaaagaggctttgctgtgtgcacccaggatcccactacccactg

SEQ ID NO: 10520 - RNA, 98 nt, synthetic construct
  source 1..98: mol_type = other RNA
caggaacatgtagacctgggggaaagccagagtcgggggaccccattcagcctccaaagaggctttgctgtgtgcacccaggatcccactacccactg

SEQ ID NO: 10521 - RNA, 99 nt, synthetic construct
  source 1..99: mol_type = other RNA
ccaggaacatgtatacctgggggaaagccagagtcgggggaccccattcagcctccaaagaggctttgctgtgtgcacccaggatcccactacccactg

SEQ ID NO: 10522 - RNA, 99 nt, synthetic construct
  source 1..99: mol_type = other RNA
ccaggaacatgtacacctgggggaaagccagagtcgggggaccccattcagcctccaaagaggctttgctgtgtgcacccaggatcccactacccactg

SEQ ID NO: 10523 - RNA, 99 nt, synthetic construct
  source 1..99: mol_type = other RNA
ccaggaacatgtaaacctgggggaaagccagagtcgggggaccccattcagcctccaaagaggctttgctgtgtgcacccaggatcccactacccactg

SEQ ID NO: 10524 - RNA, 99 nt, synthetic construct
  source 1..99: mol_type = other RNA
ccaggaacatgtagacctgggggaaagccagagtcgggggaccccattcagcctccaaagaggctttgctgtgtgcacccaggatcccactacccactg

SEQ ID NO: 10525 - RNA, 100 nt, synthetic construct
  source 1..100: mol_type = other RNA
accaggaacatgtatacctgggggaaagccagagtcgggggaccccattcagcctccaaagaggctttgctgtgtgcacccaggatcccactacccactg

SEQ ID NO: 10526 - RNA, 100 nt, synthetic construct
  source 1..100: mol_type = other RNA
accaggaacatgtagacctgggggaaagccagagtcgggggaccccattcagcctccaaagaggctttgctgtgtgcacccaggatcccactacccactg

SEQ ID NO: 10527 - RNA, 100 nt, synthetic construct
  source 1..100: mol_type = other RNA
accaggaacatgtacacctgggggaaagccagagtcgggggaccccattcagcctccaaagaggctttgctgtgtgcacccaggatcccactacccactg

SEQ ID NO: 10528 - RNA, 100 nt, synthetic construct
  source 1..100: mol_type = other RNA
accaggaacatgtaaacctgggggaaagccagagtcgggggaccccattcagcctccaaagaggctttgctgtgtgcacccaggatcccactacccactg

SEQ ID NO: 10529 - RNA, 101 nt, synthetic construct
  source 1..101: mol_type = other RNA
caccaggaacatgtagacctgggggaaagccagagtcgggggaccccattcagcctccaaagaggctttgctgtgtgcacccaggatcccactacccactg

SEQ ID NO: 10530 - RNA, 101 nt, synthetic construct
  source 1..101: mol_type = other RNA
caccaggaacatgtacacctgggggaaagccagagtcgggggaccccattcagcctccaaagaggctttgctgtgtgcacccaggatcccactacccactg

SEQ ID NO: 10531 - RNA, 101 nt, synthetic construct
  source 1..101: mol_type = other RNA
caccaggaacatgtaaacctgggggaaagccagagtcgggggaccccattcagcctccaaagaggctttgctgtgtgcacccaggatcccactacccactg

SEQ ID NO: 10532 - RNA, 101 nt, synthetic construct
  source 1..101: mol_type = other RNA
caccaggaacatgtatacctgggggaaagccagagtcgggggaccccattcagcctccaaagaggctttgctgtgtgcacccaggatcccactacccactg

SEQ ID NO: 10533 - RNA, 102 nt, synthetic construct
  source 1..102: mol_type = other RNA
tcaccaggaacatgtagacctgggggaaagccagagtcgggggaccccattcagcctccaaagaggctttgctgtgtgcacccaggatcccactacccactg

SEQ ID NO: 10534 - RNA, 102 nt, synthetic construct
  source 1..102: mol_type = other RNA
tcaccaggaacatgtaaacctgggggaaagccagagtcgggggaccccattcagcctccaaagaggctttgctgtgtgcacccaggatcccactacccactg

SEQ ID NO: 10535 - RNA, 102 nt, synthetic construct
  source 1..102: mol_type = other RNA
tcaccaggaacatgtatacctgggggaaagccagagtcgggggaccccattcagcctccaaagaggctttgctgtgtgcacccaggatcccactacccactg

SEQ ID NO: 10536 - RNA, 102 nt, synthetic construct
  source 1..102: mol_type = other RNA
tcaccaggaacatgtacacctgggggaaagccagagtcgggggaccccattcagcctccaaagaggctttgctgtgtgcacccaggatcccactacccactg

SEQ ID NO: 10537 - RNA, 103 nt, synthetic construct
  source 1..103: mol_type = other RNA
ttcaccaggaacatgtaaacctgggggaaagccagagtcgggggaccccattcagcctccaaagaggctttgctgtgtgcacccaggatcccactacccactg

SEQ ID NO: 10538 - RNA, 103 nt, synthetic construct
  source 1..103: mol_type = other RNA
ttcaccaggaacatgtacacctgggggaaagccagagtcgggggaccccattcagcctccaaagaggctttgctgtgtgcacccaggatcccactacccactg

SEQ ID NO: 10539 - RNA, 103 nt, synthetic construct
  source 1..103: mol_type = other RNA
ttcaccaggaacatgtagacctgggggaaagccagagtcgggggaccccattcagcctccaaagaggctttgctgtgtgcacccaggatcccactacccactg

SEQ ID NO: 10540 - RNA, 103 nt, synthetic construct
  source 1..103: mol_type = other RNA
ttcaccaggaacatgtatacctgggggaaagccagagtcgggggaccccattcagcctccaaagaggctttgctgtgtgcacccaggatcccactacccactg

SEQ ID NO: 10541 - RNA, 16 nt, synthetic construct
  source 1..16: mol_type = other RNA
cctctttggaggctga

SEQ ID NO: 10542 - RNA, 17 nt, synthetic construct
  source 1..17: mol_type = other RNA
gcctctttggaggctga

SEQ ID NO: 10543 - RNA, 18 nt, synthetic construct
  source 1..18: mol_type = other RNA
agcctctttggaggctga

SEQ ID NO: 10544 - RNA, 19 nt, synthetic construct
  source 1..19: mol_type = other RNA
aagcctctttggaggctga

SEQ ID NO: 10545 - RNA, 20 nt, synthetic construct
  source 1..20: mol_type = other RNA
aaagcctctttggaggctga

SEQ ID NO: 10546 - RNA, 21 nt, synthetic construct
  source 1..21: mol_type = other RNA
caaagcctctttggaggctga

SEQ ID NO: 10547 - RNA, 22 nt, synthetic construct
  source 1..22: mol_type = other RNA
gcaaagcctctttggaggctga

SEQ ID NO: 10548-10554 - skipped (7 entries)

SEQ ID NO: 10555 - RNA, 10 nt, synthetic construct
  source 1..10: mol_type = other RNA
gcctccaaag

SEQ ID NO: 10556 - RNA, 11 nt, synthetic construct
  source 1..11: mol_type = other RNA
gcctccaaaga

SEQ ID NO: 10557 - RNA, 12 nt, synthetic construct
  source 1..12: mol_type = other RNA
gcctccaaagag

SEQ ID NO: 10558 - RNA, 13 nt, synthetic construct
  source 1..13: mol_type = other RNA
gcctccaaagagg

SEQ ID NO: 10559 - RNA, 14 nt, synthetic construct
  source 1..14: mol_type = other RNA
gcctccaaagaggc

SEQ ID NO: 10560 - RNA, 15 nt, synthetic construct
  source 1..15: mol_type = other RNA
gcctccaaagaggct

SEQ ID NO: 10561 - RNA, 16 nt, synthetic construct
  source 1..16: mol_type = other RNA
gcctccaaagaggctt

SEQ ID NO: 10562 - RNA, 17 nt, synthetic construct
  source 1..17: mol_type = other RNA
gcctccaaagaggcttt

SEQ ID NO: 10563 - RNA, 18 nt, synthetic construct
  source 1..18: mol_type = other RNA
gcctccaaagaggctttg

SEQ ID NO: 10564 - RNA, 19 nt, synthetic construct
  source 1..19: mol_type = other RNA
gcctccaaagaggctttgc

SEQ ID NO: 10565 - RNA, 36 nt, synthetic construct
  source 1..36: mol_type = other RNA
acctgggggaaagccagagtcgggggaccccattca

SEQ ID NO: 10566 - RNA, 37 nt, synthetic construct
  source 1..37: mol_type = other RNA
aacctgggggaaagccagagtcgggggaccccattca

SEQ ID NO: 10567 - RNA, 37 nt, synthetic construct
  source 1..37: mol_type = other RNA
tacctgggggaaagccagagtcgggggaccccattca

SEQ ID NO: 10568 - RNA, 37 nt, synthetic construct
  source 1..37: mol_type = other RNA
gacctgggggaaagccagagtcgggggaccccattca

SEQ ID NO: 10569 - RNA, 37 nt, synthetic construct
  source 1..37: mol_type = other RNA
cacctgggggaaagccagagtcgggggaccccattca

SEQ ID NO: 10570 - RNA, 38 nt, synthetic construct
  source 1..38: mol_type = other RNA
atacctgggggaaagccagagtcgggggaccccattca

SEQ ID NO: 10571 - RNA, 38 nt, synthetic construct
  source 1..38: mol_type = other RNA
agacctgggggaaagccagagtcgggggaccccattca

SEQ ID NO: 10572 - RNA, 38 nt, synthetic construct
  source 1..38: mol_type = other RNA
acacctgggggaaagccagagtcgggggaccccattca

SEQ ID NO: 10573 - RNA, 38 nt, synthetic construct
  source 1..38: mol_type = other RNA
aaacctgggggaaagccagagtcgggggaccccattca

SEQ ID NO: 10574 - RNA, 39 nt, synthetic construct
  source 1..39: mol_type = other RNA
tagacctgggggaaagccagagtcgggggaccccattca

SEQ ID NO: 10575 - RNA, 39 nt, synthetic construct
  source 1..39: mol_type = other RNA
tacacctgggggaaagccagagtcgggggaccccattca

SEQ ID NO: 10576 - RNA, 39 nt, synthetic construct
  source 1..39: mol_type = other RNA
tatacctgggggaaagccagagtcgggggaccccattca

SEQ ID NO: 10577 - RNA, 39 nt, synthetic construct
  source 1..39: mol_type = other RNA
taaacctgggggaaagccagagtcgggggaccccattca

SEQ ID NO: 10578 - RNA, 40 nt, synthetic construct
  source 1..40: mol_type = other RNA
gtaaacctgggggaaagccagagtcgggggaccccattca

SEQ ID NO: 10579 - RNA, 40 nt, synthetic construct
  source 1..40: mol_type = other RNA
gtacacctgggggaaagccagagtcgggggaccccattca

SEQ ID NO: 10580 - RNA, 40 nt, synthetic construct
  source 1..40: mol_type = other RNA
gtagacctgggggaaagccagagtcgggggaccccattca

SEQ ID NO: 10581 - RNA, 40 nt, synthetic construct
  source 1..40: mol_type = other RNA
gtatacctgggggaaagccagagtcgggggaccccattca

SEQ ID NO: 10582 - RNA, 41 nt, synthetic construct
  source 1..41: mol_type = other RNA
tgtaaacctgggggaaagccagagtcgggggaccccattca

SEQ ID NO: 10583 - RNA, 41 nt, synthetic construct
  source 1..41: mol_type = other RNA
tgtacacctgggggaaagccagagtcgggggaccccattca

SEQ ID NO: 10584 - RNA, 41 nt, synthetic construct
  source 1..41: mol_type = other RNA
tgtatacctgggggaaagccagagtcgggggaccccattca

SEQ ID NO: 10585 - RNA, 41 nt, synthetic construct
  source 1..41: mol_type = other RNA
tgtagacctgggggaaagccagagtcgggggaccccattca

SEQ ID NO: 10586 - RNA, 42 nt, synthetic construct
  source 1..42: mol_type = other RNA
atgtagacctgggggaaagccagagtcgggggaccccattca

SEQ ID NO: 10587 - RNA, 42 nt, synthetic construct
  source 1..42: mol_type = other RNA
atgtaaacctgggggaaagccagagtcgggggaccccattca

SEQ ID NO: 10588 - RNA, 42 nt, synthetic construct
  source 1..42: mol_type = other RNA
atgtatacctgggggaaagccagagtcgggggaccccattca

SEQ ID NO: 10589 - RNA, 42 nt, synthetic construct
  source 1..42: mol_type = other RNA
atgtacacctgggggaaagccagagtcgggggaccccattca

SEQ ID NO: 10590 - RNA, 43 nt, synthetic construct
  source 1..43: mol_type = other RNA
catgtaaacctgggggaaagccagagtcgggggaccccattca

SEQ ID NO: 10591 - RNA, 43 nt, synthetic construct
  source 1..43: mol_type = other RNA
catgtatacctgggggaaagccagagtcgggggaccccattca

SEQ ID NO: 10592 - RNA, 43 nt, synthetic construct
  source 1..43: mol_type = other RNA
catgtacacctgggggaaagccagagtcgggggaccccattca

SEQ ID NO: 10593 - RNA, 43 nt, synthetic construct
  source 1..43: mol_type = other RNA
catgtagacctgggggaaagccagagtcgggggaccccattca

SEQ ID NO: 10594 - RNA, 44 nt, synthetic construct
  source 1..44: mol_type = other RNA
acatgtagacctgggggaaagccagagtcgggggaccccattca

SEQ ID NO: 10595 - RNA, 44 nt, synthetic construct
  source 1..44: mol_type = other RNA
acatgtacacctgggggaaagccagagtcgggggaccccattca

SEQ ID NO: 10596 - RNA, 44 nt, synthetic construct
  source 1..44: mol_type = other RNA
acatgtatacctgggggaaagccagagtcgggggaccccattca

SEQ ID NO: 10597 - RNA, 44 nt, synthetic construct
  source 1..44: mol_type = other RNA
acatgtaaacctgggggaaagccagagtcgggggaccccattca

SEQ ID NO: 10598 - RNA, 45 nt, synthetic construct
  source 1..45: mol_type = other RNA
aacatgtagacctgggggaaagccagagtcgggggaccccattca

SEQ ID NO: 10599 - RNA, 45 nt, synthetic construct
  source 1..45: mol_type = other RNA
aacatgtacacctgggggaaagccagagtcgggggaccccattca

SEQ ID NO: 10600 - RNA, 45 nt, synthetic construct
  source 1..45: mol_type = other RNA
aacatgtaaacctgggggaaagccagagtcgggggaccccattca

SEQ ID NO: 10601 - RNA, 45 nt, synthetic construct
  source 1..45: mol_type = other RNA
aacatgtatacctgggggaaagccagagtcgggggaccccattca

SEQ ID NO: 10602 - RNA, 46 nt, synthetic construct
  source 1..46: mol_type = other RNA
gaacatgtacacctgggggaaagccagagtcgggggaccccattca

SEQ ID NO: 10603 - RNA, 46 nt, synthetic construct
  source 1..46: mol_type = other RNA
gaacatgtatacctgggggaaagccagagtcgggggaccccattca

SEQ ID NO: 10604 - RNA, 46 nt, synthetic construct
  source 1..46: mol_type = other RNA
gaacatgtagacctgggggaaagccagagtcgggggaccccattca

SEQ ID NO: 10605 - RNA, 46 nt, synthetic construct
  source 1..46: mol_type = other RNA
gaacatgtaaacctgggggaaagccagagtcgggggaccccattca

SEQ ID NO: 10606 - RNA, 47 nt, synthetic construct
  source 1..47: mol_type = other RNA
ggaacatgtatacctgggggaaagccagagtcgggggaccccattca

SEQ ID NO: 10607 - RNA, 47 nt, synthetic construct
  source 1..47: mol_type = other RNA
ggaacatgtagacctgggggaaagccagagtcgggggaccccattca

SEQ ID NO: 10608 - RNA, 47 nt, synthetic construct
  source 1..47: mol_type = other RNA
ggaacatgtacacctgggggaaagccagagtcgggggaccccattca

SEQ ID NO: 10609 - RNA, 47 nt, synthetic construct
  source 1..47: mol_type = other RNA
ggaacatgtaaacctgggggaaagccagagtcgggggaccccattca

SEQ ID NO: 10610 - RNA, 48 nt, synthetic construct
  source 1..48: mol_type = other RNA
aggaacatgtatacctgggggaaagccagagtcgggggaccccattca

SEQ ID NO: 10611 - RNA, 48 nt, synthetic construct
  source 1..48: mol_type = other RNA
aggaacatgtagacctgggggaaagccagagtcgggggaccccattca

SEQ ID NO: 10612 - RNA, 48 nt, synthetic construct
  source 1..48: mol_type = other RNA
aggaacatgtacacctgggggaaagccagagtcgggggaccccattca

SEQ ID NO: 10613 - RNA, 48 nt, synthetic construct
  source 1..48: mol_type = other RNA
aggaacatgtaaacctgggggaaagccagagtcgggggaccccattca

SEQ ID NO: 10614 - RNA, 49 nt, synthetic construct
  source 1..49: mol_type = other RNA
caggaacatgtaaacctgggggaaagccagagtcgggggaccccattca

SEQ ID NO: 10615 - RNA, 49 nt, synthetic construct
  source 1..49: mol_type = other RNA
caggaacatgtatacctgggggaaagccagagtcgggggaccccattca

SEQ ID NO: 10616 - RNA, 49 nt, synthetic construct
  source 1..49: mol_type = other RNA
caggaacatgtacacctgggggaaagccagagtcgggggaccccattca

SEQ ID NO: 10617 - RNA, 49 nt, synthetic construct
  source 1..49: mol_type = other RNA
caggaacatgtagacctgggggaaagccagagtcgggggaccccattca

SEQ ID NO: 10618 - RNA, 50 nt, synthetic construct
  source 1..50: mol_type = other RNA
ccaggaacatgtaaacctgggggaaagccagagtcgggggaccccattca

SEQ ID NO: 10619 - RNA, 50 nt, synthetic construct
  source 1..50: mol_type = other RNA
ccaggaacatgtacacctgggggaaagccagagtcgggggaccccattca

SEQ ID NO: 10620 - RNA, 50 nt, synthetic construct
  source 1..50: mol_type = other RNA
ccaggaacatgtagacctgggggaaagccagagtcgggggaccccattca

SEQ ID NO: 10621 - RNA, 50 nt, synthetic construct
  source 1..50: mol_type = other RNA
ccaggaacatgtatacctgggggaaagccagagtcgggggaccccattca

SEQ ID NO: 10622 - RNA, 51 nt, synthetic construct
  source 1..51: mol_type = other RNA
accaggaacatgtagacctgggggaaagccagagtcgggggaccccattca

SEQ ID NO: 10623 - RNA, 51 nt, synthetic construct
  source 1..51: mol_type = other RNA
accaggaacatgtaaacctgggggaaagccagagtcgggggaccccattca

SEQ ID NO: 10624 - RNA, 51 nt, synthetic construct
  source 1..51: mol_type = other RNA
accaggaacatgtatacctgggggaaagccagagtcgggggaccccattca

SEQ ID NO: 10625 - RNA, 51 nt, synthetic construct
  source 1..51: mol_type = other RNA
accaggaacatgtacacctgggggaaagccagagtcgggggaccccattca

SEQ ID NO: 10626 - RNA, 52 nt, synthetic construct
  source 1..52: mol_type = other RNA
caccaggaacatgtacacctgggggaaagccagagtcgggggaccccattca

SEQ ID NO: 10627 - RNA, 52 nt, synthetic construct
  source 1..52: mol_type = other RNA
caccaggaacatgtatacctgggggaaagccagagtcgggggaccccattca

SEQ ID NO: 10628 - RNA, 52 nt, synthetic construct
  source 1..52: mol_type = other RNA
caccaggaacatgtaaacctgggggaaagccagagtcgggggaccccattca

SEQ ID NO: 10629 - RNA, 52 nt, synthetic construct
  source 1..52: mol_type = other RNA
caccaggaacatgtagacctgggggaaagccagagtcgggggaccccattca

SEQ ID NO: 10630 - RNA, 53 nt, synthetic construct
  source 1..53: mol_type = other RNA
tcaccaggaacatgtagacctgggggaaagccagagtcgggggaccccattca

SEQ ID NO: 10631 - RNA, 53 nt, synthetic construct
  source 1..53: mol_type = other RNA
tcaccaggaacatgtatacctgggggaaagccagagtcgggggaccccattca

SEQ ID NO: 10632 - RNA, 53 nt, synthetic construct
  source 1..53: mol_type = other RNA
tcaccaggaacatgtacacctgggggaaagccagagtcgggggaccccattca

SEQ ID NO: 10633 - RNA, 53 nt, synthetic construct
  source 1..53: mol_type = other RNA
tcaccaggaacatgtaaacctgggggaaagccagagtcgggggaccccattca

SEQ ID NO: 10634 - RNA, 54 nt, synthetic construct
  source 1..54: mol_type = other RNA
ttcaccaggaacatgtacacctgggggaaagccagagtcgggggaccccattca

SEQ ID NO: 10635 - RNA, 54 nt, synthetic construct
  source 1..54: mol_type = other RNA
ttcaccaggaacatgtagacctgggggaaagccagagtcgggggaccccattca

SEQ ID NO: 10636 - RNA, 54 nt, synthetic construct
  source 1..54: mol_type = other RNA
ttcaccaggaacatgtatacctgggggaaagccagagtcgggggaccccattca

SEQ ID NO: 10637 - RNA, 54 nt, synthetic construct
  source 1..54: mol_type = other RNA
ttcaccaggaacatgtaaacctgggggaaagccagagtcgggggaccccattca

SEQ ID NO: 10638 - RNA, 55 nt, synthetic construct
  source 1..55: mol_type = other RNA
tttcaccaggaacatgtatacctgggggaaagccagagtcgggggaccccattca

SEQ ID NO: 10639 - RNA, 55 nt, synthetic construct
  source 1..55: mol_type = other RNA
tttcaccaggaacatgtaaacctgggggaaagccagagtcgggggaccccattca

SEQ ID NO: 10640 - RNA, 55 nt, synthetic construct
  source 1..55: mol_type = other RNA
tttcaccaggaacatgtagacctgggggaaagccagagtcgggggaccccattca

SEQ ID NO: 10641 - RNA, 55 nt, synthetic construct
  source 1..55: mol_type = other RNA
tttcaccaggaacatgtacacctgggggaaagccagagtcgggggaccccattca

SEQ ID NO: 10642 - RNA, 56 nt, synthetic construct
  source 1..56: mol_type = other RNA
atttcaccaggaacatgtaaacctgggggaaagccagagtcgggggaccccattca

SEQ ID NO: 10643 - RNA, 56 nt, synthetic construct
  source 1..56: mol_type = other RNA
atttcaccaggaacatgtacacctgggggaaagccagagtcgggggaccccattca

SEQ ID NO: 10644 - RNA, 56 nt, synthetic construct
  source 1..56: mol_type = other RNA
atttcaccaggaacatgtatacctgggggaaagccagagtcgggggaccccattca

SEQ ID NO: 10645 - RNA, 56 nt, synthetic construct
  source 1..56: mol_type = other RNA
atttcaccaggaacatgtagacctgggggaaagccagagtcgggggaccccattca

SEQ ID NO: 10646 - RNA, 57 nt, synthetic construct
  source 1..57: mol_type = other RNA
catttcaccaggaacatgtagacctgggggaaagccagagtcgggggaccccattca

SEQ ID NO: 10647 - RNA, 57 nt, synthetic construct
  source 1..57: mol_type = other RNA
catttcaccaggaacatgtaaacctgggggaaagccagagtcgggggaccccattca

SEQ ID NO: 10648 - RNA, 57 nt, synthetic construct
  source 1..57: mol_type = other RNA
catttcaccaggaacatgtacacctgggggaaagccagagtcgggggaccccattca

SEQ ID NO: 10649 - RNA, 57 nt, synthetic construct
  source 1..57: mol_type = other RNA
catttcaccaggaacatgtatacctgggggaaagccagagtcgggggaccccattca

SEQ ID NO: 10650 - RNA, 58 nt, synthetic construct
  source 1..58: mol_type = other RNA
ccatttcaccaggaacatgtatacctgggggaaagccagagtcgggggaccccattca

SEQ ID NO: 10651 - RNA, 58 nt, synthetic construct
  source 1..58: mol_type = other RNA
ccatttcaccaggaacatgtagacctgggggaaagccagagtcgggggaccccattca

SEQ ID NO: 10652 - RNA, 58 nt, synthetic construct
  source 1..58: mol_type = other RNA
ccatttcaccaggaacatgtacacctgggggaaagccagagtcgggggaccccattca

SEQ ID NO: 10653 - RNA, 58 nt, synthetic construct
  source 1..58: mol_type = other RNA
ccatttcaccaggaacatgtaaacctgggggaaagccagagtcgggggaccccattca

SEQ ID NO: 10654 - RNA, 59 nt, synthetic construct
  source 1..59: mol_type = other RNA
gccatttcaccaggaacatgtagacctgggggaaagccagagtcgggggaccccattca

SEQ ID NO: 10655 - RNA, 59 nt, synthetic construct
  source 1..59: mol_type = other RNA
gccatttcaccaggaacatgtacacctgggggaaagccagagtcgggggaccccattca

SEQ ID NO: 10656 - RNA, 59 nt, synthetic construct
  source 1..59: mol_type = other RNA
gccatttcaccaggaacatgtaaacctgggggaaagccagagtcgggggaccccattca

SEQ ID NO: 10657 - RNA, 59 nt, synthetic construct
  source 1..59: mol_type = other RNA
gccatttcaccaggaacatgtatacctgggggaaagccagagtcgggggaccccattca

SEQ ID NO: 10658 - RNA, 60 nt, synthetic construct
  source 1..60: mol_type = other RNA
tgccatttcaccaggaacatgtaaacctgggggaaagccagagtcgggggaccccattca

SEQ ID NO: 10659 - RNA, 60 nt, synthetic construct
  source 1..60: mol_type = other RNA
tgccatttcaccaggaacatgtatacctgggggaaagccagagtcgggggaccccattca

SEQ ID NO: 10660 - RNA, 60 nt, synthetic construct
  source 1..60: mol_type = other RNA
tgccatttcaccaggaacatgtacacctgggggaaagccagagtcgggggaccccattca

SEQ ID NO: 10661 - RNA, 60 nt, synthetic construct
  source 1..60: mol_type = other RNA
tgccatttcaccaggaacatgtagacctgggggaaagccagagtcgggggaccccattca

SEQ ID NO: 10662 - RNA, 61 nt, synthetic construct
  source 1..61: mol_type = other RNA
ctgccatttcaccaggaacatgtatacctgggggaaagccagagtcgggggaccccattca

SEQ ID NO: 10663 - RNA, 61 nt, synthetic construct
  source 1..61: mol_type = other RNA
ctgccatttcaccaggaacatgtaaacctgggggaaagccagagtcgggggaccccattca

SEQ ID NO: 10664 - RNA, 61 nt, synthetic construct
  source 1..61: mol_type = other RNA
ctgccatttcaccaggaacatgtagacctgggggaaagccagagtcgggggaccccattca

SEQ ID NO: 10665 - RNA, 61 nt, synthetic construct
  source 1..61: mol_type = other RNA
ctgccatttcaccaggaacatgtacacctgggggaaagccagagtcgggggaccccattca

SEQ ID NO: 10666 - RNA, 62 nt, synthetic construct
  source 1..62: mol_type = other RNA
cctgccatttcaccaggaacatgtatacctgggggaaagccagagtcgggggaccccattca

SEQ ID NO: 10667 - RNA, 62 nt, synthetic construct
  source 1..62: mol_type = other RNA
cctgccatttcaccaggaacatgtagacctgggggaaagccagagtcgggggaccccattca

SEQ ID NO: 10668 - RNA, 62 nt, synthetic construct
  source 1..62: mol_type = other RNA
cctgccatttcaccaggaacatgtaaacctgggggaaagccagagtcgggggaccccattca

SEQ ID NO: 10669 - RNA, 62 nt, synthetic construct
  source 1..62: mol_type = other RNA
cctgccatttcaccaggaacatgtacacctgggggaaagccagagtcgggggaccccattca

SEQ ID NO: 10670 - RNA, 63 nt, synthetic construct
  source 1..63: mol_type = other RNA
tcctgccatttcaccaggaacatgtaaacctgggggaaagccagagtcgggggaccccattca

SEQ ID NO: 10671 - RNA, 63 nt, synthetic construct
  source 1..63: mol_type = other RNA
tcctgccatttcaccaggaacatgtagacctgggggaaagccagagtcgggggaccccattca

SEQ ID NO: 10672 - RNA, 63 nt, synthetic construct
  source 1..63: mol_type = other RNA
tcctgccatttcaccaggaacatgtacacctgggggaaagccagagtcgggggaccccattca

SEQ ID NO: 10673 - RNA, 63 nt, synthetic construct
  source 1..63: mol_type = other RNA
tcctgccatttcaccaggaacatgtatacctgggggaaagccagagtcgggggaccccattca

SEQ ID NO: 10674 - RNA, 64 nt, synthetic construct
  source 1..64: mol_type = other RNA
gtcctgccatttcaccaggaacatgtaaacctgggggaaagccagagtcgggggaccccattca

SEQ ID NO: 10675 - RNA, 64 nt, synthetic construct
  source 1..64: mol_type = other RNA
gtcctgccatttcaccaggaacatgtacacctgggggaaagccagagtcgggggaccccattca

SEQ ID NO: 10676 - RNA, 64 nt, synthetic construct
  source 1..64: mol_type = other RNA
gtcctgccatttcaccaggaacatgtatacctgggggaaagccagagtcgggggaccccattca

SEQ ID NO: 10677 - RNA, 64 nt, synthetic construct
  source 1..64: mol_type = other RNA
gtcctgccatttcaccaggaacatgtagacctgggggaaagccagagtcgggggaccccattca

SEQ ID NO: 10678 - RNA, 65 nt, synthetic construct
  source 1..65: mol_type = other RNA
ggtcctgccatttcaccaggaacatgtatacctgggggaaagccagagtcgggggaccccattca

SEQ ID NO: 10679 - RNA, 65 nt, synthetic construct
  source 1..65: mol_type = other RNA
ggtcctgccatttcaccaggaacatgtaaacctgggggaaagccagagtcgggggaccccattca

SEQ ID NO: 10680 - RNA, 65 nt, synthetic construct
  source 1..65: mol_type = other RNA
ggtcctgccatttcaccaggaacatgtacacctgggggaaagccagagtcgggggaccccattca

SEQ ID NO: 10681 - RNA, 65 nt, synthetic construct
  source 1..65: mol_type = other RNA
ggtcctgccatttcaccaggaacatgtagacctgggggaaagccagagtcgggggaccccattca

SEQ ID NO: 10682 - RNA, 66 nt, synthetic construct
  source 1..66: mol_type = other RNA
aggtcctgccatttcaccaggaacatgtagacctgggggaaagccagagtcgggggaccccattca

SEQ ID NO: 10683 - RNA, 66 nt, synthetic construct
  source 1..66: mol_type = other RNA
aggtcctgccatttcaccaggaacatgtacacctgggggaaagccagagtcgggggaccccattca

SEQ ID NO: 10684 - RNA, 66 nt, synthetic construct
  source 1..66: mol_type = other RNA
aggtcctgccatttcaccaggaacatgtatacctgggggaaagccagagtcgggggaccccattca

SEQ ID NO: 10685 - RNA, 66 nt, synthetic construct
  source 1..66: mol_type = other RNA
aggtcctgccatttcaccaggaacatgtaaacctgggggaaagccagagtcgggggaccccattca

SEQ ID NO: 10686 - RNA, 67 nt, synthetic construct
  source 1..67: mol_type = other RNA
caggtcctgccatttcaccaggaacatgtagacctgggggaaagccagagtcgggggaccccattca

SEQ ID NO: 10687 - RNA, 67 nt, synthetic construct
  source 1..67: mol_type = other RNA
caggtcctgccatttcaccaggaacatgtacacctgggggaaagccagagtcgggggaccccattca

SEQ ID NO: 10688 - RNA, 67 nt, synthetic construct
  source 1..67: mol_type = other RNA
caggtcctgccatttcaccaggaacatgtatacctgggggaaagccagagtcgggggaccccattca

SEQ ID NO: 10689 - RNA, 67 nt, synthetic construct
  source 1..67: mol_type = other RNA
caggtcctgccatttcaccaggaacatgtaaacctgggggaaagccagagtcgggggaccccattca

SEQ ID NO: 10690 - RNA, 68 nt, synthetic construct
  source 1..68: mol_type = other RNA
acaggtcctgccatttcaccaggaacatgtagacctgggggaaagccagagtcgggggaccccattca

SEQ ID NO: 10691 - RNA, 68 nt, synthetic construct
  source 1..68: mol_type = other RNA
acaggtcctgccatttcaccaggaacatgtatacctgggggaaagccagagtcgggggaccccattca

SEQ ID NO: 10692 - RNA, 68 nt, synthetic construct
  source 1..68: mol_type = other RNA
acaggtcctgccatttcaccaggaacatgtaaacctgggggaaagccagagtcgggggaccccattca

SEQ ID NO: 10693 - RNA, 68 nt, synthetic construct
  source 1..68: mol_type = other RNA
acaggtcctgccatttcaccaggaacatgtacacctgggggaaagccagagtcgggggaccccattca

SEQ ID NO: 10694 - RNA, 69 nt, synthetic construct
  source 1..69: mol_type = other RNA
gacaggtcctgccatttcaccaggaacatgtaaacctgggggaaagccagagtcgggggaccccattca

SEQ ID NO: 10695 - RNA, 69 nt, synthetic construct
  source 1..69: mol_type = other RNA
gacaggtcctgccatttcaccaggaacatgtatacctgggggaaagccagagtcgggggaccccattca

SEQ ID NO: 10696 - RNA, 69 nt, synthetic construct
  source 1..69: mol_type = other RNA
gacaggtcctgccatttcaccaggaacatgtacacctgggggaaagccagagtcgggggaccccattca

SEQ ID NO: 10697 - RNA, 69 nt, synthetic construct
  source 1..69: mol_type = other RNA
gacaggtcctgccatttcaccaggaacatgtagacctgggggaaagccagagtcgggggaccccattca

SEQ ID NO: 10698 - RNA, 70 nt, synthetic construct
  source 1..70: mol_type = other RNA
cgacaggtcctgccatttcaccaggaacatgtaaacctgggggaaagccagagtcgggggaccccattca

SEQ ID NO: 10699 - RNA, 70 nt, synthetic construct
  source 1..70: mol_type = other RNA
cgacaggtcctgccatttcaccaggaacatgtatacctgggggaaagccagagtcgggggaccccattca

SEQ ID NO: 10700 - RNA, 70 nt, synthetic construct
  source 1..70: mol_type = other RNA
cgacaggtcctgccatttcaccaggaacatgtacacctgggggaaagccagagtcgggggaccccattca

SEQ ID NO: 10701 - RNA, 70 nt, synthetic construct
  source 1..70: mol_type = other RNA
cgacaggtcctgccatttcaccaggaacatgtagacctgggggaaagccagagtcgggggaccccattca

SEQ ID NO: 10702 - RNA, 71 nt, synthetic construct
  source 1..71: mol_type = other RNA
ccgacaggtcctgccatttcaccaggaacatgtatacctgggggaaagccagagtcgggggaccccattca

SEQ ID NO: 10703 - RNA, 71 nt, synthetic construct
  source 1..71: mol_type = other RNA
ccgacaggtcctgccatttcaccaggaacatgtagacctgggggaaagccagagtcgggggaccccattca

SEQ ID NO: 10704 - RNA, 71 nt, synthetic construct
  source 1..71: mol_type = other RNA
ccgacaggtcctgccatttcaccaggaacatgtacacctgggggaaagccagagtcgggggaccccattca

SEQ ID NO: 10705 - RNA, 71 nt, synthetic construct
  source 1..71: mol_type = other RNA
ccgacaggtcctgccatttcaccaggaacatgtaaacctgggggaaagccagagtcgggggaccccattca

SEQ ID NO: 10706 - RNA, 72 nt, synthetic construct
  source 1..72: mol_type = other RNA
tccgacaggtcctgccatttcaccaggaacatgtacacctgggggaaagccagagtcgggggaccccattca

SEQ ID NO: 10707 - RNA, 72 nt, synthetic construct
  source 1..72: mol_type = other RNA
tccgacaggtcctgccatttcaccaggaacatgtaaacctgggggaaagccagagtcgggggaccccattca

SEQ ID NO: 10708 - RNA, 72 nt, synthetic construct
  source 1..72: mol_type = other RNA
tccgacaggtcctgccatttcaccaggaacatgtagacctgggggaaagccagagtcgggggaccccattca

SEQ ID NO: 10709 - RNA, 72 nt, synthetic construct
  source 1..72: mol_type = other RNA
tccgacaggtcctgccatttcaccaggaacatgtatacctgggggaaagccagagtcgggggaccccattca

SEQ ID NO: 10710 - RNA, 73 nt, synthetic construct
  source 1..73: mol_type = other RNA
ctccgacaggtcctgccatttcaccaggaacatgtaaacctgggggaaagccagagtcgggggaccccattca

SEQ ID NO: 10711 - RNA, 73 nt, synthetic construct
  source 1..73: mol_type = other RNA
ctccgacaggtcctgccatttcaccaggaacatgtacacctgggggaaagccagagtcgggggaccccattca

SEQ ID NO: 10712 - RNA, 73 nt, synthetic construct
  source 1..73: mol_type = other RNA
ctccgacaggtcctgccatttcaccaggaacatgtagacctgggggaaagccagagtcgggggaccccattca

SEQ ID NO: 10713 - RNA, 73 nt, synthetic construct
  source 1..73: mol_type = other RNA
ctccgacaggtcctgccatttcaccaggaacatgtatacctgggggaaagccagagtcgggggaccccattca

SEQ ID NO: 10714 - RNA, 74 nt, synthetic construct
  source 1..74: mol_type = other RNA
tctccgacaggtcctgccatttcaccaggaacatgtatacctgggggaaagccagagtcgggggaccccattca

SEQ ID NO: 10715 - RNA, 74 nt, synthetic construct
  source 1..74: mol_type = other RNA
tctccgacaggtcctgccatttcaccaggaacatgtagacctgggggaaagccagagtcgggggaccccattca

SEQ ID NO: 10716 - RNA, 74 nt, synthetic construct
  source 1..74: mol_type = other RNA
tctccgacaggtcctgccatttcaccaggaacatgtacacctgggggaaagccagagtcgggggaccccattca

SEQ ID NO: 10717 - RNA, 74 nt, synthetic construct
  source 1..74: mol_type = other RNA
tctccgacaggtcctgccatttcaccaggaacatgtaaacctgggggaaagccagagtcgggggaccccattca

SEQ ID NO: 10718 - RNA, 75 nt, synthetic construct
  source 1..75: mol_type = other RNA
ttctccgacaggtcctgccatttcaccaggaacatgtagacctgggggaaagccagagtcgggggaccccattca

SEQ ID NO: 10719 - RNA, 75 nt, synthetic construct
  source 1..75: mol_type = other RNA
ttctccgacaggtcctgccatttcaccaggaacatgtatacctgggggaaagccagagtcgggggaccccattca

SEQ ID NO: 10720 - RNA, 75 nt, synthetic construct
  source 1..75: mol_type = other RNA
ttctccgacaggtcctgccatttcaccaggaacatgtaaacctgggggaaagccagagtcgggggaccccattca

SEQ ID NO: 10721 - RNA, 75 nt, synthetic construct
  source 1..75: mol_type = other RNA
ttctccgacaggtcctgccatttcaccaggaacatgtacacctgggggaaagccagagtcgggggaccccattca

SEQ ID NO: 10722 - RNA, 76 nt, synthetic construct
  source 1..76: mol_type = other RNA
cttctccgacaggtcctgccatttcaccaggaacatgtatacctgggggaaagccagagtcgggggaccccattca

SEQ ID NO: 10723 - RNA, 76 nt, synthetic construct
  source 1..76: mol_type = other RNA
cttctccgacaggtcctgccatttcaccaggaacatgtacacctgggggaaagccagagtcgggggaccccattca

SEQ ID NO: 10724 - RNA, 76 nt, synthetic construct
  source 1..76: mol_type = other RNA
cttctccgacaggtcctgccatttcaccaggaacatgtagacctgggggaaagccagagtcgggggaccccattca

SEQ ID NO: 10725 - RNA, 76 nt, synthetic construct
  source 1..76: mol_type = other RNA
cttctccgacaggtcctgccatttcaccaggaacatgtaaacctgggggaaagccagagtcgggggaccccattca

SEQ ID NO: 10726 - RNA, 77 nt, synthetic construct
  source 1..77: mol_type = other RNA
ccttctccgacaggtcctgccatttcaccaggaacatgtacacctgggggaaagccagagtcgggggaccccattca

SEQ ID NO: 10727 - RNA, 77 nt, synthetic construct
  source 1..77: mol_type = other RNA
ccttctccgacaggtcctgccatttcaccaggaacatgtaaacctgggggaaagccagagtcgggggaccccattca

SEQ ID NO: 10728 - RNA, 77 nt, synthetic construct
  source 1..77: mol_type = other RNA
ccttctccgacaggtcctgccatttcaccaggaacatgtagacctgggggaaagccagagtcgggggaccccattca

SEQ ID NO: 10729 - RNA, 77 nt, synthetic construct
  source 1..77: mol_type = other RNA
ccttctccgacaggtcctgccatttcaccaggaacatgtatacctgggggaaagccagagtcgggggaccccattca

SEQ ID NO: 10730 - RNA, 78 nt, synthetic construct
  source 1..78: mol_type = other RNA
accttctccgacaggtcctgccatttcaccaggaacatgtaaacctgggggaaagccagagtcgggggaccccattca

SEQ ID NO: 10731 - RNA, 78 nt, synthetic construct
  source 1..78: mol_type = other RNA
accttctccgacaggtcctgccatttcaccaggaacatgtatacctgggggaaagccagagtcgggggaccccattca

SEQ ID NO: 10732 - RNA, 78 nt, synthetic construct
  source 1..78: mol_type = other RNA
accttctccgacaggtcctgccatttcaccaggaacatgtagacctgggggaaagccagagtcgggggaccccattca

SEQ ID NO: 10733 - RNA, 78 nt, synthetic construct
  source 1..78: mol_type = other RNA
accttctccgacaggtcctgccatttcaccaggaacatgtacacctgggggaaagccagagtcgggggaccccattca

SEQ ID NO: 10734 - RNA, 79 nt, synthetic construct
  source 1..79: mol_type = other RNA
caccttctccgacaggtcctgccatttcaccaggaacatgtagacctgggggaaagccagagtcgggggaccccattca

SEQ ID NO: 10735 - RNA, 79 nt, synthetic construct
  source 1..79: mol_type = other RNA
caccttctccgacaggtcctgccatttcaccaggaacatgtaaacctgggggaaagccagagtcgggggaccccattca

SEQ ID NO: 10736 - RNA, 79 nt, synthetic construct
  source 1..79: mol_type = other RNA
caccttctccgacaggtcctgccatttcaccaggaacatgtacacctgggggaaagccagagtcgggggaccccattca

SEQ ID NO: 10737 - RNA, 79 nt, synthetic construct
  source 1..79: mol_type = other RNA
caccttctccgacaggtcctgccatttcaccaggaacatgtatacctgggggaaagccagagtcgggggaccccattca

SEQ ID NO: 10738 - RNA, 80 nt, synthetic construct
  source 1..80: mol_type = other RNA
ccaccttctccgacaggtcctgccatttcaccaggaacatgtaaacctgggggaaagccagagtcgggggaccccattca

SEQ ID NO: 10739 - RNA, 80 nt, synthetic construct
  source 1..80: mol_type = other RNA
ccaccttctccgacaggtcctgccatttcaccaggaacatgtatacctgggggaaagccagagtcgggggaccccattca

SEQ ID NO: 10740 - RNA, 80 nt, synthetic construct
  source 1..80: mol_type = other RNA
ccaccttctccgacaggtcctgccatttcaccaggaacatgtacacctgggggaaagccagagtcgggggaccccattca

SEQ ID NO: 10741 - RNA, 80 nt, synthetic construct
  source 1..80: mol_type = other RNA
ccaccttctccgacaggtcctgccatttcaccaggaacatgtagacctgggggaaagccagagtcgggggaccccattca

SEQ ID NO: 10742 - RNA, 81 nt, synthetic construct
  source 1..81: mol_type = other RNA
accaccttctccgacaggtcctgccatttcaccaggaacatgtaaacctgggggaaagccagagtcgggggaccccattca

SEQ ID NO: 10743 - RNA, 81 nt, synthetic construct
  source 1..81: mol_type = other RNA
accaccttctccgacaggtcctgccatttcaccaggaacatgtacacctgggggaaagccagagtcgggggaccccattca

SEQ ID NO: 10744 - RNA, 81 nt, synthetic construct
  source 1..81: mol_type = other RNA
accaccttctccgacaggtcctgccatttcaccaggaacatgtagacctgggggaaagccagagtcgggggaccccattca

SEQ ID NO: 10745 - RNA, 81 nt, synthetic construct
  source 1..81: mol_type = other RNA
accaccttctccgacaggtcctgccatttcaccaggaacatgtatacctgggggaaagccagagtcgggggaccccattca

SEQ ID NO: 10746 - RNA, 82 nt, synthetic construct
  source 1..82: mol_type = other RNA
gaccaccttctccgacaggtcctgccatttcaccaggaacatgtacacctgggggaaagccagagtcgggggaccccattca

SEQ ID NO: 10747 - RNA, 82 nt, synthetic construct
  source 1..82: mol_type = other RNA
gaccaccttctccgacaggtcctgccatttcaccaggaacatgtatacctgggggaaagccagagtcgggggaccccattca

SEQ ID NO: 10748 - RNA, 82 nt, synthetic construct
  source 1..82: mol_type = other RNA
gaccaccttctccgacaggtcctgccatttcaccaggaacatgtaaacctgggggaaagccagagtcgggggaccccattca

SEQ ID NO: 10749 - RNA, 82 nt, synthetic construct
  source 1..82: mol_type = other RNA
gaccaccttctccgacaggtcctgccatttcaccaggaacatgtagacctgggggaaagccagagtcgggggaccccattca

SEQ ID NO: 10750 - RNA, 83 nt, synthetic construct
  source 1..83: mol_type = other RNA
agaccaccttctccgacaggtcctgccatttcaccaggaacatgtagacctgggggaaagccagagtcgggggaccccattca

SEQ ID NO: 10751 - RNA, 83 nt, synthetic construct
  source 1..83: mol_type = other RNA
agaccaccttctccgacaggtcctgccatttcaccaggaacatgtacacctgggggaaagccagagtcgggggaccccattca

SEQ ID NO: 10752 - RNA, 83 nt, synthetic construct
  source 1..83: mol_type = other RNA
agaccaccttctccgacaggtcctgccatttcaccaggaacatgtaaacctgggggaaagccagagtcgggggaccccattca

SEQ ID NO: 10753 - RNA, 83 nt, synthetic construct
  source 1..83: mol_type = other RNA
agaccaccttctccgacaggtcctgccatttcaccaggaacatgtatacctgggggaaagccagagtcgggggaccccattca

SEQ ID NO: 10754 - RNA, 84 nt, synthetic construct
  source 1..84: mol_type = other RNA
tagaccaccttctccgacaggtcctgccatttcaccaggaacatgtacacctgggggaaagccagagtcgggggaccccattca

SEQ ID NO: 10755 - RNA, 84 nt, synthetic construct
  source 1..84: mol_type = other RNA
tagaccaccttctccgacaggtcctgccatttcaccaggaacatgtaaacctgggggaaagccagagtcgggggaccccattca

SEQ ID NO: 10756 - RNA, 84 nt, synthetic construct
  source 1..84: mol_type = other RNA
tagaccaccttctccgacaggtcctgccatttcaccaggaacatgtagacctgggggaaagccagagtcgggggaccccattca

SEQ ID NO: 10757 - RNA, 84 nt, synthetic construct
  source 1..84: mol_type = other RNA
tagaccaccttctccgacaggtcctgccatttcaccaggaacatgtatacctgggggaaagccagagtcgggggaccccattca

SEQ ID NO: 10758 - RNA, 85 nt, synthetic construct
  source 1..85: mol_type = other RNA
gtagaccaccttctccgacaggtcctgccatttcaccaggaacatgtaaacctgggggaaagccagagtcgggggaccccattca

SEQ ID NO: 10759 - RNA, 85 nt, synthetic construct
  source 1..85: mol_type = other RNA
gtagaccaccttctccgacaggtcctgccatttcaccaggaacatgtagacctgggggaaagccagagtcgggggaccccattca

SEQ ID NO: 10760 - RNA, 85 nt, synthetic construct
  source 1..85: mol_type = other RNA
gtagaccaccttctccgacaggtcctgccatttcaccaggaacatgtatacctgggggaaagccagagtcgggggaccccattca

SEQ ID NO: 10761 - RNA, 85 nt, synthetic construct
  source 1..85: mol_type = other RNA
gtagaccaccttctccgacaggtcctgccatttcaccaggaacatgtacacctgggggaaagccagagtcgggggaccccattca

SEQ ID NO: 10762 - RNA, 86 nt, synthetic construct
  source 1..86: mol_type = other RNA
ggtagaccaccttctccgacaggtcctgccatttcaccaggaacatgtacacctgggggaaagccagagtcgggggaccccattca

SEQ ID NO: 10763 - RNA, 86 nt, synthetic construct
  source 1..86: mol_type = other RNA
ggtagaccaccttctccgacaggtcctgccatttcaccaggaacatgtaaacctgggggaaagccagagtcgggggaccccattca

SEQ ID NO: 10764 - RNA, 86 nt, synthetic construct
  source 1..86: mol_type = other RNA
ggtagaccaccttctccgacaggtcctgccatttcaccaggaacatgtatacctgggggaaagccagagtcgggggaccccattca

SEQ ID NO: 10765 - RNA, 86 nt, synthetic construct
  source 1..86: mol_type = other RNA
ggtagaccaccttctccgacaggtcctgccatttcaccaggaacatgtagacctgggggaaagccagagtcgggggaccccattca

SEQ ID NO: 10766 - RNA, 87 nt, synthetic construct
  source 1..87: mol_type = other RNA
cggtagaccaccttctccgacaggtcctgccatttcaccaggaacatgtatacctgggggaaagccagagtcgggggaccccattca

SEQ ID NO: 10767 - RNA, 87 nt, synthetic construct
  source 1..87: mol_type = other RNA
cggtagaccaccttctccgacaggtcctgccatttcaccaggaacatgtagacctgggggaaagccagagtcgggggaccccattca

SEQ ID NO: 10768 - RNA, 87 nt, synthetic construct
  source 1..87: mol_type = other RNA
cggtagaccaccttctccgacaggtcctgccatttcaccaggaacatgtacacctgggggaaagccagagtcgggggaccccattca

SEQ ID NO: 10769 - RNA, 87 nt, synthetic construct
  source 1..87: mol_type = other RNA
cggtagaccaccttctccgacaggtcctgccatttcaccaggaacatgtaaacctgggggaaagccagagtcgggggaccccattca

SEQ ID NO: 10770 - RNA, 88 nt, synthetic construct
  source 1..88: mol_type = other RNA
ccggtagaccaccttctccgacaggtcctgccatttcaccaggaacatgtacacctgggggaaagccagagtcgggggaccccattca

SEQ ID NO: 10771 - RNA, 88 nt, synthetic construct
  source 1..88: mol_type = other RNA
ccggtagaccaccttctccgacaggtcctgccatttcaccaggaacatgtagacctgggggaaagccagagtcgggggaccccattca

SEQ ID NO: 10772 - RNA, 88 nt, synthetic construct
  source 1..88: mol_type = other RNA
ccggtagaccaccttctccgacaggtcctgccatttcaccaggaacatgtatacctgggggaaagccagagtcgggggaccccattca

SEQ ID NO: 10773 - RNA, 88 nt, synthetic construct
  source 1..88: mol_type = other RNA
ccggtagaccaccttctccgacaggtcctgccatttcaccaggaacatgtaaacctgggggaaagccagagtcgggggaccccattca

SEQ ID NO: 10774 - RNA, 89 nt, synthetic construct
  source 1..89: mol_type = other RNA
gccggtagaccaccttctccgacaggtcctgccatttcaccaggaacatgtagacctgggggaaagccagagtcgggggaccccattca

SEQ ID NO: 10775 - RNA, 89 nt, synthetic construct
  source 1..89: mol_type = other RNA
gccggtagaccaccttctccgacaggtcctgccatttcaccaggaacatgtaaacctgggggaaagccagagtcgggggaccccattca

SEQ ID NO: 10776 - RNA, 89 nt, synthetic construct
  source 1..89: mol_type = other RNA
gccggtagaccaccttctccgacaggtcctgccatttcaccaggaacatgtatacctgggggaaagccagagtcgggggaccccattca

SEQ ID NO: 10777 - RNA, 89 nt, synthetic construct
  source 1..89: mol_type = other RNA
gccggtagaccaccttctccgacaggtcctgccatttcaccaggaacatgtacacctgggggaaagccagagtcgggggaccccattca

SEQ ID NO: 10778 - RNA, 90 nt, synthetic construct
  source 1..90: mol_type = other RNA
cgccggtagaccaccttctccgacaggtcctgccatttcaccaggaacatgtatacctgggggaaagccagagtcgggggaccccattca

SEQ ID NO: 10779 - RNA, 90 nt, synthetic construct
  source 1..90: mol_type = other RNA
cgccggtagaccaccttctccgacaggtcctgccatttcaccaggaacatgtacacctgggggaaagccagagtcgggggaccccattca

SEQ ID NO: 10780 - RNA, 90 nt, synthetic construct
  source 1..90: mol_type = other RNA
cgccggtagaccaccttctccgacaggtcctgccatttcaccaggaacatgtagacctgggggaaagccagagtcgggggaccccattca

SEQ ID NO: 10781 - RNA, 90 nt, synthetic construct
  source 1..90: mol_type = other RNA
cgccggtagaccaccttctccgacaggtcctgccatttcaccaggaacatgtaaacctgggggaaagccagagtcgggggaccccattca

SEQ ID NO: 10782 - RNA, 91 nt, synthetic construct
  source 1..91: mol_type = other RNA
gcgccggtagaccaccttctccgacaggtcctgccatttcaccaggaacatgtaaacctgggggaaagccagagtcgggggaccccattca

SEQ ID NO: 10783 - RNA, 91 nt, synthetic construct
  source 1..91: mol_type = other RNA
gcgccggtagaccaccttctccgacaggtcctgccatttcaccaggaacatgtagacctgggggaaagccagagtcgggggaccccattca

SEQ ID NO: 10784 - RNA, 91 nt, synthetic construct
  source 1..91: mol_type = other RNA
gcgccggtagaccaccttctccgacaggtcctgccatttcaccaggaacatgtacacctgggggaaagccagagtcgggggaccccattca

SEQ ID NO: 10785 - RNA, 91 nt, synthetic construct
  source 1..91: mol_type = other RNA
gcgccggtagaccaccttctccgacaggtcctgccatttcaccaggaacatgtatacctgggggaaagccagagtcgggggaccccattca

SEQ ID NO: 10786 - RNA, 92 nt, synthetic construct
  source 1..92: mol_type = other RNA
agcgccggtagaccaccttctccgacaggtcctgccatttcaccaggaacatgtaaacctgggggaaagccagagtcgggggaccccattca

SEQ ID NO: 10787 - RNA, 92 nt, synthetic construct
  source 1..92: mol_type = other RNA
agcgccggtagaccaccttctccgacaggtcctgccatttcaccaggaacatgtacacctgggggaaagccagagtcgggggaccccattca

SEQ ID NO: 10788 - RNA, 92 nt, synthetic construct
  source 1..92: mol_type = other RNA
agcgccggtagaccaccttctccgacaggtcctgccatttcaccaggaacatgtagacctgggggaaagccagagtcgggggaccccattca

SEQ ID NO: 10789 - RNA, 92 nt, synthetic construct
  source 1..92: mol_type = other RNA
agcgccggtagaccaccttctccgacaggtcctgccatttcaccaggaacatgtatacctgggggaaagccagagtcgggggaccccattca

SEQ ID NO: 10790 - RNA, 93 nt, synthetic construct
  source 1..93: mol_type = other RNA
aagcgccggtagaccaccttctccgacaggtcctgccatttcaccaggaacatgtaaacctgggggaaagccagagtcgggggaccccattca

SEQ ID NO: 10791 - RNA, 93 nt, synthetic construct
  source 1..93: mol_type = other RNA
aagcgccggtagaccaccttctccgacaggtcctgccatttcaccaggaacatgtagacctgggggaaagccagagtcgggggaccccattca

SEQ ID NO: 10792 - RNA, 93 nt, synthetic construct
  source 1..93: mol_type = other RNA
aagcgccggtagaccaccttctccgacaggtcctgccatttcaccaggaacatgtatacctgggggaaagccagagtcgggggaccccattca

SEQ ID NO: 10793 - RNA, 93 nt, synthetic construct
  source 1..93: mol_type = other RNA
aagcgccggtagaccaccttctccgacaggtcctgccatttcaccaggaacatgtacacctgggggaaagccagagtcgggggaccccattca

SEQ ID NO: 10794 - RNA, 94 nt, synthetic construct
  source 1..94: mol_type = other RNA
gaagcgccggtagaccaccttctccgacaggtcctgccatttcaccaggaacatgtatacctgggggaaagccagagtcgggggaccccattca

SEQ ID NO: 10795 - RNA, 94 nt, synthetic construct
  source 1..94: mol_type = other RNA
gaagcgccggtagaccaccttctccgacaggtcctgccatttcaccaggaacatgtagacctgggggaaagccagagtcgggggaccccattca

SEQ ID NO: 10796 - RNA, 94 nt, synthetic construct
  source 1..94: mol_type = other RNA
gaagcgccggtagaccaccttctccgacaggtcctgccatttcaccaggaacatgtacacctgggggaaagccagagtcgggggaccccattca

SEQ ID NO: 10797 - RNA, 94 nt, synthetic construct
  source 1..94: mol_type = other RNA
gaagcgccggtagaccaccttctccgacaggtcctgccatttcaccaggaacatgtaaacctgggggaaagccagagtcgggggaccccattca

SEQ ID NO: 10798 - RNA, 95 nt, synthetic construct
  source 1..95: mol_type = other RNA
tgaagcgccggtagaccaccttctccgacaggtcctgccatttcaccaggaacatgtagacctgggggaaagccagagtcgggggaccccattca

SEQ ID NO: 10799 - RNA, 95 nt, synthetic construct
  source 1..95: mol_type = other RNA
tgaagcgccggtagaccaccttctccgacaggtcctgccatttcaccaggaacatgtacacctgggggaaagccagagtcgggggaccccattca

SEQ ID NO: 10800 - RNA, 95 nt, synthetic construct
  source 1..95: mol_type = other RNA
tgaagcgccggtagaccaccttctccgacaggtcctgccatttcaccaggaacatgtatacctgggggaaagccagagtcgggggaccccattca

SEQ ID NO: 10801 - RNA, 95 nt, synthetic construct
  source 1..95: mol_type = other RNA
tgaagcgccggtagaccaccttctccgacaggtcctgccatttcaccaggaacatgtaaacctgggggaaagccagagtcgggggaccccattca

SEQ ID NO: 10802 - RNA, 96 nt, synthetic construct
  source 1..96: mol_type = other RNA
gtgaagcgccggtagaccaccttctccgacaggtcctgccatttcaccaggaacatgtagacctgggggaaagccagagtcgggggaccccattca

SEQ ID NO: 10803 - RNA, 96 nt, synthetic construct
  source 1..96: mol_type = other RNA
gtgaagcgccggtagaccaccttctccgacaggtcctgccatttcaccaggaacatgtacacctgggggaaagccagagtcgggggaccccattca

SEQ ID NO: 10804 - RNA, 96 nt, synthetic construct
  source 1..96: mol_type = other RNA
gtgaagcgccggtagaccaccttctccgacaggtcctgccatttcaccaggaacatgtaaacctgggggaaagccagagtcgggggaccccattca

SEQ ID NO: 10805 - RNA, 96 nt, synthetic construct
  source 1..96: mol_type = other RNA
gtgaagcgccggtagaccaccttctccgacaggtcctgccatttcaccaggaacatgtatacctgggggaaagccagagtcgggggaccccattca

SEQ ID NO: 10806 - RNA, 97 nt, synthetic construct
  source 1..97: mol_type = other RNA
ggtgaagcgccggtagaccaccttctccgacaggtcctgccatttcaccaggaacatgtaaacctgggggaaagccagagtcgggggaccccattca

SEQ ID NO: 10807 - RNA, 97 nt, synthetic construct
  source 1..97: mol_type = other RNA
ggtgaagcgccggtagaccaccttctccgacaggtcctgccatttcaccaggaacatgtacacctgggggaaagccagagtcgggggaccccattca

SEQ ID NO: 10808 - RNA, 97 nt, synthetic construct
  source 1..97: mol_type = other RNA
ggtgaagcgccggtagaccaccttctccgacaggtcctgccatttcaccaggaacatgtatacctgggggaaagccagagtcgggggaccccattca

SEQ ID NO: 10809 - RNA, 97 nt, synthetic construct
  source 1..97: mol_type = other RNA
ggtgaagcgccggtagaccaccttctccgacaggtcctgccatttcaccaggaacatgtagacctgggggaaagccagagtcgggggaccccattca

SEQ ID NO: 10810 - RNA, 98 nt, synthetic construct
  source 1..98: mol_type = other RNA
cggtgaagcgccggtagaccaccttctccgacaggtcctgccatttcaccaggaacatgtatacctgggggaaagccagagtcgggggaccccattca

SEQ ID NO: 10811 - RNA, 98 nt, synthetic construct
  source 1..98: mol_type = other RNA
cggtgaagcgccggtagaccaccttctccgacaggtcctgccatttcaccaggaacatgtaaacctgggggaaagccagagtcgggggaccccattca

SEQ ID NO: 10812 - RNA, 98 nt, synthetic construct
  source 1..98: mol_type = other RNA
cggtgaagcgccggtagaccaccttctccgacaggtcctgccatttcaccaggaacatgtacacctgggggaaagccagagtcgggggaccccattca

SEQ ID NO: 10813 - RNA, 98 nt, synthetic construct
  source 1..98: mol_type = other RNA
cggtgaagcgccggtagaccaccttctccgacaggtcctgccatttcaccaggaacatgtagacctgggggaaagccagagtcgggggaccccattca

SEQ ID NO: 10814 - RNA, 99 nt, synthetic construct
  source 1..99: mol_type = other RNA
tcggtgaagcgccggtagaccaccttctccgacaggtcctgccatttcaccaggaacatgtaaacctgggggaaagccagagtcgggggaccccattca

SEQ ID NO: 10815 - RNA, 99 nt, synthetic construct
  source 1..99: mol_type = other RNA
tcggtgaagcgccggtagaccaccttctccgacaggtcctgccatttcaccaggaacatgtatacctgggggaaagccagagtcgggggaccccattca

SEQ ID NO: 10816 - RNA, 99 nt, synthetic construct
  source 1..99: mol_type = other RNA
tcggtgaagcgccggtagaccaccttctccgacaggtcctgccatttcaccaggaacatgtagacctgggggaaagccagagtcgggggaccccattca

SEQ ID NO: 10817 - RNA, 99 nt, synthetic construct
  source 1..99: mol_type = other RNA
tcggtgaagcgccggtagaccaccttctccgacaggtcctgccatttcaccaggaacatgtacacctgggggaaagccagagtcgggggaccccattca

SEQ ID NO: 10818 - RNA, 100 nt, synthetic construct
  source 1..100: mol_type = other RNA
ctcggtgaagcgccggtagaccaccttctccgacaggtcctgccatttcaccaggaacatgtaaacctgggggaaagccagagtcgggggaccccattca

SEQ ID NO: 10819 - RNA, 100 nt, synthetic construct
  source 1..100: mol_type = other RNA
ctcggtgaagcgccggtagaccaccttctccgacaggtcctgccatttcaccaggaacatgtatacctgggggaaagccagagtcgggggaccccattca

SEQ ID NO: 10820 - RNA, 100 nt, synthetic construct
  source 1..100: mol_type = other RNA
ctcggtgaagcgccggtagaccaccttctccgacaggtcctgccatttcaccaggaacatgtagacctgggggaaagccagagtcgggggaccccattca

SEQ ID NO: 10821 - RNA, 100 nt, synthetic construct
  source 1..100: mol_type = other RNA
ctcggtgaagcgccggtagaccaccttctccgacaggtcctgccatttcaccaggaacatgtacacctgggggaaagccagagtcgggggaccccattca

SEQ ID NO: 10822 - RNA, 101 nt, synthetic construct
  source 1..101: mol_type = other RNA
tctcggtgaagcgccggtagaccaccttctccgacaggtcctgccatttcaccaggaacatgtaaacctgggggaaagccagagtcgggggaccccattca

SEQ ID NO: 10823 - RNA, 101 nt, synthetic construct
  source 1..101: mol_type = other RNA
tctcggtgaagcgccggtagaccaccttctccgacaggtcctgccatttcaccaggaacatgtacacctgggggaaagccagagtcgggggaccccattca

SEQ ID NO: 10824 - RNA, 101 nt, synthetic construct
  source 1..101: mol_type = other RNA
tctcggtgaagcgccggtagaccaccttctccgacaggtcctgccatttcaccaggaacatgtagacctgggggaaagccagagtcgggggaccccattca

SEQ ID NO: 10825 - RNA, 101 nt, synthetic construct
  source 1..101: mol_type = other RNA
tctcggtgaagcgccggtagaccaccttctccgacaggtcctgccatttcaccaggaacatgtatacctgggggaaagccagagtcgggggaccccattca

SEQ ID NO: 10826 - RNA, 102 nt, synthetic construct
  source 1..102: mol_type = other RNA
atctcggtgaagcgccggtagaccaccttctccgacaggtcctgccatttcaccaggaacatgtagacctgggggaaagccagagtcgggggaccccattca

SEQ ID NO: 10827 - RNA, 102 nt, synthetic construct
  source 1..102: mol_type = other RNA
atctcggtgaagcgccggtagaccaccttctccgacaggtcctgccatttcaccaggaacatgtatacctgggggaaagccagagtcgggggaccccattca

SEQ ID NO: 10828 - RNA, 102 nt, synthetic construct
  source 1..102: mol_type = other RNA
atctcggtgaagcgccggtagaccaccttctccgacaggtcctgccatttcaccaggaacatgtaaacctgggggaaagccagagtcgggggaccccattca

SEQ ID NO: 10829 - RNA, 102 nt, synthetic construct
  source 1..102: mol_type = other RNA
atctcggtgaagcgccggtagaccaccttctccgacaggtcctgccatttcaccaggaacatgtacacctgggggaaagccagagtcgggggaccccattca

SEQ ID NO: 10830 - RNA, 103 nt, synthetic construct
  source 1..103: mol_type = other RNA
gatctcggtgaagcgccggtagaccaccttctccgacaggtcctgccatttcaccaggaacatgtacacctgggggaaagccagagtcgggggaccccattca

SEQ ID NO: 10831 - RNA, 103 nt, synthetic construct
  source 1..103: mol_type = other RNA
gatctcggtgaagcgccggtagaccaccttctccgacaggtcctgccatttcaccaggaacatgtaaacctgggggaaagccagagtcgggggaccccattca

SEQ ID NO: 10832 - RNA, 103 nt, synthetic construct
  source 1..103: mol_type = other RNA
gatctcggtgaagcgccggtagaccaccttctccgacaggtcctgccatttcaccaggaacatgtatacctgggggaaagccagagtcgggggaccccattca

SEQ ID NO: 10833 - RNA, 103 nt, synthetic construct
  source 1..103: mol_type = other RNA
gatctcggtgaagcgccggtagaccaccttctccgacaggtcctgccatttcaccaggaacatgtagacctgggggaaagccagagtcgggggaccccattca

SEQ ID NO: 10834 - RNA, 16 nt, synthetic construct
  source 1..16: mol_type = other RNA
cagcaaagcctctttg

SEQ ID NO: 10835 - RNA, 17 nt, synthetic construct
  source 1..17: mol_type = other RNA
acagcaaagcctctttg

SEQ ID NO: 10836 - RNA, 18 nt, synthetic construct
  source 1..18: mol_type = other RNA
cacagcaaagcctctttg

SEQ ID NO: 10837 - RNA, 19 nt, synthetic construct
  source 1..19: mol_type = other RNA
acacagcaaagcctctttg

SEQ ID NO: 10838 - RNA, 20 nt, synthetic construct
  source 1..20: mol_type = other RNA
cacacagcaaagcctctttg

SEQ ID NO: 10839 - RNA, 21 nt, synthetic construct
  source 1..21: mol_type = other RNA
gcacacagcaaagcctctttg

SEQ ID NO: 10840 - RNA, 22 nt, synthetic construct
  source 1..22: mol_type = other RNA
tgcacacagcaaagcctctttg

SEQ ID NO: 10841-10847 - skipped (7 entries)

SEQ ID NO: 10848 - RNA, 10 nt, synthetic construct
  source 1..10: mol_type = other RNA
agaggctttg

SEQ ID NO: 10849 - RNA, 11 nt, synthetic construct
  source 1..11: mol_type = other RNA
agaggctttgc

SEQ ID NO: 10850 - RNA, 12 nt, synthetic construct
  source 1..12: mol_type = other RNA
agaggctttgct

SEQ ID NO: 10851 - RNA, 13 nt, synthetic construct
  source 1..13: mol_type = other RNA
agaggctttgctg

SEQ ID NO: 10852 - RNA, 14 nt, synthetic construct
  source 1..14: mol_type = other RNA
agaggctttgctgt

SEQ ID NO: 10853 - RNA, 15 nt, synthetic construct
  source 1..15: mol_type = other RNA
agaggctttgctgtg

SEQ ID NO: 10854 - RNA, 16 nt, synthetic construct
  source 1..16: mol_type = other RNA
agaggctttgctgtgt

SEQ ID NO: 10855 - RNA, 17 nt, synthetic construct
  source 1..17: mol_type = other RNA
agaggctttgctgtgtg

SEQ ID NO: 10856 - RNA, 18 nt, synthetic construct
  source 1..18: mol_type = other RNA
agaggctttgctgtgtgc

SEQ ID NO: 10857 - RNA, 19 nt, synthetic construct
  source 1..19: mol_type = other RNA
agaggctttgctgtgtgca

SEQ ID NO: 10858 - RNA, 44 nt, synthetic construct
  source 1..44: mol_type = other RNA
acctgggggaaagccagagtcgggggaccccattcagcctccaa

SEQ ID NO: 10859 - RNA, 45 nt, synthetic construct
  source 1..45: mol_type = other RNA
cacctgggggaaagccagagtcgggggaccccattcagcctccaa

SEQ ID NO: 10860 - RNA, 45 nt, synthetic construct
  source 1..45: mol_type = other RNA
aacctgggggaaagccagagtcgggggaccccattcagcctccaa

SEQ ID NO: 10861 - RNA, 45 nt, synthetic construct
  source 1..45: mol_type = other RNA
gacctgggggaaagccagagtcgggggaccccattcagcctccaa

SEQ ID NO: 10862 - RNA, 45 nt, synthetic construct
  source 1..45: mol_type = other RNA
tacctgggggaaagccagagtcgggggaccccattcagcctccaa

SEQ ID NO: 10863 - RNA, 46 nt, synthetic construct
  source 1..46: mol_type = other RNA
aaacctgggggaaagccagagtcgggggaccccattcagcctccaa

SEQ ID NO: 10864 - RNA, 46 nt, synthetic construct
  source 1..46: mol_type = other RNA
acacctgggggaaagccagagtcgggggaccccattcagcctccaa

SEQ ID NO: 10865 - RNA, 46 nt, synthetic construct
  source 1..46: mol_type = other RNA
agacctgggggaaagccagagtcgggggaccccattcagcctccaa

SEQ ID NO: 10866 - RNA, 46 nt, synthetic construct
  source 1..46: mol_type = other RNA
atacctgggggaaagccagagtcgggggaccccattcagcctccaa

SEQ ID NO: 10867 - RNA, 47 nt, synthetic construct
  source 1..47: mol_type = other RNA
tatacctgggggaaagccagagtcgggggaccccattcagcctccaa

SEQ ID NO: 10868 - RNA, 47 nt, synthetic construct
  source 1..47: mol_type = other RNA
tacacctgggggaaagccagagtcgggggaccccattcagcctccaa

SEQ ID NO: 10869 - RNA, 47 nt, synthetic construct
  source 1..47: mol_type = other RNA
tagacctgggggaaagccagagtcgggggaccccattcagcctccaa

SEQ ID NO: 10870 - RNA, 47 nt, synthetic construct
  source 1..47: mol_type = other RNA
taaacctgggggaaagccagagtcgggggaccccattcagcctccaa

SEQ ID NO: 10871 - RNA, 48 nt, synthetic construct
  source 1..48: mol_type = other RNA
gtaaacctgggggaaagccagagtcgggggaccccattcagcctccaa

SEQ ID NO: 10872 - RNA, 48 nt, synthetic construct
  source 1..48: mol_type = other RNA
gtagacctgggggaaagccagagtcgggggaccccattcagcctccaa

SEQ ID NO: 10873 - RNA, 48 nt, synthetic construct
  source 1..48: mol_type = other RNA
gtacacctgggggaaagccagagtcgggggaccccattcagcctccaa

SEQ ID NO: 10874 - RNA, 48 nt, synthetic construct
  source 1..48: mol_type = other RNA
gtatacctgggggaaagccagagtcgggggaccccattcagcctccaa

SEQ ID NO: 10875 - RNA, 49 nt, synthetic construct
  source 1..49: mol_type = other RNA
tgtacacctgggggaaagccagagtcgggggaccccattcagcctccaa

SEQ ID NO: 10876 - RNA, 49 nt, synthetic construct
  source 1..49: mol_type = other RNA
tgtaaacctgggggaaagccagagtcgggggaccccattcagcctccaa

SEQ ID NO: 10877 - RNA, 49 nt, synthetic construct
  source 1..49: mol_type = other RNA
tgtagacctgggggaaagccagagtcgggggaccccattcagcctccaa

SEQ ID NO: 10878 - RNA, 49 nt, synthetic construct
  source 1..49: mol_type = other RNA
tgtatacctgggggaaagccagagtcgggggaccccattcagcctccaa

SEQ ID NO: 10879 - RNA, 50 nt, synthetic construct
  source 1..50: mol_type = other RNA
atgtatacctgggggaaagccagagtcgggggaccccattcagcctccaa

SEQ ID NO: 10880 - RNA, 50 nt, synthetic construct
  source 1..50: mol_type = other RNA
atgtagacctgggggaaagccagagtcgggggaccccattcagcctccaa

SEQ ID NO: 10881 - RNA, 50 nt, synthetic construct
  source 1..50: mol_type = other RNA
atgtacacctgggggaaagccagagtcgggggaccccattcagcctccaa

SEQ ID NO: 10882 - RNA, 50 nt, synthetic construct
  source 1..50: mol_type = other RNA
atgtaaacctgggggaaagccagagtcgggggaccccattcagcctccaa

SEQ ID NO: 10883 - RNA, 51 nt, synthetic construct
  source 1..51: mol_type = other RNA
catgtatacctgggggaaagccagagtcgggggaccccattcagcctccaa

SEQ ID NO: 10884 - RNA, 51 nt, synthetic construct
  source 1..51: mol_type = other RNA
catgtaaacctgggggaaagccagagtcgggggaccccattcagcctccaa

SEQ ID NO: 10885 - RNA, 51 nt, synthetic construct
  source 1..51: mol_type = other RNA
catgtagacctgggggaaagccagagtcgggggaccccattcagcctccaa

SEQ ID NO: 10886 - RNA, 51 nt, synthetic construct
  source 1..51: mol_type = other RNA
catgtacacctgggggaaagccagagtcgggggaccccattcagcctccaa

SEQ ID NO: 10887 - RNA, 52 nt, synthetic construct
  source 1..52: mol_type = other RNA
acatgtacacctgggggaaagccagagtcgggggaccccattcagcctccaa

SEQ ID NO: 10888 - RNA, 52 nt, synthetic construct
  source 1..52: mol_type = other RNA
acatgtatacctgggggaaagccagagtcgggggaccccattcagcctccaa

SEQ ID NO: 10889 - RNA, 52 nt, synthetic construct
  source 1..52: mol_type = other RNA
acatgtagacctgggggaaagccagagtcgggggaccccattcagcctccaa

SEQ ID NO: 10890 - RNA, 52 nt, synthetic construct
  source 1..52: mol_type = other RNA
acatgtaaacctgggggaaagccagagtcgggggaccccattcagcctccaa

SEQ ID NO: 10891 - RNA, 53 nt, synthetic construct
  source 1..53: mol_type = other RNA
aacatgtacacctgggggaaagccagagtcgggggaccccattcagcctccaa

SEQ ID NO: 10892 - RNA, 53 nt, synthetic construct
  source 1..53: mol_type = other RNA
aacatgtaaacctgggggaaagccagagtcgggggaccccattcagcctccaa

SEQ ID NO: 10893 - RNA, 53 nt, synthetic construct
  source 1..53: mol_type = other RNA
aacatgtagacctgggggaaagccagagtcgggggaccccattcagcctccaa

SEQ ID NO: 10894 - RNA, 53 nt, synthetic construct
  source 1..53: mol_type = other RNA
aacatgtatacctgggggaaagccagagtcgggggaccccattcagcctccaa

SEQ ID NO: 10895 - RNA, 54 nt, synthetic construct
  source 1..54: mol_type = other RNA
gaacatgtagacctgggggaaagccagagtcgggggaccccattcagcctccaa

SEQ ID NO: 10896 - RNA, 54 nt, synthetic construct
  source 1..54: mol_type = other RNA
gaacatgtatacctgggggaaagccagagtcgggggaccccattcagcctccaa

SEQ ID NO: 10897 - RNA, 54 nt, synthetic construct
  source 1..54: mol_type = other RNA
gaacatgtaaacctgggggaaagccagagtcgggggaccccattcagcctccaa

SEQ ID NO: 10898 - RNA, 54 nt, synthetic construct
  source 1..54: mol_type = other RNA
gaacatgtacacctgggggaaagccagagtcgggggaccccattcagcctccaa

SEQ ID NO: 10899 - RNA, 55 nt, synthetic construct
  source 1..55: mol_type = other RNA
ggaacatgtaaacctgggggaaagccagagtcgggggaccccattcagcctccaa

SEQ ID NO: 10900 - RNA, 55 nt, synthetic construct
  source 1..55: mol_type = other RNA
ggaacatgtatacctgggggaaagccagagtcgggggaccccattcagcctccaa

SEQ ID NO: 10901 - RNA, 55 nt, synthetic construct
  source 1..55: mol_type = other RNA
ggaacatgtagacctgggggaaagccagagtcgggggaccccattcagcctccaa

SEQ ID NO: 10902 - RNA, 55 nt, synthetic construct
  source 1..55: mol_type = other RNA
ggaacatgtacacctgggggaaagccagagtcgggggaccccattcagcctccaa

SEQ ID NO: 10903 - RNA, 56 nt, synthetic construct
  source 1..56: mol_type = other RNA
aggaacatgtacacctgggggaaagccagagtcgggggaccccattcagcctccaa

SEQ ID NO: 10904 - RNA, 56 nt, synthetic construct
  source 1..56: mol_type = other RNA
aggaacatgtatacctgggggaaagccagagtcgggggaccccattcagcctccaa

SEQ ID NO: 10905 - RNA, 56 nt, synthetic construct
  source 1..56: mol_type = other RNA
aggaacatgtaaacctgggggaaagccagagtcgggggaccccattcagcctccaa

SEQ ID NO: 10906 - RNA, 56 nt, synthetic construct
  source 1..56: mol_type = other RNA
aggaacatgtagacctgggggaaagccagagtcgggggaccccattcagcctccaa

SEQ ID NO: 10907 - RNA, 57 nt, synthetic construct
  source 1..57: mol_type = other RNA
caggaacatgtacacctgggggaaagccagagtcgggggaccccattcagcctccaa

SEQ ID NO: 10908 - RNA, 57 nt, synthetic construct
  source 1..57: mol_type = other RNA
caggaacatgtatacctgggggaaagccagagtcgggggaccccattcagcctccaa

SEQ ID NO: 10909 - RNA, 57 nt, synthetic construct
  source 1..57: mol_type = other RNA
caggaacatgtagacctgggggaaagccagagtcgggggaccccattcagcctccaa

SEQ ID NO: 10910 - RNA, 57 nt, synthetic construct
  source 1..57: mol_type = other RNA
caggaacatgtaaacctgggggaaagccagagtcgggggaccccattcagcctccaa

SEQ ID NO: 10911 - RNA, 58 nt, synthetic construct
  source 1..58: mol_type = other RNA
ccaggaacatgtaaacctgggggaaagccagagtcgggggaccccattcagcctccaa

SEQ ID NO: 10912 - RNA, 58 nt, synthetic construct
  source 1..58: mol_type = other RNA
ccaggaacatgtacacctgggggaaagccagagtcgggggaccccattcagcctccaa

SEQ ID NO: 10913 - RNA, 58 nt, synthetic construct
  source 1..58: mol_type = other RNA
ccaggaacatgtagacctgggggaaagccagagtcgggggaccccattcagcctccaa

SEQ ID NO: 10914 - RNA, 58 nt, synthetic construct
  source 1..58: mol_type = other RNA
ccaggaacatgtatacctgggggaaagccagagtcgggggaccccattcagcctccaa

SEQ ID NO: 10915 - RNA, 59 nt, synthetic construct
  source 1..59: mol_type = other RNA
accaggaacatgtaaacctgggggaaagccagagtcgggggaccccattcagcctccaa

SEQ ID NO: 10916 - RNA, 59 nt, synthetic construct
  source 1..59: mol_type = other RNA
accaggaacatgtatacctgggggaaagccagagtcgggggaccccattcagcctccaa

SEQ ID NO: 10917 - RNA, 59 nt, synthetic construct
  source 1..59: mol_type = other RNA
accaggaacatgtagacctgggggaaagccagagtcgggggaccccattcagcctccaa

SEQ ID NO: 10918 - RNA, 59 nt, synthetic construct
  source 1..59: mol_type = other RNA
accaggaacatgtacacctgggggaaagccagagtcgggggaccccattcagcctccaa

SEQ ID NO: 10919 - RNA, 60 nt, synthetic construct
  source 1..60: mol_type = other RNA
caccaggaacatgtacacctgggggaaagccagagtcgggggaccccattcagcctccaa

SEQ ID NO: 10920 - RNA, 60 nt, synthetic construct
  source 1..60: mol_type = other RNA
caccaggaacatgtaaacctgggggaaagccagagtcgggggaccccattcagcctccaa

SEQ ID NO: 10921 - RNA, 60 nt, synthetic construct
  source 1..60: mol_type = other RNA
caccaggaacatgtatacctgggggaaagccagagtcgggggaccccattcagcctccaa

SEQ ID NO: 10922 - RNA, 60 nt, synthetic construct
  source 1..60: mol_type = other RNA
caccaggaacatgtagacctgggggaaagccagagtcgggggaccccattcagcctccaa

SEQ ID NO: 10923 - RNA, 61 nt, synthetic construct
  source 1..61: mol_type = other RNA
tcaccaggaacatgtaaacctgggggaaagccagagtcgggggaccccattcagcctccaa

SEQ ID NO: 10924 - RNA, 61 nt, synthetic construct
  source 1..61: mol_type = other RNA
tcaccaggaacatgtacacctgggggaaagccagagtcgggggaccccattcagcctccaa

SEQ ID NO: 10925 - RNA, 61 nt, synthetic construct
  source 1..61: mol_type = other RNA
tcaccaggaacatgtatacctgggggaaagccagagtcgggggaccccattcagcctccaa

SEQ ID NO: 10926 - RNA, 61 nt, synthetic construct
  source 1..61: mol_type = other RNA
tcaccaggaacatgtagacctgggggaaagccagagtcgggggaccccattcagcctccaa

SEQ ID NO: 10927 - RNA, 62 nt, synthetic construct
  source 1..62: mol_type = other RNA
ttcaccaggaacatgtatacctgggggaaagccagagtcgggggaccccattcagcctccaa

SEQ ID NO: 10928 - RNA, 62 nt, synthetic construct
  source 1..62: mol_type = other RNA
ttcaccaggaacatgtacacctgggggaaagccagagtcgggggaccccattcagcctccaa

SEQ ID NO: 10929 - RNA, 62 nt, synthetic construct
  source 1..62: mol_type = other RNA
ttcaccaggaacatgtaaacctgggggaaagccagagtcgggggaccccattcagcctccaa

SEQ ID NO: 10930 - RNA, 62 nt, synthetic construct
  source 1..62: mol_type = other RNA
ttcaccaggaacatgtagacctgggggaaagccagagtcgggggaccccattcagcctccaa

SEQ ID NO: 10931 - RNA, 63 nt, synthetic construct
  source 1..63: mol_type = other RNA
tttcaccaggaacatgtacacctgggggaaagccagagtcgggggaccccattcagcctccaa

SEQ ID NO: 10932 - RNA, 63 nt, synthetic construct
  source 1..63: mol_type = other RNA
tttcaccaggaacatgtatacctgggggaaagccagagtcgggggaccccattcagcctccaa

SEQ ID NO: 10933 - RNA, 63 nt, synthetic construct
  source 1..63: mol_type = other RNA
tttcaccaggaacatgtaaacctgggggaaagccagagtcgggggaccccattcagcctccaa

SEQ ID NO: 10934 - RNA, 63 nt, synthetic construct
  source 1..63: mol_type = other RNA
tttcaccaggaacatgtagacctgggggaaagccagagtcgggggaccccattcagcctccaa

SEQ ID NO: 10935 - RNA, 64 nt, synthetic construct
  source 1..64: mol_type = other RNA
atttcaccaggaacatgtagacctgggggaaagccagagtcgggggaccccattcagcctccaa

SEQ ID NO: 10936 - RNA, 64 nt, synthetic construct
  source 1..64: mol_type = other RNA
atttcaccaggaacatgtacacctgggggaaagccagagtcgggggaccccattcagcctccaa

SEQ ID NO: 10937 - RNA, 64 nt, synthetic construct
  source 1..64: mol_type = other RNA
atttcaccaggaacatgtatacctgggggaaagccagagtcgggggaccccattcagcctccaa

SEQ ID NO: 10938 - RNA, 64 nt, synthetic construct
  source 1..64: mol_type = other RNA
atttcaccaggaacatgtaaacctgggggaaagccagagtcgggggaccccattcagcctccaa

SEQ ID NO: 10939 - RNA, 65 nt, synthetic construct
  source 1..65: mol_type = other RNA
catttcaccaggaacatgtacacctgggggaaagccagagtcgggggaccccattcagcctccaa

SEQ ID NO: 10940 - RNA, 65 nt, synthetic construct
  source 1..65: mol_type = other RNA
catttcaccaggaacatgtaaacctgggggaaagccagagtcgggggaccccattcagcctccaa

SEQ ID NO: 10941 - RNA, 65 nt, synthetic construct
  source 1..65: mol_type = other RNA
catttcaccaggaacatgtagacctgggggaaagccagagtcgggggaccccattcagcctccaa

SEQ ID NO: 10942 - RNA, 65 nt, synthetic construct
  source 1..65: mol_type = other RNA
catttcaccaggaacatgtatacctgggggaaagccagagtcgggggaccccattcagcctccaa

SEQ ID NO: 10943 - RNA, 66 nt, synthetic construct
  source 1..66: mol_type = other RNA
ccatttcaccaggaacatgtatacctgggggaaagccagagtcgggggaccccattcagcctccaa

SEQ ID NO: 10944 - RNA, 66 nt, synthetic construct
  source 1..66: mol_type = other RNA
ccatttcaccaggaacatgtaaacctgggggaaagccagagtcgggggaccccattcagcctccaa

SEQ ID NO: 10945 - RNA, 66 nt, synthetic construct
  source 1..66: mol_type = other RNA
ccatttcaccaggaacatgtacacctgggggaaagccagagtcgggggaccccattcagcctccaa

SEQ ID NO: 10946 - RNA, 66 nt, synthetic construct
  source 1..66: mol_type = other RNA
ccatttcaccaggaacatgtagacctgggggaaagccagagtcgggggaccccattcagcctccaa

SEQ ID NO: 10947 - RNA, 67 nt, synthetic construct
  source 1..67: mol_type = other RNA
gccatttcaccaggaacatgtacacctgggggaaagccagagtcgggggaccccattcagcctccaa

SEQ ID NO: 10948 - RNA, 67 nt, synthetic construct
  source 1..67: mol_type = other RNA
gccatttcaccaggaacatgtaaacctgggggaaagccagagtcgggggaccccattcagcctccaa

SEQ ID NO: 10949 - RNA, 67 nt, synthetic construct
  source 1..67: mol_type = other RNA
gccatttcaccaggaacatgtatacctgggggaaagccagagtcgggggaccccattcagcctccaa

SEQ ID NO: 10950 - RNA, 67 nt, synthetic construct
  source 1..67: mol_type = other RNA
gccatttcaccaggaacatgtagacctgggggaaagccagagtcgggggaccccattcagcctccaa

SEQ ID NO: 10951 - RNA, 68 nt, synthetic construct
  source 1..68: mol_type = other RNA
tgccatttcaccaggaacatgtatacctgggggaaagccagagtcgggggaccccattcagcctccaa

SEQ ID NO: 10952 - RNA, 68 nt, synthetic construct
  source 1..68: mol_type = other RNA
tgccatttcaccaggaacatgtagacctgggggaaagccagagtcgggggaccccattcagcctccaa

SEQ ID NO: 10953 - RNA, 68 nt, synthetic construct
  source 1..68: mol_type = other RNA
tgccatttcaccaggaacatgtacacctgggggaaagccagagtcgggggaccccattcagcctccaa

SEQ ID NO: 10954 - RNA, 68 nt, synthetic construct
  source 1..68: mol_type = other RNA
tgccatttcaccaggaacatgtaaacctgggggaaagccagagtcgggggaccccattcagcctccaa

SEQ ID NO: 10955 - RNA, 69 nt, synthetic construct
  source 1..69: mol_type = other RNA
ctgccatttcaccaggaacatgtagacctgggggaaagccagagtcgggggaccccattcagcctccaa

SEQ ID NO: 10956 - RNA, 69 nt, synthetic construct
  source 1..69: mol_type = other RNA
ctgccatttcaccaggaacatgtacacctgggggaaagccagagtcgggggaccccattcagcctccaa

SEQ ID NO: 10957 - RNA, 69 nt, synthetic construct
  source 1..69: mol_type = other RNA
ctgccatttcaccaggaacatgtaaacctgggggaaagccagagtcgggggaccccattcagcctccaa

SEQ ID NO: 10958 - RNA, 69 nt, synthetic construct
  source 1..69: mol_type = other RNA
ctgccatttcaccaggaacatgtatacctgggggaaagccagagtcgggggaccccattcagcctccaa

SEQ ID NO: 10959 - RNA, 70 nt, synthetic construct
  source 1..70: mol_type = other RNA
cctgccatttcaccaggaacatgtagacctgggggaaagccagagtcgggggaccccattcagcctccaa

SEQ ID NO: 10960 - RNA, 70 nt, synthetic construct
  source 1..70: mol_type = other RNA
cctgccatttcaccaggaacatgtatacctgggggaaagccagagtcgggggaccccattcagcctccaa

SEQ ID NO: 10961 - RNA, 70 nt, synthetic construct
  source 1..70: mol_type = other RNA
cctgccatttcaccaggaacatgtaaacctgggggaaagccagagtcgggggaccccattcagcctccaa

SEQ ID NO: 10962 - RNA, 70 nt, synthetic construct
  source 1..70: mol_type = other RNA
cctgccatttcaccaggaacatgtacacctgggggaaagccagagtcgggggaccccattcagcctccaa

SEQ ID NO: 10963 - RNA, 71 nt, synthetic construct
  source 1..71: mol_type = other RNA
tcctgccatttcaccaggaacatgtacacctgggggaaagccagagtcgggggaccccattcagcctccaa

SEQ ID NO: 10964 - RNA, 71 nt, synthetic construct
  source 1..71: mol_type = other RNA
tcctgccatttcaccaggaacatgtaaacctgggggaaagccagagtcgggggaccccattcagcctccaa

SEQ ID NO: 10965 - RNA, 71 nt, synthetic construct
  source 1..71: mol_type = other RNA
tcctgccatttcaccaggaacatgtagacctgggggaaagccagagtcgggggaccccattcagcctccaa

SEQ ID NO: 10966 - RNA, 71 nt, synthetic construct
  source 1..71: mol_type = other RNA
tcctgccatttcaccaggaacatgtatacctgggggaaagccagagtcgggggaccccattcagcctccaa

SEQ ID NO: 10967 - RNA, 72 nt, synthetic construct
  source 1..72: mol_type = other RNA
gtcctgccatttcaccaggaacatgtaaacctgggggaaagccagagtcgggggaccccattcagcctccaa

SEQ ID NO: 10968 - RNA, 72 nt, synthetic construct
  source 1..72: mol_type = other RNA
gtcctgccatttcaccaggaacatgtagacctgggggaaagccagagtcgggggaccccattcagcctccaa

SEQ ID NO: 10969 - RNA, 72 nt, synthetic construct
  source 1..72: mol_type = other RNA
gtcctgccatttcaccaggaacatgtacacctgggggaaagccagagtcgggggaccccattcagcctccaa

SEQ ID NO: 10970 - RNA, 72 nt, synthetic construct
  source 1..72: mol_type = other RNA
gtcctgccatttcaccaggaacatgtatacctgggggaaagccagagtcgggggaccccattcagcctccaa

SEQ ID NO: 10971 - RNA, 73 nt, synthetic construct
  source 1..73: mol_type = other RNA
ggtcctgccatttcaccaggaacatgtatacctgggggaaagccagagtcgggggaccccattcagcctccaa

SEQ ID NO: 10972 - RNA, 73 nt, synthetic construct
  source 1..73: mol_type = other RNA
ggtcctgccatttcaccaggaacatgtagacctgggggaaagccagagtcgggggaccccattcagcctccaa

SEQ ID NO: 10973 - RNA, 73 nt, synthetic construct
  source 1..73: mol_type = other RNA
ggtcctgccatttcaccaggaacatgtacacctgggggaaagccagagtcgggggaccccattcagcctccaa

SEQ ID NO: 10974 - RNA, 73 nt, synthetic construct
  source 1..73: mol_type = other RNA
ggtcctgccatttcaccaggaacatgtaaacctgggggaaagccagagtcgggggaccccattcagcctccaa

SEQ ID NO: 10975 - RNA, 74 nt, synthetic construct
  source 1..74: mol_type = other RNA
aggtcctgccatttcaccaggaacatgtagacctgggggaaagccagagtcgggggaccccattcagcctccaa

SEQ ID NO: 10976 - RNA, 74 nt, synthetic construct
  source 1..74: mol_type = other RNA
aggtcctgccatttcaccaggaacatgtacacctgggggaaagccagagtcgggggaccccattcagcctccaa

SEQ ID NO: 10977 - RNA, 74 nt, synthetic construct
  source 1..74: mol_type = other RNA
aggtcctgccatttcaccaggaacatgtatacctgggggaaagccagagtcgggggaccccattcagcctccaa

SEQ ID NO: 10978 - RNA, 74 nt, synthetic construct
  source 1..74: mol_type = other RNA
aggtcctgccatttcaccaggaacatgtaaacctgggggaaagccagagtcgggggaccccattcagcctccaa

SEQ ID NO: 10979 - RNA, 75 nt, synthetic construct
  source 1..75: mol_type = other RNA
caggtcctgccatttcaccaggaacatgtagacctgggggaaagccagagtcgggggaccccattcagcctccaa

SEQ ID NO: 10980 - RNA, 75 nt, synthetic construct
  source 1..75: mol_type = other RNA
caggtcctgccatttcaccaggaacatgtaaacctgggggaaagccagagtcgggggaccccattcagcctccaa

SEQ ID NO: 10981 - RNA, 75 nt, synthetic construct
  source 1..75: mol_type = other RNA
caggtcctgccatttcaccaggaacatgtatacctgggggaaagccagagtcgggggaccccattcagcctccaa

SEQ ID NO: 10982 - RNA, 75 nt, synthetic construct
  source 1..75: mol_type = other RNA
caggtcctgccatttcaccaggaacatgtacacctgggggaaagccagagtcgggggaccccattcagcctccaa

SEQ ID NO: 10983 - RNA, 76 nt, synthetic construct
  source 1..76: mol_type = other RNA
acaggtcctgccatttcaccaggaacatgtatacctgggggaaagccagagtcgggggaccccattcagcctccaa

SEQ ID NO: 10984 - RNA, 76 nt, synthetic construct
  source 1..76: mol_type = other RNA
acaggtcctgccatttcaccaggaacatgtagacctgggggaaagccagagtcgggggaccccattcagcctccaa

SEQ ID NO: 10985 - RNA, 76 nt, synthetic construct
  source 1..76: mol_type = other RNA
acaggtcctgccatttcaccaggaacatgtacacctgggggaaagccagagtcgggggaccccattcagcctccaa

SEQ ID NO: 10986 - RNA, 76 nt, synthetic construct
  source 1..76: mol_type = other RNA
acaggtcctgccatttcaccaggaacatgtaaacctgggggaaagccagagtcgggggaccccattcagcctccaa

SEQ ID NO: 10987 - RNA, 77 nt, synthetic construct
  source 1..77: mol_type = other RNA
gacaggtcctgccatttcaccaggaacatgtagacctgggggaaagccagagtcgggggaccccattcagcctccaa

SEQ ID NO: 10988 - RNA, 77 nt, synthetic construct
  source 1..77: mol_type = other RNA
gacaggtcctgccatttcaccaggaacatgtacacctgggggaaagccagagtcgggggaccccattcagcctccaa

SEQ ID NO: 10989 - RNA, 77 nt, synthetic construct
  source 1..77: mol_type = other RNA
gacaggtcctgccatttcaccaggaacatgtaaacctgggggaaagccagagtcgggggaccccattcagcctccaa

SEQ ID NO: 10990 - RNA, 77 nt, synthetic construct
  source 1..77: mol_type = other RNA
gacaggtcctgccatttcaccaggaacatgtatacctgggggaaagccagagtcgggggaccccattcagcctccaa

SEQ ID NO: 10991 - RNA, 78 nt, synthetic construct
  source 1..78: mol_type = other RNA
cgacaggtcctgccatttcaccaggaacatgtacacctgggggaaagccagagtcgggggaccccattcagcctccaa

SEQ ID NO: 10992 - RNA, 78 nt, synthetic construct
  source 1..78: mol_type = other RNA
cgacaggtcctgccatttcaccaggaacatgtaaacctgggggaaagccagagtcgggggaccccattcagcctccaa

SEQ ID NO: 10993 - RNA, 78 nt, synthetic construct
  source 1..78: mol_type = other RNA
cgacaggtcctgccatttcaccaggaacatgtagacctgggggaaagccagagtcgggggaccccattcagcctccaa

SEQ ID NO: 10994 - RNA, 78 nt, synthetic construct
  source 1..78: mol_type = other RNA
cgacaggtcctgccatttcaccaggaacatgtatacctgggggaaagccagagtcgggggaccccattcagcctccaa

SEQ ID NO: 10995 - RNA, 79 nt, synthetic construct
  source 1..79: mol_type = other RNA
ccgacaggtcctgccatttcaccaggaacatgtaaacctgggggaaagccagagtcgggggaccccattcagcctccaa

SEQ ID NO: 10996 - RNA, 79 nt, synthetic construct
  source 1..79: mol_type = other RNA
ccgacaggtcctgccatttcaccaggaacatgtatacctgggggaaagccagagtcgggggaccccattcagcctccaa

SEQ ID NO: 10997 - RNA, 79 nt, synthetic construct
  source 1..79: mol_type = other RNA
ccgacaggtcctgccatttcaccaggaacatgtagacctgggggaaagccagagtcgggggaccccattcagcctccaa

SEQ ID NO: 10998 - RNA, 79 nt, synthetic construct
  source 1..79: mol_type = other RNA
ccgacaggtcctgccatttcaccaggaacatgtacacctgggggaaagccagagtcgggggaccccattcagcctccaa

SEQ ID NO: 10999 - RNA, 80 nt, synthetic construct
  source 1..80: mol_type = other RNA
tccgacaggtcctgccatttcaccaggaacatgtagacctgggggaaagccagagtcgggggaccccattcagcctccaa

SEQ ID NO: 11000 - RNA, 80 nt, synthetic construct
  source 1..80: mol_type = other RNA
tccgacaggtcctgccatttcaccaggaacatgtacacctgggggaaagccagagtcgggggaccccattcagcctccaa

SEQ ID NO: 11001 - RNA, 80 nt, synthetic construct
  source 1..80: mol_type = other RNA
tccgacaggtcctgccatttcaccaggaacatgtaaacctgggggaaagccagagtcgggggaccccattcagcctccaa

SEQ ID NO: 11002 - RNA, 80 nt, synthetic construct
  source 1..80: mol_type = other RNA
tccgacaggtcctgccatttcaccaggaacatgtatacctgggggaaagccagagtcgggggaccccattcagcctccaa

SEQ ID NO: 11003 - RNA, 81 nt, synthetic construct
  source 1..81: mol_type = other RNA
ctccgacaggtcctgccatttcaccaggaacatgtacacctgggggaaagccagagtcgggggaccccattcagcctccaa

SEQ ID NO: 11004 - RNA, 81 nt, synthetic construct
  source 1..81: mol_type = other RNA
ctccgacaggtcctgccatttcaccaggaacatgtaaacctgggggaaagccagagtcgggggaccccattcagcctccaa

SEQ ID NO: 11005 - RNA, 81 nt, synthetic construct
  source 1..81: mol_type = other RNA
ctccgacaggtcctgccatttcaccaggaacatgtagacctgggggaaagccagagtcgggggaccccattcagcctccaa

SEQ ID NO: 11006 - RNA, 81 nt, synthetic construct
  source 1..81: mol_type = other RNA
ctccgacaggtcctgccatttcaccaggaacatgtatacctgggggaaagccagagtcgggggaccccattcagcctccaa

SEQ ID NO: 11007 - RNA, 82 nt, synthetic construct
  source 1..82: mol_type = other RNA
tctccgacaggtcctgccatttcaccaggaacatgtaaacctgggggaaagccagagtcgggggaccccattcagcctccaa

SEQ ID NO: 11008 - RNA, 82 nt, synthetic construct
  source 1..82: mol_type = other RNA
tctccgacaggtcctgccatttcaccaggaacatgtagacctgggggaaagccagagtcgggggaccccattcagcctccaa

SEQ ID NO: 11009 - RNA, 82 nt, synthetic construct
  source 1..82: mol_type = other RNA
tctccgacaggtcctgccatttcaccaggaacatgtacacctgggggaaagccagagtcgggggaccccattcagcctccaa

SEQ ID NO: 11010 - RNA, 82 nt, synthetic construct
  source 1..82: mol_type = other RNA
tctccgacaggtcctgccatttcaccaggaacatgtatacctgggggaaagccagagtcgggggaccccattcagcctccaa

SEQ ID NO: 11011 - RNA, 83 nt, synthetic construct
  source 1..83: mol_type = other RNA
ttctccgacaggtcctgccatttcaccaggaacatgtacacctgggggaaagccagagtcgggggaccccattcagcctccaa

SEQ ID NO: 11012 - RNA, 83 nt, synthetic construct
  source 1..83: mol_type = other RNA
ttctccgacaggtcctgccatttcaccaggaacatgtaaacctgggggaaagccagagtcgggggaccccattcagcctccaa

SEQ ID NO: 11013 - RNA, 83 nt, synthetic construct
  source 1..83: mol_type = other RNA
ttctccgacaggtcctgccatttcaccaggaacatgtatacctgggggaaagccagagtcgggggaccccattcagcctccaa

SEQ ID NO: 11014 - RNA, 83 nt, synthetic construct
  source 1..83: mol_type = other RNA
ttctccgacaggtcctgccatttcaccaggaacatgtagacctgggggaaagccagagtcgggggaccccattcagcctccaa

SEQ ID NO: 11015 - RNA, 84 nt, synthetic construct
  source 1..84: mol_type = other RNA
cttctccgacaggtcctgccatttcaccaggaacatgtacacctgggggaaagccagagtcgggggaccccattcagcctccaa

SEQ ID NO: 11016 - RNA, 84 nt, synthetic construct
  source 1..84: mol_type = other RNA
cttctccgacaggtcctgccatttcaccaggaacatgtaaacctgggggaaagccagagtcgggggaccccattcagcctccaa

SEQ ID NO: 11017 - RNA, 84 nt, synthetic construct
  source 1..84: mol_type = other RNA
cttctccgacaggtcctgccatttcaccaggaacatgtagacctgggggaaagccagagtcgggggaccccattcagcctccaa

SEQ ID NO: 11018 - RNA, 84 nt, synthetic construct
  source 1..84: mol_type = other RNA
cttctccgacaggtcctgccatttcaccaggaacatgtatacctgggggaaagccagagtcgggggaccccattcagcctccaa

SEQ ID NO: 11019 - RNA, 85 nt, synthetic construct
  source 1..85: mol_type = other RNA
ccttctccgacaggtcctgccatttcaccaggaacatgtaaacctgggggaaagccagagtcgggggaccccattcagcctccaa

SEQ ID NO: 11020 - RNA, 85 nt, synthetic construct
  source 1..85: mol_type = other RNA
ccttctccgacaggtcctgccatttcaccaggaacatgtacacctgggggaaagccagagtcgggggaccccattcagcctccaa

SEQ ID NO: 11021 - RNA, 85 nt, synthetic construct
  source 1..85: mol_type = other RNA
ccttctccgacaggtcctgccatttcaccaggaacatgtatacctgggggaaagccagagtcgggggaccccattcagcctccaa

SEQ ID NO: 11022 - RNA, 85 nt, synthetic construct
  source 1..85: mol_type = other RNA
ccttctccgacaggtcctgccatttcaccaggaacatgtagacctgggggaaagccagagtcgggggaccccattcagcctccaa

SEQ ID NO: 11023 - RNA, 86 nt, synthetic construct
  source 1..86: mol_type = other RNA
accttctccgacaggtcctgccatttcaccaggaacatgtagacctgggggaaagccagagtcgggggaccccattcagcctccaa

SEQ ID NO: 11024 - RNA, 86 nt, synthetic construct
  source 1..86: mol_type = other RNA
accttctccgacaggtcctgccatttcaccaggaacatgtatacctgggggaaagccagagtcgggggaccccattcagcctccaa

SEQ ID NO: 11025 - RNA, 86 nt, synthetic construct
  source 1..86: mol_type = other RNA
accttctccgacaggtcctgccatttcaccaggaacatgtacacctgggggaaagccagagtcgggggaccccattcagcctccaa

SEQ ID NO: 11026 - RNA, 86 nt, synthetic construct
  source 1..86: mol_type = other RNA
accttctccgacaggtcctgccatttcaccaggaacatgtaaacctgggggaaagccagagtcgggggaccccattcagcctccaa

SEQ ID NO: 11027 - RNA, 87 nt, synthetic construct
  source 1..87: mol_type = other RNA
caccttctccgacaggtcctgccatttcaccaggaacatgtagacctgggggaaagccagagtcgggggaccccattcagcctccaa

SEQ ID NO: 11028 - RNA, 87 nt, synthetic construct
  source 1..87: mol_type = other RNA
caccttctccgacaggtcctgccatttcaccaggaacatgtatacctgggggaaagccagagtcgggggaccccattcagcctccaa

SEQ ID NO: 11029 - RNA, 87 nt, synthetic construct
  source 1..87: mol_type = other RNA
caccttctccgacaggtcctgccatttcaccaggaacatgtacacctgggggaaagccagagtcgggggaccccattcagcctccaa

SEQ ID NO: 11030 - RNA, 87 nt, synthetic construct
  source 1..87: mol_type = other RNA
caccttctccgacaggtcctgccatttcaccaggaacatgtaaacctgggggaaagccagagtcgggggaccccattcagcctccaa

SEQ ID NO: 11031 - RNA, 88 nt, synthetic construct
  source 1..88: mol_type = other RNA
ccaccttctccgacaggtcctgccatttcaccaggaacatgtacacctgggggaaagccagagtcgggggaccccattcagcctccaa

SEQ ID NO: 11032 - RNA, 88 nt, synthetic construct
  source 1..88: mol_type = other RNA
ccaccttctccgacaggtcctgccatttcaccaggaacatgtatacctgggggaaagccagagtcgggggaccccattcagcctccaa

SEQ ID NO: 11033 - RNA, 88 nt, synthetic construct
  source 1..88: mol_type = other RNA
ccaccttctccgacaggtcctgccatttcaccaggaacatgtagacctgggggaaagccagagtcgggggaccccattcagcctccaa

SEQ ID NO: 11034 - RNA, 88 nt, synthetic construct
  source 1..88: mol_type = other RNA
ccaccttctccgacaggtcctgccatttcaccaggaacatgtaaacctgggggaaagccagagtcgggggaccccattcagcctccaa

SEQ ID NO: 11035 - RNA, 89 nt, synthetic construct
  source 1..89: mol_type = other RNA
accaccttctccgacaggtcctgccatttcaccaggaacatgtatacctgggggaaagccagagtcgggggaccccattcagcctccaa

SEQ ID NO: 11036 - RNA, 89 nt, synthetic construct
  source 1..89: mol_type = other RNA
accaccttctccgacaggtcctgccatttcaccaggaacatgtaaacctgggggaaagccagagtcgggggaccccattcagcctccaa

SEQ ID NO: 11037 - RNA, 89 nt, synthetic construct
  source 1..89: mol_type = other RNA
accaccttctccgacaggtcctgccatttcaccaggaacatgtagacctgggggaaagccagagtcgggggaccccattcagcctccaa

SEQ ID NO: 11038 - RNA, 89 nt, synthetic construct
  source 1..89: mol_type = other RNA
accaccttctccgacaggtcctgccatttcaccaggaacatgtacacctgggggaaagccagagtcgggggaccccattcagcctccaa

SEQ ID NO: 11039 - RNA, 90 nt, synthetic construct
  source 1..90: mol_type = other RNA
gaccaccttctccgacaggtcctgccatttcaccaggaacatgtagacctgggggaaagccagagtcgggggaccccattcagcctccaa

SEQ ID NO: 11040 - RNA, 90 nt, synthetic construct
  source 1..90: mol_type = other RNA
gaccaccttctccgacaggtcctgccatttcaccaggaacatgtacacctgggggaaagccagagtcgggggaccccattcagcctccaa

SEQ ID NO: 11041 - RNA, 90 nt, synthetic construct
  source 1..90: mol_type = other RNA
gaccaccttctccgacaggtcctgccatttcaccaggaacatgtaaacctgggggaaagccagagtcgggggaccccattcagcctccaa

SEQ ID NO: 11042 - RNA, 90 nt, synthetic construct
  source 1..90: mol_type = other RNA
gaccaccttctccgacaggtcctgccatttcaccaggaacatgtatacctgggggaaagccagagtcgggggaccccattcagcctccaa

SEQ ID NO: 11043 - RNA, 91 nt, synthetic construct
  source 1..91: mol_type = other RNA
agaccaccttctccgacaggtcctgccatttcaccaggaacatgtatacctgggggaaagccagagtcgggggaccccattcagcctccaa

SEQ ID NO: 11044 - RNA, 91 nt, synthetic construct
  source 1..91: mol_type = other RNA
agaccaccttctccgacaggtcctgccatttcaccaggaacatgtagacctgggggaaagccagagtcgggggaccccattcagcctccaa

SEQ ID NO: 11045 - RNA, 91 nt, synthetic construct
  source 1..91: mol_type = other RNA
agaccaccttctccgacaggtcctgccatttcaccaggaacatgtaaacctgggggaaagccagagtcgggggaccccattcagcctccaa

SEQ ID NO: 11046 - RNA, 91 nt, synthetic construct
  source 1..91: mol_type = other RNA
agaccaccttctccgacaggtcctgccatttcaccaggaacatgtacacctgggggaaagccagagtcgggggaccccattcagcctccaa

SEQ ID NO: 11047 - RNA, 92 nt, synthetic construct
  source 1..92: mol_type = other RNA
tagaccaccttctccgacaggtcctgccatttcaccaggaacatgtagacctgggggaaagccagagtcgggggaccccattcagcctccaa

SEQ ID NO: 11048 - RNA, 92 nt, synthetic construct
  source 1..92: mol_type = other RNA
tagaccaccttctccgacaggtcctgccatttcaccaggaacatgtaaacctgggggaaagccagagtcgggggaccccattcagcctccaa

SEQ ID NO: 11049 - RNA, 92 nt, synthetic construct
  source 1..92: mol_type = other RNA
tagaccaccttctccgacaggtcctgccatttcaccaggaacatgtatacctgggggaaagccagagtcgggggaccccattcagcctccaa

SEQ ID NO: 11050 - RNA, 92 nt, synthetic construct
  source 1..92: mol_type = other RNA
tagaccaccttctccgacaggtcctgccatttcaccaggaacatgtacacctgggggaaagccagagtcgggggaccccattcagcctccaa

SEQ ID NO: 11051 - RNA, 93 nt, synthetic construct
  source 1..93: mol_type = other RNA
gtagaccaccttctccgacaggtcctgccatttcaccaggaacatgtatacctgggggaaagccagagtcgggggaccccattcagcctccaa

SEQ ID NO: 11052 - RNA, 93 nt, synthetic construct
  source 1..93: mol_type = other RNA
gtagaccaccttctccgacaggtcctgccatttcaccaggaacatgtagacctgggggaaagccagagtcgggggaccccattcagcctccaa

SEQ ID NO: 11053 - RNA, 93 nt, synthetic construct
  source 1..93: mol_type = other RNA
gtagaccaccttctccgacaggtcctgccatttcaccaggaacatgtacacctgggggaaagccagagtcgggggaccccattcagcctccaa

SEQ ID NO: 11054 - RNA, 93 nt, synthetic construct
  source 1..93: mol_type = other RNA
gtagaccaccttctccgacaggtcctgccatttcaccaggaacatgtaaacctgggggaaagccagagtcgggggaccccattcagcctccaa

SEQ ID NO: 11055 - RNA, 94 nt, synthetic construct
  source 1..94: mol_type = other RNA
ggtagaccaccttctccgacaggtcctgccatttcaccaggaacatgtacacctgggggaaagccagagtcgggggaccccattcagcctccaa

SEQ ID NO: 11056 - RNA, 94 nt, synthetic construct
  source 1..94: mol_type = other RNA
ggtagaccaccttctccgacaggtcctgccatttcaccaggaacatgtatacctgggggaaagccagagtcgggggaccccattcagcctccaa

SEQ ID NO: 11057 - RNA, 94 nt, synthetic construct
  source 1..94: mol_type = other RNA
ggtagaccaccttctccgacaggtcctgccatttcaccaggaacatgtaaacctgggggaaagccagagtcgggggaccccattcagcctccaa

SEQ ID NO: 11058 - RNA, 94 nt, synthetic construct
  source 1..94: mol_type = other RNA
ggtagaccaccttctccgacaggtcctgccatttcaccaggaacatgtagacctgggggaaagccagagtcgggggaccccattcagcctccaa

SEQ ID NO: 11059 - RNA, 95 nt, synthetic construct
  source 1..95: mol_type = other RNA
cggtagaccaccttctccgacaggtcctgccatttcaccaggaacatgtagacctgggggaaagccagagtcgggggaccccattcagcctccaa

SEQ ID NO: 11060 - RNA, 95 nt, synthetic construct
  source 1..95: mol_type = other RNA
cggtagaccaccttctccgacaggtcctgccatttcaccaggaacatgtatacctgggggaaagccagagtcgggggaccccattcagcctccaa

SEQ ID NO: 11061 - RNA, 95 nt, synthetic construct
  source 1..95: mol_type = other RNA
cggtagaccaccttctccgacaggtcctgccatttcaccaggaacatgtacacctgggggaaagccagagtcgggggaccccattcagcctccaa

SEQ ID NO: 11062 - RNA, 95 nt, synthetic construct
  source 1..95: mol_type = other RNA
cggtagaccaccttctccgacaggtcctgccatttcaccaggaacatgtaaacctgggggaaagccagagtcgggggaccccattcagcctccaa

SEQ ID NO: 11063 - RNA, 96 nt, synthetic construct
  source 1..96: mol_type = other RNA
ccggtagaccaccttctccgacaggtcctgccatttcaccaggaacatgtacacctgggggaaagccagagtcgggggaccccattcagcctccaa

SEQ ID NO: 11064 - RNA, 96 nt, synthetic construct
  source 1..96: mol_type = other RNA
ccggtagaccaccttctccgacaggtcctgccatttcaccaggaacatgtaaacctgggggaaagccagagtcgggggaccccattcagcctccaa

SEQ ID NO: 11065 - RNA, 96 nt, synthetic construct
  source 1..96: mol_type = other RNA
ccggtagaccaccttctccgacaggtcctgccatttcaccaggaacatgtatacctgggggaaagccagagtcgggggaccccattcagcctccaa

SEQ ID NO: 11066 - RNA, 96 nt, synthetic construct
  source 1..96: mol_type = other RNA
ccggtagaccaccttctccgacaggtcctgccatttcaccaggaacatgtagacctgggggaaagccagagtcgggggaccccattcagcctccaa

SEQ ID NO: 11067 - RNA, 97 nt, synthetic construct
  source 1..97: mol_type = other RNA
gccggtagaccaccttctccgacaggtcctgccatttcaccaggaacatgtaaacctgggggaaagccagagtcgggggaccccattcagcctccaa

SEQ ID NO: 11068 - RNA, 97 nt, synthetic construct
  source 1..97: mol_type = other RNA
gccggtagaccaccttctccgacaggtcctgccatttcaccaggaacatgtagacctgggggaaagccagagtcgggggaccccattcagcctccaa

SEQ ID NO: 11069 - RNA, 97 nt, synthetic construct
  source 1..97: mol_type = other RNA
gccggtagaccaccttctccgacaggtcctgccatttcaccaggaacatgtatacctgggggaaagccagagtcgggggaccccattcagcctccaa

SEQ ID NO: 11070 - RNA, 97 nt, synthetic construct
  source 1..97: mol_type = other RNA
gccggtagaccaccttctccgacaggtcctgccatttcaccaggaacatgtacacctgggggaaagccagagtcgggggaccccattcagcctccaa

SEQ ID NO: 11071 - RNA, 98 nt, synthetic construct
  source 1..98: mol_type = other RNA
cgccggtagaccaccttctccgacaggtcctgccatttcaccaggaacatgtacacctgggggaaagccagagtcgggggaccccattcagcctccaa

SEQ ID NO: 11072 - RNA, 98 nt, synthetic construct
  source 1..98: mol_type = other RNA
cgccggtagaccaccttctccgacaggtcctgccatttcaccaggaacatgtatacctgggggaaagccagagtcgggggaccccattcagcctccaa

SEQ ID NO: 11073 - RNA, 98 nt, synthetic construct
  source 1..98: mol_type = other RNA
cgccggtagaccaccttctccgacaggtcctgccatttcaccaggaacatgtagacctgggggaaagccagagtcgggggaccccattcagcctccaa

SEQ ID NO: 11074 - RNA, 98 nt, synthetic construct
  source 1..98: mol_type = other RNA
cgccggtagaccaccttctccgacaggtcctgccatttcaccaggaacatgtaaacctgggggaaagccagagtcgggggaccccattcagcctccaa

SEQ ID NO: 11075 - RNA, 99 nt, synthetic construct
  source 1..99: mol_type = other RNA
gcgccggtagaccaccttctccgacaggtcctgccatttcaccaggaacatgtacacctgggggaaagccagagtcgggggaccccattcagcctccaa

SEQ ID NO: 11076 - RNA, 99 nt, synthetic construct
  source 1..99: mol_type = other RNA
gcgccggtagaccaccttctccgacaggtcctgccatttcaccaggaacatgtaaacctgggggaaagccagagtcgggggaccccattcagcctccaa

SEQ ID NO: 11077 - RNA, 99 nt, synthetic construct
  source 1..99: mol_type = other RNA
gcgccggtagaccaccttctccgacaggtcctgccatttcaccaggaacatgtagacctgggggaaagccagagtcgggggaccccattcagcctccaa

SEQ ID NO: 11078 - RNA, 99 nt, synthetic construct
  source 1..99: mol_type = other RNA
gcgccggtagaccaccttctccgacaggtcctgccatttcaccaggaacatgtatacctgggggaaagccagagtcgggggaccccattcagcctccaa

SEQ ID NO: 11079 - RNA, 100 nt, synthetic construct
  source 1..100: mol_type = other RNA
agcgccggtagaccaccttctccgacaggtcctgccatttcaccaggaacatgtacacctgggggaaagccagagtcgggggaccccattcagcctccaa

SEQ ID NO: 11080 - RNA, 100 nt, synthetic construct
  source 1..100: mol_type = other RNA
agcgccggtagaccaccttctccgacaggtcctgccatttcaccaggaacatgtaaacctgggggaaagccagagtcgggggaccccattcagcctccaa

SEQ ID NO: 11081 - RNA, 100 nt, synthetic construct
  source 1..100: mol_type = other RNA
agcgccggtagaccaccttctccgacaggtcctgccatttcaccaggaacatgtagacctgggggaaagccagagtcgggggaccccattcagcctccaa

SEQ ID NO: 11082 - RNA, 100 nt, synthetic construct
  source 1..100: mol_type = other RNA
agcgccggtagaccaccttctccgacaggtcctgccatttcaccaggaacatgtatacctgggggaaagccagagtcgggggaccccattcagcctccaa

SEQ ID NO: 11083 - RNA, 101 nt, synthetic construct
  source 1..101: mol_type = other RNA
aagcgccggtagaccaccttctccgacaggtcctgccatttcaccaggaacatgtagacctgggggaaagccagagtcgggggaccccattcagcctccaa

SEQ ID NO: 11084 - RNA, 101 nt, synthetic construct
  source 1..101: mol_type = other RNA
aagcgccggtagaccaccttctccgacaggtcctgccatttcaccaggaacatgtacacctgggggaaagccagagtcgggggaccccattcagcctccaa

SEQ ID NO: 11085 - RNA, 101 nt, synthetic construct
  source 1..101: mol_type = other RNA
aagcgccggtagaccaccttctccgacaggtcctgccatttcaccaggaacatgtaaacctgggggaaagccagagtcgggggaccccattcagcctccaa

SEQ ID NO: 11086 - RNA, 101 nt, synthetic construct
  source 1..101: mol_type = other RNA
aagcgccggtagaccaccttctccgacaggtcctgccatttcaccaggaacatgtatacctgggggaaagccagagtcgggggaccccattcagcctccaa

SEQ ID NO: 11087 - RNA, 102 nt, synthetic construct
  source 1..102: mol_type = other RNA
gaagcgccggtagaccaccttctccgacaggtcctgccatttcaccaggaacatgtaaacctgggggaaagccagagtcgggggaccccattcagcctccaa

SEQ ID NO: 11088 - RNA, 102 nt, synthetic construct
  source 1..102: mol_type = other RNA
gaagcgccggtagaccaccttctccgacaggtcctgccatttcaccaggaacatgtatacctgggggaaagccagagtcgggggaccccattcagcctccaa

SEQ ID NO: 11089 - RNA, 102 nt, synthetic construct
  source 1..102: mol_type = other RNA
gaagcgccggtagaccaccttctccgacaggtcctgccatttcaccaggaacatgtacacctgggggaaagccagagtcgggggaccccattcagcctccaa

SEQ ID NO: 11090 - RNA, 102 nt, synthetic construct
  source 1..102: mol_type = other RNA
gaagcgccggtagaccaccttctccgacaggtcctgccatttcaccaggaacatgtagacctgggggaaagccagagtcgggggaccccattcagcctccaa

SEQ ID NO: 11091 - RNA, 103 nt, synthetic construct
  source 1..103: mol_type = other RNA
tgaagcgccggtagaccaccttctccgacaggtcctgccatttcaccaggaacatgtatacctgggggaaagccagagtcgggggaccccattcagcctccaa

SEQ ID NO: 11092 - RNA, 103 nt, synthetic construct
  source 1..103: mol_type = other RNA
tgaagcgccggtagaccaccttctccgacaggtcctgccatttcaccaggaacatgtacacctgggggaaagccagagtcgggggaccccattcagcctccaa

SEQ ID NO: 11093 - RNA, 103 nt, synthetic construct
  source 1..103: mol_type = other RNA
tgaagcgccggtagaccaccttctccgacaggtcctgccatttcaccaggaacatgtagacctgggggaaagccagagtcgggggaccccattcagcctccaa

SEQ ID NO: 11094 - RNA, 103 nt, synthetic construct
  source 1..103: mol_type = other RNA
tgaagcgccggtagaccaccttctccgacaggtcctgccatttcaccaggaacatgtaaacctgggggaaagccagagtcgggggaccccattcagcctccaa

SEQ ID NO: 11095 - RNA, 20 nt, synthetic construct
  source 1..20: mol_type = other RNA
cagagtcgggggaccccatt

SEQ ID NO: 11096 - RNA, 20 nt, synthetic construct
  source 1..20: mol_type = other RNA
gggaccccattcagcctcca

SEQ ID NO: 11097 - RNA, 20 nt, synthetic construct
  source 1..20: mol_type = other RNA
gtatacctgggggaaagcca

SEQ ID NO: 11098 - RNA, 20 nt, synthetic construct
  source 1..20: mol_type = other RNA
gtaaacctgggggaaagcca

SEQ ID NO: 11099 - RNA, 20 nt, synthetic construct
  source 1..20: mol_type = other RNA
gtacacctgggggaaagcca

SEQ ID NO: 11100 - RNA, 20 nt, synthetic construct
  source 1..20: mol_type = other RNA
gtagacctgggggaaagcca

SEQ ID NO: 11101 - RNA, 16 nt, synthetic construct
  source 1..16: mol_type = other RNA
atggaactcgtagatc

SEQ ID NO: 11102 - RNA, 17 nt, synthetic construct
  source 1..17: mol_type = other RNA
catggaactcgtagatc

SEQ ID NO: 11103 - RNA, 18 nt, synthetic construct
  source 1..18: mol_type = other RNA
acatggaactcgtagatc

SEQ ID NO: 11104 - RNA, 19 nt, synthetic construct
  source 1..19: mol_type = other RNA
cacatggaactcgtagatc

SEQ ID NO: 11105 - RNA, 20 nt, synthetic construct
  source 1..20: mol_type = other RNA
tcacatggaactcgtagatc

SEQ ID NO: 11106 - RNA, 21 nt, synthetic construct
  source 1..21: mol_type = other RNA
ctcacatggaactcgtagatc

SEQ ID NO: 11107 - RNA, 22 nt, synthetic construct
  source 1..22: mol_type = other RNA
actcacatggaactcgtagatc

SEQ ID NO: 11108-11114 - skipped (7 entries)

SEQ ID NO: 11115 - RNA, 10 nt, synthetic construct
  source 1..10: mol_type = other RNA
ctacgagttc

SEQ ID NO: 11116 - RNA, 11 nt, synthetic construct
  source 1..11: mol_type = other RNA
ctacgagttcc

SEQ ID NO: 11117 - RNA, 12 nt, synthetic construct
  source 1..12: mol_type = other RNA
ctacgagttcca

SEQ ID NO: 11118 - RNA, 13 nt, synthetic construct
  source 1..13: mol_type = other RNA
ctacgagttccat

SEQ ID NO: 11119 - RNA, 14 nt, synthetic construct
  source 1..14: mol_type = other RNA
ctacgagttccatg

SEQ ID NO: 11120 - RNA, 15 nt, synthetic construct
  source 1..15: mol_type = other RNA
ctacgagttccatgt

SEQ ID NO: 11121 - RNA, 16 nt, synthetic construct
  source 1..16: mol_type = other RNA
ctacgagttccatgtg

SEQ ID NO: 11122 - RNA, 17 nt, synthetic construct
  source 1..17: mol_type = other RNA
ctacgagttccatgtga

SEQ ID NO: 11123 - RNA, 18 nt, synthetic construct
  source 1..18: mol_type = other RNA
ctacgagttccatgtgag

SEQ ID NO: 11124 - RNA, 19 nt, synthetic construct
  source 1..19: mol_type = other RNA
ctacgagttccatgtgagt

SEQ ID NO: 11125 - RNA, 68 nt, synthetic construct
  source 1..68: mol_type = other RNA
gtctacatgttcctggtgaaatggcaggacctgtcggagaaggtggtctaccggcgcttcacagagat

SEQ ID NO: 11126 - RNA, 68 nt, synthetic construct
  source 1..68: mol_type = other RNA
gtttacatgttcctggtgaaatggcaggacctgtcggagaaggtggtctaccggcgcttcaccgagat

SEQ ID NO: 11127 - RNA, 68 nt, synthetic construct
  source 1..68: mol_type = other RNA
gtgtacatgttcctggtgaaatggcaggacctgtcggagaaggtggtctaccggcgcttcaccgagat

SEQ ID NO: 11128 - RNA, 68 nt, synthetic construct
  source 1..68: mol_type = other RNA
gtatacatgttcctggtgaaatggcaggacctgtcggagaaggtggtctaccggcgcttcactgagat

SEQ ID NO: 11129 - RNA, 68 nt, synthetic construct
  source 1..68: mol_type = other RNA
gtctacatgttcctggtgaaatggcaggacctgtcggagaaggtggtctaccggcgcttcaccgagat

SEQ ID NO: 11130 - RNA, 68 nt, synthetic construct
  source 1..68: mol_type = other RNA
gtctacatgttcctggtgaaatggcaggacctgtcggagaaggtggtctaccggcgcttcacggagat

SEQ ID NO: 11131 - RNA, 68 nt, synthetic construct
  source 1..68: mol_type = other RNA
gtctacatgttcctggtgaaatggcaggacctgtcggagaaggtggtctaccggcgcttcactgagat

SEQ ID NO: 11132 - RNA, 68 nt, synthetic construct
  source 1..68: mol_type = other RNA
gtttacatgttcctggtgaaatggcaggacctgtcggagaaggtggtctaccggcgcttcactgagat

SEQ ID NO: 11133 - RNA, 68 nt, synthetic construct
  source 1..68: mol_type = other RNA
gtatacatgttcctggtgaaatggcaggacctgtcggagaaggtggtctaccggcgcttcacagagat

SEQ ID NO: 11134 - RNA, 68 nt, synthetic construct
  source 1..68: mol_type = other RNA
gtatacatgttcctggtgaaatggcaggacctgtcggagaaggtggtctaccggcgcttcaccgagat

SEQ ID NO: 11135 - RNA, 68 nt, synthetic construct
  source 1..68: mol_type = other RNA
gtttacatgttcctggtgaaatggcaggacctgtcggagaaggtggtctaccggcgcttcacggagat

SEQ ID NO: 11136 - RNA, 68 nt, synthetic construct
  source 1..68: mol_type = other RNA
gtgtacatgttcctggtgaaatggcaggacctgtcggagaaggtggtctaccggcgcttcacggagat

SEQ ID NO: 11137 - RNA, 68 nt, synthetic construct
  source 1..68: mol_type = other RNA
gtgtacatgttcctggtgaaatggcaggacctgtcggagaaggtggtctaccggcgcttcactgagat

SEQ ID NO: 11138 - RNA, 68 nt, synthetic construct
  source 1..68: mol_type = other RNA
gtttacatgttcctggtgaaatggcaggacctgtcggagaaggtggtctaccggcgcttcacagagat

SEQ ID NO: 11139 - RNA, 68 nt, synthetic construct
  source 1..68: mol_type = other RNA
gtgtacatgttcctggtgaaatggcaggacctgtcggagaaggtggtctaccggcgcttcacagagat

SEQ ID NO: 11140 - RNA, 68 nt, synthetic construct
  source 1..68: mol_type = other RNA
gtatacatgttcctggtgaaatggcaggacctgtcggagaaggtggtctaccggcgcttcacggagat

SEQ ID NO: 11141 - RNA, 69 nt, synthetic construct
  source 1..69: mol_type = other RNA
ggtatacatgttcctggtgaaatggcaggacctgtcggagaaggtggtctaccggcgcttcacggagat

SEQ ID NO: 11142 - RNA, 69 nt, synthetic construct
  source 1..69: mol_type = other RNA
ggtatacatgttcctggtgaaatggcaggacctgtcggagaaggtggtctaccggcgcttcaccgagat

SEQ ID NO: 11143 - RNA, 69 nt, synthetic construct
  source 1..69: mol_type = other RNA
ggtatacatgttcctggtgaaatggcaggacctgtcggagaaggtggtctaccggcgcttcactgagat

SEQ ID NO: 11144 - RNA, 69 nt, synthetic construct
  source 1..69: mol_type = other RNA
ggtgtacatgttcctggtgaaatggcaggacctgtcggagaaggtggtctaccggcgcttcactgagat

SEQ ID NO: 11145 - RNA, 69 nt, synthetic construct
  source 1..69: mol_type = other RNA
ggtctacatgttcctggtgaaatggcaggacctgtcggagaaggtggtctaccggcgcttcaccgagat

SEQ ID NO: 11146 - RNA, 69 nt, synthetic construct
  source 1..69: mol_type = other RNA
ggtttacatgttcctggtgaaatggcaggacctgtcggagaaggtggtctaccggcgcttcacggagat

SEQ ID NO: 11147 - RNA, 69 nt, synthetic construct
  source 1..69: mol_type = other RNA
ggtttacatgttcctggtgaaatggcaggacctgtcggagaaggtggtctaccggcgcttcactgagat

SEQ ID NO: 11148 - RNA, 69 nt, synthetic construct
  source 1..69: mol_type = other RNA
ggtttacatgttcctggtgaaatggcaggacctgtcggagaaggtggtctaccggcgcttcaccgagat

SEQ ID NO: 11149 - RNA, 69 nt, synthetic construct
  source 1..69: mol_type = other RNA
ggtttacatgttcctggtgaaatggcaggacctgtcggagaaggtggtctaccggcgcttcacagagat

SEQ ID NO: 11150 - RNA, 69 nt, synthetic construct
  source 1..69: mol_type = other RNA
ggtctacatgttcctggtgaaatggcaggacctgtcggagaaggtggtctaccggcgcttcacagagat

SEQ ID NO: 11151 - RNA, 69 nt, synthetic construct
  source 1..69: mol_type = other RNA
ggtgtacatgttcctggtgaaatggcaggacctgtcggagaaggtggtctaccggcgcttcaccgagat

SEQ ID NO: 11152 - RNA, 69 nt, synthetic construct
  source 1..69: mol_type = other RNA
ggtgtacatgttcctggtgaaatggcaggacctgtcggagaaggtggtctaccggcgcttcacagagat

SEQ ID NO: 11153 - RNA, 69 nt, synthetic construct
  source 1..69: mol_type = other RNA
ggtgtacatgttcctggtgaaatggcaggacctgtcggagaaggtggtctaccggcgcttcacggagat

SEQ ID NO: 11154 - RNA, 69 nt, synthetic construct
  source 1..69: mol_type = other RNA
ggtctacatgttcctggtgaaatggcaggacctgtcggagaaggtggtctaccggcgcttcactgagat

SEQ ID NO: 11155 - RNA, 69 nt, synthetic construct
  source 1..69: mol_type = other RNA
ggtctacatgttcctggtgaaatggcaggacctgtcggagaaggtggtctaccggcgcttcacggagat

SEQ ID NO: 11156 - RNA, 69 nt, synthetic construct
  source 1..69: mol_type = other RNA
ggtatacatgttcctggtgaaatggcaggacctgtcggagaaggtggtctaccggcgcttcacagagat

SEQ ID NO: 11157 - RNA, 70 nt, synthetic construct
  source 1..70: mol_type = other RNA
aggtatacatgttcctggtgaaatggcaggacctgtcggagaaggtggtctaccggcgcttcactgagat

SEQ ID NO: 11158 - RNA, 70 nt, synthetic construct
  source 1..70: mol_type = other RNA
aggtctacatgttcctggtgaaatggcaggacctgtcggagaaggtggtctaccggcgcttcaccgagat

SEQ ID NO: 11159 - RNA, 70 nt, synthetic construct
  source 1..70: mol_type = other RNA
aggtgtacatgttcctggtgaaatggcaggacctgtcggagaaggtggtctaccggcgcttcacagagat

SEQ ID NO: 11160 - RNA, 70 nt, synthetic construct
  source 1..70: mol_type = other RNA
aggtttacatgttcctggtgaaatggcaggacctgtcggagaaggtggtctaccggcgcttcactgagat

SEQ ID NO: 11161 - RNA, 70 nt, synthetic construct
  source 1..70: mol_type = other RNA
aggtttacatgttcctggtgaaatggcaggacctgtcggagaaggtggtctaccggcgcttcacggagat

SEQ ID NO: 11162 - RNA, 70 nt, synthetic construct
  source 1..70: mol_type = other RNA
aggtttacatgttcctggtgaaatggcaggacctgtcggagaaggtggtctaccggcgcttcaccgagat

SEQ ID NO: 11163 - RNA, 70 nt, synthetic construct
  source 1..70: mol_type = other RNA
aggtctacatgttcctggtgaaatggcaggacctgtcggagaaggtggtctaccggcgcttcacggagat

SEQ ID NO: 11164 - RNA, 70 nt, synthetic construct
  source 1..70: mol_type = other RNA
aggtttacatgttcctggtgaaatggcaggacctgtcggagaaggtggtctaccggcgcttcacagagat

SEQ ID NO: 11165 - RNA, 70 nt, synthetic construct
  source 1..70: mol_type = other RNA
aggtgtacatgttcctggtgaaatggcaggacctgtcggagaaggtggtctaccggcgcttcacggagat

SEQ ID NO: 11166 - RNA, 70 nt, synthetic construct
  source 1..70: mol_type = other RNA
aggtgtacatgttcctggtgaaatggcaggacctgtcggagaaggtggtctaccggcgcttcactgagat

SEQ ID NO: 11167 - RNA, 70 nt, synthetic construct
  source 1..70: mol_type = other RNA
aggtctacatgttcctggtgaaatggcaggacctgtcggagaaggtggtctaccggcgcttcacagagat

SEQ ID NO: 11168 - RNA, 70 nt, synthetic construct
  source 1..70: mol_type = other RNA
aggtatacatgttcctggtgaaatggcaggacctgtcggagaaggtggtctaccggcgcttcacagagat

SEQ ID NO: 11169 - RNA, 70 nt, synthetic construct
  source 1..70: mol_type = other RNA
aggtctacatgttcctggtgaaatggcaggacctgtcggagaaggtggtctaccggcgcttcactgagat

SEQ ID NO: 11170 - RNA, 70 nt, synthetic construct
  source 1..70: mol_type = other RNA
aggtgtacatgttcctggtgaaatggcaggacctgtcggagaaggtggtctaccggcgcttcaccgagat

SEQ ID NO: 11171 - RNA, 70 nt, synthetic construct
  source 1..70: mol_type = other RNA
aggtatacatgttcctggtgaaatggcaggacctgtcggagaaggtggtctaccggcgcttcaccgagat

SEQ ID NO: 11172 - RNA, 70 nt, synthetic construct
  source 1..70: mol_type = other RNA
aggtatacatgttcctggtgaaatggcaggacctgtcggagaaggtggtctaccggcgcttcacggagat

SEQ ID NO: 11173 - RNA, 71 nt, synthetic construct
  source 1..71: mol_type = other RNA
caggtatacatgttcctggtgaaatggcaggacctgtcggagaaggtggtctaccggcgcttcactgagat

SEQ ID NO: 11174 - RNA, 71 nt, synthetic construct
  source 1..71: mol_type = other RNA
caggtctacatgttcctggtgaaatggcaggacctgtcggagaaggtggtctaccggcgcttcacagagat

SEQ ID NO: 11175 - RNA, 71 nt, synthetic construct
  source 1..71: mol_type = other RNA
caggtatacatgttcctggtgaaatggcaggacctgtcggagaaggtggtctaccggcgcttcacggagat

SEQ ID NO: 11176 - RNA, 71 nt, synthetic construct
  source 1..71: mol_type = other RNA
caggtatacatgttcctggtgaaatggcaggacctgtcggagaaggtggtctaccggcgcttcaccgagat

SEQ ID NO: 11177 - RNA, 71 nt, synthetic construct
  source 1..71: mol_type = other RNA
caggtctacatgttcctggtgaaatggcaggacctgtcggagaaggtggtctaccggcgcttcacggagat

SEQ ID NO: 11178 - RNA, 71 nt, synthetic construct
  source 1..71: mol_type = other RNA
caggtgtacatgttcctggtgaaatggcaggacctgtcggagaaggtggtctaccggcgcttcaccgagat

SEQ ID NO: 11179 - RNA, 71 nt, synthetic construct
  source 1..71: mol_type = other RNA
caggtgtacatgttcctggtgaaatggcaggacctgtcggagaaggtggtctaccggcgcttcacggagat

SEQ ID NO: 11180 - RNA, 71 nt, synthetic construct
  source 1..71: mol_type = other RNA
caggtatacatgttcctggtgaaatggcaggacctgtcggagaaggtggtctaccggcgcttcacagagat

SEQ ID NO: 11181 - RNA, 71 nt, synthetic construct
  source 1..71: mol_type = other RNA
caggtctacatgttcctggtgaaatggcaggacctgtcggagaaggtggtctaccggcgcttcactgagat

SEQ ID NO: 11182 - RNA, 71 nt, synthetic construct
  source 1..71: mol_type = other RNA
caggtctacatgttcctggtgaaatggcaggacctgtcggagaaggtggtctaccggcgcttcaccgagat

SEQ ID NO: 11183 - RNA, 71 nt, synthetic construct
  source 1..71: mol_type = other RNA
caggtttacatgttcctggtgaaatggcaggacctgtcggagaaggtggtctaccggcgcttcacggagat

SEQ ID NO: 11184 - RNA, 71 nt, synthetic construct
  source 1..71: mol_type = other RNA
caggtttacatgttcctggtgaaatggcaggacctgtcggagaaggtggtctaccggcgcttcactgagat

SEQ ID NO: 11185 - RNA, 71 nt, synthetic construct
  source 1..71: mol_type = other RNA
caggtttacatgttcctggtgaaatggcaggacctgtcggagaaggtggtctaccggcgcttcacagagat

SEQ ID NO: 11186 - RNA, 71 nt, synthetic construct
  source 1..71: mol_type = other RNA
caggtgtacatgttcctggtgaaatggcaggacctgtcggagaaggtggtctaccggcgcttcacagagat

SEQ ID NO: 11187 - RNA, 71 nt, synthetic construct
  source 1..71: mol_type = other RNA
caggtgtacatgttcctggtgaaatggcaggacctgtcggagaaggtggtctaccggcgcttcactgagat

SEQ ID NO: 11188 - RNA, 71 nt, synthetic construct
  source 1..71: mol_type = other RNA
caggtttacatgttcctggtgaaatggcaggacctgtcggagaaggtggtctaccggcgcttcaccgagat

SEQ ID NO: 11189 - RNA, 72 nt, synthetic construct
  source 1..72: mol_type = other RNA
ccaggtttacatgttcctggtgaaatggcaggacctgtcggagaaggtggtctaccggcgcttcacggagat

SEQ ID NO: 11190 - RNA, 72 nt, synthetic construct
  source 1..72: mol_type = other RNA
ccaggtctacatgttcctggtgaaatggcaggacctgtcggagaaggtggtctaccggcgcttcacggagat

SEQ ID NO: 11191 - RNA, 72 nt, synthetic construct
  source 1..72: mol_type = other RNA
ccaggtatacatgttcctggtgaaatggcaggacctgtcggagaaggtggtctaccggcgcttcacagagat

SEQ ID NO: 11192 - RNA, 72 nt, synthetic construct
  source 1..72: mol_type = other RNA
ccaggtatacatgttcctggtgaaatggcaggacctgtcggagaaggtggtctaccggcgcttcaccgagat

SEQ ID NO: 11193 - RNA, 72 nt, synthetic construct
  source 1..72: mol_type = other RNA
ccaggtatacatgttcctggtgaaatggcaggacctgtcggagaaggtggtctaccggcgcttcacggagat

SEQ ID NO: 11194 - RNA, 72 nt, synthetic construct
  source 1..72: mol_type = other RNA
ccaggtatacatgttcctggtgaaatggcaggacctgtcggagaaggtggtctaccggcgcttcactgagat

SEQ ID NO: 11195 - RNA, 72 nt, synthetic construct
  source 1..72: mol_type = other RNA
ccaggtctacatgttcctggtgaaatggcaggacctgtcggagaaggtggtctaccggcgcttcacagagat

SEQ ID NO: 11196 - RNA, 72 nt, synthetic construct
  source 1..72: mol_type = other RNA
ccaggtgtacatgttcctggtgaaatggcaggacctgtcggagaaggtggtctaccggcgcttcaccgagat

SEQ ID NO: 11197 - RNA, 72 nt, synthetic construct
  source 1..72: mol_type = other RNA
ccaggtttacatgttcctggtgaaatggcaggacctgtcggagaaggtggtctaccggcgcttcactgagat

SEQ ID NO: 11198 - RNA, 72 nt, synthetic construct
  source 1..72: mol_type = other RNA
ccaggtctacatgttcctggtgaaatggcaggacctgtcggagaaggtggtctaccggcgcttcaccgagat

SEQ ID NO: 11199 - RNA, 72 nt, synthetic construct
  source 1..72: mol_type = other RNA
ccaggtgtacatgttcctggtgaaatggcaggacctgtcggagaaggtggtctaccggcgcttcacagagat

SEQ ID NO: 11200 - RNA, 72 nt, synthetic construct
  source 1..72: mol_type = other RNA
ccaggtgtacatgttcctggtgaaatggcaggacctgtcggagaaggtggtctaccggcgcttcacggagat

SEQ ID NO: 11201 - RNA, 72 nt, synthetic construct
  source 1..72: mol_type = other RNA
ccaggtgtacatgttcctggtgaaatggcaggacctgtcggagaaggtggtctaccggcgcttcactgagat

SEQ ID NO: 11202 - RNA, 72 nt, synthetic construct
  source 1..72: mol_type = other RNA
ccaggtctacatgttcctggtgaaatggcaggacctgtcggagaaggtggtctaccggcgcttcactgagat

SEQ ID NO: 11203 - RNA, 72 nt, synthetic construct
  source 1..72: mol_type = other RNA
ccaggtttacatgttcctggtgaaatggcaggacctgtcggagaaggtggtctaccggcgcttcaccgagat

SEQ ID NO: 11204 - RNA, 72 nt, synthetic construct
  source 1..72: mol_type = other RNA
ccaggtttacatgttcctggtgaaatggcaggacctgtcggagaaggtggtctaccggcgcttcacagagat

SEQ ID NO: 11205 - RNA, 73 nt, synthetic construct
  source 1..73: mol_type = other RNA
cccaggtttacatgttcctggtgaaatggcaggacctgtcggagaaggtggtctaccggcgcttcacagagat

SEQ ID NO: 11206 - RNA, 73 nt, synthetic construct
  source 1..73: mol_type = other RNA
cccaggtctacatgttcctggtgaaatggcaggacctgtcggagaaggtggtctaccggcgcttcactgagat

SEQ ID NO: 11207 - RNA, 73 nt, synthetic construct
  source 1..73: mol_type = other RNA
cccaggtctacatgttcctggtgaaatggcaggacctgtcggagaaggtggtctaccggcgcttcacggagat

SEQ ID NO: 11208 - RNA, 73 nt, synthetic construct
  source 1..73: mol_type = other RNA
cccaggtttacatgttcctggtgaaatggcaggacctgtcggagaaggtggtctaccggcgcttcacggagat

SEQ ID NO: 11209 - RNA, 73 nt, synthetic construct
  source 1..73: mol_type = other RNA
cccaggtttacatgttcctggtgaaatggcaggacctgtcggagaaggtggtctaccggcgcttcaccgagat

SEQ ID NO: 11210 - RNA, 73 nt, synthetic construct
  source 1..73: mol_type = other RNA
cccaggtgtacatgttcctggtgaaatggcaggacctgtcggagaaggtggtctaccggcgcttcactgagat

SEQ ID NO: 11211 - RNA, 73 nt, synthetic construct
  source 1..73: mol_type = other RNA
cccaggtgtacatgttcctggtgaaatggcaggacctgtcggagaaggtggtctaccggcgcttcacggagat

SEQ ID NO: 11212 - RNA, 73 nt, synthetic construct
  source 1..73: mol_type = other RNA
cccaggtgtacatgttcctggtgaaatggcaggacctgtcggagaaggtggtctaccggcgcttcaccgagat

SEQ ID NO: 11213 - RNA, 73 nt, synthetic construct
  source 1..73: mol_type = other RNA
cccaggtgtacatgttcctggtgaaatggcaggacctgtcggagaaggtggtctaccggcgcttcacagagat

SEQ ID NO: 11214 - RNA, 73 nt, synthetic construct
  source 1..73: mol_type = other RNA
cccaggtctacatgttcctggtgaaatggcaggacctgtcggagaaggtggtctaccggcgcttcacagagat

SEQ ID NO: 11215 - RNA, 73 nt, synthetic construct
  source 1..73: mol_type = other RNA
cccaggtctacatgttcctggtgaaatggcaggacctgtcggagaaggtggtctaccggcgcttcaccgagat

SEQ ID NO: 11216 - RNA, 73 nt, synthetic construct
  source 1..73: mol_type = other RNA
cccaggtttacatgttcctggtgaaatggcaggacctgtcggagaaggtggtctaccggcgcttcactgagat

SEQ ID NO: 11217 - RNA, 73 nt, synthetic construct
  source 1..73: mol_type = other RNA
cccaggtatacatgttcctggtgaaatggcaggacctgtcggagaaggtggtctaccggcgcttcacggagat

SEQ ID NO: 11218 - RNA, 73 nt, synthetic construct
  source 1..73: mol_type = other RNA
cccaggtatacatgttcctggtgaaatggcaggacctgtcggagaaggtggtctaccggcgcttcacagagat

SEQ ID NO: 11219 - RNA, 73 nt, synthetic construct
  source 1..73: mol_type = other RNA
cccaggtatacatgttcctggtgaaatggcaggacctgtcggagaaggtggtctaccggcgcttcaccgagat

SEQ ID NO: 11220 - RNA, 73 nt, synthetic construct
  source 1..73: mol_type = other RNA
cccaggtatacatgttcctggtgaaatggcaggacctgtcggagaaggtggtctaccggcgcttcactgagat

SEQ ID NO: 11221 - RNA, 74 nt, synthetic construct
  source 1..74: mol_type = other RNA
ccccaggtgtacatgttcctggtgaaatggcaggacctgtcggagaaggtggtctaccggcgcttcactgagat

SEQ ID NO: 11222 - RNA, 74 nt, synthetic construct
  source 1..74: mol_type = other RNA
ccccaggtctacatgttcctggtgaaatggcaggacctgtcggagaaggtggtctaccggcgcttcaccgagat

SEQ ID NO: 11223 - RNA, 74 nt, synthetic construct
  source 1..74: mol_type = other RNA
ccccaggtgtacatgttcctggtgaaatggcaggacctgtcggagaaggtggtctaccggcgcttcacggagat

SEQ ID NO: 11224 - RNA, 74 nt, synthetic construct
  source 1..74: mol_type = other RNA
ccccaggtttacatgttcctggtgaaatggcaggacctgtcggagaaggtggtctaccggcgcttcactgagat

SEQ ID NO: 11225 - RNA, 74 nt, synthetic construct
  source 1..74: mol_type = other RNA
ccccaggtatacatgttcctggtgaaatggcaggacctgtcggagaaggtggtctaccggcgcttcaccgagat

SEQ ID NO: 11226 - RNA, 74 nt, synthetic construct
  source 1..74: mol_type = other RNA
ccccaggtatacatgttcctggtgaaatggcaggacctgtcggagaaggtggtctaccggcgcttcacagagat

SEQ ID NO: 11227 - RNA, 74 nt, synthetic construct
  source 1..74: mol_type = other RNA
ccccaggtatacatgttcctggtgaaatggcaggacctgtcggagaaggtggtctaccggcgcttcacggagat

SEQ ID NO: 11228 - RNA, 74 nt, synthetic construct
  source 1..74: mol_type = other RNA
ccccaggtctacatgttcctggtgaaatggcaggacctgtcggagaaggtggtctaccggcgcttcacagagat

SEQ ID NO: 11229 - RNA, 74 nt, synthetic construct
  source 1..74: mol_type = other RNA
ccccaggtctacatgttcctggtgaaatggcaggacctgtcggagaaggtggtctaccggcgcttcacggagat

SEQ ID NO: 11230 - RNA, 74 nt, synthetic construct
  source 1..74: mol_type = other RNA
ccccaggtttacatgttcctggtgaaatggcaggacctgtcggagaaggtggtctaccggcgcttcacggagat

SEQ ID NO: 11231 - RNA, 74 nt, synthetic construct
  source 1..74: mol_type = other RNA
ccccaggtgtacatgttcctggtgaaatggcaggacctgtcggagaaggtggtctaccggcgcttcaccgagat

SEQ ID NO: 11232 - RNA, 74 nt, synthetic construct
  source 1..74: mol_type = other RNA
ccccaggtttacatgttcctggtgaaatggcaggacctgtcggagaaggtggtctaccggcgcttcaccgagat

SEQ ID NO: 11233 - RNA, 74 nt, synthetic construct
  source 1..74: mol_type = other RNA
ccccaggtctacatgttcctggtgaaatggcaggacctgtcggagaaggtggtctaccggcgcttcactgagat

SEQ ID NO: 11234 - RNA, 74 nt, synthetic construct
  source 1..74: mol_type = other RNA
ccccaggtgtacatgttcctggtgaaatggcaggacctgtcggagaaggtggtctaccggcgcttcacagagat

SEQ ID NO: 11235 - RNA, 74 nt, synthetic construct
  source 1..74: mol_type = other RNA
ccccaggtatacatgttcctggtgaaatggcaggacctgtcggagaaggtggtctaccggcgcttcactgagat

SEQ ID NO: 11236 - RNA, 74 nt, synthetic construct
  source 1..74: mol_type = other RNA
ccccaggtttacatgttcctggtgaaatggcaggacctgtcggagaaggtggtctaccggcgcttcacagagat

SEQ ID NO: 11237 - RNA, 75 nt, synthetic construct
  source 1..75: mol_type = other RNA
cccccaggtgtacatgttcctggtgaaatggcaggacctgtcggagaaggtggtctaccggcgcttcacggagat

SEQ ID NO: 11238 - RNA, 75 nt, synthetic construct
  source 1..75: mol_type = other RNA
cccccaggtatacatgttcctggtgaaatggcaggacctgtcggagaaggtggtctaccggcgcttcaccgagat

SEQ ID NO: 11239 - RNA, 75 nt, synthetic construct
  source 1..75: mol_type = other RNA
cccccaggtatacatgttcctggtgaaatggcaggacctgtcggagaaggtggtctaccggcgcttcacggagat

SEQ ID NO: 11240 - RNA, 75 nt, synthetic construct
  source 1..75: mol_type = other RNA
cccccaggtatacatgttcctggtgaaatggcaggacctgtcggagaaggtggtctaccggcgcttcactgagat

SEQ ID NO: 11241 - RNA, 75 nt, synthetic construct
  source 1..75: mol_type = other RNA
cccccaggtctacatgttcctggtgaaatggcaggacctgtcggagaaggtggtctaccggcgcttcactgagat

SEQ ID NO: 11242 - RNA, 75 nt, synthetic construct
  source 1..75: mol_type = other RNA
cccccaggtgtacatgttcctggtgaaatggcaggacctgtcggagaaggtggtctaccggcgcttcacagagat

SEQ ID NO: 11243 - RNA, 75 nt, synthetic construct
  source 1..75: mol_type = other RNA
cccccaggtgtacatgttcctggtgaaatggcaggacctgtcggagaaggtggtctaccggcgcttcaccgagat

SEQ ID NO: 11244 - RNA, 75 nt, synthetic construct
  source 1..75: mol_type = other RNA
cccccaggtctacatgttcctggtgaaatggcaggacctgtcggagaaggtggtctaccggcgcttcacagagat

SEQ ID NO: 11245 - RNA, 75 nt, synthetic construct
  source 1..75: mol_type = other RNA
cccccaggtgtacatgttcctggtgaaatggcaggacctgtcggagaaggtggtctaccggcgcttcactgagat

SEQ ID NO: 11246 - RNA, 75 nt, synthetic construct
  source 1..75: mol_type = other RNA
cccccaggtctacatgttcctggtgaaatggcaggacctgtcggagaaggtggtctaccggcgcttcacggagat

SEQ ID NO: 11247 - RNA, 75 nt, synthetic construct
  source 1..75: mol_type = other RNA
cccccaggtctacatgttcctggtgaaatggcaggacctgtcggagaaggtggtctaccggcgcttcaccgagat

SEQ ID NO: 11248 - RNA, 75 nt, synthetic construct
  source 1..75: mol_type = other RNA
cccccaggtttacatgttcctggtgaaatggcaggacctgtcggagaaggtggtctaccggcgcttcactgagat

SEQ ID NO: 11249 - RNA, 75 nt, synthetic construct
  source 1..75: mol_type = other RNA
cccccaggtttacatgttcctggtgaaatggcaggacctgtcggagaaggtggtctaccggcgcttcacggagat

SEQ ID NO: 11250 - RNA, 75 nt, synthetic construct
  source 1..75: mol_type = other RNA
cccccaggtttacatgttcctggtgaaatggcaggacctgtcggagaaggtggtctaccggcgcttcaccgagat

SEQ ID NO: 11251 - RNA, 75 nt, synthetic construct
  source 1..75: mol_type = other RNA
cccccaggtttacatgttcctggtgaaatggcaggacctgtcggagaaggtggtctaccggcgcttcacagagat

SEQ ID NO: 11252 - RNA, 75 nt, synthetic construct
  source 1..75: mol_type = other RNA
cccccaggtatacatgttcctggtgaaatggcaggacctgtcggagaaggtggtctaccggcgcttcacagagat

SEQ ID NO: 11253 - RNA, 76 nt, synthetic construct
  source 1..76: mol_type = other RNA
tcccccaggtatacatgttcctggtgaaatggcaggacctgtcggagaaggtggtctaccggcgcttcacagagat

SEQ ID NO: 11254 - RNA, 76 nt, synthetic construct
  source 1..76: mol_type = other RNA
tcccccaggtgtacatgttcctggtgaaatggcaggacctgtcggagaaggtggtctaccggcgcttcacagagat

SEQ ID NO: 11255 - RNA, 76 nt, synthetic construct
  source 1..76: mol_type = other RNA
tcccccaggtatacatgttcctggtgaaatggcaggacctgtcggagaaggtggtctaccggcgcttcactgagat

SEQ ID NO: 11256 - RNA, 76 nt, synthetic construct
  source 1..76: mol_type = other RNA
tcccccaggtttacatgttcctggtgaaatggcaggacctgtcggagaaggtggtctaccggcgcttcacagagat

SEQ ID NO: 11257 - RNA, 76 nt, synthetic construct
  source 1..76: mol_type = other RNA
tcccccaggtttacatgttcctggtgaaatggcaggacctgtcggagaaggtggtctaccggcgcttcaccgagat

SEQ ID NO: 11258 - RNA, 76 nt, synthetic construct
  source 1..76: mol_type = other RNA
tcccccaggtttacatgttcctggtgaaatggcaggacctgtcggagaaggtggtctaccggcgcttcacggagat

SEQ ID NO: 11259 - RNA, 76 nt, synthetic construct
  source 1..76: mol_type = other RNA
tcccccaggtttacatgttcctggtgaaatggcaggacctgtcggagaaggtggtctaccggcgcttcactgagat

SEQ ID NO: 11260 - RNA, 76 nt, synthetic construct
  source 1..76: mol_type = other RNA
tcccccaggtatacatgttcctggtgaaatggcaggacctgtcggagaaggtggtctaccggcgcttcaccgagat

SEQ ID NO: 11261 - RNA, 76 nt, synthetic construct
  source 1..76: mol_type = other RNA
tcccccaggtatacatgttcctggtgaaatggcaggacctgtcggagaaggtggtctaccggcgcttcacggagat

SEQ ID NO: 11262 - RNA, 76 nt, synthetic construct
  source 1..76: mol_type = other RNA
tcccccaggtgtacatgttcctggtgaaatggcaggacctgtcggagaaggtggtctaccggcgcttcaccgagat

SEQ ID NO: 11263 - RNA, 76 nt, synthetic construct
  source 1..76: mol_type = other RNA
tcccccaggtctacatgttcctggtgaaatggcaggacctgtcggagaaggtggtctaccggcgcttcaccgagat

SEQ ID NO: 11264 - RNA, 76 nt, synthetic construct
  source 1..76: mol_type = other RNA
tcccccaggtgtacatgttcctggtgaaatggcaggacctgtcggagaaggtggtctaccggcgcttcactgagat

SEQ ID NO: 11265 - RNA, 76 nt, synthetic construct
  source 1..76: mol_type = other RNA
tcccccaggtctacatgttcctggtgaaatggcaggacctgtcggagaaggtggtctaccggcgcttcacggagat

SEQ ID NO: 11266 - RNA, 76 nt, synthetic construct
  source 1..76: mol_type = other RNA
tcccccaggtctacatgttcctggtgaaatggcaggacctgtcggagaaggtggtctaccggcgcttcactgagat

SEQ ID NO: 11267 - RNA, 76 nt, synthetic construct
  source 1..76: mol_type = other RNA
tcccccaggtgtacatgttcctggtgaaatggcaggacctgtcggagaaggtggtctaccggcgcttcacggagat

SEQ ID NO: 11268 - RNA, 76 nt, synthetic construct
  source 1..76: mol_type = other RNA
tcccccaggtctacatgttcctggtgaaatggcaggacctgtcggagaaggtggtctaccggcgcttcacagagat

SEQ ID NO: 11269 - RNA, 77 nt, synthetic construct
  source 1..77: mol_type = other RNA
ttcccccaggtctacatgttcctggtgaaatggcaggacctgtcggagaaggtggtctaccggcgcttcacggagat

SEQ ID NO: 11270 - RNA, 77 nt, synthetic construct
  source 1..77: mol_type = other RNA
ttcccccaggtctacatgttcctggtgaaatggcaggacctgtcggagaaggtggtctaccggcgcttcactgagat

SEQ ID NO: 11271 - RNA, 77 nt, synthetic construct
  source 1..77: mol_type = other RNA
ttcccccaggtgtacatgttcctggtgaaatggcaggacctgtcggagaaggtggtctaccggcgcttcacagagat

SEQ ID NO: 11272 - RNA, 77 nt, synthetic construct
  source 1..77: mol_type = other RNA
ttcccccaggtgtacatgttcctggtgaaatggcaggacctgtcggagaaggtggtctaccggcgcttcaccgagat

SEQ ID NO: 11273 - RNA, 77 nt, synthetic construct
  source 1..77: mol_type = other RNA
ttcccccaggtgtacatgttcctggtgaaatggcaggacctgtcggagaaggtggtctaccggcgcttcacggagat

SEQ ID NO: 11274 - RNA, 77 nt, synthetic construct
  source 1..77: mol_type = other RNA
ttcccccaggtatacatgttcctggtgaaatggcaggacctgtcggagaaggtggtctaccggcgcttcacggagat

SEQ ID NO: 11275 - RNA, 77 nt, synthetic construct
  source 1..77: mol_type = other RNA
ttcccccaggtttacatgttcctggtgaaatggcaggacctgtcggagaaggtggtctaccggcgcttcacagagat

SEQ ID NO: 11276 - RNA, 77 nt, synthetic construct
  source 1..77: mol_type = other RNA
ttcccccaggtttacatgttcctggtgaaatggcaggacctgtcggagaaggtggtctaccggcgcttcaccgagat

SEQ ID NO: 11277 - RNA, 77 nt, synthetic construct
  source 1..77: mol_type = other RNA
ttcccccaggtatacatgttcctggtgaaatggcaggacctgtcggagaaggtggtctaccggcgcttcacagagat

SEQ ID NO: 11278 - RNA, 77 nt, synthetic construct
  source 1..77: mol_type = other RNA
ttcccccaggtctacatgttcctggtgaaatggcaggacctgtcggagaaggtggtctaccggcgcttcacagagat

SEQ ID NO: 11279 - RNA, 77 nt, synthetic construct
  source 1..77: mol_type = other RNA
ttcccccaggtctacatgttcctggtgaaatggcaggacctgtcggagaaggtggtctaccggcgcttcaccgagat

SEQ ID NO: 11280 - RNA, 77 nt, synthetic construct
  source 1..77: mol_type = other RNA
ttcccccaggtatacatgttcctggtgaaatggcaggacctgtcggagaaggtggtctaccggcgcttcactgagat

SEQ ID NO: 11281 - RNA, 77 nt, synthetic construct
  source 1..77: mol_type = other RNA
ttcccccaggtttacatgttcctggtgaaatggcaggacctgtcggagaaggtggtctaccggcgcttcactgagat

SEQ ID NO: 11282 - RNA, 77 nt, synthetic construct
  source 1..77: mol_type = other RNA
ttcccccaggtttacatgttcctggtgaaatggcaggacctgtcggagaaggtggtctaccggcgcttcacggagat

SEQ ID NO: 11283 - RNA, 77 nt, synthetic construct
  source 1..77: mol_type = other RNA
ttcccccaggtgtacatgttcctggtgaaatggcaggacctgtcggagaaggtggtctaccggcgcttcactgagat

SEQ ID NO: 11284 - RNA, 77 nt, synthetic construct
  source 1..77: mol_type = other RNA
ttcccccaggtatacatgttcctggtgaaatggcaggacctgtcggagaaggtggtctaccggcgcttcaccgagat

SEQ ID NO: 11285 - RNA, 78 nt, synthetic construct
  source 1..78: mol_type = other RNA
tttcccccaggtatacatgttcctggtgaaatggcaggacctgtcggagaaggtggtctaccggcgcttcaccgagat

SEQ ID NO: 11286 - RNA, 78 nt, synthetic construct
  source 1..78: mol_type = other RNA
tttcccccaggtatacatgttcctggtgaaatggcaggacctgtcggagaaggtggtctaccggcgcttcacagagat

SEQ ID NO: 11287 - RNA, 78 nt, synthetic construct
  source 1..78: mol_type = other RNA
tttcccccaggtgtacatgttcctggtgaaatggcaggacctgtcggagaaggtggtctaccggcgcttcaccgagat

SEQ ID NO: 11288 - RNA, 78 nt, synthetic construct
  source 1..78: mol_type = other RNA
tttcccccaggtgtacatgttcctggtgaaatggcaggacctgtcggagaaggtggtctaccggcgcttcacagagat

SEQ ID NO: 11289 - RNA, 78 nt, synthetic construct
  source 1..78: mol_type = other RNA
tttcccccaggtatacatgttcctggtgaaatggcaggacctgtcggagaaggtggtctaccggcgcttcactgagat

SEQ ID NO: 11290 - RNA, 78 nt, synthetic construct
  source 1..78: mol_type = other RNA
tttcccccaggtgtacatgttcctggtgaaatggcaggacctgtcggagaaggtggtctaccggcgcttcacggagat

SEQ ID NO: 11291 - RNA, 78 nt, synthetic construct
  source 1..78: mol_type = other RNA
tttcccccaggtatacatgttcctggtgaaatggcaggacctgtcggagaaggtggtctaccggcgcttcacggagat

SEQ ID NO: 11292 - RNA, 78 nt, synthetic construct
  source 1..78: mol_type = other RNA
tttcccccaggtttacatgttcctggtgaaatggcaggacctgtcggagaaggtggtctaccggcgcttcaccgagat

SEQ ID NO: 11293 - RNA, 78 nt, synthetic construct
  source 1..78: mol_type = other RNA
tttcccccaggtttacatgttcctggtgaaatggcaggacctgtcggagaaggtggtctaccggcgcttcactgagat

SEQ ID NO: 11294 - RNA, 78 nt, synthetic construct
  source 1..78: mol_type = other RNA
tttcccccaggtttacatgttcctggtgaaatggcaggacctgtcggagaaggtggtctaccggcgcttcacagagat

SEQ ID NO: 11295 - RNA, 78 nt, synthetic construct
  source 1..78: mol_type = other RNA
tttcccccaggtgtacatgttcctggtgaaatggcaggacctgtcggagaaggtggtctaccggcgcttcactgagat

SEQ ID NO: 11296 - RNA, 78 nt, synthetic construct
  source 1..78: mol_type = other RNA
tttcccccaggtctacatgttcctggtgaaatggcaggacctgtcggagaaggtggtctaccggcgcttcacagagat

SEQ ID NO: 11297 - RNA, 78 nt, synthetic construct
  source 1..78: mol_type = other RNA
tttcccccaggtttacatgttcctggtgaaatggcaggacctgtcggagaaggtggtctaccggcgcttcacggagat

SEQ ID NO: 11298 - RNA, 78 nt, synthetic construct
  source 1..78: mol_type = other RNA
tttcccccaggtctacatgttcctggtgaaatggcaggacctgtcggagaaggtggtctaccggcgcttcactgagat

SEQ ID NO: 11299 - RNA, 78 nt, synthetic construct
  source 1..78: mol_type = other RNA
tttcccccaggtctacatgttcctggtgaaatggcaggacctgtcggagaaggtggtctaccggcgcttcaccgagat

SEQ ID NO: 11300 - RNA, 78 nt, synthetic construct
  source 1..78: mol_type = other RNA
tttcccccaggtctacatgttcctggtgaaatggcaggacctgtcggagaaggtggtctaccggcgcttcacggagat

SEQ ID NO: 11301 - RNA, 79 nt, synthetic construct
  source 1..79: mol_type = other RNA
ctttcccccaggtatacatgttcctggtgaaatggcaggacctgtcggagaaggtggtctaccggcgcttcaccgagat

SEQ ID NO: 11302 - RNA, 79 nt, synthetic construct
  source 1..79: mol_type = other RNA
ctttcccccaggtatacatgttcctggtgaaatggcaggacctgtcggagaaggtggtctaccggcgcttcacagagat

SEQ ID NO: 11303 - RNA, 79 nt, synthetic construct
  source 1..79: mol_type = other RNA
ctttcccccaggtatacatgttcctggtgaaatggcaggacctgtcggagaaggtggtctaccggcgcttcacggagat

SEQ ID NO: 11304 - RNA, 79 nt, synthetic construct
  source 1..79: mol_type = other RNA
ctttcccccaggtttacatgttcctggtgaaatggcaggacctgtcggagaaggtggtctaccggcgcttcaccgagat

SEQ ID NO: 11305 - RNA, 79 nt, synthetic construct
  source 1..79: mol_type = other RNA
ctttcccccaggtgtacatgttcctggtgaaatggcaggacctgtcggagaaggtggtctaccggcgcttcacggagat

SEQ ID NO: 11306 - RNA, 79 nt, synthetic construct
  source 1..79: mol_type = other RNA
ctttcccccaggtctacatgttcctggtgaaatggcaggacctgtcggagaaggtggtctaccggcgcttcacagagat

SEQ ID NO: 11307 - RNA, 79 nt, synthetic construct
  source 1..79: mol_type = other RNA
ctttcccccaggtgtacatgttcctggtgaaatggcaggacctgtcggagaaggtggtctaccggcgcttcactgagat

SEQ ID NO: 11308 - RNA, 79 nt, synthetic construct
  source 1..79: mol_type = other RNA
ctttcccccaggtttacatgttcctggtgaaatggcaggacctgtcggagaaggtggtctaccggcgcttcacagagat

SEQ ID NO: 11309 - RNA, 79 nt, synthetic construct
  source 1..79: mol_type = other RNA
ctttcccccaggtttacatgttcctggtgaaatggcaggacctgtcggagaaggtggtctaccggcgcttcacggagat

SEQ ID NO: 11310 - RNA, 79 nt, synthetic construct
  source 1..79: mol_type = other RNA
ctttcccccaggtatacatgttcctggtgaaatggcaggacctgtcggagaaggtggtctaccggcgcttcactgagat

SEQ ID NO: 11311 - RNA, 79 nt, synthetic construct
  source 1..79: mol_type = other RNA
ctttcccccaggtgtacatgttcctggtgaaatggcaggacctgtcggagaaggtggtctaccggcgcttcaccgagat

SEQ ID NO: 11312 - RNA, 79 nt, synthetic construct
  source 1..79: mol_type = other RNA
ctttcccccaggtgtacatgttcctggtgaaatggcaggacctgtcggagaaggtggtctaccggcgcttcacagagat

SEQ ID NO: 11313 - RNA, 79 nt, synthetic construct
  source 1..79: mol_type = other RNA
ctttcccccaggtctacatgttcctggtgaaatggcaggacctgtcggagaaggtggtctaccggcgcttcacggagat

SEQ ID NO: 11314 - RNA, 79 nt, synthetic construct
  source 1..79: mol_type = other RNA
ctttcccccaggtctacatgttcctggtgaaatggcaggacctgtcggagaaggtggtctaccggcgcttcactgagat

SEQ ID NO: 11315 - RNA, 79 nt, synthetic construct
  source 1..79: mol_type = other RNA
ctttcccccaggtctacatgttcctggtgaaatggcaggacctgtcggagaaggtggtctaccggcgcttcaccgagat

SEQ ID NO: 11316 - RNA, 79 nt, synthetic construct
  source 1..79: mol_type = other RNA
ctttcccccaggtttacatgttcctggtgaaatggcaggacctgtcggagaaggtggtctaccggcgcttcactgagat

SEQ ID NO: 11317 - RNA, 80 nt, synthetic construct
  source 1..80: mol_type = other RNA
gctttcccccaggtttacatgttcctggtgaaatggcaggacctgtcggagaaggtggtctaccggcgcttcaccgagat

SEQ ID NO: 11318 - RNA, 80 nt, synthetic construct
  source 1..80: mol_type = other RNA
gctttcccccaggtgtacatgttcctggtgaaatggcaggacctgtcggagaaggtggtctaccggcgcttcaccgagat

SEQ ID NO: 11319 - RNA, 80 nt, synthetic construct
  source 1..80: mol_type = other RNA
gctttcccccaggtctacatgttcctggtgaaatggcaggacctgtcggagaaggtggtctaccggcgcttcaccgagat

SEQ ID NO: 11320 - RNA, 80 nt, synthetic construct
  source 1..80: mol_type = other RNA
gctttcccccaggtctacatgttcctggtgaaatggcaggacctgtcggagaaggtggtctaccggcgcttcacagagat

SEQ ID NO: 11321 - RNA, 80 nt, synthetic construct
  source 1..80: mol_type = other RNA
gctttcccccaggtatacatgttcctggtgaaatggcaggacctgtcggagaaggtggtctaccggcgcttcacggagat

SEQ ID NO: 11322 - RNA, 80 nt, synthetic construct
  source 1..80: mol_type = other RNA
gctttcccccaggtatacatgttcctggtgaaatggcaggacctgtcggagaaggtggtctaccggcgcttcaccgagat

SEQ ID NO: 11323 - RNA, 80 nt, synthetic construct
  source 1..80: mol_type = other RNA
gctttcccccaggtatacatgttcctggtgaaatggcaggacctgtcggagaaggtggtctaccggcgcttcacagagat

SEQ ID NO: 11324 - RNA, 80 nt, synthetic construct
  source 1..80: mol_type = other RNA
gctttcccccaggtctacatgttcctggtgaaatggcaggacctgtcggagaaggtggtctaccggcgcttcactgagat

SEQ ID NO: 11325 - RNA, 80 nt, synthetic construct
  source 1..80: mol_type = other RNA
gctttcccccaggtctacatgttcctggtgaaatggcaggacctgtcggagaaggtggtctaccggcgcttcacggagat

SEQ ID NO: 11326 - RNA, 80 nt, synthetic construct
  source 1..80: mol_type = other RNA
gctttcccccaggtgtacatgttcctggtgaaatggcaggacctgtcggagaaggtggtctaccggcgcttcactgagat

SEQ ID NO: 11327 - RNA, 80 nt, synthetic construct
  source 1..80: mol_type = other RNA
gctttcccccaggtgtacatgttcctggtgaaatggcaggacctgtcggagaaggtggtctaccggcgcttcacggagat

SEQ ID NO: 11328 - RNA, 80 nt, synthetic construct
  source 1..80: mol_type = other RNA
gctttcccccaggtttacatgttcctggtgaaatggcaggacctgtcggagaaggtggtctaccggcgcttcacagagat

SEQ ID NO: 11329 - RNA, 80 nt, synthetic construct
  source 1..80: mol_type = other RNA
gctttcccccaggtatacatgttcctggtgaaatggcaggacctgtcggagaaggtggtctaccggcgcttcactgagat

SEQ ID NO: 11330 - RNA, 80 nt, synthetic construct
  source 1..80: mol_type = other RNA
gctttcccccaggtttacatgttcctggtgaaatggcaggacctgtcggagaaggtggtctaccggcgcttcacggagat

SEQ ID NO: 11331 - RNA, 80 nt, synthetic construct
  source 1..80: mol_type = other RNA
gctttcccccaggtttacatgttcctggtgaaatggcaggacctgtcggagaaggtggtctaccggcgcttcactgagat

SEQ ID NO: 11332 - RNA, 80 nt, synthetic construct
  source 1..80: mol_type = other RNA
gctttcccccaggtgtacatgttcctggtgaaatggcaggacctgtcggagaaggtggtctaccggcgcttcacagagat

SEQ ID NO: 11333 - RNA, 81 nt, synthetic construct
  source 1..81: mol_type = other RNA
ggctttcccccaggtatacatgttcctggtgaaatggcaggacctgtcggagaaggtggtctaccggcgcttcactgagat

SEQ ID NO: 11334 - RNA, 81 nt, synthetic construct
  source 1..81: mol_type = other RNA
ggctttcccccaggtctacatgttcctggtgaaatggcaggacctgtcggagaaggtggtctaccggcgcttcacagagat

SEQ ID NO: 11335 - RNA, 81 nt, synthetic construct
  source 1..81: mol_type = other RNA
ggctttcccccaggtctacatgttcctggtgaaatggcaggacctgtcggagaaggtggtctaccggcgcttcaccgagat

SEQ ID NO: 11336 - RNA, 81 nt, synthetic construct
  source 1..81: mol_type = other RNA
ggctttcccccaggtctacatgttcctggtgaaatggcaggacctgtcggagaaggtggtctaccggcgcttcacggagat

SEQ ID NO: 11337 - RNA, 81 nt, synthetic construct
  source 1..81: mol_type = other RNA
ggctttcccccaggtatacatgttcctggtgaaatggcaggacctgtcggagaaggtggtctaccggcgcttcacggagat

SEQ ID NO: 11338 - RNA, 81 nt, synthetic construct
  source 1..81: mol_type = other RNA
ggctttcccccaggtgtacatgttcctggtgaaatggcaggacctgtcggagaaggtggtctaccggcgcttcacagagat

SEQ ID NO: 11339 - RNA, 81 nt, synthetic construct
  source 1..81: mol_type = other RNA
ggctttcccccaggtgtacatgttcctggtgaaatggcaggacctgtcggagaaggtggtctaccggcgcttcacggagat

SEQ ID NO: 11340 - RNA, 81 nt, synthetic construct
  source 1..81: mol_type = other RNA
ggctttcccccaggtttacatgttcctggtgaaatggcaggacctgtcggagaaggtggtctaccggcgcttcacagagat

SEQ ID NO: 11341 - RNA, 81 nt, synthetic construct
  source 1..81: mol_type = other RNA
ggctttcccccaggtttacatgttcctggtgaaatggcaggacctgtcggagaaggtggtctaccggcgcttcacggagat

SEQ ID NO: 11342 - RNA, 81 nt, synthetic construct
  source 1..81: mol_type = other RNA
ggctttcccccaggtttacatgttcctggtgaaatggcaggacctgtcggagaaggtggtctaccggcgcttcactgagat

SEQ ID NO: 11343 - RNA, 81 nt, synthetic construct
  source 1..81: mol_type = other RNA
ggctttcccccaggtgtacatgttcctggtgaaatggcaggacctgtcggagaaggtggtctaccggcgcttcaccgagat

SEQ ID NO: 11344 - RNA, 81 nt, synthetic construct
  source 1..81: mol_type = other RNA
ggctttcccccaggtctacatgttcctggtgaaatggcaggacctgtcggagaaggtggtctaccggcgcttcactgagat

SEQ ID NO: 11345 - RNA, 81 nt, synthetic construct
  source 1..81: mol_type = other RNA
ggctttcccccaggtttacatgttcctggtgaaatggcaggacctgtcggagaaggtggtctaccggcgcttcaccgagat

SEQ ID NO: 11346 - RNA, 81 nt, synthetic construct
  source 1..81: mol_type = other RNA
ggctttcccccaggtatacatgttcctggtgaaatggcaggacctgtcggagaaggtggtctaccggcgcttcacagagat

SEQ ID NO: 11347 - RNA, 81 nt, synthetic construct
  source 1..81: mol_type = other RNA
ggctttcccccaggtatacatgttcctggtgaaatggcaggacctgtcggagaaggtggtctaccggcgcttcaccgagat

SEQ ID NO: 11348 - RNA, 81 nt, synthetic construct
  source 1..81: mol_type = other RNA
ggctttcccccaggtgtacatgttcctggtgaaatggcaggacctgtcggagaaggtggtctaccggcgcttcactgagat

SEQ ID NO: 11349 - RNA, 82 nt, synthetic construct
  source 1..82: mol_type = other RNA
tggctttcccccaggtctacatgttcctggtgaaatggcaggacctgtcggagaaggtggtctaccggcgcttcaccgagat

SEQ ID NO: 11350 - RNA, 82 nt, synthetic construct
  source 1..82: mol_type = other RNA
tggctttcccccaggtttacatgttcctggtgaaatggcaggacctgtcggagaaggtggtctaccggcgcttcacagagat

SEQ ID NO: 11351 - RNA, 82 nt, synthetic construct
  source 1..82: mol_type = other RNA
tggctttcccccaggtgtacatgttcctggtgaaatggcaggacctgtcggagaaggtggtctaccggcgcttcactgagat

SEQ ID NO: 11352 - RNA, 82 nt, synthetic construct
  source 1..82: mol_type = other RNA
tggctttcccccaggtgtacatgttcctggtgaaatggcaggacctgtcggagaaggtggtctaccggcgcttcaccgagat

SEQ ID NO: 11353 - RNA, 82 nt, synthetic construct
  source 1..82: mol_type = other RNA
tggctttcccccaggtgtacatgttcctggtgaaatggcaggacctgtcggagaaggtggtctaccggcgcttcacagagat

SEQ ID NO: 11354 - RNA, 82 nt, synthetic construct
  source 1..82: mol_type = other RNA
tggctttcccccaggtctacatgttcctggtgaaatggcaggacctgtcggagaaggtggtctaccggcgcttcactgagat

SEQ ID NO: 11355 - RNA, 82 nt, synthetic construct
  source 1..82: mol_type = other RNA
tggctttcccccaggtatacatgttcctggtgaaatggcaggacctgtcggagaaggtggtctaccggcgcttcactgagat

SEQ ID NO: 11356 - RNA, 82 nt, synthetic construct
  source 1..82: mol_type = other RNA
tggctttcccccaggtctacatgttcctggtgaaatggcaggacctgtcggagaaggtggtctaccggcgcttcacagagat

SEQ ID NO: 11357 - RNA, 82 nt, synthetic construct
  source 1..82: mol_type = other RNA
tggctttcccccaggtatacatgttcctggtgaaatggcaggacctgtcggagaaggtggtctaccggcgcttcacggagat

SEQ ID NO: 11358 - RNA, 82 nt, synthetic construct
  source 1..82: mol_type = other RNA
tggctttcccccaggtatacatgttcctggtgaaatggcaggacctgtcggagaaggtggtctaccggcgcttcaccgagat

SEQ ID NO: 11359 - RNA, 82 nt, synthetic construct
  source 1..82: mol_type = other RNA
tggctttcccccaggtttacatgttcctggtgaaatggcaggacctgtcggagaaggtggtctaccggcgcttcaccgagat

SEQ ID NO: 11360 - RNA, 82 nt, synthetic construct
  source 1..82: mol_type = other RNA
tggctttcccccaggtctacatgttcctggtgaaatggcaggacctgtcggagaaggtggtctaccggcgcttcacggagat

SEQ ID NO: 11361 - RNA, 82 nt, synthetic construct
  source 1..82: mol_type = other RNA
tggctttcccccaggtttacatgttcctggtgaaatggcaggacctgtcggagaaggtggtctaccggcgcttcacggagat

SEQ ID NO: 11362 - RNA, 82 nt, synthetic construct
  source 1..82: mol_type = other RNA
tggctttcccccaggtttacatgttcctggtgaaatggcaggacctgtcggagaaggtggtctaccggcgcttcactgagat

SEQ ID NO: 11363 - RNA, 82 nt, synthetic construct
  source 1..82: mol_type = other RNA
tggctttcccccaggtgtacatgttcctggtgaaatggcaggacctgtcggagaaggtggtctaccggcgcttcacggagat

SEQ ID NO: 11364 - RNA, 82 nt, synthetic construct
  source 1..82: mol_type = other RNA
tggctttcccccaggtatacatgttcctggtgaaatggcaggacctgtcggagaaggtggtctaccggcgcttcacagagat

SEQ ID NO: 11365 - RNA, 83 nt, synthetic construct
  source 1..83: mol_type = other RNA
ctggctttcccccaggtttacatgttcctggtgaaatggcaggacctgtcggagaaggtggtctaccggcgcttcacagagat

SEQ ID NO: 11366 - RNA, 83 nt, synthetic construct
  source 1..83: mol_type = other RNA
ctggctttcccccaggtgtacatgttcctggtgaaatggcaggacctgtcggagaaggtggtctaccggcgcttcacggagat

SEQ ID NO: 11367 - RNA, 83 nt, synthetic construct
  source 1..83: mol_type = other RNA
ctggctttcccccaggtttacatgttcctggtgaaatggcaggacctgtcggagaaggtggtctaccggcgcttcaccgagat

SEQ ID NO: 11368 - RNA, 83 nt, synthetic construct
  source 1..83: mol_type = other RNA
ctggctttcccccaggtttacatgttcctggtgaaatggcaggacctgtcggagaaggtggtctaccggcgcttcactgagat

SEQ ID NO: 11369 - RNA, 83 nt, synthetic construct
  source 1..83: mol_type = other RNA
ctggctttcccccaggtatacatgttcctggtgaaatggcaggacctgtcggagaaggtggtctaccggcgcttcacagagat

SEQ ID NO: 11370 - RNA, 83 nt, synthetic construct
  source 1..83: mol_type = other RNA
ctggctttcccccaggtgtacatgttcctggtgaaatggcaggacctgtcggagaaggtggtctaccggcgcttcaccgagat

SEQ ID NO: 11371 - RNA, 83 nt, synthetic construct
  source 1..83: mol_type = other RNA
ctggctttcccccaggtgtacatgttcctggtgaaatggcaggacctgtcggagaaggtggtctaccggcgcttcacagagat

SEQ ID NO: 11372 - RNA, 83 nt, synthetic construct
  source 1..83: mol_type = other RNA
ctggctttcccccaggtgtacatgttcctggtgaaatggcaggacctgtcggagaaggtggtctaccggcgcttcactgagat

SEQ ID NO: 11373 - RNA, 83 nt, synthetic construct
  source 1..83: mol_type = other RNA
ctggctttcccccaggtctacatgttcctggtgaaatggcaggacctgtcggagaaggtggtctaccggcgcttcacggagat

SEQ ID NO: 11374 - RNA, 83 nt, synthetic construct
  source 1..83: mol_type = other RNA
ctggctttcccccaggtctacatgttcctggtgaaatggcaggacctgtcggagaaggtggtctaccggcgcttcaccgagat

SEQ ID NO: 11375 - RNA, 83 nt, synthetic construct
  source 1..83: mol_type = other RNA
ctggctttcccccaggtttacatgttcctggtgaaatggcaggacctgtcggagaaggtggtctaccggcgcttcacggagat

SEQ ID NO: 11376 - RNA, 83 nt, synthetic construct
  source 1..83: mol_type = other RNA
ctggctttcccccaggtctacatgttcctggtgaaatggcaggacctgtcggagaaggtggtctaccggcgcttcacagagat

SEQ ID NO: 11377 - RNA, 83 nt, synthetic construct
  source 1..83: mol_type = other RNA
ctggctttcccccaggtatacatgttcctggtgaaatggcaggacctgtcggagaaggtggtctaccggcgcttcacggagat

SEQ ID NO: 11378 - RNA, 83 nt, synthetic construct
  source 1..83: mol_type = other RNA
ctggctttcccccaggtatacatgttcctggtgaaatggcaggacctgtcggagaaggtggtctaccggcgcttcaccgagat

SEQ ID NO: 11379 - RNA, 83 nt, synthetic construct
  source 1..83: mol_type = other RNA
ctggctttcccccaggtatacatgttcctggtgaaatggcaggacctgtcggagaaggtggtctaccggcgcttcactgagat

SEQ ID NO: 11380 - RNA, 83 nt, synthetic construct
  source 1..83: mol_type = other RNA
ctggctttcccccaggtctacatgttcctggtgaaatggcaggacctgtcggagaaggtggtctaccggcgcttcactgagat

SEQ ID NO: 11381 - RNA, 84 nt, synthetic construct
  source 1..84: mol_type = other RNA
tctggctttcccccaggtgtacatgttcctggtgaaatggcaggacctgtcggagaaggtggtctaccggcgcttcactgagat

SEQ ID NO: 11382 - RNA, 84 nt, synthetic construct
  source 1..84: mol_type = other RNA
tctggctttcccccaggtctacatgttcctggtgaaatggcaggacctgtcggagaaggtggtctaccggcgcttcacagagat

SEQ ID NO: 11383 - RNA, 84 nt, synthetic construct
  source 1..84: mol_type = other RNA
tctggctttcccccaggtgtacatgttcctggtgaaatggcaggacctgtcggagaaggtggtctaccggcgcttcaccgagat

SEQ ID NO: 11384 - RNA, 84 nt, synthetic construct
  source 1..84: mol_type = other RNA
tctggctttcccccaggtctacatgttcctggtgaaatggcaggacctgtcggagaaggtggtctaccggcgcttcactgagat

SEQ ID NO: 11385 - RNA, 84 nt, synthetic construct
  source 1..84: mol_type = other RNA
tctggctttcccccaggtctacatgttcctggtgaaatggcaggacctgtcggagaaggtggtctaccggcgcttcacggagat

SEQ ID NO: 11386 - RNA, 84 nt, synthetic construct
  source 1..84: mol_type = other RNA
tctggctttcccccaggtctacatgttcctggtgaaatggcaggacctgtcggagaaggtggtctaccggcgcttcaccgagat

SEQ ID NO: 11387 - RNA, 84 nt, synthetic construct
  source 1..84: mol_type = other RNA
tctggctttcccccaggtatacatgttcctggtgaaatggcaggacctgtcggagaaggtggtctaccggcgcttcactgagat

SEQ ID NO: 11388 - RNA, 84 nt, synthetic construct
  source 1..84: mol_type = other RNA
tctggctttcccccaggtatacatgttcctggtgaaatggcaggacctgtcggagaaggtggtctaccggcgcttcacggagat

SEQ ID NO: 11389 - RNA, 84 nt, synthetic construct
  source 1..84: mol_type = other RNA
tctggctttcccccaggtatacatgttcctggtgaaatggcaggacctgtcggagaaggtggtctaccggcgcttcaccgagat

SEQ ID NO: 11390 - RNA, 84 nt, synthetic construct
  source 1..84: mol_type = other RNA
tctggctttcccccaggtatacatgttcctggtgaaatggcaggacctgtcggagaaggtggtctaccggcgcttcacagagat

SEQ ID NO: 11391 - RNA, 84 nt, synthetic construct
  source 1..84: mol_type = other RNA
tctggctttcccccaggtgtacatgttcctggtgaaatggcaggacctgtcggagaaggtggtctaccggcgcttcacagagat

SEQ ID NO: 11392 - RNA, 84 nt, synthetic construct
  source 1..84: mol_type = other RNA
tctggctttcccccaggtttacatgttcctggtgaaatggcaggacctgtcggagaaggtggtctaccggcgcttcacagagat

SEQ ID NO: 11393 - RNA, 84 nt, synthetic construct
  source 1..84: mol_type = other RNA
tctggctttcccccaggtttacatgttcctggtgaaatggcaggacctgtcggagaaggtggtctaccggcgcttcaccgagat

SEQ ID NO: 11394 - RNA, 84 nt, synthetic construct
  source 1..84: mol_type = other RNA
tctggctttcccccaggtgtacatgttcctggtgaaatggcaggacctgtcggagaaggtggtctaccggcgcttcacggagat

SEQ ID NO: 11395 - RNA, 84 nt, synthetic construct
  source 1..84: mol_type = other RNA
tctggctttcccccaggtttacatgttcctggtgaaatggcaggacctgtcggagaaggtggtctaccggcgcttcactgagat

SEQ ID NO: 11396 - RNA, 84 nt, synthetic construct
  source 1..84: mol_type = other RNA
tctggctttcccccaggtttacatgttcctggtgaaatggcaggacctgtcggagaaggtggtctaccggcgcttcacggagat

SEQ ID NO: 11397 - RNA, 85 nt, synthetic construct
  source 1..85: mol_type = other RNA
ctctggctttcccccaggtttacatgttcctggtgaaatggcaggacctgtcggagaaggtggtctaccggcgcttcactgagat

SEQ ID NO: 11398 - RNA, 85 nt, synthetic construct
  source 1..85: mol_type = other RNA
ctctggctttcccccaggtctacatgttcctggtgaaatggcaggacctgtcggagaaggtggtctaccggcgcttcacggagat

SEQ ID NO: 11399 - RNA, 85 nt, synthetic construct
  source 1..85: mol_type = other RNA
ctctggctttcccccaggtctacatgttcctggtgaaatggcaggacctgtcggagaaggtggtctaccggcgcttcactgagat

SEQ ID NO: 11400 - RNA, 85 nt, synthetic construct
  source 1..85: mol_type = other RNA
ctctggctttcccccaggtctacatgttcctggtgaaatggcaggacctgtcggagaaggtggtctaccggcgcttcaccgagat

SEQ ID NO: 11401 - RNA, 85 nt, synthetic construct
  source 1..85: mol_type = other RNA
ctctggctttcccccaggtctacatgttcctggtgaaatggcaggacctgtcggagaaggtggtctaccggcgcttcacagagat

SEQ ID NO: 11402 - RNA, 85 nt, synthetic construct
  source 1..85: mol_type = other RNA
ctctggctttcccccaggtatacatgttcctggtgaaatggcaggacctgtcggagaaggtggtctaccggcgcttcactgagat

SEQ ID NO: 11403 - RNA, 85 nt, synthetic construct
  source 1..85: mol_type = other RNA
ctctggctttcccccaggtatacatgttcctggtgaaatggcaggacctgtcggagaaggtggtctaccggcgcttcacggagat

SEQ ID NO: 11404 - RNA, 85 nt, synthetic construct
  source 1..85: mol_type = other RNA
ctctggctttcccccaggtatacatgttcctggtgaaatggcaggacctgtcggagaaggtggtctaccggcgcttcacagagat

SEQ ID NO: 11405 - RNA, 85 nt, synthetic construct
  source 1..85: mol_type = other RNA
ctctggctttcccccaggtttacatgttcctggtgaaatggcaggacctgtcggagaaggtggtctaccggcgcttcacggagat

SEQ ID NO: 11406 - RNA, 85 nt, synthetic construct
  source 1..85: mol_type = other RNA
ctctggctttcccccaggtttacatgttcctggtgaaatggcaggacctgtcggagaaggtggtctaccggcgcttcaccgagat

SEQ ID NO: 11407 - RNA, 85 nt, synthetic construct
  source 1..85: mol_type = other RNA
ctctggctttcccccaggtgtacatgttcctggtgaaatggcaggacctgtcggagaaggtggtctaccggcgcttcaccgagat

SEQ ID NO: 11408 - RNA, 85 nt, synthetic construct
  source 1..85: mol_type = other RNA
ctctggctttcccccaggtgtacatgttcctggtgaaatggcaggacctgtcggagaaggtggtctaccggcgcttcacggagat

SEQ ID NO: 11409 - RNA, 85 nt, synthetic construct
  source 1..85: mol_type = other RNA
ctctggctttcccccaggtgtacatgttcctggtgaaatggcaggacctgtcggagaaggtggtctaccggcgcttcacagagat

SEQ ID NO: 11410 - RNA, 85 nt, synthetic construct
  source 1..85: mol_type = other RNA
ctctggctttcccccaggtttacatgttcctggtgaaatggcaggacctgtcggagaaggtggtctaccggcgcttcacagagat

SEQ ID NO: 11411 - RNA, 85 nt, synthetic construct
  source 1..85: mol_type = other RNA
ctctggctttcccccaggtatacatgttcctggtgaaatggcaggacctgtcggagaaggtggtctaccggcgcttcaccgagat

SEQ ID NO: 11412 - RNA, 85 nt, synthetic construct
  source 1..85: mol_type = other RNA
ctctggctttcccccaggtgtacatgttcctggtgaaatggcaggacctgtcggagaaggtggtctaccggcgcttcactgagat

SEQ ID NO: 11413 - RNA, 86 nt, synthetic construct
  source 1..86: mol_type = other RNA
actctggctttcccccaggtgtacatgttcctggtgaaatggcaggacctgtcggagaaggtggtctaccggcgcttcaccgagat

SEQ ID NO: 11414 - RNA, 86 nt, synthetic construct
  source 1..86: mol_type = other RNA
actctggctttcccccaggtgtacatgttcctggtgaaatggcaggacctgtcggagaaggtggtctaccggcgcttcacggagat

SEQ ID NO: 11415 - RNA, 86 nt, synthetic construct
  source 1..86: mol_type = other RNA
actctggctttcccccaggtgtacatgttcctggtgaaatggcaggacctgtcggagaaggtggtctaccggcgcttcactgagat

SEQ ID NO: 11416 - RNA, 86 nt, synthetic construct
  source 1..86: mol_type = other RNA
actctggctttcccccaggtttacatgttcctggtgaaatggcaggacctgtcggagaaggtggtctaccggcgcttcactgagat

SEQ ID NO: 11417 - RNA, 86 nt, synthetic construct
  source 1..86: mol_type = other RNA
actctggctttcccccaggtttacatgttcctggtgaaatggcaggacctgtcggagaaggtggtctaccggcgcttcaccgagat

SEQ ID NO: 11418 - RNA, 86 nt, synthetic construct
  source 1..86: mol_type = other RNA
actctggctttcccccaggtctacatgttcctggtgaaatggcaggacctgtcggagaaggtggtctaccggcgcttcactgagat

SEQ ID NO: 11419 - RNA, 86 nt, synthetic construct
  source 1..86: mol_type = other RNA
actctggctttcccccaggtctacatgttcctggtgaaatggcaggacctgtcggagaaggtggtctaccggcgcttcacggagat

SEQ ID NO: 11420 - RNA, 86 nt, synthetic construct
  source 1..86: mol_type = other RNA
actctggctttcccccaggtctacatgttcctggtgaaatggcaggacctgtcggagaaggtggtctaccggcgcttcaccgagat

SEQ ID NO: 11421 - RNA, 86 nt, synthetic construct
  source 1..86: mol_type = other RNA
actctggctttcccccaggtatacatgttcctggtgaaatggcaggacctgtcggagaaggtggtctaccggcgcttcactgagat

SEQ ID NO: 11422 - RNA, 86 nt, synthetic construct
  source 1..86: mol_type = other RNA
actctggctttcccccaggtttacatgttcctggtgaaatggcaggacctgtcggagaaggtggtctaccggcgcttcacagagat

SEQ ID NO: 11423 - RNA, 86 nt, synthetic construct
  source 1..86: mol_type = other RNA
actctggctttcccccaggtttacatgttcctggtgaaatggcaggacctgtcggagaaggtggtctaccggcgcttcacggagat

SEQ ID NO: 11424 - RNA, 86 nt, synthetic construct
  source 1..86: mol_type = other RNA
actctggctttcccccaggtctacatgttcctggtgaaatggcaggacctgtcggagaaggtggtctaccggcgcttcacagagat

SEQ ID NO: 11425 - RNA, 86 nt, synthetic construct
  source 1..86: mol_type = other RNA
actctggctttcccccaggtgtacatgttcctggtgaaatggcaggacctgtcggagaaggtggtctaccggcgcttcacagagat

SEQ ID NO: 11426 - RNA, 86 nt, synthetic construct
  source 1..86: mol_type = other RNA
actctggctttcccccaggtatacatgttcctggtgaaatggcaggacctgtcggagaaggtggtctaccggcgcttcacagagat

SEQ ID NO: 11427 - RNA, 86 nt, synthetic construct
  source 1..86: mol_type = other RNA
actctggctttcccccaggtatacatgttcctggtgaaatggcaggacctgtcggagaaggtggtctaccggcgcttcaccgagat

SEQ ID NO: 11428 - RNA, 86 nt, synthetic construct
  source 1..86: mol_type = other RNA
actctggctttcccccaggtatacatgttcctggtgaaatggcaggacctgtcggagaaggtggtctaccggcgcttcacggagat

SEQ ID NO: 11429 - RNA, 87 nt, synthetic construct
  source 1..87: mol_type = other RNA
gactctggctttcccccaggtttacatgttcctggtgaaatggcaggacctgtcggagaaggtggtctaccggcgcttcactgagat

SEQ ID NO: 11430 - RNA, 87 nt, synthetic construct
  source 1..87: mol_type = other RNA
gactctggctttcccccaggtgtacatgttcctggtgaaatggcaggacctgtcggagaaggtggtctaccggcgcttcacagagat

SEQ ID NO: 11431 - RNA, 87 nt, synthetic construct
  source 1..87: mol_type = other RNA
gactctggctttcccccaggtttacatgttcctggtgaaatggcaggacctgtcggagaaggtggtctaccggcgcttcacggagat

SEQ ID NO: 11432 - RNA, 87 nt, synthetic construct
  source 1..87: mol_type = other RNA
gactctggctttcccccaggtttacatgttcctggtgaaatggcaggacctgtcggagaaggtggtctaccggcgcttcaccgagat

SEQ ID NO: 11433 - RNA, 87 nt, synthetic construct
  source 1..87: mol_type = other RNA
gactctggctttcccccaggtttacatgttcctggtgaaatggcaggacctgtcggagaaggtggtctaccggcgcttcacagagat

SEQ ID NO: 11434 - RNA, 87 nt, synthetic construct
  source 1..87: mol_type = other RNA
gactctggctttcccccaggtgtacatgttcctggtgaaatggcaggacctgtcggagaaggtggtctaccggcgcttcactgagat

SEQ ID NO: 11435 - RNA, 87 nt, synthetic construct
  source 1..87: mol_type = other RNA
gactctggctttcccccaggtatacatgttcctggtgaaatggcaggacctgtcggagaaggtggtctaccggcgcttcacagagat

SEQ ID NO: 11436 - RNA, 87 nt, synthetic construct
  source 1..87: mol_type = other RNA
gactctggctttcccccaggtatacatgttcctggtgaaatggcaggacctgtcggagaaggtggtctaccggcgcttcactgagat

SEQ ID NO: 11437 - RNA, 87 nt, synthetic construct
  source 1..87: mol_type = other RNA
gactctggctttcccccaggtgtacatgttcctggtgaaatggcaggacctgtcggagaaggtggtctaccggcgcttcaccgagat

SEQ ID NO: 11438 - RNA, 87 nt, synthetic construct
  source 1..87: mol_type = other RNA
gactctggctttcccccaggtgtacatgttcctggtgaaatggcaggacctgtcggagaaggtggtctaccggcgcttcacggagat

SEQ ID NO: 11439 - RNA, 87 nt, synthetic construct
  source 1..87: mol_type = other RNA
gactctggctttcccccaggtctacatgttcctggtgaaatggcaggacctgtcggagaaggtggtctaccggcgcttcactgagat

SEQ ID NO: 11440 - RNA, 87 nt, synthetic construct
  source 1..87: mol_type = other RNA
gactctggctttcccccaggtctacatgttcctggtgaaatggcaggacctgtcggagaaggtggtctaccggcgcttcacggagat

SEQ ID NO: 11441 - RNA, 87 nt, synthetic construct
  source 1..87: mol_type = other RNA
gactctggctttcccccaggtctacatgttcctggtgaaatggcaggacctgtcggagaaggtggtctaccggcgcttcaccgagat

SEQ ID NO: 11442 - RNA, 87 nt, synthetic construct
  source 1..87: mol_type = other RNA
gactctggctttcccccaggtctacatgttcctggtgaaatggcaggacctgtcggagaaggtggtctaccggcgcttcacagagat

SEQ ID NO: 11443 - RNA, 87 nt, synthetic construct
  source 1..87: mol_type = other RNA
gactctggctttcccccaggtatacatgttcctggtgaaatggcaggacctgtcggagaaggtggtctaccggcgcttcacggagat

SEQ ID NO: 11444 - RNA, 87 nt, synthetic construct
  source 1..87: mol_type = other RNA
gactctggctttcccccaggtatacatgttcctggtgaaatggcaggacctgtcggagaaggtggtctaccggcgcttcaccgagat

SEQ ID NO: 11445 - RNA, 88 nt, synthetic construct
  source 1..88: mol_type = other RNA
cgactctggctttcccccaggtctacatgttcctggtgaaatggcaggacctgtcggagaaggtggtctaccggcgcttcacggagat

SEQ ID NO: 11446 - RNA, 88 nt, synthetic construct
  source 1..88: mol_type = other RNA
cgactctggctttcccccaggtctacatgttcctggtgaaatggcaggacctgtcggagaaggtggtctaccggcgcttcactgagat

SEQ ID NO: 11447 - RNA, 88 nt, synthetic construct
  source 1..88: mol_type = other RNA
cgactctggctttcccccaggtatacatgttcctggtgaaatggcaggacctgtcggagaaggtggtctaccggcgcttcaccgagat

SEQ ID NO: 11448 - RNA, 88 nt, synthetic construct
  source 1..88: mol_type = other RNA
cgactctggctttcccccaggtttacatgttcctggtgaaatggcaggacctgtcggagaaggtggtctaccggcgcttcacagagat

SEQ ID NO: 11449 - RNA, 88 nt, synthetic construct
  source 1..88: mol_type = other RNA
cgactctggctttcccccaggtttacatgttcctggtgaaatggcaggacctgtcggagaaggtggtctaccggcgcttcacggagat

SEQ ID NO: 11450 - RNA, 88 nt, synthetic construct
  source 1..88: mol_type = other RNA
cgactctggctttcccccaggtctacatgttcctggtgaaatggcaggacctgtcggagaaggtggtctaccggcgcttcacagagat

SEQ ID NO: 11451 - RNA, 88 nt, synthetic construct
  source 1..88: mol_type = other RNA
cgactctggctttcccccaggtttacatgttcctggtgaaatggcaggacctgtcggagaaggtggtctaccggcgcttcaccgagat

SEQ ID NO: 11452 - RNA, 88 nt, synthetic construct
  source 1..88: mol_type = other RNA
cgactctggctttcccccaggtatacatgttcctggtgaaatggcaggacctgtcggagaaggtggtctaccggcgcttcacagagat

SEQ ID NO: 11453 - RNA, 88 nt, synthetic construct
  source 1..88: mol_type = other RNA
cgactctggctttcccccaggtgtacatgttcctggtgaaatggcaggacctgtcggagaaggtggtctaccggcgcttcacggagat

SEQ ID NO: 11454 - RNA, 88 nt, synthetic construct
  source 1..88: mol_type = other RNA
cgactctggctttcccccaggtatacatgttcctggtgaaatggcaggacctgtcggagaaggtggtctaccggcgcttcactgagat

SEQ ID NO: 11455 - RNA, 88 nt, synthetic construct
  source 1..88: mol_type = other RNA
cgactctggctttcccccaggtatacatgttcctggtgaaatggcaggacctgtcggagaaggtggtctaccggcgcttcacggagat

SEQ ID NO: 11456 - RNA, 88 nt, synthetic construct
  source 1..88: mol_type = other RNA
cgactctggctttcccccaggtgtacatgttcctggtgaaatggcaggacctgtcggagaaggtggtctaccggcgcttcaccgagat

SEQ ID NO: 11457 - RNA, 88 nt, synthetic construct
  source 1..88: mol_type = other RNA
cgactctggctttcccccaggtgtacatgttcctggtgaaatggcaggacctgtcggagaaggtggtctaccggcgcttcacagagat

SEQ ID NO: 11458 - RNA, 88 nt, synthetic construct
  source 1..88: mol_type = other RNA
cgactctggctttcccccaggtttacatgttcctggtgaaatggcaggacctgtcggagaaggtggtctaccggcgcttcactgagat

SEQ ID NO: 11459 - RNA, 88 nt, synthetic construct
  source 1..88: mol_type = other RNA
cgactctggctttcccccaggtgtacatgttcctggtgaaatggcaggacctgtcggagaaggtggtctaccggcgcttcactgagat

SEQ ID NO: 11460 - RNA, 88 nt, synthetic construct
  source 1..88: mol_type = other RNA
cgactctggctttcccccaggtctacatgttcctggtgaaatggcaggacctgtcggagaaggtggtctaccggcgcttcaccgagat

SEQ ID NO: 11461 - RNA, 89 nt, synthetic construct
  source 1..89: mol_type = other RNA
ccgactctggctttcccccaggtttacatgttcctggtgaaatggcaggacctgtcggagaaggtggtctaccggcgcttcactgagat

SEQ ID NO: 11462 - RNA, 89 nt, synthetic construct
  source 1..89: mol_type = other RNA
ccgactctggctttcccccaggtgtacatgttcctggtgaaatggcaggacctgtcggagaaggtggtctaccggcgcttcacagagat

SEQ ID NO: 11463 - RNA, 89 nt, synthetic construct
  source 1..89: mol_type = other RNA
ccgactctggctttcccccaggtttacatgttcctggtgaaatggcaggacctgtcggagaaggtggtctaccggcgcttcaccgagat

SEQ ID NO: 11464 - RNA, 89 nt, synthetic construct
  source 1..89: mol_type = other RNA
ccgactctggctttcccccaggtatacatgttcctggtgaaatggcaggacctgtcggagaaggtggtctaccggcgcttcaccgagat

SEQ ID NO: 11465 - RNA, 89 nt, synthetic construct
  source 1..89: mol_type = other RNA
ccgactctggctttcccccaggtgtacatgttcctggtgaaatggcaggacctgtcggagaaggtggtctaccggcgcttcacggagat

SEQ ID NO: 11466 - RNA, 89 nt, synthetic construct
  source 1..89: mol_type = other RNA
ccgactctggctttcccccaggtgtacatgttcctggtgaaatggcaggacctgtcggagaaggtggtctaccggcgcttcactgagat

SEQ ID NO: 11467 - RNA, 89 nt, synthetic construct
  source 1..89: mol_type = other RNA
ccgactctggctttcccccaggtatacatgttcctggtgaaatggcaggacctgtcggagaaggtggtctaccggcgcttcacagagat

SEQ ID NO: 11468 - RNA, 89 nt, synthetic construct
  source 1..89: mol_type = other RNA
ccgactctggctttcccccaggtttacatgttcctggtgaaatggcaggacctgtcggagaaggtggtctaccggcgcttcacggagat

SEQ ID NO: 11469 - RNA, 89 nt, synthetic construct
  source 1..89: mol_type = other RNA
ccgactctggctttcccccaggtttacatgttcctggtgaaatggcaggacctgtcggagaaggtggtctaccggcgcttcacagagat

SEQ ID NO: 11470 - RNA, 89 nt, synthetic construct
  source 1..89: mol_type = other RNA
ccgactctggctttcccccaggtatacatgttcctggtgaaatggcaggacctgtcggagaaggtggtctaccggcgcttcacggagat

SEQ ID NO: 11471 - RNA, 89 nt, synthetic construct
  source 1..89: mol_type = other RNA
ccgactctggctttcccccaggtctacatgttcctggtgaaatggcaggacctgtcggagaaggtggtctaccggcgcttcacggagat

SEQ ID NO: 11472 - RNA, 89 nt, synthetic construct
  source 1..89: mol_type = other RNA
ccgactctggctttcccccaggtctacatgttcctggtgaaatggcaggacctgtcggagaaggtggtctaccggcgcttcacagagat

SEQ ID NO: 11473 - RNA, 89 nt, synthetic construct
  source 1..89: mol_type = other RNA
ccgactctggctttcccccaggtgtacatgttcctggtgaaatggcaggacctgtcggagaaggtggtctaccggcgcttcaccgagat

SEQ ID NO: 11474 - RNA, 89 nt, synthetic construct
  source 1..89: mol_type = other RNA
ccgactctggctttcccccaggtctacatgttcctggtgaaatggcaggacctgtcggagaaggtggtctaccggcgcttcaccgagat

SEQ ID NO: 11475 - RNA, 89 nt, synthetic construct
  source 1..89: mol_type = other RNA
ccgactctggctttcccccaggtatacatgttcctggtgaaatggcaggacctgtcggagaaggtggtctaccggcgcttcactgagat

SEQ ID NO: 11476 - RNA, 89 nt, synthetic construct
  source 1..89: mol_type = other RNA
ccgactctggctttcccccaggtctacatgttcctggtgaaatggcaggacctgtcggagaaggtggtctaccggcgcttcactgagat

SEQ ID NO: 11477 - RNA, 90 nt, synthetic construct
  source 1..90: mol_type = other RNA
cccgactctggctttcccccaggtatacatgttcctggtgaaatggcaggacctgtcggagaaggtggtctaccggcgcttcactgagat

SEQ ID NO: 11478 - RNA, 90 nt, synthetic construct
  source 1..90: mol_type = other RNA
cccgactctggctttcccccaggtttacatgttcctggtgaaatggcaggacctgtcggagaaggtggtctaccggcgcttcaccgagat

SEQ ID NO: 11479 - RNA, 90 nt, synthetic construct
  source 1..90: mol_type = other RNA
cccgactctggctttcccccaggtttacatgttcctggtgaaatggcaggacctgtcggagaaggtggtctaccggcgcttcacggagat

SEQ ID NO: 11480 - RNA, 90 nt, synthetic construct
  source 1..90: mol_type = other RNA
cccgactctggctttcccccaggtttacatgttcctggtgaaatggcaggacctgtcggagaaggtggtctaccggcgcttcactgagat

SEQ ID NO: 11481 - RNA, 90 nt, synthetic construct
  source 1..90: mol_type = other RNA
cccgactctggctttcccccaggtatacatgttcctggtgaaatggcaggacctgtcggagaaggtggtctaccggcgcttcacagagat

SEQ ID NO: 11482 - RNA, 90 nt, synthetic construct
  source 1..90: mol_type = other RNA
cccgactctggctttcccccaggtctacatgttcctggtgaaatggcaggacctgtcggagaaggtggtctaccggcgcttcactgagat

SEQ ID NO: 11483 - RNA, 90 nt, synthetic construct
  source 1..90: mol_type = other RNA
cccgactctggctttcccccaggtatacatgttcctggtgaaatggcaggacctgtcggagaaggtggtctaccggcgcttcacggagat

SEQ ID NO: 11484 - RNA, 90 nt, synthetic construct
  source 1..90: mol_type = other RNA
cccgactctggctttcccccaggtctacatgttcctggtgaaatggcaggacctgtcggagaaggtggtctaccggcgcttcaccgagat

SEQ ID NO: 11485 - RNA, 90 nt, synthetic construct
  source 1..90: mol_type = other RNA
cccgactctggctttcccccaggtctacatgttcctggtgaaatggcaggacctgtcggagaaggtggtctaccggcgcttcacagagat

SEQ ID NO: 11486 - RNA, 90 nt, synthetic construct
  source 1..90: mol_type = other RNA
cccgactctggctttcccccaggtctacatgttcctggtgaaatggcaggacctgtcggagaaggtggtctaccggcgcttcacggagat

SEQ ID NO: 11487 - RNA, 90 nt, synthetic construct
  source 1..90: mol_type = other RNA
cccgactctggctttcccccaggtatacatgttcctggtgaaatggcaggacctgtcggagaaggtggtctaccggcgcttcaccgagat

SEQ ID NO: 11488 - RNA, 90 nt, synthetic construct
  source 1..90: mol_type = other RNA
cccgactctggctttcccccaggtgtacatgttcctggtgaaatggcaggacctgtcggagaaggtggtctaccggcgcttcacggagat

SEQ ID NO: 11489 - RNA, 90 nt, synthetic construct
  source 1..90: mol_type = other RNA
cccgactctggctttcccccaggtgtacatgttcctggtgaaatggcaggacctgtcggagaaggtggtctaccggcgcttcaccgagat

SEQ ID NO: 11490 - RNA, 90 nt, synthetic construct
  source 1..90: mol_type = other RNA
cccgactctggctttcccccaggtgtacatgttcctggtgaaatggcaggacctgtcggagaaggtggtctaccggcgcttcacagagat

SEQ ID NO: 11491 - RNA, 90 nt, synthetic construct
  source 1..90: mol_type = other RNA
cccgactctggctttcccccaggtttacatgttcctggtgaaatggcaggacctgtcggagaaggtggtctaccggcgcttcacagagat

SEQ ID NO: 11492 - RNA, 90 nt, synthetic construct
  source 1..90: mol_type = other RNA
cccgactctggctttcccccaggtgtacatgttcctggtgaaatggcaggacctgtcggagaaggtggtctaccggcgcttcactgagat

SEQ ID NO: 11493 - RNA, 91 nt, synthetic construct
  source 1..91: mol_type = other RNA
ccccgactctggctttcccccaggtgtacatgttcctggtgaaatggcaggacctgtcggagaaggtggtctaccggcgcttcactgagat

SEQ ID NO: 11494 - RNA, 91 nt, synthetic construct
  source 1..91: mol_type = other RNA
ccccgactctggctttcccccaggtatacatgttcctggtgaaatggcaggacctgtcggagaaggtggtctaccggcgcttcaccgagat

SEQ ID NO: 11495 - RNA, 91 nt, synthetic construct
  source 1..91: mol_type = other RNA
ccccgactctggctttcccccaggtgtacatgttcctggtgaaatggcaggacctgtcggagaaggtggtctaccggcgcttcacagagat

SEQ ID NO: 11496 - RNA, 91 nt, synthetic construct
  source 1..91: mol_type = other RNA
ccccgactctggctttcccccaggtctacatgttcctggtgaaatggcaggacctgtcggagaaggtggtctaccggcgcttcactgagat

SEQ ID NO: 11497 - RNA, 91 nt, synthetic construct
  source 1..91: mol_type = other RNA
ccccgactctggctttcccccaggtctacatgttcctggtgaaatggcaggacctgtcggagaaggtggtctaccggcgcttcacggagat

SEQ ID NO: 11498 - RNA, 91 nt, synthetic construct
  source 1..91: mol_type = other RNA
ccccgactctggctttcccccaggtctacatgttcctggtgaaatggcaggacctgtcggagaaggtggtctaccggcgcttcaccgagat

SEQ ID NO: 11499 - RNA, 91 nt, synthetic construct
  source 1..91: mol_type = other RNA
ccccgactctggctttcccccaggtatacatgttcctggtgaaatggcaggacctgtcggagaaggtggtctaccggcgcttcacagagat

SEQ ID NO: 11500 - RNA, 91 nt, synthetic construct
  source 1..91: mol_type = other RNA
ccccgactctggctttcccccaggtatacatgttcctggtgaaatggcaggacctgtcggagaaggtggtctaccggcgcttcacggagat

SEQ ID NO: 11501 - RNA, 91 nt, synthetic construct
  source 1..91: mol_type = other RNA
ccccgactctggctttcccccaggtttacatgttcctggtgaaatggcaggacctgtcggagaaggtggtctaccggcgcttcaccgagat

SEQ ID NO: 11502 - RNA, 91 nt, synthetic construct
  source 1..91: mol_type = other RNA
ccccgactctggctttcccccaggtctacatgttcctggtgaaatggcaggacctgtcggagaaggtggtctaccggcgcttcacagagat

SEQ ID NO: 11503 - RNA, 91 nt, synthetic construct
  source 1..91: mol_type = other RNA
ccccgactctggctttcccccaggtatacatgttcctggtgaaatggcaggacctgtcggagaaggtggtctaccggcgcttcactgagat

SEQ ID NO: 11504 - RNA, 91 nt, synthetic construct
  source 1..91: mol_type = other RNA
ccccgactctggctttcccccaggtttacatgttcctggtgaaatggcaggacctgtcggagaaggtggtctaccggcgcttcactgagat

SEQ ID NO: 11505 - RNA, 91 nt, synthetic construct
  source 1..91: mol_type = other RNA
ccccgactctggctttcccccaggtgtacatgttcctggtgaaatggcaggacctgtcggagaaggtggtctaccggcgcttcacggagat

SEQ ID NO: 11506 - RNA, 91 nt, synthetic construct
  source 1..91: mol_type = other RNA
ccccgactctggctttcccccaggtgtacatgttcctggtgaaatggcaggacctgtcggagaaggtggtctaccggcgcttcaccgagat

SEQ ID NO: 11507 - RNA, 91 nt, synthetic construct
  source 1..91: mol_type = other RNA
ccccgactctggctttcccccaggtttacatgttcctggtgaaatggcaggacctgtcggagaaggtggtctaccggcgcttcacagagat

SEQ ID NO: 11508 - RNA, 91 nt, synthetic construct
  source 1..91: mol_type = other RNA
ccccgactctggctttcccccaggtttacatgttcctggtgaaatggcaggacctgtcggagaaggtggtctaccggcgcttcacggagat

SEQ ID NO: 11509 - RNA, 92 nt, synthetic construct
  source 1..92: mol_type = other RNA
cccccgactctggctttcccccaggtatacatgttcctggtgaaatggcaggacctgtcggagaaggtggtctaccggcgcttcacggagat

SEQ ID NO: 11510 - RNA, 92 nt, synthetic construct
  source 1..92: mol_type = other RNA
cccccgactctggctttcccccaggtttacatgttcctggtgaaatggcaggacctgtcggagaaggtggtctaccggcgcttcaccgagat

SEQ ID NO: 11511 - RNA, 92 nt, synthetic construct
  source 1..92: mol_type = other RNA
cccccgactctggctttcccccaggtctacatgttcctggtgaaatggcaggacctgtcggagaaggtggtctaccggcgcttcactgagat

SEQ ID NO: 11512 - RNA, 92 nt, synthetic construct
  source 1..92: mol_type = other RNA
cccccgactctggctttcccccaggtgtacatgttcctggtgaaatggcaggacctgtcggagaaggtggtctaccggcgcttcacagagat

SEQ ID NO: 11513 - RNA, 92 nt, synthetic construct
  source 1..92: mol_type = other RNA
cccccgactctggctttcccccaggtatacatgttcctggtgaaatggcaggacctgtcggagaaggtggtctaccggcgcttcacagagat

SEQ ID NO: 11514 - RNA, 92 nt, synthetic construct
  source 1..92: mol_type = other RNA
cccccgactctggctttcccccaggtatacatgttcctggtgaaatggcaggacctgtcggagaaggtggtctaccggcgcttcaccgagat

SEQ ID NO: 11515 - RNA, 92 nt, synthetic construct
  source 1..92: mol_type = other RNA
cccccgactctggctttcccccaggtctacatgttcctggtgaaatggcaggacctgtcggagaaggtggtctaccggcgcttcacagagat

SEQ ID NO: 11516 - RNA, 92 nt, synthetic construct
  source 1..92: mol_type = other RNA
cccccgactctggctttcccccaggtctacatgttcctggtgaaatggcaggacctgtcggagaaggtggtctaccggcgcttcaccgagat

SEQ ID NO: 11517 - RNA, 92 nt, synthetic construct
  source 1..92: mol_type = other RNA
cccccgactctggctttcccccaggtgtacatgttcctggtgaaatggcaggacctgtcggagaaggtggtctaccggcgcttcacggagat

SEQ ID NO: 11518 - RNA, 92 nt, synthetic construct
  source 1..92: mol_type = other RNA
cccccgactctggctttcccccaggtgtacatgttcctggtgaaatggcaggacctgtcggagaaggtggtctaccggcgcttcaccgagat

SEQ ID NO: 11519 - RNA, 92 nt, synthetic construct
  source 1..92: mol_type = other RNA
cccccgactctggctttcccccaggtgtacatgttcctggtgaaatggcaggacctgtcggagaaggtggtctaccggcgcttcactgagat

SEQ ID NO: 11520 - RNA, 92 nt, synthetic construct
  source 1..92: mol_type = other RNA
cccccgactctggctttcccccaggtttacatgttcctggtgaaatggcaggacctgtcggagaaggtggtctaccggcgcttcacagagat

SEQ ID NO: 11521 - RNA, 92 nt, synthetic construct
  source 1..92: mol_type = other RNA
cccccgactctggctttcccccaggtttacatgttcctggtgaaatggcaggacctgtcggagaaggtggtctaccggcgcttcacggagat

SEQ ID NO: 11522 - RNA, 92 nt, synthetic construct
  source 1..92: mol_type = other RNA
cccccgactctggctttcccccaggtttacatgttcctggtgaaatggcaggacctgtcggagaaggtggtctaccggcgcttcactgagat

SEQ ID NO: 11523 - RNA, 92 nt, synthetic construct
  source 1..92: mol_type = other RNA
cccccgactctggctttcccccaggtctacatgttcctggtgaaatggcaggacctgtcggagaaggtggtctaccggcgcttcacggagat

SEQ ID NO: 11524 - RNA, 92 nt, synthetic construct
  source 1..92: mol_type = other RNA
cccccgactctggctttcccccaggtatacatgttcctggtgaaatggcaggacctgtcggagaaggtggtctaccggcgcttcactgagat

SEQ ID NO: 11525 - RNA, 93 nt, synthetic construct
  source 1..93: mol_type = other RNA
tcccccgactctggctttcccccaggtctacatgttcctggtgaaatggcaggacctgtcggagaaggtggtctaccggcgcttcacagagat

SEQ ID NO: 11526 - RNA, 93 nt, synthetic construct
  source 1..93: mol_type = other RNA
tcccccgactctggctttcccccaggtttacatgttcctggtgaaatggcaggacctgtcggagaaggtggtctaccggcgcttcactgagat

SEQ ID NO: 11527 - RNA, 93 nt, synthetic construct
  source 1..93: mol_type = other RNA
tcccccgactctggctttcccccaggtgtacatgttcctggtgaaatggcaggacctgtcggagaaggtggtctaccggcgcttcacggagat

SEQ ID NO: 11528 - RNA, 93 nt, synthetic construct
  source 1..93: mol_type = other RNA
tcccccgactctggctttcccccaggtgtacatgttcctggtgaaatggcaggacctgtcggagaaggtggtctaccggcgcttcaccgagat

SEQ ID NO: 11529 - RNA, 93 nt, synthetic construct
  source 1..93: mol_type = other RNA
tcccccgactctggctttcccccaggtgtacatgttcctggtgaaatggcaggacctgtcggagaaggtggtctaccggcgcttcacagagat

SEQ ID NO: 11530 - RNA, 93 nt, synthetic construct
  source 1..93: mol_type = other RNA
tcccccgactctggctttcccccaggtgtacatgttcctggtgaaatggcaggacctgtcggagaaggtggtctaccggcgcttcactgagat

SEQ ID NO: 11531 - RNA, 93 nt, synthetic construct
  source 1..93: mol_type = other RNA
tcccccgactctggctttcccccaggtttacatgttcctggtgaaatggcaggacctgtcggagaaggtggtctaccggcgcttcacagagat

SEQ ID NO: 11532 - RNA, 93 nt, synthetic construct
  source 1..93: mol_type = other RNA
tcccccgactctggctttcccccaggtttacatgttcctggtgaaatggcaggacctgtcggagaaggtggtctaccggcgcttcaccgagat

SEQ ID NO: 11533 - RNA, 93 nt, synthetic construct
  source 1..93: mol_type = other RNA
tcccccgactctggctttcccccaggtttacatgttcctggtgaaatggcaggacctgtcggagaaggtggtctaccggcgcttcacggagat

SEQ ID NO: 11534 - RNA, 93 nt, synthetic construct
  source 1..93: mol_type = other RNA
tcccccgactctggctttcccccaggtctacatgttcctggtgaaatggcaggacctgtcggagaaggtggtctaccggcgcttcacggagat

SEQ ID NO: 11535 - RNA, 93 nt, synthetic construct
  source 1..93: mol_type = other RNA
tcccccgactctggctttcccccaggtatacatgttcctggtgaaatggcaggacctgtcggagaaggtggtctaccggcgcttcacagagat

SEQ ID NO: 11536 - RNA, 93 nt, synthetic construct
  source 1..93: mol_type = other RNA
tcccccgactctggctttcccccaggtatacatgttcctggtgaaatggcaggacctgtcggagaaggtggtctaccggcgcttcaccgagat

SEQ ID NO: 11537 - RNA, 93 nt, synthetic construct
  source 1..93: mol_type = other RNA
tcccccgactctggctttcccccaggtatacatgttcctggtgaaatggcaggacctgtcggagaaggtggtctaccggcgcttcacggagat

SEQ ID NO: 11538 - RNA, 93 nt, synthetic construct
  source 1..93: mol_type = other RNA
tcccccgactctggctttcccccaggtatacatgttcctggtgaaatggcaggacctgtcggagaaggtggtctaccggcgcttcactgagat

SEQ ID NO: 11539 - RNA, 93 nt, synthetic construct
  source 1..93: mol_type = other RNA
tcccccgactctggctttcccccaggtctacatgttcctggtgaaatggcaggacctgtcggagaaggtggtctaccggcgcttcaccgagat

SEQ ID NO: 11540 - RNA, 93 nt, synthetic construct
  source 1..93: mol_type = other RNA
tcccccgactctggctttcccccaggtctacatgttcctggtgaaatggcaggacctgtcggagaaggtggtctaccggcgcttcactgagat

SEQ ID NO: 11541 - RNA, 94 nt, synthetic construct
  source 1..94: mol_type = other RNA
gtcccccgactctggctttcccccaggtgtacatgttcctggtgaaatggcaggacctgtcggagaaggtggtctaccggcgcttcacagagat

SEQ ID NO: 11542 - RNA, 94 nt, synthetic construct
  source 1..94: mol_type = other RNA
gtcccccgactctggctttcccccaggtgtacatgttcctggtgaaatggcaggacctgtcggagaaggtggtctaccggcgcttcaccgagat

SEQ ID NO: 11543 - RNA, 94 nt, synthetic construct
  source 1..94: mol_type = other RNA
gtcccccgactctggctttcccccaggtttacatgttcctggtgaaatggcaggacctgtcggagaaggtggtctaccggcgcttcaccgagat

SEQ ID NO: 11544 - RNA, 94 nt, synthetic construct
  source 1..94: mol_type = other RNA
gtcccccgactctggctttcccccaggtttacatgttcctggtgaaatggcaggacctgtcggagaaggtggtctaccggcgcttcacagagat

SEQ ID NO: 11545 - RNA, 94 nt, synthetic construct
  source 1..94: mol_type = other RNA
gtcccccgactctggctttcccccaggtttacatgttcctggtgaaatggcaggacctgtcggagaaggtggtctaccggcgcttcactgagat

SEQ ID NO: 11546 - RNA, 94 nt, synthetic construct
  source 1..94: mol_type = other RNA
gtcccccgactctggctttcccccaggtctacatgttcctggtgaaatggcaggacctgtcggagaaggtggtctaccggcgcttcactgagat

SEQ ID NO: 11547 - RNA, 94 nt, synthetic construct
  source 1..94: mol_type = other RNA
gtcccccgactctggctttcccccaggtatacatgttcctggtgaaatggcaggacctgtcggagaaggtggtctaccggcgcttcacagagat

SEQ ID NO: 11548 - RNA, 94 nt, synthetic construct
  source 1..94: mol_type = other RNA
gtcccccgactctggctttcccccaggtatacatgttcctggtgaaatggcaggacctgtcggagaaggtggtctaccggcgcttcaccgagat

SEQ ID NO: 11549 - RNA, 94 nt, synthetic construct
  source 1..94: mol_type = other RNA
gtcccccgactctggctttcccccaggtttacatgttcctggtgaaatggcaggacctgtcggagaaggtggtctaccggcgcttcacggagat

SEQ ID NO: 11550 - RNA, 94 nt, synthetic construct
  source 1..94: mol_type = other RNA
gtcccccgactctggctttcccccaggtatacatgttcctggtgaaatggcaggacctgtcggagaaggtggtctaccggcgcttcacggagat

SEQ ID NO: 11551 - RNA, 94 nt, synthetic construct
  source 1..94: mol_type = other RNA
gtcccccgactctggctttcccccaggtgtacatgttcctggtgaaatggcaggacctgtcggagaaggtggtctaccggcgcttcactgagat

SEQ ID NO: 11552 - RNA, 94 nt, synthetic construct
  source 1..94: mol_type = other RNA
gtcccccgactctggctttcccccaggtctacatgttcctggtgaaatggcaggacctgtcggagaaggtggtctaccggcgcttcacggagat

SEQ ID NO: 11553 - RNA, 94 nt, synthetic construct
  source 1..94: mol_type = other RNA
gtcccccgactctggctttcccccaggtatacatgttcctggtgaaatggcaggacctgtcggagaaggtggtctaccggcgcttcactgagat

SEQ ID NO: 11554 - RNA, 94 nt, synthetic construct
  source 1..94: mol_type = other RNA
gtcccccgactctggctttcccccaggtgtacatgttcctggtgaaatggcaggacctgtcggagaaggtggtctaccggcgcttcacggagat

SEQ ID NO: 11555 - RNA, 94 nt, synthetic construct
  source 1..94: mol_type = other RNA
gtcccccgactctggctttcccccaggtctacatgttcctggtgaaatggcaggacctgtcggagaaggtggtctaccggcgcttcacagagat

SEQ ID NO: 11556 - RNA, 94 nt, synthetic construct
  source 1..94: mol_type = other RNA
gtcccccgactctggctttcccccaggtctacatgttcctggtgaaatggcaggacctgtcggagaaggtggtctaccggcgcttcaccgagat

SEQ ID NO: 11557 - RNA, 95 nt, synthetic construct
  source 1..95: mol_type = other RNA
ggtcccccgactctggctttcccccaggtgtacatgttcctggtgaaatggcaggacctgtcggagaaggtggtctaccggcgcttcacggagat

SEQ ID NO: 11558 - RNA, 95 nt, synthetic construct
  source 1..95: mol_type = other RNA
ggtcccccgactctggctttcccccaggtctacatgttcctggtgaaatggcaggacctgtcggagaaggtggtctaccggcgcttcaccgagat

SEQ ID NO: 11559 - RNA, 95 nt, synthetic construct
  source 1..95: mol_type = other RNA
ggtcccccgactctggctttcccccaggtatacatgttcctggtgaaatggcaggacctgtcggagaaggtggtctaccggcgcttcacagagat

SEQ ID NO: 11560 - RNA, 95 nt, synthetic construct
  source 1..95: mol_type = other RNA
ggtcccccgactctggctttcccccaggtatacatgttcctggtgaaatggcaggacctgtcggagaaggtggtctaccggcgcttcaccgagat

SEQ ID NO: 11561 - RNA, 95 nt, synthetic construct
  source 1..95: mol_type = other RNA
ggtcccccgactctggctttcccccaggtatacatgttcctggtgaaatggcaggacctgtcggagaaggtggtctaccggcgcttcacggagat

SEQ ID NO: 11562 - RNA, 95 nt, synthetic construct
  source 1..95: mol_type = other RNA
ggtcccccgactctggctttcccccaggtatacatgttcctggtgaaatggcaggacctgtcggagaaggtggtctaccggcgcttcactgagat

SEQ ID NO: 11563 - RNA, 95 nt, synthetic construct
  source 1..95: mol_type = other RNA
ggtcccccgactctggctttcccccaggtttacatgttcctggtgaaatggcaggacctgtcggagaaggtggtctaccggcgcttcacggagat

SEQ ID NO: 11564 - RNA, 95 nt, synthetic construct
  source 1..95: mol_type = other RNA
ggtcccccgactctggctttcccccaggtgtacatgttcctggtgaaatggcaggacctgtcggagaaggtggtctaccggcgcttcaccgagat

SEQ ID NO: 11565 - RNA, 95 nt, synthetic construct
  source 1..95: mol_type = other RNA
ggtcccccgactctggctttcccccaggtttacatgttcctggtgaaatggcaggacctgtcggagaaggtggtctaccggcgcttcaccgagat

SEQ ID NO: 11566 - RNA, 95 nt, synthetic construct
  source 1..95: mol_type = other RNA
ggtcccccgactctggctttcccccaggtttacatgttcctggtgaaatggcaggacctgtcggagaaggtggtctaccggcgcttcacagagat

SEQ ID NO: 11567 - RNA, 95 nt, synthetic construct
  source 1..95: mol_type = other RNA
ggtcccccgactctggctttcccccaggtgtacatgttcctggtgaaatggcaggacctgtcggagaaggtggtctaccggcgcttcactgagat

SEQ ID NO: 11568 - RNA, 95 nt, synthetic construct
  source 1..95: mol_type = other RNA
ggtcccccgactctggctttcccccaggtgtacatgttcctggtgaaatggcaggacctgtcggagaaggtggtctaccggcgcttcacagagat

SEQ ID NO: 11569 - RNA, 95 nt, synthetic construct
  source 1..95: mol_type = other RNA
ggtcccccgactctggctttcccccaggtctacatgttcctggtgaaatggcaggacctgtcggagaaggtggtctaccggcgcttcactgagat

SEQ ID NO: 11570 - RNA, 95 nt, synthetic construct
  source 1..95: mol_type = other RNA
ggtcccccgactctggctttcccccaggtttacatgttcctggtgaaatggcaggacctgtcggagaaggtggtctaccggcgcttcactgagat

SEQ ID NO: 11571 - RNA, 95 nt, synthetic construct
  source 1..95: mol_type = other RNA
ggtcccccgactctggctttcccccaggtctacatgttcctggtgaaatggcaggacctgtcggagaaggtggtctaccggcgcttcacggagat

SEQ ID NO: 11572 - RNA, 95 nt, synthetic construct
  source 1..95: mol_type = other RNA
ggtcccccgactctggctttcccccaggtctacatgttcctggtgaaatggcaggacctgtcggagaaggtggtctaccggcgcttcacagagat

SEQ ID NO: 11573 - RNA, 96 nt, synthetic construct
  source 1..96: mol_type = other RNA
gggtcccccgactctggctttcccccaggtttacatgttcctggtgaaatggcaggacctgtcggagaaggtggtctaccggcgcttcacggagat

SEQ ID NO: 11574 - RNA, 96 nt, synthetic construct
  source 1..96: mol_type = other RNA
gggtcccccgactctggctttcccccaggtgtacatgttcctggtgaaatggcaggacctgtcggagaaggtggtctaccggcgcttcactgagat

SEQ ID NO: 11575 - RNA, 96 nt, synthetic construct
  source 1..96: mol_type = other RNA
gggtcccccgactctggctttcccccaggtgtacatgttcctggtgaaatggcaggacctgtcggagaaggtggtctaccggcgcttcaccgagat

SEQ ID NO: 11576 - RNA, 96 nt, synthetic construct
  source 1..96: mol_type = other RNA
gggtcccccgactctggctttcccccaggtctacatgttcctggtgaaatggcaggacctgtcggagaaggtggtctaccggcgcttcaccgagat

SEQ ID NO: 11577 - RNA, 96 nt, synthetic construct
  source 1..96: mol_type = other RNA
gggtcccccgactctggctttcccccaggtatacatgttcctggtgaaatggcaggacctgtcggagaaggtggtctaccggcgcttcactgagat

SEQ ID NO: 11578 - RNA, 96 nt, synthetic construct
  source 1..96: mol_type = other RNA
gggtcccccgactctggctttcccccaggtttacatgttcctggtgaaatggcaggacctgtcggagaaggtggtctaccggcgcttcaccgagat

SEQ ID NO: 11579 - RNA, 96 nt, synthetic construct
  source 1..96: mol_type = other RNA
gggtcccccgactctggctttcccccaggtttacatgttcctggtgaaatggcaggacctgtcggagaaggtggtctaccggcgcttcactgagat

SEQ ID NO: 11580 - RNA, 96 nt, synthetic construct
  source 1..96: mol_type = other RNA
gggtcccccgactctggctttcccccaggtctacatgttcctggtgaaatggcaggacctgtcggagaaggtggtctaccggcgcttcacggagat

SEQ ID NO: 11581 - RNA, 96 nt, synthetic construct
  source 1..96: mol_type = other RNA
gggtcccccgactctggctttcccccaggtatacatgttcctggtgaaatggcaggacctgtcggagaaggtggtctaccggcgcttcacagagat

SEQ ID NO: 11582 - RNA, 96 nt, synthetic construct
  source 1..96: mol_type = other RNA
gggtcccccgactctggctttcccccaggtctacatgttcctggtgaaatggcaggacctgtcggagaaggtggtctaccggcgcttcactgagat

SEQ ID NO: 11583 - RNA, 96 nt, synthetic construct
  source 1..96: mol_type = other RNA
gggtcccccgactctggctttcccccaggtatacatgttcctggtgaaatggcaggacctgtcggagaaggtggtctaccggcgcttcacggagat

SEQ ID NO: 11584 - RNA, 96 nt, synthetic construct
  source 1..96: mol_type = other RNA
gggtcccccgactctggctttcccccaggtgtacatgttcctggtgaaatggcaggacctgtcggagaaggtggtctaccggcgcttcacagagat

SEQ ID NO: 11585 - RNA, 96 nt, synthetic construct
  source 1..96: mol_type = other RNA
gggtcccccgactctggctttcccccaggtctacatgttcctggtgaaatggcaggacctgtcggagaaggtggtctaccggcgcttcacagagat

SEQ ID NO: 11586 - RNA, 96 nt, synthetic construct
  source 1..96: mol_type = other RNA
gggtcccccgactctggctttcccccaggtttacatgttcctggtgaaatggcaggacctgtcggagaaggtggtctaccggcgcttcacagagat

SEQ ID NO: 11587 - RNA, 96 nt, synthetic construct
  source 1..96: mol_type = other RNA
gggtcccccgactctggctttcccccaggtgtacatgttcctggtgaaatggcaggacctgtcggagaaggtggtctaccggcgcttcacggagat

SEQ ID NO: 11588 - RNA, 96 nt, synthetic construct
  source 1..96: mol_type = other RNA
gggtcccccgactctggctttcccccaggtatacatgttcctggtgaaatggcaggacctgtcggagaaggtggtctaccggcgcttcaccgagat

SEQ ID NO: 11589 - RNA, 97 nt, synthetic construct
  source 1..97: mol_type = other RNA
ggggtcccccgactctggctttcccccaggtgtacatgttcctggtgaaatggcaggacctgtcggagaaggtggtctaccggcgcttcacggagat

SEQ ID NO: 11590 - RNA, 97 nt, synthetic construct
  source 1..97: mol_type = other RNA
ggggtcccccgactctggctttcccccaggtgtacatgttcctggtgaaatggcaggacctgtcggagaaggtggtctaccggcgcttcaccgagat

SEQ ID NO: 11591 - RNA, 97 nt, synthetic construct
  source 1..97: mol_type = other RNA
ggggtcccccgactctggctttcccccaggtttacatgttcctggtgaaatggcaggacctgtcggagaaggtggtctaccggcgcttcactgagat

SEQ ID NO: 11592 - RNA, 97 nt, synthetic construct
  source 1..97: mol_type = other RNA
ggggtcccccgactctggctttcccccaggtttacatgttcctggtgaaatggcaggacctgtcggagaaggtggtctaccggcgcttcacggagat

SEQ ID NO: 11593 - RNA, 97 nt, synthetic construct
  source 1..97: mol_type = other RNA
ggggtcccccgactctggctttcccccaggtttacatgttcctggtgaaatggcaggacctgtcggagaaggtggtctaccggcgcttcacagagat

SEQ ID NO: 11594 - RNA, 97 nt, synthetic construct
  source 1..97: mol_type = other RNA
ggggtcccccgactctggctttcccccaggtttacatgttcctggtgaaatggcaggacctgtcggagaaggtggtctaccggcgcttcaccgagat

SEQ ID NO: 11595 - RNA, 97 nt, synthetic construct
  source 1..97: mol_type = other RNA
ggggtcccccgactctggctttcccccaggtgtacatgttcctggtgaaatggcaggacctgtcggagaaggtggtctaccggcgcttcactgagat

SEQ ID NO: 11596 - RNA, 97 nt, synthetic construct
  source 1..97: mol_type = other RNA
ggggtcccccgactctggctttcccccaggtctacatgttcctggtgaaatggcaggacctgtcggagaaggtggtctaccggcgcttcacagagat

SEQ ID NO: 11597 - RNA, 97 nt, synthetic construct
  source 1..97: mol_type = other RNA
ggggtcccccgactctggctttcccccaggtgtacatgttcctggtgaaatggcaggacctgtcggagaaggtggtctaccggcgcttcacagagat

SEQ ID NO: 11598 - RNA, 97 nt, synthetic construct
  source 1..97: mol_type = other RNA
ggggtcccccgactctggctttcccccaggtatacatgttcctggtgaaatggcaggacctgtcggagaaggtggtctaccggcgcttcacagagat

SEQ ID NO: 11599 - RNA, 97 nt, synthetic construct
  source 1..97: mol_type = other RNA
ggggtcccccgactctggctttcccccaggtctacatgttcctggtgaaatggcaggacctgtcggagaaggtggtctaccggcgcttcacggagat

SEQ ID NO: 11600 - RNA, 97 nt, synthetic construct
  source 1..97: mol_type = other RNA
ggggtcccccgactctggctttcccccaggtctacatgttcctggtgaaatggcaggacctgtcggagaaggtggtctaccggcgcttcactgagat

SEQ ID NO: 11601 - RNA, 97 nt, synthetic construct
  source 1..97: mol_type = other RNA
ggggtcccccgactctggctttcccccaggtctacatgttcctggtgaaatggcaggacctgtcggagaaggtggtctaccggcgcttcaccgagat

SEQ ID NO: 11602 - RNA, 97 nt, synthetic construct
  source 1..97: mol_type = other RNA
ggggtcccccgactctggctttcccccaggtatacatgttcctggtgaaatggcaggacctgtcggagaaggtggtctaccggcgcttcaccgagat

SEQ ID NO: 11603 - RNA, 97 nt, synthetic construct
  source 1..97: mol_type = other RNA
ggggtcccccgactctggctttcccccaggtatacatgttcctggtgaaatggcaggacctgtcggagaaggtggtctaccggcgcttcactgagat

SEQ ID NO: 11604 - RNA, 97 nt, synthetic construct
  source 1..97: mol_type = other RNA
ggggtcccccgactctggctttcccccaggtatacatgttcctggtgaaatggcaggacctgtcggagaaggtggtctaccggcgcttcacggagat

SEQ ID NO: 11605 - RNA, 98 nt, synthetic construct
  source 1..98: mol_type = other RNA
tggggtcccccgactctggctttcccccaggtttacatgttcctggtgaaatggcaggacctgtcggagaaggtggtctaccggcgcttcacggagat

SEQ ID NO: 11606 - RNA, 98 nt, synthetic construct
  source 1..98: mol_type = other RNA
tggggtcccccgactctggctttcccccaggtctacatgttcctggtgaaatggcaggacctgtcggagaaggtggtctaccggcgcttcaccgagat

SEQ ID NO: 11607 - RNA, 98 nt, synthetic construct
  source 1..98: mol_type = other RNA
tggggtcccccgactctggctttcccccaggtctacatgttcctggtgaaatggcaggacctgtcggagaaggtggtctaccggcgcttcactgagat

SEQ ID NO: 11608 - RNA, 98 nt, synthetic construct
  source 1..98: mol_type = other RNA
tggggtcccccgactctggctttcccccaggtctacatgttcctggtgaaatggcaggacctgtcggagaaggtggtctaccggcgcttcacggagat

SEQ ID NO: 11609 - RNA, 98 nt, synthetic construct
  source 1..98: mol_type = other RNA
tggggtcccccgactctggctttcccccaggtttacatgttcctggtgaaatggcaggacctgtcggagaaggtggtctaccggcgcttcactgagat

SEQ ID NO: 11610 - RNA, 98 nt, synthetic construct
  source 1..98: mol_type = other RNA
tggggtcccccgactctggctttcccccaggtatacatgttcctggtgaaatggcaggacctgtcggagaaggtggtctaccggcgcttcacagagat

SEQ ID NO: 11611 - RNA, 98 nt, synthetic construct
  source 1..98: mol_type = other RNA
tggggtcccccgactctggctttcccccaggtatacatgttcctggtgaaatggcaggacctgtcggagaaggtggtctaccggcgcttcaccgagat

SEQ ID NO: 11612 - RNA, 98 nt, synthetic construct
  source 1..98: mol_type = other RNA
tggggtcccccgactctggctttcccccaggtatacatgttcctggtgaaatggcaggacctgtcggagaaggtggtctaccggcgcttcacggagat

SEQ ID NO: 11613 - RNA, 98 nt, synthetic construct
  source 1..98: mol_type = other RNA
tggggtcccccgactctggctttcccccaggtatacatgttcctggtgaaatggcaggacctgtcggagaaggtggtctaccggcgcttcactgagat

SEQ ID NO: 11614 - RNA, 98 nt, synthetic construct
  source 1..98: mol_type = other RNA
tggggtcccccgactctggctttcccccaggtgtacatgttcctggtgaaatggcaggacctgtcggagaaggtggtctaccggcgcttcacagagat

SEQ ID NO: 11615 - RNA, 98 nt, synthetic construct
  source 1..98: mol_type = other RNA
tggggtcccccgactctggctttcccccaggtgtacatgttcctggtgaaatggcaggacctgtcggagaaggtggtctaccggcgcttcaccgagat

SEQ ID NO: 11616 - RNA, 98 nt, synthetic construct
  source 1..98: mol_type = other RNA
tggggtcccccgactctggctttcccccaggtttacatgttcctggtgaaatggcaggacctgtcggagaaggtggtctaccggcgcttcaccgagat

SEQ ID NO: 11617 - RNA, 98 nt, synthetic construct
  source 1..98: mol_type = other RNA
tggggtcccccgactctggctttcccccaggtttacatgttcctggtgaaatggcaggacctgtcggagaaggtggtctaccggcgcttcacagagat

SEQ ID NO: 11618 - RNA, 98 nt, synthetic construct
  source 1..98: mol_type = other RNA
tggggtcccccgactctggctttcccccaggtgtacatgttcctggtgaaatggcaggacctgtcggagaaggtggtctaccggcgcttcactgagat

SEQ ID NO: 11619 - RNA, 98 nt, synthetic construct
  source 1..98: mol_type = other RNA
tggggtcccccgactctggctttcccccaggtgtacatgttcctggtgaaatggcaggacctgtcggagaaggtggtctaccggcgcttcacggagat

SEQ ID NO: 11620 - RNA, 98 nt, synthetic construct
  source 1..98: mol_type = other RNA
tggggtcccccgactctggctttcccccaggtctacatgttcctggtgaaatggcaggacctgtcggagaaggtggtctaccggcgcttcacagagat

SEQ ID NO: 11621 - RNA, 99 nt, synthetic construct
  source 1..99: mol_type = other RNA
atggggtcccccgactctggctttcccccaggtctacatgttcctggtgaaatggcaggacctgtcggagaaggtggtctaccggcgcttcacagagat

SEQ ID NO: 11622 - RNA, 99 nt, synthetic construct
  source 1..99: mol_type = other RNA
atggggtcccccgactctggctttcccccaggtgtacatgttcctggtgaaatggcaggacctgtcggagaaggtggtctaccggcgcttcacggagat

SEQ ID NO: 11623 - RNA, 99 nt, synthetic construct
  source 1..99: mol_type = other RNA
atggggtcccccgactctggctttcccccaggtatacatgttcctggtgaaatggcaggacctgtcggagaaggtggtctaccggcgcttcacagagat

SEQ ID NO: 11624 - RNA, 99 nt, synthetic construct
  source 1..99: mol_type = other RNA
atggggtcccccgactctggctttcccccaggtgtacatgttcctggtgaaatggcaggacctgtcggagaaggtggtctaccggcgcttcactgagat

SEQ ID NO: 11625 - RNA, 99 nt, synthetic construct
  source 1..99: mol_type = other RNA
atggggtcccccgactctggctttcccccaggtatacatgttcctggtgaaatggcaggacctgtcggagaaggtggtctaccggcgcttcaccgagat

SEQ ID NO: 11626 - RNA, 99 nt, synthetic construct
  source 1..99: mol_type = other RNA
atggggtcccccgactctggctttcccccaggtatacatgttcctggtgaaatggcaggacctgtcggagaaggtggtctaccggcgcttcacggagat

SEQ ID NO: 11627 - RNA, 99 nt, synthetic construct
  source 1..99: mol_type = other RNA
atggggtcccccgactctggctttcccccaggtgtacatgttcctggtgaaatggcaggacctgtcggagaaggtggtctaccggcgcttcacagagat

SEQ ID NO: 11628 - RNA, 99 nt, synthetic construct
  source 1..99: mol_type = other RNA
atggggtcccccgactctggctttcccccaggtatacatgttcctggtgaaatggcaggacctgtcggagaaggtggtctaccggcgcttcactgagat

SEQ ID NO: 11629 - RNA, 99 nt, synthetic construct
  source 1..99: mol_type = other RNA
atggggtcccccgactctggctttcccccaggtctacatgttcctggtgaaatggcaggacctgtcggagaaggtggtctaccggcgcttcacggagat

SEQ ID NO: 11630 - RNA, 99 nt, synthetic construct
  source 1..99: mol_type = other RNA
atggggtcccccgactctggctttcccccaggtttacatgttcctggtgaaatggcaggacctgtcggagaaggtggtctaccggcgcttcactgagat

SEQ ID NO: 11631 - RNA, 99 nt, synthetic construct
  source 1..99: mol_type = other RNA
atggggtcccccgactctggctttcccccaggtttacatgttcctggtgaaatggcaggacctgtcggagaaggtggtctaccggcgcttcacggagat

SEQ ID NO: 11632 - RNA, 99 nt, synthetic construct
  source 1..99: mol_type = other RNA
atggggtcccccgactctggctttcccccaggtttacatgttcctggtgaaatggcaggacctgtcggagaaggtggtctaccggcgcttcaccgagat

SEQ ID NO: 11633 - RNA, 99 nt, synthetic construct
  source 1..99: mol_type = other RNA
atggggtcccccgactctggctttcccccaggtctacatgttcctggtgaaatggcaggacctgtcggagaaggtggtctaccggcgcttcactgagat

SEQ ID NO: 11634 - RNA, 99 nt, synthetic construct
  source 1..99: mol_type = other RNA
atggggtcccccgactctggctttcccccaggtctacatgttcctggtgaaatggcaggacctgtcggagaaggtggtctaccggcgcttcaccgagat

SEQ ID NO: 11635 - RNA, 99 nt, synthetic construct
  source 1..99: mol_type = other RNA
atggggtcccccgactctggctttcccccaggtttacatgttcctggtgaaatggcaggacctgtcggagaaggtggtctaccggcgcttcacagagat

SEQ ID NO: 11636 - RNA, 99 nt, synthetic construct
  source 1..99: mol_type = other RNA
atggggtcccccgactctggctttcccccaggtgtacatgttcctggtgaaatggcaggacctgtcggagaaggtggtctaccggcgcttcaccgagat

SEQ ID NO: 11637 - RNA, 100 nt, synthetic construct
  source 1..100: mol_type = other RNA
aatggggtcccccgactctggctttcccccaggtctacatgttcctggtgaaatggcaggacctgtcggagaaggtggtctaccggcgcttcaccgagat

SEQ ID NO: 11638 - RNA, 100 nt, synthetic construct
  source 1..100: mol_type = other RNA
aatggggtcccccgactctggctttcccccaggtatacatgttcctggtgaaatggcaggacctgtcggagaaggtggtctaccggcgcttcactgagat

SEQ ID NO: 11639 - RNA, 100 nt, synthetic construct
  source 1..100: mol_type = other RNA
aatggggtcccccgactctggctttcccccaggtatacatgttcctggtgaaatggcaggacctgtcggagaaggtggtctaccggcgcttcacggagat

SEQ ID NO: 11640 - RNA, 100 nt, synthetic construct
  source 1..100: mol_type = other RNA
aatggggtcccccgactctggctttcccccaggtatacatgttcctggtgaaatggcaggacctgtcggagaaggtggtctaccggcgcttcaccgagat

SEQ ID NO: 11641 - RNA, 100 nt, synthetic construct
  source 1..100: mol_type = other RNA
aatggggtcccccgactctggctttcccccaggtctacatgttcctggtgaaatggcaggacctgtcggagaaggtggtctaccggcgcttcactgagat

SEQ ID NO: 11642 - RNA, 100 nt, synthetic construct
  source 1..100: mol_type = other RNA
aatggggtcccccgactctggctttcccccaggtctacatgttcctggtgaaatggcaggacctgtcggagaaggtggtctaccggcgcttcacggagat

SEQ ID NO: 11643 - RNA, 100 nt, synthetic construct
  source 1..100: mol_type = other RNA
aatggggtcccccgactctggctttcccccaggtctacatgttcctggtgaaatggcaggacctgtcggagaaggtggtctaccggcgcttcacagagat

SEQ ID NO: 11644 - RNA, 100 nt, synthetic construct
  source 1..100: mol_type = other RNA
aatggggtcccccgactctggctttcccccaggtgtacatgttcctggtgaaatggcaggacctgtcggagaaggtggtctaccggcgcttcaccgagat

SEQ ID NO: 11645 - RNA, 100 nt, synthetic construct
  source 1..100: mol_type = other RNA
aatggggtcccccgactctggctttcccccaggtgtacatgttcctggtgaaatggcaggacctgtcggagaaggtggtctaccggcgcttcacggagat

SEQ ID NO: 11646 - RNA, 100 nt, synthetic construct
  source 1..100: mol_type = other RNA
aatggggtcccccgactctggctttcccccaggtttacatgttcctggtgaaatggcaggacctgtcggagaaggtggtctaccggcgcttcactgagat

SEQ ID NO: 11647 - RNA, 100 nt, synthetic construct
  source 1..100: mol_type = other RNA
aatggggtcccccgactctggctttcccccaggtgtacatgttcctggtgaaatggcaggacctgtcggagaaggtggtctaccggcgcttcacagagat

SEQ ID NO: 11648 - RNA, 100 nt, synthetic construct
  source 1..100: mol_type = other RNA
aatggggtcccccgactctggctttcccccaggtatacatgttcctggtgaaatggcaggacctgtcggagaaggtggtctaccggcgcttcacagagat

SEQ ID NO: 11649 - RNA, 100 nt, synthetic construct
  source 1..100: mol_type = other RNA
aatggggtcccccgactctggctttcccccaggtttacatgttcctggtgaaatggcaggacctgtcggagaaggtggtctaccggcgcttcacggagat

SEQ ID NO: 11650 - RNA, 100 nt, synthetic construct
  source 1..100: mol_type = other RNA
aatggggtcccccgactctggctttcccccaggtttacatgttcctggtgaaatggcaggacctgtcggagaaggtggtctaccggcgcttcaccgagat

SEQ ID NO: 11651 - RNA, 100 nt, synthetic construct
  source 1..100: mol_type = other RNA
aatggggtcccccgactctggctttcccccaggtttacatgttcctggtgaaatggcaggacctgtcggagaaggtggtctaccggcgcttcacagagat

SEQ ID NO: 11652 - RNA, 100 nt, synthetic construct
  source 1..100: mol_type = other RNA
aatggggtcccccgactctggctttcccccaggtgtacatgttcctggtgaaatggcaggacctgtcggagaaggtggtctaccggcgcttcactgagat

SEQ ID NO: 11653 - RNA, 101 nt, synthetic construct
  source 1..101: mol_type = other RNA
gaatggggtcccccgactctggctttcccccaggtatacatgttcctggtgaaatggcaggacctgtcggagaaggtggtctaccggcgcttcaccgagat

SEQ ID NO: 11654 - RNA, 101 nt, synthetic construct
  source 1..101: mol_type = other RNA
gaatggggtcccccgactctggctttcccccaggtatacatgttcctggtgaaatggcaggacctgtcggagaaggtggtctaccggcgcttcacagagat

SEQ ID NO: 11655 - RNA, 101 nt, synthetic construct
  source 1..101: mol_type = other RNA
gaatggggtcccccgactctggctttcccccaggtatacatgttcctggtgaaatggcaggacctgtcggagaaggtggtctaccggcgcttcactgagat

SEQ ID NO: 11656 - RNA, 101 nt, synthetic construct
  source 1..101: mol_type = other RNA
gaatggggtcccccgactctggctttcccccaggtctacatgttcctggtgaaatggcaggacctgtcggagaaggtggtctaccggcgcttcacggagat

SEQ ID NO: 11657 - RNA, 101 nt, synthetic construct
  source 1..101: mol_type = other RNA
gaatggggtcccccgactctggctttcccccaggtttacatgttcctggtgaaatggcaggacctgtcggagaaggtggtctaccggcgcttcacagagat

SEQ ID NO: 11658 - RNA, 101 nt, synthetic construct
  source 1..101: mol_type = other RNA
gaatggggtcccccgactctggctttcccccaggtttacatgttcctggtgaaatggcaggacctgtcggagaaggtggtctaccggcgcttcactgagat

SEQ ID NO: 11659 - RNA, 101 nt, synthetic construct
  source 1..101: mol_type = other RNA
gaatggggtcccccgactctggctttcccccaggtttacatgttcctggtgaaatggcaggacctgtcggagaaggtggtctaccggcgcttcacggagat

SEQ ID NO: 11660 - RNA, 101 nt, synthetic construct
  source 1..101: mol_type = other RNA
gaatggggtcccccgactctggctttcccccaggtttacatgttcctggtgaaatggcaggacctgtcggagaaggtggtctaccggcgcttcaccgagat

SEQ ID NO: 11661 - RNA, 101 nt, synthetic construct
  source 1..101: mol_type = other RNA
gaatggggtcccccgactctggctttcccccaggtatacatgttcctggtgaaatggcaggacctgtcggagaaggtggtctaccggcgcttcacggagat

SEQ ID NO: 11662 - RNA, 101 nt, synthetic construct
  source 1..101: mol_type = other RNA
gaatggggtcccccgactctggctttcccccaggtgtacatgttcctggtgaaatggcaggacctgtcggagaaggtggtctaccggcgcttcactgagat

SEQ ID NO: 11663 - RNA, 101 nt, synthetic construct
  source 1..101: mol_type = other RNA
gaatggggtcccccgactctggctttcccccaggtgtacatgttcctggtgaaatggcaggacctgtcggagaaggtggtctaccggcgcttcacggagat

SEQ ID NO: 11664 - RNA, 101 nt, synthetic construct
  source 1..101: mol_type = other RNA
gaatggggtcccccgactctggctttcccccaggtctacatgttcctggtgaaatggcaggacctgtcggagaaggtggtctaccggcgcttcaccgagat

SEQ ID NO: 11665 - RNA, 101 nt, synthetic construct
  source 1..101: mol_type = other RNA
gaatggggtcccccgactctggctttcccccaggtgtacatgttcctggtgaaatggcaggacctgtcggagaaggtggtctaccggcgcttcaccgagat

SEQ ID NO: 11666 - RNA, 101 nt, synthetic construct
  source 1..101: mol_type = other RNA
gaatggggtcccccgactctggctttcccccaggtgtacatgttcctggtgaaatggcaggacctgtcggagaaggtggtctaccggcgcttcacagagat

SEQ ID NO: 11667 - RNA, 101 nt, synthetic construct
  source 1..101: mol_type = other RNA
gaatggggtcccccgactctggctttcccccaggtctacatgttcctggtgaaatggcaggacctgtcggagaaggtggtctaccggcgcttcactgagat

SEQ ID NO: 11668 - RNA, 101 nt, synthetic construct
  source 1..101: mol_type = other RNA
gaatggggtcccccgactctggctttcccccaggtctacatgttcctggtgaaatggcaggacctgtcggagaaggtggtctaccggcgcttcacagagat

SEQ ID NO: 11669 - RNA, 102 nt, synthetic construct
  source 1..102: mol_type = other RNA
tgaatggggtcccccgactctggctttcccccaggtttacatgttcctggtgaaatggcaggacctgtcggagaaggtggtctaccggcgcttcacggagat

SEQ ID NO: 11670 - RNA, 102 nt, synthetic construct
  source 1..102: mol_type = other RNA
tgaatggggtcccccgactctggctttcccccaggtttacatgttcctggtgaaatggcaggacctgtcggagaaggtggtctaccggcgcttcaccgagat

SEQ ID NO: 11671 - RNA, 102 nt, synthetic construct
  source 1..102: mol_type = other RNA
tgaatggggtcccccgactctggctttcccccaggtctacatgttcctggtgaaatggcaggacctgtcggagaaggtggtctaccggcgcttcactgagat

SEQ ID NO: 11672 - RNA, 102 nt, synthetic construct
  source 1..102: mol_type = other RNA
tgaatggggtcccccgactctggctttcccccaggtctacatgttcctggtgaaatggcaggacctgtcggagaaggtggtctaccggcgcttcacggagat

SEQ ID NO: 11673 - RNA, 102 nt, synthetic construct
  source 1..102: mol_type = other RNA
tgaatggggtcccccgactctggctttcccccaggtttacatgttcctggtgaaatggcaggacctgtcggagaaggtggtctaccggcgcttcactgagat

SEQ ID NO: 11674 - RNA, 102 nt, synthetic construct
  source 1..102: mol_type = other RNA
tgaatggggtcccccgactctggctttcccccaggtgtacatgttcctggtgaaatggcaggacctgtcggagaaggtggtctaccggcgcttcaccgagat

SEQ ID NO: 11675 - RNA, 102 nt, synthetic construct
  source 1..102: mol_type = other RNA
tgaatggggtcccccgactctggctttcccccaggtgtacatgttcctggtgaaatggcaggacctgtcggagaaggtggtctaccggcgcttcactgagat

SEQ ID NO: 11676 - RNA, 102 nt, synthetic construct
  source 1..102: mol_type = other RNA
tgaatggggtcccccgactctggctttcccccaggtgtacatgttcctggtgaaatggcaggacctgtcggagaaggtggtctaccggcgcttcacggagat

SEQ ID NO: 11677 - RNA, 102 nt, synthetic construct
  source 1..102: mol_type = other RNA
tgaatggggtcccccgactctggctttcccccaggtttacatgttcctggtgaaatggcaggacctgtcggagaaggtggtctaccggcgcttcacagagat

SEQ ID NO: 11678 - RNA, 102 nt, synthetic construct
  source 1..102: mol_type = other RNA
tgaatggggtcccccgactctggctttcccccaggtgtacatgttcctggtgaaatggcaggacctgtcggagaaggtggtctaccggcgcttcacagagat

SEQ ID NO: 11679 - RNA, 102 nt, synthetic construct
  source 1..102: mol_type = other RNA
tgaatggggtcccccgactctggctttcccccaggtatacatgttcctggtgaaatggcaggacctgtcggagaaggtggtctaccggcgcttcacagagat

SEQ ID NO: 11680 - RNA, 102 nt, synthetic construct
  source 1..102: mol_type = other RNA
tgaatggggtcccccgactctggctttcccccaggtatacatgttcctggtgaaatggcaggacctgtcggagaaggtggtctaccggcgcttcaccgagat

SEQ ID NO: 11681 - RNA, 102 nt, synthetic construct
  source 1..102: mol_type = other RNA
tgaatggggtcccccgactctggctttcccccaggtatacatgttcctggtgaaatggcaggacctgtcggagaaggtggtctaccggcgcttcacggagat

SEQ ID NO: 11682 - RNA, 102 nt, synthetic construct
  source 1..102: mol_type = other RNA
tgaatggggtcccccgactctggctttcccccaggtatacatgttcctggtgaaatggcaggacctgtcggagaaggtggtctaccggcgcttcactgagat

SEQ ID NO: 11683 - RNA, 102 nt, synthetic construct
  source 1..102: mol_type = other RNA
tgaatggggtcccccgactctggctttcccccaggtctacatgttcctggtgaaatggcaggacctgtcggagaaggtggtctaccggcgcttcacagagat

SEQ ID NO: 11684 - RNA, 102 nt, synthetic construct
  source 1..102: mol_type = other RNA
tgaatggggtcccccgactctggctttcccccaggtctacatgttcctggtgaaatggcaggacctgtcggagaaggtggtctaccggcgcttcaccgagat

SEQ ID NO: 11685 - RNA, 103 nt, synthetic construct
  source 1..103: mol_type = other RNA
ctgaatggggtcccccgactctggctttcccccaggtatacatgttcctggtgaaatggcaggacctgtcggagaaggtggtctaccggcgcttcactgagat

SEQ ID NO: 11686 - RNA, 103 nt, synthetic construct
  source 1..103: mol_type = other RNA
ctgaatggggtcccccgactctggctttcccccaggtgtacatgttcctggtgaaatggcaggacctgtcggagaaggtggtctaccggcgcttcacagagat

SEQ ID NO: 11687 - RNA, 103 nt, synthetic construct
  source 1..103: mol_type = other RNA
ctgaatggggtcccccgactctggctttcccccaggtatacatgttcctggtgaaatggcaggacctgtcggagaaggtggtctaccggcgcttcaccgagat

SEQ ID NO: 11688 - RNA, 103 nt, synthetic construct
  source 1..103: mol_type = other RNA
ctgaatggggtcccccgactctggctttcccccaggtatacatgttcctggtgaaatggcaggacctgtcggagaaggtggtctaccggcgcttcacggagat

SEQ ID NO: 11689 - RNA, 103 nt, synthetic construct
  source 1..103: mol_type = other RNA
ctgaatggggtcccccgactctggctttcccccaggtctacatgttcctggtgaaatggcaggacctgtcggagaaggtggtctaccggcgcttcacagagat

SEQ ID NO: 11690 - RNA, 103 nt, synthetic construct
  source 1..103: mol_type = other RNA
ctgaatggggtcccccgactctggctttcccccaggtctacatgttcctggtgaaatggcaggacctgtcggagaaggtggtctaccggcgcttcacggagat

SEQ ID NO: 11691 - RNA, 103 nt, synthetic construct
  source 1..103: mol_type = other RNA
ctgaatggggtcccccgactctggctttcccccaggtctacatgttcctggtgaaatggcaggacctgtcggagaaggtggtctaccggcgcttcactgagat

SEQ ID NO: 11692 - RNA, 103 nt, synthetic construct
  source 1..103: mol_type = other RNA
ctgaatggggtcccccgactctggctttcccccaggtgtacatgttcctggtgaaatggcaggacctgtcggagaaggtggtctaccggcgcttcaccgagat

SEQ ID NO: 11693 - RNA, 103 nt, synthetic construct
  source 1..103: mol_type = other RNA
ctgaatggggtcccccgactctggctttcccccaggtgtacatgttcctggtgaaatggcaggacctgtcggagaaggtggtctaccggcgcttcacggagat

SEQ ID NO: 11694 - RNA, 103 nt, synthetic construct
  source 1..103: mol_type = other RNA
ctgaatggggtcccccgactctggctttcccccaggtgtacatgttcctggtgaaatggcaggacctgtcggagaaggtggtctaccggcgcttcactgagat

SEQ ID NO: 11695 - RNA, 103 nt, synthetic construct
  source 1..103: mol_type = other RNA
ctgaatggggtcccccgactctggctttcccccaggtttacatgttcctggtgaaatggcaggacctgtcggagaaggtggtctaccggcgcttcacagagat

SEQ ID NO: 11696 - RNA, 103 nt, synthetic construct
  source 1..103: mol_type = other RNA
ctgaatggggtcccccgactctggctttcccccaggtttacatgttcctggtgaaatggcaggacctgtcggagaaggtggtctaccggcgcttcacggagat

SEQ ID NO: 11697 - RNA, 103 nt, synthetic construct
  source 1..103: mol_type = other RNA
ctgaatggggtcccccgactctggctttcccccaggtttacatgttcctggtgaaatggcaggacctgtcggagaaggtggtctaccggcgcttcactgagat

SEQ ID NO: 11698 - RNA, 103 nt, synthetic construct
  source 1..103: mol_type = other RNA
ctgaatggggtcccccgactctggctttcccccaggtctacatgttcctggtgaaatggcaggacctgtcggagaaggtggtctaccggcgcttcaccgagat

SEQ ID NO: 11699 - RNA, 103 nt, synthetic construct
  source 1..103: mol_type = other RNA
ctgaatggggtcccccgactctggctttcccccaggtatacatgttcctggtgaaatggcaggacctgtcggagaaggtggtctaccggcgcttcacagagat

SEQ ID NO: 11700 - RNA, 103 nt, synthetic construct
  source 1..103: mol_type = other RNA
ctgaatggggtcccccgactctggctttcccccaggtttacatgttcctggtgaaatggcaggacctgtcggagaaggtggtctaccggcgcttcaccgagat

SEQ ID NO: 11701 - RNA, 16 nt, synthetic construct
  source 1..16: mol_type = other RNA
ccaggaacatgtacct

SEQ ID NO: 11702 - RNA, 17 nt, synthetic construct
  source 1..17: mol_type = other RNA
accaggaacatgtacct

SEQ ID NO: 11703 - RNA, 18 nt, synthetic construct
  source 1..18: mol_type = other RNA
caccaggaacatgtacct

SEQ ID NO: 11704 - RNA, 19 nt, synthetic construct
  source 1..19: mol_type = other RNA
tcaccaggaacatgtacct

SEQ ID NO: 11705 - RNA, 20 nt, synthetic construct
  source 1..20: mol_type = other RNA
ttcaccaggaacatgtacct

SEQ ID NO: 11706 - RNA, 21 nt, synthetic construct
  source 1..21: mol_type = other RNA
tttcaccaggaacatgtacct

SEQ ID NO: 11707 - RNA, 22 nt, synthetic construct
  source 1..22: mol_type = other RNA
atttcaccaggaacatgtacct

SEQ ID NO: 11708-11714 - skipped (7 entries)

SEQ ID NO: 11715 - RNA, 10 nt, synthetic construct
  source 1..10: mol_type = other RNA
tacatgttcc

SEQ ID NO: 11716 - RNA, 11 nt, synthetic construct
  source 1..11: mol_type = other RNA
tacatgttcct

SEQ ID NO: 11717 - RNA, 12 nt, synthetic construct
  source 1..12: mol_type = other RNA
tacatgttcctg

SEQ ID NO: 11718 - RNA, 13 nt, synthetic construct
  source 1..13: mol_type = other RNA
tacatgttcctgg

SEQ ID NO: 11719 - RNA, 14 nt, synthetic construct
  source 1..14: mol_type = other RNA
tacatgttcctggt

SEQ ID NO: 11720 - RNA, 15 nt, synthetic construct
  source 1..15: mol_type = other RNA
tacatgttcctggtg

SEQ ID NO: 11721 - RNA, 16 nt, synthetic construct
  source 1..16: mol_type = other RNA
tacatgttcctggtga

SEQ ID NO: 11722 - RNA, 17 nt, synthetic construct
  source 1..17: mol_type = other RNA
tacatgttcctggtgaa

SEQ ID NO: 11723 - RNA, 18 nt, synthetic construct
  source 1..18: mol_type = other RNA
tacatgttcctggtgaaa

SEQ ID NO: 11724 - RNA, 19 nt, synthetic construct
  source 1..19: mol_type = other RNA
tacatgttcctggtgaaat

SEQ ID NO: 11725 - RNA, 10 nt, synthetic construct
  source 1..10: mol_type = other RNA
cccccaggtc

SEQ ID NO: 11726 - RNA, 10 nt, synthetic construct
  source 1..10: mol_type = other RNA
cccccaggtt

SEQ ID NO: 11727 - RNA, 10 nt, synthetic construct
  source 1..10: mol_type = other RNA
cccccaggtg

SEQ ID NO: 11728 - RNA, 10 nt, synthetic construct
  source 1..10: mol_type = other RNA
cccccaggta

SEQ ID NO: 11729 - RNA, 11 nt, synthetic construct
  source 1..11: mol_type = other RNA
tcccccaggta

SEQ ID NO: 11730 - RNA, 11 nt, synthetic construct
  source 1..11: mol_type = other RNA
tcccccaggtg

SEQ ID NO: 11731 - RNA, 11 nt, synthetic construct
  source 1..11: mol_type = other RNA
tcccccaggtt

SEQ ID NO: 11732 - RNA, 11 nt, synthetic construct
  source 1..11: mol_type = other RNA
tcccccaggtc

SEQ ID NO: 11733 - RNA, 12 nt, synthetic construct
  source 1..12: mol_type = other RNA
ttcccccaggta

SEQ ID NO: 11734 - RNA, 12 nt, synthetic construct
  source 1..12: mol_type = other RNA
ttcccccaggtc

SEQ ID NO: 11735 - RNA, 12 nt, synthetic construct
  source 1..12: mol_type = other RNA
ttcccccaggtt

SEQ ID NO: 11736 - RNA, 12 nt, synthetic construct
  source 1..12: mol_type = other RNA
ttcccccaggtg

SEQ ID NO: 11737 - RNA, 13 nt, synthetic construct
  source 1..13: mol_type = other RNA
tttcccccaggtt

SEQ ID NO: 11738 - RNA, 13 nt, synthetic construct
  source 1..13: mol_type = other RNA
tttcccccaggtc

SEQ ID NO: 11739 - RNA, 13 nt, synthetic construct
  source 1..13: mol_type = other RNA
tttcccccaggtg

SEQ ID NO: 11740 - RNA, 13 nt, synthetic construct
  source 1..13: mol_type = other RNA
tttcccccaggta

SEQ ID NO: 11741 - RNA, 14 nt, synthetic construct
  source 1..14: mol_type = other RNA
ctttcccccaggtc

SEQ ID NO: 11742 - RNA, 14 nt, synthetic construct
  source 1..14: mol_type = other RNA
ctttcccccaggta

SEQ ID NO: 11743 - RNA, 14 nt, synthetic construct
  source 1..14: mol_type = other RNA
ctttcccccaggtt

SEQ ID NO: 11744 - RNA, 14 nt, synthetic construct
  source 1..14: mol_type = other RNA
ctttcccccaggtg

SEQ ID NO: 11745 - RNA, 15 nt, synthetic construct
  source 1..15: mol_type = other RNA
gctttcccccaggtg

SEQ ID NO: 11746 - RNA, 15 nt, synthetic construct
  source 1..15: mol_type = other RNA
gctttcccccaggta

SEQ ID NO: 11747 - RNA, 15 nt, synthetic construct
  source 1..15: mol_type = other RNA
gctttcccccaggtc

SEQ ID NO: 11748 - RNA, 15 nt, synthetic construct
  source 1..15: mol_type = other RNA
gctttcccccaggtt

SEQ ID NO: 11749 - RNA, 16 nt, synthetic construct
  source 1..16: mol_type = other RNA
ggctttcccccaggta

SEQ ID NO: 11750 - RNA, 16 nt, synthetic construct
  source 1..16: mol_type = other RNA
ggctttcccccaggtc

SEQ ID NO: 11751 - RNA, 16 nt, synthetic construct
  source 1..16: mol_type = other RNA
ggctttcccccaggtg

SEQ ID NO: 11752 - RNA, 16 nt, synthetic construct
  source 1..16: mol_type = other RNA
ggctttcccccaggtt

SEQ ID NO: 11753 - RNA, 17 nt, synthetic construct
  source 1..17: mol_type = other RNA
tggctttcccccaggtg

SEQ ID NO: 11754 - RNA, 17 nt, synthetic construct
  source 1..17: mol_type = other RNA
tggctttcccccaggta

SEQ ID NO: 11755 - RNA, 17 nt, synthetic construct
  source 1..17: mol_type = other RNA
tggctttcccccaggtc

SEQ ID NO: 11756 - RNA, 17 nt, synthetic construct
  source 1..17: mol_type = other RNA
tggctttcccccaggtt

SEQ ID NO: 11757 - RNA, 18 nt, synthetic construct
  source 1..18: mol_type = other RNA
ctggctttcccccaggtc

SEQ ID NO: 11758 - RNA, 18 nt, synthetic construct
  source 1..18: mol_type = other RNA
ctggctttcccccaggta

SEQ ID NO: 11759 - RNA, 18 nt, synthetic construct
  source 1..18: mol_type = other RNA
ctggctttcccccaggtt

SEQ ID NO: 11760 - RNA, 18 nt, synthetic construct
  source 1..18: mol_type = other RNA
ctggctttcccccaggtg

SEQ ID NO: 11761 - RNA, 19 nt, synthetic construct
  source 1..19: mol_type = other RNA
tctggctttcccccaggtg

SEQ ID NO: 11762 - RNA, 19 nt, synthetic construct
  source 1..19: mol_type = other RNA
tctggctttcccccaggtt

SEQ ID NO: 11763 - RNA, 19 nt, synthetic construct
  source 1..19: mol_type = other RNA
tctggctttcccccaggtc

SEQ ID NO: 11764 - RNA, 19 nt, synthetic construct
  source 1..19: mol_type = other RNA
tctggctttcccccaggta

SEQ ID NO: 11765 - RNA, 20 nt, synthetic construct
  source 1..20: mol_type = other RNA
ctctggctttcccccaggtt

SEQ ID NO: 11766 - RNA, 20 nt, synthetic construct
  source 1..20: mol_type = other RNA
ctctggctttcccccaggtc

SEQ ID NO: 11767 - RNA, 20 nt, synthetic construct
  source 1..20: mol_type = other RNA
ctctggctttcccccaggta

SEQ ID NO: 11768 - RNA, 20 nt, synthetic construct
  source 1..20: mol_type = other RNA
ctctggctttcccccaggtg

SEQ ID NO: 11769 - RNA, 21 nt, synthetic construct
  source 1..21: mol_type = other RNA
actctggctttcccccaggta

SEQ ID NO: 11770 - RNA, 21 nt, synthetic construct
  source 1..21: mol_type = other RNA
actctggctttcccccaggtc

SEQ ID NO: 11771 - RNA, 21 nt, synthetic construct
  source 1..21: mol_type = other RNA
actctggctttcccccaggtg

SEQ ID NO: 11772 - RNA, 21 nt, synthetic construct
  source 1..21: mol_type = other RNA
actctggctttcccccaggtt

SEQ ID NO: 11773 - RNA, 22 nt, synthetic construct
  source 1..22: mol_type = other RNA
gactctggctttcccccaggta

SEQ ID NO: 11774 - RNA, 22 nt, synthetic construct
  source 1..22: mol_type = other RNA
gactctggctttcccccaggtc

SEQ ID NO: 11775 - RNA, 22 nt, synthetic construct
  source 1..22: mol_type = other RNA
gactctggctttcccccaggtt

SEQ ID NO: 11776 - RNA, 22 nt, synthetic construct
  source 1..22: mol_type = other RNA
gactctggctttcccccaggtg

SEQ ID NO: 11777 - RNA, 23 nt, synthetic construct
  source 1..23: mol_type = other RNA
cgactctggctttcccccaggta

SEQ ID NO: 11778 - RNA, 23 nt, synthetic construct
  source 1..23: mol_type = other RNA
cgactctggctttcccccaggtt

SEQ ID NO: 11779 - RNA, 23 nt, synthetic construct
  source 1..23: mol_type = other RNA
cgactctggctttcccccaggtg

SEQ ID NO: 11780 - RNA, 23 nt, synthetic construct
  source 1..23: mol_type = other RNA
cgactctggctttcccccaggtc

SEQ ID NO: 11781 - RNA, 24 nt, synthetic construct
  source 1..24: mol_type = other RNA
ccgactctggctttcccccaggtc

SEQ ID NO: 11782 - RNA, 24 nt, synthetic construct
  source 1..24: mol_type = other RNA
ccgactctggctttcccccaggtg

SEQ ID NO: 11783 - RNA, 24 nt, synthetic construct
  source 1..24: mol_type = other RNA
ccgactctggctttcccccaggtt

SEQ ID NO: 11784 - RNA, 24 nt, synthetic construct
  source 1..24: mol_type = other RNA
ccgactctggctttcccccaggta

SEQ ID NO: 11785 - RNA, 25 nt, synthetic construct
  source 1..25: mol_type = other RNA
cccgactctggctttcccccaggtt

SEQ ID NO: 11786 - RNA, 25 nt, synthetic construct
  source 1..25: mol_type = other RNA
cccgactctggctttcccccaggtg

SEQ ID NO: 11787 - RNA, 25 nt, synthetic construct
  source 1..25: mol_type = other RNA
cccgactctggctttcccccaggta

SEQ ID NO: 11788 - RNA, 25 nt, synthetic construct
  source 1..25: mol_type = other RNA
cccgactctggctttcccccaggtc

SEQ ID NO: 11789 - RNA, 26 nt, synthetic construct
  source 1..26: mol_type = other RNA
ccccgactctggctttcccccaggtc

SEQ ID NO: 11790 - RNA, 26 nt, synthetic construct
  source 1..26: mol_type = other RNA
ccccgactctggctttcccccaggtg

SEQ ID NO: 11791 - RNA, 26 nt, synthetic construct
  source 1..26: mol_type = other RNA
ccccgactctggctttcccccaggtt

SEQ ID NO: 11792 - RNA, 26 nt, synthetic construct
  source 1..26: mol_type = other RNA
ccccgactctggctttcccccaggta

SEQ ID NO: 11793 - RNA, 27 nt, synthetic construct
  source 1..27: mol_type = other RNA
cccccgactctggctttcccccaggtt

SEQ ID NO: 11794 - RNA, 27 nt, synthetic construct
  source 1..27: mol_type = other RNA
cccccgactctggctttcccccaggtg

SEQ ID NO: 11795 - RNA, 27 nt, synthetic construct
  source 1..27: mol_type = other RNA
cccccgactctggctttcccccaggtc

SEQ ID NO: 11796 - RNA, 27 nt, synthetic construct
  source 1..27: mol_type = other RNA
cccccgactctggctttcccccaggta

SEQ ID NO: 11797 - RNA, 28 nt, synthetic construct
  source 1..28: mol_type = other RNA
tcccccgactctggctttcccccaggtg

SEQ ID NO: 11798 - RNA, 28 nt, synthetic construct
  source 1..28: mol_type = other RNA
tcccccgactctggctttcccccaggta

SEQ ID NO: 11799 - RNA, 28 nt, synthetic construct
  source 1..28: mol_type = other RNA
tcccccgactctggctttcccccaggtc

SEQ ID NO: 11800 - RNA, 28 nt, synthetic construct
  source 1..28: mol_type = other RNA
tcccccgactctggctttcccccaggtt

SEQ ID NO: 11801 - RNA, 29 nt, synthetic construct
  source 1..29: mol_type = other RNA
gtcccccgactctggctttcccccaggtg

SEQ ID NO: 11802 - RNA, 29 nt, synthetic construct
  source 1..29: mol_type = other RNA
gtcccccgactctggctttcccccaggtc

SEQ ID NO: 11803 - RNA, 29 nt, synthetic construct
  source 1..29: mol_type = other RNA
gtcccccgactctggctttcccccaggtt

SEQ ID NO: 11804 - RNA, 29 nt, synthetic construct
  source 1..29: mol_type = other RNA
gtcccccgactctggctttcccccaggta

SEQ ID NO: 11805 - RNA, 30 nt, synthetic construct
  source 1..30: mol_type = other RNA
ggtcccccgactctggctttcccccaggta

SEQ ID NO: 11806 - RNA, 30 nt, synthetic construct
  source 1..30: mol_type = other RNA
ggtcccccgactctggctttcccccaggtt

SEQ ID NO: 11807 - RNA, 30 nt, synthetic construct
  source 1..30: mol_type = other RNA
ggtcccccgactctggctttcccccaggtg

SEQ ID NO: 11808 - RNA, 30 nt, synthetic construct
  source 1..30: mol_type = other RNA
ggtcccccgactctggctttcccccaggtc

SEQ ID NO: 11809 - RNA, 31 nt, synthetic construct
  source 1..31: mol_type = other RNA
gggtcccccgactctggctttcccccaggtg

SEQ ID NO: 11810 - RNA, 31 nt, synthetic construct
  source 1..31: mol_type = other RNA
gggtcccccgactctggctttcccccaggta

SEQ ID NO: 11811 - RNA, 31 nt, synthetic construct
  source 1..31: mol_type = other RNA
gggtcccccgactctggctttcccccaggtt

SEQ ID NO: 11812 - RNA, 31 nt, synthetic construct
  source 1..31: mol_type = other RNA
gggtcccccgactctggctttcccccaggtc

SEQ ID NO: 11813 - RNA, 32 nt, synthetic construct
  source 1..32: mol_type = other RNA
ggggtcccccgactctggctttcccccaggtt

SEQ ID NO: 11814 - RNA, 32 nt, synthetic construct
  source 1..32: mol_type = other RNA
ggggtcccccgactctggctttcccccaggtc

SEQ ID NO: 11815 - RNA, 32 nt, synthetic construct
  source 1..32: mol_type = other RNA
ggggtcccccgactctggctttcccccaggtg

SEQ ID NO: 11816 - RNA, 32 nt, synthetic construct
  source 1..32: mol_type = other RNA
ggggtcccccgactctggctttcccccaggta

SEQ ID NO: 11817 - RNA, 33 nt, synthetic construct
  source 1..33: mol_type = other RNA
tggggtcccccgactctggctttcccccaggtt

SEQ ID NO: 11818 - RNA, 33 nt, synthetic construct
  source 1..33: mol_type = other RNA
tggggtcccccgactctggctttcccccaggtc

SEQ ID NO: 11819 - RNA, 33 nt, synthetic construct
  source 1..33: mol_type = other RNA
tggggtcccccgactctggctttcccccaggta

SEQ ID NO: 11820 - RNA, 33 nt, synthetic construct
  source 1..33: mol_type = other RNA
tggggtcccccgactctggctttcccccaggtg

SEQ ID NO: 11821 - RNA, 34 nt, synthetic construct
  source 1..34: mol_type = other RNA
atggggtcccccgactctggctttcccccaggtg

SEQ ID NO: 11822 - RNA, 34 nt, synthetic construct
  source 1..34: mol_type = other RNA
atggggtcccccgactctggctttcccccaggtt

SEQ ID NO: 11823 - RNA, 34 nt, synthetic construct
  source 1..34: mol_type = other RNA
atggggtcccccgactctggctttcccccaggta

SEQ ID NO: 11824 - RNA, 34 nt, synthetic construct
  source 1..34: mol_type = other RNA
atggggtcccccgactctggctttcccccaggtc

SEQ ID NO: 11825 - RNA, 35 nt, synthetic construct
  source 1..35: mol_type = other RNA
aatggggtcccccgactctggctttcccccaggtc

SEQ ID NO: 11826 - RNA, 35 nt, synthetic construct
  source 1..35: mol_type = other RNA
aatggggtcccccgactctggctttcccccaggta

SEQ ID NO: 11827 - RNA, 35 nt, synthetic construct
  source 1..35: mol_type = other RNA
aatggggtcccccgactctggctttcccccaggtg

SEQ ID NO: 11828 - RNA, 35 nt, synthetic construct
  source 1..35: mol_type = other RNA
aatggggtcccccgactctggctttcccccaggtt

SEQ ID NO: 11829 - RNA, 36 nt, synthetic construct
  source 1..36: mol_type = other RNA
gaatggggtcccccgactctggctttcccccaggta

SEQ ID NO: 11830 - RNA, 36 nt, synthetic construct
  source 1..36: mol_type = other RNA
gaatggggtcccccgactctggctttcccccaggtg

SEQ ID NO: 11831 - RNA, 36 nt, synthetic construct
  source 1..36: mol_type = other RNA
gaatggggtcccccgactctggctttcccccaggtc

SEQ ID NO: 11832 - RNA, 36 nt, synthetic construct
  source 1..36: mol_type = other RNA
gaatggggtcccccgactctggctttcccccaggtt

SEQ ID NO: 11833 - RNA, 37 nt, synthetic construct
  source 1..37: mol_type = other RNA
tgaatggggtcccccgactctggctttcccccaggtg

SEQ ID NO: 11834 - RNA, 37 nt, synthetic construct
  source 1..37: mol_type = other RNA
tgaatggggtcccccgactctggctttcccccaggtt

SEQ ID NO: 11835 - RNA, 37 nt, synthetic construct
  source 1..37: mol_type = other RNA
tgaatggggtcccccgactctggctttcccccaggta

SEQ ID NO: 11836 - RNA, 37 nt, synthetic construct
  source 1..37: mol_type = other RNA
tgaatggggtcccccgactctggctttcccccaggtc

SEQ ID NO: 11837 - RNA, 38 nt, synthetic construct
  source 1..38: mol_type = other RNA
ctgaatggggtcccccgactctggctttcccccaggtt

SEQ ID NO: 11838 - RNA, 38 nt, synthetic construct
  source 1..38: mol_type = other RNA
ctgaatggggtcccccgactctggctttcccccaggtg

SEQ ID NO: 11839 - RNA, 38 nt, synthetic construct
  source 1..38: mol_type = other RNA
ctgaatggggtcccccgactctggctttcccccaggtc

SEQ ID NO: 11840 - RNA, 38 nt, synthetic construct
  source 1..38: mol_type = other RNA
ctgaatggggtcccccgactctggctttcccccaggta

SEQ ID NO: 11841 - RNA, 39 nt, synthetic construct
  source 1..39: mol_type = other RNA
gctgaatggggtcccccgactctggctttcccccaggtt

SEQ ID NO: 11842 - RNA, 39 nt, synthetic construct
  source 1..39: mol_type = other RNA
gctgaatggggtcccccgactctggctttcccccaggta

SEQ ID NO: 11843 - RNA, 39 nt, synthetic construct
  source 1..39: mol_type = other RNA
gctgaatggggtcccccgactctggctttcccccaggtc

SEQ ID NO: 11844 - RNA, 39 nt, synthetic construct
  source 1..39: mol_type = other RNA
gctgaatggggtcccccgactctggctttcccccaggtg

SEQ ID NO: 11845 - RNA, 40 nt, synthetic construct
  source 1..40: mol_type = other RNA
ggctgaatggggtcccccgactctggctttcccccaggtt

SEQ ID NO: 11846 - RNA, 40 nt, synthetic construct
  source 1..40: mol_type = other RNA
ggctgaatggggtcccccgactctggctttcccccaggta

SEQ ID NO: 11847 - RNA, 40 nt, synthetic construct
  source 1..40: mol_type = other RNA
ggctgaatggggtcccccgactctggctttcccccaggtc

SEQ ID NO: 11848 - RNA, 40 nt, synthetic construct
  source 1..40: mol_type = other RNA
ggctgaatggggtcccccgactctggctttcccccaggtg

SEQ ID NO: 11849 - RNA, 41 nt, synthetic construct
  source 1..41: mol_type = other RNA
aggctgaatggggtcccccgactctggctttcccccaggtg

SEQ ID NO: 11850 - RNA, 41 nt, synthetic construct
  source 1..41: mol_type = other RNA
aggctgaatggggtcccccgactctggctttcccccaggta

SEQ ID NO: 11851 - RNA, 41 nt, synthetic construct
  source 1..41: mol_type = other RNA
aggctgaatggggtcccccgactctggctttcccccaggtt

SEQ ID NO: 11852 - RNA, 41 nt, synthetic construct
  source 1..41: mol_type = other RNA
aggctgaatggggtcccccgactctggctttcccccaggtc

SEQ ID NO: 11853 - RNA, 42 nt, synthetic construct
  source 1..42: mol_type = other RNA
gaggctgaatggggtcccccgactctggctttcccccaggtt

SEQ ID NO: 11854 - RNA, 42 nt, synthetic construct
  source 1..42: mol_type = other RNA
gaggctgaatggggtcccccgactctggctttcccccaggtg

SEQ ID NO: 11855 - RNA, 42 nt, synthetic construct
  source 1..42: mol_type = other RNA
gaggctgaatggggtcccccgactctggctttcccccaggtc

SEQ ID NO: 11856 - RNA, 42 nt, synthetic construct
  source 1..42: mol_type = other RNA
gaggctgaatggggtcccccgactctggctttcccccaggta

SEQ ID NO: 11857 - RNA, 43 nt, synthetic construct
  source 1..43: mol_type = other RNA
ggaggctgaatggggtcccccgactctggctttcccccaggtg

SEQ ID NO: 11858 - RNA, 43 nt, synthetic construct
  source 1..43: mol_type = other RNA
ggaggctgaatggggtcccccgactctggctttcccccaggtt

SEQ ID NO: 11859 - RNA, 43 nt, synthetic construct
  source 1..43: mol_type = other RNA
ggaggctgaatggggtcccccgactctggctttcccccaggtc

SEQ ID NO: 11860 - RNA, 43 nt, synthetic construct
  source 1..43: mol_type = other RNA
ggaggctgaatggggtcccccgactctggctttcccccaggta

SEQ ID NO: 11861 - RNA, 44 nt, synthetic construct
  source 1..44: mol_type = other RNA
tggaggctgaatggggtcccccgactctggctttcccccaggtg

SEQ ID NO: 11862 - RNA, 44 nt, synthetic construct
  source 1..44: mol_type = other RNA
tggaggctgaatggggtcccccgactctggctttcccccaggtt

SEQ ID NO: 11863 - RNA, 44 nt, synthetic construct
  source 1..44: mol_type = other RNA
tggaggctgaatggggtcccccgactctggctttcccccaggtc

SEQ ID NO: 11864 - RNA, 44 nt, synthetic construct
  source 1..44: mol_type = other RNA
tggaggctgaatggggtcccccgactctggctttcccccaggta

SEQ ID NO: 11865 - RNA, 45 nt, synthetic construct
  source 1..45: mol_type = other RNA
ttggaggctgaatggggtcccccgactctggctttcccccaggta

SEQ ID NO: 11866 - RNA, 45 nt, synthetic construct
  source 1..45: mol_type = other RNA
ttggaggctgaatggggtcccccgactctggctttcccccaggtt

SEQ ID NO: 11867 - RNA, 45 nt, synthetic construct
  source 1..45: mol_type = other RNA
ttggaggctgaatggggtcccccgactctggctttcccccaggtg

SEQ ID NO: 11868 - RNA, 45 nt, synthetic construct
  source 1..45: mol_type = other RNA
ttggaggctgaatggggtcccccgactctggctttcccccaggtc

SEQ ID NO: 11869 - RNA, 46 nt, synthetic construct
  source 1..46: mol_type = other RNA
tttggaggctgaatggggtcccccgactctggctttcccccaggtg

SEQ ID NO: 11870 - RNA, 46 nt, synthetic construct
  source 1..46: mol_type = other RNA
tttggaggctgaatggggtcccccgactctggctttcccccaggtc

SEQ ID NO: 11871 - RNA, 46 nt, synthetic construct
  source 1..46: mol_type = other RNA
tttggaggctgaatggggtcccccgactctggctttcccccaggtt

SEQ ID NO: 11872 - RNA, 46 nt, synthetic construct
  source 1..46: mol_type = other RNA
tttggaggctgaatggggtcccccgactctggctttcccccaggta

SEQ ID NO: 11873 - RNA, 47 nt, synthetic construct
  source 1..47: mol_type = other RNA
ctttggaggctgaatggggtcccccgactctggctttcccccaggtc

SEQ ID NO: 11874 - RNA, 47 nt, synthetic construct
  source 1..47: mol_type = other RNA
ctttggaggctgaatggggtcccccgactctggctttcccccaggta

SEQ ID NO: 11875 - RNA, 47 nt, synthetic construct
  source 1..47: mol_type = other RNA
ctttggaggctgaatggggtcccccgactctggctttcccccaggtt

SEQ ID NO: 11876 - RNA, 47 nt, synthetic construct
  source 1..47: mol_type = other RNA
ctttggaggctgaatggggtcccccgactctggctttcccccaggtg

SEQ ID NO: 11877 - RNA, 48 nt, synthetic construct
  source 1..48: mol_type = other RNA
tctttggaggctgaatggggtcccccgactctggctttcccccaggtt

SEQ ID NO: 11878 - RNA, 48 nt, synthetic construct
  source 1..48: mol_type = other RNA
tctttggaggctgaatggggtcccccgactctggctttcccccaggtg

SEQ ID NO: 11879 - RNA, 48 nt, synthetic construct
  source 1..48: mol_type = other RNA
tctttggaggctgaatggggtcccccgactctggctttcccccaggtc

SEQ ID NO: 11880 - RNA, 48 nt, synthetic construct
  source 1..48: mol_type = other RNA
tctttggaggctgaatggggtcccccgactctggctttcccccaggta

SEQ ID NO: 11881 - RNA, 49 nt, synthetic construct
  source 1..49: mol_type = other RNA
ctctttggaggctgaatggggtcccccgactctggctttcccccaggta

SEQ ID NO: 11882 - RNA, 49 nt, synthetic construct
  source 1..49: mol_type = other RNA
ctctttggaggctgaatggggtcccccgactctggctttcccccaggtg

SEQ ID NO: 11883 - RNA, 49 nt, synthetic construct
  source 1..49: mol_type = other RNA
ctctttggaggctgaatggggtcccccgactctggctttcccccaggtc

SEQ ID NO: 11884 - RNA, 49 nt, synthetic construct
  source 1..49: mol_type = other RNA
ctctttggaggctgaatggggtcccccgactctggctttcccccaggtt

SEQ ID NO: 11885 - RNA, 50 nt, synthetic construct
  source 1..50: mol_type = other RNA
cctctttggaggctgaatggggtcccccgactctggctttcccccaggtc

SEQ ID NO: 11886 - RNA, 50 nt, synthetic construct
  source 1..50: mol_type = other RNA
cctctttggaggctgaatggggtcccccgactctggctttcccccaggta

SEQ ID NO: 11887 - RNA, 50 nt, synthetic construct
  source 1..50: mol_type = other RNA
cctctttggaggctgaatggggtcccccgactctggctttcccccaggtg

SEQ ID NO: 11888 - RNA, 50 nt, synthetic construct
  source 1..50: mol_type = other RNA
cctctttggaggctgaatggggtcccccgactctggctttcccccaggtt

SEQ ID NO: 11889 - RNA, 51 nt, synthetic construct
  source 1..51: mol_type = other RNA
gcctctttggaggctgaatggggtcccccgactctggctttcccccaggtt

SEQ ID NO: 11890 - RNA, 51 nt, synthetic construct
  source 1..51: mol_type = other RNA
gcctctttggaggctgaatggggtcccccgactctggctttcccccaggtg

SEQ ID NO: 11891 - RNA, 51 nt, synthetic construct
  source 1..51: mol_type = other RNA
gcctctttggaggctgaatggggtcccccgactctggctttcccccaggta

SEQ ID NO: 11892 - RNA, 51 nt, synthetic construct
  source 1..51: mol_type = other RNA
gcctctttggaggctgaatggggtcccccgactctggctttcccccaggtc

SEQ ID NO: 11893 - RNA, 52 nt, synthetic construct
  source 1..52: mol_type = other RNA
agcctctttggaggctgaatggggtcccccgactctggctttcccccaggta

SEQ ID NO: 11894 - RNA, 52 nt, synthetic construct
  source 1..52: mol_type = other RNA
agcctctttggaggctgaatggggtcccccgactctggctttcccccaggtc

SEQ ID NO: 11895 - RNA, 52 nt, synthetic construct
  source 1..52: mol_type = other RNA
agcctctttggaggctgaatggggtcccccgactctggctttcccccaggtt

SEQ ID NO: 11896 - RNA, 52 nt, synthetic construct
  source 1..52: mol_type = other RNA
agcctctttggaggctgaatggggtcccccgactctggctttcccccaggtg

SEQ ID NO: 11897 - RNA, 53 nt, synthetic construct
  source 1..53: mol_type = other RNA
aagcctctttggaggctgaatggggtcccccgactctggctttcccccaggta

SEQ ID NO: 11898 - RNA, 53 nt, synthetic construct
  source 1..53: mol_type = other RNA
aagcctctttggaggctgaatggggtcccccgactctggctttcccccaggtg

SEQ ID NO: 11899 - RNA, 53 nt, synthetic construct
  source 1..53: mol_type = other RNA
aagcctctttggaggctgaatggggtcccccgactctggctttcccccaggtt

SEQ ID NO: 11900 - RNA, 53 nt, synthetic construct
  source 1..53: mol_type = other RNA
aagcctctttggaggctgaatggggtcccccgactctggctttcccccaggtc

SEQ ID NO: 11901 - RNA, 54 nt, synthetic construct
  source 1..54: mol_type = other RNA
aaagcctctttggaggctgaatggggtcccccgactctggctttcccccaggtt

SEQ ID NO: 11902 - RNA, 54 nt, synthetic construct
  source 1..54: mol_type = other RNA
aaagcctctttggaggctgaatggggtcccccgactctggctttcccccaggtc

SEQ ID NO: 11903 - RNA, 54 nt, synthetic construct
  source 1..54: mol_type = other RNA
aaagcctctttggaggctgaatggggtcccccgactctggctttcccccaggta

SEQ ID NO: 11904 - RNA, 54 nt, synthetic construct
  source 1..54: mol_type = other RNA
aaagcctctttggaggctgaatggggtcccccgactctggctttcccccaggtg

SEQ ID NO: 11905 - RNA, 55 nt, synthetic construct
  source 1..55: mol_type = other RNA
caaagcctctttggaggctgaatggggtcccccgactctggctttcccccaggtt

SEQ ID NO: 11906 - RNA, 55 nt, synthetic construct
  source 1..55: mol_type = other RNA
caaagcctctttggaggctgaatggggtcccccgactctggctttcccccaggtg

SEQ ID NO: 11907 - RNA, 55 nt, synthetic construct
  source 1..55: mol_type = other RNA
caaagcctctttggaggctgaatggggtcccccgactctggctttcccccaggtc

SEQ ID NO: 11908 - RNA, 55 nt, synthetic construct
  source 1..55: mol_type = other RNA
caaagcctctttggaggctgaatggggtcccccgactctggctttcccccaggta

SEQ ID NO: 11909 - RNA, 56 nt, synthetic construct
  source 1..56: mol_type = other RNA
gcaaagcctctttggaggctgaatggggtcccccgactctggctttcccccaggtc

SEQ ID NO: 11910 - RNA, 56 nt, synthetic construct
  source 1..56: mol_type = other RNA
gcaaagcctctttggaggctgaatggggtcccccgactctggctttcccccaggta

SEQ ID NO: 11911 - RNA, 56 nt, synthetic construct
  source 1..56: mol_type = other RNA
gcaaagcctctttggaggctgaatggggtcccccgactctggctttcccccaggtg

SEQ ID NO: 11912 - RNA, 56 nt, synthetic construct
  source 1..56: mol_type = other RNA
gcaaagcctctttggaggctgaatggggtcccccgactctggctttcccccaggtt

SEQ ID NO: 11913 - RNA, 57 nt, synthetic construct
  source 1..57: mol_type = other RNA
agcaaagcctctttggaggctgaatggggtcccccgactctggctttcccccaggtg

SEQ ID NO: 11914 - RNA, 57 nt, synthetic construct
  source 1..57: mol_type = other RNA
agcaaagcctctttggaggctgaatggggtcccccgactctggctttcccccaggtc

SEQ ID NO: 11915 - RNA, 57 nt, synthetic construct
  source 1..57: mol_type = other RNA
agcaaagcctctttggaggctgaatggggtcccccgactctggctttcccccaggta

SEQ ID NO: 11916 - RNA, 57 nt, synthetic construct
  source 1..57: mol_type = other RNA
agcaaagcctctttggaggctgaatggggtcccccgactctggctttcccccaggtt

SEQ ID NO: 11917 - RNA, 58 nt, synthetic construct
  source 1..58: mol_type = other RNA
cagcaaagcctctttggaggctgaatggggtcccccgactctggctttcccccaggtt

SEQ ID NO: 11918 - RNA, 58 nt, synthetic construct
  source 1..58: mol_type = other RNA
cagcaaagcctctttggaggctgaatggggtcccccgactctggctttcccccaggtg

SEQ ID NO: 11919 - RNA, 58 nt, synthetic construct
  source 1..58: mol_type = other RNA
cagcaaagcctctttggaggctgaatggggtcccccgactctggctttcccccaggtc

SEQ ID NO: 11920 - RNA, 58 nt, synthetic construct
  source 1..58: mol_type = other RNA
cagcaaagcctctttggaggctgaatggggtcccccgactctggctttcccccaggta

SEQ ID NO: 11921 - RNA, 59 nt, synthetic construct
  source 1..59: mol_type = other RNA
acagcaaagcctctttggaggctgaatggggtcccccgactctggctttcccccaggtt

SEQ ID NO: 11922 - RNA, 59 nt, synthetic construct
  source 1..59: mol_type = other RNA
acagcaaagcctctttggaggctgaatggggtcccccgactctggctttcccccaggta

SEQ ID NO: 11923 - RNA, 59 nt, synthetic construct
  source 1..59: mol_type = other RNA
acagcaaagcctctttggaggctgaatggggtcccccgactctggctttcccccaggtc

SEQ ID NO: 11924 - RNA, 59 nt, synthetic construct
  source 1..59: mol_type = other RNA
acagcaaagcctctttggaggctgaatggggtcccccgactctggctttcccccaggtg

SEQ ID NO: 11925 - RNA, 60 nt, synthetic construct
  source 1..60: mol_type = other RNA
cacagcaaagcctctttggaggctgaatggggtcccccgactctggctttcccccaggtg

SEQ ID NO: 11926 - RNA, 60 nt, synthetic construct
  source 1..60: mol_type = other RNA
cacagcaaagcctctttggaggctgaatggggtcccccgactctggctttcccccaggta

SEQ ID NO: 11927 - RNA, 60 nt, synthetic construct
  source 1..60: mol_type = other RNA
cacagcaaagcctctttggaggctgaatggggtcccccgactctggctttcccccaggtc

SEQ ID NO: 11928 - RNA, 60 nt, synthetic construct
  source 1..60: mol_type = other RNA
cacagcaaagcctctttggaggctgaatggggtcccccgactctggctttcccccaggtt

SEQ ID NO: 11929 - RNA, 61 nt, synthetic construct
  source 1..61: mol_type = other RNA
acacagcaaagcctctttggaggctgaatggggtcccccgactctggctttcccccaggtg

SEQ ID NO: 11930 - RNA, 61 nt, synthetic construct
  source 1..61: mol_type = other RNA
acacagcaaagcctctttggaggctgaatggggtcccccgactctggctttcccccaggtc

SEQ ID NO: 11931 - RNA, 61 nt, synthetic construct
  source 1..61: mol_type = other RNA
acacagcaaagcctctttggaggctgaatggggtcccccgactctggctttcccccaggtt

SEQ ID NO: 11932 - RNA, 61 nt, synthetic construct
  source 1..61: mol_type = other RNA
acacagcaaagcctctttggaggctgaatggggtcccccgactctggctttcccccaggta

SEQ ID NO: 11933 - RNA, 62 nt, synthetic construct
  source 1..62: mol_type = other RNA
cacacagcaaagcctctttggaggctgaatggggtcccccgactctggctttcccccaggtt

SEQ ID NO: 11934 - RNA, 62 nt, synthetic construct
  source 1..62: mol_type = other RNA
cacacagcaaagcctctttggaggctgaatggggtcccccgactctggctttcccccaggtg

SEQ ID NO: 11935 - RNA, 62 nt, synthetic construct
  source 1..62: mol_type = other RNA
cacacagcaaagcctctttggaggctgaatggggtcccccgactctggctttcccccaggtc

SEQ ID NO: 11936 - RNA, 62 nt, synthetic construct
  source 1..62: mol_type = other RNA
cacacagcaaagcctctttggaggctgaatggggtcccccgactctggctttcccccaggta

SEQ ID NO: 11937 - RNA, 63 nt, synthetic construct
  source 1..63: mol_type = other RNA
gcacacagcaaagcctctttggaggctgaatggggtcccccgactctggctttcccccaggtc

SEQ ID NO: 11938 - RNA, 63 nt, synthetic construct
  source 1..63: mol_type = other RNA
gcacacagcaaagcctctttggaggctgaatggggtcccccgactctggctttcccccaggtg

SEQ ID NO: 11939 - RNA, 63 nt, synthetic construct
  source 1..63: mol_type = other RNA
gcacacagcaaagcctctttggaggctgaatggggtcccccgactctggctttcccccaggta

SEQ ID NO: 11940 - RNA, 63 nt, synthetic construct
  source 1..63: mol_type = other RNA
gcacacagcaaagcctctttggaggctgaatggggtcccccgactctggctttcccccaggtt

SEQ ID NO: 11941 - RNA, 64 nt, synthetic construct
  source 1..64: mol_type = other RNA
tgcacacagcaaagcctctttggaggctgaatggggtcccccgactctggctttcccccaggta

SEQ ID NO: 11942 - RNA, 64 nt, synthetic construct
  source 1..64: mol_type = other RNA
tgcacacagcaaagcctctttggaggctgaatggggtcccccgactctggctttcccccaggtc

SEQ ID NO: 11943 - RNA, 64 nt, synthetic construct
  source 1..64: mol_type = other RNA
tgcacacagcaaagcctctttggaggctgaatggggtcccccgactctggctttcccccaggtg

SEQ ID NO: 11944 - RNA, 64 nt, synthetic construct
  source 1..64: mol_type = other RNA
tgcacacagcaaagcctctttggaggctgaatggggtcccccgactctggctttcccccaggtt

SEQ ID NO: 11945 - RNA, 65 nt, synthetic construct
  source 1..65: mol_type = other RNA
gtgcacacagcaaagcctctttggaggctgaatggggtcccccgactctggctttcccccaggtc

SEQ ID NO: 11946 - RNA, 65 nt, synthetic construct
  source 1..65: mol_type = other RNA
gtgcacacagcaaagcctctttggaggctgaatggggtcccccgactctggctttcccccaggta

SEQ ID NO: 11947 - RNA, 65 nt, synthetic construct
  source 1..65: mol_type = other RNA
gtgcacacagcaaagcctctttggaggctgaatggggtcccccgactctggctttcccccaggtg

SEQ ID NO: 11948 - RNA, 65 nt, synthetic construct
  source 1..65: mol_type = other RNA
gtgcacacagcaaagcctctttggaggctgaatggggtcccccgactctggctttcccccaggtt

SEQ ID NO: 11949 - RNA, 66 nt, synthetic construct
  source 1..66: mol_type = other RNA
ggtgcacacagcaaagcctctttggaggctgaatggggtcccccgactctggctttcccccaggta

SEQ ID NO: 11950 - RNA, 66 nt, synthetic construct
  source 1..66: mol_type = other RNA
ggtgcacacagcaaagcctctttggaggctgaatggggtcccccgactctggctttcccccaggtg

SEQ ID NO: 11951 - RNA, 66 nt, synthetic construct
  source 1..66: mol_type = other RNA
ggtgcacacagcaaagcctctttggaggctgaatggggtcccccgactctggctttcccccaggtc

SEQ ID NO: 11952 - RNA, 66 nt, synthetic construct
  source 1..66: mol_type = other RNA
ggtgcacacagcaaagcctctttggaggctgaatggggtcccccgactctggctttcccccaggtt

SEQ ID NO: 11953 - RNA, 67 nt, synthetic construct
  source 1..67: mol_type = other RNA
gggtgcacacagcaaagcctctttggaggctgaatggggtcccccgactctggctttcccccaggtt

SEQ ID NO: 11954 - RNA, 67 nt, synthetic construct
  source 1..67: mol_type = other RNA
gggtgcacacagcaaagcctctttggaggctgaatggggtcccccgactctggctttcccccaggtc

SEQ ID NO: 11955 - RNA, 67 nt, synthetic construct
  source 1..67: mol_type = other RNA
gggtgcacacagcaaagcctctttggaggctgaatggggtcccccgactctggctttcccccaggtg

SEQ ID NO: 11956 - RNA, 67 nt, synthetic construct
  source 1..67: mol_type = other RNA
gggtgcacacagcaaagcctctttggaggctgaatggggtcccccgactctggctttcccccaggta

SEQ ID NO: 11957 - RNA, 68 nt, synthetic construct
  source 1..68: mol_type = other RNA
tgggtgcacacagcaaagcctctttggaggctgaatggggtcccccgactctggctttcccccaggtt

SEQ ID NO: 11958 - RNA, 68 nt, synthetic construct
  source 1..68: mol_type = other RNA
tgggtgcacacagcaaagcctctttggaggctgaatggggtcccccgactctggctttcccccaggtg

SEQ ID NO: 11959 - RNA, 68 nt, synthetic construct
  source 1..68: mol_type = other RNA
tgggtgcacacagcaaagcctctttggaggctgaatggggtcccccgactctggctttcccccaggtc

SEQ ID NO: 11960 - RNA, 68 nt, synthetic construct
  source 1..68: mol_type = other RNA
tgggtgcacacagcaaagcctctttggaggctgaatggggtcccccgactctggctttcccccaggta

SEQ ID NO: 11961 - RNA, 69 nt, synthetic construct
  source 1..69: mol_type = other RNA
ctgggtgcacacagcaaagcctctttggaggctgaatggggtcccccgactctggctttcccccaggtg

SEQ ID NO: 11962 - RNA, 69 nt, synthetic construct
  source 1..69: mol_type = other RNA
ctgggtgcacacagcaaagcctctttggaggctgaatggggtcccccgactctggctttcccccaggtc

SEQ ID NO: 11963 - RNA, 69 nt, synthetic construct
  source 1..69: mol_type = other RNA
ctgggtgcacacagcaaagcctctttggaggctgaatggggtcccccgactctggctttcccccaggtt

SEQ ID NO: 11964 - RNA, 69 nt, synthetic construct
  source 1..69: mol_type = other RNA
ctgggtgcacacagcaaagcctctttggaggctgaatggggtcccccgactctggctttcccccaggta

SEQ ID NO: 11965 - RNA, 70 nt, synthetic construct
  source 1..70: mol_type = other RNA
cctgggtgcacacagcaaagcctctttggaggctgaatggggtcccccgactctggctttcccccaggtc

SEQ ID NO: 11966 - RNA, 70 nt, synthetic construct
  source 1..70: mol_type = other RNA
cctgggtgcacacagcaaagcctctttggaggctgaatggggtcccccgactctggctttcccccaggtt

SEQ ID NO: 11967 - RNA, 70 nt, synthetic construct
  source 1..70: mol_type = other RNA
cctgggtgcacacagcaaagcctctttggaggctgaatggggtcccccgactctggctttcccccaggtg

SEQ ID NO: 11968 - RNA, 70 nt, synthetic construct
  source 1..70: mol_type = other RNA
cctgggtgcacacagcaaagcctctttggaggctgaatggggtcccccgactctggctttcccccaggta

SEQ ID NO: 11969 - RNA, 71 nt, synthetic construct
  source 1..71: mol_type = other RNA
tcctgggtgcacacagcaaagcctctttggaggctgaatggggtcccccgactctggctttcccccaggtt

SEQ ID NO: 11970 - RNA, 71 nt, synthetic construct
  source 1..71: mol_type = other RNA
tcctgggtgcacacagcaaagcctctttggaggctgaatggggtcccccgactctggctttcccccaggtg

SEQ ID NO: 11971 - RNA, 71 nt, synthetic construct
  source 1..71: mol_type = other RNA
tcctgggtgcacacagcaaagcctctttggaggctgaatggggtcccccgactctggctttcccccaggtc

SEQ ID NO: 11972 - RNA, 71 nt, synthetic construct
  source 1..71: mol_type = other RNA
tcctgggtgcacacagcaaagcctctttggaggctgaatggggtcccccgactctggctttcccccaggta

SEQ ID NO: 11973 - RNA, 72 nt, synthetic construct
  source 1..72: mol_type = other RNA
atcctgggtgcacacagcaaagcctctttggaggctgaatggggtcccccgactctggctttcccccaggtc

SEQ ID NO: 11974 - RNA, 72 nt, synthetic construct
  source 1..72: mol_type = other RNA
atcctgggtgcacacagcaaagcctctttggaggctgaatggggtcccccgactctggctttcccccaggta

SEQ ID NO: 11975 - RNA, 72 nt, synthetic construct
  source 1..72: mol_type = other RNA
atcctgggtgcacacagcaaagcctctttggaggctgaatggggtcccccgactctggctttcccccaggtg

SEQ ID NO: 11976 - RNA, 72 nt, synthetic construct
  source 1..72: mol_type = other RNA
atcctgggtgcacacagcaaagcctctttggaggctgaatggggtcccccgactctggctttcccccaggtt

SEQ ID NO: 11977 - RNA, 73 nt, synthetic construct
  source 1..73: mol_type = other RNA
gatcctgggtgcacacagcaaagcctctttggaggctgaatggggtcccccgactctggctttcccccaggta

SEQ ID NO: 11978 - RNA, 73 nt, synthetic construct
  source 1..73: mol_type = other RNA
gatcctgggtgcacacagcaaagcctctttggaggctgaatggggtcccccgactctggctttcccccaggtg

SEQ ID NO: 11979 - RNA, 73 nt, synthetic construct
  source 1..73: mol_type = other RNA
gatcctgggtgcacacagcaaagcctctttggaggctgaatggggtcccccgactctggctttcccccaggtt

SEQ ID NO: 11980 - RNA, 73 nt, synthetic construct
  source 1..73: mol_type = other RNA
gatcctgggtgcacacagcaaagcctctttggaggctgaatggggtcccccgactctggctttcccccaggtc

SEQ ID NO: 11981 - RNA, 74 nt, synthetic construct
  source 1..74: mol_type = other RNA
ggatcctgggtgcacacagcaaagcctctttggaggctgaatggggtcccccgactctggctttcccccaggta

SEQ ID NO: 11982 - RNA, 74 nt, synthetic construct
  source 1..74: mol_type = other RNA
ggatcctgggtgcacacagcaaagcctctttggaggctgaatggggtcccccgactctggctttcccccaggtg

SEQ ID NO: 11983 - RNA, 74 nt, synthetic construct
  source 1..74: mol_type = other RNA
ggatcctgggtgcacacagcaaagcctctttggaggctgaatggggtcccccgactctggctttcccccaggtt

SEQ ID NO: 11984 - RNA, 74 nt, synthetic construct
  source 1..74: mol_type = other RNA
ggatcctgggtgcacacagcaaagcctctttggaggctgaatggggtcccccgactctggctttcccccaggtc

SEQ ID NO: 11985 - RNA, 75 nt, synthetic construct
  source 1..75: mol_type = other RNA
gggatcctgggtgcacacagcaaagcctctttggaggctgaatggggtcccccgactctggctttcccccaggta

SEQ ID NO: 11986 - RNA, 75 nt, synthetic construct
  source 1..75: mol_type = other RNA
gggatcctgggtgcacacagcaaagcctctttggaggctgaatggggtcccccgactctggctttcccccaggtt

SEQ ID NO: 11987 - RNA, 75 nt, synthetic construct
  source 1..75: mol_type = other RNA
gggatcctgggtgcacacagcaaagcctctttggaggctgaatggggtcccccgactctggctttcccccaggtg

SEQ ID NO: 11988 - RNA, 75 nt, synthetic construct
  source 1..75: mol_type = other RNA
gggatcctgggtgcacacagcaaagcctctttggaggctgaatggggtcccccgactctggctttcccccaggtc

SEQ ID NO: 11989 - RNA, 76 nt, synthetic construct
  source 1..76: mol_type = other RNA
tgggatcctgggtgcacacagcaaagcctctttggaggctgaatggggtcccccgactctggctttcccccaggtg

SEQ ID NO: 11990 - RNA, 76 nt, synthetic construct
  source 1..76: mol_type = other RNA
tgggatcctgggtgcacacagcaaagcctctttggaggctgaatggggtcccccgactctggctttcccccaggtc

SEQ ID NO: 11991 - RNA, 76 nt, synthetic construct
  source 1..76: mol_type = other RNA
tgggatcctgggtgcacacagcaaagcctctttggaggctgaatggggtcccccgactctggctttcccccaggtt

SEQ ID NO: 11992 - RNA, 76 nt, synthetic construct
  source 1..76: mol_type = other RNA
tgggatcctgggtgcacacagcaaagcctctttggaggctgaatggggtcccccgactctggctttcccccaggta

SEQ ID NO: 11993 - RNA, 77 nt, synthetic construct
  source 1..77: mol_type = other RNA
gtgggatcctgggtgcacacagcaaagcctctttggaggctgaatggggtcccccgactctggctttcccccaggta

SEQ ID NO: 11994 - RNA, 77 nt, synthetic construct
  source 1..77: mol_type = other RNA
gtgggatcctgggtgcacacagcaaagcctctttggaggctgaatggggtcccccgactctggctttcccccaggtg

SEQ ID NO: 11995 - RNA, 77 nt, synthetic construct
  source 1..77: mol_type = other RNA
gtgggatcctgggtgcacacagcaaagcctctttggaggctgaatggggtcccccgactctggctttcccccaggtt

SEQ ID NO: 11996 - RNA, 77 nt, synthetic construct
  source 1..77: mol_type = other RNA
gtgggatcctgggtgcacacagcaaagcctctttggaggctgaatggggtcccccgactctggctttcccccaggtc

SEQ ID NO: 11997 - RNA, 78 nt, synthetic construct
  source 1..78: mol_type = other RNA
agtgggatcctgggtgcacacagcaaagcctctttggaggctgaatggggtcccccgactctggctttcccccaggtc

SEQ ID NO: 11998 - RNA, 78 nt, synthetic construct
  source 1..78: mol_type = other RNA
agtgggatcctgggtgcacacagcaaagcctctttggaggctgaatggggtcccccgactctggctttcccccaggtt

SEQ ID NO: 11999 - RNA, 78 nt, synthetic construct
  source 1..78: mol_type = other RNA
agtgggatcctgggtgcacacagcaaagcctctttggaggctgaatggggtcccccgactctggctttcccccaggta

SEQ ID NO: 12000 - RNA, 78 nt, synthetic construct
  source 1..78: mol_type = other RNA
agtgggatcctgggtgcacacagcaaagcctctttggaggctgaatggggtcccccgactctggctttcccccaggtg

SEQ ID NO: 12001 - RNA, 79 nt, synthetic construct
  source 1..79: mol_type = other RNA
tagtgggatcctgggtgcacacagcaaagcctctttggaggctgaatggggtcccccgactctggctttcccccaggtg

SEQ ID NO: 12002 - RNA, 79 nt, synthetic construct
  source 1..79: mol_type = other RNA
tagtgggatcctgggtgcacacagcaaagcctctttggaggctgaatggggtcccccgactctggctttcccccaggtt

SEQ ID NO: 12003 - RNA, 79 nt, synthetic construct
  source 1..79: mol_type = other RNA
tagtgggatcctgggtgcacacagcaaagcctctttggaggctgaatggggtcccccgactctggctttcccccaggtc

SEQ ID NO: 12004 - RNA, 79 nt, synthetic construct
  source 1..79: mol_type = other RNA
tagtgggatcctgggtgcacacagcaaagcctctttggaggctgaatggggtcccccgactctggctttcccccaggta

SEQ ID NO: 12005 - RNA, 80 nt, synthetic construct
  source 1..80: mol_type = other RNA
gtagtgggatcctgggtgcacacagcaaagcctctttggaggctgaatggggtcccccgactctggctttcccccaggtg

SEQ ID NO: 12006 - RNA, 80 nt, synthetic construct
  source 1..80: mol_type = other RNA
gtagtgggatcctgggtgcacacagcaaagcctctttggaggctgaatggggtcccccgactctggctttcccccaggtt

SEQ ID NO: 12007 - RNA, 80 nt, synthetic construct
  source 1..80: mol_type = other RNA
gtagtgggatcctgggtgcacacagcaaagcctctttggaggctgaatggggtcccccgactctggctttcccccaggtc

SEQ ID NO: 12008 - RNA, 80 nt, synthetic construct
  source 1..80: mol_type = other RNA
gtagtgggatcctgggtgcacacagcaaagcctctttggaggctgaatggggtcccccgactctggctttcccccaggta

SEQ ID NO: 12009 - RNA, 81 nt, synthetic construct
  source 1..81: mol_type = other RNA
ggtagtgggatcctgggtgcacacagcaaagcctctttggaggctgaatggggtcccccgactctggctttcccccaggtt

SEQ ID NO: 12010 - RNA, 81 nt, synthetic construct
  source 1..81: mol_type = other RNA
ggtagtgggatcctgggtgcacacagcaaagcctctttggaggctgaatggggtcccccgactctggctttcccccaggtg

SEQ ID NO: 12011 - RNA, 81 nt, synthetic construct
  source 1..81: mol_type = other RNA
ggtagtgggatcctgggtgcacacagcaaagcctctttggaggctgaatggggtcccccgactctggctttcccccaggta

SEQ ID NO: 12012 - RNA, 81 nt, synthetic construct
  source 1..81: mol_type = other RNA
ggtagtgggatcctgggtgcacacagcaaagcctctttggaggctgaatggggtcccccgactctggctttcccccaggtc

SEQ ID NO: 12013 - RNA, 82 nt, synthetic construct
  source 1..82: mol_type = other RNA
gggtagtgggatcctgggtgcacacagcaaagcctctttggaggctgaatggggtcccccgactctggctttcccccaggtc

SEQ ID NO: 12014 - RNA, 82 nt, synthetic construct
  source 1..82: mol_type = other RNA
gggtagtgggatcctgggtgcacacagcaaagcctctttggaggctgaatggggtcccccgactctggctttcccccaggta

SEQ ID NO: 12015 - RNA, 82 nt, synthetic construct
  source 1..82: mol_type = other RNA
gggtagtgggatcctgggtgcacacagcaaagcctctttggaggctgaatggggtcccccgactctggctttcccccaggtg

SEQ ID NO: 12016 - RNA, 82 nt, synthetic construct
  source 1..82: mol_type = other RNA
gggtagtgggatcctgggtgcacacagcaaagcctctttggaggctgaatggggtcccccgactctggctttcccccaggtt

SEQ ID NO: 12017 - RNA, 83 nt, synthetic construct
  source 1..83: mol_type = other RNA
tgggtagtgggatcctgggtgcacacagcaaagcctctttggaggctgaatggggtcccccgactctggctttcccccaggtc

SEQ ID NO: 12018 - RNA, 83 nt, synthetic construct
  source 1..83: mol_type = other RNA
tgggtagtgggatcctgggtgcacacagcaaagcctctttggaggctgaatggggtcccccgactctggctttcccccaggtg

SEQ ID NO: 12019 - RNA, 83 nt, synthetic construct
  source 1..83: mol_type = other RNA
tgggtagtgggatcctgggtgcacacagcaaagcctctttggaggctgaatggggtcccccgactctggctttcccccaggtt

SEQ ID NO: 12020 - RNA, 83 nt, synthetic construct
  source 1..83: mol_type = other RNA
tgggtagtgggatcctgggtgcacacagcaaagcctctttggaggctgaatggggtcccccgactctggctttcccccaggta

SEQ ID NO: 12021 - RNA, 84 nt, synthetic construct
  source 1..84: mol_type = other RNA
gtgggtagtgggatcctgggtgcacacagcaaagcctctttggaggctgaatggggtcccccgactctggctttcccccaggtg

SEQ ID NO: 12022 - RNA, 84 nt, synthetic construct
  source 1..84: mol_type = other RNA
gtgggtagtgggatcctgggtgcacacagcaaagcctctttggaggctgaatggggtcccccgactctggctttcccccaggta

SEQ ID NO: 12023 - RNA, 84 nt, synthetic construct
  source 1..84: mol_type = other RNA
gtgggtagtgggatcctgggtgcacacagcaaagcctctttggaggctgaatggggtcccccgactctggctttcccccaggtt

SEQ ID NO: 12024 - RNA, 84 nt, synthetic construct
  source 1..84: mol_type = other RNA
gtgggtagtgggatcctgggtgcacacagcaaagcctctttggaggctgaatggggtcccccgactctggctttcccccaggtc

SEQ ID NO: 12025 - RNA, 85 nt, synthetic construct
  source 1..85: mol_type = other RNA
agtgggtagtgggatcctgggtgcacacagcaaagcctctttggaggctgaatggggtcccccgactctggctttcccccaggtt

SEQ ID NO: 12026 - RNA, 85 nt, synthetic construct
  source 1..85: mol_type = other RNA
agtgggtagtgggatcctgggtgcacacagcaaagcctctttggaggctgaatggggtcccccgactctggctttcccccaggtg

SEQ ID NO: 12027 - RNA, 85 nt, synthetic construct
  source 1..85: mol_type = other RNA
agtgggtagtgggatcctgggtgcacacagcaaagcctctttggaggctgaatggggtcccccgactctggctttcccccaggtc

SEQ ID NO: 12028 - RNA, 85 nt, synthetic construct
  source 1..85: mol_type = other RNA
agtgggtagtgggatcctgggtgcacacagcaaagcctctttggaggctgaatggggtcccccgactctggctttcccccaggta

SEQ ID NO: 12029 - RNA, 86 nt, synthetic construct
  source 1..86: mol_type = other RNA
cagtgggtagtgggatcctgggtgcacacagcaaagcctctttggaggctgaatggggtcccccgactctggctttcccccaggta

SEQ ID NO: 12030 - RNA, 86 nt, synthetic construct
  source 1..86: mol_type = other RNA
cagtgggtagtgggatcctgggtgcacacagcaaagcctctttggaggctgaatggggtcccccgactctggctttcccccaggtg

SEQ ID NO: 12031 - RNA, 86 nt, synthetic construct
  source 1..86: mol_type = other RNA
cagtgggtagtgggatcctgggtgcacacagcaaagcctctttggaggctgaatggggtcccccgactctggctttcccccaggtt

SEQ ID NO: 12032 - RNA, 86 nt, synthetic construct
  source 1..86: mol_type = other RNA
cagtgggtagtgggatcctgggtgcacacagcaaagcctctttggaggctgaatggggtcccccgactctggctttcccccaggtc

SEQ ID NO: 12033 - RNA, 87 nt, synthetic construct
  source 1..87: mol_type = other RNA
ccagtgggtagtgggatcctgggtgcacacagcaaagcctctttggaggctgaatggggtcccccgactctggctttcccccaggtt

SEQ ID NO: 12034 - RNA, 87 nt, synthetic construct
  source 1..87: mol_type = other RNA
ccagtgggtagtgggatcctgggtgcacacagcaaagcctctttggaggctgaatggggtcccccgactctggctttcccccaggta

SEQ ID NO: 12035 - RNA, 87 nt, synthetic construct
  source 1..87: mol_type = other RNA
ccagtgggtagtgggatcctgggtgcacacagcaaagcctctttggaggctgaatggggtcccccgactctggctttcccccaggtc

SEQ ID NO: 12036 - RNA, 87 nt, synthetic construct
  source 1..87: mol_type = other RNA
ccagtgggtagtgggatcctgggtgcacacagcaaagcctctttggaggctgaatggggtcccccgactctggctttcccccaggtg

SEQ ID NO: 12037 - RNA, 88 nt, synthetic construct
  source 1..88: mol_type = other RNA
tccagtgggtagtgggatcctgggtgcacacagcaaagcctctttggaggctgaatggggtcccccgactctggctttcccccaggtc

SEQ ID NO: 12038 - RNA, 88 nt, synthetic construct
  source 1..88: mol_type = other RNA
tccagtgggtagtgggatcctgggtgcacacagcaaagcctctttggaggctgaatggggtcccccgactctggctttcccccaggtt

SEQ ID NO: 12039 - RNA, 88 nt, synthetic construct
  source 1..88: mol_type = other RNA
tccagtgggtagtgggatcctgggtgcacacagcaaagcctctttggaggctgaatggggtcccccgactctggctttcccccaggta

SEQ ID NO: 12040 - RNA, 88 nt, synthetic construct
  source 1..88: mol_type = other RNA
tccagtgggtagtgggatcctgggtgcacacagcaaagcctctttggaggctgaatggggtcccccgactctggctttcccccaggtg

SEQ ID NO: 12041 - RNA, 89 nt, synthetic construct
  source 1..89: mol_type = other RNA
ctccagtgggtagtgggatcctgggtgcacacagcaaagcctctttggaggctgaatggggtcccccgactctggctttcccccaggtg

SEQ ID NO: 12042 - RNA, 89 nt, synthetic construct
  source 1..89: mol_type = other RNA
ctccagtgggtagtgggatcctgggtgcacacagcaaagcctctttggaggctgaatggggtcccccgactctggctttcccccaggtt

SEQ ID NO: 12043 - RNA, 89 nt, synthetic construct
  source 1..89: mol_type = other RNA
ctccagtgggtagtgggatcctgggtgcacacagcaaagcctctttggaggctgaatggggtcccccgactctggctttcccccaggtc

SEQ ID NO: 12044 - RNA, 89 nt, synthetic construct
  source 1..89: mol_type = other RNA
ctccagtgggtagtgggatcctgggtgcacacagcaaagcctctttggaggctgaatggggtcccccgactctggctttcccccaggta

SEQ ID NO: 12045 - RNA, 90 nt, synthetic construct
  source 1..90: mol_type = other RNA
cctccagtgggtagtgggatcctgggtgcacacagcaaagcctctttggaggctgaatggggtcccccgactctggctttcccccaggta

SEQ ID NO: 12046 - RNA, 90 nt, synthetic construct
  source 1..90: mol_type = other RNA
cctccagtgggtagtgggatcctgggtgcacacagcaaagcctctttggaggctgaatggggtcccccgactctggctttcccccaggtt

SEQ ID NO: 12047 - RNA, 90 nt, synthetic construct
  source 1..90: mol_type = other RNA
cctccagtgggtagtgggatcctgggtgcacacagcaaagcctctttggaggctgaatggggtcccccgactctggctttcccccaggtg

SEQ ID NO: 12048 - RNA, 90 nt, synthetic construct
  source 1..90: mol_type = other RNA
cctccagtgggtagtgggatcctgggtgcacacagcaaagcctctttggaggctgaatggggtcccccgactctggctttcccccaggtc

SEQ ID NO: 12049 - RNA, 91 nt, synthetic construct
  source 1..91: mol_type = other RNA
tcctccagtgggtagtgggatcctgggtgcacacagcaaagcctctttggaggctgaatggggtcccccgactctggctttcccccaggtt

SEQ ID NO: 12050 - RNA, 91 nt, synthetic construct
  source 1..91: mol_type = other RNA
tcctccagtgggtagtgggatcctgggtgcacacagcaaagcctctttggaggctgaatggggtcccccgactctggctttcccccaggtg

SEQ ID NO: 12051 - RNA, 91 nt, synthetic construct
  source 1..91: mol_type = other RNA
tcctccagtgggtagtgggatcctgggtgcacacagcaaagcctctttggaggctgaatggggtcccccgactctggctttcccccaggtc

SEQ ID NO: 12052 - RNA, 91 nt, synthetic construct
  source 1..91: mol_type = other RNA
tcctccagtgggtagtgggatcctgggtgcacacagcaaagcctctttggaggctgaatggggtcccccgactctggctttcccccaggta

SEQ ID NO: 12053 - RNA, 92 nt, synthetic construct
  source 1..92: mol_type = other RNA
ttcctccagtgggtagtgggatcctgggtgcacacagcaaagcctctttggaggctgaatggggtcccccgactctggctttcccccaggta

SEQ ID NO: 12054 - RNA, 92 nt, synthetic construct
  source 1..92: mol_type = other RNA
ttcctccagtgggtagtgggatcctgggtgcacacagcaaagcctctttggaggctgaatggggtcccccgactctggctttcccccaggtt

SEQ ID NO: 12055 - RNA, 92 nt, synthetic construct
  source 1..92: mol_type = other RNA
ttcctccagtgggtagtgggatcctgggtgcacacagcaaagcctctttggaggctgaatggggtcccccgactctggctttcccccaggtc

SEQ ID NO: 12056 - RNA, 92 nt, synthetic construct
  source 1..92: mol_type = other RNA
ttcctccagtgggtagtgggatcctgggtgcacacagcaaagcctctttggaggctgaatggggtcccccgactctggctttcccccaggtg

SEQ ID NO: 12057 - RNA, 93 nt, synthetic construct
  source 1..93: mol_type = other RNA
cttcctccagtgggtagtgggatcctgggtgcacacagcaaagcctctttggaggctgaatggggtcccccgactctggctttcccccaggta

SEQ ID NO: 12058 - RNA, 93 nt, synthetic construct
  source 1..93: mol_type = other RNA
cttcctccagtgggtagtgggatcctgggtgcacacagcaaagcctctttggaggctgaatggggtcccccgactctggctttcccccaggtt

SEQ ID NO: 12059 - RNA, 93 nt, synthetic construct
  source 1..93: mol_type = other RNA
cttcctccagtgggtagtgggatcctgggtgcacacagcaaagcctctttggaggctgaatggggtcccccgactctggctttcccccaggtg

SEQ ID NO: 12060 - RNA, 93 nt, synthetic construct
  source 1..93: mol_type = other RNA
cttcctccagtgggtagtgggatcctgggtgcacacagcaaagcctctttggaggctgaatggggtcccccgactctggctttcccccaggtc

SEQ ID NO: 12061 - RNA, 94 nt, synthetic construct
  source 1..94: mol_type = other RNA
gcttcctccagtgggtagtgggatcctgggtgcacacagcaaagcctctttggaggctgaatggggtcccccgactctggctttcccccaggtc

SEQ ID NO: 12062 - RNA, 94 nt, synthetic construct
  source 1..94: mol_type = other RNA
gcttcctccagtgggtagtgggatcctgggtgcacacagcaaagcctctttggaggctgaatggggtcccccgactctggctttcccccaggtg

SEQ ID NO: 12063 - RNA, 94 nt, synthetic construct
  source 1..94: mol_type = other RNA
gcttcctccagtgggtagtgggatcctgggtgcacacagcaaagcctctttggaggctgaatggggtcccccgactctggctttcccccaggtt

SEQ ID NO: 12064 - RNA, 94 nt, synthetic construct
  source 1..94: mol_type = other RNA
gcttcctccagtgggtagtgggatcctgggtgcacacagcaaagcctctttggaggctgaatggggtcccccgactctggctttcccccaggta

SEQ ID NO: 12065 - RNA, 95 nt, synthetic construct
  source 1..95: mol_type = other RNA
ggcttcctccagtgggtagtgggatcctgggtgcacacagcaaagcctctttggaggctgaatggggtcccccgactctggctttcccccaggtc

SEQ ID NO: 12066 - RNA, 95 nt, synthetic construct
  source 1..95: mol_type = other RNA
ggcttcctccagtgggtagtgggatcctgggtgcacacagcaaagcctctttggaggctgaatggggtcccccgactctggctttcccccaggtg

SEQ ID NO: 12067 - RNA, 95 nt, synthetic construct
  source 1..95: mol_type = other RNA
ggcttcctccagtgggtagtgggatcctgggtgcacacagcaaagcctctttggaggctgaatggggtcccccgactctggctttcccccaggtt

SEQ ID NO: 12068 - RNA, 95 nt, synthetic construct
  source 1..95: mol_type = other RNA
ggcttcctccagtgggtagtgggatcctgggtgcacacagcaaagcctctttggaggctgaatggggtcccccgactctggctttcccccaggta

SEQ ID NO: 12069 - RNA, 96 nt, synthetic construct
  source 1..96: mol_type = other RNA
gggcttcctccagtgggtagtgggatcctgggtgcacacagcaaagcctctttggaggctgaatggggtcccccgactctggctttcccccaggtc

SEQ ID NO: 12070 - RNA, 96 nt, synthetic construct
  source 1..96: mol_type = other RNA
gggcttcctccagtgggtagtgggatcctgggtgcacacagcaaagcctctttggaggctgaatggggtcccccgactctggctttcccccaggtg

SEQ ID NO: 12071 - RNA, 96 nt, synthetic construct
  source 1..96: mol_type = other RNA
gggcttcctccagtgggtagtgggatcctgggtgcacacagcaaagcctctttggaggctgaatggggtcccccgactctggctttcccccaggta

SEQ ID NO: 12072 - RNA, 96 nt, synthetic construct
  source 1..96: mol_type = other RNA
gggcttcctccagtgggtagtgggatcctgggtgcacacagcaaagcctctttggaggctgaatggggtcccccgactctggctttcccccaggtt

SEQ ID NO: 12073 - RNA, 97 nt, synthetic construct
  source 1..97: mol_type = other RNA
tgggcttcctccagtgggtagtgggatcctgggtgcacacagcaaagcctctttggaggctgaatggggtcccccgactctggctttcccccaggtt

SEQ ID NO: 12074 - RNA, 97 nt, synthetic construct
  source 1..97: mol_type = other RNA
tgggcttcctccagtgggtagtgggatcctgggtgcacacagcaaagcctctttggaggctgaatggggtcccccgactctggctttcccccaggtg

SEQ ID NO: 12075 - RNA, 97 nt, synthetic construct
  source 1..97: mol_type = other RNA
tgggcttcctccagtgggtagtgggatcctgggtgcacacagcaaagcctctttggaggctgaatggggtcccccgactctggctttcccccaggtc

SEQ ID NO: 12076 - RNA, 97 nt, synthetic construct
  source 1..97: mol_type = other RNA
tgggcttcctccagtgggtagtgggatcctgggtgcacacagcaaagcctctttggaggctgaatggggtcccccgactctggctttcccccaggta

SEQ ID NO: 12077 - RNA, 98 nt, synthetic construct
  source 1..98: mol_type = other RNA
ctgggcttcctccagtgggtagtgggatcctgggtgcacacagcaaagcctctttggaggctgaatggggtcccccgactctggctttcccccaggtg

SEQ ID NO: 12078 - RNA, 98 nt, synthetic construct
  source 1..98: mol_type = other RNA
ctgggcttcctccagtgggtagtgggatcctgggtgcacacagcaaagcctctttggaggctgaatggggtcccccgactctggctttcccccaggta

SEQ ID NO: 12079 - RNA, 98 nt, synthetic construct
  source 1..98: mol_type = other RNA
ctgggcttcctccagtgggtagtgggatcctgggtgcacacagcaaagcctctttggaggctgaatggggtcccccgactctggctttcccccaggtt

SEQ ID NO: 12080 - RNA, 98 nt, synthetic construct
  source 1..98: mol_type = other RNA
ctgggcttcctccagtgggtagtgggatcctgggtgcacacagcaaagcctctttggaggctgaatggggtcccccgactctggctttcccccaggtc

SEQ ID NO: 12081 - RNA, 99 nt, synthetic construct
  source 1..99: mol_type = other RNA
tctgggcttcctccagtgggtagtgggatcctgggtgcacacagcaaagcctctttggaggctgaatggggtcccccgactctggctttcccccaggta

SEQ ID NO: 12082 - RNA, 99 nt, synthetic construct
  source 1..99: mol_type = other RNA
tctgggcttcctccagtgggtagtgggatcctgggtgcacacagcaaagcctctttggaggctgaatggggtcccccgactctggctttcccccaggtc

SEQ ID NO: 12083 - RNA, 99 nt, synthetic construct
  source 1..99: mol_type = other RNA
tctgggcttcctccagtgggtagtgggatcctgggtgcacacagcaaagcctctttggaggctgaatggggtcccccgactctggctttcccccaggtg

SEQ ID NO: 12084 - RNA, 99 nt, synthetic construct
  source 1..99: mol_type = other RNA
tctgggcttcctccagtgggtagtgggatcctgggtgcacacagcaaagcctctttggaggctgaatggggtcccccgactctggctttcccccaggtt

SEQ ID NO: 12085 - RNA, 100 nt, synthetic construct
  source 1..100: mol_type = other RNA
ctctgggcttcctccagtgggtagtgggatcctgggtgcacacagcaaagcctctttggaggctgaatggggtcccccgactctggctttcccccaggta

SEQ ID NO: 12086 - RNA, 100 nt, synthetic construct
  source 1..100: mol_type = other RNA
ctctgggcttcctccagtgggtagtgggatcctgggtgcacacagcaaagcctctttggaggctgaatggggtcccccgactctggctttcccccaggtc

SEQ ID NO: 12087 - RNA, 100 nt, synthetic construct
  source 1..100: mol_type = other RNA
ctctgggcttcctccagtgggtagtgggatcctgggtgcacacagcaaagcctctttggaggctgaatggggtcccccgactctggctttcccccaggtg

SEQ ID NO: 12088 - RNA, 100 nt, synthetic construct
  source 1..100: mol_type = other RNA
ctctgggcttcctccagtgggtagtgggatcctgggtgcacacagcaaagcctctttggaggctgaatggggtcccccgactctggctttcccccaggtt

SEQ ID NO: 12089 - RNA, 101 nt, synthetic construct
  source 1..101: mol_type = other RNA
cctctgggcttcctccagtgggtagtgggatcctgggtgcacacagcaaagcctctttggaggctgaatggggtcccccgactctggctttcccccaggtc

SEQ ID NO: 12090 - RNA, 101 nt, synthetic construct
  source 1..101: mol_type = other RNA
cctctgggcttcctccagtgggtagtgggatcctgggtgcacacagcaaagcctctttggaggctgaatggggtcccccgactctggctttcccccaggta

SEQ ID NO: 12091 - RNA, 101 nt, synthetic construct
  source 1..101: mol_type = other RNA
cctctgggcttcctccagtgggtagtgggatcctgggtgcacacagcaaagcctctttggaggctgaatggggtcccccgactctggctttcccccaggtt

SEQ ID NO: 12092 - RNA, 101 nt, synthetic construct
  source 1..101: mol_type = other RNA
cctctgggcttcctccagtgggtagtgggatcctgggtgcacacagcaaagcctctttggaggctgaatggggtcccccgactctggctttcccccaggtg

SEQ ID NO: 12093 - RNA, 102 nt, synthetic construct
  source 1..102: mol_type = other RNA
tcctctgggcttcctccagtgggtagtgggatcctgggtgcacacagcaaagcctctttggaggctgaatggggtcccccgactctggctttcccccaggtt

SEQ ID NO: 12094 - RNA, 102 nt, synthetic construct
  source 1..102: mol_type = other RNA
tcctctgggcttcctccagtgggtagtgggatcctgggtgcacacagcaaagcctctttggaggctgaatggggtcccccgactctggctttcccccaggtg

SEQ ID NO: 12095 - RNA, 102 nt, synthetic construct
  source 1..102: mol_type = other RNA
tcctctgggcttcctccagtgggtagtgggatcctgggtgcacacagcaaagcctctttggaggctgaatggggtcccccgactctggctttcccccaggtc

SEQ ID NO: 12096 - RNA, 102 nt, synthetic construct
  source 1..102: mol_type = other RNA
tcctctgggcttcctccagtgggtagtgggatcctgggtgcacacagcaaagcctctttggaggctgaatggggtcccccgactctggctttcccccaggta

SEQ ID NO: 12097 - RNA, 103 nt, synthetic construct
  source 1..103: mol_type = other RNA
atcctctgggcttcctccagtgggtagtgggatcctgggtgcacacagcaaagcctctttggaggctgaatggggtcccccgactctggctttcccccaggtc

SEQ ID NO: 12098 - RNA, 103 nt, synthetic construct
  source 1..103: mol_type = other RNA
atcctctgggcttcctccagtgggtagtgggatcctgggtgcacacagcaaagcctctttggaggctgaatggggtcccccgactctggctttcccccaggtg

SEQ ID NO: 12099 - RNA, 103 nt, synthetic construct
  source 1..103: mol_type = other RNA
atcctctgggcttcctccagtgggtagtgggatcctgggtgcacacagcaaagcctctttggaggctgaatggggtcccccgactctggctttcccccaggtt

SEQ ID NO: 12100 - RNA, 103 nt, synthetic construct
  source 1..103: mol_type = other RNA
atcctctgggcttcctccagtgggtagtgggatcctgggtgcacacagcaaagcctctttggaggctgaatggggtcccccgactctggctttcccccaggta

SEQ ID NO: 12101 - RNA, 119 nt, synthetic construct
  source 1..119: mol_type = other RNA
ttcaccaggaacatgtacctgttttagagctagaaatagcaagttaaaataaggctagtccgttatcaacttgaaaaagtggcaccgagtcggtgctcccccaggtgtacatgttcctg

SEQ ID NO: 12102 - RNA, 121 nt, synthetic construct
  source 1..121: mol_type = other RNA
ttcaccaggaacatgtacctgttttagagctagaaatagcaagttaaaataaggctagtccgttatcaacttgaaaaagtggcaccgagtcggtgctcccccaggtgtacatgttcctggt

SEQ ID NO: 12103 - RNA, 123 nt, synthetic construct
  source 1..123: mol_type = other RNA
ttcaccaggaacatgtacctgttttagagctagaaatagcaagttaaaataaggctagtccgttatcaacttgaaaaagtggcaccgagtcggtgctcccccaggtgtacatgttcctgtttt

SEQ ID NO: 12104 - RNA, 125 nt, synthetic construct
  source 1..125: mol_type = other RNA
ttcaccaggaacatgtacctgttttagagctagaaatagcaagttaaaataaggctagtccgttatcaacttgaaaaagtggcaccgagtcggtgctcccccaggtgtacatgttcctggttttt

SEQ ID NO: 12105 - RNA, 16 nt, synthetic construct
  source 1..16: mol_type = other RNA
ctcgtagatctcggtg

SEQ ID NO: 12106 - RNA, 17 nt, synthetic construct
  source 1..17: mol_type = other RNA
actcgtagatctcggtg

SEQ ID NO: 12107 - RNA, 18 nt, synthetic construct
  source 1..18: mol_type = other RNA
aactcgtagatctcggtg

SEQ ID NO: 12108 - RNA, 19 nt, synthetic construct
  source 1..19: mol_type = other RNA
gaactcgtagatctcggtg

SEQ ID NO: 12109 - RNA, 20 nt, synthetic construct
  source 1..20: mol_type = other RNA
ggaactcgtagatctcggtg

SEQ ID NO: 12110 - RNA, 21 nt, synthetic construct
  source 1..21: mol_type = other RNA
tggaactcgtagatctcggtg

SEQ ID NO: 12111 - RNA, 22 nt, synthetic construct
  source 1..22: mol_type = other RNA
atggaactcgtagatctcggtg

SEQ ID NO: 12112-12118 - skipped (7 entries)

SEQ ID NO: 12119 - RNA, 10 nt, synthetic construct
  source 1..10: mol_type = other RNA
cgagatctac

SEQ ID NO: 12120 - RNA, 11 nt, synthetic construct
  source 1..11: mol_type = other RNA
cgagatctacg

SEQ ID NO: 12121 - RNA, 12 nt, synthetic construct
  source 1..12: mol_type = other RNA
cgagatctacga

SEQ ID NO: 12122 - RNA, 13 nt, synthetic construct
  source 1..13: mol_type = other RNA
cgagatctacgag

SEQ ID NO: 12123 - RNA, 14 nt, synthetic construct
  source 1..14: mol_type = other RNA
cgagatctacgagt

SEQ ID NO: 12124 - RNA, 15 nt, synthetic construct
  source 1..15: mol_type = other RNA
cgagatctacgagtt

SEQ ID NO: 12125 - RNA, 16 nt, synthetic construct
  source 1..16: mol_type = other RNA
cgagatctacgagttc

SEQ ID NO: 12126 - RNA, 17 nt, synthetic construct
  source 1..17: mol_type = other RNA
cgagatctacgagttcc

SEQ ID NO: 12127 - RNA, 18 nt, synthetic construct
  source 1..18: mol_type = other RNA
cgagatctacgagttcca

SEQ ID NO: 12128 - RNA, 19 nt, synthetic construct
  source 1..19: mol_type = other RNA
cgagatctacgagttccat

SEQ ID NO: 12129 - RNA, 62 nt, synthetic construct
  source 1..62: mol_type = other RNA
gtgtacatgttcctggtgaaatggcaggacctgtcggagaaggtggtctaccggaggttcac

SEQ ID NO: 12130 - RNA, 62 nt, synthetic construct
  source 1..62: mol_type = other RNA
gtgtacatgttcctggtgaaatggcaggacctgtcggagaaggtggtctaccggcggttcac

SEQ ID NO: 12131 - RNA, 62 nt, synthetic construct
  source 1..62: mol_type = other RNA
gtatacatgttcctggtgaaatggcaggacctgtcggagaaggtggtctaccggcgattcac

SEQ ID NO: 12132 - RNA, 62 nt, synthetic construct
  source 1..62: mol_type = other RNA
gtttacatgttcctggtgaaatggcaggacctgtcggagaaggtggtctaccggcgcttcac

SEQ ID NO: 12133 - RNA, 62 nt, synthetic construct
  source 1..62: mol_type = other RNA
gtatacatgttcctggtgaaatggcaggacctgtcggagaaggtggtctaccggcgcttcac

SEQ ID NO: 12134 - RNA, 62 nt, synthetic construct
  source 1..62: mol_type = other RNA
gtatacatgttcctggtgaaatggcaggacctgtcggagaaggtggtctaccggcggttcac

SEQ ID NO: 12135 - RNA, 62 nt, synthetic construct
  source 1..62: mol_type = other RNA
gtatacatgttcctggtgaaatggcaggacctgtcggagaaggtggtctaccggcgtttcac

SEQ ID NO: 12136 - RNA, 62 nt, synthetic construct
  source 1..62: mol_type = other RNA
gtttacatgttcctggtgaaatggcaggacctgtcggagaaggtggtctaccggcgattcac

SEQ ID NO: 12137 - RNA, 62 nt, synthetic construct
  source 1..62: mol_type = other RNA
gtctacatgttcctggtgaaatggcaggacctgtcggagaaggtggtctaccggagattcac

SEQ ID NO: 12138 - RNA, 62 nt, synthetic construct
  source 1..62: mol_type = other RNA
gtctacatgttcctggtgaaatggcaggacctgtcggagaaggtggtctaccggaggttcac

SEQ ID NO: 12139 - RNA, 62 nt, synthetic construct
  source 1..62: mol_type = other RNA
gtttacatgttcctggtgaaatggcaggacctgtcggagaaggtggtctaccggaggttcac

SEQ ID NO: 12140 - RNA, 62 nt, synthetic construct
  source 1..62: mol_type = other RNA
gtctacatgttcctggtgaaatggcaggacctgtcggagaaggtggtctaccggcgattcac

SEQ ID NO: 12141 - RNA, 62 nt, synthetic construct
  source 1..62: mol_type = other RNA
gtctacatgttcctggtgaaatggcaggacctgtcggagaaggtggtctaccggcgcttcac

SEQ ID NO: 12142 - RNA, 62 nt, synthetic construct
  source 1..62: mol_type = other RNA
gtatacatgttcctggtgaaatggcaggacctgtcggagaaggtggtctaccggagattcac

SEQ ID NO: 12143 - RNA, 62 nt, synthetic construct
  source 1..62: mol_type = other RNA
gtttacatgttcctggtgaaatggcaggacctgtcggagaaggtggtctaccggcggttcac

SEQ ID NO: 12144 - RNA, 62 nt, synthetic construct
  source 1..62: mol_type = other RNA
gtttacatgttcctggtgaaatggcaggacctgtcggagaaggtggtctaccggagattcac

SEQ ID NO: 12145 - RNA, 62 nt, synthetic construct
  source 1..62: mol_type = other RNA
gtctacatgttcctggtgaaatggcaggacctgtcggagaaggtggtctaccggcggttcac

SEQ ID NO: 12146 - RNA, 62 nt, synthetic construct
  source 1..62: mol_type = other RNA
gtttacatgttcctggtgaaatggcaggacctgtcggagaaggtggtctaccggcgtttcac

SEQ ID NO: 12147 - RNA, 62 nt, synthetic construct
  source 1..62: mol_type = other RNA
gtgtacatgttcctggtgaaatggcaggacctgtcggagaaggtggtctaccggagattcac

SEQ ID NO: 12148 - RNA, 62 nt, synthetic construct
  source 1..62: mol_type = other RNA
gtctacatgttcctggtgaaatggcaggacctgtcggagaaggtggtctaccggcgtttcac

SEQ ID NO: 12149 - RNA, 62 nt, synthetic construct
  source 1..62: mol_type = other RNA
gtgtacatgttcctggtgaaatggcaggacctgtcggagaaggtggtctaccggcgcttcac

SEQ ID NO: 12150 - RNA, 62 nt, synthetic construct
  source 1..62: mol_type = other RNA
gtgtacatgttcctggtgaaatggcaggacctgtcggagaaggtggtctaccggcgtttcac

SEQ ID NO: 12151 - RNA, 62 nt, synthetic construct
  source 1..62: mol_type = other RNA
gtatacatgttcctggtgaaatggcaggacctgtcggagaaggtggtctaccggaggttcac

SEQ ID NO: 12152 - RNA, 62 nt, synthetic construct
  source 1..62: mol_type = other RNA
gtgtacatgttcctggtgaaatggcaggacctgtcggagaaggtggtctaccggcgattcac

SEQ ID NO: 12153 - RNA, 63 nt, synthetic construct
  source 1..63: mol_type = other RNA
ggtttacatgttcctggtgaaatggcaggacctgtcggagaaggtggtctaccggcgcttcac

SEQ ID NO: 12154 - RNA, 63 nt, synthetic construct
  source 1..63: mol_type = other RNA
ggtttacatgttcctggtgaaatggcaggacctgtcggagaaggtggtctaccggaggttcac

SEQ ID NO: 12155 - RNA, 63 nt, synthetic construct
  source 1..63: mol_type = other RNA
ggtttacatgttcctggtgaaatggcaggacctgtcggagaaggtggtctaccggagattcac

SEQ ID NO: 12156 - RNA, 63 nt, synthetic construct
  source 1..63: mol_type = other RNA
ggtgtacatgttcctggtgaaatggcaggacctgtcggagaaggtggtctaccggcgtttcac

SEQ ID NO: 12157 - RNA, 63 nt, synthetic construct
  source 1..63: mol_type = other RNA
ggtgtacatgttcctggtgaaatggcaggacctgtcggagaaggtggtctaccggcggttcac

SEQ ID NO: 12158 - RNA, 63 nt, synthetic construct
  source 1..63: mol_type = other RNA
ggtgtacatgttcctggtgaaatggcaggacctgtcggagaaggtggtctaccggcgcttcac

SEQ ID NO: 12159 - RNA, 63 nt, synthetic construct
  source 1..63: mol_type = other RNA
ggtttacatgttcctggtgaaatggcaggacctgtcggagaaggtggtctaccggcgtttcac

SEQ ID NO: 12160 - RNA, 63 nt, synthetic construct
  source 1..63: mol_type = other RNA
ggtgtacatgttcctggtgaaatggcaggacctgtcggagaaggtggtctaccggcgattcac

SEQ ID NO: 12161 - RNA, 63 nt, synthetic construct
  source 1..63: mol_type = other RNA
ggtgtacatgttcctggtgaaatggcaggacctgtcggagaaggtggtctaccggagattcac

SEQ ID NO: 12162 - RNA, 63 nt, synthetic construct
  source 1..63: mol_type = other RNA
ggtctacatgttcctggtgaaatggcaggacctgtcggagaaggtggtctaccggcggttcac

SEQ ID NO: 12163 - RNA, 63 nt, synthetic construct
  source 1..63: mol_type = other RNA
ggtttacatgttcctggtgaaatggcaggacctgtcggagaaggtggtctaccggcgattcac

SEQ ID NO: 12164 - RNA, 63 nt, synthetic construct
  source 1..63: mol_type = other RNA
ggtctacatgttcctggtgaaatggcaggacctgtcggagaaggtggtctaccggcgtttcac

SEQ ID NO: 12165 - RNA, 63 nt, synthetic construct
  source 1..63: mol_type = other RNA
ggtctacatgttcctggtgaaatggcaggacctgtcggagaaggtggtctaccggcgcttcac

SEQ ID NO: 12166 - RNA, 63 nt, synthetic construct
  source 1..63: mol_type = other RNA
ggtctacatgttcctggtgaaatggcaggacctgtcggagaaggtggtctaccggagattcac

SEQ ID NO: 12167 - RNA, 63 nt, synthetic construct
  source 1..63: mol_type = other RNA
ggtgtacatgttcctggtgaaatggcaggacctgtcggagaaggtggtctaccggaggttcac

SEQ ID NO: 12168 - RNA, 63 nt, synthetic construct
  source 1..63: mol_type = other RNA
ggtatacatgttcctggtgaaatggcaggacctgtcggagaaggtggtctaccggcgtttcac

SEQ ID NO: 12169 - RNA, 63 nt, synthetic construct
  source 1..63: mol_type = other RNA
ggtctacatgttcctggtgaaatggcaggacctgtcggagaaggtggtctaccggaggttcac

SEQ ID NO: 12170 - RNA, 63 nt, synthetic construct
  source 1..63: mol_type = other RNA
ggtttacatgttcctggtgaaatggcaggacctgtcggagaaggtggtctaccggcggttcac

SEQ ID NO: 12171 - RNA, 63 nt, synthetic construct
  source 1..63: mol_type = other RNA
ggtatacatgttcctggtgaaatggcaggacctgtcggagaaggtggtctaccggaggttcac

SEQ ID NO: 12172 - RNA, 63 nt, synthetic construct
  source 1..63: mol_type = other RNA
ggtatacatgttcctggtgaaatggcaggacctgtcggagaaggtggtctaccggcgattcac

SEQ ID NO: 12173 - RNA, 63 nt, synthetic construct
  source 1..63: mol_type = other RNA
ggtctacatgttcctggtgaaatggcaggacctgtcggagaaggtggtctaccggcgattcac

SEQ ID NO: 12174 - RNA, 63 nt, synthetic construct
  source 1..63: mol_type = other RNA
ggtatacatgttcctggtgaaatggcaggacctgtcggagaaggtggtctaccggcggttcac

SEQ ID NO: 12175 - RNA, 63 nt, synthetic construct
  source 1..63: mol_type = other RNA
ggtatacatgttcctggtgaaatggcaggacctgtcggagaaggtggtctaccggcgcttcac

SEQ ID NO: 12176 - RNA, 63 nt, synthetic construct
  source 1..63: mol_type = other RNA
ggtatacatgttcctggtgaaatggcaggacctgtcggagaaggtggtctaccggagattcac

SEQ ID NO: 12177 - RNA, 64 nt, synthetic construct
  source 1..64: mol_type = other RNA
aggtttacatgttcctggtgaaatggcaggacctgtcggagaaggtggtctaccggcgattcac

SEQ ID NO: 12178 - RNA, 64 nt, synthetic construct
  source 1..64: mol_type = other RNA
aggtttacatgttcctggtgaaatggcaggacctgtcggagaaggtggtctaccggagattcac

SEQ ID NO: 12179 - RNA, 64 nt, synthetic construct
  source 1..64: mol_type = other RNA
aggtgtacatgttcctggtgaaatggcaggacctgtcggagaaggtggtctaccggcggttcac

SEQ ID NO: 12180 - RNA, 64 nt, synthetic construct
  source 1..64: mol_type = other RNA
aggtgtacatgttcctggtgaaatggcaggacctgtcggagaaggtggtctaccggcgattcac

SEQ ID NO: 12181 - RNA, 64 nt, synthetic construct
  source 1..64: mol_type = other RNA
aggtgtacatgttcctggtgaaatggcaggacctgtcggagaaggtggtctaccggaggttcac

SEQ ID NO: 12182 - RNA, 64 nt, synthetic construct
  source 1..64: mol_type = other RNA
aggtgtacatgttcctggtgaaatggcaggacctgtcggagaaggtggtctaccggcgcttcac

SEQ ID NO: 12183 - RNA, 64 nt, synthetic construct
  source 1..64: mol_type = other RNA
aggtgtacatgttcctggtgaaatggcaggacctgtcggagaaggtggtctaccggagattcac

SEQ ID NO: 12184 - RNA, 64 nt, synthetic construct
  source 1..64: mol_type = other RNA
aggtctacatgttcctggtgaaatggcaggacctgtcggagaaggtggtctaccggcgtttcac

SEQ ID NO: 12185 - RNA, 64 nt, synthetic construct
  source 1..64: mol_type = other RNA
aggtctacatgttcctggtgaaatggcaggacctgtcggagaaggtggtctaccggcgcttcac

SEQ ID NO: 12186 - RNA, 64 nt, synthetic construct
  source 1..64: mol_type = other RNA
aggtatacatgttcctggtgaaatggcaggacctgtcggagaaggtggtctaccggagattcac

SEQ ID NO: 12187 - RNA, 64 nt, synthetic construct
  source 1..64: mol_type = other RNA
aggtctacatgttcctggtgaaatggcaggacctgtcggagaaggtggtctaccggcgattcac

SEQ ID NO: 12188 - RNA, 64 nt, synthetic construct
  source 1..64: mol_type = other RNA
aggtctacatgttcctggtgaaatggcaggacctgtcggagaaggtggtctaccggagattcac

SEQ ID NO: 12189 - RNA, 64 nt, synthetic construct
  source 1..64: mol_type = other RNA
aggtatacatgttcctggtgaaatggcaggacctgtcggagaaggtggtctaccggcggttcac

SEQ ID NO: 12190 - RNA, 64 nt, synthetic construct
  source 1..64: mol_type = other RNA
aggtatacatgttcctggtgaaatggcaggacctgtcggagaaggtggtctaccggcgtttcac

SEQ ID NO: 12191 - RNA, 64 nt, synthetic construct
  source 1..64: mol_type = other RNA
aggtatacatgttcctggtgaaatggcaggacctgtcggagaaggtggtctaccggcgcttcac

SEQ ID NO: 12192 - RNA, 64 nt, synthetic construct
  source 1..64: mol_type = other RNA
aggtatacatgttcctggtgaaatggcaggacctgtcggagaaggtggtctaccggcgattcac

SEQ ID NO: 12193 - RNA, 64 nt, synthetic construct
  source 1..64: mol_type = other RNA
aggtgtacatgttcctggtgaaatggcaggacctgtcggagaaggtggtctaccggcgtttcac

SEQ ID NO: 12194 - RNA, 64 nt, synthetic construct
  source 1..64: mol_type = other RNA
aggtctacatgttcctggtgaaatggcaggacctgtcggagaaggtggtctaccggcggttcac

SEQ ID NO: 12195 - RNA, 64 nt, synthetic construct
  source 1..64: mol_type = other RNA
aggtatacatgttcctggtgaaatggcaggacctgtcggagaaggtggtctaccggaggttcac

SEQ ID NO: 12196 - RNA, 64 nt, synthetic construct
  source 1..64: mol_type = other RNA
aggtctacatgttcctggtgaaatggcaggacctgtcggagaaggtggtctaccggaggttcac

SEQ ID NO: 12197 - RNA, 64 nt, synthetic construct
  source 1..64: mol_type = other RNA
aggtttacatgttcctggtgaaatggcaggacctgtcggagaaggtggtctaccggcgcttcac

SEQ ID NO: 12198 - RNA, 64 nt, synthetic construct
  source 1..64: mol_type = other RNA
aggtttacatgttcctggtgaaatggcaggacctgtcggagaaggtggtctaccggcggttcac

SEQ ID NO: 12199 - RNA, 64 nt, synthetic construct
  source 1..64: mol_type = other RNA
aggtttacatgttcctggtgaaatggcaggacctgtcggagaaggtggtctaccggcgtttcac

SEQ ID NO: 12200 - RNA, 64 nt, synthetic construct
  source 1..64: mol_type = other RNA
aggtttacatgttcctggtgaaatggcaggacctgtcggagaaggtggtctaccggaggttcac

SEQ ID NO: 12201 - RNA, 65 nt, synthetic construct
  source 1..65: mol_type = other RNA
caggtttacatgttcctggtgaaatggcaggacctgtcggagaaggtggtctaccggcgtttcac

SEQ ID NO: 12202 - RNA, 65 nt, synthetic construct
  source 1..65: mol_type = other RNA
caggtctacatgttcctggtgaaatggcaggacctgtcggagaaggtggtctaccggcgcttcac

SEQ ID NO: 12203 - RNA, 65 nt, synthetic construct
  source 1..65: mol_type = other RNA
caggtttacatgttcctggtgaaatggcaggacctgtcggagaaggtggtctaccggcgcttcac

SEQ ID NO: 12204 - RNA, 65 nt, synthetic construct
  source 1..65: mol_type = other RNA
caggtatacatgttcctggtgaaatggcaggacctgtcggagaaggtggtctaccggagattcac

SEQ ID NO: 12205 - RNA, 65 nt, synthetic construct
  source 1..65: mol_type = other RNA
caggtgtacatgttcctggtgaaatggcaggacctgtcggagaaggtggtctaccggcgattcac

SEQ ID NO: 12206 - RNA, 65 nt, synthetic construct
  source 1..65: mol_type = other RNA
caggtctacatgttcctggtgaaatggcaggacctgtcggagaaggtggtctaccggcgtttcac

SEQ ID NO: 12207 - RNA, 65 nt, synthetic construct
  source 1..65: mol_type = other RNA
caggtttacatgttcctggtgaaatggcaggacctgtcggagaaggtggtctaccggcggttcac

SEQ ID NO: 12208 - RNA, 65 nt, synthetic construct
  source 1..65: mol_type = other RNA
caggtttacatgttcctggtgaaatggcaggacctgtcggagaaggtggtctaccggcgattcac

SEQ ID NO: 12209 - RNA, 65 nt, synthetic construct
  source 1..65: mol_type = other RNA
caggtttacatgttcctggtgaaatggcaggacctgtcggagaaggtggtctaccggagattcac

SEQ ID NO: 12210 - RNA, 65 nt, synthetic construct
  source 1..65: mol_type = other RNA
caggtgtacatgttcctggtgaaatggcaggacctgtcggagaaggtggtctaccggcgtttcac

SEQ ID NO: 12211 - RNA, 65 nt, synthetic construct
  source 1..65: mol_type = other RNA
caggtgtacatgttcctggtgaaatggcaggacctgtcggagaaggtggtctaccggcggttcac

SEQ ID NO: 12212 - RNA, 65 nt, synthetic construct
  source 1..65: mol_type = other RNA
caggtatacatgttcctggtgaaatggcaggacctgtcggagaaggtggtctaccggcgcttcac

SEQ ID NO: 12213 - RNA, 65 nt, synthetic construct
  source 1..65: mol_type = other RNA
caggtgtacatgttcctggtgaaatggcaggacctgtcggagaaggtggtctaccggcgcttcac

SEQ ID NO: 12214 - RNA, 65 nt, synthetic construct
  source 1..65: mol_type = other RNA
caggtgtacatgttcctggtgaaatggcaggacctgtcggagaaggtggtctaccggaggttcac

SEQ ID NO: 12215 - RNA, 65 nt, synthetic construct
  source 1..65: mol_type = other RNA
caggtgtacatgttcctggtgaaatggcaggacctgtcggagaaggtggtctaccggagattcac

SEQ ID NO: 12216 - RNA, 65 nt, synthetic construct
  source 1..65: mol_type = other RNA
caggtctacatgttcctggtgaaatggcaggacctgtcggagaaggtggtctaccggcggttcac

SEQ ID NO: 12217 - RNA, 65 nt, synthetic construct
  source 1..65: mol_type = other RNA
caggtatacatgttcctggtgaaatggcaggacctgtcggagaaggtggtctaccggaggttcac

SEQ ID NO: 12218 - RNA, 65 nt, synthetic construct
  source 1..65: mol_type = other RNA
caggtctacatgttcctggtgaaatggcaggacctgtcggagaaggtggtctaccggaggttcac

SEQ ID NO: 12219 - RNA, 65 nt, synthetic construct
  source 1..65: mol_type = other RNA
caggtctacatgttcctggtgaaatggcaggacctgtcggagaaggtggtctaccggcgattcac

SEQ ID NO: 12220 - RNA, 65 nt, synthetic construct
  source 1..65: mol_type = other RNA
caggtttacatgttcctggtgaaatggcaggacctgtcggagaaggtggtctaccggaggttcac

SEQ ID NO: 12221 - RNA, 65 nt, synthetic construct
  source 1..65: mol_type = other RNA
caggtctacatgttcctggtgaaatggcaggacctgtcggagaaggtggtctaccggagattcac

SEQ ID NO: 12222 - RNA, 65 nt, synthetic construct
  source 1..65: mol_type = other RNA
caggtatacatgttcctggtgaaatggcaggacctgtcggagaaggtggtctaccggcgtttcac

SEQ ID NO: 12223 - RNA, 65 nt, synthetic construct
  source 1..65: mol_type = other RNA
caggtatacatgttcctggtgaaatggcaggacctgtcggagaaggtggtctaccggcggttcac

SEQ ID NO: 12224 - RNA, 65 nt, synthetic construct
  source 1..65: mol_type = other RNA
caggtatacatgttcctggtgaaatggcaggacctgtcggagaaggtggtctaccggcgattcac

SEQ ID NO: 12225 - RNA, 66 nt, synthetic construct
  source 1..66: mol_type = other RNA
ccaggtctacatgttcctggtgaaatggcaggacctgtcggagaaggtggtctaccggcgtttcac

SEQ ID NO: 12226 - RNA, 66 nt, synthetic construct
  source 1..66: mol_type = other RNA
ccaggtttacatgttcctggtgaaatggcaggacctgtcggagaaggtggtctaccggcgtttcac

SEQ ID NO: 12227 - RNA, 66 nt, synthetic construct
  source 1..66: mol_type = other RNA
ccaggtgtacatgttcctggtgaaatggcaggacctgtcggagaaggtggtctaccggagattcac

SEQ ID NO: 12228 - RNA, 66 nt, synthetic construct
  source 1..66: mol_type = other RNA
ccaggtgtacatgttcctggtgaaatggcaggacctgtcggagaaggtggtctaccggaggttcac

SEQ ID NO: 12229 - RNA, 66 nt, synthetic construct
  source 1..66: mol_type = other RNA
ccaggtgtacatgttcctggtgaaatggcaggacctgtcggagaaggtggtctaccggcgattcac

SEQ ID NO: 12230 - RNA, 66 nt, synthetic construct
  source 1..66: mol_type = other RNA
ccaggtttacatgttcctggtgaaatggcaggacctgtcggagaaggtggtctaccggagattcac

SEQ ID NO: 12231 - RNA, 66 nt, synthetic construct
  source 1..66: mol_type = other RNA
ccaggtgtacatgttcctggtgaaatggcaggacctgtcggagaaggtggtctaccggcggttcac

SEQ ID NO: 12232 - RNA, 66 nt, synthetic construct
  source 1..66: mol_type = other RNA
ccaggtgtacatgttcctggtgaaatggcaggacctgtcggagaaggtggtctaccggcgtttcac

SEQ ID NO: 12233 - RNA, 66 nt, synthetic construct
  source 1..66: mol_type = other RNA
ccaggtttacatgttcctggtgaaatggcaggacctgtcggagaaggtggtctaccggaggttcac

SEQ ID NO: 12234 - RNA, 66 nt, synthetic construct
  source 1..66: mol_type = other RNA
ccaggtttacatgttcctggtgaaatggcaggacctgtcggagaaggtggtctaccggcgattcac

SEQ ID NO: 12235 - RNA, 66 nt, synthetic construct
  source 1..66: mol_type = other RNA
ccaggtttacatgttcctggtgaaatggcaggacctgtcggagaaggtggtctaccggcgcttcac

SEQ ID NO: 12236 - RNA, 66 nt, synthetic construct
  source 1..66: mol_type = other RNA
ccaggtttacatgttcctggtgaaatggcaggacctgtcggagaaggtggtctaccggcggttcac

SEQ ID NO: 12237 - RNA, 66 nt, synthetic construct
  source 1..66: mol_type = other RNA
ccaggtgtacatgttcctggtgaaatggcaggacctgtcggagaaggtggtctaccggcgcttcac

SEQ ID NO: 12238 - RNA, 66 nt, synthetic construct
  source 1..66: mol_type = other RNA
ccaggtatacatgttcctggtgaaatggcaggacctgtcggagaaggtggtctaccggcgtttcac

SEQ ID NO: 12239 - RNA, 66 nt, synthetic construct
  source 1..66: mol_type = other RNA
ccaggtatacatgttcctggtgaaatggcaggacctgtcggagaaggtggtctaccggcggttcac

SEQ ID NO: 12240 - RNA, 66 nt, synthetic construct
  source 1..66: mol_type = other RNA
ccaggtctacatgttcctggtgaaatggcaggacctgtcggagaaggtggtctaccggcgcttcac

SEQ ID NO: 12241 - RNA, 66 nt, synthetic construct
  source 1..66: mol_type = other RNA
ccaggtctacatgttcctggtgaaatggcaggacctgtcggagaaggtggtctaccggagattcac

SEQ ID NO: 12242 - RNA, 66 nt, synthetic construct
  source 1..66: mol_type = other RNA
ccaggtctacatgttcctggtgaaatggcaggacctgtcggagaaggtggtctaccggaggttcac

SEQ ID NO: 12243 - RNA, 66 nt, synthetic construct
  source 1..66: mol_type = other RNA
ccaggtatacatgttcctggtgaaatggcaggacctgtcggagaaggtggtctaccggcgcttcac

SEQ ID NO: 12244 - RNA, 66 nt, synthetic construct
  source 1..66: mol_type = other RNA
ccaggtatacatgttcctggtgaaatggcaggacctgtcggagaaggtggtctaccggcgattcac

SEQ ID NO: 12245 - RNA, 66 nt, synthetic construct
  source 1..66: mol_type = other RNA
ccaggtatacatgttcctggtgaaatggcaggacctgtcggagaaggtggtctaccggaggttcac

SEQ ID NO: 12246 - RNA, 66 nt, synthetic construct
  source 1..66: mol_type = other RNA
ccaggtatacatgttcctggtgaaatggcaggacctgtcggagaaggtggtctaccggagattcac

SEQ ID NO: 12247 - RNA, 66 nt, synthetic construct
  source 1..66: mol_type = other RNA
ccaggtctacatgttcctggtgaaatggcaggacctgtcggagaaggtggtctaccggcgattcac

SEQ ID NO: 12248 - RNA, 66 nt, synthetic construct
  source 1..66: mol_type = other RNA
ccaggtctacatgttcctggtgaaatggcaggacctgtcggagaaggtggtctaccggcggttcac

SEQ ID NO: 12249 - RNA, 67 nt, synthetic construct
  source 1..67: mol_type = other RNA
cccaggtctacatgttcctggtgaaatggcaggacctgtcggagaaggtggtctaccggcgtttcac

SEQ ID NO: 12250 - RNA, 67 nt, synthetic construct
  source 1..67: mol_type = other RNA
cccaggtctacatgttcctggtgaaatggcaggacctgtcggagaaggtggtctaccggcggttcac

SEQ ID NO: 12251 - RNA, 67 nt, synthetic construct
  source 1..67: mol_type = other RNA
cccaggtctacatgttcctggtgaaatggcaggacctgtcggagaaggtggtctaccggcgcttcac

SEQ ID NO: 12252 - RNA, 67 nt, synthetic construct
  source 1..67: mol_type = other RNA
cccaggtctacatgttcctggtgaaatggcaggacctgtcggagaaggtggtctaccggcgattcac

SEQ ID NO: 12253 - RNA, 67 nt, synthetic construct
  source 1..67: mol_type = other RNA
cccaggtctacatgttcctggtgaaatggcaggacctgtcggagaaggtggtctaccggagattcac

SEQ ID NO: 12254 - RNA, 67 nt, synthetic construct
  source 1..67: mol_type = other RNA
cccaggtttacatgttcctggtgaaatggcaggacctgtcggagaaggtggtctaccggcggttcac

SEQ ID NO: 12255 - RNA, 67 nt, synthetic construct
  source 1..67: mol_type = other RNA
cccaggtatacatgttcctggtgaaatggcaggacctgtcggagaaggtggtctaccggcgcttcac

SEQ ID NO: 12256 - RNA, 67 nt, synthetic construct
  source 1..67: mol_type = other RNA
cccaggtatacatgttcctggtgaaatggcaggacctgtcggagaaggtggtctaccggcgattcac

SEQ ID NO: 12257 - RNA, 67 nt, synthetic construct
  source 1..67: mol_type = other RNA
cccaggtatacatgttcctggtgaaatggcaggacctgtcggagaaggtggtctaccggaggttcac

SEQ ID NO: 12258 - RNA, 67 nt, synthetic construct
  source 1..67: mol_type = other RNA
cccaggtatacatgttcctggtgaaatggcaggacctgtcggagaaggtggtctaccggagattcac

SEQ ID NO: 12259 - RNA, 67 nt, synthetic construct
  source 1..67: mol_type = other RNA
cccaggtgtacatgttcctggtgaaatggcaggacctgtcggagaaggtggtctaccggaggttcac

SEQ ID NO: 12260 - RNA, 67 nt, synthetic construct
  source 1..67: mol_type = other RNA
cccaggtatacatgttcctggtgaaatggcaggacctgtcggagaaggtggtctaccggcgtttcac

SEQ ID NO: 12261 - RNA, 67 nt, synthetic construct
  source 1..67: mol_type = other RNA
cccaggtttacatgttcctggtgaaatggcaggacctgtcggagaaggtggtctaccggcgcttcac

SEQ ID NO: 12262 - RNA, 67 nt, synthetic construct
  source 1..67: mol_type = other RNA
cccaggtgtacatgttcctggtgaaatggcaggacctgtcggagaaggtggtctaccggcgattcac

SEQ ID NO: 12263 - RNA, 67 nt, synthetic construct
  source 1..67: mol_type = other RNA
cccaggtgtacatgttcctggtgaaatggcaggacctgtcggagaaggtggtctaccggcggttcac

SEQ ID NO: 12264 - RNA, 67 nt, synthetic construct
  source 1..67: mol_type = other RNA
cccaggtgtacatgttcctggtgaaatggcaggacctgtcggagaaggtggtctaccggcgcttcac

SEQ ID NO: 12265 - RNA, 67 nt, synthetic construct
  source 1..67: mol_type = other RNA
cccaggtttacatgttcctggtgaaatggcaggacctgtcggagaaggtggtctaccggcgtttcac

SEQ ID NO: 12266 - RNA, 67 nt, synthetic construct
  source 1..67: mol_type = other RNA
cccaggtttacatgttcctggtgaaatggcaggacctgtcggagaaggtggtctaccggcgattcac

SEQ ID NO: 12267 - RNA, 67 nt, synthetic construct
  source 1..67: mol_type = other RNA
cccaggtgtacatgttcctggtgaaatggcaggacctgtcggagaaggtggtctaccggcgtttcac

SEQ ID NO: 12268 - RNA, 67 nt, synthetic construct
  source 1..67: mol_type = other RNA
cccaggtatacatgttcctggtgaaatggcaggacctgtcggagaaggtggtctaccggcggttcac

SEQ ID NO: 12269 - RNA, 67 nt, synthetic construct
  source 1..67: mol_type = other RNA
cccaggtgtacatgttcctggtgaaatggcaggacctgtcggagaaggtggtctaccggagattcac

SEQ ID NO: 12270 - RNA, 67 nt, synthetic construct
  source 1..67: mol_type = other RNA
cccaggtttacatgttcctggtgaaatggcaggacctgtcggagaaggtggtctaccggagattcac

SEQ ID NO: 12271 - RNA, 67 nt, synthetic construct
  source 1..67: mol_type = other RNA
cccaggtttacatgttcctggtgaaatggcaggacctgtcggagaaggtggtctaccggaggttcac

SEQ ID NO: 12272 - RNA, 67 nt, synthetic construct
  source 1..67: mol_type = other RNA
cccaggtctacatgttcctggtgaaatggcaggacctgtcggagaaggtggtctaccggaggttcac

SEQ ID NO: 12273 - RNA, 68 nt, synthetic construct
  source 1..68: mol_type = other RNA
ccccaggtctacatgttcctggtgaaatggcaggacctgtcggagaaggtggtctaccggcgtttcac

SEQ ID NO: 12274 - RNA, 68 nt, synthetic construct
  source 1..68: mol_type = other RNA
ccccaggtgtacatgttcctggtgaaatggcaggacctgtcggagaaggtggtctaccggaggttcac

SEQ ID NO: 12275 - RNA, 68 nt, synthetic construct
  source 1..68: mol_type = other RNA
ccccaggtatacatgttcctggtgaaatggcaggacctgtcggagaaggtggtctaccggcgcttcac

SEQ ID NO: 12276 - RNA, 68 nt, synthetic construct
  source 1..68: mol_type = other RNA
ccccaggtctacatgttcctggtgaaatggcaggacctgtcggagaaggtggtctaccggcgattcac

SEQ ID NO: 12277 - RNA, 68 nt, synthetic construct
  source 1..68: mol_type = other RNA
ccccaggtctacatgttcctggtgaaatggcaggacctgtcggagaaggtggtctaccggaggttcac

SEQ ID NO: 12278 - RNA, 68 nt, synthetic construct
  source 1..68: mol_type = other RNA
ccccaggtctacatgttcctggtgaaatggcaggacctgtcggagaaggtggtctaccggagattcac

SEQ ID NO: 12279 - RNA, 68 nt, synthetic construct
  source 1..68: mol_type = other RNA
ccccaggtatacatgttcctggtgaaatggcaggacctgtcggagaaggtggtctaccggcgtttcac

SEQ ID NO: 12280 - RNA, 68 nt, synthetic construct
  source 1..68: mol_type = other RNA
ccccaggtatacatgttcctggtgaaatggcaggacctgtcggagaaggtggtctaccggcggttcac

SEQ ID NO: 12281 - RNA, 68 nt, synthetic construct
  source 1..68: mol_type = other RNA
ccccaggtatacatgttcctggtgaaatggcaggacctgtcggagaaggtggtctaccggcgattcac

SEQ ID NO: 12282 - RNA, 68 nt, synthetic construct
  source 1..68: mol_type = other RNA
ccccaggtatacatgttcctggtgaaatggcaggacctgtcggagaaggtggtctaccggaggttcac

SEQ ID NO: 12283 - RNA, 68 nt, synthetic construct
  source 1..68: mol_type = other RNA
ccccaggtatacatgttcctggtgaaatggcaggacctgtcggagaaggtggtctaccggagattcac

SEQ ID NO: 12284 - RNA, 68 nt, synthetic construct
  source 1..68: mol_type = other RNA
ccccaggtgtacatgttcctggtgaaatggcaggacctgtcggagaaggtggtctaccggagattcac

SEQ ID NO: 12285 - RNA, 68 nt, synthetic construct
  source 1..68: mol_type = other RNA
ccccaggtgtacatgttcctggtgaaatggcaggacctgtcggagaaggtggtctaccggcgattcac

SEQ ID NO: 12286 - RNA, 68 nt, synthetic construct
  source 1..68: mol_type = other RNA
ccccaggtctacatgttcctggtgaaatggcaggacctgtcggagaaggtggtctaccggcggttcac

SEQ ID NO: 12287 - RNA, 68 nt, synthetic construct
  source 1..68: mol_type = other RNA
ccccaggtgtacatgttcctggtgaaatggcaggacctgtcggagaaggtggtctaccggcgcttcac

SEQ ID NO: 12288 - RNA, 68 nt, synthetic construct
  source 1..68: mol_type = other RNA
ccccaggtgtacatgttcctggtgaaatggcaggacctgtcggagaaggtggtctaccggcggttcac

SEQ ID NO: 12289 - RNA, 68 nt, synthetic construct
  source 1..68: mol_type = other RNA
ccccaggtgtacatgttcctggtgaaatggcaggacctgtcggagaaggtggtctaccggcgtttcac

SEQ ID NO: 12290 - RNA, 68 nt, synthetic construct
  source 1..68: mol_type = other RNA
ccccaggtttacatgttcctggtgaaatggcaggacctgtcggagaaggtggtctaccggcggttcac

SEQ ID NO: 12291 - RNA, 68 nt, synthetic construct
  source 1..68: mol_type = other RNA
ccccaggtctacatgttcctggtgaaatggcaggacctgtcggagaaggtggtctaccggcgcttcac

SEQ ID NO: 12292 - RNA, 68 nt, synthetic construct
  source 1..68: mol_type = other RNA
ccccaggtttacatgttcctggtgaaatggcaggacctgtcggagaaggtggtctaccggcgtttcac

SEQ ID NO: 12293 - RNA, 68 nt, synthetic construct
  source 1..68: mol_type = other RNA
ccccaggtttacatgttcctggtgaaatggcaggacctgtcggagaaggtggtctaccggcgcttcac

SEQ ID NO: 12294 - RNA, 68 nt, synthetic construct
  source 1..68: mol_type = other RNA
ccccaggtttacatgttcctggtgaaatggcaggacctgtcggagaaggtggtctaccggcgattcac

SEQ ID NO: 12295 - RNA, 68 nt, synthetic construct
  source 1..68: mol_type = other RNA
ccccaggtttacatgttcctggtgaaatggcaggacctgtcggagaaggtggtctaccggaggttcac

SEQ ID NO: 12296 - RNA, 68 nt, synthetic construct
  source 1..68: mol_type = other RNA
ccccaggtttacatgttcctggtgaaatggcaggacctgtcggagaaggtggtctaccggagattcac

SEQ ID NO: 12297 - RNA, 69 nt, synthetic construct
  source 1..69: mol_type = other RNA
cccccaggtctacatgttcctggtgaaatggcaggacctgtcggagaaggtggtctaccggcgtttcac

SEQ ID NO: 12298 - RNA, 69 nt, synthetic construct
  source 1..69: mol_type = other RNA
cccccaggtctacatgttcctggtgaaatggcaggacctgtcggagaaggtggtctaccggagattcac

SEQ ID NO: 12299 - RNA, 69 nt, synthetic construct
  source 1..69: mol_type = other RNA
cccccaggtatacatgttcctggtgaaatggcaggacctgtcggagaaggtggtctaccggcgtttcac

SEQ ID NO: 12300 - RNA, 69 nt, synthetic construct
  source 1..69: mol_type = other RNA
cccccaggtatacatgttcctggtgaaatggcaggacctgtcggagaaggtggtctaccggcgcttcac

SEQ ID NO: 12301 - RNA, 69 nt, synthetic construct
  source 1..69: mol_type = other RNA
cccccaggtatacatgttcctggtgaaatggcaggacctgtcggagaaggtggtctaccggcggttcac

SEQ ID NO: 12302 - RNA, 69 nt, synthetic construct
  source 1..69: mol_type = other RNA
cccccaggtctacatgttcctggtgaaatggcaggacctgtcggagaaggtggtctaccggcggttcac

SEQ ID NO: 12303 - RNA, 69 nt, synthetic construct
  source 1..69: mol_type = other RNA
cccccaggtatacatgttcctggtgaaatggcaggacctgtcggagaaggtggtctaccggcgattcac

SEQ ID NO: 12304 - RNA, 69 nt, synthetic construct
  source 1..69: mol_type = other RNA
cccccaggtatacatgttcctggtgaaatggcaggacctgtcggagaaggtggtctaccggaggttcac

SEQ ID NO: 12305 - RNA, 69 nt, synthetic construct
  source 1..69: mol_type = other RNA
cccccaggtatacatgttcctggtgaaatggcaggacctgtcggagaaggtggtctaccggagattcac

SEQ ID NO: 12306 - RNA, 69 nt, synthetic construct
  source 1..69: mol_type = other RNA
cccccaggtctacatgttcctggtgaaatggcaggacctgtcggagaaggtggtctaccggcgcttcac

SEQ ID NO: 12307 - RNA, 69 nt, synthetic construct
  source 1..69: mol_type = other RNA
cccccaggtgtacatgttcctggtgaaatggcaggacctgtcggagaaggtggtctaccggaggttcac

SEQ ID NO: 12308 - RNA, 69 nt, synthetic construct
  source 1..69: mol_type = other RNA
cccccaggtctacatgttcctggtgaaatggcaggacctgtcggagaaggtggtctaccggaggttcac

SEQ ID NO: 12309 - RNA, 69 nt, synthetic construct
  source 1..69: mol_type = other RNA
cccccaggtgtacatgttcctggtgaaatggcaggacctgtcggagaaggtggtctaccggcgcttcac

SEQ ID NO: 12310 - RNA, 69 nt, synthetic construct
  source 1..69: mol_type = other RNA
cccccaggtgtacatgttcctggtgaaatggcaggacctgtcggagaaggtggtctaccggagattcac

SEQ ID NO: 12311 - RNA, 69 nt, synthetic construct
  source 1..69: mol_type = other RNA
cccccaggtgtacatgttcctggtgaaatggcaggacctgtcggagaaggtggtctaccggcgattcac

SEQ ID NO: 12312 - RNA, 69 nt, synthetic construct
  source 1..69: mol_type = other RNA
cccccaggtgtacatgttcctggtgaaatggcaggacctgtcggagaaggtggtctaccggcggttcac

SEQ ID NO: 12313 - RNA, 69 nt, synthetic construct
  source 1..69: mol_type = other RNA
cccccaggtgtacatgttcctggtgaaatggcaggacctgtcggagaaggtggtctaccggcgtttcac

SEQ ID NO: 12314 - RNA, 69 nt, synthetic construct
  source 1..69: mol_type = other RNA
cccccaggtttacatgttcctggtgaaatggcaggacctgtcggagaaggtggtctaccggaggttcac

SEQ ID NO: 12315 - RNA, 69 nt, synthetic construct
  source 1..69: mol_type = other RNA
cccccaggtttacatgttcctggtgaaatggcaggacctgtcggagaaggtggtctaccggcgattcac

SEQ ID NO: 12316 - RNA, 69 nt, synthetic construct
  source 1..69: mol_type = other RNA
cccccaggtttacatgttcctggtgaaatggcaggacctgtcggagaaggtggtctaccggcgcttcac

SEQ ID NO: 12317 - RNA, 69 nt, synthetic construct
  source 1..69: mol_type = other RNA
cccccaggtttacatgttcctggtgaaatggcaggacctgtcggagaaggtggtctaccggcggttcac

SEQ ID NO: 12318 - RNA, 69 nt, synthetic construct
  source 1..69: mol_type = other RNA
cccccaggtttacatgttcctggtgaaatggcaggacctgtcggagaaggtggtctaccggcgtttcac

SEQ ID NO: 12319 - RNA, 69 nt, synthetic construct
  source 1..69: mol_type = other RNA
cccccaggtttacatgttcctggtgaaatggcaggacctgtcggagaaggtggtctaccggagattcac

SEQ ID NO: 12320 - RNA, 69 nt, synthetic construct
  source 1..69: mol_type = other RNA
cccccaggtctacatgttcctggtgaaatggcaggacctgtcggagaaggtggtctaccggcgattcac

SEQ ID NO: 12321 - RNA, 70 nt, synthetic construct
  source 1..70: mol_type = other RNA
tcccccaggtttacatgttcctggtgaaatggcaggacctgtcggagaaggtggtctaccggcgcttcac

SEQ ID NO: 12322 - RNA, 70 nt, synthetic construct
  source 1..70: mol_type = other RNA
tcccccaggtctacatgttcctggtgaaatggcaggacctgtcggagaaggtggtctaccggcgcttcac

SEQ ID NO: 12323 - RNA, 70 nt, synthetic construct
  source 1..70: mol_type = other RNA
tcccccaggtctacatgttcctggtgaaatggcaggacctgtcggagaaggtggtctaccggaggttcac

SEQ ID NO: 12324 - RNA, 70 nt, synthetic construct
  source 1..70: mol_type = other RNA
tcccccaggtctacatgttcctggtgaaatggcaggacctgtcggagaaggtggtctaccggagattcac

SEQ ID NO: 12325 - RNA, 70 nt, synthetic construct
  source 1..70: mol_type = other RNA
tcccccaggtttacatgttcctggtgaaatggcaggacctgtcggagaaggtggtctaccggcggttcac

SEQ ID NO: 12326 - RNA, 70 nt, synthetic construct
  source 1..70: mol_type = other RNA
tcccccaggtatacatgttcctggtgaaatggcaggacctgtcggagaaggtggtctaccggagattcac

SEQ ID NO: 12327 - RNA, 70 nt, synthetic construct
  source 1..70: mol_type = other RNA
tcccccaggtttacatgttcctggtgaaatggcaggacctgtcggagaaggtggtctaccggagattcac

SEQ ID NO: 12328 - RNA, 70 nt, synthetic construct
  source 1..70: mol_type = other RNA
tcccccaggtgtacatgttcctggtgaaatggcaggacctgtcggagaaggtggtctaccggcgtttcac

SEQ ID NO: 12329 - RNA, 70 nt, synthetic construct
  source 1..70: mol_type = other RNA
tcccccaggtgtacatgttcctggtgaaatggcaggacctgtcggagaaggtggtctaccggcggttcac

SEQ ID NO: 12330 - RNA, 70 nt, synthetic construct
  source 1..70: mol_type = other RNA
tcccccaggtgtacatgttcctggtgaaatggcaggacctgtcggagaaggtggtctaccggcgcttcac

SEQ ID NO: 12331 - RNA, 70 nt, synthetic construct
  source 1..70: mol_type = other RNA
tcccccaggtttacatgttcctggtgaaatggcaggacctgtcggagaaggtggtctaccggcgtttcac

SEQ ID NO: 12332 - RNA, 70 nt, synthetic construct
  source 1..70: mol_type = other RNA
tcccccaggtctacatgttcctggtgaaatggcaggacctgtcggagaaggtggtctaccggcggttcac

SEQ ID NO: 12333 - RNA, 70 nt, synthetic construct
  source 1..70: mol_type = other RNA
tcccccaggtgtacatgttcctggtgaaatggcaggacctgtcggagaaggtggtctaccggaggttcac

SEQ ID NO: 12334 - RNA, 70 nt, synthetic construct
  source 1..70: mol_type = other RNA
tcccccaggtatacatgttcctggtgaaatggcaggacctgtcggagaaggtggtctaccggcggttcac

SEQ ID NO: 12335 - RNA, 70 nt, synthetic construct
  source 1..70: mol_type = other RNA
tcccccaggtgtacatgttcctggtgaaatggcaggacctgtcggagaaggtggtctaccggagattcac

SEQ ID NO: 12336 - RNA, 70 nt, synthetic construct
  source 1..70: mol_type = other RNA
tcccccaggtttacatgttcctggtgaaatggcaggacctgtcggagaaggtggtctaccggaggttcac

SEQ ID NO: 12337 - RNA, 70 nt, synthetic construct
  source 1..70: mol_type = other RNA
tcccccaggtttacatgttcctggtgaaatggcaggacctgtcggagaaggtggtctaccggcgattcac

SEQ ID NO: 12338 - RNA, 70 nt, synthetic construct
  source 1..70: mol_type = other RNA
tcccccaggtatacatgttcctggtgaaatggcaggacctgtcggagaaggtggtctaccggaggttcac

SEQ ID NO: 12339 - RNA, 70 nt, synthetic construct
  source 1..70: mol_type = other RNA
tcccccaggtatacatgttcctggtgaaatggcaggacctgtcggagaaggtggtctaccggcgattcac

SEQ ID NO: 12340 - RNA, 70 nt, synthetic construct
  source 1..70: mol_type = other RNA
tcccccaggtatacatgttcctggtgaaatggcaggacctgtcggagaaggtggtctaccggcgcttcac

SEQ ID NO: 12341 - RNA, 70 nt, synthetic construct
  source 1..70: mol_type = other RNA
tcccccaggtgtacatgttcctggtgaaatggcaggacctgtcggagaaggtggtctaccggcgattcac

SEQ ID NO: 12342 - RNA, 70 nt, synthetic construct
  source 1..70: mol_type = other RNA
tcccccaggtatacatgttcctggtgaaatggcaggacctgtcggagaaggtggtctaccggcgtttcac

SEQ ID NO: 12343 - RNA, 70 nt, synthetic construct
  source 1..70: mol_type = other RNA
tcccccaggtctacatgttcctggtgaaatggcaggacctgtcggagaaggtggtctaccggcgtttcac

SEQ ID NO: 12344 - RNA, 70 nt, synthetic construct
  source 1..70: mol_type = other RNA
tcccccaggtctacatgttcctggtgaaatggcaggacctgtcggagaaggtggtctaccggcgattcac

SEQ ID NO: 12345 - RNA, 71 nt, synthetic construct
  source 1..71: mol_type = other RNA
ttcccccaggtttacatgttcctggtgaaatggcaggacctgtcggagaaggtggtctaccggcgcttcac

SEQ ID NO: 12346 - RNA, 71 nt, synthetic construct
  source 1..71: mol_type = other RNA
ttcccccaggtgtacatgttcctggtgaaatggcaggacctgtcggagaaggtggtctaccggaggttcac

SEQ ID NO: 12347 - RNA, 71 nt, synthetic construct
  source 1..71: mol_type = other RNA
ttcccccaggtctacatgttcctggtgaaatggcaggacctgtcggagaaggtggtctaccggcggttcac

SEQ ID NO: 12348 - RNA, 71 nt, synthetic construct
  source 1..71: mol_type = other RNA
ttcccccaggtttacatgttcctggtgaaatggcaggacctgtcggagaaggtggtctaccggcgattcac

SEQ ID NO: 12349 - RNA, 71 nt, synthetic construct
  source 1..71: mol_type = other RNA
ttcccccaggtttacatgttcctggtgaaatggcaggacctgtcggagaaggtggtctaccggaggttcac

SEQ ID NO: 12350 - RNA, 71 nt, synthetic construct
  source 1..71: mol_type = other RNA
ttcccccaggtgtacatgttcctggtgaaatggcaggacctgtcggagaaggtggtctaccggcgtttcac

SEQ ID NO: 12351 - RNA, 71 nt, synthetic construct
  source 1..71: mol_type = other RNA
ttcccccaggtgtacatgttcctggtgaaatggcaggacctgtcggagaaggtggtctaccggagattcac

SEQ ID NO: 12352 - RNA, 71 nt, synthetic construct
  source 1..71: mol_type = other RNA
ttcccccaggtgtacatgttcctggtgaaatggcaggacctgtcggagaaggtggtctaccggcggttcac

SEQ ID NO: 12353 - RNA, 71 nt, synthetic construct
  source 1..71: mol_type = other RNA
ttcccccaggtgtacatgttcctggtgaaatggcaggacctgtcggagaaggtggtctaccggcgcttcac

SEQ ID NO: 12354 - RNA, 71 nt, synthetic construct
  source 1..71: mol_type = other RNA
ttcccccaggtttacatgttcctggtgaaatggcaggacctgtcggagaaggtggtctaccggcgtttcac

SEQ ID NO: 12355 - RNA, 71 nt, synthetic construct
  source 1..71: mol_type = other RNA
ttcccccaggtttacatgttcctggtgaaatggcaggacctgtcggagaaggtggtctaccggagattcac

SEQ ID NO: 12356 - RNA, 71 nt, synthetic construct
  source 1..71: mol_type = other RNA
ttcccccaggtctacatgttcctggtgaaatggcaggacctgtcggagaaggtggtctaccggcgtttcac

SEQ ID NO: 12357 - RNA, 71 nt, synthetic construct
  source 1..71: mol_type = other RNA
ttcccccaggtctacatgttcctggtgaaatggcaggacctgtcggagaaggtggtctaccggcgcttcac

SEQ ID NO: 12358 - RNA, 71 nt, synthetic construct
  source 1..71: mol_type = other RNA
ttcccccaggtctacatgttcctggtgaaatggcaggacctgtcggagaaggtggtctaccggcgattcac

SEQ ID NO: 12359 - RNA, 71 nt, synthetic construct
  source 1..71: mol_type = other RNA
ttcccccaggtctacatgttcctggtgaaatggcaggacctgtcggagaaggtggtctaccggaggttcac

SEQ ID NO: 12360 - RNA, 71 nt, synthetic construct
  source 1..71: mol_type = other RNA
ttcccccaggtgtacatgttcctggtgaaatggcaggacctgtcggagaaggtggtctaccggcgattcac

SEQ ID NO: 12361 - RNA, 71 nt, synthetic construct
  source 1..71: mol_type = other RNA
ttcccccaggtatacatgttcctggtgaaatggcaggacctgtcggagaaggtggtctaccggcgtttcac

SEQ ID NO: 12362 - RNA, 71 nt, synthetic construct
  source 1..71: mol_type = other RNA
ttcccccaggtatacatgttcctggtgaaatggcaggacctgtcggagaaggtggtctaccggcgcttcac

SEQ ID NO: 12363 - RNA, 71 nt, synthetic construct
  source 1..71: mol_type = other RNA
ttcccccaggtatacatgttcctggtgaaatggcaggacctgtcggagaaggtggtctaccggcgattcac

SEQ ID NO: 12364 - RNA, 71 nt, synthetic construct
  source 1..71: mol_type = other RNA
ttcccccaggtatacatgttcctggtgaaatggcaggacctgtcggagaaggtggtctaccggaggttcac

SEQ ID NO: 12365 - RNA, 71 nt, synthetic construct
  source 1..71: mol_type = other RNA
ttcccccaggtatacatgttcctggtgaaatggcaggacctgtcggagaaggtggtctaccggagattcac

SEQ ID NO: 12366 - RNA, 71 nt, synthetic construct
  source 1..71: mol_type = other RNA
ttcccccaggtttacatgttcctggtgaaatggcaggacctgtcggagaaggtggtctaccggcggttcac

SEQ ID NO: 12367 - RNA, 71 nt, synthetic construct
  source 1..71: mol_type = other RNA
ttcccccaggtctacatgttcctggtgaaatggcaggacctgtcggagaaggtggtctaccggagattcac

SEQ ID NO: 12368 - RNA, 71 nt, synthetic construct
  source 1..71: mol_type = other RNA
ttcccccaggtatacatgttcctggtgaaatggcaggacctgtcggagaaggtggtctaccggcggttcac

SEQ ID NO: 12369 - RNA, 72 nt, synthetic construct
  source 1..72: mol_type = other RNA
tttcccccaggtttacatgttcctggtgaaatggcaggacctgtcggagaaggtggtctaccggcgtttcac

SEQ ID NO: 12370 - RNA, 72 nt, synthetic construct
  source 1..72: mol_type = other RNA
tttcccccaggtgtacatgttcctggtgaaatggcaggacctgtcggagaaggtggtctaccggagattcac

SEQ ID NO: 12371 - RNA, 72 nt, synthetic construct
  source 1..72: mol_type = other RNA
tttcccccaggtttacatgttcctggtgaaatggcaggacctgtcggagaaggtggtctaccggcggttcac

SEQ ID NO: 12372 - RNA, 72 nt, synthetic construct
  source 1..72: mol_type = other RNA
tttcccccaggtttacatgttcctggtgaaatggcaggacctgtcggagaaggtggtctaccggcgcttcac

SEQ ID NO: 12373 - RNA, 72 nt, synthetic construct
  source 1..72: mol_type = other RNA
tttcccccaggtttacatgttcctggtgaaatggcaggacctgtcggagaaggtggtctaccggcgattcac

SEQ ID NO: 12374 - RNA, 72 nt, synthetic construct
  source 1..72: mol_type = other RNA
tttcccccaggtttacatgttcctggtgaaatggcaggacctgtcggagaaggtggtctaccggagattcac

SEQ ID NO: 12375 - RNA, 72 nt, synthetic construct
  source 1..72: mol_type = other RNA
tttcccccaggtttacatgttcctggtgaaatggcaggacctgtcggagaaggtggtctaccggaggttcac

SEQ ID NO: 12376 - RNA, 72 nt, synthetic construct
  source 1..72: mol_type = other RNA
tttcccccaggtgtacatgttcctggtgaaatggcaggacctgtcggagaaggtggtctaccggcgtttcac

SEQ ID NO: 12377 - RNA, 72 nt, synthetic construct
  source 1..72: mol_type = other RNA
tttcccccaggtgtacatgttcctggtgaaatggcaggacctgtcggagaaggtggtctaccggcggttcac

SEQ ID NO: 12378 - RNA, 72 nt, synthetic construct
  source 1..72: mol_type = other RNA
tttcccccaggtgtacatgttcctggtgaaatggcaggacctgtcggagaaggtggtctaccggcgattcac

SEQ ID NO: 12379 - RNA, 72 nt, synthetic construct
  source 1..72: mol_type = other RNA
tttcccccaggtatacatgttcctggtgaaatggcaggacctgtcggagaaggtggtctaccggcgcttcac

SEQ ID NO: 12380 - RNA, 72 nt, synthetic construct
  source 1..72: mol_type = other RNA
tttcccccaggtatacatgttcctggtgaaatggcaggacctgtcggagaaggtggtctaccggcgattcac

SEQ ID NO: 12381 - RNA, 72 nt, synthetic construct
  source 1..72: mol_type = other RNA
tttcccccaggtgtacatgttcctggtgaaatggcaggacctgtcggagaaggtggtctaccggaggttcac

SEQ ID NO: 12382 - RNA, 72 nt, synthetic construct
  source 1..72: mol_type = other RNA
tttcccccaggtctacatgttcctggtgaaatggcaggacctgtcggagaaggtggtctaccggcgtttcac

SEQ ID NO: 12383 - RNA, 72 nt, synthetic construct
  source 1..72: mol_type = other RNA
tttcccccaggtctacatgttcctggtgaaatggcaggacctgtcggagaaggtggtctaccggcggttcac

SEQ ID NO: 12384 - RNA, 72 nt, synthetic construct
  source 1..72: mol_type = other RNA
tttcccccaggtgtacatgttcctggtgaaatggcaggacctgtcggagaaggtggtctaccggcgcttcac

SEQ ID NO: 12385 - RNA, 72 nt, synthetic construct
  source 1..72: mol_type = other RNA
tttcccccaggtctacatgttcctggtgaaatggcaggacctgtcggagaaggtggtctaccggcgcttcac

SEQ ID NO: 12386 - RNA, 72 nt, synthetic construct
  source 1..72: mol_type = other RNA
tttcccccaggtctacatgttcctggtgaaatggcaggacctgtcggagaaggtggtctaccggcgattcac

SEQ ID NO: 12387 - RNA, 72 nt, synthetic construct
  source 1..72: mol_type = other RNA
tttcccccaggtctacatgttcctggtgaaatggcaggacctgtcggagaaggtggtctaccggaggttcac

SEQ ID NO: 12388 - RNA, 72 nt, synthetic construct
  source 1..72: mol_type = other RNA
tttcccccaggtctacatgttcctggtgaaatggcaggacctgtcggagaaggtggtctaccggagattcac

SEQ ID NO: 12389 - RNA, 72 nt, synthetic construct
  source 1..72: mol_type = other RNA
tttcccccaggtatacatgttcctggtgaaatggcaggacctgtcggagaaggtggtctaccggcgtttcac

SEQ ID NO: 12390 - RNA, 72 nt, synthetic construct
  source 1..72: mol_type = other RNA
tttcccccaggtatacatgttcctggtgaaatggcaggacctgtcggagaaggtggtctaccggagattcac

SEQ ID NO: 12391 - RNA, 72 nt, synthetic construct
  source 1..72: mol_type = other RNA
tttcccccaggtatacatgttcctggtgaaatggcaggacctgtcggagaaggtggtctaccggcggttcac

SEQ ID NO: 12392 - RNA, 72 nt, synthetic construct
  source 1..72: mol_type = other RNA
tttcccccaggtatacatgttcctggtgaaatggcaggacctgtcggagaaggtggtctaccggaggttcac

SEQ ID NO: 12393 - RNA, 73 nt, synthetic construct
  source 1..73: mol_type = other RNA
ctttcccccaggtatacatgttcctggtgaaatggcaggacctgtcggagaaggtggtctaccggagattcac

SEQ ID NO: 12394 - RNA, 73 nt, synthetic construct
  source 1..73: mol_type = other RNA
ctttcccccaggtatacatgttcctggtgaaatggcaggacctgtcggagaaggtggtctaccggaggttcac

SEQ ID NO: 12395 - RNA, 73 nt, synthetic construct
  source 1..73: mol_type = other RNA
ctttcccccaggtatacatgttcctggtgaaatggcaggacctgtcggagaaggtggtctaccggcgattcac

SEQ ID NO: 12396 - RNA, 73 nt, synthetic construct
  source 1..73: mol_type = other RNA
ctttcccccaggtctacatgttcctggtgaaatggcaggacctgtcggagaaggtggtctaccggcggttcac

SEQ ID NO: 12397 - RNA, 73 nt, synthetic construct
  source 1..73: mol_type = other RNA
ctttcccccaggtatacatgttcctggtgaaatggcaggacctgtcggagaaggtggtctaccggcggttcac

SEQ ID NO: 12398 - RNA, 73 nt, synthetic construct
  source 1..73: mol_type = other RNA
ctttcccccaggtatacatgttcctggtgaaatggcaggacctgtcggagaaggtggtctaccggcgcttcac

SEQ ID NO: 12399 - RNA, 73 nt, synthetic construct
  source 1..73: mol_type = other RNA
ctttcccccaggtatacatgttcctggtgaaatggcaggacctgtcggagaaggtggtctaccggcgtttcac

SEQ ID NO: 12400 - RNA, 73 nt, synthetic construct
  source 1..73: mol_type = other RNA
ctttcccccaggtctacatgttcctggtgaaatggcaggacctgtcggagaaggtggtctaccggagattcac

SEQ ID NO: 12401 - RNA, 73 nt, synthetic construct
  source 1..73: mol_type = other RNA
ctttcccccaggtctacatgttcctggtgaaatggcaggacctgtcggagaaggtggtctaccggaggttcac

SEQ ID NO: 12402 - RNA, 73 nt, synthetic construct
  source 1..73: mol_type = other RNA
ctttcccccaggtctacatgttcctggtgaaatggcaggacctgtcggagaaggtggtctaccggcgcttcac

SEQ ID NO: 12403 - RNA, 73 nt, synthetic construct
  source 1..73: mol_type = other RNA
ctttcccccaggtgtacatgttcctggtgaaatggcaggacctgtcggagaaggtggtctaccggaggttcac

SEQ ID NO: 12404 - RNA, 73 nt, synthetic construct
  source 1..73: mol_type = other RNA
ctttcccccaggtgtacatgttcctggtgaaatggcaggacctgtcggagaaggtggtctaccggcgtttcac

SEQ ID NO: 12405 - RNA, 73 nt, synthetic construct
  source 1..73: mol_type = other RNA
ctttcccccaggtgtacatgttcctggtgaaatggcaggacctgtcggagaaggtggtctaccggagattcac

SEQ ID NO: 12406 - RNA, 73 nt, synthetic construct
  source 1..73: mol_type = other RNA
ctttcccccaggtttacatgttcctggtgaaatggcaggacctgtcggagaaggtggtctaccggcgattcac

SEQ ID NO: 12407 - RNA, 73 nt, synthetic construct
  source 1..73: mol_type = other RNA
ctttcccccaggtgtacatgttcctggtgaaatggcaggacctgtcggagaaggtggtctaccggcgcttcac

SEQ ID NO: 12408 - RNA, 73 nt, synthetic construct
  source 1..73: mol_type = other RNA
ctttcccccaggtctacatgttcctggtgaaatggcaggacctgtcggagaaggtggtctaccggcgattcac

SEQ ID NO: 12409 - RNA, 73 nt, synthetic construct
  source 1..73: mol_type = other RNA
ctttcccccaggtttacatgttcctggtgaaatggcaggacctgtcggagaaggtggtctaccggcgtttcac

SEQ ID NO: 12410 - RNA, 73 nt, synthetic construct
  source 1..73: mol_type = other RNA
ctttcccccaggtttacatgttcctggtgaaatggcaggacctgtcggagaaggtggtctaccggcggttcac

SEQ ID NO: 12411 - RNA, 73 nt, synthetic construct
  source 1..73: mol_type = other RNA
ctttcccccaggtttacatgttcctggtgaaatggcaggacctgtcggagaaggtggtctaccggcgcttcac

SEQ ID NO: 12412 - RNA, 73 nt, synthetic construct
  source 1..73: mol_type = other RNA
ctttcccccaggtttacatgttcctggtgaaatggcaggacctgtcggagaaggtggtctaccggaggttcac

SEQ ID NO: 12413 - RNA, 73 nt, synthetic construct
  source 1..73: mol_type = other RNA
ctttcccccaggtttacatgttcctggtgaaatggcaggacctgtcggagaaggtggtctaccggagattcac

SEQ ID NO: 12414 - RNA, 73 nt, synthetic construct
  source 1..73: mol_type = other RNA
ctttcccccaggtgtacatgttcctggtgaaatggcaggacctgtcggagaaggtggtctaccggcggttcac

SEQ ID NO: 12415 - RNA, 73 nt, synthetic construct
  source 1..73: mol_type = other RNA
ctttcccccaggtgtacatgttcctggtgaaatggcaggacctgtcggagaaggtggtctaccggcgattcac

SEQ ID NO: 12416 - RNA, 73 nt, synthetic construct
  source 1..73: mol_type = other RNA
ctttcccccaggtctacatgttcctggtgaaatggcaggacctgtcggagaaggtggtctaccggcgtttcac

SEQ ID NO: 12417 - RNA, 74 nt, synthetic construct
  source 1..74: mol_type = other RNA
gctttcccccaggtctacatgttcctggtgaaatggcaggacctgtcggagaaggtggtctaccggagattcac

SEQ ID NO: 12418 - RNA, 74 nt, synthetic construct
  source 1..74: mol_type = other RNA
gctttcccccaggtctacatgttcctggtgaaatggcaggacctgtcggagaaggtggtctaccggcgcttcac

SEQ ID NO: 12419 - RNA, 74 nt, synthetic construct
  source 1..74: mol_type = other RNA
gctttcccccaggtatacatgttcctggtgaaatggcaggacctgtcggagaaggtggtctaccggcggttcac

SEQ ID NO: 12420 - RNA, 74 nt, synthetic construct
  source 1..74: mol_type = other RNA
gctttcccccaggtgtacatgttcctggtgaaatggcaggacctgtcggagaaggtggtctaccggcggttcac

SEQ ID NO: 12421 - RNA, 74 nt, synthetic construct
  source 1..74: mol_type = other RNA
gctttcccccaggtttacatgttcctggtgaaatggcaggacctgtcggagaaggtggtctaccggaggttcac

SEQ ID NO: 12422 - RNA, 74 nt, synthetic construct
  source 1..74: mol_type = other RNA
gctttcccccaggtttacatgttcctggtgaaatggcaggacctgtcggagaaggtggtctaccggcgtttcac

SEQ ID NO: 12423 - RNA, 74 nt, synthetic construct
  source 1..74: mol_type = other RNA
gctttcccccaggtgtacatgttcctggtgaaatggcaggacctgtcggagaaggtggtctaccggcgtttcac

SEQ ID NO: 12424 - RNA, 74 nt, synthetic construct
  source 1..74: mol_type = other RNA
gctttcccccaggtttacatgttcctggtgaaatggcaggacctgtcggagaaggtggtctaccggagattcac

SEQ ID NO: 12425 - RNA, 74 nt, synthetic construct
  source 1..74: mol_type = other RNA
gctttcccccaggtgtacatgttcctggtgaaatggcaggacctgtcggagaaggtggtctaccggcgcttcac

SEQ ID NO: 12426 - RNA, 74 nt, synthetic construct
  source 1..74: mol_type = other RNA
gctttcccccaggtgtacatgttcctggtgaaatggcaggacctgtcggagaaggtggtctaccggaggttcac

SEQ ID NO: 12427 - RNA, 74 nt, synthetic construct
  source 1..74: mol_type = other RNA
gctttcccccaggtttacatgttcctggtgaaatggcaggacctgtcggagaaggtggtctaccggcggttcac

SEQ ID NO: 12428 - RNA, 74 nt, synthetic construct
  source 1..74: mol_type = other RNA
gctttcccccaggtctacatgttcctggtgaaatggcaggacctgtcggagaaggtggtctaccggcgtttcac

SEQ ID NO: 12429 - RNA, 74 nt, synthetic construct
  source 1..74: mol_type = other RNA
gctttcccccaggtatacatgttcctggtgaaatggcaggacctgtcggagaaggtggtctaccggagattcac

SEQ ID NO: 12430 - RNA, 74 nt, synthetic construct
  source 1..74: mol_type = other RNA
gctttcccccaggtatacatgttcctggtgaaatggcaggacctgtcggagaaggtggtctaccggaggttcac

SEQ ID NO: 12431 - RNA, 74 nt, synthetic construct
  source 1..74: mol_type = other RNA
gctttcccccaggtatacatgttcctggtgaaatggcaggacctgtcggagaaggtggtctaccggcgattcac

SEQ ID NO: 12432 - RNA, 74 nt, synthetic construct
  source 1..74: mol_type = other RNA
gctttcccccaggtatacatgttcctggtgaaatggcaggacctgtcggagaaggtggtctaccggcgcttcac

SEQ ID NO: 12433 - RNA, 74 nt, synthetic construct
  source 1..74: mol_type = other RNA
gctttcccccaggtgtacatgttcctggtgaaatggcaggacctgtcggagaaggtggtctaccggcgattcac

SEQ ID NO: 12434 - RNA, 74 nt, synthetic construct
  source 1..74: mol_type = other RNA
gctttcccccaggtatacatgttcctggtgaaatggcaggacctgtcggagaaggtggtctaccggcgtttcac

SEQ ID NO: 12435 - RNA, 74 nt, synthetic construct
  source 1..74: mol_type = other RNA
gctttcccccaggtgtacatgttcctggtgaaatggcaggacctgtcggagaaggtggtctaccggagattcac

SEQ ID NO: 12436 - RNA, 74 nt, synthetic construct
  source 1..74: mol_type = other RNA
gctttcccccaggtctacatgttcctggtgaaatggcaggacctgtcggagaaggtggtctaccggaggttcac

SEQ ID NO: 12437 - RNA, 74 nt, synthetic construct
  source 1..74: mol_type = other RNA
gctttcccccaggtctacatgttcctggtgaaatggcaggacctgtcggagaaggtggtctaccggcggttcac

SEQ ID NO: 12438 - RNA, 74 nt, synthetic construct
  source 1..74: mol_type = other RNA
gctttcccccaggtctacatgttcctggtgaaatggcaggacctgtcggagaaggtggtctaccggcgattcac

SEQ ID NO: 12439 - RNA, 74 nt, synthetic construct
  source 1..74: mol_type = other RNA
gctttcccccaggtttacatgttcctggtgaaatggcaggacctgtcggagaaggtggtctaccggcgattcac

SEQ ID NO: 12440 - RNA, 74 nt, synthetic construct
  source 1..74: mol_type = other RNA
gctttcccccaggtttacatgttcctggtgaaatggcaggacctgtcggagaaggtggtctaccggcgcttcac

SEQ ID NO: 12441 - RNA, 75 nt, synthetic construct
  source 1..75: mol_type = other RNA
ggctttcccccaggtatacatgttcctggtgaaatggcaggacctgtcggagaaggtggtctaccggaggttcac

SEQ ID NO: 12442 - RNA, 75 nt, synthetic construct
  source 1..75: mol_type = other RNA
ggctttcccccaggtatacatgttcctggtgaaatggcaggacctgtcggagaaggtggtctaccggagattcac

SEQ ID NO: 12443 - RNA, 75 nt, synthetic construct
  source 1..75: mol_type = other RNA
ggctttcccccaggtctacatgttcctggtgaaatggcaggacctgtcggagaaggtggtctaccggcgcttcac

SEQ ID NO: 12444 - RNA, 75 nt, synthetic construct
  source 1..75: mol_type = other RNA
ggctttcccccaggtctacatgttcctggtgaaatggcaggacctgtcggagaaggtggtctaccggcggttcac

SEQ ID NO: 12445 - RNA, 75 nt, synthetic construct
  source 1..75: mol_type = other RNA
ggctttcccccaggtttacatgttcctggtgaaatggcaggacctgtcggagaaggtggtctaccggcggttcac

SEQ ID NO: 12446 - RNA, 75 nt, synthetic construct
  source 1..75: mol_type = other RNA
ggctttcccccaggtttacatgttcctggtgaaatggcaggacctgtcggagaaggtggtctaccggcgcttcac

SEQ ID NO: 12447 - RNA, 75 nt, synthetic construct
  source 1..75: mol_type = other RNA
ggctttcccccaggtttacatgttcctggtgaaatggcaggacctgtcggagaaggtggtctaccggcgattcac

SEQ ID NO: 12448 - RNA, 75 nt, synthetic construct
  source 1..75: mol_type = other RNA
ggctttcccccaggtttacatgttcctggtgaaatggcaggacctgtcggagaaggtggtctaccggaggttcac

SEQ ID NO: 12449 - RNA, 75 nt, synthetic construct
  source 1..75: mol_type = other RNA
ggctttcccccaggtttacatgttcctggtgaaatggcaggacctgtcggagaaggtggtctaccggagattcac

SEQ ID NO: 12450 - RNA, 75 nt, synthetic construct
  source 1..75: mol_type = other RNA
ggctttcccccaggtgtacatgttcctggtgaaatggcaggacctgtcggagaaggtggtctaccggcgtttcac

SEQ ID NO: 12451 - RNA, 75 nt, synthetic construct
  source 1..75: mol_type = other RNA
ggctttcccccaggtgtacatgttcctggtgaaatggcaggacctgtcggagaaggtggtctaccggcgcttcac

SEQ ID NO: 12452 - RNA, 75 nt, synthetic construct
  source 1..75: mol_type = other RNA
ggctttcccccaggtgtacatgttcctggtgaaatggcaggacctgtcggagaaggtggtctaccggcggttcac

SEQ ID NO: 12453 - RNA, 75 nt, synthetic construct
  source 1..75: mol_type = other RNA
ggctttcccccaggtttacatgttcctggtgaaatggcaggacctgtcggagaaggtggtctaccggcgtttcac

SEQ ID NO: 12454 - RNA, 75 nt, synthetic construct
  source 1..75: mol_type = other RNA
ggctttcccccaggtctacatgttcctggtgaaatggcaggacctgtcggagaaggtggtctaccggcgattcac

SEQ ID NO: 12455 - RNA, 75 nt, synthetic construct
  source 1..75: mol_type = other RNA
ggctttcccccaggtatacatgttcctggtgaaatggcaggacctgtcggagaaggtggtctaccggcgcttcac

SEQ ID NO: 12456 - RNA, 75 nt, synthetic construct
  source 1..75: mol_type = other RNA
ggctttcccccaggtatacatgttcctggtgaaatggcaggacctgtcggagaaggtggtctaccggcggttcac

SEQ ID NO: 12457 - RNA, 75 nt, synthetic construct
  source 1..75: mol_type = other RNA
ggctttcccccaggtatacatgttcctggtgaaatggcaggacctgtcggagaaggtggtctaccggcgtttcac

SEQ ID NO: 12458 - RNA, 75 nt, synthetic construct
  source 1..75: mol_type = other RNA
ggctttcccccaggtatacatgttcctggtgaaatggcaggacctgtcggagaaggtggtctaccggcgattcac

SEQ ID NO: 12459 - RNA, 75 nt, synthetic construct
  source 1..75: mol_type = other RNA
ggctttcccccaggtctacatgttcctggtgaaatggcaggacctgtcggagaaggtggtctaccggaggttcac

SEQ ID NO: 12460 - RNA, 75 nt, synthetic construct
  source 1..75: mol_type = other RNA
ggctttcccccaggtctacatgttcctggtgaaatggcaggacctgtcggagaaggtggtctaccggcgtttcac

SEQ ID NO: 12461 - RNA, 75 nt, synthetic construct
  source 1..75: mol_type = other RNA
ggctttcccccaggtgtacatgttcctggtgaaatggcaggacctgtcggagaaggtggtctaccggagattcac

SEQ ID NO: 12462 - RNA, 75 nt, synthetic construct
  source 1..75: mol_type = other RNA
ggctttcccccaggtgtacatgttcctggtgaaatggcaggacctgtcggagaaggtggtctaccggaggttcac

SEQ ID NO: 12463 - RNA, 75 nt, synthetic construct
  source 1..75: mol_type = other RNA
ggctttcccccaggtctacatgttcctggtgaaatggcaggacctgtcggagaaggtggtctaccggagattcac

SEQ ID NO: 12464 - RNA, 75 nt, synthetic construct
  source 1..75: mol_type = other RNA
ggctttcccccaggtgtacatgttcctggtgaaatggcaggacctgtcggagaaggtggtctaccggcgattcac

SEQ ID NO: 12465 - RNA, 76 nt, synthetic construct
  source 1..76: mol_type = other RNA
tggctttcccccaggtatacatgttcctggtgaaatggcaggacctgtcggagaaggtggtctaccggaggttcac

SEQ ID NO: 12466 - RNA, 76 nt, synthetic construct
  source 1..76: mol_type = other RNA
tggctttcccccaggtttacatgttcctggtgaaatggcaggacctgtcggagaaggtggtctaccggcgattcac

SEQ ID NO: 12467 - RNA, 76 nt, synthetic construct
  source 1..76: mol_type = other RNA
tggctttcccccaggtttacatgttcctggtgaaatggcaggacctgtcggagaaggtggtctaccggcgtttcac

SEQ ID NO: 12468 - RNA, 76 nt, synthetic construct
  source 1..76: mol_type = other RNA
tggctttcccccaggtttacatgttcctggtgaaatggcaggacctgtcggagaaggtggtctaccggcggttcac

SEQ ID NO: 12469 - RNA, 76 nt, synthetic construct
  source 1..76: mol_type = other RNA
tggctttcccccaggtttacatgttcctggtgaaatggcaggacctgtcggagaaggtggtctaccggcgcttcac

SEQ ID NO: 12470 - RNA, 76 nt, synthetic construct
  source 1..76: mol_type = other RNA
tggctttcccccaggtttacatgttcctggtgaaatggcaggacctgtcggagaaggtggtctaccggaggttcac

SEQ ID NO: 12471 - RNA, 76 nt, synthetic construct
  source 1..76: mol_type = other RNA
tggctttcccccaggtttacatgttcctggtgaaatggcaggacctgtcggagaaggtggtctaccggagattcac

SEQ ID NO: 12472 - RNA, 76 nt, synthetic construct
  source 1..76: mol_type = other RNA
tggctttcccccaggtatacatgttcctggtgaaatggcaggacctgtcggagaaggtggtctaccggcggttcac

SEQ ID NO: 12473 - RNA, 76 nt, synthetic construct
  source 1..76: mol_type = other RNA
tggctttcccccaggtgtacatgttcctggtgaaatggcaggacctgtcggagaaggtggtctaccggcgcttcac

SEQ ID NO: 12474 - RNA, 76 nt, synthetic construct
  source 1..76: mol_type = other RNA
tggctttcccccaggtgtacatgttcctggtgaaatggcaggacctgtcggagaaggtggtctaccggcggttcac

SEQ ID NO: 12475 - RNA, 76 nt, synthetic construct
  source 1..76: mol_type = other RNA
tggctttcccccaggtgtacatgttcctggtgaaatggcaggacctgtcggagaaggtggtctaccggagattcac

SEQ ID NO: 12476 - RNA, 76 nt, synthetic construct
  source 1..76: mol_type = other RNA
tggctttcccccaggtctacatgttcctggtgaaatggcaggacctgtcggagaaggtggtctaccggcgtttcac

SEQ ID NO: 12477 - RNA, 76 nt, synthetic construct
  source 1..76: mol_type = other RNA
tggctttcccccaggtctacatgttcctggtgaaatggcaggacctgtcggagaaggtggtctaccggcggttcac

SEQ ID NO: 12478 - RNA, 76 nt, synthetic construct
  source 1..76: mol_type = other RNA
tggctttcccccaggtctacatgttcctggtgaaatggcaggacctgtcggagaaggtggtctaccggcgcttcac

SEQ ID NO: 12479 - RNA, 76 nt, synthetic construct
  source 1..76: mol_type = other RNA
tggctttcccccaggtctacatgttcctggtgaaatggcaggacctgtcggagaaggtggtctaccggcgattcac

SEQ ID NO: 12480 - RNA, 76 nt, synthetic construct
  source 1..76: mol_type = other RNA
tggctttcccccaggtctacatgttcctggtgaaatggcaggacctgtcggagaaggtggtctaccggaggttcac

SEQ ID NO: 12481 - RNA, 76 nt, synthetic construct
  source 1..76: mol_type = other RNA
tggctttcccccaggtctacatgttcctggtgaaatggcaggacctgtcggagaaggtggtctaccggagattcac

SEQ ID NO: 12482 - RNA, 76 nt, synthetic construct
  source 1..76: mol_type = other RNA
tggctttcccccaggtgtacatgttcctggtgaaatggcaggacctgtcggagaaggtggtctaccggaggttcac

SEQ ID NO: 12483 - RNA, 76 nt, synthetic construct
  source 1..76: mol_type = other RNA
tggctttcccccaggtgtacatgttcctggtgaaatggcaggacctgtcggagaaggtggtctaccggcgtttcac

SEQ ID NO: 12484 - RNA, 76 nt, synthetic construct
  source 1..76: mol_type = other RNA
tggctttcccccaggtatacatgttcctggtgaaatggcaggacctgtcggagaaggtggtctaccggagattcac

SEQ ID NO: 12485 - RNA, 76 nt, synthetic construct
  source 1..76: mol_type = other RNA
tggctttcccccaggtatacatgttcctggtgaaatggcaggacctgtcggagaaggtggtctaccggcgtttcac

SEQ ID NO: 12486 - RNA, 76 nt, synthetic construct
  source 1..76: mol_type = other RNA
tggctttcccccaggtgtacatgttcctggtgaaatggcaggacctgtcggagaaggtggtctaccggcgattcac

SEQ ID NO: 12487 - RNA, 76 nt, synthetic construct
  source 1..76: mol_type = other RNA
tggctttcccccaggtatacatgttcctggtgaaatggcaggacctgtcggagaaggtggtctaccggcgcttcac

SEQ ID NO: 12488 - RNA, 76 nt, synthetic construct
  source 1..76: mol_type = other RNA
tggctttcccccaggtatacatgttcctggtgaaatggcaggacctgtcggagaaggtggtctaccggcgattcac

SEQ ID NO: 12489 - RNA, 77 nt, synthetic construct
  source 1..77: mol_type = other RNA
ctggctttcccccaggtatacatgttcctggtgaaatggcaggacctgtcggagaaggtggtctaccggagattcac

SEQ ID NO: 12490 - RNA, 77 nt, synthetic construct
  source 1..77: mol_type = other RNA
ctggctttcccccaggtgtacatgttcctggtgaaatggcaggacctgtcggagaaggtggtctaccggcgcttcac

SEQ ID NO: 12491 - RNA, 77 nt, synthetic construct
  source 1..77: mol_type = other RNA
ctggctttcccccaggtatacatgttcctggtgaaatggcaggacctgtcggagaaggtggtctaccggaggttcac

SEQ ID NO: 12492 - RNA, 77 nt, synthetic construct
  source 1..77: mol_type = other RNA
ctggctttcccccaggtatacatgttcctggtgaaatggcaggacctgtcggagaaggtggtctaccggcgattcac

SEQ ID NO: 12493 - RNA, 77 nt, synthetic construct
  source 1..77: mol_type = other RNA
ctggctttcccccaggtatacatgttcctggtgaaatggcaggacctgtcggagaaggtggtctaccggcgcttcac

SEQ ID NO: 12494 - RNA, 77 nt, synthetic construct
  source 1..77: mol_type = other RNA
ctggctttcccccaggtttacatgttcctggtgaaatggcaggacctgtcggagaaggtggtctaccggagattcac

SEQ ID NO: 12495 - RNA, 77 nt, synthetic construct
  source 1..77: mol_type = other RNA
ctggctttcccccaggtatacatgttcctggtgaaatggcaggacctgtcggagaaggtggtctaccggcgtttcac

SEQ ID NO: 12496 - RNA, 77 nt, synthetic construct
  source 1..77: mol_type = other RNA
ctggctttcccccaggtctacatgttcctggtgaaatggcaggacctgtcggagaaggtggtctaccggaggttcac

SEQ ID NO: 12497 - RNA, 77 nt, synthetic construct
  source 1..77: mol_type = other RNA
ctggctttcccccaggtctacatgttcctggtgaaatggcaggacctgtcggagaaggtggtctaccggcgattcac

SEQ ID NO: 12498 - RNA, 77 nt, synthetic construct
  source 1..77: mol_type = other RNA
ctggctttcccccaggtctacatgttcctggtgaaatggcaggacctgtcggagaaggtggtctaccggcggttcac

SEQ ID NO: 12499 - RNA, 77 nt, synthetic construct
  source 1..77: mol_type = other RNA
ctggctttcccccaggtctacatgttcctggtgaaatggcaggacctgtcggagaaggtggtctaccggagattcac

SEQ ID NO: 12500 - RNA, 77 nt, synthetic construct
  source 1..77: mol_type = other RNA
ctggctttcccccaggtttacatgttcctggtgaaatggcaggacctgtcggagaaggtggtctaccggcgattcac

SEQ ID NO: 12501 - RNA, 77 nt, synthetic construct
  source 1..77: mol_type = other RNA
ctggctttcccccaggtctacatgttcctggtgaaatggcaggacctgtcggagaaggtggtctaccggcgtttcac

SEQ ID NO: 12502 - RNA, 77 nt, synthetic construct
  source 1..77: mol_type = other RNA
ctggctttcccccaggtatacatgttcctggtgaaatggcaggacctgtcggagaaggtggtctaccggcggttcac

SEQ ID NO: 12503 - RNA, 77 nt, synthetic construct
  source 1..77: mol_type = other RNA
ctggctttcccccaggtctacatgttcctggtgaaatggcaggacctgtcggagaaggtggtctaccggcgcttcac

SEQ ID NO: 12504 - RNA, 77 nt, synthetic construct
  source 1..77: mol_type = other RNA
ctggctttcccccaggtgtacatgttcctggtgaaatggcaggacctgtcggagaaggtggtctaccggagattcac

SEQ ID NO: 12505 - RNA, 77 nt, synthetic construct
  source 1..77: mol_type = other RNA
ctggctttcccccaggtgtacatgttcctggtgaaatggcaggacctgtcggagaaggtggtctaccggcgtttcac

SEQ ID NO: 12506 - RNA, 77 nt, synthetic construct
  source 1..77: mol_type = other RNA
ctggctttcccccaggtttacatgttcctggtgaaatggcaggacctgtcggagaaggtggtctaccggcgcttcac

SEQ ID NO: 12507 - RNA, 77 nt, synthetic construct
  source 1..77: mol_type = other RNA
ctggctttcccccaggtttacatgttcctggtgaaatggcaggacctgtcggagaaggtggtctaccggaggttcac

SEQ ID NO: 12508 - RNA, 77 nt, synthetic construct
  source 1..77: mol_type = other RNA
ctggctttcccccaggtgtacatgttcctggtgaaatggcaggacctgtcggagaaggtggtctaccggaggttcac

SEQ ID NO: 12509 - RNA, 77 nt, synthetic construct
  source 1..77: mol_type = other RNA
ctggctttcccccaggtttacatgttcctggtgaaatggcaggacctgtcggagaaggtggtctaccggcggttcac

SEQ ID NO: 12510 - RNA, 77 nt, synthetic construct
  source 1..77: mol_type = other RNA
ctggctttcccccaggtttacatgttcctggtgaaatggcaggacctgtcggagaaggtggtctaccggcgtttcac

SEQ ID NO: 12511 - RNA, 77 nt, synthetic construct
  source 1..77: mol_type = other RNA
ctggctttcccccaggtgtacatgttcctggtgaaatggcaggacctgtcggagaaggtggtctaccggcggttcac

SEQ ID NO: 12512 - RNA, 77 nt, synthetic construct
  source 1..77: mol_type = other RNA
ctggctttcccccaggtgtacatgttcctggtgaaatggcaggacctgtcggagaaggtggtctaccggcgattcac

SEQ ID NO: 12513 - RNA, 78 nt, synthetic construct
  source 1..78: mol_type = other RNA
tctggctttcccccaggtttacatgttcctggtgaaatggcaggacctgtcggagaaggtggtctaccggaggttcac

SEQ ID NO: 12514 - RNA, 78 nt, synthetic construct
  source 1..78: mol_type = other RNA
tctggctttcccccaggtttacatgttcctggtgaaatggcaggacctgtcggagaaggtggtctaccggcgattcac

SEQ ID NO: 12515 - RNA, 78 nt, synthetic construct
  source 1..78: mol_type = other RNA
tctggctttcccccaggtttacatgttcctggtgaaatggcaggacctgtcggagaaggtggtctaccggcgcttcac

SEQ ID NO: 12516 - RNA, 78 nt, synthetic construct
  source 1..78: mol_type = other RNA
tctggctttcccccaggtttacatgttcctggtgaaatggcaggacctgtcggagaaggtggtctaccggcggttcac

SEQ ID NO: 12517 - RNA, 78 nt, synthetic construct
  source 1..78: mol_type = other RNA
tctggctttcccccaggtttacatgttcctggtgaaatggcaggacctgtcggagaaggtggtctaccggcgtttcac

SEQ ID NO: 12518 - RNA, 78 nt, synthetic construct
  source 1..78: mol_type = other RNA
tctggctttcccccaggtctacatgttcctggtgaaatggcaggacctgtcggagaaggtggtctaccggcgattcac

SEQ ID NO: 12519 - RNA, 78 nt, synthetic construct
  source 1..78: mol_type = other RNA
tctggctttcccccaggtttacatgttcctggtgaaatggcaggacctgtcggagaaggtggtctaccggagattcac

SEQ ID NO: 12520 - RNA, 78 nt, synthetic construct
  source 1..78: mol_type = other RNA
tctggctttcccccaggtgtacatgttcctggtgaaatggcaggacctgtcggagaaggtggtctaccggcgtttcac

SEQ ID NO: 12521 - RNA, 78 nt, synthetic construct
  source 1..78: mol_type = other RNA
tctggctttcccccaggtgtacatgttcctggtgaaatggcaggacctgtcggagaaggtggtctaccggcggttcac

SEQ ID NO: 12522 - RNA, 78 nt, synthetic construct
  source 1..78: mol_type = other RNA
tctggctttcccccaggtgtacatgttcctggtgaaatggcaggacctgtcggagaaggtggtctaccggcgcttcac

SEQ ID NO: 12523 - RNA, 78 nt, synthetic construct
  source 1..78: mol_type = other RNA
tctggctttcccccaggtatacatgttcctggtgaaatggcaggacctgtcggagaaggtggtctaccggagattcac

SEQ ID NO: 12524 - RNA, 78 nt, synthetic construct
  source 1..78: mol_type = other RNA
tctggctttcccccaggtgtacatgttcctggtgaaatggcaggacctgtcggagaaggtggtctaccggaggttcac

SEQ ID NO: 12525 - RNA, 78 nt, synthetic construct
  source 1..78: mol_type = other RNA
tctggctttcccccaggtgtacatgttcctggtgaaatggcaggacctgtcggagaaggtggtctaccggcgattcac

SEQ ID NO: 12526 - RNA, 78 nt, synthetic construct
  source 1..78: mol_type = other RNA
tctggctttcccccaggtatacatgttcctggtgaaatggcaggacctgtcggagaaggtggtctaccggcgcttcac

SEQ ID NO: 12527 - RNA, 78 nt, synthetic construct
  source 1..78: mol_type = other RNA
tctggctttcccccaggtatacatgttcctggtgaaatggcaggacctgtcggagaaggtggtctaccggcggttcac

SEQ ID NO: 12528 - RNA, 78 nt, synthetic construct
  source 1..78: mol_type = other RNA
tctggctttcccccaggtatacatgttcctggtgaaatggcaggacctgtcggagaaggtggtctaccggcgtttcac

SEQ ID NO: 12529 - RNA, 78 nt, synthetic construct
  source 1..78: mol_type = other RNA
tctggctttcccccaggtctacatgttcctggtgaaatggcaggacctgtcggagaaggtggtctaccggagattcac

SEQ ID NO: 12530 - RNA, 78 nt, synthetic construct
  source 1..78: mol_type = other RNA
tctggctttcccccaggtctacatgttcctggtgaaatggcaggacctgtcggagaaggtggtctaccggaggttcac

SEQ ID NO: 12531 - RNA, 78 nt, synthetic construct
  source 1..78: mol_type = other RNA
tctggctttcccccaggtatacatgttcctggtgaaatggcaggacctgtcggagaaggtggtctaccggaggttcac

SEQ ID NO: 12532 - RNA, 78 nt, synthetic construct
  source 1..78: mol_type = other RNA
tctggctttcccccaggtctacatgttcctggtgaaatggcaggacctgtcggagaaggtggtctaccggcgcttcac

SEQ ID NO: 12533 - RNA, 78 nt, synthetic construct
  source 1..78: mol_type = other RNA
tctggctttcccccaggtctacatgttcctggtgaaatggcaggacctgtcggagaaggtggtctaccggcgtttcac

SEQ ID NO: 12534 - RNA, 78 nt, synthetic construct
  source 1..78: mol_type = other RNA
tctggctttcccccaggtgtacatgttcctggtgaaatggcaggacctgtcggagaaggtggtctaccggagattcac

SEQ ID NO: 12535 - RNA, 78 nt, synthetic construct
  source 1..78: mol_type = other RNA
tctggctttcccccaggtatacatgttcctggtgaaatggcaggacctgtcggagaaggtggtctaccggcgattcac

SEQ ID NO: 12536 - RNA, 78 nt, synthetic construct
  source 1..78: mol_type = other RNA
tctggctttcccccaggtctacatgttcctggtgaaatggcaggacctgtcggagaaggtggtctaccggcggttcac

SEQ ID NO: 12537 - RNA, 79 nt, synthetic construct
  source 1..79: mol_type = other RNA
ctctggctttcccccaggtttacatgttcctggtgaaatggcaggacctgtcggagaaggtggtctaccggagattcac

SEQ ID NO: 12538 - RNA, 79 nt, synthetic construct
  source 1..79: mol_type = other RNA
ctctggctttcccccaggtctacatgttcctggtgaaatggcaggacctgtcggagaaggtggtctaccggcgattcac

SEQ ID NO: 12539 - RNA, 79 nt, synthetic construct
  source 1..79: mol_type = other RNA
ctctggctttcccccaggtctacatgttcctggtgaaatggcaggacctgtcggagaaggtggtctaccggagattcac

SEQ ID NO: 12540 - RNA, 79 nt, synthetic construct
  source 1..79: mol_type = other RNA
ctctggctttcccccaggtttacatgttcctggtgaaatggcaggacctgtcggagaaggtggtctaccggcgtttcac

SEQ ID NO: 12541 - RNA, 79 nt, synthetic construct
  source 1..79: mol_type = other RNA
ctctggctttcccccaggtttacatgttcctggtgaaatggcaggacctgtcggagaaggtggtctaccggcggttcac

SEQ ID NO: 12542 - RNA, 79 nt, synthetic construct
  source 1..79: mol_type = other RNA
ctctggctttcccccaggtttacatgttcctggtgaaatggcaggacctgtcggagaaggtggtctaccggcgcttcac

SEQ ID NO: 12543 - RNA, 79 nt, synthetic construct
  source 1..79: mol_type = other RNA
ctctggctttcccccaggtttacatgttcctggtgaaatggcaggacctgtcggagaaggtggtctaccggcgattcac

SEQ ID NO: 12544 - RNA, 79 nt, synthetic construct
  source 1..79: mol_type = other RNA
ctctggctttcccccaggtgtacatgttcctggtgaaatggcaggacctgtcggagaaggtggtctaccggcgtttcac

SEQ ID NO: 12545 - RNA, 79 nt, synthetic construct
  source 1..79: mol_type = other RNA
ctctggctttcccccaggtgtacatgttcctggtgaaatggcaggacctgtcggagaaggtggtctaccggcggttcac

SEQ ID NO: 12546 - RNA, 79 nt, synthetic construct
  source 1..79: mol_type = other RNA
ctctggctttcccccaggtgtacatgttcctggtgaaatggcaggacctgtcggagaaggtggtctaccggcgcttcac

SEQ ID NO: 12547 - RNA, 79 nt, synthetic construct
  source 1..79: mol_type = other RNA
ctctggctttcccccaggtgtacatgttcctggtgaaatggcaggacctgtcggagaaggtggtctaccggagattcac

SEQ ID NO: 12548 - RNA, 79 nt, synthetic construct
  source 1..79: mol_type = other RNA
ctctggctttcccccaggtctacatgttcctggtgaaatggcaggacctgtcggagaaggtggtctaccggcgtttcac

SEQ ID NO: 12549 - RNA, 79 nt, synthetic construct
  source 1..79: mol_type = other RNA
ctctggctttcccccaggtgtacatgttcctggtgaaatggcaggacctgtcggagaaggtggtctaccggcgattcac

SEQ ID NO: 12550 - RNA, 79 nt, synthetic construct
  source 1..79: mol_type = other RNA
ctctggctttcccccaggtctacatgttcctggtgaaatggcaggacctgtcggagaaggtggtctaccggcgcttcac

SEQ ID NO: 12551 - RNA, 79 nt, synthetic construct
  source 1..79: mol_type = other RNA
ctctggctttcccccaggtatacatgttcctggtgaaatggcaggacctgtcggagaaggtggtctaccggagattcac

SEQ ID NO: 12552 - RNA, 79 nt, synthetic construct
  source 1..79: mol_type = other RNA
ctctggctttcccccaggtatacatgttcctggtgaaatggcaggacctgtcggagaaggtggtctaccggaggttcac

SEQ ID NO: 12553 - RNA, 79 nt, synthetic construct
  source 1..79: mol_type = other RNA
ctctggctttcccccaggtatacatgttcctggtgaaatggcaggacctgtcggagaaggtggtctaccggcgattcac

SEQ ID NO: 12554 - RNA, 79 nt, synthetic construct
  source 1..79: mol_type = other RNA
ctctggctttcccccaggtctacatgttcctggtgaaatggcaggacctgtcggagaaggtggtctaccggcggttcac

SEQ ID NO: 12555 - RNA, 79 nt, synthetic construct
  source 1..79: mol_type = other RNA
ctctggctttcccccaggtatacatgttcctggtgaaatggcaggacctgtcggagaaggtggtctaccggcggttcac

SEQ ID NO: 12556 - RNA, 79 nt, synthetic construct
  source 1..79: mol_type = other RNA
ctctggctttcccccaggtttacatgttcctggtgaaatggcaggacctgtcggagaaggtggtctaccggaggttcac

SEQ ID NO: 12557 - RNA, 79 nt, synthetic construct
  source 1..79: mol_type = other RNA
ctctggctttcccccaggtatacatgttcctggtgaaatggcaggacctgtcggagaaggtggtctaccggcgcttcac

SEQ ID NO: 12558 - RNA, 79 nt, synthetic construct
  source 1..79: mol_type = other RNA
ctctggctttcccccaggtatacatgttcctggtgaaatggcaggacctgtcggagaaggtggtctaccggcgtttcac

SEQ ID NO: 12559 - RNA, 79 nt, synthetic construct
  source 1..79: mol_type = other RNA
ctctggctttcccccaggtctacatgttcctggtgaaatggcaggacctgtcggagaaggtggtctaccggaggttcac

SEQ ID NO: 12560 - RNA, 79 nt, synthetic construct
  source 1..79: mol_type = other RNA
ctctggctttcccccaggtgtacatgttcctggtgaaatggcaggacctgtcggagaaggtggtctaccggaggttcac

SEQ ID NO: 12561 - RNA, 80 nt, synthetic construct
  source 1..80: mol_type = other RNA
actctggctttcccccaggtttacatgttcctggtgaaatggcaggacctgtcggagaaggtggtctaccggcggttcac

SEQ ID NO: 12562 - RNA, 80 nt, synthetic construct
  source 1..80: mol_type = other RNA
actctggctttcccccaggtgtacatgttcctggtgaaatggcaggacctgtcggagaaggtggtctaccggagattcac

SEQ ID NO: 12563 - RNA, 80 nt, synthetic construct
  source 1..80: mol_type = other RNA
actctggctttcccccaggtttacatgttcctggtgaaatggcaggacctgtcggagaaggtggtctaccggaggttcac

SEQ ID NO: 12564 - RNA, 80 nt, synthetic construct
  source 1..80: mol_type = other RNA
actctggctttcccccaggtttacatgttcctggtgaaatggcaggacctgtcggagaaggtggtctaccggagattcac

SEQ ID NO: 12565 - RNA, 80 nt, synthetic construct
  source 1..80: mol_type = other RNA
actctggctttcccccaggtgtacatgttcctggtgaaatggcaggacctgtcggagaaggtggtctaccggcgtttcac

SEQ ID NO: 12566 - RNA, 80 nt, synthetic construct
  source 1..80: mol_type = other RNA
actctggctttcccccaggtgtacatgttcctggtgaaatggcaggacctgtcggagaaggtggtctaccggcggttcac

SEQ ID NO: 12567 - RNA, 80 nt, synthetic construct
  source 1..80: mol_type = other RNA
actctggctttcccccaggtgtacatgttcctggtgaaatggcaggacctgtcggagaaggtggtctaccggcgcttcac

SEQ ID NO: 12568 - RNA, 80 nt, synthetic construct
  source 1..80: mol_type = other RNA
actctggctttcccccaggtttacatgttcctggtgaaatggcaggacctgtcggagaaggtggtctaccggcgtttcac

SEQ ID NO: 12569 - RNA, 80 nt, synthetic construct
  source 1..80: mol_type = other RNA
actctggctttcccccaggtctacatgttcctggtgaaatggcaggacctgtcggagaaggtggtctaccggcgattcac

SEQ ID NO: 12570 - RNA, 80 nt, synthetic construct
  source 1..80: mol_type = other RNA
actctggctttcccccaggtgtacatgttcctggtgaaatggcaggacctgtcggagaaggtggtctaccggaggttcac

SEQ ID NO: 12571 - RNA, 80 nt, synthetic construct
  source 1..80: mol_type = other RNA
actctggctttcccccaggtatacatgttcctggtgaaatggcaggacctgtcggagaaggtggtctaccggcggttcac

SEQ ID NO: 12572 - RNA, 80 nt, synthetic construct
  source 1..80: mol_type = other RNA
actctggctttcccccaggtttacatgttcctggtgaaatggcaggacctgtcggagaaggtggtctaccggcgattcac

SEQ ID NO: 12573 - RNA, 80 nt, synthetic construct
  source 1..80: mol_type = other RNA
actctggctttcccccaggtatacatgttcctggtgaaatggcaggacctgtcggagaaggtggtctaccggagattcac

SEQ ID NO: 12574 - RNA, 80 nt, synthetic construct
  source 1..80: mol_type = other RNA
actctggctttcccccaggtatacatgttcctggtgaaatggcaggacctgtcggagaaggtggtctaccggcgattcac

SEQ ID NO: 12575 - RNA, 80 nt, synthetic construct
  source 1..80: mol_type = other RNA
actctggctttcccccaggtatacatgttcctggtgaaatggcaggacctgtcggagaaggtggtctaccggcgcttcac

SEQ ID NO: 12576 - RNA, 80 nt, synthetic construct
  source 1..80: mol_type = other RNA
actctggctttcccccaggtgtacatgttcctggtgaaatggcaggacctgtcggagaaggtggtctaccggcgattcac

SEQ ID NO: 12577 - RNA, 80 nt, synthetic construct
  source 1..80: mol_type = other RNA
actctggctttcccccaggtatacatgttcctggtgaaatggcaggacctgtcggagaaggtggtctaccggcgtttcac

SEQ ID NO: 12578 - RNA, 80 nt, synthetic construct
  source 1..80: mol_type = other RNA
actctggctttcccccaggtctacatgttcctggtgaaatggcaggacctgtcggagaaggtggtctaccggcgtttcac

SEQ ID NO: 12579 - RNA, 80 nt, synthetic construct
  source 1..80: mol_type = other RNA
actctggctttcccccaggtctacatgttcctggtgaaatggcaggacctgtcggagaaggtggtctaccggaggttcac

SEQ ID NO: 12580 - RNA, 80 nt, synthetic construct
  source 1..80: mol_type = other RNA
actctggctttcccccaggtctacatgttcctggtgaaatggcaggacctgtcggagaaggtggtctaccggcgcttcac

SEQ ID NO: 12581 - RNA, 80 nt, synthetic construct
  source 1..80: mol_type = other RNA
actctggctttcccccaggtctacatgttcctggtgaaatggcaggacctgtcggagaaggtggtctaccggcggttcac

SEQ ID NO: 12582 - RNA, 80 nt, synthetic construct
  source 1..80: mol_type = other RNA
actctggctttcccccaggtctacatgttcctggtgaaatggcaggacctgtcggagaaggtggtctaccggagattcac

SEQ ID NO: 12583 - RNA, 80 nt, synthetic construct
  source 1..80: mol_type = other RNA
actctggctttcccccaggtatacatgttcctggtgaaatggcaggacctgtcggagaaggtggtctaccggaggttcac

SEQ ID NO: 12584 - RNA, 80 nt, synthetic construct
  source 1..80: mol_type = other RNA
actctggctttcccccaggtttacatgttcctggtgaaatggcaggacctgtcggagaaggtggtctaccggcgcttcac

SEQ ID NO: 12585 - RNA, 81 nt, synthetic construct
  source 1..81: mol_type = other RNA
gactctggctttcccccaggtgtacatgttcctggtgaaatggcaggacctgtcggagaaggtggtctaccggcggttcac

SEQ ID NO: 12586 - RNA, 81 nt, synthetic construct
  source 1..81: mol_type = other RNA
gactctggctttcccccaggtgtacatgttcctggtgaaatggcaggacctgtcggagaaggtggtctaccggcgcttcac

SEQ ID NO: 12587 - RNA, 81 nt, synthetic construct
  source 1..81: mol_type = other RNA
gactctggctttcccccaggtttacatgttcctggtgaaatggcaggacctgtcggagaaggtggtctaccggcgtttcac

SEQ ID NO: 12588 - RNA, 81 nt, synthetic construct
  source 1..81: mol_type = other RNA
gactctggctttcccccaggtttacatgttcctggtgaaatggcaggacctgtcggagaaggtggtctaccggagattcac

SEQ ID NO: 12589 - RNA, 81 nt, synthetic construct
  source 1..81: mol_type = other RNA
gactctggctttcccccaggtctacatgttcctggtgaaatggcaggacctgtcggagaaggtggtctaccggcggttcac

SEQ ID NO: 12590 - RNA, 81 nt, synthetic construct
  source 1..81: mol_type = other RNA
gactctggctttcccccaggtctacatgttcctggtgaaatggcaggacctgtcggagaaggtggtctaccggcgtttcac

SEQ ID NO: 12591 - RNA, 81 nt, synthetic construct
  source 1..81: mol_type = other RNA
gactctggctttcccccaggtctacatgttcctggtgaaatggcaggacctgtcggagaaggtggtctaccggcgcttcac

SEQ ID NO: 12592 - RNA, 81 nt, synthetic construct
  source 1..81: mol_type = other RNA
gactctggctttcccccaggtctacatgttcctggtgaaatggcaggacctgtcggagaaggtggtctaccggcgattcac

SEQ ID NO: 12593 - RNA, 81 nt, synthetic construct
  source 1..81: mol_type = other RNA
gactctggctttcccccaggtctacatgttcctggtgaaatggcaggacctgtcggagaaggtggtctaccggaggttcac

SEQ ID NO: 12594 - RNA, 81 nt, synthetic construct
  source 1..81: mol_type = other RNA
gactctggctttcccccaggtgtacatgttcctggtgaaatggcaggacctgtcggagaaggtggtctaccggcgattcac

SEQ ID NO: 12595 - RNA, 81 nt, synthetic construct
  source 1..81: mol_type = other RNA
gactctggctttcccccaggtatacatgttcctggtgaaatggcaggacctgtcggagaaggtggtctaccggcgtttcac

SEQ ID NO: 12596 - RNA, 81 nt, synthetic construct
  source 1..81: mol_type = other RNA
gactctggctttcccccaggtatacatgttcctggtgaaatggcaggacctgtcggagaaggtggtctaccggcggttcac

SEQ ID NO: 12597 - RNA, 81 nt, synthetic construct
  source 1..81: mol_type = other RNA
gactctggctttcccccaggtatacatgttcctggtgaaatggcaggacctgtcggagaaggtggtctaccggcgcttcac

SEQ ID NO: 12598 - RNA, 81 nt, synthetic construct
  source 1..81: mol_type = other RNA
gactctggctttcccccaggtatacatgttcctggtgaaatggcaggacctgtcggagaaggtggtctaccggcgattcac

SEQ ID NO: 12599 - RNA, 81 nt, synthetic construct
  source 1..81: mol_type = other RNA
gactctggctttcccccaggtatacatgttcctggtgaaatggcaggacctgtcggagaaggtggtctaccggaggttcac

SEQ ID NO: 12600 - RNA, 81 nt, synthetic construct
  source 1..81: mol_type = other RNA
gactctggctttcccccaggtctacatgttcctggtgaaatggcaggacctgtcggagaaggtggtctaccggagattcac

SEQ ID NO: 12601 - RNA, 81 nt, synthetic construct
  source 1..81: mol_type = other RNA
gactctggctttcccccaggtgtacatgttcctggtgaaatggcaggacctgtcggagaaggtggtctaccggaggttcac

SEQ ID NO: 12602 - RNA, 81 nt, synthetic construct
  source 1..81: mol_type = other RNA
gactctggctttcccccaggtgtacatgttcctggtgaaatggcaggacctgtcggagaaggtggtctaccggagattcac

SEQ ID NO: 12603 - RNA, 81 nt, synthetic construct
  source 1..81: mol_type = other RNA
gactctggctttcccccaggtgtacatgttcctggtgaaatggcaggacctgtcggagaaggtggtctaccggcgtttcac

SEQ ID NO: 12604 - RNA, 81 nt, synthetic construct
  source 1..81: mol_type = other RNA
gactctggctttcccccaggtttacatgttcctggtgaaatggcaggacctgtcggagaaggtggtctaccggcgattcac

SEQ ID NO: 12605 - RNA, 81 nt, synthetic construct
  source 1..81: mol_type = other RNA
gactctggctttcccccaggtttacatgttcctggtgaaatggcaggacctgtcggagaaggtggtctaccggcggttcac

SEQ ID NO: 12606 - RNA, 81 nt, synthetic construct
  source 1..81: mol_type = other RNA
gactctggctttcccccaggtatacatgttcctggtgaaatggcaggacctgtcggagaaggtggtctaccggagattcac

SEQ ID NO: 12607 - RNA, 81 nt, synthetic construct
  source 1..81: mol_type = other RNA
gactctggctttcccccaggtttacatgttcctggtgaaatggcaggacctgtcggagaaggtggtctaccggcgcttcac

SEQ ID NO: 12608 - RNA, 81 nt, synthetic construct
  source 1..81: mol_type = other RNA
gactctggctttcccccaggtttacatgttcctggtgaaatggcaggacctgtcggagaaggtggtctaccggaggttcac

SEQ ID NO: 12609 - RNA, 82 nt, synthetic construct
  source 1..82: mol_type = other RNA
cgactctggctttcccccaggtctacatgttcctggtgaaatggcaggacctgtcggagaaggtggtctaccggcgtttcac

SEQ ID NO: 12610 - RNA, 82 nt, synthetic construct
  source 1..82: mol_type = other RNA
cgactctggctttcccccaggtctacatgttcctggtgaaatggcaggacctgtcggagaaggtggtctaccggcggttcac

SEQ ID NO: 12611 - RNA, 82 nt, synthetic construct
  source 1..82: mol_type = other RNA
cgactctggctttcccccaggtctacatgttcctggtgaaatggcaggacctgtcggagaaggtggtctaccggcgcttcac

SEQ ID NO: 12612 - RNA, 82 nt, synthetic construct
  source 1..82: mol_type = other RNA
cgactctggctttcccccaggtctacatgttcctggtgaaatggcaggacctgtcggagaaggtggtctaccggcgattcac

SEQ ID NO: 12613 - RNA, 82 nt, synthetic construct
  source 1..82: mol_type = other RNA
cgactctggctttcccccaggtctacatgttcctggtgaaatggcaggacctgtcggagaaggtggtctaccggaggttcac

SEQ ID NO: 12614 - RNA, 82 nt, synthetic construct
  source 1..82: mol_type = other RNA
cgactctggctttcccccaggtctacatgttcctggtgaaatggcaggacctgtcggagaaggtggtctaccggagattcac

SEQ ID NO: 12615 - RNA, 82 nt, synthetic construct
  source 1..82: mol_type = other RNA
cgactctggctttcccccaggtatacatgttcctggtgaaatggcaggacctgtcggagaaggtggtctaccggcgtttcac

SEQ ID NO: 12616 - RNA, 82 nt, synthetic construct
  source 1..82: mol_type = other RNA
cgactctggctttcccccaggtatacatgttcctggtgaaatggcaggacctgtcggagaaggtggtctaccggagattcac

SEQ ID NO: 12617 - RNA, 82 nt, synthetic construct
  source 1..82: mol_type = other RNA
cgactctggctttcccccaggtatacatgttcctggtgaaatggcaggacctgtcggagaaggtggtctaccggcggttcac

SEQ ID NO: 12618 - RNA, 82 nt, synthetic construct
  source 1..82: mol_type = other RNA
cgactctggctttcccccaggtttacatgttcctggtgaaatggcaggacctgtcggagaaggtggtctaccggcgtttcac

SEQ ID NO: 12619 - RNA, 82 nt, synthetic construct
  source 1..82: mol_type = other RNA
cgactctggctttcccccaggtgtacatgttcctggtgaaatggcaggacctgtcggagaaggtggtctaccggagattcac

SEQ ID NO: 12620 - RNA, 82 nt, synthetic construct
  source 1..82: mol_type = other RNA
cgactctggctttcccccaggtgtacatgttcctggtgaaatggcaggacctgtcggagaaggtggtctaccggcgcttcac

SEQ ID NO: 12621 - RNA, 82 nt, synthetic construct
  source 1..82: mol_type = other RNA
cgactctggctttcccccaggtgtacatgttcctggtgaaatggcaggacctgtcggagaaggtggtctaccggaggttcac

SEQ ID NO: 12622 - RNA, 82 nt, synthetic construct
  source 1..82: mol_type = other RNA
cgactctggctttcccccaggtgtacatgttcctggtgaaatggcaggacctgtcggagaaggtggtctaccggcgattcac

SEQ ID NO: 12623 - RNA, 82 nt, synthetic construct
  source 1..82: mol_type = other RNA
cgactctggctttcccccaggtatacatgttcctggtgaaatggcaggacctgtcggagaaggtggtctaccggcgcttcac

SEQ ID NO: 12624 - RNA, 82 nt, synthetic construct
  source 1..82: mol_type = other RNA
cgactctggctttcccccaggtatacatgttcctggtgaaatggcaggacctgtcggagaaggtggtctaccggcgattcac

SEQ ID NO: 12625 - RNA, 82 nt, synthetic construct
  source 1..82: mol_type = other RNA
cgactctggctttcccccaggtttacatgttcctggtgaaatggcaggacctgtcggagaaggtggtctaccggcggttcac

SEQ ID NO: 12626 - RNA, 82 nt, synthetic construct
  source 1..82: mol_type = other RNA
cgactctggctttcccccaggtatacatgttcctggtgaaatggcaggacctgtcggagaaggtggtctaccggaggttcac

SEQ ID NO: 12627 - RNA, 82 nt, synthetic construct
  source 1..82: mol_type = other RNA
cgactctggctttcccccaggtttacatgttcctggtgaaatggcaggacctgtcggagaaggtggtctaccggcgcttcac

SEQ ID NO: 12628 - RNA, 82 nt, synthetic construct
  source 1..82: mol_type = other RNA
cgactctggctttcccccaggtttacatgttcctggtgaaatggcaggacctgtcggagaaggtggtctaccggcgattcac

SEQ ID NO: 12629 - RNA, 82 nt, synthetic construct
  source 1..82: mol_type = other RNA
cgactctggctttcccccaggtttacatgttcctggtgaaatggcaggacctgtcggagaaggtggtctaccggaggttcac

SEQ ID NO: 12630 - RNA, 82 nt, synthetic construct
  source 1..82: mol_type = other RNA
cgactctggctttcccccaggtttacatgttcctggtgaaatggcaggacctgtcggagaaggtggtctaccggagattcac

SEQ ID NO: 12631 - RNA, 82 nt, synthetic construct
  source 1..82: mol_type = other RNA
cgactctggctttcccccaggtgtacatgttcctggtgaaatggcaggacctgtcggagaaggtggtctaccggcgtttcac

SEQ ID NO: 12632 - RNA, 82 nt, synthetic construct
  source 1..82: mol_type = other RNA
cgactctggctttcccccaggtgtacatgttcctggtgaaatggcaggacctgtcggagaaggtggtctaccggcggttcac

SEQ ID NO: 12633 - RNA, 83 nt, synthetic construct
  source 1..83: mol_type = other RNA
ccgactctggctttcccccaggtctacatgttcctggtgaaatggcaggacctgtcggagaaggtggtctaccggaggttcac

SEQ ID NO: 12634 - RNA, 83 nt, synthetic construct
  source 1..83: mol_type = other RNA
ccgactctggctttcccccaggtgtacatgttcctggtgaaatggcaggacctgtcggagaaggtggtctaccggcgattcac

SEQ ID NO: 12635 - RNA, 83 nt, synthetic construct
  source 1..83: mol_type = other RNA
ccgactctggctttcccccaggtctacatgttcctggtgaaatggcaggacctgtcggagaaggtggtctaccggagattcac

SEQ ID NO: 12636 - RNA, 83 nt, synthetic construct
  source 1..83: mol_type = other RNA
ccgactctggctttcccccaggtatacatgttcctggtgaaatggcaggacctgtcggagaaggtggtctaccggcgcttcac

SEQ ID NO: 12637 - RNA, 83 nt, synthetic construct
  source 1..83: mol_type = other RNA
ccgactctggctttcccccaggtctacatgttcctggtgaaatggcaggacctgtcggagaaggtggtctaccggcgtttcac

SEQ ID NO: 12638 - RNA, 83 nt, synthetic construct
  source 1..83: mol_type = other RNA
ccgactctggctttcccccaggtctacatgttcctggtgaaatggcaggacctgtcggagaaggtggtctaccggcggttcac

SEQ ID NO: 12639 - RNA, 83 nt, synthetic construct
  source 1..83: mol_type = other RNA
ccgactctggctttcccccaggtatacatgttcctggtgaaatggcaggacctgtcggagaaggtggtctaccggcgtttcac

SEQ ID NO: 12640 - RNA, 83 nt, synthetic construct
  source 1..83: mol_type = other RNA
ccgactctggctttcccccaggtctacatgttcctggtgaaatggcaggacctgtcggagaaggtggtctaccggcgattcac

SEQ ID NO: 12641 - RNA, 83 nt, synthetic construct
  source 1..83: mol_type = other RNA
ccgactctggctttcccccaggtatacatgttcctggtgaaatggcaggacctgtcggagaaggtggtctaccggcggttcac

SEQ ID NO: 12642 - RNA, 83 nt, synthetic construct
  source 1..83: mol_type = other RNA
ccgactctggctttcccccaggtttacatgttcctggtgaaatggcaggacctgtcggagaaggtggtctaccggcgtttcac

SEQ ID NO: 12643 - RNA, 83 nt, synthetic construct
  source 1..83: mol_type = other RNA
ccgactctggctttcccccaggtttacatgttcctggtgaaatggcaggacctgtcggagaaggtggtctaccggcgcttcac

SEQ ID NO: 12644 - RNA, 83 nt, synthetic construct
  source 1..83: mol_type = other RNA
ccgactctggctttcccccaggtttacatgttcctggtgaaatggcaggacctgtcggagaaggtggtctaccggcgattcac

SEQ ID NO: 12645 - RNA, 83 nt, synthetic construct
  source 1..83: mol_type = other RNA
ccgactctggctttcccccaggtttacatgttcctggtgaaatggcaggacctgtcggagaaggtggtctaccggaggttcac

SEQ ID NO: 12646 - RNA, 83 nt, synthetic construct
  source 1..83: mol_type = other RNA
ccgactctggctttcccccaggtgtacatgttcctggtgaaatggcaggacctgtcggagaaggtggtctaccggcgtttcac

SEQ ID NO: 12647 - RNA, 83 nt, synthetic construct
  source 1..83: mol_type = other RNA
ccgactctggctttcccccaggtgtacatgttcctggtgaaatggcaggacctgtcggagaaggtggtctaccggcggttcac

SEQ ID NO: 12648 - RNA, 83 nt, synthetic construct
  source 1..83: mol_type = other RNA
ccgactctggctttcccccaggtgtacatgttcctggtgaaatggcaggacctgtcggagaaggtggtctaccggcgcttcac

SEQ ID NO: 12649 - RNA, 83 nt, synthetic construct
  source 1..83: mol_type = other RNA
ccgactctggctttcccccaggtgtacatgttcctggtgaaatggcaggacctgtcggagaaggtggtctaccggaggttcac

SEQ ID NO: 12650 - RNA, 83 nt, synthetic construct
  source 1..83: mol_type = other RNA
ccgactctggctttcccccaggtttacatgttcctggtgaaatggcaggacctgtcggagaaggtggtctaccggagattcac

SEQ ID NO: 12651 - RNA, 83 nt, synthetic construct
  source 1..83: mol_type = other RNA
ccgactctggctttcccccaggtgtacatgttcctggtgaaatggcaggacctgtcggagaaggtggtctaccggagattcac

SEQ ID NO: 12652 - RNA, 83 nt, synthetic construct
  source 1..83: mol_type = other RNA
ccgactctggctttcccccaggtctacatgttcctggtgaaatggcaggacctgtcggagaaggtggtctaccggcgcttcac

SEQ ID NO: 12653 - RNA, 83 nt, synthetic construct
  source 1..83: mol_type = other RNA
ccgactctggctttcccccaggtatacatgttcctggtgaaatggcaggacctgtcggagaaggtggtctaccggagattcac

SEQ ID NO: 12654 - RNA, 83 nt, synthetic construct
  source 1..83: mol_type = other RNA
ccgactctggctttcccccaggtatacatgttcctggtgaaatggcaggacctgtcggagaaggtggtctaccggaggttcac

SEQ ID NO: 12655 - RNA, 83 nt, synthetic construct
  source 1..83: mol_type = other RNA
ccgactctggctttcccccaggtatacatgttcctggtgaaatggcaggacctgtcggagaaggtggtctaccggcgattcac

SEQ ID NO: 12656 - RNA, 83 nt, synthetic construct
  source 1..83: mol_type = other RNA
ccgactctggctttcccccaggtttacatgttcctggtgaaatggcaggacctgtcggagaaggtggtctaccggcggttcac

SEQ ID NO: 12657 - RNA, 84 nt, synthetic construct
  source 1..84: mol_type = other RNA
cccgactctggctttcccccaggtctacatgttcctggtgaaatggcaggacctgtcggagaaggtggtctaccggagattcac

SEQ ID NO: 12658 - RNA, 84 nt, synthetic construct
  source 1..84: mol_type = other RNA
cccgactctggctttcccccaggtctacatgttcctggtgaaatggcaggacctgtcggagaaggtggtctaccggcggttcac

SEQ ID NO: 12659 - RNA, 84 nt, synthetic construct
  source 1..84: mol_type = other RNA
cccgactctggctttcccccaggtttacatgttcctggtgaaatggcaggacctgtcggagaaggtggtctaccggcgcttcac

SEQ ID NO: 12660 - RNA, 84 nt, synthetic construct
  source 1..84: mol_type = other RNA
cccgactctggctttcccccaggtctacatgttcctggtgaaatggcaggacctgtcggagaaggtggtctaccggaggttcac

SEQ ID NO: 12661 - RNA, 84 nt, synthetic construct
  source 1..84: mol_type = other RNA
cccgactctggctttcccccaggtctacatgttcctggtgaaatggcaggacctgtcggagaaggtggtctaccggcgtttcac

SEQ ID NO: 12662 - RNA, 84 nt, synthetic construct
  source 1..84: mol_type = other RNA
cccgactctggctttcccccaggtatacatgttcctggtgaaatggcaggacctgtcggagaaggtggtctaccggcgtttcac

SEQ ID NO: 12663 - RNA, 84 nt, synthetic construct
  source 1..84: mol_type = other RNA
cccgactctggctttcccccaggtgtacatgttcctggtgaaatggcaggacctgtcggagaaggtggtctaccggcgattcac

SEQ ID NO: 12664 - RNA, 84 nt, synthetic construct
  source 1..84: mol_type = other RNA
cccgactctggctttcccccaggtatacatgttcctggtgaaatggcaggacctgtcggagaaggtggtctaccggcgcttcac

SEQ ID NO: 12665 - RNA, 84 nt, synthetic construct
  source 1..84: mol_type = other RNA
cccgactctggctttcccccaggtatacatgttcctggtgaaatggcaggacctgtcggagaaggtggtctaccggcgattcac

SEQ ID NO: 12666 - RNA, 84 nt, synthetic construct
  source 1..84: mol_type = other RNA
cccgactctggctttcccccaggtatacatgttcctggtgaaatggcaggacctgtcggagaaggtggtctaccggaggttcac

SEQ ID NO: 12667 - RNA, 84 nt, synthetic construct
  source 1..84: mol_type = other RNA
cccgactctggctttcccccaggtatacatgttcctggtgaaatggcaggacctgtcggagaaggtggtctaccggagattcac

SEQ ID NO: 12668 - RNA, 84 nt, synthetic construct
  source 1..84: mol_type = other RNA
cccgactctggctttcccccaggtgtacatgttcctggtgaaatggcaggacctgtcggagaaggtggtctaccggagattcac

SEQ ID NO: 12669 - RNA, 84 nt, synthetic construct
  source 1..84: mol_type = other RNA
cccgactctggctttcccccaggtatacatgttcctggtgaaatggcaggacctgtcggagaaggtggtctaccggcggttcac

SEQ ID NO: 12670 - RNA, 84 nt, synthetic construct
  source 1..84: mol_type = other RNA
cccgactctggctttcccccaggtctacatgttcctggtgaaatggcaggacctgtcggagaaggtggtctaccggcgattcac

SEQ ID NO: 12671 - RNA, 84 nt, synthetic construct
  source 1..84: mol_type = other RNA
cccgactctggctttcccccaggtgtacatgttcctggtgaaatggcaggacctgtcggagaaggtggtctaccggcggttcac

SEQ ID NO: 12672 - RNA, 84 nt, synthetic construct
  source 1..84: mol_type = other RNA
cccgactctggctttcccccaggtgtacatgttcctggtgaaatggcaggacctgtcggagaaggtggtctaccggcgcttcac

SEQ ID NO: 12673 - RNA, 84 nt, synthetic construct
  source 1..84: mol_type = other RNA
cccgactctggctttcccccaggtttacatgttcctggtgaaatggcaggacctgtcggagaaggtggtctaccggcgtttcac

SEQ ID NO: 12674 - RNA, 84 nt, synthetic construct
  source 1..84: mol_type = other RNA
cccgactctggctttcccccaggtttacatgttcctggtgaaatggcaggacctgtcggagaaggtggtctaccggcggttcac

SEQ ID NO: 12675 - RNA, 84 nt, synthetic construct
  source 1..84: mol_type = other RNA
cccgactctggctttcccccaggtgtacatgttcctggtgaaatggcaggacctgtcggagaaggtggtctaccggcgtttcac

SEQ ID NO: 12676 - RNA, 84 nt, synthetic construct
  source 1..84: mol_type = other RNA
cccgactctggctttcccccaggtttacatgttcctggtgaaatggcaggacctgtcggagaaggtggtctaccggcgattcac

SEQ ID NO: 12677 - RNA, 84 nt, synthetic construct
  source 1..84: mol_type = other RNA
cccgactctggctttcccccaggtttacatgttcctggtgaaatggcaggacctgtcggagaaggtggtctaccggaggttcac

SEQ ID NO: 12678 - RNA, 84 nt, synthetic construct
  source 1..84: mol_type = other RNA
cccgactctggctttcccccaggtttacatgttcctggtgaaatggcaggacctgtcggagaaggtggtctaccggagattcac

SEQ ID NO: 12679 - RNA, 84 nt, synthetic construct
  source 1..84: mol_type = other RNA
cccgactctggctttcccccaggtgtacatgttcctggtgaaatggcaggacctgtcggagaaggtggtctaccggaggttcac

SEQ ID NO: 12680 - RNA, 84 nt, synthetic construct
  source 1..84: mol_type = other RNA
cccgactctggctttcccccaggtctacatgttcctggtgaaatggcaggacctgtcggagaaggtggtctaccggcgcttcac

SEQ ID NO: 12681 - RNA, 85 nt, synthetic construct
  source 1..85: mol_type = other RNA
ccccgactctggctttcccccaggtatacatgttcctggtgaaatggcaggacctgtcggagaaggtggtctaccggagattcac

SEQ ID NO: 12682 - RNA, 85 nt, synthetic construct
  source 1..85: mol_type = other RNA
ccccgactctggctttcccccaggtctacatgttcctggtgaaatggcaggacctgtcggagaaggtggtctaccggcgattcac

SEQ ID NO: 12683 - RNA, 85 nt, synthetic construct
  source 1..85: mol_type = other RNA
ccccgactctggctttcccccaggtgtacatgttcctggtgaaatggcaggacctgtcggagaaggtggtctaccggaggttcac

SEQ ID NO: 12684 - RNA, 85 nt, synthetic construct
  source 1..85: mol_type = other RNA
ccccgactctggctttcccccaggtttacatgttcctggtgaaatggcaggacctgtcggagaaggtggtctaccggcgcttcac

SEQ ID NO: 12685 - RNA, 85 nt, synthetic construct
  source 1..85: mol_type = other RNA
ccccgactctggctttcccccaggtttacatgttcctggtgaaatggcaggacctgtcggagaaggtggtctaccggcgattcac

SEQ ID NO: 12686 - RNA, 85 nt, synthetic construct
  source 1..85: mol_type = other RNA
ccccgactctggctttcccccaggtttacatgttcctggtgaaatggcaggacctgtcggagaaggtggtctaccggaggttcac

SEQ ID NO: 12687 - RNA, 85 nt, synthetic construct
  source 1..85: mol_type = other RNA
ccccgactctggctttcccccaggtttacatgttcctggtgaaatggcaggacctgtcggagaaggtggtctaccggagattcac

SEQ ID NO: 12688 - RNA, 85 nt, synthetic construct
  source 1..85: mol_type = other RNA
ccccgactctggctttcccccaggtgtacatgttcctggtgaaatggcaggacctgtcggagaaggtggtctaccggcgtttcac

SEQ ID NO: 12689 - RNA, 85 nt, synthetic construct
  source 1..85: mol_type = other RNA
ccccgactctggctttcccccaggtgtacatgttcctggtgaaatggcaggacctgtcggagaaggtggtctaccggcggttcac

SEQ ID NO: 12690 - RNA, 85 nt, synthetic construct
  source 1..85: mol_type = other RNA
ccccgactctggctttcccccaggtgtacatgttcctggtgaaatggcaggacctgtcggagaaggtggtctaccggcgcttcac

SEQ ID NO: 12691 - RNA, 85 nt, synthetic construct
  source 1..85: mol_type = other RNA
ccccgactctggctttcccccaggtgtacatgttcctggtgaaatggcaggacctgtcggagaaggtggtctaccggcgattcac

SEQ ID NO: 12692 - RNA, 85 nt, synthetic construct
  source 1..85: mol_type = other RNA
ccccgactctggctttcccccaggtctacatgttcctggtgaaatggcaggacctgtcggagaaggtggtctaccggcgcttcac

SEQ ID NO: 12693 - RNA, 85 nt, synthetic construct
  source 1..85: mol_type = other RNA
ccccgactctggctttcccccaggtgtacatgttcctggtgaaatggcaggacctgtcggagaaggtggtctaccggagattcac

SEQ ID NO: 12694 - RNA, 85 nt, synthetic construct
  source 1..85: mol_type = other RNA
ccccgactctggctttcccccaggtctacatgttcctggtgaaatggcaggacctgtcggagaaggtggtctaccggcgtttcac

SEQ ID NO: 12695 - RNA, 85 nt, synthetic construct
  source 1..85: mol_type = other RNA
ccccgactctggctttcccccaggtctacatgttcctggtgaaatggcaggacctgtcggagaaggtggtctaccggcggttcac

SEQ ID NO: 12696 - RNA, 85 nt, synthetic construct
  source 1..85: mol_type = other RNA
ccccgactctggctttcccccaggtctacatgttcctggtgaaatggcaggacctgtcggagaaggtggtctaccggaggttcac

SEQ ID NO: 12697 - RNA, 85 nt, synthetic construct
  source 1..85: mol_type = other RNA
ccccgactctggctttcccccaggtatacatgttcctggtgaaatggcaggacctgtcggagaaggtggtctaccggaggttcac

SEQ ID NO: 12698 - RNA, 85 nt, synthetic construct
  source 1..85: mol_type = other RNA
ccccgactctggctttcccccaggtctacatgttcctggtgaaatggcaggacctgtcggagaaggtggtctaccggagattcac

SEQ ID NO: 12699 - RNA, 85 nt, synthetic construct
  source 1..85: mol_type = other RNA
ccccgactctggctttcccccaggtatacatgttcctggtgaaatggcaggacctgtcggagaaggtggtctaccggcgtttcac

SEQ ID NO: 12700 - RNA, 85 nt, synthetic construct
  source 1..85: mol_type = other RNA
ccccgactctggctttcccccaggtatacatgttcctggtgaaatggcaggacctgtcggagaaggtggtctaccggcggttcac

SEQ ID NO: 12701 - RNA, 85 nt, synthetic construct
  source 1..85: mol_type = other RNA
ccccgactctggctttcccccaggtatacatgttcctggtgaaatggcaggacctgtcggagaaggtggtctaccggcgcttcac

SEQ ID NO: 12702 - RNA, 85 nt, synthetic construct
  source 1..85: mol_type = other RNA
ccccgactctggctttcccccaggtatacatgttcctggtgaaatggcaggacctgtcggagaaggtggtctaccggcgattcac

SEQ ID NO: 12703 - RNA, 85 nt, synthetic construct
  source 1..85: mol_type = other RNA
ccccgactctggctttcccccaggtttacatgttcctggtgaaatggcaggacctgtcggagaaggtggtctaccggcggttcac

SEQ ID NO: 12704 - RNA, 85 nt, synthetic construct
  source 1..85: mol_type = other RNA
ccccgactctggctttcccccaggtttacatgttcctggtgaaatggcaggacctgtcggagaaggtggtctaccggcgtttcac

SEQ ID NO: 12705 - RNA, 86 nt, synthetic construct
  source 1..86: mol_type = other RNA
cccccgactctggctttcccccaggtttacatgttcctggtgaaatggcaggacctgtcggagaaggtggtctaccggagattcac

SEQ ID NO: 12706 - RNA, 86 nt, synthetic construct
  source 1..86: mol_type = other RNA
cccccgactctggctttcccccaggtttacatgttcctggtgaaatggcaggacctgtcggagaaggtggtctaccggaggttcac

SEQ ID NO: 12707 - RNA, 86 nt, synthetic construct
  source 1..86: mol_type = other RNA
cccccgactctggctttcccccaggtttacatgttcctggtgaaatggcaggacctgtcggagaaggtggtctaccggcgtttcac

SEQ ID NO: 12708 - RNA, 86 nt, synthetic construct
  source 1..86: mol_type = other RNA
cccccgactctggctttcccccaggtttacatgttcctggtgaaatggcaggacctgtcggagaaggtggtctaccggcggttcac

SEQ ID NO: 12709 - RNA, 86 nt, synthetic construct
  source 1..86: mol_type = other RNA
cccccgactctggctttcccccaggtttacatgttcctggtgaaatggcaggacctgtcggagaaggtggtctaccggcgcttcac

SEQ ID NO: 12710 - RNA, 86 nt, synthetic construct
  source 1..86: mol_type = other RNA
cccccgactctggctttcccccaggtatacatgttcctggtgaaatggcaggacctgtcggagaaggtggtctaccggaggttcac

SEQ ID NO: 12711 - RNA, 86 nt, synthetic construct
  source 1..86: mol_type = other RNA
cccccgactctggctttcccccaggtatacatgttcctggtgaaatggcaggacctgtcggagaaggtggtctaccggagattcac

SEQ ID NO: 12712 - RNA, 86 nt, synthetic construct
  source 1..86: mol_type = other RNA
cccccgactctggctttcccccaggtatacatgttcctggtgaaatggcaggacctgtcggagaaggtggtctaccggcgcttcac

SEQ ID NO: 12713 - RNA, 86 nt, synthetic construct
  source 1..86: mol_type = other RNA
cccccgactctggctttcccccaggtctacatgttcctggtgaaatggcaggacctgtcggagaaggtggtctaccggagattcac

SEQ ID NO: 12714 - RNA, 86 nt, synthetic construct
  source 1..86: mol_type = other RNA
cccccgactctggctttcccccaggtgtacatgttcctggtgaaatggcaggacctgtcggagaaggtggtctaccggcgtttcac

SEQ ID NO: 12715 - RNA, 86 nt, synthetic construct
  source 1..86: mol_type = other RNA
cccccgactctggctttcccccaggtgtacatgttcctggtgaaatggcaggacctgtcggagaaggtggtctaccggcggttcac

SEQ ID NO: 12716 - RNA, 86 nt, synthetic construct
  source 1..86: mol_type = other RNA
cccccgactctggctttcccccaggtgtacatgttcctggtgaaatggcaggacctgtcggagaaggtggtctaccggcgcttcac

SEQ ID NO: 12717 - RNA, 86 nt, synthetic construct
  source 1..86: mol_type = other RNA
cccccgactctggctttcccccaggtgtacatgttcctggtgaaatggcaggacctgtcggagaaggtggtctaccggcgattcac

SEQ ID NO: 12718 - RNA, 86 nt, synthetic construct
  source 1..86: mol_type = other RNA
cccccgactctggctttcccccaggtatacatgttcctggtgaaatggcaggacctgtcggagaaggtggtctaccggcggttcac

SEQ ID NO: 12719 - RNA, 86 nt, synthetic construct
  source 1..86: mol_type = other RNA
cccccgactctggctttcccccaggtatacatgttcctggtgaaatggcaggacctgtcggagaaggtggtctaccggcgattcac

SEQ ID NO: 12720 - RNA, 86 nt, synthetic construct
  source 1..86: mol_type = other RNA
cccccgactctggctttcccccaggtttacatgttcctggtgaaatggcaggacctgtcggagaaggtggtctaccggcgattcac

SEQ ID NO: 12721 - RNA, 86 nt, synthetic construct
  source 1..86: mol_type = other RNA
cccccgactctggctttcccccaggtatacatgttcctggtgaaatggcaggacctgtcggagaaggtggtctaccggcgtttcac

SEQ ID NO: 12722 - RNA, 86 nt, synthetic construct
  source 1..86: mol_type = other RNA
cccccgactctggctttcccccaggtctacatgttcctggtgaaatggcaggacctgtcggagaaggtggtctaccggaggttcac

SEQ ID NO: 12723 - RNA, 86 nt, synthetic construct
  source 1..86: mol_type = other RNA
cccccgactctggctttcccccaggtctacatgttcctggtgaaatggcaggacctgtcggagaaggtggtctaccggcgattcac

SEQ ID NO: 12724 - RNA, 86 nt, synthetic construct
  source 1..86: mol_type = other RNA
cccccgactctggctttcccccaggtctacatgttcctggtgaaatggcaggacctgtcggagaaggtggtctaccggcgcttcac

SEQ ID NO: 12725 - RNA, 86 nt, synthetic construct
  source 1..86: mol_type = other RNA
cccccgactctggctttcccccaggtctacatgttcctggtgaaatggcaggacctgtcggagaaggtggtctaccggcggttcac

SEQ ID NO: 12726 - RNA, 86 nt, synthetic construct
  source 1..86: mol_type = other RNA
cccccgactctggctttcccccaggtctacatgttcctggtgaaatggcaggacctgtcggagaaggtggtctaccggcgtttcac

SEQ ID NO: 12727 - RNA, 86 nt, synthetic construct
  source 1..86: mol_type = other RNA
cccccgactctggctttcccccaggtgtacatgttcctggtgaaatggcaggacctgtcggagaaggtggtctaccggagattcac

SEQ ID NO: 12728 - RNA, 86 nt, synthetic construct
  source 1..86: mol_type = other RNA
cccccgactctggctttcccccaggtgtacatgttcctggtgaaatggcaggacctgtcggagaaggtggtctaccggaggttcac

SEQ ID NO: 12729 - RNA, 87 nt, synthetic construct
  source 1..87: mol_type = other RNA
tcccccgactctggctttcccccaggtctacatgttcctggtgaaatggcaggacctgtcggagaaggtggtctaccggcgcttcac

SEQ ID NO: 12730 - RNA, 87 nt, synthetic construct
  source 1..87: mol_type = other RNA
tcccccgactctggctttcccccaggtttacatgttcctggtgaaatggcaggacctgtcggagaaggtggtctaccggaggttcac

SEQ ID NO: 12731 - RNA, 87 nt, synthetic construct
  source 1..87: mol_type = other RNA
tcccccgactctggctttcccccaggtttacatgttcctggtgaaatggcaggacctgtcggagaaggtggtctaccggcgcttcac

SEQ ID NO: 12732 - RNA, 87 nt, synthetic construct
  source 1..87: mol_type = other RNA
tcccccgactctggctttcccccaggtctacatgttcctggtgaaatggcaggacctgtcggagaaggtggtctaccggaggttcac

SEQ ID NO: 12733 - RNA, 87 nt, synthetic construct
  source 1..87: mol_type = other RNA
tcccccgactctggctttcccccaggtttacatgttcctggtgaaatggcaggacctgtcggagaaggtggtctaccggcgtttcac

SEQ ID NO: 12734 - RNA, 87 nt, synthetic construct
  source 1..87: mol_type = other RNA
tcccccgactctggctttcccccaggtttacatgttcctggtgaaatggcaggacctgtcggagaaggtggtctaccggagattcac

SEQ ID NO: 12735 - RNA, 87 nt, synthetic construct
  source 1..87: mol_type = other RNA
tcccccgactctggctttcccccaggtatacatgttcctggtgaaatggcaggacctgtcggagaaggtggtctaccggaggttcac

SEQ ID NO: 12736 - RNA, 87 nt, synthetic construct
  source 1..87: mol_type = other RNA
tcccccgactctggctttcccccaggtttacatgttcctggtgaaatggcaggacctgtcggagaaggtggtctaccggcgattcac

SEQ ID NO: 12737 - RNA, 87 nt, synthetic construct
  source 1..87: mol_type = other RNA
tcccccgactctggctttcccccaggtatacatgttcctggtgaaatggcaggacctgtcggagaaggtggtctaccggcgattcac

SEQ ID NO: 12738 - RNA, 87 nt, synthetic construct
  source 1..87: mol_type = other RNA
tcccccgactctggctttcccccaggtatacatgttcctggtgaaatggcaggacctgtcggagaaggtggtctaccggcgcttcac

SEQ ID NO: 12739 - RNA, 87 nt, synthetic construct
  source 1..87: mol_type = other RNA
tcccccgactctggctttcccccaggtatacatgttcctggtgaaatggcaggacctgtcggagaaggtggtctaccggcgtttcac

SEQ ID NO: 12740 - RNA, 87 nt, synthetic construct
  source 1..87: mol_type = other RNA
tcccccgactctggctttcccccaggtctacatgttcctggtgaaatggcaggacctgtcggagaaggtggtctaccggagattcac

SEQ ID NO: 12741 - RNA, 87 nt, synthetic construct
  source 1..87: mol_type = other RNA
tcccccgactctggctttcccccaggtgtacatgttcctggtgaaatggcaggacctgtcggagaaggtggtctaccggcgtttcac

SEQ ID NO: 12742 - RNA, 87 nt, synthetic construct
  source 1..87: mol_type = other RNA
tcccccgactctggctttcccccaggtctacatgttcctggtgaaatggcaggacctgtcggagaaggtggtctaccggcgattcac

SEQ ID NO: 12743 - RNA, 87 nt, synthetic construct
  source 1..87: mol_type = other RNA
tcccccgactctggctttcccccaggtgtacatgttcctggtgaaatggcaggacctgtcggagaaggtggtctaccggcggttcac

SEQ ID NO: 12744 - RNA, 87 nt, synthetic construct
  source 1..87: mol_type = other RNA
tcccccgactctggctttcccccaggtctacatgttcctggtgaaatggcaggacctgtcggagaaggtggtctaccggcggttcac

SEQ ID NO: 12745 - RNA, 87 nt, synthetic construct
  source 1..87: mol_type = other RNA
tcccccgactctggctttcccccaggtctacatgttcctggtgaaatggcaggacctgtcggagaaggtggtctaccggcgtttcac

SEQ ID NO: 12746 - RNA, 87 nt, synthetic construct
  source 1..87: mol_type = other RNA
tcccccgactctggctttcccccaggtgtacatgttcctggtgaaatggcaggacctgtcggagaaggtggtctaccggagattcac

SEQ ID NO: 12747 - RNA, 87 nt, synthetic construct
  source 1..87: mol_type = other RNA
tcccccgactctggctttcccccaggtgtacatgttcctggtgaaatggcaggacctgtcggagaaggtggtctaccggaggttcac

SEQ ID NO: 12748 - RNA, 87 nt, synthetic construct
  source 1..87: mol_type = other RNA
tcccccgactctggctttcccccaggtatacatgttcctggtgaaatggcaggacctgtcggagaaggtggtctaccggagattcac

SEQ ID NO: 12749 - RNA, 87 nt, synthetic construct
  source 1..87: mol_type = other RNA
tcccccgactctggctttcccccaggtgtacatgttcctggtgaaatggcaggacctgtcggagaaggtggtctaccggcgattcac

SEQ ID NO: 12750 - RNA, 87 nt, synthetic construct
  source 1..87: mol_type = other RNA
tcccccgactctggctttcccccaggtgtacatgttcctggtgaaatggcaggacctgtcggagaaggtggtctaccggcgcttcac

SEQ ID NO: 12751 - RNA, 87 nt, synthetic construct
  source 1..87: mol_type = other RNA
tcccccgactctggctttcccccaggtatacatgttcctggtgaaatggcaggacctgtcggagaaggtggtctaccggcggttcac

SEQ ID NO: 12752 - RNA, 87 nt, synthetic construct
  source 1..87: mol_type = other RNA
tcccccgactctggctttcccccaggtttacatgttcctggtgaaatggcaggacctgtcggagaaggtggtctaccggcggttcac

SEQ ID NO: 12753 - RNA, 88 nt, synthetic construct
  source 1..88: mol_type = other RNA
gtcccccgactctggctttcccccaggtctacatgttcctggtgaaatggcaggacctgtcggagaaggtggtctaccggaggttcac

SEQ ID NO: 12754 - RNA, 88 nt, synthetic construct
  source 1..88: mol_type = other RNA
gtcccccgactctggctttcccccaggtatacatgttcctggtgaaatggcaggacctgtcggagaaggtggtctaccggcgattcac

SEQ ID NO: 12755 - RNA, 88 nt, synthetic construct
  source 1..88: mol_type = other RNA
gtcccccgactctggctttcccccaggtatacatgttcctggtgaaatggcaggacctgtcggagaaggtggtctaccggaggttcac

SEQ ID NO: 12756 - RNA, 88 nt, synthetic construct
  source 1..88: mol_type = other RNA
gtcccccgactctggctttcccccaggtatacatgttcctggtgaaatggcaggacctgtcggagaaggtggtctaccggcgcttcac

SEQ ID NO: 12757 - RNA, 88 nt, synthetic construct
  source 1..88: mol_type = other RNA
gtcccccgactctggctttcccccaggtctacatgttcctggtgaaatggcaggacctgtcggagaaggtggtctaccggcgtttcac

SEQ ID NO: 12758 - RNA, 88 nt, synthetic construct
  source 1..88: mol_type = other RNA
gtcccccgactctggctttcccccaggtttacatgttcctggtgaaatggcaggacctgtcggagaaggtggtctaccggaggttcac

SEQ ID NO: 12759 - RNA, 88 nt, synthetic construct
  source 1..88: mol_type = other RNA
gtcccccgactctggctttcccccaggtttacatgttcctggtgaaatggcaggacctgtcggagaaggtggtctaccggcgattcac

SEQ ID NO: 12760 - RNA, 88 nt, synthetic construct
  source 1..88: mol_type = other RNA
gtcccccgactctggctttcccccaggtttacatgttcctggtgaaatggcaggacctgtcggagaaggtggtctaccggcgcttcac

SEQ ID NO: 12761 - RNA, 88 nt, synthetic construct
  source 1..88: mol_type = other RNA
gtcccccgactctggctttcccccaggtttacatgttcctggtgaaatggcaggacctgtcggagaaggtggtctaccggcggttcac

SEQ ID NO: 12762 - RNA, 88 nt, synthetic construct
  source 1..88: mol_type = other RNA
gtcccccgactctggctttcccccaggtttacatgttcctggtgaaatggcaggacctgtcggagaaggtggtctaccggcgtttcac

SEQ ID NO: 12763 - RNA, 88 nt, synthetic construct
  source 1..88: mol_type = other RNA
gtcccccgactctggctttcccccaggtgtacatgttcctggtgaaatggcaggacctgtcggagaaggtggtctaccggcggttcac

SEQ ID NO: 12764 - RNA, 88 nt, synthetic construct
  source 1..88: mol_type = other RNA
gtcccccgactctggctttcccccaggtgtacatgttcctggtgaaatggcaggacctgtcggagaaggtggtctaccggcgcttcac

SEQ ID NO: 12765 - RNA, 88 nt, synthetic construct
  source 1..88: mol_type = other RNA
gtcccccgactctggctttcccccaggtgtacatgttcctggtgaaatggcaggacctgtcggagaaggtggtctaccggcgattcac

SEQ ID NO: 12766 - RNA, 88 nt, synthetic construct
  source 1..88: mol_type = other RNA
gtcccccgactctggctttcccccaggtatacatgttcctggtgaaatggcaggacctgtcggagaaggtggtctaccggagattcac

SEQ ID NO: 12767 - RNA, 88 nt, synthetic construct
  source 1..88: mol_type = other RNA
gtcccccgactctggctttcccccaggtgtacatgttcctggtgaaatggcaggacctgtcggagaaggtggtctaccggagattcac

SEQ ID NO: 12768 - RNA, 88 nt, synthetic construct
  source 1..88: mol_type = other RNA
gtcccccgactctggctttcccccaggtctacatgttcctggtgaaatggcaggacctgtcggagaaggtggtctaccggcggttcac

SEQ ID NO: 12769 - RNA, 88 nt, synthetic construct
  source 1..88: mol_type = other RNA
gtcccccgactctggctttcccccaggtttacatgttcctggtgaaatggcaggacctgtcggagaaggtggtctaccggagattcac

SEQ ID NO: 12770 - RNA, 88 nt, synthetic construct
  source 1..88: mol_type = other RNA
gtcccccgactctggctttcccccaggtctacatgttcctggtgaaatggcaggacctgtcggagaaggtggtctaccggcgcttcac

SEQ ID NO: 12771 - RNA, 88 nt, synthetic construct
  source 1..88: mol_type = other RNA
gtcccccgactctggctttcccccaggtctacatgttcctggtgaaatggcaggacctgtcggagaaggtggtctaccggcgattcac

SEQ ID NO: 12772 - RNA, 88 nt, synthetic construct
  source 1..88: mol_type = other RNA
gtcccccgactctggctttcccccaggtctacatgttcctggtgaaatggcaggacctgtcggagaaggtggtctaccggagattcac

SEQ ID NO: 12773 - RNA, 88 nt, synthetic construct
  source 1..88: mol_type = other RNA
gtcccccgactctggctttcccccaggtatacatgttcctggtgaaatggcaggacctgtcggagaaggtggtctaccggcgtttcac

SEQ ID NO: 12774 - RNA, 88 nt, synthetic construct
  source 1..88: mol_type = other RNA
gtcccccgactctggctttcccccaggtatacatgttcctggtgaaatggcaggacctgtcggagaaggtggtctaccggcggttcac

SEQ ID NO: 12775 - RNA, 88 nt, synthetic construct
  source 1..88: mol_type = other RNA
gtcccccgactctggctttcccccaggtgtacatgttcctggtgaaatggcaggacctgtcggagaaggtggtctaccggcgtttcac

SEQ ID NO: 12776 - RNA, 88 nt, synthetic construct
  source 1..88: mol_type = other RNA
gtcccccgactctggctttcccccaggtgtacatgttcctggtgaaatggcaggacctgtcggagaaggtggtctaccggaggttcac

SEQ ID NO: 12777 - RNA, 89 nt, synthetic construct
  source 1..89: mol_type = other RNA
ggtcccccgactctggctttcccccaggtttacatgttcctggtgaaatggcaggacctgtcggagaaggtggtctaccggaggttcac

SEQ ID NO: 12778 - RNA, 89 nt, synthetic construct
  source 1..89: mol_type = other RNA
ggtcccccgactctggctttcccccaggtttacatgttcctggtgaaatggcaggacctgtcggagaaggtggtctaccggagattcac

SEQ ID NO: 12779 - RNA, 89 nt, synthetic construct
  source 1..89: mol_type = other RNA
ggtcccccgactctggctttcccccaggtgtacatgttcctggtgaaatggcaggacctgtcggagaaggtggtctaccggcgtttcac

SEQ ID NO: 12780 - RNA, 89 nt, synthetic construct
  source 1..89: mol_type = other RNA
ggtcccccgactctggctttcccccaggtgtacatgttcctggtgaaatggcaggacctgtcggagaaggtggtctaccggcggttcac

SEQ ID NO: 12781 - RNA, 89 nt, synthetic construct
  source 1..89: mol_type = other RNA
ggtcccccgactctggctttcccccaggtatacatgttcctggtgaaatggcaggacctgtcggagaaggtggtctaccggcggttcac

SEQ ID NO: 12782 - RNA, 89 nt, synthetic construct
  source 1..89: mol_type = other RNA
ggtcccccgactctggctttcccccaggtctacatgttcctggtgaaatggcaggacctgtcggagaaggtggtctaccggcggttcac

SEQ ID NO: 12783 - RNA, 89 nt, synthetic construct
  source 1..89: mol_type = other RNA
ggtcccccgactctggctttcccccaggtatacatgttcctggtgaaatggcaggacctgtcggagaaggtggtctaccggcgtttcac

SEQ ID NO: 12784 - RNA, 89 nt, synthetic construct
  source 1..89: mol_type = other RNA
ggtcccccgactctggctttcccccaggtatacatgttcctggtgaaatggcaggacctgtcggagaaggtggtctaccggcgcttcac

SEQ ID NO: 12785 - RNA, 89 nt, synthetic construct
  source 1..89: mol_type = other RNA
ggtcccccgactctggctttcccccaggtatacatgttcctggtgaaatggcaggacctgtcggagaaggtggtctaccggcgattcac

SEQ ID NO: 12786 - RNA, 89 nt, synthetic construct
  source 1..89: mol_type = other RNA
ggtcccccgactctggctttcccccaggtatacatgttcctggtgaaatggcaggacctgtcggagaaggtggtctaccggaggttcac

SEQ ID NO: 12787 - RNA, 89 nt, synthetic construct
  source 1..89: mol_type = other RNA
ggtcccccgactctggctttcccccaggtctacatgttcctggtgaaatggcaggacctgtcggagaaggtggtctaccggaggttcac

SEQ ID NO: 12788 - RNA, 89 nt, synthetic construct
  source 1..89: mol_type = other RNA
ggtcccccgactctggctttcccccaggtttacatgttcctggtgaaatggcaggacctgtcggagaaggtggtctaccggcgattcac

SEQ ID NO: 12789 - RNA, 89 nt, synthetic construct
  source 1..89: mol_type = other RNA
ggtcccccgactctggctttcccccaggtttacatgttcctggtgaaatggcaggacctgtcggagaaggtggtctaccggcggttcac

SEQ ID NO: 12790 - RNA, 89 nt, synthetic construct
  source 1..89: mol_type = other RNA
ggtcccccgactctggctttcccccaggtatacatgttcctggtgaaatggcaggacctgtcggagaaggtggtctaccggagattcac

SEQ ID NO: 12791 - RNA, 89 nt, synthetic construct
  source 1..89: mol_type = other RNA
ggtcccccgactctggctttcccccaggtttacatgttcctggtgaaatggcaggacctgtcggagaaggtggtctaccggcgcttcac

SEQ ID NO: 12792 - RNA, 89 nt, synthetic construct
  source 1..89: mol_type = other RNA
ggtcccccgactctggctttcccccaggtctacatgttcctggtgaaatggcaggacctgtcggagaaggtggtctaccggcgattcac

SEQ ID NO: 12793 - RNA, 89 nt, synthetic construct
  source 1..89: mol_type = other RNA
ggtcccccgactctggctttcccccaggtctacatgttcctggtgaaatggcaggacctgtcggagaaggtggtctaccggagattcac

SEQ ID NO: 12794 - RNA, 89 nt, synthetic construct
  source 1..89: mol_type = other RNA
ggtcccccgactctggctttcccccaggtttacatgttcctggtgaaatggcaggacctgtcggagaaggtggtctaccggcgtttcac

SEQ ID NO: 12795 - RNA, 89 nt, synthetic construct
  source 1..89: mol_type = other RNA
ggtcccccgactctggctttcccccaggtgtacatgttcctggtgaaatggcaggacctgtcggagaaggtggtctaccggaggttcac

SEQ ID NO: 12796 - RNA, 89 nt, synthetic construct
  source 1..89: mol_type = other RNA
ggtcccccgactctggctttcccccaggtctacatgttcctggtgaaatggcaggacctgtcggagaaggtggtctaccggcgtttcac

SEQ ID NO: 12797 - RNA, 89 nt, synthetic construct
  source 1..89: mol_type = other RNA
ggtcccccgactctggctttcccccaggtgtacatgttcctggtgaaatggcaggacctgtcggagaaggtggtctaccggagattcac

SEQ ID NO: 12798 - RNA, 89 nt, synthetic construct
  source 1..89: mol_type = other RNA
ggtcccccgactctggctttcccccaggtctacatgttcctggtgaaatggcaggacctgtcggagaaggtggtctaccggcgcttcac

SEQ ID NO: 12799 - RNA, 89 nt, synthetic construct
  source 1..89: mol_type = other RNA
ggtcccccgactctggctttcccccaggtgtacatgttcctggtgaaatggcaggacctgtcggagaaggtggtctaccggcgattcac

SEQ ID NO: 12800 - RNA, 89 nt, synthetic construct
  source 1..89: mol_type = other RNA
ggtcccccgactctggctttcccccaggtgtacatgttcctggtgaaatggcaggacctgtcggagaaggtggtctaccggcgcttcac

SEQ ID NO: 12801 - RNA, 90 nt, synthetic construct
  source 1..90: mol_type = other RNA
gggtcccccgactctggctttcccccaggtatacatgttcctggtgaaatggcaggacctgtcggagaaggtggtctaccggcgattcac

SEQ ID NO: 12802 - RNA, 90 nt, synthetic construct
  source 1..90: mol_type = other RNA
gggtcccccgactctggctttcccccaggtctacatgttcctggtgaaatggcaggacctgtcggagaaggtggtctaccggcgattcac

SEQ ID NO: 12803 - RNA, 90 nt, synthetic construct
  source 1..90: mol_type = other RNA
gggtcccccgactctggctttcccccaggtctacatgttcctggtgaaatggcaggacctgtcggagaaggtggtctaccggaggttcac

SEQ ID NO: 12804 - RNA, 90 nt, synthetic construct
  source 1..90: mol_type = other RNA
gggtcccccgactctggctttcccccaggtctacatgttcctggtgaaatggcaggacctgtcggagaaggtggtctaccggagattcac

SEQ ID NO: 12805 - RNA, 90 nt, synthetic construct
  source 1..90: mol_type = other RNA
gggtcccccgactctggctttcccccaggtatacatgttcctggtgaaatggcaggacctgtcggagaaggtggtctaccggcgtttcac

SEQ ID NO: 12806 - RNA, 90 nt, synthetic construct
  source 1..90: mol_type = other RNA
gggtcccccgactctggctttcccccaggtatacatgttcctggtgaaatggcaggacctgtcggagaaggtggtctaccggcggttcac

SEQ ID NO: 12807 - RNA, 90 nt, synthetic construct
  source 1..90: mol_type = other RNA
gggtcccccgactctggctttcccccaggtatacatgttcctggtgaaatggcaggacctgtcggagaaggtggtctaccggaggttcac

SEQ ID NO: 12808 - RNA, 90 nt, synthetic construct
  source 1..90: mol_type = other RNA
gggtcccccgactctggctttcccccaggtttacatgttcctggtgaaatggcaggacctgtcggagaaggtggtctaccggcgattcac

SEQ ID NO: 12809 - RNA, 90 nt, synthetic construct
  source 1..90: mol_type = other RNA
gggtcccccgactctggctttcccccaggtatacatgttcctggtgaaatggcaggacctgtcggagaaggtggtctaccggcgcttcac

SEQ ID NO: 12810 - RNA, 90 nt, synthetic construct
  source 1..90: mol_type = other RNA
gggtcccccgactctggctttcccccaggtttacatgttcctggtgaaatggcaggacctgtcggagaaggtggtctaccggcgcttcac

SEQ ID NO: 12811 - RNA, 90 nt, synthetic construct
  source 1..90: mol_type = other RNA
gggtcccccgactctggctttcccccaggtatacatgttcctggtgaaatggcaggacctgtcggagaaggtggtctaccggagattcac

SEQ ID NO: 12812 - RNA, 90 nt, synthetic construct
  source 1..90: mol_type = other RNA
gggtcccccgactctggctttcccccaggtctacatgttcctggtgaaatggcaggacctgtcggagaaggtggtctaccggcgcttcac

SEQ ID NO: 12813 - RNA, 90 nt, synthetic construct
  source 1..90: mol_type = other RNA
gggtcccccgactctggctttcccccaggtttacatgttcctggtgaaatggcaggacctgtcggagaaggtggtctaccggcgtttcac

SEQ ID NO: 12814 - RNA, 90 nt, synthetic construct
  source 1..90: mol_type = other RNA
gggtcccccgactctggctttcccccaggtgtacatgttcctggtgaaatggcaggacctgtcggagaaggtggtctaccggagattcac

SEQ ID NO: 12815 - RNA, 90 nt, synthetic construct
  source 1..90: mol_type = other RNA
gggtcccccgactctggctttcccccaggtgtacatgttcctggtgaaatggcaggacctgtcggagaaggtggtctaccggaggttcac

SEQ ID NO: 12816 - RNA, 90 nt, synthetic construct
  source 1..90: mol_type = other RNA
gggtcccccgactctggctttcccccaggtgtacatgttcctggtgaaatggcaggacctgtcggagaaggtggtctaccggcgattcac

SEQ ID NO: 12817 - RNA, 90 nt, synthetic construct
  source 1..90: mol_type = other RNA
gggtcccccgactctggctttcccccaggtgtacatgttcctggtgaaatggcaggacctgtcggagaaggtggtctaccggcgcttcac

SEQ ID NO: 12818 - RNA, 90 nt, synthetic construct
  source 1..90: mol_type = other RNA
gggtcccccgactctggctttcccccaggtgtacatgttcctggtgaaatggcaggacctgtcggagaaggtggtctaccggcggttcac

SEQ ID NO: 12819 - RNA, 90 nt, synthetic construct
  source 1..90: mol_type = other RNA
gggtcccccgactctggctttcccccaggtgtacatgttcctggtgaaatggcaggacctgtcggagaaggtggtctaccggcgtttcac

SEQ ID NO: 12820 - RNA, 90 nt, synthetic construct
  source 1..90: mol_type = other RNA
gggtcccccgactctggctttcccccaggtttacatgttcctggtgaaatggcaggacctgtcggagaaggtggtctaccggagattcac

SEQ ID NO: 12821 - RNA, 90 nt, synthetic construct
  source 1..90: mol_type = other RNA
gggtcccccgactctggctttcccccaggtttacatgttcctggtgaaatggcaggacctgtcggagaaggtggtctaccggaggttcac

SEQ ID NO: 12822 - RNA, 90 nt, synthetic construct
  source 1..90: mol_type = other RNA
gggtcccccgactctggctttcccccaggtctacatgttcctggtgaaatggcaggacctgtcggagaaggtggtctaccggcgtttcac

SEQ ID NO: 12823 - RNA, 90 nt, synthetic construct
  source 1..90: mol_type = other RNA
gggtcccccgactctggctttcccccaggtttacatgttcctggtgaaatggcaggacctgtcggagaaggtggtctaccggcggttcac

SEQ ID NO: 12824 - RNA, 90 nt, synthetic construct
  source 1..90: mol_type = other RNA
gggtcccccgactctggctttcccccaggtctacatgttcctggtgaaatggcaggacctgtcggagaaggtggtctaccggcggttcac

SEQ ID NO: 12825 - RNA, 91 nt, synthetic construct
  source 1..91: mol_type = other RNA
ggggtcccccgactctggctttcccccaggtctacatgttcctggtgaaatggcaggacctgtcggagaaggtggtctaccggcgcttcac

SEQ ID NO: 12826 - RNA, 91 nt, synthetic construct
  source 1..91: mol_type = other RNA
ggggtcccccgactctggctttcccccaggtctacatgttcctggtgaaatggcaggacctgtcggagaaggtggtctaccggaggttcac

SEQ ID NO: 12827 - RNA, 91 nt, synthetic construct
  source 1..91: mol_type = other RNA
ggggtcccccgactctggctttcccccaggtgtacatgttcctggtgaaatggcaggacctgtcggagaaggtggtctaccggcgcttcac

SEQ ID NO: 12828 - RNA, 91 nt, synthetic construct
  source 1..91: mol_type = other RNA
ggggtcccccgactctggctttcccccaggtctacatgttcctggtgaaatggcaggacctgtcggagaaggtggtctaccggcgattcac

SEQ ID NO: 12829 - RNA, 91 nt, synthetic construct
  source 1..91: mol_type = other RNA
ggggtcccccgactctggctttcccccaggtttacatgttcctggtgaaatggcaggacctgtcggagaaggtggtctaccggagattcac

SEQ ID NO: 12830 - RNA, 91 nt, synthetic construct
  source 1..91: mol_type = other RNA
ggggtcccccgactctggctttcccccaggtgtacatgttcctggtgaaatggcaggacctgtcggagaaggtggtctaccggagattcac

SEQ ID NO: 12831 - RNA, 91 nt, synthetic construct
  source 1..91: mol_type = other RNA
ggggtcccccgactctggctttcccccaggtatacatgttcctggtgaaatggcaggacctgtcggagaaggtggtctaccggcgtttcac

SEQ ID NO: 12832 - RNA, 91 nt, synthetic construct
  source 1..91: mol_type = other RNA
ggggtcccccgactctggctttcccccaggtatacatgttcctggtgaaatggcaggacctgtcggagaaggtggtctaccggcgcttcac

SEQ ID NO: 12833 - RNA, 91 nt, synthetic construct
  source 1..91: mol_type = other RNA
ggggtcccccgactctggctttcccccaggtatacatgttcctggtgaaatggcaggacctgtcggagaaggtggtctaccggcggttcac

SEQ ID NO: 12834 - RNA, 91 nt, synthetic construct
  source 1..91: mol_type = other RNA
ggggtcccccgactctggctttcccccaggtctacatgttcctggtgaaatggcaggacctgtcggagaaggtggtctaccggcgtttcac

SEQ ID NO: 12835 - RNA, 91 nt, synthetic construct
  source 1..91: mol_type = other RNA
ggggtcccccgactctggctttcccccaggtatacatgttcctggtgaaatggcaggacctgtcggagaaggtggtctaccggcgattcac

SEQ ID NO: 12836 - RNA, 91 nt, synthetic construct
  source 1..91: mol_type = other RNA
ggggtcccccgactctggctttcccccaggtatacatgttcctggtgaaatggcaggacctgtcggagaaggtggtctaccggaggttcac

SEQ ID NO: 12837 - RNA, 91 nt, synthetic construct
  source 1..91: mol_type = other RNA
ggggtcccccgactctggctttcccccaggtatacatgttcctggtgaaatggcaggacctgtcggagaaggtggtctaccggagattcac

SEQ ID NO: 12838 - RNA, 91 nt, synthetic construct
  source 1..91: mol_type = other RNA
ggggtcccccgactctggctttcccccaggtctacatgttcctggtgaaatggcaggacctgtcggagaaggtggtctaccggcggttcac

SEQ ID NO: 12839 - RNA, 91 nt, synthetic construct
  source 1..91: mol_type = other RNA
ggggtcccccgactctggctttcccccaggtgtacatgttcctggtgaaatggcaggacctgtcggagaaggtggtctaccggcgattcac

SEQ ID NO: 12840 - RNA, 91 nt, synthetic construct
  source 1..91: mol_type = other RNA
ggggtcccccgactctggctttcccccaggtctacatgttcctggtgaaatggcaggacctgtcggagaaggtggtctaccggagattcac

SEQ ID NO: 12841 - RNA, 91 nt, synthetic construct
  source 1..91: mol_type = other RNA
ggggtcccccgactctggctttcccccaggtgtacatgttcctggtgaaatggcaggacctgtcggagaaggtggtctaccggaggttcac

SEQ ID NO: 12842 - RNA, 91 nt, synthetic construct
  source 1..91: mol_type = other RNA
ggggtcccccgactctggctttcccccaggtgtacatgttcctggtgaaatggcaggacctgtcggagaaggtggtctaccggcggttcac

SEQ ID NO: 12843 - RNA, 91 nt, synthetic construct
  source 1..91: mol_type = other RNA
ggggtcccccgactctggctttcccccaggtgtacatgttcctggtgaaatggcaggacctgtcggagaaggtggtctaccggcgtttcac

SEQ ID NO: 12844 - RNA, 91 nt, synthetic construct
  source 1..91: mol_type = other RNA
ggggtcccccgactctggctttcccccaggtttacatgttcctggtgaaatggcaggacctgtcggagaaggtggtctaccggaggttcac

SEQ ID NO: 12845 - RNA, 91 nt, synthetic construct
  source 1..91: mol_type = other RNA
ggggtcccccgactctggctttcccccaggtttacatgttcctggtgaaatggcaggacctgtcggagaaggtggtctaccggcgattcac

SEQ ID NO: 12846 - RNA, 91 nt, synthetic construct
  source 1..91: mol_type = other RNA
ggggtcccccgactctggctttcccccaggtttacatgttcctggtgaaatggcaggacctgtcggagaaggtggtctaccggcgcttcac

SEQ ID NO: 12847 - RNA, 91 nt, synthetic construct
  source 1..91: mol_type = other RNA
ggggtcccccgactctggctttcccccaggtttacatgttcctggtgaaatggcaggacctgtcggagaaggtggtctaccggcggttcac

SEQ ID NO: 12848 - RNA, 91 nt, synthetic construct
  source 1..91: mol_type = other RNA
ggggtcccccgactctggctttcccccaggtttacatgttcctggtgaaatggcaggacctgtcggagaaggtggtctaccggcgtttcac

SEQ ID NO: 12849 - RNA, 92 nt, synthetic construct
  source 1..92: mol_type = other RNA
tggggtcccccgactctggctttcccccaggtctacatgttcctggtgaaatggcaggacctgtcggagaaggtggtctaccggaggttcac

SEQ ID NO: 12850 - RNA, 92 nt, synthetic construct
  source 1..92: mol_type = other RNA
tggggtcccccgactctggctttcccccaggtttacatgttcctggtgaaatggcaggacctgtcggagaaggtggtctaccggcgattcac

SEQ ID NO: 12851 - RNA, 92 nt, synthetic construct
  source 1..92: mol_type = other RNA
tggggtcccccgactctggctttcccccaggtctacatgttcctggtgaaatggcaggacctgtcggagaaggtggtctaccggcggttcac

SEQ ID NO: 12852 - RNA, 92 nt, synthetic construct
  source 1..92: mol_type = other RNA
tggggtcccccgactctggctttcccccaggtctacatgttcctggtgaaatggcaggacctgtcggagaaggtggtctaccggcgcttcac

SEQ ID NO: 12853 - RNA, 92 nt, synthetic construct
  source 1..92: mol_type = other RNA
tggggtcccccgactctggctttcccccaggtctacatgttcctggtgaaatggcaggacctgtcggagaaggtggtctaccggcgattcac

SEQ ID NO: 12854 - RNA, 92 nt, synthetic construct
  source 1..92: mol_type = other RNA
tggggtcccccgactctggctttcccccaggtctacatgttcctggtgaaatggcaggacctgtcggagaaggtggtctaccggcgtttcac

SEQ ID NO: 12855 - RNA, 92 nt, synthetic construct
  source 1..92: mol_type = other RNA
tggggtcccccgactctggctttcccccaggtctacatgttcctggtgaaatggcaggacctgtcggagaaggtggtctaccggagattcac

SEQ ID NO: 12856 - RNA, 92 nt, synthetic construct
  source 1..92: mol_type = other RNA
tggggtcccccgactctggctttcccccaggtgtacatgttcctggtgaaatggcaggacctgtcggagaaggtggtctaccggcgattcac

SEQ ID NO: 12857 - RNA, 92 nt, synthetic construct
  source 1..92: mol_type = other RNA
tggggtcccccgactctggctttcccccaggtatacatgttcctggtgaaatggcaggacctgtcggagaaggtggtctaccggcggttcac

SEQ ID NO: 12858 - RNA, 92 nt, synthetic construct
  source 1..92: mol_type = other RNA
tggggtcccccgactctggctttcccccaggtatacatgttcctggtgaaatggcaggacctgtcggagaaggtggtctaccggcgattcac

SEQ ID NO: 12859 - RNA, 92 nt, synthetic construct
  source 1..92: mol_type = other RNA
tggggtcccccgactctggctttcccccaggtatacatgttcctggtgaaatggcaggacctgtcggagaaggtggtctaccggaggttcac

SEQ ID NO: 12860 - RNA, 92 nt, synthetic construct
  source 1..92: mol_type = other RNA
tggggtcccccgactctggctttcccccaggtttacatgttcctggtgaaatggcaggacctgtcggagaaggtggtctaccggcgcttcac

SEQ ID NO: 12861 - RNA, 92 nt, synthetic construct
  source 1..92: mol_type = other RNA
tggggtcccccgactctggctttcccccaggtatacatgttcctggtgaaatggcaggacctgtcggagaaggtggtctaccggagattcac

SEQ ID NO: 12862 - RNA, 92 nt, synthetic construct
  source 1..92: mol_type = other RNA
tggggtcccccgactctggctttcccccaggtatacatgttcctggtgaaatggcaggacctgtcggagaaggtggtctaccggcgtttcac

SEQ ID NO: 12863 - RNA, 92 nt, synthetic construct
  source 1..92: mol_type = other RNA
tggggtcccccgactctggctttcccccaggtatacatgttcctggtgaaatggcaggacctgtcggagaaggtggtctaccggcgcttcac

SEQ ID NO: 12864 - RNA, 92 nt, synthetic construct
  source 1..92: mol_type = other RNA
tggggtcccccgactctggctttcccccaggtttacatgttcctggtgaaatggcaggacctgtcggagaaggtggtctaccggcgtttcac

SEQ ID NO: 12865 - RNA, 92 nt, synthetic construct
  source 1..92: mol_type = other RNA
tggggtcccccgactctggctttcccccaggtgtacatgttcctggtgaaatggcaggacctgtcggagaaggtggtctaccggcgcttcac

SEQ ID NO: 12866 - RNA, 92 nt, synthetic construct
  source 1..92: mol_type = other RNA
tggggtcccccgactctggctttcccccaggtgtacatgttcctggtgaaatggcaggacctgtcggagaaggtggtctaccggcggttcac

SEQ ID NO: 12867 - RNA, 92 nt, synthetic construct
  source 1..92: mol_type = other RNA
tggggtcccccgactctggctttcccccaggtgtacatgttcctggtgaaatggcaggacctgtcggagaaggtggtctaccggcgtttcac

SEQ ID NO: 12868 - RNA, 92 nt, synthetic construct
  source 1..92: mol_type = other RNA
tggggtcccccgactctggctttcccccaggtttacatgttcctggtgaaatggcaggacctgtcggagaaggtggtctaccggagattcac

SEQ ID NO: 12869 - RNA, 92 nt, synthetic construct
  source 1..92: mol_type = other RNA
tggggtcccccgactctggctttcccccaggtttacatgttcctggtgaaatggcaggacctgtcggagaaggtggtctaccggaggttcac

SEQ ID NO: 12870 - RNA, 92 nt, synthetic construct
  source 1..92: mol_type = other RNA
tggggtcccccgactctggctttcccccaggtgtacatgttcctggtgaaatggcaggacctgtcggagaaggtggtctaccggagattcac

SEQ ID NO: 12871 - RNA, 92 nt, synthetic construct
  source 1..92: mol_type = other RNA
tggggtcccccgactctggctttcccccaggtttacatgttcctggtgaaatggcaggacctgtcggagaaggtggtctaccggcggttcac

SEQ ID NO: 12872 - RNA, 92 nt, synthetic construct
  source 1..92: mol_type = other RNA
tggggtcccccgactctggctttcccccaggtgtacatgttcctggtgaaatggcaggacctgtcggagaaggtggtctaccggaggttcac

SEQ ID NO: 12873 - RNA, 93 nt, synthetic construct
  source 1..93: mol_type = other RNA
atggggtcccccgactctggctttcccccaggtgtacatgttcctggtgaaatggcaggacctgtcggagaaggtggtctaccggaggttcac

SEQ ID NO: 12874 - RNA, 93 nt, synthetic construct
  source 1..93: mol_type = other RNA
atggggtcccccgactctggctttcccccaggtatacatgttcctggtgaaatggcaggacctgtcggagaaggtggtctaccggagattcac

SEQ ID NO: 12875 - RNA, 93 nt, synthetic construct
  source 1..93: mol_type = other RNA
atggggtcccccgactctggctttcccccaggtatacatgttcctggtgaaatggcaggacctgtcggagaaggtggtctaccggcgattcac

SEQ ID NO: 12876 - RNA, 93 nt, synthetic construct
  source 1..93: mol_type = other RNA
atggggtcccccgactctggctttcccccaggtatacatgttcctggtgaaatggcaggacctgtcggagaaggtggtctaccggcgcttcac

SEQ ID NO: 12877 - RNA, 93 nt, synthetic construct
  source 1..93: mol_type = other RNA
atggggtcccccgactctggctttcccccaggtatacatgttcctggtgaaatggcaggacctgtcggagaaggtggtctaccggcggttcac

SEQ ID NO: 12878 - RNA, 93 nt, synthetic construct
  source 1..93: mol_type = other RNA
atggggtcccccgactctggctttcccccaggtatacatgttcctggtgaaatggcaggacctgtcggagaaggtggtctaccggcgtttcac

SEQ ID NO: 12879 - RNA, 93 nt, synthetic construct
  source 1..93: mol_type = other RNA
atggggtcccccgactctggctttcccccaggtgtacatgttcctggtgaaatggcaggacctgtcggagaaggtggtctaccggagattcac

SEQ ID NO: 12880 - RNA, 93 nt, synthetic construct
  source 1..93: mol_type = other RNA
atggggtcccccgactctggctttcccccaggtctacatgttcctggtgaaatggcaggacctgtcggagaaggtggtctaccggaggttcac

SEQ ID NO: 12881 - RNA, 93 nt, synthetic construct
  source 1..93: mol_type = other RNA
atggggtcccccgactctggctttcccccaggtgtacatgttcctggtgaaatggcaggacctgtcggagaaggtggtctaccggcgattcac

SEQ ID NO: 12882 - RNA, 93 nt, synthetic construct
  source 1..93: mol_type = other RNA
atggggtcccccgactctggctttcccccaggtctacatgttcctggtgaaatggcaggacctgtcggagaaggtggtctaccggcgattcac

SEQ ID NO: 12883 - RNA, 93 nt, synthetic construct
  source 1..93: mol_type = other RNA
atggggtcccccgactctggctttcccccaggtctacatgttcctggtgaaatggcaggacctgtcggagaaggtggtctaccggcgcttcac

SEQ ID NO: 12884 - RNA, 93 nt, synthetic construct
  source 1..93: mol_type = other RNA
atggggtcccccgactctggctttcccccaggtctacatgttcctggtgaaatggcaggacctgtcggagaaggtggtctaccggagattcac

SEQ ID NO: 12885 - RNA, 93 nt, synthetic construct
  source 1..93: mol_type = other RNA
atggggtcccccgactctggctttcccccaggtctacatgttcctggtgaaatggcaggacctgtcggagaaggtggtctaccggcgtttcac

SEQ ID NO: 12886 - RNA, 93 nt, synthetic construct
  source 1..93: mol_type = other RNA
atggggtcccccgactctggctttcccccaggtctacatgttcctggtgaaatggcaggacctgtcggagaaggtggtctaccggcggttcac

SEQ ID NO: 12887 - RNA, 93 nt, synthetic construct
  source 1..93: mol_type = other RNA
atggggtcccccgactctggctttcccccaggtttacatgttcctggtgaaatggcaggacctgtcggagaaggtggtctaccggagattcac

SEQ ID NO: 12888 - RNA, 93 nt, synthetic construct
  source 1..93: mol_type = other RNA
atggggtcccccgactctggctttcccccaggtttacatgttcctggtgaaatggcaggacctgtcggagaaggtggtctaccggcgtttcac

SEQ ID NO: 12889 - RNA, 93 nt, synthetic construct
  source 1..93: mol_type = other RNA
atggggtcccccgactctggctttcccccaggtgtacatgttcctggtgaaatggcaggacctgtcggagaaggtggtctaccggcgcttcac

SEQ ID NO: 12890 - RNA, 93 nt, synthetic construct
  source 1..93: mol_type = other RNA
atggggtcccccgactctggctttcccccaggtgtacatgttcctggtgaaatggcaggacctgtcggagaaggtggtctaccggcggttcac

SEQ ID NO: 12891 - RNA, 93 nt, synthetic construct
  source 1..93: mol_type = other RNA
atggggtcccccgactctggctttcccccaggtgtacatgttcctggtgaaatggcaggacctgtcggagaaggtggtctaccggcgtttcac

SEQ ID NO: 12892 - RNA, 93 nt, synthetic construct
  source 1..93: mol_type = other RNA
atggggtcccccgactctggctttcccccaggtttacatgttcctggtgaaatggcaggacctgtcggagaaggtggtctaccggaggttcac

SEQ ID NO: 12893 - RNA, 93 nt, synthetic construct
  source 1..93: mol_type = other RNA
atggggtcccccgactctggctttcccccaggtttacatgttcctggtgaaatggcaggacctgtcggagaaggtggtctaccggcgattcac

SEQ ID NO: 12894 - RNA, 93 nt, synthetic construct
  source 1..93: mol_type = other RNA
atggggtcccccgactctggctttcccccaggtttacatgttcctggtgaaatggcaggacctgtcggagaaggtggtctaccggcgcttcac

SEQ ID NO: 12895 - RNA, 93 nt, synthetic construct
  source 1..93: mol_type = other RNA
atggggtcccccgactctggctttcccccaggtatacatgttcctggtgaaatggcaggacctgtcggagaaggtggtctaccggaggttcac

SEQ ID NO: 12896 - RNA, 93 nt, synthetic construct
  source 1..93: mol_type = other RNA
atggggtcccccgactctggctttcccccaggtttacatgttcctggtgaaatggcaggacctgtcggagaaggtggtctaccggcggttcac

SEQ ID NO: 12897 - RNA, 94 nt, synthetic construct
  source 1..94: mol_type = other RNA
aatggggtcccccgactctggctttcccccaggtttacatgttcctggtgaaatggcaggacctgtcggagaaggtggtctaccggagattcac

SEQ ID NO: 12898 - RNA, 94 nt, synthetic construct
  source 1..94: mol_type = other RNA
aatggggtcccccgactctggctttcccccaggtttacatgttcctggtgaaatggcaggacctgtcggagaaggtggtctaccggaggttcac

SEQ ID NO: 12899 - RNA, 94 nt, synthetic construct
  source 1..94: mol_type = other RNA
aatggggtcccccgactctggctttcccccaggtttacatgttcctggtgaaatggcaggacctgtcggagaaggtggtctaccggcgattcac

SEQ ID NO: 12900 - RNA, 94 nt, synthetic construct
  source 1..94: mol_type = other RNA
aatggggtcccccgactctggctttcccccaggtttacatgttcctggtgaaatggcaggacctgtcggagaaggtggtctaccggcgcttcac

SEQ ID NO: 12901 - RNA, 94 nt, synthetic construct
  source 1..94: mol_type = other RNA
aatggggtcccccgactctggctttcccccaggtttacatgttcctggtgaaatggcaggacctgtcggagaaggtggtctaccggcggttcac

SEQ ID NO: 12902 - RNA, 94 nt, synthetic construct
  source 1..94: mol_type = other RNA
aatggggtcccccgactctggctttcccccaggtttacatgttcctggtgaaatggcaggacctgtcggagaaggtggtctaccggcgtttcac

SEQ ID NO: 12903 - RNA, 94 nt, synthetic construct
  source 1..94: mol_type = other RNA
aatggggtcccccgactctggctttcccccaggtatacatgttcctggtgaaatggcaggacctgtcggagaaggtggtctaccggaggttcac

SEQ ID NO: 12904 - RNA, 94 nt, synthetic construct
  source 1..94: mol_type = other RNA
aatggggtcccccgactctggctttcccccaggtgtacatgttcctggtgaaatggcaggacctgtcggagaaggtggtctaccggaggttcac

SEQ ID NO: 12905 - RNA, 94 nt, synthetic construct
  source 1..94: mol_type = other RNA
aatggggtcccccgactctggctttcccccaggtgtacatgttcctggtgaaatggcaggacctgtcggagaaggtggtctaccggcgtttcac

SEQ ID NO: 12906 - RNA, 94 nt, synthetic construct
  source 1..94: mol_type = other RNA
aatggggtcccccgactctggctttcccccaggtgtacatgttcctggtgaaatggcaggacctgtcggagaaggtggtctaccggcggttcac

SEQ ID NO: 12907 - RNA, 94 nt, synthetic construct
  source 1..94: mol_type = other RNA
aatggggtcccccgactctggctttcccccaggtatacatgttcctggtgaaatggcaggacctgtcggagaaggtggtctaccggagattcac

SEQ ID NO: 12908 - RNA, 94 nt, synthetic construct
  source 1..94: mol_type = other RNA
aatggggtcccccgactctggctttcccccaggtgtacatgttcctggtgaaatggcaggacctgtcggagaaggtggtctaccggcgcttcac

SEQ ID NO: 12909 - RNA, 94 nt, synthetic construct
  source 1..94: mol_type = other RNA
aatggggtcccccgactctggctttcccccaggtatacatgttcctggtgaaatggcaggacctgtcggagaaggtggtctaccggcggttcac

SEQ ID NO: 12910 - RNA, 94 nt, synthetic construct
  source 1..94: mol_type = other RNA
aatggggtcccccgactctggctttcccccaggtatacatgttcctggtgaaatggcaggacctgtcggagaaggtggtctaccggcgcttcac

SEQ ID NO: 12911 - RNA, 94 nt, synthetic construct
  source 1..94: mol_type = other RNA
aatggggtcccccgactctggctttcccccaggtgtacatgttcctggtgaaatggcaggacctgtcggagaaggtggtctaccggcgattcac

SEQ ID NO: 12912 - RNA, 94 nt, synthetic construct
  source 1..94: mol_type = other RNA
aatggggtcccccgactctggctttcccccaggtatacatgttcctggtgaaatggcaggacctgtcggagaaggtggtctaccggcgtttcac

SEQ ID NO: 12913 - RNA, 94 nt, synthetic construct
  source 1..94: mol_type = other RNA
aatggggtcccccgactctggctttcccccaggtctacatgttcctggtgaaatggcaggacctgtcggagaaggtggtctaccggagattcac

SEQ ID NO: 12914 - RNA, 94 nt, synthetic construct
  source 1..94: mol_type = other RNA
aatggggtcccccgactctggctttcccccaggtctacatgttcctggtgaaatggcaggacctgtcggagaaggtggtctaccggaggttcac

SEQ ID NO: 12915 - RNA, 94 nt, synthetic construct
  source 1..94: mol_type = other RNA
aatggggtcccccgactctggctttcccccaggtctacatgttcctggtgaaatggcaggacctgtcggagaaggtggtctaccggcgattcac

SEQ ID NO: 12916 - RNA, 94 nt, synthetic construct
  source 1..94: mol_type = other RNA
aatggggtcccccgactctggctttcccccaggtctacatgttcctggtgaaatggcaggacctgtcggagaaggtggtctaccggcgcttcac

SEQ ID NO: 12917 - RNA, 94 nt, synthetic construct
  source 1..94: mol_type = other RNA
aatggggtcccccgactctggctttcccccaggtctacatgttcctggtgaaatggcaggacctgtcggagaaggtggtctaccggcggttcac

SEQ ID NO: 12918 - RNA, 94 nt, synthetic construct
  source 1..94: mol_type = other RNA
aatggggtcccccgactctggctttcccccaggtctacatgttcctggtgaaatggcaggacctgtcggagaaggtggtctaccggcgtttcac

SEQ ID NO: 12919 - RNA, 94 nt, synthetic construct
  source 1..94: mol_type = other RNA
aatggggtcccccgactctggctttcccccaggtgtacatgttcctggtgaaatggcaggacctgtcggagaaggtggtctaccggagattcac

SEQ ID NO: 12920 - RNA, 94 nt, synthetic construct
  source 1..94: mol_type = other RNA
aatggggtcccccgactctggctttcccccaggtatacatgttcctggtgaaatggcaggacctgtcggagaaggtggtctaccggcgattcac

SEQ ID NO: 12921 - RNA, 95 nt, synthetic construct
  source 1..95: mol_type = other RNA
gaatggggtcccccgactctggctttcccccaggtatacatgttcctggtgaaatggcaggacctgtcggagaaggtggtctaccggaggttcac

SEQ ID NO: 12922 - RNA, 95 nt, synthetic construct
  source 1..95: mol_type = other RNA
gaatggggtcccccgactctggctttcccccaggtttacatgttcctggtgaaatggcaggacctgtcggagaaggtggtctaccggcgattcac

SEQ ID NO: 12923 - RNA, 95 nt, synthetic construct
  source 1..95: mol_type = other RNA
gaatggggtcccccgactctggctttcccccaggtttacatgttcctggtgaaatggcaggacctgtcggagaaggtggtctaccggagattcac

SEQ ID NO: 12924 - RNA, 95 nt, synthetic construct
  source 1..95: mol_type = other RNA
gaatggggtcccccgactctggctttcccccaggtttacatgttcctggtgaaatggcaggacctgtcggagaaggtggtctaccggcggttcac

SEQ ID NO: 12925 - RNA, 95 nt, synthetic construct
  source 1..95: mol_type = other RNA
gaatggggtcccccgactctggctttcccccaggtttacatgttcctggtgaaatggcaggacctgtcggagaaggtggtctaccggcgcttcac

SEQ ID NO: 12926 - RNA, 95 nt, synthetic construct
  source 1..95: mol_type = other RNA
gaatggggtcccccgactctggctttcccccaggtttacatgttcctggtgaaatggcaggacctgtcggagaaggtggtctaccggaggttcac

SEQ ID NO: 12927 - RNA, 95 nt, synthetic construct
  source 1..95: mol_type = other RNA
gaatggggtcccccgactctggctttcccccaggtgtacatgttcctggtgaaatggcaggacctgtcggagaaggtggtctaccggcggttcac

SEQ ID NO: 12928 - RNA, 95 nt, synthetic construct
  source 1..95: mol_type = other RNA
gaatggggtcccccgactctggctttcccccaggtgtacatgttcctggtgaaatggcaggacctgtcggagaaggtggtctaccggcgcttcac

SEQ ID NO: 12929 - RNA, 95 nt, synthetic construct
  source 1..95: mol_type = other RNA
gaatggggtcccccgactctggctttcccccaggtgtacatgttcctggtgaaatggcaggacctgtcggagaaggtggtctaccggcgattcac

SEQ ID NO: 12930 - RNA, 95 nt, synthetic construct
  source 1..95: mol_type = other RNA
gaatggggtcccccgactctggctttcccccaggtgtacatgttcctggtgaaatggcaggacctgtcggagaaggtggtctaccggaggttcac

SEQ ID NO: 12931 - RNA, 95 nt, synthetic construct
  source 1..95: mol_type = other RNA
gaatggggtcccccgactctggctttcccccaggtgtacatgttcctggtgaaatggcaggacctgtcggagaaggtggtctaccggagattcac

SEQ ID NO: 12932 - RNA, 95 nt, synthetic construct
  source 1..95: mol_type = other RNA
gaatggggtcccccgactctggctttcccccaggtttacatgttcctggtgaaatggcaggacctgtcggagaaggtggtctaccggcgtttcac

SEQ ID NO: 12933 - RNA, 95 nt, synthetic construct
  source 1..95: mol_type = other RNA
gaatggggtcccccgactctggctttcccccaggtctacatgttcctggtgaaatggcaggacctgtcggagaaggtggtctaccggcgcttcac

SEQ ID NO: 12934 - RNA, 95 nt, synthetic construct
  source 1..95: mol_type = other RNA
gaatggggtcccccgactctggctttcccccaggtctacatgttcctggtgaaatggcaggacctgtcggagaaggtggtctaccggcggttcac

SEQ ID NO: 12935 - RNA, 95 nt, synthetic construct
  source 1..95: mol_type = other RNA
gaatggggtcccccgactctggctttcccccaggtctacatgttcctggtgaaatggcaggacctgtcggagaaggtggtctaccggcgtttcac

SEQ ID NO: 12936 - RNA, 95 nt, synthetic construct
  source 1..95: mol_type = other RNA
gaatggggtcccccgactctggctttcccccaggtatacatgttcctggtgaaatggcaggacctgtcggagaaggtggtctaccggagattcac

SEQ ID NO: 12937 - RNA, 95 nt, synthetic construct
  source 1..95: mol_type = other RNA
gaatggggtcccccgactctggctttcccccaggtatacatgttcctggtgaaatggcaggacctgtcggagaaggtggtctaccggcgattcac

SEQ ID NO: 12938 - RNA, 95 nt, synthetic construct
  source 1..95: mol_type = other RNA
gaatggggtcccccgactctggctttcccccaggtatacatgttcctggtgaaatggcaggacctgtcggagaaggtggtctaccggcggttcac

SEQ ID NO: 12939 - RNA, 95 nt, synthetic construct
  source 1..95: mol_type = other RNA
gaatggggtcccccgactctggctttcccccaggtatacatgttcctggtgaaatggcaggacctgtcggagaaggtggtctaccggcgcttcac

SEQ ID NO: 12940 - RNA, 95 nt, synthetic construct
  source 1..95: mol_type = other RNA
gaatggggtcccccgactctggctttcccccaggtgtacatgttcctggtgaaatggcaggacctgtcggagaaggtggtctaccggcgtttcac

SEQ ID NO: 12941 - RNA, 95 nt, synthetic construct
  source 1..95: mol_type = other RNA
gaatggggtcccccgactctggctttcccccaggtctacatgttcctggtgaaatggcaggacctgtcggagaaggtggtctaccggagattcac

SEQ ID NO: 12942 - RNA, 95 nt, synthetic construct
  source 1..95: mol_type = other RNA
gaatggggtcccccgactctggctttcccccaggtctacatgttcctggtgaaatggcaggacctgtcggagaaggtggtctaccggaggttcac

SEQ ID NO: 12943 - RNA, 95 nt, synthetic construct
  source 1..95: mol_type = other RNA
gaatggggtcccccgactctggctttcccccaggtctacatgttcctggtgaaatggcaggacctgtcggagaaggtggtctaccggcgattcac

SEQ ID NO: 12944 - RNA, 95 nt, synthetic construct
  source 1..95: mol_type = other RNA
gaatggggtcccccgactctggctttcccccaggtatacatgttcctggtgaaatggcaggacctgtcggagaaggtggtctaccggcgtttcac

SEQ ID NO: 12945 - RNA, 96 nt, synthetic construct
  source 1..96: mol_type = other RNA
tgaatggggtcccccgactctggctttcccccaggtctacatgttcctggtgaaatggcaggacctgtcggagaaggtggtctaccggaggttcac

SEQ ID NO: 12946 - RNA, 96 nt, synthetic construct
  source 1..96: mol_type = other RNA
tgaatggggtcccccgactctggctttcccccaggtttacatgttcctggtgaaatggcaggacctgtcggagaaggtggtctaccggcgcttcac

SEQ ID NO: 12947 - RNA, 96 nt, synthetic construct
  source 1..96: mol_type = other RNA
tgaatggggtcccccgactctggctttcccccaggtttacatgttcctggtgaaatggcaggacctgtcggagaaggtggtctaccggaggttcac

SEQ ID NO: 12948 - RNA, 96 nt, synthetic construct
  source 1..96: mol_type = other RNA
tgaatggggtcccccgactctggctttcccccaggtctacatgttcctggtgaaatggcaggacctgtcggagaaggtggtctaccggcggttcac

SEQ ID NO: 12949 - RNA, 96 nt, synthetic construct
  source 1..96: mol_type = other RNA
tgaatggggtcccccgactctggctttcccccaggtctacatgttcctggtgaaatggcaggacctgtcggagaaggtggtctaccggcgcttcac

SEQ ID NO: 12950 - RNA, 96 nt, synthetic construct
  source 1..96: mol_type = other RNA
tgaatggggtcccccgactctggctttcccccaggtctacatgttcctggtgaaatggcaggacctgtcggagaaggtggtctaccggcgattcac

SEQ ID NO: 12951 - RNA, 96 nt, synthetic construct
  source 1..96: mol_type = other RNA
tgaatggggtcccccgactctggctttcccccaggtctacatgttcctggtgaaatggcaggacctgtcggagaaggtggtctaccggagattcac

SEQ ID NO: 12952 - RNA, 96 nt, synthetic construct
  source 1..96: mol_type = other RNA
tgaatggggtcccccgactctggctttcccccaggtatacatgttcctggtgaaatggcaggacctgtcggagaaggtggtctaccggaggttcac

SEQ ID NO: 12953 - RNA, 96 nt, synthetic construct
  source 1..96: mol_type = other RNA
tgaatggggtcccccgactctggctttcccccaggtatacatgttcctggtgaaatggcaggacctgtcggagaaggtggtctaccggcggttcac

SEQ ID NO: 12954 - RNA, 96 nt, synthetic construct
  source 1..96: mol_type = other RNA
tgaatggggtcccccgactctggctttcccccaggtatacatgttcctggtgaaatggcaggacctgtcggagaaggtggtctaccggcgcttcac

SEQ ID NO: 12955 - RNA, 96 nt, synthetic construct
  source 1..96: mol_type = other RNA
tgaatggggtcccccgactctggctttcccccaggtatacatgttcctggtgaaatggcaggacctgtcggagaaggtggtctaccggcgattcac

SEQ ID NO: 12956 - RNA, 96 nt, synthetic construct
  source 1..96: mol_type = other RNA
tgaatggggtcccccgactctggctttcccccaggtatacatgttcctggtgaaatggcaggacctgtcggagaaggtggtctaccggagattcac

SEQ ID NO: 12957 - RNA, 96 nt, synthetic construct
  source 1..96: mol_type = other RNA
tgaatggggtcccccgactctggctttcccccaggtgtacatgttcctggtgaaatggcaggacctgtcggagaaggtggtctaccggagattcac

SEQ ID NO: 12958 - RNA, 96 nt, synthetic construct
  source 1..96: mol_type = other RNA
tgaatggggtcccccgactctggctttcccccaggtatacatgttcctggtgaaatggcaggacctgtcggagaaggtggtctaccggcgtttcac

SEQ ID NO: 12959 - RNA, 96 nt, synthetic construct
  source 1..96: mol_type = other RNA
tgaatggggtcccccgactctggctttcccccaggtgtacatgttcctggtgaaatggcaggacctgtcggagaaggtggtctaccggaggttcac

SEQ ID NO: 12960 - RNA, 96 nt, synthetic construct
  source 1..96: mol_type = other RNA
tgaatggggtcccccgactctggctttcccccaggtgtacatgttcctggtgaaatggcaggacctgtcggagaaggtggtctaccggcgattcac

SEQ ID NO: 12961 - RNA, 96 nt, synthetic construct
  source 1..96: mol_type = other RNA
tgaatggggtcccccgactctggctttcccccaggtgtacatgttcctggtgaaatggcaggacctgtcggagaaggtggtctaccggcggttcac

SEQ ID NO: 12962 - RNA, 96 nt, synthetic construct
  source 1..96: mol_type = other RNA
tgaatggggtcccccgactctggctttcccccaggtgtacatgttcctggtgaaatggcaggacctgtcggagaaggtggtctaccggcgcttcac

SEQ ID NO: 12963 - RNA, 96 nt, synthetic construct
  source 1..96: mol_type = other RNA
tgaatggggtcccccgactctggctttcccccaggtttacatgttcctggtgaaatggcaggacctgtcggagaaggtggtctaccggcgtttcac

SEQ ID NO: 12964 - RNA, 96 nt, synthetic construct
  source 1..96: mol_type = other RNA
tgaatggggtcccccgactctggctttcccccaggtttacatgttcctggtgaaatggcaggacctgtcggagaaggtggtctaccggcggttcac

SEQ ID NO: 12965 - RNA, 96 nt, synthetic construct
  source 1..96: mol_type = other RNA
tgaatggggtcccccgactctggctttcccccaggtgtacatgttcctggtgaaatggcaggacctgtcggagaaggtggtctaccggcgtttcac

SEQ ID NO: 12966 - RNA, 96 nt, synthetic construct
  source 1..96: mol_type = other RNA
tgaatggggtcccccgactctggctttcccccaggtttacatgttcctggtgaaatggcaggacctgtcggagaaggtggtctaccggcgattcac

SEQ ID NO: 12967 - RNA, 96 nt, synthetic construct
  source 1..96: mol_type = other RNA
tgaatggggtcccccgactctggctttcccccaggtttacatgttcctggtgaaatggcaggacctgtcggagaaggtggtctaccggagattcac

SEQ ID NO: 12968 - RNA, 96 nt, synthetic construct
  source 1..96: mol_type = other RNA
tgaatggggtcccccgactctggctttcccccaggtctacatgttcctggtgaaatggcaggacctgtcggagaaggtggtctaccggcgtttcac

SEQ ID NO: 12969 - RNA, 97 nt, synthetic construct
  source 1..97: mol_type = other RNA
ctgaatggggtcccccgactctggctttcccccaggtgtacatgttcctggtgaaatggcaggacctgtcggagaaggtggtctaccggcgattcac

SEQ ID NO: 12970 - RNA, 97 nt, synthetic construct
  source 1..97: mol_type = other RNA
ctgaatggggtcccccgactctggctttcccccaggtgtacatgttcctggtgaaatggcaggacctgtcggagaaggtggtctaccggaggttcac

SEQ ID NO: 12971 - RNA, 97 nt, synthetic construct
  source 1..97: mol_type = other RNA
ctgaatggggtcccccgactctggctttcccccaggtttacatgttcctggtgaaatggcaggacctgtcggagaaggtggtctaccggcggttcac

SEQ ID NO: 12972 - RNA, 97 nt, synthetic construct
  source 1..97: mol_type = other RNA
ctgaatggggtcccccgactctggctttcccccaggtctacatgttcctggtgaaatggcaggacctgtcggagaaggtggtctaccggcgtttcac

SEQ ID NO: 12973 - RNA, 97 nt, synthetic construct
  source 1..97: mol_type = other RNA
ctgaatggggtcccccgactctggctttcccccaggtctacatgttcctggtgaaatggcaggacctgtcggagaaggtggtctaccggaggttcac

SEQ ID NO: 12974 - RNA, 97 nt, synthetic construct
  source 1..97: mol_type = other RNA
ctgaatggggtcccccgactctggctttcccccaggtatacatgttcctggtgaaatggcaggacctgtcggagaaggtggtctaccggaggttcac

SEQ ID NO: 12975 - RNA, 97 nt, synthetic construct
  source 1..97: mol_type = other RNA
ctgaatggggtcccccgactctggctttcccccaggtctacatgttcctggtgaaatggcaggacctgtcggagaaggtggtctaccggagattcac

SEQ ID NO: 12976 - RNA, 97 nt, synthetic construct
  source 1..97: mol_type = other RNA
ctgaatggggtcccccgactctggctttcccccaggtatacatgttcctggtgaaatggcaggacctgtcggagaaggtggtctaccggcgtttcac

SEQ ID NO: 12977 - RNA, 97 nt, synthetic construct
  source 1..97: mol_type = other RNA
ctgaatggggtcccccgactctggctttcccccaggtatacatgttcctggtgaaatggcaggacctgtcggagaaggtggtctaccggcggttcac

SEQ ID NO: 12978 - RNA, 97 nt, synthetic construct
  source 1..97: mol_type = other RNA
ctgaatggggtcccccgactctggctttcccccaggtatacatgttcctggtgaaatggcaggacctgtcggagaaggtggtctaccggcgcttcac

SEQ ID NO: 12979 - RNA, 97 nt, synthetic construct
  source 1..97: mol_type = other RNA
ctgaatggggtcccccgactctggctttcccccaggtatacatgttcctggtgaaatggcaggacctgtcggagaaggtggtctaccggcgattcac

SEQ ID NO: 12980 - RNA, 97 nt, synthetic construct
  source 1..97: mol_type = other RNA
ctgaatggggtcccccgactctggctttcccccaggtctacatgttcctggtgaaatggcaggacctgtcggagaaggtggtctaccggcgattcac

SEQ ID NO: 12981 - RNA, 97 nt, synthetic construct
  source 1..97: mol_type = other RNA
ctgaatggggtcccccgactctggctttcccccaggtatacatgttcctggtgaaatggcaggacctgtcggagaaggtggtctaccggagattcac

SEQ ID NO: 12982 - RNA, 97 nt, synthetic construct
  source 1..97: mol_type = other RNA
ctgaatggggtcccccgactctggctttcccccaggtgtacatgttcctggtgaaatggcaggacctgtcggagaaggtggtctaccggcgcttcac

SEQ ID NO: 12983 - RNA, 97 nt, synthetic construct
  source 1..97: mol_type = other RNA
ctgaatggggtcccccgactctggctttcccccaggtctacatgttcctggtgaaatggcaggacctgtcggagaaggtggtctaccggcggttcac

SEQ ID NO: 12984 - RNA, 97 nt, synthetic construct
  source 1..97: mol_type = other RNA
ctgaatggggtcccccgactctggctttcccccaggtttacatgttcctggtgaaatggcaggacctgtcggagaaggtggtctaccggcgtttcac

SEQ ID NO: 12985 - RNA, 97 nt, synthetic construct
  source 1..97: mol_type = other RNA
ctgaatggggtcccccgactctggctttcccccaggtgtacatgttcctggtgaaatggcaggacctgtcggagaaggtggtctaccggcggttcac

SEQ ID NO: 12986 - RNA, 97 nt, synthetic construct
  source 1..97: mol_type = other RNA
ctgaatggggtcccccgactctggctttcccccaggtgtacatgttcctggtgaaatggcaggacctgtcggagaaggtggtctaccggcgtttcac

SEQ ID NO: 12987 - RNA, 97 nt, synthetic construct
  source 1..97: mol_type = other RNA
ctgaatggggtcccccgactctggctttcccccaggtttacatgttcctggtgaaatggcaggacctgtcggagaaggtggtctaccggagattcac

SEQ ID NO: 12988 - RNA, 97 nt, synthetic construct
  source 1..97: mol_type = other RNA
ctgaatggggtcccccgactctggctttcccccaggtctacatgttcctggtgaaatggcaggacctgtcggagaaggtggtctaccggcgcttcac

SEQ ID NO: 12989 - RNA, 97 nt, synthetic construct
  source 1..97: mol_type = other RNA
ctgaatggggtcccccgactctggctttcccccaggtgtacatgttcctggtgaaatggcaggacctgtcggagaaggtggtctaccggagattcac

SEQ ID NO: 12990 - RNA, 97 nt, synthetic construct
  source 1..97: mol_type = other RNA
ctgaatggggtcccccgactctggctttcccccaggtttacatgttcctggtgaaatggcaggacctgtcggagaaggtggtctaccggcgcttcac

SEQ ID NO: 12991 - RNA, 97 nt, synthetic construct
  source 1..97: mol_type = other RNA
ctgaatggggtcccccgactctggctttcccccaggtttacatgttcctggtgaaatggcaggacctgtcggagaaggtggtctaccggcgattcac

SEQ ID NO: 12992 - RNA, 97 nt, synthetic construct
  source 1..97: mol_type = other RNA
ctgaatggggtcccccgactctggctttcccccaggtttacatgttcctggtgaaatggcaggacctgtcggagaaggtggtctaccggaggttcac

SEQ ID NO: 12993 - RNA, 98 nt, synthetic construct
  source 1..98: mol_type = other RNA
gctgaatggggtcccccgactctggctttcccccaggtctacatgttcctggtgaaatggcaggacctgtcggagaaggtggtctaccggcgtttcac

SEQ ID NO: 12994 - RNA, 98 nt, synthetic construct
  source 1..98: mol_type = other RNA
gctgaatggggtcccccgactctggctttcccccaggtctacatgttcctggtgaaatggcaggacctgtcggagaaggtggtctaccggcggttcac

SEQ ID NO: 12995 - RNA, 98 nt, synthetic construct
  source 1..98: mol_type = other RNA
gctgaatggggtcccccgactctggctttcccccaggtctacatgttcctggtgaaatggcaggacctgtcggagaaggtggtctaccggcgcttcac

SEQ ID NO: 12996 - RNA, 98 nt, synthetic construct
  source 1..98: mol_type = other RNA
gctgaatggggtcccccgactctggctttcccccaggtctacatgttcctggtgaaatggcaggacctgtcggagaaggtggtctaccggcgattcac

SEQ ID NO: 12997 - RNA, 98 nt, synthetic construct
  source 1..98: mol_type = other RNA
gctgaatggggtcccccgactctggctttcccccaggtctacatgttcctggtgaaatggcaggacctgtcggagaaggtggtctaccggaggttcac

SEQ ID NO: 12998 - RNA, 98 nt, synthetic construct
  source 1..98: mol_type = other RNA
gctgaatggggtcccccgactctggctttcccccaggtgtacatgttcctggtgaaatggcaggacctgtcggagaaggtggtctaccggcgtttcac

SEQ ID NO: 12999 - RNA, 98 nt, synthetic construct
  source 1..98: mol_type = other RNA
gctgaatggggtcccccgactctggctttcccccaggtgtacatgttcctggtgaaatggcaggacctgtcggagaaggtggtctaccggaggttcac

SEQ ID NO: 13000 - RNA, 98 nt, synthetic construct
  source 1..98: mol_type = other RNA
gctgaatggggtcccccgactctggctttcccccaggtgtacatgttcctggtgaaatggcaggacctgtcggagaaggtggtctaccggagattcac

SEQ ID NO: 13001 - RNA, 98 nt, synthetic construct
  source 1..98: mol_type = other RNA
gctgaatggggtcccccgactctggctttcccccaggtgtacatgttcctggtgaaatggcaggacctgtcggagaaggtggtctaccggcggttcac

SEQ ID NO: 13002 - RNA, 98 nt, synthetic construct
  source 1..98: mol_type = other RNA
gctgaatggggtcccccgactctggctttcccccaggtgtacatgttcctggtgaaatggcaggacctgtcggagaaggtggtctaccggcgcttcac

SEQ ID NO: 13003 - RNA, 98 nt, synthetic construct
  source 1..98: mol_type = other RNA
gctgaatggggtcccccgactctggctttcccccaggtatacatgttcctggtgaaatggcaggacctgtcggagaaggtggtctaccggcgattcac

SEQ ID NO: 13004 - RNA, 98 nt, synthetic construct
  source 1..98: mol_type = other RNA
gctgaatggggtcccccgactctggctttcccccaggtctacatgttcctggtgaaatggcaggacctgtcggagaaggtggtctaccggagattcac

SEQ ID NO: 13005 - RNA, 98 nt, synthetic construct
  source 1..98: mol_type = other RNA
gctgaatggggtcccccgactctggctttcccccaggtatacatgttcctggtgaaatggcaggacctgtcggagaaggtggtctaccggcggttcac

SEQ ID NO: 13006 - RNA, 98 nt, synthetic construct
  source 1..98: mol_type = other RNA
gctgaatggggtcccccgactctggctttcccccaggtatacatgttcctggtgaaatggcaggacctgtcggagaaggtggtctaccggcgcttcac

SEQ ID NO: 13007 - RNA, 98 nt, synthetic construct
  source 1..98: mol_type = other RNA
gctgaatggggtcccccgactctggctttcccccaggtatacatgttcctggtgaaatggcaggacctgtcggagaaggtggtctaccggagattcac

SEQ ID NO: 13008 - RNA, 98 nt, synthetic construct
  source 1..98: mol_type = other RNA
gctgaatggggtcccccgactctggctttcccccaggtatacatgttcctggtgaaatggcaggacctgtcggagaaggtggtctaccggaggttcac

SEQ ID NO: 13009 - RNA, 98 nt, synthetic construct
  source 1..98: mol_type = other RNA
gctgaatggggtcccccgactctggctttcccccaggtttacatgttcctggtgaaatggcaggacctgtcggagaaggtggtctaccggcgattcac

SEQ ID NO: 13010 - RNA, 98 nt, synthetic construct
  source 1..98: mol_type = other RNA
gctgaatggggtcccccgactctggctttcccccaggtttacatgttcctggtgaaatggcaggacctgtcggagaaggtggtctaccggcgtttcac

SEQ ID NO: 13011 - RNA, 98 nt, synthetic construct
  source 1..98: mol_type = other RNA
gctgaatggggtcccccgactctggctttcccccaggtttacatgttcctggtgaaatggcaggacctgtcggagaaggtggtctaccggcggttcac

SEQ ID NO: 13012 - RNA, 98 nt, synthetic construct
  source 1..98: mol_type = other RNA
gctgaatggggtcccccgactctggctttcccccaggtttacatgttcctggtgaaatggcaggacctgtcggagaaggtggtctaccggcgcttcac

SEQ ID NO: 13013 - RNA, 98 nt, synthetic construct
  source 1..98: mol_type = other RNA
gctgaatggggtcccccgactctggctttcccccaggtttacatgttcctggtgaaatggcaggacctgtcggagaaggtggtctaccggaggttcac

SEQ ID NO: 13014 - RNA, 98 nt, synthetic construct
  source 1..98: mol_type = other RNA
gctgaatggggtcccccgactctggctttcccccaggtatacatgttcctggtgaaatggcaggacctgtcggagaaggtggtctaccggcgtttcac

SEQ ID NO: 13015 - RNA, 98 nt, synthetic construct
  source 1..98: mol_type = other RNA
gctgaatggggtcccccgactctggctttcccccaggtttacatgttcctggtgaaatggcaggacctgtcggagaaggtggtctaccggagattcac

SEQ ID NO: 13016 - RNA, 98 nt, synthetic construct
  source 1..98: mol_type = other RNA
gctgaatggggtcccccgactctggctttcccccaggtgtacatgttcctggtgaaatggcaggacctgtcggagaaggtggtctaccggcgattcac

SEQ ID NO: 13017 - RNA, 99 nt, synthetic construct
  source 1..99: mol_type = other RNA
ggctgaatggggtcccccgactctggctttcccccaggtgtacatgttcctggtgaaatggcaggacctgtcggagaaggtggtctaccggcgcttcac

SEQ ID NO: 13018 - RNA, 99 nt, synthetic construct
  source 1..99: mol_type = other RNA
ggctgaatggggtcccccgactctggctttcccccaggtctacatgttcctggtgaaatggcaggacctgtcggagaaggtggtctaccggagattcac

SEQ ID NO: 13019 - RNA, 99 nt, synthetic construct
  source 1..99: mol_type = other RNA
ggctgaatggggtcccccgactctggctttcccccaggtttacatgttcctggtgaaatggcaggacctgtcggagaaggtggtctaccggcgcttcac

SEQ ID NO: 13020 - RNA, 99 nt, synthetic construct
  source 1..99: mol_type = other RNA
ggctgaatggggtcccccgactctggctttcccccaggtctacatgttcctggtgaaatggcaggacctgtcggagaaggtggtctaccggcgtttcac

SEQ ID NO: 13021 - RNA, 99 nt, synthetic construct
  source 1..99: mol_type = other RNA
ggctgaatggggtcccccgactctggctttcccccaggtttacatgttcctggtgaaatggcaggacctgtcggagaaggtggtctaccggcgattcac

SEQ ID NO: 13022 - RNA, 99 nt, synthetic construct
  source 1..99: mol_type = other RNA
ggctgaatggggtcccccgactctggctttcccccaggtgtacatgttcctggtgaaatggcaggacctgtcggagaaggtggtctaccggaggttcac

SEQ ID NO: 13023 - RNA, 99 nt, synthetic construct
  source 1..99: mol_type = other RNA
ggctgaatggggtcccccgactctggctttcccccaggtttacatgttcctggtgaaatggcaggacctgtcggagaaggtggtctaccggcggttcac

SEQ ID NO: 13024 - RNA, 99 nt, synthetic construct
  source 1..99: mol_type = other RNA
ggctgaatggggtcccccgactctggctttcccccaggtttacatgttcctggtgaaatggcaggacctgtcggagaaggtggtctaccggcgtttcac

SEQ ID NO: 13025 - RNA, 99 nt, synthetic construct
  source 1..99: mol_type = other RNA
ggctgaatggggtcccccgactctggctttcccccaggtatacatgttcctggtgaaatggcaggacctgtcggagaaggtggtctaccggaggttcac

SEQ ID NO: 13026 - RNA, 99 nt, synthetic construct
  source 1..99: mol_type = other RNA
ggctgaatggggtcccccgactctggctttcccccaggtgtacatgttcctggtgaaatggcaggacctgtcggagaaggtggtctaccggcggttcac

SEQ ID NO: 13027 - RNA, 99 nt, synthetic construct
  source 1..99: mol_type = other RNA
ggctgaatggggtcccccgactctggctttcccccaggtgtacatgttcctggtgaaatggcaggacctgtcggagaaggtggtctaccggagattcac

SEQ ID NO: 13028 - RNA, 99 nt, synthetic construct
  source 1..99: mol_type = other RNA
ggctgaatggggtcccccgactctggctttcccccaggtgtacatgttcctggtgaaatggcaggacctgtcggagaaggtggtctaccggcgtttcac

SEQ ID NO: 13029 - RNA, 99 nt, synthetic construct
  source 1..99: mol_type = other RNA
ggctgaatggggtcccccgactctggctttcccccaggtatacatgttcctggtgaaatggcaggacctgtcggagaaggtggtctaccggcggttcac

SEQ ID NO: 13030 - RNA, 99 nt, synthetic construct
  source 1..99: mol_type = other RNA
ggctgaatggggtcccccgactctggctttcccccaggtttacatgttcctggtgaaatggcaggacctgtcggagaaggtggtctaccggaggttcac

SEQ ID NO: 13031 - RNA, 99 nt, synthetic construct
  source 1..99: mol_type = other RNA
ggctgaatggggtcccccgactctggctttcccccaggtatacatgttcctggtgaaatggcaggacctgtcggagaaggtggtctaccggagattcac

SEQ ID NO: 13032 - RNA, 99 nt, synthetic construct
  source 1..99: mol_type = other RNA
ggctgaatggggtcccccgactctggctttcccccaggtatacatgttcctggtgaaatggcaggacctgtcggagaaggtggtctaccggcgattcac

SEQ ID NO: 13033 - RNA, 99 nt, synthetic construct
  source 1..99: mol_type = other RNA
ggctgaatggggtcccccgactctggctttcccccaggtatacatgttcctggtgaaatggcaggacctgtcggagaaggtggtctaccggcgcttcac

SEQ ID NO: 13034 - RNA, 99 nt, synthetic construct
  source 1..99: mol_type = other RNA
ggctgaatggggtcccccgactctggctttcccccaggtttacatgttcctggtgaaatggcaggacctgtcggagaaggtggtctaccggagattcac

SEQ ID NO: 13035 - RNA, 99 nt, synthetic construct
  source 1..99: mol_type = other RNA
ggctgaatggggtcccccgactctggctttcccccaggtatacatgttcctggtgaaatggcaggacctgtcggagaaggtggtctaccggcgtttcac

SEQ ID NO: 13036 - RNA, 99 nt, synthetic construct
  source 1..99: mol_type = other RNA
ggctgaatggggtcccccgactctggctttcccccaggtctacatgttcctggtgaaatggcaggacctgtcggagaaggtggtctaccggaggttcac

SEQ ID NO: 13037 - RNA, 99 nt, synthetic construct
  source 1..99: mol_type = other RNA
ggctgaatggggtcccccgactctggctttcccccaggtctacatgttcctggtgaaatggcaggacctgtcggagaaggtggtctaccggcgattcac

SEQ ID NO: 13038 - RNA, 99 nt, synthetic construct
  source 1..99: mol_type = other RNA
ggctgaatggggtcccccgactctggctttcccccaggtctacatgttcctggtgaaatggcaggacctgtcggagaaggtggtctaccggcgcttcac

SEQ ID NO: 13039 - RNA, 99 nt, synthetic construct
  source 1..99: mol_type = other RNA
ggctgaatggggtcccccgactctggctttcccccaggtctacatgttcctggtgaaatggcaggacctgtcggagaaggtggtctaccggcggttcac

SEQ ID NO: 13040 - RNA, 99 nt, synthetic construct
  source 1..99: mol_type = other RNA
ggctgaatggggtcccccgactctggctttcccccaggtgtacatgttcctggtgaaatggcaggacctgtcggagaaggtggtctaccggcgattcac

SEQ ID NO: 13041 - RNA, 100 nt, synthetic construct
  source 1..100: mol_type = other RNA
aggctgaatggggtcccccgactctggctttcccccaggtctacatgttcctggtgaaatggcaggacctgtcggagaaggtggtctaccggcgattcac

SEQ ID NO: 13042 - RNA, 100 nt, synthetic construct
  source 1..100: mol_type = other RNA
aggctgaatggggtcccccgactctggctttcccccaggtatacatgttcctggtgaaatggcaggacctgtcggagaaggtggtctaccggcgcttcac

SEQ ID NO: 13043 - RNA, 100 nt, synthetic construct
  source 1..100: mol_type = other RNA
aggctgaatggggtcccccgactctggctttcccccaggtatacatgttcctggtgaaatggcaggacctgtcggagaaggtggtctaccggcggttcac

SEQ ID NO: 13044 - RNA, 100 nt, synthetic construct
  source 1..100: mol_type = other RNA
aggctgaatggggtcccccgactctggctttcccccaggtatacatgttcctggtgaaatggcaggacctgtcggagaaggtggtctaccggcgtttcac

SEQ ID NO: 13045 - RNA, 100 nt, synthetic construct
  source 1..100: mol_type = other RNA
aggctgaatggggtcccccgactctggctttcccccaggtctacatgttcctggtgaaatggcaggacctgtcggagaaggtggtctaccggagattcac

SEQ ID NO: 13046 - RNA, 100 nt, synthetic construct
  source 1..100: mol_type = other RNA
aggctgaatggggtcccccgactctggctttcccccaggtctacatgttcctggtgaaatggcaggacctgtcggagaaggtggtctaccggaggttcac

SEQ ID NO: 13047 - RNA, 100 nt, synthetic construct
  source 1..100: mol_type = other RNA
aggctgaatggggtcccccgactctggctttcccccaggtatacatgttcctggtgaaatggcaggacctgtcggagaaggtggtctaccggaggttcac

SEQ ID NO: 13048 - RNA, 100 nt, synthetic construct
  source 1..100: mol_type = other RNA
aggctgaatggggtcccccgactctggctttcccccaggtctacatgttcctggtgaaatggcaggacctgtcggagaaggtggtctaccggcgcttcac

SEQ ID NO: 13049 - RNA, 100 nt, synthetic construct
  source 1..100: mol_type = other RNA
aggctgaatggggtcccccgactctggctttcccccaggtctacatgttcctggtgaaatggcaggacctgtcggagaaggtggtctaccggcgtttcac

SEQ ID NO: 13050 - RNA, 100 nt, synthetic construct
  source 1..100: mol_type = other RNA
aggctgaatggggtcccccgactctggctttcccccaggtgtacatgttcctggtgaaatggcaggacctgtcggagaaggtggtctaccggagattcac

SEQ ID NO: 13051 - RNA, 100 nt, synthetic construct
  source 1..100: mol_type = other RNA
aggctgaatggggtcccccgactctggctttcccccaggtatacatgttcctggtgaaatggcaggacctgtcggagaaggtggtctaccggcgattcac

SEQ ID NO: 13052 - RNA, 100 nt, synthetic construct
  source 1..100: mol_type = other RNA
aggctgaatggggtcccccgactctggctttcccccaggtgtacatgttcctggtgaaatggcaggacctgtcggagaaggtggtctaccggaggttcac

SEQ ID NO: 13053 - RNA, 100 nt, synthetic construct
  source 1..100: mol_type = other RNA
aggctgaatggggtcccccgactctggctttcccccaggtgtacatgttcctggtgaaatggcaggacctgtcggagaaggtggtctaccggcgattcac

SEQ ID NO: 13054 - RNA, 100 nt, synthetic construct
  source 1..100: mol_type = other RNA
aggctgaatggggtcccccgactctggctttcccccaggtatacatgttcctggtgaaatggcaggacctgtcggagaaggtggtctaccggagattcac

SEQ ID NO: 13055 - RNA, 100 nt, synthetic construct
  source 1..100: mol_type = other RNA
aggctgaatggggtcccccgactctggctttcccccaggtgtacatgttcctggtgaaatggcaggacctgtcggagaaggtggtctaccggcgcttcac

SEQ ID NO: 13056 - RNA, 100 nt, synthetic construct
  source 1..100: mol_type = other RNA
aggctgaatggggtcccccgactctggctttcccccaggtgtacatgttcctggtgaaatggcaggacctgtcggagaaggtggtctaccggcgtttcac

SEQ ID NO: 13057 - RNA, 100 nt, synthetic construct
  source 1..100: mol_type = other RNA
aggctgaatggggtcccccgactctggctttcccccaggtttacatgttcctggtgaaatggcaggacctgtcggagaaggtggtctaccggagattcac

SEQ ID NO: 13058 - RNA, 100 nt, synthetic construct
  source 1..100: mol_type = other RNA
aggctgaatggggtcccccgactctggctttcccccaggtttacatgttcctggtgaaatggcaggacctgtcggagaaggtggtctaccggaggttcac

SEQ ID NO: 13059 - RNA, 100 nt, synthetic construct
  source 1..100: mol_type = other RNA
aggctgaatggggtcccccgactctggctttcccccaggtttacatgttcctggtgaaatggcaggacctgtcggagaaggtggtctaccggcgattcac

SEQ ID NO: 13060 - RNA, 100 nt, synthetic construct
  source 1..100: mol_type = other RNA
aggctgaatggggtcccccgactctggctttcccccaggtttacatgttcctggtgaaatggcaggacctgtcggagaaggtggtctaccggcgcttcac

SEQ ID NO: 13061 - RNA, 100 nt, synthetic construct
  source 1..100: mol_type = other RNA
aggctgaatggggtcccccgactctggctttcccccaggtttacatgttcctggtgaaatggcaggacctgtcggagaaggtggtctaccggcggttcac

SEQ ID NO: 13062 - RNA, 100 nt, synthetic construct
  source 1..100: mol_type = other RNA
aggctgaatggggtcccccgactctggctttcccccaggtctacatgttcctggtgaaatggcaggacctgtcggagaaggtggtctaccggcggttcac

SEQ ID NO: 13063 - RNA, 100 nt, synthetic construct
  source 1..100: mol_type = other RNA
aggctgaatggggtcccccgactctggctttcccccaggtttacatgttcctggtgaaatggcaggacctgtcggagaaggtggtctaccggcgtttcac

SEQ ID NO: 13064 - RNA, 100 nt, synthetic construct
  source 1..100: mol_type = other RNA
aggctgaatggggtcccccgactctggctttcccccaggtgtacatgttcctggtgaaatggcaggacctgtcggagaaggtggtctaccggcggttcac

SEQ ID NO: 13065 - RNA, 101 nt, synthetic construct
  source 1..101: mol_type = other RNA
gaggctgaatggggtcccccgactctggctttcccccaggtttacatgttcctggtgaaatggcaggacctgtcggagaaggtggtctaccggcgattcac

SEQ ID NO: 13066 - RNA, 101 nt, synthetic construct
  source 1..101: mol_type = other RNA
gaggctgaatggggtcccccgactctggctttcccccaggtatacatgttcctggtgaaatggcaggacctgtcggagaaggtggtctaccggcgattcac

SEQ ID NO: 13067 - RNA, 101 nt, synthetic construct
  source 1..101: mol_type = other RNA
gaggctgaatggggtcccccgactctggctttcccccaggtatacatgttcctggtgaaatggcaggacctgtcggagaaggtggtctaccggaggttcac

SEQ ID NO: 13068 - RNA, 101 nt, synthetic construct
  source 1..101: mol_type = other RNA
gaggctgaatggggtcccccgactctggctttcccccaggtttacatgttcctggtgaaatggcaggacctgtcggagaaggtggtctaccggcgtttcac

SEQ ID NO: 13069 - RNA, 101 nt, synthetic construct
  source 1..101: mol_type = other RNA
gaggctgaatggggtcccccgactctggctttcccccaggtttacatgttcctggtgaaatggcaggacctgtcggagaaggtggtctaccggcggttcac

SEQ ID NO: 13070 - RNA, 101 nt, synthetic construct
  source 1..101: mol_type = other RNA
gaggctgaatggggtcccccgactctggctttcccccaggtttacatgttcctggtgaaatggcaggacctgtcggagaaggtggtctaccggcgcttcac

SEQ ID NO: 13071 - RNA, 101 nt, synthetic construct
  source 1..101: mol_type = other RNA
gaggctgaatggggtcccccgactctggctttcccccaggtttacatgttcctggtgaaatggcaggacctgtcggagaaggtggtctaccggaggttcac

SEQ ID NO: 13072 - RNA, 101 nt, synthetic construct
  source 1..101: mol_type = other RNA
gaggctgaatggggtcccccgactctggctttcccccaggtttacatgttcctggtgaaatggcaggacctgtcggagaaggtggtctaccggagattcac

SEQ ID NO: 13073 - RNA, 101 nt, synthetic construct
  source 1..101: mol_type = other RNA
gaggctgaatggggtcccccgactctggctttcccccaggtgtacatgttcctggtgaaatggcaggacctgtcggagaaggtggtctaccggcggttcac

SEQ ID NO: 13074 - RNA, 101 nt, synthetic construct
  source 1..101: mol_type = other RNA
gaggctgaatggggtcccccgactctggctttcccccaggtgtacatgttcctggtgaaatggcaggacctgtcggagaaggtggtctaccggcgcttcac

SEQ ID NO: 13075 - RNA, 101 nt, synthetic construct
  source 1..101: mol_type = other RNA
gaggctgaatggggtcccccgactctggctttcccccaggtgtacatgttcctggtgaaatggcaggacctgtcggagaaggtggtctaccggcgattcac

SEQ ID NO: 13076 - RNA, 101 nt, synthetic construct
  source 1..101: mol_type = other RNA
gaggctgaatggggtcccccgactctggctttcccccaggtatacatgttcctggtgaaatggcaggacctgtcggagaaggtggtctaccggagattcac

SEQ ID NO: 13077 - RNA, 101 nt, synthetic construct
  source 1..101: mol_type = other RNA
gaggctgaatggggtcccccgactctggctttcccccaggtgtacatgttcctggtgaaatggcaggacctgtcggagaaggtggtctaccggaggttcac

SEQ ID NO: 13078 - RNA, 101 nt, synthetic construct
  source 1..101: mol_type = other RNA
gaggctgaatggggtcccccgactctggctttcccccaggtgtacatgttcctggtgaaatggcaggacctgtcggagaaggtggtctaccggcgtttcac

SEQ ID NO: 13079 - RNA, 101 nt, synthetic construct
  source 1..101: mol_type = other RNA
gaggctgaatggggtcccccgactctggctttcccccaggtctacatgttcctggtgaaatggcaggacctgtcggagaaggtggtctaccggcggttcac

SEQ ID NO: 13080 - RNA, 101 nt, synthetic construct
  source 1..101: mol_type = other RNA
gaggctgaatggggtcccccgactctggctttcccccaggtctacatgttcctggtgaaatggcaggacctgtcggagaaggtggtctaccggcgcttcac

SEQ ID NO: 13081 - RNA, 101 nt, synthetic construct
  source 1..101: mol_type = other RNA
gaggctgaatggggtcccccgactctggctttcccccaggtctacatgttcctggtgaaatggcaggacctgtcggagaaggtggtctaccggcgattcac

SEQ ID NO: 13082 - RNA, 101 nt, synthetic construct
  source 1..101: mol_type = other RNA
gaggctgaatggggtcccccgactctggctttcccccaggtctacatgttcctggtgaaatggcaggacctgtcggagaaggtggtctaccggaggttcac

SEQ ID NO: 13083 - RNA, 101 nt, synthetic construct
  source 1..101: mol_type = other RNA
gaggctgaatggggtcccccgactctggctttcccccaggtctacatgttcctggtgaaatggcaggacctgtcggagaaggtggtctaccggagattcac

SEQ ID NO: 13084 - RNA, 101 nt, synthetic construct
  source 1..101: mol_type = other RNA
gaggctgaatggggtcccccgactctggctttcccccaggtatacatgttcctggtgaaatggcaggacctgtcggagaaggtggtctaccggcgtttcac

SEQ ID NO: 13085 - RNA, 101 nt, synthetic construct
  source 1..101: mol_type = other RNA
gaggctgaatggggtcccccgactctggctttcccccaggtatacatgttcctggtgaaatggcaggacctgtcggagaaggtggtctaccggcggttcac

SEQ ID NO: 13086 - RNA, 101 nt, synthetic construct
  source 1..101: mol_type = other RNA
gaggctgaatggggtcccccgactctggctttcccccaggtatacatgttcctggtgaaatggcaggacctgtcggagaaggtggtctaccggcgcttcac

SEQ ID NO: 13087 - RNA, 101 nt, synthetic construct
  source 1..101: mol_type = other RNA
gaggctgaatggggtcccccgactctggctttcccccaggtgtacatgttcctggtgaaatggcaggacctgtcggagaaggtggtctaccggagattcac

SEQ ID NO: 13088 - RNA, 101 nt, synthetic construct
  source 1..101: mol_type = other RNA
gaggctgaatggggtcccccgactctggctttcccccaggtctacatgttcctggtgaaatggcaggacctgtcggagaaggtggtctaccggcgtttcac

SEQ ID NO: 13089 - RNA, 102 nt, synthetic construct
  source 1..102: mol_type = other RNA
ggaggctgaatggggtcccccgactctggctttcccccaggtctacatgttcctggtgaaatggcaggacctgtcggagaaggtggtctaccggagattcac

SEQ ID NO: 13090 - RNA, 102 nt, synthetic construct
  source 1..102: mol_type = other RNA
ggaggctgaatggggtcccccgactctggctttcccccaggtctacatgttcctggtgaaatggcaggacctgtcggagaaggtggtctaccggaggttcac

SEQ ID NO: 13091 - RNA, 102 nt, synthetic construct
  source 1..102: mol_type = other RNA
ggaggctgaatggggtcccccgactctggctttcccccaggtctacatgttcctggtgaaatggcaggacctgtcggagaaggtggtctaccggcgattcac

SEQ ID NO: 13092 - RNA, 102 nt, synthetic construct
  source 1..102: mol_type = other RNA
ggaggctgaatggggtcccccgactctggctttcccccaggtctacatgttcctggtgaaatggcaggacctgtcggagaaggtggtctaccggcgcttcac

SEQ ID NO: 13093 - RNA, 102 nt, synthetic construct
  source 1..102: mol_type = other RNA
ggaggctgaatggggtcccccgactctggctttcccccaggtctacatgttcctggtgaaatggcaggacctgtcggagaaggtggtctaccggcggttcac

SEQ ID NO: 13094 - RNA, 102 nt, synthetic construct
  source 1..102: mol_type = other RNA
ggaggctgaatggggtcccccgactctggctttcccccaggtttacatgttcctggtgaaatggcaggacctgtcggagaaggtggtctaccggagattcac

SEQ ID NO: 13095 - RNA, 102 nt, synthetic construct
  source 1..102: mol_type = other RNA
ggaggctgaatggggtcccccgactctggctttcccccaggtatacatgttcctggtgaaatggcaggacctgtcggagaaggtggtctaccggcgtttcac

SEQ ID NO: 13096 - RNA, 102 nt, synthetic construct
  source 1..102: mol_type = other RNA
ggaggctgaatggggtcccccgactctggctttcccccaggtatacatgttcctggtgaaatggcaggacctgtcggagaaggtggtctaccggagattcac

SEQ ID NO: 13097 - RNA, 102 nt, synthetic construct
  source 1..102: mol_type = other RNA
ggaggctgaatggggtcccccgactctggctttcccccaggtatacatgttcctggtgaaatggcaggacctgtcggagaaggtggtctaccggcgcttcac

SEQ ID NO: 13098 - RNA, 102 nt, synthetic construct
  source 1..102: mol_type = other RNA
ggaggctgaatggggtcccccgactctggctttcccccaggtatacatgttcctggtgaaatggcaggacctgtcggagaaggtggtctaccggcgattcac

SEQ ID NO: 13099 - RNA, 102 nt, synthetic construct
  source 1..102: mol_type = other RNA
ggaggctgaatggggtcccccgactctggctttcccccaggtgtacatgttcctggtgaaatggcaggacctgtcggagaaggtggtctaccggagattcac

SEQ ID NO: 13100 - RNA, 102 nt, synthetic construct
  source 1..102: mol_type = other RNA
ggaggctgaatggggtcccccgactctggctttcccccaggtgtacatgttcctggtgaaatggcaggacctgtcggagaaggtggtctaccggaggttcac

SEQ ID NO: 13101 - RNA, 102 nt, synthetic construct
  source 1..102: mol_type = other RNA
ggaggctgaatggggtcccccgactctggctttcccccaggtgtacatgttcctggtgaaatggcaggacctgtcggagaaggtggtctaccggcggttcac

SEQ ID NO: 13102 - RNA, 102 nt, synthetic construct
  source 1..102: mol_type = other RNA
ggaggctgaatggggtcccccgactctggctttcccccaggtgtacatgttcctggtgaaatggcaggacctgtcggagaaggtggtctaccggcgtttcac

SEQ ID NO: 13103 - RNA, 102 nt, synthetic construct
  source 1..102: mol_type = other RNA
ggaggctgaatggggtcccccgactctggctttcccccaggtttacatgttcctggtgaaatggcaggacctgtcggagaaggtggtctaccggcggttcac

SEQ ID NO: 13104 - RNA, 102 nt, synthetic construct
  source 1..102: mol_type = other RNA
ggaggctgaatggggtcccccgactctggctttcccccaggtttacatgttcctggtgaaatggcaggacctgtcggagaaggtggtctaccggaggttcac

SEQ ID NO: 13105 - RNA, 102 nt, synthetic construct
  source 1..102: mol_type = other RNA
ggaggctgaatggggtcccccgactctggctttcccccaggtttacatgttcctggtgaaatggcaggacctgtcggagaaggtggtctaccggcgattcac

SEQ ID NO: 13106 - RNA, 102 nt, synthetic construct
  source 1..102: mol_type = other RNA
ggaggctgaatggggtcccccgactctggctttcccccaggtttacatgttcctggtgaaatggcaggacctgtcggagaaggtggtctaccggcgcttcac

SEQ ID NO: 13107 - RNA, 102 nt, synthetic construct
  source 1..102: mol_type = other RNA
ggaggctgaatggggtcccccgactctggctttcccccaggtttacatgttcctggtgaaatggcaggacctgtcggagaaggtggtctaccggcgtttcac

SEQ ID NO: 13108 - RNA, 102 nt, synthetic construct
  source 1..102: mol_type = other RNA
ggaggctgaatggggtcccccgactctggctttcccccaggtctacatgttcctggtgaaatggcaggacctgtcggagaaggtggtctaccggcgtttcac

SEQ ID NO: 13109 - RNA, 102 nt, synthetic construct
  source 1..102: mol_type = other RNA
ggaggctgaatggggtcccccgactctggctttcccccaggtgtacatgttcctggtgaaatggcaggacctgtcggagaaggtggtctaccggcgattcac

SEQ ID NO: 13110 - RNA, 102 nt, synthetic construct
  source 1..102: mol_type = other RNA
ggaggctgaatggggtcccccgactctggctttcccccaggtgtacatgttcctggtgaaatggcaggacctgtcggagaaggtggtctaccggcgcttcac

SEQ ID NO: 13111 - RNA, 102 nt, synthetic construct
  source 1..102: mol_type = other RNA
ggaggctgaatggggtcccccgactctggctttcccccaggtatacatgttcctggtgaaatggcaggacctgtcggagaaggtggtctaccggcggttcac

SEQ ID NO: 13112 - RNA, 102 nt, synthetic construct
  source 1..102: mol_type = other RNA
ggaggctgaatggggtcccccgactctggctttcccccaggtatacatgttcctggtgaaatggcaggacctgtcggagaaggtggtctaccggaggttcac

SEQ ID NO: 13113 - RNA, 103 nt, synthetic construct
  source 1..103: mol_type = other RNA
tggaggctgaatggggtcccccgactctggctttcccccaggtatacatgttcctggtgaaatggcaggacctgtcggagaaggtggtctaccggcgtttcac

SEQ ID NO: 13114 - RNA, 103 nt, synthetic construct
  source 1..103: mol_type = other RNA
tggaggctgaatggggtcccccgactctggctttcccccaggtctacatgttcctggtgaaatggcaggacctgtcggagaaggtggtctaccggcgcttcac

SEQ ID NO: 13115 - RNA, 103 nt, synthetic construct
  source 1..103: mol_type = other RNA
tggaggctgaatggggtcccccgactctggctttcccccaggtatacatgttcctggtgaaatggcaggacctgtcggagaaggtggtctaccggagattcac

SEQ ID NO: 13116 - RNA, 103 nt, synthetic construct
  source 1..103: mol_type = other RNA
tggaggctgaatggggtcccccgactctggctttcccccaggtatacatgttcctggtgaaatggcaggacctgtcggagaaggtggtctaccggaggttcac

SEQ ID NO: 13117 - RNA, 103 nt, synthetic construct
  source 1..103: mol_type = other RNA
tggaggctgaatggggtcccccgactctggctttcccccaggtatacatgttcctggtgaaatggcaggacctgtcggagaaggtggtctaccggcgattcac

SEQ ID NO: 13118 - RNA, 103 nt, synthetic construct
  source 1..103: mol_type = other RNA
tggaggctgaatggggtcccccgactctggctttcccccaggtatacatgttcctggtgaaatggcaggacctgtcggagaaggtggtctaccggcgcttcac

SEQ ID NO: 13119 - RNA, 103 nt, synthetic construct
  source 1..103: mol_type = other RNA
tggaggctgaatggggtcccccgactctggctttcccccaggtatacatgttcctggtgaaatggcaggacctgtcggagaaggtggtctaccggcggttcac

SEQ ID NO: 13120 - RNA, 103 nt, synthetic construct
  source 1..103: mol_type = other RNA
tggaggctgaatggggtcccccgactctggctttcccccaggtttacatgttcctggtgaaatggcaggacctgtcggagaaggtggtctaccggcgtttcac

SEQ ID NO: 13121 - RNA, 103 nt, synthetic construct
  source 1..103: mol_type = other RNA
tggaggctgaatggggtcccccgactctggctttcccccaggtttacatgttcctggtgaaatggcaggacctgtcggagaaggtggtctaccggcggttcac

SEQ ID NO: 13122 - RNA, 103 nt, synthetic construct
  source 1..103: mol_type = other RNA
tggaggctgaatggggtcccccgactctggctttcccccaggtttacatgttcctggtgaaatggcaggacctgtcggagaaggtggtctaccggcgcttcac

SEQ ID NO: 13123 - RNA, 103 nt, synthetic construct
  source 1..103: mol_type = other RNA
tggaggctgaatggggtcccccgactctggctttcccccaggtgtacatgttcctggtgaaatggcaggacctgtcggagaaggtggtctaccggcgcttcac

SEQ ID NO: 13124 - RNA, 103 nt, synthetic construct
  source 1..103: mol_type = other RNA
tggaggctgaatggggtcccccgactctggctttcccccaggtttacatgttcctggtgaaatggcaggacctgtcggagaaggtggtctaccggcgattcac

SEQ ID NO: 13125 - RNA, 103 nt, synthetic construct
  source 1..103: mol_type = other RNA
tggaggctgaatggggtcccccgactctggctttcccccaggtttacatgttcctggtgaaatggcaggacctgtcggagaaggtggtctaccggagattcac

SEQ ID NO: 13126 - RNA, 103 nt, synthetic construct
  source 1..103: mol_type = other RNA
tggaggctgaatggggtcccccgactctggctttcccccaggtgtacatgttcctggtgaaatggcaggacctgtcggagaaggtggtctaccggcgtttcac

SEQ ID NO: 13127 - RNA, 103 nt, synthetic construct
  source 1..103: mol_type = other RNA
tggaggctgaatggggtcccccgactctggctttcccccaggtctacatgttcctggtgaaatggcaggacctgtcggagaaggtggtctaccggaggttcac

SEQ ID NO: 13128 - RNA, 103 nt, synthetic construct
  source 1..103: mol_type = other RNA
tggaggctgaatggggtcccccgactctggctttcccccaggtgtacatgttcctggtgaaatggcaggacctgtcggagaaggtggtctaccggcggttcac

SEQ ID NO: 13129 - RNA, 103 nt, synthetic construct
  source 1..103: mol_type = other RNA
tggaggctgaatggggtcccccgactctggctttcccccaggtgtacatgttcctggtgaaatggcaggacctgtcggagaaggtggtctaccggcgattcac

SEQ ID NO: 13130 - RNA, 103 nt, synthetic construct
  source 1..103: mol_type = other RNA
tggaggctgaatggggtcccccgactctggctttcccccaggtgtacatgttcctggtgaaatggcaggacctgtcggagaaggtggtctaccggaggttcac

SEQ ID NO: 13131 - RNA, 103 nt, synthetic construct
  source 1..103: mol_type = other RNA
tggaggctgaatggggtcccccgactctggctttcccccaggtgtacatgttcctggtgaaatggcaggacctgtcggagaaggtggtctaccggagattcac

SEQ ID NO: 13132 - RNA, 103 nt, synthetic construct
  source 1..103: mol_type = other RNA
tggaggctgaatggggtcccccgactctggctttcccccaggtctacatgttcctggtgaaatggcaggacctgtcggagaaggtggtctaccggcgtttcac

SEQ ID NO: 13133 - RNA, 103 nt, synthetic construct
  source 1..103: mol_type = other RNA
tggaggctgaatggggtcccccgactctggctttcccccaggtctacatgttcctggtgaaatggcaggacctgtcggagaaggtggtctaccggcggttcac

SEQ ID NO: 13134 - RNA, 103 nt, synthetic construct
  source 1..103: mol_type = other RNA
tggaggctgaatggggtcccccgactctggctttcccccaggtctacatgttcctggtgaaatggcaggacctgtcggagaaggtggtctaccggcgattcac

SEQ ID NO: 13135 - RNA, 103 nt, synthetic construct
  source 1..103: mol_type = other RNA
tggaggctgaatggggtcccccgactctggctttcccccaggtttacatgttcctggtgaaatggcaggacctgtcggagaaggtggtctaccggaggttcac

SEQ ID NO: 13136 - RNA, 103 nt, synthetic construct
  source 1..103: mol_type = other RNA
tggaggctgaatggggtcccccgactctggctttcccccaggtctacatgttcctggtgaaatggcaggacctgtcggagaaggtggtctaccggagattcac

SEQ ID NO: 13137 - RNA, 19 nt, synthetic construct
  source 1..19: mol_type = other RNA
ggtctaccggcgcttcacc

SEQ ID NO: 13138 - RNA, 19 nt, synthetic construct
  source 1..19: mol_type = other RNA
tggtctaccggcgcttcac

SEQ ID NO: 13139 - RNA, 20 nt, synthetic construct
  source 1..20: mol_type = other RNA
tggtctaccggaggttcacc

SEQ ID NO: 13140 - RNA, 20 nt, synthetic construct
  source 1..20: mol_type = other RNA
tggtctaccggcgattcacc

SEQ ID NO: 13141 - RNA, 20 nt, synthetic construct
  source 1..20: mol_type = other RNA
tggtctaccggagattcacc

SEQ ID NO: 13142 - RNA, 20 nt, synthetic construct
  source 1..20: mol_type = other RNA
tggtctaccggcgcttcacc

SEQ ID NO: 13143 - RNA, 20 nt, synthetic construct
  source 1..20: mol_type = other RNA
tggtctaccggcggttcacc

SEQ ID NO: 13144 - RNA, 20 nt, synthetic construct
  source 1..20: mol_type = other RNA
tggtctaccggcgtttcacc

SEQ ID NO: 13145 - RNA, 16 nt, synthetic construct
  source 1..16: mol_type = other RNA
ctcggtgaagcgccgg

SEQ ID NO: 13146 - RNA, 17 nt, synthetic construct
  source 1..17: mol_type = other RNA
tctcggtgaagcgccgg

SEQ ID NO: 13147 - RNA, 18 nt, synthetic construct
  source 1..18: mol_type = other RNA
atctcggtgaagcgccgg

SEQ ID NO: 13148 - RNA, 19 nt, synthetic construct
  source 1..19: mol_type = other RNA
gatctcggtgaagcgccgg

SEQ ID NO: 13149 - RNA, 20 nt, synthetic construct
  source 1..20: mol_type = other RNA
agatctcggtgaagcgccgg

SEQ ID NO: 13150 - RNA, 21 nt, synthetic construct
  source 1..21: mol_type = other RNA
tagatctcggtgaagcgccgg

SEQ ID NO: 13151 - RNA, 22 nt, synthetic construct
  source 1..22: mol_type = other RNA
gtagatctcggtgaagcgccgg

SEQ ID NO: 13152-13158 - skipped (7 entries)

SEQ ID NO: 13159 - RNA, 10 nt, synthetic construct
  source 1..10: mol_type = other RNA
gcgcttcacc

SEQ ID NO: 13160 - RNA, 11 nt, synthetic construct
  source 1..11: mol_type = other RNA
gcgcttcaccg

SEQ ID NO: 13161 - RNA, 12 nt, synthetic construct
  source 1..12: mol_type = other RNA
gcgcttcaccga

SEQ ID NO: 13162 - RNA, 13 nt, synthetic construct
  source 1..13: mol_type = other RNA
gcgcttcaccgag

SEQ ID NO: 13163 - RNA, 14 nt, synthetic construct
  source 1..14: mol_type = other RNA
gcgcttcaccgaga

SEQ ID NO: 13164 - RNA, 15 nt, synthetic construct
  source 1..15: mol_type = other RNA
gcgcttcaccgagat

SEQ ID NO: 13165 - RNA, 16 nt, synthetic construct
  source 1..16: mol_type = other RNA
gcgcttcaccgagatc

SEQ ID NO: 13166 - RNA, 17 nt, synthetic construct
  source 1..17: mol_type = other RNA
gcgcttcaccgagatct

SEQ ID NO: 13167 - RNA, 18 nt, synthetic construct
  source 1..18: mol_type = other RNA
gcgcttcaccgagatcta

SEQ ID NO: 13168 - RNA, 19 nt, synthetic construct
  source 1..19: mol_type = other RNA
gcgcttcaccgagatctac

SEQ ID NO: 13169 - RNA, 53 nt, synthetic construct
  source 1..53: mol_type = other RNA
gtgtacatgttcctggtgaaatggcaggacctgtcggagaaggtggtttaccg

SEQ ID NO: 13170 - RNA, 53 nt, synthetic construct
  source 1..53: mol_type = other RNA
gtgtacatgttcctggtgaaatggcaggacctgtcggagaaggtggtctaccg

SEQ ID NO: 13171 - RNA, 53 nt, synthetic construct
  source 1..53: mol_type = other RNA
gtgtacatgttcctggtgaaatggcaggacctgtcggagaaggtggtgtaccg

SEQ ID NO: 13172 - RNA, 53 nt, synthetic construct
  source 1..53: mol_type = other RNA
gtttacatgttcctggtgaaatggcaggacctgtcggagaaggtggtgtaccg

SEQ ID NO: 13173 - RNA, 53 nt, synthetic construct
  source 1..53: mol_type = other RNA
gtctacatgttcctggtgaaatggcaggacctgtcggagaaggtggtataccg

SEQ ID NO: 13174 - RNA, 53 nt, synthetic construct
  source 1..53: mol_type = other RNA
gtatacatgttcctggtgaaatggcaggacctgtcggagaaggtggtttaccg

SEQ ID NO: 13175 - RNA, 53 nt, synthetic construct
  source 1..53: mol_type = other RNA
gtttacatgttcctggtgaaatggcaggacctgtcggagaaggtggtttaccg

SEQ ID NO: 13176 - RNA, 53 nt, synthetic construct
  source 1..53: mol_type = other RNA
gtatacatgttcctggtgaaatggcaggacctgtcggagaaggtggtgtaccg

SEQ ID NO: 13177 - RNA, 53 nt, synthetic construct
  source 1..53: mol_type = other RNA
gtatacatgttcctggtgaaatggcaggacctgtcggagaaggtggtctaccg

SEQ ID NO: 13178 - RNA, 53 nt, synthetic construct
  source 1..53: mol_type = other RNA
gtttacatgttcctggtgaaatggcaggacctgtcggagaaggtggtataccg

SEQ ID NO: 13179 - RNA, 53 nt, synthetic construct
  source 1..53: mol_type = other RNA
gtttacatgttcctggtgaaatggcaggacctgtcggagaaggtggtctaccg

SEQ ID NO: 13180 - RNA, 53 nt, synthetic construct
  source 1..53: mol_type = other RNA
gtatacatgttcctggtgaaatggcaggacctgtcggagaaggtggtataccg

SEQ ID NO: 13181 - RNA, 53 nt, synthetic construct
  source 1..53: mol_type = other RNA
gtctacatgttcctggtgaaatggcaggacctgtcggagaaggtggtctaccg

SEQ ID NO: 13182 - RNA, 53 nt, synthetic construct
  source 1..53: mol_type = other RNA
gtctacatgttcctggtgaaatggcaggacctgtcggagaaggtggtgtaccg

SEQ ID NO: 13183 - RNA, 53 nt, synthetic construct
  source 1..53: mol_type = other RNA
gtgtacatgttcctggtgaaatggcaggacctgtcggagaaggtggtataccg

SEQ ID NO: 13184 - RNA, 53 nt, synthetic construct
  source 1..53: mol_type = other RNA
gtctacatgttcctggtgaaatggcaggacctgtcggagaaggtggtttaccg

SEQ ID NO: 13185 - RNA, 54 nt, synthetic construct
  source 1..54: mol_type = other RNA
ggtgtacatgttcctggtgaaatggcaggacctgtcggagaaggtggtctaccg

SEQ ID NO: 13186 - RNA, 54 nt, synthetic construct
  source 1..54: mol_type = other RNA
ggtctacatgttcctggtgaaatggcaggacctgtcggagaaggtggtttaccg

SEQ ID NO: 13187 - RNA, 54 nt, synthetic construct
  source 1..54: mol_type = other RNA
ggtgtacatgttcctggtgaaatggcaggacctgtcggagaaggtggtataccg

SEQ ID NO: 13188 - RNA, 54 nt, synthetic construct
  source 1..54: mol_type = other RNA
ggtttacatgttcctggtgaaatggcaggacctgtcggagaaggtggtttaccg

SEQ ID NO: 13189 - RNA, 54 nt, synthetic construct
  source 1..54: mol_type = other RNA
ggtttacatgttcctggtgaaatggcaggacctgtcggagaaggtggtgtaccg

SEQ ID NO: 13190 - RNA, 54 nt, synthetic construct
  source 1..54: mol_type = other RNA
ggtttacatgttcctggtgaaatggcaggacctgtcggagaaggtggtctaccg

SEQ ID NO: 13191 - RNA, 54 nt, synthetic construct
  source 1..54: mol_type = other RNA
ggtttacatgttcctggtgaaatggcaggacctgtcggagaaggtggtataccg

SEQ ID NO: 13192 - RNA, 54 nt, synthetic construct
  source 1..54: mol_type = other RNA
ggtctacatgttcctggtgaaatggcaggacctgtcggagaaggtggtataccg

SEQ ID NO: 13193 - RNA, 54 nt, synthetic construct
  source 1..54: mol_type = other RNA
ggtatacatgttcctggtgaaatggcaggacctgtcggagaaggtggtataccg

SEQ ID NO: 13194 - RNA, 54 nt, synthetic construct
  source 1..54: mol_type = other RNA
ggtatacatgttcctggtgaaatggcaggacctgtcggagaaggtggtctaccg

SEQ ID NO: 13195 - RNA, 54 nt, synthetic construct
  source 1..54: mol_type = other RNA
ggtgtacatgttcctggtgaaatggcaggacctgtcggagaaggtggtttaccg

SEQ ID NO: 13196 - RNA, 54 nt, synthetic construct
  source 1..54: mol_type = other RNA
ggtgtacatgttcctggtgaaatggcaggacctgtcggagaaggtggtgtaccg

SEQ ID NO: 13197 - RNA, 54 nt, synthetic construct
  source 1..54: mol_type = other RNA
ggtctacatgttcctggtgaaatggcaggacctgtcggagaaggtggtgtaccg

SEQ ID NO: 13198 - RNA, 54 nt, synthetic construct
  source 1..54: mol_type = other RNA
ggtctacatgttcctggtgaaatggcaggacctgtcggagaaggtggtctaccg

SEQ ID NO: 13199 - RNA, 54 nt, synthetic construct
  source 1..54: mol_type = other RNA
ggtatacatgttcctggtgaaatggcaggacctgtcggagaaggtggtttaccg

SEQ ID NO: 13200 - RNA, 54 nt, synthetic construct
  source 1..54: mol_type = other RNA
ggtatacatgttcctggtgaaatggcaggacctgtcggagaaggtggtgtaccg

SEQ ID NO: 13201 - RNA, 55 nt, synthetic construct
  source 1..55: mol_type = other RNA
aggtgtacatgttcctggtgaaatggcaggacctgtcggagaaggtggtttaccg

SEQ ID NO: 13202 - RNA, 55 nt, synthetic construct
  source 1..55: mol_type = other RNA
aggtgtacatgttcctggtgaaatggcaggacctgtcggagaaggtggtctaccg

SEQ ID NO: 13203 - RNA, 55 nt, synthetic construct
  source 1..55: mol_type = other RNA
aggtctacatgttcctggtgaaatggcaggacctgtcggagaaggtggtttaccg

SEQ ID NO: 13204 - RNA, 55 nt, synthetic construct
  source 1..55: mol_type = other RNA
aggtctacatgttcctggtgaaatggcaggacctgtcggagaaggtggtgtaccg

SEQ ID NO: 13205 - RNA, 55 nt, synthetic construct
  source 1..55: mol_type = other RNA
aggtctacatgttcctggtgaaatggcaggacctgtcggagaaggtggtctaccg

SEQ ID NO: 13206 - RNA, 55 nt, synthetic construct
  source 1..55: mol_type = other RNA
aggtctacatgttcctggtgaaatggcaggacctgtcggagaaggtggtataccg

SEQ ID NO: 13207 - RNA, 55 nt, synthetic construct
  source 1..55: mol_type = other RNA
aggtatacatgttcctggtgaaatggcaggacctgtcggagaaggtggtttaccg

SEQ ID NO: 13208 - RNA, 55 nt, synthetic construct
  source 1..55: mol_type = other RNA
aggtatacatgttcctggtgaaatggcaggacctgtcggagaaggtggtctaccg

SEQ ID NO: 13209 - RNA, 55 nt, synthetic construct
  source 1..55: mol_type = other RNA
aggtatacatgttcctggtgaaatggcaggacctgtcggagaaggtggtataccg

SEQ ID NO: 13210 - RNA, 55 nt, synthetic construct
  source 1..55: mol_type = other RNA
aggtttacatgttcctggtgaaatggcaggacctgtcggagaaggtggtttaccg

SEQ ID NO: 13211 - RNA, 55 nt, synthetic construct
  source 1..55: mol_type = other RNA
aggtgtacatgttcctggtgaaatggcaggacctgtcggagaaggtggtataccg

SEQ ID NO: 13212 - RNA, 55 nt, synthetic construct
  source 1..55: mol_type = other RNA
aggtgtacatgttcctggtgaaatggcaggacctgtcggagaaggtggtgtaccg

SEQ ID NO: 13213 - RNA, 55 nt, synthetic construct
  source 1..55: mol_type = other RNA
aggtttacatgttcctggtgaaatggcaggacctgtcggagaaggtggtgtaccg

SEQ ID NO: 13214 - RNA, 55 nt, synthetic construct
  source 1..55: mol_type = other RNA
aggtatacatgttcctggtgaaatggcaggacctgtcggagaaggtggtgtaccg

SEQ ID NO: 13215 - RNA, 55 nt, synthetic construct
  source 1..55: mol_type = other RNA
aggtttacatgttcctggtgaaatggcaggacctgtcggagaaggtggtctaccg

SEQ ID NO: 13216 - RNA, 55 nt, synthetic construct
  source 1..55: mol_type = other RNA
aggtttacatgttcctggtgaaatggcaggacctgtcggagaaggtggtataccg

SEQ ID NO: 13217 - RNA, 56 nt, synthetic construct
  source 1..56: mol_type = other RNA
caggtgtacatgttcctggtgaaatggcaggacctgtcggagaaggtggtttaccg

SEQ ID NO: 13218 - RNA, 56 nt, synthetic construct
  source 1..56: mol_type = other RNA
caggtgtacatgttcctggtgaaatggcaggacctgtcggagaaggtggtgtaccg

SEQ ID NO: 13219 - RNA, 56 nt, synthetic construct
  source 1..56: mol_type = other RNA
caggtctacatgttcctggtgaaatggcaggacctgtcggagaaggtggtgtaccg

SEQ ID NO: 13220 - RNA, 56 nt, synthetic construct
  source 1..56: mol_type = other RNA
caggtctacatgttcctggtgaaatggcaggacctgtcggagaaggtggtctaccg

SEQ ID NO: 13221 - RNA, 56 nt, synthetic construct
  source 1..56: mol_type = other RNA
caggtctacatgttcctggtgaaatggcaggacctgtcggagaaggtggtataccg

SEQ ID NO: 13222 - RNA, 56 nt, synthetic construct
  source 1..56: mol_type = other RNA
caggtttacatgttcctggtgaaatggcaggacctgtcggagaaggtggtttaccg

SEQ ID NO: 13223 - RNA, 56 nt, synthetic construct
  source 1..56: mol_type = other RNA
caggtatacatgttcctggtgaaatggcaggacctgtcggagaaggtggtgtaccg

SEQ ID NO: 13224 - RNA, 56 nt, synthetic construct
  source 1..56: mol_type = other RNA
caggtatacatgttcctggtgaaatggcaggacctgtcggagaaggtggtctaccg

SEQ ID NO: 13225 - RNA, 56 nt, synthetic construct
  source 1..56: mol_type = other RNA
caggtatacatgttcctggtgaaatggcaggacctgtcggagaaggtggtataccg

SEQ ID NO: 13226 - RNA, 56 nt, synthetic construct
  source 1..56: mol_type = other RNA
caggtgtacatgttcctggtgaaatggcaggacctgtcggagaaggtggtctaccg

SEQ ID NO: 13227 - RNA, 56 nt, synthetic construct
  source 1..56: mol_type = other RNA
caggtctacatgttcctggtgaaatggcaggacctgtcggagaaggtggtttaccg

SEQ ID NO: 13228 - RNA, 56 nt, synthetic construct
  source 1..56: mol_type = other RNA
caggtgtacatgttcctggtgaaatggcaggacctgtcggagaaggtggtataccg

SEQ ID NO: 13229 - RNA, 56 nt, synthetic construct
  source 1..56: mol_type = other RNA
caggtttacatgttcctggtgaaatggcaggacctgtcggagaaggtggtataccg

SEQ ID NO: 13230 - RNA, 56 nt, synthetic construct
  source 1..56: mol_type = other RNA
caggtttacatgttcctggtgaaatggcaggacctgtcggagaaggtggtgtaccg

SEQ ID NO: 13231 - RNA, 56 nt, synthetic construct
  source 1..56: mol_type = other RNA
caggtatacatgttcctggtgaaatggcaggacctgtcggagaaggtggtttaccg

SEQ ID NO: 13232 - RNA, 56 nt, synthetic construct
  source 1..56: mol_type = other RNA
caggtttacatgttcctggtgaaatggcaggacctgtcggagaaggtggtctaccg

SEQ ID NO: 13233 - RNA, 57 nt, synthetic construct
  source 1..57: mol_type = other RNA
ccaggtgtacatgttcctggtgaaatggcaggacctgtcggagaaggtggtttaccg

SEQ ID NO: 13234 - RNA, 57 nt, synthetic construct
  source 1..57: mol_type = other RNA
ccaggtttacatgttcctggtgaaatggcaggacctgtcggagaaggtggtttaccg

SEQ ID NO: 13235 - RNA, 57 nt, synthetic construct
  source 1..57: mol_type = other RNA
ccaggtgtacatgttcctggtgaaatggcaggacctgtcggagaaggtggtataccg

SEQ ID NO: 13236 - RNA, 57 nt, synthetic construct
  source 1..57: mol_type = other RNA
ccaggtgtacatgttcctggtgaaatggcaggacctgtcggagaaggtggtgtaccg

SEQ ID NO: 13237 - RNA, 57 nt, synthetic construct
  source 1..57: mol_type = other RNA
ccaggtatacatgttcctggtgaaatggcaggacctgtcggagaaggtggtataccg

SEQ ID NO: 13238 - RNA, 57 nt, synthetic construct
  source 1..57: mol_type = other RNA
ccaggtttacatgttcctggtgaaatggcaggacctgtcggagaaggtggtataccg

SEQ ID NO: 13239 - RNA, 57 nt, synthetic construct
  source 1..57: mol_type = other RNA
ccaggtctacatgttcctggtgaaatggcaggacctgtcggagaaggtggtttaccg

SEQ ID NO: 13240 - RNA, 57 nt, synthetic construct
  source 1..57: mol_type = other RNA
ccaggtctacatgttcctggtgaaatggcaggacctgtcggagaaggtggtgtaccg

SEQ ID NO: 13241 - RNA, 57 nt, synthetic construct
  source 1..57: mol_type = other RNA
ccaggtgtacatgttcctggtgaaatggcaggacctgtcggagaaggtggtctaccg

SEQ ID NO: 13242 - RNA, 57 nt, synthetic construct
  source 1..57: mol_type = other RNA
ccaggtttacatgttcctggtgaaatggcaggacctgtcggagaaggtggtgtaccg

SEQ ID NO: 13243 - RNA, 57 nt, synthetic construct
  source 1..57: mol_type = other RNA
ccaggtttacatgttcctggtgaaatggcaggacctgtcggagaaggtggtctaccg

SEQ ID NO: 13244 - RNA, 57 nt, synthetic construct
  source 1..57: mol_type = other RNA
ccaggtatacatgttcctggtgaaatggcaggacctgtcggagaaggtggtctaccg

SEQ ID NO: 13245 - RNA, 57 nt, synthetic construct
  source 1..57: mol_type = other RNA
ccaggtatacatgttcctggtgaaatggcaggacctgtcggagaaggtggtgtaccg

SEQ ID NO: 13246 - RNA, 57 nt, synthetic construct
  source 1..57: mol_type = other RNA
ccaggtatacatgttcctggtgaaatggcaggacctgtcggagaaggtggtttaccg

SEQ ID NO: 13247 - RNA, 57 nt, synthetic construct
  source 1..57: mol_type = other RNA
ccaggtctacatgttcctggtgaaatggcaggacctgtcggagaaggtggtataccg

SEQ ID NO: 13248 - RNA, 57 nt, synthetic construct
  source 1..57: mol_type = other RNA
ccaggtctacatgttcctggtgaaatggcaggacctgtcggagaaggtggtctaccg

SEQ ID NO: 13249 - RNA, 58 nt, synthetic construct
  source 1..58: mol_type = other RNA
cccaggtatacatgttcctggtgaaatggcaggacctgtcggagaaggtggtttaccg

SEQ ID NO: 13250 - RNA, 58 nt, synthetic construct
  source 1..58: mol_type = other RNA
cccaggtttacatgttcctggtgaaatggcaggacctgtcggagaaggtggtataccg

SEQ ID NO: 13251 - RNA, 58 nt, synthetic construct
  source 1..58: mol_type = other RNA
cccaggtatacatgttcctggtgaaatggcaggacctgtcggagaaggtggtataccg

SEQ ID NO: 13252 - RNA, 58 nt, synthetic construct
  source 1..58: mol_type = other RNA
cccaggtttacatgttcctggtgaaatggcaggacctgtcggagaaggtggtgtaccg

SEQ ID NO: 13253 - RNA, 58 nt, synthetic construct
  source 1..58: mol_type = other RNA
cccaggtttacatgttcctggtgaaatggcaggacctgtcggagaaggtggtttaccg

SEQ ID NO: 13254 - RNA, 58 nt, synthetic construct
  source 1..58: mol_type = other RNA
cccaggtttacatgttcctggtgaaatggcaggacctgtcggagaaggtggtctaccg

SEQ ID NO: 13255 - RNA, 58 nt, synthetic construct
  source 1..58: mol_type = other RNA
cccaggtgtacatgttcctggtgaaatggcaggacctgtcggagaaggtggtttaccg

SEQ ID NO: 13256 - RNA, 58 nt, synthetic construct
  source 1..58: mol_type = other RNA
cccaggtgtacatgttcctggtgaaatggcaggacctgtcggagaaggtggtgtaccg

SEQ ID NO: 13257 - RNA, 58 nt, synthetic construct
  source 1..58: mol_type = other RNA
cccaggtgtacatgttcctggtgaaatggcaggacctgtcggagaaggtggtataccg

SEQ ID NO: 13258 - RNA, 58 nt, synthetic construct
  source 1..58: mol_type = other RNA
cccaggtctacatgttcctggtgaaatggcaggacctgtcggagaaggtggtttaccg

SEQ ID NO: 13259 - RNA, 58 nt, synthetic construct
  source 1..58: mol_type = other RNA
cccaggtgtacatgttcctggtgaaatggcaggacctgtcggagaaggtggtctaccg

SEQ ID NO: 13260 - RNA, 58 nt, synthetic construct
  source 1..58: mol_type = other RNA
cccaggtctacatgttcctggtgaaatggcaggacctgtcggagaaggtggtctaccg

SEQ ID NO: 13261 - RNA, 58 nt, synthetic construct
  source 1..58: mol_type = other RNA
cccaggtctacatgttcctggtgaaatggcaggacctgtcggagaaggtggtataccg

SEQ ID NO: 13262 - RNA, 58 nt, synthetic construct
  source 1..58: mol_type = other RNA
cccaggtatacatgttcctggtgaaatggcaggacctgtcggagaaggtggtgtaccg

SEQ ID NO: 13263 - RNA, 58 nt, synthetic construct
  source 1..58: mol_type = other RNA
cccaggtatacatgttcctggtgaaatggcaggacctgtcggagaaggtggtctaccg

SEQ ID NO: 13264 - RNA, 58 nt, synthetic construct
  source 1..58: mol_type = other RNA
cccaggtctacatgttcctggtgaaatggcaggacctgtcggagaaggtggtgtaccg

SEQ ID NO: 13265 - RNA, 59 nt, synthetic construct
  source 1..59: mol_type = other RNA
ccccaggtatacatgttcctggtgaaatggcaggacctgtcggagaaggtggtctaccg

SEQ ID NO: 13266 - RNA, 59 nt, synthetic construct
  source 1..59: mol_type = other RNA
ccccaggtatacatgttcctggtgaaatggcaggacctgtcggagaaggtggtgtaccg

SEQ ID NO: 13267 - RNA, 59 nt, synthetic construct
  source 1..59: mol_type = other RNA
ccccaggtttacatgttcctggtgaaatggcaggacctgtcggagaaggtggtgtaccg

SEQ ID NO: 13268 - RNA, 59 nt, synthetic construct
  source 1..59: mol_type = other RNA
ccccaggtctacatgttcctggtgaaatggcaggacctgtcggagaaggtggtataccg

SEQ ID NO: 13269 - RNA, 59 nt, synthetic construct
  source 1..59: mol_type = other RNA
ccccaggtctacatgttcctggtgaaatggcaggacctgtcggagaaggtggtgtaccg

SEQ ID NO: 13270 - RNA, 59 nt, synthetic construct
  source 1..59: mol_type = other RNA
ccccaggtctacatgttcctggtgaaatggcaggacctgtcggagaaggtggtttaccg

SEQ ID NO: 13271 - RNA, 59 nt, synthetic construct
  source 1..59: mol_type = other RNA
ccccaggtgtacatgttcctggtgaaatggcaggacctgtcggagaaggtggtgtaccg

SEQ ID NO: 13272 - RNA, 59 nt, synthetic construct
  source 1..59: mol_type = other RNA
ccccaggtgtacatgttcctggtgaaatggcaggacctgtcggagaaggtggtataccg

SEQ ID NO: 13273 - RNA, 59 nt, synthetic construct
  source 1..59: mol_type = other RNA
ccccaggtgtacatgttcctggtgaaatggcaggacctgtcggagaaggtggtctaccg

SEQ ID NO: 13274 - RNA, 59 nt, synthetic construct
  source 1..59: mol_type = other RNA
ccccaggtatacatgttcctggtgaaatggcaggacctgtcggagaaggtggtttaccg

SEQ ID NO: 13275 - RNA, 59 nt, synthetic construct
  source 1..59: mol_type = other RNA
ccccaggtttacatgttcctggtgaaatggcaggacctgtcggagaaggtggtctaccg

SEQ ID NO: 13276 - RNA, 59 nt, synthetic construct
  source 1..59: mol_type = other RNA
ccccaggtatacatgttcctggtgaaatggcaggacctgtcggagaaggtggtataccg

SEQ ID NO: 13277 - RNA, 59 nt, synthetic construct
  source 1..59: mol_type = other RNA
ccccaggtttacatgttcctggtgaaatggcaggacctgtcggagaaggtggtataccg

SEQ ID NO: 13278 - RNA, 59 nt, synthetic construct
  source 1..59: mol_type = other RNA
ccccaggtgtacatgttcctggtgaaatggcaggacctgtcggagaaggtggtttaccg

SEQ ID NO: 13279 - RNA, 59 nt, synthetic construct
  source 1..59: mol_type = other RNA
ccccaggtttacatgttcctggtgaaatggcaggacctgtcggagaaggtggtttaccg

SEQ ID NO: 13280 - RNA, 59 nt, synthetic construct
  source 1..59: mol_type = other RNA
ccccaggtctacatgttcctggtgaaatggcaggacctgtcggagaaggtggtctaccg

SEQ ID NO: 13281 - RNA, 60 nt, synthetic construct
  source 1..60: mol_type = other RNA
cccccaggtgtacatgttcctggtgaaatggcaggacctgtcggagaaggtggtttaccg

SEQ ID NO: 13282 - RNA, 60 nt, synthetic construct
  source 1..60: mol_type = other RNA
cccccaggtttacatgttcctggtgaaatggcaggacctgtcggagaaggtggtttaccg

SEQ ID NO: 13283 - RNA, 60 nt, synthetic construct
  source 1..60: mol_type = other RNA
cccccaggtgtacatgttcctggtgaaatggcaggacctgtcggagaaggtggtctaccg

SEQ ID NO: 13284 - RNA, 60 nt, synthetic construct
  source 1..60: mol_type = other RNA
cccccaggtgtacatgttcctggtgaaatggcaggacctgtcggagaaggtggtataccg

SEQ ID NO: 13285 - RNA, 60 nt, synthetic construct
  source 1..60: mol_type = other RNA
cccccaggtctacatgttcctggtgaaatggcaggacctgtcggagaaggtggtgtaccg

SEQ ID NO: 13286 - RNA, 60 nt, synthetic construct
  source 1..60: mol_type = other RNA
cccccaggtgtacatgttcctggtgaaatggcaggacctgtcggagaaggtggtgtaccg

SEQ ID NO: 13287 - RNA, 60 nt, synthetic construct
  source 1..60: mol_type = other RNA
cccccaggtttacatgttcctggtgaaatggcaggacctgtcggagaaggtggtgtaccg

SEQ ID NO: 13288 - RNA, 60 nt, synthetic construct
  source 1..60: mol_type = other RNA
cccccaggtttacatgttcctggtgaaatggcaggacctgtcggagaaggtggtctaccg

SEQ ID NO: 13289 - RNA, 60 nt, synthetic construct
  source 1..60: mol_type = other RNA
cccccaggtatacatgttcctggtgaaatggcaggacctgtcggagaaggtggtataccg

SEQ ID NO: 13290 - RNA, 60 nt, synthetic construct
  source 1..60: mol_type = other RNA
cccccaggtttacatgttcctggtgaaatggcaggacctgtcggagaaggtggtataccg

SEQ ID NO: 13291 - RNA, 60 nt, synthetic construct
  source 1..60: mol_type = other RNA
cccccaggtatacatgttcctggtgaaatggcaggacctgtcggagaaggtggtctaccg

SEQ ID NO: 13292 - RNA, 60 nt, synthetic construct
  source 1..60: mol_type = other RNA
cccccaggtatacatgttcctggtgaaatggcaggacctgtcggagaaggtggtgtaccg

SEQ ID NO: 13293 - RNA, 60 nt, synthetic construct
  source 1..60: mol_type = other RNA
cccccaggtatacatgttcctggtgaaatggcaggacctgtcggagaaggtggtttaccg

SEQ ID NO: 13294 - RNA, 60 nt, synthetic construct
  source 1..60: mol_type = other RNA
cccccaggtctacatgttcctggtgaaatggcaggacctgtcggagaaggtggtataccg

SEQ ID NO: 13295 - RNA, 60 nt, synthetic construct
  source 1..60: mol_type = other RNA
cccccaggtctacatgttcctggtgaaatggcaggacctgtcggagaaggtggtctaccg

SEQ ID NO: 13296 - RNA, 60 nt, synthetic construct
  source 1..60: mol_type = other RNA
cccccaggtctacatgttcctggtgaaatggcaggacctgtcggagaaggtggtttaccg

SEQ ID NO: 13297 - RNA, 61 nt, synthetic construct
  source 1..61: mol_type = other RNA
tcccccaggtttacatgttcctggtgaaatggcaggacctgtcggagaaggtggtgtaccg

SEQ ID NO: 13298 - RNA, 61 nt, synthetic construct
  source 1..61: mol_type = other RNA
tcccccaggtatacatgttcctggtgaaatggcaggacctgtcggagaaggtggtttaccg

SEQ ID NO: 13299 - RNA, 61 nt, synthetic construct
  source 1..61: mol_type = other RNA
tcccccaggtttacatgttcctggtgaaatggcaggacctgtcggagaaggtggtctaccg

SEQ ID NO: 13300 - RNA, 61 nt, synthetic construct
  source 1..61: mol_type = other RNA
tcccccaggtttacatgttcctggtgaaatggcaggacctgtcggagaaggtggtataccg

SEQ ID NO: 13301 - RNA, 61 nt, synthetic construct
  source 1..61: mol_type = other RNA
tcccccaggtttacatgttcctggtgaaatggcaggacctgtcggagaaggtggtttaccg

SEQ ID NO: 13302 - RNA, 61 nt, synthetic construct
  source 1..61: mol_type = other RNA
tcccccaggtgtacatgttcctggtgaaatggcaggacctgtcggagaaggtggtttaccg

SEQ ID NO: 13303 - RNA, 61 nt, synthetic construct
  source 1..61: mol_type = other RNA
tcccccaggtgtacatgttcctggtgaaatggcaggacctgtcggagaaggtggtgtaccg

SEQ ID NO: 13304 - RNA, 61 nt, synthetic construct
  source 1..61: mol_type = other RNA
tcccccaggtgtacatgttcctggtgaaatggcaggacctgtcggagaaggtggtctaccg

SEQ ID NO: 13305 - RNA, 61 nt, synthetic construct
  source 1..61: mol_type = other RNA
tcccccaggtgtacatgttcctggtgaaatggcaggacctgtcggagaaggtggtataccg

SEQ ID NO: 13306 - RNA, 61 nt, synthetic construct
  source 1..61: mol_type = other RNA
tcccccaggtctacatgttcctggtgaaatggcaggacctgtcggagaaggtggtttaccg

SEQ ID NO: 13307 - RNA, 61 nt, synthetic construct
  source 1..61: mol_type = other RNA
tcccccaggtctacatgttcctggtgaaatggcaggacctgtcggagaaggtggtgtaccg

SEQ ID NO: 13308 - RNA, 61 nt, synthetic construct
  source 1..61: mol_type = other RNA
tcccccaggtctacatgttcctggtgaaatggcaggacctgtcggagaaggtggtctaccg

SEQ ID NO: 13309 - RNA, 61 nt, synthetic construct
  source 1..61: mol_type = other RNA
tcccccaggtctacatgttcctggtgaaatggcaggacctgtcggagaaggtggtataccg

SEQ ID NO: 13310 - RNA, 61 nt, synthetic construct
  source 1..61: mol_type = other RNA
tcccccaggtatacatgttcctggtgaaatggcaggacctgtcggagaaggtggtgtaccg

SEQ ID NO: 13311 - RNA, 61 nt, synthetic construct
  source 1..61: mol_type = other RNA
tcccccaggtatacatgttcctggtgaaatggcaggacctgtcggagaaggtggtctaccg

SEQ ID NO: 13312 - RNA, 61 nt, synthetic construct
  source 1..61: mol_type = other RNA
tcccccaggtatacatgttcctggtgaaatggcaggacctgtcggagaaggtggtataccg

SEQ ID NO: 13313 - RNA, 62 nt, synthetic construct
  source 1..62: mol_type = other RNA
ttcccccaggtttacatgttcctggtgaaatggcaggacctgtcggagaaggtggtgtaccg

SEQ ID NO: 13314 - RNA, 62 nt, synthetic construct
  source 1..62: mol_type = other RNA
ttcccccaggtatacatgttcctggtgaaatggcaggacctgtcggagaaggtggtataccg

SEQ ID NO: 13315 - RNA, 62 nt, synthetic construct
  source 1..62: mol_type = other RNA
ttcccccaggtatacatgttcctggtgaaatggcaggacctgtcggagaaggtggtctaccg

SEQ ID NO: 13316 - RNA, 62 nt, synthetic construct
  source 1..62: mol_type = other RNA
ttcccccaggtatacatgttcctggtgaaatggcaggacctgtcggagaaggtggtgtaccg

SEQ ID NO: 13317 - RNA, 62 nt, synthetic construct
  source 1..62: mol_type = other RNA
ttcccccaggtatacatgttcctggtgaaatggcaggacctgtcggagaaggtggtttaccg

SEQ ID NO: 13318 - RNA, 62 nt, synthetic construct
  source 1..62: mol_type = other RNA
ttcccccaggtctacatgttcctggtgaaatggcaggacctgtcggagaaggtggtctaccg

SEQ ID NO: 13319 - RNA, 62 nt, synthetic construct
  source 1..62: mol_type = other RNA
ttcccccaggtctacatgttcctggtgaaatggcaggacctgtcggagaaggtggtataccg

SEQ ID NO: 13320 - RNA, 62 nt, synthetic construct
  source 1..62: mol_type = other RNA
ttcccccaggtgtacatgttcctggtgaaatggcaggacctgtcggagaaggtggtgtaccg

SEQ ID NO: 13321 - RNA, 62 nt, synthetic construct
  source 1..62: mol_type = other RNA
ttcccccaggtgtacatgttcctggtgaaatggcaggacctgtcggagaaggtggtataccg

SEQ ID NO: 13322 - RNA, 62 nt, synthetic construct
  source 1..62: mol_type = other RNA
ttcccccaggtgtacatgttcctggtgaaatggcaggacctgtcggagaaggtggtctaccg

SEQ ID NO: 13323 - RNA, 62 nt, synthetic construct
  source 1..62: mol_type = other RNA
ttcccccaggtgtacatgttcctggtgaaatggcaggacctgtcggagaaggtggtttaccg

SEQ ID NO: 13324 - RNA, 62 nt, synthetic construct
  source 1..62: mol_type = other RNA
ttcccccaggtttacatgttcctggtgaaatggcaggacctgtcggagaaggtggtataccg

SEQ ID NO: 13325 - RNA, 62 nt, synthetic construct
  source 1..62: mol_type = other RNA
ttcccccaggtttacatgttcctggtgaaatggcaggacctgtcggagaaggtggtctaccg

SEQ ID NO: 13326 - RNA, 62 nt, synthetic construct
  source 1..62: mol_type = other RNA
ttcccccaggtttacatgttcctggtgaaatggcaggacctgtcggagaaggtggtttaccg

SEQ ID NO: 13327 - RNA, 62 nt, synthetic construct
  source 1..62: mol_type = other RNA
ttcccccaggtctacatgttcctggtgaaatggcaggacctgtcggagaaggtggtttaccg

SEQ ID NO: 13328 - RNA, 62 nt, synthetic construct
  source 1..62: mol_type = other RNA
ttcccccaggtctacatgttcctggtgaaatggcaggacctgtcggagaaggtggtgtaccg

SEQ ID NO: 13329 - RNA, 63 nt, synthetic construct
  source 1..63: mol_type = other RNA
tttcccccaggtctacatgttcctggtgaaatggcaggacctgtcggagaaggtggtgtaccg

SEQ ID NO: 13330 - RNA, 63 nt, synthetic construct
  source 1..63: mol_type = other RNA
tttcccccaggtctacatgttcctggtgaaatggcaggacctgtcggagaaggtggtataccg

SEQ ID NO: 13331 - RNA, 63 nt, synthetic construct
  source 1..63: mol_type = other RNA
tttcccccaggtatacatgttcctggtgaaatggcaggacctgtcggagaaggtggtataccg

SEQ ID NO: 13332 - RNA, 63 nt, synthetic construct
  source 1..63: mol_type = other RNA
tttcccccaggtttacatgttcctggtgaaatggcaggacctgtcggagaaggtggtttaccg

SEQ ID NO: 13333 - RNA, 63 nt, synthetic construct
  source 1..63: mol_type = other RNA
tttcccccaggtctacatgttcctggtgaaatggcaggacctgtcggagaaggtggtttaccg

SEQ ID NO: 13334 - RNA, 63 nt, synthetic construct
  source 1..63: mol_type = other RNA
tttcccccaggtgtacatgttcctggtgaaatggcaggacctgtcggagaaggtggtttaccg

SEQ ID NO: 13335 - RNA, 63 nt, synthetic construct
  source 1..63: mol_type = other RNA
tttcccccaggtgtacatgttcctggtgaaatggcaggacctgtcggagaaggtggtgtaccg

SEQ ID NO: 13336 - RNA, 63 nt, synthetic construct
  source 1..63: mol_type = other RNA
tttcccccaggtgtacatgttcctggtgaaatggcaggacctgtcggagaaggtggtctaccg

SEQ ID NO: 13337 - RNA, 63 nt, synthetic construct
  source 1..63: mol_type = other RNA
tttcccccaggtgtacatgttcctggtgaaatggcaggacctgtcggagaaggtggtataccg

SEQ ID NO: 13338 - RNA, 63 nt, synthetic construct
  source 1..63: mol_type = other RNA
tttcccccaggtctacatgttcctggtgaaatggcaggacctgtcggagaaggtggtctaccg

SEQ ID NO: 13339 - RNA, 63 nt, synthetic construct
  source 1..63: mol_type = other RNA
tttcccccaggtttacatgttcctggtgaaatggcaggacctgtcggagaaggtggtctaccg

SEQ ID NO: 13340 - RNA, 63 nt, synthetic construct
  source 1..63: mol_type = other RNA
tttcccccaggtttacatgttcctggtgaaatggcaggacctgtcggagaaggtggtgtaccg

SEQ ID NO: 13341 - RNA, 63 nt, synthetic construct
  source 1..63: mol_type = other RNA
tttcccccaggtatacatgttcctggtgaaatggcaggacctgtcggagaaggtggtttaccg

SEQ ID NO: 13342 - RNA, 63 nt, synthetic construct
  source 1..63: mol_type = other RNA
tttcccccaggtatacatgttcctggtgaaatggcaggacctgtcggagaaggtggtgtaccg

SEQ ID NO: 13343 - RNA, 63 nt, synthetic construct
  source 1..63: mol_type = other RNA
tttcccccaggtatacatgttcctggtgaaatggcaggacctgtcggagaaggtggtctaccg

SEQ ID NO: 13344 - RNA, 63 nt, synthetic construct
  source 1..63: mol_type = other RNA
tttcccccaggtttacatgttcctggtgaaatggcaggacctgtcggagaaggtggtataccg

SEQ ID NO: 13345 - RNA, 64 nt, synthetic construct
  source 1..64: mol_type = other RNA
ctttcccccaggtgtacatgttcctggtgaaatggcaggacctgtcggagaaggtggtctaccg

SEQ ID NO: 13346 - RNA, 64 nt, synthetic construct
  source 1..64: mol_type = other RNA
ctttcccccaggtttacatgttcctggtgaaatggcaggacctgtcggagaaggtggtttaccg

SEQ ID NO: 13347 - RNA, 64 nt, synthetic construct
  source 1..64: mol_type = other RNA
ctttcccccaggtttacatgttcctggtgaaatggcaggacctgtcggagaaggtggtgtaccg

SEQ ID NO: 13348 - RNA, 64 nt, synthetic construct
  source 1..64: mol_type = other RNA
ctttcccccaggtttacatgttcctggtgaaatggcaggacctgtcggagaaggtggtctaccg

SEQ ID NO: 13349 - RNA, 64 nt, synthetic construct
  source 1..64: mol_type = other RNA
ctttcccccaggtttacatgttcctggtgaaatggcaggacctgtcggagaaggtggtataccg

SEQ ID NO: 13350 - RNA, 64 nt, synthetic construct
  source 1..64: mol_type = other RNA
ctttcccccaggtgtacatgttcctggtgaaatggcaggacctgtcggagaaggtggtttaccg

SEQ ID NO: 13351 - RNA, 64 nt, synthetic construct
  source 1..64: mol_type = other RNA
ctttcccccaggtgtacatgttcctggtgaaatggcaggacctgtcggagaaggtggtgtaccg

SEQ ID NO: 13352 - RNA, 64 nt, synthetic construct
  source 1..64: mol_type = other RNA
ctttcccccaggtctacatgttcctggtgaaatggcaggacctgtcggagaaggtggtgtaccg

SEQ ID NO: 13353 - RNA, 64 nt, synthetic construct
  source 1..64: mol_type = other RNA
ctttcccccaggtgtacatgttcctggtgaaatggcaggacctgtcggagaaggtggtataccg

SEQ ID NO: 13354 - RNA, 64 nt, synthetic construct
  source 1..64: mol_type = other RNA
ctttcccccaggtctacatgttcctggtgaaatggcaggacctgtcggagaaggtggtttaccg

SEQ ID NO: 13355 - RNA, 64 nt, synthetic construct
  source 1..64: mol_type = other RNA
ctttcccccaggtctacatgttcctggtgaaatggcaggacctgtcggagaaggtggtctaccg

SEQ ID NO: 13356 - RNA, 64 nt, synthetic construct
  source 1..64: mol_type = other RNA
ctttcccccaggtctacatgttcctggtgaaatggcaggacctgtcggagaaggtggtataccg

SEQ ID NO: 13357 - RNA, 64 nt, synthetic construct
  source 1..64: mol_type = other RNA
ctttcccccaggtatacatgttcctggtgaaatggcaggacctgtcggagaaggtggtttaccg

SEQ ID NO: 13358 - RNA, 64 nt, synthetic construct
  source 1..64: mol_type = other RNA
ctttcccccaggtatacatgttcctggtgaaatggcaggacctgtcggagaaggtggtgtaccg

SEQ ID NO: 13359 - RNA, 64 nt, synthetic construct
  source 1..64: mol_type = other RNA
ctttcccccaggtatacatgttcctggtgaaatggcaggacctgtcggagaaggtggtctaccg

SEQ ID NO: 13360 - RNA, 64 nt, synthetic construct
  source 1..64: mol_type = other RNA
ctttcccccaggtatacatgttcctggtgaaatggcaggacctgtcggagaaggtggtataccg

SEQ ID NO: 13361 - RNA, 65 nt, synthetic construct
  source 1..65: mol_type = other RNA
gctttcccccaggtatacatgttcctggtgaaatggcaggacctgtcggagaaggtggtgtaccg

SEQ ID NO: 13362 - RNA, 65 nt, synthetic construct
  source 1..65: mol_type = other RNA
gctttcccccaggtgtacatgttcctggtgaaatggcaggacctgtcggagaaggtggtgtaccg

SEQ ID NO: 13363 - RNA, 65 nt, synthetic construct
  source 1..65: mol_type = other RNA
gctttcccccaggtctacatgttcctggtgaaatggcaggacctgtcggagaaggtggtgtaccg

SEQ ID NO: 13364 - RNA, 65 nt, synthetic construct
  source 1..65: mol_type = other RNA
gctttcccccaggtttacatgttcctggtgaaatggcaggacctgtcggagaaggtggtttaccg

SEQ ID NO: 13365 - RNA, 65 nt, synthetic construct
  source 1..65: mol_type = other RNA
gctttcccccaggtttacatgttcctggtgaaatggcaggacctgtcggagaaggtggtgtaccg

SEQ ID NO: 13366 - RNA, 65 nt, synthetic construct
  source 1..65: mol_type = other RNA
gctttcccccaggtttacatgttcctggtgaaatggcaggacctgtcggagaaggtggtctaccg

SEQ ID NO: 13367 - RNA, 65 nt, synthetic construct
  source 1..65: mol_type = other RNA
gctttcccccaggtgtacatgttcctggtgaaatggcaggacctgtcggagaaggtggtctaccg

SEQ ID NO: 13368 - RNA, 65 nt, synthetic construct
  source 1..65: mol_type = other RNA
gctttcccccaggtctacatgttcctggtgaaatggcaggacctgtcggagaaggtggtttaccg

SEQ ID NO: 13369 - RNA, 65 nt, synthetic construct
  source 1..65: mol_type = other RNA
gctttcccccaggtgtacatgttcctggtgaaatggcaggacctgtcggagaaggtggtataccg

SEQ ID NO: 13370 - RNA, 65 nt, synthetic construct
  source 1..65: mol_type = other RNA
gctttcccccaggtgtacatgttcctggtgaaatggcaggacctgtcggagaaggtggtttaccg

SEQ ID NO: 13371 - RNA, 65 nt, synthetic construct
  source 1..65: mol_type = other RNA
gctttcccccaggtatacatgttcctggtgaaatggcaggacctgtcggagaaggtggtctaccg

SEQ ID NO: 13372 - RNA, 65 nt, synthetic construct
  source 1..65: mol_type = other RNA
gctttcccccaggtctacatgttcctggtgaaatggcaggacctgtcggagaaggtggtataccg

SEQ ID NO: 13373 - RNA, 65 nt, synthetic construct
  source 1..65: mol_type = other RNA
gctttcccccaggtatacatgttcctggtgaaatggcaggacctgtcggagaaggtggtataccg

SEQ ID NO: 13374 - RNA, 65 nt, synthetic construct
  source 1..65: mol_type = other RNA
gctttcccccaggtttacatgttcctggtgaaatggcaggacctgtcggagaaggtggtataccg

SEQ ID NO: 13375 - RNA, 65 nt, synthetic construct
  source 1..65: mol_type = other RNA
gctttcccccaggtatacatgttcctggtgaaatggcaggacctgtcggagaaggtggtttaccg

SEQ ID NO: 13376 - RNA, 65 nt, synthetic construct
  source 1..65: mol_type = other RNA
gctttcccccaggtctacatgttcctggtgaaatggcaggacctgtcggagaaggtggtctaccg

SEQ ID NO: 13377 - RNA, 66 nt, synthetic construct
  source 1..66: mol_type = other RNA
ggctttcccccaggtctacatgttcctggtgaaatggcaggacctgtcggagaaggtggtgtaccg

SEQ ID NO: 13378 - RNA, 66 nt, synthetic construct
  source 1..66: mol_type = other RNA
ggctttcccccaggtttacatgttcctggtgaaatggcaggacctgtcggagaaggtggtgtaccg

SEQ ID NO: 13379 - RNA, 66 nt, synthetic construct
  source 1..66: mol_type = other RNA
ggctttcccccaggtctacatgttcctggtgaaatggcaggacctgtcggagaaggtggtataccg

SEQ ID NO: 13380 - RNA, 66 nt, synthetic construct
  source 1..66: mol_type = other RNA
ggctttcccccaggtatacatgttcctggtgaaatggcaggacctgtcggagaaggtggtataccg

SEQ ID NO: 13381 - RNA, 66 nt, synthetic construct
  source 1..66: mol_type = other RNA
ggctttcccccaggtatacatgttcctggtgaaatggcaggacctgtcggagaaggtggtctaccg

SEQ ID NO: 13382 - RNA, 66 nt, synthetic construct
  source 1..66: mol_type = other RNA
ggctttcccccaggtatacatgttcctggtgaaatggcaggacctgtcggagaaggtggtgtaccg

SEQ ID NO: 13383 - RNA, 66 nt, synthetic construct
  source 1..66: mol_type = other RNA
ggctttcccccaggtatacatgttcctggtgaaatggcaggacctgtcggagaaggtggtttaccg

SEQ ID NO: 13384 - RNA, 66 nt, synthetic construct
  source 1..66: mol_type = other RNA
ggctttcccccaggtctacatgttcctggtgaaatggcaggacctgtcggagaaggtggtttaccg

SEQ ID NO: 13385 - RNA, 66 nt, synthetic construct
  source 1..66: mol_type = other RNA
ggctttcccccaggtgtacatgttcctggtgaaatggcaggacctgtcggagaaggtggtataccg

SEQ ID NO: 13386 - RNA, 66 nt, synthetic construct
  source 1..66: mol_type = other RNA
ggctttcccccaggtgtacatgttcctggtgaaatggcaggacctgtcggagaaggtggtctaccg

SEQ ID NO: 13387 - RNA, 66 nt, synthetic construct
  source 1..66: mol_type = other RNA
ggctttcccccaggtgtacatgttcctggtgaaatggcaggacctgtcggagaaggtggtgtaccg

SEQ ID NO: 13388 - RNA, 66 nt, synthetic construct
  source 1..66: mol_type = other RNA
ggctttcccccaggtgtacatgttcctggtgaaatggcaggacctgtcggagaaggtggtttaccg

SEQ ID NO: 13389 - RNA, 66 nt, synthetic construct
  source 1..66: mol_type = other RNA
ggctttcccccaggtttacatgttcctggtgaaatggcaggacctgtcggagaaggtggtataccg

SEQ ID NO: 13390 - RNA, 66 nt, synthetic construct
  source 1..66: mol_type = other RNA
ggctttcccccaggtttacatgttcctggtgaaatggcaggacctgtcggagaaggtggtctaccg

SEQ ID NO: 13391 - RNA, 66 nt, synthetic construct
  source 1..66: mol_type = other RNA
ggctttcccccaggtttacatgttcctggtgaaatggcaggacctgtcggagaaggtggtttaccg

SEQ ID NO: 13392 - RNA, 66 nt, synthetic construct
  source 1..66: mol_type = other RNA
ggctttcccccaggtctacatgttcctggtgaaatggcaggacctgtcggagaaggtggtctaccg

SEQ ID NO: 13393 - RNA, 67 nt, synthetic construct
  source 1..67: mol_type = other RNA
tggctttcccccaggtatacatgttcctggtgaaatggcaggacctgtcggagaaggtggtgtaccg

SEQ ID NO: 13394 - RNA, 67 nt, synthetic construct
  source 1..67: mol_type = other RNA
tggctttcccccaggtatacatgttcctggtgaaatggcaggacctgtcggagaaggtggtttaccg

SEQ ID NO: 13395 - RNA, 67 nt, synthetic construct
  source 1..67: mol_type = other RNA
tggctttcccccaggtctacatgttcctggtgaaatggcaggacctgtcggagaaggtggtataccg

SEQ ID NO: 13396 - RNA, 67 nt, synthetic construct
  source 1..67: mol_type = other RNA
tggctttcccccaggtctacatgttcctggtgaaatggcaggacctgtcggagaaggtggtctaccg

SEQ ID NO: 13397 - RNA, 67 nt, synthetic construct
  source 1..67: mol_type = other RNA
tggctttcccccaggtctacatgttcctggtgaaatggcaggacctgtcggagaaggtggtgtaccg

SEQ ID NO: 13398 - RNA, 67 nt, synthetic construct
  source 1..67: mol_type = other RNA
tggctttcccccaggtttacatgttcctggtgaaatggcaggacctgtcggagaaggtggtgtaccg

SEQ ID NO: 13399 - RNA, 67 nt, synthetic construct
  source 1..67: mol_type = other RNA
tggctttcccccaggtgtacatgttcctggtgaaatggcaggacctgtcggagaaggtggtataccg

SEQ ID NO: 13400 - RNA, 67 nt, synthetic construct
  source 1..67: mol_type = other RNA
tggctttcccccaggtgtacatgttcctggtgaaatggcaggacctgtcggagaaggtggtctaccg

SEQ ID NO: 13401 - RNA, 67 nt, synthetic construct
  source 1..67: mol_type = other RNA
tggctttcccccaggtgtacatgttcctggtgaaatggcaggacctgtcggagaaggtggtgtaccg

SEQ ID NO: 13402 - RNA, 67 nt, synthetic construct
  source 1..67: mol_type = other RNA
tggctttcccccaggtgtacatgttcctggtgaaatggcaggacctgtcggagaaggtggtttaccg

SEQ ID NO: 13403 - RNA, 67 nt, synthetic construct
  source 1..67: mol_type = other RNA
tggctttcccccaggtttacatgttcctggtgaaatggcaggacctgtcggagaaggtggtataccg

SEQ ID NO: 13404 - RNA, 67 nt, synthetic construct
  source 1..67: mol_type = other RNA
tggctttcccccaggtttacatgttcctggtgaaatggcaggacctgtcggagaaggtggtctaccg

SEQ ID NO: 13405 - RNA, 67 nt, synthetic construct
  source 1..67: mol_type = other RNA
tggctttcccccaggtatacatgttcctggtgaaatggcaggacctgtcggagaaggtggtataccg

SEQ ID NO: 13406 - RNA, 67 nt, synthetic construct
  source 1..67: mol_type = other RNA
tggctttcccccaggtctacatgttcctggtgaaatggcaggacctgtcggagaaggtggtttaccg

SEQ ID NO: 13407 - RNA, 67 nt, synthetic construct
  source 1..67: mol_type = other RNA
tggctttcccccaggtatacatgttcctggtgaaatggcaggacctgtcggagaaggtggtctaccg

SEQ ID NO: 13408 - RNA, 67 nt, synthetic construct
  source 1..67: mol_type = other RNA
tggctttcccccaggtttacatgttcctggtgaaatggcaggacctgtcggagaaggtggtttaccg

SEQ ID NO: 13409 - RNA, 68 nt, synthetic construct
  source 1..68: mol_type = other RNA
ctggctttcccccaggtgtacatgttcctggtgaaatggcaggacctgtcggagaaggtggtttaccg

SEQ ID NO: 13410 - RNA, 68 nt, synthetic construct
  source 1..68: mol_type = other RNA
ctggctttcccccaggtctacatgttcctggtgaaatggcaggacctgtcggagaaggtggtctaccg

SEQ ID NO: 13411 - RNA, 68 nt, synthetic construct
  source 1..68: mol_type = other RNA
ctggctttcccccaggtttacatgttcctggtgaaatggcaggacctgtcggagaaggtggtataccg

SEQ ID NO: 13412 - RNA, 68 nt, synthetic construct
  source 1..68: mol_type = other RNA
ctggctttcccccaggtatacatgttcctggtgaaatggcaggacctgtcggagaaggtggtataccg

SEQ ID NO: 13413 - RNA, 68 nt, synthetic construct
  source 1..68: mol_type = other RNA
ctggctttcccccaggtatacatgttcctggtgaaatggcaggacctgtcggagaaggtggtctaccg

SEQ ID NO: 13414 - RNA, 68 nt, synthetic construct
  source 1..68: mol_type = other RNA
ctggctttcccccaggtatacatgttcctggtgaaatggcaggacctgtcggagaaggtggtgtaccg

SEQ ID NO: 13415 - RNA, 68 nt, synthetic construct
  source 1..68: mol_type = other RNA
ctggctttcccccaggtttacatgttcctggtgaaatggcaggacctgtcggagaaggtggtgtaccg

SEQ ID NO: 13416 - RNA, 68 nt, synthetic construct
  source 1..68: mol_type = other RNA
ctggctttcccccaggtctacatgttcctggtgaaatggcaggacctgtcggagaaggtggtataccg

SEQ ID NO: 13417 - RNA, 68 nt, synthetic construct
  source 1..68: mol_type = other RNA
ctggctttcccccaggtttacatgttcctggtgaaatggcaggacctgtcggagaaggtggtttaccg

SEQ ID NO: 13418 - RNA, 68 nt, synthetic construct
  source 1..68: mol_type = other RNA
ctggctttcccccaggtctacatgttcctggtgaaatggcaggacctgtcggagaaggtggtgtaccg

SEQ ID NO: 13419 - RNA, 68 nt, synthetic construct
  source 1..68: mol_type = other RNA
ctggctttcccccaggtatacatgttcctggtgaaatggcaggacctgtcggagaaggtggtttaccg

SEQ ID NO: 13420 - RNA, 68 nt, synthetic construct
  source 1..68: mol_type = other RNA
ctggctttcccccaggtctacatgttcctggtgaaatggcaggacctgtcggagaaggtggtttaccg

SEQ ID NO: 13421 - RNA, 68 nt, synthetic construct
  source 1..68: mol_type = other RNA
ctggctttcccccaggtgtacatgttcctggtgaaatggcaggacctgtcggagaaggtggtataccg

SEQ ID NO: 13422 - RNA, 68 nt, synthetic construct
  source 1..68: mol_type = other RNA
ctggctttcccccaggtgtacatgttcctggtgaaatggcaggacctgtcggagaaggtggtctaccg

SEQ ID NO: 13423 - RNA, 68 nt, synthetic construct
  source 1..68: mol_type = other RNA
ctggctttcccccaggtttacatgttcctggtgaaatggcaggacctgtcggagaaggtggtctaccg

SEQ ID NO: 13424 - RNA, 68 nt, synthetic construct
  source 1..68: mol_type = other RNA
ctggctttcccccaggtgtacatgttcctggtgaaatggcaggacctgtcggagaaggtggtgtaccg

SEQ ID NO: 13425 - RNA, 69 nt, synthetic construct
  source 1..69: mol_type = other RNA
tctggctttcccccaggtgtacatgttcctggtgaaatggcaggacctgtcggagaaggtggtttaccg

SEQ ID NO: 13426 - RNA, 69 nt, synthetic construct
  source 1..69: mol_type = other RNA
tctggctttcccccaggtatacatgttcctggtgaaatggcaggacctgtcggagaaggtggtataccg

SEQ ID NO: 13427 - RNA, 69 nt, synthetic construct
  source 1..69: mol_type = other RNA
tctggctttcccccaggtatacatgttcctggtgaaatggcaggacctgtcggagaaggtggtctaccg

SEQ ID NO: 13428 - RNA, 69 nt, synthetic construct
  source 1..69: mol_type = other RNA
tctggctttcccccaggtatacatgttcctggtgaaatggcaggacctgtcggagaaggtggtgtaccg

SEQ ID NO: 13429 - RNA, 69 nt, synthetic construct
  source 1..69: mol_type = other RNA
tctggctttcccccaggtatacatgttcctggtgaaatggcaggacctgtcggagaaggtggtttaccg

SEQ ID NO: 13430 - RNA, 69 nt, synthetic construct
  source 1..69: mol_type = other RNA
tctggctttcccccaggtctacatgttcctggtgaaatggcaggacctgtcggagaaggtggtataccg

SEQ ID NO: 13431 - RNA, 69 nt, synthetic construct
  source 1..69: mol_type = other RNA
tctggctttcccccaggtctacatgttcctggtgaaatggcaggacctgtcggagaaggtggtgtaccg

SEQ ID NO: 13432 - RNA, 69 nt, synthetic construct
  source 1..69: mol_type = other RNA
tctggctttcccccaggtctacatgttcctggtgaaatggcaggacctgtcggagaaggtggtctaccg

SEQ ID NO: 13433 - RNA, 69 nt, synthetic construct
  source 1..69: mol_type = other RNA
tctggctttcccccaggtgtacatgttcctggtgaaatggcaggacctgtcggagaaggtggtataccg

SEQ ID NO: 13434 - RNA, 69 nt, synthetic construct
  source 1..69: mol_type = other RNA
tctggctttcccccaggtgtacatgttcctggtgaaatggcaggacctgtcggagaaggtggtctaccg

SEQ ID NO: 13435 - RNA, 69 nt, synthetic construct
  source 1..69: mol_type = other RNA
tctggctttcccccaggtgtacatgttcctggtgaaatggcaggacctgtcggagaaggtggtgtaccg

SEQ ID NO: 13436 - RNA, 69 nt, synthetic construct
  source 1..69: mol_type = other RNA
tctggctttcccccaggtttacatgttcctggtgaaatggcaggacctgtcggagaaggtggtctaccg

SEQ ID NO: 13437 - RNA, 69 nt, synthetic construct
  source 1..69: mol_type = other RNA
tctggctttcccccaggtttacatgttcctggtgaaatggcaggacctgtcggagaaggtggtgtaccg

SEQ ID NO: 13438 - RNA, 69 nt, synthetic construct
  source 1..69: mol_type = other RNA
tctggctttcccccaggtttacatgttcctggtgaaatggcaggacctgtcggagaaggtggtttaccg

SEQ ID NO: 13439 - RNA, 69 nt, synthetic construct
  source 1..69: mol_type = other RNA
tctggctttcccccaggtctacatgttcctggtgaaatggcaggacctgtcggagaaggtggtttaccg

SEQ ID NO: 13440 - RNA, 69 nt, synthetic construct
  source 1..69: mol_type = other RNA
tctggctttcccccaggtttacatgttcctggtgaaatggcaggacctgtcggagaaggtggtataccg

SEQ ID NO: 13441 - RNA, 70 nt, synthetic construct
  source 1..70: mol_type = other RNA
ctctggctttcccccaggtgtacatgttcctggtgaaatggcaggacctgtcggagaaggtggtttaccg

SEQ ID NO: 13442 - RNA, 70 nt, synthetic construct
  source 1..70: mol_type = other RNA
ctctggctttcccccaggtatacatgttcctggtgaaatggcaggacctgtcggagaaggtggtgtaccg

SEQ ID NO: 13443 - RNA, 70 nt, synthetic construct
  source 1..70: mol_type = other RNA
ctctggctttcccccaggtatacatgttcctggtgaaatggcaggacctgtcggagaaggtggtttaccg

SEQ ID NO: 13444 - RNA, 70 nt, synthetic construct
  source 1..70: mol_type = other RNA
ctctggctttcccccaggtctacatgttcctggtgaaatggcaggacctgtcggagaaggtggtataccg

SEQ ID NO: 13445 - RNA, 70 nt, synthetic construct
  source 1..70: mol_type = other RNA
ctctggctttcccccaggtctacatgttcctggtgaaatggcaggacctgtcggagaaggtggtgtaccg

SEQ ID NO: 13446 - RNA, 70 nt, synthetic construct
  source 1..70: mol_type = other RNA
ctctggctttcccccaggtatacatgttcctggtgaaatggcaggacctgtcggagaaggtggtataccg

SEQ ID NO: 13447 - RNA, 70 nt, synthetic construct
  source 1..70: mol_type = other RNA
ctctggctttcccccaggtgtacatgttcctggtgaaatggcaggacctgtcggagaaggtggtataccg

SEQ ID NO: 13448 - RNA, 70 nt, synthetic construct
  source 1..70: mol_type = other RNA
ctctggctttcccccaggtgtacatgttcctggtgaaatggcaggacctgtcggagaaggtggtctaccg

SEQ ID NO: 13449 - RNA, 70 nt, synthetic construct
  source 1..70: mol_type = other RNA
ctctggctttcccccaggtttacatgttcctggtgaaatggcaggacctgtcggagaaggtggtctaccg

SEQ ID NO: 13450 - RNA, 70 nt, synthetic construct
  source 1..70: mol_type = other RNA
ctctggctttcccccaggtttacatgttcctggtgaaatggcaggacctgtcggagaaggtggtgtaccg

SEQ ID NO: 13451 - RNA, 70 nt, synthetic construct
  source 1..70: mol_type = other RNA
ctctggctttcccccaggtatacatgttcctggtgaaatggcaggacctgtcggagaaggtggtctaccg

SEQ ID NO: 13452 - RNA, 70 nt, synthetic construct
  source 1..70: mol_type = other RNA
ctctggctttcccccaggtttacatgttcctggtgaaatggcaggacctgtcggagaaggtggtataccg

SEQ ID NO: 13453 - RNA, 70 nt, synthetic construct
  source 1..70: mol_type = other RNA
ctctggctttcccccaggtctacatgttcctggtgaaatggcaggacctgtcggagaaggtggtttaccg

SEQ ID NO: 13454 - RNA, 70 nt, synthetic construct
  source 1..70: mol_type = other RNA
ctctggctttcccccaggtctacatgttcctggtgaaatggcaggacctgtcggagaaggtggtctaccg

SEQ ID NO: 13455 - RNA, 70 nt, synthetic construct
  source 1..70: mol_type = other RNA
ctctggctttcccccaggtgtacatgttcctggtgaaatggcaggacctgtcggagaaggtggtgtaccg

SEQ ID NO: 13456 - RNA, 70 nt, synthetic construct
  source 1..70: mol_type = other RNA
ctctggctttcccccaggtttacatgttcctggtgaaatggcaggacctgtcggagaaggtggtttaccg

SEQ ID NO: 13457 - RNA, 71 nt, synthetic construct
  source 1..71: mol_type = other RNA
actctggctttcccccaggtatacatgttcctggtgaaatggcaggacctgtcggagaaggtggtataccg

SEQ ID NO: 13458 - RNA, 71 nt, synthetic construct
  source 1..71: mol_type = other RNA
actctggctttcccccaggtttacatgttcctggtgaaatggcaggacctgtcggagaaggtggtttaccg

SEQ ID NO: 13459 - RNA, 71 nt, synthetic construct
  source 1..71: mol_type = other RNA
actctggctttcccccaggtttacatgttcctggtgaaatggcaggacctgtcggagaaggtggtgtaccg

SEQ ID NO: 13460 - RNA, 71 nt, synthetic construct
  source 1..71: mol_type = other RNA
actctggctttcccccaggtttacatgttcctggtgaaatggcaggacctgtcggagaaggtggtctaccg

SEQ ID NO: 13461 - RNA, 71 nt, synthetic construct
  source 1..71: mol_type = other RNA
actctggctttcccccaggtgtacatgttcctggtgaaatggcaggacctgtcggagaaggtggtttaccg

SEQ ID NO: 13462 - RNA, 71 nt, synthetic construct
  source 1..71: mol_type = other RNA
actctggctttcccccaggtttacatgttcctggtgaaatggcaggacctgtcggagaaggtggtataccg

SEQ ID NO: 13463 - RNA, 71 nt, synthetic construct
  source 1..71: mol_type = other RNA
actctggctttcccccaggtgtacatgttcctggtgaaatggcaggacctgtcggagaaggtggtataccg

SEQ ID NO: 13464 - RNA, 71 nt, synthetic construct
  source 1..71: mol_type = other RNA
actctggctttcccccaggtatacatgttcctggtgaaatggcaggacctgtcggagaaggtggtctaccg

SEQ ID NO: 13465 - RNA, 71 nt, synthetic construct
  source 1..71: mol_type = other RNA
actctggctttcccccaggtatacatgttcctggtgaaatggcaggacctgtcggagaaggtggtgtaccg

SEQ ID NO: 13466 - RNA, 71 nt, synthetic construct
  source 1..71: mol_type = other RNA
actctggctttcccccaggtatacatgttcctggtgaaatggcaggacctgtcggagaaggtggtttaccg

SEQ ID NO: 13467 - RNA, 71 nt, synthetic construct
  source 1..71: mol_type = other RNA
actctggctttcccccaggtctacatgttcctggtgaaatggcaggacctgtcggagaaggtggtataccg

SEQ ID NO: 13468 - RNA, 71 nt, synthetic construct
  source 1..71: mol_type = other RNA
actctggctttcccccaggtctacatgttcctggtgaaatggcaggacctgtcggagaaggtggtctaccg

SEQ ID NO: 13469 - RNA, 71 nt, synthetic construct
  source 1..71: mol_type = other RNA
actctggctttcccccaggtctacatgttcctggtgaaatggcaggacctgtcggagaaggtggtgtaccg

SEQ ID NO: 13470 - RNA, 71 nt, synthetic construct
  source 1..71: mol_type = other RNA
actctggctttcccccaggtctacatgttcctggtgaaatggcaggacctgtcggagaaggtggtttaccg

SEQ ID NO: 13471 - RNA, 71 nt, synthetic construct
  source 1..71: mol_type = other RNA
actctggctttcccccaggtgtacatgttcctggtgaaatggcaggacctgtcggagaaggtggtctaccg

SEQ ID NO: 13472 - RNA, 71 nt, synthetic construct
  source 1..71: mol_type = other RNA
actctggctttcccccaggtgtacatgttcctggtgaaatggcaggacctgtcggagaaggtggtgtaccg

SEQ ID NO: 13473 - RNA, 72 nt, synthetic construct
  source 1..72: mol_type = other RNA
gactctggctttcccccaggtctacatgttcctggtgaaatggcaggacctgtcggagaaggtggtctaccg

SEQ ID NO: 13474 - RNA, 72 nt, synthetic construct
  source 1..72: mol_type = other RNA
gactctggctttcccccaggtatacatgttcctggtgaaatggcaggacctgtcggagaaggtggtgtaccg

SEQ ID NO: 13475 - RNA, 72 nt, synthetic construct
  source 1..72: mol_type = other RNA
gactctggctttcccccaggtatacatgttcctggtgaaatggcaggacctgtcggagaaggtggtctaccg

SEQ ID NO: 13476 - RNA, 72 nt, synthetic construct
  source 1..72: mol_type = other RNA
gactctggctttcccccaggtatacatgttcctggtgaaatggcaggacctgtcggagaaggtggtttaccg

SEQ ID NO: 13477 - RNA, 72 nt, synthetic construct
  source 1..72: mol_type = other RNA
gactctggctttcccccaggtatacatgttcctggtgaaatggcaggacctgtcggagaaggtggtataccg

SEQ ID NO: 13478 - RNA, 72 nt, synthetic construct
  source 1..72: mol_type = other RNA
gactctggctttcccccaggtgtacatgttcctggtgaaatggcaggacctgtcggagaaggtggtctaccg

SEQ ID NO: 13479 - RNA, 72 nt, synthetic construct
  source 1..72: mol_type = other RNA
gactctggctttcccccaggtttacatgttcctggtgaaatggcaggacctgtcggagaaggtggtttaccg

SEQ ID NO: 13480 - RNA, 72 nt, synthetic construct
  source 1..72: mol_type = other RNA
gactctggctttcccccaggtctacatgttcctggtgaaatggcaggacctgtcggagaaggtggtataccg

SEQ ID NO: 13481 - RNA, 72 nt, synthetic construct
  source 1..72: mol_type = other RNA
gactctggctttcccccaggtctacatgttcctggtgaaatggcaggacctgtcggagaaggtggtgtaccg

SEQ ID NO: 13482 - RNA, 72 nt, synthetic construct
  source 1..72: mol_type = other RNA
gactctggctttcccccaggtctacatgttcctggtgaaatggcaggacctgtcggagaaggtggtttaccg

SEQ ID NO: 13483 - RNA, 72 nt, synthetic construct
  source 1..72: mol_type = other RNA
gactctggctttcccccaggtgtacatgttcctggtgaaatggcaggacctgtcggagaaggtggtttaccg

SEQ ID NO: 13484 - RNA, 72 nt, synthetic construct
  source 1..72: mol_type = other RNA
gactctggctttcccccaggtttacatgttcctggtgaaatggcaggacctgtcggagaaggtggtataccg

SEQ ID NO: 13485 - RNA, 72 nt, synthetic construct
  source 1..72: mol_type = other RNA
gactctggctttcccccaggtttacatgttcctggtgaaatggcaggacctgtcggagaaggtggtctaccg

SEQ ID NO: 13486 - RNA, 72 nt, synthetic construct
  source 1..72: mol_type = other RNA
gactctggctttcccccaggtttacatgttcctggtgaaatggcaggacctgtcggagaaggtggtgtaccg

SEQ ID NO: 13487 - RNA, 72 nt, synthetic construct
  source 1..72: mol_type = other RNA
gactctggctttcccccaggtgtacatgttcctggtgaaatggcaggacctgtcggagaaggtggtataccg

SEQ ID NO: 13488 - RNA, 72 nt, synthetic construct
  source 1..72: mol_type = other RNA
gactctggctttcccccaggtgtacatgttcctggtgaaatggcaggacctgtcggagaaggtggtgtaccg

SEQ ID NO: 13489 - RNA, 73 nt, synthetic construct
  source 1..73: mol_type = other RNA
cgactctggctttcccccaggtttacatgttcctggtgaaatggcaggacctgtcggagaaggtggtataccg

SEQ ID NO: 13490 - RNA, 73 nt, synthetic construct
  source 1..73: mol_type = other RNA
cgactctggctttcccccaggtgtacatgttcctggtgaaatggcaggacctgtcggagaaggtggtttaccg

SEQ ID NO: 13491 - RNA, 73 nt, synthetic construct
  source 1..73: mol_type = other RNA
cgactctggctttcccccaggtgtacatgttcctggtgaaatggcaggacctgtcggagaaggtggtgtaccg

SEQ ID NO: 13492 - RNA, 73 nt, synthetic construct
  source 1..73: mol_type = other RNA
cgactctggctttcccccaggtgtacatgttcctggtgaaatggcaggacctgtcggagaaggtggtataccg

SEQ ID NO: 13493 - RNA, 73 nt, synthetic construct
  source 1..73: mol_type = other RNA
cgactctggctttcccccaggtctacatgttcctggtgaaatggcaggacctgtcggagaaggtggtttaccg

SEQ ID NO: 13494 - RNA, 73 nt, synthetic construct
  source 1..73: mol_type = other RNA
cgactctggctttcccccaggtctacatgttcctggtgaaatggcaggacctgtcggagaaggtggtctaccg

SEQ ID NO: 13495 - RNA, 73 nt, synthetic construct
  source 1..73: mol_type = other RNA
cgactctggctttcccccaggtatacatgttcctggtgaaatggcaggacctgtcggagaaggtggtttaccg

SEQ ID NO: 13496 - RNA, 73 nt, synthetic construct
  source 1..73: mol_type = other RNA
cgactctggctttcccccaggtatacatgttcctggtgaaatggcaggacctgtcggagaaggtggtgtaccg

SEQ ID NO: 13497 - RNA, 73 nt, synthetic construct
  source 1..73: mol_type = other RNA
cgactctggctttcccccaggtatacatgttcctggtgaaatggcaggacctgtcggagaaggtggtctaccg

SEQ ID NO: 13498 - RNA, 73 nt, synthetic construct
  source 1..73: mol_type = other RNA
cgactctggctttcccccaggtttacatgttcctggtgaaatggcaggacctgtcggagaaggtggtctaccg

SEQ ID NO: 13499 - RNA, 73 nt, synthetic construct
  source 1..73: mol_type = other RNA
cgactctggctttcccccaggtttacatgttcctggtgaaatggcaggacctgtcggagaaggtggtgtaccg

SEQ ID NO: 13500 - RNA, 73 nt, synthetic construct
  source 1..73: mol_type = other RNA
cgactctggctttcccccaggtctacatgttcctggtgaaatggcaggacctgtcggagaaggtggtgtaccg

SEQ ID NO: 13501 - RNA, 73 nt, synthetic construct
  source 1..73: mol_type = other RNA
cgactctggctttcccccaggtatacatgttcctggtgaaatggcaggacctgtcggagaaggtggtataccg

SEQ ID NO: 13502 - RNA, 73 nt, synthetic construct
  source 1..73: mol_type = other RNA
cgactctggctttcccccaggtgtacatgttcctggtgaaatggcaggacctgtcggagaaggtggtctaccg

SEQ ID NO: 13503 - RNA, 73 nt, synthetic construct
  source 1..73: mol_type = other RNA
cgactctggctttcccccaggtctacatgttcctggtgaaatggcaggacctgtcggagaaggtggtataccg

SEQ ID NO: 13504 - RNA, 73 nt, synthetic construct
  source 1..73: mol_type = other RNA
cgactctggctttcccccaggtttacatgttcctggtgaaatggcaggacctgtcggagaaggtggtttaccg

SEQ ID NO: 13505 - RNA, 74 nt, synthetic construct
  source 1..74: mol_type = other RNA
ccgactctggctttcccccaggtttacatgttcctggtgaaatggcaggacctgtcggagaaggtggtgtaccg

SEQ ID NO: 13506 - RNA, 74 nt, synthetic construct
  source 1..74: mol_type = other RNA
ccgactctggctttcccccaggtatacatgttcctggtgaaatggcaggacctgtcggagaaggtggtataccg

SEQ ID NO: 13507 - RNA, 74 nt, synthetic construct
  source 1..74: mol_type = other RNA
ccgactctggctttcccccaggtatacatgttcctggtgaaatggcaggacctgtcggagaaggtggtctaccg

SEQ ID NO: 13508 - RNA, 74 nt, synthetic construct
  source 1..74: mol_type = other RNA
ccgactctggctttcccccaggtatacatgttcctggtgaaatggcaggacctgtcggagaaggtggtgtaccg

SEQ ID NO: 13509 - RNA, 74 nt, synthetic construct
  source 1..74: mol_type = other RNA
ccgactctggctttcccccaggtatacatgttcctggtgaaatggcaggacctgtcggagaaggtggtttaccg

SEQ ID NO: 13510 - RNA, 74 nt, synthetic construct
  source 1..74: mol_type = other RNA
ccgactctggctttcccccaggtctacatgttcctggtgaaatggcaggacctgtcggagaaggtggtataccg

SEQ ID NO: 13511 - RNA, 74 nt, synthetic construct
  source 1..74: mol_type = other RNA
ccgactctggctttcccccaggtctacatgttcctggtgaaatggcaggacctgtcggagaaggtggtgtaccg

SEQ ID NO: 13512 - RNA, 74 nt, synthetic construct
  source 1..74: mol_type = other RNA
ccgactctggctttcccccaggtgtacatgttcctggtgaaatggcaggacctgtcggagaaggtggtgtaccg

SEQ ID NO: 13513 - RNA, 74 nt, synthetic construct
  source 1..74: mol_type = other RNA
ccgactctggctttcccccaggtgtacatgttcctggtgaaatggcaggacctgtcggagaaggtggtataccg

SEQ ID NO: 13514 - RNA, 74 nt, synthetic construct
  source 1..74: mol_type = other RNA
ccgactctggctttcccccaggtgtacatgttcctggtgaaatggcaggacctgtcggagaaggtggtctaccg

SEQ ID NO: 13515 - RNA, 74 nt, synthetic construct
  source 1..74: mol_type = other RNA
ccgactctggctttcccccaggtgtacatgttcctggtgaaatggcaggacctgtcggagaaggtggtttaccg

SEQ ID NO: 13516 - RNA, 74 nt, synthetic construct
  source 1..74: mol_type = other RNA
ccgactctggctttcccccaggtttacatgttcctggtgaaatggcaggacctgtcggagaaggtggtataccg

SEQ ID NO: 13517 - RNA, 74 nt, synthetic construct
  source 1..74: mol_type = other RNA
ccgactctggctttcccccaggtttacatgttcctggtgaaatggcaggacctgtcggagaaggtggtctaccg

SEQ ID NO: 13518 - RNA, 74 nt, synthetic construct
  source 1..74: mol_type = other RNA
ccgactctggctttcccccaggtttacatgttcctggtgaaatggcaggacctgtcggagaaggtggtttaccg

SEQ ID NO: 13519 - RNA, 74 nt, synthetic construct
  source 1..74: mol_type = other RNA
ccgactctggctttcccccaggtctacatgttcctggtgaaatggcaggacctgtcggagaaggtggtttaccg

SEQ ID NO: 13520 - RNA, 74 nt, synthetic construct
  source 1..74: mol_type = other RNA
ccgactctggctttcccccaggtctacatgttcctggtgaaatggcaggacctgtcggagaaggtggtctaccg

SEQ ID NO: 13521 - RNA, 75 nt, synthetic construct
  source 1..75: mol_type = other RNA
cccgactctggctttcccccaggtttacatgttcctggtgaaatggcaggacctgtcggagaaggtggtttaccg

SEQ ID NO: 13522 - RNA, 75 nt, synthetic construct
  source 1..75: mol_type = other RNA
cccgactctggctttcccccaggtctacatgttcctggtgaaatggcaggacctgtcggagaaggtggtttaccg

SEQ ID NO: 13523 - RNA, 75 nt, synthetic construct
  source 1..75: mol_type = other RNA
cccgactctggctttcccccaggtgtacatgttcctggtgaaatggcaggacctgtcggagaaggtggtttaccg

SEQ ID NO: 13524 - RNA, 75 nt, synthetic construct
  source 1..75: mol_type = other RNA
cccgactctggctttcccccaggtgtacatgttcctggtgaaatggcaggacctgtcggagaaggtggtgtaccg

SEQ ID NO: 13525 - RNA, 75 nt, synthetic construct
  source 1..75: mol_type = other RNA
cccgactctggctttcccccaggtgtacatgttcctggtgaaatggcaggacctgtcggagaaggtggtctaccg

SEQ ID NO: 13526 - RNA, 75 nt, synthetic construct
  source 1..75: mol_type = other RNA
cccgactctggctttcccccaggtgtacatgttcctggtgaaatggcaggacctgtcggagaaggtggtataccg

SEQ ID NO: 13527 - RNA, 75 nt, synthetic construct
  source 1..75: mol_type = other RNA
cccgactctggctttcccccaggtctacatgttcctggtgaaatggcaggacctgtcggagaaggtggtgtaccg

SEQ ID NO: 13528 - RNA, 75 nt, synthetic construct
  source 1..75: mol_type = other RNA
cccgactctggctttcccccaggtttacatgttcctggtgaaatggcaggacctgtcggagaaggtggtctaccg

SEQ ID NO: 13529 - RNA, 75 nt, synthetic construct
  source 1..75: mol_type = other RNA
cccgactctggctttcccccaggtttacatgttcctggtgaaatggcaggacctgtcggagaaggtggtgtaccg

SEQ ID NO: 13530 - RNA, 75 nt, synthetic construct
  source 1..75: mol_type = other RNA
cccgactctggctttcccccaggtatacatgttcctggtgaaatggcaggacctgtcggagaaggtggtttaccg

SEQ ID NO: 13531 - RNA, 75 nt, synthetic construct
  source 1..75: mol_type = other RNA
cccgactctggctttcccccaggtatacatgttcctggtgaaatggcaggacctgtcggagaaggtggtgtaccg

SEQ ID NO: 13532 - RNA, 75 nt, synthetic construct
  source 1..75: mol_type = other RNA
cccgactctggctttcccccaggtatacatgttcctggtgaaatggcaggacctgtcggagaaggtggtctaccg

SEQ ID NO: 13533 - RNA, 75 nt, synthetic construct
  source 1..75: mol_type = other RNA
cccgactctggctttcccccaggtatacatgttcctggtgaaatggcaggacctgtcggagaaggtggtataccg

SEQ ID NO: 13534 - RNA, 75 nt, synthetic construct
  source 1..75: mol_type = other RNA
cccgactctggctttcccccaggtttacatgttcctggtgaaatggcaggacctgtcggagaaggtggtataccg

SEQ ID NO: 13535 - RNA, 75 nt, synthetic construct
  source 1..75: mol_type = other RNA
cccgactctggctttcccccaggtctacatgttcctggtgaaatggcaggacctgtcggagaaggtggtctaccg

SEQ ID NO: 13536 - RNA, 75 nt, synthetic construct
  source 1..75: mol_type = other RNA
cccgactctggctttcccccaggtctacatgttcctggtgaaatggcaggacctgtcggagaaggtggtataccg

SEQ ID NO: 13537 - RNA, 76 nt, synthetic construct
  source 1..76: mol_type = other RNA
ccccgactctggctttcccccaggtctacatgttcctggtgaaatggcaggacctgtcggagaaggtggtctaccg

SEQ ID NO: 13538 - RNA, 76 nt, synthetic construct
  source 1..76: mol_type = other RNA
ccccgactctggctttcccccaggtctacatgttcctggtgaaatggcaggacctgtcggagaaggtggtataccg

SEQ ID NO: 13539 - RNA, 76 nt, synthetic construct
  source 1..76: mol_type = other RNA
ccccgactctggctttcccccaggtatacatgttcctggtgaaatggcaggacctgtcggagaaggtggtttaccg

SEQ ID NO: 13540 - RNA, 76 nt, synthetic construct
  source 1..76: mol_type = other RNA
ccccgactctggctttcccccaggtatacatgttcctggtgaaatggcaggacctgtcggagaaggtggtgtaccg

SEQ ID NO: 13541 - RNA, 76 nt, synthetic construct
  source 1..76: mol_type = other RNA
ccccgactctggctttcccccaggtatacatgttcctggtgaaatggcaggacctgtcggagaaggtggtctaccg

SEQ ID NO: 13542 - RNA, 76 nt, synthetic construct
  source 1..76: mol_type = other RNA
ccccgactctggctttcccccaggtatacatgttcctggtgaaatggcaggacctgtcggagaaggtggtataccg

SEQ ID NO: 13543 - RNA, 76 nt, synthetic construct
  source 1..76: mol_type = other RNA
ccccgactctggctttcccccaggtttacatgttcctggtgaaatggcaggacctgtcggagaaggtggtgtaccg

SEQ ID NO: 13544 - RNA, 76 nt, synthetic construct
  source 1..76: mol_type = other RNA
ccccgactctggctttcccccaggtctacatgttcctggtgaaatggcaggacctgtcggagaaggtggtttaccg

SEQ ID NO: 13545 - RNA, 76 nt, synthetic construct
  source 1..76: mol_type = other RNA
ccccgactctggctttcccccaggtttacatgttcctggtgaaatggcaggacctgtcggagaaggtggtataccg

SEQ ID NO: 13546 - RNA, 76 nt, synthetic construct
  source 1..76: mol_type = other RNA
ccccgactctggctttcccccaggtgtacatgttcctggtgaaatggcaggacctgtcggagaaggtggtctaccg

SEQ ID NO: 13547 - RNA, 76 nt, synthetic construct
  source 1..76: mol_type = other RNA
ccccgactctggctttcccccaggtttacatgttcctggtgaaatggcaggacctgtcggagaaggtggtctaccg

SEQ ID NO: 13548 - RNA, 76 nt, synthetic construct
  source 1..76: mol_type = other RNA
ccccgactctggctttcccccaggtctacatgttcctggtgaaatggcaggacctgtcggagaaggtggtgtaccg

SEQ ID NO: 13549 - RNA, 76 nt, synthetic construct
  source 1..76: mol_type = other RNA
ccccgactctggctttcccccaggtttacatgttcctggtgaaatggcaggacctgtcggagaaggtggtttaccg

SEQ ID NO: 13550 - RNA, 76 nt, synthetic construct
  source 1..76: mol_type = other RNA
ccccgactctggctttcccccaggtgtacatgttcctggtgaaatggcaggacctgtcggagaaggtggtttaccg

SEQ ID NO: 13551 - RNA, 76 nt, synthetic construct
  source 1..76: mol_type = other RNA
ccccgactctggctttcccccaggtgtacatgttcctggtgaaatggcaggacctgtcggagaaggtggtgtaccg

SEQ ID NO: 13552 - RNA, 76 nt, synthetic construct
  source 1..76: mol_type = other RNA
ccccgactctggctttcccccaggtgtacatgttcctggtgaaatggcaggacctgtcggagaaggtggtataccg

SEQ ID NO: 13553 - RNA, 77 nt, synthetic construct
  source 1..77: mol_type = other RNA
cccccgactctggctttcccccaggtttacatgttcctggtgaaatggcaggacctgtcggagaaggtggtgtaccg

SEQ ID NO: 13554 - RNA, 77 nt, synthetic construct
  source 1..77: mol_type = other RNA
cccccgactctggctttcccccaggtttacatgttcctggtgaaatggcaggacctgtcggagaaggtggtataccg

SEQ ID NO: 13555 - RNA, 77 nt, synthetic construct
  source 1..77: mol_type = other RNA
cccccgactctggctttcccccaggtctacatgttcctggtgaaatggcaggacctgtcggagaaggtggtgtaccg

SEQ ID NO: 13556 - RNA, 77 nt, synthetic construct
  source 1..77: mol_type = other RNA
cccccgactctggctttcccccaggtatacatgttcctggtgaaatggcaggacctgtcggagaaggtggtataccg

SEQ ID NO: 13557 - RNA, 77 nt, synthetic construct
  source 1..77: mol_type = other RNA
cccccgactctggctttcccccaggtttacatgttcctggtgaaatggcaggacctgtcggagaaggtggtctaccg

SEQ ID NO: 13558 - RNA, 77 nt, synthetic construct
  source 1..77: mol_type = other RNA
cccccgactctggctttcccccaggtgtacatgttcctggtgaaatggcaggacctgtcggagaaggtggtttaccg

SEQ ID NO: 13559 - RNA, 77 nt, synthetic construct
  source 1..77: mol_type = other RNA
cccccgactctggctttcccccaggtgtacatgttcctggtgaaatggcaggacctgtcggagaaggtggtgtaccg

SEQ ID NO: 13560 - RNA, 77 nt, synthetic construct
  source 1..77: mol_type = other RNA
cccccgactctggctttcccccaggtttacatgttcctggtgaaatggcaggacctgtcggagaaggtggtttaccg

SEQ ID NO: 13561 - RNA, 77 nt, synthetic construct
  source 1..77: mol_type = other RNA
cccccgactctggctttcccccaggtgtacatgttcctggtgaaatggcaggacctgtcggagaaggtggtctaccg

SEQ ID NO: 13562 - RNA, 77 nt, synthetic construct
  source 1..77: mol_type = other RNA
cccccgactctggctttcccccaggtgtacatgttcctggtgaaatggcaggacctgtcggagaaggtggtataccg

SEQ ID NO: 13563 - RNA, 77 nt, synthetic construct
  source 1..77: mol_type = other RNA
cccccgactctggctttcccccaggtctacatgttcctggtgaaatggcaggacctgtcggagaaggtggtttaccg

SEQ ID NO: 13564 - RNA, 77 nt, synthetic construct
  source 1..77: mol_type = other RNA
cccccgactctggctttcccccaggtctacatgttcctggtgaaatggcaggacctgtcggagaaggtggtctaccg

SEQ ID NO: 13565 - RNA, 77 nt, synthetic construct
  source 1..77: mol_type = other RNA
cccccgactctggctttcccccaggtctacatgttcctggtgaaatggcaggacctgtcggagaaggtggtataccg

SEQ ID NO: 13566 - RNA, 77 nt, synthetic construct
  source 1..77: mol_type = other RNA
cccccgactctggctttcccccaggtatacatgttcctggtgaaatggcaggacctgtcggagaaggtggtttaccg

SEQ ID NO: 13567 - RNA, 77 nt, synthetic construct
  source 1..77: mol_type = other RNA
cccccgactctggctttcccccaggtatacatgttcctggtgaaatggcaggacctgtcggagaaggtggtgtaccg

SEQ ID NO: 13568 - RNA, 77 nt, synthetic construct
  source 1..77: mol_type = other RNA
cccccgactctggctttcccccaggtatacatgttcctggtgaaatggcaggacctgtcggagaaggtggtctaccg

SEQ ID NO: 13569 - RNA, 78 nt, synthetic construct
  source 1..78: mol_type = other RNA
tcccccgactctggctttcccccaggtttacatgttcctggtgaaatggcaggacctgtcggagaaggtggtataccg

SEQ ID NO: 13570 - RNA, 78 nt, synthetic construct
  source 1..78: mol_type = other RNA
tcccccgactctggctttcccccaggtttacatgttcctggtgaaatggcaggacctgtcggagaaggtggtttaccg

SEQ ID NO: 13571 - RNA, 78 nt, synthetic construct
  source 1..78: mol_type = other RNA
tcccccgactctggctttcccccaggtatacatgttcctggtgaaatggcaggacctgtcggagaaggtggtataccg

SEQ ID NO: 13572 - RNA, 78 nt, synthetic construct
  source 1..78: mol_type = other RNA
tcccccgactctggctttcccccaggtgtacatgttcctggtgaaatggcaggacctgtcggagaaggtggtttaccg

SEQ ID NO: 13573 - RNA, 78 nt, synthetic construct
  source 1..78: mol_type = other RNA
tcccccgactctggctttcccccaggtgtacatgttcctggtgaaatggcaggacctgtcggagaaggtggtgtaccg

SEQ ID NO: 13574 - RNA, 78 nt, synthetic construct
  source 1..78: mol_type = other RNA
tcccccgactctggctttcccccaggtgtacatgttcctggtgaaatggcaggacctgtcggagaaggtggtctaccg

SEQ ID NO: 13575 - RNA, 78 nt, synthetic construct
  source 1..78: mol_type = other RNA
tcccccgactctggctttcccccaggtgtacatgttcctggtgaaatggcaggacctgtcggagaaggtggtataccg

SEQ ID NO: 13576 - RNA, 78 nt, synthetic construct
  source 1..78: mol_type = other RNA
tcccccgactctggctttcccccaggtctacatgttcctggtgaaatggcaggacctgtcggagaaggtggtgtaccg

SEQ ID NO: 13577 - RNA, 78 nt, synthetic construct
  source 1..78: mol_type = other RNA
tcccccgactctggctttcccccaggtctacatgttcctggtgaaatggcaggacctgtcggagaaggtggtttaccg

SEQ ID NO: 13578 - RNA, 78 nt, synthetic construct
  source 1..78: mol_type = other RNA
tcccccgactctggctttcccccaggtctacatgttcctggtgaaatggcaggacctgtcggagaaggtggtataccg

SEQ ID NO: 13579 - RNA, 78 nt, synthetic construct
  source 1..78: mol_type = other RNA
tcccccgactctggctttcccccaggtatacatgttcctggtgaaatggcaggacctgtcggagaaggtggtttaccg

SEQ ID NO: 13580 - RNA, 78 nt, synthetic construct
  source 1..78: mol_type = other RNA
tcccccgactctggctttcccccaggtatacatgttcctggtgaaatggcaggacctgtcggagaaggtggtctaccg

SEQ ID NO: 13581 - RNA, 78 nt, synthetic construct
  source 1..78: mol_type = other RNA
tcccccgactctggctttcccccaggtctacatgttcctggtgaaatggcaggacctgtcggagaaggtggtctaccg

SEQ ID NO: 13582 - RNA, 78 nt, synthetic construct
  source 1..78: mol_type = other RNA
tcccccgactctggctttcccccaggtatacatgttcctggtgaaatggcaggacctgtcggagaaggtggtgtaccg

SEQ ID NO: 13583 - RNA, 78 nt, synthetic construct
  source 1..78: mol_type = other RNA
tcccccgactctggctttcccccaggtttacatgttcctggtgaaatggcaggacctgtcggagaaggtggtgtaccg

SEQ ID NO: 13584 - RNA, 78 nt, synthetic construct
  source 1..78: mol_type = other RNA
tcccccgactctggctttcccccaggtttacatgttcctggtgaaatggcaggacctgtcggagaaggtggtctaccg

SEQ ID NO: 13585 - RNA, 79 nt, synthetic construct
  source 1..79: mol_type = other RNA
gtcccccgactctggctttcccccaggtctacatgttcctggtgaaatggcaggacctgtcggagaaggtggtgtaccg

SEQ ID NO: 13586 - RNA, 79 nt, synthetic construct
  source 1..79: mol_type = other RNA
gtcccccgactctggctttcccccaggtgtacatgttcctggtgaaatggcaggacctgtcggagaaggtggtgtaccg

SEQ ID NO: 13587 - RNA, 79 nt, synthetic construct
  source 1..79: mol_type = other RNA
gtcccccgactctggctttcccccaggtgtacatgttcctggtgaaatggcaggacctgtcggagaaggtggtctaccg

SEQ ID NO: 13588 - RNA, 79 nt, synthetic construct
  source 1..79: mol_type = other RNA
gtcccccgactctggctttcccccaggtgtacatgttcctggtgaaatggcaggacctgtcggagaaggtggtataccg

SEQ ID NO: 13589 - RNA, 79 nt, synthetic construct
  source 1..79: mol_type = other RNA
gtcccccgactctggctttcccccaggtctacatgttcctggtgaaatggcaggacctgtcggagaaggtggtataccg

SEQ ID NO: 13590 - RNA, 79 nt, synthetic construct
  source 1..79: mol_type = other RNA
gtcccccgactctggctttcccccaggtttacatgttcctggtgaaatggcaggacctgtcggagaaggtggtgtaccg

SEQ ID NO: 13591 - RNA, 79 nt, synthetic construct
  source 1..79: mol_type = other RNA
gtcccccgactctggctttcccccaggtatacatgttcctggtgaaatggcaggacctgtcggagaaggtggtctaccg

SEQ ID NO: 13592 - RNA, 79 nt, synthetic construct
  source 1..79: mol_type = other RNA
gtcccccgactctggctttcccccaggtatacatgttcctggtgaaatggcaggacctgtcggagaaggtggtgtaccg

SEQ ID NO: 13593 - RNA, 79 nt, synthetic construct
  source 1..79: mol_type = other RNA
gtcccccgactctggctttcccccaggtctacatgttcctggtgaaatggcaggacctgtcggagaaggtggtctaccg

SEQ ID NO: 13594 - RNA, 79 nt, synthetic construct
  source 1..79: mol_type = other RNA
gtcccccgactctggctttcccccaggtctacatgttcctggtgaaatggcaggacctgtcggagaaggtggtttaccg

SEQ ID NO: 13595 - RNA, 79 nt, synthetic construct
  source 1..79: mol_type = other RNA
gtcccccgactctggctttcccccaggtttacatgttcctggtgaaatggcaggacctgtcggagaaggtggtctaccg

SEQ ID NO: 13596 - RNA, 79 nt, synthetic construct
  source 1..79: mol_type = other RNA
gtcccccgactctggctttcccccaggtatacatgttcctggtgaaatggcaggacctgtcggagaaggtggtttaccg

SEQ ID NO: 13597 - RNA, 79 nt, synthetic construct
  source 1..79: mol_type = other RNA
gtcccccgactctggctttcccccaggtttacatgttcctggtgaaatggcaggacctgtcggagaaggtggtttaccg

SEQ ID NO: 13598 - RNA, 79 nt, synthetic construct
  source 1..79: mol_type = other RNA
gtcccccgactctggctttcccccaggtttacatgttcctggtgaaatggcaggacctgtcggagaaggtggtataccg

SEQ ID NO: 13599 - RNA, 79 nt, synthetic construct
  source 1..79: mol_type = other RNA
gtcccccgactctggctttcccccaggtgtacatgttcctggtgaaatggcaggacctgtcggagaaggtggtttaccg

SEQ ID NO: 13600 - RNA, 79 nt, synthetic construct
  source 1..79: mol_type = other RNA
gtcccccgactctggctttcccccaggtatacatgttcctggtgaaatggcaggacctgtcggagaaggtggtataccg

SEQ ID NO: 13601 - RNA, 80 nt, synthetic construct
  source 1..80: mol_type = other RNA
ggtcccccgactctggctttcccccaggtatacatgttcctggtgaaatggcaggacctgtcggagaaggtggtataccg

SEQ ID NO: 13602 - RNA, 80 nt, synthetic construct
  source 1..80: mol_type = other RNA
ggtcccccgactctggctttcccccaggtatacatgttcctggtgaaatggcaggacctgtcggagaaggtggtgtaccg

SEQ ID NO: 13603 - RNA, 80 nt, synthetic construct
  source 1..80: mol_type = other RNA
ggtcccccgactctggctttcccccaggtttacatgttcctggtgaaatggcaggacctgtcggagaaggtggtctaccg

SEQ ID NO: 13604 - RNA, 80 nt, synthetic construct
  source 1..80: mol_type = other RNA
ggtcccccgactctggctttcccccaggtatacatgttcctggtgaaatggcaggacctgtcggagaaggtggtctaccg

SEQ ID NO: 13605 - RNA, 80 nt, synthetic construct
  source 1..80: mol_type = other RNA
ggtcccccgactctggctttcccccaggtttacatgttcctggtgaaatggcaggacctgtcggagaaggtggtgtaccg

SEQ ID NO: 13606 - RNA, 80 nt, synthetic construct
  source 1..80: mol_type = other RNA
ggtcccccgactctggctttcccccaggtttacatgttcctggtgaaatggcaggacctgtcggagaaggtggtttaccg

SEQ ID NO: 13607 - RNA, 80 nt, synthetic construct
  source 1..80: mol_type = other RNA
ggtcccccgactctggctttcccccaggtttacatgttcctggtgaaatggcaggacctgtcggagaaggtggtataccg

SEQ ID NO: 13608 - RNA, 80 nt, synthetic construct
  source 1..80: mol_type = other RNA
ggtcccccgactctggctttcccccaggtgtacatgttcctggtgaaatggcaggacctgtcggagaaggtggtgtaccg

SEQ ID NO: 13609 - RNA, 80 nt, synthetic construct
  source 1..80: mol_type = other RNA
ggtcccccgactctggctttcccccaggtgtacatgttcctggtgaaatggcaggacctgtcggagaaggtggtctaccg

SEQ ID NO: 13610 - RNA, 80 nt, synthetic construct
  source 1..80: mol_type = other RNA
ggtcccccgactctggctttcccccaggtgtacatgttcctggtgaaatggcaggacctgtcggagaaggtggtataccg

SEQ ID NO: 13611 - RNA, 80 nt, synthetic construct
  source 1..80: mol_type = other RNA
ggtcccccgactctggctttcccccaggtctacatgttcctggtgaaatggcaggacctgtcggagaaggtggtttaccg

SEQ ID NO: 13612 - RNA, 80 nt, synthetic construct
  source 1..80: mol_type = other RNA
ggtcccccgactctggctttcccccaggtctacatgttcctggtgaaatggcaggacctgtcggagaaggtggtgtaccg

SEQ ID NO: 13613 - RNA, 80 nt, synthetic construct
  source 1..80: mol_type = other RNA
ggtcccccgactctggctttcccccaggtctacatgttcctggtgaaatggcaggacctgtcggagaaggtggtctaccg

SEQ ID NO: 13614 - RNA, 80 nt, synthetic construct
  source 1..80: mol_type = other RNA
ggtcccccgactctggctttcccccaggtctacatgttcctggtgaaatggcaggacctgtcggagaaggtggtataccg

SEQ ID NO: 13615 - RNA, 80 nt, synthetic construct
  source 1..80: mol_type = other RNA
ggtcccccgactctggctttcccccaggtatacatgttcctggtgaaatggcaggacctgtcggagaaggtggtttaccg

SEQ ID NO: 13616 - RNA, 80 nt, synthetic construct
  source 1..80: mol_type = other RNA
ggtcccccgactctggctttcccccaggtgtacatgttcctggtgaaatggcaggacctgtcggagaaggtggtttaccg

SEQ ID NO: 13617 - RNA, 81 nt, synthetic construct
  source 1..81: mol_type = other RNA
gggtcccccgactctggctttcccccaggtttacatgttcctggtgaaatggcaggacctgtcggagaaggtggtgtaccg

SEQ ID NO: 13618 - RNA, 81 nt, synthetic construct
  source 1..81: mol_type = other RNA
gggtcccccgactctggctttcccccaggtttacatgttcctggtgaaatggcaggacctgtcggagaaggtggtataccg

SEQ ID NO: 13619 - RNA, 81 nt, synthetic construct
  source 1..81: mol_type = other RNA
gggtcccccgactctggctttcccccaggtgtacatgttcctggtgaaatggcaggacctgtcggagaaggtggtttaccg

SEQ ID NO: 13620 - RNA, 81 nt, synthetic construct
  source 1..81: mol_type = other RNA
gggtcccccgactctggctttcccccaggtatacatgttcctggtgaaatggcaggacctgtcggagaaggtggtataccg

SEQ ID NO: 13621 - RNA, 81 nt, synthetic construct
  source 1..81: mol_type = other RNA
gggtcccccgactctggctttcccccaggtgtacatgttcctggtgaaatggcaggacctgtcggagaaggtggtctaccg

SEQ ID NO: 13622 - RNA, 81 nt, synthetic construct
  source 1..81: mol_type = other RNA
gggtcccccgactctggctttcccccaggtgtacatgttcctggtgaaatggcaggacctgtcggagaaggtggtgtaccg

SEQ ID NO: 13623 - RNA, 81 nt, synthetic construct
  source 1..81: mol_type = other RNA
gggtcccccgactctggctttcccccaggtgtacatgttcctggtgaaatggcaggacctgtcggagaaggtggtataccg

SEQ ID NO: 13624 - RNA, 81 nt, synthetic construct
  source 1..81: mol_type = other RNA
gggtcccccgactctggctttcccccaggtttacatgttcctggtgaaatggcaggacctgtcggagaaggtggtttaccg

SEQ ID NO: 13625 - RNA, 81 nt, synthetic construct
  source 1..81: mol_type = other RNA
gggtcccccgactctggctttcccccaggtctacatgttcctggtgaaatggcaggacctgtcggagaaggtggtttaccg

SEQ ID NO: 13626 - RNA, 81 nt, synthetic construct
  source 1..81: mol_type = other RNA
gggtcccccgactctggctttcccccaggtctacatgttcctggtgaaatggcaggacctgtcggagaaggtggtgtaccg

SEQ ID NO: 13627 - RNA, 81 nt, synthetic construct
  source 1..81: mol_type = other RNA
gggtcccccgactctggctttcccccaggtctacatgttcctggtgaaatggcaggacctgtcggagaaggtggtctaccg

SEQ ID NO: 13628 - RNA, 81 nt, synthetic construct
  source 1..81: mol_type = other RNA
gggtcccccgactctggctttcccccaggtctacatgttcctggtgaaatggcaggacctgtcggagaaggtggtataccg

SEQ ID NO: 13629 - RNA, 81 nt, synthetic construct
  source 1..81: mol_type = other RNA
gggtcccccgactctggctttcccccaggtatacatgttcctggtgaaatggcaggacctgtcggagaaggtggtttaccg

SEQ ID NO: 13630 - RNA, 81 nt, synthetic construct
  source 1..81: mol_type = other RNA
gggtcccccgactctggctttcccccaggtatacatgttcctggtgaaatggcaggacctgtcggagaaggtggtgtaccg

SEQ ID NO: 13631 - RNA, 81 nt, synthetic construct
  source 1..81: mol_type = other RNA
gggtcccccgactctggctttcccccaggtatacatgttcctggtgaaatggcaggacctgtcggagaaggtggtctaccg

SEQ ID NO: 13632 - RNA, 81 nt, synthetic construct
  source 1..81: mol_type = other RNA
gggtcccccgactctggctttcccccaggtttacatgttcctggtgaaatggcaggacctgtcggagaaggtggtctaccg

SEQ ID NO: 13633 - RNA, 82 nt, synthetic construct
  source 1..82: mol_type = other RNA
ggggtcccccgactctggctttcccccaggtctacatgttcctggtgaaatggcaggacctgtcggagaaggtggtttaccg

SEQ ID NO: 13634 - RNA, 82 nt, synthetic construct
  source 1..82: mol_type = other RNA
ggggtcccccgactctggctttcccccaggtatacatgttcctggtgaaatggcaggacctgtcggagaaggtggtataccg

SEQ ID NO: 13635 - RNA, 82 nt, synthetic construct
  source 1..82: mol_type = other RNA
ggggtcccccgactctggctttcccccaggtttacatgttcctggtgaaatggcaggacctgtcggagaaggtggtctaccg

SEQ ID NO: 13636 - RNA, 82 nt, synthetic construct
  source 1..82: mol_type = other RNA
ggggtcccccgactctggctttcccccaggtttacatgttcctggtgaaatggcaggacctgtcggagaaggtggtataccg

SEQ ID NO: 13637 - RNA, 82 nt, synthetic construct
  source 1..82: mol_type = other RNA
ggggtcccccgactctggctttcccccaggtgtacatgttcctggtgaaatggcaggacctgtcggagaaggtggtttaccg

SEQ ID NO: 13638 - RNA, 82 nt, synthetic construct
  source 1..82: mol_type = other RNA
ggggtcccccgactctggctttcccccaggtatacatgttcctggtgaaatggcaggacctgtcggagaaggtggtctaccg

SEQ ID NO: 13639 - RNA, 82 nt, synthetic construct
  source 1..82: mol_type = other RNA
ggggtcccccgactctggctttcccccaggtatacatgttcctggtgaaatggcaggacctgtcggagaaggtggtgtaccg

SEQ ID NO: 13640 - RNA, 82 nt, synthetic construct
  source 1..82: mol_type = other RNA
ggggtcccccgactctggctttcccccaggtatacatgttcctggtgaaatggcaggacctgtcggagaaggtggtttaccg

SEQ ID NO: 13641 - RNA, 82 nt, synthetic construct
  source 1..82: mol_type = other RNA
ggggtcccccgactctggctttcccccaggtctacatgttcctggtgaaatggcaggacctgtcggagaaggtggtataccg

SEQ ID NO: 13642 - RNA, 82 nt, synthetic construct
  source 1..82: mol_type = other RNA
ggggtcccccgactctggctttcccccaggtctacatgttcctggtgaaatggcaggacctgtcggagaaggtggtctaccg

SEQ ID NO: 13643 - RNA, 82 nt, synthetic construct
  source 1..82: mol_type = other RNA
ggggtcccccgactctggctttcccccaggtctacatgttcctggtgaaatggcaggacctgtcggagaaggtggtgtaccg

SEQ ID NO: 13644 - RNA, 82 nt, synthetic construct
  source 1..82: mol_type = other RNA
ggggtcccccgactctggctttcccccaggtgtacatgttcctggtgaaatggcaggacctgtcggagaaggtggtctaccg

SEQ ID NO: 13645 - RNA, 82 nt, synthetic construct
  source 1..82: mol_type = other RNA
ggggtcccccgactctggctttcccccaggtgtacatgttcctggtgaaatggcaggacctgtcggagaaggtggtataccg

SEQ ID NO: 13646 - RNA, 82 nt, synthetic construct
  source 1..82: mol_type = other RNA
ggggtcccccgactctggctttcccccaggtttacatgttcctggtgaaatggcaggacctgtcggagaaggtggtttaccg

SEQ ID NO: 13647 - RNA, 82 nt, synthetic construct
  source 1..82: mol_type = other RNA
ggggtcccccgactctggctttcccccaggtttacatgttcctggtgaaatggcaggacctgtcggagaaggtggtgtaccg

SEQ ID NO: 13648 - RNA, 82 nt, synthetic construct
  source 1..82: mol_type = other RNA
ggggtcccccgactctggctttcccccaggtgtacatgttcctggtgaaatggcaggacctgtcggagaaggtggtgtaccg

SEQ ID NO: 13649 - RNA, 83 nt, synthetic construct
  source 1..83: mol_type = other RNA
tggggtcccccgactctggctttcccccaggtgtacatgttcctggtgaaatggcaggacctgtcggagaaggtggtctaccg

SEQ ID NO: 13650 - RNA, 83 nt, synthetic construct
  source 1..83: mol_type = other RNA
tggggtcccccgactctggctttcccccaggtttacatgttcctggtgaaatggcaggacctgtcggagaaggtggtttaccg

SEQ ID NO: 13651 - RNA, 83 nt, synthetic construct
  source 1..83: mol_type = other RNA
tggggtcccccgactctggctttcccccaggtctacatgttcctggtgaaatggcaggacctgtcggagaaggtggtgtaccg

SEQ ID NO: 13652 - RNA, 83 nt, synthetic construct
  source 1..83: mol_type = other RNA
tggggtcccccgactctggctttcccccaggtttacatgttcctggtgaaatggcaggacctgtcggagaaggtggtataccg

SEQ ID NO: 13653 - RNA, 83 nt, synthetic construct
  source 1..83: mol_type = other RNA
tggggtcccccgactctggctttcccccaggtgtacatgttcctggtgaaatggcaggacctgtcggagaaggtggtgtaccg

SEQ ID NO: 13654 - RNA, 83 nt, synthetic construct
  source 1..83: mol_type = other RNA
tggggtcccccgactctggctttcccccaggtatacatgttcctggtgaaatggcaggacctgtcggagaaggtggtctaccg

SEQ ID NO: 13655 - RNA, 83 nt, synthetic construct
  source 1..83: mol_type = other RNA
tggggtcccccgactctggctttcccccaggtatacatgttcctggtgaaatggcaggacctgtcggagaaggtggtgtaccg

SEQ ID NO: 13656 - RNA, 83 nt, synthetic construct
  source 1..83: mol_type = other RNA
tggggtcccccgactctggctttcccccaggtatacatgttcctggtgaaatggcaggacctgtcggagaaggtggtttaccg

SEQ ID NO: 13657 - RNA, 83 nt, synthetic construct
  source 1..83: mol_type = other RNA
tggggtcccccgactctggctttcccccaggtctacatgttcctggtgaaatggcaggacctgtcggagaaggtggtataccg

SEQ ID NO: 13658 - RNA, 83 nt, synthetic construct
  source 1..83: mol_type = other RNA
tggggtcccccgactctggctttcccccaggtctacatgttcctggtgaaatggcaggacctgtcggagaaggtggtctaccg

SEQ ID NO: 13659 - RNA, 83 nt, synthetic construct
  source 1..83: mol_type = other RNA
tggggtcccccgactctggctttcccccaggtctacatgttcctggtgaaatggcaggacctgtcggagaaggtggtttaccg

SEQ ID NO: 13660 - RNA, 83 nt, synthetic construct
  source 1..83: mol_type = other RNA
tggggtcccccgactctggctttcccccaggtgtacatgttcctggtgaaatggcaggacctgtcggagaaggtggtataccg

SEQ ID NO: 13661 - RNA, 83 nt, synthetic construct
  source 1..83: mol_type = other RNA
tggggtcccccgactctggctttcccccaggtgtacatgttcctggtgaaatggcaggacctgtcggagaaggtggtttaccg

SEQ ID NO: 13662 - RNA, 83 nt, synthetic construct
  source 1..83: mol_type = other RNA
tggggtcccccgactctggctttcccccaggtttacatgttcctggtgaaatggcaggacctgtcggagaaggtggtctaccg

SEQ ID NO: 13663 - RNA, 83 nt, synthetic construct
  source 1..83: mol_type = other RNA
tggggtcccccgactctggctttcccccaggtttacatgttcctggtgaaatggcaggacctgtcggagaaggtggtgtaccg

SEQ ID NO: 13664 - RNA, 83 nt, synthetic construct
  source 1..83: mol_type = other RNA
tggggtcccccgactctggctttcccccaggtatacatgttcctggtgaaatggcaggacctgtcggagaaggtggtataccg

SEQ ID NO: 13665 - RNA, 84 nt, synthetic construct
  source 1..84: mol_type = other RNA
atggggtcccccgactctggctttcccccaggtgtacatgttcctggtgaaatggcaggacctgtcggagaaggtggtttaccg

SEQ ID NO: 13666 - RNA, 84 nt, synthetic construct
  source 1..84: mol_type = other RNA
atggggtcccccgactctggctttcccccaggtttacatgttcctggtgaaatggcaggacctgtcggagaaggtggtataccg

SEQ ID NO: 13667 - RNA, 84 nt, synthetic construct
  source 1..84: mol_type = other RNA
atggggtcccccgactctggctttcccccaggtttacatgttcctggtgaaatggcaggacctgtcggagaaggtggtctaccg

SEQ ID NO: 13668 - RNA, 84 nt, synthetic construct
  source 1..84: mol_type = other RNA
atggggtcccccgactctggctttcccccaggtttacatgttcctggtgaaatggcaggacctgtcggagaaggtggtgtaccg

SEQ ID NO: 13669 - RNA, 84 nt, synthetic construct
  source 1..84: mol_type = other RNA
atggggtcccccgactctggctttcccccaggtatacatgttcctggtgaaatggcaggacctgtcggagaaggtggtataccg

SEQ ID NO: 13670 - RNA, 84 nt, synthetic construct
  source 1..84: mol_type = other RNA
atggggtcccccgactctggctttcccccaggtttacatgttcctggtgaaatggcaggacctgtcggagaaggtggtttaccg

SEQ ID NO: 13671 - RNA, 84 nt, synthetic construct
  source 1..84: mol_type = other RNA
atggggtcccccgactctggctttcccccaggtgtacatgttcctggtgaaatggcaggacctgtcggagaaggtggtgtaccg

SEQ ID NO: 13672 - RNA, 84 nt, synthetic construct
  source 1..84: mol_type = other RNA
atggggtcccccgactctggctttcccccaggtgtacatgttcctggtgaaatggcaggacctgtcggagaaggtggtctaccg

SEQ ID NO: 13673 - RNA, 84 nt, synthetic construct
  source 1..84: mol_type = other RNA
atggggtcccccgactctggctttcccccaggtctacatgttcctggtgaaatggcaggacctgtcggagaaggtggtgtaccg

SEQ ID NO: 13674 - RNA, 84 nt, synthetic construct
  source 1..84: mol_type = other RNA
atggggtcccccgactctggctttcccccaggtctacatgttcctggtgaaatggcaggacctgtcggagaaggtggtttaccg

SEQ ID NO: 13675 - RNA, 84 nt, synthetic construct
  source 1..84: mol_type = other RNA
atggggtcccccgactctggctttcccccaggtgtacatgttcctggtgaaatggcaggacctgtcggagaaggtggtataccg

SEQ ID NO: 13676 - RNA, 84 nt, synthetic construct
  source 1..84: mol_type = other RNA
atggggtcccccgactctggctttcccccaggtatacatgttcctggtgaaatggcaggacctgtcggagaaggtggtctaccg

SEQ ID NO: 13677 - RNA, 84 nt, synthetic construct
  source 1..84: mol_type = other RNA
atggggtcccccgactctggctttcccccaggtatacatgttcctggtgaaatggcaggacctgtcggagaaggtggtgtaccg

SEQ ID NO: 13678 - RNA, 84 nt, synthetic construct
  source 1..84: mol_type = other RNA
atggggtcccccgactctggctttcccccaggtatacatgttcctggtgaaatggcaggacctgtcggagaaggtggtttaccg

SEQ ID NO: 13679 - RNA, 84 nt, synthetic construct
  source 1..84: mol_type = other RNA
atggggtcccccgactctggctttcccccaggtctacatgttcctggtgaaatggcaggacctgtcggagaaggtggtataccg

SEQ ID NO: 13680 - RNA, 84 nt, synthetic construct
  source 1..84: mol_type = other RNA
atggggtcccccgactctggctttcccccaggtctacatgttcctggtgaaatggcaggacctgtcggagaaggtggtctaccg

SEQ ID NO: 13681 - RNA, 85 nt, synthetic construct
  source 1..85: mol_type = other RNA
aatggggtcccccgactctggctttcccccaggtttacatgttcctggtgaaatggcaggacctgtcggagaaggtggtttaccg

SEQ ID NO: 13682 - RNA, 85 nt, synthetic construct
  source 1..85: mol_type = other RNA
aatggggtcccccgactctggctttcccccaggtctacatgttcctggtgaaatggcaggacctgtcggagaaggtggtctaccg

SEQ ID NO: 13683 - RNA, 85 nt, synthetic construct
  source 1..85: mol_type = other RNA
aatggggtcccccgactctggctttcccccaggtatacatgttcctggtgaaatggcaggacctgtcggagaaggtggtgtaccg

SEQ ID NO: 13684 - RNA, 85 nt, synthetic construct
  source 1..85: mol_type = other RNA
aatggggtcccccgactctggctttcccccaggtatacatgttcctggtgaaatggcaggacctgtcggagaaggtggtctaccg

SEQ ID NO: 13685 - RNA, 85 nt, synthetic construct
  source 1..85: mol_type = other RNA
aatggggtcccccgactctggctttcccccaggtgtacatgttcctggtgaaatggcaggacctgtcggagaaggtggtgtaccg

SEQ ID NO: 13686 - RNA, 85 nt, synthetic construct
  source 1..85: mol_type = other RNA
aatggggtcccccgactctggctttcccccaggtatacatgttcctggtgaaatggcaggacctgtcggagaaggtggtttaccg

SEQ ID NO: 13687 - RNA, 85 nt, synthetic construct
  source 1..85: mol_type = other RNA
aatggggtcccccgactctggctttcccccaggtgtacatgttcctggtgaaatggcaggacctgtcggagaaggtggtctaccg

SEQ ID NO: 13688 - RNA, 85 nt, synthetic construct
  source 1..85: mol_type = other RNA
aatggggtcccccgactctggctttcccccaggtctacatgttcctggtgaaatggcaggacctgtcggagaaggtggtataccg

SEQ ID NO: 13689 - RNA, 85 nt, synthetic construct
  source 1..85: mol_type = other RNA
aatggggtcccccgactctggctttcccccaggtctacatgttcctggtgaaatggcaggacctgtcggagaaggtggtgtaccg

SEQ ID NO: 13690 - RNA, 85 nt, synthetic construct
  source 1..85: mol_type = other RNA
aatggggtcccccgactctggctttcccccaggtctacatgttcctggtgaaatggcaggacctgtcggagaaggtggtttaccg

SEQ ID NO: 13691 - RNA, 85 nt, synthetic construct
  source 1..85: mol_type = other RNA
aatggggtcccccgactctggctttcccccaggtgtacatgttcctggtgaaatggcaggacctgtcggagaaggtggtttaccg

SEQ ID NO: 13692 - RNA, 85 nt, synthetic construct
  source 1..85: mol_type = other RNA
aatggggtcccccgactctggctttcccccaggtttacatgttcctggtgaaatggcaggacctgtcggagaaggtggtataccg

SEQ ID NO: 13693 - RNA, 85 nt, synthetic construct
  source 1..85: mol_type = other RNA
aatggggtcccccgactctggctttcccccaggtttacatgttcctggtgaaatggcaggacctgtcggagaaggtggtctaccg

SEQ ID NO: 13694 - RNA, 85 nt, synthetic construct
  source 1..85: mol_type = other RNA
aatggggtcccccgactctggctttcccccaggtttacatgttcctggtgaaatggcaggacctgtcggagaaggtggtgtaccg

SEQ ID NO: 13695 - RNA, 85 nt, synthetic construct
  source 1..85: mol_type = other RNA
aatggggtcccccgactctggctttcccccaggtgtacatgttcctggtgaaatggcaggacctgtcggagaaggtggtataccg

SEQ ID NO: 13696 - RNA, 85 nt, synthetic construct
  source 1..85: mol_type = other RNA
aatggggtcccccgactctggctttcccccaggtatacatgttcctggtgaaatggcaggacctgtcggagaaggtggtataccg

SEQ ID NO: 13697 - RNA, 86 nt, synthetic construct
  source 1..86: mol_type = other RNA
gaatggggtcccccgactctggctttcccccaggtctacatgttcctggtgaaatggcaggacctgtcggagaaggtggtctaccg

SEQ ID NO: 13698 - RNA, 86 nt, synthetic construct
  source 1..86: mol_type = other RNA
gaatggggtcccccgactctggctttcccccaggtctacatgttcctggtgaaatggcaggacctgtcggagaaggtggtttaccg

SEQ ID NO: 13699 - RNA, 86 nt, synthetic construct
  source 1..86: mol_type = other RNA
gaatggggtcccccgactctggctttcccccaggtgtacatgttcctggtgaaatggcaggacctgtcggagaaggtggtataccg

SEQ ID NO: 13700 - RNA, 86 nt, synthetic construct
  source 1..86: mol_type = other RNA
gaatggggtcccccgactctggctttcccccaggtttacatgttcctggtgaaatggcaggacctgtcggagaaggtggtctaccg

SEQ ID NO: 13701 - RNA, 86 nt, synthetic construct
  source 1..86: mol_type = other RNA
gaatggggtcccccgactctggctttcccccaggtgtacatgttcctggtgaaatggcaggacctgtcggagaaggtggtttaccg

SEQ ID NO: 13702 - RNA, 86 nt, synthetic construct
  source 1..86: mol_type = other RNA
gaatggggtcccccgactctggctttcccccaggtttacatgttcctggtgaaatggcaggacctgtcggagaaggtggtataccg

SEQ ID NO: 13703 - RNA, 86 nt, synthetic construct
  source 1..86: mol_type = other RNA
gaatggggtcccccgactctggctttcccccaggtttacatgttcctggtgaaatggcaggacctgtcggagaaggtggtgtaccg

SEQ ID NO: 13704 - RNA, 86 nt, synthetic construct
  source 1..86: mol_type = other RNA
gaatggggtcccccgactctggctttcccccaggtttacatgttcctggtgaaatggcaggacctgtcggagaaggtggtttaccg

SEQ ID NO: 13705 - RNA, 86 nt, synthetic construct
  source 1..86: mol_type = other RNA
gaatggggtcccccgactctggctttcccccaggtgtacatgttcctggtgaaatggcaggacctgtcggagaaggtggtgtaccg

SEQ ID NO: 13706 - RNA, 86 nt, synthetic construct
  source 1..86: mol_type = other RNA
gaatggggtcccccgactctggctttcccccaggtatacatgttcctggtgaaatggcaggacctgtcggagaaggtggtttaccg

SEQ ID NO: 13707 - RNA, 86 nt, synthetic construct
  source 1..86: mol_type = other RNA
gaatggggtcccccgactctggctttcccccaggtatacatgttcctggtgaaatggcaggacctgtcggagaaggtggtctaccg

SEQ ID NO: 13708 - RNA, 86 nt, synthetic construct
  source 1..86: mol_type = other RNA
gaatggggtcccccgactctggctttcccccaggtctacatgttcctggtgaaatggcaggacctgtcggagaaggtggtgtaccg

SEQ ID NO: 13709 - RNA, 86 nt, synthetic construct
  source 1..86: mol_type = other RNA
gaatggggtcccccgactctggctttcccccaggtatacatgttcctggtgaaatggcaggacctgtcggagaaggtggtgtaccg

SEQ ID NO: 13710 - RNA, 86 nt, synthetic construct
  source 1..86: mol_type = other RNA
gaatggggtcccccgactctggctttcccccaggtctacatgttcctggtgaaatggcaggacctgtcggagaaggtggtataccg

SEQ ID NO: 13711 - RNA, 86 nt, synthetic construct
  source 1..86: mol_type = other RNA
gaatggggtcccccgactctggctttcccccaggtatacatgttcctggtgaaatggcaggacctgtcggagaaggtggtataccg

SEQ ID NO: 13712 - RNA, 86 nt, synthetic construct
  source 1..86: mol_type = other RNA
gaatggggtcccccgactctggctttcccccaggtgtacatgttcctggtgaaatggcaggacctgtcggagaaggtggtctaccg

SEQ ID NO: 13713 - RNA, 87 nt, synthetic construct
  source 1..87: mol_type = other RNA
tgaatggggtcccccgactctggctttcccccaggtatacatgttcctggtgaaatggcaggacctgtcggagaaggtggtataccg

SEQ ID NO: 13714 - RNA, 87 nt, synthetic construct
  source 1..87: mol_type = other RNA
tgaatggggtcccccgactctggctttcccccaggtttacatgttcctggtgaaatggcaggacctgtcggagaaggtggtgtaccg

SEQ ID NO: 13715 - RNA, 87 nt, synthetic construct
  source 1..87: mol_type = other RNA
tgaatggggtcccccgactctggctttcccccaggtatacatgttcctggtgaaatggcaggacctgtcggagaaggtggtctaccg

SEQ ID NO: 13716 - RNA, 87 nt, synthetic construct
  source 1..87: mol_type = other RNA
tgaatggggtcccccgactctggctttcccccaggtatacatgttcctggtgaaatggcaggacctgtcggagaaggtggtgtaccg

SEQ ID NO: 13717 - RNA, 87 nt, synthetic construct
  source 1..87: mol_type = other RNA
tgaatggggtcccccgactctggctttcccccaggtatacatgttcctggtgaaatggcaggacctgtcggagaaggtggtttaccg

SEQ ID NO: 13718 - RNA, 87 nt, synthetic construct
  source 1..87: mol_type = other RNA
tgaatggggtcccccgactctggctttcccccaggtctacatgttcctggtgaaatggcaggacctgtcggagaaggtggtataccg

SEQ ID NO: 13719 - RNA, 87 nt, synthetic construct
  source 1..87: mol_type = other RNA
tgaatggggtcccccgactctggctttcccccaggtctacatgttcctggtgaaatggcaggacctgtcggagaaggtggtctaccg

SEQ ID NO: 13720 - RNA, 87 nt, synthetic construct
  source 1..87: mol_type = other RNA
tgaatggggtcccccgactctggctttcccccaggtgtacatgttcctggtgaaatggcaggacctgtcggagaaggtggtctaccg

SEQ ID NO: 13721 - RNA, 87 nt, synthetic construct
  source 1..87: mol_type = other RNA
tgaatggggtcccccgactctggctttcccccaggtctacatgttcctggtgaaatggcaggacctgtcggagaaggtggtttaccg

SEQ ID NO: 13722 - RNA, 87 nt, synthetic construct
  source 1..87: mol_type = other RNA
tgaatggggtcccccgactctggctttcccccaggtgtacatgttcctggtgaaatggcaggacctgtcggagaaggtggtataccg

SEQ ID NO: 13723 - RNA, 87 nt, synthetic construct
  source 1..87: mol_type = other RNA
tgaatggggtcccccgactctggctttcccccaggtgtacatgttcctggtgaaatggcaggacctgtcggagaaggtggtgtaccg

SEQ ID NO: 13724 - RNA, 87 nt, synthetic construct
  source 1..87: mol_type = other RNA
tgaatggggtcccccgactctggctttcccccaggtgtacatgttcctggtgaaatggcaggacctgtcggagaaggtggtttaccg

SEQ ID NO: 13725 - RNA, 87 nt, synthetic construct
  source 1..87: mol_type = other RNA
tgaatggggtcccccgactctggctttcccccaggtttacatgttcctggtgaaatggcaggacctgtcggagaaggtggtttaccg

SEQ ID NO: 13726 - RNA, 87 nt, synthetic construct
  source 1..87: mol_type = other RNA
tgaatggggtcccccgactctggctttcccccaggtttacatgttcctggtgaaatggcaggacctgtcggagaaggtggtataccg

SEQ ID NO: 13727 - RNA, 87 nt, synthetic construct
  source 1..87: mol_type = other RNA
tgaatggggtcccccgactctggctttcccccaggtttacatgttcctggtgaaatggcaggacctgtcggagaaggtggtctaccg

SEQ ID NO: 13728 - RNA, 87 nt, synthetic construct
  source 1..87: mol_type = other RNA
tgaatggggtcccccgactctggctttcccccaggtctacatgttcctggtgaaatggcaggacctgtcggagaaggtggtgtaccg

SEQ ID NO: 13729 - RNA, 88 nt, synthetic construct
  source 1..88: mol_type = other RNA
ctgaatggggtcccccgactctggctttcccccaggtttacatgttcctggtgaaatggcaggacctgtcggagaaggtggtctaccg

SEQ ID NO: 13730 - RNA, 88 nt, synthetic construct
  source 1..88: mol_type = other RNA
ctgaatggggtcccccgactctggctttcccccaggtttacatgttcctggtgaaatggcaggacctgtcggagaaggtggtttaccg

SEQ ID NO: 13731 - RNA, 88 nt, synthetic construct
  source 1..88: mol_type = other RNA
ctgaatggggtcccccgactctggctttcccccaggtctacatgttcctggtgaaatggcaggacctgtcggagaaggtggtgtaccg

SEQ ID NO: 13732 - RNA, 88 nt, synthetic construct
  source 1..88: mol_type = other RNA
ctgaatggggtcccccgactctggctttcccccaggtgtacatgttcctggtgaaatggcaggacctgtcggagaaggtggtgtaccg

SEQ ID NO: 13733 - RNA, 88 nt, synthetic construct
  source 1..88: mol_type = other RNA
ctgaatggggtcccccgactctggctttcccccaggtgtacatgttcctggtgaaatggcaggacctgtcggagaaggtggtctaccg

SEQ ID NO: 13734 - RNA, 88 nt, synthetic construct
  source 1..88: mol_type = other RNA
ctgaatggggtcccccgactctggctttcccccaggtgtacatgttcctggtgaaatggcaggacctgtcggagaaggtggtataccg

SEQ ID NO: 13735 - RNA, 88 nt, synthetic construct
  source 1..88: mol_type = other RNA
ctgaatggggtcccccgactctggctttcccccaggtctacatgttcctggtgaaatggcaggacctgtcggagaaggtggtttaccg

SEQ ID NO: 13736 - RNA, 88 nt, synthetic construct
  source 1..88: mol_type = other RNA
ctgaatggggtcccccgactctggctttcccccaggtctacatgttcctggtgaaatggcaggacctgtcggagaaggtggtctaccg

SEQ ID NO: 13737 - RNA, 88 nt, synthetic construct
  source 1..88: mol_type = other RNA
ctgaatggggtcccccgactctggctttcccccaggtttacatgttcctggtgaaatggcaggacctgtcggagaaggtggtgtaccg

SEQ ID NO: 13738 - RNA, 88 nt, synthetic construct
  source 1..88: mol_type = other RNA
ctgaatggggtcccccgactctggctttcccccaggtatacatgttcctggtgaaatggcaggacctgtcggagaaggtggtgtaccg

SEQ ID NO: 13739 - RNA, 88 nt, synthetic construct
  source 1..88: mol_type = other RNA
ctgaatggggtcccccgactctggctttcccccaggtatacatgttcctggtgaaatggcaggacctgtcggagaaggtggtctaccg

SEQ ID NO: 13740 - RNA, 88 nt, synthetic construct
  source 1..88: mol_type = other RNA
ctgaatggggtcccccgactctggctttcccccaggtatacatgttcctggtgaaatggcaggacctgtcggagaaggtggtataccg

SEQ ID NO: 13741 - RNA, 88 nt, synthetic construct
  source 1..88: mol_type = other RNA
ctgaatggggtcccccgactctggctttcccccaggtgtacatgttcctggtgaaatggcaggacctgtcggagaaggtggtttaccg

SEQ ID NO: 13742 - RNA, 88 nt, synthetic construct
  source 1..88: mol_type = other RNA
ctgaatggggtcccccgactctggctttcccccaggtctacatgttcctggtgaaatggcaggacctgtcggagaaggtggtataccg

SEQ ID NO: 13743 - RNA, 88 nt, synthetic construct
  source 1..88: mol_type = other RNA
ctgaatggggtcccccgactctggctttcccccaggtttacatgttcctggtgaaatggcaggacctgtcggagaaggtggtataccg

SEQ ID NO: 13744 - RNA, 88 nt, synthetic construct
  source 1..88: mol_type = other RNA
ctgaatggggtcccccgactctggctttcccccaggtatacatgttcctggtgaaatggcaggacctgtcggagaaggtggtttaccg

SEQ ID NO: 13745 - RNA, 89 nt, synthetic construct
  source 1..89: mol_type = other RNA
gctgaatggggtcccccgactctggctttcccccaggtgtacatgttcctggtgaaatggcaggacctgtcggagaaggtggtataccg

SEQ ID NO: 13746 - RNA, 89 nt, synthetic construct
  source 1..89: mol_type = other RNA
gctgaatggggtcccccgactctggctttcccccaggtctacatgttcctggtgaaatggcaggacctgtcggagaaggtggtttaccg

SEQ ID NO: 13747 - RNA, 89 nt, synthetic construct
  source 1..89: mol_type = other RNA
gctgaatggggtcccccgactctggctttcccccaggtctacatgttcctggtgaaatggcaggacctgtcggagaaggtggtctaccg

SEQ ID NO: 13748 - RNA, 89 nt, synthetic construct
  source 1..89: mol_type = other RNA
gctgaatggggtcccccgactctggctttcccccaggtctacatgttcctggtgaaatggcaggacctgtcggagaaggtggtataccg

SEQ ID NO: 13749 - RNA, 89 nt, synthetic construct
  source 1..89: mol_type = other RNA
gctgaatggggtcccccgactctggctttcccccaggtatacatgttcctggtgaaatggcaggacctgtcggagaaggtggtttaccg

SEQ ID NO: 13750 - RNA, 89 nt, synthetic construct
  source 1..89: mol_type = other RNA
gctgaatggggtcccccgactctggctttcccccaggtatacatgttcctggtgaaatggcaggacctgtcggagaaggtggtgtaccg

SEQ ID NO: 13751 - RNA, 89 nt, synthetic construct
  source 1..89: mol_type = other RNA
gctgaatggggtcccccgactctggctttcccccaggtatacatgttcctggtgaaatggcaggacctgtcggagaaggtggtctaccg

SEQ ID NO: 13752 - RNA, 89 nt, synthetic construct
  source 1..89: mol_type = other RNA
gctgaatggggtcccccgactctggctttcccccaggtatacatgttcctggtgaaatggcaggacctgtcggagaaggtggtataccg

SEQ ID NO: 13753 - RNA, 89 nt, synthetic construct
  source 1..89: mol_type = other RNA
gctgaatggggtcccccgactctggctttcccccaggtctacatgttcctggtgaaatggcaggacctgtcggagaaggtggtgtaccg

SEQ ID NO: 13754 - RNA, 89 nt, synthetic construct
  source 1..89: mol_type = other RNA
gctgaatggggtcccccgactctggctttcccccaggtgtacatgttcctggtgaaatggcaggacctgtcggagaaggtggtgtaccg

SEQ ID NO: 13755 - RNA, 89 nt, synthetic construct
  source 1..89: mol_type = other RNA
gctgaatggggtcccccgactctggctttcccccaggtttacatgttcctggtgaaatggcaggacctgtcggagaaggtggtataccg

SEQ ID NO: 13756 - RNA, 89 nt, synthetic construct
  source 1..89: mol_type = other RNA
gctgaatggggtcccccgactctggctttcccccaggtgtacatgttcctggtgaaatggcaggacctgtcggagaaggtggtttaccg

SEQ ID NO: 13757 - RNA, 89 nt, synthetic construct
  source 1..89: mol_type = other RNA
gctgaatggggtcccccgactctggctttcccccaggtgtacatgttcctggtgaaatggcaggacctgtcggagaaggtggtctaccg

SEQ ID NO: 13758 - RNA, 89 nt, synthetic construct
  source 1..89: mol_type = other RNA
gctgaatggggtcccccgactctggctttcccccaggtttacatgttcctggtgaaatggcaggacctgtcggagaaggtggtttaccg

SEQ ID NO: 13759 - RNA, 89 nt, synthetic construct
  source 1..89: mol_type = other RNA
gctgaatggggtcccccgactctggctttcccccaggtttacatgttcctggtgaaatggcaggacctgtcggagaaggtggtgtaccg

SEQ ID NO: 13760 - RNA, 89 nt, synthetic construct
  source 1..89: mol_type = other RNA
gctgaatggggtcccccgactctggctttcccccaggtttacatgttcctggtgaaatggcaggacctgtcggagaaggtggtctaccg

SEQ ID NO: 13761 - RNA, 90 nt, synthetic construct
  source 1..90: mol_type = other RNA
ggctgaatggggtcccccgactctggctttcccccaggtatacatgttcctggtgaaatggcaggacctgtcggagaaggtggtgtaccg

SEQ ID NO: 13762 - RNA, 90 nt, synthetic construct
  source 1..90: mol_type = other RNA
ggctgaatggggtcccccgactctggctttcccccaggtgtacatgttcctggtgaaatggcaggacctgtcggagaaggtggtgtaccg

SEQ ID NO: 13763 - RNA, 90 nt, synthetic construct
  source 1..90: mol_type = other RNA
ggctgaatggggtcccccgactctggctttcccccaggtctacatgttcctggtgaaatggcaggacctgtcggagaaggtggtgtaccg

SEQ ID NO: 13764 - RNA, 90 nt, synthetic construct
  source 1..90: mol_type = other RNA
ggctgaatggggtcccccgactctggctttcccccaggtttacatgttcctggtgaaatggcaggacctgtcggagaaggtggtgtaccg

SEQ ID NO: 13765 - RNA, 90 nt, synthetic construct
  source 1..90: mol_type = other RNA
ggctgaatggggtcccccgactctggctttcccccaggtttacatgttcctggtgaaatggcaggacctgtcggagaaggtggtctaccg

SEQ ID NO: 13766 - RNA, 90 nt, synthetic construct
  source 1..90: mol_type = other RNA
ggctgaatggggtcccccgactctggctttcccccaggtgtacatgttcctggtgaaatggcaggacctgtcggagaaggtggtctaccg

SEQ ID NO: 13767 - RNA, 90 nt, synthetic construct
  source 1..90: mol_type = other RNA
ggctgaatggggtcccccgactctggctttcccccaggtgtacatgttcctggtgaaatggcaggacctgtcggagaaggtggtataccg

SEQ ID NO: 13768 - RNA, 90 nt, synthetic construct
  source 1..90: mol_type = other RNA
ggctgaatggggtcccccgactctggctttcccccaggtctacatgttcctggtgaaatggcaggacctgtcggagaaggtggtttaccg

SEQ ID NO: 13769 - RNA, 90 nt, synthetic construct
  source 1..90: mol_type = other RNA
ggctgaatggggtcccccgactctggctttcccccaggtgtacatgttcctggtgaaatggcaggacctgtcggagaaggtggtttaccg

SEQ ID NO: 13770 - RNA, 90 nt, synthetic construct
  source 1..90: mol_type = other RNA
ggctgaatggggtcccccgactctggctttcccccaggtatacatgttcctggtgaaatggcaggacctgtcggagaaggtggtctaccg

SEQ ID NO: 13771 - RNA, 90 nt, synthetic construct
  source 1..90: mol_type = other RNA
ggctgaatggggtcccccgactctggctttcccccaggtctacatgttcctggtgaaatggcaggacctgtcggagaaggtggtataccg

SEQ ID NO: 13772 - RNA, 90 nt, synthetic construct
  source 1..90: mol_type = other RNA
ggctgaatggggtcccccgactctggctttcccccaggtatacatgttcctggtgaaatggcaggacctgtcggagaaggtggtataccg

SEQ ID NO: 13773 - RNA, 90 nt, synthetic construct
  source 1..90: mol_type = other RNA
ggctgaatggggtcccccgactctggctttcccccaggtttacatgttcctggtgaaatggcaggacctgtcggagaaggtggtataccg

SEQ ID NO: 13774 - RNA, 90 nt, synthetic construct
  source 1..90: mol_type = other RNA
ggctgaatggggtcccccgactctggctttcccccaggtttacatgttcctggtgaaatggcaggacctgtcggagaaggtggtttaccg

SEQ ID NO: 13775 - RNA, 90 nt, synthetic construct
  source 1..90: mol_type = other RNA
ggctgaatggggtcccccgactctggctttcccccaggtatacatgttcctggtgaaatggcaggacctgtcggagaaggtggtttaccg

SEQ ID NO: 13776 - RNA, 90 nt, synthetic construct
  source 1..90: mol_type = other RNA
ggctgaatggggtcccccgactctggctttcccccaggtctacatgttcctggtgaaatggcaggacctgtcggagaaggtggtctaccg

SEQ ID NO: 13777 - RNA, 91 nt, synthetic construct
  source 1..91: mol_type = other RNA
aggctgaatggggtcccccgactctggctttcccccaggtgtacatgttcctggtgaaatggcaggacctgtcggagaaggtggtttaccg

SEQ ID NO: 13778 - RNA, 91 nt, synthetic construct
  source 1..91: mol_type = other RNA
aggctgaatggggtcccccgactctggctttcccccaggtatacatgttcctggtgaaatggcaggacctgtcggagaaggtggtataccg

SEQ ID NO: 13779 - RNA, 91 nt, synthetic construct
  source 1..91: mol_type = other RNA
aggctgaatggggtcccccgactctggctttcccccaggtctacatgttcctggtgaaatggcaggacctgtcggagaaggtggtctaccg

SEQ ID NO: 13780 - RNA, 91 nt, synthetic construct
  source 1..91: mol_type = other RNA
aggctgaatggggtcccccgactctggctttcccccaggtatacatgttcctggtgaaatggcaggacctgtcggagaaggtggtctaccg

SEQ ID NO: 13781 - RNA, 91 nt, synthetic construct
  source 1..91: mol_type = other RNA
aggctgaatggggtcccccgactctggctttcccccaggtatacatgttcctggtgaaatggcaggacctgtcggagaaggtggtgtaccg

SEQ ID NO: 13782 - RNA, 91 nt, synthetic construct
  source 1..91: mol_type = other RNA
aggctgaatggggtcccccgactctggctttcccccaggtatacatgttcctggtgaaatggcaggacctgtcggagaaggtggtttaccg

SEQ ID NO: 13783 - RNA, 91 nt, synthetic construct
  source 1..91: mol_type = other RNA
aggctgaatggggtcccccgactctggctttcccccaggtctacatgttcctggtgaaatggcaggacctgtcggagaaggtggtataccg

SEQ ID NO: 13784 - RNA, 91 nt, synthetic construct
  source 1..91: mol_type = other RNA
aggctgaatggggtcccccgactctggctttcccccaggtctacatgttcctggtgaaatggcaggacctgtcggagaaggtggtttaccg

SEQ ID NO: 13785 - RNA, 91 nt, synthetic construct
  source 1..91: mol_type = other RNA
aggctgaatggggtcccccgactctggctttcccccaggtttacatgttcctggtgaaatggcaggacctgtcggagaaggtggtttaccg

SEQ ID NO: 13786 - RNA, 91 nt, synthetic construct
  source 1..91: mol_type = other RNA
aggctgaatggggtcccccgactctggctttcccccaggtgtacatgttcctggtgaaatggcaggacctgtcggagaaggtggtataccg

SEQ ID NO: 13787 - RNA, 91 nt, synthetic construct
  source 1..91: mol_type = other RNA
aggctgaatggggtcccccgactctggctttcccccaggtgtacatgttcctggtgaaatggcaggacctgtcggagaaggtggtctaccg

SEQ ID NO: 13788 - RNA, 91 nt, synthetic construct
  source 1..91: mol_type = other RNA
aggctgaatggggtcccccgactctggctttcccccaggtgtacatgttcctggtgaaatggcaggacctgtcggagaaggtggtgtaccg

SEQ ID NO: 13789 - RNA, 91 nt, synthetic construct
  source 1..91: mol_type = other RNA
aggctgaatggggtcccccgactctggctttcccccaggtttacatgttcctggtgaaatggcaggacctgtcggagaaggtggtataccg

SEQ ID NO: 13790 - RNA, 91 nt, synthetic construct
  source 1..91: mol_type = other RNA
aggctgaatggggtcccccgactctggctttcccccaggtttacatgttcctggtgaaatggcaggacctgtcggagaaggtggtgtaccg

SEQ ID NO: 13791 - RNA, 91 nt, synthetic construct
  source 1..91: mol_type = other RNA
aggctgaatggggtcccccgactctggctttcccccaggtctacatgttcctggtgaaatggcaggacctgtcggagaaggtggtgtaccg

SEQ ID NO: 13792 - RNA, 91 nt, synthetic construct
  source 1..91: mol_type = other RNA
aggctgaatggggtcccccgactctggctttcccccaggtttacatgttcctggtgaaatggcaggacctgtcggagaaggtggtctaccg

SEQ ID NO: 13793 - RNA, 92 nt, synthetic construct
  source 1..92: mol_type = other RNA
gaggctgaatggggtcccccgactctggctttcccccaggtttacatgttcctggtgaaatggcaggacctgtcggagaaggtggtataccg

SEQ ID NO: 13794 - RNA, 92 nt, synthetic construct
  source 1..92: mol_type = other RNA
gaggctgaatggggtcccccgactctggctttcccccaggtttacatgttcctggtgaaatggcaggacctgtcggagaaggtggtttaccg

SEQ ID NO: 13795 - RNA, 92 nt, synthetic construct
  source 1..92: mol_type = other RNA
gaggctgaatggggtcccccgactctggctttcccccaggtttacatgttcctggtgaaatggcaggacctgtcggagaaggtggtgtaccg

SEQ ID NO: 13796 - RNA, 92 nt, synthetic construct
  source 1..92: mol_type = other RNA
gaggctgaatggggtcccccgactctggctttcccccaggtatacatgttcctggtgaaatggcaggacctgtcggagaaggtggtataccg

SEQ ID NO: 13797 - RNA, 92 nt, synthetic construct
  source 1..92: mol_type = other RNA
gaggctgaatggggtcccccgactctggctttcccccaggtgtacatgttcctggtgaaatggcaggacctgtcggagaaggtggtttaccg

SEQ ID NO: 13798 - RNA, 92 nt, synthetic construct
  source 1..92: mol_type = other RNA
gaggctgaatggggtcccccgactctggctttcccccaggtgtacatgttcctggtgaaatggcaggacctgtcggagaaggtggtgtaccg

SEQ ID NO: 13799 - RNA, 92 nt, synthetic construct
  source 1..92: mol_type = other RNA
gaggctgaatggggtcccccgactctggctttcccccaggtgtacatgttcctggtgaaatggcaggacctgtcggagaaggtggtctaccg

SEQ ID NO: 13800 - RNA, 92 nt, synthetic construct
  source 1..92: mol_type = other RNA
gaggctgaatggggtcccccgactctggctttcccccaggtgtacatgttcctggtgaaatggcaggacctgtcggagaaggtggtataccg

SEQ ID NO: 13801 - RNA, 92 nt, synthetic construct
  source 1..92: mol_type = other RNA
gaggctgaatggggtcccccgactctggctttcccccaggtttacatgttcctggtgaaatggcaggacctgtcggagaaggtggtctaccg

SEQ ID NO: 13802 - RNA, 92 nt, synthetic construct
  source 1..92: mol_type = other RNA
gaggctgaatggggtcccccgactctggctttcccccaggtctacatgttcctggtgaaatggcaggacctgtcggagaaggtggtttaccg

SEQ ID NO: 13803 - RNA, 92 nt, synthetic construct
  source 1..92: mol_type = other RNA
gaggctgaatggggtcccccgactctggctttcccccaggtatacatgttcctggtgaaatggcaggacctgtcggagaaggtggtctaccg

SEQ ID NO: 13804 - RNA, 92 nt, synthetic construct
  source 1..92: mol_type = other RNA
gaggctgaatggggtcccccgactctggctttcccccaggtatacatgttcctggtgaaatggcaggacctgtcggagaaggtggtgtaccg

SEQ ID NO: 13805 - RNA, 92 nt, synthetic construct
  source 1..92: mol_type = other RNA
gaggctgaatggggtcccccgactctggctttcccccaggtatacatgttcctggtgaaatggcaggacctgtcggagaaggtggtttaccg

SEQ ID NO: 13806 - RNA, 92 nt, synthetic construct
  source 1..92: mol_type = other RNA
gaggctgaatggggtcccccgactctggctttcccccaggtctacatgttcctggtgaaatggcaggacctgtcggagaaggtggtataccg

SEQ ID NO: 13807 - RNA, 92 nt, synthetic construct
  source 1..92: mol_type = other RNA
gaggctgaatggggtcccccgactctggctttcccccaggtctacatgttcctggtgaaatggcaggacctgtcggagaaggtggtctaccg

SEQ ID NO: 13808 - RNA, 92 nt, synthetic construct
  source 1..92: mol_type = other RNA
gaggctgaatggggtcccccgactctggctttcccccaggtctacatgttcctggtgaaatggcaggacctgtcggagaaggtggtgtaccg

SEQ ID NO: 13809 - RNA, 93 nt, synthetic construct
  source 1..93: mol_type = other RNA
ggaggctgaatggggtcccccgactctggctttcccccaggtgtacatgttcctggtgaaatggcaggacctgtcggagaaggtggtgtaccg

SEQ ID NO: 13810 - RNA, 93 nt, synthetic construct
  source 1..93: mol_type = other RNA
ggaggctgaatggggtcccccgactctggctttcccccaggtctacatgttcctggtgaaatggcaggacctgtcggagaaggtggtgtaccg

SEQ ID NO: 13811 - RNA, 93 nt, synthetic construct
  source 1..93: mol_type = other RNA
ggaggctgaatggggtcccccgactctggctttcccccaggtttacatgttcctggtgaaatggcaggacctgtcggagaaggtggtttaccg

SEQ ID NO: 13812 - RNA, 93 nt, synthetic construct
  source 1..93: mol_type = other RNA
ggaggctgaatggggtcccccgactctggctttcccccaggtttacatgttcctggtgaaatggcaggacctgtcggagaaggtggtctaccg

SEQ ID NO: 13813 - RNA, 93 nt, synthetic construct
  source 1..93: mol_type = other RNA
ggaggctgaatggggtcccccgactctggctttcccccaggtttacatgttcctggtgaaatggcaggacctgtcggagaaggtggtataccg

SEQ ID NO: 13814 - RNA, 93 nt, synthetic construct
  source 1..93: mol_type = other RNA
ggaggctgaatggggtcccccgactctggctttcccccaggtctacatgttcctggtgaaatggcaggacctgtcggagaaggtggtataccg

SEQ ID NO: 13815 - RNA, 93 nt, synthetic construct
  source 1..93: mol_type = other RNA
ggaggctgaatggggtcccccgactctggctttcccccaggtgtacatgttcctggtgaaatggcaggacctgtcggagaaggtggtttaccg

SEQ ID NO: 13816 - RNA, 93 nt, synthetic construct
  source 1..93: mol_type = other RNA
ggaggctgaatggggtcccccgactctggctttcccccaggtatacatgttcctggtgaaatggcaggacctgtcggagaaggtggtctaccg

SEQ ID NO: 13817 - RNA, 93 nt, synthetic construct
  source 1..93: mol_type = other RNA
ggaggctgaatggggtcccccgactctggctttcccccaggtatacatgttcctggtgaaatggcaggacctgtcggagaaggtggtgtaccg

SEQ ID NO: 13818 - RNA, 93 nt, synthetic construct
  source 1..93: mol_type = other RNA
ggaggctgaatggggtcccccgactctggctttcccccaggtatacatgttcctggtgaaatggcaggacctgtcggagaaggtggtttaccg

SEQ ID NO: 13819 - RNA, 93 nt, synthetic construct
  source 1..93: mol_type = other RNA
ggaggctgaatggggtcccccgactctggctttcccccaggtttacatgttcctggtgaaatggcaggacctgtcggagaaggtggtgtaccg

SEQ ID NO: 13820 - RNA, 93 nt, synthetic construct
  source 1..93: mol_type = other RNA
ggaggctgaatggggtcccccgactctggctttcccccaggtctacatgttcctggtgaaatggcaggacctgtcggagaaggtggtctaccg

SEQ ID NO: 13821 - RNA, 93 nt, synthetic construct
  source 1..93: mol_type = other RNA
ggaggctgaatggggtcccccgactctggctttcccccaggtctacatgttcctggtgaaatggcaggacctgtcggagaaggtggtttaccg

SEQ ID NO: 13822 - RNA, 93 nt, synthetic construct
  source 1..93: mol_type = other RNA
ggaggctgaatggggtcccccgactctggctttcccccaggtgtacatgttcctggtgaaatggcaggacctgtcggagaaggtggtataccg

SEQ ID NO: 13823 - RNA, 93 nt, synthetic construct
  source 1..93: mol_type = other RNA
ggaggctgaatggggtcccccgactctggctttcccccaggtgtacatgttcctggtgaaatggcaggacctgtcggagaaggtggtctaccg

SEQ ID NO: 13824 - RNA, 93 nt, synthetic construct
  source 1..93: mol_type = other RNA
ggaggctgaatggggtcccccgactctggctttcccccaggtatacatgttcctggtgaaatggcaggacctgtcggagaaggtggtataccg

SEQ ID NO: 13825 - RNA, 94 nt, synthetic construct
  source 1..94: mol_type = other RNA
tggaggctgaatggggtcccccgactctggctttcccccaggtgtacatgttcctggtgaaatggcaggacctgtcggagaaggtggtttaccg

SEQ ID NO: 13826 - RNA, 94 nt, synthetic construct
  source 1..94: mol_type = other RNA
tggaggctgaatggggtcccccgactctggctttcccccaggtatacatgttcctggtgaaatggcaggacctgtcggagaaggtggtataccg

SEQ ID NO: 13827 - RNA, 94 nt, synthetic construct
  source 1..94: mol_type = other RNA
tggaggctgaatggggtcccccgactctggctttcccccaggtatacatgttcctggtgaaatggcaggacctgtcggagaaggtggtctaccg

SEQ ID NO: 13828 - RNA, 94 nt, synthetic construct
  source 1..94: mol_type = other RNA
tggaggctgaatggggtcccccgactctggctttcccccaggtatacatgttcctggtgaaatggcaggacctgtcggagaaggtggtgtaccg

SEQ ID NO: 13829 - RNA, 94 nt, synthetic construct
  source 1..94: mol_type = other RNA
tggaggctgaatggggtcccccgactctggctttcccccaggtctacatgttcctggtgaaatggcaggacctgtcggagaaggtggtataccg

SEQ ID NO: 13830 - RNA, 94 nt, synthetic construct
  source 1..94: mol_type = other RNA
tggaggctgaatggggtcccccgactctggctttcccccaggtatacatgttcctggtgaaatggcaggacctgtcggagaaggtggtttaccg

SEQ ID NO: 13831 - RNA, 94 nt, synthetic construct
  source 1..94: mol_type = other RNA
tggaggctgaatggggtcccccgactctggctttcccccaggtctacatgttcctggtgaaatggcaggacctgtcggagaaggtggtctaccg

SEQ ID NO: 13832 - RNA, 94 nt, synthetic construct
  source 1..94: mol_type = other RNA
tggaggctgaatggggtcccccgactctggctttcccccaggtctacatgttcctggtgaaatggcaggacctgtcggagaaggtggtgtaccg

SEQ ID NO: 13833 - RNA, 94 nt, synthetic construct
  source 1..94: mol_type = other RNA
tggaggctgaatggggtcccccgactctggctttcccccaggtgtacatgttcctggtgaaatggcaggacctgtcggagaaggtggtctaccg

SEQ ID NO: 13834 - RNA, 94 nt, synthetic construct
  source 1..94: mol_type = other RNA
tggaggctgaatggggtcccccgactctggctttcccccaggtgtacatgttcctggtgaaatggcaggacctgtcggagaaggtggtataccg

SEQ ID NO: 13835 - RNA, 94 nt, synthetic construct
  source 1..94: mol_type = other RNA
tggaggctgaatggggtcccccgactctggctttcccccaggtttacatgttcctggtgaaatggcaggacctgtcggagaaggtggtttaccg

SEQ ID NO: 13836 - RNA, 94 nt, synthetic construct
  source 1..94: mol_type = other RNA
tggaggctgaatggggtcccccgactctggctttcccccaggtttacatgttcctggtgaaatggcaggacctgtcggagaaggtggtgtaccg

SEQ ID NO: 13837 - RNA, 94 nt, synthetic construct
  source 1..94: mol_type = other RNA
tggaggctgaatggggtcccccgactctggctttcccccaggtttacatgttcctggtgaaatggcaggacctgtcggagaaggtggtctaccg

SEQ ID NO: 13838 - RNA, 94 nt, synthetic construct
  source 1..94: mol_type = other RNA
tggaggctgaatggggtcccccgactctggctttcccccaggtttacatgttcctggtgaaatggcaggacctgtcggagaaggtggtataccg

SEQ ID NO: 13839 - RNA, 94 nt, synthetic construct
  source 1..94: mol_type = other RNA
tggaggctgaatggggtcccccgactctggctttcccccaggtctacatgttcctggtgaaatggcaggacctgtcggagaaggtggtttaccg

SEQ ID NO: 13840 - RNA, 94 nt, synthetic construct
  source 1..94: mol_type = other RNA
tggaggctgaatggggtcccccgactctggctttcccccaggtgtacatgttcctggtgaaatggcaggacctgtcggagaaggtggtgtaccg

SEQ ID NO: 13841 - RNA, 95 nt, synthetic construct
  source 1..95: mol_type = other RNA
ttggaggctgaatggggtcccccgactctggctttcccccaggtttacatgttcctggtgaaatggcaggacctgtcggagaaggtggtgtaccg

SEQ ID NO: 13842 - RNA, 95 nt, synthetic construct
  source 1..95: mol_type = other RNA
ttggaggctgaatggggtcccccgactctggctttcccccaggtgtacatgttcctggtgaaatggcaggacctgtcggagaaggtggtttaccg

SEQ ID NO: 13843 - RNA, 95 nt, synthetic construct
  source 1..95: mol_type = other RNA
ttggaggctgaatggggtcccccgactctggctttcccccaggtatacatgttcctggtgaaatggcaggacctgtcggagaaggtggtataccg

SEQ ID NO: 13844 - RNA, 95 nt, synthetic construct
  source 1..95: mol_type = other RNA
ttggaggctgaatggggtcccccgactctggctttcccccaggtgtacatgttcctggtgaaatggcaggacctgtcggagaaggtggtctaccg

SEQ ID NO: 13845 - RNA, 95 nt, synthetic construct
  source 1..95: mol_type = other RNA
ttggaggctgaatggggtcccccgactctggctttcccccaggtttacatgttcctggtgaaatggcaggacctgtcggagaaggtggtttaccg

SEQ ID NO: 13846 - RNA, 95 nt, synthetic construct
  source 1..95: mol_type = other RNA
ttggaggctgaatggggtcccccgactctggctttcccccaggtgtacatgttcctggtgaaatggcaggacctgtcggagaaggtggtgtaccg

SEQ ID NO: 13847 - RNA, 95 nt, synthetic construct
  source 1..95: mol_type = other RNA
ttggaggctgaatggggtcccccgactctggctttcccccaggtatacatgttcctggtgaaatggcaggacctgtcggagaaggtggtctaccg

SEQ ID NO: 13848 - RNA, 95 nt, synthetic construct
  source 1..95: mol_type = other RNA
ttggaggctgaatggggtcccccgactctggctttcccccaggtatacatgttcctggtgaaatggcaggacctgtcggagaaggtggtgtaccg

SEQ ID NO: 13849 - RNA, 95 nt, synthetic construct
  source 1..95: mol_type = other RNA
ttggaggctgaatggggtcccccgactctggctttcccccaggtatacatgttcctggtgaaatggcaggacctgtcggagaaggtggtttaccg

SEQ ID NO: 13850 - RNA, 95 nt, synthetic construct
  source 1..95: mol_type = other RNA
ttggaggctgaatggggtcccccgactctggctttcccccaggtctacatgttcctggtgaaatggcaggacctgtcggagaaggtggtataccg

SEQ ID NO: 13851 - RNA, 95 nt, synthetic construct
  source 1..95: mol_type = other RNA
ttggaggctgaatggggtcccccgactctggctttcccccaggtttacatgttcctggtgaaatggcaggacctgtcggagaaggtggtctaccg

SEQ ID NO: 13852 - RNA, 95 nt, synthetic construct
  source 1..95: mol_type = other RNA
ttggaggctgaatggggtcccccgactctggctttcccccaggtctacatgttcctggtgaaatggcaggacctgtcggagaaggtggtctaccg

SEQ ID NO: 13853 - RNA, 95 nt, synthetic construct
  source 1..95: mol_type = other RNA
ttggaggctgaatggggtcccccgactctggctttcccccaggtctacatgttcctggtgaaatggcaggacctgtcggagaaggtggtgtaccg

SEQ ID NO: 13854 - RNA, 95 nt, synthetic construct
  source 1..95: mol_type = other RNA
ttggaggctgaatggggtcccccgactctggctttcccccaggtctacatgttcctggtgaaatggcaggacctgtcggagaaggtggtttaccg

SEQ ID NO: 13855 - RNA, 95 nt, synthetic construct
  source 1..95: mol_type = other RNA
ttggaggctgaatggggtcccccgactctggctttcccccaggtgtacatgttcctggtgaaatggcaggacctgtcggagaaggtggtataccg

SEQ ID NO: 13856 - RNA, 95 nt, synthetic construct
  source 1..95: mol_type = other RNA
ttggaggctgaatggggtcccccgactctggctttcccccaggtttacatgttcctggtgaaatggcaggacctgtcggagaaggtggtataccg

SEQ ID NO: 13857 - RNA, 96 nt, synthetic construct
  source 1..96: mol_type = other RNA
tttggaggctgaatggggtcccccgactctggctttcccccaggtgtacatgttcctggtgaaatggcaggacctgtcggagaaggtggtataccg

SEQ ID NO: 13858 - RNA, 96 nt, synthetic construct
  source 1..96: mol_type = other RNA
tttggaggctgaatggggtcccccgactctggctttcccccaggtctacatgttcctggtgaaatggcaggacctgtcggagaaggtggtttaccg

SEQ ID NO: 13859 - RNA, 96 nt, synthetic construct
  source 1..96: mol_type = other RNA
tttggaggctgaatggggtcccccgactctggctttcccccaggtttacatgttcctggtgaaatggcaggacctgtcggagaaggtggtgtaccg

SEQ ID NO: 13860 - RNA, 96 nt, synthetic construct
  source 1..96: mol_type = other RNA
tttggaggctgaatggggtcccccgactctggctttcccccaggtttacatgttcctggtgaaatggcaggacctgtcggagaaggtggtctaccg

SEQ ID NO: 13861 - RNA, 96 nt, synthetic construct
  source 1..96: mol_type = other RNA
tttggaggctgaatggggtcccccgactctggctttcccccaggtttacatgttcctggtgaaatggcaggacctgtcggagaaggtggtataccg

SEQ ID NO: 13862 - RNA, 96 nt, synthetic construct
  source 1..96: mol_type = other RNA
tttggaggctgaatggggtcccccgactctggctttcccccaggtgtacatgttcctggtgaaatggcaggacctgtcggagaaggtggtttaccg

SEQ ID NO: 13863 - RNA, 96 nt, synthetic construct
  source 1..96: mol_type = other RNA
tttggaggctgaatggggtcccccgactctggctttcccccaggtgtacatgttcctggtgaaatggcaggacctgtcggagaaggtggtgtaccg

SEQ ID NO: 13864 - RNA, 96 nt, synthetic construct
  source 1..96: mol_type = other RNA
tttggaggctgaatggggtcccccgactctggctttcccccaggtttacatgttcctggtgaaatggcaggacctgtcggagaaggtggtttaccg

SEQ ID NO: 13865 - RNA, 96 nt, synthetic construct
  source 1..96: mol_type = other RNA
tttggaggctgaatggggtcccccgactctggctttcccccaggtgtacatgttcctggtgaaatggcaggacctgtcggagaaggtggtctaccg

SEQ ID NO: 13866 - RNA, 96 nt, synthetic construct
  source 1..96: mol_type = other RNA
tttggaggctgaatggggtcccccgactctggctttcccccaggtctacatgttcctggtgaaatggcaggacctgtcggagaaggtggtgtaccg

SEQ ID NO: 13867 - RNA, 96 nt, synthetic construct
  source 1..96: mol_type = other RNA
tttggaggctgaatggggtcccccgactctggctttcccccaggtctacatgttcctggtgaaatggcaggacctgtcggagaaggtggtctaccg

SEQ ID NO: 13868 - RNA, 96 nt, synthetic construct
  source 1..96: mol_type = other RNA
tttggaggctgaatggggtcccccgactctggctttcccccaggtatacatgttcctggtgaaatggcaggacctgtcggagaaggtggtttaccg

SEQ ID NO: 13869 - RNA, 96 nt, synthetic construct
  source 1..96: mol_type = other RNA
tttggaggctgaatggggtcccccgactctggctttcccccaggtatacatgttcctggtgaaatggcaggacctgtcggagaaggtggtgtaccg

SEQ ID NO: 13870 - RNA, 96 nt, synthetic construct
  source 1..96: mol_type = other RNA
tttggaggctgaatggggtcccccgactctggctttcccccaggtatacatgttcctggtgaaatggcaggacctgtcggagaaggtggtctaccg

SEQ ID NO: 13871 - RNA, 96 nt, synthetic construct
  source 1..96: mol_type = other RNA
tttggaggctgaatggggtcccccgactctggctttcccccaggtatacatgttcctggtgaaatggcaggacctgtcggagaaggtggtataccg

SEQ ID NO: 13872 - RNA, 96 nt, synthetic construct
  source 1..96: mol_type = other RNA
tttggaggctgaatggggtcccccgactctggctttcccccaggtctacatgttcctggtgaaatggcaggacctgtcggagaaggtggtataccg

SEQ ID NO: 13873 - RNA, 97 nt, synthetic construct
  source 1..97: mol_type = other RNA
ctttggaggctgaatggggtcccccgactctggctttcccccaggtgtacatgttcctggtgaaatggcaggacctgtcggagaaggtggtctaccg

SEQ ID NO: 13874 - RNA, 97 nt, synthetic construct
  source 1..97: mol_type = other RNA
ctttggaggctgaatggggtcccccgactctggctttcccccaggtatacatgttcctggtgaaatggcaggacctgtcggagaaggtggtataccg

SEQ ID NO: 13875 - RNA, 97 nt, synthetic construct
  source 1..97: mol_type = other RNA
ctttggaggctgaatggggtcccccgactctggctttcccccaggtatacatgttcctggtgaaatggcaggacctgtcggagaaggtggtttaccg

SEQ ID NO: 13876 - RNA, 97 nt, synthetic construct
  source 1..97: mol_type = other RNA
ctttggaggctgaatggggtcccccgactctggctttcccccaggtgtacatgttcctggtgaaatggcaggacctgtcggagaaggtggtgtaccg

SEQ ID NO: 13877 - RNA, 97 nt, synthetic construct
  source 1..97: mol_type = other RNA
ctttggaggctgaatggggtcccccgactctggctttcccccaggtatacatgttcctggtgaaatggcaggacctgtcggagaaggtggtgtaccg

SEQ ID NO: 13878 - RNA, 97 nt, synthetic construct
  source 1..97: mol_type = other RNA
ctttggaggctgaatggggtcccccgactctggctttcccccaggtctacatgttcctggtgaaatggcaggacctgtcggagaaggtggtgtaccg

SEQ ID NO: 13879 - RNA, 97 nt, synthetic construct
  source 1..97: mol_type = other RNA
ctttggaggctgaatggggtcccccgactctggctttcccccaggtctacatgttcctggtgaaatggcaggacctgtcggagaaggtggtataccg

SEQ ID NO: 13880 - RNA, 97 nt, synthetic construct
  source 1..97: mol_type = other RNA
ctttggaggctgaatggggtcccccgactctggctttcccccaggtctacatgttcctggtgaaatggcaggacctgtcggagaaggtggtttaccg

SEQ ID NO: 13881 - RNA, 97 nt, synthetic construct
  source 1..97: mol_type = other RNA
ctttggaggctgaatggggtcccccgactctggctttcccccaggtttacatgttcctggtgaaatggcaggacctgtcggagaaggtggtataccg

SEQ ID NO: 13882 - RNA, 97 nt, synthetic construct
  source 1..97: mol_type = other RNA
ctttggaggctgaatggggtcccccgactctggctttcccccaggtgtacatgttcctggtgaaatggcaggacctgtcggagaaggtggtttaccg

SEQ ID NO: 13883 - RNA, 97 nt, synthetic construct
  source 1..97: mol_type = other RNA
ctttggaggctgaatggggtcccccgactctggctttcccccaggtatacatgttcctggtgaaatggcaggacctgtcggagaaggtggtctaccg

SEQ ID NO: 13884 - RNA, 97 nt, synthetic construct
  source 1..97: mol_type = other RNA
ctttggaggctgaatggggtcccccgactctggctttcccccaggtctacatgttcctggtgaaatggcaggacctgtcggagaaggtggtctaccg

SEQ ID NO: 13885 - RNA, 97 nt, synthetic construct
  source 1..97: mol_type = other RNA
ctttggaggctgaatggggtcccccgactctggctttcccccaggtgtacatgttcctggtgaaatggcaggacctgtcggagaaggtggtataccg

SEQ ID NO: 13886 - RNA, 97 nt, synthetic construct
  source 1..97: mol_type = other RNA
ctttggaggctgaatggggtcccccgactctggctttcccccaggtttacatgttcctggtgaaatggcaggacctgtcggagaaggtggtttaccg

SEQ ID NO: 13887 - RNA, 97 nt, synthetic construct
  source 1..97: mol_type = other RNA
ctttggaggctgaatggggtcccccgactctggctttcccccaggtttacatgttcctggtgaaatggcaggacctgtcggagaaggtggtgtaccg

SEQ ID NO: 13888 - RNA, 97 nt, synthetic construct
  source 1..97: mol_type = other RNA
ctttggaggctgaatggggtcccccgactctggctttcccccaggtttacatgttcctggtgaaatggcaggacctgtcggagaaggtggtctaccg

SEQ ID NO: 13889 - RNA, 98 nt, synthetic construct
  source 1..98: mol_type = other RNA
tctttggaggctgaatggggtcccccgactctggctttcccccaggtctacatgttcctggtgaaatggcaggacctgtcggagaaggtggtataccg

SEQ ID NO: 13890 - RNA, 98 nt, synthetic construct
  source 1..98: mol_type = other RNA
tctttggaggctgaatggggtcccccgactctggctttcccccaggtgtacatgttcctggtgaaatggcaggacctgtcggagaaggtggtctaccg

SEQ ID NO: 13891 - RNA, 98 nt, synthetic construct
  source 1..98: mol_type = other RNA
tctttggaggctgaatggggtcccccgactctggctttcccccaggtatacatgttcctggtgaaatggcaggacctgtcggagaaggtggtataccg

SEQ ID NO: 13892 - RNA, 98 nt, synthetic construct
  source 1..98: mol_type = other RNA
tctttggaggctgaatggggtcccccgactctggctttcccccaggtatacatgttcctggtgaaatggcaggacctgtcggagaaggtggtctaccg

SEQ ID NO: 13893 - RNA, 98 nt, synthetic construct
  source 1..98: mol_type = other RNA
tctttggaggctgaatggggtcccccgactctggctttcccccaggtatacatgttcctggtgaaatggcaggacctgtcggagaaggtggtgtaccg

SEQ ID NO: 13894 - RNA, 98 nt, synthetic construct
  source 1..98: mol_type = other RNA
tctttggaggctgaatggggtcccccgactctggctttcccccaggtctacatgttcctggtgaaatggcaggacctgtcggagaaggtggtctaccg

SEQ ID NO: 13895 - RNA, 98 nt, synthetic construct
  source 1..98: mol_type = other RNA
tctttggaggctgaatggggtcccccgactctggctttcccccaggtctacatgttcctggtgaaatggcaggacctgtcggagaaggtggtttaccg

SEQ ID NO: 13896 - RNA, 98 nt, synthetic construct
  source 1..98: mol_type = other RNA
tctttggaggctgaatggggtcccccgactctggctttcccccaggtgtacatgttcctggtgaaatggcaggacctgtcggagaaggtggtataccg

SEQ ID NO: 13897 - RNA, 98 nt, synthetic construct
  source 1..98: mol_type = other RNA
tctttggaggctgaatggggtcccccgactctggctttcccccaggtgtacatgttcctggtgaaatggcaggacctgtcggagaaggtggtgtaccg

SEQ ID NO: 13898 - RNA, 98 nt, synthetic construct
  source 1..98: mol_type = other RNA
tctttggaggctgaatggggtcccccgactctggctttcccccaggtgtacatgttcctggtgaaatggcaggacctgtcggagaaggtggtttaccg

SEQ ID NO: 13899 - RNA, 98 nt, synthetic construct
  source 1..98: mol_type = other RNA
tctttggaggctgaatggggtcccccgactctggctttcccccaggtttacatgttcctggtgaaatggcaggacctgtcggagaaggtggtataccg

SEQ ID NO: 13900 - RNA, 98 nt, synthetic construct
  source 1..98: mol_type = other RNA
tctttggaggctgaatggggtcccccgactctggctttcccccaggtttacatgttcctggtgaaatggcaggacctgtcggagaaggtggtctaccg

SEQ ID NO: 13901 - RNA, 98 nt, synthetic construct
  source 1..98: mol_type = other RNA
tctttggaggctgaatggggtcccccgactctggctttcccccaggtttacatgttcctggtgaaatggcaggacctgtcggagaaggtggtgtaccg

SEQ ID NO: 13902 - RNA, 98 nt, synthetic construct
  source 1..98: mol_type = other RNA
tctttggaggctgaatggggtcccccgactctggctttcccccaggtttacatgttcctggtgaaatggcaggacctgtcggagaaggtggtttaccg

SEQ ID NO: 13903 - RNA, 98 nt, synthetic construct
  source 1..98: mol_type = other RNA
tctttggaggctgaatggggtcccccgactctggctttcccccaggtctacatgttcctggtgaaatggcaggacctgtcggagaaggtggtgtaccg

SEQ ID NO: 13904 - RNA, 98 nt, synthetic construct
  source 1..98: mol_type = other RNA
tctttggaggctgaatggggtcccccgactctggctttcccccaggtatacatgttcctggtgaaatggcaggacctgtcggagaaggtggtttaccg

SEQ ID NO: 13905 - RNA, 99 nt, synthetic construct
  source 1..99: mol_type = other RNA
ctctttggaggctgaatggggtcccccgactctggctttcccccaggtatacatgttcctggtgaaatggcaggacctgtcggagaaggtggtttaccg

SEQ ID NO: 13906 - RNA, 99 nt, synthetic construct
  source 1..99: mol_type = other RNA
ctctttggaggctgaatggggtcccccgactctggctttcccccaggtctacatgttcctggtgaaatggcaggacctgtcggagaaggtggtataccg

SEQ ID NO: 13907 - RNA, 99 nt, synthetic construct
  source 1..99: mol_type = other RNA
ctctttggaggctgaatggggtcccccgactctggctttcccccaggtctacatgttcctggtgaaatggcaggacctgtcggagaaggtggtctaccg

SEQ ID NO: 13908 - RNA, 99 nt, synthetic construct
  source 1..99: mol_type = other RNA
ctctttggaggctgaatggggtcccccgactctggctttcccccaggtgtacatgttcctggtgaaatggcaggacctgtcggagaaggtggtctaccg

SEQ ID NO: 13909 - RNA, 99 nt, synthetic construct
  source 1..99: mol_type = other RNA
ctctttggaggctgaatggggtcccccgactctggctttcccccaggtctacatgttcctggtgaaatggcaggacctgtcggagaaggtggtttaccg

SEQ ID NO: 13910 - RNA, 99 nt, synthetic construct
  source 1..99: mol_type = other RNA
ctctttggaggctgaatggggtcccccgactctggctttcccccaggtgtacatgttcctggtgaaatggcaggacctgtcggagaaggtggtataccg

SEQ ID NO: 13911 - RNA, 99 nt, synthetic construct
  source 1..99: mol_type = other RNA
ctctttggaggctgaatggggtcccccgactctggctttcccccaggtgtacatgttcctggtgaaatggcaggacctgtcggagaaggtggtgtaccg

SEQ ID NO: 13912 - RNA, 99 nt, synthetic construct
  source 1..99: mol_type = other RNA
ctctttggaggctgaatggggtcccccgactctggctttcccccaggtgtacatgttcctggtgaaatggcaggacctgtcggagaaggtggtttaccg

SEQ ID NO: 13913 - RNA, 99 nt, synthetic construct
  source 1..99: mol_type = other RNA
ctctttggaggctgaatggggtcccccgactctggctttcccccaggtttacatgttcctggtgaaatggcaggacctgtcggagaaggtggtataccg

SEQ ID NO: 13914 - RNA, 99 nt, synthetic construct
  source 1..99: mol_type = other RNA
ctctttggaggctgaatggggtcccccgactctggctttcccccaggtttacatgttcctggtgaaatggcaggacctgtcggagaaggtggtttaccg

SEQ ID NO: 13915 - RNA, 99 nt, synthetic construct
  source 1..99: mol_type = other RNA
ctctttggaggctgaatggggtcccccgactctggctttcccccaggtatacatgttcctggtgaaatggcaggacctgtcggagaaggtggtgtaccg

SEQ ID NO: 13916 - RNA, 99 nt, synthetic construct
  source 1..99: mol_type = other RNA
ctctttggaggctgaatggggtcccccgactctggctttcccccaggtttacatgttcctggtgaaatggcaggacctgtcggagaaggtggtgtaccg

SEQ ID NO: 13917 - RNA, 99 nt, synthetic construct
  source 1..99: mol_type = other RNA
ctctttggaggctgaatggggtcccccgactctggctttcccccaggtctacatgttcctggtgaaatggcaggacctgtcggagaaggtggtgtaccg

SEQ ID NO: 13918 - RNA, 99 nt, synthetic construct
  source 1..99: mol_type = other RNA
ctctttggaggctgaatggggtcccccgactctggctttcccccaggtatacatgttcctggtgaaatggcaggacctgtcggagaaggtggtctaccg

SEQ ID NO: 13919 - RNA, 99 nt, synthetic construct
  source 1..99: mol_type = other RNA
ctctttggaggctgaatggggtcccccgactctggctttcccccaggtttacatgttcctggtgaaatggcaggacctgtcggagaaggtggtctaccg

SEQ ID NO: 13920 - RNA, 99 nt, synthetic construct
  source 1..99: mol_type = other RNA
ctctttggaggctgaatggggtcccccgactctggctttcccccaggtatacatgttcctggtgaaatggcaggacctgtcggagaaggtggtataccg

SEQ ID NO: 13921 - RNA, 100 nt, synthetic construct
  source 1..100: mol_type = other RNA
cctctttggaggctgaatggggtcccccgactctggctttcccccaggtctacatgttcctggtgaaatggcaggacctgtcggagaaggtggtgtaccg

SEQ ID NO: 13922 - RNA, 100 nt, synthetic construct
  source 1..100: mol_type = other RNA
cctctttggaggctgaatggggtcccccgactctggctttcccccaggtttacatgttcctggtgaaatggcaggacctgtcggagaaggtggtctaccg

SEQ ID NO: 13923 - RNA, 100 nt, synthetic construct
  source 1..100: mol_type = other RNA
cctctttggaggctgaatggggtcccccgactctggctttcccccaggtctacatgttcctggtgaaatggcaggacctgtcggagaaggtggtataccg

SEQ ID NO: 13924 - RNA, 100 nt, synthetic construct
  source 1..100: mol_type = other RNA
cctctttggaggctgaatggggtcccccgactctggctttcccccaggtgtacatgttcctggtgaaatggcaggacctgtcggagaaggtggtttaccg

SEQ ID NO: 13925 - RNA, 100 nt, synthetic construct
  source 1..100: mol_type = other RNA
cctctttggaggctgaatggggtcccccgactctggctttcccccaggtatacatgttcctggtgaaatggcaggacctgtcggagaaggtggtataccg

SEQ ID NO: 13926 - RNA, 100 nt, synthetic construct
  source 1..100: mol_type = other RNA
cctctttggaggctgaatggggtcccccgactctggctttcccccaggtatacatgttcctggtgaaatggcaggacctgtcggagaaggtggtctaccg

SEQ ID NO: 13927 - RNA, 100 nt, synthetic construct
  source 1..100: mol_type = other RNA
cctctttggaggctgaatggggtcccccgactctggctttcccccaggtatacatgttcctggtgaaatggcaggacctgtcggagaaggtggtgtaccg

SEQ ID NO: 13928 - RNA, 100 nt, synthetic construct
  source 1..100: mol_type = other RNA
cctctttggaggctgaatggggtcccccgactctggctttcccccaggtatacatgttcctggtgaaatggcaggacctgtcggagaaggtggtttaccg

SEQ ID NO: 13929 - RNA, 100 nt, synthetic construct
  source 1..100: mol_type = other RNA
cctctttggaggctgaatggggtcccccgactctggctttcccccaggtttacatgttcctggtgaaatggcaggacctgtcggagaaggtggtgtaccg

SEQ ID NO: 13930 - RNA, 100 nt, synthetic construct
  source 1..100: mol_type = other RNA
cctctttggaggctgaatggggtcccccgactctggctttcccccaggtctacatgttcctggtgaaatggcaggacctgtcggagaaggtggtctaccg

SEQ ID NO: 13931 - RNA, 100 nt, synthetic construct
  source 1..100: mol_type = other RNA
cctctttggaggctgaatggggtcccccgactctggctttcccccaggtctacatgttcctggtgaaatggcaggacctgtcggagaaggtggtttaccg

SEQ ID NO: 13932 - RNA, 100 nt, synthetic construct
  source 1..100: mol_type = other RNA
cctctttggaggctgaatggggtcccccgactctggctttcccccaggtgtacatgttcctggtgaaatggcaggacctgtcggagaaggtggtataccg

SEQ ID NO: 13933 - RNA, 100 nt, synthetic construct
  source 1..100: mol_type = other RNA
cctctttggaggctgaatggggtcccccgactctggctttcccccaggtgtacatgttcctggtgaaatggcaggacctgtcggagaaggtggtgtaccg

SEQ ID NO: 13934 - RNA, 100 nt, synthetic construct
  source 1..100: mol_type = other RNA
cctctttggaggctgaatggggtcccccgactctggctttcccccaggtgtacatgttcctggtgaaatggcaggacctgtcggagaaggtggtctaccg

SEQ ID NO: 13935 - RNA, 100 nt, synthetic construct
  source 1..100: mol_type = other RNA
cctctttggaggctgaatggggtcccccgactctggctttcccccaggtttacatgttcctggtgaaatggcaggacctgtcggagaaggtggtataccg

SEQ ID NO: 13936 - RNA, 100 nt, synthetic construct
  source 1..100: mol_type = other RNA
cctctttggaggctgaatggggtcccccgactctggctttcccccaggtttacatgttcctggtgaaatggcaggacctgtcggagaaggtggtttaccg

SEQ ID NO: 13937 - RNA, 101 nt, synthetic construct
  source 1..101: mol_type = other RNA
gcctctttggaggctgaatggggtcccccgactctggctttcccccaggtctacatgttcctggtgaaatggcaggacctgtcggagaaggtggtgtaccg

SEQ ID NO: 13938 - RNA, 101 nt, synthetic construct
  source 1..101: mol_type = other RNA
gcctctttggaggctgaatggggtcccccgactctggctttcccccaggtgtacatgttcctggtgaaatggcaggacctgtcggagaaggtggtctaccg

SEQ ID NO: 13939 - RNA, 101 nt, synthetic construct
  source 1..101: mol_type = other RNA
gcctctttggaggctgaatggggtcccccgactctggctttcccccaggtttacatgttcctggtgaaatggcaggacctgtcggagaaggtggtgtaccg

SEQ ID NO: 13940 - RNA, 101 nt, synthetic construct
  source 1..101: mol_type = other RNA
gcctctttggaggctgaatggggtcccccgactctggctttcccccaggtttacatgttcctggtgaaatggcaggacctgtcggagaaggtggtctaccg

SEQ ID NO: 13941 - RNA, 101 nt, synthetic construct
  source 1..101: mol_type = other RNA
gcctctttggaggctgaatggggtcccccgactctggctttcccccaggtttacatgttcctggtgaaatggcaggacctgtcggagaaggtggtataccg

SEQ ID NO: 13942 - RNA, 101 nt, synthetic construct
  source 1..101: mol_type = other RNA
gcctctttggaggctgaatggggtcccccgactctggctttcccccaggtgtacatgttcctggtgaaatggcaggacctgtcggagaaggtggtttaccg

SEQ ID NO: 13943 - RNA, 101 nt, synthetic construct
  source 1..101: mol_type = other RNA
gcctctttggaggctgaatggggtcccccgactctggctttcccccaggtgtacatgttcctggtgaaatggcaggacctgtcggagaaggtggtgtaccg

SEQ ID NO: 13944 - RNA, 101 nt, synthetic construct
  source 1..101: mol_type = other RNA
gcctctttggaggctgaatggggtcccccgactctggctttcccccaggtatacatgttcctggtgaaatggcaggacctgtcggagaaggtggtctaccg

SEQ ID NO: 13945 - RNA, 101 nt, synthetic construct
  source 1..101: mol_type = other RNA
gcctctttggaggctgaatggggtcccccgactctggctttcccccaggtgtacatgttcctggtgaaatggcaggacctgtcggagaaggtggtataccg

SEQ ID NO: 13946 - RNA, 101 nt, synthetic construct
  source 1..101: mol_type = other RNA
gcctctttggaggctgaatggggtcccccgactctggctttcccccaggtctacatgttcctggtgaaatggcaggacctgtcggagaaggtggtttaccg

SEQ ID NO: 13947 - RNA, 101 nt, synthetic construct
  source 1..101: mol_type = other RNA
gcctctttggaggctgaatggggtcccccgactctggctttcccccaggtctacatgttcctggtgaaatggcaggacctgtcggagaaggtggtctaccg

SEQ ID NO: 13948 - RNA, 101 nt, synthetic construct
  source 1..101: mol_type = other RNA
gcctctttggaggctgaatggggtcccccgactctggctttcccccaggtctacatgttcctggtgaaatggcaggacctgtcggagaaggtggtataccg

SEQ ID NO: 13949 - RNA, 101 nt, synthetic construct
  source 1..101: mol_type = other RNA
gcctctttggaggctgaatggggtcccccgactctggctttcccccaggtatacatgttcctggtgaaatggcaggacctgtcggagaaggtggtttaccg

SEQ ID NO: 13950 - RNA, 101 nt, synthetic construct
  source 1..101: mol_type = other RNA
gcctctttggaggctgaatggggtcccccgactctggctttcccccaggtatacatgttcctggtgaaatggcaggacctgtcggagaaggtggtgtaccg

SEQ ID NO: 13951 - RNA, 101 nt, synthetic construct
  source 1..101: mol_type = other RNA
gcctctttggaggctgaatggggtcccccgactctggctttcccccaggtatacatgttcctggtgaaatggcaggacctgtcggagaaggtggtataccg

SEQ ID NO: 13952 - RNA, 101 nt, synthetic construct
  source 1..101: mol_type = other RNA
gcctctttggaggctgaatggggtcccccgactctggctttcccccaggtttacatgttcctggtgaaatggcaggacctgtcggagaaggtggtttaccg

SEQ ID NO: 13953 - RNA, 102 nt, synthetic construct
  source 1..102: mol_type = other RNA
agcctctttggaggctgaatggggtcccccgactctggctttcccccaggtgtacatgttcctggtgaaatggcaggacctgtcggagaaggtggtttaccg

SEQ ID NO: 13954 - RNA, 102 nt, synthetic construct
  source 1..102: mol_type = other RNA
agcctctttggaggctgaatggggtcccccgactctggctttcccccaggtctacatgttcctggtgaaatggcaggacctgtcggagaaggtggtttaccg

SEQ ID NO: 13955 - RNA, 102 nt, synthetic construct
  source 1..102: mol_type = other RNA
agcctctttggaggctgaatggggtcccccgactctggctttcccccaggtgtacatgttcctggtgaaatggcaggacctgtcggagaaggtggtataccg

SEQ ID NO: 13956 - RNA, 102 nt, synthetic construct
  source 1..102: mol_type = other RNA
agcctctttggaggctgaatggggtcccccgactctggctttcccccaggtgtacatgttcctggtgaaatggcaggacctgtcggagaaggtggtctaccg

SEQ ID NO: 13957 - RNA, 102 nt, synthetic construct
  source 1..102: mol_type = other RNA
agcctctttggaggctgaatggggtcccccgactctggctttcccccaggtttacatgttcctggtgaaatggcaggacctgtcggagaaggtggtctaccg

SEQ ID NO: 13958 - RNA, 102 nt, synthetic construct
  source 1..102: mol_type = other RNA
agcctctttggaggctgaatggggtcccccgactctggctttcccccaggtttacatgttcctggtgaaatggcaggacctgtcggagaaggtggtgtaccg

SEQ ID NO: 13959 - RNA, 102 nt, synthetic construct
  source 1..102: mol_type = other RNA
agcctctttggaggctgaatggggtcccccgactctggctttcccccaggtttacatgttcctggtgaaatggcaggacctgtcggagaaggtggtttaccg

SEQ ID NO: 13960 - RNA, 102 nt, synthetic construct
  source 1..102: mol_type = other RNA
agcctctttggaggctgaatggggtcccccgactctggctttcccccaggtctacatgttcctggtgaaatggcaggacctgtcggagaaggtggtgtaccg

SEQ ID NO: 13961 - RNA, 102 nt, synthetic construct
  source 1..102: mol_type = other RNA
agcctctttggaggctgaatggggtcccccgactctggctttcccccaggtgtacatgttcctggtgaaatggcaggacctgtcggagaaggtggtgtaccg

SEQ ID NO: 13962 - RNA, 102 nt, synthetic construct
  source 1..102: mol_type = other RNA
agcctctttggaggctgaatggggtcccccgactctggctttcccccaggtatacatgttcctggtgaaatggcaggacctgtcggagaaggtggtctaccg

SEQ ID NO: 13963 - RNA, 102 nt, synthetic construct
  source 1..102: mol_type = other RNA
agcctctttggaggctgaatggggtcccccgactctggctttcccccaggtatacatgttcctggtgaaatggcaggacctgtcggagaaggtggtataccg

SEQ ID NO: 13964 - RNA, 102 nt, synthetic construct
  source 1..102: mol_type = other RNA
agcctctttggaggctgaatggggtcccccgactctggctttcccccaggtctacatgttcctggtgaaatggcaggacctgtcggagaaggtggtataccg

SEQ ID NO: 13965 - RNA, 102 nt, synthetic construct
  source 1..102: mol_type = other RNA
agcctctttggaggctgaatggggtcccccgactctggctttcccccaggtatacatgttcctggtgaaatggcaggacctgtcggagaaggtggtttaccg

SEQ ID NO: 13966 - RNA, 102 nt, synthetic construct
  source 1..102: mol_type = other RNA
agcctctttggaggctgaatggggtcccccgactctggctttcccccaggtctacatgttcctggtgaaatggcaggacctgtcggagaaggtggtctaccg

SEQ ID NO: 13967 - RNA, 102 nt, synthetic construct
  source 1..102: mol_type = other RNA
agcctctttggaggctgaatggggtcccccgactctggctttcccccaggtatacatgttcctggtgaaatggcaggacctgtcggagaaggtggtgtaccg

SEQ ID NO: 13968 - RNA, 102 nt, synthetic construct
  source 1..102: mol_type = other RNA
agcctctttggaggctgaatggggtcccccgactctggctttcccccaggtttacatgttcctggtgaaatggcaggacctgtcggagaaggtggtataccg

SEQ ID NO: 13969 - RNA, 103 nt, synthetic construct
  source 1..103: mol_type = other RNA
aagcctctttggaggctgaatggggtcccccgactctggctttcccccaggtatacatgttcctggtgaaatggcaggacctgtcggagaaggtggtctaccg

SEQ ID NO: 13970 - RNA, 103 nt, synthetic construct
  source 1..103: mol_type = other RNA
aagcctctttggaggctgaatggggtcccccgactctggctttcccccaggtctacatgttcctggtgaaatggcaggacctgtcggagaaggtggtctaccg

SEQ ID NO: 13971 - RNA, 103 nt, synthetic construct
  source 1..103: mol_type = other RNA
aagcctctttggaggctgaatggggtcccccgactctggctttcccccaggtctacatgttcctggtgaaatggcaggacctgtcggagaaggtggtgtaccg

SEQ ID NO: 13972 - RNA, 103 nt, synthetic construct
  source 1..103: mol_type = other RNA
aagcctctttggaggctgaatggggtcccccgactctggctttcccccaggtttacatgttcctggtgaaatggcaggacctgtcggagaaggtggtgtaccg

SEQ ID NO: 13973 - RNA, 103 nt, synthetic construct
  source 1..103: mol_type = other RNA
aagcctctttggaggctgaatggggtcccccgactctggctttcccccaggtttacatgttcctggtgaaatggcaggacctgtcggagaaggtggtctaccg

SEQ ID NO: 13974 - RNA, 103 nt, synthetic construct
  source 1..103: mol_type = other RNA
aagcctctttggaggctgaatggggtcccccgactctggctttcccccaggtttacatgttcctggtgaaatggcaggacctgtcggagaaggtggtataccg

SEQ ID NO: 13975 - RNA, 103 nt, synthetic construct
  source 1..103: mol_type = other RNA
aagcctctttggaggctgaatggggtcccccgactctggctttcccccaggtgtacatgttcctggtgaaatggcaggacctgtcggagaaggtggtttaccg

SEQ ID NO: 13976 - RNA, 103 nt, synthetic construct
  source 1..103: mol_type = other RNA
aagcctctttggaggctgaatggggtcccccgactctggctttcccccaggtgtacatgttcctggtgaaatggcaggacctgtcggagaaggtggtgtaccg

SEQ ID NO: 13977 - RNA, 103 nt, synthetic construct
  source 1..103: mol_type = other RNA
aagcctctttggaggctgaatggggtcccccgactctggctttcccccaggtgtacatgttcctggtgaaatggcaggacctgtcggagaaggtggtataccg

SEQ ID NO: 13978 - RNA, 103 nt, synthetic construct
  source 1..103: mol_type = other RNA
aagcctctttggaggctgaatggggtcccccgactctggctttcccccaggtctacatgttcctggtgaaatggcaggacctgtcggagaaggtggtttaccg

SEQ ID NO: 13979 - RNA, 103 nt, synthetic construct
  source 1..103: mol_type = other RNA
aagcctctttggaggctgaatggggtcccccgactctggctttcccccaggtctacatgttcctggtgaaatggcaggacctgtcggagaaggtggtataccg

SEQ ID NO: 13980 - RNA, 103 nt, synthetic construct
  source 1..103: mol_type = other RNA
aagcctctttggaggctgaatggggtcccccgactctggctttcccccaggtatacatgttcctggtgaaatggcaggacctgtcggagaaggtggtttaccg

SEQ ID NO: 13981 - RNA, 103 nt, synthetic construct
  source 1..103: mol_type = other RNA
aagcctctttggaggctgaatggggtcccccgactctggctttcccccaggtatacatgttcctggtgaaatggcaggacctgtcggagaaggtggtgtaccg

SEQ ID NO: 13982 - RNA, 103 nt, synthetic construct
  source 1..103: mol_type = other RNA
aagcctctttggaggctgaatggggtcccccgactctggctttcccccaggtttacatgttcctggtgaaatggcaggacctgtcggagaaggtggtttaccg

SEQ ID NO: 13983 - RNA, 103 nt, synthetic construct
  source 1..103: mol_type = other RNA
aagcctctttggaggctgaatggggtcccccgactctggctttcccccaggtatacatgttcctggtgaaatggcaggacctgtcggagaaggtggtataccg

SEQ ID NO: 13984 - RNA, 103 nt, synthetic construct
  source 1..103: mol_type = other RNA
aagcctctttggaggctgaatggggtcccccgactctggctttcccccaggtgtacatgttcctggtgaaatggcaggacctgtcggagaaggtggtctaccg

SEQ ID NO: 13985 - RNA, 16 nt, synthetic construct
  source 1..16: mol_type = other RNA
actcacatggaactcg

SEQ ID NO: 13986 - RNA, 17 nt, synthetic construct
  source 1..17: mol_type = other RNA
cactcacatggaactcg

SEQ ID NO: 13987 - RNA, 18 nt, synthetic construct
  source 1..18: mol_type = other RNA
acactcacatggaactcg

SEQ ID NO: 13988 - RNA, 19 nt, synthetic construct
  source 1..19: mol_type = other RNA
cacactcacatggaactcg

SEQ ID NO: 13989 - RNA, 20 nt, synthetic construct
  source 1..20: mol_type = other RNA
ccacactcacatggaactcg

SEQ ID NO: 13990 - RNA, 21 nt, synthetic construct
  source 1..21: mol_type = other RNA
cccacactcacatggaactcg

SEQ ID NO: 13991 - RNA, 22 nt, synthetic construct
  source 1..22: mol_type = other RNA
ccccacactcacatggaactcg

SEQ ID NO: 13992-13998 - skipped (7 entries)

SEQ ID NO: 13999 - RNA, 10 nt, synthetic construct
  source 1..10: mol_type = other RNA
gttccatgtg

SEQ ID NO: 14000 - RNA, 11 nt, synthetic construct
  source 1..11: mol_type = other RNA
gttccatgtga

SEQ ID NO: 14001 - RNA, 12 nt, synthetic construct
  source 1..12: mol_type = other RNA
gttccatgtgag

SEQ ID NO: 14002 - RNA, 13 nt, synthetic construct
  source 1..13: mol_type = other RNA
gttccatgtgagt

SEQ ID NO: 14003 - RNA, 14 nt, synthetic construct
  source 1..14: mol_type = other RNA
gttccatgtgagtg

SEQ ID NO: 14004 - RNA, 15 nt, synthetic construct
  source 1..15: mol_type = other RNA
gttccatgtgagtgt

SEQ ID NO: 14005 - RNA, 16 nt, synthetic construct
  source 1..16: mol_type = other RNA
gttccatgtgagtgtg

SEQ ID NO: 14006 - RNA, 17 nt, synthetic construct
  source 1..17: mol_type = other RNA
gttccatgtgagtgtgg

SEQ ID NO: 14007 - RNA, 18 nt, synthetic construct
  source 1..18: mol_type = other RNA
gttccatgtgagtgtggg

SEQ ID NO: 14008 - RNA, 19 nt, synthetic construct
  source 1..19: mol_type = other RNA
gttccatgtgagtgtgggg

SEQ ID NO: 14009 - RNA, 74 nt, synthetic construct
  source 1..74: mol_type = other RNA
gtttacatgttcctggtgaaatggcaggacctgtcggagaaggtggtctaccggcgcttcaccgagatctacga

SEQ ID NO: 14010 - RNA, 74 nt, synthetic construct
  source 1..74: mol_type = other RNA
gtctacatgttcctggtgaaatggcaggacctgtcggagaaggtggtctaccggcgcttcaccgagatatacga

SEQ ID NO: 14011 - RNA, 74 nt, synthetic construct
  source 1..74: mol_type = other RNA
gtctacatgttcctggtgaaatggcaggacctgtcggagaaggtggtctaccggcgcttcaccgagatctacga

SEQ ID NO: 14012 - RNA, 74 nt, synthetic construct
  source 1..74: mol_type = other RNA
gtctacatgttcctggtgaaatggcaggacctgtcggagaaggtggtctaccggcgcttcaccgagatttacga

SEQ ID NO: 14013 - RNA, 74 nt, synthetic construct
  source 1..74: mol_type = other RNA
gtatacatgttcctggtgaaatggcaggacctgtcggagaaggtggtctaccggcgcttcaccgagatctacga

SEQ ID NO: 14014 - RNA, 74 nt, synthetic construct
  source 1..74: mol_type = other RNA
gtgtacatgttcctggtgaaatggcaggacctgtcggagaaggtggtctaccggcgcttcaccgagatctacga

SEQ ID NO: 14015 - RNA, 74 nt, synthetic construct
  source 1..74: mol_type = other RNA
gtgtacatgttcctggtgaaatggcaggacctgtcggagaaggtggtctaccggcgcttcaccgagatttacga

SEQ ID NO: 14016 - RNA, 74 nt, synthetic construct
  source 1..74: mol_type = other RNA
gtttacatgttcctggtgaaatggcaggacctgtcggagaaggtggtctaccggcgcttcaccgagatatacga

SEQ ID NO: 14017 - RNA, 74 nt, synthetic construct
  source 1..74: mol_type = other RNA
gtttacatgttcctggtgaaatggcaggacctgtcggagaaggtggtctaccggcgcttcaccgagatttacga

SEQ ID NO: 14018 - RNA, 74 nt, synthetic construct
  source 1..74: mol_type = other RNA
gtatacatgttcctggtgaaatggcaggacctgtcggagaaggtggtctaccggcgcttcaccgagatttacga

SEQ ID NO: 14019 - RNA, 74 nt, synthetic construct
  source 1..74: mol_type = other RNA
gtatacatgttcctggtgaaatggcaggacctgtcggagaaggtggtctaccggcgcttcaccgagatatacga

SEQ ID NO: 14020 - RNA, 74 nt, synthetic construct
  source 1..74: mol_type = other RNA
gtgtacatgttcctggtgaaatggcaggacctgtcggagaaggtggtctaccggcgcttcaccgagatatacga

SEQ ID NO: 14021 - RNA, 75 nt, synthetic construct
  source 1..75: mol_type = other RNA
ggtatacatgttcctggtgaaatggcaggacctgtcggagaaggtggtctaccggcgcttcaccgagatatacga

SEQ ID NO: 14022 - RNA, 75 nt, synthetic construct
  source 1..75: mol_type = other RNA
ggtttacatgttcctggtgaaatggcaggacctgtcggagaaggtggtctaccggcgcttcaccgagatatacga

SEQ ID NO: 14023 - RNA, 75 nt, synthetic construct
  source 1..75: mol_type = other RNA
ggtgtacatgttcctggtgaaatggcaggacctgtcggagaaggtggtctaccggcgcttcaccgagatctacga

SEQ ID NO: 14024 - RNA, 75 nt, synthetic construct
  source 1..75: mol_type = other RNA
ggtttacatgttcctggtgaaatggcaggacctgtcggagaaggtggtctaccggcgcttcaccgagatctacga

SEQ ID NO: 14025 - RNA, 75 nt, synthetic construct
  source 1..75: mol_type = other RNA
ggtatacatgttcctggtgaaatggcaggacctgtcggagaaggtggtctaccggcgcttcaccgagatctacga

SEQ ID NO: 14026 - RNA, 75 nt, synthetic construct
  source 1..75: mol_type = other RNA
ggtgtacatgttcctggtgaaatggcaggacctgtcggagaaggtggtctaccggcgcttcaccgagatttacga

SEQ ID NO: 14027 - RNA, 75 nt, synthetic construct
  source 1..75: mol_type = other RNA
ggtatacatgttcctggtgaaatggcaggacctgtcggagaaggtggtctaccggcgcttcaccgagatttacga

SEQ ID NO: 14028 - RNA, 75 nt, synthetic construct
  source 1..75: mol_type = other RNA
ggtctacatgttcctggtgaaatggcaggacctgtcggagaaggtggtctaccggcgcttcaccgagatatacga

SEQ ID NO: 14029 - RNA, 75 nt, synthetic construct
  source 1..75: mol_type = other RNA
ggtctacatgttcctggtgaaatggcaggacctgtcggagaaggtggtctaccggcgcttcaccgagatctacga

SEQ ID NO: 14030 - RNA, 75 nt, synthetic construct
  source 1..75: mol_type = other RNA
ggtttacatgttcctggtgaaatggcaggacctgtcggagaaggtggtctaccggcgcttcaccgagatttacga

SEQ ID NO: 14031 - RNA, 75 nt, synthetic construct
  source 1..75: mol_type = other RNA
ggtgtacatgttcctggtgaaatggcaggacctgtcggagaaggtggtctaccggcgcttcaccgagatatacga

SEQ ID NO: 14032 - RNA, 75 nt, synthetic construct
  source 1..75: mol_type = other RNA
ggtctacatgttcctggtgaaatggcaggacctgtcggagaaggtggtctaccggcgcttcaccgagatttacga

SEQ ID NO: 14033 - RNA, 76 nt, synthetic construct
  source 1..76: mol_type = other RNA
aggtctacatgttcctggtgaaatggcaggacctgtcggagaaggtggtctaccggcgcttcaccgagatatacga

SEQ ID NO: 14034 - RNA, 76 nt, synthetic construct
  source 1..76: mol_type = other RNA
aggtttacatgttcctggtgaaatggcaggacctgtcggagaaggtggtctaccggcgcttcaccgagatctacga

SEQ ID NO: 14035 - RNA, 76 nt, synthetic construct
  source 1..76: mol_type = other RNA
aggtttacatgttcctggtgaaatggcaggacctgtcggagaaggtggtctaccggcgcttcaccgagatatacga

SEQ ID NO: 14036 - RNA, 76 nt, synthetic construct
  source 1..76: mol_type = other RNA
aggtgtacatgttcctggtgaaatggcaggacctgtcggagaaggtggtctaccggcgcttcaccgagatttacga

SEQ ID NO: 14037 - RNA, 76 nt, synthetic construct
  source 1..76: mol_type = other RNA
aggtgtacatgttcctggtgaaatggcaggacctgtcggagaaggtggtctaccggcgcttcaccgagatctacga

SEQ ID NO: 14038 - RNA, 76 nt, synthetic construct
  source 1..76: mol_type = other RNA
aggtttacatgttcctggtgaaatggcaggacctgtcggagaaggtggtctaccggcgcttcaccgagatttacga

SEQ ID NO: 14039 - RNA, 76 nt, synthetic construct
  source 1..76: mol_type = other RNA
aggtatacatgttcctggtgaaatggcaggacctgtcggagaaggtggtctaccggcgcttcaccgagatctacga

SEQ ID NO: 14040 - RNA, 76 nt, synthetic construct
  source 1..76: mol_type = other RNA
aggtgtacatgttcctggtgaaatggcaggacctgtcggagaaggtggtctaccggcgcttcaccgagatatacga

SEQ ID NO: 14041 - RNA, 76 nt, synthetic construct
  source 1..76: mol_type = other RNA
aggtctacatgttcctggtgaaatggcaggacctgtcggagaaggtggtctaccggcgcttcaccgagatctacga

SEQ ID NO: 14042 - RNA, 76 nt, synthetic construct
  source 1..76: mol_type = other RNA
aggtctacatgttcctggtgaaatggcaggacctgtcggagaaggtggtctaccggcgcttcaccgagatttacga

SEQ ID NO: 14043 - RNA, 76 nt, synthetic construct
  source 1..76: mol_type = other RNA
aggtatacatgttcctggtgaaatggcaggacctgtcggagaaggtggtctaccggcgcttcaccgagatatacga

SEQ ID NO: 14044 - RNA, 76 nt, synthetic construct
  source 1..76: mol_type = other RNA
aggtatacatgttcctggtgaaatggcaggacctgtcggagaaggtggtctaccggcgcttcaccgagatttacga

SEQ ID NO: 14045 - RNA, 77 nt, synthetic construct
  source 1..77: mol_type = other RNA
caggtttacatgttcctggtgaaatggcaggacctgtcggagaaggtggtctaccggcgcttcaccgagatctacga

SEQ ID NO: 14046 - RNA, 77 nt, synthetic construct
  source 1..77: mol_type = other RNA
caggtttacatgttcctggtgaaatggcaggacctgtcggagaaggtggtctaccggcgcttcaccgagatttacga

SEQ ID NO: 14047 - RNA, 77 nt, synthetic construct
  source 1..77: mol_type = other RNA
caggtatacatgttcctggtgaaatggcaggacctgtcggagaaggtggtctaccggcgcttcaccgagatatacga

SEQ ID NO: 14048 - RNA, 77 nt, synthetic construct
  source 1..77: mol_type = other RNA
caggtctacatgttcctggtgaaatggcaggacctgtcggagaaggtggtctaccggcgcttcaccgagatttacga

SEQ ID NO: 14049 - RNA, 77 nt, synthetic construct
  source 1..77: mol_type = other RNA
caggtgtacatgttcctggtgaaatggcaggacctgtcggagaaggtggtctaccggcgcttcaccgagatatacga

SEQ ID NO: 14050 - RNA, 77 nt, synthetic construct
  source 1..77: mol_type = other RNA
caggtgtacatgttcctggtgaaatggcaggacctgtcggagaaggtggtctaccggcgcttcaccgagatctacga

SEQ ID NO: 14051 - RNA, 77 nt, synthetic construct
  source 1..77: mol_type = other RNA
caggtgtacatgttcctggtgaaatggcaggacctgtcggagaaggtggtctaccggcgcttcaccgagatttacga

SEQ ID NO: 14052 - RNA, 77 nt, synthetic construct
  source 1..77: mol_type = other RNA
caggtttacatgttcctggtgaaatggcaggacctgtcggagaaggtggtctaccggcgcttcaccgagatatacga

SEQ ID NO: 14053 - RNA, 77 nt, synthetic construct
  source 1..77: mol_type = other RNA
caggtatacatgttcctggtgaaatggcaggacctgtcggagaaggtggtctaccggcgcttcaccgagatctacga

SEQ ID NO: 14054 - RNA, 77 nt, synthetic construct
  source 1..77: mol_type = other RNA
caggtctacatgttcctggtgaaatggcaggacctgtcggagaaggtggtctaccggcgcttcaccgagatctacga

SEQ ID NO: 14055 - RNA, 77 nt, synthetic construct
  source 1..77: mol_type = other RNA
caggtctacatgttcctggtgaaatggcaggacctgtcggagaaggtggtctaccggcgcttcaccgagatatacga

SEQ ID NO: 14056 - RNA, 77 nt, synthetic construct
  source 1..77: mol_type = other RNA
caggtatacatgttcctggtgaaatggcaggacctgtcggagaaggtggtctaccggcgcttcaccgagatttacga

SEQ ID NO: 14057 - RNA, 78 nt, synthetic construct
  source 1..78: mol_type = other RNA
ccaggtatacatgttcctggtgaaatggcaggacctgtcggagaaggtggtctaccggcgcttcaccgagatttacga

SEQ ID NO: 14058 - RNA, 78 nt, synthetic construct
  source 1..78: mol_type = other RNA
ccaggtttacatgttcctggtgaaatggcaggacctgtcggagaaggtggtctaccggcgcttcaccgagatttacga

SEQ ID NO: 14059 - RNA, 78 nt, synthetic construct
  source 1..78: mol_type = other RNA
ccaggtatacatgttcctggtgaaatggcaggacctgtcggagaaggtggtctaccggcgcttcaccgagatctacga

SEQ ID NO: 14060 - RNA, 78 nt, synthetic construct
  source 1..78: mol_type = other RNA
ccaggtctacatgttcctggtgaaatggcaggacctgtcggagaaggtggtctaccggcgcttcaccgagatatacga

SEQ ID NO: 14061 - RNA, 78 nt, synthetic construct
  source 1..78: mol_type = other RNA
ccaggtctacatgttcctggtgaaatggcaggacctgtcggagaaggtggtctaccggcgcttcaccgagatctacga

SEQ ID NO: 14062 - RNA, 78 nt, synthetic construct
  source 1..78: mol_type = other RNA
ccaggtttacatgttcctggtgaaatggcaggacctgtcggagaaggtggtctaccggcgcttcaccgagatctacga

SEQ ID NO: 14063 - RNA, 78 nt, synthetic construct
  source 1..78: mol_type = other RNA
ccaggtttacatgttcctggtgaaatggcaggacctgtcggagaaggtggtctaccggcgcttcaccgagatatacga

SEQ ID NO: 14064 - RNA, 78 nt, synthetic construct
  source 1..78: mol_type = other RNA
ccaggtgtacatgttcctggtgaaatggcaggacctgtcggagaaggtggtctaccggcgcttcaccgagatttacga

SEQ ID NO: 14065 - RNA, 78 nt, synthetic construct
  source 1..78: mol_type = other RNA
ccaggtgtacatgttcctggtgaaatggcaggacctgtcggagaaggtggtctaccggcgcttcaccgagatctacga

SEQ ID NO: 14066 - RNA, 78 nt, synthetic construct
  source 1..78: mol_type = other RNA
ccaggtgtacatgttcctggtgaaatggcaggacctgtcggagaaggtggtctaccggcgcttcaccgagatatacga

SEQ ID NO: 14067 - RNA, 78 nt, synthetic construct
  source 1..78: mol_type = other RNA
ccaggtatacatgttcctggtgaaatggcaggacctgtcggagaaggtggtctaccggcgcttcaccgagatatacga

SEQ ID NO: 14068 - RNA, 78 nt, synthetic construct
  source 1..78: mol_type = other RNA
ccaggtctacatgttcctggtgaaatggcaggacctgtcggagaaggtggtctaccggcgcttcaccgagatttacga

SEQ ID NO: 14069 - RNA, 79 nt, synthetic construct
  source 1..79: mol_type = other RNA
cccaggtttacatgttcctggtgaaatggcaggacctgtcggagaaggtggtctaccggcgcttcaccgagatttacga

SEQ ID NO: 14070 - RNA, 79 nt, synthetic construct
  source 1..79: mol_type = other RNA
cccaggtttacatgttcctggtgaaatggcaggacctgtcggagaaggtggtctaccggcgcttcaccgagatctacga

SEQ ID NO: 14071 - RNA, 79 nt, synthetic construct
  source 1..79: mol_type = other RNA
cccaggtctacatgttcctggtgaaatggcaggacctgtcggagaaggtggtctaccggcgcttcaccgagatttacga

SEQ ID NO: 14072 - RNA, 79 nt, synthetic construct
  source 1..79: mol_type = other RNA
cccaggtgtacatgttcctggtgaaatggcaggacctgtcggagaaggtggtctaccggcgcttcaccgagatttacga

SEQ ID NO: 14073 - RNA, 79 nt, synthetic construct
  source 1..79: mol_type = other RNA
cccaggtatacatgttcctggtgaaatggcaggacctgtcggagaaggtggtctaccggcgcttcaccgagatatacga

SEQ ID NO: 14074 - RNA, 79 nt, synthetic construct
  source 1..79: mol_type = other RNA
cccaggtatacatgttcctggtgaaatggcaggacctgtcggagaaggtggtctaccggcgcttcaccgagatctacga

SEQ ID NO: 14075 - RNA, 79 nt, synthetic construct
  source 1..79: mol_type = other RNA
cccaggtgtacatgttcctggtgaaatggcaggacctgtcggagaaggtggtctaccggcgcttcaccgagatatacga

SEQ ID NO: 14076 - RNA, 79 nt, synthetic construct
  source 1..79: mol_type = other RNA
cccaggtatacatgttcctggtgaaatggcaggacctgtcggagaaggtggtctaccggcgcttcaccgagatttacga

SEQ ID NO: 14077 - RNA, 79 nt, synthetic construct
  source 1..79: mol_type = other RNA
cccaggtctacatgttcctggtgaaatggcaggacctgtcggagaaggtggtctaccggcgcttcaccgagatatacga

SEQ ID NO: 14078 - RNA, 79 nt, synthetic construct
  source 1..79: mol_type = other RNA
cccaggtgtacatgttcctggtgaaatggcaggacctgtcggagaaggtggtctaccggcgcttcaccgagatctacga

SEQ ID NO: 14079 - RNA, 79 nt, synthetic construct
  source 1..79: mol_type = other RNA
cccaggtctacatgttcctggtgaaatggcaggacctgtcggagaaggtggtctaccggcgcttcaccgagatctacga

SEQ ID NO: 14080 - RNA, 79 nt, synthetic construct
  source 1..79: mol_type = other RNA
cccaggtttacatgttcctggtgaaatggcaggacctgtcggagaaggtggtctaccggcgcttcaccgagatatacga

SEQ ID NO: 14081 - RNA, 80 nt, synthetic construct
  source 1..80: mol_type = other RNA
ccccaggtctacatgttcctggtgaaatggcaggacctgtcggagaaggtggtctaccggcgcttcaccgagatctacga

SEQ ID NO: 14082 - RNA, 80 nt, synthetic construct
  source 1..80: mol_type = other RNA
ccccaggtctacatgttcctggtgaaatggcaggacctgtcggagaaggtggtctaccggcgcttcaccgagatttacga

SEQ ID NO: 14083 - RNA, 80 nt, synthetic construct
  source 1..80: mol_type = other RNA
ccccaggtgtacatgttcctggtgaaatggcaggacctgtcggagaaggtggtctaccggcgcttcaccgagatctacga

SEQ ID NO: 14084 - RNA, 80 nt, synthetic construct
  source 1..80: mol_type = other RNA
ccccaggtgtacatgttcctggtgaaatggcaggacctgtcggagaaggtggtctaccggcgcttcaccgagatttacga

SEQ ID NO: 14085 - RNA, 80 nt, synthetic construct
  source 1..80: mol_type = other RNA
ccccaggtttacatgttcctggtgaaatggcaggacctgtcggagaaggtggtctaccggcgcttcaccgagatctacga

SEQ ID NO: 14086 - RNA, 80 nt, synthetic construct
  source 1..80: mol_type = other RNA
ccccaggtttacatgttcctggtgaaatggcaggacctgtcggagaaggtggtctaccggcgcttcaccgagatttacga

SEQ ID NO: 14087 - RNA, 80 nt, synthetic construct
  source 1..80: mol_type = other RNA
ccccaggtttacatgttcctggtgaaatggcaggacctgtcggagaaggtggtctaccggcgcttcaccgagatatacga

SEQ ID NO: 14088 - RNA, 80 nt, synthetic construct
  source 1..80: mol_type = other RNA
ccccaggtatacatgttcctggtgaaatggcaggacctgtcggagaaggtggtctaccggcgcttcaccgagatctacga

SEQ ID NO: 14089 - RNA, 80 nt, synthetic construct
  source 1..80: mol_type = other RNA
ccccaggtctacatgttcctggtgaaatggcaggacctgtcggagaaggtggtctaccggcgcttcaccgagatatacga

SEQ ID NO: 14090 - RNA, 80 nt, synthetic construct
  source 1..80: mol_type = other RNA
ccccaggtatacatgttcctggtgaaatggcaggacctgtcggagaaggtggtctaccggcgcttcaccgagatttacga

SEQ ID NO: 14091 - RNA, 80 nt, synthetic construct
  source 1..80: mol_type = other RNA
ccccaggtgtacatgttcctggtgaaatggcaggacctgtcggagaaggtggtctaccggcgcttcaccgagatatacga

SEQ ID NO: 14092 - RNA, 80 nt, synthetic construct
  source 1..80: mol_type = other RNA
ccccaggtatacatgttcctggtgaaatggcaggacctgtcggagaaggtggtctaccggcgcttcaccgagatatacga

SEQ ID NO: 14093 - RNA, 81 nt, synthetic construct
  source 1..81: mol_type = other RNA
cccccaggtctacatgttcctggtgaaatggcaggacctgtcggagaaggtggtctaccggcgcttcaccgagatatacga

SEQ ID NO: 14094 - RNA, 81 nt, synthetic construct
  source 1..81: mol_type = other RNA
cccccaggtctacatgttcctggtgaaatggcaggacctgtcggagaaggtggtctaccggcgcttcaccgagatctacga

SEQ ID NO: 14095 - RNA, 81 nt, synthetic construct
  source 1..81: mol_type = other RNA
cccccaggtgtacatgttcctggtgaaatggcaggacctgtcggagaaggtggtctaccggcgcttcaccgagatatacga

SEQ ID NO: 14096 - RNA, 81 nt, synthetic construct
  source 1..81: mol_type = other RNA
cccccaggtatacatgttcctggtgaaatggcaggacctgtcggagaaggtggtctaccggcgcttcaccgagatatacga

SEQ ID NO: 14097 - RNA, 81 nt, synthetic construct
  source 1..81: mol_type = other RNA
cccccaggtatacatgttcctggtgaaatggcaggacctgtcggagaaggtggtctaccggcgcttcaccgagatctacga

SEQ ID NO: 14098 - RNA, 81 nt, synthetic construct
  source 1..81: mol_type = other RNA
cccccaggtatacatgttcctggtgaaatggcaggacctgtcggagaaggtggtctaccggcgcttcaccgagatttacga

SEQ ID NO: 14099 - RNA, 81 nt, synthetic construct
  source 1..81: mol_type = other RNA
cccccaggtgtacatgttcctggtgaaatggcaggacctgtcggagaaggtggtctaccggcgcttcaccgagatttacga

SEQ ID NO: 14100 - RNA, 81 nt, synthetic construct
  source 1..81: mol_type = other RNA
cccccaggtctacatgttcctggtgaaatggcaggacctgtcggagaaggtggtctaccggcgcttcaccgagatttacga

SEQ ID NO: 14101 - RNA, 81 nt, synthetic construct
  source 1..81: mol_type = other RNA
cccccaggtttacatgttcctggtgaaatggcaggacctgtcggagaaggtggtctaccggcgcttcaccgagatttacga

SEQ ID NO: 14102 - RNA, 81 nt, synthetic construct
  source 1..81: mol_type = other RNA
cccccaggtttacatgttcctggtgaaatggcaggacctgtcggagaaggtggtctaccggcgcttcaccgagatctacga

SEQ ID NO: 14103 - RNA, 81 nt, synthetic construct
  source 1..81: mol_type = other RNA
cccccaggtttacatgttcctggtgaaatggcaggacctgtcggagaaggtggtctaccggcgcttcaccgagatatacga

SEQ ID NO: 14104 - RNA, 81 nt, synthetic construct
  source 1..81: mol_type = other RNA
cccccaggtgtacatgttcctggtgaaatggcaggacctgtcggagaaggtggtctaccggcgcttcaccgagatctacga

SEQ ID NO: 14105 - RNA, 82 nt, synthetic construct
  source 1..82: mol_type = other RNA
tcccccaggtatacatgttcctggtgaaatggcaggacctgtcggagaaggtggtctaccggcgcttcaccgagatttacga

SEQ ID NO: 14106 - RNA, 82 nt, synthetic construct
  source 1..82: mol_type = other RNA
tcccccaggtatacatgttcctggtgaaatggcaggacctgtcggagaaggtggtctaccggcgcttcaccgagatctacga

SEQ ID NO: 14107 - RNA, 82 nt, synthetic construct
  source 1..82: mol_type = other RNA
tcccccaggtatacatgttcctggtgaaatggcaggacctgtcggagaaggtggtctaccggcgcttcaccgagatatacga

SEQ ID NO: 14108 - RNA, 82 nt, synthetic construct
  source 1..82: mol_type = other RNA
tcccccaggtttacatgttcctggtgaaatggcaggacctgtcggagaaggtggtctaccggcgcttcaccgagatttacga

SEQ ID NO: 14109 - RNA, 82 nt, synthetic construct
  source 1..82: mol_type = other RNA
tcccccaggtttacatgttcctggtgaaatggcaggacctgtcggagaaggtggtctaccggcgcttcaccgagatctacga

SEQ ID NO: 14110 - RNA, 82 nt, synthetic construct
  source 1..82: mol_type = other RNA
tcccccaggtctacatgttcctggtgaaatggcaggacctgtcggagaaggtggtctaccggcgcttcaccgagatttacga

SEQ ID NO: 14111 - RNA, 82 nt, synthetic construct
  source 1..82: mol_type = other RNA
tcccccaggtctacatgttcctggtgaaatggcaggacctgtcggagaaggtggtctaccggcgcttcaccgagatatacga

SEQ ID NO: 14112 - RNA, 82 nt, synthetic construct
  source 1..82: mol_type = other RNA
tcccccaggtctacatgttcctggtgaaatggcaggacctgtcggagaaggtggtctaccggcgcttcaccgagatctacga

SEQ ID NO: 14113 - RNA, 82 nt, synthetic construct
  source 1..82: mol_type = other RNA
tcccccaggtgtacatgttcctggtgaaatggcaggacctgtcggagaaggtggtctaccggcgcttcaccgagatctacga

SEQ ID NO: 14114 - RNA, 82 nt, synthetic construct
  source 1..82: mol_type = other RNA
tcccccaggtgtacatgttcctggtgaaatggcaggacctgtcggagaaggtggtctaccggcgcttcaccgagatatacga

SEQ ID NO: 14115 - RNA, 82 nt, synthetic construct
  source 1..82: mol_type = other RNA
tcccccaggtttacatgttcctggtgaaatggcaggacctgtcggagaaggtggtctaccggcgcttcaccgagatatacga

SEQ ID NO: 14116 - RNA, 82 nt, synthetic construct
  source 1..82: mol_type = other RNA
tcccccaggtgtacatgttcctggtgaaatggcaggacctgtcggagaaggtggtctaccggcgcttcaccgagatttacga

SEQ ID NO: 14117 - RNA, 83 nt, synthetic construct
  source 1..83: mol_type = other RNA
ttcccccaggtctacatgttcctggtgaaatggcaggacctgtcggagaaggtggtctaccggcgcttcaccgagatctacga

SEQ ID NO: 14118 - RNA, 83 nt, synthetic construct
  source 1..83: mol_type = other RNA
ttcccccaggtgtacatgttcctggtgaaatggcaggacctgtcggagaaggtggtctaccggcgcttcaccgagatatacga

SEQ ID NO: 14119 - RNA, 83 nt, synthetic construct
  source 1..83: mol_type = other RNA
ttcccccaggtttacatgttcctggtgaaatggcaggacctgtcggagaaggtggtctaccggcgcttcaccgagatttacga

SEQ ID NO: 14120 - RNA, 83 nt, synthetic construct
  source 1..83: mol_type = other RNA
ttcccccaggtatacatgttcctggtgaaatggcaggacctgtcggagaaggtggtctaccggcgcttcaccgagatttacga

SEQ ID NO: 14121 - RNA, 83 nt, synthetic construct
  source 1..83: mol_type = other RNA
ttcccccaggtatacatgttcctggtgaaatggcaggacctgtcggagaaggtggtctaccggcgcttcaccgagatatacga

SEQ ID NO: 14122 - RNA, 83 nt, synthetic construct
  source 1..83: mol_type = other RNA
ttcccccaggtttacatgttcctggtgaaatggcaggacctgtcggagaaggtggtctaccggcgcttcaccgagatctacga

SEQ ID NO: 14123 - RNA, 83 nt, synthetic construct
  source 1..83: mol_type = other RNA
ttcccccaggtgtacatgttcctggtgaaatggcaggacctgtcggagaaggtggtctaccggcgcttcaccgagatttacga

SEQ ID NO: 14124 - RNA, 83 nt, synthetic construct
  source 1..83: mol_type = other RNA
ttcccccaggtgtacatgttcctggtgaaatggcaggacctgtcggagaaggtggtctaccggcgcttcaccgagatctacga

SEQ ID NO: 14125 - RNA, 83 nt, synthetic construct
  source 1..83: mol_type = other RNA
ttcccccaggtctacatgttcctggtgaaatggcaggacctgtcggagaaggtggtctaccggcgcttcaccgagatatacga

SEQ ID NO: 14126 - RNA, 83 nt, synthetic construct
  source 1..83: mol_type = other RNA
ttcccccaggtctacatgttcctggtgaaatggcaggacctgtcggagaaggtggtctaccggcgcttcaccgagatttacga

SEQ ID NO: 14127 - RNA, 83 nt, synthetic construct
  source 1..83: mol_type = other RNA
ttcccccaggtatacatgttcctggtgaaatggcaggacctgtcggagaaggtggtctaccggcgcttcaccgagatctacga

SEQ ID NO: 14128 - RNA, 83 nt, synthetic construct
  source 1..83: mol_type = other RNA
ttcccccaggtttacatgttcctggtgaaatggcaggacctgtcggagaaggtggtctaccggcgcttcaccgagatatacga

SEQ ID NO: 14129 - RNA, 84 nt, synthetic construct
  source 1..84: mol_type = other RNA
tttcccccaggtttacatgttcctggtgaaatggcaggacctgtcggagaaggtggtctaccggcgcttcaccgagatttacga

SEQ ID NO: 14130 - RNA, 84 nt, synthetic construct
  source 1..84: mol_type = other RNA
tttcccccaggtatacatgttcctggtgaaatggcaggacctgtcggagaaggtggtctaccggcgcttcaccgagatatacga

SEQ ID NO: 14131 - RNA, 84 nt, synthetic construct
  source 1..84: mol_type = other RNA
tttcccccaggtctacatgttcctggtgaaatggcaggacctgtcggagaaggtggtctaccggcgcttcaccgagatatacga

SEQ ID NO: 14132 - RNA, 84 nt, synthetic construct
  source 1..84: mol_type = other RNA
tttcccccaggtgtacatgttcctggtgaaatggcaggacctgtcggagaaggtggtctaccggcgcttcaccgagatttacga

SEQ ID NO: 14133 - RNA, 84 nt, synthetic construct
  source 1..84: mol_type = other RNA
tttcccccaggtatacatgttcctggtgaaatggcaggacctgtcggagaaggtggtctaccggcgcttcaccgagatctacga

SEQ ID NO: 14134 - RNA, 84 nt, synthetic construct
  source 1..84: mol_type = other RNA
tttcccccaggtttacatgttcctggtgaaatggcaggacctgtcggagaaggtggtctaccggcgcttcaccgagatctacga

SEQ ID NO: 14135 - RNA, 84 nt, synthetic construct
  source 1..84: mol_type = other RNA
tttcccccaggtctacatgttcctggtgaaatggcaggacctgtcggagaaggtggtctaccggcgcttcaccgagatctacga

SEQ ID NO: 14136 - RNA, 84 nt, synthetic construct
  source 1..84: mol_type = other RNA
tttcccccaggtatacatgttcctggtgaaatggcaggacctgtcggagaaggtggtctaccggcgcttcaccgagatttacga

SEQ ID NO: 14137 - RNA, 84 nt, synthetic construct
  source 1..84: mol_type = other RNA
tttcccccaggtctacatgttcctggtgaaatggcaggacctgtcggagaaggtggtctaccggcgcttcaccgagatttacga

SEQ ID NO: 14138 - RNA, 84 nt, synthetic construct
  source 1..84: mol_type = other RNA
tttcccccaggtgtacatgttcctggtgaaatggcaggacctgtcggagaaggtggtctaccggcgcttcaccgagatctacga

SEQ ID NO: 14139 - RNA, 84 nt, synthetic construct
  source 1..84: mol_type = other RNA
tttcccccaggtttacatgttcctggtgaaatggcaggacctgtcggagaaggtggtctaccggcgcttcaccgagatatacga

SEQ ID NO: 14140 - RNA, 84 nt, synthetic construct
  source 1..84: mol_type = other RNA
tttcccccaggtgtacatgttcctggtgaaatggcaggacctgtcggagaaggtggtctaccggcgcttcaccgagatatacga

SEQ ID NO: 14141 - RNA, 85 nt, synthetic construct
  source 1..85: mol_type = other RNA
ctttcccccaggtctacatgttcctggtgaaatggcaggacctgtcggagaaggtggtctaccggcgcttcaccgagatctacga

SEQ ID NO: 14142 - RNA, 85 nt, synthetic construct
  source 1..85: mol_type = other RNA
ctttcccccaggtatacatgttcctggtgaaatggcaggacctgtcggagaaggtggtctaccggcgcttcaccgagatctacga

SEQ ID NO: 14143 - RNA, 85 nt, synthetic construct
  source 1..85: mol_type = other RNA
ctttcccccaggtatacatgttcctggtgaaatggcaggacctgtcggagaaggtggtctaccggcgcttcaccgagatttacga

SEQ ID NO: 14144 - RNA, 85 nt, synthetic construct
  source 1..85: mol_type = other RNA
ctttcccccaggtatacatgttcctggtgaaatggcaggacctgtcggagaaggtggtctaccggcgcttcaccgagatatacga

SEQ ID NO: 14145 - RNA, 85 nt, synthetic construct
  source 1..85: mol_type = other RNA
ctttcccccaggtctacatgttcctggtgaaatggcaggacctgtcggagaaggtggtctaccggcgcttcaccgagatttacga

SEQ ID NO: 14146 - RNA, 85 nt, synthetic construct
  source 1..85: mol_type = other RNA
ctttcccccaggtgtacatgttcctggtgaaatggcaggacctgtcggagaaggtggtctaccggcgcttcaccgagatatacga

SEQ ID NO: 14147 - RNA, 85 nt, synthetic construct
  source 1..85: mol_type = other RNA
ctttcccccaggtctacatgttcctggtgaaatggcaggacctgtcggagaaggtggtctaccggcgcttcaccgagatatacga

SEQ ID NO: 14148 - RNA, 85 nt, synthetic construct
  source 1..85: mol_type = other RNA
ctttcccccaggtgtacatgttcctggtgaaatggcaggacctgtcggagaaggtggtctaccggcgcttcaccgagatctacga

SEQ ID NO: 14149 - RNA, 85 nt, synthetic construct
  source 1..85: mol_type = other RNA
ctttcccccaggtgtacatgttcctggtgaaatggcaggacctgtcggagaaggtggtctaccggcgcttcaccgagatttacga

SEQ ID NO: 14150 - RNA, 85 nt, synthetic construct
  source 1..85: mol_type = other RNA
ctttcccccaggtttacatgttcctggtgaaatggcaggacctgtcggagaaggtggtctaccggcgcttcaccgagatatacga

SEQ ID NO: 14151 - RNA, 85 nt, synthetic construct
  source 1..85: mol_type = other RNA
ctttcccccaggtttacatgttcctggtgaaatggcaggacctgtcggagaaggtggtctaccggcgcttcaccgagatctacga

SEQ ID NO: 14152 - RNA, 85 nt, synthetic construct
  source 1..85: mol_type = other RNA
ctttcccccaggtttacatgttcctggtgaaatggcaggacctgtcggagaaggtggtctaccggcgcttcaccgagatttacga

SEQ ID NO: 14153 - RNA, 86 nt, synthetic construct
  source 1..86: mol_type = other RNA
gctttcccccaggtttacatgttcctggtgaaatggcaggacctgtcggagaaggtggtctaccggcgcttcaccgagatctacga

SEQ ID NO: 14154 - RNA, 86 nt, synthetic construct
  source 1..86: mol_type = other RNA
gctttcccccaggtttacatgttcctggtgaaatggcaggacctgtcggagaaggtggtctaccggcgcttcaccgagatttacga

SEQ ID NO: 14155 - RNA, 86 nt, synthetic construct
  source 1..86: mol_type = other RNA
gctttcccccaggtctacatgttcctggtgaaatggcaggacctgtcggagaaggtggtctaccggcgcttcaccgagatatacga

SEQ ID NO: 14156 - RNA, 86 nt, synthetic construct
  source 1..86: mol_type = other RNA
gctttcccccaggtatacatgttcctggtgaaatggcaggacctgtcggagaaggtggtctaccggcgcttcaccgagatatacga

SEQ ID NO: 14157 - RNA, 86 nt, synthetic construct
  source 1..86: mol_type = other RNA
gctttcccccaggtatacatgttcctggtgaaatggcaggacctgtcggagaaggtggtctaccggcgcttcaccgagatctacga

SEQ ID NO: 14158 - RNA, 86 nt, synthetic construct
  source 1..86: mol_type = other RNA
gctttcccccaggtgtacatgttcctggtgaaatggcaggacctgtcggagaaggtggtctaccggcgcttcaccgagatatacga

SEQ ID NO: 14159 - RNA, 86 nt, synthetic construct
  source 1..86: mol_type = other RNA
gctttcccccaggtttacatgttcctggtgaaatggcaggacctgtcggagaaggtggtctaccggcgcttcaccgagatatacga

SEQ ID NO: 14160 - RNA, 86 nt, synthetic construct
  source 1..86: mol_type = other RNA
gctttcccccaggtgtacatgttcctggtgaaatggcaggacctgtcggagaaggtggtctaccggcgcttcaccgagatttacga

SEQ ID NO: 14161 - RNA, 86 nt, synthetic construct
  source 1..86: mol_type = other RNA
gctttcccccaggtgtacatgttcctggtgaaatggcaggacctgtcggagaaggtggtctaccggcgcttcaccgagatctacga

SEQ ID NO: 14162 - RNA, 86 nt, synthetic construct
  source 1..86: mol_type = other RNA
gctttcccccaggtctacatgttcctggtgaaatggcaggacctgtcggagaaggtggtctaccggcgcttcaccgagatttacga

SEQ ID NO: 14163 - RNA, 86 nt, synthetic construct
  source 1..86: mol_type = other RNA
gctttcccccaggtctacatgttcctggtgaaatggcaggacctgtcggagaaggtggtctaccggcgcttcaccgagatctacga

SEQ ID NO: 14164 - RNA, 86 nt, synthetic construct
  source 1..86: mol_type = other RNA
gctttcccccaggtatacatgttcctggtgaaatggcaggacctgtcggagaaggtggtctaccggcgcttcaccgagatttacga

SEQ ID NO: 14165 - RNA, 87 nt, synthetic construct
  source 1..87: mol_type = other RNA
ggctttcccccaggtatacatgttcctggtgaaatggcaggacctgtcggagaaggtggtctaccggcgcttcaccgagatttacga

SEQ ID NO: 14166 - RNA, 87 nt, synthetic construct
  source 1..87: mol_type = other RNA
ggctttcccccaggtttacatgttcctggtgaaatggcaggacctgtcggagaaggtggtctaccggcgcttcaccgagatttacga

SEQ ID NO: 14167 - RNA, 87 nt, synthetic construct
  source 1..87: mol_type = other RNA
ggctttcccccaggtctacatgttcctggtgaaatggcaggacctgtcggagaaggtggtctaccggcgcttcaccgagatatacga

SEQ ID NO: 14168 - RNA, 87 nt, synthetic construct
  source 1..87: mol_type = other RNA
ggctttcccccaggtatacatgttcctggtgaaatggcaggacctgtcggagaaggtggtctaccggcgcttcaccgagatatacga

SEQ ID NO: 14169 - RNA, 87 nt, synthetic construct
  source 1..87: mol_type = other RNA
ggctttcccccaggtttacatgttcctggtgaaatggcaggacctgtcggagaaggtggtctaccggcgcttcaccgagatctacga

SEQ ID NO: 14170 - RNA, 87 nt, synthetic construct
  source 1..87: mol_type = other RNA
ggctttcccccaggtttacatgttcctggtgaaatggcaggacctgtcggagaaggtggtctaccggcgcttcaccgagatatacga

SEQ ID NO: 14171 - RNA, 87 nt, synthetic construct
  source 1..87: mol_type = other RNA
ggctttcccccaggtgtacatgttcctggtgaaatggcaggacctgtcggagaaggtggtctaccggcgcttcaccgagatttacga

SEQ ID NO: 14172 - RNA, 87 nt, synthetic construct
  source 1..87: mol_type = other RNA
ggctttcccccaggtgtacatgttcctggtgaaatggcaggacctgtcggagaaggtggtctaccggcgcttcaccgagatctacga

SEQ ID NO: 14173 - RNA, 87 nt, synthetic construct
  source 1..87: mol_type = other RNA
ggctttcccccaggtgtacatgttcctggtgaaatggcaggacctgtcggagaaggtggtctaccggcgcttcaccgagatatacga

SEQ ID NO: 14174 - RNA, 87 nt, synthetic construct
  source 1..87: mol_type = other RNA
ggctttcccccaggtctacatgttcctggtgaaatggcaggacctgtcggagaaggtggtctaccggcgcttcaccgagatttacga

SEQ ID NO: 14175 - RNA, 87 nt, synthetic construct
  source 1..87: mol_type = other RNA
ggctttcccccaggtctacatgttcctggtgaaatggcaggacctgtcggagaaggtggtctaccggcgcttcaccgagatctacga

SEQ ID NO: 14176 - RNA, 87 nt, synthetic construct
  source 1..87: mol_type = other RNA
ggctttcccccaggtatacatgttcctggtgaaatggcaggacctgtcggagaaggtggtctaccggcgcttcaccgagatctacga

SEQ ID NO: 14177 - RNA, 88 nt, synthetic construct
  source 1..88: mol_type = other RNA
tggctttcccccaggtctacatgttcctggtgaaatggcaggacctgtcggagaaggtggtctaccggcgcttcaccgagatttacga

SEQ ID NO: 14178 - RNA, 88 nt, synthetic construct
  source 1..88: mol_type = other RNA
tggctttcccccaggtttacatgttcctggtgaaatggcaggacctgtcggagaaggtggtctaccggcgcttcaccgagatttacga

SEQ ID NO: 14179 - RNA, 88 nt, synthetic construct
  source 1..88: mol_type = other RNA
tggctttcccccaggtttacatgttcctggtgaaatggcaggacctgtcggagaaggtggtctaccggcgcttcaccgagatatacga

SEQ ID NO: 14180 - RNA, 88 nt, synthetic construct
  source 1..88: mol_type = other RNA
tggctttcccccaggtgtacatgttcctggtgaaatggcaggacctgtcggagaaggtggtctaccggcgcttcaccgagatttacga

SEQ ID NO: 14181 - RNA, 88 nt, synthetic construct
  source 1..88: mol_type = other RNA
tggctttcccccaggtgtacatgttcctggtgaaatggcaggacctgtcggagaaggtggtctaccggcgcttcaccgagatctacga

SEQ ID NO: 14182 - RNA, 88 nt, synthetic construct
  source 1..88: mol_type = other RNA
tggctttcccccaggtgtacatgttcctggtgaaatggcaggacctgtcggagaaggtggtctaccggcgcttcaccgagatatacga

SEQ ID NO: 14183 - RNA, 88 nt, synthetic construct
  source 1..88: mol_type = other RNA
tggctttcccccaggtatacatgttcctggtgaaatggcaggacctgtcggagaaggtggtctaccggcgcttcaccgagatatacga

SEQ ID NO: 14184 - RNA, 88 nt, synthetic construct
  source 1..88: mol_type = other RNA
tggctttcccccaggtatacatgttcctggtgaaatggcaggacctgtcggagaaggtggtctaccggcgcttcaccgagatctacga

SEQ ID NO: 14185 - RNA, 88 nt, synthetic construct
  source 1..88: mol_type = other RNA
tggctttcccccaggtatacatgttcctggtgaaatggcaggacctgtcggagaaggtggtctaccggcgcttcaccgagatttacga

SEQ ID NO: 14186 - RNA, 88 nt, synthetic construct
  source 1..88: mol_type = other RNA
tggctttcccccaggtctacatgttcctggtgaaatggcaggacctgtcggagaaggtggtctaccggcgcttcaccgagatatacga

SEQ ID NO: 14187 - RNA, 88 nt, synthetic construct
  source 1..88: mol_type = other RNA
tggctttcccccaggtttacatgttcctggtgaaatggcaggacctgtcggagaaggtggtctaccggcgcttcaccgagatctacga

SEQ ID NO: 14188 - RNA, 88 nt, synthetic construct
  source 1..88: mol_type = other RNA
tggctttcccccaggtctacatgttcctggtgaaatggcaggacctgtcggagaaggtggtctaccggcgcttcaccgagatctacga

SEQ ID NO: 14189 - RNA, 89 nt, synthetic construct
  source 1..89: mol_type = other RNA
ctggctttcccccaggtgtacatgttcctggtgaaatggcaggacctgtcggagaaggtggtctaccggcgcttcaccgagatctacga

SEQ ID NO: 14190 - RNA, 89 nt, synthetic construct
  source 1..89: mol_type = other RNA
ctggctttcccccaggtttacatgttcctggtgaaatggcaggacctgtcggagaaggtggtctaccggcgcttcaccgagatttacga

SEQ ID NO: 14191 - RNA, 89 nt, synthetic construct
  source 1..89: mol_type = other RNA
ctggctttcccccaggtgtacatgttcctggtgaaatggcaggacctgtcggagaaggtggtctaccggcgcttcaccgagatatacga

SEQ ID NO: 14192 - RNA, 89 nt, synthetic construct
  source 1..89: mol_type = other RNA
ctggctttcccccaggtctacatgttcctggtgaaatggcaggacctgtcggagaaggtggtctaccggcgcttcaccgagatttacga

SEQ ID NO: 14193 - RNA, 89 nt, synthetic construct
  source 1..89: mol_type = other RNA
ctggctttcccccaggtttacatgttcctggtgaaatggcaggacctgtcggagaaggtggtctaccggcgcttcaccgagatctacga

SEQ ID NO: 14194 - RNA, 89 nt, synthetic construct
  source 1..89: mol_type = other RNA
ctggctttcccccaggtttacatgttcctggtgaaatggcaggacctgtcggagaaggtggtctaccggcgcttcaccgagatatacga

SEQ ID NO: 14195 - RNA, 89 nt, synthetic construct
  source 1..89: mol_type = other RNA
ctggctttcccccaggtatacatgttcctggtgaaatggcaggacctgtcggagaaggtggtctaccggcgcttcaccgagatatacga

SEQ ID NO: 14196 - RNA, 89 nt, synthetic construct
  source 1..89: mol_type = other RNA
ctggctttcccccaggtatacatgttcctggtgaaatggcaggacctgtcggagaaggtggtctaccggcgcttcaccgagatctacga

SEQ ID NO: 14197 - RNA, 89 nt, synthetic construct
  source 1..89: mol_type = other RNA
ctggctttcccccaggtatacatgttcctggtgaaatggcaggacctgtcggagaaggtggtctaccggcgcttcaccgagatttacga

SEQ ID NO: 14198 - RNA, 89 nt, synthetic construct
  source 1..89: mol_type = other RNA
ctggctttcccccaggtgtacatgttcctggtgaaatggcaggacctgtcggagaaggtggtctaccggcgcttcaccgagatttacga

SEQ ID NO: 14199 - RNA, 89 nt, synthetic construct
  source 1..89: mol_type = other RNA
ctggctttcccccaggtctacatgttcctggtgaaatggcaggacctgtcggagaaggtggtctaccggcgcttcaccgagatatacga

SEQ ID NO: 14200 - RNA, 89 nt, synthetic construct
  source 1..89: mol_type = other RNA
ctggctttcccccaggtctacatgttcctggtgaaatggcaggacctgtcggagaaggtggtctaccggcgcttcaccgagatctacga

SEQ ID NO: 14201 - RNA, 90 nt, synthetic construct
  source 1..90: mol_type = other RNA
tctggctttcccccaggtatacatgttcctggtgaaatggcaggacctgtcggagaaggtggtctaccggcgcttcaccgagatttacga

SEQ ID NO: 14202 - RNA, 90 nt, synthetic construct
  source 1..90: mol_type = other RNA
tctggctttcccccaggtgtacatgttcctggtgaaatggcaggacctgtcggagaaggtggtctaccggcgcttcaccgagatatacga

SEQ ID NO: 14203 - RNA, 90 nt, synthetic construct
  source 1..90: mol_type = other RNA
tctggctttcccccaggtttacatgttcctggtgaaatggcaggacctgtcggagaaggtggtctaccggcgcttcaccgagatctacga

SEQ ID NO: 14204 - RNA, 90 nt, synthetic construct
  source 1..90: mol_type = other RNA
tctggctttcccccaggtatacatgttcctggtgaaatggcaggacctgtcggagaaggtggtctaccggcgcttcaccgagatctacga

SEQ ID NO: 14205 - RNA, 90 nt, synthetic construct
  source 1..90: mol_type = other RNA
tctggctttcccccaggtttacatgttcctggtgaaatggcaggacctgtcggagaaggtggtctaccggcgcttcaccgagatatacga

SEQ ID NO: 14206 - RNA, 90 nt, synthetic construct
  source 1..90: mol_type = other RNA
tctggctttcccccaggtatacatgttcctggtgaaatggcaggacctgtcggagaaggtggtctaccggcgcttcaccgagatatacga

SEQ ID NO: 14207 - RNA, 90 nt, synthetic construct
  source 1..90: mol_type = other RNA
tctggctttcccccaggtctacatgttcctggtgaaatggcaggacctgtcggagaaggtggtctaccggcgcttcaccgagatttacga

SEQ ID NO: 14208 - RNA, 90 nt, synthetic construct
  source 1..90: mol_type = other RNA
tctggctttcccccaggtctacatgttcctggtgaaatggcaggacctgtcggagaaggtggtctaccggcgcttcaccgagatatacga

SEQ ID NO: 14209 - RNA, 90 nt, synthetic construct
  source 1..90: mol_type = other RNA
tctggctttcccccaggtctacatgttcctggtgaaatggcaggacctgtcggagaaggtggtctaccggcgcttcaccgagatctacga

SEQ ID NO: 14210 - RNA, 90 nt, synthetic construct
  source 1..90: mol_type = other RNA
tctggctttcccccaggtgtacatgttcctggtgaaatggcaggacctgtcggagaaggtggtctaccggcgcttcaccgagatctacga

SEQ ID NO: 14211 - RNA, 90 nt, synthetic construct
  source 1..90: mol_type = other RNA
tctggctttcccccaggtttacatgttcctggtgaaatggcaggacctgtcggagaaggtggtctaccggcgcttcaccgagatttacga

SEQ ID NO: 14212 - RNA, 90 nt, synthetic construct
  source 1..90: mol_type = other RNA
tctggctttcccccaggtgtacatgttcctggtgaaatggcaggacctgtcggagaaggtggtctaccggcgcttcaccgagatttacga

SEQ ID NO: 14213 - RNA, 91 nt, synthetic construct
  source 1..91: mol_type = other RNA
ctctggctttcccccaggtatacatgttcctggtgaaatggcaggacctgtcggagaaggtggtctaccggcgcttcaccgagatttacga

SEQ ID NO: 14214 - RNA, 91 nt, synthetic construct
  source 1..91: mol_type = other RNA
ctctggctttcccccaggtctacatgttcctggtgaaatggcaggacctgtcggagaaggtggtctaccggcgcttcaccgagatctacga

SEQ ID NO: 14215 - RNA, 91 nt, synthetic construct
  source 1..91: mol_type = other RNA
ctctggctttcccccaggtatacatgttcctggtgaaatggcaggacctgtcggagaaggtggtctaccggcgcttcaccgagatctacga

SEQ ID NO: 14216 - RNA, 91 nt, synthetic construct
  source 1..91: mol_type = other RNA
ctctggctttcccccaggtctacatgttcctggtgaaatggcaggacctgtcggagaaggtggtctaccggcgcttcaccgagatatacga

SEQ ID NO: 14217 - RNA, 91 nt, synthetic construct
  source 1..91: mol_type = other RNA
ctctggctttcccccaggtttacatgttcctggtgaaatggcaggacctgtcggagaaggtggtctaccggcgcttcaccgagatttacga

SEQ ID NO: 14218 - RNA, 91 nt, synthetic construct
  source 1..91: mol_type = other RNA
ctctggctttcccccaggtttacatgttcctggtgaaatggcaggacctgtcggagaaggtggtctaccggcgcttcaccgagatatacga

SEQ ID NO: 14219 - RNA, 91 nt, synthetic construct
  source 1..91: mol_type = other RNA
ctctggctttcccccaggtctacatgttcctggtgaaatggcaggacctgtcggagaaggtggtctaccggcgcttcaccgagatttacga

SEQ ID NO: 14220 - RNA, 91 nt, synthetic construct
  source 1..91: mol_type = other RNA
ctctggctttcccccaggtgtacatgttcctggtgaaatggcaggacctgtcggagaaggtggtctaccggcgcttcaccgagatctacga

SEQ ID NO: 14221 - RNA, 91 nt, synthetic construct
  source 1..91: mol_type = other RNA
ctctggctttcccccaggtgtacatgttcctggtgaaatggcaggacctgtcggagaaggtggtctaccggcgcttcaccgagatttacga

SEQ ID NO: 14222 - RNA, 91 nt, synthetic construct
  source 1..91: mol_type = other RNA
ctctggctttcccccaggtttacatgttcctggtgaaatggcaggacctgtcggagaaggtggtctaccggcgcttcaccgagatctacga

SEQ ID NO: 14223 - RNA, 91 nt, synthetic construct
  source 1..91: mol_type = other RNA
ctctggctttcccccaggtgtacatgttcctggtgaaatggcaggacctgtcggagaaggtggtctaccggcgcttcaccgagatatacga

SEQ ID NO: 14224 - RNA, 91 nt, synthetic construct
  source 1..91: mol_type = other RNA
ctctggctttcccccaggtatacatgttcctggtgaaatggcaggacctgtcggagaaggtggtctaccggcgcttcaccgagatatacga

SEQ ID NO: 14225 - RNA, 92 nt, synthetic construct
  source 1..92: mol_type = other RNA
actctggctttcccccaggtttacatgttcctggtgaaatggcaggacctgtcggagaaggtggtctaccggcgcttcaccgagatctacga

SEQ ID NO: 14226 - RNA, 92 nt, synthetic construct
  source 1..92: mol_type = other RNA
actctggctttcccccaggtgtacatgttcctggtgaaatggcaggacctgtcggagaaggtggtctaccggcgcttcaccgagatatacga

SEQ ID NO: 14227 - RNA, 92 nt, synthetic construct
  source 1..92: mol_type = other RNA
actctggctttcccccaggtttacatgttcctggtgaaatggcaggacctgtcggagaaggtggtctaccggcgcttcaccgagatttacga

SEQ ID NO: 14228 - RNA, 92 nt, synthetic construct
  source 1..92: mol_type = other RNA
actctggctttcccccaggtctacatgttcctggtgaaatggcaggacctgtcggagaaggtggtctaccggcgcttcaccgagatttacga

SEQ ID NO: 14229 - RNA, 92 nt, synthetic construct
  source 1..92: mol_type = other RNA
actctggctttcccccaggtctacatgttcctggtgaaatggcaggacctgtcggagaaggtggtctaccggcgcttcaccgagatctacga

SEQ ID NO: 14230 - RNA, 92 nt, synthetic construct
  source 1..92: mol_type = other RNA
actctggctttcccccaggtatacatgttcctggtgaaatggcaggacctgtcggagaaggtggtctaccggcgcttcaccgagatctacga

SEQ ID NO: 14231 - RNA, 92 nt, synthetic construct
  source 1..92: mol_type = other RNA
actctggctttcccccaggtgtacatgttcctggtgaaatggcaggacctgtcggagaaggtggtctaccggcgcttcaccgagatttacga

SEQ ID NO: 14232 - RNA, 92 nt, synthetic construct
  source 1..92: mol_type = other RNA
actctggctttcccccaggtgtacatgttcctggtgaaatggcaggacctgtcggagaaggtggtctaccggcgcttcaccgagatctacga

SEQ ID NO: 14233 - RNA, 92 nt, synthetic construct
  source 1..92: mol_type = other RNA
actctggctttcccccaggtttacatgttcctggtgaaatggcaggacctgtcggagaaggtggtctaccggcgcttcaccgagatatacga

SEQ ID NO: 14234 - RNA, 92 nt, synthetic construct
  source 1..92: mol_type = other RNA
actctggctttcccccaggtctacatgttcctggtgaaatggcaggacctgtcggagaaggtggtctaccggcgcttcaccgagatatacga

SEQ ID NO: 14235 - RNA, 92 nt, synthetic construct
  source 1..92: mol_type = other RNA
actctggctttcccccaggtatacatgttcctggtgaaatggcaggacctgtcggagaaggtggtctaccggcgcttcaccgagatttacga

SEQ ID NO: 14236 - RNA, 92 nt, synthetic construct
  source 1..92: mol_type = other RNA
actctggctttcccccaggtatacatgttcctggtgaaatggcaggacctgtcggagaaggtggtctaccggcgcttcaccgagatatacga

SEQ ID NO: 14237 - RNA, 93 nt, synthetic construct
  source 1..93: mol_type = other RNA
gactctggctttcccccaggtctacatgttcctggtgaaatggcaggacctgtcggagaaggtggtctaccggcgcttcaccgagatctacga

SEQ ID NO: 14238 - RNA, 93 nt, synthetic construct
  source 1..93: mol_type = other RNA
gactctggctttcccccaggtttacatgttcctggtgaaatggcaggacctgtcggagaaggtggtctaccggcgcttcaccgagatttacga

SEQ ID NO: 14239 - RNA, 93 nt, synthetic construct
  source 1..93: mol_type = other RNA
gactctggctttcccccaggtttacatgttcctggtgaaatggcaggacctgtcggagaaggtggtctaccggcgcttcaccgagatatacga

SEQ ID NO: 14240 - RNA, 93 nt, synthetic construct
  source 1..93: mol_type = other RNA
gactctggctttcccccaggtgtacatgttcctggtgaaatggcaggacctgtcggagaaggtggtctaccggcgcttcaccgagatatacga

SEQ ID NO: 14241 - RNA, 93 nt, synthetic construct
  source 1..93: mol_type = other RNA
gactctggctttcccccaggtctacatgttcctggtgaaatggcaggacctgtcggagaaggtggtctaccggcgcttcaccgagatatacga

SEQ ID NO: 14242 - RNA, 93 nt, synthetic construct
  source 1..93: mol_type = other RNA
gactctggctttcccccaggtgtacatgttcctggtgaaatggcaggacctgtcggagaaggtggtctaccggcgcttcaccgagatctacga

SEQ ID NO: 14243 - RNA, 93 nt, synthetic construct
  source 1..93: mol_type = other RNA
gactctggctttcccccaggtttacatgttcctggtgaaatggcaggacctgtcggagaaggtggtctaccggcgcttcaccgagatctacga

SEQ ID NO: 14244 - RNA, 93 nt, synthetic construct
  source 1..93: mol_type = other RNA
gactctggctttcccccaggtatacatgttcctggtgaaatggcaggacctgtcggagaaggtggtctaccggcgcttcaccgagatttacga

SEQ ID NO: 14245 - RNA, 93 nt, synthetic construct
  source 1..93: mol_type = other RNA
gactctggctttcccccaggtatacatgttcctggtgaaatggcaggacctgtcggagaaggtggtctaccggcgcttcaccgagatatacga

SEQ ID NO: 14246 - RNA, 93 nt, synthetic construct
  source 1..93: mol_type = other RNA
gactctggctttcccccaggtgtacatgttcctggtgaaatggcaggacctgtcggagaaggtggtctaccggcgcttcaccgagatttacga

SEQ ID NO: 14247 - RNA, 93 nt, synthetic construct
  source 1..93: mol_type = other RNA
gactctggctttcccccaggtatacatgttcctggtgaaatggcaggacctgtcggagaaggtggtctaccggcgcttcaccgagatctacga

SEQ ID NO: 14248 - RNA, 93 nt, synthetic construct
  source 1..93: mol_type = other RNA
gactctggctttcccccaggtctacatgttcctggtgaaatggcaggacctgtcggagaaggtggtctaccggcgcttcaccgagatttacga

SEQ ID NO: 14249 - RNA, 94 nt, synthetic construct
  source 1..94: mol_type = other RNA
cgactctggctttcccccaggtttacatgttcctggtgaaatggcaggacctgtcggagaaggtggtctaccggcgcttcaccgagatctacga

SEQ ID NO: 14250 - RNA, 94 nt, synthetic construct
  source 1..94: mol_type = other RNA
cgactctggctttcccccaggtatacatgttcctggtgaaatggcaggacctgtcggagaaggtggtctaccggcgcttcaccgagatttacga

SEQ ID NO: 14251 - RNA, 94 nt, synthetic construct
  source 1..94: mol_type = other RNA
cgactctggctttcccccaggtatacatgttcctggtgaaatggcaggacctgtcggagaaggtggtctaccggcgcttcaccgagatctacga

SEQ ID NO: 14252 - RNA, 94 nt, synthetic construct
  source 1..94: mol_type = other RNA
cgactctggctttcccccaggtctacatgttcctggtgaaatggcaggacctgtcggagaaggtggtctaccggcgcttcaccgagatttacga

SEQ ID NO: 14253 - RNA, 94 nt, synthetic construct
  source 1..94: mol_type = other RNA
cgactctggctttcccccaggtttacatgttcctggtgaaatggcaggacctgtcggagaaggtggtctaccggcgcttcaccgagatttacga

SEQ ID NO: 14254 - RNA, 94 nt, synthetic construct
  source 1..94: mol_type = other RNA
cgactctggctttcccccaggtttacatgttcctggtgaaatggcaggacctgtcggagaaggtggtctaccggcgcttcaccgagatatacga

SEQ ID NO: 14255 - RNA, 94 nt, synthetic construct
  source 1..94: mol_type = other RNA
cgactctggctttcccccaggtgtacatgttcctggtgaaatggcaggacctgtcggagaaggtggtctaccggcgcttcaccgagatttacga

SEQ ID NO: 14256 - RNA, 94 nt, synthetic construct
  source 1..94: mol_type = other RNA
cgactctggctttcccccaggtgtacatgttcctggtgaaatggcaggacctgtcggagaaggtggtctaccggcgcttcaccgagatctacga

SEQ ID NO: 14257 - RNA, 94 nt, synthetic construct
  source 1..94: mol_type = other RNA
cgactctggctttcccccaggtgtacatgttcctggtgaaatggcaggacctgtcggagaaggtggtctaccggcgcttcaccgagatatacga

SEQ ID NO: 14258 - RNA, 94 nt, synthetic construct
  source 1..94: mol_type = other RNA
cgactctggctttcccccaggtatacatgttcctggtgaaatggcaggacctgtcggagaaggtggtctaccggcgcttcaccgagatatacga

SEQ ID NO: 14259 - RNA, 94 nt, synthetic construct
  source 1..94: mol_type = other RNA
cgactctggctttcccccaggtctacatgttcctggtgaaatggcaggacctgtcggagaaggtggtctaccggcgcttcaccgagatatacga

SEQ ID NO: 14260 - RNA, 94 nt, synthetic construct
  source 1..94: mol_type = other RNA
cgactctggctttcccccaggtctacatgttcctggtgaaatggcaggacctgtcggagaaggtggtctaccggcgcttcaccgagatctacga

SEQ ID NO: 14261 - RNA, 95 nt, synthetic construct
  source 1..95: mol_type = other RNA
ccgactctggctttcccccaggtgtacatgttcctggtgaaatggcaggacctgtcggagaaggtggtctaccggcgcttcaccgagatttacga

SEQ ID NO: 14262 - RNA, 95 nt, synthetic construct
  source 1..95: mol_type = other RNA
ccgactctggctttcccccaggtgtacatgttcctggtgaaatggcaggacctgtcggagaaggtggtctaccggcgcttcaccgagatctacga

SEQ ID NO: 14263 - RNA, 95 nt, synthetic construct
  source 1..95: mol_type = other RNA
ccgactctggctttcccccaggtctacatgttcctggtgaaatggcaggacctgtcggagaaggtggtctaccggcgcttcaccgagatatacga

SEQ ID NO: 14264 - RNA, 95 nt, synthetic construct
  source 1..95: mol_type = other RNA
ccgactctggctttcccccaggtatacatgttcctggtgaaatggcaggacctgtcggagaaggtggtctaccggcgcttcaccgagatttacga

SEQ ID NO: 14265 - RNA, 95 nt, synthetic construct
  source 1..95: mol_type = other RNA
ccgactctggctttcccccaggtctacatgttcctggtgaaatggcaggacctgtcggagaaggtggtctaccggcgcttcaccgagatctacga

SEQ ID NO: 14266 - RNA, 95 nt, synthetic construct
  source 1..95: mol_type = other RNA
ccgactctggctttcccccaggtatacatgttcctggtgaaatggcaggacctgtcggagaaggtggtctaccggcgcttcaccgagatatacga

SEQ ID NO: 14267 - RNA, 95 nt, synthetic construct
  source 1..95: mol_type = other RNA
ccgactctggctttcccccaggtctacatgttcctggtgaaatggcaggacctgtcggagaaggtggtctaccggcgcttcaccgagatttacga

SEQ ID NO: 14268 - RNA, 95 nt, synthetic construct
  source 1..95: mol_type = other RNA
ccgactctggctttcccccaggtgtacatgttcctggtgaaatggcaggacctgtcggagaaggtggtctaccggcgcttcaccgagatatacga

SEQ ID NO: 14269 - RNA, 95 nt, synthetic construct
  source 1..95: mol_type = other RNA
ccgactctggctttcccccaggtttacatgttcctggtgaaatggcaggacctgtcggagaaggtggtctaccggcgcttcaccgagatctacga

SEQ ID NO: 14270 - RNA, 95 nt, synthetic construct
  source 1..95: mol_type = other RNA
ccgactctggctttcccccaggtatacatgttcctggtgaaatggcaggacctgtcggagaaggtggtctaccggcgcttcaccgagatctacga

SEQ ID NO: 14271 - RNA, 95 nt, synthetic construct
  source 1..95: mol_type = other RNA
ccgactctggctttcccccaggtttacatgttcctggtgaaatggcaggacctgtcggagaaggtggtctaccggcgcttcaccgagatatacga

SEQ ID NO: 14272 - RNA, 95 nt, synthetic construct
  source 1..95: mol_type = other RNA
ccgactctggctttcccccaggtttacatgttcctggtgaaatggcaggacctgtcggagaaggtggtctaccggcgcttcaccgagatttacga

SEQ ID NO: 14273 - RNA, 96 nt, synthetic construct
  source 1..96: mol_type = other RNA
cccgactctggctttcccccaggtgtacatgttcctggtgaaatggcaggacctgtcggagaaggtggtctaccggcgcttcaccgagatatacga

SEQ ID NO: 14274 - RNA, 96 nt, synthetic construct
  source 1..96: mol_type = other RNA
cccgactctggctttcccccaggtctacatgttcctggtgaaatggcaggacctgtcggagaaggtggtctaccggcgcttcaccgagatttacga

SEQ ID NO: 14275 - RNA, 96 nt, synthetic construct
  source 1..96: mol_type = other RNA
cccgactctggctttcccccaggtatacatgttcctggtgaaatggcaggacctgtcggagaaggtggtctaccggcgcttcaccgagatatacga

SEQ ID NO: 14276 - RNA, 96 nt, synthetic construct
  source 1..96: mol_type = other RNA
cccgactctggctttcccccaggtatacatgttcctggtgaaatggcaggacctgtcggagaaggtggtctaccggcgcttcaccgagatctacga

SEQ ID NO: 14277 - RNA, 96 nt, synthetic construct
  source 1..96: mol_type = other RNA
cccgactctggctttcccccaggtgtacatgttcctggtgaaatggcaggacctgtcggagaaggtggtctaccggcgcttcaccgagatctacga

SEQ ID NO: 14278 - RNA, 96 nt, synthetic construct
  source 1..96: mol_type = other RNA
cccgactctggctttcccccaggtatacatgttcctggtgaaatggcaggacctgtcggagaaggtggtctaccggcgcttcaccgagatttacga

SEQ ID NO: 14279 - RNA, 96 nt, synthetic construct
  source 1..96: mol_type = other RNA
cccgactctggctttcccccaggtctacatgttcctggtgaaatggcaggacctgtcggagaaggtggtctaccggcgcttcaccgagatctacga

SEQ ID NO: 14280 - RNA, 96 nt, synthetic construct
  source 1..96: mol_type = other RNA
cccgactctggctttcccccaggtctacatgttcctggtgaaatggcaggacctgtcggagaaggtggtctaccggcgcttcaccgagatatacga

SEQ ID NO: 14281 - RNA, 96 nt, synthetic construct
  source 1..96: mol_type = other RNA
cccgactctggctttcccccaggtgtacatgttcctggtgaaatggcaggacctgtcggagaaggtggtctaccggcgcttcaccgagatttacga

SEQ ID NO: 14282 - RNA, 96 nt, synthetic construct
  source 1..96: mol_type = other RNA
cccgactctggctttcccccaggtttacatgttcctggtgaaatggcaggacctgtcggagaaggtggtctaccggcgcttcaccgagatatacga

SEQ ID NO: 14283 - RNA, 96 nt, synthetic construct
  source 1..96: mol_type = other RNA
cccgactctggctttcccccaggtttacatgttcctggtgaaatggcaggacctgtcggagaaggtggtctaccggcgcttcaccgagatctacga

SEQ ID NO: 14284 - RNA, 96 nt, synthetic construct
  source 1..96: mol_type = other RNA
cccgactctggctttcccccaggtttacatgttcctggtgaaatggcaggacctgtcggagaaggtggtctaccggcgcttcaccgagatttacga

SEQ ID NO: 14285 - RNA, 97 nt, synthetic construct
  source 1..97: mol_type = other RNA
ccccgactctggctttcccccaggtttacatgttcctggtgaaatggcaggacctgtcggagaaggtggtctaccggcgcttcaccgagatatacga

SEQ ID NO: 14286 - RNA, 97 nt, synthetic construct
  source 1..97: mol_type = other RNA
ccccgactctggctttcccccaggtgtacatgttcctggtgaaatggcaggacctgtcggagaaggtggtctaccggcgcttcaccgagatttacga

SEQ ID NO: 14287 - RNA, 97 nt, synthetic construct
  source 1..97: mol_type = other RNA
ccccgactctggctttcccccaggtgtacatgttcctggtgaaatggcaggacctgtcggagaaggtggtctaccggcgcttcaccgagatatacga

SEQ ID NO: 14288 - RNA, 97 nt, synthetic construct
  source 1..97: mol_type = other RNA
ccccgactctggctttcccccaggtctacatgttcctggtgaaatggcaggacctgtcggagaaggtggtctaccggcgcttcaccgagatttacga

SEQ ID NO: 14289 - RNA, 97 nt, synthetic construct
  source 1..97: mol_type = other RNA
ccccgactctggctttcccccaggtctacatgttcctggtgaaatggcaggacctgtcggagaaggtggtctaccggcgcttcaccgagatctacga

SEQ ID NO: 14290 - RNA, 97 nt, synthetic construct
  source 1..97: mol_type = other RNA
ccccgactctggctttcccccaggtatacatgttcctggtgaaatggcaggacctgtcggagaaggtggtctaccggcgcttcaccgagatctacga

SEQ ID NO: 14291 - RNA, 97 nt, synthetic construct
  source 1..97: mol_type = other RNA
ccccgactctggctttcccccaggtatacatgttcctggtgaaatggcaggacctgtcggagaaggtggtctaccggcgcttcaccgagatttacga

SEQ ID NO: 14292 - RNA, 97 nt, synthetic construct
  source 1..97: mol_type = other RNA
ccccgactctggctttcccccaggtatacatgttcctggtgaaatggcaggacctgtcggagaaggtggtctaccggcgcttcaccgagatatacga

SEQ ID NO: 14293 - RNA, 97 nt, synthetic construct
  source 1..97: mol_type = other RNA
ccccgactctggctttcccccaggtctacatgttcctggtgaaatggcaggacctgtcggagaaggtggtctaccggcgcttcaccgagatatacga

SEQ ID NO: 14294 - RNA, 97 nt, synthetic construct
  source 1..97: mol_type = other RNA
ccccgactctggctttcccccaggtttacatgttcctggtgaaatggcaggacctgtcggagaaggtggtctaccggcgcttcaccgagatctacga

SEQ ID NO: 14295 - RNA, 97 nt, synthetic construct
  source 1..97: mol_type = other RNA
ccccgactctggctttcccccaggtttacatgttcctggtgaaatggcaggacctgtcggagaaggtggtctaccggcgcttcaccgagatttacga

SEQ ID NO: 14296 - RNA, 97 nt, synthetic construct
  source 1..97: mol_type = other RNA
ccccgactctggctttcccccaggtgtacatgttcctggtgaaatggcaggacctgtcggagaaggtggtctaccggcgcttcaccgagatctacga

SEQ ID NO: 14297 - RNA, 98 nt, synthetic construct
  source 1..98: mol_type = other RNA
cccccgactctggctttcccccaggtctacatgttcctggtgaaatggcaggacctgtcggagaaggtggtctaccggcgcttcaccgagatctacga

SEQ ID NO: 14298 - RNA, 98 nt, synthetic construct
  source 1..98: mol_type = other RNA
cccccgactctggctttcccccaggtctacatgttcctggtgaaatggcaggacctgtcggagaaggtggtctaccggcgcttcaccgagatttacga

SEQ ID NO: 14299 - RNA, 98 nt, synthetic construct
  source 1..98: mol_type = other RNA
cccccgactctggctttcccccaggtttacatgttcctggtgaaatggcaggacctgtcggagaaggtggtctaccggcgcttcaccgagatctacga

SEQ ID NO: 14300 - RNA, 98 nt, synthetic construct
  source 1..98: mol_type = other RNA
cccccgactctggctttcccccaggtttacatgttcctggtgaaatggcaggacctgtcggagaaggtggtctaccggcgcttcaccgagatttacga

SEQ ID NO: 14301 - RNA, 98 nt, synthetic construct
  source 1..98: mol_type = other RNA
cccccgactctggctttcccccaggtatacatgttcctggtgaaatggcaggacctgtcggagaaggtggtctaccggcgcttcaccgagatctacga

SEQ ID NO: 14302 - RNA, 98 nt, synthetic construct
  source 1..98: mol_type = other RNA
cccccgactctggctttcccccaggtgtacatgttcctggtgaaatggcaggacctgtcggagaaggtggtctaccggcgcttcaccgagatatacga

SEQ ID NO: 14303 - RNA, 98 nt, synthetic construct
  source 1..98: mol_type = other RNA
cccccgactctggctttcccccaggtgtacatgttcctggtgaaatggcaggacctgtcggagaaggtggtctaccggcgcttcaccgagatctacga

SEQ ID NO: 14304 - RNA, 98 nt, synthetic construct
  source 1..98: mol_type = other RNA
cccccgactctggctttcccccaggtatacatgttcctggtgaaatggcaggacctgtcggagaaggtggtctaccggcgcttcaccgagatatacga

SEQ ID NO: 14305 - RNA, 98 nt, synthetic construct
  source 1..98: mol_type = other RNA
cccccgactctggctttcccccaggtgtacatgttcctggtgaaatggcaggacctgtcggagaaggtggtctaccggcgcttcaccgagatttacga

SEQ ID NO: 14306 - RNA, 98 nt, synthetic construct
  source 1..98: mol_type = other RNA
cccccgactctggctttcccccaggtatacatgttcctggtgaaatggcaggacctgtcggagaaggtggtctaccggcgcttcaccgagatttacga

SEQ ID NO: 14307 - RNA, 98 nt, synthetic construct
  source 1..98: mol_type = other RNA
cccccgactctggctttcccccaggtctacatgttcctggtgaaatggcaggacctgtcggagaaggtggtctaccggcgcttcaccgagatatacga

SEQ ID NO: 14308 - RNA, 98 nt, synthetic construct
  source 1..98: mol_type = other RNA
cccccgactctggctttcccccaggtttacatgttcctggtgaaatggcaggacctgtcggagaaggtggtctaccggcgcttcaccgagatatacga

SEQ ID NO: 14309 - RNA, 99 nt, synthetic construct
  source 1..99: mol_type = other RNA
tcccccgactctggctttcccccaggtttacatgttcctggtgaaatggcaggacctgtcggagaaggtggtctaccggcgcttcaccgagatctacga

SEQ ID NO: 14310 - RNA, 99 nt, synthetic construct
  source 1..99: mol_type = other RNA
tcccccgactctggctttcccccaggtgtacatgttcctggtgaaatggcaggacctgtcggagaaggtggtctaccggcgcttcaccgagatctacga

SEQ ID NO: 14311 - RNA, 99 nt, synthetic construct
  source 1..99: mol_type = other RNA
tcccccgactctggctttcccccaggtttacatgttcctggtgaaatggcaggacctgtcggagaaggtggtctaccggcgcttcaccgagatatacga

SEQ ID NO: 14312 - RNA, 99 nt, synthetic construct
  source 1..99: mol_type = other RNA
tcccccgactctggctttcccccaggtgtacatgttcctggtgaaatggcaggacctgtcggagaaggtggtctaccggcgcttcaccgagatatacga

SEQ ID NO: 14313 - RNA, 99 nt, synthetic construct
  source 1..99: mol_type = other RNA
tcccccgactctggctttcccccaggtgtacatgttcctggtgaaatggcaggacctgtcggagaaggtggtctaccggcgcttcaccgagatttacga

SEQ ID NO: 14314 - RNA, 99 nt, synthetic construct
  source 1..99: mol_type = other RNA
tcccccgactctggctttcccccaggtctacatgttcctggtgaaatggcaggacctgtcggagaaggtggtctaccggcgcttcaccgagatttacga

SEQ ID NO: 14315 - RNA, 99 nt, synthetic construct
  source 1..99: mol_type = other RNA
tcccccgactctggctttcccccaggtctacatgttcctggtgaaatggcaggacctgtcggagaaggtggtctaccggcgcttcaccgagatctacga

SEQ ID NO: 14316 - RNA, 99 nt, synthetic construct
  source 1..99: mol_type = other RNA
tcccccgactctggctttcccccaggtctacatgttcctggtgaaatggcaggacctgtcggagaaggtggtctaccggcgcttcaccgagatatacga

SEQ ID NO: 14317 - RNA, 99 nt, synthetic construct
  source 1..99: mol_type = other RNA
tcccccgactctggctttcccccaggtatacatgttcctggtgaaatggcaggacctgtcggagaaggtggtctaccggcgcttcaccgagatttacga

SEQ ID NO: 14318 - RNA, 99 nt, synthetic construct
  source 1..99: mol_type = other RNA
tcccccgactctggctttcccccaggtatacatgttcctggtgaaatggcaggacctgtcggagaaggtggtctaccggcgcttcaccgagatctacga

SEQ ID NO: 14319 - RNA, 99 nt, synthetic construct
  source 1..99: mol_type = other RNA
tcccccgactctggctttcccccaggtatacatgttcctggtgaaatggcaggacctgtcggagaaggtggtctaccggcgcttcaccgagatatacga

SEQ ID NO: 14320 - RNA, 99 nt, synthetic construct
  source 1..99: mol_type = other RNA
tcccccgactctggctttcccccaggtttacatgttcctggtgaaatggcaggacctgtcggagaaggtggtctaccggcgcttcaccgagatttacga

SEQ ID NO: 14321 - RNA, 100 nt, synthetic construct
  source 1..100: mol_type = other RNA
gtcccccgactctggctttcccccaggtttacatgttcctggtgaaatggcaggacctgtcggagaaggtggtctaccggcgcttcaccgagatttacga

SEQ ID NO: 14322 - RNA, 100 nt, synthetic construct
  source 1..100: mol_type = other RNA
gtcccccgactctggctttcccccaggtctacatgttcctggtgaaatggcaggacctgtcggagaaggtggtctaccggcgcttcaccgagatctacga

SEQ ID NO: 14323 - RNA, 100 nt, synthetic construct
  source 1..100: mol_type = other RNA
gtcccccgactctggctttcccccaggtttacatgttcctggtgaaatggcaggacctgtcggagaaggtggtctaccggcgcttcaccgagatctacga

SEQ ID NO: 14324 - RNA, 100 nt, synthetic construct
  source 1..100: mol_type = other RNA
gtcccccgactctggctttcccccaggtatacatgttcctggtgaaatggcaggacctgtcggagaaggtggtctaccggcgcttcaccgagatctacga

SEQ ID NO: 14325 - RNA, 100 nt, synthetic construct
  source 1..100: mol_type = other RNA
gtcccccgactctggctttcccccaggtatacatgttcctggtgaaatggcaggacctgtcggagaaggtggtctaccggcgcttcaccgagatatacga

SEQ ID NO: 14326 - RNA, 100 nt, synthetic construct
  source 1..100: mol_type = other RNA
gtcccccgactctggctttcccccaggtctacatgttcctggtgaaatggcaggacctgtcggagaaggtggtctaccggcgcttcaccgagatatacga

SEQ ID NO: 14327 - RNA, 100 nt, synthetic construct
  source 1..100: mol_type = other RNA
gtcccccgactctggctttcccccaggtgtacatgttcctggtgaaatggcaggacctgtcggagaaggtggtctaccggcgcttcaccgagatatacga

SEQ ID NO: 14328 - RNA, 100 nt, synthetic construct
  source 1..100: mol_type = other RNA
gtcccccgactctggctttcccccaggtgtacatgttcctggtgaaatggcaggacctgtcggagaaggtggtctaccggcgcttcaccgagatctacga

SEQ ID NO: 14329 - RNA, 100 nt, synthetic construct
  source 1..100: mol_type = other RNA
gtcccccgactctggctttcccccaggtgtacatgttcctggtgaaatggcaggacctgtcggagaaggtggtctaccggcgcttcaccgagatttacga

SEQ ID NO: 14330 - RNA, 100 nt, synthetic construct
  source 1..100: mol_type = other RNA
gtcccccgactctggctttcccccaggtctacatgttcctggtgaaatggcaggacctgtcggagaaggtggtctaccggcgcttcaccgagatttacga

SEQ ID NO: 14331 - RNA, 100 nt, synthetic construct
  source 1..100: mol_type = other RNA
gtcccccgactctggctttcccccaggtttacatgttcctggtgaaatggcaggacctgtcggagaaggtggtctaccggcgcttcaccgagatatacga

SEQ ID NO: 14332 - RNA, 100 nt, synthetic construct
  source 1..100: mol_type = other RNA
gtcccccgactctggctttcccccaggtatacatgttcctggtgaaatggcaggacctgtcggagaaggtggtctaccggcgcttcaccgagatttacga

SEQ ID NO: 14333 - RNA, 101 nt, synthetic construct
  source 1..101: mol_type = other RNA
ggtcccccgactctggctttcccccaggtttacatgttcctggtgaaatggcaggacctgtcggagaaggtggtctaccggcgcttcaccgagatttacga

SEQ ID NO: 14334 - RNA, 101 nt, synthetic construct
  source 1..101: mol_type = other RNA
ggtcccccgactctggctttcccccaggtttacatgttcctggtgaaatggcaggacctgtcggagaaggtggtctaccggcgcttcaccgagatctacga

SEQ ID NO: 14335 - RNA, 101 nt, synthetic construct
  source 1..101: mol_type = other RNA
ggtcccccgactctggctttcccccaggtttacatgttcctggtgaaatggcaggacctgtcggagaaggtggtctaccggcgcttcaccgagatatacga

SEQ ID NO: 14336 - RNA, 101 nt, synthetic construct
  source 1..101: mol_type = other RNA
ggtcccccgactctggctttcccccaggtgtacatgttcctggtgaaatggcaggacctgtcggagaaggtggtctaccggcgcttcaccgagatttacga

SEQ ID NO: 14337 - RNA, 101 nt, synthetic construct
  source 1..101: mol_type = other RNA
ggtcccccgactctggctttcccccaggtgtacatgttcctggtgaaatggcaggacctgtcggagaaggtggtctaccggcgcttcaccgagatctacga

SEQ ID NO: 14338 - RNA, 101 nt, synthetic construct
  source 1..101: mol_type = other RNA
ggtcccccgactctggctttcccccaggtctacatgttcctggtgaaatggcaggacctgtcggagaaggtggtctaccggcgcttcaccgagatatacga

SEQ ID NO: 14339 - RNA, 101 nt, synthetic construct
  source 1..101: mol_type = other RNA
ggtcccccgactctggctttcccccaggtgtacatgttcctggtgaaatggcaggacctgtcggagaaggtggtctaccggcgcttcaccgagatatacga

SEQ ID NO: 14340 - RNA, 101 nt, synthetic construct
  source 1..101: mol_type = other RNA
ggtcccccgactctggctttcccccaggtatacatgttcctggtgaaatggcaggacctgtcggagaaggtggtctaccggcgcttcaccgagatttacga

SEQ ID NO: 14341 - RNA, 101 nt, synthetic construct
  source 1..101: mol_type = other RNA
ggtcccccgactctggctttcccccaggtctacatgttcctggtgaaatggcaggacctgtcggagaaggtggtctaccggcgcttcaccgagatttacga

SEQ ID NO: 14342 - RNA, 101 nt, synthetic construct
  source 1..101: mol_type = other RNA
ggtcccccgactctggctttcccccaggtctacatgttcctggtgaaatggcaggacctgtcggagaaggtggtctaccggcgcttcaccgagatctacga

SEQ ID NO: 14343 - RNA, 101 nt, synthetic construct
  source 1..101: mol_type = other RNA
ggtcccccgactctggctttcccccaggtatacatgttcctggtgaaatggcaggacctgtcggagaaggtggtctaccggcgcttcaccgagatctacga

SEQ ID NO: 14344 - RNA, 101 nt, synthetic construct
  source 1..101: mol_type = other RNA
ggtcccccgactctggctttcccccaggtatacatgttcctggtgaaatggcaggacctgtcggagaaggtggtctaccggcgcttcaccgagatatacga

SEQ ID NO: 14345 - RNA, 102 nt, synthetic construct
  source 1..102: mol_type = other RNA
gggtcccccgactctggctttcccccaggtatacatgttcctggtgaaatggcaggacctgtcggagaaggtggtctaccggcgcttcaccgagatctacga

SEQ ID NO: 14346 - RNA, 102 nt, synthetic construct
  source 1..102: mol_type = other RNA
gggtcccccgactctggctttcccccaggtgtacatgttcctggtgaaatggcaggacctgtcggagaaggtggtctaccggcgcttcaccgagatatacga

SEQ ID NO: 14347 - RNA, 102 nt, synthetic construct
  source 1..102: mol_type = other RNA
gggtcccccgactctggctttcccccaggtctacatgttcctggtgaaatggcaggacctgtcggagaaggtggtctaccggcgcttcaccgagatatacga

SEQ ID NO: 14348 - RNA, 102 nt, synthetic construct
  source 1..102: mol_type = other RNA
gggtcccccgactctggctttcccccaggtttacatgttcctggtgaaatggcaggacctgtcggagaaggtggtctaccggcgcttcaccgagatttacga

SEQ ID NO: 14349 - RNA, 102 nt, synthetic construct
  source 1..102: mol_type = other RNA
gggtcccccgactctggctttcccccaggtttacatgttcctggtgaaatggcaggacctgtcggagaaggtggtctaccggcgcttcaccgagatctacga

SEQ ID NO: 14350 - RNA, 102 nt, synthetic construct
  source 1..102: mol_type = other RNA
gggtcccccgactctggctttcccccaggtttacatgttcctggtgaaatggcaggacctgtcggagaaggtggtctaccggcgcttcaccgagatatacga

SEQ ID NO: 14351 - RNA, 102 nt, synthetic construct
  source 1..102: mol_type = other RNA
gggtcccccgactctggctttcccccaggtgtacatgttcctggtgaaatggcaggacctgtcggagaaggtggtctaccggcgcttcaccgagatttacga

SEQ ID NO: 14352 - RNA, 102 nt, synthetic construct
  source 1..102: mol_type = other RNA
gggtcccccgactctggctttcccccaggtgtacatgttcctggtgaaatggcaggacctgtcggagaaggtggtctaccggcgcttcaccgagatctacga

SEQ ID NO: 14353 - RNA, 102 nt, synthetic construct
  source 1..102: mol_type = other RNA
gggtcccccgactctggctttcccccaggtctacatgttcctggtgaaatggcaggacctgtcggagaaggtggtctaccggcgcttcaccgagatttacga

SEQ ID NO: 14354 - RNA, 102 nt, synthetic construct
  source 1..102: mol_type = other RNA
gggtcccccgactctggctttcccccaggtctacatgttcctggtgaaatggcaggacctgtcggagaaggtggtctaccggcgcttcaccgagatctacga

SEQ ID NO: 14355 - RNA, 102 nt, synthetic construct
  source 1..102: mol_type = other RNA
gggtcccccgactctggctttcccccaggtatacatgttcctggtgaaatggcaggacctgtcggagaaggtggtctaccggcgcttcaccgagatttacga

SEQ ID NO: 14356 - RNA, 102 nt, synthetic construct
  source 1..102: mol_type = other RNA
gggtcccccgactctggctttcccccaggtatacatgttcctggtgaaatggcaggacctgtcggagaaggtggtctaccggcgcttcaccgagatatacga

SEQ ID NO: 14357 - RNA, 103 nt, synthetic construct
  source 1..103: mol_type = other RNA
ggggtcccccgactctggctttcccccaggtctacatgttcctggtgaaatggcaggacctgtcggagaaggtggtctaccggcgcttcaccgagatttacga

SEQ ID NO: 14358 - RNA, 103 nt, synthetic construct
  source 1..103: mol_type = other RNA
ggggtcccccgactctggctttcccccaggtttacatgttcctggtgaaatggcaggacctgtcggagaaggtggtctaccggcgcttcaccgagatctacga

SEQ ID NO: 14359 - RNA, 103 nt, synthetic construct
  source 1..103: mol_type = other RNA
ggggtcccccgactctggctttcccccaggtttacatgttcctggtgaaatggcaggacctgtcggagaaggtggtctaccggcgcttcaccgagatatacga

SEQ ID NO: 14360 - RNA, 103 nt, synthetic construct
  source 1..103: mol_type = other RNA
ggggtcccccgactctggctttcccccaggtgtacatgttcctggtgaaatggcaggacctgtcggagaaggtggtctaccggcgcttcaccgagatttacga

SEQ ID NO: 14361 - RNA, 103 nt, synthetic construct
  source 1..103: mol_type = other RNA
ggggtcccccgactctggctttcccccaggtgtacatgttcctggtgaaatggcaggacctgtcggagaaggtggtctaccggcgcttcaccgagatctacga

SEQ ID NO: 14362 - RNA, 103 nt, synthetic construct
  source 1..103: mol_type = other RNA
ggggtcccccgactctggctttcccccaggtgtacatgttcctggtgaaatggcaggacctgtcggagaaggtggtctaccggcgcttcaccgagatatacga

SEQ ID NO: 14363 - RNA, 103 nt, synthetic construct
  source 1..103: mol_type = other RNA
ggggtcccccgactctggctttcccccaggtatacatgttcctggtgaaatggcaggacctgtcggagaaggtggtctaccggcgcttcaccgagatatacga

SEQ ID NO: 14364 - RNA, 103 nt, synthetic construct
  source 1..103: mol_type = other RNA
ggggtcccccgactctggctttcccccaggtatacatgttcctggtgaaatggcaggacctgtcggagaaggtggtctaccggcgcttcaccgagatttacga

SEQ ID NO: 14365 - RNA, 103 nt, synthetic construct
  source 1..103: mol_type = other RNA
ggggtcccccgactctggctttcccccaggtctacatgttcctggtgaaatggcaggacctgtcggagaaggtggtctaccggcgcttcaccgagatatacga

SEQ ID NO: 14366 - RNA, 103 nt, synthetic construct
  source 1..103: mol_type = other RNA
ggggtcccccgactctggctttcccccaggtctacatgttcctggtgaaatggcaggacctgtcggagaaggtggtctaccggcgcttcaccgagatctacga

SEQ ID NO: 14367 - RNA, 103 nt, synthetic construct
  source 1..103: mol_type = other RNA
ggggtcccccgactctggctttcccccaggtttacatgttcctggtgaaatggcaggacctgtcggagaaggtggtctaccggcgcttcaccgagatttacga

SEQ ID NO: 14368 - RNA, 103 nt, synthetic construct
  source 1..103: mol_type = other RNA
ggggtcccccgactctggctttcccccaggtatacatgttcctggtgaaatggcaggacctgtcggagaaggtggtctaccggcgcttcaccgagatctacga

SEQ ID NO: 14369 - RNA, 19 nt, synthetic construct
  source 1..19: mol_type = other RNA
ggcgcttcaccgagatcta

SEQ ID NO: 14370 - RNA, 19 nt, synthetic construct
  source 1..19: mol_type = other RNA
gcgcttcaccgagatctac

SEQ ID NO: 14371 - RNA, 20 nt, synthetic construct
  source 1..20: mol_type = other RNA
ggcgcttcaccgagatctac

SEQ ID NO: 14372 - RNA, 20 nt, synthetic construct
  source 1..20: mol_type = other RNA
ggcgcttcaccgagatatac

SEQ ID NO: 14373 - RNA, 20 nt, synthetic construct
  source 1..20: mol_type = other RNA
ggcgcttcaccgagatttac

SEQ ID NO: 14374 - RNA, 16 nt, synthetic construct
  source 1..16: mol_type = other RNA
ggatcctgggtgcaca

SEQ ID NO: 14375 - RNA, 17 nt, synthetic construct
  source 1..17: mol_type = other RNA
gggatcctgggtgcaca

SEQ ID NO: 14376 - RNA, 18 nt, synthetic construct
  source 1..18: mol_type = other RNA
tgggatcctgggtgcaca

SEQ ID NO: 14377 - RNA, 19 nt, synthetic construct
  source 1..19: mol_type = other RNA
gtgggatcctgggtgcaca

SEQ ID NO: 14378 - RNA, 20 nt, synthetic construct
  source 1..20: mol_type = other RNA
agtgggatcctgggtgcaca

SEQ ID NO: 14379 - RNA, 21 nt, synthetic construct
  source 1..21: mol_type = other RNA
tagtgggatcctgggtgcaca

SEQ ID NO: 14380 - RNA, 22 nt, synthetic construct
  source 1..22: mol_type = other RNA
gtagtgggatcctgggtgcaca

SEQ ID NO: 14381-14387 - skipped (7 entries)

SEQ ID NO: 14388 - RNA, 10 nt, synthetic construct
  source 1..10: mol_type = other RNA
gcacccagga

SEQ ID NO: 14389 - RNA, 11 nt, synthetic construct
  source 1..11: mol_type = other RNA
gcacccaggat

SEQ ID NO: 14390 - RNA, 12 nt, synthetic construct
  source 1..12: mol_type = other RNA
gcacccaggatc

SEQ ID NO: 14391 - RNA, 13 nt, synthetic construct
  source 1..13: mol_type = other RNA
gcacccaggatcc

SEQ ID NO: 14392 - RNA, 14 nt, synthetic construct
  source 1..14: mol_type = other RNA
gcacccaggatccc

SEQ ID NO: 14393 - RNA, 15 nt, synthetic construct
  source 1..15: mol_type = other RNA
gcacccaggatccca

SEQ ID NO: 14394 - RNA, 16 nt, synthetic construct
  source 1..16: mol_type = other RNA
gcacccaggatcccac

SEQ ID NO: 14395 - RNA, 17 nt, synthetic construct
  source 1..17: mol_type = other RNA
gcacccaggatcccact

SEQ ID NO: 14396 - RNA, 18 nt, synthetic construct
  source 1..18: mol_type = other RNA
gcacccaggatcccacta

SEQ ID NO: 14397 - RNA, 19 nt, synthetic construct
  source 1..19: mol_type = other RNA
gcacccaggatcccactac

SEQ ID NO: 14398 - RNA, 60 nt, synthetic construct
  source 1..60: mol_type = other RNA
acctgggggaaagccagagtcgggggaccccattcagcctccaaagaggctttgctgtgt

SEQ ID NO: 14399 - RNA, 61 nt, synthetic construct
  source 1..61: mol_type = other RNA
gacctgggggaaagccagagtcgggggaccccattcagcctccaaagaggctttgctgtgt

SEQ ID NO: 14400 - RNA, 61 nt, synthetic construct
  source 1..61: mol_type = other RNA
aacctgggggaaagccagagtcgggggaccccattcagcctccaaagaggctttgctgtgt

SEQ ID NO: 14401 - RNA, 61 nt, synthetic construct
  source 1..61: mol_type = other RNA
tacctgggggaaagccagagtcgggggaccccattcagcctccaaagaggctttgctgtgt

SEQ ID NO: 14402 - RNA, 61 nt, synthetic construct
  source 1..61: mol_type = other RNA
cacctgggggaaagccagagtcgggggaccccattcagcctccaaagaggctttgctgtgt

SEQ ID NO: 14403 - RNA, 62 nt, synthetic construct
  source 1..62: mol_type = other RNA
aaacctgggggaaagccagagtcgggggaccccattcagcctccaaagaggctttgctgtgt

SEQ ID NO: 14404 - RNA, 62 nt, synthetic construct
  source 1..62: mol_type = other RNA
atacctgggggaaagccagagtcgggggaccccattcagcctccaaagaggctttgctgtgt

SEQ ID NO: 14405 - RNA, 62 nt, synthetic construct
  source 1..62: mol_type = other RNA
acacctgggggaaagccagagtcgggggaccccattcagcctccaaagaggctttgctgtgt

SEQ ID NO: 14406 - RNA, 62 nt, synthetic construct
  source 1..62: mol_type = other RNA
agacctgggggaaagccagagtcgggggaccccattcagcctccaaagaggctttgctgtgt

SEQ ID NO: 14407 - RNA, 63 nt, synthetic construct
  source 1..63: mol_type = other RNA
tagacctgggggaaagccagagtcgggggaccccattcagcctccaaagaggctttgctgtgt

SEQ ID NO: 14408 - RNA, 63 nt, synthetic construct
  source 1..63: mol_type = other RNA
tatacctgggggaaagccagagtcgggggaccccattcagcctccaaagaggctttgctgtgt

SEQ ID NO: 14409 - RNA, 63 nt, synthetic construct
  source 1..63: mol_type = other RNA
taaacctgggggaaagccagagtcgggggaccccattcagcctccaaagaggctttgctgtgt

SEQ ID NO: 14410 - RNA, 63 nt, synthetic construct
  source 1..63: mol_type = other RNA
tacacctgggggaaagccagagtcgggggaccccattcagcctccaaagaggctttgctgtgt

SEQ ID NO: 14411 - RNA, 64 nt, synthetic construct
  source 1..64: mol_type = other RNA
gtaaacctgggggaaagccagagtcgggggaccccattcagcctccaaagaggctttgctgtgt

SEQ ID NO: 14412 - RNA, 64 nt, synthetic construct
  source 1..64: mol_type = other RNA
gtacacctgggggaaagccagagtcgggggaccccattcagcctccaaagaggctttgctgtgt

SEQ ID NO: 14413 - RNA, 64 nt, synthetic construct
  source 1..64: mol_type = other RNA
gtagacctgggggaaagccagagtcgggggaccccattcagcctccaaagaggctttgctgtgt

SEQ ID NO: 14414 - RNA, 64 nt, synthetic construct
  source 1..64: mol_type = other RNA
gtatacctgggggaaagccagagtcgggggaccccattcagcctccaaagaggctttgctgtgt

SEQ ID NO: 14415 - RNA, 65 nt, synthetic construct
  source 1..65: mol_type = other RNA
tgtaaacctgggggaaagccagagtcgggggaccccattcagcctccaaagaggctttgctgtgt

SEQ ID NO: 14416 - RNA, 65 nt, synthetic construct
  source 1..65: mol_type = other RNA
tgtacacctgggggaaagccagagtcgggggaccccattcagcctccaaagaggctttgctgtgt

SEQ ID NO: 14417 - RNA, 65 nt, synthetic construct
  source 1..65: mol_type = other RNA
tgtagacctgggggaaagccagagtcgggggaccccattcagcctccaaagaggctttgctgtgt

SEQ ID NO: 14418 - RNA, 65 nt, synthetic construct
  source 1..65: mol_type = other RNA
tgtatacctgggggaaagccagagtcgggggaccccattcagcctccaaagaggctttgctgtgt

SEQ ID NO: 14419 - RNA, 66 nt, synthetic construct
  source 1..66: mol_type = other RNA
atgtagacctgggggaaagccagagtcgggggaccccattcagcctccaaagaggctttgctgtgt

SEQ ID NO: 14420 - RNA, 66 nt, synthetic construct
  source 1..66: mol_type = other RNA
atgtacacctgggggaaagccagagtcgggggaccccattcagcctccaaagaggctttgctgtgt

SEQ ID NO: 14421 - RNA, 66 nt, synthetic construct
  source 1..66: mol_type = other RNA
atgtatacctgggggaaagccagagtcgggggaccccattcagcctccaaagaggctttgctgtgt

SEQ ID NO: 14422 - RNA, 66 nt, synthetic construct
  source 1..66: mol_type = other RNA
atgtaaacctgggggaaagccagagtcgggggaccccattcagcctccaaagaggctttgctgtgt

SEQ ID NO: 14423 - RNA, 67 nt, synthetic construct
  source 1..67: mol_type = other RNA
catgtatacctgggggaaagccagagtcgggggaccccattcagcctccaaagaggctttgctgtgt

SEQ ID NO: 14424 - RNA, 67 nt, synthetic construct
  source 1..67: mol_type = other RNA
catgtaaacctgggggaaagccagagtcgggggaccccattcagcctccaaagaggctttgctgtgt

SEQ ID NO: 14425 - RNA, 67 nt, synthetic construct
  source 1..67: mol_type = other RNA
catgtagacctgggggaaagccagagtcgggggaccccattcagcctccaaagaggctttgctgtgt

SEQ ID NO: 14426 - RNA, 67 nt, synthetic construct
  source 1..67: mol_type = other RNA
catgtacacctgggggaaagccagagtcgggggaccccattcagcctccaaagaggctttgctgtgt

SEQ ID NO: 14427 - RNA, 68 nt, synthetic construct
  source 1..68: mol_type = other RNA
acatgtagacctgggggaaagccagagtcgggggaccccattcagcctccaaagaggctttgctgtgt

SEQ ID NO: 14428 - RNA, 68 nt, synthetic construct
  source 1..68: mol_type = other RNA
acatgtaaacctgggggaaagccagagtcgggggaccccattcagcctccaaagaggctttgctgtgt

SEQ ID NO: 14429 - RNA, 68 nt, synthetic construct
  source 1..68: mol_type = other RNA
acatgtacacctgggggaaagccagagtcgggggaccccattcagcctccaaagaggctttgctgtgt

SEQ ID NO: 14430 - RNA, 68 nt, synthetic construct
  source 1..68: mol_type = other RNA
acatgtatacctgggggaaagccagagtcgggggaccccattcagcctccaaagaggctttgctgtgt

SEQ ID NO: 14431 - RNA, 69 nt, synthetic construct
  source 1..69: mol_type = other RNA
aacatgtatacctgggggaaagccagagtcgggggaccccattcagcctccaaagaggctttgctgtgt

SEQ ID NO: 14432 - RNA, 69 nt, synthetic construct
  source 1..69: mol_type = other RNA
aacatgtaaacctgggggaaagccagagtcgggggaccccattcagcctccaaagaggctttgctgtgt

SEQ ID NO: 14433 - RNA, 69 nt, synthetic construct
  source 1..69: mol_type = other RNA
aacatgtacacctgggggaaagccagagtcgggggaccccattcagcctccaaagaggctttgctgtgt

SEQ ID NO: 14434 - RNA, 69 nt, synthetic construct
  source 1..69: mol_type = other RNA
aacatgtagacctgggggaaagccagagtcgggggaccccattcagcctccaaagaggctttgctgtgt

SEQ ID NO: 14435 - RNA, 70 nt, synthetic construct
  source 1..70: mol_type = other RNA
gaacatgtatacctgggggaaagccagagtcgggggaccccattcagcctccaaagaggctttgctgtgt

SEQ ID NO: 14436 - RNA, 70 nt, synthetic construct
  source 1..70: mol_type = other RNA
gaacatgtaaacctgggggaaagccagagtcgggggaccccattcagcctccaaagaggctttgctgtgt

SEQ ID NO: 14437 - RNA, 70 nt, synthetic construct
  source 1..70: mol_type = other RNA
gaacatgtacacctgggggaaagccagagtcgggggaccccattcagcctccaaagaggctttgctgtgt

SEQ ID NO: 14438 - RNA, 70 nt, synthetic construct
  source 1..70: mol_type = other RNA
gaacatgtagacctgggggaaagccagagtcgggggaccccattcagcctccaaagaggctttgctgtgt

SEQ ID NO: 14439 - RNA, 71 nt, synthetic construct
  source 1..71: mol_type = other RNA
ggaacatgtagacctgggggaaagccagagtcgggggaccccattcagcctccaaagaggctttgctgtgt

SEQ ID NO: 14440 - RNA, 71 nt, synthetic construct
  source 1..71: mol_type = other RNA
ggaacatgtaaacctgggggaaagccagagtcgggggaccccattcagcctccaaagaggctttgctgtgt

SEQ ID NO: 14441 - RNA, 71 nt, synthetic construct
  source 1..71: mol_type = other RNA
ggaacatgtacacctgggggaaagccagagtcgggggaccccattcagcctccaaagaggctttgctgtgt

SEQ ID NO: 14442 - RNA, 71 nt, synthetic construct
  source 1..71: mol_type = other RNA
ggaacatgtatacctgggggaaagccagagtcgggggaccccattcagcctccaaagaggctttgctgtgt

SEQ ID NO: 14443 - RNA, 72 nt, synthetic construct
  source 1..72: mol_type = other RNA
aggaacatgtaaacctgggggaaagccagagtcgggggaccccattcagcctccaaagaggctttgctgtgt

SEQ ID NO: 14444 - RNA, 72 nt, synthetic construct
  source 1..72: mol_type = other RNA
aggaacatgtacacctgggggaaagccagagtcgggggaccccattcagcctccaaagaggctttgctgtgt

SEQ ID NO: 14445 - RNA, 72 nt, synthetic construct
  source 1..72: mol_type = other RNA
aggaacatgtagacctgggggaaagccagagtcgggggaccccattcagcctccaaagaggctttgctgtgt

SEQ ID NO: 14446 - RNA, 72 nt, synthetic construct
  source 1..72: mol_type = other RNA
aggaacatgtatacctgggggaaagccagagtcgggggaccccattcagcctccaaagaggctttgctgtgt

SEQ ID NO: 14447 - RNA, 73 nt, synthetic construct
  source 1..73: mol_type = other RNA
caggaacatgtagacctgggggaaagccagagtcgggggaccccattcagcctccaaagaggctttgctgtgt

SEQ ID NO: 14448 - RNA, 73 nt, synthetic construct
  source 1..73: mol_type = other RNA
caggaacatgtacacctgggggaaagccagagtcgggggaccccattcagcctccaaagaggctttgctgtgt

SEQ ID NO: 14449 - RNA, 73 nt, synthetic construct
  source 1..73: mol_type = other RNA
caggaacatgtaaacctgggggaaagccagagtcgggggaccccattcagcctccaaagaggctttgctgtgt

SEQ ID NO: 14450 - RNA, 73 nt, synthetic construct
  source 1..73: mol_type = other RNA
caggaacatgtatacctgggggaaagccagagtcgggggaccccattcagcctccaaagaggctttgctgtgt

SEQ ID NO: 14451 - RNA, 74 nt, synthetic construct
  source 1..74: mol_type = other RNA
ccaggaacatgtatacctgggggaaagccagagtcgggggaccccattcagcctccaaagaggctttgctgtgt

SEQ ID NO: 14452 - RNA, 74 nt, synthetic construct
  source 1..74: mol_type = other RNA
ccaggaacatgtaaacctgggggaaagccagagtcgggggaccccattcagcctccaaagaggctttgctgtgt

SEQ ID NO: 14453 - RNA, 74 nt, synthetic construct
  source 1..74: mol_type = other RNA
ccaggaacatgtagacctgggggaaagccagagtcgggggaccccattcagcctccaaagaggctttgctgtgt

SEQ ID NO: 14454 - RNA, 74 nt, synthetic construct
  source 1..74: mol_type = other RNA
ccaggaacatgtacacctgggggaaagccagagtcgggggaccccattcagcctccaaagaggctttgctgtgt

SEQ ID NO: 14455 - RNA, 75 nt, synthetic construct
  source 1..75: mol_type = other RNA
accaggaacatgtaaacctgggggaaagccagagtcgggggaccccattcagcctccaaagaggctttgctgtgt

SEQ ID NO: 14456 - RNA, 75 nt, synthetic construct
  source 1..75: mol_type = other RNA
accaggaacatgtacacctgggggaaagccagagtcgggggaccccattcagcctccaaagaggctttgctgtgt

SEQ ID NO: 14457 - RNA, 75 nt, synthetic construct
  source 1..75: mol_type = other RNA
accaggaacatgtatacctgggggaaagccagagtcgggggaccccattcagcctccaaagaggctttgctgtgt

SEQ ID NO: 14458 - RNA, 75 nt, synthetic construct
  source 1..75: mol_type = other RNA
accaggaacatgtagacctgggggaaagccagagtcgggggaccccattcagcctccaaagaggctttgctgtgt

SEQ ID NO: 14459 - RNA, 76 nt, synthetic construct
  source 1..76: mol_type = other RNA
caccaggaacatgtaaacctgggggaaagccagagtcgggggaccccattcagcctccaaagaggctttgctgtgt

SEQ ID NO: 14460 - RNA, 76 nt, synthetic construct
  source 1..76: mol_type = other RNA
caccaggaacatgtacacctgggggaaagccagagtcgggggaccccattcagcctccaaagaggctttgctgtgt

SEQ ID NO: 14461 - RNA, 76 nt, synthetic construct
  source 1..76: mol_type = other RNA
caccaggaacatgtatacctgggggaaagccagagtcgggggaccccattcagcctccaaagaggctttgctgtgt

SEQ ID NO: 14462 - RNA, 76 nt, synthetic construct
  source 1..76: mol_type = other RNA
caccaggaacatgtagacctgggggaaagccagagtcgggggaccccattcagcctccaaagaggctttgctgtgt

SEQ ID NO: 14463 - RNA, 77 nt, synthetic construct
  source 1..77: mol_type = other RNA
tcaccaggaacatgtacacctgggggaaagccagagtcgggggaccccattcagcctccaaagaggctttgctgtgt

SEQ ID NO: 14464 - RNA, 77 nt, synthetic construct
  source 1..77: mol_type = other RNA
tcaccaggaacatgtagacctgggggaaagccagagtcgggggaccccattcagcctccaaagaggctttgctgtgt

SEQ ID NO: 14465 - RNA, 77 nt, synthetic construct
  source 1..77: mol_type = other RNA
tcaccaggaacatgtatacctgggggaaagccagagtcgggggaccccattcagcctccaaagaggctttgctgtgt

SEQ ID NO: 14466 - RNA, 77 nt, synthetic construct
  source 1..77: mol_type = other RNA
tcaccaggaacatgtaaacctgggggaaagccagagtcgggggaccccattcagcctccaaagaggctttgctgtgt

SEQ ID NO: 14467 - RNA, 78 nt, synthetic construct
  source 1..78: mol_type = other RNA
ttcaccaggaacatgtatacctgggggaaagccagagtcgggggaccccattcagcctccaaagaggctttgctgtgt

SEQ ID NO: 14468 - RNA, 78 nt, synthetic construct
  source 1..78: mol_type = other RNA
ttcaccaggaacatgtacacctgggggaaagccagagtcgggggaccccattcagcctccaaagaggctttgctgtgt

SEQ ID NO: 14469 - RNA, 78 nt, synthetic construct
  source 1..78: mol_type = other RNA
ttcaccaggaacatgtaaacctgggggaaagccagagtcgggggaccccattcagcctccaaagaggctttgctgtgt

SEQ ID NO: 14470 - RNA, 78 nt, synthetic construct
  source 1..78: mol_type = other RNA
ttcaccaggaacatgtagacctgggggaaagccagagtcgggggaccccattcagcctccaaagaggctttgctgtgt

SEQ ID NO: 14471 - RNA, 79 nt, synthetic construct
  source 1..79: mol_type = other RNA
tttcaccaggaacatgtaaacctgggggaaagccagagtcgggggaccccattcagcctccaaagaggctttgctgtgt

SEQ ID NO: 14472 - RNA, 79 nt, synthetic construct
  source 1..79: mol_type = other RNA
tttcaccaggaacatgtatacctgggggaaagccagagtcgggggaccccattcagcctccaaagaggctttgctgtgt

SEQ ID NO: 14473 - RNA, 79 nt, synthetic construct
  source 1..79: mol_type = other RNA
tttcaccaggaacatgtagacctgggggaaagccagagtcgggggaccccattcagcctccaaagaggctttgctgtgt

SEQ ID NO: 14474 - RNA, 79 nt, synthetic construct
  source 1..79: mol_type = other RNA
tttcaccaggaacatgtacacctgggggaaagccagagtcgggggaccccattcagcctccaaagaggctttgctgtgt

SEQ ID NO: 14475 - RNA, 80 nt, synthetic construct
  source 1..80: mol_type = other RNA
atttcaccaggaacatgtatacctgggggaaagccagagtcgggggaccccattcagcctccaaagaggctttgctgtgt

SEQ ID NO: 14476 - RNA, 80 nt, synthetic construct
  source 1..80: mol_type = other RNA
atttcaccaggaacatgtagacctgggggaaagccagagtcgggggaccccattcagcctccaaagaggctttgctgtgt

SEQ ID NO: 14477 - RNA, 80 nt, synthetic construct
  source 1..80: mol_type = other RNA
atttcaccaggaacatgtacacctgggggaaagccagagtcgggggaccccattcagcctccaaagaggctttgctgtgt

SEQ ID NO: 14478 - RNA, 80 nt, synthetic construct
  source 1..80: mol_type = other RNA
atttcaccaggaacatgtaaacctgggggaaagccagagtcgggggaccccattcagcctccaaagaggctttgctgtgt

SEQ ID NO: 14479 - RNA, 81 nt, synthetic construct
  source 1..81: mol_type = other RNA
catttcaccaggaacatgtatacctgggggaaagccagagtcgggggaccccattcagcctccaaagaggctttgctgtgt

SEQ ID NO: 14480 - RNA, 81 nt, synthetic construct
  source 1..81: mol_type = other RNA
catttcaccaggaacatgtaaacctgggggaaagccagagtcgggggaccccattcagcctccaaagaggctttgctgtgt

SEQ ID NO: 14481 - RNA, 81 nt, synthetic construct
  source 1..81: mol_type = other RNA
catttcaccaggaacatgtagacctgggggaaagccagagtcgggggaccccattcagcctccaaagaggctttgctgtgt

SEQ ID NO: 14482 - RNA, 81 nt, synthetic construct
  source 1..81: mol_type = other RNA
catttcaccaggaacatgtacacctgggggaaagccagagtcgggggaccccattcagcctccaaagaggctttgctgtgt

SEQ ID NO: 14483 - RNA, 82 nt, synthetic construct
  source 1..82: mol_type = other RNA
ccatttcaccaggaacatgtaaacctgggggaaagccagagtcgggggaccccattcagcctccaaagaggctttgctgtgt

SEQ ID NO: 14484 - RNA, 82 nt, synthetic construct
  source 1..82: mol_type = other RNA
ccatttcaccaggaacatgtacacctgggggaaagccagagtcgggggaccccattcagcctccaaagaggctttgctgtgt

SEQ ID NO: 14485 - RNA, 82 nt, synthetic construct
  source 1..82: mol_type = other RNA
ccatttcaccaggaacatgtagacctgggggaaagccagagtcgggggaccccattcagcctccaaagaggctttgctgtgt

SEQ ID NO: 14486 - RNA, 82 nt, synthetic construct
  source 1..82: mol_type = other RNA
ccatttcaccaggaacatgtatacctgggggaaagccagagtcgggggaccccattcagcctccaaagaggctttgctgtgt

SEQ ID NO: 14487 - RNA, 83 nt, synthetic construct
  source 1..83: mol_type = other RNA
gccatttcaccaggaacatgtaaacctgggggaaagccagagtcgggggaccccattcagcctccaaagaggctttgctgtgt

SEQ ID NO: 14488 - RNA, 83 nt, synthetic construct
  source 1..83: mol_type = other RNA
gccatttcaccaggaacatgtacacctgggggaaagccagagtcgggggaccccattcagcctccaaagaggctttgctgtgt

SEQ ID NO: 14489 - RNA, 83 nt, synthetic construct
  source 1..83: mol_type = other RNA
gccatttcaccaggaacatgtagacctgggggaaagccagagtcgggggaccccattcagcctccaaagaggctttgctgtgt

SEQ ID NO: 14490 - RNA, 83 nt, synthetic construct
  source 1..83: mol_type = other RNA
gccatttcaccaggaacatgtatacctgggggaaagccagagtcgggggaccccattcagcctccaaagaggctttgctgtgt

SEQ ID NO: 14491 - RNA, 84 nt, synthetic construct
  source 1..84: mol_type = other RNA
tgccatttcaccaggaacatgtacacctgggggaaagccagagtcgggggaccccattcagcctccaaagaggctttgctgtgt

SEQ ID NO: 14492 - RNA, 84 nt, synthetic construct
  source 1..84: mol_type = other RNA
tgccatttcaccaggaacatgtagacctgggggaaagccagagtcgggggaccccattcagcctccaaagaggctttgctgtgt

SEQ ID NO: 14493 - RNA, 84 nt, synthetic construct
  source 1..84: mol_type = other RNA
tgccatttcaccaggaacatgtatacctgggggaaagccagagtcgggggaccccattcagcctccaaagaggctttgctgtgt

SEQ ID NO: 14494 - RNA, 84 nt, synthetic construct
  source 1..84: mol_type = other RNA
tgccatttcaccaggaacatgtaaacctgggggaaagccagagtcgggggaccccattcagcctccaaagaggctttgctgtgt

SEQ ID NO: 14495 - RNA, 85 nt, synthetic construct
  source 1..85: mol_type = other RNA
ctgccatttcaccaggaacatgtaaacctgggggaaagccagagtcgggggaccccattcagcctccaaagaggctttgctgtgt

SEQ ID NO: 14496 - RNA, 85 nt, synthetic construct
  source 1..85: mol_type = other RNA
ctgccatttcaccaggaacatgtacacctgggggaaagccagagtcgggggaccccattcagcctccaaagaggctttgctgtgt

SEQ ID NO: 14497 - RNA, 85 nt, synthetic construct
  source 1..85: mol_type = other RNA
ctgccatttcaccaggaacatgtatacctgggggaaagccagagtcgggggaccccattcagcctccaaagaggctttgctgtgt

SEQ ID NO: 14498 - RNA, 85 nt, synthetic construct
  source 1..85: mol_type = other RNA
ctgccatttcaccaggaacatgtagacctgggggaaagccagagtcgggggaccccattcagcctccaaagaggctttgctgtgt

SEQ ID NO: 14499 - RNA, 86 nt, synthetic construct
  source 1..86: mol_type = other RNA
cctgccatttcaccaggaacatgtatacctgggggaaagccagagtcgggggaccccattcagcctccaaagaggctttgctgtgt

SEQ ID NO: 14500 - RNA, 86 nt, synthetic construct
  source 1..86: mol_type = other RNA
cctgccatttcaccaggaacatgtaaacctgggggaaagccagagtcgggggaccccattcagcctccaaagaggctttgctgtgt

SEQ ID NO: 14501 - RNA, 86 nt, synthetic construct
  source 1..86: mol_type = other RNA
cctgccatttcaccaggaacatgtacacctgggggaaagccagagtcgggggaccccattcagcctccaaagaggctttgctgtgt

SEQ ID NO: 14502 - RNA, 86 nt, synthetic construct
  source 1..86: mol_type = other RNA
cctgccatttcaccaggaacatgtagacctgggggaaagccagagtcgggggaccccattcagcctccaaagaggctttgctgtgt

SEQ ID NO: 14503 - RNA, 87 nt, synthetic construct
  source 1..87: mol_type = other RNA
tcctgccatttcaccaggaacatgtaaacctgggggaaagccagagtcgggggaccccattcagcctccaaagaggctttgctgtgt

SEQ ID NO: 14504 - RNA, 87 nt, synthetic construct
  source 1..87: mol_type = other RNA
tcctgccatttcaccaggaacatgtagacctgggggaaagccagagtcgggggaccccattcagcctccaaagaggctttgctgtgt

SEQ ID NO: 14505 - RNA, 87 nt, synthetic construct
  source 1..87: mol_type = other RNA
tcctgccatttcaccaggaacatgtacacctgggggaaagccagagtcgggggaccccattcagcctccaaagaggctttgctgtgt

SEQ ID NO: 14506 - RNA, 87 nt, synthetic construct
  source 1..87: mol_type = other RNA
tcctgccatttcaccaggaacatgtatacctgggggaaagccagagtcgggggaccccattcagcctccaaagaggctttgctgtgt

SEQ ID NO: 14507 - RNA, 88 nt, synthetic construct
  source 1..88: mol_type = other RNA
gtcctgccatttcaccaggaacatgtaaacctgggggaaagccagagtcgggggaccccattcagcctccaaagaggctttgctgtgt

SEQ ID NO: 14508 - RNA, 88 nt, synthetic construct
  source 1..88: mol_type = other RNA
gtcctgccatttcaccaggaacatgtagacctgggggaaagccagagtcgggggaccccattcagcctccaaagaggctttgctgtgt

SEQ ID NO: 14509 - RNA, 88 nt, synthetic construct
  source 1..88: mol_type = other RNA
gtcctgccatttcaccaggaacatgtacacctgggggaaagccagagtcgggggaccccattcagcctccaaagaggctttgctgtgt

SEQ ID NO: 14510 - RNA, 88 nt, synthetic construct
  source 1..88: mol_type = other RNA
gtcctgccatttcaccaggaacatgtatacctgggggaaagccagagtcgggggaccccattcagcctccaaagaggctttgctgtgt

SEQ ID NO: 14511 - RNA, 89 nt, synthetic construct
  source 1..89: mol_type = other RNA
ggtcctgccatttcaccaggaacatgtagacctgggggaaagccagagtcgggggaccccattcagcctccaaagaggctttgctgtgt

SEQ ID NO: 14512 - RNA, 89 nt, synthetic construct
  source 1..89: mol_type = other RNA
ggtcctgccatttcaccaggaacatgtaaacctgggggaaagccagagtcgggggaccccattcagcctccaaagaggctttgctgtgt

SEQ ID NO: 14513 - RNA, 89 nt, synthetic construct
  source 1..89: mol_type = other RNA
ggtcctgccatttcaccaggaacatgtatacctgggggaaagccagagtcgggggaccccattcagcctccaaagaggctttgctgtgt

SEQ ID NO: 14514 - RNA, 89 nt, synthetic construct
  source 1..89: mol_type = other RNA
ggtcctgccatttcaccaggaacatgtacacctgggggaaagccagagtcgggggaccccattcagcctccaaagaggctttgctgtgt

SEQ ID NO: 14515 - RNA, 90 nt, synthetic construct
  source 1..90: mol_type = other RNA
aggtcctgccatttcaccaggaacatgtatacctgggggaaagccagagtcgggggaccccattcagcctccaaagaggctttgctgtgt

SEQ ID NO: 14516 - RNA, 90 nt, synthetic construct
  source 1..90: mol_type = other RNA
aggtcctgccatttcaccaggaacatgtaaacctgggggaaagccagagtcgggggaccccattcagcctccaaagaggctttgctgtgt

SEQ ID NO: 14517 - RNA, 90 nt, synthetic construct
  source 1..90: mol_type = other RNA
aggtcctgccatttcaccaggaacatgtagacctgggggaaagccagagtcgggggaccccattcagcctccaaagaggctttgctgtgt

SEQ ID NO: 14518 - RNA, 90 nt, synthetic construct
  source 1..90: mol_type = other RNA
aggtcctgccatttcaccaggaacatgtacacctgggggaaagccagagtcgggggaccccattcagcctccaaagaggctttgctgtgt

SEQ ID NO: 14519 - RNA, 91 nt, synthetic construct
  source 1..91: mol_type = other RNA
caggtcctgccatttcaccaggaacatgtagacctgggggaaagccagagtcgggggaccccattcagcctccaaagaggctttgctgtgt

SEQ ID NO: 14520 - RNA, 91 nt, synthetic construct
  source 1..91: mol_type = other RNA
caggtcctgccatttcaccaggaacatgtaaacctgggggaaagccagagtcgggggaccccattcagcctccaaagaggctttgctgtgt

SEQ ID NO: 14521 - RNA, 91 nt, synthetic construct
  source 1..91: mol_type = other RNA
caggtcctgccatttcaccaggaacatgtatacctgggggaaagccagagtcgggggaccccattcagcctccaaagaggctttgctgtgt

SEQ ID NO: 14522 - RNA, 91 nt, synthetic construct
  source 1..91: mol_type = other RNA
caggtcctgccatttcaccaggaacatgtacacctgggggaaagccagagtcgggggaccccattcagcctccaaagaggctttgctgtgt

SEQ ID NO: 14523 - RNA, 92 nt, synthetic construct
  source 1..92: mol_type = other RNA
acaggtcctgccatttcaccaggaacatgtaaacctgggggaaagccagagtcgggggaccccattcagcctccaaagaggctttgctgtgt

SEQ ID NO: 14524 - RNA, 92 nt, synthetic construct
  source 1..92: mol_type = other RNA
acaggtcctgccatttcaccaggaacatgtagacctgggggaaagccagagtcgggggaccccattcagcctccaaagaggctttgctgtgt

SEQ ID NO: 14525 - RNA, 92 nt, synthetic construct
  source 1..92: mol_type = other RNA
acaggtcctgccatttcaccaggaacatgtatacctgggggaaagccagagtcgggggaccccattcagcctccaaagaggctttgctgtgt

SEQ ID NO: 14526 - RNA, 92 nt, synthetic construct
  source 1..92: mol_type = other RNA
acaggtcctgccatttcaccaggaacatgtacacctgggggaaagccagagtcgggggaccccattcagcctccaaagaggctttgctgtgt

SEQ ID NO: 14527 - RNA, 93 nt, synthetic construct
  source 1..93: mol_type = other RNA
gacaggtcctgccatttcaccaggaacatgtagacctgggggaaagccagagtcgggggaccccattcagcctccaaagaggctttgctgtgt

SEQ ID NO: 14528 - RNA, 93 nt, synthetic construct
  source 1..93: mol_type = other RNA
gacaggtcctgccatttcaccaggaacatgtatacctgggggaaagccagagtcgggggaccccattcagcctccaaagaggctttgctgtgt

SEQ ID NO: 14529 - RNA, 93 nt, synthetic construct
  source 1..93: mol_type = other RNA
gacaggtcctgccatttcaccaggaacatgtaaacctgggggaaagccagagtcgggggaccccattcagcctccaaagaggctttgctgtgt

SEQ ID NO: 14530 - RNA, 93 nt, synthetic construct
  source 1..93: mol_type = other RNA
gacaggtcctgccatttcaccaggaacatgtacacctgggggaaagccagagtcgggggaccccattcagcctccaaagaggctttgctgtgt

SEQ ID NO: 14531 - RNA, 94 nt, synthetic construct
  source 1..94: mol_type = other RNA
cgacaggtcctgccatttcaccaggaacatgtatacctgggggaaagccagagtcgggggaccccattcagcctccaaagaggctttgctgtgt

SEQ ID NO: 14532 - RNA, 94 nt, synthetic construct
  source 1..94: mol_type = other RNA
cgacaggtcctgccatttcaccaggaacatgtagacctgggggaaagccagagtcgggggaccccattcagcctccaaagaggctttgctgtgt

SEQ ID NO: 14533 - RNA, 94 nt, synthetic construct
  source 1..94: mol_type = other RNA
cgacaggtcctgccatttcaccaggaacatgtaaacctgggggaaagccagagtcgggggaccccattcagcctccaaagaggctttgctgtgt

SEQ ID NO: 14534 - RNA, 94 nt, synthetic construct
  source 1..94: mol_type = other RNA
cgacaggtcctgccatttcaccaggaacatgtacacctgggggaaagccagagtcgggggaccccattcagcctccaaagaggctttgctgtgt

SEQ ID NO: 14535 - RNA, 95 nt, synthetic construct
  source 1..95: mol_type = other RNA
ccgacaggtcctgccatttcaccaggaacatgtacacctgggggaaagccagagtcgggggaccccattcagcctccaaagaggctttgctgtgt

SEQ ID NO: 14536 - RNA, 95 nt, synthetic construct
  source 1..95: mol_type = other RNA
ccgacaggtcctgccatttcaccaggaacatgtaaacctgggggaaagccagagtcgggggaccccattcagcctccaaagaggctttgctgtgt

SEQ ID NO: 14537 - RNA, 95 nt, synthetic construct
  source 1..95: mol_type = other RNA
ccgacaggtcctgccatttcaccaggaacatgtagacctgggggaaagccagagtcgggggaccccattcagcctccaaagaggctttgctgtgt

SEQ ID NO: 14538 - RNA, 95 nt, synthetic construct
  source 1..95: mol_type = other RNA
ccgacaggtcctgccatttcaccaggaacatgtatacctgggggaaagccagagtcgggggaccccattcagcctccaaagaggctttgctgtgt

SEQ ID NO: 14539 - RNA, 96 nt, synthetic construct
  source 1..96: mol_type = other RNA
tccgacaggtcctgccatttcaccaggaacatgtacacctgggggaaagccagagtcgggggaccccattcagcctccaaagaggctttgctgtgt

SEQ ID NO: 14540 - RNA, 96 nt, synthetic construct
  source 1..96: mol_type = other RNA
tccgacaggtcctgccatttcaccaggaacatgtagacctgggggaaagccagagtcgggggaccccattcagcctccaaagaggctttgctgtgt

SEQ ID NO: 14541 - RNA, 96 nt, synthetic construct
  source 1..96: mol_type = other RNA
tccgacaggtcctgccatttcaccaggaacatgtatacctgggggaaagccagagtcgggggaccccattcagcctccaaagaggctttgctgtgt

SEQ ID NO: 14542 - RNA, 96 nt, synthetic construct
  source 1..96: mol_type = other RNA
tccgacaggtcctgccatttcaccaggaacatgtaaacctgggggaaagccagagtcgggggaccccattcagcctccaaagaggctttgctgtgt

SEQ ID NO: 14543 - RNA, 97 nt, synthetic construct
  source 1..97: mol_type = other RNA
ctccgacaggtcctgccatttcaccaggaacatgtaaacctgggggaaagccagagtcgggggaccccattcagcctccaaagaggctttgctgtgt

SEQ ID NO: 14544 - RNA, 97 nt, synthetic construct
  source 1..97: mol_type = other RNA
ctccgacaggtcctgccatttcaccaggaacatgtatacctgggggaaagccagagtcgggggaccccattcagcctccaaagaggctttgctgtgt

SEQ ID NO: 14545 - RNA, 97 nt, synthetic construct
  source 1..97: mol_type = other RNA
ctccgacaggtcctgccatttcaccaggaacatgtagacctgggggaaagccagagtcgggggaccccattcagcctccaaagaggctttgctgtgt

SEQ ID NO: 14546 - RNA, 97 nt, synthetic construct
  source 1..97: mol_type = other RNA
ctccgacaggtcctgccatttcaccaggaacatgtacacctgggggaaagccagagtcgggggaccccattcagcctccaaagaggctttgctgtgt

SEQ ID NO: 14547 - RNA, 98 nt, synthetic construct
  source 1..98: mol_type = other RNA
tctccgacaggtcctgccatttcaccaggaacatgtatacctgggggaaagccagagtcgggggaccccattcagcctccaaagaggctttgctgtgt

SEQ ID NO: 14548 - RNA, 98 nt, synthetic construct
  source 1..98: mol_type = other RNA
tctccgacaggtcctgccatttcaccaggaacatgtaaacctgggggaaagccagagtcgggggaccccattcagcctccaaagaggctttgctgtgt

SEQ ID NO: 14549 - RNA, 98 nt, synthetic construct
  source 1..98: mol_type = other RNA
tctccgacaggtcctgccatttcaccaggaacatgtacacctgggggaaagccagagtcgggggaccccattcagcctccaaagaggctttgctgtgt

SEQ ID NO: 14550 - RNA, 98 nt, synthetic construct
  source 1..98: mol_type = other RNA
tctccgacaggtcctgccatttcaccaggaacatgtagacctgggggaaagccagagtcgggggaccccattcagcctccaaagaggctttgctgtgt

SEQ ID NO: 14551 - RNA, 99 nt, synthetic construct
  source 1..99: mol_type = other RNA
ttctccgacaggtcctgccatttcaccaggaacatgtatacctgggggaaagccagagtcgggggaccccattcagcctccaaagaggctttgctgtgt

SEQ ID NO: 14552 - RNA, 99 nt, synthetic construct
  source 1..99: mol_type = other RNA
ttctccgacaggtcctgccatttcaccaggaacatgtaaacctgggggaaagccagagtcgggggaccccattcagcctccaaagaggctttgctgtgt

SEQ ID NO: 14553 - RNA, 99 nt, synthetic construct
  source 1..99: mol_type = other RNA
ttctccgacaggtcctgccatttcaccaggaacatgtacacctgggggaaagccagagtcgggggaccccattcagcctccaaagaggctttgctgtgt

SEQ ID NO: 14554 - RNA, 99 nt, synthetic construct
  source 1..99: mol_type = other RNA
ttctccgacaggtcctgccatttcaccaggaacatgtagacctgggggaaagccagagtcgggggaccccattcagcctccaaagaggctttgctgtgt

SEQ ID NO: 14555 - RNA, 100 nt, synthetic construct
  source 1..100: mol_type = other RNA
cttctccgacaggtcctgccatttcaccaggaacatgtacacctgggggaaagccagagtcgggggaccccattcagcctccaaagaggctttgctgtgt

SEQ ID NO: 14556 - RNA, 100 nt, synthetic construct
  source 1..100: mol_type = other RNA
cttctccgacaggtcctgccatttcaccaggaacatgtagacctgggggaaagccagagtcgggggaccccattcagcctccaaagaggctttgctgtgt

SEQ ID NO: 14557 - RNA, 100 nt, synthetic construct
  source 1..100: mol_type = other RNA
cttctccgacaggtcctgccatttcaccaggaacatgtatacctgggggaaagccagagtcgggggaccccattcagcctccaaagaggctttgctgtgt

SEQ ID NO: 14558 - RNA, 100 nt, synthetic construct
  source 1..100: mol_type = other RNA
cttctccgacaggtcctgccatttcaccaggaacatgtaaacctgggggaaagccagagtcgggggaccccattcagcctccaaagaggctttgctgtgt

SEQ ID NO: 14559 - RNA, 101 nt, synthetic construct
  source 1..101: mol_type = other RNA
ccttctccgacaggtcctgccatttcaccaggaacatgtaaacctgggggaaagccagagtcgggggaccccattcagcctccaaagaggctttgctgtgt

SEQ ID NO: 14560 - RNA, 101 nt, synthetic construct
  source 1..101: mol_type = other RNA
ccttctccgacaggtcctgccatttcaccaggaacatgtacacctgggggaaagccagagtcgggggaccccattcagcctccaaagaggctttgctgtgt

SEQ ID NO: 14561 - RNA, 101 nt, synthetic construct
  source 1..101: mol_type = other RNA
ccttctccgacaggtcctgccatttcaccaggaacatgtagacctgggggaaagccagagtcgggggaccccattcagcctccaaagaggctttgctgtgt

SEQ ID NO: 14562 - RNA, 101 nt, synthetic construct
  source 1..101: mol_type = other RNA
ccttctccgacaggtcctgccatttcaccaggaacatgtatacctgggggaaagccagagtcgggggaccccattcagcctccaaagaggctttgctgtgt

SEQ ID NO: 14563 - RNA, 102 nt, synthetic construct
  source 1..102: mol_type = other RNA
accttctccgacaggtcctgccatttcaccaggaacatgtatacctgggggaaagccagagtcgggggaccccattcagcctccaaagaggctttgctgtgt

SEQ ID NO: 14564 - RNA, 102 nt, synthetic construct
  source 1..102: mol_type = other RNA
accttctccgacaggtcctgccatttcaccaggaacatgtagacctgggggaaagccagagtcgggggaccccattcagcctccaaagaggctttgctgtgt

SEQ ID NO: 14565 - RNA, 102 nt, synthetic construct
  source 1..102: mol_type = other RNA
accttctccgacaggtcctgccatttcaccaggaacatgtaaacctgggggaaagccagagtcgggggaccccattcagcctccaaagaggctttgctgtgt

SEQ ID NO: 14566 - RNA, 102 nt, synthetic construct
  source 1..102: mol_type = other RNA
accttctccgacaggtcctgccatttcaccaggaacatgtacacctgggggaaagccagagtcgggggaccccattcagcctccaaagaggctttgctgtgt

SEQ ID NO: 14567 - RNA, 103 nt, synthetic construct
  source 1..103: mol_type = other RNA
caccttctccgacaggtcctgccatttcaccaggaacatgtatacctgggggaaagccagagtcgggggaccccattcagcctccaaagaggctttgctgtgt

SEQ ID NO: 14568 - RNA, 103 nt, synthetic construct
  source 1..103: mol_type = other RNA
caccttctccgacaggtcctgccatttcaccaggaacatgtaaacctgggggaaagccagagtcgggggaccccattcagcctccaaagaggctttgctgtgt

SEQ ID NO: 14569 - RNA, 103 nt, synthetic construct
  source 1..103: mol_type = other RNA
caccttctccgacaggtcctgccatttcaccaggaacatgtagacctgggggaaagccagagtcgggggaccccattcagcctccaaagaggctttgctgtgt

SEQ ID NO: 14570 - RNA, 103 nt, synthetic construct
  source 1..103: mol_type = other RNA
caccttctccgacaggtcctgccatttcaccaggaacatgtacacctgggggaaagccagagtcgggggaccccattcagcctccaaagaggctttgctgtgt

SEQ ID NO: 14571 - RNA, 16 nt, synthetic construct
  source 1..16: mol_type = other RNA
ctgggtgcacacagca

SEQ ID NO: 14572 - RNA, 17 nt, synthetic construct
  source 1..17: mol_type = other RNA
cctgggtgcacacagca

SEQ ID NO: 14573 - RNA, 18 nt, synthetic construct
  source 1..18: mol_type = other RNA
tcctgggtgcacacagca

SEQ ID NO: 14574 - RNA, 19 nt, synthetic construct
  source 1..19: mol_type = other RNA
atcctgggtgcacacagca

SEQ ID NO: 14575 - RNA, 20 nt, synthetic construct
  source 1..20: mol_type = other RNA
gatcctgggtgcacacagca

SEQ ID NO: 14576 - RNA, 21 nt, synthetic construct
  source 1..21: mol_type = other RNA
ggatcctgggtgcacacagca

SEQ ID NO: 14577 - RNA, 22 nt, synthetic construct
  source 1..22: mol_type = other RNA
gggatcctgggtgcacacagca

SEQ ID NO: 14578-14584 - skipped (7 entries)

SEQ ID NO: 14585 - RNA, 10 nt, synthetic construct
  source 1..10: mol_type = other RNA
tgtgtgcacc

SEQ ID NO: 14586 - RNA, 11 nt, synthetic construct
  source 1..11: mol_type = other RNA
tgtgtgcaccc

SEQ ID NO: 14587 - RNA, 12 nt, synthetic construct
  source 1..12: mol_type = other RNA
tgtgtgcaccca

SEQ ID NO: 14588 - RNA, 13 nt, synthetic construct
  source 1..13: mol_type = other RNA
tgtgtgcacccag

SEQ ID NO: 14589 - RNA, 14 nt, synthetic construct
  source 1..14: mol_type = other RNA
tgtgtgcacccagg

SEQ ID NO: 14590 - RNA, 15 nt, synthetic construct
  source 1..15: mol_type = other RNA
tgtgtgcacccagga

SEQ ID NO: 14591 - RNA, 16 nt, synthetic construct
  source 1..16: mol_type = other RNA
tgtgtgcacccaggat

SEQ ID NO: 14592 - RNA, 17 nt, synthetic construct
  source 1..17: mol_type = other RNA
tgtgtgcacccaggatc

SEQ ID NO: 14593 - RNA, 18 nt, synthetic construct
  source 1..18: mol_type = other RNA
tgtgtgcacccaggatcc

SEQ ID NO: 14594 - RNA, 19 nt, synthetic construct
  source 1..19: mol_type = other RNA
tgtgtgcacccaggatccc

SEQ ID NO: 14595 - RNA, 55 nt, synthetic construct
  source 1..55: mol_type = other RNA
acctgggggaaagccagagtcgggggaccccattcagcctccaaagaggctttgc

SEQ ID NO: 14596 - RNA, 56 nt, synthetic construct
  source 1..56: mol_type = other RNA
gacctgggggaaagccagagtcgggggaccccattcagcctccaaagaggctttgc

SEQ ID NO: 14597 - RNA, 56 nt, synthetic construct
  source 1..56: mol_type = other RNA
cacctgggggaaagccagagtcgggggaccccattcagcctccaaagaggctttgc

SEQ ID NO: 14598 - RNA, 56 nt, synthetic construct
  source 1..56: mol_type = other RNA
aacctgggggaaagccagagtcgggggaccccattcagcctccaaagaggctttgc

SEQ ID NO: 14599 - RNA, 56 nt, synthetic construct
  source 1..56: mol_type = other RNA
tacctgggggaaagccagagtcgggggaccccattcagcctccaaagaggctttgc

SEQ ID NO: 14600 - RNA, 57 nt, synthetic construct
  source 1..57: mol_type = other RNA
agacctgggggaaagccagagtcgggggaccccattcagcctccaaagaggctttgc

SEQ ID NO: 14601 - RNA, 57 nt, synthetic construct
  source 1..57: mol_type = other RNA
acacctgggggaaagccagagtcgggggaccccattcagcctccaaagaggctttgc

SEQ ID NO: 14602 - RNA, 57 nt, synthetic construct
  source 1..57: mol_type = other RNA
atacctgggggaaagccagagtcgggggaccccattcagcctccaaagaggctttgc

SEQ ID NO: 14603 - RNA, 57 nt, synthetic construct
  source 1..57: mol_type = other RNA
aaacctgggggaaagccagagtcgggggaccccattcagcctccaaagaggctttgc

SEQ ID NO: 14604 - RNA, 58 nt, synthetic construct
  source 1..58: mol_type = other RNA
tacacctgggggaaagccagagtcgggggaccccattcagcctccaaagaggctttgc

SEQ ID NO: 14605 - RNA, 58 nt, synthetic construct
  source 1..58: mol_type = other RNA
taaacctgggggaaagccagagtcgggggaccccattcagcctccaaagaggctttgc

SEQ ID NO: 14606 - RNA, 58 nt, synthetic construct
  source 1..58: mol_type = other RNA
tatacctgggggaaagccagagtcgggggaccccattcagcctccaaagaggctttgc

SEQ ID NO: 14607 - RNA, 58 nt, synthetic construct
  source 1..58: mol_type = other RNA
tagacctgggggaaagccagagtcgggggaccccattcagcctccaaagaggctttgc

SEQ ID NO: 14608 - RNA, 59 nt, synthetic construct
  source 1..59: mol_type = other RNA
gtatacctgggggaaagccagagtcgggggaccccattcagcctccaaagaggctttgc

SEQ ID NO: 14609 - RNA, 59 nt, synthetic construct
  source 1..59: mol_type = other RNA
gtagacctgggggaaagccagagtcgggggaccccattcagcctccaaagaggctttgc

SEQ ID NO: 14610 - RNA, 59 nt, synthetic construct
  source 1..59: mol_type = other RNA
gtacacctgggggaaagccagagtcgggggaccccattcagcctccaaagaggctttgc

SEQ ID NO: 14611 - RNA, 59 nt, synthetic construct
  source 1..59: mol_type = other RNA
gtaaacctgggggaaagccagagtcgggggaccccattcagcctccaaagaggctttgc

SEQ ID NO: 14612 - RNA, 60 nt, synthetic construct
  source 1..60: mol_type = other RNA
tgtacacctgggggaaagccagagtcgggggaccccattcagcctccaaagaggctttgc

SEQ ID NO: 14613 - RNA, 60 nt, synthetic construct
  source 1..60: mol_type = other RNA
tgtatacctgggggaaagccagagtcgggggaccccattcagcctccaaagaggctttgc

SEQ ID NO: 14614 - RNA, 60 nt, synthetic construct
  source 1..60: mol_type = other RNA
tgtagacctgggggaaagccagagtcgggggaccccattcagcctccaaagaggctttgc

SEQ ID NO: 14615 - RNA, 60 nt, synthetic construct
  source 1..60: mol_type = other RNA
tgtaaacctgggggaaagccagagtcgggggaccccattcagcctccaaagaggctttgc

SEQ ID NO: 14616 - RNA, 61 nt, synthetic construct
  source 1..61: mol_type = other RNA
atgtagacctgggggaaagccagagtcgggggaccccattcagcctccaaagaggctttgc

SEQ ID NO: 14617 - RNA, 61 nt, synthetic construct
  source 1..61: mol_type = other RNA
atgtatacctgggggaaagccagagtcgggggaccccattcagcctccaaagaggctttgc

SEQ ID NO: 14618 - RNA, 61 nt, synthetic construct
  source 1..61: mol_type = other RNA
atgtacacctgggggaaagccagagtcgggggaccccattcagcctccaaagaggctttgc

SEQ ID NO: 14619 - RNA, 61 nt, synthetic construct
  source 1..61: mol_type = other RNA
atgtaaacctgggggaaagccagagtcgggggaccccattcagcctccaaagaggctttgc

SEQ ID NO: 14620 - RNA, 62 nt, synthetic construct
  source 1..62: mol_type = other RNA
catgtagacctgggggaaagccagagtcgggggaccccattcagcctccaaagaggctttgc

SEQ ID NO: 14621 - RNA, 62 nt, synthetic construct
  source 1..62: mol_type = other RNA
catgtaaacctgggggaaagccagagtcgggggaccccattcagcctccaaagaggctttgc

SEQ ID NO: 14622 - RNA, 62 nt, synthetic construct
  source 1..62: mol_type = other RNA
catgtatacctgggggaaagccagagtcgggggaccccattcagcctccaaagaggctttgc

SEQ ID NO: 14623 - RNA, 62 nt, synthetic construct
  source 1..62: mol_type = other RNA
catgtacacctgggggaaagccagagtcgggggaccccattcagcctccaaagaggctttgc

SEQ ID NO: 14624 - RNA, 63 nt, synthetic construct
  source 1..63: mol_type = other RNA
acatgtaaacctgggggaaagccagagtcgggggaccccattcagcctccaaagaggctttgc

SEQ ID NO: 14625 - RNA, 63 nt, synthetic construct
  source 1..63: mol_type = other RNA
acatgtagacctgggggaaagccagagtcgggggaccccattcagcctccaaagaggctttgc

SEQ ID NO: 14626 - RNA, 63 nt, synthetic construct
  source 1..63: mol_type = other RNA
acatgtacacctgggggaaagccagagtcgggggaccccattcagcctccaaagaggctttgc

SEQ ID NO: 14627 - RNA, 63 nt, synthetic construct
  source 1..63: mol_type = other RNA
acatgtatacctgggggaaagccagagtcgggggaccccattcagcctccaaagaggctttgc

SEQ ID NO: 14628 - RNA, 64 nt, synthetic construct
  source 1..64: mol_type = other RNA
aacatgtatacctgggggaaagccagagtcgggggaccccattcagcctccaaagaggctttgc

SEQ ID NO: 14629 - RNA, 64 nt, synthetic construct
  source 1..64: mol_type = other RNA
aacatgtagacctgggggaaagccagagtcgggggaccccattcagcctccaaagaggctttgc

SEQ ID NO: 14630 - RNA, 64 nt, synthetic construct
  source 1..64: mol_type = other RNA
aacatgtacacctgggggaaagccagagtcgggggaccccattcagcctccaaagaggctttgc

SEQ ID NO: 14631 - RNA, 64 nt, synthetic construct
  source 1..64: mol_type = other RNA
aacatgtaaacctgggggaaagccagagtcgggggaccccattcagcctccaaagaggctttgc

SEQ ID NO: 14632 - RNA, 65 nt, synthetic construct
  source 1..65: mol_type = other RNA
gaacatgtatacctgggggaaagccagagtcgggggaccccattcagcctccaaagaggctttgc

SEQ ID NO: 14633 - RNA, 65 nt, synthetic construct
  source 1..65: mol_type = other RNA
gaacatgtagacctgggggaaagccagagtcgggggaccccattcagcctccaaagaggctttgc

SEQ ID NO: 14634 - RNA, 65 nt, synthetic construct
  source 1..65: mol_type = other RNA
gaacatgtacacctgggggaaagccagagtcgggggaccccattcagcctccaaagaggctttgc

SEQ ID NO: 14635 - RNA, 65 nt, synthetic construct
  source 1..65: mol_type = other RNA
gaacatgtaaacctgggggaaagccagagtcgggggaccccattcagcctccaaagaggctttgc

SEQ ID NO: 14636 - RNA, 66 nt, synthetic construct
  source 1..66: mol_type = other RNA
ggaacatgtaaacctgggggaaagccagagtcgggggaccccattcagcctccaaagaggctttgc

SEQ ID NO: 14637 - RNA, 66 nt, synthetic construct
  source 1..66: mol_type = other RNA
ggaacatgtagacctgggggaaagccagagtcgggggaccccattcagcctccaaagaggctttgc

SEQ ID NO: 14638 - RNA, 66 nt, synthetic construct
  source 1..66: mol_type = other RNA
ggaacatgtacacctgggggaaagccagagtcgggggaccccattcagcctccaaagaggctttgc

SEQ ID NO: 14639 - RNA, 66 nt, synthetic construct
  source 1..66: mol_type = other RNA
ggaacatgtatacctgggggaaagccagagtcgggggaccccattcagcctccaaagaggctttgc

SEQ ID NO: 14640 - RNA, 67 nt, synthetic construct
  source 1..67: mol_type = other RNA
aggaacatgtatacctgggggaaagccagagtcgggggaccccattcagcctccaaagaggctttgc

SEQ ID NO: 14641 - RNA, 67 nt, synthetic construct
  source 1..67: mol_type = other RNA
aggaacatgtaaacctgggggaaagccagagtcgggggaccccattcagcctccaaagaggctttgc

SEQ ID NO: 14642 - RNA, 67 nt, synthetic construct
  source 1..67: mol_type = other RNA
aggaacatgtacacctgggggaaagccagagtcgggggaccccattcagcctccaaagaggctttgc

SEQ ID NO: 14643 - RNA, 67 nt, synthetic construct
  source 1..67: mol_type = other RNA
aggaacatgtagacctgggggaaagccagagtcgggggaccccattcagcctccaaagaggctttgc

SEQ ID NO: 14644 - RNA, 68 nt, synthetic construct
  source 1..68: mol_type = other RNA
caggaacatgtacacctgggggaaagccagagtcgggggaccccattcagcctccaaagaggctttgc

SEQ ID NO: 14645 - RNA, 68 nt, synthetic construct
  source 1..68: mol_type = other RNA
caggaacatgtaaacctgggggaaagccagagtcgggggaccccattcagcctccaaagaggctttgc

SEQ ID NO: 14646 - RNA, 68 nt, synthetic construct
  source 1..68: mol_type = other RNA
caggaacatgtagacctgggggaaagccagagtcgggggaccccattcagcctccaaagaggctttgc

SEQ ID NO: 14647 - RNA, 68 nt, synthetic construct
  source 1..68: mol_type = other RNA
caggaacatgtatacctgggggaaagccagagtcgggggaccccattcagcctccaaagaggctttgc

SEQ ID NO: 14648 - RNA, 69 nt, synthetic construct
  source 1..69: mol_type = other RNA
ccaggaacatgtaaacctgggggaaagccagagtcgggggaccccattcagcctccaaagaggctttgc

SEQ ID NO: 14649 - RNA, 69 nt, synthetic construct
  source 1..69: mol_type = other RNA
ccaggaacatgtacacctgggggaaagccagagtcgggggaccccattcagcctccaaagaggctttgc

SEQ ID NO: 14650 - RNA, 69 nt, synthetic construct
  source 1..69: mol_type = other RNA
ccaggaacatgtagacctgggggaaagccagagtcgggggaccccattcagcctccaaagaggctttgc

SEQ ID NO: 14651 - RNA, 69 nt, synthetic construct
  source 1..69: mol_type = other RNA
ccaggaacatgtatacctgggggaaagccagagtcgggggaccccattcagcctccaaagaggctttgc

SEQ ID NO: 14652 - RNA, 70 nt, synthetic construct
  source 1..70: mol_type = other RNA
accaggaacatgtaaacctgggggaaagccagagtcgggggaccccattcagcctccaaagaggctttgc

SEQ ID NO: 14653 - RNA, 70 nt, synthetic construct
  source 1..70: mol_type = other RNA
accaggaacatgtagacctgggggaaagccagagtcgggggaccccattcagcctccaaagaggctttgc

SEQ ID NO: 14654 - RNA, 70 nt, synthetic construct
  source 1..70: mol_type = other RNA
accaggaacatgtacacctgggggaaagccagagtcgggggaccccattcagcctccaaagaggctttgc

SEQ ID NO: 14655 - RNA, 70 nt, synthetic construct
  source 1..70: mol_type = other RNA
accaggaacatgtatacctgggggaaagccagagtcgggggaccccattcagcctccaaagaggctttgc

SEQ ID NO: 14656 - RNA, 71 nt, synthetic construct
  source 1..71: mol_type = other RNA
caccaggaacatgtagacctgggggaaagccagagtcgggggaccccattcagcctccaaagaggctttgc

SEQ ID NO: 14657 - RNA, 71 nt, synthetic construct
  source 1..71: mol_type = other RNA
caccaggaacatgtatacctgggggaaagccagagtcgggggaccccattcagcctccaaagaggctttgc

SEQ ID NO: 14658 - RNA, 71 nt, synthetic construct
  source 1..71: mol_type = other RNA
caccaggaacatgtacacctgggggaaagccagagtcgggggaccccattcagcctccaaagaggctttgc

SEQ ID NO: 14659 - RNA, 71 nt, synthetic construct
  source 1..71: mol_type = other RNA
caccaggaacatgtaaacctgggggaaagccagagtcgggggaccccattcagcctccaaagaggctttgc

SEQ ID NO: 14660 - RNA, 72 nt, synthetic construct
  source 1..72: mol_type = other RNA
tcaccaggaacatgtaaacctgggggaaagccagagtcgggggaccccattcagcctccaaagaggctttgc

SEQ ID NO: 14661 - RNA, 72 nt, synthetic construct
  source 1..72: mol_type = other RNA
tcaccaggaacatgtatacctgggggaaagccagagtcgggggaccccattcagcctccaaagaggctttgc

SEQ ID NO: 14662 - RNA, 72 nt, synthetic construct
  source 1..72: mol_type = other RNA
tcaccaggaacatgtagacctgggggaaagccagagtcgggggaccccattcagcctccaaagaggctttgc

SEQ ID NO: 14663 - RNA, 72 nt, synthetic construct
  source 1..72: mol_type = other RNA
tcaccaggaacatgtacacctgggggaaagccagagtcgggggaccccattcagcctccaaagaggctttgc

SEQ ID NO: 14664 - RNA, 73 nt, synthetic construct
  source 1..73: mol_type = other RNA
ttcaccaggaacatgtaaacctgggggaaagccagagtcgggggaccccattcagcctccaaagaggctttgc

SEQ ID NO: 14665 - RNA, 73 nt, synthetic construct
  source 1..73: mol_type = other RNA
ttcaccaggaacatgtacacctgggggaaagccagagtcgggggaccccattcagcctccaaagaggctttgc

SEQ ID NO: 14666 - RNA, 73 nt, synthetic construct
  source 1..73: mol_type = other RNA
ttcaccaggaacatgtagacctgggggaaagccagagtcgggggaccccattcagcctccaaagaggctttgc

SEQ ID NO: 14667 - RNA, 73 nt, synthetic construct
  source 1..73: mol_type = other RNA
ttcaccaggaacatgtatacctgggggaaagccagagtcgggggaccccattcagcctccaaagaggctttgc

SEQ ID NO: 14668 - RNA, 74 nt, synthetic construct
  source 1..74: mol_type = other RNA
tttcaccaggaacatgtaaacctgggggaaagccagagtcgggggaccccattcagcctccaaagaggctttgc

SEQ ID NO: 14669 - RNA, 74 nt, synthetic construct
  source 1..74: mol_type = other RNA
tttcaccaggaacatgtagacctgggggaaagccagagtcgggggaccccattcagcctccaaagaggctttgc

SEQ ID NO: 14670 - RNA, 74 nt, synthetic construct
  source 1..74: mol_type = other RNA
tttcaccaggaacatgtatacctgggggaaagccagagtcgggggaccccattcagcctccaaagaggctttgc

SEQ ID NO: 14671 - RNA, 74 nt, synthetic construct
  source 1..74: mol_type = other RNA
tttcaccaggaacatgtacacctgggggaaagccagagtcgggggaccccattcagcctccaaagaggctttgc

SEQ ID NO: 14672 - RNA, 75 nt, synthetic construct
  source 1..75: mol_type = other RNA
atttcaccaggaacatgtatacctgggggaaagccagagtcgggggaccccattcagcctccaaagaggctttgc

SEQ ID NO: 14673 - RNA, 75 nt, synthetic construct
  source 1..75: mol_type = other RNA
atttcaccaggaacatgtaaacctgggggaaagccagagtcgggggaccccattcagcctccaaagaggctttgc

SEQ ID NO: 14674 - RNA, 75 nt, synthetic construct
  source 1..75: mol_type = other RNA
atttcaccaggaacatgtacacctgggggaaagccagagtcgggggaccccattcagcctccaaagaggctttgc

SEQ ID NO: 14675 - RNA, 75 nt, synthetic construct
  source 1..75: mol_type = other RNA
atttcaccaggaacatgtagacctgggggaaagccagagtcgggggaccccattcagcctccaaagaggctttgc

SEQ ID NO: 14676 - RNA, 76 nt, synthetic construct
  source 1..76: mol_type = other RNA
catttcaccaggaacatgtagacctgggggaaagccagagtcgggggaccccattcagcctccaaagaggctttgc

SEQ ID NO: 14677 - RNA, 76 nt, synthetic construct
  source 1..76: mol_type = other RNA
catttcaccaggaacatgtacacctgggggaaagccagagtcgggggaccccattcagcctccaaagaggctttgc

SEQ ID NO: 14678 - RNA, 76 nt, synthetic construct
  source 1..76: mol_type = other RNA
catttcaccaggaacatgtatacctgggggaaagccagagtcgggggaccccattcagcctccaaagaggctttgc

SEQ ID NO: 14679 - RNA, 76 nt, synthetic construct
  source 1..76: mol_type = other RNA
catttcaccaggaacatgtaaacctgggggaaagccagagtcgggggaccccattcagcctccaaagaggctttgc

SEQ ID NO: 14680 - RNA, 77 nt, synthetic construct
  source 1..77: mol_type = other RNA
ccatttcaccaggaacatgtatacctgggggaaagccagagtcgggggaccccattcagcctccaaagaggctttgc

SEQ ID NO: 14681 - RNA, 77 nt, synthetic construct
  source 1..77: mol_type = other RNA
ccatttcaccaggaacatgtacacctgggggaaagccagagtcgggggaccccattcagcctccaaagaggctttgc

SEQ ID NO: 14682 - RNA, 77 nt, synthetic construct
  source 1..77: mol_type = other RNA
ccatttcaccaggaacatgtagacctgggggaaagccagagtcgggggaccccattcagcctccaaagaggctttgc

SEQ ID NO: 14683 - RNA, 77 nt, synthetic construct
  source 1..77: mol_type = other RNA
ccatttcaccaggaacatgtaaacctgggggaaagccagagtcgggggaccccattcagcctccaaagaggctttgc

SEQ ID NO: 14684 - RNA, 78 nt, synthetic construct
  source 1..78: mol_type = other RNA
gccatttcaccaggaacatgtaaacctgggggaaagccagagtcgggggaccccattcagcctccaaagaggctttgc

SEQ ID NO: 14685 - RNA, 78 nt, synthetic construct
  source 1..78: mol_type = other RNA
gccatttcaccaggaacatgtacacctgggggaaagccagagtcgggggaccccattcagcctccaaagaggctttgc

SEQ ID NO: 14686 - RNA, 78 nt, synthetic construct
  source 1..78: mol_type = other RNA
gccatttcaccaggaacatgtatacctgggggaaagccagagtcgggggaccccattcagcctccaaagaggctttgc

SEQ ID NO: 14687 - RNA, 78 nt, synthetic construct
  source 1..78: mol_type = other RNA
gccatttcaccaggaacatgtagacctgggggaaagccagagtcgggggaccccattcagcctccaaagaggctttgc

SEQ ID NO: 14688 - RNA, 79 nt, synthetic construct
  source 1..79: mol_type = other RNA
tgccatttcaccaggaacatgtacacctgggggaaagccagagtcgggggaccccattcagcctccaaagaggctttgc

SEQ ID NO: 14689 - RNA, 79 nt, synthetic construct
  source 1..79: mol_type = other RNA
tgccatttcaccaggaacatgtagacctgggggaaagccagagtcgggggaccccattcagcctccaaagaggctttgc

SEQ ID NO: 14690 - RNA, 79 nt, synthetic construct
  source 1..79: mol_type = other RNA
tgccatttcaccaggaacatgtaaacctgggggaaagccagagtcgggggaccccattcagcctccaaagaggctttgc

SEQ ID NO: 14691 - RNA, 79 nt, synthetic construct
  source 1..79: mol_type = other RNA
tgccatttcaccaggaacatgtatacctgggggaaagccagagtcgggggaccccattcagcctccaaagaggctttgc

SEQ ID NO: 14692 - RNA, 80 nt, synthetic construct
  source 1..80: mol_type = other RNA
ctgccatttcaccaggaacatgtacacctgggggaaagccagagtcgggggaccccattcagcctccaaagaggctttgc

SEQ ID NO: 14693 - RNA, 80 nt, synthetic construct
  source 1..80: mol_type = other RNA
ctgccatttcaccaggaacatgtagacctgggggaaagccagagtcgggggaccccattcagcctccaaagaggctttgc

SEQ ID NO: 14694 - RNA, 80 nt, synthetic construct
  source 1..80: mol_type = other RNA
ctgccatttcaccaggaacatgtatacctgggggaaagccagagtcgggggaccccattcagcctccaaagaggctttgc

SEQ ID NO: 14695 - RNA, 80 nt, synthetic construct
  source 1..80: mol_type = other RNA
ctgccatttcaccaggaacatgtaaacctgggggaaagccagagtcgggggaccccattcagcctccaaagaggctttgc

SEQ ID NO: 14696 - RNA, 81 nt, synthetic construct
  source 1..81: mol_type = other RNA
cctgccatttcaccaggaacatgtacacctgggggaaagccagagtcgggggaccccattcagcctccaaagaggctttgc

SEQ ID NO: 14697 - RNA, 81 nt, synthetic construct
  source 1..81: mol_type = other RNA
cctgccatttcaccaggaacatgtaaacctgggggaaagccagagtcgggggaccccattcagcctccaaagaggctttgc

SEQ ID NO: 14698 - RNA, 81 nt, synthetic construct
  source 1..81: mol_type = other RNA
cctgccatttcaccaggaacatgtagacctgggggaaagccagagtcgggggaccccattcagcctccaaagaggctttgc

SEQ ID NO: 14699 - RNA, 81 nt, synthetic construct
  source 1..81: mol_type = other RNA
cctgccatttcaccaggaacatgtatacctgggggaaagccagagtcgggggaccccattcagcctccaaagaggctttgc

SEQ ID NO: 14700 - RNA, 82 nt, synthetic construct
  source 1..82: mol_type = other RNA
tcctgccatttcaccaggaacatgtagacctgggggaaagccagagtcgggggaccccattcagcctccaaagaggctttgc

SEQ ID NO: 14701 - RNA, 82 nt, synthetic construct
  source 1..82: mol_type = other RNA
tcctgccatttcaccaggaacatgtatacctgggggaaagccagagtcgggggaccccattcagcctccaaagaggctttgc

SEQ ID NO: 14702 - RNA, 82 nt, synthetic construct
  source 1..82: mol_type = other RNA
tcctgccatttcaccaggaacatgtaaacctgggggaaagccagagtcgggggaccccattcagcctccaaagaggctttgc

SEQ ID NO: 14703 - RNA, 82 nt, synthetic construct
  source 1..82: mol_type = other RNA
tcctgccatttcaccaggaacatgtacacctgggggaaagccagagtcgggggaccccattcagcctccaaagaggctttgc

SEQ ID NO: 14704 - RNA, 83 nt, synthetic construct
  source 1..83: mol_type = other RNA
gtcctgccatttcaccaggaacatgtaaacctgggggaaagccagagtcgggggaccccattcagcctccaaagaggctttgc

SEQ ID NO: 14705 - RNA, 83 nt, synthetic construct
  source 1..83: mol_type = other RNA
gtcctgccatttcaccaggaacatgtacacctgggggaaagccagagtcgggggaccccattcagcctccaaagaggctttgc

SEQ ID NO: 14706 - RNA, 83 nt, synthetic construct
  source 1..83: mol_type = other RNA
gtcctgccatttcaccaggaacatgtatacctgggggaaagccagagtcgggggaccccattcagcctccaaagaggctttgc

SEQ ID NO: 14707 - RNA, 83 nt, synthetic construct
  source 1..83: mol_type = other RNA
gtcctgccatttcaccaggaacatgtagacctgggggaaagccagagtcgggggaccccattcagcctccaaagaggctttgc

SEQ ID NO: 14708 - RNA, 84 nt, synthetic construct
  source 1..84: mol_type = other RNA
ggtcctgccatttcaccaggaacatgtatacctgggggaaagccagagtcgggggaccccattcagcctccaaagaggctttgc

SEQ ID NO: 14709 - RNA, 84 nt, synthetic construct
  source 1..84: mol_type = other RNA
ggtcctgccatttcaccaggaacatgtagacctgggggaaagccagagtcgggggaccccattcagcctccaaagaggctttgc

SEQ ID NO: 14710 - RNA, 84 nt, synthetic construct
  source 1..84: mol_type = other RNA
ggtcctgccatttcaccaggaacatgtacacctgggggaaagccagagtcgggggaccccattcagcctccaaagaggctttgc

SEQ ID NO: 14711 - RNA, 84 nt, synthetic construct
  source 1..84: mol_type = other RNA
ggtcctgccatttcaccaggaacatgtaaacctgggggaaagccagagtcgggggaccccattcagcctccaaagaggctttgc

SEQ ID NO: 14712 - RNA, 85 nt, synthetic construct
  source 1..85: mol_type = other RNA
aggtcctgccatttcaccaggaacatgtaaacctgggggaaagccagagtcgggggaccccattcagcctccaaagaggctttgc

SEQ ID NO: 14713 - RNA, 85 nt, synthetic construct
  source 1..85: mol_type = other RNA
aggtcctgccatttcaccaggaacatgtagacctgggggaaagccagagtcgggggaccccattcagcctccaaagaggctttgc

SEQ ID NO: 14714 - RNA, 85 nt, synthetic construct
  source 1..85: mol_type = other RNA
aggtcctgccatttcaccaggaacatgtacacctgggggaaagccagagtcgggggaccccattcagcctccaaagaggctttgc

SEQ ID NO: 14715 - RNA, 85 nt, synthetic construct
  source 1..85: mol_type = other RNA
aggtcctgccatttcaccaggaacatgtatacctgggggaaagccagagtcgggggaccccattcagcctccaaagaggctttgc

SEQ ID NO: 14716 - RNA, 86 nt, synthetic construct
  source 1..86: mol_type = other RNA
caggtcctgccatttcaccaggaacatgtagacctgggggaaagccagagtcgggggaccccattcagcctccaaagaggctttgc

SEQ ID NO: 14717 - RNA, 86 nt, synthetic construct
  source 1..86: mol_type = other RNA
caggtcctgccatttcaccaggaacatgtaaacctgggggaaagccagagtcgggggaccccattcagcctccaaagaggctttgc

SEQ ID NO: 14718 - RNA, 86 nt, synthetic construct
  source 1..86: mol_type = other RNA
caggtcctgccatttcaccaggaacatgtacacctgggggaaagccagagtcgggggaccccattcagcctccaaagaggctttgc

SEQ ID NO: 14719 - RNA, 86 nt, synthetic construct
  source 1..86: mol_type = other RNA
caggtcctgccatttcaccaggaacatgtatacctgggggaaagccagagtcgggggaccccattcagcctccaaagaggctttgc

SEQ ID NO: 14720 - RNA, 87 nt, synthetic construct
  source 1..87: mol_type = other RNA
acaggtcctgccatttcaccaggaacatgtatacctgggggaaagccagagtcgggggaccccattcagcctccaaagaggctttgc

SEQ ID NO: 14721 - RNA, 87 nt, synthetic construct
  source 1..87: mol_type = other RNA
acaggtcctgccatttcaccaggaacatgtagacctgggggaaagccagagtcgggggaccccattcagcctccaaagaggctttgc

SEQ ID NO: 14722 - RNA, 87 nt, synthetic construct
  source 1..87: mol_type = other RNA
acaggtcctgccatttcaccaggaacatgtacacctgggggaaagccagagtcgggggaccccattcagcctccaaagaggctttgc

SEQ ID NO: 14723 - RNA, 87 nt, synthetic construct
  source 1..87: mol_type = other RNA
acaggtcctgccatttcaccaggaacatgtaaacctgggggaaagccagagtcgggggaccccattcagcctccaaagaggctttgc

SEQ ID NO: 14724 - RNA, 88 nt, synthetic construct
  source 1..88: mol_type = other RNA
gacaggtcctgccatttcaccaggaacatgtacacctgggggaaagccagagtcgggggaccccattcagcctccaaagaggctttgc

SEQ ID NO: 14725 - RNA, 88 nt, synthetic construct
  source 1..88: mol_type = other RNA
gacaggtcctgccatttcaccaggaacatgtatacctgggggaaagccagagtcgggggaccccattcagcctccaaagaggctttgc

SEQ ID NO: 14726 - RNA, 88 nt, synthetic construct
  source 1..88: mol_type = other RNA
gacaggtcctgccatttcaccaggaacatgtaaacctgggggaaagccagagtcgggggaccccattcagcctccaaagaggctttgc

SEQ ID NO: 14727 - RNA, 88 nt, synthetic construct
  source 1..88: mol_type = other RNA
gacaggtcctgccatttcaccaggaacatgtagacctgggggaaagccagagtcgggggaccccattcagcctccaaagaggctttgc

SEQ ID NO: 14728 - RNA, 89 nt, synthetic construct
  source 1..89: mol_type = other RNA
cgacaggtcctgccatttcaccaggaacatgtaaacctgggggaaagccagagtcgggggaccccattcagcctccaaagaggctttgc

SEQ ID NO: 14729 - RNA, 89 nt, synthetic construct
  source 1..89: mol_type = other RNA
cgacaggtcctgccatttcaccaggaacatgtatacctgggggaaagccagagtcgggggaccccattcagcctccaaagaggctttgc

SEQ ID NO: 14730 - RNA, 89 nt, synthetic construct
  source 1..89: mol_type = other RNA
cgacaggtcctgccatttcaccaggaacatgtacacctgggggaaagccagagtcgggggaccccattcagcctccaaagaggctttgc

SEQ ID NO: 14731 - RNA, 89 nt, synthetic construct
  source 1..89: mol_type = other RNA
cgacaggtcctgccatttcaccaggaacatgtagacctgggggaaagccagagtcgggggaccccattcagcctccaaagaggctttgc

SEQ ID NO: 14732 - RNA, 90 nt, synthetic construct
  source 1..90: mol_type = other RNA
ccgacaggtcctgccatttcaccaggaacatgtagacctgggggaaagccagagtcgggggaccccattcagcctccaaagaggctttgc

SEQ ID NO: 14733 - RNA, 90 nt, synthetic construct
  source 1..90: mol_type = other RNA
ccgacaggtcctgccatttcaccaggaacatgtatacctgggggaaagccagagtcgggggaccccattcagcctccaaagaggctttgc

SEQ ID NO: 14734 - RNA, 90 nt, synthetic construct
  source 1..90: mol_type = other RNA
ccgacaggtcctgccatttcaccaggaacatgtaaacctgggggaaagccagagtcgggggaccccattcagcctccaaagaggctttgc

SEQ ID NO: 14735 - RNA, 90 nt, synthetic construct
  source 1..90: mol_type = other RNA
ccgacaggtcctgccatttcaccaggaacatgtacacctgggggaaagccagagtcgggggaccccattcagcctccaaagaggctttgc

SEQ ID NO: 14736 - RNA, 91 nt, synthetic construct
  source 1..91: mol_type = other RNA
tccgacaggtcctgccatttcaccaggaacatgtaaacctgggggaaagccagagtcgggggaccccattcagcctccaaagaggctttgc

SEQ ID NO: 14737 - RNA, 91 nt, synthetic construct
  source 1..91: mol_type = other RNA
tccgacaggtcctgccatttcaccaggaacatgtagacctgggggaaagccagagtcgggggaccccattcagcctccaaagaggctttgc

SEQ ID NO: 14738 - RNA, 91 nt, synthetic construct
  source 1..91: mol_type = other RNA
tccgacaggtcctgccatttcaccaggaacatgtatacctgggggaaagccagagtcgggggaccccattcagcctccaaagaggctttgc

SEQ ID NO: 14739 - RNA, 91 nt, synthetic construct
  source 1..91: mol_type = other RNA
tccgacaggtcctgccatttcaccaggaacatgtacacctgggggaaagccagagtcgggggaccccattcagcctccaaagaggctttgc

SEQ ID NO: 14740 - RNA, 92 nt, synthetic construct
  source 1..92: mol_type = other RNA
ctccgacaggtcctgccatttcaccaggaacatgtacacctgggggaaagccagagtcgggggaccccattcagcctccaaagaggctttgc

SEQ ID NO: 14741 - RNA, 92 nt, synthetic construct
  source 1..92: mol_type = other RNA
ctccgacaggtcctgccatttcaccaggaacatgtatacctgggggaaagccagagtcgggggaccccattcagcctccaaagaggctttgc

SEQ ID NO: 14742 - RNA, 92 nt, synthetic construct
  source 1..92: mol_type = other RNA
ctccgacaggtcctgccatttcaccaggaacatgtagacctgggggaaagccagagtcgggggaccccattcagcctccaaagaggctttgc

SEQ ID NO: 14743 - RNA, 92 nt, synthetic construct
  source 1..92: mol_type = other RNA
ctccgacaggtcctgccatttcaccaggaacatgtaaacctgggggaaagccagagtcgggggaccccattcagcctccaaagaggctttgc

SEQ ID NO: 14744 - RNA, 93 nt, synthetic construct
  source 1..93: mol_type = other RNA
tctccgacaggtcctgccatttcaccaggaacatgtaaacctgggggaaagccagagtcgggggaccccattcagcctccaaagaggctttgc

SEQ ID NO: 14745 - RNA, 93 nt, synthetic construct
  source 1..93: mol_type = other RNA
tctccgacaggtcctgccatttcaccaggaacatgtacacctgggggaaagccagagtcgggggaccccattcagcctccaaagaggctttgc

SEQ ID NO: 14746 - RNA, 93 nt, synthetic construct
  source 1..93: mol_type = other RNA
tctccgacaggtcctgccatttcaccaggaacatgtatacctgggggaaagccagagtcgggggaccccattcagcctccaaagaggctttgc

SEQ ID NO: 14747 - RNA, 93 nt, synthetic construct
  source 1..93: mol_type = other RNA
tctccgacaggtcctgccatttcaccaggaacatgtagacctgggggaaagccagagtcgggggaccccattcagcctccaaagaggctttgc

SEQ ID NO: 14748 - RNA, 94 nt, synthetic construct
  source 1..94: mol_type = other RNA
ttctccgacaggtcctgccatttcaccaggaacatgtagacctgggggaaagccagagtcgggggaccccattcagcctccaaagaggctttgc

SEQ ID NO: 14749 - RNA, 94 nt, synthetic construct
  source 1..94: mol_type = other RNA
ttctccgacaggtcctgccatttcaccaggaacatgtacacctgggggaaagccagagtcgggggaccccattcagcctccaaagaggctttgc

SEQ ID NO: 14750 - RNA, 94 nt, synthetic construct
  source 1..94: mol_type = other RNA
ttctccgacaggtcctgccatttcaccaggaacatgtaaacctgggggaaagccagagtcgggggaccccattcagcctccaaagaggctttgc

SEQ ID NO: 14751 - RNA, 94 nt, synthetic construct
  source 1..94: mol_type = other RNA
ttctccgacaggtcctgccatttcaccaggaacatgtatacctgggggaaagccagagtcgggggaccccattcagcctccaaagaggctttgc

SEQ ID NO: 14752 - RNA, 95 nt, synthetic construct
  source 1..95: mol_type = other RNA
cttctccgacaggtcctgccatttcaccaggaacatgtatacctgggggaaagccagagtcgggggaccccattcagcctccaaagaggctttgc

SEQ ID NO: 14753 - RNA, 95 nt, synthetic construct
  source 1..95: mol_type = other RNA
cttctccgacaggtcctgccatttcaccaggaacatgtagacctgggggaaagccagagtcgggggaccccattcagcctccaaagaggctttgc

SEQ ID NO: 14754 - RNA, 95 nt, synthetic construct
  source 1..95: mol_type = other RNA
cttctccgacaggtcctgccatttcaccaggaacatgtaaacctgggggaaagccagagtcgggggaccccattcagcctccaaagaggctttgc

SEQ ID NO: 14755 - RNA, 95 nt, synthetic construct
  source 1..95: mol_type = other RNA
cttctccgacaggtcctgccatttcaccaggaacatgtacacctgggggaaagccagagtcgggggaccccattcagcctccaaagaggctttgc

SEQ ID NO: 14756 - RNA, 96 nt, synthetic construct
  source 1..96: mol_type = other RNA
ccttctccgacaggtcctgccatttcaccaggaacatgtacacctgggggaaagccagagtcgggggaccccattcagcctccaaagaggctttgc

SEQ ID NO: 14757 - RNA, 96 nt, synthetic construct
  source 1..96: mol_type = other RNA
ccttctccgacaggtcctgccatttcaccaggaacatgtaaacctgggggaaagccagagtcgggggaccccattcagcctccaaagaggctttgc

SEQ ID NO: 14758 - RNA, 96 nt, synthetic construct
  source 1..96: mol_type = other RNA
ccttctccgacaggtcctgccatttcaccaggaacatgtatacctgggggaaagccagagtcgggggaccccattcagcctccaaagaggctttgc

SEQ ID NO: 14759 - RNA, 96 nt, synthetic construct
  source 1..96: mol_type = other RNA
ccttctccgacaggtcctgccatttcaccaggaacatgtagacctgggggaaagccagagtcgggggaccccattcagcctccaaagaggctttgc

SEQ ID NO: 14760 - RNA, 97 nt, synthetic construct
  source 1..97: mol_type = other RNA
accttctccgacaggtcctgccatttcaccaggaacatgtagacctgggggaaagccagagtcgggggaccccattcagcctccaaagaggctttgc

SEQ ID NO: 14761 - RNA, 97 nt, synthetic construct
  source 1..97: mol_type = other RNA
accttctccgacaggtcctgccatttcaccaggaacatgtatacctgggggaaagccagagtcgggggaccccattcagcctccaaagaggctttgc

SEQ ID NO: 14762 - RNA, 97 nt, synthetic construct
  source 1..97: mol_type = other RNA
accttctccgacaggtcctgccatttcaccaggaacatgtacacctgggggaaagccagagtcgggggaccccattcagcctccaaagaggctttgc

SEQ ID NO: 14763 - RNA, 97 nt, synthetic construct
  source 1..97: mol_type = other RNA
accttctccgacaggtcctgccatttcaccaggaacatgtaaacctgggggaaagccagagtcgggggaccccattcagcctccaaagaggctttgc

SEQ ID NO: 14764 - RNA, 98 nt, synthetic construct
  source 1..98: mol_type = other RNA
caccttctccgacaggtcctgccatttcaccaggaacatgtatacctgggggaaagccagagtcgggggaccccattcagcctccaaagaggctttgc

SEQ ID NO: 14765 - RNA, 98 nt, synthetic construct
  source 1..98: mol_type = other RNA
caccttctccgacaggtcctgccatttcaccaggaacatgtaaacctgggggaaagccagagtcgggggaccccattcagcctccaaagaggctttgc

SEQ ID NO: 14766 - RNA, 98 nt, synthetic construct
  source 1..98: mol_type = other RNA
caccttctccgacaggtcctgccatttcaccaggaacatgtacacctgggggaaagccagagtcgggggaccccattcagcctccaaagaggctttgc

SEQ ID NO: 14767 - RNA, 98 nt, synthetic construct
  source 1..98: mol_type = other RNA
caccttctccgacaggtcctgccatttcaccaggaacatgtagacctgggggaaagccagagtcgggggaccccattcagcctccaaagaggctttgc

SEQ ID NO: 14768 - RNA, 99 nt, synthetic construct
  source 1..99: mol_type = other RNA
ccaccttctccgacaggtcctgccatttcaccaggaacatgtaaacctgggggaaagccagagtcgggggaccccattcagcctccaaagaggctttgc

SEQ ID NO: 14769 - RNA, 99 nt, synthetic construct
  source 1..99: mol_type = other RNA
ccaccttctccgacaggtcctgccatttcaccaggaacatgtacacctgggggaaagccagagtcgggggaccccattcagcctccaaagaggctttgc

SEQ ID NO: 14770 - RNA, 99 nt, synthetic construct
  source 1..99: mol_type = other RNA
ccaccttctccgacaggtcctgccatttcaccaggaacatgtagacctgggggaaagccagagtcgggggaccccattcagcctccaaagaggctttgc

SEQ ID NO: 14771 - RNA, 99 nt, synthetic construct
  source 1..99: mol_type = other RNA
ccaccttctccgacaggtcctgccatttcaccaggaacatgtatacctgggggaaagccagagtcgggggaccccattcagcctccaaagaggctttgc

SEQ ID NO: 14772 - RNA, 100 nt, synthetic construct
  source 1..100: mol_type = other RNA
accaccttctccgacaggtcctgccatttcaccaggaacatgtagacctgggggaaagccagagtcgggggaccccattcagcctccaaagaggctttgc

SEQ ID NO: 14773 - RNA, 100 nt, synthetic construct
  source 1..100: mol_type = other RNA
accaccttctccgacaggtcctgccatttcaccaggaacatgtatacctgggggaaagccagagtcgggggaccccattcagcctccaaagaggctttgc

SEQ ID NO: 14774 - RNA, 100 nt, synthetic construct
  source 1..100: mol_type = other RNA
accaccttctccgacaggtcctgccatttcaccaggaacatgtaaacctgggggaaagccagagtcgggggaccccattcagcctccaaagaggctttgc

SEQ ID NO: 14775 - RNA, 100 nt, synthetic construct
  source 1..100: mol_type = other RNA
accaccttctccgacaggtcctgccatttcaccaggaacatgtacacctgggggaaagccagagtcgggggaccccattcagcctccaaagaggctttgc

SEQ ID NO: 14776 - RNA, 101 nt, synthetic construct
  source 1..101: mol_type = other RNA
gaccaccttctccgacaggtcctgccatttcaccaggaacatgtatacctgggggaaagccagagtcgggggaccccattcagcctccaaagaggctttgc

SEQ ID NO: 14777 - RNA, 101 nt, synthetic construct
  source 1..101: mol_type = other RNA
gaccaccttctccgacaggtcctgccatttcaccaggaacatgtagacctgggggaaagccagagtcgggggaccccattcagcctccaaagaggctttgc

SEQ ID NO: 14778 - RNA, 101 nt, synthetic construct
  source 1..101: mol_type = other RNA
gaccaccttctccgacaggtcctgccatttcaccaggaacatgtacacctgggggaaagccagagtcgggggaccccattcagcctccaaagaggctttgc

SEQ ID NO: 14779 - RNA, 101 nt, synthetic construct
  source 1..101: mol_type = other RNA
gaccaccttctccgacaggtcctgccatttcaccaggaacatgtaaacctgggggaaagccagagtcgggggaccccattcagcctccaaagaggctttgc

SEQ ID NO: 14780 - RNA, 102 nt, synthetic construct
  source 1..102: mol_type = other RNA
agaccaccttctccgacaggtcctgccatttcaccaggaacatgtacacctgggggaaagccagagtcgggggaccccattcagcctccaaagaggctttgc

SEQ ID NO: 14781 - RNA, 102 nt, synthetic construct
  source 1..102: mol_type = other RNA
agaccaccttctccgacaggtcctgccatttcaccaggaacatgtaaacctgggggaaagccagagtcgggggaccccattcagcctccaaagaggctttgc

SEQ ID NO: 14782 - RNA, 102 nt, synthetic construct
  source 1..102: mol_type = other RNA
agaccaccttctccgacaggtcctgccatttcaccaggaacatgtagacctgggggaaagccagagtcgggggaccccattcagcctccaaagaggctttgc

SEQ ID NO: 14783 - RNA, 102 nt, synthetic construct
  source 1..102: mol_type = other RNA
agaccaccttctccgacaggtcctgccatttcaccaggaacatgtatacctgggggaaagccagagtcgggggaccccattcagcctccaaagaggctttgc

SEQ ID NO: 14784 - RNA, 103 nt, synthetic construct
  source 1..103: mol_type = other RNA
tagaccaccttctccgacaggtcctgccatttcaccaggaacatgtaaacctgggggaaagccagagtcgggggaccccattcagcctccaaagaggctttgc

SEQ ID NO: 14785 - RNA, 103 nt, synthetic construct
  source 1..103: mol_type = other RNA
tagaccaccttctccgacaggtcctgccatttcaccaggaacatgtacacctgggggaaagccagagtcgggggaccccattcagcctccaaagaggctttgc

SEQ ID NO: 14786 - RNA, 103 nt, synthetic construct
  source 1..103: mol_type = other RNA
tagaccaccttctccgacaggtcctgccatttcaccaggaacatgtagacctgggggaaagccagagtcgggggaccccattcagcctccaaagaggctttgc

SEQ ID NO: 14787 - RNA, 103 nt, synthetic construct
  source 1..103: mol_type = other RNA
tagaccaccttctccgacaggtcctgccatttcaccaggaacatgtatacctgggggaaagccagagtcgggggaccccattcagcctccaaagaggctttgc

SEQ ID NO: 14788 - RNA, 16 nt, synthetic construct
  source 1..16: mol_type = other RNA
ggcttcctccagtggg

SEQ ID NO: 14789 - RNA, 17 nt, synthetic construct
  source 1..17: mol_type = other RNA
gggcttcctccagtggg

SEQ ID NO: 14790 - RNA, 18 nt, synthetic construct
  source 1..18: mol_type = other RNA
tgggcttcctccagtggg

SEQ ID NO: 14791 - RNA, 19 nt, synthetic construct
  source 1..19: mol_type = other RNA
ctgggcttcctccagtggg

SEQ ID NO: 14792 - RNA, 20 nt, synthetic construct
  source 1..20: mol_type = other RNA
tctgggcttcctccagtggg

SEQ ID NO: 14793 - RNA, 21 nt, synthetic construct
  source 1..21: mol_type = other RNA
ctctgggcttcctccagtggg

SEQ ID NO: 14794 - RNA, 22 nt, synthetic construct
  source 1..22: mol_type = other RNA
cctctgggcttcctccagtggg

SEQ ID NO: 14795-14801 - skipped (7 entries)

SEQ ID NO: 14802 - RNA, 10 nt, synthetic construct
  source 1..10: mol_type = other RNA
actggaggaa

SEQ ID NO: 14803 - RNA, 11 nt, synthetic construct
  source 1..11: mol_type = other RNA
actggaggaag

SEQ ID NO: 14804 - RNA, 12 nt, synthetic construct
  source 1..12: mol_type = other RNA
actggaggaagc

SEQ ID NO: 14805 - RNA, 13 nt, synthetic construct
  source 1..13: mol_type = other RNA
actggaggaagcc

SEQ ID NO: 14806 - RNA, 14 nt, synthetic construct
  source 1..14: mol_type = other RNA
actggaggaagccc

SEQ ID NO: 14807 - RNA, 15 nt, synthetic construct
  source 1..15: mol_type = other RNA
actggaggaagccca

SEQ ID NO: 14808 - RNA, 16 nt, synthetic construct
  source 1..16: mol_type = other RNA
actggaggaagcccag

SEQ ID NO: 14809 - RNA, 17 nt, synthetic construct
  source 1..17: mol_type = other RNA
actggaggaagcccaga

SEQ ID NO: 14810 - RNA, 18 nt, synthetic construct
  source 1..18: mol_type = other RNA
actggaggaagcccagag

SEQ ID NO: 14811 - RNA, 19 nt, synthetic construct
  source 1..19: mol_type = other RNA
actggaggaagcccagagg

SEQ ID NO: 14812 - RNA, 81 nt, synthetic construct
  source 1..81: mol_type = other RNA
acctgggggaaagccagagtcgggggaccccattcagcctccaaagaggctttgctgtgtgcacccaggatcccactaccc

SEQ ID NO: 14813 - RNA, 82 nt, synthetic construct
  source 1..82: mol_type = other RNA
gacctgggggaaagccagagtcgggggaccccattcagcctccaaagaggctttgctgtgtgcacccaggatcccactaccc

SEQ ID NO: 14814 - RNA, 82 nt, synthetic construct
  source 1..82: mol_type = other RNA
cacctgggggaaagccagagtcgggggaccccattcagcctccaaagaggctttgctgtgtgcacccaggatcccactaccc

SEQ ID NO: 14815 - RNA, 82 nt, synthetic construct
  source 1..82: mol_type = other RNA
aacctgggggaaagccagagtcgggggaccccattcagcctccaaagaggctttgctgtgtgcacccaggatcccactaccc

SEQ ID NO: 14816 - RNA, 82 nt, synthetic construct
  source 1..82: mol_type = other RNA
tacctgggggaaagccagagtcgggggaccccattcagcctccaaagaggctttgctgtgtgcacccaggatcccactaccc

SEQ ID NO: 14817 - RNA, 83 nt, synthetic construct
  source 1..83: mol_type = other RNA
agacctgggggaaagccagagtcgggggaccccattcagcctccaaagaggctttgctgtgtgcacccaggatcccactaccc

SEQ ID NO: 14818 - RNA, 83 nt, synthetic construct
  source 1..83: mol_type = other RNA
aaacctgggggaaagccagagtcgggggaccccattcagcctccaaagaggctttgctgtgtgcacccaggatcccactaccc

SEQ ID NO: 14819 - RNA, 83 nt, synthetic construct
  source 1..83: mol_type = other RNA
atacctgggggaaagccagagtcgggggaccccattcagcctccaaagaggctttgctgtgtgcacccaggatcccactaccc

SEQ ID NO: 14820 - RNA, 83 nt, synthetic construct
  source 1..83: mol_type = other RNA
acacctgggggaaagccagagtcgggggaccccattcagcctccaaagaggctttgctgtgtgcacccaggatcccactaccc

SEQ ID NO: 14821 - RNA, 84 nt, synthetic construct
  source 1..84: mol_type = other RNA
taaacctgggggaaagccagagtcgggggaccccattcagcctccaaagaggctttgctgtgtgcacccaggatcccactaccc

SEQ ID NO: 14822 - RNA, 84 nt, synthetic construct
  source 1..84: mol_type = other RNA
tatacctgggggaaagccagagtcgggggaccccattcagcctccaaagaggctttgctgtgtgcacccaggatcccactaccc

SEQ ID NO: 14823 - RNA, 84 nt, synthetic construct
  source 1..84: mol_type = other RNA
tagacctgggggaaagccagagtcgggggaccccattcagcctccaaagaggctttgctgtgtgcacccaggatcccactaccc

SEQ ID NO: 14824 - RNA, 84 nt, synthetic construct
  source 1..84: mol_type = other RNA
tacacctgggggaaagccagagtcgggggaccccattcagcctccaaagaggctttgctgtgtgcacccaggatcccactaccc

SEQ ID NO: 14825 - RNA, 85 nt, synthetic construct
  source 1..85: mol_type = other RNA
gtatacctgggggaaagccagagtcgggggaccccattcagcctccaaagaggctttgctgtgtgcacccaggatcccactaccc

SEQ ID NO: 14826 - RNA, 85 nt, synthetic construct
  source 1..85: mol_type = other RNA
gtacacctgggggaaagccagagtcgggggaccccattcagcctccaaagaggctttgctgtgtgcacccaggatcccactaccc

SEQ ID NO: 14827 - RNA, 85 nt, synthetic construct
  source 1..85: mol_type = other RNA
gtagacctgggggaaagccagagtcgggggaccccattcagcctccaaagaggctttgctgtgtgcacccaggatcccactaccc

SEQ ID NO: 14828 - RNA, 85 nt, synthetic construct
  source 1..85: mol_type = other RNA
gtaaacctgggggaaagccagagtcgggggaccccattcagcctccaaagaggctttgctgtgtgcacccaggatcccactaccc

SEQ ID NO: 14829 - RNA, 86 nt, synthetic construct
  source 1..86: mol_type = other RNA
tgtaaacctgggggaaagccagagtcgggggaccccattcagcctccaaagaggctttgctgtgtgcacccaggatcccactaccc

SEQ ID NO: 14830 - RNA, 86 nt, synthetic construct
  source 1..86: mol_type = other RNA
tgtacacctgggggaaagccagagtcgggggaccccattcagcctccaaagaggctttgctgtgtgcacccaggatcccactaccc

SEQ ID NO: 14831 - RNA, 86 nt, synthetic construct
  source 1..86: mol_type = other RNA
tgtatacctgggggaaagccagagtcgggggaccccattcagcctccaaagaggctttgctgtgtgcacccaggatcccactaccc

SEQ ID NO: 14832 - RNA, 86 nt, synthetic construct
  source 1..86: mol_type = other RNA
tgtagacctgggggaaagccagagtcgggggaccccattcagcctccaaagaggctttgctgtgtgcacccaggatcccactaccc

SEQ ID NO: 14833 - RNA, 87 nt, synthetic construct
  source 1..87: mol_type = other RNA
atgtaaacctgggggaaagccagagtcgggggaccccattcagcctccaaagaggctttgctgtgtgcacccaggatcccactaccc

SEQ ID NO: 14834 - RNA, 87 nt, synthetic construct
  source 1..87: mol_type = other RNA
atgtagacctgggggaaagccagagtcgggggaccccattcagcctccaaagaggctttgctgtgtgcacccaggatcccactaccc

SEQ ID NO: 14835 - RNA, 87 nt, synthetic construct
  source 1..87: mol_type = other RNA
atgtatacctgggggaaagccagagtcgggggaccccattcagcctccaaagaggctttgctgtgtgcacccaggatcccactaccc

SEQ ID NO: 14836 - RNA, 87 nt, synthetic construct
  source 1..87: mol_type = other RNA
atgtacacctgggggaaagccagagtcgggggaccccattcagcctccaaagaggctttgctgtgtgcacccaggatcccactaccc

SEQ ID NO: 14837 - RNA, 88 nt, synthetic construct
  source 1..88: mol_type = other RNA
catgtaaacctgggggaaagccagagtcgggggaccccattcagcctccaaagaggctttgctgtgtgcacccaggatcccactaccc

SEQ ID NO: 14838 - RNA, 88 nt, synthetic construct
  source 1..88: mol_type = other RNA
catgtatacctgggggaaagccagagtcgggggaccccattcagcctccaaagaggctttgctgtgtgcacccaggatcccactaccc

SEQ ID NO: 14839 - RNA, 88 nt, synthetic construct
  source 1..88: mol_type = other RNA
catgtagacctgggggaaagccagagtcgggggaccccattcagcctccaaagaggctttgctgtgtgcacccaggatcccactaccc

SEQ ID NO: 14840 - RNA, 88 nt, synthetic construct
  source 1..88: mol_type = other RNA
catgtacacctgggggaaagccagagtcgggggaccccattcagcctccaaagaggctttgctgtgtgcacccaggatcccactaccc

SEQ ID NO: 14841 - RNA, 89 nt, synthetic construct
  source 1..89: mol_type = other RNA
acatgtatacctgggggaaagccagagtcgggggaccccattcagcctccaaagaggctttgctgtgtgcacccaggatcccactaccc

SEQ ID NO: 14842 - RNA, 89 nt, synthetic construct
  source 1..89: mol_type = other RNA
acatgtagacctgggggaaagccagagtcgggggaccccattcagcctccaaagaggctttgctgtgtgcacccaggatcccactaccc

SEQ ID NO: 14843 - RNA, 89 nt, synthetic construct
  source 1..89: mol_type = other RNA
acatgtacacctgggggaaagccagagtcgggggaccccattcagcctccaaagaggctttgctgtgtgcacccaggatcccactaccc

SEQ ID NO: 14844 - RNA, 89 nt, synthetic construct
  source 1..89: mol_type = other RNA
acatgtaaacctgggggaaagccagagtcgggggaccccattcagcctccaaagaggctttgctgtgtgcacccaggatcccactaccc

SEQ ID NO: 14845 - RNA, 90 nt, synthetic construct
  source 1..90: mol_type = other RNA
aacatgtacacctgggggaaagccagagtcgggggaccccattcagcctccaaagaggctttgctgtgtgcacccaggatcccactaccc

SEQ ID NO: 14846 - RNA, 90 nt, synthetic construct
  source 1..90: mol_type = other RNA
aacatgtatacctgggggaaagccagagtcgggggaccccattcagcctccaaagaggctttgctgtgtgcacccaggatcccactaccc

SEQ ID NO: 14847 - RNA, 90 nt, synthetic construct
  source 1..90: mol_type = other RNA
aacatgtagacctgggggaaagccagagtcgggggaccccattcagcctccaaagaggctttgctgtgtgcacccaggatcccactaccc

SEQ ID NO: 14848 - RNA, 90 nt, synthetic construct
  source 1..90: mol_type = other RNA
aacatgtaaacctgggggaaagccagagtcgggggaccccattcagcctccaaagaggctttgctgtgtgcacccaggatcccactaccc

SEQ ID NO: 14849 - RNA, 91 nt, synthetic construct
  source 1..91: mol_type = other RNA
gaacatgtatacctgggggaaagccagagtcgggggaccccattcagcctccaaagaggctttgctgtgtgcacccaggatcccactaccc

SEQ ID NO: 14850 - RNA, 91 nt, synthetic construct
  source 1..91: mol_type = other RNA
gaacatgtagacctgggggaaagccagagtcgggggaccccattcagcctccaaagaggctttgctgtgtgcacccaggatcccactaccc

SEQ ID NO: 14851 - RNA, 91 nt, synthetic construct
  source 1..91: mol_type = other RNA
gaacatgtacacctgggggaaagccagagtcgggggaccccattcagcctccaaagaggctttgctgtgtgcacccaggatcccactaccc

SEQ ID NO: 14852 - RNA, 91 nt, synthetic construct
  source 1..91: mol_type = other RNA
gaacatgtaaacctgggggaaagccagagtcgggggaccccattcagcctccaaagaggctttgctgtgtgcacccaggatcccactaccc

SEQ ID NO: 14853 - RNA, 92 nt, synthetic construct
  source 1..92: mol_type = other RNA
ggaacatgtaaacctgggggaaagccagagtcgggggaccccattcagcctccaaagaggctttgctgtgtgcacccaggatcccactaccc

SEQ ID NO: 14854 - RNA, 92 nt, synthetic construct
  source 1..92: mol_type = other RNA
ggaacatgtagacctgggggaaagccagagtcgggggaccccattcagcctccaaagaggctttgctgtgtgcacccaggatcccactaccc

SEQ ID NO: 14855 - RNA, 92 nt, synthetic construct
  source 1..92: mol_type = other RNA
ggaacatgtatacctgggggaaagccagagtcgggggaccccattcagcctccaaagaggctttgctgtgtgcacccaggatcccactaccc

SEQ ID NO: 14856 - RNA, 92 nt, synthetic construct
  source 1..92: mol_type = other RNA
ggaacatgtacacctgggggaaagccagagtcgggggaccccattcagcctccaaagaggctttgctgtgtgcacccaggatcccactaccc

SEQ ID NO: 14857 - RNA, 93 nt, synthetic construct
  source 1..93: mol_type = other RNA
aggaacatgtaaacctgggggaaagccagagtcgggggaccccattcagcctccaaagaggctttgctgtgtgcacccaggatcccactaccc

SEQ ID NO: 14858 - RNA, 93 nt, synthetic construct
  source 1..93: mol_type = other RNA
aggaacatgtacacctgggggaaagccagagtcgggggaccccattcagcctccaaagaggctttgctgtgtgcacccaggatcccactaccc

SEQ ID NO: 14859 - RNA, 93 nt, synthetic construct
  source 1..93: mol_type = other RNA
aggaacatgtagacctgggggaaagccagagtcgggggaccccattcagcctccaaagaggctttgctgtgtgcacccaggatcccactaccc

SEQ ID NO: 14860 - RNA, 93 nt, synthetic construct
  source 1..93: mol_type = other RNA
aggaacatgtatacctgggggaaagccagagtcgggggaccccattcagcctccaaagaggctttgctgtgtgcacccaggatcccactaccc

SEQ ID NO: 14861 - RNA, 94 nt, synthetic construct
  source 1..94: mol_type = other RNA
caggaacatgtatacctgggggaaagccagagtcgggggaccccattcagcctccaaagaggctttgctgtgtgcacccaggatcccactaccc

SEQ ID NO: 14862 - RNA, 94 nt, synthetic construct
  source 1..94: mol_type = other RNA
caggaacatgtagacctgggggaaagccagagtcgggggaccccattcagcctccaaagaggctttgctgtgtgcacccaggatcccactaccc

SEQ ID NO: 14863 - RNA, 94 nt, synthetic construct
  source 1..94: mol_type = other RNA
caggaacatgtacacctgggggaaagccagagtcgggggaccccattcagcctccaaagaggctttgctgtgtgcacccaggatcccactaccc

SEQ ID NO: 14864 - RNA, 94 nt, synthetic construct
  source 1..94: mol_type = other RNA
caggaacatgtaaacctgggggaaagccagagtcgggggaccccattcagcctccaaagaggctttgctgtgtgcacccaggatcccactaccc

SEQ ID NO: 14865 - RNA, 95 nt, synthetic construct
  source 1..95: mol_type = other RNA
ccaggaacatgtacacctgggggaaagccagagtcgggggaccccattcagcctccaaagaggctttgctgtgtgcacccaggatcccactaccc

SEQ ID NO: 14866 - RNA, 95 nt, synthetic construct
  source 1..95: mol_type = other RNA
ccaggaacatgtaaacctgggggaaagccagagtcgggggaccccattcagcctccaaagaggctttgctgtgtgcacccaggatcccactaccc

SEQ ID NO: 14867 - RNA, 95 nt, synthetic construct
  source 1..95: mol_type = other RNA
ccaggaacatgtatacctgggggaaagccagagtcgggggaccccattcagcctccaaagaggctttgctgtgtgcacccaggatcccactaccc

SEQ ID NO: 14868 - RNA, 95 nt, synthetic construct
  source 1..95: mol_type = other RNA
ccaggaacatgtagacctgggggaaagccagagtcgggggaccccattcagcctccaaagaggctttgctgtgtgcacccaggatcccactaccc

SEQ ID NO: 14869 - RNA, 96 nt, synthetic construct
  source 1..96: mol_type = other RNA
accaggaacatgtaaacctgggggaaagccagagtcgggggaccccattcagcctccaaagaggctttgctgtgtgcacccaggatcccactaccc

SEQ ID NO: 14870 - RNA, 96 nt, synthetic construct
  source 1..96: mol_type = other RNA
accaggaacatgtacacctgggggaaagccagagtcgggggaccccattcagcctccaaagaggctttgctgtgtgcacccaggatcccactaccc

SEQ ID NO: 14871 - RNA, 96 nt, synthetic construct
  source 1..96: mol_type = other RNA
accaggaacatgtatacctgggggaaagccagagtcgggggaccccattcagcctccaaagaggctttgctgtgtgcacccaggatcccactaccc

SEQ ID NO: 14872 - RNA, 96 nt, synthetic construct
  source 1..96: mol_type = other RNA
accaggaacatgtagacctgggggaaagccagagtcgggggaccccattcagcctccaaagaggctttgctgtgtgcacccaggatcccactaccc

SEQ ID NO: 14873 - RNA, 97 nt, synthetic construct
  source 1..97: mol_type = other RNA
caccaggaacatgtacacctgggggaaagccagagtcgggggaccccattcagcctccaaagaggctttgctgtgtgcacccaggatcccactaccc

SEQ ID NO: 14874 - RNA, 97 nt, synthetic construct
  source 1..97: mol_type = other RNA
caccaggaacatgtagacctgggggaaagccagagtcgggggaccccattcagcctccaaagaggctttgctgtgtgcacccaggatcccactaccc

SEQ ID NO: 14875 - RNA, 97 nt, synthetic construct
  source 1..97: mol_type = other RNA
caccaggaacatgtatacctgggggaaagccagagtcgggggaccccattcagcctccaaagaggctttgctgtgtgcacccaggatcccactaccc

SEQ ID NO: 14876 - RNA, 97 nt, synthetic construct
  source 1..97: mol_type = other RNA
caccaggaacatgtaaacctgggggaaagccagagtcgggggaccccattcagcctccaaagaggctttgctgtgtgcacccaggatcccactaccc

SEQ ID NO: 14877 - RNA, 98 nt, synthetic construct
  source 1..98: mol_type = other RNA
tcaccaggaacatgtacacctgggggaaagccagagtcgggggaccccattcagcctccaaagaggctttgctgtgtgcacccaggatcccactaccc

SEQ ID NO: 14878 - RNA, 98 nt, synthetic construct
  source 1..98: mol_type = other RNA
tcaccaggaacatgtaaacctgggggaaagccagagtcgggggaccccattcagcctccaaagaggctttgctgtgtgcacccaggatcccactaccc

SEQ ID NO: 14879 - RNA, 98 nt, synthetic construct
  source 1..98: mol_type = other RNA
tcaccaggaacatgtagacctgggggaaagccagagtcgggggaccccattcagcctccaaagaggctttgctgtgtgcacccaggatcccactaccc

SEQ ID NO: 14880 - RNA, 98 nt, synthetic construct
  source 1..98: mol_type = other RNA
tcaccaggaacatgtatacctgggggaaagccagagtcgggggaccccattcagcctccaaagaggctttgctgtgtgcacccaggatcccactaccc

SEQ ID NO: 14881 - RNA, 99 nt, synthetic construct
  source 1..99: mol_type = other RNA
ttcaccaggaacatgtatacctgggggaaagccagagtcgggggaccccattcagcctccaaagaggctttgctgtgtgcacccaggatcccactaccc

SEQ ID NO: 14882 - RNA, 99 nt, synthetic construct
  source 1..99: mol_type = other RNA
ttcaccaggaacatgtagacctgggggaaagccagagtcgggggaccccattcagcctccaaagaggctttgctgtgtgcacccaggatcccactaccc

SEQ ID NO: 14883 - RNA, 99 nt, synthetic construct
  source 1..99: mol_type = other RNA
ttcaccaggaacatgtacacctgggggaaagccagagtcgggggaccccattcagcctccaaagaggctttgctgtgtgcacccaggatcccactaccc

SEQ ID NO: 14884 - RNA, 99 nt, synthetic construct
  source 1..99: mol_type = other RNA
ttcaccaggaacatgtaaacctgggggaaagccagagtcgggggaccccattcagcctccaaagaggctttgctgtgtgcacccaggatcccactaccc

SEQ ID NO: 14885 - RNA, 100 nt, synthetic construct
  source 1..100: mol_type = other RNA
tttcaccaggaacatgtaaacctgggggaaagccagagtcgggggaccccattcagcctccaaagaggctttgctgtgtgcacccaggatcccactaccc

SEQ ID NO: 14886 - RNA, 100 nt, synthetic construct
  source 1..100: mol_type = other RNA
tttcaccaggaacatgtatacctgggggaaagccagagtcgggggaccccattcagcctccaaagaggctttgctgtgtgcacccaggatcccactaccc

SEQ ID NO: 14887 - RNA, 100 nt, synthetic construct
  source 1..100: mol_type = other RNA
tttcaccaggaacatgtagacctgggggaaagccagagtcgggggaccccattcagcctccaaagaggctttgctgtgtgcacccaggatcccactaccc

SEQ ID NO: 14888 - RNA, 100 nt, synthetic construct
  source 1..100: mol_type = other RNA
tttcaccaggaacatgtacacctgggggaaagccagagtcgggggaccccattcagcctccaaagaggctttgctgtgtgcacccaggatcccactaccc

SEQ ID NO: 14889 - RNA, 101 nt, synthetic construct
  source 1..101: mol_type = other RNA
atttcaccaggaacatgtatacctgggggaaagccagagtcgggggaccccattcagcctccaaagaggctttgctgtgtgcacccaggatcccactaccc

SEQ ID NO: 14890 - RNA, 101 nt, synthetic construct
  source 1..101: mol_type = other RNA
atttcaccaggaacatgtaaacctgggggaaagccagagtcgggggaccccattcagcctccaaagaggctttgctgtgtgcacccaggatcccactaccc

SEQ ID NO: 14891 - RNA, 101 nt, synthetic construct
  source 1..101: mol_type = other RNA
atttcaccaggaacatgtacacctgggggaaagccagagtcgggggaccccattcagcctccaaagaggctttgctgtgtgcacccaggatcccactaccc

SEQ ID NO: 14892 - RNA, 101 nt, synthetic construct
  source 1..101: mol_type = other RNA
atttcaccaggaacatgtagacctgggggaaagccagagtcgggggaccccattcagcctccaaagaggctttgctgtgtgcacccaggatcccactaccc

SEQ ID NO: 14893 - RNA, 102 nt, synthetic construct
  source 1..102: mol_type = other RNA
catttcaccaggaacatgtaaacctgggggaaagccagagtcgggggaccccattcagcctccaaagaggctttgctgtgtgcacccaggatcccactaccc

SEQ ID NO: 14894 - RNA, 102 nt, synthetic construct
  source 1..102: mol_type = other RNA
catttcaccaggaacatgtatacctgggggaaagccagagtcgggggaccccattcagcctccaaagaggctttgctgtgtgcacccaggatcccactaccc

SEQ ID NO: 14895 - RNA, 102 nt, synthetic construct
  source 1..102: mol_type = other RNA
catttcaccaggaacatgtacacctgggggaaagccagagtcgggggaccccattcagcctccaaagaggctttgctgtgtgcacccaggatcccactaccc

SEQ ID NO: 14896 - RNA, 102 nt, synthetic construct
  source 1..102: mol_type = other RNA
catttcaccaggaacatgtagacctgggggaaagccagagtcgggggaccccattcagcctccaaagaggctttgctgtgtgcacccaggatcccactaccc

SEQ ID NO: 14897 - RNA, 103 nt, synthetic construct
  source 1..103: mol_type = other RNA
ccatttcaccaggaacatgtatacctgggggaaagccagagtcgggggaccccattcagcctccaaagaggctttgctgtgtgcacccaggatcccactaccc

SEQ ID NO: 14898 - RNA, 103 nt, synthetic construct
  source 1..103: mol_type = other RNA
ccatttcaccaggaacatgtacacctgggggaaagccagagtcgggggaccccattcagcctccaaagaggctttgctgtgtgcacccaggatcccactaccc

SEQ ID NO: 14899 - RNA, 103 nt, synthetic construct
  source 1..103: mol_type = other RNA
ccatttcaccaggaacatgtagacctgggggaaagccagagtcgggggaccccattcagcctccaaagaggctttgctgtgtgcacccaggatcccactaccc

SEQ ID NO: 14900 - RNA, 103 nt, synthetic construct
  source 1..103: mol_type = other RNA
ccatttcaccaggaacatgtaaacctgggggaaagccagagtcgggggaccccattcagcctccaaagaggctttgctgtgtgcacccaggatcccactaccc

SEQ ID NO: 14901 - RNA, 16 nt, synthetic construct
  source 1..16: mol_type = other RNA
tcctctgggcttcctc

SEQ ID NO: 14902 - RNA, 17 nt, synthetic construct
  source 1..17: mol_type = other RNA
atcctctgggcttcctc

SEQ ID NO: 14903 - RNA, 18 nt, synthetic construct
  source 1..18: mol_type = other RNA
aatcctctgggcttcctc

SEQ ID NO: 14904 - RNA, 19 nt, synthetic construct
  source 1..19: mol_type = other RNA
caatcctctgggcttcctc

SEQ ID NO: 14905 - RNA, 20 nt, synthetic construct
  source 1..20: mol_type = other RNA
ccaatcctctgggcttcctc

SEQ ID NO: 14906 - RNA, 21 nt, synthetic construct
  source 1..21: mol_type = other RNA
cccaatcctctgggcttcctc

SEQ ID NO: 14907 - RNA, 22 nt, synthetic construct
  source 1..22: mol_type = other RNA
ccccaatcctctgggcttcctc

SEQ ID NO: 14908-14913 - skipped (6 entries)

SEQ ID NO: 14914 - RNA, 10 nt, synthetic construct
  source 1..10: mol_type = other RNA
gaagcccaga

SEQ ID NO: 14915 - RNA, 11 nt, synthetic construct
  source 1..11: mol_type = other RNA
gaagcccagag

SEQ ID NO: 14916 - RNA, 12 nt, synthetic construct
  source 1..12: mol_type = other RNA
gaagcccagagg

SEQ ID NO: 14917 - RNA, 13 nt, synthetic construct
  source 1..13: mol_type = other RNA
gaagcccagagga

SEQ ID NO: 14918 - RNA, 14 nt, synthetic construct
  source 1..14: mol_type = other RNA
gaagcccagaggat

SEQ ID NO: 14919 - RNA, 15 nt, synthetic construct
  source 1..15: mol_type = other RNA
gaagcccagaggatt

SEQ ID NO: 14920 - RNA, 16 nt, synthetic construct
  source 1..16: mol_type = other RNA
gaagcccagaggattg

SEQ ID NO: 14921 - RNA, 17 nt, synthetic construct
  source 1..17: mol_type = other RNA
gaagcccagaggattgg

SEQ ID NO: 14922 - RNA, 18 nt, synthetic construct
  source 1..18: mol_type = other RNA
gaagcccagaggattggg

SEQ ID NO: 14923 - RNA, 19 nt, synthetic construct
  source 1..19: mol_type = other RNA
gaagcccagaggattgggg

SEQ ID NO: 14924 - RNA, 88 nt, synthetic construct
  source 1..88: mol_type = other RNA
acctgggggaaagccagagtcgggggaccccattcagcctccaaagaggctttgctgtgtgcacccaggatcccactacccactggag

SEQ ID NO: 14925 - RNA, 89 nt, synthetic construct
  source 1..89: mol_type = other RNA
aacctgggggaaagccagagtcgggggaccccattcagcctccaaagaggctttgctgtgtgcacccaggatcccactacccactggag

SEQ ID NO: 14926 - RNA, 89 nt, synthetic construct
  source 1..89: mol_type = other RNA
gacctgggggaaagccagagtcgggggaccccattcagcctccaaagaggctttgctgtgtgcacccaggatcccactacccactggag

SEQ ID NO: 14927 - RNA, 89 nt, synthetic construct
  source 1..89: mol_type = other RNA
tacctgggggaaagccagagtcgggggaccccattcagcctccaaagaggctttgctgtgtgcacccaggatcccactacccactggag

SEQ ID NO: 14928 - RNA, 89 nt, synthetic construct
  source 1..89: mol_type = other RNA
cacctgggggaaagccagagtcgggggaccccattcagcctccaaagaggctttgctgtgtgcacccaggatcccactacccactggag

SEQ ID NO: 14929 - RNA, 90 nt, synthetic construct
  source 1..90: mol_type = other RNA
aaacctgggggaaagccagagtcgggggaccccattcagcctccaaagaggctttgctgtgtgcacccaggatcccactacccactggag

SEQ ID NO: 14930 - RNA, 90 nt, synthetic construct
  source 1..90: mol_type = other RNA
acacctgggggaaagccagagtcgggggaccccattcagcctccaaagaggctttgctgtgtgcacccaggatcccactacccactggag

SEQ ID NO: 14931 - RNA, 90 nt, synthetic construct
  source 1..90: mol_type = other RNA
atacctgggggaaagccagagtcgggggaccccattcagcctccaaagaggctttgctgtgtgcacccaggatcccactacccactggag

SEQ ID NO: 14932 - RNA, 90 nt, synthetic construct
  source 1..90: mol_type = other RNA
agacctgggggaaagccagagtcgggggaccccattcagcctccaaagaggctttgctgtgtgcacccaggatcccactacccactggag

SEQ ID NO: 14933 - RNA, 91 nt, synthetic construct
  source 1..91: mol_type = other RNA
tatacctgggggaaagccagagtcgggggaccccattcagcctccaaagaggctttgctgtgtgcacccaggatcccactacccactggag

SEQ ID NO: 14934 - RNA, 91 nt, synthetic construct
  source 1..91: mol_type = other RNA
taaacctgggggaaagccagagtcgggggaccccattcagcctccaaagaggctttgctgtgtgcacccaggatcccactacccactggag

SEQ ID NO: 14935 - RNA, 91 nt, synthetic construct
  source 1..91: mol_type = other RNA
tacacctgggggaaagccagagtcgggggaccccattcagcctccaaagaggctttgctgtgtgcacccaggatcccactacccactggag

SEQ ID NO: 14936 - RNA, 91 nt, synthetic construct
  source 1..91: mol_type = other RNA
tagacctgggggaaagccagagtcgggggaccccattcagcctccaaagaggctttgctgtgtgcacccaggatcccactacccactggag

SEQ ID NO: 14937 - RNA, 92 nt, synthetic construct
  source 1..92: mol_type = other RNA
gtatacctgggggaaagccagagtcgggggaccccattcagcctccaaagaggctttgctgtgtgcacccaggatcccactacccactggag

SEQ ID NO: 14938 - RNA, 92 nt, synthetic construct
  source 1..92: mol_type = other RNA
gtagacctgggggaaagccagagtcgggggaccccattcagcctccaaagaggctttgctgtgtgcacccaggatcccactacccactggag

SEQ ID NO: 14939 - RNA, 92 nt, synthetic construct
  source 1..92: mol_type = other RNA
gtaaacctgggggaaagccagagtcgggggaccccattcagcctccaaagaggctttgctgtgtgcacccaggatcccactacccactggag

SEQ ID NO: 14940 - RNA, 92 nt, synthetic construct
  source 1..92: mol_type = other RNA
gtacacctgggggaaagccagagtcgggggaccccattcagcctccaaagaggctttgctgtgtgcacccaggatcccactacccactggag

SEQ ID NO: 14941 - RNA, 93 nt, synthetic construct
  source 1..93: mol_type = other RNA
tgtacacctgggggaaagccagagtcgggggaccccattcagcctccaaagaggctttgctgtgtgcacccaggatcccactacccactggag

SEQ ID NO: 14942 - RNA, 93 nt, synthetic construct
  source 1..93: mol_type = other RNA
tgtaaacctgggggaaagccagagtcgggggaccccattcagcctccaaagaggctttgctgtgtgcacccaggatcccactacccactggag

SEQ ID NO: 14943 - RNA, 93 nt, synthetic construct
  source 1..93: mol_type = other RNA
tgtagacctgggggaaagccagagtcgggggaccccattcagcctccaaagaggctttgctgtgtgcacccaggatcccactacccactggag

SEQ ID NO: 14944 - RNA, 93 nt, synthetic construct
  source 1..93: mol_type = other RNA
tgtatacctgggggaaagccagagtcgggggaccccattcagcctccaaagaggctttgctgtgtgcacccaggatcccactacccactggag

SEQ ID NO: 14945 - RNA, 94 nt, synthetic construct
  source 1..94: mol_type = other RNA
atgtacacctgggggaaagccagagtcgggggaccccattcagcctccaaagaggctttgctgtgtgcacccaggatcccactacccactggag

SEQ ID NO: 14946 - RNA, 94 nt, synthetic construct
  source 1..94: mol_type = other RNA
atgtatacctgggggaaagccagagtcgggggaccccattcagcctccaaagaggctttgctgtgtgcacccaggatcccactacccactggag

SEQ ID NO: 14947 - RNA, 94 nt, synthetic construct
  source 1..94: mol_type = other RNA
atgtagacctgggggaaagccagagtcgggggaccccattcagcctccaaagaggctttgctgtgtgcacccaggatcccactacccactggag

SEQ ID NO: 14948 - RNA, 94 nt, synthetic construct
  source 1..94: mol_type = other RNA
atgtaaacctgggggaaagccagagtcgggggaccccattcagcctccaaagaggctttgctgtgtgcacccaggatcccactacccactggag

SEQ ID NO: 14949 - RNA, 95 nt, synthetic construct
  source 1..95: mol_type = other RNA
catgtaaacctgggggaaagccagagtcgggggaccccattcagcctccaaagaggctttgctgtgtgcacccaggatcccactacccactggag

SEQ ID NO: 14950 - RNA, 95 nt, synthetic construct
  source 1..95: mol_type = other RNA
catgtagacctgggggaaagccagagtcgggggaccccattcagcctccaaagaggctttgctgtgtgcacccaggatcccactacccactggag

SEQ ID NO: 14951 - RNA, 95 nt, synthetic construct
  source 1..95: mol_type = other RNA
catgtatacctgggggaaagccagagtcgggggaccccattcagcctccaaagaggctttgctgtgtgcacccaggatcccactacccactggag

SEQ ID NO: 14952 - RNA, 95 nt, synthetic construct
  source 1..95: mol_type = other RNA
catgtacacctgggggaaagccagagtcgggggaccccattcagcctccaaagaggctttgctgtgtgcacccaggatcccactacccactggag

SEQ ID NO: 14953 - RNA, 96 nt, synthetic construct
  source 1..96: mol_type = other RNA
acatgtagacctgggggaaagccagagtcgggggaccccattcagcctccaaagaggctttgctgtgtgcacccaggatcccactacccactggag

SEQ ID NO: 14954 - RNA, 96 nt, synthetic construct
  source 1..96: mol_type = other RNA
acatgtacacctgggggaaagccagagtcgggggaccccattcagcctccaaagaggctttgctgtgtgcacccaggatcccactacccactggag

SEQ ID NO: 14955 - RNA, 96 nt, synthetic construct
  source 1..96: mol_type = other RNA
acatgtatacctgggggaaagccagagtcgggggaccccattcagcctccaaagaggctttgctgtgtgcacccaggatcccactacccactggag

SEQ ID NO: 14956 - RNA, 96 nt, synthetic construct
  source 1..96: mol_type = other RNA
acatgtaaacctgggggaaagccagagtcgggggaccccattcagcctccaaagaggctttgctgtgtgcacccaggatcccactacccactggag

SEQ ID NO: 14957 - RNA, 97 nt, synthetic construct
  source 1..97: mol_type = other RNA
aacatgtacacctgggggaaagccagagtcgggggaccccattcagcctccaaagaggctttgctgtgtgcacccaggatcccactacccactggag

SEQ ID NO: 14958 - RNA, 97 nt, synthetic construct
  source 1..97: mol_type = other RNA
aacatgtagacctgggggaaagccagagtcgggggaccccattcagcctccaaagaggctttgctgtgtgcacccaggatcccactacccactggag

SEQ ID NO: 14959 - RNA, 97 nt, synthetic construct
  source 1..97: mol_type = other RNA
aacatgtatacctgggggaaagccagagtcgggggaccccattcagcctccaaagaggctttgctgtgtgcacccaggatcccactacccactggag

SEQ ID NO: 14960 - RNA, 97 nt, synthetic construct
  source 1..97: mol_type = other RNA
aacatgtaaacctgggggaaagccagagtcgggggaccccattcagcctccaaagaggctttgctgtgtgcacccaggatcccactacccactggag

SEQ ID NO: 14961 - RNA, 98 nt, synthetic construct
  source 1..98: mol_type = other RNA
gaacatgtaaacctgggggaaagccagagtcgggggaccccattcagcctccaaagaggctttgctgtgtgcacccaggatcccactacccactggag

SEQ ID NO: 14962 - RNA, 98 nt, synthetic construct
  source 1..98: mol_type = other RNA
gaacatgtatacctgggggaaagccagagtcgggggaccccattcagcctccaaagaggctttgctgtgtgcacccaggatcccactacccactggag

SEQ ID NO: 14963 - RNA, 98 nt, synthetic construct
  source 1..98: mol_type = other RNA
gaacatgtagacctgggggaaagccagagtcgggggaccccattcagcctccaaagaggctttgctgtgtgcacccaggatcccactacccactggag

SEQ ID NO: 14964 - RNA, 98 nt, synthetic construct
  source 1..98: mol_type = other RNA
gaacatgtacacctgggggaaagccagagtcgggggaccccattcagcctccaaagaggctttgctgtgtgcacccaggatcccactacccactggag

SEQ ID NO: 14965 - RNA, 99 nt, synthetic construct
  source 1..99: mol_type = other RNA
ggaacatgtaaacctgggggaaagccagagtcgggggaccccattcagcctccaaagaggctttgctgtgtgcacccaggatcccactacccactggag

SEQ ID NO: 14966 - RNA, 99 nt, synthetic construct
  source 1..99: mol_type = other RNA
ggaacatgtagacctgggggaaagccagagtcgggggaccccattcagcctccaaagaggctttgctgtgtgcacccaggatcccactacccactggag

SEQ ID NO: 14967 - RNA, 99 nt, synthetic construct
  source 1..99: mol_type = other RNA
ggaacatgtacacctgggggaaagccagagtcgggggaccccattcagcctccaaagaggctttgctgtgtgcacccaggatcccactacccactggag

SEQ ID NO: 14968 - RNA, 99 nt, synthetic construct
  source 1..99: mol_type = other RNA
ggaacatgtatacctgggggaaagccagagtcgggggaccccattcagcctccaaagaggctttgctgtgtgcacccaggatcccactacccactggag

SEQ ID NO: 14969 - RNA, 100 nt, synthetic construct
  source 1..100: mol_type = other RNA
aggaacatgtatacctgggggaaagccagagtcgggggaccccattcagcctccaaagaggctttgctgtgtgcacccaggatcccactacccactggag

SEQ ID NO: 14970 - RNA, 100 nt, synthetic construct
  source 1..100: mol_type = other RNA
aggaacatgtagacctgggggaaagccagagtcgggggaccccattcagcctccaaagaggctttgctgtgtgcacccaggatcccactacccactggag

SEQ ID NO: 14971 - RNA, 100 nt, synthetic construct
  source 1..100: mol_type = other RNA
aggaacatgtacacctgggggaaagccagagtcgggggaccccattcagcctccaaagaggctttgctgtgtgcacccaggatcccactacccactggag

SEQ ID NO: 14972 - RNA, 100 nt, synthetic construct
  source 1..100: mol_type = other RNA
aggaacatgtaaacctgggggaaagccagagtcgggggaccccattcagcctccaaagaggctttgctgtgtgcacccaggatcccactacccactggag

SEQ ID NO: 14973 - RNA, 101 nt, synthetic construct
  source 1..101: mol_type = other RNA
caggaacatgtatacctgggggaaagccagagtcgggggaccccattcagcctccaaagaggctttgctgtgtgcacccaggatcccactacccactggag

SEQ ID NO: 14974 - RNA, 101 nt, synthetic construct
  source 1..101: mol_type = other RNA
caggaacatgtagacctgggggaaagccagagtcgggggaccccattcagcctccaaagaggctttgctgtgtgcacccaggatcccactacccactggag

SEQ ID NO: 14975 - RNA, 101 nt, synthetic construct
  source 1..101: mol_type = other RNA
caggaacatgtaaacctgggggaaagccagagtcgggggaccccattcagcctccaaagaggctttgctgtgtgcacccaggatcccactacccactggag

SEQ ID NO: 14976 - RNA, 101 nt, synthetic construct
  source 1..101: mol_type = other RNA
caggaacatgtacacctgggggaaagccagagtcgggggaccccattcagcctccaaagaggctttgctgtgtgcacccaggatcccactacccactggag

SEQ ID NO: 14977 - RNA, 102 nt, synthetic construct
  source 1..102: mol_type = other RNA
ccaggaacatgtatacctgggggaaagccagagtcgggggaccccattcagcctccaaagaggctttgctgtgtgcacccaggatcccactacccactggag

SEQ ID NO: 14978 - RNA, 102 nt, synthetic construct
  source 1..102: mol_type = other RNA
ccaggaacatgtagacctgggggaaagccagagtcgggggaccccattcagcctccaaagaggctttgctgtgtgcacccaggatcccactacccactggag

SEQ ID NO: 14979 - RNA, 102 nt, synthetic construct
  source 1..102: mol_type = other RNA
ccaggaacatgtacacctgggggaaagccagagtcgggggaccccattcagcctccaaagaggctttgctgtgtgcacccaggatcccactacccactggag

SEQ ID NO: 14980 - RNA, 102 nt, synthetic construct
  source 1..102: mol_type = other RNA
ccaggaacatgtaaacctgggggaaagccagagtcgggggaccccattcagcctccaaagaggctttgctgtgtgcacccaggatcccactacccactggag

SEQ ID NO: 14981 - RNA, 103 nt, synthetic construct
  source 1..103: mol_type = other RNA
accaggaacatgtagacctgggggaaagccagagtcgggggaccccattcagcctccaaagaggctttgctgtgtgcacccaggatcccactacccactggag

SEQ ID NO: 14982 - RNA, 103 nt, synthetic construct
  source 1..103: mol_type = other RNA
accaggaacatgtatacctgggggaaagccagagtcgggggaccccattcagcctccaaagaggctttgctgtgtgcacccaggatcccactacccactggag

SEQ ID NO: 14983 - RNA, 103 nt, synthetic construct
  source 1..103: mol_type = other RNA
accaggaacatgtacacctgggggaaagccagagtcgggggaccccattcagcctccaaagaggctttgctgtgtgcacccaggatcccactacccactggag

SEQ ID NO: 14984 - RNA, 103 nt, synthetic construct
  source 1..103: mol_type = other RNA
accaggaacatgtaaacctgggggaaagccagagtcgggggaccccattcagcctccaaagaggctttgctgtgtgcacccaggatcccactacccactggag

SEQ ID NO: 14985 - RNA, 20 nt, synthetic construct
  source 1..20: mol_type = other RNA
atcccactacccactggagg

SEQ ID NO: 14986 - RNA, 16 nt, synthetic construct
  source 1..16: mol_type = other RNA
tgggtagtgggatcct

SEQ ID NO: 14987 - RNA, 17 nt, synthetic construct
  source 1..17: mol_type = other RNA
gtgggtagtgggatcct

SEQ ID NO: 14988 - RNA, 18 nt, synthetic construct
  source 1..18: mol_type = other RNA
agtgggtagtgggatcct

SEQ ID NO: 14989 - RNA, 19 nt, synthetic construct
  source 1..19: mol_type = other RNA
cagtgggtagtgggatcct

SEQ ID NO: 14990 - RNA, 20 nt, synthetic construct
  source 1..20: mol_type = other RNA
ccagtgggtagtgggatcct

SEQ ID NO: 14991 - RNA, 21 nt, synthetic construct
  source 1..21: mol_type = other RNA
tccagtgggtagtgggatcct

SEQ ID NO: 14992 - RNA, 22 nt, synthetic construct
  source 1..22: mol_type = other RNA
ctccagtgggtagtgggatcct

SEQ ID NO: 14993-14999 - skipped (7 entries)

SEQ ID NO: 15000 - RNA, 10 nt, synthetic construct
  source 1..10: mol_type = other RNA
atcccactac

SEQ ID NO: 15001 - RNA, 11 nt, synthetic construct
  source 1..11: mol_type = other RNA
atcccactacc

SEQ ID NO: 15002 - RNA, 12 nt, synthetic construct
  source 1..12: mol_type = other RNA
atcccactaccc

SEQ ID NO: 15003 - RNA, 13 nt, synthetic construct
  source 1..13: mol_type = other RNA
atcccactaccca

SEQ ID NO: 15004 - RNA, 14 nt, synthetic construct
  source 1..14: mol_type = other RNA
atcccactacccac

SEQ ID NO: 15005 - RNA, 15 nt, synthetic construct
  source 1..15: mol_type = other RNA
atcccactacccact

SEQ ID NO: 15006 - RNA, 16 nt, synthetic construct
  source 1..16: mol_type = other RNA
atcccactacccactg

SEQ ID NO: 15007 - RNA, 17 nt, synthetic construct
  source 1..17: mol_type = other RNA
atcccactacccactgg

SEQ ID NO: 15008 - RNA, 18 nt, synthetic construct
  source 1..18: mol_type = other RNA
atcccactacccactgga

SEQ ID NO: 15009 - RNA, 19 nt, synthetic construct
  source 1..19: mol_type = other RNA
atcccactacccactggag

SEQ ID NO: 15010 - RNA, 69 nt, synthetic construct
  source 1..69: mol_type = other RNA
acctgggggaaagccagagtcgggggaccccattcagcctccaaagaggctttgctgtgtgcacccagg

SEQ ID NO: 15011 - RNA, 70 nt, synthetic construct
  source 1..70: mol_type = other RNA
aacctgggggaaagccagagtcgggggaccccattcagcctccaaagaggctttgctgtgtgcacccagg

SEQ ID NO: 15012 - RNA, 70 nt, synthetic construct
  source 1..70: mol_type = other RNA
cacctgggggaaagccagagtcgggggaccccattcagcctccaaagaggctttgctgtgtgcacccagg

SEQ ID NO: 15013 - RNA, 70 nt, synthetic construct
  source 1..70: mol_type = other RNA
gacctgggggaaagccagagtcgggggaccccattcagcctccaaagaggctttgctgtgtgcacccagg

SEQ ID NO: 15014 - RNA, 70 nt, synthetic construct
  source 1..70: mol_type = other RNA
tacctgggggaaagccagagtcgggggaccccattcagcctccaaagaggctttgctgtgtgcacccagg

SEQ ID NO: 15015 - RNA, 71 nt, synthetic construct
  source 1..71: mol_type = other RNA
atacctgggggaaagccagagtcgggggaccccattcagcctccaaagaggctttgctgtgtgcacccagg

SEQ ID NO: 15016 - RNA, 71 nt, synthetic construct
  source 1..71: mol_type = other RNA
aaacctgggggaaagccagagtcgggggaccccattcagcctccaaagaggctttgctgtgtgcacccagg

SEQ ID NO: 15017 - RNA, 71 nt, synthetic construct
  source 1..71: mol_type = other RNA
acacctgggggaaagccagagtcgggggaccccattcagcctccaaagaggctttgctgtgtgcacccagg

SEQ ID NO: 15018 - RNA, 71 nt, synthetic construct
  source 1..71: mol_type = other RNA
agacctgggggaaagccagagtcgggggaccccattcagcctccaaagaggctttgctgtgtgcacccagg

SEQ ID NO: 15019 - RNA, 72 nt, synthetic construct
  source 1..72: mol_type = other RNA
tatacctgggggaaagccagagtcgggggaccccattcagcctccaaagaggctttgctgtgtgcacccagg

SEQ ID NO: 15020 - RNA, 72 nt, synthetic construct
  source 1..72: mol_type = other RNA
tagacctgggggaaagccagagtcgggggaccccattcagcctccaaagaggctttgctgtgtgcacccagg

SEQ ID NO: 15021 - RNA, 72 nt, synthetic construct
  source 1..72: mol_type = other RNA
taaacctgggggaaagccagagtcgggggaccccattcagcctccaaagaggctttgctgtgtgcacccagg

SEQ ID NO: 15022 - RNA, 72 nt, synthetic construct
  source 1..72: mol_type = other RNA
tacacctgggggaaagccagagtcgggggaccccattcagcctccaaagaggctttgctgtgtgcacccagg

SEQ ID NO: 15023 - RNA, 73 nt, synthetic construct
  source 1..73: mol_type = other RNA
gtaaacctgggggaaagccagagtcgggggaccccattcagcctccaaagaggctttgctgtgtgcacccagg

SEQ ID NO: 15024 - RNA, 73 nt, synthetic construct
  source 1..73: mol_type = other RNA
gtatacctgggggaaagccagagtcgggggaccccattcagcctccaaagaggctttgctgtgtgcacccagg

SEQ ID NO: 15025 - RNA, 73 nt, synthetic construct
  source 1..73: mol_type = other RNA
gtacacctgggggaaagccagagtcgggggaccccattcagcctccaaagaggctttgctgtgtgcacccagg

SEQ ID NO: 15026 - RNA, 73 nt, synthetic construct
  source 1..73: mol_type = other RNA
gtagacctgggggaaagccagagtcgggggaccccattcagcctccaaagaggctttgctgtgtgcacccagg

SEQ ID NO: 15027 - RNA, 74 nt, synthetic construct
  source 1..74: mol_type = other RNA
tgtatacctgggggaaagccagagtcgggggaccccattcagcctccaaagaggctttgctgtgtgcacccagg

SEQ ID NO: 15028 - RNA, 74 nt, synthetic construct
  source 1..74: mol_type = other RNA
tgtaaacctgggggaaagccagagtcgggggaccccattcagcctccaaagaggctttgctgtgtgcacccagg

SEQ ID NO: 15029 - RNA, 74 nt, synthetic construct
  source 1..74: mol_type = other RNA
tgtacacctgggggaaagccagagtcgggggaccccattcagcctccaaagaggctttgctgtgtgcacccagg

SEQ ID NO: 15030 - RNA, 74 nt, synthetic construct
  source 1..74: mol_type = other RNA
tgtagacctgggggaaagccagagtcgggggaccccattcagcctccaaagaggctttgctgtgtgcacccagg

SEQ ID NO: 15031 - RNA, 75 nt, synthetic construct
  source 1..75: mol_type = other RNA
atgtagacctgggggaaagccagagtcgggggaccccattcagcctccaaagaggctttgctgtgtgcacccagg

SEQ ID NO: 15032 - RNA, 75 nt, synthetic construct
  source 1..75: mol_type = other RNA
atgtaaacctgggggaaagccagagtcgggggaccccattcagcctccaaagaggctttgctgtgtgcacccagg

SEQ ID NO: 15033 - RNA, 75 nt, synthetic construct
  source 1..75: mol_type = other RNA
atgtatacctgggggaaagccagagtcgggggaccccattcagcctccaaagaggctttgctgtgtgcacccagg

SEQ ID NO: 15034 - RNA, 75 nt, synthetic construct
  source 1..75: mol_type = other RNA
atgtacacctgggggaaagccagagtcgggggaccccattcagcctccaaagaggctttgctgtgtgcacccagg

SEQ ID NO: 15035 - RNA, 76 nt, synthetic construct
  source 1..76: mol_type = other RNA
catgtatacctgggggaaagccagagtcgggggaccccattcagcctccaaagaggctttgctgtgtgcacccagg

SEQ ID NO: 15036 - RNA, 76 nt, synthetic construct
  source 1..76: mol_type = other RNA
catgtagacctgggggaaagccagagtcgggggaccccattcagcctccaaagaggctttgctgtgtgcacccagg

SEQ ID NO: 15037 - RNA, 76 nt, synthetic construct
  source 1..76: mol_type = other RNA
catgtaaacctgggggaaagccagagtcgggggaccccattcagcctccaaagaggctttgctgtgtgcacccagg

SEQ ID NO: 15038 - RNA, 76 nt, synthetic construct
  source 1..76: mol_type = other RNA
catgtacacctgggggaaagccagagtcgggggaccccattcagcctccaaagaggctttgctgtgtgcacccagg

SEQ ID NO: 15039 - RNA, 77 nt, synthetic construct
  source 1..77: mol_type = other RNA
acatgtacacctgggggaaagccagagtcgggggaccccattcagcctccaaagaggctttgctgtgtgcacccagg

SEQ ID NO: 15040 - RNA, 77 nt, synthetic construct
  source 1..77: mol_type = other RNA
acatgtatacctgggggaaagccagagtcgggggaccccattcagcctccaaagaggctttgctgtgtgcacccagg

SEQ ID NO: 15041 - RNA, 77 nt, synthetic construct
  source 1..77: mol_type = other RNA
acatgtaaacctgggggaaagccagagtcgggggaccccattcagcctccaaagaggctttgctgtgtgcacccagg

SEQ ID NO: 15042 - RNA, 77 nt, synthetic construct
  source 1..77: mol_type = other RNA
acatgtagacctgggggaaagccagagtcgggggaccccattcagcctccaaagaggctttgctgtgtgcacccagg

SEQ ID NO: 15043 - RNA, 78 nt, synthetic construct
  source 1..78: mol_type = other RNA
aacatgtacacctgggggaaagccagagtcgggggaccccattcagcctccaaagaggctttgctgtgtgcacccagg

SEQ ID NO: 15044 - RNA, 78 nt, synthetic construct
  source 1..78: mol_type = other RNA
aacatgtaaacctgggggaaagccagagtcgggggaccccattcagcctccaaagaggctttgctgtgtgcacccagg

SEQ ID NO: 15045 - RNA, 78 nt, synthetic construct
  source 1..78: mol_type = other RNA
aacatgtatacctgggggaaagccagagtcgggggaccccattcagcctccaaagaggctttgctgtgtgcacccagg

SEQ ID NO: 15046 - RNA, 78 nt, synthetic construct
  source 1..78: mol_type = other RNA
aacatgtagacctgggggaaagccagagtcgggggaccccattcagcctccaaagaggctttgctgtgtgcacccagg

SEQ ID NO: 15047 - RNA, 79 nt, synthetic construct
  source 1..79: mol_type = other RNA
gaacatgtagacctgggggaaagccagagtcgggggaccccattcagcctccaaagaggctttgctgtgtgcacccagg

SEQ ID NO: 15048 - RNA, 79 nt, synthetic construct
  source 1..79: mol_type = other RNA
gaacatgtatacctgggggaaagccagagtcgggggaccccattcagcctccaaagaggctttgctgtgtgcacccagg

SEQ ID NO: 15049 - RNA, 79 nt, synthetic construct
  source 1..79: mol_type = other RNA
gaacatgtacacctgggggaaagccagagtcgggggaccccattcagcctccaaagaggctttgctgtgtgcacccagg

SEQ ID NO: 15050 - RNA, 79 nt, synthetic construct
  source 1..79: mol_type = other RNA
gaacatgtaaacctgggggaaagccagagtcgggggaccccattcagcctccaaagaggctttgctgtgtgcacccagg

SEQ ID NO: 15051 - RNA, 80 nt, synthetic construct
  source 1..80: mol_type = other RNA
ggaacatgtacacctgggggaaagccagagtcgggggaccccattcagcctccaaagaggctttgctgtgtgcacccagg

SEQ ID NO: 15052 - RNA, 80 nt, synthetic construct
  source 1..80: mol_type = other RNA
ggaacatgtaaacctgggggaaagccagagtcgggggaccccattcagcctccaaagaggctttgctgtgtgcacccagg

SEQ ID NO: 15053 - RNA, 80 nt, synthetic construct
  source 1..80: mol_type = other RNA
ggaacatgtagacctgggggaaagccagagtcgggggaccccattcagcctccaaagaggctttgctgtgtgcacccagg

SEQ ID NO: 15054 - RNA, 80 nt, synthetic construct
  source 1..80: mol_type = other RNA
ggaacatgtatacctgggggaaagccagagtcgggggaccccattcagcctccaaagaggctttgctgtgtgcacccagg

SEQ ID NO: 15055 - RNA, 81 nt, synthetic construct
  source 1..81: mol_type = other RNA
aggaacatgtacacctgggggaaagccagagtcgggggaccccattcagcctccaaagaggctttgctgtgtgcacccagg

SEQ ID NO: 15056 - RNA, 81 nt, synthetic construct
  source 1..81: mol_type = other RNA
aggaacatgtatacctgggggaaagccagagtcgggggaccccattcagcctccaaagaggctttgctgtgtgcacccagg

SEQ ID NO: 15057 - RNA, 81 nt, synthetic construct
  source 1..81: mol_type = other RNA
aggaacatgtagacctgggggaaagccagagtcgggggaccccattcagcctccaaagaggctttgctgtgtgcacccagg

SEQ ID NO: 15058 - RNA, 81 nt, synthetic construct
  source 1..81: mol_type = other RNA
aggaacatgtaaacctgggggaaagccagagtcgggggaccccattcagcctccaaagaggctttgctgtgtgcacccagg

SEQ ID NO: 15059 - RNA, 82 nt, synthetic construct
  source 1..82: mol_type = other RNA
caggaacatgtacacctgggggaaagccagagtcgggggaccccattcagcctccaaagaggctttgctgtgtgcacccagg

SEQ ID NO: 15060 - RNA, 82 nt, synthetic construct
  source 1..82: mol_type = other RNA
caggaacatgtatacctgggggaaagccagagtcgggggaccccattcagcctccaaagaggctttgctgtgtgcacccagg

SEQ ID NO: 15061 - RNA, 82 nt, synthetic construct
  source 1..82: mol_type = other RNA
caggaacatgtaaacctgggggaaagccagagtcgggggaccccattcagcctccaaagaggctttgctgtgtgcacccagg

SEQ ID NO: 15062 - RNA, 82 nt, synthetic construct
  source 1..82: mol_type = other RNA
caggaacatgtagacctgggggaaagccagagtcgggggaccccattcagcctccaaagaggctttgctgtgtgcacccagg

SEQ ID NO: 15063 - RNA, 83 nt, synthetic construct
  source 1..83: mol_type = other RNA
ccaggaacatgtatacctgggggaaagccagagtcgggggaccccattcagcctccaaagaggctttgctgtgtgcacccagg

SEQ ID NO: 15064 - RNA, 83 nt, synthetic construct
  source 1..83: mol_type = other RNA
ccaggaacatgtaaacctgggggaaagccagagtcgggggaccccattcagcctccaaagaggctttgctgtgtgcacccagg

SEQ ID NO: 15065 - RNA, 83 nt, synthetic construct
  source 1..83: mol_type = other RNA
ccaggaacatgtacacctgggggaaagccagagtcgggggaccccattcagcctccaaagaggctttgctgtgtgcacccagg

SEQ ID NO: 15066 - RNA, 83 nt, synthetic construct
  source 1..83: mol_type = other RNA
ccaggaacatgtagacctgggggaaagccagagtcgggggaccccattcagcctccaaagaggctttgctgtgtgcacccagg

SEQ ID NO: 15067 - RNA, 84 nt, synthetic construct
  source 1..84: mol_type = other RNA
accaggaacatgtagacctgggggaaagccagagtcgggggaccccattcagcctccaaagaggctttgctgtgtgcacccagg

SEQ ID NO: 15068 - RNA, 84 nt, synthetic construct
  source 1..84: mol_type = other RNA
accaggaacatgtacacctgggggaaagccagagtcgggggaccccattcagcctccaaagaggctttgctgtgtgcacccagg

SEQ ID NO: 15069 - RNA, 84 nt, synthetic construct
  source 1..84: mol_type = other RNA
accaggaacatgtaaacctgggggaaagccagagtcgggggaccccattcagcctccaaagaggctttgctgtgtgcacccagg

SEQ ID NO: 15070 - RNA, 84 nt, synthetic construct
  source 1..84: mol_type = other RNA
accaggaacatgtatacctgggggaaagccagagtcgggggaccccattcagcctccaaagaggctttgctgtgtgcacccagg

SEQ ID NO: 15071 - RNA, 85 nt, synthetic construct
  source 1..85: mol_type = other RNA
caccaggaacatgtatacctgggggaaagccagagtcgggggaccccattcagcctccaaagaggctttgctgtgtgcacccagg

SEQ ID NO: 15072 - RNA, 85 nt, synthetic construct
  source 1..85: mol_type = other RNA
caccaggaacatgtagacctgggggaaagccagagtcgggggaccccattcagcctccaaagaggctttgctgtgtgcacccagg

SEQ ID NO: 15073 - RNA, 85 nt, synthetic construct
  source 1..85: mol_type = other RNA
caccaggaacatgtacacctgggggaaagccagagtcgggggaccccattcagcctccaaagaggctttgctgtgtgcacccagg

SEQ ID NO: 15074 - RNA, 85 nt, synthetic construct
  source 1..85: mol_type = other RNA
caccaggaacatgtaaacctgggggaaagccagagtcgggggaccccattcagcctccaaagaggctttgctgtgtgcacccagg

SEQ ID NO: 15075 - RNA, 86 nt, synthetic construct
  source 1..86: mol_type = other RNA
tcaccaggaacatgtagacctgggggaaagccagagtcgggggaccccattcagcctccaaagaggctttgctgtgtgcacccagg

SEQ ID NO: 15076 - RNA, 86 nt, synthetic construct
  source 1..86: mol_type = other RNA
tcaccaggaacatgtacacctgggggaaagccagagtcgggggaccccattcagcctccaaagaggctttgctgtgtgcacccagg

SEQ ID NO: 15077 - RNA, 86 nt, synthetic construct
  source 1..86: mol_type = other RNA
tcaccaggaacatgtatacctgggggaaagccagagtcgggggaccccattcagcctccaaagaggctttgctgtgtgcacccagg

SEQ ID NO: 15078 - RNA, 86 nt, synthetic construct
  source 1..86: mol_type = other RNA
tcaccaggaacatgtaaacctgggggaaagccagagtcgggggaccccattcagcctccaaagaggctttgctgtgtgcacccagg

SEQ ID NO: 15079 - RNA, 87 nt, synthetic construct
  source 1..87: mol_type = other RNA
ttcaccaggaacatgtagacctgggggaaagccagagtcgggggaccccattcagcctccaaagaggctttgctgtgtgcacccagg

SEQ ID NO: 15080 - RNA, 87 nt, synthetic construct
  source 1..87: mol_type = other RNA
ttcaccaggaacatgtaaacctgggggaaagccagagtcgggggaccccattcagcctccaaagaggctttgctgtgtgcacccagg

SEQ ID NO: 15081 - RNA, 87 nt, synthetic construct
  source 1..87: mol_type = other RNA
ttcaccaggaacatgtacacctgggggaaagccagagtcgggggaccccattcagcctccaaagaggctttgctgtgtgcacccagg

SEQ ID NO: 15082 - RNA, 87 nt, synthetic construct
  source 1..87: mol_type = other RNA
ttcaccaggaacatgtatacctgggggaaagccagagtcgggggaccccattcagcctccaaagaggctttgctgtgtgcacccagg

SEQ ID NO: 15083 - RNA, 88 nt, synthetic construct
  source 1..88: mol_type = other RNA
tttcaccaggaacatgtaaacctgggggaaagccagagtcgggggaccccattcagcctccaaagaggctttgctgtgtgcacccagg

SEQ ID NO: 15084 - RNA, 88 nt, synthetic construct
  source 1..88: mol_type = other RNA
tttcaccaggaacatgtacacctgggggaaagccagagtcgggggaccccattcagcctccaaagaggctttgctgtgtgcacccagg

SEQ ID NO: 15085 - RNA, 88 nt, synthetic construct
  source 1..88: mol_type = other RNA
tttcaccaggaacatgtagacctgggggaaagccagagtcgggggaccccattcagcctccaaagaggctttgctgtgtgcacccagg

SEQ ID NO: 15086 - RNA, 88 nt, synthetic construct
  source 1..88: mol_type = other RNA
tttcaccaggaacatgtatacctgggggaaagccagagtcgggggaccccattcagcctccaaagaggctttgctgtgtgcacccagg

SEQ ID NO: 15087 - RNA, 89 nt, synthetic construct
  source 1..89: mol_type = other RNA
atttcaccaggaacatgtacacctgggggaaagccagagtcgggggaccccattcagcctccaaagaggctttgctgtgtgcacccagg

SEQ ID NO: 15088 - RNA, 89 nt, synthetic construct
  source 1..89: mol_type = other RNA
atttcaccaggaacatgtaaacctgggggaaagccagagtcgggggaccccattcagcctccaaagaggctttgctgtgtgcacccagg

SEQ ID NO: 15089 - RNA, 89 nt, synthetic construct
  source 1..89: mol_type = other RNA
atttcaccaggaacatgtagacctgggggaaagccagagtcgggggaccccattcagcctccaaagaggctttgctgtgtgcacccagg

SEQ ID NO: 15090 - RNA, 89 nt, synthetic construct
  source 1..89: mol_type = other RNA
atttcaccaggaacatgtatacctgggggaaagccagagtcgggggaccccattcagcctccaaagaggctttgctgtgtgcacccagg

SEQ ID NO: 15091 - RNA, 90 nt, synthetic construct
  source 1..90: mol_type = other RNA
catttcaccaggaacatgtaaacctgggggaaagccagagtcgggggaccccattcagcctccaaagaggctttgctgtgtgcacccagg

SEQ ID NO: 15092 - RNA, 90 nt, synthetic construct
  source 1..90: mol_type = other RNA
catttcaccaggaacatgtacacctgggggaaagccagagtcgggggaccccattcagcctccaaagaggctttgctgtgtgcacccagg

SEQ ID NO: 15093 - RNA, 90 nt, synthetic construct
  source 1..90: mol_type = other RNA
catttcaccaggaacatgtagacctgggggaaagccagagtcgggggaccccattcagcctccaaagaggctttgctgtgtgcacccagg

SEQ ID NO: 15094 - RNA, 90 nt, synthetic construct
  source 1..90: mol_type = other RNA
catttcaccaggaacatgtatacctgggggaaagccagagtcgggggaccccattcagcctccaaagaggctttgctgtgtgcacccagg

SEQ ID NO: 15095 - RNA, 91 nt, synthetic construct
  source 1..91: mol_type = other RNA
ccatttcaccaggaacatgtatacctgggggaaagccagagtcgggggaccccattcagcctccaaagaggctttgctgtgtgcacccagg

SEQ ID NO: 15096 - RNA, 91 nt, synthetic construct
  source 1..91: mol_type = other RNA
ccatttcaccaggaacatgtagacctgggggaaagccagagtcgggggaccccattcagcctccaaagaggctttgctgtgtgcacccagg

SEQ ID NO: 15097 - RNA, 91 nt, synthetic construct
  source 1..91: mol_type = other RNA
ccatttcaccaggaacatgtaaacctgggggaaagccagagtcgggggaccccattcagcctccaaagaggctttgctgtgtgcacccagg

SEQ ID NO: 15098 - RNA, 91 nt, synthetic construct
  source 1..91: mol_type = other RNA
ccatttcaccaggaacatgtacacctgggggaaagccagagtcgggggaccccattcagcctccaaagaggctttgctgtgtgcacccagg

SEQ ID NO: 15099 - RNA, 92 nt, synthetic construct
  source 1..92: mol_type = other RNA
gccatttcaccaggaacatgtacacctgggggaaagccagagtcgggggaccccattcagcctccaaagaggctttgctgtgtgcacccagg

SEQ ID NO: 15100 - RNA, 92 nt, synthetic construct
  source 1..92: mol_type = other RNA
gccatttcaccaggaacatgtaaacctgggggaaagccagagtcgggggaccccattcagcctccaaagaggctttgctgtgtgcacccagg

SEQ ID NO: 15101 - RNA, 92 nt, synthetic construct
  source 1..92: mol_type = other RNA
gccatttcaccaggaacatgtagacctgggggaaagccagagtcgggggaccccattcagcctccaaagaggctttgctgtgtgcacccagg

SEQ ID NO: 15102 - RNA, 92 nt, synthetic construct
  source 1..92: mol_type = other RNA
gccatttcaccaggaacatgtatacctgggggaaagccagagtcgggggaccccattcagcctccaaagaggctttgctgtgtgcacccagg

SEQ ID NO: 15103 - RNA, 93 nt, synthetic construct
  source 1..93: mol_type = other RNA
tgccatttcaccaggaacatgtaaacctgggggaaagccagagtcgggggaccccattcagcctccaaagaggctttgctgtgtgcacccagg

SEQ ID NO: 15104 - RNA, 93 nt, synthetic construct
  source 1..93: mol_type = other RNA
tgccatttcaccaggaacatgtatacctgggggaaagccagagtcgggggaccccattcagcctccaaagaggctttgctgtgtgcacccagg

SEQ ID NO: 15105 - RNA, 93 nt, synthetic construct
  source 1..93: mol_type = other RNA
tgccatttcaccaggaacatgtacacctgggggaaagccagagtcgggggaccccattcagcctccaaagaggctttgctgtgtgcacccagg

SEQ ID NO: 15106 - RNA, 93 nt, synthetic construct
  source 1..93: mol_type = other RNA
tgccatttcaccaggaacatgtagacctgggggaaagccagagtcgggggaccccattcagcctccaaagaggctttgctgtgtgcacccagg

SEQ ID NO: 15107 - RNA, 94 nt, synthetic construct
  source 1..94: mol_type = other RNA
ctgccatttcaccaggaacatgtagacctgggggaaagccagagtcgggggaccccattcagcctccaaagaggctttgctgtgtgcacccagg

SEQ ID NO: 15108 - RNA, 94 nt, synthetic construct
  source 1..94: mol_type = other RNA
ctgccatttcaccaggaacatgtaaacctgggggaaagccagagtcgggggaccccattcagcctccaaagaggctttgctgtgtgcacccagg

SEQ ID NO: 15109 - RNA, 94 nt, synthetic construct
  source 1..94: mol_type = other RNA
ctgccatttcaccaggaacatgtacacctgggggaaagccagagtcgggggaccccattcagcctccaaagaggctttgctgtgtgcacccagg

SEQ ID NO: 15110 - RNA, 94 nt, synthetic construct
  source 1..94: mol_type = other RNA
ctgccatttcaccaggaacatgtatacctgggggaaagccagagtcgggggaccccattcagcctccaaagaggctttgctgtgtgcacccagg

SEQ ID NO: 15111 - RNA, 95 nt, synthetic construct
  source 1..95: mol_type = other RNA
cctgccatttcaccaggaacatgtagacctgggggaaagccagagtcgggggaccccattcagcctccaaagaggctttgctgtgtgcacccagg

SEQ ID NO: 15112 - RNA, 95 nt, synthetic construct
  source 1..95: mol_type = other RNA
cctgccatttcaccaggaacatgtaaacctgggggaaagccagagtcgggggaccccattcagcctccaaagaggctttgctgtgtgcacccagg

SEQ ID NO: 15113 - RNA, 95 nt, synthetic construct
  source 1..95: mol_type = other RNA
cctgccatttcaccaggaacatgtacacctgggggaaagccagagtcgggggaccccattcagcctccaaagaggctttgctgtgtgcacccagg

SEQ ID NO: 15114 - RNA, 95 nt, synthetic construct
  source 1..95: mol_type = other RNA
cctgccatttcaccaggaacatgtatacctgggggaaagccagagtcgggggaccccattcagcctccaaagaggctttgctgtgtgcacccagg

SEQ ID NO: 15115 - RNA, 96 nt, synthetic construct
  source 1..96: mol_type = other RNA
tcctgccatttcaccaggaacatgtacacctgggggaaagccagagtcgggggaccccattcagcctccaaagaggctttgctgtgtgcacccagg

SEQ ID NO: 15116 - RNA, 96 nt, synthetic construct
  source 1..96: mol_type = other RNA
tcctgccatttcaccaggaacatgtagacctgggggaaagccagagtcgggggaccccattcagcctccaaagaggctttgctgtgtgcacccagg

SEQ ID NO: 15117 - RNA, 96 nt, synthetic construct
  source 1..96: mol_type = other RNA
tcctgccatttcaccaggaacatgtatacctgggggaaagccagagtcgggggaccccattcagcctccaaagaggctttgctgtgtgcacccagg

SEQ ID NO: 15118 - RNA, 96 nt, synthetic construct
  source 1..96: mol_type = other RNA
tcctgccatttcaccaggaacatgtaaacctgggggaaagccagagtcgggggaccccattcagcctccaaagaggctttgctgtgtgcacccagg

SEQ ID NO: 15119 - RNA, 97 nt, synthetic construct
  source 1..97: mol_type = other RNA
gtcctgccatttcaccaggaacatgtatacctgggggaaagccagagtcgggggaccccattcagcctccaaagaggctttgctgtgtgcacccagg

SEQ ID NO: 15120 - RNA, 97 nt, synthetic construct
  source 1..97: mol_type = other RNA
gtcctgccatttcaccaggaacatgtagacctgggggaaagccagagtcgggggaccccattcagcctccaaagaggctttgctgtgtgcacccagg

SEQ ID NO: 15121 - RNA, 97 nt, synthetic construct
  source 1..97: mol_type = other RNA
gtcctgccatttcaccaggaacatgtaaacctgggggaaagccagagtcgggggaccccattcagcctccaaagaggctttgctgtgtgcacccagg

SEQ ID NO: 15122 - RNA, 97 nt, synthetic construct
  source 1..97: mol_type = other RNA
gtcctgccatttcaccaggaacatgtacacctgggggaaagccagagtcgggggaccccattcagcctccaaagaggctttgctgtgtgcacccagg

SEQ ID NO: 15123 - RNA, 98 nt, synthetic construct
  source 1..98: mol_type = other RNA
ggtcctgccatttcaccaggaacatgtacacctgggggaaagccagagtcgggggaccccattcagcctccaaagaggctttgctgtgtgcacccagg

SEQ ID NO: 15124 - RNA, 98 nt, synthetic construct
  source 1..98: mol_type = other RNA
ggtcctgccatttcaccaggaacatgtagacctgggggaaagccagagtcgggggaccccattcagcctccaaagaggctttgctgtgtgcacccagg

SEQ ID NO: 15125 - RNA, 98 nt, synthetic construct
  source 1..98: mol_type = other RNA
ggtcctgccatttcaccaggaacatgtatacctgggggaaagccagagtcgggggaccccattcagcctccaaagaggctttgctgtgtgcacccagg

SEQ ID NO: 15126 - RNA, 98 nt, synthetic construct
  source 1..98: mol_type = other RNA
ggtcctgccatttcaccaggaacatgtaaacctgggggaaagccagagtcgggggaccccattcagcctccaaagaggctttgctgtgtgcacccagg

SEQ ID NO: 15127 - RNA, 99 nt, synthetic construct
  source 1..99: mol_type = other RNA
aggtcctgccatttcaccaggaacatgtacacctgggggaaagccagagtcgggggaccccattcagcctccaaagaggctttgctgtgtgcacccagg

SEQ ID NO: 15128 - RNA, 99 nt, synthetic construct
  source 1..99: mol_type = other RNA
aggtcctgccatttcaccaggaacatgtatacctgggggaaagccagagtcgggggaccccattcagcctccaaagaggctttgctgtgtgcacccagg

SEQ ID NO: 15129 - RNA, 99 nt, synthetic construct
  source 1..99: mol_type = other RNA
aggtcctgccatttcaccaggaacatgtagacctgggggaaagccagagtcgggggaccccattcagcctccaaagaggctttgctgtgtgcacccagg

SEQ ID NO: 15130 - RNA, 99 nt, synthetic construct
  source 1..99: mol_type = other RNA
aggtcctgccatttcaccaggaacatgtaaacctgggggaaagccagagtcgggggaccccattcagcctccaaagaggctttgctgtgtgcacccagg

SEQ ID NO: 15131 - RNA, 100 nt, synthetic construct
  source 1..100: mol_type = other RNA
caggtcctgccatttcaccaggaacatgtagacctgggggaaagccagagtcgggggaccccattcagcctccaaagaggctttgctgtgtgcacccagg

SEQ ID NO: 15132 - RNA, 100 nt, synthetic construct
  source 1..100: mol_type = other RNA
caggtcctgccatttcaccaggaacatgtatacctgggggaaagccagagtcgggggaccccattcagcctccaaagaggctttgctgtgtgcacccagg

SEQ ID NO: 15133 - RNA, 100 nt, synthetic construct
  source 1..100: mol_type = other RNA
caggtcctgccatttcaccaggaacatgtaaacctgggggaaagccagagtcgggggaccccattcagcctccaaagaggctttgctgtgtgcacccagg

SEQ ID NO: 15134 - RNA, 100 nt, synthetic construct
  source 1..100: mol_type = other RNA
caggtcctgccatttcaccaggaacatgtacacctgggggaaagccagagtcgggggaccccattcagcctccaaagaggctttgctgtgtgcacccagg

SEQ ID NO: 15135 - RNA, 101 nt, synthetic construct
  source 1..101: mol_type = other RNA
acaggtcctgccatttcaccaggaacatgtagacctgggggaaagccagagtcgggggaccccattcagcctccaaagaggctttgctgtgtgcacccagg

SEQ ID NO: 15136 - RNA, 101 nt, synthetic construct
  source 1..101: mol_type = other RNA
acaggtcctgccatttcaccaggaacatgtatacctgggggaaagccagagtcgggggaccccattcagcctccaaagaggctttgctgtgtgcacccagg

SEQ ID NO: 15137 - RNA, 101 nt, synthetic construct
  source 1..101: mol_type = other RNA
acaggtcctgccatttcaccaggaacatgtacacctgggggaaagccagagtcgggggaccccattcagcctccaaagaggctttgctgtgtgcacccagg

SEQ ID NO: 15138 - RNA, 101 nt, synthetic construct
  source 1..101: mol_type = other RNA
acaggtcctgccatttcaccaggaacatgtaaacctgggggaaagccagagtcgggggaccccattcagcctccaaagaggctttgctgtgtgcacccagg

SEQ ID NO: 15139 - RNA, 102 nt, synthetic construct
  source 1..102: mol_type = other RNA
gacaggtcctgccatttcaccaggaacatgtaaacctgggggaaagccagagtcgggggaccccattcagcctccaaagaggctttgctgtgtgcacccagg

SEQ ID NO: 15140 - RNA, 102 nt, synthetic construct
  source 1..102: mol_type = other RNA
gacaggtcctgccatttcaccaggaacatgtatacctgggggaaagccagagtcgggggaccccattcagcctccaaagaggctttgctgtgtgcacccagg

SEQ ID NO: 15141 - RNA, 102 nt, synthetic construct
  source 1..102: mol_type = other RNA
gacaggtcctgccatttcaccaggaacatgtagacctgggggaaagccagagtcgggggaccccattcagcctccaaagaggctttgctgtgtgcacccagg

SEQ ID NO: 15142 - RNA, 102 nt, synthetic construct
  source 1..102: mol_type = other RNA
gacaggtcctgccatttcaccaggaacatgtacacctgggggaaagccagagtcgggggaccccattcagcctccaaagaggctttgctgtgtgcacccagg

SEQ ID NO: 15143 - RNA, 103 nt, synthetic construct
  source 1..103: mol_type = other RNA
cgacaggtcctgccatttcaccaggaacatgtacacctgggggaaagccagagtcgggggaccccattcagcctccaaagaggctttgctgtgtgcacccagg

SEQ ID NO: 15144 - RNA, 103 nt, synthetic construct
  source 1..103: mol_type = other RNA
cgacaggtcctgccatttcaccaggaacatgtatacctgggggaaagccagagtcgggggaccccattcagcctccaaagaggctttgctgtgtgcacccagg

SEQ ID NO: 15145 - RNA, 103 nt, synthetic construct
  source 1..103: mol_type = other RNA
cgacaggtcctgccatttcaccaggaacatgtaaacctgggggaaagccagagtcgggggaccccattcagcctccaaagaggctttgctgtgtgcacccagg

SEQ ID NO: 15146 - RNA, 103 nt, synthetic construct
  source 1..103: mol_type = other RNA
cgacaggtcctgccatttcaccaggaacatgtagacctgggggaaagccagagtcgggggaccccattcagcctccaaagaggctttgctgtgtgcacccagg

SEQ ID NO: 15147 - RNA, 16 nt, synthetic construct
  source 1..16: mol_type = other RNA
agcaaagcctctttgg

SEQ ID NO: 15148 - RNA, 17 nt, synthetic construct
  source 1..17: mol_type = other RNA
cagcaaagcctctttgg

SEQ ID NO: 15149 - RNA, 18 nt, synthetic construct
  source 1..18: mol_type = other RNA
acagcaaagcctctttgg

SEQ ID NO: 15150 - RNA, 19 nt, synthetic construct
  source 1..19: mol_type = other RNA
cacagcaaagcctctttgg

SEQ ID NO: 15151 - RNA, 20 nt, synthetic construct
  source 1..20: mol_type = other RNA
acacagcaaagcctctttgg

SEQ ID NO: 15152 - RNA, 21 nt, synthetic construct
  source 1..21: mol_type = other RNA
cacacagcaaagcctctttgg

SEQ ID NO: 15153 - RNA, 22 nt, synthetic construct
  source 1..22: mol_type = other RNA
gcacacagcaaagcctctttgg

SEQ ID NO: 15154-15160 - skipped (7 entries)

SEQ ID NO: 15161 - RNA, 10 nt, synthetic construct
  source 1..10: mol_type = other RNA
aagaggcttt

SEQ ID NO: 15162 - RNA, 11 nt, synthetic construct
  source 1..11: mol_type = other RNA
aagaggctttg

SEQ ID NO: 15163 - RNA, 12 nt, synthetic construct
  source 1..12: mol_type = other RNA
aagaggctttgc

SEQ ID NO: 15164 - RNA, 13 nt, synthetic construct
  source 1..13: mol_type = other RNA
aagaggctttgct

SEQ ID NO: 15165 - RNA, 14 nt, synthetic construct
  source 1..14: mol_type = other RNA
aagaggctttgctg

SEQ ID NO: 15166 - RNA, 15 nt, synthetic construct
  source 1..15: mol_type = other RNA
aagaggctttgctgt

SEQ ID NO: 15167 - RNA, 16 nt, synthetic construct
  source 1..16: mol_type = other RNA
aagaggctttgctgtg

SEQ ID NO: 15168 - RNA, 17 nt, synthetic construct
  source 1..17: mol_type = other RNA
aagaggctttgctgtgt

SEQ ID NO: 15169 - RNA, 18 nt, synthetic construct
  source 1..18: mol_type = other RNA
aagaggctttgctgtgtg

SEQ ID NO: 15170 - RNA, 19 nt, synthetic construct
  source 1..19: mol_type = other RNA
aagaggctttgctgtgtgc

SEQ ID NO: 15171 - RNA, 43 nt, synthetic construct
  source 1..43: mol_type = other RNA
acctgggggaaagccagagtcgggggaccccattcagcctcca

SEQ ID NO: 15172 - RNA, 44 nt, synthetic construct
  source 1..44: mol_type = other RNA
aacctgggggaaagccagagtcgggggaccccattcagcctcca

SEQ ID NO: 15173 - RNA, 44 nt, synthetic construct
  source 1..44: mol_type = other RNA
cacctgggggaaagccagagtcgggggaccccattcagcctcca

SEQ ID NO: 15174 - RNA, 44 nt, synthetic construct
  source 1..44: mol_type = other RNA
gacctgggggaaagccagagtcgggggaccccattcagcctcca

SEQ ID NO: 15175 - RNA, 44 nt, synthetic construct
  source 1..44: mol_type = other RNA
tacctgggggaaagccagagtcgggggaccccattcagcctcca

SEQ ID NO: 15176 - RNA, 45 nt, synthetic construct
  source 1..45: mol_type = other RNA
acacctgggggaaagccagagtcgggggaccccattcagcctcca

SEQ ID NO: 15177 - RNA, 45 nt, synthetic construct
  source 1..45: mol_type = other RNA
aaacctgggggaaagccagagtcgggggaccccattcagcctcca

SEQ ID NO: 15178 - RNA, 45 nt, synthetic construct
  source 1..45: mol_type = other RNA
agacctgggggaaagccagagtcgggggaccccattcagcctcca

SEQ ID NO: 15179 - RNA, 45 nt, synthetic construct
  source 1..45: mol_type = other RNA
atacctgggggaaagccagagtcgggggaccccattcagcctcca

SEQ ID NO: 15180 - RNA, 46 nt, synthetic construct
  source 1..46: mol_type = other RNA
tacacctgggggaaagccagagtcgggggaccccattcagcctcca

SEQ ID NO: 15181 - RNA, 46 nt, synthetic construct
  source 1..46: mol_type = other RNA
taaacctgggggaaagccagagtcgggggaccccattcagcctcca

SEQ ID NO: 15182 - RNA, 46 nt, synthetic construct
  source 1..46: mol_type = other RNA
tatacctgggggaaagccagagtcgggggaccccattcagcctcca

SEQ ID NO: 15183 - RNA, 46 nt, synthetic construct
  source 1..46: mol_type = other RNA
tagacctgggggaaagccagagtcgggggaccccattcagcctcca

SEQ ID NO: 15184 - RNA, 47 nt, synthetic construct
  source 1..47: mol_type = other RNA
gtatacctgggggaaagccagagtcgggggaccccattcagcctcca

SEQ ID NO: 15185 - RNA, 47 nt, synthetic construct
  source 1..47: mol_type = other RNA
gtaaacctgggggaaagccagagtcgggggaccccattcagcctcca

SEQ ID NO: 15186 - RNA, 47 nt, synthetic construct
  source 1..47: mol_type = other RNA
gtacacctgggggaaagccagagtcgggggaccccattcagcctcca

SEQ ID NO: 15187 - RNA, 47 nt, synthetic construct
  source 1..47: mol_type = other RNA
gtagacctgggggaaagccagagtcgggggaccccattcagcctcca

SEQ ID NO: 15188 - RNA, 48 nt, synthetic construct
  source 1..48: mol_type = other RNA
tgtatacctgggggaaagccagagtcgggggaccccattcagcctcca

SEQ ID NO: 15189 - RNA, 48 nt, synthetic construct
  source 1..48: mol_type = other RNA
tgtagacctgggggaaagccagagtcgggggaccccattcagcctcca

SEQ ID NO: 15190 - RNA, 48 nt, synthetic construct
  source 1..48: mol_type = other RNA
tgtacacctgggggaaagccagagtcgggggaccccattcagcctcca

SEQ ID NO: 15191 - RNA, 48 nt, synthetic construct
  source 1..48: mol_type = other RNA
tgtaaacctgggggaaagccagagtcgggggaccccattcagcctcca

SEQ ID NO: 15192 - RNA, 49 nt, synthetic construct
  source 1..49: mol_type = other RNA
atgtacacctgggggaaagccagagtcgggggaccccattcagcctcca

SEQ ID NO: 15193 - RNA, 49 nt, synthetic construct
  source 1..49: mol_type = other RNA
atgtaaacctgggggaaagccagagtcgggggaccccattcagcctcca

SEQ ID NO: 15194 - RNA, 49 nt, synthetic construct
  source 1..49: mol_type = other RNA
atgtagacctgggggaaagccagagtcgggggaccccattcagcctcca

SEQ ID NO: 15195 - RNA, 49 nt, synthetic construct
  source 1..49: mol_type = other RNA
atgtatacctgggggaaagccagagtcgggggaccccattcagcctcca

SEQ ID NO: 15196 - RNA, 50 nt, synthetic construct
  source 1..50: mol_type = other RNA
catgtacacctgggggaaagccagagtcgggggaccccattcagcctcca

SEQ ID NO: 15197 - RNA, 50 nt, synthetic construct
  source 1..50: mol_type = other RNA
catgtagacctgggggaaagccagagtcgggggaccccattcagcctcca

SEQ ID NO: 15198 - RNA, 50 nt, synthetic construct
  source 1..50: mol_type = other RNA
catgtaaacctgggggaaagccagagtcgggggaccccattcagcctcca

SEQ ID NO: 15199 - RNA, 50 nt, synthetic construct
  source 1..50: mol_type = other RNA
catgtatacctgggggaaagccagagtcgggggaccccattcagcctcca

SEQ ID NO: 15200 - RNA, 51 nt, synthetic construct
  source 1..51: mol_type = other RNA
acatgtaaacctgggggaaagccagagtcgggggaccccattcagcctcca

SEQ ID NO: 15201 - RNA, 51 nt, synthetic construct
  source 1..51: mol_type = other RNA
acatgtacacctgggggaaagccagagtcgggggaccccattcagcctcca

SEQ ID NO: 15202 - RNA, 51 nt, synthetic construct
  source 1..51: mol_type = other RNA
acatgtatacctgggggaaagccagagtcgggggaccccattcagcctcca

SEQ ID NO: 15203 - RNA, 51 nt, synthetic construct
  source 1..51: mol_type = other RNA
acatgtagacctgggggaaagccagagtcgggggaccccattcagcctcca

SEQ ID NO: 15204 - RNA, 52 nt, synthetic construct
  source 1..52: mol_type = other RNA
aacatgtaaacctgggggaaagccagagtcgggggaccccattcagcctcca

SEQ ID NO: 15205 - RNA, 52 nt, synthetic construct
  source 1..52: mol_type = other RNA
aacatgtacacctgggggaaagccagagtcgggggaccccattcagcctcca

SEQ ID NO: 15206 - RNA, 52 nt, synthetic construct
  source 1..52: mol_type = other RNA
aacatgtagacctgggggaaagccagagtcgggggaccccattcagcctcca

SEQ ID NO: 15207 - RNA, 52 nt, synthetic construct
  source 1..52: mol_type = other RNA
aacatgtatacctgggggaaagccagagtcgggggaccccattcagcctcca

SEQ ID NO: 15208 - RNA, 53 nt, synthetic construct
  source 1..53: mol_type = other RNA
gaacatgtatacctgggggaaagccagagtcgggggaccccattcagcctcca

SEQ ID NO: 15209 - RNA, 53 nt, synthetic construct
  source 1..53: mol_type = other RNA
gaacatgtaaacctgggggaaagccagagtcgggggaccccattcagcctcca

SEQ ID NO: 15210 - RNA, 53 nt, synthetic construct
  source 1..53: mol_type = other RNA
gaacatgtacacctgggggaaagccagagtcgggggaccccattcagcctcca

SEQ ID NO: 15211 - RNA, 53 nt, synthetic construct
  source 1..53: mol_type = other RNA
gaacatgtagacctgggggaaagccagagtcgggggaccccattcagcctcca

SEQ ID NO: 15212 - RNA, 54 nt, synthetic construct
  source 1..54: mol_type = other RNA
ggaacatgtacacctgggggaaagccagagtcgggggaccccattcagcctcca

SEQ ID NO: 15213 - RNA, 54 nt, synthetic construct
  source 1..54: mol_type = other RNA
ggaacatgtaaacctgggggaaagccagagtcgggggaccccattcagcctcca

SEQ ID NO: 15214 - RNA, 54 nt, synthetic construct
  source 1..54: mol_type = other RNA
ggaacatgtatacctgggggaaagccagagtcgggggaccccattcagcctcca

SEQ ID NO: 15215 - RNA, 54 nt, synthetic construct
  source 1..54: mol_type = other RNA
ggaacatgtagacctgggggaaagccagagtcgggggaccccattcagcctcca

SEQ ID NO: 15216 - RNA, 55 nt, synthetic construct
  source 1..55: mol_type = other RNA
aggaacatgtaaacctgggggaaagccagagtcgggggaccccattcagcctcca

SEQ ID NO: 15217 - RNA, 55 nt, synthetic construct
  source 1..55: mol_type = other RNA
aggaacatgtagacctgggggaaagccagagtcgggggaccccattcagcctcca

SEQ ID NO: 15218 - RNA, 55 nt, synthetic construct
  source 1..55: mol_type = other RNA
aggaacatgtatacctgggggaaagccagagtcgggggaccccattcagcctcca

SEQ ID NO: 15219 - RNA, 55 nt, synthetic construct
  source 1..55: mol_type = other RNA
aggaacatgtacacctgggggaaagccagagtcgggggaccccattcagcctcca

SEQ ID NO: 15220 - RNA, 56 nt, synthetic construct
  source 1..56: mol_type = other RNA
caggaacatgtatacctgggggaaagccagagtcgggggaccccattcagcctcca

SEQ ID NO: 15221 - RNA, 56 nt, synthetic construct
  source 1..56: mol_type = other RNA
caggaacatgtaaacctgggggaaagccagagtcgggggaccccattcagcctcca

SEQ ID NO: 15222 - RNA, 56 nt, synthetic construct
  source 1..56: mol_type = other RNA
caggaacatgtacacctgggggaaagccagagtcgggggaccccattcagcctcca

SEQ ID NO: 15223 - RNA, 56 nt, synthetic construct
  source 1..56: mol_type = other RNA
caggaacatgtagacctgggggaaagccagagtcgggggaccccattcagcctcca

SEQ ID NO: 15224 - RNA, 57 nt, synthetic construct
  source 1..57: mol_type = other RNA
ccaggaacatgtacacctgggggaaagccagagtcgggggaccccattcagcctcca

SEQ ID NO: 15225 - RNA, 57 nt, synthetic construct
  source 1..57: mol_type = other RNA
ccaggaacatgtaaacctgggggaaagccagagtcgggggaccccattcagcctcca

SEQ ID NO: 15226 - RNA, 57 nt, synthetic construct
  source 1..57: mol_type = other RNA
ccaggaacatgtagacctgggggaaagccagagtcgggggaccccattcagcctcca

SEQ ID NO: 15227 - RNA, 57 nt, synthetic construct
  source 1..57: mol_type = other RNA
ccaggaacatgtatacctgggggaaagccagagtcgggggaccccattcagcctcca

SEQ ID NO: 15228 - RNA, 58 nt, synthetic construct
  source 1..58: mol_type = other RNA
accaggaacatgtagacctgggggaaagccagagtcgggggaccccattcagcctcca

SEQ ID NO: 15229 - RNA, 58 nt, synthetic construct
  source 1..58: mol_type = other RNA
accaggaacatgtacacctgggggaaagccagagtcgggggaccccattcagcctcca

SEQ ID NO: 15230 - RNA, 58 nt, synthetic construct
  source 1..58: mol_type = other RNA
accaggaacatgtaaacctgggggaaagccagagtcgggggaccccattcagcctcca

SEQ ID NO: 15231 - RNA, 58 nt, synthetic construct
  source 1..58: mol_type = other RNA
accaggaacatgtatacctgggggaaagccagagtcgggggaccccattcagcctcca

SEQ ID NO: 15232 - RNA, 59 nt, synthetic construct
  source 1..59: mol_type = other RNA
caccaggaacatgtacacctgggggaaagccagagtcgggggaccccattcagcctcca

SEQ ID NO: 15233 - RNA, 59 nt, synthetic construct
  source 1..59: mol_type = other RNA
caccaggaacatgtagacctgggggaaagccagagtcgggggaccccattcagcctcca

SEQ ID NO: 15234 - RNA, 59 nt, synthetic construct
  source 1..59: mol_type = other RNA
caccaggaacatgtaaacctgggggaaagccagagtcgggggaccccattcagcctcca

SEQ ID NO: 15235 - RNA, 59 nt, synthetic construct
  source 1..59: mol_type = other RNA
caccaggaacatgtatacctgggggaaagccagagtcgggggaccccattcagcctcca

SEQ ID NO: 15236 - RNA, 60 nt, synthetic construct
  source 1..60: mol_type = other RNA
tcaccaggaacatgtatacctgggggaaagccagagtcgggggaccccattcagcctcca

SEQ ID NO: 15237 - RNA, 60 nt, synthetic construct
  source 1..60: mol_type = other RNA
tcaccaggaacatgtaaacctgggggaaagccagagtcgggggaccccattcagcctcca

SEQ ID NO: 15238 - RNA, 60 nt, synthetic construct
  source 1..60: mol_type = other RNA
tcaccaggaacatgtacacctgggggaaagccagagtcgggggaccccattcagcctcca

SEQ ID NO: 15239 - RNA, 60 nt, synthetic construct
  source 1..60: mol_type = other RNA
tcaccaggaacatgtagacctgggggaaagccagagtcgggggaccccattcagcctcca

SEQ ID NO: 15240 - RNA, 61 nt, synthetic construct
  source 1..61: mol_type = other RNA
ttcaccaggaacatgtagacctgggggaaagccagagtcgggggaccccattcagcctcca

SEQ ID NO: 15241 - RNA, 61 nt, synthetic construct
  source 1..61: mol_type = other RNA
ttcaccaggaacatgtatacctgggggaaagccagagtcgggggaccccattcagcctcca

SEQ ID NO: 15242 - RNA, 61 nt, synthetic construct
  source 1..61: mol_type = other RNA
ttcaccaggaacatgtacacctgggggaaagccagagtcgggggaccccattcagcctcca

SEQ ID NO: 15243 - RNA, 61 nt, synthetic construct
  source 1..61: mol_type = other RNA
ttcaccaggaacatgtaaacctgggggaaagccagagtcgggggaccccattcagcctcca

SEQ ID NO: 15244 - RNA, 62 nt, synthetic construct
  source 1..62: mol_type = other RNA
tttcaccaggaacatgtagacctgggggaaagccagagtcgggggaccccattcagcctcca

SEQ ID NO: 15245 - RNA, 62 nt, synthetic construct
  source 1..62: mol_type = other RNA
tttcaccaggaacatgtatacctgggggaaagccagagtcgggggaccccattcagcctcca

SEQ ID NO: 15246 - RNA, 62 nt, synthetic construct
  source 1..62: mol_type = other RNA
tttcaccaggaacatgtaaacctgggggaaagccagagtcgggggaccccattcagcctcca

SEQ ID NO: 15247 - RNA, 62 nt, synthetic construct
  source 1..62: mol_type = other RNA
tttcaccaggaacatgtacacctgggggaaagccagagtcgggggaccccattcagcctcca

SEQ ID NO: 15248 - RNA, 63 nt, synthetic construct
  source 1..63: mol_type = other RNA
atttcaccaggaacatgtaaacctgggggaaagccagagtcgggggaccccattcagcctcca

SEQ ID NO: 15249 - RNA, 63 nt, synthetic construct
  source 1..63: mol_type = other RNA
atttcaccaggaacatgtacacctgggggaaagccagagtcgggggaccccattcagcctcca

SEQ ID NO: 15250 - RNA, 63 nt, synthetic construct
  source 1..63: mol_type = other RNA
atttcaccaggaacatgtagacctgggggaaagccagagtcgggggaccccattcagcctcca

SEQ ID NO: 15251 - RNA, 63 nt, synthetic construct
  source 1..63: mol_type = other RNA
atttcaccaggaacatgtatacctgggggaaagccagagtcgggggaccccattcagcctcca

SEQ ID NO: 15252 - RNA, 64 nt, synthetic construct
  source 1..64: mol_type = other RNA
catttcaccaggaacatgtatacctgggggaaagccagagtcgggggaccccattcagcctcca

SEQ ID NO: 15253 - RNA, 64 nt, synthetic construct
  source 1..64: mol_type = other RNA
catttcaccaggaacatgtaaacctgggggaaagccagagtcgggggaccccattcagcctcca

SEQ ID NO: 15254 - RNA, 64 nt, synthetic construct
  source 1..64: mol_type = other RNA
catttcaccaggaacatgtacacctgggggaaagccagagtcgggggaccccattcagcctcca

SEQ ID NO: 15255 - RNA, 64 nt, synthetic construct
  source 1..64: mol_type = other RNA
catttcaccaggaacatgtagacctgggggaaagccagagtcgggggaccccattcagcctcca

SEQ ID NO: 15256 - RNA, 65 nt, synthetic construct
  source 1..65: mol_type = other RNA
ccatttcaccaggaacatgtacacctgggggaaagccagagtcgggggaccccattcagcctcca

SEQ ID NO: 15257 - RNA, 65 nt, synthetic construct
  source 1..65: mol_type = other RNA
ccatttcaccaggaacatgtaaacctgggggaaagccagagtcgggggaccccattcagcctcca

SEQ ID NO: 15258 - RNA, 65 nt, synthetic construct
  source 1..65: mol_type = other RNA
ccatttcaccaggaacatgtagacctgggggaaagccagagtcgggggaccccattcagcctcca

SEQ ID NO: 15259 - RNA, 65 nt, synthetic construct
  source 1..65: mol_type = other RNA
ccatttcaccaggaacatgtatacctgggggaaagccagagtcgggggaccccattcagcctcca

SEQ ID NO: 15260 - RNA, 66 nt, synthetic construct
  source 1..66: mol_type = other RNA
gccatttcaccaggaacatgtatacctgggggaaagccagagtcgggggaccccattcagcctcca

SEQ ID NO: 15261 - RNA, 66 nt, synthetic construct
  source 1..66: mol_type = other RNA
gccatttcaccaggaacatgtacacctgggggaaagccagagtcgggggaccccattcagcctcca

SEQ ID NO: 15262 - RNA, 66 nt, synthetic construct
  source 1..66: mol_type = other RNA
gccatttcaccaggaacatgtagacctgggggaaagccagagtcgggggaccccattcagcctcca

SEQ ID NO: 15263 - RNA, 66 nt, synthetic construct
  source 1..66: mol_type = other RNA
gccatttcaccaggaacatgtaaacctgggggaaagccagagtcgggggaccccattcagcctcca

SEQ ID NO: 15264 - RNA, 67 nt, synthetic construct
  source 1..67: mol_type = other RNA
tgccatttcaccaggaacatgtatacctgggggaaagccagagtcgggggaccccattcagcctcca

SEQ ID NO: 15265 - RNA, 67 nt, synthetic construct
  source 1..67: mol_type = other RNA
tgccatttcaccaggaacatgtacacctgggggaaagccagagtcgggggaccccattcagcctcca

SEQ ID NO: 15266 - RNA, 67 nt, synthetic construct
  source 1..67: mol_type = other RNA
tgccatttcaccaggaacatgtaaacctgggggaaagccagagtcgggggaccccattcagcctcca

SEQ ID NO: 15267 - RNA, 67 nt, synthetic construct
  source 1..67: mol_type = other RNA
tgccatttcaccaggaacatgtagacctgggggaaagccagagtcgggggaccccattcagcctcca

SEQ ID NO: 15268 - RNA, 68 nt, synthetic construct
  source 1..68: mol_type = other RNA
ctgccatttcaccaggaacatgtatacctgggggaaagccagagtcgggggaccccattcagcctcca

SEQ ID NO: 15269 - RNA, 68 nt, synthetic construct
  source 1..68: mol_type = other RNA
ctgccatttcaccaggaacatgtagacctgggggaaagccagagtcgggggaccccattcagcctcca

SEQ ID NO: 15270 - RNA, 68 nt, synthetic construct
  source 1..68: mol_type = other RNA
ctgccatttcaccaggaacatgtacacctgggggaaagccagagtcgggggaccccattcagcctcca

SEQ ID NO: 15271 - RNA, 68 nt, synthetic construct
  source 1..68: mol_type = other RNA
ctgccatttcaccaggaacatgtaaacctgggggaaagccagagtcgggggaccccattcagcctcca

SEQ ID NO: 15272 - RNA, 69 nt, synthetic construct
  source 1..69: mol_type = other RNA
cctgccatttcaccaggaacatgtatacctgggggaaagccagagtcgggggaccccattcagcctcca

SEQ ID NO: 15273 - RNA, 69 nt, synthetic construct
  source 1..69: mol_type = other RNA
cctgccatttcaccaggaacatgtacacctgggggaaagccagagtcgggggaccccattcagcctcca

SEQ ID NO: 15274 - RNA, 69 nt, synthetic construct
  source 1..69: mol_type = other RNA
cctgccatttcaccaggaacatgtagacctgggggaaagccagagtcgggggaccccattcagcctcca

SEQ ID NO: 15275 - RNA, 69 nt, synthetic construct
  source 1..69: mol_type = other RNA
cctgccatttcaccaggaacatgtaaacctgggggaaagccagagtcgggggaccccattcagcctcca

SEQ ID NO: 15276 - RNA, 70 nt, synthetic construct
  source 1..70: mol_type = other RNA
tcctgccatttcaccaggaacatgtatacctgggggaaagccagagtcgggggaccccattcagcctcca

SEQ ID NO: 15277 - RNA, 70 nt, synthetic construct
  source 1..70: mol_type = other RNA
tcctgccatttcaccaggaacatgtacacctgggggaaagccagagtcgggggaccccattcagcctcca

SEQ ID NO: 15278 - RNA, 70 nt, synthetic construct
  source 1..70: mol_type = other RNA
tcctgccatttcaccaggaacatgtaaacctgggggaaagccagagtcgggggaccccattcagcctcca

SEQ ID NO: 15279 - RNA, 70 nt, synthetic construct
  source 1..70: mol_type = other RNA
tcctgccatttcaccaggaacatgtagacctgggggaaagccagagtcgggggaccccattcagcctcca

SEQ ID NO: 15280 - RNA, 71 nt, synthetic construct
  source 1..71: mol_type = other RNA
gtcctgccatttcaccaggaacatgtagacctgggggaaagccagagtcgggggaccccattcagcctcca

SEQ ID NO: 15281 - RNA, 71 nt, synthetic construct
  source 1..71: mol_type = other RNA
gtcctgccatttcaccaggaacatgtacacctgggggaaagccagagtcgggggaccccattcagcctcca

SEQ ID NO: 15282 - RNA, 71 nt, synthetic construct
  source 1..71: mol_type = other RNA
gtcctgccatttcaccaggaacatgtaaacctgggggaaagccagagtcgggggaccccattcagcctcca

SEQ ID NO: 15283 - RNA, 71 nt, synthetic construct
  source 1..71: mol_type = other RNA
gtcctgccatttcaccaggaacatgtatacctgggggaaagccagagtcgggggaccccattcagcctcca

SEQ ID NO: 15284 - RNA, 72 nt, synthetic construct
  source 1..72: mol_type = other RNA
ggtcctgccatttcaccaggaacatgtatacctgggggaaagccagagtcgggggaccccattcagcctcca

SEQ ID NO: 15285 - RNA, 72 nt, synthetic construct
  source 1..72: mol_type = other RNA
ggtcctgccatttcaccaggaacatgtacacctgggggaaagccagagtcgggggaccccattcagcctcca

SEQ ID NO: 15286 - RNA, 72 nt, synthetic construct
  source 1..72: mol_type = other RNA
ggtcctgccatttcaccaggaacatgtaaacctgggggaaagccagagtcgggggaccccattcagcctcca

SEQ ID NO: 15287 - RNA, 72 nt, synthetic construct
  source 1..72: mol_type = other RNA
ggtcctgccatttcaccaggaacatgtagacctgggggaaagccagagtcgggggaccccattcagcctcca

SEQ ID NO: 15288 - RNA, 73 nt, synthetic construct
  source 1..73: mol_type = other RNA
aggtcctgccatttcaccaggaacatgtagacctgggggaaagccagagtcgggggaccccattcagcctcca

SEQ ID NO: 15289 - RNA, 73 nt, synthetic construct
  source 1..73: mol_type = other RNA
aggtcctgccatttcaccaggaacatgtacacctgggggaaagccagagtcgggggaccccattcagcctcca

SEQ ID NO: 15290 - RNA, 73 nt, synthetic construct
  source 1..73: mol_type = other RNA
aggtcctgccatttcaccaggaacatgtaaacctgggggaaagccagagtcgggggaccccattcagcctcca

SEQ ID NO: 15291 - RNA, 73 nt, synthetic construct
  source 1..73: mol_type = other RNA
aggtcctgccatttcaccaggaacatgtatacctgggggaaagccagagtcgggggaccccattcagcctcca

SEQ ID NO: 15292 - RNA, 74 nt, synthetic construct
  source 1..74: mol_type = other RNA
caggtcctgccatttcaccaggaacatgtagacctgggggaaagccagagtcgggggaccccattcagcctcca

SEQ ID NO: 15293 - RNA, 74 nt, synthetic construct
  source 1..74: mol_type = other RNA
caggtcctgccatttcaccaggaacatgtaaacctgggggaaagccagagtcgggggaccccattcagcctcca

SEQ ID NO: 15294 - RNA, 74 nt, synthetic construct
  source 1..74: mol_type = other RNA
caggtcctgccatttcaccaggaacatgtacacctgggggaaagccagagtcgggggaccccattcagcctcca

SEQ ID NO: 15295 - RNA, 74 nt, synthetic construct
  source 1..74: mol_type = other RNA
caggtcctgccatttcaccaggaacatgtatacctgggggaaagccagagtcgggggaccccattcagcctcca

SEQ ID NO: 15296 - RNA, 75 nt, synthetic construct
  source 1..75: mol_type = other RNA
acaggtcctgccatttcaccaggaacatgtaaacctgggggaaagccagagtcgggggaccccattcagcctcca

SEQ ID NO: 15297 - RNA, 75 nt, synthetic construct
  source 1..75: mol_type = other RNA
acaggtcctgccatttcaccaggaacatgtatacctgggggaaagccagagtcgggggaccccattcagcctcca

SEQ ID NO: 15298 - RNA, 75 nt, synthetic construct
  source 1..75: mol_type = other RNA
acaggtcctgccatttcaccaggaacatgtacacctgggggaaagccagagtcgggggaccccattcagcctcca

SEQ ID NO: 15299 - RNA, 75 nt, synthetic construct
  source 1..75: mol_type = other RNA
acaggtcctgccatttcaccaggaacatgtagacctgggggaaagccagagtcgggggaccccattcagcctcca

SEQ ID NO: 15300 - RNA, 76 nt, synthetic construct
  source 1..76: mol_type = other RNA
gacaggtcctgccatttcaccaggaacatgtatacctgggggaaagccagagtcgggggaccccattcagcctcca

SEQ ID NO: 15301 - RNA, 76 nt, synthetic construct
  source 1..76: mol_type = other RNA
gacaggtcctgccatttcaccaggaacatgtagacctgggggaaagccagagtcgggggaccccattcagcctcca

SEQ ID NO: 15302 - RNA, 76 nt, synthetic construct
  source 1..76: mol_type = other RNA
gacaggtcctgccatttcaccaggaacatgtacacctgggggaaagccagagtcgggggaccccattcagcctcca

SEQ ID NO: 15303 - RNA, 76 nt, synthetic construct
  source 1..76: mol_type = other RNA
gacaggtcctgccatttcaccaggaacatgtaaacctgggggaaagccagagtcgggggaccccattcagcctcca

SEQ ID NO: 15304 - RNA, 77 nt, synthetic construct
  source 1..77: mol_type = other RNA
cgacaggtcctgccatttcaccaggaacatgtatacctgggggaaagccagagtcgggggaccccattcagcctcca

SEQ ID NO: 15305 - RNA, 77 nt, synthetic construct
  source 1..77: mol_type = other RNA
cgacaggtcctgccatttcaccaggaacatgtacacctgggggaaagccagagtcgggggaccccattcagcctcca

SEQ ID NO: 15306 - RNA, 77 nt, synthetic construct
  source 1..77: mol_type = other RNA
cgacaggtcctgccatttcaccaggaacatgtaaacctgggggaaagccagagtcgggggaccccattcagcctcca

SEQ ID NO: 15307 - RNA, 77 nt, synthetic construct
  source 1..77: mol_type = other RNA
cgacaggtcctgccatttcaccaggaacatgtagacctgggggaaagccagagtcgggggaccccattcagcctcca

SEQ ID NO: 15308 - RNA, 78 nt, synthetic construct
  source 1..78: mol_type = other RNA
ccgacaggtcctgccatttcaccaggaacatgtagacctgggggaaagccagagtcgggggaccccattcagcctcca

SEQ ID NO: 15309 - RNA, 78 nt, synthetic construct
  source 1..78: mol_type = other RNA
ccgacaggtcctgccatttcaccaggaacatgtatacctgggggaaagccagagtcgggggaccccattcagcctcca

SEQ ID NO: 15310 - RNA, 78 nt, synthetic construct
  source 1..78: mol_type = other RNA
ccgacaggtcctgccatttcaccaggaacatgtaaacctgggggaaagccagagtcgggggaccccattcagcctcca

SEQ ID NO: 15311 - RNA, 78 nt, synthetic construct
  source 1..78: mol_type = other RNA
ccgacaggtcctgccatttcaccaggaacatgtacacctgggggaaagccagagtcgggggaccccattcagcctcca

SEQ ID NO: 15312 - RNA, 79 nt, synthetic construct
  source 1..79: mol_type = other RNA
tccgacaggtcctgccatttcaccaggaacatgtaaacctgggggaaagccagagtcgggggaccccattcagcctcca

SEQ ID NO: 15313 - RNA, 79 nt, synthetic construct
  source 1..79: mol_type = other RNA
tccgacaggtcctgccatttcaccaggaacatgtatacctgggggaaagccagagtcgggggaccccattcagcctcca

SEQ ID NO: 15314 - RNA, 79 nt, synthetic construct
  source 1..79: mol_type = other RNA
tccgacaggtcctgccatttcaccaggaacatgtacacctgggggaaagccagagtcgggggaccccattcagcctcca

SEQ ID NO: 15315 - RNA, 79 nt, synthetic construct
  source 1..79: mol_type = other RNA
tccgacaggtcctgccatttcaccaggaacatgtagacctgggggaaagccagagtcgggggaccccattcagcctcca

SEQ ID NO: 15316 - RNA, 80 nt, synthetic construct
  source 1..80: mol_type = other RNA
ctccgacaggtcctgccatttcaccaggaacatgtagacctgggggaaagccagagtcgggggaccccattcagcctcca

SEQ ID NO: 15317 - RNA, 80 nt, synthetic construct
  source 1..80: mol_type = other RNA
ctccgacaggtcctgccatttcaccaggaacatgtaaacctgggggaaagccagagtcgggggaccccattcagcctcca

SEQ ID NO: 15318 - RNA, 80 nt, synthetic construct
  source 1..80: mol_type = other RNA
ctccgacaggtcctgccatttcaccaggaacatgtatacctgggggaaagccagagtcgggggaccccattcagcctcca

SEQ ID NO: 15319 - RNA, 80 nt, synthetic construct
  source 1..80: mol_type = other RNA
ctccgacaggtcctgccatttcaccaggaacatgtacacctgggggaaagccagagtcgggggaccccattcagcctcca

SEQ ID NO: 15320 - RNA, 81 nt, synthetic construct
  source 1..81: mol_type = other RNA
tctccgacaggtcctgccatttcaccaggaacatgtatacctgggggaaagccagagtcgggggaccccattcagcctcca

SEQ ID NO: 15321 - RNA, 81 nt, synthetic construct
  source 1..81: mol_type = other RNA
tctccgacaggtcctgccatttcaccaggaacatgtagacctgggggaaagccagagtcgggggaccccattcagcctcca

SEQ ID NO: 15322 - RNA, 81 nt, synthetic construct
  source 1..81: mol_type = other RNA
tctccgacaggtcctgccatttcaccaggaacatgtacacctgggggaaagccagagtcgggggaccccattcagcctcca

SEQ ID NO: 15323 - RNA, 81 nt, synthetic construct
  source 1..81: mol_type = other RNA
tctccgacaggtcctgccatttcaccaggaacatgtaaacctgggggaaagccagagtcgggggaccccattcagcctcca

SEQ ID NO: 15324 - RNA, 82 nt, synthetic construct
  source 1..82: mol_type = other RNA
ttctccgacaggtcctgccatttcaccaggaacatgtagacctgggggaaagccagagtcgggggaccccattcagcctcca

SEQ ID NO: 15325 - RNA, 82 nt, synthetic construct
  source 1..82: mol_type = other RNA
ttctccgacaggtcctgccatttcaccaggaacatgtacacctgggggaaagccagagtcgggggaccccattcagcctcca

SEQ ID NO: 15326 - RNA, 82 nt, synthetic construct
  source 1..82: mol_type = other RNA
ttctccgacaggtcctgccatttcaccaggaacatgtatacctgggggaaagccagagtcgggggaccccattcagcctcca

SEQ ID NO: 15327 - RNA, 82 nt, synthetic construct
  source 1..82: mol_type = other RNA
ttctccgacaggtcctgccatttcaccaggaacatgtaaacctgggggaaagccagagtcgggggaccccattcagcctcca

SEQ ID NO: 15328 - RNA, 83 nt, synthetic construct
  source 1..83: mol_type = other RNA
cttctccgacaggtcctgccatttcaccaggaacatgtatacctgggggaaagccagagtcgggggaccccattcagcctcca

SEQ ID NO: 15329 - RNA, 83 nt, synthetic construct
  source 1..83: mol_type = other RNA
cttctccgacaggtcctgccatttcaccaggaacatgtagacctgggggaaagccagagtcgggggaccccattcagcctcca

SEQ ID NO: 15330 - RNA, 83 nt, synthetic construct
  source 1..83: mol_type = other RNA
cttctccgacaggtcctgccatttcaccaggaacatgtacacctgggggaaagccagagtcgggggaccccattcagcctcca

SEQ ID NO: 15331 - RNA, 83 nt, synthetic construct
  source 1..83: mol_type = other RNA
cttctccgacaggtcctgccatttcaccaggaacatgtaaacctgggggaaagccagagtcgggggaccccattcagcctcca

SEQ ID NO: 15332 - RNA, 84 nt, synthetic construct
  source 1..84: mol_type = other RNA
ccttctccgacaggtcctgccatttcaccaggaacatgtaaacctgggggaaagccagagtcgggggaccccattcagcctcca

SEQ ID NO: 15333 - RNA, 84 nt, synthetic construct
  source 1..84: mol_type = other RNA
ccttctccgacaggtcctgccatttcaccaggaacatgtacacctgggggaaagccagagtcgggggaccccattcagcctcca

SEQ ID NO: 15334 - RNA, 84 nt, synthetic construct
  source 1..84: mol_type = other RNA
ccttctccgacaggtcctgccatttcaccaggaacatgtatacctgggggaaagccagagtcgggggaccccattcagcctcca

SEQ ID NO: 15335 - RNA, 84 nt, synthetic construct
  source 1..84: mol_type = other RNA
ccttctccgacaggtcctgccatttcaccaggaacatgtagacctgggggaaagccagagtcgggggaccccattcagcctcca

SEQ ID NO: 15336 - RNA, 85 nt, synthetic construct
  source 1..85: mol_type = other RNA
accttctccgacaggtcctgccatttcaccaggaacatgtacacctgggggaaagccagagtcgggggaccccattcagcctcca

SEQ ID NO: 15337 - RNA, 85 nt, synthetic construct
  source 1..85: mol_type = other RNA
accttctccgacaggtcctgccatttcaccaggaacatgtaaacctgggggaaagccagagtcgggggaccccattcagcctcca

SEQ ID NO: 15338 - RNA, 85 nt, synthetic construct
  source 1..85: mol_type = other RNA
accttctccgacaggtcctgccatttcaccaggaacatgtagacctgggggaaagccagagtcgggggaccccattcagcctcca

SEQ ID NO: 15339 - RNA, 85 nt, synthetic construct
  source 1..85: mol_type = other RNA
accttctccgacaggtcctgccatttcaccaggaacatgtatacctgggggaaagccagagtcgggggaccccattcagcctcca

SEQ ID NO: 15340 - RNA, 86 nt, synthetic construct
  source 1..86: mol_type = other RNA
caccttctccgacaggtcctgccatttcaccaggaacatgtacacctgggggaaagccagagtcgggggaccccattcagcctcca

SEQ ID NO: 15341 - RNA, 86 nt, synthetic construct
  source 1..86: mol_type = other RNA
caccttctccgacaggtcctgccatttcaccaggaacatgtaaacctgggggaaagccagagtcgggggaccccattcagcctcca

SEQ ID NO: 15342 - RNA, 86 nt, synthetic construct
  source 1..86: mol_type = other RNA
caccttctccgacaggtcctgccatttcaccaggaacatgtagacctgggggaaagccagagtcgggggaccccattcagcctcca

SEQ ID NO: 15343 - RNA, 86 nt, synthetic construct
  source 1..86: mol_type = other RNA
caccttctccgacaggtcctgccatttcaccaggaacatgtatacctgggggaaagccagagtcgggggaccccattcagcctcca

SEQ ID NO: 15344 - RNA, 87 nt, synthetic construct
  source 1..87: mol_type = other RNA
ccaccttctccgacaggtcctgccatttcaccaggaacatgtagacctgggggaaagccagagtcgggggaccccattcagcctcca

SEQ ID NO: 15345 - RNA, 87 nt, synthetic construct
  source 1..87: mol_type = other RNA
ccaccttctccgacaggtcctgccatttcaccaggaacatgtacacctgggggaaagccagagtcgggggaccccattcagcctcca

SEQ ID NO: 15346 - RNA, 87 nt, synthetic construct
  source 1..87: mol_type = other RNA
ccaccttctccgacaggtcctgccatttcaccaggaacatgtaaacctgggggaaagccagagtcgggggaccccattcagcctcca

SEQ ID NO: 15347 - RNA, 87 nt, synthetic construct
  source 1..87: mol_type = other RNA
ccaccttctccgacaggtcctgccatttcaccaggaacatgtatacctgggggaaagccagagtcgggggaccccattcagcctcca

SEQ ID NO: 15348 - RNA, 88 nt, synthetic construct
  source 1..88: mol_type = other RNA
accaccttctccgacaggtcctgccatttcaccaggaacatgtacacctgggggaaagccagagtcgggggaccccattcagcctcca

SEQ ID NO: 15349 - RNA, 88 nt, synthetic construct
  source 1..88: mol_type = other RNA
accaccttctccgacaggtcctgccatttcaccaggaacatgtagacctgggggaaagccagagtcgggggaccccattcagcctcca

SEQ ID NO: 15350 - RNA, 88 nt, synthetic construct
  source 1..88: mol_type = other RNA
accaccttctccgacaggtcctgccatttcaccaggaacatgtatacctgggggaaagccagagtcgggggaccccattcagcctcca

SEQ ID NO: 15351 - RNA, 88 nt, synthetic construct
  source 1..88: mol_type = other RNA
accaccttctccgacaggtcctgccatttcaccaggaacatgtaaacctgggggaaagccagagtcgggggaccccattcagcctcca

SEQ ID NO: 15352 - RNA, 89 nt, synthetic construct
  source 1..89: mol_type = other RNA
gaccaccttctccgacaggtcctgccatttcaccaggaacatgtatacctgggggaaagccagagtcgggggaccccattcagcctcca

SEQ ID NO: 15353 - RNA, 89 nt, synthetic construct
  source 1..89: mol_type = other RNA
gaccaccttctccgacaggtcctgccatttcaccaggaacatgtaaacctgggggaaagccagagtcgggggaccccattcagcctcca

SEQ ID NO: 15354 - RNA, 89 nt, synthetic construct
  source 1..89: mol_type = other RNA
gaccaccttctccgacaggtcctgccatttcaccaggaacatgtacacctgggggaaagccagagtcgggggaccccattcagcctcca

SEQ ID NO: 15355 - RNA, 89 nt, synthetic construct
  source 1..89: mol_type = other RNA
gaccaccttctccgacaggtcctgccatttcaccaggaacatgtagacctgggggaaagccagagtcgggggaccccattcagcctcca

SEQ ID NO: 15356 - RNA, 90 nt, synthetic construct
  source 1..90: mol_type = other RNA
agaccaccttctccgacaggtcctgccatttcaccaggaacatgtacacctgggggaaagccagagtcgggggaccccattcagcctcca

SEQ ID NO: 15357 - RNA, 90 nt, synthetic construct
  source 1..90: mol_type = other RNA
agaccaccttctccgacaggtcctgccatttcaccaggaacatgtaaacctgggggaaagccagagtcgggggaccccattcagcctcca

SEQ ID NO: 15358 - RNA, 90 nt, synthetic construct
  source 1..90: mol_type = other RNA
agaccaccttctccgacaggtcctgccatttcaccaggaacatgtatacctgggggaaagccagagtcgggggaccccattcagcctcca

SEQ ID NO: 15359 - RNA, 90 nt, synthetic construct
  source 1..90: mol_type = other RNA
agaccaccttctccgacaggtcctgccatttcaccaggaacatgtagacctgggggaaagccagagtcgggggaccccattcagcctcca

SEQ ID NO: 15360 - RNA, 91 nt, synthetic construct
  source 1..91: mol_type = other RNA
tagaccaccttctccgacaggtcctgccatttcaccaggaacatgtagacctgggggaaagccagagtcgggggaccccattcagcctcca

SEQ ID NO: 15361 - RNA, 91 nt, synthetic construct
  source 1..91: mol_type = other RNA
tagaccaccttctccgacaggtcctgccatttcaccaggaacatgtaaacctgggggaaagccagagtcgggggaccccattcagcctcca

SEQ ID NO: 15362 - RNA, 91 nt, synthetic construct
  source 1..91: mol_type = other RNA
tagaccaccttctccgacaggtcctgccatttcaccaggaacatgtatacctgggggaaagccagagtcgggggaccccattcagcctcca

SEQ ID NO: 15363 - RNA, 91 nt, synthetic construct
  source 1..91: mol_type = other RNA
tagaccaccttctccgacaggtcctgccatttcaccaggaacatgtacacctgggggaaagccagagtcgggggaccccattcagcctcca

SEQ ID NO: 15364 - RNA, 92 nt, synthetic construct
  source 1..92: mol_type = other RNA
gtagaccaccttctccgacaggtcctgccatttcaccaggaacatgtagacctgggggaaagccagagtcgggggaccccattcagcctcca

SEQ ID NO: 15365 - RNA, 92 nt, synthetic construct
  source 1..92: mol_type = other RNA
gtagaccaccttctccgacaggtcctgccatttcaccaggaacatgtacacctgggggaaagccagagtcgggggaccccattcagcctcca

SEQ ID NO: 15366 - RNA, 92 nt, synthetic construct
  source 1..92: mol_type = other RNA
gtagaccaccttctccgacaggtcctgccatttcaccaggaacatgtaaacctgggggaaagccagagtcgggggaccccattcagcctcca

SEQ ID NO: 15367 - RNA, 92 nt, synthetic construct
  source 1..92: mol_type = other RNA
gtagaccaccttctccgacaggtcctgccatttcaccaggaacatgtatacctgggggaaagccagagtcgggggaccccattcagcctcca

SEQ ID NO: 15368 - RNA, 93 nt, synthetic construct
  source 1..93: mol_type = other RNA
ggtagaccaccttctccgacaggtcctgccatttcaccaggaacatgtatacctgggggaaagccagagtcgggggaccccattcagcctcca

SEQ ID NO: 15369 - RNA, 93 nt, synthetic construct
  source 1..93: mol_type = other RNA
ggtagaccaccttctccgacaggtcctgccatttcaccaggaacatgtagacctgggggaaagccagagtcgggggaccccattcagcctcca

SEQ ID NO: 15370 - RNA, 93 nt, synthetic construct
  source 1..93: mol_type = other RNA
ggtagaccaccttctccgacaggtcctgccatttcaccaggaacatgtaaacctgggggaaagccagagtcgggggaccccattcagcctcca

SEQ ID NO: 15371 - RNA, 93 nt, synthetic construct
  source 1..93: mol_type = other RNA
ggtagaccaccttctccgacaggtcctgccatttcaccaggaacatgtacacctgggggaaagccagagtcgggggaccccattcagcctcca

SEQ ID NO: 15372 - RNA, 94 nt, synthetic construct
  source 1..94: mol_type = other RNA
cggtagaccaccttctccgacaggtcctgccatttcaccaggaacatgtatacctgggggaaagccagagtcgggggaccccattcagcctcca

SEQ ID NO: 15373 - RNA, 94 nt, synthetic construct
  source 1..94: mol_type = other RNA
cggtagaccaccttctccgacaggtcctgccatttcaccaggaacatgtagacctgggggaaagccagagtcgggggaccccattcagcctcca

SEQ ID NO: 15374 - RNA, 94 nt, synthetic construct
  source 1..94: mol_type = other RNA
cggtagaccaccttctccgacaggtcctgccatttcaccaggaacatgtacacctgggggaaagccagagtcgggggaccccattcagcctcca

SEQ ID NO: 15375 - RNA, 94 nt, synthetic construct
  source 1..94: mol_type = other RNA
cggtagaccaccttctccgacaggtcctgccatttcaccaggaacatgtaaacctgggggaaagccagagtcgggggaccccattcagcctcca

SEQ ID NO: 15376 - RNA, 95 nt, synthetic construct
  source 1..95: mol_type = other RNA
ccggtagaccaccttctccgacaggtcctgccatttcaccaggaacatgtatacctgggggaaagccagagtcgggggaccccattcagcctcca

SEQ ID NO: 15377 - RNA, 95 nt, synthetic construct
  source 1..95: mol_type = other RNA
ccggtagaccaccttctccgacaggtcctgccatttcaccaggaacatgtagacctgggggaaagccagagtcgggggaccccattcagcctcca

SEQ ID NO: 15378 - RNA, 95 nt, synthetic construct
  source 1..95: mol_type = other RNA
ccggtagaccaccttctccgacaggtcctgccatttcaccaggaacatgtacacctgggggaaagccagagtcgggggaccccattcagcctcca

SEQ ID NO: 15379 - RNA, 95 nt, synthetic construct
  source 1..95: mol_type = other RNA
ccggtagaccaccttctccgacaggtcctgccatttcaccaggaacatgtaaacctgggggaaagccagagtcgggggaccccattcagcctcca

SEQ ID NO: 15380 - RNA, 96 nt, synthetic construct
  source 1..96: mol_type = other RNA
gccggtagaccaccttctccgacaggtcctgccatttcaccaggaacatgtaaacctgggggaaagccagagtcgggggaccccattcagcctcca

SEQ ID NO: 15381 - RNA, 96 nt, synthetic construct
  source 1..96: mol_type = other RNA
gccggtagaccaccttctccgacaggtcctgccatttcaccaggaacatgtacacctgggggaaagccagagtcgggggaccccattcagcctcca

SEQ ID NO: 15382 - RNA, 96 nt, synthetic construct
  source 1..96: mol_type = other RNA
gccggtagaccaccttctccgacaggtcctgccatttcaccaggaacatgtagacctgggggaaagccagagtcgggggaccccattcagcctcca

SEQ ID NO: 15383 - RNA, 96 nt, synthetic construct
  source 1..96: mol_type = other RNA
gccggtagaccaccttctccgacaggtcctgccatttcaccaggaacatgtatacctgggggaaagccagagtcgggggaccccattcagcctcca

SEQ ID NO: 15384 - RNA, 97 nt, synthetic construct
  source 1..97: mol_type = other RNA
cgccggtagaccaccttctccgacaggtcctgccatttcaccaggaacatgtacacctgggggaaagccagagtcgggggaccccattcagcctcca

SEQ ID NO: 15385 - RNA, 97 nt, synthetic construct
  source 1..97: mol_type = other RNA
cgccggtagaccaccttctccgacaggtcctgccatttcaccaggaacatgtagacctgggggaaagccagagtcgggggaccccattcagcctcca

SEQ ID NO: 15386 - RNA, 97 nt, synthetic construct
  source 1..97: mol_type = other RNA
cgccggtagaccaccttctccgacaggtcctgccatttcaccaggaacatgtatacctgggggaaagccagagtcgggggaccccattcagcctcca

SEQ ID NO: 15387 - RNA, 97 nt, synthetic construct
  source 1..97: mol_type = other RNA
cgccggtagaccaccttctccgacaggtcctgccatttcaccaggaacatgtaaacctgggggaaagccagagtcgggggaccccattcagcctcca

SEQ ID NO: 15388 - RNA, 98 nt, synthetic construct
  source 1..98: mol_type = other RNA
gcgccggtagaccaccttctccgacaggtcctgccatttcaccaggaacatgtacacctgggggaaagccagagtcgggggaccccattcagcctcca

SEQ ID NO: 15389 - RNA, 98 nt, synthetic construct
  source 1..98: mol_type = other RNA
gcgccggtagaccaccttctccgacaggtcctgccatttcaccaggaacatgtatacctgggggaaagccagagtcgggggaccccattcagcctcca

SEQ ID NO: 15390 - RNA, 98 nt, synthetic construct
  source 1..98: mol_type = other RNA
gcgccggtagaccaccttctccgacaggtcctgccatttcaccaggaacatgtaaacctgggggaaagccagagtcgggggaccccattcagcctcca

SEQ ID NO: 15391 - RNA, 98 nt, synthetic construct
  source 1..98: mol_type = other RNA
gcgccggtagaccaccttctccgacaggtcctgccatttcaccaggaacatgtagacctgggggaaagccagagtcgggggaccccattcagcctcca

SEQ ID NO: 15392 - RNA, 99 nt, synthetic construct
  source 1..99: mol_type = other RNA
agcgccggtagaccaccttctccgacaggtcctgccatttcaccaggaacatgtagacctgggggaaagccagagtcgggggaccccattcagcctcca

SEQ ID NO: 15393 - RNA, 99 nt, synthetic construct
  source 1..99: mol_type = other RNA
agcgccggtagaccaccttctccgacaggtcctgccatttcaccaggaacatgtatacctgggggaaagccagagtcgggggaccccattcagcctcca

SEQ ID NO: 15394 - RNA, 99 nt, synthetic construct
  source 1..99: mol_type = other RNA
agcgccggtagaccaccttctccgacaggtcctgccatttcaccaggaacatgtaaacctgggggaaagccagagtcgggggaccccattcagcctcca

SEQ ID NO: 15395 - RNA, 99 nt, synthetic construct
  source 1..99: mol_type = other RNA
agcgccggtagaccaccttctccgacaggtcctgccatttcaccaggaacatgtacacctgggggaaagccagagtcgggggaccccattcagcctcca

SEQ ID NO: 15396 - RNA, 100 nt, synthetic construct
  source 1..100: mol_type = other RNA
aagcgccggtagaccaccttctccgacaggtcctgccatttcaccaggaacatgtagacctgggggaaagccagagtcgggggaccccattcagcctcca

SEQ ID NO: 15397 - RNA, 100 nt, synthetic construct
  source 1..100: mol_type = other RNA
aagcgccggtagaccaccttctccgacaggtcctgccatttcaccaggaacatgtaaacctgggggaaagccagagtcgggggaccccattcagcctcca

SEQ ID NO: 15398 - RNA, 100 nt, synthetic construct
  source 1..100: mol_type = other RNA
aagcgccggtagaccaccttctccgacaggtcctgccatttcaccaggaacatgtatacctgggggaaagccagagtcgggggaccccattcagcctcca

SEQ ID NO: 15399 - RNA, 100 nt, synthetic construct
  source 1..100: mol_type = other RNA
aagcgccggtagaccaccttctccgacaggtcctgccatttcaccaggaacatgtacacctgggggaaagccagagtcgggggaccccattcagcctcca

SEQ ID NO: 15400 - RNA, 101 nt, synthetic construct
  source 1..101: mol_type = other RNA
gaagcgccggtagaccaccttctccgacaggtcctgccatttcaccaggaacatgtacacctgggggaaagccagagtcgggggaccccattcagcctcca

SEQ ID NO: 15401 - RNA, 101 nt, synthetic construct
  source 1..101: mol_type = other RNA
gaagcgccggtagaccaccttctccgacaggtcctgccatttcaccaggaacatgtaaacctgggggaaagccagagtcgggggaccccattcagcctcca

SEQ ID NO: 15402 - RNA, 101 nt, synthetic construct
  source 1..101: mol_type = other RNA
gaagcgccggtagaccaccttctccgacaggtcctgccatttcaccaggaacatgtatacctgggggaaagccagagtcgggggaccccattcagcctcca

SEQ ID NO: 15403 - RNA, 101 nt, synthetic construct
  source 1..101: mol_type = other RNA
gaagcgccggtagaccaccttctccgacaggtcctgccatttcaccaggaacatgtagacctgggggaaagccagagtcgggggaccccattcagcctcca

SEQ ID NO: 15404 - RNA, 102 nt, synthetic construct
  source 1..102: mol_type = other RNA
tgaagcgccggtagaccaccttctccgacaggtcctgccatttcaccaggaacatgtacacctgggggaaagccagagtcgggggaccccattcagcctcca

SEQ ID NO: 15405 - RNA, 102 nt, synthetic construct
  source 1..102: mol_type = other RNA
tgaagcgccggtagaccaccttctccgacaggtcctgccatttcaccaggaacatgtagacctgggggaaagccagagtcgggggaccccattcagcctcca

SEQ ID NO: 15406 - RNA, 102 nt, synthetic construct
  source 1..102: mol_type = other RNA
tgaagcgccggtagaccaccttctccgacaggtcctgccatttcaccaggaacatgtaaacctgggggaaagccagagtcgggggaccccattcagcctcca

SEQ ID NO: 15407 - RNA, 102 nt, synthetic construct
  source 1..102: mol_type = other RNA
tgaagcgccggtagaccaccttctccgacaggtcctgccatttcaccaggaacatgtatacctgggggaaagccagagtcgggggaccccattcagcctcca

SEQ ID NO: 15408 - RNA, 103 nt, synthetic construct
  source 1..103: mol_type = other RNA
gtgaagcgccggtagaccaccttctccgacaggtcctgccatttcaccaggaacatgtacacctgggggaaagccagagtcgggggaccccattcagcctcca

SEQ ID NO: 15409 - RNA, 103 nt, synthetic construct
  source 1..103: mol_type = other RNA
gtgaagcgccggtagaccaccttctccgacaggtcctgccatttcaccaggaacatgtaaacctgggggaaagccagagtcgggggaccccattcagcctcca

SEQ ID NO: 15410 - RNA, 103 nt, synthetic construct
  source 1..103: mol_type = other RNA
gtgaagcgccggtagaccaccttctccgacaggtcctgccatttcaccaggaacatgtagacctgggggaaagccagagtcgggggaccccattcagcctcca

SEQ ID NO: 15411 - RNA, 103 nt, synthetic construct
  source 1..103: mol_type = other RNA
gtgaagcgccggtagaccaccttctccgacaggtcctgccatttcaccaggaacatgtatacctgggggaaagccagagtcgggggaccccattcagcctcca

SEQ ID NO: 15412 - RNA, 16 nt, synthetic construct
  source 1..16: mol_type = other RNA
tggaactcgtagatct

SEQ ID NO: 15413 - RNA, 17 nt, synthetic construct
  source 1..17: mol_type = other RNA
atggaactcgtagatct

SEQ ID NO: 15414 - RNA, 18 nt, synthetic construct
  source 1..18: mol_type = other RNA
catggaactcgtagatct

SEQ ID NO: 15415 - RNA, 19 nt, synthetic construct
  source 1..19: mol_type = other RNA
acatggaactcgtagatct

SEQ ID NO: 15416 - RNA, 20 nt, synthetic construct
  source 1..20: mol_type = other RNA
cacatggaactcgtagatct

SEQ ID NO: 15417 - RNA, 21 nt, synthetic construct
  source 1..21: mol_type = other RNA
tcacatggaactcgtagatct

SEQ ID NO: 15418 - RNA, 22 nt, synthetic construct
  source 1..22: mol_type = other RNA
ctcacatggaactcgtagatct

SEQ ID NO: 15419-15425 - skipped (7 entries)

SEQ ID NO: 15426 - RNA, 10 nt, synthetic construct
  source 1..10: mol_type = other RNA
tctacgagtt

SEQ ID NO: 15427 - RNA, 11 nt, synthetic construct
  source 1..11: mol_type = other RNA
tctacgagttc

SEQ ID NO: 15428 - RNA, 12 nt, synthetic construct
  source 1..12: mol_type = other RNA
tctacgagttcc

SEQ ID NO: 15429 - RNA, 13 nt, synthetic construct
  source 1..13: mol_type = other RNA
tctacgagttcca

SEQ ID NO: 15430 - RNA, 14 nt, synthetic construct
  source 1..14: mol_type = other RNA
tctacgagttccat

SEQ ID NO: 15431 - RNA, 15 nt, synthetic construct
  source 1..15: mol_type = other RNA
tctacgagttccatg

SEQ ID NO: 15432 - RNA, 16 nt, synthetic construct
  source 1..16: mol_type = other RNA
tctacgagttccatgt

SEQ ID NO: 15433 - RNA, 17 nt, synthetic construct
  source 1..17: mol_type = other RNA
tctacgagttccatgtg

SEQ ID NO: 15434 - RNA, 18 nt, synthetic construct
  source 1..18: mol_type = other RNA
tctacgagttccatgtga

SEQ ID NO: 15435 - RNA, 19 nt, synthetic construct
  source 1..19: mol_type = other RNA
tctacgagttccatgtgag

SEQ ID NO: 15436 - RNA, 67 nt, synthetic construct
  source 1..67: mol_type = other RNA
gtgtacatgttcctggtgaaatggcaggacctgtcggagaaggtggtctaccggcgcttcacagaga

SEQ ID NO: 15437 - RNA, 67 nt, synthetic construct
  source 1..67: mol_type = other RNA
gtgtacatgttcctggtgaaatggcaggacctgtcggagaaggtggtctaccggcgcttcaccgaga

SEQ ID NO: 15438 - RNA, 67 nt, synthetic construct
  source 1..67: mol_type = other RNA
gtctacatgttcctggtgaaatggcaggacctgtcggagaaggtggtctaccggcgcttcaccgaga

SEQ ID NO: 15439 - RNA, 67 nt, synthetic construct
  source 1..67: mol_type = other RNA
gtatacatgttcctggtgaaatggcaggacctgtcggagaaggtggtctaccggcgcttcacagaga

SEQ ID NO: 15440 - RNA, 67 nt, synthetic construct
  source 1..67: mol_type = other RNA
gtttacatgttcctggtgaaatggcaggacctgtcggagaaggtggtctaccggcgcttcacagaga

SEQ ID NO: 15441 - RNA, 67 nt, synthetic construct
  source 1..67: mol_type = other RNA
gtttacatgttcctggtgaaatggcaggacctgtcggagaaggtggtctaccggcgcttcaccgaga

SEQ ID NO: 15442 - RNA, 67 nt, synthetic construct
  source 1..67: mol_type = other RNA
gtttacatgttcctggtgaaatggcaggacctgtcggagaaggtggtctaccggcgcttcacggaga

SEQ ID NO: 15443 - RNA, 67 nt, synthetic construct
  source 1..67: mol_type = other RNA
gtttacatgttcctggtgaaatggcaggacctgtcggagaaggtggtctaccggcgcttcactgaga

SEQ ID NO: 15444 - RNA, 67 nt, synthetic construct
  source 1..67: mol_type = other RNA
gtctacatgttcctggtgaaatggcaggacctgtcggagaaggtggtctaccggcgcttcacggaga

SEQ ID NO: 15445 - RNA, 67 nt, synthetic construct
  source 1..67: mol_type = other RNA
gtgtacatgttcctggtgaaatggcaggacctgtcggagaaggtggtctaccggcgcttcacggaga

SEQ ID NO: 15446 - RNA, 67 nt, synthetic construct
  source 1..67: mol_type = other RNA
gtctacatgttcctggtgaaatggcaggacctgtcggagaaggtggtctaccggcgcttcacagaga

SEQ ID NO: 15447 - RNA, 67 nt, synthetic construct
  source 1..67: mol_type = other RNA
gtatacatgttcctggtgaaatggcaggacctgtcggagaaggtggtctaccggcgcttcactgaga

SEQ ID NO: 15448 - RNA, 67 nt, synthetic construct
  source 1..67: mol_type = other RNA
gtatacatgttcctggtgaaatggcaggacctgtcggagaaggtggtctaccggcgcttcacggaga

SEQ ID NO: 15449 - RNA, 67 nt, synthetic construct
  source 1..67: mol_type = other RNA
gtatacatgttcctggtgaaatggcaggacctgtcggagaaggtggtctaccggcgcttcaccgaga

SEQ ID NO: 15450 - RNA, 67 nt, synthetic construct
  source 1..67: mol_type = other RNA
gtctacatgttcctggtgaaatggcaggacctgtcggagaaggtggtctaccggcgcttcactgaga

SEQ ID NO: 15451 - RNA, 67 nt, synthetic construct
  source 1..67: mol_type = other RNA
gtgtacatgttcctggtgaaatggcaggacctgtcggagaaggtggtctaccggcgcttcactgaga

SEQ ID NO: 15452 - RNA, 68 nt, synthetic construct
  source 1..68: mol_type = other RNA
ggtatacatgttcctggtgaaatggcaggacctgtcggagaaggtggtctaccggcgcttcacagaga

SEQ ID NO: 15453 - RNA, 68 nt, synthetic construct
  source 1..68: mol_type = other RNA
ggtatacatgttcctggtgaaatggcaggacctgtcggagaaggtggtctaccggcgcttcacggaga

SEQ ID NO: 15454 - RNA, 68 nt, synthetic construct
  source 1..68: mol_type = other RNA
ggtatacatgttcctggtgaaatggcaggacctgtcggagaaggtggtctaccggcgcttcaccgaga

SEQ ID NO: 15455 - RNA, 68 nt, synthetic construct
  source 1..68: mol_type = other RNA
ggtctacatgttcctggtgaaatggcaggacctgtcggagaaggtggtctaccggcgcttcaccgaga

SEQ ID NO: 15456 - RNA, 68 nt, synthetic construct
  source 1..68: mol_type = other RNA
ggtatacatgttcctggtgaaatggcaggacctgtcggagaaggtggtctaccggcgcttcactgaga

SEQ ID NO: 15457 - RNA, 68 nt, synthetic construct
  source 1..68: mol_type = other RNA
ggtttacatgttcctggtgaaatggcaggacctgtcggagaaggtggtctaccggcgcttcacagaga

SEQ ID NO: 15458 - RNA, 68 nt, synthetic construct
  source 1..68: mol_type = other RNA
ggtgtacatgttcctggtgaaatggcaggacctgtcggagaaggtggtctaccggcgcttcactgaga

SEQ ID NO: 15459 - RNA, 68 nt, synthetic construct
  source 1..68: mol_type = other RNA
ggtgtacatgttcctggtgaaatggcaggacctgtcggagaaggtggtctaccggcgcttcacggaga

SEQ ID NO: 15460 - RNA, 68 nt, synthetic construct
  source 1..68: mol_type = other RNA
ggtgtacatgttcctggtgaaatggcaggacctgtcggagaaggtggtctaccggcgcttcacagaga

SEQ ID NO: 15461 - RNA, 68 nt, synthetic construct
  source 1..68: mol_type = other RNA
ggtttacatgttcctggtgaaatggcaggacctgtcggagaaggtggtctaccggcgcttcaccgaga

SEQ ID NO: 15462 - RNA, 68 nt, synthetic construct
  source 1..68: mol_type = other RNA
ggtctacatgttcctggtgaaatggcaggacctgtcggagaaggtggtctaccggcgcttcactgaga

SEQ ID NO: 15463 - RNA, 68 nt, synthetic construct
  source 1..68: mol_type = other RNA
ggtctacatgttcctggtgaaatggcaggacctgtcggagaaggtggtctaccggcgcttcacggaga

SEQ ID NO: 15464 - RNA, 68 nt, synthetic construct
  source 1..68: mol_type = other RNA
ggtttacatgttcctggtgaaatggcaggacctgtcggagaaggtggtctaccggcgcttcactgaga

SEQ ID NO: 15465 - RNA, 68 nt, synthetic construct
  source 1..68: mol_type = other RNA
ggtgtacatgttcctggtgaaatggcaggacctgtcggagaaggtggtctaccggcgcttcaccgaga

SEQ ID NO: 15466 - RNA, 68 nt, synthetic construct
  source 1..68: mol_type = other RNA
ggtctacatgttcctggtgaaatggcaggacctgtcggagaaggtggtctaccggcgcttcacagaga

SEQ ID NO: 15467 - RNA, 68 nt, synthetic construct
  source 1..68: mol_type = other RNA
ggtttacatgttcctggtgaaatggcaggacctgtcggagaaggtggtctaccggcgcttcacggaga

SEQ ID NO: 15468 - RNA, 69 nt, synthetic construct
  source 1..69: mol_type = other RNA
aggtgtacatgttcctggtgaaatggcaggacctgtcggagaaggtggtctaccggcgcttcacagaga

SEQ ID NO: 15469 - RNA, 69 nt, synthetic construct
  source 1..69: mol_type = other RNA
aggtgtacatgttcctggtgaaatggcaggacctgtcggagaaggtggtctaccggcgcttcacggaga

SEQ ID NO: 15470 - RNA, 69 nt, synthetic construct
  source 1..69: mol_type = other RNA
aggtttacatgttcctggtgaaatggcaggacctgtcggagaaggtggtctaccggcgcttcactgaga

SEQ ID NO: 15471 - RNA, 69 nt, synthetic construct
  source 1..69: mol_type = other RNA
aggtttacatgttcctggtgaaatggcaggacctgtcggagaaggtggtctaccggcgcttcacggaga

SEQ ID NO: 15472 - RNA, 69 nt, synthetic construct
  source 1..69: mol_type = other RNA
aggtttacatgttcctggtgaaatggcaggacctgtcggagaaggtggtctaccggcgcttcaccgaga

SEQ ID NO: 15473 - RNA, 69 nt, synthetic construct
  source 1..69: mol_type = other RNA
aggtttacatgttcctggtgaaatggcaggacctgtcggagaaggtggtctaccggcgcttcacagaga

SEQ ID NO: 15474 - RNA, 69 nt, synthetic construct
  source 1..69: mol_type = other RNA
aggtgtacatgttcctggtgaaatggcaggacctgtcggagaaggtggtctaccggcgcttcaccgaga

SEQ ID NO: 15475 - RNA, 69 nt, synthetic construct
  source 1..69: mol_type = other RNA
aggtctacatgttcctggtgaaatggcaggacctgtcggagaaggtggtctaccggcgcttcacagaga

SEQ ID NO: 15476 - RNA, 69 nt, synthetic construct
  source 1..69: mol_type = other RNA
aggtctacatgttcctggtgaaatggcaggacctgtcggagaaggtggtctaccggcgcttcactgaga

SEQ ID NO: 15477 - RNA, 69 nt, synthetic construct
  source 1..69: mol_type = other RNA
aggtgtacatgttcctggtgaaatggcaggacctgtcggagaaggtggtctaccggcgcttcactgaga

SEQ ID NO: 15478 - RNA, 69 nt, synthetic construct
  source 1..69: mol_type = other RNA
aggtctacatgttcctggtgaaatggcaggacctgtcggagaaggtggtctaccggcgcttcaccgaga

SEQ ID NO: 15479 - RNA, 69 nt, synthetic construct
  source 1..69: mol_type = other RNA
aggtatacatgttcctggtgaaatggcaggacctgtcggagaaggtggtctaccggcgcttcactgaga

SEQ ID NO: 15480 - RNA, 69 nt, synthetic construct
  source 1..69: mol_type = other RNA
aggtatacatgttcctggtgaaatggcaggacctgtcggagaaggtggtctaccggcgcttcacggaga

SEQ ID NO: 15481 - RNA, 69 nt, synthetic construct
  source 1..69: mol_type = other RNA
aggtatacatgttcctggtgaaatggcaggacctgtcggagaaggtggtctaccggcgcttcaccgaga

SEQ ID NO: 15482 - RNA, 69 nt, synthetic construct
  source 1..69: mol_type = other RNA
aggtatacatgttcctggtgaaatggcaggacctgtcggagaaggtggtctaccggcgcttcacagaga

SEQ ID NO: 15483 - RNA, 69 nt, synthetic construct
  source 1..69: mol_type = other RNA
aggtctacatgttcctggtgaaatggcaggacctgtcggagaaggtggtctaccggcgcttcacggaga

SEQ ID NO: 15484 - RNA, 70 nt, synthetic construct
  source 1..70: mol_type = other RNA
caggtctacatgttcctggtgaaatggcaggacctgtcggagaaggtggtctaccggcgcttcaccgaga

SEQ ID NO: 15485 - RNA, 70 nt, synthetic construct
  source 1..70: mol_type = other RNA
caggtttacatgttcctggtgaaatggcaggacctgtcggagaaggtggtctaccggcgcttcaccgaga

SEQ ID NO: 15486 - RNA, 70 nt, synthetic construct
  source 1..70: mol_type = other RNA
caggtctacatgttcctggtgaaatggcaggacctgtcggagaaggtggtctaccggcgcttcacggaga

SEQ ID NO: 15487 - RNA, 70 nt, synthetic construct
  source 1..70: mol_type = other RNA
caggtatacatgttcctggtgaaatggcaggacctgtcggagaaggtggtctaccggcgcttcacagaga

SEQ ID NO: 15488 - RNA, 70 nt, synthetic construct
  source 1..70: mol_type = other RNA
caggtatacatgttcctggtgaaatggcaggacctgtcggagaaggtggtctaccggcgcttcaccgaga

SEQ ID NO: 15489 - RNA, 70 nt, synthetic construct
  source 1..70: mol_type = other RNA
caggtatacatgttcctggtgaaatggcaggacctgtcggagaaggtggtctaccggcgcttcactgaga

SEQ ID NO: 15490 - RNA, 70 nt, synthetic construct
  source 1..70: mol_type = other RNA
caggtctacatgttcctggtgaaatggcaggacctgtcggagaaggtggtctaccggcgcttcacagaga

SEQ ID NO: 15491 - RNA, 70 nt, synthetic construct
  source 1..70: mol_type = other RNA
caggtgtacatgttcctggtgaaatggcaggacctgtcggagaaggtggtctaccggcgcttcactgaga

SEQ ID NO: 15492 - RNA, 70 nt, synthetic construct
  source 1..70: mol_type = other RNA
caggtctacatgttcctggtgaaatggcaggacctgtcggagaaggtggtctaccggcgcttcactgaga

SEQ ID NO: 15493 - RNA, 70 nt, synthetic construct
  source 1..70: mol_type = other RNA
caggtgtacatgttcctggtgaaatggcaggacctgtcggagaaggtggtctaccggcgcttcacagaga

SEQ ID NO: 15494 - RNA, 70 nt, synthetic construct
  source 1..70: mol_type = other RNA
caggtttacatgttcctggtgaaatggcaggacctgtcggagaaggtggtctaccggcgcttcactgaga

SEQ ID NO: 15495 - RNA, 70 nt, synthetic construct
  source 1..70: mol_type = other RNA
caggtttacatgttcctggtgaaatggcaggacctgtcggagaaggtggtctaccggcgcttcacggaga

SEQ ID NO: 15496 - RNA, 70 nt, synthetic construct
  source 1..70: mol_type = other RNA
caggtgtacatgttcctggtgaaatggcaggacctgtcggagaaggtggtctaccggcgcttcaccgaga

SEQ ID NO: 15497 - RNA, 70 nt, synthetic construct
  source 1..70: mol_type = other RNA
caggtgtacatgttcctggtgaaatggcaggacctgtcggagaaggtggtctaccggcgcttcacggaga

SEQ ID NO: 15498 - RNA, 70 nt, synthetic construct
  source 1..70: mol_type = other RNA
caggtttacatgttcctggtgaaatggcaggacctgtcggagaaggtggtctaccggcgcttcacagaga

SEQ ID NO: 15499 - RNA, 70 nt, synthetic construct
  source 1..70: mol_type = other RNA
caggtatacatgttcctggtgaaatggcaggacctgtcggagaaggtggtctaccggcgcttcacggaga

SEQ ID NO: 15500 - RNA, 71 nt, synthetic construct
  source 1..71: mol_type = other RNA
ccaggtctacatgttcctggtgaaatggcaggacctgtcggagaaggtggtctaccggcgcttcaccgaga

SEQ ID NO: 15501 - RNA, 71 nt, synthetic construct
  source 1..71: mol_type = other RNA
ccaggtctacatgttcctggtgaaatggcaggacctgtcggagaaggtggtctaccggcgcttcacggaga

SEQ ID NO: 15502 - RNA, 71 nt, synthetic construct
  source 1..71: mol_type = other RNA
ccaggtctacatgttcctggtgaaatggcaggacctgtcggagaaggtggtctaccggcgcttcactgaga

SEQ ID NO: 15503 - RNA, 71 nt, synthetic construct
  source 1..71: mol_type = other RNA
ccaggtgtacatgttcctggtgaaatggcaggacctgtcggagaaggtggtctaccggcgcttcacagaga

SEQ ID NO: 15504 - RNA, 71 nt, synthetic construct
  source 1..71: mol_type = other RNA
ccaggtgtacatgttcctggtgaaatggcaggacctgtcggagaaggtggtctaccggcgcttcaccgaga

SEQ ID NO: 15505 - RNA, 71 nt, synthetic construct
  source 1..71: mol_type = other RNA
ccaggtatacatgttcctggtgaaatggcaggacctgtcggagaaggtggtctaccggcgcttcacggaga

SEQ ID NO: 15506 - RNA, 71 nt, synthetic construct
  source 1..71: mol_type = other RNA
ccaggtgtacatgttcctggtgaaatggcaggacctgtcggagaaggtggtctaccggcgcttcactgaga

SEQ ID NO: 15507 - RNA, 71 nt, synthetic construct
  source 1..71: mol_type = other RNA
ccaggtatacatgttcctggtgaaatggcaggacctgtcggagaaggtggtctaccggcgcttcacagaga

SEQ ID NO: 15508 - RNA, 71 nt, synthetic construct
  source 1..71: mol_type = other RNA
ccaggtttacatgttcctggtgaaatggcaggacctgtcggagaaggtggtctaccggcgcttcacagaga

SEQ ID NO: 15509 - RNA, 71 nt, synthetic construct
  source 1..71: mol_type = other RNA
ccaggtttacatgttcctggtgaaatggcaggacctgtcggagaaggtggtctaccggcgcttcaccgaga

SEQ ID NO: 15510 - RNA, 71 nt, synthetic construct
  source 1..71: mol_type = other RNA
ccaggtttacatgttcctggtgaaatggcaggacctgtcggagaaggtggtctaccggcgcttcactgaga

SEQ ID NO: 15511 - RNA, 71 nt, synthetic construct
  source 1..71: mol_type = other RNA
ccaggtgtacatgttcctggtgaaatggcaggacctgtcggagaaggtggtctaccggcgcttcacggaga

SEQ ID NO: 15512 - RNA, 71 nt, synthetic construct
  source 1..71: mol_type = other RNA
ccaggtctacatgttcctggtgaaatggcaggacctgtcggagaaggtggtctaccggcgcttcacagaga

SEQ ID NO: 15513 - RNA, 71 nt, synthetic construct
  source 1..71: mol_type = other RNA
ccaggtatacatgttcctggtgaaatggcaggacctgtcggagaaggtggtctaccggcgcttcactgaga

SEQ ID NO: 15514 - RNA, 71 nt, synthetic construct
  source 1..71: mol_type = other RNA
ccaggtatacatgttcctggtgaaatggcaggacctgtcggagaaggtggtctaccggcgcttcaccgaga

SEQ ID NO: 15515 - RNA, 71 nt, synthetic construct
  source 1..71: mol_type = other RNA
ccaggtttacatgttcctggtgaaatggcaggacctgtcggagaaggtggtctaccggcgcttcacggaga

SEQ ID NO: 15516 - RNA, 72 nt, synthetic construct
  source 1..72: mol_type = other RNA
cccaggtatacatgttcctggtgaaatggcaggacctgtcggagaaggtggtctaccggcgcttcacagaga

SEQ ID NO: 15517 - RNA, 72 nt, synthetic construct
  source 1..72: mol_type = other RNA
cccaggtctacatgttcctggtgaaatggcaggacctgtcggagaaggtggtctaccggcgcttcacagaga

SEQ ID NO: 15518 - RNA, 72 nt, synthetic construct
  source 1..72: mol_type = other RNA
cccaggtgtacatgttcctggtgaaatggcaggacctgtcggagaaggtggtctaccggcgcttcacagaga

SEQ ID NO: 15519 - RNA, 72 nt, synthetic construct
  source 1..72: mol_type = other RNA
cccaggtctacatgttcctggtgaaatggcaggacctgtcggagaaggtggtctaccggcgcttcaccgaga

SEQ ID NO: 15520 - RNA, 72 nt, synthetic construct
  source 1..72: mol_type = other RNA
cccaggtctacatgttcctggtgaaatggcaggacctgtcggagaaggtggtctaccggcgcttcacggaga

SEQ ID NO: 15521 - RNA, 72 nt, synthetic construct
  source 1..72: mol_type = other RNA
cccaggtatacatgttcctggtgaaatggcaggacctgtcggagaaggtggtctaccggcgcttcacggaga

SEQ ID NO: 15522 - RNA, 72 nt, synthetic construct
  source 1..72: mol_type = other RNA
cccaggtatacatgttcctggtgaaatggcaggacctgtcggagaaggtggtctaccggcgcttcactgaga

SEQ ID NO: 15523 - RNA, 72 nt, synthetic construct
  source 1..72: mol_type = other RNA
cccaggtatacatgttcctggtgaaatggcaggacctgtcggagaaggtggtctaccggcgcttcaccgaga

SEQ ID NO: 15524 - RNA, 72 nt, synthetic construct
  source 1..72: mol_type = other RNA
cccaggtctacatgttcctggtgaaatggcaggacctgtcggagaaggtggtctaccggcgcttcactgaga

SEQ ID NO: 15525 - RNA, 72 nt, synthetic construct
  source 1..72: mol_type = other RNA
cccaggtgtacatgttcctggtgaaatggcaggacctgtcggagaaggtggtctaccggcgcttcacggaga

SEQ ID NO: 15526 - RNA, 72 nt, synthetic construct
  source 1..72: mol_type = other RNA
cccaggtttacatgttcctggtgaaatggcaggacctgtcggagaaggtggtctaccggcgcttcactgaga

SEQ ID NO: 15527 - RNA, 72 nt, synthetic construct
  source 1..72: mol_type = other RNA
cccaggtgtacatgttcctggtgaaatggcaggacctgtcggagaaggtggtctaccggcgcttcaccgaga

SEQ ID NO: 15528 - RNA, 72 nt, synthetic construct
  source 1..72: mol_type = other RNA
cccaggtgtacatgttcctggtgaaatggcaggacctgtcggagaaggtggtctaccggcgcttcactgaga

SEQ ID NO: 15529 - RNA, 72 nt, synthetic construct
  source 1..72: mol_type = other RNA
cccaggtttacatgttcctggtgaaatggcaggacctgtcggagaaggtggtctaccggcgcttcacagaga

SEQ ID NO: 15530 - RNA, 72 nt, synthetic construct
  source 1..72: mol_type = other RNA
cccaggtttacatgttcctggtgaaatggcaggacctgtcggagaaggtggtctaccggcgcttcaccgaga

SEQ ID NO: 15531 - RNA, 72 nt, synthetic construct
  source 1..72: mol_type = other RNA
cccaggtttacatgttcctggtgaaatggcaggacctgtcggagaaggtggtctaccggcgcttcacggaga

SEQ ID NO: 15532 - RNA, 73 nt, synthetic construct
  source 1..73: mol_type = other RNA
ccccaggtttacatgttcctggtgaaatggcaggacctgtcggagaaggtggtctaccggcgcttcactgaga

SEQ ID NO: 15533 - RNA, 73 nt, synthetic construct
  source 1..73: mol_type = other RNA
ccccaggtctacatgttcctggtgaaatggcaggacctgtcggagaaggtggtctaccggcgcttcaccgaga

SEQ ID NO: 15534 - RNA, 73 nt, synthetic construct
  source 1..73: mol_type = other RNA
ccccaggtttacatgttcctggtgaaatggcaggacctgtcggagaaggtggtctaccggcgcttcaccgaga

SEQ ID NO: 15535 - RNA, 73 nt, synthetic construct
  source 1..73: mol_type = other RNA
ccccaggtttacatgttcctggtgaaatggcaggacctgtcggagaaggtggtctaccggcgcttcacggaga

SEQ ID NO: 15536 - RNA, 73 nt, synthetic construct
  source 1..73: mol_type = other RNA
ccccaggtttacatgttcctggtgaaatggcaggacctgtcggagaaggtggtctaccggcgcttcacagaga

SEQ ID NO: 15537 - RNA, 73 nt, synthetic construct
  source 1..73: mol_type = other RNA
ccccaggtgtacatgttcctggtgaaatggcaggacctgtcggagaaggtggtctaccggcgcttcactgaga

SEQ ID NO: 15538 - RNA, 73 nt, synthetic construct
  source 1..73: mol_type = other RNA
ccccaggtgtacatgttcctggtgaaatggcaggacctgtcggagaaggtggtctaccggcgcttcacggaga

SEQ ID NO: 15539 - RNA, 73 nt, synthetic construct
  source 1..73: mol_type = other RNA
ccccaggtgtacatgttcctggtgaaatggcaggacctgtcggagaaggtggtctaccggcgcttcacagaga

SEQ ID NO: 15540 - RNA, 73 nt, synthetic construct
  source 1..73: mol_type = other RNA
ccccaggtgtacatgttcctggtgaaatggcaggacctgtcggagaaggtggtctaccggcgcttcaccgaga

SEQ ID NO: 15541 - RNA, 73 nt, synthetic construct
  source 1..73: mol_type = other RNA
ccccaggtctacatgttcctggtgaaatggcaggacctgtcggagaaggtggtctaccggcgcttcacagaga

SEQ ID NO: 15542 - RNA, 73 nt, synthetic construct
  source 1..73: mol_type = other RNA
ccccaggtatacatgttcctggtgaaatggcaggacctgtcggagaaggtggtctaccggcgcttcactgaga

SEQ ID NO: 15543 - RNA, 73 nt, synthetic construct
  source 1..73: mol_type = other RNA
ccccaggtatacatgttcctggtgaaatggcaggacctgtcggagaaggtggtctaccggcgcttcacggaga

SEQ ID NO: 15544 - RNA, 73 nt, synthetic construct
  source 1..73: mol_type = other RNA
ccccaggtatacatgttcctggtgaaatggcaggacctgtcggagaaggtggtctaccggcgcttcaccgaga

SEQ ID NO: 15545 - RNA, 73 nt, synthetic construct
  source 1..73: mol_type = other RNA
ccccaggtatacatgttcctggtgaaatggcaggacctgtcggagaaggtggtctaccggcgcttcacagaga

SEQ ID NO: 15546 - RNA, 73 nt, synthetic construct
  source 1..73: mol_type = other RNA
ccccaggtctacatgttcctggtgaaatggcaggacctgtcggagaaggtggtctaccggcgcttcactgaga

SEQ ID NO: 15547 - RNA, 73 nt, synthetic construct
  source 1..73: mol_type = other RNA
ccccaggtctacatgttcctggtgaaatggcaggacctgtcggagaaggtggtctaccggcgcttcacggaga

SEQ ID NO: 15548 - RNA, 74 nt, synthetic construct
  source 1..74: mol_type = other RNA
cccccaggtgtacatgttcctggtgaaatggcaggacctgtcggagaaggtggtctaccggcgcttcaccgaga

SEQ ID NO: 15549 - RNA, 74 nt, synthetic construct
  source 1..74: mol_type = other RNA
cccccaggtatacatgttcctggtgaaatggcaggacctgtcggagaaggtggtctaccggcgcttcaccgaga

SEQ ID NO: 15550 - RNA, 74 nt, synthetic construct
  source 1..74: mol_type = other RNA
cccccaggtgtacatgttcctggtgaaatggcaggacctgtcggagaaggtggtctaccggcgcttcacagaga

SEQ ID NO: 15551 - RNA, 74 nt, synthetic construct
  source 1..74: mol_type = other RNA
cccccaggtatacatgttcctggtgaaatggcaggacctgtcggagaaggtggtctaccggcgcttcacagaga

SEQ ID NO: 15552 - RNA, 74 nt, synthetic construct
  source 1..74: mol_type = other RNA
cccccaggtctacatgttcctggtgaaatggcaggacctgtcggagaaggtggtctaccggcgcttcaccgaga

SEQ ID NO: 15553 - RNA, 74 nt, synthetic construct
  source 1..74: mol_type = other RNA
cccccaggtctacatgttcctggtgaaatggcaggacctgtcggagaaggtggtctaccggcgcttcactgaga

SEQ ID NO: 15554 - RNA, 74 nt, synthetic construct
  source 1..74: mol_type = other RNA
cccccaggtgtacatgttcctggtgaaatggcaggacctgtcggagaaggtggtctaccggcgcttcacggaga

SEQ ID NO: 15555 - RNA, 74 nt, synthetic construct
  source 1..74: mol_type = other RNA
cccccaggtgtacatgttcctggtgaaatggcaggacctgtcggagaaggtggtctaccggcgcttcactgaga

SEQ ID NO: 15556 - RNA, 74 nt, synthetic construct
  source 1..74: mol_type = other RNA
cccccaggtttacatgttcctggtgaaatggcaggacctgtcggagaaggtggtctaccggcgcttcaccgaga

SEQ ID NO: 15557 - RNA, 74 nt, synthetic construct
  source 1..74: mol_type = other RNA
cccccaggtttacatgttcctggtgaaatggcaggacctgtcggagaaggtggtctaccggcgcttcacagaga

SEQ ID NO: 15558 - RNA, 74 nt, synthetic construct
  source 1..74: mol_type = other RNA
cccccaggtctacatgttcctggtgaaatggcaggacctgtcggagaaggtggtctaccggcgcttcacggaga

SEQ ID NO: 15559 - RNA, 74 nt, synthetic construct
  source 1..74: mol_type = other RNA
cccccaggtctacatgttcctggtgaaatggcaggacctgtcggagaaggtggtctaccggcgcttcacagaga

SEQ ID NO: 15560 - RNA, 74 nt, synthetic construct
  source 1..74: mol_type = other RNA
cccccaggtatacatgttcctggtgaaatggcaggacctgtcggagaaggtggtctaccggcgcttcacggaga

SEQ ID NO: 15561 - RNA, 74 nt, synthetic construct
  source 1..74: mol_type = other RNA
cccccaggtatacatgttcctggtgaaatggcaggacctgtcggagaaggtggtctaccggcgcttcactgaga

SEQ ID NO: 15562 - RNA, 74 nt, synthetic construct
  source 1..74: mol_type = other RNA
cccccaggtttacatgttcctggtgaaatggcaggacctgtcggagaaggtggtctaccggcgcttcactgaga

SEQ ID NO: 15563 - RNA, 74 nt, synthetic construct
  source 1..74: mol_type = other RNA
cccccaggtttacatgttcctggtgaaatggcaggacctgtcggagaaggtggtctaccggcgcttcacggaga

SEQ ID NO: 15564 - RNA, 75 nt, synthetic construct
  source 1..75: mol_type = other RNA
tcccccaggtgtacatgttcctggtgaaatggcaggacctgtcggagaaggtggtctaccggcgcttcaccgaga

SEQ ID NO: 15565 - RNA, 75 nt, synthetic construct
  source 1..75: mol_type = other RNA
tcccccaggtgtacatgttcctggtgaaatggcaggacctgtcggagaaggtggtctaccggcgcttcactgaga

SEQ ID NO: 15566 - RNA, 75 nt, synthetic construct
  source 1..75: mol_type = other RNA
tcccccaggtttacatgttcctggtgaaatggcaggacctgtcggagaaggtggtctaccggcgcttcactgaga

SEQ ID NO: 15567 - RNA, 75 nt, synthetic construct
  source 1..75: mol_type = other RNA
tcccccaggtttacatgttcctggtgaaatggcaggacctgtcggagaaggtggtctaccggcgcttcacggaga

SEQ ID NO: 15568 - RNA, 75 nt, synthetic construct
  source 1..75: mol_type = other RNA
tcccccaggtttacatgttcctggtgaaatggcaggacctgtcggagaaggtggtctaccggcgcttcaccgaga

SEQ ID NO: 15569 - RNA, 75 nt, synthetic construct
  source 1..75: mol_type = other RNA
tcccccaggtttacatgttcctggtgaaatggcaggacctgtcggagaaggtggtctaccggcgcttcacagaga

SEQ ID NO: 15570 - RNA, 75 nt, synthetic construct
  source 1..75: mol_type = other RNA
tcccccaggtgtacatgttcctggtgaaatggcaggacctgtcggagaaggtggtctaccggcgcttcacggaga

SEQ ID NO: 15571 - RNA, 75 nt, synthetic construct
  source 1..75: mol_type = other RNA
tcccccaggtctacatgttcctggtgaaatggcaggacctgtcggagaaggtggtctaccggcgcttcacagaga

SEQ ID NO: 15572 - RNA, 75 nt, synthetic construct
  source 1..75: mol_type = other RNA
tcccccaggtctacatgttcctggtgaaatggcaggacctgtcggagaaggtggtctaccggcgcttcactgaga

SEQ ID NO: 15573 - RNA, 75 nt, synthetic construct
  source 1..75: mol_type = other RNA
tcccccaggtgtacatgttcctggtgaaatggcaggacctgtcggagaaggtggtctaccggcgcttcacagaga

SEQ ID NO: 15574 - RNA, 75 nt, synthetic construct
  source 1..75: mol_type = other RNA
tcccccaggtctacatgttcctggtgaaatggcaggacctgtcggagaaggtggtctaccggcgcttcaccgaga

SEQ ID NO: 15575 - RNA, 75 nt, synthetic construct
  source 1..75: mol_type = other RNA
tcccccaggtatacatgttcctggtgaaatggcaggacctgtcggagaaggtggtctaccggcgcttcactgaga

SEQ ID NO: 15576 - RNA, 75 nt, synthetic construct
  source 1..75: mol_type = other RNA
tcccccaggtatacatgttcctggtgaaatggcaggacctgtcggagaaggtggtctaccggcgcttcacggaga

SEQ ID NO: 15577 - RNA, 75 nt, synthetic construct
  source 1..75: mol_type = other RNA
tcccccaggtatacatgttcctggtgaaatggcaggacctgtcggagaaggtggtctaccggcgcttcaccgaga

SEQ ID NO: 15578 - RNA, 75 nt, synthetic construct
  source 1..75: mol_type = other RNA
tcccccaggtatacatgttcctggtgaaatggcaggacctgtcggagaaggtggtctaccggcgcttcacagaga

SEQ ID NO: 15579 - RNA, 75 nt, synthetic construct
  source 1..75: mol_type = other RNA
tcccccaggtctacatgttcctggtgaaatggcaggacctgtcggagaaggtggtctaccggcgcttcacggaga

SEQ ID NO: 15580 - RNA, 76 nt, synthetic construct
  source 1..76: mol_type = other RNA
ttcccccaggtctacatgttcctggtgaaatggcaggacctgtcggagaaggtggtctaccggcgcttcacagaga

SEQ ID NO: 15581 - RNA, 76 nt, synthetic construct
  source 1..76: mol_type = other RNA
ttcccccaggtatacatgttcctggtgaaatggcaggacctgtcggagaaggtggtctaccggcgcttcaccgaga

SEQ ID NO: 15582 - RNA, 76 nt, synthetic construct
  source 1..76: mol_type = other RNA
ttcccccaggtctacatgttcctggtgaaatggcaggacctgtcggagaaggtggtctaccggcgcttcactgaga

SEQ ID NO: 15583 - RNA, 76 nt, synthetic construct
  source 1..76: mol_type = other RNA
ttcccccaggtgtacatgttcctggtgaaatggcaggacctgtcggagaaggtggtctaccggcgcttcacagaga

SEQ ID NO: 15584 - RNA, 76 nt, synthetic construct
  source 1..76: mol_type = other RNA
ttcccccaggtctacatgttcctggtgaaatggcaggacctgtcggagaaggtggtctaccggcgcttcaccgaga

SEQ ID NO: 15585 - RNA, 76 nt, synthetic construct
  source 1..76: mol_type = other RNA
ttcccccaggtctacatgttcctggtgaaatggcaggacctgtcggagaaggtggtctaccggcgcttcacggaga

SEQ ID NO: 15586 - RNA, 76 nt, synthetic construct
  source 1..76: mol_type = other RNA
ttcccccaggtttacatgttcctggtgaaatggcaggacctgtcggagaaggtggtctaccggcgcttcaccgaga

SEQ ID NO: 15587 - RNA, 76 nt, synthetic construct
  source 1..76: mol_type = other RNA
ttcccccaggtatacatgttcctggtgaaatggcaggacctgtcggagaaggtggtctaccggcgcttcacagaga

SEQ ID NO: 15588 - RNA, 76 nt, synthetic construct
  source 1..76: mol_type = other RNA
ttcccccaggtatacatgttcctggtgaaatggcaggacctgtcggagaaggtggtctaccggcgcttcacggaga

SEQ ID NO: 15589 - RNA, 76 nt, synthetic construct
  source 1..76: mol_type = other RNA
ttcccccaggtatacatgttcctggtgaaatggcaggacctgtcggagaaggtggtctaccggcgcttcactgaga

SEQ ID NO: 15590 - RNA, 76 nt, synthetic construct
  source 1..76: mol_type = other RNA
ttcccccaggtttacatgttcctggtgaaatggcaggacctgtcggagaaggtggtctaccggcgcttcacagaga

SEQ ID NO: 15591 - RNA, 76 nt, synthetic construct
  source 1..76: mol_type = other RNA
ttcccccaggtgtacatgttcctggtgaaatggcaggacctgtcggagaaggtggtctaccggcgcttcacggaga

SEQ ID NO: 15592 - RNA, 76 nt, synthetic construct
  source 1..76: mol_type = other RNA
ttcccccaggtttacatgttcctggtgaaatggcaggacctgtcggagaaggtggtctaccggcgcttcacggaga

SEQ ID NO: 15593 - RNA, 76 nt, synthetic construct
  source 1..76: mol_type = other RNA
ttcccccaggtgtacatgttcctggtgaaatggcaggacctgtcggagaaggtggtctaccggcgcttcaccgaga

SEQ ID NO: 15594 - RNA, 76 nt, synthetic construct
  source 1..76: mol_type = other RNA
ttcccccaggtgtacatgttcctggtgaaatggcaggacctgtcggagaaggtggtctaccggcgcttcactgaga

SEQ ID NO: 15595 - RNA, 76 nt, synthetic construct
  source 1..76: mol_type = other RNA
ttcccccaggtttacatgttcctggtgaaatggcaggacctgtcggagaaggtggtctaccggcgcttcactgaga

SEQ ID NO: 15596 - RNA, 77 nt, synthetic construct
  source 1..77: mol_type = other RNA
tttcccccaggtatacatgttcctggtgaaatggcaggacctgtcggagaaggtggtctaccggcgcttcacggaga

SEQ ID NO: 15597 - RNA, 77 nt, synthetic construct
  source 1..77: mol_type = other RNA
tttcccccaggtctacatgttcctggtgaaatggcaggacctgtcggagaaggtggtctaccggcgcttcaccgaga

SEQ ID NO: 15598 - RNA, 77 nt, synthetic construct
  source 1..77: mol_type = other RNA
tttcccccaggtatacatgttcctggtgaaatggcaggacctgtcggagaaggtggtctaccggcgcttcaccgaga

SEQ ID NO: 15599 - RNA, 77 nt, synthetic construct
  source 1..77: mol_type = other RNA
tttcccccaggtatacatgttcctggtgaaatggcaggacctgtcggagaaggtggtctaccggcgcttcacagaga

SEQ ID NO: 15600 - RNA, 77 nt, synthetic construct
  source 1..77: mol_type = other RNA
tttcccccaggtgtacatgttcctggtgaaatggcaggacctgtcggagaaggtggtctaccggcgcttcacagaga

SEQ ID NO: 15601 - RNA, 77 nt, synthetic construct
  source 1..77: mol_type = other RNA
tttcccccaggtctacatgttcctggtgaaatggcaggacctgtcggagaaggtggtctaccggcgcttcacggaga

SEQ ID NO: 15602 - RNA, 77 nt, synthetic construct
  source 1..77: mol_type = other RNA
tttcccccaggtgtacatgttcctggtgaaatggcaggacctgtcggagaaggtggtctaccggcgcttcaccgaga

SEQ ID NO: 15603 - RNA, 77 nt, synthetic construct
  source 1..77: mol_type = other RNA
tttcccccaggtgtacatgttcctggtgaaatggcaggacctgtcggagaaggtggtctaccggcgcttcactgaga

SEQ ID NO: 15604 - RNA, 77 nt, synthetic construct
  source 1..77: mol_type = other RNA
tttcccccaggtttacatgttcctggtgaaatggcaggacctgtcggagaaggtggtctaccggcgcttcacagaga

SEQ ID NO: 15605 - RNA, 77 nt, synthetic construct
  source 1..77: mol_type = other RNA
tttcccccaggtttacatgttcctggtgaaatggcaggacctgtcggagaaggtggtctaccggcgcttcacggaga

SEQ ID NO: 15606 - RNA, 77 nt, synthetic construct
  source 1..77: mol_type = other RNA
tttcccccaggtttacatgttcctggtgaaatggcaggacctgtcggagaaggtggtctaccggcgcttcactgaga

SEQ ID NO: 15607 - RNA, 77 nt, synthetic construct
  source 1..77: mol_type = other RNA
tttcccccaggtgtacatgttcctggtgaaatggcaggacctgtcggagaaggtggtctaccggcgcttcacggaga

SEQ ID NO: 15608 - RNA, 77 nt, synthetic construct
  source 1..77: mol_type = other RNA
tttcccccaggtttacatgttcctggtgaaatggcaggacctgtcggagaaggtggtctaccggcgcttcaccgaga

SEQ ID NO: 15609 - RNA, 77 nt, synthetic construct
  source 1..77: mol_type = other RNA
tttcccccaggtctacatgttcctggtgaaatggcaggacctgtcggagaaggtggtctaccggcgcttcacagaga

SEQ ID NO: 15610 - RNA, 77 nt, synthetic construct
  source 1..77: mol_type = other RNA
tttcccccaggtctacatgttcctggtgaaatggcaggacctgtcggagaaggtggtctaccggcgcttcactgaga

SEQ ID NO: 15611 - RNA, 77 nt, synthetic construct
  source 1..77: mol_type = other RNA
tttcccccaggtatacatgttcctggtgaaatggcaggacctgtcggagaaggtggtctaccggcgcttcactgaga

SEQ ID NO: 15612 - RNA, 78 nt, synthetic construct
  source 1..78: mol_type = other RNA
ctttcccccaggtctacatgttcctggtgaaatggcaggacctgtcggagaaggtggtctaccggcgcttcactgaga

SEQ ID NO: 15613 - RNA, 78 nt, synthetic construct
  source 1..78: mol_type = other RNA
ctttcccccaggtttacatgttcctggtgaaatggcaggacctgtcggagaaggtggtctaccggcgcttcactgaga

SEQ ID NO: 15614 - RNA, 78 nt, synthetic construct
  source 1..78: mol_type = other RNA
ctttcccccaggtttacatgttcctggtgaaatggcaggacctgtcggagaaggtggtctaccggcgcttcacggaga

SEQ ID NO: 15615 - RNA, 78 nt, synthetic construct
  source 1..78: mol_type = other RNA
ctttcccccaggtttacatgttcctggtgaaatggcaggacctgtcggagaaggtggtctaccggcgcttcaccgaga

SEQ ID NO: 15616 - RNA, 78 nt, synthetic construct
  source 1..78: mol_type = other RNA
ctttcccccaggtgtacatgttcctggtgaaatggcaggacctgtcggagaaggtggtctaccggcgcttcactgaga

SEQ ID NO: 15617 - RNA, 78 nt, synthetic construct
  source 1..78: mol_type = other RNA
ctttcccccaggtgtacatgttcctggtgaaatggcaggacctgtcggagaaggtggtctaccggcgcttcacggaga

SEQ ID NO: 15618 - RNA, 78 nt, synthetic construct
  source 1..78: mol_type = other RNA
ctttcccccaggtgtacatgttcctggtgaaatggcaggacctgtcggagaaggtggtctaccggcgcttcaccgaga

SEQ ID NO: 15619 - RNA, 78 nt, synthetic construct
  source 1..78: mol_type = other RNA
ctttcccccaggtttacatgttcctggtgaaatggcaggacctgtcggagaaggtggtctaccggcgcttcacagaga

SEQ ID NO: 15620 - RNA, 78 nt, synthetic construct
  source 1..78: mol_type = other RNA
ctttcccccaggtgtacatgttcctggtgaaatggcaggacctgtcggagaaggtggtctaccggcgcttcacagaga

SEQ ID NO: 15621 - RNA, 78 nt, synthetic construct
  source 1..78: mol_type = other RNA
ctttcccccaggtctacatgttcctggtgaaatggcaggacctgtcggagaaggtggtctaccggcgcttcacagaga

SEQ ID NO: 15622 - RNA, 78 nt, synthetic construct
  source 1..78: mol_type = other RNA
ctttcccccaggtatacatgttcctggtgaaatggcaggacctgtcggagaaggtggtctaccggcgcttcacggaga

SEQ ID NO: 15623 - RNA, 78 nt, synthetic construct
  source 1..78: mol_type = other RNA
ctttcccccaggtatacatgttcctggtgaaatggcaggacctgtcggagaaggtggtctaccggcgcttcactgaga

SEQ ID NO: 15624 - RNA, 78 nt, synthetic construct
  source 1..78: mol_type = other RNA
ctttcccccaggtatacatgttcctggtgaaatggcaggacctgtcggagaaggtggtctaccggcgcttcaccgaga

SEQ ID NO: 15625 - RNA, 78 nt, synthetic construct
  source 1..78: mol_type = other RNA
ctttcccccaggtatacatgttcctggtgaaatggcaggacctgtcggagaaggtggtctaccggcgcttcacagaga

SEQ ID NO: 15626 - RNA, 78 nt, synthetic construct
  source 1..78: mol_type = other RNA
ctttcccccaggtctacatgttcctggtgaaatggcaggacctgtcggagaaggtggtctaccggcgcttcacggaga

SEQ ID NO: 15627 - RNA, 78 nt, synthetic construct
  source 1..78: mol_type = other RNA
ctttcccccaggtctacatgttcctggtgaaatggcaggacctgtcggagaaggtggtctaccggcgcttcaccgaga

SEQ ID NO: 15628 - RNA, 79 nt, synthetic construct
  source 1..79: mol_type = other RNA
gctttcccccaggtgtacatgttcctggtgaaatggcaggacctgtcggagaaggtggtctaccggcgcttcactgaga

SEQ ID NO: 15629 - RNA, 79 nt, synthetic construct
  source 1..79: mol_type = other RNA
gctttcccccaggtctacatgttcctggtgaaatggcaggacctgtcggagaaggtggtctaccggcgcttcacagaga

SEQ ID NO: 15630 - RNA, 79 nt, synthetic construct
  source 1..79: mol_type = other RNA
gctttcccccaggtgtacatgttcctggtgaaatggcaggacctgtcggagaaggtggtctaccggcgcttcacggaga

SEQ ID NO: 15631 - RNA, 79 nt, synthetic construct
  source 1..79: mol_type = other RNA
gctttcccccaggtgtacatgttcctggtgaaatggcaggacctgtcggagaaggtggtctaccggcgcttcaccgaga

SEQ ID NO: 15632 - RNA, 79 nt, synthetic construct
  source 1..79: mol_type = other RNA
gctttcccccaggtttacatgttcctggtgaaatggcaggacctgtcggagaaggtggtctaccggcgcttcacggaga

SEQ ID NO: 15633 - RNA, 79 nt, synthetic construct
  source 1..79: mol_type = other RNA
gctttcccccaggtttacatgttcctggtgaaatggcaggacctgtcggagaaggtggtctaccggcgcttcaccgaga

SEQ ID NO: 15634 - RNA, 79 nt, synthetic construct
  source 1..79: mol_type = other RNA
gctttcccccaggtttacatgttcctggtgaaatggcaggacctgtcggagaaggtggtctaccggcgcttcacagaga

SEQ ID NO: 15635 - RNA, 79 nt, synthetic construct
  source 1..79: mol_type = other RNA
gctttcccccaggtgtacatgttcctggtgaaatggcaggacctgtcggagaaggtggtctaccggcgcttcacagaga

SEQ ID NO: 15636 - RNA, 79 nt, synthetic construct
  source 1..79: mol_type = other RNA
gctttcccccaggtttacatgttcctggtgaaatggcaggacctgtcggagaaggtggtctaccggcgcttcactgaga

SEQ ID NO: 15637 - RNA, 79 nt, synthetic construct
  source 1..79: mol_type = other RNA
gctttcccccaggtctacatgttcctggtgaaatggcaggacctgtcggagaaggtggtctaccggcgcttcacggaga

SEQ ID NO: 15638 - RNA, 79 nt, synthetic construct
  source 1..79: mol_type = other RNA
gctttcccccaggtatacatgttcctggtgaaatggcaggacctgtcggagaaggtggtctaccggcgcttcactgaga

SEQ ID NO: 15639 - RNA, 79 nt, synthetic construct
  source 1..79: mol_type = other RNA
gctttcccccaggtatacatgttcctggtgaaatggcaggacctgtcggagaaggtggtctaccggcgcttcaccgaga

SEQ ID NO: 15640 - RNA, 79 nt, synthetic construct
  source 1..79: mol_type = other RNA
gctttcccccaggtatacatgttcctggtgaaatggcaggacctgtcggagaaggtggtctaccggcgcttcacagaga

SEQ ID NO: 15641 - RNA, 79 nt, synthetic construct
  source 1..79: mol_type = other RNA
gctttcccccaggtctacatgttcctggtgaaatggcaggacctgtcggagaaggtggtctaccggcgcttcactgaga

SEQ ID NO: 15642 - RNA, 79 nt, synthetic construct
  source 1..79: mol_type = other RNA
gctttcccccaggtctacatgttcctggtgaaatggcaggacctgtcggagaaggtggtctaccggcgcttcaccgaga

SEQ ID NO: 15643 - RNA, 79 nt, synthetic construct
  source 1..79: mol_type = other RNA
gctttcccccaggtatacatgttcctggtgaaatggcaggacctgtcggagaaggtggtctaccggcgcttcacggaga

SEQ ID NO: 15644 - RNA, 80 nt, synthetic construct
  source 1..80: mol_type = other RNA
ggctttcccccaggtatacatgttcctggtgaaatggcaggacctgtcggagaaggtggtctaccggcgcttcaccgaga

SEQ ID NO: 15645 - RNA, 80 nt, synthetic construct
  source 1..80: mol_type = other RNA
ggctttcccccaggtatacatgttcctggtgaaatggcaggacctgtcggagaaggtggtctaccggcgcttcacggaga

SEQ ID NO: 15646 - RNA, 80 nt, synthetic construct
  source 1..80: mol_type = other RNA
ggctttcccccaggtctacatgttcctggtgaaatggcaggacctgtcggagaaggtggtctaccggcgcttcacagaga

SEQ ID NO: 15647 - RNA, 80 nt, synthetic construct
  source 1..80: mol_type = other RNA
ggctttcccccaggtgtacatgttcctggtgaaatggcaggacctgtcggagaaggtggtctaccggcgcttcacagaga

SEQ ID NO: 15648 - RNA, 80 nt, synthetic construct
  source 1..80: mol_type = other RNA
ggctttcccccaggtctacatgttcctggtgaaatggcaggacctgtcggagaaggtggtctaccggcgcttcaccgaga

SEQ ID NO: 15649 - RNA, 80 nt, synthetic construct
  source 1..80: mol_type = other RNA
ggctttcccccaggtatacatgttcctggtgaaatggcaggacctgtcggagaaggtggtctaccggcgcttcacagaga

SEQ ID NO: 15650 - RNA, 80 nt, synthetic construct
  source 1..80: mol_type = other RNA
ggctttcccccaggtgtacatgttcctggtgaaatggcaggacctgtcggagaaggtggtctaccggcgcttcaccgaga

SEQ ID NO: 15651 - RNA, 80 nt, synthetic construct
  source 1..80: mol_type = other RNA
ggctttcccccaggtgtacatgttcctggtgaaatggcaggacctgtcggagaaggtggtctaccggcgcttcacggaga

SEQ ID NO: 15652 - RNA, 80 nt, synthetic construct
  source 1..80: mol_type = other RNA
ggctttcccccaggtttacatgttcctggtgaaatggcaggacctgtcggagaaggtggtctaccggcgcttcactgaga

SEQ ID NO: 15653 - RNA, 80 nt, synthetic construct
  source 1..80: mol_type = other RNA
ggctttcccccaggtttacatgttcctggtgaaatggcaggacctgtcggagaaggtggtctaccggcgcttcacggaga

SEQ ID NO: 15654 - RNA, 80 nt, synthetic construct
  source 1..80: mol_type = other RNA
ggctttcccccaggtttacatgttcctggtgaaatggcaggacctgtcggagaaggtggtctaccggcgcttcaccgaga

SEQ ID NO: 15655 - RNA, 80 nt, synthetic construct
  source 1..80: mol_type = other RNA
ggctttcccccaggtttacatgttcctggtgaaatggcaggacctgtcggagaaggtggtctaccggcgcttcacagaga

SEQ ID NO: 15656 - RNA, 80 nt, synthetic construct
  source 1..80: mol_type = other RNA
ggctttcccccaggtgtacatgttcctggtgaaatggcaggacctgtcggagaaggtggtctaccggcgcttcactgaga

SEQ ID NO: 15657 - RNA, 80 nt, synthetic construct
  source 1..80: mol_type = other RNA
ggctttcccccaggtctacatgttcctggtgaaatggcaggacctgtcggagaaggtggtctaccggcgcttcacggaga

SEQ ID NO: 15658 - RNA, 80 nt, synthetic construct
  source 1..80: mol_type = other RNA
ggctttcccccaggtctacatgttcctggtgaaatggcaggacctgtcggagaaggtggtctaccggcgcttcactgaga

SEQ ID NO: 15659 - RNA, 80 nt, synthetic construct
  source 1..80: mol_type = other RNA
ggctttcccccaggtatacatgttcctggtgaaatggcaggacctgtcggagaaggtggtctaccggcgcttcactgaga

SEQ ID NO: 15660 - RNA, 81 nt, synthetic construct
  source 1..81: mol_type = other RNA
tggctttcccccaggtgtacatgttcctggtgaaatggcaggacctgtcggagaaggtggtctaccggcgcttcaccgaga

SEQ ID NO: 15661 - RNA, 81 nt, synthetic construct
  source 1..81: mol_type = other RNA
tggctttcccccaggtgtacatgttcctggtgaaatggcaggacctgtcggagaaggtggtctaccggcgcttcacggaga

SEQ ID NO: 15662 - RNA, 81 nt, synthetic construct
  source 1..81: mol_type = other RNA
tggctttcccccaggtgtacatgttcctggtgaaatggcaggacctgtcggagaaggtggtctaccggcgcttcacagaga

SEQ ID NO: 15663 - RNA, 81 nt, synthetic construct
  source 1..81: mol_type = other RNA
tggctttcccccaggtgtacatgttcctggtgaaatggcaggacctgtcggagaaggtggtctaccggcgcttcactgaga

SEQ ID NO: 15664 - RNA, 81 nt, synthetic construct
  source 1..81: mol_type = other RNA
tggctttcccccaggtttacatgttcctggtgaaatggcaggacctgtcggagaaggtggtctaccggcgcttcactgaga

SEQ ID NO: 15665 - RNA, 81 nt, synthetic construct
  source 1..81: mol_type = other RNA
tggctttcccccaggtttacatgttcctggtgaaatggcaggacctgtcggagaaggtggtctaccggcgcttcacggaga

SEQ ID NO: 15666 - RNA, 81 nt, synthetic construct
  source 1..81: mol_type = other RNA
tggctttcccccaggtttacatgttcctggtgaaatggcaggacctgtcggagaaggtggtctaccggcgcttcaccgaga

SEQ ID NO: 15667 - RNA, 81 nt, synthetic construct
  source 1..81: mol_type = other RNA
tggctttcccccaggtctacatgttcctggtgaaatggcaggacctgtcggagaaggtggtctaccggcgcttcactgaga

SEQ ID NO: 15668 - RNA, 81 nt, synthetic construct
  source 1..81: mol_type = other RNA
tggctttcccccaggtatacatgttcctggtgaaatggcaggacctgtcggagaaggtggtctaccggcgcttcacagaga

SEQ ID NO: 15669 - RNA, 81 nt, synthetic construct
  source 1..81: mol_type = other RNA
tggctttcccccaggtctacatgttcctggtgaaatggcaggacctgtcggagaaggtggtctaccggcgcttcaccgaga

SEQ ID NO: 15670 - RNA, 81 nt, synthetic construct
  source 1..81: mol_type = other RNA
tggctttcccccaggtctacatgttcctggtgaaatggcaggacctgtcggagaaggtggtctaccggcgcttcacggaga

SEQ ID NO: 15671 - RNA, 81 nt, synthetic construct
  source 1..81: mol_type = other RNA
tggctttcccccaggtctacatgttcctggtgaaatggcaggacctgtcggagaaggtggtctaccggcgcttcacagaga

SEQ ID NO: 15672 - RNA, 81 nt, synthetic construct
  source 1..81: mol_type = other RNA
tggctttcccccaggtatacatgttcctggtgaaatggcaggacctgtcggagaaggtggtctaccggcgcttcaccgaga

SEQ ID NO: 15673 - RNA, 81 nt, synthetic construct
  source 1..81: mol_type = other RNA
tggctttcccccaggtatacatgttcctggtgaaatggcaggacctgtcggagaaggtggtctaccggcgcttcactgaga

SEQ ID NO: 15674 - RNA, 81 nt, synthetic construct
  source 1..81: mol_type = other RNA
tggctttcccccaggtatacatgttcctggtgaaatggcaggacctgtcggagaaggtggtctaccggcgcttcacggaga

SEQ ID NO: 15675 - RNA, 81 nt, synthetic construct
  source 1..81: mol_type = other RNA
tggctttcccccaggtttacatgttcctggtgaaatggcaggacctgtcggagaaggtggtctaccggcgcttcacagaga

SEQ ID NO: 15676 - RNA, 82 nt, synthetic construct
  source 1..82: mol_type = other RNA
ctggctttcccccaggtctacatgttcctggtgaaatggcaggacctgtcggagaaggtggtctaccggcgcttcacagaga

SEQ ID NO: 15677 - RNA, 82 nt, synthetic construct
  source 1..82: mol_type = other RNA
ctggctttcccccaggtctacatgttcctggtgaaatggcaggacctgtcggagaaggtggtctaccggcgcttcaccgaga

SEQ ID NO: 15678 - RNA, 82 nt, synthetic construct
  source 1..82: mol_type = other RNA
ctggctttcccccaggtgtacatgttcctggtgaaatggcaggacctgtcggagaaggtggtctaccggcgcttcacggaga

SEQ ID NO: 15679 - RNA, 82 nt, synthetic construct
  source 1..82: mol_type = other RNA
ctggctttcccccaggtttacatgttcctggtgaaatggcaggacctgtcggagaaggtggtctaccggcgcttcacggaga

SEQ ID NO: 15680 - RNA, 82 nt, synthetic construct
  source 1..82: mol_type = other RNA
ctggctttcccccaggtttacatgttcctggtgaaatggcaggacctgtcggagaaggtggtctaccggcgcttcaccgaga

SEQ ID NO: 15681 - RNA, 82 nt, synthetic construct
  source 1..82: mol_type = other RNA
ctggctttcccccaggtgtacatgttcctggtgaaatggcaggacctgtcggagaaggtggtctaccggcgcttcacagaga

SEQ ID NO: 15682 - RNA, 82 nt, synthetic construct
  source 1..82: mol_type = other RNA
ctggctttcccccaggtttacatgttcctggtgaaatggcaggacctgtcggagaaggtggtctaccggcgcttcactgaga

SEQ ID NO: 15683 - RNA, 82 nt, synthetic construct
  source 1..82: mol_type = other RNA
ctggctttcccccaggtttacatgttcctggtgaaatggcaggacctgtcggagaaggtggtctaccggcgcttcacagaga

SEQ ID NO: 15684 - RNA, 82 nt, synthetic construct
  source 1..82: mol_type = other RNA
ctggctttcccccaggtgtacatgttcctggtgaaatggcaggacctgtcggagaaggtggtctaccggcgcttcaccgaga

SEQ ID NO: 15685 - RNA, 82 nt, synthetic construct
  source 1..82: mol_type = other RNA
ctggctttcccccaggtctacatgttcctggtgaaatggcaggacctgtcggagaaggtggtctaccggcgcttcactgaga

SEQ ID NO: 15686 - RNA, 82 nt, synthetic construct
  source 1..82: mol_type = other RNA
ctggctttcccccaggtgtacatgttcctggtgaaatggcaggacctgtcggagaaggtggtctaccggcgcttcactgaga

SEQ ID NO: 15687 - RNA, 82 nt, synthetic construct
  source 1..82: mol_type = other RNA
ctggctttcccccaggtatacatgttcctggtgaaatggcaggacctgtcggagaaggtggtctaccggcgcttcactgaga

SEQ ID NO: 15688 - RNA, 82 nt, synthetic construct
  source 1..82: mol_type = other RNA
ctggctttcccccaggtatacatgttcctggtgaaatggcaggacctgtcggagaaggtggtctaccggcgcttcacggaga

SEQ ID NO: 15689 - RNA, 82 nt, synthetic construct
  source 1..82: mol_type = other RNA
ctggctttcccccaggtatacatgttcctggtgaaatggcaggacctgtcggagaaggtggtctaccggcgcttcacagaga

SEQ ID NO: 15690 - RNA, 82 nt, synthetic construct
  source 1..82: mol_type = other RNA
ctggctttcccccaggtatacatgttcctggtgaaatggcaggacctgtcggagaaggtggtctaccggcgcttcaccgaga

SEQ ID NO: 15691 - RNA, 82 nt, synthetic construct
  source 1..82: mol_type = other RNA
ctggctttcccccaggtctacatgttcctggtgaaatggcaggacctgtcggagaaggtggtctaccggcgcttcacggaga

SEQ ID NO: 15692 - RNA, 83 nt, synthetic construct
  source 1..83: mol_type = other RNA
tctggctttcccccaggtatacatgttcctggtgaaatggcaggacctgtcggagaaggtggtctaccggcgcttcactgaga

SEQ ID NO: 15693 - RNA, 83 nt, synthetic construct
  source 1..83: mol_type = other RNA
tctggctttcccccaggtatacatgttcctggtgaaatggcaggacctgtcggagaaggtggtctaccggcgcttcacggaga

SEQ ID NO: 15694 - RNA, 83 nt, synthetic construct
  source 1..83: mol_type = other RNA
tctggctttcccccaggtatacatgttcctggtgaaatggcaggacctgtcggagaaggtggtctaccggcgcttcaccgaga

SEQ ID NO: 15695 - RNA, 83 nt, synthetic construct
  source 1..83: mol_type = other RNA
tctggctttcccccaggtctacatgttcctggtgaaatggcaggacctgtcggagaaggtggtctaccggcgcttcactgaga

SEQ ID NO: 15696 - RNA, 83 nt, synthetic construct
  source 1..83: mol_type = other RNA
tctggctttcccccaggtgtacatgttcctggtgaaatggcaggacctgtcggagaaggtggtctaccggcgcttcacagaga

SEQ ID NO: 15697 - RNA, 83 nt, synthetic construct
  source 1..83: mol_type = other RNA
tctggctttcccccaggtctacatgttcctggtgaaatggcaggacctgtcggagaaggtggtctaccggcgcttcacagaga

SEQ ID NO: 15698 - RNA, 83 nt, synthetic construct
  source 1..83: mol_type = other RNA
tctggctttcccccaggtctacatgttcctggtgaaatggcaggacctgtcggagaaggtggtctaccggcgcttcaccgaga

SEQ ID NO: 15699 - RNA, 83 nt, synthetic construct
  source 1..83: mol_type = other RNA
tctggctttcccccaggtatacatgttcctggtgaaatggcaggacctgtcggagaaggtggtctaccggcgcttcacagaga

SEQ ID NO: 15700 - RNA, 83 nt, synthetic construct
  source 1..83: mol_type = other RNA
tctggctttcccccaggtctacatgttcctggtgaaatggcaggacctgtcggagaaggtggtctaccggcgcttcacggaga

SEQ ID NO: 15701 - RNA, 83 nt, synthetic construct
  source 1..83: mol_type = other RNA
tctggctttcccccaggtttacatgttcctggtgaaatggcaggacctgtcggagaaggtggtctaccggcgcttcacagaga

SEQ ID NO: 15702 - RNA, 83 nt, synthetic construct
  source 1..83: mol_type = other RNA
tctggctttcccccaggtttacatgttcctggtgaaatggcaggacctgtcggagaaggtggtctaccggcgcttcaccgaga

SEQ ID NO: 15703 - RNA, 83 nt, synthetic construct
  source 1..83: mol_type = other RNA
tctggctttcccccaggtgtacatgttcctggtgaaatggcaggacctgtcggagaaggtggtctaccggcgcttcaccgaga

SEQ ID NO: 15704 - RNA, 83 nt, synthetic construct
  source 1..83: mol_type = other RNA
tctggctttcccccaggtttacatgttcctggtgaaatggcaggacctgtcggagaaggtggtctaccggcgcttcactgaga

SEQ ID NO: 15705 - RNA, 83 nt, synthetic construct
  source 1..83: mol_type = other RNA
tctggctttcccccaggtgtacatgttcctggtgaaatggcaggacctgtcggagaaggtggtctaccggcgcttcactgaga

SEQ ID NO: 15706 - RNA, 83 nt, synthetic construct
  source 1..83: mol_type = other RNA
tctggctttcccccaggtttacatgttcctggtgaaatggcaggacctgtcggagaaggtggtctaccggcgcttcacggaga

SEQ ID NO: 15707 - RNA, 83 nt, synthetic construct
  source 1..83: mol_type = other RNA
tctggctttcccccaggtgtacatgttcctggtgaaatggcaggacctgtcggagaaggtggtctaccggcgcttcacggaga

SEQ ID NO: 15708 - RNA, 84 nt, synthetic construct
  source 1..84: mol_type = other RNA
ctctggctttcccccaggtttacatgttcctggtgaaatggcaggacctgtcggagaaggtggtctaccggcgcttcactgaga

SEQ ID NO: 15709 - RNA, 84 nt, synthetic construct
  source 1..84: mol_type = other RNA
ctctggctttcccccaggtctacatgttcctggtgaaatggcaggacctgtcggagaaggtggtctaccggcgcttcaccgaga

SEQ ID NO: 15710 - RNA, 84 nt, synthetic construct
  source 1..84: mol_type = other RNA
ctctggctttcccccaggtttacatgttcctggtgaaatggcaggacctgtcggagaaggtggtctaccggcgcttcaccgaga

SEQ ID NO: 15711 - RNA, 84 nt, synthetic construct
  source 1..84: mol_type = other RNA
ctctggctttcccccaggtatacatgttcctggtgaaatggcaggacctgtcggagaaggtggtctaccggcgcttcacagaga

SEQ ID NO: 15712 - RNA, 84 nt, synthetic construct
  source 1..84: mol_type = other RNA
ctctggctttcccccaggtatacatgttcctggtgaaatggcaggacctgtcggagaaggtggtctaccggcgcttcacggaga

SEQ ID NO: 15713 - RNA, 84 nt, synthetic construct
  source 1..84: mol_type = other RNA
ctctggctttcccccaggtatacatgttcctggtgaaatggcaggacctgtcggagaaggtggtctaccggcgcttcactgaga

SEQ ID NO: 15714 - RNA, 84 nt, synthetic construct
  source 1..84: mol_type = other RNA
ctctggctttcccccaggtctacatgttcctggtgaaatggcaggacctgtcggagaaggtggtctaccggcgcttcacagaga

SEQ ID NO: 15715 - RNA, 84 nt, synthetic construct
  source 1..84: mol_type = other RNA
ctctggctttcccccaggtttacatgttcctggtgaaatggcaggacctgtcggagaaggtggtctaccggcgcttcacggaga

SEQ ID NO: 15716 - RNA, 84 nt, synthetic construct
  source 1..84: mol_type = other RNA
ctctggctttcccccaggtctacatgttcctggtgaaatggcaggacctgtcggagaaggtggtctaccggcgcttcacggaga

SEQ ID NO: 15717 - RNA, 84 nt, synthetic construct
  source 1..84: mol_type = other RNA
ctctggctttcccccaggtgtacatgttcctggtgaaatggcaggacctgtcggagaaggtggtctaccggcgcttcacagaga

SEQ ID NO: 15718 - RNA, 84 nt, synthetic construct
  source 1..84: mol_type = other RNA
ctctggctttcccccaggtgtacatgttcctggtgaaatggcaggacctgtcggagaaggtggtctaccggcgcttcaccgaga

SEQ ID NO: 15719 - RNA, 84 nt, synthetic construct
  source 1..84: mol_type = other RNA
ctctggctttcccccaggtgtacatgttcctggtgaaatggcaggacctgtcggagaaggtggtctaccggcgcttcacggaga

SEQ ID NO: 15720 - RNA, 84 nt, synthetic construct
  source 1..84: mol_type = other RNA
ctctggctttcccccaggtatacatgttcctggtgaaatggcaggacctgtcggagaaggtggtctaccggcgcttcaccgaga

SEQ ID NO: 15721 - RNA, 84 nt, synthetic construct
  source 1..84: mol_type = other RNA
ctctggctttcccccaggtgtacatgttcctggtgaaatggcaggacctgtcggagaaggtggtctaccggcgcttcactgaga

SEQ ID NO: 15722 - RNA, 84 nt, synthetic construct
  source 1..84: mol_type = other RNA
ctctggctttcccccaggtctacatgttcctggtgaaatggcaggacctgtcggagaaggtggtctaccggcgcttcactgaga

SEQ ID NO: 15723 - RNA, 84 nt, synthetic construct
  source 1..84: mol_type = other RNA
ctctggctttcccccaggtttacatgttcctggtgaaatggcaggacctgtcggagaaggtggtctaccggcgcttcacagaga

SEQ ID NO: 15724 - RNA, 85 nt, synthetic construct
  source 1..85: mol_type = other RNA
actctggctttcccccaggtctacatgttcctggtgaaatggcaggacctgtcggagaaggtggtctaccggcgcttcactgaga

SEQ ID NO: 15725 - RNA, 85 nt, synthetic construct
  source 1..85: mol_type = other RNA
actctggctttcccccaggtatacatgttcctggtgaaatggcaggacctgtcggagaaggtggtctaccggcgcttcaccgaga

SEQ ID NO: 15726 - RNA, 85 nt, synthetic construct
  source 1..85: mol_type = other RNA
actctggctttcccccaggtatacatgttcctggtgaaatggcaggacctgtcggagaaggtggtctaccggcgcttcacggaga

SEQ ID NO: 15727 - RNA, 85 nt, synthetic construct
  source 1..85: mol_type = other RNA
actctggctttcccccaggtatacatgttcctggtgaaatggcaggacctgtcggagaaggtggtctaccggcgcttcactgaga

SEQ ID NO: 15728 - RNA, 85 nt, synthetic construct
  source 1..85: mol_type = other RNA
actctggctttcccccaggtctacatgttcctggtgaaatggcaggacctgtcggagaaggtggtctaccggcgcttcacagaga

SEQ ID NO: 15729 - RNA, 85 nt, synthetic construct
  source 1..85: mol_type = other RNA
actctggctttcccccaggtctacatgttcctggtgaaatggcaggacctgtcggagaaggtggtctaccggcgcttcaccgaga

SEQ ID NO: 15730 - RNA, 85 nt, synthetic construct
  source 1..85: mol_type = other RNA
actctggctttcccccaggtctacatgttcctggtgaaatggcaggacctgtcggagaaggtggtctaccggcgcttcacggaga

SEQ ID NO: 15731 - RNA, 85 nt, synthetic construct
  source 1..85: mol_type = other RNA
actctggctttcccccaggtttacatgttcctggtgaaatggcaggacctgtcggagaaggtggtctaccggcgcttcacagaga

SEQ ID NO: 15732 - RNA, 85 nt, synthetic construct
  source 1..85: mol_type = other RNA
actctggctttcccccaggtttacatgttcctggtgaaatggcaggacctgtcggagaaggtggtctaccggcgcttcacggaga

SEQ ID NO: 15733 - RNA, 85 nt, synthetic construct
  source 1..85: mol_type = other RNA
actctggctttcccccaggtgtacatgttcctggtgaaatggcaggacctgtcggagaaggtggtctaccggcgcttcaccgaga

SEQ ID NO: 15734 - RNA, 85 nt, synthetic construct
  source 1..85: mol_type = other RNA
actctggctttcccccaggtttacatgttcctggtgaaatggcaggacctgtcggagaaggtggtctaccggcgcttcaccgaga

SEQ ID NO: 15735 - RNA, 85 nt, synthetic construct
  source 1..85: mol_type = other RNA
actctggctttcccccaggtttacatgttcctggtgaaatggcaggacctgtcggagaaggtggtctaccggcgcttcactgaga

SEQ ID NO: 15736 - RNA, 85 nt, synthetic construct
  source 1..85: mol_type = other RNA
actctggctttcccccaggtatacatgttcctggtgaaatggcaggacctgtcggagaaggtggtctaccggcgcttcacagaga

SEQ ID NO: 15737 - RNA, 85 nt, synthetic construct
  source 1..85: mol_type = other RNA
actctggctttcccccaggtgtacatgttcctggtgaaatggcaggacctgtcggagaaggtggtctaccggcgcttcactgaga

SEQ ID NO: 15738 - RNA, 85 nt, synthetic construct
  source 1..85: mol_type = other RNA
actctggctttcccccaggtgtacatgttcctggtgaaatggcaggacctgtcggagaaggtggtctaccggcgcttcacagaga

SEQ ID NO: 15739 - RNA, 85 nt, synthetic construct
  source 1..85: mol_type = other RNA
actctggctttcccccaggtgtacatgttcctggtgaaatggcaggacctgtcggagaaggtggtctaccggcgcttcacggaga

SEQ ID NO: 15740 - RNA, 86 nt, synthetic construct
  source 1..86: mol_type = other RNA
gactctggctttcccccaggtctacatgttcctggtgaaatggcaggacctgtcggagaaggtggtctaccggcgcttcacagaga

SEQ ID NO: 15741 - RNA, 86 nt, synthetic construct
  source 1..86: mol_type = other RNA
gactctggctttcccccaggtgtacatgttcctggtgaaatggcaggacctgtcggagaaggtggtctaccggcgcttcactgaga

SEQ ID NO: 15742 - RNA, 86 nt, synthetic construct
  source 1..86: mol_type = other RNA
gactctggctttcccccaggtttacatgttcctggtgaaatggcaggacctgtcggagaaggtggtctaccggcgcttcacagaga

SEQ ID NO: 15743 - RNA, 86 nt, synthetic construct
  source 1..86: mol_type = other RNA
gactctggctttcccccaggtttacatgttcctggtgaaatggcaggacctgtcggagaaggtggtctaccggcgcttcaccgaga

SEQ ID NO: 15744 - RNA, 86 nt, synthetic construct
  source 1..86: mol_type = other RNA
gactctggctttcccccaggtttacatgttcctggtgaaatggcaggacctgtcggagaaggtggtctaccggcgcttcacggaga

SEQ ID NO: 15745 - RNA, 86 nt, synthetic construct
  source 1..86: mol_type = other RNA
gactctggctttcccccaggtttacatgttcctggtgaaatggcaggacctgtcggagaaggtggtctaccggcgcttcactgaga

SEQ ID NO: 15746 - RNA, 86 nt, synthetic construct
  source 1..86: mol_type = other RNA
gactctggctttcccccaggtgtacatgttcctggtgaaatggcaggacctgtcggagaaggtggtctaccggcgcttcaccgaga

SEQ ID NO: 15747 - RNA, 86 nt, synthetic construct
  source 1..86: mol_type = other RNA
gactctggctttcccccaggtgtacatgttcctggtgaaatggcaggacctgtcggagaaggtggtctaccggcgcttcacggaga

SEQ ID NO: 15748 - RNA, 86 nt, synthetic construct
  source 1..86: mol_type = other RNA
gactctggctttcccccaggtgtacatgttcctggtgaaatggcaggacctgtcggagaaggtggtctaccggcgcttcacagaga

SEQ ID NO: 15749 - RNA, 86 nt, synthetic construct
  source 1..86: mol_type = other RNA
gactctggctttcccccaggtctacatgttcctggtgaaatggcaggacctgtcggagaaggtggtctaccggcgcttcacggaga

SEQ ID NO: 15750 - RNA, 86 nt, synthetic construct
  source 1..86: mol_type = other RNA
gactctggctttcccccaggtatacatgttcctggtgaaatggcaggacctgtcggagaaggtggtctaccggcgcttcacagaga

SEQ ID NO: 15751 - RNA, 86 nt, synthetic construct
  source 1..86: mol_type = other RNA
gactctggctttcccccaggtatacatgttcctggtgaaatggcaggacctgtcggagaaggtggtctaccggcgcttcacggaga

SEQ ID NO: 15752 - RNA, 86 nt, synthetic construct
  source 1..86: mol_type = other RNA
gactctggctttcccccaggtatacatgttcctggtgaaatggcaggacctgtcggagaaggtggtctaccggcgcttcaccgaga

SEQ ID NO: 15753 - RNA, 86 nt, synthetic construct
  source 1..86: mol_type = other RNA
gactctggctttcccccaggtctacatgttcctggtgaaatggcaggacctgtcggagaaggtggtctaccggcgcttcactgaga

SEQ ID NO: 15754 - RNA, 86 nt, synthetic construct
  source 1..86: mol_type = other RNA
gactctggctttcccccaggtctacatgttcctggtgaaatggcaggacctgtcggagaaggtggtctaccggcgcttcaccgaga

SEQ ID NO: 15755 - RNA, 86 nt, synthetic construct
  source 1..86: mol_type = other RNA
gactctggctttcccccaggtatacatgttcctggtgaaatggcaggacctgtcggagaaggtggtctaccggcgcttcactgaga

SEQ ID NO: 15756 - RNA, 87 nt, synthetic construct
  source 1..87: mol_type = other RNA
cgactctggctttcccccaggtttacatgttcctggtgaaatggcaggacctgtcggagaaggtggtctaccggcgcttcactgaga

SEQ ID NO: 15757 - RNA, 87 nt, synthetic construct
  source 1..87: mol_type = other RNA
cgactctggctttcccccaggtgtacatgttcctggtgaaatggcaggacctgtcggagaaggtggtctaccggcgcttcaccgaga

SEQ ID NO: 15758 - RNA, 87 nt, synthetic construct
  source 1..87: mol_type = other RNA
cgactctggctttcccccaggtgtacatgttcctggtgaaatggcaggacctgtcggagaaggtggtctaccggcgcttcacggaga

SEQ ID NO: 15759 - RNA, 87 nt, synthetic construct
  source 1..87: mol_type = other RNA
cgactctggctttcccccaggtttacatgttcctggtgaaatggcaggacctgtcggagaaggtggtctaccggcgcttcacggaga

SEQ ID NO: 15760 - RNA, 87 nt, synthetic construct
  source 1..87: mol_type = other RNA
cgactctggctttcccccaggtttacatgttcctggtgaaatggcaggacctgtcggagaaggtggtctaccggcgcttcaccgaga

SEQ ID NO: 15761 - RNA, 87 nt, synthetic construct
  source 1..87: mol_type = other RNA
cgactctggctttcccccaggtctacatgttcctggtgaaatggcaggacctgtcggagaaggtggtctaccggcgcttcaccgaga

SEQ ID NO: 15762 - RNA, 87 nt, synthetic construct
  source 1..87: mol_type = other RNA
cgactctggctttcccccaggtgtacatgttcctggtgaaatggcaggacctgtcggagaaggtggtctaccggcgcttcactgaga

SEQ ID NO: 15763 - RNA, 87 nt, synthetic construct
  source 1..87: mol_type = other RNA
cgactctggctttcccccaggtttacatgttcctggtgaaatggcaggacctgtcggagaaggtggtctaccggcgcttcacagaga

SEQ ID NO: 15764 - RNA, 87 nt, synthetic construct
  source 1..87: mol_type = other RNA
cgactctggctttcccccaggtatacatgttcctggtgaaatggcaggacctgtcggagaaggtggtctaccggcgcttcaccgaga

SEQ ID NO: 15765 - RNA, 87 nt, synthetic construct
  source 1..87: mol_type = other RNA
cgactctggctttcccccaggtatacatgttcctggtgaaatggcaggacctgtcggagaaggtggtctaccggcgcttcacggaga

SEQ ID NO: 15766 - RNA, 87 nt, synthetic construct
  source 1..87: mol_type = other RNA
cgactctggctttcccccaggtatacatgttcctggtgaaatggcaggacctgtcggagaaggtggtctaccggcgcttcactgaga

SEQ ID NO: 15767 - RNA, 87 nt, synthetic construct
  source 1..87: mol_type = other RNA
cgactctggctttcccccaggtctacatgttcctggtgaaatggcaggacctgtcggagaaggtggtctaccggcgcttcacagaga

SEQ ID NO: 15768 - RNA, 87 nt, synthetic construct
  source 1..87: mol_type = other RNA
cgactctggctttcccccaggtctacatgttcctggtgaaatggcaggacctgtcggagaaggtggtctaccggcgcttcacggaga

SEQ ID NO: 15769 - RNA, 87 nt, synthetic construct
  source 1..87: mol_type = other RNA
cgactctggctttcccccaggtatacatgttcctggtgaaatggcaggacctgtcggagaaggtggtctaccggcgcttcacagaga

SEQ ID NO: 15770 - RNA, 87 nt, synthetic construct
  source 1..87: mol_type = other RNA
cgactctggctttcccccaggtgtacatgttcctggtgaaatggcaggacctgtcggagaaggtggtctaccggcgcttcacagaga

SEQ ID NO: 15771 - RNA, 87 nt, synthetic construct
  source 1..87: mol_type = other RNA
cgactctggctttcccccaggtctacatgttcctggtgaaatggcaggacctgtcggagaaggtggtctaccggcgcttcactgaga

SEQ ID NO: 15772 - RNA, 88 nt, synthetic construct
  source 1..88: mol_type = other RNA
ccgactctggctttcccccaggtgtacatgttcctggtgaaatggcaggacctgtcggagaaggtggtctaccggcgcttcacggaga

SEQ ID NO: 15773 - RNA, 88 nt, synthetic construct
  source 1..88: mol_type = other RNA
ccgactctggctttcccccaggtttacatgttcctggtgaaatggcaggacctgtcggagaaggtggtctaccggcgcttcaccgaga

SEQ ID NO: 15774 - RNA, 88 nt, synthetic construct
  source 1..88: mol_type = other RNA
ccgactctggctttcccccaggtatacatgttcctggtgaaatggcaggacctgtcggagaaggtggtctaccggcgcttcacagaga

SEQ ID NO: 15775 - RNA, 88 nt, synthetic construct
  source 1..88: mol_type = other RNA
ccgactctggctttcccccaggtatacatgttcctggtgaaatggcaggacctgtcggagaaggtggtctaccggcgcttcacggaga

SEQ ID NO: 15776 - RNA, 88 nt, synthetic construct
  source 1..88: mol_type = other RNA
ccgactctggctttcccccaggtttacatgttcctggtgaaatggcaggacctgtcggagaaggtggtctaccggcgcttcactgaga

SEQ ID NO: 15777 - RNA, 88 nt, synthetic construct
  source 1..88: mol_type = other RNA
ccgactctggctttcccccaggtatacatgttcctggtgaaatggcaggacctgtcggagaaggtggtctaccggcgcttcaccgaga

SEQ ID NO: 15778 - RNA, 88 nt, synthetic construct
  source 1..88: mol_type = other RNA
ccgactctggctttcccccaggtttacatgttcctggtgaaatggcaggacctgtcggagaaggtggtctaccggcgcttcacggaga

SEQ ID NO: 15779 - RNA, 88 nt, synthetic construct
  source 1..88: mol_type = other RNA
ccgactctggctttcccccaggtatacatgttcctggtgaaatggcaggacctgtcggagaaggtggtctaccggcgcttcactgaga

SEQ ID NO: 15780 - RNA, 88 nt, synthetic construct
  source 1..88: mol_type = other RNA
ccgactctggctttcccccaggtctacatgttcctggtgaaatggcaggacctgtcggagaaggtggtctaccggcgcttcacggaga

SEQ ID NO: 15781 - RNA, 88 nt, synthetic construct
  source 1..88: mol_type = other RNA
ccgactctggctttcccccaggtctacatgttcctggtgaaatggcaggacctgtcggagaaggtggtctaccggcgcttcaccgaga

SEQ ID NO: 15782 - RNA, 88 nt, synthetic construct
  source 1..88: mol_type = other RNA
ccgactctggctttcccccaggtctacatgttcctggtgaaatggcaggacctgtcggagaaggtggtctaccggcgcttcactgaga

SEQ ID NO: 15783 - RNA, 88 nt, synthetic construct
  source 1..88: mol_type = other RNA
ccgactctggctttcccccaggtgtacatgttcctggtgaaatggcaggacctgtcggagaaggtggtctaccggcgcttcacagaga

SEQ ID NO: 15784 - RNA, 88 nt, synthetic construct
  source 1..88: mol_type = other RNA
ccgactctggctttcccccaggtgtacatgttcctggtgaaatggcaggacctgtcggagaaggtggtctaccggcgcttcaccgaga

SEQ ID NO: 15785 - RNA, 88 nt, synthetic construct
  source 1..88: mol_type = other RNA
ccgactctggctttcccccaggtgtacatgttcctggtgaaatggcaggacctgtcggagaaggtggtctaccggcgcttcactgaga

SEQ ID NO: 15786 - RNA, 88 nt, synthetic construct
  source 1..88: mol_type = other RNA
ccgactctggctttcccccaggtttacatgttcctggtgaaatggcaggacctgtcggagaaggtggtctaccggcgcttcacagaga

SEQ ID NO: 15787 - RNA, 88 nt, synthetic construct
  source 1..88: mol_type = other RNA
ccgactctggctttcccccaggtctacatgttcctggtgaaatggcaggacctgtcggagaaggtggtctaccggcgcttcacagaga

SEQ ID NO: 15788 - RNA, 89 nt, synthetic construct
  source 1..89: mol_type = other RNA
cccgactctggctttcccccaggtttacatgttcctggtgaaatggcaggacctgtcggagaaggtggtctaccggcgcttcactgaga

SEQ ID NO: 15789 - RNA, 89 nt, synthetic construct
  source 1..89: mol_type = other RNA
cccgactctggctttcccccaggtatacatgttcctggtgaaatggcaggacctgtcggagaaggtggtctaccggcgcttcacagaga

SEQ ID NO: 15790 - RNA, 89 nt, synthetic construct
  source 1..89: mol_type = other RNA
cccgactctggctttcccccaggtatacatgttcctggtgaaatggcaggacctgtcggagaaggtggtctaccggcgcttcacggaga

SEQ ID NO: 15791 - RNA, 89 nt, synthetic construct
  source 1..89: mol_type = other RNA
cccgactctggctttcccccaggtatacatgttcctggtgaaatggcaggacctgtcggagaaggtggtctaccggcgcttcaccgaga

SEQ ID NO: 15792 - RNA, 89 nt, synthetic construct
  source 1..89: mol_type = other RNA
cccgactctggctttcccccaggtttacatgttcctggtgaaatggcaggacctgtcggagaaggtggtctaccggcgcttcacagaga

SEQ ID NO: 15793 - RNA, 89 nt, synthetic construct
  source 1..89: mol_type = other RNA
cccgactctggctttcccccaggtctacatgttcctggtgaaatggcaggacctgtcggagaaggtggtctaccggcgcttcaccgaga

SEQ ID NO: 15794 - RNA, 89 nt, synthetic construct
  source 1..89: mol_type = other RNA
cccgactctggctttcccccaggtctacatgttcctggtgaaatggcaggacctgtcggagaaggtggtctaccggcgcttcactgaga

SEQ ID NO: 15795 - RNA, 89 nt, synthetic construct
  source 1..89: mol_type = other RNA
cccgactctggctttcccccaggtttacatgttcctggtgaaatggcaggacctgtcggagaaggtggtctaccggcgcttcacggaga

SEQ ID NO: 15796 - RNA, 89 nt, synthetic construct
  source 1..89: mol_type = other RNA
cccgactctggctttcccccaggtgtacatgttcctggtgaaatggcaggacctgtcggagaaggtggtctaccggcgcttcaccgaga

SEQ ID NO: 15797 - RNA, 89 nt, synthetic construct
  source 1..89: mol_type = other RNA
cccgactctggctttcccccaggtgtacatgttcctggtgaaatggcaggacctgtcggagaaggtggtctaccggcgcttcacggaga

SEQ ID NO: 15798 - RNA, 89 nt, synthetic construct
  source 1..89: mol_type = other RNA
cccgactctggctttcccccaggtgtacatgttcctggtgaaatggcaggacctgtcggagaaggtggtctaccggcgcttcacagaga

SEQ ID NO: 15799 - RNA, 89 nt, synthetic construct
  source 1..89: mol_type = other RNA
cccgactctggctttcccccaggtctacatgttcctggtgaaatggcaggacctgtcggagaaggtggtctaccggcgcttcacagaga

SEQ ID NO: 15800 - RNA, 89 nt, synthetic construct
  source 1..89: mol_type = other RNA
cccgactctggctttcccccaggtctacatgttcctggtgaaatggcaggacctgtcggagaaggtggtctaccggcgcttcacggaga

SEQ ID NO: 15801 - RNA, 89 nt, synthetic construct
  source 1..89: mol_type = other RNA
cccgactctggctttcccccaggtatacatgttcctggtgaaatggcaggacctgtcggagaaggtggtctaccggcgcttcactgaga

SEQ ID NO: 15802 - RNA, 89 nt, synthetic construct
  source 1..89: mol_type = other RNA
cccgactctggctttcccccaggtgtacatgttcctggtgaaatggcaggacctgtcggagaaggtggtctaccggcgcttcactgaga

SEQ ID NO: 15803 - RNA, 89 nt, synthetic construct
  source 1..89: mol_type = other RNA
cccgactctggctttcccccaggtttacatgttcctggtgaaatggcaggacctgtcggagaaggtggtctaccggcgcttcaccgaga

SEQ ID NO: 15804 - RNA, 90 nt, synthetic construct
  source 1..90: mol_type = other RNA
ccccgactctggctttcccccaggtctacatgttcctggtgaaatggcaggacctgtcggagaaggtggtctaccggcgcttcacggaga

SEQ ID NO: 15805 - RNA, 90 nt, synthetic construct
  source 1..90: mol_type = other RNA
ccccgactctggctttcccccaggtctacatgttcctggtgaaatggcaggacctgtcggagaaggtggtctaccggcgcttcaccgaga

SEQ ID NO: 15806 - RNA, 90 nt, synthetic construct
  source 1..90: mol_type = other RNA
ccccgactctggctttcccccaggtatacatgttcctggtgaaatggcaggacctgtcggagaaggtggtctaccggcgcttcacagaga

SEQ ID NO: 15807 - RNA, 90 nt, synthetic construct
  source 1..90: mol_type = other RNA
ccccgactctggctttcccccaggtatacatgttcctggtgaaatggcaggacctgtcggagaaggtggtctaccggcgcttcaccgaga

SEQ ID NO: 15808 - RNA, 90 nt, synthetic construct
  source 1..90: mol_type = other RNA
ccccgactctggctttcccccaggtgtacatgttcctggtgaaatggcaggacctgtcggagaaggtggtctaccggcgcttcacggaga

SEQ ID NO: 15809 - RNA, 90 nt, synthetic construct
  source 1..90: mol_type = other RNA
ccccgactctggctttcccccaggtatacatgttcctggtgaaatggcaggacctgtcggagaaggtggtctaccggcgcttcactgaga

SEQ ID NO: 15810 - RNA, 90 nt, synthetic construct
  source 1..90: mol_type = other RNA
ccccgactctggctttcccccaggtctacatgttcctggtgaaatggcaggacctgtcggagaaggtggtctaccggcgcttcacagaga

SEQ ID NO: 15811 - RNA, 90 nt, synthetic construct
  source 1..90: mol_type = other RNA
ccccgactctggctttcccccaggtctacatgttcctggtgaaatggcaggacctgtcggagaaggtggtctaccggcgcttcactgaga

SEQ ID NO: 15812 - RNA, 90 nt, synthetic construct
  source 1..90: mol_type = other RNA
ccccgactctggctttcccccaggtttacatgttcctggtgaaatggcaggacctgtcggagaaggtggtctaccggcgcttcacagaga

SEQ ID NO: 15813 - RNA, 90 nt, synthetic construct
  source 1..90: mol_type = other RNA
ccccgactctggctttcccccaggtttacatgttcctggtgaaatggcaggacctgtcggagaaggtggtctaccggcgcttcacggaga

SEQ ID NO: 15814 - RNA, 90 nt, synthetic construct
  source 1..90: mol_type = other RNA
ccccgactctggctttcccccaggtttacatgttcctggtgaaatggcaggacctgtcggagaaggtggtctaccggcgcttcaccgaga

SEQ ID NO: 15815 - RNA, 90 nt, synthetic construct
  source 1..90: mol_type = other RNA
ccccgactctggctttcccccaggtttacatgttcctggtgaaatggcaggacctgtcggagaaggtggtctaccggcgcttcactgaga

SEQ ID NO: 15816 - RNA, 90 nt, synthetic construct
  source 1..90: mol_type = other RNA
ccccgactctggctttcccccaggtgtacatgttcctggtgaaatggcaggacctgtcggagaaggtggtctaccggcgcttcacagaga

SEQ ID NO: 15817 - RNA, 90 nt, synthetic construct
  source 1..90: mol_type = other RNA
ccccgactctggctttcccccaggtgtacatgttcctggtgaaatggcaggacctgtcggagaaggtggtctaccggcgcttcaccgaga

SEQ ID NO: 15818 - RNA, 90 nt, synthetic construct
  source 1..90: mol_type = other RNA
ccccgactctggctttcccccaggtgtacatgttcctggtgaaatggcaggacctgtcggagaaggtggtctaccggcgcttcactgaga

SEQ ID NO: 15819 - RNA, 90 nt, synthetic construct
  source 1..90: mol_type = other RNA
ccccgactctggctttcccccaggtatacatgttcctggtgaaatggcaggacctgtcggagaaggtggtctaccggcgcttcacggaga

SEQ ID NO: 15820 - RNA, 91 nt, synthetic construct
  source 1..91: mol_type = other RNA
cccccgactctggctttcccccaggtgtacatgttcctggtgaaatggcaggacctgtcggagaaggtggtctaccggcgcttcactgaga

SEQ ID NO: 15821 - RNA, 91 nt, synthetic construct
  source 1..91: mol_type = other RNA
cccccgactctggctttcccccaggtttacatgttcctggtgaaatggcaggacctgtcggagaaggtggtctaccggcgcttcacagaga

SEQ ID NO: 15822 - RNA, 91 nt, synthetic construct
  source 1..91: mol_type = other RNA
cccccgactctggctttcccccaggtctacatgttcctggtgaaatggcaggacctgtcggagaaggtggtctaccggcgcttcaccgaga

SEQ ID NO: 15823 - RNA, 91 nt, synthetic construct
  source 1..91: mol_type = other RNA
cccccgactctggctttcccccaggtgtacatgttcctggtgaaatggcaggacctgtcggagaaggtggtctaccggcgcttcacggaga

SEQ ID NO: 15824 - RNA, 91 nt, synthetic construct
  source 1..91: mol_type = other RNA
cccccgactctggctttcccccaggtgtacatgttcctggtgaaatggcaggacctgtcggagaaggtggtctaccggcgcttcaccgaga

SEQ ID NO: 15825 - RNA, 91 nt, synthetic construct
  source 1..91: mol_type = other RNA
cccccgactctggctttcccccaggtgtacatgttcctggtgaaatggcaggacctgtcggagaaggtggtctaccggcgcttcacagaga

SEQ ID NO: 15826 - RNA, 91 nt, synthetic construct
  source 1..91: mol_type = other RNA
cccccgactctggctttcccccaggtctacatgttcctggtgaaatggcaggacctgtcggagaaggtggtctaccggcgcttcactgaga

SEQ ID NO: 15827 - RNA, 91 nt, synthetic construct
  source 1..91: mol_type = other RNA
cccccgactctggctttcccccaggtttacatgttcctggtgaaatggcaggacctgtcggagaaggtggtctaccggcgcttcaccgaga

SEQ ID NO: 15828 - RNA, 91 nt, synthetic construct
  source 1..91: mol_type = other RNA
cccccgactctggctttcccccaggtatacatgttcctggtgaaatggcaggacctgtcggagaaggtggtctaccggcgcttcactgaga

SEQ ID NO: 15829 - RNA, 91 nt, synthetic construct
  source 1..91: mol_type = other RNA
cccccgactctggctttcccccaggtttacatgttcctggtgaaatggcaggacctgtcggagaaggtggtctaccggcgcttcacggaga

SEQ ID NO: 15830 - RNA, 91 nt, synthetic construct
  source 1..91: mol_type = other RNA
cccccgactctggctttcccccaggtttacatgttcctggtgaaatggcaggacctgtcggagaaggtggtctaccggcgcttcactgaga

SEQ ID NO: 15831 - RNA, 91 nt, synthetic construct
  source 1..91: mol_type = other RNA
cccccgactctggctttcccccaggtatacatgttcctggtgaaatggcaggacctgtcggagaaggtggtctaccggcgcttcacagaga

SEQ ID NO: 15832 - RNA, 91 nt, synthetic construct
  source 1..91: mol_type = other RNA
cccccgactctggctttcccccaggtatacatgttcctggtgaaatggcaggacctgtcggagaaggtggtctaccggcgcttcacggaga

SEQ ID NO: 15833 - RNA, 91 nt, synthetic construct
  source 1..91: mol_type = other RNA
cccccgactctggctttcccccaggtatacatgttcctggtgaaatggcaggacctgtcggagaaggtggtctaccggcgcttcaccgaga

SEQ ID NO: 15834 - RNA, 91 nt, synthetic construct
  source 1..91: mol_type = other RNA
cccccgactctggctttcccccaggtctacatgttcctggtgaaatggcaggacctgtcggagaaggtggtctaccggcgcttcacagaga

SEQ ID NO: 15835 - RNA, 91 nt, synthetic construct
  source 1..91: mol_type = other RNA
cccccgactctggctttcccccaggtctacatgttcctggtgaaatggcaggacctgtcggagaaggtggtctaccggcgcttcacggaga

SEQ ID NO: 15836 - RNA, 92 nt, synthetic construct
  source 1..92: mol_type = other RNA
tcccccgactctggctttcccccaggtctacatgttcctggtgaaatggcaggacctgtcggagaaggtggtctaccggcgcttcacggaga

SEQ ID NO: 15837 - RNA, 92 nt, synthetic construct
  source 1..92: mol_type = other RNA
tcccccgactctggctttcccccaggtatacatgttcctggtgaaatggcaggacctgtcggagaaggtggtctaccggcgcttcacagaga

SEQ ID NO: 15838 - RNA, 92 nt, synthetic construct
  source 1..92: mol_type = other RNA
tcccccgactctggctttcccccaggtatacatgttcctggtgaaatggcaggacctgtcggagaaggtggtctaccggcgcttcaccgaga

SEQ ID NO: 15839 - RNA, 92 nt, synthetic construct
  source 1..92: mol_type = other RNA
tcccccgactctggctttcccccaggtatacatgttcctggtgaaatggcaggacctgtcggagaaggtggtctaccggcgcttcacggaga

SEQ ID NO: 15840 - RNA, 92 nt, synthetic construct
  source 1..92: mol_type = other RNA
tcccccgactctggctttcccccaggtatacatgttcctggtgaaatggcaggacctgtcggagaaggtggtctaccggcgcttcactgaga

SEQ ID NO: 15841 - RNA, 92 nt, synthetic construct
  source 1..92: mol_type = other RNA
tcccccgactctggctttcccccaggtctacatgttcctggtgaaatggcaggacctgtcggagaaggtggtctaccggcgcttcacagaga

SEQ ID NO: 15842 - RNA, 92 nt, synthetic construct
  source 1..92: mol_type = other RNA
tcccccgactctggctttcccccaggtctacatgttcctggtgaaatggcaggacctgtcggagaaggtggtctaccggcgcttcactgaga

SEQ ID NO: 15843 - RNA, 92 nt, synthetic construct
  source 1..92: mol_type = other RNA
tcccccgactctggctttcccccaggtgtacatgttcctggtgaaatggcaggacctgtcggagaaggtggtctaccggcgcttcaccgaga

SEQ ID NO: 15844 - RNA, 92 nt, synthetic construct
  source 1..92: mol_type = other RNA
tcccccgactctggctttcccccaggtttacatgttcctggtgaaatggcaggacctgtcggagaaggtggtctaccggcgcttcacggaga

SEQ ID NO: 15845 - RNA, 92 nt, synthetic construct
  source 1..92: mol_type = other RNA
tcccccgactctggctttcccccaggtttacatgttcctggtgaaatggcaggacctgtcggagaaggtggtctaccggcgcttcaccgaga

SEQ ID NO: 15846 - RNA, 92 nt, synthetic construct
  source 1..92: mol_type = other RNA
tcccccgactctggctttcccccaggtttacatgttcctggtgaaatggcaggacctgtcggagaaggtggtctaccggcgcttcacagaga

SEQ ID NO: 15847 - RNA, 92 nt, synthetic construct
  source 1..92: mol_type = other RNA
tcccccgactctggctttcccccaggtgtacatgttcctggtgaaatggcaggacctgtcggagaaggtggtctaccggcgcttcacagaga

SEQ ID NO: 15848 - RNA, 92 nt, synthetic construct
  source 1..92: mol_type = other RNA
tcccccgactctggctttcccccaggtgtacatgttcctggtgaaatggcaggacctgtcggagaaggtggtctaccggcgcttcactgaga

SEQ ID NO: 15849 - RNA, 92 nt, synthetic construct
  source 1..92: mol_type = other RNA
tcccccgactctggctttcccccaggtgtacatgttcctggtgaaatggcaggacctgtcggagaaggtggtctaccggcgcttcacggaga

SEQ ID NO: 15850 - RNA, 92 nt, synthetic construct
  source 1..92: mol_type = other RNA
tcccccgactctggctttcccccaggtctacatgttcctggtgaaatggcaggacctgtcggagaaggtggtctaccggcgcttcaccgaga

SEQ ID NO: 15851 - RNA, 92 nt, synthetic construct
  source 1..92: mol_type = other RNA
tcccccgactctggctttcccccaggtttacatgttcctggtgaaatggcaggacctgtcggagaaggtggtctaccggcgcttcactgaga

SEQ ID NO: 15852 - RNA, 93 nt, synthetic construct
  source 1..93: mol_type = other RNA
gtcccccgactctggctttcccccaggtgtacatgttcctggtgaaatggcaggacctgtcggagaaggtggtctaccggcgcttcacagaga

SEQ ID NO: 15853 - RNA, 93 nt, synthetic construct
  source 1..93: mol_type = other RNA
gtcccccgactctggctttcccccaggtatacatgttcctggtgaaatggcaggacctgtcggagaaggtggtctaccggcgcttcactgaga

SEQ ID NO: 15854 - RNA, 93 nt, synthetic construct
  source 1..93: mol_type = other RNA
gtcccccgactctggctttcccccaggtttacatgttcctggtgaaatggcaggacctgtcggagaaggtggtctaccggcgcttcacggaga

SEQ ID NO: 15855 - RNA, 93 nt, synthetic construct
  source 1..93: mol_type = other RNA
gtcccccgactctggctttcccccaggtttacatgttcctggtgaaatggcaggacctgtcggagaaggtggtctaccggcgcttcaccgaga

SEQ ID NO: 15856 - RNA, 93 nt, synthetic construct
  source 1..93: mol_type = other RNA
gtcccccgactctggctttcccccaggtttacatgttcctggtgaaatggcaggacctgtcggagaaggtggtctaccggcgcttcacagaga

SEQ ID NO: 15857 - RNA, 93 nt, synthetic construct
  source 1..93: mol_type = other RNA
gtcccccgactctggctttcccccaggtgtacatgttcctggtgaaatggcaggacctgtcggagaaggtggtctaccggcgcttcactgaga

SEQ ID NO: 15858 - RNA, 93 nt, synthetic construct
  source 1..93: mol_type = other RNA
gtcccccgactctggctttcccccaggtgtacatgttcctggtgaaatggcaggacctgtcggagaaggtggtctaccggcgcttcacggaga

SEQ ID NO: 15859 - RNA, 93 nt, synthetic construct
  source 1..93: mol_type = other RNA
gtcccccgactctggctttcccccaggtgtacatgttcctggtgaaatggcaggacctgtcggagaaggtggtctaccggcgcttcaccgaga

SEQ ID NO: 15860 - RNA, 93 nt, synthetic construct
  source 1..93: mol_type = other RNA
gtcccccgactctggctttcccccaggtctacatgttcctggtgaaatggcaggacctgtcggagaaggtggtctaccggcgcttcactgaga

SEQ ID NO: 15861 - RNA, 93 nt, synthetic construct
  source 1..93: mol_type = other RNA
gtcccccgactctggctttcccccaggtctacatgttcctggtgaaatggcaggacctgtcggagaaggtggtctaccggcgcttcacggaga

SEQ ID NO: 15862 - RNA, 93 nt, synthetic construct
  source 1..93: mol_type = other RNA
gtcccccgactctggctttcccccaggtctacatgttcctggtgaaatggcaggacctgtcggagaaggtggtctaccggcgcttcaccgaga

SEQ ID NO: 15863 - RNA, 93 nt, synthetic construct
  source 1..93: mol_type = other RNA
gtcccccgactctggctttcccccaggtctacatgttcctggtgaaatggcaggacctgtcggagaaggtggtctaccggcgcttcacagaga

SEQ ID NO: 15864 - RNA, 93 nt, synthetic construct
  source 1..93: mol_type = other RNA
gtcccccgactctggctttcccccaggtatacatgttcctggtgaaatggcaggacctgtcggagaaggtggtctaccggcgcttcacggaga

SEQ ID NO: 15865 - RNA, 93 nt, synthetic construct
  source 1..93: mol_type = other RNA
gtcccccgactctggctttcccccaggtatacatgttcctggtgaaatggcaggacctgtcggagaaggtggtctaccggcgcttcaccgaga

SEQ ID NO: 15866 - RNA, 93 nt, synthetic construct
  source 1..93: mol_type = other RNA
gtcccccgactctggctttcccccaggtatacatgttcctggtgaaatggcaggacctgtcggagaaggtggtctaccggcgcttcacagaga

SEQ ID NO: 15867 - RNA, 93 nt, synthetic construct
  source 1..93: mol_type = other RNA
gtcccccgactctggctttcccccaggtttacatgttcctggtgaaatggcaggacctgtcggagaaggtggtctaccggcgcttcactgaga

SEQ ID NO: 15868 - RNA, 94 nt, synthetic construct
  source 1..94: mol_type = other RNA
ggtcccccgactctggctttcccccaggtgtacatgttcctggtgaaatggcaggacctgtcggagaaggtggtctaccggcgcttcaccgaga

SEQ ID NO: 15869 - RNA, 94 nt, synthetic construct
  source 1..94: mol_type = other RNA
ggtcccccgactctggctttcccccaggtgtacatgttcctggtgaaatggcaggacctgtcggagaaggtggtctaccggcgcttcacggaga

SEQ ID NO: 15870 - RNA, 94 nt, synthetic construct
  source 1..94: mol_type = other RNA
ggtcccccgactctggctttcccccaggtttacatgttcctggtgaaatggcaggacctgtcggagaaggtggtctaccggcgcttcactgaga

SEQ ID NO: 15871 - RNA, 94 nt, synthetic construct
  source 1..94: mol_type = other RNA
ggtcccccgactctggctttcccccaggtttacatgttcctggtgaaatggcaggacctgtcggagaaggtggtctaccggcgcttcacggaga

SEQ ID NO: 15872 - RNA, 94 nt, synthetic construct
  source 1..94: mol_type = other RNA
ggtcccccgactctggctttcccccaggtttacatgttcctggtgaaatggcaggacctgtcggagaaggtggtctaccggcgcttcaccgaga

SEQ ID NO: 15873 - RNA, 94 nt, synthetic construct
  source 1..94: mol_type = other RNA
ggtcccccgactctggctttcccccaggtttacatgttcctggtgaaatggcaggacctgtcggagaaggtggtctaccggcgcttcacagaga

SEQ ID NO: 15874 - RNA, 94 nt, synthetic construct
  source 1..94: mol_type = other RNA
ggtcccccgactctggctttcccccaggtgtacatgttcctggtgaaatggcaggacctgtcggagaaggtggtctaccggcgcttcactgaga

SEQ ID NO: 15875 - RNA, 94 nt, synthetic construct
  source 1..94: mol_type = other RNA
ggtcccccgactctggctttcccccaggtgtacatgttcctggtgaaatggcaggacctgtcggagaaggtggtctaccggcgcttcacagaga

SEQ ID NO: 15876 - RNA, 94 nt, synthetic construct
  source 1..94: mol_type = other RNA
ggtcccccgactctggctttcccccaggtctacatgttcctggtgaaatggcaggacctgtcggagaaggtggtctaccggcgcttcactgaga

SEQ ID NO: 15877 - RNA, 94 nt, synthetic construct
  source 1..94: mol_type = other RNA
ggtcccccgactctggctttcccccaggtatacatgttcctggtgaaatggcaggacctgtcggagaaggtggtctaccggcgcttcacggaga

SEQ ID NO: 15878 - RNA, 94 nt, synthetic construct
  source 1..94: mol_type = other RNA
ggtcccccgactctggctttcccccaggtctacatgttcctggtgaaatggcaggacctgtcggagaaggtggtctaccggcgcttcacggaga

SEQ ID NO: 15879 - RNA, 94 nt, synthetic construct
  source 1..94: mol_type = other RNA
ggtcccccgactctggctttcccccaggtctacatgttcctggtgaaatggcaggacctgtcggagaaggtggtctaccggcgcttcaccgaga

SEQ ID NO: 15880 - RNA, 94 nt, synthetic construct
  source 1..94: mol_type = other RNA
ggtcccccgactctggctttcccccaggtatacatgttcctggtgaaatggcaggacctgtcggagaaggtggtctaccggcgcttcacagaga

SEQ ID NO: 15881 - RNA, 94 nt, synthetic construct
  source 1..94: mol_type = other RNA
ggtcccccgactctggctttcccccaggtatacatgttcctggtgaaatggcaggacctgtcggagaaggtggtctaccggcgcttcaccgaga

SEQ ID NO: 15882 - RNA, 94 nt, synthetic construct
  source 1..94: mol_type = other RNA
ggtcccccgactctggctttcccccaggtatacatgttcctggtgaaatggcaggacctgtcggagaaggtggtctaccggcgcttcactgaga

SEQ ID NO: 15883 - RNA, 94 nt, synthetic construct
  source 1..94: mol_type = other RNA
ggtcccccgactctggctttcccccaggtctacatgttcctggtgaaatggcaggacctgtcggagaaggtggtctaccggcgcttcacagaga

SEQ ID NO: 15884 - RNA, 95 nt, synthetic construct
  source 1..95: mol_type = other RNA
gggtcccccgactctggctttcccccaggtttacatgttcctggtgaaatggcaggacctgtcggagaaggtggtctaccggcgcttcacggaga

SEQ ID NO: 15885 - RNA, 95 nt, synthetic construct
  source 1..95: mol_type = other RNA
gggtcccccgactctggctttcccccaggtatacatgttcctggtgaaatggcaggacctgtcggagaaggtggtctaccggcgcttcactgaga

SEQ ID NO: 15886 - RNA, 95 nt, synthetic construct
  source 1..95: mol_type = other RNA
gggtcccccgactctggctttcccccaggtttacatgttcctggtgaaatggcaggacctgtcggagaaggtggtctaccggcgcttcactgaga

SEQ ID NO: 15887 - RNA, 95 nt, synthetic construct
  source 1..95: mol_type = other RNA
gggtcccccgactctggctttcccccaggtatacatgttcctggtgaaatggcaggacctgtcggagaaggtggtctaccggcgcttcacagaga

SEQ ID NO: 15888 - RNA, 95 nt, synthetic construct
  source 1..95: mol_type = other RNA
gggtcccccgactctggctttcccccaggtatacatgttcctggtgaaatggcaggacctgtcggagaaggtggtctaccggcgcttcaccgaga

SEQ ID NO: 15889 - RNA, 95 nt, synthetic construct
  source 1..95: mol_type = other RNA
gggtcccccgactctggctttcccccaggtatacatgttcctggtgaaatggcaggacctgtcggagaaggtggtctaccggcgcttcacggaga

SEQ ID NO: 15890 - RNA, 95 nt, synthetic construct
  source 1..95: mol_type = other RNA
gggtcccccgactctggctttcccccaggtctacatgttcctggtgaaatggcaggacctgtcggagaaggtggtctaccggcgcttcacagaga

SEQ ID NO: 15891 - RNA, 95 nt, synthetic construct
  source 1..95: mol_type = other RNA
gggtcccccgactctggctttcccccaggtctacatgttcctggtgaaatggcaggacctgtcggagaaggtggtctaccggcgcttcaccgaga

SEQ ID NO: 15892 - RNA, 95 nt, synthetic construct
  source 1..95: mol_type = other RNA
gggtcccccgactctggctttcccccaggtctacatgttcctggtgaaatggcaggacctgtcggagaaggtggtctaccggcgcttcacggaga

SEQ ID NO: 15893 - RNA, 95 nt, synthetic construct
  source 1..95: mol_type = other RNA
gggtcccccgactctggctttcccccaggtctacatgttcctggtgaaatggcaggacctgtcggagaaggtggtctaccggcgcttcactgaga

SEQ ID NO: 15894 - RNA, 95 nt, synthetic construct
  source 1..95: mol_type = other RNA
gggtcccccgactctggctttcccccaggtttacatgttcctggtgaaatggcaggacctgtcggagaaggtggtctaccggcgcttcaccgaga

SEQ ID NO: 15895 - RNA, 95 nt, synthetic construct
  source 1..95: mol_type = other RNA
gggtcccccgactctggctttcccccaggtgtacatgttcctggtgaaatggcaggacctgtcggagaaggtggtctaccggcgcttcacagaga

SEQ ID NO: 15896 - RNA, 95 nt, synthetic construct
  source 1..95: mol_type = other RNA
gggtcccccgactctggctttcccccaggtgtacatgttcctggtgaaatggcaggacctgtcggagaaggtggtctaccggcgcttcaccgaga

SEQ ID NO: 15897 - RNA, 95 nt, synthetic construct
  source 1..95: mol_type = other RNA
gggtcccccgactctggctttcccccaggtgtacatgttcctggtgaaatggcaggacctgtcggagaaggtggtctaccggcgcttcactgaga

SEQ ID NO: 15898 - RNA, 95 nt, synthetic construct
  source 1..95: mol_type = other RNA
gggtcccccgactctggctttcccccaggtgtacatgttcctggtgaaatggcaggacctgtcggagaaggtggtctaccggcgcttcacggaga

SEQ ID NO: 15899 - RNA, 95 nt, synthetic construct
  source 1..95: mol_type = other RNA
gggtcccccgactctggctttcccccaggtttacatgttcctggtgaaatggcaggacctgtcggagaaggtggtctaccggcgcttcacagaga

SEQ ID NO: 15900 - RNA, 96 nt, synthetic construct
  source 1..96: mol_type = other RNA
ggggtcccccgactctggctttcccccaggtttacatgttcctggtgaaatggcaggacctgtcggagaaggtggtctaccggcgcttcacggaga

SEQ ID NO: 15901 - RNA, 96 nt, synthetic construct
  source 1..96: mol_type = other RNA
ggggtcccccgactctggctttcccccaggtgtacatgttcctggtgaaatggcaggacctgtcggagaaggtggtctaccggcgcttcacagaga

SEQ ID NO: 15902 - RNA, 96 nt, synthetic construct
  source 1..96: mol_type = other RNA
ggggtcccccgactctggctttcccccaggtgtacatgttcctggtgaaatggcaggacctgtcggagaaggtggtctaccggcgcttcaccgaga

SEQ ID NO: 15903 - RNA, 96 nt, synthetic construct
  source 1..96: mol_type = other RNA
ggggtcccccgactctggctttcccccaggtgtacatgttcctggtgaaatggcaggacctgtcggagaaggtggtctaccggcgcttcacggaga

SEQ ID NO: 15904 - RNA, 96 nt, synthetic construct
  source 1..96: mol_type = other RNA
ggggtcccccgactctggctttcccccaggtttacatgttcctggtgaaatggcaggacctgtcggagaaggtggtctaccggcgcttcacagaga

SEQ ID NO: 15905 - RNA, 96 nt, synthetic construct
  source 1..96: mol_type = other RNA
ggggtcccccgactctggctttcccccaggtttacatgttcctggtgaaatggcaggacctgtcggagaaggtggtctaccggcgcttcaccgaga

SEQ ID NO: 15906 - RNA, 96 nt, synthetic construct
  source 1..96: mol_type = other RNA
ggggtcccccgactctggctttcccccaggtgtacatgttcctggtgaaatggcaggacctgtcggagaaggtggtctaccggcgcttcactgaga

SEQ ID NO: 15907 - RNA, 96 nt, synthetic construct
  source 1..96: mol_type = other RNA
ggggtcccccgactctggctttcccccaggtttacatgttcctggtgaaatggcaggacctgtcggagaaggtggtctaccggcgcttcactgaga

SEQ ID NO: 15908 - RNA, 96 nt, synthetic construct
  source 1..96: mol_type = other RNA
ggggtcccccgactctggctttcccccaggtctacatgttcctggtgaaatggcaggacctgtcggagaaggtggtctaccggcgcttcaccgaga

SEQ ID NO: 15909 - RNA, 96 nt, synthetic construct
  source 1..96: mol_type = other RNA
ggggtcccccgactctggctttcccccaggtctacatgttcctggtgaaatggcaggacctgtcggagaaggtggtctaccggcgcttcacagaga

SEQ ID NO: 15910 - RNA, 96 nt, synthetic construct
  source 1..96: mol_type = other RNA
ggggtcccccgactctggctttcccccaggtatacatgttcctggtgaaatggcaggacctgtcggagaaggtggtctaccggcgcttcactgaga

SEQ ID NO: 15911 - RNA, 96 nt, synthetic construct
  source 1..96: mol_type = other RNA
ggggtcccccgactctggctttcccccaggtatacatgttcctggtgaaatggcaggacctgtcggagaaggtggtctaccggcgcttcacggaga

SEQ ID NO: 15912 - RNA, 96 nt, synthetic construct
  source 1..96: mol_type = other RNA
ggggtcccccgactctggctttcccccaggtatacatgttcctggtgaaatggcaggacctgtcggagaaggtggtctaccggcgcttcaccgaga

SEQ ID NO: 15913 - RNA, 96 nt, synthetic construct
  source 1..96: mol_type = other RNA
ggggtcccccgactctggctttcccccaggtatacatgttcctggtgaaatggcaggacctgtcggagaaggtggtctaccggcgcttcacagaga

SEQ ID NO: 15914 - RNA, 96 nt, synthetic construct
  source 1..96: mol_type = other RNA
ggggtcccccgactctggctttcccccaggtctacatgttcctggtgaaatggcaggacctgtcggagaaggtggtctaccggcgcttcactgaga

SEQ ID NO: 15915 - RNA, 96 nt, synthetic construct
  source 1..96: mol_type = other RNA
ggggtcccccgactctggctttcccccaggtctacatgttcctggtgaaatggcaggacctgtcggagaaggtggtctaccggcgcttcacggaga

SEQ ID NO: 15916 - RNA, 97 nt, synthetic construct
  source 1..97: mol_type = other RNA
tggggtcccccgactctggctttcccccaggtatacatgttcctggtgaaatggcaggacctgtcggagaaggtggtctaccggcgcttcacagaga

SEQ ID NO: 15917 - RNA, 97 nt, synthetic construct
  source 1..97: mol_type = other RNA
tggggtcccccgactctggctttcccccaggtgtacatgttcctggtgaaatggcaggacctgtcggagaaggtggtctaccggcgcttcactgaga

SEQ ID NO: 15918 - RNA, 97 nt, synthetic construct
  source 1..97: mol_type = other RNA
tggggtcccccgactctggctttcccccaggtttacatgttcctggtgaaatggcaggacctgtcggagaaggtggtctaccggcgcttcacagaga

SEQ ID NO: 15919 - RNA, 97 nt, synthetic construct
  source 1..97: mol_type = other RNA
tggggtcccccgactctggctttcccccaggtgtacatgttcctggtgaaatggcaggacctgtcggagaaggtggtctaccggcgcttcacggaga

SEQ ID NO: 15920 - RNA, 97 nt, synthetic construct
  source 1..97: mol_type = other RNA
tggggtcccccgactctggctttcccccaggtttacatgttcctggtgaaatggcaggacctgtcggagaaggtggtctaccggcgcttcaccgaga

SEQ ID NO: 15921 - RNA, 97 nt, synthetic construct
  source 1..97: mol_type = other RNA
tggggtcccccgactctggctttcccccaggtctacatgttcctggtgaaatggcaggacctgtcggagaaggtggtctaccggcgcttcacagaga

SEQ ID NO: 15922 - RNA, 97 nt, synthetic construct
  source 1..97: mol_type = other RNA
tggggtcccccgactctggctttcccccaggtttacatgttcctggtgaaatggcaggacctgtcggagaaggtggtctaccggcgcttcactgaga

SEQ ID NO: 15923 - RNA, 97 nt, synthetic construct
  source 1..97: mol_type = other RNA
tggggtcccccgactctggctttcccccaggtctacatgttcctggtgaaatggcaggacctgtcggagaaggtggtctaccggcgcttcacggaga

SEQ ID NO: 15924 - RNA, 97 nt, synthetic construct
  source 1..97: mol_type = other RNA
tggggtcccccgactctggctttcccccaggtatacatgttcctggtgaaatggcaggacctgtcggagaaggtggtctaccggcgcttcacggaga

SEQ ID NO: 15925 - RNA, 97 nt, synthetic construct
  source 1..97: mol_type = other RNA
tggggtcccccgactctggctttcccccaggtctacatgttcctggtgaaatggcaggacctgtcggagaaggtggtctaccggcgcttcactgaga

SEQ ID NO: 15926 - RNA, 97 nt, synthetic construct
  source 1..97: mol_type = other RNA
tggggtcccccgactctggctttcccccaggtgtacatgttcctggtgaaatggcaggacctgtcggagaaggtggtctaccggcgcttcaccgaga

SEQ ID NO: 15927 - RNA, 97 nt, synthetic construct
  source 1..97: mol_type = other RNA
tggggtcccccgactctggctttcccccaggtgtacatgttcctggtgaaatggcaggacctgtcggagaaggtggtctaccggcgcttcacagaga

SEQ ID NO: 15928 - RNA, 97 nt, synthetic construct
  source 1..97: mol_type = other RNA
tggggtcccccgactctggctttcccccaggtatacatgttcctggtgaaatggcaggacctgtcggagaaggtggtctaccggcgcttcactgaga

SEQ ID NO: 15929 - RNA, 97 nt, synthetic construct
  source 1..97: mol_type = other RNA
tggggtcccccgactctggctttcccccaggtatacatgttcctggtgaaatggcaggacctgtcggagaaggtggtctaccggcgcttcaccgaga

SEQ ID NO: 15930 - RNA, 97 nt, synthetic construct
  source 1..97: mol_type = other RNA
tggggtcccccgactctggctttcccccaggtctacatgttcctggtgaaatggcaggacctgtcggagaaggtggtctaccggcgcttcaccgaga

SEQ ID NO: 15931 - RNA, 97 nt, synthetic construct
  source 1..97: mol_type = other RNA
tggggtcccccgactctggctttcccccaggtttacatgttcctggtgaaatggcaggacctgtcggagaaggtggtctaccggcgcttcacggaga

SEQ ID NO: 15932 - RNA, 98 nt, synthetic construct
  source 1..98: mol_type = other RNA
atggggtcccccgactctggctttcccccaggtttacatgttcctggtgaaatggcaggacctgtcggagaaggtggtctaccggcgcttcaccgaga

SEQ ID NO: 15933 - RNA, 98 nt, synthetic construct
  source 1..98: mol_type = other RNA
atggggtcccccgactctggctttcccccaggtatacatgttcctggtgaaatggcaggacctgtcggagaaggtggtctaccggcgcttcactgaga

SEQ ID NO: 15934 - RNA, 98 nt, synthetic construct
  source 1..98: mol_type = other RNA
atggggtcccccgactctggctttcccccaggtatacatgttcctggtgaaatggcaggacctgtcggagaaggtggtctaccggcgcttcacagaga

SEQ ID NO: 15935 - RNA, 98 nt, synthetic construct
  source 1..98: mol_type = other RNA
atggggtcccccgactctggctttcccccaggtctacatgttcctggtgaaatggcaggacctgtcggagaaggtggtctaccggcgcttcaccgaga

SEQ ID NO: 15936 - RNA, 98 nt, synthetic construct
  source 1..98: mol_type = other RNA
atggggtcccccgactctggctttcccccaggtatacatgttcctggtgaaatggcaggacctgtcggagaaggtggtctaccggcgcttcaccgaga

SEQ ID NO: 15937 - RNA, 98 nt, synthetic construct
  source 1..98: mol_type = other RNA
atggggtcccccgactctggctttcccccaggtgtacatgttcctggtgaaatggcaggacctgtcggagaaggtggtctaccggcgcttcaccgaga

SEQ ID NO: 15938 - RNA, 98 nt, synthetic construct
  source 1..98: mol_type = other RNA
atggggtcccccgactctggctttcccccaggtttacatgttcctggtgaaatggcaggacctgtcggagaaggtggtctaccggcgcttcactgaga

SEQ ID NO: 15939 - RNA, 98 nt, synthetic construct
  source 1..98: mol_type = other RNA
atggggtcccccgactctggctttcccccaggtttacatgttcctggtgaaatggcaggacctgtcggagaaggtggtctaccggcgcttcacggaga

SEQ ID NO: 15940 - RNA, 98 nt, synthetic construct
  source 1..98: mol_type = other RNA
atggggtcccccgactctggctttcccccaggtgtacatgttcctggtgaaatggcaggacctgtcggagaaggtggtctaccggcgcttcactgaga

SEQ ID NO: 15941 - RNA, 98 nt, synthetic construct
  source 1..98: mol_type = other RNA
atggggtcccccgactctggctttcccccaggtctacatgttcctggtgaaatggcaggacctgtcggagaaggtggtctaccggcgcttcacagaga

SEQ ID NO: 15942 - RNA, 98 nt, synthetic construct
  source 1..98: mol_type = other RNA
atggggtcccccgactctggctttcccccaggtttacatgttcctggtgaaatggcaggacctgtcggagaaggtggtctaccggcgcttcacagaga

SEQ ID NO: 15943 - RNA, 98 nt, synthetic construct
  source 1..98: mol_type = other RNA
atggggtcccccgactctggctttcccccaggtctacatgttcctggtgaaatggcaggacctgtcggagaaggtggtctaccggcgcttcacggaga

SEQ ID NO: 15944 - RNA, 98 nt, synthetic construct
  source 1..98: mol_type = other RNA
atggggtcccccgactctggctttcccccaggtctacatgttcctggtgaaatggcaggacctgtcggagaaggtggtctaccggcgcttcactgaga

SEQ ID NO: 15945 - RNA, 98 nt, synthetic construct
  source 1..98: mol_type = other RNA
atggggtcccccgactctggctttcccccaggtgtacatgttcctggtgaaatggcaggacctgtcggagaaggtggtctaccggcgcttcacagaga

SEQ ID NO: 15946 - RNA, 98 nt, synthetic construct
  source 1..98: mol_type = other RNA
atggggtcccccgactctggctttcccccaggtatacatgttcctggtgaaatggcaggacctgtcggagaaggtggtctaccggcgcttcacggaga

SEQ ID NO: 15947 - RNA, 98 nt, synthetic construct
  source 1..98: mol_type = other RNA
atggggtcccccgactctggctttcccccaggtgtacatgttcctggtgaaatggcaggacctgtcggagaaggtggtctaccggcgcttcacggaga

SEQ ID NO: 15948 - RNA, 99 nt, synthetic construct
  source 1..99: mol_type = other RNA
aatggggtcccccgactctggctttcccccaggtttacatgttcctggtgaaatggcaggacctgtcggagaaggtggtctaccggcgcttcactgaga

SEQ ID NO: 15949 - RNA, 99 nt, synthetic construct
  source 1..99: mol_type = other RNA
aatggggtcccccgactctggctttcccccaggtctacatgttcctggtgaaatggcaggacctgtcggagaaggtggtctaccggcgcttcactgaga

SEQ ID NO: 15950 - RNA, 99 nt, synthetic construct
  source 1..99: mol_type = other RNA
aatggggtcccccgactctggctttcccccaggtttacatgttcctggtgaaatggcaggacctgtcggagaaggtggtctaccggcgcttcaccgaga

SEQ ID NO: 15951 - RNA, 99 nt, synthetic construct
  source 1..99: mol_type = other RNA
aatggggtcccccgactctggctttcccccaggtctacatgttcctggtgaaatggcaggacctgtcggagaaggtggtctaccggcgcttcacagaga

SEQ ID NO: 15952 - RNA, 99 nt, synthetic construct
  source 1..99: mol_type = other RNA
aatggggtcccccgactctggctttcccccaggtttacatgttcctggtgaaatggcaggacctgtcggagaaggtggtctaccggcgcttcacggaga

SEQ ID NO: 15953 - RNA, 99 nt, synthetic construct
  source 1..99: mol_type = other RNA
aatggggtcccccgactctggctttcccccaggtatacatgttcctggtgaaatggcaggacctgtcggagaaggtggtctaccggcgcttcacagaga

SEQ ID NO: 15954 - RNA, 99 nt, synthetic construct
  source 1..99: mol_type = other RNA
aatggggtcccccgactctggctttcccccaggtatacatgttcctggtgaaatggcaggacctgtcggagaaggtggtctaccggcgcttcaccgaga

SEQ ID NO: 15955 - RNA, 99 nt, synthetic construct
  source 1..99: mol_type = other RNA
aatggggtcccccgactctggctttcccccaggtatacatgttcctggtgaaatggcaggacctgtcggagaaggtggtctaccggcgcttcacggaga

SEQ ID NO: 15956 - RNA, 99 nt, synthetic construct
  source 1..99: mol_type = other RNA
aatggggtcccccgactctggctttcccccaggtctacatgttcctggtgaaatggcaggacctgtcggagaaggtggtctaccggcgcttcaccgaga

SEQ ID NO: 15957 - RNA, 99 nt, synthetic construct
  source 1..99: mol_type = other RNA
aatggggtcccccgactctggctttcccccaggtctacatgttcctggtgaaatggcaggacctgtcggagaaggtggtctaccggcgcttcacggaga

SEQ ID NO: 15958 - RNA, 99 nt, synthetic construct
  source 1..99: mol_type = other RNA
aatggggtcccccgactctggctttcccccaggtgtacatgttcctggtgaaatggcaggacctgtcggagaaggtggtctaccggcgcttcacagaga

SEQ ID NO: 15959 - RNA, 99 nt, synthetic construct
  source 1..99: mol_type = other RNA
aatggggtcccccgactctggctttcccccaggtgtacatgttcctggtgaaatggcaggacctgtcggagaaggtggtctaccggcgcttcaccgaga

SEQ ID NO: 15960 - RNA, 99 nt, synthetic construct
  source 1..99: mol_type = other RNA
aatggggtcccccgactctggctttcccccaggtgtacatgttcctggtgaaatggcaggacctgtcggagaaggtggtctaccggcgcttcacggaga

SEQ ID NO: 15961 - RNA, 99 nt, synthetic construct
  source 1..99: mol_type = other RNA
aatggggtcccccgactctggctttcccccaggtgtacatgttcctggtgaaatggcaggacctgtcggagaaggtggtctaccggcgcttcactgaga

SEQ ID NO: 15962 - RNA, 99 nt, synthetic construct
  source 1..99: mol_type = other RNA
aatggggtcccccgactctggctttcccccaggtttacatgttcctggtgaaatggcaggacctgtcggagaaggtggtctaccggcgcttcacagaga

SEQ ID NO: 15963 - RNA, 99 nt, synthetic construct
  source 1..99: mol_type = other RNA
aatggggtcccccgactctggctttcccccaggtatacatgttcctggtgaaatggcaggacctgtcggagaaggtggtctaccggcgcttcactgaga

SEQ ID NO: 15964 - RNA, 100 nt, synthetic construct
  source 1..100: mol_type = other RNA
gaatggggtcccccgactctggctttcccccaggtatacatgttcctggtgaaatggcaggacctgtcggagaaggtggtctaccggcgcttcacagaga

SEQ ID NO: 15965 - RNA, 100 nt, synthetic construct
  source 1..100: mol_type = other RNA
gaatggggtcccccgactctggctttcccccaggtttacatgttcctggtgaaatggcaggacctgtcggagaaggtggtctaccggcgcttcactgaga

SEQ ID NO: 15966 - RNA, 100 nt, synthetic construct
  source 1..100: mol_type = other RNA
gaatggggtcccccgactctggctttcccccaggtttacatgttcctggtgaaatggcaggacctgtcggagaaggtggtctaccggcgcttcacggaga

SEQ ID NO: 15967 - RNA, 100 nt, synthetic construct
  source 1..100: mol_type = other RNA
gaatggggtcccccgactctggctttcccccaggtttacatgttcctggtgaaatggcaggacctgtcggagaaggtggtctaccggcgcttcacagaga

SEQ ID NO: 15968 - RNA, 100 nt, synthetic construct
  source 1..100: mol_type = other RNA
gaatggggtcccccgactctggctttcccccaggtctacatgttcctggtgaaatggcaggacctgtcggagaaggtggtctaccggcgcttcactgaga

SEQ ID NO: 15969 - RNA, 100 nt, synthetic construct
  source 1..100: mol_type = other RNA
gaatggggtcccccgactctggctttcccccaggtgtacatgttcctggtgaaatggcaggacctgtcggagaaggtggtctaccggcgcttcactgaga

SEQ ID NO: 15970 - RNA, 100 nt, synthetic construct
  source 1..100: mol_type = other RNA
gaatggggtcccccgactctggctttcccccaggtgtacatgttcctggtgaaatggcaggacctgtcggagaaggtggtctaccggcgcttcacggaga

SEQ ID NO: 15971 - RNA, 100 nt, synthetic construct
  source 1..100: mol_type = other RNA
gaatggggtcccccgactctggctttcccccaggtctacatgttcctggtgaaatggcaggacctgtcggagaaggtggtctaccggcgcttcacagaga

SEQ ID NO: 15972 - RNA, 100 nt, synthetic construct
  source 1..100: mol_type = other RNA
gaatggggtcccccgactctggctttcccccaggtgtacatgttcctggtgaaatggcaggacctgtcggagaaggtggtctaccggcgcttcacagaga

SEQ ID NO: 15973 - RNA, 100 nt, synthetic construct
  source 1..100: mol_type = other RNA
gaatggggtcccccgactctggctttcccccaggtttacatgttcctggtgaaatggcaggacctgtcggagaaggtggtctaccggcgcttcaccgaga

SEQ ID NO: 15974 - RNA, 100 nt, synthetic construct
  source 1..100: mol_type = other RNA
gaatggggtcccccgactctggctttcccccaggtctacatgttcctggtgaaatggcaggacctgtcggagaaggtggtctaccggcgcttcacggaga

SEQ ID NO: 15975 - RNA, 100 nt, synthetic construct
  source 1..100: mol_type = other RNA
gaatggggtcccccgactctggctttcccccaggtctacatgttcctggtgaaatggcaggacctgtcggagaaggtggtctaccggcgcttcaccgaga

SEQ ID NO: 15976 - RNA, 100 nt, synthetic construct
  source 1..100: mol_type = other RNA
gaatggggtcccccgactctggctttcccccaggtatacatgttcctggtgaaatggcaggacctgtcggagaaggtggtctaccggcgcttcacggaga

SEQ ID NO: 15977 - RNA, 100 nt, synthetic construct
  source 1..100: mol_type = other RNA
gaatggggtcccccgactctggctttcccccaggtatacatgttcctggtgaaatggcaggacctgtcggagaaggtggtctaccggcgcttcaccgaga

SEQ ID NO: 15978 - RNA, 100 nt, synthetic construct
  source 1..100: mol_type = other RNA
gaatggggtcccccgactctggctttcccccaggtgtacatgttcctggtgaaatggcaggacctgtcggagaaggtggtctaccggcgcttcaccgaga

SEQ ID NO: 15979 - RNA, 100 nt, synthetic construct
  source 1..100: mol_type = other RNA
gaatggggtcccccgactctggctttcccccaggtatacatgttcctggtgaaatggcaggacctgtcggagaaggtggtctaccggcgcttcactgaga

SEQ ID NO: 15980 - RNA, 101 nt, synthetic construct
  source 1..101: mol_type = other RNA
tgaatggggtcccccgactctggctttcccccaggtatacatgttcctggtgaaatggcaggacctgtcggagaaggtggtctaccggcgcttcacagaga

SEQ ID NO: 15981 - RNA, 101 nt, synthetic construct
  source 1..101: mol_type = other RNA
tgaatggggtcccccgactctggctttcccccaggtatacatgttcctggtgaaatggcaggacctgtcggagaaggtggtctaccggcgcttcaccgaga

SEQ ID NO: 15982 - RNA, 101 nt, synthetic construct
  source 1..101: mol_type = other RNA
tgaatggggtcccccgactctggctttcccccaggtatacatgttcctggtgaaatggcaggacctgtcggagaaggtggtctaccggcgcttcacggaga

SEQ ID NO: 15983 - RNA, 101 nt, synthetic construct
  source 1..101: mol_type = other RNA
tgaatggggtcccccgactctggctttcccccaggtatacatgttcctggtgaaatggcaggacctgtcggagaaggtggtctaccggcgcttcactgaga

SEQ ID NO: 15984 - RNA, 101 nt, synthetic construct
  source 1..101: mol_type = other RNA
tgaatggggtcccccgactctggctttcccccaggtctacatgttcctggtgaaatggcaggacctgtcggagaaggtggtctaccggcgcttcacagaga

SEQ ID NO: 15985 - RNA, 101 nt, synthetic construct
  source 1..101: mol_type = other RNA
tgaatggggtcccccgactctggctttcccccaggtctacatgttcctggtgaaatggcaggacctgtcggagaaggtggtctaccggcgcttcaccgaga

SEQ ID NO: 15986 - RNA, 101 nt, synthetic construct
  source 1..101: mol_type = other RNA
tgaatggggtcccccgactctggctttcccccaggtctacatgttcctggtgaaatggcaggacctgtcggagaaggtggtctaccggcgcttcacggaga

SEQ ID NO: 15987 - RNA, 101 nt, synthetic construct
  source 1..101: mol_type = other RNA
tgaatggggtcccccgactctggctttcccccaggtgtacatgttcctggtgaaatggcaggacctgtcggagaaggtggtctaccggcgcttcacggaga

SEQ ID NO: 15988 - RNA, 101 nt, synthetic construct
  source 1..101: mol_type = other RNA
tgaatggggtcccccgactctggctttcccccaggtgtacatgttcctggtgaaatggcaggacctgtcggagaaggtggtctaccggcgcttcaccgaga

SEQ ID NO: 15989 - RNA, 101 nt, synthetic construct
  source 1..101: mol_type = other RNA
tgaatggggtcccccgactctggctttcccccaggtgtacatgttcctggtgaaatggcaggacctgtcggagaaggtggtctaccggcgcttcactgaga

SEQ ID NO: 15990 - RNA, 101 nt, synthetic construct
  source 1..101: mol_type = other RNA
tgaatggggtcccccgactctggctttcccccaggtttacatgttcctggtgaaatggcaggacctgtcggagaaggtggtctaccggcgcttcacagaga

SEQ ID NO: 15991 - RNA, 101 nt, synthetic construct
  source 1..101: mol_type = other RNA
tgaatggggtcccccgactctggctttcccccaggtttacatgttcctggtgaaatggcaggacctgtcggagaaggtggtctaccggcgcttcaccgaga

SEQ ID NO: 15992 - RNA, 101 nt, synthetic construct
  source 1..101: mol_type = other RNA
tgaatggggtcccccgactctggctttcccccaggtctacatgttcctggtgaaatggcaggacctgtcggagaaggtggtctaccggcgcttcactgaga

SEQ ID NO: 15993 - RNA, 101 nt, synthetic construct
  source 1..101: mol_type = other RNA
tgaatggggtcccccgactctggctttcccccaggtttacatgttcctggtgaaatggcaggacctgtcggagaaggtggtctaccggcgcttcactgaga

SEQ ID NO: 15994 - RNA, 101 nt, synthetic construct
  source 1..101: mol_type = other RNA
tgaatggggtcccccgactctggctttcccccaggtgtacatgttcctggtgaaatggcaggacctgtcggagaaggtggtctaccggcgcttcacagaga

SEQ ID NO: 15995 - RNA, 101 nt, synthetic construct
  source 1..101: mol_type = other RNA
tgaatggggtcccccgactctggctttcccccaggtttacatgttcctggtgaaatggcaggacctgtcggagaaggtggtctaccggcgcttcacggaga

SEQ ID NO: 15996 - RNA, 102 nt, synthetic construct
  source 1..102: mol_type = other RNA
ctgaatggggtcccccgactctggctttcccccaggtgtacatgttcctggtgaaatggcaggacctgtcggagaaggtggtctaccggcgcttcactgaga

SEQ ID NO: 15997 - RNA, 102 nt, synthetic construct
  source 1..102: mol_type = other RNA
ctgaatggggtcccccgactctggctttcccccaggtttacatgttcctggtgaaatggcaggacctgtcggagaaggtggtctaccggcgcttcactgaga

SEQ ID NO: 15998 - RNA, 102 nt, synthetic construct
  source 1..102: mol_type = other RNA
ctgaatggggtcccccgactctggctttcccccaggtttacatgttcctggtgaaatggcaggacctgtcggagaaggtggtctaccggcgcttcacagaga

SEQ ID NO: 15999 - RNA, 102 nt, synthetic construct
  source 1..102: mol_type = other RNA
ctgaatggggtcccccgactctggctttcccccaggtctacatgttcctggtgaaatggcaggacctgtcggagaaggtggtctaccggcgcttcacggaga

SEQ ID NO: 16000 - RNA, 102 nt, synthetic construct
  source 1..102: mol_type = other RNA
ctgaatggggtcccccgactctggctttcccccaggtgtacatgttcctggtgaaatggcaggacctgtcggagaaggtggtctaccggcgcttcacggaga

SEQ ID NO: 16001 - RNA, 102 nt, synthetic construct
  source 1..102: mol_type = other RNA
ctgaatggggtcccccgactctggctttcccccaggtgtacatgttcctggtgaaatggcaggacctgtcggagaaggtggtctaccggcgcttcacagaga

SEQ ID NO: 16002 - RNA, 102 nt, synthetic construct
  source 1..102: mol_type = other RNA
ctgaatggggtcccccgactctggctttcccccaggtatacatgttcctggtgaaatggcaggacctgtcggagaaggtggtctaccggcgcttcactgaga

SEQ ID NO: 16003 - RNA, 102 nt, synthetic construct
  source 1..102: mol_type = other RNA
ctgaatggggtcccccgactctggctttcccccaggtatacatgttcctggtgaaatggcaggacctgtcggagaaggtggtctaccggcgcttcacggaga

SEQ ID NO: 16004 - RNA, 102 nt, synthetic construct
  source 1..102: mol_type = other RNA
ctgaatggggtcccccgactctggctttcccccaggtgtacatgttcctggtgaaatggcaggacctgtcggagaaggtggtctaccggcgcttcaccgaga

SEQ ID NO: 16005 - RNA, 102 nt, synthetic construct
  source 1..102: mol_type = other RNA
ctgaatggggtcccccgactctggctttcccccaggtttacatgttcctggtgaaatggcaggacctgtcggagaaggtggtctaccggcgcttcaccgaga

SEQ ID NO: 16006 - RNA, 102 nt, synthetic construct
  source 1..102: mol_type = other RNA
ctgaatggggtcccccgactctggctttcccccaggtttacatgttcctggtgaaatggcaggacctgtcggagaaggtggtctaccggcgcttcacggaga

SEQ ID NO: 16007 - RNA, 102 nt, synthetic construct
  source 1..102: mol_type = other RNA
ctgaatggggtcccccgactctggctttcccccaggtctacatgttcctggtgaaatggcaggacctgtcggagaaggtggtctaccggcgcttcactgaga

SEQ ID NO: 16008 - RNA, 102 nt, synthetic construct
  source 1..102: mol_type = other RNA
ctgaatggggtcccccgactctggctttcccccaggtatacatgttcctggtgaaatggcaggacctgtcggagaaggtggtctaccggcgcttcacagaga

SEQ ID NO: 16009 - RNA, 102 nt, synthetic construct
  source 1..102: mol_type = other RNA
ctgaatggggtcccccgactctggctttcccccaggtatacatgttcctggtgaaatggcaggacctgtcggagaaggtggtctaccggcgcttcaccgaga

SEQ ID NO: 16010 - RNA, 102 nt, synthetic construct
  source 1..102: mol_type = other RNA
ctgaatggggtcccccgactctggctttcccccaggtctacatgttcctggtgaaatggcaggacctgtcggagaaggtggtctaccggcgcttcacagaga

SEQ ID NO: 16011 - RNA, 102 nt, synthetic construct
  source 1..102: mol_type = other RNA
ctgaatggggtcccccgactctggctttcccccaggtctacatgttcctggtgaaatggcaggacctgtcggagaaggtggtctaccggcgcttcaccgaga

SEQ ID NO: 16012 - RNA, 103 nt, synthetic construct
  source 1..103: mol_type = other RNA
gctgaatggggtcccccgactctggctttcccccaggtctacatgttcctggtgaaatggcaggacctgtcggagaaggtggtctaccggcgcttcacggaga

SEQ ID NO: 16013 - RNA, 103 nt, synthetic construct
  source 1..103: mol_type = other RNA
gctgaatggggtcccccgactctggctttcccccaggtttacatgttcctggtgaaatggcaggacctgtcggagaaggtggtctaccggcgcttcaccgaga

SEQ ID NO: 16014 - RNA, 103 nt, synthetic construct
  source 1..103: mol_type = other RNA
gctgaatggggtcccccgactctggctttcccccaggtctacatgttcctggtgaaatggcaggacctgtcggagaaggtggtctaccggcgcttcactgaga

SEQ ID NO: 16015 - RNA, 103 nt, synthetic construct
  source 1..103: mol_type = other RNA
gctgaatggggtcccccgactctggctttcccccaggtgtacatgttcctggtgaaatggcaggacctgtcggagaaggtggtctaccggcgcttcacagaga

SEQ ID NO: 16016 - RNA, 103 nt, synthetic construct
  source 1..103: mol_type = other RNA
gctgaatggggtcccccgactctggctttcccccaggtgtacatgttcctggtgaaatggcaggacctgtcggagaaggtggtctaccggcgcttcaccgaga

SEQ ID NO: 16017 - RNA, 103 nt, synthetic construct
  source 1..103: mol_type = other RNA
gctgaatggggtcccccgactctggctttcccccaggtttacatgttcctggtgaaatggcaggacctgtcggagaaggtggtctaccggcgcttcacagaga

SEQ ID NO: 16018 - RNA, 103 nt, synthetic construct
  source 1..103: mol_type = other RNA
gctgaatggggtcccccgactctggctttcccccaggtatacatgttcctggtgaaatggcaggacctgtcggagaaggtggtctaccggcgcttcacggaga

SEQ ID NO: 16019 - RNA, 103 nt, synthetic construct
  source 1..103: mol_type = other RNA
gctgaatggggtcccccgactctggctttcccccaggtttacatgttcctggtgaaatggcaggacctgtcggagaaggtggtctaccggcgcttcacggaga

SEQ ID NO: 16020 - RNA, 103 nt, synthetic construct
  source 1..103: mol_type = other RNA
gctgaatggggtcccccgactctggctttcccccaggtttacatgttcctggtgaaatggcaggacctgtcggagaaggtggtctaccggcgcttcactgaga

SEQ ID NO: 16021 - RNA, 103 nt, synthetic construct
  source 1..103: mol_type = other RNA
gctgaatggggtcccccgactctggctttcccccaggtctacatgttcctggtgaaatggcaggacctgtcggagaaggtggtctaccggcgcttcaccgaga

SEQ ID NO: 16022 - RNA, 103 nt, synthetic construct
  source 1..103: mol_type = other RNA
gctgaatggggtcccccgactctggctttcccccaggtatacatgttcctggtgaaatggcaggacctgtcggagaaggtggtctaccggcgcttcacagaga

SEQ ID NO: 16023 - RNA, 103 nt, synthetic construct
  source 1..103: mol_type = other RNA
gctgaatggggtcccccgactctggctttcccccaggtatacatgttcctggtgaaatggcaggacctgtcggagaaggtggtctaccggcgcttcaccgaga

SEQ ID NO: 16024 - RNA, 103 nt, synthetic construct
  source 1..103: mol_type = other RNA
gctgaatggggtcccccgactctggctttcccccaggtatacatgttcctggtgaaatggcaggacctgtcggagaaggtggtctaccggcgcttcactgaga

SEQ ID NO: 16025 - RNA, 103 nt, synthetic construct
  source 1..103: mol_type = other RNA
gctgaatggggtcccccgactctggctttcccccaggtgtacatgttcctggtgaaatggcaggacctgtcggagaaggtggtctaccggcgcttcacggaga

SEQ ID NO: 16026 - RNA, 103 nt, synthetic construct
  source 1..103: mol_type = other RNA
gctgaatggggtcccccgactctggctttcccccaggtgtacatgttcctggtgaaatggcaggacctgtcggagaaggtggtctaccggcgcttcactgaga

SEQ ID NO: 16027 - RNA, 103 nt, synthetic construct
  source 1..103: mol_type = other RNA
gctgaatggggtcccccgactctggctttcccccaggtctacatgttcctggtgaaatggcaggacctgtcggagaaggtggtctaccggcgcttcacagaga

SEQ ID NO: 16028 - RNA, 19 nt, synthetic construct
  source 1..19: mol_type = other RNA
tgttcctggtgaaatggca

SEQ ID NO: 16029 - RNA, 19 nt, synthetic construct
  source 1..19: mol_type = other RNA
aaatggcaggacctgtcgg

SEQ ID NO: 16030 - RNA, 19 nt, synthetic construct
  source 1..19: mol_type = other RNA
atacatgttcctggtgaaa

SEQ ID NO: 16031 - RNA, 19 nt, synthetic construct
  source 1..19: mol_type = other RNA
ccccaggtatacatgttcc

SEQ ID NO: 16032 - RNA, 19 nt, synthetic construct
  source 1..19: mol_type = other RNA
atgttcctggtgaaatggc

SEQ ID NO: 16033 - RNA, 19 nt, synthetic construct
  source 1..19: mol_type = other RNA
gtctaccggcgcttcaccg

SEQ ID NO: 16034 - RNA, 19 nt, synthetic construct
  source 1..19: mol_type = other RNA
gtgaaatggcaggacctgt

SEQ ID NO: 16035 - RNA, 19 nt, synthetic construct
  source 1..19: mol_type = other RNA
tggcaggacctgtcggaga

SEQ ID NO: 16036 - RNA, 19 nt, synthetic construct
  source 1..19: mol_type = other RNA
gtacatgttcctggtgaaa

SEQ ID NO: 16037 - RNA, 19 nt, synthetic construct
  source 1..19: mol_type = other RNA
caggacctgtcggagaagg

SEQ ID NO: 16038 - RNA, 19 nt, synthetic construct
  source 1..19: mol_type = other RNA
gtcggagaaggtggtctac

SEQ ID NO: 16039 - RNA, 19 nt, synthetic construct
  source 1..19: mol_type = other RNA
ccccaggtgtacatgttcc

SEQ ID NO: 16040 - RNA, 20 nt, synthetic construct
  source 1..20: mol_type = other RNA
tgtacatgttcctggtgaaa

SEQ ID NO: 16041 - RNA, 20 nt, synthetic construct
  source 1..20: mol_type = other RNA
atgttcctggtgaaatggca

SEQ ID NO: 16042 - RNA, 20 nt, synthetic construct
  source 1..20: mol_type = other RNA
caggacctgtcggagaaggt

SEQ ID NO: 16043 - RNA, 20 nt, synthetic construct
  source 1..20: mol_type = other RNA
catgttcctggtgaaatggc

SEQ ID NO: 16044 - RNA, 20 nt, synthetic construct
  source 1..20: mol_type = other RNA
ccaggtgtacatgttcctgg

SEQ ID NO: 16045 - RNA, 20 nt, synthetic construct
  source 1..20: mol_type = other RNA
ccaggtttacatgttcctgg

SEQ ID NO: 16046 - RNA, 20 nt, synthetic construct
  source 1..20: mol_type = other RNA
ccccaggtatacatgttcct

SEQ ID NO: 16047 - RNA, 20 nt, synthetic construct
  source 1..20: mol_type = other RNA
ccccaggtctacatgttcct

SEQ ID NO: 16048 - RNA, 20 nt, synthetic construct
  source 1..20: mol_type = other RNA
ccaggtatacatgttcctgg

SEQ ID NO: 16049 - RNA, 20 nt, synthetic construct
  source 1..20: mol_type = other RNA
ccaggtctacatgttcctgg

SEQ ID NO: 16050 - RNA, 20 nt, synthetic construct
  source 1..20: mol_type = other RNA
tctacatgttcctggtgaaa

SEQ ID NO: 16051 - RNA, 20 nt, synthetic construct
  source 1..20: mol_type = other RNA
gtcggagaaggtggtctacc

SEQ ID NO: 16052 - RNA, 20 nt, synthetic construct
  source 1..20: mol_type = other RNA
atggcaggacctgtcggaga

SEQ ID NO: 16053 - RNA, 20 nt, synthetic construct
  source 1..20: mol_type = other RNA
tggcaggacctgtcggagaa

SEQ ID NO: 16054 - RNA, 20 nt, synthetic construct
  source 1..20: mol_type = other RNA
atacatgttcctggtgaaat

SEQ ID NO: 16055 - RNA, 20 nt, synthetic construct
  source 1..20: mol_type = other RNA
ggtctaccggcgcttcacag

SEQ ID NO: 16056 - RNA, 20 nt, synthetic construct
  source 1..20: mol_type = other RNA
tgtcggagaaggtggtctac

SEQ ID NO: 16057 - RNA, 20 nt, synthetic construct
  source 1..20: mol_type = other RNA
ttacatgttcctggtgaaat

SEQ ID NO: 16058 - RNA, 20 nt, synthetic construct
  source 1..20: mol_type = other RNA
tttacatgttcctggtgaaa

SEQ ID NO: 16059 - RNA, 20 nt, synthetic construct
  source 1..20: mol_type = other RNA
gcaggacctgtcggagaagg

SEQ ID NO: 16060 - RNA, 20 nt, synthetic construct
  source 1..20: mol_type = other RNA
gaaatggcaggacctgtcgg

SEQ ID NO: 16061 - RNA, 20 nt, synthetic construct
  source 1..20: mol_type = other RNA
ggtctaccggcgcttcaccg

SEQ ID NO: 16062 - RNA, 20 nt, synthetic construct
  source 1..20: mol_type = other RNA
gtggtctaccggcgcttcac

SEQ ID NO: 16063 - RNA, 20 nt, synthetic construct
  source 1..20: mol_type = other RNA
ggtctaccggcgcttcactg

SEQ ID NO: 16064 - RNA, 20 nt, synthetic construct
  source 1..20: mol_type = other RNA
cccccaggtgtacatgttcc

SEQ ID NO: 16065 - RNA, 20 nt, synthetic construct
  source 1..20: mol_type = other RNA
cccccaggtttacatgttcc

SEQ ID NO: 16066 - RNA, 20 nt, synthetic construct
  source 1..20: mol_type = other RNA
cctggtgaaatggcaggacc

SEQ ID NO: 16067 - RNA, 20 nt, synthetic construct
  source 1..20: mol_type = other RNA
ctacatgttcctggtgaaat

SEQ ID NO: 16068 - RNA, 20 nt, synthetic construct
  source 1..20: mol_type = other RNA
cggagaaggtggtctaccgg

SEQ ID NO: 16069 - RNA, 20 nt, synthetic construct
  source 1..20: mol_type = other RNA
cccccaggtatacatgttcc

SEQ ID NO: 16070 - RNA, 20 nt, synthetic construct
  source 1..20: mol_type = other RNA
gtacatgttcctggtgaaat

SEQ ID NO: 16071 - RNA, 20 nt, synthetic construct
  source 1..20: mol_type = other RNA
ggtgaaatggcaggacctgt

SEQ ID NO: 16072 - RNA, 20 nt, synthetic construct
  source 1..20: mol_type = other RNA
ccccaggtgtacatgttcct

SEQ ID NO: 16073 - RNA, 20 nt, synthetic construct
  source 1..20: mol_type = other RNA
gtgaaatggcaggacctgtc

SEQ ID NO: 16074 - RNA, 20 nt, synthetic construct
  source 1..20: mol_type = other RNA
tatacatgttcctggtgaaa

SEQ ID NO: 16075 - RNA, 20 nt, synthetic construct
  source 1..20: mol_type = other RNA
ccccaggtttacatgttcct

SEQ ID NO: 16076 - RNA, 20 nt, synthetic construct
  source 1..20: mol_type = other RNA
cccccaggtctacatgttcc

SEQ ID NO: 16077 - RNA, 20 nt, synthetic construct
  source 1..20: mol_type = other RNA
ggtctaccggcgcttcacgg

SEQ ID NO: 16078 - RNA, 16 nt, synthetic construct
  source 1..16: mol_type = other RNA
gaccaccttctccgac

SEQ ID NO: 16079 - RNA, 17 nt, synthetic construct
  source 1..17: mol_type = other RNA
agaccaccttctccgac

SEQ ID NO: 16080 - RNA, 18 nt, synthetic construct
  source 1..18: mol_type = other RNA
tagaccaccttctccgac

SEQ ID NO: 16081 - RNA, 19 nt, synthetic construct
  source 1..19: mol_type = other RNA
gtagaccaccttctccgac

SEQ ID NO: 16082 - RNA, 20 nt, synthetic construct
  source 1..20: mol_type = other RNA
ggtagaccaccttctccgac

SEQ ID NO: 16083 - RNA, 21 nt, synthetic construct
  source 1..21: mol_type = other RNA
cggtagaccaccttctccgac

SEQ ID NO: 16084 - RNA, 22 nt, synthetic construct
  source 1..22: mol_type = other RNA
ccggtagaccaccttctccgac

SEQ ID NO: 16085-16091 - skipped (7 entries)

SEQ ID NO: 16092 - RNA, 10 nt, synthetic construct
  source 1..10: mol_type = other RNA
ggagaaggtg

SEQ ID NO: 16093 - RNA, 11 nt, synthetic construct
  source 1..11: mol_type = other RNA
ggagaaggtgg

SEQ ID NO: 16094 - RNA, 12 nt, synthetic construct
  source 1..12: mol_type = other RNA
ggagaaggtggt

SEQ ID NO: 16095 - RNA, 13 nt, synthetic construct
  source 1..13: mol_type = other RNA
ggagaaggtggtc

SEQ ID NO: 16096 - RNA, 14 nt, synthetic construct
  source 1..14: mol_type = other RNA
ggagaaggtggtct

SEQ ID NO: 16097 - RNA, 15 nt, synthetic construct
  source 1..15: mol_type = other RNA
ggagaaggtggtcta

SEQ ID NO: 16098 - RNA, 16 nt, synthetic construct
  source 1..16: mol_type = other RNA
ggagaaggtggtctac

SEQ ID NO: 16099 - RNA, 17 nt, synthetic construct
  source 1..17: mol_type = other RNA
ggagaaggtggtctacc

SEQ ID NO: 16100 - RNA, 18 nt, synthetic construct
  source 1..18: mol_type = other RNA
ggagaaggtggtctaccg

SEQ ID NO: 16101 - RNA, 19 nt, synthetic construct
  source 1..19: mol_type = other RNA
ggagaaggtggtctaccgg

SEQ ID NO: 16102 - RNA, 35 nt, synthetic construct
  source 1..35: mol_type = other RNA
gtatacatgttcctggtgaaatggcaggatctgtc

SEQ ID NO: 16103 - RNA, 35 nt, synthetic construct
  source 1..35: mol_type = other RNA
gtatacatgttcctggtgaaatggcaggacttgtc

SEQ ID NO: 16104 - RNA, 35 nt, synthetic construct
  source 1..35: mol_type = other RNA
gtatacatgttcctggtgaaatggcaggacctgtc

SEQ ID NO: 16105 - RNA, 35 nt, synthetic construct
  source 1..35: mol_type = other RNA
gtgtacatgttcctggtgaaatggcaggacttgtc

SEQ ID NO: 16106 - RNA, 35 nt, synthetic construct
  source 1..35: mol_type = other RNA
gtttacatgttcctggtgaaatggcaggatttatc

SEQ ID NO: 16107 - RNA, 35 nt, synthetic construct
  source 1..35: mol_type = other RNA
gtctacatgttcctggtgaaatggcaggacttatc

SEQ ID NO: 16108 - RNA, 35 nt, synthetic construct
  source 1..35: mol_type = other RNA
gtgtacatgttcctggtgaaatggcaggatttatc

SEQ ID NO: 16109 - RNA, 35 nt, synthetic construct
  source 1..35: mol_type = other RNA
gtctacatgttcctggtgaaatggcaggacctgtc

SEQ ID NO: 16110 - RNA, 35 nt, synthetic construct
  source 1..35: mol_type = other RNA
gtctacatgttcctggtgaaatggcaggacttgtc

SEQ ID NO: 16111 - RNA, 35 nt, synthetic construct
  source 1..35: mol_type = other RNA
gtatacatgttcctggtgaaatggcaggatttatc

SEQ ID NO: 16112 - RNA, 35 nt, synthetic construct
  source 1..35: mol_type = other RNA
gtctacatgttcctggtgaaatggcaggatctgtc

SEQ ID NO: 16113 - RNA, 35 nt, synthetic construct
  source 1..35: mol_type = other RNA
gtctacatgttcctggtgaaatggcaggatttatc

SEQ ID NO: 16114 - RNA, 35 nt, synthetic construct
  source 1..35: mol_type = other RNA
gtctacatgttcctggtgaaatggcaggatttgtc

SEQ ID NO: 16115 - RNA, 35 nt, synthetic construct
  source 1..35: mol_type = other RNA
gtgtacatgttcctggtgaaatggcaggacctgtc

SEQ ID NO: 16116 - RNA, 35 nt, synthetic construct
  source 1..35: mol_type = other RNA
gtgtacatgttcctggtgaaatggcaggacttatc

SEQ ID NO: 16117 - RNA, 35 nt, synthetic construct
  source 1..35: mol_type = other RNA
gtttacatgttcctggtgaaatggcaggacttgtc

SEQ ID NO: 16118 - RNA, 35 nt, synthetic construct
  source 1..35: mol_type = other RNA
gtgtacatgttcctggtgaaatggcaggatttgtc

SEQ ID NO: 16119 - RNA, 35 nt, synthetic construct
  source 1..35: mol_type = other RNA
gtttacatgttcctggtgaaatggcaggacctgtc

SEQ ID NO: 16120 - RNA, 35 nt, synthetic construct
  source 1..35: mol_type = other RNA
gtttacatgttcctggtgaaatggcaggacttatc

SEQ ID NO: 16121 - RNA, 35 nt, synthetic construct
  source 1..35: mol_type = other RNA
gtttacatgttcctggtgaaatggcaggatttgtc

SEQ ID NO: 16122 - RNA, 35 nt, synthetic construct
  source 1..35: mol_type = other RNA
gtttacatgttcctggtgaaatggcaggatctgtc

SEQ ID NO: 16123 - RNA, 35 nt, synthetic construct
  source 1..35: mol_type = other RNA
gtatacatgttcctggtgaaatggcaggatttgtc

SEQ ID NO: 16124 - RNA, 35 nt, synthetic construct
  source 1..35: mol_type = other RNA
gtgtacatgttcctggtgaaatggcaggatctgtc

SEQ ID NO: 16125 - RNA, 35 nt, synthetic construct
  source 1..35: mol_type = other RNA
gtatacatgttcctggtgaaatggcaggacttatc

SEQ ID NO: 16126 - RNA, 36 nt, synthetic construct
  source 1..36: mol_type = other RNA
ggtgtacatgttcctggtgaaatggcaggacttatc

SEQ ID NO: 16127 - RNA, 36 nt, synthetic construct
  source 1..36: mol_type = other RNA
ggtctacatgttcctggtgaaatggcaggatttatc

SEQ ID NO: 16128 - RNA, 36 nt, synthetic construct
  source 1..36: mol_type = other RNA
ggtgtacatgttcctggtgaaatggcaggatttatc

SEQ ID NO: 16129 - RNA, 36 nt, synthetic construct
  source 1..36: mol_type = other RNA
ggtctacatgttcctggtgaaatggcaggatttgtc

SEQ ID NO: 16130 - RNA, 36 nt, synthetic construct
  source 1..36: mol_type = other RNA
ggtgtacatgttcctggtgaaatggcaggacctgtc

SEQ ID NO: 16131 - RNA, 36 nt, synthetic construct
  source 1..36: mol_type = other RNA
ggtctacatgttcctggtgaaatggcaggacctgtc

SEQ ID NO: 16132 - RNA, 36 nt, synthetic construct
  source 1..36: mol_type = other RNA
ggtgtacatgttcctggtgaaatggcaggacttgtc

SEQ ID NO: 16133 - RNA, 36 nt, synthetic construct
  source 1..36: mol_type = other RNA
ggtctacatgttcctggtgaaatggcaggacttatc

SEQ ID NO: 16134 - RNA, 36 nt, synthetic construct
  source 1..36: mol_type = other RNA
ggtatacatgttcctggtgaaatggcaggatttgtc

SEQ ID NO: 16135 - RNA, 36 nt, synthetic construct
  source 1..36: mol_type = other RNA
ggtctacatgttcctggtgaaatggcaggacttgtc

SEQ ID NO: 16136 - RNA, 36 nt, synthetic construct
  source 1..36: mol_type = other RNA
ggtatacatgttcctggtgaaatggcaggatttatc

SEQ ID NO: 16137 - RNA, 36 nt, synthetic construct
  source 1..36: mol_type = other RNA
ggtttacatgttcctggtgaaatggcaggacttgtc

SEQ ID NO: 16138 - RNA, 36 nt, synthetic construct
  source 1..36: mol_type = other RNA
ggtgtacatgttcctggtgaaatggcaggatctgtc

SEQ ID NO: 16139 - RNA, 36 nt, synthetic construct
  source 1..36: mol_type = other RNA
ggtttacatgttcctggtgaaatggcaggatttgtc

SEQ ID NO: 16140 - RNA, 36 nt, synthetic construct
  source 1..36: mol_type = other RNA
ggtttacatgttcctggtgaaatggcaggatttatc

SEQ ID NO: 16141 - RNA, 36 nt, synthetic construct
  source 1..36: mol_type = other RNA
ggtttacatgttcctggtgaaatggcaggatctgtc

SEQ ID NO: 16142 - RNA, 36 nt, synthetic construct
  source 1..36: mol_type = other RNA
ggtgtacatgttcctggtgaaatggcaggatttgtc

SEQ ID NO: 16143 - RNA, 36 nt, synthetic construct
  source 1..36: mol_type = other RNA
ggtttacatgttcctggtgaaatggcaggacttatc

SEQ ID NO: 16144 - RNA, 36 nt, synthetic construct
  source 1..36: mol_type = other RNA
ggtttacatgttcctggtgaaatggcaggacctgtc

SEQ ID NO: 16145 - RNA, 36 nt, synthetic construct
  source 1..36: mol_type = other RNA
ggtctacatgttcctggtgaaatggcaggatctgtc

SEQ ID NO: 16146 - RNA, 36 nt, synthetic construct
  source 1..36: mol_type = other RNA
ggtatacatgttcctggtgaaatggcaggacctgtc

SEQ ID NO: 16147 - RNA, 36 nt, synthetic construct
  source 1..36: mol_type = other RNA
ggtatacatgttcctggtgaaatggcaggacttatc

SEQ ID NO: 16148 - RNA, 36 nt, synthetic construct
  source 1..36: mol_type = other RNA
ggtatacatgttcctggtgaaatggcaggacttgtc

SEQ ID NO: 16149 - RNA, 36 nt, synthetic construct
  source 1..36: mol_type = other RNA
ggtatacatgttcctggtgaaatggcaggatctgtc

SEQ ID NO: 16150 - RNA, 37 nt, synthetic construct
  source 1..37: mol_type = other RNA
aggtatacatgttcctggtgaaatggcaggacctgtc

SEQ ID NO: 16151 - RNA, 37 nt, synthetic construct
  source 1..37: mol_type = other RNA
aggtatacatgttcctggtgaaatggcaggacttatc

SEQ ID NO: 16152 - RNA, 37 nt, synthetic construct
  source 1..37: mol_type = other RNA
aggtctacatgttcctggtgaaatggcaggacttatc

SEQ ID NO: 16153 - RNA, 37 nt, synthetic construct
  source 1..37: mol_type = other RNA
aggtatacatgttcctggtgaaatggcaggacttgtc

SEQ ID NO: 16154 - RNA, 37 nt, synthetic construct
  source 1..37: mol_type = other RNA
aggtatacatgttcctggtgaaatggcaggatctgtc

SEQ ID NO: 16155 - RNA, 37 nt, synthetic construct
  source 1..37: mol_type = other RNA
aggtatacatgttcctggtgaaatggcaggatttatc

SEQ ID NO: 16156 - RNA, 37 nt, synthetic construct
  source 1..37: mol_type = other RNA
aggtatacatgttcctggtgaaatggcaggatttgtc

SEQ ID NO: 16157 - RNA, 37 nt, synthetic construct
  source 1..37: mol_type = other RNA
aggtctacatgttcctggtgaaatggcaggacctgtc

SEQ ID NO: 16158 - RNA, 37 nt, synthetic construct
  source 1..37: mol_type = other RNA
aggtctacatgttcctggtgaaatggcaggacttgtc

SEQ ID NO: 16159 - RNA, 37 nt, synthetic construct
  source 1..37: mol_type = other RNA
aggtctacatgttcctggtgaaatggcaggatctgtc

SEQ ID NO: 16160 - RNA, 37 nt, synthetic construct
  source 1..37: mol_type = other RNA
aggtctacatgttcctggtgaaatggcaggatttatc

SEQ ID NO: 16161 - RNA, 37 nt, synthetic construct
  source 1..37: mol_type = other RNA
aggtttacatgttcctggtgaaatggcaggatttatc

SEQ ID NO: 16162 - RNA, 37 nt, synthetic construct
  source 1..37: mol_type = other RNA
aggtttacatgttcctggtgaaatggcaggatctgtc

SEQ ID NO: 16163 - RNA, 37 nt, synthetic construct
  source 1..37: mol_type = other RNA
aggtttacatgttcctggtgaaatggcaggacttgtc

SEQ ID NO: 16164 - RNA, 37 nt, synthetic construct
  source 1..37: mol_type = other RNA
aggtttacatgttcctggtgaaatggcaggacttatc

SEQ ID NO: 16165 - RNA, 37 nt, synthetic construct
  source 1..37: mol_type = other RNA
aggtttacatgttcctggtgaaatggcaggacctgtc

SEQ ID NO: 16166 - RNA, 37 nt, synthetic construct
  source 1..37: mol_type = other RNA
aggtgtacatgttcctggtgaaatggcaggatttatc

SEQ ID NO: 16167 - RNA, 37 nt, synthetic construct
  source 1..37: mol_type = other RNA
aggtgtacatgttcctggtgaaatggcaggatctgtc

SEQ ID NO: 16168 - RNA, 37 nt, synthetic construct
  source 1..37: mol_type = other RNA
aggtgtacatgttcctggtgaaatggcaggacttgtc

SEQ ID NO: 16169 - RNA, 37 nt, synthetic construct
  source 1..37: mol_type = other RNA
aggtgtacatgttcctggtgaaatggcaggacctgtc

SEQ ID NO: 16170 - RNA, 37 nt, synthetic construct
  source 1..37: mol_type = other RNA
aggtttacatgttcctggtgaaatggcaggatttgtc

SEQ ID NO: 16171 - RNA, 37 nt, synthetic construct
  source 1..37: mol_type = other RNA
aggtgtacatgttcctggtgaaatggcaggacttatc

SEQ ID NO: 16172 - RNA, 37 nt, synthetic construct
  source 1..37: mol_type = other RNA
aggtgtacatgttcctggtgaaatggcaggatttgtc

SEQ ID NO: 16173 - RNA, 37 nt, synthetic construct
  source 1..37: mol_type = other RNA
aggtctacatgttcctggtgaaatggcaggatttgtc

SEQ ID NO: 16174 - RNA, 38 nt, synthetic construct
  source 1..38: mol_type = other RNA
caggtttacatgttcctggtgaaatggcaggacttatc

SEQ ID NO: 16175 - RNA, 38 nt, synthetic construct
  source 1..38: mol_type = other RNA
caggtttacatgttcctggtgaaatggcaggacttgtc

SEQ ID NO: 16176 - RNA, 38 nt, synthetic construct
  source 1..38: mol_type = other RNA
caggtttacatgttcctggtgaaatggcaggatttatc

SEQ ID NO: 16177 - RNA, 38 nt, synthetic construct
  source 1..38: mol_type = other RNA
caggtttacatgttcctggtgaaatggcaggatttgtc

SEQ ID NO: 16178 - RNA, 38 nt, synthetic construct
  source 1..38: mol_type = other RNA
caggtttacatgttcctggtgaaatggcaggacctgtc

SEQ ID NO: 16179 - RNA, 38 nt, synthetic construct
  source 1..38: mol_type = other RNA
caggtgtacatgttcctggtgaaatggcaggacttatc

SEQ ID NO: 16180 - RNA, 38 nt, synthetic construct
  source 1..38: mol_type = other RNA
caggtctacatgttcctggtgaaatggcaggatttatc

SEQ ID NO: 16181 - RNA, 38 nt, synthetic construct
  source 1..38: mol_type = other RNA
caggtatacatgttcctggtgaaatggcaggatttgtc

SEQ ID NO: 16182 - RNA, 38 nt, synthetic construct
  source 1..38: mol_type = other RNA
caggtatacatgttcctggtgaaatggcaggatttatc

SEQ ID NO: 16183 - RNA, 38 nt, synthetic construct
  source 1..38: mol_type = other RNA
caggtatacatgttcctggtgaaatggcaggacctgtc

SEQ ID NO: 16184 - RNA, 38 nt, synthetic construct
  source 1..38: mol_type = other RNA
caggtatacatgttcctggtgaaatggcaggacttgtc

SEQ ID NO: 16185 - RNA, 38 nt, synthetic construct
  source 1..38: mol_type = other RNA
caggtatacatgttcctggtgaaatggcaggacttatc

SEQ ID NO: 16186 - RNA, 38 nt, synthetic construct
  source 1..38: mol_type = other RNA
caggtctacatgttcctggtgaaatggcaggatctgtc

SEQ ID NO: 16187 - RNA, 38 nt, synthetic construct
  source 1..38: mol_type = other RNA
caggtgtacatgttcctggtgaaatggcaggacctgtc

SEQ ID NO: 16188 - RNA, 38 nt, synthetic construct
  source 1..38: mol_type = other RNA
caggtctacatgttcctggtgaaatggcaggacctgtc

SEQ ID NO: 16189 - RNA, 38 nt, synthetic construct
  source 1..38: mol_type = other RNA
caggtctacatgttcctggtgaaatggcaggacttatc

SEQ ID NO: 16190 - RNA, 38 nt, synthetic construct
  source 1..38: mol_type = other RNA
caggtttacatgttcctggtgaaatggcaggatctgtc

SEQ ID NO: 16191 - RNA, 38 nt, synthetic construct
  source 1..38: mol_type = other RNA
caggtctacatgttcctggtgaaatggcaggatttgtc

SEQ ID NO: 16192 - RNA, 38 nt, synthetic construct
  source 1..38: mol_type = other RNA
caggtctacatgttcctggtgaaatggcaggacttgtc

SEQ ID NO: 16193 - RNA, 38 nt, synthetic construct
  source 1..38: mol_type = other RNA
caggtgtacatgttcctggtgaaatggcaggatttgtc

SEQ ID NO: 16194 - RNA, 38 nt, synthetic construct
  source 1..38: mol_type = other RNA
caggtgtacatgttcctggtgaaatggcaggatttatc

SEQ ID NO: 16195 - RNA, 38 nt, synthetic construct
  source 1..38: mol_type = other RNA
caggtgtacatgttcctggtgaaatggcaggacttgtc

SEQ ID NO: 16196 - RNA, 38 nt, synthetic construct
  source 1..38: mol_type = other RNA
caggtgtacatgttcctggtgaaatggcaggatctgtc

SEQ ID NO: 16197 - RNA, 38 nt, synthetic construct
  source 1..38: mol_type = other RNA
caggtatacatgttcctggtgaaatggcaggatctgtc

SEQ ID NO: 16198 - RNA, 39 nt, synthetic construct
  source 1..39: mol_type = other RNA
ccaggtctacatgttcctggtgaaatggcaggacctgtc

SEQ ID NO: 16199 - RNA, 39 nt, synthetic construct
  source 1..39: mol_type = other RNA
ccaggtatacatgttcctggtgaaatggcaggacttgtc

SEQ ID NO: 16200 - RNA, 39 nt, synthetic construct
  source 1..39: mol_type = other RNA
ccaggtttacatgttcctggtgaaatggcaggatctgtc

SEQ ID NO: 16201 - RNA, 39 nt, synthetic construct
  source 1..39: mol_type = other RNA
ccaggtttacatgttcctggtgaaatggcaggatttgtc

SEQ ID NO: 16202 - RNA, 39 nt, synthetic construct
  source 1..39: mol_type = other RNA
ccaggtttacatgttcctggtgaaatggcaggatttatc

SEQ ID NO: 16203 - RNA, 39 nt, synthetic construct
  source 1..39: mol_type = other RNA
ccaggtgtacatgttcctggtgaaatggcaggatttatc

SEQ ID NO: 16204 - RNA, 39 nt, synthetic construct
  source 1..39: mol_type = other RNA
ccaggtgtacatgttcctggtgaaatggcaggatttgtc

SEQ ID NO: 16205 - RNA, 39 nt, synthetic construct
  source 1..39: mol_type = other RNA
ccaggtatacatgttcctggtgaaatggcaggacctgtc

SEQ ID NO: 16206 - RNA, 39 nt, synthetic construct
  source 1..39: mol_type = other RNA
ccaggtctacatgttcctggtgaaatggcaggacttatc

SEQ ID NO: 16207 - RNA, 39 nt, synthetic construct
  source 1..39: mol_type = other RNA
ccaggtttacatgttcctggtgaaatggcaggacctgtc

SEQ ID NO: 16208 - RNA, 39 nt, synthetic construct
  source 1..39: mol_type = other RNA
ccaggtttacatgttcctggtgaaatggcaggacttgtc

SEQ ID NO: 16209 - RNA, 39 nt, synthetic construct
  source 1..39: mol_type = other RNA
ccaggtttacatgttcctggtgaaatggcaggacttatc

SEQ ID NO: 16210 - RNA, 39 nt, synthetic construct
  source 1..39: mol_type = other RNA
ccaggtgtacatgttcctggtgaaatggcaggacttgtc

SEQ ID NO: 16211 - RNA, 39 nt, synthetic construct
  source 1..39: mol_type = other RNA
ccaggtgtacatgttcctggtgaaatggcaggacttatc

SEQ ID NO: 16212 - RNA, 39 nt, synthetic construct
  source 1..39: mol_type = other RNA
ccaggtgtacatgttcctggtgaaatggcaggacctgtc

SEQ ID NO: 16213 - RNA, 39 nt, synthetic construct
  source 1..39: mol_type = other RNA
ccaggtctacatgttcctggtgaaatggcaggatttgtc

SEQ ID NO: 16214 - RNA, 39 nt, synthetic construct
  source 1..39: mol_type = other RNA
ccaggtctacatgttcctggtgaaatggcaggatttatc

SEQ ID NO: 16215 - RNA, 39 nt, synthetic construct
  source 1..39: mol_type = other RNA
ccaggtctacatgttcctggtgaaatggcaggatctgtc

SEQ ID NO: 16216 - RNA, 39 nt, synthetic construct
  source 1..39: mol_type = other RNA
ccaggtgtacatgttcctggtgaaatggcaggatctgtc

SEQ ID NO: 16217 - RNA, 39 nt, synthetic construct
  source 1..39: mol_type = other RNA
ccaggtctacatgttcctggtgaaatggcaggacttgtc

SEQ ID NO: 16218 - RNA, 39 nt, synthetic construct
  source 1..39: mol_type = other RNA
ccaggtatacatgttcctggtgaaatggcaggatttgtc

SEQ ID NO: 16219 - RNA, 39 nt, synthetic construct
  source 1..39: mol_type = other RNA
ccaggtatacatgttcctggtgaaatggcaggatttatc

SEQ ID NO: 16220 - RNA, 39 nt, synthetic construct
  source 1..39: mol_type = other RNA
ccaggtatacatgttcctggtgaaatggcaggatctgtc

SEQ ID NO: 16221 - RNA, 39 nt, synthetic construct
  source 1..39: mol_type = other RNA
ccaggtatacatgttcctggtgaaatggcaggacttatc

SEQ ID NO: 16222 - RNA, 40 nt, synthetic construct
  source 1..40: mol_type = other RNA
cccaggtatacatgttcctggtgaaatggcaggacttatc

SEQ ID NO: 16223 - RNA, 40 nt, synthetic construct
  source 1..40: mol_type = other RNA
cccaggtatacatgttcctggtgaaatggcaggacctgtc

SEQ ID NO: 16224 - RNA, 40 nt, synthetic construct
  source 1..40: mol_type = other RNA
cccaggtttacatgttcctggtgaaatggcaggatttgtc

SEQ ID NO: 16225 - RNA, 40 nt, synthetic construct
  source 1..40: mol_type = other RNA
cccaggtgtacatgttcctggtgaaatggcaggacctgtc

SEQ ID NO: 16226 - RNA, 40 nt, synthetic construct
  source 1..40: mol_type = other RNA
cccaggtctacatgttcctggtgaaatggcaggatctgtc

SEQ ID NO: 16227 - RNA, 40 nt, synthetic construct
  source 1..40: mol_type = other RNA
cccaggtttacatgttcctggtgaaatggcaggatttatc

SEQ ID NO: 16228 - RNA, 40 nt, synthetic construct
  source 1..40: mol_type = other RNA
cccaggtttacatgttcctggtgaaatggcaggatctgtc

SEQ ID NO: 16229 - RNA, 40 nt, synthetic construct
  source 1..40: mol_type = other RNA
cccaggtttacatgttcctggtgaaatggcaggacttgtc

SEQ ID NO: 16230 - RNA, 40 nt, synthetic construct
  source 1..40: mol_type = other RNA
cccaggtttacatgttcctggtgaaatggcaggacttatc

SEQ ID NO: 16231 - RNA, 40 nt, synthetic construct
  source 1..40: mol_type = other RNA
cccaggtttacatgttcctggtgaaatggcaggacctgtc

SEQ ID NO: 16232 - RNA, 40 nt, synthetic construct
  source 1..40: mol_type = other RNA
cccaggtgtacatgttcctggtgaaatggcaggatttgtc

SEQ ID NO: 16233 - RNA, 40 nt, synthetic construct
  source 1..40: mol_type = other RNA
cccaggtgtacatgttcctggtgaaatggcaggatttatc

SEQ ID NO: 16234 - RNA, 40 nt, synthetic construct
  source 1..40: mol_type = other RNA
cccaggtgtacatgttcctggtgaaatggcaggatctgtc

SEQ ID NO: 16235 - RNA, 40 nt, synthetic construct
  source 1..40: mol_type = other RNA
cccaggtgtacatgttcctggtgaaatggcaggacttgtc

SEQ ID NO: 16236 - RNA, 40 nt, synthetic construct
  source 1..40: mol_type = other RNA
cccaggtgtacatgttcctggtgaaatggcaggacttatc

SEQ ID NO: 16237 - RNA, 40 nt, synthetic construct
  source 1..40: mol_type = other RNA
cccaggtctacatgttcctggtgaaatggcaggatttatc

SEQ ID NO: 16238 - RNA, 40 nt, synthetic construct
  source 1..40: mol_type = other RNA
cccaggtctacatgttcctggtgaaatggcaggacttgtc

SEQ ID NO: 16239 - RNA, 40 nt, synthetic construct
  source 1..40: mol_type = other RNA
cccaggtctacatgttcctggtgaaatggcaggacttatc

SEQ ID NO: 16240 - RNA, 40 nt, synthetic construct
  source 1..40: mol_type = other RNA
cccaggtctacatgttcctggtgaaatggcaggacctgtc

SEQ ID NO: 16241 - RNA, 40 nt, synthetic construct
  source 1..40: mol_type = other RNA
cccaggtatacatgttcctggtgaaatggcaggatttgtc

SEQ ID NO: 16242 - RNA, 40 nt, synthetic construct
  source 1..40: mol_type = other RNA
cccaggtatacatgttcctggtgaaatggcaggatttatc

SEQ ID NO: 16243 - RNA, 40 nt, synthetic construct
  source 1..40: mol_type = other RNA
cccaggtatacatgttcctggtgaaatggcaggatctgtc

SEQ ID NO: 16244 - RNA, 40 nt, synthetic construct
  source 1..40: mol_type = other RNA
cccaggtatacatgttcctggtgaaatggcaggacttgtc

SEQ ID NO: 16245 - RNA, 40 nt, synthetic construct
  source 1..40: mol_type = other RNA
cccaggtctacatgttcctggtgaaatggcaggatttgtc

SEQ ID NO: 16246 - RNA, 41 nt, synthetic construct
  source 1..41: mol_type = other RNA
ccccaggtatacatgttcctggtgaaatggcaggacttatc

SEQ ID NO: 16247 - RNA, 41 nt, synthetic construct
  source 1..41: mol_type = other RNA
ccccaggtgtacatgttcctggtgaaatggcaggacctgtc

SEQ ID NO: 16248 - RNA, 41 nt, synthetic construct
  source 1..41: mol_type = other RNA
ccccaggtctacatgttcctggtgaaatggcaggatttgtc

SEQ ID NO: 16249 - RNA, 41 nt, synthetic construct
  source 1..41: mol_type = other RNA
ccccaggtgtacatgttcctggtgaaatggcaggatctgtc

SEQ ID NO: 16250 - RNA, 41 nt, synthetic construct
  source 1..41: mol_type = other RNA
ccccaggtctacatgttcctggtgaaatggcaggatctgtc

SEQ ID NO: 16251 - RNA, 41 nt, synthetic construct
  source 1..41: mol_type = other RNA
ccccaggtctacatgttcctggtgaaatggcaggatttatc

SEQ ID NO: 16252 - RNA, 41 nt, synthetic construct
  source 1..41: mol_type = other RNA
ccccaggtatacatgttcctggtgaaatggcaggatttatc

SEQ ID NO: 16253 - RNA, 41 nt, synthetic construct
  source 1..41: mol_type = other RNA
ccccaggtatacatgttcctggtgaaatggcaggacttgtc

SEQ ID NO: 16254 - RNA, 41 nt, synthetic construct
  source 1..41: mol_type = other RNA
ccccaggtatacatgttcctggtgaaatggcaggatctgtc

SEQ ID NO: 16255 - RNA, 41 nt, synthetic construct
  source 1..41: mol_type = other RNA
ccccaggtctacatgttcctggtgaaatggcaggacctgtc

SEQ ID NO: 16256 - RNA, 41 nt, synthetic construct
  source 1..41: mol_type = other RNA
ccccaggtctacatgttcctggtgaaatggcaggacttgtc

SEQ ID NO: 16257 - RNA, 41 nt, synthetic construct
  source 1..41: mol_type = other RNA
ccccaggtatacatgttcctggtgaaatggcaggatttgtc

SEQ ID NO: 16258 - RNA, 41 nt, synthetic construct
  source 1..41: mol_type = other RNA
ccccaggtctacatgttcctggtgaaatggcaggacttatc

SEQ ID NO: 16259 - RNA, 41 nt, synthetic construct
  source 1..41: mol_type = other RNA
ccccaggtgtacatgttcctggtgaaatggcaggatttgtc

SEQ ID NO: 16260 - RNA, 41 nt, synthetic construct
  source 1..41: mol_type = other RNA
ccccaggtttacatgttcctggtgaaatggcaggacctgtc

SEQ ID NO: 16261 - RNA, 41 nt, synthetic construct
  source 1..41: mol_type = other RNA
ccccaggtgtacatgttcctggtgaaatggcaggatttatc

SEQ ID NO: 16262 - RNA, 41 nt, synthetic construct
  source 1..41: mol_type = other RNA
ccccaggtttacatgttcctggtgaaatggcaggacttatc

SEQ ID NO: 16263 - RNA, 41 nt, synthetic construct
  source 1..41: mol_type = other RNA
ccccaggtttacatgttcctggtgaaatggcaggacttgtc

SEQ ID NO: 16264 - RNA, 41 nt, synthetic construct
  source 1..41: mol_type = other RNA
ccccaggtatacatgttcctggtgaaatggcaggacctgtc

SEQ ID NO: 16265 - RNA, 41 nt, synthetic construct
  source 1..41: mol_type = other RNA
ccccaggtttacatgttcctggtgaaatggcaggatttatc

SEQ ID NO: 16266 - RNA, 41 nt, synthetic construct
  source 1..41: mol_type = other RNA
ccccaggtttacatgttcctggtgaaatggcaggatttgtc

SEQ ID NO: 16267 - RNA, 41 nt, synthetic construct
  source 1..41: mol_type = other RNA
ccccaggtttacatgttcctggtgaaatggcaggatctgtc

SEQ ID NO: 16268 - RNA, 41 nt, synthetic construct
  source 1..41: mol_type = other RNA
ccccaggtgtacatgttcctggtgaaatggcaggacttgtc

SEQ ID NO: 16269 - RNA, 41 nt, synthetic construct
  source 1..41: mol_type = other RNA
ccccaggtgtacatgttcctggtgaaatggcaggacttatc

SEQ ID NO: 16270 - RNA, 42 nt, synthetic construct
  source 1..42: mol_type = other RNA
cccccaggtgtacatgttcctggtgaaatggcaggatttatc

SEQ ID NO: 16271 - RNA, 42 nt, synthetic construct
  source 1..42: mol_type = other RNA
cccccaggtttacatgttcctggtgaaatggcaggatttatc

SEQ ID NO: 16272 - RNA, 42 nt, synthetic construct
  source 1..42: mol_type = other RNA
cccccaggtttacatgttcctggtgaaatggcaggatctgtc

SEQ ID NO: 16273 - RNA, 42 nt, synthetic construct
  source 1..42: mol_type = other RNA
cccccaggtttacatgttcctggtgaaatggcaggacttgtc

SEQ ID NO: 16274 - RNA, 42 nt, synthetic construct
  source 1..42: mol_type = other RNA
cccccaggtgtacatgttcctggtgaaatggcaggatctgtc

SEQ ID NO: 16275 - RNA, 42 nt, synthetic construct
  source 1..42: mol_type = other RNA
cccccaggtatacatgttcctggtgaaatggcaggatttatc

SEQ ID NO: 16276 - RNA, 42 nt, synthetic construct
  source 1..42: mol_type = other RNA
cccccaggtctacatgttcctggtgaaatggcaggacttatc

SEQ ID NO: 16277 - RNA, 42 nt, synthetic construct
  source 1..42: mol_type = other RNA
cccccaggtctacatgttcctggtgaaatggcaggacctgtc

SEQ ID NO: 16278 - RNA, 42 nt, synthetic construct
  source 1..42: mol_type = other RNA
cccccaggtatacatgttcctggtgaaatggcaggatttgtc

SEQ ID NO: 16279 - RNA, 42 nt, synthetic construct
  source 1..42: mol_type = other RNA
cccccaggtatacatgttcctggtgaaatggcaggacctgtc

SEQ ID NO: 16280 - RNA, 42 nt, synthetic construct
  source 1..42: mol_type = other RNA
cccccaggtatacatgttcctggtgaaatggcaggatctgtc

SEQ ID NO: 16281 - RNA, 42 nt, synthetic construct
  source 1..42: mol_type = other RNA
cccccaggtatacatgttcctggtgaaatggcaggacttgtc

SEQ ID NO: 16282 - RNA, 42 nt, synthetic construct
  source 1..42: mol_type = other RNA
cccccaggtatacatgttcctggtgaaatggcaggacttatc

SEQ ID NO: 16283 - RNA, 42 nt, synthetic construct
  source 1..42: mol_type = other RNA
cccccaggtctacatgttcctggtgaaatggcaggacttgtc

SEQ ID NO: 16284 - RNA, 42 nt, synthetic construct
  source 1..42: mol_type = other RNA
cccccaggtctacatgttcctggtgaaatggcaggatttatc

SEQ ID NO: 16285 - RNA, 42 nt, synthetic construct
  source 1..42: mol_type = other RNA
cccccaggtctacatgttcctggtgaaatggcaggatctgtc

SEQ ID NO: 16286 - RNA, 42 nt, synthetic construct
  source 1..42: mol_type = other RNA
cccccaggtttacatgttcctggtgaaatggcaggacctgtc

SEQ ID NO: 16287 - RNA, 42 nt, synthetic construct
  source 1..42: mol_type = other RNA
cccccaggtctacatgttcctggtgaaatggcaggatttgtc

SEQ ID NO: 16288 - RNA, 42 nt, synthetic construct
  source 1..42: mol_type = other RNA
cccccaggtgtacatgttcctggtgaaatggcaggacttgtc

SEQ ID NO: 16289 - RNA, 42 nt, synthetic construct
  source 1..42: mol_type = other RNA
cccccaggtttacatgttcctggtgaaatggcaggatttgtc

SEQ ID NO: 16290 - RNA, 42 nt, synthetic construct
  source 1..42: mol_type = other RNA
cccccaggtgtacatgttcctggtgaaatggcaggatttgtc

SEQ ID NO: 16291 - RNA, 42 nt, synthetic construct
  source 1..42: mol_type = other RNA
cccccaggtgtacatgttcctggtgaaatggcaggacctgtc

SEQ ID NO: 16292 - RNA, 42 nt, synthetic construct
  source 1..42: mol_type = other RNA
cccccaggtgtacatgttcctggtgaaatggcaggacttatc

SEQ ID NO: 16293 - RNA, 42 nt, synthetic construct
  source 1..42: mol_type = other RNA
cccccaggtttacatgttcctggtgaaatggcaggacttatc

SEQ ID NO: 16294 - RNA, 43 nt, synthetic construct
  source 1..43: mol_type = other RNA
tcccccaggtatacatgttcctggtgaaatggcaggatctgtc

SEQ ID NO: 16295 - RNA, 43 nt, synthetic construct
  source 1..43: mol_type = other RNA
tcccccaggtctacatgttcctggtgaaatggcaggatttatc

SEQ ID NO: 16296 - RNA, 43 nt, synthetic construct
  source 1..43: mol_type = other RNA
tcccccaggtctacatgttcctggtgaaatggcaggacttatc

SEQ ID NO: 16297 - RNA, 43 nt, synthetic construct
  source 1..43: mol_type = other RNA
tcccccaggtgtacatgttcctggtgaaatggcaggacttgtc

SEQ ID NO: 16298 - RNA, 43 nt, synthetic construct
  source 1..43: mol_type = other RNA
tcccccaggtgtacatgttcctggtgaaatggcaggacctgtc

SEQ ID NO: 16299 - RNA, 43 nt, synthetic construct
  source 1..43: mol_type = other RNA
tcccccaggtgtacatgttcctggtgaaatggcaggacttatc

SEQ ID NO: 16300 - RNA, 43 nt, synthetic construct
  source 1..43: mol_type = other RNA
tcccccaggtttacatgttcctggtgaaatggcaggatctgtc

SEQ ID NO: 16301 - RNA, 43 nt, synthetic construct
  source 1..43: mol_type = other RNA
tcccccaggtttacatgttcctggtgaaatggcaggatttgtc

SEQ ID NO: 16302 - RNA, 43 nt, synthetic construct
  source 1..43: mol_type = other RNA
tcccccaggtttacatgttcctggtgaaatggcaggacctgtc

SEQ ID NO: 16303 - RNA, 43 nt, synthetic construct
  source 1..43: mol_type = other RNA
tcccccaggtttacatgttcctggtgaaatggcaggatttatc

SEQ ID NO: 16304 - RNA, 43 nt, synthetic construct
  source 1..43: mol_type = other RNA
tcccccaggtctacatgttcctggtgaaatggcaggatttgtc

SEQ ID NO: 16305 - RNA, 43 nt, synthetic construct
  source 1..43: mol_type = other RNA
tcccccaggtgtacatgttcctggtgaaatggcaggatttatc

SEQ ID NO: 16306 - RNA, 43 nt, synthetic construct
  source 1..43: mol_type = other RNA
tcccccaggtgtacatgttcctggtgaaatggcaggatttgtc

SEQ ID NO: 16307 - RNA, 43 nt, synthetic construct
  source 1..43: mol_type = other RNA
tcccccaggtgtacatgttcctggtgaaatggcaggatctgtc

SEQ ID NO: 16308 - RNA, 43 nt, synthetic construct
  source 1..43: mol_type = other RNA
tcccccaggtctacatgttcctggtgaaatggcaggatctgtc

SEQ ID NO: 16309 - RNA, 43 nt, synthetic construct
  source 1..43: mol_type = other RNA
tcccccaggtttacatgttcctggtgaaatggcaggacttgtc

SEQ ID NO: 16310 - RNA, 43 nt, synthetic construct
  source 1..43: mol_type = other RNA
tcccccaggtatacatgttcctggtgaaatggcaggacctgtc

SEQ ID NO: 16311 - RNA, 43 nt, synthetic construct
  source 1..43: mol_type = other RNA
tcccccaggtatacatgttcctggtgaaatggcaggacttatc

SEQ ID NO: 16312 - RNA, 43 nt, synthetic construct
  source 1..43: mol_type = other RNA
tcccccaggtatacatgttcctggtgaaatggcaggacttgtc

SEQ ID NO: 16313 - RNA, 43 nt, synthetic construct
  source 1..43: mol_type = other RNA
tcccccaggtttacatgttcctggtgaaatggcaggacttatc

SEQ ID NO: 16314 - RNA, 43 nt, synthetic construct
  source 1..43: mol_type = other RNA
tcccccaggtctacatgttcctggtgaaatggcaggacttgtc

SEQ ID NO: 16315 - RNA, 43 nt, synthetic construct
  source 1..43: mol_type = other RNA
tcccccaggtatacatgttcctggtgaaatggcaggatttatc

SEQ ID NO: 16316 - RNA, 43 nt, synthetic construct
  source 1..43: mol_type = other RNA
tcccccaggtctacatgttcctggtgaaatggcaggacctgtc

SEQ ID NO: 16317 - RNA, 43 nt, synthetic construct
  source 1..43: mol_type = other RNA
tcccccaggtatacatgttcctggtgaaatggcaggatttgtc

SEQ ID NO: 16318 - RNA, 44 nt, synthetic construct
  source 1..44: mol_type = other RNA
ttcccccaggtttacatgttcctggtgaaatggcaggatttatc

SEQ ID NO: 16319 - RNA, 44 nt, synthetic construct
  source 1..44: mol_type = other RNA
ttcccccaggtctacatgttcctggtgaaatggcaggacttatc

SEQ ID NO: 16320 - RNA, 44 nt, synthetic construct
  source 1..44: mol_type = other RNA
ttcccccaggtttacatgttcctggtgaaatggcaggatctgtc

SEQ ID NO: 16321 - RNA, 44 nt, synthetic construct
  source 1..44: mol_type = other RNA
ttcccccaggtttacatgttcctggtgaaatggcaggatttgtc

SEQ ID NO: 16322 - RNA, 44 nt, synthetic construct
  source 1..44: mol_type = other RNA
ttcccccaggtttacatgttcctggtgaaatggcaggacctgtc

SEQ ID NO: 16323 - RNA, 44 nt, synthetic construct
  source 1..44: mol_type = other RNA
ttcccccaggtctacatgttcctggtgaaatggcaggacttgtc

SEQ ID NO: 16324 - RNA, 44 nt, synthetic construct
  source 1..44: mol_type = other RNA
ttcccccaggtatacatgttcctggtgaaatggcaggatctgtc

SEQ ID NO: 16325 - RNA, 44 nt, synthetic construct
  source 1..44: mol_type = other RNA
ttcccccaggtgtacatgttcctggtgaaatggcaggatttatc

SEQ ID NO: 16326 - RNA, 44 nt, synthetic construct
  source 1..44: mol_type = other RNA
ttcccccaggtgtacatgttcctggtgaaatggcaggatctgtc

SEQ ID NO: 16327 - RNA, 44 nt, synthetic construct
  source 1..44: mol_type = other RNA
ttcccccaggtgtacatgttcctggtgaaatggcaggacttgtc

SEQ ID NO: 16328 - RNA, 44 nt, synthetic construct
  source 1..44: mol_type = other RNA
ttcccccaggtgtacatgttcctggtgaaatggcaggacttatc

SEQ ID NO: 16329 - RNA, 44 nt, synthetic construct
  source 1..44: mol_type = other RNA
ttcccccaggtgtacatgttcctggtgaaatggcaggacctgtc

SEQ ID NO: 16330 - RNA, 44 nt, synthetic construct
  source 1..44: mol_type = other RNA
ttcccccaggtctacatgttcctggtgaaatggcaggatttatc

SEQ ID NO: 16331 - RNA, 44 nt, synthetic construct
  source 1..44: mol_type = other RNA
ttcccccaggtatacatgttcctggtgaaatggcaggatttgtc

SEQ ID NO: 16332 - RNA, 44 nt, synthetic construct
  source 1..44: mol_type = other RNA
ttcccccaggtatacatgttcctggtgaaatggcaggatttatc

SEQ ID NO: 16333 - RNA, 44 nt, synthetic construct
  source 1..44: mol_type = other RNA
ttcccccaggtctacatgttcctggtgaaatggcaggatctgtc

SEQ ID NO: 16334 - RNA, 44 nt, synthetic construct
  source 1..44: mol_type = other RNA
ttcccccaggtatacatgttcctggtgaaatggcaggacttgtc

SEQ ID NO: 16335 - RNA, 44 nt, synthetic construct
  source 1..44: mol_type = other RNA
ttcccccaggtatacatgttcctggtgaaatggcaggacttatc

SEQ ID NO: 16336 - RNA, 44 nt, synthetic construct
  source 1..44: mol_type = other RNA
ttcccccaggtatacatgttcctggtgaaatggcaggacctgtc

SEQ ID NO: 16337 - RNA, 44 nt, synthetic construct
  source 1..44: mol_type = other RNA
ttcccccaggtctacatgttcctggtgaaatggcaggatttgtc

SEQ ID NO: 16338 - RNA, 44 nt, synthetic construct
  source 1..44: mol_type = other RNA
ttcccccaggtctacatgttcctggtgaaatggcaggacctgtc

SEQ ID NO: 16339 - RNA, 44 nt, synthetic construct
  source 1..44: mol_type = other RNA
ttcccccaggtttacatgttcctggtgaaatggcaggacttatc

SEQ ID NO: 16340 - RNA, 44 nt, synthetic construct
  source 1..44: mol_type = other RNA
ttcccccaggtttacatgttcctggtgaaatggcaggacttgtc

SEQ ID NO: 16341 - RNA, 44 nt, synthetic construct
  source 1..44: mol_type = other RNA
ttcccccaggtgtacatgttcctggtgaaatggcaggatttgtc

SEQ ID NO: 16342 - RNA, 45 nt, synthetic construct
  source 1..45: mol_type = other RNA
tttcccccaggtatacatgttcctggtgaaatggcaggacttgtc

SEQ ID NO: 16343 - RNA, 45 nt, synthetic construct
  source 1..45: mol_type = other RNA
tttcccccaggtatacatgttcctggtgaaatggcaggatttatc

SEQ ID NO: 16344 - RNA, 45 nt, synthetic construct
  source 1..45: mol_type = other RNA
tttcccccaggtatacatgttcctggtgaaatggcaggacctgtc

SEQ ID NO: 16345 - RNA, 45 nt, synthetic construct
  source 1..45: mol_type = other RNA
tttcccccaggtatacatgttcctggtgaaatggcaggatctgtc

SEQ ID NO: 16346 - RNA, 45 nt, synthetic construct
  source 1..45: mol_type = other RNA
tttcccccaggtctacatgttcctggtgaaatggcaggacctgtc

SEQ ID NO: 16347 - RNA, 45 nt, synthetic construct
  source 1..45: mol_type = other RNA
tttcccccaggtatacatgttcctggtgaaatggcaggatttgtc

SEQ ID NO: 16348 - RNA, 45 nt, synthetic construct
  source 1..45: mol_type = other RNA
tttcccccaggtatacatgttcctggtgaaatggcaggacttatc

SEQ ID NO: 16349 - RNA, 45 nt, synthetic construct
  source 1..45: mol_type = other RNA
tttcccccaggtgtacatgttcctggtgaaatggcaggatttatc

SEQ ID NO: 16350 - RNA, 45 nt, synthetic construct
  source 1..45: mol_type = other RNA
tttcccccaggtctacatgttcctggtgaaatggcaggacttatc

SEQ ID NO: 16351 - RNA, 45 nt, synthetic construct
  source 1..45: mol_type = other RNA
tttcccccaggtttacatgttcctggtgaaatggcaggatttgtc

SEQ ID NO: 16352 - RNA, 45 nt, synthetic construct
  source 1..45: mol_type = other RNA
tttcccccaggtttacatgttcctggtgaaatggcaggatttatc

SEQ ID NO: 16353 - RNA, 45 nt, synthetic construct
  source 1..45: mol_type = other RNA
tttcccccaggtttacatgttcctggtgaaatggcaggatctgtc

SEQ ID NO: 16354 - RNA, 45 nt, synthetic construct
  source 1..45: mol_type = other RNA
tttcccccaggtttacatgttcctggtgaaatggcaggacttgtc

SEQ ID NO: 16355 - RNA, 45 nt, synthetic construct
  source 1..45: mol_type = other RNA
tttcccccaggtttacatgttcctggtgaaatggcaggacctgtc

SEQ ID NO: 16356 - RNA, 45 nt, synthetic construct
  source 1..45: mol_type = other RNA
tttcccccaggtgtacatgttcctggtgaaatggcaggatttgtc

SEQ ID NO: 16357 - RNA, 45 nt, synthetic construct
  source 1..45: mol_type = other RNA
tttcccccaggtgtacatgttcctggtgaaatggcaggacctgtc

SEQ ID NO: 16358 - RNA, 45 nt, synthetic construct
  source 1..45: mol_type = other RNA
tttcccccaggtttacatgttcctggtgaaatggcaggacttatc

SEQ ID NO: 16359 - RNA, 45 nt, synthetic construct
  source 1..45: mol_type = other RNA
tttcccccaggtgtacatgttcctggtgaaatggcaggatctgtc

SEQ ID NO: 16360 - RNA, 45 nt, synthetic construct
  source 1..45: mol_type = other RNA
tttcccccaggtgtacatgttcctggtgaaatggcaggacttgtc

SEQ ID NO: 16361 - RNA, 45 nt, synthetic construct
  source 1..45: mol_type = other RNA
tttcccccaggtgtacatgttcctggtgaaatggcaggacttatc

SEQ ID NO: 16362 - RNA, 45 nt, synthetic construct
  source 1..45: mol_type = other RNA
tttcccccaggtctacatgttcctggtgaaatggcaggatttgtc

SEQ ID NO: 16363 - RNA, 45 nt, synthetic construct
  source 1..45: mol_type = other RNA
tttcccccaggtctacatgttcctggtgaaatggcaggatttatc

SEQ ID NO: 16364 - RNA, 45 nt, synthetic construct
  source 1..45: mol_type = other RNA
tttcccccaggtctacatgttcctggtgaaatggcaggatctgtc

SEQ ID NO: 16365 - RNA, 45 nt, synthetic construct
  source 1..45: mol_type = other RNA
tttcccccaggtctacatgttcctggtgaaatggcaggacttgtc

SEQ ID NO: 16366 - RNA, 46 nt, synthetic construct
  source 1..46: mol_type = other RNA
ctttcccccaggtatacatgttcctggtgaaatggcaggacttatc

SEQ ID NO: 16367 - RNA, 46 nt, synthetic construct
  source 1..46: mol_type = other RNA
ctttcccccaggtatacatgttcctggtgaaatggcaggacctgtc

SEQ ID NO: 16368 - RNA, 46 nt, synthetic construct
  source 1..46: mol_type = other RNA
ctttcccccaggtctacatgttcctggtgaaatggcaggatttatc

SEQ ID NO: 16369 - RNA, 46 nt, synthetic construct
  source 1..46: mol_type = other RNA
ctttcccccaggtgtacatgttcctggtgaaatggcaggatttatc

SEQ ID NO: 16370 - RNA, 46 nt, synthetic construct
  source 1..46: mol_type = other RNA
ctttcccccaggtatacatgttcctggtgaaatggcaggacttgtc

SEQ ID NO: 16371 - RNA, 46 nt, synthetic construct
  source 1..46: mol_type = other RNA
ctttcccccaggtatacatgttcctggtgaaatggcaggatctgtc

SEQ ID NO: 16372 - RNA, 46 nt, synthetic construct
  source 1..46: mol_type = other RNA
ctttcccccaggtatacatgttcctggtgaaatggcaggatttatc

SEQ ID NO: 16373 - RNA, 46 nt, synthetic construct
  source 1..46: mol_type = other RNA
ctttcccccaggtatacatgttcctggtgaaatggcaggatttgtc

SEQ ID NO: 16374 - RNA, 46 nt, synthetic construct
  source 1..46: mol_type = other RNA
ctttcccccaggtgtacatgttcctggtgaaatggcaggacctgtc

SEQ ID NO: 16375 - RNA, 46 nt, synthetic construct
  source 1..46: mol_type = other RNA
ctttcccccaggtctacatgttcctggtgaaatggcaggatctgtc

SEQ ID NO: 16376 - RNA, 46 nt, synthetic construct
  source 1..46: mol_type = other RNA
ctttcccccaggtttacatgttcctggtgaaatggcaggatttgtc

SEQ ID NO: 16377 - RNA, 46 nt, synthetic construct
  source 1..46: mol_type = other RNA
ctttcccccaggtttacatgttcctggtgaaatggcaggatttatc

SEQ ID NO: 16378 - RNA, 46 nt, synthetic construct
  source 1..46: mol_type = other RNA
ctttcccccaggtttacatgttcctggtgaaatggcaggatctgtc

SEQ ID NO: 16379 - RNA, 46 nt, synthetic construct
  source 1..46: mol_type = other RNA
ctttcccccaggtttacatgttcctggtgaaatggcaggacttgtc

SEQ ID NO: 16380 - RNA, 46 nt, synthetic construct
  source 1..46: mol_type = other RNA
ctttcccccaggtttacatgttcctggtgaaatggcaggacttatc

SEQ ID NO: 16381 - RNA, 46 nt, synthetic construct
  source 1..46: mol_type = other RNA
ctttcccccaggtttacatgttcctggtgaaatggcaggacctgtc

SEQ ID NO: 16382 - RNA, 46 nt, synthetic construct
  source 1..46: mol_type = other RNA
ctttcccccaggtgtacatgttcctggtgaaatggcaggatttgtc

SEQ ID NO: 16383 - RNA, 46 nt, synthetic construct
  source 1..46: mol_type = other RNA
ctttcccccaggtgtacatgttcctggtgaaatggcaggatctgtc

SEQ ID NO: 16384 - RNA, 46 nt, synthetic construct
  source 1..46: mol_type = other RNA
ctttcccccaggtgtacatgttcctggtgaaatggcaggacttgtc

SEQ ID NO: 16385 - RNA, 46 nt, synthetic construct
  source 1..46: mol_type = other RNA
ctttcccccaggtctacatgttcctggtgaaatggcaggatttgtc

SEQ ID NO: 16386 - RNA, 46 nt, synthetic construct
  source 1..46: mol_type = other RNA
ctttcccccaggtgtacatgttcctggtgaaatggcaggacttatc

SEQ ID NO: 16387 - RNA, 46 nt, synthetic construct
  source 1..46: mol_type = other RNA
ctttcccccaggtctacatgttcctggtgaaatggcaggacttgtc

SEQ ID NO: 16388 - RNA, 46 nt, synthetic construct
  source 1..46: mol_type = other RNA
ctttcccccaggtctacatgttcctggtgaaatggcaggacttatc

SEQ ID NO: 16389 - RNA, 46 nt, synthetic construct
  source 1..46: mol_type = other RNA
ctttcccccaggtctacatgttcctggtgaaatggcaggacctgtc

SEQ ID NO: 16390 - RNA, 47 nt, synthetic construct
  source 1..47: mol_type = other RNA
gctttcccccaggtttacatgttcctggtgaaatggcaggatctgtc

SEQ ID NO: 16391 - RNA, 47 nt, synthetic construct
  source 1..47: mol_type = other RNA
gctttcccccaggtttacatgttcctggtgaaatggcaggatttgtc

SEQ ID NO: 16392 - RNA, 47 nt, synthetic construct
  source 1..47: mol_type = other RNA
gctttcccccaggtgtacatgttcctggtgaaatggcaggacctgtc

SEQ ID NO: 16393 - RNA, 47 nt, synthetic construct
  source 1..47: mol_type = other RNA
gctttcccccaggtgtacatgttcctggtgaaatggcaggatttgtc

SEQ ID NO: 16394 - RNA, 47 nt, synthetic construct
  source 1..47: mol_type = other RNA
gctttcccccaggtgtacatgttcctggtgaaatggcaggatctgtc

SEQ ID NO: 16395 - RNA, 47 nt, synthetic construct
  source 1..47: mol_type = other RNA
gctttcccccaggtttacatgttcctggtgaaatggcaggacttgtc

SEQ ID NO: 16396 - RNA, 47 nt, synthetic construct
  source 1..47: mol_type = other RNA
gctttcccccaggtttacatgttcctggtgaaatggcaggacttatc

SEQ ID NO: 16397 - RNA, 47 nt, synthetic construct
  source 1..47: mol_type = other RNA
gctttcccccaggtgtacatgttcctggtgaaatggcaggatttatc

SEQ ID NO: 16398 - RNA, 47 nt, synthetic construct
  source 1..47: mol_type = other RNA
gctttcccccaggtatacatgttcctggtgaaatggcaggatttatc

SEQ ID NO: 16399 - RNA, 47 nt, synthetic construct
  source 1..47: mol_type = other RNA
gctttcccccaggtctacatgttcctggtgaaatggcaggacctgtc

SEQ ID NO: 16400 - RNA, 47 nt, synthetic construct
  source 1..47: mol_type = other RNA
gctttcccccaggtctacatgttcctggtgaaatggcaggatctgtc

SEQ ID NO: 16401 - RNA, 47 nt, synthetic construct
  source 1..47: mol_type = other RNA
gctttcccccaggtctacatgttcctggtgaaatggcaggacttgtc

SEQ ID NO: 16402 - RNA, 47 nt, synthetic construct
  source 1..47: mol_type = other RNA
gctttcccccaggtctacatgttcctggtgaaatggcaggacttatc

SEQ ID NO: 16403 - RNA, 47 nt, synthetic construct
  source 1..47: mol_type = other RNA
gctttcccccaggtatacatgttcctggtgaaatggcaggatttgtc

SEQ ID NO: 16404 - RNA, 47 nt, synthetic construct
  source 1..47: mol_type = other RNA
gctttcccccaggtatacatgttcctggtgaaatggcaggacttatc

SEQ ID NO: 16405 - RNA, 47 nt, synthetic construct
  source 1..47: mol_type = other RNA
gctttcccccaggtatacatgttcctggtgaaatggcaggatctgtc

SEQ ID NO: 16406 - RNA, 47 nt, synthetic construct
  source 1..47: mol_type = other RNA
gctttcccccaggtatacatgttcctggtgaaatggcaggacttgtc

SEQ ID NO: 16407 - RNA, 47 nt, synthetic construct
  source 1..47: mol_type = other RNA
gctttcccccaggtatacatgttcctggtgaaatggcaggacctgtc

SEQ ID NO: 16408 - RNA, 47 nt, synthetic construct
  source 1..47: mol_type = other RNA
gctttcccccaggtctacatgttcctggtgaaatggcaggatttatc

SEQ ID NO: 16409 - RNA, 47 nt, synthetic construct
  source 1..47: mol_type = other RNA
gctttcccccaggtgtacatgttcctggtgaaatggcaggacttatc

SEQ ID NO: 16410 - RNA, 47 nt, synthetic construct
  source 1..47: mol_type = other RNA
gctttcccccaggtctacatgttcctggtgaaatggcaggatttgtc

SEQ ID NO: 16411 - RNA, 47 nt, synthetic construct
  source 1..47: mol_type = other RNA
gctttcccccaggtttacatgttcctggtgaaatggcaggatttatc

SEQ ID NO: 16412 - RNA, 47 nt, synthetic construct
  source 1..47: mol_type = other RNA
gctttcccccaggtgtacatgttcctggtgaaatggcaggacttgtc

SEQ ID NO: 16413 - RNA, 47 nt, synthetic construct
  source 1..47: mol_type = other RNA
gctttcccccaggtttacatgttcctggtgaaatggcaggacctgtc

SEQ ID NO: 16414 - RNA, 48 nt, synthetic construct
  source 1..48: mol_type = other RNA
ggctttcccccaggtctacatgttcctggtgaaatggcaggatctgtc

SEQ ID NO: 16415 - RNA, 48 nt, synthetic construct
  source 1..48: mol_type = other RNA
ggctttcccccaggtatacatgttcctggtgaaatggcaggatctgtc

SEQ ID NO: 16416 - RNA, 48 nt, synthetic construct
  source 1..48: mol_type = other RNA
ggctttcccccaggtatacatgttcctggtgaaatggcaggatttgtc

SEQ ID NO: 16417 - RNA, 48 nt, synthetic construct
  source 1..48: mol_type = other RNA
ggctttcccccaggtctacatgttcctggtgaaatggcaggacctgtc

SEQ ID NO: 16418 - RNA, 48 nt, synthetic construct
  source 1..48: mol_type = other RNA
ggctttcccccaggtctacatgttcctggtgaaatggcaggacttatc

SEQ ID NO: 16419 - RNA, 48 nt, synthetic construct
  source 1..48: mol_type = other RNA
ggctttcccccaggtatacatgttcctggtgaaatggcaggatttatc

SEQ ID NO: 16420 - RNA, 48 nt, synthetic construct
  source 1..48: mol_type = other RNA
ggctttcccccaggtatacatgttcctggtgaaatggcaggacttatc

SEQ ID NO: 16421 - RNA, 48 nt, synthetic construct
  source 1..48: mol_type = other RNA
ggctttcccccaggtatacatgttcctggtgaaatggcaggacctgtc

SEQ ID NO: 16422 - RNA, 48 nt, synthetic construct
  source 1..48: mol_type = other RNA
ggctttcccccaggtctacatgttcctggtgaaatggcaggacttgtc

SEQ ID NO: 16423 - RNA, 48 nt, synthetic construct
  source 1..48: mol_type = other RNA
ggctttcccccaggtttacatgttcctggtgaaatggcaggatttatc

SEQ ID NO: 16424 - RNA, 48 nt, synthetic construct
  source 1..48: mol_type = other RNA
ggctttcccccaggtttacatgttcctggtgaaatggcaggatctgtc

SEQ ID NO: 16425 - RNA, 48 nt, synthetic construct
  source 1..48: mol_type = other RNA
ggctttcccccaggtgtacatgttcctggtgaaatggcaggacctgtc

SEQ ID NO: 16426 - RNA, 48 nt, synthetic construct
  source 1..48: mol_type = other RNA
ggctttcccccaggtttacatgttcctggtgaaatggcaggacttgtc

SEQ ID NO: 16427 - RNA, 48 nt, synthetic construct
  source 1..48: mol_type = other RNA
ggctttcccccaggtgtacatgttcctggtgaaatggcaggacttatc

SEQ ID NO: 16428 - RNA, 48 nt, synthetic construct
  source 1..48: mol_type = other RNA
ggctttcccccaggtgtacatgttcctggtgaaatggcaggatttatc

SEQ ID NO: 16429 - RNA, 48 nt, synthetic construct
  source 1..48: mol_type = other RNA
ggctttcccccaggtgtacatgttcctggtgaaatggcaggatttgtc

SEQ ID NO: 16430 - RNA, 48 nt, synthetic construct
  source 1..48: mol_type = other RNA
ggctttcccccaggtgtacatgttcctggtgaaatggcaggatctgtc

SEQ ID NO: 16431 - RNA, 48 nt, synthetic construct
  source 1..48: mol_type = other RNA
ggctttcccccaggtgtacatgttcctggtgaaatggcaggacttgtc

SEQ ID NO: 16432 - RNA, 48 nt, synthetic construct
  source 1..48: mol_type = other RNA
ggctttcccccaggtctacatgttcctggtgaaatggcaggatttgtc

SEQ ID NO: 16433 - RNA, 48 nt, synthetic construct
  source 1..48: mol_type = other RNA
ggctttcccccaggtttacatgttcctggtgaaatggcaggacctgtc

SEQ ID NO: 16434 - RNA, 48 nt, synthetic construct
  source 1..48: mol_type = other RNA
ggctttcccccaggtttacatgttcctggtgaaatggcaggacttatc

SEQ ID NO: 16435 - RNA, 48 nt, synthetic construct
  source 1..48: mol_type = other RNA
ggctttcccccaggtttacatgttcctggtgaaatggcaggatttgtc

SEQ ID NO: 16436 - RNA, 48 nt, synthetic construct
  source 1..48: mol_type = other RNA
ggctttcccccaggtatacatgttcctggtgaaatggcaggacttgtc

SEQ ID NO: 16437 - RNA, 48 nt, synthetic construct
  source 1..48: mol_type = other RNA
ggctttcccccaggtctacatgttcctggtgaaatggcaggatttatc

SEQ ID NO: 16438 - RNA, 49 nt, synthetic construct
  source 1..49: mol_type = other RNA
tggctttcccccaggtctacatgttcctggtgaaatggcaggacttgtc

SEQ ID NO: 16439 - RNA, 49 nt, synthetic construct
  source 1..49: mol_type = other RNA
tggctttcccccaggtgtacatgttcctggtgaaatggcaggatctgtc

SEQ ID NO: 16440 - RNA, 49 nt, synthetic construct
  source 1..49: mol_type = other RNA
tggctttcccccaggtgtacatgttcctggtgaaatggcaggatttatc

SEQ ID NO: 16441 - RNA, 49 nt, synthetic construct
  source 1..49: mol_type = other RNA
tggctttcccccaggtttacatgttcctggtgaaatggcaggacctgtc

SEQ ID NO: 16442 - RNA, 49 nt, synthetic construct
  source 1..49: mol_type = other RNA
tggctttcccccaggtttacatgttcctggtgaaatggcaggatttgtc

SEQ ID NO: 16443 - RNA, 49 nt, synthetic construct
  source 1..49: mol_type = other RNA
tggctttcccccaggtttacatgttcctggtgaaatggcaggatctgtc

SEQ ID NO: 16444 - RNA, 49 nt, synthetic construct
  source 1..49: mol_type = other RNA
tggctttcccccaggtttacatgttcctggtgaaatggcaggatttatc

SEQ ID NO: 16445 - RNA, 49 nt, synthetic construct
  source 1..49: mol_type = other RNA
tggctttcccccaggtgtacatgttcctggtgaaatggcaggacttgtc

SEQ ID NO: 16446 - RNA, 49 nt, synthetic construct
  source 1..49: mol_type = other RNA
tggctttcccccaggtttacatgttcctggtgaaatggcaggacttatc

SEQ ID NO: 16447 - RNA, 49 nt, synthetic construct
  source 1..49: mol_type = other RNA
tggctttcccccaggtgtacatgttcctggtgaaatggcaggacttatc

SEQ ID NO: 16448 - RNA, 49 nt, synthetic construct
  source 1..49: mol_type = other RNA
tggctttcccccaggtttacatgttcctggtgaaatggcaggacttgtc

SEQ ID NO: 16449 - RNA, 49 nt, synthetic construct
  source 1..49: mol_type = other RNA
tggctttcccccaggtctacatgttcctggtgaaatggcaggatttgtc

SEQ ID NO: 16450 - RNA, 49 nt, synthetic construct
  source 1..49: mol_type = other RNA
tggctttcccccaggtctacatgttcctggtgaaatggcaggatttatc

SEQ ID NO: 16451 - RNA, 49 nt, synthetic construct
  source 1..49: mol_type = other RNA
tggctttcccccaggtctacatgttcctggtgaaatggcaggatctgtc

SEQ ID NO: 16452 - RNA, 49 nt, synthetic construct
  source 1..49: mol_type = other RNA
tggctttcccccaggtctacatgttcctggtgaaatggcaggacttatc

SEQ ID NO: 16453 - RNA, 49 nt, synthetic construct
  source 1..49: mol_type = other RNA
tggctttcccccaggtctacatgttcctggtgaaatggcaggacctgtc

SEQ ID NO: 16454 - RNA, 49 nt, synthetic construct
  source 1..49: mol_type = other RNA
tggctttcccccaggtatacatgttcctggtgaaatggcaggatttgtc

SEQ ID NO: 16455 - RNA, 49 nt, synthetic construct
  source 1..49: mol_type = other RNA
tggctttcccccaggtatacatgttcctggtgaaatggcaggatttatc

SEQ ID NO: 16456 - RNA, 49 nt, synthetic construct
  source 1..49: mol_type = other RNA
tggctttcccccaggtatacatgttcctggtgaaatggcaggatctgtc

SEQ ID NO: 16457 - RNA, 49 nt, synthetic construct
  source 1..49: mol_type = other RNA
tggctttcccccaggtatacatgttcctggtgaaatggcaggacttatc

SEQ ID NO: 16458 - RNA, 49 nt, synthetic construct
  source 1..49: mol_type = other RNA
tggctttcccccaggtatacatgttcctggtgaaatggcaggacctgtc

SEQ ID NO: 16459 - RNA, 49 nt, synthetic construct
  source 1..49: mol_type = other RNA
tggctttcccccaggtgtacatgttcctggtgaaatggcaggacctgtc

SEQ ID NO: 16460 - RNA, 49 nt, synthetic construct
  source 1..49: mol_type = other RNA
tggctttcccccaggtatacatgttcctggtgaaatggcaggacttgtc

SEQ ID NO: 16461 - RNA, 49 nt, synthetic construct
  source 1..49: mol_type = other RNA
tggctttcccccaggtgtacatgttcctggtgaaatggcaggatttgtc

SEQ ID NO: 16462 - RNA, 50 nt, synthetic construct
  source 1..50: mol_type = other RNA
ctggctttcccccaggtctacatgttcctggtgaaatggcaggatttgtc

SEQ ID NO: 16463 - RNA, 50 nt, synthetic construct
  source 1..50: mol_type = other RNA
ctggctttcccccaggtatacatgttcctggtgaaatggcaggatttatc

SEQ ID NO: 16464 - RNA, 50 nt, synthetic construct
  source 1..50: mol_type = other RNA
ctggctttcccccaggtttacatgttcctggtgaaatggcaggatctgtc

SEQ ID NO: 16465 - RNA, 50 nt, synthetic construct
  source 1..50: mol_type = other RNA
ctggctttcccccaggtttacatgttcctggtgaaatggcaggatttatc

SEQ ID NO: 16466 - RNA, 50 nt, synthetic construct
  source 1..50: mol_type = other RNA
ctggctttcccccaggtgtacatgttcctggtgaaatggcaggatttgtc

SEQ ID NO: 16467 - RNA, 50 nt, synthetic construct
  source 1..50: mol_type = other RNA
ctggctttcccccaggtatacatgttcctggtgaaatggcaggacctgtc

SEQ ID NO: 16468 - RNA, 50 nt, synthetic construct
  source 1..50: mol_type = other RNA
ctggctttcccccaggtttacatgttcctggtgaaatggcaggatttgtc

SEQ ID NO: 16469 - RNA, 50 nt, synthetic construct
  source 1..50: mol_type = other RNA
ctggctttcccccaggtatacatgttcctggtgaaatggcaggacttatc

SEQ ID NO: 16470 - RNA, 50 nt, synthetic construct
  source 1..50: mol_type = other RNA
ctggctttcccccaggtatacatgttcctggtgaaatggcaggacttgtc

SEQ ID NO: 16471 - RNA, 50 nt, synthetic construct
  source 1..50: mol_type = other RNA
ctggctttcccccaggtatacatgttcctggtgaaatggcaggatctgtc

SEQ ID NO: 16472 - RNA, 50 nt, synthetic construct
  source 1..50: mol_type = other RNA
ctggctttcccccaggtatacatgttcctggtgaaatggcaggatttgtc

SEQ ID NO: 16473 - RNA, 50 nt, synthetic construct
  source 1..50: mol_type = other RNA
ctggctttcccccaggtctacatgttcctggtgaaatggcaggatttatc

SEQ ID NO: 16474 - RNA, 50 nt, synthetic construct
  source 1..50: mol_type = other RNA
ctggctttcccccaggtttacatgttcctggtgaaatggcaggacttgtc

SEQ ID NO: 16475 - RNA, 50 nt, synthetic construct
  source 1..50: mol_type = other RNA
ctggctttcccccaggtttacatgttcctggtgaaatggcaggacttatc

SEQ ID NO: 16476 - RNA, 50 nt, synthetic construct
  source 1..50: mol_type = other RNA
ctggctttcccccaggtttacatgttcctggtgaaatggcaggacctgtc

SEQ ID NO: 16477 - RNA, 50 nt, synthetic construct
  source 1..50: mol_type = other RNA
ctggctttcccccaggtgtacatgttcctggtgaaatggcaggatttatc

SEQ ID NO: 16478 - RNA, 50 nt, synthetic construct
  source 1..50: mol_type = other RNA
ctggctttcccccaggtgtacatgttcctggtgaaatggcaggatctgtc

SEQ ID NO: 16479 - RNA, 50 nt, synthetic construct
  source 1..50: mol_type = other RNA
ctggctttcccccaggtgtacatgttcctggtgaaatggcaggacttgtc

SEQ ID NO: 16480 - RNA, 50 nt, synthetic construct
  source 1..50: mol_type = other RNA
ctggctttcccccaggtgtacatgttcctggtgaaatggcaggacctgtc

SEQ ID NO: 16481 - RNA, 50 nt, synthetic construct
  source 1..50: mol_type = other RNA
ctggctttcccccaggtgtacatgttcctggtgaaatggcaggacttatc

SEQ ID NO: 16482 - RNA, 50 nt, synthetic construct
  source 1..50: mol_type = other RNA
ctggctttcccccaggtctacatgttcctggtgaaatggcaggacttgtc

SEQ ID NO: 16483 - RNA, 50 nt, synthetic construct
  source 1..50: mol_type = other RNA
ctggctttcccccaggtctacatgttcctggtgaaatggcaggatctgtc

SEQ ID NO: 16484 - RNA, 50 nt, synthetic construct
  source 1..50: mol_type = other RNA
ctggctttcccccaggtctacatgttcctggtgaaatggcaggacttatc

SEQ ID NO: 16485 - RNA, 50 nt, synthetic construct
  source 1..50: mol_type = other RNA
ctggctttcccccaggtctacatgttcctggtgaaatggcaggacctgtc

SEQ ID NO: 16486 - RNA, 51 nt, synthetic construct
  source 1..51: mol_type = other RNA
tctggctttcccccaggtatacatgttcctggtgaaatggcaggacctgtc

SEQ ID NO: 16487 - RNA, 51 nt, synthetic construct
  source 1..51: mol_type = other RNA
tctggctttcccccaggtatacatgttcctggtgaaatggcaggacttgtc

SEQ ID NO: 16488 - RNA, 51 nt, synthetic construct
  source 1..51: mol_type = other RNA
tctggctttcccccaggtgtacatgttcctggtgaaatggcaggatttatc

SEQ ID NO: 16489 - RNA, 51 nt, synthetic construct
  source 1..51: mol_type = other RNA
tctggctttcccccaggtatacatgttcctggtgaaatggcaggatttgtc

SEQ ID NO: 16490 - RNA, 51 nt, synthetic construct
  source 1..51: mol_type = other RNA
tctggctttcccccaggtctacatgttcctggtgaaatggcaggacttatc

SEQ ID NO: 16491 - RNA, 51 nt, synthetic construct
  source 1..51: mol_type = other RNA
tctggctttcccccaggtctacatgttcctggtgaaatggcaggacttgtc

SEQ ID NO: 16492 - RNA, 51 nt, synthetic construct
  source 1..51: mol_type = other RNA
tctggctttcccccaggtttacatgttcctggtgaaatggcaggacctgtc

SEQ ID NO: 16493 - RNA, 51 nt, synthetic construct
  source 1..51: mol_type = other RNA
tctggctttcccccaggtctacatgttcctggtgaaatggcaggacctgtc

SEQ ID NO: 16494 - RNA, 51 nt, synthetic construct
  source 1..51: mol_type = other RNA
tctggctttcccccaggtctacatgttcctggtgaaatggcaggatttgtc

SEQ ID NO: 16495 - RNA, 51 nt, synthetic construct
  source 1..51: mol_type = other RNA
tctggctttcccccaggtctacatgttcctggtgaaatggcaggatctgtc

SEQ ID NO: 16496 - RNA, 51 nt, synthetic construct
  source 1..51: mol_type = other RNA
tctggctttcccccaggtctacatgttcctggtgaaatggcaggatttatc

SEQ ID NO: 16497 - RNA, 51 nt, synthetic construct
  source 1..51: mol_type = other RNA
tctggctttcccccaggtatacatgttcctggtgaaatggcaggatctgtc

SEQ ID NO: 16498 - RNA, 51 nt, synthetic construct
  source 1..51: mol_type = other RNA
tctggctttcccccaggtatacatgttcctggtgaaatggcaggacttatc

SEQ ID NO: 16499 - RNA, 51 nt, synthetic construct
  source 1..51: mol_type = other RNA
tctggctttcccccaggtgtacatgttcctggtgaaatggcaggatttgtc

SEQ ID NO: 16500 - RNA, 51 nt, synthetic construct
  source 1..51: mol_type = other RNA
tctggctttcccccaggtgtacatgttcctggtgaaatggcaggatctgtc

SEQ ID NO: 16501 - RNA, 51 nt, synthetic construct
  source 1..51: mol_type = other RNA
tctggctttcccccaggtatacatgttcctggtgaaatggcaggatttatc

SEQ ID NO: 16502 - RNA, 51 nt, synthetic construct
  source 1..51: mol_type = other RNA
tctggctttcccccaggtttacatgttcctggtgaaatggcaggacttgtc

SEQ ID NO: 16503 - RNA, 51 nt, synthetic construct
  source 1..51: mol_type = other RNA
tctggctttcccccaggtttacatgttcctggtgaaatggcaggatctgtc

SEQ ID NO: 16504 - RNA, 51 nt, synthetic construct
  source 1..51: mol_type = other RNA
tctggctttcccccaggtttacatgttcctggtgaaatggcaggatttatc

SEQ ID NO: 16505 - RNA, 51 nt, synthetic construct
  source 1..51: mol_type = other RNA
tctggctttcccccaggtttacatgttcctggtgaaatggcaggatttgtc

SEQ ID NO: 16506 - RNA, 51 nt, synthetic construct
  source 1..51: mol_type = other RNA
tctggctttcccccaggtgtacatgttcctggtgaaatggcaggacttatc

SEQ ID NO: 16507 - RNA, 51 nt, synthetic construct
  source 1..51: mol_type = other RNA
tctggctttcccccaggtttacatgttcctggtgaaatggcaggacttatc

SEQ ID NO: 16508 - RNA, 51 nt, synthetic construct
  source 1..51: mol_type = other RNA
tctggctttcccccaggtgtacatgttcctggtgaaatggcaggacctgtc

SEQ ID NO: 16509 - RNA, 51 nt, synthetic construct
  source 1..51: mol_type = other RNA
tctggctttcccccaggtgtacatgttcctggtgaaatggcaggacttgtc

SEQ ID NO: 16510 - RNA, 52 nt, synthetic construct
  source 1..52: mol_type = other RNA
ctctggctttcccccaggtttacatgttcctggtgaaatggcaggacctgtc

SEQ ID NO: 16511 - RNA, 52 nt, synthetic construct
  source 1..52: mol_type = other RNA
ctctggctttcccccaggtttacatgttcctggtgaaatggcaggacttatc

SEQ ID NO: 16512 - RNA, 52 nt, synthetic construct
  source 1..52: mol_type = other RNA
ctctggctttcccccaggtttacatgttcctggtgaaatggcaggacttgtc

SEQ ID NO: 16513 - RNA, 52 nt, synthetic construct
  source 1..52: mol_type = other RNA
ctctggctttcccccaggtttacatgttcctggtgaaatggcaggatctgtc

SEQ ID NO: 16514 - RNA, 52 nt, synthetic construct
  source 1..52: mol_type = other RNA
ctctggctttcccccaggtttacatgttcctggtgaaatggcaggatttatc

SEQ ID NO: 16515 - RNA, 52 nt, synthetic construct
  source 1..52: mol_type = other RNA
ctctggctttcccccaggtctacatgttcctggtgaaatggcaggatttgtc

SEQ ID NO: 16516 - RNA, 52 nt, synthetic construct
  source 1..52: mol_type = other RNA
ctctggctttcccccaggtatacatgttcctggtgaaatggcaggatttatc

SEQ ID NO: 16517 - RNA, 52 nt, synthetic construct
  source 1..52: mol_type = other RNA
ctctggctttcccccaggtctacatgttcctggtgaaatggcaggacttatc

SEQ ID NO: 16518 - RNA, 52 nt, synthetic construct
  source 1..52: mol_type = other RNA
ctctggctttcccccaggtatacatgttcctggtgaaatggcaggatttgtc

SEQ ID NO: 16519 - RNA, 52 nt, synthetic construct
  source 1..52: mol_type = other RNA
ctctggctttcccccaggtgtacatgttcctggtgaaatggcaggatttgtc

SEQ ID NO: 16520 - RNA, 52 nt, synthetic construct
  source 1..52: mol_type = other RNA
ctctggctttcccccaggtgtacatgttcctggtgaaatggcaggatctgtc

SEQ ID NO: 16521 - RNA, 52 nt, synthetic construct
  source 1..52: mol_type = other RNA
ctctggctttcccccaggtgtacatgttcctggtgaaatggcaggacttatc

SEQ ID NO: 16522 - RNA, 52 nt, synthetic construct
  source 1..52: mol_type = other RNA
ctctggctttcccccaggtttacatgttcctggtgaaatggcaggatttgtc

SEQ ID NO: 16523 - RNA, 52 nt, synthetic construct
  source 1..52: mol_type = other RNA
ctctggctttcccccaggtctacatgttcctggtgaaatggcaggacctgtc

SEQ ID NO: 16524 - RNA, 52 nt, synthetic construct
  source 1..52: mol_type = other RNA
ctctggctttcccccaggtctacatgttcctggtgaaatggcaggatttatc

SEQ ID NO: 16525 - RNA, 52 nt, synthetic construct
  source 1..52: mol_type = other RNA
ctctggctttcccccaggtatacatgttcctggtgaaatggcaggacttgtc

SEQ ID NO: 16526 - RNA, 52 nt, synthetic construct
  source 1..52: mol_type = other RNA
ctctggctttcccccaggtatacatgttcctggtgaaatggcaggacttatc

SEQ ID NO: 16527 - RNA, 52 nt, synthetic construct
  source 1..52: mol_type = other RNA
ctctggctttcccccaggtatacatgttcctggtgaaatggcaggacctgtc

SEQ ID NO: 16528 - RNA, 52 nt, synthetic construct
  source 1..52: mol_type = other RNA
ctctggctttcccccaggtctacatgttcctggtgaaatggcaggacttgtc

SEQ ID NO: 16529 - RNA, 52 nt, synthetic construct
  source 1..52: mol_type = other RNA
ctctggctttcccccaggtatacatgttcctggtgaaatggcaggatctgtc

SEQ ID NO: 16530 - RNA, 52 nt, synthetic construct
  source 1..52: mol_type = other RNA
ctctggctttcccccaggtctacatgttcctggtgaaatggcaggatctgtc

SEQ ID NO: 16531 - RNA, 52 nt, synthetic construct
  source 1..52: mol_type = other RNA
ctctggctttcccccaggtgtacatgttcctggtgaaatggcaggatttatc

SEQ ID NO: 16532 - RNA, 52 nt, synthetic construct
  source 1..52: mol_type = other RNA
ctctggctttcccccaggtgtacatgttcctggtgaaatggcaggacctgtc

SEQ ID NO: 16533 - RNA, 52 nt, synthetic construct
  source 1..52: mol_type = other RNA
ctctggctttcccccaggtgtacatgttcctggtgaaatggcaggacttgtc

SEQ ID NO: 16534 - RNA, 53 nt, synthetic construct
  source 1..53: mol_type = other RNA
actctggctttcccccaggtctacatgttcctggtgaaatggcaggacctgtc

SEQ ID NO: 16535 - RNA, 53 nt, synthetic construct
  source 1..53: mol_type = other RNA
actctggctttcccccaggtgtacatgttcctggtgaaatggcaggatctgtc

SEQ ID NO: 16536 - RNA, 53 nt, synthetic construct
  source 1..53: mol_type = other RNA
actctggctttcccccaggtgtacatgttcctggtgaaatggcaggatttatc

SEQ ID NO: 16537 - RNA, 53 nt, synthetic construct
  source 1..53: mol_type = other RNA
actctggctttcccccaggtttacatgttcctggtgaaatggcaggacctgtc

SEQ ID NO: 16538 - RNA, 53 nt, synthetic construct
  source 1..53: mol_type = other RNA
actctggctttcccccaggtgtacatgttcctggtgaaatggcaggatttgtc

SEQ ID NO: 16539 - RNA, 53 nt, synthetic construct
  source 1..53: mol_type = other RNA
actctggctttcccccaggtttacatgttcctggtgaaatggcaggacttgtc

SEQ ID NO: 16540 - RNA, 53 nt, synthetic construct
  source 1..53: mol_type = other RNA
actctggctttcccccaggtatacatgttcctggtgaaatggcaggatttgtc

SEQ ID NO: 16541 - RNA, 53 nt, synthetic construct
  source 1..53: mol_type = other RNA
actctggctttcccccaggtctacatgttcctggtgaaatggcaggatctgtc

SEQ ID NO: 16542 - RNA, 53 nt, synthetic construct
  source 1..53: mol_type = other RNA
actctggctttcccccaggtctacatgttcctggtgaaatggcaggacttgtc

SEQ ID NO: 16543 - RNA, 53 nt, synthetic construct
  source 1..53: mol_type = other RNA
actctggctttcccccaggtctacatgttcctggtgaaatggcaggacttatc

SEQ ID NO: 16544 - RNA, 53 nt, synthetic construct
  source 1..53: mol_type = other RNA
actctggctttcccccaggtatacatgttcctggtgaaatggcaggacctgtc

SEQ ID NO: 16545 - RNA, 53 nt, synthetic construct
  source 1..53: mol_type = other RNA
actctggctttcccccaggtttacatgttcctggtgaaatggcaggatttatc

SEQ ID NO: 16546 - RNA, 53 nt, synthetic construct
  source 1..53: mol_type = other RNA
actctggctttcccccaggtatacatgttcctggtgaaatggcaggatttatc

SEQ ID NO: 16547 - RNA, 53 nt, synthetic construct
  source 1..53: mol_type = other RNA
actctggctttcccccaggtatacatgttcctggtgaaatggcaggatctgtc

SEQ ID NO: 16548 - RNA, 53 nt, synthetic construct
  source 1..53: mol_type = other RNA
actctggctttcccccaggtttacatgttcctggtgaaatggcaggatctgtc

SEQ ID NO: 16549 - RNA, 53 nt, synthetic construct
  source 1..53: mol_type = other RNA
actctggctttcccccaggtatacatgttcctggtgaaatggcaggacttatc

SEQ ID NO: 16550 - RNA, 53 nt, synthetic construct
  source 1..53: mol_type = other RNA
actctggctttcccccaggtctacatgttcctggtgaaatggcaggatttatc

SEQ ID NO: 16551 - RNA, 53 nt, synthetic construct
  source 1..53: mol_type = other RNA
actctggctttcccccaggtctacatgttcctggtgaaatggcaggatttgtc

SEQ ID NO: 16552 - RNA, 53 nt, synthetic construct
  source 1..53: mol_type = other RNA
actctggctttcccccaggtgtacatgttcctggtgaaatggcaggacctgtc

SEQ ID NO: 16553 - RNA, 53 nt, synthetic construct
  source 1..53: mol_type = other RNA
actctggctttcccccaggtttacatgttcctggtgaaatggcaggacttatc

SEQ ID NO: 16554 - RNA, 53 nt, synthetic construct
  source 1..53: mol_type = other RNA
actctggctttcccccaggtgtacatgttcctggtgaaatggcaggacttatc

SEQ ID NO: 16555 - RNA, 53 nt, synthetic construct
  source 1..53: mol_type = other RNA
actctggctttcccccaggtgtacatgttcctggtgaaatggcaggacttgtc

SEQ ID NO: 16556 - RNA, 53 nt, synthetic construct
  source 1..53: mol_type = other RNA
actctggctttcccccaggtttacatgttcctggtgaaatggcaggatttgtc

SEQ ID NO: 16557 - RNA, 53 nt, synthetic construct
  source 1..53: mol_type = other RNA
actctggctttcccccaggtatacatgttcctggtgaaatggcaggacttgtc

SEQ ID NO: 16558 - RNA, 54 nt, synthetic construct
  source 1..54: mol_type = other RNA
gactctggctttcccccaggtctacatgttcctggtgaaatggcaggacctgtc

SEQ ID NO: 16559 - RNA, 54 nt, synthetic construct
  source 1..54: mol_type = other RNA
gactctggctttcccccaggtatacatgttcctggtgaaatggcaggatttgtc

SEQ ID NO: 16560 - RNA, 54 nt, synthetic construct
  source 1..54: mol_type = other RNA
gactctggctttcccccaggtatacatgttcctggtgaaatggcaggatctgtc

SEQ ID NO: 16561 - RNA, 54 nt, synthetic construct
  source 1..54: mol_type = other RNA
gactctggctttcccccaggtatacatgttcctggtgaaatggcaggacttgtc

SEQ ID NO: 16562 - RNA, 54 nt, synthetic construct
  source 1..54: mol_type = other RNA
gactctggctttcccccaggtatacatgttcctggtgaaatggcaggacttatc

SEQ ID NO: 16563 - RNA, 54 nt, synthetic construct
  source 1..54: mol_type = other RNA
gactctggctttcccccaggtatacatgttcctggtgaaatggcaggacctgtc

SEQ ID NO: 16564 - RNA, 54 nt, synthetic construct
  source 1..54: mol_type = other RNA
gactctggctttcccccaggtctacatgttcctggtgaaatggcaggatttatc

SEQ ID NO: 16565 - RNA, 54 nt, synthetic construct
  source 1..54: mol_type = other RNA
gactctggctttcccccaggtttacatgttcctggtgaaatggcaggatttatc

SEQ ID NO: 16566 - RNA, 54 nt, synthetic construct
  source 1..54: mol_type = other RNA
gactctggctttcccccaggtatacatgttcctggtgaaatggcaggatttatc

SEQ ID NO: 16567 - RNA, 54 nt, synthetic construct
  source 1..54: mol_type = other RNA
gactctggctttcccccaggtctacatgttcctggtgaaatggcaggacttatc

SEQ ID NO: 16568 - RNA, 54 nt, synthetic construct
  source 1..54: mol_type = other RNA
gactctggctttcccccaggtttacatgttcctggtgaaatggcaggatctgtc

SEQ ID NO: 16569 - RNA, 54 nt, synthetic construct
  source 1..54: mol_type = other RNA
gactctggctttcccccaggtctacatgttcctggtgaaatggcaggatctgtc

SEQ ID NO: 16570 - RNA, 54 nt, synthetic construct
  source 1..54: mol_type = other RNA
gactctggctttcccccaggtctacatgttcctggtgaaatggcaggacttgtc

SEQ ID NO: 16571 - RNA, 54 nt, synthetic construct
  source 1..54: mol_type = other RNA
gactctggctttcccccaggtctacatgttcctggtgaaatggcaggatttgtc

SEQ ID NO: 16572 - RNA, 54 nt, synthetic construct
  source 1..54: mol_type = other RNA
gactctggctttcccccaggtttacatgttcctggtgaaatggcaggatttgtc

SEQ ID NO: 16573 - RNA, 54 nt, synthetic construct
  source 1..54: mol_type = other RNA
gactctggctttcccccaggtgtacatgttcctggtgaaatggcaggacctgtc

SEQ ID NO: 16574 - RNA, 54 nt, synthetic construct
  source 1..54: mol_type = other RNA
gactctggctttcccccaggtttacatgttcctggtgaaatggcaggacttgtc

SEQ ID NO: 16575 - RNA, 54 nt, synthetic construct
  source 1..54: mol_type = other RNA
gactctggctttcccccaggtttacatgttcctggtgaaatggcaggacttatc

SEQ ID NO: 16576 - RNA, 54 nt, synthetic construct
  source 1..54: mol_type = other RNA
gactctggctttcccccaggtttacatgttcctggtgaaatggcaggacctgtc

SEQ ID NO: 16577 - RNA, 54 nt, synthetic construct
  source 1..54: mol_type = other RNA
gactctggctttcccccaggtgtacatgttcctggtgaaatggcaggatttgtc

SEQ ID NO: 16578 - RNA, 54 nt, synthetic construct
  source 1..54: mol_type = other RNA
gactctggctttcccccaggtgtacatgttcctggtgaaatggcaggatttatc

SEQ ID NO: 16579 - RNA, 54 nt, synthetic construct
  source 1..54: mol_type = other RNA
gactctggctttcccccaggtgtacatgttcctggtgaaatggcaggatctgtc

SEQ ID NO: 16580 - RNA, 54 nt, synthetic construct
  source 1..54: mol_type = other RNA
gactctggctttcccccaggtgtacatgttcctggtgaaatggcaggacttgtc

SEQ ID NO: 16581 - RNA, 54 nt, synthetic construct
  source 1..54: mol_type = other RNA
gactctggctttcccccaggtgtacatgttcctggtgaaatggcaggacttatc

SEQ ID NO: 16582 - RNA, 55 nt, synthetic construct
  source 1..55: mol_type = other RNA
cgactctggctttcccccaggtatacatgttcctggtgaaatggcaggacttgtc

SEQ ID NO: 16583 - RNA, 55 nt, synthetic construct
  source 1..55: mol_type = other RNA
cgactctggctttcccccaggtgtacatgttcctggtgaaatggcaggacctgtc

SEQ ID NO: 16584 - RNA, 55 nt, synthetic construct
  source 1..55: mol_type = other RNA
cgactctggctttcccccaggtctacatgttcctggtgaaatggcaggatttatc

SEQ ID NO: 16585 - RNA, 55 nt, synthetic construct
  source 1..55: mol_type = other RNA
cgactctggctttcccccaggtatacatgttcctggtgaaatggcaggacctgtc

SEQ ID NO: 16586 - RNA, 55 nt, synthetic construct
  source 1..55: mol_type = other RNA
cgactctggctttcccccaggtatacatgttcctggtgaaatggcaggacttatc

SEQ ID NO: 16587 - RNA, 55 nt, synthetic construct
  source 1..55: mol_type = other RNA
cgactctggctttcccccaggtctacatgttcctggtgaaatggcaggacttatc

SEQ ID NO: 16588 - RNA, 55 nt, synthetic construct
  source 1..55: mol_type = other RNA
cgactctggctttcccccaggtatacatgttcctggtgaaatggcaggatctgtc

SEQ ID NO: 16589 - RNA, 55 nt, synthetic construct
  source 1..55: mol_type = other RNA
cgactctggctttcccccaggtatacatgttcctggtgaaatggcaggatttgtc

SEQ ID NO: 16590 - RNA, 55 nt, synthetic construct
  source 1..55: mol_type = other RNA
cgactctggctttcccccaggtctacatgttcctggtgaaatggcaggacctgtc

SEQ ID NO: 16591 - RNA, 55 nt, synthetic construct
  source 1..55: mol_type = other RNA
cgactctggctttcccccaggtctacatgttcctggtgaaatggcaggacttgtc

SEQ ID NO: 16592 - RNA, 55 nt, synthetic construct
  source 1..55: mol_type = other RNA
cgactctggctttcccccaggtatacatgttcctggtgaaatggcaggatttatc

SEQ ID NO: 16593 - RNA, 55 nt, synthetic construct
  source 1..55: mol_type = other RNA
cgactctggctttcccccaggtctacatgttcctggtgaaatggcaggatttgtc

SEQ ID NO: 16594 - RNA, 55 nt, synthetic construct
  source 1..55: mol_type = other RNA
cgactctggctttcccccaggtctacatgttcctggtgaaatggcaggatctgtc

SEQ ID NO: 16595 - RNA, 55 nt, synthetic construct
  source 1..55: mol_type = other RNA
cgactctggctttcccccaggtgtacatgttcctggtgaaatggcaggatctgtc

SEQ ID NO: 16596 - RNA, 55 nt, synthetic construct
  source 1..55: mol_type = other RNA
cgactctggctttcccccaggtgtacatgttcctggtgaaatggcaggacttgtc

SEQ ID NO: 16597 - RNA, 55 nt, synthetic construct
  source 1..55: mol_type = other RNA
cgactctggctttcccccaggtgtacatgttcctggtgaaatggcaggacttatc

SEQ ID NO: 16598 - RNA, 55 nt, synthetic construct
  source 1..55: mol_type = other RNA
cgactctggctttcccccaggtttacatgttcctggtgaaatggcaggacctgtc

SEQ ID NO: 16599 - RNA, 55 nt, synthetic construct
  source 1..55: mol_type = other RNA
cgactctggctttcccccaggtgtacatgttcctggtgaaatggcaggatttatc

SEQ ID NO: 16600 - RNA, 55 nt, synthetic construct
  source 1..55: mol_type = other RNA
cgactctggctttcccccaggtttacatgttcctggtgaaatggcaggatttgtc

SEQ ID NO: 16601 - RNA, 55 nt, synthetic construct
  source 1..55: mol_type = other RNA
cgactctggctttcccccaggtttacatgttcctggtgaaatggcaggatttatc

SEQ ID NO: 16602 - RNA, 55 nt, synthetic construct
  source 1..55: mol_type = other RNA
cgactctggctttcccccaggtttacatgttcctggtgaaatggcaggatctgtc

SEQ ID NO: 16603 - RNA, 55 nt, synthetic construct
  source 1..55: mol_type = other RNA
cgactctggctttcccccaggtttacatgttcctggtgaaatggcaggacttgtc

SEQ ID NO: 16604 - RNA, 55 nt, synthetic construct
  source 1..55: mol_type = other RNA
cgactctggctttcccccaggtttacatgttcctggtgaaatggcaggacttatc

SEQ ID NO: 16605 - RNA, 55 nt, synthetic construct
  source 1..55: mol_type = other RNA
cgactctggctttcccccaggtgtacatgttcctggtgaaatggcaggatttgtc

SEQ ID NO: 16606 - RNA, 56 nt, synthetic construct
  source 1..56: mol_type = other RNA
ccgactctggctttcccccaggtatacatgttcctggtgaaatggcaggatttatc

SEQ ID NO: 16607 - RNA, 56 nt, synthetic construct
  source 1..56: mol_type = other RNA
ccgactctggctttcccccaggtctacatgttcctggtgaaatggcaggatctgtc

SEQ ID NO: 16608 - RNA, 56 nt, synthetic construct
  source 1..56: mol_type = other RNA
ccgactctggctttcccccaggtctacatgttcctggtgaaatggcaggatttatc

SEQ ID NO: 16609 - RNA, 56 nt, synthetic construct
  source 1..56: mol_type = other RNA
ccgactctggctttcccccaggtctacatgttcctggtgaaatggcaggacttatc

SEQ ID NO: 16610 - RNA, 56 nt, synthetic construct
  source 1..56: mol_type = other RNA
ccgactctggctttcccccaggtctacatgttcctggtgaaatggcaggacctgtc

SEQ ID NO: 16611 - RNA, 56 nt, synthetic construct
  source 1..56: mol_type = other RNA
ccgactctggctttcccccaggtatacatgttcctggtgaaatggcaggacctgtc

SEQ ID NO: 16612 - RNA, 56 nt, synthetic construct
  source 1..56: mol_type = other RNA
ccgactctggctttcccccaggtctacatgttcctggtgaaatggcaggacttgtc

SEQ ID NO: 16613 - RNA, 56 nt, synthetic construct
  source 1..56: mol_type = other RNA
ccgactctggctttcccccaggtatacatgttcctggtgaaatggcaggatctgtc

SEQ ID NO: 16614 - RNA, 56 nt, synthetic construct
  source 1..56: mol_type = other RNA
ccgactctggctttcccccaggtatacatgttcctggtgaaatggcaggacttgtc

SEQ ID NO: 16615 - RNA, 56 nt, synthetic construct
  source 1..56: mol_type = other RNA
ccgactctggctttcccccaggtatacatgttcctggtgaaatggcaggacttatc

SEQ ID NO: 16616 - RNA, 56 nt, synthetic construct
  source 1..56: mol_type = other RNA
ccgactctggctttcccccaggtctacatgttcctggtgaaatggcaggatttgtc

SEQ ID NO: 16617 - RNA, 56 nt, synthetic construct
  source 1..56: mol_type = other RNA
ccgactctggctttcccccaggtatacatgttcctggtgaaatggcaggatttgtc

SEQ ID NO: 16618 - RNA, 56 nt, synthetic construct
  source 1..56: mol_type = other RNA
ccgactctggctttcccccaggtttacatgttcctggtgaaatggcaggatttgtc

SEQ ID NO: 16619 - RNA, 56 nt, synthetic construct
  source 1..56: mol_type = other RNA
ccgactctggctttcccccaggtgtacatgttcctggtgaaatggcaggacttatc

SEQ ID NO: 16620 - RNA, 56 nt, synthetic construct
  source 1..56: mol_type = other RNA
ccgactctggctttcccccaggtttacatgttcctggtgaaatggcaggacttgtc

SEQ ID NO: 16621 - RNA, 56 nt, synthetic construct
  source 1..56: mol_type = other RNA
ccgactctggctttcccccaggtttacatgttcctggtgaaatggcaggatttatc

SEQ ID NO: 16622 - RNA, 56 nt, synthetic construct
  source 1..56: mol_type = other RNA
ccgactctggctttcccccaggtttacatgttcctggtgaaatggcaggacttatc

SEQ ID NO: 16623 - RNA, 56 nt, synthetic construct
  source 1..56: mol_type = other RNA
ccgactctggctttcccccaggtgtacatgttcctggtgaaatggcaggatttatc

SEQ ID NO: 16624 - RNA, 56 nt, synthetic construct
  source 1..56: mol_type = other RNA
ccgactctggctttcccccaggtgtacatgttcctggtgaaatggcaggatttgtc

SEQ ID NO: 16625 - RNA, 56 nt, synthetic construct
  source 1..56: mol_type = other RNA
ccgactctggctttcccccaggtgtacatgttcctggtgaaatggcaggacttgtc

SEQ ID NO: 16626 - RNA, 56 nt, synthetic construct
  source 1..56: mol_type = other RNA
ccgactctggctttcccccaggtttacatgttcctggtgaaatggcaggacctgtc

SEQ ID NO: 16627 - RNA, 56 nt, synthetic construct
  source 1..56: mol_type = other RNA
ccgactctggctttcccccaggtgtacatgttcctggtgaaatggcaggacctgtc

SEQ ID NO: 16628 - RNA, 56 nt, synthetic construct
  source 1..56: mol_type = other RNA
ccgactctggctttcccccaggtgtacatgttcctggtgaaatggcaggatctgtc

SEQ ID NO: 16629 - RNA, 56 nt, synthetic construct
  source 1..56: mol_type = other RNA
ccgactctggctttcccccaggtttacatgttcctggtgaaatggcaggatctgtc

SEQ ID NO: 16630 - RNA, 57 nt, synthetic construct
  source 1..57: mol_type = other RNA
cccgactctggctttcccccaggtatacatgttcctggtgaaatggcaggatttgtc

SEQ ID NO: 16631 - RNA, 57 nt, synthetic construct
  source 1..57: mol_type = other RNA
cccgactctggctttcccccaggtgtacatgttcctggtgaaatggcaggatttgtc

SEQ ID NO: 16632 - RNA, 57 nt, synthetic construct
  source 1..57: mol_type = other RNA
cccgactctggctttcccccaggtgtacatgttcctggtgaaatggcaggatttatc

SEQ ID NO: 16633 - RNA, 57 nt, synthetic construct
  source 1..57: mol_type = other RNA
cccgactctggctttcccccaggtgtacatgttcctggtgaaatggcaggacttgtc

SEQ ID NO: 16634 - RNA, 57 nt, synthetic construct
  source 1..57: mol_type = other RNA
cccgactctggctttcccccaggtgtacatgttcctggtgaaatggcaggatctgtc

SEQ ID NO: 16635 - RNA, 57 nt, synthetic construct
  source 1..57: mol_type = other RNA
cccgactctggctttcccccaggtctacatgttcctggtgaaatggcaggatctgtc

SEQ ID NO: 16636 - RNA, 57 nt, synthetic construct
  source 1..57: mol_type = other RNA
cccgactctggctttcccccaggtctacatgttcctggtgaaatggcaggacttgtc

SEQ ID NO: 16637 - RNA, 57 nt, synthetic construct
  source 1..57: mol_type = other RNA
cccgactctggctttcccccaggtctacatgttcctggtgaaatggcaggacttatc

SEQ ID NO: 16638 - RNA, 57 nt, synthetic construct
  source 1..57: mol_type = other RNA
cccgactctggctttcccccaggtctacatgttcctggtgaaatggcaggacctgtc

SEQ ID NO: 16639 - RNA, 57 nt, synthetic construct
  source 1..57: mol_type = other RNA
cccgactctggctttcccccaggtatacatgttcctggtgaaatggcaggatttatc

SEQ ID NO: 16640 - RNA, 57 nt, synthetic construct
  source 1..57: mol_type = other RNA
cccgactctggctttcccccaggtatacatgttcctggtgaaatggcaggacttgtc

SEQ ID NO: 16641 - RNA, 57 nt, synthetic construct
  source 1..57: mol_type = other RNA
cccgactctggctttcccccaggtatacatgttcctggtgaaatggcaggatctgtc

SEQ ID NO: 16642 - RNA, 57 nt, synthetic construct
  source 1..57: mol_type = other RNA
cccgactctggctttcccccaggtatacatgttcctggtgaaatggcaggacttatc

SEQ ID NO: 16643 - RNA, 57 nt, synthetic construct
  source 1..57: mol_type = other RNA
cccgactctggctttcccccaggtatacatgttcctggtgaaatggcaggacctgtc

SEQ ID NO: 16644 - RNA, 57 nt, synthetic construct
  source 1..57: mol_type = other RNA
cccgactctggctttcccccaggtctacatgttcctggtgaaatggcaggatttgtc

SEQ ID NO: 16645 - RNA, 57 nt, synthetic construct
  source 1..57: mol_type = other RNA
cccgactctggctttcccccaggtttacatgttcctggtgaaatggcaggacctgtc

SEQ ID NO: 16646 - RNA, 57 nt, synthetic construct
  source 1..57: mol_type = other RNA
cccgactctggctttcccccaggtgtacatgttcctggtgaaatggcaggacttatc

SEQ ID NO: 16647 - RNA, 57 nt, synthetic construct
  source 1..57: mol_type = other RNA
cccgactctggctttcccccaggtgtacatgttcctggtgaaatggcaggacctgtc

SEQ ID NO: 16648 - RNA, 57 nt, synthetic construct
  source 1..57: mol_type = other RNA
cccgactctggctttcccccaggtttacatgttcctggtgaaatggcaggacttatc

SEQ ID NO: 16649 - RNA, 57 nt, synthetic construct
  source 1..57: mol_type = other RNA
cccgactctggctttcccccaggtttacatgttcctggtgaaatggcaggacttgtc

SEQ ID NO: 16650 - RNA, 57 nt, synthetic construct
  source 1..57: mol_type = other RNA
cccgactctggctttcccccaggtttacatgttcctggtgaaatggcaggatttatc

SEQ ID NO: 16651 - RNA, 57 nt, synthetic construct
  source 1..57: mol_type = other RNA
cccgactctggctttcccccaggtctacatgttcctggtgaaatggcaggatttatc

SEQ ID NO: 16652 - RNA, 57 nt, synthetic construct
  source 1..57: mol_type = other RNA
cccgactctggctttcccccaggtttacatgttcctggtgaaatggcaggatctgtc

SEQ ID NO: 16653 - RNA, 57 nt, synthetic construct
  source 1..57: mol_type = other RNA
cccgactctggctttcccccaggtttacatgttcctggtgaaatggcaggatttgtc

SEQ ID NO: 16654 - RNA, 58 nt, synthetic construct
  source 1..58: mol_type = other RNA
ccccgactctggctttcccccaggtgtacatgttcctggtgaaatggcaggatttgtc

SEQ ID NO: 16655 - RNA, 58 nt, synthetic construct
  source 1..58: mol_type = other RNA
ccccgactctggctttcccccaggtttacatgttcctggtgaaatggcaggacctgtc

SEQ ID NO: 16656 - RNA, 58 nt, synthetic construct
  source 1..58: mol_type = other RNA
ccccgactctggctttcccccaggtgtacatgttcctggtgaaatggcaggacttatc

SEQ ID NO: 16657 - RNA, 58 nt, synthetic construct
  source 1..58: mol_type = other RNA
ccccgactctggctttcccccaggtttacatgttcctggtgaaatggcaggacttgtc

SEQ ID NO: 16658 - RNA, 58 nt, synthetic construct
  source 1..58: mol_type = other RNA
ccccgactctggctttcccccaggtttacatgttcctggtgaaatggcaggatctgtc

SEQ ID NO: 16659 - RNA, 58 nt, synthetic construct
  source 1..58: mol_type = other RNA
ccccgactctggctttcccccaggtttacatgttcctggtgaaatggcaggatttatc

SEQ ID NO: 16660 - RNA, 58 nt, synthetic construct
  source 1..58: mol_type = other RNA
ccccgactctggctttcccccaggtgtacatgttcctggtgaaatggcaggatctgtc

SEQ ID NO: 16661 - RNA, 58 nt, synthetic construct
  source 1..58: mol_type = other RNA
ccccgactctggctttcccccaggtttacatgttcctggtgaaatggcaggacttatc

SEQ ID NO: 16662 - RNA, 58 nt, synthetic construct
  source 1..58: mol_type = other RNA
ccccgactctggctttcccccaggtgtacatgttcctggtgaaatggcaggacctgtc

SEQ ID NO: 16663 - RNA, 58 nt, synthetic construct
  source 1..58: mol_type = other RNA
ccccgactctggctttcccccaggtgtacatgttcctggtgaaatggcaggatttatc

SEQ ID NO: 16664 - RNA, 58 nt, synthetic construct
  source 1..58: mol_type = other RNA
ccccgactctggctttcccccaggtctacatgttcctggtgaaatggcaggatctgtc

SEQ ID NO: 16665 - RNA, 58 nt, synthetic construct
  source 1..58: mol_type = other RNA
ccccgactctggctttcccccaggtctacatgttcctggtgaaatggcaggacttatc

SEQ ID NO: 16666 - RNA, 58 nt, synthetic construct
  source 1..58: mol_type = other RNA
ccccgactctggctttcccccaggtctacatgttcctggtgaaatggcaggatttgtc

SEQ ID NO: 16667 - RNA, 58 nt, synthetic construct
  source 1..58: mol_type = other RNA
ccccgactctggctttcccccaggtctacatgttcctggtgaaatggcaggacttgtc

SEQ ID NO: 16668 - RNA, 58 nt, synthetic construct
  source 1..58: mol_type = other RNA
ccccgactctggctttcccccaggtgtacatgttcctggtgaaatggcaggacttgtc

SEQ ID NO: 16669 - RNA, 58 nt, synthetic construct
  source 1..58: mol_type = other RNA
ccccgactctggctttcccccaggtttacatgttcctggtgaaatggcaggatttgtc

SEQ ID NO: 16670 - RNA, 58 nt, synthetic construct
  source 1..58: mol_type = other RNA
ccccgactctggctttcccccaggtatacatgttcctggtgaaatggcaggatttgtc

SEQ ID NO: 16671 - RNA, 58 nt, synthetic construct
  source 1..58: mol_type = other RNA
ccccgactctggctttcccccaggtatacatgttcctggtgaaatggcaggacctgtc

SEQ ID NO: 16672 - RNA, 58 nt, synthetic construct
  source 1..58: mol_type = other RNA
ccccgactctggctttcccccaggtatacatgttcctggtgaaatggcaggacttatc

SEQ ID NO: 16673 - RNA, 58 nt, synthetic construct
  source 1..58: mol_type = other RNA
ccccgactctggctttcccccaggtatacatgttcctggtgaaatggcaggacttgtc

SEQ ID NO: 16674 - RNA, 58 nt, synthetic construct
  source 1..58: mol_type = other RNA
ccccgactctggctttcccccaggtctacatgttcctggtgaaatggcaggatttatc

SEQ ID NO: 16675 - RNA, 58 nt, synthetic construct
  source 1..58: mol_type = other RNA
ccccgactctggctttcccccaggtatacatgttcctggtgaaatggcaggatttatc

SEQ ID NO: 16676 - RNA, 58 nt, synthetic construct
  source 1..58: mol_type = other RNA
ccccgactctggctttcccccaggtatacatgttcctggtgaaatggcaggatctgtc

SEQ ID NO: 16677 - RNA, 58 nt, synthetic construct
  source 1..58: mol_type = other RNA
ccccgactctggctttcccccaggtctacatgttcctggtgaaatggcaggacctgtc

SEQ ID NO: 16678 - RNA, 59 nt, synthetic construct
  source 1..59: mol_type = other RNA
cccccgactctggctttcccccaggtgtacatgttcctggtgaaatggcaggacctgtc

SEQ ID NO: 16679 - RNA, 59 nt, synthetic construct
  source 1..59: mol_type = other RNA
cccccgactctggctttcccccaggtctacatgttcctggtgaaatggcaggatctgtc

SEQ ID NO: 16680 - RNA, 59 nt, synthetic construct
  source 1..59: mol_type = other RNA
cccccgactctggctttcccccaggtgtacatgttcctggtgaaatggcaggatctgtc

SEQ ID NO: 16681 - RNA, 59 nt, synthetic construct
  source 1..59: mol_type = other RNA
cccccgactctggctttcccccaggtgtacatgttcctggtgaaatggcaggatttatc

SEQ ID NO: 16682 - RNA, 59 nt, synthetic construct
  source 1..59: mol_type = other RNA
cccccgactctggctttcccccaggtgtacatgttcctggtgaaatggcaggatttgtc

SEQ ID NO: 16683 - RNA, 59 nt, synthetic construct
  source 1..59: mol_type = other RNA
cccccgactctggctttcccccaggtttacatgttcctggtgaaatggcaggatttatc

SEQ ID NO: 16684 - RNA, 59 nt, synthetic construct
  source 1..59: mol_type = other RNA
cccccgactctggctttcccccaggtttacatgttcctggtgaaatggcaggacttatc

SEQ ID NO: 16685 - RNA, 59 nt, synthetic construct
  source 1..59: mol_type = other RNA
cccccgactctggctttcccccaggtttacatgttcctggtgaaatggcaggacttgtc

SEQ ID NO: 16686 - RNA, 59 nt, synthetic construct
  source 1..59: mol_type = other RNA
cccccgactctggctttcccccaggtgtacatgttcctggtgaaatggcaggacttatc

SEQ ID NO: 16687 - RNA, 59 nt, synthetic construct
  source 1..59: mol_type = other RNA
cccccgactctggctttcccccaggtttacatgttcctggtgaaatggcaggatctgtc

SEQ ID NO: 16688 - RNA, 59 nt, synthetic construct
  source 1..59: mol_type = other RNA
cccccgactctggctttcccccaggtttacatgttcctggtgaaatggcaggatttgtc

SEQ ID NO: 16689 - RNA, 59 nt, synthetic construct
  source 1..59: mol_type = other RNA
cccccgactctggctttcccccaggtttacatgttcctggtgaaatggcaggacctgtc

SEQ ID NO: 16690 - RNA, 59 nt, synthetic construct
  source 1..59: mol_type = other RNA
cccccgactctggctttcccccaggtctacatgttcctggtgaaatggcaggatttatc

SEQ ID NO: 16691 - RNA, 59 nt, synthetic construct
  source 1..59: mol_type = other RNA
cccccgactctggctttcccccaggtatacatgttcctggtgaaatggcaggacctgtc

SEQ ID NO: 16692 - RNA, 59 nt, synthetic construct
  source 1..59: mol_type = other RNA
cccccgactctggctttcccccaggtctacatgttcctggtgaaatggcaggatttgtc

SEQ ID NO: 16693 - RNA, 59 nt, synthetic construct
  source 1..59: mol_type = other RNA
cccccgactctggctttcccccaggtatacatgttcctggtgaaatggcaggacttgtc

SEQ ID NO: 16694 - RNA, 59 nt, synthetic construct
  source 1..59: mol_type = other RNA
cccccgactctggctttcccccaggtatacatgttcctggtgaaatggcaggatctgtc

SEQ ID NO: 16695 - RNA, 59 nt, synthetic construct
  source 1..59: mol_type = other RNA
cccccgactctggctttcccccaggtatacatgttcctggtgaaatggcaggacttatc

SEQ ID NO: 16696 - RNA, 59 nt, synthetic construct
  source 1..59: mol_type = other RNA
cccccgactctggctttcccccaggtatacatgttcctggtgaaatggcaggatttgtc

SEQ ID NO: 16697 - RNA, 59 nt, synthetic construct
  source 1..59: mol_type = other RNA
cccccgactctggctttcccccaggtctacatgttcctggtgaaatggcaggacttatc

SEQ ID NO: 16698 - RNA, 59 nt, synthetic construct
  source 1..59: mol_type = other RNA
cccccgactctggctttcccccaggtctacatgttcctggtgaaatggcaggacttgtc

SEQ ID NO: 16699 - RNA, 59 nt, synthetic construct
  source 1..59: mol_type = other RNA
cccccgactctggctttcccccaggtatacatgttcctggtgaaatggcaggatttatc

SEQ ID NO: 16700 - RNA, 59 nt, synthetic construct
  source 1..59: mol_type = other RNA
cccccgactctggctttcccccaggtgtacatgttcctggtgaaatggcaggacttgtc

SEQ ID NO: 16701 - RNA, 59 nt, synthetic construct
  source 1..59: mol_type = other RNA
cccccgactctggctttcccccaggtctacatgttcctggtgaaatggcaggacctgtc

SEQ ID NO: 16702 - RNA, 60 nt, synthetic construct
  source 1..60: mol_type = other RNA
tcccccgactctggctttcccccaggtgtacatgttcctggtgaaatggcaggacctgtc

SEQ ID NO: 16703 - RNA, 60 nt, synthetic construct
  source 1..60: mol_type = other RNA
tcccccgactctggctttcccccaggtctacatgttcctggtgaaatggcaggatttgtc

SEQ ID NO: 16704 - RNA, 60 nt, synthetic construct
  source 1..60: mol_type = other RNA
tcccccgactctggctttcccccaggtctacatgttcctggtgaaatggcaggatttatc

SEQ ID NO: 16705 - RNA, 60 nt, synthetic construct
  source 1..60: mol_type = other RNA
tcccccgactctggctttcccccaggtctacatgttcctggtgaaatggcaggacttgtc

SEQ ID NO: 16706 - RNA, 60 nt, synthetic construct
  source 1..60: mol_type = other RNA
tcccccgactctggctttcccccaggtgtacatgttcctggtgaaatggcaggacttgtc

SEQ ID NO: 16707 - RNA, 60 nt, synthetic construct
  source 1..60: mol_type = other RNA
tcccccgactctggctttcccccaggtctacatgttcctggtgaaatggcaggatctgtc

SEQ ID NO: 16708 - RNA, 60 nt, synthetic construct
  source 1..60: mol_type = other RNA
tcccccgactctggctttcccccaggtatacatgttcctggtgaaatggcaggatttatc

SEQ ID NO: 16709 - RNA, 60 nt, synthetic construct
  source 1..60: mol_type = other RNA
tcccccgactctggctttcccccaggtatacatgttcctggtgaaatggcaggatctgtc

SEQ ID NO: 16710 - RNA, 60 nt, synthetic construct
  source 1..60: mol_type = other RNA
tcccccgactctggctttcccccaggtctacatgttcctggtgaaatggcaggacttatc

SEQ ID NO: 16711 - RNA, 60 nt, synthetic construct
  source 1..60: mol_type = other RNA
tcccccgactctggctttcccccaggtatacatgttcctggtgaaatggcaggacttgtc

SEQ ID NO: 16712 - RNA, 60 nt, synthetic construct
  source 1..60: mol_type = other RNA
tcccccgactctggctttcccccaggtatacatgttcctggtgaaatggcaggacttatc

SEQ ID NO: 16713 - RNA, 60 nt, synthetic construct
  source 1..60: mol_type = other RNA
tcccccgactctggctttcccccaggtatacatgttcctggtgaaatggcaggacctgtc

SEQ ID NO: 16714 - RNA, 60 nt, synthetic construct
  source 1..60: mol_type = other RNA
tcccccgactctggctttcccccaggtatacatgttcctggtgaaatggcaggatttgtc

SEQ ID NO: 16715 - RNA, 60 nt, synthetic construct
  source 1..60: mol_type = other RNA
tcccccgactctggctttcccccaggtttacatgttcctggtgaaatggcaggacttatc

SEQ ID NO: 16716 - RNA, 60 nt, synthetic construct
  source 1..60: mol_type = other RNA
tcccccgactctggctttcccccaggtctacatgttcctggtgaaatggcaggacctgtc

SEQ ID NO: 16717 - RNA, 60 nt, synthetic construct
  source 1..60: mol_type = other RNA
tcccccgactctggctttcccccaggtgtacatgttcctggtgaaatggcaggatttatc

SEQ ID NO: 16718 - RNA, 60 nt, synthetic construct
  source 1..60: mol_type = other RNA
tcccccgactctggctttcccccaggtgtacatgttcctggtgaaatggcaggacttatc

SEQ ID NO: 16719 - RNA, 60 nt, synthetic construct
  source 1..60: mol_type = other RNA
tcccccgactctggctttcccccaggtttacatgttcctggtgaaatggcaggacctgtc

SEQ ID NO: 16720 - RNA, 60 nt, synthetic construct
  source 1..60: mol_type = other RNA
tcccccgactctggctttcccccaggtgtacatgttcctggtgaaatggcaggatctgtc

SEQ ID NO: 16721 - RNA, 60 nt, synthetic construct
  source 1..60: mol_type = other RNA
tcccccgactctggctttcccccaggtttacatgttcctggtgaaatggcaggatttgtc

SEQ ID NO: 16722 - RNA, 60 nt, synthetic construct
  source 1..60: mol_type = other RNA
tcccccgactctggctttcccccaggtttacatgttcctggtgaaatggcaggatttatc

SEQ ID NO: 16723 - RNA, 60 nt, synthetic construct
  source 1..60: mol_type = other RNA
tcccccgactctggctttcccccaggtttacatgttcctggtgaaatggcaggatctgtc

SEQ ID NO: 16724 - RNA, 60 nt, synthetic construct
  source 1..60: mol_type = other RNA
tcccccgactctggctttcccccaggtttacatgttcctggtgaaatggcaggacttgtc

SEQ ID NO: 16725 - RNA, 60 nt, synthetic construct
  source 1..60: mol_type = other RNA
tcccccgactctggctttcccccaggtgtacatgttcctggtgaaatggcaggatttgtc

SEQ ID NO: 16726 - RNA, 61 nt, synthetic construct
  source 1..61: mol_type = other RNA
gtcccccgactctggctttcccccaggtatacatgttcctggtgaaatggcaggacctgtc

SEQ ID NO: 16727 - RNA, 61 nt, synthetic construct
  source 1..61: mol_type = other RNA
gtcccccgactctggctttcccccaggtctacatgttcctggtgaaatggcaggacttatc

SEQ ID NO: 16728 - RNA, 61 nt, synthetic construct
  source 1..61: mol_type = other RNA
gtcccccgactctggctttcccccaggtatacatgttcctggtgaaatggcaggacttgtc

SEQ ID NO: 16729 - RNA, 61 nt, synthetic construct
  source 1..61: mol_type = other RNA
gtcccccgactctggctttcccccaggtctacatgttcctggtgaaatggcaggacctgtc

SEQ ID NO: 16730 - RNA, 61 nt, synthetic construct
  source 1..61: mol_type = other RNA
gtcccccgactctggctttcccccaggtatacatgttcctggtgaaatggcaggatttgtc

SEQ ID NO: 16731 - RNA, 61 nt, synthetic construct
  source 1..61: mol_type = other RNA
gtcccccgactctggctttcccccaggtatacatgttcctggtgaaatggcaggacttatc

SEQ ID NO: 16732 - RNA, 61 nt, synthetic construct
  source 1..61: mol_type = other RNA
gtcccccgactctggctttcccccaggtgtacatgttcctggtgaaatggcaggatttatc

SEQ ID NO: 16733 - RNA, 61 nt, synthetic construct
  source 1..61: mol_type = other RNA
gtcccccgactctggctttcccccaggtatacatgttcctggtgaaatggcaggatctgtc

SEQ ID NO: 16734 - RNA, 61 nt, synthetic construct
  source 1..61: mol_type = other RNA
gtcccccgactctggctttcccccaggtttacatgttcctggtgaaatggcaggatttgtc

SEQ ID NO: 16735 - RNA, 61 nt, synthetic construct
  source 1..61: mol_type = other RNA
gtcccccgactctggctttcccccaggtatacatgttcctggtgaaatggcaggatttatc

SEQ ID NO: 16736 - RNA, 61 nt, synthetic construct
  source 1..61: mol_type = other RNA
gtcccccgactctggctttcccccaggtttacatgttcctggtgaaatggcaggatctgtc

SEQ ID NO: 16737 - RNA, 61 nt, synthetic construct
  source 1..61: mol_type = other RNA
gtcccccgactctggctttcccccaggtctacatgttcctggtgaaatggcaggacttgtc

SEQ ID NO: 16738 - RNA, 61 nt, synthetic construct
  source 1..61: mol_type = other RNA
gtcccccgactctggctttcccccaggtttacatgttcctggtgaaatggcaggatttatc

SEQ ID NO: 16739 - RNA, 61 nt, synthetic construct
  source 1..61: mol_type = other RNA
gtcccccgactctggctttcccccaggtgtacatgttcctggtgaaatggcaggacctgtc

SEQ ID NO: 16740 - RNA, 61 nt, synthetic construct
  source 1..61: mol_type = other RNA
gtcccccgactctggctttcccccaggtctacatgttcctggtgaaatggcaggatctgtc

SEQ ID NO: 16741 - RNA, 61 nt, synthetic construct
  source 1..61: mol_type = other RNA
gtcccccgactctggctttcccccaggtgtacatgttcctggtgaaatggcaggatctgtc

SEQ ID NO: 16742 - RNA, 61 nt, synthetic construct
  source 1..61: mol_type = other RNA
gtcccccgactctggctttcccccaggtctacatgttcctggtgaaatggcaggatttatc

SEQ ID NO: 16743 - RNA, 61 nt, synthetic construct
  source 1..61: mol_type = other RNA
gtcccccgactctggctttcccccaggtctacatgttcctggtgaaatggcaggatttgtc

SEQ ID NO: 16744 - RNA, 61 nt, synthetic construct
  source 1..61: mol_type = other RNA
gtcccccgactctggctttcccccaggtgtacatgttcctggtgaaatggcaggacttatc

SEQ ID NO: 16745 - RNA, 61 nt, synthetic construct
  source 1..61: mol_type = other RNA
gtcccccgactctggctttcccccaggtgtacatgttcctggtgaaatggcaggatttgtc

SEQ ID NO: 16746 - RNA, 61 nt, synthetic construct
  source 1..61: mol_type = other RNA
gtcccccgactctggctttcccccaggtttacatgttcctggtgaaatggcaggacctgtc

SEQ ID NO: 16747 - RNA, 61 nt, synthetic construct
  source 1..61: mol_type = other RNA
gtcccccgactctggctttcccccaggtttacatgttcctggtgaaatggcaggacttgtc

SEQ ID NO: 16748 - RNA, 61 nt, synthetic construct
  source 1..61: mol_type = other RNA
gtcccccgactctggctttcccccaggtgtacatgttcctggtgaaatggcaggacttgtc

SEQ ID NO: 16749 - RNA, 61 nt, synthetic construct
  source 1..61: mol_type = other RNA
gtcccccgactctggctttcccccaggtttacatgttcctggtgaaatggcaggacttatc

SEQ ID NO: 16750 - RNA, 62 nt, synthetic construct
  source 1..62: mol_type = other RNA
ggtcccccgactctggctttcccccaggtatacatgttcctggtgaaatggcaggatttatc

SEQ ID NO: 16751 - RNA, 62 nt, synthetic construct
  source 1..62: mol_type = other RNA
ggtcccccgactctggctttcccccaggtttacatgttcctggtgaaatggcaggacctgtc

SEQ ID NO: 16752 - RNA, 62 nt, synthetic construct
  source 1..62: mol_type = other RNA
ggtcccccgactctggctttcccccaggtttacatgttcctggtgaaatggcaggatctgtc

SEQ ID NO: 16753 - RNA, 62 nt, synthetic construct
  source 1..62: mol_type = other RNA
ggtcccccgactctggctttcccccaggtttacatgttcctggtgaaatggcaggacttatc

SEQ ID NO: 16754 - RNA, 62 nt, synthetic construct
  source 1..62: mol_type = other RNA
ggtcccccgactctggctttcccccaggtgtacatgttcctggtgaaatggcaggatttatc

SEQ ID NO: 16755 - RNA, 62 nt, synthetic construct
  source 1..62: mol_type = other RNA
ggtcccccgactctggctttcccccaggtctacatgttcctggtgaaatggcaggatttatc

SEQ ID NO: 16756 - RNA, 62 nt, synthetic construct
  source 1..62: mol_type = other RNA
ggtcccccgactctggctttcccccaggtttacatgttcctggtgaaatggcaggatttgtc

SEQ ID NO: 16757 - RNA, 62 nt, synthetic construct
  source 1..62: mol_type = other RNA
ggtcccccgactctggctttcccccaggtctacatgttcctggtgaaatggcaggatctgtc

SEQ ID NO: 16758 - RNA, 62 nt, synthetic construct
  source 1..62: mol_type = other RNA
ggtcccccgactctggctttcccccaggtgtacatgttcctggtgaaatggcaggatttgtc

SEQ ID NO: 16759 - RNA, 62 nt, synthetic construct
  source 1..62: mol_type = other RNA
ggtcccccgactctggctttcccccaggtctacatgttcctggtgaaatggcaggacctgtc

SEQ ID NO: 16760 - RNA, 62 nt, synthetic construct
  source 1..62: mol_type = other RNA
ggtcccccgactctggctttcccccaggtgtacatgttcctggtgaaatggcaggacttgtc

SEQ ID NO: 16761 - RNA, 62 nt, synthetic construct
  source 1..62: mol_type = other RNA
ggtcccccgactctggctttcccccaggtatacatgttcctggtgaaatggcaggatctgtc

SEQ ID NO: 16762 - RNA, 62 nt, synthetic construct
  source 1..62: mol_type = other RNA
ggtcccccgactctggctttcccccaggtgtacatgttcctggtgaaatggcaggacctgtc

SEQ ID NO: 16763 - RNA, 62 nt, synthetic construct
  source 1..62: mol_type = other RNA
ggtcccccgactctggctttcccccaggtctacatgttcctggtgaaatggcaggatttgtc

SEQ ID NO: 16764 - RNA, 62 nt, synthetic construct
  source 1..62: mol_type = other RNA
ggtcccccgactctggctttcccccaggtttacatgttcctggtgaaatggcaggatttatc

SEQ ID NO: 16765 - RNA, 62 nt, synthetic construct
  source 1..62: mol_type = other RNA
ggtcccccgactctggctttcccccaggtatacatgttcctggtgaaatggcaggacctgtc

SEQ ID NO: 16766 - RNA, 62 nt, synthetic construct
  source 1..62: mol_type = other RNA
ggtcccccgactctggctttcccccaggtgtacatgttcctggtgaaatggcaggatctgtc

SEQ ID NO: 16767 - RNA, 62 nt, synthetic construct
  source 1..62: mol_type = other RNA
ggtcccccgactctggctttcccccaggtctacatgttcctggtgaaatggcaggacttatc

SEQ ID NO: 16768 - RNA, 62 nt, synthetic construct
  source 1..62: mol_type = other RNA
ggtcccccgactctggctttcccccaggtgtacatgttcctggtgaaatggcaggacttatc

SEQ ID NO: 16769 - RNA, 62 nt, synthetic construct
  source 1..62: mol_type = other RNA
ggtcccccgactctggctttcccccaggtatacatgttcctggtgaaatggcaggatttgtc

SEQ ID NO: 16770 - RNA, 62 nt, synthetic construct
  source 1..62: mol_type = other RNA
ggtcccccgactctggctttcccccaggtatacatgttcctggtgaaatggcaggacttgtc

SEQ ID NO: 16771 - RNA, 62 nt, synthetic construct
  source 1..62: mol_type = other RNA
ggtcccccgactctggctttcccccaggtttacatgttcctggtgaaatggcaggacttgtc

SEQ ID NO: 16772 - RNA, 62 nt, synthetic construct
  source 1..62: mol_type = other RNA
ggtcccccgactctggctttcccccaggtatacatgttcctggtgaaatggcaggacttatc

SEQ ID NO: 16773 - RNA, 62 nt, synthetic construct
  source 1..62: mol_type = other RNA
ggtcccccgactctggctttcccccaggtctacatgttcctggtgaaatggcaggacttgtc

SEQ ID NO: 16774 - RNA, 63 nt, synthetic construct
  source 1..63: mol_type = other RNA
gggtcccccgactctggctttcccccaggtgtacatgttcctggtgaaatggcaggatctgtc

SEQ ID NO: 16775 - RNA, 63 nt, synthetic construct
  source 1..63: mol_type = other RNA
gggtcccccgactctggctttcccccaggtgtacatgttcctggtgaaatggcaggacttgtc

SEQ ID NO: 16776 - RNA, 63 nt, synthetic construct
  source 1..63: mol_type = other RNA
gggtcccccgactctggctttcccccaggtgtacatgttcctggtgaaatggcaggacttatc

SEQ ID NO: 16777 - RNA, 63 nt, synthetic construct
  source 1..63: mol_type = other RNA
gggtcccccgactctggctttcccccaggtgtacatgttcctggtgaaatggcaggacctgtc

SEQ ID NO: 16778 - RNA, 63 nt, synthetic construct
  source 1..63: mol_type = other RNA
gggtcccccgactctggctttcccccaggtatacatgttcctggtgaaatggcaggatctgtc

SEQ ID NO: 16779 - RNA, 63 nt, synthetic construct
  source 1..63: mol_type = other RNA
gggtcccccgactctggctttcccccaggtatacatgttcctggtgaaatggcaggacttatc

SEQ ID NO: 16780 - RNA, 63 nt, synthetic construct
  source 1..63: mol_type = other RNA
gggtcccccgactctggctttcccccaggtatacatgttcctggtgaaatggcaggacttgtc

SEQ ID NO: 16781 - RNA, 63 nt, synthetic construct
  source 1..63: mol_type = other RNA
gggtcccccgactctggctttcccccaggtttacatgttcctggtgaaatggcaggacttgtc

SEQ ID NO: 16782 - RNA, 63 nt, synthetic construct
  source 1..63: mol_type = other RNA
gggtcccccgactctggctttcccccaggtatacatgttcctggtgaaatggcaggatttgtc

SEQ ID NO: 16783 - RNA, 63 nt, synthetic construct
  source 1..63: mol_type = other RNA
gggtcccccgactctggctttcccccaggtctacatgttcctggtgaaatggcaggacctgtc

SEQ ID NO: 16784 - RNA, 63 nt, synthetic construct
  source 1..63: mol_type = other RNA
gggtcccccgactctggctttcccccaggtctacatgttcctggtgaaatggcaggacttatc

SEQ ID NO: 16785 - RNA, 63 nt, synthetic construct
  source 1..63: mol_type = other RNA
gggtcccccgactctggctttcccccaggtctacatgttcctggtgaaatggcaggacttgtc

SEQ ID NO: 16786 - RNA, 63 nt, synthetic construct
  source 1..63: mol_type = other RNA
gggtcccccgactctggctttcccccaggtctacatgttcctggtgaaatggcaggatctgtc

SEQ ID NO: 16787 - RNA, 63 nt, synthetic construct
  source 1..63: mol_type = other RNA
gggtcccccgactctggctttcccccaggtatacatgttcctggtgaaatggcaggatttatc

SEQ ID NO: 16788 - RNA, 63 nt, synthetic construct
  source 1..63: mol_type = other RNA
gggtcccccgactctggctttcccccaggtctacatgttcctggtgaaatggcaggatttatc

SEQ ID NO: 16789 - RNA, 63 nt, synthetic construct
  source 1..63: mol_type = other RNA
gggtcccccgactctggctttcccccaggtttacatgttcctggtgaaatggcaggatttgtc

SEQ ID NO: 16790 - RNA, 63 nt, synthetic construct
  source 1..63: mol_type = other RNA
gggtcccccgactctggctttcccccaggtctacatgttcctggtgaaatggcaggatttgtc

SEQ ID NO: 16791 - RNA, 63 nt, synthetic construct
  source 1..63: mol_type = other RNA
gggtcccccgactctggctttcccccaggtgtacatgttcctggtgaaatggcaggatttatc

SEQ ID NO: 16792 - RNA, 63 nt, synthetic construct
  source 1..63: mol_type = other RNA
gggtcccccgactctggctttcccccaggtgtacatgttcctggtgaaatggcaggatttgtc

SEQ ID NO: 16793 - RNA, 63 nt, synthetic construct
  source 1..63: mol_type = other RNA
gggtcccccgactctggctttcccccaggtttacatgttcctggtgaaatggcaggacttatc

SEQ ID NO: 16794 - RNA, 63 nt, synthetic construct
  source 1..63: mol_type = other RNA
gggtcccccgactctggctttcccccaggtttacatgttcctggtgaaatggcaggatttatc

SEQ ID NO: 16795 - RNA, 63 nt, synthetic construct
  source 1..63: mol_type = other RNA
gggtcccccgactctggctttcccccaggtatacatgttcctggtgaaatggcaggacctgtc

SEQ ID NO: 16796 - RNA, 63 nt, synthetic construct
  source 1..63: mol_type = other RNA
gggtcccccgactctggctttcccccaggtttacatgttcctggtgaaatggcaggatctgtc

SEQ ID NO: 16797 - RNA, 63 nt, synthetic construct
  source 1..63: mol_type = other RNA
gggtcccccgactctggctttcccccaggtttacatgttcctggtgaaatggcaggacctgtc

SEQ ID NO: 16798 - RNA, 64 nt, synthetic construct
  source 1..64: mol_type = other RNA
ggggtcccccgactctggctttcccccaggtttacatgttcctggtgaaatggcaggatttatc

SEQ ID NO: 16799 - RNA, 64 nt, synthetic construct
  source 1..64: mol_type = other RNA
ggggtcccccgactctggctttcccccaggtatacatgttcctggtgaaatggcaggatttgtc

SEQ ID NO: 16800 - RNA, 64 nt, synthetic construct
  source 1..64: mol_type = other RNA
ggggtcccccgactctggctttcccccaggtatacatgttcctggtgaaatggcaggatttatc

SEQ ID NO: 16801 - RNA, 64 nt, synthetic construct
  source 1..64: mol_type = other RNA
ggggtcccccgactctggctttcccccaggtatacatgttcctggtgaaatggcaggatctgtc

SEQ ID NO: 16802 - RNA, 64 nt, synthetic construct
  source 1..64: mol_type = other RNA
ggggtcccccgactctggctttcccccaggtatacatgttcctggtgaaatggcaggacttgtc

SEQ ID NO: 16803 - RNA, 64 nt, synthetic construct
  source 1..64: mol_type = other RNA
ggggtcccccgactctggctttcccccaggtatacatgttcctggtgaaatggcaggacttatc

SEQ ID NO: 16804 - RNA, 64 nt, synthetic construct
  source 1..64: mol_type = other RNA
ggggtcccccgactctggctttcccccaggtatacatgttcctggtgaaatggcaggacctgtc

SEQ ID NO: 16805 - RNA, 64 nt, synthetic construct
  source 1..64: mol_type = other RNA
ggggtcccccgactctggctttcccccaggtttacatgttcctggtgaaatggcaggacctgtc

SEQ ID NO: 16806 - RNA, 64 nt, synthetic construct
  source 1..64: mol_type = other RNA
ggggtcccccgactctggctttcccccaggtttacatgttcctggtgaaatggcaggatttgtc

SEQ ID NO: 16807 - RNA, 64 nt, synthetic construct
  source 1..64: mol_type = other RNA
ggggtcccccgactctggctttcccccaggtctacatgttcctggtgaaatggcaggacctgtc

SEQ ID NO: 16808 - RNA, 64 nt, synthetic construct
  source 1..64: mol_type = other RNA
ggggtcccccgactctggctttcccccaggtctacatgttcctggtgaaatggcaggacttatc

SEQ ID NO: 16809 - RNA, 64 nt, synthetic construct
  source 1..64: mol_type = other RNA
ggggtcccccgactctggctttcccccaggtgtacatgttcctggtgaaatggcaggatctgtc

SEQ ID NO: 16810 - RNA, 64 nt, synthetic construct
  source 1..64: mol_type = other RNA
ggggtcccccgactctggctttcccccaggtttacatgttcctggtgaaatggcaggacttgtc

SEQ ID NO: 16811 - RNA, 64 nt, synthetic construct
  source 1..64: mol_type = other RNA
ggggtcccccgactctggctttcccccaggtctacatgttcctggtgaaatggcaggatttgtc

SEQ ID NO: 16812 - RNA, 64 nt, synthetic construct
  source 1..64: mol_type = other RNA
ggggtcccccgactctggctttcccccaggtctacatgttcctggtgaaatggcaggatttatc

SEQ ID NO: 16813 - RNA, 64 nt, synthetic construct
  source 1..64: mol_type = other RNA
ggggtcccccgactctggctttcccccaggtctacatgttcctggtgaaatggcaggatctgtc

SEQ ID NO: 16814 - RNA, 64 nt, synthetic construct
  source 1..64: mol_type = other RNA
ggggtcccccgactctggctttcccccaggtctacatgttcctggtgaaatggcaggacttgtc

SEQ ID NO: 16815 - RNA, 64 nt, synthetic construct
  source 1..64: mol_type = other RNA
ggggtcccccgactctggctttcccccaggtgtacatgttcctggtgaaatggcaggacctgtc

SEQ ID NO: 16816 - RNA, 64 nt, synthetic construct
  source 1..64: mol_type = other RNA
ggggtcccccgactctggctttcccccaggtttacatgttcctggtgaaatggcaggatctgtc

SEQ ID NO: 16817 - RNA, 64 nt, synthetic construct
  source 1..64: mol_type = other RNA
ggggtcccccgactctggctttcccccaggtttacatgttcctggtgaaatggcaggacttatc

SEQ ID NO: 16818 - RNA, 64 nt, synthetic construct
  source 1..64: mol_type = other RNA
ggggtcccccgactctggctttcccccaggtgtacatgttcctggtgaaatggcaggatttatc

SEQ ID NO: 16819 - RNA, 64 nt, synthetic construct
  source 1..64: mol_type = other RNA
ggggtcccccgactctggctttcccccaggtgtacatgttcctggtgaaatggcaggacttatc

SEQ ID NO: 16820 - RNA, 64 nt, synthetic construct
  source 1..64: mol_type = other RNA
ggggtcccccgactctggctttcccccaggtgtacatgttcctggtgaaatggcaggacttgtc

SEQ ID NO: 16821 - RNA, 64 nt, synthetic construct
  source 1..64: mol_type = other RNA
ggggtcccccgactctggctttcccccaggtgtacatgttcctggtgaaatggcaggatttgtc

SEQ ID NO: 16822 - RNA, 65 nt, synthetic construct
  source 1..65: mol_type = other RNA
tggggtcccccgactctggctttcccccaggtatacatgttcctggtgaaatggcaggacttatc

SEQ ID NO: 16823 - RNA, 65 nt, synthetic construct
  source 1..65: mol_type = other RNA
tggggtcccccgactctggctttcccccaggtgtacatgttcctggtgaaatggcaggacctgtc

SEQ ID NO: 16824 - RNA, 65 nt, synthetic construct
  source 1..65: mol_type = other RNA
tggggtcccccgactctggctttcccccaggtctacatgttcctggtgaaatggcaggatttgtc

SEQ ID NO: 16825 - RNA, 65 nt, synthetic construct
  source 1..65: mol_type = other RNA
tggggtcccccgactctggctttcccccaggtctacatgttcctggtgaaatggcaggatttatc

SEQ ID NO: 16826 - RNA, 65 nt, synthetic construct
  source 1..65: mol_type = other RNA
tggggtcccccgactctggctttcccccaggtctacatgttcctggtgaaatggcaggacttgtc

SEQ ID NO: 16827 - RNA, 65 nt, synthetic construct
  source 1..65: mol_type = other RNA
tggggtcccccgactctggctttcccccaggtctacatgttcctggtgaaatggcaggacttatc

SEQ ID NO: 16828 - RNA, 65 nt, synthetic construct
  source 1..65: mol_type = other RNA
tggggtcccccgactctggctttcccccaggtctacatgttcctggtgaaatggcaggacctgtc

SEQ ID NO: 16829 - RNA, 65 nt, synthetic construct
  source 1..65: mol_type = other RNA
tggggtcccccgactctggctttcccccaggtatacatgttcctggtgaaatggcaggatttgtc

SEQ ID NO: 16830 - RNA, 65 nt, synthetic construct
  source 1..65: mol_type = other RNA
tggggtcccccgactctggctttcccccaggtatacatgttcctggtgaaatggcaggatttatc

SEQ ID NO: 16831 - RNA, 65 nt, synthetic construct
  source 1..65: mol_type = other RNA
tggggtcccccgactctggctttcccccaggtatacatgttcctggtgaaatggcaggatctgtc

SEQ ID NO: 16832 - RNA, 65 nt, synthetic construct
  source 1..65: mol_type = other RNA
tggggtcccccgactctggctttcccccaggtatacatgttcctggtgaaatggcaggacttgtc

SEQ ID NO: 16833 - RNA, 65 nt, synthetic construct
  source 1..65: mol_type = other RNA
tggggtcccccgactctggctttcccccaggtttacatgttcctggtgaaatggcaggatttatc

SEQ ID NO: 16834 - RNA, 65 nt, synthetic construct
  source 1..65: mol_type = other RNA
tggggtcccccgactctggctttcccccaggtttacatgttcctggtgaaatggcaggatttgtc

SEQ ID NO: 16835 - RNA, 65 nt, synthetic construct
  source 1..65: mol_type = other RNA
tggggtcccccgactctggctttcccccaggtttacatgttcctggtgaaatggcaggatctgtc

SEQ ID NO: 16836 - RNA, 65 nt, synthetic construct
  source 1..65: mol_type = other RNA
tggggtcccccgactctggctttcccccaggtttacatgttcctggtgaaatggcaggacttgtc

SEQ ID NO: 16837 - RNA, 65 nt, synthetic construct
  source 1..65: mol_type = other RNA
tggggtcccccgactctggctttcccccaggtttacatgttcctggtgaaatggcaggacttatc

SEQ ID NO: 16838 - RNA, 65 nt, synthetic construct
  source 1..65: mol_type = other RNA
tggggtcccccgactctggctttcccccaggtgtacatgttcctggtgaaatggcaggatttgtc

SEQ ID NO: 16839 - RNA, 65 nt, synthetic construct
  source 1..65: mol_type = other RNA
tggggtcccccgactctggctttcccccaggtgtacatgttcctggtgaaatggcaggatttatc

SEQ ID NO: 16840 - RNA, 65 nt, synthetic construct
  source 1..65: mol_type = other RNA
tggggtcccccgactctggctttcccccaggtgtacatgttcctggtgaaatggcaggatctgtc

SEQ ID NO: 16841 - RNA, 65 nt, synthetic construct
  source 1..65: mol_type = other RNA
tggggtcccccgactctggctttcccccaggtatacatgttcctggtgaaatggcaggacctgtc

SEQ ID NO: 16842 - RNA, 65 nt, synthetic construct
  source 1..65: mol_type = other RNA
tggggtcccccgactctggctttcccccaggtgtacatgttcctggtgaaatggcaggacttatc

SEQ ID NO: 16843 - RNA, 65 nt, synthetic construct
  source 1..65: mol_type = other RNA
tggggtcccccgactctggctttcccccaggtgtacatgttcctggtgaaatggcaggacttgtc

SEQ ID NO: 16844 - RNA, 65 nt, synthetic construct
  source 1..65: mol_type = other RNA
tggggtcccccgactctggctttcccccaggtttacatgttcctggtgaaatggcaggacctgtc

SEQ ID NO: 16845 - RNA, 65 nt, synthetic construct
  source 1..65: mol_type = other RNA
tggggtcccccgactctggctttcccccaggtctacatgttcctggtgaaatggcaggatctgtc

SEQ ID NO: 16846 - RNA, 66 nt, synthetic construct
  source 1..66: mol_type = other RNA
atggggtcccccgactctggctttcccccaggtttacatgttcctggtgaaatggcaggatttgtc

SEQ ID NO: 16847 - RNA, 66 nt, synthetic construct
  source 1..66: mol_type = other RNA
atggggtcccccgactctggctttcccccaggtatacatgttcctggtgaaatggcaggacttgtc

SEQ ID NO: 16848 - RNA, 66 nt, synthetic construct
  source 1..66: mol_type = other RNA
atggggtcccccgactctggctttcccccaggtatacatgttcctggtgaaatggcaggacttatc

SEQ ID NO: 16849 - RNA, 66 nt, synthetic construct
  source 1..66: mol_type = other RNA
atggggtcccccgactctggctttcccccaggtatacatgttcctggtgaaatggcaggacctgtc

SEQ ID NO: 16850 - RNA, 66 nt, synthetic construct
  source 1..66: mol_type = other RNA
atggggtcccccgactctggctttcccccaggtctacatgttcctggtgaaatggcaggatttatc

SEQ ID NO: 16851 - RNA, 66 nt, synthetic construct
  source 1..66: mol_type = other RNA
atggggtcccccgactctggctttcccccaggtctacatgttcctggtgaaatggcaggatctgtc

SEQ ID NO: 16852 - RNA, 66 nt, synthetic construct
  source 1..66: mol_type = other RNA
atggggtcccccgactctggctttcccccaggtatacatgttcctggtgaaatggcaggatctgtc

SEQ ID NO: 16853 - RNA, 66 nt, synthetic construct
  source 1..66: mol_type = other RNA
atggggtcccccgactctggctttcccccaggtctacatgttcctggtgaaatggcaggatttgtc

SEQ ID NO: 16854 - RNA, 66 nt, synthetic construct
  source 1..66: mol_type = other RNA
atggggtcccccgactctggctttcccccaggtttacatgttcctggtgaaatggcaggacttgtc

SEQ ID NO: 16855 - RNA, 66 nt, synthetic construct
  source 1..66: mol_type = other RNA
atggggtcccccgactctggctttcccccaggtatacatgttcctggtgaaatggcaggatttgtc

SEQ ID NO: 16856 - RNA, 66 nt, synthetic construct
  source 1..66: mol_type = other RNA
atggggtcccccgactctggctttcccccaggtgtacatgttcctggtgaaatggcaggacttatc

SEQ ID NO: 16857 - RNA, 66 nt, synthetic construct
  source 1..66: mol_type = other RNA
atggggtcccccgactctggctttcccccaggtgtacatgttcctggtgaaatggcaggatctgtc

SEQ ID NO: 16858 - RNA, 66 nt, synthetic construct
  source 1..66: mol_type = other RNA
atggggtcccccgactctggctttcccccaggtgtacatgttcctggtgaaatggcaggatttatc

SEQ ID NO: 16859 - RNA, 66 nt, synthetic construct
  source 1..66: mol_type = other RNA
atggggtcccccgactctggctttcccccaggtttacatgttcctggtgaaatggcaggatctgtc

SEQ ID NO: 16860 - RNA, 66 nt, synthetic construct
  source 1..66: mol_type = other RNA
atggggtcccccgactctggctttcccccaggtttacatgttcctggtgaaatggcaggacttatc

SEQ ID NO: 16861 - RNA, 66 nt, synthetic construct
  source 1..66: mol_type = other RNA
atggggtcccccgactctggctttcccccaggtgtacatgttcctggtgaaatggcaggacctgtc

SEQ ID NO: 16862 - RNA, 66 nt, synthetic construct
  source 1..66: mol_type = other RNA
atggggtcccccgactctggctttcccccaggtttacatgttcctggtgaaatggcaggacctgtc

SEQ ID NO: 16863 - RNA, 66 nt, synthetic construct
  source 1..66: mol_type = other RNA
atggggtcccccgactctggctttcccccaggtgtacatgttcctggtgaaatggcaggatttgtc

SEQ ID NO: 16864 - RNA, 66 nt, synthetic construct
  source 1..66: mol_type = other RNA
atggggtcccccgactctggctttcccccaggtttacatgttcctggtgaaatggcaggatttatc

SEQ ID NO: 16865 - RNA, 66 nt, synthetic construct
  source 1..66: mol_type = other RNA
atggggtcccccgactctggctttcccccaggtgtacatgttcctggtgaaatggcaggacttgtc

SEQ ID NO: 16866 - RNA, 66 nt, synthetic construct
  source 1..66: mol_type = other RNA
atggggtcccccgactctggctttcccccaggtctacatgttcctggtgaaatggcaggacctgtc

SEQ ID NO: 16867 - RNA, 66 nt, synthetic construct
  source 1..66: mol_type = other RNA
atggggtcccccgactctggctttcccccaggtctacatgttcctggtgaaatggcaggacttatc

SEQ ID NO: 16868 - RNA, 66 nt, synthetic construct
  source 1..66: mol_type = other RNA
atggggtcccccgactctggctttcccccaggtctacatgttcctggtgaaatggcaggacttgtc

SEQ ID NO: 16869 - RNA, 66 nt, synthetic construct
  source 1..66: mol_type = other RNA
atggggtcccccgactctggctttcccccaggtatacatgttcctggtgaaatggcaggatttatc

SEQ ID NO: 16870 - RNA, 67 nt, synthetic construct
  source 1..67: mol_type = other RNA
aatggggtcccccgactctggctttcccccaggtgtacatgttcctggtgaaatggcaggacctgtc

SEQ ID NO: 16871 - RNA, 67 nt, synthetic construct
  source 1..67: mol_type = other RNA
aatggggtcccccgactctggctttcccccaggtctacatgttcctggtgaaatggcaggacttgtc

SEQ ID NO: 16872 - RNA, 67 nt, synthetic construct
  source 1..67: mol_type = other RNA
aatggggtcccccgactctggctttcccccaggtatacatgttcctggtgaaatggcaggacttgtc

SEQ ID NO: 16873 - RNA, 67 nt, synthetic construct
  source 1..67: mol_type = other RNA
aatggggtcccccgactctggctttcccccaggtatacatgttcctggtgaaatggcaggatttatc

SEQ ID NO: 16874 - RNA, 67 nt, synthetic construct
  source 1..67: mol_type = other RNA
aatggggtcccccgactctggctttcccccaggtatacatgttcctggtgaaatggcaggatctgtc

SEQ ID NO: 16875 - RNA, 67 nt, synthetic construct
  source 1..67: mol_type = other RNA
aatggggtcccccgactctggctttcccccaggtatacatgttcctggtgaaatggcaggatttgtc

SEQ ID NO: 16876 - RNA, 67 nt, synthetic construct
  source 1..67: mol_type = other RNA
aatggggtcccccgactctggctttcccccaggtctacatgttcctggtgaaatggcaggacctgtc

SEQ ID NO: 16877 - RNA, 67 nt, synthetic construct
  source 1..67: mol_type = other RNA
aatggggtcccccgactctggctttcccccaggtctacatgttcctggtgaaatggcaggacttatc

SEQ ID NO: 16878 - RNA, 67 nt, synthetic construct
  source 1..67: mol_type = other RNA
aatggggtcccccgactctggctttcccccaggtatacatgttcctggtgaaatggcaggacctgtc

SEQ ID NO: 16879 - RNA, 67 nt, synthetic construct
  source 1..67: mol_type = other RNA
aatggggtcccccgactctggctttcccccaggtctacatgttcctggtgaaatggcaggatctgtc

SEQ ID NO: 16880 - RNA, 67 nt, synthetic construct
  source 1..67: mol_type = other RNA
aatggggtcccccgactctggctttcccccaggtctacatgttcctggtgaaatggcaggatttatc

SEQ ID NO: 16881 - RNA, 67 nt, synthetic construct
  source 1..67: mol_type = other RNA
aatggggtcccccgactctggctttcccccaggtctacatgttcctggtgaaatggcaggatttgtc

SEQ ID NO: 16882 - RNA, 67 nt, synthetic construct
  source 1..67: mol_type = other RNA
aatggggtcccccgactctggctttcccccaggtgtacatgttcctggtgaaatggcaggacttgtc

SEQ ID NO: 16883 - RNA, 67 nt, synthetic construct
  source 1..67: mol_type = other RNA
aatggggtcccccgactctggctttcccccaggtgtacatgttcctggtgaaatggcaggacttatc

SEQ ID NO: 16884 - RNA, 67 nt, synthetic construct
  source 1..67: mol_type = other RNA
aatggggtcccccgactctggctttcccccaggtttacatgttcctggtgaaatggcaggatctgtc

SEQ ID NO: 16885 - RNA, 67 nt, synthetic construct
  source 1..67: mol_type = other RNA
aatggggtcccccgactctggctttcccccaggtatacatgttcctggtgaaatggcaggacttatc

SEQ ID NO: 16886 - RNA, 67 nt, synthetic construct
  source 1..67: mol_type = other RNA
aatggggtcccccgactctggctttcccccaggtttacatgttcctggtgaaatggcaggatttgtc

SEQ ID NO: 16887 - RNA, 67 nt, synthetic construct
  source 1..67: mol_type = other RNA
aatggggtcccccgactctggctttcccccaggtgtacatgttcctggtgaaatggcaggatctgtc

SEQ ID NO: 16888 - RNA, 67 nt, synthetic construct
  source 1..67: mol_type = other RNA
aatggggtcccccgactctggctttcccccaggtgtacatgttcctggtgaaatggcaggatttatc

SEQ ID NO: 16889 - RNA, 67 nt, synthetic construct
  source 1..67: mol_type = other RNA
aatggggtcccccgactctggctttcccccaggtgtacatgttcctggtgaaatggcaggatttgtc

SEQ ID NO: 16890 - RNA, 67 nt, synthetic construct
  source 1..67: mol_type = other RNA
aatggggtcccccgactctggctttcccccaggtttacatgttcctggtgaaatggcaggatttatc

SEQ ID NO: 16891 - RNA, 67 nt, synthetic construct
  source 1..67: mol_type = other RNA
aatggggtcccccgactctggctttcccccaggtttacatgttcctggtgaaatggcaggacttatc

SEQ ID NO: 16892 - RNA, 67 nt, synthetic construct
  source 1..67: mol_type = other RNA
aatggggtcccccgactctggctttcccccaggtttacatgttcctggtgaaatggcaggacttgtc

SEQ ID NO: 16893 - RNA, 67 nt, synthetic construct
  source 1..67: mol_type = other RNA
aatggggtcccccgactctggctttcccccaggtttacatgttcctggtgaaatggcaggacctgtc

SEQ ID NO: 16894 - RNA, 68 nt, synthetic construct
  source 1..68: mol_type = other RNA
gaatggggtcccccgactctggctttcccccaggtttacatgttcctggtgaaatggcaggatttgtc

SEQ ID NO: 16895 - RNA, 68 nt, synthetic construct
  source 1..68: mol_type = other RNA
gaatggggtcccccgactctggctttcccccaggtttacatgttcctggtgaaatggcaggacctgtc

SEQ ID NO: 16896 - RNA, 68 nt, synthetic construct
  source 1..68: mol_type = other RNA
gaatggggtcccccgactctggctttcccccaggtttacatgttcctggtgaaatggcaggacttgtc

SEQ ID NO: 16897 - RNA, 68 nt, synthetic construct
  source 1..68: mol_type = other RNA
gaatggggtcccccgactctggctttcccccaggtatacatgttcctggtgaaatggcaggatttgtc

SEQ ID NO: 16898 - RNA, 68 nt, synthetic construct
  source 1..68: mol_type = other RNA
gaatggggtcccccgactctggctttcccccaggtctacatgttcctggtgaaatggcaggatctgtc

SEQ ID NO: 16899 - RNA, 68 nt, synthetic construct
  source 1..68: mol_type = other RNA
gaatggggtcccccgactctggctttcccccaggtttacatgttcctggtgaaatggcaggacttatc

SEQ ID NO: 16900 - RNA, 68 nt, synthetic construct
  source 1..68: mol_type = other RNA
gaatggggtcccccgactctggctttcccccaggtgtacatgttcctggtgaaatggcaggatttgtc

SEQ ID NO: 16901 - RNA, 68 nt, synthetic construct
  source 1..68: mol_type = other RNA
gaatggggtcccccgactctggctttcccccaggtgtacatgttcctggtgaaatggcaggatttatc

SEQ ID NO: 16902 - RNA, 68 nt, synthetic construct
  source 1..68: mol_type = other RNA
gaatggggtcccccgactctggctttcccccaggtctacatgttcctggtgaaatggcaggacttgtc

SEQ ID NO: 16903 - RNA, 68 nt, synthetic construct
  source 1..68: mol_type = other RNA
gaatggggtcccccgactctggctttcccccaggtgtacatgttcctggtgaaatggcaggacttatc

SEQ ID NO: 16904 - RNA, 68 nt, synthetic construct
  source 1..68: mol_type = other RNA
gaatggggtcccccgactctggctttcccccaggtgtacatgttcctggtgaaatggcaggacctgtc

SEQ ID NO: 16905 - RNA, 68 nt, synthetic construct
  source 1..68: mol_type = other RNA
gaatggggtcccccgactctggctttcccccaggtctacatgttcctggtgaaatggcaggatttgtc

SEQ ID NO: 16906 - RNA, 68 nt, synthetic construct
  source 1..68: mol_type = other RNA
gaatggggtcccccgactctggctttcccccaggtgtacatgttcctggtgaaatggcaggatctgtc

SEQ ID NO: 16907 - RNA, 68 nt, synthetic construct
  source 1..68: mol_type = other RNA
gaatggggtcccccgactctggctttcccccaggtgtacatgttcctggtgaaatggcaggacttgtc

SEQ ID NO: 16908 - RNA, 68 nt, synthetic construct
  source 1..68: mol_type = other RNA
gaatggggtcccccgactctggctttcccccaggtctacatgttcctggtgaaatggcaggatttatc

SEQ ID NO: 16909 - RNA, 68 nt, synthetic construct
  source 1..68: mol_type = other RNA
gaatggggtcccccgactctggctttcccccaggtatacatgttcctggtgaaatggcaggacctgtc

SEQ ID NO: 16910 - RNA, 68 nt, synthetic construct
  source 1..68: mol_type = other RNA
gaatggggtcccccgactctggctttcccccaggtatacatgttcctggtgaaatggcaggacttatc

SEQ ID NO: 16911 - RNA, 68 nt, synthetic construct
  source 1..68: mol_type = other RNA
gaatggggtcccccgactctggctttcccccaggtctacatgttcctggtgaaatggcaggacttatc

SEQ ID NO: 16912 - RNA, 68 nt, synthetic construct
  source 1..68: mol_type = other RNA
gaatggggtcccccgactctggctttcccccaggtctacatgttcctggtgaaatggcaggacctgtc

SEQ ID NO: 16913 - RNA, 68 nt, synthetic construct
  source 1..68: mol_type = other RNA
gaatggggtcccccgactctggctttcccccaggtttacatgttcctggtgaaatggcaggatctgtc

SEQ ID NO: 16914 - RNA, 68 nt, synthetic construct
  source 1..68: mol_type = other RNA
gaatggggtcccccgactctggctttcccccaggtatacatgttcctggtgaaatggcaggatttatc

SEQ ID NO: 16915 - RNA, 68 nt, synthetic construct
  source 1..68: mol_type = other RNA
gaatggggtcccccgactctggctttcccccaggtatacatgttcctggtgaaatggcaggatctgtc

SEQ ID NO: 16916 - RNA, 68 nt, synthetic construct
  source 1..68: mol_type = other RNA
gaatggggtcccccgactctggctttcccccaggtatacatgttcctggtgaaatggcaggacttgtc

SEQ ID NO: 16917 - RNA, 68 nt, synthetic construct
  source 1..68: mol_type = other RNA
gaatggggtcccccgactctggctttcccccaggtttacatgttcctggtgaaatggcaggatttatc

SEQ ID NO: 16918 - RNA, 69 nt, synthetic construct
  source 1..69: mol_type = other RNA
tgaatggggtcccccgactctggctttcccccaggtgtacatgttcctggtgaaatggcaggatttgtc

SEQ ID NO: 16919 - RNA, 69 nt, synthetic construct
  source 1..69: mol_type = other RNA
tgaatggggtcccccgactctggctttcccccaggtttacatgttcctggtgaaatggcaggatttatc

SEQ ID NO: 16920 - RNA, 69 nt, synthetic construct
  source 1..69: mol_type = other RNA
tgaatggggtcccccgactctggctttcccccaggtgtacatgttcctggtgaaatggcaggacctgtc

SEQ ID NO: 16921 - RNA, 69 nt, synthetic construct
  source 1..69: mol_type = other RNA
tgaatggggtcccccgactctggctttcccccaggtctacatgttcctggtgaaatggcaggacttatc

SEQ ID NO: 16922 - RNA, 69 nt, synthetic construct
  source 1..69: mol_type = other RNA
tgaatggggtcccccgactctggctttcccccaggtttacatgttcctggtgaaatggcaggacctgtc

SEQ ID NO: 16923 - RNA, 69 nt, synthetic construct
  source 1..69: mol_type = other RNA
tgaatggggtcccccgactctggctttcccccaggtttacatgttcctggtgaaatggcaggacttatc

SEQ ID NO: 16924 - RNA, 69 nt, synthetic construct
  source 1..69: mol_type = other RNA
tgaatggggtcccccgactctggctttcccccaggtttacatgttcctggtgaaatggcaggacttgtc

SEQ ID NO: 16925 - RNA, 69 nt, synthetic construct
  source 1..69: mol_type = other RNA
tgaatggggtcccccgactctggctttcccccaggtttacatgttcctggtgaaatggcaggatctgtc

SEQ ID NO: 16926 - RNA, 69 nt, synthetic construct
  source 1..69: mol_type = other RNA
tgaatggggtcccccgactctggctttcccccaggtgtacatgttcctggtgaaatggcaggacttatc

SEQ ID NO: 16927 - RNA, 69 nt, synthetic construct
  source 1..69: mol_type = other RNA
tgaatggggtcccccgactctggctttcccccaggtgtacatgttcctggtgaaatggcaggatctgtc

SEQ ID NO: 16928 - RNA, 69 nt, synthetic construct
  source 1..69: mol_type = other RNA
tgaatggggtcccccgactctggctttcccccaggtgtacatgttcctggtgaaatggcaggacttgtc

SEQ ID NO: 16929 - RNA, 69 nt, synthetic construct
  source 1..69: mol_type = other RNA
tgaatggggtcccccgactctggctttcccccaggtatacatgttcctggtgaaatggcaggacttatc

SEQ ID NO: 16930 - RNA, 69 nt, synthetic construct
  source 1..69: mol_type = other RNA
tgaatggggtcccccgactctggctttcccccaggtctacatgttcctggtgaaatggcaggatttatc

SEQ ID NO: 16931 - RNA, 69 nt, synthetic construct
  source 1..69: mol_type = other RNA
tgaatggggtcccccgactctggctttcccccaggtctacatgttcctggtgaaatggcaggatctgtc

SEQ ID NO: 16932 - RNA, 69 nt, synthetic construct
  source 1..69: mol_type = other RNA
tgaatggggtcccccgactctggctttcccccaggtctacatgttcctggtgaaatggcaggacttgtc

SEQ ID NO: 16933 - RNA, 69 nt, synthetic construct
  source 1..69: mol_type = other RNA
tgaatggggtcccccgactctggctttcccccaggtctacatgttcctggtgaaatggcaggacctgtc

SEQ ID NO: 16934 - RNA, 69 nt, synthetic construct
  source 1..69: mol_type = other RNA
tgaatggggtcccccgactctggctttcccccaggtgtacatgttcctggtgaaatggcaggatttatc

SEQ ID NO: 16935 - RNA, 69 nt, synthetic construct
  source 1..69: mol_type = other RNA
tgaatggggtcccccgactctggctttcccccaggtatacatgttcctggtgaaatggcaggatttgtc

SEQ ID NO: 16936 - RNA, 69 nt, synthetic construct
  source 1..69: mol_type = other RNA
tgaatggggtcccccgactctggctttcccccaggtatacatgttcctggtgaaatggcaggatttatc

SEQ ID NO: 16937 - RNA, 69 nt, synthetic construct
  source 1..69: mol_type = other RNA
tgaatggggtcccccgactctggctttcccccaggtatacatgttcctggtgaaatggcaggatctgtc

SEQ ID NO: 16938 - RNA, 69 nt, synthetic construct
  source 1..69: mol_type = other RNA
tgaatggggtcccccgactctggctttcccccaggtatacatgttcctggtgaaatggcaggacttgtc

SEQ ID NO: 16939 - RNA, 69 nt, synthetic construct
  source 1..69: mol_type = other RNA
tgaatggggtcccccgactctggctttcccccaggtctacatgttcctggtgaaatggcaggatttgtc

SEQ ID NO: 16940 - RNA, 69 nt, synthetic construct
  source 1..69: mol_type = other RNA
tgaatggggtcccccgactctggctttcccccaggtttacatgttcctggtgaaatggcaggatttgtc

SEQ ID NO: 16941 - RNA, 69 nt, synthetic construct
  source 1..69: mol_type = other RNA
tgaatggggtcccccgactctggctttcccccaggtatacatgttcctggtgaaatggcaggacctgtc

SEQ ID NO: 16942 - RNA, 70 nt, synthetic construct
  source 1..70: mol_type = other RNA
ctgaatggggtcccccgactctggctttcccccaggtgtacatgttcctggtgaaatggcaggacttgtc

SEQ ID NO: 16943 - RNA, 70 nt, synthetic construct
  source 1..70: mol_type = other RNA
ctgaatggggtcccccgactctggctttcccccaggtatacatgttcctggtgaaatggcaggacttatc

SEQ ID NO: 16944 - RNA, 70 nt, synthetic construct
  source 1..70: mol_type = other RNA
ctgaatggggtcccccgactctggctttcccccaggtttacatgttcctggtgaaatggcaggatttgtc

SEQ ID NO: 16945 - RNA, 70 nt, synthetic construct
  source 1..70: mol_type = other RNA
ctgaatggggtcccccgactctggctttcccccaggtttacatgttcctggtgaaatggcaggatttatc

SEQ ID NO: 16946 - RNA, 70 nt, synthetic construct
  source 1..70: mol_type = other RNA
ctgaatggggtcccccgactctggctttcccccaggtttacatgttcctggtgaaatggcaggatctgtc

SEQ ID NO: 16947 - RNA, 70 nt, synthetic construct
  source 1..70: mol_type = other RNA
ctgaatggggtcccccgactctggctttcccccaggtttacatgttcctggtgaaatggcaggacttgtc

SEQ ID NO: 16948 - RNA, 70 nt, synthetic construct
  source 1..70: mol_type = other RNA
ctgaatggggtcccccgactctggctttcccccaggtttacatgttcctggtgaaatggcaggacttatc

SEQ ID NO: 16949 - RNA, 70 nt, synthetic construct
  source 1..70: mol_type = other RNA
ctgaatggggtcccccgactctggctttcccccaggtttacatgttcctggtgaaatggcaggacctgtc

SEQ ID NO: 16950 - RNA, 70 nt, synthetic construct
  source 1..70: mol_type = other RNA
ctgaatggggtcccccgactctggctttcccccaggtgtacatgttcctggtgaaatggcaggatttgtc

SEQ ID NO: 16951 - RNA, 70 nt, synthetic construct
  source 1..70: mol_type = other RNA
ctgaatggggtcccccgactctggctttcccccaggtgtacatgttcctggtgaaatggcaggatttatc

SEQ ID NO: 16952 - RNA, 70 nt, synthetic construct
  source 1..70: mol_type = other RNA
ctgaatggggtcccccgactctggctttcccccaggtgtacatgttcctggtgaaatggcaggatctgtc

SEQ ID NO: 16953 - RNA, 70 nt, synthetic construct
  source 1..70: mol_type = other RNA
ctgaatggggtcccccgactctggctttcccccaggtgtacatgttcctggtgaaatggcaggacctgtc

SEQ ID NO: 16954 - RNA, 70 nt, synthetic construct
  source 1..70: mol_type = other RNA
ctgaatggggtcccccgactctggctttcccccaggtgtacatgttcctggtgaaatggcaggacttatc

SEQ ID NO: 16955 - RNA, 70 nt, synthetic construct
  source 1..70: mol_type = other RNA
ctgaatggggtcccccgactctggctttcccccaggtctacatgttcctggtgaaatggcaggatctgtc

SEQ ID NO: 16956 - RNA, 70 nt, synthetic construct
  source 1..70: mol_type = other RNA
ctgaatggggtcccccgactctggctttcccccaggtctacatgttcctggtgaaatggcaggacttgtc

SEQ ID NO: 16957 - RNA, 70 nt, synthetic construct
  source 1..70: mol_type = other RNA
ctgaatggggtcccccgactctggctttcccccaggtctacatgttcctggtgaaatggcaggacttatc

SEQ ID NO: 16958 - RNA, 70 nt, synthetic construct
  source 1..70: mol_type = other RNA
ctgaatggggtcccccgactctggctttcccccaggtatacatgttcctggtgaaatggcaggatttgtc

SEQ ID NO: 16959 - RNA, 70 nt, synthetic construct
  source 1..70: mol_type = other RNA
ctgaatggggtcccccgactctggctttcccccaggtatacatgttcctggtgaaatggcaggatttatc

SEQ ID NO: 16960 - RNA, 70 nt, synthetic construct
  source 1..70: mol_type = other RNA
ctgaatggggtcccccgactctggctttcccccaggtatacatgttcctggtgaaatggcaggatctgtc

SEQ ID NO: 16961 - RNA, 70 nt, synthetic construct
  source 1..70: mol_type = other RNA
ctgaatggggtcccccgactctggctttcccccaggtatacatgttcctggtgaaatggcaggacttgtc

SEQ ID NO: 16962 - RNA, 70 nt, synthetic construct
  source 1..70: mol_type = other RNA
ctgaatggggtcccccgactctggctttcccccaggtctacatgttcctggtgaaatggcaggatttatc

SEQ ID NO: 16963 - RNA, 70 nt, synthetic construct
  source 1..70: mol_type = other RNA
ctgaatggggtcccccgactctggctttcccccaggtatacatgttcctggtgaaatggcaggacctgtc

SEQ ID NO: 16964 - RNA, 70 nt, synthetic construct
  source 1..70: mol_type = other RNA
ctgaatggggtcccccgactctggctttcccccaggtctacatgttcctggtgaaatggcaggacctgtc

SEQ ID NO: 16965 - RNA, 70 nt, synthetic construct
  source 1..70: mol_type = other RNA
ctgaatggggtcccccgactctggctttcccccaggtctacatgttcctggtgaaatggcaggatttgtc

SEQ ID NO: 16966 - RNA, 71 nt, synthetic construct
  source 1..71: mol_type = other RNA
gctgaatggggtcccccgactctggctttcccccaggtatacatgttcctggtgaaatggcaggatctgtc

SEQ ID NO: 16967 - RNA, 71 nt, synthetic construct
  source 1..71: mol_type = other RNA
gctgaatggggtcccccgactctggctttcccccaggtatacatgttcctggtgaaatggcaggatttgtc

SEQ ID NO: 16968 - RNA, 71 nt, synthetic construct
  source 1..71: mol_type = other RNA
gctgaatggggtcccccgactctggctttcccccaggtctacatgttcctggtgaaatggcaggacctgtc

SEQ ID NO: 16969 - RNA, 71 nt, synthetic construct
  source 1..71: mol_type = other RNA
gctgaatggggtcccccgactctggctttcccccaggtctacatgttcctggtgaaatggcaggacttatc

SEQ ID NO: 16970 - RNA, 71 nt, synthetic construct
  source 1..71: mol_type = other RNA
gctgaatggggtcccccgactctggctttcccccaggtatacatgttcctggtgaaatggcaggatttatc

SEQ ID NO: 16971 - RNA, 71 nt, synthetic construct
  source 1..71: mol_type = other RNA
gctgaatggggtcccccgactctggctttcccccaggtatacatgttcctggtgaaatggcaggacctgtc

SEQ ID NO: 16972 - RNA, 71 nt, synthetic construct
  source 1..71: mol_type = other RNA
gctgaatggggtcccccgactctggctttcccccaggtatacatgttcctggtgaaatggcaggacttatc

SEQ ID NO: 16973 - RNA, 71 nt, synthetic construct
  source 1..71: mol_type = other RNA
gctgaatggggtcccccgactctggctttcccccaggtctacatgttcctggtgaaatggcaggatctgtc

SEQ ID NO: 16974 - RNA, 71 nt, synthetic construct
  source 1..71: mol_type = other RNA
gctgaatggggtcccccgactctggctttcccccaggtttacatgttcctggtgaaatggcaggatttgtc

SEQ ID NO: 16975 - RNA, 71 nt, synthetic construct
  source 1..71: mol_type = other RNA
gctgaatggggtcccccgactctggctttcccccaggtttacatgttcctggtgaaatggcaggatttatc

SEQ ID NO: 16976 - RNA, 71 nt, synthetic construct
  source 1..71: mol_type = other RNA
gctgaatggggtcccccgactctggctttcccccaggtttacatgttcctggtgaaatggcaggatctgtc

SEQ ID NO: 16977 - RNA, 71 nt, synthetic construct
  source 1..71: mol_type = other RNA
gctgaatggggtcccccgactctggctttcccccaggtttacatgttcctggtgaaatggcaggacttgtc

SEQ ID NO: 16978 - RNA, 71 nt, synthetic construct
  source 1..71: mol_type = other RNA
gctgaatggggtcccccgactctggctttcccccaggtttacatgttcctggtgaaatggcaggacttatc

SEQ ID NO: 16979 - RNA, 71 nt, synthetic construct
  source 1..71: mol_type = other RNA
gctgaatggggtcccccgactctggctttcccccaggtttacatgttcctggtgaaatggcaggacctgtc

SEQ ID NO: 16980 - RNA, 71 nt, synthetic construct
  source 1..71: mol_type = other RNA
gctgaatggggtcccccgactctggctttcccccaggtgtacatgttcctggtgaaatggcaggatttgtc

SEQ ID NO: 16981 - RNA, 71 nt, synthetic construct
  source 1..71: mol_type = other RNA
gctgaatggggtcccccgactctggctttcccccaggtgtacatgttcctggtgaaatggcaggatttatc

SEQ ID NO: 16982 - RNA, 71 nt, synthetic construct
  source 1..71: mol_type = other RNA
gctgaatggggtcccccgactctggctttcccccaggtgtacatgttcctggtgaaatggcaggatctgtc

SEQ ID NO: 16983 - RNA, 71 nt, synthetic construct
  source 1..71: mol_type = other RNA
gctgaatggggtcccccgactctggctttcccccaggtgtacatgttcctggtgaaatggcaggacttgtc

SEQ ID NO: 16984 - RNA, 71 nt, synthetic construct
  source 1..71: mol_type = other RNA
gctgaatggggtcccccgactctggctttcccccaggtgtacatgttcctggtgaaatggcaggacttatc

SEQ ID NO: 16985 - RNA, 71 nt, synthetic construct
  source 1..71: mol_type = other RNA
gctgaatggggtcccccgactctggctttcccccaggtctacatgttcctggtgaaatggcaggacttgtc

SEQ ID NO: 16986 - RNA, 71 nt, synthetic construct
  source 1..71: mol_type = other RNA
gctgaatggggtcccccgactctggctttcccccaggtgtacatgttcctggtgaaatggcaggacctgtc

SEQ ID NO: 16987 - RNA, 71 nt, synthetic construct
  source 1..71: mol_type = other RNA
gctgaatggggtcccccgactctggctttcccccaggtatacatgttcctggtgaaatggcaggacttgtc

SEQ ID NO: 16988 - RNA, 71 nt, synthetic construct
  source 1..71: mol_type = other RNA
gctgaatggggtcccccgactctggctttcccccaggtctacatgttcctggtgaaatggcaggatttatc

SEQ ID NO: 16989 - RNA, 71 nt, synthetic construct
  source 1..71: mol_type = other RNA
gctgaatggggtcccccgactctggctttcccccaggtctacatgttcctggtgaaatggcaggatttgtc

SEQ ID NO: 16990 - RNA, 72 nt, synthetic construct
  source 1..72: mol_type = other RNA
ggctgaatggggtcccccgactctggctttcccccaggtatacatgttcctggtgaaatggcaggatctgtc

SEQ ID NO: 16991 - RNA, 72 nt, synthetic construct
  source 1..72: mol_type = other RNA
ggctgaatggggtcccccgactctggctttcccccaggtatacatgttcctggtgaaatggcaggatttatc

SEQ ID NO: 16992 - RNA, 72 nt, synthetic construct
  source 1..72: mol_type = other RNA
ggctgaatggggtcccccgactctggctttcccccaggtatacatgttcctggtgaaatggcaggatttgtc

SEQ ID NO: 16993 - RNA, 72 nt, synthetic construct
  source 1..72: mol_type = other RNA
ggctgaatggggtcccccgactctggctttcccccaggtatacatgttcctggtgaaatggcaggacttatc

SEQ ID NO: 16994 - RNA, 72 nt, synthetic construct
  source 1..72: mol_type = other RNA
ggctgaatggggtcccccgactctggctttcccccaggtctacatgttcctggtgaaatggcaggatttatc

SEQ ID NO: 16995 - RNA, 72 nt, synthetic construct
  source 1..72: mol_type = other RNA
ggctgaatggggtcccccgactctggctttcccccaggtctacatgttcctggtgaaatggcaggatttgtc

SEQ ID NO: 16996 - RNA, 72 nt, synthetic construct
  source 1..72: mol_type = other RNA
ggctgaatggggtcccccgactctggctttcccccaggtgtacatgttcctggtgaaatggcaggacctgtc

SEQ ID NO: 16997 - RNA, 72 nt, synthetic construct
  source 1..72: mol_type = other RNA
ggctgaatggggtcccccgactctggctttcccccaggtgtacatgttcctggtgaaatggcaggacttatc

SEQ ID NO: 16998 - RNA, 72 nt, synthetic construct
  source 1..72: mol_type = other RNA
ggctgaatggggtcccccgactctggctttcccccaggtgtacatgttcctggtgaaatggcaggacttgtc

SEQ ID NO: 16999 - RNA, 72 nt, synthetic construct
  source 1..72: mol_type = other RNA
ggctgaatggggtcccccgactctggctttcccccaggtctacatgttcctggtgaaatggcaggacctgtc

SEQ ID NO: 17000 - RNA, 72 nt, synthetic construct
  source 1..72: mol_type = other RNA
ggctgaatggggtcccccgactctggctttcccccaggtctacatgttcctggtgaaatggcaggatctgtc

SEQ ID NO: 17001 - RNA, 72 nt, synthetic construct
  source 1..72: mol_type = other RNA
ggctgaatggggtcccccgactctggctttcccccaggtatacatgttcctggtgaaatggcaggacctgtc

SEQ ID NO: 17002 - RNA, 72 nt, synthetic construct
  source 1..72: mol_type = other RNA
ggctgaatggggtcccccgactctggctttcccccaggtgtacatgttcctggtgaaatggcaggatctgtc

SEQ ID NO: 17003 - RNA, 72 nt, synthetic construct
  source 1..72: mol_type = other RNA
ggctgaatggggtcccccgactctggctttcccccaggtatacatgttcctggtgaaatggcaggacttgtc

SEQ ID NO: 17004 - RNA, 72 nt, synthetic construct
  source 1..72: mol_type = other RNA
ggctgaatggggtcccccgactctggctttcccccaggtctacatgttcctggtgaaatggcaggacttatc

SEQ ID NO: 17005 - RNA, 72 nt, synthetic construct
  source 1..72: mol_type = other RNA
ggctgaatggggtcccccgactctggctttcccccaggtctacatgttcctggtgaaatggcaggacttgtc

SEQ ID NO: 17006 - RNA, 72 nt, synthetic construct
  source 1..72: mol_type = other RNA
ggctgaatggggtcccccgactctggctttcccccaggtttacatgttcctggtgaaatggcaggatttgtc

SEQ ID NO: 17007 - RNA, 72 nt, synthetic construct
  source 1..72: mol_type = other RNA
ggctgaatggggtcccccgactctggctttcccccaggtttacatgttcctggtgaaatggcaggatttatc

SEQ ID NO: 17008 - RNA, 72 nt, synthetic construct
  source 1..72: mol_type = other RNA
ggctgaatggggtcccccgactctggctttcccccaggtttacatgttcctggtgaaatggcaggatctgtc

SEQ ID NO: 17009 - RNA, 72 nt, synthetic construct
  source 1..72: mol_type = other RNA
ggctgaatggggtcccccgactctggctttcccccaggtttacatgttcctggtgaaatggcaggacttgtc

SEQ ID NO: 17010 - RNA, 72 nt, synthetic construct
  source 1..72: mol_type = other RNA
ggctgaatggggtcccccgactctggctttcccccaggtttacatgttcctggtgaaatggcaggacttatc

SEQ ID NO: 17011 - RNA, 72 nt, synthetic construct
  source 1..72: mol_type = other RNA
ggctgaatggggtcccccgactctggctttcccccaggtgtacatgttcctggtgaaatggcaggatttgtc

SEQ ID NO: 17012 - RNA, 72 nt, synthetic construct
  source 1..72: mol_type = other RNA
ggctgaatggggtcccccgactctggctttcccccaggtgtacatgttcctggtgaaatggcaggatttatc

SEQ ID NO: 17013 - RNA, 72 nt, synthetic construct
  source 1..72: mol_type = other RNA
ggctgaatggggtcccccgactctggctttcccccaggtttacatgttcctggtgaaatggcaggacctgtc

SEQ ID NO: 17014 - RNA, 73 nt, synthetic construct
  source 1..73: mol_type = other RNA
aggctgaatggggtcccccgactctggctttcccccaggtctacatgttcctggtgaaatggcaggatttatc

SEQ ID NO: 17015 - RNA, 73 nt, synthetic construct
  source 1..73: mol_type = other RNA
aggctgaatggggtcccccgactctggctttcccccaggtatacatgttcctggtgaaatggcaggatttatc

SEQ ID NO: 17016 - RNA, 73 nt, synthetic construct
  source 1..73: mol_type = other RNA
aggctgaatggggtcccccgactctggctttcccccaggtctacatgttcctggtgaaatggcaggatttgtc

SEQ ID NO: 17017 - RNA, 73 nt, synthetic construct
  source 1..73: mol_type = other RNA
aggctgaatggggtcccccgactctggctttcccccaggtttacatgttcctggtgaaatggcaggatctgtc

SEQ ID NO: 17018 - RNA, 73 nt, synthetic construct
  source 1..73: mol_type = other RNA
aggctgaatggggtcccccgactctggctttcccccaggtgtacatgttcctggtgaaatggcaggacttatc

SEQ ID NO: 17019 - RNA, 73 nt, synthetic construct
  source 1..73: mol_type = other RNA
aggctgaatggggtcccccgactctggctttcccccaggtgtacatgttcctggtgaaatggcaggatctgtc

SEQ ID NO: 17020 - RNA, 73 nt, synthetic construct
  source 1..73: mol_type = other RNA
aggctgaatggggtcccccgactctggctttcccccaggtttacatgttcctggtgaaatggcaggacttgtc

SEQ ID NO: 17021 - RNA, 73 nt, synthetic construct
  source 1..73: mol_type = other RNA
aggctgaatggggtcccccgactctggctttcccccaggtttacatgttcctggtgaaatggcaggatttatc

SEQ ID NO: 17022 - RNA, 73 nt, synthetic construct
  source 1..73: mol_type = other RNA
aggctgaatggggtcccccgactctggctttcccccaggtgtacatgttcctggtgaaatggcaggatttgtc

SEQ ID NO: 17023 - RNA, 73 nt, synthetic construct
  source 1..73: mol_type = other RNA
aggctgaatggggtcccccgactctggctttcccccaggtgtacatgttcctggtgaaatggcaggatttatc

SEQ ID NO: 17024 - RNA, 73 nt, synthetic construct
  source 1..73: mol_type = other RNA
aggctgaatggggtcccccgactctggctttcccccaggtttacatgttcctggtgaaatggcaggacctgtc

SEQ ID NO: 17025 - RNA, 73 nt, synthetic construct
  source 1..73: mol_type = other RNA
aggctgaatggggtcccccgactctggctttcccccaggtctacatgttcctggtgaaatggcaggacttgtc

SEQ ID NO: 17026 - RNA, 73 nt, synthetic construct
  source 1..73: mol_type = other RNA
aggctgaatggggtcccccgactctggctttcccccaggtctacatgttcctggtgaaatggcaggacctgtc

SEQ ID NO: 17027 - RNA, 73 nt, synthetic construct
  source 1..73: mol_type = other RNA
aggctgaatggggtcccccgactctggctttcccccaggtatacatgttcctggtgaaatggcaggatttgtc

SEQ ID NO: 17028 - RNA, 73 nt, synthetic construct
  source 1..73: mol_type = other RNA
aggctgaatggggtcccccgactctggctttcccccaggtctacatgttcctggtgaaatggcaggacttatc

SEQ ID NO: 17029 - RNA, 73 nt, synthetic construct
  source 1..73: mol_type = other RNA
aggctgaatggggtcccccgactctggctttcccccaggtctacatgttcctggtgaaatggcaggatctgtc

SEQ ID NO: 17030 - RNA, 73 nt, synthetic construct
  source 1..73: mol_type = other RNA
aggctgaatggggtcccccgactctggctttcccccaggtgtacatgttcctggtgaaatggcaggacttgtc

SEQ ID NO: 17031 - RNA, 73 nt, synthetic construct
  source 1..73: mol_type = other RNA
aggctgaatggggtcccccgactctggctttcccccaggtttacatgttcctggtgaaatggcaggatttgtc

SEQ ID NO: 17032 - RNA, 73 nt, synthetic construct
  source 1..73: mol_type = other RNA
aggctgaatggggtcccccgactctggctttcccccaggtgtacatgttcctggtgaaatggcaggacctgtc

SEQ ID NO: 17033 - RNA, 73 nt, synthetic construct
  source 1..73: mol_type = other RNA
aggctgaatggggtcccccgactctggctttcccccaggtttacatgttcctggtgaaatggcaggacttatc

SEQ ID NO: 17034 - RNA, 73 nt, synthetic construct
  source 1..73: mol_type = other RNA
aggctgaatggggtcccccgactctggctttcccccaggtatacatgttcctggtgaaatggcaggacctgtc

SEQ ID NO: 17035 - RNA, 73 nt, synthetic construct
  source 1..73: mol_type = other RNA
aggctgaatggggtcccccgactctggctttcccccaggtatacatgttcctggtgaaatggcaggacttatc

SEQ ID NO: 17036 - RNA, 73 nt, synthetic construct
  source 1..73: mol_type = other RNA
aggctgaatggggtcccccgactctggctttcccccaggtatacatgttcctggtgaaatggcaggacttgtc

SEQ ID NO: 17037 - RNA, 73 nt, synthetic construct
  source 1..73: mol_type = other RNA
aggctgaatggggtcccccgactctggctttcccccaggtatacatgttcctggtgaaatggcaggatctgtc

SEQ ID NO: 17038 - RNA, 74 nt, synthetic construct
  source 1..74: mol_type = other RNA
gaggctgaatggggtcccccgactctggctttcccccaggtttacatgttcctggtgaaatggcaggatctgtc

SEQ ID NO: 17039 - RNA, 74 nt, synthetic construct
  source 1..74: mol_type = other RNA
gaggctgaatggggtcccccgactctggctttcccccaggtttacatgttcctggtgaaatggcaggacttatc

SEQ ID NO: 17040 - RNA, 74 nt, synthetic construct
  source 1..74: mol_type = other RNA
gaggctgaatggggtcccccgactctggctttcccccaggtttacatgttcctggtgaaatggcaggacttgtc

SEQ ID NO: 17041 - RNA, 74 nt, synthetic construct
  source 1..74: mol_type = other RNA
gaggctgaatggggtcccccgactctggctttcccccaggtttacatgttcctggtgaaatggcaggacctgtc

SEQ ID NO: 17042 - RNA, 74 nt, synthetic construct
  source 1..74: mol_type = other RNA
gaggctgaatggggtcccccgactctggctttcccccaggtttacatgttcctggtgaaatggcaggatttatc

SEQ ID NO: 17043 - RNA, 74 nt, synthetic construct
  source 1..74: mol_type = other RNA
gaggctgaatggggtcccccgactctggctttcccccaggtgtacatgttcctggtgaaatggcaggatttgtc

SEQ ID NO: 17044 - RNA, 74 nt, synthetic construct
  source 1..74: mol_type = other RNA
gaggctgaatggggtcccccgactctggctttcccccaggtgtacatgttcctggtgaaatggcaggatctgtc

SEQ ID NO: 17045 - RNA, 74 nt, synthetic construct
  source 1..74: mol_type = other RNA
gaggctgaatggggtcccccgactctggctttcccccaggtttacatgttcctggtgaaatggcaggatttgtc

SEQ ID NO: 17046 - RNA, 74 nt, synthetic construct
  source 1..74: mol_type = other RNA
gaggctgaatggggtcccccgactctggctttcccccaggtatacatgttcctggtgaaatggcaggatctgtc

SEQ ID NO: 17047 - RNA, 74 nt, synthetic construct
  source 1..74: mol_type = other RNA
gaggctgaatggggtcccccgactctggctttcccccaggtgtacatgttcctggtgaaatggcaggacttatc

SEQ ID NO: 17048 - RNA, 74 nt, synthetic construct
  source 1..74: mol_type = other RNA
gaggctgaatggggtcccccgactctggctttcccccaggtctacatgttcctggtgaaatggcaggatttgtc

SEQ ID NO: 17049 - RNA, 74 nt, synthetic construct
  source 1..74: mol_type = other RNA
gaggctgaatggggtcccccgactctggctttcccccaggtctacatgttcctggtgaaatggcaggatttatc

SEQ ID NO: 17050 - RNA, 74 nt, synthetic construct
  source 1..74: mol_type = other RNA
gaggctgaatggggtcccccgactctggctttcccccaggtctacatgttcctggtgaaatggcaggatctgtc

SEQ ID NO: 17051 - RNA, 74 nt, synthetic construct
  source 1..74: mol_type = other RNA
gaggctgaatggggtcccccgactctggctttcccccaggtctacatgttcctggtgaaatggcaggacttgtc

SEQ ID NO: 17052 - RNA, 74 nt, synthetic construct
  source 1..74: mol_type = other RNA
gaggctgaatggggtcccccgactctggctttcccccaggtatacatgttcctggtgaaatggcaggatttgtc

SEQ ID NO: 17053 - RNA, 74 nt, synthetic construct
  source 1..74: mol_type = other RNA
gaggctgaatggggtcccccgactctggctttcccccaggtctacatgttcctggtgaaatggcaggacctgtc

SEQ ID NO: 17054 - RNA, 74 nt, synthetic construct
  source 1..74: mol_type = other RNA
gaggctgaatggggtcccccgactctggctttcccccaggtatacatgttcctggtgaaatggcaggatttatc

SEQ ID NO: 17055 - RNA, 74 nt, synthetic construct
  source 1..74: mol_type = other RNA
gaggctgaatggggtcccccgactctggctttcccccaggtgtacatgttcctggtgaaatggcaggacctgtc

SEQ ID NO: 17056 - RNA, 74 nt, synthetic construct
  source 1..74: mol_type = other RNA
gaggctgaatggggtcccccgactctggctttcccccaggtatacatgttcctggtgaaatggcaggacttatc

SEQ ID NO: 17057 - RNA, 74 nt, synthetic construct
  source 1..74: mol_type = other RNA
gaggctgaatggggtcccccgactctggctttcccccaggtctacatgttcctggtgaaatggcaggacttatc

SEQ ID NO: 17058 - RNA, 74 nt, synthetic construct
  source 1..74: mol_type = other RNA
gaggctgaatggggtcccccgactctggctttcccccaggtatacatgttcctggtgaaatggcaggacttgtc

SEQ ID NO: 17059 - RNA, 74 nt, synthetic construct
  source 1..74: mol_type = other RNA
gaggctgaatggggtcccccgactctggctttcccccaggtgtacatgttcctggtgaaatggcaggatttatc

SEQ ID NO: 17060 - RNA, 74 nt, synthetic construct
  source 1..74: mol_type = other RNA
gaggctgaatggggtcccccgactctggctttcccccaggtatacatgttcctggtgaaatggcaggacctgtc

SEQ ID NO: 17061 - RNA, 74 nt, synthetic construct
  source 1..74: mol_type = other RNA
gaggctgaatggggtcccccgactctggctttcccccaggtgtacatgttcctggtgaaatggcaggacttgtc

SEQ ID NO: 17062 - RNA, 75 nt, synthetic construct
  source 1..75: mol_type = other RNA
ggaggctgaatggggtcccccgactctggctttcccccaggtgtacatgttcctggtgaaatggcaggatttatc

SEQ ID NO: 17063 - RNA, 75 nt, synthetic construct
  source 1..75: mol_type = other RNA
ggaggctgaatggggtcccccgactctggctttcccccaggtgtacatgttcctggtgaaatggcaggatctgtc

SEQ ID NO: 17064 - RNA, 75 nt, synthetic construct
  source 1..75: mol_type = other RNA
ggaggctgaatggggtcccccgactctggctttcccccaggtgtacatgttcctggtgaaatggcaggacttgtc

SEQ ID NO: 17065 - RNA, 75 nt, synthetic construct
  source 1..75: mol_type = other RNA
ggaggctgaatggggtcccccgactctggctttcccccaggtgtacatgttcctggtgaaatggcaggacttatc

SEQ ID NO: 17066 - RNA, 75 nt, synthetic construct
  source 1..75: mol_type = other RNA
ggaggctgaatggggtcccccgactctggctttcccccaggtgtacatgttcctggtgaaatggcaggacctgtc

SEQ ID NO: 17067 - RNA, 75 nt, synthetic construct
  source 1..75: mol_type = other RNA
ggaggctgaatggggtcccccgactctggctttcccccaggtttacatgttcctggtgaaatggcaggatttgtc

SEQ ID NO: 17068 - RNA, 75 nt, synthetic construct
  source 1..75: mol_type = other RNA
ggaggctgaatggggtcccccgactctggctttcccccaggtatacatgttcctggtgaaatggcaggacctgtc

SEQ ID NO: 17069 - RNA, 75 nt, synthetic construct
  source 1..75: mol_type = other RNA
ggaggctgaatggggtcccccgactctggctttcccccaggtatacatgttcctggtgaaatggcaggacttatc

SEQ ID NO: 17070 - RNA, 75 nt, synthetic construct
  source 1..75: mol_type = other RNA
ggaggctgaatggggtcccccgactctggctttcccccaggtatacatgttcctggtgaaatggcaggacttgtc

SEQ ID NO: 17071 - RNA, 75 nt, synthetic construct
  source 1..75: mol_type = other RNA
ggaggctgaatggggtcccccgactctggctttcccccaggtatacatgttcctggtgaaatggcaggatctgtc

SEQ ID NO: 17072 - RNA, 75 nt, synthetic construct
  source 1..75: mol_type = other RNA
ggaggctgaatggggtcccccgactctggctttcccccaggtttacatgttcctggtgaaatggcaggatctgtc

SEQ ID NO: 17073 - RNA, 75 nt, synthetic construct
  source 1..75: mol_type = other RNA
ggaggctgaatggggtcccccgactctggctttcccccaggtatacatgttcctggtgaaatggcaggatttgtc

SEQ ID NO: 17074 - RNA, 75 nt, synthetic construct
  source 1..75: mol_type = other RNA
ggaggctgaatggggtcccccgactctggctttcccccaggtctacatgttcctggtgaaatggcaggacctgtc

SEQ ID NO: 17075 - RNA, 75 nt, synthetic construct
  source 1..75: mol_type = other RNA
ggaggctgaatggggtcccccgactctggctttcccccaggtctacatgttcctggtgaaatggcaggacttatc

SEQ ID NO: 17076 - RNA, 75 nt, synthetic construct
  source 1..75: mol_type = other RNA
ggaggctgaatggggtcccccgactctggctttcccccaggtctacatgttcctggtgaaatggcaggacttgtc

SEQ ID NO: 17077 - RNA, 75 nt, synthetic construct
  source 1..75: mol_type = other RNA
ggaggctgaatggggtcccccgactctggctttcccccaggtatacatgttcctggtgaaatggcaggatttatc

SEQ ID NO: 17078 - RNA, 75 nt, synthetic construct
  source 1..75: mol_type = other RNA
ggaggctgaatggggtcccccgactctggctttcccccaggtctacatgttcctggtgaaatggcaggatctgtc

SEQ ID NO: 17079 - RNA, 75 nt, synthetic construct
  source 1..75: mol_type = other RNA
ggaggctgaatggggtcccccgactctggctttcccccaggtttacatgttcctggtgaaatggcaggatttatc

SEQ ID NO: 17080 - RNA, 75 nt, synthetic construct
  source 1..75: mol_type = other RNA
ggaggctgaatggggtcccccgactctggctttcccccaggtgtacatgttcctggtgaaatggcaggatttgtc

SEQ ID NO: 17081 - RNA, 75 nt, synthetic construct
  source 1..75: mol_type = other RNA
ggaggctgaatggggtcccccgactctggctttcccccaggtttacatgttcctggtgaaatggcaggacctgtc

SEQ ID NO: 17082 - RNA, 75 nt, synthetic construct
  source 1..75: mol_type = other RNA
ggaggctgaatggggtcccccgactctggctttcccccaggtttacatgttcctggtgaaatggcaggacttgtc

SEQ ID NO: 17083 - RNA, 75 nt, synthetic construct
  source 1..75: mol_type = other RNA
ggaggctgaatggggtcccccgactctggctttcccccaggtctacatgttcctggtgaaatggcaggatttatc

SEQ ID NO: 17084 - RNA, 75 nt, synthetic construct
  source 1..75: mol_type = other RNA
ggaggctgaatggggtcccccgactctggctttcccccaggtctacatgttcctggtgaaatggcaggatttgtc

SEQ ID NO: 17085 - RNA, 75 nt, synthetic construct
  source 1..75: mol_type = other RNA
ggaggctgaatggggtcccccgactctggctttcccccaggtttacatgttcctggtgaaatggcaggacttatc

SEQ ID NO: 17086 - RNA, 76 nt, synthetic construct
  source 1..76: mol_type = other RNA
tggaggctgaatggggtcccccgactctggctttcccccaggtttacatgttcctggtgaaatggcaggacctgtc

SEQ ID NO: 17087 - RNA, 76 nt, synthetic construct
  source 1..76: mol_type = other RNA
tggaggctgaatggggtcccccgactctggctttcccccaggtatacatgttcctggtgaaatggcaggacttgtc

SEQ ID NO: 17088 - RNA, 76 nt, synthetic construct
  source 1..76: mol_type = other RNA
tggaggctgaatggggtcccccgactctggctttcccccaggtgtacatgttcctggtgaaatggcaggacttatc

SEQ ID NO: 17089 - RNA, 76 nt, synthetic construct
  source 1..76: mol_type = other RNA
tggaggctgaatggggtcccccgactctggctttcccccaggtctacatgttcctggtgaaatggcaggatttatc

SEQ ID NO: 17090 - RNA, 76 nt, synthetic construct
  source 1..76: mol_type = other RNA
tggaggctgaatggggtcccccgactctggctttcccccaggtctacatgttcctggtgaaatggcaggatttgtc

SEQ ID NO: 17091 - RNA, 76 nt, synthetic construct
  source 1..76: mol_type = other RNA
tggaggctgaatggggtcccccgactctggctttcccccaggtctacatgttcctggtgaaatggcaggatctgtc

SEQ ID NO: 17092 - RNA, 76 nt, synthetic construct
  source 1..76: mol_type = other RNA
tggaggctgaatggggtcccccgactctggctttcccccaggtctacatgttcctggtgaaatggcaggacttgtc

SEQ ID NO: 17093 - RNA, 76 nt, synthetic construct
  source 1..76: mol_type = other RNA
tggaggctgaatggggtcccccgactctggctttcccccaggtatacatgttcctggtgaaatggcaggatttatc

SEQ ID NO: 17094 - RNA, 76 nt, synthetic construct
  source 1..76: mol_type = other RNA
tggaggctgaatggggtcccccgactctggctttcccccaggtatacatgttcctggtgaaatggcaggatttgtc

SEQ ID NO: 17095 - RNA, 76 nt, synthetic construct
  source 1..76: mol_type = other RNA
tggaggctgaatggggtcccccgactctggctttcccccaggtatacatgttcctggtgaaatggcaggatctgtc

SEQ ID NO: 17096 - RNA, 76 nt, synthetic construct
  source 1..76: mol_type = other RNA
tggaggctgaatggggtcccccgactctggctttcccccaggtgtacatgttcctggtgaaatggcaggacctgtc

SEQ ID NO: 17097 - RNA, 76 nt, synthetic construct
  source 1..76: mol_type = other RNA
tggaggctgaatggggtcccccgactctggctttcccccaggtctacatgttcctggtgaaatggcaggacttatc

SEQ ID NO: 17098 - RNA, 76 nt, synthetic construct
  source 1..76: mol_type = other RNA
tggaggctgaatggggtcccccgactctggctttcccccaggtatacatgttcctggtgaaatggcaggacctgtc

SEQ ID NO: 17099 - RNA, 76 nt, synthetic construct
  source 1..76: mol_type = other RNA
tggaggctgaatggggtcccccgactctggctttcccccaggtatacatgttcctggtgaaatggcaggacttatc

SEQ ID NO: 17100 - RNA, 76 nt, synthetic construct
  source 1..76: mol_type = other RNA
tggaggctgaatggggtcccccgactctggctttcccccaggtttacatgttcctggtgaaatggcaggacttgtc

SEQ ID NO: 17101 - RNA, 76 nt, synthetic construct
  source 1..76: mol_type = other RNA
tggaggctgaatggggtcccccgactctggctttcccccaggtgtacatgttcctggtgaaatggcaggacttgtc

SEQ ID NO: 17102 - RNA, 76 nt, synthetic construct
  source 1..76: mol_type = other RNA
tggaggctgaatggggtcccccgactctggctttcccccaggtttacatgttcctggtgaaatggcaggatttatc

SEQ ID NO: 17103 - RNA, 76 nt, synthetic construct
  source 1..76: mol_type = other RNA
tggaggctgaatggggtcccccgactctggctttcccccaggtttacatgttcctggtgaaatggcaggacttatc

SEQ ID NO: 17104 - RNA, 76 nt, synthetic construct
  source 1..76: mol_type = other RNA
tggaggctgaatggggtcccccgactctggctttcccccaggtgtacatgttcctggtgaaatggcaggatttgtc

SEQ ID NO: 17105 - RNA, 76 nt, synthetic construct
  source 1..76: mol_type = other RNA
tggaggctgaatggggtcccccgactctggctttcccccaggtgtacatgttcctggtgaaatggcaggatttatc

SEQ ID NO: 17106 - RNA, 76 nt, synthetic construct
  source 1..76: mol_type = other RNA
tggaggctgaatggggtcccccgactctggctttcccccaggtgtacatgttcctggtgaaatggcaggatctgtc

SEQ ID NO: 17107 - RNA, 76 nt, synthetic construct
  source 1..76: mol_type = other RNA
tggaggctgaatggggtcccccgactctggctttcccccaggtttacatgttcctggtgaaatggcaggatttgtc

SEQ ID NO: 17108 - RNA, 76 nt, synthetic construct
  source 1..76: mol_type = other RNA
tggaggctgaatggggtcccccgactctggctttcccccaggtttacatgttcctggtgaaatggcaggatctgtc

SEQ ID NO: 17109 - RNA, 76 nt, synthetic construct
  source 1..76: mol_type = other RNA
tggaggctgaatggggtcccccgactctggctttcccccaggtctacatgttcctggtgaaatggcaggacctgtc

SEQ ID NO: 17110 - RNA, 77 nt, synthetic construct
  source 1..77: mol_type = other RNA
ttggaggctgaatggggtcccccgactctggctttcccccaggtttacatgttcctggtgaaatggcaggatttgtc

SEQ ID NO: 17111 - RNA, 77 nt, synthetic construct
  source 1..77: mol_type = other RNA
ttggaggctgaatggggtcccccgactctggctttcccccaggtgtacatgttcctggtgaaatggcaggatttatc

SEQ ID NO: 17112 - RNA, 77 nt, synthetic construct
  source 1..77: mol_type = other RNA
ttggaggctgaatggggtcccccgactctggctttcccccaggtttacatgttcctggtgaaatggcaggatctgtc

SEQ ID NO: 17113 - RNA, 77 nt, synthetic construct
  source 1..77: mol_type = other RNA
ttggaggctgaatggggtcccccgactctggctttcccccaggtttacatgttcctggtgaaatggcaggatttatc

SEQ ID NO: 17114 - RNA, 77 nt, synthetic construct
  source 1..77: mol_type = other RNA
ttggaggctgaatggggtcccccgactctggctttcccccaggtctacatgttcctggtgaaatggcaggatctgtc

SEQ ID NO: 17115 - RNA, 77 nt, synthetic construct
  source 1..77: mol_type = other RNA
ttggaggctgaatggggtcccccgactctggctttcccccaggtctacatgttcctggtgaaatggcaggacttatc

SEQ ID NO: 17116 - RNA, 77 nt, synthetic construct
  source 1..77: mol_type = other RNA
ttggaggctgaatggggtcccccgactctggctttcccccaggtatacatgttcctggtgaaatggcaggacctgtc

SEQ ID NO: 17117 - RNA, 77 nt, synthetic construct
  source 1..77: mol_type = other RNA
ttggaggctgaatggggtcccccgactctggctttcccccaggtatacatgttcctggtgaaatggcaggacttatc

SEQ ID NO: 17118 - RNA, 77 nt, synthetic construct
  source 1..77: mol_type = other RNA
ttggaggctgaatggggtcccccgactctggctttcccccaggtatacatgttcctggtgaaatggcaggacttgtc

SEQ ID NO: 17119 - RNA, 77 nt, synthetic construct
  source 1..77: mol_type = other RNA
ttggaggctgaatggggtcccccgactctggctttcccccaggtatacatgttcctggtgaaatggcaggatctgtc

SEQ ID NO: 17120 - RNA, 77 nt, synthetic construct
  source 1..77: mol_type = other RNA
ttggaggctgaatggggtcccccgactctggctttcccccaggtatacatgttcctggtgaaatggcaggatttatc

SEQ ID NO: 17121 - RNA, 77 nt, synthetic construct
  source 1..77: mol_type = other RNA
ttggaggctgaatggggtcccccgactctggctttcccccaggtatacatgttcctggtgaaatggcaggatttgtc

SEQ ID NO: 17122 - RNA, 77 nt, synthetic construct
  source 1..77: mol_type = other RNA
ttggaggctgaatggggtcccccgactctggctttcccccaggtgtacatgttcctggtgaaatggcaggatttgtc

SEQ ID NO: 17123 - RNA, 77 nt, synthetic construct
  source 1..77: mol_type = other RNA
ttggaggctgaatggggtcccccgactctggctttcccccaggtctacatgttcctggtgaaatggcaggacttgtc

SEQ ID NO: 17124 - RNA, 77 nt, synthetic construct
  source 1..77: mol_type = other RNA
ttggaggctgaatggggtcccccgactctggctttcccccaggtctacatgttcctggtgaaatggcaggacctgtc

SEQ ID NO: 17125 - RNA, 77 nt, synthetic construct
  source 1..77: mol_type = other RNA
ttggaggctgaatggggtcccccgactctggctttcccccaggtctacatgttcctggtgaaatggcaggatttatc

SEQ ID NO: 17126 - RNA, 77 nt, synthetic construct
  source 1..77: mol_type = other RNA
ttggaggctgaatggggtcccccgactctggctttcccccaggtctacatgttcctggtgaaatggcaggatttgtc

SEQ ID NO: 17127 - RNA, 77 nt, synthetic construct
  source 1..77: mol_type = other RNA
ttggaggctgaatggggtcccccgactctggctttcccccaggtgtacatgttcctggtgaaatggcaggacctgtc

SEQ ID NO: 17128 - RNA, 77 nt, synthetic construct
  source 1..77: mol_type = other RNA
ttggaggctgaatggggtcccccgactctggctttcccccaggtttacatgttcctggtgaaatggcaggacttatc

SEQ ID NO: 17129 - RNA, 77 nt, synthetic construct
  source 1..77: mol_type = other RNA
ttggaggctgaatggggtcccccgactctggctttcccccaggtttacatgttcctggtgaaatggcaggacctgtc

SEQ ID NO: 17130 - RNA, 77 nt, synthetic construct
  source 1..77: mol_type = other RNA
ttggaggctgaatggggtcccccgactctggctttcccccaggtttacatgttcctggtgaaatggcaggacttgtc

SEQ ID NO: 17131 - RNA, 77 nt, synthetic construct
  source 1..77: mol_type = other RNA
ttggaggctgaatggggtcccccgactctggctttcccccaggtgtacatgttcctggtgaaatggcaggatctgtc

SEQ ID NO: 17132 - RNA, 77 nt, synthetic construct
  source 1..77: mol_type = other RNA
ttggaggctgaatggggtcccccgactctggctttcccccaggtgtacatgttcctggtgaaatggcaggacttgtc

SEQ ID NO: 17133 - RNA, 77 nt, synthetic construct
  source 1..77: mol_type = other RNA
ttggaggctgaatggggtcccccgactctggctttcccccaggtgtacatgttcctggtgaaatggcaggacttatc

SEQ ID NO: 17134 - RNA, 78 nt, synthetic construct
  source 1..78: mol_type = other RNA
tttggaggctgaatggggtcccccgactctggctttcccccaggtttacatgttcctggtgaaatggcaggacctgtc

SEQ ID NO: 17135 - RNA, 78 nt, synthetic construct
  source 1..78: mol_type = other RNA
tttggaggctgaatggggtcccccgactctggctttcccccaggtatacatgttcctggtgaaatggcaggacttatc

SEQ ID NO: 17136 - RNA, 78 nt, synthetic construct
  source 1..78: mol_type = other RNA
tttggaggctgaatggggtcccccgactctggctttcccccaggtatacatgttcctggtgaaatggcaggacctgtc

SEQ ID NO: 17137 - RNA, 78 nt, synthetic construct
  source 1..78: mol_type = other RNA
tttggaggctgaatggggtcccccgactctggctttcccccaggtgtacatgttcctggtgaaatggcaggacctgtc

SEQ ID NO: 17138 - RNA, 78 nt, synthetic construct
  source 1..78: mol_type = other RNA
tttggaggctgaatggggtcccccgactctggctttcccccaggtatacatgttcctggtgaaatggcaggacttgtc

SEQ ID NO: 17139 - RNA, 78 nt, synthetic construct
  source 1..78: mol_type = other RNA
tttggaggctgaatggggtcccccgactctggctttcccccaggtgtacatgttcctggtgaaatggcaggatttgtc

SEQ ID NO: 17140 - RNA, 78 nt, synthetic construct
  source 1..78: mol_type = other RNA
tttggaggctgaatggggtcccccgactctggctttcccccaggtctacatgttcctggtgaaatggcaggatttgtc

SEQ ID NO: 17141 - RNA, 78 nt, synthetic construct
  source 1..78: mol_type = other RNA
tttggaggctgaatggggtcccccgactctggctttcccccaggtgtacatgttcctggtgaaatggcaggatctgtc

SEQ ID NO: 17142 - RNA, 78 nt, synthetic construct
  source 1..78: mol_type = other RNA
tttggaggctgaatggggtcccccgactctggctttcccccaggtgtacatgttcctggtgaaatggcaggatttatc

SEQ ID NO: 17143 - RNA, 78 nt, synthetic construct
  source 1..78: mol_type = other RNA
tttggaggctgaatggggtcccccgactctggctttcccccaggtttacatgttcctggtgaaatggcaggatctgtc

SEQ ID NO: 17144 - RNA, 78 nt, synthetic construct
  source 1..78: mol_type = other RNA
tttggaggctgaatggggtcccccgactctggctttcccccaggtttacatgttcctggtgaaatggcaggacttgtc

SEQ ID NO: 17145 - RNA, 78 nt, synthetic construct
  source 1..78: mol_type = other RNA
tttggaggctgaatggggtcccccgactctggctttcccccaggtttacatgttcctggtgaaatggcaggatttatc

SEQ ID NO: 17146 - RNA, 78 nt, synthetic construct
  source 1..78: mol_type = other RNA
tttggaggctgaatggggtcccccgactctggctttcccccaggtttacatgttcctggtgaaatggcaggacttatc

SEQ ID NO: 17147 - RNA, 78 nt, synthetic construct
  source 1..78: mol_type = other RNA
tttggaggctgaatggggtcccccgactctggctttcccccaggtgtacatgttcctggtgaaatggcaggacttatc

SEQ ID NO: 17148 - RNA, 78 nt, synthetic construct
  source 1..78: mol_type = other RNA
tttggaggctgaatggggtcccccgactctggctttcccccaggtatacatgttcctggtgaaatggcaggatttgtc

SEQ ID NO: 17149 - RNA, 78 nt, synthetic construct
  source 1..78: mol_type = other RNA
tttggaggctgaatggggtcccccgactctggctttcccccaggtctacatgttcctggtgaaatggcaggatttatc

SEQ ID NO: 17150 - RNA, 78 nt, synthetic construct
  source 1..78: mol_type = other RNA
tttggaggctgaatggggtcccccgactctggctttcccccaggtctacatgttcctggtgaaatggcaggatctgtc

SEQ ID NO: 17151 - RNA, 78 nt, synthetic construct
  source 1..78: mol_type = other RNA
tttggaggctgaatggggtcccccgactctggctttcccccaggtctacatgttcctggtgaaatggcaggacttgtc

SEQ ID NO: 17152 - RNA, 78 nt, synthetic construct
  source 1..78: mol_type = other RNA
tttggaggctgaatggggtcccccgactctggctttcccccaggtctacatgttcctggtgaaatggcaggacttatc

SEQ ID NO: 17153 - RNA, 78 nt, synthetic construct
  source 1..78: mol_type = other RNA
tttggaggctgaatggggtcccccgactctggctttcccccaggtctacatgttcctggtgaaatggcaggacctgtc

SEQ ID NO: 17154 - RNA, 78 nt, synthetic construct
  source 1..78: mol_type = other RNA
tttggaggctgaatggggtcccccgactctggctttcccccaggtttacatgttcctggtgaaatggcaggatttgtc

SEQ ID NO: 17155 - RNA, 78 nt, synthetic construct
  source 1..78: mol_type = other RNA
tttggaggctgaatggggtcccccgactctggctttcccccaggtatacatgttcctggtgaaatggcaggatttatc

SEQ ID NO: 17156 - RNA, 78 nt, synthetic construct
  source 1..78: mol_type = other RNA
tttggaggctgaatggggtcccccgactctggctttcccccaggtatacatgttcctggtgaaatggcaggatctgtc

SEQ ID NO: 17157 - RNA, 78 nt, synthetic construct
  source 1..78: mol_type = other RNA
tttggaggctgaatggggtcccccgactctggctttcccccaggtgtacatgttcctggtgaaatggcaggacttgtc

SEQ ID NO: 17158 - RNA, 79 nt, synthetic construct
  source 1..79: mol_type = other RNA
ctttggaggctgaatggggtcccccgactctggctttcccccaggtttacatgttcctggtgaaatggcaggatctgtc

SEQ ID NO: 17159 - RNA, 79 nt, synthetic construct
  source 1..79: mol_type = other RNA
ctttggaggctgaatggggtcccccgactctggctttcccccaggtttacatgttcctggtgaaatggcaggatttatc

SEQ ID NO: 17160 - RNA, 79 nt, synthetic construct
  source 1..79: mol_type = other RNA
ctttggaggctgaatggggtcccccgactctggctttcccccaggtttacatgttcctggtgaaatggcaggacttgtc

SEQ ID NO: 17161 - RNA, 79 nt, synthetic construct
  source 1..79: mol_type = other RNA
ctttggaggctgaatggggtcccccgactctggctttcccccaggtatacatgttcctggtgaaatggcaggacctgtc

SEQ ID NO: 17162 - RNA, 79 nt, synthetic construct
  source 1..79: mol_type = other RNA
ctttggaggctgaatggggtcccccgactctggctttcccccaggtctacatgttcctggtgaaatggcaggatttgtc

SEQ ID NO: 17163 - RNA, 79 nt, synthetic construct
  source 1..79: mol_type = other RNA
ctttggaggctgaatggggtcccccgactctggctttcccccaggtatacatgttcctggtgaaatggcaggatctgtc

SEQ ID NO: 17164 - RNA, 79 nt, synthetic construct
  source 1..79: mol_type = other RNA
ctttggaggctgaatggggtcccccgactctggctttcccccaggtatacatgttcctggtgaaatggcaggatttatc

SEQ ID NO: 17165 - RNA, 79 nt, synthetic construct
  source 1..79: mol_type = other RNA
ctttggaggctgaatggggtcccccgactctggctttcccccaggtatacatgttcctggtgaaatggcaggatttgtc

SEQ ID NO: 17166 - RNA, 79 nt, synthetic construct
  source 1..79: mol_type = other RNA
ctttggaggctgaatggggtcccccgactctggctttcccccaggtctacatgttcctggtgaaatggcaggacctgtc

SEQ ID NO: 17167 - RNA, 79 nt, synthetic construct
  source 1..79: mol_type = other RNA
ctttggaggctgaatggggtcccccgactctggctttcccccaggtctacatgttcctggtgaaatggcaggacttatc

SEQ ID NO: 17168 - RNA, 79 nt, synthetic construct
  source 1..79: mol_type = other RNA
ctttggaggctgaatggggtcccccgactctggctttcccccaggtttacatgttcctggtgaaatggcaggatttgtc

SEQ ID NO: 17169 - RNA, 79 nt, synthetic construct
  source 1..79: mol_type = other RNA
ctttggaggctgaatggggtcccccgactctggctttcccccaggtgtacatgttcctggtgaaatggcaggacctgtc

SEQ ID NO: 17170 - RNA, 79 nt, synthetic construct
  source 1..79: mol_type = other RNA
ctttggaggctgaatggggtcccccgactctggctttcccccaggtctacatgttcctggtgaaatggcaggatttatc

SEQ ID NO: 17171 - RNA, 79 nt, synthetic construct
  source 1..79: mol_type = other RNA
ctttggaggctgaatggggtcccccgactctggctttcccccaggtgtacatgttcctggtgaaatggcaggacttatc

SEQ ID NO: 17172 - RNA, 79 nt, synthetic construct
  source 1..79: mol_type = other RNA
ctttggaggctgaatggggtcccccgactctggctttcccccaggtgtacatgttcctggtgaaatggcaggacttgtc

SEQ ID NO: 17173 - RNA, 79 nt, synthetic construct
  source 1..79: mol_type = other RNA
ctttggaggctgaatggggtcccccgactctggctttcccccaggtatacatgttcctggtgaaatggcaggacttatc

SEQ ID NO: 17174 - RNA, 79 nt, synthetic construct
  source 1..79: mol_type = other RNA
ctttggaggctgaatggggtcccccgactctggctttcccccaggtgtacatgttcctggtgaaatggcaggatctgtc

SEQ ID NO: 17175 - RNA, 79 nt, synthetic construct
  source 1..79: mol_type = other RNA
ctttggaggctgaatggggtcccccgactctggctttcccccaggtgtacatgttcctggtgaaatggcaggatttatc

SEQ ID NO: 17176 - RNA, 79 nt, synthetic construct
  source 1..79: mol_type = other RNA
ctttggaggctgaatggggtcccccgactctggctttcccccaggtttacatgttcctggtgaaatggcaggacctgtc

SEQ ID NO: 17177 - RNA, 79 nt, synthetic construct
  source 1..79: mol_type = other RNA
ctttggaggctgaatggggtcccccgactctggctttcccccaggtttacatgttcctggtgaaatggcaggacttatc

SEQ ID NO: 17178 - RNA, 79 nt, synthetic construct
  source 1..79: mol_type = other RNA
ctttggaggctgaatggggtcccccgactctggctttcccccaggtatacatgttcctggtgaaatggcaggacttgtc

SEQ ID NO: 17179 - RNA, 79 nt, synthetic construct
  source 1..79: mol_type = other RNA
ctttggaggctgaatggggtcccccgactctggctttcccccaggtctacatgttcctggtgaaatggcaggatctgtc

SEQ ID NO: 17180 - RNA, 79 nt, synthetic construct
  source 1..79: mol_type = other RNA
ctttggaggctgaatggggtcccccgactctggctttcccccaggtctacatgttcctggtgaaatggcaggacttgtc

SEQ ID NO: 17181 - RNA, 79 nt, synthetic construct
  source 1..79: mol_type = other RNA
ctttggaggctgaatggggtcccccgactctggctttcccccaggtgtacatgttcctggtgaaatggcaggatttgtc

SEQ ID NO: 17182 - RNA, 80 nt, synthetic construct
  source 1..80: mol_type = other RNA
tctttggaggctgaatggggtcccccgactctggctttcccccaggtatacatgttcctggtgaaatggcaggacttatc

SEQ ID NO: 17183 - RNA, 80 nt, synthetic construct
  source 1..80: mol_type = other RNA
tctttggaggctgaatggggtcccccgactctggctttcccccaggtatacatgttcctggtgaaatggcaggatctgtc

SEQ ID NO: 17184 - RNA, 80 nt, synthetic construct
  source 1..80: mol_type = other RNA
tctttggaggctgaatggggtcccccgactctggctttcccccaggtctacatgttcctggtgaaatggcaggatttgtc

SEQ ID NO: 17185 - RNA, 80 nt, synthetic construct
  source 1..80: mol_type = other RNA
tctttggaggctgaatggggtcccccgactctggctttcccccaggtctacatgttcctggtgaaatggcaggacctgtc

SEQ ID NO: 17186 - RNA, 80 nt, synthetic construct
  source 1..80: mol_type = other RNA
tctttggaggctgaatggggtcccccgactctggctttcccccaggtatacatgttcctggtgaaatggcaggacttgtc

SEQ ID NO: 17187 - RNA, 80 nt, synthetic construct
  source 1..80: mol_type = other RNA
tctttggaggctgaatggggtcccccgactctggctttcccccaggtatacatgttcctggtgaaatggcaggatttatc

SEQ ID NO: 17188 - RNA, 80 nt, synthetic construct
  source 1..80: mol_type = other RNA
tctttggaggctgaatggggtcccccgactctggctttcccccaggtctacatgttcctggtgaaatggcaggacttgtc

SEQ ID NO: 17189 - RNA, 80 nt, synthetic construct
  source 1..80: mol_type = other RNA
tctttggaggctgaatggggtcccccgactctggctttcccccaggtgtacatgttcctggtgaaatggcaggatctgtc

SEQ ID NO: 17190 - RNA, 80 nt, synthetic construct
  source 1..80: mol_type = other RNA
tctttggaggctgaatggggtcccccgactctggctttcccccaggtatacatgttcctggtgaaatggcaggatttgtc

SEQ ID NO: 17191 - RNA, 80 nt, synthetic construct
  source 1..80: mol_type = other RNA
tctttggaggctgaatggggtcccccgactctggctttcccccaggtttacatgttcctggtgaaatggcaggacttgtc

SEQ ID NO: 17192 - RNA, 80 nt, synthetic construct
  source 1..80: mol_type = other RNA
tctttggaggctgaatggggtcccccgactctggctttcccccaggtttacatgttcctggtgaaatggcaggacctgtc

SEQ ID NO: 17193 - RNA, 80 nt, synthetic construct
  source 1..80: mol_type = other RNA
tctttggaggctgaatggggtcccccgactctggctttcccccaggtctacatgttcctggtgaaatggcaggatctgtc

SEQ ID NO: 17194 - RNA, 80 nt, synthetic construct
  source 1..80: mol_type = other RNA
tctttggaggctgaatggggtcccccgactctggctttcccccaggtttacatgttcctggtgaaatggcaggatttatc

SEQ ID NO: 17195 - RNA, 80 nt, synthetic construct
  source 1..80: mol_type = other RNA
tctttggaggctgaatggggtcccccgactctggctttcccccaggtgtacatgttcctggtgaaatggcaggatttgtc

SEQ ID NO: 17196 - RNA, 80 nt, synthetic construct
  source 1..80: mol_type = other RNA
tctttggaggctgaatggggtcccccgactctggctttcccccaggtgtacatgttcctggtgaaatggcaggatttatc

SEQ ID NO: 17197 - RNA, 80 nt, synthetic construct
  source 1..80: mol_type = other RNA
tctttggaggctgaatggggtcccccgactctggctttcccccaggtttacatgttcctggtgaaatggcaggacttatc

SEQ ID NO: 17198 - RNA, 80 nt, synthetic construct
  source 1..80: mol_type = other RNA
tctttggaggctgaatggggtcccccgactctggctttcccccaggtgtacatgttcctggtgaaatggcaggacttgtc

SEQ ID NO: 17199 - RNA, 80 nt, synthetic construct
  source 1..80: mol_type = other RNA
tctttggaggctgaatggggtcccccgactctggctttcccccaggtgtacatgttcctggtgaaatggcaggacttatc

SEQ ID NO: 17200 - RNA, 80 nt, synthetic construct
  source 1..80: mol_type = other RNA
tctttggaggctgaatggggtcccccgactctggctttcccccaggtttacatgttcctggtgaaatggcaggatttgtc

SEQ ID NO: 17201 - RNA, 80 nt, synthetic construct
  source 1..80: mol_type = other RNA
tctttggaggctgaatggggtcccccgactctggctttcccccaggtgtacatgttcctggtgaaatggcaggacctgtc

SEQ ID NO: 17202 - RNA, 80 nt, synthetic construct
  source 1..80: mol_type = other RNA
tctttggaggctgaatggggtcccccgactctggctttcccccaggtctacatgttcctggtgaaatggcaggatttatc

SEQ ID NO: 17203 - RNA, 80 nt, synthetic construct
  source 1..80: mol_type = other RNA
tctttggaggctgaatggggtcccccgactctggctttcccccaggtctacatgttcctggtgaaatggcaggacttatc

SEQ ID NO: 17204 - RNA, 80 nt, synthetic construct
  source 1..80: mol_type = other RNA
tctttggaggctgaatggggtcccccgactctggctttcccccaggtatacatgttcctggtgaaatggcaggacctgtc

SEQ ID NO: 17205 - RNA, 80 nt, synthetic construct
  source 1..80: mol_type = other RNA
tctttggaggctgaatggggtcccccgactctggctttcccccaggtttacatgttcctggtgaaatggcaggatctgtc

SEQ ID NO: 17206 - RNA, 81 nt, synthetic construct
  source 1..81: mol_type = other RNA
ctctttggaggctgaatggggtcccccgactctggctttcccccaggtctacatgttcctggtgaaatggcaggatttgtc

SEQ ID NO: 17207 - RNA, 81 nt, synthetic construct
  source 1..81: mol_type = other RNA
ctctttggaggctgaatggggtcccccgactctggctttcccccaggtatacatgttcctggtgaaatggcaggacctgtc

SEQ ID NO: 17208 - RNA, 81 nt, synthetic construct
  source 1..81: mol_type = other RNA
ctctttggaggctgaatggggtcccccgactctggctttcccccaggtatacatgttcctggtgaaatggcaggacttatc

SEQ ID NO: 17209 - RNA, 81 nt, synthetic construct
  source 1..81: mol_type = other RNA
ctctttggaggctgaatggggtcccccgactctggctttcccccaggtttacatgttcctggtgaaatggcaggatttatc

SEQ ID NO: 17210 - RNA, 81 nt, synthetic construct
  source 1..81: mol_type = other RNA
ctctttggaggctgaatggggtcccccgactctggctttcccccaggtctacatgttcctggtgaaatggcaggatctgtc

SEQ ID NO: 17211 - RNA, 81 nt, synthetic construct
  source 1..81: mol_type = other RNA
ctctttggaggctgaatggggtcccccgactctggctttcccccaggtctacatgttcctggtgaaatggcaggacctgtc

SEQ ID NO: 17212 - RNA, 81 nt, synthetic construct
  source 1..81: mol_type = other RNA
ctctttggaggctgaatggggtcccccgactctggctttcccccaggtatacatgttcctggtgaaatggcaggatttgtc

SEQ ID NO: 17213 - RNA, 81 nt, synthetic construct
  source 1..81: mol_type = other RNA
ctctttggaggctgaatggggtcccccgactctggctttcccccaggtctacatgttcctggtgaaatggcaggacttatc

SEQ ID NO: 17214 - RNA, 81 nt, synthetic construct
  source 1..81: mol_type = other RNA
ctctttggaggctgaatggggtcccccgactctggctttcccccaggtctacatgttcctggtgaaatggcaggacttgtc

SEQ ID NO: 17215 - RNA, 81 nt, synthetic construct
  source 1..81: mol_type = other RNA
ctctttggaggctgaatggggtcccccgactctggctttcccccaggtatacatgttcctggtgaaatggcaggatctgtc

SEQ ID NO: 17216 - RNA, 81 nt, synthetic construct
  source 1..81: mol_type = other RNA
ctctttggaggctgaatggggtcccccgactctggctttcccccaggtatacatgttcctggtgaaatggcaggatttatc

SEQ ID NO: 17217 - RNA, 81 nt, synthetic construct
  source 1..81: mol_type = other RNA
ctctttggaggctgaatggggtcccccgactctggctttcccccaggtgtacatgttcctggtgaaatggcaggacttgtc

SEQ ID NO: 17218 - RNA, 81 nt, synthetic construct
  source 1..81: mol_type = other RNA
ctctttggaggctgaatggggtcccccgactctggctttcccccaggtgtacatgttcctggtgaaatggcaggatctgtc

SEQ ID NO: 17219 - RNA, 81 nt, synthetic construct
  source 1..81: mol_type = other RNA
ctctttggaggctgaatggggtcccccgactctggctttcccccaggtatacatgttcctggtgaaatggcaggacttgtc

SEQ ID NO: 17220 - RNA, 81 nt, synthetic construct
  source 1..81: mol_type = other RNA
ctctttggaggctgaatggggtcccccgactctggctttcccccaggtgtacatgttcctggtgaaatggcaggacctgtc

SEQ ID NO: 17221 - RNA, 81 nt, synthetic construct
  source 1..81: mol_type = other RNA
ctctttggaggctgaatggggtcccccgactctggctttcccccaggtctacatgttcctggtgaaatggcaggatttatc

SEQ ID NO: 17222 - RNA, 81 nt, synthetic construct
  source 1..81: mol_type = other RNA
ctctttggaggctgaatggggtcccccgactctggctttcccccaggtttacatgttcctggtgaaatggcaggatttgtc

SEQ ID NO: 17223 - RNA, 81 nt, synthetic construct
  source 1..81: mol_type = other RNA
ctctttggaggctgaatggggtcccccgactctggctttcccccaggtgtacatgttcctggtgaaatggcaggacttatc

SEQ ID NO: 17224 - RNA, 81 nt, synthetic construct
  source 1..81: mol_type = other RNA
ctctttggaggctgaatggggtcccccgactctggctttcccccaggtttacatgttcctggtgaaatggcaggatctgtc

SEQ ID NO: 17225 - RNA, 81 nt, synthetic construct
  source 1..81: mol_type = other RNA
ctctttggaggctgaatggggtcccccgactctggctttcccccaggtttacatgttcctggtgaaatggcaggacttgtc

SEQ ID NO: 17226 - RNA, 81 nt, synthetic construct
  source 1..81: mol_type = other RNA
ctctttggaggctgaatggggtcccccgactctggctttcccccaggtttacatgttcctggtgaaatggcaggacttatc

SEQ ID NO: 17227 - RNA, 81 nt, synthetic construct
  source 1..81: mol_type = other RNA
ctctttggaggctgaatggggtcccccgactctggctttcccccaggtttacatgttcctggtgaaatggcaggacctgtc

SEQ ID NO: 17228 - RNA, 81 nt, synthetic construct
  source 1..81: mol_type = other RNA
ctctttggaggctgaatggggtcccccgactctggctttcccccaggtgtacatgttcctggtgaaatggcaggatttgtc

SEQ ID NO: 17229 - RNA, 81 nt, synthetic construct
  source 1..81: mol_type = other RNA
ctctttggaggctgaatggggtcccccgactctggctttcccccaggtgtacatgttcctggtgaaatggcaggatttatc

SEQ ID NO: 17230 - RNA, 82 nt, synthetic construct
  source 1..82: mol_type = other RNA
cctctttggaggctgaatggggtcccccgactctggctttcccccaggtatacatgttcctggtgaaatggcaggacctgtc

SEQ ID NO: 17231 - RNA, 82 nt, synthetic construct
  source 1..82: mol_type = other RNA
cctctttggaggctgaatggggtcccccgactctggctttcccccaggtgtacatgttcctggtgaaatggcaggacttgtc

SEQ ID NO: 17232 - RNA, 82 nt, synthetic construct
  source 1..82: mol_type = other RNA
cctctttggaggctgaatggggtcccccgactctggctttcccccaggtctacatgttcctggtgaaatggcaggatttgtc

SEQ ID NO: 17233 - RNA, 82 nt, synthetic construct
  source 1..82: mol_type = other RNA
cctctttggaggctgaatggggtcccccgactctggctttcccccaggtctacatgttcctggtgaaatggcaggatttatc

SEQ ID NO: 17234 - RNA, 82 nt, synthetic construct
  source 1..82: mol_type = other RNA
cctctttggaggctgaatggggtcccccgactctggctttcccccaggtttacatgttcctggtgaaatggcaggacctgtc

SEQ ID NO: 17235 - RNA, 82 nt, synthetic construct
  source 1..82: mol_type = other RNA
cctctttggaggctgaatggggtcccccgactctggctttcccccaggtgtacatgttcctggtgaaatggcaggatttgtc

SEQ ID NO: 17236 - RNA, 82 nt, synthetic construct
  source 1..82: mol_type = other RNA
cctctttggaggctgaatggggtcccccgactctggctttcccccaggtgtacatgttcctggtgaaatggcaggatttatc

SEQ ID NO: 17237 - RNA, 82 nt, synthetic construct
  source 1..82: mol_type = other RNA
cctctttggaggctgaatggggtcccccgactctggctttcccccaggtgtacatgttcctggtgaaatggcaggatctgtc

SEQ ID NO: 17238 - RNA, 82 nt, synthetic construct
  source 1..82: mol_type = other RNA
cctctttggaggctgaatggggtcccccgactctggctttcccccaggtttacatgttcctggtgaaatggcaggacttatc

SEQ ID NO: 17239 - RNA, 82 nt, synthetic construct
  source 1..82: mol_type = other RNA
cctctttggaggctgaatggggtcccccgactctggctttcccccaggtttacatgttcctggtgaaatggcaggatttatc

SEQ ID NO: 17240 - RNA, 82 nt, synthetic construct
  source 1..82: mol_type = other RNA
cctctttggaggctgaatggggtcccccgactctggctttcccccaggtctacatgttcctggtgaaatggcaggatctgtc

SEQ ID NO: 17241 - RNA, 82 nt, synthetic construct
  source 1..82: mol_type = other RNA
cctctttggaggctgaatggggtcccccgactctggctttcccccaggtttacatgttcctggtgaaatggcaggatctgtc

SEQ ID NO: 17242 - RNA, 82 nt, synthetic construct
  source 1..82: mol_type = other RNA
cctctttggaggctgaatggggtcccccgactctggctttcccccaggtttacatgttcctggtgaaatggcaggacttgtc

SEQ ID NO: 17243 - RNA, 82 nt, synthetic construct
  source 1..82: mol_type = other RNA
cctctttggaggctgaatggggtcccccgactctggctttcccccaggtgtacatgttcctggtgaaatggcaggacttatc

SEQ ID NO: 17244 - RNA, 82 nt, synthetic construct
  source 1..82: mol_type = other RNA
cctctttggaggctgaatggggtcccccgactctggctttcccccaggtatacatgttcctggtgaaatggcaggatttatc

SEQ ID NO: 17245 - RNA, 82 nt, synthetic construct
  source 1..82: mol_type = other RNA
cctctttggaggctgaatggggtcccccgactctggctttcccccaggtttacatgttcctggtgaaatggcaggatttgtc

SEQ ID NO: 17246 - RNA, 82 nt, synthetic construct
  source 1..82: mol_type = other RNA
cctctttggaggctgaatggggtcccccgactctggctttcccccaggtgtacatgttcctggtgaaatggcaggacctgtc

SEQ ID NO: 17247 - RNA, 82 nt, synthetic construct
  source 1..82: mol_type = other RNA
cctctttggaggctgaatggggtcccccgactctggctttcccccaggtatacatgttcctggtgaaatggcaggacttatc

SEQ ID NO: 17248 - RNA, 82 nt, synthetic construct
  source 1..82: mol_type = other RNA
cctctttggaggctgaatggggtcccccgactctggctttcccccaggtatacatgttcctggtgaaatggcaggacttgtc

SEQ ID NO: 17249 - RNA, 82 nt, synthetic construct
  source 1..82: mol_type = other RNA
cctctttggaggctgaatggggtcccccgactctggctttcccccaggtatacatgttcctggtgaaatggcaggatctgtc

SEQ ID NO: 17250 - RNA, 82 nt, synthetic construct
  source 1..82: mol_type = other RNA
cctctttggaggctgaatggggtcccccgactctggctttcccccaggtctacatgttcctggtgaaatggcaggacttatc

SEQ ID NO: 17251 - RNA, 82 nt, synthetic construct
  source 1..82: mol_type = other RNA
cctctttggaggctgaatggggtcccccgactctggctttcccccaggtatacatgttcctggtgaaatggcaggatttgtc

SEQ ID NO: 17252 - RNA, 82 nt, synthetic construct
  source 1..82: mol_type = other RNA
cctctttggaggctgaatggggtcccccgactctggctttcccccaggtctacatgttcctggtgaaatggcaggacctgtc

SEQ ID NO: 17253 - RNA, 82 nt, synthetic construct
  source 1..82: mol_type = other RNA
cctctttggaggctgaatggggtcccccgactctggctttcccccaggtctacatgttcctggtgaaatggcaggacttgtc

SEQ ID NO: 17254 - RNA, 83 nt, synthetic construct
  source 1..83: mol_type = other RNA
gcctctttggaggctgaatggggtcccccgactctggctttcccccaggtgtacatgttcctggtgaaatggcaggacttgtc

SEQ ID NO: 17255 - RNA, 83 nt, synthetic construct
  source 1..83: mol_type = other RNA
gcctctttggaggctgaatggggtcccccgactctggctttcccccaggtgtacatgttcctggtgaaatggcaggacttatc

SEQ ID NO: 17256 - RNA, 83 nt, synthetic construct
  source 1..83: mol_type = other RNA
gcctctttggaggctgaatggggtcccccgactctggctttcccccaggtatacatgttcctggtgaaatggcaggatttgtc

SEQ ID NO: 17257 - RNA, 83 nt, synthetic construct
  source 1..83: mol_type = other RNA
gcctctttggaggctgaatggggtcccccgactctggctttcccccaggtctacatgttcctggtgaaatggcaggatctgtc

SEQ ID NO: 17258 - RNA, 83 nt, synthetic construct
  source 1..83: mol_type = other RNA
gcctctttggaggctgaatggggtcccccgactctggctttcccccaggtctacatgttcctggtgaaatggcaggacttgtc

SEQ ID NO: 17259 - RNA, 83 nt, synthetic construct
  source 1..83: mol_type = other RNA
gcctctttggaggctgaatggggtcccccgactctggctttcccccaggtctacatgttcctggtgaaatggcaggacttatc

SEQ ID NO: 17260 - RNA, 83 nt, synthetic construct
  source 1..83: mol_type = other RNA
gcctctttggaggctgaatggggtcccccgactctggctttcccccaggtctacatgttcctggtgaaatggcaggacctgtc

SEQ ID NO: 17261 - RNA, 83 nt, synthetic construct
  source 1..83: mol_type = other RNA
gcctctttggaggctgaatggggtcccccgactctggctttcccccaggtatacatgttcctggtgaaatggcaggatttatc

SEQ ID NO: 17262 - RNA, 83 nt, synthetic construct
  source 1..83: mol_type = other RNA
gcctctttggaggctgaatggggtcccccgactctggctttcccccaggtgtacatgttcctggtgaaatggcaggatttatc

SEQ ID NO: 17263 - RNA, 83 nt, synthetic construct
  source 1..83: mol_type = other RNA
gcctctttggaggctgaatggggtcccccgactctggctttcccccaggtatacatgttcctggtgaaatggcaggatctgtc

SEQ ID NO: 17264 - RNA, 83 nt, synthetic construct
  source 1..83: mol_type = other RNA
gcctctttggaggctgaatggggtcccccgactctggctttcccccaggtatacatgttcctggtgaaatggcaggacttgtc

SEQ ID NO: 17265 - RNA, 83 nt, synthetic construct
  source 1..83: mol_type = other RNA
gcctctttggaggctgaatggggtcccccgactctggctttcccccaggtatacatgttcctggtgaaatggcaggacctgtc

SEQ ID NO: 17266 - RNA, 83 nt, synthetic construct
  source 1..83: mol_type = other RNA
gcctctttggaggctgaatggggtcccccgactctggctttcccccaggtctacatgttcctggtgaaatggcaggatttgtc

SEQ ID NO: 17267 - RNA, 83 nt, synthetic construct
  source 1..83: mol_type = other RNA
gcctctttggaggctgaatggggtcccccgactctggctttcccccaggtctacatgttcctggtgaaatggcaggatttatc

SEQ ID NO: 17268 - RNA, 83 nt, synthetic construct
  source 1..83: mol_type = other RNA
gcctctttggaggctgaatggggtcccccgactctggctttcccccaggtttacatgttcctggtgaaatggcaggacttatc

SEQ ID NO: 17269 - RNA, 83 nt, synthetic construct
  source 1..83: mol_type = other RNA
gcctctttggaggctgaatggggtcccccgactctggctttcccccaggtgtacatgttcctggtgaaatggcaggacctgtc

SEQ ID NO: 17270 - RNA, 83 nt, synthetic construct
  source 1..83: mol_type = other RNA
gcctctttggaggctgaatggggtcccccgactctggctttcccccaggtatacatgttcctggtgaaatggcaggacttatc

SEQ ID NO: 17271 - RNA, 83 nt, synthetic construct
  source 1..83: mol_type = other RNA
gcctctttggaggctgaatggggtcccccgactctggctttcccccaggtgtacatgttcctggtgaaatggcaggatttgtc

SEQ ID NO: 17272 - RNA, 83 nt, synthetic construct
  source 1..83: mol_type = other RNA
gcctctttggaggctgaatggggtcccccgactctggctttcccccaggtttacatgttcctggtgaaatggcaggacctgtc

SEQ ID NO: 17273 - RNA, 83 nt, synthetic construct
  source 1..83: mol_type = other RNA
gcctctttggaggctgaatggggtcccccgactctggctttcccccaggtttacatgttcctggtgaaatggcaggacttgtc

SEQ ID NO: 17274 - RNA, 83 nt, synthetic construct
  source 1..83: mol_type = other RNA
gcctctttggaggctgaatggggtcccccgactctggctttcccccaggtttacatgttcctggtgaaatggcaggatctgtc

SEQ ID NO: 17275 - RNA, 83 nt, synthetic construct
  source 1..83: mol_type = other RNA
gcctctttggaggctgaatggggtcccccgactctggctttcccccaggtttacatgttcctggtgaaatggcaggatttatc

SEQ ID NO: 17276 - RNA, 83 nt, synthetic construct
  source 1..83: mol_type = other RNA
gcctctttggaggctgaatggggtcccccgactctggctttcccccaggtttacatgttcctggtgaaatggcaggatttgtc

SEQ ID NO: 17277 - RNA, 83 nt, synthetic construct
  source 1..83: mol_type = other RNA
gcctctttggaggctgaatggggtcccccgactctggctttcccccaggtgtacatgttcctggtgaaatggcaggatctgtc

SEQ ID NO: 17278 - RNA, 84 nt, synthetic construct
  source 1..84: mol_type = other RNA
agcctctttggaggctgaatggggtcccccgactctggctttcccccaggtctacatgttcctggtgaaatggcaggatttgtc

SEQ ID NO: 17279 - RNA, 84 nt, synthetic construct
  source 1..84: mol_type = other RNA
agcctctttggaggctgaatggggtcccccgactctggctttcccccaggtctacatgttcctggtgaaatggcaggatttatc

SEQ ID NO: 17280 - RNA, 84 nt, synthetic construct
  source 1..84: mol_type = other RNA
agcctctttggaggctgaatggggtcccccgactctggctttcccccaggtctacatgttcctggtgaaatggcaggatctgtc

SEQ ID NO: 17281 - RNA, 84 nt, synthetic construct
  source 1..84: mol_type = other RNA
agcctctttggaggctgaatggggtcccccgactctggctttcccccaggtctacatgttcctggtgaaatggcaggacttatc

SEQ ID NO: 17282 - RNA, 84 nt, synthetic construct
  source 1..84: mol_type = other RNA
agcctctttggaggctgaatggggtcccccgactctggctttcccccaggtctacatgttcctggtgaaatggcaggacctgtc

SEQ ID NO: 17283 - RNA, 84 nt, synthetic construct
  source 1..84: mol_type = other RNA
agcctctttggaggctgaatggggtcccccgactctggctttcccccaggtatacatgttcctggtgaaatggcaggacttgtc

SEQ ID NO: 17284 - RNA, 84 nt, synthetic construct
  source 1..84: mol_type = other RNA
agcctctttggaggctgaatggggtcccccgactctggctttcccccaggtatacatgttcctggtgaaatggcaggatttatc

SEQ ID NO: 17285 - RNA, 84 nt, synthetic construct
  source 1..84: mol_type = other RNA
agcctctttggaggctgaatggggtcccccgactctggctttcccccaggtatacatgttcctggtgaaatggcaggacttatc

SEQ ID NO: 17286 - RNA, 84 nt, synthetic construct
  source 1..84: mol_type = other RNA
agcctctttggaggctgaatggggtcccccgactctggctttcccccaggtatacatgttcctggtgaaatggcaggacctgtc

SEQ ID NO: 17287 - RNA, 84 nt, synthetic construct
  source 1..84: mol_type = other RNA
agcctctttggaggctgaatggggtcccccgactctggctttcccccaggtgtacatgttcctggtgaaatggcaggatttgtc

SEQ ID NO: 17288 - RNA, 84 nt, synthetic construct
  source 1..84: mol_type = other RNA
agcctctttggaggctgaatggggtcccccgactctggctttcccccaggtttacatgttcctggtgaaatggcaggacctgtc

SEQ ID NO: 17289 - RNA, 84 nt, synthetic construct
  source 1..84: mol_type = other RNA
agcctctttggaggctgaatggggtcccccgactctggctttcccccaggtttacatgttcctggtgaaatggcaggacttgtc

SEQ ID NO: 17290 - RNA, 84 nt, synthetic construct
  source 1..84: mol_type = other RNA
agcctctttggaggctgaatggggtcccccgactctggctttcccccaggtttacatgttcctggtgaaatggcaggatctgtc

SEQ ID NO: 17291 - RNA, 84 nt, synthetic construct
  source 1..84: mol_type = other RNA
agcctctttggaggctgaatggggtcccccgactctggctttcccccaggtttacatgttcctggtgaaatggcaggatttatc

SEQ ID NO: 17292 - RNA, 84 nt, synthetic construct
  source 1..84: mol_type = other RNA
agcctctttggaggctgaatggggtcccccgactctggctttcccccaggtttacatgttcctggtgaaatggcaggatttgtc

SEQ ID NO: 17293 - RNA, 84 nt, synthetic construct
  source 1..84: mol_type = other RNA
agcctctttggaggctgaatggggtcccccgactctggctttcccccaggtttacatgttcctggtgaaatggcaggacttatc

SEQ ID NO: 17294 - RNA, 84 nt, synthetic construct
  source 1..84: mol_type = other RNA
agcctctttggaggctgaatggggtcccccgactctggctttcccccaggtctacatgttcctggtgaaatggcaggacttgtc

SEQ ID NO: 17295 - RNA, 84 nt, synthetic construct
  source 1..84: mol_type = other RNA
agcctctttggaggctgaatggggtcccccgactctggctttcccccaggtatacatgttcctggtgaaatggcaggatctgtc

SEQ ID NO: 17296 - RNA, 84 nt, synthetic construct
  source 1..84: mol_type = other RNA
agcctctttggaggctgaatggggtcccccgactctggctttcccccaggtgtacatgttcctggtgaaatggcaggacctgtc

SEQ ID NO: 17297 - RNA, 84 nt, synthetic construct
  source 1..84: mol_type = other RNA
agcctctttggaggctgaatggggtcccccgactctggctttcccccaggtgtacatgttcctggtgaaatggcaggacttatc

SEQ ID NO: 17298 - RNA, 84 nt, synthetic construct
  source 1..84: mol_type = other RNA
agcctctttggaggctgaatggggtcccccgactctggctttcccccaggtgtacatgttcctggtgaaatggcaggatctgtc

SEQ ID NO: 17299 - RNA, 84 nt, synthetic construct
  source 1..84: mol_type = other RNA
agcctctttggaggctgaatggggtcccccgactctggctttcccccaggtatacatgttcctggtgaaatggcaggatttgtc

SEQ ID NO: 17300 - RNA, 84 nt, synthetic construct
  source 1..84: mol_type = other RNA
agcctctttggaggctgaatggggtcccccgactctggctttcccccaggtgtacatgttcctggtgaaatggcaggatttatc

SEQ ID NO: 17301 - RNA, 84 nt, synthetic construct
  source 1..84: mol_type = other RNA
agcctctttggaggctgaatggggtcccccgactctggctttcccccaggtgtacatgttcctggtgaaatggcaggacttgtc

SEQ ID NO: 17302 - RNA, 85 nt, synthetic construct
  source 1..85: mol_type = other RNA
aagcctctttggaggctgaatggggtcccccgactctggctttcccccaggtttacatgttcctggtgaaatggcaggacttatc

SEQ ID NO: 17303 - RNA, 85 nt, synthetic construct
  source 1..85: mol_type = other RNA
aagcctctttggaggctgaatggggtcccccgactctggctttcccccaggtgtacatgttcctggtgaaatggcaggatttgtc

SEQ ID NO: 17304 - RNA, 85 nt, synthetic construct
  source 1..85: mol_type = other RNA
aagcctctttggaggctgaatggggtcccccgactctggctttcccccaggtgtacatgttcctggtgaaatggcaggatttatc

SEQ ID NO: 17305 - RNA, 85 nt, synthetic construct
  source 1..85: mol_type = other RNA
aagcctctttggaggctgaatggggtcccccgactctggctttcccccaggtgtacatgttcctggtgaaatggcaggatctgtc

SEQ ID NO: 17306 - RNA, 85 nt, synthetic construct
  source 1..85: mol_type = other RNA
aagcctctttggaggctgaatggggtcccccgactctggctttcccccaggtgtacatgttcctggtgaaatggcaggacttgtc

SEQ ID NO: 17307 - RNA, 85 nt, synthetic construct
  source 1..85: mol_type = other RNA
aagcctctttggaggctgaatggggtcccccgactctggctttcccccaggtgtacatgttcctggtgaaatggcaggacttatc

SEQ ID NO: 17308 - RNA, 85 nt, synthetic construct
  source 1..85: mol_type = other RNA
aagcctctttggaggctgaatggggtcccccgactctggctttcccccaggtttacatgttcctggtgaaatggcaggatctgtc

SEQ ID NO: 17309 - RNA, 85 nt, synthetic construct
  source 1..85: mol_type = other RNA
aagcctctttggaggctgaatggggtcccccgactctggctttcccccaggtttacatgttcctggtgaaatggcaggacctgtc

SEQ ID NO: 17310 - RNA, 85 nt, synthetic construct
  source 1..85: mol_type = other RNA
aagcctctttggaggctgaatggggtcccccgactctggctttcccccaggtctacatgttcctggtgaaatggcaggatttatc

SEQ ID NO: 17311 - RNA, 85 nt, synthetic construct
  source 1..85: mol_type = other RNA
aagcctctttggaggctgaatggggtcccccgactctggctttcccccaggtatacatgttcctggtgaaatggcaggatctgtc

SEQ ID NO: 17312 - RNA, 85 nt, synthetic construct
  source 1..85: mol_type = other RNA
aagcctctttggaggctgaatggggtcccccgactctggctttcccccaggtctacatgttcctggtgaaatggcaggatctgtc

SEQ ID NO: 17313 - RNA, 85 nt, synthetic construct
  source 1..85: mol_type = other RNA
aagcctctttggaggctgaatggggtcccccgactctggctttcccccaggtctacatgttcctggtgaaatggcaggatttgtc

SEQ ID NO: 17314 - RNA, 85 nt, synthetic construct
  source 1..85: mol_type = other RNA
aagcctctttggaggctgaatggggtcccccgactctggctttcccccaggtatacatgttcctggtgaaatggcaggacctgtc

SEQ ID NO: 17315 - RNA, 85 nt, synthetic construct
  source 1..85: mol_type = other RNA
aagcctctttggaggctgaatggggtcccccgactctggctttcccccaggtatacatgttcctggtgaaatggcaggacttatc

SEQ ID NO: 17316 - RNA, 85 nt, synthetic construct
  source 1..85: mol_type = other RNA
aagcctctttggaggctgaatggggtcccccgactctggctttcccccaggtatacatgttcctggtgaaatggcaggacttgtc

SEQ ID NO: 17317 - RNA, 85 nt, synthetic construct
  source 1..85: mol_type = other RNA
aagcctctttggaggctgaatggggtcccccgactctggctttcccccaggtgtacatgttcctggtgaaatggcaggacctgtc

SEQ ID NO: 17318 - RNA, 85 nt, synthetic construct
  source 1..85: mol_type = other RNA
aagcctctttggaggctgaatggggtcccccgactctggctttcccccaggtatacatgttcctggtgaaatggcaggatttatc

SEQ ID NO: 17319 - RNA, 85 nt, synthetic construct
  source 1..85: mol_type = other RNA
aagcctctttggaggctgaatggggtcccccgactctggctttcccccaggtctacatgttcctggtgaaatggcaggacctgtc

SEQ ID NO: 17320 - RNA, 85 nt, synthetic construct
  source 1..85: mol_type = other RNA
aagcctctttggaggctgaatggggtcccccgactctggctttcccccaggtctacatgttcctggtgaaatggcaggacttatc

SEQ ID NO: 17321 - RNA, 85 nt, synthetic construct
  source 1..85: mol_type = other RNA
aagcctctttggaggctgaatggggtcccccgactctggctttcccccaggtctacatgttcctggtgaaatggcaggacttgtc

SEQ ID NO: 17322 - RNA, 85 nt, synthetic construct
  source 1..85: mol_type = other RNA
aagcctctttggaggctgaatggggtcccccgactctggctttcccccaggtatacatgttcctggtgaaatggcaggatttgtc

SEQ ID NO: 17323 - RNA, 85 nt, synthetic construct
  source 1..85: mol_type = other RNA
aagcctctttggaggctgaatggggtcccccgactctggctttcccccaggtttacatgttcctggtgaaatggcaggacttgtc

SEQ ID NO: 17324 - RNA, 85 nt, synthetic construct
  source 1..85: mol_type = other RNA
aagcctctttggaggctgaatggggtcccccgactctggctttcccccaggtttacatgttcctggtgaaatggcaggatttatc

SEQ ID NO: 17325 - RNA, 85 nt, synthetic construct
  source 1..85: mol_type = other RNA
aagcctctttggaggctgaatggggtcccccgactctggctttcccccaggtttacatgttcctggtgaaatggcaggatttgtc

SEQ ID NO: 17326 - RNA, 86 nt, synthetic construct
  source 1..86: mol_type = other RNA
aaagcctctttggaggctgaatggggtcccccgactctggctttcccccaggtttacatgttcctggtgaaatggcaggatttgtc

SEQ ID NO: 17327 - RNA, 86 nt, synthetic construct
  source 1..86: mol_type = other RNA
aaagcctctttggaggctgaatggggtcccccgactctggctttcccccaggtctacatgttcctggtgaaatggcaggatctgtc

SEQ ID NO: 17328 - RNA, 86 nt, synthetic construct
  source 1..86: mol_type = other RNA
aaagcctctttggaggctgaatggggtcccccgactctggctttcccccaggtttacatgttcctggtgaaatggcaggatctgtc

SEQ ID NO: 17329 - RNA, 86 nt, synthetic construct
  source 1..86: mol_type = other RNA
aaagcctctttggaggctgaatggggtcccccgactctggctttcccccaggtctacatgttcctggtgaaatggcaggatttgtc

SEQ ID NO: 17330 - RNA, 86 nt, synthetic construct
  source 1..86: mol_type = other RNA
aaagcctctttggaggctgaatggggtcccccgactctggctttcccccaggtgtacatgttcctggtgaaatggcaggacctgtc

SEQ ID NO: 17331 - RNA, 86 nt, synthetic construct
  source 1..86: mol_type = other RNA
aaagcctctttggaggctgaatggggtcccccgactctggctttcccccaggtatacatgttcctggtgaaatggcaggacctgtc

SEQ ID NO: 17332 - RNA, 86 nt, synthetic construct
  source 1..86: mol_type = other RNA
aaagcctctttggaggctgaatggggtcccccgactctggctttcccccaggtgtacatgttcctggtgaaatggcaggacttgtc

SEQ ID NO: 17333 - RNA, 86 nt, synthetic construct
  source 1..86: mol_type = other RNA
aaagcctctttggaggctgaatggggtcccccgactctggctttcccccaggtgtacatgttcctggtgaaatggcaggatctgtc

SEQ ID NO: 17334 - RNA, 86 nt, synthetic construct
  source 1..86: mol_type = other RNA
aaagcctctttggaggctgaatggggtcccccgactctggctttcccccaggtgtacatgttcctggtgaaatggcaggatttatc

SEQ ID NO: 17335 - RNA, 86 nt, synthetic construct
  source 1..86: mol_type = other RNA
aaagcctctttggaggctgaatggggtcccccgactctggctttcccccaggtgtacatgttcctggtgaaatggcaggatttgtc

SEQ ID NO: 17336 - RNA, 86 nt, synthetic construct
  source 1..86: mol_type = other RNA
aaagcctctttggaggctgaatggggtcccccgactctggctttcccccaggtttacatgttcctggtgaaatggcaggatttatc

SEQ ID NO: 17337 - RNA, 86 nt, synthetic construct
  source 1..86: mol_type = other RNA
aaagcctctttggaggctgaatggggtcccccgactctggctttcccccaggtttacatgttcctggtgaaatggcaggacttatc

SEQ ID NO: 17338 - RNA, 86 nt, synthetic construct
  source 1..86: mol_type = other RNA
aaagcctctttggaggctgaatggggtcccccgactctggctttcccccaggtttacatgttcctggtgaaatggcaggacttgtc

SEQ ID NO: 17339 - RNA, 86 nt, synthetic construct
  source 1..86: mol_type = other RNA
aaagcctctttggaggctgaatggggtcccccgactctggctttcccccaggtgtacatgttcctggtgaaatggcaggacttatc

SEQ ID NO: 17340 - RNA, 86 nt, synthetic construct
  source 1..86: mol_type = other RNA
aaagcctctttggaggctgaatggggtcccccgactctggctttcccccaggtttacatgttcctggtgaaatggcaggacctgtc

SEQ ID NO: 17341 - RNA, 86 nt, synthetic construct
  source 1..86: mol_type = other RNA
aaagcctctttggaggctgaatggggtcccccgactctggctttcccccaggtctacatgttcctggtgaaatggcaggacctgtc

SEQ ID NO: 17342 - RNA, 86 nt, synthetic construct
  source 1..86: mol_type = other RNA
aaagcctctttggaggctgaatggggtcccccgactctggctttcccccaggtatacatgttcctggtgaaatggcaggatttatc

SEQ ID NO: 17343 - RNA, 86 nt, synthetic construct
  source 1..86: mol_type = other RNA
aaagcctctttggaggctgaatggggtcccccgactctggctttcccccaggtctacatgttcctggtgaaatggcaggatttatc

SEQ ID NO: 17344 - RNA, 86 nt, synthetic construct
  source 1..86: mol_type = other RNA
aaagcctctttggaggctgaatggggtcccccgactctggctttcccccaggtatacatgttcctggtgaaatggcaggacttgtc

SEQ ID NO: 17345 - RNA, 86 nt, synthetic construct
  source 1..86: mol_type = other RNA
aaagcctctttggaggctgaatggggtcccccgactctggctttcccccaggtatacatgttcctggtgaaatggcaggatctgtc

SEQ ID NO: 17346 - RNA, 86 nt, synthetic construct
  source 1..86: mol_type = other RNA
aaagcctctttggaggctgaatggggtcccccgactctggctttcccccaggtatacatgttcctggtgaaatggcaggacttatc

SEQ ID NO: 17347 - RNA, 86 nt, synthetic construct
  source 1..86: mol_type = other RNA
aaagcctctttggaggctgaatggggtcccccgactctggctttcccccaggtatacatgttcctggtgaaatggcaggatttgtc

SEQ ID NO: 17348 - RNA, 86 nt, synthetic construct
  source 1..86: mol_type = other RNA
aaagcctctttggaggctgaatggggtcccccgactctggctttcccccaggtctacatgttcctggtgaaatggcaggacttatc

SEQ ID NO: 17349 - RNA, 86 nt, synthetic construct
  source 1..86: mol_type = other RNA
aaagcctctttggaggctgaatggggtcccccgactctggctttcccccaggtctacatgttcctggtgaaatggcaggacttgtc

SEQ ID NO: 17350 - RNA, 87 nt, synthetic construct
  source 1..87: mol_type = other RNA
caaagcctctttggaggctgaatggggtcccccgactctggctttcccccaggtttacatgttcctggtgaaatggcaggatttatc

SEQ ID NO: 17351 - RNA, 87 nt, synthetic construct
  source 1..87: mol_type = other RNA
caaagcctctttggaggctgaatggggtcccccgactctggctttcccccaggtatacatgttcctggtgaaatggcaggacctgtc

SEQ ID NO: 17352 - RNA, 87 nt, synthetic construct
  source 1..87: mol_type = other RNA
caaagcctctttggaggctgaatggggtcccccgactctggctttcccccaggtatacatgttcctggtgaaatggcaggacttgtc

SEQ ID NO: 17353 - RNA, 87 nt, synthetic construct
  source 1..87: mol_type = other RNA
caaagcctctttggaggctgaatggggtcccccgactctggctttcccccaggtttacatgttcctggtgaaatggcaggatttgtc

SEQ ID NO: 17354 - RNA, 87 nt, synthetic construct
  source 1..87: mol_type = other RNA
caaagcctctttggaggctgaatggggtcccccgactctggctttcccccaggtgtacatgttcctggtgaaatggcaggatttatc

SEQ ID NO: 17355 - RNA, 87 nt, synthetic construct
  source 1..87: mol_type = other RNA
caaagcctctttggaggctgaatggggtcccccgactctggctttcccccaggtttacatgttcctggtgaaatggcaggatctgtc

SEQ ID NO: 17356 - RNA, 87 nt, synthetic construct
  source 1..87: mol_type = other RNA
caaagcctctttggaggctgaatggggtcccccgactctggctttcccccaggtttacatgttcctggtgaaatggcaggacctgtc

SEQ ID NO: 17357 - RNA, 87 nt, synthetic construct
  source 1..87: mol_type = other RNA
caaagcctctttggaggctgaatggggtcccccgactctggctttcccccaggtctacatgttcctggtgaaatggcaggatctgtc

SEQ ID NO: 17358 - RNA, 87 nt, synthetic construct
  source 1..87: mol_type = other RNA
caaagcctctttggaggctgaatggggtcccccgactctggctttcccccaggtttacatgttcctggtgaaatggcaggacttgtc

SEQ ID NO: 17359 - RNA, 87 nt, synthetic construct
  source 1..87: mol_type = other RNA
caaagcctctttggaggctgaatggggtcccccgactctggctttcccccaggtttacatgttcctggtgaaatggcaggacttatc

SEQ ID NO: 17360 - RNA, 87 nt, synthetic construct
  source 1..87: mol_type = other RNA
caaagcctctttggaggctgaatggggtcccccgactctggctttcccccaggtgtacatgttcctggtgaaatggcaggatttgtc

SEQ ID NO: 17361 - RNA, 87 nt, synthetic construct
  source 1..87: mol_type = other RNA
caaagcctctttggaggctgaatggggtcccccgactctggctttcccccaggtgtacatgttcctggtgaaatggcaggatctgtc

SEQ ID NO: 17362 - RNA, 87 nt, synthetic construct
  source 1..87: mol_type = other RNA
caaagcctctttggaggctgaatggggtcccccgactctggctttcccccaggtgtacatgttcctggtgaaatggcaggacttgtc

SEQ ID NO: 17363 - RNA, 87 nt, synthetic construct
  source 1..87: mol_type = other RNA
caaagcctctttggaggctgaatggggtcccccgactctggctttcccccaggtgtacatgttcctggtgaaatggcaggacttatc

SEQ ID NO: 17364 - RNA, 87 nt, synthetic construct
  source 1..87: mol_type = other RNA
caaagcctctttggaggctgaatggggtcccccgactctggctttcccccaggtctacatgttcctggtgaaatggcaggatttgtc

SEQ ID NO: 17365 - RNA, 87 nt, synthetic construct
  source 1..87: mol_type = other RNA
caaagcctctttggaggctgaatggggtcccccgactctggctttcccccaggtgtacatgttcctggtgaaatggcaggacctgtc

SEQ ID NO: 17366 - RNA, 87 nt, synthetic construct
  source 1..87: mol_type = other RNA
caaagcctctttggaggctgaatggggtcccccgactctggctttcccccaggtctacatgttcctggtgaaatggcaggacttgtc

SEQ ID NO: 17367 - RNA, 87 nt, synthetic construct
  source 1..87: mol_type = other RNA
caaagcctctttggaggctgaatggggtcccccgactctggctttcccccaggtctacatgttcctggtgaaatggcaggatttatc

SEQ ID NO: 17368 - RNA, 87 nt, synthetic construct
  source 1..87: mol_type = other RNA
caaagcctctttggaggctgaatggggtcccccgactctggctttcccccaggtctacatgttcctggtgaaatggcaggacttatc

SEQ ID NO: 17369 - RNA, 87 nt, synthetic construct
  source 1..87: mol_type = other RNA
caaagcctctttggaggctgaatggggtcccccgactctggctttcccccaggtctacatgttcctggtgaaatggcaggacctgtc

SEQ ID NO: 17370 - RNA, 87 nt, synthetic construct
  source 1..87: mol_type = other RNA
caaagcctctttggaggctgaatggggtcccccgactctggctttcccccaggtatacatgttcctggtgaaatggcaggatttgtc

SEQ ID NO: 17371 - RNA, 87 nt, synthetic construct
  source 1..87: mol_type = other RNA
caaagcctctttggaggctgaatggggtcccccgactctggctttcccccaggtatacatgttcctggtgaaatggcaggatttatc

SEQ ID NO: 17372 - RNA, 87 nt, synthetic construct
  source 1..87: mol_type = other RNA
caaagcctctttggaggctgaatggggtcccccgactctggctttcccccaggtatacatgttcctggtgaaatggcaggatctgtc

SEQ ID NO: 17373 - RNA, 87 nt, synthetic construct
  source 1..87: mol_type = other RNA
caaagcctctttggaggctgaatggggtcccccgactctggctttcccccaggtatacatgttcctggtgaaatggcaggacttatc

SEQ ID NO: 17374 - RNA, 88 nt, synthetic construct
  source 1..88: mol_type = other RNA
gcaaagcctctttggaggctgaatggggtcccccgactctggctttcccccaggtatacatgttcctggtgaaatggcaggacctgtc

SEQ ID NO: 17375 - RNA, 88 nt, synthetic construct
  source 1..88: mol_type = other RNA
gcaaagcctctttggaggctgaatggggtcccccgactctggctttcccccaggtatacatgttcctggtgaaatggcaggacttgtc

SEQ ID NO: 17376 - RNA, 88 nt, synthetic construct
  source 1..88: mol_type = other RNA
gcaaagcctctttggaggctgaatggggtcccccgactctggctttcccccaggtatacatgttcctggtgaaatggcaggatctgtc

SEQ ID NO: 17377 - RNA, 88 nt, synthetic construct
  source 1..88: mol_type = other RNA
gcaaagcctctttggaggctgaatggggtcccccgactctggctttcccccaggtatacatgttcctggtgaaatggcaggatttgtc

SEQ ID NO: 17378 - RNA, 88 nt, synthetic construct
  source 1..88: mol_type = other RNA
gcaaagcctctttggaggctgaatggggtcccccgactctggctttcccccaggtctacatgttcctggtgaaatggcaggacctgtc

SEQ ID NO: 17379 - RNA, 88 nt, synthetic construct
  source 1..88: mol_type = other RNA
gcaaagcctctttggaggctgaatggggtcccccgactctggctttcccccaggtctacatgttcctggtgaaatggcaggacttatc

SEQ ID NO: 17380 - RNA, 88 nt, synthetic construct
  source 1..88: mol_type = other RNA
gcaaagcctctttggaggctgaatggggtcccccgactctggctttcccccaggtctacatgttcctggtgaaatggcaggacttgtc

SEQ ID NO: 17381 - RNA, 88 nt, synthetic construct
  source 1..88: mol_type = other RNA
gcaaagcctctttggaggctgaatggggtcccccgactctggctttcccccaggtctacatgttcctggtgaaatggcaggatctgtc

SEQ ID NO: 17382 - RNA, 88 nt, synthetic construct
  source 1..88: mol_type = other RNA
gcaaagcctctttggaggctgaatggggtcccccgactctggctttcccccaggtatacatgttcctggtgaaatggcaggatttatc

SEQ ID NO: 17383 - RNA, 88 nt, synthetic construct
  source 1..88: mol_type = other RNA
gcaaagcctctttggaggctgaatggggtcccccgactctggctttcccccaggtctacatgttcctggtgaaatggcaggatttatc

SEQ ID NO: 17384 - RNA, 88 nt, synthetic construct
  source 1..88: mol_type = other RNA
gcaaagcctctttggaggctgaatggggtcccccgactctggctttcccccaggtatacatgttcctggtgaaatggcaggacttatc

SEQ ID NO: 17385 - RNA, 88 nt, synthetic construct
  source 1..88: mol_type = other RNA
gcaaagcctctttggaggctgaatggggtcccccgactctggctttcccccaggtgtacatgttcctggtgaaatggcaggacctgtc

SEQ ID NO: 17386 - RNA, 88 nt, synthetic construct
  source 1..88: mol_type = other RNA
gcaaagcctctttggaggctgaatggggtcccccgactctggctttcccccaggtttacatgttcctggtgaaatggcaggacttatc

SEQ ID NO: 17387 - RNA, 88 nt, synthetic construct
  source 1..88: mol_type = other RNA
gcaaagcctctttggaggctgaatggggtcccccgactctggctttcccccaggtgtacatgttcctggtgaaatggcaggacttatc

SEQ ID NO: 17388 - RNA, 88 nt, synthetic construct
  source 1..88: mol_type = other RNA
gcaaagcctctttggaggctgaatggggtcccccgactctggctttcccccaggtttacatgttcctggtgaaatggcaggatttgtc

SEQ ID NO: 17389 - RNA, 88 nt, synthetic construct
  source 1..88: mol_type = other RNA
gcaaagcctctttggaggctgaatggggtcccccgactctggctttcccccaggtttacatgttcctggtgaaatggcaggatttatc

SEQ ID NO: 17390 - RNA, 88 nt, synthetic construct
  source 1..88: mol_type = other RNA
gcaaagcctctttggaggctgaatggggtcccccgactctggctttcccccaggtttacatgttcctggtgaaatggcaggatctgtc

SEQ ID NO: 17391 - RNA, 88 nt, synthetic construct
  source 1..88: mol_type = other RNA
gcaaagcctctttggaggctgaatggggtcccccgactctggctttcccccaggtttacatgttcctggtgaaatggcaggacttgtc

SEQ ID NO: 17392 - RNA, 88 nt, synthetic construct
  source 1..88: mol_type = other RNA
gcaaagcctctttggaggctgaatggggtcccccgactctggctttcccccaggtctacatgttcctggtgaaatggcaggatttgtc

SEQ ID NO: 17393 - RNA, 88 nt, synthetic construct
  source 1..88: mol_type = other RNA
gcaaagcctctttggaggctgaatggggtcccccgactctggctttcccccaggtgtacatgttcctggtgaaatggcaggatctgtc

SEQ ID NO: 17394 - RNA, 88 nt, synthetic construct
  source 1..88: mol_type = other RNA
gcaaagcctctttggaggctgaatggggtcccccgactctggctttcccccaggtgtacatgttcctggtgaaatggcaggatttatc

SEQ ID NO: 17395 - RNA, 88 nt, synthetic construct
  source 1..88: mol_type = other RNA
gcaaagcctctttggaggctgaatggggtcccccgactctggctttcccccaggtgtacatgttcctggtgaaatggcaggacttgtc

SEQ ID NO: 17396 - RNA, 88 nt, synthetic construct
  source 1..88: mol_type = other RNA
gcaaagcctctttggaggctgaatggggtcccccgactctggctttcccccaggtgtacatgttcctggtgaaatggcaggatttgtc

SEQ ID NO: 17397 - RNA, 88 nt, synthetic construct
  source 1..88: mol_type = other RNA
gcaaagcctctttggaggctgaatggggtcccccgactctggctttcccccaggtttacatgttcctggtgaaatggcaggacctgtc

SEQ ID NO: 17398 - RNA, 89 nt, synthetic construct
  source 1..89: mol_type = other RNA
agcaaagcctctttggaggctgaatggggtcccccgactctggctttcccccaggtatacatgttcctggtgaaatggcaggacctgtc

SEQ ID NO: 17399 - RNA, 89 nt, synthetic construct
  source 1..89: mol_type = other RNA
agcaaagcctctttggaggctgaatggggtcccccgactctggctttcccccaggtttacatgttcctggtgaaatggcaggatctgtc

SEQ ID NO: 17400 - RNA, 89 nt, synthetic construct
  source 1..89: mol_type = other RNA
agcaaagcctctttggaggctgaatggggtcccccgactctggctttcccccaggtctacatgttcctggtgaaatggcaggatctgtc

SEQ ID NO: 17401 - RNA, 89 nt, synthetic construct
  source 1..89: mol_type = other RNA
agcaaagcctctttggaggctgaatggggtcccccgactctggctttcccccaggtttacatgttcctggtgaaatggcaggatttgtc

SEQ ID NO: 17402 - RNA, 89 nt, synthetic construct
  source 1..89: mol_type = other RNA
agcaaagcctctttggaggctgaatggggtcccccgactctggctttcccccaggtatacatgttcctggtgaaatggcaggatttatc

SEQ ID NO: 17403 - RNA, 89 nt, synthetic construct
  source 1..89: mol_type = other RNA
agcaaagcctctttggaggctgaatggggtcccccgactctggctttcccccaggtttacatgttcctggtgaaatggcaggacttatc

SEQ ID NO: 17404 - RNA, 89 nt, synthetic construct
  source 1..89: mol_type = other RNA
agcaaagcctctttggaggctgaatggggtcccccgactctggctttcccccaggtatacatgttcctggtgaaatggcaggacttatc

SEQ ID NO: 17405 - RNA, 89 nt, synthetic construct
  source 1..89: mol_type = other RNA
agcaaagcctctttggaggctgaatggggtcccccgactctggctttcccccaggtttacatgttcctggtgaaatggcaggacctgtc

SEQ ID NO: 17406 - RNA, 89 nt, synthetic construct
  source 1..89: mol_type = other RNA
agcaaagcctctttggaggctgaatggggtcccccgactctggctttcccccaggtatacatgttcctggtgaaatggcaggatctgtc

SEQ ID NO: 17407 - RNA, 89 nt, synthetic construct
  source 1..89: mol_type = other RNA
agcaaagcctctttggaggctgaatggggtcccccgactctggctttcccccaggtgtacatgttcctggtgaaatggcaggatttgtc

SEQ ID NO: 17408 - RNA, 89 nt, synthetic construct
  source 1..89: mol_type = other RNA
agcaaagcctctttggaggctgaatggggtcccccgactctggctttcccccaggtctacatgttcctggtgaaatggcaggacctgtc

SEQ ID NO: 17409 - RNA, 89 nt, synthetic construct
  source 1..89: mol_type = other RNA
agcaaagcctctttggaggctgaatggggtcccccgactctggctttcccccaggtgtacatgttcctggtgaaatggcaggatctgtc

SEQ ID NO: 17410 - RNA, 89 nt, synthetic construct
  source 1..89: mol_type = other RNA
agcaaagcctctttggaggctgaatggggtcccccgactctggctttcccccaggtgtacatgttcctggtgaaatggcaggatttatc

SEQ ID NO: 17411 - RNA, 89 nt, synthetic construct
  source 1..89: mol_type = other RNA
agcaaagcctctttggaggctgaatggggtcccccgactctggctttcccccaggtctacatgttcctggtgaaatggcaggatttgtc

SEQ ID NO: 17412 - RNA, 89 nt, synthetic construct
  source 1..89: mol_type = other RNA
agcaaagcctctttggaggctgaatggggtcccccgactctggctttcccccaggtttacatgttcctggtgaaatggcaggacttgtc

SEQ ID NO: 17413 - RNA, 89 nt, synthetic construct
  source 1..89: mol_type = other RNA
agcaaagcctctttggaggctgaatggggtcccccgactctggctttcccccaggtgtacatgttcctggtgaaatggcaggacttgtc

SEQ ID NO: 17414 - RNA, 89 nt, synthetic construct
  source 1..89: mol_type = other RNA
agcaaagcctctttggaggctgaatggggtcccccgactctggctttcccccaggtgtacatgttcctggtgaaatggcaggacttatc

SEQ ID NO: 17415 - RNA, 89 nt, synthetic construct
  source 1..89: mol_type = other RNA
agcaaagcctctttggaggctgaatggggtcccccgactctggctttcccccaggtgtacatgttcctggtgaaatggcaggacctgtc

SEQ ID NO: 17416 - RNA, 89 nt, synthetic construct
  source 1..89: mol_type = other RNA
agcaaagcctctttggaggctgaatggggtcccccgactctggctttcccccaggtttacatgttcctggtgaaatggcaggatttatc

SEQ ID NO: 17417 - RNA, 89 nt, synthetic construct
  source 1..89: mol_type = other RNA
agcaaagcctctttggaggctgaatggggtcccccgactctggctttcccccaggtctacatgttcctggtgaaatggcaggacttgtc

SEQ ID NO: 17418 - RNA, 89 nt, synthetic construct
  source 1..89: mol_type = other RNA
agcaaagcctctttggaggctgaatggggtcccccgactctggctttcccccaggtctacatgttcctggtgaaatggcaggacttatc

SEQ ID NO: 17419 - RNA, 89 nt, synthetic construct
  source 1..89: mol_type = other RNA
agcaaagcctctttggaggctgaatggggtcccccgactctggctttcccccaggtctacatgttcctggtgaaatggcaggatttatc

SEQ ID NO: 17420 - RNA, 89 nt, synthetic construct
  source 1..89: mol_type = other RNA
agcaaagcctctttggaggctgaatggggtcccccgactctggctttcccccaggtatacatgttcctggtgaaatggcaggatttgtc

SEQ ID NO: 17421 - RNA, 89 nt, synthetic construct
  source 1..89: mol_type = other RNA
agcaaagcctctttggaggctgaatggggtcccccgactctggctttcccccaggtatacatgttcctggtgaaatggcaggacttgtc

SEQ ID NO: 17422 - RNA, 90 nt, synthetic construct
  source 1..90: mol_type = other RNA
cagcaaagcctctttggaggctgaatggggtcccccgactctggctttcccccaggtatacatgttcctggtgaaatggcaggatctgtc

SEQ ID NO: 17423 - RNA, 90 nt, synthetic construct
  source 1..90: mol_type = other RNA
cagcaaagcctctttggaggctgaatggggtcccccgactctggctttcccccaggtatacatgttcctggtgaaatggcaggatttgtc

SEQ ID NO: 17424 - RNA, 90 nt, synthetic construct
  source 1..90: mol_type = other RNA
cagcaaagcctctttggaggctgaatggggtcccccgactctggctttcccccaggtatacatgttcctggtgaaatggcaggacttatc

SEQ ID NO: 17425 - RNA, 90 nt, synthetic construct
  source 1..90: mol_type = other RNA
cagcaaagcctctttggaggctgaatggggtcccccgactctggctttcccccaggtctacatgttcctggtgaaatggcaggacttatc

SEQ ID NO: 17426 - RNA, 90 nt, synthetic construct
  source 1..90: mol_type = other RNA
cagcaaagcctctttggaggctgaatggggtcccccgactctggctttcccccaggtctacatgttcctggtgaaatggcaggacttgtc

SEQ ID NO: 17427 - RNA, 90 nt, synthetic construct
  source 1..90: mol_type = other RNA
cagcaaagcctctttggaggctgaatggggtcccccgactctggctttcccccaggtctacatgttcctggtgaaatggcaggatttatc

SEQ ID NO: 17428 - RNA, 90 nt, synthetic construct
  source 1..90: mol_type = other RNA
cagcaaagcctctttggaggctgaatggggtcccccgactctggctttcccccaggtctacatgttcctggtgaaatggcaggacctgtc

SEQ ID NO: 17429 - RNA, 90 nt, synthetic construct
  source 1..90: mol_type = other RNA
cagcaaagcctctttggaggctgaatggggtcccccgactctggctttcccccaggtatacatgttcctggtgaaatggcaggatttatc

SEQ ID NO: 17430 - RNA, 90 nt, synthetic construct
  source 1..90: mol_type = other RNA
cagcaaagcctctttggaggctgaatggggtcccccgactctggctttcccccaggtttacatgttcctggtgaaatggcaggatttatc

SEQ ID NO: 17431 - RNA, 90 nt, synthetic construct
  source 1..90: mol_type = other RNA
cagcaaagcctctttggaggctgaatggggtcccccgactctggctttcccccaggtatacatgttcctggtgaaatggcaggacttgtc

SEQ ID NO: 17432 - RNA, 90 nt, synthetic construct
  source 1..90: mol_type = other RNA
cagcaaagcctctttggaggctgaatggggtcccccgactctggctttcccccaggtgtacatgttcctggtgaaatggcaggacctgtc

SEQ ID NO: 17433 - RNA, 90 nt, synthetic construct
  source 1..90: mol_type = other RNA
cagcaaagcctctttggaggctgaatggggtcccccgactctggctttcccccaggtgtacatgttcctggtgaaatggcaggatttgtc

SEQ ID NO: 17434 - RNA, 90 nt, synthetic construct
  source 1..90: mol_type = other RNA
cagcaaagcctctttggaggctgaatggggtcccccgactctggctttcccccaggtctacatgttcctggtgaaatggcaggatttgtc

SEQ ID NO: 17435 - RNA, 90 nt, synthetic construct
  source 1..90: mol_type = other RNA
cagcaaagcctctttggaggctgaatggggtcccccgactctggctttcccccaggtgtacatgttcctggtgaaatggcaggacttatc

SEQ ID NO: 17436 - RNA, 90 nt, synthetic construct
  source 1..90: mol_type = other RNA
cagcaaagcctctttggaggctgaatggggtcccccgactctggctttcccccaggtctacatgttcctggtgaaatggcaggatctgtc

SEQ ID NO: 17437 - RNA, 90 nt, synthetic construct
  source 1..90: mol_type = other RNA
cagcaaagcctctttggaggctgaatggggtcccccgactctggctttcccccaggtatacatgttcctggtgaaatggcaggacctgtc

SEQ ID NO: 17438 - RNA, 90 nt, synthetic construct
  source 1..90: mol_type = other RNA
cagcaaagcctctttggaggctgaatggggtcccccgactctggctttcccccaggtttacatgttcctggtgaaatggcaggatttgtc

SEQ ID NO: 17439 - RNA, 90 nt, synthetic construct
  source 1..90: mol_type = other RNA
cagcaaagcctctttggaggctgaatggggtcccccgactctggctttcccccaggtttacatgttcctggtgaaatggcaggatctgtc

SEQ ID NO: 17440 - RNA, 90 nt, synthetic construct
  source 1..90: mol_type = other RNA
cagcaaagcctctttggaggctgaatggggtcccccgactctggctttcccccaggtttacatgttcctggtgaaatggcaggacttgtc

SEQ ID NO: 17441 - RNA, 90 nt, synthetic construct
  source 1..90: mol_type = other RNA
cagcaaagcctctttggaggctgaatggggtcccccgactctggctttcccccaggtttacatgttcctggtgaaatggcaggacttatc

SEQ ID NO: 17442 - RNA, 90 nt, synthetic construct
  source 1..90: mol_type = other RNA
cagcaaagcctctttggaggctgaatggggtcccccgactctggctttcccccaggtttacatgttcctggtgaaatggcaggacctgtc

SEQ ID NO: 17443 - RNA, 90 nt, synthetic construct
  source 1..90: mol_type = other RNA
cagcaaagcctctttggaggctgaatggggtcccccgactctggctttcccccaggtgtacatgttcctggtgaaatggcaggatttatc

SEQ ID NO: 17444 - RNA, 90 nt, synthetic construct
  source 1..90: mol_type = other RNA
cagcaaagcctctttggaggctgaatggggtcccccgactctggctttcccccaggtgtacatgttcctggtgaaatggcaggatctgtc

SEQ ID NO: 17445 - RNA, 90 nt, synthetic construct
  source 1..90: mol_type = other RNA
cagcaaagcctctttggaggctgaatggggtcccccgactctggctttcccccaggtgtacatgttcctggtgaaatggcaggacttgtc

SEQ ID NO: 17446 - RNA, 91 nt, synthetic construct
  source 1..91: mol_type = other RNA
acagcaaagcctctttggaggctgaatggggtcccccgactctggctttcccccaggtgtacatgttcctggtgaaatggcaggacctgtc

SEQ ID NO: 17447 - RNA, 91 nt, synthetic construct
  source 1..91: mol_type = other RNA
acagcaaagcctctttggaggctgaatggggtcccccgactctggctttcccccaggtatacatgttcctggtgaaatggcaggatctgtc

SEQ ID NO: 17448 - RNA, 91 nt, synthetic construct
  source 1..91: mol_type = other RNA
acagcaaagcctctttggaggctgaatggggtcccccgactctggctttcccccaggtatacatgttcctggtgaaatggcaggacctgtc

SEQ ID NO: 17449 - RNA, 91 nt, synthetic construct
  source 1..91: mol_type = other RNA
acagcaaagcctctttggaggctgaatggggtcccccgactctggctttcccccaggtctacatgttcctggtgaaatggcaggatttgtc

SEQ ID NO: 17450 - RNA, 91 nt, synthetic construct
  source 1..91: mol_type = other RNA
acagcaaagcctctttggaggctgaatggggtcccccgactctggctttcccccaggtatacatgttcctggtgaaatggcaggacttatc

SEQ ID NO: 17451 - RNA, 91 nt, synthetic construct
  source 1..91: mol_type = other RNA
acagcaaagcctctttggaggctgaatggggtcccccgactctggctttcccccaggtatacatgttcctggtgaaatggcaggacttgtc

SEQ ID NO: 17452 - RNA, 91 nt, synthetic construct
  source 1..91: mol_type = other RNA
acagcaaagcctctttggaggctgaatggggtcccccgactctggctttcccccaggtctacatgttcctggtgaaatggcaggacctgtc

SEQ ID NO: 17453 - RNA, 91 nt, synthetic construct
  source 1..91: mol_type = other RNA
acagcaaagcctctttggaggctgaatggggtcccccgactctggctttcccccaggtatacatgttcctggtgaaatggcaggatttatc

SEQ ID NO: 17454 - RNA, 91 nt, synthetic construct
  source 1..91: mol_type = other RNA
acagcaaagcctctttggaggctgaatggggtcccccgactctggctttcccccaggtctacatgttcctggtgaaatggcaggacttatc

SEQ ID NO: 17455 - RNA, 91 nt, synthetic construct
  source 1..91: mol_type = other RNA
acagcaaagcctctttggaggctgaatggggtcccccgactctggctttcccccaggtctacatgttcctggtgaaatggcaggacttgtc

SEQ ID NO: 17456 - RNA, 91 nt, synthetic construct
  source 1..91: mol_type = other RNA
acagcaaagcctctttggaggctgaatggggtcccccgactctggctttcccccaggtctacatgttcctggtgaaatggcaggatctgtc

SEQ ID NO: 17457 - RNA, 91 nt, synthetic construct
  source 1..91: mol_type = other RNA
acagcaaagcctctttggaggctgaatggggtcccccgactctggctttcccccaggtatacatgttcctggtgaaatggcaggatttgtc

SEQ ID NO: 17458 - RNA, 91 nt, synthetic construct
  source 1..91: mol_type = other RNA
acagcaaagcctctttggaggctgaatggggtcccccgactctggctttcccccaggtctacatgttcctggtgaaatggcaggatttatc

SEQ ID NO: 17459 - RNA, 91 nt, synthetic construct
  source 1..91: mol_type = other RNA
acagcaaagcctctttggaggctgaatggggtcccccgactctggctttcccccaggtgtacatgttcctggtgaaatggcaggatctgtc

SEQ ID NO: 17460 - RNA, 91 nt, synthetic construct
  source 1..91: mol_type = other RNA
acagcaaagcctctttggaggctgaatggggtcccccgactctggctttcccccaggtgtacatgttcctggtgaaatggcaggatttatc

SEQ ID NO: 17461 - RNA, 91 nt, synthetic construct
  source 1..91: mol_type = other RNA
acagcaaagcctctttggaggctgaatggggtcccccgactctggctttcccccaggtgtacatgttcctggtgaaatggcaggatttgtc

SEQ ID NO: 17462 - RNA, 91 nt, synthetic construct
  source 1..91: mol_type = other RNA
acagcaaagcctctttggaggctgaatggggtcccccgactctggctttcccccaggtgtacatgttcctggtgaaatggcaggacttatc

SEQ ID NO: 17463 - RNA, 91 nt, synthetic construct
  source 1..91: mol_type = other RNA
acagcaaagcctctttggaggctgaatggggtcccccgactctggctttcccccaggtgtacatgttcctggtgaaatggcaggacttgtc

SEQ ID NO: 17464 - RNA, 91 nt, synthetic construct
  source 1..91: mol_type = other RNA
acagcaaagcctctttggaggctgaatggggtcccccgactctggctttcccccaggtttacatgttcctggtgaaatggcaggatttgtc

SEQ ID NO: 17465 - RNA, 91 nt, synthetic construct
  source 1..91: mol_type = other RNA
acagcaaagcctctttggaggctgaatggggtcccccgactctggctttcccccaggtttacatgttcctggtgaaatggcaggatttatc

SEQ ID NO: 17466 - RNA, 91 nt, synthetic construct
  source 1..91: mol_type = other RNA
acagcaaagcctctttggaggctgaatggggtcccccgactctggctttcccccaggtttacatgttcctggtgaaatggcaggatctgtc

SEQ ID NO: 17467 - RNA, 91 nt, synthetic construct
  source 1..91: mol_type = other RNA
acagcaaagcctctttggaggctgaatggggtcccccgactctggctttcccccaggtttacatgttcctggtgaaatggcaggacttgtc

SEQ ID NO: 17468 - RNA, 91 nt, synthetic construct
  source 1..91: mol_type = other RNA
acagcaaagcctctttggaggctgaatggggtcccccgactctggctttcccccaggtttacatgttcctggtgaaatggcaggacttatc

SEQ ID NO: 17469 - RNA, 91 nt, synthetic construct
  source 1..91: mol_type = other RNA
acagcaaagcctctttggaggctgaatggggtcccccgactctggctttcccccaggtttacatgttcctggtgaaatggcaggacctgtc

SEQ ID NO: 17470 - RNA, 92 nt, synthetic construct
  source 1..92: mol_type = other RNA
cacagcaaagcctctttggaggctgaatggggtcccccgactctggctttcccccaggtatacatgttcctggtgaaatggcaggatttgtc

SEQ ID NO: 17471 - RNA, 92 nt, synthetic construct
  source 1..92: mol_type = other RNA
cacagcaaagcctctttggaggctgaatggggtcccccgactctggctttcccccaggtgtacatgttcctggtgaaatggcaggatctgtc

SEQ ID NO: 17472 - RNA, 92 nt, synthetic construct
  source 1..92: mol_type = other RNA
cacagcaaagcctctttggaggctgaatggggtcccccgactctggctttcccccaggtgtacatgttcctggtgaaatggcaggacttgtc

SEQ ID NO: 17473 - RNA, 92 nt, synthetic construct
  source 1..92: mol_type = other RNA
cacagcaaagcctctttggaggctgaatggggtcccccgactctggctttcccccaggtgtacatgttcctggtgaaatggcaggacttatc

SEQ ID NO: 17474 - RNA, 92 nt, synthetic construct
  source 1..92: mol_type = other RNA
cacagcaaagcctctttggaggctgaatggggtcccccgactctggctttcccccaggtgtacatgttcctggtgaaatggcaggacctgtc

SEQ ID NO: 17475 - RNA, 92 nt, synthetic construct
  source 1..92: mol_type = other RNA
cacagcaaagcctctttggaggctgaatggggtcccccgactctggctttcccccaggtctacatgttcctggtgaaatggcaggacctgtc

SEQ ID NO: 17476 - RNA, 92 nt, synthetic construct
  source 1..92: mol_type = other RNA
cacagcaaagcctctttggaggctgaatggggtcccccgactctggctttcccccaggtctacatgttcctggtgaaatggcaggatttatc

SEQ ID NO: 17477 - RNA, 92 nt, synthetic construct
  source 1..92: mol_type = other RNA
cacagcaaagcctctttggaggctgaatggggtcccccgactctggctttcccccaggtctacatgttcctggtgaaatggcaggatctgtc

SEQ ID NO: 17478 - RNA, 92 nt, synthetic construct
  source 1..92: mol_type = other RNA
cacagcaaagcctctttggaggctgaatggggtcccccgactctggctttcccccaggtctacatgttcctggtgaaatggcaggacttgtc

SEQ ID NO: 17479 - RNA, 92 nt, synthetic construct
  source 1..92: mol_type = other RNA
cacagcaaagcctctttggaggctgaatggggtcccccgactctggctttcccccaggtctacatgttcctggtgaaatggcaggatttgtc

SEQ ID NO: 17480 - RNA, 92 nt, synthetic construct
  source 1..92: mol_type = other RNA
cacagcaaagcctctttggaggctgaatggggtcccccgactctggctttcccccaggtgtacatgttcctggtgaaatggcaggatttgtc

SEQ ID NO: 17481 - RNA, 92 nt, synthetic construct
  source 1..92: mol_type = other RNA
cacagcaaagcctctttggaggctgaatggggtcccccgactctggctttcccccaggtgtacatgttcctggtgaaatggcaggatttatc

SEQ ID NO: 17482 - RNA, 92 nt, synthetic construct
  source 1..92: mol_type = other RNA
cacagcaaagcctctttggaggctgaatggggtcccccgactctggctttcccccaggtttacatgttcctggtgaaatggcaggacttatc

SEQ ID NO: 17483 - RNA, 92 nt, synthetic construct
  source 1..92: mol_type = other RNA
cacagcaaagcctctttggaggctgaatggggtcccccgactctggctttcccccaggtatacatgttcctggtgaaatggcaggatctgtc

SEQ ID NO: 17484 - RNA, 92 nt, synthetic construct
  source 1..92: mol_type = other RNA
cacagcaaagcctctttggaggctgaatggggtcccccgactctggctttcccccaggtctacatgttcctggtgaaatggcaggacttatc

SEQ ID NO: 17485 - RNA, 92 nt, synthetic construct
  source 1..92: mol_type = other RNA
cacagcaaagcctctttggaggctgaatggggtcccccgactctggctttcccccaggtttacatgttcctggtgaaatggcaggacttgtc

(The sequence listing continues in the following parts.)
